United States Patent Application Publication US 2007/0134655 A1 - sequence listing, part 12

SEQ ID NO: 443512 - RNA, 32 nt, Human
gcggcccagcacucggcacuggccacuugcag

SEQ ID NO: 443513 - RNA, 32 nt, Human
gcggcccagcagaggagcggaaagcauggucc

SEQ ID NO: 443514 - RNA, 22 nt, Human
gcggcccagcccggcccagccc

SEQ ID NO: 443515 - RNA, 32 nt, Human
gcggcccaggacggcggcuaggccguagugca

SEQ ID NO: 443516 - RNA, 32 nt, Human
gcggcccaggcggggugcgaguggcgcagucg

SEQ ID NO: 443517 - RNA, 32 nt, Human
gcggccccaaucccuguccucuccucuccugc

SEQ ID NO: 443518 - RNA, 23 nt, Human
gcggccccacccugcacuggucc

SEQ ID NO: 443519 - RNA, 20 nt, Human
gcggccccaccucaguccgg

SEQ ID NO: 443520 - RNA, 22 nt, Human
gcggccccaggacgcagcagca

SEQ ID NO: 443521 - RNA, 32 nt, Human
gcggccccauccugcugacgucaggccccagg

SEQ ID NO: 443522 - RNA, 18 nt, Human
gcggcccccaccagggca

SEQ ID NO: 443523 - RNA, 24 nt, Human
gcggcccccgaaggugggcguccc

SEQ ID NO: 443524 - RNA, 32 nt, Human
gcggcccccgcagccuagaccucccaggccug

SEQ ID NO: 443525 - RNA, 32 nt, Human
gcggcccccggaugaagagaucugggaacccg

SEQ ID NO: 443526 - RNA, 32 nt, Human
gcggcccccgucgcauacacacuggcacagac

SEQ ID NO: 443527 - RNA, 25 nt, Human
gcggcccccuccagcccccggcucc

SEQ ID NO: 443528 - RNA, 32 nt, Human
gcggcccccuccccucaccucucccccucccc

SEQ ID NO: 443529 - RNA, 32 nt, Human
gcggccccgagccucuuguugcuggacuauga

SEQ ID NO: 443530 - RNA, 32 nt, Human
gcggccccgagugcccugugaaaucagcucag

SEQ ID NO: 443531 - RNA, 32 nt, Human
gcggccccgcggggaggaagagggaaaaggaa

SEQ ID NO: 443532 - RNA, 32 nt, Human
gcggccccggagcggccgcagcgcgguggucu

SEQ ID NO: 443533 - RNA, 23 nt, Human
gcggccccggcuccagcccagcc

SEQ ID NO: 443534 - RNA, 32 nt, Human
gcggccccguggccaccaugucccugcacggc

SEQ ID NO: 443535 - RNA, 32 nt, Human
gcggccccugcaggagaagacagacugcugcu

SEQ ID NO: 443536 - RNA, 32 nt, Human
gcggccccugcagggugggggucuguggcaga

SEQ ID NO: 443537 - RNA, 32 nt, Human
gcggccccugcucuaccuccuagcgccggugc

SEQ ID NO: 443538 - RNA, 32 nt, Human
gcggcccgccccggggaggcaggcuggcaggu

SEQ ID NO: 443539 - RNA, 32 nt, Human
gcggcccgcuggcugcccuucccgccagcgca

SEQ ID NO: 443540 - RNA, 22 nt, Human
gcggcccggcccggcccagcuc

SEQ ID NO: 443541 - RNA, 32 nt, Human
gcggcccggccgccugcggcacugccuuccgu

SEQ ID NO: 443542 - RNA, 32 nt, Human
gcggcccggccuggaugcgcugggcggagggu

SEQ ID NO: 443543 - RNA, 32 nt, Human
gcggcccguguccccuuccuccauccuugcug

SEQ ID NO: 443544 - RNA, 32 nt, Human
gcggcccucucgcucucgcagcaacaagggaa

SEQ ID NO: 443545 - RNA, 32 nt, Human
gcggcccugacacgugauggaccaaagccacc

SEQ ID NO: 443546 - RNA, 25 nt, Human
gcggcccugcccucccgcccagccc

SEQ ID NO: 443547 - RNA, 32 nt, Human
gcggcccugccugggccuucggagccuccugc

SEQ ID NO: 443548 - RNA, 32 nt, Human
gcggcccugccuggugccauugccucagccaa

SEQ ID NO: 443549 - RNA, 32 nt, Human
gcggcccugcgcgggcuguccaggccuccgcc

SEQ ID NO: 443550 - RNA, 32 nt, Human
gcggcccuggaggauguuagacuugcucccuc

SEQ ID NO: 443551 - RNA, 32 nt, Human
gcggcccuggggauggggaaggagcaggagcu

SEQ ID NO: 443552 - RNA, 22 nt, Human
gcggccgagccagcggcggcgg

SEQ ID NO: 443553 - RNA, 32 nt, Human
gcggccgaggaggaggaggaggaggccccgga

SEQ ID NO: 443554 - RNA, 32 nt, Human
gcggccgagggggauggagcgagcgccgagcc

SEQ ID NO: 443555 - RNA, 32 nt, Human
gcggccgaugaggacgguucugagggaacuag

SEQ ID NO: 443556 - RNA, 19 nt, Human
gcggccgcaacgcaacgga

SEQ ID NO: 443557 - RNA, 19 nt, Human
gcggccgcagcaucucgga

SEQ ID NO: 443558 - RNA, 32 nt, Human
gcggccgcagugggguggagggggcagggcgu

SEQ ID NO: 443559 - RNA, 27 nt, Human
gcggccgccagcuaggggcgcgggaag

SEQ ID NO: 443560 - RNA, 32 nt, Human
gcggccgcccccagacccgcagugccaugcgc

SEQ ID NO: 443561 - RNA, 23 nt, Human
gcggccgccgccgccaccgccgc

SEQ ID NO: 443562 - RNA, 32 nt, Human
gcggccgccuucugcuggcuguguccaugcag

SEQ ID NO: 443563 - RNA, 18 nt, Human
gcggccgcgcggcagcug

SEQ ID NO: 443564 - RNA, 32 nt, Human
gcggccgcggaggaggaggaaggggaggaggg

SEQ ID NO: 443565 - RNA, 32 nt, Human
gcggccgcggccacagucaugcucagucgacu

SEQ ID NO: 443566 - RNA, 32 nt, Human
gcggccgcggcuccuguccagacccugacccu

SEQ ID NO: 443567 - RNA, 32 nt, Human
gcggccgcgugcagaggugcaggcagagcagc

SEQ ID NO: 443568 - RNA, 32 nt, Human
gcggccgcguggggcccagcacaaagaccugu

SEQ ID NO: 443569 - RNA, 32 nt, Human
gcggccgcugaauucuagaacccaggugcaac

SEQ ID NO: 443570 - RNA, 32 nt, Human
gcggccgcugaauucuagggaggcgcgccccc

SEQ ID NO: 443571 - RNA, 32 nt, Human
gcggccgcugccugccgggcccucucuucugg

SEQ ID NO: 443572 - RNA, 22 nt, Human
gcggccgcuggcccuggccccg

SEQ ID NO: 443573 - RNA, 32 nt, Human
gcggccggcacuguagauuaacaggaaacuuc

SEQ ID NO: 443574 - RNA, 32 nt, Human
gcggccggcugcaggucggccaggagcuccug

SEQ ID NO: 443575 - RNA, 19 nt, Human
gcggccgggacccccgucc

SEQ ID NO: 443576 - RNA, 32 nt, Human
gcggccgggaggauggccugggcugcgggugg

SEQ ID NO: 443577 - RNA, 32 nt, Human
gcggccggggcugaagggagaggcgcaggagc

SEQ ID NO: 443578 - RNA, 25 nt, Human
gcggccggucggcccggcccagccc

SEQ ID NO: 443579 - RNA, 32 nt, Human
gcggccguggagcccaggcuuugaugucuuuc

SEQ ID NO: 443580 - RNA, 22 nt, Human
gcggccguugcgggcggcgcgg

SEQ ID NO: 443581 - RNA, 32 nt, Human
gcggccucagagagcuuccuccccucggaagg

SEQ ID NO: 443582 - RNA, 32 nt, Human
gcggccucagaugaaugcggcuguuaagaccu

SEQ ID NO: 443583 - RNA, 32 nt, Human
gcggccucaguugaguagugcauuccugaguu

SEQ ID NO: 443584 - RNA, 32 nt, Human
gcggccucccaaagugcugggaucacaggcgc

SEQ ID NO: 443585 - RNA, 21 nt, Human
gcggccuccgcccuggucccg

SEQ ID NO: 443586 - RNA, 32 nt, Human
gcggccuccggaagugcugggauuacaggcgu

SEQ ID NO: 443587 - RNA, 32 nt, Human
gcggccuccugccaccaccaggcucccuaacc

SEQ ID NO: 443588 - RNA, 20 nt, Human
gcggccucggaccccggacc

SEQ ID NO: 443589 - RNA, 32 nt, Human
gcggccucucuaggaagcuguuccuuucuaug

SEQ ID NO: 443590 - RNA, 32 nt, Human
gcggccucugcaggaucugcagcuguggaagg

SEQ ID NO: 443591 - RNA, 32 nt, Human
gcggccucuugugugagggccugugggauucu

SEQ ID NO: 443592 - RNA, 19 nt, Human
gcggccugagcgcccggcc

SEQ ID NO: 443593 - RNA, 32 nt, Human
gcggccugccaccacagcacgcggccuccuga

SEQ ID NO: 443594 - RNA, 19 nt, Human
gcggccuggcaggcaacca

SEQ ID NO: 443595 - RNA, 32 nt, Human
gcggccuggggcugagcauggagcagcgcggc

SEQ ID NO: 443596 - RNA, 32 nt, Human
gcggccuucacucagggucagcgggcaccagg

SEQ ID NO: 443597 - RNA, 32 nt, Human
gcggccuucccaggccccgcuuuugcuuucgg

SEQ ID NO: 443598 - RNA, 32 nt, Human
gcggccuucccaggccccgcuuuugcuuuugg

SEQ ID NO: 443599 - RNA, 32 nt, Human
gcggccuucuuuccuuucugucaaccucucau

SEQ ID NO: 443600 - RNA, 32 nt, Human
gcggccuugccacauauucuggcuccaggcuc

SEQ ID NO: 443601 - RNA, 32 nt, Human
gcggccuuuagaaugaacaugacaucaccuug

SEQ ID NO: 443602 - RNA, 32 nt, Human
gcggccuuucaccucuuccuugauuacucaca

SEQ ID NO: 443603 - RNA, 32 nt, Human
gcggccuuucccgaauggggacagaacccgcu

SEQ ID NO: 443604 - RNA, 24 nt, Human
gcggccuuugcccgaccuuccaca

SEQ ID NO: 443605 - RNA, 32 nt, Human
gcggcgaaacaacaugugucuucuggaacuuc

SEQ ID NO: 443606 - RNA, 32 nt, Human
gcggcgaaaccagccuugucauuucagcauuc

SEQ ID NO: 443607 - RNA, 32 nt, Human
gcggcgaaggaggugguggcugcguugggcuc

SEQ ID NO: 443608 - RNA, 32 nt, Human
gcggcgacaugaaacugcuuacccacaaucug

SEQ ID NO: 443609 - RNA, 32 nt, Human
gcggcgacugggaggggcagcggcagcagugg

SEQ ID NO: 443610 - RNA, 32 nt, Human
gcggcgagagguggccugggaauggccgggcc

SEQ ID NO: 443611 - RNA, 32 nt, Human
gcggcgaggagaaaggaaggagaggagaaaac

SEQ ID NO: 443612 - RNA, 32 nt, Human
gcggcgaggccgcggcgacaagguagccaccc

SEQ ID NO: 443613 - RNA, 32 nt, Human
gcggcgaugaggugguccugaggcagaagccc

SEQ ID NO: 443614 - RNA, 22 nt, Human
gcggcgaugaucuguuugugcg

SEQ ID NO: 443615 - RNA, 31 nt, Human
gcggcgauggagcggaggucgcggaggaagu

SEQ ID NO: 443616 - RNA, 32 nt, Human
gcggcgcacacguguaaucccagcuacucagg

SEQ ID NO: 443617 - RNA, 19 nt, Human
gcggcgcagccccccggcc

SEQ ID NO: 443618 - RNA, 32 nt, Human
gcggcgcagcugcucccgcugccacagccgcc

SEQ ID NO: 443619 - RNA, 32 nt, Human
gcggcgccaagcugagccccuucgcacccgag

SEQ ID NO: 443620 - RNA, 18 nt, Human
gcggcgccagucggugcg

SEQ ID NO: 443621 - RNA, 32 nt, Human
gcggcgccaugcaggucuccagccucaaugag

SEQ ID NO: 443622 - RNA, 32 nt, Human
gcggcgcccgggagcaggugugcaggagcgca

SEQ ID NO: 443623 - RNA, 32 nt, Human
gcggcgcccgggagccgagcuugcagcgaggg

SEQ ID NO: 443624 - RNA, 32 nt, Human
gcggcgcccgggagccggagccuucgcggcgu

SEQ ID NO: 443625 - RNA, 32 nt, Human
gcggcgcccucgggagggagcugcgcgcgggc

SEQ ID NO: 443626 - RNA, 32 nt, Human
gcggcgccgcgcacuccaacccggcgggcacc

SEQ ID NO: 443627 - RNA, 32 nt, Human
gcggcgccggcuccugccgccugggccccggg

SEQ ID NO: 443628 - RNA, 18 nt, Human
gcggcgccuguaauccca

SEQ ID NO: 443629 - RNA, 28 nt, Human
gcggcgccuguaaucccagcuacuuggg

SEQ ID NO: 443630 - RNA, 32 nt, Human
gcggcgccuguaggcuggagggacugugaggu

SEQ ID NO: 443631 - RNA, 19 nt, Human
gcggcgcgaagcccgggug

SEQ ID NO: 443632 - RNA, 32 nt, Human
gcggcgcgaggggcgggcuuucaggcucccgg

SEQ ID NO: 443633 - RNA, 32 nt, Human
gcggcgcgcacaggcaggagguugcaguuggg

SEQ ID NO: 443634 - RNA, 18 nt, Human
gcggcgcgcgcugugcuc

SEQ ID NO: 443635 - RNA, 32 nt, Human
gcggcgcggacagcugagcuucuccuccgucg

SEQ ID NO: 443636 - RNA, 32 nt, Human
gcggcgcggagagacgcagcggagguuuuccu

SEQ ID NO: 443637 - RNA, 32 nt, Human
gcggcgcggcgccggcggcgggugcgcuccga

SEQ ID NO: 443638 - RNA, 32 nt, Human
gcggcgcggcgggaccauggagcucagagcgc

SEQ ID NO: 443639 - RNA, 32 nt, Human
gcggcgcggcggggaagagagacugcggcggg

SEQ ID NO: 443640 - RNA, 32 nt, Human
gcggcgcgggaggcacguuccuuagcuccgcc

SEQ ID NO: 443641 - RNA, 32 nt, Human
gcggcgcggguuccugccucucugggugggug

SEQ ID NO: 443642 - RNA, 32 nt, Human
gcggcgcgugcgucugugccucugcgcggguc

SEQ ID NO: 443643 - RNA, 32 nt, Human
gcggcgcucgguuucccgccuccuagggaagg

SEQ ID NO: 443644 - RNA, 32 nt, Human
gcggcgcucucagaccgagagcugcccuugcc

SEQ ID NO: 443645 - RNA, 32 nt, Human
gcggcgcugacauuggacaggugguggacgag

SEQ ID NO: 443646 - RNA, 32 nt, Human
gcggcgcugcacucuagccugggugacagagu

SEQ ID NO: 443647 - RNA, 32 nt, Human
gcggcgcugccgcggcagcggcgggccccuca

SEQ ID NO: 443648 - RNA, 32 nt, Human
gcggcgcugcgcucggccaggccggcaccaug

SEQ ID NO: 443649 - RNA, 32 nt, Human
gcggcgcugggaaaggaggagauugggaggcu

SEQ ID NO: 443650 - RNA, 32 nt, Human
gcggcgcuggggccagaggggccaggcgggag

SEQ ID NO: 443651 - RNA, 32 nt, Human
gcggcgcuuugugcuccagucgcuccuaacgc

SEQ ID NO: 443652 - RNA, 32 nt, Human
gcggcggaaccucccuccccagcucugagcac

SEQ ID NO: 443653 - RNA, 32 nt, Human
gcggcggacgcgcggcucccaccccuccccuc

SEQ ID NO: 443654 - RNA, 32 nt, Human
gcggcggagaggacgagaccgggacaagacca

SEQ ID NO: 443655 - RNA, 32 nt, Human
gcggcggagaggggacugcggucagcugcguc

SEQ ID NO: 443656 - RNA, 32 nt, Human
gcggcggagaggggcccacggcggcggcccgg

SEQ ID NO: 443657 - RNA, 32 nt, Human
gcggcggagauggaggagggaggccgggacaa

SEQ ID NO: 443658 - RNA, 32 nt, Human
gcggcggagcgagcgcgcuccgggagggccga

SEQ ID NO: 443659 - RNA, 32 nt, Human
gcggcggagcugggaccuaccugccugagucc

SEQ ID NO: 443660 - RNA, 32 nt, Human
gcggcggaggaggaggaggagcgggaggagcg

SEQ ID NO: 443661 - RNA, 32 nt, Human
gcggcggaggcagaggaagagggagcgggagc

SEQ ID NO: 443662 - RNA, 32 nt, Human
gcggcggagggcggaggagacucgcuugcacc

SEQ ID NO: 443663 - RNA, 32 nt, Human
gcggcggaggggcauugcacuuccgggaaguc

SEQ ID NO: 443664 - RNA, 32 nt, Human
gcggcggaucuccuccuccuuuccagcaguga

SEQ ID NO: 443665 - RNA, 32 nt, Human
gcggcggcaagggacagcaggagcaguggugc

SEQ ID NO: 443666 - RNA, 32 nt, Human
gcggcggcagaggcucccuacacaaaagcauu

SEQ ID NO: 443667 - RNA, 32 nt, Human
gcggcggcagccugccuugcucugccaggaac

SEQ ID NO: 443668 - RNA, 32 nt, Human
gcggcggcaggagagguuguggugcuaguuuc

SEQ ID NO: 443669 - RNA, 32 nt, Human
gcggcggcagggcggggccggagcagcgggcg

SEQ ID NO: 443670 - RNA, 32 nt, Human
gcggcggcaguggcggucccacuggcaggcgg

SEQ ID NO: 443671 - RNA, 32 nt, Human
gcggcggccagaggaaccccgagucccggccc

SEQ ID NO: 443672 - RNA, 19 nt, Human
gcggcggccagcggcgcgg

SEQ ID NO: 443673 - RNA, 32 nt, Human
gcggcggccagggaggugcggagcagccucgg

SEQ ID NO: 443674 - RNA, 20 nt, Human
gcggcggcccagcgaaggag

SEQ ID NO: 443675 - RNA, 17 nt, Human
gcggcggccgcgaggag

SEQ ID NO: 443676 - RNA, 32 nt, Human
gcggcggccgcuccucuaguuccacaaugucc

SEQ ID NO: 443677 - RNA, 32 nt, Human
gcggcggcgcuuggcagccaggagcucugcau

SEQ ID NO: 443678 - RNA, 27 nt, Human
gcggcggcggaggcgcccggucccggc

SEQ ID NO: 443679 - RNA, 32 nt, Human
gcggcggcggcgcaggcucagagcagaccccg

SEQ ID NO: 443680 - RNA, 18 nt, Human
gcggcggcggcggcgcgg

SEQ ID NO: 443681 - RNA, 32 nt, Human
gcggcggcggcggucgaggagcucccauggca

SEQ ID NO: 443682 - RNA, 32 nt, Human
gcggcggcgggcaguugcaguggugcagaaug

SEQ ID NO: 443683 - RNA, 32 nt, Human
gcggcggcgggcggaggcugggccggaggggu

SEQ ID NO: 443684 - RNA, 32 nt, Human
gcggcggcgggugggaaauggcggaguaucug

SEQ ID NO: 443685 - RNA, 32 nt, Human
gcggcggcggugagaagagcgaggcggaggag

SEQ ID NO: 443686 - RNA, 32 nt, Human
gcggcggcgguuccagcaugaagaggagagcu

SEQ ID NO: 443687 - RNA, 21 nt, Human
gcggcggcgucggccggaucg

SEQ ID NO: 443688 - RNA, 22 nt, Human
gcggcggcucaugccuguaauc

SEQ ID NO: 443689 - RNA, 32 nt, Human
gcggcggcucgggagagagggacgcgggcugc

SEQ ID NO: 443690 - RNA, 32 nt, Human
gcggcggcugacucgccuucucuccggggcug

SEQ ID NO: 443691 - RNA, 20 nt, Human
gcggcggcugccagucugug

SEQ ID NO: 443692 - RNA, 32 nt, Human
gcggcggcugcccuccucacacucggcuccgc

SEQ ID NO: 443693 - RNA, 32 nt, Human
gcggcggcugcggcucgggagcgcggcugcuu

SEQ ID NO: 443694 - RNA, 32 nt, Human
gcggcggcugcggcuucucugggcgccugggc

SEQ ID NO: 443695 - RNA, 32 nt, Human
gcggcggcugggaacgccgcuccccgacgcac

SEQ ID NO: 443696 - RNA, 32 nt, Human
gcggcgggacagugccagugggcguguggggc

SEQ ID NO: 443697 - RNA, 32 nt, Human
gcggcgggagagagcccugagaccagugcacc

SEQ ID NO: 443698 - RNA, 32 nt, Human
gcggcgggagagaggaggaggcggcggcgggg

SEQ ID NO: 443699 - RNA, 32 nt, Human
gcggcgggagcagcauggauuggggcacugag

SEQ ID NO: 443700 - RNA, 32 nt, Human
gcggcgggagcugcugccugcccaggcccgcc

SEQ ID NO: 443701 - RNA, 32 nt, Human
gcggcgggaggaagaacgcuucccaaccagcc

SEQ ID NO: 443702 - RNA, 20 nt, Human
gcggcgggaggcgggcgcgg

SEQ ID NO: 443703 - RNA, 32 nt, Human
gcggcgggagguaaggcauggccaggccggcu

SEQ ID NO: 443704 - RNA, 32 nt, Human
gcggcgggcaggcggcgggcgcggcgggcgag

SEQ ID NO: 443705 - RNA, 22 nt, Human
gcggcgggccccagucugagcg

SEQ ID NO: 443706 - RNA, 21 nt, Human
gcggcgggccgccuuugccca

SEQ ID NO: 443707 - RNA, 32 nt, Human
gcggcgggcugcuccugucacccagcggcggc

SEQ ID NO: 443708 - RNA, 32 nt, Human
gcggcggggaaggaggaggagggggagagucg

SEQ ID NO: 443709 - RNA, 32 nt, Human
gcggcggggaggcagcaggcgcgggagcgggc

SEQ ID NO: 443710 - RNA, 32 nt, Human
gcggcggggagugggagccggcccggcucagu

SEQ ID NO: 443711 - RNA, 32 nt, Human
gcggcggggccagaggcucagcggcucccagg

SEQ ID NO: 443712 - RNA, 32 nt, Human
gcggcgggggaaggaugcaggggaagaagccg

SEQ ID NO: 443713 - RNA, 20 nt, Human
gcggcgggggcacccggcgu

SEQ ID NO: 443714 - RNA, 32 nt, Human
gcggcggggucgcgggacaggagaagcggagg

SEQ ID NO: 443715 - RNA, 22 nt, Human
gcggcggggucggguccgcgcg

SEQ ID NO: 443716 - RNA, 32 nt, Human
gcggcggggucugagcccaagucggaagccgc

SEQ ID NO: 443717 - RNA, 32 nt, Human
gcggcggugcgugcuggcgccggagaguuccg

SEQ ID NO: 443718 - RNA, 32 nt, Human
gcggcggugcuaggcucgccucugccucccuc

SEQ ID NO: 443719 - RNA, 32 nt, Human
gcggcggugcuggagguugcggcggcggcugc

SEQ ID NO: 443720 - RNA, 32 nt, Human
gcggcgguggacugcgcuggacgauagcuugg

SEQ ID NO: 443721 - RNA, 32 nt, Human
gcggcguagggaggccggggccggggcugagg

SEQ ID NO: 443722 - RNA, 32 nt, Human
gcggcgucagccacacugaugguggggcucac

SEQ ID NO: 443723 - RNA, 32 nt, Human
gcggcguccgggaggcggcggagacgcggggc

SEQ ID NO: 443724 - RNA, 32 nt, Human
gcggcgucgggagcguucugcccagccggccc

SEQ ID NO: 443725 - RNA, 32 nt, Human
gcggcgucucgaggcgaguuggcggagcugug

SEQ ID NO: 443726 - RNA, 32 nt, Human
gcggcgucugcagcucgcuucaagauggccgc

SEQ ID NO: 443727 - RNA, 22 nt, Human
gcggcgugacguuggcugugcg

SEQ ID NO: 443728 - RNA, 32 nt, Human
gcggcgugaguugcauguugugugaggauccc

SEQ ID NO: 443729 - RNA, 19 nt, Human
gcggcgugaugcgcgcgga

SEQ ID NO: 443730 - RNA, 20 nt, Human
gcggcguggcguccgcucug

SEQ ID NO: 443731 - RNA, 32 nt, Human
gcggcgugggaggcugggccgcagugaguggg

SEQ ID NO: 443732 - RNA, 21 nt, Human
gcggcgugggcccgucgcgcg

SEQ ID NO: 443733 - RNA, 32 nt, Human
gcggcguuggccagggcagccgcggcgggcag

SEQ ID NO: 443734 - RNA, 32 nt, Human
gcggcuacauggugacuccaguacggggacau

SEQ ID NO: 443735 - RNA, 32 nt, Human
gcggcuacgggagaagucuuaguagcuuguau

SEQ ID NO: 443736 - RNA, 32 nt, Human
gcggcuacuuuaaaaugcuucuuucucagaau

SEQ ID NO: 443737 - RNA, 32 nt, Human
gcggcuagacgccgaguccgacuugcagcugg

SEQ ID NO: 443738 - RNA, 32 nt, Human
gcggcuagagcaucaccucuucacgcaagugu

SEQ ID NO: 443739 - RNA, 32 nt, Human
gcggcuagcagggagaggggcggagaggcagc

SEQ ID NO: 443740 - RNA, 32 nt, Human
gcggcuaguuuuucuuucuguuuccaggugaa

SEQ ID NO: 443741 - RNA, 32 nt, Human
gcggcuauaggaaaacagccuguugcauggua

SEQ ID NO: 443742 - RNA, 18 nt, Human
gcggcucacagcgagggg

SEQ ID NO: 443743 - RNA, 32 nt, Human
gcggcucacccaggccugccauggguccuuag

SEQ ID NO: 443744 - RNA, 32 nt, Human
gcggcucacuacaaccucugccucaagcgauc

SEQ ID NO: 443745 - RNA, 19 nt, Human
gcggcucacuccuguaauc

SEQ ID NO: 443746 - RNA, 32 nt, Human
gcggcucacugcaaccuccaccucccagguuc

SEQ ID NO: 443747 - RNA, 32 nt, Human
gcggcucacugcaaccuccaccucccgggcuc

SEQ ID NO: 443748 - RNA, 32 nt, Human
gcggcucacugcaaccuggaacuccugggcuc

SEQ ID NO: 443749 - RNA, 32 nt, Human
gcggcucacugcagccuccauccucuggguuc

SEQ ID NO: 443750 - RNA, 32 nt, Human
gcggcucagccaugagcaacaggaguagcuuu

SEQ ID NO: 443751 - RNA, 32 nt, Human
gcggcucaggggaaacgaggcugcaguggugg

SEQ ID NO: 443752 - RNA, 32 nt, Human
gcggcucaguucagcagagcuggaguugaaca

SEQ ID NO: 443753 - RNA, 23 nt, Human
gcggcuccacccgacccagaccc

SEQ ID NO: 443754 - RNA, 24 nt, Human
gcggcuccacuacagacccagccc

SEQ ID NO: 443755 - RNA, 32 nt, Human
gcggcuccagggccauggcggaggagcagggc

SEQ ID NO: 443756 - RNA, 32 nt, Human
gcggcuccaggugggaggaaggcgggcgaagg

SEQ ID NO: 443757 - RNA, 24 nt, Human
gcggcucccagcucugccaggccc

SEQ ID NO: 443758 - RNA, 22 nt, Human
gcggcucccagggccuccagcc

SEQ ID NO: 443759 - RNA, 23 nt, Human
gcggcucccagggccucccgccc

SEQ ID NO: 443760 - RNA, 32 nt, Human
gcggcucccccuccucuuacuccgcguccucu

SEQ ID NO: 443761 - RNA, 22 nt, Human
gcggcucccgaggguccaggcc

SEQ ID NO: 443762 - RNA, 22 nt, Human
gcggcucccggggcccagcacc

SEQ ID NO: 443763 - RNA, 23 nt, Human
gcggcucccgggguccccagcuc

SEQ ID NO: 443764 - RNA, 23 nt, Human
gcggcucccgggugucccaggcc

SEQ ID NO: 443765 - RNA, 22 nt, Human
gcggcucccgguaucccgaccc

SEQ ID NO: 443766 - RNA, 32 nt, Human
gcggcucccucaccugccggcuuguuccucgg

SEQ ID NO: 443767 - RNA, 20 nt, Human
gcggcucccucccugcgcag

SEQ ID NO: 443768 - RNA, 32 nt, Human
gcggcucccuuucagcagcugcgggagcaugc

SEQ ID NO: 443769 - RNA, 32 nt, Human
gcggcuccggccagggccgggccgggggccgg

SEQ ID NO: 443770 - RNA, 32 nt, Human
gcggcuccuaucucuuggugauccccuucccc

SEQ ID NO: 443771 - RNA, 32 nt, Human
gcggcuccugcaggaggccacugucugcagcu

SEQ ID NO: 443772 - RNA, 32 nt, Human
gcggcuccugcucuuccuggacuccugagcag

SEQ ID NO: 443773 - RNA, 32 nt, Human
gcggcuccuuagggcagaacagcugcaugugg

SEQ ID NO: 443774 - RNA, 32 nt, Human
gcggcucggugacuugauacuuggggcagccc

SEQ ID NO: 443775 - RNA, 32 nt, Human
gcggcucgguggucgagccagggaggaggcgg

SEQ ID NO: 443776 - RNA, 19 nt, Human
gcggcucucgccuguaauc

SEQ ID NO: 443777 - RNA, 32 nt, Human
gcggcucugaagccugagcgggggccgggggc

SEQ ID NO: 443778 - RNA, 32 nt, Human
gcggcucugccgcggcggcagcauggguggcc

SEQ ID NO: 443779 - RNA, 32 nt, Human
gcggcucuggacugcagccucccaaggcucca

SEQ ID NO: 443780 - RNA, 22 nt, Human
gcggcucuggagccgcccggcc

SEQ ID NO: 443781 - RNA, 32 nt, Human
gcggcucugguuccuccagccaccucaguccc

SEQ ID NO: 443782 - RNA, 32 nt, Human
gcggcucuuccuggacagugagagcagggcug

SEQ ID NO: 443783 - RNA, 32 nt, Human
gcggcucuuccuggacagugagagcagggcuu

SEQ ID NO: 443784 - RNA, 19 nt, Human
gcggcucuugccuguaauc

SEQ ID NO: 443785 - RNA, 32 nt, Human
gcggcugaaggaggggcugagccucaggaccc

SEQ ID NO: 443786 - RNA, 32 nt, Human
gcggcugacacacacguucaagcccaggacug

SEQ ID NO: 443787 - RNA, 32 nt, Human
gcggcugagaguggagccuuucaggcuggcau

SEQ ID NO: 443788 - RNA, 21 nt, Human
gcggcugaggaaagcaggagg

SEQ ID NO: 443789 - RNA, 32 nt, Human
gcggcugaggacggggcagagcugagucggcu

SEQ ID NO: 443790 - RNA, 32 nt, Human
gcggcugaggaggcgggaaggcggcagugguu

SEQ ID NO: 443791 - RNA, 32 nt, Human
gcggcugagguggguguaucaccugaaguccg

SEQ ID NO: 443792 - RNA, 32 nt, Human
gcggcugauauccugaucuugccccuccagag

SEQ ID NO: 443793 - RNA, 32 nt, Human
gcggcugcaagaggaggccggaggcgagcgcg

SEQ ID NO: 443794 - RNA, 32 nt, Human
gcggcugcacccugccccauccugccgggauc

SEQ ID NO: 443795 - RNA, 32 nt, Human
gcggcugcagaggcagugcccgcagacaaugg

SEQ ID NO: 443796 - RNA, 32 nt, Human
gcggcugcagccgccgccgccgggaaggagag

SEQ ID NO: 443797 - RNA, 19 nt, Human
gcggcugcagcgcgggcgg

SEQ ID NO: 443798 - RNA, 19 nt, Human
gcggcugcagcugccgcgg

SEQ ID NO: 443799 - RNA, 32 nt, Human
gcggcugcagugaacaagaucgcgccacugca

SEQ ID NO: 443800 - RNA, 32 nt, Human
gcggcugcagugagcugugauugcaccacugc

SEQ ID NO: 443801 - RNA, 32 nt, Human
gcggcugcauuuucagugcccugcaggaaugg

SEQ ID NO: 443802 - RNA, 32 nt, Human
gcggcugccagccugccccacuggugugugcc

SEQ ID NO: 443803 - RNA, 32 nt, Human
gcggcugccccagcuacgcugggaggaggccg

SEQ ID NO: 443804 - RNA, 19 nt, Human
gcggcugccgccgcagcgu

SEQ ID NO: 443805 - RNA, 18 nt, Human
gcggcugccgcucggcgc

SEQ ID NO: 443806 - RNA, 23 nt, Human
gcggcugccgggacucggcgcgg

SEQ ID NO: 443807 - RNA, 32 nt, Human
gcggcugccugggcuggggcucgcuccagggc

SEQ ID NO: 443808 - RNA, 32 nt, Human
gcggcugcgagaggagggcgggcgggaggcua

SEQ ID NO: 443809 - RNA, 32 nt, Human
gcggcugcgaguggagaaccagcagcugagca

SEQ ID NO: 443810 - RNA, 32 nt, Human
gcggcugcggcggcggagcuccuccgaggucc

SEQ ID NO: 443811 - RNA, 32 nt, Human
gcggcugcggcuccugcaccuccccggggagc

SEQ ID NO: 443812 - RNA, 32 nt, Human
gcggcugcgggguuccuggugcugaggacgga

SEQ ID NO: 443813 - RNA, 32 nt, Human
gcggcugcgugagacuccggcuccaggcguuc

SEQ ID NO: 443814 - RNA, 32 nt, Human
gcggcugcugcccucccucuucugccuccccu

SEQ ID NO: 443815 - RNA, 32 nt, Human
gcggcuggaagagagugugguguguggacggg

SEQ ID NO: 443816 - RNA, 32 nt, Human
gcggcuggacaagggcugcaagcacaacagcu

SEQ ID NO: 443817 - RNA, 32 nt, Human
gcggcuggagaaagaugcaguccucaggaagg

SEQ ID NO: 443818 - RNA, 32 nt, Human
gcggcuggagcagcaagggagucagggccagg

SEQ ID NO: 443819 - RNA, 32 nt, Human
gcggcuggaggcggaggcaacggcggcuggag

SEQ ID NO: 443820 - RNA, 32 nt, Human
gcggcuggaucugucuuugacuuacauggggc

SEQ ID NO: 443821 - RNA, 32 nt, Human
gcggcuggcaggcaggauguuuugaaauggug

SEQ ID NO: 443822 - RNA, 32 nt, Human
gcggcuggccuuggugacagaugcagacagug

SEQ ID NO: 443823 - RNA, 32 nt, Human
gcggcuggcgaagaaggaaagaggguacucuc

SEQ ID NO: 443824 - RNA, 32 nt, Human
gcggcugggaccccguuucauccauccaugcu

SEQ ID NO: 443825 - RNA, 32 nt, Human
gcggcugggagagguugugccacccgggacca

SEQ ID NO: 443826 - RNA, 32 nt, Human
gcggcugggcagggcggcguggggcuucgcug

SEQ ID NO: 443827 - RNA, 32 nt, Human
gcggcugggcuggaggucaaggaugcauucca

SEQ ID NO: 443828 - RNA, 19 nt, Human
gcggcuggggcccgcgcgg

SEQ ID NO: 443829 - RNA, 32 nt, Human
gcggcuggucugcgcuccugugcauugccuug

SEQ ID NO: 443830 - RNA, 32 nt, Human
gcggcugguggaggcgggccauaggcaaugag

SEQ ID NO: 443831 - RNA, 32 nt, Human
gcggcuggugucugagcugauugccugugaac

SEQ ID NO: 443832 - RNA, 32 nt, Human
gcggcugugauccaggcuggggcgagaccaug

SEQ ID NO: 443833 - RNA, 32 nt, Human
gcggcuguucuaccccucccccuccccgcggu

SEQ ID NO: 443834 - RNA, 32 nt, Human
gcggcuucagaucuccaaucccugccaccacc

SEQ ID NO: 443835 - RNA, 32 nt, Human
gcggcuucagcacugcagccacgacccgccug

SEQ ID NO: 443836 - RNA, 32 nt, Human
gcggcuucagggagcacagggugcaggagcgg

SEQ ID NO: 443837 - RNA, 28 nt, Human
gcggcuuccggugcugccugcgucaucu

SEQ ID NO: 443838 - RNA, 32 nt, Human
gcggcuucucagagcacaacagcuccagcugg

SEQ ID NO: 443839 - RNA, 32 nt, Human
gcggcuucucugagaaacccuaucgaagggga

SEQ ID NO: 443840 - RNA, 32 nt, Human
gcggcuucuggcuucucuguggagcuugguuc

SEQ ID NO: 443841 - RNA, 32 nt, Human
gcggcuucuuucuuuccgugccgauagcgcuc

SEQ ID NO: 443842 - RNA, 32 nt, Human
gcggcuugguucaccuggaggcuggugugggg

SEQ ID NO: 443843 - RNA, 32 nt, Human
gcggcuugucccaggcugcugggcuguggucu

SEQ ID NO: 443844 - RNA, 32 nt, Human
gcggcuuuaucauuccuuuccaguucauaaac

SEQ ID NO: 443845 - RNA, 18 nt, Human
gcggcuuugugcaggcgg

SEQ ID NO: 443846 - RNA, 32 nt, Human
gcggcuuuuggcggccuuucugcuccucgcgg

SEQ ID NO: 443847 - RNA, 32 nt, Human
gcgggaaacugaagccauuacucuccaaaccc

SEQ ID NO: 443848 - RNA, 20 nt, Human
gcgggaaagaagccagcaga

SEQ ID NO: 443849 - RNA, 32 nt, Human
gcgggaaccagcacaaaguguuggcaucgccc

SEQ ID NO: 443850 - RNA, 32 nt, Human
gcgggaacccaggaggcagagguugcagugag

SEQ ID NO: 443851 - RNA, 32 nt, Human
gcgggaaccuggucccagcuugaguuccugcc

SEQ ID NO: 443852 - RNA, 19 nt, Human
gcgggaacggggcggggug

SEQ ID NO: 443853 - RNA, 32 nt, Human
gcgggaacucagcuucaaccucgaugucuuca

SEQ ID NO: 443854 - RNA, 32 nt, Human
gcgggaacucaggaaaaugaaggaggcuggcg

SEQ ID NO: 443855 - RNA, 32 nt, Human
gcgggaacugaggcacagagggguuaaguaac

SEQ ID NO: 443856 - RNA, 32 nt, Human
gcgggaagagcagggagaggagguggacucau

SEQ ID NO: 443857 - RNA, 32 nt, Human
gcgggaagagggcucggagcugccuuccugcu

SEQ ID NO: 443858 - RNA, 32 nt, Human
gcgggaagcagggacaguggagagggcgcugc

SEQ ID NO: 443859 - RNA, 32 nt, Human
gcgggaagcaggugcccaggagagaggggaua

SEQ ID NO: 443860 - RNA, 32 nt, Human
gcgggaagcgaagaggcgggcgggccagcgag

SEQ ID NO: 443861 - RNA, 32 nt, Human
gcgggaaggaaaaugagugagucuuugguugu

SEQ ID NO: 443862 - RNA, 32 nt, Human
gcgggaaggacuuccucuuuacacccacagag

SEQ ID NO: 443863 - RNA, 32 nt, Human
gcgggaaggcggggcucggaugcaaucgggac

SEQ ID NO: 443864 - RNA, 32 nt, Human
gcgggaaggcugucccggcgccucaggcagcu

SEQ ID NO: 443865 - RNA, 32 nt, Human
gcgggaagugauucuagugagguggagagaga

SEQ ID NO: 443866 - RNA, 32 nt, Human
gcgggacagccaagcaccuccaaccaaauaag

SEQ ID NO: 443867 - RNA, 32 nt, Human
gcgggacagcgacauggccggccacacgcagc

SEQ ID NO: 443868 - RNA, 32 nt, Human
gcgggacaguuauguuuccuugccccgucgca

SEQ ID NO: 443869 - RNA, 32 nt, Human
gcgggacaugcacacaaugugaaacagacaaa

SEQ ID NO: 443870 - RNA, 32 nt, Human
gcgggaccagagggagggaggcugcggacgag

SEQ ID NO: 443871 - RNA, 32 nt, Human
gcgggaccaggaggaggaggaggaggaggagg

SEQ ID NO: 443872 - RNA, 32 nt, Human
gcgggaccccuccacuuauugcggaaugagcc

SEQ ID NO: 443873 - RNA, 32 nt, Human
gcgggacccgagacggaggcgcggggccgggg

SEQ ID NO: 443874 - RNA, 23 nt, Human
gcgggacccgccagcuucagcga

SEQ ID NO: 443875 - RNA, 32 nt, Human
gcgggaccucaagggcucacugcggcuaagug

SEQ ID NO: 443876 - RNA, 21 nt, Human
gcgggacgcaaggccagcaga

SEQ ID NO: 443877 - RNA, 32 nt, Human
gcgggacgggacuggcccugcccagccaugaa

SEQ ID NO: 443878 - RNA, 31 nt, Human
gcgggacugaggcugccucacguguugcaag

SEQ ID NO: 443879 - RNA, 18 nt, Human
gcgggacuuaggcagcuc

SEQ ID NO: 443880 - RNA, 32 nt, Human
gcgggagaaagcaccagcagguucugagcccu

SEQ ID NO: 443881 - RNA, 32 nt, Human
gcgggagaaccagcagcaggaacggcuccugc

SEQ ID NO: 443882 - RNA, 32 nt, Human
gcgggagaaucacuugaacccaggagguggag

SEQ ID NO: 443883 - RNA, 19 nt, Human
gcgggagaaucgcuugaac

SEQ ID NO: 443884 - RNA, 19 nt, Human
gcgggagaauugcuugaac

SEQ ID NO: 443885 - RNA, 32 nt, Human
gcgggagagaggaagagaggggagcgcggugg

SEQ ID NO: 443886 - RNA, 32 nt, Human
gcgggagagaggaggaggcggcggcggggcag

SEQ ID NO: 443887 - RNA, 32 nt, Human
gcgggagagcuaggagagccagcuggagucug

SEQ ID NO: 443888 - RNA, 24 nt, Human
gcgggagaggcgcaguggcugcag

SEQ ID NO: 443889 - RNA, 32 nt, Human
gcgggagauucaaaccuggaagaaggaggaac

SEQ ID NO: 443890 - RNA, 32 nt, Human
gcgggagcagcccagggccagagagggagccc

SEQ ID NO: 443891 - RNA, 32 nt, Human
gcgggagcaugcuggggcucugggggcagcgg

SEQ ID NO: 443892 - RNA, 32 nt, Human
gcgggagccacggaccaagaccagccacaucc

SEQ ID NO: 443893 - RNA, 16 nt, Human
gcgggagccagcgcag

SEQ ID NO: 443894 - RNA, 18 nt, Human
gcgggagcccccuuggca

SEQ ID NO: 443895 - RNA, 21 nt, Human
gcgggagcccugaggcugcgg

SEQ ID NO: 443896 - RNA, 31 nt, Human
gcgggagccgcacagucgaggagggagcgcg

SEQ ID NO: 443897 - RNA, 32 nt, Human
gcgggagcggggaaucugggauucagaacucu

SEQ ID NO: 443898 - RNA, 18 nt, Human
gcgggagcggggcugcag

SEQ ID NO: 443899 - RNA, 19 nt, Human
gcgggagcuacggcugcgg

SEQ ID NO: 443900 - RNA, 32 nt, Human
gcgggagcugagcgcaggggaggcaggcggag

SEQ ID NO: 443901 - RNA, 20 nt, Human
gcgggagcugcgggcugcgg

SEQ ID NO: 443902 - RNA, 22 nt, Human
gcgggagcuggagaggcugcgg

SEQ ID NO: 443903 - RNA, 32 nt, Human
gcgggagcuggagcggggcccuccgggguauc

SEQ ID NO: 443904 - RNA, 32 nt, Human
gcgggagcugugcagcuccuuaucauggggac

SEQ ID NO: 443905 - RNA, 32 nt, Human
gcgggaggaagaggaggaggaggaggaggcug

SEQ ID NO: 443906 - RNA, 32 nt, Human
gcgggaggacucagagucagggacacagcagc

SEQ ID NO: 443907 - RNA, 32 nt, Human
gcgggaggagagaagggacagcucugggaggc

SEQ ID NO: 443908 - RNA, 18 nt, Human
gcgggaggagcgggcugc

SEQ ID NO: 443909 - RNA, 32 nt, Human
gcgggaggaggcacaucacauagcaagagugg

SEQ ID NO: 443910 - RNA, 32 nt, Human
gcgggaggaggcggcggcggcggcuagcgagg

SEQ ID NO: 443911 - RNA, 21 nt, Human
gcgggaggaucgaccgacaga

SEQ ID NO: 443912 - RNA, 32 nt, Human
gcgggaggaucucuugagcccaggaguucgag

SEQ ID NO: 443913 - RNA, 19 nt, Human
gcgggaggcagaccagcag

SEQ ID NO: 443914 - RNA, 22 nt, Human
gcgggaggcagguuccgcacga

SEQ ID NO: 443915 - RNA, 32 nt, Human
gcgggaggcgacauggagacaggggcggccga

SEQ ID NO: 443916 - RNA, 20 nt, Human
gcgggaggcggcagccgcag

SEQ ID NO: 443917 - RNA, 18 nt, Human
gcgggaggcggugguaga

SEQ ID NO: 443918 - RNA, 32 nt, Human
gcgggagggaagggcggcacuggagagauggg

SEQ ID NO: 443919 - RNA, 32 nt, Human
gcgggagggaggcgggagucgggggaagacgc

SEQ ID NO: 443920 - RNA, 32 nt, Human
gcgggagggcgcagcgcugggccucgugucgc

SEQ ID NO: 443921 - RNA, 24 nt, Human
gcgggagggcguccggucugcacg

SEQ ID NO: 443922 - RNA, 32 nt, Human
gcgggaggggaggcuccucuccaugguccaga

SEQ ID NO: 443923 - RNA, 32 nt, Human
gcgggaggggcgcgagcgggcuggccgaggag

SEQ ID NO: 443924 - RNA, 32 nt, Human
gcgggagggggagggggagugggcgggcagug

SEQ ID NO: 443925 - RNA, 32 nt, Human
gcgggagggggucgagaaagaggaacgaggag

SEQ ID NO: 443926 - RNA, 23 nt, Human
gcgggagggguggaggcugcggg

SEQ ID NO: 443927 - RNA, 32 nt, Human
gcgggagggugagggcaagaggacugaugguu

SEQ ID NO: 443928 - RNA, 32 nt, Human
gcgggagggugcaccugucccgggcgccgugg

SEQ ID NO: 443929 - RNA, 32 nt, Human
gcgggaggguugcuugagcucaggaguuugag

SEQ ID NO: 443930 - RNA, 32 nt, Human
gcgggaggugccucuuuagaaaccacgaagug

SEQ ID NO: 443931 - RNA, 23 nt, Human
gcgggaggugggaugugagacag

SEQ ID NO: 443932 - RNA, 21 nt, Human
gcgggagguggguggcugcgg

SEQ ID NO: 443933 - RNA, 32 nt, Human
gcgggaggugucgcggggagccuggugcccuu

SEQ ID NO: 443934 - RNA, 32 nt, Human
gcgggaguacgcgagagcagggauggggcagc

SEQ ID NO: 443935 - RNA, 32 nt, Human
gcgggaguagacucugcuuccuccagccacac

SEQ ID NO: 443936 - RNA, 32 nt, Human
gcgggagugauguggaggucgcccugggagcc

SEQ ID NO: 443937 - RNA, 32 nt, Human
gcgggaguuccagagagaggacauagcucuga

SEQ ID NO: 443938 - RNA, 32 nt, Human
gcgggauccaaacuuccggugccugcagagcu

SEQ ID NO: 443939 - RNA, 32 nt, Human
gcgggauccagaaacaugucgaccacacuucu

SEQ ID NO: 443940 - RNA, 32 nt, Human
gcgggauccgcgggggcagcccggccgggcgg

SEQ ID NO: 443941 - RNA, 32 nt, Human
gcgggauccggugggagccggagucccgccga

SEQ ID NO: 443942 - RNA, 32 nt, Human
gcgggaugcggcggggcggcagccugagcgcc

SEQ ID NO: 443943 - RNA, 32 nt, Human
gcgggaugcgggagcaggcaaagggaaagcga

SEQ ID NO: 443944 - RNA, 32 nt, Human
gcgggauggaggaggaugcaggaagaggaguc

SEQ ID NO: 443945 - RNA, 32 nt, Human
gcgggaugggccaccgccgaauuuguaccccc

SEQ ID NO: 443946 - RNA, 32 nt, Human
gcgggaugguauagccgggccugagggcgggc

SEQ ID NO: 443947 - RNA, 22 nt, Human
gcgggcaaaucaccugagguca

SEQ ID NO: 443948 - RNA, 23 nt, Human
gcgggcaaaucaccugaggucag

SEQ ID NO: 443949 - RNA, 32 nt, Human
gcgggcaagccuggcagggcagagggagcccc

SEQ ID NO: 443950 - RNA, 32 nt, Human
gcgggcaagcuccggggucucuggguggagag

SEQ ID NO: 443951 - RNA, 22 nt, Human
gcgggcaaggacagcuccgcga

SEQ ID NO: 443952 - RNA, 32 nt, Human
gcgggcacagcccagagcucuggggcggugca

SEQ ID NO: 443953 - RNA, 32 nt, Human
gcgggcacagcccuuucucaggguuggacccc

SEQ ID NO: 443954 - RNA, 32 nt, Human
gcgggcaccauggugcugucggugccugugau

SEQ ID NO: 443955 - RNA, 32 nt, Human
gcgggcacccggaaacaugcaggggagggugc

SEQ ID NO: 443956 - RNA, 32 nt, Human
gcgggcaccucgggggcgggcgcggggcgcag

SEQ ID NO: 443957 - RNA, 19 nt, Human
gcgggcaccuguaguccca

SEQ ID NO: 443958 - RNA, 32 nt, Human
gcgggcacuuguagucccagcuacucaggagg

SEQ ID NO: 443959 - RNA, 32 nt, Human
gcgggcagaagggagagagggaggggcagcua

SEQ ID NO: 443960 - RNA, 24 nt, Human
gcgggcagaucaccugaggccagg

SEQ ID NO: 443961 - RNA, 22 nt, Human
gcgggcagaucaccugagguca

SEQ ID NO: 443962 - RNA, 24 nt, Human
gcgggcagaucaccugaggucagg

SEQ ID NO: 443963 - RNA, 23 nt, Human
gcgggcagaucacugaggucagg

SEQ ID NO: 443964 - RNA, 24 nt, Human
gcgggcagaucacuugaagucagg

SEQ ID NO: 443965 - RNA, 24 nt, Human
gcgggcagaucacuugagaucagg

SEQ ID NO: 443966 - RNA, 24 nt, Human
gcgggcagaucacuugaggucagg

SEQ ID NO: 443967 - RNA, 32 nt, Human
gcgggcagaucuccugagcucaggaguucgag

SEQ ID NO: 443968 - RNA, 18 nt, Human
gcgggcagcagcuccagc

SEQ ID NO: 443969 - RNA, 32 nt, Human
gcgggcagcagcugugugcgggccuggggguu

SEQ ID NO: 443970 - RNA, 32 nt, Human
gcgggcagcaugguucacuccagcaugggggc

SEQ ID NO: 443971 - RNA, 32 nt, Human
gcgggcagcccagccucugucccucuuugccu

SEQ ID NO: 443972 - RNA, 32 nt, Human
gcgggcagcgucgccucacgcggagcagagcu

SEQ ID NO: 443973 - RNA, 32 nt, Human
gcgggcaggcggguggggcaggcugggggcug

SEQ ID NO: 443974 - RNA, 32 nt, Human
gcgggcaggcuggggguauguguggcaggaac

SEQ ID NO: 443975 - RNA, 32 nt, Human
gcgggcagggaguggagucggggucuuacucc

SEQ ID NO: 443976 - RNA, 32 nt, Human
gcgggcagggccugaagugcaggugcgggcag

SEQ ID NO: 443977 - RNA, 32 nt, Human
gcgggcaggggugggagcccucacaggcaagg

SEQ ID NO: 443978 - RNA, 32 nt, Human
gcgggcagugaacgaguguggggaaggauugg

SEQ ID NO: 443979 - RNA, 29 nt, Human
gcgggcaguuuaugugugccuggacacag

SEQ ID NO: 443980 - RNA, 32 nt, Human
gcgggcaucuuggaaucaugacucccacaaug

SEQ ID NO: 443981 - RNA, 32 nt, Human
gcgggcaucuuucaccaaagcuacucaggaag

SEQ ID NO: 443982 - RNA, 32 nt, Human
gcgggcauggcguggaggaggagggaggccgg

SEQ ID NO: 443983 - RNA, 32 nt, Human
gcgggcaugguggcucacgccuguaaucccag

SEQ ID NO: 443984 - RNA, 32 nt, Human
gcgggcaugguggugggcgccuguaauuccag

SEQ ID NO: 443985 - RNA, 32 nt, Human
gcgggccagcacugguaccuagccggggcccg

SEQ ID NO: 443986 - RNA, 32 nt, Human
gcgggccagccugggccccagcccacaccuuc

SEQ ID NO: 443987 - RNA, 32 nt, Human
gcgggccaggcgcgcggugucaccuccacgaa

SEQ ID NO: 443988 - RNA, 32 nt, Human
gcgggccaggucgcccuugagacucagugcgc

SEQ ID NO: 443989 - RNA, 32 nt, Human
gcgggcccaagagaugaaggaaaggagugaaa

SEQ ID NO: 443990 - RNA, 32 nt, Human
gcgggcccaagccuuuggaucucaggugaccg

SEQ ID NO: 443991 - RNA, 19 nt, Human
gcgggcccacaucuuccgg

SEQ ID NO: 443992 - RNA, 32 nt, Human
gcgggcccagaacauccggggagacaaggccc

SEQ ID NO: 443993 - RNA, 22 nt, Human
gcgggcccagacugcgcuccgg

SEQ ID NO: 443994 - RNA, 25 nt, Human
gcgggcccaugaggaggccugggga

SEQ ID NO: 443995 - RNA, 32 nt, Human
gcgggcccccuccaggagcuccgggcaagcag

SEQ ID NO: 443996 - RNA, 32 nt, Human
gcgggcccccuucaccccuuuucugucugcac

SEQ ID NO: 443997 - RNA, 32 nt, Human
gcgggccccgggcccuccuccgucucagccgc

SEQ ID NO: 443998 - RNA, 23 nt, Human
gcgggcccgggaccacccuccgg

SEQ ID NO: 443999 - RNA, 32 nt, Human
gcgggcccugcccacaccuccuggggcgcgug

SEQ ID NO: 444000 - RNA, 32 nt, Human
gcgggcccugcccuccccaugccuccugcccu

SEQ ID NO: 444001 - RNA, 32 nt, Human
gcgggcccuggguuugaagcagccuggcuuuc

SEQ ID NO: 444002 - RNA, 20 nt, Human
gcgggcccuuccaccgcagc

SEQ ID NO: 444003 - RNA, 19 nt, Human
gcgggccgccagccccagc

SEQ ID NO: 444004 - RNA, 32 nt, Human
gcgggccgcggcuccggcauggccgggaucau

SEQ ID NO: 444005 - RNA, 32 nt, Human
gcgggccgcucaccugacauguggaccugcag

SEQ ID NO: 444006 - RNA, 19 nt, Human
gcgggccggagggcugcag

SEQ ID NO: 444007 - RNA, 32 nt, Human
gcgggccgggcccggggccgcuuggaauggcg

SEQ ID NO: 444008 - RNA, 27 nt, Human
gcgggccgggggcggaggcgcuggggg

SEQ ID NO: 444009 - RNA, 32 nt, Human
gcgggccuacagccaugucccgggacccgggg

SEQ ID NO: 444010 - RNA, 32 nt, Human
gcgggccucacaggucacccagccagaucuca

SEQ ID NO: 444011 - RNA, 32 nt, Human
gcgggccuccagcagcccugugccugccgcua

SEQ ID NO: 444012 - RNA, 32 nt, Human
gcgggccucgaccgcaggucucaucccacacu

SEQ ID NO: 444013 - RNA, 32 nt, Human
gcucacucacugcccucccucccuccugggcu

SEQ ID NO: 444014 - RNA, 32 nt, Human
gcucacuccaaccuccgccuccuggguucaag

SEQ ID NO: 444015 - RNA, 32 nt, Human
gcucacuccagccuccaacuccugggcucaag

SEQ ID NO: 444016 - RNA, 32 nt, Human
gcucacuccagccuccacuucccagguucaag

SEQ ID NO: 444017 - RNA, 32 nt, Human
gcucacuccagccucggauguuuccucgcugc

SEQ ID NO: 444018 - RNA, 32 nt, Human
gcucacucccuuccucuccaucucucccucuc

SEQ ID NO: 444019 - RNA, 32 nt, Human
gcucacucccuugagccugcuuccucacucca

SEQ ID NO: 444020 - RNA, 32 nt, Human
gcucacuccucaucuuacccuaccaucucccc

SEQ ID NO: 444021 - RNA, 32 nt, Human
gcucacuccuguaaucccaacacuuugagagg

SEQ ID NO: 444022 - RNA, 32 nt, Human
gcucacuccuguaaucccaccacuuugggagg

SEQ ID NO: 444023 - RNA, 32 nt, Human
gcucacuccuguaaucccagcacuuuggaggc

SEQ ID NO: 444024 - RNA, 32 nt, Human
gcucacuccuguaaucccagcacuuugggaag

SEQ ID NO: 444025 - RNA, 32 nt, Human
gcucacuccuguaaucccagcacuuugggagg

SEQ ID NO: 444026 - RNA, 32 nt, Human
gcucacuccuguaaucccagcauuuugagagg

SEQ ID NO: 444027 - RNA, 32 nt, Human
gcucacuccuguaaucccagcauuuugggagg

SEQ ID NO: 444028 - RNA, 32 nt, Human
gcucacuccuguaaucccggcacuuuggaaug

SEQ ID NO: 444029 - RNA, 32 nt, Human
gcucacuccuguaauccgagcaauuugggagg

SEQ ID NO: 444030 - RNA, 32 nt, Human
gcucacuccuguaauccuagcaguuuggaagg

SEQ ID NO: 444031 - RNA, 32 nt, Human
gcucacuccuguaaucucaacaauuugagagg

SEQ ID NO: 444032 - RNA, 32 nt, Human
gcucacuccuguaaucucagaacuuugggagg

SEQ ID NO: 444033 - RNA, 32 nt, Human
gcucacuccuguaauuccagcacuuugggagg

SEQ ID NO: 444034 - RNA, 32 nt, Human
gcucacuccuguagucccagcacuuugggagg

SEQ ID NO: 444035 - RNA, 32 nt, Human
gcucacuccuuucuacuaauuguggaugucuc

SEQ ID NO: 444036 - RNA, 32 nt, Human
gcucacucggcuuccaggacaccccgcucagg

SEQ ID NO: 444037 - RNA, 32 nt, Human
gcucacucuaccccaucuccuugccgggugag

SEQ ID NO: 444038 - RNA, 32 nt, Human
gcucacucuagccuugaauuccugggcccaag

SEQ ID NO: 444039 - RNA, 32 nt, Human
gcucacucuccccuccaagauaugagaaacug

SEQ ID NO: 444040 - RNA, 32 nt, Human
gcucacucuccucccugcagcugcaguguggc

SEQ ID NO: 444041 - RNA, 32 nt, Human
gcucacucugcaaccuccacuucccagguuca

SEQ ID NO: 444042 - RNA, 22 nt, Human
gcucacugaaaccucugccucc

SEQ ID NO: 444043 - RNA, 21 nt, Human
gcucacugaaccucugccucc

SEQ ID NO: 444044 - RNA, 32 nt, Human
gcucacugaagccuccgcuuccuggguucaag

SEQ ID NO: 444045 - RNA, 32 nt, Human
gcucacugaagggugagccaggccagugcuuc

SEQ ID NO: 444046 - RNA, 32 nt, Human
gcucacugacacucuguaaaggccaaucaaug

SEQ ID NO: 444047 - RNA, 32 nt, Human
gcucacugcaaacuccaccucccagguucaag

SEQ ID NO: 444048 - RNA, 22 nt, Human
gcucacugcaaacucugccucc

SEQ ID NO: 444049 - RNA, 32 nt, Human
gcucacugcaaaucuccgccucccagguucaa

SEQ ID NO: 444050 - RNA, 32 nt, Human
gcucacugcaacauccaccucaugggcucaag

SEQ ID NO: 444051 - RNA, 32 nt, Human
gcucacugcaacauccaccuccuggguucaag

SEQ ID NO: 444052 - RNA, 32 nt, Human
gcucacugcaacauccagcuccuggguuucag

SEQ ID NO: 444053 - RNA, 22 nt, Human
gcucacugcaacauccgccucu

SEQ ID NO: 444054 - RNA, 32 nt, Human
gcucacugcaacaucugacuccuggguucaag

SEQ ID NO: 444055 - RNA, 22 nt, Human
gcucacugcaaccaacaccuuc

SEQ ID NO: 444056 - RNA, 22 nt, Human
gcucacugcaaccacugccucc

SEQ ID NO: 444057 - RNA, 32 nt, Human
gcucacugcaaccacugcuuccuggguucaag

SEQ ID NO: 444058 - RNA, 32 nt, Human
gcucacugcaacccccaccucccggguucaag

SEQ ID NO: 444059 - RNA, 22 nt, Human
gcucacugcaacccccgccucc

SEQ ID NO: 444060 - RNA, 32 nt, Human
gcucacugcaacccccgccuccuggguucaag

SEQ ID NO: 444061 - RNA, 22 nt, Human
gcucacugcaaccccuccuccu

SEQ ID NO: 444062 - RNA, 23 nt, Human
gcucacugcaaccucaaacuccu

SEQ ID NO: 444063 - RNA, 32 nt, Human
gcucacugcaaccucaaacuccugggcucaag

SEQ ID NO: 444064 - RNA, 21 nt, Human
gcucacugcaaccucaauccu

SEQ ID NO: 444065 - RNA, 32 nt, Human
gcucacugcaaccucagccuccugggcucaag

SEQ ID NO: 444066 - RNA, 22 nt, Human
gcucacugcaaccuccaccccc

SEQ ID NO: 444067 - RNA, 21 nt, Human
gcucacugcaaccuccaccuc

SEQ ID NO: 444068 - RNA, 32 nt, Human
gcucacugcaaccuccaccucacagguucaag

SEQ ID NO: 444069 - RNA, 22 nt, Human
gcucacugcaaccuccaccucc

SEQ ID NO: 444070 - RNA, 32 nt, Human
gcucacugcaaccuccaccucccagaaggaag

SEQ ID NO: 444071 - RNA, 32 nt, Human
gcucacugcaaccuccaccucccaggaucaag

SEQ ID NO: 444072 - RNA, 32 nt, Human
gcucacugcaaccuccaccucccaggcucaag

SEQ ID NO: 444073 - RNA, 32 nt, Human
gcucacugcaaccuccaccucccaggucagcg

SEQ ID NO: 444074 - RNA, 32 nt, Human
gcucacugcaaccuccaccucccagguccaag

SEQ ID NO: 444075 - RNA, 32 nt, Human
gcucacugcaaccuccaccucccaggugcaag

SEQ ID NO: 444076 - RNA, 32 nt, Human
gcucacugcaaccuccaccucccagguucaag

SEQ ID NO: 444077 - RNA, 32 nt, Human
gcucacugcaaccuccaccucccagguucaca

SEQ ID NO: 444078 - RNA, 32 nt, Human
gcucacugcaaccuccaccuccccggguucaa

SEQ ID NO: 444079 - RNA, 32 nt, Human
gcucacugcaaccuccaccucccgggcucaag

SEQ ID NO: 444080 - RNA, 32 nt, Human
gcucacugcaaccuccaccucccgggucaagc

SEQ ID NO: 444081 - RNA, 32 nt, Human
gcucacugcaaccuccaccucccggguucaac

SEQ ID NO: 444082 - RNA, 32 nt, Human
gcucacugcaaccuccaccucccggguucaag

SEQ ID NO: 444083 - RNA, 32 nt, Human
gcucacugcaaccuccaccucccggguucacg

SEQ ID NO: 444084 - RNA, 32 nt, Human
gcucacugcaaccuccaccucccggguucagg

SEQ ID NO: 444085 - RNA, 32 nt, Human
gcucacugcaaccuccaccucccggguucaug

SEQ ID NO: 444086 - RNA, 32 nt, Human
gcucacugcaaccuccaccucccggguuccag

SEQ ID NO: 444087 - RNA, 32 nt, Human
gcucacugcaaccuccaccucccggguuucag

SEQ ID NO: 444088 - RNA, 32 nt, Human
gcucacugcaaccuccaccucccugguucaag

SEQ ID NO: 444089 - RNA, 32 nt, Human
gcucacugcaaccuccaccuccggguucaagc

SEQ ID NO: 444090 - RNA, 23 nt, Human
gcucacugcaaccuccaccuccu

SEQ ID NO: 444091 - RNA, 32 nt, Human
gcucacugcaaccuccaccuccuagguucaag

SEQ ID NO: 444092 - RNA, 32 nt, Human
gcucacugcaaccuccaccuccugaguucaag

SEQ ID NO: 444093 - RNA, 32 nt, Human
gcucacugcaaccuccaccuccuggauucaag

SEQ ID NO: 444094 - RNA, 32 nt, Human
gcucacugcaaccuccaccuccuggauucgag

SEQ ID NO: 444095 - RNA, 32 nt, Human
gcucacugcaaccuccaccuccuggcuucaag

SEQ ID NO: 444096 - RNA, 32 nt, Human
gcucacugcaaccuccaccuccugggcucaag

SEQ ID NO: 444097 - RNA, 32 nt, Human
gcucacugcaaccuccaccuccugggucaagc

SEQ ID NO: 444098 - RNA, 32 nt, Human
gcucacugcaaccuccaccuccuggguucaag

SEQ ID NO: 444099 - RNA, 32 nt, Human
gcucacugcaaccuccaccuccuggguucagg

SEQ ID NO: 444100 - RNA, 32 nt, Human
gcucacugcaaccuccaccuccuggguugaag

SEQ ID NO: 444101 - RNA, 32 nt, Human
gcucacugcaaccuccaccuccuggguuuaag

SEQ ID NO: 444102 - RNA, 32 nt, Human
gcucacugcaaccuccaccuccugguucaagc

SEQ ID NO: 444103 - RNA, 32 nt, Human
gcucacugcaaccuccaccucgcagguucaag

SEQ ID NO: 444104 - RNA, 22 nt, Human
gcucacugcaaccuccaccucu

SEQ ID NO: 444105 - RNA, 32 nt, Human
gcucacugcaaccuccaccucucagguucaag

SEQ ID NO: 444106 - RNA, 32 nt, Human
gcucacugcaaccuccaccucugggauucaag

SEQ ID NO: 444107 - RNA, 21 nt, Human
gcucacugcaaccuccaccuu

SEQ ID NO: 444108 - RNA, 32 nt, Human
gcucacugcaaccuccacuuccuggguucaag

SEQ ID NO: 444109 - RNA, 22 nt, Human
gcucacugcaaccuccaucucc

SEQ ID NO: 444110 - RNA, 23 nt, Human
gcucacugcaaccuccaucuccu

SEQ ID NO: 444111 - RNA, 32 nt, Human
gcucacugcaaccucccccuccuggguucaag

SEQ ID NO: 444112 - RNA, 32 nt, Human
gcucacugcaaccuccgacuccuggguucaag

SEQ ID NO: 444113 - RNA, 22 nt, Human
gcucacugcaaccuccgcagcc

SEQ ID NO: 444114 - RNA, 22 nt, Human
gcucacugcaaccuccgcaucc

SEQ ID NO: 444115 - RNA, 23 nt, Human
gcucacugcaaccuccgcccccu

SEQ ID NO: 444116 - RNA, 22 nt, Human
gcucacugcaaccuccgccucc

SEQ ID NO: 444117 - RNA, 23 nt, Human
gcucacugcaaccuccgccuccu

SEQ ID NO: 444118 - RNA, 32 nt, Human
gcucacugcaaccuccgccuccugggaucaag

SEQ ID NO: 444119 - RNA, 32 nt, Human
gcucacugcaaccuccgccuccugggcucaag

SEQ ID NO: 444120 - RNA, 32 nt, Human
gcucacugcaaccuccgccuccuggguuaaag

SEQ ID NO: 444121 - RNA, 32 nt, Human
gcucacugcaaccuccgccuccuggguucaaa

SEQ ID NO: 444122 - RNA, 32 nt, Human
gcucacugcaaccuccgccuccuggguucaag

SEQ ID NO: 444123 - RNA, 32 nt, Human
gcucacugcaaccuccgccuccuggguucaca

SEQ ID NO: 444124 - RNA, 32 nt, Human
gcucacugcaaccuccgccuccuggguucagg

SEQ ID NO: 444125 - RNA, 32 nt, Human
gcucacugcaaccuccgccuccuggguuccaa

SEQ ID NO: 444126 - RNA, 32 nt, Human
gcucacugcaaccuccgccuccuggguucggg

SEQ ID NO: 444127 - RNA, 23 nt, Human
gcucacugcaaccuccgccucuu

SEQ ID NO: 444128 - RNA, 23 nt, Human
gcucacugcaaccuccgccugcu

SEQ ID NO: 444129 - RNA, 23 nt, Human
gcucacugcaaccuccgcuuccu

SEQ ID NO: 444130 - RNA, 22 nt, Human
gcucacugcaaccuccgucucc

SEQ ID NO: 444131 - RNA, 23 nt, Human
gcucacugcaaccuccgucuccu

SEQ ID NO: 444132 - RNA, 32 nt, Human
gcucacugcaaccuccgucuccuggguucaag

SEQ ID NO: 444133 - RNA, 22 nt, Human
gcucacugcaaccuccgucucu

SEQ ID NO: 444134 - RNA, 32 nt, Human
gcucacugcaaccuccguuuccuggguucgag

SEQ ID NO: 444135 - RNA, 22 nt, Human
gcucacugcaaccuccuccucc

SEQ ID NO: 444136 - RNA, 23 nt, Human
gcucacugcaaccuccuccuucu

SEQ ID NO: 444137 - RNA, 23 nt, Human
gcucacugcaaccucgaccuccu

SEQ ID NO: 444138 - RNA, 23 nt, Human
gcucacugcaaccucgaccucuu

SEQ ID NO: 444139 - RNA, 22 nt, Human
gcucacugcaaccucggccucc

SEQ ID NO: 444140 - RNA, 22 nt, Human
gcucacugcaaccucuaccucc

SEQ ID NO: 444141 - RNA, 23 nt, Human
gcucacugcaaccucuaccuccu

SEQ ID NO: 444142 - RNA, 32 nt, Human
gcucacugcaaccucuaccuccuggauucaag

SEQ ID NO: 444143 - RNA, 32 nt, Human
gcucacugcaaccucuaccuccuggguucaag

SEQ ID NO: 444144 - RNA, 22 nt, Human
gcucacugcaaccucucucucc

SEQ ID NO: 444145 - RNA, 32 nt, Human
gcucacugcaaccucucucucccggguucaag

SEQ ID NO: 444146 - RNA, 23 nt, Human
gcucacugcaaccucugacuccu

SEQ ID NO: 444147 - RNA, 22 nt, Human
gcucacugcaaccucugccucc

SEQ ID NO: 444148 - RNA, 23 nt, Human
gcucacugcaaccucugccuccu

SEQ ID NO: 444149 - RNA, 32 nt, Human
gcucacugcaaccucugccuccugggcucaac

SEQ ID NO: 444150 - RNA, 32 nt, Human
gcucacugcaaccucugccuccugggcucaag

SEQ ID NO: 444151 - RNA, 32 nt, Human
gcucacugcaaccucugccuccugggguucaa

SEQ ID NO: 444152 - RNA, 32 nt, Human
gcucacugcaaccucugccuccugggugcaag

SEQ ID NO: 444153 - RNA, 32 nt, Human
gcucacugcaaccucugccuccuggguucaag

SEQ ID NO: 444154 - RNA, 32 nt, Human
gcucacugcaaccucugccuccuggguucagg

SEQ ID NO: 444155 - RNA, 32 nt, Human
gcucacugcaaccucugccuccuggguucucc

SEQ ID NO: 444156 - RNA, 32 nt, Human
gcucacugcaaccucugccuccuggguuuaaa

SEQ ID NO: 444157 - RNA, 32 nt, Human
gcucacugcaaccucugccuccuggguuuaag

SEQ ID NO: 444158 - RNA, 23 nt, Human
gcucacugcaaccucugccuucu

SEQ ID NO: 444159 - RNA, 22 nt, Human
gcucacugcaaccucugcuucc

SEQ ID NO: 444160 - RNA, 23 nt, Human
gcucacugcaaccucugcuuccu

SEQ ID NO: 444161 - RNA, 32 nt, Human
gcucacugcaaccucugcuuccuggguucaaa

SEQ ID NO: 444162 - RNA, 23 nt, Human
gcucacugcaaccucugucuccu

SEQ ID NO: 444163 - RNA, 32 nt, Human
gcucacugcaaccucugucuccugggcucaag

SEQ ID NO: 444164 - RNA, 32 nt, Human
gcucacugcaaccucugucuccuggguucaaa

SEQ ID NO: 444165 - RNA, 32 nt, Human
gcucacugcaaccucugucuccuggguucaag

SEQ ID NO: 444166 - RNA, 32 nt, Human
gcucacugcaaccucugucuccuggguucagg

SEQ ID NO: 444167 - RNA, 32 nt, Human
gcucacugcaaccucugucuccuggguuuaag

SEQ ID NO: 444168 - RNA, 32 nt, Human
gcucacugcaaccucuguguccugggcucaag

SEQ ID NO: 444169 - RNA, 32 nt, Human
gcucacugcaaccucuugccucccagguucaa

SEQ ID NO: 444170 - RNA, 32 nt, Human
gcucacugcaaccugcgccuccuggguucaag

SEQ ID NO: 444171 - RNA, 32 nt, Human
gcucacugcaaccuggaacuccugggcucaau

SEQ ID NO: 444172 - RNA, 22 nt, Human
gcucacugcaaccugugccucc

SEQ ID NO: 444173 - RNA, 23 nt, Human
gcucacugcaaccuucgccaccu

SEQ ID NO: 444174 - RNA, 22 nt, Human
gcucacugcaaccuuggccucc

SEQ ID NO: 444175 - RNA, 22 nt, Human
gcucacugcaaccuuugucucc

SEQ ID NO: 444176 - RNA, 32 nt, Human
gcucacugcaacguccaccuccuggguucaag

SEQ ID NO: 444177 - RNA, 23 nt, Human
gcucacugcaacguccaccucuu

SEQ ID NO: 444178 - RNA, 32 nt, Human
gcucacugcaacguccaccucuugaguucaag

SEQ ID NO: 444179 - RNA, 32 nt, Human
gcucacugcaacguccgccuccuggguucaag

SEQ ID NO: 444180 - RNA, 22 nt, Human
gcucacugcaacgucugccucc

SEQ ID NO: 444181 - RNA, 32 nt, Human
gcucacugcaacgucugccuccuggguucaag

SEQ ID NO: 444182 - RNA, 32 nt, Human
gcucacugcaacuaccaccuccuggguucaag

SEQ ID NO: 444183 - RNA, 32 nt, Human
gcucacugcaacuccaccucccggguucacgc

SEQ ID NO: 444184 - RNA, 32 nt, Human
gcucacugcaacucugccucccggguucaagc

SEQ ID NO: 444185 - RNA, 32 nt, Human
gcucacugcaacucugcuucccagguucaagu

SEQ ID NO: 444186 - RNA, 32 nt, Human
gcucacugcaacugcagccucccggguucagg

SEQ ID NO: 444187 - RNA, 22 nt, Human
gcucacugcaacuuccaccucc

SEQ ID NO: 444188 - RNA, 32 nt, Human
gcucacugcaacuuccaccucccagguucaag

SEQ ID NO: 444189 - RNA, 32 nt, Human
gcucacugcaacuuccaccucccggguucaag

SEQ ID NO: 444190 - RNA, 32 nt, Human
gcucacugcaacuuccaccucugggaucaagg

SEQ ID NO: 444191 - RNA, 32 nt, Human
gcucacugcaacuuccacuucccggguucaag

SEQ ID NO: 444192 - RNA, 22 nt, Human
gcucacugcaacuuccgcaucc

SEQ ID NO: 444193 - RNA, 32 nt, Human
gcucacugcaacuuccgcaucccagguucaag

SEQ ID NO: 444194 - RNA, 32 nt, Human
gcucacugcaacuuccgccccgccagguucgg

SEQ ID NO: 444195 - RNA, 32 nt, Human
gcucacugcaacuuccgccucccggguucaag

SEQ ID NO: 444196 - RNA, 32 nt, Human
gcucacugcaacuuccgccucccgguuucaag

SEQ ID NO: 444197 - RNA, 32 nt, Human
gcucacugcaacuuccgccuccugggaucaag

SEQ ID NO: 444198 - RNA, 32 nt, Human
gcucacugcaacuuccgccuccuguguucaag

SEQ ID NO: 444199 - RNA, 32 nt, Human
gcucacugcaacuuccgucucccggguucaag

SEQ ID NO: 444200 - RNA, 32 nt, Human
gcucacugcaacuucuaccaccuagguucaag

SEQ ID NO: 444201 - RNA, 32 nt, Human
gcucacugcaacuucuaccuccgagguucaag

SEQ ID NO: 444202 - RNA, 32 nt, Human
gcucacugcaacuucugccaccuggguucaag

SEQ ID NO: 444203 - RNA, 32 nt, Human
gcucacugcaacuucugccucccagguucaag

SEQ ID NO: 444204 - RNA, 32 nt, Human
gcucacugcaacuucugccucccggguucaaa

SEQ ID NO: 444205 - RNA, 32 nt, Human
gcucacugcaacuucugccucccggguucaag

SEQ ID NO: 444206 - RNA, 23 nt, Human
gcucacugcaacuucugccuccu

SEQ ID NO: 444207 - RNA, 32 nt, Human
gcucacugcaacuucugccuccuagguucaag

SEQ ID NO: 444208 - RNA, 32 nt, Human
gcucacugcaacuucugccuccuggguucaag

SEQ ID NO: 444209 - RNA, 32 nt, Human
gcucacugcaacuucugccuccugguaucaag

SEQ ID NO: 444210 - RNA, 32 nt, Human
gcucacugcaacuucugccucuuggguucaag

SEQ ID NO: 444211 - RNA, 32 nt, Human
gcucacugcaacuucugccuuccagguucaag

SEQ ID NO: 444212 - RNA, 32 nt, Human
gcucacugcaacuugggccucccagguucaag

SEQ ID NO: 444213 - RNA, 32 nt, Human
gcucacugcaagcccugccuccuggguucaug

SEQ ID NO: 444214 - RNA, 22 nt, Human
gcucacugcaagcuccaacucc

SEQ ID NO: 444215 - RNA, 22 nt, Human
gcucacugcaagcuccaccucc

SEQ ID NO: 444216 - RNA, 32 nt, Human
gcucacugcaagcuccaccucccagguucaca

SEQ ID NO: 444217 - RNA, 32 nt, Human
gcucacugcaagcuccaccucccagguucacg

SEQ ID NO: 444218 - RNA, 32 nt, Human
gcucacugcaagcuccaccucccggguucacg

SEQ ID NO: 444219 - RNA, 32 nt, Human
gcucacugcaagcuccaccucccggguucaug

SEQ ID NO: 444220 - RNA, 32 nt, Human
gcucacugcaagcuccaccucccggguuuaug

SEQ ID NO: 444221 - RNA, 23 nt, Human
gcucacugcaagcuccaccuccu

SEQ ID NO: 444222 - RNA, 32 nt, Human
gcucacugcaagcuccaccuccuggguucaag

SEQ ID NO: 444223 - RNA, 32 nt, Human
gcucacugcaagcuccaccuccuggguucacg

SEQ ID NO: 444224 - RNA, 32 nt, Human
gcucacugcaagcuccaccuccuggguucaug

SEQ ID NO: 444225 - RNA, 18 nt, Human
gcucacugcaagcuccgc

SEQ ID NO: 444226 - RNA, 22 nt, Human
gcucacugcaagcuccgccucc

SEQ ID NO: 444227 - RNA, 23 nt, Human
gcucacugcaagcuccgccuccu

SEQ ID NO: 444228 - RNA, 32 nt, Human
gcucacugcaagcuccgccuccuggguucaag

SEQ ID NO: 444229 - RNA, 32 nt, Human
gcucacugcaagcuccgccuccuggguucaca

SEQ ID NO: 444230 - RNA, 32 nt, Human
gcucacugcaagcuccgccuccuggguucacg

SEQ ID NO: 444231 - RNA, 32 nt, Human
gcucacugcaagcuccgccuccuggguucaug

SEQ ID NO: 444232 - RNA, 32 nt, Human
gcucacugcaagcuccgccuccuggguugaca

SEQ ID NO: 444233 - RNA, 32 nt, Human
gcucacugcaagcucggccuccuggguucaaa

SEQ ID NO: 444234 - RNA, 18 nt, Human
gcucacugcaagcucugc

SEQ ID NO: 444235 - RNA, 22 nt, Human
gcucacugcaagcucugccucc

SEQ ID NO: 444236 - RNA, 32 nt, Human
gcucacugcaagcucugccuccugggcucaca

SEQ ID NO: 444237 - RNA, 32 nt, Human
gcucacugcaagcucugccuccuggguucaag

SEQ ID NO: 444238 - RNA, 32 nt, Human
gcucacugcaagcucugccuccuggguucacg

SEQ ID NO: 444239 - RNA, 32 nt, Human
gcucacugcaagcucugcguccuggguugacg

SEQ ID NO: 444240 - RNA, 23 nt, Human
gcucacugcaaucuccaccuccu

SEQ ID NO: 444241 - RNA, 32 nt, Human
gcucacugcaaucuccaccuccuggguucaag

SEQ ID NO: 444242 - RNA, 22 nt, Human
gcucacugcaaucuccgccucc

SEQ ID NO: 444243 - RNA, 23 nt, Human
gcucacugcaaucucugccuccu

SEQ ID NO: 444244 - RNA, 32 nt, Human
gcucacugcaaucucugccuccuggguucaag

SEQ ID NO: 444245 - RNA, 32 nt, Human
gcucacugcaaucucugccuccuggguucaga

SEQ ID NO: 444246 - RNA, 23 nt, Human
gcucacugcacccucaaccuccu

SEQ ID NO: 444247 - RNA, 32 nt, Human
gcucacugcacccucaaccuccuggguucaag

SEQ ID NO: 444248 - RNA, 32 nt, Human
gcucacugcacccuccgccuccugggcucaag

SEQ ID NO: 444249 - RNA, 32 nt, Human
gcucacugcagacuccaacuccuggccucaaa

SEQ ID NO: 444250 - RNA, 32 nt, Human
gcucacugcagacuucaccuccugaguucaag

SEQ ID NO: 444251 - RNA, 22 nt, Human
gcucacugcagccacugccucc

SEQ ID NO: 444252 - RNA, 32 nt, Human
gcucacugcagcccugaacuccugggcucaag

SEQ ID NO: 444253 - RNA, 23 nt, Human
gcucacugcagccucaaacuccu

SEQ ID NO: 444254 - RNA, 32 nt, Human
gcucacugcagccucaaacuccuaggcucagg

SEQ ID NO: 444255 - RNA, 32 nt, Human
gcucacugcagccucaaacuccugaguccaag

SEQ ID NO: 444256 - RNA, 32 nt, Human
gcucacugcagccucaaacuccugggcucaag

SEQ ID NO: 444257 - RNA, 32 nt, Human
gcucacugcagccucaaacuccugggcucagg

SEQ ID NO: 444258 - RNA, 32 nt, Human
gcucacugcagccucaaacucuuuggcucaag

SEQ ID NO: 444259 - RNA, 32 nt, Human
gcucacugcagccucaaccucccaggcucaag

SEQ ID NO: 444260 - RNA, 32 nt, Human
gcucacugcagccucaaccucccagguucaag

SEQ ID NO: 444261 - RNA, 23 nt, Human
gcucacugcagccucaaccuccu

SEQ ID NO: 444262 - RNA, 32 nt, Human
gcucacugcagccucaaccuccugagcucaag

SEQ ID NO: 444263 - RNA, 32 nt, Human
gcucacugcagccucaaccuccugggcuaagu

SEQ ID NO: 444264 - RNA, 32 nt, Human
gcucacugcagccucaaccuccugggcucaag

SEQ ID NO: 444265 - RNA, 32 nt, Human
gcucacugcagccucaaccucugaaggcccag

SEQ ID NO: 444266 - RNA, 32 nt, Human
gcucacugcagccucaaccugcugggcucaag

SEQ ID NO: 444267 - RNA, 32 nt, Human
gcucacugcagccucaaccuggguucaaguga

SEQ ID NO: 444268 - RNA, 32 nt, Human
gcucacugcagccucaaccuucuggguucaag

SEQ ID NO: 444269 - RNA, 32 nt, Human
gcucacugcagccucaacuuccagcgcuaaag

SEQ ID NO: 444270 - RNA, 23 nt, Human
gcucacugcagccucaacuuccu

SEQ ID NO: 444271 - RNA, 32 nt, Human
gcucacugcagccucagcguccugggcucaaa

SEQ ID NO: 444272 - RNA, 32 nt, Human
gcucacugcagccucauacuccugggcucaag

SEQ ID NO: 444273 - RNA, 32 nt, Human
gcucacugcagccuccaacuccuggguucaag

SEQ ID NO: 444274 - RNA, 22 nt, Human
gcucacugcagccuccaccucc

SEQ ID NO: 444275 - RNA, 32 nt, Human
gcucacugcagccuccaccucccagguucaag

SEQ ID NO: 444276 - RNA, 32 nt, Human
gcucacugcagccuccaccuccccgguuccag

SEQ ID NO: 444277 - RNA, 32 nt, Human
gcucacugcagccuccaccucccggguucaau

SEQ ID NO: 444278 - RNA, 23 nt, Human
gcucacugcagccuccaccuccu

SEQ ID NO: 444279 - RNA, 32 nt, Human
gcucacugcagccuccaccuccugggcucaaa

SEQ ID NO: 444280 - RNA, 32 nt, Human
gcucacugcagccuccaccuccugggcucaag

SEQ ID NO: 444281 - RNA, 32 nt, Human
gcucacugcagccuccaccuccugggcucaug

SEQ ID NO: 444282 - RNA, 32 nt, Human
gcucacugcagccuccaccuccugggcucucc

SEQ ID NO: 444283 - RNA, 32 nt, Human
gcucacugcagccuccaccuccuggguucaag

SEQ ID NO: 444284 - RNA, 32 nt, Human
gcucacugcagccuccacuuccuggguucaca

SEQ ID NO: 444285 - RNA, 18 nt, Human
gcucacugcagccucccu

SEQ ID NO: 444286 - RNA, 32 nt, Human
gcucacugcagccuccgccuccuggguucaag

SEQ ID NO: 444287 - RNA, 32 nt, Human
gcucacugcagccuccuucuccuggguccaag

SEQ ID NO: 444288 - RNA, 32 nt, Human
gcucacugcagccucgaacuccugggcucaag

SEQ ID NO: 444289 - RNA, 22 nt, Human
gcucacugcagccucgaccucc

SEQ ID NO: 444290 - RNA, 23 nt, Human
gcucacugcagccucgaccuccu

SEQ ID NO: 444291 - RNA, 32 nt, Human
gcucacugcagccucgaccuccugggcucaac

SEQ ID NO: 444292 - RNA, 32 nt, Human
gcucacugcagccucgaccuccugggcucaag

SEQ ID NO: 444293 - RNA, 32 nt, Human
gcucacugcagccucgacuuccugggcucaaa

SEQ ID NO: 444294 - RNA, 32 nt, Human
gcucacugcagccucugccuccuggguucaag

SEQ ID NO: 444295 - RNA, 32 nt, Human
gcucacugcagccucugccuccuggguuccaa

SEQ ID NO: 444296 - RNA, 32 nt, Human
gcucacugcagccuggaacuccugggaucaag

SEQ ID NO: 444297 - RNA, 32 nt, Human
gcucacugcagccuggaacuccugggcucagg

SEQ ID NO: 444298 - RNA, 32 nt, Human
gcucacugcagccuggaauuccugggcucaag

SEQ ID NO: 444299 - RNA, 32 nt, Human
gcucacugcagccuggagcuccugggcacaag

SEQ ID NO: 444300 - RNA, 32 nt, Human
gcucacugcagccuugaacuccuggccucaag

SEQ ID NO: 444301 - RNA, 32 nt, Human
gcucacugcagccuugaacuccugggaucaaa

SEQ ID NO: 444302 - RNA, 32 nt, Human
gcucacugcagccuugaauuccugggcucgag

SEQ ID NO: 444303 - RNA, 32 nt, Human
gcucacugcagccuugaccuccugggcugaag

SEQ ID NO: 444304 - RNA, 32 nt, Human
gcucacugcagccuugaccuccuggguucaag

SEQ ID NO: 444305 - RNA, 32 nt, Human
gcucacugcagccuugaccuccuggguuccgg

SEQ ID NO: 444306 - RNA, 32 nt, Human
gcucacugcagccuugacuuccugggcucaag

SEQ ID NO: 444307 - RNA, 32 nt, Human
gcucacugcagccuugagcuccugggcuacca

SEQ ID NO: 444308 - RNA, 32 nt, Human
gcucacugcagccuugagcuccugggcucaag

SEQ ID NO: 444309 - RNA, 32 nt, Human
gcucacugcagcuucaaacuccugggcucaaa

SEQ ID NO: 444310 - RNA, 23 nt, Human
gcucacugcagcuucaacacccc

SEQ ID NO: 444311 - RNA, 32 nt, Human
gcucacugcagcuuugacuuccugggcucaag

SEQ ID NO: 444312 - RNA, 32 nt, Human
gcucacugcaggcuccgccuccuggguucacg

SEQ ID NO: 444313 - RNA, 23 nt, Human
gcucacugcaggcucugccuccu

SEQ ID NO: 444314 - RNA, 32 nt, Human
gcucacugcaggcucugccuccuggguucacg

SEQ ID NO: 444315 - RNA, 32 nt, Human
gcucacugcaggcucugccuccuggguuccag

SEQ ID NO: 444316 - RNA, 23 nt, Human
gcucacugcagguucagccuucu

SEQ ID NO: 444317 - RNA, 22 nt, Human
gcucacugcagucucugccucc

SEQ ID NO: 444318 - RNA, 23 nt, Human
gcucacugcagucuucagccucc

SEQ ID NO: 444319 - RNA, 32 nt, Human
gcucacugcagucuugaacuccugggcucaag

SEQ ID NO: 444320 - RNA, 32 nt, Human
gcucacugcaguuucaaguuccugggcucaaa

SEQ ID NO: 444321 - RNA, 32 nt, Human
gcucacugcauccucaaccuccuggguucaga

SEQ ID NO: 444322 - RNA, 32 nt, Human
gcucacugcauccucaacuuccugggcucaag

SEQ ID NO: 444323 - RNA, 32 nt, Human
gcucacugcauccuccaccuccuggguucaag

SEQ ID NO: 444324 - RNA, 32 nt, Human
gcucacugcauccuccaguuccuggguucaag

SEQ ID NO: 444325 - RNA, 22 nt, Human
gcucacugcauccuccgccucc

SEQ ID NO: 444326 - RNA, 22 nt, Human
gcucacugcauccucugccucc

SEQ ID NO: 444327 - RNA, 32 nt, Human
gcucacugcauccucugccuccuggguucaaa

SEQ ID NO: 444328 - RNA, 32 nt, Human
gcucacugcauccucugccuccuggguucaag

SEQ ID NO: 444329 - RNA, 22 nt, Human
gcucacugccaccucugccucc

SEQ ID NO: 444330 - RNA, 32 nt, Human
gcucacugccaccuuugccuccuggguucaag

SEQ ID NO: 444331 - RNA, 32 nt, Human
gcucacugccagcugcggccugggcaccgcgg

SEQ ID NO: 444332 - RNA, 32 nt, Human
gcucacugcccagcccccaucuaccucugaga

SEQ ID NO: 444333 - RNA, 32 nt, Human
gcucacugcccuucuagaugugccuucccgcu

SEQ ID NO: 444334 - RNA, 32 nt, Human
gcucacugccgccucaaccucuccuggguuca

SEQ ID NO: 444335 - RNA, 22 nt, Human
gcucacugcgaccuccaccucc

SEQ ID NO: 444336 - RNA, 23 nt, Human
gcucacugcgaccuccaccuccu

SEQ ID NO: 444337 - RNA, 32 nt, Human
gcucacugcgaccuccaccuccuggguucaag

SEQ ID NO: 444338 - RNA, 32 nt, Human
gcucacugcgaccucugcuuccuggguucaag

SEQ ID NO: 444339 - RNA, 32 nt, Human
gcucacugcgaccugcaccuccuggguucaag

SEQ ID NO: 444340 - RNA, 32 nt, Human
gcucacugcgagcuccaccucucggguucaca

SEQ ID NO: 444341 - RNA, 32 nt, Human
gcucacugcgagcucugccuccuggguucaag

SEQ ID NO: 444342 - RNA, 32 nt, Human
gcucacugcggccuugaacuccugggcuuaag

SEQ ID NO: 444343 - RNA, 32 nt, Human
gcucacugcucacccaccugcugcugccauga

SEQ ID NO: 444344 - RNA, 32 nt, Human
gcucacugcuguucucugggcuuguugacugu

SEQ ID NO: 444345 - RNA, 32 nt, Human
gcucacuggcaacaucugccucccggguucaa

SEQ ID NO: 444346 - RNA, 32 nt, Human
gcucacugggauaucuggcauuaguggaugcu

SEQ ID NO: 444347 - RNA, 32 nt, Human
gcucacugggcacgguggcucacaccuguaac

SEQ ID NO: 444348 - RNA, 32 nt, Human
gcucacuggucuuguaacuguccucuccuuau

SEQ ID NO: 444349 - RNA, 32 nt, Human
gcucacuguaaccucaaaauccugggcucaag

SEQ ID NO: 444350 - RNA, 20 nt, Human
gcucacuguaaccucaaacu

SEQ ID NO: 444351 - RNA, 23 nt, Human
gcucacuguaaccucaaacuccu

SEQ ID NO: 444352 - RNA, 20 nt, Human
gcucacuguaaccuccaccu

SEQ ID NO: 444353 - RNA, 22 nt, Human
gcucacuguaaccuccaccucc

SEQ ID NO: 444354 - RNA, 32 nt, Human
gcucacuguaaccuccaccuccuggguucacg

SEQ ID NO: 444355 - RNA, 32 nt, Human
gcucacuguaaccuccgacuccuggguucaag

SEQ ID NO: 444356 - RNA, 32 nt, Human
gcucacuguaaccuccgccuccuggguucaaa

SEQ ID NO: 444357 - RNA, 22 nt, Human
gcucacuguaaccucugccucc

SEQ ID NO: 444358 - RNA, 32 nt, Human
gcucacuguaaccucugccuccuggguucaag

SEQ ID NO: 444359 - RNA, 32 nt, Human
gcucacuguaaucuccgccuccuggguucaag

SEQ ID NO: 444360 - RNA, 32 nt, Human
gcucacuguacccuugaacuccugggcucaag

SEQ ID NO: 444361 - RNA, 32 nt, Human
gcucacuguacuccagcccggguucaagcaau

SEQ ID NO: 444362 - RNA, 32 nt, Human
gcucacuguagccacaaccucucaggcucaag

SEQ ID NO: 444363 - RNA, 32 nt, Human
gcucacuguagccucgaauuccugggcucaag

SEQ ID NO: 444364 - RNA, 32 nt, Human
gcucacuguagccucgaccuccugggcucaag

SEQ ID NO: 444365 - RNA, 32 nt, Human
gcucacuguagccucuaucuccugggcucaag

SEQ ID NO: 444366 - RNA, 32 nt, Human
gcucacuguagccuugacauccugggcucaag

SEQ ID NO: 444367 - RNA, 32 nt, Human
gcucacuguagccuugaucuccugggcucaag

SEQ ID NO: 444368 - RNA, 32 nt, Human
gcucacuguagucucaaccuccugggcucaag

SEQ ID NO: 444369 - RNA, 22 nt, Human
gcucacuguauccucugccucc

SEQ ID NO: 444370 - RNA, 23 nt, Human
gcucacugugaccuccgccuccu

SEQ ID NO: 444371 - RNA, 32 nt, Human
gcucacugugaccuccgccuccuggguucaag

SEQ ID NO: 444372 - RNA, 32 nt, Human
gcucacugugaccucugccuccuggguuuaag

SEQ ID NO: 444373 - RNA, 18 nt, Human
gcucacugugcucaggga

SEQ ID NO: 444374 - RNA, 32 nt, Human
gcucacuguguauuuaauaaauggacaaagag

SEQ ID NO: 444375 - RNA, 32 nt, Human
gcucacuucacugcacuccagucugggugaca

SEQ ID NO: 444376 - RNA, 32 nt, Human
gcucacuucagucucaaaauccugggcucaag

SEQ ID NO: 444377 - RNA, 32 nt, Human
gcucacuuccaguagcagaaccaccuuaguug

SEQ ID NO: 444378 - RNA, 31 nt, Human
gcucacuucuagagagaagaaaaaggcuggg

SEQ ID NO: 444379 - RNA, 32 nt, Human
gcucacuucucucccacuucugcuccauuugu

SEQ ID NO: 444380 - RNA, 32 nt, Human
gcucacuuucgccuucuccauccccugccgug

SEQ ID NO: 444381 - RNA, 32 nt, Human
gcucagaaacauuugacauuuggggugacgcg

SEQ ID NO: 444382 - RNA, 32 nt, Human
gcucagaaaccacugcauucugaccugcugua

SEQ ID NO: 444383 - RNA, 31 nt, Human
gcucagaaauaauugcucuguugaaaauaau

SEQ ID NO: 444384 - RNA, 32 nt, Human
gcucagaaauuuguucaagaucgcacagcuag

SEQ ID NO: 444385 - RNA, 32 nt, Human
gcucagaacaagaacugagauccagagagaug

SEQ ID NO: 444386 - RNA, 32 nt, Human
gcucagaacagcuucagcugucuaugggaagg

SEQ ID NO: 444387 - RNA, 22 nt, Human
gcucagaagaccaguguuucca

SEQ ID NO: 444388 - RNA, 32 nt, Human
gcucagaagcggccccaacaccugccacgcug

SEQ ID NO: 444389 - RNA, 32 nt, Human
gcucagaagucaccuccucagugcaguuagcc

SEQ ID NO: 444390 - RNA, 32 nt, Human
gcucagaauagcaccauugcugguuuguauua

SEQ ID NO: 444391 - RNA, 32 nt, Human
gcucagaauaugcucacugcuaagcuacaaac

SEQ ID NO: 444392 - RNA, 32 nt, Human
gcucagaccacugcaaucuaugggcagaccgc

SEQ ID NO: 444393 - RNA, 32 nt, Human
gcucagaccuauaaucccagcacuuugggagu

SEQ ID NO: 444394 - RNA, 32 nt, Human
gcucagaccuguaaucccagaacuuugggagc

SEQ ID NO: 444395 - RNA, 32 nt, Human
gcucagacgguuuauggaggcaaagguuugga

SEQ ID NO: 444396 - RNA, 32 nt, Human
gcucagacuguacucuucuagccaucugaaau

SEQ ID NO: 444397 - RNA, 32 nt, Human
gcucagacuuggggagggagggguguggcucc

SEQ ID NO: 444398 - RNA, 32 nt, Human
gcucagagaaauuauucauaagagaaaagaau

SEQ ID NO: 444399 - RNA, 32 nt, Human
gcucagagacaaacuggucaagugugagggca

SEQ ID NO: 444400 - RNA, 32 nt, Human
gcucagagaccuggcagacaccaccuuaaccc

SEQ ID NO: 444401 - RNA, 32 nt, Human
gcucagagauggggaccaucuuggagcgauca

SEQ ID NO: 444402 - RNA, 32 nt, Human
gcucagagccagucuuuuuggugaggguaacc

SEQ ID NO: 444403 - RNA, 32 nt, Human
gcucagagccaugccaggugucugugauaggg

SEQ ID NO: 444404 - RNA, 30 nt, Human
gcucagagccucuccuccuuccugucccga

SEQ ID NO: 444405 - RNA, 32 nt, Human
gcucagagcggaggggagacugaccggagcgc

SEQ ID NO: 444406 - RNA, 32 nt, Human
gcucagagcugcugagcaggaaccggagggug

SEQ ID NO: 444407 - RNA, 32 nt, Human
gcucagagcugcugugugucauccuguguuug

SEQ ID NO: 444408 - RNA, 31 nt, Human
gcucagaggagaccugcaguggguagcuccu

SEQ ID NO: 444409 - RNA, 32 nt, Human
gcucagaggaggaggacaaagacggcggggug

SEQ ID NO: 444410 - RNA, 32 nt, Human
gcucagaggaggcagagauggggugguggcug

SEQ ID NO: 444411 - RNA, 32 nt, Human
gcucagaggggccucaucuuccccagcccucc

SEQ ID NO: 444412 - RNA, 32 nt, Human
gcucagagucccgagacacagacaugaacacc

SEQ ID NO: 444413 - RNA, 32 nt, Human
gcucagagugaccaagcggaagaagaaaaaga

SEQ ID NO: 444414 - RNA, 32 nt, Human
gcucagaguggcugagacuuguguccugacca

SEQ ID NO: 444415 - RNA, 32 nt, Human
gcucagagugggagacagagagacaagugugc

SEQ ID NO: 444416 - RNA, 32 nt, Human
gcucagaguuugaaguuccacagccaggcugu

SEQ ID NO: 444417 - RNA, 32 nt, Human
gcucagaucaagaauccaguuaccucaaagcu

SEQ ID NO: 444418 - RNA, 32 nt, Human
gcucagaucccaccccugaucuccagacucau

SEQ ID NO: 444419 - RNA, 32 nt, Human
gcucagaucucccucccgaucucccuccccac

SEQ ID NO: 444420 - RNA, 32 nt, Human
gcucagaugcaggaacccagaaugggggcuuc

SEQ ID NO: 444421 - RNA, 32 nt, Human
gcucagaugcugaauccccaaccagagaagac

SEQ ID NO: 444422 - RNA, 32 nt, Human
gcucagauggccugggugcuauguggagcagg

SEQ ID NO: 444423 - RNA, 32 nt, Human
gcucagaugguccuccugccucagcuuccaaa

SEQ ID NO: 444424 - RNA, 19 nt, Human
gcucagauguccuaaugaa

SEQ ID NO: 444425 - RNA, 32 nt, Human
gcucagcaaccacuuugcaccaugaggcagca

SEQ ID NO: 444426 - RNA, 32 nt, Human
gcucagcacacaggcugguaguguugggcacc

SEQ ID NO: 444427 - RNA, 32 nt, Human
gcucagcaccauccaucuccgucucccuagag

SEQ ID NO: 444428 - RNA, 32 nt, Human
gcucagcacccugcgggaauucuauuaaaucu

SEQ ID NO: 444429 - RNA, 32 nt, Human
gcucagcaccugcggcgcccucagggagccgg

SEQ ID NO: 444430 - RNA, 32 nt, Human
gcucagcacugaguagaccuagagcauuuuua

SEQ ID NO: 444431 - RNA, 32 nt, Human
gcucagcagacauccacacacaguaauggggu

SEQ ID NO: 444432 - RNA, 32 nt, Human
gcucagcagcccaaggacgauggugaggggag

SEQ ID NO: 444433 - RNA, 32 nt, Human
gcucagcaggagaaaggcaaggggcucguuca

SEQ ID NO: 444434 - RNA, 32 nt, Human
gcucagcaggcacagggcagaucaaugcauca

SEQ ID NO: 444435 - RNA, 32 nt, Human
gcucagcagggucccagcccacggccacacau

SEQ ID NO: 444436 - RNA, 32 nt, Human
gcucagcagugaccuggagugugcaaauaaau

SEQ ID NO: 444437 - RNA, 32 nt, Human
gcucagcauagacccagcucucugggggaugg

SEQ ID NO: 444438 - RNA, 32 nt, Human
gcucagcauugagagaauaaaaugucacuacc

SEQ ID NO: 444439 - RNA, 22 nt, Human
gcucagcauuguguacaaaaua

SEQ ID NO: 444440 - RNA, 32 nt, Human
gcucagccaagaaggagcgggguggcgcagcg

SEQ ID NO: 444441 - RNA, 32 nt, Human
gcucagccacagaccuuugagggaguaaaggg

SEQ ID NO: 444442 - RNA, 19 nt, Human
gcucagccaccugucuccu

SEQ ID NO: 444443 - RNA, 32 nt, Human
gcucagccacucugcccagcuggguuggaucu

SEQ ID NO: 444444 - RNA, 22 nt, Human
gcucagccagcagcccccuccc

SEQ ID NO: 444445 - RNA, 21 nt, Human
gcucagccaggccccgcggug

SEQ ID NO: 444446 - RNA, 32 nt, Human
gcucagccagggaugcagaaccaucccugcuu

SEQ ID NO: 444447 - RNA, 20 nt, Human
gcucagccauguccccuccc

SEQ ID NO: 444448 - RNA, 20 nt, Human
gcucagcccacccccuccca

SEQ ID NO: 444449 - RNA, 32 nt, Human
gcucagcccagcccuggcacagagaagagaca

SEQ ID NO: 444450 - RNA, 32 nt, Human
gcucagcccagccugggcacagccagugccca

SEQ ID NO: 444451 - RNA, 32 nt, Human
gcucagccccaucagucucaaagguuaagcca

SEQ ID NO: 444452 - RNA, 32 nt, Human
gcucagccccgcucgauuuuuccucuucuguu

SEQ ID NO: 444453 - RNA, 32 nt, Human
gcucagccccuccccuccaacucucaucccau

SEQ ID NO: 444454 - RNA, 25 nt, Human
gcucagcccgacugcccuccuccca

SEQ ID NO: 444455 - RNA, 32 nt, Human
gcucagcccucccugccccucccuucaaccau

SEQ ID NO: 444456 - RNA, 32 nt, Human
gcucagcccugaggggcuuacuuugcccgugg

SEQ ID NO: 444457 - RNA, 32 nt, Human
gcucagcccugccugguuccugcagcacauca

SEQ ID NO: 444458 - RNA, 32 nt, Human
gcucagcccuuggccgucgcaaaggagcuggc

SEQ ID NO: 444459 - RNA, 24 nt, Human
gcucagccgaaagccccccgccca

SEQ ID NO: 444460 - RNA, 32 nt, Human
gcucagccgacucgcagggccugcucuucuuc

SEQ ID NO: 444461 - RNA, 21 nt, Human
gcucagccgccuccucugcca

SEQ ID NO: 444462 - RNA, 32 nt, Human
gcucagccuaaacacgcuaacauggugcccca

SEQ ID NO: 444463 - RNA, 32 nt, Human
gcucagccugacugcaacucaccucgaaggcg

SEQ ID NO: 444464 - RNA, 20 nt, Human
gcucagccuggagugcagug

SEQ ID NO: 444465 - RNA, 32 nt, Human
gcucagccugugccaccauugcucugucugau

SEQ ID NO: 444466 - RNA, 32 nt, Human
gcucagcgaggcagaggguggggcugcacaga

SEQ ID NO: 444467 - RNA, 32 nt, Human
gcucagcgauugcuucccagcagcagcagcag

SEQ ID NO: 444468 - RNA, 32 nt, Human
gcucagcgccggccuuucccucccucugccaa

SEQ ID NO: 444469 - RNA, 22 nt, Human
gcucagcgugaagucugaaaua

SEQ ID NO: 444470 - RNA, 32 nt, Human
gcucagcuacuccuaaccuccacuuacaaacu

SEQ ID NO: 444471 - RNA, 32 nt, Human
gcucagcuaggccgggcagacaaggacagaag

SEQ ID NO: 444472 - RNA, 25 nt, Human
gcucagcuauauauguaauaaaaua

SEQ ID NO: 444473 - RNA, 32 nt, Human
gcucagcuauggacacaucugagccagccaag

SEQ ID NO: 444474 - RNA, 32 nt, Human
gcucagcucacacccaagacauggccacuccg

SEQ ID NO: 444475 - RNA, 32 nt, Human
gcucagcucacugcaaccuccaccucccaggu

SEQ ID NO: 444476 - RNA, 32 nt, Human
gcucagcucaguaccucagccaccuccaagau

SEQ ID NO: 444477 - RNA, 32 nt, Human
gcucagcuccacacaaagcugcagaaggacga

SEQ ID NO: 444478 - RNA, 32 nt, Human
gcucagcuccacacuagccuaggcccugcaag

SEQ ID NO: 444479 - RNA, 32 nt, Human
gcucagcuccuggagagugaggguugaagaaa

SEQ ID NO: 444480 - RNA, 32 nt, Human
gcucagcucugccccgcgccucccgggcuccg

SEQ ID NO: 444481 - RNA, 32 nt, Human
gcucagcucugguuuccucucccaggcucacc

SEQ ID NO: 444482 - RNA, 32 nt, Human
gcucagcugcaaccacagccucgucguucugg

SEQ ID NO: 444483 - RNA, 32 nt, Human
gcucagcugcagcugccaccugcacacggugc

SEQ ID NO: 444484 - RNA, 32 nt, Human
gcucagcugcccaggcuggagugugguggcgc

SEQ ID NO: 444485 - RNA, 21 nt, Human
gcucagcugggagcgcagagg

SEQ ID NO: 444486 - RNA, 32 nt, Human
gcucagcugggcuuuaucacacaucccgugaa

SEQ ID NO: 444487 - RNA, 32 nt, Human
gcucagcuggguccccagugcccagcaucagc

SEQ ID NO: 444488 - RNA, 32 nt, Human
gcucagcuuaagggaggcuucuugccuguggg

SEQ ID NO: 444489 - RNA, 32 nt, Human
gcucagcuuccgccccagccagggaagcggca

SEQ ID NO: 444490 - RNA, 32 nt, Human
gcucagcuucuaaucccagcacuuugguaggc

SEQ ID NO: 444491 - RNA, 18 nt, Human
gcucagcuucucugaaua

SEQ ID NO: 444492 - RNA, 32 nt, Human
gcucagcuugguuuuggacaagccuguccauu

SEQ ID NO: 444493 - RNA, 32 nt, Human
gcucaggaaaugcaguagcaggccauauugca

SEQ ID NO: 444494 - RNA, 32 nt, Human
gcucaggaacugcuuuugauucacauuaagcu

SEQ ID NO: 444495 - RNA, 32 nt, Human
gcucaggaagcugaggugggaggaucacuuga

SEQ ID NO: 444496 - RNA, 32 nt, Human
gcucaggacugagacaguuauucacugaacau

SEQ ID NO: 444497 - RNA, 32 nt, Human
gcucaggagccagcagggcagaguucugccug

SEQ ID NO: 444498 - RNA, 32 nt, Human
gcucaggagcccuaccucccugccauuauagc

SEQ ID NO: 444499 - RNA, 19 nt, Human
gcucaggagcugcauccca

SEQ ID NO: 444500 - RNA, 32 nt, Human
gcucaggaggagggacccucuacucauuaugu

SEQ ID NO: 444501 - RNA, 32 nt, Human
gcucaggaggcagagguuacagguuacaguga

SEQ ID NO: 444502 - RNA, 32 nt, Human
gcucaggaggcagagguugcagugagccaaaa

SEQ ID NO: 444503 - RNA, 32 nt, Human
gcucaggaggcagagguugcagugagcugaga

SEQ ID NO: 444504 - RNA, 32 nt, Human
gcucaggaggcugaagcaggaggaucacuuga

SEQ ID NO: 444505 - RNA, 32 nt, Human
gcucaggaggcugaggcaggagaaucgcuuga

SEQ ID NO: 444506 - RNA, 32 nt, Human
gcucaggaggcugaggcaggagaaucgcuugg

SEQ ID NO: 444507 - RNA, 32 nt, Human
gcucaggaggcugaggcaggagaguggacuga

SEQ ID NO: 444508 - RNA, 32 nt, Human
gcucaggaggcugaggcaggaggaucucuuga

SEQ ID NO: 444509 - RNA, 32 nt, Human
gcucaggaggcugaggcaugagaaucgcuuga

SEQ ID NO: 444510 - RNA, 32 nt, Human
gcucaggaggcugaggugggaggaucaccuga

SEQ ID NO: 444511 - RNA, 32 nt, Human
gcucaggaggcugaggugggaggauugcuuga

SEQ ID NO: 444512 - RNA, 32 nt, Human
gcucaggaggguaggccagggugugaagggac

SEQ ID NO: 444513 - RNA, 32 nt, Human
gcucaggagggugggugggagcugcagugggc

SEQ ID NO: 444514 - RNA, 32 nt, Human
gcucaggagguugggucugcagugagcuaucu

SEQ ID NO: 444515 - RNA, 32 nt, Human
gcucaggaguaugagacuagccuggacaacau

SEQ ID NO: 444516 - RNA, 32 nt, Human
gcucaggaguucaagaccagccuggacaacau

SEQ ID NO: 444517 - RNA, 32 nt, Human
gcucaggaguucaagacgagccugggcaacau

SEQ ID NO: 444518 - RNA, 32 nt, Human
gcucaggaguucgagagcagccugggcaacau

SEQ ID NO: 444519 - RNA, 32 nt, Human
gcucaggauauauccugguguugcuugaccug

SEQ ID NO: 444520 - RNA, 32 nt, Human
gcucaggaugaaagaggagcugagagaagugc

SEQ ID NO: 444521 - RNA, 32 nt, Human
gcucaggaugagggaaaagaaaaagauugaga

SEQ ID NO: 444522 - RNA, 21 nt, Human
gcucaggcaagcccacccuca

SEQ ID NO: 444523 - RNA, 32 nt, Human
gcucaggcaagugccuugcacacaguagguac

SEQ ID NO: 444524 - RNA, 23 nt, Human
gcucaggcaauccgcccaccuca

SEQ ID NO: 444525 - RNA, 32 nt, Human
gcucaggcagcagccccugggcgcgggaaggu

SEQ ID NO: 444526 - RNA, 18 nt, Human
gcucaggcagguccugug

SEQ ID NO: 444527 - RNA, 32 nt, Human
gcucaggcauuugacuccuacagcagaaguuc

SEQ ID NO: 444528 - RNA, 21 nt, Human
gcucaggccacccugccgagg

SEQ ID NO: 444529 - RNA, 32 nt, Human
gcucaggcccaggaggugggagaaggucacag

SEQ ID NO: 444530 - RNA, 19 nt, Human
gcucaggcccugcccccca

SEQ ID NO: 444531 - RNA, 15 nt, Human
gcucaggccucacag

SEQ ID NO: 444532 - RNA, 32 nt, Human
gcucaggccugacaccaggggcugccaaugcc

SEQ ID NO: 444533 - RNA, 16 nt, Human
gcucaggccugcccca

SEQ ID NO: 444534 - RNA, 32 nt, Human
gcucaggccugggagucaguaguuuccuaaga

SEQ ID NO: 444535 - RNA, 19 nt, Human
gcucaggccuguaacccca

SEQ ID NO: 444536 - RNA, 32 nt, Human
gcucaggccuguaaccccagcacuucgggagg

SEQ ID NO: 444537 - RNA, 32 nt, Human
gcucaggccuguaaccccaguacuuugggagg

SEQ ID NO: 444538 - RNA, 32 nt, Human
gcucaggccuguaaccucagcacuuuggugag

SEQ ID NO: 444539 - RNA, 32 nt, Human
gcucaggccuguaaucccaacacuuugggagg

SEQ ID NO: 444540 - RNA, 32 nt, Human
gcucaggccuguaaucccaacccuuuggaagg

SEQ ID NO: 444541 - RNA, 32 nt, Human
gcucaggccuguaaucccagcacucugggagg

SEQ ID NO: 444542 - RNA, 32 nt, Human
gcucaggccuguaaucccagcacugugggagg

SEQ ID NO: 444543 - RNA, 32 nt, Human
gcucaggccuguaaucccagcacuucaggaag

SEQ ID NO: 444544 - RNA, 32 nt, Human
gcucaggccuguaaucccagcacuuuccaagg

SEQ ID NO: 444545 - RNA, 32 nt, Human
gcucaggccuguaaucccagcacuuugggaag

SEQ ID NO: 444546 - RNA, 32 nt, Human
gcucaggccuguaaucccagcacuuugggagg

SEQ ID NO: 444547 - RNA, 32 nt, Human
gcucaggccuguaaucccagcauuuucagagg

SEQ ID NO: 444548 - RNA, 32 nt, Human
gcucaggccuguaaucccagcauuuugggagg

SEQ ID NO: 444549 - RNA, 32 nt, Human
gcucaggccuguaauccuaacacuuugggagg

SEQ ID NO: 444550 - RNA, 32 nt, Human
gcucaggccuguaauccuggcacuuugggagg

SEQ ID NO: 444551 - RNA, 19 nt, Human
gcucaggccuguaaucuca

SEQ ID NO: 444552 - RNA, 32 nt, Human
gcucaggccuguaaucucagcacuuugggagg

SEQ ID NO: 444553 - RNA, 32 nt, Human
gcucaggccugugaucccagcacuuugggagg

SEQ ID NO: 444554 - RNA, 32 nt, Human
gcucaggcgagggagaugagagacggcggcgg

SEQ ID NO: 444555 - RNA, 32 nt, Human
gcucaggcgcuucucccaccuuggccuccuga

SEQ ID NO: 444556 - RNA, 20 nt, Human
gcucaggcuacugccacuca

SEQ ID NO: 444557 - RNA, 32 nt, Human
gcucaggcucaagagcaacauggaggucugca

SEQ ID NO: 444558 - RNA, 32 nt, Human
gcucaggcucaggugauccucacaccuuagcc

SEQ ID NO: 444559 - RNA, 32 nt, Human
gcucaggcucucugccuuccagaggccgcuuc

SEQ ID NO: 444560 - RNA, 32 nt, Human
gcucaggcugaucucaaacuccugggcuccaa

SEQ ID NO: 444561 - RNA, 32 nt, Human
gcucaggcugaucucgagcuccugggcucaag

SEQ ID NO: 444562 - RNA, 21 nt, Human
gcucaggcuggaguacagugg

SEQ ID NO: 444563 - RNA, 20 nt, Human
gcucaggcuggagugcaaug

SEQ ID NO: 444564 - RNA, 21 nt, Human
gcucaggcuggagugcaaugg

SEQ ID NO: 444565 - RNA, 19 nt, Human
gcucaggcuggagugcagu

SEQ ID NO: 444566 - RNA, 20 nt, Human
gcucaggcuggagugcagug

SEQ ID NO: 444567 - RNA, 23 nt, Human
gcucaggcuggagugcagugaug

SEQ ID NO: 444568 - RNA, 21 nt, Human
gcucaggcuggagugcagugg

SEQ ID NO: 444569 - RNA, 24 nt, Human
gcucaggcuggagugcaguggcgu

SEQ ID NO: 444570 - RNA, 23 nt, Human
gcucaggcuggagugcaguguug

SEQ ID NO: 444571 - RNA, 21 nt, Human
gcucaggcuggauugcagugg

SEQ ID NO: 444572 - RNA, 24 nt, Human
gcucaggcuggauugcaguggcgu

SEQ ID NO: 444573 - RNA, 32 nt, Human
gcucaggcuggccuugaacuccugggcucaag

SEQ ID NO: 444574 - RNA, 19 nt, Human
gcucaggcugggugcagug

SEQ ID NO: 444575 - RNA, 20 nt, Human
gcucaggcugggugcagugg

SEQ ID NO: 444576 - RNA, 32 nt, Human
gcucaggcugucccugagggccuguguuuuga

SEQ ID NO: 444577 - RNA, 32 nt, Human
gcucaggcuguggggcaggcugggcagggggc

SEQ ID NO: 444578 - RNA, 20 nt, Human
gcucaggcuuauucacauga

SEQ ID NO: 444579 - RNA, 32 nt, Human
gcucaggcuucacuuuguaaaccagguggggg

SEQ ID NO: 444580 - RNA, 32 nt, Human
gcucaggcuuugcccaggugccaggagaaggu

SEQ ID NO: 444581 - RNA, 32 nt, Human
gcucagggaaaugaagacaggagaacugcugc

SEQ ID NO: 444582 - RNA, 32 nt, Human
gcucagggaaggccucuucaugggcauguucc

SEQ ID NO: 444583 - RNA, 32 nt, Human
gcucagggacugcccucaucugauguccucuc

SEQ ID NO: 444584 - RNA, 32 nt, Human
gcucagggacugcccucauuugauguccuuuu

SEQ ID NO: 444585 - RNA, 20 nt, Human
gcucagggagcagcagagcc

SEQ ID NO: 444586 - RNA, 32 nt, Human
gcucagggagccaaagggaacagccagauccu

SEQ ID NO: 444587 - RNA, 32 nt, Human
gcucagggagcuaggcaguugcccaaggggac

SEQ ID NO: 444588 - RNA, 32 nt, Human
gcucagggaggcacugugagccaggaauggau

SEQ ID NO: 444589 - RNA, 32 nt, Human
gcucagggaguagaccugacuggggagcuaag

SEQ ID NO: 444590 - RNA, 32 nt, Human
gcucagggaugggccuuccagccggagcaccc

SEQ ID NO: 444591 - RNA, 31 nt, Human
gcucagggcaaaggcaacuuggcuucacagg

SEQ ID NO: 444592 - RNA, 32 nt, Human
gcucagggcacugagagaucccagaagguaac

SEQ ID NO: 444593 - RNA, 32 nt, Human
gcucagggccaguucuggugggcagcagagac

SEQ ID NO: 444594 - RNA, 21 nt, Human
gcucagggcccaccuccucca

SEQ ID NO: 444595 - RNA, 32 nt, Human
gcucagggcccaccuccuccagcgaguacccc

SEQ ID NO: 444596 - RNA, 32 nt, Human
gcucagggcccaguggccuggccagcucugga

SEQ ID NO: 444597 - RNA, 32 nt, Human
gcucagggccgcggccgacaucagcccggugu

SEQ ID NO: 444598 - RNA, 32 nt, Human
gcucagggccuggguugagggagcuuagggaa

SEQ ID NO: 444599 - RNA, 24 nt, Human
gcucagggcggucgagugcagugg

SEQ ID NO: 444600 - RNA, 32 nt, Human
gcucagggcugccggggagaccccaagaggac

SEQ ID NO: 444601 - RNA, 32 nt, Human
gcucagggcuugguacaaugagcugaauuaga

SEQ ID NO: 444602 - RNA, 32 nt, Human
gcucaggggaacacaagugcacagagagagau

SEQ ID NO: 444603 - RNA, 19 nt, Human
gcucaggggagaauggagu

SEQ ID NO: 444604 - RNA, 32 nt, Human
gcucaggggaggcaggaagaugaaggacuguu

SEQ ID NO: 444605 - RNA, 20 nt, Human
gcucaggggcagcucauaga

SEQ ID NO: 444606 - RNA, 21 nt, Human
gcucagggggcagcaagccag

SEQ ID NO: 444607 - RNA, 32 nt, Human
gcucagggggccaaggcugcagugagucauga

SEQ ID NO: 444608 - RNA, 19 nt, Human
gcucagggggccccugaug

SEQ ID NO: 444609 - RNA, 32 nt, Human
gcucaggggugagguggagagggagacaugac

SEQ ID NO: 444610 - RNA, 23 nt, Human
gcucaggggugggaucggggagc

SEQ ID NO: 444611 - RNA, 32 nt, Human
gcucagggucucaaacauggacgcccacugug

SEQ ID NO: 444612 - RNA, 32 nt, Human
gcucaggguggacagcugcucuugccaaccgg

SEQ ID NO: 444613 - RNA, 32 nt, Human
gcucagggugggcggaggaagcgguuagacgc

SEQ ID NO: 444614 - RNA, 32 nt, Human
gcucagguauaaccucaccuucccuggcucau

SEQ ID NO: 444615 - RNA, 20 nt, Human
gcucagguccgacccugcug

SEQ ID NO: 444616 - RNA, 32 nt, Human
gcucaggucuagggguuggggaauauuaaagu

SEQ ID NO: 444617 - RNA, 32 nt, Human
gcucaggucucacuccagccaucgcuguggcc

SEQ ID NO: 444618 - RNA, 32 nt, Human
gcucaggucuguggguucccuggucaugccau

SEQ ID NO: 444619 - RNA, 32 nt, Human
gcucaggucuguuuguaaaucuuuaauaaaua

SEQ ID NO: 444620 - RNA, 32 nt, Human
gcucaggugaguccucacaggcgugcugcagg

SEQ ID NO: 444621 - RNA, 32 nt, Human
gcucaggugauccucccaucucagccucucga

SEQ ID NO: 444622 - RNA, 32 nt, Human
gcucaggugauccucccaucucagccugccuc

SEQ ID NO: 444623 - RNA, 32 nt, Human
gcucaggugauccuccugccucaggccuuccc

SEQ ID NO: 444624 - RNA, 32 nt, Human
gcucaggugcagaagcagagccccuaacugga

SEQ ID NO: 444625 - RNA, 32 nt, Human
gcucaggugccaggucaggaugugggaggaca

SEQ ID NO: 444626 - RNA, 32 nt, Human
gcucaggugggacgagggcugcagugaaggcc

SEQ ID NO: 444627 - RNA, 32 nt, Human
gcucaggugggcagagcuuaaagggaacgccc

SEQ ID NO: 444628 - RNA, 32 nt, Human
gcucagguucaucauugaaacaucccaguguu

SEQ ID NO: 444629 - RNA, 32 nt, Human
gcucagguuccaagacucagcugccuaauccc

SEQ ID NO: 444630 - RNA, 18 nt, Human
gcucagguuguucacaga

SEQ ID NO: 444631 - RNA, 32 nt, Human
gcucagguuucugccuccagguacagucuggc

SEQ ID NO: 444632 - RNA, 20 nt, Human
gcucaguaaccagcugcgcc

SEQ ID NO: 444633 - RNA, 32 nt, Human
gcucaguaauuccuguuacuuuacagacagga

SEQ ID NO: 444634 - RNA, 32 nt, Human
gcucaguacagggcaggagcugcugugguguu

SEQ ID NO: 444635 - RNA, 20 nt, Human
gcucaguaccucagccaccu

SEQ ID NO: 444636 - RNA, 21 nt, Human
gcucaguagucagacuggaua

SEQ ID NO: 444637 - RNA, 32 nt, Human
gcucaguauagaacuacauuaucugcaaacuc

SEQ ID NO: 444638 - RNA, 32 nt, Human
gcucaguauuccuacaggguaagagguaggaa

SEQ ID NO: 444639 - RNA, 32 nt, Human
gcucagucaagaacuaagaaauaguaugaauu

SEQ ID NO: 444640 - RNA, 32 nt, Human
gcucagucaagggcuaaugauugcccaccccc

SEQ ID NO: 444641 - RNA, 32 nt, Human
gcucaguccuggaagaacguggccgccugccc

SEQ ID NO: 444642 - RNA, 32 nt, Human
gcucagucgcucaggcuggagugcaauggugg

SEQ ID NO: 444643 - RNA, 32 nt, Human
gcucagucuaggggaaggcagggccuuggucc

SEQ ID NO: 444644 - RNA, 32 nt, Human
gcucagucucaaaggcagaugcaucagagcca

SEQ ID NO: 444645 - RNA, 32 nt, Human
gcucagucuccaaguuccuuuaugaaacaggg

SEQ ID NO: 444646 - RNA, 32 nt, Human
gcucagucuccaggagacucagggccugccag

SEQ ID NO: 444647 - RNA, 32 nt, Human
gcucagucuggacucuacuuacacucauuuuu

SEQ ID NO: 444648 - RNA, 32 nt, Human
gcucagugaaaggcuucccuacccuuugcacu

SEQ ID NO: 444649 - RNA, 32 nt, Human
gcucagugacccuuucucuagggggacaucag

SEQ ID NO: 444650 - RNA, 32 nt, Human
gcucagugaugacgugggggaggugggagagg

SEQ ID NO: 444651 - RNA, 32 nt, Human
gcucagugcaaccuccgccuccuggguucaag

SEQ ID NO: 444652 - RNA, 32 nt, Human
gcucagugcaaccuugaccuccugggcucaag

SEQ ID NO: 444653 - RNA, 32 nt, Human
gcucagugcagccucaaacuccugggcucaag

SEQ ID NO: 444654 - RNA, 32 nt, Human
gcucagugcagccucaaacucuugggcucaag

SEQ ID NO: 444655 - RNA, 32 nt, Human
gcucagugcagccuccaacuccugggcucaau

SEQ ID NO: 444656 - RNA, 32 nt, Human
gcucagugcccuuuaagugcaucccgcugugc

SEQ ID NO: 444657 - RNA, 32 nt, Human
gcucagugccugagauugaaaaagucaacaua

SEQ ID NO: 444658 - RNA, 32 nt, Human
gcucagugcuauuuauauacuacaguaauuuu

SEQ ID NO: 444659 - RNA, 32 nt, Human
gcucagugcugcuggaugaugagggagaucaa

SEQ ID NO: 444660 - RNA, 20 nt, Human
gcucaguggagcagcugcgg

SEQ ID NO: 444661 - RNA, 32 nt, Human
gcucaguggaucaugaccaaacuccugucaug

SEQ ID NO: 444662 - RNA, 19 nt, Human
gcucaguggauugcagugg

SEQ ID NO: 444663 - RNA, 24 nt, Human
gcucaguggcucacaccuguaauc

SEQ ID NO: 444664 - RNA, 32 nt, Human
gcucaguguaugcuaggcaacaauucucccgc

SEQ ID NO: 444665 - RNA, 32 nt, Human
gcucagugucacagaccuuuguggaagcaaca

SEQ ID NO: 444666 - RNA, 32 nt, Human
gcucagugucaccuggcuauggaaggggcugg

SEQ ID NO: 444667 - RNA, 31 nt, Human
gcucagugucauccagggccugugucccucc

SEQ ID NO: 444668 - RNA, 32 nt, Human
gcucagugugacccaaccuccuaauuucccca

SEQ ID NO: 444669 - RNA, 19 nt, Human
gcucaguuccacgacacgc

SEQ ID NO: 444670 - RNA, 21 nt, Human
gcucaguuccaggaaggcuga

SEQ ID NO: 444671 - RNA, 32 nt, Human
gcucaguuccaguagcagaaccaccuuaguug

SEQ ID NO: 444672 - RNA, 32 nt, Human
gcucaguugcaucuggaaggugcagugugcac

SEQ ID NO: 444673 - RNA, 32 nt, Human
gcucaguugcccagacuggagagcaguggcca

SEQ ID NO: 444674 - RNA, 19 nt, Human
gcucaguuggcucccaaag

SEQ ID NO: 444675 - RNA, 32 nt, Human
gcucaguuuccaggugguuccucugccuggca

SEQ ID NO: 444676 - RNA, 32 nt, Human
gcucauaccuguaaaucccagcacuuugggag

SEQ ID NO: 444677 - RNA, 32 nt, Human
gcucauaccuguaaucccagcaauuugggagg

SEQ ID NO: 444678 - RNA, 32 nt, Human
gcucauaccuguaaucccagcacuuugggaag

SEQ ID NO: 444679 - RNA, 32 nt, Human
gcucauaccuguaaucccagcacuuugggagg

SEQ ID NO: 444680 - RNA, 32 nt, Human
gcucauaccuguaaucccagcaguuugggagg

SEQ ID NO: 444681 - RNA, 32 nt, Human
gcucauaccuguaaucccaggacuuugggagg

SEQ ID NO: 444682 - RNA, 32 nt, Human
gcucauaccuguaaucccggcacuuugggagg

SEQ ID NO: 444683 - RNA, 32 nt, Human
gcucauaccuguaauccuagcacucugggagg

SEQ ID NO: 444684 - RNA, 32 nt, Human
gcucauaccuguaaucucagcacugugggagg

SEQ ID NO: 444685 - RNA, 32 nt, Human
gcucauaccuguaaugccagcacuuugggagg

SEQ ID NO: 444686 - RNA, 32 nt, Human
gcucauaccuguuaauuccagcacuuugggag

SEQ ID NO: 444687 - RNA, 32 nt, Human
gcucauaccuguuauaccagcacuuugggagg

SEQ ID NO: 444688 - RNA, 31 nt, Human
gcucauacucauaauggccuguugaguuguu

SEQ ID NO: 444689 - RNA, 32 nt, Human
gcucauacugauucauuuugaucucugcuaau

SEQ ID NO: 444690 - RNA, 32 nt, Human
gcucauacuuguaacccagcacuuugggaagc

SEQ ID NO: 444691 - RNA, 32 nt, Human
gcucauagcaagcuccgccuccuggguucaug

SEQ ID NO: 444692 - RNA, 32 nt, Human
gcucauaucugugauuccagcacuuugagagg

SEQ ID NO: 444693 - RNA, 32 nt, Human
gcucauaugccaccuuuuuaaaccaauggaaa

SEQ ID NO: 444694 - RNA, 32 nt, Human
gcucauauguauaaucuuagcacuuugggagg

SEQ ID NO: 444695 - RNA, 32 nt, Human
gcucauauguuuagaauggucaagcaauccca

SEQ ID NO: 444696 - RNA, 32 nt, Human
gcucauauuccugaugcauuugccagaugcaa

SEQ ID NO: 444697 - RNA, 32 nt, Human
gcucauauuuacacuuacagcuuuucauuuga

SEQ ID NO: 444698 - RNA, 22 nt, Human
gcucaucaaacucucagcauau

SEQ ID NO: 444699 - RNA, 32 nt, Human
gcucaucacaguucuuuccucuuucugcucug

SEQ ID NO: 444700 - RNA, 22 nt, Human
gcucaucacauguccuucccca

SEQ ID NO: 444701 - RNA, 27 nt, Human
gcucaucacccuuccacauccuccucc

SEQ ID NO: 444702 - RNA, 32 nt, Human
gcucaucaccuugggaggccacuguaggagga

SEQ ID NO: 444703 - RNA, 32 nt, Human
gcucaucagacugaaacuugcucacagacuuc

SEQ ID NO: 444704 - RNA, 32 nt, Human
gcucaucagccaaaacucaagccuugccuuuu

SEQ ID NO: 444705 - RNA, 24 nt, Human
gcucaucaucccuucuucauacca

SEQ ID NO: 444706 - RNA, 32 nt, Human
gcucauccauccacagagcagugcagugggag

SEQ ID NO: 444707 - RNA, 32 nt, Human
gcucaucccaaagcauuugccucuuuuguguc

SEQ ID NO: 444708 - RNA, 32 nt, Human
gcucaucccuguaaucccagugcuuugggagg

SEQ ID NO: 444709 - RNA, 32 nt, Human
gcucaucccuguaauuccagcacuuuggaagg

SEQ ID NO: 444710 - RNA, 27 nt, Human
gcucaucccuuuuagggcaacaaggaa

SEQ ID NO: 444711 - RNA, 32 nt, Human
gcucauccgccguggagagcgaggccacgcac

SEQ ID NO: 444712 - RNA, 21 nt, Human
gcucauccgugucucugaaga

SEQ ID NO: 444713 - RNA, 32 nt, Human
gcucauccugggagagaggugacaaguucaga

SEQ ID NO: 444714 - RNA, 32 nt, Human
gcucaucggagaagaaagaauggcugucagcc

SEQ ID NO: 444715 - RNA, 32 nt, Human
gcucaucguaaccuccaccucccggguucaag

SEQ ID NO: 444716 - RNA, 32 nt, Human
gcucaucgucuagugaggaaggcaugugugaa

SEQ ID NO: 444717 - RNA, 32 nt, Human
gcucaucguuucuucccggaaacaucugcaga

SEQ ID NO: 444718 - RNA, 32 nt, Human
gcucaucuaacaggcuggaguuuucaggcaga

SEQ ID NO: 444719 - RNA, 32 nt, Human
gcucaucuacauuggcauucuggaccaugccc

SEQ ID NO: 444720 - RNA, 32 nt, Human
gcucaucuaggguggacccagcugcuggggaa

SEQ ID NO: 444721 - RNA, 32 nt, Human
gcucaucuccauuagaaaauggagucaucuua

SEQ ID NO: 444722 - RNA, 32 nt, Human
gcucaucucccaggauggugacuaaguagcuu

SEQ ID NO: 444723 - RNA, 32 nt, Human
gcucaucucgugaccucugccacccacauccu

SEQ ID NO: 444724 - RNA, 32 nt, Human
gcucaucucuccccauuucuuucuucccauaa

SEQ ID NO: 444725 - RNA, 32 nt, Human
gcucaucucugaguucucaggacccuugcccc

SEQ ID NO: 444726 - RNA, 32 nt, Human
gcucaucugccugggcccgugcaguuuugcag

SEQ ID NO: 444727 - RNA, 32 nt, Human
gcucaucugggcagaggaagcuucagaaagcu

SEQ ID NO: 444728 - RNA, 24 nt, Human
gcucaucuuagcuuacaaacacua

SEQ ID NO: 444729 - RNA, 32 nt, Human
gcucaucuucaugaccuacaauggguaccucu

SEQ ID NO: 444730 - RNA, 18 nt, Human
gcucaucuugaaacuuga

SEQ ID NO: 444731 - RNA, 28 nt, Human
gcucaucuuuggauugccucaucauccc

SEQ ID NO: 444732 - RNA, 21 nt, Human
gcucaugacagcacccugcug

SEQ ID NO: 444733 - RNA, 19 nt, Human
gcucaugacuguaauccca

SEQ ID NO: 444734 - RNA, 32 nt, Human
gcucaugacuguaaucccaacacuuuggagga

SEQ ID NO: 444735 - RNA, 32 nt, Human
gcucaugacuguaaucccagcacuuugggagg

SEQ ID NO: 444736 - RNA, 32 nt, Human
gcucaugacuguaaucccaguacuuugggaag

SEQ ID NO: 444737 - RNA, 32 nt, Human
gcucaugauaacuuacgggauaacaauaguag

SEQ ID NO: 444738 - RNA, 32 nt, Human
gcucaugauguucuuucuggagguucaacacu

SEQ ID NO: 444739 - RNA, 32 nt, Human
gcucaugcacaugcaacaggugcgucugucua

SEQ ID NO: 444740 - RNA, 31 nt, Human
gcucaugcacuuuauguauauguuccaggaa

SEQ ID NO: 444741 - RNA, 32 nt, Human
gcucaugcauguaaucccagcacuuugggagg

SEQ ID NO: 444742 - RNA, 32 nt, Human
gcucaugcaugugucaaugucauaacugucuu

SEQ ID NO: 444743 - RNA, 32 nt, Human
gcucaugccacaggaucccagcacuuugggag

SEQ ID NO: 444744 - RNA, 32 nt, Human
gcucaugccagcaauccuagcacuuugggagg

SEQ ID NO: 444745 - RNA, 32 nt, Human
gcucaugccaguuaucccagcacuuugggagg

SEQ ID NO: 444746 - RNA, 32 nt, Human
gcucaugcccauaaucccagcacuuugggaga

SEQ ID NO: 444747 - RNA, 32 nt, Human
gcucaugcccguaaucccagcacuuugggaga

SEQ ID NO: 444748 - RNA, 32 nt, Human
gcucaugcccguaaucccagcacuuugguagg

SEQ ID NO: 444749 - RNA, 32 nt, Human
gcucaugcccguaaucucagcacuuugggagg

SEQ ID NO: 444750 - RNA, 32 nt, Human
gcucaugcccguaauuucugcacuuugggaga

SEQ ID NO: 444751 - RNA, 32 nt, Human
gcucaugcccucaauguuuauauuguguuauc

SEQ ID NO: 444752 - RNA, 17 nt, Human
gcucaugcccuucagcu

SEQ ID NO: 444753 - RNA, 32 nt, Human
gcucaugccgguaaucucagcacuuugggagg

SEQ ID NO: 444754 - RNA, 32 nt, Human
gcucaugccuauaaaauuccagcacuuuggga

SEQ ID NO: 444755 - RNA, 19 nt, Human
gcucaugccuauaauccca

SEQ ID NO: 444756 - RNA, 32 nt, Human
gcucaugccuauaaucccagcacuuuaggagc

SEQ ID NO: 444757 - RNA, 32 nt, Human
gcucaugccuauaaucccagcacuuuaggagg

SEQ ID NO: 444758 - RNA, 32 nt, Human
gcucaugccuauaaucccagcacuuugagagg

SEQ ID NO: 444759 - RNA, 32 nt, Human
gcucaugccuauaaucccagcacuuuggcagg

SEQ ID NO: 444760 - RNA, 32 nt, Human
gcucaugccuauaaucccagcacuuugggaag

SEQ ID NO: 444761 - RNA, 32 nt, Human
gcucaugccuauaaucccagcacuuugggagg

SEQ ID NO: 444762 - RNA, 32 nt, Human
gcucaugccuauaaucccagcacuuuuggagg

SEQ ID NO: 444763 - RNA, 32 nt, Human
gcucaugccuauaaucccggcacuuugggagg

SEQ ID NO: 444764 - RNA, 32 nt, Human
gcucaugccuauaaucccggcacuuugggagu

SEQ ID NO: 444765 - RNA, 32 nt, Human
gcucaugccuauaauccuagcacuuugagagg

SEQ ID NO: 444766 - RNA, 32 nt, Human
gcucaugccuauaauccuagcacuuugggagg

SEQ ID NO: 444767 - RNA, 32 nt, Human
gcucaugccuauaaucucagcacuuuugggag

SEQ ID NO: 444768 - RNA, 32 nt, Human
gcucaugccuauaaucuuagcacuuugggagg

SEQ ID NO: 444769 - RNA, 32 nt, Human
gcucaugccuauaauuccagcacuuuggaggg

SEQ ID NO: 444770 - RNA, 32 nt, Human
gcucaugccuauaauuccagcacuuugggagg

SEQ ID NO: 444771 - RNA, 32 nt, Human
gcucaugccuauagucccagcacuuugggagg

SEQ ID NO: 444772 - RNA, 32 nt, Human
gcucaugccuauauucccagcacuuugagagg

SEQ ID NO: 444773 - RNA, 32 nt, Human
gcucaugccuauauucccugcacuuugggagg

SEQ ID NO: 444774 - RNA, 32 nt, Human
gcucaugccuauuaucccagcacuuugggagg

SEQ ID NO: 444775 - RNA, 32 nt, Human
gcucaugccucuaaucccagcacuuugggagg

SEQ ID NO: 444776 - RNA, 32 nt, Human
gcucaugccugaaauccuagcacuuugggaag

SEQ ID NO: 444777 - RNA, 32 nt, Human
gcucaugccugcaaucccagcacuuugggagg

SEQ ID NO: 444778 - RNA, 32 nt, Human
gcucaugccugcaauuccagcacuuugggagg

SEQ ID NO: 444779 - RNA, 32 nt, Human
gcucaugccuggaaucccagcacuuugagagg

SEQ ID NO: 444780 - RNA, 32 nt, Human
gcucaugccuggaaucccagcacuuugggagg

SEQ ID NO: 444781 - RNA, 32 nt, Human
gcucaugccuguaaacccagcacuuugggagg

SEQ ID NO: 444782 - RNA, 32 nt, Human
gcucaugccuguaaaucccagcacuuugguag

SEQ ID NO: 444783 - RNA, 32 nt, Human
gcucaugccuguaaccccagcacuuugggagg

SEQ ID NO: 444784 - RNA, 32 nt, Human
gcucaugccuguaaccucagcacuuugggagg

SEQ ID NO: 444785 - RNA, 32 nt, Human
gcucaugccuguaagcccaacacuuugggagg

SEQ ID NO: 444786 - RNA, 32 nt, Human
gcucaugccuguaagcccagcacuuugggagg

SEQ ID NO: 444787 - RNA, 32 nt, Human
gcucaugccuguaauagcagcuacucgggagg

SEQ ID NO: 444788 - RNA, 32 nt, Human
gcucaugccuguaaucaaucccagcacuuugg

SEQ ID NO: 444789 - RNA, 32 nt, Human
gcucaugccuguaaucauagcauuaugggagg

SEQ ID NO: 444790 - RNA, 32 nt, Human
gcucaugccuguaauccaacauugggaggcca

SEQ ID NO: 444791 - RNA, 32 nt, Human
gcucaugccuguaauccaagcauuuugagagg

SEQ ID NO: 444792 - RNA, 32 nt, Human
gcucaugccuguaauccagcacuuugggaggc

SEQ ID NO: 444793 - RNA, 32 nt, Human
gcucaugccuguaauccaguacuuuaggaggc

SEQ ID NO: 444794 - RNA, 18 nt, Human
gcucaugccuguaauccc

SEQ ID NO: 444795 - RNA, 19 nt, Human
gcucaugccuguaauccca

SEQ ID NO: 444796 - RNA, 32 nt, Human
gcucaugccuguaaucccaaaacuuugggagu

SEQ ID NO: 444797 - RNA, 32 nt, Human
gcucaugccuguaaucccaacacucugggagg

SEQ ID NO: 444798 - RNA, 32 nt, Human
gcucaugccuguaaucccaacacuuugagaag

SEQ ID NO: 444799 - RNA, 32 nt, Human
gcucaugccuguaaucccaacacuuugagagg

SEQ ID NO: 444800 - RNA, 32 nt, Human
gcucaugccuguaaucccaacacuuugggaga

SEQ ID NO: 444801 - RNA, 32 nt, Human
gcucaugccuguaaucccaacacuuugggagg

SEQ ID NO: 444802 - RNA, 32 nt, Human
gcucaugccuguaaucccaacacuuugggagu

SEQ ID NO: 444803 - RNA, 32 nt, Human
gcucaugccuguaaucccaacacuuuugggag

SEQ ID NO: 444804 - RNA, 32 nt, Human
gcucaugccuguaaucccaacauucugggagg

SEQ ID NO: 444805 - RNA, 32 nt, Human
gcucaugccuguaaucccaauacuuugggagg

SEQ ID NO: 444806 - RNA, 32 nt, Human
gcucaugccuguaaucccaccacuuugggagg

SEQ ID NO: 444807 - RNA, 32 nt, Human
gcucaugccuguaaucccaccacuuugggugg

SEQ ID NO: 444808 - RNA, 32 nt, Human
gcucaugccuguaaucccagaacuuugggagg

SEQ ID NO: 444809 - RNA, 32 nt, Human
gcucaugccuguaaucccagaauuuugggagg

SEQ ID NO: 444810 - RNA, 21 nt, Human
gcucaugccuguaaucccagc

SEQ ID NO: 444811 - RNA, 32 nt, Human
gcucaugccuguaaucccagcaauuuaggagg

SEQ ID NO: 444812 - RNA, 32 nt, Human
gcucaugccuguaaucccagcacauugggaag

SEQ ID NO: 444813 - RNA, 32 nt, Human
gcucaugccuguaaucccagcaccuugaaggc

SEQ ID NO: 444814 - RNA, 32 nt, Human
gcucaugccuguaaucccagcaccuugggagg

SEQ ID NO: 444815 - RNA, 32 nt, Human
gcucaugccuguaaucccagcacuaugggagg

SEQ ID NO: 444816 - RNA, 32 nt, Human
gcucaugccuguaaucccagcacucuggaagg

SEQ ID NO: 444817 - RNA, 32 nt, Human
gcucaugccuguaaucccagcacucugggagg

SEQ ID NO: 444818 - RNA, 32 nt, Human
gcucaugccuguaaucccagcacuguaggcgg

SEQ ID NO: 444819 - RNA, 32 nt, Human
gcucaugccuguaaucccagcacugugggaga

SEQ ID NO: 444820 - RNA, 32 nt, Human
gcucaugccuguaaucccagcacugugggagg

SEQ ID NO: 444821 - RNA, 32 nt, Human
gcucaugccuguaaucccagcacuuauuuuau

SEQ ID NO: 444822 - RNA, 32 nt, Human
gcucaugccuguaaucccagcacuucaggagg

SEQ ID NO: 444823 - RNA, 32 nt, Human
gcucaugccuguaaucccagcacuucgggagg

SEQ ID NO: 444824 - RNA, 32 nt, Human
gcucaugccuguaaucccagcacuuggagagg

SEQ ID NO: 444825 - RNA, 32 nt, Human
gcucaugccuguaaucccagcacuugggaggc

SEQ ID NO: 444826 - RNA, 32 nt, Human
gcucaugccuguaaucccagcacuuggggagg

SEQ ID NO: 444827 - RNA, 32 nt, Human
gcucaugccuguaaucccagcacuuucaaagg

SEQ ID NO: 444828 - RNA, 32 nt, Human
gcucaugccuguaaucccagcacuuucagagg

SEQ ID NO: 444829 - RNA, 32 nt, Human
gcucaugccuguaaucccagcacuuucggagg

SEQ ID NO: 444830 - RNA, 32 nt, Human
gcucaugccuguaaucccagcacuuugagaga

SEQ ID NO: 444831 - RNA, 32 nt, Human
gcucaugccuguaaucccagcacuuugagagg

SEQ ID NO: 444832 - RNA, 32 nt, Human
gcucaugccuguaaucccagcacuuugauagg

SEQ ID NO: 444833 - RNA, 32 nt, Human
gcucaugccuguaaucccagcacuuugcgagg

SEQ ID NO: 444834 - RNA, 32 nt, Human
gcucaugccuguaaucccagcacuuuggaagg

SEQ ID NO: 444835 - RNA, 32 nt, Human
gcucaugccuguaaucccagcacuuuggcagg

SEQ ID NO: 444836 - RNA, 32 nt, Human
gcucaugccuguaaucccagcacuuugggaag

SEQ ID NO: 444837 - RNA, 32 nt, Human
gcucaugccuguaaucccagcacuuugggaga

SEQ ID NO: 444838 - RNA, 32 nt, Human
gcucaugccuguaaucccagcacuuugggagg

SEQ ID NO: 444839 - RNA, 32 nt, Human
gcucaugccuguaaucccagcacuuugggagu

SEQ ID NO: 444840 - RNA, 32 nt, Human
gcucaugccuguaaucccagcacuuugggaug

SEQ ID NO: 444841 - RNA, 32 nt, Human
gcucaugccuguaaucccagcacuuugggauu

SEQ ID NO: 444842 - RNA, 32 nt, Human
gcucaugccuguaaucccagcacuuuggggag

SEQ ID NO: 444843 - RNA, 32 nt, Human
gcucaugccuguaaucccagcacuuugggggc

SEQ ID NO: 444844 - RNA, 32 nt, Human
gcucaugccuguaaucccagcacuuugguagg

SEQ ID NO: 444845 - RNA, 32 nt, Human
gcucaugccuguaaucccagcacuuuucggag

SEQ ID NO: 444846 - RNA, 32 nt, Human
gcucaugccuguaaucccagcacuuuugaggc

SEQ ID NO: 444847 - RNA, 32 nt, Human
gcucaugccuguaaucccagcacuuuuggagg

SEQ ID NO: 444848 - RNA, 32 nt, Human
gcucaugccuguaaucccagcauuuugagagg

SEQ ID NO: 444849 - RNA, 32 nt, Human
gcucaugccuguaaucccagcauuuuggaagg

SEQ ID NO: 444850 - RNA, 32 nt, Human
gcucaugccuguaaucccagcauuuugggaga

SEQ ID NO: 444851 - RNA, 32 nt, Human
gcucaugccuguaaucccagcauuuugggagg

SEQ ID NO: 444852 - RNA, 32 nt, Human
gcucaugccuguaaucccagcauuuugguagg

SEQ ID NO: 444853 - RNA, 32 nt, Human
gcucaugccuguaaucccagcccuuugggagg

SEQ ID NO: 444854 - RNA, 32 nt, Human
gcucaugccuguaaucccagcgcuuugggagg

SEQ ID NO: 444855 - RNA, 32 nt, Human
gcucaugccuguaaucccaggacuuugggagg

SEQ ID NO: 444856 - RNA, 32 nt, Human
gcucaugccuguaaucccaggacuuugguagg

SEQ ID NO: 444857 - RNA, 21 nt, Human
gcucaugccuguaaucccagu

SEQ ID NO: 444858 - RNA, 32 nt, Human
gcucaugccuguaaucccaguacuuugggagg

SEQ ID NO: 444859 - RNA, 32 nt, Human
gcucaugccuguaaucccagugcuuugggagg

SEQ ID NO: 444860 - RNA, 32 nt, Human
gcucaugccuguaaucccgacacuuugggagg

SEQ ID NO: 444861 - RNA, 32 nt, Human
gcucaugccuguaaucccggcacuuugggagg

SEQ ID NO: 444862 - RNA, 21 nt, Human
gcucaugccuguaaucccugc

SEQ ID NO: 444863 - RNA, 32 nt, Human
gcucaugccuguaaucccugcaauuugggaga

SEQ ID NO: 444864 - RNA, 32 nt, Human
gcucaugccuguaaucccugcacuuugggagg

SEQ ID NO: 444865 - RNA, 32 nt, Human
gcucaugccuguaaucccugcacuuugggaug

SEQ ID NO: 444866 - RNA, 32 nt, Human
gcucaugccuguaauccgagcacuucgggaag

SEQ ID NO: 444867 - RNA, 32 nt, Human
gcucaugccuguaauccgagcacuuugggagg

SEQ ID NO: 444868 - RNA, 19 nt, Human
gcucaugccuguaauccua

SEQ ID NO: 444869 - RNA, 32 nt, Human
gcucaugccuguaauccuaacacuuugggagg

SEQ ID NO: 444870 - RNA, 21 nt, Human
gcucaugccuguaauccuagc

SEQ ID NO: 444871 - RNA, 32 nt, Human
gcucaugccuguaauccuagcacuuugagagg

SEQ ID NO: 444872 - RNA, 32 nt, Human
gcucaugccuguaauccuagcacuuuggaagg

SEQ ID NO: 444873 - RNA, 32 nt, Human
gcucaugccuguaauccuagcacuuugggaag

SEQ ID NO: 444874 - RNA, 32 nt, Human
gcucaugccuguaauccuagcacuuugggagg

SEQ ID NO: 444875 - RNA, 32 nt, Human
gcucaugccuguaauccuagcacuuuggggga

SEQ ID NO: 444876 - RNA, 32 nt, Human
gcucaugccuguaauccuagcacuuugggugg

SEQ ID NO: 444877 - RNA, 32 nt, Human
gcucaugccuguaauccuagcagcuugggagg

SEQ ID NO: 444878 - RNA, 32 nt, Human
gcucaugccuguaauccuagcagguugggagg

SEQ ID NO: 444879 - RNA, 32 nt, Human
gcucaugccuguaauccuagcauuuugggagg

SEQ ID NO: 444880 - RNA, 32 nt, Human
gcucaugccuguaauccuggcacuuugggagg

SEQ ID NO: 444881 - RNA, 32 nt, Human
gcucaugccuguaaucgcagcacuuugggagg

SEQ ID NO: 444882 - RNA, 32 nt, Human
gcucaugccuguaaucguagcacuuugagagg

SEQ ID NO: 444883 - RNA, 32 nt, Human
gcucaugccuguaaucucaacacuuugggaag

SEQ ID NO: 444884 - RNA, 32 nt, Human
gcucaugccuguaaucucagaacuuugggagg

SEQ ID NO: 444885 - RNA, 32 nt, Human
gcucaugccuguaaucucagcaauuugggagg

SEQ ID NO: 444886 - RNA, 32 nt, Human
gcucaugccuguaaucucagcacuguaggagg

SEQ ID NO: 444887 - RNA, 32 nt, Human
gcucaugccuguaaucucagcacuuugagagg

SEQ ID NO: 444888 - RNA, 32 nt, Human
gcucaugccuguaaucucagcacuuugggaga

SEQ ID NO: 444889 - RNA, 32 nt, Human
gcucaugccuguaaucucagcacuuugggagg

SEQ ID NO: 444890 - RNA, 32 nt, Human
gcucaugccuguaaucucagcuacuuggcugg

SEQ ID NO: 444891 - RNA, 32 nt, Human
gcucaugccuguaaucucaguacauugggagg

SEQ ID NO: 444892 - RNA, 32 nt, Human
gcucaugccuguaaucucaguacuuugggagg

SEQ ID NO: 444893 - RNA, 22 nt, Human
gcucaugccuguaaucuccagc

SEQ ID NO: 444894 - RNA, 32 nt, Human
gcucaugccuguaaucuccagcacuuugggag

SEQ ID NO: 444895 - RNA, 32 nt, Human
gcucaugccuguaaucugagcacuuugggaga

SEQ ID NO: 444896 - RNA, 32 nt, Human
gcucaugccuguaaucuuaucacuuugggagg

SEQ ID NO: 444897 - RNA, 32 nt, Human
gcucaugccuguaaugccagcacuuugccaag

SEQ ID NO: 444898 - RNA, 32 nt, Human
gcucaugccuguaauuccagcacuuuaggagg

SEQ ID NO: 444899 - RNA, 32 nt, Human
gcucaugccuguaauuccagcacuuugggagg

SEQ ID NO: 444900 - RNA, 32 nt, Human
gcucaugccuguaauuccggcacuuugggagg

SEQ ID NO: 444901 - RNA, 32 nt, Human
gcucaugccuguaauuucaguacuuugggagg

SEQ ID NO: 444902 - RNA, 32 nt, Human
gcucaugccuguagucccagcacucgggaagg

SEQ ID NO: 444903 - RNA, 32 nt, Human
gcucaugccuguagucccagcacucugugggg

SEQ ID NO: 444904 - RNA, 32 nt, Human
gcucaugccuguagucccagcacuuugggaga

SEQ ID NO: 444905 - RNA, 32 nt, Human
gcucaugccuguagucccagcacuuugggagg

SEQ ID NO: 444906 - RNA, 32 nt, Human
gcucaugccuguagucccagcuacucuggagg

SEQ ID NO: 444907 - RNA, 32 nt, Human
gcucaugccuguagucccagcuacuugggagg

SEQ ID NO: 444908 - RNA, 32 nt, Human
gcucaugccuguaguccuagcacuuugggagg

SEQ ID NO: 444909 - RNA, 32 nt, Human
gcucaugccuguaguuccagcgcuuugggagg

SEQ ID NO: 444910 - RNA, 32 nt, Human
gcucaugccuguauaaucccagcacuuuggga

SEQ ID NO: 444911 - RNA, 32 nt, Human
gcucaugccuguauccagcacuuugggaggcc

SEQ ID NO: 444912 - RNA, 32 nt, Human
gcucaugccuguaucccagcacuuugggaggc

SEQ ID NO: 444913 - RNA, 32 nt, Human
gcucaugccuguaucccagcccuuugggaggc

SEQ ID NO: 444914 - RNA, 32 nt, Human
gcucaugccuguauucccaccacuuugggagg

SEQ ID NO: 444915 - RNA, 32 nt, Human
gcucaugccuguauucccaguacuuugggagc

SEQ ID NO: 444916 - RNA, 32 nt, Human
gcucaugccugucaucccagcacuuugggaag

SEQ ID NO: 444917 - RNA, 32 nt, Human
gcucaugccugucaucccagcacuuugggagg

SEQ ID NO: 444918 - RNA, 32 nt, Human
gcucaugccugugaucccagcacuuugggagg

SEQ ID NO: 444919 - RNA, 32 nt, Human
gcucaugccugugaucccagcacuuugggugg

SEQ ID NO: 444920 - RNA, 32 nt, Human
gcucaugccugugauccuagcacuuugcgagg

SEQ ID NO: 444921 - RNA, 32 nt, Human
gcucaugccugugauccuagcacuuugggagu

SEQ ID NO: 444922 - RNA, 32 nt, Human
gcucaugccugugaucgcagcacuuugggagg

SEQ ID NO: 444923 - RNA, 32 nt, Human
gcucaugccuguggucccagcacuuugggagg

SEQ ID NO: 444924 - RNA, 32 nt, Human
gcucaugccuuaaucccagcacuuugggaggu

SEQ ID NO: 444925 - RNA, 32 nt, Human
gcucaugccuuaaucccagcacuuuuggaggc

SEQ ID NO: 444926 - RNA, 32 nt, Human
gcucaugccuuuaaucccagcacuuugggagg

SEQ ID NO: 444927 - RNA, 32 nt, Human
gcucaugcgacugcacuccagccugggugacu

SEQ ID NO: 444928 - RNA, 32 nt, Human
gcucaugcguguaaucccagcacuuugggagg

SEQ ID NO: 444929 - RNA, 32 nt, Human
gcucaugcuccuggugcugcugggacuugggg

SEQ ID NO: 444930 - RNA, 32 nt, Human
gcucaugcugccggcccugcgccugcccagcc

SEQ ID NO: 444931 - RNA, 32 nt, Human
gcucaugcuggucucaaacuccugggcucaag

SEQ ID NO: 444932 - RNA, 19 nt, Human
gcucaugcuuguaauccca

SEQ ID NO: 444933 - RNA, 21 nt, Human
gcucaugcuuguaaucccagc

SEQ ID NO: 444934 - RNA, 32 nt, Human
gcucaugcuuguaaucccagcacuuggggagg

SEQ ID NO: 444935 - RNA, 32 nt, Human
gcucaugcuuguaaucccagcacuuugggaag

SEQ ID NO: 444936 - RNA, 32 nt, Human
gcucaugcuuguaaucccagcacuuugggagg

SEQ ID NO: 444937 - RNA, 32 nt, Human
gcucaugcuuguaaucccagcacuuugguagg

SEQ ID NO: 444938 - RNA, 32 nt, Human
gcucaugcuuguaauccuagcacuuuuugagg

SEQ ID NO: 444939 - RNA, 19 nt, Human
gcucaugcuuguaaucuca

SEQ ID NO: 444940 - RNA, 32 nt, Human
gcucaugcuuguaaucucaacauuuugggagg

SEQ ID NO: 444941 - RNA, 32 nt, Human
gcucaugcuuguaaucucaccacuuugggagg

SEQ ID NO: 444942 - RNA, 32 nt, Human
gcucaugcuuguaaucucagcacuuugggagu

SEQ ID NO: 444943 - RNA, 20 nt, Human
gcucauggagcacaagcaga

SEQ ID NO: 444944 - RNA, 17 nt, Human
gcucauggagcgcaggg

SEQ ID NO: 444945 - RNA, 29 nt, Human
gcucauggcgggcggaggagccggggacc

SEQ ID NO: 444946 - RNA, 32 nt, Human
gcucauggcuacgcuccagccccgggugugga

SEQ ID NO: 444947 - RNA, 32 nt, Human
gcucaugggaucugguuguuuagaagcaugca

SEQ ID NO: 444948 - RNA, 32 nt, Human
gcucaugggcucugagccaaagaaggaggcau

SEQ ID NO: 444949 - RNA, 24 nt, Human
gcucaugguuaaugcaggcaggug

SEQ ID NO: 444950 - RNA, 32 nt, Human
gcucaugucuauaaucccagcacuuugggagg

SEQ ID NO: 444951 - RNA, 32 nt, Human
gcucaugucucuaaucccagcacuuugggaga

SEQ ID NO: 444952 - RNA, 19 nt, Human
gcucaugucuguaauccca

SEQ ID NO: 444953 - RNA, 21 nt, Human
gcucaugucuguaaucccagc

SEQ ID NO: 444954 - RNA, 29 nt, Human
gcucaugucuguaaucccagcacuuuggg

SEQ ID NO: 444955 - RNA, 32 nt, Human
gcucaugucuguaaucccagcacuuugggagg

SEQ ID NO: 444956 - RNA, 29 nt, Human
gcucaugucuuacccugucaucuugccag

SEQ ID NO: 444957 - RNA, 29 nt, Human
gcucaugucuuacccugucuucuugccag

SEQ ID NO: 444958 - RNA, 32 nt, Human
gcucaugugugggcacacacgcacaaacacac

SEQ ID NO: 444959 - RNA, 32 nt, Human
gcucauguguuuuggggacaaaagugaaauga

SEQ ID NO: 444960 - RNA, 32 nt, Human
gcucauguuucuuuggucauucuguccauccu

SEQ ID NO: 444961 - RNA, 32 nt, Human
gcucauguuuguaaaucccagcacuuugggaa

SEQ ID NO: 444962 - RNA, 32 nt, Human
gcucauguuuguaaucccagcacuuuggggga

SEQ ID NO: 444963 - RNA, 32 nt, Human
gcucauguuuguaauccuagcacuuugggagg

SEQ ID NO: 444964 - RNA, 22 nt, Human
gcucauuaaacagccuccccca

SEQ ID NO: 444965 - RNA, 32 nt, Human
gcucauuacaaccuccaccucccggguucagg

SEQ ID NO: 444966 - RNA, 32 nt, Human
gcucauuacagccuccgccuccugggcucaag

SEQ ID NO: 444967 - RNA, 32 nt, Human
gcucauuacaguucuuuccucuuucugcucug

SEQ ID NO: 444968 - RNA, 19 nt, Human
gcucauuaccugccaucca

SEQ ID NO: 444969 - RNA, 32 nt, Human
gcucauucaaagauguucucagugcaacugag

SEQ ID NO: 444970 - RNA, 32 nt, Human
gcucauucaaagcugaaucagaaaccagccgu

SEQ ID NO: 444971 - RNA, 32 nt, Human
gcucauucacucaaaaagcaacagugagacag

SEQ ID NO: 444972 - RNA, 21 nt, Human
gcucauucacugcaaacuccc

SEQ ID NO: 444973 - RNA, 32 nt, Human
gcucauucagcaucugaccucuaccuucauaa

SEQ ID NO: 444974 - RNA, 32 nt, Human
gcucauuccccgagcacuccagccuggcaguc

SEQ ID NO: 444975 - RNA, 32 nt, Human
gcucauucccugggagugcacacacugagccc

SEQ ID NO: 444976 - RNA, 32 nt, Human
gcucauuccuguaaucccagcacuuugggagg

SEQ ID NO: 444977 - RNA, 32 nt, Human
gcucauuccuguaaucccagcucuuugggagg

SEQ ID NO: 444978 - RNA, 20 nt, Human
gcucauucgucacccuguug

SEQ ID NO: 444979 - RNA, 20 nt, Human
gcucauucugucccaugcug

SEQ ID NO: 444980 - RNA, 32 nt, Human
gcucauugaagccucgcacuccugggcucaag

SEQ ID NO: 444981 - RNA, 32 nt, Human
gcucauugcaaccuccgccuccuggguucaag

SEQ ID NO: 444982 - RNA, 32 nt, Human
gcucauugcaacuuccaccuccuggguugaag

SEQ ID NO: 444983 - RNA, 32 nt, Human
gcucauugcaacuuccacuucccagguucaag

SEQ ID NO: 444984 - RNA, 32 nt, Human
gcucauugcaccugggagggcaccuggagcuc

SEQ ID NO: 444985 - RNA, 32 nt, Human
gcucauugcagccucaaacuccugggcucaag

SEQ ID NO: 444986 - RNA, 22 nt, Human
gcucauugcagccucaaccucc

SEQ ID NO: 444987 - RNA, 32 nt, Human
gcucauugcagccuccacuuccugggcucaag

SEQ ID NO: 444988 - RNA, 32 nt, Human
gcucauugcagccucgaacuccugggcucaua

SEQ ID NO: 444989 - RNA, 32 nt, Human
gcucauugcagccuucaauuccugggcucagg

SEQ ID NO: 444990 - RNA, 32 nt, Human
gcucauugcagcuuugaccuccugggcuuagg

SEQ ID NO: 444991 - RNA, 32 nt, Human
gcucauugcaucuuugaccuccugggcucagc

SEQ ID NO: 444992 - RNA, 32 nt, Human
gcucauugcucuucagagagagugguuggagc

SEQ ID NO: 444993 - RNA, 32 nt, Human
gcucauugcuuucuaagaucuaaaaugauacu

SEQ ID NO: 444994 - RNA, 32 nt, Human
gcucauuggauucagguauuuuucccuuugca

SEQ ID NO: 444995 - RNA, 32 nt, Human
gcucauuuccacccaaccccaggauuuccaca

SEQ ID NO: 444996 - RNA, 32 nt, Human
gcucauuuccacccagccccaggauuuccaga

SEQ ID NO: 444997 - RNA, 24 nt, Human
gcucauuucuaucauucuccccca

SEQ ID NO: 444998 - RNA, 20 nt, Human
gcucauuucuguguugccuu

SEQ ID NO: 444999 - RNA, 18 nt, Human
gcucauuugcuugccuug

SEQ ID NO: 445000 - RNA, 16 nt, Human
gcucauuuggguucag

SEQ ID NO: 445001 - RNA, 18 nt, Human
gcucauuugguucaggca

SEQ ID NO: 445002 - RNA, 32 nt, Human
gcuccaaaaagccccagaaagaguaugccuuc

SEQ ID NO: 445003 - RNA, 26 nt, Human
gcuccaaaauggucuccugguccgug

SEQ ID NO: 445004 - RNA, 32 nt, Human
gcuccaaaccuguaaggacccaggagggcuuc

SEQ ID NO: 445005 - RNA, 32 nt, Human
gcuccaaacuauuauccagacccauaacccca

SEQ ID NO: 445006 - RNA, 20 nt, Human
gcuccaaaguucuugaagca

SEQ ID NO: 445007 - RNA, 32 nt, Human
gcuccaacaauccucccaucucagccucugaa

SEQ ID NO: 445008 - RNA, 32 nt, Human
gcuccaacacaaaugcugccuccuuuaggaug

SEQ ID NO: 445009 - RNA, 32 nt, Human
gcuccaacaucaccagccucgguugacgugga

SEQ ID NO: 445010 - RNA, 32 nt, Human
gcuccaaccccucaaccucuaucucauagaug

SEQ ID NO: 445011 - RNA, 21 nt, Human
gcuccaaccucucuggucuuc

SEQ ID NO: 445012 - RNA, 32 nt, Human
gcuccaaccugcaaagaucuguccucagccuu

SEQ ID NO: 445013 - RNA, 32 nt, Human
gcuccaacucacugcucacccucuucugugag

SEQ ID NO: 445014 - RNA, 31 nt, Human
gcuccaacucccucagggccuguguugccgc

SEQ ID NO: 445015 - RNA, 32 nt, Human
gcuccaacugcuacaacagauccaucaagcaa

SEQ ID NO: 445016 - RNA, 32 nt, Human
gcuccaacuuccugcugacagggggcuuagug

SEQ ID NO: 445017 - RNA, 32 nt, Human
gcuccaagaaauagacagaaaguccccugaac

SEQ ID NO: 445018 - RNA, 32 nt, Human
gcuccaagacacugaccgggcuuuucagagcc

SEQ ID NO: 445019 - RNA, 32 nt, Human
gcuccaagcagagcagaaagaaaacagaugau

SEQ ID NO: 445020 - RNA, 32 nt, Human
gcuccaagcaguggacugcccacccacuccca

SEQ ID NO: 445021 - RNA, 32 nt, Human
gcuccaagcucugcuuuuccuuccucugaaac

SEQ ID NO: 445022 - RNA, 32 nt, Human
gcuccaaggaacauugccucucuggaucugcu

SEQ ID NO: 445023 - RNA, 32 nt, Human
gcuccaaggcaguggaaauaaaaagaaggaaa

SEQ ID NO: 445024 - RNA, 32 nt, Human
gcuccaagggagaaacuucugggagccuccaa

SEQ ID NO: 445025 - RNA, 32 nt, Human
gcuccaagggagcguggucguggaagaaacaa

SEQ ID NO: 445026 - RNA, 32 nt, Human
gcuccaaguccagcaaccugcacuccagccug

SEQ ID NO: 445027 - RNA, 32 nt, Human
gcuccaaugccacugagcccugcucccucugc

SEQ ID NO: 445028 - RNA, 32 nt, Human
gcuccaauugccagcaaccucugcuuguccgg

SEQ ID NO: 445029 - RNA, 32 nt, Human
gcuccacaaccaccuccagccugggagauagg

SEQ ID NO: 445030 - RNA, 19 nt, Human
gcuccacaccagccauccc

SEQ ID NO: 445031 - RNA, 32 nt, Human
gcuccacaccgcagcgcagccuccgggacucc

SEQ ID NO: 445032 - RNA, 32 nt, Human
gcuccacaccugccuccauagcacuuugccug

SEQ ID NO: 445033 - RNA, 19 nt, Human
gcuccacagcuguagcucu

SEQ ID NO: 445034 - RNA, 32 nt, Human
gcuccacaggccugcacucggagucuggggcc

SEQ ID NO: 445035 - RNA, 18 nt, Human
gcuccacagggacuugag

SEQ ID NO: 445036 - RNA, 32 nt, Human
gcuccacagggacuugaggcaugcaguuggga

SEQ ID NO: 445037 - RNA, 32 nt, Human
gcuccacagguugggagccgucgugggaccug

SEQ ID NO: 445038 - RNA, 32 nt, Human
gcuccacaguccugucauccuggucaggacua

SEQ ID NO: 445039 - RNA, 32 nt, Human
gcuccacauccagcuuucaucuuccaucaaug

SEQ ID NO: 445040 - RNA, 32 nt, Human
gcuccacauccuucauucacugaucucuggga

SEQ ID NO: 445041 - RNA, 20 nt, Human
gcuccacauucuccuccucg

SEQ ID NO: 445042 - RNA, 22 nt, Human
gcuccaccagccacugaugcca

SEQ ID NO: 445043 - RNA, 32 nt, Human
gcuccaccagcugcagaauuucaacacgcuga

SEQ ID NO: 445044 - RNA, 23 nt, Human
gcuccaccagcuuccagggcggc

SEQ ID NO: 445045 - RNA, 32 nt, Human
gcuccacccagaggccaguccugugugucugg

SEQ ID NO: 445046 - RNA, 32 nt, Human
gcuccacccagccugcgccacuguguucuuaa

SEQ ID NO: 445047 - RNA, 32 nt, Human
gcuccacccagccugcgccacuguguucuucu

SEQ ID NO: 445048 - RNA, 32 nt, Human
gcuccacccagcucugugcccaaggccccuga

SEQ ID NO: 445049 - RNA, 32 nt, Human
gcuccacccauggcuaaagggggccaagguau

SEQ ID NO: 445050 - RNA, 23 nt, Human
gcuccaccccccggcucccggga

SEQ ID NO: 445051 - RNA, 32 nt, Human
gcuccacccucucucccaccauggcccgucag

SEQ ID NO: 445052 - RNA, 32 nt, Human
gcuccacccucucuccccuggaaaggacacca

SEQ ID NO: 445053 - RNA, 32 nt, Human
gcuccacccugcagaaccucagugguggcguc

SEQ ID NO: 445054 - RNA, 32 nt, Human
gcuccaccuccaacuugacaucaugcuuucug

SEQ ID NO: 445055 - RNA, 32 nt, Human
gcuccaccuccugauccuguguguccuccgac

SEQ ID NO: 445056 - RNA, 19 nt, Human
gcuccaccuccuggguuca

SEQ ID NO: 445057 - RNA, 21 nt, Human
gcuccaccuucucuggucuuc

SEQ ID NO: 445058 - RNA, 20 nt, Human
gcuccacgcccuccaggggg

SEQ ID NO: 445059 - RNA, 23 nt, Human
gcuccacgcugucgcagccaccg

SEQ ID NO: 445060 - RNA, 32 nt, Human
gcuccacggcaccauggccccgaagcugcugc

SEQ ID NO: 445061 - RNA, 32 nt, Human
gcuccacguguacccccuucacucccucccac

SEQ ID NO: 445062 - RNA, 23 nt, Human
gcuccacguucucuucugucugu

SEQ ID NO: 445063 - RNA, 21 nt, Human
gcuccacuccaccggccugug

SEQ ID NO: 445064 - RNA, 32 nt, Human
gcuccacucccaggcccacuugcugccauugg

SEQ ID NO: 445065 - RNA, 32 nt, Human
gcuccacucccaggcucugggggcuggggagu

SEQ ID NO: 445066 - RNA, 32 nt, Human
gcuccacuccuuggcuggaggcagugcugagg

SEQ ID NO: 445067 - RNA, 32 nt, Human
gcuccacugauuggaggauagagccagcuguc

SEQ ID NO: 445068 - RNA, 32 nt, Human
gcuccacugcaacaucacgguuuuccuuguuc

SEQ ID NO: 445069 - RNA, 32 nt, Human
gcuccacugcaacaucacguuuuccuuguucc

SEQ ID NO: 445070 - RNA, 32 nt, Human
gcuccacugcacuccagcccaggugacagugu

SEQ ID NO: 445071 - RNA, 32 nt, Human
gcuccacugcacuccagccugggugacagauc

SEQ ID NO: 445072 - RNA, 32 nt, Human
gcuccacugcuggucauucuggaugaugaggc

SEQ ID NO: 445073 - RNA, 32 nt, Human
gcuccacugucucuccugccucccucuuucau

SEQ ID NO: 445074 - RNA, 32 nt, Human
gcuccacugugguccagaaaaggaggccuuuc

SEQ ID NO: 445075 - RNA, 21 nt, Human
gcuccacuuccagaagccagg

SEQ ID NO: 445076 - RNA, 32 nt, Human
gcuccacuuccgaggaggagaaguagcuacau

SEQ ID NO: 445077 - RNA, 32 nt, Human
gcuccacuugcugguguuuuauagauucauac

SEQ ID NO: 445078 - RNA, 32 nt, Human
gcuccacuuuugaggcugcaguccauucagag

SEQ ID NO: 445079 - RNA, 32 nt, Human
gcuccagaaauuuuccucuggaacuaucagga

SEQ ID NO: 445080 - RNA, 32 nt, Human
gcuccagaaggagcuuuccaggauagcuuuga

SEQ ID NO: 445081 - RNA, 25 nt, Human
gcuccagaagucugugacuaccuug

SEQ ID NO: 445082 - RNA, 32 nt, Human
gcuccagaaucaggagcuuccccucaggaaau

SEQ ID NO: 445083 - RNA, 32 nt, Human
gcuccagaccccacuacagcagcuuuugacug

SEQ ID NO: 445084 - RNA, 32 nt, Human
gcuccagaccccagagggccagaagaacucac

SEQ ID NO: 445085 - RNA, 32 nt, Human
gcuccagaccuggaauccacaaaagccaaacc

SEQ ID NO: 445086 - RNA, 32 nt, Human
gcuccagacucaauuagaacagcuccaagaag

SEQ ID NO: 445087 - RNA, 21 nt, Human
gcuccagagagcugccuucca

SEQ ID NO: 445088 - RNA, 32 nt, Human
gcuccagagcauaccguggcccaggugguauc

SEQ ID NO: 445089 - RNA, 32 nt, Human
gcuccagagcccacgaggcuugcagaucgggg

SEQ ID NO: 445090 - RNA, 32 nt, Human
gcuccagagcccagauguaaaaggugcaauuu

SEQ ID NO: 445091 - RNA, 17 nt, Human
gcuccagagcucagggg

SEQ ID NO: 445092 - RNA, 32 nt, Human
gcuccagagugccggcgcagggccaagagcca

SEQ ID NO: 445093 - RNA, 32 nt, Human
gcuccagauaaagcugaggagccugugccagu

SEQ ID NO: 445094 - RNA, 20 nt, Human
gcuccagaugcgcuuuucca

SEQ ID NO: 445095 - RNA, 19 nt, Human
gcuccagcaaaagcgcagg

SEQ ID NO: 445096 - RNA, 21 nt, Human
gcuccagcaagcccgucaucu

SEQ ID NO: 445097 - RNA, 31 nt, Human
gcuccagcaagcucgaccaugccaagagacu

SEQ ID NO: 445098 - RNA, 32 nt, Human
gcuccagcagaggaaguuccaguccccacccg

SEQ ID NO: 445099 - RNA, 32 nt, Human
gcuccagcagaggcugggcaccuucagccauc

SEQ ID NO: 445100 - RNA, 23 nt, Human
gcuccagcagccccaaccccgcc

SEQ ID NO: 445101 - RNA, 32 nt, Human
gcuccagcagcuucaccuggagggaggggugc

SEQ ID NO: 445102 - RNA, 21 nt, Human
gcuccagcaggaaauggcuga

SEQ ID NO: 445103 - RNA, 21 nt, Human
gcuccagcaggauggcggcuc

SEQ ID NO: 445104 - RNA, 32 nt, Human
gcuccagcaguuacagcagcagcagcuccagc

SEQ ID NO: 445105 - RNA, 21 nt, Human
gcuccagcaucccgucagggg

SEQ ID NO: 445106 - RNA, 17 nt, Human
gcuccagccaaaagggg

SEQ ID NO: 445107 - RNA, 32 nt, Human
gcuccagccacaucuggacccaucagugacug

SEQ ID NO: 445108 - RNA, 32 nt, Human
gcuccagccacugcccuggccucagcauauca

SEQ ID NO: 445109 - RNA, 32 nt, Human
gcuccagccagaucuggcuggggacagcaccg

SEQ ID NO: 445110 - RNA, 32 nt, Human
gcuccagccagcagcucccacacugcucccag

SEQ ID NO: 445111 - RNA, 32 nt, Human
gcuccagccagccccuaacugguccccagaag

SEQ ID NO: 445112 - RNA, 17 nt, Human
gcuccagccagccgggg

SEQ ID NO: 445113 - RNA, 32 nt, Human
gcuccagccagcucugccccacagggaaggag

SEQ ID NO: 445114 - RNA, 20 nt, Human
gcuccagccaggccugggca

SEQ ID NO: 445115 - RNA, 32 nt, Human
gcuccagccauccucucaccucagccucccaa

SEQ ID NO: 445116 - RNA, 32 nt, Human
gcuccagcccaaugccccagcuggccuucccc

SEQ ID NO: 445117 - RNA, 21 nt, Human
gcuccagcccaccagcccucc

SEQ ID NO: 445118 - RNA, 22 nt, Human
gcuccagcccagccagcacucu

SEQ ID NO: 445119 - RNA, 32 nt, Human
gcuccagcccaggacuucgaggcugcaaugag

SEQ ID NO: 445120 - RNA, 20 nt, Human
gcuccagccccacagcccgc

SEQ ID NO: 445121 - RNA, 22 nt, Human
gcuccagccccgcagcccaccg

SEQ ID NO: 445122 - RNA, 21 nt, Human
gcuccagccccucucuugucu

SEQ ID NO: 445123 - RNA, 19 nt, Human
gcuccagccccuggaaggc

SEQ ID NO: 445124 - RNA, 19 nt, Human
gcuccagcccggcccggca

SEQ ID NO: 445125 - RNA, 32 nt, Human
gcuccagcccuucaucagccugggcagucuua

SEQ ID NO: 445126 - RNA, 23 nt, Human
gcuccagccgccgccgccgccgc

SEQ ID NO: 445127 - RNA, 22 nt, Human
gcuccagccgccugcagcgggg

SEQ ID NO: 445128 - RNA, 20 nt, Human
gcuccagccgggcgcagugg

SEQ ID NO: 445129 - RNA, 32 nt, Human
gcuccagccugaggcuuccagaagugcccuac

SEQ ID NO: 445130 - RNA, 23 nt, Human
gcuccagccugagugauagagug

SEQ ID NO: 445131 - RNA, 16 nt, Human
gcuccagccuggaggg

SEQ ID NO: 445132 - RNA, 32 nt, Human
gcuccagccugggcaacaaagugagacucugu

SEQ ID NO: 445133 - RNA, 22 nt, Human
gcuccagccugggcaacaagag

SEQ ID NO: 445134 - RNA, 26 nt, Human
gcuccagccugggugacagagugaga

SEQ ID NO: 445135 - RNA, 32 nt, Human
gcuccagccugggugaggagacccuguccuaa

SEQ ID NO: 445136 - RNA, 21 nt, Human
gcuccagcgaagaaaaggcug

SEQ ID NO: 445137 - RNA, 24 nt, Human
gcuccagcgacagccaacgccucu

SEQ ID NO: 445138 - RNA, 23 nt, Human
gcuccagcgccgcgcagccaccg

SEQ ID NO: 445139 - RNA, 19 nt, Human
gcuccagcuacucaggagg

SEQ ID NO: 445140 - RNA, 23 nt, Human
gcuccagcuacucaggaggcuga

SEQ ID NO: 445141 - RNA, 21 nt, Human
gcuccagcuagcauguuuuuc

SEQ ID NO: 445142 - RNA, 20 nt, Human
gcuccagcucacuaggccga

SEQ ID NO: 445143 - RNA, 32 nt, Human
gcuccagcucacucuaccccaucuccuugccg

SEQ ID NO: 445144 - RNA, 21 nt, Human
gcuccagcuccagaccuuguc

SEQ ID NO: 445145 - RNA, 32 nt, Human
gcuccagcucgugccaucuucccaauguacca

SEQ ID NO: 445146 - RNA, 32 nt, Human
gcuccagcugcagggccagggggugcagguga

SEQ ID NO: 445147 - RNA, 20 nt, Human
gcuccagcugccuuaggagg

SEQ ID NO: 445148 - RNA, 17 nt, Human
gcuccagcugggagggg

SEQ ID NO: 445149 - RNA, 32 nt, Human
gcuccagcugguuguugccaugugggaaugga

SEQ ID NO: 445150 - RNA, 32 nt, Human
gcuccagcuguggccuuccacucugagcccua

SEQ ID NO: 445151 - RNA, 32 nt, Human
gcuccagcuguucauaccacaucaguguuucc

SEQ ID NO: 445152 - RNA, 19 nt, Human
gcuccagcuguucgaaggu

SEQ ID NO: 445153 - RNA, 32 nt, Human
gcuccagcuguucuuccugcacaggccaucga

SEQ ID NO: 445154 - RNA, 32 nt, Human
gcuccagcuucucccuccaucucccuccccuu

SEQ ID NO: 445155 - RNA, 32 nt, Human
gcuccagcuuugaccugggaagcuguuucagg

SEQ ID NO: 445156 - RNA, 32 nt, Human
gcuccaggagaaagcaggcgggcgggcggaga

SEQ ID NO: 445157 - RNA, 21 nt, Human
gcuccaggagagagaagaggu

SEQ ID NO: 445158 - RNA, 20 nt, Human
gcuccaggagagugagcagg

SEQ ID NO: 445159 - RNA, 32 nt, Human
gcuccaggaggaagcccaggaggcugaugccu

SEQ ID NO: 445160 - RNA, 21 nt, Human
gcuccaggaggacaaggcuga

SEQ ID NO: 445161 - RNA, 23 nt, Human
gcuccaggaggagcaugugcagg

SEQ ID NO: 445162 - RNA, 32 nt, Human
gcuccaggagggaggcugggaggcaggacuuu

SEQ ID NO: 445163 - RNA, 24 nt, Human
gcuccaggaggucacacagcaggu

SEQ ID NO: 445164 - RNA, 21 nt, Human
gcuccaggcagacaaggcuga

SEQ ID NO: 445165 - RNA, 22 nt, Human
gcuccaggcaggagaaggcuga

SEQ ID NO: 445166 - RNA, 32 nt, Human
gcuccaggcaucccccucacccccaccaacga

SEQ ID NO: 445167 - RNA, 32 nt, Human
gcuccaggcaugaccccggcacccucauaggg

SEQ ID NO: 445168 - RNA, 32 nt, Human
gcuccaggccgagaggaugcuguugagcacau

SEQ ID NO: 445169 - RNA, 32 nt, Human
gcuccaggccguucuccuccccugagcaucca

SEQ ID NO: 445170 - RNA, 32 nt, Human
gcuccaggccuccauguguugugcugcacggg

SEQ ID NO: 445171 - RNA, 32 nt, Human
gcuccaggcgacccggccucugaccccacgga

SEQ ID NO: 445172 - RNA, 21 nt, Human
gcuccaggcggacaaggcuga

SEQ ID NO: 445173 - RNA, 32 nt, Human
gcuccaggcugugccuacacagcagugcuggu

SEQ ID NO: 445174 - RNA, 21 nt, Human
gcuccagggagcacaggaggu

SEQ ID NO: 445175 - RNA, 32 nt, Human
gcuccagggcagugucccucccuggcuugccu

SEQ ID NO: 445176 - RNA, 23 nt, Human
gcuccagggccacguuccagggu

SEQ ID NO: 445177 - RNA, 21 nt, Human
gcuccagggcugcccagcagg

SEQ ID NO: 445178 - RNA, 20 nt, Human
gcuccagggcuugucagagg

SEQ ID NO: 445179 - RNA, 16 nt, Human
gcuccaggggccagca

SEQ ID NO: 445180 - RNA, 20 nt, Human
gcuccaggggccccagcugg

SEQ ID NO: 445181 - RNA, 32 nt, Human
gcuccaggggcuaggugcguuaagaugagcau

SEQ ID NO: 445182 - RNA, 23 nt, Human
gcuccagggggaagacgcagagg

SEQ ID NO: 445183 - RNA, 21 nt, Human
gcuccagggucccugguuuuc

SEQ ID NO: 445184 - RNA, 32 nt, Human
gcuccagggucuggggcagcuugggcacaggu

SEQ ID NO: 445185 - RNA, 19 nt, Human
gcuccagguagacgcaggg

SEQ ID NO: 445186 - RNA, 32 nt, Human
gcuccaggucacaacucccaaaggagaugcag

SEQ ID NO: 445187 - RNA, 21 nt, Human
gcuccaggugcgccagcaggu

SEQ ID NO: 445188 - RNA, 32 nt, Human
gcuccaguaaaggguuuuggcugcauuugggg

SEQ ID NO: 445189 - RNA, 22 nt, Human
gcuccagucacccggaagcuga

SEQ ID NO: 445190 - RNA, 32 nt, Human
gcuccagucagcccacaagaugccauuguccc

SEQ ID NO: 445191 - RNA, 32 nt, Human
gcuccagucagccugcuuccacgaggccuguc

SEQ ID NO: 445192 - RNA, 21 nt, Human
gcuccaguccugugccaguag

SEQ ID NO: 445193 - RNA, 20 nt, Human
gcuccaguccuucccuagcc

SEQ ID NO: 445194 - RNA, 20 nt, Human
gcuccagucgggaauggcca

SEQ ID NO: 445195 - RNA, 32 nt, Human
gcuccagucuccacagccauccuggcccacac

SEQ ID NO: 445196 - RNA, 18 nt, Human
gcuccagucuccccugcc

SEQ ID NO: 445197 - RNA, 23 nt, Human
gcuccagugaaacuugggcacau

SEQ ID NO: 445198 - RNA, 32 nt, Human
gcuccagugauccucucaccucagccucccaa

SEQ ID NO: 445199 - RNA, 32 nt, Human
gcuccagugcugguuuuagaacaagaaugaag

SEQ ID NO: 445200 - RNA, 32 nt, Human
gcuccaguuaucuguauuuuauguaauguaau

SEQ ID NO: 445201 - RNA, 32 nt, Human
gcuccaguucccaacaaguuauucauuuccau

SEQ ID NO: 445202 - RNA, 21 nt, Human
gcuccaguugcucaucugaga

SEQ ID NO: 445203 - RNA, 24 nt, Human
gcuccaguugucaccauguuucca

SEQ ID NO: 445204 - RNA, 32 nt, Human
gcuccaguuugugggcuccucccaggccugac

SEQ ID NO: 445205 - RNA, 32 nt, Human
gcuccauagaggccuggcugacuggagcagag

SEQ ID NO: 445206 - RNA, 22 nt, Human
gcuccauagcgggcuccacagc

SEQ ID NO: 445207 - RNA, 32 nt, Human
gcuccaucaccaggcuggagugcaguggugcg

SEQ ID NO: 445208 - RNA, 32 nt, Human
gcuccaucacccaagccagagugcagugguga

SEQ ID NO: 445209 - RNA, 32 nt, Human
gcuccaucagccggcuggacaguuuuacaucu

SEQ ID NO: 445210 - RNA, 21 nt, Human
gcuccaucaucuucuuccgag

SEQ ID NO: 445211 - RNA, 32 nt, Human
gcuccaucaugaagacuugcuuccccaccaaa

SEQ ID NO: 445212 - RNA, 21 nt, Human
gcuccauccccagccccggcc

SEQ ID NO: 445213 - RNA, 32 nt, Human
gcuccaucccuggcuuccccagccugcggccg

SEQ ID NO: 445214 - RNA, 32 nt, Human
gcuccauccggcugccccauuccggcucccug

SEQ ID NO: 445215 - RNA, 19 nt, Human
gcuccauccuggcugcuug

SEQ ID NO: 445216 - RNA, 22 nt, Human
gcuccauccuucccugccgggg

SEQ ID NO: 445217 - RNA, 32 nt, Human
gcuccaucgcccaggccugggaugcagugaug

SEQ ID NO: 445218 - RNA, 32 nt, Human
gcuccaucgcccaggcugcagugcagugacac

SEQ ID NO: 445219 - RNA, 19 nt, Human
gcuccaucuauuuuuucca

SEQ ID NO: 445220 - RNA, 20 nt, Human
gcuccaucuccacccugcug

SEQ ID NO: 445221 - RNA, 32 nt, Human
gcuccaucugucccucccugaggucccucauc

SEQ ID NO: 445222 - RNA, 32 nt, Human
gcuccaucuuuuccucacucccucugauuggu

SEQ ID NO: 445223 - RNA, 23 nt, Human
gcuccaugcaaccucugccuccu

SEQ ID NO: 445224 - RNA, 32 nt, Human
gcuccaugcaaccucugccuccuggguucaag

SEQ ID NO: 445225 - RNA, 31 nt, Human
gcuccaugccucucuguccucuucuuuguug

SEQ ID NO: 445226 - RNA, 32 nt, Human
gcuccauggaccaggcccugcccaugcaucca

SEQ ID NO: 445227 - RNA, 32 nt, Human
gcuccauggaccaggcccugcccaugcauccg

SEQ ID NO: 445228 - RNA, 32 nt, Human
gcuccauggagccuucagucuccugggaagcu

SEQ ID NO: 445229 - RNA, 32 nt, Human
gcuccauguccuuguguggcugcuccagcgag

SEQ ID NO: 445230 - RNA, 32 nt, Human
gcuccauuauggcuugauuuacuccacgugca

SEQ ID NO: 445231 - RNA, 32 nt, Human
gcuccauucaucucugaggucucacagcccca

SEQ ID NO: 445232 - RNA, 32 nt, Human
gcuccauucauguuccugcaaaggacauaauc

SEQ ID NO: 445233 - RNA, 32 nt, Human
gcuccauuccaggucaacugaauuaaaauuug

SEQ ID NO: 445234 - RNA, 32 nt, Human
gcuccauucccacucccugccugucuccuagg

SEQ ID NO: 445235 - RNA, 32 nt, Human
gcuccauugcacuccagccugggcaacaagag

SEQ ID NO: 445236 - RNA, 32 nt, Human
gcuccauugcacuccagccugggcaacgagcg

SEQ ID NO: 445237 - RNA, 32 nt, Human
gcuccauugcacuccagccugggcgauagagu

SEQ ID NO: 445238 - RNA, 32 nt, Human
gcuccauugcacuccagccugggugacaguga

SEQ ID NO: 445239 - RNA, 32 nt, Human
gcuccauugcccaggcuggacugcagcagcgu

SEQ ID NO: 445240 - RNA, 32 nt, Human
gcuccauugcccaggcuggauuacaguggcgc

SEQ ID NO: 445241 - RNA, 32 nt, Human
gcuccauuguugaccacugauguaacucaacg

SEQ ID NO: 445242 - RNA, 32 nt, Human
gcuccauuguuugagccaagaaucuaagucau

SEQ ID NO: 445243 - RNA, 24 nt, Human
gcuccauuuccccuccuccucucu

SEQ ID NO: 445244 - RNA, 32 nt, Human
gcuccauuuccccuccuccucucuaccagaca

SEQ ID NO: 445245 - RNA, 32 nt, Human
gcucccaaaccaugucaggaccaccuuccucu

SEQ ID NO: 445246 - RNA, 21 nt, Human
gcucccaaagccagagcccag

SEQ ID NO: 445247 - RNA, 24 nt, Human
gcucccaaagcucugggaggacau

SEQ ID NO: 445248 - RNA, 32 nt, Human
gcucccaaaguacugggauuacaggcaugagc

SEQ ID NO: 445249 - RNA, 32 nt, Human
gcucccaaagugcugagauuacaggcaugaac

SEQ ID NO: 445250 - RNA, 32 nt, Human
gcucccaaagugcuggaauuacaggcauuagc

SEQ ID NO: 445251 - RNA, 32 nt, Human
gcucccaaagugcugggauuacaggcaugagc

SEQ ID NO: 445252 - RNA, 32 nt, Human
gcucccaaagugcugggauuacaggcgugagc

SEQ ID NO: 445253 - RNA, 32 nt, Human
gcucccaaaguguugggauuacaggcaugagc

SEQ ID NO: 445254 - RNA, 32 nt, Human
gcucccaaaguguugggauuacaggcgugagu

SEQ ID NO: 445255 - RNA, 32 nt, Human
gcucccaacuauucccguagcucagugccccc

SEQ ID NO: 445256 - RNA, 32 nt, Human
gcucccaagaggaggagagggaggcugcagac

SEQ ID NO: 445257 - RNA, 32 nt, Human
gcucccaagcuccauucuuccuucccucaacu

SEQ ID NO: 445258 - RNA, 32 nt, Human
gcucccaaggccaggugucucuaaaggaagcc

SEQ ID NO: 445259 - RNA, 32 nt, Human
gcucccaagggcuucugucuucaucucugcau

SEQ ID NO: 445260 - RNA, 32 nt, Human
gcucccaagguggcagugguggcagcagugau

SEQ ID NO: 445261 - RNA, 32 nt, Human
gcucccaaguagcugagauuacaggcauccgc

SEQ ID NO: 445262 - RNA, 32 nt, Human
gcucccaaguagcugggacuacaguagcuggg

SEQ ID NO: 445263 - RNA, 32 nt, Human
gcucccaaguagcugggauuacaggcauguac

SEQ ID NO: 445264 - RNA, 32 nt, Human
gcucccaaguagcugggauuacaggugcccgc

SEQ ID NO: 445265 - RNA, 32 nt, Human
gcucccaaucacccugcacauuugauucuaaa

SEQ ID NO: 445266 - RNA, 21 nt, Human
gcucccaauccaguccuccaa

SEQ ID NO: 445267 - RNA, 23 nt, Human
gcucccacaccccucggcccgug

SEQ ID NO: 445268 - RNA, 32 nt, Human
gcucccacaggcuggagugcaauggugugauc

SEQ ID NO: 445269 - RNA, 32 nt, Human
gcucccaccacugcacuccagccugggaagca

SEQ ID NO: 445270 - RNA, 32 nt, Human
gcucccaccacugcacuccagccugggcgaca

SEQ ID NO: 445271 - RNA, 32 nt, Human
gcucccaccagccugccaggccaggcuccugg

SEQ ID NO: 445272 - RNA, 32 nt, Human
gcucccaccagugugaagcagaaggaugacuu

SEQ ID NO: 445273 - RNA, 32 nt, Human
gcucccaccauggggcccaugccgaguggaug

SEQ ID NO: 445274 - RNA, 32 nt, Human
gcucccacccacccuccagaucccuuccagcu

SEQ ID NO: 445275 - RNA, 22 nt, Human
gcucccacccaccugacuccaa

SEQ ID NO: 445276 - RNA, 21 nt, Human
gcucccaccccuccggccccc

SEQ ID NO: 445277 - RNA, 22 nt, Human
gcucccaccccugaccuucucc

SEQ ID NO: 445278 - RNA, 19 nt, Human
gcucccacccuuucuccuc

SEQ ID NO: 445279 - RNA, 32 nt, Human
gcucccaccgcaguaccgccuccuggaacgga

SEQ ID NO: 445280 - RNA, 32 nt, Human
gcucccaccuauaauccuagcacuuugggagg

SEQ ID NO: 445281 - RNA, 18 nt, Human
gcucccaccucggccucc

SEQ ID NO: 445282 - RNA, 32 nt, Human
gcucccaccuguagucccagcacuuugggagg

SEQ ID NO: 445283 - RNA, 27 nt, Human
gcucccacgagucccugcucagcccca

SEQ ID NO: 445284 - RNA, 32 nt, Human
gcucccacgagucccugcucagccccagcagu

SEQ ID NO: 445285 - RNA, 32 nt, Human
gcucccacgcagcagagguuccacugagagga

SEQ ID NO: 445286 - RNA, 32 nt, Human
gcucccacggaggggagcaggaaugcugcacu

SEQ ID NO: 445287 - RNA, 32 nt, Human
gcucccacggaucccacuucugacaccaucua

SEQ ID NO: 445288 - RNA, 32 nt, Human
gcucccacuccaugcugcuucugggugggacc

SEQ ID NO: 445289 - RNA, 32 nt, Human
gcucccacugcacuccagccugggcgacagag

SEQ ID NO: 445290 - RNA, 32 nt, Human
gcucccacugccugucugcucuguucccaaag

SEQ ID NO: 445291 - RNA, 32 nt, Human
gcucccacugugguugagcuuuauguuuacag

SEQ ID NO: 445292 - RNA, 32 nt, Human
gcucccacuuccuuuuccuuaauaagaaccau

SEQ ID NO: 445293 - RNA, 32 nt, Human
gcucccacuuucccccuaacauagugccuguc

SEQ ID NO: 445294 - RNA, 22 nt, Human
gcucccagaagagcuggcauug

SEQ ID NO: 445295 - RNA, 32 nt, Human
gcucccagacacaggcccguccucggaagagc

SEQ ID NO: 445296 - RNA, 32 nt, Human
gcucccagcagagugaggacuucauucucuag

SEQ ID NO: 445297 - RNA, 32 nt, Human
gcucccagccaagaaccucggggccgcugcgc

SEQ ID NO: 445298 - RNA, 23 nt, Human
gcucccagcccagcuguagcucu

SEQ ID NO: 445299 - RNA, 32 nt, Human
gcucccagccugaauucugucuaucuagcugu

SEQ ID NO: 445300 - RNA, 32 nt, Human
gcucccagccugccucaccagggaagguugga

SEQ ID NO: 445301 - RNA, 32 nt, Human
gcucccagccugggcucugggagugggggcuc

SEQ ID NO: 445302 - RNA, 32 nt, Human
gcucccagcuacuuggaagacugaggugaaag

SEQ ID NO: 445303 - RNA, 32 nt, Human
gcucccagcucgaguugugggccccgccgcgg

SEQ ID NO: 445304 - RNA, 22 nt, Human
gcucccaggacccaggguacau

SEQ ID NO: 445305 - RNA, 32 nt, Human
gcucccaggagaaggggacccggccggagaag

SEQ ID NO: 445306 - RNA, 32 nt, Human
gcucccaggaugaacugguugcaguggcugcu

SEQ ID NO: 445307 - RNA, 32 nt, Human
gcucccaggcagccuccgccagccggaccccg

SEQ ID NO: 445308 - RNA, 32 nt, Human
gcucccaggcgagggggacuuggggcuuccac

SEQ ID NO: 445309 - RNA, 32 nt, Human
gcucccaggcuacgcaccuguacagcauguga

SEQ ID NO: 445310 - RNA, 32 nt, Human
gcucccaggcuggaguccaguggugugaucuc

SEQ ID NO: 445311 - RNA, 32 nt, Human
gcucccaggcuggggcugugcugcaggcuccg

SEQ ID NO: 445312 - RNA, 32 nt, Human
gcucccagggcggcccgcugccccacacccuc

SEQ ID NO: 445313 - RNA, 32 nt, Human
gcucccagguagcugggauuacgggcgcccac

SEQ ID NO: 445314 - RNA, 32 nt, Human
gcucccaguacagugcccccugcuuguggugc

SEQ ID NO: 445315 - RNA, 32 nt, Human
gcucccagugcagcugccaccccagcccaaau

SEQ ID NO: 445316 - RNA, 27 nt, Human
gcucccauaaccgcugauucucagggu

SEQ ID NO: 445317 - RNA, 32 nt, Human
gcucccaucauccugagcuagagacacgugac

SEQ ID NO: 445318 - RNA, 32 nt, Human
gcucccaucccuccuuccucuccuucuccaag

SEQ ID NO: 445319 - RNA, 21 nt, Human
gcucccaucucagucucccaa

SEQ ID NO: 445320 - RNA, 32 nt, Human
gcucccaucucuacccagucucaggccugcuu

SEQ ID NO: 445321 - RNA, 32 nt, Human
gcucccaucucucucuuugccucauagauuua

SEQ ID NO: 445322 - RNA, 20 nt, Human
gcucccaucucugauccucc

SEQ ID NO: 445323 - RNA, 24 nt, Human
gcucccaucugaaccacuuugccu

SEQ ID NO: 445324 - RNA, 32 nt, Human
gcucccaucugccucugcugcacacacaggca

SEQ ID NO: 445325 - RNA, 32 nt, Human
gcucccaucugucccugaggaagccccacuuc

SEQ ID NO: 445326 - RNA, 22 nt, Human
gcucccaugcacaacucuccaa

SEQ ID NO: 445327 - RNA, 32 nt, Human
gcucccaugccacccuccagaauucaccaaca

SEQ ID NO: 445328 - RNA, 32 nt, Human
gcucccaugggcuaggagccagugugaggcug

SEQ ID NO: 445329 - RNA, 32 nt, Human
gcucccaugugcuugaggaaggcuggugagcc

SEQ ID NO: 445330 - RNA, 32 nt, Human
gcucccauuagcuggugcaggcuuccguuaag

SEQ ID NO: 445331 - RNA, 32 nt, Human
gcucccauugcagcuacauacuugagauguac

SEQ ID NO: 445332 - RNA, 32 nt, Human
gcucccauuuagucucuuucuagccagccugu

SEQ ID NO: 445333 - RNA, 32 nt, Human
gcuccccaaauacccacagcucccaccgggua

SEQ ID NO: 445334 - RNA, 32 nt, Human
gcuccccaacccagugcugccaacuguacagc

SEQ ID NO: 445335 - RNA, 25 nt, Human
gcuccccaagaacgcggcucugcgc

SEQ ID NO: 445336 - RNA, 32 nt, Human
gcuccccaauaacugcacuucaccuguaaaga

SEQ ID NO: 445337 - RNA, 32 nt, Human
gcuccccaauccagcacucugccugcuccuuc

SEQ ID NO: 445338 - RNA, 32 nt, Human
gcuccccacacagcuggcuacacugcucaggc

SEQ ID NO: 445339 - RNA, 32 nt, Human
gcuccccacacgugcucgcagccuggcggggc

SEQ ID NO: 445340 - RNA, 32 nt, Human
gcuccccacagaccugguguaauuucacaagg

SEQ ID NO: 445341 - RNA, 22 nt, Human
gcuccccacaggucccucuccc

SEQ ID NO: 445342 - RNA, 32 nt, Human
gcuccccacccaggcagggcagcaugggaccc

SEQ ID NO: 445343 - RNA, 32 nt, Human
gcuccccacccuggcccccugccccugcacuc

SEQ ID NO: 445344 - RNA, 32 nt, Human
gcuccccacccuggcccugccccagccugugu

SEQ ID NO: 445345 - RNA, 21 nt, Human
gcuccccaccuggcucucagc

SEQ ID NO: 445346 - RNA, 32 nt, Human
gcuccccaccuugccugcgcccgcccggagcc

SEQ ID NO: 445347 - RNA, 19 nt, Human
gcuccccaccuuggccugc

SEQ ID NO: 445348 - RNA, 16 nt, Human
gcuccccacgccacca

SEQ ID NO: 445349 - RNA, 18 nt, Human
gcuccccacgcgccacca

SEQ ID NO: 445350 - RNA, 32 nt, Human
gcuccccacgcugaaacccugcagccuuaaga

SEQ ID NO: 445351 - RNA, 18 nt, Human
gcuccccacgugccacca

SEQ ID NO: 445352 - RNA, 32 nt, Human
gcuccccacucagaaaaggaggcggcuucggg

SEQ ID NO: 445353 - RNA, 32 nt, Human
gcuccccacugcacuugccaccugagucacau

SEQ ID NO: 445354 - RNA, 32 nt, Human
gcuccccagaagcaagagaguucaagugaagg

SEQ ID NO: 445355 - RNA, 25 nt, Human
gcuccccagaagcaccucucugggu

SEQ ID NO: 445356 - RNA, 32 nt, Human
gcuccccagccauguggaaguguaaguccaau

SEQ ID NO: 445357 - RNA, 26 nt, Human
gcuccccagcccaggguucccccagc

SEQ ID NO: 445358 - RNA, 32 nt, Human
gcuccccagccccaggccgggaggcccagaug

SEQ ID NO: 445359 - RNA, 22 nt, Human
gcuccccagcccuggcucugca

SEQ ID NO: 445360 - RNA, 22 nt, Human
gcuccccagcccuuccuuaggg

SEQ ID NO: 445361 - RNA, 22 nt, Human
gcuccccagcccuuugcugcgc

SEQ ID NO: 445362 - RNA, 24 nt, Human
gcuccccagcucacucucugaagc

SEQ ID NO: 445363 - RNA, 23 nt, Human
gcuccccagcucuuccugucagc

SEQ ID NO: 445364 - RNA, 32 nt, Human
gcuccccagcuuccucuccucggaaggcaauu

SEQ ID NO: 445365 - RNA, 32 nt, Human
gcuccccaggguggcaggagcugaggaagggc

SEQ ID NO: 445366 - RNA, 32 nt, Human
gcuccccaguagcugggacuacaggcgcccgc

SEQ ID NO: 445367 - RNA, 21 nt, Human
gcuccccaguuuccugggggu

SEQ ID NO: 445368 - RNA, 32 nt, Human
gcuccccaucugcccacccacuaaagcccaug

SEQ ID NO: 445369 - RNA, 32 nt, Human
gcuccccaucuucuccuuacugcaucucagcc

SEQ ID NO: 445370 - RNA, 32 nt, Human
gcuccccaugaagaucaggaucaacggcaggg

SEQ ID NO: 445371 - RNA, 32 nt, Human
gcuccccaugcuucacacaggucccccagaug

SEQ ID NO: 445372 - RNA, 22 nt, Human
gcuccccauggaccaggccugg

SEQ ID NO: 445373 - RNA, 32 nt, Human
gcuccccauugauugaagagucacugucugaa

SEQ ID NO: 445374 - RNA, 32 nt, Human
gcucccccagcaaucucugccuacaccuccug

SEQ ID NO: 445375 - RNA, 21 nt, Human
gcuccccccacaggggugcag

SEQ ID NO: 445376 - RNA, 32 nt, Human
gcucccccgaccggugggcauuugugaggccc

SEQ ID NO: 445377 - RNA, 32 nt, Human
gcucccccgcccugcccugcccucaccucccu

SEQ ID NO: 445378 - RNA, 32 nt, Human
gcucccccgcuguccccgaggauuucccgcgg

SEQ ID NO: 445379 - RNA, 23 nt, Human
gcucccccggacuggcccugccc

SEQ ID NO: 445380 - RNA, 32 nt, Human
gcucccccuccaccgccuccgccgccucagca

SEQ ID NO: 445381 - RNA, 32 nt, Human
gcucccccucccccaaauucccuuucuccucc

SEQ ID NO: 445382 - RNA, 32 nt, Human
gcucccccucccccuccucccugcuccuucgc

SEQ ID NO: 445383 - RNA, 23 nt, Human
gcucccccucugcuucucggggu

SEQ ID NO: 445384 - RNA, 23 nt, Human
gcucccccugcagaaugucuuca

SEQ ID NO: 445385 - RNA, 21 nt, Human
gcucccccugccucuccccuc

SEQ ID NO: 445386 - RNA, 32 nt, Human
gcucccccugcucacucucugcugaccuccgg

SEQ ID NO: 445387 - RNA, 32 nt, Human
gcucccccugugcugggcucugugccacacac

SEQ ID NO: 445388 - RNA, 32 nt, Human
gcucccccuucaccccuccuugcccgccuacc

SEQ ID NO: 445389 - RNA, 32 nt, Human
gcucccccuucuuuaguaauaggugcuggcaa

SEQ ID NO: 445390 - RNA, 19 nt, Human
gcuccccgacagguggggc

SEQ ID NO: 445391 - RNA, 26 nt, Human
gcuccccgccaccgccgccgccgccg

SEQ ID NO: 445392 - RNA, 22 nt, Human
gcuccccgcgccgccgccgccg

SEQ ID NO: 445393 - RNA, 32 nt, Human
gcuccccggcgcucacaccugagcucacucgc

SEQ ID NO: 445394 - RNA, 19 nt, Human
gcuccccggcuguggcccu

SEQ ID NO: 445395 - RNA, 21 nt, Human
gcuccccgggagccagcccca

SEQ ID NO: 445396 - RNA, 20 nt, Human
gcuccccggggcggggcggg

SEQ ID NO: 445397 - RNA, 26 nt, Human
gcuccccggugccgccgccgcugccg

SEQ ID NO: 445398 - RNA, 22 nt, Human
gcuccccggugcuaccuugccu

SEQ ID NO: 445399 - RNA, 21 nt, Human
gcuccccgugccacucagggu

SEQ ID NO: 445400 - RNA, 22 nt, Human
gcuccccgugccguggggcagg

SEQ ID NO: 445401 - RNA, 32 nt, Human
gcuccccuccagggcuccugcagccucgccgc

SEQ ID NO: 445402 - RNA, 32 nt, Human
gcuccccuccccucccccuccccgggcccggg

SEQ ID NO: 445403 - RNA, 32 nt, Human
gcuccccuccggagcugggauccaggcgcgua

SEQ ID NO: 445404 - RNA, 24 nt, Human
gcuccccuccugcucucccucccu

SEQ ID NO: 445405 - RNA, 32 nt, Human
gcuccccucugcccagcccuucccaggcugau

SEQ ID NO: 445406 - RNA, 21 nt, Human
gcuccccugaauaucuucucu

SEQ ID NO: 445407 - RNA, 32 nt, Human
gcuccccugagucucaggcaacaguuuuguca

SEQ ID NO: 445408 - RNA, 32 nt, Human
gcuccccugccaggauagacagaagagcugcc

SEQ ID NO: 445409 - RNA, 19 nt, Human
gcuccccugccccccucuc

SEQ ID NO: 445410 - RNA, 32 nt, Human
gcuccccugccucaccaccuccucuccgcucu

SEQ ID NO: 445411 - RNA, 26 nt, Human
gcuccccugccucuguucuccuuucu

SEQ ID NO: 445412 - RNA, 32 nt, Human
gcuccccugccugggcccugacuucagcuccc

SEQ ID NO: 445413 - RNA, 32 nt, Human
gcuccccugcgcccucuccucuccccgcgccc

SEQ ID NO: 445414 - RNA, 32 nt, Human
gcuccccugcugaagguggggauugcccaucc

SEQ ID NO: 445415 - RNA, 32 nt, Human
gcuccccugcuuuggggagaucucaaaccaug

SEQ ID NO: 445416 - RNA, 32 nt, Human
gcuccccugggucaccuccucccugcucgcug

SEQ ID NO: 445417 - RNA, 32 nt, Human
gcuccccuguucaaaguggccacagcgcagac

SEQ ID NO: 445418 - RNA, 32 nt, Human
gcuccccuguuuaucuagagccuucguuccug

SEQ ID NO: 445419 - RNA, 27 nt, Human
gcuccccuucccucccccuuccucucu

SEQ ID NO: 445420 - RNA, 22 nt, Human
gcuccccuuccuggcccucccc

SEQ ID NO: 445421 - RNA, 32 nt, Human
gcuccccuucucucuaccuucucccccaacgu

SEQ ID NO: 445422 - RNA, 32 nt, Human
gcuccccuugcagggcagacagugccuggcac

SEQ ID NO: 445423 - RNA, 23 nt, Human
gcuccccuuguagcugucuuaca

SEQ ID NO: 445424 - RNA, 32 nt, Human
gcuccccuuuccugcccugccuuucggugcaa

SEQ ID NO: 445425 - RNA, 32 nt, Human
gcucccgaaucccugcaucucccgccccaggc

SEQ ID NO: 445426 - RNA, 32 nt, Human
gcucccgaggagggggaugcagaggugaugca

SEQ ID NO: 445427 - RNA, 32 nt, Human
gcucccgaggcaggcaggcccaguugcuguuu

SEQ ID NO: 445428 - RNA, 32 nt, Human
gcucccgaguagcugggauuacaggcaugugc

SEQ ID NO: 445429 - RNA, 21 nt, Human
gcucccgauucuccuccucuc

SEQ ID NO: 445430 - RNA, 32 nt, Human
gcucccgcagacugagccacagccugggccuc

SEQ ID NO: 445431 - RNA, 32 nt, Human
gcucccgcagccgccccgccgcccgcccggag

SEQ ID NO: 445432 - RNA, 32 nt, Human
gcucccgcauuucucaugcuucuucucauggg

SEQ ID NO: 445433 - RNA, 21 nt, Human
gcucccgcccccacccuccaa

SEQ ID NO: 445434 - RNA, 32 nt, Human
gcucccgccuggaaucccagcacuuugggagg

SEQ ID NO: 445435 - RNA, 19 nt, Human
gcucccgccuguaauccca

SEQ ID NO: 445436 - RNA, 32 nt, Human
gcucccgccuguaaucccagaacuuugggagg

SEQ ID NO: 445437 - RNA, 32 nt, Human
gcucccgccuguaaucccagcacuuugggaag

SEQ ID NO: 445438 - RNA, 32 nt, Human
gcucccgccuguaaucccagcacuuugggagg

SEQ ID NO: 445439 - RNA, 32 nt, Human
gcucccgccuguaaucccaguacuuugggaag

SEQ ID NO: 445440 - RNA, 32 nt, Human
gcucccgccuguaaucccauuacuuugggagg

SEQ ID NO: 445441 - RNA, 32 nt, Human
gcucccgccuguaauccuagcacuuugggagg

SEQ ID NO: 445442 - RNA, 32 nt, Human
gcucccgccugugaucccggcacuuugggagg

SEQ ID NO: 445443 - RNA, 32 nt, Human
gcucccgcugggacuccacuuccguggauguc

SEQ ID NO: 445444 - RNA, 23 nt, Human
gcucccgcuguacugcagccccg

SEQ ID NO: 445445 - RNA, 32 nt, Human
gcucccggaagcugcagcagcugguaacaaag

SEQ ID NO: 445446 - RNA, 24 nt, Human
gcucccggacccugacucugcagc

SEQ ID NO: 445447 - RNA, 32 nt, Human
gcucccggcccggcagccgagccccagcacaa

SEQ ID NO: 445448 - RNA, 21 nt, Human
gcucccggcccggcccagccc

SEQ ID NO: 445449 - RNA, 21 nt, Human
gcucccggcgcacggagcaca

SEQ ID NO: 445450 - RNA, 32 nt, Human
gcucccggcucccucccccuucggauguggcu

SEQ ID NO: 445451 - RNA, 32 nt, Human
gcucccggcucugaggcugccccaggggcacu

SEQ ID NO: 445452 - RNA, 31 nt, Human
gcucccggcugaauaaaccucuuccuucuuu

SEQ ID NO: 445453 - RNA, 22 nt, Human
gcucccgggccucagccuccca

SEQ ID NO: 445454 - RNA, 32 nt, Human
gcucccggggcccagaggcaggacuguggcgg

SEQ ID NO: 445455 - RNA, 32 nt, Human
gcucccgguccgccucccagcaucccugcgag

SEQ ID NO: 445456 - RNA, 32 nt, Human
gcucccggugcugccugcagggccacaggcuc

SEQ ID NO: 445457 - RNA, 32 nt, Human
gcucccgguggaagcaagggagcccagccgga

SEQ ID NO: 445458 - RNA, 20 nt, Human
gcucccgguucccuccccag

SEQ ID NO: 445459 - RNA, 32 nt, Human
gcucccgguucccuccccagcuccucgucuuu

SEQ ID NO: 445460 - RNA, 23 nt, Human
gcucccguagcacacuauaacau

SEQ ID NO: 445461 - RNA, 32 nt, Human
gcucccgucccuggcccggaccuuggcugucu

SEQ ID NO: 445462 - RNA, 32 nt, Human
gcucccguugcuaccggaaugccucuucaggu

SEQ ID NO: 445463 - RNA, 32 nt, Human
gcucccuacaacuuccaccucccagguucaag

SEQ ID NO: 445464 - RNA, 32 nt, Human
gcucccuacccacacuggcuuccugccuccca

SEQ ID NO: 445465 - RNA, 32 nt, Human
gcucccuagagcaggagaucuugagugggaga

SEQ ID NO: 445466 - RNA, 24 nt, Human
gcucccuagccagacaguggaggu

SEQ ID NO: 445467 - RNA, 32 nt, Human
gcucccuauaaaaggcaggcagagccaccgag

SEQ ID NO: 445468 - RNA, 32 nt, Human
gcucccucacuggccuccggcaggccaggcug

SEQ ID NO: 445469 - RNA, 22 nt, Human
gcucccucagagcuacucuuca

SEQ ID NO: 445470 - RNA, 32 nt, Human
gcucccucagcuugcagggagguauggagagg

SEQ ID NO: 445471 - RNA, 32 nt, Human
gcucccucagcuugcagggagguguggagcga

SEQ ID NO: 445472 - RNA, 32 nt, Human
gcucccucagcuugcggggagguguggaggga

SEQ ID NO: 445473 - RNA, 21 nt, Human
gcucccucagugguugucuca

SEQ ID NO: 445474 - RNA, 32 nt, Human
gcucccucauagucuacccccacgccucagug

SEQ ID NO: 445475 - RNA, 32 nt, Human
gcucccuccagaaauagcaaacuucaugcagc

SEQ ID NO: 445476 - RNA, 32 nt, Human
gcucccuccagcccaugacccggggcuaggag

SEQ ID NO: 445477 - RNA, 32 nt, Human
gcucccuccauucagggcguuugggagccacc

SEQ ID NO: 445478 - RNA, 32 nt, Human
gcucccuccccacauuccccaugcucaaggcc

SEQ ID NO: 445479 - RNA, 23 nt, Human
gcucccuccccagggucaucuca

SEQ ID NO: 445480 - RNA, 32 nt, Human
gcucccuccccgagcuggcccagcacaaggca

SEQ ID NO: 445481 - RNA, 32 nt, Human
gcucccuccccuccucccuugcucaccccacg

SEQ ID NO: 445482 - RNA, 32 nt, Human
gcucccucccgcaccccgauguggaccucuac

SEQ ID NO: 445483 - RNA, 24 nt, Human
gcucccucccggggcucuucuuca

SEQ ID NO: 445484 - RNA, 32 nt, Human
gcucccucccuucaccuuuccucuccuggcgg

SEQ ID NO: 445485 - RNA, 24 nt, Human
gcucccuccucaagguugucuuca

SEQ ID NO: 445486 - RNA, 20 nt, Human
gcucccuccucccugccuuc

SEQ ID NO: 445487 - RNA, 24 nt, Human
gcucccuccucggaguccccuuca

SEQ ID NO: 445488 - RNA, 27 nt, Human
gcucccuccucggauuugauugucuuc

SEQ ID NO: 445489 - RNA, 23 nt, Human
gcucccuccucggcccgucccca

SEQ ID NO: 445490 - RNA, 24 nt, Human
gcucccuccucgggcugcauuuca

SEQ ID NO: 445491 - RNA, 32 nt, Human
gcucccuccucucuaccuaccucugaccuucu

SEQ ID NO: 445492 - RNA, 32 nt, Human
gcucccuccucuucuucaauaaccccaaagag

SEQ ID NO: 445493 - RNA, 18 nt, Human
gcucccuccugaagcagg

SEQ ID NO: 445494 - RNA, 23 nt, Human
gcucccucuaccuggaaaccucc

SEQ ID NO: 445495 - RNA, 32 nt, Human
gcucccucucaccacccucuucugccuaugag

SEQ ID NO: 445496 - RNA, 32 nt, Human
gcucccucuccccaaccgcgaaacgugagggg

SEQ ID NO: 445497 - RNA, 32 nt, Human
gcucccucuccgugcucugccugguggccacg

SEQ ID NO: 445498 - RNA, 32 nt, Human
gcucccucuccucccugagcaccugcugcugc

SEQ ID NO: 445499 - RNA, 32 nt, Human
gcucccucucuccacacggagcuccuggcagc

SEQ ID NO: 445500 - RNA, 32 nt, Human
gcucccucugcugccccugaugcaugcuucug

SEQ ID NO: 445501 - RNA, 32 nt, Human
gcucccucuggcccuucucuguuuaguaguug

SEQ ID NO: 445502 - RNA, 32 nt, Human
gcucccucuguggaggugaggaggggagauuc

SEQ ID NO: 445503 - RNA, 32 nt, Human
gcucccucuguggggccugcuggggccuggga

SEQ ID NO: 445504 - RNA, 32 nt, Human
gcucccucuguuaccuuuccaucuagcaaguu

SEQ ID NO: 445505 - RNA, 32 nt, Human
gcucccucuuggguccugugccaaguccgccc

SEQ ID NO: 445506 - RNA, 32 nt, Human
gcucccucuuugggguucccaaggcacccugu

SEQ ID NO: 445507 - RNA, 32 nt, Human
gcucccucuuuuccacagaggcugcugagggc

SEQ ID NO: 445508 - RNA, 32 nt, Human
gcucccugaagcuuuccuaauauugcugugcu

SEQ ID NO: 445509 - RNA, 32 nt, Human
gcucccugaauguuaaccacagaggagucacu

SEQ ID NO: 445510 - RNA, 32 nt, Human
gcucccugcaaccuccaccucccggguucaag

SEQ ID NO: 445511 - RNA, 23 nt, Human
gcucccugcaaccuccaccuccu

SEQ ID NO: 445512 - RNA, 32 nt, Human
gcucccugcaaccuccaccuccuggguucaaa

SEQ ID NO: 445513 - RNA, 32 nt, Human
gcucccugcaaccuccaccuccuggguucaag

SEQ ID NO: 445514 - RNA, 22 nt, Human
gcucccugcaaccuccgccucc

SEQ ID NO: 445515 - RNA, 32 nt, Human
gcucccugcaaccuccgccuccuggauuccag

SEQ ID NO: 445516 - RNA, 32 nt, Human
gcucccugcaaccuccgccuccuggguucaag

SEQ ID NO: 445517 - RNA, 32 nt, Human
gcucccugcaaccucugcuuccuggguucagg

SEQ ID NO: 445518 - RNA, 32 nt, Human
gcucccugcaaucuccaccucccagguucaag

SEQ ID NO: 445519 - RNA, 32 nt, Human
gcucccugcacacccaggccagccaccccucc

SEQ ID NO: 445520 - RNA, 32 nt, Human
gcucccugcaccuggccgcccugccuucccgc

SEQ ID NO: 445521 - RNA, 32 nt, Human
gcucccugcagccucaaacuccugggcucaag

SEQ ID NO: 445522 - RNA, 32 nt, Human
gcucccugcagccuugaccuccugggcucaag

SEQ ID NO: 445523 - RNA, 32 nt, Human
gcucccugcaguugcaaauuccugggcucaag

SEQ ID NO: 445524 - RNA, 21 nt, Human
gcucccugcccaggccauauc

SEQ ID NO: 445525 - RNA, 24 nt, Human
gcucccugccccccagaccauuuc

SEQ ID NO: 445526 - RNA, 22 nt, Human
gcucccugcccucugcucaccc

SEQ ID NO: 445527 - RNA, 32 nt, Human
gcucccugcccucugcucacccauguccaauc

SEQ ID NO: 445528 - RNA, 20 nt, Human
gcucccugcccuugagcccc

SEQ ID NO: 445529 - RNA, 20 nt, Human
gcucccugcccuuggggccc

SEQ ID NO: 445530 - RNA, 32 nt, Human
gcucccugccuccaagccuggugccacaggcc

SEQ ID NO: 445531 - RNA, 31 nt, Human
gcucccugccucuggggccuccaguccuuca

SEQ ID NO: 445532 - RNA, 25 nt, Human
gcucccugccuguggcucagcccca

SEQ ID NO: 445533 - RNA, 32 nt, Human
gcucccugcgcucccgccaccucggcaacucc

SEQ ID NO: 445534 - RNA, 21 nt, Human
gcucccugcuuuuucaugcca

SEQ ID NO: 445535 - RNA, 22 nt, Human
gcucccuggaacagugcagggg

SEQ ID NO: 445536 - RNA, 20 nt, Human
gcucccuggagcccagggca

SEQ ID NO: 445537 - RNA, 32 nt, Human
gcucccuggaggcugggccaggaggcagccuc

SEQ ID NO: 445538 - RNA, 32 nt, Human
gcucccuggccccugcccccagccccugcagc

SEQ ID NO: 445539 - RNA, 32 nt, Human
gcucccuggcucccaugucaagagucgcugug

SEQ ID NO: 445540 - RNA, 32 nt, Human
gcucccugggauucaauguucauuaaaauauc

SEQ ID NO: 445541 - RNA, 32 nt, Human
gcucccugggcuggcauggggaggggagagaa

SEQ ID NO: 445542 - RNA, 32 nt, Human
gcucccuggggaacccagcaggcggcgaagau

SEQ ID NO: 445543 - RNA, 32 nt, Human
gcucccuggggcuggucacagcuggcucauga

SEQ ID NO: 445544 - RNA, 20 nt, Human
gcucccugggucccuuccca

SEQ ID NO: 445545 - RNA, 23 nt, Human
gcucccugggucuccuccucucu

SEQ ID NO: 445546 - RNA, 32 nt, Human
gcucccugguagggacaauaaagguuuugggu

SEQ ID NO: 445547 - RNA, 22 nt, Human
gcucccuguaaccucaaacucc

SEQ ID NO: 445548 - RNA, 26 nt, Human
gcucccugucucacaaggccucuuca

SEQ ID NO: 445549 - RNA, 32 nt, Human
gcucccugucuucugucagccucagggcaucc

SEQ ID NO: 445550 - RNA, 32 nt, Human
gcucccuguuccugccagguacugaacugacu

SEQ ID NO: 445551 - RNA, 32 nt, Human
gcucccuguucugcaucucgcucaacagacug

SEQ ID NO: 445552 - RNA, 32 nt, Human
gcucccuuaaagauugugccagugauagaugu

SEQ ID NO: 445553 - RNA, 32 nt, Human
gcucccuucauacuccucacccuacgcaccgc

SEQ ID NO: 445554 - RNA, 32 nt, Human
gcucccuuccaccugucauucccaccacccug

SEQ ID NO: 445555 - RNA, 32 nt, Human
gcucccuuccccacaaggcuccugggccuccg

SEQ ID NO: 445556 - RNA, 32 nt, Human
gcucccuuccgaggcugcagggccaggcgcgg

SEQ ID NO: 445557 - RNA, 32 nt, Human
gcucccuugacucaggacugugcucgaauugu

SEQ ID NO: 445558 - RNA, 32 nt, Human
gcucccuugcagaugcaccguggccuggcggc

SEQ ID NO: 445559 - RNA, 32 nt, Human
gcucccuuggcaggcuguggucuccucugcaa

SEQ ID NO: 445560 - RNA, 32 nt, Human
gcucccuugggcagacagcaggcuuaggccau

SEQ ID NO: 445561 - RNA, 32 nt, Human
gcucccuugggcuggagcugcaguaccguacc

SEQ ID NO: 445562 - RNA, 32 nt, Human
gcucccuugucauucugacuccugggcuuacc

SEQ ID NO: 445563 - RNA, 32 nt, Human
gcucccuuuaaccuccagcuccuggguucaag

SEQ ID NO: 445564 - RNA, 32 nt, Human
gcucccuuugaccuuuuugagaacaagaagaa

SEQ ID NO: 445565 - RNA, 32 nt, Human
gcucccuuuucaccugaaaugccuucagcuca

SEQ ID NO: 445566 - RNA, 32 nt, Human
gcuccgaagaacaugugucacaaaagaugaag

SEQ ID NO: 445567 - RNA, 32 nt, Human
gcuccgaccacucauucagugugugaccucag

SEQ ID NO: 445568 - RNA, 32 nt, Human
gcuccgagaacucugucaucaguggcuaaggc

SEQ ID NO: 445569 - RNA, 32 nt, Human
gcuccgaggagggguggacuccaccuuggaca

SEQ ID NO: 445570 - RNA, 19 nt, Human
gcuccgaggaguccgcccg

SEQ ID NO: 445571 - RNA, 31 nt, Human
gcuccgaggccagagagaaaagacugcgagg

SEQ ID NO: 445572 - RNA, 32 nt, Human
gcuccgaggcggagcugcagcagcugcggcag

SEQ ID NO: 445573 - RNA, 32 nt, Human
gcuccgagggaggagagaggggcucgggaagg

SEQ ID NO: 445574 - RNA, 32 nt, Human
gcuccgagggccaggagcaggacggcggccgc

SEQ ID NO: 445575 - RNA, 32 nt, Human
gcuccgaggucggcgggggucuggguggccau

SEQ ID NO: 445576 - RNA, 32 nt, Human
gcuccgauguccacccuuguccccagguggac

SEQ ID NO: 445577 - RNA, 24 nt, Human
gcuccgcaaagcucugggcuugug

SEQ ID NO: 445578 - RNA, 24 nt, Human
gcuccgcagaccugcgcuaucuca

SEQ ID NO: 445579 - RNA, 32 nt, Human
gcuccgcaggccacgagaagcugccggugcac

SEQ ID NO: 445580 - RNA, 32 nt, Human
gcuccgcaggcccagccgccucuccugcgccc

SEQ ID NO: 445581 - RNA, 20 nt, Human
gcuccgcauccaaccccggg

SEQ ID NO: 445582 - RNA, 23 nt, Human
gcuccgcauccuugcgccacgug

SEQ ID NO: 445583 - RNA, 32 nt, Human
gcuccgccacugcaugcucccgccggaccgag

SEQ ID NO: 445584 - RNA, 22 nt, Human
gcuccgcccccucacgcgcucu

SEQ ID NO: 445585 - RNA, 32 nt, Human
gcuccgcccccucccucucccuugagaagcug

SEQ ID NO: 445586 - RNA, 32 nt, Human
gcuccgcccuggagugaaggaggagccgucac

SEQ ID NO: 445587 - RNA, 32 nt, Human
gcuccgcccuggcacguguccuugcuggcggc

SEQ ID NO: 445588 - RNA, 32 nt, Human
gcuccgcccuugccuuggggccgagggagccc

SEQ ID NO: 445589 - RNA, 19 nt, Human
gcuccgccgccgccgagca

SEQ ID NO: 445590 - RNA, 20 nt, Human
gcuccgccgccgccgccgcc

SEQ ID NO: 445591 - RNA, 32 nt, Human
gcuccgccguccuucgcuucuuuugcugggcu

SEQ ID NO: 445592 - RNA, 32 nt, Human
gcuccgccuccaacgugacaucaugcuuucug

SEQ ID NO: 445593 - RNA, 32 nt, Human
gcuccgccuccaacuugacaucaugcuuucug

SEQ ID NO: 445594 - RNA, 32 nt, Human
gcuccgccucccacuugacaucaugcuuucug

SEQ ID NO: 445595 - RNA, 20 nt, Human
gcuccgccucccgccccggg

SEQ ID NO: 445596 - RNA, 20 nt, Human
gcuccgccucccggguucag

SEQ ID NO: 445597 - RNA, 19 nt, Human
gcuccgccuccuggguuca

SEQ ID NO: 445598 - RNA, 21 nt, Human
gcuccgccucgguggcaaaca

SEQ ID NO: 445599 - RNA, 20 nt, Human
gcuccgccuggcacugggca

SEQ ID NO: 445600 - RNA, 32 nt, Human
gcuccgccuggccuggccauacugugucccau

SEQ ID NO: 445601 - RNA, 32 nt, Human
gcuccgccuguccccaacccagucccauuuuu

SEQ ID NO: 445602 - RNA, 21 nt, Human
gcuccgcgccgccugggucuc

SEQ ID NO: 445603 - RNA, 21 nt, Human
gcuccgcgccgcgccgcuccg

SEQ ID NO: 445604 - RNA, 32 nt, Human
gcuccgcgccugcuccuucuccacuuuuugca

SEQ ID NO: 445605 - RNA, 19 nt, Human
gcuccgcgccugcuggauc

SEQ ID NO: 445606 - RNA, 32 nt, Human
gcuccgcgccugcuggaucguggaugcagcgu

SEQ ID NO: 445607 - RNA, 32 nt, Human
gcuccgcgcgggagccauguaacccugcggcg

SEQ ID NO: 445608 - RNA, 20 nt, Human
gcuccgcgcucccagccucg

SEQ ID NO: 445609 - RNA, 32 nt, Human
gcuccgcgcucuugugaaauacugguucuguu

SEQ ID NO: 445610 - RNA, 32 nt, Human
gcuccgcggccuggaguggcucugccggggca

SEQ ID NO: 445611 - RNA, 32 nt, Human
gcuccgcggcgccgcugagcaggcgcuccugg

SEQ ID NO: 445612 - RNA, 22 nt, Human
gcuccgcgucccgaccggcccg

SEQ ID NO: 445613 - RNA, 22 nt, Human
gcuccgcucagggccccgguca

SEQ ID NO: 445614 - RNA, 32 nt, Human
gcuccgcugcgcuugucuccagcuuccagccc

SEQ ID NO: 445615 - RNA, 32 nt, Human
gcuccgcuucccaggcuggggugcaguggugc

SEQ ID NO: 445616 - RNA, 32 nt, Human
gcuccggaaaugcaacugcguacgggcuggcc

SEQ ID NO: 445617 - RNA, 32 nt, Human
gcuccggaagaugaaaccgaaaaagaaucugc

SEQ ID NO: 445618 - RNA, 32 nt, Human
gcuccggaccagcucagccucugauaagcugg

SEQ ID NO: 445619 - RNA, 32 nt, Human
gcuccggacgcagagguggcaguggcaccagg

SEQ ID NO: 445620 - RNA, 32 nt, Human
gcuccggagaagcaguaggcgaggggccuggc

SEQ ID NO: 445621 - RNA, 18 nt, Human
gcuccggagcugcagcca

SEQ ID NO: 445622 - RNA, 32 nt, Human
gcuccggaggcugaggcaggagaaucgcuuga

SEQ ID NO: 445623 - RNA, 32 nt, Human
gcuccggccaaaugcugggcucaggccugggu

SEQ ID NO: 445624 - RNA, 19 nt, Human
gcuccggccagcccagccc

SEQ ID NO: 445625 - RNA, 23 nt, Human
gcuccggccaguucccuuuuaga

SEQ ID NO: 445626 - RNA, 22 nt, Human
gcuccggccucagccagcccca

SEQ ID NO: 445627 - RNA, 21 nt, Human
gcuccggcgccugcagccccg

SEQ ID NO: 445628 - RNA, 32 nt, Human
gcuccggcucacugcccagcccccaucuaccu

SEQ ID NO: 445629 - RNA, 32 nt, Human
gcuccggcucccagguucacgccauuguccug

SEQ ID NO: 445630 - RNA, 22 nt, Human
gcuccggcuccgaguccgagga

SEQ ID NO: 445631 - RNA, 32 nt, Human
gcuccggcucgagcucaggcuccagcuucagc

SEQ ID NO: 445632 - RNA, 21 nt, Human
gcuccggcuggcaccugagga

SEQ ID NO: 445633 - RNA, 32 nt, Human
gcuccgggagccaagcagggauccgggccucg

SEQ ID NO: 445634 - RNA, 32 nt, Human
gcuccgggaggccuuggcugggacagaguggg

SEQ ID NO: 445635 - RNA, 32 nt, Human
gcuccgggcccgcggcaaccucgggcgcuguu

SEQ ID NO: 445636 - RNA, 32 nt, Human
gcuccgggcucuuccagggagggguggguaca

SEQ ID NO: 445637 - RNA, 32 nt, Human
gcuccggggaaggcgguugcagcuccugagug

SEQ ID NO: 445638 - RNA, 32 nt, Human
gcuccggggcccaguggcucuaccccugcucc

SEQ ID NO: 445639 - RNA, 32 nt, Human
gcuccggggcggagcucgcgauagcgaccggg

SEQ ID NO: 445640 - RNA, 32 nt, Human
gcuccggggcucucaucuuccacucggaucuc

SEQ ID NO: 445641 - RNA, 32 nt, Human
gcuccggggcuucuucccugcccgcccggggc

SEQ ID NO: 445642 - RNA, 32 nt, Human
gcuccgggggcagaccagacucugacucuccu

SEQ ID NO: 445643 - RNA, 32 nt, Human
gcuccgggucuggagggaugcgacauccugag

SEQ ID NO: 445644 - RNA, 32 nt, Human
gcuccgggugccgcggcacugcagcgcugaga

SEQ ID NO: 445645 - RNA, 32 nt, Human
gcuccggugcucgcacaaucccccgccucggc

SEQ ID NO: 445646 - RNA, 32 nt, Human
gcuccggugugucugucgguugcaguguugga

SEQ ID NO: 445647 - RNA, 21 nt, Human
gcuccgguucacucuuuccaa

SEQ ID NO: 445648 - RNA, 32 nt, Human
gcuccgguuggugagcgcgccugcgcguugac

SEQ ID NO: 445649 - RNA, 20 nt, Human
gcuccgucacacucuccgag

SEQ ID NO: 445650 - RNA, 32 nt, Human
gcuccgucacccaggcuggagugcaguggcaa

SEQ ID NO: 445651 - RNA, 32 nt, Human
gcuccgucacccaggcuggagugcaguggcgc

SEQ ID NO: 445652 - RNA, 22 nt, Human
gcuccgucccuccccacccagg

SEQ ID NO: 445653 - RNA, 28 nt, Human
gcuccguccugcauuucugugguccgug

SEQ ID NO: 445654 - RNA, 32 nt, Human
gcuccgucgcccaggcuggcaugcaguugcgc

SEQ ID NO: 445655 - RNA, 32 nt, Human
gcuccgugacccaggcuggaaugcaauggcuc

SEQ ID NO: 445656 - RNA, 32 nt, Human
gcuccgugccuccaccaccacuggccaccagg

SEQ ID NO: 445657 - RNA, 32 nt, Human
gcuccgugcuuuuagcccuccugagccaaaga

SEQ ID NO: 445658 - RNA, 31 nt, Human
gcuccguggguggcaggacugaacuugaaca

SEQ ID NO: 445659 - RNA, 23 nt, Human
gcuccgugugccccagcacgaca

SEQ ID NO: 445660 - RNA, 32 nt, Human
gcuccguucccuggcuagucugugccugguca

SEQ ID NO: 445661 - RNA, 32 nt, Human
gcuccguucuccucacugucauggugccacca

SEQ ID NO: 445662 - RNA, 32 nt, Human
gcuccguugcccagguuggagugcaguggccc

SEQ ID NO: 445663 - RNA, 32 nt, Human
gcuccguugccuagcuggagugcacgaucuca

SEQ ID NO: 445664 - RNA, 32 nt, Human
gcuccuaaagccagggguuagcaccuggccag

SEQ ID NO: 445665 - RNA, 24 nt, Human
gcuccuaaagccuucugucuccua

SEQ ID NO: 445666 - RNA, 32 nt, Human
gcuccuaaagugcugggauuacaggcgugagc

SEQ ID NO: 445667 - RNA, 32 nt, Human
gcuccuaagaguucuuaauuuauaacuaauuu

SEQ ID NO: 445668 - RNA, 32 nt, Human
gcuccuaaggaaccccacccccaugcaauuug

SEQ ID NO: 445669 - RNA, 32 nt, Human
gcuccuaaugggggcccaaagcucagggcugg

SEQ ID NO: 445670 - RNA, 32 nt, Human
gcuccuaccucuucccuccuugccagccccug

SEQ ID NO: 445671 - RNA, 32 nt, Human
gcuccuagaaaggcgaaaagauauucaggagc

SEQ ID NO: 445672 - RNA, 32 nt, Human
gcuccuagaacaguuccuggcuuguaacagaa

SEQ ID NO: 445673 - RNA, 32 nt, Human
gcuccuagccugggugacagagcaagacucca

SEQ ID NO: 445674 - RNA, 19 nt, Human
gcuccuagccugugcucug

SEQ ID NO: 445675 - RNA, 32 nt, Human
gcuccuagcgggcuuggucaagagcaggaggc

SEQ ID NO: 445676 - RNA, 32 nt, Human
gcuccuauccacccuggccagcacccagcuua

SEQ ID NO: 445677 - RNA, 32 nt, Human
gcuccuaucccaccccaccccaaaaagagaaa

SEQ ID NO: 445678 - RNA, 28 nt, Human
gcuccucaacgugcggccucaucauaag

SEQ ID NO: 445679 - RNA, 18 nt, Human
gcuccucacaacauggug

SEQ ID NO: 445680 - RNA, 32 nt, Human
gcuccucacccaggcuggaaugcaguggugug

SEQ ID NO: 445681 - RNA, 23 nt, Human
gcuccucagccaggacacagggu

SEQ ID NO: 445682 - RNA, 22 nt, Human
gcuccucagcccucuucucccu

SEQ ID NO: 445683 - RNA, 21 nt, Human
gcuccucagcucccucagugu

SEQ ID NO: 445684 - RNA, 25 nt, Human
gcuccucagcugggggccucggggu

SEQ ID NO: 445685 - RNA, 19 nt, Human
gcuccucagcuucgugucc

SEQ ID NO: 445686 - RNA, 32 nt, Human
gcuccucaggaggcugaggugggaggauggcu

SEQ ID NO: 445687 - RNA, 32 nt, Human
gcuccucaggcaccuccucucugacggggccu

SEQ ID NO: 445688 - RNA, 32 nt, Human
gcuccucaggcugccucucugccuguuacugc

SEQ ID NO: 445689 - RNA, 21 nt, Human
gcuccucagggccccggggca

SEQ ID NO: 445690 - RNA, 32 nt, Human
gcuccucaguaggacagacagacgcaggcggg

SEQ ID NO: 445691 - RNA, 18 nt, Human
gcuccucagucgcagggg

SEQ ID NO: 445692 - RNA, 32 nt, Human
gcuccucaugccacaagaugugacaccuuucc

SEQ ID NO: 445693 - RNA, 32 nt, Human
gcuccucauggacgggagcgcaguggggaagg

SEQ ID NO: 445694 - RNA, 32 nt, Human
gcuccucauuuuuccuccuguugcaccccagc

SEQ ID NO: 445695 - RNA, 24 nt, Human
gcuccuccaaagccagagcccaag

SEQ ID NO: 445696 - RNA, 25 nt, Human
gcuccuccacccagugcuucugccc

SEQ ID NO: 445697 - RNA, 32 nt, Human
gcuccuccagaguggagccagggggacagugg

SEQ ID NO: 445698 - RNA, 32 nt, Human
gcuccuccagcagcucagaauguggccuguau

SEQ ID NO: 445699 - RNA, 32 nt, Human
gcuccuccaugcaguacucacacugcugucug

SEQ ID NO: 445700 - RNA, 32 nt, Human
gcuccucccaacaaacuccagaacagcagaaa

SEQ ID NO: 445701 - RNA, 32 nt, Human
gcuccucccacacccacccuggcuuccaucau

SEQ ID NO: 445702 - RNA, 32 nt, Human
gcuccucccacaguccuaucuccucaccaggc

SEQ ID NO: 445703 - RNA, 32 nt, Human
gcuccucccaccccaccucuucucagccuugc

SEQ ID NO: 445704 - RNA, 18 nt, Human
gcuccuccccagccucca

SEQ ID NO: 445705 - RNA, 32 nt, Human
gcuccucccccaggaagagccuuaaaccccaa

SEQ ID NO: 445706 - RNA, 19 nt, Human
gcuccucccccucaugcca

SEQ ID NO: 445707 - RNA, 32 nt, Human
gcuccuccccugagacaagugagggguagucg

SEQ ID NO: 445708 - RNA, 19 nt, Human
gcuccuccccugccugcca

SEQ ID NO: 445709 - RNA, 32 nt, Human
gcuccuccccuucuuucucuuccuucugccuc

SEQ ID NO: 445710 - RNA, 32 nt, Human
gcuccucccucuuuacccuccccuccagugaa

SEQ ID NO: 445711 - RNA, 20 nt, Human
gcuccucccugaccuuccuc

SEQ ID NO: 445712 - RNA, 32 nt, Human
gcuccucccugccucaguggcucuggguaccu

SEQ ID NO: 445713 - RNA, 32 nt, Human
gcuccucccugccuugccuuguuugcugaggg

SEQ ID NO: 445714 - RNA, 23 nt, Human
gcuccuccgacccgcuccgcucc

SEQ ID NO: 445715 - RNA, 32 nt, Human
gcuccuccgccuggccugggccgucugcccgc

SEQ ID NO: 445716 - RNA, 21 nt, Human
gcuccuccggcucugcagggu

SEQ ID NO: 445717 - RNA, 32 nt, Human
gcuccuccucacccucuaccucccugugcuca

SEQ ID NO: 445718 - RNA, 19 nt, Human
gcuccuccucagccugcca

SEQ ID NO: 445719 - RNA, 19 nt, Human
gcuccuccucaggcugcug

SEQ ID NO: 445720 - RNA, 32 nt, Human
gcuccuccuccaggauggcuggaggugggacc

SEQ ID NO: 445721 - RNA, 23 nt, Human
gcuccuccuccucccucccaagg

SEQ ID NO: 445722 - RNA, 32 nt, Human
gcuccuccucuccccucuccucuuucagagca

SEQ ID NO: 445723 - RNA, 32 nt, Human
gcuccuccugcacggaagagacaggggcaggg

SEQ ID NO: 445724 - RNA, 16 nt, Human
gcuccuccugccacca

SEQ ID NO: 445725 - RNA, 32 nt, Human
gcuccuccuuccaagagcacugaggcaccagu

SEQ ID NO: 445726 - RNA, 32 nt, Human
gcuccucgcaucagauccucugugcugggaau

SEQ ID NO: 445727 - RNA, 32 nt, Human
gcuccucgcccgcgggaagaccaggcugcgac

SEQ ID NO: 445728 - RNA, 21 nt, Human
gcuccucgcucucggacgcca

SEQ ID NO: 445729 - RNA, 25 nt, Human
gcuccucgcugucgccgccgcugcc

SEQ ID NO: 445730 - RNA, 32 nt, Human
gcuccucggacaccaagcagaauucugcaugg

SEQ ID NO: 445731 - RNA, 32 nt, Human
gcuccucggacucugguuaccucugaggcugg

SEQ ID NO: 445732 - RNA, 32 nt, Human
gcuccucggcuaugcuaauguccccucagaga

SEQ ID NO: 445733 - RNA, 23 nt, Human
gcuccucgucaugugauuuucca

SEQ ID NO: 445734 - RNA, 32 nt, Human
gcuccucguccuccucguccuccggggcccca

SEQ ID NO: 445735 - RNA, 32 nt, Human
gcuccucuaaaccuggguaagcucuuugaccu

SEQ ID NO: 445736 - RNA, 32 nt, Human
gcuccucucacugcccucugcaccagcaacau

SEQ ID NO: 445737 - RNA, 22 nt, Human
gcuccucucaggcugggccccg

SEQ ID NO: 445738 - RNA, 32 nt, Human
gcuccucuccacccugacucuacaggccgggg

SEQ ID NO: 445739 - RNA, 32 nt, Human
gcuccucuccagacacagagacaugggagugg

SEQ ID NO: 445740 - RNA, 32 nt, Human
gcuccucuccagaguuuccucucaccuccgug

SEQ ID NO: 445741 - RNA, 32 nt, Human
gcuccucuccuggaggauugcagguggaacuc

SEQ ID NO: 445742 - RNA, 32 nt, Human
gcuccucuccuuccuuuuccuuccuaggcacu

SEQ ID NO: 445743 - RNA, 32 nt, Human
gcuccucuccuuuccuccucccccucggagcc

SEQ ID NO: 445744 - RNA, 23 nt, Human
gcuccucucgccgccgccuccac

SEQ ID NO: 445745 - RNA, 32 nt, Human
gcuccucucggccccuccuccugggccgccuc

SEQ ID NO: 445746 - RNA, 32 nt, Human
gcuccucucucaccuccucucucccucuccug

SEQ ID NO: 445747 - RNA, 17 nt, Human
gcuccucugaagccagg

SEQ ID NO: 445748 - RNA, 24 nt, Human
gcuccucugaaggaucaccugccc

SEQ ID NO: 445749 - RNA, 23 nt, Human
gcuccucugacucccaucucacu

SEQ ID NO: 445750 - RNA, 19 nt, Human
gcuccucugacugaaccua

SEQ ID NO: 445751 - RNA, 32 nt, Human
gcuccucugagccaggaggccggugcugggcc

SEQ ID NO: 445752 - RNA, 32 nt, Human
gcuccucugcaaaggccagccagcuugggagc

SEQ ID NO: 445753 - RNA, 32 nt, Human
gcuccucugcagcuuccuccucagccucccuc

SEQ ID NO: 445754 - RNA, 32 nt, Human
gcuccucugccuauuugcccacaggcuuugcu

SEQ ID NO: 445755 - RNA, 32 nt, Human
gcuccucugcucccucuuuuucucccuucucu

SEQ ID NO: 445756 - RNA, 32 nt, Human
gcuccucugcuuacuuuuccuccuggcuggau

SEQ ID NO: 445757 - RNA, 32 nt, Human
gcuccucuggugcccacgcccuugccacccug

SEQ ID NO: 445758 - RNA, 21 nt, Human
gcuccucugucaccagcccca

SEQ ID NO: 445759 - RNA, 32 nt, Human
gcuccucugucccagcucugcggcccaggggg

SEQ ID NO: 445760 - RNA, 18 nt, Human
gcuccucugugggugagg

SEQ ID NO: 445761 - RNA, 32 nt, Human
gcuccucuuguucgguuaaccagcacauaaca

SEQ ID NO: 445762 - RNA, 32 nt, Human
gcuccucuuugcuuccuucccucucucuccuc

SEQ ID NO: 445763 - RNA, 32 nt, Human
gcuccugaaagaaaugcuagaagccuaagaac

SEQ ID NO: 445764 - RNA, 32 nt, Human
gcuccugaacaacaggccucaugccucucuuu

SEQ ID NO: 445765 - RNA, 32 nt, Human
gcuccugaacaucucugauuucuccggcuguc

SEQ ID NO: 445766 - RNA, 32 nt, Human
gcuccugaacuuuucuuucuuccaucaugcuc

SEQ ID NO: 445767 - RNA, 32 nt, Human
gcuccugaagcagcaguuauggagcuucccuc

SEQ ID NO: 445768 - RNA, 32 nt, Human
gcuccugaagcuugugggcagcuccagaagcu

SEQ ID NO: 445769 - RNA, 32 nt, Human
gcuccugacagccuggcgacguggcgaagaug

SEQ ID NO: 445770 - RNA, 32 nt, Human
gcuccugaccagacccucagaaccugaggacg

SEQ ID NO: 445771 - RNA, 23 nt, Human
gcuccugacccgacccagcccca

SEQ ID NO: 445772 - RNA, 32 nt, Human
gcuccugacugggcacaggagcucccagcuuu

SEQ ID NO: 445773 - RNA, 32 nt, Human
gcuccugacuguugcugcuccccagcccaugg

SEQ ID NO: 445774 - RNA, 32 nt, Human
gcuccugacuuccauucccccuucaaaguccg

SEQ ID NO: 445775 - RNA, 32 nt, Human
gcuccugagaccuggcccugccacacgcucca

SEQ ID NO: 445776 - RNA, 32 nt, Human
gcuccugagauggaagaucuguccucuccaga

SEQ ID NO: 445777 - RNA, 32 nt, Human
gcuccugaggaggaaaauggcggagaacgcgg

SEQ ID NO: 445778 - RNA, 32 nt, Human
gcuccugaggccaaagccagagacucgaacag

SEQ ID NO: 445779 - RNA, 32 nt, Human
gcuccugaggcugaggcaggaagaucacuuga

SEQ ID NO: 445780 - RNA, 32 nt, Human
gcuccugaggggcagaggagcagagaugcauc

SEQ ID NO: 445781 - RNA, 32 nt, Human
gcuccugaguagcuaggauuacaggcacaugc

SEQ ID NO: 445782 - RNA, 32 nt, Human
gcuccugaguagcuggaacuacaggcacgcac

SEQ ID NO: 445783 - RNA, 32 nt, Human
gcuccugaguagcugggacuacaggauuacag

SEQ ID NO: 445784 - RNA, 32 nt, Human
gcuccugaguagcugggauuacaggcacguga

SEQ ID NO: 445785 - RNA, 32 nt, Human
gcuccugaguagcugggauuacaggcgcccgc

SEQ ID NO: 445786 - RNA, 32 nt, Human
gcuccugaguagcugggccugugcacugggca

SEQ ID NO: 445787 - RNA, 32 nt, Human
gcuccugaguagcuggggauuacaggugccua

SEQ ID NO: 445788 - RNA, 32 nt, Human
gcuccugaucccccuucuccuugcaucacccg

SEQ ID NO: 445789 - RNA, 32 nt, Human
gcuccugaucuuccucccuuccucccuuucuu

SEQ ID NO: 445790 - RNA, 32 nt, Human
gcuccugauggccauggaaggaacauuuuucu

SEQ ID NO: 445791 - RNA, 32 nt, Human
gcuccugcaagggugagcacuguauacacaga

SEQ ID NO: 445792 - RNA, 32 nt, Human
gcuccugcacacaugcaugcacacaaacgugu

SEQ ID NO: 445793 - RNA, 17 nt, Human
gcuccugcaccagcccc

SEQ ID NO: 445794 - RNA, 32 nt, Human
gcuccugcacuucuccccagagcgggacccuc

SEQ ID NO: 445795 - RNA, 24 nt, Human
gcuccugcagcgccucggucugug

SEQ ID NO: 445796 - RNA, 32 nt, Human
gcuccugcaggcggcgcuugcgguacgggcug

SEQ ID NO: 445797 - RNA, 32 nt, Human
gcuccugcauauguauaugcugggugaccuug

SEQ ID NO: 445798 - RNA, 32 nt, Human
gcuccugcauuccgucacuccaugacuucauc

SEQ ID NO: 445799 - RNA, 22 nt, Human
gcuccugccacagccgucgccu

SEQ ID NO: 445800 - RNA, 26 nt, Human
gcuccugccagccaugccuucagggu

SEQ ID NO: 445801 - RNA, 32 nt, Human
gcuccugcccaagagaggggcuguggggcccc

SEQ ID NO: 445802 - RNA, 32 nt, Human
gcuccugcccacacuccuaccugcugcccuga

SEQ ID NO: 445803 - RNA, 32 nt, Human
gcuccugcccacacuccugccugcugcccuga

SEQ ID NO: 445804 - RNA, 32 nt, Human
gcuccugcccacgcuccugacugcugcccuga

SEQ ID NO: 445805 - RNA, 32 nt, Human
gcuccugccccuccuuuaucaaaguuggggac

SEQ ID NO: 445806 - RNA, 32 nt, Human
gcuccugcccgcacuccugccugcugcccuga

SEQ ID NO: 445807 - RNA, 32 nt, Human
gcuccugccgagaagcugggccaccccuuaag

SEQ ID NO: 445808 - RNA, 20 nt, Human
gcuccugccgccgccgccgc

SEQ ID NO: 445809 - RNA, 32 nt, Human
gcuccugccuauaaucccagcacuuugggagg

SEQ ID NO: 445810 - RNA, 32 nt, Human
gcuccugccuccugccccagcagguaccacgg

SEQ ID NO: 445811 - RNA, 17 nt, Human
gcuccugccugccacca

SEQ ID NO: 445812 - RNA, 32 nt, Human
gcuccugccuggauucccagcacuuugggaga

SEQ ID NO: 445813 - RNA, 32 nt, Human
gcuccugccuguaaucccagcacuuugggagg

SEQ ID NO: 445814 - RNA, 32 nt, Human
gcuccugccuguaaucgcagcacuuugggagg

SEQ ID NO: 445815 - RNA, 32 nt, Human
gcuccugccugugauccuagcacuuugggagg

SEQ ID NO: 445816 - RNA, 32 nt, Human
gcuccugccuguucucagccccggcuccugcc

SEQ ID NO: 445817 - RNA, 32 nt, Human
gcuccugccuugaugaagcccauguccugccu

SEQ ID NO: 445818 - RNA, 23 nt, Human
gcuccugcgaccccccagccccg

SEQ ID NO: 445819 - RNA, 32 nt, Human
gcuccugcgcuuccucuccuccuggguguuaa

SEQ ID NO: 445820 - RNA, 32 nt, Human
gcuccugcuccggcuccuccaucuuggccucg

SEQ ID NO: 445821 - RNA, 32 nt, Human
gcuccugcucucccucucccuccuccaggcca

SEQ ID NO: 445822 - RNA, 21 nt, Human
gcuccugcugaaacaccuccc

SEQ ID NO: 445823 - RNA, 31 nt, Human
gcuccugcugcgucugggccugaaggucucu

SEQ ID NO: 445824 - RNA, 32 nt, Human
gcuccugcuggcuugguagaagacagaauucg

SEQ ID NO: 445825 - RNA, 32 nt, Human
gcuccugcugggcuccagccagaguagucaca

SEQ ID NO: 445826 - RNA, 32 nt, Human
gcuccugcuucaggugcagaaacacagcuauu

SEQ ID NO: 445827 - RNA, 25 nt, Human
gcuccuggaacuauacagauaggua

SEQ ID NO: 445828 - RNA, 22 nt, Human
gcuccuggaagggauccagggu

SEQ ID NO: 445829 - RNA, 32 nt, Human
gcuccuggacugcccuguaucuaaguccucaa

SEQ ID NO: 445830 - RNA, 32 nt, Human
gcuccuggaggcaggugaugcugugggcacgc

SEQ ID NO: 445831 - RNA, 32 nt, Human
gcuccuggauccgcuccugccugcgcccgcag

SEQ ID NO: 445832 - RNA, 19 nt, Human
gcuccuggaucucccaggu

SEQ ID NO: 445833 - RNA, 32 nt, Human
gcuccuggaugaccaggcaccgcuguugagca

SEQ ID NO: 445834 - RNA, 32 nt, Human
gcuccuggccauauaucaagguuucaauaaau

SEQ ID NO: 445835 - RNA, 24 nt, Human
gcuccuggccccuuggcuggccgg

SEQ ID NO: 445836 - RNA, 32 nt, Human
gcuccuggccucaaucgaucuuccugccaagg

SEQ ID NO: 445837 - RNA, 32 nt, Human
gcuccuggcgccuucucccuagggguagacuc

SEQ ID NO: 445838 - RNA, 32 nt, Human
gcuccuggcgcuacugcccuccagagucccuc

SEQ ID NO: 445839 - RNA, 25 nt, Human
gcuccuggcucccuccucggcccgu

SEQ ID NO: 445840 - RNA, 32 nt, Human
gcuccuggcugcaggcccaggccccaaggucu

SEQ ID NO: 445841 - RNA, 32 nt, Human
gcuccuggcuucccccuggagcugggagagag

SEQ ID NO: 445842 - RNA, 32 nt, Human
gcuccugggaaaggaaaggaccacagcaaaca

SEQ ID NO: 445843 - RNA, 32 nt, Human
gcuccugggacaccuccaguguccagcacaca

SEQ ID NO: 445844 - RNA, 32 nt, Human
gcuccugggcaggcucggcagggcaggcagcu

SEQ ID NO: 445845 - RNA, 32 nt, Human
gcuccugggccccagccccgcgcaggccaagg

SEQ ID NO: 445846 - RNA, 32 nt, Human
gcuccuggggugcagggugcuuggggguggcu

SEQ ID NO: 445847 - RNA, 32 nt, Human
gcuccugggugugucagaggccagccugggga

SEQ ID NO: 445848 - RNA, 31 nt, Human
gcuccuggguuucagcaauucuccugccuca

SEQ ID NO: 445849 - RNA, 18 nt, Human
gcuccuggugcccagccc

SEQ ID NO: 445850 - RNA, 32 nt, Human
gcuccuggugcuaacaacaaaguuccacuucc

SEQ ID NO: 445851 - RNA, 32 nt, Human
gcuccuggugcuguuccugcauucacccacug

SEQ ID NO: 445852 - RNA, 32 nt, Human
gcuccugguggaagcaagggagcccagccgaa

SEQ ID NO: 445853 - RNA, 32 nt, Human
gcuccugguggggcagaaaggcugcaacgcug

SEQ ID NO: 445854 - RNA, 32 nt, Human
gcuccuguauaguucccucccacacugaauag

SEQ ID NO: 445855 - RNA, 32 nt, Human
gcuccuguccagacccugacccucccucccaa

SEQ ID NO: 445856 - RNA, 32 nt, Human
gcuccugucccuggcccuaccuccuucccugu

SEQ ID NO: 445857 - RNA, 32 nt, Human
gcuccugucgcccaggcuggagugcaauggca

SEQ ID NO: 445858 - RNA, 32 nt, Human
gcuccugucuauaaucgcagcacuuugggagg

SEQ ID NO: 445859 - RNA, 32 nt, Human
gcuccugucuguuuccccauccugccagauuu

SEQ ID NO: 445860 - RNA, 32 nt, Human
gcuccugugaggcagacaggacagugagguug

SEQ ID NO: 445861 - RNA, 32 nt, Human
gcuccugugauguucuggggaggccuuggaag

SEQ ID NO: 445862 - RNA, 32 nt, Human
gcuccugugcugcugagcagggcaaccaguag

SEQ ID NO: 445863 - RNA, 32 nt, Human
gcuccuguugugcaggcuggagugcaguggca

SEQ ID NO: 445864 - RNA, 32 nt, Human
gcuccuuaaagcagaggagccuguccugggag

SEQ ID NO: 445865 - RNA, 32 nt, Human
gcuccuucaccacccccacgauugguaugaug

SEQ ID NO: 445866 - RNA, 32 nt, Human
gcuccuucagaaauagcagcaggcugguugcu

SEQ ID NO: 445867 - RNA, 32 nt, Human
gcuccuucagccaggccagcagaagggccuuc

SEQ ID NO: 445868 - RNA, 32 nt, Human
gcuccuucagcuucucuggcuccugggccagg

SEQ ID NO: 445869 - RNA, 32 nt, Human
gcuccuuccagccauggcucucagaguccuuc

SEQ ID NO: 445870 - RNA, 18 nt, Human
gcuccuuccagcuugcca

SEQ ID NO: 445871 - RNA, 32 nt, Human
gcuccuuccagugcgcccaguacagcaggaga

SEQ ID NO: 445872 - RNA, 32 nt, Human
gcuccuucccaaacugcccccuugcccagcca

SEQ ID NO: 445873 - RNA, 20 nt, Human
gcuccuuccuccucggcucg

SEQ ID NO: 445874 - RNA, 32 nt, Human
gcuccuuccuggaguacaacagcuggcaugug

SEQ ID NO: 445875 - RNA, 32 nt, Human
gcuccuucuccacuuuuugcagaucaaacagc

SEQ ID NO: 445876 - RNA, 32 nt, Human
gcuccuucuccagccuuauugcacugacuaaa

SEQ ID NO: 445877 - RNA, 18 nt, Human
gcuccuucucuucaugcc

SEQ ID NO: 445878 - RNA, 32 nt, Human
gcuccuucucuucucccaucugcuaccagagc

SEQ ID NO: 445879 - RNA, 32 nt, Human
gcuccuucugucuuguagagucuuguuauagu

SEQ ID NO: 445880 - RNA, 32 nt, Human
gcuccuucuucagcccuccccuucccagcccc

SEQ ID NO: 445881 - RNA, 32 nt, Human
gcuccuucuuguucugcccuccagagauuugc

SEQ ID NO: 445882 - RNA, 32 nt, Human
gcuccuugacucugccguuuccuaauaagacc

SEQ ID NO: 445883 - RNA, 32 nt, Human
gcuccuugagggaugaaccugggagcccaaga

SEQ ID NO: 445884 - RNA, 32 nt, Human
gcuccuugccacccucaucuccagcaugccug

SEQ ID NO: 445885 - RNA, 21 nt, Human
gcuccuugccugccacuucuu

SEQ ID NO: 445886 - RNA, 24 nt, Human
gcuccuugcugagcuuuugagggu

SEQ ID NO: 445887 - RNA, 32 nt, Human
gcuccuugcugguuuuuaacuuggggagaaac

SEQ ID NO: 445888 - RNA, 32 nt, Human
gcuccuuggcggugccuggagcccgggcgcac

SEQ ID NO: 445889 - RNA, 32 nt, Human
gcuccuuggcuauaaguuauuuucccuguuac

SEQ ID NO: 445890 - RNA, 23 nt, Human
gcuccuuggcuucugaaggcuga

SEQ ID NO: 445891 - RNA, 32 nt, Human
gcuccuuggucaccaggcaaugggagcuguag

SEQ ID NO: 445892 - RNA, 32 nt, Human
gcuccuuuaagcugcugcugcauacacauuuc

SEQ ID NO: 445893 - RNA, 32 nt, Human
gcuccuuucacauuggauugugugugaguggu

SEQ ID NO: 445894 - RNA, 32 nt, Human
gcuccuuucagagguuggacagugccaugaca

SEQ ID NO: 445895 - RNA, 32 nt, Human
gcuccuuucccuuuuccaucaucucuuuuccc

SEQ ID NO: 445896 - RNA, 22 nt, Human
gcuccuuugcaggaaacugggg

SEQ ID NO: 445897 - RNA, 23 nt, Human
gcuccuuuggguaaauaccaagg

SEQ ID NO: 445898 - RNA, 32 nt, Human
gcuccuuuucacccugcccccugggccugagg

SEQ ID NO: 445899 - RNA, 32 nt, Human
gcuccuuuucauuaccccuccuccguuuucac

SEQ ID NO: 445900 - RNA, 32 nt, Human
gcucgaaaguagaagaaaguguugccagggac

SEQ ID NO: 445901 - RNA, 32 nt, Human
gcucgaacccaggagguggagguugcagugag

SEQ ID NO: 445902 - RNA, 32 nt, Human
gcucgaaugguccucucacugcagccucccaa

SEQ ID NO: 445903 - RNA, 32 nt, Human
gcucgacaugaucuuaucaacauggaaaauaa

SEQ ID NO: 445904 - RNA, 32 nt, Human
gcucgacauuaggccucaaggcugccaucugu

SEQ ID NO: 445905 - RNA, 32 nt, Human
gcucgacccgcagcaggagcagcagcuguucc

SEQ ID NO: 445906 - RNA, 17 nt, Human
gcucgacuuccaccucu

SEQ ID NO: 445907 - RNA, 32 nt, Human
gcucgagaauacugcccaguuacucuagcgcg

SEQ ID NO: 445908 - RNA, 32 nt, Human
gcucgagaccagccuggaaaauguggugaaau

SEQ ID NO: 445909 - RNA, 32 nt, Human
gcucgagaccagccuggccaacauggugaaac

SEQ ID NO: 445910 - RNA, 25 nt, Human
gcucgagaccagccugggcaacaug

SEQ ID NO: 445911 - RNA, 32 nt, Human
gcucgagaggagaauguggccacuuuccgagg

SEQ ID NO: 445912 - RNA, 32 nt, Human
gcucgagccagccuggccaacauggcaaaacc

SEQ ID NO: 445913 - RNA, 32 nt, Human
gcucgagccugggguccaugucccuuugccgu

SEQ ID NO: 445914 - RNA, 32 nt, Human
gcucgagcggccagggccaggcgaggccgggg

SEQ ID NO: 445915 - RNA, 32 nt, Human
gcucgagcgguucuccugcgucagccucccaa

SEQ ID NO: 445916 - RNA, 32 nt, Human
gcucgaggaggaugccugggcccggugcaagg

SEQ ID NO: 445917 - RNA, 32 nt, Human
gcucgaggcuguucccuguccugccucagugc

SEQ ID NO: 445918 - RNA, 32 nt, Human
gcucgagggaaucugcuuacaggucguuccua

SEQ ID NO: 445919 - RNA, 32 nt, Human
gcucgagugacaucuucgcgcaccaaucggga

SEQ ID NO: 445920 - RNA, 21 nt, Human
gcucgaucucggcucacugca

SEQ ID NO: 445921 - RNA, 32 nt, Human
gcucgaugcagaaccaccaugcuccagacaca

SEQ ID NO: 445922 - RNA, 23 nt, Human
gcucgaugcucggccugcugcug

SEQ ID NO: 445923 - RNA, 32 nt, Human
gcucgauucccaggaucucggcugccuuuucc

SEQ ID NO: 445924 - RNA, 32 nt, Human
gcucgauucucccagugccuggcugaguuucg

SEQ ID NO: 445925 - RNA, 32 nt, Human
gcucgcaaaccugaaaacuacugacgcgccuu

SEQ ID NO: 445926 - RNA, 32 nt, Human
gcucgcacccccacuuucgccuccuccagcuc

SEQ ID NO: 445927 - RNA, 32 nt, Human
gcucgcaccuguaaucccagcacucuaggagg

SEQ ID NO: 445928 - RNA, 32 nt, Human
gcucgcaccuguaaucccagcacuuugggagg

SEQ ID NO: 445929 - RNA, 32 nt, Human
gcucgcagcagcuggggaggagccaaagccuc

SEQ ID NO: 445930 - RNA, 21 nt, Human
gcucgcagcuccccagucuca

SEQ ID NO: 445931 - RNA, 32 nt, Human
gcucgcaggaaggaagaagggagccgaggacg

SEQ ID NO: 445932 - RNA, 31 nt, Human
gcucgccagagagucuauguaugggauugaa

SEQ ID NO: 445933 - RNA, 19 nt, Human
gcucgccagcgcugugcuc

SEQ ID NO: 445934 - RNA, 32 nt, Human
gcucgccaggaaccucgccugguccugauuuc

SEQ ID NO: 445935 - RNA, 32 nt, Human
gcucgccaugucuucucacaagacuuucagga

SEQ ID NO: 445936 - RNA, 32 nt, Human
gcucgcccagacuccgggcagugagagggagg

SEQ ID NO: 445937 - RNA, 32 nt, Human
gcucgccccucuacuccuccacgccccggccc

SEQ ID NO: 445938 - RNA, 32 nt, Human
gcucgcccggagcagcccaggagcucagcaug

SEQ ID NO: 445939 - RNA, 32 nt, Human
gcucgccggcgcccugugcggacggcccugcc

SEQ ID NO: 445940 - RNA, 32 nt, Human
gcucgccucggaucagcugagccuucugagcu

SEQ ID NO: 445941 - RNA, 32 nt, Human
gcucgccucuggcggagcagcagccacucgcg

SEQ ID NO: 445942 - RNA, 32 nt, Human
gcucgccugaguaugggguggugucauggagc

SEQ ID NO: 445943 - RNA, 32 nt, Human
gcucgccuguaaucccagcacuuugggaggcc

SEQ ID NO: 445944 - RNA, 32 nt, Human
gcucgccuguaaucccagcuacuugggaggcu

SEQ ID NO: 445945 - RNA, 32 nt, Human
gcucgccuuuucguaccugggcucaggugcgg

SEQ ID NO: 445946 - RNA, 32 nt, Human
gcucgcgaggauguggggaaaagggaacccuc

SEQ ID NO: 445947 - RNA, 32 nt, Human
gcucgcgccauugcacuccagccuuggaacaa

SEQ ID NO: 445948 - RNA, 32 nt, Human
gcucgcgccgcucugcugcugcugcugccgcc

SEQ ID NO: 445949 - RNA, 32 nt, Human
gcucgcgccggcucaccaugcacugccacgcc

SEQ ID NO: 445950 - RNA, 32 nt, Human
gcucgcgccuguaaucccagcacuuugggagg

SEQ ID NO: 445951 - RNA, 32 nt, Human
gcucgcgcuugugaucccagcacuuugggaga

SEQ ID NO: 445952 - RNA, 32 nt, Human
gcucgcggaggcacuucuccgagcgugacgug

SEQ ID NO: 445953 - RNA, 18 nt, Human
gcucgcgggcccgugccg

SEQ ID NO: 445954 - RNA, 20 nt, Human
gcucgcguugaagccgcacg

SEQ ID NO: 445955 - RNA, 32 nt, Human
gcucgcucaccucccuccucugcaccaugacu

SEQ ID NO: 445956 - RNA, 32 nt, Human
gcucgcuccuguaaucccagcacuuugggagg

SEQ ID NO: 445957 - RNA, 32 nt, Human
gcucgcuccuuggucugcaguccuuuaaacaa

SEQ ID NO: 445958 - RNA, 32 nt, Human
gcucgcucucacugcuacugcuuccugggagg

SEQ ID NO: 445959 - RNA, 32 nt, Human
gcucgcucuccccagugucagcaacagcacuu

SEQ ID NO: 445960 - RNA, 32 nt, Human
gcucgcucuccuccccuuccuuccgcucaaug

SEQ ID NO: 445961 - RNA, 32 nt, Human
gcucgcucuccucugccaguugccggaggucu

SEQ ID NO: 445962 - RNA, 32 nt, Human
gcucgcucuccucugcgccugcgccgccggga

SEQ ID NO: 445963 - RNA, 32 nt, Human
gcucgcugcaaccaccaucuccuggguucagg

SEQ ID NO: 445964 - RNA, 22 nt, Human
gcucgcugcaacccccaccucc

SEQ ID NO: 445965 - RNA, 32 nt, Human
gcucgcugcaacccccaccucccagguucaag

SEQ ID NO: 445966 - RNA, 32 nt, Human
gcucgcugcaaccuccaccuccugggcucaca

SEQ ID NO: 445967 - RNA, 32 nt, Human
gcucgcugcaaccuccaccuccuggguucaag

SEQ ID NO: 445968 - RNA, 32 nt, Human
gcucgcugcaaccuccuccuccuggguucaag

SEQ ID NO: 445969 - RNA, 32 nt, Human
gcucgcugcagccacugccuccuggguucagg

SEQ ID NO: 445970 - RNA, 32 nt, Human
gcucgcugcagccuccaccucccagguucaag

SEQ ID NO: 445971 - RNA, 32 nt, Human
gcucgcugcagccucugccuccuggguucaag

SEQ ID NO: 445972 - RNA, 32 nt, Human
gcucgcugccuggugcuugucuuggcgagaug

SEQ ID NO: 445973 - RNA, 32 nt, Human
gcucgcuggcccugcacuccgccuuaguccug

SEQ ID NO: 445974 - RNA, 32 nt, Human
gcucgcugugcccgcugugccugcugugcccg

SEQ ID NO: 445975 - RNA, 32 nt, Human
gcucgcuugugucuauucaucauguuuagccu

SEQ ID NO: 445976 - RNA, 32 nt, Human
gcucggaaauccaucccacccaccucuguccc

SEQ ID NO: 445977 - RNA, 32 nt, Human
gcucggaagauggaggcugcagugagccauga

SEQ ID NO: 445978 - RNA, 18 nt, Human
gcucggaccaggcagcca

SEQ ID NO: 445979 - RNA, 22 nt, Human
gcucggaccuuccgcucucccc

SEQ ID NO: 445980 - RNA, 32 nt, Human
gcucggacuaagccauguggauucaggugugg

SEQ ID NO: 445981 - RNA, 18 nt, Human
gcucggacuuggugaagc

SEQ ID NO: 445982 - RNA, 32 nt, Human
gcucggagaaggacaggacaauggcggccuua

SEQ ID NO: 445983 - RNA, 32 nt, Human
gcucggagcagagaaggccagagcagagaggg

SEQ ID NO: 445984 - RNA, 32 nt, Human
gcucggagcccacguccuccucggugacacag

SEQ ID NO: 445985 - RNA, 21 nt, Human
gcucggaggaaccucugguaa

SEQ ID NO: 445986 - RNA, 32 nt, Human
gcucggaggcggaagcuugaggggcgcgggga

SEQ ID NO: 445987 - RNA, 32 nt, Human
gcucggauucacucugugaccgcauaugugag

SEQ ID NO: 445988 - RNA, 32 nt, Human
gcucggcaagcauaggcgaguuggcaguggaa

SEQ ID NO: 445989 - RNA, 20 nt, Human
gcucggcagcagcgcagcgg

SEQ ID NO: 445990 - RNA, 23 nt, Human
gcucggcagccgcccgcagcccc

SEQ ID NO: 445991 - RNA, 32 nt, Human
gcucggccacggguggcgaggcugcggugagg

SEQ ID NO: 445992 - RNA, 32 nt, Human
gcucggccagaacagcagcagcagcgaggaga

SEQ ID NO: 445993 - RNA, 32 nt, Human
gcucggcccaaggcaggagaaucucuugaagc

SEQ ID NO: 445994 - RNA, 32 nt, Human
gcucggcccuuccuucggucagaaagucgccc

SEQ ID NO: 445995 - RNA, 20 nt, Human
gcucggccgcugggaaccgu

SEQ ID NO: 445996 - RNA, 20 nt, Human
gcucggccguagcggagcug

SEQ ID NO: 445997 - RNA, 32 nt, Human
gcucggccuaggucuacguccccagcuccagc

SEQ ID NO: 445998 - RNA, 32 nt, Human
gcucggccucgccggccucccugcugcaggcc

SEQ ID NO: 445999 - RNA, 32 nt, Human
gcucggccuuaaggagcugaagagucugggua

SEQ ID NO: 446000 - RNA, 32 nt, Human
gcucggcgaaggccaaguugaaggcuuccacg

SEQ ID NO: 446001 - RNA, 32 nt, Human
gcucggcgagaaauugaucuccccagcuuuuc

SEQ ID NO: 446002 - RNA, 32 nt, Human
gcucggcgagcuccuccagaccuccuaggccu

SEQ ID NO: 446003 - RNA, 32 nt, Human
gcucggcgaguuggaguucauccuggaagcgu

SEQ ID NO: 446004 - RNA, 18 nt, Human
gcucggcgccggggccca

SEQ ID NO: 446005 - RNA, 32 nt, Human
gcucggcgcgcagguccugggcccagggcggg

SEQ ID NO: 446006 - RNA, 32 nt, Human
gcucggcggcaccuccacacccgccccaacgc

SEQ ID NO: 446007 - RNA, 32 nt, Human
gcucggcugaaccaggacuccucacugucuac

SEQ ID NO: 446008 - RNA, 32 nt, Human
gcucggcuucagucuccaggagacagugguca

SEQ ID NO: 446009 - RNA, 32 nt, Human
gcucggcuuccugcugauggucaggguuuugg

SEQ ID NO: 446010 - RNA, 32 nt, Human
gcucggcuucuuccucugugcuggucaugaaa

SEQ ID NO: 446011 - RNA, 32 nt, Human
gcucggcuuuggacuguguccucagcuccuuc

SEQ ID NO: 446012 - RNA, 32 nt, Human
gcucgggaacucacagaaaaugcugaguccgg

SEQ ID NO: 446013 - RNA, 20 nt, Human
gcucgggagcuggccgggga

SEQ ID NO: 446014 - RNA, 32 nt, Human
gcucgggaggcugaggcaggagaaucacuuga

SEQ ID NO: 446015 - RNA, 32 nt, Human
gcucgggaggcugaggcaggagaaucgcuuga

SEQ ID NO: 446016 - RNA, 32 nt, Human
gcucgggaggcugaggcaggagaaucucuuuc

SEQ ID NO: 446017 - RNA, 32 nt, Human
gcucgggaggcugaggcaggggaaucgcuuga

SEQ ID NO: 446018 - RNA, 32 nt, Human
gcucgggaggcugaggcaggggcauugcuugg

SEQ ID NO: 446019 - RNA, 32 nt, Human
gcucgggcagccgccgccaccgcugcccagga

SEQ ID NO: 446020 - RNA, 32 nt, Human
gcucgggccacuuacacaccacugccugauaa

SEQ ID NO: 446021 - RNA, 18 nt, Human
gcucgggccccagccccg

SEQ ID NO: 446022 - RNA, 18 nt, Human
gcucgggccccugcacca

SEQ ID NO: 446023 - RNA, 19 nt, Human
gcucgggccgcgccugcca

SEQ ID NO: 446024 - RNA, 20 nt, Human
gcucgggccgggggccacca

SEQ ID NO: 446025 - RNA, 32 nt, Human
gcucgggccuguaaucccagcacuuucggagg

SEQ ID NO: 446026 - RNA, 18 nt, Human
gcucgggccuguguaauu

SEQ ID NO: 446027 - RNA, 32 nt, Human
gcucgggcuagccucaaacuccugggcucaag

SEQ ID NO: 446028 - RNA, 32 nt, Human
gcucgggcuauccuuccaucucagccucccga

SEQ ID NO: 446029 - RNA, 32 nt, Human
gcucgggcuccugguggaggagggaagccugg

SEQ ID NO: 446030 - RNA, 32 nt, Human
gcucggggacucugcggcugcucucggaccug

SEQ ID NO: 446031 - RNA, 32 nt, Human
gcucggggaggaggcagugacggccggugaga

SEQ ID NO: 446032 - RNA, 32 nt, Human
gcucggggaggcagagaaucucuugggagucu

SEQ ID NO: 446033 - RNA, 32 nt, Human
gcucggggcugaagcacuggaugcacuucuug

SEQ ID NO: 446034 - RNA, 32 nt, Human
gcucggggcugcaggcuggagugcagugggac

SEQ ID NO: 446035 - RNA, 32 nt, Human
gcucggggucccugccaaaaaugcagaaccug

SEQ ID NO: 446036 - RNA, 32 nt, Human
gcucgggucaccuucucuguggaacagcaagu

SEQ ID NO: 446037 - RNA, 32 nt, Human
gcucgggucagaagcucacucccgugcccucg

SEQ ID NO: 446038 - RNA, 32 nt, Human
gcucgggucccuucaccuccccgcccuuucuu

SEQ ID NO: 446039 - RNA, 32 nt, Human
gcucgggugaagcucucgggaagggcaagacu

SEQ ID NO: 446040 - RNA, 32 nt, Human
gcucggucaccuaggcuggaguguaguggcgc

SEQ ID NO: 446041 - RNA, 24 nt, Human
gcucgguccuuccgaggaagcuaa

SEQ ID NO: 446042 - RNA, 32 nt, Human
gcucgguggaaaugcccagccgagggacgcga

SEQ ID NO: 446043 - RNA, 32 nt, Human
gcucgguggagacgguuugccccuguggcucg

SEQ ID NO: 446044 - RNA, 32 nt, Human
gcucgguucccaagucucaccucgccaguacu

SEQ ID NO: 446045 - RNA, 32 nt, Human
gcucguaaccaccacucugagaccagcuucuu

SEQ ID NO: 446046 - RNA, 32 nt, Human
gcucguaccuguaauccagcacuuugggaagc

SEQ ID NO: 446047 - RNA, 32 nt, Human
gcucguacucgugcgccucgcuucgcuuuucc

SEQ ID NO: 446048 - RNA, 32 nt, Human
gcucguagaggagagaaaacaagaguggacug

SEQ ID NO: 446049 - RNA, 32 nt, Human
gcucguaucuguaaucccagcacuuugagagg

SEQ ID NO: 446050 - RNA, 32 nt, Human
gcucgucacccaggcuggagugcaauugugca

SEQ ID NO: 446051 - RNA, 32 nt, Human
gcucgucaggaaggcaggagacaggagacggg

SEQ ID NO: 446052 - RNA, 32 nt, Human
gcucgucccacccuagggacucagccacuugc

SEQ ID NO: 446053 - RNA, 20 nt, Human
gcucguccccggccccggcc

SEQ ID NO: 446054 - RNA, 25 nt, Human
gcucguccucagcccaaagccugca

SEQ ID NO: 446055 - RNA, 32 nt, Human
gcucguccuccccuccccacccucacccaccu

SEQ ID NO: 446056 - RNA, 32 nt, Human
gcucgucgcugcuguuuccugcugggggugcc

SEQ ID NO: 446057 - RNA, 32 nt, Human
gcucgucgcuggcugcucccaccaaccaccac

SEQ ID NO: 446058 - RNA, 32 nt, Human
gcucgucucggaacuccugaccucaggugauc

SEQ ID NO: 446059 - RNA, 32 nt, Human
gcucgucugccuggacuguugcgggccccggg

SEQ ID NO: 446060 - RNA, 32 nt, Human
gcucgucugugucccugccacucugaguuauc

SEQ ID NO: 446061 - RNA, 32 nt, Human
gcucgugaccucacgugauccucccgucuccg

SEQ ID NO: 446062 - RNA, 32 nt, Human
gcucgugagcacacucagugcccagcccagcc

SEQ ID NO: 446063 - RNA, 32 nt, Human
gcucgugcauguaauccuagcacuuugggagg

SEQ ID NO: 446064 - RNA, 32 nt, Human
gcucgugccuacaaucccagcacuuugggagg

SEQ ID NO: 446065 - RNA, 19 nt, Human
gcucgugccuguaauacca

SEQ ID NO: 446066 - RNA, 32 nt, Human
gcucgugccuguaauaccaacauuuugggagg

SEQ ID NO: 446067 - RNA, 32 nt, Human
gcucgugccuguaaucccagcacuuugggagg

SEQ ID NO: 446068 - RNA, 32 nt, Human
gcucgugccuguacucccagcacuuugggagg

SEQ ID NO: 446069 - RNA, 32 nt, Human
gcucgugccuguagucccagcacuuugggagg

SEQ ID NO: 446070 - RNA, 32 nt, Human
gcucgugccugucaucccagcacuuugggagg

SEQ ID NO: 446071 - RNA, 32 nt, Human
gcucgugccugugaucucagcacuugggaaag

SEQ ID NO: 446072 - RNA, 32 nt, Human
gcucgugcucaaguagccuggcuggcacaggg

SEQ ID NO: 446073 - RNA, 32 nt, Human
gcucgugcuggguggauugugauguggaaacc

SEQ ID NO: 446074 - RNA, 32 nt, Human
gcucgugcuuguaaucccagcacuuugggagg

SEQ ID NO: 446075 - RNA, 32 nt, Human
gcucguggacccugggcucgucuuugcagagu

SEQ ID NO: 446076 - RNA, 32 nt, Human
gcucguggagcagaaucucccgacacccacac

SEQ ID NO: 446077 - RNA, 23 nt, Human
gcucguggccgcgccugcucccg

SEQ ID NO: 446078 - RNA, 19 nt, Human
gcucguggcuguaauccca

SEQ ID NO: 446079 - RNA, 32 nt, Human
gcucgugugccuggcccgagcccugcuccgca

SEQ ID NO: 446080 - RNA, 32 nt, Human
gcucguuacccaggguggagugcagugguagc

SEQ ID NO: 446081 - RNA, 32 nt, Human
gcucguuagcuuuaaucaaucaugcccugccu

SEQ ID NO: 446082 - RNA, 32 nt, Human
gcucguucaacucaggaacuuccccagauucc

SEQ ID NO: 446083 - RNA, 32 nt, Human
gcucguucucggcuugucuacaggcccuuuuc

SEQ ID NO: 446084 - RNA, 32 nt, Human
gcucguugcuugccuauucuuuacagaggaau

SEQ ID NO: 446085 - RNA, 32 nt, Human
gcucguuugagggauugggguggaccuggggu

SEQ ID NO: 446086 - RNA, 32 nt, Human
gcucguuuuauagcaaccucucucuacccuag

SEQ ID NO: 446087 - RNA, 32 nt, Human
gcucguuuugcagagaaggcaguguuccucua

SEQ ID NO: 446088 - RNA, 32 nt, Human
gcucuaaaacgggaaggcuauuugggacaggc

SEQ ID NO: 446089 - RNA, 32 nt, Human
gcucuaaagacuguucuggccccagacacagg

SEQ ID NO: 446090 - RNA, 32 nt, Human
gcucuaaaugcagaauuaauggagacuucaau

SEQ ID NO: 446091 - RNA, 21 nt, Human
gcucuaacaucucuggucuuu

SEQ ID NO: 446092 - RNA, 32 nt, Human
gcucuaacauggcaugcccuuucucagcccag

SEQ ID NO: 446093 - RNA, 32 nt, Human
gcucuaacccagccaggaagguguaaacaaua

SEQ ID NO: 446094 - RNA, 32 nt, Human
gcucuaacccauuuuccuccagcccuggcuac

SEQ ID NO: 446095 - RNA, 32 nt, Human
gcucuaagaccacccagcucucuuccuggcua

SEQ ID NO: 446096 - RNA, 32 nt, Human
gcucuaagggcagcugaccaccugccagcccc

SEQ ID NO: 446097 - RNA, 32 nt, Human
gcucuaaguugaaugcaguccuagugggaauc

SEQ ID NO: 446098 - RNA, 32 nt, Human
gcucuacaaggagucccugagccgccucaugg

SEQ ID NO: 446099 - RNA, 32 nt, Human
gcucuacacauacugcaugcucaggacccaua

SEQ ID NO: 446100 - RNA, 32 nt, Human
gcucuacagcggagguggcuguggcgguggcg

SEQ ID NO: 446101 - RNA, 32 nt, Human
gcucuacaucuucugccuuagucucaguuugu

SEQ ID NO: 446102 - RNA, 32 nt, Human
gcucuacauuauuucuucaaaggaaaggaaag

SEQ ID NO: 446103 - RNA, 32 nt, Human
gcucuaccacccaggcuggagugcaguggugu

SEQ ID NO: 446104 - RNA, 32 nt, Human
gcucuaccaguuccuguuucuucugagccaga

SEQ ID NO: 446105 - RNA, 32 nt, Human
gcucuaccaguucucguuuugggccagaggca

SEQ ID NO: 446106 - RNA, 32 nt, Human
gcucuaccccauuggcucagagcuagggcaaa

SEQ ID NO: 446107 - RNA, 17 nt, Human
gcucuaccccgccgcag

SEQ ID NO: 446108 - RNA, 32 nt, Human
gcucuacccuauacugaugcuccgacugccua

SEQ ID NO: 446109 - RNA, 32 nt, Human
gcucuacccucugccucucaccaggagacacu

SEQ ID NO: 446110 - RNA, 32 nt, Human
gcucuacccuugggaagccugaucccggugug

SEQ ID NO: 446111 - RNA, 32 nt, Human
gcucuaccgcaaggaccuggagauugugcucu

SEQ ID NO: 446112 - RNA, 26 nt, Human
gcucuaccuagcgcugcaggcuccug

SEQ ID NO: 446113 - RNA, 32 nt, Human
gcucuaccuaucugauacaucuguaaaugugg

SEQ ID NO: 446114 - RNA, 19 nt, Human
gcucuaccucucuuucuca

SEQ ID NO: 446115 - RNA, 32 nt, Human
gcucuacgcgagguuuguuaauaaaaguuugu

SEQ ID NO: 446116 - RNA, 32 nt, Human
gcucuacggugacuuugaagacuuggaaacag

SEQ ID NO: 446117 - RNA, 22 nt, Human
gcucuacucauuccuuccacca

SEQ ID NO: 446118 - RNA, 32 nt, Human
gcucuacuccacccacucccagcucugccaag

SEQ ID NO: 446119 - RNA, 32 nt, Human
gcucuacucuagaggggcagguccaaguucac

SEQ ID NO: 446120 - RNA, 32 nt, Human
gcucuacugccagugugaccucacccucucca

SEQ ID NO: 446121 - RNA, 32 nt, Human
gcucuacuuggaagacauuuuccucuuucucc

SEQ ID NO: 446122 - RNA, 32 nt, Human
gcucuagaucccccuccccugccugcucugca

SEQ ID NO: 446123 - RNA, 20 nt, Human
gcucuagccaagguccugcc

SEQ ID NO: 446124 - RNA, 32 nt, Human
gcucuagccaucucucggucacuggcaauaaa

SEQ ID NO: 446125 - RNA, 32 nt, Human
gcucuagccugaacccuggccugggccgagca

SEQ ID NO: 446126 - RNA, 32 nt, Human
gcucuagcucacuguugccucgcugucugcca

SEQ ID NO: 446127 - RNA, 32 nt, Human
gcucuagcuucuuguguaccauaguacugugg

SEQ ID NO: 446128 - RNA, 32 nt, Human
gcucuaggaaacaccagucuugagagguggcc

SEQ ID NO: 446129 - RNA, 32 nt, Human
gcucuaggaacacagugccagugcagaaguuu

SEQ ID NO: 446130 - RNA, 32 nt, Human
gcucuaggaagcagauacaguuauuaagucca

SEQ ID NO: 446131 - RNA, 32 nt, Human
gcucuaggaaggcagcaugcucagugggaaca

SEQ ID NO: 446132 - RNA, 19 nt, Human
gcucuaggaccugggccuc

SEQ ID NO: 446133 - RNA, 32 nt, Human
gcucuaggaggaggcagggacuccaggguguc

SEQ ID NO: 446134 - RNA, 32 nt, Human
gcucuaggaggaggcagggauuccaggguguu

SEQ ID NO: 446135 - RNA, 32 nt, Human
gcucuaggcccuucagacuugcacuuggagaa

SEQ ID NO: 446136 - RNA, 21 nt, Human
gcucuaggccuuauccucccu

SEQ ID NO: 446137 - RNA, 32 nt, Human
gcucuaggcugcuguccaugccagcuugggac

SEQ ID NO: 446138 - RNA, 32 nt, Human
gcucuaggcuucuccugcugaguccuggucuu

SEQ ID NO: 446139 - RNA, 32 nt, Human
gcucuagggacaccuggugauuccuacacaag

SEQ ID NO: 446140 - RNA, 32 nt, Human
gcucuagggcugaagguggaaguagggccacu

SEQ ID NO: 446141 - RNA, 32 nt, Human
gcucuaggggaagguauacugggcagggaguu

SEQ ID NO: 446142 - RNA, 32 nt, Human
gcucuagguuucuucucccaaaggggacccaa

SEQ ID NO: 446143 - RNA, 32 nt, Human
gcucuaguaccauuccuuccucuuagccccag

SEQ ID NO: 446144 - RNA, 32 nt, Human
gcucuagugcauucaagagagccuguuacuag

SEQ ID NO: 446145 - RNA, 32 nt, Human
gcucuaguggguggaaacgggugguugccaug

SEQ ID NO: 446146 - RNA, 30 nt, Human
gcucuaguguuugguggcguugccguugca

SEQ ID NO: 446147 - RNA, 32 nt, Human
gcucuaguugcccacacuagagugcaauggcg

SEQ ID NO: 446148 - RNA, 32 nt, Human
gcucuauaaauccugcuccucuuucccauauc

SEQ ID NO: 446149 - RNA, 32 nt, Human
gcucuauagcagacacuaaagacuggguuaca

SEQ ID NO: 446150 - RNA, 32 nt, Human
gcucuaucaccaggugggagugcaguggcaca

SEQ ID NO: 446151 - RNA, 32 nt, Human
gcucuaucacccaagcuggaguacaguggcac

SEQ ID NO: 446152 - RNA, 32 nt, Human
gcucuaucacccaggcugaagugcaguagugc

SEQ ID NO: 446153 - RNA, 32 nt, Human
gcucuaucacccaggcugaagugcagugguac

SEQ ID NO: 446154 - RNA, 32 nt, Human
gcucuaucacccaggcuggagugcaguggugc

SEQ ID NO: 446155 - RNA, 32 nt, Human
gcucuaucaccuaggcuggagugcagcggcau

SEQ ID NO: 446156 - RNA, 32 nt, Human
gcucuaucagccacagaucucaugguggcugu

SEQ ID NO: 446157 - RNA, 32 nt, Human
gcucuaucagggcaugucagaccaacagaggg

SEQ ID NO: 446158 - RNA, 32 nt, Human
gcucuauccccuuccuccuaccugaccaggcc

SEQ ID NO: 446159 - RNA, 32 nt, Human
gcucuaucgccaggcuggaguguaguggcaug

SEQ ID NO: 446160 - RNA, 32 nt, Human
gcucuaucgcccaggauggagugcaguggcuc

SEQ ID NO: 446161 - RNA, 32 nt, Human
gcucuaucgcccaggcuggagugcaguggcgc

SEQ ID NO: 446162 - RNA, 32 nt, Human
gcucuaucgccuaggcugaagcacaguggugc

SEQ ID NO: 446163 - RNA, 32 nt, Human
gcucuaucggccgccucgcuaccagauagcca

SEQ ID NO: 446164 - RNA, 32 nt, Human
gcucuaugaauuuuccaugaaaggaggaagua

SEQ ID NO: 446165 - RNA, 32 nt, Human
gcucuaugcaaccuccaccuccuggguucaug

SEQ ID NO: 446166 - RNA, 23 nt, Human
gcucuaugcugucuauccucucu

SEQ ID NO: 446167 - RNA, 32 nt, Human
gcucuaugcuuguguaccuuugcacauauuuu

SEQ ID NO: 446168 - RNA, 32 nt, Human
gcucuauggaccaggcccugcccaugcauccg

SEQ ID NO: 446169 - RNA, 32 nt, Human
gcucuauggcccaggcuggaguacagugacac

SEQ ID NO: 446170 - RNA, 32 nt, Human
gcucuauggugacuuugaagacuuggaaacag

SEQ ID NO: 446171 - RNA, 32 nt, Human
gcucuaugugagucucaggaagugaauuaaau

SEQ ID NO: 446172 - RNA, 32 nt, Human
gcucuauuacucaggcuggaguaaaauggugc

SEQ ID NO: 446173 - RNA, 21 nt, Human
gcucuauuccauaccgugcca

SEQ ID NO: 446174 - RNA, 19 nt, Human
gcucuauucccccucugcc

SEQ ID NO: 446175 - RNA, 32 nt, Human
gcucuauuccugacacuaccucucauuugcaa

SEQ ID NO: 446176 - RNA, 20 nt, Human
gcucuauucuguaccugcca

SEQ ID NO: 446177 - RNA, 32 nt, Human
gcucuauucuuuucucuuucuucauuuaacau

SEQ ID NO: 446178 - RNA, 32 nt, Human
gcucuauugcccaggcuggagugcaguggcuc

SEQ ID NO: 446179 - RNA, 32 nt, Human
gcucuauugcccaggcuggagugcagugguac

SEQ ID NO: 446180 - RNA, 32 nt, Human
gcucuauugcccagucuggagugcaguggcau

SEQ ID NO: 446181 - RNA, 32 nt, Human
gcucuauuggccaggcuggaguguaguggcac

SEQ ID NO: 446182 - RNA, 32 nt, Human
gcucuauuguucagacuggagugcaguggcau

SEQ ID NO: 446183 - RNA, 32 nt, Human
gcucuauuuauggaggagaugaaaguuuccgg

SEQ ID NO: 446184 - RNA, 32 nt, Human
gcucucaacccccauauuuugccuuugaauac

SEQ ID NO: 446185 - RNA, 32 nt, Human
gcucucaauccccagcccucauccagaguuug

SEQ ID NO: 446186 - RNA, 32 nt, Human
gcucucaauggccgcagacuccuccagccucu

SEQ ID NO: 446187 - RNA, 32 nt, Human
gcucucacaggcuggggauguuuauaaaguga

SEQ ID NO: 446188 - RNA, 32 nt, Human
gcucucacaguucuuuuucuuccugucauaac

SEQ ID NO: 446189 - RNA, 21 nt, Human
gcucucaccagacaaugaaug

SEQ ID NO: 446190 - RNA, 32 nt, Human
gcucucaccccagggaugaaacacccagaaac

SEQ ID NO: 446191 - RNA, 32 nt, Human
gcucucacccucccuucucucccucaauaaug

SEQ ID NO: 446192 - RNA, 32 nt, Human
gcucucacccugggguccccagccucucaccg

SEQ ID NO: 446193 - RNA, 32 nt, Human
gcucucaccgcaaccuccgucuccuggguuca

SEQ ID NO: 446194 - RNA, 32 nt, Human
gcucucacucacugauaaugcuuauuaccuuc

SEQ ID NO: 446195 - RNA, 32 nt, Human
gcucucacuucacaccgauucccaccagggca

SEQ ID NO: 446196 - RNA, 32 nt, Human
gcucucagagagagcucuccccuggcagugac

SEQ ID NO: 446197 - RNA, 32 nt, Human
gcucucagaguuucugugaugauuuguugagc

SEQ ID NO: 446198 - RNA, 32 nt, Human
gcucucagaucgagucuugcucugucacccgg

SEQ ID NO: 446199 - RNA, 19 nt, Human
gcucucagccagcggccgg

SEQ ID NO: 446200 - RNA, 32 nt, Human
gcucucagcuacuccugaaacgggcagagaug

SEQ ID NO: 446201 - RNA, 22 nt, Human
gcucucagcucacugcagcccu

SEQ ID NO: 446202 - RNA, 32 nt, Human
gcucucagcugcacucacagcaccagugagac

SEQ ID NO: 446203 - RNA, 32 nt, Human
gcucucagcuggcagugcaaugcuuguagaag

SEQ ID NO: 446204 - RNA, 32 nt, Human
gcucucagcugguauugaacuggugggagaaa

SEQ ID NO: 446205 - RNA, 32 nt, Human
gcucucagcuuuuagaaaauucuaucugcuaa

SEQ ID NO: 446206 - RNA, 32 nt, Human
gcucucaggaugacucuuggcucuugggcaug

SEQ ID NO: 446207 - RNA, 32 nt, Human
gcucucaggcagcagagggccgccgucggggu

SEQ ID NO: 446208 - RNA, 21 nt, Human
gcucucaggccuccuccucca

SEQ ID NO: 446209 - RNA, 20 nt, Human
gcucucagggacugagggca

SEQ ID NO: 446210 - RNA, 32 nt, Human
gcucucagggcuagaaugcuucccccucuuau

SEQ ID NO: 446211 - RNA, 22 nt, Human
gcucucaguagcgucagcccca

SEQ ID NO: 446212 - RNA, 32 nt, Human
gcucucaguaggaacuuggaaugcaagcugga

SEQ ID NO: 446213 - RNA, 32 nt, Human
gcucucauauuuuaaaauauccuuggaggcua

SEQ ID NO: 446214 - RNA, 32 nt, Human
gcucucaugaucauaacggcucugcugugaag

SEQ ID NO: 446215 - RNA, 32 nt, Human
gcucuccaaaccugcuugcuugcaccccucua

SEQ ID NO: 446216 - RNA, 32 nt, Human
gcucuccaacaagaaggaaagcagggaggaag

SEQ ID NO: 446217 - RNA, 32 nt, Human
gcucuccaaggagcaggagcugggugaucuug

SEQ ID NO: 446218 - RNA, 32 nt, Human
gcucuccaauuuaaaaaggaagggccucuccu

SEQ ID NO: 446219 - RNA, 23 nt, Human
gcucuccacccccucuggcccca

SEQ ID NO: 446220 - RNA, 23 nt, Human
gcucuccagaaaaaugcuuugaa

SEQ ID NO: 446221 - RNA, 32 nt, Human
gcucuccagaagcaugaacugcaguggagaug

SEQ ID NO: 446222 - RNA, 32 nt, Human
gcucuccagcagcugcuccugccugauucaac

SEQ ID NO: 446223 - RNA, 32 nt, Human
gcucuccagcccugcagcagaagaacuucccg

SEQ ID NO: 446224 - RNA, 23 nt, Human
gcucuccagccucugacacaaga

SEQ ID NO: 446225 - RNA, 23 nt, Human
gcucuccagccugcgccuggggu

SEQ ID NO: 446226 - RNA, 32 nt, Human
gcucuccagccugggcaacagagcaaggcucu

SEQ ID NO: 446227 - RNA, 32 nt, Human
gcucuccagccuggggaacagagcaagacugu

SEQ ID NO: 446228 - RNA, 32 nt, Human
gcucuccagguggucagagggcccaguggugc

SEQ ID NO: 446229 - RNA, 32 nt, Human
gcucuccaugccaccaccugcccuaccauuua

SEQ ID NO: 446230 - RNA, 32 nt, Human
gcucuccauggcccacagcaggcacaggucug

SEQ ID NO: 446231 - RNA, 21 nt, Human
gcucucccaacacauaacuca

SEQ ID NO: 446232 - RNA, 24 nt, Human
gcucucccacaauucaucuucccu

SEQ ID NO: 446233 - RNA, 32 nt, Human
gcucucccacagaaaccuuuguccuugcaacu

SEQ ID NO: 446234 - RNA, 32 nt, Human
gcucucccaggaggaagcauuccccaccccac

SEQ ID NO: 446235 - RNA, 32 nt, Human
gcucuccccaaccacucuccccagauccugga

SEQ ID NO: 446236 - RNA, 32 nt, Human
gcucuccccacccauuccccugccccuaggag

SEQ ID NO: 446237 - RNA, 32 nt, Human
gcucuccccaugagcaaguucuugccuucauu

SEQ ID NO: 446238 - RNA, 23 nt, Human
gcucucccccgccagcagccccg

SEQ ID NO: 446239 - RNA, 16 nt, Human
gcucuccccuccugug

SEQ ID NO: 446240 - RNA, 32 nt, Human
gcucucccgagucugugacuacaggcaaauca

SEQ ID NO: 446241 - RNA, 32 nt, Human
gcucucccgcauuccuccucccacuuggccaa

SEQ ID NO: 446242 - RNA, 32 nt, Human
gcucucccuccaccaacucucaaggcuccuca

SEQ ID NO: 446243 - RNA, 32 nt, Human
gcucucccucccccugucccccacccucaugg

SEQ ID NO: 446244 - RNA, 32 nt, Human
gcucucccuccccuccccacuccuccucucuu

SEQ ID NO: 446245 - RNA, 32 nt, Human
gcucucccuccucuccccuucgcuguccccuc

SEQ ID NO: 446246 - RNA, 32 nt, Human
gcucucccuccucugagugccaugucuagggc

SEQ ID NO: 446247 - RNA, 32 nt, Human
gcucucccucugauuuaggagaucuuguuacc

SEQ ID NO: 446248 - RNA, 32 nt, Human
gcucucccugcuccccauucugaagcccaggu

SEQ ID NO: 446249 - RNA, 32 nt, Human
gcucucccuggacuugcccugccuggaacagg

SEQ ID NO: 446250 - RNA, 32 nt, Human
gcucucccugucucuaggucgcugagagaggu

SEQ ID NO: 446251 - RNA, 32 nt, Human
gcucucccuuugcgcagcccuaccuuaaggaa

SEQ ID NO: 446252 - RNA, 32 nt, Human
gcucuccgcuccaccccuuagccugggaaccc

SEQ ID NO: 446253 - RNA, 32 nt, Human
gcucuccggacccugcagcagagaggccagag

SEQ ID NO: 446254 - RNA, 26 nt, Human
gcucuccggggcuccugccagcccca

SEQ ID NO: 446255 - RNA, 24 nt, Human
gcucuccguggggcaccccaugga

SEQ ID NO: 446256 - RNA, 20 nt, Human
gcucuccuaccucccucucu

SEQ ID NO: 446257 - RNA, 19 nt, Human
gcucuccuaucagaagcuc

SEQ ID NO: 446258 - RNA, 32 nt, Human
gcucuccucccccuaaaaagcugacucacugu

SEQ ID NO: 446259 - RNA, 32 nt, Human
gcucuccucccgcuucaggccuaggauggcaa

SEQ ID NO: 446260 - RNA, 19 nt, Human
gcucuccucccugccacca

SEQ ID NO: 446261 - RNA, 17 nt, Human
gcucuccuccugcugcc

SEQ ID NO: 446262 - RNA, 32 nt, Human
gcucuccucggaggcugcuggggaggagccuc

SEQ ID NO: 446263 - RNA, 32 nt, Human
gcucuccucuggcuagagugggaagagggggc

SEQ ID NO: 446264 - RNA, 19 nt, Human
gcucuccugccacccagag

SEQ ID NO: 446265 - RNA, 20 nt, Human
gcucuccugccacccugcug

SEQ ID NO: 446266 - RNA, 32 nt, Human
gcucuccugcccaccucuccccacccugaacc

SEQ ID NO: 446267 - RNA, 21 nt, Human
gcucuccugcccugcccuccu

SEQ ID NO: 446268 - RNA, 21 nt, Human
gcucuccugcccugccuuccu

SEQ ID NO: 446269 - RNA, 20 nt, Human
gcucuccugcccugggccuc

SEQ ID NO: 446270 - RNA, 22 nt, Human
gcucuccugccuccaccgccuu

SEQ ID NO: 446271 - RNA, 32 nt, Human
gcucuccugccuccaccgccuugguuuugcuu

SEQ ID NO: 446272 - RNA, 24 nt, Human
gcucuccugccucuucgucuuucu

SEQ ID NO: 446273 - RNA, 32 nt, Human
gcucuccugcugagguggagacugcagugagc

SEQ ID NO: 446274 - RNA, 32 nt, Human
gcucuccugcugagguggagauugcagugaac

SEQ ID NO: 446275 - RNA, 22 nt, Human
gcucuccugcugccgccucucu

SEQ ID NO: 446276 - RNA, 32 nt, Human
gcucuccugcuguguggcuuggggcuuguugc

SEQ ID NO: 446277 - RNA, 24 nt, Human
gcucuccuggcucacucuuacggu

SEQ ID NO: 446278 - RNA, 24 nt, Human
gcucuccuguccucccugugcuca

SEQ ID NO: 446279 - RNA, 32 nt, Human
gcucuccugucuggggcaucuacuggagcacc

SEQ ID NO: 446280 - RNA, 32 nt, Human
gcucuccuucugagucaggacauguguacagg

SEQ ID NO: 446281 - RNA, 32 nt, Human
gcucuccuugaauaagaaagccagcagaacuc

SEQ ID NO: 446282 - RNA, 32 nt, Human
gcucuccuugcagugcaggccccagccgcucu

SEQ ID NO: 446283 - RNA, 32 nt, Human
gcucuccuugcuccuggccuugcugaccucag

SEQ ID NO: 446284 - RNA, 32 nt, Human
gcucuccuuuggguguaugcaggugugugggg

SEQ ID NO: 446285 - RNA, 32 nt, Human
gcucuccuuuucccucuuacccucucucucuu

SEQ ID NO: 446286 - RNA, 32 nt, Human
gcucucgagagcuccagcaggagaggcccuuc

SEQ ID NO: 446287 - RNA, 32 nt, Human
gcucucgcccaggcuggagugcaguggguggg

SEQ ID NO: 446288 - RNA, 32 nt, Human
gcucucgccucaccccggcuccugggcuuuga

SEQ ID NO: 446289 - RNA, 32 nt, Human
gcucucgccuguaaucccagcacuuugggagg

SEQ ID NO: 446290 - RNA, 32 nt, Human
gcucucgccuguaaucucagcacuuugggagg

SEQ ID NO: 446291 - RNA, 23 nt, Human
gcucucgcgggcgcgcucggggu

SEQ ID NO: 446292 - RNA, 32 nt, Human
gcucucgcuccacuugcccuucccaggaacca

SEQ ID NO: 446293 - RNA, 32 nt, Human
gcucucgcugguuuguucuuggguuguuuuuc

SEQ ID NO: 446294 - RNA, 32 nt, Human
gcucucggcccacacaauaugaccucggggag

SEQ ID NO: 446295 - RNA, 21 nt, Human
gcucucggcccagcagacccc

SEQ ID NO: 446296 - RNA, 32 nt, Human
gcucucggccccggagcccggucgcaggagcg

SEQ ID NO: 446297 - RNA, 23 nt, Human
gcucucggcucacugcaaccucu

SEQ ID NO: 446298 - RNA, 32 nt, Human
gcucucggcugcagcgcuggguggaucuagga

SEQ ID NO: 446299 - RNA, 21 nt, Human
gcucucggcugggcgcagugg

SEQ ID NO: 446300 - RNA, 32 nt, Human
gcucucgggaaagcugcccagauggggcugcg

SEQ ID NO: 446301 - RNA, 32 nt, Human
gcucucguugccaaggcuggagugcaauggca

SEQ ID NO: 446302 - RNA, 32 nt, Human
gcucucguugccgaggcuggaguguaguagug

SEQ ID NO: 446303 - RNA, 32 nt, Human
gcucucuaacccgagcuagagugcagugacgc

SEQ ID NO: 446304 - RNA, 32 nt, Human
gcucucuaccucucccugcuccuggugccugc

SEQ ID NO: 446305 - RNA, 32 nt, Human
gcucucuagcuggcuggaguguaggauugcgu

SEQ ID NO: 446306 - RNA, 32 nt, Human
gcucucuauuggagagaggaagugacuggccu

SEQ ID NO: 446307 - RNA, 32 nt, Human
gcucucucacccaggccugaagugcaguggca

SEQ ID NO: 446308 - RNA, 32 nt, Human
gcucucucacccaggcuggaguagagugacaa

SEQ ID NO: 446309 - RNA, 32 nt, Human
gcucucucacccaggcuggaguguaagugaca

SEQ ID NO: 446310 - RNA, 23 nt, Human
gcucucucaccucuauuaccucc

SEQ ID NO: 446311 - RNA, 32 nt, Human
gcucucucagugccauggagaggcaggaagag

SEQ ID NO: 446312 - RNA, 32 nt, Human
gcucucucauuuucuuuucuucuccuuucccc

SEQ ID NO: 446313 - RNA, 32 nt, Human
gcucucuccaccacgcugccucaggcccuagg

SEQ ID NO: 446314 - RNA, 32 nt, Human
gcucucuccaguaccagacucauuucaguacc

SEQ ID NO: 446315 - RNA, 32 nt, Human
gcucucucccuuaaaacuaacagggagagagc

SEQ ID NO: 446316 - RNA, 32 nt, Human
gcucucuccuacucaguuugaucucucuaaaa

SEQ ID NO: 446317 - RNA, 32 nt, Human
gcucucuccucaaauggaggcagccauggccu

SEQ ID NO: 446318 - RNA, 32 nt, Human
gcucucuccugauagucuuucaguuaaggaga

SEQ ID NO: 446319 - RNA, 32 nt, Human
gcucucuccugcuucaagaucuugccucuuua

SEQ ID NO: 446320 - RNA, 32 nt, Human
gcucucuccuucagaaccccgcucugaggaaa

SEQ ID NO: 446321 - RNA, 32 nt, Human
gcucucuccuuguggggagguggauccucugc

SEQ ID NO: 446322 - RNA, 32 nt, Human
gcucucuccuuuccccuuuuccucuuauccca

SEQ ID NO: 446323 - RNA, 32 nt, Human
gcucucucgcccaggcuggagugcaguggugc

SEQ ID NO: 446324 - RNA, 32 nt, Human
gcucucucuagcuccccaauucugccugccuc

SEQ ID NO: 446325 - RNA, 32 nt, Human
gcucucucuaucuugcaaauaggaguccuuaa

SEQ ID NO: 446326 - RNA, 32 nt, Human
gcucucucuccucaucuccaucucccaggcuc

SEQ ID NO: 446327 - RNA, 32 nt, Human
gcucucucucugcugccucuucauacguuuuc

SEQ ID NO: 446328 - RNA, 32 nt, Human
gcucucucucugggacugaccugcugcaagca

SEQ ID NO: 446329 - RNA, 22 nt, Human
gcucucucucuuugccugcugc

SEQ ID NO: 446330 - RNA, 31 nt, Human
gcucucucugucucugggucuucuggcugug

SEQ ID NO: 446331 - RNA, 32 nt, Human
gcucucucugugggcuucucuuggugcacggu

SEQ ID NO: 446332 - RNA, 20 nt, Human
gcucucucuuugccugcugc

SEQ ID NO: 446333 - RNA, 32 nt, Human
gcucucugaauccauugauacagucaugccaa

SEQ ID NO: 446334 - RNA, 32 nt, Human
gcucucugagccagucccucagccacugaagu

SEQ ID NO: 446335 - RNA, 32 nt, Human
gcucucugaucaucuucuucaauuccugcuag

SEQ ID NO: 446336 - RNA, 32 nt, Human
gcucucugauccacucaggggucagggcauca

SEQ ID NO: 446337 - RNA, 32 nt, Human
gcucucugcaaacucugcuuccuggguucaca

SEQ ID NO: 446338 - RNA, 32 nt, Human
gcucucugcaaccuccaccuccuggguucaag

SEQ ID NO: 446339 - RNA, 22 nt, Human
gcucucugcaaccucugccucc

SEQ ID NO: 446340 - RNA, 32 nt, Human
gcucucugcaacuuccgccuccuggguucaag

SEQ ID NO: 446341 - RNA, 21 nt, Human
gcucucugccccucaugcccc

SEQ ID NO: 446342 - RNA, 24 nt, Human
gcucucugcccuugaucagcccca

SEQ ID NO: 446343 - RNA, 32 nt, Human
gcucucugccucccucuccaacgcccggauga

SEQ ID NO: 446344 - RNA, 22 nt, Human
gcucucugccucccuuccagga

SEQ ID NO: 446345 - RNA, 31 nt, Human
gcucucugccucucugcccuuuggucuaugu

SEQ ID NO: 446346 - RNA, 32 nt, Human
gcucucugcucacauuucucucucccauuuuc

SEQ ID NO: 446347 - RNA, 32 nt, Human
gcucucugcucacuuuucucucucccguuuuc

SEQ ID NO: 446348 - RNA, 32 nt, Human
gcucucugcuuugggcucugcaggccaccaga

SEQ ID NO: 446349 - RNA, 32 nt, Human
gcucucuggaacccauuucucaagggagaacc

SEQ ID NO: 446350 - RNA, 32 nt, Human
gcucucuggcaggcaggcuaggaagcucuagg

SEQ ID NO: 446351 - RNA, 29 nt, Human
gcucucuggccgcuaucaucccagcagug

SEQ ID NO: 446352 - RNA, 32 nt, Human
gcucucuggccuccagccucccagcagcaugg

SEQ ID NO: 446353 - RNA, 32 nt, Human
gcucucuggcugaggcugccugccuggagggg

SEQ ID NO: 446354 - RNA, 32 nt, Human
gcucucugggaggugugcuggguguguucgug

SEQ ID NO: 446355 - RNA, 32 nt, Human
gcucucugggcugacugggccaggggagguua

SEQ ID NO: 446356 - RNA, 32 nt, Human
gcucucuggggucugacucugccccuuuucuu

SEQ ID NO: 446357 - RNA, 32 nt, Human
gcucucuguccgaucugugcauguuauuuuuc

SEQ ID NO: 446358 - RNA, 32 nt, Human
gcucucugugcuacuuacaucucccucccuug

SEQ ID NO: 446359 - RNA, 32 nt, Human
gcucucugugcucucagggacaccuccucuga

SEQ ID NO: 446360 - RNA, 32 nt, Human
gcucucuguggcagaguguguggagcggaugg

SEQ ID NO: 446361 - RNA, 32 nt, Human
gcucucuuacccaagcuggagugcagugacau

SEQ ID NO: 446362 - RNA, 32 nt, Human
gcucucuucaugccuugaaauuuuggggucca

SEQ ID NO: 446363 - RNA, 32 nt, Human
gcucucuuccucauguuauaacauggauccac

SEQ ID NO: 446364 - RNA, 32 nt, Human
gcucucuugcccagacuggaauacaguggugu

SEQ ID NO: 446365 - RNA, 32 nt, Human
gcucucuugcccaggcuggagugcaauggcac

SEQ ID NO: 446366 - RNA, 32 nt, Human
gcucucuugccuggcguucccucugcacggcu

SEQ ID NO: 446367 - RNA, 32 nt, Human
gcucucuuguccaggcuggagugcaauagcgc

SEQ ID NO: 446368 - RNA, 32 nt, Human
gcucucuuugguagggagaggggcuccaauau

SEQ ID NO: 446369 - RNA, 32 nt, Human
gcucucuuuuuaacuuucucugugauaaggaa

SEQ ID NO: 446370 - RNA, 32 nt, Human
gcucugaaaaacaugcccccgaggcucugugc

SEQ ID NO: 446371 - RNA, 32 nt, Human
gcucugaaaacacaguggagguuguggugaag

SEQ ID NO: 446372 - RNA, 32 nt, Human
gcucugaaaagaagauauuuuucaaccugaac

SEQ ID NO: 446373 - RNA, 32 nt, Human
gcucugaaacaguaggacauccugggugggug

SEQ ID NO: 446374 - RNA, 32 nt, Human
gcucugaacacaucccugagcugcagagcuga

SEQ ID NO: 446375 - RNA, 32 nt, Human
gcucugaacuagugccugcuacccaggacacc

SEQ ID NO: 446376 - RNA, 32 nt, Human
gcucugaacuucuccuucauccagggaugggc

SEQ ID NO: 446377 - RNA, 20 nt, Human
gcucugaacuuugagacagg

SEQ ID NO: 446378 - RNA, 32 nt, Human
gcucugaagagggagacugaggagcuggccug

SEQ ID NO: 446379 - RNA, 32 nt, Human
gcucugaagggaggggaagagagaggccuggg

SEQ ID NO: 446380 - RNA, 32 nt, Human
gcucugaagguaaacucaagucuccggagacu

SEQ ID NO: 446381 - RNA, 32 nt, Human
gcucugaaggucaaaagccucauuuuauuuug

SEQ ID NO: 446382 - RNA, 32 nt, Human
gcucugaaggugaaggugggagagcaggcccc

SEQ ID NO: 446383 - RNA, 32 nt, Human
gcucugacaucaucaucaccauuaacagcuga

SEQ ID NO: 446384 - RNA, 21 nt, Human
gcucugaccaaucuggucuuc

SEQ ID NO: 446385 - RNA, 32 nt, Human
gcucugaccaggaaagcuagugccauccccug

SEQ ID NO: 446386 - RNA, 32 nt, Human
gcucugaccccaaaacgaggugucuuugguaa

SEQ ID NO: 446387 - RNA, 32 nt, Human
gcucugaccccaauaucaggaacuuggcaucu

SEQ ID NO: 446388 - RNA, 31 nt, Human
gcucugaccuccucugggcccugucgccccu

SEQ ID NO: 446389 - RNA, 23 nt, Human
gcucugaccugggcagccuuccu

SEQ ID NO: 446390 - RNA, 32 nt, Human
gcucugacgcacaggcuggagugcaguggcuc

SEQ ID NO: 446391 - RNA, 32 nt, Human
gcucugacgcccuccauuucucuggcuccggc

SEQ ID NO: 446392 - RNA, 32 nt, Human
gcucugacucuucgauccucccucuuuguguc

SEQ ID NO: 446393 - RNA, 32 nt, Human
gcucugacuguacuuacgcugcacugucggug

SEQ ID NO: 446394 - RNA, 32 nt, Human
gcucugacuucucauuacugugcugaaaguca

SEQ ID NO: 446395 - RNA, 32 nt, Human
gcucugagaagaacaccugagagcgcuuucca

SEQ ID NO: 446396 - RNA, 32 nt, Human
gcucugagaaggugcuggauucugagugggcc

SEQ ID NO: 446397 - RNA, 21 nt, Human
gcucugagaauuccccugguc

SEQ ID NO: 446398 - RNA, 32 nt, Human
gcucugagaccucgcuuccuuuauggauccaa

SEQ ID NO: 446399 - RNA, 22 nt, Human
gcucugagagggacagacggug

SEQ ID NO: 446400 - RNA, 21 nt, Human
gcucugagauacuaauaggug

SEQ ID NO: 446401 - RNA, 20 nt, Human
gcucugagccaagggugagg

SEQ ID NO: 446402 - RNA, 32 nt, Human
gcucugagcccuccuucuugcccugagcuuuc

SEQ ID NO: 446403 - RNA, 32 nt, Human
gcucugagccgggagagccgaacagcugaaga

SEQ ID NO: 446404 - RNA, 22 nt, Human
gcucugagccucuagcaugguu

SEQ ID NO: 446405 - RNA, 32 nt, Human
gcucugagccugugacuccuucugcuaggcag

SEQ ID NO: 446406 - RNA, 32 nt, Human
gcucugagcugagagagaagaaauagcuaugc

SEQ ID NO: 446407 - RNA, 32 nt, Human
gcucugagcuggauugauggggccagucuccc

SEQ ID NO: 446408 - RNA, 32 nt, Human
gcucugaggauccggccucaccucuccacggg

SEQ ID NO: 446409 - RNA, 32 nt, Human
gcucugaggauucuggcugggaagaaaaagag

SEQ ID NO: 446410 - RNA, 32 nt, Human
gcucugagggagagacagugagcugcaagacu

SEQ ID NO: 446411 - RNA, 32 nt, Human
gcucugaggggaggggguccgugguagaggcc

SEQ ID NO: 446412 - RNA, 32 nt, Human
gcucugagggucccugccugaagagggacagg

SEQ ID NO: 446413 - RNA, 21 nt, Human
gcucugaggguggaaggcagg

SEQ ID NO: 446414 - RNA, 32 nt, Human
gcucugagguacucugcucacaggccccagac

SEQ ID NO: 446415 - RNA, 32 nt, Human
gcucugagguguccugaacacacagcaacggc

SEQ ID NO: 446416 - RNA, 32 nt, Human
gcucugaguaaacgcauguugugugcaaaguu

SEQ ID NO: 446417 - RNA, 32 nt, Human
gcucugaguagcugggauuauaggcaugcacc

SEQ ID NO: 446418 - RNA, 32 nt, Human
gcucugaguccagcuuagcuuuccaaaauucu

SEQ ID NO: 446419 - RNA, 22 nt, Human
gcucugagucugcccacgcagg

SEQ ID NO: 446420 - RNA, 32 nt, Human
gcucugaguggccacugggggaaaggcagccu

SEQ ID NO: 446421 - RNA, 32 nt, Human
gcucugaguggccauggggaagcgauacuucu

SEQ ID NO: 446422 - RNA, 32 nt, Human
gcucugauaacugccuuuccuuccuucugugc

SEQ ID NO: 446423 - RNA, 32 nt, Human
gcucugaucacccagggauucucucuccaacc

SEQ ID NO: 446424 - RNA, 32 nt, Human
gcucugaucaccucaagccucccacucugaac

SEQ ID NO: 446425 - RNA, 32 nt, Human
gcucugaucccaggcuggauggaguggcugga

SEQ ID NO: 446426 - RNA, 32 nt, Human
gcucugaucgggguccaacccagggagacugu

SEQ ID NO: 446427 - RNA, 32 nt, Human
gcucugaucuaccagcccugguguaguuuauu

SEQ ID NO: 446428 - RNA, 32 nt, Human
gcucugaucuccaagggaaaguuuuccugcau

SEQ ID NO: 446429 - RNA, 27 nt, Human
gcucugauuaucuagcauuuuuagggu

SEQ ID NO: 446430 - RNA, 18 nt, Human
gcucugauuucugacuca

SEQ ID NO: 446431 - RNA, 32 nt, Human
gcucugcaacaaaucuccagccuggguugcca

SEQ ID NO: 446432 - RNA, 32 nt, Human
gcucugcaacgugggagccuuggaggcgggug

SEQ ID NO: 446433 - RNA, 32 nt, Human
gcucugcaauuccccucugcugcugucccucc

SEQ ID NO: 446434 - RNA, 32 nt, Human
gcucugcaccaaccccaggcuacugagccacc

SEQ ID NO: 446435 - RNA, 32 nt, Human
gcucugcaccuuccucccgucuugccuucucc

SEQ ID NO: 446436 - RNA, 21 nt, Human
gcucugcacuccacccaggag

SEQ ID NO: 446437 - RNA, 32 nt, Human
gcucugcagcagccucugccacccugugaccu

SEQ ID NO: 446438 - RNA, 32 nt, Human
gcucugcagccugggcucugcccugccucagc

SEQ ID NO: 446439 - RNA, 32 nt, Human
gcucugcagcuagcauuucaaccauaugugga

SEQ ID NO: 446440 - RNA, 32 nt, Human
gcucugcagcugugaggaaacagccuucguua

SEQ ID NO: 446441 - RNA, 32 nt, Human
gcucugcaggacuccauuucucccacagcucu

SEQ ID NO: 446442 - RNA, 20 nt, Human
gcucugcaggcacccagggu

SEQ ID NO: 446443 - RNA, 32 nt, Human
gcucugcaggccccagcacccgcagagcagac

SEQ ID NO: 446444 - RNA, 32 nt, Human
gcucugcagggagcccuggugccagagaccuu

SEQ ID NO: 446445 - RNA, 20 nt, Human
gcucugcagggccuagggua

SEQ ID NO: 446446 - RNA, 32 nt, Human
gcucugcagggugggggcaauugaaggcccaa

SEQ ID NO: 446447 - RNA, 32 nt, Human
gcucugcagggugggggcuagagaggaagcag

SEQ ID NO: 446448 - RNA, 22 nt, Human
gcucugcaguccucggcgugug

SEQ ID NO: 446449 - RNA, 32 nt, Human
gcucugcaugccgccagccuaguagaaaguuc

SEQ ID NO: 446450 - RNA, 24 nt, Human
gcucugcaugcuccucugccugug

SEQ ID NO: 446451 - RNA, 32 nt, Human
gcucugcauucuucgcuguccaggccugccgg

SEQ ID NO: 446452 - RNA, 32 nt, Human
gcucugcauuuguuuucccuuaggugaacaau

SEQ ID NO: 446453 - RNA, 32 nt, Human
gcucugccaagcugagccuggccaagcuaggu

SEQ ID NO: 446454 - RNA, 32 nt, Human
gcucugccacccaggcuggagugcaguggugc

SEQ ID NO: 446455 - RNA, 32 nt, Human
gcucugccagaggcugaggugcccaggguguc

SEQ ID NO: 446456 - RNA, 32 nt, Human
gcucugccagcagccuuccacgggggagggag

SEQ ID NO: 446457 - RNA, 32 nt, Human
gcucugccaucugacagcucccagaggguucu

SEQ ID NO: 446458 - RNA, 32 nt, Human
gcucugccaucuuuagcgcuggcuucauucuc

SEQ ID NO: 446459 - RNA, 32 nt, Human
gcucugccauggcuauuuccacugcucuauuu

SEQ ID NO: 446460 - RNA, 32 nt, Human
gcucugcccacugugaaaccacuagguucuag

SEQ ID NO: 446461 - RNA, 32 nt, Human
gcucugcccagcaguccaaagcggcauggcca

SEQ ID NO: 446462 - RNA, 32 nt, Human
gcucugcccaggagguggcguccagcagucca

SEQ ID NO: 446463 - RNA, 21 nt, Human
gcucugccccagacugggggg

SEQ ID NO: 446464 - RNA, 24 nt, Human
gcucugccccaguauccccaggga

SEQ ID NO: 446465 - RNA, 32 nt, Human
gcucugccccauccugucacuccuggaauaag

SEQ ID NO: 446466 - RNA, 22 nt, Human
gcucugccccaugggcacggga

SEQ ID NO: 446467 - RNA, 18 nt, Human
gcucugccccucaggggg

SEQ ID NO: 446468 - RNA, 32 nt, Human
gcucugccccugggguggaggccagaggagau

SEQ ID NO: 446469 - RNA, 32 nt, Human
gcucugccccuggguggcugggaggagaggcc

SEQ ID NO: 446470 - RNA, 32 nt, Human
gcucugccccuuccagcuggagccgcccgugc

SEQ ID NO: 446471 - RNA, 32 nt, Human
gcucugccccuugcaggcuuugcucacggggu

SEQ ID NO: 446472 - RNA, 32 nt, Human
gcucugcccgcagccugaccucuagcccuggu

SEQ ID NO: 446473 - RNA, 32 nt, Human
gcucugcccuggaaagggggugaccucuugcc

SEQ ID NO: 446474 - RNA, 32 nt, Human
gcucugccgcccaggcgggagugcaguggcag

SEQ ID NO: 446475 - RNA, 32 nt, Human
gcucugccgcccaggcuggagugcaguggcgc

SEQ ID NO: 446476 - RNA, 17 nt, Human
gcucugccguaaucuca

SEQ ID NO: 446477 - RNA, 32 nt, Human
gcucugccguggcugccucugcacugacaccc

SEQ ID NO: 446478 - RNA, 23 nt, Human
gcucugccucaacuuuccuagga

SEQ ID NO: 446479 - RNA, 26 nt, Human
gcucugccucacccugcuggcuccug

SEQ ID NO: 446480 - RNA, 32 nt, Human
gcucugccuccacccccucccuauuccugaug

SEQ ID NO: 446481 - RNA, 32 nt, Human
gcucugccugcagcugggccucugccucaucc

SEQ ID NO: 446482 - RNA, 32 nt, Human
gcucugccuucccaucaucuccuuucaggacc

SEQ ID NO: 446483 - RNA, 25 nt, Human
gcucugccuucccucccugguccuc

SEQ ID NO: 446484 - RNA, 18 nt, Human
gcucugccuuggguucag

SEQ ID NO: 446485 - RNA, 32 nt, Human
gcucugccuuggugucaugccugcugcacccc

SEQ ID NO: 446486 - RNA, 32 nt, Human
gcucugcgagccccugcacuccauccugcuga

SEQ ID NO: 446487 - RNA, 32 nt, Human
gcucugcgcccaggauggagugcaguggcaug

SEQ ID NO: 446488 - RNA, 20 nt, Human
gcucugcgcccgccgccccg

SEQ ID NO: 446489 - RNA, 19 nt, Human
gcucugcgccgucgccccg

SEQ ID NO: 446490 - RNA, 32 nt, Human
gcucugcgggagaaaagcccaucucuagcaca

SEQ ID NO: 446491 - RNA, 22 nt, Human
gcucugcgguccucggccugug

SEQ ID NO: 446492 - RNA, 32 nt, Human
gcucugcgugguggagauaaaugaggaguaga

SEQ ID NO: 446493 - RNA, 21 nt, Human
gcucugcuaagcuuuggggua

SEQ ID NO: 446494 - RNA, 32 nt, Human
gcucugcuaugaaugcaccugcccucauuuga

SEQ ID NO: 446495 - RNA, 32 nt, Human
gcucugcuaugggagaagcaggcuggggcuug

SEQ ID NO: 446496 - RNA, 32 nt, Human
gcucugcuauggugaacauccagacugucacc

SEQ ID NO: 446497 - RNA, 32 nt, Human
gcucugcucacccugagcaugcagagagagca

SEQ ID NO: 446498 - RNA, 32 nt, Human
gcucugcucaggcugggaggcagagggcacaa

SEQ ID NO: 446499 - RNA, 32 nt, Human
gcucugcuccacugcuggaaggaacccuucgg

SEQ ID NO: 446500 - RNA, 32 nt, Human
gcucugcuccaggaguccaggaaagacgaggc

SEQ ID NO: 446501 - RNA, 32 nt, Human
gcucugcucccgccuguuuucuuucugacucu

SEQ ID NO: 446502 - RNA, 24 nt, Human
gcucugcuccuccccugccugcca

SEQ ID NO: 446503 - RNA, 32 nt, Human
gcucugcugcacugagacuucuugucaaugcc

SEQ ID NO: 446504 - RNA, 32 nt, Human
gcucugcugcagcugggagugugcagagacug

SEQ ID NO: 446505 - RNA, 32 nt, Human
gcucugcugcccaggcuagagugcaguggcgu

SEQ ID NO: 446506 - RNA, 32 nt, Human
gcucugcugcccaggcuggaaugcaguggugc

SEQ ID NO: 446507 - RNA, 32 nt, Human
gcucugcugcccaggcuggaguacagugaugu

SEQ ID NO: 446508 - RNA, 32 nt, Human
gcucugcugcccgccuggcugcucugucugcu

SEQ ID NO: 446509 - RNA, 32 nt, Human
gcucugcugcuggcuucuccugccaggaagug

SEQ ID NO: 446510 - RNA, 18 nt, Human
gcucugcuggagccaauc

SEQ ID NO: 446511 - RNA, 20 nt, Human
gcucugcuggagugcggugg

SEQ ID NO: 446512 - RNA, 32 nt, Human
gcucugcugucagauuagagugcagcggcaug

SEQ ID NO: 446513 - RNA, 32 nt, Human
gcucugcugugaaugugccugccugucauuug

SEQ ID NO: 446514 - RNA, 32 nt, Human
gcucuggaaaggccuuccuggguggggaauag

SEQ ID NO: 446515 - RNA, 32 nt, Human
gcucuggaacccagcaggaucacagcugccug

SEQ ID NO: 446516 - RNA, 32 nt, Human
gcucuggaagagaaggaacagggagcagagag

SEQ ID NO: 446517 - RNA, 32 nt, Human
gcucuggaagagaggcaguagcaaagagauga

SEQ ID NO: 446518 - RNA, 32 nt, Human
gcucuggaagcugacuucugaagaugacugcc

SEQ ID NO: 446519 - RNA, 22 nt, Human
gcucuggaagcugugacugagc

SEQ ID NO: 446520 - RNA, 32 nt, Human
gcucuggaagucagguggguuuccugagagag

SEQ ID NO: 446521 - RNA, 24 nt, Human
gcucuggaaguuguggacaaaccg

SEQ ID NO: 446522 - RNA, 32 nt, Human
gcucuggacauaugccuguugauuugagaaga

SEQ ID NO: 446523 - RNA, 32 nt, Human
gcucuggaccuuucccccucucccugcggccu

SEQ ID NO: 446524 - RNA, 21 nt, Human
gcucuggacugacugcaggug

SEQ ID NO: 446525 - RNA, 32 nt, Human
gcucuggacuggggacacagggauagcugagc

SEQ ID NO: 446526 - RNA, 32 nt, Human
gcucuggacuugccuccagagacugcuccaga

SEQ ID NO: 446527 - RNA, 24 nt, Human
gcucuggagagacugagacgggug

SEQ ID NO: 446528 - RNA, 21 nt, Human
gcucuggagaggaaacaaacc

SEQ ID NO: 446529 - RNA, 20 nt, Human
gcucuggagcccccagagga

SEQ ID NO: 446530 - RNA, 32 nt, Human
gcucuggaggcagcacacacagaauaacccug

SEQ ID NO: 446531 - RNA, 32 nt, Human
gcucuggaggcaggcugggcgguggcggccga

SEQ ID NO: 446532 - RNA, 22 nt, Human
gcucuggaggccacggugcagg

SEQ ID NO: 446533 - RNA, 32 nt, Human
gcucuggaggcugaggcaggagaaucacuuga

SEQ ID NO: 446534 - RNA, 32 nt, Human
gcucuggaggcuggaagccaagaucaagaugu

SEQ ID NO: 446535 - RNA, 32 nt, Human
gcucuggaggcuggagucugagcuggcagcac

SEQ ID NO: 446536 - RNA, 32 nt, Human
gcucuggagggaaaagccagagagaccaagau

SEQ ID NO: 446537 - RNA, 32 nt, Human
gcucuggagggagggccaggagcugccacacc

SEQ ID NO: 446538 - RNA, 32 nt, Human
gcucuggagggagugagcaggaugcugugaga

SEQ ID NO: 446539 - RNA, 32 nt, Human
gcucuggagguggaggcugccaugagccauga

SEQ ID NO: 446540 - RNA, 32 nt, Human
gcucuggagguggccuguucagugggggcaag

SEQ ID NO: 446541 - RNA, 32 nt, Human
gcucuggagguggcgaguaggccaguguggua

SEQ ID NO: 446542 - RNA, 22 nt, Human
gcucuggaguaaauaacaaaga

SEQ ID NO: 446543 - RNA, 22 nt, Human
gcucuggauccccagaacaaga

SEQ ID NO: 446544 - RNA, 32 nt, Human
gcucuggauggcugaaggcuccugggccaucu

SEQ ID NO: 446545 - RNA, 22 nt, Human
gcucuggcacugcccccuccca

SEQ ID NO: 446546 - RNA, 32 nt, Human
gcucuggcagagaccucugcccuccucacccu

SEQ ID NO: 446547 - RNA, 32 nt, Human
gcucuggcagggccaggagacauggcuucugc

SEQ ID NO: 446548 - RNA, 18 nt, Human
gcucuggccauccuuucc

SEQ ID NO: 446549 - RNA, 32 nt, Human
gcucuggcccuggcccacauugcacauggaaa

SEQ ID NO: 446550 - RNA, 32 nt, Human
gcucuggccucaguacccucagucuccucucc

SEQ ID NO: 446551 - RNA, 32 nt, Human
gcucuggccuccugcucagacuaaaggcaccu

SEQ ID NO: 446552 - RNA, 32 nt, Human
gcucuggcgcccaggcuggaguacaguggcau

SEQ ID NO: 446553 - RNA, 32 nt, Human
gcucuggcucuggggaacuggcccaggcauca

SEQ ID NO: 446554 - RNA, 32 nt, Human
gcucuggcugaacuggggaacucucuuguggu

SEQ ID NO: 446555 - RNA, 32 nt, Human
gcucugggaagcagugagucacacacacugcc

SEQ ID NO: 446556 - RNA, 21 nt, Human
gcucugggaaguggcugcacc

SEQ ID NO: 446557 - RNA, 22 nt, Human
gcucugggagacgaggugcagg

SEQ ID NO: 446558 - RNA, 32 nt, Human
gcucugggagagaaaggaggccagccugcugu

SEQ ID NO: 446559 - RNA, 20 nt, Human
gcugcuggagcacaggcaua

SEQ ID NO: 446560 - RNA, 32 nt, Human
gcugcuggagcagcagcggcccccgcucccgg

SEQ ID NO: 446561 - RNA, 19 nt, Human
gcugcuggagccccgagca

SEQ ID NO: 446562 - RNA, 22 nt, Human
gcugcuggagccugcccucaga

SEQ ID NO: 446563 - RNA, 20 nt, Human
gcugcuggagcgcucggggu

SEQ ID NO: 446564 - RNA, 21 nt, Human
gcugcuggagcuggcaaggua

SEQ ID NO: 446565 - RNA, 32 nt, Human
gcugcuggagcuugaguggaaagccgagccuu

SEQ ID NO: 446566 - RNA, 23 nt, Human
gcugcuggaggagaugcccaagg

SEQ ID NO: 446567 - RNA, 22 nt, Human
gcugcuggaggcugucguccca

SEQ ID NO: 446568 - RNA, 20 nt, Human
gcugcuggagggcugugggc

SEQ ID NO: 446569 - RNA, 22 nt, Human
gcugcuggagguggggcgaggc

SEQ ID NO: 446570 - RNA, 24 nt, Human
gcugcuggaguacauguguucaca

SEQ ID NO: 446571 - RNA, 22 nt, Human
gcugcuggagugcaauugcaca

SEQ ID NO: 446572 - RNA, 18 nt, Human
gcugcuggagugcagugg

SEQ ID NO: 446573 - RNA, 32 nt, Human
gcugcuggauaacauuugucauucauauucuu

SEQ ID NO: 446574 - RNA, 25 nt, Human
gcugcuggauugcacucucaaggca

SEQ ID NO: 446575 - RNA, 20 nt, Human
gcugcuggcacagcgcaggg

SEQ ID NO: 446576 - RNA, 18 nt, Human
gcugcuggcagccaaggu

SEQ ID NO: 446577 - RNA, 19 nt, Human
gcugcuggcagccccaagg

SEQ ID NO: 446578 - RNA, 21 nt, Human
gcugcuggccaacgcagggca

SEQ ID NO: 446579 - RNA, 19 nt, Human
gcugcuggccacaggugac

SEQ ID NO: 446580 - RNA, 21 nt, Human
gcugcuggccaggcccgaggc

SEQ ID NO: 446581 - RNA, 32 nt, Human
gcugcuggcccggcggaaggcugagaaggaac

SEQ ID NO: 446582 - RNA, 32 nt, Human
gcugcuggcgagggagagaugggugggccaug

SEQ ID NO: 446583 - RNA, 21 nt, Human
gcugcuggcgcgggcccgggc

SEQ ID NO: 446584 - RNA, 32 nt, Human
gcugcuggcguaguguaggccagacauugaca

SEQ ID NO: 446585 - RNA, 32 nt, Human
gcugcuggcuagugauaaauaacugaaaccca

SEQ ID NO: 446586 - RNA, 32 nt, Human
gcugcuggcuccugcccugcuuccugugaucg

SEQ ID NO: 446587 - RNA, 20 nt, Human
gcugcuggcuggcccaagca

SEQ ID NO: 446588 - RNA, 32 nt, Human
gcugcuggcuggcccaagcagagagcugaggc

SEQ ID NO: 446589 - RNA, 32 nt, Human
gcugcuggcuuuaggaggaagcuguucaagcg

SEQ ID NO: 446590 - RNA, 32 nt, Human
gcugcugggaaccugagguugucaaaggggcg

SEQ ID NO: 446591 - RNA, 32 nt, Human
gcugcugggacccaccucccccuccccggcca

SEQ ID NO: 446592 - RNA, 32 nt, Human
gcugcugggaggaaggaggagacagaaggagu

SEQ ID NO: 446593 - RNA, 32 nt, Human
gcugcugggaggacgacggacggcagcggcca

SEQ ID NO: 446594 - RNA, 32 nt, Human
gcugcugggaggagguggugggcugguucgga

SEQ ID NO: 446595 - RNA, 32 nt, Human
gcugcugggaggaugaccauggcugggggcag

SEQ ID NO: 446596 - RNA, 20 nt, Human
gcugcugggaguccauggca

SEQ ID NO: 446597 - RNA, 32 nt, Human
gcugcugggagugggagugacucccccaccuc

SEQ ID NO: 446598 - RNA, 32 nt, Human
gcugcugggauuacaggcgugagccaccacuc

SEQ ID NO: 446599 - RNA, 32 nt, Human
gcugcugggcagcaccuccuaacuucagggaa

SEQ ID NO: 446600 - RNA, 32 nt, Human
gcugcugggcagcugggcagagcucugggaag

SEQ ID NO: 446601 - RNA, 32 nt, Human
gcugcugggcccagaggugacauuugacuuuu

SEQ ID NO: 446602 - RNA, 19 nt, Human
gcugcugggccccgagcca

SEQ ID NO: 446603 - RNA, 32 nt, Human
gcugcugggccgcuccccuuggaggcccugcu

SEQ ID NO: 446604 - RNA, 32 nt, Human
gcugcugggccggcccugccuugcgcuagcag

SEQ ID NO: 446605 - RNA, 22 nt, Human
gcugcugggcggccgcggggca

SEQ ID NO: 446606 - RNA, 20 nt, Human
gcugcugggcuccggggaca

SEQ ID NO: 446607 - RNA, 32 nt, Human
gcugcugggcucuccaccucaggccuuggaua

SEQ ID NO: 446608 - RNA, 21 nt, Human
gcugcuggggacgcucagggc

SEQ ID NO: 446609 - RNA, 21 nt, Human
gcugcuggggaggcugaggua

SEQ ID NO: 446610 - RNA, 32 nt, Human
gcugcuggggcagauggcgguggcaggaguuu

SEQ ID NO: 446611 - RNA, 22 nt, Human
gcugcuggggcagggcccaggg

SEQ ID NO: 446612 - RNA, 20 nt, Human
gcugcuggggccuuggggca

SEQ ID NO: 446613 - RNA, 21 nt, Human
gcugcuggggcgccacgagca

SEQ ID NO: 446614 - RNA, 22 nt, Human
gcugcuggggcuggggauggca

SEQ ID NO: 446615 - RNA, 20 nt, Human
gcugcuggggggcugaggca

SEQ ID NO: 446616 - RNA, 20 nt, Human
gcugcugggguggaagagca

SEQ ID NO: 446617 - RNA, 32 nt, Human
gcugcugggugagcagcuggaggccggacagu

SEQ ID NO: 446618 - RNA, 32 nt, Human
gcugcugggugagggccuggagauguggaacc

SEQ ID NO: 446619 - RNA, 32 nt, Human
gcugcugggugcacagaugaggggagguggga

SEQ ID NO: 446620 - RNA, 19 nt, Human
gcugcugggugcgaaggca

SEQ ID NO: 446621 - RNA, 23 nt, Human
gcugcuggguuugcauguuuaca

SEQ ID NO: 446622 - RNA, 32 nt, Human
gcugcuggucccagagagugcagcccagggca

SEQ ID NO: 446623 - RNA, 32 nt, Human
gcugcuggucccauggccaccugcuggcuuug

SEQ ID NO: 446624 - RNA, 22 nt, Human
gcugcuggucgggggccugggc

SEQ ID NO: 446625 - RNA, 32 nt, Human
gcugcuggucugggugcugcuggccuccaagc

SEQ ID NO: 446626 - RNA, 22 nt, Human
gcugcuggugggagcccgaggu

SEQ ID NO: 446627 - RNA, 32 nt, Human
gcugcugguguccuccaggccugggugggcgg

SEQ ID NO: 446628 - RNA, 32 nt, Human
gcugcuggugucugucucaggguacggugcag

SEQ ID NO: 446629 - RNA, 32 nt, Human
gcugcugguguuuggcuuauugacauacucca

SEQ ID NO: 446630 - RNA, 32 nt, Human
gcugcuguauaugauauagcuuuguuaaauau

SEQ ID NO: 446631 - RNA, 32 nt, Human
gcugcugucacagucucauuuguucuuccaac

SEQ ID NO: 446632 - RNA, 32 nt, Human
gcugcugucagccuuuuugcugcugucaaguc

SEQ ID NO: 446633 - RNA, 32 nt, Human
gcugcugucaucauccccuugccuuuucaagc

SEQ ID NO: 446634 - RNA, 32 nt, Human
gcugcugucuccaggagccccugagaagauuu

SEQ ID NO: 446635 - RNA, 18 nt, Human
gcugcugucugacuucau

SEQ ID NO: 446636 - RNA, 17 nt, Human
gcugcugucuucucccu

SEQ ID NO: 446637 - RNA, 32 nt, Human
gcugcugugaccaaagggagaauggagauaac

SEQ ID NO: 446638 - RNA, 32 nt, Human
gcugcugugaccccagcaccuuccucaggaug

SEQ ID NO: 446639 - RNA, 32 nt, Human
gcugcugugauacugaguuuucuaaacagcau

SEQ ID NO: 446640 - RNA, 32 nt, Human
gcugcugugcaggggagcacagggaacagaag

SEQ ID NO: 446641 - RNA, 32 nt, Human
gcugcugugcagggguguggaguagggagcug

SEQ ID NO: 446642 - RNA, 21 nt, Human
gcugcugugccgucccgugug

SEQ ID NO: 446643 - RNA, 32 nt, Human
gcugcugugcugccauccccugcucacuccgc

SEQ ID NO: 446644 - RNA, 22 nt, Human
gcugcugugcugggcccggggc

SEQ ID NO: 446645 - RNA, 16 nt, Human
gcugcugugggaggug

SEQ ID NO: 446646 - RNA, 18 nt, Human
gcugcuguguagacugua

SEQ ID NO: 446647 - RNA, 32 nt, Human
gcugcugugucuggaaacccuccugagucagc

SEQ ID NO: 446648 - RNA, 32 nt, Human
gcugcuguuauucaaagaucaaaggaguaaaa

SEQ ID NO: 446649 - RNA, 15 nt, Human
gcugcuguucacuga

SEQ ID NO: 446650 - RNA, 32 nt, Human
gcugcuguuccaacgcugccugcacuacaaca

SEQ ID NO: 446651 - RNA, 32 nt, Human
gcugcuguugggagccaagaccggcccuuugg

SEQ ID NO: 446652 - RNA, 32 nt, Human
gcugcuguuucuggggcucugaaaaucugugg

SEQ ID NO: 446653 - RNA, 32 nt, Human
gcugcuguuuucugaaggugagaagccauuuu

SEQ ID NO: 446654 - RNA, 29 nt, Human
gcugcuguuuugucugugccugggcucug

SEQ ID NO: 446655 - RNA, 32 nt, Human
gcugcuuacucugcccugggccgccugaggcc

SEQ ID NO: 446656 - RNA, 21 nt, Human
gcugcuuagagccaggggguu

SEQ ID NO: 446657 - RNA, 20 nt, Human
gcugcuuagggcccaagcca

SEQ ID NO: 446658 - RNA, 32 nt, Human
gcugcuuauaacacaucccaagugcaggccgc

SEQ ID NO: 446659 - RNA, 32 nt, Human
gcugcuuauuaaaccuccuucuggaccuauug

SEQ ID NO: 446660 - RNA, 32 nt, Human
gcugcuucacacugacuuacacggugagcagc

SEQ ID NO: 446661 - RNA, 32 nt, Human
gcugcuucagggaaugugucccucccaccaug

SEQ ID NO: 446662 - RNA, 32 nt, Human
gcugcuucaggugugauccagcacuuucccag

SEQ ID NO: 446663 - RNA, 32 nt, Human
gcugcuucaugggcugaugugaggauuaaaca

SEQ ID NO: 446664 - RNA, 32 nt, Human
gcugcuuccacugucucagaaacugguccccg

SEQ ID NO: 446665 - RNA, 32 nt, Human
gcugcuuccaggcugggcagcacaaggccuug

SEQ ID NO: 446666 - RNA, 32 nt, Human
gcugcuuccagugaaugcuacacaccugcacc

SEQ ID NO: 446667 - RNA, 32 nt, Human
gcugcuuccauguucagucccuucccugcuuc

SEQ ID NO: 446668 - RNA, 32 nt, Human
gcugcuucccacagggugacaggcugggcugg

SEQ ID NO: 446669 - RNA, 32 nt, Human
gcugcuuccccuuuuuggccuguuuccuuagc

SEQ ID NO: 446670 - RNA, 32 nt, Human
gcugcuucccugggccauagauuugcaaugca

SEQ ID NO: 446671 - RNA, 32 nt, Human
gcugcuucccuggugugucuguucucuccucu

SEQ ID NO: 446672 - RNA, 32 nt, Human
gcugcuuccucaucuaccugugguguugggac

SEQ ID NO: 446673 - RNA, 24 nt, Human
gcugcuuccuggggacccagggca

SEQ ID NO: 446674 - RNA, 32 nt, Human
gcugcuuccuucaguuccccaggcuccuccuc

SEQ ID NO: 446675 - RNA, 32 nt, Human
gcugcuuccuucuggccagauggcagagggca

SEQ ID NO: 446676 - RNA, 32 nt, Human
gcugcuucgcguagcuuugaggaaggucuagu

SEQ ID NO: 446677 - RNA, 32 nt, Human
gcugcuucggugucccugucgggcuucccagc

SEQ ID NO: 446678 - RNA, 32 nt, Human
gcugcuucuccuccaucuugcuaguuaacaga

SEQ ID NO: 446679 - RNA, 32 nt, Human
gcugcuucuccucuuguuucugccuuaauaau

SEQ ID NO: 446680 - RNA, 32 nt, Human
gcugcuucugcagagaaggcaggccacugaug

SEQ ID NO: 446681 - RNA, 32 nt, Human
gcugcuucuggaagugcuggaagcaucacccc

SEQ ID NO: 446682 - RNA, 32 nt, Human
gcugcuucugugacccccacagcccagacuca

SEQ ID NO: 446683 - RNA, 32 nt, Human
gcugcuucuuguagaggaaacagcuuugaagu

SEQ ID NO: 446684 - RNA, 32 nt, Human
gcugcuucuuucucccccagacgcccuugcau

SEQ ID NO: 446685 - RNA, 32 nt, Human
gcugcuugaacccuggaaguggagguugcagu

SEQ ID NO: 446686 - RNA, 24 nt, Human
gcugcuugagcccaggaguucaga

SEQ ID NO: 446687 - RNA, 32 nt, Human
gcugcuugagggcugauagcucugccuuaccc

SEQ ID NO: 446688 - RNA, 20 nt, Human
gcugcuugagguccaaggca

SEQ ID NO: 446689 - RNA, 32 nt, Human
gcugcuugaguuguuucuuauauucuaaagca

SEQ ID NO: 446690 - RNA, 22 nt, Human
gcugcuugauaucacugacucu

SEQ ID NO: 446691 - RNA, 32 nt, Human
gcugcuugcacacuagggcacaugugggcuuu

SEQ ID NO: 446692 - RNA, 32 nt, Human
gcugcuugcagagaaggggcugccucaggauc

SEQ ID NO: 446693 - RNA, 32 nt, Human
gcugcuugccuuucuccguuuauugacucaca

SEQ ID NO: 446694 - RNA, 32 nt, Human
gcugcuugcgcuacuggcagagcugcugcgag

SEQ ID NO: 446695 - RNA, 32 nt, Human
gcugcuugcggacaggauguccugggguccga

SEQ ID NO: 446696 - RNA, 32 nt, Human
gcugcuuggaaaacuguccacacuugcuacuc

SEQ ID NO: 446697 - RNA, 32 nt, Human
gcugcuuggaguugaaaaaugcacacagccaa

SEQ ID NO: 446698 - RNA, 32 nt, Human
gcugcuugggaggaaggccaggaggaacacga

SEQ ID NO: 446699 - RNA, 19 nt, Human
gcugcuuggggccagggca

SEQ ID NO: 446700 - RNA, 32 nt, Human
gcugcuugguuggaggaagugaagcuggcuua

SEQ ID NO: 446701 - RNA, 32 nt, Human
gcugcuugguuugcucugagugcaaauggaac

SEQ ID NO: 446702 - RNA, 32 nt, Human
gcugcuuguacagaaagugaaaauuaguuggc

SEQ ID NO: 446703 - RNA, 32 nt, Human
gcugcuugucaagaagcauuucccggcaagag

SEQ ID NO: 446704 - RNA, 32 nt, Human
gcugcuugucccagcagguggccuugaucucu

SEQ ID NO: 446705 - RNA, 32 nt, Human
gcugcuugugccaggccccagugccccuggcc

SEQ ID NO: 446706 - RNA, 32 nt, Human
gcugcuugugggcagugaggaggcggacagca

SEQ ID NO: 446707 - RNA, 32 nt, Human
gcugcuuguucucccauggauuccugucccaa

SEQ ID NO: 446708 - RNA, 32 nt, Human
gcugcuuuaaggcuuuuagugaacaucugaag

SEQ ID NO: 446709 - RNA, 32 nt, Human
gcugcuuuccucaaaaugaguguuagugucaa

SEQ ID NO: 446710 - RNA, 32 nt, Human
gcugcuuuccugaaggugaaucauucugucca

SEQ ID NO: 446711 - RNA, 32 nt, Human
gcugcuuucuccccucccuucuugacucucug

SEQ ID NO: 446712 - RNA, 32 nt, Human
gcugcuuucucuccucuucccuuuccgggugc

SEQ ID NO: 446713 - RNA, 32 nt, Human
gcugcuuucucuucuacuucuugugcuuuacu

SEQ ID NO: 446714 - RNA, 32 nt, Human
gcugcuuugagcaggaacaaggccuccaggcc

SEQ ID NO: 446715 - RNA, 32 nt, Human
gcugcuuugcagguacaucaugugacagugga

SEQ ID NO: 446716 - RNA, 32 nt, Human
gcugcuuugccauucugguugcacugaucuuu

SEQ ID NO: 446717 - RNA, 19 nt, Human
gcugcuuugggccggggca

SEQ ID NO: 446718 - RNA, 32 nt, Human
gcugcuuugggggacucccaaaguaggccuuu

SEQ ID NO: 446719 - RNA, 22 nt, Human
gcugcuuugucugccagugccg

SEQ ID NO: 446720 - RNA, 32 nt, Human
gcugcuuuguggacaccgcaggaaguuccucg

SEQ ID NO: 446721 - RNA, 32 nt, Human
gcuggaaaaaggcagagaacgugggagugauc

SEQ ID NO: 446722 - RNA, 32 nt, Human
gcuggaaaacagugacaacaguggauuuuguu

SEQ ID NO: 446723 - RNA, 32 nt, Human
gcuggaaacauguugcacaauggucuccccac

SEQ ID NO: 446724 - RNA, 30 nt, Human
gcuggaaaccaacaggugaccucagggagg

SEQ ID NO: 446725 - RNA, 32 nt, Human
gcuggaaaccaagaggauccaaacuuccugca

SEQ ID NO: 446726 - RNA, 32 nt, Human
gcuggaaaccacagggaggggaagggagggga

SEQ ID NO: 446727 - RNA, 26 nt, Human
gcuggaaaccaggcagguuccuuccc

SEQ ID NO: 446728 - RNA, 25 nt, Human
gcuggaaacucuggcugcucaggaa

SEQ ID NO: 446729 - RNA, 32 nt, Human
gcuggaaacuucaggaaagcaccaaugagcuu

SEQ ID NO: 446730 - RNA, 32 nt, Human
gcuggaaagaggacaaguuugagaggcaacac

SEQ ID NO: 446731 - RNA, 32 nt, Human
gcuggaaagaggagaaggagagggaguacaaa

SEQ ID NO: 446732 - RNA, 32 nt, Human
gcuggaaagccacacgcggcagaggagagcug

SEQ ID NO: 446733 - RNA, 32 nt, Human
gcuggaaauacuuggaauauuuuccagagucu

SEQ ID NO: 446734 - RNA, 32 nt, Human
gcuggaacacagacuuccugggggucccgccg

SEQ ID NO: 446735 - RNA, 16 nt, Human
gcuggaacacugugau

SEQ ID NO: 446736 - RNA, 32 nt, Human
gcuggaacaggugagcagccugggcgacggcc

SEQ ID NO: 446737 - RNA, 32 nt, Human
gcuggaaccaguagcaaggagcccgagaucag

SEQ ID NO: 446738 - RNA, 32 nt, Human
gcuggaacccagaagggugagauuugugagau

SEQ ID NO: 446739 - RNA, 32 nt, Human
gcuggaacccaggaggcaaagguugcagugag

SEQ ID NO: 446740 - RNA, 32 nt, Human
gcuggaacccaggaggcagaggucgcagugag

SEQ ID NO: 446741 - RNA, 32 nt, Human
gcuggaacccaggagguggagguugcagugag

SEQ ID NO: 446742 - RNA, 32 nt, Human
gcuggaacccgggagguagaggcugcagugag

SEQ ID NO: 446743 - RNA, 32 nt, Human
gcuggaaccugggagguggaggcugcagugaa

SEQ ID NO: 446744 - RNA, 32 nt, Human
gcuggaaccugucggaacuccaugccuuccuc

SEQ ID NO: 446745 - RNA, 21 nt, Human
gcuggaacgcagucccuucca

SEQ ID NO: 446746 - RNA, 32 nt, Human
gcuggaacguggaggcagagguugcagugagc

SEQ ID NO: 446747 - RNA, 32 nt, Human
gcuggaacugagggagugagcuuggggacuuc

SEQ ID NO: 446748 - RNA, 32 nt, Human
gcuggaacuggaauuugucuuccuauugacuc

SEQ ID NO: 446749 - RNA, 32 nt, Human
gcuggaagagaagcucugucuucaggggccag

SEQ ID NO: 446750 - RNA, 19 nt, Human
gcuggaagagcugcccuca

SEQ ID NO: 446751 - RNA, 32 nt, Human
gcuggaagaggaggaggaggagaggcggcggg

SEQ ID NO: 446752 - RNA, 32 nt, Human
gcuggaagaggaggugucccagugagccgccc

SEQ ID NO: 446753 - RNA, 32 nt, Human
gcuggaagagugagggugaaggcaagaaguag

SEQ ID NO: 446754 - RNA, 32 nt, Human
gcuggaagaugaagccaugauagcuacagaga

SEQ ID NO: 446755 - RNA, 32 nt, Human
gcuggaagccauggucccgaaguguagggcaa

SEQ ID NO: 446756 - RNA, 25 nt, Human
gcuggaagcccagccccuacugcug

SEQ ID NO: 446757 - RNA, 32 nt, Human
gcuggaagcccaggccugcagcuguggaacuc

SEQ ID NO: 446758 - RNA, 32 nt, Human
gcuggaagcccauccuggaugugcugcacucg

SEQ ID NO: 446759 - RNA, 19 nt, Human
gcuggaagcuggcaggcga

SEQ ID NO: 446760 - RNA, 20 nt, Human
gcuggaagcugugggggaag

SEQ ID NO: 446761 - RNA, 32 nt, Human
gcuggaaggaaaccuuucccucuugggaccuc

SEQ ID NO: 446762 - RNA, 32 nt, Human
gcuggaaggauagccucgcuucccaggugcag

SEQ ID NO: 446763 - RNA, 24 nt, Human
gcuggaaggcugcgauucccagug

SEQ ID NO: 446764 - RNA, 32 nt, Human
gcuggaaggggacgguacucaccagaauggcu

SEQ ID NO: 446765 - RNA, 32 nt, Human
gcuggaaggggaggggcgagagggcugucucg

SEQ ID NO: 446766 - RNA, 32 nt, Human
gcuggaaggggaggggcgccaggugaggcggc

SEQ ID NO: 446767 - RNA, 25 nt, Human
gcuggaaggucuuguggccacagga

SEQ ID NO: 446768 - RNA, 32 nt, Human
gcuggaagucaugugugaaucauggagaaauc

SEQ ID NO: 446769 - RNA, 32 nt, Human
gcuggaaguucaggaugccaccaccuugaaca

SEQ ID NO: 446770 - RNA, 19 nt, Human
gcuggaauaaacgcugcug

SEQ ID NO: 446771 - RNA, 32 nt, Human
gcuggaauaugggaaaauuaauuugggcuuag

SEQ ID NO: 446772 - RNA, 32 nt, Human
gcuggaaucacaggcaggaucuggaaggaggg

SEQ ID NO: 446773 - RNA, 24 nt, Human
gcuggaauccuguguuccucgcca

SEQ ID NO: 446774 - RNA, 32 nt, Human
gcuggaaugagcugcaaggaggagugaguucu

SEQ ID NO: 446775 - RNA, 32 nt, Human
gcuggaauggggagcaaugagaggagggagug

SEQ ID NO: 446776 - RNA, 32 nt, Human
gcuggaaugggggccaggcugagccgaucugg

SEQ ID NO: 446777 - RNA, 32 nt, Human
gcuggaauuuccaagcugcuucacagaggcca

SEQ ID NO: 446778 - RNA, 28 nt, Human
gcuggacaacacagcaagacuccaucuc

SEQ ID NO: 446779 - RNA, 22 nt, Human
gcuggacaacagaagccccaug

SEQ ID NO: 446780 - RNA, 32 nt, Human
gcuggacaacuagaauguugaccucgagccga

SEQ ID NO: 446781 - RNA, 32 nt, Human
gcuggacaagggguaggagcugcuggaacagg

SEQ ID NO: 446782 - RNA, 32 nt, Human
gcuggacaagugguuuguuugugugcaaacca

SEQ ID NO: 446783 - RNA, 32 nt, Human
gcuggacaauggugugaacccaggaggcggug

SEQ ID NO: 446784 - RNA, 32 nt, Human
gcuggacacacguggaaccaagccagggaugg

SEQ ID NO: 446785 - RNA, 20 nt, Human
gcuggacacaggaggccuca

SEQ ID NO: 446786 - RNA, 24 nt, Human
gcuggacacaggcgcggccucaug

SEQ ID NO: 446787 - RNA, 32 nt, Human
gcuggacagagggaggaggccaggccagagcc

SEQ ID NO: 446788 - RNA, 32 nt, Human
gcuggacagauggaacuggaagggcagccguc

SEQ ID NO: 446789 - RNA, 32 nt, Human
gcuggacagauggcuggccaagugggagcaga

SEQ ID NO: 446790 - RNA, 19 nt, Human
gcuggacagcacucugcca

SEQ ID NO: 446791 - RNA, 21 nt, Human
gcuggacagcagcgggccccg

SEQ ID NO: 446792 - RNA, 20 nt, Human
gcuggacagcgacacgcagg

SEQ ID NO: 446793 - RNA, 32 nt, Human
gcuggacaggcugcccucucccucucugcccc

SEQ ID NO: 446794 - RNA, 32 nt, Human
gcuggacaguggacccuaccagccugcgggaa

SEQ ID NO: 446795 - RNA, 24 nt, Human
gcuggaccaaggcuaaccuuucua

SEQ ID NO: 446796 - RNA, 32 nt, Human
gcuggaccacguagccccagaucacaccuggg

SEQ ID NO: 446797 - RNA, 32 nt, Human
gcuggaccaggacccauggcaagagcaccugg

SEQ ID NO: 446798 - RNA, 32 nt, Human
gcuggaccaggagaaaaggcaguuaugaagcc

SEQ ID NO: 446799 - RNA, 22 nt, Human
gcuggaccaucucuguaggauc

SEQ ID NO: 446800 - RNA, 25 nt, Human
gcuggaccaugaggcugucucccca

SEQ ID NO: 446801 - RNA, 32 nt, Human
gcuggacccaugagccucgcuggggccuccuc

SEQ ID NO: 446802 - RNA, 21 nt, Human
gcuggacccugcucacugcug

SEQ ID NO: 446803 - RNA, 21 nt, Human
gcuggaccgggacccauggca

SEQ ID NO: 446804 - RNA, 32 nt, Human
gcuggaccgggacccauggcaagagcaccugg

SEQ ID NO: 446805 - RNA, 32 nt, Human
gcuggaccuaguuucacaaucuguugucucca

SEQ ID NO: 446806 - RNA, 32 nt, Human
gcuggaccucaccaagcugcuguggccaucaa

SEQ ID NO: 446807 - RNA, 19 nt, Human
gcuggaccuccccuuucca

SEQ ID NO: 446808 - RNA, 32 nt, Human
gcuggaccugcagcagggguuuguggaggugg

SEQ ID NO: 446809 - RNA, 32 nt, Human
gcuggacgcuguucuguucagugugcucuuug

SEQ ID NO: 446810 - RNA, 32 nt, Human
gcuggacggugaccuucauucaggggaaccug

SEQ ID NO: 446811 - RNA, 20 nt, Human
gcuggacguagcucuuucca

SEQ ID NO: 446812 - RNA, 20 nt, Human
gcuggacuaaauggcugcag

SEQ ID NO: 446813 - RNA, 32 nt, Human
gcuggacuauuucacuagaaaccacguagaau

SEQ ID NO: 446814 - RNA, 32 nt, Human
gcuggacucaaugcaaccuucucccacgagca

SEQ ID NO: 446815 - RNA, 18 nt, Human
gcuggacucagcugccca

SEQ ID NO: 446816 - RNA, 32 nt, Human
gcuggacucagcugcccaccugagccugacag

SEQ ID NO: 446817 - RNA, 32 nt, Human
gcuggacuccacugcuuuggaggcugcccagu

SEQ ID NO: 446818 - RNA, 32 nt, Human
gcuggacuccaggcuccccugccugcauagug

SEQ ID NO: 446819 - RNA, 32 nt, Human
gcuggacuccuggagguuguucugagcuuacc

SEQ ID NO: 446820 - RNA, 19 nt, Human
gcuggacucgcgccuccca

SEQ ID NO: 446821 - RNA, 21 nt, Human
gcuggacucgcgccucccacg

SEQ ID NO: 446822 - RNA, 19 nt, Human
gcuggacucuggccuuccc

SEQ ID NO: 446823 - RNA, 20 nt, Human
gcuggacugaauaucuuucc

SEQ ID NO: 446824 - RNA, 22 nt, Human
gcuggacugagcugcucuccca

SEQ ID NO: 446825 - RNA, 20 nt, Human
gcuggacugaguguccccca

SEQ ID NO: 446826 - RNA, 32 nt, Human
gcuggacugcugcuguucaggagccaccagag

SEQ ID NO: 446827 - RNA, 19 nt, Human
gcuggacuggaacccuucc

SEQ ID NO: 446828 - RNA, 32 nt, Human
gcuggacuggaggugggcaugccacccucaca

SEQ ID NO: 446829 - RNA, 32 nt, Human
gcuggacuggcagccaaguaaaggagagugau

SEQ ID NO: 446830 - RNA, 20 nt, Human
gcuggacuggccacuauccg

SEQ ID NO: 446831 - RNA, 21 nt, Human
gcuggacuggccuugcuucua

SEQ ID NO: 446832 - RNA, 22 nt, Human
gcuggacuggcugccuuguucc

SEQ ID NO: 446833 - RNA, 22 nt, Human
gcuggacuggcuguccuuucca

SEQ ID NO: 446834 - RNA, 32 nt, Human
gcuggacuggggcaggcugggcuuccaggaaa

SEQ ID NO: 446835 - RNA, 19 nt, Human
gcuggacugggucugccca

SEQ ID NO: 446836 - RNA, 20 nt, Human
gcuggacugggugggcccca

SEQ ID NO: 446837 - RNA, 32 nt, Human
gcuggacuguacugcugccaucucuggcucac

SEQ ID NO: 446838 - RNA, 20 nt, Human
gcuggacuguuggccuuucc

SEQ ID NO: 446839 - RNA, 32 nt, Human
gcuggacuucugaccacugacuucuccugacc

SEQ ID NO: 446840 - RNA, 32 nt, Human
gcuggacuugccaaagaugaccugggagagug

SEQ ID NO: 446841 - RNA, 21 nt, Human
gcuggagaaaaggcccagggu

SEQ ID NO: 446842 - RNA, 32 nt, Human
gcuggagaaaugcacuagcagagugcaggauc

SEQ ID NO: 446843 - RNA, 32 nt, Human
gcuggagaagaaagagccccugguuuuauuug

SEQ ID NO: 446844 - RNA, 32 nt, Human
gcuggagaagaugacaaagaggaagaagacca

SEQ ID NO: 446845 - RNA, 19 nt, Human
gcuggagaaucgcuugaac

SEQ ID NO: 446846 - RNA, 32 nt, Human
gcuggagaauggugugaacccaggaggcggag

SEQ ID NO: 446847 - RNA, 20 nt, Human
gcuggagaccauucuuucca

SEQ ID NO: 446848 - RNA, 32 nt, Human
gcuggagacgacgaggaggaggauuaagucca

SEQ ID NO: 446849 - RNA, 32 nt, Human
gcuggagacuggcugcuggggccuccuugcuu

SEQ ID NO: 446850 - RNA, 32 nt, Human
gcuggagacugguuaauugggccaaagauaca

SEQ ID NO: 446851 - RNA, 32 nt, Human
gcuggagagaagagaaggcagcagcagaggcc

SEQ ID NO: 446852 - RNA, 32 nt, Human
gcuggagagacacuccaacaucugcagcagga

SEQ ID NO: 446853 - RNA, 24 nt, Human
gcuggagagaggcugucuuuccca

SEQ ID NO: 446854 - RNA, 32 nt, Human
gcuggagagagggagagagaggcccgcccgcu

SEQ ID NO: 446855 - RNA, 32 nt, Human
gcuggagagcgggacguggcagaggagccacu

SEQ ID NO: 446856 - RNA, 32 nt, Human
gcuggagaggaagguaaagaagaagagaauau

SEQ ID NO: 446857 - RNA, 32 nt, Human
gcuggagaggagcaaugaaagggaggagacac

SEQ ID NO: 446858 - RNA, 32 nt, Human
gcuggagaggaugcuggagcuggagugggaag

SEQ ID NO: 446859 - RNA, 32 nt, Human
gcuggagaggcaggcagagggcagugguucuc

SEQ ID NO: 446860 - RNA, 23 nt, Human
gcuggagaggggcagcugggccc

SEQ ID NO: 446861 - RNA, 19 nt, Human
gcuggagaggugggggaag

SEQ ID NO: 446862 - RNA, 32 nt, Human
gcuggagauccuuucucucaagggcaggauua

SEQ ID NO: 446863 - RNA, 32 nt, Human
gcuggagaugaaagcuuuguagugaggacuga

SEQ ID NO: 446864 - RNA, 32 nt, Human
gcuggagaugccaagugagugugugcauuuuu

SEQ ID NO: 446865 - RNA, 32 nt, Human
gcuggagaugccuguggaacauuccagccagg

SEQ ID NO: 446866 - RNA, 32 nt, Human
gcuggagaugggggcagggggagcagcauccu

SEQ ID NO: 446867 - RNA, 32 nt, Human
gcuggagauuacaggcaugagccaccacgccc

SEQ ID NO: 446868 - RNA, 32 nt, Human
gcuggagcagaagcaacaggaggcugagagga

SEQ ID NO: 446869 - RNA, 32 nt, Human
gcuggagcagaggagcucacgccugcgggucg

SEQ ID NO: 446870 - RNA, 32 nt, Human
gcuggagcagaggcccuucacccagagccagu

SEQ ID NO: 446871 - RNA, 32 nt, Human
gcuggagcagcccaggcccggcggacagccuc

SEQ ID NO: 446872 - RNA, 32 nt, Human
gcuggagcagccgcccaacuccuggcgcggga

SEQ ID NO: 446873 - RNA, 32 nt, Human
gcuggagcaguuuggggcaggggguucuggga

SEQ ID NO: 446874 - RNA, 32 nt, Human
gcuggagcauuuccuucccuuuccagugaagg

SEQ ID NO: 446875 - RNA, 31 nt, Human
gcuggagcauuuuucugaugccagcugaaua

SEQ ID NO: 446876 - RNA, 32 nt, Human
gcuggagccagagagguagaggcugcagugag

SEQ ID NO: 446877 - RNA, 32 nt, Human
gcuggagccaggaccuggcguugggcgguacu

SEQ ID NO: 446878 - RNA, 32 nt, Human
gcuggagccaggcugggggugcuggguggaga

SEQ ID NO: 446879 - RNA, 28 nt, Human
gcuggagccagugcugccuguccguccc

SEQ ID NO: 446880 - RNA, 16 nt, Human
gcuggagcccaaggca

SEQ ID NO: 446881 - RNA, 32 nt, Human
gcuggagcccagcaguuggagguggugcaccu

SEQ ID NO: 446882 - RNA, 32 nt, Human
gcuggagcccaggaaauugaggcugcagugag

SEQ ID NO: 446883 - RNA, 32 nt, Human
gcuggagcccaggaggcacaggcugcagugag

SEQ ID NO: 446884 - RNA, 32 nt, Human
gcuggagcccaggaguucgagaccugccuugg

SEQ ID NO: 446885 - RNA, 32 nt, Human
gcuggagcccaggaguuugagguuacaguaaa

SEQ ID NO: 446886 - RNA, 32 nt, Human
gcuggagcccaggccagcuggggagggguggg

SEQ ID NO: 446887 - RNA, 32 nt, Human
gcuggagcccccauggccagcccagccuggcu

SEQ ID NO: 446888 - RNA, 19 nt, Human
gcuggagccccgggccugg

SEQ ID NO: 446889 - RNA, 32 nt, Human
gcuggagccugagucagggcccagaggcugag

SEQ ID NO: 446890 - RNA, 32 nt, Human
gcuggagccugggaaguugaggcugcagugag

SEQ ID NO: 446891 - RNA, 32 nt, Human
gcuggagcgagucacggggagagcagaaagcu

SEQ ID NO: 446892 - RNA, 32 nt, Human
gcuggagcuacugccuugcccuuccuucccuc

SEQ ID NO: 446893 - RNA, 32 nt, Human
gcuggagcucacugcacuccagcagucauggg

SEQ ID NO: 446894 - RNA, 32 nt, Human
gcuggagcugauggaggugcagcuggagagga

SEQ ID NO: 446895 - RNA, 32 nt, Human
gcuggagcugcuggaggcccugggguugguag

SEQ ID NO: 446896 - RNA, 32 nt, Human
gcuggagcuggcagaggugaugagcggcggag

SEQ ID NO: 446897 - RNA, 32 nt, Human
gcuggagcugggaacccagcgagcgccugacc

SEQ ID NO: 446898 - RNA, 32 nt, Human
gcuggagcuuccgggcccuggaaagggguccc

SEQ ID NO: 446899 - RNA, 32 nt, Human
gcuggagcuucucagcuugaaauccuaggccu

SEQ ID NO: 446900 - RNA, 32 nt, Human
gcuggagcuugcucccccuuguucggaagcug

SEQ ID NO: 446901 - RNA, 23 nt, Human
gcuggaggaacaacugggcccug

SEQ ID NO: 446902 - RNA, 32 nt, Human
gcuggaggaagacaucccagauccagaggagc

SEQ ID NO: 446903 - RNA, 32 nt, Human
gcuggaggaagugccaucugcauggccacucu

SEQ ID NO: 446904 - RNA, 32 nt, Human
gcuggaggacacaccgaccccaccccaugcug

SEQ ID NO: 446905 - RNA, 32 nt, Human
gcuggaggacagugaugugaucucgggucacc

SEQ ID NO: 446906 - RNA, 32 nt, Human
gcuggaggaccugccccuaccugcugcaucgu

SEQ ID NO: 446907 - RNA, 32 nt, Human
gcuggaggacgcuuccuccugguuagauccuc

SEQ ID NO: 446908 - RNA, 32 nt, Human
gcuggaggacggggagguugucaggggcuaug

SEQ ID NO: 446909 - RNA, 32 nt, Human
gcuggaggagagaagccaguugugugucucag

SEQ ID NO: 446910 - RNA, 18 nt, Human
gcuggaggagcaggggug

SEQ ID NO: 446911 - RNA, 18 nt, Human
gcuggaggagcccaaggg

SEQ ID NO: 446912 - RNA, 18 nt, Human
gcuggaggagcucagagu

SEQ ID NO: 446913 - RNA, 32 nt, Human
gcuggaggaggaaaccggcggagcagcuuccc

SEQ ID NO: 446914 - RNA, 32 nt, Human
gcuggaggaggaagagggcauggcggccucac

SEQ ID NO: 446915 - RNA, 32 nt, Human
gcuggaggaggcggagaggcagagggaggagc

SEQ ID NO: 446916 - RNA, 24 nt, Human
gcuggaggaggggaagcugggccc

SEQ ID NO: 446917 - RNA, 21 nt, Human
gcuggaggaguuuccuuccca

SEQ ID NO: 446918 - RNA, 32 nt, Human
gcuggaggaucacuugagcccaggaaguugag

SEQ ID NO: 446919 - RNA, 32 nt, Human
gcuggaggaugacaaggagaagauggugggca

SEQ ID NO: 446920 - RNA, 32 nt, Human
gcuggaggaugagagaucacauggaaugaggc

SEQ ID NO: 446921 - RNA, 32 nt, Human
gcuggaggcagaaacagcagaagcguuaacag

SEQ ID NO: 446922 - RNA, 32 nt, Human
gcuggaggcagauagacacaguauagggggaa

SEQ ID NO: 446923 - RNA, 18 nt, Human
gcuggaggcagccaggaa

SEQ ID NO: 446924 - RNA, 21 nt, Human
gcuggaggccaugcucccucc

SEQ ID NO: 446925 - RNA, 32 nt, Human
gcuggaggcccgggcuggaggggcaguguugc

SEQ ID NO: 446926 - RNA, 23 nt, Human
gcuggaggccuguguggggacca

SEQ ID NO: 446927 - RNA, 32 nt, Human
gcuggaggccuucuuguuucuccagucccugg

SEQ ID NO: 446928 - RNA, 32 nt, Human
gcuggaggcggaggcagcuggggagguccgag

SEQ ID NO: 446929 - RNA, 32 nt, Human
gcuggaggcggcagcgguuggaggcuucgccc

SEQ ID NO: 446930 - RNA, 21 nt, Human
gcuggaggcuggccacagugg

SEQ ID NO: 446931 - RNA, 21 nt, Human
gcuggaggcugggugcagugg

SEQ ID NO: 446932 - RNA, 32 nt, Human
gcuggagggaaggagccaggagggagagagcc

SEQ ID NO: 446933 - RNA, 19 nt, Human
gcuggagggagcagggggu

SEQ ID NO: 446934 - RNA, 32 nt, Human
gcuggagggagguggagggaggaaggugggaa

SEQ ID NO: 446935 - RNA, 32 nt, Human
gcuggagggcccugaacccugcacugcguggc

SEQ ID NO: 446936 - RNA, 32 nt, Human
gcuggagggcggaggaaggagaaggagggccc

SEQ ID NO: 446937 - RNA, 21 nt, Human
gcuggagggcuguccccuuca

SEQ ID NO: 446938 - RNA, 32 nt, Human
gcuggaggggccaagacugacaggcacagcgg

SEQ ID NO: 446939 - RNA, 22 nt, Human
gcuggaggggcugggccaagga

SEQ ID NO: 446940 - RNA, 32 nt, Human
gcuggagggggagcgaggggagagggggcugc

SEQ ID NO: 446941 - RNA, 16 nt, Human
gcuggagggggcgcgg

SEQ ID NO: 446942 - RNA, 23 nt, Human
gcuggagguaaggcugggcccug

SEQ ID NO: 446943 - RNA, 32 nt, Human
gcuggagguccaggccagggugacugggagau

SEQ ID NO: 446944 - RNA, 21 nt, Human
gcuggaggugcacguuccccc

SEQ ID NO: 446945 - RNA, 31 nt, Human
gcuggaggugccggugggccuguguugcugg

SEQ ID NO: 446946 - RNA, 32 nt, Human
gcuggaggugugaggauccgaacccaggggug

SEQ ID NO: 446947 - RNA, 32 nt, Human
gcuggagguucugcgggagcagcuggccacgg

SEQ ID NO: 446948 - RNA, 32 nt, Human
gcuggagguugaggacgcccagugagugugca

SEQ ID NO: 446949 - RNA, 32 nt, Human
gcuggagguugccauggagggccauuccugcc

SEQ ID NO: 446950 - RNA, 32 nt, Human
gcuggaguacaguagugcaaucucagcucacu

SEQ ID NO: 446951 - RNA, 32 nt, Human
gcuggaguacaguggugcgaucaugggcuuac

SEQ ID NO: 446952 - RNA, 32 nt, Human
gcuggaguauuuucuaauaauccugcuugacc

SEQ ID NO: 446953 - RNA, 32 nt, Human
gcuggagucacuccuucucugucucaugugua

SEQ ID NO: 446954 - RNA, 25 nt, Human
gcuggaguccuccaucuccuuccca

SEQ ID NO: 446955 - RNA, 21 nt, Human
gcuggagucucccagcugcca

SEQ ID NO: 446956 - RNA, 22 nt, Human
gcuggagugaaggcggagggag

SEQ ID NO: 446957 - RNA, 32 nt, Human
gcuggagugcaauggcgcgaucuuggcucacu

SEQ ID NO: 446958 - RNA, 32 nt, Human
gcuggagugcaauggugcaaugaucucggcuc

SEQ ID NO: 446959 - RNA, 32 nt, Human
gcuggagugcaguagugcaaucagggcucacu

SEQ ID NO: 446960 - RNA, 32 nt, Human
gcuggagugcaguggugcaguggcucgaucuc

SEQ ID NO: 446961 - RNA, 32 nt, Human
gcuggagugcaguggugcaguggugcaaucuc

SEQ ID NO: 446962 - RNA, 18 nt, Human
gcuggagugcaguggugu

SEQ ID NO: 446963 - RNA, 32 nt, Human
gcuggagugcaguggugugauccuggcucacu

SEQ ID NO: 446964 - RNA, 32 nt, Human
gcuggagugcgggccucguccacccacagacc

SEQ ID NO: 446965 - RNA, 32 nt, Human
gcuggaguggaaguggagagacacucucuucu

SEQ ID NO: 446966 - RNA, 32 nt, Human
gcuggaguguaagugacaugaucauagcucac

SEQ ID NO: 446967 - RNA, 32 nt, Human
gcuggaguguaguagugugauccuggcucacu

SEQ ID NO: 446968 - RNA, 32 nt, Human
gcuggaguguaguggugugauccuggcucacu

SEQ ID NO: 446969 - RNA, 19 nt, Human
gcuggagugugacuggaaa

SEQ ID NO: 446970 - RNA, 32 nt, Human
gcuggaguucaaugaguccuagacagugagag

SEQ ID NO: 446971 - RNA, 32 nt, Human
gcuggaguuugcugugggcacugaggcgcggg

SEQ ID NO: 446972 - RNA, 19 nt, Human
gcuggaguuuguccuucca

SEQ ID NO: 446973 - RNA, 32 nt, Human
gcuggauaaaaaggguaugaugacagaugaag

SEQ ID NO: 446974 - RNA, 22 nt, Human
gcuggauaaccagacugugaca

SEQ ID NO: 446975 - RNA, 32 nt, Human
gcuggauauccagguucucgccaggccccgau

SEQ ID NO: 446976 - RNA, 32 nt, Human
gcuggauccagacugcagauccagagcugcgc

SEQ ID NO: 446977 - RNA, 32 nt, Human
gcuggauccauggcuggggauccaggcaaggc

SEQ ID NO: 446978 - RNA, 32 nt, Human
gcuggauccauguaugggguccagcgcuggcu

SEQ ID NO: 446979 - RNA, 32 nt, Human
gcuggauccuuugacagagaguggucccuaaa

SEQ ID NO: 446980 - RNA, 32 nt, Human
gcuggaucguaggguucgaggcugcuugcuuu

SEQ ID NO: 446981 - RNA, 32 nt, Human
gcuggaucuggggcagccaccuugcuaccaug

SEQ ID NO: 446982 - RNA, 32 nt, Human
gcuggaucuugagucccauuagcugugagaug

SEQ ID NO: 446983 - RNA, 32 nt, Human
gcuggaugaaaccaaggauaguucagguauaa

SEQ ID NO: 446984 - RNA, 32 nt, Human
gcuggaugaaauggcaguggauuuuuaaacuu

SEQ ID NO: 446985 - RNA, 32 nt, Human
gcuggaugagugaaacaggaauggagcaagcc

SEQ ID NO: 446986 - RNA, 32 nt, Human
gcuggaugcagcagcggcugggcuugguccca

SEQ ID NO: 446987 - RNA, 32 nt, Human
gcuggauggaaacccuggaauaggcuacuuga

SEQ ID NO: 446988 - RNA, 32 nt, Human
gcuggauggcugugucuggccuaggagaccac

SEQ ID NO: 446989 - RNA, 32 nt, Human
gcuggaugggcuguggugggaggguugcagcg

SEQ ID NO: 446990 - RNA, 32 nt, Human
gcuggauguaaucaccuuugguuggacuagaa

SEQ ID NO: 446991 - RNA, 24 nt, Human
gcuggaugugaaacuguugaaaag

SEQ ID NO: 446992 - RNA, 22 nt, Human
gcuggaugugcaugcccugugg

SEQ ID NO: 446993 - RNA, 32 nt, Human
gcuggaugugccucccaggccugcugugguuc

SEQ ID NO: 446994 - RNA, 32 nt, Human
gcuggaugugguggcagugccuguaaucccag

SEQ ID NO: 446995 - RNA, 32 nt, Human
gcuggaugugguggcuccuuccuccucuauag

SEQ ID NO: 446996 - RNA, 32 nt, Human
gcuggaugugucauccacugagccuucaucuc

SEQ ID NO: 446997 - RNA, 32 nt, Human
gcuggauguuauugcgggcaccuguaauccca

SEQ ID NO: 446998 - RNA, 32 nt, Human
gcuggauuaagcuuuguugugauugugaccaa

SEQ ID NO: 446999 - RNA, 32 nt, Human
gcuggauuaucuugaaccugugcuauuaaaug

SEQ ID NO: 447000 - RNA, 26 nt, Human
gcuggauuccucuguguucuuuccca

SEQ ID NO: 447001 - RNA, 23 nt, Human
gcuggauucucaggcugggcccc

SEQ ID NO: 447002 - RNA, 32 nt, Human
gcuggauucuucuuccucaaauauuuggggcu

SEQ ID NO: 447003 - RNA, 32 nt, Human
gcuggauuuuuaaugaaacagacucagggagg

SEQ ID NO: 447004 - RNA, 32 nt, Human
gcuggcaaaagagcagugcugaaggaggagau

SEQ ID NO: 447005 - RNA, 32 nt, Human
gcuggcaaccagcgccccagaagcacagccag

SEQ ID NO: 447006 - RNA, 32 nt, Human
gcuggcaagaagaagcgaaagcagaggaggag

SEQ ID NO: 447007 - RNA, 32 nt, Human
gcuggcaagaagauaaaauaugacagaaccug

SEQ ID NO: 447008 - RNA, 32 nt, Human
gcuggcaaggggauauucagcucugcaaagga

SEQ ID NO: 447009 - RNA, 32 nt, Human
gcuggcaaggggugacugccucugagucauug

SEQ ID NO: 447010 - RNA, 32 nt, Human
gcuggcaaugcuguuucacuggaggacacggc

SEQ ID NO: 447011 - RNA, 32 nt, Human
gcuggcacaagagcagcggcuugggggagccg

SEQ ID NO: 447012 - RNA, 19 nt, Human
gcuggcacacagcccuggg

SEQ ID NO: 447013 - RNA, 32 nt, Human
gcuggcacagccccaggcuuggugaggaagag

SEQ ID NO: 447014 - RNA, 32 nt, Human
gcuggcacaggcaucucagaggugugagauga

SEQ ID NO: 447015 - RNA, 32 nt, Human
gcuggcaccacugcacugugaugggggcccuc

SEQ ID NO: 447016 - RNA, 18 nt, Human
gcuggcaccagggcucgg

SEQ ID NO: 447017 - RNA, 32 nt, Human
gcuggcacccacuccugggcugcucagagcug

SEQ ID NO: 447018 - RNA, 32 nt, Human
gcuggcacccaucccagggcuccucuggagcu

SEQ ID NO: 447019 - RNA, 32 nt, Human
gcuggcaccccacagggagccuuggagcccug

SEQ ID NO: 447020 - RNA, 24 nt, Human
gcuggcaccugcucccugugcuca

SEQ ID NO: 447021 - RNA, 32 nt, Human
gcuggcaccuguaaucccagcauuaugggaaa

SEQ ID NO: 447022 - RNA, 32 nt, Human
gcuggcaccuguaaucccagcauuaugggaga

SEQ ID NO: 447023 - RNA, 32 nt, Human
gcuggcaccuguaaucccagcauuuugggaga

SEQ ID NO: 447024 - RNA, 32 nt, Human
gcuggcacggugccucaggaagguggcgacuc

SEQ ID NO: 447025 - RNA, 32 nt, Human
gcuggcacugacugggcauagcuccccgcuuc

SEQ ID NO: 447026 - RNA, 32 nt, Human
gcuggcacugcaccuggauuuguacugcaaga

SEQ ID NO: 447027 - RNA, 18 nt, Human
gcuggcacuuuggcccug

SEQ ID NO: 447028 - RNA, 32 nt, Human
gcuggcagaaagauugcauagucagugcuucc

SEQ ID NO: 447029 - RNA, 21 nt, Human
gcuggcagacgggcagggggu

SEQ ID NO: 447030 - RNA, 32 nt, Human
gcuggcagaggagcagcuggacuggggccuuu

SEQ ID NO: 447031 - RNA, 32 nt, Human
gcuggcagaggccauuuguggaaaguggagag

SEQ ID NO: 447032 - RNA, 32 nt, Human
gcuggcagaggcugugcucccuccucaggugg

SEQ ID NO: 447033 - RNA, 32 nt, Human
gcuggcagaggggacagaguucagggaggggc

SEQ ID NO: 447034 - RNA, 32 nt, Human
gcuggcagaguuguguuugcaguguaguccug

SEQ ID NO: 447035 - RNA, 32 nt, Human
gcuggcagauacaaaagacaguggcuuuuauc

SEQ ID NO: 447036 - RNA, 24 nt, Human
gcuggcagaucacuuaaggucagg

SEQ ID NO: 447037 - RNA, 24 nt, Human
gcuggcagaucacuugaggccagg

SEQ ID NO: 447038 - RNA, 24 nt, Human
gcuggcagaucacuugaggucagg

SEQ ID NO: 447039 - RNA, 32 nt, Human
gcuggcagaugggaacagguucuucuugagga

SEQ ID NO: 447040 - RNA, 32 nt, Human
gcuggcagcgcugccuccugcccacauuccug

SEQ ID NO: 447041 - RNA, 32 nt, Human
gcuggcagcggagagagcagcccuggagcagg

SEQ ID NO: 447042 - RNA, 32 nt, Human
gcuggcagcuccggguggcggugcaggggcga

SEQ ID NO: 447043 - RNA, 32 nt, Human
gcuggcagcugugugguagggagguccaagua

SEQ ID NO: 447044 - RNA, 32 nt, Human
gcuggcaggagaaacugaggaaccacaguccu

SEQ ID NO: 447045 - RNA, 32 nt, Human
gcuggcaggagagaagcagggugggcugcugg

SEQ ID NO: 447046 - RNA, 32 nt, Human
gcuggcaggaggguaguuucuccagucucccc

SEQ ID NO: 447047 - RNA, 32 nt, Human
gcuggcaggcagacccaggcaguuuggcacca

SEQ ID NO: 447048 - RNA, 32 nt, Human
gcuggcaggcagcgugcggcagaagaugcuuc

SEQ ID NO: 447049 - RNA, 32 nt, Human
gcuggcaggcccuguggcugcuggcugagggu

SEQ ID NO: 447050 - RNA, 21 nt, Human
gcuggcaggccgggcaggggg

SEQ ID NO: 447051 - RNA, 32 nt, Human
gcuggcaggcugccuuccuuccuggagguucu

SEQ ID NO: 447052 - RNA, 32 nt, Human
gcuggcaggcuggagcugggaacccagcgagc

SEQ ID NO: 447053 - RNA, 32 nt, Human
gcuggcaggcuugaggcccaggaagagccagu

SEQ ID NO: 447054 - RNA, 32 nt, Human
gcuggcagggagugguugaggucugggggcca

SEQ ID NO: 447055 - RNA, 32 nt, Human
gcuggcagggcagaggagguagucuggaguug

SEQ ID NO: 447056 - RNA, 20 nt, Human
gcuggcagggcagcaggggg

SEQ ID NO: 447057 - RNA, 22 nt, Human
gcuggcagggcccucuggggca

SEQ ID NO: 447058 - RNA, 20 nt, Human
gcuggcagggcucucggcgg

SEQ ID NO: 447059 - RNA, 19 nt, Human
gcuggcaggggaggggcug

SEQ ID NO: 447060 - RNA, 32 nt, Human
gcuggcaggggagggggcagacagccucgccu

SEQ ID NO: 447061 - RNA, 17 nt, Human
gcuggcaggggcagggg

SEQ ID NO: 447062 - RNA, 32 nt, Human
gcuggcaggggcaggggugaacuggaggcaag

SEQ ID NO: 447063 - RNA, 17 nt, Human
gcuggcagguagggggu

SEQ ID NO: 447064 - RNA, 32 nt, Human
gcuggcagguggccucacccacagcaggggag

SEQ ID NO: 447065 - RNA, 18 nt, Human
gcuggcaggugggagggg

SEQ ID NO: 447066 - RNA, 32 nt, Human
gcuggcagugccuguccccagcagccagcaaa

SEQ ID NO: 447067 - RNA, 17 nt, Human
gcuggcaguggcagggg

SEQ ID NO: 447068 - RNA, 32 nt, Human
gcuggcaguucuguucacguccauugccggca

SEQ ID NO: 447069 - RNA, 32 nt, Human
gcuggcauaggaucugcccagaagagaaaaug

SEQ ID NO: 447070 - RNA, 32 nt, Human
gcuggcaucauguccuguggccgccccacuug

SEQ ID NO: 447071 - RNA, 32 nt, Human
gcuggcaucccugcuugcagcugugaaggggg

SEQ ID NO: 447072 - RNA, 22 nt, Human
gcuggcaucugaaccuagggua

SEQ ID NO: 447073 - RNA, 32 nt, Human
gcuggcaugagacucaaaugcaaagauccugc

SEQ ID NO: 447074 - RNA, 32 nt, Human
gcuggcaugcugguguguaccuguaguccuag

SEQ ID NO: 447075 - RNA, 32 nt, Human
gcuggcaugguggcucccgccuguaaucccag

SEQ ID NO: 447076 - RNA, 32 nt, Human
gcuggcauggugguacagaagguaucagucaa

SEQ ID NO: 447077 - RNA, 32 nt, Human
gcuggcauguuguauucaagaguggcagaaga

SEQ ID NO: 447078 - RNA, 32 nt, Human
gcuggcauucaugucuucauuuugggaugcag

SEQ ID NO: 447079 - RNA, 32 nt, Human
gcuggcauuccaggcugcugagugcggcaucu

SEQ ID NO: 447080 - RNA, 32 nt, Human
gcuggcauuuggacucaaugaaaagggcaccu

SEQ ID NO: 447081 - RNA, 32 nt, Human
gcuggccaaaagagcuuguuugcugggaggug

SEQ ID NO: 447082 - RNA, 32 nt, Human
gcuggccaaacaacuaaagcccacuugcauca

SEQ ID NO: 447083 - RNA, 32 nt, Human
gcuggccaacagcuuguccccgaucugccucc

SEQ ID NO: 447084 - RNA, 32 nt, Human
gcuggccaagugggcggugggugaggggcccc

SEQ ID NO: 447085 - RNA, 32 nt, Human
gcuggccaaucagugucaucuccuggguaaau

SEQ ID NO: 447086 - RNA, 32 nt, Human
gcuggccagagggagaggcagcagggaacgug

SEQ ID NO: 447087 - RNA, 32 nt, Human
gcuggccagagguggaaggaaggaggaaagga

SEQ ID NO: 447088 - RNA, 32 nt, Human
gcuggccagcuauuguggaugcugauggaaga

SEQ ID NO: 447089 - RNA, 32 nt, Human
gcuggccaggaaaaucgaaagggaaacacccu

SEQ ID NO: 447090 - RNA, 32 nt, Human
gcuggccaucaaggccagcugggaugaguccg

SEQ ID NO: 447091 - RNA, 32 nt, Human
gcuggccauucugccuuucugacauuuccuug

SEQ ID NO: 447092 - RNA, 32 nt, Human
gcuggccauuuugccuuucugacauuuccuug

SEQ ID NO: 447093 - RNA, 22 nt, Human
gcuggcccaaggcuggacccug

SEQ ID NO: 447094 - RNA, 32 nt, Human
gcuggcccacccaaggagcagugccggacaac

SEQ ID NO: 447095 - RNA, 32 nt, Human
gcuggcccacugguccccucucuggcucugug

SEQ ID NO: 447096 - RNA, 32 nt, Human
gcuggcccagaggaaggguuagaugugggugg

SEQ ID NO: 447097 - RNA, 15 nt, Human
gcuggcccagagugg

SEQ ID NO: 447098 - RNA, 32 nt, Human
gcuggcccagccagggcaggcagaagcuaggg

SEQ ID NO: 447099 - RNA, 32 nt, Human
gcuggcccaggccaagauggagaaggcagcca

SEQ ID NO: 447100 - RNA, 32 nt, Human
gcuggcccagggugguggucagcugggucagg

SEQ ID NO: 447101 - RNA, 32 nt, Human
gcuggcccaggugcucccucccuuccugcagg

SEQ ID NO: 447102 - RNA, 32 nt, Human
gcuggccccacaagccacucaguuccaaggga

SEQ ID NO: 447103 - RNA, 32 nt, Human
gcuggccccacucuuguagcauggacacugcu

SEQ ID NO: 447104 - RNA, 32 nt, Human
gcuggccccaggacuucugaucucaguccucu

SEQ ID NO: 447105 - RNA, 32 nt, Human
gcuggcccccuccucugcuuuagccccggcaa

SEQ ID NO: 447106 - RNA, 32 nt, Human
gcuggccccgagcacagacucucccccaaggc

SEQ ID NO: 447107 - RNA, 32 nt, Human
gcuggccccggccuuccgcggcugcuucuugu

SEQ ID NO: 447108 - RNA, 32 nt, Human
gcuggccccggguccgccccagaggaguccac

SEQ ID NO: 447109 - RNA, 32 nt, Human
gcuggccccucagucccuuccuacuccccaac

SEQ ID NO: 447110 - RNA, 32 nt, Human
gcuggccccugaggcccaugcucccugaacgc

SEQ ID NO: 447111 - RNA, 32 nt, Human
gcuggccccuggcuggaggggagggcaguggc

SEQ ID NO: 447112 - RNA, 20 nt, Human
gcuggcccgacgccucccga

SEQ ID NO: 447113 - RNA, 32 nt, Human
gcuggcccggcucuccagcugcagaggcaggu

SEQ ID NO: 447114 - RNA, 32 nt, Human
gcuggcccgggagggggcgcggggcacgguug

SEQ ID NO: 447115 - RNA, 32 nt, Human
gcuggcccggggcugcagccugaccccucugc

SEQ ID NO: 447116 - RNA, 32 nt, Human
gcuggcccuaagguaaugcagaaagauuugga

SEQ ID NO: 447117 - RNA, 32 nt, Human
gcuggcccuagcauuggacccuaggagaccug

SEQ ID NO: 447118 - RNA, 23 nt, Human
gcuggcccucagccacagugccc

SEQ ID NO: 447119 - RNA, 32 nt, Human
gcuggcccucaggcugcugcucugccuucauu

SEQ ID NO: 447120 - RNA, 32 nt, Human
gcuggcccucauucggggucgggaaccaaggg

SEQ ID NO: 447121 - RNA, 32 nt, Human
gcuggcccucauugccuccgggggcuaccuua

SEQ ID NO: 447122 - RNA, 32 nt, Human
gcuggcccuccaccaucuucacauuccaagac

SEQ ID NO: 447123 - RNA, 32 nt, Human
gcuggcccuccacccccaccucaagugccuua

SEQ ID NO: 447124 - RNA, 32 nt, Human
gcuggcccuccuccucuucccuggcccauuga

SEQ ID NO: 447125 - RNA, 32 nt, Human
gcuggcccuccuggcccccgccuuccacgccc

SEQ ID NO: 447126 - RNA, 24 nt, Human
gcuggcccugaacuccugggccca

SEQ ID NO: 447127 - RNA, 32 nt, Human
gcuggcccugagacauccagucuuccacacuc

SEQ ID NO: 447128 - RNA, 21 nt, Human
gcuggcccugaggcagggggu

SEQ ID NO: 447129 - RNA, 32 nt, Human
gcuggcccugccacuccagccuggccucacug

SEQ ID NO: 447130 - RNA, 32 nt, Human
gcuggcccugccucugccuggccggcgccgca

SEQ ID NO: 447131 - RNA, 32 nt, Human
gcuggcccugccucuucuggccuggugucucc

SEQ ID NO: 447132 - RNA, 32 nt, Human
gcuggcccugcuggcccugccucuucuggccu

SEQ ID NO: 447133 - RNA, 21 nt, Human
gcuggcccugggcggggccac

SEQ ID NO: 447134 - RNA, 21 nt, Human
gcuggccgccaccgcugccac

SEQ ID NO: 447135 - RNA, 26 nt, Human
gcuggccgccucccugagccggcugg

SEQ ID NO: 447136 - RNA, 32 nt, Human
gcuggccgcgggcagccaggcccagcccccgc

SEQ ID NO: 447137 - RNA, 32 nt, Human
gcuggccggaggacaggucaggugagggggcc

SEQ ID NO: 447138 - RNA, 16 nt, Human
gcuggccggcaggggg

SEQ ID NO: 447139 - RNA, 17 nt, Human
gcuggccgggcgcggug

SEQ ID NO: 447140 - RNA, 32 nt, Human
gcuggccggggaggggcggauggaggggccug

SEQ ID NO: 447141 - RNA, 32 nt, Human
gcuggccgguaagauauuagugccucauuuua

SEQ ID NO: 447142 - RNA, 32 nt, Human
gcuggccgucaagaaguaaggaaagaagaagc

SEQ ID NO: 447143 - RNA, 24 nt, Human
gcuggccucaaacuccugggcuca

SEQ ID NO: 447144 - RNA, 23 nt, Human
gcuggccucagcaaacaaugcca

SEQ ID NO: 447145 - RNA, 20 nt, Human
gcuggccuccaagcuggcag

SEQ ID NO: 447146 - RNA, 32 nt, Human
gcuggccuccacccgcucagacgcccgcacac

SEQ ID NO: 447147 - RNA, 18 nt, Human
gcuggccuccauggcccc

SEQ ID NO: 447148 - RNA, 32 nt, Human
gcuggccucccgccgcugugcauugcagcauu

SEQ ID NO: 447149 - RNA, 32 nt, Human
gcuggccuccuaugccucaucaugucccaaac

SEQ ID NO: 447150 - RNA, 21 nt, Human
gcuggccuccuguggggccac

SEQ ID NO: 447151 - RNA, 21 nt, Human
gcuggccucgcucugcugcug

SEQ ID NO: 447152 - RNA, 32 nt, Human
gcuggccucggacugcaggacagaauccuuac

SEQ ID NO: 447153 - RNA, 32 nt, Human
gcuggccucgucucagaaccucuucuuguguc

SEQ ID NO: 447154 - RNA, 32 nt, Human
gcuggccucucacugccuccccaaggcccccu

SEQ ID NO: 447155 - RNA, 18 nt, Human
gcuggccugagcaggggg

SEQ ID NO: 447156 - RNA, 32 nt, Human
gcuggccugaugcuggugucugugccggagcc

SEQ ID NO: 447157 - RNA, 32 nt, Human
gcuggccugcaaacuccaggagcacagagaca

SEQ ID NO: 447158 - RNA, 32 nt, Human
gcuggccugccccuucuuccagaggcuauggc

SEQ ID NO: 447159 - RNA, 32 nt, Human
gcuggccugcucacagagcucuaccucagccu

SEQ ID NO: 447160 - RNA, 32 nt, Human
gcuggccugcucauggggcugcgucgcucacc

SEQ ID NO: 447161 - RNA, 32 nt, Human
gcuggccuggaacugacccuuccuucauccuc

SEQ ID NO: 447162 - RNA, 32 nt, Human
gcuggccuggacugccugugcucugggcucca

SEQ ID NO: 447163 - RNA, 18 nt, Human
gcuggccuggcagggggu

SEQ ID NO: 447164 - RNA, 32 nt, Human
gcuggccuggcccauucaccucuuguggccca

SEQ ID NO: 447165 - RNA, 32 nt, Human
gcuggccuggcucugugccugccugccuccag

SEQ ID NO: 447166 - RNA, 16 nt, Human
gcuggccuggguccag

SEQ ID NO: 447167 - RNA, 32 nt, Human
gcuggccugguccuggcacauccucugcacug

SEQ ID NO: 447168 - RNA, 17 nt, Human
gcuggccuguaauccca

SEQ ID NO: 447169 - RNA, 23 nt, Human
gcuggccugugguggucugugua

SEQ ID NO: 447170 - RNA, 32 nt, Human
gcuggccugugucuaaggcugccuguaagaaa

SEQ ID NO: 447171 - RNA, 19 nt, Human
gcuggccuucuuccugcca

SEQ ID NO: 447172 - RNA, 32 nt, Human
gcuggccuucuuccugccacaggccaugccuc

SEQ ID NO: 447173 - RNA, 24 nt, Human
gcuggccuugaacuccugggcuca

SEQ ID NO: 447174 - RNA, 24 nt, Human
gcuggccuugagcuccugggcuca

SEQ ID NO: 447175 - RNA, 32 nt, Human
gcuggccuuggaggacggucagcuggaggaug

SEQ ID NO: 447176 - RNA, 21 nt, Human
gcuggcgagcgcggcacccca

SEQ ID NO: 447177 - RNA, 18 nt, Human
gcuggcgagggugggggu

SEQ ID NO: 447178 - RNA, 32 nt, Human
gcuggcgagggugggggugggcaagggaugca

SEQ ID NO: 447179 - RNA, 32 nt, Human
gcuggcgcggggcggaggagaaucgcucuuaa

SEQ ID NO: 447180 - RNA, 32 nt, Human
gcuggcggacucaggcuggggucugcagugca

SEQ ID NO: 447181 - RNA, 16 nt, Human
gcuggcggagcacggg

SEQ ID NO: 447182 - RNA, 32 nt, Human
gcuggcggaugugcgagcgaggagaacgaggu

SEQ ID NO: 447183 - RNA, 20 nt, Human
gcuggcggcaaagagggguu

SEQ ID NO: 447184 - RNA, 17 nt, Human
gcuggcggcaguggugg

SEQ ID NO: 447185 - RNA, 20 nt, Human
gcuggcggccaccgcagggg

SEQ ID NO: 447186 - RNA, 18 nt, Human
gcuggcggccggcggggg

SEQ ID NO: 447187 - RNA, 19 nt, Human
gcuggcggcggccgggggu

SEQ ID NO: 447188 - RNA, 21 nt, Human
gcuggcggcggcgcagcgguu

SEQ ID NO: 447189 - RNA, 19 nt, Human
gcuggcggcggggcugggg

SEQ ID NO: 447190 - RNA, 18 nt, Human
gcuggcggcugaggaggg

SEQ ID NO: 447191 - RNA, 18 nt, Human
gcuggcgggagagggugg

SEQ ID NO: 447192 - RNA, 20 nt, Human
gcuggcgggagggccgcacc

SEQ ID NO: 447193 - RNA, 32 nt, Human
gcuggcgggagguuuggagcagauggauaccg

SEQ ID NO: 447194 - RNA, 16 nt, Human
gcuggcgggcgggcgg

SEQ ID NO: 447195 - RNA, 17 nt, Human
gcuggcgggcgggcggg

SEQ ID NO: 447196 - RNA, 32 nt, Human
gcuggcggggagaagcagacacccucccagca

SEQ ID NO: 447197 - RNA, 17 nt, Human
gcuggcggggccggggg

SEQ ID NO: 447198 - RNA, 16 nt, Human
gcuggcggggcugggg

SEQ ID NO: 447199 - RNA, 17 nt, Human
gcuggcgggggaggcgg

SEQ ID NO: 447200 - RNA, 16 nt, Human
gcuggcgggggagggg

SEQ ID NO: 447201 - RNA, 18 nt, Human
gcuggcggggggaggagg

SEQ ID NO: 447202 - RNA, 32 nt, Human
gcuggcggucaccauggcaaugcgggagcugg

SEQ ID NO: 447203 - RNA, 32 nt, Human
gcuggcggucaccgaggaaaacacccugugug

SEQ ID NO: 447204 - RNA, 32 nt, Human
gcuggcggucgggagagcggcggcagcgagag

SEQ ID NO: 447205 - RNA, 18 nt, Human
gcuggcggugacagccgg

SEQ ID NO: 447206 - RNA, 21 nt, Human
gcuggcggugagcaggggguu

SEQ ID NO: 447207 - RNA, 18 nt, Human
gcuggcgguggugggggu

SEQ ID NO: 447208 - RNA, 20 nt, Human
gcuggcgguguggcgggggg

SEQ ID NO: 447209 - RNA, 32 nt, Human
gcuggcgucugugccaucucugcuccacugac

SEQ ID NO: 447210 - RNA, 18 nt, Human
gcuggcgugccagggggu

SEQ ID NO: 447211 - RNA, 32 nt, Human
gcuggcgugggggucucagaauggagcccuca

SEQ ID NO: 447212 - RNA, 32 nt, Human
gcuggcgugguggcacguaccuguaaucucag

SEQ ID NO: 447213 - RNA, 32 nt, Human
gcuggcgugguggcucacaccuguaaucccag

SEQ ID NO: 447214 - RNA, 32 nt, Human
gcuggcguuggguuccaaauuugcauuuuauu

SEQ ID NO: 447215 - RNA, 32 nt, Human
gcuggcguuuuggaaucgaauuucgacaggga

SEQ ID NO: 447216 - RNA, 32 nt, Human
gcuggcuacaaugcuauccagccggugguggc

SEQ ID NO: 447217 - RNA, 32 nt, Human
gcuggcuagcauggugagaccgucucuacuaa

SEQ ID NO: 447218 - RNA, 32 nt, Human
gcuggcuagggagggacagggcagggaggcuc

SEQ ID NO: 447219 - RNA, 32 nt, Human
gcuggcucacugcagccuccaccucccagguu

SEQ ID NO: 447220 - RNA, 32 nt, Human
gcuggcucaggccccaaccucuggccuuuuaa

SEQ ID NO: 447221 - RNA, 21 nt, Human
gcuggcuccagcccgcugcug

SEQ ID NO: 447222 - RNA, 32 nt, Human
gcuggcuccagccuggaaaccugucugagguu

SEQ ID NO: 447223 - RNA, 32 nt, Human
gcuggcucccaucucccucccauuugcagacc

SEQ ID NO: 447224 - RNA, 32 nt, Human
gcuggcucccccacaccucccaccugcauugc

SEQ ID NO: 447225 - RNA, 32 nt, Human
gcuggcucccucuuggucuucccaggcugggg

SEQ ID NO: 447226 - RNA, 32 nt, Human
gcuggcucgagccugggguccaugucccuuug

SEQ ID NO: 447227 - RNA, 32 nt, Human
gcuggcucucaaaucccaaaguugggaggcau

SEQ ID NO: 447228 - RNA, 32 nt, Human
gcuggcucucaauccccgccucgcgggggugc

SEQ ID NO: 447229 - RNA, 32 nt, Human
gcuggcucuccacaccccuccuguuccagaaa

SEQ ID NO: 447230 - RNA, 32 nt, Human
gcuggcucucugccccaacccugggcacuggc

SEQ ID NO: 447231 - RNA, 32 nt, Human
gcuggcucugggaagagagugagggacagagg

SEQ ID NO: 447232 - RNA, 20 nt, Human
gcuggcucugggcagggagu

SEQ ID NO: 447233 - RNA, 32 nt, Human
gcuggcucuguuuccaagccuggggagggguu

SEQ ID NO: 447234 - RNA, 32 nt, Human
gcuggcugacaguuccaugaggauggcaaaag

SEQ ID NO: 447235 - RNA, 32 nt, Human
gcuggcugaccugggcccacagagccuggcuu

SEQ ID NO: 447236 - RNA, 32 nt, Human
gcuggcugagauuggggcagcggcucagcagu

SEQ ID NO: 447237 - RNA, 32 nt, Human
gcuggcugagccuauggccaaugaguauuccu

SEQ ID NO: 447238 - RNA, 32 nt, Human
gcuggcugagggugggcacuaagcuggccacc

SEQ ID NO: 447239 - RNA, 32 nt, Human
gcuggcugcacuggcccugcggcgggccccag

SEQ ID NO: 447240 - RNA, 32 nt, Human
gcuggcugcagccuccaccucccuggcucaag

SEQ ID NO: 447241 - RNA, 32 nt, Human
gcuggcugcccauagcaucccaugucccacgu

SEQ ID NO: 447242 - RNA, 21 nt, Human
gcuggcugcccccagccaagc

SEQ ID NO: 447243 - RNA, 22 nt, Human
gcuggcugcccugcagaggcca

SEQ ID NO: 447244 - RNA, 32 nt, Human
gcuggcugccuccugucagcugggcaggcggg

SEQ ID NO: 447245 - RNA, 31 nt, Human
gcuggcugccucuccuccugcugucucugcu

SEQ ID NO: 447246 - RNA, 20 nt, Human
gcuggcugcggcagcagggg

SEQ ID NO: 447247 - RNA, 32 nt, Human
gcuggcugcugcuuuucugcuccuggaagcgg

SEQ ID NO: 447248 - RNA, 32 nt, Human
gcuggcugcuguugugccucaucucugggcac

SEQ ID NO: 447249 - RNA, 19 nt, Human
gcuggcuggagugcagugg

SEQ ID NO: 447250 - RNA, 21 nt, Human
gcuggcuggcccagugcuccu

SEQ ID NO: 447251 - RNA, 32 nt, Human
gcuggcuggccucacccaccccugcacaguug

SEQ ID NO: 447252 - RNA, 32 nt, Human
gcuggcuggcgcgcccagccucgcagaaccag

SEQ ID NO: 447253 - RNA, 32 nt, Human
gcuggcuggcgugcgugaacagguguggaccg

SEQ ID NO: 447254 - RNA, 21 nt, Human
gcuggcuggcuuucuuucuuu

SEQ ID NO: 447255 - RNA, 32 nt, Human
gcuggcugggcagcacgucucuccccacaggg

SEQ ID NO: 447256 - RNA, 32 nt, Human
gcuggcugggcaggcaggggcuugccucuugc

SEQ ID NO: 447257 - RNA, 32 nt, Human
gcuggcugggcccagacagacugugguggccu

SEQ ID NO: 447258 - RNA, 17 nt, Human
gcuggcugggcgcggug

SEQ ID NO: 447259 - RNA, 17 nt, Human
gcuggcugggcguggug

SEQ ID NO: 447260 - RNA, 32 nt, Human
gcuggcugggcuggggaggggguagugacagu

SEQ ID NO: 447261 - RNA, 19 nt, Human
gcuggcugggggcuugaca

SEQ ID NO: 447262 - RNA, 32 nt, Human
gcuggcugggguccccgaagaucucaggaauu

SEQ ID NO: 447263 - RNA, 32 nt, Human
gcuggcugguaggccagccaccugggauggca

SEQ ID NO: 447264 - RNA, 32 nt, Human
gcuggcuggugggaugggggaggguggggagc

SEQ ID NO: 447265 - RNA, 24 nt, Human
gcuggcugguuagagguucccuuu

SEQ ID NO: 447266 - RNA, 19 nt, Human
gcuggcuguaccuguuccu

SEQ ID NO: 447267 - RNA, 32 nt, Human
gcuggcuguaggaaccccagggaggcacaggg

SEQ ID NO: 447268 - RNA, 32 nt, Human
gcuggcugucauggcaacaggaggcugugcug

SEQ ID NO: 447269 - RNA, 32 nt, Human
gcuggcugugcacauucccuccugcuccccag

SEQ ID NO: 447270 - RNA, 32 nt, Human
gcuggcugugggacucuaaggccaggccagca

SEQ ID NO: 447271 - RNA, 32 nt, Human
gcuggcugugugaucuugggcaaguucaacca

SEQ ID NO: 447272 - RNA, 32 nt, Human
gcuggcugugugaucuugggcaaguucgacca

SEQ ID NO: 447273 - RNA, 24 nt, Human
gcuggcuguuuucuucuggggcuu

SEQ ID NO: 447274 - RNA, 32 nt, Human
gcuggcuucagcugcagaacucucagucccuc

SEQ ID NO: 447275 - RNA, 32 nt, Human
gcuggcuucauucucagacucugguagcauga

SEQ ID NO: 447276 - RNA, 32 nt, Human
gcuggcuucucaccagccuggcccugcagaag

SEQ ID NO: 447277 - RNA, 32 nt, Human
gcuggcuucucccaggccucuucuacuauggc

SEQ ID NO: 447278 - RNA, 32 nt, Human
gcuggcuucucuccccugccccaaaccucucu

SEQ ID NO: 447279 - RNA, 32 nt, Human
gcuggcuucugcgcuuucuuccucuccaaagu

SEQ ID NO: 447280 - RNA, 32 nt, Human
gcuggcuugaagucugugucucaggucgagga

SEQ ID NO: 447281 - RNA, 32 nt, Human
gcuggcuugagcuccucuggaaugugcaggga

SEQ ID NO: 447282 - RNA, 20 nt, Human
gcuggcuuggccaugccuuu

SEQ ID NO: 447283 - RNA, 32 nt, Human
gcuggcuuggccggaaacccgggggaggccca

SEQ ID NO: 447284 - RNA, 32 nt, Human
gcuggcuuuccuucugggcugucuccaucuga

SEQ ID NO: 447285 - RNA, 32 nt, Human
gcuggcuuucuuucuuucuuucuuucuuucuu

SEQ ID NO: 447286 - RNA, 21 nt, Human
gcuggcuuugcggcaggggug

SEQ ID NO: 447287 - RNA, 32 nt, Human
gcuggcuuugggcaucucgggcaggacagguc

SEQ ID NO: 447288 - RNA, 32 nt, Human
gcuggcuuugucuuugggccugggcaggcuua

SEQ ID NO: 447289 - RNA, 23 nt, Human
gcugggaaacccuagaccauguc

SEQ ID NO: 447290 - RNA, 32 nt, Human
gcugggaaagaggucagugcagauguuuuugg

SEQ ID NO: 447291 - RNA, 32 nt, Human
gcugggaaaggccuggccagcagguagccugu

SEQ ID NO: 447292 - RNA, 32 nt, Human
gcugggaaaugaggaggccaugcacagggugg

SEQ ID NO: 447293 - RNA, 32 nt, Human
gcugggaaccacugacccagacucaguuccug

SEQ ID NO: 447294 - RNA, 32 nt, Human
gcugggaaccugagguugucaaaggggcggca

SEQ ID NO: 447295 - RNA, 32 nt, Human
gcugggaagagaggcgaagccaggucaccuuu

SEQ ID NO: 447296 - RNA, 32 nt, Human
gcugggaagggacggcccucgcccgcggugau

SEQ ID NO: 447297 - RNA, 32 nt, Human
gcugggaagucuucugucucagugcugguuuu

SEQ ID NO: 447298 - RNA, 32 nt, Human
gcugggaauggaguugggaggcagguguugaa

SEQ ID NO: 447299 - RNA, 32 nt, Human
gcugggaauggccauguggaacaggccaugcc

SEQ ID NO: 447300 - RNA, 32 nt, Human
gcugggaauuacaggcacccaccacaucuggc

SEQ ID NO: 447301 - RNA, 32 nt, Human
gcugggacaaaguuagaauugccugaagauuu

SEQ ID NO: 447302 - RNA, 24 nt, Human
gcugggacaacauagggagaccac

SEQ ID NO: 447303 - RNA, 19 nt, Human
gcugggacaacucugaggc

SEQ ID NO: 447304 - RNA, 19 nt, Human
gcugggacagaguggggcc

SEQ ID NO: 447305 - RNA, 32 nt, Human
gcugggacagcuagagaagauggcccaggcug

SEQ ID NO: 447306 - RNA, 23 nt, Human
gcugggacaggagaaucgcuuga

SEQ ID NO: 447307 - RNA, 32 nt, Human
gcugggacagggaaggaagucagugaagcugg

SEQ ID NO: 447308 - RNA, 32 nt, Human
gcugggacagggacucugccucuuggaguuug

SEQ ID NO: 447309 - RNA, 23 nt, Human
gcugggacaugugaugggggcac

SEQ ID NO: 447310 - RNA, 24 nt, Human
gcugggacauuauguaggagccac

SEQ ID NO: 447311 - RNA, 24 nt, Human
gcugggaccacaaaugugagccac

SEQ ID NO: 447312 - RNA, 32 nt, Human
gcugggaccacagcuugggcaggaaagggaug

SEQ ID NO: 447313 - RNA, 18 nt, Human
gcugggaccacaggcaug

SEQ ID NO: 447314 - RNA, 32 nt, Human
gcugggaccagugaaaccuacuucaugaagag

SEQ ID NO: 447315 - RNA, 32 nt, Human
gcugggaccccuccccuccaacacacauacuc

SEQ ID NO: 447316 - RNA, 21 nt, Human
gcugggaccgaggcugggcca

SEQ ID NO: 447317 - RNA, 32 nt, Human
gcugggaccuauccccucacaucuaaugaaug

SEQ ID NO: 447318 - RNA, 32 nt, Human
gcugggaccucucuccccaacugcccugcucu

SEQ ID NO: 447319 - RNA, 23 nt, Human
gcugggaccuggggaaccaagga

SEQ ID NO: 447320 - RNA, 32 nt, Human
gcugggacgcgguggguguggagcagcauccc

SEQ ID NO: 447321 - RNA, 32 nt, Human
gcugggacuaagucacagggaucugcugcagc

SEQ ID NO: 447322 - RNA, 24 nt, Human
gcugggacuacaauugugagccac

SEQ ID NO: 447323 - RNA, 24 nt, Human
gcugggacuacagaugugggccac

SEQ ID NO: 447324 - RNA, 32 nt, Human
gcugggacuacaggauuacaguuuaaagacaa

SEQ ID NO: 447325 - RNA, 24 nt, Human
gcugggacuacaggcacaggccac

SEQ ID NO: 447326 - RNA, 32 nt, Human
gcugggacuacaggccccugcccagcuaauuu

SEQ ID NO: 447327 - RNA, 20 nt, Human
gcugggacuacaggcgugag

SEQ ID NO: 447328 - RNA, 24 nt, Human
gcugggacuacaggugccaucaga

SEQ ID NO: 447329 - RNA, 20 nt, Human
gcugggacuacaggugugag

SEQ ID NO: 447330 - RNA, 24 nt, Human
gcugggacuauaagugugagccac

SEQ ID NO: 447331 - RNA, 32 nt, Human
gcugggacucacucuagcuugcccagcaacuu

SEQ ID NO: 447332 - RNA, 32 nt, Human
gcugggacuccucgguccuugccuccuaguuu

SEQ ID NO: 447333 - RNA, 21 nt, Human
gcugggacugagaaggcucac

SEQ ID NO: 447334 - RNA, 24 nt, Human
gcugggacugcaguuguaagccac

SEQ ID NO: 447335 - RNA, 32 nt, Human
gcugggacugcgggcgccccaccaccacgccc

SEQ ID NO: 447336 - RNA, 24 nt, Human
gcugggacugggaggcagagccgc

SEQ ID NO: 447337 - RNA, 32 nt, Human
gcugggacugggugggggcaggauggaguuag

SEQ ID NO: 447338 - RNA, 32 nt, Human
gcugggagaacuguacuggugcuucaucauca

SEQ ID NO: 447339 - RNA, 32 nt, Human
gcugggagacacagcaagacuccgucucaaaa

SEQ ID NO: 447340 - RNA, 32 nt, Human
gcugggagacccacagagugugcaucagucac

SEQ ID NO: 447341 - RNA, 32 nt, Human
gcugggagagcagcaagggggaccaggugcgc

SEQ ID NO: 447342 - RNA, 32 nt, Human
gcugggagaggcaggaaggauccuccccuaga

SEQ ID NO: 447343 - RNA, 32 nt, Human
gcugggagagguaaguugaaguagcugaaggu

SEQ ID NO: 447344 - RNA, 22 nt, Human
gcugggagcacaggcacugcag

SEQ ID NO: 447345 - RNA, 20 nt, Human
gcugggagccuagucacgga

SEQ ID NO: 447346 - RNA, 20 nt, Human
gcugggagcgacacgcagug

SEQ ID NO: 447347 - RNA, 21 nt, Human
gcugggagcgacacgcaguga

SEQ ID NO: 447348 - RNA, 32 nt, Human
gcugggagcgccugccuucucuugccuugaaa

SEQ ID NO: 447349 - RNA, 19 nt, Human
gcugggagcguccucuuca

SEQ ID NO: 447350 - RNA, 32 nt, Human
gcugggagcugcagacuggaaauguuuauuug

SEQ ID NO: 447351 - RNA, 22 nt, Human
gcugggagcugggcuaggcccc

SEQ ID NO: 447352 - RNA, 32 nt, Human
gcugggagcuguagaccggagcuguuccuauu

SEQ ID NO: 447353 - RNA, 32 nt, Human
gcugggagcugugcaccggagcuguuccuauu

SEQ ID NO: 447354 - RNA, 24 nt, Human
gcugggaggaagggaugggccccg

SEQ ID NO: 447355 - RNA, 19 nt, Human
gcugggaggacagagccag

SEQ ID NO: 447356 - RNA, 32 nt, Human
gcugggaggagaaggcggcggaagguggagau

SEQ ID NO: 447357 - RNA, 32 nt, Human
gcugggaggagccuggagaaagaggcgaccuu

SEQ ID NO: 447358 - RNA, 32 nt, Human
gcugggaggagguggugacgguggcaacggca

SEQ ID NO: 447359 - RNA, 32 nt, Human
gcugggaggagucagagcuggcuuccauucac

SEQ ID NO: 447360 - RNA, 32 nt, Human
gcugggaggcagagguugcagugagcugagau

SEQ ID NO: 447361 - RNA, 32 nt, Human
gcugggaggcagaguuuucagugagccaagau

SEQ ID NO: 447362 - RNA, 32 nt, Human
gcugggaggcggagguugcagugagccaagau

SEQ ID NO: 447363 - RNA, 32 nt, Human
gcugggaggcggagguugcagugagcugagau

SEQ ID NO: 447364 - RNA, 32 nt, Human
gcugggaggcuuccugcgcucagaccuauccu

SEQ ID NO: 447365 - RNA, 32 nt, Human
gcugggagggagaagugcuacgccuuugcagg

SEQ ID NO: 447366 - RNA, 32 nt, Human
gcugggagggaggaugugugcauuuuguaaau

SEQ ID NO: 447367 - RNA, 32 nt, Human
gcugggagggcucuuccaggagguaggaguug

SEQ ID NO: 447368 - RNA, 32 nt, Human
gcugggaggggccguccuuccuucccuucacc

SEQ ID NO: 447369 - RNA, 32 nt, Human
gcugggaggggcugaguguacuugguggaggc

SEQ ID NO: 447370 - RNA, 32 nt, Human
gcugggagggggcccuuccagacugggggccc

SEQ ID NO: 447371 - RNA, 32 nt, Human
gcugggagggggcccuuccagauugggggccc

SEQ ID NO: 447372 - RNA, 32 nt, Human
gcugggagguggaugcugcagugagcagugau

SEQ ID NO: 447373 - RNA, 24 nt, Human
gcugggaguacaggcgcgcaccac

SEQ ID NO: 447374 - RNA, 32 nt, Human
gcugggagucaagucagcuaggaaggaagcag

SEQ ID NO: 447375 - RNA, 32 nt, Human
gcugggauaccaguacuacagcucuuccucca

SEQ ID NO: 447376 - RNA, 22 nt, Human
gcugggauagggguggagccac

SEQ ID NO: 447377 - RNA, 32 nt, Human
gcugggaucacugucugcagucaccaccggcu

SEQ ID NO: 447378 - RNA, 32 nt, Human
gcugggaucuccaaggggccuccuggauucag

SEQ ID NO: 447379 - RNA, 32 nt, Human
gcugggaucugcugguggccugggcagugccc

SEQ ID NO: 447380 - RNA, 31 nt, Human
gcugggaugaagaugcugccaggaguggacg

SEQ ID NO: 447381 - RNA, 21 nt, Human
gcugggaugauaugggggaag

SEQ ID NO: 447382 - RNA, 32 nt, Human
gcugggaugcaauggcauggucucagcucacu

SEQ ID NO: 447383 - RNA, 32 nt, Human
gcugggaugcaauguaggcugagggaaagacg

SEQ ID NO: 447384 - RNA, 24 nt, Human
gcugggaugggagaaucgcuugag

SEQ ID NO: 447385 - RNA, 24 nt, Human
gcugggaugggcccuccaagccca

SEQ ID NO: 447386 - RNA, 32 nt, Human
gcugggaugggugagagaauugaggugacuuu

SEQ ID NO: 447387 - RNA, 22 nt, Human
gcugggaugguggcgagcugua

SEQ ID NO: 447388 - RNA, 23 nt, Human
gcugggauuacaccaccaugccc

SEQ ID NO: 447389 - RNA, 32 nt, Human
gcugggauuacaccaccaugcccagcuacuaa

SEQ ID NO: 447390 - RNA, 32 nt, Human
gcugggauuacaggaugagccacugagcccag

SEQ ID NO: 447391 - RNA, 24 nt, Human
gcugggauuacaggcacacaccac

SEQ ID NO: 447392 - RNA, 24 nt, Human
gcugggauuacaggcacgcaccac

SEQ ID NO: 447393 - RNA, 20 nt, Human
gcugggauuacaggcaugag

SEQ ID NO: 447394 - RNA, 24 nt, Human
gcugggauuacaggcgcacaccac

SEQ ID NO: 447395 - RNA, 18 nt, Human
gcugggauuacaggcgug

SEQ ID NO: 447396 - RNA, 20 nt, Human
gcugggauuacaggcgugag

SEQ ID NO: 447397 - RNA, 20 nt, Human
gcugggauuacaggcguggg

SEQ ID NO: 447398 - RNA, 32 nt, Human
gcugggauuacagggcaccugccaccacgccu

SEQ ID NO: 447399 - RNA, 20 nt, Human
gcugggauuacagguaugag

SEQ ID NO: 447400 - RNA, 20 nt, Human
gcugggauuacaggugugag

SEQ ID NO: 447401 - RNA, 24 nt, Human
gcugggauuacaugcgugagccac

SEQ ID NO: 447402 - RNA, 24 nt, Human
gcugggauuacuggcaugagccac

SEQ ID NO: 447403 - RNA, 24 nt, Human
gcugggauuacuggcgugagccac

SEQ ID NO: 447404 - RNA, 22 nt, Human
gcugggauuaggugugagccac

SEQ ID NO: 447405 - RNA, 23 nt, Human
gcugggauucaggugugagccac

SEQ ID NO: 447406 - RNA, 32 nt, Human
gcugggauucuggcaucugccucccuagaccu

SEQ ID NO: 447407 - RNA, 23 nt, Human
gcugggauugcagcgugagccac

SEQ ID NO: 447408 - RNA, 32 nt, Human
gcugggauuuacaggcaugagccaccgcaccc

SEQ ID NO: 447409 - RNA, 32 nt, Human
gcugggauuuacaggcaugagccaccgcgccc

SEQ ID NO: 447410 - RNA, 32 nt, Human
gcugggcaacaaagcaagacccggucucuccc

SEQ ID NO: 447411 - RNA, 32 nt, Human
gcugggcaacacagcaagacucugucucaaaa

SEQ ID NO: 447412 - RNA, 32 nt, Human
gcugggcaacacagggagacccccucucuaca

SEQ ID NO: 447413 - RNA, 32 nt, Human
gcugggcaagaagaaagccaagggcaaggcca

SEQ ID NO: 447414 - RNA, 32 nt, Human
gcugggcacacaguaggugcuuuagcggacag

SEQ ID NO: 447415 - RNA, 32 nt, Human
gcugggcacagcaacuggaucccagccuucuu

SEQ ID NO: 447416 - RNA, 32 nt, Human
gcugggcacccaggacccccaggugcuugaca

SEQ ID NO: 447417 - RNA, 32 nt, Human
gcugggcaccugaaggaugacauggcccugcc

SEQ ID NO: 447418 - RNA, 32 nt, Human
gcugggcacgcaguaggggcucaggagaugcu

SEQ ID NO: 447419 - RNA, 32 nt, Human
gcugggcacggcccuggcguucggcacuagac

SEQ ID NO: 447420 - RNA, 32 nt, Human
gcugggcacugagcugccgccuggugaagggg

SEQ ID NO: 447421 - RNA, 32 nt, Human
gcugggcacugaggucccuggcgucccugguu

SEQ ID NO: 447422 - RNA, 32 nt, Human
gcugggcacugcguggccuugccccucucccg

SEQ ID NO: 447423 - RNA, 32 nt, Human
gcugggcagagcccugggggcgcggugcugcc

SEQ ID NO: 447424 - RNA, 32 nt, Human
gcugggcagagcugcggcacagggccugggcu

SEQ ID NO: 447425 - RNA, 32 nt, Human
gcugggcagaggcagaggucagcacuggccau

SEQ ID NO: 447426 - RNA, 32 nt, Human
gcugggcagccccagagagaggauguggaaag

SEQ ID NO: 447427 - RNA, 32 nt, Human
gcugggcaggaggagagggcagaggaagaccc

SEQ ID NO: 447428 - RNA, 32 nt, Human
gcugggcagggacccaggcucaugcucccagc

SEQ ID NO: 447429 - RNA, 32 nt, Human
gcugggcagggccuggcggagguggaguggcc

SEQ ID NO: 447430 - RNA, 32 nt, Human
gcugggcaucuccccauauucucucuccugua

SEQ ID NO: 447431 - RNA, 32 nt, Human
gcugggcaucucuccucuguggcucuaggaca

SEQ ID NO: 447432 - RNA, 32 nt, Human
gcugggcauggcugccuguaaucccagcacuu

SEQ ID NO: 447433 - RNA, 31 nt, Human
gcugggcaugggagagaaacgggcuggggag

SEQ ID NO: 447434 - RNA, 31 nt, Human
gcugggcaugguggcgggcacuuguaguccc

SEQ ID NO: 447435 - RNA, 31 nt, Human
gcugggcauuauguguccaugccagggaugc

SEQ ID NO: 447436 - RNA, 32 nt, Human
gcugggcauuuccaucauauagaccucugccc

SEQ ID NO: 447437 - RNA, 32 nt, Human
gcugggccaagccagggauggggccacagcca

SEQ ID NO: 447438 - RNA, 32 nt, Human
gcugggccagcagaagcuaggacaucugugag

SEQ ID NO: 447439 - RNA, 32 nt, Human
gcugggccagccgcccacccccacccccagug

SEQ ID NO: 447440 - RNA, 32 nt, Human
gcugggccagccuggcccugcagggcagagca

SEQ ID NO: 447441 - RNA, 32 nt, Human
gcugggccagggacucaacaauggggacagaa

SEQ ID NO: 447442 - RNA, 32 nt, Human
gcugggccaugggacccuggaggcagagcugg

SEQ ID NO: 447443 - RNA, 32 nt, Human
gcugggccauuuuguucuuggagggacaaaau

SEQ ID NO: 447444 - RNA, 32 nt, Human
gcugggcccacacaccucuccauggacuccag

SEQ ID NO: 447445 - RNA, 32 nt, Human
gcugggcccagccuggggacagggaaccugcc

SEQ ID NO: 447446 - RNA, 32 nt, Human
gcugggcccagccugucucgcccuggccgcgg

SEQ ID NO: 447447 - RNA, 32 nt, Human
gcugggcccaggacggugcguccggccucgcc

SEQ ID NO: 447448 - RNA, 32 nt, Human
gcugggcccaggcuguggcaugauggccggag

SEQ ID NO: 447449 - RNA, 32 nt, Human
gcugggccccacaaacaccacaaacaccuuuu

SEQ ID NO: 447450 - RNA, 32 nt, Human
gcugggccccucagagccucugagaugcagag

SEQ ID NO: 447451 - RNA, 32 nt, Human
gcugggccccuggggaggagggagggugggcg

SEQ ID NO: 447452 - RNA, 32 nt, Human
gcugggcccgugagccacucggccucaggucg

SEQ ID NO: 447453 - RNA, 32 nt, Human
gcugggcccuccaggauuugagagagggagag

SEQ ID NO: 447454 - RNA, 32 nt, Human
gcugggcccugccuccccguuacccuccuucc

SEQ ID NO: 447455 - RNA, 32 nt, Human
gcugggcccugccugcagccagggcugggguu

SEQ ID NO: 447456 - RNA, 32 nt, Human
gcugggcccuggagggucaagagccccaauua

SEQ ID NO: 447457 - RNA, 32 nt, Human
gcugggcccuggcagguggaaaaccaucuccc

SEQ ID NO: 447458 - RNA, 32 nt, Human
gcugggccgaggacagggcggcaggggugaca

SEQ ID NO: 447459 - RNA, 32 nt, Human
gcugggccggaagccucugccugcagguuucu

SEQ ID NO: 447460 - RNA, 22 nt, Human
gcugggccgggacuuccuuccu

SEQ ID NO: 447461 - RNA, 32 nt, Human
gcugggccucaaggagaccguucauggaagcu

SEQ ID NO: 447462 - RNA, 32 nt, Human
gcugggccuccacuucagccuagugaacaaaa

SEQ ID NO: 447463 - RNA, 32 nt, Human
gcugggccucuaagaaccacagccacagaguc

SEQ ID NO: 447464 - RNA, 32 nt, Human
gcugggccucugaagcucuccucuuugagguc

SEQ ID NO: 447465 - RNA, 32 nt, Human
gcugggccucugccucauccugacucccccug

SEQ ID NO: 447466 - RNA, 32 nt, Human
gcugggccugcuguccagcuucccaggugcag

SEQ ID NO: 447467 - RNA, 32 nt, Human
gcugggccuggcucccaggaccaguccagucc

SEQ ID NO: 447468 - RNA, 17 nt, Human
gcugggccuggcucccu

SEQ ID NO: 447469 - RNA, 32 nt, Human
gcugggccuggcugagggcccugugugcucac

SEQ ID NO: 447470 - RNA, 32 nt, Human
gcugggccugggacaggcuccuccucucccuc

SEQ ID NO: 447471 - RNA, 32 nt, Human
gcugggccugggacuucugccucugccgccuc

SEQ ID NO: 447472 - RNA, 32 nt, Human
gcugggccugggcacaggaggagcagcugcuu

SEQ ID NO: 447473 - RNA, 32 nt, Human
gcugggccuguccugccgucauggcccccugc

SEQ ID NO: 447474 - RNA, 32 nt, Human
gcugggccuuugaggacacagaucagaagaaa

SEQ ID NO: 447475 - RNA, 32 nt, Human
gcugggccuuugucuccugggcaccgggugcc

SEQ ID NO: 447476 - RNA, 32 nt, Human
gcugggcgacagagcgagacccugucucaaaa

SEQ ID NO: 447477 - RNA, 20 nt, Human
gcugggcgacguggaggagg

SEQ ID NO: 447478 - RNA, 32 nt, Human
gcugggcgagcuccacugacaaguggguagga

SEQ ID NO: 447479 - RNA, 32 nt, Human
gcugggcgcccaggaggaagggagggcagagg

SEQ ID NO: 447480 - RNA, 32 nt, Human
gcugggcggacugucugugugucugucucucu

SEQ ID NO: 447481 - RNA, 32 nt, Human
gcugggcggcauaagcauugccacuaucgaag

SEQ ID NO: 447482 - RNA, 32 nt, Human
gcugggcggcgccggcggcaugugcgagggcc

SEQ ID NO: 447483 - RNA, 32 nt, Human
gcugggcgggggagaggaaggggcggggcagg

SEQ ID NO: 447484 - RNA, 32 nt, Human
gcugggcgggguggcucagaccuguaauccca

SEQ ID NO: 447485 - RNA, 32 nt, Human
gcugggcgugcuagagguugcagcaugagacu

SEQ ID NO: 447486 - RNA, 32 nt, Human
gcugggcguggggcucacaccuguaaucccag

SEQ ID NO: 447487 - RNA, 32 nt, Human
gcugggcuacaaagcaagacucccucucaaaa

SEQ ID NO: 447488 - RNA, 32 nt, Human
gcugggcuagcuaaaggguggggagagggaag

SEQ ID NO: 447489 - RNA, 32 nt, Human
gcugggcucaaagauaaaaggaagggaaaagc

SEQ ID NO: 447490 - RNA, 32 nt, Human
gcugggcucacagcaggugcuuaauaaacaga

SEQ ID NO: 447491 - RNA, 32 nt, Human
gcugggcucacuguggccccaccccaagccgu

SEQ ID NO: 447492 - RNA, 32 nt, Human
gcugggcuccacccaccuucuugcucuaccag

SEQ ID NO: 447493 - RNA, 32 nt, Human
gcugggcucccagagcugcuggcguuucgaau

SEQ ID NO: 447494 - RNA, 32 nt, Human
gcugggcucgcgccggggcucugggugugugc

SEQ ID NO: 447495 - RNA, 32 nt, Human
gcugggcucgggcuauccuuccaucucagccu

SEQ ID NO: 447496 - RNA, 32 nt, Human
gcugggcucugccacccuaccuguucaguguc

SEQ ID NO: 447497 - RNA, 31 nt, Human
gcugggcucuguguguggccuguguccccug

SEQ ID NO: 447498 - RNA, 32 nt, Human
gcugggcucuuggagguaggggagcuacaggg

SEQ ID NO: 447499 - RNA, 22 nt, Human
gcugggcugagcagggccucua

SEQ ID NO: 447500 - RNA, 32 nt, Human
gcugggcugccuggcacugcccgcuugccggu

SEQ ID NO: 447501 - RNA, 21 nt, Human
gcugggcugcgagcugggccc

SEQ ID NO: 447502 - RNA, 32 nt, Human
gcugggcuggacugccugggccagugauaaug

SEQ ID NO: 447503 - RNA, 32 nt, Human
gcugggcuggagagacuggacuuagucuugcc

SEQ ID NO: 447504 - RNA, 32 nt, Human
gcugggcugggaaguggggaaagcaggggagc

SEQ ID NO: 447505 - RNA, 20 nt, Human
gcugggcugggcugagcccc

SEQ ID NO: 447506 - RNA, 32 nt, Human
gcugggcugggcugggcugugggagcccuaug

SEQ ID NO: 447507 - RNA, 32 nt, Human
gcugggcugggcugugguggggugggggacaa

SEQ ID NO: 447508 - RNA, 20 nt, Human
gcugggcuggggugggcccc

SEQ ID NO: 447509 - RNA, 32 nt, Human
gcugggcuggugcccccaggagauggagggcc

SEQ ID NO: 447510 - RNA, 32 nt, Human
gcugggcuguagccaauagccaugcaggacug

SEQ ID NO: 447511 - RNA, 23 nt, Human
gcugggcuguucccagccuccca

SEQ ID NO: 447512 - RNA, 32 nt, Human
gcugggcuucaugucaaacaugucaauguaug

SEQ ID NO: 447513 - RNA, 20 nt, Human
gcugggcuugccugcugcug

SEQ ID NO: 447514 - RNA, 17 nt, Human
gcugggcuuggguccag

SEQ ID NO: 447515 - RNA, 32 nt, Human
gcugggcuugguuuucuugaccugccugccug

SEQ ID NO: 447516 - RNA, 32 nt, Human
gcugggcuugucagggggcaccccaaagaggg

SEQ ID NO: 447517 - RNA, 18 nt, Human
gcuggggaaaaugugcca

SEQ ID NO: 447518 - RNA, 32 nt, Human
gcuggggaagagaguccugaacgguuugaugu

SEQ ID NO: 447519 - RNA, 32 nt, Human
gcuggggaaggaagacagggacugcagguguc

SEQ ID NO: 447520 - RNA, 32 nt, Human
gcuggggaaggacacacuggaggcucuugcug

SEQ ID NO: 447521 - RNA, 32 nt, Human
gcuggggaagggacagucaagagcagucaguu

SEQ ID NO: 447522 - RNA, 32 nt, Human
gcuggggaaggggaaagagggaggaaggggag

SEQ ID NO: 447523 - RNA, 32 nt, Human
gcuggggaagugaacccugagguggggacccu

SEQ ID NO: 447524 - RNA, 32 nt, Human
gcuggggacaagggcugccacugcacuuagca

SEQ ID NO: 447525 - RNA, 32 nt, Human
gcuggggacaugcaacaauaacaggugaguuc

SEQ ID NO: 447526 - RNA, 17 nt, Human
gcuggggacccagggca

SEQ ID NO: 447527 - RNA, 21 nt, Human
gcuggggacuacaggcacccg

SEQ ID NO: 447528 - RNA, 32 nt, Human
gcuggggacuacaggugcgugccaccacgcuc

SEQ ID NO: 447529 - RNA, 21 nt, Human
gcuggggacuccugggcccug

SEQ ID NO: 447530 - RNA, 21 nt, Human
gcuggggacucucugugcccc

SEQ ID NO: 447531 - RNA, 21 nt, Human
gcuggggacuggcgcagcccc

SEQ ID NO: 447532 - RNA, 32 nt, Human
gcuggggacugggggccagggagcagcaagcc

SEQ ID NO: 447533 - RNA, 32 nt, Human
gcuggggagaagguguucauucacuugcauuu

SEQ ID NO: 447534 - RNA, 24 nt, Human
gcuggggagaauggggcugggccc

SEQ ID NO: 447535 - RNA, 32 nt, Human
gcuggggagaggagggcagugaggagcgagga

SEQ ID NO: 447536 - RNA, 32 nt, Human
gcuggggagaggagggcuggaggcagagagug

SEQ ID NO: 447537 - RNA, 32 nt, Human
gcuggggagagggagaaggcaggccucaggau

SEQ ID NO: 447538 - RNA, 32 nt, Human
gcuggggagagggcagggaggcuuccugggcc

SEQ ID NO: 447539 - RNA, 32 nt, Human
gcuggggagagggggagggggcugugguggug

SEQ ID NO: 447540 - RNA, 32 nt, Human
gcuggggagagguggaggcugacagcugagac

SEQ ID NO: 447541 - RNA, 32 nt, Human
gcuggggagauggaggcugcagugagcuauaa

SEQ ID NO: 447542 - RNA, 23 nt, Human
gcuggggagcgacugacgccccg

SEQ ID NO: 447543 - RNA, 21 nt, Human
gcuggggagcgcugagccgcg

SEQ ID NO: 447544 - RNA, 32 nt, Human
gcuggggagcugcacccaccucccuuccaggg

SEQ ID NO: 447545 - RNA, 32 nt, Human
gcuggggaggacauucuggggcugaggguuga

SEQ ID NO: 447546 - RNA, 32 nt, Human
gcuggggaggccaggguauaagaaaagcauca

SEQ ID NO: 447547 - RNA, 22 nt, Human
gcuggggaggcggcgggccccg

SEQ ID NO: 447548 - RNA, 32 nt, Human
gcuggggaggcugaaguaggaggaucauuuau

SEQ ID NO: 447549 - RNA, 32 nt, Human
gcuggggaggcugaggugggaggauugcuugg

SEQ ID NO: 447550 - RNA, 32 nt, Human
gcuggggagggagaggaugggaccagguugga

SEQ ID NO: 447551 - RNA, 22 nt, Human
gcuggggagggcccaggccacg

SEQ ID NO: 447552 - RNA, 32 nt, Human
gcuggggagggcucuuccauccccagcacccc

SEQ ID NO: 447553 - RNA, 24 nt, Human
gcuggggaggggggcugggcuccc

SEQ ID NO: 447554 - RNA, 24 nt, Human
gcuggggaggggucgcuggccccg

SEQ ID NO: 447555 - RNA, 32 nt, Human
gcuggggagggugggagcacgaacgagguggg

SEQ ID NO: 447556 - RNA, 32 nt, Human
gcuggggagguagaggaaagugcuagaguaca

SEQ ID NO: 447557 - RNA, 32 nt, Human
gcuggggaggucgaggcagcagugagccgaga

SEQ ID NO: 447558 - RNA, 32 nt, Human
gcuggggaggucuuggaggccuggucucugcc

SEQ ID NO: 447559 - RNA, 32 nt, Human
gcuggggagugagaggaugagcuagugagugg

SEQ ID NO: 447560 - RNA, 32 nt, Human
gcuggggagugggaacagggaggggcagaaaa

SEQ ID NO: 447561 - RNA, 32 nt, Human
gcuggggaucccggaccucgauucugcgggcg

SEQ ID NO: 447562 - RNA, 32 nt, Human
gcuggggaugggccuggcugcacagcauccuc

SEQ ID NO: 447563 - RNA, 32 nt, Human
gcuggggauggguggaggcagugacaggcucc

SEQ ID NO: 447564 - RNA, 32 nt, Human
gcuggggauuacaggugccuaccagcaugcuc

SEQ ID NO: 447565 - RNA, 32 nt, Human
gcuggggauuuguggagggaagaccaccaccc

SEQ ID NO: 447566 - RNA, 32 nt, Human
gcuggggcaagaacucugggcuuggguaauga

SEQ ID NO: 447567 - RNA, 32 nt, Human
gcuggggcaauggcaucugucacgguguuuuc

SEQ ID NO: 447568 - RNA, 32 nt, Human
gcuggggcaccgggagcugugaagggaacgug

SEQ ID NO: 447569 - RNA, 32 nt, Human
gcuggggcagaagagggucucacuuugucacc

SEQ ID NO: 447570 - RNA, 23 nt, Human
gcuggggcagcagaaucgcuuga

SEQ ID NO: 447571 - RNA, 32 nt, Human
gcuggggcagcccucagagccuggccacgugg

SEQ ID NO: 447572 - RNA, 32 nt, Human
gcuggggcagccugcagcugcccacccaaccu

SEQ ID NO: 447573 - RNA, 24 nt, Human
gcuggggcaggagaaucacuugag

SEQ ID NO: 447574 - RNA, 23 nt, Human
gcuggggcaggagaaucgcuuga

SEQ ID NO: 447575 - RNA, 24 nt, Human
gcuggggcaggagaauugccugag

SEQ ID NO: 447576 - RNA, 23 nt, Human
gcuggggcaggagaauugcuuga

SEQ ID NO: 447577 - RNA, 32 nt, Human
gcuggggcagggaagggugggaggggccccau

SEQ ID NO: 447578 - RNA, 32 nt, Human
gcuggggcagggccccggccugggacucagca

SEQ ID NO: 447579 - RNA, 32 nt, Human
gcuggggccagccuggucucccaggccugagg

SEQ ID NO: 447580 - RNA, 32 nt, Human
gcuggggccagccugucuucaccggcacccuc

SEQ ID NO: 447581 - RNA, 32 nt, Human
gcuggggccaggcuucucuccccaccaccugc

SEQ ID NO: 447582 - RNA, 32 nt, Human
gcuggggcccacaaagucaaggcugcagugag

SEQ ID NO: 447583 - RNA, 32 nt, Human
gcuggggccccagcuguacggagucuucccag

SEQ ID NO: 447584 - RNA, 32 nt, Human
gcuggggcccucaggaucaucauuaaccccau

SEQ ID NO: 447585 - RNA, 32 nt, Human
gcuggggcccugcuuguuggccugaccccucc

SEQ ID NO: 447586 - RNA, 32 nt, Human
gcuggggcccuggagcccccuuuggggcggag

SEQ ID NO: 447587 - RNA, 32 nt, Human
gcuggggccgaggcagcuggagauguggucaa

SEQ ID NO: 447588 - RNA, 18 nt, Human
gcuggggccgccuugggg

SEQ ID NO: 447589 - RNA, 32 nt, Human
gcuggggccugaugccuggucaucauuugagu

SEQ ID NO: 447590 - RNA, 32 nt, Human
gcuggggccuggccucgcccacgguggauccg

SEQ ID NO: 447591 - RNA, 32 nt, Human
gcuggggccuuuuucugucucauaaagacagg

SEQ ID NO: 447592 - RNA, 21 nt, Human
gcuggggcgaaggucgcugag

SEQ ID NO: 447593 - RNA, 24 nt, Human
gcuggggcgagaggauugcuugag

SEQ ID NO: 447594 - RNA, 24 nt, Human
gcuggggcgaggugugaaggccac

SEQ ID NO: 447595 - RNA, 18 nt, Human
gcuggggcgcagagggag

SEQ ID NO: 447596 - RNA, 32 nt, Human
gcuggggcggcugaaguaggagggucacuuag

SEQ ID NO: 447597 - RNA, 24 nt, Human
gcuggggcgggcgaaucgccugag

SEQ ID NO: 447598 - RNA, 32 nt, Human
gcuggggcggggcuuggccagugccuucaggg

SEQ ID NO: 447599 - RNA, 32 nt, Human
gcuggggcggugagggcauggggugaggcaug

SEQ ID NO: 447600 - RNA, 32 nt, Human
gcuggggcuagugccagagaaucccuucucag

SEQ ID NO: 447601 - RNA, 32 nt, Human
gcuggggcucaucgagggucucaggccgaggc

SEQ ID NO: 447602 - RNA, 32 nt, Human
gcuggggcucugcugguuaaggaacaggaagc

SEQ ID NO: 447603 - RNA, 22 nt, Human
gcuggggcugacuccugccuca

SEQ ID NO: 447604 - RNA, 32 nt, Human
gcuggggcugcagcgcugccuccgagaccgag

SEQ ID NO: 447605 - RNA, 32 nt, Human
gcuggggcugcagcuggugguguuuccaacaa

SEQ ID NO: 447606 - RNA, 32 nt, Human
gcuggggcuggaaccaggucuccugcccuugu

SEQ ID NO: 447607 - RNA, 32 nt, Human
gcuggggcugggccaucaccauuccagagaca

SEQ ID NO: 447608 - RNA, 32 nt, Human
gcuggggcugggggugggaugggcuggugaga

SEQ ID NO: 447609 - RNA, 32 nt, Human
gcugggggagaaaggaccuccuggaacugacu

SEQ ID NO: 447610 - RNA, 32 nt, Human
gcugggggagccaccggccuuggccagcccag

SEQ ID NO: 447611 - RNA, 17 nt, Human
gcugggggagccagggc

SEQ ID NO: 447612 - RNA, 32 nt, Human
gcugggggagcuauggaagugcccaaggcugc

SEQ ID NO: 447613 - RNA, 32 nt, Human
gcugggggaggcaccccacagacucagcgccg

SEQ ID NO: 447614 - RNA, 32 nt, Human
gcugggggaggcaggaggaugccugccuggac

SEQ ID NO: 447615 - RNA, 32 nt, Human
gcugggggaggcaguggcggcuggaguaggua

SEQ ID NO: 447616 - RNA, 32 nt, Human
gcugggggaggcggcacauuggcaguguguca

SEQ ID NO: 447617 - RNA, 32 nt, Human
gcugggggaggggcucaagggagcccagcugg

SEQ ID NO: 447618 - RNA, 21 nt, Human
gcugggggaggguucagggca

SEQ ID NO: 447619 - RNA, 32 nt, Human
gcugggggaggugggagggaucacgccuauag

SEQ ID NO: 447620 - RNA, 32 nt, Human
gcugggggaugggagagccacaguguguuucu

SEQ ID NO: 447621 - RNA, 23 nt, Human
gcugggggcacagccccucccca

SEQ ID NO: 447622 - RNA, 32 nt, Human
gcugggggcaggaggagguggggaggggcacu

SEQ ID NO: 447623 - RNA, 32 nt, Human
gcugggggcaguggacagggaauugggauacc

SEQ ID NO: 447624 - RNA, 23 nt, Human
gcugggggccauccuccuuccca

SEQ ID NO: 447625 - RNA, 31 nt, Human
gcugggggccucucuccugggucagggaugu

SEQ ID NO: 447626 - RNA, 32 nt, Human
gcugggggccugagagacagacaggaacccac

SEQ ID NO: 447627 - RNA, 32 nt, Human
gcugggggcucagaccagggaucgcucaggcc

SEQ ID NO: 447628 - RNA, 32 nt, Human
gcugggggcugcagggcugggucagggguaca

SEQ ID NO: 447629 - RNA, 32 nt, Human
gcugggggcuggcaauggcgguguggugucca

SEQ ID NO: 447630 - RNA, 22 nt, Human
gcuggggggaggcccggccccg

SEQ ID NO: 447631 - RNA, 32 nt, Human
gcuggggguagaaaugucaugggugacuucug

SEQ ID NO: 447632 - RNA, 32 nt, Human
gcuggggguggaggguggaggagggagcagga

SEQ ID NO: 447633 - RNA, 32 nt, Human
gcuggggguggcugggaggggaagggaaggga

SEQ ID NO: 447634 - RNA, 22 nt, Human
gcuggggguuggaacagggggu

SEQ ID NO: 447635 - RNA, 19 nt, Human
gcugggguagagcggagga

SEQ ID NO: 447636 - RNA, 17 nt, Human
gcugggguaggaggaag

SEQ ID NO: 447637 - RNA, 22 nt, Human
gcugggguagggagacaggaag

SEQ ID NO: 447638 - RNA, 32 nt, Human
gcugggguccccucagugugaauggcccauua

SEQ ID NO: 447639 - RNA, 32 nt, Human
gcugggguccugacacaacaggaguacaucug

SEQ ID NO: 447640 - RNA, 32 nt, Human
gcugggguccugaugccucuguuuccaaacaa

SEQ ID NO: 447641 - RNA, 32 nt, Human
gcuggggucucaaggcuggagucaaggugaug

SEQ ID NO: 447642 - RNA, 23 nt, Human
gcuggggucuggcacagaggagg

SEQ ID NO: 447643 - RNA, 32 nt, Human
gcuggggucugucuugucuggagcaguggggc

SEQ ID NO: 447644 - RNA, 19 nt, Human
gcuggggucuuggaggaag

SEQ ID NO: 447645 - RNA, 32 nt, Human
gcuggggugagaccccucccuuccagaaucca

SEQ ID NO: 447646 - RNA, 32 nt, Human
gcuggggugagcucagggaggggaagaggaga

SEQ ID NO: 447647 - RNA, 18 nt, Human
gcuggggugcagaggagg

SEQ ID NO: 447648 - RNA, 32 nt, Human
gcugggguggagaagggcuagcccaccgcagc

SEQ ID NO: 447649 - RNA, 32 nt, Human
gcugggguggaggaucagucacacugcugagu

SEQ ID NO: 447650 - RNA, 19 nt, Human
gcugggguggcagagggag

SEQ ID NO: 447651 - RNA, 32 nt, Human
gcuggggugggaacaggauggcgggcaauaga

SEQ ID NO: 447652 - RNA, 32 nt, Human
gcuggggugggacugucugugugcccuguggg

SEQ ID NO: 447653 - RNA, 24 nt, Human
gcuggggugggaggacugcuugag

SEQ ID NO: 447654 - RNA, 32 nt, Human
gcuggggugggcggaggucgcugccuggggau

SEQ ID NO: 447655 - RNA, 32 nt, Human
gcugggguggggaaagguggcccaguggagcc

SEQ ID NO: 447656 - RNA, 32 nt, Human
gcugggguggggauggggguaucaggagucua

SEQ ID NO: 447657 - RNA, 32 nt, Human
gcugggguggguggaaggggcaggaggguggc

SEQ ID NO: 447658 - RNA, 32 nt, Human
gcuggggugucaauaaagcugugcuugggguc

SEQ ID NO: 447659 - RNA, 22 nt, Human
gcugggguguuccuggaagagg

SEQ ID NO: 447660 - RNA, 32 nt, Human
gcugggguuggggguggguggggagcuuuugg

SEQ ID NO: 447661 - RNA, 32 nt, Human
gcugggguuggugagagugggacucgggggaa

SEQ ID NO: 447662 - RNA, 32 nt, Human
gcuggguagagcaaucugggcacuuuggccaa

SEQ ID NO: 447663 - RNA, 32 nt, Human
gcuggguaguguucucauuugggggcugaagu

SEQ ID NO: 447664 - RNA, 32 nt, Human
gcugggucaauacaaacaaaaagguacuguca

SEQ ID NO: 447665 - RNA, 20 nt, Human
gcugggucaccagcugccca

SEQ ID NO: 447666 - RNA, 32 nt, Human
gcugggucagggguacacagagcuaaggccaa

SEQ ID NO: 447667 - RNA, 32 nt, Human
gcugggucauaugacaagcauuagccaaugag

SEQ ID NO: 447668 - RNA, 32 nt, Human
gcugggucaugauuuccacaucaugagcgaag

SEQ ID NO: 447669 - RNA, 32 nt, Human
gcugggucccacccuccgagccauggugcccc

SEQ ID NO: 447670 - RNA, 32 nt, Human
gcugggucccagggaugcagaagggucaaaac

SEQ ID NO: 447671 - RNA, 23 nt, Human
gcuggguccccccaaccuucccc

SEQ ID NO: 447672 - RNA, 32 nt, Human
gcuggguccuaaguccucucagcaguggguga

SEQ ID NO: 447673 - RNA, 32 nt, Human
gcugggucgcguagcccaggguggaggcagaa

SEQ ID NO: 447674 - RNA, 32 nt, Human
gcugggucgggaagaaaaauaauucugcaagg

SEQ ID NO: 447675 - RNA, 32 nt, Human
gcugggucgggccgacgugccacccacccgga

SEQ ID NO: 447676 - RNA, 32 nt, Human
gcugggucuagggugcgaagaacugcaauggc

SEQ ID NO: 447677 - RNA, 32 nt, Human
gcugggucuaugccagccuggcccugcagggu

SEQ ID NO: 447678 - RNA, 32 nt, Human
gcugggucucagaagcucagauguuccucaga

SEQ ID NO: 447679 - RNA, 32 nt, Human
gcugggucucaggcugggcucagcaaaggacu

SEQ ID NO: 447680 - RNA, 19 nt, Human
gcugggucuccagcugguu

SEQ ID NO: 447681 - RNA, 32 nt, Human
gcugggucucgaacuccugaccucaggugauc

SEQ ID NO: 447682 - RNA, 23 nt, Human
gcugggucugcccucuucccccu

SEQ ID NO: 447683 - RNA, 20 nt, Human
gcugggucugcguccuuucc

SEQ ID NO: 447684 - RNA, 32 nt, Human
gcugggucuggagggccccugcugggugggcc

SEQ ID NO: 447685 - RNA, 32 nt, Human
gcugggucugggaggagggaggcugggaggcc

SEQ ID NO: 447686 - RNA, 32 nt, Human
gcugggucuuuguaacccagcacuuccucuug

SEQ ID NO: 447687 - RNA, 32 nt, Human
gcugggugaagccccugcauccuaauuccccc

SEQ ID NO: 447688 - RNA, 32 nt, Human
gcugggugacgaggccacccagagccaggcgg

SEQ ID NO: 447689 - RNA, 31 nt, Human
gcugggugacuucccccaaccgcagagacag

SEQ ID NO: 447690 - RNA, 32 nt, Human
gcugggugagccaaggacagggcuggcuccuc

SEQ ID NO: 447691 - RNA, 32 nt, Human
gcugggugcagggcgcgccaggagucccagcc

SEQ ID NO: 447692 - RNA, 32 nt, Human
gcugggugccccggaagaagggcaggcaggaa

SEQ ID NO: 447693 - RNA, 32 nt, Human
gcugggugccccguugcccucccaggccacua

SEQ ID NO: 447694 - RNA, 32 nt, Human
gcugggugcccugugcacgccaccccacuucc

SEQ ID NO: 447695 - RNA, 32 nt, Human
gcugggugcgguggcuguuggcauuuugggag

SEQ ID NO: 447696 - RNA, 32 nt, Human
gcugggugcucacuggugaugaggcagaugaa

SEQ ID NO: 447697 - RNA, 32 nt, Human
gcugggugcuuugcgcaaaaccaggcagcgag

SEQ ID NO: 447698 - RNA, 18 nt, Human
gcuggguggaugcagugg

SEQ ID NO: 447699 - RNA, 19 nt, Human
gcuggguggccuggcccug

SEQ ID NO: 447700 - RNA, 32 nt, Human
gcuggguggcugcuccgggcgcauccaccagc

SEQ ID NO: 447701 - RNA, 32 nt, Human
gcugggugggaagcaucaucugcacagucccu

SEQ ID NO: 447702 - RNA, 32 nt, Human
gcugggugggcaaaucacuugaggucaagagu

SEQ ID NO: 447703 - RNA, 31 nt, Human
gcuggguggguggguggggaagaaaugggcc

SEQ ID NO: 447704 - RNA, 32 nt, Human
gcuggguggguguguccaggaggagagcaggg

SEQ ID NO: 447705 - RNA, 32 nt, Human
gcuggguggguuuggaguucuuggcuuuaauc

SEQ ID NO: 447706 - RNA, 31 nt, Human
gcugggugguucucugggccucaguuucccu

SEQ ID NO: 447707 - RNA, 19 nt, Human
gcuggguguaagagugcca

SEQ ID NO: 447708 - RNA, 32 nt, Human
gcuggguguacagguggguuugggagagagga

SEQ ID NO: 447709 - RNA, 32 nt, Human
gcuggguguauggcgcccaccuguaauccuag

SEQ ID NO: 447710 - RNA, 32 nt, Human
gcugggugucagaccuggaggagaagcuccca

SEQ ID NO: 447711 - RNA, 32 nt, Human
gcugggugugagccaccaccagucaacaaaau

SEQ ID NO: 447712 - RNA, 32 nt, Human
gcugggugugcgguguucugucuccgcucccg

SEQ ID NO: 447713 - RNA, 24 nt, Human
gcugggugugcugucuccuuccca

SEQ ID NO: 447714 - RNA, 32 nt, Human
gcugggugugggccccgaguacacgggagauc

SEQ ID NO: 447715 - RNA, 21 nt, Human
gcugggugugggcggggccac

SEQ ID NO: 447716 - RNA, 32 nt, Human
gcuggguuaggggagcaccuguuucagacugg

SEQ ID NO: 447717 - RNA, 32 nt, Human
gcuggguucauacacgugcacacacacgcaua

SEQ ID NO: 447718 - RNA, 32 nt, Human
gcuggguucccacucccggccuaggcaccucc

SEQ ID NO: 447719 - RNA, 32 nt, Human
gcuggguugaaguucgagugaagauuaaacug

SEQ ID NO: 447720 - RNA, 32 nt, Human
gcuggguugccagaaaagaugguggccuaguc

SEQ ID NO: 447721 - RNA, 32 nt, Human
gcuggguuggggacccagggaacaucggucua

SEQ ID NO: 447722 - RNA, 32 nt, Human
gcuggguuguccaggguguccucagucucuau

SEQ ID NO: 447723 - RNA, 32 nt, Human
gcuggguuugcucucccgcuguugccaggggc

SEQ ID NO: 447724 - RNA, 32 nt, Human
gcugguaaccccacucccucugcugcagcacc

SEQ ID NO: 447725 - RNA, 32 nt, Human
gcugguaaccuuucugcuauuuccuugaccuc

SEQ ID NO: 447726 - RNA, 32 nt, Human
gcugguaagcaugugcaugcucugccuuucuu

SEQ ID NO: 447727 - RNA, 32 nt, Human
gcugguaaugauguauaccuggcagcugaccg

SEQ ID NO: 447728 - RNA, 32 nt, Human
gcugguaccauccugguagaagagcccucuga

SEQ ID NO: 447729 - RNA, 32 nt, Human
gcugguacggguggaaugggggugagacacca

SEQ ID NO: 447730 - RNA, 32 nt, Human
gcugguacugggugggcaccugggagccacag

SEQ ID NO: 447731 - RNA, 32 nt, Human
gcugguagcugaggggacgggcaagugagagg

SEQ ID NO: 447732 - RNA, 32 nt, Human
gcugguaguaaggaggccaguuuggaggcagg

SEQ ID NO: 447733 - RNA, 32 nt, Human
gcugguaugagacucccugggaccuagaggcu

SEQ ID NO: 447734 - RNA, 32 nt, Human
gcugguauuauuauguucuuagcaauaaaugc

SEQ ID NO: 447735 - RNA, 32 nt, Human
gcuggucaacacagagagaugagcuucagggg

SEQ ID NO: 447736 - RNA, 32 nt, Human
gcuggucacagagucuccugggcacagguuau

SEQ ID NO: 447737 - RNA, 32 nt, Human
gcuggucaccccaagaucuacuuauacaugaa

SEQ ID NO: 447738 - RNA, 24 nt, Human
gcuggucacgaacuccugggcuca

SEQ ID NO: 447739 - RNA, 32 nt, Human
gcuggucagacccagagguugucaggagguca

SEQ ID NO: 447740 - RNA, 32 nt, Human
gcugguccagcaccugcucucaccaugaccuc

SEQ ID NO: 447741 - RNA, 32 nt, Human
gcugguccagugaugggcaagugacagaccuu

SEQ ID NO: 447742 - RNA, 32 nt, Human
gcugguccauccuccccacuccuggucagccu

SEQ ID NO: 447743 - RNA, 32 nt, Human
gcugguccaucuuuacccuucucugagcuaug

SEQ ID NO: 447744 - RNA, 32 nt, Human
gcugguccauuccccauucauggcacagagca

SEQ ID NO: 447745 - RNA, 32 nt, Human
gcuggucccaggcuggauugccguggcacaau

SEQ ID NO: 447746 - RNA, 32 nt, Human
gcugguccccagaaagcaggacagaaagaagg

SEQ ID NO: 447747 - RNA, 32 nt, Human
gcugguccccuccucugcuuuagccccggcaa

SEQ ID NO: 447748 - RNA, 24 nt, Human
gcuggucccugccucuggggcuuu

SEQ ID NO: 447749 - RNA, 32 nt, Human
gcugguccuccuggcccaggcugcaggagcca

SEQ ID NO: 447750 - RNA, 32 nt, Human
gcugguccugaacccagaucucuggcugagag

SEQ ID NO: 447751 - RNA, 24 nt, Human
gcugguccugaacuccugggcuca

SEQ ID NO: 447752 - RNA, 32 nt, Human
gcugguccugcaggaucccuggaguugcagcu

SEQ ID NO: 447753 - RNA, 24 nt, Human
gcuggucgcgaacuccugagcuca

SEQ ID NO: 447754 - RNA, 24 nt, Human
gcuggucgugaacuccugagcuca

SEQ ID NO: 447755 - RNA, 24 nt, Human
gcuggucgugaacuccugggcuca

SEQ ID NO: 447756 - RNA, 24 nt, Human
gcuggucuaaaacuccugaccuca

SEQ ID NO: 447757 - RNA, 22 nt, Human
gcuggucuagaacucaaccuca

SEQ ID NO: 447758 - RNA, 32 nt, Human
gcuggucuagaacuucuggucucaagcaaucu

SEQ ID NO: 447759 - RNA, 32 nt, Human
gcuggucuauuuuacccugugacauuuaaaua

SEQ ID NO: 447760 - RNA, 32 nt, Human
gcuggucucaaaacuccugaccucaggugaug

SEQ ID NO: 447761 - RNA, 32 nt, Human
gcuggucucaaaacuccugagcucaagugauc

SEQ ID NO: 447762 - RNA, 24 nt, Human
gcuggucucaaaccccugggcuca

SEQ ID NO: 447763 - RNA, 24 nt, Human
gcuggucucaaacuccuaggcuca

SEQ ID NO: 447764 - RNA, 24 nt, Human
gcuggucucaaacuccuccacuca

SEQ ID NO: 447765 - RNA, 24 nt, Human
gcuggucucaaacuccugaacuca

SEQ ID NO: 447766 - RNA, 21 nt, Human
gcuggucucaaacuccugacc

SEQ ID NO: 447767 - RNA, 24 nt, Human
gcuggucucaaacuccugagcuca

SEQ ID NO: 447768 - RNA, 24 nt, Human
gcuggucucaaacuccugcucuca

SEQ ID NO: 447769 - RNA, 24 nt, Human
gcuggucucaaacuccuggacuca

SEQ ID NO: 447770 - RNA, 24 nt, Human
gcuggucucaaacuccugggcuca

SEQ ID NO: 447771 - RNA, 24 nt, Human
gcuggucucaaacucgugugccca

SEQ ID NO: 447772 - RNA, 24 nt, Human
gcuggucucaaccuccugggcuca

SEQ ID NO: 447773 - RNA, 32 nt, Human
gcuggucucaacuccugaccucaggugaucca

SEQ ID NO: 447774 - RNA, 23 nt, Human
gcuggucucaacuccugggcuca

SEQ ID NO: 447775 - RNA, 24 nt, Human
gcuggucucaaucuccugggccca

SEQ ID NO: 447776 - RNA, 24 nt, Human
gcuggucucaggcuccugggcuca

SEQ ID NO: 447777 - RNA, 24 nt, Human
gcuggucuccaacuccugagcuca

SEQ ID NO: 447778 - RNA, 24 nt, Human
gcuggucuccaacuccugcccuca

SEQ ID NO: 447779 - RNA, 24 nt, Human
gcuggucuccaacuccuggacuca

SEQ ID NO: 447780 - RNA, 24 nt, Human
gcuggucuccaacuccugggcuca

SEQ ID NO: 447781 - RNA, 20 nt, Human
gcuggucuccagccagguga

SEQ ID NO: 447782 - RNA, 32 nt, Human
gcuggucuccgcaugagagaaaagccaccucc

SEQ ID NO: 447783 - RNA, 24 nt, Human
gcuggucucgaaccccugagcuca

SEQ ID NO: 447784 - RNA, 23 nt, Human
gcuggucucgaacucccaccuca

SEQ ID NO: 447785 - RNA, 24 nt, Human
gcuggucucgaacuccugaacuca

SEQ ID NO: 447786 - RNA, 24 nt, Human
gcuggucucgaacuccugagcuca

SEQ ID NO: 447787 - RNA, 24 nt, Human
gcuggucucgaacuccugcccuca

SEQ ID NO: 447788 - RNA, 24 nt, Human
gcuggucucgaacuccuggacuca

SEQ ID NO: 447789 - RNA, 24 nt, Human
gcuggucucgaacuccugggcuca

SEQ ID NO: 447790 - RNA, 24 nt, Human
gcuggucucgaacuccuguccuca

SEQ ID NO: 447791 - RNA, 32 nt, Human
gcuggucucgacuccugaccucaggugaucca

SEQ ID NO: 447792 - RNA, 32 nt, Human
gcuggucucggaacuccugacugcaggugauc

SEQ ID NO: 447793 - RNA, 24 nt, Human
gcuggucucggacuccugggcuca

SEQ ID NO: 447794 - RNA, 24 nt, Human
gcuggucucuaacuccugggcuca

SEQ ID NO: 447795 - RNA, 24 nt, Human
gcuggucugaaacucccaacuuca

SEQ ID NO: 447796 - RNA, 24 nt, Human
gcuggucugaagcugcugggcuca

SEQ ID NO: 447797 - RNA, 24 nt, Human
gcuggucugaaguucugggauguu

SEQ ID NO: 447798 - RNA, 24 nt, Human
gcuggucuggaacgccugaccuca

SEQ ID NO: 447799 - RNA, 24 nt, Human
gcuggucuggaacuccuaaccuca

SEQ ID NO: 447800 - RNA, 18 nt, Human
gcuggucuggaacuccug

SEQ ID NO: 447801 - RNA, 24 nt, Human
gcuggucuggaacuccugaccuca

SEQ ID NO: 447802 - RNA, 24 nt, Human
gcuggucuggaacuccugagcuca

SEQ ID NO: 447803 - RNA, 23 nt, Human
gcuggucuggaacuccuggccuc

SEQ ID NO: 447804 - RNA, 24 nt, Human
gcuggucuggccccuccugccuca

SEQ ID NO: 447805 - RNA, 32 nt, Human
gcuggucuggccuggccguguggugaugaggc

SEQ ID NO: 447806 - RNA, 21 nt, Human
gcuggucugggucucugccca

SEQ ID NO: 447807 - RNA, 24 nt, Human
gcuggucuuaaacuccugggcuca

SEQ ID NO: 447808 - RNA, 32 nt, Human
gcuggucuuccuagaaguaccugcuggguucu

SEQ ID NO: 447809 - RNA, 24 nt, Human
gcuggucuugaacucccgggcuca

SEQ ID NO: 447810 - RNA, 32 nt, Human
gcuggucuugaacuccuaaccucgggugaucc

SEQ ID NO: 447811 - RNA, 24 nt, Human
gcuggucuugaacuccuagacuca

SEQ ID NO: 447812 - RNA, 24 nt, Human
gcuggucuugaacuccuaggcuca

SEQ ID NO: 447813 - RNA, 24 nt, Human
gcuggucuugaacuccugaacuca

SEQ ID NO: 447814 - RNA, 24 nt, Human
gcuggucuugaacuccugagcuca

SEQ ID NO: 447815 - RNA, 24 nt, Human
gcuggucuugaacuccuggacuca

SEQ ID NO: 447816 - RNA, 32 nt, Human
gcuggucuugaacuccuggcuucgggugaucc

SEQ ID NO: 447817 - RNA, 24 nt, Human
gcuggucuugaacuccugggcuca

SEQ ID NO: 447818 - RNA, 24 nt, Human
gcuggucuugaacuccugugcuca

SEQ ID NO: 447819 - RNA, 26 nt, Human
gcuggucuugagaacuccugggcuca

SEQ ID NO: 447820 - RNA, 32 nt, Human
gcuggucuugagaacuccugggcucaaguggu

SEQ ID NO: 447821 - RNA, 24 nt, Human
gcuggucuugagcuccugagcuca

SEQ ID NO: 447822 - RNA, 32 nt, Human
gcuggucuugcacuccugaccucacgugaucu

SEQ ID NO: 447823 - RNA, 32 nt, Human
gcuggucuugugaacuccuggccucaggugau

SEQ ID NO: 447824 - RNA, 32 nt, Human
gcuggucuuuauuccucccucaugagcacagg

SEQ ID NO: 447825 - RNA, 23 nt, Human
gcuggucuuuggccuggugcuca

SEQ ID NO: 447826 - RNA, 32 nt, Human
gcuggugaaagcuuccuuugcuccaauaagcu

SEQ ID NO: 447827 - RNA, 32 nt, Human
gcuggugaacagcucagcagacaacaugcugg

SEQ ID NO: 447828 - RNA, 32 nt, Human
gcuggugaaggguuuccucuccuccaccaugg

SEQ ID NO: 447829 - RNA, 32 nt, Human
gcuggugaauggcaggugugugccucaguguc

SEQ ID NO: 447830 - RNA, 22 nt, Human
gcuggugaccgccacagccccg

SEQ ID NO: 447831 - RNA, 32 nt, Human
gcuggugacucugugugaacuggccuuuggga

SEQ ID NO: 447832 - RNA, 32 nt, Human
gcuggugagaggaggaguuagagcuggucguu

SEQ ID NO: 447833 - RNA, 23 nt, Human
gcuggugauugaggggcccgggc

SEQ ID NO: 447834 - RNA, 22 nt, Human
gcuggugcagagauggaggaag

SEQ ID NO: 447835 - RNA, 32 nt, Human
gcuggugcagccacccucgcucccucugcucu

SEQ ID NO: 447836 - RNA, 32 nt, Human
gcuggugccagaauaacacagacucagcugcc

SEQ ID NO: 447837 - RNA, 17 nt, Human
gcuggugccagcagggg

SEQ ID NO: 447838 - RNA, 32 nt, Human
gcuggugccagccuguuaccuguucucacuga

SEQ ID NO: 447839 - RNA, 20 nt, Human
gcuggugccagccuucuccc

SEQ ID NO: 447840 - RNA, 32 nt, Human
gcuggugcccuauuuccagccaccccagcagc

SEQ ID NO: 447841 - RNA, 21 nt, Human
gcuggugcccugagcgacaga

SEQ ID NO: 447842 - RNA, 18 nt, Human
gcuggugcccugcagcug

SEQ ID NO: 447843 - RNA, 32 nt, Human
gcuggugcccugcuuucagauacuggauugua

SEQ ID NO: 447844 - RNA, 32 nt, Human
gcuggugccgggaggguggagguagauguacc

SEQ ID NO: 447845 - RNA, 32 nt, Human
gcuggugccuccaguauuugguauacagaagg

SEQ ID NO: 447846 - RNA, 32 nt, Human
gcuggugccuggccuuccuggaauggugggug

SEQ ID NO: 447847 - RNA, 32 nt, Human
gcuggugcucaggccggccuguccugggccca

SEQ ID NO: 447848 - RNA, 32 nt, Human
gcuggugcuccaggcuggcggcgcucaccuuu

SEQ ID NO: 447849 - RNA, 24 nt, Human
gcuggugcucuccuccugugccca

SEQ ID NO: 447850 - RNA, 32 nt, Human
gcuggugcugcugcucgucauccuggccagga

SEQ ID NO: 447851 - RNA, 24 nt, Human
gcugguggacagaaggcacugcag

SEQ ID NO: 447852 - RNA, 32 nt, Human
gcugguggagccaagacaaggugcaggcagug

SEQ ID NO: 447853 - RNA, 32 nt, Human
gcugguggagccagacagagcaggugcgggga

SEQ ID NO: 447854 - RNA, 32 nt, Human
gcugguggagcuuuguaaggauucucugcagg

SEQ ID NO: 447855 - RNA, 32 nt, Human
gcugguggcccagguccugcugcucauuaguu

SEQ ID NO: 447856 - RNA, 20 nt, Human
gcugguggccuuggccggcu

SEQ ID NO: 447857 - RNA, 32 nt, Human
gcugguggcgaagcggcucaggagaaccgggg

SEQ ID NO: 447858 - RNA, 32 nt, Human
gcugguggcugcagcuggggugaggcgcgagg

SEQ ID NO: 447859 - RNA, 32 nt, Human
gcugguggcugccagcccuggggcccggcaca

SEQ ID NO: 447860 - RNA, 32 nt, Human
gcugguggcugggaggggagccuggcugcccu

SEQ ID NO: 447861 - RNA, 32 nt, Human
gcugguggcuucugaauuugguauuugaacua

SEQ ID NO: 447862 - RNA, 32 nt, Human
gcuggugggaaagaguuuguuuuuggggccua

SEQ ID NO: 447863 - RNA, 20 nt, Human
gcuggugggaacaggggcgu

SEQ ID NO: 447864 - RNA, 32 nt, Human
gcuggugggcacacagggagggggaggucagg

SEQ ID NO: 447865 - RNA, 32 nt, Human
gcuggugggcaggaagguaaaggggagaccau

SEQ ID NO: 447866 - RNA, 32 nt, Human
gcuggugggcaggccacugcugggacaggguc

SEQ ID NO: 447867 - RNA, 19 nt, Human
gcuggugggcagggggcug

SEQ ID NO: 447868 - RNA, 18 nt, Human
gcuggugggcaguggguu

SEQ ID NO: 447869 - RNA, 32 nt, Human
gcuggugggguggaggaugcugaguggugggu

SEQ ID NO: 447870 - RNA, 32 nt, Human
gcuggugggguuucaagacaugguucagcauc

SEQ ID NO: 447871 - RNA, 32 nt, Human
gcuggugguccaccacccucaggaugaggucc

SEQ ID NO: 447872 - RNA, 32 nt, Human
gcugguggucgggagagcggcggcagcgagag

SEQ ID NO: 447873 - RNA, 32 nt, Human
gcuggugguggagucauggcugcaggccaggg

SEQ ID NO: 447874 - RNA, 32 nt, Human
gcuggugguggcuucagcggaggcaggccggg

SEQ ID NO: 447875 - RNA, 32 nt, Human
gcuggugguggcuucgggcucaugcccagaca

SEQ ID NO: 447876 - RNA, 32 nt, Human
gcuggugguguggcuguaggggaggggagacc

SEQ ID NO: 447877 - RNA, 32 nt, Human
gcuggugguuuuucagcucccuucccuugaga

SEQ ID NO: 447878 - RNA, 32 nt, Human
gcugguguauagcacugcuacugauaugugua

SEQ ID NO: 447879 - RNA, 24 nt, Human
gcuggugucaaacuccugggcuca

SEQ ID NO: 447880 - RNA, 32 nt, Human
gcugguguccccgugugucuuucaugggacug

SEQ ID NO: 447881 - RNA, 29 nt, Human
gcugguguccguggcgugccuggguggaa

SEQ ID NO: 447882 - RNA, 24 nt, Human
gcuggugucgaacuccugggcuca

SEQ ID NO: 447883 - RNA, 32 nt, Human
gcuggugucuguaaucccagcugugggagguu

SEQ ID NO: 447884 - RNA, 32 nt, Human
gcuggugucuucauccagaagggacaguuugu

SEQ ID NO: 447885 - RNA, 32 nt, Human
gcuggugugcaggggugcggucaugggcucau

SEQ ID NO: 447886 - RNA, 32 nt, Human
gcuggugugcugcuuaguuugcuguggguuuu

SEQ ID NO: 447887 - RNA, 24 nt, Human
gcugguguggaacuccugaacuca

SEQ ID NO: 447888 - RNA, 32 nt, Human
gcuggugugguggcuuaugccuguaaucccac

SEQ ID NO: 447889 - RNA, 32 nt, Human
gcugguguuaaauaucagcuccuaauaagaug

SEQ ID NO: 447890 - RNA, 32 nt, Human
gcugguguugggcccggagcagcaucuuccgg

SEQ ID NO: 447891 - RNA, 32 nt, Human
gcugguguuuuuccugccuaggcggagacacc

SEQ ID NO: 447892 - RNA, 32 nt, Human
gcugguuaaagaaccauccggaucgcagcgcg

SEQ ID NO: 447893 - RNA, 32 nt, Human
gcugguuacacgugucucucacaccacauuuc

SEQ ID NO: 447894 - RNA, 32 nt, Human
gcugguuacuguacgcaaguugagugccagac

SEQ ID NO: 447895 - RNA, 32 nt, Human
gcugguucaggugcccuggagggaaggggaag

SEQ ID NO: 447896 - RNA, 32 nt, Human
gcugguucauuuucuuuucuucucuuuucuuu

SEQ ID NO: 447897 - RNA, 32 nt, Human
gcugguuccaacuguuuaaucccuucugucuu

SEQ ID NO: 447898 - RNA, 32 nt, Human
gcugguucccaagcucgcacagaaggugauaa

SEQ ID NO: 447899 - RNA, 32 nt, Human
gcugguucccagaggauugucuacccugaagu

SEQ ID NO: 447900 - RNA, 19 nt, Human
gcugguucccaggcugcug

SEQ ID NO: 447901 - RNA, 32 nt, Human
gcugguuccuucagaccccuaacccuacuaac

SEQ ID NO: 447902 - RNA, 32 nt, Human
gcugguucuccaggaagcagacaccucucacu

SEQ ID NO: 447903 - RNA, 32 nt, Human
gcugguucuccagggcugcagucucuccaggu

SEQ ID NO: 447904 - RNA, 24 nt, Human
gcugguucugaacuccugggcuca

SEQ ID NO: 447905 - RNA, 32 nt, Human
gcugguucugcuggugccucugccccuggcuu

SEQ ID NO: 447906 - RNA, 32 nt, Human
gcugguugaagugcuuucugucuagugagggg

SEQ ID NO: 447907 - RNA, 32 nt, Human
gcugguugccaacgugucaaccagccuguguu

SEQ ID NO: 447908 - RNA, 22 nt, Human
gcugguugccggcgcccgcccg

SEQ ID NO: 447909 - RNA, 21 nt, Human
gcugguugcuugaacugacag

SEQ ID NO: 447910 - RNA, 24 nt, Human
gcugguuggcgacuguucuuucca

SEQ ID NO: 447911 - RNA, 32 nt, Human
gcugguuggugcugcccugccucucgugccgg

SEQ ID NO: 447912 - RNA, 30 nt, Human
gcugguugguuuuuccugcuccugggguaa

SEQ ID NO: 447913 - RNA, 32 nt, Human
gcugguuguugcuaagguugcugccaugguaa

SEQ ID NO: 447914 - RNA, 24 nt, Human
gcugguuuaaaacuccugagcuca

SEQ ID NO: 447915 - RNA, 24 nt, Human
gcugguuugaacuccuacaacuca

SEQ ID NO: 447916 - RNA, 32 nt, Human
gcugguuuggaguaaaauauaaaagagcuugu

SEQ ID NO: 447917 - RNA, 32 nt, Human
gcugguuuggggaguggugagguagggguggg

SEQ ID NO: 447918 - RNA, 32 nt, Human
gcugguuuggugcggugaguccugccccggcu

SEQ ID NO: 447919 - RNA, 24 nt, Human
gcugguuuuucccacaugggcuuu

SEQ ID NO: 447920 - RNA, 32 nt, Human
gcuguaaaaccaaagaccagaagucagauaua

SEQ ID NO: 447921 - RNA, 32 nt, Human
gcuguaaacuacugcaacccucacauccucaa

SEQ ID NO: 447922 - RNA, 32 nt, Human
gcuguaacacaaacagggcugcaacaugcccc

SEQ ID NO: 447923 - RNA, 32 nt, Human
gcuguaaccaugguacucaguccuuccaaagu

SEQ ID NO: 447924 - RNA, 32 nt, Human
gcuguaacuacuguuucagaauguugcugcug

SEQ ID NO: 447925 - RNA, 32 nt, Human
gcuguaacuggaagcaacacuccuggguaaaa

SEQ ID NO: 447926 - RNA, 32 nt, Human
gcuguaagaaaaggucuagaaauaggugaaag

SEQ ID NO: 447927 - RNA, 32 nt, Human
gcuguaagaagagacugggaagauaggcucug

SEQ ID NO: 447928 - RNA, 32 nt, Human
gcuguaagacuuggugggcggggugggguggg

SEQ ID NO: 447929 - RNA, 32 nt, Human
gcuguaagagcaucagauuugaaacauaucug

SEQ ID NO: 447930 - RNA, 32 nt, Human
gcuguaagagcucauuuuggaggaauaaugga

SEQ ID NO: 447931 - RNA, 32 nt, Human
gcuguaagauagucaaccacaguagucaccua

SEQ ID NO: 447932 - RNA, 32 nt, Human
gcuguaagcauucugagcugggcuuguuguuu

SEQ ID NO: 447933 - RNA, 22 nt, Human
gcuguaagcugccugccgggcc

SEQ ID NO: 447934 - RNA, 32 nt, Human
gcuguaaggagagguuggaagugaagaugaug

SEQ ID NO: 447935 - RNA, 32 nt, Human
gcuguaaucccagcuacuugggaggcugaggc

SEQ ID NO: 447936 - RNA, 32 nt, Human
gcuguaauccuagcuacucgggaggcugaggc

SEQ ID NO: 447937 - RNA, 32 nt, Human
gcuguaauccuggcuacucaggaggccgaggc

SEQ ID NO: 447938 - RNA, 32 nt, Human
gcuguaaucgagcucccgccaucccaggugcu

SEQ ID NO: 447939 - RNA, 32 nt, Human
gcuguaaucugcaaacucugggaggcugaggu

SEQ ID NO: 447940 - RNA, 32 nt, Human
gcuguaauggaugaacaugccacccagcuccc

SEQ ID NO: 447941 - RNA, 32 nt, Human
gcuguaauggcauuuaaagcaaacaaacaaac

SEQ ID NO: 447942 - RNA, 32 nt, Human
gcuguaauuuaacccagagcagcuccacguga

SEQ ID NO: 447943 - RNA, 32 nt, Human
gcuguacaacgucaggauucagagguaggcuc

SEQ ID NO: 447944 - RNA, 32 nt, Human
gcuguacacagaugcuacagacuuguacuaac

SEQ ID NO: 447945 - RNA, 32 nt, Human
gcuguacacagcagaucaguacuguucaacag

SEQ ID NO: 447946 - RNA, 32 nt, Human
gcuguacacccaaggauucuguucugcaacuc

SEQ ID NO: 447947 - RNA, 32 nt, Human
gcuguacagaagcacuuuucauggacagaaau

SEQ ID NO: 447948 - RNA, 32 nt, Human
gcuguacaggcagagacccaggggagggagcu

SEQ ID NO: 447949 - RNA, 31 nt, Human
gcuguacauacuuuuuggguuuauuuggaaa

SEQ ID NO: 447950 - RNA, 32 nt, Human
gcuguacaucuagccaccccagccuggccacg

SEQ ID NO: 447951 - RNA, 32 nt, Human
gcuguacccacugucuaaccaaucccaaugag

SEQ ID NO: 447952 - RNA, 32 nt, Human
gcuguacccaggaauggagccugcacggugaa

SEQ ID NO: 447953 - RNA, 17 nt, Human
gcuguacccccaggguc

SEQ ID NO: 447954 - RNA, 32 nt, Human
gcuguaccccuaccccugccuccccgaagccu

SEQ ID NO: 447955 - RNA, 20 nt, Human
gcuguaccugagauuaggag

SEQ ID NO: 447956 - RNA, 32 nt, Human
gcuguaccuggauccugcuccucuggguugaa

SEQ ID NO: 447957 - RNA, 32 nt, Human
gcuguacgcaggccggccuccaccuccagagg

SEQ ID NO: 447958 - RNA, 32 nt, Human
gcuguacugccaggcugcgaugcgugcuggcc

SEQ ID NO: 447959 - RNA, 16 nt, Human
gcuguacuggguccag

SEQ ID NO: 447960 - RNA, 32 nt, Human
gcuguacuuuccagaucuucuaugugacacaa

SEQ ID NO: 447961 - RNA, 32 nt, Human
gcuguagacaucuguccuacacuugagaugau

SEQ ID NO: 447962 - RNA, 21 nt, Human
gcuguagacuugcugcugcug

SEQ ID NO: 447963 - RNA, 32 nt, Human
gcuguagagagggacagaaggggcgguucagc

SEQ ID NO: 447964 - RNA, 32 nt, Human
gcuguagagcaucugaccccuuauuaccaccu

SEQ ID NO: 447965 - RNA, 32 nt, Human
gcuguagaggggcagaugugguuugaacccag

SEQ ID NO: 447966 - RNA, 32 nt, Human
gcuguagaguuggcgggccaggagggcaguug

SEQ ID NO: 447967 - RNA, 32 nt, Human
gcuguagauaaacugguuauccuaaaaucaug

SEQ ID NO: 447968 - RNA, 32 nt, Human
gcuguagauggacaagcuugauuguuggaacc

SEQ ID NO: 447969 - RNA, 32 nt, Human
gcuguagcaaacaauuucuagauacuagaagc

SEQ ID NO: 447970 - RNA, 29 nt, Human
gcuguagcaaaucucagguaagaagagaa

SEQ ID NO: 447971 - RNA, 32 nt, Human
gcuguagcaccuggguacgcucagggagcaaa

SEQ ID NO: 447972 - RNA, 32 nt, Human
gcuguagccaauagccaugcaggacugguuca

SEQ ID NO: 447973 - RNA, 22 nt, Human
gcuguagccagccggagccaga

SEQ ID NO: 447974 - RNA, 20 nt, Human
gcuguagccauauggaacuc

SEQ ID NO: 447975 - RNA, 32 nt, Human
gcuguagcccaagaggaagaggucacuggggc

SEQ ID NO: 447976 - RNA, 25 nt, Human
gcuguagccccagggacccagggca

SEQ ID NO: 447977 - RNA, 32 nt, Human
gcuguagccuggugaagaccaccugggccgga

SEQ ID NO: 447978 - RNA, 22 nt, Human
gcuguagcucccgagcuacucu

SEQ ID NO: 447979 - RNA, 23 nt, Human
gcuguagcucugggccuggaacu

SEQ ID NO: 447980 - RNA, 19 nt, Human
gcuguagcugugcuggugg

SEQ ID NO: 447981 - RNA, 32 nt, Human
gcuguagcuuaagacaaggcaauaccugagau

SEQ ID NO: 447982 - RNA, 23 nt, Human
gcuguagcuuccaggcuggccuc

SEQ ID NO: 447983 - RNA, 32 nt, Human
gcuguaggaggaggcagggauuccaggguguc

SEQ ID NO: 447984 - RNA, 32 nt, Human
gcuguaggauauuuuugggaaauaaauccaaa

SEQ ID NO: 447985 - RNA, 32 nt, Human
gcuguaggcacuugggcugacugccugcagaa

SEQ ID NO: 447986 - RNA, 32 nt, Human
gcuguagggggcaccugucuggcuccgggccc

SEQ ID NO: 447987 - RNA, 32 nt, Human
gcuguagguaucugugugugcaccuugaagaa

SEQ ID NO: 447988 - RNA, 32 nt, Human
gcuguagguccugaggccagggauuuuuaauu

SEQ ID NO: 447989 - RNA, 32 nt, Human
gcuguagguggcucccucccaccccaacgauu

SEQ ID NO: 447990 - RNA, 32 nt, Human
gcuguagucagcguuauguaugccauugacuc

SEQ ID NO: 447991 - RNA, 32 nt, Human
gcuguagucccagcuacucgggaggcugaggc

SEQ ID NO: 447992 - RNA, 32 nt, Human
gcuguagucccagcuacuuuggaggcugaggc

SEQ ID NO: 447993 - RNA, 32 nt, Human
gcuguagucgcagcuacucaggaggcugaggc

SEQ ID NO: 447994 - RNA, 32 nt, Human
gcuguagucuuagcuacucaggaggcugaagc

SEQ ID NO: 447995 - RNA, 32 nt, Human
gcuguagugagcugucauugugccacuauccu

SEQ ID NO: 447996 - RNA, 32 nt, Human
gcuguaguuagcaaaauuggcauccucuuuag

SEQ ID NO: 447997 - RNA, 31 nt, Human
gcuguauauuuuuuguagaugcucuuuauua

SEQ ID NO: 447998 - RNA, 32 nt, Human
gcuguaucccacacaaaacacgcacacagagc

SEQ ID NO: 447999 - RNA, 32 nt, Human
gcuguaucuucccagggcuccgccaagcaccg

SEQ ID NO: 448000 - RNA, 32 nt, Human
gcuguaugauacaaagugauuuauucacaacc

SEQ ID NO: 448001 - RNA, 32 nt, Human
gcuguauggcccagagaggagcucaugugucu

SEQ ID NO: 448002 - RNA, 32 nt, Human
gcuguaugggcucucuuccuccuuccaccgug

SEQ ID NO: 448003 - RNA, 29 nt, Human
gcuguaugucugugugagacuggauuuuc

SEQ ID NO: 448004 - RNA, 31 nt, Human
gcuguauucaauaaaucuguuuggaggaaaa

SEQ ID NO: 448005 - RNA, 32 nt, Human
gcuguauucauggauucagccaaccauggcug

SEQ ID NO: 448006 - RNA, 32 nt, Human
gcuguauucucuucucuucggggaagcacaag

SEQ ID NO: 448007 - RNA, 32 nt, Human
gcuguauucugacuuugaagccuguuaagagg

SEQ ID NO: 448008 - RNA, 32 nt, Human
gcuguauucuucacagcaacagagcucaguua

SEQ ID NO: 448009 - RNA, 32 nt, Human
gcuguauugccagacuggagugcaguggcgug

SEQ ID NO: 448010 - RNA, 32 nt, Human
gcuguauugcccaggcuggagugcaguggcgc

SEQ ID NO: 448011 - RNA, 32 nt, Human
gcuguauugcccaggcuggagugugguggcac

SEQ ID NO: 448012 - RNA, 32 nt, Human
gcuguauuggcuacuccagaaaguaggaguaa

SEQ ID NO: 448013 - RNA, 32 nt, Human
gcuguauuguuuauugcugguuuaugaccuua

SEQ ID NO: 448014 - RNA, 21 nt, Human
gcuguauuuaucucugaggca

SEQ ID NO: 448015 - RNA, 32 nt, Human
gcuguauuucccaggcuggagugcagaggcac

SEQ ID NO: 448016 - RNA, 32 nt, Human
gcuguauuugugaauugugcugguuuccuggg

SEQ ID NO: 448017 - RNA, 32 nt, Human
gcugucaaauccuuuagaugcuucuggguucc

SEQ ID NO: 448018 - RNA, 32 nt, Human
gcugucaacagaguggaggucucaguggggaa

SEQ ID NO: 448019 - RNA, 32 nt, Human
gcugucaaccauuggucauccuuugucagacu

SEQ ID NO: 448020 - RNA, 32 nt, Human
gcugucaacuccugccuccaccuggggucacc

SEQ ID NO: 448021 - RNA, 17 nt, Human
gcugucaagagggugua

SEQ ID NO: 448022 - RNA, 27 nt, Human
gcugucaagcaauggauaaacagcucu

SEQ ID NO: 448023 - RNA, 32 nt, Human
gcugucaagucgcugagaagcugcugugacuc

SEQ ID NO: 448024 - RNA, 32 nt, Human
gcugucaaugcuguguugucaugugccacuuc

SEQ ID NO: 448025 - RNA, 21 nt, Human
gcugucacaauuauuaccauc

SEQ ID NO: 448026 - RNA, 15 nt, Human
gcugucacagaugac

SEQ ID NO: 448027 - RNA, 15 nt, Human
gcugucacagauggc

SEQ ID NO: 448028 - RNA, 32 nt, Human
gcugucacagcccugagagucaggguggagau

SEQ ID NO: 448029 - RNA, 19 nt, Human
gcugucaccacccugguag

SEQ ID NO: 448030 - RNA, 32 nt, Human
gcugucaccaggcuggagugcaguggcgcgau

SEQ ID NO: 448031 - RNA, 25 nt, Human
gcugucacccaggcuggagugcagu

SEQ ID NO: 448032 - RNA, 32 nt, Human
gcugucaccugcaauucucccuuaucagggcc

SEQ ID NO: 448033 - RNA, 32 nt, Human
gcugucaccuggucuugcccagaagagccguu

SEQ ID NO: 448034 - RNA, 32 nt, Human
gcugucaccuuccaccccacaaggccaaccuu

SEQ ID NO: 448035 - RNA, 32 nt, Human
gcugucaccuucuguugacaacagucaguagc

SEQ ID NO: 448036 - RNA, 32 nt, Human
gcugucacucucgcucuccucuugcuugaaca

SEQ ID NO: 448037 - RNA, 32 nt, Human
gcugucacuguagcugcucccguagggucguu

SEQ ID NO: 448038 - RNA, 23 nt, Human
gcugucacuucuuuuggcuugug

SEQ ID NO: 448039 - RNA, 32 nt, Human
gcugucagaauaugcauccacagagaugagcc

SEQ ID NO: 448040 - RNA, 32 nt, Human
gcugucagagguacaggagcugggagagucca

SEQ ID NO: 448041 - RNA, 32 nt, Human
gcugucagcagcacuguguuccaggcucuugu

SEQ ID NO: 448042 - RNA, 32 nt, Human
gcugucagccauuccuguucccaugagaugau

SEQ ID NO: 448043 - RNA, 32 nt, Human
gcugucagcccugaaaaacacacaggucagac

SEQ ID NO: 448044 - RNA, 32 nt, Human
gcugucagcugauucccgggguugguggcagc

SEQ ID NO: 448045 - RNA, 30 nt, Human
gcugucagcuugcagcccggggacagaggc

SEQ ID NO: 448046 - RNA, 32 nt, Human
gcugucaggaaggagaaagguucuuucuggcu

SEQ ID NO: 448047 - RNA, 21 nt, Human
gcugucaggacagcgcgggga

SEQ ID NO: 448048 - RNA, 32 nt, Human
gcugucaggagagaggugcagggaggaaggcc

SEQ ID NO: 448049 - RNA, 32 nt, Human
gcugucaggagagauggcugaaaaggugauca

SEQ ID NO: 448050 - RNA, 21 nt, Human
gcugucaggccacgcugguga

SEQ ID NO: 448051 - RNA, 32 nt, Human
gcugucaggccacggccgcuuggggcuuggcu

SEQ ID NO: 448052 - RNA, 23 nt, Human
gcugucaggccuggugaagggug

SEQ ID NO: 448053 - RNA, 22 nt, Human
gcugucagggccugcgguguga

SEQ ID NO: 448054 - RNA, 32 nt, Human
gcugucagguaccggccauggugcagguggga

SEQ ID NO: 448055 - RNA, 32 nt, Human
gcugucaggucaccagugagcagaucaaagcc

SEQ ID NO: 448056 - RNA, 32 nt, Human
gcugucagugccuccccacuuccaagcagaaa

SEQ ID NO: 448057 - RNA, 32 nt, Human
gcugucaucuauggguggccacugugaccuac

SEQ ID NO: 448058 - RNA, 32 nt, Human
gcugucaugaggcacagugacaagggccagga

SEQ ID NO: 448059 - RNA, 32 nt, Human
gcugucaugcaccaugagacaaagcccaagcu

SEQ ID NO: 448060 - RNA, 32 nt, Human
gcugucauggccucaccuggagcggaggggac

SEQ ID NO: 448061 - RNA, 32 nt, Human
gcugucaugguccuuugcagagcugcugcuuu

SEQ ID NO: 448062 - RNA, 32 nt, Human
gcugucauucugcugguggcuuccugcgucuu

SEQ ID NO: 448063 - RNA, 32 nt, Human
gcuguccaaagacaaugggguuuucuuccugu

SEQ ID NO: 448064 - RNA, 32 nt, Human
gcuguccaacagggguugggaggggcauuuug

SEQ ID NO: 448065 - RNA, 32 nt, Human
gcuguccaauggaggcccuccgugcuaguacg

SEQ ID NO: 448066 - RNA, 32 nt, Human
gcuguccacaucuggcuuuugugggacucaga

SEQ ID NO: 448067 - RNA, 18 nt, Human
gcuguccaccaggcagcu

SEQ ID NO: 448068 - RNA, 32 nt, Human
gcuguccacucccugccugccugcccgcaucu

SEQ ID NO: 448069 - RNA, 32 nt, Human
gcuguccacugccaccacucgggcagugcuug

SEQ ID NO: 448070 - RNA, 19 nt, Human
gcuguccagagcccugccg

SEQ ID NO: 448071 - RNA, 20 nt, Human
gcuguccagccagccagcca

SEQ ID NO: 448072 - RNA, 32 nt, Human
gcuguccaucugcugaaggccaccuucaguuu

SEQ ID NO: 448073 - RNA, 32 nt, Human
gcuguccauucaauuccaaauacugguuuuaa

SEQ ID NO: 448074 - RNA, 32 nt, Human
gcuguccauuccagugguaagggagaggggac

SEQ ID NO: 448075 - RNA, 21 nt, Human
gcugucccaagcaauggguaa

SEQ ID NO: 448076 - RNA, 20 nt, Human
gcugucccaccaggcaguaa

SEQ ID NO: 448077 - RNA, 18 nt, Human
gcugucccacugugguaa

SEQ ID NO: 448078 - RNA, 32 nt, Human
gcugucccagaggggagggguugugugugcga

SEQ ID NO: 448079 - RNA, 20 nt, Human
gcugucccagauccuaguga

SEQ ID NO: 448080 - RNA, 32 nt, Human
gcugucccagcacuguggguucagauagcagc

SEQ ID NO: 448081 - RNA, 21 nt, Human
gcugucccaggcugccagcca

SEQ ID NO: 448082 - RNA, 32 nt, Human
gcugucccaugguguguucugccccucccacc

SEQ ID NO: 448083 - RNA, 32 nt, Human
gcuguccccagccugcacagcccaagcccagg

SEQ ID NO: 448084 - RNA, 32 nt, Human
gcuguccccaggcugcaguucuggucccuggu

SEQ ID NO: 448085 - RNA, 22 nt, Human
gcuguccccaguuuugccccaa

SEQ ID NO: 448086 - RNA, 32 nt, Human
gcuguccccauucucuccuuucaccaucucuc

SEQ ID NO: 448087 - RNA, 32 nt, Human
gcugucccccagagauggcagauccugaggua

SEQ ID NO: 448088 - RNA, 32 nt, Human
gcugucccccggggcuccuucugcaugacacu

SEQ ID NO: 448089 - RNA, 32 nt, Human
gcuguccccuagugagggacuguguugacuga

SEQ ID NO: 448090 - RNA, 32 nt, Human
gcuguccccucucccucaguccuuccugacug

SEQ ID NO: 448091 - RNA, 32 nt, Human
gcuguccccugacccagagccuaggggauccg

SEQ ID NO: 448092 - RNA, 32 nt, Human
gcuguccccugcccuccccuccccaacuaccc

SEQ ID NO: 448093 - RNA, 19 nt, Human
gcugucccgagcuagguga

SEQ ID NO: 448094 - RNA, 20 nt, Human
gcugucccgagcuaggugac

SEQ ID NO: 448095 - RNA, 32 nt, Human
gcugucccgagucuggacuuucccucugcccc

SEQ ID NO: 448096 - RNA, 19 nt, Human
gcugucccgcgggccccgg

SEQ ID NO: 448097 - RNA, 18 nt, Human
gcugucccggguguacca

SEQ ID NO: 448098 - RNA, 32 nt, Human
gcugucccucccccuuguccuuucccuucagu

SEQ ID NO: 448099 - RNA, 32 nt, Human
gcugucccucccccuugucuuucccuucagua

SEQ ID NO: 448100 - RNA, 18 nt, Human
gcugucccucccuuguaa

SEQ ID NO: 448101 - RNA, 32 nt, Human
gcugucccuccucuccccuuauguggcggggg

SEQ ID NO: 448102 - RNA, 21 nt, Human
gcugucccuccugccaaguaa

SEQ ID NO: 448103 - RNA, 32 nt, Human
gcugucccugcagggccaucugacugccaagc

SEQ ID NO: 448104 - RNA, 32 nt, Human
gcugucccuuucucuuugccccugaguugugu

SEQ ID NO: 448105 - RNA, 20 nt, Human
gcuguccgacgccugcccca

SEQ ID NO: 448106 - RNA, 18 nt, Human
gcuguccgaggugcucca

SEQ ID NO: 448107 - RNA, 20 nt, Human
gcuguccgcaaccuccgcca

SEQ ID NO: 448108 - RNA, 18 nt, Human
gcuguccgcagcuugcgc

SEQ ID NO: 448109 - RNA, 21 nt, Human
gcuguccgcaugcuccgggcc

SEQ ID NO: 448110 - RNA, 18 nt, Human
gcuguccgccagcccgcg

SEQ ID NO: 448111 - RNA, 20 nt, Human
gcuguccgccagcuacccgc

SEQ ID NO: 448112 - RNA, 19 nt, Human
gcuguccgccagugcauca

SEQ ID NO: 448113 - RNA, 18 nt, Human
gcuguccgccaugcccgc

SEQ ID NO: 448114 - RNA, 18 nt, Human
gcuguccgccaugccgcg

SEQ ID NO: 448115 - RNA, 18 nt, Human
gcuguccgccccccguca

SEQ ID NO: 448116 - RNA, 32 nt, Human
gcuguccgcccugccugccugccugugugguc

SEQ ID NO: 448117 - RNA, 20 nt, Human
gcuguccgccucagcuccca

SEQ ID NO: 448118 - RNA, 18 nt, Human
gcuguccgcggucgcgcc

SEQ ID NO: 448119 - RNA, 18 nt, Human
gcuguccgcuccugccca

SEQ ID NO: 448120 - RNA, 19 nt, Human
gcuguccgcuucagcacca

SEQ ID NO: 448121 - RNA, 32 nt, Human
gcuguccggcagcugcucuuuguccacccaaa

SEQ ID NO: 448122 - RNA, 32 nt, Human
gcuguccggcuggcagagccugacgugucucu

SEQ ID NO: 448123 - RNA, 18 nt, Human
gcuguccgucggcgccca

SEQ ID NO: 448124 - RNA, 21 nt, Human
gcuguccguggcggcuggugu

SEQ ID NO: 448125 - RNA, 32 nt, Human
gcuguccgugggagguggaggccgaggacauu

SEQ ID NO: 448126 - RNA, 18 nt, Human
gcuguccguucaggacca

SEQ ID NO: 448127 - RNA, 21 nt, Human
gcuguccuagcucccugguaa

SEQ ID NO: 448128 - RNA, 32 nt, Human
gcuguccucagaggaggaggaggaggaggcag

SEQ ID NO: 448129 - RNA, 32 nt, Human
gcuguccuccauccuccauucuguccaacucc

SEQ ID NO: 448130 - RNA, 32 nt, Human
gcuguccucccaggacaagccaaggauccaac

SEQ ID NO: 448131 - RNA, 32 nt, Human
gcuguccucccuucauuucuguggaccuugga

SEQ ID NO: 448132 - RNA, 32 nt, Human
gcuguccuccggcagcuggagauguccgagcc

SEQ ID NO: 448133 - RNA, 32 nt, Human
gcuguccuccuuuaccuuccucucuccucagc

SEQ ID NO: 448134 - RNA, 32 nt, Human
gcuguccucugauccccagcuuccuagggcuc

SEQ ID NO: 448135 - RNA, 32 nt, Human
gcuguccucuggccucagccuccugaguagcu

SEQ ID NO: 448136 - RNA, 32 nt, Human
gcuguccugaauugcuguaacaagcacacuau

SEQ ID NO: 448137 - RNA, 25 nt, Human
gcuguccugcacucuuucuugcaag

SEQ ID NO: 448138 - RNA, 21 nt, Human
gcuguccugcccagccuuccu

SEQ ID NO: 448139 - RNA, 18 nt, Human
gcuguccugcuccaguaa

SEQ ID NO: 448140 - RNA, 16 nt, Human
gcuguccugcuuuugc

SEQ ID NO: 448141 - RNA, 32 nt, Human
gcuguccuggagaaaguccuagagguuaucuc

SEQ ID NO: 448142 - RNA, 21 nt, Human
gcuguccugggggcugcgcua

SEQ ID NO: 448143 - RNA, 32 nt, Human
gcuguccugggugggagggaaacuucauuuca

SEQ ID NO: 448144 - RNA, 22 nt, Human
gcuguccuguguguagcacuca

SEQ ID NO: 448145 - RNA, 32 nt, Human
gcuguccuucccgcagcuucuuggagugucag

SEQ ID NO: 448146 - RNA, 32 nt, Human
gcuguccuucuggagagugguggagaaccaag

SEQ ID NO: 448147 - RNA, 32 nt, Human
gcuguccuugagccucgacucugggugagccc

SEQ ID NO: 448148 - RNA, 32 nt, Human
gcuguccuugcuugugccugccucuuucacuu

SEQ ID NO: 448149 - RNA, 19 nt, Human
gcuguccuuuugcuggcca

SEQ ID NO: 448150 - RNA, 32 nt, Human
gcugucgcacggucagaucaugggcuccacca

SEQ ID NO: 448151 - RNA, 25 nt, Human
gcugucgcccaggcuggagugcagu

SEQ ID NO: 448152 - RNA, 32 nt, Human
gcugucgcccgcgccaccuccaccgccgccgc

SEQ ID NO: 448153 - RNA, 21 nt, Human
gcugucgccgccgccgccgcc

SEQ ID NO: 448154 - RNA, 23 nt, Human
gcugucgccgccgcucucagggu

SEQ ID NO: 448155 - RNA, 20 nt, Human
gcugucgccgccgcugccac

SEQ ID NO: 448156 - RNA, 32 nt, Human
gcugucgccggcggagggugcauguuugcgag

SEQ ID NO: 448157 - RNA, 32 nt, Human
gcugucgccugacagcauaccucaaaaggccc

SEQ ID NO: 448158 - RNA, 32 nt, Human
gcugucgccuggcgccgcgcauggcccacgcg

SEQ ID NO: 448159 - RNA, 32 nt, Human
gcugucgccuguaaugccagcgcuuugggagg

SEQ ID NO: 448160 - RNA, 32 nt, Human
gcugucggacugcgcucccagccugggcucug

SEQ ID NO: 448161 - RNA, 32 nt, Human
gcugucggagggaaggaggacggugcggggcc

SEQ ID NO: 448162 - RNA, 32 nt, Human
gcugucggcaggcgauguacaaaugaaagcgc

SEQ ID NO: 448163 - RNA, 27 nt, Human
gcugucggccucgcuuuuccugggcca

SEQ ID NO: 448164 - RNA, 32 nt, Human
gcugucgggccgcggcggcgcuuggcagccag

SEQ ID NO: 448165 - RNA, 32 nt, Human
gcugucguaguuggagguggccugaggagcuc

SEQ ID NO: 448166 - RNA, 32 nt, Human
gcugucuagaguagcuuaccagaagcuuccau

SEQ ID NO: 448167 - RNA, 32 nt, Human
gcugucucacccaggcuggagugcaguggcac

SEQ ID NO: 448168 - RNA, 32 nt, Human
gcugucucacugggggccugcuuuccucaaag

SEQ ID NO: 448169 - RNA, 32 nt, Human
gcugucucauagaugggauuuguacucuuggg

SEQ ID NO: 448170 - RNA, 32 nt, Human
gcugucuccacucaaaaccucagggcugugac

SEQ ID NO: 448171 - RNA, 32 nt, Human
gcugucuccagaggaucaaagccacacccaaa

SEQ ID NO: 448172 - RNA, 32 nt, Human
gcugucuccaguuucugggguuaagcacuaag

SEQ ID NO: 448173 - RNA, 21 nt, Human
gcugucuccccggcuggcugg

SEQ ID NO: 448174 - RNA, 32 nt, Human
gcugucucccuccagggauccgcaccgcccua

SEQ ID NO: 448175 - RNA, 32 nt, Human
gcugucucuaaaauacuuggcaugucauuagg

SEQ ID NO: 448176 - RNA, 32 nt, Human
gcugucucuaaggguggccccuccucucaggc

SEQ ID NO: 448177 - RNA, 32 nt, Human
gcugucucucccuccauuguucagcucuguac

SEQ ID NO: 448178 - RNA, 32 nt, Human
gcugucucucccuuucucccccucucucucug

SEQ ID NO: 448179 - RNA, 32 nt, Human
gcugucucucuguggaucagauuucucuccug

SEQ ID NO: 448180 - RNA, 32 nt, Human
gcugucucugccacaggagagccacauggucg

SEQ ID NO: 448181 - RNA, 32 nt, Human
gcugucucuguggugcuuuugcccucauaccu

SEQ ID NO: 448182 - RNA, 19 nt, Human
gcugucugagagcuagcca

SEQ ID NO: 448183 - RNA, 19 nt, Human
gcugucugagcagggaggu

SEQ ID NO: 448184 - RNA, 19 nt, Human
gcugucugagccacagcca

SEQ ID NO: 448185 - RNA, 20 nt, Human
gcugucugaggacugcucca

SEQ ID NO: 448186 - RNA, 19 nt, Human
gcugucugaguacugugau

SEQ ID NO: 448187 - RNA, 32 nt, Human
gcugucugagucuaaagcaccguaucuuggug

SEQ ID NO: 448188 - RNA, 18 nt, Human
gcugucugaucugugaca

SEQ ID NO: 448189 - RNA, 31 nt, Human
gcugucugccucucuacggcucugcuuccca

SEQ ID NO: 448190 - RNA, 21 nt, Human
gcugucugccugagcaacucu

SEQ ID NO: 448191 - RNA, 32 nt, Human
gcugucugccuguauuuucggacuuugacauu

SEQ ID NO: 448192 - RNA, 30 nt, Human
gcugucugcuugaaaggagaaagacaguaa

SEQ ID NO: 448193 - RNA, 32 nt, Human
gcugucugguuugcccacuucaucucauucuc

SEQ ID NO: 448194 - RNA, 32 nt, Human
gcugucuguaugcccugggagcucagguggga

SEQ ID NO: 448195 - RNA, 32 nt, Human
gcugucuguccagugcucucuuccugccucca

SEQ ID NO: 448196 - RNA, 32 nt, Human
gcugucuguccccuucuccaucgcccucuccc

SEQ ID NO: 448197 - RNA, 32 nt, Human
gcugucugucucccccucucuguuuaugucug

SEQ ID NO: 448198 - RNA, 32 nt, Human
gcugucuguguguacgugugcaggggaguaca

SEQ ID NO: 448199 - RNA, 32 nt, Human
gcugucuguuaacuccgcggucaguucccgga

SEQ ID NO: 448200 - RNA, 32 nt, Human
gcugucuguucugcagagaguagccugaggcc

SEQ ID NO: 448201 - RNA, 32 nt, Human
gcugucuucaacaacaggugcugcuuagucau

SEQ ID NO: 448202 - RNA, 21 nt, Human
gcugucuucagcagcaucuca

SEQ ID NO: 448203 - RNA, 32 nt, Human
gcugucuuccacacccuuccucccuccaggcu

SEQ ID NO: 448204 - RNA, 32 nt, Human
gcugucuucccaagaucacccccaggaguugg

SEQ ID NO: 448205 - RNA, 32 nt, Human
gcugucuucccaagccuuugaugacaaaccaa

SEQ ID NO: 448206 - RNA, 19 nt, Human
gcugucuucccccugcuaa

SEQ ID NO: 448207 - RNA, 32 nt, Human
gcugucuuccucccuuccccuggggguccugc

SEQ ID NO: 448208 - RNA, 32 nt, Human
gcugucuucugcuggccucauccugcagcagg

SEQ ID NO: 448209 - RNA, 32 nt, Human
gcugucuugcccaggcuggaguucaggggcua

SEQ ID NO: 448210 - RNA, 32 nt, Human
gcugucuuggucuccccuguggaaacccuucu

SEQ ID NO: 448211 - RNA, 32 nt, Human
gcugucuuguagcugcuuuccucccaguuagg

SEQ ID NO: 448212 - RNA, 32 nt, Human
gcugucuuucuccuccagagggucugugucuu

SEQ ID NO: 448213 - RNA, 32 nt, Human
gcugucuuuguucuccuuggccugugugggcu

SEQ ID NO: 448214 - RNA, 32 nt, Human
gcugugaaagagaucugugaccuugcacccug

SEQ ID NO: 448215 - RNA, 20 nt, Human
gcugugaaaggacugaggca

SEQ ID NO: 448216 - RNA, 32 nt, Human
gcugugaaccaccugggcuucaucucaagccu

SEQ ID NO: 448217 - RNA, 32 nt, Human
gcugugaaggcagugaaaagcaguugaaauac

SEQ ID NO: 448218 - RNA, 32 nt, Human
gcugugaauauuccuaacuuacccagauguug

SEQ ID NO: 448219 - RNA, 32 nt, Human
gcugugaaucagugagaaacugugacugccuc

SEQ ID NO: 448220 - RNA, 32 nt, Human
gcugugaaugauaccuggccuuucucacuaug

SEQ ID NO: 448221 - RNA, 32 nt, Human
gcugugaauucuccugcagacaggagggcccu

SEQ ID NO: 448222 - RNA, 29 nt, Human
gcugugacaguucuguuggucuacagaaa

SEQ ID NO: 448223 - RNA, 32 nt, Human
gcugugacaucucaucuucuguccucagaugg

SEQ ID NO: 448224 - RNA, 32 nt, Human
gcugugaccaacacaugugagacccaguccug

SEQ ID NO: 448225 - RNA, 32 nt, Human
gcugugaccagagcaaccagagccugccaccc

SEQ ID NO: 448226 - RNA, 32 nt, Human
gcugugaccagccugguggcgcgaagugucug

SEQ ID NO: 448227 - RNA, 32 nt, Human
gcugugacccccagauucauggaggggcuuua

SEQ ID NO: 448228 - RNA, 32 nt, Human
gcugugaccucaccucucuggcuuugggcggc

SEQ ID NO: 448229 - RNA, 18 nt, Human
gcugugacggacccaagg

SEQ ID NO: 448230 - RNA, 18 nt, Human
gcugugacgucugcgcca

SEQ ID NO: 448231 - RNA, 32 nt, Human
gcugugacuccagauacuuugcacugaagaga

SEQ ID NO: 448232 - RNA, 32 nt, Human
gcugugacucccacugcacuccagcucgggga

SEQ ID NO: 448233 - RNA, 32 nt, Human
gcugugacuccucuguggacaugguggcagca

SEQ ID NO: 448234 - RNA, 32 nt, Human
gcugugacugacucacacucuaacccagcaac

SEQ ID NO: 448235 - RNA, 32 nt, Human
gcugugacugcugcaagcucugccuucaccag

SEQ ID NO: 448236 - RNA, 20 nt, Human
gcugugacugggccagggca

SEQ ID NO: 448237 - RNA, 32 nt, Human
gcugugagaagaaggaaagcggcuggccuggu

SEQ ID NO: 448238 - RNA, 32 nt, Human
gcugugagacccaagacaaaaggggcugaggg

SEQ ID NO: 448239 - RNA, 32 nt, Human
gcugugagacugagcugggcucugaguguaaa

SEQ ID NO: 448240 - RNA, 32 nt, Human
gcugugagagauucuuucaagaagaccaaaau

SEQ ID NO: 448241 - RNA, 32 nt, Human
gcugugagagcaccacucaucugcgaaacgca

SEQ ID NO: 448242 - RNA, 32 nt, Human
gcugugagagccagaaugaagcauguacaaga

SEQ ID NO: 448243 - RNA, 32 nt, Human
gcugugagcagucuccugcauucacacgacaa

SEQ ID NO: 448244 - RNA, 32 nt, Human
gcugugagccaagagccgcggagcacgccggg

SEQ ID NO: 448245 - RNA, 32 nt, Human
gcugugagccaccuccagccucggguggcugc

SEQ ID NO: 448246 - RNA, 32 nt, Human
gcugugagccacugcacccggccgggaauuua

SEQ ID NO: 448247 - RNA, 32 nt, Human
gcugugagccagcacucagcugugucagauuu

SEQ ID NO: 448248 - RNA, 32 nt, Human
gcugugagccauggcaccuggccacacacguc

SEQ ID NO: 448249 - RNA, 32 nt, Human
gcugugagcccaggcaguguggucaccgagug

SEQ ID NO: 448250 - RNA, 32 nt, Human
gcugugagccgaggcauuccagccugggcaac

SEQ ID NO: 448251 - RNA, 21 nt, Human
gcugugagcugcuuuggcaga

SEQ ID NO: 448252 - RNA, 32 nt, Human
gcugugaggaagagcacaggcuucaugcacau

SEQ ID NO: 448253 - RNA, 32 nt, Human
gcugugaggaaggcguuccuguucccauuuua

SEQ ID NO: 448254 - RNA, 32 nt, Human
gcugugaggaggcuacaaaggccaggcuggug

SEQ ID NO: 448255 - RNA, 32 nt, Human
gcugugaggccacuggugcugagucaaaggga

SEQ ID NO: 448256 - RNA, 32 nt, Human
gcugugaggccccuggacaagcagagguggcc

SEQ ID NO: 448257 - RNA, 32 nt, Human
gcugugaggccuggggccuugcacuggcugga

SEQ ID NO: 448258 - RNA, 32 nt, Human
gcugugaggcucaaaugagccaaagguuauaa

SEQ ID NO: 448259 - RNA, 32 nt, Human
gcugugagggaggggaaaagcauuuuucaaua

SEQ ID NO: 448260 - RNA, 18 nt, Human
gcugugagggcugugcca

SEQ ID NO: 448261 - RNA, 32 nt, Human
gcugugaguaccucuuucuacuccuuucaggu

SEQ ID NO: 448262 - RNA, 32 nt, Human
gcugugaguagagaagcuaggccccgagccgg

SEQ ID NO: 448263 - RNA, 32 nt, Human
gcugugagucacuggccaggagcccagggugu

SEQ ID NO: 448264 - RNA, 32 nt, Human
gcugugagucauggggcucacugaggccuugu

SEQ ID NO: 448265 - RNA, 32 nt, Human
gcugugaguuguuucaauaaaggggcccaagg

SEQ ID NO: 448266 - RNA, 32 nt, Human
gcugugaucuguccugggcggggaccaggagg

SEQ ID NO: 448267 - RNA, 20 nt, Human
gcugugauggcaccaaggca

SEQ ID NO: 448268 - RNA, 32 nt, Human
gcugugauugugccacgggagcaugagcccuu

SEQ ID NO: 448269 - RNA, 32 nt, Human
gcugugauugugccacugcacucauccuggaa

SEQ ID NO: 448270 - RNA, 32 nt, Human
gcugugauugugccacugcacuccagccuggg

SEQ ID NO: 448271 - RNA, 32 nt, Human
gcugugauugugccacuguacuccagccuggg

SEQ ID NO: 448272 - RNA, 32 nt, Human
gcugugcaaaauaugcauaagaaaguagaaaa

SEQ ID NO: 448273 - RNA, 32 nt, Human
gcugugcacaucuccccacuccagccaccuuc

SEQ ID NO: 448274 - RNA, 32 nt, Human
gcugugcacggccuccccugcccuccuguucu

SEQ ID NO: 448275 - RNA, 32 nt, Human
gcugugcacucguuugcuuucuccaacgacuc

SEQ ID NO: 448276 - RNA, 32 nt, Human
gcugugcagaaggugaaauggaggaaaccaca

SEQ ID NO: 448277 - RNA, 25 nt, Human
gcugugcagagccauaagccuccca

SEQ ID NO: 448278 - RNA, 32 nt, Human
gcugugcagagggacagauggaagaaagcuag

SEQ ID NO: 448279 - RNA, 32 nt, Human
gcugugcagaucccagucccucauuucugucg

SEQ ID NO: 448280 - RNA, 32 nt, Human
gcugugcagcuccuuguccuuccugagcgucu

SEQ ID NO: 448281 - RNA, 32 nt, Human
gcugugcagcuugauagcaucuuacccacggu

SEQ ID NO: 448282 - RNA, 23 nt, Human
gcugugcaggaggguuacuugag

SEQ ID NO: 448283 - RNA, 32 nt, Human
gcugugcaggguacuccuccagauggaaucag

SEQ ID NO: 448284 - RNA, 32 nt, Human
gcugugcagggugcagcgcucagguggauccu

SEQ ID NO: 448285 - RNA, 32 nt, Human
gcugugcaugaucaugguuaagccacaacauc

SEQ ID NO: 448286 - RNA, 32 nt, Human
gcugugccaauacugccuacugugcuagccug

SEQ ID NO: 448287 - RNA, 32 nt, Human
gcugugccacaucuucugccauccuaagggga

SEQ ID NO: 448288 - RNA, 32 nt, Human
gcugugccacugggacccgccucugccaugaa

SEQ ID NO: 448289 - RNA, 21 nt, Human
gcugugccagcaggggggcug

SEQ ID NO: 448290 - RNA, 32 nt, Human
gcugugccagguugaaguauuguauuuugcaa

SEQ ID NO: 448291 - RNA, 32 nt, Human
gcugugccaucccgccggacgucgggauggug

SEQ ID NO: 448292 - RNA, 32 nt, Human
gcugugcccacacauggugaaagggacuacca

SEQ ID NO: 448293 - RNA, 32 nt, Human
gcugugcccauucuacuaacugagugagacau

SEQ ID NO: 448294 - RNA, 32 nt, Human
gcugugccccagcuguuccagcagcuugucug

SEQ ID NO: 448295 - RNA, 32 nt, Human
gcugugcccgggcuccucuccagcacuccgug

SEQ ID NO: 448296 - RNA, 19 nt, Human
gcugugccgccgccgccau

SEQ ID NO: 448297 - RNA, 21 nt, Human
gcugugccgcuggcucagccc

SEQ ID NO: 448298 - RNA, 32 nt, Human
gcugugccgggaggcagccacagggaagcuca

SEQ ID NO: 448299 - RNA, 32 nt, Human
gcugugccgguugcuuucugcagccgcaucuc

SEQ ID NO: 448300 - RNA, 32 nt, Human
gcugugccuauucaaguggccuucaggcagag

SEQ ID NO: 448301 - RNA, 32 nt, Human
gcugugccuccccagggacucugcccauguuc

SEQ ID NO: 448302 - RNA, 32 nt, Human
gcugugccuccccuaugugcagccgcugggau

SEQ ID NO: 448303 - RNA, 32 nt, Human
gcugugccucgggcuuggcuccaccucagggc

SEQ ID NO: 448304 - RNA, 32 nt, Human
gcugugccucuacugcccugaggacuuaccag

SEQ ID NO: 448305 - RNA, 32 nt, Human
gcugugccuggacugaagcugucccgcagguc

SEQ ID NO: 448306 - RNA, 32 nt, Human
gcugugccugggagccgagagaggcgguaaua

SEQ ID NO: 448307 - RNA, 32 nt, Human
gcugugccugggaguggcuucagcccaggcgu

SEQ ID NO: 448308 - RNA, 32 nt, Human
gcugugccugggcuccaaggacaggaacacug

SEQ ID NO: 448309 - RNA, 32 nt, Human
gcugugcgauccagauggcuugagugaugaag

SEQ ID NO: 448310 - RNA, 17 nt, Human
gcugugcgcaccaaaga

SEQ ID NO: 448311 - RNA, 21 nt, Human
gcugugcgggccccccuuccc

SEQ ID NO: 448312 - RNA, 32 nt, Human
gcugugcgugagccgggacuguacccacagcu

SEQ ID NO: 448313 - RNA, 32 nt, Human
gcugugcguucugagggagggagaccucggca

SEQ ID NO: 448314 - RNA, 24 nt, Human
gcugugcuaagaaugucaauggaa

SEQ ID NO: 448315 - RNA, 32 nt, Human
gcugugcucacugauccgccuccagggccacc

SEQ ID NO: 448316 - RNA, 32 nt, Human
gcugugcucagaggaggugagaggagaggaag

SEQ ID NO: 448317 - RNA, 32 nt, Human
gcugugcuccaagaugaggaggacggaagugu

SEQ ID NO: 448318 - RNA, 21 nt, Human
gcugugcuccagcuccugcgg

SEQ ID NO: 448319 - RNA, 22 nt, Human
gcugugcucucaccagcugcug

SEQ ID NO: 448320 - RNA, 32 nt, Human
gcugugcucugaaugcuucuccuucacauagg

SEQ ID NO: 448321 - RNA, 20 nt, Human
gcugugcugcaccccaugug

SEQ ID NO: 448322 - RNA, 32 nt, Human
gcugugcugcugcuggucuccugauggcuguu

SEQ ID NO: 448323 - RNA, 32 nt, Human
gcugugcuggccugccaggccugcugcaugcu

SEQ ID NO: 448324 - RNA, 32 nt, Human
gcugugcugggaaggacacagagagguggcug

SEQ ID NO: 448325 - RNA, 32 nt, Human
gcugugcugggaaggccgaggaugggggccca

SEQ ID NO: 448326 - RNA, 31 nt, Human
gcugugcugguccagcaccugcucucaccau

SEQ ID NO: 448327 - RNA, 32 nt, Human
gcugugcugucugcuagggucaccuccuguuu

SEQ ID NO: 448328 - RNA, 32 nt, Human
gcugugcugugcuauggugcucugucuacuug

SEQ ID NO: 448329 - RNA, 32 nt, Human
gcugugcuuccagagguggcgugaugccuccc

SEQ ID NO: 448330 - RNA, 18 nt, Human
gcugugcuugaccaagga

SEQ ID NO: 448331 - RNA, 18 nt, Human
gcugugcuuugcccgugg

SEQ ID NO: 448332 - RNA, 32 nt, Human
gcugugcuuuggaacaaucacagggaauggcc

SEQ ID NO: 448333 - RNA, 32 nt, Human
gcuguggaaagacuucacgucuugccgaauga

SEQ ID NO: 448334 - RNA, 32 nt, Human
gcuguggaacaaccagcucacgcacacaggca

SEQ ID NO: 448335 - RNA, 32 nt, Human
gcuguggaaccccgggcccccugcugcgggcu

SEQ ID NO: 448336 - RNA, 32 nt, Human
gcuguggaagcagccaaggcacuuccucaccc

SEQ ID NO: 448337 - RNA, 32 nt, Human
gcuguggaauuuguuuuccuucauaauauuua

SEQ ID NO: 448338 - RNA, 32 nt, Human
gcuguggacagaaaagccuccuuaagugagcu

SEQ ID NO: 448339 - RNA, 32 nt, Human
gcuguggaccaaugcaucucuuuaaaggcaaa

SEQ ID NO: 448340 - RNA, 32 nt, Human
gcuguggacccugucuucugggcacaguggac

SEQ ID NO: 448341 - RNA, 32 nt, Human
gcuguggaccgcgugggcucgccucccuggga

SEQ ID NO: 448342 - RNA, 32 nt, Human
gcuguggaccucuccuccuucuccuugaccuc

SEQ ID NO: 448343 - RNA, 32 nt, Human
gcuguggacucaggacccaggacucuguuuac

SEQ ID NO: 448344 - RNA, 32 nt, Human
gcuguggagaaaagaaguccauggaagccagg

SEQ ID NO: 448345 - RNA, 22 nt, Human
gcuguggagagcuggccgggga

SEQ ID NO: 448346 - RNA, 32 nt, Human
gcuguggagaggaggaagcggaacuagagaug

SEQ ID NO: 448347 - RNA, 32 nt, Human
gcuguggagagggacagaaggggugguucagc

SEQ ID NO: 448348 - RNA, 32 nt, Human
gcuguggagaggggcuacgcagcugccccagc

SEQ ID NO: 448349 - RNA, 32 nt, Human
gcuguggagagggugcacagggccuggcaggg

SEQ ID NO: 448350 - RNA, 32 nt, Human
gcuguggagauccauuccccaccuuuccugug

SEQ ID NO: 448351 - RNA, 32 nt, Human
gcuguggaggccaggguggaacugggguugcc

SEQ ID NO: 448352 - RNA, 32 nt, Human
gcuguggagugcaggccagagcagggugugcg

SEQ ID NO: 448353 - RNA, 22 nt, Human
gcuguggcagagaauugcuuga

SEQ ID NO: 448354 - RNA, 24 nt, Human
gcuguggcaggagaacugcuugag

SEQ ID NO: 448355 - RNA, 23 nt, Human
gcuguggcaggagaaucgcuaga

SEQ ID NO: 448356 - RNA, 23 nt, Human
gcuguggcaggagaaucguuuga

SEQ ID NO: 448357 - RNA, 32 nt, Human
gcuguggcaggcaggggugguaguaguaguga

SEQ ID NO: 448358 - RNA, 32 nt, Human
gcuguggcagggcaggggcggcuuggaaccug

SEQ ID NO: 448359 - RNA, 19 nt, Human
gcuguggcagggggcacug

SEQ ID NO: 448360 - RNA, 32 nt, Human
gcuguggcauugugugggcauguggccaggca

SEQ ID NO: 448361 - RNA, 32 nt, Human
gcuguggccagcugcugacccagcuccuccug

SEQ ID NO: 448362 - RNA, 32 nt, Human
gcuguggccaggacaugacaaugacggcuuuc

SEQ ID NO: 448363 - RNA, 22 nt, Human
gcuguggccaguggagagccac

SEQ ID NO: 448364 - RNA, 32 nt, Human
gcuguggccauauguuuguauauugugugugg

SEQ ID NO: 448365 - RNA, 25 nt, Human
gcuguggcccaggcugaagugcagu

SEQ ID NO: 448366 - RNA, 32 nt, Human
gcuguggcccauucccccucugcuaugccuua

SEQ ID NO: 448367 - RNA, 21 nt, Human
gcuguggcccugccuggcuag

SEQ ID NO: 448368 - RNA, 32 nt, Human
gcuguggcccuggaugcuggagcuggaggguu

SEQ ID NO: 448369 - RNA, 32 nt, Human
gcuguggcccugggcccagcuguggguccuga

SEQ ID NO: 448370 - RNA, 32 nt, Human
gcuguggccuccccugccccugcuccagcucc

SEQ ID NO: 448371 - RNA, 22 nt, Human
gcuguggcgccacguccuccca

SEQ ID NO: 448372 - RNA, 32 nt, Human
gcuguggcggugcacaggggaggcagguccuu

SEQ ID NO: 448373 - RNA, 22 nt, Human
gcuguggcucaagccuguaauc

SEQ ID NO: 448374 - RNA, 22 nt, Human
gcuguggcucacaccuguaauc

SEQ ID NO: 448375 - RNA, 21 nt, Human
gcuguggcucaccugcugcug

SEQ ID NO: 448376 - RNA, 22 nt, Human
gcuguggcucacgccugcaauc

SEQ ID NO: 448377 - RNA, 22 nt, Human
gcuguggcucacgccuguaauc

SEQ ID NO: 448378 - RNA, 22 nt, Human
gcuguggcucacgccuguaauu

SEQ ID NO: 448379 - RNA, 22 nt, Human
gcuguggcucaugacuauaauc

SEQ ID NO: 448380 - RNA, 22 nt, Human
gcuguggcucaugccuguaauc

SEQ ID NO: 448381 - RNA, 32 nt, Human
gcuguggcuccaguuccagcacugccucuccc

SEQ ID NO: 448382 - RNA, 21 nt, Human
gcuguggcucugcccuuucca

SEQ ID NO: 448383 - RNA, 32 nt, Human
gcuguggcugaaggcagcuuccacagcucacu

SEQ ID NO: 448384 - RNA, 32 nt, Human
gcuguggcugcugcggucagggagaggucgca

SEQ ID NO: 448385 - RNA, 22 nt, Human
gcuguggcuuaugccuguaauc

SEQ ID NO: 448386 - RNA, 32 nt, Human
gcugugggaagagagaugagggucagauaggu

SEQ ID NO: 448387 - RNA, 26 nt, Human
gcugugggaccuuccuggcugacugg

SEQ ID NO: 448388 - RNA, 32 nt, Human
gcugugggacugccuucuguccuucauccgcc

SEQ ID NO: 448389 - RNA, 21 nt, Human
gcugugggacuggcccgccag

SEQ ID NO: 448390 - RNA, 30 nt, Human
gcugugggacuggcccugcuccuguacugc

SEQ ID NO: 448391 - RNA, 18 nt, Human
gcugugggagcagaguga

SEQ ID NO: 448392 - RNA, 32 nt, Human
gcugugggagcaggcccagugggaggcugugg

SEQ ID NO: 448393 - RNA, 32 nt, Human
gcugugggagccaagaauaagacagaaggcau

SEQ ID NO: 448394 - RNA, 20 nt, Human
gcugugggagcugcccugug

SEQ ID NO: 448395 - RNA, 32 nt, Human
gcugugggcacccugcaggaggcaccuguagg

SEQ ID NO: 448396 - RNA, 32 nt, Human
gcugugggcaucuucugcccaugggcuccauu

SEQ ID NO: 448397 - RNA, 21 nt, Human
gcugugggccaggcugcucag

SEQ ID NO: 448398 - RNA, 32 nt, Human
gcugugggcccucuggaauugugcuccucaca

SEQ ID NO: 448399 - RNA, 32 nt, Human
gcugugggccugacagaaguugauauuugggu

SEQ ID NO: 448400 - RNA, 22 nt, Human
gcugugggcggagcugggucag

SEQ ID NO: 448401 - RNA, 23 nt, Human
gcugugggcuaccgggccgccgg

SEQ ID NO: 448402 - RNA, 22 nt, Human
gcugugggcucccugucccugg

SEQ ID NO: 448403 - RNA, 21 nt, Human
gcugugggcucucugggacag

SEQ ID NO: 448404 - RNA, 32 nt, Human
gcugugggcugcaggcaagcggucgggugggg

SEQ ID NO: 448405 - RNA, 23 nt, Human
gcugugggcuuuggguuugucag

SEQ ID NO: 448406 - RNA, 21 nt, Human
gcuguggggagcuggagagga

SEQ ID NO: 448407 - RNA, 32 nt, Human
gcuguggggaggaggcaggaaucugaaaaggu

SEQ ID NO: 448408 - RNA, 32 nt, Human
gcuguggggcagcugggauccagguaagaccg

SEQ ID NO: 448409 - RNA, 32 nt, Human
gcuguggggcaggcacuagggggccuuucccu

SEQ ID NO: 448410 - RNA, 21 nt, Human
gcuguggggcaggcugggcag

SEQ ID NO: 448411 - RNA, 32 nt, Human
gcuguggggcaggcugggcagggggcugagcu

SEQ ID NO: 448412 - RNA, 32 nt, Human
gcuguggggccaguugauaccugcuggcagga

SEQ ID NO: 448413 - RNA, 32 nt, Human
gcuguggggcugggggaugcccucuuuucuau

SEQ ID NO: 448414 - RNA, 32 nt, Human
gcugugggggugccuuccucagccucuggccc

SEQ ID NO: 448415 - RNA, 32 nt, Human
gcuguggggucugcccuggccacccacugugu

SEQ ID NO: 448416 - RNA, 20 nt, Human
gcugugggugcagcauuuca

SEQ ID NO: 448417 - RNA, 32 nt, Human
gcuguggguucagaggacuccaccuccuggcu

SEQ ID NO: 448418 - RNA, 32 nt, Human
gcuguggguucgagguggaggcugcagcugaa

SEQ ID NO: 448419 - RNA, 20 nt, Human
gcuguggguucucugaagca

SEQ ID NO: 448420 - RNA, 22 nt, Human
gcuguggguuuugggggcucag

SEQ ID NO: 448421 - RNA, 22 nt, Human
gcugugguaaaaaaccugcagg

SEQ ID NO: 448422 - RNA, 32 nt, Human
gcugugguaaguccagccugcccagggcugcu

SEQ ID NO: 448423 - RNA, 32 nt, Human
gcuguggucagaaacaggucagugauggaggc

SEQ ID NO: 448424 - RNA, 32 nt, Human
gcuguggucaggcaggcgaauggggagcaagc

SEQ ID NO: 448425 - RNA, 32 nt, Human
gcuguggucccagcuacucaggaggcugaggu

SEQ ID NO: 448426 - RNA, 20 nt, Human
gcuguggucucagcaaugca

SEQ ID NO: 448427 - RNA, 18 nt, Human
gcuguggucuccuuggua

SEQ ID NO: 448428 - RNA, 24 nt, Human
gcuguggucuuaacguagacugca

SEQ ID NO: 448429 - RNA, 22 nt, Human
gcuguggucuuccagcacacag

SEQ ID NO: 448430 - RNA, 20 nt, Human
gcuguggucuugaucugcag

SEQ ID NO: 448431 - RNA, 21 nt, Human
gcuguggucuuggcgcgggga

SEQ ID NO: 448432 - RNA, 32 nt, Human
gcuguggugaacacucgugugggggugggggu

SEQ ID NO: 448433 - RNA, 32 nt, Human
gcuguggugagcuguugauugcaccacugcac

SEQ ID NO: 448434 - RNA, 32 nt, Human
gcuguggugcagcccugcuccagccuuggccu

SEQ ID NO: 448435 - RNA, 32 nt, Human
gcuguggugcaggagagaaggaaguuugggaa

SEQ ID NO: 448436 - RNA, 32 nt, Human
gcuguggugcggaagccaggaggcaggcgcgc

SEQ ID NO: 448437 - RNA, 32 nt, Human
gcuguggugggaagaguuagggccagugucuu

SEQ ID NO: 448438 - RNA, 24 nt, Human
gcuguggugggaggauugcuugag

SEQ ID NO: 448439 - RNA, 32 nt, Human
gcuguggugguguugaucaguugcuccagugu

SEQ ID NO: 448440 - RNA, 32 nt, Human
gcuguggugugaggacuucucagacaaaggca

SEQ ID NO: 448441 - RNA, 19 nt, Human
gcugugguuaagcacugca

SEQ ID NO: 448442 - RNA, 32 nt, Human
gcugugguuaguaucuuguucugugauugguu

SEQ ID NO: 448443 - RNA, 32 nt, Human
gcugugguugcuucucuuccuccugcugccgc

SEQ ID NO: 448444 - RNA, 19 nt, Human
gcugugguuuagcacugca

SEQ ID NO: 448445 - RNA, 32 nt, Human
gcuguguaaccuugaacuacacaauucuccuu

SEQ ID NO: 448446 - RNA, 18 nt, Human
gcuguguaacugcugcca

SEQ ID NO: 448447 - RNA, 32 nt, Human
gcuguguaauccuaugucagcucucuuaggaa

SEQ ID NO: 448448 - RNA, 32 nt, Human
gcuguguaggcugcagaugagaguucuguucu

SEQ ID NO: 448449 - RNA, 32 nt, Human
gcuguguaugaucaguuaucuaccucagaguc

SEQ ID NO: 448450 - RNA, 32 nt, Human
gcuguguaugcagccugcagguuuccauacac

SEQ ID NO: 448451 - RNA, 32 nt, Human
gcuguguauguguggggguggggagggcauau

SEQ ID NO: 448452 - RNA, 32 nt, Human
gcugugucacacaggcuggagugcaguggcgu

SEQ ID NO: 448453 - RNA, 21 nt, Human
gcugugucacagccagaggga

SEQ ID NO: 448454 - RNA, 32 nt, Human
gcugugucaccaaggcuggagggcaauagcau

SEQ ID NO: 448455 - RNA, 32 nt, Human
gcugugucaccaggauggagugcaguggcaug

SEQ ID NO: 448456 - RNA, 32 nt, Human
gcugugucaccaggcuggagcaguggcacgau

SEQ ID NO: 448457 - RNA, 32 nt, Human
gcugugucacccaggcugccaggcuggagugg

SEQ ID NO: 448458 - RNA, 32 nt, Human
gcugugucacccaggcuggagugcaguggcgc

SEQ ID NO: 448459 - RNA, 32 nt, Human
gcugugucaccuaggcuggagugcaguggcac

SEQ ID NO: 448460 - RNA, 21 nt, Human
gcuguguccagacagcacaaa

SEQ ID NO: 448461 - RNA, 22 nt, Human
gcuguguccagggcucagggca

SEQ ID NO: 448462 - RNA, 32 nt, Human
gcugugucccagagacauggguccuccgggug

SEQ ID NO: 448463 - RNA, 32 nt, Human
gcugugucccagguuuccucagucucuaaccc

SEQ ID NO: 448464 - RNA, 19 nt, Human
gcugugucccugaacaucc

SEQ ID NO: 448465 - RNA, 22 nt, Human
gcugugucccuugaaacacaga

SEQ ID NO: 448466 - RNA, 32 nt, Human
gcuguguccgccgcaccagccaccccaaagcc

SEQ ID NO: 448467 - RNA, 32 nt, Human
gcuguguccugccucagcacaaagacccagug

SEQ ID NO: 448468 - RNA, 32 nt, Human
gcuguguccuuucccuuaccucccucugccag

SEQ ID NO: 448469 - RNA, 32 nt, Human
gcugugucgccaaggcuggagugcaguggugc

SEQ ID NO: 448470 - RNA, 32 nt, Human
gcugugucgcccagacuggagugcaguggugg

SEQ ID NO: 448471 - RNA, 32 nt, Human
gcugugucgcccaggcuggagugcagugagcu

SEQ ID NO: 448472 - RNA, 32 nt, Human
gcugugucgccuaggcuggagugcaguggcgu

SEQ ID NO: 448473 - RNA, 21 nt, Human
gcugugucuagcagcaccugu

SEQ ID NO: 448474 - RNA, 32 nt, Human
gcugugucuguggagcugcggccacucaugcu

SEQ ID NO: 448475 - RNA, 32 nt, Human
gcugugucuucaugucccugagggucuugggc

SEQ ID NO: 448476 - RNA, 32 nt, Human
gcugugugaacccagcaagucacaggaucacu

SEQ ID NO: 448477 - RNA, 32 nt, Human
gcugugugaauucaggccuuguggaaaacacc

SEQ ID NO: 448478 - RNA, 32 nt, Human
gcugugugacagaucaacgugcugaugguaag

SEQ ID NO: 448479 - RNA, 19 nt, Human
gcugugugacagcugcacc

SEQ ID NO: 448480 - RNA, 32 nt, Human
gcugugugacuucaggcaagccacuuuaccuc

SEQ ID NO: 448481 - RNA, 32 nt, Human
gcugugugagcccuucagcugcagagcggggg

SEQ ID NO: 448482 - RNA, 32 nt, Human
gcugugugcacugugccagggacaggaggguu

SEQ ID NO: 448483 - RNA, 32 nt, Human
gcugugugccaaggaguaaauugcugggcugc

SEQ ID NO: 448484 - RNA, 31 nt, Human
gcugugugcccugguggaccugugucugggc

SEQ ID NO: 448485 - RNA, 32 nt, Human
gcugugugccugugccuggggccuuauguugc

SEQ ID NO: 448486 - RNA, 19 nt, Human
gcugugugcugacuaugca

SEQ ID NO: 448487 - RNA, 32 nt, Human
gcugugugcugcccgccugccugcuggcucuc

SEQ ID NO: 448488 - RNA, 32 nt, Human
gcuguguggagccaccacuccuagccacagcu

SEQ ID NO: 448489 - RNA, 32 nt, Human
gcuguguggcccaggcuggagugcaguggcgc

SEQ ID NO: 448490 - RNA, 32 nt, Human
gcuguguggcccggagugagauucagaaaguc

SEQ ID NO: 448491 - RNA, 32 nt, Human
gcuguguggccgcggccccagcgugcgucucu

SEQ ID NO: 448492 - RNA, 32 nt, Human
gcuguguggccuagguuggagugcaauggcgc

SEQ ID NO: 448493 - RNA, 32 nt, Human
gcuguguggccugacagucucuaccaguccug

SEQ ID NO: 448494 - RNA, 32 nt, Human
gcuguguggcuuuccuuccugaagaguccgug

SEQ ID NO: 448495 - RNA, 23 nt, Human
gcugugugggagggaccuagggc

SEQ ID NO: 448496 - RNA, 32 nt, Human
gcugugugggccugggcuaugcggcagggcag

SEQ ID NO: 448497 - RNA, 21 nt, Human
gcuguguggggagccgaggua

SEQ ID NO: 448498 - RNA, 32 nt, Human
gcuguguguccuugcccugccugccuguggcu

SEQ ID NO: 448499 - RNA, 29 nt, Human
gcugugugucuguguagacugggcacagc

SEQ ID NO: 448500 - RNA, 31 nt, Human
gcuguguguggaauugcuugccaaagaaguu

SEQ ID NO: 448501 - RNA, 21 nt, Human
gcuguguguggggcccaagca

SEQ ID NO: 448502 - RNA, 32 nt, Human
gcuguguguguagugugguuggccaguaggug

SEQ ID NO: 448503 - RNA, 32 nt, Human
gcuguguguuggcgugccacgguggggauuuc

SEQ ID NO: 448504 - RNA, 32 nt, Human
gcuguguuaaaccucagaguuuaaaagcuacu

SEQ ID NO: 448505 - RNA, 32 nt, Human
gcuguguuaacacucccucccgaggagacuuc

SEQ ID NO: 448506 - RNA, 24 nt, Human
gcuguguuacccaggcuggucuca

SEQ ID NO: 448507 - RNA, 32 nt, Human
gcuguguuagacugcaugcuugaguguuuggg

SEQ ID NO: 448508 - RNA, 32 nt, Human
gcuguguuagcgguucaugcacaugccugacg

SEQ ID NO: 448509 - RNA, 32 nt, Human
gcuguguucaggauguugaagugcagugucag

SEQ ID NO: 448510 - RNA, 32 nt, Human
gcuguguuccaggggcccugauuuccucggau

SEQ ID NO: 448511 - RNA, 32 nt, Human
gcuguguucccgccgccgccccggcuagucuc

SEQ ID NO: 448512 - RNA, 32 nt, Human
gcuguguuccugggcccugcccauggccucaa

SEQ ID NO: 448513 - RNA, 32 nt, Human
gcuguguucuaacccagcucuggagacuuagg

SEQ ID NO: 448514 - RNA, 32 nt, Human
gcuguguucugcagcaaaacaggcugggggaa

SEQ ID NO: 448515 - RNA, 32 nt, Human
gcuguguugcagaauggaguuuccauggauuu

SEQ ID NO: 448516 - RNA, 32 nt, Human
gcuguguugccaaggcuggagugcaggccgcg

SEQ ID NO: 448517 - RNA, 24 nt, Human
gcuguguugcccagacuggucuca

SEQ ID NO: 448518 - RNA, 32 nt, Human
gcuguguugcccaggcuagagugcagcaguga

SEQ ID NO: 448519 - RNA, 32 nt, Human
gcuguguugcccaggcuggagugcaauggcgc

SEQ ID NO: 448520 - RNA, 32 nt, Human
gcuguguugcccaggcuggagugcaguagcua

SEQ ID NO: 448521 - RNA, 32 nt, Human
gcuguguugcccaggcuggagugcaguggccu

SEQ ID NO: 448522 - RNA, 32 nt, Human
gcuguguugcccaggcuggagugcaguggugu

SEQ ID NO: 448523 - RNA, 32 nt, Human
gcuguguugcccaggcuggagugcgguggcua

SEQ ID NO: 448524 - RNA, 32 nt, Human
gcuguguugcccugacuggaguucaguggugc

SEQ ID NO: 448525 - RNA, 32 nt, Human
gcuguguuguccaggcuggagugcaauggugu

SEQ ID NO: 448526 - RNA, 32 nt, Human
gcuguguuguccaggcuggagugcaguggugu

SEQ ID NO: 448527 - RNA, 32 nt, Human
gcuguguuuggacgcguuccugcccagccccu

SEQ ID NO: 448528 - RNA, 18 nt, Human
gcuguguuuucuaacaca

SEQ ID NO: 448529 - RNA, 32 nt, Human
gcuguuaaauagauuucucaauaauguaaaua

SEQ ID NO: 448530 - RNA, 32 nt, Human
gcuguuaaccacccgccccgcccccucccugc

SEQ ID NO: 448531 - RNA, 32 nt, Human
gcuguuaaccagccugcauuacaucuggaagu

SEQ ID NO: 448532 - RNA, 32 nt, Human
gcuguuaauuccaaaugugaacuuuuugaguc

SEQ ID NO: 448533 - RNA, 32 nt, Human
gcuguuaccaggaggagagcaagacgcugagc

SEQ ID NO: 448534 - RNA, 32 nt, Human
gcuguuaccaugucuacauuuuguagaaugau

SEQ ID NO: 448535 - RNA, 31 nt, Human
gcuguuaccucagcugggccuggauggucua

SEQ ID NO: 448536 - RNA, 32 nt, Human
gcuguuaccuuccucagggcuuagggagggag

SEQ ID NO: 448537 - RNA, 32 nt, Human
gcuguuacucagccccugagucugacucaucu

SEQ ID NO: 448538 - RNA, 21 nt, Human
gcuguuacugauagacaccuu

SEQ ID NO: 448539 - RNA, 32 nt, Human
gcuguuagaagcaggaggugugcagggggugg

SEQ ID NO: 448540 - RNA, 32 nt, Human
gcuguuagcaggagcuaugucccuuccuaucg

SEQ ID NO: 448541 - RNA, 32 nt, Human
gcuguuaggcugugcugugcucugcuuaagga

SEQ ID NO: 448542 - RNA, 32 nt, Human
gcuguuagugucuucuuccugcccucagcacc

SEQ ID NO: 448543 - RNA, 32 nt, Human
gcuguuauggccgccuccuugagguaguaucc

SEQ ID NO: 448544 - RNA, 32 nt, Human
gcuguucacucccauucuccccuacaguuuua

SEQ ID NO: 448545 - RNA, 32 nt, Human
gcuguucagaagaauaaaauaugacuguuuua

SEQ ID NO: 448546 - RNA, 32 nt, Human
gcuguucagacagaagagcugaaucagcagca

SEQ ID NO: 448547 - RNA, 32 nt, Human
gcuguucagcugguugagguuucaaaccuccc

SEQ ID NO: 448548 - RNA, 32 nt, Human
gcuguucaggguggaggcacagaugagcagag

SEQ ID NO: 448549 - RNA, 32 nt, Human
gcuguucauucauaaagaucuggauuugcuuu

SEQ ID NO: 448550 - RNA, 32 nt, Human
gcuguucauucuguacagugaauuuucugaac

SEQ ID NO: 448551 - RNA, 32 nt, Human
gcuguuccaggaacugggcauguaugaagaua

SEQ ID NO: 448552 - RNA, 32 nt, Human
gcuguuccaggcuccaggggaaaaaggugugg

SEQ ID NO: 448553 - RNA, 31 nt, Human
gcuguuccauggaagaauaccaacagucccc

SEQ ID NO: 448554 - RNA, 32 nt, Human
gcuguucccagcuccagcucuaaccucgccua

SEQ ID NO: 448555 - RNA, 32 nt, Human
gcuguucccaggaggcagcucccuccuggcac

SEQ ID NO: 448556 - RNA, 32 nt, Human
gcuguuccccgaggaggaagggaaggggcucu

SEQ ID NO: 448557 - RNA, 32 nt, Human
gcuguucccuaucaaguauuaauguagggaug

SEQ ID NO: 448558 - RNA, 32 nt, Human
gcuguuccuacucaguaaacaggugugaugag

SEQ ID NO: 448559 - RNA, 32 nt, Human
gcuguuccuccagggccagcacucgggcgagg

SEQ ID NO: 448560 - RNA, 32 nt, Human
gcuguuccucccugucaccugccuccucauca

SEQ ID NO: 448561 - RNA, 32 nt, Human
gcuguuccugacuacagccaucaugccucggg

SEQ ID NO: 448562 - RNA, 18 nt, Human
gcuguuccuuccuucaca

SEQ ID NO: 448563 - RNA, 32 nt, Human
gcuguucgaacccagccagggaugaaaaauca

SEQ ID NO: 448564 - RNA, 20 nt, Human
gcuguucgcugucuuuucca

SEQ ID NO: 448565 - RNA, 18 nt, Human
gcuguucggugcaggggg

SEQ ID NO: 448566 - RNA, 32 nt, Human
gcuguucuaguuccucuccauccgccaccucc

SEQ ID NO: 448567 - RNA, 32 nt, Human
gcuguucucagcuccagcuucaaaccucgagu

SEQ ID NO: 448568 - RNA, 32 nt, Human
gcuguucuccacuccugacuucucccagccuc

SEQ ID NO: 448569 - RNA, 32 nt, Human
gcuguucuccccucacugcugagucucccagg

SEQ ID NO: 448570 - RNA, 32 nt, Human
gcuguucuccugcugcucuccugcugcuggcc

SEQ ID NO: 448571 - RNA, 32 nt, Human
gcuguucucuggagaaaaauaaaauggaaauu

SEQ ID NO: 448572 - RNA, 18 nt, Human
gcuguucucuuuuauuca

SEQ ID NO: 448573 - RNA, 32 nt, Human
gcuguucugggcuuccagugauuggcagcuga

SEQ ID NO: 448574 - RNA, 32 nt, Human
gcuguucuggguagccuggggcugaggaggug

SEQ ID NO: 448575 - RNA, 32 nt, Human
gcuguucuuccaaagcccccaggcuggcuuag

SEQ ID NO: 448576 - RNA, 32 nt, Human
gcuguucuuguguggcuuucugggcaguaggg

SEQ ID NO: 448577 - RNA, 21 nt, Human
gcuguucuuucagcugcucca

SEQ ID NO: 448578 - RNA, 32 nt, Human
gcuguugaaagcuucacaagaccauuguuaag

SEQ ID NO: 448579 - RNA, 22 nt, Human
gcuguugaacauccacaaggca

SEQ ID NO: 448580 - RNA, 32 nt, Human
gcuguugaagggucaccuggaggcagacguug

SEQ ID NO: 448581 - RNA, 32 nt, Human
gcuguugacaucagccugcuucuuccccucug

SEQ ID NO: 448582 - RNA, 32 nt, Human
gcuguugagacccugagcccugagucuguauu

SEQ ID NO: 448583 - RNA, 32 nt, Human
gcuguugagauauuuuaaaauauugccuccgu

SEQ ID NO: 448584 - RNA, 32 nt, Human
gcuguugagaugguaacagauuugcuccuaaa

SEQ ID NO: 448585 - RNA, 32 nt, Human
gcuguugagggcccuggagaaacuucagcaga

SEQ ID NO: 448586 - RNA, 19 nt, Human
gcuguugagguccuaggca

SEQ ID NO: 448587 - RNA, 32 nt, Human
gcuguugcaacacugccucacucuuccccucc

SEQ ID NO: 448588 - RNA, 32 nt, Human
gcuguugcagaggcggcuugcuucccaccugu

SEQ ID NO: 448589 - RNA, 32 nt, Human
gcuguugcagugagccaagaucacgccauugc

SEQ ID NO: 448590 - RNA, 25 nt, Human
gcuguugcccaggcugcagugcagu

SEQ ID NO: 448591 - RNA, 25 nt, Human
gcuguugcccaggcuguagugcagu

SEQ ID NO: 448592 - RNA, 21 nt, Human
gcuguugccgaccccggggca

SEQ ID NO: 448593 - RNA, 32 nt, Human
gcuguugccgccgcugcucuagcugccgucag

SEQ ID NO: 448594 - RNA, 32 nt, Human
gcuguugccugggagcuugguacuuucccucc

SEQ ID NO: 448595 - RNA, 19 nt, Human
gcuguugcggacccggggc

SEQ ID NO: 448596 - RNA, 32 nt, Human
gcuguugcuauuuguauuucucuuguccuuua

SEQ ID NO: 448597 - RNA, 32 nt, Human
gcuguugcugaggagggggcugggaccccuuc

SEQ ID NO: 448598 - RNA, 32 nt, Human
gcuguugcugauuuuauucuugaucaguaguu

SEQ ID NO: 448599 - RNA, 32 nt, Human
gcuguugcugcugccaacuacuucuuugcaug

SEQ ID NO: 448600 - RNA, 20 nt, Human
gcuguuggaaaauggugcca

SEQ ID NO: 448601 - RNA, 32 nt, Human
gcuguuggaaagaucuuugugaggauuaggaa

SEQ ID NO: 448602 - RNA, 32 nt, Human
gcuguuggacugucauuucauugcucauugua

SEQ ID NO: 448603 - RNA, 32 nt, Human
gcuguuggagagugcuggaggaaaugcacuuu

SEQ ID NO: 448604 - RNA, 20 nt, Human
gcuguuggaggaccccgagg

SEQ ID NO: 448605 - RNA, 22 nt, Human
gcuguuggaggugcuccgagca

SEQ ID NO: 448606 - RNA, 32 nt, Human
gcuguuggauucugaggguggggagggagaga

SEQ ID NO: 448607 - RNA, 21 nt, Human
gcuguuggcaggaacuccaag

SEQ ID NO: 448608 - RNA, 32 nt, Human
gcuguuggcaugagccacugauguucauguga

SEQ ID NO: 448609 - RNA, 32 nt, Human
gcuguuggccaucccuuccccagccacaggug

SEQ ID NO: 448610 - RNA, 32 nt, Human
gcuguuggcucaccgagaccagccucaucucg

SEQ ID NO: 448611 - RNA, 32 nt, Human
gcuguuggcugcacaucaggaaggcugugaug

SEQ ID NO: 448612 - RNA, 32 nt, Human
gcuguugggaggaacagaugagacaguggcua

SEQ ID NO: 448613 - RNA, 32 nt, Human
gcuguugggaggaagcagaggcagaugggaaa

SEQ ID NO: 448614 - RNA, 32 nt, Human
gcuguuggggagaaggaaaucugaggccccca

SEQ ID NO: 448615 - RNA, 32 nt, Human
gcuguugggggaagaagaguuuuuggacccau

SEQ ID NO: 448616 - RNA, 22 nt, Human
gcuguugggggagaagagggca

SEQ ID NO: 448617 - RNA, 32 nt, Human
gcuguuggggguuucccuguguggaccauggg

SEQ ID NO: 448618 - RNA, 32 nt, Human
gcuguugguggagguccugccuccaggaauag

SEQ ID NO: 448619 - RNA, 32 nt, Human
gcuguuguacaaaggaauugcagcugcuuaca

SEQ ID NO: 448620 - RNA, 32 nt, Human
gcuguuguaguuacaguaaauacacugugaag

SEQ ID NO: 448621 - RNA, 32 nt, Human
gcuguuguaucugucaaaagagaggagaggua

SEQ ID NO: 448622 - RNA, 32 nt, Human
gcuguugucacccaggcuggagugcaguggug

SEQ ID NO: 448623 - RNA, 32 nt, Human
gcuguugucaccggguuuggaaagcaccuuaa

SEQ ID NO: 448624 - RNA, 32 nt, Human
gcuguugucaucuguugaccacaaacacguuu

SEQ ID NO: 448625 - RNA, 32 nt, Human
gcuguugucauuuuucucagcaucuuuguuau

SEQ ID NO: 448626 - RNA, 32 nt, Human
gcuguugucgccuaggcuggagugcaaugaug

SEQ ID NO: 448627 - RNA, 32 nt, Human
gcuguugucucccaggcuggagugcaguggcg

SEQ ID NO: 448628 - RNA, 32 nt, Human
gcuguugugaucacucagcucagcuuuuguua

SEQ ID NO: 448629 - RNA, 32 nt, Human
gcuguuguggugaaggcuuccucgcuaaaagu

SEQ ID NO: 448630 - RNA, 21 nt, Human
gcuguugugucaacugggcca

SEQ ID NO: 448631 - RNA, 25 nt, Human
gcuguuguuaggaaggcaccaaaga

SEQ ID NO: 448632 - RNA, 32 nt, Human
gcuguuguugcccaggcuggagugcaauagca

SEQ ID NO: 448633 - RNA, 32 nt, Human
gcuguuguugcccaggcuggagugcaauggca

SEQ ID NO: 448634 - RNA, 32 nt, Human
gcuguuguugcccaggcuggagugcaauggcg

SEQ ID NO: 448635 - RNA, 26 nt, Human
gcuguuguuuuuugcuccuugagcua

SEQ ID NO: 448636 - RNA, 32 nt, Human
gcuguuuaaggguuuuaucugagccacuuuaa

SEQ ID NO: 448637 - RNA, 32 nt, Human
gcuguuuaccugcauuuguucacuuuuguuga

SEQ ID NO: 448638 - RNA, 32 nt, Human
gcuguuuacuuaagauucuguggugugacauc

SEQ ID NO: 448639 - RNA, 32 nt, Human
gcuguuuagagcugagcaaggccaagugggug

SEQ ID NO: 448640 - RNA, 32 nt, Human
gcuguuuauaguaaaauaaaacucccuaccuu

SEQ ID NO: 448641 - RNA, 24 nt, Human
gcuguuucaaaguucucuguggca

SEQ ID NO: 448642 - RNA, 32 nt, Human
gcuguuucacacuguauauguacauuguuuuc

SEQ ID NO: 448643 - RNA, 32 nt, Human
gcuguuucacagugccaaucuaguucccuccu

SEQ ID NO: 448644 - RNA, 32 nt, Human
gcuguuuccuggcuggagugcaguggcaugau

SEQ ID NO: 448645 - RNA, 32 nt, Human
gcuguuuccuuucaaaguucugggaggacgaa

SEQ ID NO: 448646 - RNA, 32 nt, Human
gcuguuucucccacauauucacauacgugucu

SEQ ID NO: 448647 - RNA, 32 nt, Human
gcuguuucuccgccggucuacuucccauauuu

SEQ ID NO: 448648 - RNA, 32 nt, Human
gcuguuucuuggaaccugcucuccugcuugcu

SEQ ID NO: 448649 - RNA, 32 nt, Human
gcuguuucuuggcucugcucagccaugccagg

SEQ ID NO: 448650 - RNA, 32 nt, Human
gcuguuugaaagcuucaccucaccuuucugca

SEQ ID NO: 448651 - RNA, 32 nt, Human
gcuguuugaaccugccugucuccuggauuuca

SEQ ID NO: 448652 - RNA, 31 nt, Human
gcuguuugacuucucugcugaagugauuucc

SEQ ID NO: 448653 - RNA, 32 nt, Human
gcuguuugcacagcuccaacugugcaugcuca

SEQ ID NO: 448654 - RNA, 32 nt, Human
gcuguuugcaucccugccaggagccuuaaacc

SEQ ID NO: 448655 - RNA, 32 nt, Human
gcuguuugcccaggaacuuaggguggguaccu

SEQ ID NO: 448656 - RNA, 32 nt, Human
gcuguuuggcagaguccuguccuggcuauggg

SEQ ID NO: 448657 - RNA, 32 nt, Human
gcuguuugggcagaauaaagacaagugacuug

SEQ ID NO: 448658 - RNA, 32 nt, Human
gcuguuuggggaggggguguguggagccgggu

SEQ ID NO: 448659 - RNA, 32 nt, Human
gcuguuugguaucaucaccugccauacauguu

SEQ ID NO: 448660 - RNA, 32 nt, Human
gcuguuugucaaggguggggcagcagcaacuu

SEQ ID NO: 448661 - RNA, 19 nt, Human
gcuguuugugcugcagcca

SEQ ID NO: 448662 - RNA, 32 nt, Human
gcuguuuucacucauuagcuccugagguaaac

SEQ ID NO: 448663 - RNA, 32 nt, Human
gcuguuuuccuccccucuguguacucccuuaa

SEQ ID NO: 448664 - RNA, 32 nt, Human
gcuguuuucucaugucucucccagugugaauu

SEQ ID NO: 448665 - RNA, 32 nt, Human
gcuguuuucuucuucuuguaguucuaauuuag

SEQ ID NO: 448666 - RNA, 32 nt, Human
gcuguuuucuugcaggugaagcuccugcaguc

SEQ ID NO: 448667 - RNA, 32 nt, Human
gcuguuuugaauaacauaggugcucuuccuca

SEQ ID NO: 448668 - RNA, 32 nt, Human
gcuguuuuuaucaaaaaggaacaugaggauca

SEQ ID NO: 448669 - RNA, 32 nt, Human
  misc_feature (4)..(4): n is a, c, g, or u
gcunugaaggaggcaauguucuucucauuuga

SEQ ID NO: 448670 - RNA, 32 nt, Human
gcuuaaaaauacugaauuuaccuucacaaaag

SEQ ID NO: 448671 - RNA, 32 nt, Human
gcuuaaaaggccauguucuuuccacuucaugu

SEQ ID NO: 448672 - RNA, 32 nt, Human
gcuuaaacccaggaggcaaaggcugcagugag

SEQ ID NO: 448673 - RNA, 32 nt, Human
gcuuaaacccaggaggcggagguugcagugag

SEQ ID NO: 448674 - RNA, 32 nt, Human
gcuuaaacccaggaggcggugguuguaggaag

SEQ ID NO: 448675 - RNA, 32 nt, Human
gcuuaaacccaggagguggagguugcagugag

SEQ ID NO: 448676 - RNA, 32 nt, Human
gcuuaaacccgggaggcagaggcugcagagag

SEQ ID NO: 448677 - RNA, 32 nt, Human
gcuuaaaguaucagugguugagaagagcuuuu

SEQ ID NO: 448678 - RNA, 17 nt, Human
gcuuaaauaacugugau

SEQ ID NO: 448679 - RNA, 32 nt, Human
gcuuaacacagccgggcuugggggcagucagg

SEQ ID NO: 448680 - RNA, 32 nt, Human
gcuuaacacccaccauccaggguccagcuccu

SEQ ID NO: 448681 - RNA, 32 nt, Human
gcuuaacagucuuauucucauucuuuauuuug

SEQ ID NO: 448682 - RNA, 32 nt, Human
gcuuaacaugaaacugucugcauuucuaccug

SEQ ID NO: 448683 - RNA, 32 nt, Human
gcuuaaccaagagugagaggauaugucauguu

SEQ ID NO: 448684 - RNA, 32 nt, Human
gcuuaaccacuuccuuuggucugcacccaaug

SEQ ID NO: 448685 - RNA, 32 nt, Human
gcuuaaccagugagggaagcacugaagagcgc

SEQ ID NO: 448686 - RNA, 32 nt, Human
gcuuaaccauuuccuaugugccaagcugugcc

SEQ ID NO: 448687 - RNA, 32 nt, Human
gcuuaacccaugagcuccaugugccuuuugga

SEQ ID NO: 448688 - RNA, 32 nt, Human
gcuuaaccuuggcuccuguggcauuuuacaaa

SEQ ID NO: 448689 - RNA, 32 nt, Human
gcuuaacgucucugaaccucagcuucuucauc

SEQ ID NO: 448690 - RNA, 32 nt, Human
gcuuaacucuugugguggccagccuccaagau

SEQ ID NO: 448691 - RNA, 32 nt, Human
gcuuaagacacaccugccuucauuucaaccac

SEQ ID NO: 448692 - RNA, 19 nt, Human
gcuuaagacacuccugcug

SEQ ID NO: 448693 - RNA, 32 nt, Human
gcuuaagauccagcugggacuccuagccuccc

SEQ ID NO: 448694 - RNA, 32 nt, Human
gcuuaagcaggagguagagaccaccuguugca

SEQ ID NO: 448695 - RNA, 32 nt, Human
gcuuaagcccagaaggucgaggcugcagugag

SEQ ID NO: 448696 - RNA, 32 nt, Human
gcuuaagcccaggaaguugagaccgcagagag

SEQ ID NO: 448697 - RNA, 32 nt, Human
gcuuaagcccaggagacagagguugcagugag

SEQ ID NO: 448698 - RNA, 32 nt, Human
gcuuaagcccaggagguucaggcugcaguaag

SEQ ID NO: 448699 - RNA, 22 nt, Human
gcuuaagcccaggaguucaaga

SEQ ID NO: 448700 - RNA, 32 nt, Human
gcuuaagcccaggaguucgagaucagccugga

SEQ ID NO: 448701 - RNA, 32 nt, Human
gcuuaagcccaggaguucgggguuacagugag

SEQ ID NO: 448702 - RNA, 32 nt, Human
gcuuaagcccaggaguuugagucuguaaugca

SEQ ID NO: 448703 - RNA, 32 nt, Human
gcuuaagccuaggagacggaggcuguagugag

SEQ ID NO: 448704 - RNA, 22 nt, Human
gcuuaagcucaagaguuugaga

SEQ ID NO: 448705 - RNA, 32 nt, Human
gcuuaagcugccgaggugacacagggcgcugu

SEQ ID NO: 448706 - RNA, 32 nt, Human
gcuuaaggacaaagucuagaaaccacuaucau

SEQ ID NO: 448707 - RNA, 32 nt, Human
gcuuaaggacagugguuaugacaugggggccu

SEQ ID NO: 448708 - RNA, 32 nt, Human
gcuuaaggaucacuguuggcaaugaccacuuc

SEQ ID NO: 448709 - RNA, 32 nt, Human
gcuuaaggcugcagacuaggaaaugggauucc

SEQ ID NO: 448710 - RNA, 32 nt, Human
gcuuaagggaggcggcggcagcgcggcggugg

SEQ ID NO: 448711 - RNA, 21 nt, Human
gcuuaagggucacagguucug

SEQ ID NO: 448712 - RNA, 32 nt, Human
gcuuaagucugggagguugaggcugcagugag

SEQ ID NO: 448713 - RNA, 21 nt, Human
gcuuaauaacaugcaagcuaa

SEQ ID NO: 448714 - RNA, 21 nt, Human
gcuuaauaacugaccuucuga

SEQ ID NO: 448715 - RNA, 19 nt, Human
gcuuaauaauuaauggcua

SEQ ID NO: 448716 - RNA, 32 nt, Human
gcuuaaucuggaacauaauuaaacauccuaca

SEQ ID NO: 448717 - RNA, 32 nt, Human
gcuuaaucuucucugccccaguucuuccugag

SEQ ID NO: 448718 - RNA, 32 nt, Human
gcuuaaucuuuucuaaaaucgccuguaugaaa

SEQ ID NO: 448719 - RNA, 22 nt, Human
gcuuaaugcaaccucuaccucc

SEQ ID NO: 448720 - RNA, 32 nt, Human
gcuuaauucccccaagcagaagaccagaucca

SEQ ID NO: 448721 - RNA, 32 nt, Human
gcuuaauuugcacauccccaccccuugacaac

SEQ ID NO: 448722 - RNA, 32 nt, Human
gcuuaauuuguuuuuaaauacuuuccuggcug

SEQ ID NO: 448723 - RNA, 32 nt, Human
gcuuacaacuagauaaaacauucuuuugacau

SEQ ID NO: 448724 - RNA, 32 nt, Human
gcuuacaacuuaggagcagcaccaacugaagg

SEQ ID NO: 448725 - RNA, 32 nt, Human
gcuuacaccaguaaucccagcacuuugggagg

SEQ ID NO: 448726 - RNA, 32 nt, Human
gcuuacaccuauaaucccagcacuuugggagg

SEQ ID NO: 448727 - RNA, 32 nt, Human
gcuuacaccuguaaccccagcacuuugggagg

SEQ ID NO: 448728 - RNA, 32 nt, Human
gcuuacaccuguaagcccagcacuuugggagg

SEQ ID NO: 448729 - RNA, 32 nt, Human
gcuuacaccuguaaucccaacacuuugcgagg

SEQ ID NO: 448730 - RNA, 32 nt, Human
gcuuacaccuguaaucccaacacuuugggaag

SEQ ID NO: 448731 - RNA, 32 nt, Human
gcuuacaccuguaaucccaaugcuuugggaga

SEQ ID NO: 448732 - RNA, 32 nt, Human
gcuuacaccuguaaucccagcacuuugggagg

SEQ ID NO: 448733 - RNA, 32 nt, Human
gcuuacaccuguaaucccaguacuuugggagg

SEQ ID NO: 448734 - RNA, 32 nt, Human
gcuuacaccuguaauccuaguacuuugggagg

SEQ ID NO: 448735 - RNA, 32 nt, Human
gcuuacaccuguaaucgcagcauuuugggagg

SEQ ID NO: 448736 - RNA, 32 nt, Human
gcuuacaccuguaaucugagcgcuuugggagg

SEQ ID NO: 448737 - RNA, 32 nt, Human
gcuuacaccuguaauuccagcacuuugggacg

SEQ ID NO: 448738 - RNA, 32 nt, Human
gcuuacaccugugaucccagcacuuugggagg

SEQ ID NO: 448739 - RNA, 32 nt, Human
gcuuacacuguugcaucacaagggacucaccc

SEQ ID NO: 448740 - RNA, 32 nt, Human
gcuuacagauaaccaaaaccuuagucaaucug

SEQ ID NO: 448741 - RNA, 20 nt, Human
gcuuacaggaagcuuuuugu

SEQ ID NO: 448742 - RNA, 32 nt, Human
gcuuacaggcugagccaagcccacggccaugc

SEQ ID NO: 448743 - RNA, 32 nt, Human
gcuuacauagccccacgaaucccccaagaggu

SEQ ID NO: 448744 - RNA, 20 nt, Human
gcuuacaucauccuccuguu

SEQ ID NO: 448745 - RNA, 32 nt, Human
gcuuacaucuguaaucccagcacuuugggagg

SEQ ID NO: 448746 - RNA, 22 nt, Human
gcuuacaucuuugucuguagua

SEQ ID NO: 448747 - RNA, 32 nt, Human
gcuuaccaaauggcaagcauugugcugauucc

SEQ ID NO: 448748 - RNA, 32 nt, Human
gcuuaccaccugccaccaagguuuccucucuu

SEQ ID NO: 448749 - RNA, 32 nt, Human
gcuuaccaccuuccaggguccagcacaggugc

SEQ ID NO: 448750 - RNA, 19 nt, Human
gcuuaccacuucccacuca

SEQ ID NO: 448751 - RNA, 32 nt, Human
gcuuacccagaaccacuccuccaggagagcug

SEQ ID NO: 448752 - RNA, 32 nt, Human
gcuuaccccuccauucacagccuccuuacucu

SEQ ID NO: 448753 - RNA, 32 nt, Human
gcuuaccccuguaaucccagcacuuugggagg

SEQ ID NO: 448754 - RNA, 20 nt, Human
gcuuaccugaccucuugcug

SEQ ID NO: 448755 - RNA, 32 nt, Human
gcuuaccugcaaaugaaucacuguggaaaugu

SEQ ID NO: 448756 - RNA, 32 nt, Human
gcuuaccugccugugccauucuuccucugggc

SEQ ID NO: 448757 - RNA, 32 nt, Human
gcuuaccuggcuuaggaaagaccaucauggcc

SEQ ID NO: 448758 - RNA, 17 nt, Human
gcuuaccuguaauucca

SEQ ID NO: 448759 - RNA, 19 nt, Human
gcuuaccuguaauuccagc

SEQ ID NO: 448760 - RNA, 32 nt, Human
gcuuaccugugggugggggagggagaccacac

SEQ ID NO: 448761 - RNA, 32 nt, Human
gcuuaccuucucuuccucauccagaaagcauc

SEQ ID NO: 448762 - RNA, 32 nt, Human
gcuuaccuucugcuguuuguuccaggcucacc

SEQ ID NO: 448763 - RNA, 32 nt, Human
gcuuaccuuguccccaaagggguggguugugg

SEQ ID NO: 448764 - RNA, 32 nt, Human
gcuuacgccuauaaucccagcacuuugggagg

SEQ ID NO: 448765 - RNA, 32 nt, Human
gcuuacgccuauaaucccagcuacucaggagg

SEQ ID NO: 448766 - RNA, 19 nt, Human
gcuuacgccugcaauccca

SEQ ID NO: 448767 - RNA, 32 nt, Human
gcuuacgccuguaaucccaauacuuugggagg

SEQ ID NO: 448768 - RNA, 32 nt, Human
gcuuacgccuguaaucccagcacuuugagagg

SEQ ID NO: 448769 - RNA, 32 nt, Human
gcuuacgccuguaaucccagcacuuugggacg

SEQ ID NO: 448770 - RNA, 32 nt, Human
gcuuacgccuguaaucccagcacuuugggagg

SEQ ID NO: 448771 - RNA, 32 nt, Human
gcuuacgccuguaaucccagcgcuuugggagg

SEQ ID NO: 448772 - RNA, 32 nt, Human
gcuuacgccuguaaucccaggacuuugggagg

SEQ ID NO: 448773 - RNA, 32 nt, Human
gcuuacgccuguaauccuagcacuuugggagg

SEQ ID NO: 448774 - RNA, 32 nt, Human
gcuuacgccuguaauuccagcacuuugggagg

SEQ ID NO: 448775 - RNA, 32 nt, Human
gcuuacgccuguuaucccagcacuuugggagg

SEQ ID NO: 448776 - RNA, 32 nt, Human
gcuuacgccuuuccuuuucuugcuccuucuuc

SEQ ID NO: 448777 - RNA, 32 nt, Human
gcuuacgcuuguagucccagcacuuugggagg

SEQ ID NO: 448778 - RNA, 32 nt, Human
gcuuacggcacaguagagagcuuccagggcug

SEQ ID NO: 448779 - RNA, 32 nt, Human
gcuuacuacaaccuccgccuccuggguucaag

SEQ ID NO: 448780 - RNA, 32 nt, Human
gcuuacuacgaccucugccuccuggguucaag

SEQ ID NO: 448781 - RNA, 32 nt, Human
gcuuacucacucagcaguuacccggccccugu

SEQ ID NO: 448782 - RNA, 32 nt, Human
gcuuacucuccccucaccuuuucuuuucacug

SEQ ID NO: 448783 - RNA, 19 nt, Human
gcuuacugauaaacuugag

SEQ ID NO: 448784 - RNA, 32 nt, Human
gcuuacugcaaccuccaccucccaggugcaag

SEQ ID NO: 448785 - RNA, 32 nt, Human
gcuuacugcaaccuccaccucccagguucaag

SEQ ID NO: 448786 - RNA, 32 nt, Human
gcuuacugcaaccuccaccucccggguucaag

SEQ ID NO: 448787 - RNA, 23 nt, Human
gcuuacugcaaccuccaccuccu

SEQ ID NO: 448788 - RNA, 32 nt, Human
gcuuacugcaaccuccaccuccuggguucaag

SEQ ID NO: 448789 - RNA, 32 nt, Human
gcuuacugcaaccuccgccuccuggguucaag

SEQ ID NO: 448790 - RNA, 32 nt, Human
gcuuacugcaaccuccgccuucccagauucaa

SEQ ID NO: 448791 - RNA, 32 nt, Human
gcuuacugcaacuuccagcuccuggguucgaa

SEQ ID NO: 448792 - RNA, 32 nt, Human
gcuuacugcaacuuccgacucccagguucaag

SEQ ID NO: 448793 - RNA, 32 nt, Human
gcuuacugcaagcuccgccuccuggguucacg

SEQ ID NO: 448794 - RNA, 32 nt, Human
gcuuacugcaagcucugccuccuggguucaag

SEQ ID NO: 448795 - RNA, 32 nt, Human
gcuuacugcacccucaaccuccugggcucaag

SEQ ID NO: 448796 - RNA, 23 nt, Human
gcuuacugcagccucaaccuccu

SEQ ID NO: 448797 - RNA, 32 nt, Human
gcuuacugcagccucaaccuccugggcucagg

SEQ ID NO: 448798 - RNA, 32 nt, Human
gcuuacugcauccccuuuucuaagugcuucac

SEQ ID NO: 448799 - RNA, 32 nt, Human
gcuuacugcccaggugacuugugcauugcuuu

SEQ ID NO: 448800 - RNA, 32 nt, Human
gcuuacuguaccuuccaacuccuggguucaag

SEQ ID NO: 448801 - RNA, 32 nt, Human
gcuuacugugacauccgccuccuggguucaaa

SEQ ID NO: 448802 - RNA, 32 nt, Human
gcuuacuuacugcaaugucuuuggcccuccuu

SEQ ID NO: 448803 - RNA, 32 nt, Human
gcuuacuuaguuuuucucuuccuugucuccca

SEQ ID NO: 448804 - RNA, 19 nt, Human
gcuuacuucaguccugcug

SEQ ID NO: 448805 - RNA, 32 nt, Human
gcuuacuucugccucugcccuggggcuggacu

SEQ ID NO: 448806 - RNA, 32 nt, Human
gcuuacuuugcaaagaaggaagaugguuguuu

SEQ ID NO: 448807 - RNA, 19 nt, Human
gcuuagaaaaaacagccug

SEQ ID NO: 448808 - RNA, 32 nt, Human
gcuuagaaaccccaucaacugaucuagugagu

SEQ ID NO: 448809 - RNA, 32 nt, Human
gcuuagaacaucaauuccucugcugccauuua

SEQ ID NO: 448810 - RNA, 32 nt, Human
gcuuagacugaggagcucugugggcagcccca

SEQ ID NO: 448811 - RNA, 32 nt, Human
gcuuagacugucuccugccacuuuaaauguca

SEQ ID NO: 448812 - RNA, 32 nt, Human
gcuuagagaauagaguuguucaggcugccaau

SEQ ID NO: 448813 - RNA, 32 nt, Human
gcuuagaggaacuugaguuaggauccguacuu

SEQ ID NO: 448814 - RNA, 32 nt, Human
gcuuagagguuucucacaccucuguucccagg

SEQ ID NO: 448815 - RNA, 18 nt, Human
gcuuagagugaaacuuga

SEQ ID NO: 448816 - RNA, 32 nt, Human
gcuuagaugagagcauaucaucaggaaaguuu

SEQ ID NO: 448817 - RNA, 32 nt, Human
gcuuagaugagguggugaaauagggguaucag

SEQ ID NO: 448818 - RNA, 32 nt, Human
gcuuagauguuccaguaaucuaauauggccac

SEQ ID NO: 448819 - RNA, 32 nt, Human
gcuuagcaaggagccaacauaacagaugggcu

SEQ ID NO: 448820 - RNA, 32 nt, Human
gcuuagcaugaaucuucuuuauuguccugauu

SEQ ID NO: 448821 - RNA, 32 nt, Human
gcuuagccauucagaagagaaaaauggaauau

SEQ ID NO: 448822 - RNA, 32 nt, Human
gcuuagcccagcucagggguggggaagaggcg

SEQ ID NO: 448823 - RNA, 32 nt, Human
gcuuagcccaguuuccagggaagcauuguuuu

SEQ ID NO: 448824 - RNA, 32 nt, Human
gcuuagccguccaggcuagagugcaguagugc

SEQ ID NO: 448825 - RNA, 32 nt, Human
gcuuagcucucugcuuuguucuugggagccaa

SEQ ID NO: 448826 - RNA, 20 nt, Human
gcuuagcuggagugcggugg

SEQ ID NO: 448827 - RNA, 32 nt, Human
gcuuagcugggcuguaaagaugaaggcaucaa

SEQ ID NO: 448828 - RNA, 32 nt, Human
gcuuagcuucaaggacaccugccuucaaagcc

SEQ ID NO: 448829 - RNA, 32 nt, Human
gcuuagcuuucugucugugaaugucuauauag

SEQ ID NO: 448830 - RNA, 32 nt, Human
gcuuaggaagcaugagggcaacuauagugagg

SEQ ID NO: 448831 - RNA, 32 nt, Human
gcuuaggaaugcccuuuauggaaagggcuaug

SEQ ID NO: 448832 - RNA, 32 nt, Human
gcuuaggaggcugaagcaggaggauugauuga

SEQ ID NO: 448833 - RNA, 32 nt, Human
gcuuaggaggggcggagacgcucacaucgucu

SEQ ID NO: 448834 - RNA, 32 nt, Human
gcuuaggagguugaggcugcagugagcugugc

SEQ ID NO: 448835 - RNA, 32 nt, Human
gcuuaggauggcuaugugaucagguguggcca

SEQ ID NO: 448836 - RNA, 32 nt, Human
gcuuaggccaugagccuccucaacaagcccaa

SEQ ID NO: 448837 - RNA, 32 nt, Human
gcuuaggccgcagaggucugugggccugagcc

SEQ ID NO: 448838 - RNA, 20 nt, Human
gcuuaggccgggcgcagugg

SEQ ID NO: 448839 - RNA, 32 nt, Human
gcuuaggcgagggagucaggcuggcuucggcc

SEQ ID NO: 448840 - RNA, 24 nt, Human
gcuuaggcgccaccacuaguacca

SEQ ID NO: 448841 - RNA, 32 nt, Human
gcuuagggagucacuauuggaggcagagaggc

SEQ ID NO: 448842 - RNA, 26 nt, Human
gcuuaggggacaagaguuugaacuca

SEQ ID NO: 448843 - RNA, 32 nt, Human
gcuuaggggccuuggaaugccugcuguccagc

SEQ ID NO: 448844 - RNA, 24 nt, Human
gcuuagguaggagaauagcuugag

SEQ ID NO: 448845 - RNA, 32 nt, Human
gcuuaggugucacccacuggccuucguggugu

SEQ ID NO: 448846 - RNA, 32 nt, Human
gcuuagguuuuucugucauccucagaucccac

SEQ ID NO: 448847 - RNA, 22 nt, Human
gcuuagucacauggccacaccc

SEQ ID NO: 448848 - RNA, 32 nt, Human
gcuuaguccaauugcagagaacucgcuuccca

SEQ ID NO: 448849 - RNA, 32 nt, Human
gcuuaguccagucugugcuccugggcuacaag

SEQ ID NO: 448850 - RNA, 32 nt, Human
gcuuagugcuaggacugagaggcugcaccaua

SEQ ID NO: 448851 - RNA, 32 nt, Human
gcuuagugcucacuaggggacaugcacaugga

SEQ ID NO: 448852 - RNA, 32 nt, Human
gcuuagugcucagagcuggggagggagguucc

SEQ ID NO: 448853 - RNA, 32 nt, Human
gcuuaguggagaugggcaccacugccauuugc

SEQ ID NO: 448854 - RNA, 32 nt, Human
gcuuaguggagugcuuaggguaguuggccagg

SEQ ID NO: 448855 - RNA, 21 nt, Human
gcuuaguggggacccagggca

SEQ ID NO: 448856 - RNA, 23 nt, Human
gcuuaguguccucauccguuaaa

SEQ ID NO: 448857 - RNA, 32 nt, Human
gcuuaguuacaacuguuaaugugugaccugcu

SEQ ID NO: 448858 - RNA, 32 nt, Human
gcuuaguuaggaaggcaguaggauguggccug

SEQ ID NO: 448859 - RNA, 32 nt, Human
gcuuaguuccaaugcauuuggcuccagaaaga

SEQ ID NO: 448860 - RNA, 32 nt, Human
gcuuaguucugagccauuuauucugcuacacu

SEQ ID NO: 448861 - RNA, 32 nt, Human
gcuuaguugcuucccaccccagccugacacac

SEQ ID NO: 448862 - RNA, 32 nt, Human
gcuuauaacauccugacuaugcuuacaaauau

SEQ ID NO: 448863 - RNA, 19 nt, Human
gcuuauaccuguaauccua

SEQ ID NO: 448864 - RNA, 32 nt, Human
gcuuauaccuguaauccuagcacuuugggagg

SEQ ID NO: 448865 - RNA, 32 nt, Human
gcuuauaguccuggggaucagaauuccaaaau

SEQ ID NO: 448866 - RNA, 32 nt, Human
gcuuauaugcuaacucuuuucauguuagcaaa

SEQ ID NO: 448867 - RNA, 32 nt, Human
gcuuaucaggacuuccagagucaugcaugaac

SEQ ID NO: 448868 - RNA, 21 nt, Human
gcuuaucccccagacccugcu

SEQ ID NO: 448869 - RNA, 32 nt, Human
gcuuaucccgggaauucaagguugcagugagc

SEQ ID NO: 448870 - RNA, 32 nt, Human
gcuuaucccuucugcucucuccccucacccag

SEQ ID NO: 448871 - RNA, 32 nt, Human
gcuuauccuaacaaucuucauggcaggauuuu

SEQ ID NO: 448872 - RNA, 32 nt, Human
gcuuauccuucagagcaaugaccugcaugcag

SEQ ID NO: 448873 - RNA, 32 nt, Human
gcuuaucuacagcccuaaucugcugauugaac

SEQ ID NO: 448874 - RNA, 19 nt, Human
gcuuaucucaccucugcug

SEQ ID NO: 448875 - RNA, 32 nt, Human
gcuuaucuccaauaaacaucuauguuaaaucc

SEQ ID NO: 448876 - RNA, 32 nt, Human
gcuuaucucugccuccuuccuccuccuuccca

SEQ ID NO: 448877 - RNA, 32 nt, Human
gcuuaucugauuugccuccuuuggaaaggcug

SEQ ID NO: 448878 - RNA, 32 nt, Human
gcuuaucuguuggcuucucuuggccuguggga

SEQ ID NO: 448879 - RNA, 17 nt, Human
gcuuaucuucuuugaua

SEQ ID NO: 448880 - RNA, 32 nt, Human
gcuuaugagagccaaguagucaguggaagaga

SEQ ID NO: 448881 - RNA, 31 nt, Human
gcuuaugaguuauuucacacauuccugagca

SEQ ID NO: 448882 - RNA, 32 nt, Human
gcuuaugaucugagcaaaaugugaacuucagu

SEQ ID NO: 448883 - RNA, 19 nt, Human
gcuuaugauuuauccugcu

SEQ ID NO: 448884 - RNA, 32 nt, Human
gcuuaugcagaacaucucugugaaacgcugcu

SEQ ID NO: 448885 - RNA, 32 nt, Human
gcuuaugcaucuggugggagaggguggggagg

SEQ ID NO: 448886 - RNA, 32 nt, Human
gcuuaugcccauaaucacagcacuucgggagg

SEQ ID NO: 448887 - RNA, 32 nt, Human
gcuuaugccuaggagguugaggcugcagugag

SEQ ID NO: 448888 - RNA, 32 nt, Human
gcuuaugccuauaauccuagcacuuugggagg

SEQ ID NO: 448889 - RNA, 32 nt, Human
gcuuaugccuguaaucccacuuugggaggcca

SEQ ID NO: 448890 - RNA, 32 nt, Human
gcuuaugccuguaaucccagcacucugggagg

SEQ ID NO: 448891 - RNA, 32 nt, Human
gcuuaugccuguaaucccagcacuuggggaag

SEQ ID NO: 448892 - RNA, 32 nt, Human
gcuuaugccuguaaucccagcacuuugcaggc

SEQ ID NO: 448893 - RNA, 32 nt, Human
gcuuaugccuguaaucccagcacuuuggaagg

SEQ ID NO: 448894 - RNA, 32 nt, Human
gcuuaugccuguaaucccagcacuuugggagg

SEQ ID NO: 448895 - RNA, 32 nt, Human
gcuuaugccuguaaucccagcacuuuggguga

SEQ ID NO: 448896 - RNA, 32 nt, Human
gcuuaugccuguaaucccagcaugcugggagg

SEQ ID NO: 448897 - RNA, 32 nt, Human
gcuuaugccuguaaucccgguacuuugggagg

SEQ ID NO: 448898 - RNA, 32 nt, Human
gcuuaugccuguaaucccugcacuuugggaag

SEQ ID NO: 448899 - RNA, 32 nt, Human
gcuuaugccuguaauccuagaacuuugggagg

SEQ ID NO: 448900 - RNA, 32 nt, Human
gcuuaugccuguaauccuagcgcuuugggagg

SEQ ID NO: 448901 - RNA, 32 nt, Human
gcuuaugccuguaauugcagcacuuuuagagg

SEQ ID NO: 448902 - RNA, 32 nt, Human
gcuuaugcuacuuaaucagaaucuugagaaaa

SEQ ID NO: 448903 - RNA, 32 nt, Human
gcuuaugcuuguaaucccagcacuuugggagg

SEQ ID NO: 448904 - RNA, 32 nt, Human
gcuuauggaagacauaccugcaauggaagcug

SEQ ID NO: 448905 - RNA, 29 nt, Human
gcuuauggccauauguauggccauuugua

SEQ ID NO: 448906 - RNA, 32 nt, Human
gcuuauggccggucacagccucagugugacuc

SEQ ID NO: 448907 - RNA, 32 nt, Human
gcuuauggcguuggucacuggcaggcucagag

SEQ ID NO: 448908 - RNA, 32 nt, Human
gcuuaugggaaacugcugauucccuucguguc

SEQ ID NO: 448909 - RNA, 32 nt, Human
gcuuaugggaauccugagcugcuuuucaccau

SEQ ID NO: 448910 - RNA, 32 nt, Human
gcuuaugggauccuccugccucagcuuccuaa

SEQ ID NO: 448911 - RNA, 32 nt, Human
gcuuaugggggaaggugacgccuucugggccc

SEQ ID NO: 448912 - RNA, 32 nt, Human
gcuuauggugaguguggcugggggugcagaga

SEQ ID NO: 448913 - RNA, 32 nt, Human
gcuuaugguuccuuuucucaggagaggauuuu

SEQ ID NO: 448914 - RNA, 32 nt, Human
gcuuaugucaucucuguuauuguccccagcuu

SEQ ID NO: 448915 - RNA, 32 nt, Human
gcuuaugucuguaaucccagcacuuuugagag

SEQ ID NO: 448916 - RNA, 32 nt, Human
gcuuauuccucccauuccucuacuuuacugug

SEQ ID NO: 448917 - RNA, 32 nt, Human
gcuuauucuccucccuguuaucugcuagaucu

SEQ ID NO: 448918 - RNA, 32 nt, Human
gcuuauugaagccucugccuccuggguucaag

SEQ ID NO: 448919 - RNA, 32 nt, Human
gcuuauugcaaccuccgcuuccuggguucaaa

SEQ ID NO: 448920 - RNA, 32 nt, Human
gcuuauugcagucuccaccuccugaguucaag

SEQ ID NO: 448921 - RNA, 32 nt, Human
gcuuauugcccaggcuggagugcaauggcacg

SEQ ID NO: 448922 - RNA, 23 nt, Human
gcuuauuggcaccagggacagag

SEQ ID NO: 448923 - RNA, 32 nt, Human
gcuuauuggugauccuagaugcagccugcaac

SEQ ID NO: 448924 - RNA, 31 nt, Human
gcuuauuuaucuguuugccaugcagaaaaua

SEQ ID NO: 448925 - RNA, 18 nt, Human
gcuuauuugccaaagcug

SEQ ID NO: 448926 - RNA, 15 nt, Human
gcuuauuugcccugc

SEQ ID NO: 448927 - RNA, 19 nt, Human
gcuuauuuguaaacucugu

SEQ ID NO: 448928 - RNA, 32 nt, Human
gcuuauuuucuuuccgcccccuccggggcuga

SEQ ID NO: 448929 - RNA, 32 nt, Human
gcuucaaaaagccacagcagagcauugucacc

SEQ ID NO: 448930 - RNA, 32 nt, Human
gcuucaaaacuagaagugcgcaugaaggaugc

SEQ ID NO: 448931 - RNA, 32 nt, Human
gcuucaaacagaguccagcacaguguggcacc

SEQ ID NO: 448932 - RNA, 32 nt, Human
gcuucaaagcaaacccuuacacacacaaagcc

SEQ ID NO: 448933 - RNA, 22 nt, Human
gcuucaaccaaaugaaacuuga

SEQ ID NO: 448934 - RNA, 32 nt, Human
gcuucaacugaguagagagcagccuggguucc

SEQ ID NO: 448935 - RNA, 32 nt, Human
gcuucaacuguacuucauuuaaugccauuaau

SEQ ID NO: 448936 - RNA, 32 nt, Human
gcuucaacuuccugggcucaaguaauccuccc

SEQ ID NO: 448937 - RNA, 25 nt, Human
gcuucaacuugauuaucuugugaaa

SEQ ID NO: 448938 - RNA, 32 nt, Human
gcuucaagauccugcuaccauuuucuuuuggg

SEQ ID NO: 448939 - RNA, 32 nt, Human
gcuucaagcaauccuccugccuuggccuccca

SEQ ID NO: 448940 - RNA, 32 nt, Human
gcuucaaggaaugggaaagggaggguaggaag

SEQ ID NO: 448941 - RNA, 32 nt, Human
gcuucaaggccuggggagccuguccuuccaug

SEQ ID NO: 448942 - RNA, 32 nt, Human
gcuucaagggagcauuauagggcagaaaacaa

SEQ ID NO: 448943 - RNA, 24 nt, Human
gcuucaagggauccucccaccuca

SEQ ID NO: 448944 - RNA, 32 nt, Human
gcuucaagggcagccuggaggaaagaggugug

SEQ ID NO: 448945 - RNA, 32 nt, Human
gcuucaagucucucucugugacuggugauuuu

SEQ ID NO: 448946 - RNA, 32 nt, Human
gcuucaaguucagaucaggcaaggaacaaacc

SEQ ID NO: 448947 - RNA, 32 nt, Human
gcuucaauaaaucugugcuuuuauugcuucaa

SEQ ID NO: 448948 - RNA, 32 nt, Human
gcuucaaugccacggccugaccggaguauccg

SEQ ID NO: 448949 - RNA, 32 nt, Human
gcuucaauucaggagcuuugaaggaaguccaa

SEQ ID NO: 448950 - RNA, 32 nt, Human
gcuucacaaaagcugauagaguacaaucccac

SEQ ID NO: 448951 - RNA, 20 nt, Human
gcuucacaaaugaaaaggag

SEQ ID NO: 448952 - RNA, 19 nt, Human
gcuucacaaaugugcugag

SEQ ID NO: 448953 - RNA, 32 nt, Human
gcuucacaagcaggcagcugaacacuucguac

SEQ ID NO: 448954 - RNA, 32 nt, Human
gcuucacaagggcaggagagcccuccaucacu

SEQ ID NO: 448955 - RNA, 32 nt, Human
gcuucacagccucuauggcuacaugguucuuc

SEQ ID NO: 448956 - RNA, 32 nt, Human
gcuucacaguaggaaaggguaaguggggccca

SEQ ID NO: 448957 - RNA, 32 nt, Human
gcuucacaguggacucuccacgcccagcuagc

SEQ ID NO: 448958 - RNA, 32 nt, Human
gcuucacaugguuaaaaacaagcacaauuuug

SEQ ID NO: 448959 - RNA, 32 nt, Human
gcuucaccaaagaggaccccacucugaagcca

SEQ ID NO: 448960 - RNA, 32 nt, Human
gcuucaccacucccucugggcugugauucugu

SEQ ID NO: 448961 - RNA, 32 nt, Human
gcuucaccacugggcucuuccucccagaccca

SEQ ID NO: 448962 - RNA, 32 nt, Human
gcuucaccauccugggucaagcaguguuccuu

SEQ ID NO: 448963 - RNA, 32 nt, Human
gcuucacccaucacugguggguugcaggaaca

SEQ ID NO: 448964 - RNA, 32 nt, Human
gcuucacccugaguuuuguuuuguauuguuuu

SEQ ID NO: 448965 - RNA, 32 nt, Human
gcuucaccgaccgaucuccaucggcugcggcc

SEQ ID NO: 448966 - RNA, 32 nt, Human
gcuucaccgagucccucaagccccaggaggca

SEQ ID NO: 448967 - RNA, 32 nt, Human
gcuucaccucauuccucccacuggccuuaccc

SEQ ID NO: 448968 - RNA, 32 nt, Human
gcuucaccuggaggggccagagggucaccugg

SEQ ID NO: 448969 - RNA, 32 nt, Human
gcuucaccugggacagcagacacagcagaacc

SEQ ID NO: 448970 - RNA, 32 nt, Human
gcuucacgagacugaccagccuggugagauaa

SEQ ID NO: 448971 - RNA, 32 nt, Human
gcuucacgccuguaauucuagcacuuugggag

SEQ ID NO: 448972 - RNA, 18 nt, Human
gcuucacgguaagcugag

SEQ ID NO: 448973 - RNA, 32 nt, Human
gcuucacgugguuuggagaugggugggggaaa

SEQ ID NO: 448974 - RNA, 21 nt, Human
gcuucacuauacaguauucca

SEQ ID NO: 448975 - RNA, 32 nt, Human
gcuucacucggaucacgcccuccugggcacag

SEQ ID NO: 448976 - RNA, 32 nt, Human
gcuucacuuccguuccagccucagcggcagcu

SEQ ID NO: 448977 - RNA, 32 nt, Human
gcuucacuugcuccuucacuucccaguuccgc

SEQ ID NO: 448978 - RNA, 32 nt, Human
gcuucagaaacucccaauuccaaaaagcugag

SEQ ID NO: 448979 - RNA, 32 nt, Human
gcuucagaagccaugacuccccaacucugccu

SEQ ID NO: 448980 - RNA, 21 nt, Human
gcuucagaagcccugcuccca

SEQ ID NO: 448981 - RNA, 32 nt, Human
gcuucagacuuagaggugaauaaauugagguc

SEQ ID NO: 448982 - RNA, 32 nt, Human
gcuucagagagggagaagcacugugaggccuc

SEQ ID NO: 448983 - RNA, 18 nt, Human
gcuucagagcuucccaug

SEQ ID NO: 448984 - RNA, 32 nt, Human
gcuucagaggcuaauauaacaaaaccaauaaa

SEQ ID NO: 448985 - RNA, 32 nt, Human
gcuucagaugggaagaagucagaggaaccaga

SEQ ID NO: 448986 - RNA, 32 nt, Human
gcuucagcaggagauccuucccagaagguuga

SEQ ID NO: 448987 - RNA, 22 nt, Human
gcuucagccccagacccugcag

SEQ ID NO: 448988 - RNA, 22 nt, Human
gcuucagccccaggcccuaagc

SEQ ID NO: 448989 - RNA, 32 nt, Human
gcuucagcccgggagauugaggcugcggugag

SEQ ID NO: 448990 - RNA, 32 nt, Human
gcuucagccuccauucucacuuuccuucucaa

SEQ ID NO: 448991 - RNA, 20 nt, Human
gcuucagccucgccugcugc

SEQ ID NO: 448992 - RNA, 32 nt, Human
gcuucagccuggaccagggguggacccugugc

SEQ ID NO: 448993 - RNA, 22 nt, Human
gcuucagccugggcaacaagag

SEQ ID NO: 448994 - RNA, 18 nt, Human
gcuucagccuguguaguc

SEQ ID NO: 448995 - RNA, 32 nt, Human
gcuucagcgaugacuccagucuggguguccca

SEQ ID NO: 448996 - RNA, 32 nt, Human
gcuucagcuccuuuacuugcugcuccaacugc

SEQ ID NO: 448997 - RNA, 32 nt, Human
gcuucagcuggcagagaggcuuucccagaaaa

SEQ ID NO: 448998 - RNA, 32 nt, Human
gcuucagcuucucggguguacaacagcagcug

SEQ ID NO: 448999 - RNA, 32 nt, Human
gcuucagcuuucuuacagcuauucugggccug

SEQ ID NO: 449000 - RNA, 32 nt, Human
gcuucaggaaguguggcgaccagaaagcguag

SEQ ID NO: 449001 - RNA, 32 nt, Human
gcuucaggaccugcuuggucagcugcagguug

SEQ ID NO: 449002 - RNA, 32 nt, Human
gcuucaggauacuuccaggagacagagccacc

SEQ ID NO: 449003 - RNA, 32 nt, Human
gcuucaggaugaaaggugagaccccggugaac

SEQ ID NO: 449004 - RNA, 26 nt, Human
gcuucaggcccccgccuuggccugug

SEQ ID NO: 449005 - RNA, 32 nt, Human
gcuucaggccugaagagcagagaagcccuguu

SEQ ID NO: 449006 - RNA, 32 nt, Human
gcuucaggcucugaagcacuccccaucucagg

SEQ ID NO: 449007 - RNA, 32 nt, Human
gcuucaggcugcucccugaccccucugaccuu

SEQ ID NO: 449008 - RNA, 32 nt, Human
gcuucaggcugcuucugcucugugucugccca

SEQ ID NO: 449009 - RNA, 32 nt, Human
gcuucaggcuguagagggaauuuggucugaag

SEQ ID NO: 449010 - RNA, 32 nt, Human
gcuucagggacuuaccuuccuggucauuuuua

SEQ ID NO: 449011 - RNA, 32 nt, Human
gcuucaggguaaaacugucuacuagcaagauu

SEQ ID NO: 449012 - RNA, 32 nt, Human
gcuucaggguacagcucccccgcagccagaag

SEQ ID NO: 449013 - RNA, 32 nt, Human
gcuucagguccaggcuguguuuggcuuucagg

SEQ ID NO: 449014 - RNA, 22 nt, Human
gcuucaguagaaugaaacguga

SEQ ID NO: 449015 - RNA, 32 nt, Human
gcuucagucaacugaccaaacacugcuuugaa

SEQ ID NO: 449016 - RNA, 24 nt, Human
gcuucagucagcgcaaguauucca

SEQ ID NO: 449017 - RNA, 32 nt, Human
gcuucagucucagcagagaauuuccuaaaugc

SEQ ID NO: 449018 - RNA, 32 nt, Human
gcuucagucuccaggagacaguggucaccucu

SEQ ID NO: 449019 - RNA, 32 nt, Human
gcuucagugagcuaugggugcaccacuacaca

SEQ ID NO: 449020 - RNA, 32 nt, Human
gcuucagugccugccuuggggugaggaagaca

SEQ ID NO: 449021 - RNA, 32 nt, Human
gcuucagugcggcucugucccugcugccgccu

SEQ ID NO: 449022 - RNA, 20 nt, Human
gcuucagugcugugugcucu

SEQ ID NO: 449023 - RNA, 32 nt, Human
gcuucaguggacaaagaagaugagacauuuca

SEQ ID NO: 449024 - RNA, 32 nt, Human
gcuucaguggccaccagccucgucacauacac

SEQ ID NO: 449025 - RNA, 32 nt, Human
gcuucaguguuaacacagcagugauugucagc

SEQ ID NO: 449026 - RNA, 32 nt, Human
gcuucaguucauucccccaucuugcugccaag

SEQ ID NO: 449027 - RNA, 20 nt, Human
gcuucaguuucaacaucugu

SEQ ID NO: 449028 - RNA, 23 nt, Human
gcuucaguuucccauggcuggaa

SEQ ID NO: 449029 - RNA, 32 nt, Human
gcuucaguuucccccagcacccaggagagccu

SEQ ID NO: 449030 - RNA, 24 nt, Human
gcuucaguuuccucaucugugaaa

SEQ ID NO: 449031 - RNA, 24 nt, Human
gcuucaguuuccuggucuguagaa

SEQ ID NO: 449032 - RNA, 20 nt, Human
gcuucaguuuucucaucugu

SEQ ID NO: 449033 - RNA, 22 nt, Human
gcuucaguuuuucaugucccca

SEQ ID NO: 449034 - RNA, 24 nt, Human
gcuucauacucuugagcacauccu

SEQ ID NO: 449035 - RNA, 32 nt, Human
gcuucauaucucucccuucuuuaccuucauuu

SEQ ID NO: 449036 - RNA, 32 nt, Human
gcuucauccaauauaucauucaaaugcaucug

SEQ ID NO: 449037 - RNA, 32 nt, Human
gcuucauccaugucccuacaaaggacaugaac

SEQ ID NO: 449038 - RNA, 32 nt, Human
gcuucauccaugucccugcaaaggacaugguc

SEQ ID NO: 449039 - RNA, 32 nt, Human
gcuucauccauguuccuacaaaggacaugaac

SEQ ID NO: 449040 - RNA, 32 nt, Human
gcuucaucccccaagauggccgaugaucuggc

SEQ ID NO: 449041 - RNA, 21 nt, Human
gcuucauccguggaacuugag

SEQ ID NO: 449042 - RNA, 32 nt, Human
gcuucauccuugggccagaaggcuccaacccu

SEQ ID NO: 449043 - RNA, 32 nt, Human
gcuucaucguggggcucucaguuccgauuccc

SEQ ID NO: 449044 - RNA, 18 nt, Human
gcuucaucuaaaacuuug

SEQ ID NO: 449045 - RNA, 32 nt, Human
gcuucaucuaugucccuacaaaggacaugaac

SEQ ID NO: 449046 - RNA, 32 nt, Human
gcuucaucucugccucucuccaccccacccca

SEQ ID NO: 449047 - RNA, 21 nt, Human
gcuucaucugcaaagggcccu

SEQ ID NO: 449048 - RNA, 24 nt, Human
gcuucaucuguagaaacagccacu

SEQ ID NO: 449049 - RNA, 24 nt, Human
gcuucaucuguauuuacagcugcu

SEQ ID NO: 449050 - RNA, 24 nt, Human
gcuucaucuguauuuauagccacu

SEQ ID NO: 449051 - RNA, 24 nt, Human
gcuucaucuguauuuauggcuacu

SEQ ID NO: 449052 - RNA, 24 nt, Human
gcuucaucuguauuuccagccacu

SEQ ID NO: 449053 - RNA, 32 nt, Human
gcuucaugagcagcugcuugaguucaggaagu

SEQ ID NO: 449054 - RNA, 18 nt, Human
gcuucaugcagacuugag

SEQ ID NO: 449055 - RNA, 32 nt, Human
gcuucaugccagguuaggaaggcagcauucca

SEQ ID NO: 449056 - RNA, 32 nt, Human
gcuucaugccucccuucucccagcucaggugg

SEQ ID NO: 449057 - RNA, 32 nt, Human
gcuucaugccuguaauccaagcacuuugagag

SEQ ID NO: 449058 - RNA, 30 nt, Human
gcuucaugcugaggaagauucuugaagacu

SEQ ID NO: 449059 - RNA, 32 nt, Human
gcuucauggucuucguggacaugugagggccg

SEQ ID NO: 449060 - RNA, 32 nt, Human
gcuucaugguguuccuggaaggcagaugagcu

SEQ ID NO: 449061 - RNA, 32 nt, Human
gcuucaugucacagcauuuaguuuguucaaca

SEQ ID NO: 449062 - RNA, 32 nt, Human
gcuucaugugcaugugcacacugcccccugau

SEQ ID NO: 449063 - RNA, 32 nt, Human
gcuucauguguauggcuauuuguauuuaacaa

SEQ ID NO: 449064 - RNA, 32 nt, Human
gcuucauuaaauuaaucucacuuugaauaucu

SEQ ID NO: 449065 - RNA, 32 nt, Human
gcuucauuaagaguuuuauacugugaagauuu

SEQ ID NO: 449066 - RNA, 32 nt, Human
gcuucauuauucaccauccagagaccaaauaa

SEQ ID NO: 449067 - RNA, 32 nt, Human
gcuucauucaccgaacuuugugcucaaaaugc

SEQ ID NO: 449068 - RNA, 32 nt, Human
gcuucauucagucuauggaccaggaagaauuu

SEQ ID NO: 449069 - RNA, 32 nt, Human
gcuucauucucacccuguauuucuuuagcccu

SEQ ID NO: 449070 - RNA, 32 nt, Human
gcuucauucugucacccaggcuggagugcaaa

SEQ ID NO: 449071 - RNA, 32 nt, Human
gcuucauuuaggucucacaacucacuagacau

SEQ ID NO: 449072 - RNA, 32 nt, Human
gcuucauuuauuccuuuccuuucuauccuuuu

SEQ ID NO: 449073 - RNA, 32 nt, Human
gcuucauuucuuccacuucuccagaaaaugga

SEQ ID NO: 449074 - RNA, 32 nt, Human
gcuucauuugacacccagagucugacuuugga

SEQ ID NO: 449075 - RNA, 32 nt, Human
gcuuccaaaagaucaaguugcuuuuguuuguu

SEQ ID NO: 449076 - RNA, 32 nt, Human
gcuuccaaaagcuugugaguuggggaauccau

SEQ ID NO: 449077 - RNA, 32 nt, Human
gcuuccaaaagugcccgaggcagcccuuccag

SEQ ID NO: 449078 - RNA, 32 nt, Human
gcuuccaaaggaucaggggaucacccugagaa

SEQ ID NO: 449079 - RNA, 32 nt, Human
gcuuccaaagugauggacaggaaggggcagag

SEQ ID NO: 449080 - RNA, 32 nt, Human
gcuuccaacacucacuggcugugugacuuugg

SEQ ID NO: 449081 - RNA, 32 nt, Human
gcuuccaacccagccaggggucuuaggugucc

SEQ ID NO: 449082 - RNA, 32 nt, Human
gcuuccaacuuaggcuuuuggcucagaagauu

SEQ ID NO: 449083 - RNA, 32 nt, Human
gcuuccaagaaagaggaggagaguugaaaaga

SEQ ID NO: 449084 - RNA, 32 nt, Human
gcuuccaagcagcaugcuacaggccagccuuc

SEQ ID NO: 449085 - RNA, 19 nt, Human
gcuuccaagcccccggcac

SEQ ID NO: 449086 - RNA, 32 nt, Human
gcuuccaaguucugagagcccaaaaaggccag

SEQ ID NO: 449087 - RNA, 32 nt, Human
gcuuccaaucauggcagaaaagaaaggggcgc

SEQ ID NO: 449088 - RNA, 32 nt, Human
gcuuccacaaaacauagcaggggaacuauuau

SEQ ID NO: 449089 - RNA, 32 nt, Human
gcuuccaccaggagucuggagugcaauggcac

SEQ ID NO: 449090 - RNA, 32 nt, Human
gcuuccacccuuucacacaauucaugucauca

SEQ ID NO: 449091 - RNA, 21 nt, Human
gcuuccaccucuccacuccug

SEQ ID NO: 449092 - RNA, 32 nt, Human
gcuuccaccucuccacuccugugucuaccugg

SEQ ID NO: 449093 - RNA, 32 nt, Human
gcuuccaccugcuaggagggugguguacucua

SEQ ID NO: 449094 - RNA, 15 nt, Human
gcuuccaccugcucc

SEQ ID NO: 449095 - RNA, 32 nt, Human
gcuuccacgcauggcuucugccauugguucuc

SEQ ID NO: 449096 - RNA, 32 nt, Human
gcuuccacggcagcaucuucagcucuuggguu

SEQ ID NO: 449097 - RNA, 32 nt, Human
gcuuccacgugggccucacauuccaguccuuu

SEQ ID NO: 449098 - RNA, 32 nt, Human
gcuuccacuacaucaggaggugaaggaggaaa

SEQ ID NO: 449099 - RNA, 32 nt, Human
gcuuccacugcacccccucccaagggacacag

SEQ ID NO: 449100 - RNA, 21 nt, Human
gcuuccacugcauccuggcca

SEQ ID NO: 449101 - RNA, 32 nt, Human
gcuuccacuguggcucaauccuauguucugaa

SEQ ID NO: 449102 - RNA, 23 nt, Human
gcuuccagaaacacccacaggca

SEQ ID NO: 449103 - RNA, 22 nt, Human
gcuuccagaaagcccagggcag

SEQ ID NO: 449104 - RNA, 32 nt, Human
gcuuccagaaaugccacacuugugugccacag

SEQ ID NO: 449105 - RNA, 32 nt, Human
gcuuccagaaccuggcaggaggcugguguauc

SEQ ID NO: 449106 - RNA, 20 nt, Human
gcuuccagaacuacagacag

SEQ ID NO: 449107 - RNA, 24 nt, Human
gcuuccagaggaagaagcaggcag

SEQ ID NO: 449108 - RNA, 32 nt, Human
gcuuccagaggaagacgagggagcaggagcuu

SEQ ID NO: 449109 - RNA, 24 nt, Human
gcuuccagaggaaggaacaggcag

SEQ ID NO: 449110 - RNA, 23 nt, Human
gcuuccagaggaaggaucaggca

SEQ ID NO: 449111 - RNA, 22 nt, Human
gcuuccagcagcacaaaagcag

SEQ ID NO: 449112 - RNA, 21 nt, Human
gcuuccagcagugccuucccu

SEQ ID NO: 449113 - RNA, 32 nt, Human
gcuuccagcauuuucauggauuacaaaugucu

SEQ ID NO: 449114 - RNA, 32 nt, Human
gcuuccagccaagaaaauagacugaggugcuu

SEQ ID NO: 449115 - RNA, 32 nt, Human
gcuuccagcccacuccagccaggggagcaggg

SEQ ID NO: 449116 - RNA, 32 nt, Human
gcuuccagcccuacauugaaccaccuucuuuc

SEQ ID NO: 449117 - RNA, 32 nt, Human
gcuuccagccucuaccaugcaggagagaacac

SEQ ID NO: 449118 - RNA, 32 nt, Human
gcuuccaggaacucagccugcacagaggcagc

SEQ ID NO: 449119 - RNA, 32 nt, Human
gcuuccaggccuggcuuccucucuugggagac

SEQ ID NO: 449120 - RNA, 32 nt, Human
gcuuccaggccugguuccugggcggguguuga

SEQ ID NO: 449121 - RNA, 32 nt, Human
gcuuccaggcuggauggagugcccuggcgcga

SEQ ID NO: 449122 - RNA, 19 nt, Human
gcuuccagggacccaggca

SEQ ID NO: 449123 - RNA, 22 nt, Human
gcuuccagggucacuccuugcc

SEQ ID NO: 449124 - RNA, 32 nt, Human
gcuuccagguauggagaaagagacaaagagga

SEQ ID NO: 449125 - RNA, 22 nt, Human
gcuuccaguacugcacuuugcc

SEQ ID NO: 449126 - RNA, 22 nt, Human
ggaacccaugauuguuaauuca

SEQ ID NO: 449127 - RNA, 32 nt, Human
ggaaccccaccugacccaagcccaccugcugc

SEQ ID NO: 449128 - RNA, 32 nt, Human
ggaaccccauagccccucuccaccucacccca

SEQ ID NO: 449129 - RNA, 20 nt, Human
ggaaccccaucucuacaaaa

SEQ ID NO: 449130 - RNA, 18 nt, Human
ggaaccccaucucuacua

SEQ ID NO: 449131 - RNA, 32 nt, Human
ggaaccccaucuucagcccagccuguccgucc

SEQ ID NO: 449132 - RNA, 26 nt, Human
ggaacccccaagugaggcuggaggga

SEQ ID NO: 449133 - RNA, 32 nt, Human
ggaaccccucaacgaagcugugaaugaagagg

SEQ ID NO: 449134 - RNA, 32 nt, Human
ggaaccccuccccacccucuuuccccagcgcu

SEQ ID NO: 449135 - RNA, 32 nt, Human
ggaaccccucccccauuuacuucuccaccucc

SEQ ID NO: 449136 - RNA, 32 nt, Human
ggaaccccucccugaggaccucagacccucuc

SEQ ID NO: 449137 - RNA, 30 nt, Human
ggaacccgaccucgccccgugaccucagag

SEQ ID NO: 449138 - RNA, 24 nt, Human
ggaacccgagcugagccugccucu

SEQ ID NO: 449139 - RNA, 32 nt, Human
ggaacccgaggggacaccagcucugcacaagu

SEQ ID NO: 449140 - RNA, 18 nt, Human
ggaacccgcggcgagcug

SEQ ID NO: 449141 - RNA, 32 nt, Human
ggaacccggaagguggagguugcagugagccg

SEQ ID NO: 449142 - RNA, 32 nt, Human
ggaacccggagcaccuccacuucuagggaaga

SEQ ID NO: 449143 - RNA, 21 nt, Human
ggaacccggcgcggcugccug

SEQ ID NO: 449144 - RNA, 32 nt, Human
ggaacccggcugugggugguucugagcuguuu

SEQ ID NO: 449145 - RNA, 32 nt, Human
ggaacccgggagcagagacugcagugagcuga

SEQ ID NO: 449146 - RNA, 32 nt, Human
ggaacccgggaggcagagcuugcagugagccg

SEQ ID NO: 449147 - RNA, 32 nt, Human
ggaacccgggaggcagagguugcagugagcug

SEQ ID NO: 449148 - RNA, 32 nt, Human
ggaacccgggaggcggagcuugcagugagccg

SEQ ID NO: 449149 - RNA, 32 nt, Human
ggaacccgggaggcggagguugccgugagucg

SEQ ID NO: 449150 - RNA, 32 nt, Human
ggaacccgggaggcggauguugcggugagccg

SEQ ID NO: 449151 - RNA, 32 nt, Human
ggaacccgggagguggagguuguggugagcug

SEQ ID NO: 449152 - RNA, 21 nt, Human
ggaacccgugcaggcgcugag

SEQ ID NO: 449153 - RNA, 32 nt, Human
ggaacccguggucacacacacgcacugcccug

SEQ ID NO: 449154 - RNA, 32 nt, Human
ggaacccuauuuccuuccccugcagcucagcc

SEQ ID NO: 449155 - RNA, 32 nt, Human
ggaacccucacacaccacugauaggaauguau

SEQ ID NO: 449156 - RNA, 32 nt, Human
ggaacccucagccaggaggcgcggcuggucgg

SEQ ID NO: 449157 - RNA, 32 nt, Human
ggaacccuccuugcuagcguugcaaagaaggg

SEQ ID NO: 449158 - RNA, 32 nt, Human
ggaacccucuuuucccccuagaagaaccacca

SEQ ID NO: 449159 - RNA, 32 nt, Human
ggaacccugcagccuucccaugcuaucuguug

SEQ ID NO: 449160 - RNA, 32 nt, Human
ggaacccugccucuuccugcuaccuguggguc

SEQ ID NO: 449161 - RNA, 32 nt, Human
ggaacccugcucaucugguagggcucuuuccu

SEQ ID NO: 449162 - RNA, 32 nt, Human
ggaacccugcuuguccaacagggugucaggau

SEQ ID NO: 449163 - RNA, 32 nt, Human
ggaacccuggagacagaagucaggugucauca

SEQ ID NO: 449164 - RNA, 32 nt, Human
ggaacccuggagguugagguugcagugagcug

SEQ ID NO: 449165 - RNA, 32 nt, Human
ggaacccuggugucuccuccagcgugguggaa

SEQ ID NO: 449166 - RNA, 32 nt, Human
ggaacccuuuuucuccccgcuguggccucugc

SEQ ID NO: 449167 - RNA, 32 nt, Human
ggaaccgacaggccgguguccccagccgcaaa

SEQ ID NO: 449168 - RNA, 32 nt, Human
ggaaccgaccucuucagccaguggaaauguuc

SEQ ID NO: 449169 - RNA, 18 nt, Human
ggaaccgagccugcucua

SEQ ID NO: 449170 - RNA, 32 nt, Human
ggaaccgcaaucagcugugagccagcaccacc

SEQ ID NO: 449171 - RNA, 32 nt, Human
ggaaccgcacacagccacaucuuccuagaccu

SEQ ID NO: 449172 - RNA, 32 nt, Human
ggaaccgcagagccagaagagcacggagcagc

SEQ ID NO: 449173 - RNA, 16 nt, Human
ggaaccgcggcugcug

SEQ ID NO: 449174 - RNA, 32 nt, Human
ggaaccgcuccuugucccuccuggccuccccg

SEQ ID NO: 449175 - RNA, 32 nt, Human
ggaaccggacuugccuuugggcaccuuccagg

SEQ ID NO: 449176 - RNA, 32 nt, Human
ggaaccgggcgcaggggagcgagcccggcccc

SEQ ID NO: 449177 - RNA, 32 nt, Human
ggaaccgggguuucaccauguuggccaggcug

SEQ ID NO: 449178 - RNA, 32 nt, Human
ggaaccguaucaggccagcaugguggcucaug

SEQ ID NO: 449179 - RNA, 32 nt, Human
ggaaccguuuuacacuggauguuucucaugua

SEQ ID NO: 449180 - RNA, 32 nt, Human
ggaaccuagccucccuuuccaucaugggacuc

SEQ ID NO: 449181 - RNA, 32 nt, Human
ggaaccuaguacaggucucccacccagggccu

SEQ ID NO: 449182 - RNA, 32 nt, Human
ggaaccucacucagcccaggguguagggcagg

SEQ ID NO: 449183 - RNA, 32 nt, Human
ggaaccucagcaggcuggcuccagcuccagaa

SEQ ID NO: 449184 - RNA, 32 nt, Human
ggaaccuccagucucagcaccaugaaucaaac

SEQ ID NO: 449185 - RNA, 32 nt, Human
ggaaccuccccagccugcgccugcugcaugcc

SEQ ID NO: 449186 - RNA, 32 nt, Human
ggaaccucgcgaaccacugguggcacauccuu

SEQ ID NO: 449187 - RNA, 32 nt, Human
ggaaccucgcuaugccuugcucccaucaacac

SEQ ID NO: 449188 - RNA, 32 nt, Human
ggaaccucugucucauccuccuggaaccuugc

SEQ ID NO: 449189 - RNA, 32 nt, Human
ggaaccucuucuuccccucuuccagagcuucc

SEQ ID NO: 449190 - RNA, 32 nt, Human
ggaaccucuuucuuugaucuucuuuuucuuuu

SEQ ID NO: 449191 - RNA, 32 nt, Human
ggaaccugacacauaguaggcacacaguaaac

SEQ ID NO: 449192 - RNA, 32 nt, Human
ggaaccugagugcgcugggcuuggggaagucg

SEQ ID NO: 449193 - RNA, 32 nt, Human
ggaaccugcguccugggugacaucccggaccu

SEQ ID NO: 449194 - RNA, 32 nt, Human
ggaaccuggauauugagcucuuacuuuucucc

SEQ ID NO: 449195 - RNA, 32 nt, Human
ggaaccuggccccgggcaaccagccagagaag

SEQ ID NO: 449196 - RNA, 32 nt, Human
ggaaccugggaggcggagcuuacagugaaccg

SEQ ID NO: 449197 - RNA, 32 nt, Human
ggaaccugggaggcggagguugcagugaacca

SEQ ID NO: 449198 - RNA, 32 nt, Human
ggaaccugggagguggaggcugcagugaaccg

SEQ ID NO: 449199 - RNA, 32 nt, Human
ggaaccugggauguggagguugcagugagcca

SEQ ID NO: 449200 - RNA, 32 nt, Human
ggaaccugggcaggaggcacagaggaagccaa

SEQ ID NO: 449201 - RNA, 19 nt, Human
ggaaccugggccucugaga

SEQ ID NO: 449202 - RNA, 32 nt, Human
ggaaccugggcggugcaugcacugugcacccu

SEQ ID NO: 449203 - RNA, 32 nt, Human
ggaaccuggggaggggcccagagcaaagggca

SEQ ID NO: 449204 - RNA, 32 nt, Human
ggaaccugguauaaaacuacagacgucagaca

SEQ ID NO: 449205 - RNA, 32 nt, Human
ggaaccugguucacccuucauaccagcuccaa

SEQ ID NO: 449206 - RNA, 32 nt, Human
ggaaccuguaaucccagcuacaggggaggcug

SEQ ID NO: 449207 - RNA, 32 nt, Human
ggaaccuguguggagccagccgcagugagccc

SEQ ID NO: 449208 - RNA, 32 nt, Human
ggaaccuguuagcugcuccucuccgcagccag

SEQ ID NO: 449209 - RNA, 32 nt, Human
ggaaccuuaaugcccaggaugauccugucuaa

SEQ ID NO: 449210 - RNA, 32 nt, Human
ggaaccuucuaccaucucaucucccagugauu

SEQ ID NO: 449211 - RNA, 32 nt, Human
ggaaccuugggcaaggaagaaugugagcaaga

SEQ ID NO: 449212 - RNA, 32 nt, Human
ggaaccuuuagggaggauaguggagaagccgc

SEQ ID NO: 449213 - RNA, 32 nt, Human
ggaaccuuugcuuuaggacuuagggaugaugu

SEQ ID NO: 449214 - RNA, 32 nt, Human
ggaacgaacagcugucugccuuguugugagag

SEQ ID NO: 449215 - RNA, 23 nt, Human
ggaacgaacccuggcuggagggg

SEQ ID NO: 449216 - RNA, 32 nt, Human
ggaacgaauggacugaacaaaacucagccugc

SEQ ID NO: 449217 - RNA, 32 nt, Human
ggaacgagagaaagagugagaggaauagaaga

SEQ ID NO: 449218 - RNA, 32 nt, Human
ggaacgauggaaugcaucuguuacuagagacu

SEQ ID NO: 449219 - RNA, 32 nt, Human
ggaacgauuuggaacgaaaggaaguggaagaa

SEQ ID NO: 449220 - RNA, 19 nt, Human
ggaacgcagagcaccgagg

SEQ ID NO: 449221 - RNA, 19 nt, Human
ggaacgccccggcugggug

SEQ ID NO: 449222 - RNA, 32 nt, Human
ggaacgccggagaguuggucucuccccuucua

SEQ ID NO: 449223 - RNA, 32 nt, Human
ggaacgccgugccaguggcggcugguaucccg

SEQ ID NO: 449224 - RNA, 32 nt, Human
ggaacgcgcacccgccccaacgcccagacacg

SEQ ID NO: 449225 - RNA, 25 nt, Human
ggaacgcgcagccagccuugggaag

SEQ ID NO: 449226 - RNA, 32 nt, Human
ggaacgcggaaggugcccucugcggugggcau

SEQ ID NO: 449227 - RNA, 32 nt, Human
ggaacgcggaggcagggagaggcuccgugacg

SEQ ID NO: 449228 - RNA, 32 nt, Human
ggaacgcugcagcugcacccacccugcuugau

SEQ ID NO: 449229 - RNA, 32 nt, Human
ggaacgcugccuggcgaacccugguguucaag

SEQ ID NO: 449230 - RNA, 32 nt, Human
ggaacggaccacacccucucuccccagcaugg

SEQ ID NO: 449231 - RNA, 32 nt, Human
ggaacggagcggcggggcaggagcuguucugg

SEQ ID NO: 449232 - RNA, 32 nt, Human
ggaacggaucccuuagguucaggaagcuucug

SEQ ID NO: 449233 - RNA, 32 nt, Human
ggaacggcagcccagccgugggacggacgugg

SEQ ID NO: 449234 - RNA, 19 nt, Human
ggaacggcccagguccccg

SEQ ID NO: 449235 - RNA, 32 nt, Human
ggaacggcugcuucuccucugcccagggcccu

SEQ ID NO: 449236 - RNA, 32 nt, Human
ggaacgggagccaacauggcagcgggguucgg

SEQ ID NO: 449237 - RNA, 32 nt, Human
ggaacgggaggcgaagggauaaugagcugggg

SEQ ID NO: 449238 - RNA, 18 nt, Human
ggaacgggcagcuggcug

SEQ ID NO: 449239 - RNA, 32 nt, Human
ggaacgggcuuucuuuucaggccagcguggca

SEQ ID NO: 449240 - RNA, 32 nt, Human
ggaacggggcaggcccuagguggggugggcug

SEQ ID NO: 449241 - RNA, 32 nt, Human
ggaacggggccagacucagcccgacagcggga

SEQ ID NO: 449242 - RNA, 32 nt, Human
ggaacgggggccuucuccauaggaagaggagg

SEQ ID NO: 449243 - RNA, 22 nt, Human
ggaacgggguguuaucuuuacu

SEQ ID NO: 449244 - RNA, 23 nt, Human
ggaacggugaggccaucuacuga

SEQ ID NO: 449245 - RNA, 32 nt, Human
ggaacggugaucuucuugaaugauguuucagu

SEQ ID NO: 449246 - RNA, 19 nt, Human
ggaacgguggggcuggcug

SEQ ID NO: 449247 - RNA, 20 nt, Human
ggaacgucggguccugggaa

SEQ ID NO: 449248 - RNA, 32 nt, Human
ggaacgucuccaccagcuucccuuccagccga

SEQ ID NO: 449249 - RNA, 32 nt, Human
ggaacgugaaacuccacaaggccagaagcagc

SEQ ID NO: 449250 - RNA, 32 nt, Human
ggaacgugagccaggaggcccggaccggccac

SEQ ID NO: 449251 - RNA, 32 nt, Human
ggaacguggaggcagagguugcagugagccga

SEQ ID NO: 449252 - RNA, 32 nt, Human
ggaacguggcugguuggaggagguagaucacc

SEQ ID NO: 449253 - RNA, 32 nt, Human
ggaacgugggucaggguggggcaacaguggca

SEQ ID NO: 449254 - RNA, 32 nt, Human
ggaacguguagcuguugagagguggacucugu

SEQ ID NO: 449255 - RNA, 32 nt, Human
ggaacuaaaaccagaggcauuauuacugcauu

SEQ ID NO: 449256 - RNA, 32 nt, Human
ggaacuacagaaggcucugccgucugugucuu

SEQ ID NO: 449257 - RNA, 32 nt, Human
ggaacuaccacugguccacucuggaccucaga

SEQ ID NO: 449258 - RNA, 32 nt, Human
ggaacuacugcaggaauccagauucugggaaa

SEQ ID NO: 449259 - RNA, 32 nt, Human
ggaacuacuguacuuugccauuuuucuauaaa

SEQ ID NO: 449260 - RNA, 32 nt, Human
ggaacuagagagaguggcaggagcgcuccagg

SEQ ID NO: 449261 - RNA, 32 nt, Human
ggaacuagcugcagagggaugagugaccacca

SEQ ID NO: 449262 - RNA, 32 nt, Human
ggaacuaguccauauaacccagcuucaguagc

SEQ ID NO: 449263 - RNA, 32 nt, Human
ggaacuauguggagcccagcugcugcagccca

SEQ ID NO: 449264 - RNA, 32 nt, Human
ggaacuauugaagcccgcuuucagguucuuuu

SEQ ID NO: 449265 - RNA, 32 nt, Human
ggaacucaacagcuccaguuaaaugcuuugau

SEQ ID NO: 449266 - RNA, 32 nt, Human
ggaacucaagcucagcuucugccuccugucuc

SEQ ID NO: 449267 - RNA, 18 nt, Human
ggaacucacacgcagucc

SEQ ID NO: 449268 - RNA, 32 nt, Human
ggaacucagaggagucaaguggucaaagcuca

SEQ ID NO: 449269 - RNA, 32 nt, Human
ggaacucagcugucuguggcuucccaugucuu

SEQ ID NO: 449270 - RNA, 32 nt, Human
ggaacucaggaggcagagguugcagugagcca

SEQ ID NO: 449271 - RNA, 32 nt, Human
ggaacucaggaggcggaggcugcagucaacca

SEQ ID NO: 449272 - RNA, 32 nt, Human
ggaacucauacugucuacacaucagaccauag

SEQ ID NO: 449273 - RNA, 32 nt, Human
ggaacuccagccugcgccaccacgucacgcac

SEQ ID NO: 449274 - RNA, 22 nt, Human
ggaacuccaggacgaggaggac

SEQ ID NO: 449275 - RNA, 32 nt, Human
ggaacuccaguucuggggucagaagauuuaaa

SEQ ID NO: 449276 - RNA, 32 nt, Human
ggaacucccagaccaggaguuggggcaggcug

SEQ ID NO: 449277 - RNA, 32 nt, Human
ggaacuccccucuccacugauggcugggaagg

SEQ ID NO: 449278 - RNA, 32 nt, Human
ggaacucccugccucugagccaccaacuggac

SEQ ID NO: 449279 - RNA, 32 nt, Human
ggaacuccucaagaaccugaagauugagagcg

SEQ ID NO: 449280 - RNA, 32 nt, Human
ggaacuccuccaggggcugagauuggauucac

SEQ ID NO: 449281 - RNA, 32 nt, Human
ggaacuccuuaguggcgaagcagcagccccug

SEQ ID NO: 449282 - RNA, 32 nt, Human
ggaacucggcugcggcuccauggucugaguug

SEQ ID NO: 449283 - RNA, 32 nt, Human
ggaacucucaucaucccucuagggacagcagg

SEQ ID NO: 449284 - RNA, 32 nt, Human
ggaacucuccaccuccgucucccuuggggccc

SEQ ID NO: 449285 - RNA, 32 nt, Human
ggaacucucccacauccucuuccccaacuuca

SEQ ID NO: 449286 - RNA, 32 nt, Human
ggaacucucucuuuucuugcuguucucugaau

SEQ ID NO: 449287 - RNA, 32 nt, Human
ggaacucugcugucagguugugaguuuuguuu

SEQ ID NO: 449288 - RNA, 32 nt, Human
ggaacucuggcacccaggcaugaagcacguug

SEQ ID NO: 449289 - RNA, 21 nt, Human
ggaacugaaugaggaguggaa

SEQ ID NO: 449290 - RNA, 32 nt, Human
ggaacugacacauucucucagagcucaagguc

SEQ ID NO: 449291 - RNA, 32 nt, Human
ggaacugacccaggcuggacuugcggggagga

SEQ ID NO: 449292 - RNA, 32 nt, Human
ggaacugaccgaccuauugucuugggacccac

SEQ ID NO: 449293 - RNA, 21 nt, Human
ggaacugaggaauccagcacg

SEQ ID NO: 449294 - RNA, 32 nt, Human
ggaacugaggggaguaugugacuaaauguguc

SEQ ID NO: 449295 - RNA, 20 nt, Human
ggaacugagguggaguccca

SEQ ID NO: 449296 - RNA, 32 nt, Human
ggaacugaugaaugugaauuucccucuaagaa

SEQ ID NO: 449297 - RNA, 32 nt, Human
ggaacugcaacuccagcguccucagcacccca

SEQ ID NO: 449298 - RNA, 31 nt, Human
ggaacugcaagcuagaaaacaagcugaaaca

SEQ ID NO: 449299 - RNA, 32 nt, Human
ggaacugcagagccagaagagcacggagcagc

SEQ ID NO: 449300 - RNA, 32 nt, Human
ggaacugcagcaaaugcaaacuugaagucaug

SEQ ID NO: 449301 - RNA, 32 nt, Human
ggaacugcagcccuaggaaucugggugaaugg

SEQ ID NO: 449302 - RNA, 31 nt, Human
ggaacugcaugauuccucugccaaaggccac

SEQ ID NO: 449303 - RNA, 32 nt, Human
ggaacugccaacgcuucugcuugggaauugcg

SEQ ID NO: 449304 - RNA, 32 nt, Human
ggaacugccacugcaacucugcacguccagga

SEQ ID NO: 449305 - RNA, 32 nt, Human
ggaacugccccuggcccuccugucccacuauu

SEQ ID NO: 449306 - RNA, 25 nt, Human
ggaacugccugaaugugguuuggga

SEQ ID NO: 449307 - RNA, 32 nt, Human
ggaacugcugccacaaccucaggcugggcacc

SEQ ID NO: 449308 - RNA, 32 nt, Human
ggaacugcugugcagccccucagaguaccgcu

SEQ ID NO: 449309 - RNA, 32 nt, Human
ggaacugcuguucaccauucauuccagaccug

SEQ ID NO: 449310 - RNA, 32 nt, Human
ggaacugcuugucccaugcugcucugauuuau

SEQ ID NO: 449311 - RNA, 32 nt, Human
ggaacuggaagacgucuuguagugcuacauug

SEQ ID NO: 449312 - RNA, 18 nt, Human
ggaacuggaaggggggug

SEQ ID NO: 449313 - RNA, 32 nt, Human
ggaacuggaauaggcguguccucucccucgac

SEQ ID NO: 449314 - RNA, 21 nt, Human
ggaacuggagaccccucccaa

SEQ ID NO: 449315 - RNA, 32 nt, Human
ggaacuggagcaucauaaagauagcaagcuac

SEQ ID NO: 449316 - RNA, 32 nt, Human
ggaacuggaggaggggacuccaggaaugggga

SEQ ID NO: 449317 - RNA, 20 nt, Human
ggaacuggaggagugggcug

SEQ ID NO: 449318 - RNA, 32 nt, Human
ggaacuggagggugagaggaagggugggucug

SEQ ID NO: 449319 - RNA, 32 nt, Human
ggaacuggagguuggcuccagcaaaggagguu

SEQ ID NO: 449320 - RNA, 32 nt, Human
ggaacuggcaucccauucagcaucucaggacu

SEQ ID NO: 449321 - RNA, 19 nt, Human
ggaacuggcccagcuccgg

SEQ ID NO: 449322 - RNA, 32 nt, Human
ggaacuggcuaugagcagaagguucgggccag

SEQ ID NO: 449323 - RNA, 18 nt, Human
ggaacuggcucgauuuca

SEQ ID NO: 449324 - RNA, 32 nt, Human
ggaacugggaggcagguuuggaggcugcagug

SEQ ID NO: 449325 - RNA, 32 nt, Human
ggaacugggccgcagcccccagcuucacccac

SEQ ID NO: 449326 - RNA, 32 nt, Human
ggaacuggggcaaggcccaucugucugcaagg

SEQ ID NO: 449327 - RNA, 32 nt, Human
ggaacuggggccaccagcccugggcacgagau

SEQ ID NO: 449328 - RNA, 32 nt, Human
ggaacugguuuugaagagacacucugaaauga

SEQ ID NO: 449329 - RNA, 32 nt, Human
ggaacuguaggccuugcugaagcauccuccca

SEQ ID NO: 449330 - RNA, 32 nt, Human
ggaacuguauccacccaaaugucaccgauuuc

SEQ ID NO: 449331 - RNA, 32 nt, Human
ggaacugucaagcagaaguuuucacccuccuu

SEQ ID NO: 449332 - RNA, 32 nt, Human
ggaacuguccaggaugcggggagguguggagg

SEQ ID NO: 449333 - RNA, 18 nt, Human
ggaacuguccgcagugug

SEQ ID NO: 449334 - RNA, 32 nt, Human
ggaacugugauggaccacuuccaaaacagaga

SEQ ID NO: 449335 - RNA, 32 nt, Human
ggaacugugcccaguguggccccguggccucu

SEQ ID NO: 449336 - RNA, 32 nt, Human
ggaacugugugccuauaccugccugugugugu

SEQ ID NO: 449337 - RNA, 32 nt, Human
ggaacuguguguguucugaugguucaaugggg

SEQ ID NO: 449338 - RNA, 23 nt, Human
ggaacuguguguguugcaggggg

SEQ ID NO: 449339 - RNA, 32 nt, Human
ggaacuguuuuguaucugccucuuuacuaguc

SEQ ID NO: 449340 - RNA, 32 nt, Human
ggaacuuaaacucagucuucugacuccaagcu

SEQ ID NO: 449341 - RNA, 32 nt, Human
ggaacuuaacagcaaggccagaugcacauccc

SEQ ID NO: 449342 - RNA, 32 nt, Human
ggaacuuacacucuuuaagccauuccagucau

SEQ ID NO: 449343 - RNA, 22 nt, Human
ggaacuuauucauuaaccacca

SEQ ID NO: 449344 - RNA, 32 nt, Human
ggaacuucagaauaugcagaugcccagacugu

SEQ ID NO: 449345 - RNA, 32 nt, Human
ggaacuucaugcugggacaagcagcccaucaa

SEQ ID NO: 449346 - RNA, 32 nt, Human
ggaacuucauucuucacaaacuagccagugac

SEQ ID NO: 449347 - RNA, 32 nt, Human
ggaacuuccaccugggcucugcgcuaggucuc

SEQ ID NO: 449348 - RNA, 32 nt, Human
ggaacuucccaggaggggaagggacagaccag

SEQ ID NO: 449349 - RNA, 32 nt, Human
ggaacuucucagggaugcaaaauucaucaacc

SEQ ID NO: 449350 - RNA, 32 nt, Human
ggaacuucugccuuccugguuuccuugacuuu

SEQ ID NO: 449351 - RNA, 32 nt, Human
ggaacuugcaagcagccagggaacgcugaaaa

SEQ ID NO: 449352 - RNA, 21 nt, Human
ggaacuugcacccuggucuuu

SEQ ID NO: 449353 - RNA, 31 nt, Human
ggaacuugcagaggaacugcggcuuuaccaa

SEQ ID NO: 449354 - RNA, 32 nt, Human
ggaacuugcccaggucaggcacuguggaugug

SEQ ID NO: 449355 - RNA, 21 nt, Human
ggaacuugccgucugguuuuu

SEQ ID NO: 449356 - RNA, 32 nt, Human
ggaacuugcugggccaagcugcagcggcgcug

SEQ ID NO: 449357 - RNA, 32 nt, Human
ggaacuuggaagggaagagcucugaaggagcc

SEQ ID NO: 449358 - RNA, 32 nt, Human
ggaacuuggagcugaaaaacauuggcacugag

SEQ ID NO: 449359 - RNA, 32 nt, Human
ggaacuuggcugcuuuuucuuucugcaguuag

SEQ ID NO: 449360 - RNA, 32 nt, Human
ggaacuuggggguggucuuggcauucagagcu

SEQ ID NO: 449361 - RNA, 32 nt, Human
ggaacuuggguggggaggggacaugaggagga

SEQ ID NO: 449362 - RNA, 32 nt, Human
ggaacuugguggccccuguagagaugccaggu

SEQ ID NO: 449363 - RNA, 32 nt, Human
ggaacuugugcagcaaaguuugggagcuacug

SEQ ID NO: 449364 - RNA, 22 nt, Human
ggaacuugugccuggcuggcug

SEQ ID NO: 449365 - RNA, 32 nt, Human
ggaacuugugcuggcccugcaaugucaaggga

SEQ ID NO: 449366 - RNA, 22 nt, Human
ggaacuuguuuccuuagucuuu

SEQ ID NO: 449367 - RNA, 32 nt, Human
ggaacuuucauaauuaccuuaguucuccaugc

SEQ ID NO: 449368 - RNA, 32 nt, Human
ggaacuuucauaauuaccuuaguucuccauuc

SEQ ID NO: 449369 - RNA, 32 nt, Human
ggaacuuugaauacugaaugacucucaaucac

SEQ ID NO: 449370 - RNA, 32 nt, Human
ggaacuuugccaucaguggcugaggccagaga

SEQ ID NO: 449371 - RNA, 32 nt, Human
ggaacuuugccucauaccccaccaaccccugc

SEQ ID NO: 449372 - RNA, 32 nt, Human
ggaagaaaaacaggucucagcccaggguccuc

SEQ ID NO: 449373 - RNA, 23 nt, Human
ggaagaaaaagagcagaggcaga

SEQ ID NO: 449374 - RNA, 32 nt, Human
ggaagaaaagaaggagggagagagggaggaag

SEQ ID NO: 449375 - RNA, 32 nt, Human
ggaagaaaagagaccaggucucagcuugacua

SEQ ID NO: 449376 - RNA, 32 nt, Human
ggaagaaaaggaggaaggaaggaaaaggugau

SEQ ID NO: 449377 - RNA, 32 nt, Human
ggaagaaaaggcugcugggccaggacacuuca

SEQ ID NO: 449378 - RNA, 32 nt, Human
ggaagaaacaggguaagagcaaagacaaggug

SEQ ID NO: 449379 - RNA, 32 nt, Human
ggaagaaaccaccagcuuuauagugugccuga

SEQ ID NO: 449380 - RNA, 32 nt, Human
ggaagaaagaaggagagcaggagggcgaggag

SEQ ID NO: 449381 - RNA, 32 nt, Human
ggaagaaagagggagacaguagcugcucaaau

SEQ ID NO: 449382 - RNA, 32 nt, Human
ggaagaaagcauuuugcaucagccuggaguga

SEQ ID NO: 449383 - RNA, 20 nt, Human
ggaagaaagcuaucuaggga

SEQ ID NO: 449384 - RNA, 32 nt, Human
ggaagaaagcuccugauuggcuggugguggaa

SEQ ID NO: 449385 - RNA, 25 nt, Human
ggaagaaaggaaaaggaagggcaga

SEQ ID NO: 449386 - RNA, 32 nt, Human
ggaagaaaggaaggaaggaaagaaggaaggga

SEQ ID NO: 449387 - RNA, 32 nt, Human
ggaagaaaggaaggaaggaaggcgagagagag

SEQ ID NO: 449388 - RNA, 23 nt, Human
ggaagaaaggaggaagaggcagg

SEQ ID NO: 449389 - RNA, 22 nt, Human
ggaagaaagggaaggagguaga

SEQ ID NO: 449390 - RNA, 26 nt, Human
ggaagaaagggagagagaagaaaaga

SEQ ID NO: 449391 - RNA, 24 nt, Human
ggaagaaagggaggauagaacaga

SEQ ID NO: 449392 - RNA, 32 nt, Human
ggaagaaagggugggagggaggaagaacggaa

SEQ ID NO: 449393 - RNA, 32 nt, Human
ggaagaaagugaaagaugagugccaguacuuu

SEQ ID NO: 449394 - RNA, 32 nt, Human
ggaagaaaguucugguucacaugccuuguagc

SEQ ID NO: 449395 - RNA, 32 nt, Human
ggaagaaauagcggggagaaaagggaguuggu

SEQ ID NO: 449396 - RNA, 32 nt, Human
ggaagaaauggaauucuggcuccugggucccu

SEQ ID NO: 449397 - RNA, 32 nt, Human
ggaagaaauggugagcaggggcugcaauugca

SEQ ID NO: 449398 - RNA, 32 nt, Human
ggaagaacaacaaagacaugcuuuccauuuuu

SEQ ID NO: 449399 - RNA, 32 nt, Human
ggaagaacaaggcaauucucacccucaguuuu

SEQ ID NO: 449400 - RNA, 32 nt, Human
ggaagaacacccuucuccgucucccucuuuuu

SEQ ID NO: 449401 - RNA, 22 nt, Human
ggaagaacagagaggggacaga

SEQ ID NO: 449402 - RNA, 32 nt, Human
ggaagaacauggccuggccaaauguuuuucaa

SEQ ID NO: 449403 - RNA, 32 nt, Human
ggaagaaccaguccugccaacaucuugaucuu

SEQ ID NO: 449404 - RNA, 32 nt, Human
ggaagaacccuccacccugccucguggguggg

SEQ ID NO: 449405 - RNA, 32 nt, Human
ggaagaacucauuguugaucacacuguugccu

SEQ ID NO: 449406 - RNA, 32 nt, Human
ggaagaacugauuucaauauauugccgcugca

SEQ ID NO: 449407 - RNA, 32 nt, Human
ggaagaacuuugucccuuuacuucugauuuga

SEQ ID NO: 449408 - RNA, 32 nt, Human
ggaagaagaaaauagcagcaagaaauaucucu

SEQ ID NO: 449409 - RNA, 32 nt, Human
ggaagaagaagagauuucggaggccauccugc

SEQ ID NO: 449410 - RNA, 32 nt, Human
ggaagaagaagaggaggaagaagauauccucu

SEQ ID NO: 449411 - RNA, 32 nt, Human
ggaagaagaaggagguugcuggccuuggauau

SEQ ID NO: 449412 - RNA, 19 nt, Human
ggaagaagacagggaccag

SEQ ID NO: 449413 - RNA, 32 nt, Human
ggaagaagaccggagucaaaggacucaucugu

SEQ ID NO: 449414 - RNA, 32 nt, Human
ggaagaagagaaggaagaggagagggggccgc

SEQ ID NO: 449415 - RNA, 32 nt, Human
ggaagaagagaaggagguccucauccuauagc

SEQ ID NO: 449416 - RNA, 32 nt, Human
ggaagaagagagaaggagaaggaagaaggaga

SEQ ID NO: 449417 - RNA, 23 nt, Human
ggaagaagaggagcaggccggga

SEQ ID NO: 449418 - RNA, 24 nt, Human
ggaagaagaggaggaggaggaaga

SEQ ID NO: 449419 - RNA, 32 nt, Human
ggaagaagaggaggaggaggaagaggaggagg

SEQ ID NO: 449420 - RNA, 32 nt, Human
ggaagaagaggaggaggaggaggaggaggagg

SEQ ID NO: 449421 - RNA, 32 nt, Human
ggaagaagagguggaggugugguuguggugga

SEQ ID NO: 449422 - RNA, 32 nt, Human
ggaagaagagugaaggccaguguuaggaaaaa

SEQ ID NO: 449423 - RNA, 32 nt, Human
ggaagaagauauccucucucuggcagaagaaa

SEQ ID NO: 449424 - RNA, 32 nt, Human
ggaagaagcacagaauuccucaacucccagug

SEQ ID NO: 449425 - RNA, 32 nt, Human
ggaagaagccagaaccccaccuggccugccca

SEQ ID NO: 449426 - RNA, 32 nt, Human
ggaagaagcuugcugguagcacuugcuacccu

SEQ ID NO: 449427 - RNA, 23 nt, Human
ggaagaaggaagaaaaccugaua

SEQ ID NO: 449428 - RNA, 20 nt, Human
ggaagaaggaggcagcaggg

SEQ ID NO: 449429 - RNA, 24 nt, Human
ggaagaaggaggcuaggagcaggg

SEQ ID NO: 449430 - RNA, 20 nt, Human
ggaagaaggcaggcuucugg

SEQ ID NO: 449431 - RNA, 32 nt, Human
ggaagaaggcccugucccccugucgccacugc

SEQ ID NO: 449432 - RNA, 24 nt, Human
ggaagaaggggagacgagccggga

SEQ ID NO: 449433 - RNA, 20 nt, Human
ggaagaagggucguuucuga

SEQ ID NO: 449434 - RNA, 32 nt, Human
ggaagaagucagggacagggaccaggauacca

SEQ ID NO: 449435 - RNA, 32 nt, Human
ggaagaaguguuuaguucuggaaaagguaaau

SEQ ID NO: 449436 - RNA, 32 nt, Human
ggaagaauaaagugccuucugagcaagcagcu

SEQ ID NO: 449437 - RNA, 32 nt, Human
ggaagaaucaggcucagcgcacuggcacaugc

SEQ ID NO: 449438 - RNA, 32 nt, Human
ggaagaaucugaggaacacagaacagccccag

SEQ ID NO: 449439 - RNA, 16 nt, Human
ggaagaaugcuuuuga

SEQ ID NO: 449440 - RNA, 32 nt, Human
ggaagaauggcgaggggagagcagaggagaag

SEQ ID NO: 449441 - RNA, 32 nt, Human
ggaagaaugucccuuuucuucaaguuugggaa

SEQ ID NO: 449442 - RNA, 32 nt, Human
ggaagaauguguaugcuguugcuguugaauag

SEQ ID NO: 449443 - RNA, 32 nt, Human
ggaagaauuggcaccuuccuagggaaggagac

SEQ ID NO: 449444 - RNA, 32 nt, Human
ggaagacaacccaggcaguaccauucaggaca

SEQ ID NO: 449445 - RNA, 32 nt, Human
ggaagacaaggcagaagaggcuggccaggccc

SEQ ID NO: 449446 - RNA, 32 nt, Human
ggaagacaagucaggaggauugauugaagcua

SEQ ID NO: 449447 - RNA, 21 nt, Human
ggaagacagacacagaugcaa

SEQ ID NO: 449448 - RNA, 32 nt, Human
ggaagacagacuccugucuucacuccuaaaug

SEQ ID NO: 449449 - RNA, 21 nt, Human
ggaagacagagauggcagagc

SEQ ID NO: 449450 - RNA, 32 nt, Human
ggaagacagagcagaggccucggcugcagcac

SEQ ID NO: 449451 - RNA, 32 nt, Human
ggaagacagaggugccuggguggccgaggccu

SEQ ID NO: 449452 - RNA, 32 nt, Human
ggaagacagagguggcaggacaaggaagagga

SEQ ID NO: 449453 - RNA, 32 nt, Human
ggaagacagauggggaagggggcggugaacac

SEQ ID NO: 449454 - RNA, 32 nt, Human
ggaagacagcacaaaguggauccauacucuga

SEQ ID NO: 449455 - RNA, 32 nt, Human
ggaagacagccaaggcugcagcugcugaagga

SEQ ID NO: 449456 - RNA, 32 nt, Human
ggaagacagccaauagcacccauuaaaagaaa

SEQ ID NO: 449457 - RNA, 32 nt, Human
ggaagacagccuggccuugcccaccugcacac

SEQ ID NO: 449458 - RNA, 32 nt, Human
ggaagacaggagaaacuacuuaaggugguuaa

SEQ ID NO: 449459 - RNA, 20 nt, Human
ggaagacaggccccugggaa

SEQ ID NO: 449460 - RNA, 32 nt, Human
ggaagacaggcuucccuuccuucccccuccuu

SEQ ID NO: 449461 - RNA, 32 nt, Human
ggaagacaggucacucuccccuaggcaguucc

SEQ ID NO: 449462 - RNA, 23 nt, Human
ggaagacagguuccucacagcaa

SEQ ID NO: 449463 - RNA, 32 nt, Human
ggaagacagugcagccacccagccuuuaccag

SEQ ID NO: 449464 - RNA, 32 nt, Human
ggaagacaguggccacagcccaacaggaggcc

SEQ ID NO: 449465 - RNA, 21 nt, Human
ggaagacaguuaucagggcaa

SEQ ID NO: 449466 - RNA, 32 nt, Human
ggaagacaucuuccuucucugccucggcuucc

SEQ ID NO: 449467 - RNA, 32 nt, Human
ggaagacaugccgacgucuccucugccuaggg

SEQ ID NO: 449468 - RNA, 32 nt, Human
ggaagaccacaguauuucucccuucccacucu

SEQ ID NO: 449469 - RNA, 27 nt, Human
ggaagaccagccucagaggguccuucu

SEQ ID NO: 449470 - RNA, 32 nt, Human
ggaagaccagccuggccaacauggcgaaaccc

SEQ ID NO: 449471 - RNA, 32 nt, Human
ggaagaccaguugggcccaagccugggauagu

SEQ ID NO: 449472 - RNA, 32 nt, Human
ggaagaccaguuucuuucaaucuaaggcuauu

SEQ ID NO: 449473 - RNA, 32 nt, Human
ggaagaccaugggcuguaggggagaguguggc

SEQ ID NO: 449474 - RNA, 32 nt, Human
ggaagacccaggagcugggaggcacgggagua

SEQ ID NO: 449475 - RNA, 23 nt, Human
ggaagacccaggccauguuccca

SEQ ID NO: 449476 - RNA, 32 nt, Human
ggaagacccagucucagacucugugccuuuaa

SEQ ID NO: 449477 - RNA, 32 nt, Human
ggaagaccccgagguggaaaagaaggagcacc

SEQ ID NO: 449478 - RNA, 32 nt, Human
ggaagacccuucuuccaugcagcuugauguca

SEQ ID NO: 449479 - RNA, 23 nt, Human
ggaagaccgaggcggguggauca

SEQ ID NO: 449480 - RNA, 32 nt, Human
ggaagaccuauaccccacgccugggccuggcu

SEQ ID NO: 449481 - RNA, 23 nt, Human
ggaagacgcccggucccgggccg

SEQ ID NO: 449482 - RNA, 26 nt, Human
ggaagacgcggggaagaggaggcgga

SEQ ID NO: 449483 - RNA, 32 nt, Human
ggaagacgcugaggaggaggaggaggcggagg

SEQ ID NO: 449484 - RNA, 32 nt, Human
ggaagacguucuugcauccucagccuguguca

SEQ ID NO: 449485 - RNA, 32 nt, Human
ggaagacucauuuuggacuucugaccuugaac

SEQ ID NO: 449486 - RNA, 32 nt, Human
ggaagacucccacucccugaaaucuggaguga

SEQ ID NO: 449487 - RNA, 32 nt, Human
ggaagacucccagcacuucuggaacugugcuu

SEQ ID NO: 449488 - RNA, 32 nt, Human
ggaagacucugccucaccugccuccuugaagg

SEQ ID NO: 449489 - RNA, 32 nt, Human
ggaagacugaggacaugggcucagugguggcu

SEQ ID NO: 449490 - RNA, 21 nt, Human
ggaagacugcuugagcccagg

SEQ ID NO: 449491 - RNA, 32 nt, Human
ggaagacuggaugucuuucuucuucauccaag

SEQ ID NO: 449492 - RNA, 32 nt, Human
ggaagacuguggcugcuagcacuuggagccaa

SEQ ID NO: 449493 - RNA, 21 nt, Human
ggaagacuuggccccugggga

SEQ ID NO: 449494 - RNA, 32 nt, Human
ggaagacuuugcccugcccugagagcuggucu

SEQ ID NO: 449495 - RNA, 32 nt, Human
ggaagagaaaaugccugcaguuguaaugucug

SEQ ID NO: 449496 - RNA, 18 nt, Human
ggaagagaaacuuuuuga

SEQ ID NO: 449497 - RNA, 32 nt, Human
ggaagagaaagagugaagaaaaguugcgagcg

SEQ ID NO: 449498 - RNA, 32 nt, Human
ggaagagaaaguagagaagaaaagaaugaugu

SEQ ID NO: 449499 - RNA, 32 nt, Human
ggaagagaaaugcaaagugugggcagccgcca

SEQ ID NO: 449500 - RNA, 32 nt, Human
ggaagagaagaaaacggaggagaggaggggac

SEQ ID NO: 449501 - RNA, 32 nt, Human
ggaagagaagaaaauggaggagaggaggggac

SEQ ID NO: 449502 - RNA, 32 nt, Human
ggaagagaagaauguugcuuaagaaagaacau

SEQ ID NO: 449503 - RNA, 32 nt, Human
ggaagagaagagaagaggacaguaccaagauc

SEQ ID NO: 449504 - RNA, 32 nt, Human
ggaagagaagcaggagggguguuuuucuugaa

SEQ ID NO: 449505 - RNA, 18 nt, Human
ggaagagaagcaucauga

SEQ ID NO: 449506 - RNA, 21 nt, Human
ggaagagaagugugcuuuuga

SEQ ID NO: 449507 - RNA, 32 nt, Human
ggaagagaaucugucagccuuggagggaaggg

SEQ ID NO: 449508 - RNA, 32 nt, Human
ggaagagaaugggagacaaaggaccuggugau

SEQ ID NO: 449509 - RNA, 16 nt, Human
ggaagagaaugucuga

SEQ ID NO: 449510 - RNA, 18 nt, Human
ggaagagaauugucuuga

SEQ ID NO: 449511 - RNA, 32 nt, Human
ggaagagacacaggaacacagauggagggcaa

SEQ ID NO: 449512 - RNA, 32 nt, Human
ggaagagacacuccuuuccuuuuacuaagacc

SEQ ID NO: 449513 - RNA, 32 nt, Human
ggaagagacagugugggcugagagcagaggga

SEQ ID NO: 449514 - RNA, 17 nt, Human
ggaagagaccugccuga

SEQ ID NO: 449515 - RNA, 32 nt, Human
ggaagagacgucggagucugaucgcagacaca

SEQ ID NO: 449516 - RNA, 32 nt, Human
ggaagagacuccagggcucugcagagagggaa

SEQ ID NO: 449517 - RNA, 20 nt, Human
ggaagagagaagcugggaga

SEQ ID NO: 449518 - RNA, 32 nt, Human
ggaagagagacagagaaacagagacagaaaga

SEQ ID NO: 449519 - RNA, 28 nt, Human
ggaagagagacagaggaucaagggcuuu

SEQ ID NO: 449520 - RNA, 32 nt, Human
ggaagagagaccagagaguuuagaggccagga

SEQ ID NO: 449521 - RNA, 32 nt, Human
ggaagagagaggaagggugagggugaggcgug

SEQ ID NO: 449522 - RNA, 32 nt, Human
ggaagagagauggagucacauggauuuuuggu

SEQ ID NO: 449523 - RNA, 17 nt, Human
ggaagagagcuggcugg

SEQ ID NO: 449524 - RNA, 32 nt, Human
ggaagagagcuugggcugggaacgcgccugau

SEQ ID NO: 449525 - RNA, 32 nt, Human
ggaagagaggccuggagauaccagguugucuu

SEQ ID NO: 449526 - RNA, 18 nt, Human
ggaagagaggccuucugg

SEQ ID NO: 449527 - RNA, 32 nt, Human
ggaagagagggaggaggaaaggaaggagagag

SEQ ID NO: 449528 - RNA, 32 nt, Human
ggaagagagggagggaggcgggaggagcgcgg

SEQ ID NO: 449529 - RNA, 17 nt, Human
ggaagagaggguucuga

SEQ ID NO: 449530 - RNA, 18 nt, Human
ggaagagagugauacuga

SEQ ID NO: 449531 - RNA, 32 nt, Human
ggaagagauagaggaggaggagggggaggaag

SEQ ID NO: 449532 - RNA, 17 nt, Human
ggaagagauauuucugg

SEQ ID NO: 449533 - RNA, 18 nt, Human
ggaagagaugaagcucug

SEQ ID NO: 449534 - RNA, 18 nt, Human
ggaagagauggcugcuga

SEQ ID NO: 449535 - RNA, 32 nt, Human
ggaagagaugguugacccagaggauccugaua

SEQ ID NO: 449536 - RNA, 18 nt, Human
ggaagagaugugugccug

SEQ ID NO: 449537 - RNA, 16 nt, Human
ggaagagauguuugga

SEQ ID NO: 449538 - RNA, 18 nt, Human
ggaagagauucugcccug

SEQ ID NO: 449539 - RNA, 32 nt, Human
ggaagagauugagagaccuagcaaugugaagu

SEQ ID NO: 449540 - RNA, 18 nt, Human
ggaagagauugcaucuga

SEQ ID NO: 449541 - RNA, 16 nt, Human
ggaagagauugccuga

SEQ ID NO: 449542 - RNA, 18 nt, Human
ggaagagauuguauuaga

SEQ ID NO: 449543 - RNA, 18 nt, Human
ggaagagauuugucucug

SEQ ID NO: 449544 - RNA, 32 nt, Human
ggaagagcaauggcugcagcagcagcuucuca

SEQ ID NO: 449545 - RNA, 22 nt, Human
ggaagagcacaaggugcaggug

SEQ ID NO: 449546 - RNA, 24 nt, Human
ggaagagcaucauggcugugcagg

SEQ ID NO: 449547 - RNA, 32 nt, Human
ggaagagcauccccuuccuccuuucccuggcc

SEQ ID NO: 449548 - RNA, 32 nt, Human
ggaagagcauggcaggcagagauacagcaagg

SEQ ID NO: 449549 - RNA, 32 nt, Human
ggaagagcauguggugauuggccacacacuga

SEQ ID NO: 449550 - RNA, 32 nt, Human
ggaagagcauuuuucuaaggagaacaggugac

SEQ ID NO: 449551 - RNA, 22 nt, Human
ggaagagccaaacccgacucuc

SEQ ID NO: 449552 - RNA, 32 nt, Human
ggaagagccauggugaaaccgcaucucuacua

SEQ ID NO: 449553 - RNA, 32 nt, Human
ggaagagcccaggaugccucaggccuggcaac

SEQ ID NO: 449554 - RNA, 32 nt, Human
ggaagagccuccauuucaucucauguccauuu

SEQ ID NO: 449555 - RNA, 32 nt, Human
ggaagagcucacugccagcugcggccugggca

SEQ ID NO: 449556 - RNA, 32 nt, Human
ggaagagcuggaacagcaggaggcggaggugc

SEQ ID NO: 449557 - RNA, 22 nt, Human
ggaagagcugggccccugggag

SEQ ID NO: 449558 - RNA, 32 nt, Human
ggaagagcuggguaccaggccacccacugugg

SEQ ID NO: 449559 - RNA, 32 nt, Human
ggaagagcuguggaggacacacucucaguuug

SEQ ID NO: 449560 - RNA, 32 nt, Human
ggaagaggaagaagagguagaaaacauauuuu

SEQ ID NO: 449561 - RNA, 32 nt, Human
ggaagaggaagaggaaagcaaaggagucaggg

SEQ ID NO: 449562 - RNA, 32 nt, Human
ggaagaggaagaggaagagaggaagcggaggg

SEQ ID NO: 449563 - RNA, 32 nt, Human
ggaagaggaagaggaggaaggcgacggcaaca

SEQ ID NO: 449564 - RNA, 32 nt, Human
ggaagaggaagaggaggacgaacagagauccu

SEQ ID NO: 449565 - RNA, 32 nt, Human
ggaagaggaagaggaggagaggccggggacga

SEQ ID NO: 449566 - RNA, 32 nt, Human
ggaagaggaagaggaggaggaggagaccggca

SEQ ID NO: 449567 - RNA, 32 nt, Human
ggaagaggaaggcagcccuggagugguuucuu

SEQ ID NO: 449568 - RNA, 32 nt, Human
ggaagaggaagggagaggcaagcaacuaggua

SEQ ID NO: 449569 - RNA, 32 nt, Human
ggaagaggaaucaagaguaaagagguaggggu

SEQ ID NO: 449570 - RNA, 32 nt, Human
ggaagaggacaaagagacagagcccagggggu

SEQ ID NO: 449571 - RNA, 32 nt, Human
ggaagaggacacugaagaggagagcucagcca

SEQ ID NO: 449572 - RNA, 32 nt, Human
ggaagaggacagagcaaagccaugaacaucau

SEQ ID NO: 449573 - RNA, 32 nt, Human
ggaagaggacagugaugugacuucuuggucag

SEQ ID NO: 449574 - RNA, 32 nt, Human
ggaagaggaccagcuccuggucaggagacuga

SEQ ID NO: 449575 - RNA, 32 nt, Human
ggaagaggacccugucccccagcacugggcuu

SEQ ID NO: 449576 - RNA, 32 nt, Human
ggaagaggaccgggaggagagguggagagcgg

SEQ ID NO: 449577 - RNA, 32 nt, Human
ggaagaggagacaaacccuacugucggccugc

SEQ ID NO: 449578 - RNA, 32 nt, Human
ggaagaggagccaaugacaggguagggagaug

SEQ ID NO: 449579 - RNA, 32 nt, Human
ggaagaggaggaagaagaggaggaggaggaga

SEQ ID NO: 449580 - RNA, 32 nt, Human
ggaagaggaggaagaggaaggggagagggacg

SEQ ID NO: 449581 - RNA, 21 nt, Human
ggaagaggaggaggaggaaga

SEQ ID NO: 449582 - RNA, 32 nt, Human
ggaagaggaggaggaggaagaggggagcacaa

SEQ ID NO: 449583 - RNA, 32 nt, Human
ggaagaggaggaggaggaagggagcaccagug

SEQ ID NO: 449584 - RNA, 20 nt, Human
ggaagaggaggaggaggaga

SEQ ID NO: 449585 - RNA, 32 nt, Human
ggaagaggaggaggaggagaccggcagcaacu

SEQ ID NO: 449586 - RNA, 24 nt, Human
ggaagaggaggaggaggaggaaga

SEQ ID NO: 449587 - RNA, 23 nt, Human
ggaagaggaggaggaggaggaga

SEQ ID NO: 449588 - RNA, 32 nt, Human
ggaagaggaggaggaggaggagaaggaggaga

SEQ ID NO: 449589 - RNA, 32 nt, Human
ggaagaggaggaggaggaggagcuggaggagg

SEQ ID NO: 449590 - RNA, 32 nt, Human
ggaagaggaggaggaggaggaggaagcugaag

SEQ ID NO: 449591 - RNA, 32 nt, Human
ggaagaggaggaggaggaggaggaaggggcuu

SEQ ID NO: 449592 - RNA, 32 nt, Human
ggaagaggaggaggaggaggaggcuggguugg

SEQ ID NO: 449593 - RNA, 32 nt, Human
ggaagaggaggcaccgcggcggcggcugagag

SEQ ID NO: 449594 - RNA, 32 nt, Human
ggaagaggaggggaggaggaggaggaggagga

SEQ ID NO: 449595 - RNA, 32 nt, Human
ggaagaggagugggccugaggagcagcaggaa

SEQ ID NO: 449596 - RNA, 32 nt, Human
ggaagaggcaggcagaggcugaggcugauucc

SEQ ID NO: 449597 - RNA, 32 nt, Human
ggaagaggcccggcggaggcggcggugcagcg

SEQ ID NO: 449598 - RNA, 32 nt, Human
ggaagaggccugcacagacaggaggagcagcu

SEQ ID NO: 449599 - RNA, 18 nt, Human
ggaagaggccuuucuaga

SEQ ID NO: 449600 - RNA, 32 nt, Human
ggaagaggccuuucuagaauuuucuuugagca

SEQ ID NO: 449601 - RNA, 16 nt, Human
ggaagaggccuuuuga

SEQ ID NO: 449602 - RNA, 17 nt, Human
ggaagaggcuccucuga

SEQ ID NO: 449603 - RNA, 32 nt, Human
ggaagaggcugcaggcucaagggcagggauuc

SEQ ID NO: 449604 - RNA, 17 nt, Human
ggaagaggcugcucugg

SEQ ID NO: 449605 - RNA, 32 nt, Human
ggaagaggcugcugagaaagagaaugagaaga

SEQ ID NO: 449606 - RNA, 17 nt, Human
ggaagaggcuuaccuga

SEQ ID NO: 449607 - RNA, 20 nt, Human
ggaagaggcuucagacgcug

SEQ ID NO: 449608 - RNA, 20 nt, Human
ggaagaggcuuccaucccuc

SEQ ID NO: 449609 - RNA, 16 nt, Human
ggaagaggcuuccugg

SEQ ID NO: 449610 - RNA, 32 nt, Human
ggaagagggacgccgcugagggccaaggggcg

SEQ ID NO: 449611 - RNA, 17 nt, Human
ggaagagggagcucugg

SEQ ID NO: 449612 - RNA, 32 nt, Human
ggaagagggagugaggcccuguggacacagca

SEQ ID NO: 449613 - RNA, 32 nt, Human
ggaagagggauuauaauuuggugcuguuugua

SEQ ID NO: 449614 - RNA, 32 nt, Human
ggaagagggcaggcgaggcgggaaggugggcu

SEQ ID NO: 449615 - RNA, 32 nt, Human
ggaagagggcaugcaaguucugccugucuucu

SEQ ID NO: 449616 - RNA, 32 nt, Human
ggaagagggccugguuguuuauuuauauguuu

SEQ ID NO: 449617 - RNA, 32 nt, Human
ggaagagggcuggaugcagggccagcucaacc

SEQ ID NO: 449618 - RNA, 18 nt, Human
ggaagagggcuuccauga

SEQ ID NO: 449619 - RNA, 17 nt, Human
ggaagagggcuuuuuga

SEQ ID NO: 449620 - RNA, 23 nt, Human
ggaagaggggaaagagaggcaga

SEQ ID NO: 449621 - RNA, 24 nt, Human
ggaagaggggaaggaggaggaaga

SEQ ID NO: 449622 - RNA, 32 nt, Human
ggaagaggggccugagggcggaagggguuugg

SEQ ID NO: 449623 - RNA, 32 nt, Human
ggaagagggggaggagaaggaggaagaggggg

SEQ ID NO: 449624 - RNA, 21 nt, Human
ggaagagggggaggagacagg

SEQ ID NO: 449625 - RNA, 21 nt, Human
ggaagagggggaggaggaaga

SEQ ID NO: 449626 - RNA, 32 nt, Human
ggaagagggggaggaggaagaggggaaggagg

SEQ ID NO: 449627 - RNA, 18 nt, Human
ggaagagggggagggaga

SEQ ID NO: 449628 - RNA, 32 nt, Human
ggaagagggugcaaguccccuccuggggcccc

SEQ ID NO: 449629 - RNA, 32 nt, Human
ggaagaggguuggauuaucauuaccuuuacaa

SEQ ID NO: 449630 - RNA, 17 nt, Human
ggaagagguauuucuga

SEQ ID NO: 449631 - RNA, 16 nt, Human
ggaagaggucuucgga

SEQ ID NO: 449632 - RNA, 17 nt, Human
ggaagaggugccccugg

SEQ ID NO: 449633 - RNA, 18 nt, Human
ggaagaggugcucuccug

SEQ ID NO: 449634 - RNA, 32 nt, Human
ggaagagguggaggaggaggaggaggaggugg

SEQ ID NO: 449635 - RNA, 32 nt, Human
ggaagagguggaggaggaggggccagggcagu

SEQ ID NO: 449636 - RNA, 19 nt, Human
ggaagagguggcaagggga

SEQ ID NO: 449637 - RNA, 18 nt, Human
ggaagagguggcccucug

SEQ ID NO: 449638 - RNA, 17 nt, Human
ggaagagguggcucugg

SEQ ID NO: 449639 - RNA, 32 nt, Human
ggaagagucaugggaggugaaaggggcacguu

SEQ ID NO: 449640 - RNA, 32 nt, Human
ggaagaguccuugaguguggcagcaguuuuga

SEQ ID NO: 449641 - RNA, 32 nt, Human
ggaagagugaagaacagaaaaauguuaguggg

SEQ ID NO: 449642 - RNA, 32 nt, Human
ggaagagugacuucugugagauggcuggcugg

SEQ ID NO: 449643 - RNA, 32 nt, Human
ggaagagugagcaggacacagaggggagggga

SEQ ID NO: 449644 - RNA, 32 nt, Human
ggaagagugggaggaggaggggaagcggcgaa

SEQ ID NO: 449645 - RNA, 32 nt, Human
ggaagaguggggcugcuaggcaaguggauuag

SEQ ID NO: 449646 - RNA, 32 nt, Human
ggaagagugggguagagccaggcggcacaggc

SEQ ID NO: 449647 - RNA, 32 nt, Human
ggaagagugguuuggagagagccuucuagaau

SEQ ID NO: 449648 - RNA, 19 nt, Human
ggaagaguuccugcuucug

SEQ ID NO: 449649 - RNA, 32 nt, Human
ggaagaguugcugagacgacuacagcaaauua

SEQ ID NO: 449650 - RNA, 32 nt, Human
ggaagauaaagauggucacacaaacaguuucc

SEQ ID NO: 449651 - RNA, 32 nt, Human
ggaagauaagagaaaaagaagaauggauaaaa

SEQ ID NO: 449652 - RNA, 32 nt, Human
ggaagauaggguugggacagggugcuuuggaa

SEQ ID NO: 449653 - RNA, 32 nt, Human
ggaagauauugguggcuggugguuuugugcuu

SEQ ID NO: 449654 - RNA, 32 nt, Human
ggaagauauuucuaaucggucuugcccagagg

SEQ ID NO: 449655 - RNA, 32 nt, Human
ggaagaucacaaggucaggagaucgagaccau

SEQ ID NO: 449656 - RNA, 32 nt, Human
ggaagaucacuugaggccaggaguucaaggcu

SEQ ID NO: 449657 - RNA, 32 nt, Human
ggaagaucacuugaggccaggaguuugagacc

SEQ ID NO: 449658 - RNA, 24 nt, Human
ggaagaucaggaggaggaggaaga

SEQ ID NO: 449659 - RNA, 32 nt, Human
ggaagaucaggaggaggaggaagaagaggaaa

SEQ ID NO: 449660 - RNA, 32 nt, Human
ggaagaucauuugagcccaggaggcugaggcu

SEQ ID NO: 449661 - RNA, 32 nt, Human
ggaagauccaggaguugaagaccagccugggc

SEQ ID NO: 449662 - RNA, 32 nt, Human
ggaagauccugaagcaguucagaaggaauaag

SEQ ID NO: 449663 - RNA, 22 nt, Human
ggaagaucuccccccagagcaa

SEQ ID NO: 449664 - RNA, 32 nt, Human
ggaagaucuggagugaaaaggcagcagaugca

SEQ ID NO: 449665 - RNA, 32 nt, Human
ggaagaugaagaggaggaagagggagaaggga

SEQ ID NO: 449666 - RNA, 18 nt, Human
ggaagaugacuccuggga

SEQ ID NO: 449667 - RNA, 32 nt, Human
ggaagaugagagaaaauuaguaggauuaguug

SEQ ID NO: 449668 - RNA, 32 nt, Human
ggaagaugcaccuugaucucacccucacucca

SEQ ID NO: 449669 - RNA, 32 nt, Human
ggaagaugcccaccccugcuugggacuugaga

SEQ ID NO: 449670 - RNA, 22 nt, Human
ggaagaugccugccggcaccga

SEQ ID NO: 449671 - RNA, 32 nt, Human
ggaagauggaaaaaggaauccaggcaaaaagg

SEQ ID NO: 449672 - RNA, 32 nt, Human
ggaagauggccaggcuguugaaagcuucacaa

SEQ ID NO: 449673 - RNA, 32 nt, Human
ggaagauggcggcugcuccuuuggaggagcgg

SEQ ID NO: 449674 - RNA, 30 nt, Human
ggaagauggcggcugugguggagaauguag

SEQ ID NO: 449675 - RNA, 21 nt, Human
ggaagauggcuugagcccagg

SEQ ID NO: 449676 - RNA, 23 nt, Human
ggaagauggggcugcaccugcca

SEQ ID NO: 449677 - RNA, 22 nt, Human
ggaagauucgcuugagcccagg

SEQ ID NO: 449678 - RNA, 32 nt, Human
ggaagauucugagacauuucgccugagauaua

SEQ ID NO: 449679 - RNA, 21 nt, Human
ggaagauugcuucagcccagg

SEQ ID NO: 449680 - RNA, 32 nt, Human
ggaagauuguuuaggggguuaaggagcucaga

SEQ ID NO: 449681 - RNA, 32 nt, Human
ggaagauuuaacauuugcuugggaaugugauu

SEQ ID NO: 449682 - RNA, 32 nt, Human
ggaagauuucacuucauugucuagcccagaau

SEQ ID NO: 449683 - RNA, 32 nt, Human
ggaagauuucccagccuuucuucacaacacuu

SEQ ID NO: 449684 - RNA, 32 nt, Human
ggaagauuuccuuauugucauuuccuuccauc

SEQ ID NO: 449685 - RNA, 32 nt, Human
ggaagauuugcaguuaaagauggcuaccauca

SEQ ID NO: 449686 - RNA, 32 nt, Human
ggaagcaaagguugucacaucuucccaagcca

SEQ ID NO: 449687 - RNA, 32 nt, Human
ggaagcaacuccaggaacacuccuuccacucc

SEQ ID NO: 449688 - RNA, 32 nt, Human
ggaagcaaguucgccagagagaaaguugaccg

SEQ ID NO: 449689 - RNA, 24 nt, Human
ggaagcaaugccugcccccuggag

SEQ ID NO: 449690 - RNA, 22 nt, Human
ggaagcacacggccucugggaa

SEQ ID NO: 449691 - RNA, 32 nt, Human
ggaagcacagcuccaaguucagacaggugccc

SEQ ID NO: 449692 - RNA, 31 nt, Human
ggaagcacagcuucauuuccugugucuuuuu

SEQ ID NO: 449693 - RNA, 32 nt, Human
ggaagcacaggcaaugucugcaaucagcugug

SEQ ID NO: 449694 - RNA, 32 nt, Human
ggaagcacaugccucucucaggccaaacucac

SEQ ID NO: 449695 - RNA, 32 nt, Human
ggaagcacgugcuuaagcccuuuugcugauuu

SEQ ID NO: 449696 - RNA, 32 nt, Human
ggaagcacuucaggaacaagcacacagcugug

SEQ ID NO: 449697 - RNA, 32 nt, Human
ggaagcagaacacacagcuggaggcuuggaac

SEQ ID NO: 449698 - RNA, 32 nt, Human
ggaagcagacaggaaggagagaagcagaaaca

SEQ ID NO: 449699 - RNA, 21 nt, Human
ggaagcagacaggcuccuggg

SEQ ID NO: 449700 - RNA, 32 nt, Human
ggaagcagaccagcccacuacagagccaggca

SEQ ID NO: 449701 - RNA, 32 nt, Human
ggaagcagaggaggccagggaggcaggggagg

SEQ ID NO: 449702 - RNA, 32 nt, Human
ggaagcagaggaggccagggaggcaguggagg

SEQ ID NO: 449703 - RNA, 32 nt, Human
ggaagcagaguuuucaucagcugcugaagugg

SEQ ID NO: 449704 - RNA, 32 nt, Human
ggaagcagaugaaaggcuuaagaaaaaggcgg

SEQ ID NO: 449705 - RNA, 32 nt, Human
ggaagcagcacagagcuggacaggcuuugaac

SEQ ID NO: 449706 - RNA, 32 nt, Human
ggaagcagcagccucgccccuggcagagaugc

SEQ ID NO: 449707 - RNA, 32 nt, Human
ggaagcagcaggaaaugugcauguggguagag

SEQ ID NO: 449708 - RNA, 32 nt, Human
ggaagcagccaggaguggcuggggaagaaucu

SEQ ID NO: 449709 - RNA, 32 nt, Human
ggaagcagccccgggcugggaaagggcugagu

SEQ ID NO: 449710 - RNA, 16 nt, Human
ggaagcagccucagag

SEQ ID NO: 449711 - RNA, 17 nt, Human
ggaagcagcgcuggcug

SEQ ID NO: 449712 - RNA, 32 nt, Human
ggaagcagcucagcccagccugggagaggcca

SEQ ID NO: 449713 - RNA, 21 nt, Human
ggaagcagcugagcccaagga

SEQ ID NO: 449714 - RNA, 17 nt, Human
ggaagcagcugcagagg

SEQ ID NO: 449715 - RNA, 19 nt, Human
ggaagcagcuggaaagaga

SEQ ID NO: 449716 - RNA, 32 nt, Human
ggaagcagcuucuagagaacagcuucaggugc

SEQ ID NO: 449717 - RNA, 32 nt, Human
ggaagcaggaaagcacgaaggagcagccagcc

SEQ ID NO: 449718 - RNA, 16 nt, Human
ggaagcaggaacccca

SEQ ID NO: 449719 - RNA, 32 nt, Human
ggaagcaggaagcagacuccagagggccuccc

SEQ ID NO: 449720 - RNA, 32 nt, Human
ggaagcaggacccuccugacuggugcucuucc

SEQ ID NO: 449721 - RNA, 32 nt, Human
ggaagcaggaggaaacccgaagauccuggaga

SEQ ID NO: 449722 - RNA, 32 nt, Human
ggaagcaggcagcaggaggucugggggcugga

SEQ ID NO: 449723 - RNA, 32 nt, Human
ggaagcaggcagcaugggaagcaggauggcag

SEQ ID NO: 449724 - RNA, 20 nt, Human
ggaagcagggcagaacucug

SEQ ID NO: 449725 - RNA, 32 nt, Human
ggaagcaggggaggggagggagcagcugggca

SEQ ID NO: 449726 - RNA, 32 nt, Human
ggaagcaggggcugaggaacacuuagagggug

SEQ ID NO: 449727 - RNA, 22 nt, Human
ggaagcaggguaggaguccuuc

SEQ ID NO: 449728 - RNA, 20 nt, Human
ggaagcaggugucccuggag

SEQ ID NO: 449729 - RNA, 32 nt, Human
ggaagcaguaagugguagccaccccaccccug

SEQ ID NO: 449730 - RNA, 32 nt, Human
ggaagcagucuuaacaaaggcucuuuucagag

SEQ ID NO: 449731 - RNA, 32 nt, Human
ggaagcagugagaagcaccagaauugagaaac

SEQ ID NO: 449732 - RNA, 32 nt, Human
ggaagcaguuuggcccagcccaaggagacccc

SEQ ID NO: 449733 - RNA, 23 nt, Human
ggaagcauaggaugccauuucuu

SEQ ID NO: 449734 - RNA, 32 nt, Human
ggaagcaucacccaggcuggcagaucauggua

SEQ ID NO: 449735 - RNA, 32 nt, Human
ggaagcauccacccucucgcugccccagccug

SEQ ID NO: 449736 - RNA, 32 nt, Human
ggaagcauccaggaaccccagagcaggcagug

SEQ ID NO: 449737 - RNA, 22 nt, Human
ggaagcauccgagucacuccuu

SEQ ID NO: 449738 - RNA, 32 nt, Human
ggaagcaucuacccguucacuccagucccacc

SEQ ID NO: 449739 - RNA, 32 nt, Human
ggaagcaugaaggaugcacaggucaggccauu

SEQ ID NO: 449740 - RNA, 23 nt, Human
ggaagcaugccaacaaagccaca

SEQ ID NO: 449741 - RNA, 23 nt, Human
ggaagcaugccugaucucuucuu

SEQ ID NO: 449742 - RNA, 32 nt, Human
ggaagccaaaagacuggccaccucugguucaa

SEQ ID NO: 449743 - RNA, 32 nt, Human
ggaagccaaaccacagccucugcaucaaccag

SEQ ID NO: 449744 - RNA, 32 nt, Human
ggaagccaaagggcuccucucuacccugacuc

SEQ ID NO: 449745 - RNA, 32 nt, Human
ggaagccaacuuaacccaggggucugaaagua

SEQ ID NO: 449746 - RNA, 32 nt, Human
ggaagccaagcauggcccugccucuggcgccu

SEQ ID NO: 449747 - RNA, 25 nt, Human
ggaagccaaggagggaggaucacuu

SEQ ID NO: 449748 - RNA, 25 nt, Human
ggaagccaaggcaggaagacugcuu

SEQ ID NO: 449749 - RNA, 32 nt, Human
ggaagccaaggcaggaggauugcuugaggcca

SEQ ID NO: 449750 - RNA, 32 nt, Human
ggaagccaaggcagguggaucgcuugagcuca

SEQ ID NO: 449751 - RNA, 32 nt, Human
ggaagccaaggcagguggauugcuugagccca

SEQ ID NO: 449752 - RNA, 32 nt, Human
ggaagccaagggaggaggaucacuugagccca

SEQ ID NO: 449753 - RNA, 25 nt, Human
ggaagccaagguaagaggauugcuu

SEQ ID NO: 449754 - RNA, 32 nt, Human
ggaagccaagguaagaggauugcuugagccca

SEQ ID NO: 449755 - RNA, 23 nt, Human
ggaagccaagguaggaggaucau

SEQ ID NO: 449756 - RNA, 25 nt, Human
ggaagccaagguggaaggauugcuu

SEQ ID NO: 449757 - RNA, 25 nt, Human
ggaagccaaggugggagaauugcuu

SEQ ID NO: 449758 - RNA, 32 nt, Human
ggaagccaaggugggagaauugcuugaagcca

SEQ ID NO: 449759 - RNA, 25 nt, Human
ggaagccaaggugggaggaucacuu

SEQ ID NO: 449760 - RNA, 32 nt, Human
ggaagccaaggugggaguaucgcuugagccca

SEQ ID NO: 449761 - RNA, 32 nt, Human
ggaagccaaguccaggcugagccccaggagga

SEQ ID NO: 449762 - RNA, 32 nt, Human
ggaagccacaugcuggauggcuacaaggggcu

SEQ ID NO: 449763 - RNA, 20 nt, Human
ggaagccacccaacuucccu

SEQ ID NO: 449764 - RNA, 32 nt, Human
ggaagccaccgugugguucuuucacaggcacg

SEQ ID NO: 449765 - RNA, 32 nt, Human
ggaagccacugcaaccaggaccggaguggagg

SEQ ID NO: 449766 - RNA, 32 nt, Human
ggaagccacugccaccaugggagcuacuuccu

SEQ ID NO: 449767 - RNA, 25 nt, Human
ggaagccagacccacagaggcacuu

SEQ ID NO: 449768 - RNA, 32 nt, Human
ggaagccagaggucuugaaagacuucagccau

SEQ ID NO: 449769 - RNA, 32 nt, Human
ggaagccagcacuagcucucaucccccauccg

SEQ ID NO: 449770 - RNA, 32 nt, Human
ggaagccagcauggcuggagcacggaguggcc

SEQ ID NO: 449771 - RNA, 18 nt, Human
ggaagccagccucaggga

SEQ ID NO: 449772 - RNA, 32 nt, Human
ggaagccagcuggggaaaugggggcugcaggg

SEQ ID NO: 449773 - RNA, 20 nt, Human
ggaagccagcuuccagguca

SEQ ID NO: 449774 - RNA, 32 nt, Human
ggaagccaggagacugcaguggcaggucugga

SEQ ID NO: 449775 - RNA, 32 nt, Human
ggaagccaggauguaauucucagaaccagucu

SEQ ID NO: 449776 - RNA, 19 nt, Human
ggaagccaggcgcggggag

SEQ ID NO: 449777 - RNA, 32 nt, Human
ggaagccagggcaugaggauuguuugagccca

SEQ ID NO: 449778 - RNA, 19 nt, Human
ggaagccagggcucagaga

SEQ ID NO: 449779 - RNA, 32 nt, Human
ggaagccaggggacuccagccugggcggggug

SEQ ID NO: 449780 - RNA, 32 nt, Human
ggaagccagguaaagaggggccagggaagaau

SEQ ID NO: 449781 - RNA, 22 nt, Human
ggaagccaggucucuccucuca

SEQ ID NO: 449782 - RNA, 32 nt, Human
ggaagccagugcagggugggugaggaagugca

SEQ ID NO: 449783 - RNA, 32 nt, Human
ggaagccagugucccaggcguucucacgcccg

SEQ ID NO: 449784 - RNA, 32 nt, Human
ggaagccauagcacuccuaauguuuggugcua

SEQ ID NO: 449785 - RNA, 32 nt, Human
ggaagccaucaucucauuaccucugucagugc

SEQ ID NO: 449786 - RNA, 32 nt, Human
ggaagccaugguacaggcagagcucagggcga

SEQ ID NO: 449787 - RNA, 19 nt, Human
ggaagcccaacuccuauga

SEQ ID NO: 449788 - RNA, 32 nt, Human
ggaagcccaaguagauggcacacgcagugccc

SEQ ID NO: 449789 - RNA, 28 nt, Human
ggaagcccaaguguuggccauccucaac

SEQ ID NO: 449790 - RNA, 32 nt, Human
ggaagcccacggccuggcuggggcagggucaa

SEQ ID NO: 449791 - RNA, 27 nt, Human
ggaagcccagacacucggggccuggag

SEQ ID NO: 449792 - RNA, 32 nt, Human
ggaagcccagggagguugagcagugagagagg

SEQ ID NO: 449793 - RNA, 18 nt, Human
ggaagcccauccaucugg

SEQ ID NO: 449794 - RNA, 18 nt, Human
ggaagcccaucccuggga

SEQ ID NO: 449795 - RNA, 32 nt, Human
ggaagcccauuccuccccaucaguuggccucu

SEQ ID NO: 449796 - RNA, 32 nt, Human
ggaagccccucaggcucacacggggagccacc

SEQ ID NO: 449797 - RNA, 32 nt, Human
ggaagccccugcccuuccuguggcauagugug

SEQ ID NO: 449798 - RNA, 32 nt, Human
ggaagccccuggccagccuccaccugagccca

SEQ ID NO: 449799 - RNA, 32 nt, Human
ggaagcccgagaaacacaggagagcgagcgca

SEQ ID NO: 449800 - RNA, 32 nt, Human
ggaagcccgggagugagagaaagcggcuccgg

SEQ ID NO: 449801 - RNA, 32 nt, Human
ggaagcccucauccucaccaccucccccuucc

SEQ ID NO: 449802 - RNA, 32 nt, Human
ggaagcccucauccucaccgccucccccuucc

SEQ ID NO: 449803 - RNA, 32 nt, Human
ggaagcccuccccucuucauaguccccaucuc

SEQ ID NO: 449804 - RNA, 17 nt, Human
ggaagcccugacuuccc

SEQ ID NO: 449805 - RNA, 32 nt, Human
ggaagcccugcagaaaguuccaucaggcuguu

SEQ ID NO: 449806 - RNA, 32 nt, Human
ggaagcccugcagcagaaacaguguggcuccu

SEQ ID NO: 449807 - RNA, 32 nt, Human
ggaagcccugcccagggaugguccugccauga

SEQ ID NO: 449808 - RNA, 21 nt, Human
ggaagccgaagagccugggga

SEQ ID NO: 449809 - RNA, 32 nt, Human
ggaagccgaagcaggaggaucacuggaggcca

SEQ ID NO: 449810 - RNA, 32 nt, Human
ggaagccgaagcaggaguuguuguugcugagg

SEQ ID NO: 449811 - RNA, 32 nt, Human
ggaagccgagaaacagcggaaacagaacugag

SEQ ID NO: 449812 - RNA, 32 nt, Human
ggaagccgaggcgagagaauugcuugagacca

SEQ ID NO: 449813 - RNA, 32 nt, Human
ggaagccgaguucacucucugccugcccaggg

SEQ ID NO: 449814 - RNA, 24 nt, Human
ggaagccgauggcggcggcugcgg

SEQ ID NO: 449815 - RNA, 32 nt, Human
ggaagccgauucugauuccuguggacccacag

SEQ ID NO: 449816 - RNA, 32 nt, Human
ggaagccgcagcccaaggaggucgucacuugc

SEQ ID NO: 449817 - RNA, 19 nt, Human
ggaagccgcuuauccuguu

SEQ ID NO: 449818 - RNA, 32 nt, Human
ggaagccggaccuggagccggagcagccgcga

SEQ ID NO: 449819 - RNA, 32 nt, Human
ggaagccggagcuaguggaagacucugccuca

SEQ ID NO: 449820 - RNA, 17 nt, Human
ggaagccgggcuggcug

SEQ ID NO: 449821 - RNA, 32 nt, Human
ggaagccggggaaggccaggguggaagggcgg

SEQ ID NO: 449822 - RNA, 23 nt, Human
ggaagccggggcaaaggcugcag

SEQ ID NO: 449823 - RNA, 24 nt, Human
ggaagccguauguaugucaggggg

SEQ ID NO: 449824 - RNA, 32 nt, Human
ggaagccuagguguccuugagcugaaccgcac

SEQ ID NO: 449825 - RNA, 32 nt, Human
ggaagccuccgggagaccagagcugggugcag

SEQ ID NO: 449826 - RNA, 32 nt, Human
ggaagccucucagaggaggaggagcuggagac

SEQ ID NO: 449827 - RNA, 32 nt, Human
ggaagccucucaguagagaugaaccauggccc

SEQ ID NO: 449828 - RNA, 32 nt, Human
ggaagccucucaucauuggguuuccaucccca

SEQ ID NO: 449829 - RNA, 32 nt, Human
ggaagccucugaucucucuauuuggaaguuug

SEQ ID NO: 449830 - RNA, 32 nt, Human
ggaagccucugcacuuccacacauggcacagu

SEQ ID NO: 449831 - RNA, 16 nt, Human
ggaagccucugggagg

SEQ ID NO: 449832 - RNA, 32 nt, Human
ggaagccugaucauucuuccaucagcucugca

SEQ ID NO: 449833 - RNA, 32 nt, Human
ggaagccugcaaccaggacgcucuccaggagg

SEQ ID NO: 449834 - RNA, 32 nt, Human
ggaagccugcacgagacugcccauguguacau

SEQ ID NO: 449835 - RNA, 32 nt, Human
ggaagccugcacuccagcuucgaguggaacga

SEQ ID NO: 449836 - RNA, 23 nt, Human
ggaagccugcgugugcgcagcuc

SEQ ID NO: 449837 - RNA, 24 nt, Human
ggaagccugcuccuuccccucuca

SEQ ID NO: 449838 - RNA, 32 nt, Human
ggaagccuggacugugcagccuucgggcaccc

SEQ ID NO: 449839 - RNA, 32 nt, Human
ggaagccuggggacugcagcccagggacgagg

SEQ ID NO: 449840 - RNA, 32 nt, Human
ggaagccuguaaucccagcuacuugggaggcu

SEQ ID NO: 449841 - RNA, 32 nt, Human
ggaagccuguagucccagcuacuccggaggcu

SEQ ID NO: 449842 - RNA, 22 nt, Human
ggaagccuguggaggacuguuu

SEQ ID NO: 449843 - RNA, 22 nt, Human
ggaagccugugggcuccucuga

SEQ ID NO: 449844 - RNA, 32 nt, Human
ggaagccuucaaggagccaugggucugugcug

SEQ ID NO: 449845 - RNA, 32 nt, Human
ggaagccuugcucuuuuccaucaugccucuaa

SEQ ID NO: 449846 - RNA, 32 nt, Human
ggaagcgagagaggaggggagagacccuggcc

SEQ ID NO: 449847 - RNA, 32 nt, Human
ggaagcgagcagaggcuccacaggcuuacgcu

SEQ ID NO: 449848 - RNA, 32 nt, Human
ggaagcgaggaacccggccuucucccgcuccu

SEQ ID NO: 449849 - RNA, 32 nt, Human
ggaagcgaugcagcauccagaacgacggagga

SEQ ID NO: 449850 - RNA, 32 nt, Human
ggaagcgauggagcccgggaagagaagaacca

SEQ ID NO: 449851 - RNA, 30 nt, Human
ggaagcgauucucccaugcucauguguaau

SEQ ID NO: 449852 - RNA, 22 nt, Human
ggaagcgcgagggccucaaagg

SEQ ID NO: 449853 - RNA, 32 nt, Human
ggaagcgcggaggcggggcgcgggggcagugg

SEQ ID NO: 449854 - RNA, 22 nt, Human
ggaagcgcggcggggccuccag

SEQ ID NO: 449855 - RNA, 32 nt, Human
ggaagcgcuucacuccagguugguagcuucuu

SEQ ID NO: 449856 - RNA, 17 nt, Human
ggaagcggagaccccga

SEQ ID NO: 449857 - RNA, 32 nt, Human
ggaagcggagccaacaugccaguggcccggag

SEQ ID NO: 449858 - RNA, 23 nt, Human
ggaagcggaggaggcggaggcgg

SEQ ID NO: 449859 - RNA, 32 nt, Human
ggaagcggagggggagcagguuugcggggcca

SEQ ID NO: 449860 - RNA, 23 nt, Human
ggaagcggcgguggcggccgcgg

SEQ ID NO: 449861 - RNA, 32 nt, Human
ggaagcgggaggagagccacacggucaaguug

SEQ ID NO: 449862 - RNA, 24 nt, Human
ggaagcgggaggcgagcggguagg

SEQ ID NO: 449863 - RNA, 32 nt, Human
ggaagcgggggagugggcucgucuccuaaauu

SEQ ID NO: 449864 - RNA, 32 nt, Human
ggaagcgggguccucagcugggggccucgggg

SEQ ID NO: 449865 - RNA, 31 nt, Human
ggaagcgggguucucccugccacagggaccc

SEQ ID NO: 449866 - RNA, 20 nt, Human
ggaagcguugccgcuggcug

SEQ ID NO: 449867 - RNA, 31 nt, Human
ggaagcuaaaggaacuugggcauucagggag

SEQ ID NO: 449868 - RNA, 23 nt, Human
ggaagcuaaauaucaucuaucuu

SEQ ID NO: 449869 - RNA, 32 nt, Human
ggaagcuaagucccaggaaaacauaccuacag

SEQ ID NO: 449870 - RNA, 24 nt, Human
ggaagcuacccugagauauaguca

SEQ ID NO: 449871 - RNA, 32 nt, Human
ggaagcuacuguccucacacuccuggaucacu

SEQ ID NO: 449872 - RNA, 32 nt, Human
ggaagcuaggaaaaggaaagugaaggaauggu

SEQ ID NO: 449873 - RNA, 32 nt, Human
ggaagcucacagaacuugggucuggcuggcuc

SEQ ID NO: 449874 - RNA, 32 nt, Human
ggaagcucagagcgcuggucuccacccuggug

SEQ ID NO: 449875 - RNA, 32 nt, Human
ggaagcucaucauccagcucaggaagagauga

SEQ ID NO: 449876 - RNA, 32 nt, Human
ggaagcucauuuccagaagauccuuaaaauga

SEQ ID NO: 449877 - RNA, 32 nt, Human
ggaagcuccacaaauucauuugccuauucauu

SEQ ID NO: 449878 - RNA, 32 nt, Human
ggaagcuccagccccaggauggggcugcccug

SEQ ID NO: 449879 - RNA, 32 nt, Human
ggaagcuccagcugcugcugggcugccuggca

SEQ ID NO: 449880 - RNA, 32 nt, Human
ggaagcuccaucugagcaaguacaccaaauga

SEQ ID NO: 449881 - RNA, 32 nt, Human
ggaagcuccuuuuucuccaccucucucaauac

SEQ ID NO: 449882 - RNA, 32 nt, Human
ggaagcucuaaauuugaaacuguacuuaauaa

SEQ ID NO: 449883 - RNA, 32 nt, Human
ggaagcucucagaaaaaucucuagugguggcu

SEQ ID NO: 449884 - RNA, 32 nt, Human
ggaagcucugaggaugguugcagugaggaagc

SEQ ID NO: 449885 - RNA, 32 nt, Human
ggaagcucugcaucccuucucccauaccuugc

SEQ ID NO: 449886 - RNA, 32 nt, Human
ggaagcucuucauuuauaaagcuauuugaagg

SEQ ID NO: 449887 - RNA, 32 nt, Human
ggaagcucuucuuccugcuuggcuuccaccuu

SEQ ID NO: 449888 - RNA, 19 nt, Human
ggaagcugaacccuuggaa

SEQ ID NO: 449889 - RNA, 32 nt, Human
ggaagcugaagcagaaagauugcuugagccug

SEQ ID NO: 449890 - RNA, 19 nt, Human
ggaagcugaagcaggagaa

SEQ ID NO: 449891 - RNA, 25 nt, Human
ggaagcugaagcaggaggauugcuu

SEQ ID NO: 449892 - RNA, 32 nt, Human
ggaagcugaagcaggaggauugcuugagccca

SEQ ID NO: 449893 - RNA, 19 nt, Human
ggaagcugaagcccgggga

SEQ ID NO: 449894 - RNA, 32 nt, Human
ggaagcugaaggccacuuccucccagauggcc

SEQ ID NO: 449895 - RNA, 17 nt, Human
ggaagcugaagugggag

SEQ ID NO: 449896 - RNA, 31 nt, Human
ggaagcugacuucuuaggcuaaaggacaaaa

SEQ ID NO: 449897 - RNA, 19 nt, Human
ggaagcugagaagcuggaa

SEQ ID NO: 449898 - RNA, 32 nt, Human
ggaagcugagacaggaggaucgcuugaaccca

SEQ ID NO: 449899 - RNA, 32 nt, Human
ggaagcugagacgagacaaucgcuugaaccuu

SEQ ID NO: 449900 - RNA, 20 nt, Human
ggaagcugagccuccaggag

SEQ ID NO: 449901 - RNA, 32 nt, Human
ggaagcugaggaaggagaauugcuugaacccg

SEQ ID NO: 449902 - RNA, 32 nt, Human
ggaagcugaggcaauagaauugcuugaaccug

SEQ ID NO: 449903 - RNA, 32 nt, Human
ggaagcugaggcagaagaaucgcuugaacucg

SEQ ID NO: 449904 - RNA, 32 nt, Human
ggaagcugaggcaggaaaaucgcuugaaccug

SEQ ID NO: 449905 - RNA, 32 nt, Human
ggaagcugaggcaggagaaucgcuugaacccg

SEQ ID NO: 449906 - RNA, 32 nt, Human
ggaagcugaggcaggagaaucgcuugaaccug

SEQ ID NO: 449907 - RNA, 32 nt, Human
ggaagcugaggcaggagaauugcuugaaccca

SEQ ID NO: 449908 - RNA, 32 nt, Human
ggaagcugaggcaggagaauugcuugaaccug

SEQ ID NO: 449909 - RNA, 22 nt, Human
ggaagcugaggcaggaggauca

SEQ ID NO: 449910 - RNA, 32 nt, Human
ggaagcugaggcaggaggaucucuugaacccg

SEQ ID NO: 449911 - RNA, 16 nt, Human
ggaagcugaggcaggg

SEQ ID NO: 449912 - RNA, 19 nt, Human
ggaagcugaggcaggggga

SEQ ID NO: 449913 - RNA, 20 nt, Human
ggaagcugaggccacaggga

SEQ ID NO: 449914 - RNA, 20 nt, Human
ggaagcugaggccacgggag

SEQ ID NO: 449915 - RNA, 32 nt, Human
ggaagcugaggcgagagaaucgcuugaacccg

SEQ ID NO: 449916 - RNA, 32 nt, Human
ggaagcugaggcgagagaaucgcuugaaccug

SEQ ID NO: 449917 - RNA, 19 nt, Human
ggaagcugaggcucagaga

SEQ ID NO: 449918 - RNA, 21 nt, Human
ggaagcugagggcacgaggag

SEQ ID NO: 449919 - RNA, 21 nt, Human
ggaagcugagggcccgcugag

SEQ ID NO: 449920 - RNA, 20 nt, Human
ggaagcugaggggcaugagg

SEQ ID NO: 449921 - RNA, 32 nt, Human
ggaagcugagguaggagaaucgcuugaaccca

SEQ ID NO: 449922 - RNA, 25 nt, Human
ggaagcugagguaggaggauugcuu

SEQ ID NO: 449923 - RNA, 32 nt, Human
ggaagcugagguaggaggauugcuugagccca

SEQ ID NO: 449924 - RNA, 32 nt, Human
ggaagcugaggugagaggaucucuagagccca

SEQ ID NO: 449925 - RNA, 32 nt, Human
ggaagcugaggugggaagaucgcuugagccca

SEQ ID NO: 449926 - RNA, 25 nt, Human
ggaagcugaggugggaggaucacuu

SEQ ID NO: 449927 - RNA, 32 nt, Human
ggaagcugaggugggaggauugauugagcuca

SEQ ID NO: 449928 - RNA, 32 nt, Human
ggaagcugaggugggagggucgcuugagccca

SEQ ID NO: 449929 - RNA, 32 nt, Human
ggaagcugcaccugacagaagcuccaggaugc

SEQ ID NO: 449930 - RNA, 32 nt, Human
ggaagcugcaccugacggagcauaccgacuuc

SEQ ID NO: 449931 - RNA, 32 nt, Human
ggaagcugcauccacagcagaccucacugaca

SEQ ID NO: 449932 - RNA, 22 nt, Human
ggaagcugcccugcccuuggaa

SEQ ID NO: 449933 - RNA, 32 nt, Human
ggaagcugccuugggaucagagcagacauaaa

SEQ ID NO: 449934 - RNA, 19 nt, Human
ggaagcugcucacacucuu

SEQ ID NO: 449935 - RNA, 32 nt, Human
ggaagcugcuggcugacugccauguccacgca

SEQ ID NO: 449936 - RNA, 32 nt, Human
ggaagcugcugucccacuugggccauaugauc

SEQ ID NO: 449937 - RNA, 22 nt, Human
ggaagcugcugucucccaggaa

SEQ ID NO: 449938 - RNA, 32 nt, Human
ggaagcugcuucuguuuggccacaggccugug

SEQ ID NO: 449939 - RNA, 32 nt, Human
ggaagcuggaaacccugcauaguguggcugag

SEQ ID NO: 449940 - RNA, 32 nt, Human
ggaagcuggagaagaugacaaagaggaagaag

SEQ ID NO: 449941 - RNA, 32 nt, Human
ggaagcuggagagagcacagugaaauugaaau

SEQ ID NO: 449942 - RNA, 19 nt, Human
ggaagcuggagcucagaga

SEQ ID NO: 449943 - RNA, 32 nt, Human
ggaagcuggcgcugggggaggcugagggugag

SEQ ID NO: 449944 - RNA, 32 nt, Human
ggaagcuggcggggacugggaggcaggaaccu

SEQ ID NO: 449945 - RNA, 16 nt, Human
ggaagcuggcuggcug

SEQ ID NO: 449946 - RNA, 26 nt, Human
ggaagcuggcugggugggugugguua

SEQ ID NO: 449947 - RNA, 32 nt, Human
ggaagcuggcuuguucagggguccccagcagg

SEQ ID NO: 449948 - RNA, 32 nt, Human
ggaagcugggaaagacugauguugauuuggaa

SEQ ID NO: 449949 - RNA, 21 nt, Human
ggaagcugggaaaugaaguca

SEQ ID NO: 449950 - RNA, 32 nt, Human
ggaagcugggagaaaggaggucgaggaggagg

SEQ ID NO: 449951 - RNA, 32 nt, Human
ggaagcugggaggucaggugggguggaugaua

SEQ ID NO: 449952 - RNA, 19 nt, Human
ggaagcugggccucagagg

SEQ ID NO: 449953 - RNA, 32 nt, Human
ggaagcuggggagagaaaggaaggaaacggga

SEQ ID NO: 449954 - RNA, 32 nt, Human
ggaagcugggggaaggguggucugagcacccc

SEQ ID NO: 449955 - RNA, 20 nt, Human
ggaagcugucccugcccagu

SEQ ID NO: 449956 - RNA, 18 nt, Human
ggaagcugugcccaggaa

SEQ ID NO: 449957 - RNA, 32 nt, Human
ggaagcugugcuguagccuguaauuacugaca

SEQ ID NO: 449958 - RNA, 32 nt, Human
ggaagcuguggcugccggcggugggacgcccc

SEQ ID NO: 449959 - RNA, 32 nt, Human
ggaagcuguggcugggcgugggaaggcugagu

SEQ ID NO: 449960 - RNA, 32 nt, Human
ggaagcuguggggagaccagaggaucaagcug

SEQ ID NO: 449961 - RNA, 21 nt, Human
ggaagcuguucuaccuuggaa

SEQ ID NO: 449962 - RNA, 32 nt, Human
ggaagcuuacagucaugguggaaggugaacag

SEQ ID NO: 449963 - RNA, 31 nt, Human
ggaagcuuauuagguucacuguugaaugaug

SEQ ID NO: 449964 - RNA, 32 nt, Human
ggaagcuuccugccuuuuucuuugguugcucc

SEQ ID NO: 449965 - RNA, 32 nt, Human
ggaagcuucuaggaggcugagaagcaggagau

SEQ ID NO: 449966 - RNA, 32 nt, Human
ggaagcuugacaggcagcugggcaucagugca

SEQ ID NO: 449967 - RNA, 32 nt, Human
ggaagcuuugggcuucggugggugcaggcuca

SEQ ID NO: 449968 - RNA, 21 nt, Human
ggaagcuuuugaauuuuuuca

SEQ ID NO: 449969 - RNA, 32 nt, Human
ggaaggaaaagugccaugucaacccccaguaa

SEQ ID NO: 449970 - RNA, 32 nt, Human
ggaaggaaacccacaaaccaaagauacuguag

SEQ ID NO: 449971 - RNA, 32 nt, Human
ggaaggaaagaaagaaggaagugaagagggag

SEQ ID NO: 449972 - RNA, 32 nt, Human
ggaaggaaagagaacgggccaagacugggacu

SEQ ID NO: 449973 - RNA, 32 nt, Human
ggaaggaaagagaccuuccuggucacacuugg

SEQ ID NO: 449974 - RNA, 32 nt, Human
ggaaggaaagccauuaaucuuugcacaguacc

SEQ ID NO: 449975 - RNA, 23 nt, Human
ggaaggaaaggagggagggagcg

SEQ ID NO: 449976 - RNA, 32 nt, Human
ggaaggaacucaccuugaacuuagcuuucuuu

SEQ ID NO: 449977 - RNA, 32 nt, Human
ggaaggaagaaaggaggaagaggcaggcacaa

SEQ ID NO: 449978 - RNA, 32 nt, Human
ggaaggaagaaggaggcuaggagcagggggaa

SEQ ID NO: 449979 - RNA, 32 nt, Human
ggaaggaagaaugaaauuaaaaggagacuuuc

SEQ ID NO: 449980 - RNA, 32 nt, Human
ggaaggaagagaaaggggagcucuccagcaaa

SEQ ID NO: 449981 - RNA, 32 nt, Human
ggaaggaagcucuugcuucucaguccaugcuc

SEQ ID NO: 449982 - RNA, 32 nt, Human
ggaaggaagcuuggcugcucaguuucugaguc

SEQ ID NO: 449983 - RNA, 32 nt, Human
ggaaggaaggaaaaggaggggagaggagggga

SEQ ID NO: 449984 - RNA, 32 nt, Human
ggaaggaaggaaggaaggaaagaaagaaaggu

SEQ ID NO: 449985 - RNA, 32 nt, Human
ggaaggaaggaaggaaggaagaaagaaagaaa

SEQ ID NO: 449986 - RNA, 32 nt, Human
ggaaggaaggaaggagaaaggaaaggaaggca

SEQ ID NO: 449987 - RNA, 32 nt, Human
ggaaggaaggacuggaaggaaaaagagacagg

SEQ ID NO: 449988 - RNA, 20 nt, Human
ggaaggaaggagcacccaga

SEQ ID NO: 449989 - RNA, 32 nt, Human
ggaaggaaggcaacugugaggcuucugagaag

SEQ ID NO: 449990 - RNA, 19 nt, Human
ggaaggaaggguuggggga

SEQ ID NO: 449991 - RNA, 32 nt, Human
ggaaggacacagacccaaaagccagacccagg

SEQ ID NO: 449992 - RNA, 19 nt, Human
ggaaggacccaggauuuga

SEQ ID NO: 449993 - RNA, 21 nt, Human
ggaaggaccccacauccuucu

SEQ ID NO: 449994 - RNA, 32 nt, Human
ggaaggaccgggaaggaagagcggagccggag

SEQ ID NO: 449995 - RNA, 32 nt, Human
ggaaggaccuuuccucaccucccuuuugacag

SEQ ID NO: 449996 - RNA, 32 nt, Human
ggaaggacgaggcagagcuccgcgcugacgaa

SEQ ID NO: 449997 - RNA, 32 nt, Human
ggaaggacucacacuggagaaaaacccuauga

SEQ ID NO: 449998 - RNA, 32 nt, Human
ggaaggacucggccgggccgccggaugugacg

SEQ ID NO: 449999 - RNA, 32 nt, Human
ggaaggacugaggaagggaggccugggggccg

SEQ ID NO: 450000 - RNA, 32 nt, Human
ggaaggacuggggcacuuucugccacaguaga

SEQ ID NO: 450001 - RNA, 22 nt, Human
ggaaggacuguggcugcaggug

SEQ ID NO: 450002 - RNA, 19 nt, Human
ggaaggacuugcugggagg

SEQ ID NO: 450003 - RNA, 32 nt, Human
ggaaggagaacagugucaucucuuccuuuguu

SEQ ID NO: 450004 - RNA, 32 nt, Human
ggaaggagaaggccuuugcugccugaaagucu

SEQ ID NO: 450005 - RNA, 32 nt, Human
ggaaggagagaaggaaggaaggaacuuccgua

SEQ ID NO: 450006 - RNA, 32 nt, Human
ggaaggagaggcacccacacaaaggacgcagg

SEQ ID NO: 450007 - RNA, 32 nt, Human
ggaaggagaggggagagcagcgacaggccucc

SEQ ID NO: 450008 - RNA, 32 nt, Human
ggaaggagagguuucucacaccaaggcagaug

SEQ ID NO: 450009 - RNA, 32 nt, Human
ggaaggagauggagcuugcgggagcccccacu

SEQ ID NO: 450010 - RNA, 18 nt, Human
ggaaggagauuugggaga

SEQ ID NO: 450011 - RNA, 32 nt, Human
ggaaggagcccucccucucucccuugucccuc

SEQ ID NO: 450012 - RNA, 32 nt, Human
ggaaggagcuagugggggacucgaggccugag

SEQ ID NO: 450013 - RNA, 32 nt, Human
ggaaggaggaggaggacccugcaccucagggg

SEQ ID NO: 450014 - RNA, 32 nt, Human
ggaaggaggaggaggaggagcaaagguguugg

SEQ ID NO: 450015 - RNA, 32 nt, Human
ggaaggaggcagcuaggcuguagauggaagau

SEQ ID NO: 450016 - RNA, 21 nt, Human
ggaaggaggcaggugcaggug

SEQ ID NO: 450017 - RNA, 32 nt, Human
ggaaggaggcugggacugugcccugacaugau

SEQ ID NO: 450018 - RNA, 32 nt, Human
ggaaggagggagcagggcucggcgaggggaag

SEQ ID NO: 450019 - RNA, 24 nt, Human
ggaaggagggcagggggcgcggga

SEQ ID NO: 450020 - RNA, 32 nt, Human
ggaaggagggccuguggcugcaguccaggcau

SEQ ID NO: 450021 - RNA, 17 nt, Human
ggaaggaggggaggaga

SEQ ID NO: 450022 - RNA, 32 nt, Human
ggaaggaggggaggagaaaggcaaaagcaaac

SEQ ID NO: 450023 - RNA, 32 nt, Human
ggaaggaggggagggaaaagucccacggagga

SEQ ID NO: 450024 - RNA, 18 nt, Human
ggaaggaggggagggaga

SEQ ID NO: 450025 - RNA, 18 nt, Human
ggaaggagggggaggagg

SEQ ID NO: 450026 - RNA, 21 nt, Human
ggaaggagggugccugggagg

SEQ ID NO: 450027 - RNA, 20 nt, Human
ggaaggaggguguggggagg

SEQ ID NO: 450028 - RNA, 19 nt, Human
ggaaggaggguuagggagg

SEQ ID NO: 450029 - RNA, 24 nt, Human
ggaaggaggucucccguugggaga

SEQ ID NO: 450030 - RNA, 21 nt, Human
ggaaggaggugggggccggga

SEQ ID NO: 450031 - RNA, 22 nt, Human
ggaaggaguacggaggccgaga

SEQ ID NO: 450032 - RNA, 32 nt, Human
ggaaggaguccugggagcauggcuuucccuga

SEQ ID NO: 450033 - RNA, 18 nt, Human
ggaaggagucgcugggag

SEQ ID NO: 450034 - RNA, 32 nt, Human
ggaaggaguuacuguguuauucugaguucuua

SEQ ID NO: 450035 - RNA, 32 nt, Human
ggaaggaguugacaggugggcccagugaacuu

SEQ ID NO: 450036 - RNA, 32 nt, Human
ggaaggaguuugcagagaagcuggagucccug

SEQ ID NO: 450037 - RNA, 32 nt, Human
ggaaggauagaagcuugaagaccuggggaaau

SEQ ID NO: 450038 - RNA, 25 nt, Human
ggaaggauauguaauaaugcaggug

SEQ ID NO: 450039 - RNA, 32 nt, Human
ggaaggaucuuucuaguccagccccucgcuuu

SEQ ID NO: 450040 - RNA, 32 nt, Human
ggaaggaugucagcugaccucucaccucccau

SEQ ID NO: 450041 - RNA, 20 nt, Human
ggaaggauugcucgaggcca

SEQ ID NO: 450042 - RNA, 32 nt, Human
ggaaggauuuugucgucugccucccaguucug

SEQ ID NO: 450043 - RNA, 32 nt, Human
ggaaggcaaauacucaggguuugaagggagac

SEQ ID NO: 450044 - RNA, 32 nt, Human
ggaaggcaagcuccaaaccccugccuggaaga

SEQ ID NO: 450045 - RNA, 19 nt, Human
ggaaggcaauggguuucaa

SEQ ID NO: 450046 - RNA, 32 nt, Human
ggaaggcaauugcuccuuaacagcagaguauc

SEQ ID NO: 450047 - RNA, 32 nt, Human
ggaaggcacacagagaggccacgugaggacac

SEQ ID NO: 450048 - RNA, 32 nt, Human
ggaaggcacaccauggcuuccucugcuugguu

SEQ ID NO: 450049 - RNA, 32 nt, Human
ggaaggcacagggaagcaucagcaaccaaggu

SEQ ID NO: 450050 - RNA, 32 nt, Human
ggaaggcaccaauuuucccagccccacuccca

SEQ ID NO: 450051 - RNA, 19 nt, Human
ggaaggcacccaagcucua

SEQ ID NO: 450052 - RNA, 32 nt, Human
ggaaggcacuaaggggaagggagaagcccuca

SEQ ID NO: 450053 - RNA, 22 nt, Human
ggaaggcacuugggauuuucug

SEQ ID NO: 450054 - RNA, 32 nt, Human
ggaaggcagacaggcgccagagcccagcacuc

SEQ ID NO: 450055 - RNA, 24 nt, Human
ggaaggcagacgagaggcacuuua

SEQ ID NO: 450056 - RNA, 32 nt, Human
ggaaggcagagcagcgucugccugacggggag

SEQ ID NO: 450057 - RNA, 18 nt, Human
ggaaggcagaggcaguga

SEQ ID NO: 450058 - RNA, 32 nt, Human
ggaaggcagagugugacagagcagagccaggg

SEQ ID NO: 450059 - RNA, 21 nt, Human
ggaaggcagccaggcuggcag

SEQ ID NO: 450060 - RNA, 32 nt, Human
ggaaggcagccaggcuggcagauuuccaaaag

SEQ ID NO: 450061 - RNA, 20 nt, Human
ggaaggcagccgcacccugg

SEQ ID NO: 450062 - RNA, 22 nt, Human
ggaaggcagcuuucauuuguuu

SEQ ID NO: 450063 - RNA, 32 nt, Human
ggaaggcaggagaggccagggaagcagaggag

SEQ ID NO: 450064 - RNA, 32 nt, Human
ggaaggcaggcaggacgggggcguuggggagc

SEQ ID NO: 450065 - RNA, 21 nt, Human
ggaaggcaggcaggagcucug

SEQ ID NO: 450066 - RNA, 19 nt, Human
ggaaggcaggcagggcucu

SEQ ID NO: 450067 - RNA, 32 nt, Human
ggaaggcaggcuuaaagccaggaagcaccuca

SEQ ID NO: 450068 - RNA, 21 nt, Human
ggaaggcagggaggaggcaga

SEQ ID NO: 450069 - RNA, 19 nt, Human
ggaaggcagggagggccug

SEQ ID NO: 450070 - RNA, 32 nt, Human
ggaaggcagggugguuggaacagaacaagaga

SEQ ID NO: 450071 - RNA, 23 nt, Human
ggaaggccaagacagguggauca

SEQ ID NO: 450072 - RNA, 32 nt, Human
ggaaggccaagugcugcaaguggcugggagug

SEQ ID NO: 450073 - RNA, 32 nt, Human
ggaaggccagaaccucacccugcccuccuccc

SEQ ID NO: 450074 - RNA, 21 nt, Human
ggaaggccagccccgcaucuc

SEQ ID NO: 450075 - RNA, 21 nt, Human
ggaaggccagcccuccuccuc

SEQ ID NO: 450076 - RNA, 21 nt, Human
ggaaggccagugcaacccccu

SEQ ID NO: 450077 - RNA, 32 nt, Human
ggaaggccaguuccaauuugagccgcugugaa

SEQ ID NO: 450078 - RNA, 32 nt, Human
ggaaggcccaccccuggggcugggcaguguag

SEQ ID NO: 450079 - RNA, 32 nt, Human
ggaaggcccacuguccagcagcccccagguug

SEQ ID NO: 450080 - RNA, 32 nt, Human
ggaaggcccccaggaggagcaggcugguggca

SEQ ID NO: 450081 - RNA, 32 nt, Human
ggaaggcccgggccauuucuucccugaccugu

SEQ ID NO: 450082 - RNA, 20 nt, Human
ggaaggcccucaccuggagg

SEQ ID NO: 450083 - RNA, 32 nt, Human
ggaaggcccugagcgucacugcugcugggcgg

SEQ ID NO: 450084 - RNA, 32 nt, Human
ggaaggcccugaggcggaggcugugcuccgcc

SEQ ID NO: 450085 - RNA, 32 nt, Human
ggaaggcccuggggacccuugugccuguugcu

SEQ ID NO: 450086 - RNA, 32 nt, Human
ggaaggcccugggggugcaguggagcgaccgu

SEQ ID NO: 450087 - RNA, 21 nt, Human
ggaaggccgagcaaggaccau

SEQ ID NO: 450088 - RNA, 21 nt, Human
ggaaggccgaggcagaggauc

SEQ ID NO: 450089 - RNA, 23 nt, Human
ggaaggccgaggcaggaggauca

SEQ ID NO: 450090 - RNA, 23 nt, Human
ggaaggccgaggcaggcagaucg

SEQ ID NO: 450091 - RNA, 23 nt, Human
ggaaggccgaggcaggcggauca

SEQ ID NO: 450092 - RNA, 22 nt, Human
ggaaggccgaggcaggcggauu

SEQ ID NO: 450093 - RNA, 23 nt, Human
ggaaggccgaggcagguggauca

SEQ ID NO: 450094 - RNA, 23 nt, Human
ggaaggccgaggcgggcagauca

SEQ ID NO: 450095 - RNA, 23 nt, Human
ggaaggccgaggcgggcggauca

SEQ ID NO: 450096 - RNA, 23 nt, Human
ggaaggccgaggcggggggauca

SEQ ID NO: 450097 - RNA, 23 nt, Human
ggaaggccgaggcggguggguca

SEQ ID NO: 450098 - RNA, 24 nt, Human
ggaaggccgaggugggcagaucau

SEQ ID NO: 450099 - RNA, 21 nt, Human
ggaaggccgagguggguggau

SEQ ID NO: 450100 - RNA, 23 nt, Human
ggaaggccgagguggguggauca

SEQ ID NO: 450101 - RNA, 24 nt, Human
ggaaggccgggcgcgguggcucau

SEQ ID NO: 450102 - RNA, 18 nt, Human
ggaaggccgggguggauc

SEQ ID NO: 450103 - RNA, 23 nt, Human
ggaaggccgggguggaucccucu

SEQ ID NO: 450104 - RNA, 32 nt, Human
ggaaggccucacguuguccuccagagcugcuc

SEQ ID NO: 450105 - RNA, 32 nt, Human
ggaaggccugcucugccccacugggguguccu

SEQ ID NO: 450106 - RNA, 32 nt, Human
ggaaggccuuccagaucuggcuccagggucac

SEQ ID NO: 450107 - RNA, 32 nt, Human
ggaaggccuuucucuccaugcuccuuuugcgg

SEQ ID NO: 450108 - RNA, 32 nt, Human
ggaaggcgaagguaguuaauaauuugaauaga

SEQ ID NO: 450109 - RNA, 32 nt, Human
ggaaggcgagcucuccuccaccguccaaagua

SEQ ID NO: 450110 - RNA, 32 nt, Human
ggaaggcgaggcgagcuuuggugaggaggcgc

SEQ ID NO: 450111 - RNA, 25 nt, Human
ggaaggcgaggugccuggccugcca

SEQ ID NO: 450112 - RNA, 32 nt, Human
ggaaggcgauuggcaucgaucucuccaucccu

SEQ ID NO: 450113 - RNA, 32 nt, Human
ggaaggcgcugggccuggaccucugccacuca

SEQ ID NO: 450114 - RNA, 32 nt, Human
ggaaggcggccuuccccugcaguccugugucc

SEQ ID NO: 450115 - RNA, 21 nt, Human
ggaaggcgguagguaccuacc

SEQ ID NO: 450116 - RNA, 32 nt, Human
ggaaggcgguucugagagcuucagagagcgau

SEQ ID NO: 450117 - RNA, 32 nt, Human
ggaaggcgguugcagcuccugagugcagcgcg

SEQ ID NO: 450118 - RNA, 22 nt, Human
ggaaggcuaaugagucugaacu

SEQ ID NO: 450119 - RNA, 32 nt, Human
ggaaggcucaaaggagucaacauuuagaucug

SEQ ID NO: 450120 - RNA, 32 nt, Human
ggaaggcuccugggccuuucuggcucugggaa

SEQ ID NO: 450121 - RNA, 20 nt, Human
ggaaggcucggcgcccccuc

SEQ ID NO: 450122 - RNA, 23 nt, Human
ggaaggcucugguggagaaccug

SEQ ID NO: 450123 - RNA, 32 nt, Human
ggaaggcucugguucucuagggacuugaaggc

SEQ ID NO: 450124 - RNA, 23 nt, Human
ggaaggcugaagcccgcuuccca

SEQ ID NO: 450125 - RNA, 32 nt, Human
ggaaggcugagccucuccccagccuucaugcc

SEQ ID NO: 450126 - RNA, 23 nt, Human
ggaaggcugaggcacauggacca

SEQ ID NO: 450127 - RNA, 23 nt, Human
ggaaggcugaggcaggagaauca

SEQ ID NO: 450128 - RNA, 24 nt, Human
ggaaggcugaggcaggagaaucau

SEQ ID NO: 450129 - RNA, 24 nt, Human
ggaaggcugaggcaggaggaucau

SEQ ID NO: 450130 - RNA, 24 nt, Human
ggaaggcugaggcgggcagaucau

SEQ ID NO: 450131 - RNA, 23 nt, Human
ggaaggcugaggcgggcggauca

SEQ ID NO: 450132 - RNA, 32 nt, Human
ggaaggcugcccuguggccacacccauccucc

SEQ ID NO: 450133 - RNA, 22 nt, Human
ggaaggcugcgagaggacucua

SEQ ID NO: 450134 - RNA, 32 nt, Human
ggaaggcuggagaggcagacggugggacccac

SEQ ID NO: 450135 - RNA, 32 nt, Human
ggaaggcugggcagacuggcuuuuguuaccug

SEQ ID NO: 450136 - RNA, 19 nt, Human
ggaaggcugggcugggagg

SEQ ID NO: 450137 - RNA, 32 nt, Human
ggaaggcuggggccgggcaggccaggccaagc

SEQ ID NO: 450138 - RNA, 22 nt, Human
ggaaggcugugcccaucuccca

SEQ ID NO: 450139 - RNA, 32 nt, Human
ggaaggcuguggggucuugcucugccuuagca

SEQ ID NO: 450140 - RNA, 18 nt, Human
ggaaggcuguguuucuga

SEQ ID NO: 450141 - RNA, 32 nt, Human
ggaaggcuuggccuugaugaugcagcuggccc

SEQ ID NO: 450142 - RNA, 32 nt, Human
ggaagggaaacaauaaaucucgcugaauugaa

SEQ ID NO: 450143 - RNA, 32 nt, Human
ggaagggaaaggggaggaagauggagggagaa

SEQ ID NO: 450144 - RNA, 32 nt, Human
ggaagggaacugcugggcucauccacaccaug

SEQ ID NO: 450145 - RNA, 32 nt, Human
ggaagggaagagcucugaaggagccagagggg

SEQ ID NO: 450146 - RNA, 32 nt, Human
ggaagggaagcacacucugcuguucuggaauc

SEQ ID NO: 450147 - RNA, 32 nt, Human
ggaagggaaggaaggagagggagggggaggau

SEQ ID NO: 450148 - RNA, 32 nt, Human
ggaagggaaggaggagaaagcaggcgaagcgg

SEQ ID NO: 450149 - RNA, 32 nt, Human
ggaagggaagugaggaggagggacaaggaaga

SEQ ID NO: 450150 - RNA, 32 nt, Human
ggaagggaauggggagaagggagaagcaagca

SEQ ID NO: 450151 - RNA, 19 nt, Human
ggaagggacaagcugugga

SEQ ID NO: 450152 - RNA, 32 nt, Human
ggaagggacaccaucaggccucuggcugaggc

SEQ ID NO: 450153 - RNA, 32 nt, Human
ggaagggacugcagaggugugcgagaugagug

SEQ ID NO: 450154 - RNA, 32 nt, Human
ggaagggacuuccucuuucucucccuccuccc

SEQ ID NO: 450155 - RNA, 32 nt, Human
ggaagggagaggagguguaagauggucacucu

SEQ ID NO: 450156 - RNA, 32 nt, Human
ggaagggagagggagaaaaggaggagaacagg

SEQ ID NO: 450157 - RNA, 32 nt, Human
ggaagggagagggggagcuguuugucacacuu

SEQ ID NO: 450158 - RNA, 32 nt, Human
ggaagggagcccagcuggugacaagagagccc

SEQ ID NO: 450159 - RNA, 19 nt, Human
ggaagggagcugcugggaa

SEQ ID NO: 450160 - RNA, 32 nt, Human
ggaagggaggaggagagccaggugagcagugg

SEQ ID NO: 450161 - RNA, 32 nt, Human
ggaagggaggcgaaggccugagguuuuccauc

SEQ ID NO: 450162 - RNA, 32 nt, Human
ggaagggaggcuggggcugcagggcagugaaa

SEQ ID NO: 450163 - RNA, 32 nt, Human
ggaagggagggagggagaaaggagaaguuggu

SEQ ID NO: 450164 - RNA, 32 nt, Human
ggaagggaggggaggagaggagaggagaggaa

SEQ ID NO: 450165 - RNA, 32 nt, Human
ggaagggagguggagguccaguaagggccugg

SEQ ID NO: 450166 - RNA, 32 nt, Human
ggaagggaggugggcagcagugggucagagau

SEQ ID NO: 450167 - RNA, 17 nt, Human
ggaagggaguguuccga

SEQ ID NO: 450168 - RNA, 20 nt, Human
ggaagggauagccagaggga

SEQ ID NO: 450169 - RNA, 32 nt, Human
ggaagggcaaaguccuuuggggcaaagaaccc

SEQ ID NO: 450170 - RNA, 32 nt, Human
ggaagggcaauauuuaucaugcuucaguggug

SEQ ID NO: 450171 - RNA, 21 nt, Human
ggaagggcacacagcagcagg

SEQ ID NO: 450172 - RNA, 32 nt, Human
ggaagggcacaggggcugagcacuacagaagu

SEQ ID NO: 450173 - RNA, 21 nt, Human
ggaagggcaccagcaugcagg

SEQ ID NO: 450174 - RNA, 32 nt, Human
ggaagggcagaagucccgccgaaggcacuccc

SEQ ID NO: 450175 - RNA, 32 nt, Human
ggaagggcagacggaggcaucuugguguauac

SEQ ID NO: 450176 - RNA, 32 nt, Human
ggaagggcagagccagaagcaagccgugccag

SEQ ID NO: 450177 - RNA, 22 nt, Human
ggaagggcagagcggagagccg

SEQ ID NO: 450178 - RNA, 25 nt, Human
ggaagggcagggcagacugcaggug

SEQ ID NO: 450179 - RNA, 21 nt, Human
ggaagggcaggggaccuggga

SEQ ID NO: 450180 - RNA, 32 nt, Human
ggaagggcaggguagagaggguauguccagua

SEQ ID NO: 450181 - RNA, 32 nt, Human
ggaagggcaggugggagcugugacacagugug

SEQ ID NO: 450182 - RNA, 18 nt, Human
ggaagggcauuccaggca

SEQ ID NO: 450183 - RNA, 32 nt, Human
ggaagggccaggcagagcaggaagccuucggu

SEQ ID NO: 450184 - RNA, 22 nt, Human
ggaagggccugggcuggcugug

SEQ ID NO: 450185 - RNA, 32 nt, Human
ggaagggcgugcaaaaacuaacauugaaauuu

SEQ ID NO: 450186 - RNA, 32 nt, Human
ggaagggcugagaaaagcugagaaugagaagu

SEQ ID NO: 450187 - RNA, 21 nt, Human
ggaagggcugagcuggaggug

SEQ ID NO: 450188 - RNA, 32 nt, Human
ggaagggcugcagcugagcuggggguugaauu

SEQ ID NO: 450189 - RNA, 32 nt, Human
ggaaggggaacacagaccaggaagcucgguga

SEQ ID NO: 450190 - RNA, 32 nt, Human
ggaaggggaagaggaaagcaaaggcgucagga

SEQ ID NO: 450191 - RNA, 32 nt, Human
ggaaggggaagaggaagaagagugaacaaagc

SEQ ID NO: 450192 - RNA, 32 nt, Human
ggaaggggaagcagaguguccacccaccaggg

SEQ ID NO: 450193 - RNA, 32 nt, Human
ggaaggggaagggagagaauaaucuugggggu

SEQ ID NO: 450194 - RNA, 32 nt, Human
ggaaggggacagggaagaagaggcucucccgc

SEQ ID NO: 450195 - RNA, 32 nt, Human
ggaaggggacagugaaaagaggagugacagga

SEQ ID NO: 450196 - RNA, 32 nt, Human
ggaaggggacagugaaauuggggcuagagaag

SEQ ID NO: 450197 - RNA, 32 nt, Human
ggaaggggacccagagagaaaguccuggcugc

SEQ ID NO: 450198 - RNA, 21 nt, Human
ggaaggggaccuagcccggag

SEQ ID NO: 450199 - RNA, 32 nt, Human
ggaaggggagaaaggggcugccagaggcggga

SEQ ID NO: 450200 - RNA, 32 nt, Human
ggaaggggagagaaaccgagagaaccgguucc

SEQ ID NO: 450201 - RNA, 32 nt, Human
ggaaggggagagaagcaggagucgggagacug

SEQ ID NO: 450202 - RNA, 32 nt, Human
ggaaggggagagaugccgagguggucaguauc

SEQ ID NO: 450203 - RNA, 32 nt, Human
ggaaggggaggcagaggaggaacaucuggaaa

SEQ ID NO: 450204 - RNA, 32 nt, Human
ggaaggggaggcgggcgggcggagaggagaga

SEQ ID NO: 450205 - RNA, 18 nt, Human
ggaaggggagggugaggu

SEQ ID NO: 450206 - RNA, 32 nt, Human
ggaaggggagugagaaagaggcugaaauuaag

SEQ ID NO: 450207 - RNA, 22 nt, Human
ggaaggggaguggcuggaggga

SEQ ID NO: 450208 - RNA, 32 nt, Human
ggaaggggaguggcuggagggagcagggggug

SEQ ID NO: 450209 - RNA, 16 nt, Human
ggaaggggaguggggu

SEQ ID NO: 450210 - RNA, 18 nt, Human
ggaaggggaugccccuga

SEQ ID NO: 450211 - RNA, 17 nt, Human
ggaaggggauuggggug

SEQ ID NO: 450212 - RNA, 32 nt, Human
ggaaggggcaaggaagacuggcaaacagaugg

SEQ ID NO: 450213 - RNA, 32 nt, Human
ggaaggggcaggaggaaggguugagguuacuu

SEQ ID NO: 450214 - RNA, 18 nt, Human
ggaaggggcaguggggug

SEQ ID NO: 450215 - RNA, 19 nt, Human
ggaaggggccaagcugcag

SEQ ID NO: 450216 - RNA, 32 nt, Human
ggaaggggccaugggagucccugcugagcucg

SEQ ID NO: 450217 - RNA, 18 nt, Human
ggaaggggcgcugggaga

SEQ ID NO: 450218 - RNA, 32 nt, Human
ggaaggggcggggagagcgccagagggaggcc

SEQ ID NO: 450219 - RNA, 32 nt, Human
ggaaggggcguugcccccacagggcaaaccuu

SEQ ID NO: 450220 - RNA, 32 nt, Human
ggaaggggcugacugggucugguccuuaccaa

SEQ ID NO: 450221 - RNA, 32 nt, Human
ggaagggggaauccuugacgcauuuuacagac

SEQ ID NO: 450222 - RNA, 32 nt, Human
ggaagggggaaucugccucuuguugccauggg

SEQ ID NO: 450223 - RNA, 17 nt, Human
ggaagggggcccucugg

SEQ ID NO: 450224 - RNA, 16 nt, Human
ggaagggggcuuccgg

SEQ ID NO: 450225 - RNA, 22 nt, Human
ggaaggggggccgcaucacccu

SEQ ID NO: 450226 - RNA, 32 nt, Human
ggaagggggugaggauguggguugggacaggu

SEQ ID NO: 450227 - RNA, 32 nt, Human
ggaagggggugcccugaaaccaaacuggaagc

SEQ ID NO: 450228 - RNA, 19 nt, Human
ggaaggggguggccaggag

SEQ ID NO: 450229 - RNA, 32 nt, Human
ggaagggguaccugggcugggugcagggccau

SEQ ID NO: 450230 - RNA, 32 nt, Human
ggaaggggucuguagugucacucaaggcggug

SEQ ID NO: 450231 - RNA, 17 nt, Human
ggaaggggugacucuga

SEQ ID NO: 450232 - RNA, 32 nt, Human
ggaaggggugaggagagcagccagaggaaaac

SEQ ID NO: 450233 - RNA, 32 nt, Human
ggaaggguaaugcacugccagacugagaagac

SEQ ID NO: 450234 - RNA, 18 nt, Human
ggaagggucagggcccuc

SEQ ID NO: 450235 - RNA, 19 nt, Human
ggaagggucucugcuucug

SEQ ID NO: 450236 - RNA, 32 nt, Human
ggaagggucugccccgagcuuucugguuggca

SEQ ID NO: 450237 - RNA, 32 nt, Human
ggaagggucuggaagguggcagggaagccagc

SEQ ID NO: 450238 - RNA, 32 nt, Human
ggaagggugcuagaggcccaucaaggaagugg

SEQ ID NO: 450239 - RNA, 31 nt, Human
ggaagggugcucaaggauuggagaggagaca

SEQ ID NO: 450240 - RNA, 32 nt, Human
ggaaggguggggacgaggcgucgggaggguau

SEQ ID NO: 450241 - RNA, 32 nt, Human
ggaagggugguuuaaggaaccggcaggggucu

SEQ ID NO: 450242 - RNA, 31 nt, Human
ggaagggugucucaaagccuguugagcccau

SEQ ID NO: 450243 - RNA, 32 nt, Human
ggaagguaaagugagagguuuaggucaguguu

SEQ ID NO: 450244 - RNA, 32 nt, Human
ggaagguaaaugccaaacccagagccauguga

SEQ ID NO: 450245 - RNA, 23 nt, Human
ggaagguaagugggccaccugcu

SEQ ID NO: 450246 - RNA, 32 nt, Human
ggaagguacaucauguugucacauuaauuugg

SEQ ID NO: 450247 - RNA, 22 nt, Human
ggaagguaccagggagaaccug

SEQ ID NO: 450248 - RNA, 18 nt, Human
ggaagguacccggcucua

SEQ ID NO: 450249 - RNA, 32 nt, Human
ggaagguagcacugagucccacacauucucug

SEQ ID NO: 450250 - RNA, 32 nt, Human
ggaagguagcucaguggcauuucugagcaggg

SEQ ID NO: 450251 - RNA, 20 nt, Human
ggaagguaggggagaaucua

SEQ ID NO: 450252 - RNA, 32 nt, Human
ggaagguagucugagccacugccuuucccaag

SEQ ID NO: 450253 - RNA, 32 nt, Human
ggaagguccuaaguacagacaggguacaucug

SEQ ID NO: 450254 - RNA, 32 nt, Human
ggaaggucgugggccacacaaugcugugugac

SEQ ID NO: 450255 - RNA, 32 nt, Human
ggaaggucugaugccucccgugggcagucagg

SEQ ID NO: 450256 - RNA, 32 nt, Human
ggaaggucugcagcuucacuccugagccagcg

SEQ ID NO: 450257 - RNA, 21 nt, Human
ggaaggugaccugccugacca

SEQ ID NO: 450258 - RNA, 18 nt, Human
ggaaggugacgcacucca

SEQ ID NO: 450259 - RNA, 32 nt, Human
ggaaggugacgcacuccagcuuuaugaaguca

SEQ ID NO: 450260 - RNA, 31 nt, Human
ggaaggugacuucucucuguuugucuuaagu

SEQ ID NO: 450261 - RNA, 32 nt, Human
ggaaggugagccuuuuccuggccaagggcagc

SEQ ID NO: 450262 - RNA, 32 nt, Human
ggaaggugaggcaccugaagcagagaaaguaa

SEQ ID NO: 450263 - RNA, 32 nt, Human
ggaaggugaggcaccugaggcagagaaaguaa

SEQ ID NO: 450264 - RNA, 32 nt, Human
ggaaggugaggcagaagcauugcuugagcuug

SEQ ID NO: 450265 - RNA, 22 nt, Human
ggaaggugagggauucagggga

SEQ ID NO: 450266 - RNA, 20 nt, Human
ggaaggugauggggcggggg

SEQ ID NO: 450267 - RNA, 24 nt, Human
ggaaggugauggguauuagugggg

SEQ ID NO: 450268 - RNA, 32 nt, Human
ggaaggugccagcccgccccggaugggcaucg

SEQ ID NO: 450269 - RNA, 32 nt, Human
ggaaggugcccauuccacucugccuuugucac

SEQ ID NO: 450270 - RNA, 32 nt, Human
ggaaggugcuagaagccaggcccaggaagguu

SEQ ID NO: 450271 - RNA, 32 nt, Human
ggaaggugcucacaggugcacugcggggagaa

SEQ ID NO: 450272 - RNA, 32 nt, Human
ggaagguggaguuuccugcuguugcuugugaa

SEQ ID NO: 450273 - RNA, 32 nt, Human
ggaagguggccggcuaugucccagaaaccguc

SEQ ID NO: 450274 - RNA, 32 nt, Human
ggaaggugggagcagggugagcugcaggccug

SEQ ID NO: 450275 - RNA, 21 nt, Human
ggaaggugggcgggcagggga

SEQ ID NO: 450276 - RNA, 32 nt, Human
ggaaggugggcugaggcccagggugaacaugc

SEQ ID NO: 450277 - RNA, 18 nt, Human
ggaaggugggguagggug

SEQ ID NO: 450278 - RNA, 18 nt, Human
ggaaggugggucugggga

SEQ ID NO: 450279 - RNA, 32 nt, Human
ggaaggugggugagccacugcccucaaacccg

SEQ ID NO: 450280 - RNA, 22 nt, Human
ggaagguggugacaacucaggg

SEQ ID NO: 450281 - RNA, 21 nt, Human
ggaagguggugcgcaugguga

SEQ ID NO: 450282 - RNA, 23 nt, Human
ggaagguggugguuccgugggga

SEQ ID NO: 450283 - RNA, 21 nt, Human
ggaaggugguguccgggagga

SEQ ID NO: 450284 - RNA, 32 nt, Human
ggaaggugguuuugagaacuauguguuugguc

SEQ ID NO: 450285 - RNA, 32 nt, Human
ggaagguguagggagagguaagcaguguguau

SEQ ID NO: 450286 - RNA, 22 nt, Human
ggaagguguugaguccugggaa

SEQ ID NO: 450287 - RNA, 32 nt, Human
ggaagguucucuuugaccccaucucauuucga

SEQ ID NO: 450288 - RNA, 32 nt, Human
ggaagguugaggcugaaaugagcugugaucau

SEQ ID NO: 450289 - RNA, 32 nt, Human
ggaagguugugcugguauuuggcucaugacag

SEQ ID NO: 450290 - RNA, 32 nt, Human
ggaagguuuuaagcagagaagugacagguugg

SEQ ID NO: 450291 - RNA, 32 nt, Human
ggaagguuuuauugaaaacuacagcuggagau

SEQ ID NO: 450292 - RNA, 32 nt, Human
ggaagguuuucaggcuccucacaaaggagaga

SEQ ID NO: 450293 - RNA, 32 nt, Human
ggaaguaaaagggagagagggagggaggaagg

SEQ ID NO: 450294 - RNA, 32 nt, Human
ggaaguaacugccucugacuucaacucaagaa

SEQ ID NO: 450295 - RNA, 32 nt, Human
ggaaguaauuuccaguucuuacacucugauac

SEQ ID NO: 450296 - RNA, 32 nt, Human
ggaaguacacgcccgugaaauucacggaggcg

SEQ ID NO: 450297 - RNA, 32 nt, Human
ggaaguaccugccgccaucuugcucaccagcc

SEQ ID NO: 450298 - RNA, 32 nt, Human
ggaaguacucucaguggggaccaccugcuuuc

SEQ ID NO: 450299 - RNA, 32 nt, Human
ggaaguacucugucuguggccugcagucuagu

SEQ ID NO: 450300 - RNA, 32 nt, Human
ggaaguacugaccaucggcugccugugagcag

SEQ ID NO: 450301 - RNA, 18 nt, Human
ggaaguacugggggccag

SEQ ID NO: 450302 - RNA, 32 nt, Human
ggaaguaggauucugguucuuuguuccuauuc

SEQ ID NO: 450303 - RNA, 32 nt, Human
ggaaguaggcagggagaaaggaacauccggaa

SEQ ID NO: 450304 - RNA, 32 nt, Human
ggaaguaggcgagacggggaaggaguucugag

SEQ ID NO: 450305 - RNA, 30 nt, Human
ggaaguaguuuuaauguagaaagacauuua

SEQ ID NO: 450306 - RNA, 32 nt, Human
ggaaguauacauauuuguuuuuccaaaguuuu

SEQ ID NO: 450307 - RNA, 32 nt, Human
ggaagucaagccugcagugaaccaugauagca

SEQ ID NO: 450308 - RNA, 32 nt, Human
ggaagucaagccugcagugagccaugacuguu

SEQ ID NO: 450309 - RNA, 32 nt, Human
ggaagucacagaacaguaguacgcuagcaggg

SEQ ID NO: 450310 - RNA, 31 nt, Human
ggaagucacagcuauauuccagagcugcuau

SEQ ID NO: 450311 - RNA, 31 nt, Human
ggaagucacagcugucagguaccggccaugg

SEQ ID NO: 450312 - RNA, 32 nt, Human
ggaagucaccagagaacaggagagggauuuga

SEQ ID NO: 450313 - RNA, 21 nt, Human
ggaagucaugugugaaucaug

SEQ ID NO: 450314 - RNA, 32 nt, Human
ggaagucauugaaaaagagaacagugacguag

SEQ ID NO: 450315 - RNA, 32 nt, Human
ggaagucauuuugauaauuuugcuuaaaccac

SEQ ID NO: 450316 - RNA, 15 nt, Human
ggaaguccagggagg

SEQ ID NO: 450317 - RNA, 32 nt, Human
ggaagucccagaggacucugugaaugaaguuu

SEQ ID NO: 450318 - RNA, 32 nt, Human
ggaagucccaggaggauggggaccaggaaggc

SEQ ID NO: 450319 - RNA, 32 nt, Human
ggaagucccgcucuccccgcggcucugaguug

SEQ ID NO: 450320 - RNA, 32 nt, Human
ggaaguccuccccuacaucuguuuucuucugu

SEQ ID NO: 450321 - RNA, 32 nt, Human
ggaaguccugcagaugugcgugccugugugug

SEQ ID NO: 450322 - RNA, 32 nt, Human
ggaaguccugggacccagggaggggaggggcc

SEQ ID NO: 450323 - RNA, 32 nt, Human
ggaaguccuuccccuucucuucccaggccugg

SEQ ID NO: 450324 - RNA, 32 nt, Human
ggaaguccuugcaagcuaauucuuugaccugu

SEQ ID NO: 450325 - RNA, 32 nt, Human
ggaagucgcggccacugccugugugcggaugu

SEQ ID NO: 450326 - RNA, 32 nt, Human
ggaagucgucccaggcugcuagauacuaaggu

SEQ ID NO: 450327 - RNA, 32 nt, Human
ggaagucucaaggcuugaguuagaagucuuaa

SEQ ID NO: 450328 - RNA, 32 nt, Human
ggaagucucugcauccaugccacccaccccag

SEQ ID NO: 450329 - RNA, 32 nt, Human
ggaagucucuuccuccuccuccucuucucucc

SEQ ID NO: 450330 - RNA, 32 nt, Human
ggaagucugaaggugagcauucaguuaggugg

SEQ ID NO: 450331 - RNA, 32 nt, Human
ggaagucugucaacugggagggggagaggggg

SEQ ID NO: 450332 - RNA, 32 nt, Human
ggaagucuuccagaauacaaacuacucccagu

SEQ ID NO: 450333 - RNA, 32 nt, Human
ggaagucuugcagcugaagggaggcacuccuu

SEQ ID NO: 450334 - RNA, 32 nt, Human
ggaagugaaggcagauuucccuccuucgucgc

SEQ ID NO: 450335 - RNA, 32 nt, Human
ggaagugacacacaacauccacuaugagacuu

SEQ ID NO: 450336 - RNA, 21 nt, Human
ggaagugacuaaugcugaaaa

SEQ ID NO: 450337 - RNA, 23 nt, Human
ggaagugacuuuuccccauuuga

SEQ ID NO: 450338 - RNA, 32 nt, Human
ggaagugagacacgugcauuccugccuuccgu

SEQ ID NO: 450339 - RNA, 20 nt, Human
ggaagugagagccugcucca

SEQ ID NO: 450340 - RNA, 23 nt, Human
ggaagugaggccauggagggagg

SEQ ID NO: 450341 - RNA, 32 nt, Human
ggaagugaggccauggagggaggcagaagagc

SEQ ID NO: 450342 - RNA, 18 nt, Human
ggaagugauaguuucuga

SEQ ID NO: 450343 - RNA, 32 nt, Human
ggaagugauaucauaaaaguagcaaccuucau

SEQ ID NO: 450344 - RNA, 32 nt, Human
ggaagugaucagagggaacgagcuguagguuu

SEQ ID NO: 450345 - RNA, 32 nt, Human
ggaagugcagaggcaaagggugcuacccaagc

SEQ ID NO: 450346 - RNA, 25 nt, Human
ggaagugcagcaggcaggugaucau

SEQ ID NO: 450347 - RNA, 21 nt, Human
ggaagugcauggacagugccu

SEQ ID NO: 450348 - RNA, 32 nt, Human
ggaagugcccacugaggggaggccuguguguu

SEQ ID NO: 450349 - RNA, 32 nt, Human
ggaagugccccagggugagaacgugcccagcc

SEQ ID NO: 450350 - RNA, 32 nt, Human
ggaagugccuguagucccagcuacucuggagg

SEQ ID NO: 450351 - RNA, 32 nt, Human
ggaagugcgcuuggagaagaugacacccccga

SEQ ID NO: 450352 - RNA, 32 nt, Human
ggaagugcucucucgccacucugggugcuuua

SEQ ID NO: 450353 - RNA, 21 nt, Human
ggaagugcugccagguuccuc

SEQ ID NO: 450354 - RNA, 20 nt, Human
ggaagugcugggauuacagg

SEQ ID NO: 450355 - RNA, 24 nt, Human
ggaaguggaagcaggcuggaaaga

SEQ ID NO: 450356 - RNA, 32 nt, Human
ggaaguggaaggcagugaacacacucagcagc

SEQ ID NO: 450357 - RNA, 32 nt, Human
ggaaguggagccaucaucacaggguacgaagg

SEQ ID NO: 450358 - RNA, 32 nt, Human
ggaaguggaggaaccacuguccgccugcggag

SEQ ID NO: 450359 - RNA, 32 nt, Human
ggaaguggaggcauugccucuccagaugugcc

SEQ ID NO: 450360 - RNA, 20 nt, Human
ggaaguggaggcggagggag

SEQ ID NO: 450361 - RNA, 32 nt, Human
ggaaguggaggcggagggagacgguggcgucg

SEQ ID NO: 450362 - RNA, 25 nt, Human
ggaaguggagggggugaaagugagg

SEQ ID NO: 450363 - RNA, 32 nt, Human
ggaaguggagugacaggggacagguagagaga

SEQ ID NO: 450364 - RNA, 32 nt, Human
ggaaguggcucugggcaccagccuguggggcu

SEQ ID NO: 450365 - RNA, 32 nt, Human
ggaaguggcugcaggcaacacagggccucucc

SEQ ID NO: 450366 - RNA, 32 nt, Human
ggaaguggcuuccugccucugaagacagcaca

SEQ ID NO: 450367 - RNA, 32 nt, Human
ggaaguggcuuuccuauucucuuccaagccag

SEQ ID NO: 450368 - RNA, 32 nt, Human
ggaagugggaagagagguggucuucuggcauu

SEQ ID NO: 450369 - RNA, 19 nt, Human
ggaagugggcccucagaga

SEQ ID NO: 450370 - RNA, 27 nt, Human
ggaagugggccuaggagggccugcagg

SEQ ID NO: 450371 - RNA, 32 nt, Human
ggaaguggggaagaguagguucucgguacuua

SEQ ID NO: 450372 - RNA, 32 nt, Human
ggaaguggggaccacgccauagagggucugcu

SEQ ID NO: 450373 - RNA, 32 nt, Human
ggaaguggggacggaacaggaggcgagagccg

SEQ ID NO: 450374 - RNA, 23 nt, Human
ggaaguggggcagggaggcgcag

SEQ ID NO: 450375 - RNA, 32 nt, Human
ggaagugggggcugcaaaauggaggcuuuccc

SEQ ID NO: 450376 - RNA, 25 nt, Human
ggaagugggggugaggagccugcgg

SEQ ID NO: 450377 - RNA, 32 nt, Human
ggaagugggguccagacaggaguggggagccc

SEQ ID NO: 450378 - RNA, 32 nt, Human
ggaagugggugaggcugggcagggccuggcgg

SEQ ID NO: 450379 - RNA, 32 nt, Human
ggaaguggguguccaugggccacugagcagug

SEQ ID NO: 450380 - RNA, 32 nt, Human
ggaagugguaggacucuggaagaggccacaca

SEQ ID NO: 450381 - RNA, 32 nt, Human
ggaaguguaagcagcugaggucucuugaggga

SEQ ID NO: 450382 - RNA, 32 nt, Human
ggaaguguagcuccggaugguggagaaccagu

SEQ ID NO: 450383 - RNA, 32 nt, Human
ggaagugucccaaagcaccaagggggugagac

SEQ ID NO: 450384 - RNA, 32 nt, Human
ggaagugucucaagauaguuggaaaagaagaa

SEQ ID NO: 450385 - RNA, 32 nt, Human
ggaagugucugcuggauuccauuuucuaagag

SEQ ID NO: 450386 - RNA, 32 nt, Human
ggaaguguuagaaaguugcuggagugagaaau

SEQ ID NO: 450387 - RNA, 32 nt, Human
ggaaguguuuguaaucccagcacuuugggagg

SEQ ID NO: 450388 - RNA, 32 nt, Human
ggaaguuaagcgagggagagacggugaaacac

SEQ ID NO: 450389 - RNA, 32 nt, Human
ggaaguucaacaguaagcagcaccuccaagac

SEQ ID NO: 450390 - RNA, 32 nt, Human
ggaaguucaagaucaaagugccagcagauuca

SEQ ID NO: 450391 - RNA, 32 nt, Human
ggaaguucacagucacuuucucggugauaacc

SEQ ID NO: 450392 - RNA, 32 nt, Human
ggaaguucgagaccagccugaccaacauggag

SEQ ID NO: 450393 - RNA, 32 nt, Human
ggaaguucucacugugaacuuuacagcaaugc

SEQ ID NO: 450394 - RNA, 32 nt, Human
ggaaguugagaaccaggaaagcugcuuucacg

SEQ ID NO: 450395 - RNA, 25 nt, Human
ggaaguugagacuuaaaaaauacuu

SEQ ID NO: 450396 - RNA, 32 nt, Human
ggaaguugagcggcggcaagaaauaauggcgg

SEQ ID NO: 450397 - RNA, 32 nt, Human
ggaaguugagcuccaccuccuuuccaagugag

SEQ ID NO: 450398 - RNA, 25 nt, Human
ggaaguugaggcaggaggauugcuu

SEQ ID NO: 450399 - RNA, 32 nt, Human
ggaaguugaggcaggaggauugcuugagccca

SEQ ID NO: 450400 - RNA, 32 nt, Human
ggaaguugaggcaggaggauugcuugagugca

SEQ ID NO: 450401 - RNA, 25 nt, Human
ggaaguugcaggcgggaggacucuu

SEQ ID NO: 450402 - RNA, 32 nt, Human
ggaaguugcaugcugccuccuggguuuuaucc

SEQ ID NO: 450403 - RNA, 22 nt, Human
ggaaguugcuccaagaacagua

SEQ ID NO: 450404 - RNA, 32 nt, Human
ggaaguugcuguucucagaccugguucugaga

SEQ ID NO: 450405 - RNA, 32 nt, Human
ggaaguugcuugaauguuggggagaggaaaau

SEQ ID NO: 450406 - RNA, 32 nt, Human
ggaaguuggagaccuugggagcuccagggaaa

SEQ ID NO: 450407 - RNA, 32 nt, Human
ggaaguuggucgccugccccacucccuccugg

SEQ ID NO: 450408 - RNA, 32 nt, Human
ggaaguugguguagaccagcuguggagcugaa

SEQ ID NO: 450409 - RNA, 32 nt, Human
ggaaguugugacguugcagcuccaaccgacgu

SEQ ID NO: 450410 - RNA, 32 nt, Human
ggaaguuguuaugucauggggucaugggagga

SEQ ID NO: 450411 - RNA, 32 nt, Human
ggaaguuuauaucuaaaaauguuaauagugcg

SEQ ID NO: 450412 - RNA, 32 nt, Human
ggaaguuuguauugccaaguacacuguugauc

SEQ ID NO: 450413 - RNA, 32 nt, Human
ggaaguuuuguagccacacacaggauacugcc

SEQ ID NO: 450414 - RNA, 32 nt, Human
ggaauaaaaacaauaugaguaguguaaucuug

SEQ ID NO: 450415 - RNA, 25 nt, Human
ggaauaaaacuacugaugcagugaa

SEQ ID NO: 450416 - RNA, 32 nt, Human
ggaauaaacagcugcccuagccccagagggau

SEQ ID NO: 450417 - RNA, 32 nt, Human
ggaauaaagaagcggggagaaggaucaggcuc

SEQ ID NO: 450418 - RNA, 32 nt, Human
ggaauaacaggagacagggaagagguggaaau

SEQ ID NO: 450419 - RNA, 32 nt, Human
ggaauaaccuuaaaaaguuaaaaagucauugu

SEQ ID NO: 450420 - RNA, 32 nt, Human
ggaauaagaguaaauuggguaaggagauaucc

SEQ ID NO: 450421 - RNA, 21 nt, Human
ggaauaagcaaaggugugcaa

SEQ ID NO: 450422 - RNA, 32 nt, Human
ggaauaagcacuuuuuaaaaaugcagauacau

SEQ ID NO: 450423 - RNA, 32 nt, Human
ggaauaaggggaaggaagagagagggagcagg

SEQ ID NO: 450424 - RNA, 32 nt, Human
ggaauaagggucuugacuguugcccaagcugg

SEQ ID NO: 450425 - RNA, 32 nt, Human
ggaauaaguagcugguguuucuagccuccgcc

SEQ ID NO: 450426 - RNA, 32 nt, Human
ggaauaaguaucucacauggcaggugcagggc

SEQ ID NO: 450427 - RNA, 32 nt, Human
ggaauaagucugccucugccucugccucaccc

SEQ ID NO: 450428 - RNA, 32 nt, Human
ggaauaauaaacagaggaaggcgggcuaaugc

SEQ ID NO: 450429 - RNA, 32 nt, Human
ggaauaauccagccuaggcuguggguggcugg

SEQ ID NO: 450430 - RNA, 32 nt, Human
ggaauaaucuguccuucacagaggauuauggu

SEQ ID NO: 450431 - RNA, 32 nt, Human
ggaauaaugauuucucagauuuguaggcuuga

SEQ ID NO: 450432 - RNA, 32 nt, Human
ggaauaauguuccaucaugcagguggaccuca

SEQ ID NO: 450433 - RNA, 32 nt, Human
ggaauacaagagcuagggcugccuaaggaagg

SEQ ID NO: 450434 - RNA, 32 nt, Human
ggaauacaagcauacaccaccaugcccagcua

SEQ ID NO: 450435 - RNA, 32 nt, Human
ggaauacacauccugaagaucucgugacuaua

SEQ ID NO: 450436 - RNA, 24 nt, Human
ggaauacagaagagaaacuagaaa

SEQ ID NO: 450437 - RNA, 32 nt, Human
ggaauacaggcacccgccaccaugcccggcua

SEQ ID NO: 450438 - RNA, 32 nt, Human
ggaauacaucucucacacauacucacaaacac

SEQ ID NO: 450439 - RNA, 32 nt, Human
ggaauacauuuucaaaaugcaguaaucaaaau

SEQ ID NO: 450440 - RNA, 32 nt, Human
ggaauacccucccggcuaucgcuucagugggu

SEQ ID NO: 450441 - RNA, 32 nt, Human
ggaauacugagcugauggugucauccagcagc

SEQ ID NO: 450442 - RNA, 32 nt, Human
ggaauagaugaggaugggcacaugguggagag

SEQ ID NO: 450443 - RNA, 32 nt, Human
ggaauagcacuggcuucagcaggcgugucaug

SEQ ID NO: 450444 - RNA, 32 nt, Human
ggaauagcagaguuuucuuuucuuuguauuac

SEQ ID NO: 450445 - RNA, 32 nt, Human
ggaauagcugacugguaaguuauuauucuucc

SEQ ID NO: 450446 - RNA, 32 nt, Human
ggaauagcuugaccacagucucuauccugggg

SEQ ID NO: 450447 - RNA, 32 nt, Human
ggaauaggagcugaauaaaaugaggcugagac

SEQ ID NO: 450448 - RNA, 32 nt, Human
ggaauaggagcuugcucuguccacucuacaca

SEQ ID NO: 450449 - RNA, 32 nt, Human
ggaauagggaaaaagguaagagacuaacgugg

SEQ ID NO: 450450 - RNA, 32 nt, Human
ggaauagguuuaacccaguuugcauucuccaa

SEQ ID NO: 450451 - RNA, 32 nt, Human
ggaauaguuuucuccucguugguucauguguu

SEQ ID NO: 450452 - RNA, 21 nt, Human
ggaauauaaaguaagcaugaa

SEQ ID NO: 450453 - RNA, 32 nt, Human
ggaauauaggguggaaaugguguggacaggca

SEQ ID NO: 450454 - RNA, 32 nt, Human
ggaauauauaaauaacucuuauaacacaacaa

SEQ ID NO: 450455 - RNA, 32 nt, Human
ggaauaucacacucuggggacugugguggggu

SEQ ID NO: 450456 - RNA, 32 nt, Human
ggaauaucacacucuggggacuguuguggggu

SEQ ID NO: 450457 - RNA, 32 nt, Human
ggaauauccugcaaccugcugcucugagccug

SEQ ID NO: 450458 - RNA, 27 nt, Human
ggaauaucuacagcagugaugcuugaa

SEQ ID NO: 450459 - RNA, 32 nt, Human
ggaauaugacaggaaaaguuacccacaggaug

SEQ ID NO: 450460 - RNA, 32 nt, Human
ggaauaugauacaaguggcaucaggaaaugag

SEQ ID NO: 450461 - RNA, 32 nt, Human
ggaauauggauaagauuagaccagccccucuc

SEQ ID NO: 450462 - RNA, 24 nt, Human
ggaauauguaagacugugcgaaaa

SEQ ID NO: 450463 - RNA, 30 nt, Human
ggaauaugucgaguuucucuagggcgcccc

SEQ ID NO: 450464 - RNA, 32 nt, Human
ggaauauugggagcuaggagucugaaccugaa

SEQ ID NO: 450465 - RNA, 32 nt, Human
ggaauauuuauaaaugagcaaauaucauacug

SEQ ID NO: 450466 - RNA, 32 nt, Human
ggaauauuugugugggggagggggaggagaag

SEQ ID NO: 450467 - RNA, 32 nt, Human
ggaauauuuuguccuucugugacagcaccacu

SEQ ID NO: 450468 - RNA, 32 nt, Human
ggaaucaaaacacacccccacucugaugguga

SEQ ID NO: 450469 - RNA, 32 nt, Human
ggaaucaagggagaggaacggggaagaaacga

SEQ ID NO: 450470 - RNA, 32 nt, Human
ggaaucaaguccacucuucugccugcaacauu

SEQ ID NO: 450471 - RNA, 32 nt, Human
ggaaucacagcccagacacaaaagcaggaaac

SEQ ID NO: 450472 - RNA, 32 nt, Human
ggaaucacccuacagaagaggccagcuauaaa

SEQ ID NO: 450473 - RNA, 32 nt, Human
ggaaucacuguuugccagcuguguggccuugg

SEQ ID NO: 450474 - RNA, 32 nt, Human
ggaaucagaggacgaggcugcucuaaagacug

SEQ ID NO: 450475 - RNA, 32 nt, Human
ggaaucagaggcagcuguuaccagguuucggc

SEQ ID NO: 450476 - RNA, 32 nt, Human
ggaaucagcccaucuaaagcagucuuuauaug

SEQ ID NO: 450477 - RNA, 32 nt, Human
ggaaucaggguaaaaggugcagguguggagag

SEQ ID NO: 450478 - RNA, 32 nt, Human
ggaaucaucuagaacaauuaagccgaccagga

SEQ ID NO: 450479 - RNA, 32 nt, Human
ggaaucauuuggaaaugcgaagacugugaaaa

SEQ ID NO: 450480 - RNA, 32 nt, Human
ggaauccacagcaacaguagccagacccgcug

SEQ ID NO: 450481 - RNA, 32 nt, Human
ggaauccagaagaaagaggagugacagauaag

SEQ ID NO: 450482 - RNA, 32 nt, Human
ggaauccagacucccuucucucaaggggaggc

SEQ ID NO: 450483 - RNA, 21 nt, Human
ggaauccagauacccaccaca

SEQ ID NO: 450484 - RNA, 32 nt, Human
ggaauccaucacagccccgggucuuucacccc

SEQ ID NO: 450485 - RNA, 32 nt, Human
ggaauccauguaaaacucucugugcaucuaaa

SEQ ID NO: 450486 - RNA, 32 nt, Human
ggaaucccaaaccaagcagcucuugcugguca

SEQ ID NO: 450487 - RNA, 32 nt, Human
ggaaucccaagaggggaaggggaagagcagcc

SEQ ID NO: 450488 - RNA, 32 nt, Human
ggaaucccagaaacuuccaucucagguccuuc

SEQ ID NO: 450489 - RNA, 32 nt, Human
ggaaucccaucuuuccagcaucaucugcuaag

SEQ ID NO: 450490 - RNA, 32 nt, Human
ggaauccccaaaaagauaacauuuuucuucug

SEQ ID NO: 450491 - RNA, 32 nt, Human
ggaaucccccgucuaccucucuccuugguccu

SEQ ID NO: 450492 - RNA, 32 nt, Human
ggaauccccuaggagccuucagucugggagaa

SEQ ID NO: 450493 - RNA, 32 nt, Human
ggaaucccucccccucuuacuuuuucucuugu

SEQ ID NO: 450494 - RNA, 21 nt, Human
ggaaucccucuuuccauguga

SEQ ID NO: 450495 - RNA, 19 nt, Human
ggaaucccuuccucccaug

SEQ ID NO: 450496 - RNA, 32 nt, Human
ggaauccggagcgcuuggaucucagguuuagc

SEQ ID NO: 450497 - RNA, 32 nt, Human
ggaauccgggagaugcauguugcagugagcug

SEQ ID NO: 450498 - RNA, 32 nt, Human
ggaauccguggcucuaccugcccagcaugaca

SEQ ID NO: 450499 - RNA, 22 nt, Human
ggaauccuacuacgagcgauca

SEQ ID NO: 450500 - RNA, 25 nt, Human
ggaauccuaggcggaagaaccccga

SEQ ID NO: 450501 - RNA, 32 nt, Human
ggaauccuagggggcuccaugacaccuucccc

SEQ ID NO: 450502 - RNA, 32 nt, Human
ggaauccuccuucucuugcccugaagagcucu

SEQ ID NO: 450503 - RNA, 32 nt, Human
ggaauccucuaucaccuccugcuguuccaccu

SEQ ID NO: 450504 - RNA, 32 nt, Human
ggaauccugccugccccauggaguugcgcagc

SEQ ID NO: 450505 - RNA, 32 nt, Human
ggaauccugcugcaucacagaagcuggaaguu

SEQ ID NO: 450506 - RNA, 32 nt, Human
ggaauccuggauuuugcccucuccuuagcucu

SEQ ID NO: 450507 - RNA, 32 nt, Human
ggaauccuuaaagccauguccaaggauuuggu

SEQ ID NO: 450508 - RNA, 32 nt, Human
ggaauccuucaccgucucagcugguaucagcc

SEQ ID NO: 450509 - RNA, 32 nt, Human
ggaauccuuuaagauuauguccaguuauuugc

SEQ ID NO: 450510 - RNA, 32 nt, Human
ggaaucgacaucuucuugguauugguuuucgc

SEQ ID NO: 450511 - RNA, 32 nt, Human
ggaaucgcaauguuguggcgucugacuuguau

SEQ ID NO: 450512 - RNA, 32 nt, Human
ggaaucgcugccucuggcuuucuguuuucuac

SEQ ID NO: 450513 - RNA, 32 nt, Human
ggaaucgcuugaaccugggaggcggagguugc

SEQ ID NO: 450514 - RNA, 32 nt, Human
ggaaucgcuugaaccugggagguggaggcuac

SEQ ID NO: 450515 - RNA, 32 nt, Human
ggaaucggaucaucccugacucagcuuauacc

SEQ ID NO: 450516 - RNA, 32 nt, Human
ggaaucguagggggcuccaugacaccuucccc

SEQ ID NO: 450517 - RNA, 32 nt, Human
ggaaucgugccacuccacuccagccugggcaa

SEQ ID NO: 450518 - RNA, 32 nt, Human
ggaaucuaaggcacuagagggcuugacggcca

SEQ ID NO: 450519 - RNA, 23 nt, Human
ggaaucucacaaacauaauguug

SEQ ID NO: 450520 - RNA, 32 nt, Human
ggaaucuccacaacgacaggugcuuuggaggc

SEQ ID NO: 450521 - RNA, 32 nt, Human
ggaaucuccagccuuccagauuuucugggacc

SEQ ID NO: 450522 - RNA, 32 nt, Human
ggaaucucccacacugucugcucccuauaaaa

SEQ ID NO: 450523 - RNA, 32 nt, Human
ggaaucucucucuguugcccaggcuggagugu

SEQ ID NO: 450524 - RNA, 32 nt, Human
ggaaucucuguaggcucaccuuugccauuucu

SEQ ID NO: 450525 - RNA, 32 nt, Human
ggaaucugagccuucucuuacaacagggaguc

SEQ ID NO: 450526 - RNA, 32 nt, Human
ggaaucugagccuugugaugucaggcuguuaa

SEQ ID NO: 450527 - RNA, 32 nt, Human
ggaaucuggagcugucauuuuagaagagcaac

SEQ ID NO: 450528 - RNA, 32 nt, Human
ggaaucuggccaggcccugcuuaggcccccau

SEQ ID NO: 450529 - RNA, 32 nt, Human
ggaaucugggaggcccugagacagggauugug

SEQ ID NO: 450530 - RNA, 32 nt, Human
ggaaucugggcuggggaaagacggcaccggga

SEQ ID NO: 450531 - RNA, 32 nt, Human
ggaaucuguaaaccuugagggauagcuuucug

SEQ ID NO: 450532 - RNA, 32 nt, Human
ggaaucuguagcugugcuuugagaauugccau

SEQ ID NO: 450533 - RNA, 32 nt, Human
ggaaucugugagacagagugaauccucuugau

SEQ ID NO: 450534 - RNA, 32 nt, Human
ggaaucuuacuauuucaucugauaccuuguuc

SEQ ID NO: 450535 - RNA, 32 nt, Human
ggaaucuucuugucauucuuuuuaaacggaug

SEQ ID NO: 450536 - RNA, 32 nt, Human
ggaaucuugcagcugcuuuuuauucuaaguac

SEQ ID NO: 450537 - RNA, 21 nt, Human
ggaaucuugggcaccugggaa

SEQ ID NO: 450538 - RNA, 32 nt, Human
ggaaugaaacuagauaauuucaagaaacugag

SEQ ID NO: 450539 - RNA, 32 nt, Human
ggaaugaagagaguguaaauaaccaaucugaa

SEQ ID NO: 450540 - RNA, 20 nt, Human
ggaaugaagccuuagccagg

SEQ ID NO: 450541 - RNA, 32 nt, Human
ggaaugaaggcaggaaggaggcuggaauaaau

SEQ ID NO: 450542 - RNA, 22 nt, Human
ggaaugaaugccuaauggugga

SEQ ID NO: 450543 - RNA, 32 nt, Human
ggaaugaauggaagcugacgggcagagagagg

SEQ ID NO: 450544 - RNA, 32 nt, Human
ggaaugacaaccuacccagccugguggggcug

SEQ ID NO: 450545 - RNA, 32 nt, Human
ggaaugacauguuguuuggauuacugagccag

SEQ ID NO: 450546 - RNA, 32 nt, Human
ggaaugaccaacucuauccaggccugacagug

SEQ ID NO: 450547 - RNA, 32 nt, Human
ggaaugaccagaaaauuuuugucuuucaugga

SEQ ID NO: 450548 - RNA, 32 nt, Human
ggaaugaccagccuguccaacagaggggcagc

SEQ ID NO: 450549 - RNA, 32 nt, Human
ggaaugaccgcucucccuuugcgcagcccuac

SEQ ID NO: 450550 - RNA, 28 nt, Human
ggaaugacguuccuccacaguauccuga

SEQ ID NO: 450551 - RNA, 32 nt, Human
ggaaugacuaaacaagauaauggcaguuuagg

SEQ ID NO: 450552 - RNA, 32 nt, Human
ggaaugacugugaggagacaucagggcugagg

SEQ ID NO: 450553 - RNA, 32 nt, Human
ggaaugagaaauguuagucaugugaguucuug

SEQ ID NO: 450554 - RNA, 32 nt, Human
ggaaugagagcagcauggacugccacaguuuu

SEQ ID NO: 450555 - RNA, 32 nt, Human
ggaaugagagggcagaggucucuccacaggug

SEQ ID NO: 450556 - RNA, 18 nt, Human
ggaaugagcaaaucucaa

SEQ ID NO: 450557 - RNA, 32 nt, Human
ggaaugagcaggaagccaaucagccaaagaaa

SEQ ID NO: 450558 - RNA, 32 nt, Human
ggaaugagcaggcaggggagacugagauggaa

SEQ ID NO: 450559 - RNA, 32 nt, Human
ggaaugagccacucccaguucuggagagugag

SEQ ID NO: 450560 - RNA, 32 nt, Human
ggaaugagcccaccaucugccccaaccaccag

SEQ ID NO: 450561 - RNA, 32 nt, Human
ggaaugagccuugacccuggccccagacggag

SEQ ID NO: 450562 - RNA, 32 nt, Human
ggaaugagcugccuaccugcugcuccacgagg

SEQ ID NO: 450563 - RNA, 32 nt, Human
ggaaugaggaagagaagacaaaagcaagaugg

SEQ ID NO: 450564 - RNA, 17 nt, Human
ggaaugaggccugcucc

SEQ ID NO: 450565 - RNA, 32 nt, Human
ggaaugaggcuggauacggugcagugaaaaag

SEQ ID NO: 450566 - RNA, 32 nt, Human
ggaaugagggagaaaugcccuuuuuggcaauu

SEQ ID NO: 450567 - RNA, 17 nt, Human
ggaaugaguguuucuga

SEQ ID NO: 450568 - RNA, 32 nt, Human
ggaaugaguuaagauuugggggacuguaggga

SEQ ID NO: 450569 - RNA, 32 nt, Human
ggaaugauagcccagaacaaaaagaaaucuug

SEQ ID NO: 450570 - RNA, 32 nt, Human
ggaaugauccaauacuguugcccuuuuccuug

SEQ ID NO: 450571 - RNA, 32 nt, Human
ggaaugcagaaggagacaggaggacucaagug

SEQ ID NO: 450572 - RNA, 32 nt, Human
ggaaugcagacagccucuucuccucuggggcc

SEQ ID NO: 450573 - RNA, 32 nt, Human
ggaaugcagcccccugaagacagcacuacaag

SEQ ID NO: 450574 - RNA, 32 nt, Human
ggaaugcagcuucuguccuuucuugggauguc

SEQ ID NO: 450575 - RNA, 32 nt, Human
ggaaugcaggccacagcacccaaucaagacaa

SEQ ID NO: 450576 - RNA, 32 nt, Human
ggaaugcagggcccugagccugacagcacucu

SEQ ID NO: 450577 - RNA, 32 nt, Human
ggaaugcaguccacaguggccagguggccaga

SEQ ID NO: 450578 - RNA, 31 nt, Human
ggaaugcaguuucagcgugaccugcagucau

SEQ ID NO: 450579 - RNA, 32 nt, Human
ggaaugcauauguauaauaucuauguugccuu

SEQ ID NO: 450580 - RNA, 32 nt, Human
ggaaugcauauuccacuggaacuggaauucca

SEQ ID NO: 450581 - RNA, 24 nt, Human
ggaaugcauuaagaggguuuggga

SEQ ID NO: 450582 - RNA, 23 nt, Human
ggaaugccaaggcagguggauca

SEQ ID NO: 450583 - RNA, 32 nt, Human
ggaaugccagaaaugcauggcagcagcuaaua

SEQ ID NO: 450584 - RNA, 32 nt, Human
ggaaugccagccagggagcacagugagccuua

SEQ ID NO: 450585 - RNA, 32 nt, Human
ggaaugccagcgcgugccaagccuggggcugg

SEQ ID NO: 450586 - RNA, 32 nt, Human
ggaaugccaucaucucuaguucccagggccca

SEQ ID NO: 450587 - RNA, 32 nt, Human
ggaaugcccaacucccccuucucagccuucuu

SEQ ID NO: 450588 - RNA, 32 nt, Human
ggaaugccucuccuguugcauuggucccugaa

SEQ ID NO: 450589 - RNA, 32 nt, Human
ggaaugccugccucccuguuaccagcucugca

SEQ ID NO: 450590 - RNA, 32 nt, Human
ggaaugccugggagugggggugcaggcgggca

SEQ ID NO: 450591 - RNA, 32 nt, Human
ggaaugccuugcaauaugaauguuaauauaau

SEQ ID NO: 450592 - RNA, 32 nt, Human
ggaaugcgguaggagagcagggugucagcaag

SEQ ID NO: 450593 - RNA, 23 nt, Human
ggaaugcuacaggggccagcagg

SEQ ID NO: 450594 - RNA, 32 nt, Human
ggaaugcuauugguuuuuacacauuaaucuug

SEQ ID NO: 450595 - RNA, 32 nt, Human
ggaaugcugaguuugucaugucccaugggccu

SEQ ID NO: 450596 - RNA, 32 nt, Human
ggaaugcuggaagccaagcuugcacauucuag

SEQ ID NO: 450597 - RNA, 32 nt, Human
ggaaugcuggacaauaaagcgagugcugccca

SEQ ID NO: 450598 - RNA, 32 nt, Human
ggaaugcugggcccccagccuggccagacaag

SEQ ID NO: 450599 - RNA, 24 nt, Human
ggaauggaaagaacuacagaggga

SEQ ID NO: 450600 - RNA, 32 nt, Human
ggaauggaaagcaggccucugaggcaguggac

SEQ ID NO: 450601 - RNA, 32 nt, Human
ggaauggacagaggaauccugaagccuuaaca

SEQ ID NO: 450602 - RNA, 32 nt, Human
ggaauggagcccuggaaucugcauuuuguaag

SEQ ID NO: 450603 - RNA, 32 nt, Human
ggaauggagccugcacggugaauggcuuugua

SEQ ID NO: 450604 - RNA, 19 nt, Human
ggaauggagggcuccgggc

SEQ ID NO: 450605 - RNA, 32 nt, Human
ggaauggaggggccaucguggggcucucccgg

SEQ ID NO: 450606 - RNA, 21 nt, Human
ggaauggagggugguggggag

SEQ ID NO: 450607 - RNA, 32 nt, Human
ggaauggaucuacagccugccucccagguuuc

SEQ ID NO: 450608 - RNA, 32 nt, Human
ggaauggcaaaacuacugucgguugauguguc

SEQ ID NO: 450609 - RNA, 32 nt, Human
ggaauggcaaacuguuuuguuuugaaggaucu

SEQ ID NO: 450610 - RNA, 23 nt, Human
ggaauggcauuguauuuaccacc

SEQ ID NO: 450611 - RNA, 32 nt, Human
ggaauggccugcuaggagaugcagugagcccc

SEQ ID NO: 450612 - RNA, 32 nt, Human
ggaaugggagaaaacagccagcaggaggagcu

SEQ ID NO: 450613 - RNA, 32 nt, Human
ggaauggggaaagggggaagagcagcaugcgg

SEQ ID NO: 450614 - RNA, 32 nt, Human
ggaaugggggaagaggaggagcaggaggcccu

SEQ ID NO: 450615 - RNA, 17 nt, Human
ggaaugggguaggggga

SEQ ID NO: 450616 - RNA, 32 nt, Human
ggaaugggguagggggaggaguugugggggaa

SEQ ID NO: 450617 - RNA, 32 nt, Human
ggaaugguauuagucaaacauggugccagugu

SEQ ID NO: 450618 - RNA, 16 nt, Human
ggaauggugcuucugg

SEQ ID NO: 450619 - RNA, 32 nt, Human
ggaaugguugagugaggguaagggaaagaaua

SEQ ID NO: 450620 - RNA, 32 nt, Human
ggaauguaaaccgauuuaaugccaaaccaccu

SEQ ID NO: 450621 - RNA, 32 nt, Human
ggaauguacauauuuauuuacuuuucuaacug

SEQ ID NO: 450622 - RNA, 21 nt, Human
ggaauguacguuguggcccuc

SEQ ID NO: 450623 - RNA, 32 nt, Human
ggaauguauaaaugaggguggguccuucugca

SEQ ID NO: 450624 - RNA, 32 nt, Human
ggaauguauauacuuuugcuaauguuccagca

SEQ ID NO: 450625 - RNA, 32 nt, Human
ggaaugucagggacuagugacccaguccuguu

SEQ ID NO: 450626 - RNA, 32 nt, Human
ggaaugucgcccauuacuccucaggccuggcc

SEQ ID NO: 450627 - RNA, 32 nt, Human
ggaaugucugcagcuucacuccugaagccagc

SEQ ID NO: 450628 - RNA, 32 nt, Human
ggaaugucuggcuuuuccucagcuuauugauc

SEQ ID NO: 450629 - RNA, 32 nt, Human
ggaaugugaacacauuguuuguagugcuaucc

SEQ ID NO: 450630 - RNA, 21 nt, Human
ggaaugugaaggguaugcaga

SEQ ID NO: 450631 - RNA, 21 nt, Human
ggaaugugaccuuugcugcag

SEQ ID NO: 450632 - RNA, 32 nt, Human
ggaaugugaguguguuugugugcaugaaagag

SEQ ID NO: 450633 - RNA, 32 nt, Human
ggaaugugauagauagcuucuauaauuaugca

SEQ ID NO: 450634 - RNA, 32 nt, Human
ggaaugugcacguuuccaggggcgaguauugu

SEQ ID NO: 450635 - RNA, 22 nt, Human
ggaaugugcagacccugggguc

SEQ ID NO: 450636 - RNA, 32 nt, Human
ggaaugugccaugucuuucuucaguguuaugg

SEQ ID NO: 450637 - RNA, 32 nt, Human
ggaauguggacgcuuuccugcccagccagggc

SEQ ID NO: 450638 - RNA, 32 nt, Human
ggaauguggcaaauccuauaacaaguuuucaa

SEQ ID NO: 450639 - RNA, 32 nt, Human
ggaaugugggagagaggcagaaaaaggagcag

SEQ ID NO: 450640 - RNA, 32 nt, Human
ggaaugugguaaccaggaggaagggucacugg

SEQ ID NO: 450641 - RNA, 22 nt, Human
ggaauguguaugaugcaacaga

SEQ ID NO: 450642 - RNA, 21 nt, Human
ggaauguguggcaacugcaga

SEQ ID NO: 450643 - RNA, 32 nt, Human
ggaauguguugcagcaguuuucgcagaugaua

SEQ ID NO: 450644 - RNA, 32 nt, Human
ggaauguuaccuguuucugcugcuagaagauc

SEQ ID NO: 450645 - RNA, 32 nt, Human
ggaauguucucagcagagaagaaugaggagaa

SEQ ID NO: 450646 - RNA, 32 nt, Human
ggaauguucuuucugcucuauacuguggccug

SEQ ID NO: 450647 - RNA, 31 nt, Human
ggaauguuuaauaaauauucauugaauaaug

SEQ ID NO: 450648 - RNA, 32 nt, Human
ggaauguuuaccagacacagagcccagaggga

SEQ ID NO: 450649 - RNA, 32 nt, Human
ggaauguuuauggaauauuuaggauaaaugau

SEQ ID NO: 450650 - RNA, 32 nt, Human
ggaauguuuucacuggcccuuaccucaugauu

SEQ ID NO: 450651 - RNA, 32 nt, Human
ggaauuaaaggcuuccucugggugccugcuga

SEQ ID NO: 450652 - RNA, 32 nt, Human
ggaauuaagacaaagacacagaaauagagugc

SEQ ID NO: 450653 - RNA, 32 nt, Human
ggaauuaagacaaagacacagaaauauagugc

SEQ ID NO: 450654 - RNA, 32 nt, Human
ggaauuacaagugugucccaugccugaccuuc

SEQ ID NO: 450655 - RNA, 32 nt, Human
ggaauuacacagaagacgggugacagccaagg

SEQ ID NO: 450656 - RNA, 32 nt, Human
ggaauuacauaaggauaaugaggcccaacuga

SEQ ID NO: 450657 - RNA, 32 nt, Human
ggaauuacauauauuuguaugauucuucuagu

SEQ ID NO: 450658 - RNA, 32 nt, Human
ggaauuacuugguuuugcacauuaagaggccc

SEQ ID NO: 450659 - RNA, 32 nt, Human
ggaauuagcccuggccugaaaguggcccauca

SEQ ID NO: 450660 - RNA, 32 nt, Human
ggaauuaggacuccaguaccacugccuucacc

SEQ ID NO: 450661 - RNA, 32 nt, Human
ggaauuaggagagaagguagggguugggaauc

SEQ ID NO: 450662 - RNA, 32 nt, Human
ggaauuaggagccagguugacaaggacuuuuu

SEQ ID NO: 450663 - RNA, 32 nt, Human
ggaauuaggaggugggcacuuuaagggaugau

SEQ ID NO: 450664 - RNA, 32 nt, Human
ggaauuagggcuguggacacugucuugaggau

SEQ ID NO: 450665 - RNA, 32 nt, Human
ggaauuaguucagauuauuaagccugaauagg

SEQ ID NO: 450666 - RNA, 31 nt, Human
ggaauuaucaccagugauguuggagacuuaa

SEQ ID NO: 450667 - RNA, 32 nt, Human
ggaauuauccagacugccuugccacuagauga

SEQ ID NO: 450668 - RNA, 32 nt, Human
ggaauuaugagggagaggucugagggaaggga

SEQ ID NO: 450669 - RNA, 32 nt, Human
ggaauuauuuuauacagauuaggagaaauuaa

SEQ ID NO: 450670 - RNA, 32 nt, Human
ggaauuauuuucaugcagacagcuugucaagc

SEQ ID NO: 450671 - RNA, 32 nt, Human
ggaauucacaccccuccccuucucccacagcc

SEQ ID NO: 450672 - RNA, 32 nt, Human
ggaauucacccaggcagccuggagucagccau

SEQ ID NO: 450673 - RNA, 32 nt, Human
ggaauucagaggcagagcuuucagaugauucu

SEQ ID NO: 450674 - RNA, 32 nt, Human
ggaauucagaucugccuugugugaacagaacc

SEQ ID NO: 450675 - RNA, 32 nt, Human
ggaauucagcacugcauucucuuugcacccuc

SEQ ID NO: 450676 - RNA, 32 nt, Human
ggaauucaucuccagcaguggccugagaggaa

SEQ ID NO: 450677 - RNA, 20 nt, Human
ggaauucauuugccauccac

SEQ ID NO: 450678 - RNA, 32 nt, Human
ggaauuccaauucuuuuucucuccuuagaucu

SEQ ID NO: 450679 - RNA, 32 nt, Human
ggaauuccacaucugcucgugcaugccaucca

SEQ ID NO: 450680 - RNA, 32 nt, Human
ggaauuccaccugagaacaagucccgcaaacc

SEQ ID NO: 450681 - RNA, 32 nt, Human
ggaauuccugcucugguugcuggaucguguac

SEQ ID NO: 450682 - RNA, 18 nt, Human
ggaauuccuuggagccac

SEQ ID NO: 450683 - RNA, 32 nt, Human
ggaauucgccagccuucagccucccaacgugc

SEQ ID NO: 450684 - RNA, 32 nt, Human
ggaauucgggaaugacacgucuucugauccca

SEQ ID NO: 450685 - RNA, 25 nt, Human
ggaauucuaggcggaagaaccccga

SEQ ID NO: 450686 - RNA, 32 nt, Human
ggaauucuauuuuaugaaccuagagaagcaga

SEQ ID NO: 450687 - RNA, 32 nt, Human
ggaauucugaagcgcuggugaccccuggggua

SEQ ID NO: 450688 - RNA, 32 nt, Human
ggaauucugauaguguguagagcagggucuau

SEQ ID NO: 450689 - RNA, 32 nt, Human
ggaauucugcacuccaguuacuuaacuuuccc

SEQ ID NO: 450690 - RNA, 32 nt, Human
ggaauucugcagccacacccacugcggcaguc

SEQ ID NO: 450691 - RNA, 32 nt, Human
ggaauucugccuaaguugucugccuuuucuac

SEQ ID NO: 450692 - RNA, 32 nt, Human
ggaauucugggaaaacuuuuacuuccugauua

SEQ ID NO: 450693 - RNA, 32 nt, Human
ggaauucuguauuacaugaaugcugcuuauau

SEQ ID NO: 450694 - RNA, 32 nt, Human
ggaauucuuuguacuaauacagggagcacacu

SEQ ID NO: 450695 - RNA, 32 nt, Human
ggaauugaaauguuaagauacccagaacaaca

SEQ ID NO: 450696 - RNA, 32 nt, Human
ggaauugacaaucagaucacauggacacagga

SEQ ID NO: 450697 - RNA, 32 nt, Human
ggaauugacuccggcgugcacacacguacaca

SEQ ID NO: 450698 - RNA, 32 nt, Human
ggaauugagagucacagacacugagccacgca

SEQ ID NO: 450699 - RNA, 32 nt, Human
ggaauugauugucagccaccucccucugccag

SEQ ID NO: 450700 - RNA, 32 nt, Human
ggaauugcaugccaucuccacccugagccuga

SEQ ID NO: 450701 - RNA, 32 nt, Human
ggaauugccccaggaggacaccagauacagac

SEQ ID NO: 450702 - RNA, 32 nt, Human
ggaauugccucagccuccuaccaguccucccu

SEQ ID NO: 450703 - RNA, 32 nt, Human
ggaauugcugagacaggauggccuggcagggg

SEQ ID NO: 450704 - RNA, 32 nt, Human
ggaauuggacuggagugaaugggcacaggggu

SEQ ID NO: 450705 - RNA, 32 nt, Human
ggaauuggaggcggcagugagucaugaguaug

SEQ ID NO: 450706 - RNA, 32 nt, Human
ggaauuguaggauguuuagcagcaucacuggc

SEQ ID NO: 450707 - RNA, 32 nt, Human
ggaauuguuaauaauugcuccuaaagauuaua

SEQ ID NO: 450708 - RNA, 32 nt, Human
ggaauuguuaucugucucuugcucugagauac

SEQ ID NO: 450709 - RNA, 32 nt, Human
ggaauuguuuugccuuucuguucaucugugaa

SEQ ID NO: 450710 - RNA, 32 nt, Human
ggaauuuaaccagcaacauugacccagaaaug

SEQ ID NO: 450711 - RNA, 32 nt, Human
ggaauuuacacaaauuauaaaaauuagucggg

SEQ ID NO: 450712 - RNA, 32 nt, Human
ggaauuuagaacuaauccauccauccaucuac

SEQ ID NO: 450713 - RNA, 32 nt, Human
ggaauuuauuauuuugggcaugauggcuuuca

SEQ ID NO: 450714 - RNA, 32 nt, Human
ggaauuucaaaccauugcucuuagucccaagc

SEQ ID NO: 450715 - RNA, 32 nt, Human
ggaauuucacacuuuaccuacucugaucacuc

SEQ ID NO: 450716 - RNA, 32 nt, Human
ggaauuucaguacacugaauuuugccucugac

SEQ ID NO: 450717 - RNA, 32 nt, Human
ggaauuucauggcaacaaugcugguaagggca

SEQ ID NO: 450718 - RNA, 32 nt, Human
ggaauuucuacccaaagcugucugagaguuua

SEQ ID NO: 450719 - RNA, 20 nt, Human
ggaauuucugguccugggaa

SEQ ID NO: 450720 - RNA, 32 nt, Human
ggaauuugagaccuggccaacauggugaaacc

SEQ ID NO: 450721 - RNA, 32 nt, Human
ggaauuugaggcaagaggauugcuagaggcca

SEQ ID NO: 450722 - RNA, 32 nt, Human
ggaauuugcauccagcagcagcacuuagaccu

SEQ ID NO: 450723 - RNA, 32 nt, Human
ggaauuugcauucaugugcauuuaccaagagg

SEQ ID NO: 450724 - RNA, 32 nt, Human
ggaauuuggaaaccucaaauggcuaaacuauu

SEQ ID NO: 450725 - RNA, 32 nt, Human
ggaauuuggggaagccaccaugcaauccagug

SEQ ID NO: 450726 - RNA, 23 nt, Human
ggaauuuucuuaagagguuucaa

SEQ ID NO: 450727 - RNA, 32 nt, Human
ggaauuuuuguagggauugaagccagagcuag

SEQ ID NO: 450728 - RNA, 19 nt, Human
ggacaaaagaauucuuucc

SEQ ID NO: 450729 - RNA, 32 nt, Human
ggacaaaagccaaaggugccaggccuuagagc

SEQ ID NO: 450730 - RNA, 32 nt, Human
ggacaaacaggugacccagcagacccagccug

SEQ ID NO: 450731 - RNA, 22 nt, Human
ggacaaacagugcacuauguua

SEQ ID NO: 450732 - RNA, 32 nt, Human
ggacaaaccaaagccuuuguucuuucuuauug

SEQ ID NO: 450733 - RNA, 32 nt, Human
ggacaaaccagccagccucuccagagcaggcg

SEQ ID NO: 450734 - RNA, 32 nt, Human
ggacaaaccuagaauuuucucccuuuauguau

SEQ ID NO: 450735 - RNA, 32 nt, Human
ggacaaaccucaccaguaccugcacaggagaa

SEQ ID NO: 450736 - RNA, 21 nt, Human
ggacaaacuuggggacaguca

SEQ ID NO: 450737 - RNA, 32 nt, Human
ggacaaagccuggggcugggcgggggccaugg

SEQ ID NO: 450738 - RNA, 26 nt, Human
ggacaaagcucuccguggcuguggca

SEQ ID NO: 450739 - RNA, 32 nt, Human
ggacaaaggcauugcaccuacuuucuccuuga

SEQ ID NO: 450740 - RNA, 25 nt, Human
ggacaaagggaugaggcuccagaga

SEQ ID NO: 450741 - RNA, 32 nt, Human
ggacaaagguagacaucuuuccucacugccag

SEQ ID NO: 450742 - RNA, 24 nt, Human
ggacaaaguagacacccgccuaca

SEQ ID NO: 450743 - RNA, 32 nt, Human
ggacaaagucuccagcccacguucucucugcc

SEQ ID NO: 450744 - RNA, 21 nt, Human
ggacaaagugccacuacaaca

SEQ ID NO: 450745 - RNA, 21 nt, Human
ggacaaauaggcucuauuuua

SEQ ID NO: 450746 - RNA, 32 nt, Human
ggacaaauauccacccaagagaaccaaucaua

SEQ ID NO: 450747 - RNA, 32 nt, Human
ggacaaaucucucaccaggacugaggagacca

SEQ ID NO: 450748 - RNA, 32 nt, Human
ggacaaaucucuuugugcuguuugguaacacu

SEQ ID NO: 450749 - RNA, 21 nt, Human
ggacaaaugaccacuauguua

SEQ ID NO: 450750 - RNA, 32 nt, Human
ggacaaaugagaccagcaaugugaacuguauu

SEQ ID NO: 450751 - RNA, 32 nt, Human
ggacaaaugccacacggcucucaccaguggcu

SEQ ID NO: 450752 - RNA, 20 nt, Human
ggacaaaugccacugcaaca

SEQ ID NO: 450753 - RNA, 32 nt, Human
ggacaaauggcagcagaaagagaaagaacaga

SEQ ID NO: 450754 - RNA, 32 nt, Human
ggacaaauuccuaggaucuccccaccaccccu

SEQ ID NO: 450755 - RNA, 32 nt, Human
ggacaaauuuauuugcaaaaugagucuaguuu

SEQ ID NO: 450756 - RNA, 32 nt, Human
ggacaaauuugugaaugcagcggccaaaagau

SEQ ID NO: 450757 - RNA, 18 nt, Human
ggacaacaaucucugaga

SEQ ID NO: 450758 - RNA, 20 nt, Human
ggacaacacaccugcugcug

SEQ ID NO: 450759 - RNA, 32 nt, Human
ggacaacacagcugcuuccccaggcugcccac

SEQ ID NO: 450760 - RNA, 32 nt, Human
ggacaacacagugagaccucaucucuaucaaa

SEQ ID NO: 450761 - RNA, 24 nt, Human
ggacaacacagugagacucugucu

SEQ ID NO: 450762 - RNA, 32 nt, Human
ggacaacagaagacugucuaaggaugccugga

SEQ ID NO: 450763 - RNA, 24 nt, Human
ggacaacagagggagacucugucu

SEQ ID NO: 450764 - RNA, 24 nt, Human
ggacaacagagugagacuccaucu

SEQ ID NO: 450765 - RNA, 24 nt, Human
ggacaacagagugggacucugucu

SEQ ID NO: 450766 - RNA, 32 nt, Human
ggacaacagcugcuauuuucacuugagcccaa

SEQ ID NO: 450767 - RNA, 32 nt, Human
ggacaacaggcgcccgucaccacgcccagcua

SEQ ID NO: 450768 - RNA, 32 nt, Human
ggacaacagguacgcaccaccacggccagcua

SEQ ID NO: 450769 - RNA, 32 nt, Human
ggacaacaggugugcaccaccaugcccugcua

SEQ ID NO: 450770 - RNA, 32 nt, Human
ggacaacagugaauguguuuaugccagcgugu

SEQ ID NO: 450771 - RNA, 32 nt, Human
ggacaacauacagccucuggaaacccaaccuu

SEQ ID NO: 450772 - RNA, 32 nt, Human
ggacaacauacuaaaaccucaucucuaugaaa

SEQ ID NO: 450773 - RNA, 32 nt, Human
ggacaacauagugaaacccugucucuacuaag

SEQ ID NO: 450774 - RNA, 32 nt, Human
ggacaacauagugagacccccaucucuaaaua

SEQ ID NO: 450775 - RNA, 32 nt, Human
ggacaacaucgugaaaccuugucucuacaaaa

SEQ ID NO: 450776 - RNA, 32 nt, Human
ggacaacaugaugagauccccaucucuaaaag

SEQ ID NO: 450777 - RNA, 32 nt, Human
ggacaacauggcgaaaccucaucucuauuaaa

SEQ ID NO: 450778 - RNA, 32 nt, Human
ggacaacauggggagaccccaucucuaccgga

SEQ ID NO: 450779 - RNA, 32 nt, Human
ggacaacauggugaaaccccaucucuacgaaa

SEQ ID NO: 450780 - RNA, 32 nt, Human
ggacaacauggugaaaccccaucucuuuaaaa

SEQ ID NO: 450781 - RNA, 32 nt, Human
ggacaacauggugaaaccccgucucuacaaaa

SEQ ID NO: 450782 - RNA, 32 nt, Human
ggacaacauggugaaaccccuucucuacuaaa

SEQ ID NO: 450783 - RNA, 32 nt, Human
ggacaacauggugaaacccuaucucuacuaaa

SEQ ID NO: 450784 - RNA, 32 nt, Human
ggacaacauggugaaacccugucucuacuguc

SEQ ID NO: 450785 - RNA, 32 nt, Human
ggacaacauggugaaacccuucucuacuaaaa

SEQ ID NO: 450786 - RNA, 32 nt, Human
ggacaacauggugaacccgucucuacuaauuu

SEQ ID NO: 450787 - RNA, 32 nt, Human
ggacaacauggugagaccucgucucuacaaaa

SEQ ID NO: 450788 - RNA, 21 nt, Human
ggacaacauuggucuaggaca

SEQ ID NO: 450789 - RNA, 32 nt, Human
ggacaacauugugaaaccuugucucuacaaaa

SEQ ID NO: 450790 - RNA, 32 nt, Human
ggacaaccauuuacuugguguaaagaacuuaa

SEQ ID NO: 450791 - RNA, 32 nt, Human
ggacaaccuauguuauggauguuuccaccaac

SEQ ID NO: 450792 - RNA, 21 nt, Human
ggacaaccuggugguggugga

SEQ ID NO: 450793 - RNA, 32 nt, Human
ggacaacgcaaccuaccucacaggguuguugu

SEQ ID NO: 450794 - RNA, 32 nt, Human
ggacaacuccaccccuuccuuggccuugcccc

SEQ ID NO: 450795 - RNA, 32 nt, Human
ggacaacuccacccuccuuccuuccccacagg

SEQ ID NO: 450796 - RNA, 32 nt, Human
ggacaacuccuuccuguugagggucgagccug

SEQ ID NO: 450797 - RNA, 32 nt, Human
ggacaacugaaaagucacaucacagcuggcau

SEQ ID NO: 450798 - RNA, 32 nt, Human
ggacaacugccuggugacacugcugccgcugc

SEQ ID NO: 450799 - RNA, 32 nt, Human
ggacaacuggaagacaguuacgcuucguccuc

SEQ ID NO: 450800 - RNA, 32 nt, Human
ggacaacuggaaggaggacucagguagcccca

SEQ ID NO: 450801 - RNA, 21 nt, Human
ggacaacuuuaaguggacacu

SEQ ID NO: 450802 - RNA, 32 nt, Human
ggacaacuuuguggccaccugcucugaaaguc

SEQ ID NO: 450803 - RNA, 32 nt, Human
ggacaagaaggagccagcucccagcggguuca

SEQ ID NO: 450804 - RNA, 32 nt, Human
ggacaagacaggcagagaucuauaaacagaca

SEQ ID NO: 450805 - RNA, 17 nt, Human
ggacaagacuacugugg

SEQ ID NO: 450806 - RNA, 32 nt, Human
ggacaagacuccgacuccagcucugacuuuuu

SEQ ID NO: 450807 - RNA, 20 nt, Human
ggacaagaguggcacugugg

SEQ ID NO: 450808 - RNA, 32 nt, Human
ggacaagaguugagcagccuuucugcugauua

SEQ ID NO: 450809 - RNA, 24 nt, Human
ggacaagaguuugaacucaaggga

SEQ ID NO: 450810 - RNA, 32 nt, Human
ggacaagauacaaguucacaugaugggaaaaa

SEQ ID NO: 450811 - RNA, 32 nt, Human
ggacaagauauauuuuucucuguauuucuaua

SEQ ID NO: 450812 - RNA, 32 nt, Human
ggacaagauccccuaaugagcuggcagguggg

SEQ ID NO: 450813 - RNA, 32 nt, Human
ggacaagauucccagagaggagaggaggcugu

SEQ ID NO: 450814 - RNA, 32 nt, Human
ggacaagauuuucagccauuuuugccacauau

SEQ ID NO: 450815 - RNA, 32 nt, Human
ggacaagcagaacagguguggaagagagauuu

SEQ ID NO: 450816 - RNA, 32 nt, Human
ggacaagcagagaaggcuaaagugcucugguu

SEQ ID NO: 450817 - RNA, 32 nt, Human
ggacaagcaguuggagugagaaucaagacagc

SEQ ID NO: 450818 - RNA, 32 nt, Human
ggacaagccacuaguccccucuggaccucaac

SEQ ID NO: 450819 - RNA, 32 nt, Human
ggacaagccagcugccccaggguucuuccccu

SEQ ID NO: 450820 - RNA, 32 nt, Human
ggacaagccauccaaaaaccccaggcccacau

SEQ ID NO: 450821 - RNA, 32 nt, Human
ggacaagccgccaagacccaggggcccagagc

SEQ ID NO: 450822 - RNA, 16 nt, Human
ggacaagccucuggga

SEQ ID NO: 450823 - RNA, 19 nt, Human
ggacaagcggcggcggcug

SEQ ID NO: 450824 - RNA, 32 nt, Human
ggacaagcuaguauucuugucuuuggacuuca

SEQ ID NO: 450825 - RNA, 32 nt, Human
ggacaagcucacuauucacacaagcucagccu

SEQ ID NO: 450826 - RNA, 32 nt, Human
ggacaagcuguggagcuggcugagucacagcc

SEQ ID NO: 450827 - RNA, 32 nt, Human
ggacaaggacucaggacauggguguggaagaa

SEQ ID NO: 450828 - RNA, 32 nt, Human
ggacaaggaggcggggccugcagcuggcuugg

SEQ ID NO: 450829 - RNA, 32 nt, Human
ggacaaggaguuuccagcugcuggcuggaguc

SEQ ID NO: 450830 - RNA, 32 nt, Human
ggacaaggcagguggaggggaggccaguguac

SEQ ID NO: 450831 - RNA, 19 nt, Human
ggacaaggccagaaacagc

SEQ ID NO: 450832 - RNA, 32 nt, Human
ggacaaggcugcagggccucuuucggguuucc

SEQ ID NO: 450833 - RNA, 32 nt, Human
ggacaaggcugguuauuagaacaaagauuucg

SEQ ID NO: 450834 - RNA, 32 nt, Human
ggacaagggagacacaacacaaaucccucuaa

SEQ ID NO: 450835 - RNA, 32 nt, Human
ggacaagggaggcaguggcuaguggggugaac

SEQ ID NO: 450836 - RNA, 32 nt, Human
ggacaagggcaagauuauuaagcagcaagaga

SEQ ID NO: 450837 - RNA, 32 nt, Human
ggacaagggcuguguugucacagcaggaauag

SEQ ID NO: 450838 - RNA, 32 nt, Human
ggacaaggggagaguccccuacuccccugauc

SEQ ID NO: 450839 - RNA, 32 nt, Human
ggacaagguccuggcuagagaaugucaauguc

SEQ ID NO: 450840 - RNA, 32 nt, Human
ggacaagguucucgaguucccauugcugaaag

SEQ ID NO: 450841 - RNA, 32 nt, Human
ggacaagugcagcugcugcgccugugcuggga

SEQ ID NO: 450842 - RNA, 21 nt, Human
ggacaauaaauggaugugaca

SEQ ID NO: 450843 - RNA, 32 nt, Human
ggacaauauagugaaaccccgucucuacuaaa

SEQ ID NO: 450844 - RNA, 32 nt, Human
ggacaauauggugaaacccugucuuuacuaaa

SEQ ID NO: 450845 - RNA, 32 nt, Human
ggacaauauggugaagcccuaucucuacuaaa

SEQ ID NO: 450846 - RNA, 32 nt, Human
ggacaaucugcaaaauggagagaauacaauaa

SEQ ID NO: 450847 - RNA, 32 nt, Human
ggacaaugacauaugaaugaggaucaaaacga

SEQ ID NO: 450848 - RNA, 30 nt, Human
ggacaauggagguggcgguggagaaggcgg

SEQ ID NO: 450849 - RNA, 22 nt, Human
ggacaauggccaggugaagccu

SEQ ID NO: 450850 - RNA, 30 nt, Human
ggacaauggguucagacaaaagagugagua

SEQ ID NO: 450851 - RNA, 32 nt, Human
ggacaauggugacagauccaggcaccgagcuc

SEQ ID NO: 450852 - RNA, 32 nt, Human
ggacaauuagggacuggugugccugucauucu

SEQ ID NO: 450853 - RNA, 19 nt, Human
ggacaauuauggcugugac

SEQ ID NO: 450854 - RNA, 32 nt, Human
ggacaauuguaacugugaaacuauggcuuaac

SEQ ID NO: 450855 - RNA, 32 nt, Human
ggacaauuucuagaagacuacaauucagucua

SEQ ID NO: 450856 - RNA, 32 nt, Human
ggacaauuucuccuaguuaccacuagggguua

SEQ ID NO: 450857 - RNA, 32 nt, Human
ggacaauuuugcagcaauacagcagcaucagg

SEQ ID NO: 450858 - RNA, 32 nt, Human
ggacacaaacaccagcuauugccugcaucugg

SEQ ID NO: 450859 - RNA, 32 nt, Human
ggacacaaagcuaacacagccaucguuauaca

SEQ ID NO: 450860 - RNA, 32 nt, Human
ggacacaaccugcuggagugcaauggcacgau

SEQ ID NO: 450861 - RNA, 32 nt, Human
ggacacaauaccaacucuuucaugccaggaga

SEQ ID NO: 450862 - RNA, 32 nt, Human
ggacacacaccaagggcacuccugcagguggc

SEQ ID NO: 450863 - RNA, 32 nt, Human
ggacacacagauggacagagagcaggaaagac

SEQ ID NO: 450864 - RNA, 32 nt, Human
ggacacacagccaggcaaggagggagcucacc

SEQ ID NO: 450865 - RNA, 32 nt, Human
ggacacacagcccaggcuguucugagucagaa

SEQ ID NO: 450866 - RNA, 22 nt, Human
ggacacacaggaccacucagug

SEQ ID NO: 450867 - RNA, 23 nt, Human
ggacacacaggccaccugugcag

SEQ ID NO: 450868 - RNA, 21 nt, Human
ggacacacaggugugcaccuc

SEQ ID NO: 450869 - RNA, 32 nt, Human
ggacacacaguguggcauccucauguuugcac

SEQ ID NO: 450870 - RNA, 32 nt, Human
ggacacaccagggcaucaccagucucuaucac

SEQ ID NO: 450871 - RNA, 32 nt, Human
ggacacaccauggggugaagccaucccaaggc

SEQ ID NO: 450872 - RNA, 32 nt, Human
ggacacacgauccaguccugaccaaacagaau

SEQ ID NO: 450873 - RNA, 32 nt, Human
ggacacagaacuaaaacuacuacuuacaucua

SEQ ID NO: 450874 - RNA, 32 nt, Human
ggacacagacacaaaaucccugcccuuaacaa

SEQ ID NO: 450875 - RNA, 32 nt, Human
ggacacagacuugccggcucuaccuaucgcca

SEQ ID NO: 450876 - RNA, 32 nt, Human
ggacacagagagagacacaaacagggagggcg

SEQ ID NO: 450877 - RNA, 32 nt, Human
ggacacagagccacugcaguccccgcucggag

SEQ ID NO: 450878 - RNA, 21 nt, Human
ggacacagagccacugugcag

SEQ ID NO: 450879 - RNA, 32 nt, Human
ggacacagagcucccucucucccuccaaagaa

SEQ ID NO: 450880 - RNA, 19 nt, Human
ggacacagaggcucagaga

SEQ ID NO: 450881 - RNA, 32 nt, Human
ggacacagagggcaagacugcaucccaguuac

SEQ ID NO: 450882 - RNA, 32 nt, Human
ggacacagcgcacacccagacccuccaccagg

SEQ ID NO: 450883 - RNA, 32 nt, Human
ggacacagcuaaaucauaucauauaccaucuu

SEQ ID NO: 450884 - RNA, 32 nt, Human
ggacacagcugcuccccucuggcuaugaagag

SEQ ID NO: 450885 - RNA, 32 nt, Human
ggacacagcuuuggccuugggaauucugggaa

SEQ ID NO: 450886 - RNA, 32 nt, Human
ggacacaggaagugcugccauugagaguguuc

SEQ ID NO: 450887 - RNA, 32 nt, Human
ggacacagggaggggaacaacacacaccaggg

SEQ ID NO: 450888 - RNA, 31 nt, Human
ggacacaggguggucccuugccagggacugg

SEQ ID NO: 450889 - RNA, 32 nt, Human
ggacacauagagggaaacaacacacacugggg

SEQ ID NO: 450890 - RNA, 32 nt, Human
ggacacauagaggggaacaacacacacugggg

SEQ ID NO: 450891 - RNA, 25 nt, Human
ggacacauauauuaaacagauuguu

SEQ ID NO: 450892 - RNA, 32 nt, Human
ggacacauaucuuuugaguuauuuggacugaa

SEQ ID NO: 450893 - RNA, 23 nt, Human
ggacacaucaccaacccauggac

SEQ ID NO: 450894 - RNA, 32 nt, Human
ggacacauccccacccugccucccaucuggcc

SEQ ID NO: 450895 - RNA, 25 nt, Human
ggacacaucugcccacagcugcaca

SEQ ID NO: 450896 - RNA, 32 nt, Human
ggacacaucuggggacagucuccuuccuggag

SEQ ID NO: 450897 - RNA, 32 nt, Human
ggacacaugagcccuggaugaguaugguaggg

SEQ ID NO: 450898 - RNA, 32 nt, Human
ggacacauuccagauuucugugcugaaauauu

SEQ ID NO: 450899 - RNA, 32 nt, Human
ggacacauuuuauccugauccacaguggaguu

SEQ ID NO: 450900 - RNA, 20 nt, Human
ggacaccaacaggguuucaa

SEQ ID NO: 450901 - RNA, 32 nt, Human
ggacaccaagucuuguagcuucuccuaaauau

SEQ ID NO: 450902 - RNA, 32 nt, Human
ggacaccaccaggcaccucccuaggcaacgcc

SEQ ID NO: 450903 - RNA, 32 nt, Human
ggacaccacgccagugcuuuccugccuuccuu

SEQ ID NO: 450904 - RNA, 32 nt, Human
ggacaccacuuaaauauccaucaauggaagac

SEQ ID NO: 450905 - RNA, 32 nt, Human
ggacaccagaagagacaggagaucagagacca

SEQ ID NO: 450906 - RNA, 31 nt, Human
ggacaccagagagucguguggcugagguuuc

SEQ ID NO: 450907 - RNA, 21 nt, Human
ggacaccagccuggugcccau

SEQ ID NO: 450908 - RNA, 30 nt, Human
ggacaccaggaggucagggcacagaggacg

SEQ ID NO: 450909 - RNA, 17 nt, Human
ggacaccaggcuggcug

SEQ ID NO: 450910 - RNA, 32 nt, Human
ggacaccagggagagacagagacagagaugac

SEQ ID NO: 450911 - RNA, 32 nt, Human
ggacaccagggugggggugaaggagacacuac

SEQ ID NO: 450912 - RNA, 32 nt, Human
ggacaccaguuauuagaggaugagaaaaguaa

SEQ ID NO: 450913 - RNA, 32 nt, Human
ggacaccaucgagggagcaggagcaucaggcg

SEQ ID NO: 450914 - RNA, 32 nt, Human
ggacaccaucuugaccaaacaccaagaaggca

SEQ ID NO: 450915 - RNA, 32 nt, Human
ggacaccaugccacaaggagagugaucucuuc

SEQ ID NO: 450916 - RNA, 32 nt, Human
ggacaccauucaagccagcugaauuccgguca

SEQ ID NO: 450917 - RNA, 32 nt, Human
ggacaccauuggaccccacccagccuggaucu

SEQ ID NO: 450918 - RNA, 32 nt, Human
ggacacccaagaauaaaagaauaaccacaaag

SEQ ID NO: 450919 - RNA, 32 nt, Human
ggacacccacgcccuucucuccagaagccggg

SEQ ID NO: 450920 - RNA, 32 nt, Human
ggacacccaucuuaccggccaauguccaaaau

SEQ ID NO: 450921 - RNA, 19 nt, Human
ggacaccccaggcugccac

SEQ ID NO: 450922 - RNA, 19 nt, Human
ggacacccccagcuuccac

SEQ ID NO: 450923 - RNA, 32 nt, Human
ggacacccggggucaagcagaagaggaaggca

SEQ ID NO: 450924 - RNA, 18 nt, Human
ggacacccugaaauccac

SEQ ID NO: 450925 - RNA, 32 nt, Human
ggacacccuugccaccacuggggacugccacu

SEQ ID NO: 450926 - RNA, 19 nt, Human
ggacacccuugucuaggga

SEQ ID NO: 450927 - RNA, 32 nt, Human
ggacaccgagcccugagugcugugcugcugcu

SEQ ID NO: 450928 - RNA, 32 nt, Human
ggacaccgugagccagccaggccuggccgcug

SEQ ID NO: 450929 - RNA, 32 nt, Human
ggacaccuaauacccacagcccuccagagacc

SEQ ID NO: 450930 - RNA, 32 nt, Human
ggacaccucccagccagaaggcucugagacau

SEQ ID NO: 450931 - RNA, 22 nt, Human
ggacaccucccuucccuucuca

SEQ ID NO: 450932 - RNA, 32 nt, Human
ggacaccuccucugauaugcugaggccagugu

SEQ ID NO: 450933 - RNA, 32 nt, Human
ggacaccuccuggcacaacaccaccuucuuug

SEQ ID NO: 450934 - RNA, 32 nt, Human
ggacaccucuuggagcucaccaccacugucac

SEQ ID NO: 450935 - RNA, 32 nt, Human
ggacaccugcccugcccugccaccugucuguc

SEQ ID NO: 450936 - RNA, 32 nt, Human
ggacaccugcucaccccugccucaucuguacu

SEQ ID NO: 450937 - RNA, 32 nt, Human
ggacaccugcuccacuucaccuuuugccauga

SEQ ID NO: 450938 - RNA, 32 nt, Human
ggacaccuggaacugcggcaaaguaggagaag

SEQ ID NO: 450939 - RNA, 32 nt, Human
ggacaccuggagcccccaggagcugggagagg

SEQ ID NO: 450940 - RNA, 32 nt, Human
ggacaccuggccagugcugaagggcuguugug

SEQ ID NO: 450941 - RNA, 32 nt, Human
ggacaccugggcaaggaagggcugugcauuga

SEQ ID NO: 450942 - RNA, 32 nt, Human
ggacaccugguccugcuagcuggaccacuggc

SEQ ID NO: 450943 - RNA, 17 nt, Human
ggacaccuguaauccca

SEQ ID NO: 450944 - RNA, 32 nt, Human
ggacaccuguaaucccagcuacuagggaggcu

SEQ ID NO: 450945 - RNA, 32 nt, Human
ggacaccuguaaucccagcuacucagguggcu

SEQ ID NO: 450946 - RNA, 32 nt, Human
ggacaccuguaaucccugcugcuugggaggca

SEQ ID NO: 450947 - RNA, 32 nt, Human
ggacaccuguagucccagcugcuugggaggcu

SEQ ID NO: 450948 - RNA, 24 nt, Human
ggacaccugugacaccuggccaca

SEQ ID NO: 450949 - RNA, 32 nt, Human
ggacaccuguucugcuguuguguccugccauu

SEQ ID NO: 450950 - RNA, 32 nt, Human
ggacaccuucuuuccacgcuuuccagccugug

SEQ ID NO: 450951 - RNA, 32 nt, Human
ggacaccuuuaaucccaguuacucaggaggcu

SEQ ID NO: 450952 - RNA, 18 nt, Human
ggacacgaggacacggga

SEQ ID NO: 450953 - RNA, 32 nt, Human
ggacacgccagaggaggaggccggggaauggc

SEQ ID NO: 450954 - RNA, 32 nt, Human
ggacacgccaugacucuggagggucuguauuu

SEQ ID NO: 450955 - RNA, 32 nt, Human
ggacacgcccaucuuggauuuccugaaagcag

SEQ ID NO: 450956 - RNA, 32 nt, Human
ggacacggagccaagacagagucuagcaaaga

SEQ ID NO: 450957 - RNA, 32 nt, Human
ggacacggcccaccuggaggccugugugcgcu

SEQ ID NO: 450958 - RNA, 32 nt, Human
ggacacggcccuguggugucucacccacgggc

SEQ ID NO: 450959 - RNA, 32 nt, Human
ggacacggcucccaggccucugaccccugcuc

SEQ ID NO: 450960 - RNA, 32 nt, Human
ggacacgggcagcagacaguggucaguccuuu

SEQ ID NO: 450961 - RNA, 32 nt, Human
ggacacggucacccguugccagcucuagccuu

SEQ ID NO: 450962 - RNA, 32 nt, Human
ggacacgugauggaccguaggaagaaggcacu

SEQ ID NO: 450963 - RNA, 32 nt, Human
ggacacuaucaagaaaauaggcugggugcagu

SEQ ID NO: 450964 - RNA, 32 nt, Human
ggacacucaaauaaugugauuuuaugaggcua

SEQ ID NO: 450965 - RNA, 31 nt, Human
ggacacucaauaaauguucauuggugaaaaa

SEQ ID NO: 450966 - RNA, 32 nt, Human
ggacacucagcacaucuuagcuuuauuuccuu

SEQ ID NO: 450967 - RNA, 20 nt, Human
ggacacucaggcacagagug

SEQ ID NO: 450968 - RNA, 32 nt, Human
ggacacuccagaugugguuggaagcauaagug

SEQ ID NO: 450969 - RNA, 32 nt, Human
ggacacuccagaugugguuggaagcauaugug

SEQ ID NO: 450970 - RNA, 32 nt, Human
ggacacucugaacuccugcacucuccagaagu

SEQ ID NO: 450971 - RNA, 32 nt, Human
ggacacucugaggagaggcagauggagcucca

SEQ ID NO: 450972 - RNA, 32 nt, Human
ggacacugacguaggaggguugcuugagacug

SEQ ID NO: 450973 - RNA, 32 nt, Human
ggacacugagccgggcaacagguggccccggc

SEQ ID NO: 450974 - RNA, 32 nt, Human
ggacacugagguagccucauuccacagguuua

SEQ ID NO: 450975 - RNA, 32 nt, Human
ggacacugcagaggaagauaaugaagagaucu

SEQ ID NO: 450976 - RNA, 32 nt, Human
ggacacugcagucuggcuacacacagagaucu

SEQ ID NO: 450977 - RNA, 32 nt, Human
ggacacugcccccuaccuucucugcccacacc

SEQ ID NO: 450978 - RNA, 32 nt, Human
ggacacugcccuggcccuccauacucugcucc

SEQ ID NO: 450979 - RNA, 32 nt, Human
ggacacugcugggcacaguuaacucuaauucu

SEQ ID NO: 450980 - RNA, 32 nt, Human
ggacacuggcuggccuuccuucucuucugagc

SEQ ID NO: 450981 - RNA, 32 nt, Human
ggacacuggggcauccugcucaucucacaccc

SEQ ID NO: 450982 - RNA, 32 nt, Human
ggacacuguaggaggcagauccaagaggcuuc

SEQ ID NO: 450983 - RNA, 32 nt, Human
ggacacugucggcacggugggcugggggcgua

SEQ ID NO: 450984 - RNA, 32 nt, Human
ggacacuuagggccacagaggccaggccaggg

SEQ ID NO: 450985 - RNA, 32 nt, Human
ggacacuuaugcugaauuauguucuuauuauu

SEQ ID NO: 450986 - RNA, 32 nt, Human
ggacacuucccuaccggggcugaggccaugcu

SEQ ID NO: 450987 - RNA, 32 nt, Human
ggacacuuuucuucccuccagccaggguuucu

SEQ ID NO: 450988 - RNA, 32 nt, Human
ggacagaaaccagccucagaguccggggcagg

SEQ ID NO: 450989 - RNA, 32 nt, Human
ggacagaaagccaccagccaauggagaacaaa

SEQ ID NO: 450990 - RNA, 32 nt, Human
ggacagaacugggauggauacacacaugcuua

SEQ ID NO: 450991 - RNA, 32 nt, Human
ggacagaacuucuuccaaaagagagggauggc

SEQ ID NO: 450992 - RNA, 21 nt, Human
ggacagaagcagacagcaggu

SEQ ID NO: 450993 - RNA, 32 nt, Human
ggacagaagccagugccuuuaagucauuugug

SEQ ID NO: 450994 - RNA, 32 nt, Human
ggacagaauucuagguggaugauuuuugccau

SEQ ID NO: 450995 - RNA, 31 nt, Human
ggacagacacagccugaaaccaaagccucug

SEQ ID NO: 450996 - RNA, 32 nt, Human
ggacagacagaagaaaagacaagaagcagcug

SEQ ID NO: 450997 - RNA, 32 nt, Human
ggacagacccggggcagccucugggugaacag

SEQ ID NO: 450998 - RNA, 32 nt, Human
ggacagacccuuuaaccucaccucugugcauc

SEQ ID NO: 450999 - RNA, 32 nt, Human
ggacagaccucaggagcuuucauuucaguuag

SEQ ID NO: 451000 - RNA, 20 nt, Human
ggacagacgcaaaccugagg

SEQ ID NO: 451001 - RNA, 21 nt, Human
ggacagacguuucucuggagg

SEQ ID NO: 451002 - RNA, 32 nt, Human
ggacagacuacuuuuuaaaugauaugaagaaa

SEQ ID NO: 451003 - RNA, 32 nt, Human
ggacagagacccagagggcagcgucagacacc

SEQ ID NO: 451004 - RNA, 20 nt, Human
ggacagagagaugacugggg

SEQ ID NO: 451005 - RNA, 32 nt, Human
ggacagagagcagagaggccgggggucuucag

SEQ ID NO: 451006 - RNA, 32 nt, Human
ggacagagagcucugaaggacagaacacgcau

SEQ ID NO: 451007 - RNA, 32 nt, Human
ggacagagaggaaggagguggagcagcugggg

SEQ ID NO: 451008 - RNA, 32 nt, Human
ggacagagagugcacaaacuacccagcacagc

SEQ ID NO: 451009 - RNA, 32 nt, Human
ggacagagaguuacagaaaugggagacuguuu

SEQ ID NO: 451010 - RNA, 20 nt, Human
ggacagagcagcucuugucc

SEQ ID NO: 451011 - RNA, 32 nt, Human
ggacagagcagggaccucaacuacacugauca

SEQ ID NO: 451012 - RNA, 32 nt, Human
ggacagagccaggagucaagugcagugccaag

SEQ ID NO: 451013 - RNA, 32 nt, Human
ggacagagcccaaaacggggguagacuuugug

SEQ ID NO: 451014 - RNA, 32 nt, Human
ggacagagcccagcagaucccagcugugaaga

SEQ ID NO: 451015 - RNA, 17 nt, Human
ggacagagccucaggga

SEQ ID NO: 451016 - RNA, 18 nt, Human
ggacagagcgccuuccac

SEQ ID NO: 451017 - RNA, 19 nt, Human
ggacagagcuaaagaaaca

SEQ ID NO: 451018 - RNA, 22 nt, Human
ggacagagcucagacaagagca

SEQ ID NO: 451019 - RNA, 32 nt, Human
ggacagagcucaggggcucagagcagaguugg

SEQ ID NO: 451020 - RNA, 24 nt, Human
ggacagagcucccucacuucaaga

SEQ ID NO: 451021 - RNA, 22 nt, Human
ggacagaggaagaccugauggg

SEQ ID NO: 451022 - RNA, 32 nt, Human
ggacagaggaagcuuuagauagagacuuuaga

SEQ ID NO: 451023 - RNA, 32 nt, Human
ggacagaggccugcuucagggaagcugggagu

SEQ ID NO: 451024 - RNA, 32 nt, Human
ggacagaggcgaggggacagcccagcgccauc

SEQ ID NO: 451025 - RNA, 23 nt, Human
ggacagaggggaagaaagcuggg

SEQ ID NO: 451026 - RNA, 32 nt, Human
ggacagagguagacuguccuccccuaccuccu

SEQ ID NO: 451027 - RNA, 32 nt, Human
ggacagagguggagacaggugcagugacccag

SEQ ID NO: 451028 - RNA, 19 nt, Human
ggacagagucucucucugu

SEQ ID NO: 451029 - RNA, 31 nt, Human
ggacagagugagagaagucagcugucacggg

SEQ ID NO: 451030 - RNA, 32 nt, Human
ggacagauagacagugcugcccugcgaagugg

SEQ ID NO: 451031 - RNA, 32 nt, Human
ggacagauauuuuaguaucucaguaauguccu

SEQ ID NO: 451032 - RNA, 22 nt, Human
ggacagaucacuugaggucagg

SEQ ID NO: 451033 - RNA, 32 nt, Human
ggacagaucuagauguuuguuuaccaagcuau

SEQ ID NO: 451034 - RNA, 32 nt, Human
ggacagaugccuccuuccucuuuuccuuccca

SEQ ID NO: 451035 - RNA, 32 nt, Human
ggacagauggaugucgcacacgccgagacucu

SEQ ID NO: 451036 - RNA, 32 nt, Human
ggacagauggccaggccugugcacacaccagc

SEQ ID NO: 451037 - RNA, 32 nt, Human
ggacagauugagcaaagaaucuuugagcgguc

SEQ ID NO: 451038 - RNA, 32 nt, Human
ggacagauugaggaaauuccuagaucacugag

SEQ ID NO: 451039 - RNA, 32 nt, Human
ggacagcaagaggcacucugucuucacuugaa

SEQ ID NO: 451040 - RNA, 32 nt, Human
ggacagcaaggcccccagcccgugggaaagac

SEQ ID NO: 451041 - RNA, 32 nt, Human
ggacagcaagggacccugagcucugcaagcug

SEQ ID NO: 451042 - RNA, 32 nt, Human
ggacagcacacagaaagguuuucaucaucaag

SEQ ID NO: 451043 - RNA, 32 nt, Human
ggacagcacagcccggggacugcccagccagc

SEQ ID NO: 451044 - RNA, 32 nt, Human
ggacagcaccccgagggccacaggugagggac

SEQ ID NO: 451045 - RNA, 32 nt, Human
ggacagcaccucuucaaccaccuccggcuucc

SEQ ID NO: 451046 - RNA, 32 nt, Human
ggacagcacgcgcgggcugcugugcugccugg

SEQ ID NO: 451047 - RNA, 32 nt, Human
ggacagcacugagcaggccccggagaggaggg

SEQ ID NO: 451048 - RNA, 32 nt, Human
ggacagcacugggugcucaggcuggccaagga

SEQ ID NO: 451049 - RNA, 32 nt, Human
ggacagcagacccuggggguuggcucugaugg

SEQ ID NO: 451050 - RNA, 26 nt, Human
ggacagcagcuuccgcugucuccaca

SEQ ID NO: 451051 - RNA, 19 nt, Human
ggacagcaggauagacagg

SEQ ID NO: 451052 - RNA, 32 nt, Human
ggacagcaggcagaggccgagccugggccaca

SEQ ID NO: 451053 - RNA, 32 nt, Human
ggacagcagggacagcggggaggcaggaaaag

SEQ ID NO: 451054 - RNA, 32 nt, Human
ggacagcaggguggccguggugaaggagaacg

SEQ ID NO: 451055 - RNA, 32 nt, Human
ggacagcauccugggcgagcucaacgggcccc

SEQ ID NO: 451056 - RNA, 32 nt, Human
ggacagcauuugaaggacacauauugcaguug

SEQ ID NO: 451057 - RNA, 19 nt, Human
ggacagccacauccugcug

SEQ ID NO: 451058 - RNA, 32 nt, Human
ggacagccacucacccucucugugcugucucc

SEQ ID NO: 451059 - RNA, 32 nt, Human
ggacagccagcacccccuccccaaagaccggg

SEQ ID NO: 451060 - RNA, 22 nt, Human
ggacagccagggcggcagggag

SEQ ID NO: 451061 - RNA, 25 nt, Human
ggacagccaguaaccucgcagagag

SEQ ID NO: 451062 - RNA, 32 nt, Human
ggacagcccacggucuggaggccgaggaccac

SEQ ID NO: 451063 - RNA, 32 nt, Human
ggacagcccacuguuccaugcugcccaagaag

SEQ ID NO: 451064 - RNA, 32 nt, Human
ggacagcccaggaaacaaggggucugaggaug

SEQ ID NO: 451065 - RNA, 32 nt, Human
ggacagcccaggccauggcaggaagaaucccu

SEQ ID NO: 451066 - RNA, 32 nt, Human
ggacagcccaucgugugaacuauagaguuugu

SEQ ID NO: 451067 - RNA, 32 nt, Human
ggacagcccaucucccuucaagaacccuacgg

SEQ ID NO: 451068 - RNA, 32 nt, Human
ggacagccccucuucucagcagucaccguggc

SEQ ID NO: 451069 - RNA, 32 nt, Human
ggacagccccuucagccccuucuccccucccc

SEQ ID NO: 451070 - RNA, 32 nt, Human
ggacagcccucuguuguuucuaaugccauacu

SEQ ID NO: 451071 - RNA, 16 nt, Human
ggacagccggcugcug

SEQ ID NO: 451072 - RNA, 32 nt, Human
ggacagccguaaucacucugugccucaguuuc

SEQ ID NO: 451073 - RNA, 32 nt, Human
ggacagccuccaggagcacagcggcuucuccu

SEQ ID NO: 451074 - RNA, 32 nt, Human
ggacagccuccucuuuucuagaagucuauuua

SEQ ID NO: 451075 - RNA, 32 nt, Human
ggacagccuggcacagaggcagagucuagagc

SEQ ID NO: 451076 - RNA, 32 nt, Human
ggacagccugggggacuuccugccuaggcaag

SEQ ID NO: 451077 - RNA, 22 nt, Human
ggacagccugugcagggggcug

SEQ ID NO: 451078 - RNA, 32 nt, Human
ggacagcgcauugcgaccuccaccaccccugc

SEQ ID NO: 451079 - RNA, 23 nt, Human
ggacagcgccauccaccugugca

SEQ ID NO: 451080 - RNA, 32 nt, Human
ggacagcggcagcacccccaugcccagggacg

SEQ ID NO: 451081 - RNA, 32 nt, Human
ggacagcguggcaugagccaggagcccgggcc

SEQ ID NO: 451082 - RNA, 32 nt, Human
ggacagcucagcugccaauacauucaacccuu

SEQ ID NO: 451083 - RNA, 32 nt, Human
ggacagcuccagcagcucaggcuccagcccuc

SEQ ID NO: 451084 - RNA, 32 nt, Human
ggacagcucccaucucucccauggcccugaca

SEQ ID NO: 451085 - RNA, 32 nt, Human
ggacagcucgcagucccugagccucugcaggc

SEQ ID NO: 451086 - RNA, 32 nt, Human
ggacagcucugaucccccuccuuccucuccuc

SEQ ID NO: 451087 - RNA, 32 nt, Human
ggacagcucugcccuugaggcccuucagaaau

SEQ ID NO: 451088 - RNA, 32 nt, Human
ggacagcucuggaaggugcucacaggugcacu

SEQ ID NO: 451089 - RNA, 32 nt, Human
ggacagcugaaggcaauaggaggcagauuauc

SEQ ID NO: 451090 - RNA, 18 nt, Human
ggacagcugagugucaua

SEQ ID NO: 451091 - RNA, 32 nt, Human
ggacagcugcagagaagaggccuggaacucgg

SEQ ID NO: 451092 - RNA, 32 nt, Human
ggacagcugcggccagagacccugcuagcccc

SEQ ID NO: 451093 - RNA, 32 nt, Human
ggacagcugcucaugguaggccuucuuggcug

SEQ ID NO: 451094 - RNA, 32 nt, Human
ggacagcugcuuguuacauuuggcucacgcua

SEQ ID NO: 451095 - RNA, 32 nt, Human
ggacagcuggaaggcaagguucagcugggacu

SEQ ID NO: 451096 - RNA, 32 nt, Human
ggacagcugggaacugggggaugcaagugaga

SEQ ID NO: 451097 - RNA, 32 nt, Human
ggacagcuuccuauggggaagacagaggcuuc

SEQ ID NO: 451098 - RNA, 32 nt, Human
ggacagcuuuuccguggaaauucaaggcaucu

SEQ ID NO: 451099 - RNA, 32 nt, Human
ggacaggaaaaguaggaggaggaucuggggca

SEQ ID NO: 451100 - RNA, 32 nt, Human
ggacaggaaagauaggaauguugcuaugagga

SEQ ID NO: 451101 - RNA, 32 nt, Human
ggacaggaagagaccuuauuuccugaugggac

SEQ ID NO: 451102 - RNA, 32 nt, Human
ggacaggaaggaaaggaggauuaggaauauaa

SEQ ID NO: 451103 - RNA, 17 nt, Human
ggacaggaaguggggug

SEQ ID NO: 451104 - RNA, 32 nt, Human
ggacaggacuccaaaggcuuuuggucccagag

SEQ ID NO: 451105 - RNA, 16 nt, Human
ggacaggacugcagca

SEQ ID NO: 451106 - RNA, 32 nt, Human
ggacaggacuuccuuccaucuucuccugcuca

SEQ ID NO: 451107 - RNA, 32 nt, Human
ggacaggagagggaggggugggggacaguggg

SEQ ID NO: 451108 - RNA, 16 nt, Human
ggacaggagaucagca

SEQ ID NO: 451109 - RNA, 32 nt, Human
ggacaggagcccagaagagacacugaggacaa

SEQ ID NO: 451110 - RNA, 32 nt, Human
ggacaggagcgcgggaucgaaggguggacucc

SEQ ID NO: 451111 - RNA, 32 nt, Human
ggacaggaggaaagugaggacaggugggguac

SEQ ID NO: 451112 - RNA, 32 nt, Human
ggacaggagggaaugcagggaggaaggaaaga

SEQ ID NO: 451113 - RNA, 20 nt, Human
ggacaggaucccggcggcag

SEQ ID NO: 451114 - RNA, 32 nt, Human
ggacaggaugacagacagggacgaagcagaga

SEQ ID NO: 451115 - RNA, 32 nt, Human
ggacaggaugcaggucagggagagggaaggca

SEQ ID NO: 451116 - RNA, 32 nt, Human
ggacaggauggcugugugugguggucaccagg

SEQ ID NO: 451117 - RNA, 32 nt, Human
ggacaggcacacacaugcagauaugcugccug

SEQ ID NO: 451118 - RNA, 32 nt, Human
ggacaggcacagcagaggugagagugggagga

SEQ ID NO: 451119 - RNA, 32 nt, Human
ggacaggcacagcuacuuacgcgaacacagca

SEQ ID NO: 451120 - RNA, 32 nt, Human
ggacaggcacuggccucagaccggggccacac

SEQ ID NO: 451121 - RNA, 32 nt, Human
ggacaggccacagcugucaugccaccucccag

SEQ ID NO: 451122 - RNA, 32 nt, Human
ggacaggccacuugcuugcuguguggcauugg

SEQ ID NO: 451123 - RNA, 26 nt, Human
ggacaggccagagaggaggccagcag

SEQ ID NO: 451124 - RNA, 32 nt, Human
ggacaggccaggccugaucccaccucacuucc

SEQ ID NO: 451125 - RNA, 32 nt, Human
ggacaggcccucagccccuccugccccaucca

SEQ ID NO: 451126 - RNA, 32 nt, Human
ggacaggcccuggcacuuggcaggugcuuggu

SEQ ID NO: 451127 - RNA, 32 nt, Human
ggacaggccugaugccugcagugguuuagggc

SEQ ID NO: 451128 - RNA, 32 nt, Human
ggacaggcgcaggggaggcugccugaagggca

SEQ ID NO: 451129 - RNA, 22 nt, Human
ggacaggcggcggcggaggcgg

SEQ ID NO: 451130 - RNA, 32 nt, Human
ggacaggcggugagcucaguggauugcagugg

SEQ ID NO: 451131 - RNA, 18 nt, Human
ggacaggcgucuagguga

SEQ ID NO: 451132 - RNA, 32 nt, Human
ggacaggcucaaucuuucuggcccaaacucag

SEQ ID NO: 451133 - RNA, 32 nt, Human
ggacaggcucacaccugugaccacugugucag

SEQ ID NO: 451134 - RNA, 32 nt, Human
ggacaggcuccuccucucccuccagaagccag

SEQ ID NO: 451135 - RNA, 19 nt, Human
ggacaggcugaaaauagca

SEQ ID NO: 451136 - RNA, 22 nt, Human
ggacaggcuggcuggcuggcug

SEQ ID NO: 451137 - RNA, 32 nt, Human
ggacaggcuuucacuuucacucccaugaggag

SEQ ID NO: 451138 - RNA, 32 nt, Human
ggacagggaagguggaggaguggauagaacuu

SEQ ID NO: 451139 - RNA, 32 nt, Human
ggacagggaccugggagccgagcgaauagcau

SEQ ID NO: 451140 - RNA, 32 nt, Human
ggacagggaggagagcggcuguggagaaacuu

SEQ ID NO: 451141 - RNA, 32 nt, Human
ggacagggaguugccuucucucugccugguug

SEQ ID NO: 451142 - RNA, 32 nt, Human
ggacagggcaugugcugacuccacacugaauc

SEQ ID NO: 451143 - RNA, 32 nt, Human
ggacagggccagauuucauguugacccugggg

SEQ ID NO: 451144 - RNA, 32 nt, Human
ggacagggcccagcagcaucucagccuccuac

SEQ ID NO: 451145 - RNA, 32 nt, Human
ggacagggcccccacaggggaugguuucacga

SEQ ID NO: 451146 - RNA, 32 nt, Human
ggacagggcccugucuccucagcuucaggcac

SEQ ID NO: 451147 - RNA, 32 nt, Human
ggacagggcgcagagccgggaggcaggccgca

SEQ ID NO: 451148 - RNA, 32 nt, Human
ggacagggcuguagcugugaggucuugucucc

SEQ ID NO: 451149 - RNA, 32 nt, Human
ggacagggcuuggugggcacucggaagccagu

SEQ ID NO: 451150 - RNA, 32 nt, Human
ggacaggggucugaaguacacuggaauuuacu

SEQ ID NO: 451151 - RNA, 32 nt, Human
ggacagggucaccaccuuucucucccuucuuc

SEQ ID NO: 451152 - RNA, 32 nt, Human
ggacaggguggagaggaggagaacccugaagg

SEQ ID NO: 451153 - RNA, 23 nt, Human
ggacaggguggcugacuggcaga

SEQ ID NO: 451154 - RNA, 32 nt, Human
ggacagguaggaaggaaggaaaggaggaaagg

SEQ ID NO: 451155 - RNA, 32 nt, Human
ggacaggucaggaaggagagaucugacugagc

SEQ ID NO: 451156 - RNA, 32 nt, Human
ggacagguccugggugagggugggagauuuag

SEQ ID NO: 451157 - RNA, 32 nt, Human
ggacaggucucgagucacugcuacaguuucag

SEQ ID NO: 451158 - RNA, 32 nt, Human
ggacaggucugcgcugcagugggaucuggcug

SEQ ID NO: 451159 - RNA, 18 nt, Human
ggacaggugacugggagg

SEQ ID NO: 451160 - RNA, 32 nt, Human
ggacaggugaucuggggaaaacgcagcuacac

SEQ ID NO: 451161 - RNA, 19 nt, Human
ggacaggugaugccagcag

SEQ ID NO: 451162 - RNA, 32 nt, Human
ggacaggugcagccuggcaugggggagcgugg

SEQ ID NO: 451163 - RNA, 21 nt, Human
ggacaggugccaggcuggcug

SEQ ID NO: 451164 - RNA, 32 nt, Human
ggacagguggauugaugagacuccuccagugg

SEQ ID NO: 451165 - RNA, 22 nt, Human
ggacagguggcagcaggucggc

SEQ ID NO: 451166 - RNA, 18 nt, Human
ggacagguggccugggca

SEQ ID NO: 451167 - RNA, 31 nt, Human
ggacaggugucucuugagccuguguuccaag

SEQ ID NO: 451168 - RNA, 32 nt, Human
ggacaggugucucuugagccuguguuccaaga

SEQ ID NO: 451169 - RNA, 32 nt, Human
ggacagguugcaugaguuggggugccgucagu

SEQ ID NO: 451170 - RNA, 32 nt, Human
ggacaguaaaaccuagaguuggaguuggaucu

SEQ ID NO: 451171 - RNA, 32 nt, Human
ggacaguaacccugccacacacugccugaaau

SEQ ID NO: 451172 - RNA, 32 nt, Human
ggacaguacucugcucucaccucucugcuucu

SEQ ID NO: 451173 - RNA, 32 nt, Human
ggacaguagcuggcacagaggggcuacuaaac

SEQ ID NO: 451174 - RNA, 32 nt, Human
ggacagucacugcaaucucuuuaccaccuccc

SEQ ID NO: 451175 - RNA, 32 nt, Human
ggacagucagcuuuguuucucccuucaucugc

SEQ ID NO: 451176 - RNA, 32 nt, Human
ggacagucaguuccucacuggaguccucuguu

SEQ ID NO: 451177 - RNA, 21 nt, Human
ggacagucccucucuguggag

SEQ ID NO: 451178 - RNA, 32 nt, Human
ggacagugaaguuuaacacaacugaacucuaa

SEQ ID NO: 451179 - RNA, 32 nt, Human
ggacagugccaaccuccuccuggggaucccau

SEQ ID NO: 451180 - RNA, 32 nt, Human
ggacagugcccgguccccuugagggccaucac

SEQ ID NO: 451181 - RNA, 32 nt, Human
ggacagugcugcugcccccggcgggccuuccu

SEQ ID NO: 451182 - RNA, 18 nt, Human
ggacaguggaaaggcagg

SEQ ID NO: 451183 - RNA, 20 nt, Human
ggacaguggaaccucagaga

SEQ ID NO: 451184 - RNA, 32 nt, Human
ggacaguggaucaccugaggucagggguucga

SEQ ID NO: 451185 - RNA, 32 nt, Human
ggacaguggggccuguccuuguucauccacuc

SEQ ID NO: 451186 - RNA, 23 nt, Human
ggacagugggggcucucuuacca

SEQ ID NO: 451187 - RNA, 32 nt, Human
ggacagugggucaggcaggacaaggagaaagc

SEQ ID NO: 451188 - RNA, 17 nt, Human
ggacaguggguggagug

SEQ ID NO: 451189 - RNA, 32 nt, Human
ggacagugguauggccuuggccccagaccacu

SEQ ID NO: 451190 - RNA, 32 nt, Human
ggacagugucaguucccagagguccugggaca

SEQ ID NO: 451191 - RNA, 32 nt, Human
ggacagugugccaccugcugucugagaggcag

SEQ ID NO: 451192 - RNA, 32 nt, Human
ggacagugugcuggucacccuggugcagggcc

SEQ ID NO: 451193 - RNA, 32 nt, Human
ggacaguugaggcaacucguagauggagauuu

SEQ ID NO: 451194 - RNA, 32 nt, Human
ggacaguugauuccugggguccacacuccugg

SEQ ID NO: 451195 - RNA, 32 nt, Human
ggacaguugggacuucaugccugauuagcuga

SEQ ID NO: 451196 - RNA, 32 nt, Human
ggacaguugguguuuggccgugccgcugucua

SEQ ID NO: 451197 - RNA, 32 nt, Human
ggacauacaauauuucugucuccagucuacca

SEQ ID NO: 451198 - RNA, 32 nt, Human
ggacauacauaaggagagaagguacagugaug

SEQ ID NO: 451199 - RNA, 22 nt, Human
ggacauaccaucuuguccugcu

SEQ ID NO: 451200 - RNA, 20 nt, Human
ggacauaccugaaggcuggu

SEQ ID NO: 451201 - RNA, 32 nt, Human
ggacauacugccuggcagccugccuuccuagg

SEQ ID NO: 451202 - RNA, 32 nt, Human
ggacauagaggguggacaguucaggccugugu

SEQ ID NO: 451203 - RNA, 24 nt, Human
ggacauaggcaagccuugaucaua

SEQ ID NO: 451204 - RNA, 32 nt, Human
ggacauagggcugagaguagccaugggcucug

SEQ ID NO: 451205 - RNA, 32 nt, Human
ggacauaucacagccucugcccccggcuguga

SEQ ID NO: 451206 - RNA, 32 nt, Human
ggacauaucuuuguggcuacuguggcugcgcu

SEQ ID NO: 451207 - RNA, 32 nt, Human
ggacaucaaaaacaaccugaaagaggcgauug

SEQ ID NO: 451208 - RNA, 32 nt, Human
ggacaucaaacaucucacagacugccuggaag

SEQ ID NO: 451209 - RNA, 32 nt, Human
ggacaucaaauuuccagggacuacguucggag

SEQ ID NO: 451210 - RNA, 32 nt, Human
ggacaucaacauaggaauuuggggagcacaua

SEQ ID NO: 451211 - RNA, 31 nt, Human
ggacaucacagcuucaggccugaagagcaga

SEQ ID NO: 451212 - RNA, 32 nt, Human
ggacaucacagcuucaggccugaagagcagag

SEQ ID NO: 451213 - RNA, 32 nt, Human
ggacaucaccuuuucgcuuuuuccaagauggc

SEQ ID NO: 451214 - RNA, 32 nt, Human
ggacaucagaacuuauuccucuugucaaacug

SEQ ID NO: 451215 - RNA, 24 nt, Human
ggacaucagugucuucucugugag

SEQ ID NO: 451216 - RNA, 32 nt, Human
ggacauccaggugcccuucauccaagcuccua

SEQ ID NO: 451217 - RNA, 32 nt, Human
ggacaucccgcugaagccacgcuccuuccagc

SEQ ID NO: 451218 - RNA, 32 nt, Human
ggacauccgaaagcuacaccacagaugccagu

SEQ ID NO: 451219 - RNA, 32 nt, Human
ggacauccgggagguguaucagccuggcucag

SEQ ID NO: 451220 - RNA, 32 nt, Human
ggacauccugugcaugaugccuagagagucug

SEQ ID NO: 451221 - RNA, 32 nt, Human
ggacaucgcgccacugcacuccagccugggcg

SEQ ID NO: 451222 - RNA, 32 nt, Human
ggacaucgggcaggacugacacugugucuugu

SEQ ID NO: 451223 - RNA, 32 nt, Human
ggacaucgggggcaaguuugcaguggggccgg

SEQ ID NO: 451224 - RNA, 32 nt, Human
ggacaucgucaggcuggcccaggaccaggagg

SEQ ID NO: 451225 - RNA, 25 nt, Human
ggacaucucagaaaagaagaggcag

SEQ ID NO: 451226 - RNA, 32 nt, Human
ggacaucucaggucuucagggucuuccaucug

SEQ ID NO: 451227 - RNA, 32 nt, Human
ggacaucuccuuggggcuggucaguugcaucc

SEQ ID NO: 451228 - RNA, 23 nt, Human
ggacaucucuaguguagcugcca

SEQ ID NO: 451229 - RNA, 32 nt, Human
ggacaucugaguaccuaucucacacacugacc

SEQ ID NO: 451230 - RNA, 32 nt, Human
ggacaucuggccuuaagccucuguugaacagg

SEQ ID NO: 451231 - RNA, 32 nt, Human
ggacaucugggcucugggcugcaucauguaca

SEQ ID NO: 451232 - RNA, 32 nt, Human
ggacaucugguugcuuuggccugcugcccucu

SEQ ID NO: 451233 - RNA, 17 nt, Human
ggacaucuguaauccca

SEQ ID NO: 451234 - RNA, 20 nt, Human
ggacaucuguaaucccagcu

SEQ ID NO: 451235 - RNA, 32 nt, Human
ggacaucuguaaucccagcuacucaggaggcu

SEQ ID NO: 451236 - RNA, 21 nt, Human
ggacaucuucccacaucuaca

SEQ ID NO: 451237 - RNA, 32 nt, Human
ggacaucuuuuucucaccuucauucucaguga

SEQ ID NO: 451238 - RNA, 23 nt, Human
ggacaugaaauuuacaaagggcc

SEQ ID NO: 451239 - RNA, 32 nt, Human
ggacaugaagugaaaagcgggaagagcuucuu

SEQ ID NO: 451240 - RNA, 32 nt, Human
ggacaugaaguuaaccacagucgggaaacaag

SEQ ID NO: 451241 - RNA, 32 nt, Human
ggacaugacacacagccuaccuggugugacac

SEQ ID NO: 451242 - RNA, 32 nt, Human
ggacaugacagugacgggccugcucuggggcu

SEQ ID NO: 451243 - RNA, 18 nt, Human
ggacaugacuucaggugg

SEQ ID NO: 451244 - RNA, 29 nt, Human
ggacaugagaagcauuggcaucaggguaa

SEQ ID NO: 451245 - RNA, 32 nt, Human
ggacaugagacaccacauuccauuugugcuag

SEQ ID NO: 451246 - RNA, 32 nt, Human
ggacaugcacacacaaguaacauugagcugca

SEQ ID NO: 451247 - RNA, 32 nt, Human
ggacaugcacacacacucacaugcucucacuc

SEQ ID NO: 451248 - RNA, 32 nt, Human
ggacaugcacacacgugcagauaugcuguccg

SEQ ID NO: 451249 - RNA, 29 nt, Human
ggacaugcacggacacagccgcaacggcc

SEQ ID NO: 451250 - RNA, 32 nt, Human
ggacaugcagauuaguagaacuuucaaguaaa

SEQ ID NO: 451251 - RNA, 18 nt, Human
ggacaugcagccccuccu

SEQ ID NO: 451252 - RNA, 32 nt, Human
ggacaugcagggcucacaggagacagggcuca

SEQ ID NO: 451253 - RNA, 32 nt, Human
ggacaugccagcuacacuggccuuggcgcccu

SEQ ID NO: 451254 - RNA, 32 nt, Human
ggacaugcccuagggaacagugcucugaaucg

SEQ ID NO: 451255 - RNA, 32 nt, Human
ggacaugccgugguggagaacacaccuguggc

SEQ ID NO: 451256 - RNA, 32 nt, Human
ggacaugcuccugcauacuccuggguguccca

SEQ ID NO: 451257 - RNA, 32 nt, Human
ggacaugcugccugaacauacacacgcacacc

SEQ ID NO: 451258 - RNA, 32 nt, Human
ggacaugcuguccucugcuccuggguguacug

SEQ ID NO: 451259 - RNA, 32 nt, Human
ggacauggagaaagcagacaugguggacggua

SEQ ID NO: 451260 - RNA, 32 nt, Human
ggacauggagauuaguagaacuuucaaguaca

SEQ ID NO: 451261 - RNA, 32 nt, Human
ggacauggccaccuuuccccagugucugaggc

SEQ ID NO: 451262 - RNA, 32 nt, Human
ggacauggccuggaccagggaggcaggccucc

SEQ ID NO: 451263 - RNA, 29 nt, Human
ggacauggcuccccacaacccccacacuc

SEQ ID NO: 451264 - RNA, 20 nt, Human
ggacaugggaggggcugcac

SEQ ID NO: 451265 - RNA, 32 nt, Human
ggacaugggcccagagagguuaugugagugac

SEQ ID NO: 451266 - RNA, 32 nt, Human
ggacaugggguaccaccuacacccaacaaguc

SEQ ID NO: 451267 - RNA, 32 nt, Human
ggacaugggugaacggaaguggaagcugugag

SEQ ID NO: 451268 - RNA, 32 nt, Human
ggacauggugggaugggcauguggucccagcu

SEQ ID NO: 451269 - RNA, 21 nt, Human
ggacauggugucccaugccca

SEQ ID NO: 451270 - RNA, 32 nt, Human
ggacaugguucagaaacagcuaaagcagacaa

SEQ ID NO: 451271 - RNA, 32 nt, Human
ggacauguacugccucucaucuagaauuuauu

SEQ ID NO: 451272 - RNA, 32 nt, Human
ggacauguuggcgugcaccuccugaguagcug

SEQ ID NO: 451273 - RNA, 32 nt, Human
ggacauucagugguugcugggguccgcagacu

SEQ ID NO: 451274 - RNA, 32 nt, Human
ggacauucccacccucccccaugcugccaagu

SEQ ID NO: 451275 - RNA, 32 nt, Human
ggacauucuagucccugacucgccagaugcau

SEQ ID NO: 451276 - RNA, 32 nt, Human
ggacauucugagggacccggaggcagggagcc

SEQ ID NO: 451277 - RNA, 32 nt, Human
ggacauucuggaagcauggaaggcguggacuu

SEQ ID NO: 451278 - RNA, 32 nt, Human
ggacauucuuacugugcuaaaaagccacugca

SEQ ID NO: 451279 - RNA, 32 nt, Human
ggacauugcagccgccuaccugcuccagggaa

SEQ ID NO: 451280 - RNA, 32 nt, Human
ggacauugcugccucugccugggcugcagccg

SEQ ID NO: 451281 - RNA, 32 nt, Human
ggacauuggaaagagacagcaugggggaaagg

SEQ ID NO: 451282 - RNA, 32 nt, Human
ggacauugggaagcaguauaagaaaaacuuca

SEQ ID NO: 451283 - RNA, 32 nt, Human
ggacauuguaugcagggagcacuguucacauc

SEQ ID NO: 451284 - RNA, 32 nt, Human
ggacauuguuuugaacuagguggacaugccau

SEQ ID NO: 451285 - RNA, 32 nt, Human
ggacauuuauucaucaugccuaaggaauuuga

SEQ ID NO: 451286 - RNA, 31 nt, Human
ggacauuucaauaaaauuguuuggaaaauaa

SEQ ID NO: 451287 - RNA, 32 nt, Human
ggacauuucuauaaucuauauucuaauuugau

SEQ ID NO: 451288 - RNA, 32 nt, Human
ggaccaaaaaggauggauuucccuggccucuc

SEQ ID NO: 451289 - RNA, 32 nt, Human
ggaccaaaagcaggcggggacaaggacaguaa

SEQ ID NO: 451290 - RNA, 32 nt, Human
ggaccaaaaguuauuuuagcuuccucaauaga

SEQ ID NO: 451291 - RNA, 22 nt, Human
ggaccaaagcuguaccuagagg

SEQ ID NO: 451292 - RNA, 32 nt, Human
ggaccaacauggugaaaccccaucucuacuaa

SEQ ID NO: 451293 - RNA, 32 nt, Human
ggaccaacauggugaaaccccgucucuacuaa

SEQ ID NO: 451294 - RNA, 19 nt, Human
ggaccaaccagacacggga

SEQ ID NO: 451295 - RNA, 32 nt, Human
ggaccaacccuccacugcgaguugaccaauaa

SEQ ID NO: 451296 - RNA, 32 nt, Human
ggaccaaccugcucuguccccaaaggacgccu

SEQ ID NO: 451297 - RNA, 26 nt, Human
ggaccaagaccagccacauccagggg

SEQ ID NO: 451298 - RNA, 21 nt, Human
ggaccaagacuccccuagaga

SEQ ID NO: 451299 - RNA, 32 nt, Human
ggaccaagagacaacacagaagaggcuggacc

SEQ ID NO: 451300 - RNA, 32 nt, Human
ggaccaagaggaaaagagucggagggguagac

SEQ ID NO: 451301 - RNA, 32 nt, Human
ggaccaagauaacaaucucaucuucgcaggau

SEQ ID NO: 451302 - RNA, 24 nt, Human
ggaccaagcacagggcauuuagag

SEQ ID NO: 451303 - RNA, 21 nt, Human
ggaccaagcaggagcuuaaga

SEQ ID NO: 451304 - RNA, 25 nt, Human
ggaccaagccugugucaccuggaga

SEQ ID NO: 451305 - RNA, 21 nt, Human
ggaccaagccuuccucggaga

SEQ ID NO: 451306 - RNA, 32 nt, Human
ggaccaagcuuuguccaagugaagcaggcuuc

SEQ ID NO: 451307 - RNA, 32 nt, Human
ggaccaaggaccgagacacagacauggaagga

SEQ ID NO: 451308 - RNA, 32 nt, Human
ggaccaaggaggcaaugccaggaagcugguga

SEQ ID NO: 451309 - RNA, 22 nt, Human
ggaccaagggaggccagcaggu

SEQ ID NO: 451310 - RNA, 32 nt, Human
ggaccaagggaggccagcagguggacaggggg

SEQ ID NO: 451311 - RNA, 32 nt, Human
ggaccaagguggaucucaguaaggagguagag

SEQ ID NO: 451312 - RNA, 17 nt, Human
ggaccaaucagcauucu

SEQ ID NO: 451313 - RNA, 32 nt, Human
ggaccaaugucacaucgcuucaugggcauggc

SEQ ID NO: 451314 - RNA, 32 nt, Human
ggaccacaagcccaaaaaggacaaaaaugggc

SEQ ID NO: 451315 - RNA, 32 nt, Human
ggaccacaaggcaaucugggguguggacagac

SEQ ID NO: 451316 - RNA, 32 nt, Human
ggaccacacccccgucacucugaccccagcac

SEQ ID NO: 451317 - RNA, 32 nt, Human
ggaccacacugagguuggguuucagaccaaga

SEQ ID NO: 451318 - RNA, 32 nt, Human
ggaccacacugcagccuggcuucuucuaucug

SEQ ID NO: 451319 - RNA, 32 nt, Human
ggaccacagaggaaguggaucgugcggcagag

SEQ ID NO: 451320 - RNA, 32 nt, Human
ggaccacagcaaacaccauucuuuuugccgua

SEQ ID NO: 451321 - RNA, 24 nt, Human
ggaccacagcaucaggagacggga

SEQ ID NO: 451322 - RNA, 22 nt, Human
ggaccacagcugccagggacuu

SEQ ID NO: 451323 - RNA, 32 nt, Human
ggaccacaggcacgugccaccauguugcccag

SEQ ID NO: 451324 - RNA, 32 nt, Human
ggaccacaggcgagugucaccaugcugggcag

SEQ ID NO: 451325 - RNA, 32 nt, Human
ggaccacaggcgcccaccaccacgcccagcua

SEQ ID NO: 451326 - RNA, 32 nt, Human
ggaccacaggcgcccccaccauguccggcuaa

SEQ ID NO: 451327 - RNA, 32 nt, Human
ggaccacaggcgcccgccaccacgcccggcua

SEQ ID NO: 451328 - RNA, 32 nt, Human
ggaccacaggcgugcaccaccaugcauagcua

SEQ ID NO: 451329 - RNA, 32 nt, Human
ggaccacaggcgugcaccaccaugcccaccua

SEQ ID NO: 451330 - RNA, 18 nt, Human
ggaccacaggcucaggca

SEQ ID NO: 451331 - RNA, 19 nt, Human
ggaccacagggccucuucc

SEQ ID NO: 451332 - RNA, 32 nt, Human
ggaccacagguaugcaccaccacgcccagcua

SEQ ID NO: 451333 - RNA, 32 nt, Human
ggaccacaggugccuaccaccaugccaggcua

SEQ ID NO: 451334 - RNA, 32 nt, Human
ggaccacaggugcgugucaccaugcuuggcua

SEQ ID NO: 451335 - RNA, 32 nt, Human
ggaccacaggugugcaccaccacgcccggcua

SEQ ID NO: 451336 - RNA, 32 nt, Human
ggaccacaugccacugccugcaccuuucggca

SEQ ID NO: 451337 - RNA, 21 nt, Human
ggaccacauucaagggugugg

SEQ ID NO: 451338 - RNA, 32 nt, Human
ggaccacauuuugcuuaauguaaaggagccac

SEQ ID NO: 451339 - RNA, 32 nt, Human
ggaccaccaagcucuaggucauccaucucugc

SEQ ID NO: 451340 - RNA, 32 nt, Human
ggaccaccagagaggagagggaaccagauaug

SEQ ID NO: 451341 - RNA, 20 nt, Human
ggaccaccagccccagcaag

SEQ ID NO: 451342 - RNA, 32 nt, Human
ggaccaccagccccagcaagagcacaagagga

SEQ ID NO: 451343 - RNA, 32 nt, Human
ggaccaccagccccaguaagagcacaagagga

SEQ ID NO: 451344 - RNA, 32 nt, Human
ggaccaccauggccaagaaccgcagggacaga

SEQ ID NO: 451345 - RNA, 32 nt, Human
ggaccacccacugcuucuccccaacccugaug

SEQ ID NO: 451346 - RNA, 32 nt, Human
ggaccacccaggcuugaggcagcggcgggaac

SEQ ID NO: 451347 - RNA, 19 nt, Human
ggaccaccccucccuucca

SEQ ID NO: 451348 - RNA, 24 nt, Human
ggaccaccgccguccccaccgcca

SEQ ID NO: 451349 - RNA, 18 nt, Human
ggaccaccgugcuggcug

SEQ ID NO: 451350 - RNA, 32 nt, Human
ggaccaccuccaggggcuaagugauggaucuu

SEQ ID NO: 451351 - RNA, 17 nt, Human
ggaccaccuccucugcc

SEQ ID NO: 451352 - RNA, 32 nt, Human
ggaccaccugcagggcugccuguuuauugaca

SEQ ID NO: 451353 - RNA, 19 nt, Human
ggaccacgucuuccugagg

SEQ ID NO: 451354 - RNA, 32 nt, Human
ggaccacuaagcuggggacaggaaccaagucc

SEQ ID NO: 451355 - RNA, 24 nt, Human
ggaccacuaaggaagcccagcaaa

SEQ ID NO: 451356 - RNA, 32 nt, Human
ggaccacuaccugcagcuaagcagugagcaga

SEQ ID NO: 451357 - RNA, 32 nt, Human
ggaccacuauacuccagccuggcaacagagca

SEQ ID NO: 451358 - RNA, 32 nt, Human
ggaccacucagggcaucagggggcguggucug

SEQ ID NO: 451359 - RNA, 32 nt, Human
ggaccacuccauccucuccacagcauccccuc

SEQ ID NO: 451360 - RNA, 21 nt, Human
ggaccacucggauggcacuca

SEQ ID NO: 451361 - RNA, 32 nt, Human
ggaccacugaggaccacaucacugcagaccca

SEQ ID NO: 451362 - RNA, 32 nt, Human
ggaccacugcucuccagccugggcaacagagu

SEQ ID NO: 451363 - RNA, 32 nt, Human
ggaccacugggagcacaaugcccacaucaucu

SEQ ID NO: 451364 - RNA, 32 nt, Human
ggaccacugugugcagcaccucccagacggcu

SEQ ID NO: 451365 - RNA, 32 nt, Human
ggaccagaaacaccucccuucuccaacaaaag

SEQ ID NO: 451366 - RNA, 20 nt, Human
ggaccagaaccauccauuga

SEQ ID NO: 451367 - RNA, 21 nt, Human
ggaccagaaccccugccucca

SEQ ID NO: 451368 - RNA, 32 nt, Human
ggaccagaccaaguagaggccuuggugcuggu

SEQ ID NO: 451369 - RNA, 20 nt, Human
ggaccagacccccaucccca

SEQ ID NO: 451370 - RNA, 32 nt, Human
ggaccagacccccauccccaccccuccugguc

SEQ ID NO: 451371 - RNA, 32 nt, Human
ggaccagaccuggccaaggucagccagcgggg

SEQ ID NO: 451372 - RNA, 32 nt, Human
ggaccagacuggcgugggugagcuccacaccc

SEQ ID NO: 451373 - RNA, 32 nt, Human
ggaccagagagaggagaaagcggagacaggua

SEQ ID NO: 451374 - RNA, 32 nt, Human
ggaccagaggagagagagcaccgagaggggca

SEQ ID NO: 451375 - RNA, 32 nt, Human
ggaccagaggagcagaccagcacuucaaccua

SEQ ID NO: 451376 - RNA, 32 nt, Human
ggaccagaucucccccucuccccacuacuuca

SEQ ID NO: 451377 - RNA, 32 nt, Human
ggaccagaucuggguguugugccugcuuucga

SEQ ID NO: 451378 - RNA, 32 nt, Human
ggaccagaugaggaucugaaauggcagccuuu

SEQ ID NO: 451379 - RNA, 32 nt, Human
ggaccagcacuggacgaagacaaggaucccac

SEQ ID NO: 451380 - RNA, 32 nt, Human
ggaccagcacuggaggaagacaaggaucccac

SEQ ID NO: 451381 - RNA, 32 nt, Human
ggaccagcagagggcacucucacccacgggga

SEQ ID NO: 451382 - RNA, 32 nt, Human
ggaccagcagcaaacaaaacguuuggucuucu

SEQ ID NO: 451383 - RNA, 32 nt, Human
ggaccagcaggcacagcaccuccagaacagug

SEQ ID NO: 451384 - RNA, 32 nt, Human
ggaccagccagaccagcagagcagggagccac

SEQ ID NO: 451385 - RNA, 32 nt, Human
ggaccagccagccagcaaggacccagucggcc

SEQ ID NO: 451386 - RNA, 32 nt, Human
ggaccagccagcgcuccucaggagucucacug

SEQ ID NO: 451387 - RNA, 32 nt, Human
ggaccagcccagccugcauacuugccacuugg

SEQ ID NO: 451388 - RNA, 32 nt, Human
ggaccagcccagguggggcaggcagaaaacuc

SEQ ID NO: 451389 - RNA, 32 nt, Human
ggaccagccccuaguguggguugugggggcgg

SEQ ID NO: 451390 - RNA, 32 nt, Human
ggaccagcccucucgguuugggaauaaggcau

SEQ ID NO: 451391 - RNA, 32 nt, Human
ggaccagccugaccaacauggugaaaccccgu

SEQ ID NO: 451392 - RNA, 32 nt, Human
ggaccagccugaccaacauggugaaauauaca

SEQ ID NO: 451393 - RNA, 32 nt, Human
ggaccagccugaccagcguggagaaacucugu

SEQ ID NO: 451394 - RNA, 32 nt, Human
ggaccagcgucuccccuucaaccgccuggccc

SEQ ID NO: 451395 - RNA, 18 nt, Human
ggaccagcgugcugcugc

SEQ ID NO: 451396 - RNA, 32 nt, Human
ggaccagcuccaccuccagccaccccaggucu

SEQ ID NO: 451397 - RNA, 18 nt, Human
ggaccagcugagacuaag

SEQ ID NO: 451398 - RNA, 21 nt, Human
ggaccagcugagacuaagaag

SEQ ID NO: 451399 - RNA, 22 nt, Human
ggaccagcugcagggucaggca

SEQ ID NO: 451400 - RNA, 21 nt, Human
ggaccagcuuccccaccuuca

SEQ ID NO: 451401 - RNA, 32 nt, Human
ggaccaggaaauucaaaucccucucaugauac

SEQ ID NO: 451402 - RNA, 24 nt, Human
ggaccaggaaguagagcagcaggu

SEQ ID NO: 451403 - RNA, 26 nt, Human
ggaccaggacaucggcuacuucgagg

SEQ ID NO: 451404 - RNA, 24 nt, Human
ggaccaggagaaaggggggcggug

SEQ ID NO: 451405 - RNA, 32 nt, Human
ggaccaggagaagagcaaagaaaagcagcccg

SEQ ID NO: 451406 - RNA, 32 nt, Human
ggaccaggagaggaucaaugcuuacauugaag

SEQ ID NO: 451407 - RNA, 32 nt, Human
ggaccaggaggaggaggaggaggaggaggaga

SEQ ID NO: 451408 - RNA, 32 nt, Human
ggaccaggagugcagggcaccugcugaggacu

SEQ ID NO: 451409 - RNA, 24 nt, Human
ggaccaggauuuucuacccagaga

SEQ ID NO: 451410 - RNA, 24 nt, Human
ggaccaggcaaaaaccacccaaga

SEQ ID NO: 451411 - RNA, 24 nt, Human
ggaccaggcacgcggcccaugggg

SEQ ID NO: 451412 - RNA, 25 nt, Human
ggaccaggcacuaggcaaccagggg

SEQ ID NO: 451413 - RNA, 24 nt, Human
ggaccaggcagaaaccacccaaga

SEQ ID NO: 451414 - RNA, 32 nt, Human
ggaccaggcagcugaccaggguggcagguguu

SEQ ID NO: 451415 - RNA, 23 nt, Human
ggaccaggcaguggcugcagagg

SEQ ID NO: 451416 - RNA, 26 nt, Human
ggaccaggcauuuagcuaguuagaga

SEQ ID NO: 451417 - RNA, 22 nt, Human
ggaccaggccuggagggcacuu

SEQ ID NO: 451418 - RNA, 23 nt, Human
ggaccaggccuggugcccagugg

SEQ ID NO: 451419 - RNA, 24 nt, Human
ggaccaggcucagccgcccagugg

SEQ ID NO: 451420 - RNA, 32 nt, Human
ggaccagggaccaggccagggugcgggcaggc

SEQ ID NO: 451421 - RNA, 32 nt, Human
ggaccagggaggacaggaugcugggcagggga

SEQ ID NO: 451422 - RNA, 32 nt, Human
ggaccagggaggacgcgcggugcgggagcaga

SEQ ID NO: 451423 - RNA, 32 nt, Human
ggaccagggaggugcaggugucugcaguguca

SEQ ID NO: 451424 - RNA, 25 nt, Human
ggaccagggcaccacucucuaggga

SEQ ID NO: 451425 - RNA, 32 nt, Human
ggaccagggcuggcagauguugucuaccugcu

SEQ ID NO: 451426 - RNA, 32 nt, Human
ggaccaggggaucaugucuccagguaacccga

SEQ ID NO: 451427 - RNA, 32 nt, Human
ggaccagggugaggacccgccggaugacagcc

SEQ ID NO: 451428 - RNA, 17 nt, Human
ggaccaggucucagaga

SEQ ID NO: 451429 - RNA, 32 nt, Human
ggaccagguggaggcggcggcggcagaggagu

SEQ ID NO: 451430 - RNA, 32 nt, Human
ggaccaggugggaacaaaggaggcucagagag

SEQ ID NO: 451431 - RNA, 21 nt, Human
ggaccaggugguggccagaga

SEQ ID NO: 451432 - RNA, 21 nt, Human
ggaccaggugucgcgcagaga

SEQ ID NO: 451433 - RNA, 32 nt, Human
ggaccaguacaaacucauggccaaucagcucc

SEQ ID NO: 451434 - RNA, 32 nt, Human
ggaccaguaggacucaagguggacgugcguuc

SEQ ID NO: 451435 - RNA, 32 nt, Human
ggaccaguaggugcccuuccagccugaagauc

SEQ ID NO: 451436 - RNA, 32 nt, Human
ggaccagugaaccaaggacugucagaucgcca

SEQ ID NO: 451437 - RNA, 32 nt, Human
ggaccagugacagcccuucaguuuccucacug

SEQ ID NO: 451438 - RNA, 32 nt, Human
ggaccagugcagccgccgccucccaggaucgu

SEQ ID NO: 451439 - RNA, 25 nt, Human
ggaccagugcgccccaucccaggga

SEQ ID NO: 451440 - RNA, 32 nt, Human
ggaccagugcucuucaggaauguggcugcaag

SEQ ID NO: 451441 - RNA, 32 nt, Human
ggaccagugucuucugucucagggcuuauuau

SEQ ID NO: 451442 - RNA, 32 nt, Human
ggaccaguucaguucuggucagcuagagggcc

SEQ ID NO: 451443 - RNA, 32 nt, Human
ggaccaguugcucgauaccauccggagccuga

SEQ ID NO: 451444 - RNA, 32 nt, Human
ggaccauacaggcuguauauuuugguggauuc

SEQ ID NO: 451445 - RNA, 32 nt, Human
ggaccauaggcgugcaccaccauacucagcua

SEQ ID NO: 451446 - RNA, 32 nt, Human
ggaccaucagccaggccccggggagggagcca

SEQ ID NO: 451447 - RNA, 20 nt, Human
ggaccaucauccccacucca

SEQ ID NO: 451448 - RNA, 32 nt, Human
ggaccaucucuguccccuccacccucacucca

SEQ ID NO: 451449 - RNA, 32 nt, Human
ggaccaucugggauuucuacagccuggguacc

SEQ ID NO: 451450 - RNA, 32 nt, Human
ggaccaucugucccuguccacccuucacagcu

SEQ ID NO: 451451 - RNA, 19 nt, Human
ggaccaugaccugcuggug

SEQ ID NO: 451452 - RNA, 30 nt, Human
ggaccaugagggcgcuggaggggccaggcc

SEQ ID NO: 451453 - RNA, 30 nt, Human
ggaccaugcagcuagagaucaaaguggccc

SEQ ID NO: 451454 - RNA, 32 nt, Human
ggaccaugccagauucugccucucuggaaaga

SEQ ID NO: 451455 - RNA, 32 nt, Human
ggaccauggcagagaaaagcaggagaggagca

SEQ ID NO: 451456 - RNA, 32 nt, Human
ggaccaugggaagucagucucuugcguguccu

SEQ ID NO: 451457 - RNA, 30 nt, Human
ggaccaugucggcggcgggagcgggcgcgg

SEQ ID NO: 451458 - RNA, 21 nt, Human
ggaccauucaccugucugcug

SEQ ID NO: 451459 - RNA, 32 nt, Human
ggaccauuccaucuuauauguaaagaaaucug

SEQ ID NO: 451460 - RNA, 32 nt, Human
ggaccauugcagcauccuccccuccucggacu

SEQ ID NO: 451461 - RNA, 32 nt, Human
ggacccaaacaaugugcuggacgccgagaagg

SEQ ID NO: 451462 - RNA, 18 nt, Human
ggacccaaacucuccuua

SEQ ID NO: 451463 - RNA, 24 nt, Human
ggacccaaccccuagaucccacca

SEQ ID NO: 451464 - RNA, 23 nt, Human
ggacccaaccgccgccuacccca

SEQ ID NO: 451465 - RNA, 24 nt, Human
ggacccaacuccuggaccuuucca

SEQ ID NO: 451466 - RNA, 24 nt, Human
ggacccaagacucugaaccuucca

SEQ ID NO: 451467 - RNA, 32 nt, Human
ggacccaagaggagcaggcagggacgggggca

SEQ ID NO: 451468 - RNA, 23 nt, Human
ggacccaagcgauccuccugucu

SEQ ID NO: 451469 - RNA, 32 nt, Human
ggacccaaggaguggggauacagugagaauua

SEQ ID NO: 451470 - RNA, 32 nt, Human
ggacccaaggcaggcuguuccuuggggcgguc

SEQ ID NO: 451471 - RNA, 32 nt, Human
ggacccaaggccacuuucaacucuuauggggu

SEQ ID NO: 451472 - RNA, 32 nt, Human
ggacccaauagagagggcaagcugagcaucug

SEQ ID NO: 451473 - RNA, 32 nt, Human
ggacccacacuggguugaggccagugucuccu

SEQ ID NO: 451474 - RNA, 32 nt, Human
ggacccacagaaacagccugacagcagcuggu

SEQ ID NO: 451475 - RNA, 32 nt, Human
ggacccacagaauuacagggaaguuacaggga

SEQ ID NO: 451476 - RNA, 32 nt, Human
ggacccaccagcugcacgggcugcugcugcgc

SEQ ID NO: 451477 - RNA, 32 nt, Human
ggacccacccaccacagcccaucacccuccau

SEQ ID NO: 451478 - RNA, 32 nt, Human
ggacccaccugggugcaguugccuucagggac

SEQ ID NO: 451479 - RNA, 32 nt, Human
ggacccacgccacggccaggagcccagagcag

SEQ ID NO: 451480 - RNA, 32 nt, Human
ggacccacucaucugcugcuucuucgugcgcc

SEQ ID NO: 451481 - RNA, 19 nt, Human
ggacccacuggacacaggg

SEQ ID NO: 451482 - RNA, 32 nt, Human
ggacccagaaaaccacacuggcuccaacuucc

SEQ ID NO: 451483 - RNA, 18 nt, Human
ggacccagaacuucucca

SEQ ID NO: 451484 - RNA, 23 nt, Human
ggacccagaagagaagggcacug

SEQ ID NO: 451485 - RNA, 32 nt, Human
ggacccagaagcuuaccagcggugucuuacac

SEQ ID NO: 451486 - RNA, 23 nt, Human
ggacccagacauaggcuuggugg

SEQ ID NO: 451487 - RNA, 20 nt, Human
ggacccagacgcaggacaga

SEQ ID NO: 451488 - RNA, 32 nt, Human
ggacccagagaaccgggccgggcacagcgugg

SEQ ID NO: 451489 - RNA, 32 nt, Human
ggacccagaggggcugccugaccucagggcuc

SEQ ID NO: 451490 - RNA, 23 nt, Human
ggacccagaguccaggcggcugg

SEQ ID NO: 451491 - RNA, 21 nt, Human
ggacccagaugcaagacacug

SEQ ID NO: 451492 - RNA, 32 nt, Human
ggacccagauggggcuuucccuuuguagccau

SEQ ID NO: 451493 - RNA, 25 nt, Human
ggacccagcagccuggauccuucca

SEQ ID NO: 451494 - RNA, 32 nt, Human
ggacccagcagugggcgcuggugacaguggcg

SEQ ID NO: 451495 - RNA, 22 nt, Human
ggacccagcauguaggugccgg

SEQ ID NO: 451496 - RNA, 32 nt, Human
ggacccagcccagcucccguccucuugguggc

SEQ ID NO: 451497 - RNA, 24 nt, Human
ggacccagccccuccucucugaga

SEQ ID NO: 451498 - RNA, 32 nt, Human
ggacccagccgccaucagcccaacggaagcaa

SEQ ID NO: 451499 - RNA, 32 nt, Human
ggacccagcucgagccgccaggacacagacgu

SEQ ID NO: 451500 - RNA, 23 nt, Human
ggacccagcucugcaggcaccca

SEQ ID NO: 451501 - RNA, 19 nt, Human
ggacccagcucuuccugag

SEQ ID NO: 451502 - RNA, 32 nt, Human
ggacccagcugguuuauaacuucagaagaaau

SEQ ID NO: 451503 - RNA, 32 nt, Human
ggacccagcuguagugagguugcagugauuga

SEQ ID NO: 451504 - RNA, 32 nt, Human
ggacccaggaggcagagcuugcagugagccga

SEQ ID NO: 451505 - RNA, 23 nt, Human
ggacccaggagggagggcagcug

SEQ ID NO: 451506 - RNA, 32 nt, Human
ggacccaggauuugaacccagcuucagugugc

SEQ ID NO: 451507 - RNA, 32 nt, Human
ggacccaggcagggcagagcaauaccuuccga

SEQ ID NO: 451508 - RNA, 16 nt, Human
ggacccaggcuggcug

SEQ ID NO: 451509 - RNA, 32 nt, Human
ggacccagggagaggagccagugacacaggca

SEQ ID NO: 451510 - RNA, 22 nt, Human
ggacccagggcaaggugacugg

SEQ ID NO: 451511 - RNA, 32 nt, Human
ggacccaggggagguuuagggguccuaucucc

SEQ ID NO: 451512 - RNA, 32 nt, Human
ggacccaggucugcucccugggaugcuuucuc

SEQ ID NO: 451513 - RNA, 23 nt, Human
ggacccaguauuuccccuccuug

SEQ ID NO: 451514 - RNA, 19 nt, Human
ggacccagugcccucugca

SEQ ID NO: 451515 - RNA, 32 nt, Human
ggacccagugggcaguaauuuaaucauggugg

SEQ ID NO: 451516 - RNA, 21 nt, Human
ggacccagugggucccacagc

SEQ ID NO: 451517 - RNA, 32 nt, Human
ggacccaguucagaaucucgacacaagaauca

SEQ ID NO: 451518 - RNA, 32 nt, Human
ggacccaguucuggcaagauucaucaccuacu

SEQ ID NO: 451519 - RNA, 32 nt, Human
ggacccauccagcugagugaacccaggguggu

SEQ ID NO: 451520 - RNA, 32 nt, Human
ggacccaugaauccugaccacucuugaaccca

SEQ ID NO: 451521 - RNA, 32 nt, Human
ggacccaugugugggcaugauccuguggaaca

SEQ ID NO: 451522 - RNA, 32 nt, Human
ggacccauuuaugaggagguggcuuaugaaag

SEQ ID NO: 451523 - RNA, 32 nt, Human
ggaccccaaaaagaagagagcucagaagcccu

SEQ ID NO: 451524 - RNA, 32 nt, Human
ggaccccaaagcagccccuuggagcugcaggg

SEQ ID NO: 451525 - RNA, 32 nt, Human
ggaccccaaaugguggucguugucccuucugu

SEQ ID NO: 451526 - RNA, 32 nt, Human
ggaccccaaugcccccacagagcaauacacug

SEQ ID NO: 451527 - RNA, 32 nt, Human
ggaccccaccaccacccgcaacacugccgcug

SEQ ID NO: 451528 - RNA, 32 nt, Human
ggaccccaccacugcacuccagccuggaugac

SEQ ID NO: 451529 - RNA, 32 nt, Human
ggaccccagaguccuguucugcugagguuuga

SEQ ID NO: 451530 - RNA, 32 nt, Human
ggaccccagaugggggaggggaugacaaggcu

SEQ ID NO: 451531 - RNA, 30 nt, Human
ggaccccagauucacagggcacaaaugcau

SEQ ID NO: 451532 - RNA, 32 nt, Human
ggaccccagccggcugcuggagcccagaggcc

SEQ ID NO: 451533 - RNA, 32 nt, Human
ggaccccaggaggagaggcuugccgugccucc

SEQ ID NO: 451534 - RNA, 21 nt, Human
ggaccccaggccacucugaga

SEQ ID NO: 451535 - RNA, 32 nt, Human
ggaccccagggagaaacgcucuccccacccac

SEQ ID NO: 451536 - RNA, 32 nt, Human
ggaccccagggugggagggaaggugcgguggg

SEQ ID NO: 451537 - RNA, 32 nt, Human
ggaccccagugaaaugaugugcauaugaaaau

SEQ ID NO: 451538 - RNA, 32 nt, Human
ggaccccaguuuaaaagaguuugaaggagcaa

SEQ ID NO: 451539 - RNA, 32 nt, Human
ggaccccauaaucugcccaucugggacuuggc

SEQ ID NO: 451540 - RNA, 19 nt, Human
ggaccccauccccacccca

SEQ ID NO: 451541 - RNA, 32 nt, Human
ggaccccauggccaugguugagcggccgaggc

SEQ ID NO: 451542 - RNA, 32 nt, Human
ggacccccaaagugcugggauuccagguguga

SEQ ID NO: 451543 - RNA, 32 nt, Human
ggacccccaagagugagugagggggcaaggcu

SEQ ID NO: 451544 - RNA, 32 nt, Human
ggacccccaccaccagccucuugaaguggcuc

SEQ ID NO: 451545 - RNA, 32 nt, Human
ggacccccagaacuaagaagggagggcgagug

SEQ ID NO: 451546 - RNA, 32 nt, Human
ggacccccagaagaggagcggggcacccccga

SEQ ID NO: 451547 - RNA, 21 nt, Human
ggacccccgcaccugcccucu

SEQ ID NO: 451548 - RNA, 18 nt, Human
ggacccccgggcuggcug

SEQ ID NO: 451549 - RNA, 32 nt, Human
ggacccccucauuccugccgcugccgucccug

SEQ ID NO: 451550 - RNA, 32 nt, Human
ggacccccuccccauugucaggcucuccaugu

SEQ ID NO: 451551 - RNA, 21 nt, Human
ggacccccuggcccacccugg

SEQ ID NO: 451552 - RNA, 28 nt, Human
ggacccccuggcccugccucauccacca

SEQ ID NO: 451553 - RNA, 32 nt, Human
ggaccccgagagaagcaggggagcucggcggg

SEQ ID NO: 451554 - RNA, 19 nt, Human
ggaccccgaggaggacugc

SEQ ID NO: 451555 - RNA, 32 nt, Human
ggaccccgcccaggcagggagcugcugugagu

SEQ ID NO: 451556 - RNA, 21 nt, Human
ggaccccgccuggacucccca

SEQ ID NO: 451557 - RNA, 32 nt, Human
ggaccccgcguuccuccucccugccggucccc

SEQ ID NO: 451558 - RNA, 32 nt, Human
ggaccccggagcugggcugggcuguggcccuu

SEQ ID NO: 451559 - RNA, 24 nt, Human
ggaccccggccucucgagggcugg

SEQ ID NO: 451560 - RNA, 32 nt, Human
ggaccccggcgccgucuccgcguggcucugga

SEQ ID NO: 451561 - RNA, 26 nt, Human
ggaccccgggaaccucuccugccgga

SEQ ID NO: 451562 - RNA, 32 nt, Human
ggaccccgggaagggaaggcagccugguuucu

SEQ ID NO: 451563 - RNA, 32 nt, Human
ggaccccguggauauggagcagucgccgccgc

SEQ ID NO: 451564 - RNA, 32 nt, Human
ggaccccuaggagccagguccuacggauaggu

SEQ ID NO: 451565 - RNA, 21 nt, Human
ggaccccucacaaacacacuu

SEQ ID NO: 451566 - RNA, 32 nt, Human
ggaccccuccacccacgcucacaagucaucca

SEQ ID NO: 451567 - RNA, 30 nt, Human
ggaccccuccccuacaugcaccaaugcacg

SEQ ID NO: 451568 - RNA, 32 nt, Human
ggaccccucugccugccccaaccccuuuggag

SEQ ID NO: 451569 - RNA, 32 nt, Human
ggaccccucugccuuccuccccaauccugacu

SEQ ID NO: 451570 - RNA, 32 nt, Human
ggaccccucuucuccaaccacucaggaaaccu

SEQ ID NO: 451571 - RNA, 32 nt, Human
ggaccccucuuucuaggcugaaccuugagucc

SEQ ID NO: 451572 - RNA, 32 nt, Human
ggaccccugcagcugcagacaucugcuucacc

SEQ ID NO: 451573 - RNA, 32 nt, Human
ggaccccugcaguuggcugggcccgcagcacu

SEQ ID NO: 451574 - RNA, 20 nt, Human
ggaccccugcccacuccaca

SEQ ID NO: 451575 - RNA, 32 nt, Human
ggaccccugccuggaggccuccguguccucag

SEQ ID NO: 451576 - RNA, 32 nt, Human
ggaccccugcggcccccugccuagaggagcac

SEQ ID NO: 451577 - RNA, 32 nt, Human
ggaccccugcugauucuuucugcuucuaagac

SEQ ID NO: 451578 - RNA, 32 nt, Human
ggaccccugcugcugcuccugcucagcuccug

SEQ ID NO: 451579 - RNA, 32 nt, Human
ggaccccuggcccacugacuccuggggauggg

SEQ ID NO: 451580 - RNA, 32 nt, Human
ggaccccuggggaccuguacacuagcaggaug

SEQ ID NO: 451581 - RNA, 23 nt, Human
ggaccccugucugcacaccaggg

SEQ ID NO: 451582 - RNA, 32 nt, Human
ggaccccuugaggacaucgccaggcucugugg

SEQ ID NO: 451583 - RNA, 32 nt, Human
ggaccccuuucugcaacccacccaucccuccc

SEQ ID NO: 451584 - RNA, 32 nt, Human
ggacccgacucagcuugagacacuccagccaa

SEQ ID NO: 451585 - RNA, 21 nt, Human
ggacccgacuggcugggcuuc

SEQ ID NO: 451586 - RNA, 32 nt, Human
ggacccgagaagcagagagcgagagggggaag

SEQ ID NO: 451587 - RNA, 32 nt, Human
ggacccgagagagagcgccgccgccaucuuag

SEQ ID NO: 451588 - RNA, 32 nt, Human
ggacccgagggagggaggguggggaagcgagg

SEQ ID NO: 451589 - RNA, 32 nt, Human
ggacccgaggguggaacccacccccugggcuc

SEQ ID NO: 451590 - RNA, 32 nt, Human
ggacccgcagccgccgccgccgccuccucccc

SEQ ID NO: 451591 - RNA, 32 nt, Human
ggacccgcagccgccucgucaccuccaguugg

SEQ ID NO: 451592 - RNA, 17 nt, Human
ggacccgcccccuccuu

SEQ ID NO: 451593 - RNA, 32 nt, Human
ggacccgccugcggucugcaucagccucuggg

SEQ ID NO: 451594 - RNA, 32 nt, Human
ggacccgcucuuucgccaccuuccccagccgc

SEQ ID NO: 451595 - RNA, 23 nt, Human
ggacccggacaggacugauggcc

SEQ ID NO: 451596 - RNA, 21 nt, Human
ggacccggacccaggacccuc

SEQ ID NO: 451597 - RNA, 32 nt, Human
ggacccggaugugaauggcaugcugaaacucg

SEQ ID NO: 451598 - RNA, 21 nt, Human
ggacccggcccaaggaucugg

SEQ ID NO: 451599 - RNA, 32 nt, Human
ggacccggccgccagccucucccuccaccucu

SEQ ID NO: 451600 - RNA, 32 nt, Human
ggacccggcuacgacaaccucuacgugaccuc

SEQ ID NO: 451601 - RNA, 32 nt, Human
ggacccgggaggcagagguugcagugagccga

SEQ ID NO: 451602 - RNA, 32 nt, Human
ggacccgggaggcggagguugcagugagccaa

SEQ ID NO: 451603 - RNA, 32 nt, Human
ggacccgggaggcggagguugcagugagccga

SEQ ID NO: 451604 - RNA, 19 nt, Human
ggacccgggagugggucuc

SEQ ID NO: 451605 - RNA, 23 nt, Human
ggacccggucucccacaggugac

SEQ ID NO: 451606 - RNA, 32 nt, Human
ggacccgugagguuuguguggaccccgaguuc

SEQ ID NO: 451607 - RNA, 32 nt, Human
ggacccuaagaugcgugaggcaggcucucuaa

SEQ ID NO: 451608 - RNA, 32 nt, Human
ggacccuagccacgcugaccuccugccucucc

SEQ ID NO: 451609 - RNA, 32 nt, Human
ggacccuagcugugguaggaaguggcccucag

SEQ ID NO: 451610 - RNA, 32 nt, Human
ggacccuaggagaccugacuggaacuggcucc

SEQ ID NO: 451611 - RNA, 32 nt, Human
ggacccuaggcuuggagcuggagcugggguaa

SEQ ID NO: 451612 - RNA, 32 nt, Human
ggacccucaccaacuuuccccaccucaggcag

SEQ ID NO: 451613 - RNA, 24 nt, Human
ggacccucaccacgaaucucauga

SEQ ID NO: 451614 - RNA, 32 nt, Human
ggacccucacugcugucucugccuccuuucug

SEQ ID NO: 451615 - RNA, 32 nt, Human
ggacccucagcagcucuggcucugccucagga

SEQ ID NO: 451616 - RNA, 24 nt, Human
ggacccucaggccagcagcacccu

SEQ ID NO: 451617 - RNA, 32 nt, Human
ggacccuccugcacaacaucuccaggggaccg

SEQ ID NO: 451618 - RNA, 32 nt, Human
ggacccucgaaaccccagccccuagggaguuu

SEQ ID NO: 451619 - RNA, 32 nt, Human
ggacccucgucuuuaccacgcuccugaggaau

SEQ ID NO: 451620 - RNA, 32 nt, Human
ggacccucgugaaggaugcaagcagcugccca

SEQ ID NO: 451621 - RNA, 32 nt, Human
ggacccucuccaccaugggcccaccagaccaa

SEQ ID NO: 451622 - RNA, 32 nt, Human
ggacccucucccuggcugccucaggcuucucu

SEQ ID NO: 451623 - RNA, 32 nt, Human
ggacccugacaccugccaacagccccucugcc

SEQ ID NO: 451624 - RNA, 32 nt, Human
ggacccugagcaacccccuccugggcuccuuu

SEQ ID NO: 451625 - RNA, 19 nt, Human
ggacccugagcacccccuu

SEQ ID NO: 451626 - RNA, 32 nt, Human
ggacccugagccacagugaguuggucaaaugc

SEQ ID NO: 451627 - RNA, 32 nt, Human
ggacccugcaguccucggccagccuggcuguc

SEQ ID NO: 451628 - RNA, 19 nt, Human
ggacccugcccacaccccu

SEQ ID NO: 451629 - RNA, 20 nt, Human
ggacccugccgagggggcug

SEQ ID NO: 451630 - RNA, 29 nt, Human
ggacccugccuucaaucaucccuccucuu

SEQ ID NO: 451631 - RNA, 32 nt, Human
ggacccugcucacaggcaggcuuuuccuccaa

SEQ ID NO: 451632 - RNA, 32 nt, Human
ggacccugcuucugaaguacaugaaccuugag

SEQ ID NO: 451633 - RNA, 32 nt, Human
ggacccugcuucugagugacggaccagcucac

SEQ ID NO: 451634 - RNA, 20 nt, Human
ggacccuggacuuugccaga

SEQ ID NO: 451635 - RNA, 32 nt, Human
ggacccuggaggggcaagcaugugguuccuuu

SEQ ID NO: 451636 - RNA, 32 nt, Human
ggacccuggagguagaggcugcagugagccaa

SEQ ID NO: 451637 - RNA, 19 nt, Human
ggacccuggcagccucccu

SEQ ID NO: 451638 - RNA, 18 nt, Human
ggacccuggccccuccuu

SEQ ID NO: 451639 - RNA, 32 nt, Human
ggacccuggccgcuucccaccaucuucugcag

SEQ ID NO: 451640 - RNA, 32 nt, Human
ggacccugggcccucaccgcaggcagcaguuu

SEQ ID NO: 451641 - RNA, 32 nt, Human
ggacccuggggaaggcagggagggcagguagc

SEQ ID NO: 451642 - RNA, 32 nt, Human
ggacccugggguggagggugagggauucugug

SEQ ID NO: 451643 - RNA, 32 nt, Human
ggacccuggugcucaucuucucuugucauuca

SEQ ID NO: 451644 - RNA, 18 nt, Human
ggacccugugcccuccuu

SEQ ID NO: 451645 - RNA, 32 nt, Human
ggacccugugugccucauaagggcuauucuuu

SEQ ID NO: 451646 - RNA, 24 nt, Human
ggacccuuaacugccucacccuga

SEQ ID NO: 451647 - RNA, 32 nt, Human
ggacccuucaucuucuccucugccaggggagg

SEQ ID NO: 451648 - RNA, 23 nt, Human
ggacccuuccagaccucacccug

SEQ ID NO: 451649 - RNA, 32 nt, Human
ggacccuuccccuccaggggugcaguggggug

SEQ ID NO: 451650 - RNA, 32 nt, Human
ggacccuugcagggcuuugcagcugcucaucu

SEQ ID NO: 451651 - RNA, 20 nt, Human
ggacccuugcaggucugccc

SEQ ID NO: 451652 - RNA, 32 nt, Human
ggacccuugccucaccccucccccuggccuca

SEQ ID NO: 451653 - RNA, 17 nt, Human
ggacccuuucccuccuu

SEQ ID NO: 451654 - RNA, 18 nt, Human
ggacccuuuucuaugcaa

SEQ ID NO: 451655 - RNA, 32 nt, Human
ggaccgacgcggagaggaagggaagccgcauc

SEQ ID NO: 451656 - RNA, 32 nt, Human
ggaccgagacuguaccuuccagccuucagcgc

SEQ ID NO: 451657 - RNA, 32 nt, Human
ggaccgagagcaucaugggcagcacugucccg

SEQ ID NO: 451658 - RNA, 20 nt, Human
ggaccgagcacguccaggga

SEQ ID NO: 451659 - RNA, 19 nt, Human
ggaccgagccccagcaagg

SEQ ID NO: 451660 - RNA, 24 nt, Human
ggaccgagccccgucucccaggga

SEQ ID NO: 451661 - RNA, 32 nt, Human
ggaccgagcugcuggggaggaccucaguuaac

SEQ ID NO: 451662 - RNA, 32 nt, Human
ggaccgagcugggcuucucuuccucccuacag

SEQ ID NO: 451663 - RNA, 32 nt, Human
ggaccgaggcagcggcggcaccugccggccga

SEQ ID NO: 451664 - RNA, 32 nt, Human
ggaccgaggccaggacucuccuugggguuugg

SEQ ID NO: 451665 - RNA, 21 nt, Human
ggaccgaggggcucccaaggg

SEQ ID NO: 451666 - RNA, 32 nt, Human
ggaccgaugccugcugugccuuccugcugagg

SEQ ID NO: 451667 - RNA, 32 nt, Human
ggaccgcaugcccuaaacacacaauccgugaa

SEQ ID NO: 451668 - RNA, 32 nt, Human
ggaccgccacccccugagaggcucccuucccc

SEQ ID NO: 451669 - RNA, 19 nt, Human
ggaccgccacgccccggag

SEQ ID NO: 451670 - RNA, 20 nt, Human
ggaccgccccccuccugcca

SEQ ID NO: 451671 - RNA, 32 nt, Human
ggaccgcccugggccagccuccggcggggacc

SEQ ID NO: 451672 - RNA, 32 nt, Human
ggaccgccgggccaccaccggccgccucagcc

SEQ ID NO: 451673 - RNA, 32 nt, Human
ggaccgccucggaggcagaagagccgcgagga

SEQ ID NO: 451674 - RNA, 32 nt, Human
ggaccgccugcagcugggcuguaaggagugug

SEQ ID NO: 451675 - RNA, 32 nt, Human
ggaccgcgcagcccggugugugcaguggccuc

SEQ ID NO: 451676 - RNA, 17 nt, Human
ggaccgcgcccccuccu

SEQ ID NO: 451677 - RNA, 22 nt, Human
ggaccgcggagcugaggagcgg

SEQ ID NO: 451678 - RNA, 32 nt, Human
ggaccgcggccucagcgagcaggaagccuggg

SEQ ID NO: 451679 - RNA, 24 nt, Human
ggaccgcggggcggacgggagcga

SEQ ID NO: 451680 - RNA, 32 nt, Human
ggaccgcucggcuuccugcucucgccggaguu

SEQ ID NO: 451681 - RNA, 20 nt, Human
ggaccgcuggacagacgcac

SEQ ID NO: 451682 - RNA, 32 nt, Human
ggaccgcuggcuuauaagcgaucauguuucuc

SEQ ID NO: 451683 - RNA, 32 nt, Human
ggagccuaagacccucccagagcccaggggcu

SEQ ID NO: 451684 - RNA, 32 nt, Human
ggagccuaagacccucccagagcccaggugcu

SEQ ID NO: 451685 - RNA, 32 nt, Human
ggagccuaagucugugguggacagauaauaau

SEQ ID NO: 451686 - RNA, 32 nt, Human
ggagccuacaucuucauaagcuuuuuagcagg

SEQ ID NO: 451687 - RNA, 32 nt, Human
ggagccuaccaccacgucuggcuaauuuuugu

SEQ ID NO: 451688 - RNA, 32 nt, Human
ggagccuaccuuccccuccccuuccccacgcu

SEQ ID NO: 451689 - RNA, 32 nt, Human
ggagccuagagcugcucagcuucggugggggu

SEQ ID NO: 451690 - RNA, 32 nt, Human
ggagccuauccugaauuuuguaaaauauccca

SEQ ID NO: 451691 - RNA, 32 nt, Human
ggagccuauuuguuuguuaucacauugacuuc

SEQ ID NO: 451692 - RNA, 32 nt, Human
ggagccucaaauacuuguguucauuugggaaa

SEQ ID NO: 451693 - RNA, 32 nt, Human
ggagccucacuuccagcccagccugggcccgc

SEQ ID NO: 451694 - RNA, 32 nt, Human
ggagccucagacacacuggaguucagggcugg

SEQ ID NO: 451695 - RNA, 32 nt, Human
ggagccucagggaugggcucaggcugaugguc

SEQ ID NO: 451696 - RNA, 32 nt, Human
ggagccucagucugacauuccacgccggggug

SEQ ID NO: 451697 - RNA, 32 nt, Human
ggagccucauugagacaggggagagagaaaga

SEQ ID NO: 451698 - RNA, 32 nt, Human
ggagccucccuggaguggagcagcccugaagc

SEQ ID NO: 451699 - RNA, 32 nt, Human
ggagccuccgccugcuuccuccagaagacacg

SEQ ID NO: 451700 - RNA, 32 nt, Human
ggagccuccucucucaagcuggggccucccug

SEQ ID NO: 451701 - RNA, 32 nt, Human
ggagccuccugccucaaagugcuccccuaagu

SEQ ID NO: 451702 - RNA, 32 nt, Human
ggagccucgguuggcuccucuggaacagggag

SEQ ID NO: 451703 - RNA, 32 nt, Human
ggagccucuccacuucaugauuuucagcuaac

SEQ ID NO: 451704 - RNA, 17 nt, Human
ggagccucuuccuugcc

SEQ ID NO: 451705 - RNA, 32 nt, Human
ggagccucuugggugucaaacaagcacccugg

SEQ ID NO: 451706 - RNA, 32 nt, Human
ggagccugaagauggcacagcucugugauuca

SEQ ID NO: 451707 - RNA, 32 nt, Human
ggagccugagaacuccuccuccugggacucuc

SEQ ID NO: 451708 - RNA, 19 nt, Human
ggagccugagaagaggcag

SEQ ID NO: 451709 - RNA, 32 nt, Human
ggagccugagagguggaggaguucugaucccc

SEQ ID NO: 451710 - RNA, 32 nt, Human
ggagccugagcagccugaugggcgagcggcgc

SEQ ID NO: 451711 - RNA, 32 nt, Human
ggagccugaggcaggagaauugcuugaacacg

SEQ ID NO: 451712 - RNA, 32 nt, Human
ggagccugaggcaggagaauugcuugaaccca

SEQ ID NO: 451713 - RNA, 32 nt, Human
ggagccugaggcaggaggauugcuugagcuca

SEQ ID NO: 451714 - RNA, 32 nt, Human
ggagccugaggcagggcaauugcuugaacucg

SEQ ID NO: 451715 - RNA, 32 nt, Human
ggagccugaggcaugagaaucacuugaacucg

SEQ ID NO: 451716 - RNA, 32 nt, Human
ggagccugaggcgggagaauugcuugaacccg

SEQ ID NO: 451717 - RNA, 32 nt, Human
ggagccugaggugggaggauugcuugagucug

SEQ ID NO: 451718 - RNA, 32 nt, Human
ggagccugaucaccugcccugcugagucccag

SEQ ID NO: 451719 - RNA, 32 nt, Human
ggagccugcacuccacagacccucuccuugcc

SEQ ID NO: 451720 - RNA, 32 nt, Human
ggagccugcaggaagcugaacuuugaaagauu

SEQ ID NO: 451721 - RNA, 32 nt, Human
ggagccugcaugggcgcacucucucuuucuga

SEQ ID NO: 451722 - RNA, 32 nt, Human
ggagccugccacccucuuccugcccuaccucc

SEQ ID NO: 451723 - RNA, 32 nt, Human
ggagccugcccagcccccuggucuuugagcuc

SEQ ID NO: 451724 - RNA, 32 nt, Human
ggagccugcccugauugccuucaccucauuuc

SEQ ID NO: 451725 - RNA, 32 nt, Human
ggagccugccuggggccugccucugccagaag

SEQ ID NO: 451726 - RNA, 17 nt, Human
ggagccugcgcgccgag

SEQ ID NO: 451727 - RNA, 19 nt, Human
ggagccugcgugugguggg

SEQ ID NO: 451728 - RNA, 32 nt, Human
ggagccugcuaaggaacaaugccgccugucaa

SEQ ID NO: 451729 - RNA, 32 nt, Human
ggagccugcuccagcccgccucccggagccag

SEQ ID NO: 451730 - RNA, 32 nt, Human
ggagccugcuccugaagcugccacugccccac

SEQ ID NO: 451731 - RNA, 32 nt, Human
ggagccugcugguacccuggggguugugggga

SEQ ID NO: 451732 - RNA, 32 nt, Human
ggagccugcuuggagccagcuuccugccccug

SEQ ID NO: 451733 - RNA, 32 nt, Human
ggagccuggaagcagaugagauggggccgcag

SEQ ID NO: 451734 - RNA, 32 nt, Human
ggagccuggagaaagaggcgaccuuccuuggg

SEQ ID NO: 451735 - RNA, 32 nt, Human
ggagccuggagcuguuggucagaugggcagcc

SEQ ID NO: 451736 - RNA, 16 nt, Human
ggagccuggagguggg

SEQ ID NO: 451737 - RNA, 21 nt, Human
ggagccuggccgcggaccccu

SEQ ID NO: 451738 - RNA, 32 nt, Human
ggagccuggcuccccucuucguuccuucccug

SEQ ID NO: 451739 - RNA, 32 nt, Human
ggagccuggcucugcugccuaaugcuggagca

SEQ ID NO: 451740 - RNA, 32 nt, Human
ggagccugggaggcagagguugcagugagcca

SEQ ID NO: 451741 - RNA, 32 nt, Human
ggagccugggaggucaaggcugcagugagcca

SEQ ID NO: 451742 - RNA, 32 nt, Human
ggagccugggcaacaagagcgaaacuccgucu

SEQ ID NO: 451743 - RNA, 32 nt, Human
ggagccugggccaugguacagcuggcuccugc

SEQ ID NO: 451744 - RNA, 32 nt, Human
ggagccugggccucccugaaccccuggcuucc

SEQ ID NO: 451745 - RNA, 32 nt, Human
ggagccugggccugacauggcccaggaggccc

SEQ ID NO: 451746 - RNA, 18 nt, Human
ggagccugggcggccuuc

SEQ ID NO: 451747 - RNA, 32 nt, Human
ggagccugggcuccaggcagaucugcuccuua

SEQ ID NO: 451748 - RNA, 32 nt, Human
ggagccugggcugacugguugggacucaccga

SEQ ID NO: 451749 - RNA, 32 nt, Human
ggagccugggcuggaagaggcagcaaaaggga

SEQ ID NO: 451750 - RNA, 32 nt, Human
ggagccugggguccccugggguggggugguca

SEQ ID NO: 451751 - RNA, 32 nt, Human
ggagccugggugcagcagagacagaggaagca

SEQ ID NO: 451752 - RNA, 32 nt, Human
ggagccuggugcuguaguguugugcugggacu

SEQ ID NO: 451753 - RNA, 32 nt, Human
ggagccuguaaucccagcuacacaggaggcug

SEQ ID NO: 451754 - RNA, 32 nt, Human
ggagccuguaaucccagcuguucgggaggcug

SEQ ID NO: 451755 - RNA, 32 nt, Human
ggagccuguaccagccugccuucuccaggagg

SEQ ID NO: 451756 - RNA, 32 nt, Human
ggagccuguagucccagcuacacgggaggcua

SEQ ID NO: 451757 - RNA, 32 nt, Human
ggagccuguagucccagcuacucaggaggcug

SEQ ID NO: 451758 - RNA, 32 nt, Human
ggagccugugagccaccggcccacgugaaagu

SEQ ID NO: 451759 - RNA, 32 nt, Human
ggagccugugucccuagcgcaggugugucugu

SEQ ID NO: 451760 - RNA, 32 nt, Human
ggagccuguuuaccuguguucaaaaucuggca

SEQ ID NO: 451761 - RNA, 32 nt, Human
ggagccuuacugaugaaccccugcagagaagg

SEQ ID NO: 451762 - RNA, 32 nt, Human
ggagccuuaggaugcagcaugccuucaggaga

SEQ ID NO: 451763 - RNA, 32 nt, Human
ggagccuucccaagccuucuccucagcccgac

SEQ ID NO: 451764 - RNA, 21 nt, Human
ggagccuugaggccaggaggg

SEQ ID NO: 451765 - RNA, 32 nt, Human
ggagccuugccucagagaccaacugguggcug

SEQ ID NO: 451766 - RNA, 32 nt, Human
ggagccuugcugcucaucagcauccagguccu

SEQ ID NO: 451767 - RNA, 32 nt, Human
ggagccuuggaggcggguggccuggcugugcu

SEQ ID NO: 451768 - RNA, 32 nt, Human
ggagccuuggcuccugagcauccccaaagugu

SEQ ID NO: 451769 - RNA, 32 nt, Human
ggagccuugggccugaguccuggcucccucac

SEQ ID NO: 451770 - RNA, 32 nt, Human
ggagccuugugagauccuucacaggcagugca

SEQ ID NO: 451771 - RNA, 32 nt, Human
ggagccuugugccuugagacuccuggaaagac

SEQ ID NO: 451772 - RNA, 32 nt, Human
ggagccuuucaggcuggcauggagagcuuaag

SEQ ID NO: 451773 - RNA, 32 nt, Human
ggagccuuugggcugagcaagcacugaggagg

SEQ ID NO: 451774 - RNA, 32 nt, Human
ggagcgaccagcacaacaccaaaugggaaugu

SEQ ID NO: 451775 - RNA, 32 nt, Human
ggagcgagacaggcgaccaacacagaggagag

SEQ ID NO: 451776 - RNA, 32 nt, Human
ggagcgagcaugucguggacacacacagacua

SEQ ID NO: 451777 - RNA, 32 nt, Human
ggagcgagcgaagcuguggccuuggugaagcu

SEQ ID NO: 451778 - RNA, 32 nt, Human
ggagcgagcucccucauggcaucuggaacgcu

SEQ ID NO: 451779 - RNA, 32 nt, Human
ggagcgagcugugcggggcagcgcgggcuggc

SEQ ID NO: 451780 - RNA, 32 nt, Human
ggagcgaggacaacguuggcccagaugggggc

SEQ ID NO: 451781 - RNA, 18 nt, Human
ggagcgaggaugauuuca

SEQ ID NO: 451782 - RNA, 32 nt, Human
ggagcgagggaagcggcuagaggaucggggag

SEQ ID NO: 451783 - RNA, 32 nt, Human
ggagcgagggcaaggagagagcagugaggccg

SEQ ID NO: 451784 - RNA, 32 nt, Human
ggagcgaggggcuggcaugguuggccucgccc

SEQ ID NO: 451785 - RNA, 17 nt, Human
ggagcgauccucagaga

SEQ ID NO: 451786 - RNA, 31 nt, Human
ggagcgaugggaggccuugagaagaagaagu

SEQ ID NO: 451787 - RNA, 22 nt, Human
ggagcgcagggcggccgcugca

SEQ ID NO: 451788 - RNA, 32 nt, Human
ggagcgcaggggcagaggccgagacgcuggac

SEQ ID NO: 451789 - RNA, 32 nt, Human
ggagcgccaaccucgaagacaacucagcacug

SEQ ID NO: 451790 - RNA, 20 nt, Human
ggagcgccagcggcugcagg

SEQ ID NO: 451791 - RNA, 25 nt, Human
ggagcgcccaaacacuccaaagggg

SEQ ID NO: 451792 - RNA, 26 nt, Human
ggagcgcccaaacucugcaaaugggc

SEQ ID NO: 451793 - RNA, 26 nt, Human
ggagcgcccagacacugcaaaggcgc

SEQ ID NO: 451794 - RNA, 26 nt, Human
ggagcgcccgagcucugcagaagggc

SEQ ID NO: 451795 - RNA, 17 nt, Human
ggagcgcccgcagacua

SEQ ID NO: 451796 - RNA, 32 nt, Human
ggagcgcccgccgcgguccccaccuccaugga

SEQ ID NO: 451797 - RNA, 21 nt, Human
ggagcgccggggagggggcgg

SEQ ID NO: 451798 - RNA, 23 nt, Human
ggagcgccuacaccucccuggag

SEQ ID NO: 451799 - RNA, 32 nt, Human
ggagcgccuggaggagcuuagagaccccagcc

SEQ ID NO: 451800 - RNA, 32 nt, Human
ggagcgccuggcagcagcaggagcagcagcag

SEQ ID NO: 451801 - RNA, 32 nt, Human
ggagcgccuggcccucccucccuagcccuucc

SEQ ID NO: 451802 - RNA, 22 nt, Human
ggagcgcgacgcggcggcagca

SEQ ID NO: 451803 - RNA, 20 nt, Human
ggagcgcgagcggcgggcgg

SEQ ID NO: 451804 - RNA, 17 nt, Human
ggagcgcgcugggaagg

SEQ ID NO: 451805 - RNA, 32 nt, Human
ggagcgcggagaggaggcuggaagaggaagau

SEQ ID NO: 451806 - RNA, 32 nt, Human
ggagcgcgggcgcgcagagccgaggccgggac

SEQ ID NO: 451807 - RNA, 18 nt, Human
ggagcgcggucucugagg

SEQ ID NO: 451808 - RNA, 32 nt, Human
ggagcgcguggcgggcgucagcgcgguggcca

SEQ ID NO: 451809 - RNA, 32 nt, Human
ggagcgcucagaccucccucccucgcgcaucu

SEQ ID NO: 451810 - RNA, 32 nt, Human
ggagcgcuccacucgcugccgccggagggccg

SEQ ID NO: 451811 - RNA, 32 nt, Human
ggagcgcugggcccaggcaggggcuucugauu

SEQ ID NO: 451812 - RNA, 32 nt, Human
ggagcgcuuuaggcuggccggcggcgcuggga

SEQ ID NO: 451813 - RNA, 32 nt, Human
ggagcggaagggagccacuggccgcgguggca

SEQ ID NO: 451814 - RNA, 32 nt, Human
ggagcggagaaaagaaaccgcuuuggaaaaug

SEQ ID NO: 451815 - RNA, 32 nt, Human
ggagcggagagggaaggaggaggaggaggagc

SEQ ID NO: 451816 - RNA, 32 nt, Human
ggagcggagagggagcgcgcccgccccagccc

SEQ ID NO: 451817 - RNA, 32 nt, Human
ggagcggagaggggaggggagagaguugggcg

SEQ ID NO: 451818 - RNA, 32 nt, Human
ggagcggagccgcggcucgacggcggugcgcu

SEQ ID NO: 451819 - RNA, 32 nt, Human
ggagcggagcgcugcagccaagccgauagcac

SEQ ID NO: 451820 - RNA, 32 nt, Human
ggagcggagcuugccugccugccuguggagac

SEQ ID NO: 451821 - RNA, 32 nt, Human
ggagcggagcuuggcccugcgcccugugcagg

SEQ ID NO: 451822 - RNA, 19 nt, Human
ggagcggaggcgggcgcgg

SEQ ID NO: 451823 - RNA, 32 nt, Human
ggagcggagguggcggcggcggcgguagcggu

SEQ ID NO: 451824 - RNA, 32 nt, Human
ggagcggaucccggggcugggauugcgcgccc

SEQ ID NO: 451825 - RNA, 32 nt, Human
ggagcggcaacuucuaacuuugcuccaagcca

SEQ ID NO: 451826 - RNA, 32 nt, Human
ggagcggcaggagcugcggcuggagaaggaga

SEQ ID NO: 451827 - RNA, 16 nt, Human
ggagcggccccagcca

SEQ ID NO: 451828 - RNA, 32 nt, Human
ggagcggcgccgcgcacuccaacccggcgggc

SEQ ID NO: 451829 - RNA, 19 nt, Human
ggagcggcgcguccuggca

SEQ ID NO: 451830 - RNA, 32 nt, Human
ggagcggcgcugggcgaccagagcagggucga

SEQ ID NO: 451831 - RNA, 20 nt, Human
ggagcggcggccccacaaga

SEQ ID NO: 451832 - RNA, 21 nt, Human
ggagcggcggcgccucaaaga

SEQ ID NO: 451833 - RNA, 19 nt, Human
ggagcggcggcgggggcgg

SEQ ID NO: 451834 - RNA, 22 nt, Human
ggagcggcggcucaugccugua

SEQ ID NO: 451835 - RNA, 32 nt, Human
ggagcggcugcaacgccggugccugaggagcg

SEQ ID NO: 451836 - RNA, 32 nt, Human
ggagcggcugggauggcgcguccgcggccccg

SEQ ID NO: 451837 - RNA, 32 nt, Human
ggagcgggaagaggagaugacaggaagcgacg

SEQ ID NO: 451838 - RNA, 32 nt, Human
ggagcgggagcaccguccagccuccgugcagc

SEQ ID NO: 451839 - RNA, 32 nt, Human
ggagcgggagcgggagccggagcgagagcgcg

SEQ ID NO: 451840 - RNA, 18 nt, Human
ggagcgggagcggugcag

SEQ ID NO: 451841 - RNA, 22 nt, Human
ggagcgggaggagcgcgggcgg

SEQ ID NO: 451842 - RNA, 20 nt, Human
ggagcgggaggagcuggcag

SEQ ID NO: 451843 - RNA, 32 nt, Human
ggagcgggaggcggugguagagagagauaaaa

SEQ ID NO: 451844 - RNA, 22 nt, Human
ggagcgggagggcccgggucgg

SEQ ID NO: 451845 - RNA, 22 nt, Human
ggagcgggagggcgggcggcgg

SEQ ID NO: 451846 - RNA, 22 nt, Human
ggagcgggcagagcgggggcag

SEQ ID NO: 451847 - RNA, 32 nt, Human
ggagcgggcggcggcgggggaggcagaggcgg

SEQ ID NO: 451848 - RNA, 19 nt, Human
ggagcgggcggcugggaga

SEQ ID NO: 451849 - RNA, 19 nt, Human
ggagcgggcgggccugcag

SEQ ID NO: 451850 - RNA, 32 nt, Human
ggagcggggaagcagaagccagagaggggaag

SEQ ID NO: 451851 - RNA, 32 nt, Human
ggagcggggaccgguagccgacugccucuggg

SEQ ID NO: 451852 - RNA, 32 nt, Human
ggagcggggaggcgaggagggggcugugaguc

SEQ ID NO: 451853 - RNA, 32 nt, Human
ggagcggggcaggacuuccaggaggaccccaa

SEQ ID NO: 451854 - RNA, 21 nt, Human
ggagcggggcgggcgggcgcg

SEQ ID NO: 451855 - RNA, 32 nt, Human
ggagcggggcggggcgugcugggaucucgagg

SEQ ID NO: 451856 - RNA, 22 nt, Human
ggagcgggggcggcgggggcgg

SEQ ID NO: 451857 - RNA, 32 nt, Human
ggagcggguggaaaaaggaggcuuugaccagg

SEQ ID NO: 451858 - RNA, 22 nt, Human
ggagcgguggcucacaccugua

SEQ ID NO: 451859 - RNA, 32 nt, Human
ggagcggugugcagaggagguggccugcccgg

SEQ ID NO: 451860 - RNA, 32 nt, Human
ggagcgugagccacuucugcaguccaagcuga

SEQ ID NO: 451861 - RNA, 32 nt, Human
ggagcguggcgcucuguaacuuccugccgucu

SEQ ID NO: 451862 - RNA, 32 nt, Human
ggagcgugggaggcgggaguggaguggaagaa

SEQ ID NO: 451863 - RNA, 32 nt, Human
ggagcguggggaggggguaagggagccagcca

SEQ ID NO: 451864 - RNA, 32 nt, Human
ggagcguugucuggagguuccagggacagggc

SEQ ID NO: 451865 - RNA, 32 nt, Human
ggagcuaaccgcaccccucucccuuucacgga

SEQ ID NO: 451866 - RNA, 32 nt, Human
ggagcuaaggccuucaguguccccuuccuuac

SEQ ID NO: 451867 - RNA, 24 nt, Human
ggagcuaaggugggagaauugcuu

SEQ ID NO: 451868 - RNA, 32 nt, Human
ggagcuaaugguagagcguccuugaggcucca

SEQ ID NO: 451869 - RNA, 32 nt, Human
ggagcuacaccgcugagcugggcagagcugcg

SEQ ID NO: 451870 - RNA, 32 nt, Human
ggagcuacacguggaaauaugagggaagaacc

SEQ ID NO: 451871 - RNA, 32 nt, Human
ggagcuacagagcauuaacaaauacucaucuu

SEQ ID NO: 451872 - RNA, 32 nt, Human
ggagcuacaugcaccucuccuccccucagcca

SEQ ID NO: 451873 - RNA, 32 nt, Human
ggagcuacucucaggcugcaaguaaguaugaa

SEQ ID NO: 451874 - RNA, 32 nt, Human
ggagcuacugcaggaccagaagcacaaagugc

SEQ ID NO: 451875 - RNA, 32 nt, Human
ggagcuagaagaguggccaggagaugaaagca

SEQ ID NO: 451876 - RNA, 19 nt, Human
ggagcuagaaggcuggcug

SEQ ID NO: 451877 - RNA, 32 nt, Human
ggagcuagccugggggcgagccaggguccccc

SEQ ID NO: 451878 - RNA, 32 nt, Human
ggagcuaggacuagccaggacccgcagccgcc

SEQ ID NO: 451879 - RNA, 32 nt, Human
ggagcuagggcugcugccucagcuccaagaca

SEQ ID NO: 451880 - RNA, 32 nt, Human
ggagcuagggcuggagcucugcccaggugccc

SEQ ID NO: 451881 - RNA, 31 nt, Human
ggagcuagugagaggaggaggaggugggcag

SEQ ID NO: 451882 - RNA, 32 nt, Human
ggagcuaucaacaauccuguacucacuugaag

SEQ ID NO: 451883 - RNA, 18 nt, Human
ggagcucacaaauccagu

SEQ ID NO: 451884 - RNA, 32 nt, Human
ggagcucacagaagaccccuggaacccagagc

SEQ ID NO: 451885 - RNA, 32 nt, Human
ggagcucacagaaggggagggagcaccaggcc

SEQ ID NO: 451886 - RNA, 32 nt, Human
ggagcucacugcacuccagcagucaugggacc

SEQ ID NO: 451887 - RNA, 32 nt, Human
ggagcucagagcaucgcugggccugcgccaga

SEQ ID NO: 451888 - RNA, 32 nt, Human
ggagcucagcaaccacuuugcaccaugaggca

SEQ ID NO: 451889 - RNA, 32 nt, Human
ggagcucagcccuccaccuccacagcucaaga

SEQ ID NO: 451890 - RNA, 21 nt, Human
ggagcucagccucucuccuca

SEQ ID NO: 451891 - RNA, 32 nt, Human
ggagcucagccuugccccucaggagcugcaug

SEQ ID NO: 451892 - RNA, 32 nt, Human
ggagcucagcuguguuguguggcaguuuauua

SEQ ID NO: 451893 - RNA, 17 nt, Human
ggagcucaggaaccgag

SEQ ID NO: 451894 - RNA, 32 nt, Human
ggagcucaggaggccgaggcugccuugagcug

SEQ ID NO: 451895 - RNA, 32 nt, Human
ggagcucaggaguucaagagcagccugggcaa

SEQ ID NO: 451896 - RNA, 32 nt, Human
ggagcucagggguggagggcgaugggucggga

SEQ ID NO: 451897 - RNA, 32 nt, Human
ggagcucagucagccacaccuuccugcauccu

SEQ ID NO: 451898 - RNA, 21 nt, Human
ggagcucaguucaucaacuca

SEQ ID NO: 451899 - RNA, 19 nt, Human
ggagcucaguuuucaacuc

SEQ ID NO: 451900 - RNA, 32 nt, Human
ggagcucaucccuuguguucugccaggguggg

SEQ ID NO: 451901 - RNA, 32 nt, Human
ggagcucaugccgaccuuuccccaccaccgca

SEQ ID NO: 451902 - RNA, 24 nt, Human
ggagcucauuugauucauacccca

SEQ ID NO: 451903 - RNA, 32 nt, Human
ggagcuccaagaaaggccacccauagagcuca

SEQ ID NO: 451904 - RNA, 32 nt, Human
ggagcuccaaggcugcagccaggagccccgua

SEQ ID NO: 451905 - RNA, 32 nt, Human
ggagcuccagaagggccagcugggcauauucu

SEQ ID NO: 451906 - RNA, 32 nt, Human
ggagcuccagaggguguuccagggccuggaga

SEQ ID NO: 451907 - RNA, 18 nt, Human
ggagcuccagcucuggga

SEQ ID NO: 451908 - RNA, 32 nt, Human
ggagcucccagaggaaacucuugaccaccagu

SEQ ID NO: 451909 - RNA, 22 nt, Human
ggagcuccccaacuuggacccc

SEQ ID NO: 451910 - RNA, 32 nt, Human
ggagcuccccaaugccuuucugauacaucgcu

SEQ ID NO: 451911 - RNA, 26 nt, Human
ggagcucccugaagauggggcugugu

SEQ ID NO: 451912 - RNA, 32 nt, Human
ggagcuccuccaggagcaggcugggaucccaa

SEQ ID NO: 451913 - RNA, 32 nt, Human
ggagcuccugggaagcccugggugcaggacac

SEQ ID NO: 451914 - RNA, 32 nt, Human
ggagcuccugucccauccacaccagcucccca

SEQ ID NO: 451915 - RNA, 20 nt, Human
ggagcuccugucucccaaaa

SEQ ID NO: 451916 - RNA, 32 nt, Human
ggagcuccuucugccuccuuuccugccccaug

SEQ ID NO: 451917 - RNA, 17 nt, Human
ggagcucgcacggcgcc

SEQ ID NO: 451918 - RNA, 22 nt, Human
ggagcucgcauaccaggccgag

SEQ ID NO: 451919 - RNA, 32 nt, Human
ggagcucgccccuccccucagccugcccgccu

SEQ ID NO: 451920 - RNA, 32 nt, Human
ggagcucgcuucugugcugaagaugcuuugca

SEQ ID NO: 451921 - RNA, 32 nt, Human
ggagcucggauuuuaaggcaguagcuugccga

SEQ ID NO: 451922 - RNA, 32 nt, Human
ggagcucggcggagaccucucccgccagcccu

SEQ ID NO: 451923 - RNA, 32 nt, Human
ggagcucgggaguucaagaccagccugggcaa

SEQ ID NO: 451924 - RNA, 32 nt, Human
ggagcucggucgccgaagcggagggagacucu

SEQ ID NO: 451925 - RNA, 21 nt, Human
ggagcucuaggacaaggggac

SEQ ID NO: 451926 - RNA, 32 nt, Human
ggagcucuccacccacucacauuccguccccg

SEQ ID NO: 451927 - RNA, 32 nt, Human
ggagcucucuaaggagcuaagguccaugggaa

SEQ ID NO: 451928 - RNA, 32 nt, Human
ggagcucucuaaugaagggauaccaaagucuu

SEQ ID NO: 451929 - RNA, 32 nt, Human
ggagcucucuuuuucccguccugcuuucuuuc

SEQ ID NO: 451930 - RNA, 32 nt, Human
ggagcucugaacccagcccacagggaagcaga

SEQ ID NO: 451931 - RNA, 32 nt, Human
ggagcucugagacgccuccugucccacgcucu

SEQ ID NO: 451932 - RNA, 23 nt, Human
ggagcucugcaggagucugcagg

SEQ ID NO: 451933 - RNA, 32 nt, Human
ggagcucugcaggagucugcaggucacccgga

SEQ ID NO: 451934 - RNA, 32 nt, Human
ggagcucugcaguaccacagggccaagaaggu

SEQ ID NO: 451935 - RNA, 21 nt, Human
ggagcucugccagaggggcag

SEQ ID NO: 451936 - RNA, 32 nt, Human
ggagcucugcuggcuccugucugaaccuccuc

SEQ ID NO: 451937 - RNA, 22 nt, Human
ggagcucuggagcccccagagg

SEQ ID NO: 451938 - RNA, 23 nt, Human
ggagcucuggagcccccagagga

SEQ ID NO: 451939 - RNA, 32 nt, Human
ggagcucuggaggcggggcuucgagcguggcu

SEQ ID NO: 451940 - RNA, 20 nt, Human
ggagcucuggagucagagga

SEQ ID NO: 451941 - RNA, 32 nt, Human
ggagcucuggccacugcuucccaugagcugag

SEQ ID NO: 451942 - RNA, 24 nt, Human
ggagcucugggaauuuggagugac

SEQ ID NO: 451943 - RNA, 20 nt, Human
ggagcucugggagcaaggac

SEQ ID NO: 451944 - RNA, 32 nt, Human
ggagcucugggcaacaggaggaggcccggugc

SEQ ID NO: 451945 - RNA, 21 nt, Human
ggagcucuggggaaaaaggac

SEQ ID NO: 451946 - RNA, 32 nt, Human
ggagcucugucgucgguggcugaggcccgagu

SEQ ID NO: 451947 - RNA, 32 nt, Human
ggagcucuguucucgcuccugagcagcugcua

SEQ ID NO: 451948 - RNA, 32 nt, Human
ggagcucuuccugcuucucuccccaucaccau

SEQ ID NO: 451949 - RNA, 32 nt, Human
ggagcucuugcagccagaggcugcaggaaaaa

SEQ ID NO: 451950 - RNA, 32 nt, Human
ggagcucuuggcuggggcugacccugggcagg

SEQ ID NO: 451951 - RNA, 20 nt, Human
ggagcugaacauucaauuca

SEQ ID NO: 451952 - RNA, 32 nt, Human
ggagcugaaccauccccaccucaggguuauau

SEQ ID NO: 451953 - RNA, 32 nt, Human
ggagcugaagguggaggagcuggaggagaagg

SEQ ID NO: 451954 - RNA, 32 nt, Human
ggagcugaagugacagcggaggcggaagcaac

SEQ ID NO: 451955 - RNA, 20 nt, Human
ggagcugaauaugccacuua

SEQ ID NO: 451956 - RNA, 19 nt, Human
ggagcugaaucuucaccca

SEQ ID NO: 451957 - RNA, 20 nt, Human
ggagcugaauuccaagccca

SEQ ID NO: 451958 - RNA, 32 nt, Human
ggagcugagaaaccgagucacugugaaaagau

SEQ ID NO: 451959 - RNA, 21 nt, Human
ggagcugagagaggggggcag

SEQ ID NO: 451960 - RNA, 20 nt, Human
ggagcugagagaucacugca

SEQ ID NO: 451961 - RNA, 19 nt, Human
ggagcugagagggagcuca

SEQ ID NO: 451962 - RNA, 18 nt, Human
ggagcugagaucacacca

SEQ ID NO: 451963 - RNA, 18 nt, Human
ggagcugagaucacgcca

SEQ ID NO: 451964 - RNA, 19 nt, Human
ggagcugagauccagccca

SEQ ID NO: 451965 - RNA, 20 nt, Human
ggagcugagauccagcccag

SEQ ID NO: 451966 - RNA, 19 nt, Human
ggagcugagaugcacguca

SEQ ID NO: 451967 - RNA, 20 nt, Human
ggagcugagcaagaggcuca

SEQ ID NO: 451968 - RNA, 31 nt, Human
ggagcugagcaagggucgcucacuuagaaau

SEQ ID NO: 451969 - RNA, 21 nt, Human
ggagcugagcacaacaugcca

SEQ ID NO: 451970 - RNA, 20 nt, Human
ggagcugagcauaggagcuc

SEQ ID NO: 451971 - RNA, 32 nt, Human
ggagcugagccccagcgugaugcccgaggcuc

SEQ ID NO: 451972 - RNA, 32 nt, Human
ggagcugagcccguggccgcucacaggugucc

SEQ ID NO: 451973 - RNA, 19 nt, Human
ggagcugagccgguccuca

SEQ ID NO: 451974 - RNA, 32 nt, Human
ggagcugagccuaagcccuggcggggcuuugg

SEQ ID NO: 451975 - RNA, 32 nt, Human
ggagcugagcugggaucaccacauggugcugg

SEQ ID NO: 451976 - RNA, 19 nt, Human
ggagcugaggccacacuca

SEQ ID NO: 451977 - RNA, 21 nt, Human
ggagcugagggcaccacccag

SEQ ID NO: 451978 - RNA, 32 nt, Human
ggagcugaggggcagugcggaugccccaggaa

SEQ ID NO: 451979 - RNA, 18 nt, Human
ggagcugaguaguagcca

SEQ ID NO: 451980 - RNA, 18 nt, Human
ggagcugagucccagcca

SEQ ID NO: 451981 - RNA, 21 nt, Human
ggagcugauaccuguguucag

SEQ ID NO: 451982 - RNA, 32 nt, Human
ggagcugauggcuugggaaggagggagucaga

SEQ ID NO: 451983 - RNA, 32 nt, Human
ggagcugcaaggggaaaggacccacuuccaca

SEQ ID NO: 451984 - RNA, 32 nt, Human
ggagcugcagacgcuggcuaggaagcacaggg

SEQ ID NO: 451985 - RNA, 32 nt, Human
ggagcugcaguuggagcuggcauuccugggga

SEQ ID NO: 451986 - RNA, 32 nt, Human
ggagcugccaagagugaagggaagagacagcc

SEQ ID NO: 451987 - RNA, 32 nt, Human
ggagcugccagccugaggugcccacuccgcca

SEQ ID NO: 451988 - RNA, 19 nt, Human
ggagcugccagcgaggcuu

SEQ ID NO: 451989 - RNA, 32 nt, Human
ggagcugccccaccagccauccuugaagagac

SEQ ID NO: 451990 - RNA, 32 nt, Human
ggagcugccccaggcuuuagugcagcugccaa

SEQ ID NO: 451991 - RNA, 32 nt, Human
ggagcugccccaggggcuggacaagcugaccc

SEQ ID NO: 451992 - RNA, 32 nt, Human
ggagcugccuccucucaagagcaguugguugg

SEQ ID NO: 451993 - RNA, 32 nt, Human
ggagcugccugcagagaggccugccacugggg

SEQ ID NO: 451994 - RNA, 32 nt, Human
ggagcugccugggcuccgugucucugagcccc

SEQ ID NO: 451995 - RNA, 32 nt, Human
ggagcugccuggggacguuugccuuggggccc

SEQ ID NO: 451996 - RNA, 32 nt, Human
ggagcugccuggggcagggcucuaccuccccu

SEQ ID NO: 451997 - RNA, 32 nt, Human
ggagcugccugugcuggaggaaucacuuuuua

SEQ ID NO: 451998 - RNA, 32 nt, Human
ggagcugccuuugcaaaccugccuguuggcau

SEQ ID NO: 451999 - RNA, 32 nt, Human
ggagcugcggaggaggggcccgucucuaggag

SEQ ID NO: 452000 - RNA, 24 nt, Human
ggagcugcguuuguuuugccauca

SEQ ID NO: 452001 - RNA, 22 nt, Human
ggagcugcuagaacaaugcuga

SEQ ID NO: 452002 - RNA, 32 nt, Human
ggagcugcugaacuccgagcacagggugaaga

SEQ ID NO: 452003 - RNA, 32 nt, Human
ggagcugcugacuggggcaaagcacucaacag

SEQ ID NO: 452004 - RNA, 32 nt, Human
ggagcugcugccgucagacuccugccucaagc

SEQ ID NO: 452005 - RNA, 32 nt, Human
ggagcugcugcgggcuccccucaggcucugcu

SEQ ID NO: 452006 - RNA, 18 nt, Human
ggagcugcugcugcucca

SEQ ID NO: 452007 - RNA, 32 nt, Human
ggagcugcuggcugagcugcucacacacugga

SEQ ID NO: 452008 - RNA, 32 nt, Human
ggagcugcugggucucagccucguguagacga

SEQ ID NO: 452009 - RNA, 32 nt, Human
ggagcugcugguuuagccuugcaccuggggaa

SEQ ID NO: 452010 - RNA, 32 nt, Human
ggagcugcuguggagccucauccaccgcuucu

SEQ ID NO: 452011 - RNA, 32 nt, Human
ggagcugcuguggcaggugcccccagagugaa

SEQ ID NO: 452012 - RNA, 32 nt, Human
ggagcugcuugcugagguguaaagggucuucu

SEQ ID NO: 452013 - RNA, 32 nt, Human
ggagcugcuuuccugagggacucgaaauucuc

SEQ ID NO: 452014 - RNA, 32 nt, Human
ggagcugcuuucuccccacuggcugggcugca

SEQ ID NO: 452015 - RNA, 32 nt, Human
ggagcuggaaaccugggguggguuggccaaag

SEQ ID NO: 452016 - RNA, 32 nt, Human
ggagcuggaagaggaggaggaggagaggcggc

SEQ ID NO: 452017 - RNA, 32 nt, Human
ggagcuggaagaggccgugggccgcauccacc

SEQ ID NO: 452018 - RNA, 30 nt, Human
ggagcuggaagccacguggggccagacagg

SEQ ID NO: 452019 - RNA, 32 nt, Human
ggagcuggacacugcccccacccuugaccuca

SEQ ID NO: 452020 - RNA, 32 nt, Human
ggagcuggaccacagugggacaaggacaccuc

SEQ ID NO: 452021 - RNA, 32 nt, Human
ggagcuggaccaggagguggaggcucagggga

SEQ ID NO: 452022 - RNA, 32 nt, Human
ggagcuggaccuggaggcgccgccgcgacagc

SEQ ID NO: 452023 - RNA, 32 nt, Human
ggagcuggagaaacaacaucuucuggaaggga

SEQ ID NO: 452024 - RNA, 32 nt, Human
ggagcuggaggccgcccaggagcgggccaagc

SEQ ID NO: 452025 - RNA, 32 nt, Human
ggagcuggaggcggaggcagcuggggaggucc

SEQ ID NO: 452026 - RNA, 32 nt, Human
ggagcuggaggggacacuggcccagggagagc

SEQ ID NO: 452027 - RNA, 32 nt, Human
ggagcuggagucucccccuuccuccugugccc

SEQ ID NO: 452028 - RNA, 32 nt, Human
ggagcuggagugagcugagcagaaguuuugug

SEQ ID NO: 452029 - RNA, 32 nt, Human
ggagcuggagugauuccgaggacagauuccau

SEQ ID NO: 452030 - RNA, 32 nt, Human
ggagcuggauuugggagcucugcuugccgacu

SEQ ID NO: 452031 - RNA, 32 nt, Human
ggagcuggccaauucucccaggaguccuggcc

SEQ ID NO: 452032 - RNA, 18 nt, Human
ggagcuggcccucaacuc

SEQ ID NO: 452033 - RNA, 32 nt, Human
ggagcuggcggcagugacaggaggcgcgaacc

SEQ ID NO: 452034 - RNA, 32 nt, Human
ggagcuggcugcagacacccacucaguccagu

SEQ ID NO: 452035 - RNA, 19 nt, Human
ggagcuggcuggcugggag

SEQ ID NO: 452036 - RNA, 32 nt, Human
ggagcuggcuugaguuucucaaaagccaucgg

SEQ ID NO: 452037 - RNA, 32 nt, Human
ggagcugggaaaagggaggcagaggaggcaga

SEQ ID NO: 452038 - RNA, 19 nt, Human
ggagcugggaaguggggug

SEQ ID NO: 452039 - RNA, 32 nt, Human
ggagcugggaccccuccccuccaacacacaua

SEQ ID NO: 452040 - RNA, 32 nt, Human
ggagcugggagagaggccgggguuagggugau

SEQ ID NO: 452041 - RNA, 16 nt, Human
ggagcugggagccugg

SEQ ID NO: 452042 - RNA, 32 nt, Human
ggagcugggauuauaggugcaugcuaccacgc

SEQ ID NO: 452043 - RNA, 32 nt, Human
ggagcugggauuugaaccaggaucugucagcg

SEQ ID NO: 452044 - RNA, 16 nt, Human
ggagcugggcacucca

SEQ ID NO: 452045 - RNA, 19 nt, Human
ggagcugggcagagccugg

SEQ ID NO: 452046 - RNA, 32 nt, Human
ggagcugggcagggcacagcagggcaggagug

SEQ ID NO: 452047 - RNA, 20 nt, Human
ggagcugggccaaguacgac

SEQ ID NO: 452048 - RNA, 19 nt, Human
ggagcugggccaccugcca

SEQ ID NO: 452049 - RNA, 20 nt, Human
ggagcugggccccaaccuca

SEQ ID NO: 452050 - RNA, 32 nt, Human
ggagcugggcccugccacccaggccgggcuag

SEQ ID NO: 452051 - RNA, 32 nt, Human
ggagcugggccugggaacagcccuggcuuggu

SEQ ID NO: 452052 - RNA, 32 nt, Human
ggagcuggggagaaggaaggggagcaaggaga

SEQ ID NO: 452053 - RNA, 32 nt, Human
ggagcuggggagacaaaaauguggauaacaac

SEQ ID NO: 452054 - RNA, 32 nt, Human
ggagcuggggagucugcuggaggccugggaug

SEQ ID NO: 452055 - RNA, 32 nt, Human
ggagcuggggcugagaugcuccagguuuugag

SEQ ID NO: 452056 - RNA, 32 nt, Human
ggagcuggggcugcagcuggugguguuuccaa

SEQ ID NO: 452057 - RNA, 32 nt, Human
ggagcugggggaggcaguggcggcuggaguag

SEQ ID NO: 452058 - RNA, 32 nt, Human
ggagcuggggugcggcccugugcuccaggccc

SEQ ID NO: 452059 - RNA, 31 nt, Human
ggagcugggguggaagaggggagggggacac

SEQ ID NO: 452060 - RNA, 32 nt, Human
ggagcuggguauuguuaaaaacugcauuaugc

SEQ ID NO: 452061 - RNA, 32 nt, Human
ggagcugggucaccagggccaucagcugagcu

SEQ ID NO: 452062 - RNA, 32 nt, Human
ggagcugggucugagccccagcugaagggacu

SEQ ID NO: 452063 - RNA, 32 nt, Human
ggagcugggugagucaugaggggucagggggu

SEQ ID NO: 452064 - RNA, 18 nt, Human
ggagcuggguucaucuca

SEQ ID NO: 452065 - RNA, 32 nt, Human
ggagcugguaucacagaugaagauuauagagg

SEQ ID NO: 452066 - RNA, 32 nt, Human
ggagcuggugagagagagcaguuaaggcaagc

SEQ ID NO: 452067 - RNA, 32 nt, Human
ggagcugguggaggggagggaggagacaucuc

SEQ ID NO: 452068 - RNA, 32 nt, Human
ggagcugguggccagacccagaaaggccagau

SEQ ID NO: 452069 - RNA, 32 nt, Human
ggagcugguggugggagaaugacggcagggac

SEQ ID NO: 452070 - RNA, 32 nt, Human
ggagcugguguggcccacaaagggucggagag

SEQ ID NO: 452071 - RNA, 32 nt, Human
ggagcugguguuuuucagccagacagaggcau

SEQ ID NO: 452072 - RNA, 32 nt, Human
ggagcugguguuuuuccugccuaggcggagac

SEQ ID NO: 452073 - RNA, 32 nt, Human
ggagcugguuccucucucccacccuaagggca

SEQ ID NO: 452074 - RNA, 32 nt, Human
ggagcugguugcuucucugcugugcuuaucua

SEQ ID NO: 452075 - RNA, 21 nt, Human
ggagcugucagcaaggagcag

SEQ ID NO: 452076 - RNA, 16 nt, Human
ggagcugucaggugga

SEQ ID NO: 452077 - RNA, 32 nt, Human
ggagcuguccccucacagaggcagguuccggg

SEQ ID NO: 452078 - RNA, 18 nt, Human
ggagcuguccucaacuca

SEQ ID NO: 452079 - RNA, 32 nt, Human
ggagcugucucagcaagaggagaccuggggcu

SEQ ID NO: 452080 - RNA, 23 nt, Human
ggagcugugacagcagagagcag

SEQ ID NO: 452081 - RNA, 23 nt, Human
ggagcugugcccggugccugcag

SEQ ID NO: 452082 - RNA, 32 nt, Human
ggagcuguggccucggcagcugugggaaugcg

SEQ ID NO: 452083 - RNA, 32 nt, Human
ggagcuguggggagcucagagcugagauccua

SEQ ID NO: 452084 - RNA, 32 nt, Human
ggagcuguggucagaggaggagccggcgccug

SEQ ID NO: 452085 - RNA, 32 nt, Human
ggagcuguguaccaaucgucucagccuucauu

SEQ ID NO: 452086 - RNA, 32 nt, Human
ggagcugugucaccaggcucuugcuucguggc

SEQ ID NO: 452087 - RNA, 32 nt, Human
ggagcuuaaccaugccuccauugggaagucua

SEQ ID NO: 452088 - RNA, 32 nt, Human
ggagcuuacaauccuggcuggaggcaggggag

SEQ ID NO: 452089 - RNA, 32 nt, Human
ggagcuuagcuggcucuuauccugugauaagc

SEQ ID NO: 452090 - RNA, 32 nt, Human
ggagcuuaggguuugugagacagaacaucagg

SEQ ID NO: 452091 - RNA, 32 nt, Human
ggagcuuauggucuagugagggagacagagga

SEQ ID NO: 452092 - RNA, 32 nt, Human
ggagcuucaaaacucggccauggccaaggucu

SEQ ID NO: 452093 - RNA, 32 nt, Human
ggagcuucacacaacagaaacugccucgcagu

SEQ ID NO: 452094 - RNA, 32 nt, Human
ggagcuucaccaagggcuuuucagcagugaag

SEQ ID NO: 452095 - RNA, 32 nt, Human
ggagcuucaccuuuuugucuuggcuuuucuuu

SEQ ID NO: 452096 - RNA, 23 nt, Human
ggagcuucacgcaggccacccag

SEQ ID NO: 452097 - RNA, 32 nt, Human
ggagcuucagugcugugugcucuuggccucca

SEQ ID NO: 452098 - RNA, 32 nt, Human
ggagcuucauagaccgauugcaucagaaucuc

SEQ ID NO: 452099 - RNA, 32 nt, Human
ggagcuucauuuccuucaagugggccuuccug

SEQ ID NO: 452100 - RNA, 19 nt, Human
ggagcuuccuccccucuca

SEQ ID NO: 452101 - RNA, 32 nt, Human
ggagcuuccucuuucccugaacuaacucaguc

SEQ ID NO: 452102 - RNA, 32 nt, Human
ggagcuuccugagggcagggaggcagauggga

SEQ ID NO: 452103 - RNA, 32 nt, Human
ggagcuuccugcagccccgaccucucagguua

SEQ ID NO: 452104 - RNA, 32 nt, Human
ggagcuuccugccucugcuccgacacccggca

SEQ ID NO: 452105 - RNA, 32 nt, Human
ggagcuuccugggcccuucccugggccucagg

SEQ ID NO: 452106 - RNA, 22 nt, Human
ggagcuucggcagggccugcag

SEQ ID NO: 452107 - RNA, 32 nt, Human
ggagcuucucggccauccgcugugaguuuugc

SEQ ID NO: 452108 - RNA, 32 nt, Human
ggagcuucucugcuucaugucuugcuucccac

SEQ ID NO: 452109 - RNA, 19 nt, Human
ggagcuucucuuuaacuca

SEQ ID NO: 452110 - RNA, 32 nt, Human
ggagcuugaaguuuauaucuaaaucauucaaa

SEQ ID NO: 452111 - RNA, 32 nt, Human
ggagcuugaauccagcacccaccucaugucug

SEQ ID NO: 452112 - RNA, 32 nt, Human
ggagcuugaggcaggccgauugcuugagccca

SEQ ID NO: 452113 - RNA, 32 nt, Human
ggagcuugcaggaaccagcaaugagaaggcca

SEQ ID NO: 452114 - RNA, 32 nt, Human
ggagcuugcccucagccccuucaucugccgag

SEQ ID NO: 452115 - RNA, 32 nt, Human
ggagcuugcccuucugggguccugguuccuga

SEQ ID NO: 452116 - RNA, 32 nt, Human
ggagcuugcugaggcaaggccgaggauaagga

SEQ ID NO: 452117 - RNA, 32 nt, Human
ggagcuugcugggagccaccucccaggucauu

SEQ ID NO: 452118 - RNA, 32 nt, Human
ggagcuuggauuuuaaggcaguagcuugcuga

SEQ ID NO: 452119 - RNA, 19 nt, Human
ggagcuuggcaggguccca

SEQ ID NO: 452120 - RNA, 32 nt, Human
ggagcuuggggagaggaugggagugggcagag

SEQ ID NO: 452121 - RNA, 32 nt, Human
ggagcuuggugaggagggugggccuagggcuu

SEQ ID NO: 452122 - RNA, 32 nt, Human
ggagcuugucaccauuggacagucucccugau

SEQ ID NO: 452123 - RNA, 32 nt, Human
ggagcuugucaggcuuaucuugcugaagaugg

SEQ ID NO: 452124 - RNA, 32 nt, Human
ggagcuugugauguauuucugccuccuggagu

SEQ ID NO: 452125 - RNA, 32 nt, Human
ggagcuuuacucuucucucucuuacacaaugc

SEQ ID NO: 452126 - RNA, 32 nt, Human
ggagcuuucauaauuaccuuaguucuccaugc

SEQ ID NO: 452127 - RNA, 32 nt, Human
ggagcuuuccaggccagcuuugaggauaagcu

SEQ ID NO: 452128 - RNA, 32 nt, Human
ggagcuuucugggccagcuuugaggauaagcu

SEQ ID NO: 452129 - RNA, 32 nt, Human
ggagcuuugccucucuaggccggcagcgccuc

SEQ ID NO: 452130 - RNA, 32 nt, Human
ggagcuuuuccccuuugcucagcagguuucuc

SEQ ID NO: 452131 - RNA, 32 nt, Human
ggagcuuuugauugcugaccugugucguacca

SEQ ID NO: 452132 - RNA, 32 nt, Human
ggagcuuuuucagaaacagggcagcagugggg

SEQ ID NO: 452133 - RNA, 32 nt, Human
ggaggaaaaauuaaggggagagaggaaaacaa

SEQ ID NO: 452134 - RNA, 32 nt, Human
ggaggaaaaauuagcucuuugaagagaaagua

SEQ ID NO: 452135 - RNA, 32 nt, Human
ggaggaaaacucaguaagaauuauauuagucu

SEQ ID NO: 452136 - RNA, 32 nt, Human
ggaggaaaagagaguccugcuucugccuggcu

SEQ ID NO: 452137 - RNA, 32 nt, Human
ggaggaaaagcagucaggccacacaacauugu

SEQ ID NO: 452138 - RNA, 24 nt, Human
ggaggaaacauuauaaagugcucu

SEQ ID NO: 452139 - RNA, 32 nt, Human
ggaggaaacuuccuuccaucuucucugcauaa

SEQ ID NO: 452140 - RNA, 32 nt, Human
ggaggaaagagacagagacaaaggcacagcgg

SEQ ID NO: 452141 - RNA, 22 nt, Human
ggaggaaaggcgggacacagcg

SEQ ID NO: 452142 - RNA, 32 nt, Human
ggaggaaagggggagauugaggugggagagag

SEQ ID NO: 452143 - RNA, 32 nt, Human
ggaggaaauacagcuagaacaaaggggaggaa

SEQ ID NO: 452144 - RNA, 32 nt, Human
ggaggaaauaccaaaugcauuguuguucugcu

SEQ ID NO: 452145 - RNA, 32 nt, Human
ggaggaaauagcaagguuaagaugugugaaua

SEQ ID NO: 452146 - RNA, 19 nt, Human
ggaggaaauggcggggagg

SEQ ID NO: 452147 - RNA, 32 nt, Human
ggaggaaauguucauucagugguagcuauuuc

SEQ ID NO: 452148 - RNA, 20 nt, Human
ggaggaacaggaagagaaga

SEQ ID NO: 452149 - RNA, 31 nt, Human
ggaggaacauagcaaaguaggagggacagag

SEQ ID NO: 452150 - RNA, 32 nt, Human
ggaggaacaugcagucuccugucucaugguuu

SEQ ID NO: 452151 - RNA, 32 nt, Human
ggaggaacauggagaggagagcagcgggccca

SEQ ID NO: 452152 - RNA, 32 nt, Human
ggaggaaccagaaaaguggccucuucccccaa

SEQ ID NO: 452153 - RNA, 32 nt, Human
ggaggaacccuccaccaaugagagaugggaau

SEQ ID NO: 452154 - RNA, 32 nt, Human
ggaggaaccuugagcccgggaggcagagguug

SEQ ID NO: 452155 - RNA, 32 nt, Human
ggaggaacguggucaacucacaccugccucuu

SEQ ID NO: 452156 - RNA, 32 nt, Human
ggaggaacucaagcucagcuucugccuccugu

SEQ ID NO: 452157 - RNA, 32 nt, Human
ggaggaacucagaagagaacagccuggggcaa

SEQ ID NO: 452158 - RNA, 32 nt, Human
ggaggaacucuacaaccugaguuugccuuugu

SEQ ID NO: 452159 - RNA, 21 nt, Human
ggaggaacuggaaggugcuuu

SEQ ID NO: 452160 - RNA, 32 nt, Human
ggaggaacugggaggcagguuuggaggcugca

SEQ ID NO: 452161 - RNA, 32 nt, Human
ggaggaacugggccuccgcuucccagcaacgc

SEQ ID NO: 452162 - RNA, 32 nt, Human
ggaggaacuguacugcccccgugucacccccg

SEQ ID NO: 452163 - RNA, 32 nt, Human
ggaggaacuuaaagggcugaguucugaggcgc

SEQ ID NO: 452164 - RNA, 22 nt, Human
ggaggaagaaagggagagaggg

SEQ ID NO: 452165 - RNA, 32 nt, Human
ggaggaagaagaaaaagugcucagggauuuau

SEQ ID NO: 452166 - RNA, 32 nt, Human
ggaggaagaagaggaggaggagaaagaagcag

SEQ ID NO: 452167 - RNA, 32 nt, Human
ggaggaagaagaggaggaggaggagauggugg

SEQ ID NO: 452168 - RNA, 26 nt, Human
ggaggaagaagaggaggaggaggagg

SEQ ID NO: 452169 - RNA, 32 nt, Human
ggaggaagaagaggaggaggaggaggaggagg

SEQ ID NO: 452170 - RNA, 21 nt, Human
ggaggaagaagaggaggaggg

SEQ ID NO: 452171 - RNA, 32 nt, Human
ggaggaagaagaggcgagaacgauccccgaac

SEQ ID NO: 452172 - RNA, 32 nt, Human
ggaggaagaagccagaugacagucaggagcuc

SEQ ID NO: 452173 - RNA, 17 nt, Human
ggaggaagaagcgggug

SEQ ID NO: 452174 - RNA, 32 nt, Human
ggaggaagaaggaagagaggcagaagacuagg

SEQ ID NO: 452175 - RNA, 24 nt, Human
ggaggaagaccuggggugggggug

SEQ ID NO: 452176 - RNA, 32 nt, Human
ggaggaagacugccucuccaucgcugucagag

SEQ ID NO: 452177 - RNA, 32 nt, Human
ggaggaagagagaggaagggugagggugaggc

SEQ ID NO: 452178 - RNA, 32 nt, Human
ggaggaagagaugacccaagauuaggcagaug

SEQ ID NO: 452179 - RNA, 32 nt, Human
ggaggaagaggaagaguggggauggagaaagg

SEQ ID NO: 452180 - RNA, 32 nt, Human
ggaggaagaggaaggaugaagaaaaggaagaa

SEQ ID NO: 452181 - RNA, 32 nt, Human
ggaggaagaggaaguaggaagaaugcaggagg

SEQ ID NO: 452182 - RNA, 32 nt, Human
ggaggaagaggagaaagagggagggagauggg

SEQ ID NO: 452183 - RNA, 32 nt, Human
ggaggaagaggaggacaaaaagggggaggaga

SEQ ID NO: 452184 - RNA, 32 nt, Human
ggaggaagaggaggagaagguagcuacagcaa

SEQ ID NO: 452185 - RNA, 32 nt, Human
ggaggaagaggaggaggaagaggacuucucac

SEQ ID NO: 452186 - RNA, 32 nt, Human
ggaggaagaggaggaggaagaggaggaagagg

SEQ ID NO: 452187 - RNA, 32 nt, Human
ggaggaagaggaggaggaggaagaggggagca

SEQ ID NO: 452188 - RNA, 32 nt, Human
ggaggaagaggaggaggaggaagggagcacca

SEQ ID NO: 452189 - RNA, 32 nt, Human
ggaggaagaggaggaggaggaggaggaagcug

SEQ ID NO: 452190 - RNA, 32 nt, Human
ggaggaagaggaggaggaggaggaggcugggu

SEQ ID NO: 452191 - RNA, 26 nt, Human
ggaggaagaggggaaugcacaucuuu

SEQ ID NO: 452192 - RNA, 32 nt, Human
ggaggaagagguggaggaggaggaggaagagg

SEQ ID NO: 452193 - RNA, 32 nt, Human
ggaggaagagguggaggaggaggaggaggagg

SEQ ID NO: 452194 - RNA, 32 nt, Human
ggaggaagagucaggcucacagcugggguggc

SEQ ID NO: 452195 - RNA, 32 nt, Human
ggaggaagagugggagggagggcuggggaugg

SEQ ID NO: 452196 - RNA, 32 nt, Human
ggaggaagaguuugggggcuguggagggaagg

SEQ ID NO: 452197 - RNA, 21 nt, Human
ggaggaagcagagcagugcuu

SEQ ID NO: 452198 - RNA, 32 nt, Human
ggaggaagcagcacuaaagcacucugaaucaa

SEQ ID NO: 452199 - RNA, 32 nt, Human
ggaggaagcagcacuaaagcacucugagucaa

SEQ ID NO: 452200 - RNA, 21 nt, Human
ggaggaagccggccacacucu

SEQ ID NO: 452201 - RNA, 20 nt, Human
ggaggaagcgguuagugcuu

SEQ ID NO: 452202 - RNA, 20 nt, Human
ggaggaagcgucagugcccu

SEQ ID NO: 452203 - RNA, 24 nt, Human
ggaggaagcucuggaucacaguug

SEQ ID NO: 452204 - RNA, 32 nt, Human
ggaggaagcugaagcgggcagaucacuugagg

SEQ ID NO: 452205 - RNA, 22 nt, Human
ggaggaagcugacacggagaug

SEQ ID NO: 452206 - RNA, 32 nt, Human
ggaggaagcuggagagagcacagugaaauuga

SEQ ID NO: 452207 - RNA, 21 nt, Human
ggaggaagcuggguaggcccu

SEQ ID NO: 452208 - RNA, 32 nt, Human
ggaggaagcuguccuugcaccccuggucucgg

SEQ ID NO: 452209 - RNA, 32 nt, Human
ggaggaagcuguucuccccaccccaggugccu

SEQ ID NO: 452210 - RNA, 32 nt, Human
ggaggaagcuuauuagguucacuguugaauga

SEQ ID NO: 452211 - RNA, 24 nt, Human
ggaggaaggaaacgaacgaggggg

SEQ ID NO: 452212 - RNA, 24 nt, Human
ggaggaaggaagcagggaagaggg

SEQ ID NO: 452213 - RNA, 23 nt, Human
ggaggaaggaagccaagagaggg

SEQ ID NO: 452214 - RNA, 32 nt, Human
ggaggaaggaagcgcagugacagugccuaagu

SEQ ID NO: 452215 - RNA, 32 nt, Human
ggaggaaggaagcggcggcgcggcgggcacag

SEQ ID NO: 452216 - RNA, 32 nt, Human
ggaggaaggaaggaagaaggaugggucaauga

SEQ ID NO: 452217 - RNA, 22 nt, Human
ggaggaaggaaggacuggaagg

SEQ ID NO: 452218 - RNA, 23 nt, Human
ggaggaaggaagggagggagggg

SEQ ID NO: 452219 - RNA, 32 nt, Human
ggaggaaggagaagaaguaaaagugcgaagag

SEQ ID NO: 452220 - RNA, 22 nt, Human
ggaggaaggagagaaggggagg

SEQ ID NO: 452221 - RNA, 32 nt, Human
ggaggaaggagagaaggggaggagggcggggg

SEQ ID NO: 452222 - RNA, 23 nt, Human
ggaggaaggagagaggaagcagg

SEQ ID NO: 452223 - RNA, 32 nt, Human
ggaggaaggagagaggaagcaggugagggccg

SEQ ID NO: 452224 - RNA, 32 nt, Human
ggaggaaggagaggaggaugaaggagaagaug

SEQ ID NO: 452225 - RNA, 24 nt, Human
ggaggaaggaggacccaggacagg

SEQ ID NO: 452226 - RNA, 21 nt, Human
ggaggaaggaggacccgugcg

SEQ ID NO: 452227 - RNA, 22 nt, Human
ggaggaaggaggagacagaagg

SEQ ID NO: 452228 - RNA, 23 nt, Human
ggaggaaggaggcacagaccggg

SEQ ID NO: 452229 - RNA, 24 nt, Human
ggaggaaggaggccacggagcggg

SEQ ID NO: 452230 - RNA, 32 nt, Human
ggaggaaggagggagagggaaguaggaaagaa

SEQ ID NO: 452231 - RNA, 32 nt, Human
ggaggaaggagguggguguuaagcgauuggug

SEQ ID NO: 452232 - RNA, 32 nt, Human
ggaggaaggcagcuagaaaugggagggaagcu

SEQ ID NO: 452233 - RNA, 32 nt, Human
ggaggaaggccucuguaucaccccaguacucu

SEQ ID NO: 452234 - RNA, 32 nt, Human
ggaggaaggcggggaguccagguuccgccccg

SEQ ID NO: 452235 - RNA, 18 nt, Human
ggaggaaggcgggggagg

SEQ ID NO: 452236 - RNA, 21 nt, Human
ggaggaaggcguauaaggaug

SEQ ID NO: 452237 - RNA, 32 nt, Human
ggaggaaggcugccaggagcugaggggcuggc

SEQ ID NO: 452238 - RNA, 19 nt, Human
ggaggaaggggacagaggg

SEQ ID NO: 452239 - RNA, 32 nt, Human
ggaggaaggggcaggaggaaggguugagguua

SEQ ID NO: 452240 - RNA, 19 nt, Human
ggaggaaggggcugggagg

SEQ ID NO: 452241 - RNA, 20 nt, Human
ggaggaagggggcauggagc

SEQ ID NO: 452242 - RNA, 32 nt, Human
ggaggaagguaaaggagaagagagggaggggu

SEQ ID NO: 452243 - RNA, 23 nt, Human
ggaggaagguacuugaugggaug

SEQ ID NO: 452244 - RNA, 24 nt, Human
ggaggaaggucuggcauugggaug

SEQ ID NO: 452245 - RNA, 21 nt, Human
ggaggaagguggccauggaug

SEQ ID NO: 452246 - RNA, 24 nt, Human
ggaggaaguagcuggacaggcccu

SEQ ID NO: 452247 - RNA, 32 nt, Human
ggaggaaguauacacccccgugugagaugguc

SEQ ID NO: 452248 - RNA, 31 nt, Human
ggaggaagugagaggugaacucagccuggga

SEQ ID NO: 452249 - RNA, 32 nt, Human
ggaggaagugagcguggggcucagggaccagg

SEQ ID NO: 452250 - RNA, 32 nt, Human
ggaggaagugggcucugaggcugcagggcugg

SEQ ID NO: 452251 - RNA, 19 nt, Human
ggaggaagugggugagcuc

SEQ ID NO: 452252 - RNA, 32 nt, Human
ggaggaaguuccugcagaugaagcgcaggaaa

SEQ ID NO: 452253 - RNA, 24 nt, Human
ggaggaaguucugcccggcgcucu

SEQ ID NO: 452254 - RNA, 24 nt, Human
ggaggaaguucugccgggcgcucu

SEQ ID NO: 452255 - RNA, 23 nt, Human
ggaggaaguuuuggaaagaguuc

SEQ ID NO: 452256 - RNA, 26 nt, Human
ggaggaauaccagggccacggagggg

SEQ ID NO: 452257 - RNA, 32 nt, Human
ggaggaauaugggagcguuucgcucuccuugu

SEQ ID NO: 452258 - RNA, 32 nt, Human
ggaggaaucacuucccucagaacccagccaag

SEQ ID NO: 452259 - RNA, 32 nt, Human
ggaggaaucacuuuuuaggcgcuuguuuugga

SEQ ID NO: 452260 - RNA, 20 nt, Human
ggaggaaugagaggugggga

SEQ ID NO: 452261 - RNA, 32 nt, Human
ggaggaaugccauuaaagugaacuccccaccu

SEQ ID NO: 452262 - RNA, 18 nt, Human
ggaggaaugccuggggga

SEQ ID NO: 452263 - RNA, 22 nt, Human
ggaggaauguuugguugggaga

SEQ ID NO: 452264 - RNA, 32 nt, Human
ggaggaauucugaagccauugucuccuugagu

SEQ ID NO: 452265 - RNA, 24 nt, Human
ggaggaauucuuggaugguguccu

SEQ ID NO: 452266 - RNA, 32 nt, Human
ggaggaauugggcagcuguugcuuuggaucug

SEQ ID NO: 452267 - RNA, 32 nt, Human
ggaggaauuucuguugagcugaaaugcaccug

SEQ ID NO: 452268 - RNA, 32 nt, Human
ggaggaauuuuacugacccagcauccagauga

SEQ ID NO: 452269 - RNA, 32 nt, Human
ggaggacaacacugccuuucaaacuuuuuacu

SEQ ID NO: 452270 - RNA, 32 nt, Human
ggaggacaagagccuuagccaaugacaacuca

SEQ ID NO: 452271 - RNA, 32 nt, Human
ggaggacaaggcaggcacacaaauggccagga

SEQ ID NO: 452272 - RNA, 32 nt, Human
ggaggacacacguugcacauucuccaaauauc

SEQ ID NO: 452273 - RNA, 32 nt, Human
ggaggacacucccaucagaacuuggcagccuu

SEQ ID NO: 452274 - RNA, 32 nt, Human
ggaggacagagggagacagggcugcuccccaa

SEQ ID NO: 452275 - RNA, 32 nt, Human
ggaggacagcacagaucaaugaaaccagcaga

SEQ ID NO: 452276 - RNA, 32 nt, Human
ggaggacagcagcauggagaaagauccuagaa

SEQ ID NO: 452277 - RNA, 32 nt, Human
ggaggacagcgagaagaaaggaagagaaaugc

SEQ ID NO: 452278 - RNA, 32 nt, Human
ggaggacaggguggcccuggggacaagaggga

SEQ ID NO: 452279 - RNA, 20 nt, Human
ggaggacaggucaggugagg

SEQ ID NO: 452280 - RNA, 32 nt, Human
ggaggacagucacugcaaucucuuuaccaccu

SEQ ID NO: 452281 - RNA, 32 nt, Human
ggaggacagucugcauuacucagucuacugau

SEQ ID NO: 452282 - RNA, 32 nt, Human
ggaggacagugccaaccuccuccuggggaucc

SEQ ID NO: 452283 - RNA, 32 nt, Human
ggaggacauguggccucaggaagccugggggu

SEQ ID NO: 452284 - RNA, 32 nt, Human
ggaggacauguggccucaggaagccugggugu

SEQ ID NO: 452285 - RNA, 17 nt, Human
ggaggacauucaaacca

SEQ ID NO: 452286 - RNA, 32 nt, Human
ggaggacauuuccacugucuucccuggcagcu

SEQ ID NO: 452287 - RNA, 32 nt, Human
ggaggaccacagaagcuuuggcaccgaggauc

SEQ ID NO: 452288 - RNA, 32 nt, Human
ggaggaccagcagaggauuaaaggugacuggg

SEQ ID NO: 452289 - RNA, 32 nt, Human
ggaggaccaggaucugaacccaacugggucuc

SEQ ID NO: 452290 - RNA, 23 nt, Human
ggaggacccagacagcgugcccc

SEQ ID NO: 452291 - RNA, 32 nt, Human
ggaggacccagaggaggagacgaaggggaagg

SEQ ID NO: 452292 - RNA, 32 nt, Human
ggaggacccagccacccaagggucgucuucug

SEQ ID NO: 452293 - RNA, 32 nt, Human
ggaggaccccgagggcugaggagcagccagga

SEQ ID NO: 452294 - RNA, 32 nt, Human
ggaggacccuggccugagcgagcugcugaagg

SEQ ID NO: 452295 - RNA, 32 nt, Human
ggaggacccuggccugagcgagcugcugcagg

SEQ ID NO: 452296 - RNA, 32 nt, Human
ggaggacccugggcgugauucucccucccugg

SEQ ID NO: 452297 - RNA, 32 nt, Human
ggaggaccgagaggggucucaggcuggcgauu

SEQ ID NO: 452298 - RNA, 21 nt, Human
ggaggaccgcuugagcccagg

SEQ ID NO: 452299 - RNA, 22 nt, Human
ggaggaccguucucugucccca

SEQ ID NO: 452300 - RNA, 32 nt, Human
ggaggaccuccaggacugagacugggcucugu

SEQ ID NO: 452301 - RNA, 32 nt, Human
ggaggaccugcucugcccucuccccaccccuu

SEQ ID NO: 452302 - RNA, 24 nt, Human
ggaggaccugcugcagcugggagg

SEQ ID NO: 452303 - RNA, 32 nt, Human
ggaggaccuggguuugaguccuggaucacccc

SEQ ID NO: 452304 - RNA, 32 nt, Human
ggaggaccugguggccuccucauucucuuuug

SEQ ID NO: 452305 - RNA, 32 nt, Human
ggaggaccugguggggaggaggccguguuaca

SEQ ID NO: 452306 - RNA, 19 nt, Human
ggaggacgcagcccacugc

SEQ ID NO: 452307 - RNA, 21 nt, Human
ggaggacgccugucgacgacc

SEQ ID NO: 452308 - RNA, 32 nt, Human
ggaggacgcggaagaggagcugugggaagggg

SEQ ID NO: 452309 - RNA, 32 nt, Human
ggaggacuacugggggcuggccagucagggag

SEQ ID NO: 452310 - RNA, 32 nt, Human
ggaggacucauuuuaccugacuucaagacuua

SEQ ID NO: 452311 - RNA, 32 nt, Human
ggaggacucccaucaccuucucucagaacaaa

SEQ ID NO: 452312 - RNA, 32 nt, Human
ggaggacuccugccuuuccuguuuagacaccc

SEQ ID NO: 452313 - RNA, 19 nt, Human
ggaggacucugggggcuag

SEQ ID NO: 452314 - RNA, 32 nt, Human
ggaggacugcuugaagccagaaguucaagacc

SEQ ID NO: 452315 - RNA, 21 nt, Human
ggaggacugcuugagcccagg

SEQ ID NO: 452316 - RNA, 32 nt, Human
ggaggacuggccucuaggaguugaggaccuca

SEQ ID NO: 452317 - RNA, 32 nt, Human
ggaggacuggcguugccuuuucucccagcuac

SEQ ID NO: 452318 - RNA, 32 nt, Human
ggaggacugguuuccagccauaccuguucugg

SEQ ID NO: 452319 - RNA, 19 nt, Human
ggaggacuuccaauggaga

SEQ ID NO: 452320 - RNA, 32 nt, Human
ggaggacuucuuggaggaggugguggcugggc

SEQ ID NO: 452321 - RNA, 32 nt, Human
ggaggacuugcuggggaccagaauccaaacgg

SEQ ID NO: 452322 - RNA, 32 nt, Human
ggaggacuugucacccuccaccccacauugcu

SEQ ID NO: 452323 - RNA, 23 nt, Human
ggaggagaaagcugacaggcgug

SEQ ID NO: 452324 - RNA, 32 nt, Human
ggaggagaaaggggaaaggaagaaagaaggag

SEQ ID NO: 452325 - RNA, 32 nt, Human
ggaggagaaagggugucugcugccuggugagg

SEQ ID NO: 452326 - RNA, 32 nt, Human
ggaggagaagacggaggaaggcucaggccccu

SEQ ID NO: 452327 - RNA, 32 nt, Human
ggaggagaagcacaguugucccauugaauuau

SEQ ID NO: 452328 - RNA, 32 nt, Human
ggaggagaagcagugccuucccucucgugugg

SEQ ID NO: 452329 - RNA, 21 nt, Human
ggaggagaagcugagcacgug

SEQ ID NO: 452330 - RNA, 32 nt, Human
ggaggagaaggagcccccagcccagccucauc

SEQ ID NO: 452331 - RNA, 32 nt, Human
ggaggagaaggaggaggaagccauggaugaca

SEQ ID NO: 452332 - RNA, 32 nt, Human
ggaggagaaggaggaggaggaagaggaggagc

SEQ ID NO: 452333 - RNA, 32 nt, Human
ggaggagaagggccucaaacugugcauguaag

SEQ ID NO: 452334 - RNA, 32 nt, Human
ggaggagaaggugguugaacugaguacugaga

SEQ ID NO: 452335 - RNA, 32 nt, Human
ggaggagaaugaagaaagauggagucaaacag

SEQ ID NO: 452336 - RNA, 32 nt, Human
ggaggagacagaugauaaguaaacaaauaaau

SEQ ID NO: 452337 - RNA, 20 nt, Human
ggaggagacaggggaugagg

SEQ ID NO: 452338 - RNA, 32 nt, Human
ggaggagaccucagauccucuucaucccuuua

SEQ ID NO: 452339 - RNA, 32 nt, Human
ggaggagagaacgcugccucuccucuggauug

SEQ ID NO: 452340 - RNA, 32 nt, Human
ggaggagagaagguagagcuguucuuaaauuu

SEQ ID NO: 452341 - RNA, 32 nt, Human
ggaggagagaagugcggcugugaucuggggaa

SEQ ID NO: 452342 - RNA, 32 nt, Human
ggaggagagagaggagaagggaggcaagggag

SEQ ID NO: 452343 - RNA, 32 nt, Human
ggaggagagagaggagaagggaggcaggggag

SEQ ID NO: 452344 - RNA, 32 nt, Human
ggaggagagaggaaagagcggagcagccauug

SEQ ID NO: 452345 - RNA, 22 nt, Human
ggaggagagagggcacaucucc

SEQ ID NO: 452346 - RNA, 32 nt, Human
ggaggagagcaucaucacuuuccauuagcugu

SEQ ID NO: 452347 - RNA, 32 nt, Human
ggaggagaggagaggagagggaggauccugga

SEQ ID NO: 452348 - RNA, 21 nt, Human
ggaggagaggaggagccgaga

SEQ ID NO: 452349 - RNA, 22 nt, Human
ggaggagaggcaacgugaacag

SEQ ID NO: 452350 - RNA, 20 nt, Human
ggaggagaggcagcgagcgg

SEQ ID NO: 452351 - RNA, 32 nt, Human
ggaggagaggccaggaagggagagggagaaaa

SEQ ID NO: 452352 - RNA, 20 nt, Human
ggaggagaggcgcggggagc

SEQ ID NO: 452353 - RNA, 20 nt, Human
ggaggagaggcugacuacag

SEQ ID NO: 452354 - RNA, 18 nt, Human
ggaggagaggcugaggga

SEQ ID NO: 452355 - RNA, 20 nt, Human
ggaggagaggcugagggagg

SEQ ID NO: 452356 - RNA, 32 nt, Human
ggaggagagggagggggaggacauggcaccau

SEQ ID NO: 452357 - RNA, 32 nt, Human
ggaggagagggcagaggaagacccccucuccu

SEQ ID NO: 452358 - RNA, 32 nt, Human
ggaggagaggguaagggaaagguggaggggcu

SEQ ID NO: 452359 - RNA, 20 nt, Human
ggaggagagguggcaggagg

SEQ ID NO: 452360 - RNA, 32 nt, Human
ggaggagaguagcucccuucucacacaaacgc

SEQ ID NO: 452361 - RNA, 32 nt, Human
ggaggagagucaccuccagacaacaucugcuc

SEQ ID NO: 452362 - RNA, 32 nt, Human
ggaggagaguggcggcugacacugugaaggag

SEQ ID NO: 452363 - RNA, 32 nt, Human
ggaggagaugauugagcugcuucuacuaagau

SEQ ID NO: 452364 - RNA, 32 nt, Human
ggaggagauggcuggcaccugggaacgcuaug

SEQ ID NO: 452365 - RNA, 19 nt, Human
ggaggagauguugagggga

SEQ ID NO: 452366 - RNA, 32 nt, Human
ggaggagcaaacugaggggcaggcuacugggg

SEQ ID NO: 452367 - RNA, 32 nt, Human
ggaggagcaagggacaagaggagcagaggaca

SEQ ID NO: 452368 - RNA, 18 nt, Human
ggaggagcaagggggcca

SEQ ID NO: 452369 - RNA, 32 nt, Human
ggaggagcacacggcaccuuuccccagagccc

SEQ ID NO: 452370 - RNA, 32 nt, Human
ggaggagcaccacucacuucugcagggagcaa

SEQ ID NO: 452371 - RNA, 16 nt, Human
ggaggagcagaagcca

SEQ ID NO: 452372 - RNA, 32 nt, Human
ggaggagcagaggcgggcgccgcaccgccccg

SEQ ID NO: 452373 - RNA, 32 nt, Human
ggaggagcagagggagaaagcgagggggcggg

SEQ ID NO: 452374 - RNA, 21 nt, Human
ggaggagcagcacggagcggg

SEQ ID NO: 452375 - RNA, 32 nt, Human
ggaggagcagcagaggcggucgggagcgauga

SEQ ID NO: 452376 - RNA, 32 nt, Human
ggaggagcagcagcuuggggagagggauuucc

SEQ ID NO: 452377 - RNA, 24 nt, Human
ggaggagcagccgaguacuuucag

SEQ ID NO: 452378 - RNA, 32 nt, Human
ggaggagcaggaaggugaccaggguguuuggg

SEQ ID NO: 452379 - RNA, 32 nt, Human
ggaggagcagggcugagcuggccacgccaccu

SEQ ID NO: 452380 - RNA, 32 nt, Human
ggaggagcaguuacccaacaaggacuguuuca

SEQ ID NO: 452381 - RNA, 32 nt, Human
ggaggagccaaggaauucuguggcugugcugc

SEQ ID NO: 452382 - RNA, 22 nt, Human
ggaggagccagaagcugggaga

SEQ ID NO: 452383 - RNA, 32 nt, Human
ggaggagccagcugcaguaguauccgccugua

SEQ ID NO: 452384 - RNA, 32 nt, Human
ggaggagcccaccagccccuucuucuugugaa

SEQ ID NO: 452385 - RNA, 32 nt, Human
ggaggagcccaggaaggaggcuccgcugguuc

SEQ ID NO: 452386 - RNA, 19 nt, Human
ggaggagcccagggcccuc

SEQ ID NO: 452387 - RNA, 32 nt, Human
ggaggagcccgggggagagggaccaggagggg

SEQ ID NO: 452388 - RNA, 32 nt, Human
ggaggagccggagccucugccucagcagccgc

SEQ ID NO: 452389 - RNA, 32 nt, Human
ggaggagccuccugccucuuccgggcuccggg

SEQ ID NO: 452390 - RNA, 22 nt, Human
ggaggagccucugucccaccag

SEQ ID NO: 452391 - RNA, 32 nt, Human
ggaggagcgacaccuccaggcuuccgggagcc

SEQ ID NO: 452392 - RNA, 23 nt, Human
ggaggagcgaugcaguugggaga

SEQ ID NO: 452393 - RNA, 32 nt, Human
ggaggagcuacagaugauucagccugagaagc

SEQ ID NO: 452394 - RNA, 32 nt, Human
ggaggagcuagcagacacauccaguaucuccu

SEQ ID NO: 452395 - RNA, 32 nt, Human
ggaggagcucacacccucaaacuccucaauaa

SEQ ID NO: 452396 - RNA, 32 nt, Human
ggaggagcuccaggaagcaggcaggccuuggu

SEQ ID NO: 452397 - RNA, 24 nt, Human
ggaggagcugacccggcuggggga

SEQ ID NO: 452398 - RNA, 32 nt, Human
ggaggagcugccgauggucccagugccauauu

SEQ ID NO: 452399 - RNA, 18 nt, Human
ggaggagcugucacgcug

SEQ ID NO: 452400 - RNA, 32 nt, Human
ggaggagcuuaggacaaaccucucugaugaag

SEQ ID NO: 452401 - RNA, 32 nt, Human
ggaggagcuucaucuguucccuucccaccucc

SEQ ID NO: 452402 - RNA, 32 nt, Human
ggaggaggaaaaggaggaagaggaggacaaaa

SEQ ID NO: 452403 - RNA, 32 nt, Human
ggaggaggaaagaggaggacauggucuccgag

SEQ ID NO: 452404 - RNA, 32 nt, Human
ggaggaggaagagaagcaggagagagaaagcc

SEQ ID NO: 452405 - RNA, 32 nt, Human
ggaggaggaagaggaaaacaagacaaacagcc

SEQ ID NO: 452406 - RNA, 32 nt, Human
ggaggaggaagaggaaacaagauaugacaagg

SEQ ID NO: 452407 - RNA, 32 nt, Human
ggaggaggaagaggagaauaaggaggagcagg

SEQ ID NO: 452408 - RNA, 32 nt, Human
ggaggaggaagaggagaggaggaagcaaagaa

SEQ ID NO: 452409 - RNA, 32 nt, Human
ggaggaggaagaggaggaagaggaugaccuga

SEQ ID NO: 452410 - RNA, 32 nt, Human
ggaggaggaagaggaggaggaagaggacuucu

SEQ ID NO: 452411 - RNA, 32 nt, Human
ggaggaggaagaggaggaggaggaagggagca

SEQ ID NO: 452412 - RNA, 23 nt, Human
ggaggaggaagaggaggcgauag

SEQ ID NO: 452413 - RNA, 32 nt, Human
ggaggaggaagagggcaguggggaaggggccu

SEQ ID NO: 452414 - RNA, 32 nt, Human
ggaggaggaaggaaagaaagaaagcgagggag

SEQ ID NO: 452415 - RNA, 32 nt, Human
ggaggaggaagggagcaccagugaagaaucag

SEQ ID NO: 452416 - RNA, 20 nt, Human
ggaggaggaaguggugaggu

SEQ ID NO: 452417 - RNA, 32 nt, Human
ggaggaggacacgaaagugaacuccaccguca

SEQ ID NO: 452418 - RNA, 32 nt, Human
ggaggaggagaaagcugaccgcuuaggcccgg

SEQ ID NO: 452419 - RNA, 32 nt, Human
ggaggaggagaaagguggaggagaagggaggg

SEQ ID NO: 452420 - RNA, 32 nt, Human
ggaggaggagagaaaggcggcucuucccgugc

SEQ ID NO: 452421 - RNA, 32 nt, Human
ggaggaggagagaauggaauggcuggacuuug

SEQ ID NO: 452422 - RNA, 32 nt, Human
ggaggaggagcagcaccuccuacuggccugac

SEQ ID NO: 452423 - RNA, 32 nt, Human
ggaggaggagccgugacccuguggaaggugcg

SEQ ID NO: 452424 - RNA, 32 nt, Human
ggaggaggaggaagaaaaugagagugggaagg

SEQ ID NO: 452425 - RNA, 32 nt, Human
ggaggaggaggaagaagaggaggaggaggagg

SEQ ID NO: 452426 - RNA, 32 nt, Human
ggaggaggaggaagaagaggaggagggaggaa

SEQ ID NO: 452427 - RNA, 32 nt, Human
ggaggaggaggaagaggaggagaagguagcua

SEQ ID NO: 452428 - RNA, 32 nt, Human
ggaggaggaggaagaggaggagcgcagucgga

SEQ ID NO: 452429 - RNA, 32 nt, Human
ggaggaggaggaagaggaggaggaggaaggga

SEQ ID NO: 452430 - RNA, 32 nt, Human
ggaggaggaggaagagggcaguggggaagggg

SEQ ID NO: 452431 - RNA, 32 nt, Human
ggaggaggaggaagaggggagcacaaaggauc

SEQ ID NO: 452432 - RNA, 32 nt, Human
ggaggaggaggaagaggggauggagcaggggc

SEQ ID NO: 452433 - RNA, 32 nt, Human
ggaggaggaggaagagguauggcaugggagga

SEQ ID NO: 452434 - RNA, 32 nt, Human
ggaggaggaggaagagguggaggaggaggagg

SEQ ID NO: 452435 - RNA, 32 nt, Human
ggaggaggaggagagcgcgagugagcaggggc

SEQ ID NO: 452436 - RNA, 32 nt, Human
ggaggaggaggagagcgcgggcuggcgcuugc

SEQ ID NO: 452437 - RNA, 32 nt, Human
ggaggaggaggaggagaaggaggagagagagg

SEQ ID NO: 452438 - RNA, 32 nt, Human
ggaggaggaggaggagaaggaggaggaggaag

SEQ ID NO: 452439 - RNA, 32 nt, Human
ggaggaggaggaggagaaggaggagggcagcu

SEQ ID NO: 452440 - RNA, 32 nt, Human
ggaggaggaggaggagcgcgagcucagcgaca

SEQ ID NO: 452441 - RNA, 32 nt, Human
ggaggaggaggaggagcgcgagcucagcgaua

SEQ ID NO: 452442 - RNA, 32 nt, Human
ggaggaggaggaggaggaagaagagguagcgg

SEQ ID NO: 452443 - RNA, 32 nt, Human
ggaggaggaggaggaggaagaggaggagaagg

SEQ ID NO: 452444 - RNA, 32 nt, Human
ggaggaggaggaggaggaagagggcagugggg

SEQ ID NO: 452445 - RNA, 32 nt, Human
ggaggaggaggaggaggaagagguggaggagg

SEQ ID NO: 452446 - RNA, 32 nt, Human
ggaggaggaggaggaggaggaagaagagguag

SEQ ID NO: 452447 - RNA, 32 nt, Human
ggaggaggaggaggaggaggaagagggcagug

SEQ ID NO: 452448 - RNA, 32 nt, Human
ggaggaggaggaggaggaggacgcgggccugg

SEQ ID NO: 452449 - RNA, 32 nt, Human
ggaggaggaggaggaggaggagaggggccucg

SEQ ID NO: 452450 - RNA, 32 nt, Human
ggaggaggaggaggaggaggaggagagcgcgg

SEQ ID NO: 452451 - RNA, 32 nt, Human
ggaggaggaggaggaggaggaggaggaggagg

SEQ ID NO: 452452 - RNA, 32 nt, Human
ggaggaggaggaggaggaggaggaggaggggg

SEQ ID NO: 452453 - RNA, 32 nt, Human
ggaggaggaggaggaggaggaggaggccaggu

SEQ ID NO: 452454 - RNA, 32 nt, Human
ggaggaggaggaggaggaggaggaggcggcgg

SEQ ID NO: 452455 - RNA, 32 nt, Human
ggaggaggaggaggaggaggaggagggggccg

SEQ ID NO: 452456 - RNA, 32 nt, Human
ggaggaggaggaggaggaggaggagggggcgg

SEQ ID NO: 452457 - RNA, 32 nt, Human
ggaggaggaggaggaggaggaggagguggcgg

SEQ ID NO: 452458 - RNA, 32 nt, Human
ggaggaggaggaggaggaggaggcaaaguuag

SEQ ID NO: 452459 - RNA, 32 nt, Human
ggaggaggaggaggaggaggagggggccgaga

SEQ ID NO: 452460 - RNA, 32 nt, Human
ggaggaggaggaggaggaggagggggcggcca

SEQ ID NO: 452461 - RNA, 32 nt, Human
ggaggaggaggaggaggaggaggucguggaug

SEQ ID NO: 452462 - RNA, 32 nt, Human
ggaggaggaggaggaggagggggccgagaaga

SEQ ID NO: 452463 - RNA, 32 nt, Human
ggaggaggaggaggaggagggggcggccaugg

SEQ ID NO: 452464 - RNA, 32 nt, Human
ggaggaggaggaggaggaggugguggaggagg

SEQ ID NO: 452465 - RNA, 32 nt, Human
ggaggaggaggaggagguugcagugagccgag

SEQ ID NO: 452466 - RNA, 32 nt, Human
ggaggaggaggcagagaggaguggagggcgga

SEQ ID NO: 452467 - RNA, 32 nt, Human
ggaggaggaggcggaggaggcggaggaggagg

SEQ ID NO: 452468 - RNA, 32 nt, Human
ggaggaggaggcggaggaggcgguggagggga

SEQ ID NO: 452469 - RNA, 32 nt, Human
ggaggaggaggcggcggcggcggugggccccg

SEQ ID NO: 452470 - RNA, 32 nt, Human
ggaggaggaggcggcgugcagggaggagaaaa

SEQ ID NO: 452471 - RNA, 32 nt, Human
ggaggaggagggaaggaagauggcggccgugg

SEQ ID NO: 452472 - RNA, 32 nt, Human
ggaggaggagggcacgugucugccuccccugg

SEQ ID NO: 452473 - RNA, 21 nt, Human
ggaggaggaggggagugcucu

SEQ ID NO: 452474 - RNA, 32 nt, Human
ggaggaggagggggaggaagaggagguggaga

SEQ ID NO: 452475 - RNA, 32 nt, Human
ggaggaggagggggaggagggagcggagaucu

SEQ ID NO: 452476 - RNA, 20 nt, Human
ggaggaggagguugcaguga

SEQ ID NO: 452477 - RNA, 32 nt, Human
ggaggaggagugaaggcggcggcggcggagga

SEQ ID NO: 452478 - RNA, 32 nt, Human
ggaggaggaguuccgccccacccucuacagcc

SEQ ID NO: 452479 - RNA, 22 nt, Human
ggaggaggaguugacagucucu

SEQ ID NO: 452480 - RNA, 18 nt, Human
ggaggaggaucuggggga

SEQ ID NO: 452481 - RNA, 17 nt, Human
ggaggaggaugaggagg

SEQ ID NO: 452482 - RNA, 32 nt, Human
ggaggaggauucugccuuuccuccagugccau

SEQ ID NO: 452483 - RNA, 32 nt, Human
ggaggaggcaaaguuagaguuggggcuggcgc

SEQ ID NO: 452484 - RNA, 26 nt, Human
ggaggaggcaggcccaagccccccaa

SEQ ID NO: 452485 - RNA, 32 nt, Human
ggaggaggcaggcggcggccccgguggcuccc

SEQ ID NO: 452486 - RNA, 32 nt, Human
ggaggaggcaucuccccucaugccccgcaaag

SEQ ID NO: 452487 - RNA, 19 nt, Human
ggaggaggccaggagggag

SEQ ID NO: 452488 - RNA, 32 nt, Human
ggaggaggccccggaggaggaggcguuggagg

SEQ ID NO: 452489 - RNA, 32 nt, Human
ggaggaggccgacacaccacaccuacacuccc

SEQ ID NO: 452490 - RNA, 20 nt, Human
ggaggaggccgagcgggagg

SEQ ID NO: 452491 - RNA, 19 nt, Human
ggaggaggccggccggagg

SEQ ID NO: 452492 - RNA, 32 nt, Human
ggaggaggccuuggaagaguccggccuggcuu

SEQ ID NO: 452493 - RNA, 32 nt, Human
ggaggaggcgaggaggagagacugcuccauaa

SEQ ID NO: 452494 - RNA, 20 nt, Human
ggaggaggcggaggaggagg

SEQ ID NO: 452495 - RNA, 18 nt, Human
ggaggaggcggcggcggg

SEQ ID NO: 452496 - RNA, 20 nt, Human
ggaggaggcggcggcugcgg

SEQ ID NO: 452497 - RNA, 32 nt, Human
ggaggaggcggcgugcagggaggagaaaaagc

SEQ ID NO: 452498 - RNA, 18 nt, Human
ggaggaggcgugguggga

SEQ ID NO: 452499 - RNA, 20 nt, Human
ggaggaggcguugugaggug

SEQ ID NO: 452500 - RNA, 24 nt, Human
ggaggaggcucuggaguccugcuc

SEQ ID NO: 452501 - RNA, 21 nt, Human
ggaggaggcucuguauguccu

SEQ ID NO: 452502 - RNA, 32 nt, Human
ggaggaggcugcagccgugguccaaccaggag

SEQ ID NO: 452503 - RNA, 24 nt, Human
ggaggaggcugggaguaguuuucu

SEQ ID NO: 452504 - RNA, 23 nt, Human
ggaggaggcuuuuaugugacuuu

SEQ ID NO: 452505 - RNA, 32 nt, Human
ggaggagggaaacugcccagcuuucccccggc

SEQ ID NO: 452506 - RNA, 32 nt, Human
ggaggagggaaagggguggcucuggcaggaaa

SEQ ID NO: 452507 - RNA, 32 nt, Human
ggaggagggaagagaaauaaacguggcagcgc

SEQ ID NO: 452508 - RNA, 32 nt, Human
ggaggagggagagagauggagaggaggggaga

SEQ ID NO: 452509 - RNA, 31 nt, Human
ggaggagggagagggaggucacuggaaaggg

SEQ ID NO: 452510 - RNA, 32 nt, Human
ggaggagggagaugccuggggaggggcuccug

SEQ ID NO: 452511 - RNA, 32 nt, Human
ggaggagggagccaggcuucgcuucaaggcgg

SEQ ID NO: 452512 - RNA, 32 nt, Human
ggaggagggaggaggaagagagggagggaggc

SEQ ID NO: 452513 - RNA, 32 nt, Human
ggaggagggaggauuuccucugugcagcuuuc

SEQ ID NO: 452514 - RNA, 32 nt, Human
ggaggagggaggcaggaggugagguuggaagu

SEQ ID NO: 452515 - RNA, 32 nt, Human
ggaggagggaggugcugugagccuagcgagau

SEQ ID NO: 452516 - RNA, 18 nt, Human
ggaggagggagguggaga

SEQ ID NO: 452517 - RNA, 32 nt, Human
ggaggagggaguggagagacugacuggccgug

SEQ ID NO: 452518 - RNA, 18 nt, Human
ggaggagggaugcggagg

SEQ ID NO: 452519 - RNA, 17 nt, Human
ggaggagggccaggaga

SEQ ID NO: 452520 - RNA, 18 nt, Human
ggaggagggcugaauaga

SEQ ID NO: 452521 - RNA, 32 nt, Human
ggaggagggcugggaguaugacaccuucggcu

SEQ ID NO: 452522 - RNA, 32 nt, Human
ggaggagggcuggucuccgcuccucaggggcu

SEQ ID NO: 452523 - RNA, 18 nt, Human
ggaggaggggacggauga

SEQ ID NO: 452524 - RNA, 16 nt, Human
ggaggaggggaggaga

SEQ ID NO: 452525 - RNA, 32 nt, Human
ggaggaggggagggaggaagaaggaagagagg

SEQ ID NO: 452526 - RNA, 32 nt, Human
ggaggaggggcagagccaggaggcaguggggc

SEQ ID NO: 452527 - RNA, 18 nt, Human
ggaggaggggccagggca

SEQ ID NO: 452528 - RNA, 32 nt, Human
ggaggagggggaggaggaagaagagaaggaag

SEQ ID NO: 452529 - RNA, 32 nt, Human
ggaggagggggaggaggagcgggaggagggac

SEQ ID NO: 452530 - RNA, 17 nt, Human
ggaggagggggccgaga

SEQ ID NO: 452531 - RNA, 32 nt, Human
ggaggagggggcggccggcuucugcugcagcc

SEQ ID NO: 452532 - RNA, 17 nt, Human
ggaggaggggugagaga

SEQ ID NO: 452533 - RNA, 32 nt, Human
ggaggaggguaccacucaggaggcuagguaac

SEQ ID NO: 452534 - RNA, 32 nt, Human
ggaggagggugagagagaagcugggagagcag

SEQ ID NO: 452535 - RNA, 18 nt, Human
ggaggaggguggcggaga

SEQ ID NO: 452536 - RNA, 32 nt, Human
ggaggaggguuggauaccuguggugugacacc

SEQ ID NO: 452537 - RNA, 23 nt, Human
ggaggagguaaacauuggagaug

SEQ ID NO: 452538 - RNA, 19 nt, Human
ggaggagguauggggauga

SEQ ID NO: 452539 - RNA, 18 nt, Human
ggaggaggucguggauga

SEQ ID NO: 452540 - RNA, 17 nt, Human
ggaggaggugccagaga

SEQ ID NO: 452541 - RNA, 18 nt, Human
ggaggaggugccuagagg

SEQ ID NO: 452542 - RNA, 20 nt, Human
ggaggagguggaggaggaga

SEQ ID NO: 452543 - RNA, 32 nt, Human
ggaggagguggaggaggagagguggcaggagg

SEQ ID NO: 452544 - RNA, 32 nt, Human
ggaggagguggaggaggaggaagaggagaagg

SEQ ID NO: 452545 - RNA, 19 nt, Human
ggaggagguggcggcgaga

SEQ ID NO: 452546 - RNA, 17 nt, Human
ggaggagguggcggcgg

SEQ ID NO: 452547 - RNA, 32 nt, Human
ggaggagguuccgucagcagcuggcaguagcc

SEQ ID NO: 452548 - RNA, 18 nt, Human
ggaggagguugggaggug

SEQ ID NO: 452549 - RNA, 31 nt, Human
ggaggagucauguuggagguuggggaagaac

SEQ ID NO: 452550 - RNA, 32 nt, Human
ggaggagugauuuggaaaacuauaggcuggaa

SEQ ID NO: 452551 - RNA, 32 nt, Human
ggaggaguggaguggagcucuugccuuguuac

SEQ ID NO: 452552 - RNA, 32 nt, Human
ggaggaguggcagaagaaagauagguuggaga

SEQ ID NO: 452553 - RNA, 32 nt, Human
ggaggagugggagugccugcagccugaucaga

SEQ ID NO: 452554 - RNA, 32 nt, Human
ggaggaguguggaggaagcgggguccucagcu

SEQ ID NO: 452555 - RNA, 32 nt, Human
ggaggaguuagacuugccucgugggaugagag

SEQ ID NO: 452556 - RNA, 32 nt, Human
ggaggaguuagaggaggaggaggaggaggaag

SEQ ID NO: 452557 - RNA, 20 nt, Human
ggaggaguuccgggggccag

SEQ ID NO: 452558 - RNA, 20 nt, Human
ggaggaguuucaccauguug

SEQ ID NO: 452559 - RNA, 24 nt, Human
ggaggaguuucaccauguuggcca

SEQ ID NO: 452560 - RNA, 32 nt, Human
ggaggauacaggcugaccggguggcgagaugu

SEQ ID NO: 452561 - RNA, 20 nt, Human
ggaggauacaguucaggaua

SEQ ID NO: 452562 - RNA, 21 nt, Human
ggaggauagcuugagcccagg

SEQ ID NO: 452563 - RNA, 32 nt, Human
ggaggauagguuaagaaaggaaagggacagaa

SEQ ID NO: 452564 - RNA, 32 nt, Human
ggaggauaguaagagagggagcagggagacca

SEQ ID NO: 452565 - RNA, 32 nt, Human
ggaggaucaaacacugucagaauugcugaaau

SEQ ID NO: 452566 - RNA, 32 nt, Human
ggaggaucacaaggucaggagaucgagaccau

SEQ ID NO: 452567 - RNA, 32 nt, Human
ggaggaucacaugaggccaggaauucaagacc

SEQ ID NO: 452568 - RNA, 32 nt, Human
ggaggaucacugagaccagccugggcaacaua

SEQ ID NO: 452569 - RNA, 32 nt, Human
ggaggaucacuggaguucgaggcugcagugag

SEQ ID NO: 452570 - RNA, 32 nt, Human
ggaggaucacuugaagccaggaguuccagacc

SEQ ID NO: 452571 - RNA, 32 nt, Human
ggaggaucacuugaagccaggaguuuaaaacc

SEQ ID NO: 452572 - RNA, 21 nt, Human
ggaggaucacuugagcccagg

SEQ ID NO: 452573 - RNA, 32 nt, Human
ggaggaucacuugagcccaggagauuaagacu

SEQ ID NO: 452574 - RNA, 32 nt, Human
ggaggaucacuugagcccaggagauugaggcu

SEQ ID NO: 452575 - RNA, 32 nt, Human
ggaggaucacuugagcccuggagaucgaggcu

SEQ ID NO: 452576 - RNA, 32 nt, Human
ggaggaucacuugagccuaggaauucaagacc

SEQ ID NO: 452577 - RNA, 32 nt, Human
ggaggaucacuugagccugaguucaacacugc

SEQ ID NO: 452578 - RNA, 32 nt, Human
ggaggaucacuugagccugggggacugaggcu

SEQ ID NO: 452579 - RNA, 32 nt, Human
ggaggaucacuugaggccaagaguuugagacc

SEQ ID NO: 452580 - RNA, 32 nt, Human
ggaggaucacuugaggccaggacuuugagacc

SEQ ID NO: 452581 - RNA, 32 nt, Human
ggaggaucacuugaggccaggagucugagaca

SEQ ID NO: 452582 - RNA, 32 nt, Human
ggaggaucacuugaggccaggaguucaagacc

SEQ ID NO: 452583 - RNA, 32 nt, Human
ggaggaucacuugaggccaggaguucaagauc

SEQ ID NO: 452584 - RNA, 32 nt, Human
ggaggaucacuugaggccaggaguuugagacc

SEQ ID NO: 452585 - RNA, 32 nt, Human
ggaggaucacuugaggccaggaguuugggacc

SEQ ID NO: 452586 - RNA, 32 nt, Human
ggaggaucacuugaggccagugagcugugauc

SEQ ID NO: 452587 - RNA, 32 nt, Human
ggaggaucacuuggagccaggaguuugagacc

SEQ ID NO: 452588 - RNA, 32 nt, Human
ggaggaucagccacaguugacucaacaaagac

SEQ ID NO: 452589 - RNA, 32 nt, Human
ggaggaucauuugagccugggaauuugagccc

SEQ ID NO: 452590 - RNA, 32 nt, Human
ggaggaucauuugaggccaggaguuugagacc

SEQ ID NO: 452591 - RNA, 32 nt, Human
ggaggauccaugucggcucugccugcagugac

SEQ ID NO: 452592 - RNA, 32 nt, Human
ggaggaucccacccuucugcucugaugucuuc

SEQ ID NO: 452593 - RNA, 21 nt, Human
ggaggaucccuugagcccagg

SEQ ID NO: 452594 - RNA, 32 nt, Human
ggaggaucccuugaucccuuguggccaggagu

SEQ ID NO: 452595 - RNA, 32 nt, Human
ggaggauccugaggacccccugguugcagcca

SEQ ID NO: 452596 - RNA, 32 nt, Human
ggaggaucgcagucagcagagcagggcugagg

SEQ ID NO: 452597 - RNA, 21 nt, Human
ggaggaucgcuugagcccagg

SEQ ID NO: 452598 - RNA, 32 nt, Human
ggaggaucgcuugaggccagaaguucaagacc

SEQ ID NO: 452599 - RNA, 32 nt, Human
ggaggaucgcuugaggccaggaguuugagacc

SEQ ID NO: 452600 - RNA, 32 nt, Human
ggaggaucguuugagccugagaguuugagacc

SEQ ID NO: 452601 - RNA, 21 nt, Human
ggaggaucucuugagcccagg

SEQ ID NO: 452602 - RNA, 32 nt, Human
ggaggaucucuugaggccaggaguugcagacc

SEQ ID NO: 452603 - RNA, 21 nt, Human
ggaggaucuggagagcugcug

SEQ ID NO: 452604 - RNA, 32 nt, Human
ggaggaugacuugaggccaggaguuggagacc

SEQ ID NO: 452605 - RNA, 32 nt, Human
ggaggaugaggcaagagaaucgcuugaaccua

SEQ ID NO: 452606 - RNA, 32 nt, Human
ggaggaugaggcaggagaaucgcuugaaccug

SEQ ID NO: 452607 - RNA, 32 nt, Human
ggaggaugaggcaggagaauugcuugaaaccc

SEQ ID NO: 452608 - RNA, 32 nt, Human
ggaggaugaggcaggagaauugcuugaacccg

SEQ ID NO: 452609 - RNA, 32 nt, Human
ggaggaugaggcaggaggaucucuugagccca

SEQ ID NO: 452610 - RNA, 32 nt, Human
ggaggaugagucaggagaauugcuugaaccca

SEQ ID NO: 452611 - RNA, 20 nt, Human
ggaggaugcauguggaucau

SEQ ID NO: 452612 - RNA, 32 nt, Human
ggaggaugccguggcgucuccucccaggagcc

SEQ ID NO: 452613 - RNA, 32 nt, Human
ggaggaugccuagaagauguugggaacagaag

SEQ ID NO: 452614 - RNA, 32 nt, Human
ggaggaugcuguuuaucugucaccuccacuug

SEQ ID NO: 452615 - RNA, 21 nt, Human
ggaggauggagaagagagaga

SEQ ID NO: 452616 - RNA, 32 nt, Human
ggaggauggcaaagagagucgcaucucagugc

SEQ ID NO: 452617 - RNA, 32 nt, Human
ggaggauggcauuccauacagcaaaggagaag

SEQ ID NO: 452618 - RNA, 32 nt, Human
ggaggauggcucgaagccaggaguucgaaacc

SEQ ID NO: 452619 - RNA, 30 nt, Human
ggaggauggcuggggccaggggucugggag

SEQ ID NO: 452620 - RNA, 32 nt, Human
ggaggauggcuugaagccaguaguucaagacc

SEQ ID NO: 452621 - RNA, 21 nt, Human
ggaggauggcuugagcccagg

SEQ ID NO: 452622 - RNA, 32 nt, Human
ggaggauggcuugaggccagagguuugagacc

SEQ ID NO: 452623 - RNA, 30 nt, Human
ggaggaugggucaucuggaacccacuuaca

SEQ ID NO: 452624 - RNA, 32 nt, Human
ggaggauggucagccuuggagcaucucucaau

SEQ ID NO: 452625 - RNA, 32 nt, Human
ggaggauguccaccuugcuugguggcucuggg

SEQ ID NO: 452626 - RNA, 22 nt, Human
ggaggaugugauauguggggga

SEQ ID NO: 452627 - RNA, 32 nt, Human
ggaggaugugguucuggaugacgagaauccac

SEQ ID NO: 452628 - RNA, 19 nt, Human
ggaggauuacuccaugcca

SEQ ID NO: 452629 - RNA, 32 nt, Human
ggaggauuacuugagcccuggaggucaaagcu

SEQ ID NO: 452630 - RNA, 19 nt, Human
ggaggauuacuugaggcca

SEQ ID NO: 452631 - RNA, 32 nt, Human
ggaggauuacuugaggccagaaguuugagacu

SEQ ID NO: 452632 - RNA, 32 nt, Human
ggaggauuacuugaggccaggaguucaagacc

SEQ ID NO: 452633 - RNA, 32 nt, Human
ggaggauucaguacaggggcugagggaggagg

SEQ ID NO: 452634 - RNA, 21 nt, Human
ggaggauugccugagcccagg

SEQ ID NO: 452635 - RNA, 32 nt, Human
ggaggauugccugaggccaggaguuugacacc

SEQ ID NO: 452636 - RNA, 32 nt, Human
ggaggauugccugaggccagggguuugagacc

SEQ ID NO: 452637 - RNA, 21 nt, Human
ggaggauugcuuaagcccagg

SEQ ID NO: 452638 - RNA, 19 nt, Human
ggaggauugcuugaagcca

SEQ ID NO: 452639 - RNA, 20 nt, Human
ggaggauugcuugagcccag

SEQ ID NO: 452640 - RNA, 21 nt, Human
ggaggauugcuugagcccagg

SEQ ID NO: 452641 - RNA, 21 nt, Human
ggaggauugcuugagcccugg

SEQ ID NO: 452642 - RNA, 32 nt, Human
ggaggauugcuugagcccuggaguucaaggcu

SEQ ID NO: 452643 - RNA, 21 nt, Human
ggaggauugcuugagcucagg

SEQ ID NO: 452644 - RNA, 21 nt, Human
ggaggauugcuugaggccagg

SEQ ID NO: 452645 - RNA, 32 nt, Human
ggaggauugcuugaggccaggaauucgagacc

SEQ ID NO: 452646 - RNA, 32 nt, Human
ggaggauugcuugaggccaggaguuugagacc

SEQ ID NO: 452647 - RNA, 20 nt, Human
ggaggauugcuugaguccag

SEQ ID NO: 452648 - RNA, 32 nt, Human
ggaggauuugagggagcucacugccuaccugg

SEQ ID NO: 452649 - RNA, 32 nt, Human
ggaggauuuggaauuaguccugggcgaccuga

SEQ ID NO: 452650 - RNA, 32 nt, Human
ggaggauuuguucaucagaugcugggaaggaa

SEQ ID NO: 452651 - RNA, 32 nt, Human
ggaggcaaagccaggccaggguacagugagaa

SEQ ID NO: 452652 - RNA, 32 nt, Human
ggaggcaaaggcaggagaguugcuugaacuga

SEQ ID NO: 452653 - RNA, 32 nt, Human
ggaggcaaaggugggagaaucgcgugagccca

SEQ ID NO: 452654 - RNA, 32 nt, Human
ggaggcaaaucagcugggcccugcccucacag

SEQ ID NO: 452655 - RNA, 18 nt, Human
ggaggcaacaucuccucu

SEQ ID NO: 452656 - RNA, 32 nt, Human
ggaggcaacauguacagaugaaggugaaccac

SEQ ID NO: 452657 - RNA, 32 nt, Human
ggaggcaacgcaagccugaguccuuucuuccu

SEQ ID NO: 452658 - RNA, 32 nt, Human
ggaggcaagggaggggcagcagaaccaagaca

SEQ ID NO: 452659 - RNA, 17 nt, Human
ggaggcaauggcuccaa

SEQ ID NO: 452660 - RNA, 17 nt, Human
ggaggcacaaaacccca

SEQ ID NO: 452661 - RNA, 32 nt, Human
ggaggcacaagccugaagcacucuucuaccaa

SEQ ID NO: 452662 - RNA, 32 nt, Human
ggaggcacagcagccaaguggggaggcaggug

SEQ ID NO: 452663 - RNA, 32 nt, Human
ggaggcacagcaguuucaccaucuuugaggug

SEQ ID NO: 452664 - RNA, 32 nt, Human
ggaggcacaggcccucauccacccucuggcac

SEQ ID NO: 452665 - RNA, 32 nt, Human
ggaggcacagggccgcccucugugcugaggcc

SEQ ID NO: 452666 - RNA, 32 nt, Human
ggaggcacaugguccugucucacgucacaggg

SEQ ID NO: 452667 - RNA, 32 nt, Human
ggaggcaccacugucacuggccaagggcuggc

SEQ ID NO: 452668 - RNA, 32 nt, Human
ggaggcaccuuuggguucccagugcccagcac

SEQ ID NO: 452669 - RNA, 32 nt, Human
ggaggcacgcggagcugugcaggcagaagcgg

SEQ ID NO: 452670 - RNA, 32 nt, Human
ggaggcacggcagaggaggcagggccgacggc

SEQ ID NO: 452671 - RNA, 32 nt, Human
ggaggcacgucaggcaaugacacaccauuccu

SEQ ID NO: 452672 - RNA, 32 nt, Human
ggaggcacuuaggggagacucggauggggaca

SEQ ID NO: 452673 - RNA, 32 nt, Human
ggaggcagaagagccgcgaggagccagcggag

SEQ ID NO: 452674 - RNA, 32 nt, Human
ggaggcagaagaggaagucagagcgaugugcu

SEQ ID NO: 452675 - RNA, 32 nt, Human
ggaggcagacagguuucugggcagaagggggu

SEQ ID NO: 452676 - RNA, 32 nt, Human
ggaggcagagacaggcaggucgcuugagcuca

SEQ ID NO: 452677 - RNA, 23 nt, Human
ggaggcagagagagggaggcaga

SEQ ID NO: 452678 - RNA, 32 nt, Human
ggaggcagagauuacugugggccaaggaaugg

SEQ ID NO: 452679 - RNA, 32 nt, Human
ggaggcagagcgcggcccugcgucagagcgag

SEQ ID NO: 452680 - RNA, 19 nt, Human
ggaggcagaggaccuggag

SEQ ID NO: 452681 - RNA, 22 nt, Human
ggaggcagaggacggcccggag

SEQ ID NO: 452682 - RNA, 21 nt, Human
ggaggcagaggcagaggcaga

SEQ ID NO: 452683 - RNA, 32 nt, Human
ggaggcagaggcaggagaaucgcuugaaccca

SEQ ID NO: 452684 - RNA, 32 nt, Human
ggaggcagaggcaggagaaucguuugaaccca

SEQ ID NO: 452685 - RNA, 32 nt, Human
ggaggcagaggcaggagaauugcuugaacucg

SEQ ID NO: 452686 - RNA, 32 nt, Human
ggaggcagaggcaggagaauugcuugagcccg

SEQ ID NO: 452687 - RNA, 32 nt, Human
ggaggcagaggcaggaggauagcuugagccca

SEQ ID NO: 452688 - RNA, 32 nt, Human
ggaggcagaggcaggaggaucgcuugagccca

SEQ ID NO: 452689 - RNA, 32 nt, Human
ggaggcagaggcaggaggauugcuuaaggcca

SEQ ID NO: 452690 - RNA, 32 nt, Human
ggaggcagaggccaggccuccucaaguuggcc

SEQ ID NO: 452691 - RNA, 32 nt, Human
ggaggcagaggcgggaggauugcuugaggccg

SEQ ID NO: 452692 - RNA, 32 nt, Human
ggaggcagaggcugcacucuagccugggcaac

SEQ ID NO: 452693 - RNA, 20 nt, Human
ggaggcagaggcugcaguga

SEQ ID NO: 452694 - RNA, 32 nt, Human
ggaggcagaggcugggaaugggagcaguaagc

SEQ ID NO: 452695 - RNA, 22 nt, Human
ggaggcagagggggcccuggag

SEQ ID NO: 452696 - RNA, 22 nt, Human
ggaggcagaggggugccuggag

SEQ ID NO: 452697 - RNA, 32 nt, Human
ggaggcagaggugagagaaucgcuugagccca

SEQ ID NO: 452698 - RNA, 32 nt, Human
ggaggcagaggugagagaaucgugcuugaaca

SEQ ID NO: 452699 - RNA, 32 nt, Human
ggaggcagagguggaggcgcuuugaaagccgu

SEQ ID NO: 452700 - RNA, 32 nt, Human
ggaggcagaggugggagaaucgcuugaacaug

SEQ ID NO: 452701 - RNA, 32 nt, Human
ggaggcagaggugggaggauugcuugguccca

SEQ ID NO: 452702 - RNA, 20 nt, Human
ggaggcagagguugcaauga

SEQ ID NO: 452703 - RNA, 21 nt, Human
ggaggcagagguugcaaugag

SEQ ID NO: 452704 - RNA, 20 nt, Human
ggaggcagagguugcagcga

SEQ ID NO: 452705 - RNA, 21 nt, Human
ggaggcagagguugcagcgag

SEQ ID NO: 452706 - RNA, 20 nt, Human
ggaggcagagguugcaguga

SEQ ID NO: 452707 - RNA, 21 nt, Human
ggaggcagagguugcagugag

SEQ ID NO: 452708 - RNA, 32 nt, Human
ggaggcagagguugcagugaggugagauagcg

SEQ ID NO: 452709 - RNA, 32 nt, Human
ggaggcagaguccucgcguggucuccugccuc

SEQ ID NO: 452710 - RNA, 32 nt, Human
ggaggcagaguuugcagugagcugagaucaug

SEQ ID NO: 452711 - RNA, 32 nt, Human
ggaggcagaguuugcagugagcugagauggug

SEQ ID NO: 452712 - RNA, 32 nt, Human
ggaggcagaguuugccgugagcugagauugug

SEQ ID NO: 452713 - RNA, 32 nt, Human
ggaggcagaucuuuccaagguggaaagguaau

SEQ ID NO: 452714 - RNA, 32 nt, Human
ggaggcagaugaucauggucugccucaacugu

SEQ ID NO: 452715 - RNA, 32 nt, Human
ggaggcagauguccugucugugagccaguucc

SEQ ID NO: 452716 - RNA, 32 nt, Human
ggaggcagcaacggagaguggggaaguggagc

SEQ ID NO: 452717 - RNA, 20 nt, Human
ggaggcagcagacacuggag

SEQ ID NO: 452718 - RNA, 21 nt, Human
ggaggcagcagccagaugaga

SEQ ID NO: 452719 - RNA, 20 nt, Human
ggaggcagcaggagcaguga

SEQ ID NO: 452720 - RNA, 32 nt, Human
ggaggcagcaggggucagccugggcaggaacc

SEQ ID NO: 452721 - RNA, 19 nt, Human
ggaggcagccaaggcggag

SEQ ID NO: 452722 - RNA, 21 nt, Human
ggaggcagccacaggcgagug

SEQ ID NO: 452723 - RNA, 19 nt, Human
ggaggcagccaugcugggg

SEQ ID NO: 452724 - RNA, 22 nt, Human
ggaggcagccaugggcugggag

SEQ ID NO: 452725 - RNA, 23 nt, Human
ggaggcagccaugggcugggaga

SEQ ID NO: 452726 - RNA, 18 nt, Human
ggaggcagcccccuguga

SEQ ID NO: 452727 - RNA, 18 nt, Human
ggaggcagccccuaggag

SEQ ID NO: 452728 - RNA, 25 nt, Human
ggaggcagccgaacagaacugcaga

SEQ ID NO: 452729 - RNA, 32 nt, Human
ggaggcagccuccuaguugcugaaaguuaagg

SEQ ID NO: 452730 - RNA, 32 nt, Human
ggaggcagccugggugggugagccauggggca

SEQ ID NO: 452731 - RNA, 32 nt, Human
ggaggcagccuucggggccugcauuugagaau

SEQ ID NO: 452732 - RNA, 21 nt, Human
ggaggcagcggaggcugcucg

SEQ ID NO: 452733 - RNA, 32 nt, Human
ggaggcagcggccagggcugggccagggcgag

SEQ ID NO: 452734 - RNA, 32 nt, Human
ggaggcagcggcggcagcaggagacgcagcgg

SEQ ID NO: 452735 - RNA, 32 nt, Human
ggaggcagcggcuggagaauugcuugaaccug

SEQ ID NO: 452736 - RNA, 32 nt, Human
ggaggcagcgugaaagaacagaagggcaucug

SEQ ID NO: 452737 - RNA, 18 nt, Human
ggaggcagcucacuggag

SEQ ID NO: 452738 - RNA, 18 nt, Human
ggaggcagcuccacguca

SEQ ID NO: 452739 - RNA, 32 nt, Human
ggaggcaggaagaucacuugagccugggaugu

SEQ ID NO: 452740 - RNA, 32 nt, Human
ggaggcaggagauggcaauggaagcgacagcu

SEQ ID NO: 452741 - RNA, 32 nt, Human
ggaggcaggagccacggguggggccaggccac

SEQ ID NO: 452742 - RNA, 23 nt, Human
ggaggcaggagcggcggcgacgg

SEQ ID NO: 452743 - RNA, 32 nt, Human
ggaggcaggagcuggggagugggagccuauga

SEQ ID NO: 452744 - RNA, 32 nt, Human
ggaggcaggaggaucacuugagcccaggaguu

SEQ ID NO: 452745 - RNA, 23 nt, Human
ggaggcaggaggcggcugcgcgg

SEQ ID NO: 452746 - RNA, 32 nt, Human
ggaggcaggaggugagguuggaaguugagcaa

SEQ ID NO: 452747 - RNA, 19 nt, Human
ggaggcaggauaccuggag

SEQ ID NO: 452748 - RNA, 20 nt, Human
ggaggcaggcauggcccugg

SEQ ID NO: 452749 - RNA, 19 nt, Human
ggaggcaggcgccgcggag

SEQ ID NO: 452750 - RNA, 32 nt, Human
ggaggcaggcugggugcaguggcucaugccua

SEQ ID NO: 452751 - RNA, 32 nt, Human
ggaggcaggcuggugguggagucauggcugca

SEQ ID NO: 452752 - RNA, 32 nt, Human
ggaggcagggaaaugcgguauuuacugggaac

SEQ ID NO: 452753 - RNA, 32 nt, Human
ggaggcagggagccaccuccucagcuucccug

SEQ ID NO: 452754 - RNA, 26 nt, Human
ggaggcagggagucuggugccugcag

SEQ ID NO: 452755 - RNA, 32 nt, Human
ggaggcagggauggggacaggguggguggcuu

SEQ ID NO: 452756 - RNA, 22 nt, Human
ggaggcagggcagagccucagg

SEQ ID NO: 452757 - RNA, 32 nt, Human
ggaggcagggcaggagguuggagcagcccugc

SEQ ID NO: 452758 - RNA, 22 nt, Human
ggaggcagggcagggccucugg

SEQ ID NO: 452759 - RNA, 24 nt, Human
ggaggcagggcagggccucuggga

SEQ ID NO: 452760 - RNA, 32 nt, Human
ggaggcaggggaggggcagcagaaccaaggca

SEQ ID NO: 452761 - RNA, 32 nt, Human
ggaggcaggggcagaggucagaaggggugucu

SEQ ID NO: 452762 - RNA, 17 nt, Human
ggaggcaggggccgagg

SEQ ID NO: 452763 - RNA, 32 nt, Human
ggaggcaggggcuuccuggugcuggagguugg

SEQ ID NO: 452764 - RNA, 23 nt, Human
ggaggcagggggcaggccugcgg

SEQ ID NO: 452765 - RNA, 32 nt, Human
ggaggcagggguuccagcacaaaguuuacuuc

SEQ ID NO: 452766 - RNA, 19 nt, Human
ggaggcagggucucugggg

SEQ ID NO: 452767 - RNA, 32 nt, Human
ggaggcaggucgggaggaagaagagguggagg

SEQ ID NO: 452768 - RNA, 32 nt, Human
ggaggcagguucugcaaagcaagugcaagagg

SEQ ID NO: 452769 - RNA, 32 nt, Human
ggaggcaguagacauggagaaauccuaucuuu

SEQ ID NO: 452770 - RNA, 32 nt, Human
ggaggcagucacaggagugaggugcaguugcu

SEQ ID NO: 452771 - RNA, 19 nt, Human
ggaggcaguccucaccucu

SEQ ID NO: 452772 - RNA, 32 nt, Human
ggaggcaguggaggcaggagaggcuggggagg

SEQ ID NO: 452773 - RNA, 32 nt, Human
ggaggcaguggcagagggguugagggacaggg

SEQ ID NO: 452774 - RNA, 20 nt, Human
ggaggcaguggcgggcuccc

SEQ ID NO: 452775 - RNA, 32 nt, Human
ggaggcagugggcuggcagcuuccugcugcuc

SEQ ID NO: 452776 - RNA, 32 nt, Human
ggaggcauaugcuuguguguguacauggggug

SEQ ID NO: 452777 - RNA, 32 nt, Human
ggaggcaucacugaggccaggagcucugccca

SEQ ID NO: 452778 - RNA, 32 nt, Human
ggaggcaucauugaggccaggagcucugcccg

SEQ ID NO: 452779 - RNA, 32 nt, Human
ggaggcaucccauccagccucagagggcccag

SEQ ID NO: 452780 - RNA, 32 nt, Human
ggaggcauggcuguaauucuuuagcuuucucc

SEQ ID NO: 452781 - RNA, 32 nt, Human
ggaggcauuagcagcagcaccucugggucaac

SEQ ID NO: 452782 - RNA, 32 nt, Human
ggaggcauugcugcaggugagccugggaugcc

SEQ ID NO: 452783 - RNA, 32 nt, Human
ggaggcauuuaaggaaaucuguuucucuuuug

SEQ ID NO: 452784 - RNA, 32 nt, Human
ggaggcauuuacacacagcacacuccagcucu

SEQ ID NO: 452785 - RNA, 32 nt, Human
ggaggcauuuggauccauugggccacauguga

SEQ ID NO: 452786 - RNA, 32 nt, Human
ggaggccaaagcaggagaauugcuugaacccg

SEQ ID NO: 452787 - RNA, 32 nt, Human
ggaggccaaagcaggaggauagcuugaggcca

SEQ ID NO: 452788 - RNA, 32 nt, Human
ggaggccaaagcaggaggaucacuugagccua

SEQ ID NO: 452789 - RNA, 32 nt, Human
ggaggccaaagcaggaggaucgcuugagccca

SEQ ID NO: 452790 - RNA, 24 nt, Human
ggaggccaaagcaggcaaaucucu

SEQ ID NO: 452791 - RNA, 23 nt, Human
ggaggccaaaggaaaggaucucu

SEQ ID NO: 452792 - RNA, 24 nt, Human
ggaggccaaagggcugcagucacc

SEQ ID NO: 452793 - RNA, 24 nt, Human
ggaggccaaaugggagaauugcuu

SEQ ID NO: 452794 - RNA, 23 nt, Human
ggaggccaaaugggccaccccuu

SEQ ID NO: 452795 - RNA, 32 nt, Human
ggaggccaacacaggaggaucacuugagacug

SEQ ID NO: 452796 - RNA, 32 nt, Human
ggaggccaacuaaggguaucaccaagaagcca

SEQ ID NO: 452797 - RNA, 21 nt, Human
ggaggccaacugaugcucucc

SEQ ID NO: 452798 - RNA, 26 nt, Human
ggaggccaagaagaggaagauugcuu

SEQ ID NO: 452799 - RNA, 32 nt, Human
ggaggccaagacaggaggaucacuugaggcca

SEQ ID NO: 452800 - RNA, 32 nt, Human
ggaggccaagacgggaugauugcuugagcuca

SEQ ID NO: 452801 - RNA, 32 nt, Human
ggaggccaagagucugagaccagccuggcuaa

SEQ ID NO: 452802 - RNA, 32 nt, Human
ggaggccaagaguuggagagcagacugggcaa

SEQ ID NO: 452803 - RNA, 24 nt, Human
ggaggccaagaucgcaagcugcuu

SEQ ID NO: 452804 - RNA, 24 nt, Human
ggaggccaagauggaggauugcuu

SEQ ID NO: 452805 - RNA, 25 nt, Human
ggaggccaagaugggaggagugcuu

SEQ ID NO: 452806 - RNA, 25 nt, Human
ggaggccaagaugggaggaucgcuu

SEQ ID NO: 452807 - RNA, 32 nt, Human
ggaggccaagaugggcagauugcuugaggcca

SEQ ID NO: 452808 - RNA, 32 nt, Human
ggaggccaagaugggcggauugcuugagguca

SEQ ID NO: 452809 - RNA, 32 nt, Human
ggaggccaagcugccagguuuggggcuggggg

SEQ ID NO: 452810 - RNA, 24 nt, Human
ggaggccaagcuuuaaacaucucu

SEQ ID NO: 452811 - RNA, 25 nt, Human
ggaggccaaggaaggaggacugcuu

SEQ ID NO: 452812 - RNA, 32 nt, Human
ggaggccaaggaaggaggauugcuugagcuca

SEQ ID NO: 452813 - RNA, 24 nt, Human
ggaggccaaggaaggcagaucacc

SEQ ID NO: 452814 - RNA, 25 nt, Human
ggaggccaaggcaaaaggauugcuu

SEQ ID NO: 452815 - RNA, 32 nt, Human
ggaggccaaggcaaaaggauugcuugagugca

SEQ ID NO: 452816 - RNA, 32 nt, Human
ggaggccaaggcacaagaaucgcuugaaccag

SEQ ID NO: 452817 - RNA, 25 nt, Human
ggaggccaaggcaggaagauugcuu

SEQ ID NO: 452818 - RNA, 32 nt, Human
ggaggccaaggcaggagaaucgcucgaaacca

SEQ ID NO: 452819 - RNA, 32 nt, Human
ggaggccaaggcaggagaaucgcuugaaccug

SEQ ID NO: 452820 - RNA, 25 nt, Human
ggaggccaaggcaggaggacugcuu

SEQ ID NO: 452821 - RNA, 32 nt, Human
ggaggccaaggcaggaggacugcuugagccca

SEQ ID NO: 452822 - RNA, 32 nt, Human
ggaggccaaggcaggaggaucacuugagccua

SEQ ID NO: 452823 - RNA, 32 nt, Human
ggaggccaaggcaggaggaucacuugagccug

SEQ ID NO: 452824 - RNA, 32 nt, Human
ggaggccaaggcaggaggaucacuugaggcca

SEQ ID NO: 452825 - RNA, 32 nt, Human
ggaggccaaggcaggaggaucacuugaggcua

SEQ ID NO: 452826 - RNA, 32 nt, Human
ggaggccaaggcaggaggaucacuugaguccu

SEQ ID NO: 452827 - RNA, 32 nt, Human
ggaggccaaggcaggaggaucgcuugagccca

SEQ ID NO: 452828 - RNA, 32 nt, Human
ggaggccaaggcaggaggaucgcuugagguca

SEQ ID NO: 452829 - RNA, 32 nt, Human
ggaggccaaggcaggaggaucguuugaggcca

SEQ ID NO: 452830 - RNA, 32 nt, Human
ggaggccaaggcaggaggaucucuugagccca

SEQ ID NO: 452831 - RNA, 32 nt, Human
ggaggccaaggcaggaggauggcuugaagcca

SEQ ID NO: 452832 - RNA, 32 nt, Human
ggaggccaaggcaggaggauggcuugagccca

SEQ ID NO: 452833 - RNA, 32 nt, Human
ggaggccaaggcaggaggauggcuugagcuca

SEQ ID NO: 452834 - RNA, 25 nt, Human
ggaggccaaggcaggaggauugcuu

SEQ ID NO: 452835 - RNA, 32 nt, Human
ggaggccaaggcaggaggauugcuugagaccu

SEQ ID NO: 452836 - RNA, 32 nt, Human
ggaggccaaggcaggaggauugcuugagccca

SEQ ID NO: 452837 - RNA, 32 nt, Human
ggaggccaaggcaggaggauugcuugaggcga

SEQ ID NO: 452838 - RNA, 32 nt, Human
ggaggccaaggcaggaggauugcuugagguca

SEQ ID NO: 452839 - RNA, 32 nt, Human
ggaggccaaggcaggcagaucgcuugagccca

SEQ ID NO: 452840 - RNA, 32 nt, Human
ggaggccaaggcaggcugauugcuugagguca

SEQ ID NO: 452841 - RNA, 23 nt, Human
ggaggccaaggcagguggaucau

SEQ ID NO: 452842 - RNA, 22 nt, Human
ggaggccaaggcagguggaucg

SEQ ID NO: 452843 - RNA, 32 nt, Human
ggaggccaaggcagguggaucgcuugaggcca

SEQ ID NO: 452844 - RNA, 25 nt, Human
ggaggccaaggccagaggauugcuu

SEQ ID NO: 452845 - RNA, 32 nt, Human
ggaggccaaggccagaggauugcuugagucua

SEQ ID NO: 452846 - RNA, 32 nt, Human
ggaggccaaggcgaguggauugcuugagccca

SEQ ID NO: 452847 - RNA, 25 nt, Human
ggaggccaaggcgggaggaucacuu

SEQ ID NO: 452848 - RNA, 25 nt, Human
ggaggccaaggcgggaggaucgcuu

SEQ ID NO: 452849 - RNA, 32 nt, Human
ggaggccaaggcgggaggaucgcuugagccca

SEQ ID NO: 452850 - RNA, 25 nt, Human
ggaggccaaggcgggaggauugcuu

SEQ ID NO: 452851 - RNA, 32 nt, Human
ggaggccaaggcgggaggauugcuugagccca

SEQ ID NO: 452852 - RNA, 32 nt, Human
ggaggccaaggcgggaggguugcuugagcuca

SEQ ID NO: 452853 - RNA, 32 nt, Human
ggaggccaaggcgggucgauuacuugagguca

SEQ ID NO: 452854 - RNA, 22 nt, Human
ggaggccaaggcggguggauca

SEQ ID NO: 452855 - RNA, 32 nt, Human
ggaggccaagguaagaggaucgcuugagguca

SEQ ID NO: 452856 - RNA, 32 nt, Human
ggaggccaagguaggaggauggcuugaggcca

SEQ ID NO: 452857 - RNA, 25 nt, Human
ggaggccaagguaggaggauugcuu

SEQ ID NO: 452858 - RNA, 32 nt, Human
ggaggccaagguaggaggauugcuugaagcua

SEQ ID NO: 452859 - RNA, 32 nt, Human
ggaggccaaggugagcccaaggugggaggauc

SEQ ID NO: 452860 - RNA, 22 nt, Human
ggaggccaaggugcaacuuucu

SEQ ID NO: 452861 - RNA, 32 nt, Human
ggaggccaaggugcaaggcgggcagaucauuu

SEQ ID NO: 452862 - RNA, 32 nt, Human
ggaggccaaggugggaacaucgcuugaggcca

SEQ ID NO: 452863 - RNA, 25 nt, Human
ggaggccaaggugggaagaucacuu

SEQ ID NO: 452864 - RNA, 25 nt, Human
ggaggccaaggugggaagaucgcuu

SEQ ID NO: 452865 - RNA, 23 nt, Human
ggaggccaaggugggaagauugc

SEQ ID NO: 452866 - RNA, 25 nt, Human
ggaggccaaggugggaggacgacuu

SEQ ID NO: 452867 - RNA, 20 nt, Human
ggaggccaaggugggaggau

SEQ ID NO: 452868 - RNA, 24 nt, Human
ggaggccaaggugggaggaucacu

SEQ ID NO: 452869 - RNA, 25 nt, Human
ggaggccaaggugggaggaucacuu

SEQ ID NO: 452870 - RNA, 32 nt, Human
ggaggccaaggugggaggaucaguugagcccc

SEQ ID NO: 452871 - RNA, 25 nt, Human
ggaggccaaggugggaggaucgcuu

SEQ ID NO: 452872 - RNA, 32 nt, Human
ggaggccaaggugggaggaucgcuugagacca

SEQ ID NO: 452873 - RNA, 32 nt, Human
ggaggccaaggugggaggaucgcuugagccca

SEQ ID NO: 452874 - RNA, 25 nt, Human
ggaggccaaggugggaggauuacuu

SEQ ID NO: 452875 - RNA, 32 nt, Human
ggaggccaaggugggaggauuacuugagacca

SEQ ID NO: 452876 - RNA, 25 nt, Human
ggaggccaaggugggaggauugcuu

SEQ ID NO: 452877 - RNA, 32 nt, Human
ggaggccaaggugggaggauugcuugaaccca

SEQ ID NO: 452878 - RNA, 32 nt, Human
ggaggccaaggugggaggauugcuugagccca

SEQ ID NO: 452879 - RNA, 32 nt, Human
ggaggccaaggugggaggauugcuugagcgua

SEQ ID NO: 452880 - RNA, 32 nt, Human
ggaggccaaggugggaggauugcuugagcuca

SEQ ID NO: 452881 - RNA, 32 nt, Human
ggaggccaaggugggaggauugcuugagcucg

SEQ ID NO: 452882 - RNA, 32 nt, Human
ggaggccaaggugggaggauugcuugaggcca

SEQ ID NO: 452883 - RNA, 32 nt, Human
ggaggccaaggugggagggaagaucgauugag

SEQ ID NO: 452884 - RNA, 32 nt, Human
ggaggccaaggugggaguuuugcuugaggcca

SEQ ID NO: 452885 - RNA, 32 nt, Human
ggaggccaaggugggcagauugcuugaacccc

SEQ ID NO: 452886 - RNA, 32 nt, Human
ggaggccaaggugggcggauugcuugagcuua

SEQ ID NO: 452887 - RNA, 32 nt, Human
ggaggccaaggugggugaauugcuugagguca

SEQ ID NO: 452888 - RNA, 25 nt, Human
ggaggccaaguaaggacgauugcuu

SEQ ID NO: 452889 - RNA, 18 nt, Human
ggaggccaaguccacugc

SEQ ID NO: 452890 - RNA, 32 nt, Human
ggaggccaaguugucagcuuuuugauccucua

SEQ ID NO: 452891 - RNA, 32 nt, Human
ggaggccaaugcggaaggaucgcuugagccca

SEQ ID NO: 452892 - RNA, 21 nt, Human
ggaggccaauggcggcuuccc

SEQ ID NO: 452893 - RNA, 32 nt, Human
ggaggccacaaugggacaccugagggaaaagg

SEQ ID NO: 452894 - RNA, 32 nt, Human
ggaggccacagugggcagauugcuugagccca

SEQ ID NO: 452895 - RNA, 32 nt, Human
ggaggccacaguucugugagcagaggaagagc

SEQ ID NO: 452896 - RNA, 18 nt, Human
ggaggccacaucccgggg

SEQ ID NO: 452897 - RNA, 32 nt, Human
ggaggccacauccugaauaugaauguucuacu

SEQ ID NO: 452898 - RNA, 32 nt, Human
ggaggccaccaucgugaaagagugagaucugu

SEQ ID NO: 452899 - RNA, 32 nt, Human
ggaggccaccgagaagaaggaggaagcagggg

SEQ ID NO: 452900 - RNA, 21 nt, Human
ggaggccaccugcacauucuc

SEQ ID NO: 452901 - RNA, 21 nt, Human
ggaggccacggagcuggggga

SEQ ID NO: 452902 - RNA, 32 nt, Human
ggaggccacucagcccagggaggcaggacuca

SEQ ID NO: 452903 - RNA, 32 nt, Human
ggaggccacugcacugcucacuuguggcccag

SEQ ID NO: 452904 - RNA, 22 nt, Human
ggaggccagacaccagccccca

SEQ ID NO: 452905 - RNA, 18 nt, Human
ggaggccagagagaggca

SEQ ID NO: 452906 - RNA, 32 nt, Human
ggaggccagagccuuucucugccaucagcccu

SEQ ID NO: 452907 - RNA, 32 nt, Human
ggaggccagagggagaggaggaucucagcagg

SEQ ID NO: 452908 - RNA, 32 nt, Human
ggaggccagccccuggcucacuggcacagggc

SEQ ID NO: 452909 - RNA, 32 nt, Human
ggaggccagccuggaagaggcagcaguggcuc

SEQ ID NO: 452910 - RNA, 32 nt, Human
ggaggccagccuggcccugagcugcuggauac

SEQ ID NO: 452911 - RNA, 32 nt, Human
ggaggccaggagccauccuguguucagauggu

SEQ ID NO: 452912 - RNA, 32 nt, Human
ggaggccaggaguucaauaccagccugggcaa

SEQ ID NO: 452913 - RNA, 32 nt, Human
ggaggccaggaguuuugagaccagccugggaa

SEQ ID NO: 452914 - RNA, 24 nt, Human
ggaggccaggcaggaggauugcuu

SEQ ID NO: 452915 - RNA, 32 nt, Human
ggaggccaggccaggacguccuugcucccugc

SEQ ID NO: 452916 - RNA, 32 nt, Human
ggaggccaggccgagccccuggaaccaucccg

SEQ ID NO: 452917 - RNA, 32 nt, Human
ggaggccagggaggcaggggaggcaggagagg

SEQ ID NO: 452918 - RNA, 32 nt, Human
ggaggccagggaggcaguggaggcaggagagg

SEQ ID NO: 452919 - RNA, 20 nt, Human
ggaggccagggcaggccugc

SEQ ID NO: 452920 - RNA, 25 nt, Human
ggaggccagggcgggaggauugcuu

SEQ ID NO: 452921 - RNA, 32 nt, Human
ggaggccagggcgggaggauugcuugggcuca

SEQ ID NO: 452922 - RNA, 32 nt, Human
ggaggccagggugggaggaucguuugagccca

SEQ ID NO: 452923 - RNA, 32 nt, Human
ggaggccagggugggcagaucaugaggucaga

SEQ ID NO: 452924 - RNA, 31 nt, Human
ggaggccagugccagcaccugcccagugggc

SEQ ID NO: 452925 - RNA, 22 nt, Human
ggaggccaguucgagaacugcu

SEQ ID NO: 452926 - RNA, 31 nt, Human
ggaggccaguuucaggaacuuuugccacaag

SEQ ID NO: 452927 - RNA, 32 nt, Human
ggaggccaguuucaggaacuuuugccacaagu

SEQ ID NO: 452928 - RNA, 32 nt, Human
ggaggccauagcaggaggauugcucgagccca

SEQ ID NO: 452929 - RNA, 22 nt, Human
ggaggccaucggggagccggga

SEQ ID NO: 452930 - RNA, 32 nt, Human
ggaggcccaacugaggagagugugcuggagca

SEQ ID NO: 452931 - RNA, 32 nt, Human
ggaggcccacucucccccugccgcggccuccc

SEQ ID NO: 452932 - RNA, 26 nt, Human
ggaggcccagauggggaggaucacuu

SEQ ID NO: 452933 - RNA, 32 nt, Human
ggaggcccagcuagccccagacuucggcccca

SEQ ID NO: 452934 - RNA, 32 nt, Human
ggaggcccagcuccgcaggcagguguggaugc

SEQ ID NO: 452935 - RNA, 32 nt, Human
ggaggcccaggacagaaccccaggaacaccgc

SEQ ID NO: 452936 - RNA, 32 nt, Human
ggaggcccaggaguagaggcugcagcgcccgg

SEQ ID NO: 452937 - RNA, 32 nt, Human
ggaggcccaggaguguggcugcaagagaaaag

SEQ ID NO: 452938 - RNA, 19 nt, Human
ggaggcccaggcugggaga

SEQ ID NO: 452939 - RNA, 32 nt, Human
ggaggcccagggagaacggggaagggacauuu

SEQ ID NO: 452940 - RNA, 25 nt, Human
ggaggcccaggugggaggaucgcuu

SEQ ID NO: 452941 - RNA, 32 nt, Human
ggaggcccauccgagcucagcacuggaagugu

SEQ ID NO: 452942 - RNA, 32 nt, Human
ggaggcccaucugaggagagugugcuggagca

SEQ ID NO: 452943 - RNA, 21 nt, Human
ggaggccccaauggcaucuuc

SEQ ID NO: 452944 - RNA, 19 nt, Human
ggaggccccaccccagagg

SEQ ID NO: 452945 - RNA, 28 nt, Human
ggaggccccagcacagccucaucuccau

SEQ ID NO: 452946 - RNA, 32 nt, Human
ggaggccccaggauugguccugagguacagag

SEQ ID NO: 452947 - RNA, 32 nt, Human
ggaggcccccggcggcuggagcgcggcggcag

SEQ ID NO: 452948 - RNA, 18 nt, Human
ggaggccccgcccccucc

SEQ ID NO: 452949 - RNA, 32 nt, Human
ggaggccccucaggcccgugcgggccacuguc

SEQ ID NO: 452950 - RNA, 32 nt, Human
ggaggccccucgggggcagcacaucuuccucc

SEQ ID NO: 452951 - RNA, 32 nt, Human
ggaggccccuggcauaggggacagcccugggc

SEQ ID NO: 452952 - RNA, 32 nt, Human
ggaggccccuuuccuagucucauccuccccug

SEQ ID NO: 452953 - RNA, 32 nt, Human
ggaggcccgcagagcacagagcaggagaaggg

SEQ ID NO: 452954 - RNA, 20 nt, Human
ggaggcccggaggccugcag

SEQ ID NO: 452955 - RNA, 32 nt, Human
ggaggcccggggcgcugagcucaggcccagaa

SEQ ID NO: 452956 - RNA, 32 nt, Human
ggaggcccguggacuccgcacagggaagaaac

SEQ ID NO: 452957 - RNA, 32 nt, Human
ggaggcccuagagcagagcagagcagcugugg

SEQ ID NO: 452958 - RNA, 32 nt, Human
ggaggcccuagaggagcaccaaaggagaagau

SEQ ID NO: 452959 - RNA, 32 nt, Human
ggaggcccuaucucccauccuguggaacccgc

SEQ ID NO: 452960 - RNA, 32 nt, Human
ggaggcccugaccucugcugcaguggccgccc

SEQ ID NO: 452961 - RNA, 32 nt, Human
ggaggcccugcagggucucggcuggguccgca

SEQ ID NO: 452962 - RNA, 22 nt, Human
ggaggcccugggcucccagggg

SEQ ID NO: 452963 - RNA, 32 nt, Human
ggaggccgaagcaggaggauugcuugaaucca

SEQ ID NO: 452964 - RNA, 32 nt, Human
ggaggccgaagcaggcggaucacuugagguca

SEQ ID NO: 452965 - RNA, 32 nt, Human
ggaggccgaagcagguggaucacuugaggcca

SEQ ID NO: 452966 - RNA, 25 nt, Human
ggaggccgaagugggaggacugcuu

SEQ ID NO: 452967 - RNA, 22 nt, Human
ggaggccgaagugguggcucau

SEQ ID NO: 452968 - RNA, 25 nt, Human
ggaggccgacgcaggaggauugcuu

SEQ ID NO: 452969 - RNA, 32 nt, Human
ggaggccgacgcaggaggauugcuugaggcca

SEQ ID NO: 452970 - RNA, 18 nt, Human
ggaggccgacgcagucau

SEQ ID NO: 452971 - RNA, 25 nt, Human
ggaggccgagaagggaggaucacuu

SEQ ID NO: 452972 - RNA, 32 nt, Human
ggaggccgagacaggcagauugcuugagccca

SEQ ID NO: 452973 - RNA, 32 nt, Human
ggaggccgagaggggcggggucgcggcggggc

SEQ ID NO: 452974 - RNA, 23 nt, Human
ggaggccgaggacuucaugcucc

SEQ ID NO: 452975 - RNA, 32 nt, Human
ggaggccgaggcaagagaaucgcuugaaccug

SEQ ID NO: 452976 - RNA, 32 nt, Human
ggaggccgaggcacgagaaucgcuugaacccg

SEQ ID NO: 452977 - RNA, 32 nt, Human
ggaggccgaggcacgagaauugcuugaaccca

SEQ ID NO: 452978 - RNA, 22 nt, Human
ggaggccgaggcagaaaaauca

SEQ ID NO: 452979 - RNA, 32 nt, Human
ggaggccgaggcagaagaauugcuugaacugg

SEQ ID NO: 452980 - RNA, 32 nt, Human
ggaggccgaggcaggaaaaucgcuugaaccug

SEQ ID NO: 452981 - RNA, 25 nt, Human
ggaggccgaggcaggaagacugcuu

SEQ ID NO: 452982 - RNA, 25 nt, Human
ggaggccgaggcaggaagauugcuu

SEQ ID NO: 452983 - RNA, 32 nt, Human
ggaggccgaggcaggaagauugcuugaacuca

SEQ ID NO: 452984 - RNA, 32 nt, Human
ggaggccgaggcaggagaaucgcuugaaccug

SEQ ID NO: 452985 - RNA, 32 nt, Human
ggaggccgaggcaggagaaucgcuugagccca

SEQ ID NO: 452986 - RNA, 32 nt, Human
ggaggccgaggcaggagaauugcuugaacccg

SEQ ID NO: 452987 - RNA, 32 nt, Human
ggaggccgaggcaggagaauugcuugaaccug

SEQ ID NO: 452988 - RNA, 32 nt, Human
ggaggccgaggcaggagcaucgcuugagccca

SEQ ID NO: 452989 - RNA, 32 nt, Human
ggaggccgaggcaggaggaucacuugaggcca

SEQ ID NO: 452990 - RNA, 32 nt, Human
ggaggccgaggcaggaggaucacuugaggcua

SEQ ID NO: 452991 - RNA, 32 nt, Human
ggaggccgaggcaggaggaucacuugagguca

SEQ ID NO: 452992 - RNA, 32 nt, Human
ggaggccgaggcaggaggaucgcuugagccca

SEQ ID NO: 452993 - RNA, 32 nt, Human
ggaggccgaggcaggaggauugcuugaacccg

SEQ ID NO: 452994 - RNA, 32 nt, Human
ggaggccgaggcaggaggauugcuugaggcca

SEQ ID NO: 452995 - RNA, 22 nt, Human
ggaggccgaggcaggcggauca

SEQ ID NO: 452996 - RNA, 21 nt, Human
ggaggccgaggcaggcggauu

SEQ ID NO: 452997 - RNA, 25 nt, Human
ggaggccgaggcagggggacugcuu

SEQ ID NO: 452998 - RNA, 32 nt, Human
ggaggccgaggcagggggauugcuugagcuca

SEQ ID NO: 452999 - RNA, 32 nt, Human
ggaggccgaggcagguggaucgcuugagccag

SEQ ID NO: 453000 - RNA, 32 nt, Human
ggaggccgaggcagguggaucgcuugagcuca

SEQ ID NO: 453001 - RNA, 32 nt, Human
ggaggccgaggcaguuggauuacuugaggcca

SEQ ID NO: 453002 - RNA, 32 nt, Human
ggaggccgaggcaugagaaucacuugaacccg

SEQ ID NO: 453003 - RNA, 21 nt, Human
ggaggccgaggcccacucucc

SEQ ID NO: 453004 - RNA, 23 nt, Human
ggaggccgaggcggcgagggcgg

SEQ ID NO: 453005 - RNA, 25 nt, Human
ggaggccgaggcgggaggaucacuu

SEQ ID NO: 453006 - RNA, 22 nt, Human
ggaggccgaggcgggcggauca

SEQ ID NO: 453007 - RNA, 32 nt, Human
ggaggccgaggcgggcggaucgcuugagccca

SEQ ID NO: 453008 - RNA, 32 nt, Human
ggaggccgaggcgggcggaucgcuugagguca

SEQ ID NO: 453009 - RNA, 23 nt, Human
ggaggccgaggcggguggaucau

SEQ ID NO: 453010 - RNA, 32 nt, Human
ggaggccgaggcggguggaucgcuugagcaca

SEQ ID NO: 453011 - RNA, 22 nt, Human
ggaggccgaggcuggcagauca

SEQ ID NO: 453012 - RNA, 32 nt, Human
ggaggccgaggcugggggauugcuugacguca

SEQ ID NO: 453013 - RNA, 32 nt, Human
ggaggccgaggugaguggauugcuugaguccu

SEQ ID NO: 453014 - RNA, 25 nt, Human
ggaggccgaggugggaagaucacuu

SEQ ID NO: 453015 - RNA, 25 nt, Human
ggaggccgaggugggaggagcgcuu

SEQ ID NO: 453016 - RNA, 22 nt, Human
ggaggccgaggugggaggauca

SEQ ID NO: 453017 - RNA, 25 nt, Human
ggaggccgaggugggaggaucacuu

SEQ ID NO: 453018 - RNA, 25 nt, Human
ggaggccgaggugggaggaucgcuu

SEQ ID NO: 453019 - RNA, 32 nt, Human
ggaggccgaggugggaggaucgcuugagccca

SEQ ID NO: 453020 - RNA, 25 nt, Human
ggaggccgaggugggaggauugcuu

SEQ ID NO: 453021 - RNA, 32 nt, Human
ggaggccgaggugggaggauugcuugagcuca

SEQ ID NO: 453022 - RNA, 32 nt, Human
ggaggccgaggugggaggauugcuugaggcca

SEQ ID NO: 453023 - RNA, 32 nt, Human
ggaggccgaggugggaggauugcuugagucca

SEQ ID NO: 453024 - RNA, 32 nt, Human
ggaggccgagucggaaggauugcuugagccca

SEQ ID NO: 453025 - RNA, 22 nt, Human
ggaggccgagugggaggauugc

SEQ ID NO: 453026 - RNA, 32 nt, Human
ggaggccgaucccggugcacacggugcccgug

SEQ ID NO: 453027 - RNA, 32 nt, Human
ggaggccgcagcaccuucuggaagacuuggcc

SEQ ID NO: 453028 - RNA, 32 nt, Human
ggaggccgcaggcaggugguucagugguuagg

SEQ ID NO: 453029 - RNA, 20 nt, Human
ggaggccgccugaggacugc

SEQ ID NO: 453030 - RNA, 23 nt, Human
ggaggccggagcugagccugcag

SEQ ID NO: 453031 - RNA, 19 nt, Human
ggaggccggccggccugca

SEQ ID NO: 453032 - RNA, 27 nt, Human
ggaggccggcgcuccgcuccgcuccag

SEQ ID NO: 453033 - RNA, 32 nt, Human
ggaggccgggacgucaaggggcuuccaacucc

SEQ ID NO: 453034 - RNA, 32 nt, Human
ggaggccgggagacagggacuggugagaaugg

SEQ ID NO: 453035 - RNA, 19 nt, Human
ggaggccgggaggccggga

SEQ ID NO: 453036 - RNA, 22 nt, Human
ggaggccgggcaugguggcuca

SEQ ID NO: 453037 - RNA, 22 nt, Human
ggaggccgggccugguggcuca

SEQ ID NO: 453038 - RNA, 23 nt, Human
ggaggccgggccuugggccacag

SEQ ID NO: 453039 - RNA, 22 nt, Human
ggaggccgggcgcgguggcuca

SEQ ID NO: 453040 - RNA, 20 nt, Human
ggaggccgggcugcgccugc

SEQ ID NO: 453041 - RNA, 24 nt, Human
ggaggccggggacgacaccaucuc

SEQ ID NO: 453042 - RNA, 18 nt, Human
ggaggccggggccugcag

SEQ ID NO: 453043 - RNA, 22 nt, Human
ggaggccggggcggcgggcgcg

SEQ ID NO: 453044 - RNA, 21 nt, Human
ggaggccggggcucccaggaa

SEQ ID NO: 453045 - RNA, 32 nt, Human
ggaggccgucugggaaaagauuaaggaaauug

SEQ ID NO: 453046 - RNA, 32 nt, Human
ggaggccgugaggacgcuggcuggcagaggcu

SEQ ID NO: 453047 - RNA, 32 nt, Human
ggaggccgugcugccugcucaugugggcuguu

SEQ ID NO: 453048 - RNA, 32 nt, Human
ggaggccuagacaggaggauugauugaggcua

SEQ ID NO: 453049 - RNA, 25 nt, Human
ggaggccuaggcaggaggauugcuu

SEQ ID NO: 453050 - RNA, 32 nt, Human
ggaggccuaggcaggaggauugcuugagccug

SEQ ID NO: 453051 - RNA, 32 nt, Human
ggaggccuaggugggaggauugcuugaguccg

SEQ ID NO: 453052 - RNA, 23 nt, Human
ggaggccucaccgugagaccuua

SEQ ID NO: 453053 - RNA, 32 nt, Human
ggaggccucagcaaccugcucuuccgcugcuc

SEQ ID NO: 453054 - RNA, 32 nt, Human
ggaggccuccacuccuuccaucucuuccuuca

SEQ ID NO: 453055 - RNA, 32 nt, Human
ggaggccucccaggcuggucugcuccacuggc

SEQ ID NO: 453056 - RNA, 32 nt, Human
ggaggccucccauccaggacacugggggcagg

SEQ ID NO: 453057 - RNA, 32 nt, Human
ggaggccuccuugggccuggucccccuuugcc

SEQ ID NO: 453058 - RNA, 32 nt, Human
ggaggccucgcaaucaugguggaaggcaagaa

SEQ ID NO: 453059 - RNA, 18 nt, Human
ggaggccucggcggauca

SEQ ID NO: 453060 - RNA, 32 nt, Human
ggaggccucuagugaacaccuuuaucuccaug

SEQ ID NO: 453061 - RNA, 20 nt, Human
ggaggccucuggaacccagg

SEQ ID NO: 453062 - RNA, 32 nt, Human
ggaggccucuggucucugccugcccugggugc

SEQ ID NO: 453063 - RNA, 32 nt, Human
ggaggccucuguccuccacuuugaggcucugg

SEQ ID NO: 453064 - RNA, 32 nt, Human
ggaggccugagcgggaagcauuggcguccgag

SEQ ID NO: 453065 - RNA, 32 nt, Human
ggaggccugagggcuugagggaggcuggggaa

SEQ ID NO: 453066 - RNA, 32 nt, Human
ggaggccugcacaggcuggaggaggguuuggg

SEQ ID NO: 453067 - RNA, 32 nt, Human
ggaggccugcacuuggaccugaccucaagccu

SEQ ID NO: 453068 - RNA, 32 nt, Human
ggaggccugcagaaccugagcugugacuggca

SEQ ID NO: 453069 - RNA, 32 nt, Human
ggaggccugcagccucuaacugaugccccugc

SEQ ID NO: 453070 - RNA, 22 nt, Human
ggaggccugccugccucuggag

SEQ ID NO: 453071 - RNA, 32 nt, Human
ggaggccugccugccucuguaggcuccaccuc

SEQ ID NO: 453072 - RNA, 32 nt, Human
ggaggccugccuggcaggugugcgugccucgu

SEQ ID NO: 453073 - RNA, 18 nt, Human
ggaggccuggcucuggga

SEQ ID NO: 453074 - RNA, 22 nt, Human
ggaggccugggccgcccagagg

SEQ ID NO: 453075 - RNA, 26 nt, Human
ggaggccugggcugagacagugcucu

SEQ ID NO: 453076 - RNA, 32 nt, Human
ggaggccuggggcacugcuuucugcuacaccu

SEQ ID NO: 453077 - RNA, 32 nt, Human
ggaggccuggggcagggcaccagugacaggca

SEQ ID NO: 453078 - RNA, 32 nt, Human
ggaggccugggggcagggagaggagugacuga

SEQ ID NO: 453079 - RNA, 32 nt, Human
ggaggccugugagagcugccucugccucagug

SEQ ID NO: 453080 - RNA, 32 nt, Human
ggaggccuuauuuucaaaaaugugaaauauaa

SEQ ID NO: 453081 - RNA, 32 nt, Human
ggaggccuucaaggaggugggcacagggugag

SEQ ID NO: 453082 - RNA, 32 nt, Human
ggaggccuuccucugcgaggugacaucagcug

SEQ ID NO: 453083 - RNA, 20 nt, Human
ggaggccuuggggcccucag

SEQ ID NO: 453084 - RNA, 32 nt, Human
ggaggccuuuaccaggacagagcuagaaucga

SEQ ID NO: 453085 - RNA, 23 nt, Human
ggaggccuuugaaaugcaucuuu

SEQ ID NO: 453086 - RNA, 32 nt, Human
ggaggcgaaucuguaacaagcuccucugccuu

SEQ ID NO: 453087 - RNA, 31 nt, Human
ggaggcgacaaguccaucagcagaaagucac

SEQ ID NO: 453088 - RNA, 32 nt, Human
ggaggcgaggcagggcagggcacuuucguccc

SEQ ID NO: 453089 - RNA, 22 nt, Human
ggaggcgaggcagggccugcag

SEQ ID NO: 453090 - RNA, 32 nt, Human
ggaggcgaggcagggccugcagcggucucuga

SEQ ID NO: 453091 - RNA, 22 nt, Human
ggaggcgcaaucagacugcaga

SEQ ID NO: 453092 - RNA, 32 nt, Human
ggaggcgcaggcaaugcucagcccuggaugua

SEQ ID NO: 453093 - RNA, 32 nt, Human
ggaggcgccaggcugaaaccaccaccuccacc

SEQ ID NO: 453094 - RNA, 20 nt, Human
ggaggcgcccagcaucccuc

SEQ ID NO: 453095 - RNA, 24 nt, Human
ggaggcgccgagcaccgagcgccg

SEQ ID NO: 453096 - RNA, 25 nt, Human
ggaggcgccggggcgggggaugcgg

SEQ ID NO: 453097 - RNA, 32 nt, Human
ggaggcgccugggaagggcucccuaccggccc

SEQ ID NO: 453098 - RNA, 22 nt, Human
ggaggcgcgagccguccagguc

SEQ ID NO: 453099 - RNA, 32 nt, Human
ggaggcgcgggagauguccacccugggcuggu

SEQ ID NO: 453100 - RNA, 32 nt, Human
ggaggcgcugcgcccccggccccagccgaucg

SEQ ID NO: 453101 - RNA, 32 nt, Human
ggaggcgcuggccuccugggccuugccgucca

SEQ ID NO: 453102 - RNA, 19 nt, Human
ggaggcgcuggcucuggga

SEQ ID NO: 453103 - RNA, 32 nt, Human
ggaggcgcuggcugagucggccucgugcaggc

SEQ ID NO: 453104 - RNA, 32 nt, Human
ggaggcgcuugccuucagcuugugggaaaucc

SEQ ID NO: 453105 - RNA, 32 nt, Human
ggaggcggaagcaggaguaucccuugagucug

SEQ ID NO: 453106 - RNA, 20 nt, Human
ggaggcggaaguugcgguga

SEQ ID NO: 453107 - RNA, 21 nt, Human
ggaggcggaaguugcggugag

SEQ ID NO: 453108 - RNA, 32 nt, Human
ggaggcggaauuccuaccgcugggaacugaaa

SEQ ID NO: 453109 - RNA, 32 nt, Human
ggaggcggagcgccacaaggaggacuugaagc

SEQ ID NO: 453110 - RNA, 23 nt, Human
ggaggcggaggagaggccugcgg

SEQ ID NO: 453111 - RNA, 32 nt, Human
ggaggcggaggagggcgcauugcuugagccua

SEQ ID NO: 453112 - RNA, 32 nt, Human
ggaggcggaggcagaggcugcagugacccaag

SEQ ID NO: 453113 - RNA, 32 nt, Human
ggaggcggaggcagagguggaggcgcuuugaa

SEQ ID NO: 453114 - RNA, 32 nt, Human
ggaggcggaggcagcggcuggaggagcgcgag

SEQ ID NO: 453115 - RNA, 32 nt, Human
ggaggcggaggcaggaggaucucuugaaguca

SEQ ID NO: 453116 - RNA, 32 nt, Human
ggaggcggaggcaggcggguugcuugagcucc

SEQ ID NO: 453117 - RNA, 22 nt, Human
ggaggcggaggcccggaggcgg

SEQ ID NO: 453118 - RNA, 20 nt, Human
ggaggcggaggcggaggcgg

SEQ ID NO: 453119 - RNA, 32 nt, Human
ggaggcggaggcggagggcgaggggcggggag

SEQ ID NO: 453120 - RNA, 32 nt, Human
ggaggcggaggcggagguugcagugagccaag

SEQ ID NO: 453121 - RNA, 20 nt, Human
ggaggcggaggcggccgcgg

SEQ ID NO: 453122 - RNA, 21 nt, Human
ggaggcggaggcggggguacg

SEQ ID NO: 453123 - RNA, 32 nt, Human
ggaggcggagguaguggugagcaaagaucgua

SEQ ID NO: 453124 - RNA, 32 nt, Human
ggaggcggagguggagcuggcggagagcggga

SEQ ID NO: 453125 - RNA, 20 nt, Human
ggaggcggagguugcagcga

SEQ ID NO: 453126 - RNA, 21 nt, Human
ggaggcggagguugcagcgag

SEQ ID NO: 453127 - RNA, 20 nt, Human
ggaggcggagguugcaguga

SEQ ID NO: 453128 - RNA, 21 nt, Human
ggaggcggagguugcagugag

SEQ ID NO: 453129 - RNA, 32 nt, Human
ggaggcggagucucacucuguugcccaggcug

SEQ ID NO: 453130 - RNA, 20 nt, Human
ggaggcggaguuugcaguga

SEQ ID NO: 453131 - RNA, 24 nt, Human
ggaggcggcaacggcgggcgccgg

SEQ ID NO: 453132 - RNA, 22 nt, Human
ggaggcggcacccaggggccgg

SEQ ID NO: 453133 - RNA, 21 nt, Human
ggaggcggcagaggcugcccg

SEQ ID NO: 453134 - RNA, 32 nt, Human
ggaggcggcagcgguuggaggcuucgcccggc

SEQ ID NO: 453135 - RNA, 21 nt, Human
ggaggcggcaggcccggguca

SEQ ID NO: 453136 - RNA, 22 nt, Human
ggaggcggcaggugcacgggaa

SEQ ID NO: 453137 - RNA, 32 nt, Human
ggaggcggcccaggcugccuuggugauucugg

SEQ ID NO: 453138 - RNA, 32 nt, Human
ggaggcggccccggacggggauggucagcggc

SEQ ID NO: 453139 - RNA, 32 nt, Human
ggaggcggccgugggccgccugggcagaaugu

SEQ ID NO: 453140 - RNA, 32 nt, Human
ggaggcggccucuccccuguugcugcccgugu

SEQ ID NO: 453141 - RNA, 32 nt, Human
ggaggcggcgaagggcgcaggagcaucgcucg

SEQ ID NO: 453142 - RNA, 22 nt, Human
ggaggcggcgagagaggacugc

SEQ ID NO: 453143 - RNA, 23 nt, Human
ggaggcggcggccacggcgcggg

SEQ ID NO: 453144 - RNA, 20 nt, Human
ggaggcggcggcggaggcgg

SEQ ID NO: 453145 - RNA, 24 nt, Human
ggaggcggcggcggcgaagggagg

SEQ ID NO: 453146 - RNA, 22 nt, Human
ggaggcggcggcggcgcgcgga

SEQ ID NO: 453147 - RNA, 20 nt, Human
ggaggcggcggcgggaacgg

SEQ ID NO: 453148 - RNA, 19 nt, Human
ggaggcggcggcgggagcg

SEQ ID NO: 453149 - RNA, 24 nt, Human
ggaggcggcgggccacggcgcgaa

SEQ ID NO: 453150 - RNA, 32 nt, Human
ggaggcggcgggcggaggcggcgggagcggug

SEQ ID NO: 453151 - RNA, 32 nt, Human
ggaggcggcggggucuuugucucgcugcagcg

SEQ ID NO: 453152 - RNA, 23 nt, Human
ggaggcggcgguggcucccgggg

SEQ ID NO: 453153 - RNA, 32 nt, Human
ggaggcggcugggauagaggccagucccaaac

SEQ ID NO: 453154 - RNA, 21 nt, Human
ggaggcgggacuucgggugcg

SEQ ID NO: 453155 - RNA, 32 nt, Human
ggaggcgggagaugcagccaggaggaacagcu

SEQ ID NO: 453156 - RNA, 20 nt, Human
ggaggcgggagccgugugcg

SEQ ID NO: 453157 - RNA, 26 nt, Human
ggaggcgggaggacgcgcaggggcgg

SEQ ID NO: 453158 - RNA, 32 nt, Human
ggaggcgggaggaucaugaggucaggagaucg

SEQ ID NO: 453159 - RNA, 23 nt, Human
ggaggcgggaggcggcggcggcg

SEQ ID NO: 453160 - RNA, 23 nt, Human
ggaggcgggaggcgggaggccgg

SEQ ID NO: 453161 - RNA, 23 nt, Human
ggaggcgggagggcgggcgcugg

SEQ ID NO: 453162 - RNA, 32 nt, Human
ggaggcgggagggugggcucuauauuuucauu

SEQ ID NO: 453163 - RNA, 21 nt, Human
ggaggcgggagucgccugcgg

SEQ ID NO: 453164 - RNA, 23 nt, Human
ggaggcgggaugccggggggcgg

SEQ ID NO: 453165 - RNA, 32 nt, Human
ggaggcgggaugggacacccaacacuuuuucc

SEQ ID NO: 453166 - RNA, 32 nt, Human
ggaggcgggcggcccgggccucaggccccucc

SEQ ID NO: 453167 - RNA, 32 nt, Human
ggaggcgggcggggccgguggaucuggagccg

SEQ ID NO: 453168 - RNA, 32 nt, Human
ggaggcgggcgugagacaagcccagcccgcac

SEQ ID NO: 453169 - RNA, 22 nt, Human
ggaggcggggcagggcugagca

SEQ ID NO: 453170 - RNA, 32 nt, Human
ggaggcggggcccugcaggacgucauguucuc

SEQ ID NO: 453171 - RNA, 22 nt, Human
ggaggcggggcggcgggggcgg

SEQ ID NO: 453172 - RNA, 19 nt, Human
ggaggcgggggcggggcgg

SEQ ID NO: 453173 - RNA, 32 nt, Human
ggaggcggggguggacagggaggcagcuugug

SEQ ID NO: 453174 - RNA, 32 nt, Human
ggaggcggugaugucggugcagguugugucag

SEQ ID NO: 453175 - RNA, 19 nt, Human
ggaggcggugguccuggga

SEQ ID NO: 453176 - RNA, 20 nt, Human
ggaggcggugguggaggagg

SEQ ID NO: 453177 - RNA, 32 nt, Human
ggaggcgugagaguccaugaagggggugugag

SEQ ID NO: 453178 - RNA, 32 nt, Human
ggaggcguucaucgaacugcacugccugccca

SEQ ID NO: 453179 - RNA, 32 nt, Human
ggaggcuaaagcaggagaauugcuugaaccug

SEQ ID NO: 453180 - RNA, 25 nt, Human
ggaggcuaaagugggaggauuacuu

SEQ ID NO: 453181 - RNA, 32 nt, Human
ggaggcuaagauaggaggaucacuugagccca

SEQ ID NO: 453182 - RNA, 32 nt, Human
ggaggcuaagaugaguggauugcuugagccua

SEQ ID NO: 453183 - RNA, 32 nt, Human
ggaggcuaagccaggaggacuguuugagccca

SEQ ID NO: 453184 - RNA, 32 nt, Human
ggaggcuaagcccaguucaaggcugcagugaa

SEQ ID NO: 453185 - RNA, 22 nt, Human
ggaggcuaaggaacucgucuuu

SEQ ID NO: 453186 - RNA, 32 nt, Human
ggaggcuaaggcaagagaauugcuugaacccg

SEQ ID NO: 453187 - RNA, 32 nt, Human
ggaggcuaaggcaggaaaauuguuugaaccca

SEQ ID NO: 453188 - RNA, 32 nt, Human
ggaggcuaaggcaggagaauagcaugaacccg

SEQ ID NO: 453189 - RNA, 32 nt, Human
ggaggcuaaggcaggagaaucacuugaaccca

SEQ ID NO: 453190 - RNA, 32 nt, Human
ggaggcuaaggcaggagaaucacuugaacccu

SEQ ID NO: 453191 - RNA, 32 nt, Human
ggaggcuaaggcaggagaaucacuugaaccug

SEQ ID NO: 453192 - RNA, 32 nt, Human
ggaggcuaaggcaggagaaucacuugaaucca

SEQ ID NO: 453193 - RNA, 32 nt, Human
ggaggcuaaggcaggagaaucgcuugaaccca

SEQ ID NO: 453194 - RNA, 32 nt, Human
ggaggcuaaggcaggagaaucgcuugaacccc

SEQ ID NO: 453195 - RNA, 32 nt, Human
ggaggcuaaggcaggagaaucgcuugaacccg

SEQ ID NO: 453196 - RNA, 32 nt, Human
ggaggcuaaggcaggagaaucgcuugacggga

SEQ ID NO: 453197 - RNA, 32 nt, Human
ggaggcuaaggcaggagaauggcgugaacccg

SEQ ID NO: 453198 - RNA, 32 nt, Human
ggaggcuaaggcaggagaauugcuugaaccug

SEQ ID NO: 453199 - RNA, 32 nt, Human
ggaggcuaaggcaggagaauugcuugagccca

SEQ ID NO: 453200 - RNA, 32 nt, Human
ggaggcuaaggcaggagcaucguuugagccca

SEQ ID NO: 453201 - RNA, 25 nt, Human
ggaggcuaaggcaggaggauugcuu

SEQ ID NO: 453202 - RNA, 32 nt, Human
ggaggcuaaggcaggaggauugcuugagcaua

SEQ ID NO: 453203 - RNA, 32 nt, Human
ggaggcuaaggcaggaggauugcuugagccca

SEQ ID NO: 453204 - RNA, 32 nt, Human
ggaggcuaaggcaggcagaucacuugagacca

SEQ ID NO: 453205 - RNA, 32 nt, Human
ggaggcuaaggcaggcggaucacuugagguca

SEQ ID NO: 453206 - RNA, 32 nt, Human
ggaggcuaaggcaggcugaucacuugagguca

SEQ ID NO: 453207 - RNA, 32 nt, Human
ggaggcuaaggcagggagaacugcuugaacuc

SEQ ID NO: 453208 - RNA, 32 nt, Human
ggaggcuaaggcagggagaaucgcuugaagua

SEQ ID NO: 453209 - RNA, 32 nt, Human
ggaggcuaaggcagggagaauugcuuaaaccg

SEQ ID NO: 453210 - RNA, 32 nt, Human
ggaggcuaaggcagggagauggcuugagacca

SEQ ID NO: 453211 - RNA, 32 nt, Human
ggaggcuaaggcaggggaaucgcuugaaccug

SEQ ID NO: 453212 - RNA, 32 nt, Human
ggaggcuaaggcaugagaaucgcuugaaccug

SEQ ID NO: 453213 - RNA, 32 nt, Human
ggaggcuaaggcgggagaaucgcuugaauugg

SEQ ID NO: 453214 - RNA, 22 nt, Human
ggaggcuaaggcugcccaggag

SEQ ID NO: 453215 - RNA, 19 nt, Human
ggaggcuaaggcugggaga

SEQ ID NO: 453216 - RNA, 32 nt, Human
ggaggcuaagguaagagaauugcuugacccca

SEQ ID NO: 453217 - RNA, 32 nt, Human
ggaggcuaagguagaagaauugcuugaaccug

SEQ ID NO: 453218 - RNA, 25 nt, Human
ggaggcuaaggugggagaauugcuu

SEQ ID NO: 453219 - RNA, 32 nt, Human
ggaggcuaaggugggagaauugcuugaacccg

SEQ ID NO: 453220 - RNA, 32 nt, Human
ggaggcuaaggugggagaauugcuugaaccug

SEQ ID NO: 453221 - RNA, 25 nt, Human
ggaggcuaaggugggaggaucacuu

SEQ ID NO: 453222 - RNA, 32 nt, Human
ggaggcuaaugcaggagaaucgcuugaaccca

SEQ ID NO: 453223 - RNA, 32 nt, Human
ggaggcuacagcaggagaauugcuugaacucg

SEQ ID NO: 453224 - RNA, 32 nt, Human
ggaggcuaccagggccagagacagggaauggg

SEQ ID NO: 453225 - RNA, 32 nt, Human
ggaggcuaggcacggcaccagccugggaugcc

SEQ ID NO: 453226 - RNA, 32 nt, Human
ggaggcucagcagcaggacgacuugagcccaa

SEQ ID NO: 453227 - RNA, 32 nt, Human
ggaggcucagcaggucuuggagcugggagagg

SEQ ID NO: 453228 - RNA, 32 nt, Human
ggaggcucagcaguggucuugagggguaaagg

SEQ ID NO: 453229 - RNA, 32 nt, Human
ggaggcucaggcacgagaaucgcuugagucug

SEQ ID NO: 453230 - RNA, 32 nt, Human
ggaggcucaggcaggaggaucacuugaaccca

SEQ ID NO: 453231 - RNA, 25 nt, Human
ggaggcucaggcaggaggauugcuu

SEQ ID NO: 453232 - RNA, 32 nt, Human
ggaggcucaggcaggaggauugcuugagccca

SEQ ID NO: 453233 - RNA, 25 nt, Human
ggaggcucaggugggaggaucacuu

SEQ ID NO: 453234 - RNA, 25 nt, Human
ggaggcucaggugggaggauugcuu

SEQ ID NO: 453235 - RNA, 32 nt, Human
ggaggcucaggugggaggauugcuugaggcca

SEQ ID NO: 453236 - RNA, 32 nt, Human
ggaggcucaggugggcgaauugcuugagccca

SEQ ID NO: 453237 - RNA, 32 nt, Human
ggaggcucagugaccugcccugggugacacgg

SEQ ID NO: 453238 - RNA, 20 nt, Human
ggaggcucaugccuguaauc

SEQ ID NO: 453239 - RNA, 32 nt, Human
ggaggcuccacaguccuugccugcucauggac

SEQ ID NO: 453240 - RNA, 32 nt, Human
ggaggcuccagccauagcgccugguguaucca

SEQ ID NO: 453241 - RNA, 32 nt, Human
ggaggcuccaguuugggaaaggacugacugag

SEQ ID NO: 453242 - RNA, 32 nt, Human
ggaggcucccucugcugacccccugcagccug

SEQ ID NO: 453243 - RNA, 32 nt, Human
ggaggcucccugugccuggggccugagugcug

SEQ ID NO: 453244 - RNA, 32 nt, Human
ggaggcuccucugugagcucuaccugccuccc

SEQ ID NO: 453245 - RNA, 21 nt, Human
ggaggcucgagugacaucuuc

SEQ ID NO: 453246 - RNA, 21 nt, Human
ggaggcucggcuucucugcug

SEQ ID NO: 453247 - RNA, 32 nt, Human
ggaggcucuccugagugucugccccugcagug

SEQ ID NO: 453248 - RNA, 32 nt, Human
ggaggcucugggcggaggugcagugaccccgc

SEQ ID NO: 453249 - RNA, 32 nt, Human
ggaggcucugugggaugcuguugccuuggucc

SEQ ID NO: 453250 - RNA, 32 nt, Human
ggaggcugaaacaggagaauugcuugaaccug

SEQ ID NO: 453251 - RNA, 25 nt, Human
ggaggcugaaaugggaggaucacuu

SEQ ID NO: 453252 - RNA, 32 nt, Human
ggaggcugaaccaggagaauugcuugaaccgg

SEQ ID NO: 453253 - RNA, 32 nt, Human
ggaggcugaagcaagagaaucgcuugaaccca

SEQ ID NO: 453254 - RNA, 32 nt, Human
ggaggcugaagcaccagaaucucuugaaccca

SEQ ID NO: 453255 - RNA, 32 nt, Human
ggaggcugaagcagaagaaucgcuugaacccg

SEQ ID NO: 453256 - RNA, 32 nt, Human
ggaggcugaagcagaagaauugcuugaaccca

SEQ ID NO: 453257 - RNA, 32 nt, Human
ggaggcugaagcaggaaaaucgcuugaacuga

SEQ ID NO: 453258 - RNA, 32 nt, Human
ggaggcugaagcaggagaacugccugaaccca

SEQ ID NO: 453259 - RNA, 32 nt, Human
ggaggcugaagcaggagaaucacuugaaccca

SEQ ID NO: 453260 - RNA, 32 nt, Human
ggaggcugaagcaggagaaucacuugaacccg

SEQ ID NO: 453261 - RNA, 32 nt, Human
ggaggcugaagcaggagaaucacuugaaccug

SEQ ID NO: 453262 - RNA, 32 nt, Human
ggaggcugaagcaggagaaucacuugaacuca

SEQ ID NO: 453263 - RNA, 32 nt, Human
ggaggcugaagcaggagaaucccuugaaccug

SEQ ID NO: 453264 - RNA, 32 nt, Human
ggaggcugaagcaggagaaucgcuggaaccca

SEQ ID NO: 453265 - RNA, 32 nt, Human
ggaggcugaagcaggagaaucgcuugaacccg

SEQ ID NO: 453266 - RNA, 32 nt, Human
ggaggcugaagcaggagaaucgcuugaaccug

SEQ ID NO: 453267 - RNA, 32 nt, Human
ggaggcugaagcaggagaaucgcuugagccca

SEQ ID NO: 453268 - RNA, 32 nt, Human
ggaggcugaagcaggagaaucguuugaauucg

SEQ ID NO: 453269 - RNA, 32 nt, Human
ggaggcugaagcaggagaauggcaugaacccg

SEQ ID NO: 453270 - RNA, 32 nt, Human
ggaggcugaagcaggagaauggcgugaaccug

SEQ ID NO: 453271 - RNA, 32 nt, Human
ggaggcugaagcaggagaauugccugaaccca

SEQ ID NO: 453272 - RNA, 32 nt, Human
ggaggcugaagcaggagaauugccugaaccug

SEQ ID NO: 453273 - RNA, 32 nt, Human
ggaggcugaagcaggagaauugcucaaaccug

SEQ ID NO: 453274 - RNA, 32 nt, Human
ggaggcugaagcaggagaauugcucgaaccug

SEQ ID NO: 453275 - RNA, 32 nt, Human
ggaggcugaagcaggagaauugcuugaacccg

SEQ ID NO: 453276 - RNA, 32 nt, Human
ggaggcugaagcaggagagucacuugaaccug

SEQ ID NO: 453277 - RNA, 32 nt, Human
ggaggcugaagcaggagauuugcuugaaccug

SEQ ID NO: 453278 - RNA, 32 nt, Human
ggaggcugaagcaggagcauggcgugaaccug

SEQ ID NO: 453279 - RNA, 25 nt, Human
ggaggcugaagcaggaggacugcuu

SEQ ID NO: 453280 - RNA, 32 nt, Human
ggaggcugaagcaggaggacugcuugagcuga

SEQ ID NO: 453281 - RNA, 32 nt, Human
ggaggcugaagcaggaggacugcuugaggcca

SEQ ID NO: 453282 - RNA, 32 nt, Human
ggaggcugaagcaggaggauagcuagagccca

SEQ ID NO: 453283 - RNA, 32 nt, Human
ggaggcugaagcaggaggauagcuugagccca

SEQ ID NO: 453284 - RNA, 32 nt, Human
ggaggcugaagcaggaggaucacuugagccca

SEQ ID NO: 453285 - RNA, 32 nt, Human
ggaggcugaagcaggaggaucacuugagccug

SEQ ID NO: 453286 - RNA, 32 nt, Human
ggaggcugaagcaggaggaucacuugagcuug

SEQ ID NO: 453287 - RNA, 32 nt, Human
ggaggcugaagcaggaggaucacuugaggcca

SEQ ID NO: 453288 - RNA, 32 nt, Human
ggaggcugaagcaggaggauugaggaagaggu

SEQ ID NO: 453289 - RNA, 32 nt, Human
ggaggcugaagcaggaggauugauugagccug

SEQ ID NO: 453290 - RNA, 32 nt, Human
ggaggcugaagcaggaggauugcuugagccug

SEQ ID NO: 453291 - RNA, 32 nt, Human
ggaggcugaagcaggauaaucgcuugaacccg

SEQ ID NO: 453292 - RNA, 32 nt, Human
ggaggcugaagcaggaugauagcuugauuacc

SEQ ID NO: 453293 - RNA, 32 nt, Human
ggaggcugaagcaggcagauugcuugaggcca

SEQ ID NO: 453294 - RNA, 32 nt, Human
ggaggcugaagcaugagaaucacuugaauccu

SEQ ID NO: 453295 - RNA, 32 nt, Human
ggaggcugaagcgacgccggaggcaggcaaag

SEQ ID NO: 453296 - RNA, 25 nt, Human
ggaggcugaagcgggaggaucgcuu

SEQ ID NO: 453297 - RNA, 32 nt, Human
ggaggcugaaggcagauuggaggagaaacagc

SEQ ID NO: 453298 - RNA, 32 nt, Human
ggaggcugaaguaggaggaucauuuaugcuug

SEQ ID NO: 453299 - RNA, 32 nt, Human
ggaggcugaaguaggaggaucgucuugagccc

SEQ ID NO: 453300 - RNA, 25 nt, Human
ggaggcugaagugggaagaucacuu

SEQ ID NO: 453301 - RNA, 25 nt, Human
ggaggcugaagugggagaauuacuu

SEQ ID NO: 453302 - RNA, 25 nt, Human
ggaggcugaagugggaggaucgcuu

SEQ ID NO: 453303 - RNA, 32 nt, Human
ggaggcugaagugggaggauuacuugagcccg

SEQ ID NO: 453304 - RNA, 25 nt, Human
ggaggcugaagugggaggauugcuu

SEQ ID NO: 453305 - RNA, 32 nt, Human
ggaggcugacauaggagaauugcuugaauaua

SEQ ID NO: 453306 - RNA, 32 nt, Human
ggaggcugacgcaggagaaucgcuugaaccug

SEQ ID NO: 453307 - RNA, 25 nt, Human
ggaggcugacgcaggaggauugcuu

SEQ ID NO: 453308 - RNA, 32 nt, Human
ggaggcugacgcaggggaauugcuugaaccag

SEQ ID NO: 453309 - RNA, 32 nt, Human
ggaggcugacggaggaggaucacuugagccca

SEQ ID NO: 453310 - RNA, 25 nt, Human
ggaggcugacgugggaggauugcuu

SEQ ID NO: 453311 - RNA, 32 nt, Human
ggaggcugacgugggaggauugcuugugccca

SEQ ID NO: 453312 - RNA, 32 nt, Human
ggaggcugagacacaagaauugcuugaaucca

SEQ ID NO: 453313 - RNA, 32 nt, Human
ggaggcugagacagaagaaucgcuugaaccug

SEQ ID NO: 453314 - RNA, 32 nt, Human
ggaggcugagacagaagaauugcuugaaccug

SEQ ID NO: 453315 - RNA, 32 nt, Human
ggaggcugagacaggacaaucgcuugaaccug

SEQ ID NO: 453316 - RNA, 32 nt, Human
ggaggcugagacaggacacuugcuugaacccg

SEQ ID NO: 453317 - RNA, 32 nt, Human
ggaggcugagacaggagaaucgcuugaaccca

SEQ ID NO: 453318 - RNA, 32 nt, Human
ggaggcugagacaggagaaucgcuugaacccg

SEQ ID NO: 453319 - RNA, 32 nt, Human
ggaggcugagacaggagaaucgcuugaacccu

SEQ ID NO: 453320 - RNA, 32 nt, Human
ggaggcugagacaggagaaucgcuugaaccug

SEQ ID NO: 453321 - RNA, 32 nt, Human
ggaggcugagacaggagaaucgcuugaauccg

SEQ ID NO: 453322 - RNA, 32 nt, Human
ggaggcugagacaggagaauugcuugaaccca

SEQ ID NO: 453323 - RNA, 32 nt, Human
ggaggcugagacaggagaauugcuugaacccg

SEQ ID NO: 453324 - RNA, 32 nt, Human
ggaggcugagacaggagaauugcuugaaccug

SEQ ID NO: 453325 - RNA, 32 nt, Human
ggaggcugagacaggagacuugcuugaaugug

SEQ ID NO: 453326 - RNA, 32 nt, Human
ggaggcugagacaggagagucgcuugaaccug

SEQ ID NO: 453327 - RNA, 32 nt, Human
ggaggcugagacaggagauuugcuugaacccg

SEQ ID NO: 453328 - RNA, 32 nt, Human
ggaggcugagacaggaggauuccuugagcccu

SEQ ID NO: 453329 - RNA, 32 nt, Human
ggaggcugagacaggaggauugccugaggcca

SEQ ID NO: 453330 - RNA, 25 nt, Human
ggaggcugagacaggaggauugcuu

SEQ ID NO: 453331 - RNA, 32 nt, Human
ggaggcugagacaggcgaauugcuugaaccug

SEQ ID NO: 453332 - RNA, 32 nt, Human
ggaggcugagagaggagauuugcuugaaccca

SEQ ID NO: 453333 - RNA, 32 nt, Human
ggaggcugagaggugggaggaugccuugagcu

SEQ ID NO: 453334 - RNA, 32 nt, Human
ggaggcugagauaggagaaucgcuugaaccug

SEQ ID NO: 453335 - RNA, 32 nt, Human
ggaggcugagauaggaggaucacuugaacccg

SEQ ID NO: 453336 - RNA, 25 nt, Human
ggaggcugagaugggaggaucacuu

SEQ ID NO: 453337 - RNA, 25 nt, Human
ggaggcugagaugggaggaucgcuu

SEQ ID NO: 453338 - RNA, 23 nt, Human
ggaggcugagaugggaggauugc

SEQ ID NO: 453339 - RNA, 32 nt, Human
ggaggcugagaugggaggauugccugagccca

SEQ ID NO: 453340 - RNA, 25 nt, Human
ggaggcugagaugggaggauugcuu

SEQ ID NO: 453341 - RNA, 32 nt, Human
ggaggcugagaugggaggauugcuugagccca

SEQ ID NO: 453342 - RNA, 32 nt, Human
ggaggcugagaugggaggauugcuugagccug

SEQ ID NO: 453343 - RNA, 32 nt, Human
ggaggcugagauggguggauugcuugagccca

SEQ ID NO: 453344 - RNA, 32 nt, Human
ggaggcugagaugugagaaucacuugaaccug

SEQ ID NO: 453345 - RNA, 32 nt, Human
ggaggcugagaugugagaauugcuugagccca

SEQ ID NO: 453346 - RNA, 32 nt, Human
ggaggcugagauugcagugagccgaaaucacg

SEQ ID NO: 453347 - RNA, 32 nt, Human
ggaggcugagccacgagaggcuaggcacuucc

SEQ ID NO: 453348 - RNA, 32 nt, Human
ggaggcugagccacucagcaucuccugguccu

SEQ ID NO: 453349 - RNA, 32 nt, Human
ggaggcugagccaggagaaucgcuugaacccg

SEQ ID NO: 453350 - RNA, 32 nt, Human
ggaggcugagccaggagaauugcuugaaccca

SEQ ID NO: 453351 - RNA, 32 nt, Human
ggaggcugagccaggaggaucacuugagcccg

SEQ ID NO: 453352 - RNA, 32 nt, Human
ggaggcugagccuugucaggcccagccacauc

SEQ ID NO: 453353 - RNA, 32 nt, Human
ggaggcugagcuucgaggauugauugagccag

SEQ ID NO: 453354 - RNA, 32 nt, Human
ggaggcugaggaaggagaaucgcuugaacccg

SEQ ID NO: 453355 - RNA, 32 nt, Human
ggaggcugaggaaggagaaucgcuugaagccu

SEQ ID NO: 453356 - RNA, 32 nt, Human
ggaggcugaggaaggagaauugcuugaacuug

SEQ ID NO: 453357 - RNA, 32 nt, Human
ggaggcugaggagggagaaucgguugaaccug

SEQ ID NO: 453358 - RNA, 32 nt, Human
ggaggcugaggcaagagaaucgcuugaaacug

SEQ ID NO: 453359 - RNA, 32 nt, Human
ggaggcugaggcaagagaaucgcuugaaccca

SEQ ID NO: 453360 - RNA, 32 nt, Human
ggaggcugaggcaagagaaucgcuugaacccg

SEQ ID NO: 453361 - RNA, 32 nt, Human
ggaggcugaggcaagagaaucgcuugaaccug

SEQ ID NO: 453362 - RNA, 32 nt, Human
ggaggcugaggcaagagaaucgcuugaacuca

SEQ ID NO: 453363 - RNA, 32 nt, Human
ggaggcugaggcaagagaaucgcuugaaucug

SEQ ID NO: 453364 - RNA, 32 nt, Human
ggaggcugaggcaagagaaucguuugaaccug

SEQ ID NO: 453365 - RNA, 32 nt, Human
ggaggcugaggcaagagaauugcuugaaccca

SEQ ID NO: 453366 - RNA, 32 nt, Human
ggaggcugaggcaagagaauugcuugaacccg

SEQ ID NO: 453367 - RNA, 32 nt, Human
ggaggcugaggcaagagaauugcuugaacuca

SEQ ID NO: 453368 - RNA, 32 nt, Human
ggaggcugaggcaagagaauugcuuggacccg

SEQ ID NO: 453369 - RNA, 32 nt, Human
ggaggcugaggcaagagaauugcuuggacuca

SEQ ID NO: 453370 - RNA, 32 nt, Human
ggaggcugaggcaagagaguugcuugaaccca

SEQ ID NO: 453371 - RNA, 22 nt, Human
ggaggcugaggcaagaggauca

SEQ ID NO: 453372 - RNA, 32 nt, Human
ggaggcugaggcaagaggaucgcuugagccca

SEQ ID NO: 453373 - RNA, 25 nt, Human
ggaggcugaggcaagaggauugcuu

SEQ ID NO: 453374 - RNA, 32 nt, Human
ggaggcugaggcaagaggauugcuugaguuaa

SEQ ID NO: 453375 - RNA, 32 nt, Human
ggaggcugaggcaagaggauugcuugggcccg

SEQ ID NO: 453376 - RNA, 32 nt, Human
ggaggcugaggcacaagaaucgcuugaaccca

SEQ ID NO: 453377 - RNA, 32 nt, Human
ggaggcugaggcacaagaaucgcuugaacccg

SEQ ID NO: 453378 - RNA, 32 nt, Human
ggaggcugaggcacaagaaucgcuugaaucca

SEQ ID NO: 453379 - RNA, 32 nt, Human
ggaggcugaggcacaagaauugcuugaaccag

SEQ ID NO: 453380 - RNA, 32 nt, Human
ggaggcugaggcacaagaauugcuugaaccug

SEQ ID NO: 453381 - RNA, 32 nt, Human
ggaggcugaggcacaggaauugcuugaaccca

SEQ ID NO: 453382 - RNA, 32 nt, Human
ggaggcugaggcaccagaauugcuugaaccca

SEQ ID NO: 453383 - RNA, 32 nt, Human
ggaggcugaggcacgagaaucgcuugaaccug

SEQ ID NO: 453384 - RNA, 32 nt, Human
ggaggcugaggcacgagaaucgcuugagcccg

SEQ ID NO: 453385 - RNA, 32 nt, Human
ggaggcugaggcacgagaaucgcuugagcccu

SEQ ID NO: 453386 - RNA, 32 nt, Human
ggaggcugaggcacgagaaucgcuugagccug

SEQ ID NO: 453387 - RNA, 32 nt, Human
ggaggcugaggcacgagaauugcuugaaccca

SEQ ID NO: 453388 - RNA, 32 nt, Human
ggaggcugaggcacgagacuugcuugaaccca

SEQ ID NO: 453389 - RNA, 32 nt, Human
ggaggcugaggcacuagaaucgcuugagccug

SEQ ID NO: 453390 - RNA, 22 nt, Human
ggaggcugaggcagaacugcuu

SEQ ID NO: 453391 - RNA, 22 nt, Human
ggaggcugaggcagaagaauca

SEQ ID NO: 453392 - RNA, 32 nt, Human
ggaggcugaggcagaagaaucgcuugaaccca

SEQ ID NO: 453393 - RNA, 32 nt, Human
ggaggcugaggcagaagaaucgcuugaacccg

SEQ ID NO: 453394 - RNA, 32 nt, Human
ggaggcugaggcagaagaaucgcuugaacccu

SEQ ID NO: 453395 - RNA, 32 nt, Human
ggaggcugaggcagaagaaucgcuugaaccgg

SEQ ID NO: 453396 - RNA, 32 nt, Human
ggaggcugaggcagaagaaucgcuugaaccug

SEQ ID NO: 453397 - RNA, 32 nt, Human
ggaggcugaggcagaagaaucgcuugagcccg

SEQ ID NO: 453398 - RNA, 32 nt, Human
ggaggcugaggcagaagaauugcuugaaccca

SEQ ID NO: 453399 - RNA, 25 nt, Human
ggaggcugaggcagaaggauugcuu

SEQ ID NO: 453400 - RNA, 32 nt, Human
ggaggcugaggcagaaggauugcuugaacccg

SEQ ID NO: 453401 - RNA, 32 nt, Human
ggaggcugaggcagaaguauugcuugaaccca

SEQ ID NO: 453402 - RNA, 32 nt, Human
ggaggcugaggcagaauaaucgcuugaaccca

SEQ ID NO: 453403 - RNA, 25 nt, Human
ggaggcugaggcagauggacugcuu

SEQ ID NO: 453404 - RNA, 22 nt, Human
ggaggcugaggcaggaaaauca

SEQ ID NO: 453405 - RNA, 32 nt, Human
ggaggcugaggcaggaaaaucgcuugaaccca

SEQ ID NO: 453406 - RNA, 32 nt, Human
ggaggcugaggcaggaaaaucgcuugcaccca

SEQ ID NO: 453407 - RNA, 32 nt, Human
ggaggcugaggcaggaaaauugcuugaacccg

SEQ ID NO: 453408 - RNA, 32 nt, Human
ggaggcugaggcaggaagcucgcuugagcuca

SEQ ID NO: 453409 - RNA, 32 nt, Human
ggaggcugaggcaggacaaucgcuugaaccug

SEQ ID NO: 453410 - RNA, 24 nt, Human
ggaggcugaggcaggagaacugcu

SEQ ID NO: 453411 - RNA, 22 nt, Human
ggaggcugaggcaggagaauca

SEQ ID NO: 453412 - RNA, 32 nt, Human
ggaggcugaggcaggagaaucgccugaaccca

SEQ ID NO: 453413 - RNA, 32 nt, Human
ggaggcugaggcaggagaaucgccugaacccg

SEQ ID NO: 453414 - RNA, 32 nt, Human
ggaggcugaggcaggagaaucgccugaaccug

SEQ ID NO: 453415 - RNA, 32 nt, Human
ggaggcugaggcaggagaaucgcgugaaccca

SEQ ID NO: 453416 - RNA, 32 nt, Human
ggaggcugaggcaggagaaucgcgugaacccg

SEQ ID NO: 453417 - RNA, 32 nt, Human
ggaggcugaggcaggagaaucgcuagaacccg

SEQ ID NO: 453418 - RNA, 32 nt, Human
ggaggcugaggcaggagaaucgcuagaaccug

SEQ ID NO: 453419 - RNA, 32 nt, Human
ggaggcugaggcaggagaaucgcuggaaccca

SEQ ID NO: 453420 - RNA, 32 nt, Human
ggaggcugaggcaggagaaucgcuggaacccg

SEQ ID NO: 453421 - RNA, 32 nt, Human
ggaggcugaggcaggagaaucgcuggaaccug

SEQ ID NO: 453422 - RNA, 32 nt, Human
ggaggcugaggcaggagaaucgcuggagcccg

SEQ ID NO: 453423 - RNA, 32 nt, Human
ggaggcugaggcaggagaaucgcuuaaaccug

SEQ ID NO: 453424 - RNA, 32 nt, Human
ggaggcugaggcaggagaaucgcuuaaacucg

SEQ ID NO: 453425 - RNA, 32 nt, Human
ggaggcugaggcaggagaaucgcuugaaaaca

SEQ ID NO: 453426 - RNA, 32 nt, Human
ggaggcugaggcaggagaaucgcuugaaacug

SEQ ID NO: 453427 - RNA, 32 nt, Human
ggaggcugaggcaggagaaucgcuugaaccag

SEQ ID NO: 453428 - RNA, 32 nt, Human
ggaggcugaggcaggagaaucgcuugaaccca

SEQ ID NO: 453429 - RNA, 32 nt, Human
ggaggcugaggcaggagaaucgcuugaacccg

SEQ ID NO: 453430 - RNA, 32 nt, Human
ggaggcugaggcaggagaaucgcuugaaccgg

SEQ ID NO: 453431 - RNA, 32 nt, Human
ggaggcugaggcaggagaaucgcuugaaccua

SEQ ID NO: 453432 - RNA, 32 nt, Human
ggaggcugaggcaggagaaucgcuugaaccug

SEQ ID NO: 453433 - RNA, 32 nt, Human
ggaggcugaggcaggagaaucgcuugaacuca

SEQ ID NO: 453434 - RNA, 32 nt, Human
ggaggcugaggcaggagaaucgcuugaacucg

SEQ ID NO: 453435 - RNA, 32 nt, Human
ggaggcugaggcaggagaaucgcuugaaucca

SEQ ID NO: 453436 - RNA, 32 nt, Human
ggaggcugaggcaggagaaucgcuugaauccg

SEQ ID NO: 453437 - RNA, 32 nt, Human
ggaggcugaggcaggagaaucgcuugaaucug

SEQ ID NO: 453438 - RNA, 32 nt, Human
ggaggcugaggcaggagaaucgcuugacucca

SEQ ID NO: 453439 - RNA, 32 nt, Human
ggaggcugaggcaggagaaucgcuugagccca

SEQ ID NO: 453440 - RNA, 32 nt, Human
ggaggcugaggcaggagaaucgcuugagcccg

SEQ ID NO: 453441 - RNA, 32 nt, Human
ggaggcugaggcaggagaaucgcuugagccug

SEQ ID NO: 453442 - RNA, 32 nt, Human
ggaggcugaggcaggagaaucgcuuggaccug

SEQ ID NO: 453443 - RNA, 32 nt, Human
ggaggcugaggcaggagaaucgcuuguaccca

SEQ ID NO: 453444 - RNA, 32 nt, Human
ggaggcugaggcaggagaaucgguugaaccag

SEQ ID NO: 453445 - RNA, 32 nt, Human
ggaggcugaggcaggagaaucgguugaacccg

SEQ ID NO: 453446 - RNA, 32 nt, Human
ggaggcugaggcaggagaaucguuugaaccca

SEQ ID NO: 453447 - RNA, 32 nt, Human
ggaggcugaggcaggagaaucguuugaacccg

SEQ ID NO: 453448 - RNA, 32 nt, Human
ggaggcugaggcaggagaaucguuugaaccug

SEQ ID NO: 453449 - RNA, 32 nt, Human
ggaggcugaggcaggagaaugaagugaaccga

SEQ ID NO: 453450 - RNA, 32 nt, Human
ggaggcugaggcaggagaaugaugugaacccg

SEQ ID NO: 453451 - RNA, 32 nt, Human
ggaggcugaggcaggagaauggcgggaaccug

SEQ ID NO: 453452 - RNA, 32 nt, Human
ggaggcugaggcaggagaauguggugaaccug

SEQ ID NO: 453453 - RNA, 32 nt, Human
ggaggcugaggcaggagaauugcuugaaaccc

SEQ ID NO: 453454 - RNA, 32 nt, Human
ggaggcugaggcaggagaauugcuugaaccaa

SEQ ID NO: 453455 - RNA, 32 nt, Human
ggaggcugaggcaggagaauugcuugaaccag

SEQ ID NO: 453456 - RNA, 32 nt, Human
ggaggcugaggcaggagaauugcuugaaccca

SEQ ID NO: 453457 - RNA, 32 nt, Human
ggaggcugaggcaggagaauugcuugaacccg

SEQ ID NO: 453458 - RNA, 32 nt, Human
ggaggcugaggcaggagaauugcuugaacccu

SEQ ID NO: 453459 - RNA, 32 nt, Human
ggaggcugaggcaggagaauugcuugaaccua

SEQ ID NO: 453460 - RNA, 32 nt, Human
ggaggcugaggcaggagaauugcuugaaccug

SEQ ID NO: 453461 - RNA, 32 nt, Human
ggaggcugaggcaggagaauugcuugaacuca

SEQ ID NO: 453462 - RNA, 32 nt, Human
ggaggcugaggcaggagaauugcuugaacucg

SEQ ID NO: 453463 - RNA, 32 nt, Human
ggaggcugaggcaggagaauugcuugaacugg

SEQ ID NO: 453464 - RNA, 32 nt, Human
ggaggcugaggcaggagaauugcuugaacuug

SEQ ID NO: 453465 - RNA, 32 nt, Human
ggaggcugaggcaggagaauugcuugaagaug

SEQ ID NO: 453466 - RNA, 32 nt, Human
ggaggcugaggcaggagaauugcuugaauccc

SEQ ID NO: 453467 - RNA, 32 nt, Human
ggaggcugaggcaggagaauugcuugaauccg

SEQ ID NO: 453468 - RNA, 32 nt, Human
ggaggcugaggcaggagaauugcuugaaucua

SEQ ID NO: 453469 - RNA, 32 nt, Human
ggaggcugaggcaggagaauugcuugaaucug

SEQ ID NO: 453470 - RNA, 32 nt, Human
ggaggcugaggcaggagaauugcuugagccca

SEQ ID NO: 453471 - RNA, 32 nt, Human
ggaggcugaggcaggagaauugcuugagcccg

SEQ ID NO: 453472 - RNA, 32 nt, Human
ggaggcugaggcaggagaauugcuugagccug

SEQ ID NO: 453473 - RNA, 32 nt, Human
ggaggcugaggcaggagaauugcuugagucca

SEQ ID NO: 453474 - RNA, 32 nt, Human
ggaggcugaggcaggagaauugcuuggaccua

SEQ ID NO: 453475 - RNA, 32 nt, Human
ggaggcugaggcaggagacucgcuugaaccca

SEQ ID NO: 453476 - RNA, 32 nt, Human
ggaggcugaggcaggagacucgcuugaaccug

SEQ ID NO: 453477 - RNA, 32 nt, Human
ggaggcugaggcaggagauucgcuugaaccug

SEQ ID NO: 453478 - RNA, 32 nt, Human
ggaggcugaggcaggagauucgcuugaacuca

SEQ ID NO: 453479 - RNA, 32 nt, Human
ggaggcugaggcaggagcaucgcuugaaccug

SEQ ID NO: 453480 - RNA, 32 nt, Human
ggaggcugaggcaggagcauugcuugaacccg

SEQ ID NO: 453481 - RNA, 24 nt, Human
ggaggcugaggcaggaggaccgcu

SEQ ID NO: 453482 - RNA, 32 nt, Human
ggaggcugaggcaggaggaccgcuugagccca

SEQ ID NO: 453483 - RNA, 25 nt, Human
ggaggcugaggcaggaggacugcuu

SEQ ID NO: 453484 - RNA, 32 nt, Human
ggaggcugaggcaggaggacugcuugagccca

SEQ ID NO: 453485 - RNA, 25 nt, Human
ggaggcugaggcaggaggacuguuu

SEQ ID NO: 453486 - RNA, 32 nt, Human
ggaggcugaggcaggaggacuguuugaguuca

SEQ ID NO: 453487 - RNA, 32 nt, Human
ggaggcugaggcaggaggaggauaacuugaac

SEQ ID NO: 453488 - RNA, 32 nt, Human
ggaggcugaggcaggaggauagcuugaggcug

SEQ ID NO: 453489 - RNA, 22 nt, Human
ggaggcugaggcaggaggauca

SEQ ID NO: 453490 - RNA, 32 nt, Human
ggaggcugaggcaggaggaucacucgagcuca

SEQ ID NO: 453491 - RNA, 32 nt, Human
ggaggcugaggcaggaggaucacuugaaccug

SEQ ID NO: 453492 - RNA, 32 nt, Human
ggaggcugaggcaggaggaucacuugaacugg

SEQ ID NO: 453493 - RNA, 32 nt, Human
ggaggcugaggcaggaggaucacuugagacca

SEQ ID NO: 453494 - RNA, 32 nt, Human
ggaggcugaggcaggaggaucacuugagccaa

SEQ ID NO: 453495 - RNA, 32 nt, Human
ggaggcugaggcaggaggaucacuugagccca

SEQ ID NO: 453496 - RNA, 32 nt, Human
ggaggcugaggcaggaggaucacuugagccua

SEQ ID NO: 453497 - RNA, 32 nt, Human
ggaggcugaggcaggaggaucacuugaggcca

SEQ ID NO: 453498 - RNA, 32 nt, Human
ggaggcugaggcaggaggaucacuugagguca

SEQ ID NO: 453499 - RNA, 23 nt, Human
ggaggcugaggcaggaggaucau

SEQ ID NO: 453500 - RNA, 32 nt, Human
ggaggcugaggcaggaggaucauuugagccca

SEQ ID NO: 453501 - RNA, 32 nt, Human
ggaggcugaggcaggaggaucauuugagguca

SEQ ID NO: 453502 - RNA, 32 nt, Human
ggaggcugaggcaggaggaucccuugagccca

SEQ ID NO: 453503 - RNA, 32 nt, Human
ggaggcugaggcaggaggaucccuugagucca

SEQ ID NO: 453504 - RNA, 32 nt, Human
ggaggcugaggcaggaggaucccuugaguuca

SEQ ID NO: 453505 - RNA, 32 nt, Human
ggaggcugaggcaggaggaucccuuggguuca

SEQ ID NO: 453506 - RNA, 32 nt, Human
ggaggcugaggcaggaggaucgccugagccca

SEQ ID NO: 453507 - RNA, 32 nt, Human
ggaggcugaggcaggaggaucgcuugaaccca

SEQ ID NO: 453508 - RNA, 32 nt, Human
ggaggcugaggcaggaggaucgcuugagccca

SEQ ID NO: 453509 - RNA, 32 nt, Human
ggaggcugaggcaggaggaucgcuugaggcca

SEQ ID NO: 453510 - RNA, 32 nt, Human
ggaggcugaggcaggaggaucgcuugagugug

SEQ ID NO: 453511 - RNA, 32 nt, Human
ggaggcugaggcaggaggaucgcuugggccug

SEQ ID NO: 453512 - RNA, 32 nt, Human
ggaggcugaggcaggaggaucucuugagccca

SEQ ID NO: 453513 - RNA, 32 nt, Human
ggaggcugaggcaggaggauggcgugaacccg

SEQ ID NO: 453514 - RNA, 32 nt, Human
ggaggcugaggcaggaggauggcuugaaccug

SEQ ID NO: 453515 - RNA, 32 nt, Human
ggaggcugaggcaggaggauggugugaaccug

SEQ ID NO: 453516 - RNA, 32 nt, Human
ggaggcugaggcaggaggauugccugagccca

SEQ ID NO: 453517 - RNA, 32 nt, Human
ggaggcugaggcaggaggauugccugaggcca

SEQ ID NO: 453518 - RNA, 24 nt, Human
ggaggcugaggcaggaggauugcu

SEQ ID NO: 453519 - RNA, 25 nt, Human
ggaggcugaggcaggaggauugcuu

SEQ ID NO: 453520 - RNA, 32 nt, Human
ggaggcugaggcaggaggauugcuugaacccg

SEQ ID NO: 453521 - RNA, 32 nt, Human
ggaggcugaggcaggaggauugcuugaacccu

SEQ ID NO: 453522 - RNA, 32 nt, Human
ggaggcugaggcaggaggauugcuugagccca

SEQ ID NO: 453523 - RNA, 32 nt, Human
ggaggcugaggcaggaggauugcuugaggcca

SEQ ID NO: 453524 - RNA, 32 nt, Human
ggaggcugaggcaggaggauugcuugagucua

SEQ ID NO: 453525 - RNA, 32 nt, Human
ggaggcugaggcaggaggauuguuugaggcca

SEQ ID NO: 453526 - RNA, 32 nt, Human
ggaggcugaggcaggagggucucuugagccca

SEQ ID NO: 453527 - RNA, 32 nt, Human
ggaggcugaggcaggaggguugcuugagacua

SEQ ID NO: 453528 - RNA, 32 nt, Human
ggaggcugaggcaggaguauugcuugaacccg

SEQ ID NO: 453529 - RNA, 32 nt, Human
ggaggcugaggcaggauaaucgcuugaauccg

SEQ ID NO: 453530 - RNA, 32 nt, Human
ggaggcugaggcaggauaauugcuugaaccca

SEQ ID NO: 453531 - RNA, 32 nt, Human
ggaggcugaggcaggauaauugcuugagccug

SEQ ID NO: 453532 - RNA, 32 nt, Human
ggaggcugaggcaggauaauugcuuggaccug

SEQ ID NO: 453533 - RNA, 32 nt, Human
ggaggcugaggcaggcagauugcuugagcuca

SEQ ID NO: 453534 - RNA, 32 nt, Human
ggaggcugaggcaggcggaucgcuugagcuca

SEQ ID NO: 453535 - RNA, 32 nt, Human
ggaggcugaggcaggggaaucgcuugaaccug

SEQ ID NO: 453536 - RNA, 32 nt, Human
ggaggcugaggcaggggaauugcuugaaccag

SEQ ID NO: 453537 - RNA, 32 nt, Human
ggaggcugaggcaggggaauugcuugaacccg

SEQ ID NO: 453538 - RNA, 32 nt, Human
ggaggcugaggcaggggcauugcuugggcccg

SEQ ID NO: 453539 - RNA, 22 nt, Human
ggaggcugaggcaggugaauca

SEQ ID NO: 453540 - RNA, 32 nt, Human
ggaggcugaggcaggugaaucgcuugaaccca

SEQ ID NO: 453541 - RNA, 32 nt, Human
ggaggcugaggcagguggauugcuugaaccca

SEQ ID NO: 453542 - RNA, 32 nt, Human
ggaggcugaggcagguggauugcuuugaggcc

SEQ ID NO: 453543 - RNA, 32 nt, Human
ggaggcugaggcaguagaaucgcuugaaccca

SEQ ID NO: 453544 - RNA, 32 nt, Human
ggaggcugaggcauaagaaucgccugaacccg

SEQ ID NO: 453545 - RNA, 32 nt, Human
ggaggcugaggcaugagaaucaauugaacccg

SEQ ID NO: 453546 - RNA, 32 nt, Human
ggaggcugaggcaugagaaucacuuaaaccug

SEQ ID NO: 453547 - RNA, 32 nt, Human
ggaggcugaggcaugagaaucacuugaacccu

SEQ ID NO: 453548 - RNA, 32 nt, Human
ggaggcugaggcaugagaaucacuugaaccug

SEQ ID NO: 453549 - RNA, 32 nt, Human
ggaggcugaggcaugagaaucgcugcaacuug

SEQ ID NO: 453550 - RNA, 32 nt, Human
ggaggcugaggcaugagaaucgcuugaaccua

SEQ ID NO: 453551 - RNA, 32 nt, Human
ggaggcugaggcaugagaaucgcuugaaccug

SEQ ID NO: 453552 - RNA, 32 nt, Human
ggaggcugaggcaugagaaucgcuugagccgg

SEQ ID NO: 453553 - RNA, 32 nt, Human
ggaggcugaggcaugagaaucgcuuggacccg

SEQ ID NO: 453554 - RNA, 32 nt, Human
ggaggcugaggcaugagaaucgcuugggccca

SEQ ID NO: 453555 - RNA, 32 nt, Human
ggaggcugaggcaugagaauuacuugaaccca

SEQ ID NO: 453556 - RNA, 32 nt, Human
ggaggcugaggcaugagaauugcuugaaccag

SEQ ID NO: 453557 - RNA, 32 nt, Human
ggaggcugaggcaugagaauugcuugaaccca

SEQ ID NO: 453558 - RNA, 32 nt, Human
ggaggcugaggcaugagaauugcuugaacccg

SEQ ID NO: 453559 - RNA, 32 nt, Human
ggaggcugaggcaugagaauugcuugaaccug

SEQ ID NO: 453560 - RNA, 32 nt, Human
ggaggcugaggcaugagacuugccugaaccca

SEQ ID NO: 453561 - RNA, 32 nt, Human
ggaggcugaggccagagaaucgcuugaaccug

SEQ ID NO: 453562 - RNA, 32 nt, Human
ggaggcugaggccaggaggauggguggacgcu

SEQ ID NO: 453563 - RNA, 32 nt, Human
ggaggcugaggcccgagaaucgcuugagcccu

SEQ ID NO: 453564 - RNA, 32 nt, Human
ggaggcugaggccggagaaucgcuugagcccg

SEQ ID NO: 453565 - RNA, 32 nt, Human
ggaggcugaggccggaggauugcuugagccca

SEQ ID NO: 453566 - RNA, 32 nt, Human
ggaggcugaggccugagacucgcuugaaccca

SEQ ID NO: 453567 - RNA, 32 nt, Human
ggaggcugaggcgagagaaucgcuugagccug

SEQ ID NO: 453568 - RNA, 25 nt, Human
ggaggcugaggcgagaggauugcuu

SEQ ID NO: 453569 - RNA, 32 nt, Human
ggaggcugaggcggaacgaucgcuugagccuu

SEQ ID NO: 453570 - RNA, 32 nt, Human
ggaggcugaggcggaagauucgcuugagccca

SEQ ID NO: 453571 - RNA, 32 nt, Human
ggaggcugaggcggaugaauugcuugaaucca

SEQ ID NO: 453572 - RNA, 32 nt, Human
ggaggcugaggcgggagaaucgcuugaaccca

SEQ ID NO: 453573 - RNA, 32 nt, Human
ggaggcugaggcgggagaaucgcuugaacccg

SEQ ID NO: 453574 - RNA, 32 nt, Human
ggaggcugaggcgggagaauugcuugaacagg

SEQ ID NO: 453575 - RNA, 32 nt, Human
ggaggcugaggcgggagaauugcuugaacccg

SEQ ID NO: 453576 - RNA, 25 nt, Human
ggaggcugaggcgggaggaucacuu

SEQ ID NO: 453577 - RNA, 25 nt, Human
ggaggcugaggcgggaggaucgcuu

SEQ ID NO: 453578 - RNA, 32 nt, Human
ggaggcugaggcgggaggaucgcuugagccca

SEQ ID NO: 453579 - RNA, 25 nt, Human
ggaggcugaggcgggaggauugcuu

SEQ ID NO: 453580 - RNA, 32 nt, Human
ggaggcugaggcgggaggauugcuugaggcca

SEQ ID NO: 453581 - RNA, 32 nt, Human
ggaggcugaggcgggcagauugcuugagguca

SEQ ID NO: 453582 - RNA, 32 nt, Human
ggaggcugaggcggguggauugcuugagacca

SEQ ID NO: 453583 - RNA, 32 nt, Human
ggaggcugaggcggguggauugcuugagccca

SEQ ID NO: 453584 - RNA, 32 nt, Human
ggaggcugaggcggguggauugcuugaggcca

SEQ ID NO: 453585 - RNA, 32 nt, Human
ggaggcugaggcgugagaaucgcuugaacccg

SEQ ID NO: 453586 - RNA, 32 nt, Human
ggaggcugaggcuggagaaucgcuugaaccca

SEQ ID NO: 453587 - RNA, 32 nt, Human
ggaggcugaggcuggagaaucgcuugaggcua

SEQ ID NO: 453588 - RNA, 32 nt, Human
ggaggcugaggcuggagaaucguuugaggcua

SEQ ID NO: 453589 - RNA, 32 nt, Human
ggaggcugaggcuggagaauggugugaaccca

SEQ ID NO: 453590 - RNA, 32 nt, Human
ggaggcugaggcuggagaauugcuugaggcua

SEQ ID NO: 453591 - RNA, 32 nt, Human
ggaggcugaggcuggagaguugcucaaacccg

SEQ ID NO: 453592 - RNA, 32 nt, Human
ggaggcugaggcuggaggaucgcuugaaccug

SEQ ID NO: 453593 - RNA, 32 nt, Human
ggaggcugaggcuggaggauugguugagcuua

SEQ ID NO: 453594 - RNA, 22 nt, Human
ggaggcugaggcugguggauca

SEQ ID NO: 453595 - RNA, 32 nt, Human
ggaggcugaggggcaaggauugcuugaggcug

SEQ ID NO: 453596 - RNA, 32 nt, Human
ggaggcugagggggaagaauugcuugggccca

SEQ ID NO: 453597 - RNA, 32 nt, Human
ggaggcugaggggguggaucaccugaggucgg

SEQ ID NO: 453598 - RNA, 32 nt, Human
ggaggcugaggguggagaaucgcuugaaccug

SEQ ID NO: 453599 - RNA, 32 nt, Human
ggaggcugagguaggagaaucgcuugaaccca

SEQ ID NO: 453600 - RNA, 32 nt, Human
ggaggcugagguaggagaaucgcuugaacccg

SEQ ID NO: 453601 - RNA, 32 nt, Human
ggaggcugagguaggagaaucguuugaacuca

SEQ ID NO: 453602 - RNA, 32 nt, Human
ggaggcugagguaggagaauggcgugaacccg

SEQ ID NO: 453603 - RNA, 32 nt, Human
ggaggcugagguaggagaauugcuugaaccca

SEQ ID NO: 453604 - RNA, 32 nt, Human
ggaggcugagguaggagaauugcuugaaccug

SEQ ID NO: 453605 - RNA, 32 nt, Human
ggaggcugagguaggagaauugcuugacccug

SEQ ID NO: 453606 - RNA, 32 nt, Human
ggaggcugagguaggagaauugcuugagccug

SEQ ID NO: 453607 - RNA, 32 nt, Human
ggaggcugagguaggagagucgcuugagccug

SEQ ID NO: 453608 - RNA, 25 nt, Human
ggaggcugagguaggaggacugcuu

SEQ ID NO: 453609 - RNA, 32 nt, Human
ggaggcugagguaggaggaucacuuaagccug

SEQ ID NO: 453610 - RNA, 32 nt, Human
ggaggcugagguaggaggaucacuugggccaa

SEQ ID NO: 453611 - RNA, 32 nt, Human
ggaggcugagguaggaggaucgccugagcaug

SEQ ID NO: 453612 - RNA, 32 nt, Human
ggaggcugagguaggaggaucgcuugaaccca

SEQ ID NO: 453613 - RNA, 32 nt, Human
ggaggcugagguaggaggaucgcuugagccug

SEQ ID NO: 453614 - RNA, 32 nt, Human
ggaggcugagguaggaggaucgcuugaggcca

SEQ ID NO: 453615 - RNA, 32 nt, Human
ggaggcugagguaggaggauugauugaggcca

SEQ ID NO: 453616 - RNA, 32 nt, Human
ggaggcugagguaggcagaucacuugagcuca

SEQ ID NO: 453617 - RNA, 32 nt, Human
ggaggcugagguaguagaauugcuugaaccag

SEQ ID NO: 453618 - RNA, 32 nt, Human
ggaggcugagguaugaggauugcuugagccug

SEQ ID NO: 453619 - RNA, 25 nt, Human
ggaggcugaggugaaaggauugcuu

SEQ ID NO: 453620 - RNA, 32 nt, Human
ggaggcugaggugaaaggauugcuugagccag

SEQ ID NO: 453621 - RNA, 32 nt, Human
ggaggcugaggugagaggaucgcuugagcuca

SEQ ID NO: 453622 - RNA, 32 nt, Human
ggaggcugaggugagaggauuccuugaggcca

SEQ ID NO: 453623 - RNA, 32 nt, Human
ggaggcugaggugagcagguugcuugagccca

SEQ ID NO: 453624 - RNA, 32 nt, Human
ggaggcugaggugaguggauugcuugaguccg

SEQ ID NO: 453625 - RNA, 32 nt, Human
ggaggcugagguggaaagauggcccaggaauu

SEQ ID NO: 453626 - RNA, 32 nt, Human
ggaggcugagguggaaggaucgcuugagccca

SEQ ID NO: 453627 - RNA, 32 nt, Human
ggaggcugagguggaaggauugcuugagccug

SEQ ID NO: 453628 - RNA, 32 nt, Human
ggaggcugagguggacagaucgcuugagccca

SEQ ID NO: 453629 - RNA, 32 nt, Human
ggaggcugagguggagggaucgcuugaaucca

SEQ ID NO: 453630 - RNA, 25 nt, Human
ggaggcugaggugggaaaaucacuu

SEQ ID NO: 453631 - RNA, 25 nt, Human
ggaggcugaggugggagaaucacuu

SEQ ID NO: 453632 - RNA, 25 nt, Human
ggaggcugaggugggagaaucgcuu

SEQ ID NO: 453633 - RNA, 32 nt, Human
ggaggcugaggugggagaaucgcuugaaccca

SEQ ID NO: 453634 - RNA, 23 nt, Human
ggaggcugaggugggagaauugc

SEQ ID NO: 453635 - RNA, 24 nt, Human
ggaggcugaggugggagaauugcu

SEQ ID NO: 453636 - RNA, 25 nt, Human
ggaggcugaggugggagaauugcuu

SEQ ID NO: 453637 - RNA, 32 nt, Human
ggaggcugaggugggagaauugcuugaaccca

SEQ ID NO: 453638 - RNA, 32 nt, Human
ggaggcugaggugggagaauugcuugaaccug

SEQ ID NO: 453639 - RNA, 32 nt, Human
ggaggcugaggugggagaauugcuugagccca

SEQ ID NO: 453640 - RNA, 32 nt, Human
ggaggcugaggugggagccugggaggucaagg

SEQ ID NO: 453641 - RNA, 25 nt, Human
ggaggcugaggugggaggacugcuu

SEQ ID NO: 453642 - RNA, 25 nt, Human
ggaggcugaggugggaggaucacuu

SEQ ID NO: 453643 - RNA, 32 nt, Human
ggaggcugaggugggaggaucccaggaguuca

SEQ ID NO: 453644 - RNA, 23 nt, Human
ggaggcugaggugggaggaucgc

SEQ ID NO: 453645 - RNA, 25 nt, Human
ggaggcugaggugggaggaucgcuu

SEQ ID NO: 453646 - RNA, 32 nt, Human
ggaggcugaggugggaggaucgcuugaaccca

SEQ ID NO: 453647 - RNA, 32 nt, Human
ggaggcugaggugggaggaucgcuugagccca

SEQ ID NO: 453648 - RNA, 32 nt, Human
ggaggcugaggugggaggaucgcuugagccug

SEQ ID NO: 453649 - RNA, 32 nt, Human
ggaggcugaggugggaggaucgcuugaggcaa

SEQ ID NO: 453650 - RNA, 23 nt, Human
ggaggcugaggugggaggauugc

SEQ ID NO: 453651 - RNA, 32 nt, Human
ggaggcugaggugggaggauugccugagccca

SEQ ID NO: 453652 - RNA, 25 nt, Human
ggaggcugaggugggaggauugcuu

SEQ ID NO: 453653 - RNA, 32 nt, Human
ggaggcugaggugggaggauugcuugaaccca

SEQ ID NO: 453654 - RNA, 32 nt, Human
ggaggcugaggugggaggauugcuugaacccg

SEQ ID NO: 453655 - RNA, 32 nt, Human
ggaggcugaggugggaggauugcuugagacca

SEQ ID NO: 453656 - RNA, 32 nt, Human
ggaggcugaggugggaggauugcuugagccaa

SEQ ID NO: 453657 - RNA, 32 nt, Human
ggaggcugaggugggaggauugcuugagccca

SEQ ID NO: 453658 - RNA, 32 nt, Human
ggaggcugaggugggaggauugcuugagcccu

SEQ ID NO: 453659 - RNA, 32 nt, Human
ggaggcugaggugggaggauugcuugagccua

SEQ ID NO: 453660 - RNA, 32 nt, Human
ggaggcugaggugggaggauugcuugagccug

SEQ ID NO: 453661 - RNA, 32 nt, Human
ggaggcugaggugggaggauugcuugagucca

SEQ ID NO: 453662 - RNA, 32 nt, Human
ggaggcugaggugggaggauugcuugggccug

SEQ ID NO: 453663 - RNA, 32 nt, Human
ggaggcugaggugggaggauuguuugagccca

SEQ ID NO: 453664 - RNA, 32 nt, Human
ggaggcugaggugggaggauuguuugagccug

SEQ ID NO: 453665 - RNA, 32 nt, Human
ggaggcugaggugggagggucgcuugaguuca

SEQ ID NO: 453666 - RNA, 32 nt, Human
ggaggcugaggugggaggguugcuugagccca

SEQ ID NO: 453667 - RNA, 32 nt, Human
ggaggcugaggugggcagaucgcuugagccca

SEQ ID NO: 453668 - RNA, 32 nt, Human
ggaggcugaggugggcggauugcuugaggucg

SEQ ID NO: 453669 - RNA, 32 nt, Human
ggaggcugagguggguggauugcuugagccca

SEQ ID NO: 453670 - RNA, 32 nt, Human
ggaggcugaggugguuguauugcuugaggcca

SEQ ID NO: 453671 - RNA, 32 nt, Human
ggaggcugagguugcaggaucgcuugagccca

SEQ ID NO: 453672 - RNA, 32 nt, Human
ggaggcugagguuggagaaucgcuugaggcca

SEQ ID NO: 453673 - RNA, 32 nt, Human
ggaggcugagguuggaggauugcuugagccca

SEQ ID NO: 453674 - RNA, 32 nt, Human
ggaggcugagucaggagaaucgcuugaaccug

SEQ ID NO: 453675 - RNA, 32 nt, Human
ggaggcugagucaggauaauugcuugaaccug

SEQ ID NO: 453676 - RNA, 32 nt, Human
ggaggcugaguccccuuccucacugcucucua

SEQ ID NO: 453677 - RNA, 32 nt, Human
ggaggcugagucugaaauaaacucugucgucu

SEQ ID NO: 453678 - RNA, 24 nt, Human
ggaggcugagugggaugaccgcuu

SEQ ID NO: 453679 - RNA, 32 nt, Human
ggaggcugaugcaagaggaucgcuugagccca

SEQ ID NO: 453680 - RNA, 32 nt, Human
ggaggcugaugcaugagaauugcuugaaccca

SEQ ID NO: 453681 - RNA, 32 nt, Human
ggaggcugcacuggagccacaggcagggguga

SEQ ID NO: 453682 - RNA, 32 nt, Human
ggaggcugcagaggaggagcagggugggguuu

SEQ ID NO: 453683 - RNA, 32 nt, Human
ggaggcugcagcugaagguggcaggaacccac

SEQ ID NO: 453684 - RNA, 32 nt, Human
ggaggcugcccacauccccacaugugcacugu

SEQ ID NO: 453685 - RNA, 32 nt, Human
ggaggcugccggaacucaagaggcagaaaaag

SEQ ID NO: 453686 - RNA, 32 nt, Human
ggaggcugccgggcagaguggagcagcuuggg

SEQ ID NO: 453687 - RNA, 32 nt, Human
ggaggcugcgacaggaaaauugcuugaacuca

SEQ ID NO: 453688 - RNA, 32 nt, Human
ggaggcugcgccccuccaguucugccuucaua

SEQ ID NO: 453689 - RNA, 32 nt, Human
ggaggcugcggcaggagaauugcuugaacccg

SEQ ID NO: 453690 - RNA, 32 nt, Human
ggaggcugcggcgggagaaucgcuugaaccgg

SEQ ID NO: 453691 - RNA, 32 nt, Human
ggaggcugcgguucugcuuccuccuggggcug

SEQ ID NO: 453692 - RNA, 32 nt, Human
ggaggcugcuguuacugagcuguggggaccag

SEQ ID NO: 453693 - RNA, 32 nt, Human
ggaggcuggacaccuguucugcuguugugucc

SEQ ID NO: 453694 - RNA, 18 nt, Human
ggaggcuggacagcucca

SEQ ID NO: 453695 - RNA, 32 nt, Human
ggaggcuggagguggagauggggucaggaaca

SEQ ID NO: 453696 - RNA, 32 nt, Human
ggaggcuggcacaggagaaucgcuugaaucug

SEQ ID NO: 453697 - RNA, 32 nt, Human
ggaggcuggcagcugaaagagcagggaaggcu

SEQ ID NO: 453698 - RNA, 32 nt, Human
ggaggcuggccuuucaucucagcaccagggug

SEQ ID NO: 453699 - RNA, 23 nt, Human
ggaggcuggcggacaggcgacag

SEQ ID NO: 453700 - RNA, 22 nt, Human
ggaggcuggcggguugcuucag

SEQ ID NO: 453701 - RNA, 32 nt, Human
ggaggcuggcucugcuggccgucacgagcacu

SEQ ID NO: 453702 - RNA, 29 nt, Human
ggaggcuggcugcugcccaccucucucgc

SEQ ID NO: 453703 - RNA, 32 nt, Human
ggaggcuggcugcugcccaccucucucgcacc

SEQ ID NO: 453704 - RNA, 32 nt, Human
ggaggcuggcuggcugucucucucacacagau

SEQ ID NO: 453705 - RNA, 32 nt, Human
ggaggcugggacaggagaaucgcuugaacccg

SEQ ID NO: 453706 - RNA, 32 nt, Human
ggaggcugggagagcagcaagggggaccaggu

SEQ ID NO: 453707 - RNA, 32 nt, Human
ggaggcugggagaggggaacgugggaauagca

SEQ ID NO: 453708 - RNA, 32 nt, Human
ggaggcugggagguggcugucuccuagugucu

SEQ ID NO: 453709 - RNA, 32 nt, Human
ggaggcugggccauuaugagcucugcauuucc

SEQ ID NO: 453710 - RNA, 19 nt, Human
ggaggcugggccccuggga

SEQ ID NO: 453711 - RNA, 32 nt, Human
ggaggcugggccggugggagagggaggcgagc

SEQ ID NO: 453712 - RNA, 32 nt, Human
ggaggcugggccugaaugggggcaaguugagg

SEQ ID NO: 453713 - RNA, 24 nt, Human
ggaggcugggccugcccacuccag

SEQ ID NO: 453714 - RNA, 32 nt, Human
ggaggcugggcugcagcccugccccuuccugg

SEQ ID NO: 453715 - RNA, 32 nt, Human
ggaggcugggcuggcacaguggagagcaacag

SEQ ID NO: 453716 - RNA, 18 nt, Human
ggaggcugggcugggaga

SEQ ID NO: 453717 - RNA, 32 nt, Human
ggaggcugggcugggagaggaggcaaggaaca

SEQ ID NO: 453718 - RNA, 32 nt, Human
ggaggcuggggcagcagaaucgcuugaaccug

SEQ ID NO: 453719 - RNA, 32 nt, Human
ggaggcuggggcaggagaaucgcuugaaccca

SEQ ID NO: 453720 - RNA, 32 nt, Human
ggaggcuggggcaggagaauggcaugaaccca

SEQ ID NO: 453721 - RNA, 32 nt, Human
ggaggcuggggcaggagaauugcuugaaccca

SEQ ID NO: 453722 - RNA, 32 nt, Human
ggaggcuggggcaugagaauugcuuuaacccg

SEQ ID NO: 453723 - RNA, 32 nt, Human
ggaggcuggggccagaugacagcuagugaggg

SEQ ID NO: 453724 - RNA, 25 nt, Human
ggaggcuggggcgagaggauugcuu

SEQ ID NO: 453725 - RNA, 32 nt, Human
ggaggcuggggcgagaggauugcuugagccca

SEQ ID NO: 453726 - RNA, 32 nt, Human
ggaggcuggggcggguggauugcuugaugcca

SEQ ID NO: 453727 - RNA, 25 nt, Human
ggaggcuggggugggaggacugcuu

SEQ ID NO: 453728 - RNA, 32 nt, Human
ggaggcuggggugggaggaucgcuugaaccca

SEQ ID NO: 453729 - RNA, 20 nt, Human
ggaggcugggugcagcucca

SEQ ID NO: 453730 - RNA, 32 nt, Human
ggaggcugguucugcugccucuacacaggggc

SEQ ID NO: 453731 - RNA, 32 nt, Human
ggaggcuguccaccuugcuuggcucacuggga

SEQ ID NO: 453732 - RNA, 32 nt, Human
ggaggcugugagacccacagggcuaggcccag

SEQ ID NO: 453733 - RNA, 22 nt, Human
ggaggcugugcugcagcuccag

SEQ ID NO: 453734 - RNA, 24 nt, Human
ggaggcuguggcaggagaacugcu

SEQ ID NO: 453735 - RNA, 32 nt, Human
ggaggcuguggcaggagaaucgcuagaaccug

SEQ ID NO: 453736 - RNA, 32 nt, Human
ggaggcuguggcaggagaaucgcuugaaccca

SEQ ID NO: 453737 - RNA, 32 nt, Human
ggaggcuguggcaggagaauugcuugaaccca

SEQ ID NO: 453738 - RNA, 32 nt, Human
ggaggcuguggcggacuccuuccaacucacga

SEQ ID NO: 453739 - RNA, 22 nt, Human
ggaggcugugguagguggauca

SEQ ID NO: 453740 - RNA, 25 nt, Human
ggaggcuguggugggaggauugcuu

SEQ ID NO: 453741 - RNA, 32 nt, Human
ggaggcuguggugggaggauugcuugagucca

SEQ ID NO: 453742 - RNA, 32 nt, Human
ggaggcuguguccgugggugugcagugcccag

SEQ ID NO: 453743 - RNA, 32 nt, Human
ggaggcuguuauauucucacugggcgagagaa

SEQ ID NO: 453744 - RNA, 32 nt, Human
ggaggcuguuuccuccccugguggauuuaaga

SEQ ID NO: 453745 - RNA, 32 nt, Human
ggaggcuuagacaugagaaucacuugaaccca

SEQ ID NO: 453746 - RNA, 32 nt, Human
ggaggcuuaggcaggagaauugcuugaaccca

SEQ ID NO: 453747 - RNA, 32 nt, Human
ggaggcuuagucaggaggaucucuugagccug

SEQ ID NO: 453748 - RNA, 32 nt, Human
ggaggcuuauucaauucuucugaccucagaac

SEQ ID NO: 453749 - RNA, 32 nt, Human
ggaggcuucacagagaaggcugugguuccccu

SEQ ID NO: 453750 - RNA, 32 nt, Human
ggaggcuucaggggacuguucucaccuuaacu

SEQ ID NO: 453751 - RNA, 19 nt, Human
ggaggcuucauguggggga

SEQ ID NO: 453752 - RNA, 19 nt, Human
ggaggcuuccuuccagccc

SEQ ID NO: 453753 - RNA, 21 nt, Human
ggaggcuucugguagugcucu

SEQ ID NO: 453754 - RNA, 32 nt, Human
ggaggcuugagaauggaaggauccucauuucu

SEQ ID NO: 453755 - RNA, 26 nt, Human
ggaggcuugaggcgggaggaucacuu

SEQ ID NO: 453756 - RNA, 32 nt, Human
ggaggcuugcucauggugacauccucaucucc

SEQ ID NO: 453757 - RNA, 32 nt, Human
ggaggcuuggaggaggugagaguggaguggcu

SEQ ID NO: 453758 - RNA, 32 nt, Human
ggaggcuuggaucugaggucuugcuguccacu

SEQ ID NO: 453759 - RNA, 32 nt, Human
ggaggcuugggaacagggaaagagggaaaugu

SEQ ID NO: 453760 - RNA, 23 nt, Human
ggaggcuugggaugcagccccag

SEQ ID NO: 453761 - RNA, 23 nt, Human
ggaggcuugggugggaggauugc

SEQ ID NO: 453762 - RNA, 32 nt, Human
ggaggcuugggugggaggauugccugagacca

SEQ ID NO: 453763 - RNA, 32 nt, Human
ggaggcuuugacugggcugccugccugugagg

SEQ ID NO: 453764 - RNA, 32 nt, Human
ggaggcuuugggaggcugaggugggaggauug

SEQ ID NO: 453765 - RNA, 32 nt, Human
ggagggaaacacccucccggauccagagcccg

SEQ ID NO: 453766 - RNA, 32 nt, Human
ggagggaaaccugaacuuuuccugcacuuucu

SEQ ID NO: 453767 - RNA, 18 nt, Human
ggagggaaagaaaccagg

SEQ ID NO: 453768 - RNA, 32 nt, Human
ggagggaaauccuucagccaaaagucacacau

SEQ ID NO: 453769 - RNA, 32 nt, Human
ggagggaacaggcaggaagaucagggcagaau

SEQ ID NO: 453770 - RNA, 32 nt, Human
ggagggaacccuaccuguuucccugauaacug

SEQ ID NO: 453771 - RNA, 24 nt, Human
ggagggaacccugggcagggcucu

SEQ ID NO: 453772 - RNA, 32 nt, Human
ggagggaagaggaggagaggggaggggaccug

SEQ ID NO: 453773 - RNA, 32 nt, Human
ggagggaagaggagggaaacuaggagagacuu

SEQ ID NO: 453774 - RNA, 32 nt, Human
ggagggaagaucuugaugguguuucuuuuccc

SEQ ID NO: 453775 - RNA, 32 nt, Human
ggagggaagcacugucauguggacguggauga

SEQ ID NO: 453776 - RNA, 32 nt, Human
ggagggaaggagcaggagagcaggaaggaaac

SEQ ID NO: 453777 - RNA, 27 nt, Human
ggagggaaggcgaaaggggggcgagga

SEQ ID NO: 453778 - RNA, 32 nt, Human
ggagggaaggcggugaacacagcccccgugcc

SEQ ID NO: 453779 - RNA, 32 nt, Human
ggagggaaggguggguaaggaggagagagcgg

SEQ ID NO: 453780 - RNA, 18 nt, Human
ggagggaaggucaacaga

SEQ ID NO: 453781 - RNA, 32 nt, Human
ggagggaaguccuuguuggcagagggaugugg

SEQ ID NO: 453782 - RNA, 32 nt, Human
ggagggaaguggcugagagcucacaggcaccc

SEQ ID NO: 453783 - RNA, 32 nt, Human
ggagggaaugagccucagggaggagugagcac

SEQ ID NO: 453784 - RNA, 32 nt, Human
ggagggaaugcagaggaaagaaugaguauccu

SEQ ID NO: 453785 - RNA, 31 nt, Human
ggagggaaugggagagaaagcugagauuuca

SEQ ID NO: 453786 - RNA, 32 nt, Human
ggagggaauuggggcaucagaggcuuugaagc

SEQ ID NO: 453787 - RNA, 32 nt, Human
ggagggacaagugugcaugcagauguccucag

SEQ ID NO: 453788 - RNA, 32 nt, Human
ggagggacacuggagagcagggggaggccacg

SEQ ID NO: 453789 - RNA, 32 nt, Human
ggagggacagagagacagggagagucagccuc

SEQ ID NO: 453790 - RNA, 32 nt, Human
ggagggacagagcagaggggccagggacugag

SEQ ID NO: 453791 - RNA, 32 nt, Human
ggagggacagucucaccauuuccccagggcac

SEQ ID NO: 453792 - RNA, 20 nt, Human
ggagggacaucuccgggugu

SEQ ID NO: 453793 - RNA, 32 nt, Human
ggagggaccaaagccgugaggaugaggacaac

SEQ ID NO: 453794 - RNA, 32 nt, Human
ggagggaccacagagcaccagccugcauggaa

SEQ ID NO: 453795 - RNA, 32 nt, Human
ggagggaccccugguguaggccugggcgauag

SEQ ID NO: 453796 - RNA, 32 nt, Human
ggagggacccuccagccccaggaaucugcuuu

SEQ ID NO: 453797 - RNA, 32 nt, Human
ggagggaccgaggugacacagagccggcccug

SEQ ID NO: 453798 - RNA, 32 nt, Human
ggagggaccuccugccuacuccagccccuacc

SEQ ID NO: 453799 - RNA, 31 nt, Human
ggagggaccuugucucccagcucagggcucu

SEQ ID NO: 453800 - RNA, 32 nt, Human
ggagggacgcggaggaggaagaggguagacag

SEQ ID NO: 453801 - RNA, 32 nt, Human
ggagggacugaugcgaggucccccaggccuca

SEQ ID NO: 453802 - RNA, 22 nt, Human
ggagggacugcugacccaccaa

SEQ ID NO: 453803 - RNA, 32 nt, Human
ggagggacuggagaggaaugagauuggccaaa

SEQ ID NO: 453804 - RNA, 32 nt, Human
ggagggagaaaggagaaauuuugguuuuucaa

SEQ ID NO: 453805 - RNA, 32 nt, Human
ggagggagaagagagauaguggguaugcuucu

SEQ ID NO: 453806 - RNA, 32 nt, Human
ggagggagaagggaagaaagaaacaaugucua

SEQ ID NO: 453807 - RNA, 32 nt, Human
ggagggagacauccagcuugggcuuuccccuu

SEQ ID NO: 453808 - RNA, 32 nt, Human
ggagggagacggcuagggcagcaagugaagga

SEQ ID NO: 453809 - RNA, 22 nt, Human
ggagggagacgggauaguguuu

SEQ ID NO: 453810 - RNA, 32 nt, Human
ggagggagagaaagggguggcggagaggagga

SEQ ID NO: 453811 - RNA, 32 nt, Human
ggagggagagagagggagggagagggagugaa

SEQ ID NO: 453812 - RNA, 24 nt, Human
ggagggagagcggagaaacuggga

SEQ ID NO: 453813 - RNA, 32 nt, Human
ggagggagaggaaggcaggggaguugaugcau

SEQ ID NO: 453814 - RNA, 20 nt, Human
ggagggagaggaggggagcc

SEQ ID NO: 453815 - RNA, 25 nt, Human
ggagggagaggauggagagcgggga

SEQ ID NO: 453816 - RNA, 32 nt, Human
ggagggagaggcaccaugcaugugggugauua

SEQ ID NO: 453817 - RNA, 32 nt, Human
ggagggagagggcaggaaggaggcagagcugu

SEQ ID NO: 453818 - RNA, 32 nt, Human
ggagggagcagcggggagcuugcagugaccaa

SEQ ID NO: 453819 - RNA, 32 nt, Human
ggagggagcaggauggagagcaggaugaaguc

SEQ ID NO: 453820 - RNA, 32 nt, Human
ggagggagcaguccagaugccaacaaggaaau

SEQ ID NO: 453821 - RNA, 20 nt, Human
ggagggagccacccccaagg

SEQ ID NO: 453822 - RNA, 32 nt, Human
ggagggagccacgggcccugccccaaccgcuc

SEQ ID NO: 453823 - RNA, 32 nt, Human
ggagggagccacgggcccugccccaccugcuc

SEQ ID NO: 453824 - RNA, 32 nt, Human
ggagggagccgacacuugaauguaguaauagg

SEQ ID NO: 453825 - RNA, 32 nt, Human
ggagggagccgcacgcggcccagggcagcggu

SEQ ID NO: 453826 - RNA, 32 nt, Human
ggagggagccggggcagccacagggagagaca

SEQ ID NO: 453827 - RNA, 32 nt, Human
ggagggagccugcucccugccacacacguaca

SEQ ID NO: 453828 - RNA, 22 nt, Human
ggagggagcggcggcaggcucu

SEQ ID NO: 453829 - RNA, 32 nt, Human
ggagggagcugacagauaaggaaacugaggcc

SEQ ID NO: 453830 - RNA, 32 nt, Human
ggagggagcugcagaggguccaucgccgccgu

SEQ ID NO: 453831 - RNA, 32 nt, Human
ggagggagcugccuguggcccuaaggagcuga

SEQ ID NO: 453832 - RNA, 32 nt, Human
ggagggaggaaaggguaggaagggugggaagg

SEQ ID NO: 453833 - RNA, 32 nt, Human
ggagggaggaagaauagaggaaaacaaugggc

SEQ ID NO: 453834 - RNA, 24 nt, Human
ggagggaggacagggaaggccagg

SEQ ID NO: 453835 - RNA, 21 nt, Human
ggagggaggacagggagucgg

SEQ ID NO: 453836 - RNA, 32 nt, Human
ggagggaggacgugcgaggccggugcguggag

SEQ ID NO: 453837 - RNA, 22 nt, Human
ggagggaggagaggacccagga

SEQ ID NO: 453838 - RNA, 32 nt, Human
ggagggaggaggaagagagggagggaggcggg

SEQ ID NO: 453839 - RNA, 32 nt, Human
ggagggaggaggaggaggaagaagagcggaga

SEQ ID NO: 453840 - RNA, 32 nt, Human
ggagggaggaggaggaggaagagguauggcau

SEQ ID NO: 453841 - RNA, 32 nt, Human
ggagggaggcaccccuuccaggaacaaggcgg

SEQ ID NO: 453842 - RNA, 23 nt, Human
ggagggaggcagaagagccaggg

SEQ ID NO: 453843 - RNA, 32 nt, Human
ggagggaggcagggaggcagggaggcagggag

SEQ ID NO: 453844 - RNA, 24 nt, Human
ggagggaggcgcugcugguguucu

SEQ ID NO: 453845 - RNA, 32 nt, Human
ggagggaggcugagagggccgggccgggcggc

SEQ ID NO: 453846 - RNA, 21 nt, Human
ggagggaggcuggagcgggga

SEQ ID NO: 453847 - RNA, 32 nt, Human
ggagggaggcuggagcggggaggcgaggaggg

SEQ ID NO: 453848 - RNA, 32 nt, Human
ggagggagggacaaacacucccaaucauccac

SEQ ID NO: 453849 - RNA, 22 nt, Human
ggagggagggacagagccugga

SEQ ID NO: 453850 - RNA, 32 nt, Human
ggagggagggagggaaagcuuccuccuaaauc

SEQ ID NO: 453851 - RNA, 18 nt, Human
ggagggagggauucuggg

SEQ ID NO: 453852 - RNA, 24 nt, Human
ggagggagggcaggaauggagggg

SEQ ID NO: 453853 - RNA, 23 nt, Human
ggagggagggcaggguggagggc

SEQ ID NO: 453854 - RNA, 32 nt, Human
ggagggagggccccuugcucuccagcaaaagc

SEQ ID NO: 453855 - RNA, 22 nt, Human
ggagggagggcgggcgcggggg

SEQ ID NO: 453856 - RNA, 21 nt, Human
ggagggagggcgggcggcgcg

SEQ ID NO: 453857 - RNA, 18 nt, Human
ggagggagggcgggugcc

SEQ ID NO: 453858 - RNA, 32 nt, Human
ggagggagggcuggucccccucugagggggcu

SEQ ID NO: 453859 - RNA, 32 nt, Human
ggagggaggggauuuaaaaaccugcagcaaca

SEQ ID NO: 453860 - RNA, 32 nt, Human
ggagggaggggcccuggaggccacauccugcc

SEQ ID NO: 453861 - RNA, 32 nt, Human
ggagggagggugaguuagggggagacccggcc

SEQ ID NO: 453862 - RNA, 16 nt, Human
ggagggagguggugaa

SEQ ID NO: 453863 - RNA, 32 nt, Human
ggagggaguccagcccagcugccugcaggaag

SEQ ID NO: 453864 - RNA, 32 nt, Human
ggagggagugagccagcagcuuaaguccagcu

SEQ ID NO: 453865 - RNA, 22 nt, Human
ggagggaguggcucugugcuuu

SEQ ID NO: 453866 - RNA, 32 nt, Human
ggagggaguguauggaccuggccccauggcuu

SEQ ID NO: 453867 - RNA, 32 nt, Human
ggagggauauuuccugguuuuccagagguuag

SEQ ID NO: 453868 - RNA, 32 nt, Human
ggagggaugaagauggaguuauccucugcaga

SEQ ID NO: 453869 - RNA, 32 nt, Human
ggagggaugaggagguggagugcaggggaugu

SEQ ID NO: 453870 - RNA, 32 nt, Human
ggagggauggccugacugaaacaggugagagu

SEQ ID NO: 453871 - RNA, 32 nt, Human
ggagggaugggggcaggaaugagggaaggucu

SEQ ID NO: 453872 - RNA, 32 nt, Human
ggagggauuccacuggugaaacccacucacag

SEQ ID NO: 453873 - RNA, 21 nt, Human
ggagggauugaucuucagggc

SEQ ID NO: 453874 - RNA, 32 nt, Human
ggagggauugggcugaagcugcuccaccucau

SEQ ID NO: 453875 - RNA, 32 nt, Human
ggagggcaacaggcugccgggccccgcuggcc

SEQ ID NO: 453876 - RNA, 32 nt, Human
ggagggcaaggcggcagaaucgcuugagcccc

SEQ ID NO: 453877 - RNA, 32 nt, Human
ggagggcacagcaggugcagcuaacccucugu

SEQ ID NO: 453878 - RNA, 32 nt, Human
ggagggcacugguugcagaggcuggaagugaa

SEQ ID NO: 453879 - RNA, 32 nt, Human
ggagggcacuuccuccacagucccccacccac

SEQ ID NO: 453880 - RNA, 20 nt, Human
ggagggcacuuggcugggag

SEQ ID NO: 453881 - RNA, 32 nt, Human
ggagggcagagcaggcccugcggagagcucac

SEQ ID NO: 453882 - RNA, 22 nt, Human
ggagggcagagggcagagcucu

SEQ ID NO: 453883 - RNA, 23 nt, Human
ggagggcagagggcagagcucug

SEQ ID NO: 453884 - RNA, 32 nt, Human
ggagggcagaggugaggagggggaagauguuu

SEQ ID NO: 453885 - RNA, 32 nt, Human
ggagggcagauuuguaaccucugguucucugc

SEQ ID NO: 453886 - RNA, 32 nt, Human
ggagggcagcaaaugcugacaaggaugaaaag

SEQ ID NO: 453887 - RNA, 32 nt, Human
ggagggcagcagaggcagagaacgaggacagg

SEQ ID NO: 453888 - RNA, 32 nt, Human
ggagggcagccaacagcccucuucccaccugg

SEQ ID NO: 453889 - RNA, 21 nt, Human
ggagggcagccacggaguggg

SEQ ID NO: 453890 - RNA, 22 nt, Human
ggagggcagccuucaaacgugu

SEQ ID NO: 453891 - RNA, 19 nt, Human
ggagggcaggacucuggga

SEQ ID NO: 453892 - RNA, 31 nt, Human
ggagggcagggccagcaccucaccccacaca

SEQ ID NO: 453893 - RNA, 32 nt, Human
ggagggcaggggugaggagggagcaggagaac

SEQ ID NO: 453894 - RNA, 32 nt, Human
ggagggcaggggugaggagggagcaggagggc

SEQ ID NO: 453895 - RNA, 32 nt, Human
ggagggcagggugagccagcgggcaagggucc

SEQ ID NO: 453896 - RNA, 32 nt, Human
ggagggcaggguggggcugaggaacugacgug

SEQ ID NO: 453897 - RNA, 20 nt, Human
ggagggcaucuacucuggga

SEQ ID NO: 453898 - RNA, 21 nt, Human
ggagggcauggugucgggggg

SEQ ID NO: 453899 - RNA, 32 nt, Human
ggagggcaugucccuuugggagcccgccuugu

SEQ ID NO: 453900 - RNA, 32 nt, Human
ggagggcauuugcugccccagcuacuaaggug

SEQ ID NO: 453901 - RNA, 32 nt, Human
ggagggccaaguguccauucagacucggguau

SEQ ID NO: 453902 - RNA, 32 nt, Human
ggagggccagagaggcaguuggaagauggcgg

SEQ ID NO: 453903 - RNA, 18 nt, Human
ggagggccagcucuggga

SEQ ID NO: 453904 - RNA, 32 nt, Human
ggagggccaggggcgugcaugccaggccgggc

SEQ ID NO: 453905 - RNA, 32 nt, Human
ggagggccagugugggaccccugcugccaccu

SEQ ID NO: 453906 - RNA, 32 nt, Human
ggagggccauggagaagaggcugggagucaag

SEQ ID NO: 453907 - RNA, 32 nt, Human
ggagggcccaggagccagaccucgguuuugcg

SEQ ID NO: 453908 - RNA, 32 nt, Human
ggagggcccccagacagcucccaggcacguca

SEQ ID NO: 453909 - RNA, 32 nt, Human
ggagggccccuggguaauggggcagagagaug

SEQ ID NO: 453910 - RNA, 32 nt, Human
ggagggcccgggagcgugggagcaggagggug

SEQ ID NO: 453911 - RNA, 16 nt, Human
ggagggcccucugggg

SEQ ID NO: 453912 - RNA, 32 nt, Human
ggagggcccuggccugagcgagcugcugcagg

SEQ ID NO: 453913 - RNA, 32 nt, Human
ggagggccggaagaggaaagaaaccagaguuu

SEQ ID NO: 453914 - RNA, 32 nt, Human
ggagggccggaggcauguggccucccagaccu

SEQ ID NO: 453915 - RNA, 32 nt, Human
ggagggccuccaggugagugccgggcucggcg

SEQ ID NO: 453916 - RNA, 32 nt, Human
ggagggccuggcagagacugagcacuggcccc

SEQ ID NO: 453917 - RNA, 19 nt, Human
ggagggccuggcuggguga

SEQ ID NO: 453918 - RNA, 32 nt, Human
ggagggccuugccucuucccggcugccaucuc

SEQ ID NO: 453919 - RNA, 32 nt, Human
ggagggcgaagaggaggaggaaggggaggacg

SEQ ID NO: 453920 - RNA, 32 nt, Human
ggagggcgacccagaggagggggaagaugccg

SEQ ID NO: 453921 - RNA, 32 nt, Human
ggagggcgacucagagaucacagggagcgugg

SEQ ID NO: 453922 - RNA, 22 nt, Human
ggagggcgaggggcuauuacca

SEQ ID NO: 453923 - RNA, 32 nt, Human
ggagggcgcauugcuugagccuaggaguucga

SEQ ID NO: 453924 - RNA, 17 nt, Human
ggagggcgccucuggga

SEQ ID NO: 453925 - RNA, 20 nt, Human
ggagggcgcggccucgggga

SEQ ID NO: 453926 - RNA, 32 nt, Human
ggagggcggaaacagcggaggggccagucucc

SEQ ID NO: 453927 - RNA, 32 nt, Human
ggagggcggagcaggcggcggugcaggaggcc

SEQ ID NO: 453928 - RNA, 22 nt, Human
ggagggcggcaggggccuggag

SEQ ID NO: 453929 - RNA, 19 nt, Human
ggagggcgggagcucggcg

SEQ ID NO: 453930 - RNA, 21 nt, Human
ggagggcgggaguguggagga

SEQ ID NO: 453931 - RNA, 32 nt, Human
ggagggcgggcugccuuuccagguuccucagc

SEQ ID NO: 453932 - RNA, 32 nt, Human
ggagggcggggcaagggucucccagcgcgaca

SEQ ID NO: 453933 - RNA, 18 nt, Human
ggagggcguuucucggga

SEQ ID NO: 453934 - RNA, 32 nt, Human
ggagggcuacagcccacaucccacccccucgu

SEQ ID NO: 453935 - RNA, 32 nt, Human
ggagggcuagccccgggacuuggggccaauac

SEQ ID NO: 453936 - RNA, 32 nt, Human
ggagggcuagggggcagguggggaggggaagc

SEQ ID NO: 453937 - RNA, 32 nt, Human
ggagggcuauguguccuggaccaugaagaagg

SEQ ID NO: 453938 - RNA, 17 nt, Human
ggagggcuccucuggga

SEQ ID NO: 453939 - RNA, 32 nt, Human
ggagggcucucuucuuucuuccucauccuacu

SEQ ID NO: 453940 - RNA, 32 nt, Human
ggagggcucugcaggccgccucccggaacggg

SEQ ID NO: 453941 - RNA, 22 nt, Human
ggagggcugcagagccugcagg

SEQ ID NO: 453942 - RNA, 32 nt, Human
ggagggcugcugcaguggggucugaggagggc

SEQ ID NO: 453943 - RNA, 32 nt, Human
ggagggcuggaaugguacaucacauaggcaag

SEQ ID NO: 453944 - RNA, 32 nt, Human
ggagggcuggacggcgagcugggagccagccc

SEQ ID NO: 453945 - RNA, 20 nt, Human
ggagggcuggagagccgggg

SEQ ID NO: 453946 - RNA, 32 nt, Human
ggagggcuggaggcagagaguguaagugugca

SEQ ID NO: 453947 - RNA, 32 nt, Human
ggagggcuggucucccugggggcuccccagug

SEQ ID NO: 453948 - RNA, 21 nt, Human
ggagggcugguggcugggagg

SEQ ID NO: 453949 - RNA, 24 nt, Human
ggagggcuguccuuggggacucua

SEQ ID NO: 453950 - RNA, 16 nt, Human
ggagggcuuccuggga

SEQ ID NO: 453951 - RNA, 32 nt, Human
ggaggggaaaaauguguguggcucuuacguuu

SEQ ID NO: 453952 - RNA, 32 nt, Human
ggaggggaaagaagggcuucugccauuauagg

SEQ ID NO: 453953 - RNA, 32 nt, Human
ggaggggaacaggagccagacaugacagggac

SEQ ID NO: 453954 - RNA, 32 nt, Human
ggaggggaacugguauccugccaagccugguu

SEQ ID NO: 453955 - RNA, 21 nt, Human
ggaggggaacuuauuggggga

SEQ ID NO: 453956 - RNA, 32 nt, Human
ggaggggaaggcagcaagccuguccaucacau

SEQ ID NO: 453957 - RNA, 32 nt, Human
ggaggggaaggggugucacugccccucugugg

SEQ ID NO: 453958 - RNA, 32 nt, Human
ggaggggacagcuucacccuuggaaguccugg

SEQ ID NO: 453959 - RNA, 19 nt, Human
ggaggggaccaggggucag

SEQ ID NO: 453960 - RNA, 32 nt, Human
ggaggggaccaucaccaccaucaccacucggc

SEQ ID NO: 453961 - RNA, 32 nt, Human
ggaggggacgcugggacccuugccuuagauuu

SEQ ID NO: 453962 - RNA, 31 nt, Human
ggaggggacugucacuuuccugugucuuugg

SEQ ID NO: 453963 - RNA, 32 nt, Human
ggaggggagaggaggggaaggggaggcagagg

SEQ ID NO: 453964 - RNA, 32 nt, Human
ggaggggagaggggaagguggcuggccgggug

SEQ ID NO: 453965 - RNA, 32 nt, Human
ggaggggagcagccgggaguuggggcuucccc

SEQ ID NO: 453966 - RNA, 32 nt, Human
ggaggggagcaggggagggaaagaaaccaggc

SEQ ID NO: 453967 - RNA, 19 nt, Human
ggaggggagccaaggccag

SEQ ID NO: 453968 - RNA, 32 nt, Human
ggaggggagcucaagguuuggguggggacuca

SEQ ID NO: 453969 - RNA, 32 nt, Human
ggaggggagcugcuccugccagaagcuggugg

SEQ ID NO: 453970 - RNA, 32 nt, Human
ggaggggaggaagguuagggaggcggagaggg

SEQ ID NO: 453971 - RNA, 32 nt, Human
ggaggggaggagaaggaggaggaagccaugga

SEQ ID NO: 453972 - RNA, 32 nt, Human
ggaggggaggagagcagagaacguccccaggg

SEQ ID NO: 453973 - RNA, 32 nt, Human
ggaggggaggagaggagaggagaggaaccguc

SEQ ID NO: 453974 - RNA, 32 nt, Human
ggaggggaggagaggagaggagagggaggauc

SEQ ID NO: 453975 - RNA, 32 nt, Human
ggaggggaggaggaggaggaggaggaggucgu

SEQ ID NO: 453976 - RNA, 32 nt, Human
ggaggggaggcaggaggaggccgagggcccca

SEQ ID NO: 453977 - RNA, 32 nt, Human
ggaggggagggaagggaagggaagggaagggg

SEQ ID NO: 453978 - RNA, 32 nt, Human
ggaggggagggaggaagaaggaagagaggcag

SEQ ID NO: 453979 - RNA, 19 nt, Human
ggaggggagggaggacugc

SEQ ID NO: 453980 - RNA, 32 nt, Human
ggaggggagggaggcaauaagcaaagaaauaa

SEQ ID NO: 453981 - RNA, 16 nt, Human
ggaggggagggaggug

SEQ ID NO: 453982 - RNA, 32 nt, Human
ggaggggagggcaguggcagaggagauggaga

SEQ ID NO: 453983 - RNA, 32 nt, Human
ggaggggaggggcaggaagaggugagaagauc

SEQ ID NO: 453984 - RNA, 32 nt, Human
ggaggggaggggcagggggcggugccacggcc

SEQ ID NO: 453985 - RNA, 32 nt, Human
ggaggggagguggcaggcgcguuugcaggagg

SEQ ID NO: 453986 - RNA, 32 nt, Human
ggaggggauauuguggugaacaugacaggcau

SEQ ID NO: 453987 - RNA, 17 nt, Human
ggaggggauccagcgag

SEQ ID NO: 453988 - RNA, 32 nt, Human
ggaggggaugcacacauuagaguaggaaagag

SEQ ID NO: 453989 - RNA, 32 nt, Human
ggaggggauggcccugagcccagcggcuccuc

SEQ ID NO: 453990 - RNA, 32 nt, Human
ggaggggauuagggguggggcaguuuuugucu

SEQ ID NO: 453991 - RNA, 32 nt, Human
ggaggggcaaagcccguugacacagcugcuag

SEQ ID NO: 453992 - RNA, 21 nt, Human
ggaggggcaaggccccagcaa

SEQ ID NO: 453993 - RNA, 32 nt, Human
ggaggggcacgagaagagaggagcagggagga

SEQ ID NO: 453994 - RNA, 21 nt, Human
ggaggggcacugcagggccgg

SEQ ID NO: 453995 - RNA, 32 nt, Human
ggaggggcagaggccaacggaucccccugccu

SEQ ID NO: 453996 - RNA, 32 nt, Human
ggaggggcagcgagcaggugggguggauuucc

SEQ ID NO: 453997 - RNA, 26 nt, Human
ggaggggcagcgcagccucccaccaa

SEQ ID NO: 453998 - RNA, 17 nt, Human
ggaggggcagcuucuga

SEQ ID NO: 453999 - RNA, 23 nt, Human
ggaggggcaggagugguucagga

SEQ ID NO: 454000 - RNA, 22 nt, Human
ggaggggcaggauggcccccaa

SEQ ID NO: 454001 - RNA, 32 nt, Human
ggaggggcagggaagagguggcacuugugauu

SEQ ID NO: 454002 - RNA, 32 nt, Human
ggaggggcaguggggcugggccuggguggccc

SEQ ID NO: 454003 - RNA, 32 nt, Human
ggaggggcauguuaaagggaugacugugcauu

SEQ ID NO: 454004 - RNA, 32 nt, Human
ggaggggccaacacccucaucagagcccuccu

SEQ ID NO: 454005 - RNA, 22 nt, Human
ggaggggccagcaguccucccu

SEQ ID NO: 454006 - RNA, 32 nt, Human
ggaggggccagccugcaggguggguuccaguu

SEQ ID NO: 454007 - RNA, 32 nt, Human
ggaggggccagccugggaccagcagaguggaa

SEQ ID NO: 454008 - RNA, 17 nt, Human
ggaggggccccaggggu

SEQ ID NO: 454009 - RNA, 32 nt, Human
ggaggggccccugcuucuccagccuggacccc

SEQ ID NO: 454010 - RNA, 32 nt, Human
ggaggggcccgccuuagccaugugaaggugga

SEQ ID NO: 454011 - RNA, 24 nt, Human
ggaggggcccguugucucccuggc

SEQ ID NO: 454012 - RNA, 32 nt, Human
ggaggggccggagcggagaagcugcccaccuu

SEQ ID NO: 454013 - RNA, 23 nt, Human
ggaggggccggugaccucuuggc

SEQ ID NO: 454014 - RNA, 21 nt, Human
ggaggggccgugccugggaga

SEQ ID NO: 454015 - RNA, 32 nt, Human
ggaggggccugggcagagggccuggaccuggg

SEQ ID NO: 454016 - RNA, 32 nt, Human
ggaggggccuucauaccugcggccccaaagcc

SEQ ID NO: 454017 - RNA, 18 nt, Human
ggaggggcgagaagccag

SEQ ID NO: 454018 - RNA, 19 nt, Human
ggaggggcgagcugggagg

SEQ ID NO: 454019 - RNA, 21 nt, Human
ggaggggcgagggcgggccag

SEQ ID NO: 454020 - RNA, 32 nt, Human
ggaggggcgcaaggcagacggucuccagccac

SEQ ID NO: 454021 - RNA, 32 nt, Human
ggaggggcgcaggaccauggacuggggguggg

SEQ ID NO: 454022 - RNA, 32 nt, Human
ggaggggcggcugcugccuggugacggcaccc

SEQ ID NO: 454023 - RNA, 32 nt, Human
ggaggggcgggagggagguguugccgucacug

SEQ ID NO: 454024 - RNA, 32 nt, Human
ggaggggcgggagguggagcagggucccaggc

SEQ ID NO: 454025 - RNA, 32 nt, Human
ggaggggcuacaaaugcuugacucagugaugc

SEQ ID NO: 454026 - RNA, 22 nt, Human
ggaggggcuacugucccuuggc

SEQ ID NO: 454027 - RNA, 32 nt, Human
ggaggggcuagaacaagggcccaggggacugg

SEQ ID NO: 454028 - RNA, 32 nt, Human
ggaggggcucaagggagcccagcugggagggc

SEQ ID NO: 454029 - RNA, 23 nt, Human
ggaggggcucagcucccugugca

SEQ ID NO: 454030 - RNA, 32 nt, Human
ggaggggcucagggcacccugaggcggagguu

SEQ ID NO: 454031 - RNA, 32 nt, Human
ggaggggcucugccacucccagccugggaaug

SEQ ID NO: 454032 - RNA, 22 nt, Human
ggaggggcucugccgcuuagca

SEQ ID NO: 454033 - RNA, 32 nt, Human
ggaggggcucugcguuggcuucucccugggga

SEQ ID NO: 454034 - RNA, 23 nt, Human
ggaggggcuggaggaggagcaga

SEQ ID NO: 454035 - RNA, 32 nt, Human
ggaggggcuggggguagaaaugucauggguga

SEQ ID NO: 454036 - RNA, 21 nt, Human
ggaggggcuguccucuccgca

SEQ ID NO: 454037 - RNA, 18 nt, Human
ggaggggcugugggccag

SEQ ID NO: 454038 - RNA, 18 nt, Human
ggaggggcuucucugggg

SEQ ID NO: 454039 - RNA, 32 nt, Human
ggagggggaagagaucccaggaggugcagugg

SEQ ID NO: 454040 - RNA, 32 nt, Human
ggagggggaaggacagagggggaggggaagga

SEQ ID NO: 454041 - RNA, 22 nt, Human
ggagggggaaggaggaaacagg

SEQ ID NO: 454042 - RNA, 32 nt, Human
ggagggggaaggaggaaacaggaagcccagag

SEQ ID NO: 454043 - RNA, 19 nt, Human
ggagggggacgcccggggu

SEQ ID NO: 454044 - RNA, 32 nt, Human
ggagggggagacgaggaggaggaggacaugac

SEQ ID NO: 454045 - RNA, 32 nt, Human
ggagggggagagaagcagagggagagagaagg

SEQ ID NO: 454046 - RNA, 32 nt, Human
ggagggggagagagaggaggacaggcugcgac

SEQ ID NO: 454047 - RNA, 32 nt, Human
ggagggggagagagcaaggagaucgguaucuu

SEQ ID NO: 454048 - RNA, 32 nt, Human
ggagggggagagaggucaggccaggcccgugg

SEQ ID NO: 454049 - RNA, 18 nt, Human
ggagggggagcugagaga

SEQ ID NO: 454050 - RNA, 21 nt, Human
ggagggggagcuguuaggggg

SEQ ID NO: 454051 - RNA, 32 nt, Human
ggagggggaggaagaggagguggagaaggagg

SEQ ID NO: 454052 - RNA, 21 nt, Human
ggagggggaggaggaagaaga

SEQ ID NO: 454053 - RNA, 32 nt, Human
ggagggggaggcaggaggauugcugucagccu

SEQ ID NO: 454054 - RNA, 32 nt, Human
ggagggggaggggaagaagaaggccucacuuu

SEQ ID NO: 454055 - RNA, 32 nt, Human
ggagggggaggggcaggagcuuggaccuuggu

SEQ ID NO: 454056 - RNA, 32 nt, Human
ggagggggaugcagaggugaugcagcuggggu

SEQ ID NO: 454057 - RNA, 20 nt, Human
ggagggggauguggcguuuc

SEQ ID NO: 454058 - RNA, 32 nt, Human
ggagggggauguuggccucucccaggcuccuc

SEQ ID NO: 454059 - RNA, 32 nt, Human
ggagggggcacaguuggauucucuccagugaa

SEQ ID NO: 454060 - RNA, 32 nt, Human
ggagggggcaccgccucccacccacugagggc

SEQ ID NO: 454061 - RNA, 18 nt, Human
ggagggggcagaggccag

SEQ ID NO: 454062 - RNA, 32 nt, Human
ggagggggcaggcaaagucaaagugaaugacc

SEQ ID NO: 454063 - RNA, 22 nt, Human
ggagggggcaggccuguguucu

SEQ ID NO: 454064 - RNA, 32 nt, Human
ggagggggcaggcuuccccugggcagacaggc

SEQ ID NO: 454065 - RNA, 24 nt, Human
ggagggggcaguuugcugugcucu

SEQ ID NO: 454066 - RNA, 32 nt, Human
ggagggggcaucuucugacagccugccucugc

SEQ ID NO: 454067 - RNA, 32 nt, Human
ggagggggccacaccacccacccagggggcug

SEQ ID NO: 454068 - RNA, 32 nt, Human
ggagggggccagcaggucacggggcagaaucu

SEQ ID NO: 454069 - RNA, 32 nt, Human
ggagggggccagugucauucaaagauguggcu

SEQ ID NO: 454070 - RNA, 23 nt, Human
ggagggggccgggcgcggugcuc

SEQ ID NO: 454071 - RNA, 32 nt, Human
ggagggggccucucauggcccuucccuggccu

SEQ ID NO: 454072 - RNA, 32 nt, Human
ggagggggccuggacuggcauggauccagugu

SEQ ID NO: 454073 - RNA, 18 nt, Human
ggagggggcggggaggug

SEQ ID NO: 454074 - RNA, 32 nt, Human
ggagggggcuaaagaggaaggaggggaggagg

SEQ ID NO: 454075 - RNA, 23 nt, Human
ggagggggcuagggauaugcucu

SEQ ID NO: 454076 - RNA, 20 nt, Human
ggagggggcucugcgcgcuc

SEQ ID NO: 454077 - RNA, 22 nt, Human
ggagggggcucuggucuuuucu

SEQ ID NO: 454078 - RNA, 32 nt, Human
ggagggggcugguggagauuugagguggguuu

SEQ ID NO: 454079 - RNA, 23 nt, Human
ggagggggcuguggugguguucu

SEQ ID NO: 454080 - RNA, 22 nt, Human
ggagggggcuuugcuggucuuu

SEQ ID NO: 454081 - RNA, 32 nt, Human
ggaggggguagagggagccaggagcacugggu

SEQ ID NO: 454082 - RNA, 19 nt, Human
ggagggggucaggggucag

SEQ ID NO: 454083 - RNA, 32 nt, Human
ggagggggugggccuggccuaaucaggugagc

SEQ ID NO: 454084 - RNA, 32 nt, Human
ggaggggguuccggguggaggcuugcagcugc

SEQ ID NO: 454085 - RNA, 23 nt, Human
ggaggggguucucuaucugcucu

SEQ ID NO: 454086 - RNA, 32 nt, Human
ggagggguaggugagggucgcgaggcugccug

SEQ ID NO: 454087 - RNA, 32 nt, Human
ggaggggucaccaagccagagcugggcuccac

SEQ ID NO: 454088 - RNA, 32 nt, Human
ggaggggucauugaugcagucauucucagucu

SEQ ID NO: 454089 - RNA, 32 nt, Human
ggagggguccccaacauggauguguugccccu

SEQ ID NO: 454090 - RNA, 16 nt, Human
ggaggggucccugggg

SEQ ID NO: 454091 - RNA, 32 nt, Human
ggaggggugccacaugucucagaucugccauu

SEQ ID NO: 454092 - RNA, 32 nt, Human
ggaggggugcuacuguuuuccaagugaauggg

SEQ ID NO: 454093 - RNA, 32 nt, Human
ggaggggugcuggccccucugccuggcccugg

SEQ ID NO: 454094 - RNA, 31 nt, Human
ggagggguggagcugccucauaaucugcuuu

SEQ ID NO: 454095 - RNA, 32 nt, Human
ggaggggugggaggggcugagauggcugcugg

SEQ ID NO: 454096 - RNA, 32 nt, Human
ggagggguggggaggaagccggggcagucacc

SEQ ID NO: 454097 - RNA, 32 nt, Human
ggagggguggggauugggggacaugggcauuu

SEQ ID NO: 454098 - RNA, 20 nt, Human
ggaggggugguuggcguuuc

SEQ ID NO: 454099 - RNA, 32 nt, Human
ggaggggugugcuugcucccguacacaggagu

SEQ ID NO: 454100 - RNA, 32 nt, Human
ggagggguuggguugggcucuuaucuucaugg

SEQ ID NO: 454101 - RNA, 23 nt, Human
ggagggguuggucuuggugucuc

SEQ ID NO: 454102 - RNA, 32 nt, Human
ggagggguuguugaccaggcagaggaaucugg

SEQ ID NO: 454103 - RNA, 32 nt, Human
ggaggguagagagaaggaaccauuaaggaccu

SEQ ID NO: 454104 - RNA, 32 nt, Human
ggaggguaggagcagcuggagacucugcucua

SEQ ID NO: 454105 - RNA, 32 nt, Human
ggaggguaggcaggauuggggaagagagccug

SEQ ID NO: 454106 - RNA, 32 nt, Human
ggaggguagggagagaagcugagaccaggacc

SEQ ID NO: 454107 - RNA, 32 nt, Human
ggaggguaugauugccugaccaggacagccag

SEQ ID NO: 454108 - RNA, 32 nt, Human
ggagggucagaagcagaaagaaaucaaagcuc

SEQ ID NO: 454109 - RNA, 32 nt, Human
ggagggucagaggcagaaucuacuuacagugg

SEQ ID NO: 454110 - RNA, 32 nt, Human
ggagggucagccagggccugcgagggcagcgg

SEQ ID NO: 454111 - RNA, 32 nt, Human
ggaggguccagaaaagcagcuccccaagccug

SEQ ID NO: 454112 - RNA, 21 nt, Human
ggagggucccagccccaccaa

SEQ ID NO: 454113 - RNA, 32 nt, Human
ggagggucccccacacccucaggcucaugccc

SEQ ID NO: 454114 - RNA, 32 nt, Human
ggagggucccuugggcucgagcuccacaucag

SEQ ID NO: 454115 - RNA, 32 nt, Human
ggagggucucaaacuccugaccucaggcgauc

SEQ ID NO: 454116 - RNA, 24 nt, Human
ggagggucuggcacgccccaccaa

SEQ ID NO: 454117 - RNA, 32 nt, Human
ggagggucuugcagucaucuacauacuucccu

SEQ ID NO: 454118 - RNA, 32 nt, Human
ggagggugaacaaaccccgagggaggcccggc

SEQ ID NO: 454119 - RNA, 32 nt, Human
ggagggugaggcaggagauuugcuugaaccug

SEQ ID NO: 454120 - RNA, 21 nt, Human
ggagggugaggcgguggggga

SEQ ID NO: 454121 - RNA, 19 nt, Human
ggagggugaggcucagaga

SEQ ID NO: 454122 - RNA, 32 nt, Human
ggagggugagggugaccccaucugcuauuuuu

SEQ ID NO: 454123 - RNA, 32 nt, Human
ggagggugagucaagagaauugcuugaaccug

SEQ ID NO: 454124 - RNA, 32 nt, Human
ggagggugagucaggcccugcuucacccacgc

SEQ ID NO: 454125 - RNA, 32 nt, Human
ggagggugagucccucacaaagggcggagcgg

SEQ ID NO: 454126 - RNA, 32 nt, Human
ggagggugcagagcucugcagagccaugggcc

SEQ ID NO: 454127 - RNA, 32 nt, Human
ggagggugcagggagaggggaggcggggacgg

SEQ ID NO: 454128 - RNA, 32 nt, Human
ggagggugcagugauagcuccuccucacugcc

SEQ ID NO: 454129 - RNA, 32 nt, Human
ggagggugccacccucucccugccaggggccu

SEQ ID NO: 454130 - RNA, 18 nt, Human
ggagggugcgcuggagga

SEQ ID NO: 454131 - RNA, 32 nt, Human
ggagggugcucuggguuuccgugagguaacca

SEQ ID NO: 454132 - RNA, 32 nt, Human
ggagggugcugaggcagcagggggcuggugua

SEQ ID NO: 454133 - RNA, 22 nt, Human
ggagggugcuuuauugggugga

SEQ ID NO: 454134 - RNA, 32 nt, Human
ggaggguggcugcccacggccuggguguggcu

SEQ ID NO: 454135 - RNA, 32 nt, Human
ggagggugggcaaggcugggagggauaucaac

SEQ ID NO: 454136 - RNA, 32 nt, Human
ggagggugggcccacugcuuuggaggugaugg

SEQ ID NO: 454137 - RNA, 32 nt, Human
ggagggugggggcgcaggcccgggagggggca

SEQ ID NO: 454138 - RNA, 32 nt, Human
ggagggugggugcagacacaggcugaggacca

SEQ ID NO: 454139 - RNA, 31 nt, Human
ggaggguggguggagcagguggacuggaguu

SEQ ID NO: 454140 - RNA, 31 nt, Human
ggaggguggguggggaaggcugagcaaaggg

SEQ ID NO: 454141 - RNA, 23 nt, Human
ggagggugggugguugcagggga

SEQ ID NO: 454142 - RNA, 32 nt, Human
ggagggugguuagagaagguuucacuaaguga

SEQ ID NO: 454143 - RNA, 21 nt, Human
ggaggguguaaguuuagggga

SEQ ID NO: 454144 - RNA, 22 nt, Human
ggagggugugcuuggcaggggg

SEQ ID NO: 454145 - RNA, 32 nt, Human
ggaggguguuacugggcaccaguggacucgcc

SEQ ID NO: 454146 - RNA, 32 nt, Human
ggaggguguugugguuugucuuucuaauuagg

SEQ ID NO: 454147 - RNA, 21 nt, Human
ggaggguuacuugagcccagg

SEQ ID NO: 454148 - RNA, 32 nt, Human
ggaggguucuggguggaagcuggcaggcauac

SEQ ID NO: 454149 - RNA, 32 nt, Human
ggaggguugcauggcggcugggcaaaggugcu

SEQ ID NO: 454150 - RNA, 32 nt, Human
ggaggguugccugggaaccccaggaauugacc

SEQ ID NO: 454151 - RNA, 23 nt, Human
ggaggguugcuggagggugcuuu

SEQ ID NO: 454152 - RNA, 24 nt, Human
ggaggguuggucccaccccuggag

SEQ ID NO: 454153 - RNA, 32 nt, Human
ggaggguuucuggcauuuuccacaccugucca

SEQ ID NO: 454154 - RNA, 32 nt, Human
ggaggguuugcucuccaaaaagaauuguaaua

SEQ ID NO: 454155 - RNA, 21 nt, Human
ggagguaaacagcccugcagg

SEQ ID NO: 454156 - RNA, 31 nt, Human
ggagguaaagggagguuuucacugugggugu

SEQ ID NO: 454157 - RNA, 32 nt, Human
ggagguaaagggagguuuucacuguggguguu

SEQ ID NO: 454158 - RNA, 22 nt, Human
ggagguaacgggacgggcgcga

SEQ ID NO: 454159 - RNA, 32 nt, Human
ggagguacagaaguuccaauucccuuuuuauu

SEQ ID NO: 454160 - RNA, 32 nt, Human
ggagguaccaauucuggacaaagugccacuac

SEQ ID NO: 454161 - RNA, 32 nt, Human
ggagguacugacuccagcccuuccagcccaaa

SEQ ID NO: 454162 - RNA, 32 nt, Human
ggagguagaagaggggaaggaagaugguuucu

SEQ ID NO: 454163 - RNA, 32 nt, Human
ggagguagaccucacauacacacacauagacg

SEQ ID NO: 454164 - RNA, 21 nt, Human
ggagguagagauugcaaugag

SEQ ID NO: 454165 - RNA, 17 nt, Human
ggagguagauccuggga

SEQ ID NO: 454166 - RNA, 32 nt, Human
ggagguagcaagcagaguugggggaggagggg

SEQ ID NO: 454167 - RNA, 32 nt, Human
ggagguagcacaaagggaggaccauggucuuc

SEQ ID NO: 454168 - RNA, 32 nt, Human
ggagguagcaccacaggaagcaggcaucacac

SEQ ID NO: 454169 - RNA, 32 nt, Human
ggagguagcuuugagguggaagagggcugcaa

SEQ ID NO: 454170 - RNA, 32 nt, Human
ggagguaggaaggggaggaagucugaguaagc

SEQ ID NO: 454171 - RNA, 32 nt, Human
ggagguaggaggaucacuugagcccaggagug

SEQ ID NO: 454172 - RNA, 32 nt, Human
ggagguaggcgggaacacucaccccgcgauuu

SEQ ID NO: 454173 - RNA, 32 nt, Human
ggagguagggaggggagcaggagcaagagcug

SEQ ID NO: 454174 - RNA, 32 nt, Human
ggagguaggggcugggcaugcaccuugguuaa

SEQ ID NO: 454175 - RNA, 32 nt, Human
ggagguaggggugggcccuggagaugaggagg

SEQ ID NO: 454176 - RNA, 32 nt, Human
ggagguaguaggggcagggaaaggucagcaua

SEQ ID NO: 454177 - RNA, 32 nt, Human
ggagguauaaauauuucaggccaagguucaau

SEQ ID NO: 454178 - RNA, 32 nt, Human
ggagguaugccauuaaugaaauccacuguccu

SEQ ID NO: 454179 - RNA, 32 nt, Human
ggaggucaacaucuaucuaauuuaaaagcuau

SEQ ID NO: 454180 - RNA, 32 nt, Human
ggaggucaagaugggaggauugcuugagccca

SEQ ID NO: 454181 - RNA, 32 nt, Human
ggaggucaagccuacagugagccaugaucuca

SEQ ID NO: 454182 - RNA, 25 nt, Human
ggaggucaaggugggaggauugcuu

SEQ ID NO: 454183 - RNA, 32 nt, Human
ggaggucaaggugggaggauugcuugagccag

SEQ ID NO: 454184 - RNA, 27 nt, Human
ggaggucaaggugugagcgacgucucc

SEQ ID NO: 454185 - RNA, 32 nt, Human
ggaggucacacagcagguuucugcaccacgca

SEQ ID NO: 454186 - RNA, 32 nt, Human
ggaggucacagcugcuccuuuuuggucaauga

SEQ ID NO: 454187 - RNA, 31 nt, Human
ggaggucacagcugggcucacagaagcucuu

SEQ ID NO: 454188 - RNA, 21 nt, Human
ggaggucacauacacagcucu

SEQ ID NO: 454189 - RNA, 31 nt, Human
ggaggucaccgaugcuugacauuccugccuc

SEQ ID NO: 454190 - RNA, 32 nt, Human
ggaggucacugcacuaccacccaccucuggaa

SEQ ID NO: 454191 - RNA, 23 nt, Human
ggaggucagaggaucccacuucc

SEQ ID NO: 454192 - RNA, 24 nt, Human
ggaggucagaggauguauguggcc

SEQ ID NO: 454193 - RNA, 32 nt, Human
ggaggucagaugggaacuuggaacugggcaug

SEQ ID NO: 454194 - RNA, 32 nt, Human
ggaggucagcacaagauacacgucacaaagac

SEQ ID NO: 454195 - RNA, 32 nt, Human
ggaggucaggucaaggcugcagugagccaugg

SEQ ID NO: 454196 - RNA, 32 nt, Human
ggaggucaguaguucaagaccagccuggccaa

SEQ ID NO: 454197 - RNA, 20 nt, Human
ggaggucaucggggccucag

SEQ ID NO: 454198 - RNA, 32 nt, Human
ggagguccacacaagccaaaauaucucuauau

SEQ ID NO: 454199 - RNA, 32 nt, Human
ggagguccagccgccgcgcccgcuacccggag

SEQ ID NO: 454200 - RNA, 19 nt, Human
ggagguccagguggacugc

SEQ ID NO: 454201 - RNA, 18 nt, Human
ggagguccauguggggga

SEQ ID NO: 454202 - RNA, 32 nt, Human
ggaggucgaggcaggaggaucacuugagucca

SEQ ID NO: 454203 - RNA, 32 nt, Human
ggaggucgaggcaggaguauugcuugagcccg

SEQ ID NO: 454204 - RNA, 32 nt, Human
ggaggucgaggcagguggaucgcuugagccca

SEQ ID NO: 454205 - RNA, 24 nt, Human
ggaggucgaggcgggcagaucucc

SEQ ID NO: 454206 - RNA, 32 nt, Human
ggaggucggcagugugaggagcugcuauggug

SEQ ID NO: 454207 - RNA, 32 nt, Human
ggaggucgggacuagggugggagaggcacuau

SEQ ID NO: 454208 - RNA, 21 nt, Human
ggaggucuccaaaaagauauu

SEQ ID NO: 454209 - RNA, 22 nt, Human
ggaggucuccaggggccugcag

SEQ ID NO: 454210 - RNA, 32 nt, Human
ggaggucuccaggggccugcagaaggaaagaa

SEQ ID NO: 454211 - RNA, 32 nt, Human
ggaggucugacagccccucccucccagagcug

SEQ ID NO: 454212 - RNA, 32 nt, Human
ggaggucugcagcuggaagcccagcccacagc

SEQ ID NO: 454213 - RNA, 32 nt, Human
ggaggucugggaagggcuggaaaucacugggg

SEQ ID NO: 454214 - RNA, 32 nt, Human
ggaggucugggcagccacccagggggcccucc

SEQ ID NO: 454215 - RNA, 32 nt, Human
ggaggucuggggcucugguggcuuccauagcu

SEQ ID NO: 454216 - RNA, 32 nt, Human
ggaggucugggggcuggagucuggugguggca

SEQ ID NO: 454217 - RNA, 32 nt, Human
ggaggucuggucaggaugggggugcaguccca

SEQ ID NO: 454218 - RNA, 32 nt, Human
ggaggucuguaauuccugucuccuggacucuc

SEQ ID NO: 454219 - RNA, 32 nt, Human
ggaggucugucugcacugggagccucaggagg

SEQ ID NO: 454220 - RNA, 32 nt, Human
ggaggucuucccacgcccugucauuaggcugc

SEQ ID NO: 454221 - RNA, 32 nt, Human
ggaggucuuguggugugugucuccucucuucu

SEQ ID NO: 454222 - RNA, 20 nt, Human
ggaggugaacguuccaggca

SEQ ID NO: 454223 - RNA, 18 nt, Human
ggaggugaagucggguca

SEQ ID NO: 454224 - RNA, 22 nt, Human
ggaggugacaggggcccggagg

SEQ ID NO: 454225 - RNA, 32 nt, Human
ggaggugacaucagguguuccucuccagcagu

SEQ ID NO: 454226 - RNA, 32 nt, Human
ggaggugagaggugauuuccugccauucuucu

SEQ ID NO: 454227 - RNA, 32 nt, Human
ggaggugaggagcaacucugcccagccgcccc

SEQ ID NO: 454228 - RNA, 32 nt, Human
ggaggugaggcugcacuucgcuguguuugagg

SEQ ID NO: 454229 - RNA, 32 nt, Human
ggaggugaggggcgccucugcccagcugcccc

SEQ ID NO: 454230 - RNA, 32 nt, Human
ggaggugagggugucugacgugcacugagggc

SEQ ID NO: 454231 - RNA, 32 nt, Human
ggaggugaguuccguucuuccuugugagauga

SEQ ID NO: 454232 - RNA, 32 nt, Human
ggaggugaucccucccuccugccugcccgcca

SEQ ID NO: 454233 - RNA, 32 nt, Human
ggaggugcacuuuacuuccugacuccuuuccu

SEQ ID NO: 454234 - RNA, 32 nt, Human
ggaggugcagccagggcaaggaggaguccucc

SEQ ID NO: 454235 - RNA, 20 nt, Human
ggaggugcagcuaaaggcca

SEQ ID NO: 454236 - RNA, 32 nt, Human
ggaggugcagggccaggaggaacaugagguga

SEQ ID NO: 454237 - RNA, 32 nt, Human
ggaggugcaguggagggggcaagcuuugcucc

SEQ ID NO: 454238 - RNA, 17 nt, Human
ggaggugcaguuagguc

SEQ ID NO: 454239 - RNA, 32 nt, Human
ggaggugccuggagugcccacccugggagaca

SEQ ID NO: 454240 - RNA, 20 nt, Human
ggaggugcggcugcaggccg

SEQ ID NO: 454241 - RNA, 32 nt, Human
ggaggugcguccuuguuuuccaggaaauguuc

SEQ ID NO: 454242 - RNA, 32 nt, Human
ggcaagaggagguggcggcggugguaguggug

SEQ ID NO: 454243 - RNA, 32 nt, Human
ggcaagaggcuggagggcccaauggcugcaaa

SEQ ID NO: 454244 - RNA, 32 nt, Human
ggcaagagggaaggcgagacagcagugaacag

SEQ ID NO: 454245 - RNA, 32 nt, Human
ggcaagaggggguggagggguguggcaguggu

SEQ ID NO: 454246 - RNA, 32 nt, Human
ggcaagaggucuucugaacacauccaccagau

SEQ ID NO: 454247 - RNA, 32 nt, Human
ggcaagagugcccgcuacaaccgcuucuccgg

SEQ ID NO: 454248 - RNA, 32 nt, Human
ggcaagagugugaggcaggaagacugagucag

SEQ ID NO: 454249 - RNA, 19 nt, Human
ggcaagauaaaccaauguc

SEQ ID NO: 454250 - RNA, 22 nt, Human
ggcaagaugauuucagauuuuc

SEQ ID NO: 454251 - RNA, 20 nt, Human
ggcaagaugccuagaucuuc

SEQ ID NO: 454252 - RNA, 31 nt, Human
ggcaagauggcagaaguagagcagaagaaga

SEQ ID NO: 454253 - RNA, 32 nt, Human
ggcaagaugggagcugguuggggaaggggauc

SEQ ID NO: 454254 - RNA, 32 nt, Human
ggcaagauugagggcccgggagagggaggccc

SEQ ID NO: 454255 - RNA, 32 nt, Human
ggcaagcaagacacaccagagcucuucccucg

SEQ ID NO: 454256 - RNA, 32 nt, Human
ggcaagcaaggaauggcugugccugaggcugc

SEQ ID NO: 454257 - RNA, 24 nt, Human
ggcaagcaauucuaagaucuucca

SEQ ID NO: 454258 - RNA, 32 nt, Human
ggcaagcacaauauuacagaggaacucucaaa

SEQ ID NO: 454259 - RNA, 16 nt, Human
ggcaagcacugggguc

SEQ ID NO: 454260 - RNA, 32 nt, Human
ggcaagcagaagcagcggccgcagcgaagcug

SEQ ID NO: 454261 - RNA, 32 nt, Human
ggcaagcagggugcucugggaccgcacuucau

SEQ ID NO: 454262 - RNA, 32 nt, Human
ggcaagcaggucacagaugccagggcucauuu

SEQ ID NO: 454263 - RNA, 32 nt, Human
ggcaagcaggugugaagagcagggcucagcag

SEQ ID NO: 454264 - RNA, 32 nt, Human
ggcaagcagucgucccuguccugggcaucccu

SEQ ID NO: 454265 - RNA, 32 nt, Human
ggcaagccaagugcccucucugaaccucaguu

SEQ ID NO: 454266 - RNA, 32 nt, Human
ggcaagcccaaggagccagcugugguggcggc

SEQ ID NO: 454267 - RNA, 32 nt, Human
ggcaagcgacugguuggaucaaaagccaguau

SEQ ID NO: 454268 - RNA, 32 nt, Human
ggcaagcggcuuucugggucucagcccucucu

SEQ ID NO: 454269 - RNA, 32 nt, Human
ggcaagcucugcugcgaugccucugccucauc

SEQ ID NO: 454270 - RNA, 32 nt, Human
ggcaagcugcugcuuauggccugggugucaug

SEQ ID NO: 454271 - RNA, 32 nt, Human
ggcaagcuggaacuuggguggggaggggacau

SEQ ID NO: 454272 - RNA, 32 nt, Human
ggcaagcugugacuucuccaggucucacgggc

SEQ ID NO: 454273 - RNA, 18 nt, Human
ggcaagcuguucagauuc

SEQ ID NO: 454274 - RNA, 32 nt, Human
ggcaagcuugcagcugcccugauggugcaggu

SEQ ID NO: 454275 - RNA, 19 nt, Human
ggcaaggaaacagauucuc

SEQ ID NO: 454276 - RNA, 32 nt, Human
ggcaaggaaagaggccggucaccagaagccag

SEQ ID NO: 454277 - RNA, 32 nt, Human
ggcaaggaacaccacaccacugcuuuucagca

SEQ ID NO: 454278 - RNA, 32 nt, Human
ggcaaggaagaaugugagcaagaguagagaga

SEQ ID NO: 454279 - RNA, 32 nt, Human
ggcaaggaaggagccaggauggccugggcucu

SEQ ID NO: 454280 - RNA, 17 nt, Human
ggcaaggaaugucugcu

SEQ ID NO: 454281 - RNA, 32 nt, Human
ggcaaggacaggagagcagugcagugacacag

SEQ ID NO: 454282 - RNA, 32 nt, Human
ggcaaggaccagcugcccauucugagcccagg

SEQ ID NO: 454283 - RNA, 32 nt, Human
ggcaaggacuccucccaucuucacaccugaac

SEQ ID NO: 454284 - RNA, 32 nt, Human
ggcaaggagcagaagacauaacguugaaacag

SEQ ID NO: 454285 - RNA, 32 nt, Human
ggcaaggagccaaggaccacagagccucagcc

SEQ ID NO: 454286 - RNA, 32 nt, Human
ggcaaggaggugggggccgcaggguuggggcg

SEQ ID NO: 454287 - RNA, 32 nt, Human
ggcaaggagugauuuuauucuguauuacucca

SEQ ID NO: 454288 - RNA, 23 nt, Human
ggcaaggaucacagcugcccuug

SEQ ID NO: 454289 - RNA, 32 nt, Human
ggcaaggaugcccaaagacaccagguuggaga

SEQ ID NO: 454290 - RNA, 32 nt, Human
ggcaaggauggaaauucaccucaguuugcugu

SEQ ID NO: 454291 - RNA, 32 nt, Human
ggcaaggcauguugguuugcgugugggaaucc

SEQ ID NO: 454292 - RNA, 32 nt, Human
ggcaaggccaagaagugaggccagcagggagg

SEQ ID NO: 454293 - RNA, 32 nt, Human
ggcaaggccacaaccuccauucucccagaaaa

SEQ ID NO: 454294 - RNA, 32 nt, Human
ggcaaggccaggagugcccaccagcuugcccc

SEQ ID NO: 454295 - RNA, 17 nt, Human
ggcaaggcccaauggcc

SEQ ID NO: 454296 - RNA, 32 nt, Human
ggcaaggccugacaggcugaagucaccuggaa

SEQ ID NO: 454297 - RNA, 32 nt, Human
ggcaaggcggaggggccaggguggggguagcc

SEQ ID NO: 454298 - RNA, 32 nt, Human
ggcaaggcuccucacaguauccuugagaggug

SEQ ID NO: 454299 - RNA, 32 nt, Human
ggcaaggcuggguggggaagaaagagaaaaac

SEQ ID NO: 454300 - RNA, 17 nt, Human
ggcaaggcuuccaggcc

SEQ ID NO: 454301 - RNA, 21 nt, Human
ggcaaggcuuguggggcgcuu

SEQ ID NO: 454302 - RNA, 32 nt, Human
ggcaagggaaaaccggcuguggagaaggaaau

SEQ ID NO: 454303 - RNA, 32 nt, Human
ggcaagggagaaggcaggaugaugaggagacu

SEQ ID NO: 454304 - RNA, 32 nt, Human
ggcaagggcgagcggcggggacuggggaaggg

SEQ ID NO: 454305 - RNA, 32 nt, Human
ggcaagggcugaaggaggccacuccaucucac

SEQ ID NO: 454306 - RNA, 32 nt, Human
ggcaagggcuguagacauucugcucuggucac

SEQ ID NO: 454307 - RNA, 18 nt, Human
ggcaagggcuugggggga

SEQ ID NO: 454308 - RNA, 17 nt, Human
ggcaaggggaaccacca

SEQ ID NO: 454309 - RNA, 32 nt, Human
ggcaaggggaaucugucaucauucauugcaaa

SEQ ID NO: 454310 - RNA, 32 nt, Human
ggcaaggggaggcaggaggguggccuggaccu

SEQ ID NO: 454311 - RNA, 32 nt, Human
ggcaaggggauuucucaggucauuuggagaac

SEQ ID NO: 454312 - RNA, 32 nt, Human
ggcaaggggcucuuugaugaugaggacgagga

SEQ ID NO: 454313 - RNA, 32 nt, Human
ggcaagggggaguguagagcagagcagaagcc

SEQ ID NO: 454314 - RNA, 32 nt, Human
ggcaaggggugaggauaggacagagggauuuu

SEQ ID NO: 454315 - RNA, 32 nt, Human
ggcaagggucaaacugacucacucuaccagga

SEQ ID NO: 454316 - RNA, 32 nt, Human
ggcaaggguuugcccaguuugcagaugagaaa

SEQ ID NO: 454317 - RNA, 32 nt, Human
ggcaagguaccgucacugacaccagcagcauu

SEQ ID NO: 454318 - RNA, 19 nt, Human
ggcaagguagcccugggca

SEQ ID NO: 454319 - RNA, 32 nt, Human
ggcaagguaggaacaagaugagcuugaaauau

SEQ ID NO: 454320 - RNA, 32 nt, Human
ggcaaggucagacuuagaguacagcuguuuuc

SEQ ID NO: 454321 - RNA, 32 nt, Human
ggcaaggucauuaaauuugccaccucacacgu

SEQ ID NO: 454322 - RNA, 32 nt, Human
ggcaaggucauuggccgggccuggccugugga

SEQ ID NO: 454323 - RNA, 32 nt, Human
ggcaaggucccucuccagcugcaggugaggcc

SEQ ID NO: 454324 - RNA, 32 nt, Human
ggcaaggucugagggcccaccgaugagagaga

SEQ ID NO: 454325 - RNA, 32 nt, Human
ggcaaggugaugaccagcuggagagagaucag

SEQ ID NO: 454326 - RNA, 32 nt, Human
ggcaaggugcugcucagagaggaggaccucau

SEQ ID NO: 454327 - RNA, 32 nt, Human
ggcaagguggaggcagaguuugagcugcugac

SEQ ID NO: 454328 - RNA, 23 nt, Human
ggcaagguggugacaggcagcag

SEQ ID NO: 454329 - RNA, 32 nt, Human
ggcaagguucaaggcagacuaaccucaugcau

SEQ ID NO: 454330 - RNA, 32 nt, Human
ggcaaguagcaagaauagagcaaaauaucaaa

SEQ ID NO: 454331 - RNA, 32 nt, Human
ggcaagucaguuaaccuuucuggccuguuacc

SEQ ID NO: 454332 - RNA, 32 nt, Human
ggcaagucauuuucaucucuuugccccaguuu

SEQ ID NO: 454333 - RNA, 32 nt, Human
ggcaaguccaccacuacuggccaucugaccua

SEQ ID NO: 454334 - RNA, 32 nt, Human
ggcaaguccaccacuacuggccaucugaucua

SEQ ID NO: 454335 - RNA, 32 nt, Human
ggcaagucuccuacggcuuccugggccugcac

SEQ ID NO: 454336 - RNA, 32 nt, Human
ggcaagugagccaagaaccuaggagcagggcc

SEQ ID NO: 454337 - RNA, 32 nt, Human
ggcaagugagccugcaccauggagguggccac

SEQ ID NO: 454338 - RNA, 28 nt, Human
ggcaagugaggugcugccgucauccagg

SEQ ID NO: 454339 - RNA, 32 nt, Human
ggcaagugccaguaaucccagcuacucuugga

SEQ ID NO: 454340 - RNA, 32 nt, Human
ggcaagugccugaaaucccagguacucaggag

SEQ ID NO: 454341 - RNA, 24 nt, Human
ggcaaguggcuguggcggccgcag

SEQ ID NO: 454342 - RNA, 32 nt, Human
ggcaaguguguggaagcugagcguugucgccg

SEQ ID NO: 454343 - RNA, 32 nt, Human
ggcaaguuacuuaucuuccuccauuuauucac

SEQ ID NO: 454344 - RNA, 32 nt, Human
ggcaaguuacuuuaucuaucugccucaccucc

SEQ ID NO: 454345 - RNA, 32 nt, Human
ggcaauaagagucccaauuccaaccugacucu

SEQ ID NO: 454346 - RNA, 32 nt, Human
ggcaauaagcuuuuggaaaaacuauuccagaa

SEQ ID NO: 454347 - RNA, 32 nt, Human
ggcaauaaguaggggaaggaagaauuucauuu

SEQ ID NO: 454348 - RNA, 32 nt, Human
ggcaauaccauccuggacacaggaacuggcaa

SEQ ID NO: 454349 - RNA, 32 nt, Human
ggcaauagaacccaggggucugagcauggagc

SEQ ID NO: 454350 - RNA, 23 nt, Human
ggcaauagaguaagacucugucu

SEQ ID NO: 454351 - RNA, 32 nt, Human
ggcaauagcccccauuccugggucuuuagaga

SEQ ID NO: 454352 - RNA, 20 nt, Human
ggcaauagcucucagaucuc

SEQ ID NO: 454353 - RNA, 32 nt, Human
ggcaauaggaugagguuucuucaggguaaacu

SEQ ID NO: 454354 - RNA, 32 nt, Human
ggcaauaggccugggaaagucgcacuuucauc

SEQ ID NO: 454355 - RNA, 32 nt, Human
ggcaaucacucacuggcaaugagggaggcagg

SEQ ID NO: 454356 - RNA, 32 nt, Human
ggcaaucagcacaaaaauuauuuagaaaucuu

SEQ ID NO: 454357 - RNA, 32 nt, Human
ggcaaucagugaaguuuauguaaugaagcccu

SEQ ID NO: 454358 - RNA, 32 nt, Human
ggcaaucauagauuucuuuuccauuuugcaua

SEQ ID NO: 454359 - RNA, 17 nt, Human
ggcaaucauuugagguc

SEQ ID NO: 454360 - RNA, 32 nt, Human
ggcaauccaauacagacaggaagauaaaacuc

SEQ ID NO: 454361 - RNA, 32 nt, Human
ggcaauccucugaccaccacagagcccucgca

SEQ ID NO: 454362 - RNA, 32 nt, Human
ggcaaucgggcagugaaacuugauauuguauu

SEQ ID NO: 454363 - RNA, 32 nt, Human
ggcaaucuccaucucccggguucaagcgauuu

SEQ ID NO: 454364 - RNA, 20 nt, Human
ggcaaucucggcucacugca

SEQ ID NO: 454365 - RNA, 32 nt, Human
ggcaaucucugccucugcaacagggcacuugc

SEQ ID NO: 454366 - RNA, 22 nt, Human
ggcaaucugaggcgacugguga

SEQ ID NO: 454367 - RNA, 32 nt, Human
ggcaaucuugaacccucuaugcagugagagca

SEQ ID NO: 454368 - RNA, 32 nt, Human
ggcaaugacaaguuuaacauauacaaauucgu

SEQ ID NO: 454369 - RNA, 32 nt, Human
ggcaaugagcaguucuguagaggauucaugug

SEQ ID NO: 454370 - RNA, 32 nt, Human
ggcaaugaggucgaucacccuuuugcuauagc

SEQ ID NO: 454371 - RNA, 32 nt, Human
ggcaaugcaaaugcaggugcaguuuucuguua

SEQ ID NO: 454372 - RNA, 32 nt, Human
ggcaaugcaucuuuccaaccugagcgaguggg

SEQ ID NO: 454373 - RNA, 32 nt, Human
ggcaaugcuccuggggagucuguggggaagau

SEQ ID NO: 454374 - RNA, 32 nt, Human
ggcaaugcuuuccagaggauggaguccuuuuu

SEQ ID NO: 454375 - RNA, 32 nt, Human
ggcaauggacaaggaaggaauaaagggagaag

SEQ ID NO: 454376 - RNA, 32 nt, Human
ggcaauggagaaggcaggaaggcaggggccuu

SEQ ID NO: 454377 - RNA, 32 nt, Human
ggcaauggcaggcaggaaagacagaggaagga

SEQ ID NO: 454378 - RNA, 31 nt, Human
ggcaauggcgccaucucagcucacugcaacg

SEQ ID NO: 454379 - RNA, 32 nt, Human
ggcaauggcgugaacccgggaggcagagcuug

SEQ ID NO: 454380 - RNA, 32 nt, Human
ggcaauggcuccaagccuugccauagggcugc

SEQ ID NO: 454381 - RNA, 32 nt, Human
ggcaauggcugcacaacauuacaaauguauuu

SEQ ID NO: 454382 - RNA, 29 nt, Human
ggcaauggcugcagacucuauuccgacau

SEQ ID NO: 454383 - RNA, 32 nt, Human
ggcaaugggacccagcuccaucagacacuugu

SEQ ID NO: 454384 - RNA, 32 nt, Human
ggcaaugggcaaaggggcugugccuugcagcc

SEQ ID NO: 454385 - RNA, 31 nt, Human
ggcaauggugcaaucucagcucacugcaacc

SEQ ID NO: 454386 - RNA, 32 nt, Human
ggcaaugucucugcuucuuccugggcugucau

SEQ ID NO: 454387 - RNA, 32 nt, Human
ggcaauguggugaagcugaguuucuguccaau

SEQ ID NO: 454388 - RNA, 32 nt, Human
ggcaauguucccccucuccucucuuccucccu

SEQ ID NO: 454389 - RNA, 20 nt, Human
ggcaauguuuccauuaagua

SEQ ID NO: 454390 - RNA, 32 nt, Human
ggcaauguuuguccuuaccaggauuuaaucua

SEQ ID NO: 454391 - RNA, 32 nt, Human
ggcaauucaaaacaggcugacauacagagggc

SEQ ID NO: 454392 - RNA, 32 nt, Human
ggcaauucauaugcacaugcaaguuugagaac

SEQ ID NO: 454393 - RNA, 32 nt, Human
ggcaauuccagaaaucuuaguagcccauguua

SEQ ID NO: 454394 - RNA, 32 nt, Human
ggcaauuccucuucauugucuacauagugaca

SEQ ID NO: 454395 - RNA, 32 nt, Human
ggcaauugagguggguggucaaaagagaagca

SEQ ID NO: 454396 - RNA, 31 nt, Human
ggcaauuguacaaucucggcucauuacaacc

SEQ ID NO: 454397 - RNA, 32 nt, Human
ggcaauuguuuauagugaaacuuuuuaaauua

SEQ ID NO: 454398 - RNA, 32 nt, Human
ggcaauuucaugguguuucaccagagggcgcu

SEQ ID NO: 454399 - RNA, 32 nt, Human
ggcaauuugacagaguguuggaugugucaugu

SEQ ID NO: 454400 - RNA, 32 nt, Human
ggcaauuugcuugagcuacuucuugccagcaa

SEQ ID NO: 454401 - RNA, 32 nt, Human
ggcaauuugggaugccuccuggggaagguuuc

SEQ ID NO: 454402 - RNA, 32 nt, Human
ggcaauuugggcugggcucaacagggcaguuc

SEQ ID NO: 454403 - RNA, 32 nt, Human
ggcacaaaauacuuagacuagaugcugaucca

SEQ ID NO: 454404 - RNA, 32 nt, Human
ggcacaaacaaucuggaagccaaaaauugcac

SEQ ID NO: 454405 - RNA, 32 nt, Human
ggcacaaagcaagcuaaugucaccugagacca

SEQ ID NO: 454406 - RNA, 32 nt, Human
ggcacaaauuauacugucaaccuacuguugcu

SEQ ID NO: 454407 - RNA, 32 nt, Human
ggcacaacaaucacuugagccuaggaggccca

SEQ ID NO: 454408 - RNA, 32 nt, Human
ggcacaaccaagaacugggauuaaugaagcau

SEQ ID NO: 454409 - RNA, 24 nt, Human
ggcacaaccagacgcccagucaca

SEQ ID NO: 454410 - RNA, 32 nt, Human
ggcacaaccagcuuccuggaguuaccucagca

SEQ ID NO: 454411 - RNA, 32 nt, Human
ggcacaacucaaauguguaaagaaggaagagc

SEQ ID NO: 454412 - RNA, 32 nt, Human
ggcacaacuccaggaauucucuagcuccuggu

SEQ ID NO: 454413 - RNA, 32 nt, Human
ggcacaacugacugguucacagcacuccuuac

SEQ ID NO: 454414 - RNA, 32 nt, Human
ggcacaagacucagugcugggccuggcaugca

SEQ ID NO: 454415 - RNA, 32 nt, Human
ggcacaagagcaaagagaugggccagugacuc

SEQ ID NO: 454416 - RNA, 32 nt, Human
ggcacaagaucauuccuguuguacauggggag

SEQ ID NO: 454417 - RNA, 32 nt, Human
ggcacaagccucccacugccccuuuccccgcc

SEQ ID NO: 454418 - RNA, 32 nt, Human
ggcacaagccuguaaucucugcacuuugggau

SEQ ID NO: 454419 - RNA, 32 nt, Human
ggcacaagcucccuagccucuuuggauccauu

SEQ ID NO: 454420 - RNA, 32 nt, Human
ggcacaaggaagaaaguaugggaaggaggaau

SEQ ID NO: 454421 - RNA, 24 nt, Human
ggcacaagugauccuccugcuuca

SEQ ID NO: 454422 - RNA, 32 nt, Human
ggcacaagugcacacacaucuaugcagacaag

SEQ ID NO: 454423 - RNA, 22 nt, Human
ggcacaaucucagcucacugca

SEQ ID NO: 454424 - RNA, 32 nt, Human
ggcacaauggcuggacaugggugggcucugau

SEQ ID NO: 454425 - RNA, 32 nt, Human
ggcacaauguauacuucagugcucacccguag

SEQ ID NO: 454426 - RNA, 32 nt, Human
ggcacaauugcacuccagcccgagugacagaa

SEQ ID NO: 454427 - RNA, 32 nt, Human
ggcacacacacagcucugugccugugugggca

SEQ ID NO: 454428 - RNA, 32 nt, Human
ggcacacacaugcacacacccauaaacacaca

SEQ ID NO: 454429 - RNA, 32 nt, Human
ggcacacaccaccacauccagcuuauuuuugu

SEQ ID NO: 454430 - RNA, 32 nt, Human
ggcacacaccuauaaucucagcacuuugggag

SEQ ID NO: 454431 - RNA, 32 nt, Human
ggcacacaccuguaaucccagcuacucaggaa

SEQ ID NO: 454432 - RNA, 32 nt, Human
ggcacacaccuguaaucccagcuacucaggag

SEQ ID NO: 454433 - RNA, 32 nt, Human
ggcacacaccuguaaucccagcuacucggagg

SEQ ID NO: 454434 - RNA, 32 nt, Human
ggcacacaccuguaaucccagcuacucgggag

SEQ ID NO: 454435 - RNA, 32 nt, Human
ggcacacaccuguaaucccaguuacucaggag

SEQ ID NO: 454436 - RNA, 19 nt, Human
ggcacacacgacacaggga

SEQ ID NO: 454437 - RNA, 19 nt, Human
ggcacacacguccagccca

SEQ ID NO: 454438 - RNA, 32 nt, Human
ggcacacacugggaugccgcagccuggccggc

SEQ ID NO: 454439 - RNA, 32 nt, Human
ggcacacagauccccuggaaacccaccucucu

SEQ ID NO: 454440 - RNA, 21 nt, Human
ggcacacagcaugcguggcgu

SEQ ID NO: 454441 - RNA, 32 nt, Human
ggcacacagcauggcagaaaaccgagagcccc

SEQ ID NO: 454442 - RNA, 32 nt, Human
ggcacacagggagggggaggucaggggcagag

SEQ ID NO: 454443 - RNA, 21 nt, Human
ggcacacagggcccggccaca

SEQ ID NO: 454444 - RNA, 32 nt, Human
ggcacacagggcccggccacacccagcggccc

SEQ ID NO: 454445 - RNA, 18 nt, Human
ggcacacagggcuggcuc

SEQ ID NO: 454446 - RNA, 21 nt, Human
ggcacacagggucacugcuga

SEQ ID NO: 454447 - RNA, 31 nt, Human
ggcacacagguguccauucagaugagaguug

SEQ ID NO: 454448 - RNA, 32 nt, Human
ggcacacauuuaccuauguaacaaaccugcac

SEQ ID NO: 454449 - RNA, 32 nt, Human
ggcacacauuuuccuauguaacaaauuugcaa

SEQ ID NO: 454450 - RNA, 32 nt, Human
ggcacaccaccagugaggcacauguugccuuu

SEQ ID NO: 454451 - RNA, 32 nt, Human
ggcacaccacuccuuccagcaguagucgcuuu

SEQ ID NO: 454452 - RNA, 32 nt, Human
ggcacaccagaggcaggucuucaauacccacu

SEQ ID NO: 454453 - RNA, 32 nt, Human
ggcacaccauacuagaauucacacuggagaga

SEQ ID NO: 454454 - RNA, 32 nt, Human
ggcacaccauuaacaaaugacagacuugggcu

SEQ ID NO: 454455 - RNA, 32 nt, Human
ggcacacccacccucaaucugggugggcauca

SEQ ID NO: 454456 - RNA, 32 nt, Human
ggcacacccauucucucaugcuuggaagaagc

SEQ ID NO: 454457 - RNA, 32 nt, Human
ggcacacccuacuguccuugugccucacgccc

SEQ ID NO: 454458 - RNA, 32 nt, Human
ggcacacccugccuguuuucucuuuuuagaca

SEQ ID NO: 454459 - RNA, 32 nt, Human
ggcacaccuucucccgggcacugaggcccagg

SEQ ID NO: 454460 - RNA, 32 nt, Human
ggcacacgaaggagguggggaggugaagaugg

SEQ ID NO: 454461 - RNA, 20 nt, Human
ggcacacgcaccugcucucc

SEQ ID NO: 454462 - RNA, 32 nt, Human
ggcacacgccuguaauaccagcuacucaggug

SEQ ID NO: 454463 - RNA, 32 nt, Human
ggcacacgccuguaaucccagcuacucagaug

SEQ ID NO: 454464 - RNA, 32 nt, Human
ggcacacgccuguaaucccagcuacucaggag

SEQ ID NO: 454465 - RNA, 32 nt, Human
ggcacacgccuguaaucccagcuacucgggaa

SEQ ID NO: 454466 - RNA, 32 nt, Human
ggcacacgccuguaaucccagcuacucuggag

SEQ ID NO: 454467 - RNA, 32 nt, Human
ggcacacgccuguaaucccagguacuuggaag

SEQ ID NO: 454468 - RNA, 32 nt, Human
ggcacacgccuguaaucccaguuacuugggag

SEQ ID NO: 454469 - RNA, 32 nt, Human
ggcacacgccuguaaucucagcuacucaggag

SEQ ID NO: 454470 - RNA, 32 nt, Human
ggcacacgccugucaucccagcuacucgguag

SEQ ID NO: 454471 - RNA, 18 nt, Human
ggcacacgccuuguucuu

SEQ ID NO: 454472 - RNA, 32 nt, Human
ggcacacggcccuucggagccugggcagccug

SEQ ID NO: 454473 - RNA, 32 nt, Human
ggcacacggcuguaaucccagcacuuugggag

SEQ ID NO: 454474 - RNA, 32 nt, Human
ggcacacguacgcacacacgcacaugcacaga

SEQ ID NO: 454475 - RNA, 32 nt, Human
ggcacacguggggcucuuuacccacuuggguu

SEQ ID NO: 454476 - RNA, 32 nt, Human
ggcacacguuuaccuguguaaccugcacaucc

SEQ ID NO: 454477 - RNA, 32 nt, Human
ggcacacuccuguaaucccagcuacuuaggag

SEQ ID NO: 454478 - RNA, 32 nt, Human
ggcacacugcaaccuucgccucccagauucaa

SEQ ID NO: 454479 - RNA, 32 nt, Human
ggcacacuggagucagaaaaacagaaauuaag

SEQ ID NO: 454480 - RNA, 32 nt, Human
ggcacacuggggagacaagaggcuccacaaca

SEQ ID NO: 454481 - RNA, 32 nt, Human
ggcacacuucacuucccacauucuccaggagg

SEQ ID NO: 454482 - RNA, 32 nt, Human
ggcacacuuuaacccagucucuguugcuguug

SEQ ID NO: 454483 - RNA, 19 nt, Human
ggcacagaaagggcagcuu

SEQ ID NO: 454484 - RNA, 20 nt, Human
ggcacagaaaucgagcaagg

SEQ ID NO: 454485 - RNA, 32 nt, Human
ggcacagaaggacugugugccugggucuaaca

SEQ ID NO: 454486 - RNA, 32 nt, Human
ggcacagaagggcugagagaccuggccuagug

SEQ ID NO: 454487 - RNA, 32 nt, Human
ggcacagaccucuuucccucugccucaaagcc

SEQ ID NO: 454488 - RNA, 32 nt, Human
ggcacagacuucggguuggauuugucagcaag

SEQ ID NO: 454489 - RNA, 25 nt, Human
ggcacagacuugccucuguugcugu

SEQ ID NO: 454490 - RNA, 19 nt, Human
ggcacagagaagagacagg

SEQ ID NO: 454491 - RNA, 32 nt, Human
ggcacagagagacagagguucauggacugagg

SEQ ID NO: 454492 - RNA, 19 nt, Human
ggcacagagagauauuuaa

SEQ ID NO: 454493 - RNA, 32 nt, Human
ggcacagagcagagaggagggcacuggugguc

SEQ ID NO: 454494 - RNA, 32 nt, Human
ggcacagagcgguagacccugcuucucuaagu

SEQ ID NO: 454495 - RNA, 32 nt, Human
ggcacagagcugggcaugggagagaaacgggc

SEQ ID NO: 454496 - RNA, 32 nt, Human
ggcacagaucucuuucccucugccucaaagcc

SEQ ID NO: 454497 - RNA, 32 nt, Human
ggcacagaugagagacagaggcagagaaguua

SEQ ID NO: 454498 - RNA, 32 nt, Human
ggcacagauggcugggacgggugacaguguga

SEQ ID NO: 454499 - RNA, 32 nt, Human
ggcacagauugguauuuguucuguaaagccca

SEQ ID NO: 454500 - RNA, 18 nt, Human
ggcacagcacaaaggcuu

SEQ ID NO: 454501 - RNA, 22 nt, Human
ggcacagcagccagcggguggg

SEQ ID NO: 454502 - RNA, 32 nt, Human
ggcacagcaguggcuggaaggugccccgugga

SEQ ID NO: 454503 - RNA, 32 nt, Human
ggcacagcaucacuugaacccaggaggcagag

SEQ ID NO: 454504 - RNA, 22 nt, Human
ggcacagcaugcuuguacuuga

SEQ ID NO: 454505 - RNA, 32 nt, Human
ggcacagccaggcuggagucagugucugcccc

SEQ ID NO: 454506 - RNA, 32 nt, Human
ggcacagcccucacagcucaaacgcccacccc

SEQ ID NO: 454507 - RNA, 32 nt, Human
ggcacagcccugacacagguguggcuacugga

SEQ ID NO: 454508 - RNA, 32 nt, Human
ggcacagccugggggcccucaggcugggcgcg

SEQ ID NO: 454509 - RNA, 32 nt, Human
ggcacagccugugcagagagggugggucaccc

SEQ ID NO: 454510 - RNA, 18 nt, Human
ggcacagcgccgcaucca

SEQ ID NO: 454511 - RNA, 19 nt, Human
ggcacagcggaacuccggg

SEQ ID NO: 454512 - RNA, 32 nt, Human
ggcacagcuacuccuggcuggggguggggccu

SEQ ID NO: 454513 - RNA, 32 nt, Human
ggcacagcuccccagucuuugcuuaugcccac

SEQ ID NO: 454514 - RNA, 32 nt, Human
ggcacagcucuaggcugggaggggagaaccag

SEQ ID NO: 454515 - RNA, 32 nt, Human
ggcacagcugccacgggcucuccugggcuuau

SEQ ID NO: 454516 - RNA, 32 nt, Human
ggcacagcugcucucccaugggugauggugau

SEQ ID NO: 454517 - RNA, 32 nt, Human
ggcacagcuucaaaaugacaucuaaguagcug

SEQ ID NO: 454518 - RNA, 18 nt, Human
ggcacaggaagggaaggg

SEQ ID NO: 454519 - RNA, 23 nt, Human
ggcacaggaucaauaaugccuga

SEQ ID NO: 454520 - RNA, 31 nt, Human
ggcacaggcaaaggguguggcuucagagaag

SEQ ID NO: 454521 - RNA, 32 nt, Human
ggcacaggcagaaggacuucagcugcuggucu

SEQ ID NO: 454522 - RNA, 32 nt, Human
ggcacaggccacugcaaacccugcugcugccg

SEQ ID NO: 454523 - RNA, 32 nt, Human
ggcacaggccccggaguggagggggcagggga

SEQ ID NO: 454524 - RNA, 21 nt, Human
ggcacaggccuguaguccuag

SEQ ID NO: 454525 - RNA, 19 nt, Human
ggcacaggcuaaaaccuga

SEQ ID NO: 454526 - RNA, 32 nt, Human
ggcacaggcuggacacaggaaugggggcgccu

SEQ ID NO: 454527 - RNA, 32 nt, Human
ggcacaggcugugagccagggugcugggaaac

SEQ ID NO: 454528 - RNA, 32 nt, Human
ggcacagggacagcaugucuccagccagcgcc

SEQ ID NO: 454529 - RNA, 32 nt, Human
ggcacagggacuccgggagacucagagggcga

SEQ ID NO: 454530 - RNA, 32 nt, Human
ggcacagggagaugcucaggggccagucccug

SEQ ID NO: 454531 - RNA, 32 nt, Human
ggcacagggagguggguuggggugaggccaca

SEQ ID NO: 454532 - RNA, 32 nt, Human
ggcacagggccaucugucaccaggggcuuagg

SEQ ID NO: 454533 - RNA, 32 nt, Human
ggcacaggggacuaggggcauguagaguauau

SEQ ID NO: 454534 - RNA, 32 nt, Human
ggcacaggggcuccuggaaagacagcaggcuu

SEQ ID NO: 454535 - RNA, 32 nt, Human
ggcacagggggucaggcacuguggaaagaagg

SEQ ID NO: 454536 - RNA, 32 nt, Human
ggcacaggugccagaaucuaucuuuugcccua

SEQ ID NO: 454537 - RNA, 19 nt, Human
ggcacagguggcugcuuag

SEQ ID NO: 454538 - RNA, 32 nt, Human
ggcacaggugugagugugugagcaacaguacc

SEQ ID NO: 454539 - RNA, 20 nt, Human
ggcacagguuauaaacuuaa

SEQ ID NO: 454540 - RNA, 18 nt, Human
ggcacagguucauaucca

SEQ ID NO: 454541 - RNA, 22 nt, Human
ggcacagguugauaauuaucua

SEQ ID NO: 454542 - RNA, 32 nt, Human
ggcacaguacccuuugguuuguugacuguuuu

SEQ ID NO: 454543 - RNA, 32 nt, Human
ggcacaguccccucugccccugccucagucga

SEQ ID NO: 454544 - RNA, 32 nt, Human
ggcacagucucuaggucucugacaggcaggua

SEQ ID NO: 454545 - RNA, 32 nt, Human
ggcacagucugugucauuggugcacaugugcg

SEQ ID NO: 454546 - RNA, 32 nt, Human
ggcacagugagggggagccaggucagcaaguu

SEQ ID NO: 454547 - RNA, 32 nt, Human
ggcacagugaugggcaaagauuagcugcuucc

SEQ ID NO: 454548 - RNA, 32 nt, Human
ggcacagugcagcuuggugaagccacacgcug

SEQ ID NO: 454549 - RNA, 32 nt, Human
ggcacagugcaugucagcaucuaagauuccac

SEQ ID NO: 454550 - RNA, 32 nt, Human
ggcacaguggcucacaccuaaucccagcacuu

SEQ ID NO: 454551 - RNA, 22 nt, Human
ggcacaguggcucauaccugua

SEQ ID NO: 454552 - RNA, 21 nt, Human
ggcacaguggcucaugccuga

SEQ ID NO: 454553 - RNA, 22 nt, Human
ggcacaguggcucaugccugua

SEQ ID NO: 454554 - RNA, 32 nt, Human
ggcacagugggugaggagauggggacagguga

SEQ ID NO: 454555 - RNA, 25 nt, Human
ggcacagugguggcucaugccugua

SEQ ID NO: 454556 - RNA, 32 nt, Human
ggcacagugguggcucaugccuguaaucccag

SEQ ID NO: 454557 - RNA, 32 nt, Human
ggcacaguguagaucugaaaaguccugacuac

SEQ ID NO: 454558 - RNA, 32 nt, Human
ggcacagugucgcgccuguaaucccagcacuu

SEQ ID NO: 454559 - RNA, 32 nt, Human
ggcacaguguuuugaagggaggugggagcucu

SEQ ID NO: 454560 - RNA, 32 nt, Human
ggcacaguucaugcccuguaauccuagcacuu

SEQ ID NO: 454561 - RNA, 32 nt, Human
ggcacauaacauggaaccuggccaggcauggu

SEQ ID NO: 454562 - RNA, 32 nt, Human
ggcacauacagacucacauacagacacacaca

SEQ ID NO: 454563 - RNA, 32 nt, Human
ggcacauaccuguaaucccagcuacucgggag

SEQ ID NO: 454564 - RNA, 32 nt, Human
ggcacauaccuguaaucccagcuacuuggaau

SEQ ID NO: 454565 - RNA, 32 nt, Human
ggcacauacucagagcagucuucuuagccuau

SEQ ID NO: 454566 - RNA, 32 nt, Human
ggcacauagaagcccucacacacacaugcccg

SEQ ID NO: 454567 - RNA, 32 nt, Human
ggcacauaguacaguggauggaaggugcccgc

SEQ ID NO: 454568 - RNA, 32 nt, Human
ggcacaucaugcugcuggacagucugugcgaa

SEQ ID NO: 454569 - RNA, 24 nt, Human
ggcacauccaguugccaaggaaug

SEQ ID NO: 454570 - RNA, 32 nt, Human
ggcacaucgcuuuccccucuagaucuccauau

SEQ ID NO: 454571 - RNA, 32 nt, Human
ggcacaucugcuguccauuggggguucucagu

SEQ ID NO: 454572 - RNA, 32 nt, Human
ggcacaucugcugugguuucucaccagagaac

SEQ ID NO: 454573 - RNA, 32 nt, Human
ggcacaugacuguaaucccagcuacucaggag

SEQ ID NO: 454574 - RNA, 31 nt, Human
ggcacaugacuucucacagcuacaggugacc

SEQ ID NO: 454575 - RNA, 32 nt, Human
ggcacaugauagugcaaacugcucugacacca

SEQ ID NO: 454576 - RNA, 22 nt, Human
ggcacaugcacuacaagaggaa

SEQ ID NO: 454577 - RNA, 21 nt, Human
ggcacaugcauuggccuggca

SEQ ID NO: 454578 - RNA, 32 nt, Human
ggcacaugccaccacaccuagcuccuuacaac

SEQ ID NO: 454579 - RNA, 32 nt, Human
ggcacaugccuauaaucccagcuacucaggag

SEQ ID NO: 454580 - RNA, 32 nt, Human
ggcacaugccuauaaucccagcuacucgggag

SEQ ID NO: 454581 - RNA, 32 nt, Human
ggcacaugccuauaaucccagcuacuugggag

SEQ ID NO: 454582 - RNA, 32 nt, Human
ggcacaugccuaugaucccagcuacuggggag

SEQ ID NO: 454583 - RNA, 32 nt, Human
ggcacaugccugcaaucccagcuacuugagag

SEQ ID NO: 454584 - RNA, 32 nt, Human
ggcacaugccugccagcguugugucaugccug

SEQ ID NO: 454585 - RNA, 32 nt, Human
ggcacaugccuguaaaccuagcuacuugagag

SEQ ID NO: 454586 - RNA, 32 nt, Human
ggcacaugccuguaacccagcuacucgggagg

SEQ ID NO: 454587 - RNA, 32 nt, Human
ggcacaugccuguaacuccagcuacuugggag

SEQ ID NO: 454588 - RNA, 32 nt, Human
ggcacaugccuguaauaucagcuacucaggag

SEQ ID NO: 454589 - RNA, 20 nt, Human
ggcacaugccuguaauccca

SEQ ID NO: 454590 - RNA, 32 nt, Human
ggcacaugccuguaaucccaacuacuugggag

SEQ ID NO: 454591 - RNA, 32 nt, Human
ggcacaugccuguaaucccagauacuugggag

SEQ ID NO: 454592 - RNA, 32 nt, Human
ggcacaugccuguaaucccagcacuuugggaa

SEQ ID NO: 454593 - RNA, 32 nt, Human
ggcacaugccuguaaucccagcacuuugggag

SEQ ID NO: 454594 - RNA, 32 nt, Human
ggcacaugccuguaaucccagcacuuuggggg

SEQ ID NO: 454595 - RNA, 23 nt, Human
ggcacaugccuguaaucccagcu

SEQ ID NO: 454596 - RNA, 32 nt, Human
ggcacaugccuguaaucccagcuacaugggag

SEQ ID NO: 454597 - RNA, 32 nt, Human
ggcacaugccuguaaucccagcuacccgggga

SEQ ID NO: 454598 - RNA, 32 nt, Human
ggcacaugccuguaaucccagcuacgucagga

SEQ ID NO: 454599 - RNA, 28 nt, Human
ggcacaugccuguaaucccagcuacuca

SEQ ID NO: 454600 - RNA, 32 nt, Human
ggcacaugccuguaaucccagcuacucaggag

SEQ ID NO: 454601 - RNA, 32 nt, Human
ggcacaugccuguaaucccagcuacucagggg

SEQ ID NO: 454602 - RNA, 32 nt, Human
ggcacaugccuguaaucccagcuacucaugag

SEQ ID NO: 454603 - RNA, 32 nt, Human
ggcacaugccuguaaucccagcuacuccggaa

SEQ ID NO: 454604 - RNA, 32 nt, Human
ggcacaugccuguaaucccagcuacucggagg

SEQ ID NO: 454605 - RNA, 32 nt, Human
ggcacaugccuguaaucccagcuacucgggag

SEQ ID NO: 454606 - RNA, 32 nt, Human
ggcacaugccuguaaucccagcuacuuggcag

SEQ ID NO: 454607 - RNA, 32 nt, Human
ggcacaugccuguaaucccagcuacuugggag

SEQ ID NO: 454608 - RNA, 32 nt, Human
ggcacaugccuguaaucccagcugcucaggag

SEQ ID NO: 454609 - RNA, 32 nt, Human
ggcacaugccuguaaucccagcugcuggagag

SEQ ID NO: 454610 - RNA, 32 nt, Human
ggcacaugccuguaaucccgguauuugggagg

SEQ ID NO: 454611 - RNA, 32 nt, Human
ggcacaugccuguaauccgagugcuuugggag

SEQ ID NO: 454612 - RNA, 32 nt, Human
ggcacaugccuguaauccuagcacuuugggag

SEQ ID NO: 454613 - RNA, 32 nt, Human
ggcacaugccuguaauccuagcuacucgggag

SEQ ID NO: 454614 - RNA, 32 nt, Human
ggcacaugccuguaaucgcagcuacucaggag

SEQ ID NO: 454615 - RNA, 32 nt, Human
ggcacaugccuguaaucucagcgacuugggag

SEQ ID NO: 454616 - RNA, 32 nt, Human
ggcacaugccuguaaucucagcuacuagagag

SEQ ID NO: 454617 - RNA, 32 nt, Human
ggcacaugccuguaaucucagcuacucaggag

SEQ ID NO: 454618 - RNA, 32 nt, Human
ggcacaugccuguaaucucagcuacuugggag

SEQ ID NO: 454619 - RNA, 32 nt, Human
ggcacaugccuguaaugccagcuacucgggag

SEQ ID NO: 454620 - RNA, 32 nt, Human
ggcacaugccuguaauuccagcugcuugggag

SEQ ID NO: 454621 - RNA, 32 nt, Human
ggcacaugccuguagucccaccuacucgagaa

SEQ ID NO: 454622 - RNA, 32 nt, Human
ggcacaugccuguagucccaccuacuugggag

SEQ ID NO: 454623 - RNA, 32 nt, Human
ggcacaugccuguagucccaccuuugagcggc

SEQ ID NO: 454624 - RNA, 32 nt, Human
ggcacaugccuguagucccagauacuugggag

SEQ ID NO: 454625 - RNA, 32 nt, Human
ggcacaugccuguagucccagccacuagggcg

SEQ ID NO: 454626 - RNA, 32 nt, Human
ggcacaugccuguagucccagcuacgugggag

SEQ ID NO: 454627 - RNA, 32 nt, Human
ggcacaugccuguagucccagcuacucaagag

SEQ ID NO: 454628 - RNA, 32 nt, Human
ggcacaugccuguagucccagcuacuccagag

SEQ ID NO: 454629 - RNA, 32 nt, Human
ggcacaugccuguagucccagcuacucgggag

SEQ ID NO: 454630 - RNA, 32 nt, Human
ggcacaugccuguagucccagcuacuggggag

SEQ ID NO: 454631 - RNA, 32 nt, Human
ggcacaugccuguagucccagcuacuugagag

SEQ ID NO: 454632 - RNA, 32 nt, Human
ggcacaugccuguaguuccagcuacucaggag

SEQ ID NO: 454633 - RNA, 32 nt, Human
ggcacaugccuguauucccagcugcuugggag

SEQ ID NO: 454634 - RNA, 32 nt, Human
ggcacaugccugugaucccagcacuuugggau

SEQ ID NO: 454635 - RNA, 32 nt, Human
ggcacaugccugugaucccagcuacucaggaa

SEQ ID NO: 454636 - RNA, 32 nt, Human
ggcacaugccugugaucccagcuacucaggag

SEQ ID NO: 454637 - RNA, 32 nt, Human
ggcacaugccugugaucccagcuacugaggag

SEQ ID NO: 454638 - RNA, 32 nt, Human
ggcacaugccuguggucccagguacuugagag

SEQ ID NO: 454639 - RNA, 32 nt, Human
ggcacaugccugugguccuagccacuagaggc

SEQ ID NO: 454640 - RNA, 32 nt, Human
ggcacaugccuguggucgcagcugcucgggag

SEQ ID NO: 454641 - RNA, 32 nt, Human
ggcacaugccuguggucucagcuacuugggag

SEQ ID NO: 454642 - RNA, 32 nt, Human
ggcacaugccugugguuccagccacucaggag

SEQ ID NO: 454643 - RNA, 32 nt, Human
ggcacaugccuguugucccagcugcuugggag

SEQ ID NO: 454644 - RNA, 20 nt, Human
ggcacaugccuugaucccag

SEQ ID NO: 454645 - RNA, 32 nt, Human
ggcacaugcuuauaaucccagaaauuugggag

SEQ ID NO: 454646 - RNA, 32 nt, Human
ggcacaugcuuguaaucccagcuacucgggag

SEQ ID NO: 454647 - RNA, 21 nt, Human
ggcacauggaacuucacgggu

SEQ ID NO: 454648 - RNA, 32 nt, Human
ggcacauggaggguacaaggaggacucgccug

SEQ ID NO: 454649 - RNA, 18 nt, Human
ggcacauggauccauggc

SEQ ID NO: 454650 - RNA, 21 nt, Human
ggcacaugggacagccauggc

SEQ ID NO: 454651 - RNA, 32 nt, Human
ggcacauguaaucccagcuacuugggaggcug

SEQ ID NO: 454652 - RNA, 32 nt, Human
ggcacauguacugcaggugugcagugagcaca

SEQ ID NO: 454653 - RNA, 32 nt, Human
ggcacauguauacauacguaacaaaccugcac

SEQ ID NO: 454654 - RNA, 32 nt, Human
ggcacauguauacauauguaacaaaccugcac

SEQ ID NO: 454655 - RNA, 32 nt, Human
ggcacauguauacauauguaacaaaccugcau

SEQ ID NO: 454656 - RNA, 32 nt, Human
ggcacauguauacauauguaacaaaucugcac

SEQ ID NO: 454657 - RNA, 32 nt, Human
ggcacauguauacauauguaacuaaccugcac

SEQ ID NO: 454658 - RNA, 32 nt, Human
ggcacauguauaccuauguaacaaaccugcac

SEQ ID NO: 454659 - RNA, 32 nt, Human
ggcacauguauaccuguguaacaaaccugcac

SEQ ID NO: 454660 - RNA, 32 nt, Human
ggcacauguauacguauguaacuaaccugcac

SEQ ID NO: 454661 - RNA, 32 nt, Human
ggcacauguauucauauguaacaaaccugcac

SEQ ID NO: 454662 - RNA, 32 nt, Human
ggcacaugucuguaaucccagcuacucaggag

SEQ ID NO: 454663 - RNA, 32 nt, Human
ggcacaugucuguaaucccagcuacucgggag

SEQ ID NO: 454664 - RNA, 32 nt, Human
ggcacaugucuguaauccuagcacuuugggag

SEQ ID NO: 454665 - RNA, 32 nt, Human
ggcacauguggagagccagggagaagaagaga

SEQ ID NO: 454666 - RNA, 32 nt, Human
ggcacauguggagagccagggagaggaagaga

SEQ ID NO: 454667 - RNA, 32 nt, Human
ggcacauguguaccuauguaacaaaccugcac

SEQ ID NO: 454668 - RNA, 25 nt, Human
ggcacauguguggggaagccgguca

SEQ ID NO: 454669 - RNA, 32 nt, Human
ggcacauguuuaccuauguaacaaaccugcac

SEQ ID NO: 454670 - RNA, 32 nt, Human
ggcacauguuuaccuauguaacaaaccugcau

SEQ ID NO: 454671 - RNA, 32 nt, Human
ggcacauuacuuuugcaccaaccgaccuaaua

SEQ ID NO: 454672 - RNA, 32 nt, Human
ggcacauucacuucucccacucuuggcaugua

SEQ ID NO: 454673 - RNA, 32 nt, Human
ggcacauuccuguaaucccagcuacucgggag

SEQ ID NO: 454674 - RNA, 17 nt, Human
ggcacauuuaauaccca

SEQ ID NO: 454675 - RNA, 25 nt, Human
ggcaccaacaacauggacggccaca

SEQ ID NO: 454676 - RNA, 21 nt, Human
ggcaccaaggagcugacuaca

SEQ ID NO: 454677 - RNA, 21 nt, Human
ggcaccaaggggccaaccgcc

SEQ ID NO: 454678 - RNA, 23 nt, Human
ggcaccaaguccaccuggccuca

SEQ ID NO: 454679 - RNA, 19 nt, Human
ggcaccacagaugcucucc

SEQ ID NO: 454680 - RNA, 22 nt, Human
ggcaccacagccuccaaaaaug

SEQ ID NO: 454681 - RNA, 32 nt, Human
ggcaccacagugagcauuguguucuuggcaug

SEQ ID NO: 454682 - RNA, 20 nt, Human
ggcaccaccacacccggcua

SEQ ID NO: 454683 - RNA, 20 nt, Human
ggcaccaccacaccuggcua

SEQ ID NO: 454684 - RNA, 32 nt, Human
ggcaccaccaccucacagcugugugaccggga

SEQ ID NO: 454685 - RNA, 32 nt, Human
ggcaccacccaccccucaccuugcaggcugcc

SEQ ID NO: 454686 - RNA, 23 nt, Human
ggcaccacccccucauccaggga

SEQ ID NO: 454687 - RNA, 32 nt, Human
ggcaccacccuggcaguuccagccuguagggg

SEQ ID NO: 454688 - RNA, 32 nt, Human
ggcaccacccuugcccugaagccuggggcacu

SEQ ID NO: 454689 - RNA, 32 nt, Human
ggcaccaccugacagaauucucaagcaccuga

SEQ ID NO: 454690 - RNA, 32 nt, Human
ggcaccacguaagaccuccugcccuuagcucu

SEQ ID NO: 454691 - RNA, 32 nt, Human
ggcaccacuacacuccagcccgggcgacagag

SEQ ID NO: 454692 - RNA, 32 nt, Human
ggcaccacuacauuucagccugggcgaaagua

SEQ ID NO: 454693 - RNA, 32 nt, Human
ggcaccacugcacuccagccuaggugacagag

SEQ ID NO: 454694 - RNA, 23 nt, Human
ggcaccacugcacuccagccugg

SEQ ID NO: 454695 - RNA, 32 nt, Human
ggcaccacugcacuccagccuggacgacagag

SEQ ID NO: 454696 - RNA, 32 nt, Human
ggcaccacugcacuccagccugggagacacag

SEQ ID NO: 454697 - RNA, 32 nt, Human
ggcaccacugcacuccagccugggagacagag

SEQ ID NO: 454698 - RNA, 32 nt, Human
ggcaccacugcacuccagccugggcaacagag

SEQ ID NO: 454699 - RNA, 32 nt, Human
ggcaccacugcacuccagccugggugacagag

SEQ ID NO: 454700 - RNA, 32 nt, Human
ggcaccacugcacuccagccugggugagagag

SEQ ID NO: 454701 - RNA, 32 nt, Human
ggcaccacugcacuccagcuugggugacagag

SEQ ID NO: 454702 - RNA, 32 nt, Human
ggcaccacugcacuccauccugggugacagag

SEQ ID NO: 454703 - RNA, 32 nt, Human
ggcaccacugcacuccggccuaggcaacgaga

SEQ ID NO: 454704 - RNA, 32 nt, Human
ggcaccacugcacucuagccugggcaagagaa

SEQ ID NO: 454705 - RNA, 32 nt, Human
ggcaccacugcacuucagccugggugacagag

SEQ ID NO: 454706 - RNA, 32 nt, Human
ggcaccacugcauuccagccugggugacagag

SEQ ID NO: 454707 - RNA, 32 nt, Human
ggcaccacugcccuccagccuggaugacagag

SEQ ID NO: 454708 - RNA, 32 nt, Human
ggcaccacuggacuccagccugggcgacagag

SEQ ID NO: 454709 - RNA, 32 nt, Human
ggcaccacuguacuccagccugggugacagag

SEQ ID NO: 454710 - RNA, 32 nt, Human
ggcaccacuuauugcacuccagcccgggcgac

SEQ ID NO: 454711 - RNA, 32 nt, Human
ggcaccagagcaaaaccaacagagccacuggg

SEQ ID NO: 454712 - RNA, 32 nt, Human
ggcaccagagugaacagggcaggcagguagua

SEQ ID NO: 454713 - RNA, 24 nt, Human
ggcaccagaugaugucccaccaca

SEQ ID NO: 454714 - RNA, 22 nt, Human
ggcaccagcacaccuaaucaca

SEQ ID NO: 454715 - RNA, 24 nt, Human
ggcaccagcacuucauugacuaca

SEQ ID NO: 454716 - RNA, 21 nt, Human
ggcaccagcagggaugccaca

SEQ ID NO: 454717 - RNA, 21 nt, Human
ggcaccagccccagccuccca

SEQ ID NO: 454718 - RNA, 20 nt, Human
ggcaccagccccccaggguc

SEQ ID NO: 454719 - RNA, 32 nt, Human
ggcaccagccccugcuaaauucugagcauuga

SEQ ID NO: 454720 - RNA, 22 nt, Human
ggcaccagcccucccggccccg

SEQ ID NO: 454721 - RNA, 32 nt, Human
ggcaccagccucccacugcacagcuuccuucc

SEQ ID NO: 454722 - RNA, 25 nt, Human
ggcaccagcgaaucagacuuccaca

SEQ ID NO: 454723 - RNA, 24 nt, Human
ggcaccagcuaccucagggacaug

SEQ ID NO: 454724 - RNA, 22 nt, Human
ggcaccagcucagcuggcgcau

SEQ ID NO: 454725 - RNA, 32 nt, Human
ggcaccagcucaggacugcaucugccugccau

SEQ ID NO: 454726 - RNA, 19 nt, Human
ggcaccagcucccucagcc

SEQ ID NO: 454727 - RNA, 32 nt, Human
ggcaccagcuccuuggaccccaccucccaugc

SEQ ID NO: 454728 - RNA, 32 nt, Human
ggcaccagcuuccuccuggaaccagggucucu

SEQ ID NO: 454729 - RNA, 19 nt, Human
ggcaccaggacugcucucc

SEQ ID NO: 454730 - RNA, 24 nt, Human
ggcaccaggcaucugauggugcca

SEQ ID NO: 454731 - RNA, 19 nt, Human
ggcaccaggccugguccag

SEQ ID NO: 454732 - RNA, 25 nt, Human
ggcaccaggcugggaugagcugugu

SEQ ID NO: 454733 - RNA, 32 nt, Human
ggcaccaggcugggaugagcugugugcuugcg

SEQ ID NO: 454734 - RNA, 32 nt, Human
ggcaccagggcugcucccgagauucucagauc

SEQ ID NO: 454735 - RNA, 32 nt, Human
ggcaccaggucacuuuaugcugggugauauag

SEQ ID NO: 454736 - RNA, 32 nt, Human
ggcaccaggucaggcugggugcgccaugguug

SEQ ID NO: 454737 - RNA, 18 nt, Human
ggcaccaguccccuugcg

SEQ ID NO: 454738 - RNA, 32 nt, Human
ggcaccagugaaaucaggggaggcagaaaauc

SEQ ID NO: 454739 - RNA, 32 nt, Human
ggcaccagugacaggcacaggucccaggacca

SEQ ID NO: 454740 - RNA, 18 nt, Human
ggcaccagugcccugcca

SEQ ID NO: 454741 - RNA, 32 nt, Human
ggcaccagugggcuuggcacuccaccuugggc

SEQ ID NO: 454742 - RNA, 20 nt, Human
ggcaccaucccuucuggcca

SEQ ID NO: 454743 - RNA, 20 nt, Human
ggcaccaucugccaaugcca

SEQ ID NO: 454744 - RNA, 22 nt, Human
ggcaccaugacuccaagaugaa

SEQ ID NO: 454745 - RNA, 32 nt, Human
ggcaccaugccuggcuaauuuuuguauuuuua

SEQ ID NO: 454746 - RNA, 32 nt, Human
ggcaccauggacugagcaccucccagguucca

SEQ ID NO: 454747 - RNA, 19 nt, Human
ggcaccauggugacugcca

SEQ ID NO: 454748 - RNA, 32 nt, Human
ggcaccauuacacuccagccugggcaacagug

SEQ ID NO: 454749 - RNA, 18 nt, Human
ggcaccauuccugcagcc

SEQ ID NO: 454750 - RNA, 32 nt, Human
ggcaccauuccugcagcccuccagacuuccug

SEQ ID NO: 454751 - RNA, 19 nt, Human
ggcaccauucuagguacca

SEQ ID NO: 454752 - RNA, 22 nt, Human
ggcaccauucucaucuuucuca

SEQ ID NO: 454753 - RNA, 32 nt, Human
ggcaccauugcacccuagccugggcaacagag

SEQ ID NO: 454754 - RNA, 32 nt, Human
ggcaccauugcacuccagccugggugacaaga

SEQ ID NO: 454755 - RNA, 18 nt, Human
ggcaccauuggaacacca

SEQ ID NO: 454756 - RNA, 32 nt, Human
ggcacccaagucuuccuuccagcauuccugcu

SEQ ID NO: 454757 - RNA, 32 nt, Human
ggcacccacagcaacggagucucaacaggcag

SEQ ID NO: 454758 - RNA, 32 nt, Human
ggcacccacaggcugcugggaggagagcauaa

SEQ ID NO: 454759 - RNA, 32 nt, Human
ggcacccacaggcuggcugagaaugaggcaua

SEQ ID NO: 454760 - RNA, 32 nt, Human
ggcacccaccucuccgcuuccuaguuuccuag

SEQ ID NO: 454761 - RNA, 32 nt, Human
ggcacccacugacuccagccucauggaaccac

SEQ ID NO: 454762 - RNA, 24 nt, Human
ggcacccagagcgcugcgaccaca

SEQ ID NO: 454763 - RNA, 32 nt, Human
ggcacccagaucuuccagccauauguggaguc

SEQ ID NO: 454764 - RNA, 32 nt, Human
ggcacccaggcaggugcagggaagugcagagc

SEQ ID NO: 454765 - RNA, 32 nt, Human
ggcacccaggccugcccugccugcuggcuacu

SEQ ID NO: 454766 - RNA, 32 nt, Human
ggcacccagggcgaauggggcccagggcagac

SEQ ID NO: 454767 - RNA, 32 nt, Human
ggcacccaggugaguggcauucgggugagugg

SEQ ID NO: 454768 - RNA, 22 nt, Human
ggcacccaguguuguggccugg

SEQ ID NO: 454769 - RNA, 32 nt, Human
ggcacccauacagucaacacagugagccucag

SEQ ID NO: 454770 - RNA, 32 nt, Human
ggcacccauacccccaccuccagccuguugac

SEQ ID NO: 454771 - RNA, 32 nt, Human
ggcaccccaggccccugggaggugaguuagac

SEQ ID NO: 454772 - RNA, 32 nt, Human
ggcaccccaguagcuggccaccaccugcaguu

SEQ ID NO: 454773 - RNA, 26 nt, Human
ggcacccccagaaugaccuggccgca

SEQ ID NO: 454774 - RNA, 32 nt, Human
ggcacccccagaaugaccuggccgcagugagg

SEQ ID NO: 454775 - RNA, 21 nt, Human
ggcacccccagccuggguccc

SEQ ID NO: 454776 - RNA, 20 nt, Human
ggcaccccccugcugcugcc

SEQ ID NO: 454777 - RNA, 32 nt, Human
ggcacccccggaauugcucugccuuguguccc

SEQ ID NO: 454778 - RNA, 20 nt, Human
ggcaccccguguuccuuggc

SEQ ID NO: 454779 - RNA, 32 nt, Human
ggcaccccuccugcagcuccauggcugcccca

SEQ ID NO: 454780 - RNA, 19 nt, Human
ggcaccccuggucuugaug

SEQ ID NO: 454781 - RNA, 18 nt, Human
ggcaccccuucugccccc

SEQ ID NO: 454782 - RNA, 32 nt, Human
ggcacccgccuguaaucccagcuacucgggag

SEQ ID NO: 454783 - RNA, 32 nt, Human
ggcacccggcacacacccucccugccaccagg

SEQ ID NO: 454784 - RNA, 24 nt, Human
ggcacccggcgggcgcccgggcgc

SEQ ID NO: 454785 - RNA, 32 nt, Human
ggcacccgggagaaggaggaggcaaagaaaag

SEQ ID NO: 454786 - RNA, 32 nt, Human
ggcacccgggagaagggagaggguccuguuga

SEQ ID NO: 454787 - RNA, 32 nt, Human
ggcacccucacagacacgcggggcuggccccc

SEQ ID NO: 454788 - RNA, 32 nt, Human
ggcacccucagaccacacaguagccaaguucu

SEQ ID NO: 454789 - RNA, 32 nt, Human
ggcacccucagccgggcucuuugcagaagcag

SEQ ID NO: 454790 - RNA, 22 nt, Human
ggcacccucccacccggcugca

SEQ ID NO: 454791 - RNA, 32 nt, Human
ggcacccucgcaggguuugaauagcugcccuu

SEQ ID NO: 454792 - RNA, 32 nt, Human
ggcacccugaagccuccaugcccaggccaaaa

SEQ ID NO: 454793 - RNA, 32 nt, Human
ggcacccugagcuccaguaccaccacucacaa

SEQ ID NO: 454794 - RNA, 19 nt, Human
ggcacccugccgcccgacc

SEQ ID NO: 454795 - RNA, 32 nt, Human
ggcacccuggaucccccagagagcagauuggu

SEQ ID NO: 454796 - RNA, 20 nt, Human
ggcacccuggccgccuggac

SEQ ID NO: 454797 - RNA, 32 nt, Human
ggcacccuggguggcaggcaagccuugaaauc

SEQ ID NO: 454798 - RNA, 32 nt, Human
ggcacccugguuggaaagaggggugaggauuc

SEQ ID NO: 454799 - RNA, 32 nt, Human
ggcacccugucuucacacauaucucaucgugg

SEQ ID NO: 454800 - RNA, 32 nt, Human
ggcacccuuccucugugccccagugggcauca

SEQ ID NO: 454801 - RNA, 32 nt, Human
ggcaccgaagucagaugaguaucccuguaggu

SEQ ID NO: 454802 - RNA, 20 nt, Human
ggcaccgcaggaccggccac

SEQ ID NO: 454803 - RNA, 19 nt, Human
ggcaccgccgcuccgagua

SEQ ID NO: 454804 - RNA, 32 nt, Human
ggcaccgccugauccuuuugugcuucauaaau

SEQ ID NO: 454805 - RNA, 32 nt, Human
ggcaccgcgagcugggagacggcggcagccca

SEQ ID NO: 454806 - RNA, 32 nt, Human
ggcaccgcgccuggccaggccggcugcaguuu

SEQ ID NO: 454807 - RNA, 21 nt, Human
ggcaccgcgcugccggccgca

SEQ ID NO: 454808 - RNA, 32 nt, Human
ggcaccgcugcacuccaaccugggcaacagag

SEQ ID NO: 454809 - RNA, 23 nt, Human
ggcaccgcuggugccugcucuuu

SEQ ID NO: 454810 - RNA, 32 nt, Human
ggcaccggcggccccucugccucgcggaaaag

SEQ ID NO: 454811 - RNA, 32 nt, Human
ggcaccgggacccccucaccauccagugggcc

SEQ ID NO: 454812 - RNA, 32 nt, Human
ggcaccgggaggcgguggcggcggcggcggcg

SEQ ID NO: 454813 - RNA, 32 nt, Human
ggcaccgggccgcggcgccaccauggcggugc

SEQ ID NO: 454814 - RNA, 32 nt, Human
ggcaccggguuccgacagguccauaccagccc

SEQ ID NO: 454815 - RNA, 32 nt, Human
ggcaccguggugguggcucugccccuugcugc

SEQ ID NO: 454816 - RNA, 32 nt, Human
ggcaccuacucaguaucuuuuccucuuuauca

SEQ ID NO: 454817 - RNA, 32 nt, Human
ggcaccuacuccuuagagcuugcugauaccag

SEQ ID NO: 454818 - RNA, 32 nt, Human
ggcaccuaggauuggaaaacauggacagauca

SEQ ID NO: 454819 - RNA, 32 nt, Human
ggcaccuagggguguugcuaaauuauuaauag

SEQ ID NO: 454820 - RNA, 32 nt, Human
ggcaccuauaaucccagcuacaugggaggcug

SEQ ID NO: 454821 - RNA, 17 nt, Human
ggcaccuauaccuguac

SEQ ID NO: 454822 - RNA, 32 nt, Human
ggcaccucaaagcugggagccaggcccuggag

SEQ ID NO: 454823 - RNA, 31 nt, Human
ggcaccucaauaaacucuguugcaaaauugg

SEQ ID NO: 454824 - RNA, 32 nt, Human
ggcaccucaaucuacaccagagcccagggagu

SEQ ID NO: 454825 - RNA, 22 nt, Human
ggcaccucaccucacaccugcu

SEQ ID NO: 454826 - RNA, 20 nt, Human
ggcaccucacucaugcaagg

SEQ ID NO: 454827 - RNA, 32 nt, Human
ggcaccucagccgcccccaagcccagagcaca

SEQ ID NO: 454828 - RNA, 17 nt, Human
ggcaccucagucuggau

SEQ ID NO: 454829 - RNA, 19 nt, Human
ggcaccuccaaccaccaca

SEQ ID NO: 454830 - RNA, 32 nt, Human
ggcaccuccaccauugcccccggccuaagaag

SEQ ID NO: 454831 - RNA, 32 nt, Human
ggcaccuccacugacagaggcggccccuccca

SEQ ID NO: 454832 - RNA, 32 nt, Human
ggcaccuccagccaggcuccaggggauguucc

SEQ ID NO: 454833 - RNA, 32 nt, Human
ggcaccuccccggccucucucuucccagcugc

SEQ ID NO: 454834 - RNA, 32 nt, Human
ggcaccuccuacucccaucugaacaagagggg

SEQ ID NO: 454835 - RNA, 18 nt, Human
ggcaccuccuccauggcu

SEQ ID NO: 454836 - RNA, 32 nt, Human
ggcaccucuaaucccagcuacuugggaggcug

SEQ ID NO: 454837 - RNA, 19 nt, Human
ggcaccucugacccuggac

SEQ ID NO: 454838 - RNA, 32 nt, Human
ggcaccucuggggagcaaagagguggauccug

SEQ ID NO: 454839 - RNA, 32 nt, Human
ggcaccucuguaggcccugccugugccugucc

SEQ ID NO: 454840 - RNA, 32 nt, Human
ggcaccucuuccagggaugucucccucuaaga

SEQ ID NO: 454841 - RNA, 18 nt, Human
ggcaccucuuccuugaug

SEQ ID NO: 454842 - RNA, 32 nt, Human
ggcaccucuuucuccuucuccaaccacuauua

SEQ ID NO: 454843 - RNA, 32 nt, Human
ggcaccucuuucuuccucugucauauggcucc

SEQ ID NO: 454844 - RNA, 32 nt, Human
ggcaccucuuucuucugaccucagacggcucu

SEQ ID NO: 454845 - RNA, 32 nt, Human
ggcaccugaacacggggcucucagaagacauc

SEQ ID NO: 454846 - RNA, 32 nt, Human
ggcaccugaccagccacaggagagggcaguuc

SEQ ID NO: 454847 - RNA, 21 nt, Human
ggcaccugagcagccauuuca

SEQ ID NO: 454848 - RNA, 32 nt, Human
ggcaccugaggagagugagcagccuggaccac

SEQ ID NO: 454849 - RNA, 32 nt, Human
ggcaccugcaaucccagcuacaugggaggcug

SEQ ID NO: 454850 - RNA, 32 nt, Human
ggcaccugcaaucccagcuacuugggaggcug

SEQ ID NO: 454851 - RNA, 30 nt, Human
ggcaccugcaccuggccacgccgcgccgcc

SEQ ID NO: 454852 - RNA, 32 nt, Human
ggcaccugccacugugcagagccuggggcugc

SEQ ID NO: 454853 - RNA, 19 nt, Human
ggcaccugccagucuccac

SEQ ID NO: 454854 - RNA, 32 nt, Human
ggcaccugccccucagcuccgcuggucugucu

SEQ ID NO: 454855 - RNA, 32 nt, Human
ggcaccugccuauaaucccagcuauuugggag

SEQ ID NO: 454856 - RNA, 31 nt, Human
ggcaccugccucucugagucuugggucucag

SEQ ID NO: 454857 - RNA, 32 nt, Human
ggcaccugccuggcacaagugcagcaggccgg

SEQ ID NO: 454858 - RNA, 32 nt, Human
ggcaccugccuguaaucccagcuacuugggag

SEQ ID NO: 454859 - RNA, 32 nt, Human
ggcaccugccuguaaucucagcuacucaggag

SEQ ID NO: 454860 - RNA, 32 nt, Human
ggcaccugcggucccagcuacuugggaggcug

SEQ ID NO: 454861 - RNA, 32 nt, Human
ggcaccugcguccccucucccgggcuccccug

SEQ ID NO: 454862 - RNA, 32 nt, Human
ggcaccuggaacccguggcaagcgccgagccg

SEQ ID NO: 454863 - RNA, 32 nt, Human
ggcaccuggaacccuggacuucacugggaggg

SEQ ID NO: 454864 - RNA, 32 nt, Human
ggcaccuggaccccaucacaauacuccuucuu

SEQ ID NO: 454865 - RNA, 32 nt, Human
ggcaccuggagucccagcuacuccggaggcug

SEQ ID NO: 454866 - RNA, 32 nt, Human
ggcaccuggauggugacccugggccguccucu

SEQ ID NO: 454867 - RNA, 22 nt, Human
ggcaccuggcaccuggccugca

SEQ ID NO: 454868 - RNA, 32 nt, Human
ggcaccuggcaggaggcgggugugugaauagc

SEQ ID NO: 454869 - RNA, 16 nt, Human
ggcaccuggccugggc

SEQ ID NO: 454870 - RNA, 17 nt, Human
ggcaccuggcugggguc

SEQ ID NO: 454871 - RNA, 32 nt, Human
ggcaccugguugaagggacugggagcccgcac

SEQ ID NO: 454872 - RNA, 32 nt, Human
ggcaccuguaaccccagcuacucgggaggcug

SEQ ID NO: 454873 - RNA, 16 nt, Human
ggcaccuguaauccca

SEQ ID NO: 454874 - RNA, 19 nt, Human
ggcaccuguaaucccagcu

SEQ ID NO: 454875 - RNA, 32 nt, Human
ggcaccuguaaucccagcuaccugagaggcug

SEQ ID NO: 454876 - RNA, 32 nt, Human
ggcaccuguaaucccagcuacuagggagacug

SEQ ID NO: 454877 - RNA, 32 nt, Human
ggcaccuguaaucccagcuacucgagaggcug

SEQ ID NO: 454878 - RNA, 32 nt, Human
ggcaccuguaaucccagcuacucgggaggccg

SEQ ID NO: 454879 - RNA, 32 nt, Human
ggcaccuguaaucccagcuacucgggaggcug

SEQ ID NO: 454880 - RNA, 32 nt, Human
ggcaccuguaaucccagcuacucuggaggcug

SEQ ID NO: 454881 - RNA, 32 nt, Human
ggcaccuguaaucccagcuacuuggaaggcug

SEQ ID NO: 454882 - RNA, 32 nt, Human
ggcaccuguaaucccagcuacuugggagacug

SEQ ID NO: 454883 - RNA, 32 nt, Human
ggcaccuguaaucccagcuacuugggaggcua

SEQ ID NO: 454884 - RNA, 32 nt, Human
ggcaccuguaaucccagcuacuugggaggcug

SEQ ID NO: 454885 - RNA, 24 nt, Human
ggcaccuguaaucccagcugcucg

SEQ ID NO: 454886 - RNA, 16 nt, Human
ggcaccuguaguccca

SEQ ID NO: 454887 - RNA, 32 nt, Human
ggcaccuguagucccagccaccugggaggcug

SEQ ID NO: 454888 - RNA, 32 nt, Human
ggcaccuguagucccagcuacacgggaggcug

SEQ ID NO: 454889 - RNA, 32 nt, Human
ggcaccuguagucccagcuacacgggaggcuu

SEQ ID NO: 454890 - RNA, 32 nt, Human
ggcaccuguagucccagcuacccgggaggcug

SEQ ID NO: 454891 - RNA, 32 nt, Human
ggcaccuguagucccagcuacuagggaggcug

SEQ ID NO: 454892 - RNA, 32 nt, Human
ggcaccuguagucccagcuacucaggaggcug

SEQ ID NO: 454893 - RNA, 32 nt, Human
ggcaccuguagucccagcuacucgagaggcug

SEQ ID NO: 454894 - RNA, 32 nt, Human
ggcaccuguagucccagcuacucgggaggcug

SEQ ID NO: 454895 - RNA, 32 nt, Human
ggcaccuguagucccagcuacucuggaggcug

SEQ ID NO: 454896 - RNA, 32 nt, Human
ggcaccuguagucccagcuacuugggaggcug

SEQ ID NO: 454897 - RNA, 32 nt, Human
ggcaccuguagucucaacuauuugggaggcug

SEQ ID NO: 454898 - RNA, 19 nt, Human
ggcaccuguaguuccagcu

SEQ ID NO: 454899 - RNA, 32 nt, Human
ggcaccuguaguuccagcuacucggagacuga

SEQ ID NO: 454900 - RNA, 32 nt, Human
ggcaccuguauacauauguaacuaaccugcac

SEQ ID NO: 454901 - RNA, 17 nt, Human
ggcaccuguaucuggau

SEQ ID NO: 454902 - RNA, 32 nt, Human
ggcaccuguauucccagcuacuuggaaggcug

SEQ ID NO: 454903 - RNA, 32 nt, Human
ggcaccuguauucccagcuacuugggaggcug

SEQ ID NO: 454904 - RNA, 32 nt, Human
ggcaccugucaucccagcuacuugggaggcug

SEQ ID NO: 454905 - RNA, 16 nt, Human
ggcaccugugauccca

SEQ ID NO: 454906 - RNA, 32 nt, Human
ggcaccugugaucccagcuaccugggaggcug

SEQ ID NO: 454907 - RNA, 32 nt, Human
ggcaccugugaucccagcuacuuggaggcuga

SEQ ID NO: 454908 - RNA, 32 nt, Human
ggcaccugugcaccccucccaccucugccuca

SEQ ID NO: 454909 - RNA, 32 nt, Human
ggcaccugugguuuggugaguccuccagguaa

SEQ ID NO: 454910 - RNA, 23 nt, Human
ggcaccuucaaggaacccagggu

SEQ ID NO: 454911 - RNA, 17 nt, Human
ggcaccuucaccugggc

SEQ ID NO: 454912 - RNA, 32 nt, Human
ggcaccuucagccucagaguggaaucuuuuaa

SEQ ID NO: 454913 - RNA, 32 nt, Human
ggcaccuucccacuuucuagcucuggagaggu

SEQ ID NO: 454914 - RNA, 32 nt, Human
ggcaccuugcagccccuuccugcuggggcucc

SEQ ID NO: 454915 - RNA, 32 nt, Human
ggcaccuugcugggucuguggcauuuuccaag

SEQ ID NO: 454916 - RNA, 21 nt, Human
ggcaccuuucaccacuugguc

SEQ ID NO: 454917 - RNA, 32 nt, Human
ggcacgaagaaugccaagaguuuaccuggcca

SEQ ID NO: 454918 - RNA, 32 nt, Human
ggcacgaaggccaggccagggccugggccucu

SEQ ID NO: 454919 - RNA, 32 nt, Human
ggcacgaagucuccaagaagccacuuugccuc

SEQ ID NO: 454920 - RNA, 32 nt, Human
ggcacgaccagaaaggaacucccuuugcacgg

SEQ ID NO: 454921 - RNA, 32 nt, Human
ggcacgacuuuggcugggauggauaccauaua

SEQ ID NO: 454922 - RNA, 32 nt, Human
ggcacgagcgagggagccggaaagaugguggu

SEQ ID NO: 454923 - RNA, 32 nt, Human
ggcacgagcgaguuccugucucucugccaacg

SEQ ID NO: 454924 - RNA, 32 nt, Human
ggcacgagcucugugagacugagguggcgguc

SEQ ID NO: 454925 - RNA, 32 nt, Human
ggcacgaggaaagacugaccgacugacucuga

SEQ ID NO: 454926 - RNA, 32 nt, Human
ggcacgaggaagcgguugggaaagugucgguu

SEQ ID NO: 454927 - RNA, 32 nt, Human
ggcacgaggaaggagucggggucuuccccagu

SEQ ID NO: 454928 - RNA, 32 nt, Human
ggcacgaggagaauggccagcaggaaggcggg

SEQ ID NO: 454929 - RNA, 32 nt, Human
ggcacgaggaggagaagagcaaagaaaagcag

SEQ ID NO: 454930 - RNA, 32 nt, Human
ggcacgaggagugggccacagcaggaucucaa

SEQ ID NO: 454931 - RNA, 24 nt, Human
ggcacgaggcacgugguuaugcug

SEQ ID NO: 454932 - RNA, 32 nt, Human
ggcacgaggcagagguugugguaggaaccaca

SEQ ID NO: 454933 - RNA, 32 nt, Human
ggcacgaggcagaguggcgcagcaaguggccg

SEQ ID NO: 454934 - RNA, 32 nt, Human
ggcacgaggcagcaguggggcggggauggagg

SEQ ID NO: 454935 - RNA, 23 nt, Human
ggcacgaggcagcgcuggccgca

SEQ ID NO: 454936 - RNA, 32 nt, Human
ggcacgaggcaggccaggugugugcguccguc

SEQ ID NO: 454937 - RNA, 32 nt, Human
ggcacgaggcagggccggugggauccccucgg

SEQ ID NO: 454938 - RNA, 32 nt, Human
ggcacgaggcagugggcaggccaggcagggcg

SEQ ID NO: 454939 - RNA, 32 nt, Human
ggcacgaggcccgggccaggggcgggcgccgc

SEQ ID NO: 454940 - RNA, 32 nt, Human
ggcacgaggcccugccugccccgggcggccag

SEQ ID NO: 454941 - RNA, 32 nt, Human
ggcacgaggccgggaugaaaggagggaacgca

SEQ ID NO: 454942 - RNA, 32 nt, Human
ggcacgaggccgggcgcgagcccggauccagg

SEQ ID NO: 454943 - RNA, 18 nt, Human
ggcacgaggccugagcuc

SEQ ID NO: 454944 - RNA, 32 nt, Human
ggcacgaggccugcccacaacaccccagcuug

SEQ ID NO: 454945 - RNA, 20 nt, Human
ggcacgaggccugggcggcu

SEQ ID NO: 454946 - RNA, 32 nt, Human
ggcacgaggccugggcggcuccgcuagcuguu

SEQ ID NO: 454947 - RNA, 17 nt, Human
ggcacgaggccuggguc

SEQ ID NO: 454948 - RNA, 32 nt, Human
ggcacgaggcgaaacccagcgcuguugccaaa

SEQ ID NO: 454949 - RNA, 32 nt, Human
ggcacgaggcgccgagucugggcgcggggacg

SEQ ID NO: 454950 - RNA, 32 nt, Human
ggcacgaggcggaggaggcgaggagcgccggg

SEQ ID NO: 454951 - RNA, 32 nt, Human
ggcacgaggcggagugcaagugagcuucucgg

SEQ ID NO: 454952 - RNA, 32 nt, Human
ggcacgaggcggccucccugccccuucacggc

SEQ ID NO: 454953 - RNA, 21 nt, Human
ggcacgaggcggcgccggaag

SEQ ID NO: 454954 - RNA, 32 nt, Human
ggcacgaggcgggcggcugcugaggugagggc

SEQ ID NO: 454955 - RNA, 20 nt, Human
ggcacgaggcgggggcggcc

SEQ ID NO: 454956 - RNA, 32 nt, Human
ggcacgaggcucaguggugaaggcugugcgga

SEQ ID NO: 454957 - RNA, 32 nt, Human
ggcacgaggcugagggcagagcuguuugccug

SEQ ID NO: 454958 - RNA, 32 nt, Human
ggcacgaggcugcccuaguggccuaugucccu

SEQ ID NO: 454959 - RNA, 28 nt, Human
ggcacgaggcugccucagucuccugagu

SEQ ID NO: 454960 - RNA, 21 nt, Human
ggcacgaggcugcggcggccu

SEQ ID NO: 454961 - RNA, 32 nt, Human
ggcacgaggcuucccagaggcgcgagucgcuu

SEQ ID NO: 454962 - RNA, 32 nt, Human
ggcacgaggcuucuguagcucgcguugaagcc

SEQ ID NO: 454963 - RNA, 32 nt, Human
ggcacgagggaaagggagaaaaagauucuaca

SEQ ID NO: 454964 - RNA, 32 nt, Human
ggcacgagggaaaugcuguuugcucgaagacg

SEQ ID NO: 454965 - RNA, 32 nt, Human
ggcacgagggacgacuccacgcucgcuugccc

SEQ ID NO: 454966 - RNA, 32 nt, Human
ggcacgagggagacacgggagcgcuuggcacg

SEQ ID NO: 454967 - RNA, 32 nt, Human
ggcacgagggagagaucguccaggaggcggug

SEQ ID NO: 454968 - RNA, 32 nt, Human
ggcacgagggagagcgcagcgcgcagcccggu

SEQ ID NO: 454969 - RNA, 32 nt, Human
ggcacgagggagagcuggaggggcgugcgcgc

SEQ ID NO: 454970 - RNA, 32 nt, Human
ggcacgagggagaggucaggggucagcaggag

SEQ ID NO: 454971 - RNA, 32 nt, Human
ggcacgagggagcaaugggaaagacuggagua

SEQ ID NO: 454972 - RNA, 32 nt, Human
ggcacgagggagcggugcggaggcucugcucg

SEQ ID NO: 454973 - RNA, 32 nt, Human
ggcacgagggagggaggaggugagagugauua

SEQ ID NO: 454974 - RNA, 32 nt, Human
ggcacgagggagugccucaaggaguaugccca

SEQ ID NO: 454975 - RNA, 32 nt, Human
ggcacgagggccaggcugaggggaggguagag

SEQ ID NO: 454976 - RNA, 32 nt, Human
ggcacgagggccccaggagaggcagagaguga

SEQ ID NO: 454977 - RNA, 32 nt, Human
ggcacgagggcgagcugagguggaggcaggcu

SEQ ID NO: 454978 - RNA, 32 nt, Human
ggcacgagggcgcgccgagauggccgcgcucc

SEQ ID NO: 454979 - RNA, 32 nt, Human
ggcacgagggcggggaagauggcggaugacaa

SEQ ID NO: 454980 - RNA, 32 nt, Human
ggcacgagggcugagagggcccgcggguaggc

SEQ ID NO: 454981 - RNA, 32 nt, Human
ggcacgagggcugagcgccggaggagcguagg

SEQ ID NO: 454982 - RNA, 32 nt, Human
ggcacgagggcuggaguccacaggcuuuuacc

SEQ ID NO: 454983 - RNA, 32 nt, Human
ggcacgagggcuguggggaggauggaggcagg

SEQ ID NO: 454984 - RNA, 32 nt, Human
ggcacgaggggaggaggaggaggaggagagga

SEQ ID NO: 454985 - RNA, 32 nt, Human
ggcacgaggggaggccggggcggggcgggcgc

SEQ ID NO: 454986 - RNA, 32 nt, Human
ggcacgaggggagggggcaguugggcggggau

SEQ ID NO: 454987 - RNA, 32 nt, Human
ggcacgaggggauggcagaggaggugaggagg

SEQ ID NO: 454988 - RNA, 32 nt, Human
ggcacgaggggcugcuauagagccgggugaga

SEQ ID NO: 454989 - RNA, 32 nt, Human
ggcacgagggggaaauggcggccgcgggcuug

SEQ ID NO: 454990 - RNA, 32 nt, Human
ggcacgagggggaagaaaagggaauuccaacc

SEQ ID NO: 454991 - RNA, 21 nt, Human
ggcacgaggggucggcggccu

SEQ ID NO: 454992 - RNA, 32 nt, Human
ggcacgagggguucuggaagacggcagagcug

SEQ ID NO: 454993 - RNA, 21 nt, Human
ggcacgagggucaagcagccu

SEQ ID NO: 454994 - RNA, 32 nt, Human
ggcacgaggguggacgcgaggagccgggcgcu

SEQ ID NO: 454995 - RNA, 32 nt, Human
ggcacgaggguggucagcacaggggccggcac

SEQ ID NO: 454996 - RNA, 32 nt, Human
ggcacgagguaguggcgggaggcugugagcug

SEQ ID NO: 454997 - RNA, 32 nt, Human
ggcacgagguggagcaccgugaggaagaagcg

SEQ ID NO: 454998 - RNA, 32 nt, Human
ggcacgagguggagcugcgcguggaggagucc

SEQ ID NO: 454999 - RNA, 32 nt, Human
ggcacgagguggagggucucgcucugucacac

SEQ ID NO: 455000 - RNA, 32 nt, Human
ggcacgagguggggaagcugcuaacccgaccc

SEQ ID NO: 455001 - RNA, 32 nt, Human
ggcacgaguauggugagacaccagccccugca

SEQ ID NO: 455002 - RNA, 32 nt, Human
ggcacgaucauagcucacugcugcugcuccac

SEQ ID NO: 455003 - RNA, 22 nt, Human
ggcacgaucucagcucacugca

SEQ ID NO: 455004 - RNA, 22 nt, Human
ggcacgaucucggcucaccgca

SEQ ID NO: 455005 - RNA, 20 nt, Human
ggcacgcacacaugcucugc

SEQ ID NO: 455006 - RNA, 32 nt, Human
ggcacgcaccacuacugccuggcuaauuuuua

SEQ ID NO: 455007 - RNA, 32 nt, Human
ggcacgcaccacugcuucccacuggggccggc

SEQ ID NO: 455008 - RNA, 22 nt, Human
ggcacgcaccaucuguugccau

SEQ ID NO: 455009 - RNA, 32 nt, Human
ggcacgcaccuguaaucccagcuacucaggag

SEQ ID NO: 455010 - RNA, 32 nt, Human
ggcacgcaccuguaaucccagcuacucgggag

SEQ ID NO: 455011 - RNA, 24 nt, Human
ggcacgcacuggcaccuggcccca

SEQ ID NO: 455012 - RNA, 32 nt, Human
ggcacgcagagcuguguugaaggacauacuuu

SEQ ID NO: 455013 - RNA, 25 nt, Human
ggcacgcagaggagcagccgaccau

SEQ ID NO: 455014 - RNA, 18 nt, Human
ggcacgccagucugcacc

SEQ ID NO: 455015 - RNA, 32 nt, Human
ggcacgccuggcuggcugccucugccucuacu

SEQ ID NO: 455016 - RNA, 32 nt, Human
ggcacgccuguaaucccagcacuuugggaggc

SEQ ID NO: 455017 - RNA, 32 nt, Human
ggcacgcgccuguaauaccagcuacucaggag

SEQ ID NO: 455018 - RNA, 32 nt, Human
ggcacgcgccuguaaucccagccacucaggaa

SEQ ID NO: 455019 - RNA, 32 nt, Human
ggcacgcgccuguaaucccagcuacucaagag

SEQ ID NO: 455020 - RNA, 32 nt, Human
ggcacgcgccuguaaucccagcuacucaggag

SEQ ID NO: 455021 - RNA, 32 nt, Human
ggcacgcgccuguaaucccagcuacucgggag

SEQ ID NO: 455022 - RNA, 32 nt, Human
ggcacgcgccuguaaucccagcuacuugggag

SEQ ID NO: 455023 - RNA, 20 nt, Human
ggcacgcgccuguaguccca

SEQ ID NO: 455024 - RNA, 23 nt, Human
ggcacgcgccuguagucccagcu

SEQ ID NO: 455025 - RNA, 32 nt, Human
ggcacgcgcucggaagucgggggucggcgcgg

SEQ ID NO: 455026 - RNA, 17 nt, Human
ggcacgcggcccauggg

SEQ ID NO: 455027 - RNA, 22 nt, Human
ggcacgcuccacaccccuggag

SEQ ID NO: 455028 - RNA, 21 nt, Human
ggcacgcugauggagcccggg

SEQ ID NO: 455029 - RNA, 20 nt, Human
ggcacgcugguggggcagcu

SEQ ID NO: 455030 - RNA, 19 nt, Human
ggcacgcuguggcuggcua

SEQ ID NO: 455031 - RNA, 32 nt, Human
ggcacgcuucuacaacccuccugggaccccga

SEQ ID NO: 455032 - RNA, 27 nt, Human
ggcacgcuugcguaugucuguuaccau

SEQ ID NO: 455033 - RNA, 23 nt, Human
ggcacggacaagggccacugcag

SEQ ID NO: 455034 - RNA, 32 nt, Human
ggcacggacugcuccgugggccgcugcccuuc

SEQ ID NO: 455035 - RNA, 22 nt, Human
ggcacggaggcucaugccugua

SEQ ID NO: 455036 - RNA, 32 nt, Human
ggcacggagggagagacccugggugagacccc

SEQ ID NO: 455037 - RNA, 23 nt, Human
ggcacggagggucacugggcggc

SEQ ID NO: 455038 - RNA, 26 nt, Human
ggcacggauccaaguaccuggccaca

SEQ ID NO: 455039 - RNA, 32 nt, Human
ggcacggcaagaggagcaagagcaaggaccgc

SEQ ID NO: 455040 - RNA, 19 nt, Human
ggcacggcagaggaggcag

SEQ ID NO: 455041 - RNA, 32 nt, Human
ggcacggcaggcagcggcgccgucucccggug

SEQ ID NO: 455042 - RNA, 24 nt, Human
ggcacggccaaaaagaucugguua

SEQ ID NO: 455043 - RNA, 32 nt, Human
ggcacggccaaccuugucguucaucaaugccg

SEQ ID NO: 455044 - RNA, 32 nt, Human
ggcacggccccgucuucugccuccuccuccgu

SEQ ID NO: 455045 - RNA, 32 nt, Human
ggcacggcgcuguauccuaccugggcucuggc

SEQ ID NO: 455046 - RNA, 32 nt, Human
ggcacggcggcucuguucaagcacuuuaugcg

SEQ ID NO: 455047 - RNA, 32 nt, Human
ggcacgggacaggcaugugacacuaggccaca

SEQ ID NO: 455048 - RNA, 32 nt, Human
ggcacgggcagcuccuguucugccuuucccag

SEQ ID NO: 455049 - RNA, 18 nt, Human
ggcacgggcuccucagag

SEQ ID NO: 455050 - RNA, 22 nt, Human
ggcacggggacagccggccgca

SEQ ID NO: 455051 - RNA, 22 nt, Human
ggcacggggagucgggcggucu

SEQ ID NO: 455052 - RNA, 32 nt, Human
ggcacggggcugcugagggucuguggaacucc

SEQ ID NO: 455053 - RNA, 19 nt, Human
ggcacggggcuuaccaggg

SEQ ID NO: 455054 - RNA, 32 nt, Human
ggcacgggucggccgcaauccagccugggcgg

SEQ ID NO: 455055 - RNA, 32 nt, Human
ggcacgggugauccccguuccaccccaagaga

SEQ ID NO: 455056 - RNA, 32 nt, Human
ggcacggugaagcacuggccggggucuggcug

SEQ ID NO: 455057 - RNA, 22 nt, Human
ggcacgguggcccaugccugua

SEQ ID NO: 455058 - RNA, 32 nt, Human
ggcacgguggcgggcaccuguaguuccagcug

SEQ ID NO: 455059 - RNA, 22 nt, Human
ggcacgguggcucacaccugua

SEQ ID NO: 455060 - RNA, 32 nt, Human
ggcacgguggcucaccuguaaucccagcacuu

SEQ ID NO: 455061 - RNA, 22 nt, Human
ggcacgguggcucaugccugua

SEQ ID NO: 455062 - RNA, 32 nt, Human
ggcacggugguguggcuauagucugagcuacu

SEQ ID NO: 455063 - RNA, 32 nt, Human
ggcacguaccuguaaucucagcuacucaggag

SEQ ID NO: 455064 - RNA, 32 nt, Human
ggcacguccacaggcugggucgcgagguggcg

SEQ ID NO: 455065 - RNA, 32 nt, Human
ggcacgugccuauagucccagcaacuugggag

SEQ ID NO: 455066 - RNA, 32 nt, Human
ggcacgugccucucugaauccagccugccauu

SEQ ID NO: 455067 - RNA, 32 nt, Human
ggcacgugccuguaaucccagcuaccugggag

SEQ ID NO: 455068 - RNA, 32 nt, Human
ggcacgugccuguaaucccagcuacucaggag

SEQ ID NO: 455069 - RNA, 32 nt, Human
ggcacgugccuguaaucccagcuacucgggag

SEQ ID NO: 455070 - RNA, 32 nt, Human
ggcacgugccuguaaucccaguuacucaggag

SEQ ID NO: 455071 - RNA, 32 nt, Human
ggcacgugccuguaaucccaguuacuugggag

SEQ ID NO: 455072 - RNA, 32 nt, Human
ggcacgugccuguaaucucagcaacucaggag

SEQ ID NO: 455073 - RNA, 32 nt, Human
ggcacgugccuguaaucucagcuacucaggag

SEQ ID NO: 455074 - RNA, 32 nt, Human
ggcacgugccuguaauuccagcuacuugggag

SEQ ID NO: 455075 - RNA, 32 nt, Human
ggcacgugccuguagccccagcuacuugggag

SEQ ID NO: 455076 - RNA, 32 nt, Human
ggcacgugccuguagucccagcuacucaggag

SEQ ID NO: 455077 - RNA, 32 nt, Human
ggcacgugccuguagucccagcuacuccggag

SEQ ID NO: 455078 - RNA, 32 nt, Human
ggcacgugccuguagucccagcuacucgggaa

SEQ ID NO: 455079 - RNA, 32 nt, Human
ggcacgugccuguagugccggcuacucaggag

SEQ ID NO: 455080 - RNA, 32 nt, Human
ggcacgugccuguaguuccagcuacuugggag

SEQ ID NO: 455081 - RNA, 32 nt, Human
ggcacgugccuguauucccaucuacucgggag

SEQ ID NO: 455082 - RNA, 32 nt, Human
ggcacgugccugugaucccagcuacuugggag

SEQ ID NO: 455083 - RNA, 32 nt, Human
ggcacguggcugccauggagaaguaaagaagg

SEQ ID NO: 455084 - RNA, 32 nt, Human
ggcacgugggcaucacguaagcagcacacuag

SEQ ID NO: 455085 - RNA, 32 nt, Human
ggcacguguacguuucaggaagaagaagcaga

SEQ ID NO: 455086 - RNA, 22 nt, Human
ggcacgugucccaagccuguca

SEQ ID NO: 455087 - RNA, 20 nt, Human
ggcacgugucucagccuggu

SEQ ID NO: 455088 - RNA, 32 nt, Human
ggcacgugucuguaaucccagcuacucuggag

SEQ ID NO: 455089 - RNA, 17 nt, Human
ggcacgugugaccuggg

SEQ ID NO: 455090 - RNA, 23 nt, Human
ggcacgugugaccuggguaguca

SEQ ID NO: 455091 - RNA, 32 nt, Human
ggcacgugugaguacuaggcccaggggaagag

SEQ ID NO: 455092 - RNA, 32 nt, Human
ggcacuaaaccagguggucaaucagggagcac

SEQ ID NO: 455093 - RNA, 17 nt, Human
ggcacuaaccugccaua

SEQ ID NO: 455094 - RNA, 32 nt, Human
ggcacuaagggaguuuggggaaagccaaagaa

SEQ ID NO: 455095 - RNA, 32 nt, Human
ggcacuaauggaagaaagugcugcucaaagga

SEQ ID NO: 455096 - RNA, 32 nt, Human
ggcacuacacggggugcuggauucaaaucuca

SEQ ID NO: 455097 - RNA, 32 nt, Human
ggcacuaccaccccgcuccaucaucacuaugu

SEQ ID NO: 455098 - RNA, 32 nt, Human
ggcacuaccacccugcuccaucaucacuacgu

SEQ ID NO: 455099 - RNA, 32 nt, Human
ggcacuaccauauuuugcaugccaaauugcug

SEQ ID NO: 455100 - RNA, 32 nt, Human
ggcacuacccagacugccagagcccaggcugg

SEQ ID NO: 455101 - RNA, 22 nt, Human
ggcacuacugacuuuguucuua

SEQ ID NO: 455102 - RNA, 22 nt, Human
ggcacuacugccaccugccaca

SEQ ID NO: 455103 - RNA, 32 nt, Human
ggcacuagaaagggauuuggcauuuuaugucc

SEQ ID NO: 455104 - RNA, 32 nt, Human
ggcacuagagccauccagaaguggcagugccc

SEQ ID NO: 455105 - RNA, 22 nt, Human
ggcacuagaggcucccuugacg

SEQ ID NO: 455106 - RNA, 32 nt, Human
ggcacuaggcgaggaggaaaguggagaccacc

SEQ ID NO: 455107 - RNA, 32 nt, Human
ggcacuaucaccaccucucugccuucaugcca

SEQ ID NO: 455108 - RNA, 32 nt, Human
ggcacuauuugauaaugggccaggacauuccu

SEQ ID NO: 455109 - RNA, 19 nt, Human
ggcacucacagccccgcag

SEQ ID NO: 455110 - RNA, 32 nt, Human
ggcacucacauucacacacauacacacucauu

SEQ ID NO: 455111 - RNA, 19 nt, Human
ggcacucacgccucuuacg

SEQ ID NO: 455112 - RNA, 32 nt, Human
ggcacucacguagagcccaaggagcagucccc

SEQ ID NO: 455113 - RNA, 32 nt, Human
ggcacucacugcagacuuccucuuucaaggga

SEQ ID NO: 455114 - RNA, 21 nt, Human
ggcacucagaucuccauggcc

SEQ ID NO: 455115 - RNA, 32 nt, Human
ggcacucagggugggggacagcaggaucaaga

SEQ ID NO: 455116 - RNA, 20 nt, Human
ggcacucagucucccuggcg

SEQ ID NO: 455117 - RNA, 32 nt, Human
ggcacucaguggguggagaggaagcauaugug

SEQ ID NO: 455118 - RNA, 17 nt, Human
ggcacuccaaaaggggc

SEQ ID NO: 455119 - RNA, 32 nt, Human
ggcacuccaagugcauccuccacuggcaacag

SEQ ID NO: 455120 - RNA, 32 nt, Human
ggcacuccagccuggcgacaagagugagacuc

SEQ ID NO: 455121 - RNA, 32 nt, Human
ggcacuccagccugggcaacagagugagaccc

SEQ ID NO: 455122 - RNA, 32 nt, Human
ggcacuccagccugggcagcagagugagacuc

SEQ ID NO: 455123 - RNA, 32 nt, Human
ggcacuccagccugggugacagagugagacuc

SEQ ID NO: 455124 - RNA, 32 nt, Human
ggcacuccagccugggugacagagugagacug

SEQ ID NO: 455125 - RNA, 32 nt, Human
ggcacuccagccugggugacagugagacugug

SEQ ID NO: 455126 - RNA, 20 nt, Human
ggcacucccgaugccuggac

SEQ ID NO: 455127 - RNA, 32 nt, Human
ggcacucccucauccuggugggcacagagaua

SEQ ID NO: 455128 - RNA, 32 nt, Human
ggcacuccgcagccucuccaucugcuggcacu

SEQ ID NO: 455129 - RNA, 16 nt, Human
ggcacuccgccuggau

SEQ ID NO: 455130 - RNA, 32 nt, Human
ggcacuccuccccuccccucacuucucccacc

SEQ ID NO: 455131 - RNA, 32 nt, Human
ggcacuccuccuugcccugccagcugugccuu

SEQ ID NO: 455132 - RNA, 32 nt, Human
ggcacuccugcagguggcccggccugagguuc

SEQ ID NO: 455133 - RNA, 20 nt, Human
ggcacucgcaacuucucacg

SEQ ID NO: 455134 - RNA, 32 nt, Human
ggcacucgccuguccacuucugaguccaggug

SEQ ID NO: 455135 - RNA, 18 nt, Human
ggcacucgccuuaggacg

SEQ ID NO: 455136 - RNA, 20 nt, Human
ggcacucgcuacucccugcg

SEQ ID NO: 455137 - RNA, 19 nt, Human
ggcacucggaggccuuggc

SEQ ID NO: 455138 - RNA, 32 nt, Human
ggcacucucagcagcucaacugcccagcguga

SEQ ID NO: 455139 - RNA, 32 nt, Human
ggcacucucugccuucaugcaccuguccuuuc

SEQ ID NO: 455140 - RNA, 32 nt, Human
ggcacucugguuaaaugacucucuccagccuc

SEQ ID NO: 455141 - RNA, 32 nt, Human
ggcacucugucugcugguggcccucucggcuc

SEQ ID NO: 455142 - RNA, 22 nt, Human
ggcacucuugccacuccuugac

SEQ ID NO: 455143 - RNA, 21 nt, Human
ggcacugaauauccccuuggc

SEQ ID NO: 455144 - RNA, 32 nt, Human
ggcacugacaucuuugcuggacucuuuuaauc

SEQ ID NO: 455145 - RNA, 22 nt, Human
ggcacugaccggcccaccuggu

SEQ ID NO: 455146 - RNA, 18 nt, Human
ggcacugacuggggugcu

SEQ ID NO: 455147 - RNA, 23 nt, Human
ggcacugacugggucacugguga

SEQ ID NO: 455148 - RNA, 32 nt, Human
ggcacugagaccuccacccacuguggacucca

SEQ ID NO: 455149 - RNA, 32 nt, Human
ggcacugaggcagaggaggcaagggcuggucc

SEQ ID NO: 455150 - RNA, 32 nt, Human
ggcacugaggccagcauggcugugggaguuga

SEQ ID NO: 455151 - RNA, 32 nt, Human
ggcacugauugcaggcauguguuucaucauca

SEQ ID NO: 455152 - RNA, 32 nt, Human
ggcacugcaaaccugcucgcagcaccagccgg

SEQ ID NO: 455153 - RNA, 32 nt, Human
ggcacugcacuccagucugggugacagaguga

SEQ ID NO: 455154 - RNA, 17 nt, Human
ggcacugcagauccuga

SEQ ID NO: 455155 - RNA, 21 nt, Human
ggcacugcagcacacaacgca

SEQ ID NO: 455156 - RNA, 32 nt, Human
ggcacugcagcauuccaaucugggcaacauag

SEQ ID NO: 455157 - RNA, 17 nt, Human
ggcacugcagccugggc

SEQ ID NO: 455158 - RNA, 17 nt, Human
ggcacugcagcuauggg

SEQ ID NO: 455159 - RNA, 32 nt, Human
ggcacugcagcuaugggcacugccucagccua

SEQ ID NO: 455160 - RNA, 32 nt, Human
ggcacugcaggggugucacacagcaggcacac

SEQ ID NO: 455161 - RNA, 20 nt, Human
ggcacugccagugucuucca

SEQ ID NO: 455162 - RNA, 32 nt, Human
ggcacugccccagagccccgcagugagagccc

SEQ ID NO: 455163 - RNA, 21 nt, Human
ggcacugcccgccgggacaug

SEQ ID NO: 455164 - RNA, 31 nt, Human
ggcacugcccucucugugccuugguuucccc

SEQ ID NO: 455165 - RNA, 32 nt, Human
ggcacugcccuugccaacuuuuacccucccaa

SEQ ID NO: 455166 - RNA, 32 nt, Human
ggcacugcugcaacuucugcuuucaucccaug

SEQ ID NO: 455167 - RNA, 32 nt, Human
ggcacugcugcacuccagccugcgggacagag

SEQ ID NO: 455168 - RNA, 32 nt, Human
ggcacugcugccaugcugccuccccaggcugg

SEQ ID NO: 455169 - RNA, 32 nt, Human
ggcacugcugcuucccagcuguguggccucag

SEQ ID NO: 455170 - RNA, 32 nt, Human
ggcacugcuggugggaagaggcauuuuaccuu

SEQ ID NO: 455171 - RNA, 32 nt, Human
ggcacugcuuugcccagggcacauugacagaa

SEQ ID NO: 455172 - RNA, 32 nt, Human
ggcacuggacaagcuagugggcuuuucguugu

SEQ ID NO: 455173 - RNA, 32 nt, Human
ggcacuggacagaaacagccauccaaguggcu

SEQ ID NO: 455174 - RNA, 16 nt, Human
ggcacuggacuuggac

SEQ ID NO: 455175 - RNA, 32 nt, Human
ggcacuggagccccguaagugugcaggaguga

SEQ ID NO: 455176 - RNA, 32 nt, Human
ggcacuggagugagggaguagauaaaacagcu

SEQ ID NO: 455177 - RNA, 32 nt, Human
ggcacuggagugucagcggaggccccaggcag

SEQ ID NO: 455178 - RNA, 20 nt, Human
ggcacuggaucccaucaaag

SEQ ID NO: 455179 - RNA, 32 nt, Human
ggcacuggcacaagcucagcacaugcccagua

SEQ ID NO: 455180 - RNA, 32 nt, Human
ggcacuggcaggccuuaccucacauugcuaaa

SEQ ID NO: 455181 - RNA, 19 nt, Human
ggcacuggcagggggcaug

SEQ ID NO: 455182 - RNA, 32 nt, Human
ggcacuggccacucugccuggagagaggagua

SEQ ID NO: 455183 - RNA, 32 nt, Human
ggcacuggccagagggguuaggaggauuugga

SEQ ID NO: 455184 - RNA, 32 nt, Human
ggcacuggccuggacuccuccucugcccuccu

SEQ ID NO: 455185 - RNA, 32 nt, Human
ggcacuggccuggguagagccagggcgagcac

SEQ ID NO: 455186 - RNA, 32 nt, Human
ggcacugggaccccaaccucucccagaguggc

SEQ ID NO: 455187 - RNA, 17 nt, Human
ggcacugggaccuggau

SEQ ID NO: 455188 - RNA, 32 nt, Human
ggcacugggacuggucccugcccucauccuua

SEQ ID NO: 455189 - RNA, 22 nt, Human
ggcacugggaggacaguggcug

SEQ ID NO: 455190 - RNA, 32 nt, Human
ggcacugggcaaggcccccagagcagggcaag

SEQ ID NO: 455191 - RNA, 31 nt, Human
ggcacugggcacuucucacaaacuuucuagu

SEQ ID NO: 455192 - RNA, 32 nt, Human
ggcacugggccuugcugcaccuuggggcugac

SEQ ID NO: 455193 - RNA, 32 nt, Human
ggcacugggcucgccuugcacgcccaccagga

SEQ ID NO: 455194 - RNA, 17 nt, Human
ggcacugggcugggguc

SEQ ID NO: 455195 - RNA, 32 nt, Human
ggcacuggggacccugcacagucuggccaugu

SEQ ID NO: 455196 - RNA, 32 nt, Human
ggcacuggggagggggcuucaaggagggagug

SEQ ID NO: 455197 - RNA, 32 nt, Human
ggcacuggggguggagggugcacacgaauggc

SEQ ID NO: 455198 - RNA, 32 nt, Human
ggcacuggguaccucagggugagcagagggca

SEQ ID NO: 455199 - RNA, 32 nt, Human
ggcacugggugaggacagcugggcaggggcug

SEQ ID NO: 455200 - RNA, 32 nt, Human
ggcacuggucacuccuaugugcuaagacaagg

SEQ ID NO: 455201 - RNA, 31 nt, Human
ggcacuggugagagacaugaacacugacugg

SEQ ID NO: 455202 - RNA, 32 nt, Human
ggcacuggugaugucccaggagguagaccucc

SEQ ID NO: 455203 - RNA, 23 nt, Human
ggcacugguggggaauuugguca

SEQ ID NO: 455204 - RNA, 32 nt, Human
ggcacuguaggugagcgcgagaggacggagga

SEQ ID NO: 455205 - RNA, 32 nt, Human
ggcacugucacugcccaccuccuugggccucc

SEQ ID NO: 455206 - RNA, 32 nt, Human
ggcacugucaugucucuacugggaaauacaca

SEQ ID NO: 455207 - RNA, 32 nt, Human
ggcacugucuguggccccagggguugaggacc

SEQ ID NO: 455208 - RNA, 32 nt, Human
ggcacugugaugggagcugguggcgacugagu

SEQ ID NO: 455209 - RNA, 32 nt, Human
ggcacugugccacccucauuccuccagagcuu

SEQ ID NO: 455210 - RNA, 24 nt, Human
ggcacugugcgucugcagaggggc

SEQ ID NO: 455211 - RNA, 32 nt, Human
ggcacugugcugcugcuguggagcggcgccga

SEQ ID NO: 455212 - RNA, 32 nt, Human
ggcacugugggggugccugagcacacauaccg

SEQ ID NO: 455213 - RNA, 32 nt, Human
ggcacuguggugaucccauaaaaggccagucc

SEQ ID NO: 455214 - RNA, 32 nt, Human
ggcacuguucaauacuguaugccuucuguauu

SEQ ID NO: 455215 - RNA, 32 nt, Human
ggcacuuaacauccuuccacccacaugcccga

SEQ ID NO: 455216 - RNA, 32 nt, Human
ggcacuuacaauuuuuaaaauaguuuauguca

SEQ ID NO: 455217 - RNA, 32 nt, Human
ggcacuuaggugccuggcuggcccagggcuug

SEQ ID NO: 455218 - RNA, 24 nt, Human
ggcacuucauugagaguuuuguca

SEQ ID NO: 455219 - RNA, 21 nt, Human
ggcacuuccaaaaaauuggca

SEQ ID NO: 455220 - RNA, 32 nt, Human
ggcacuucccccuuggcuccugaggccagaac

SEQ ID NO: 455221 - RNA, 32 nt, Human
ggcacuucccuuuccuccuccuugggccaugc

SEQ ID NO: 455222 - RNA, 32 nt, Human
ggcacuuccucuucucuuuucuagucagggua

SEQ ID NO: 455223 - RNA, 32 nt, Human
ggcacuuccuuccuguuaaaccccuguuaacu

SEQ ID NO: 455224 - RNA, 32 nt, Human
ggcacuucggcugcuccacagggaaggcgaca

SEQ ID NO: 455225 - RNA, 32 nt, Human
ggcacuucuagguauuggacaagugacagaaa

SEQ ID NO: 455226 - RNA, 32 nt, Human
ggcacuucuaguuucacguaaauauucauauu

SEQ ID NO: 455227 - RNA, 32 nt, Human
ggcacuucuccccucccuggcccuucucaguu

SEQ ID NO: 455228 - RNA, 20 nt, Human
ggcacuucugccaagaaaug

SEQ ID NO: 455229 - RNA, 23 nt, Human
ggcacuucugggugugucaguca

SEQ ID NO: 455230 - RNA, 19 nt, Human
ggcacuucuuccugcugcc

SEQ ID NO: 455231 - RNA, 32 nt, Human
ggcacuugaauucucucauccugggccagaga

SEQ ID NO: 455232 - RNA, 32 nt, Human
ggcacuugauggggguuaguugcuuggcagcc

SEQ ID NO: 455233 - RNA, 32 nt, Human
ggcacuugcauccugagucggggaagaauccu

SEQ ID NO: 455234 - RNA, 32 nt, Human
ggcacuugccuguagucucagcuacuuaggag

SEQ ID NO: 455235 - RNA, 32 nt, Human
ggcacuugcucccugggcaacuccuuucccag

SEQ ID NO: 455236 - RNA, 22 nt, Human
ggcacuuggaacccugaucaca

SEQ ID NO: 455237 - RNA, 32 nt, Human
ggcacuuggcccaugggaaagaggguguggug

SEQ ID NO: 455238 - RNA, 19 nt, Human
ggcacuugggaguggggug

SEQ ID NO: 455239 - RNA, 32 nt, Human
ggcacuuguauuccagccucgcugcauuugcu

SEQ ID NO: 455240 - RNA, 19 nt, Human
ggcacuuguuccugagguc

SEQ ID NO: 455241 - RNA, 32 nt, Human
ggcacuuucauccucaagcucagggcccaucc

SEQ ID NO: 455242 - RNA, 32 nt, Human
ggcacuuucccuaccugcugugguauuucaua

SEQ ID NO: 455243 - RNA, 19 nt, Human
ggcacuuucucccuugagg

SEQ ID NO: 455244 - RNA, 32 nt, Human
ggcacuuucucuaguuuaaccucuugcuauuu

SEQ ID NO: 455245 - RNA, 22 nt, Human
ggcacuuugaaccuugaccaca

SEQ ID NO: 455246 - RNA, 32 nt, Human
ggcacuuuuccuuaagaaauagaacuugauuu

SEQ ID NO: 455247 - RNA, 21 nt, Human
ggcacuuuugcuuuuguguua

SEQ ID NO: 455248 - RNA, 32 nt, Human
ggcacuuuuuccaauuugacugaucucuaaac

SEQ ID NO: 455249 - RNA, 32 nt, Human
ggcagaaaaaugguggucauuggccgacauca

SEQ ID NO: 455250 - RNA, 32 nt, Human
ggcagaaaacagcucuggcaggaagggacugc

SEQ ID NO: 455251 - RNA, 32 nt, Human
ggcagaaaagaagggagagaaccucaugggca

SEQ ID NO: 455252 - RNA, 32 nt, Human
ggcagaaaaggauccuaggaaauaagucucuu

SEQ ID NO: 455253 - RNA, 18 nt, Human
ggcagaaacaccucaaag

SEQ ID NO: 455254 - RNA, 18 nt, Human
ggcagaaacuggggcagc

SEQ ID NO: 455255 - RNA, 32 nt, Human
ggcagaaagacauuuuucuccucaguagcaua

SEQ ID NO: 455256 - RNA, 19 nt, Human
ggcagaaagaccugaguuc

SEQ ID NO: 455257 - RNA, 32 nt, Human
ggcagaaagaggaggacaaagaggaggaaagc

SEQ ID NO: 455258 - RNA, 32 nt, Human
ggcagaaagauaaaaauuucagugaagaagaa

SEQ ID NO: 455259 - RNA, 32 nt, Human
ggcagaaagcaggguugcccccagaugucucu

SEQ ID NO: 455260 - RNA, 32 nt, Human
ggcagaaagcuggagccccuggaguuggcugu

SEQ ID NO: 455261 - RNA, 32 nt, Human
ggcagaaaucaaaagaaauccuugagggcugg

SEQ ID NO: 455262 - RNA, 19 nt, Human
ggcagaaauccccuugaug

SEQ ID NO: 455263 - RNA, 32 nt, Human
ggcagaacaggcagaagggauggaauuuggcu

SEQ ID NO: 455264 - RNA, 32 nt, Human
ggcagaaccaaucaccaccacagccugcaagu

SEQ ID NO: 455265 - RNA, 21 nt, Human
ggcagaaccugcgggggcagg

SEQ ID NO: 455266 - RNA, 32 nt, Human
ggcagaacuauccgcugaggaaccuggcagaa

SEQ ID NO: 455267 - RNA, 23 nt, Human
ggcagaacucaaauggaaggagg

SEQ ID NO: 455268 - RNA, 23 nt, Human
ggcagaacuggcuggagcugcuu

SEQ ID NO: 455269 - RNA, 32 nt, Human
ggcagaacugucucccccuugucaccuaccuc

SEQ ID NO: 455270 - RNA, 19 nt, Human
ggcagaagaagcugggagg

SEQ ID NO: 455271 - RNA, 32 nt, Human
ggcagaagaaugggagaggaaaaagaaagaaa

SEQ ID NO: 455272 - RNA, 19 nt, Human
ggcagaagacucugggcca

SEQ ID NO: 455273 - RNA, 16 nt, Human
ggcagaagagaaagga

SEQ ID NO: 455274 - RNA, 32 nt, Human
ggcagaagaugccccacuccagccugcaucca

SEQ ID NO: 455275 - RNA, 32 nt, Human
ggcagaagcaagaagagauuguuuugaagcca

SEQ ID NO: 455276 - RNA, 32 nt, Human
ggcagaagccccgugaaccgugaaagagaaaa

SEQ ID NO: 455277 - RNA, 32 nt, Human
ggcagaagccugggucacagcacccagaacug

SEQ ID NO: 455278 - RNA, 16 nt, Human
ggcagaagcugagguc

SEQ ID NO: 455279 - RNA, 32 nt, Human
ggcagaagcugggagccucccuucccuuugaa

SEQ ID NO: 455280 - RNA, 20 nt, Human
ggcagaaggacgcugagguc

SEQ ID NO: 455281 - RNA, 32 nt, Human
ggcagaaggauggggacaacuuggaagccaga

SEQ ID NO: 455282 - RNA, 32 nt, Human
ggcagaagggagagagggaggggcagcuaugc

SEQ ID NO: 455283 - RNA, 32 nt, Human
ggcagaagggccauaguucauccagcuccucc

SEQ ID NO: 455284 - RNA, 32 nt, Human
ggcagaaggggcucuccagaccccuuuuccau

SEQ ID NO: 455285 - RNA, 32 nt, Human
ggcagaaggucuaugggggcagcugggacucc

SEQ ID NO: 455286 - RNA, 32 nt, Human
ggcagaaggugaaagagguuguguugacugug

SEQ ID NO: 455287 - RNA, 32 nt, Human
ggcagaaguacaaaccagauuuagagaauuga

SEQ ID NO: 455288 - RNA, 22 nt, Human
ggcagaauacuggcaagaaaug

SEQ ID NO: 455289 - RNA, 32 nt, Human
ggcagaaucaccaggauggaacacaggucuug

SEQ ID NO: 455290 - RNA, 32 nt, Human
ggcagaaugagaaaggcccaggggcccccauu

SEQ ID NO: 455291 - RNA, 32 nt, Human
ggcagacaacucagggagaaacucaggagugc

SEQ ID NO: 455292 - RNA, 32 nt, Human
ggcagacaagcagacagauguccuuauguggu

SEQ ID NO: 455293 - RNA, 32 nt, Human
ggcagacaagggcuaagauuuccuuagcagua

SEQ ID NO: 455294 - RNA, 32 nt, Human
ggcagacacagcccuaugggucaugguuugac

SEQ ID NO: 455295 - RNA, 31 nt, Human
ggcagacaccgagcuagcuguaggaguuuuu

SEQ ID NO: 455296 - RNA, 32 nt, Human
ggcagacagaaccucugggacacacaccaagg

SEQ ID NO: 455297 - RNA, 32 nt, Human
ggcagacagacccugauaaugagccuggcagg

SEQ ID NO: 455298 - RNA, 32 nt, Human
ggcagacagagagcuguuauccuaacugauuu

SEQ ID NO: 455299 - RNA, 32 nt, Human
ggcagacagcaggggauuaaguaacucauaac

SEQ ID NO: 455300 - RNA, 19 nt, Human
ggcagacagcauugggguc

SEQ ID NO: 455301 - RNA, 32 nt, Human
ggcagacagcgggcuggugaacaggaagagca

SEQ ID NO: 455302 - RNA, 32 nt, Human
ggcagacaggcagagggccagagcagaggaca

SEQ ID NO: 455303 - RNA, 32 nt, Human
ggcagacaggcagggaggguguggcugggcug

SEQ ID NO: 455304 - RNA, 32 nt, Human
ggcagacaucuaacccugaaaaccacucgcuu

SEQ ID NO: 455305 - RNA, 32 nt, Human
ggcagacauuugguuuaucugugucauugguc

SEQ ID NO: 455306 - RNA, 32 nt, Human
ggcagacccacccuuaaucuggguaggaacca

SEQ ID NO: 455307 - RNA, 32 nt, Human
ggcagacccacccuuaaucuggguaggcacca

SEQ ID NO: 455308 - RNA, 32 nt, Human
ggcagaccccucuaccuccuccaggcugggag

SEQ ID NO: 455309 - RNA, 32 nt, Human
ggcagacccgggagcugagaauagaggaauac

SEQ ID NO: 455310 - RNA, 20 nt, Human
ggcagacccgugucuuucca

SEQ ID NO: 455311 - RNA, 32 nt, Human
ggcagaccuggacucacagccuggcugugaug

SEQ ID NO: 455312 - RNA, 22 nt, Human
ggcagacggaucacuugagguc

SEQ ID NO: 455313 - RNA, 32 nt, Human
ggcagacggcucucccccuuaaagcuguuccc

SEQ ID NO: 455314 - RNA, 32 nt, Human
ggcagacggcucuugggcucuuuuccccaccu

SEQ ID NO: 455315 - RNA, 32 nt, Human
ggcagacggugacuucugaagcugggacacaa

SEQ ID NO: 455316 - RNA, 32 nt, Human
ggcagacguuuacccucuaucacagaccuuuc

SEQ ID NO: 455317 - RNA, 32 nt, Human
ggcagacucugaauuaugcacagggaaugcca

SEQ ID NO: 455318 - RNA, 18 nt, Human
ggcagacugcccguggcc

SEQ ID NO: 455319 - RNA, 32 nt, Human
ggcagacuugcagagcaaauaagggaccuggc

SEQ ID NO: 455320 - RNA, 32 nt, Human
ggcagagaaaacagcaauagugaaugaaugca

SEQ ID NO: 455321 - RNA, 32 nt, Human
ggcagagaaaaccugcauccucugggcuuguu

SEQ ID NO: 455322 - RNA, 32 nt, Human
ggcagagaaagccgagcagagcuggguggcgu

SEQ ID NO: 455323 - RNA, 32 nt, Human
ggcagagaaagcuccuguuaauaaaagaggag

SEQ ID NO: 455324 - RNA, 32 nt, Human
ggcagagaaagcuucaggaguaccuugcagcc

SEQ ID NO: 455325 - RNA, 32 nt, Human
ggcagagaaaugccagcugcaccagggcucag

SEQ ID NO: 455326 - RNA, 32 nt, Human
ggcagagaaggcuuccuccagcggcugggugg

SEQ ID NO: 455327 - RNA, 20 nt, Human
ggcagagaagggccucaaga

SEQ ID NO: 455328 - RNA, 32 nt, Human
ggcagagaauggauuuauucucugcuagguuu

SEQ ID NO: 455329 - RNA, 23 nt, Human
ggcagagacaagagaagaggaga

SEQ ID NO: 455330 - RNA, 19 nt, Human
ggcagagacacagcuguca

SEQ ID NO: 455331 - RNA, 32 nt, Human
ggcagagaccauaagagaaaccugccaaggag

SEQ ID NO: 455332 - RNA, 32 nt, Human
ggcagagaccuguggaccuggccuccccacuc

SEQ ID NO: 455333 - RNA, 21 nt, Human
ggcagagacggagaagaugaa

SEQ ID NO: 455334 - RNA, 20 nt, Human
ggcagagacggaggggcagc

SEQ ID NO: 455335 - RNA, 32 nt, Human
ggcagagacucgggggugcucagcagcagccc

SEQ ID NO: 455336 - RNA, 32 nt, Human
ggcagagagaaagagagagaaagaguaugugg

SEQ ID NO: 455337 - RNA, 32 nt, Human
ggcagagagaaagggaaaccagaucuuacucc

SEQ ID NO: 455338 - RNA, 20 nt, Human
ggcagagagcaaaaagggga

SEQ ID NO: 455339 - RNA, 32 nt, Human
ggcagagagcaagggggacgaggcagaugacg

SEQ ID NO: 455340 - RNA, 32 nt, Human
ggcagagagcuagcuccucccuuucuuucuuu

SEQ ID NO: 455341 - RNA, 20 nt, Human
ggcagagaggcuccauggcc

SEQ ID NO: 455342 - RNA, 32 nt, Human
ggcagagagguuuccaggcagugagagguggc

SEQ ID NO: 455343 - RNA, 32 nt, Human
ggcagagaucacaaaacuaacagcucuuucug

SEQ ID NO: 455344 - RNA, 32 nt, Human
ggcagagauggaccaggcgguggacagauggg

SEQ ID NO: 455345 - RNA, 32 nt, Human
ggcagagaugggugugugaggggugaggaggc

SEQ ID NO: 455346 - RNA, 32 nt, Human
ggcagagauuaguauccuggcacuccagugac

SEQ ID NO: 455347 - RNA, 18 nt, Human
ggcagagauugcuugcga

SEQ ID NO: 455348 - RNA, 23 nt, Human
ggcagagauuggaaugggcagcu

SEQ ID NO: 455349 - RNA, 32 nt, Human
ggcagagcaacuugcacaacagccuggaccug

SEQ ID NO: 455350 - RNA, 17 nt, Human
ggcagagcaaggggagc

SEQ ID NO: 455351 - RNA, 32 nt, Human
ggcagagcaccacugugauuuguucuccuggu

SEQ ID NO: 455352 - RNA, 20 nt, Human
ggcagagcagaaagcggcuu

SEQ ID NO: 455353 - RNA, 32 nt, Human
ggcagagcagcccaggcucagcauggagccca

SEQ ID NO: 455354 - RNA, 32 nt, Human
ggcagagcagcgucugccugacggggagggcg

SEQ ID NO: 455355 - RNA, 18 nt, Human
ggcagagcagguaggcgc

SEQ ID NO: 455356 - RNA, 32 nt, Human
ggcagagcauguggucugagggcccacaguga

SEQ ID NO: 455357 - RNA, 21 nt, Human
ggcagagcauuuaagagugaa

SEQ ID NO: 455358 - RNA, 19 nt, Human
ggcagagccacggggagcu

SEQ ID NO: 455359 - RNA, 20 nt, Human
ggcagagccacugggcacuu

SEQ ID NO: 455360 - RNA, 32 nt, Human
ggcagagccaggaagaucccccagaaaagaaa

SEQ ID NO: 455361 - RNA, 32 nt, Human
ggcagagccaggacccaggaggugugauuccu

SEQ ID NO: 455362 - RNA, 22 nt, Human
ggcagagccaggacuggagcuu

SEQ ID NO: 455363 - RNA, 22 nt, Human
ggcagagccaguggaggugagu

SEQ ID NO: 455364 - RNA, 21 nt, Human
ggcagagcccagaugcuuuug

SEQ ID NO: 455365 - RNA, 32 nt, Human
ggcagagccccaugcuguccucugccuuugag

SEQ ID NO: 455366 - RNA, 22 nt, Human
ggcagagcccuggcagggcgcu

SEQ ID NO: 455367 - RNA, 21 nt, Human
ggcagagccggcuguacagcu

SEQ ID NO: 455368 - RNA, 21 nt, Human
ggcagagccggugcgacguuu

SEQ ID NO: 455369 - RNA, 21 nt, Human
ggcagagccgugccucacuga

SEQ ID NO: 455370 - RNA, 19 nt, Human
ggcagagccgugcgggcgc

SEQ ID NO: 455371 - RNA, 19 nt, Human
ggcagagccucugagauga

SEQ ID NO: 455372 - RNA, 22 nt, Human
ggcagagccugaggaagcugaa

SEQ ID NO: 455373 - RNA, 19 nt, Human
ggcagagccugcagcagcu

SEQ ID NO: 455374 - RNA, 18 nt, Human
ggcagagccugggugguc

SEQ ID NO: 455375 - RNA, 21 nt, Human
ggcagagcgcgcggccagcuu

SEQ ID NO: 455376 - RNA, 18 nt, Human
ggcagagcggcgcaggca

SEQ ID NO: 455377 - RNA, 21 nt, Human
ggcagagcggcgcaggcagcu

SEQ ID NO: 455378 - RNA, 19 nt, Human
ggcagagcguguggcaucu

SEQ ID NO: 455379 - RNA, 20 nt, Human
ggcagagcuauaaagacgag

SEQ ID NO: 455380 - RNA, 32 nt, Human
ggcagagcuaucucucucauagcuuuuaugcc

SEQ ID NO: 455381 - RNA, 32 nt, Human
ggcagagcucaggugggaaugcuugcucccca

SEQ ID NO: 455382 - RNA, 23 nt, Human
ggcagagcuccacaacccaagga

SEQ ID NO: 455383 - RNA, 23 nt, Human
ggcagagcucggagccucauuga

SEQ ID NO: 455384 - RNA, 18 nt, Human
ggcagagcucgugcaugc

SEQ ID NO: 455385 - RNA, 19 nt, Human
ggcagagcucuggccacuu

SEQ ID NO: 455386 - RNA, 21 nt, Human
ggcagagcucugggaagugaa

SEQ ID NO: 455387 - RNA, 20 nt, Human
ggcagagcugacuccaggcc

SEQ ID NO: 455388 - RNA, 21 nt, Human
ggcagagcugagagagaagaa

SEQ ID NO: 455389 - RNA, 22 nt, Human
ggcagagcugagagccgcaguu

SEQ ID NO: 455390 - RNA, 32 nt, Human
ggcagagcugcagggccugggcuaagagguag

SEQ ID NO: 455391 - RNA, 21 nt, Human
ggcagagcugccgcccaaaga

SEQ ID NO: 455392 - RNA, 22 nt, Human
ggcagagcugcuguuuucugaa

SEQ ID NO: 455393 - RNA, 19 nt, Human
ggcagagcuggaagaggaa

SEQ ID NO: 455394 - RNA, 23 nt, Human
ggcagagcuggacucugaucaca

SEQ ID NO: 455395 - RNA, 19 nt, Human
ggcagagcuggagccaguu

SEQ ID NO: 455396 - RNA, 32 nt, Human
ggcagagcuggcaccggaugggaacgauggag

SEQ ID NO: 455397 - RNA, 22 nt, Human
ggcagagcuggcuggcucagcu

SEQ ID NO: 455398 - RNA, 21 nt, Human
ggcagagcugggacuccagcu

SEQ ID NO: 455399 - RNA, 23 nt, Human
ggcagagcugggagcaagaugga

SEQ ID NO: 455400 - RNA, 32 nt, Human
ggcagagcugggguaucccaugaugucaccac

SEQ ID NO: 455401 - RNA, 20 nt, Human
ggcagagcuggguggcagcu

SEQ ID NO: 455402 - RNA, 32 nt, Human
ggcagagcuggguucuccuccugggggcccag

SEQ ID NO: 455403 - RNA, 19 nt, Human
ggcagagcuggucaugagc

SEQ ID NO: 455404 - RNA, 20 nt, Human
ggcagagcuggugggggcag

SEQ ID NO: 455405 - RNA, 22 nt, Human
ggcagagcuggugugagacgag

SEQ ID NO: 455406 - RNA, 32 nt, Human
ggcagagcuggugugagacgagacaauccugc

SEQ ID NO: 455407 - RNA, 19 nt, Human
ggcagagcuguccucagcu

SEQ ID NO: 455408 - RNA, 21 nt, Human
ggcagagcuguggcggaagaa

SEQ ID NO: 455409 - RNA, 32 nt, Human
ggcagagcuguugcccacaagcgccuuuuauu

SEQ ID NO: 455410 - RNA, 20 nt, Human
ggcagagcuugagggcaguu

SEQ ID NO: 455411 - RNA, 32 nt, Human
ggcagagcuuguaaggcuagagcccaggucug

SEQ ID NO: 455412 - RNA, 18 nt, Human
ggcagagcuuucagauga

SEQ ID NO: 455413 - RNA, 20 nt, Human
ggcagagcuuugugagagaa

SEQ ID NO: 455414 - RNA, 32 nt, Human
ggcagaggaagggagagaggcggcggcgacac

SEQ ID NO: 455415 - RNA, 32 nt, Human
ggcagaggaagguggggagagcccagaaggac

SEQ ID NO: 455416 - RNA, 32 nt, Human
ggcagaggacggugcagccaagccacacagag

SEQ ID NO: 455417 - RNA, 32 nt, Human
ggcagaggagcagagaugcaucagcucgccug

SEQ ID NO: 455418 - RNA, 32 nt, Human
ggcagaggagcccaagggacugaagauggcca

SEQ ID NO: 455419 - RNA, 32 nt, Human
ggcagaggagcugaccagggagggagguaccc

SEQ ID NO: 455420 - RNA, 18 nt, Human
ggcagaggagcugggguc

SEQ ID NO: 455421 - RNA, 32 nt, Human
ggcagaggaggcaagggcugguccagagagcc

SEQ ID NO: 455422 - RNA, 32 nt, Human
ggcagaggaggcaccuguaggggguggugggc

SEQ ID NO: 455423 - RNA, 32 nt, Human
ggcagaggaggcagaggcagaggcagaggcag

SEQ ID NO: 455424 - RNA, 32 nt, Human
ggcagaggagguggaguucuuccaugcaggag

SEQ ID NO: 455425 - RNA, 32 nt, Human
ggcagaggagugagaggacugugccagaggag

SEQ ID NO: 455426 - RNA, 32 nt, Human
ggcagaggaguuucuucaggaagaaccagggc

SEQ ID NO: 455427 - RNA, 32 nt, Human
ggcagaggcaagagaagaggaaagcgggcggc

SEQ ID NO: 455428 - RNA, 19 nt, Human
ggcagaggcagccucccca

SEQ ID NO: 455429 - RNA, 19 nt, Human
ggcagaggcauccauggcu

SEQ ID NO: 455430 - RNA, 15 nt, Human
ggcagaggccugggc

SEQ ID NO: 455431 - RNA, 32 nt, Human
ggcagaggccuguaaucccagcuacuugggag

SEQ ID NO: 455432 - RNA, 32 nt, Human
ggcagaggcgagggagguugcggguaggaagg

SEQ ID NO: 455433 - RNA, 32 nt, Human
ggcagaggcuagugcugaccuacgggcugaug

SEQ ID NO: 455434 - RNA, 32 nt, Human
ggcagaggcugcaagggguggaggcugagcug

SEQ ID NO: 455435 - RNA, 32 nt, Human
ggcagaggcugcacucuagccugggcaacaga

SEQ ID NO: 455436 - RNA, 32 nt, Human
ggcagaggcugcagagagccaaggagugcacc

SEQ ID NO: 455437 - RNA, 32 nt, Human
ggcagaggcugcggagccccagaagggucuac

SEQ ID NO: 455438 - RNA, 32 nt, Human
ggcagaggcugugcucccuccucagguggccu

SEQ ID NO: 455439 - RNA, 32 nt, Human
ggcagagggaaagggguacacugagggagaaa

SEQ ID NO: 455440 - RNA, 32 nt, Human
ggcagagggaaaggguggucagggugaggaug

SEQ ID NO: 455441 - RNA, 32 nt, Human
ggcagagggaaugacguggcaauucugagccc

SEQ ID NO: 455442 - RNA, 32 nt, Human
ggcagagggcagcaguagcagugggaugcuuu

SEQ ID NO: 455443 - RNA, 21 nt, Human
ggcagagggcagcgggcagcu

SEQ ID NO: 455444 - RNA, 20 nt, Human
ggcagaggggcuuccaggcc

SEQ ID NO: 455445 - RNA, 32 nt, Human
ggcagagggggagggggacgaagcugguggcg

SEQ ID NO: 455446 - RNA, 19 nt, Human
ggcagagggguccauggcu

SEQ ID NO: 455447 - RNA, 32 nt, Human
ggcagagggguguggagcagccuggaguacag

SEQ ID NO: 455448 - RNA, 32 nt, Human
ggcagagggugguggagaggagagggagaaag

SEQ ID NO: 455449 - RNA, 32 nt, Human
ggcagagguagcugaggguagcauggcagagg

SEQ ID NO: 455450 - RNA, 32 nt, Human
ggcagaggucaccaggcuggucuaccagguag

SEQ ID NO: 455451 - RNA, 20 nt, Human
ggcagagguccccugagguc

SEQ ID NO: 455452 - RNA, 32 nt, Human
ggcagaggucucucacuguguugcccagacaa

SEQ ID NO: 455453 - RNA, 32 nt, Human
ggcagaggucucucauuguguugcccagacaa

SEQ ID NO: 455454 - RNA, 32 nt, Human
ggcagagguggugagaagaagaggaggagauu

SEQ ID NO: 455455 - RNA, 32 nt, Human
ggcagagguuacagguuacagugagcaaagau

SEQ ID NO: 455456 - RNA, 18 nt, Human
ggcagagguugcagugag

SEQ ID NO: 455457 - RNA, 32 nt, Human
ggcagagguugcagugagcugagguugcggug

SEQ ID NO: 455458 - RNA, 32 nt, Human
ggcagaguagggggugguuggagagcaguuag

SEQ ID NO: 455459 - RNA, 32 nt, Human
ggcagaguauugaacccugccucccaguuaaa

SEQ ID NO: 455460 - RNA, 23 nt, Human
ggcagagucacacuggggcagcu

SEQ ID NO: 455461 - RNA, 19 nt, Human
ggcagaguccagggcagcu

SEQ ID NO: 455462 - RNA, 32 nt, Human
ggcagaguccccaucacguggcaagccaggcg

SEQ ID NO: 455463 - RNA, 32 nt, Human
ggcagaguccuggagcuggcucuauaaggcag

SEQ ID NO: 455464 - RNA, 16 nt, Human
ggcagagucugggguc

SEQ ID NO: 455465 - RNA, 20 nt, Human
ggcagagucugugggugcag

SEQ ID NO: 455466 - RNA, 32 nt, Human
ggcagagucuucauauggaaacaguuuuuauu

SEQ ID NO: 455467 - RNA, 19 nt, Human
ggcagagugaauugggguc

SEQ ID NO: 455468 - RNA, 22 nt, Human
ggcagaguggaacccugccucc

SEQ ID NO: 455469 - RNA, 18 nt, Human
ggcagaguggagcagcuu

SEQ ID NO: 455470 - RNA, 21 nt, Human
ggcagaguggagcccagggug

SEQ ID NO: 455471 - RNA, 32 nt, Human
ggcagaguggucacugcacgcaccuggccucc

SEQ ID NO: 455472 - RNA, 32 nt, Human
ggcagaguguugaacccugccucccaguuaaa

SEQ ID NO: 455473 - RNA, 32 nt, Human
ggcagaguucacuauucuaucugccauuagac

SEQ ID NO: 455474 - RNA, 32 nt, Human
ggcagaguucagcccacaucuccgucucgagc

SEQ ID NO: 455475 - RNA, 32 nt, Human
ggcagaguuccccagccuggaggcucuggugg

SEQ ID NO: 455476 - RNA, 32 nt, Human
ggcagaguugacacggaaccccaaagcaagga

SEQ ID NO: 455477 - RNA, 18 nt, Human
ggcagaguuggaagcagc

SEQ ID NO: 455478 - RNA, 20 nt, Human
ggcagaguuuaucccaauga

SEQ ID NO: 455479 - RNA, 22 nt, Human
ggcagaguuugggggcaagcuu

SEQ ID NO: 455480 - RNA, 32 nt, Human
ggcagauaaacccaaaguaaguguuggcuaaa

SEQ ID NO: 455481 - RNA, 18 nt, Human
ggcagauaaccugagguc

SEQ ID NO: 455482 - RNA, 18 nt, Human
ggcagauaaccugcgguc

SEQ ID NO: 455483 - RNA, 15 nt, Human
ggcagauaacggggc

SEQ ID NO: 455484 - RNA, 32 nt, Human
ggcagauaauauaugaauaaaguucagccaaa

SEQ ID NO: 455485 - RNA, 25 nt, Human
ggcagauacagcacacuugaccgca

SEQ ID NO: 455486 - RNA, 18 nt, Human
ggcagauacuuucagguu

SEQ ID NO: 455487 - RNA, 32 nt, Human
ggcagauagaggaaaagaaauuaauaugaaag

SEQ ID NO: 455488 - RNA, 16 nt, Human
ggcagauagcagaggc

SEQ ID NO: 455489 - RNA, 20 nt, Human
ggcagauagguggcuggguc

SEQ ID NO: 455490 - RNA, 32 nt, Human
ggcagauaucugagaaaugguuuaauucaugc

SEQ ID NO: 455491 - RNA, 16 nt, Human
ggcagauauugaaguu

SEQ ID NO: 455492 - RNA, 32 nt, Human
ggcagauauuuugccccauggcuauuuacggu

SEQ ID NO: 455493 - RNA, 32 nt, Human
ggcagauauuuugccccauggcuauuuacugu

SEQ ID NO: 455494 - RNA, 32 nt, Human
ggcagaucaagcaauucucuugccucagccuc

SEQ ID NO: 455495 - RNA, 32 nt, Human
ggcagaucaauaaagaaaggcuucuucaggac

SEQ ID NO: 455496 - RNA, 32 nt, Human
ggcagaucacaaggucaggagaucgagaccau

SEQ ID NO: 455497 - RNA, 32 nt, Human
ggcagaucacaugaggccaggaguucaagacc

SEQ ID NO: 455498 - RNA, 19 nt, Human
ggcagaucaccaagaaaug

SEQ ID NO: 455499 - RNA, 32 nt, Human
ggcagaucaccugaggccagaaguucgagacc

SEQ ID NO: 455500 - RNA, 32 nt, Human
ggcagaucaccugaggccaggaguucacaacc

SEQ ID NO: 455501 - RNA, 32 nt, Human
ggcagaucaccugaggccaggaguucgagacc

SEQ ID NO: 455502 - RNA, 32 nt, Human
ggcagaucaccugaggccaggcuggucucgaa

SEQ ID NO: 455503 - RNA, 18 nt, Human
ggcagaucaccugagguc

SEQ ID NO: 455504 - RNA, 32 nt, Human
ggcagaucaccugaggucagagcucgagacca

SEQ ID NO: 455505 - RNA, 18 nt, Human
ggcagaucaccugagguu

SEQ ID NO: 455506 - RNA, 18 nt, Human
ggcagaucaccugggguc

SEQ ID NO: 455507 - RNA, 18 nt, Human
ggcagaucaccuuagguc

SEQ ID NO: 455508 - RNA, 18 nt, Human
ggcagaucacgugagguc

SEQ ID NO: 455509 - RNA, 18 nt, Human
ggcagaucacuagagguc

SEQ ID NO: 455510 - RNA, 18 nt, Human
ggcagaucacuuaagguc

SEQ ID NO: 455511 - RNA, 18 nt, Human
ggcagaucacuugaaguc

SEQ ID NO: 455512 - RNA, 32 nt, Human
ggcagaucacuugaggccaauaguucgagauc

SEQ ID NO: 455513 - RNA, 32 nt, Human
ggcagaucacuugaggccaggaguucaagacc

SEQ ID NO: 455514 - RNA, 32 nt, Human
ggcagaucacuugaggccaggaguuccagacc

SEQ ID NO: 455515 - RNA, 32 nt, Human
ggcagaucacuugaggccaggaguucgagacc

SEQ ID NO: 455516 - RNA, 32 nt, Human
ggcagaucacuugaggccaggaguucugagac

SEQ ID NO: 455517 - RNA, 18 nt, Human
ggcagaucacuugagguc

SEQ ID NO: 455518 - RNA, 18 nt, Human
ggcagaucacuugagguu

SEQ ID NO: 455519 - RNA, 32 nt, Human
ggcagaucacuuggugccaggaguucuagacc

SEQ ID NO: 455520 - RNA, 32 nt, Human
ggcagaucagcuccugaacacaaugcagucac

SEQ ID NO: 455521 - RNA, 18 nt, Human
ggcagaucagcugagguc

SEQ ID NO: 455522 - RNA, 18 nt, Human
ggcagaucaguugagguc

SEQ ID NO: 455523 - RNA, 32 nt, Human
ggcagaucaucugaggccaggaguucaagacc

SEQ ID NO: 455524 - RNA, 32 nt, Human
ggcagaucaucugaggccaggaguucgagacc

SEQ ID NO: 455525 - RNA, 18 nt, Human
ggcagaucaucugagguc

SEQ ID NO: 455526 - RNA, 18 nt, Human
ggcagaucaucugggguc

SEQ ID NO: 455527 - RNA, 32 nt, Human
ggcagaucaugcaucuuugagugcaguuuggu

SEQ ID NO: 455528 - RNA, 32 nt, Human
ggcagaucauuugaggccaggaguucaagacc

SEQ ID NO: 455529 - RNA, 18 nt, Human
ggcagaucauuugagguc

SEQ ID NO: 455530 - RNA, 19 nt, Human
ggcagauccaggggcaguu

SEQ ID NO: 455531 - RNA, 32 nt, Human
ggcagauccaggguucagcuggguggccgccu

SEQ ID NO: 455532 - RNA, 32 nt, Human
ggcagaucccucugcugaauauauagcaggac

SEQ ID NO: 455533 - RNA, 32 nt, Human
ggcagauccuacagggugaccgacuccugcag

SEQ ID NO: 455534 - RNA, 18 nt, Human
ggcagaucgccugagguc

SEQ ID NO: 455535 - RNA, 21 nt, Human
ggcagaucgcuugagcccagg

SEQ ID NO: 455536 - RNA, 18 nt, Human
ggcagaucgcuugagguc

SEQ ID NO: 455537 - RNA, 32 nt, Human
ggcagaucucaaacuccaggcucagaacugug

SEQ ID NO: 455538 - RNA, 32 nt, Human
ggcagaucucaaacuccugaccucgugaugca

SEQ ID NO: 455539 - RNA, 32 nt, Human
ggcagaucucaaacuucugaccucgugaugca

SEQ ID NO: 455540 - RNA, 32 nt, Human
ggcagaucucagacuccugggcucaagcgauc

SEQ ID NO: 455541 - RNA, 19 nt, Human
ggcagaucucgcccagguc

SEQ ID NO: 455542 - RNA, 18 nt, Human
ggcagaucucuugagguc

SEQ ID NO: 455543 - RNA, 18 nt, Human
ggcagaucugcccagguc

SEQ ID NO: 455544 - RNA, 18 nt, Human
ggcagaucuucugagguc

SEQ ID NO: 455545 - RNA, 32 nt, Human
ggcagaugaacccagcaggcuuaggagguggc

SEQ ID NO: 455546 - RNA, 32 nt, Human
ggcagaugacacuuuuucccacccuuuuaaag

SEQ ID NO: 455547 - RNA, 18 nt, Human
ggcagaugacuugagguc

SEQ ID NO: 455548 - RNA, 17 nt, Human
ggcagaugaucaugguc

SEQ ID NO: 455549 - RNA, 32 nt, Human
ggcagaugauuauuacccucagaaagguugca

SEQ ID NO: 455550 - RNA, 16 nt, Human
ggcagaugcagagguc

SEQ ID NO: 455551 - RNA, 17 nt, Human
ggcagaugccugagguc

SEQ ID NO: 455552 - RNA, 17 nt, Human
ggcagaugccuguaguc

SEQ ID NO: 455553 - RNA, 32 nt, Human
ggcagaugccuguagucccagcaacucaggag

SEQ ID NO: 455554 - RNA, 19 nt, Human
ggcagaugcucuccaggcc

SEQ ID NO: 455555 - RNA, 32 nt, Human
ggcagaugcuguucugguuaaaaggcuuucca

SEQ ID NO: 455556 - RNA, 18 nt, Human
ggcagauggcaguggguc

SEQ ID NO: 455557 - RNA, 32 nt, Human
ggcagaugggagaagccaaugggaacuucuca

SEQ ID NO: 455558 - RNA, 31 nt, Human
ggcagaugggcugagauaaaagacuguuggg

SEQ ID NO: 455559 - RNA, 32 nt, Human
ggcagauggucagacccaggaggaggcauugc

SEQ ID NO: 455560 - RNA, 18 nt, Human
ggcagaugguccuagguc

SEQ ID NO: 455561 - RNA, 22 nt, Human
ggcagaugguggaaggcagcuu

SEQ ID NO: 455562 - RNA, 32 nt, Human
ggcagauguguccugaggaacaguugguaaau

SEQ ID NO: 455563 - RNA, 18 nt, Human
ggcagauuauuugagcuc

SEQ ID NO: 455564 - RNA, 32 nt, Human
ggcagauuccaaaggcuuggggcacucugggg

SEQ ID NO: 455565 - RNA, 21 nt, Human
ggcagauuccagccccaaugg

SEQ ID NO: 455566 - RNA, 32 nt, Human
ggcagauuccuuaccugucugcccucaugauu

SEQ ID NO: 455567 - RNA, 32 nt, Human
ggcagauucuggaaagccccugggcuuucuuc

SEQ ID NO: 455568 - RNA, 18 nt, Human
ggcagauugcccgagcuc

SEQ ID NO: 455569 - RNA, 18 nt, Human
ggcagauugccugagcuc

SEQ ID NO: 455570 - RNA, 21 nt, Human
ggcagauugcuugagcccagg

SEQ ID NO: 455571 - RNA, 21 nt, Human
ggcagauugcuugagcucagg

SEQ ID NO: 455572 - RNA, 21 nt, Human
ggcagauugcuugaggccagg

SEQ ID NO: 455573 - RNA, 32 nt, Human
ggcagauugcuugaggccaggaguuugagacc

SEQ ID NO: 455574 - RNA, 19 nt, Human
ggcagauugcuugauccua

SEQ ID NO: 455575 - RNA, 32 nt, Human
ggcagauuuccugucugugcuuucuuuuucca

SEQ ID NO: 455576 - RNA, 32 nt, Human
ggcagcaaaccaccauggcacauguguaccua

SEQ ID NO: 455577 - RNA, 32 nt, Human
ggcagcaacauggcaagaagguggugggccaa

SEQ ID NO: 455578 - RNA, 32 nt, Human
ggcagcaacccccaucucagccccgagccugg

SEQ ID NO: 455579 - RNA, 32 nt, Human
ggcagcaacuguccaugaagaggggaagagug

SEQ ID NO: 455580 - RNA, 32 nt, Human
ggcagcaagaaggugaggcaucagggaacggg

SEQ ID NO: 455581 - RNA, 32 nt, Human
ggcagcaagacuagagcaaaagaaaaaucugu

SEQ ID NO: 455582 - RNA, 32 nt, Human
ggcagcaagcaaucaucagagcauagagcuga

SEQ ID NO: 455583 - RNA, 32 nt, Human
ggcagcaagcggauuuucagguuguggcagcu

SEQ ID NO: 455584 - RNA, 32 nt, Human
ggcagcaagugugucauucacacacaucauuc

SEQ ID NO: 455585 - RNA, 32 nt, Human
ggcagcaaugggguuccugcagcugcuggucg

SEQ ID NO: 455586 - RNA, 32 nt, Human
ggcagcacagcccaaggaccaaaggagggggu

SEQ ID NO: 455587 - RNA, 32 nt, Human
ggcagcacagccgccugcguugagcgcccacg

SEQ ID NO: 455588 - RNA, 32 nt, Human
ggcagcacaggcaacaguucagagguaguggu

SEQ ID NO: 455589 - RNA, 32 nt, Human
ggcagcacagggccucaggccugggugccacc

SEQ ID NO: 455590 - RNA, 32 nt, Human
ggcagcaccacugccugcucccuggaagguag

SEQ ID NO: 455591 - RNA, 32 nt, Human
ggcagcaccagcagggguccaccaagagccca

SEQ ID NO: 455592 - RNA, 21 nt, Human
ggcagcaccgaggccuggcca

SEQ ID NO: 455593 - RNA, 23 nt, Human
ggcagcaccgaggccuggccaca

SEQ ID NO: 455594 - RNA, 32 nt, Human
ggcagcaccgcagccucugccccagccccggc

SEQ ID NO: 455595 - RNA, 32 nt, Human
ggcagcaccgugaacacugugcaccugucuuc

SEQ ID NO: 455596 - RNA, 32 nt, Human
ggcagcaccuccaggauacauaaauucaaugg

SEQ ID NO: 455597 - RNA, 32 nt, Human
ggcagcaccuugcccuccccaggggaucacuc

SEQ ID NO: 455598 - RNA, 32 nt, Human
ggcagcacggcacuucagccuaggugacagag

SEQ ID NO: 455599 - RNA, 23 nt, Human
ggcagcacgugggggcgugguca

SEQ ID NO: 455600 - RNA, 30 nt, Human
ggcagcacuaaaugcuuuggugguguuugc

SEQ ID NO: 455601 - RNA, 32 nt, Human
ggcagcacucgugggagccacagggcaggggc

SEQ ID NO: 455602 - RNA, 31 nt, Human
ggcagcacugccuagaauaucaugcugucuc

SEQ ID NO: 455603 - RNA, 32 nt, Human
ggcagcacuugaaaauucugcccucuacugau

SEQ ID NO: 455604 - RNA, 32 nt, Human
ggcagcagaagcuuccucugggcucagacuca

SEQ ID NO: 455605 - RNA, 32 nt, Human
ggcagcagaaguccuggagccagugccucagu

SEQ ID NO: 455606 - RNA, 21 nt, Human
ggcagcagacacacacaggga

SEQ ID NO: 455607 - RNA, 32 nt, Human
ggcagcagagauccaagugccugcugacuccc

SEQ ID NO: 455608 - RNA, 21 nt, Human
ggcagcagagcccucuccuca

SEQ ID NO: 455609 - RNA, 18 nt, Human
ggcagcagagccugggca

SEQ ID NO: 455610 - RNA, 32 nt, Human
ggcagcagagguggaguagggaggaggcaagg

SEQ ID NO: 455611 - RNA, 32 nt, Human
ggcagcagcagccuuaccaguccuccaugauc

SEQ ID NO: 455612 - RNA, 19 nt, Human
ggcagcagcccccaugguc

SEQ ID NO: 455613 - RNA, 32 nt, Human
ggcagcagccuuggaagcagggugugcuccuc

SEQ ID NO: 455614 - RNA, 32 nt, Human
ggcagcagcuagagucuguaauucucugcguc

SEQ ID NO: 455615 - RNA, 32 nt, Human
ggcagcagcucagagcgggcagcuucuuccag

SEQ ID NO: 455616 - RNA, 32 nt, Human
ggcagcagcugaggcccuguccaaagagaacu

SEQ ID NO: 455617 - RNA, 32 nt, Human
ggcagcagcugcagcuguuucacaggcugucc

SEQ ID NO: 455618 - RNA, 32 nt, Human
ggcagcagcuuagaaucaguauuugugguugg

SEQ ID NO: 455619 - RNA, 32 nt, Human
ggcagcaggaagggcacagcugucugagaccc

SEQ ID NO: 455620 - RNA, 32 nt, Human
ggcagcaggacuagcuggagagcuagaccugg

SEQ ID NO: 455621 - RNA, 32 nt, Human
ggcagcaggagcaggaggagcgugaacgagaa

SEQ ID NO: 455622 - RNA, 32 nt, Human
ggcagcaggaggcggagcucuuuugcuuggau

SEQ ID NO: 455623 - RNA, 32 nt, Human
ggcagcaggagggcagagggcagagcucuggc

SEQ ID NO: 455624 - RNA, 32 nt, Human
ggcagcaggcagcaggcgggcgcgcuguggcu

SEQ ID NO: 455625 - RNA, 32 nt, Human
ggcagcaggccucugaggguucuggaaucugu

SEQ ID NO: 455626 - RNA, 32 nt, Human
ggcagcaggccugguugcagcuggcguggggg

SEQ ID NO: 455627 - RNA, 32 nt, Human
ggcagcagggacagaaaacaacagagauacau

SEQ ID NO: 455628 - RNA, 32 nt, Human
ggcagcagggagaggaaggaggugggggagag

SEQ ID NO: 455629 - RNA, 32 nt, Human
ggcagcagggaucccuccuccuccaggggauc

SEQ ID NO: 455630 - RNA, 32 nt, Human
ggcagcagggcagaggagacuauggggagccc

SEQ ID NO: 455631 - RNA, 32 nt, Human
ggcagcagggccagugucaccugcugaccucu

SEQ ID NO: 455632 - RNA, 18 nt, Human
ggcagcagggcuauggcc

SEQ ID NO: 455633 - RNA, 32 nt, Human
ggcagcagggcucaguggaggucuggaaugac

SEQ ID NO: 455634 - RNA, 19 nt, Human
ggcagcaggggccauggcc

SEQ ID NO: 455635 - RNA, 32 nt, Human
ggcagcaggggccggcccugugcacaaggaug

SEQ ID NO: 455636 - RNA, 18 nt, Human
ggcagcagggugagggag

SEQ ID NO: 455637 - RNA, 21 nt, Human
ggcagcagguagcucuuccca

SEQ ID NO: 455638 - RNA, 32 nt, Human
ggcagcaguagacucugcaggagcuggagagg

SEQ ID NO: 455639 - RNA, 19 nt, Human
ggcagcagucagcuggggg

SEQ ID NO: 455640 - RNA, 32 nt, Human
ggcagcagugagucucggccugggcagaaaug

SEQ ID NO: 455641 - RNA, 21 nt, Human
ggcagcagugcggucgugguc

SEQ ID NO: 455642 - RNA, 32 nt, Human
ggcagcaguggccgcacaucuggauggaagcg

SEQ ID NO: 455643 - RNA, 32 nt, Human
ggcagcauccacccauucugguuaccaugcca

SEQ ID NO: 455644 - RNA, 17 nt, Human
ggcagcauuucauggcc

SEQ ID NO: 455645 - RNA, 32 nt, Human
ggcagccaaaagcagaggagcuugcaggaagg

SEQ ID NO: 455646 - RNA, 20 nt, Human
ggcagccaaacagcuggcaa

SEQ ID NO: 455647 - RNA, 22 nt, Human
ggcagccaaacugcagcuucaa

SEQ ID NO: 455648 - RNA, 32 nt, Human
ggcagccaaaugguuccagauacuucagcuuu

SEQ ID NO: 455649 - RNA, 17 nt, Human
ggcagccaacccuggcu

SEQ ID NO: 455650 - RNA, 26 nt, Human
ggcagccaacuauaaugucuuccuca

SEQ ID NO: 455651 - RNA, 18 nt, Human
ggcagccaacucccagcc

SEQ ID NO: 455652 - RNA, 20 nt, Human
ggcagccaacugcaggugcc

SEQ ID NO: 455653 - RNA, 17 nt, Human
ggcagccaacuugcgcc

SEQ ID NO: 455654 - RNA, 32 nt, Human
ggcagccaacuugcgccucuuagaaggaucag

SEQ ID NO: 455655 - RNA, 24 nt, Human
ggcagccaagaacgagcagccaag

SEQ ID NO: 455656 - RNA, 22 nt, Human
ggcagccaagggggacugcaag

SEQ ID NO: 455657 - RNA, 20 nt, Human
ggcagccaaggugaccagcc

SEQ ID NO: 455658 - RNA, 17 nt, Human
ggcagccaaguccagcc

SEQ ID NO: 455659 - RNA, 32 nt, Human
ggcagccaaguggauaaaaccuuuaggagccc

SEQ ID NO: 455660 - RNA, 17 nt, Human
ggcagccaaucuguacc

SEQ ID NO: 455661 - RNA, 17 nt, Human
ggcagccacagcagcug

SEQ ID NO: 455662 - RNA, 19 nt, Human
ggcagccaccauccuggcc

SEQ ID NO: 455663 - RNA, 32 nt, Human
ggcagccaccaugagccucagugaggagcagg

SEQ ID NO: 455664 - RNA, 32 nt, Human
ggcagccacccaagugcugaggggagcccucc

SEQ ID NO: 455665 - RNA, 32 nt, Human
ggcagccaccgccaccaccgccgccgccacca

SEQ ID NO: 455666 - RNA, 32 nt, Human
ggcagccacgggcagagcaccaugcccauccc

SEQ ID NO: 455667 - RNA, 32 nt, Human
ggcagccacucccuauugccccucucuccccu

SEQ ID NO: 455668 - RNA, 17 nt, Human
ggcagccacuccuagcc

SEQ ID NO: 455669 - RNA, 22 nt, Human
ggcagccacugagcccuuggca

SEQ ID NO: 455670 - RNA, 23 nt, Human
ggcagccacugcccuccguggcc

SEQ ID NO: 455671 - RNA, 19 nt, Human
ggcagccacuggccaggcc

SEQ ID NO: 455672 - RNA, 19 nt, Human
ggcagccagaaccauaucc

SEQ ID NO: 455673 - RNA, 32 nt, Human
ggcagccagaagccggcggcaguggcggcacc

SEQ ID NO: 455674 - RNA, 32 nt, Human
ggcagccagaagggagcucauagugucuagga

SEQ ID NO: 455675 - RNA, 16 nt, Human
ggcagccagaccagcu

SEQ ID NO: 455676 - RNA, 19 nt, Human
ggcagccagacccagagcc

SEQ ID NO: 455677 - RNA, 32 nt, Human
ggcagccagaccccugaccacccuccgaaccu

SEQ ID NO: 455678 - RNA, 32 nt, Human
ggcagccagacggacggcaggagccagccccg

SEQ ID NO: 455679 - RNA, 32 nt, Human
ggcagccagagaagccccugagagggaaugau

SEQ ID NO: 455680 - RNA, 19 nt, Human
ggcagccagagggcagcug

SEQ ID NO: 455681 - RNA, 19 nt, Human
ggcagccagauaucgggcc

SEQ ID NO: 455682 - RNA, 22 nt, Human
ggcagccagauaucgggccaua

SEQ ID NO: 455683 - RNA, 18 nt, Human
ggcagccagaugguggcu

SEQ ID NO: 455684 - RNA, 19 nt, Human
ggcagccagcaacaaagcc

SEQ ID NO: 455685 - RNA, 19 nt, Human
ggcagccagcaccaugggc

SEQ ID NO: 455686 - RNA, 17 nt, Human
ggcagccagcaccgggc

SEQ ID NO: 455687 - RNA, 18 nt, Human
ggcagccagcacugugcc

SEQ ID NO: 455688 - RNA, 18 nt, Human
ggcagccagcacuucgcc

SEQ ID NO: 455689 - RNA, 32 nt, Human
ggcagccagcacuucgccccugacuguccugc

SEQ ID NO: 455690 - RNA, 32 nt, Human
ggcagccagcagaggcagcagcacagagccac

SEQ ID NO: 455691 - RNA, 17 nt, Human
ggcagccagcagcagcu

SEQ ID NO: 455692 - RNA, 19 nt, Human
ggcagccagcaggcagguc

SEQ ID NO: 455693 - RNA, 21 nt, Human
ggcagccagcaguaccgggcc

SEQ ID NO: 455694 - RNA, 19 nt, Human
ggcagccagcaucugggcc

SEQ ID NO: 455695 - RNA, 17 nt, Human
ggcagccagccacagcc

SEQ ID NO: 455696 - RNA, 18 nt, Human
ggcagccagccacaggcu

SEQ ID NO: 455697 - RNA, 16 nt, Human
ggcagccagcccaggu

SEQ ID NO: 455698 - RNA, 17 nt, Human
ggcagccagccccuggc

SEQ ID NO: 455699 - RNA, 18 nt, Human
ggcagccagcccucaagc

SEQ ID NO: 455700 - RNA, 23 nt, Human
ggcagccagcccuggcuuccaag

SEQ ID NO: 455701 - RNA, 19 nt, Human
ggcagccagccucccacgg

SEQ ID NO: 455702 - RNA, 20 nt, Human
ggcagccagccucuguuucu

SEQ ID NO: 455703 - RNA, 18 nt, Human
ggcagccagccugccgcc

SEQ ID NO: 455704 - RNA, 18 nt, Human
ggcagccagccugccggc

SEQ ID NO: 455705 - RNA, 18 nt, Human
ggcagccagcuacaggcu

SEQ ID NO: 455706 - RNA, 19 nt, Human
ggcagccagcucugucucc

SEQ ID NO: 455707 - RNA, 32 nt, Human
ggcagccagcugagaagaguugagggaaagug

SEQ ID NO: 455708 - RNA, 19 nt, Human
ggcagccagcugcagggcc

SEQ ID NO: 455709 - RNA, 19 nt, Human
ggcagccagcuucuacgcu

SEQ ID NO: 455710 - RNA, 19 nt, Human
ggcagccagcuucuuaguu

SEQ ID NO: 455711 - RNA, 18 nt, Human
ggcagccagcuuugggcu

SEQ ID NO: 455712 - RNA, 25 nt, Human
ggcagccaggacccacccaugggga

SEQ ID NO: 455713 - RNA, 21 nt, Human
ggcagccaggacggcaccaag

SEQ ID NO: 455714 - RNA, 18 nt, Human
ggcagccaggagccagcu

SEQ ID NO: 455715 - RNA, 20 nt, Human
ggcagccaggaguccugacc

SEQ ID NO: 455716 - RNA, 20 nt, Human
ggcagccaggaucccugacc

SEQ ID NO: 455717 - RNA, 19 nt, Human
ggcagccaggauucuggcc

SEQ ID NO: 455718 - RNA, 32 nt, Human
ggcagccaggcaggcccgggugguggugccag

SEQ ID NO: 455719 - RNA, 17 nt, Human
ggcagccaggccaggcc

SEQ ID NO: 455720 - RNA, 17 nt, Human
ggcagccaggcccagcc

SEQ ID NO: 455721 - RNA, 17 nt, Human
ggcagccaggcugggcc

SEQ ID NO: 455722 - RNA, 18 nt, Human
ggcagccagggcagggcc

SEQ ID NO: 455723 - RNA, 17 nt, Human
ggcagccagguaaggcc

SEQ ID NO: 455724 - RNA, 19 nt, Human
ggcagccaggucccaggcc

SEQ ID NO: 455725 - RNA, 32 nt, Human
ggcagccagguggcucaugggcuguagugagc

SEQ ID NO: 455726 - RNA, 18 nt, Human
ggcagccaguuaccagcu

SEQ ID NO: 455727 - RNA, 21 nt, Human
ggcagccaguuggugagggcc

SEQ ID NO: 455728 - RNA, 32 nt, Human
ggcagccauaauaagagucuucagagagauga

SEQ ID NO: 455729 - RNA, 32 nt, Human
ggcagccauccugggaaugucugcaagggucu

SEQ ID NO: 455730 - RNA, 18 nt, Human
ggcagccaucuacaagcc

SEQ ID NO: 455731 - RNA, 18 nt, Human
ggcagccauggccauggc

SEQ ID NO: 455732 - RNA, 19 nt, Human
ggcagccauggccugaagu

SEQ ID NO: 455733 - RNA, 32 nt, Human
ggcagccauggugcgguucaagcacagguacc

SEQ ID NO: 455734 - RNA, 32 nt, Human
ggcagccauucaaggaaaacccagcccuggcu

SEQ ID NO: 455735 - RNA, 32 nt, Human
ggcagcccaagagcucagggagccagggaccc

SEQ ID NO: 455736 - RNA, 20 nt, Human
ggcagcccagcccuggccgc

SEQ ID NO: 455737 - RNA, 32 nt, Human
ggcagcccagccgccgccaccgcgccgcggcc

SEQ ID NO: 455738 - RNA, 32 nt, Human
ggcagcccagcuucgcgaaggcuguaggcaca

SEQ ID NO: 455739 - RNA, 17 nt, Human
ggcagcccaucguggcc

SEQ ID NO: 455740 - RNA, 32 nt, Human
ggcagccccagagggaucccgcccuccagcau

SEQ ID NO: 455741 - RNA, 32 nt, Human
ggcagccccagcaccaccaggucucccgggaa

SEQ ID NO: 455742 - RNA, 21 nt, Human
ggcagcccccacccccacccc

SEQ ID NO: 455743 - RNA, 32 nt, Human
ggcagcccccagcccccugaggcccuguccau

SEQ ID NO: 455744 - RNA, 32 nt, Human
ggcagcccccaucugcucaauaucacugcucu

SEQ ID NO: 455745 - RNA, 32 nt, Human
ggcagcccccuucauugcaccuaucuccccca

SEQ ID NO: 455746 - RNA, 21 nt, Human
ggcagccccgcgaccaccccu

SEQ ID NO: 455747 - RNA, 23 nt, Human
ggcagccccggagcccagcggcc

SEQ ID NO: 455748 - RNA, 32 nt, Human
ggcagccccggcugcacucuagccgccugggu

SEQ ID NO: 455749 - RNA, 19 nt, Human
ggcagccccggucccggcg

SEQ ID NO: 455750 - RNA, 23 nt, Human
ggcagccccgugcucccguggcc

SEQ ID NO: 455751 - RNA, 32 nt, Human
ggcagccccucaggccccacagguggguccug

SEQ ID NO: 455752 - RNA, 21 nt, Human
ggcagccccuccacacccacc

SEQ ID NO: 455753 - RNA, 21 nt, Human
ggcagccccucccacgacccc

SEQ ID NO: 455754 - RNA, 24 nt, Human
ggcagccccucccagccugccccu

SEQ ID NO: 455755 - RNA, 32 nt, Human
ggcagccccucccagccugccccuucugcgcu

SEQ ID NO: 455756 - RNA, 23 nt, Human
ggcagccccucgucaccuacucc

SEQ ID NO: 455757 - RNA, 32 nt, Human
ggcagccccucuggcccugccagcugccugcg

SEQ ID NO: 455758 - RNA, 32 nt, Human
ggcagccccugcccacucccaugcugguggcc

SEQ ID NO: 455759 - RNA, 32 nt, Human
ggcagccccugcccucggugagacgcagccca

SEQ ID NO: 455760 - RNA, 32 nt, Human
ggcagccccuggccugcacacuacucaugaca

SEQ ID NO: 455761 - RNA, 32 nt, Human
ggcagccccuggguagcuucaggauggggcug

SEQ ID NO: 455762 - RNA, 22 nt, Human
ggcagccccuucugcccacccc

SEQ ID NO: 455763 - RNA, 17 nt, Human
ggcagccccuucuggcc

SEQ ID NO: 455764 - RNA, 32 nt, Human
ggcagccccuugccagcauccccacacccacc

SEQ ID NO: 455765 - RNA, 32 nt, Human
ggcagcccgccucucccccugcugagacuuua

SEQ ID NO: 455766 - RNA, 32 nt, Human
ggcagcccuagccucugcuggcuaucgggaca

SEQ ID NO: 455767 - RNA, 23 nt, Human
ggcagcccucacuuuucauggcc

SEQ ID NO: 455768 - RNA, 17 nt, Human
ggcagcccuccaugguc

SEQ ID NO: 455769 - RNA, 32 nt, Human
ggcagcccucccccuuuccuucucucccugau

SEQ ID NO: 455770 - RNA, 32 nt, Human
ggcagcccuccccgccccucuccuucaaggag

SEQ ID NO: 455771 - RNA, 23 nt, Human
ggcagcccucucaccccagggcc

SEQ ID NO: 455772 - RNA, 21 nt, Human
ggcagcccuggagcccacccu

SEQ ID NO: 455773 - RNA, 32 nt, Human
ggcagcccugggcagucuucuggccccuugcu

SEQ ID NO: 455774 - RNA, 32 nt, Human
ggcagcccugguagcaggcggggaagaggucg

SEQ ID NO: 455775 - RNA, 32 nt, Human
ggcagcccuguaucaccccuggcagugaggug

SEQ ID NO: 455776 - RNA, 32 nt, Human
ggcagcccuucuuuguccucugggguaaauga

SEQ ID NO: 455777 - RNA, 18 nt, Human
ggcagcccuuuccaugcc

SEQ ID NO: 455778 - RNA, 18 nt, Human
ggcagccgaggccuggcc

SEQ ID NO: 455779 - RNA, 18 nt, Human
ggcagccgccaccaggcc

SEQ ID NO: 455780 - RNA, 17 nt, Human
ggcagccgcccgcagcc

SEQ ID NO: 455781 - RNA, 17 nt, Human
ggcagccgcccucggcc

SEQ ID NO: 455782 - RNA, 32 nt, Human
ggcagccgcgagguggacggggcgguggggcc

SEQ ID NO: 455783 - RNA, 32 nt, Human
ggcagccgcgcguccuggaauauggggucgcu

SEQ ID NO: 455784 - RNA, 20 nt, Human
ggcagccgcggaucccggcc

SEQ ID NO: 455785 - RNA, 18 nt, Human
ggcagccggaacagggcc

SEQ ID NO: 455786 - RNA, 32 nt, Human
ggcagccggaagcagcugggcccacacaccuc

SEQ ID NO: 455787 - RNA, 18 nt, Human
ggcagccggagcgcggcc

SEQ ID NO: 455788 - RNA, 32 nt, Human
ggcagccggagggagugagagccaccccgugc

SEQ ID NO: 455789 - RNA, 18 nt, Human
ggcagccggaucgcagcc

SEQ ID NO: 455790 - RNA, 18 nt, Human
ggcagccggcacccagcc

SEQ ID NO: 455791 - RNA, 17 nt, Human
ggcagccggcaguggcc

SEQ ID NO: 455792 - RNA, 17 nt, Human
ggcagccggccaaggcc

SEQ ID NO: 455793 - RNA, 20 nt, Human
ggcagccgggccccagggcc

SEQ ID NO: 455794 - RNA, 32 nt, Human
ggcagccggggacagaagagaccccgccguug

SEQ ID NO: 455795 - RNA, 32 nt, Human
ggcagccggggcagccauugguggugucaaga

SEQ ID NO: 455796 - RNA, 17 nt, Human
ggcagccggggcauggc

SEQ ID NO: 455797 - RNA, 19 nt, Human
ggcagccgugcaccugacc

SEQ ID NO: 455798 - RNA, 32 nt, Human
ggcagccucagcaaucaaacuauucccucacu

SEQ ID NO: 455799 - RNA, 32 nt, Human
ggcagccucagcucugugccccucacccugcu

SEQ ID NO: 455800 - RNA, 32 nt, Human
ggcagccuccacccuuucucuaugccugcaac

SEQ ID NO: 455801 - RNA, 32 nt, Human
ggcagccuccacucugggagcucccaucccuc

SEQ ID NO: 455802 - RNA, 20 nt, Human
ggcagccuccugcccaggcc

SEQ ID NO: 455803 - RNA, 32 nt, Human
ggcagccuccugccugcccuggccuugcuggg

SEQ ID NO: 455804 - RNA, 32 nt, Human
ggcagccuccuucccuguucaugagaauucuu

SEQ ID NO: 455805 - RNA, 17 nt, Human
ggcagccucuccauggc

SEQ ID NO: 455806 - RNA, 19 nt, Human
ggcagccucucccauggcc

SEQ ID NO: 455807 - RNA, 32 nt, Human
ggcagccucucuuauuugguucuugggcugcu

SEQ ID NO: 455808 - RNA, 32 nt, Human
ggcagccugagccccagcccacaugccacuca

SEQ ID NO: 455809 - RNA, 32 nt, Human
ggcagccugcagcaacuggaacaaggccccac

SEQ ID NO: 455810 - RNA, 32 nt, Human
ggcagccugcagcugcccacccaaccuggucu

SEQ ID NO: 455811 - RNA, 19 nt, Human
ggcagccugcagggcagcu

SEQ ID NO: 455812 - RNA, 32 nt, Human
ggcagccugccuggcccgcacagucugccugu

SEQ ID NO: 455813 - RNA, 32 nt, Human
ggcagccuggaaaguugugucuucugggaaag

SEQ ID NO: 455814 - RNA, 32 nt, Human
ggcagccuggacaacaugaccugcauccuggu

SEQ ID NO: 455815 - RNA, 32 nt, Human
ggcagccugggaguuggacguggcucaggcag

SEQ ID NO: 455816 - RNA, 32 nt, Human
ggcagccugguucggggcagguugugaggcca

SEQ ID NO: 455817 - RNA, 32 nt, Human
ggcagccuguugguccacaccuacuugcucag

SEQ ID NO: 455818 - RNA, 23 nt, Human
ggcagccuucgaaguccugggca

SEQ ID NO: 455819 - RNA, 32 nt, Human
ggcagccuucgaaguccugggcauugggugag

SEQ ID NO: 455820 - RNA, 18 nt, Human
ggcagccuucucucauag

SEQ ID NO: 455821 - RNA, 32 nt, Human
ggcagccuugaagacaccacaggccaaaacau

SEQ ID NO: 455822 - RNA, 18 nt, Human
ggcagccuugcccuggag

SEQ ID NO: 455823 - RNA, 20 nt, Human
ggcagccuuggccuccagca

SEQ ID NO: 455824 - RNA, 19 nt, Human
ggcagccuuuuccauggcc

SEQ ID NO: 455825 - RNA, 19 nt, Human
ggcagcgaaacuuuuccca

SEQ ID NO: 455826 - RNA, 32 nt, Human
ggcagcgaccuccagggccuccuaccugcuga

SEQ ID NO: 455827 - RNA, 32 nt, Human
ggcagcgagaggagaccaggaggcuaggaccc

SEQ ID NO: 455828 - RNA, 22 nt, Human
ggcagcgagaggagcuucccca

SEQ ID NO: 455829 - RNA, 32 nt, Human
ggcagcgagagucacagacaagacagcaagca

SEQ ID NO: 455830 - RNA, 20 nt, Human
ggcagcgaggaggagccaca

SEQ ID NO: 455831 - RNA, 32 nt, Human
ggcagcgauggaaauuucagcucuacuuuuuc

SEQ ID NO: 455832 - RNA, 17 nt, Human
ggcagcgcagccaggcc

SEQ ID NO: 455833 - RNA, 25 nt, Human
ggcagcgcaggaaacgcccggccgc

SEQ ID NO: 455834 - RNA, 19 nt, Human
ggcagcgcauggggggcug

SEQ ID NO: 455835 - RNA, 32 nt, Human
ggcagcgcccccaggauugaacguggggagcc

SEQ ID NO: 455836 - RNA, 20 nt, Human
ggcagcgcccgaaggccugg

SEQ ID NO: 455837 - RNA, 16 nt, Human
ggcagcgcccgcgccc

SEQ ID NO: 455838 - RNA, 23 nt, Human
ggcagcgcccuucguccaggcuc

SEQ ID NO: 455839 - RNA, 32 nt, Human
ggcagcgccgggugccuguccugcugccuuuc

SEQ ID NO: 455840 - RNA, 32 nt, Human
ggcagcgcggccggggcccaggaaggggaggg

SEQ ID NO: 455841 - RNA, 32 nt, Human
ggcagcgcugcacuugccaugcuggaaaccag

SEQ ID NO: 455842 - RNA, 21 nt, Human
ggcagcgcugcuccaucagcc

SEQ ID NO: 455843 - RNA, 32 nt, Human
ggcagcgcuuccucuggcagggccgaggcucg

SEQ ID NO: 455844 - RNA, 32 nt, Human
ggcagcggaagaugguguugcugagaguguua

SEQ ID NO: 455845 - RNA, 32 nt, Human
ggcagcggaggcagcggcggcagcaggagacg

SEQ ID NO: 455846 - RNA, 24 nt, Human
ggcagcggaggcugcucggccgca

SEQ ID NO: 455847 - RNA, 19 nt, Human
ggcagcggagggucucccc

SEQ ID NO: 455848 - RNA, 32 nt, Human
ggcagcggcaccauccucacaccucugcauuc

SEQ ID NO: 455849 - RNA, 19 nt, Human
ggcagcggcagccguggcc

SEQ ID NO: 455850 - RNA, 21 nt, Human
ggcagcggcagcggcagcgga

SEQ ID NO: 455851 - RNA, 19 nt, Human
ggcagcggccaccauggcc

SEQ ID NO: 455852 - RNA, 32 nt, Human
ggcagcggccccggaggaagaggaagaaggga

SEQ ID NO: 455853 - RNA, 32 nt, Human
ggcagcggcgccgcagccugggcuggcggaac

SEQ ID NO: 455854 - RNA, 32 nt, Human
ggcagcggcgcugcgccuccucaguguucugc

SEQ ID NO: 455855 - RNA, 18 nt, Human
ggcagcggcggcagcgga

SEQ ID NO: 455856 - RNA, 32 nt, Human
ggcagcggcggcggcgugccugccuggcggcc

SEQ ID NO: 455857 - RNA, 32 nt, Human
ggcagcggcggcgguugccaggagcccgcguu

SEQ ID NO: 455858 - RNA, 20 nt, Human
ggcagcggcugcagaggggc

SEQ ID NO: 455859 - RNA, 32 nt, Human
ggcagcggcugcagaggggcgagccgggcgca

SEQ ID NO: 455860 - RNA, 32 nt, Human
ggcagcggcuggaagaagaguugcugucugug

SEQ ID NO: 455861 - RNA, 32 nt, Human
ggcagcgggcccagccugagcaauggcaggau

SEQ ID NO: 455862 - RNA, 19 nt, Human
ggcagcgggccucucccca

SEQ ID NO: 455863 - RNA, 32 nt, Human
ggcagcggggauagacagggaauggggagaag

SEQ ID NO: 455864 - RNA, 17 nt, Human
ggcagcggguggggcgc

SEQ ID NO: 455865 - RNA, 21 nt, Human
ggcagcguaagcgccauggcc

SEQ ID NO: 455866 - RNA, 24 nt, Human
ggcagcguaagcgccauggccaua

SEQ ID NO: 455867 - RNA, 32 nt, Human
ggcagcgucuagggguggauguuuacagcucc

SEQ ID NO: 455868 - RNA, 32 nt, Human
ggcagcgugcacacucggauuugcuacguuuc

SEQ ID NO: 455869 - RNA, 20 nt, Human
ggcagcgugugccugugguc

SEQ ID NO: 455870 - RNA, 19 nt, Human
ggcagcguuagggcugcuu

SEQ ID NO: 455871 - RNA, 32 nt, Human
ggcagcguucagggaugcaaggggcagagcgg

SEQ ID NO: 455872 - RNA, 32 nt, Human
ggcagcguuuugcucacacagcagcuuuugca

SEQ ID NO: 455873 - RNA, 32 nt, Human
ggcagcuaaacccauagaaggaguuggaccaa

SEQ ID NO: 455874 - RNA, 32 nt, Human
ggcagcuaagaagucuuaggcagcagcccaga

SEQ ID NO: 455875 - RNA, 32 nt, Human
ggcagcuaaugcucucaccgcggcgggggaag

SEQ ID NO: 455876 - RNA, 32 nt, Human
ggcagcuaauuggccccagugccaucuugccc

SEQ ID NO: 455877 - RNA, 20 nt, Human
ggcagcuacauuccuuggcc

SEQ ID NO: 455878 - RNA, 20 nt, Human
ggcagcuacugcccagggcc

SEQ ID NO: 455879 - RNA, 32 nt, Human
ggcagcuagccuggccaguggcugucccgugg

SEQ ID NO: 455880 - RNA, 32 nt, Human
ggcagcuaggccugaauagagcugugcagccc

SEQ ID NO: 455881 - RNA, 19 nt, Human
ggcagcuauaugccaugga

SEQ ID NO: 455882 - RNA, 32 nt, Human
ggcagcucacagugaggguccuggaggcgcgg

SEQ ID NO: 455883 - RNA, 18 nt, Human
ggcagcucaccugagguc

SEQ ID NO: 455884 - RNA, 32 nt, Human
ggcagcucacuggagagccuacauuccuuaca

SEQ ID NO: 455885 - RNA, 32 nt, Human
ggcagcucagaauuauucuggaaagaaagccu

SEQ ID NO: 455886 - RNA, 32 nt, Human
ggcagcucagcuuuccugaguccugacugcug

SEQ ID NO: 455887 - RNA, 18 nt, Human
ggcagcucaggcccggca

SEQ ID NO: 455888 - RNA, 23 nt, Human
ggcagcucaugacuguaauccca

SEQ ID NO: 455889 - RNA, 32 nt, Human
ggcagcucauuuccucaaauucuguccucagu

SEQ ID NO: 455890 - RNA, 32 nt, Human
ggcagcuccaacccaacucggcuuaacuccgc

SEQ ID NO: 455891 - RNA, 32 nt, Human
ggcagcuccagccugggggacaggugacccca

SEQ ID NO: 455892 - RNA, 32 nt, Human
ggcagcucccagaccggagaggaccuuggacc

SEQ ID NO: 455893 - RNA, 19 nt, Human
ggcagcucccagccugcug

SEQ ID NO: 455894 - RNA, 32 nt, Human
ggcagcuccccuggaagaagcugauggaauuc

SEQ ID NO: 455895 - RNA, 32 nt, Human
ggcagcucccugcuuuguccugcaugaacaga

SEQ ID NO: 455896 - RNA, 21 nt, Human
ggcagcuccguccccauggcc

SEQ ID NO: 455897 - RNA, 32 nt, Human
ggcagcuccuccucauccccugccuuaagucc

SEQ ID NO: 455898 - RNA, 32 nt, Human
ggcagcuccuggaagcuccaccaggacccacg

SEQ ID NO: 455899 - RNA, 32 nt, Human
ggcagcucgaaggagauggaucuguuucucag

SEQ ID NO: 455900 - RNA, 32 nt, Human
ggcagcucgcccagacuccgggcagugagagg

SEQ ID NO: 455901 - RNA, 32 nt, Human
ggcagcucggaaggcagaugcacuucuacaga

SEQ ID NO: 455902 - RNA, 32 nt, Human
ggcagcucgguaacugacaucagcaacuuuug

SEQ ID NO: 455903 - RNA, 32 nt, Human
ggcagcucuccccucacucuccuccaccugcc

SEQ ID NO: 455904 - RNA, 32 nt, Human
ggcagcucuccucauuuuccccaaaacaggga

SEQ ID NO: 455905 - RNA, 19 nt, Human
ggcagcucugccuguggga

SEQ ID NO: 455906 - RNA, 32 nt, Human
ggcagcucugcucugugccguccugugccugu

SEQ ID NO: 455907 - RNA, 32 nt, Human
ggcagcucuggacugacugcaggugaugucca

SEQ ID NO: 455908 - RNA, 32 nt, Human
ggcagcucuggcugcaacccgcuggcucggaa

SEQ ID NO: 455909 - RNA, 32 nt, Human
ggcagcucugggagagaaaggaggccagccug

SEQ ID NO: 455910 - RNA, 24 nt, Human
ggcagcucuguccccuccugcucu

SEQ ID NO: 455911 - RNA, 21 nt, Human
ggcagcucugugcccuuggcc

SEQ ID NO: 455912 - RNA, 32 nt, Human
ggcagcucugugggggcucugcuacugcuggc

SEQ ID NO: 455913 - RNA, 32 nt, Human
ggcagcucuugaguuaugcacugugaagaaug

SEQ ID NO: 455914 - RNA, 32 nt, Human
ggcagcugaagccuugagauccugggccagcu

SEQ ID NO: 455915 - RNA, 32 nt, Human
ggcagcugacacagcagaccuugaauccugag

SEQ ID NO: 455916 - RNA, 20 nt, Human
ggcagcugacgaggcagcug

SEQ ID NO: 455917 - RNA, 18 nt, Human
ggcagcugagcccuggcc

SEQ ID NO: 455918 - RNA, 32 nt, Human
ggcagcugagucugcagguggagaggugcagg

SEQ ID NO: 455919 - RNA, 18 nt, Human
ggcagcugauuccaggcc

SEQ ID NO: 455920 - RNA, 21 nt, Human
ggcagcugcacauccacggcc

SEQ ID NO: 455921 - RNA, 18 nt, Human
ggcagcugcaccacugcc

SEQ ID NO: 455922 - RNA, 32 nt, Human
ggcagcugcacggcuccuggccccggagcaug

SEQ ID NO: 455923 - RNA, 32 nt, Human
ggcagcugcagagaggcccugccugaacccac

SEQ ID NO: 455924 - RNA, 18 nt, Human
ggcagcugcaggccacag

SEQ ID NO: 455925 - RNA, 32 nt, Human
ggcagcugcagguacccccagcacuuuagccc

SEQ ID NO: 455926 - RNA, 32 nt, Human
ggcagcugcaguggcuucuccuuucccaggcu

SEQ ID NO: 455927 - RNA, 32 nt, Human
ggcagcugcaugcucccucucuccagaccagc

SEQ ID NO: 455928 - RNA, 17 nt, Human
ggcagcugccacaggcc

SEQ ID NO: 455929 - RNA, 17 nt, Human
ggcagcugccccaggcc

SEQ ID NO: 455930 - RNA, 22 nt, Human
ggcagcugccguccucauggcc

SEQ ID NO: 455931 - RNA, 32 nt, Human
ggcagcugcggggagcccggcagccacgcucu

SEQ ID NO: 455932 - RNA, 32 nt, Human
ggcagcugcuaccucgcugggacaggcucugg

SEQ ID NO: 455933 - RNA, 32 nt, Human
ggcagcugcuaccucucccucugccccuuuau

SEQ ID NO: 455934 - RNA, 32 nt, Human
ggcagcugcuccaugcagaacugaagcugguu

SEQ ID NO: 455935 - RNA, 19 nt, Human
ggcagcugcucccuuggca

SEQ ID NO: 455936 - RNA, 19 nt, Human
ggcagcugcugccagagcc

SEQ ID NO: 455937 - RNA, 21 nt, Human
ggcagcugcugcuggggcagc

SEQ ID NO: 455938 - RNA, 19 nt, Human
ggcagcugcuggccaugga

SEQ ID NO: 455939 - RNA, 17 nt, Human
ggcagcugcuugagguc

SEQ ID NO: 455940 - RNA, 32 nt, Human
ggcagcugcuugugggagagcugaggucuaga

SEQ ID NO: 455941 - RNA, 19 nt, Human
ggcagcuggaagccucccc

SEQ ID NO: 455942 - RNA, 32 nt, Human
ggcagcuggagcagcaagaugcugucgagacc

SEQ ID NO: 455943 - RNA, 32 nt, Human
ggcagcuggaggagcugggacggcggcaugag

SEQ ID NO: 455944 - RNA, 32 nt, Human
ggcagcuggagugggagaaagguggcucggac

SEQ ID NO: 455945 - RNA, 32 nt, Human
ggcagcuggauccacguggaaaacacgccacc

SEQ ID NO: 455946 - RNA, 32 nt, Human
ggcagcuggcauggucagguaacacuaguggc

SEQ ID NO: 455947 - RNA, 32 nt, Human
ggcagcuggcucuucugcugaccucagauacc

SEQ ID NO: 455948 - RNA, 19 nt, Human
ggcagcugggaccauggcc

SEQ ID NO: 455949 - RNA, 32 nt, Human
ggcagcugggauuacaggugcacaccaccaug

SEQ ID NO: 455950 - RNA, 32 nt, Human
ggcagcugggcugaggacuggaacauucugug

SEQ ID NO: 455951 - RNA, 32 nt, Human
ggcagcuggggaggggcugcggaaggaggagg

SEQ ID NO: 455952 - RNA, 32 nt, Human
ggcagcuggggcccuggugcacagggccagau

SEQ ID NO: 455953 - RNA, 32 nt, Human
ggcagcuggguccugggcuggaggacuaaaau

SEQ ID NO: 455954 - RNA, 32 nt, Human
ggcagcugguguuucgcuccuggagugugccu

SEQ ID NO: 455955 - RNA, 18 nt, Human
ggcagcuguagccuggcc

SEQ ID NO: 455956 - RNA, 32 nt, Human
ggcagcugugaagaaaguucccaauagugagg

SEQ ID NO: 455957 - RNA, 19 nt, Human
ggcagcugugccccuggcc

SEQ ID NO: 455958 - RNA, 32 nt, Human
ggcagcugugccugcccugccucugccugagg

SEQ ID NO: 455959 - RNA, 20 nt, Human
ggcagcugugcuccucggcc

SEQ ID NO: 455960 - RNA, 17 nt, Human
ggcagcuuccacaccca

SEQ ID NO: 455961 - RNA, 32 nt, Human
ggcagcuuccagccugggggcuggugaccaca

SEQ ID NO: 455962 - RNA, 32 nt, Human
ggcagcuucccgggcagacacucucucccuca

SEQ ID NO: 455963 - RNA, 32 nt, Human
ggcagcuucccugaacacucaucccccaucag

SEQ ID NO: 455964 - RNA, 32 nt, Human
ggcagcuucucaggucagccuccuccgggccu

SEQ ID NO: 455965 - RNA, 32 nt, Human
ggcagcuucuccuccagacuccuagccccgag

SEQ ID NO: 455966 - RNA, 32 nt, Human
ggcagcuucugacacaccagccccaggaccug

SEQ ID NO: 455967 - RNA, 32 nt, Human
ggcagcuucugccucuccugucaccccugccc

SEQ ID NO: 455968 - RNA, 32 nt, Human
ggcagcuucugccugggaugggccacaaagcc

SEQ ID NO: 455969 - RNA, 32 nt, Human
ggcagcuucuguccucacccuacccugcucuc

SEQ ID NO: 455970 - RNA, 32 nt, Human
ggcagcuucuuucugcccucaggagccuuguu

SEQ ID NO: 455971 - RNA, 32 nt, Human
ggcagcuugccacccccuccucucccuucacc

SEQ ID NO: 455972 - RNA, 32 nt, Human
ggcagcuuuccacagaauuugcauuuagagga

SEQ ID NO: 455973 - RNA, 32 nt, Human
ggcagcuuucuuuggggcuucagugagaacuc

SEQ ID NO: 455974 - RNA, 30 nt, Human
ggcagcuuugaaugcaguccaacagaaauu

SEQ ID NO: 455975 - RNA, 32 nt, Human
ggcagcuuugaaugcaguccaacagaaauuaa

SEQ ID NO: 455976 - RNA, 32 nt, Human
ggcagcuuugaggacaaaaaggcaacauuaaa

SEQ ID NO: 455977 - RNA, 32 nt, Human
ggcagcuuugcagccccugccccaccagcccc

SEQ ID NO: 455978 - RNA, 32 nt, Human
ggcagcuuuucugcuuuuucccuuccucugug

SEQ ID NO: 455979 - RNA, 32 nt, Human
ggcaggaaaccagguuucgccuauuccacugu

SEQ ID NO: 455980 - RNA, 32 nt, Human
ggcaggaaagacagaggaaggaaggagggaga

SEQ ID NO: 455981 - RNA, 32 nt, Human
ggcaggaaaguuggggaccaggccuguugucu

SEQ ID NO: 455982 - RNA, 32 nt, Human
ggcaggaacagagagacagagccugaguaauu

SEQ ID NO: 455983 - RNA, 32 nt, Human
ggcaggaacaugcuccccaagucacagucugc

SEQ ID NO: 455984 - RNA, 32 nt, Human
ggcaggaacuccaagugcccaggccucuuggg

SEQ ID NO: 455985 - RNA, 32 nt, Human
ggcaggaagaaaggaaggaaggaaagaaggaa

SEQ ID NO: 455986 - RNA, 32 nt, Human
ggcaggaagaggagcagaaaagaagggcuggg

SEQ ID NO: 455987 - RNA, 18 nt, Human
ggcaggaagccuauggcc

SEQ ID NO: 455988 - RNA, 32 nt, Human
ggcaggaaggaggcagagcuguccgugggagg

SEQ ID NO: 455989 - RNA, 19 nt, Human
ggcaggaaggaggggcagc

SEQ ID NO: 455990 - RNA, 32 nt, Human
ggcaggaaggcccuguccagccacucagccug

SEQ ID NO: 455991 - RNA, 18 nt, Human
ggcaggaaggcugagagg

SEQ ID NO: 455992 - RNA, 18 nt, Human
ggcaggaagggugggguc

SEQ ID NO: 455993 - RNA, 32 nt, Human
ggcaggaaggguuccagggccacccagugugg

SEQ ID NO: 455994 - RNA, 32 nt, Human
ggcaggaauaagaagucagacagagacagcaa

SEQ ID NO: 455995 - RNA, 32 nt, Human
ggcaggaaugacaggagaugagcuugagggac

SEQ ID NO: 455996 - RNA, 32 nt, Human
ggcaggaaugugccuccuggcccucgaugcuu

SEQ ID NO: 455997 - RNA, 32 nt, Human
ggcaggacacagagcacagcugugcuggaagu

SEQ ID NO: 455998 - RNA, 32 nt, Human
ggcaggacagagggaaggcaaaaagaagaagc

SEQ ID NO: 455999 - RNA, 32 nt, Human
ggcaggacagcagaggaugugcugggauuaaa

SEQ ID NO: 456000 - RNA, 32 nt, Human
ggcaggacaggcggggguggucuggagugcgc

SEQ ID NO: 456001 - RNA, 17 nt, Human
ggcaggacaugagaguc

SEQ ID NO: 456002 - RNA, 23 nt, Human
ggcaggaccaaggagucgggagg

SEQ ID NO: 456003 - RNA, 32 nt, Human
ggcaggaccagaggcccacauggaugccacuc

SEQ ID NO: 456004 - RNA, 20 nt, Human
ggcaggaccaggucaggagg

SEQ ID NO: 456005 - RNA, 32 nt, Human
ggcaggaccauccgaacagauccucaaagcug

SEQ ID NO: 456006 - RNA, 18 nt, Human
ggcaggaccccagagagg

SEQ ID NO: 456007 - RNA, 17 nt, Human
ggcaggaccccauggcc

SEQ ID NO: 456008 - RNA, 32 nt, Human
ggcaggaccgccacccucccaugcaaaucacc

SEQ ID NO: 456009 - RNA, 32 nt, Human
ggcaggaccugggcccucccacccaucagagc

SEQ ID NO: 456010 - RNA, 17 nt, Human
ggcaggacucugagguu

SEQ ID NO: 456011 - RNA, 32 nt, Human
ggcaggacuggaagcuggcucugggugaguca

SEQ ID NO: 456012 - RNA, 21 nt, Human
ggcaggacugggagccggagg

SEQ ID NO: 456013 - RNA, 32 nt, Human
ggcaggacugggagguggcggcagcgggcgag

SEQ ID NO: 456014 - RNA, 32 nt, Human
ggcaggagaacugaagaacucuuucagugaag

SEQ ID NO: 456015 - RNA, 28 nt, Human
ggcaggagaaucacaucaaccugggagg

SEQ ID NO: 456016 - RNA, 32 nt, Human
ggcaggagaaucagagguugcagugaaccgag

SEQ ID NO: 456017 - RNA, 20 nt, Human
ggcaggagaaucgcuagaac

SEQ ID NO: 456018 - RNA, 20 nt, Human
ggcaggagaaucguuugaac

SEQ ID NO: 456019 - RNA, 32 nt, Human
ggcaggagaaucucgggaggcagagguugcag

SEQ ID NO: 456020 - RNA, 20 nt, Human
ggcaggagaauugcuugaac

SEQ ID NO: 456021 - RNA, 32 nt, Human
ggcaggagagagggaaaaagaaaagaaggaac

SEQ ID NO: 456022 - RNA, 32 nt, Human
ggcaggagaggaaggaaagcagcucucucagc

SEQ ID NO: 456023 - RNA, 32 nt, Human
ggcaggagagugagcuuugccgcggcagacgc

SEQ ID NO: 456024 - RNA, 32 nt, Human
ggcaggagagugcuugaacccaggaggcggag

SEQ ID NO: 456025 - RNA, 32 nt, Human
ggcaggagauagacucuggcccuuguuucuag

SEQ ID NO: 456026 - RNA, 32 nt, Human
ggcaggagauggcaauggaagcgacagcuccc

SEQ ID NO: 456027 - RNA, 32 nt, Human
ggcaggagcaaaccacaggaaggcuucauaau

SEQ ID NO: 456028 - RNA, 32 nt, Human
ggcaggagcaaggagagagggaagaaggaccc

SEQ ID NO: 456029 - RNA, 32 nt, Human
ggcaggagcaagggaggaagccaggggcgagg

SEQ ID NO: 456030 - RNA, 31 nt, Human
ggcaggagcagacugccucagcccaugugcc

SEQ ID NO: 456031 - RNA, 32 nt, Human
ggcaggagcagagcagacacagcagcaaugga

SEQ ID NO: 456032 - RNA, 18 nt, Human
ggcaggagccccagggcc

SEQ ID NO: 456033 - RNA, 32 nt, Human
ggcaggagcccuggcacuaaugcuguacaggu

SEQ ID NO: 456034 - RNA, 32 nt, Human
ggcaggagccgggacugucacuuuggagacaa

SEQ ID NO: 456035 - RNA, 32 nt, Human
ggcaggagccuguaauccuagcuacucaggag

SEQ ID NO: 456036 - RNA, 32 nt, Human
ggcaggagccuugccucucagguggcgggcuc

SEQ ID NO: 456037 - RNA, 19 nt, Human
ggcaggagcgcccauggcu

SEQ ID NO: 456038 - RNA, 32 nt, Human
ggcaggagcucccuggccagcucaguggaugg

SEQ ID NO: 456039 - RNA, 32 nt, Human
ggcaggagcuccugccccucugccucccaccc

SEQ ID NO: 456040 - RNA, 32 nt, Human
ggcaggagcuggccaguaauaggcugacgagg

SEQ ID NO: 456041 - RNA, 16 nt, Human
ggcaggagcugggguc

SEQ ID NO: 456042 - RNA, 32 nt, Human
ggcaggaggagaagaugcgggagcaggaagug

SEQ ID NO: 456043 - RNA, 32 nt, Human
ggcaggaggagaagaugugggagcaggaagug

SEQ ID NO: 456044 - RNA, 32 nt, Human
ggcaggaggagaagcaugaagagaaaaccugu

SEQ ID NO: 456045 - RNA, 32 nt, Human
ggcaggaggagagacugguggagggaagagcu

SEQ ID NO: 456046 - RNA, 32 nt, Human
ggcaggaggagcaggagaggcugcuggagagg

SEQ ID NO: 456047 - RNA, 32 nt, Human
ggcaggaggagccacaugagagagggagaagg

SEQ ID NO: 456048 - RNA, 32 nt, Human
ggcaggaggauggagaagugccagcagcuggg

SEQ ID NO: 456049 - RNA, 32 nt, Human
ggcaggaggccagccccaucucaggcucacgu

SEQ ID NO: 456050 - RNA, 32 nt, Human
ggcaggagggcaagacgacagcaagagaacaa

SEQ ID NO: 456051 - RNA, 21 nt, Human
ggcaggagggcacugaccaca

SEQ ID NO: 456052 - RNA, 32 nt, Human
ggcaggagggccugaggucugagguaccccug

SEQ ID NO: 456053 - RNA, 32 nt, Human
ggcaggaggggugggaccaggcugggaggaca

SEQ ID NO: 456054 - RNA, 20 nt, Human
ggcaggaggguuccaugggc

SEQ ID NO: 456055 - RNA, 32 nt, Human
ggcaggaggucauuuucaaguaagaauuuucc

SEQ ID NO: 456056 - RNA, 32 nt, Human
ggcaggaguugggggagcaggagggcaggggu

SEQ ID NO: 456057 - RNA, 32 nt, Human
ggcaggauccaagcagaucagcccagccuagc

SEQ ID NO: 456058 - RNA, 23 nt, Human
ggcaggauccucaggccccagcc

SEQ ID NO: 456059 - RNA, 32 nt, Human
ggcaggaucuggaaggagggagcugcccagac

SEQ ID NO: 456060 - RNA, 32 nt, Human
ggcaggaugcagugagccagccccagggccag

SEQ ID NO: 456061 - RNA, 32 nt, Human
ggcaggauggacaugguagaggauguggauac

SEQ ID NO: 456062 - RNA, 31 nt, Human
ggcaggauggcagagggcaaggcaggcggcg

SEQ ID NO: 456063 - RNA, 32 nt, Human
ggcaggauggccuuuccuucccucucugaugu

SEQ ID NO: 456064 - RNA, 17 nt, Human
ggcaggaugggggcagc

SEQ ID NO: 456065 - RNA, 32 nt, Human
ggcaggcaacugcagcucgccaccucccucac

SEQ ID NO: 456066 - RNA, 32 nt, Human
ggcaggcaagccuugaaaucaagugcacgagc

SEQ ID NO: 456067 - RNA, 24 nt, Human
ggcaggcaauucuaagaucuucca

SEQ ID NO: 456068 - RNA, 32 nt, Human
ggcaggcacacgagcccaugcccgacagccac

SEQ ID NO: 456069 - RNA, 32 nt, Human
ggcaggcacagaaaaucuauccaucugguagc

SEQ ID NO: 456070 - RNA, 32 nt, Human
ggcaggcacagcccgguuggcgugggccagag

SEQ ID NO: 456071 - RNA, 32 nt, Human
ggcaggcaccuggauguugagaguggagaugu

SEQ ID NO: 456072 - RNA, 32 nt, Human
ggcaggcaccuguaaucccagcuacucaggaa

SEQ ID NO: 456073 - RNA, 32 nt, Human
ggcaggcaccuguaaucccagcuacucaggag

SEQ ID NO: 456074 - RNA, 32 nt, Human
ggcaggcaccuguaaucccagcuacucgggag

SEQ ID NO: 456075 - RNA, 32 nt, Human
ggcaggcaccuguaaucccagcuacuugggag

SEQ ID NO: 456076 - RNA, 32 nt, Human
ggcaggcacucgggaagggaagauggauguaa

SEQ ID NO: 456077 - RNA, 32 nt, Human
ggcaggcagacuuuccaggaagaggcuccaug

SEQ ID NO: 456078 - RNA, 32 nt, Human
ggcaggcagaggagagcaagcuacuucuggga

SEQ ID NO: 456079 - RNA, 24 nt, Human
ggcaggcagaguggaacccugccu

SEQ ID NO: 456080 - RNA, 32 nt, Human
ggcaggcagcaaagacugggaaagacacacca

SEQ ID NO: 456081 - RNA, 32 nt, Human
ggcaggcagcucagcccagccugggcacagcc

SEQ ID NO: 456082 - RNA, 32 nt, Human
ggcaggcaggaaagaguggggauccuaagguu

SEQ ID NO: 456083 - RNA, 32 nt, Human
ggcaggcaggagccccgcccucccaggcacag

SEQ ID NO: 456084 - RNA, 32 nt, Human
ggcaggcaggagguggaguugcagcuguuggc

SEQ ID NO: 456085 - RNA, 32 nt, Human
ggcaggcaggauugggcuuuucuggcuucuac

SEQ ID NO: 456086 - RNA, 32 nt, Human
ggcaggcaggcagggcauagcgacaguguggg

SEQ ID NO: 456087 - RNA, 32 nt, Human
ggcaggcaggcaggugguuggauggggaggca

SEQ ID NO: 456088 - RNA, 32 nt, Human
ggcaggcagggugggccacggaacuggguccc

SEQ ID NO: 456089 - RNA, 32 nt, Human
ggcaggcaggguggggcacugugagcugucgg

SEQ ID NO: 456090 - RNA, 32 nt, Human
ggcaggcagguggaucaccugaggucaggagu

SEQ ID NO: 456091 - RNA, 32 nt, Human
ggcaggcaucggagcuuccagccuggggagac

SEQ ID NO: 456092 - RNA, 24 nt, Human
ggcaggccaagggccucgaccaca

SEQ ID NO: 456093 - RNA, 32 nt, Human
ggcaggccaguucuaauuuccaauagauaagu

SEQ ID NO: 456094 - RNA, 32 nt, Human
ggcaggccaucaggcugggggcugugcuaugu

SEQ ID NO: 456095 - RNA, 32 nt, Human
ggcaggccauguuggggagacuccagcaccgu

SEQ ID NO: 456096 - RNA, 21 nt, Human
ggcaggcccagcccauccccu

SEQ ID NO: 456097 - RNA, 18 nt, Human
ggcaggcccagggcagcu

SEQ ID NO: 456098 - RNA, 32 nt, Human
ggcaggcccaggggaggguggggccuuggugc

SEQ ID NO: 456099 - RNA, 32 nt, Human
ggcaggcccauggagggccuucaacucauugg

SEQ ID NO: 456100 - RNA, 22 nt, Human
ggcaggcccucagccagcuucc

SEQ ID NO: 456101 - RNA, 32 nt, Human
ggcaggcccugcucccccuaccuccuugccag

SEQ ID NO: 456102 - RNA, 32 nt, Human
ggcaggcccuggaggaugagaagguggcagga

SEQ ID NO: 456103 - RNA, 23 nt, Human
ggcaggccgaggcagguggauca

SEQ ID NO: 456104 - RNA, 23 nt, Human
ggcaggccgaggcgggcagauca

SEQ ID NO: 456105 - RNA, 20 nt, Human
ggcaggccggaguggggcgc

SEQ ID NO: 456106 - RNA, 32 nt, Human
ggcaggccucgccccucccuugcucacccagu

SEQ ID NO: 456107 - RNA, 25 nt, Human
ggcaggccuggcucagacuggaagg

SEQ ID NO: 456108 - RNA, 32 nt, Human
ggcaggccugggauggagcccaucucuccagu

SEQ ID NO: 456109 - RNA, 23 nt, Human
ggcaggccugggcccagcuccgg

SEQ ID NO: 456110 - RNA, 24 nt, Human
ggcaggccuggguaggggcagcuu

SEQ ID NO: 456111 - RNA, 32 nt, Human
ggcaggccuuccggaagaaaaagagccauugg

SEQ ID NO: 456112 - RNA, 32 nt, Human
ggcaggccuugaauugggagcagcagccaccu

SEQ ID NO: 456113 - RNA, 18 nt, Human
ggcaggcgagcugggguc

SEQ ID NO: 456114 - RNA, 32 nt, Human
ggcaggcgcagaggucccagccccaggccugg

SEQ ID NO: 456115 - RNA, 32 nt, Human
ggcaggcgccuauaaucccagcuacucaggag

SEQ ID NO: 456116 - RNA, 32 nt, Human
ggcaggcgccugaaaucccagcuacucaagag

SEQ ID NO: 456117 - RNA, 32 nt, Human
ggcaggcgccuguaauccagcuacucgggagg

SEQ ID NO: 456118 - RNA, 32 nt, Human
ggcaggcgccuguaaucccagcuacucaggag

SEQ ID NO: 456119 - RNA, 32 nt, Human
ggcaggcgccuguaaucccagcuacucgggag

SEQ ID NO: 456120 - RNA, 32 nt, Human
ggcaggcgccuguaaucccagcuacuggggag

SEQ ID NO: 456121 - RNA, 32 nt, Human
ggcaggcgccuguaaucccagcuacuuggaag

SEQ ID NO: 456122 - RNA, 32 nt, Human
ggcaggcgccuguaaucccagcuacuugggag

SEQ ID NO: 456123 - RNA, 32 nt, Human
ggcaggcgccuguaaucccagcuauuugggag

SEQ ID NO: 456124 - RNA, 32 nt, Human
ggcaggcgccuguaaucccaguuacucaguag

SEQ ID NO: 456125 - RNA, 32 nt, Human
ggcaggcgccuguagucccagcacuuugggag

SEQ ID NO: 456126 - RNA, 20 nt, Human
ggcaggcggcggcggaggag

SEQ ID NO: 456127 - RNA, 19 nt, Human
ggcaggcggcgggcgcuca

SEQ ID NO: 456128 - RNA, 25 nt, Human
ggcaggcggguacaggggccagcag

SEQ ID NO: 456129 - RNA, 32 nt, Human
ggcaggcgggucaucugacaucaggagaauca

SEQ ID NO: 456130 - RNA, 32 nt, Human
ggcaggcgggucaucugacaucaggaguuuga

SEQ ID NO: 456131 - RNA, 22 nt, Human
ggcaggcggucaaggccggcag

SEQ ID NO: 456132 - RNA, 32 nt, Human
ggcaggcgguccccauccccaccagcucguuu

SEQ ID NO: 456133 - RNA, 19 nt, Human
ggcaggcggugggggcagc

SEQ ID NO: 456134 - RNA, 32 nt, Human
ggcaggcgucuguaaucccagcugcuugggag

SEQ ID NO: 456135 - RNA, 32 nt, Human
ggcaggcgugacagcagaugcagaggacagag

SEQ ID NO: 456136 - RNA, 32 nt, Human
ggcaggcgugagcaaccauggccgggcagcac

SEQ ID NO: 456137 - RNA, 32 nt, Human
ggcaggcucaaccuucagauucccagggccuc

SEQ ID NO: 456138 - RNA, 32 nt, Human
ggcaggcucaagcccaggucuccugaccugca

SEQ ID NO: 456139 - RNA, 32 nt, Human
ggcaggcucacugccaggccagccuccgagag

SEQ ID NO: 456140 - RNA, 32 nt, Human
ggcaggcucacugcccgcuucuuuuccuucuu

SEQ ID NO: 456141 - RNA, 32 nt, Human
ggcaggcucccucugcaguggggucugggccu

SEQ ID NO: 456142 - RNA, 32 nt, Human
ggcaggcucguggccuccccucccagaagcgc

SEQ ID NO: 456143 - RNA, 32 nt, Human
ggcaggcucugccacucagaucaccauguaca

SEQ ID NO: 456144 - RNA, 20 nt, Human
ggcaggcucuggagcugcuu

SEQ ID NO: 456145 - RNA, 32 nt, Human
ggcaggcucugguccuguccagcugcuggaga

SEQ ID NO: 456146 - RNA, 32 nt, Human
ggcaggcugagcgugcagcaacuccaggcauc

SEQ ID NO: 456147 - RNA, 32 nt, Human
ggcaggcugcagccucaugccaugucucucuc

SEQ ID NO: 456148 - RNA, 32 nt, Human
ggcaggcugcagcuguccccggguggccuggc

SEQ ID NO: 456149 - RNA, 32 nt, Human
ggcaggcugggagcauggaggacagcuuaugg

SEQ ID NO: 456150 - RNA, 32 nt, Human
ggcaggcuggggcugcgggcugagggggaccg

SEQ ID NO: 456151 - RNA, 32 nt, Human
ggcaggcugggugggagggaggagggccgaga

SEQ ID NO: 456152 - RNA, 32 nt, Human
ggcaggcugucucucaagguggucuuuucugc

SEQ ID NO: 456153 - RNA, 32 nt, Human
ggcaggcugugcaggaggguuacuugagccca

SEQ ID NO: 456154 - RNA, 32 nt, Human
ggcaggcuguggauggggcggagcagggcaga

SEQ ID NO: 456155 - RNA, 32 nt, Human
ggcaggcuuggggaaaauggccauacaggagg

SEQ ID NO: 456156 - RNA, 32 nt, Human
ggcaggcuugugcuccccuuggagaagggcug

SEQ ID NO: 456157 - RNA, 32 nt, Human
ggcagggaaaggcucugaaagccagcugccga

SEQ ID NO: 456158 - RNA, 32 nt, Human
ggcagggaaauuccccuucuccccagugauuc

SEQ ID NO: 456159 - RNA, 32 nt, Human
ggcagggaagacucacagcagagcaggagggg

SEQ ID NO: 456160 - RNA, 20 nt, Human
ggcagggaagccuugagguc

SEQ ID NO: 456161 - RNA, 32 nt, Human
ggcagggaaggagccuccccuacagguuucag

SEQ ID NO: 456162 - RNA, 32 nt, Human
ggcagggaaucagcuaacccggcugcccaugg

SEQ ID NO: 456163 - RNA, 16 nt, Human
ggcagggaauuauggg

SEQ ID NO: 456164 - RNA, 32 nt, Human
ggcagggaauuaugggggcugugcccagggug

SEQ ID NO: 456165 - RNA, 32 nt, Human
ggcagggacagggacagcccaggucacacgug

SEQ ID NO: 456166 - RNA, 32 nt, Human
ggcagggacggaacuccuauucagcaguuuuu

SEQ ID NO: 456167 - RNA, 32 nt, Human
ggcagggacggguggagaggcgcagggacccc

SEQ ID NO: 456168 - RNA, 32 nt, Human
ggcagggacuagaacagagggagccaccugga

SEQ ID NO: 456169 - RNA, 32 nt, Human
ggcagggacuggcgcccugugccugagugggu

SEQ ID NO: 456170 - RNA, 20 nt, Human
ggcagggacuguggcagcuu

SEQ ID NO: 456171 - RNA, 32 nt, Human
ggcagggacuugcccaagggcauauagugaga

SEQ ID NO: 456172 - RNA, 32 nt, Human
ggcagggagaagagaaggcauuaguaagaaaa

SEQ ID NO: 456173 - RNA, 18 nt, Human
ggcagggagaccuggguc

SEQ ID NO: 456174 - RNA, 32 nt, Human
ggcagggagagggcggaagggcuggcgaucgc

SEQ ID NO: 456175 - RNA, 32 nt, Human
ggcagggagagggucuuggggacagcccuccu

SEQ ID NO: 456176 - RNA, 32 nt, Human
ggcagggagauagacccagcugugcugucaug

SEQ ID NO: 456177 - RNA, 32 nt, Human
ggcagggagcaguguugggagagggcucccca

SEQ ID NO: 456178 - RNA, 32 nt, Human
ggcagggagccaccuccucagcuucccugagg

SEQ ID NO: 456179 - RNA, 32 nt, Human
ggcagggagcuagggccggaugaggcagggca

SEQ ID NO: 456180 - RNA, 32 nt, Human
ggcagggaggaggcagggccuguucugcaguu

SEQ ID NO: 456181 - RNA, 22 nt, Human
ggcagggaggaugggggcagcu

SEQ ID NO: 456182 - RNA, 32 nt, Human
ggcagggaggcacgcagguacugugaaaaucc

SEQ ID NO: 456183 - RNA, 32 nt, Human
ggcagggaggcagggaggcugcagagucagag

SEQ ID NO: 456184 - RNA, 32 nt, Human
ggcagggaggcgccugcuccaccagcuggugg

SEQ ID NO: 456185 - RNA, 32 nt, Human
ggcagggaggcugcagagucagagucgcgggc

SEQ ID NO: 456186 - RNA, 32 nt, Human
ggcagggaggggcaggguguucuagaggugag

SEQ ID NO: 456187 - RNA, 32 nt, Human
ggcagggaggggcaucccucccugccggccuc

SEQ ID NO: 456188 - RNA, 32 nt, Human
ggcagggagguggggguugggggaguaguggg

SEQ ID NO: 456189 - RNA, 32 nt, Human
ggcagggauguugaaguaucccaagggcuuaa

SEQ ID NO: 456190 - RNA, 32 nt, Human
ggcagggauuacaggaacccaccaccaugcug

SEQ ID NO: 456191 - RNA, 19 nt, Human
ggcagggcaaagcuagcuu

SEQ ID NO: 456192 - RNA, 32 nt, Human
ggcagggcaagggccccagcuggcaagcugga

SEQ ID NO: 456193 - RNA, 32 nt, Human
ggcagggcaagggugggagugugcaaagcccu

SEQ ID NO: 456194 - RNA, 32 nt, Human
ggcagggcacagcagagcaggcuggagaagcg

SEQ ID NO: 456195 - RNA, 32 nt, Human
ggcagggcagaggcacgucuggguccccuccc

SEQ ID NO: 456196 - RNA, 32 nt, Human
ggcagggcagccaggggcugcagugaaaugaa

SEQ ID NO: 456197 - RNA, 32 nt, Human
ggcagggcagccaggggcugcagugaaaugga

SEQ ID NO: 456198 - RNA, 32 nt, Human
ggcagggcagccgcccccgcucccagccaggc

SEQ ID NO: 456199 - RNA, 32 nt, Human
ggcagggcaggcagagcucagcacagccucac

SEQ ID NO: 456200 - RNA, 32 nt, Human
ggcagggcaggcgauuccagugggguugggcc

SEQ ID NO: 456201 - RNA, 16 nt, Human
ggcagggcagggcagc

SEQ ID NO: 456202 - RNA, 32 nt, Human
ggcagggcagggcgauguagaccuggaauuug

SEQ ID NO: 456203 - RNA, 32 nt, Human
ggcagggcaugaguuagggagacugaagagua

SEQ ID NO: 456204 - RNA, 18 nt, Human
ggcagggccaacgggagg

SEQ ID NO: 456205 - RNA, 32 nt, Human
ggcagggccaagagcaggaaccagccucagaa

SEQ ID NO: 456206 - RNA, 32 nt, Human
ggcagggccacugagcccuccucagaugguua

SEQ ID NO: 456207 - RNA, 20 nt, Human
ggcagggccagcccauggcu

SEQ ID NO: 456208 - RNA, 32 nt, Human
ggcagggccaggcagagagagaugcuggggac

SEQ ID NO: 456209 - RNA, 18 nt, Human
ggcagggccagggcagcu

SEQ ID NO: 456210 - RNA, 19 nt, Human
ggcagggcccagugagagg

SEQ ID NO: 456211 - RNA, 32 nt, Human
ggcagggcccuugcccucacaccccgcugccc

SEQ ID NO: 456212 - RNA, 21 nt, Human
ggcagggccgcagccgaaaga

SEQ ID NO: 456213 - RNA, 32 nt, Human
ggcagggccgcugacgugugcccaugggaugu

SEQ ID NO: 456214 - RNA, 20 nt, Human
ggcagggccgcuggccagca

SEQ ID NO: 456215 - RNA, 20 nt, Human
ggcagggccggcggggcagc

SEQ ID NO: 456216 - RNA, 19 nt, Human
ggcagggccggggcaagcu

SEQ ID NO: 456217 - RNA, 32 nt, Human
ggcagggccucgcccacaccaaaccuguggac

SEQ ID NO: 456218 - RNA, 19 nt, Human
ggcagggccucuccaugcc

SEQ ID NO: 456219 - RNA, 32 nt, Human
ggcagggccugccuccucuggcucagugugag

SEQ ID NO: 456220 - RNA, 32 nt, Human
ggcagggccugcuucccauaagaagggcuaaa

SEQ ID NO: 456221 - RNA, 32 nt, Human
ggcagggccuggcggagguggaguggccacug

SEQ ID NO: 456222 - RNA, 32 nt, Human
ggcagggccuuccacaccuauaccuucucaaa

SEQ ID NO: 456223 - RNA, 32 nt, Human
ggcagggccuuggggagccccagcacaaugau

SEQ ID NO: 456224 - RNA, 32 nt, Human
ggcagggcgacggucagccacuacgaaugccu

SEQ ID NO: 456225 - RNA, 32 nt, Human
ggcagggcgagcaggauguccuuguccaggga

SEQ ID NO: 456226 - RNA, 32 nt, Human
ggcagggcgaguugugugugaguuggcugccc

SEQ ID NO: 456227 - RNA, 21 nt, Human
ggcagggcgcuggccgcgcug

SEQ ID NO: 456228 - RNA, 32 nt, Human
ggcagggcucacacuccugggcucugaacaca

SEQ ID NO: 456229 - RNA, 32 nt, Human
ggcagggcucuggugggagagggagacagaug

SEQ ID NO: 456230 - RNA, 32 nt, Human
ggcagggcugacugaauagccagggggugcca

SEQ ID NO: 456231 - RNA, 32 nt, Human
ggcagggcugcugaagcgcggaguucgggguc

SEQ ID NO: 456232 - RNA, 32 nt, Human
ggcagggcuggguggaggagagaguggcaccc

SEQ ID NO: 456233 - RNA, 32 nt, Human
ggcagggcuguagcccacgccgggugcuauuc

SEQ ID NO: 456234 - RNA, 30 nt, Human
ggcaggggaagagacagggcacagcuggcc

SEQ ID NO: 456235 - RNA, 19 nt, Human
ggcaggggaaggaccugau

SEQ ID NO: 456236 - RNA, 32 nt, Human
ggcaggggaaggggccuggccgccaccugcuc

SEQ ID NO: 456237 - RNA, 32 nt, Human
ggcaggggacauagacaaggagggaggaagcu

SEQ ID NO: 456238 - RNA, 32 nt, Human
ggcaggggagagagggaaaugccaaaaacuug

SEQ ID NO: 456239 - RNA, 32 nt, Human
ggcaggggaggacuguggggucugggcucugu

SEQ ID NO: 456240 - RNA, 32 nt, Human
ggcaggggaggcauccuuacuggagaggcagg

SEQ ID NO: 456241 - RNA, 32 nt, Human
ggcaggggcagcugggcuggcucccggggaac

SEQ ID NO: 456242 - RNA, 20 nt, Human
ggcaggggcagggcaagcuu

SEQ ID NO: 456243 - RNA, 19 nt, Human
ggcaggggcaggggcagcu

SEQ ID NO: 456244 - RNA, 32 nt, Human
ggcaggggcccagcccugccuuccacugugcu

SEQ ID NO: 456245 - RNA, 32 nt, Human
ggcaggggcgggcggagggaggggagggguga

SEQ ID NO: 456246 - RNA, 32 nt, Human
ggcaggggcgguggaggacucaggaacugccc

SEQ ID NO: 456247 - RNA, 32 nt, Human
ggcaggggcugaggggacuguggaagccacga

SEQ ID NO: 456248 - RNA, 32 nt, Human
ggcaggggcugcaggaagggggaaugaggaau

SEQ ID NO: 456249 - RNA, 32 nt, Human
ggcagggggaagaaggaggagaagaugaagaa

SEQ ID NO: 456250 - RNA, 32 nt, Human
ggcagggggacacggcccugcauucuggacag

SEQ ID NO: 456251 - RNA, 32 nt, Human
ggcagggggagggccagcucugggagacgagg

SEQ ID NO: 456252 - RNA, 32 nt, Human
ggcagggggaggguaggagcagcuggagacuc

SEQ ID NO: 456253 - RNA, 32 nt, Human
ggcagggggauggccauggaaggguugagggg

SEQ ID NO: 456254 - RNA, 32 nt, Human
ggcagggggcagggggcagagagcagagagga

SEQ ID NO: 456255 - RNA, 22 nt, Human
ggcagggggcgaagugcagugg

SEQ ID NO: 456256 - RNA, 32 nt, Human
ggcagggggcuggggacugcagccccacuccc

SEQ ID NO: 456257 - RNA, 32 nt, Human
ggcagggggugagggaggacagcagagggcua

SEQ ID NO: 456258 - RNA, 32 nt, Human
ggcagggggugaggggcaggucuaguguuccu

SEQ ID NO: 456259 - RNA, 32 nt, Human
ggcaggggguuccagaguggggugggccgugc

SEQ ID NO: 456260 - RNA, 32 nt, Human
ggcagggguagaggcucguagauggaacuggu

SEQ ID NO: 456261 - RNA, 32 nt, Human
ggcaggggucauagauccuaagccauaaaaua

SEQ ID NO: 456262 - RNA, 32 nt, Human
ggcaggggugagagcacccacugaauugacau

SEQ ID NO: 456263 - RNA, 32 nt, Human
ggcaggggugagaguggagcugaguggggucu

SEQ ID NO: 456264 - RNA, 20 nt, Human
ggcaggggugccccauggcu

SEQ ID NO: 456265 - RNA, 26 nt, Human
ggcagggguuaccaacuggccagcag

SEQ ID NO: 456266 - RNA, 32 nt, Human
ggcagggguuccaacaccagcacagggcuccc

SEQ ID NO: 456267 - RNA, 20 nt, Human
ggcaggguacacucucccca

SEQ ID NO: 456268 - RNA, 16 nt, Human
ggcaggguccugggaa

SEQ ID NO: 456269 - RNA, 16 nt, Human
ggcagggucugggguc

SEQ ID NO: 456270 - RNA, 32 nt, Human
ggcagggucuugaggcagccacugugaugcuc

SEQ ID NO: 456271 - RNA, 20 nt, Human
ggcagggugauggggagcuu

SEQ ID NO: 456272 - RNA, 32 nt, Human
ggcagggugcacgcgcuggcccugccacucca

SEQ ID NO: 456273 - RNA, 19 nt, Human
ggcagggugcucugagguc

SEQ ID NO: 456274 - RNA, 32 nt, Human
ggcaggguggaguggagggggagcuacuaggc

SEQ ID NO: 456275 - RNA, 22 nt, Human
ggcaggguggcucacaccugua

SEQ ID NO: 456276 - RNA, 32 nt, Human
ggcagggugggauggaggagaagaauuuucag

SEQ ID NO: 456277 - RNA, 32 nt, Human
ggcaggguggggcaggaugcagugagccagcc

SEQ ID NO: 456278 - RNA, 32 nt, Human
ggcaggguguggggcaaggcagugagugaaga

SEQ ID NO: 456279 - RNA, 32 nt, Human
ggcaggguguggggcagggcagugagugaaga

SEQ ID NO: 456280 - RNA, 32 nt, Human
ggcaggguuccugccuuggacccccagucugg

SEQ ID NO: 456281 - RNA, 19 nt, Human
ggcaggguucuccaaggcc

SEQ ID NO: 456282 - RNA, 32 nt, Human
ggcaggguuuccuccuuagacacugacagcau

SEQ ID NO: 456283 - RNA, 32 nt, Human
ggcagguaccuguaaucccagcuacucgggag

SEQ ID NO: 456284 - RNA, 32 nt, Human
ggcagguagaagccuccgucccuaccuuauag

SEQ ID NO: 456285 - RNA, 18 nt, Human
ggcaggucacuugagguc

SEQ ID NO: 456286 - RNA, 32 nt, Human
ggcaggucagggccuggucccuuuguaggugg

SEQ ID NO: 456287 - RNA, 32 nt, Human
ggcaggucaggguuguccgcucugauuagcag

SEQ ID NO: 456288 - RNA, 32 nt, Human
ggcaggucagucuccgugcaggaugugagcag

SEQ ID NO: 456289 - RNA, 17 nt, Human
ggcagguccaccugggc

SEQ ID NO: 456290 - RNA, 32 nt, Human
ggcagguccagcucugugggcccuacccuccu

SEQ ID NO: 456291 - RNA, 18 nt, Human
ggcaggucccccuuagcg

SEQ ID NO: 456292 - RNA, 32 nt, Human
ggcagguccuuagugggcuagaccuaccuuuc

SEQ ID NO: 456293 - RNA, 32 nt, Human
ggcaggucgucggcugcaaccacacacuugga

SEQ ID NO: 456294 - RNA, 32 nt, Human
ggcaggucuccagcugaaucugugccuacaaa

SEQ ID NO: 456295 - RNA, 32 nt, Human
ggcaggucuccagcugaaucugugccuacgaa

SEQ ID NO: 456296 - RNA, 32 nt, Human
ggcaggucuccucugggaggucuuggccgacu

SEQ ID NO: 456297 - RNA, 32 nt, Human
ggcaggucuuaagaaagguacuuagcaagugc

SEQ ID NO: 456298 - RNA, 32 nt, Human
ggcaggugacaccuccugcagcccccagcaug

SEQ ID NO: 456299 - RNA, 32 nt, Human
ggcaggugacccaagacagagcugaccccucc

SEQ ID NO: 456300 - RNA, 32 nt, Human
ggcaggugagaagggaaucauccugagaggcu

SEQ ID NO: 456301 - RNA, 32 nt, Human
ggcaggugaggcuuggccugcccagccugucc

SEQ ID NO: 456302 - RNA, 19 nt, Human
ggcaggugcacacaccucc

SEQ ID NO: 456303 - RNA, 32 nt, Human
ggcaggugcacacaccuccacagugaccucug

SEQ ID NO: 456304 - RNA, 32 nt, Human
ggcaggugcaccacugggcuccuggguagugu

SEQ ID NO: 456305 - RNA, 32 nt, Human
ggcaggugccuauaaucccagcuacuccagag

SEQ ID NO: 456306 - RNA, 32 nt, Human
ggcaggugccuguaaucccaacuacucaggag

SEQ ID NO: 456307 - RNA, 32 nt, Human
ggcaggugccuguaaucccagcacuuugggaa

SEQ ID NO: 456308 - RNA, 32 nt, Human
ggcaggugccuguaaucccagcuacucaggag

SEQ ID NO: 456309 - RNA, 32 nt, Human
ggcaggugccuguaaucccagcuacucagggg

SEQ ID NO: 456310 - RNA, 32 nt, Human
ggcaggugccuguaaucccagcuacucgggag

SEQ ID NO: 456311 - RNA, 32 nt, Human
ggcaggugccuguaaucccagcuacucugucu

SEQ ID NO: 456312 - RNA, 32 nt, Human
ggcaggugccuguaaucccagcuacuugagag

SEQ ID NO: 456313 - RNA, 32 nt, Human
ggcaggugccuguaaucccagcuacuugggag

SEQ ID NO: 456314 - RNA, 32 nt, Human
ggcaggugccuguaaucccauguacucuggag

SEQ ID NO: 456315 - RNA, 32 nt, Human
ggcaggugccuguaauccuagcuacuuggcag

SEQ ID NO: 456316 - RNA, 17 nt, Human
ggcaggugccuguaguc

SEQ ID NO: 456317 - RNA, 32 nt, Human
ggcaggugccuguagucccagcuacucggcag

SEQ ID NO: 456318 - RNA, 32 nt, Human
ggcaggugccuguagucccagcuacucgggaa

SEQ ID NO: 456319 - RNA, 32 nt, Human
ggcaggugccuguagucccagcuacucgggag

SEQ ID NO: 456320 - RNA, 32 nt, Human
ggcaggugccuguagucccagcuacucuggag

SEQ ID NO: 456321 - RNA, 32 nt, Human
ggcaggugccuguagucccagcuacuugggac

SEQ ID NO: 456322 - RNA, 32 nt, Human
ggcaggugccuguagucccagcuacuugggag

SEQ ID NO: 456323 - RNA, 32 nt, Human
ggcaggugccuguagucucagcuacucaggag

SEQ ID NO: 456324 - RNA, 22 nt, Human
ggcaggugcuauuuccauggcc

SEQ ID NO: 456325 - RNA, 17 nt, Human
ggcaggugcuggagguc

SEQ ID NO: 456326 - RNA, 32 nt, Human
ggcaggugcuuguaaucccagcuacuugggag

SEQ ID NO: 456327 - RNA, 32 nt, Human
ggcagguggaaaaccaucucccagaaaccuga

SEQ ID NO: 456328 - RNA, 32 nt, Human
ggcagguggagacagcuuauuaggcagccugc

SEQ ID NO: 456329 - RNA, 32 nt, Human
ggcagguggagaggaggauggggaccagcagc

SEQ ID NO: 456330 - RNA, 32 nt, Human
ggcagguggagaguccagggaggcaggaugga

SEQ ID NO: 456331 - RNA, 20 nt, Human
ggcagguggaucacaagguc

SEQ ID NO: 456332 - RNA, 32 nt, Human
ggcagguggaucacaaugucaggaguuugaga

SEQ ID NO: 456333 - RNA, 32 nt, Human
ggcagguggaucaccugaggucaggggcucaa

SEQ ID NO: 456334 - RNA, 32 nt, Human
ggcagguggaucaccugaggucgggagcucga

SEQ ID NO: 456335 - RNA, 32 nt, Human
ggcagguggaucaccugaggucgggaguucaa

SEQ ID NO: 456336 - RNA, 32 nt, Human
ggcagguggaucaccugaggucgggaguucga

SEQ ID NO: 456337 - RNA, 32 nt, Human
ggcagguggaucaccugaggucgggaguuuga

SEQ ID NO: 456338 - RNA, 32 nt, Human
ggcagguggaucaccugaggucgggauuuuga

SEQ ID NO: 456339 - RNA, 20 nt, Human
ggcagguggaucacgagguc

SEQ ID NO: 456340 - RNA, 32 nt, Human
ggcagguggaucaucugaggucaggaguuuga

SEQ ID NO: 456341 - RNA, 32 nt, Human
ggcagguggaucaugaggucaugagauugaga

SEQ ID NO: 456342 - RNA, 18 nt, Human
ggcagguggccacagcag

SEQ ID NO: 456343 - RNA, 20 nt, Human
ggcagguggccaccaggguc

SEQ ID NO: 456344 - RNA, 32 nt, Human
ggcaggugggaggcacgggguugcggaucccg

SEQ ID NO: 456345 - RNA, 32 nt, Human
ggcagguggggcaauccagagcugugggggcu

SEQ ID NO: 456346 - RNA, 21 nt, Human
ggcagguggggggagccacca

SEQ ID NO: 456347 - RNA, 32 nt, Human
ggcagguggguggagggggaugcugggaguuc

SEQ ID NO: 456348 - RNA, 32 nt, Human
ggcagguggugaggaagagugggguagagcca

SEQ ID NO: 456349 - RNA, 19 nt, Human
ggcagguguccaccagcag

SEQ ID NO: 456350 - RNA, 32 nt, Human
ggcaggugucugcaugcuacccgggucucgga

SEQ ID NO: 456351 - RNA, 32 nt, Human
ggcaggugucugcugcucaccuggcucuggag

SEQ ID NO: 456352 - RNA, 17 nt, Human
ggcaggugucuguaguc

SEQ ID NO: 456353 - RNA, 32 nt, Human
ggcaggugugagccaucgcgcccggccaacuu

SEQ ID NO: 456354 - RNA, 32 nt, Human
ggcaggugugggagcacagcuggaacaaugug

SEQ ID NO: 456355 - RNA, 32 nt, Human
ggcagguucacaggcgaggccuggaguaacac

SEQ ID NO: 456356 - RNA, 32 nt, Human
ggcagguuccacccuucucuaccagccccgcu

SEQ ID NO: 456357 - RNA, 32 nt, Human
ggcagguuccagagaaucgaguagaccuuuug

SEQ ID NO: 456358 - RNA, 32 nt, Human
ggcagguuccagagaaugcaguagaccuuuug

SEQ ID NO: 456359 - RNA, 19 nt, Human
ggcagguucggcuggaagg

SEQ ID NO: 456360 - RNA, 32 nt, Human
ggcagguugccccuuucuggguuuguggugac

SEQ ID NO: 456361 - RNA, 23 nt, Human
ggcagguuucagggugccagugg

SEQ ID NO: 456362 - RNA, 21 nt, Human
ggcagguuuccaagagcaggg

SEQ ID NO: 456363 - RNA, 32 nt, Human
ggcagguuuuccaggcuggagucgguuccacc

SEQ ID NO: 456364 - RNA, 32 nt, Human
ggcaguaaugagcgccccagagccuccaucau

SEQ ID NO: 456365 - RNA, 32 nt, Human
ggcaguaccaggaggagguacauguauguccg

SEQ ID NO: 456366 - RNA, 32 nt, Human
ggcaguacucaucuuggcccugggaagaaacu

SEQ ID NO: 456367 - RNA, 32 nt, Human
ggcaguacugacugggcacugccucugccccc

SEQ ID NO: 456368 - RNA, 32 nt, Human
ggcaguacuguggcccaccaguguaaucuccc

SEQ ID NO: 456369 - RNA, 32 nt, Human
ggcaguagaauggccagcauuccugccuguaa

SEQ ID NO: 456370 - RNA, 32 nt, Human
ggcaguagacuuccgggauggcugucgugggg

SEQ ID NO: 456371 - RNA, 32 nt, Human
ggcaguagcagcuguguuugaguuucuggcug

SEQ ID NO: 456372 - RNA, 32 nt, Human
ggcaguagcucugccaacuggggcuccucucu

SEQ ID NO: 456373 - RNA, 32 nt, Human
ggcaguagggaaaugagugaggcugcccugag

SEQ ID NO: 456374 - RNA, 32 nt, Human
ggcaguagggauuggguugggggaagauaacu

SEQ ID NO: 456375 - RNA, 32 nt, Human
ggcaguagggcuggaaccaaaguauuacucuc

SEQ ID NO: 456376 - RNA, 32 nt, Human
ggcaguaucggccagaucaguguuacauugau

SEQ ID NO: 456377 - RNA, 32 nt, Human
ggcaguauuuuagugcucaucaacauugugac

SEQ ID NO: 456378 - RNA, 32 nt, Human
ggcagucaaccaggaacaggucgcagccaggc

SEQ ID NO: 456379 - RNA, 24 nt, Human
ggcagucaagcgagcaucaggaga

SEQ ID NO: 456380 - RNA, 32 nt, Human
ggcagucaaguguggcuacuucuaccuggagu

SEQ ID NO: 456381 - RNA, 20 nt, Human
ggcagucaaugcccauaacc

SEQ ID NO: 456382 - RNA, 32 nt, Human
ggcagucacaucuggaaauggaaagccgaccu

SEQ ID NO: 456383 - RNA, 32 nt, Human
ggcagucacaugcuucccugguuuuagcacac

SEQ ID NO: 456384 - RNA, 32 nt, Human
ggcagucaccacccagcccuuccuugggcguc

SEQ ID NO: 456385 - RNA, 32 nt, Human
ggcagucaccuguaaucccagcuacuugggag

SEQ ID NO: 456386 - RNA, 32 nt, Human
ggcagucacugggacaaggagggacuugccuc

SEQ ID NO: 456387 - RNA, 21 nt, Human
ggcagucagaaagcccagggu

SEQ ID NO: 456388 - RNA, 21 nt, Human
ggcagucagaggcgcuggaga

SEQ ID NO: 456389 - RNA, 32 nt, Human
ggcagucagccagcaaaucaguaggauaaaca

SEQ ID NO: 456390 - RNA, 18 nt, Human
ggcagucagcccauagcu

SEQ ID NO: 456391 - RNA, 19 nt, Human
ggcagucagccucccagcc

SEQ ID NO: 456392 - RNA, 32 nt, Human
ggcagucaggcagaaaugggcaaguucagggu

SEQ ID NO: 456393 - RNA, 20 nt, Human
ggcagucaggcuccagggcc

SEQ ID NO: 456394 - RNA, 22 nt, Human
ggcagucaggggacacuagaga

SEQ ID NO: 456395 - RNA, 32 nt, Human
ggcagucaguccagagaugcuggcccucgccc

SEQ ID NO: 456396 - RNA, 32 nt, Human
ggcagucaugaggaaacaggucagggcgaagc

SEQ ID NO: 456397 - RNA, 20 nt, Human
ggcaguccagccucucccca

SEQ ID NO: 456398 - RNA, 19 nt, Human
ggcaguccaggcucagaca

SEQ ID NO: 456399 - RNA, 32 nt, Human
ggcagucccagcaggacccauggaguguccuu

SEQ ID NO: 456400 - RNA, 32 nt, Human
ggcagucccaggaguucugaccaucaagccua

SEQ ID NO: 456401 - RNA, 19 nt, Human
ggcaguccccagccuccca

SEQ ID NO: 456402 - RNA, 32 nt, Human
ggcaguccuaggcgugggggcagaugggugga

SEQ ID NO: 456403 - RNA, 32 nt, Human
ggcaguccucaccucugccucccucgcuccuc

SEQ ID NO: 456404 - RNA, 32 nt, Human
ggcaguccugcacuccuucuggaggcucuagg

SEQ ID NO: 456405 - RNA, 32 nt, Human
ggcaguccuggaggcagggggugaggggcagg

SEQ ID NO: 456406 - RNA, 32 nt, Human
ggcaguccuggccuguugagcuuguccagacg

SEQ ID NO: 456407 - RNA, 32 nt, Human
ggcagucgcuuuucugaauucuccccuccggc

SEQ ID NO: 456408 - RNA, 21 nt, Human
ggcagucggggcucgcggaga

SEQ ID NO: 456409 - RNA, 32 nt, Human
ggcagucuccaaacuauagaacuccuaacgcu

SEQ ID NO: 456410 - RNA, 32 nt, Human
ggcagucucgcgcggcuacugcagcacugggg

SEQ ID NO: 456411 - RNA, 32 nt, Human
ggcagucugaacggcaagcuugagucaggacc

SEQ ID NO: 456412 - RNA, 22 nt, Human
ggcagucugccuugucugugga

SEQ ID NO: 456413 - RNA, 32 nt, Human
ggcagucuggaggggcauggccagcagcuugc

SEQ ID NO: 456414 - RNA, 32 nt, Human
ggcagucugggcaauauagugaggcucccauc

SEQ ID NO: 456415 - RNA, 32 nt, Human
ggcagucuguagagcagcucccagaggcugcc

SEQ ID NO: 456416 - RNA, 25 nt, Human
ggcagucugucgcugcucauggaga

SEQ ID NO: 456417 - RNA, 32 nt, Human
ggcagucuuugaggcccccaucagagaccccc

SEQ ID NO: 456418 - RNA, 32 nt, Human
ggcagucuuuuuccaucucuaccgaaguugau

SEQ ID NO: 456419 - RNA, 25 nt, Human
ggcagugaaugucuugcucuuccca

SEQ ID NO: 456420 - RNA, 32 nt, Human
ggcagugacaacacacacucggcuucaguucu

SEQ ID NO: 456421 - RNA, 32 nt, Human
ggcagugaccacccacccuggagccauggucc

SEQ ID NO: 456422 - RNA, 32 nt, Human
ggcagugaccuacucugcuccccagaggcucc

SEQ ID NO: 456423 - RNA, 32 nt, Human
ggcagugacuaguccaggagugcagcugggag

SEQ ID NO: 456424 - RNA, 18 nt, Human
ggcagugacugcucaaag

SEQ ID NO: 456425 - RNA, 32 nt, Human
ggcagugacuuggagcccugaagaagggacca

SEQ ID NO: 456426 - RNA, 17 nt, Human
ggcagugagcugcgguc

SEQ ID NO: 456427 - RNA, 21 nt, Human
ggcagugaucuccuguucccu

SEQ ID NO: 456428 - RNA, 32 nt, Human
ggcagugaugggagaaggggaggcaugauucu

SEQ ID NO: 456429 - RNA, 32 nt, Human
ggcagugcaacaaccccagaccugccuuuggg

SEQ ID NO: 456430 - RNA, 32 nt, Human
ggcagugcaaggaagggacggggaagagaagc

SEQ ID NO: 456431 - RNA, 32 nt, Human
ggcagugcaauauuuagcugcuaacaagacug

SEQ ID NO: 456432 - RNA, 32 nt, Human
ggcagugcagccgccucacaggucggcggacg

SEQ ID NO: 456433 - RNA, 32 nt, Human
ggcagugcagugagcugucuggccuuuugucc

SEQ ID NO: 456434 - RNA, 32 nt, Human
ggcagugcagugugccugggagcugucuggaa

SEQ ID NO: 456435 - RNA, 32 nt, Human
ggcagugccaugggggcaacagccaaaauagg

SEQ ID NO: 456436 - RNA, 32 nt, Human
ggcagugccuguaaucccagcuauuugggagg

SEQ ID NO: 456437 - RNA, 32 nt, Human
ggcagugccuguagucccagcugcucgggagg

SEQ ID NO: 456438 - RNA, 32 nt, Human
ggcagugcgguggaggugagggggugagccug

SEQ ID NO: 456439 - RNA, 31 nt, Human
ggcagugcgucuggagggccugugcgagcuc

SEQ ID NO: 456440 - RNA, 32 nt, Human
ggcagugcugagggcugggaugcucugugacc

SEQ ID NO: 456441 - RNA, 18 nt, Human
ggcaguggaaaaaguccu

SEQ ID NO: 456442 - RNA, 19 nt, Human
ggcaguggaaccgacuccc

SEQ ID NO: 456443 - RNA, 32 nt, Human
ggcaguggagacuguagugugugcgugugugc

SEQ ID NO: 456444 - RNA, 32 nt, Human
ggcaguggagagugcugcuggguguacgcugc

SEQ ID NO: 456445 - RNA, 22 nt, Human
ggcaguggagaugcugucccca

SEQ ID NO: 456446 - RNA, 32 nt, Human
ggcaguggcaccuccgcugagcuuuuaaacca

SEQ ID NO: 456447 - RNA, 31 nt, Human
ggcaguggcacgaucucagcucacugcaagc

SEQ ID NO: 456448 - RNA, 32 nt, Human
ggcaguggcaggcaguagugaagucggcucua

SEQ ID NO: 456449 - RNA, 32 nt, Human
ggcaguggccaagccugcuguguccuuccucc

SEQ ID NO: 456450 - RNA, 19 nt, Human
ggcaguggcccuggcagcu

SEQ ID NO: 456451 - RNA, 32 nt, Human
ggcaguggcucacaccuauaaucccagcacuu

SEQ ID NO: 456452 - RNA, 32 nt, Human
ggcaguggcucacaccuauaaucccagccaag

SEQ ID NO: 456453 - RNA, 32 nt, Human
ggcaguggcucaugccuauaaucccagcacuu

SEQ ID NO: 456454 - RNA, 32 nt, Human
ggcaguggcugugggagcaggaauggcgcagc

SEQ ID NO: 456455 - RNA, 32 nt, Human
ggcagugggaagagggugguucccuggggguc

SEQ ID NO: 456456 - RNA, 20 nt, Human
ggcagugggaaguaguugaa

SEQ ID NO: 456457 - RNA, 32 nt, Human
ggcagugggaauguucuuucugcucuauacug

SEQ ID NO: 456458 - RNA, 32 nt, Human
ggcagugggaggcaagagugaagcagaggaga

SEQ ID NO: 456459 - RNA, 32 nt, Human
ggcagugggaggggcuguauggagaggagcug

SEQ ID NO: 456460 - RNA, 32 nt, Human
ggcagugggcaggccaggcagggcggguacgg

SEQ ID NO: 456461 - RNA, 32 nt, Human
ggcagugggcagguauggcugagggcguguga

SEQ ID NO: 456462 - RNA, 24 nt, Human
ggcagugggcucagccucucccca

SEQ ID NO: 456463 - RNA, 32 nt, Human
ggcaguggggacugccuggugaacacagaugu

SEQ ID NO: 456464 - RNA, 32 nt, Human
ggcagugggggaugugggauggcagcagccag

SEQ ID NO: 456465 - RNA, 32 nt, Human
ggcaguggggugagaggagggguuuacagggu

SEQ ID NO: 456466 - RNA, 22 nt, Human
ggcagugggguuugagauugga

SEQ ID NO: 456467 - RNA, 32 nt, Human
ggcagugggugaggggaccaggagguggcucc

SEQ ID NO: 456468 - RNA, 32 nt, Human
ggcaguggguggagagagaauggggagacgac

SEQ ID NO: 456469 - RNA, 31 nt, Human
ggcaguggugcgaucucagcucacugcaacc

SEQ ID NO: 456470 - RNA, 32 nt, Human
ggcaguggugcuggccucacagcccuggccau

SEQ ID NO: 456471 - RNA, 32 nt, Human
ggcagugguggaggugggcauuggcggggcuu

SEQ ID NO: 456472 - RNA, 32 nt, Human
ggcagugguggcacgggagcaggcuaggcggg

SEQ ID NO: 456473 - RNA, 32 nt, Human
ggcaguguagcaucucuuccacaaucagacag

SEQ ID NO: 456474 - RNA, 32 nt, Human
ggcagugucauccucauguucugccuuccagg

SEQ ID NO: 456475 - RNA, 32 nt, Human
ggcagugucucccacagacccaggagcgccac

SEQ ID NO: 456476 - RNA, 32 nt, Human
ggcagugugagcuguaggcagggacggggagg

SEQ ID NO: 456477 - RNA, 32 nt, Human
ggcagugugcaggcagguccugaggccugggg

SEQ ID NO: 456478 - RNA, 32 nt, Human
ggcagugugcggcucuggcggcugcguggcgg

SEQ ID NO: 456479 - RNA, 32 nt, Human
ggcagugugggaugggagggagcccugaaaca

SEQ ID NO: 456480 - RNA, 32 nt, Human
ggcaguguggugggaaggaagcucuggaagcu

SEQ ID NO: 456481 - RNA, 32 nt, Human
ggcaguguguauauaauaaacauguauggaaa

SEQ ID NO: 456482 - RNA, 32 nt, Human
ggcaguguuccuauuuggggcuugcaugccaa

SEQ ID NO: 456483 - RNA, 32 nt, Human
ggcaguguucugacagauguauaguguuuuga

SEQ ID NO: 456484 - RNA, 32 nt, Human
ggcaguuaacaugcaugggcugguuuguuucu

SEQ ID NO: 456485 - RNA, 24 nt, Human
ggcaguuaacuaaagaguacuccu

SEQ ID NO: 456486 - RNA, 21 nt, Human
ggcaguuaacuuaauaucccu

SEQ ID NO: 456487 - RNA, 32 nt, Human
ggcaguuaaguaugguuuaaagagauguuuau

SEQ ID NO: 456488 - RNA, 32 nt, Human
ggcaguuagccagcucaaguucuuuuucagag

SEQ ID NO: 456489 - RNA, 32 nt, Human
ggcaguuaugcuguuacuagugauuuuagggc

SEQ ID NO: 456490 - RNA, 32 nt, Human
ggcaguucacugcaugugcugcccccuugggu

SEQ ID NO: 456491 - RNA, 32 nt, Human
ggcaguucaggcagaucggaaaccacuggcug

SEQ ID NO: 456492 - RNA, 32 nt, Human
ggcaguucaggucauauggugacuugaugacc

SEQ ID NO: 456493 - RNA, 32 nt, Human
ggcaguuccaggacacagggaagugaguguga

SEQ ID NO: 456494 - RNA, 32 nt, Human
ggcaguuccugaccagcaccccaccaaguccu

SEQ ID NO: 456495 - RNA, 32 nt, Human
ggcaguucugcacccagccaaacacauaacaa

SEQ ID NO: 456496 - RNA, 32 nt, Human
ggcaguugaaaccaguuggacggcccagcuug

SEQ ID NO: 456497 - RNA, 32 nt, Human
ggcaguugaaggaggcagagaagggguuggug

SEQ ID NO: 456498 - RNA, 17 nt, Human
ggcaguugaccuggguc

SEQ ID NO: 456499 - RNA, 32 nt, Human
ggcaguugccuguaauccuagcuacucaggag

SEQ ID NO: 456500 - RNA, 32 nt, Human
ggcaguuggaggaaggccagaggaacagcuuu

SEQ ID NO: 456501 - RNA, 23 nt, Human
ggcaguuggaucaccugagguua

SEQ ID NO: 456502 - RNA, 32 nt, Human
ggcaguuguggagggagagggagcaaggaaua

SEQ ID NO: 456503 - RNA, 32 nt, Human
ggcaguuucaguuucagccuaagagacuggug

SEQ ID NO: 456504 - RNA, 32 nt, Human
ggcaguuugaagcaguucuucaugccacuuag

SEQ ID NO: 456505 - RNA, 32 nt, Human
ggcaguuugagaccagccugaccaacguggag

SEQ ID NO: 456506 - RNA, 32 nt, Human
ggcaguuuguaauccuggacuagcuuugcuga

SEQ ID NO: 456507 - RNA, 32 nt, Human
ggcauaaacuuagacacagucuugcauuuuug

SEQ ID NO: 456508 - RNA, 32 nt, Human
ggcauaaauguucaaucuaacggcuuugguug

SEQ ID NO: 456509 - RNA, 24 nt, Human
ggcauaagcaauccucccacuuca

SEQ ID NO: 456510 - RNA, 32 nt, Human
ggcauaaugacagcaccugccuggugaugcuc

SEQ ID NO: 456511 - RNA, 32 nt, Human
ggcauacacaugcacgcuuacauguacacgug

SEQ ID NO: 456512 - RNA, 32 nt, Human
ggcauacaccuguaauuccagcuacucauagg

SEQ ID NO: 456513 - RNA, 32 nt, Human
ggcauacagcauggugacuggaauggaugagc

SEQ ID NO: 456514 - RNA, 32 nt, Human
ggcauacaggcagcgagcgcuaagggacgcac

SEQ ID NO: 456515 - RNA, 32 nt, Human
ggcauacauauaauacauaccuaauuauagua

SEQ ID NO: 456516 - RNA, 32 nt, Human
ggcauacauaugcacacaagcaugcacagagg

SEQ ID NO: 456517 - RNA, 32 nt, Human
ggcauaccuuucaauuucucugaucucuaugg

SEQ ID NO: 456518 - RNA, 32 nt, Human
ggcauacgccuguaaucccagcuacucgggag

SEQ ID NO: 456519 - RNA, 32 nt, Human
ggcauacgccuguaauccuagcuacuugggag

SEQ ID NO: 456520 - RNA, 32 nt, Human
ggcauacguggugggaggguggagggcucccu

SEQ ID NO: 456521 - RNA, 32 nt, Human
ggcauacguguucacaggcagaguaguugauc

SEQ ID NO: 456522 - RNA, 17 nt, Human
ggcauacucaccuggau

SEQ ID NO: 456523 - RNA, 32 nt, Human
ggcauagaauuccaaagaaaauggugcugggu

SEQ ID NO: 456524 - RNA, 32 nt, Human
ggcauagagguugggcuggaggccuguccacu

SEQ ID NO: 456525 - RNA, 32 nt, Human
ggcauagcucacuguaggcuagccucugcuua

SEQ ID NO: 456526 - RNA, 32 nt, Human
ggcauaggccuguaaucguagcgcuuugagag

SEQ ID NO: 456527 - RNA, 32 nt, Human
ggcauaggcucuagugcugaaaggauccaggu

SEQ ID NO: 456528 - RNA, 32 nt, Human
ggcauagggaaaucucugcagccuugauuagu

SEQ ID NO: 456529 - RNA, 32 nt, Human
ggcauagggcagccuaccaccuccaagggggc

SEQ ID NO: 456530 - RNA, 32 nt, Human
ggcauagucauuuucuguaucuuuucaccuca

SEQ ID NO: 456531 - RNA, 22 nt, Human
ggcauaguggcucauacuugua

SEQ ID NO: 456532 - RNA, 32 nt, Human
ggcauaguggugagccaaacgcauuauagcau

SEQ ID NO: 456533 - RNA, 18 nt, Human
ggcauaucaccugagguc

SEQ ID NO: 456534 - RNA, 32 nt, Human
ggcauaucucaaccuccccuuccucaggggca

SEQ ID NO: 456535 - RNA, 32 nt, Human
ggcauaugaagugcuuucagauccaaagaaaa

SEQ ID NO: 456536 - RNA, 20 nt, Human
ggcauaugacuuuauacuua

SEQ ID NO: 456537 - RNA, 32 nt, Human
ggcauaugagaauaggugagcaagauauugcu

SEQ ID NO: 456538 - RNA, 32 nt, Human
ggcauaugcaauauuuacauuuuuaauuuagu

SEQ ID NO: 456539 - RNA, 32 nt, Human
ggcauaugccuguaaaucccagcuauuuggga

SEQ ID NO: 456540 - RNA, 32 nt, Human
ggcauaugccuguagucccaguuacuugggag

SEQ ID NO: 456541 - RNA, 32 nt, Human
ggcauaugggcaacaaagcuauggaaccuaug

SEQ ID NO: 456542 - RNA, 32 nt, Human
ggcauauggggcccugccaacaccacuuccuc

SEQ ID NO: 456543 - RNA, 32 nt, Human
ggcauauguauacauauguaacaaaccugcau

SEQ ID NO: 456544 - RNA, 22 nt, Human
ggcauauugaaagggcugcacc

SEQ ID NO: 456545 - RNA, 32 nt, Human
ggcauauugcauucuaaauaagaugcuaaaua

SEQ ID NO: 456546 - RNA, 32 nt, Human
ggcauauuggggaccugggaaugugugaagga

SEQ ID NO: 456547 - RNA, 32 nt, Human
ggcauauuguagcugcucaguggacguuagcu

SEQ ID NO: 456548 - RNA, 22 nt, Human
ggcaucaaccccaggccacgcu

SEQ ID NO: 456549 - RNA, 32 nt, Human
ggcaucaacuggagccacuucacagcuuguuu

SEQ ID NO: 456550 - RNA, 32 nt, Human
ggcaucaacuuaggugacagguacgauaagca

SEQ ID NO: 456551 - RNA, 32 nt, Human
ggcaucaaggaguacgagugcaaggagugcca

SEQ ID NO: 456552 - RNA, 32 nt, Human
ggcaucaaucacacagcaagcuuuucaaagga

SEQ ID NO: 456553 - RNA, 32 nt, Human
ggcaucaaucacauagcaagcuuuucaaagga

SEQ ID NO: 456554 - RNA, 25 nt, Human
ggcaucacacgccaguggccaccug

SEQ ID NO: 456555 - RNA, 32 nt, Human
ggcaucacagaagugaaaugaaaacaaaauua

SEQ ID NO: 456556 - RNA, 32 nt, Human
ggcaucacagaucauuguggacuuggcacgcu

SEQ ID NO: 456557 - RNA, 32 nt, Human
ggcaucacagugagcagugagcacagagggag

SEQ ID NO: 456558 - RNA, 23 nt, Human
ggcaucaccagccgaaccugccu

SEQ ID NO: 456559 - RNA, 18 nt, Human
ggcaucaccaggauucua

SEQ ID NO: 456560 - RNA, 32 nt, Human
ggcaucacccgcucggcucugaagcggacgcc

SEQ ID NO: 456561 - RNA, 22 nt, Human
ggcaucacgcuaccugacuuca

SEQ ID NO: 456562 - RNA, 22 nt, Human
ggcaucacgcugccugacuuca

SEQ ID NO: 456563 - RNA, 19 nt, Human
ggcaucacguccacaugca

SEQ ID NO: 456564 - RNA, 32 nt, Human
ggcaucacuggcagaggauucguguagguggc

SEQ ID NO: 456565 - RNA, 32 nt, Human
ggcaucacuuucuccuccuccucaugcccugc

SEQ ID NO: 456566 - RNA, 19 nt, Human
ggcaucagagccucacaga

SEQ ID NO: 456567 - RNA, 23 nt, Human
ggcaucagauggagcacacaggu

SEQ ID NO: 456568 - RNA, 22 nt, Human
ggcaucagauuccugauccaca

SEQ ID NO: 456569 - RNA, 32 nt, Human
ggcaucagcagucacagagcaccaagccaaaa

SEQ ID NO: 456570 - RNA, 32 nt, Human
ggcaucagcaucagcccuuccucccagagccc

SEQ ID NO: 456571 - RNA, 32 nt, Human
ggcaucagccaccacacccagccaacuuaacu

SEQ ID NO: 456572 - RNA, 32 nt, Human
ggcaucagccaccacacccagccgucauugga

SEQ ID NO: 456573 - RNA, 32 nt, Human
ggcaucagccaccacaccuggccuugaacauu

SEQ ID NO: 456574 - RNA, 32 nt, Human
ggcaucagccaucuugcuugagaaccaccaag

SEQ ID NO: 456575 - RNA, 20 nt, Human
ggcaucagccucauaccuaa

SEQ ID NO: 456576 - RNA, 24 nt, Human
ggcaucagccugcuguugaucaca

SEQ ID NO: 456577 - RNA, 32 nt, Human
ggcaucagcguuucaugcucugccuuuuagcu

SEQ ID NO: 456578 - RNA, 18 nt, Human
ggcaucagcuaccugggc

SEQ ID NO: 456579 - RNA, 32 nt, Human
ggcaucagcuguuggaaaccugggcagcccuc

SEQ ID NO: 456580 - RNA, 32 nt, Human
ggcaucaggccccagccuuggccugaaaccuc

SEQ ID NO: 456581 - RNA, 19 nt, Human
ggcaucaggcugcuuggac

SEQ ID NO: 456582 - RNA, 24 nt, Human
ggcaucagggaaauauuuguuaca

SEQ ID NO: 456583 - RNA, 32 nt, Human
ggcaucagggccuuucuccuccccaccuguag

SEQ ID NO: 456584 - RNA, 32 nt, Human
ggcaucagguucuaaaauaagcucguaauuuu

SEQ ID NO: 456585 - RNA, 32 nt, Human
ggcaucaguacacaucauccuccucacuccag

SEQ ID NO: 456586 - RNA, 32 nt, Human
ggcaucaguguccaggaguagcuguauuugag

SEQ ID NO: 456587 - RNA, 32 nt, Human
ggcaucauccaauuuucuucccaaaccucugc

SEQ ID NO: 456588 - RNA, 23 nt, Human
ggcaucaucugcccccggcuaca

SEQ ID NO: 456589 - RNA, 32 nt, Human
ggcaucaugaucuuugccuuccuugaaaauac

SEQ ID NO: 456590 - RNA, 32 nt, Human
ggcaucaugcaucuguacuguaccaaaagugu

SEQ ID NO: 456591 - RNA, 32 nt, Human
ggcaucauggggacaaaaggaaaccucugacu

SEQ ID NO: 456592 - RNA, 32 nt, Human
ggcaucauugcauuccagccugggcaacagag

SEQ ID NO: 456593 - RNA, 22 nt, Human
ggcaucauuuauaguagcaaaa

SEQ ID NO: 456594 - RNA, 32 nt, Human
ggcauccaauccagagggguccacucuagagg

SEQ ID NO: 456595 - RNA, 22 nt, Human
ggcauccacaccuccauuuuau

SEQ ID NO: 456596 - RNA, 32 nt, Human
ggcauccacuugugguaaccccuuacgaugau

SEQ ID NO: 456597 - RNA, 32 nt, Human
ggcauccagaagcagcugcaguguugcugcca

SEQ ID NO: 456598 - RNA, 32 nt, Human
ggcauccaggcagagggauugauguccgaaga

SEQ ID NO: 456599 - RNA, 32 nt, Human
ggcauccaggcagguccagcaguccuggcggg

SEQ ID NO: 456600 - RNA, 32 nt, Human
ggcauccagggugauuagggggcagucgagga

SEQ ID NO: 456601 - RNA, 32 nt, Human
ggcauccaguacagaggggcuggacuuggacc

SEQ ID NO: 456602 - RNA, 32 nt, Human
ggcauccauacaccccagaagacuucccaaau

SEQ ID NO: 456603 - RNA, 32 nt, Human
ggcauccaucaucuguagcauuucuccuuugu

SEQ ID NO: 456604 - RNA, 32 nt, Human
ggcauccauuccaaucaagaaaugauggugcu

SEQ ID NO: 456605 - RNA, 32 nt, Human
ggcaucccaaagugcugggauuacaagaauga

SEQ ID NO: 456606 - RNA, 32 nt, Human
ggcaucccaaagugcugggauuacagcauccc

SEQ ID NO: 456607 - RNA, 32 nt, Human
ggcaucccaaagugcugggauuacgagcguga

SEQ ID NO: 456608 - RNA, 32 nt, Human
ggcaucccaaaguguugggauuauaggcacga

SEQ ID NO: 456609 - RNA, 32 nt, Human
ggcaucccaagaccucaucugccugcaguguc

SEQ ID NO: 456610 - RNA, 32 nt, Human
ggcaucccaggauuuggaauucagcugugagc

SEQ ID NO: 456611 - RNA, 32 nt, Human
ggcaucccaggccuuccuccugacugacuucu

SEQ ID NO: 456612 - RNA, 32 nt, Human
ggcaucccaugcacuccacuucucaggaucua

SEQ ID NO: 456613 - RNA, 32 nt, Human
ggcauccccaggcugcccagaccuaagggcuu

SEQ ID NO: 456614 - RNA, 32 nt, Human
ggcauccccucccagguuuucagccagugccu

SEQ ID NO: 456615 - RNA, 18 nt, Human
ggcauccccucgccugga

SEQ ID NO: 456616 - RNA, 32 nt, Human
ggcauccccuucuccaccugguaaaugcugcc

SEQ ID NO: 456617 - RNA, 32 nt, Human
ggcaucccuaaagcucacucugaagauguuag

SEQ ID NO: 456618 - RNA, 19 nt, Human
ggcaucccuaccgccugga

SEQ ID NO: 456619 - RNA, 32 nt, Human
ggcaucccuccugguaccaagcugcugggugc

SEQ ID NO: 456620 - RNA, 32 nt, Human
ggcaucccugcccugccuccagccuugguggc

SEQ ID NO: 456621 - RNA, 32 nt, Human
ggcaucccugcucccugcccugggucccagac

SEQ ID NO: 456622 - RNA, 21 nt, Human
ggcaucccuggggaccugggc

SEQ ID NO: 456623 - RNA, 19 nt, Human
ggcauccgagaugcugggc

SEQ ID NO: 456624 - RNA, 32 nt, Human
ggcauccgcuuuggcuggagcucucagugcgu

SEQ ID NO: 456625 - RNA, 32 nt, Human
ggcauccggagcuuccugaggacacaccagca

SEQ ID NO: 456626 - RNA, 32 nt, Human
ggcauccggcuaccugcccucccugccuuccc

SEQ ID NO: 456627 - RNA, 32 nt, Human
ggcauccgggcccgcuacucgcccacugggag

SEQ ID NO: 456628 - RNA, 32 nt, Human
ggcauccuaaagugcugagaugacaggcauga

SEQ ID NO: 456629 - RNA, 32 nt, Human
ggcauccuaaagugcugggauuacaggcguga

SEQ ID NO: 456630 - RNA, 32 nt, Human
ggcauccuaccaacagcaccaucaaggcacgu

SEQ ID NO: 456631 - RNA, 19 nt, Human
ggcauccucagaugucagc

SEQ ID NO: 456632 - RNA, 18 nt, Human
ggcauccucauccuguac

SEQ ID NO: 456633 - RNA, 32 nt, Human
ggcauccuccuccugggauuccuguggccucc

SEQ ID NO: 456634 - RNA, 32 nt, Human
ggcauccucgugaaagugcacacacuucaugg

SEQ ID NO: 456635 - RNA, 32 nt, Human
ggcauccucucucugcuggucaacccugucca

SEQ ID NO: 456636 - RNA, 32 nt, Human
ggcauccugacaggcacagugagacccuugcu

SEQ ID NO: 456637 - RNA, 18 nt, Human
ggcauccugacgcuggac

SEQ ID NO: 456638 - RNA, 32 nt, Human
ggcauccugaguccuggcccuccugggaucug

SEQ ID NO: 456639 - RNA, 16 nt, Human
ggcauccugccugggc

SEQ ID NO: 456640 - RNA, 18 nt, Human
ggcauccuggcgcuggac

SEQ ID NO: 456641 - RNA, 32 nt, Human
ggcauccuucaguucaaucaaguugugccuaa

SEQ ID NO: 456642 - RNA, 32 nt, Human
ggcauccuugaggaccuccaccugggagaugc

SEQ ID NO: 456643 - RNA, 32 nt, Human
ggcaucgcuugguuccugaugcccauguucca

SEQ ID NO: 456644 - RNA, 32 nt, Human
ggcaucggcaagaaaaagaaggugguggccgu

SEQ ID NO: 456645 - RNA, 32 nt, Human
ggcaucgggccagggaaaaccucggauuagca

SEQ ID NO: 456646 - RNA, 32 nt, Human
ggcaucgguucuccucacucuccagccuguug

SEQ ID NO: 456647 - RNA, 32 nt, Human
ggcaucgucuaugcuucccuugcccucuccag

SEQ ID NO: 456648 - RNA, 32 nt, Human
ggcaucgucucugggcccuccuuucccccuuu

SEQ ID NO: 456649 - RNA, 19 nt, Human
ggcaucguguccacgcuca

SEQ ID NO: 456650 - RNA, 20 nt, Human
ggcaucuacacagccuggac

SEQ ID NO: 456651 - RNA, 32 nt, Human
ggcaucuagcauuugccuccuccacaaagaag

SEQ ID NO: 456652 - RNA, 32 nt, Human
ggcaucuagggagggugugggaaggucaagau

SEQ ID NO: 456653 - RNA, 32 nt, Human
ggcaucuauuccugcccccaucaugccccaca

SEQ ID NO: 456654 - RNA, 31 nt, Human
ggcaucucaauaaaacuguuucgaaaagaag

SEQ ID NO: 456655 - RNA, 32 nt, Human
ggcaucucacguacccccaucugagaccucuu

SEQ ID NO: 456656 - RNA, 32 nt, Human
ggcaucuccagccucaggccggcagguccuau

SEQ ID NO: 456657 - RNA, 32 nt, Human
ggcaucuccuacucuccauuuauauucuaugg

SEQ ID NO: 456658 - RNA, 32 nt, Human
ggcaucuccugucacauugggaaaugaagaau

SEQ ID NO: 456659 - RNA, 16 nt, Human
ggcaucuccuucugca

SEQ ID NO: 456660 - RNA, 32 nt, Human
ggcaucucggcccuggcuccagcuccggcucc

SEQ ID NO: 456661 - RNA, 23 nt, Human
ggcaucucgguccauucugccca

SEQ ID NO: 456662 - RNA, 32 nt, Human
ggcaucucucuagccugguagaaucuuacuau

SEQ ID NO: 456663 - RNA, 32 nt, Human
ggcaucucugagaaaguggccccagggagaga

SEQ ID NO: 456664 - RNA, 32 nt, Human
ggcaucucugggcuggaugagcucccacaagc

SEQ ID NO: 456665 - RNA, 32 nt, Human
ggcaucugacuucacacugagcugagccuauc

SEQ ID NO: 456666 - RNA, 32 nt, Human
ggcaucugagugaaguguccccagggacaucu

SEQ ID NO: 456667 - RNA, 32 nt, Human
ggcaucugcacuccagcccaggacuguggucu

SEQ ID NO: 456668 - RNA, 32 nt, Human
ggcaucugccacugcugcugacugccacuacc

SEQ ID NO: 456669 - RNA, 32 nt, Human
ggcaucugcccaggacagaagccauggcauau

SEQ ID NO: 456670 - RNA, 32 nt, Human
ggcaucugccuguagucccagcuacucgggag

SEQ ID NO: 456671 - RNA, 32 nt, Human
ggcaucugccuuccagaaucucucucuggcuu

SEQ ID NO: 456672 - RNA, 19 nt, Human
ggcaucuggaagccugggc

SEQ ID NO: 456673 - RNA, 32 nt, Human
ggcaucuggcagcaagaaggugaggcaucagg

SEQ ID NO: 456674 - RNA, 32 nt, Human
ggcaucugggguuguggcuggggaaggacggg

SEQ ID NO: 456675 - RNA, 32 nt, Human
ggcaucugguuacugguuauuuuaaaaagaau

SEQ ID NO: 456676 - RNA, 32 nt, Human
ggcaucugguugaccccagccuggggaggagg

SEQ ID NO: 456677 - RNA, 32 nt, Human
ggcaucugguuucuaaaaauuuauuugaaaca

SEQ ID NO: 456678 - RNA, 32 nt, Human
ggcaucuguagucccagcuaauuggaagggug

SEQ ID NO: 456679 - RNA, 32 nt, Human
ggcaucuguagucccagcuacucaggaggcug

SEQ ID NO: 456680 - RNA, 32 nt, Human
ggcaucuguagucccagcuacuugggaagcug

SEQ ID NO: 456681 - RNA, 32 nt, Human
ggcaucuguccacccaugugguuccagacacg

SEQ ID NO: 456682 - RNA, 32 nt, Human
ggcaucuguggacucaaggaguccaggugacg

SEQ ID NO: 456683 - RNA, 23 nt, Human
ggcaucuguguccaaccugguca

SEQ ID NO: 456684 - RNA, 31 nt, Human
ggcaucuuaauagacuucuguugaaaacuuc

SEQ ID NO: 456685 - RNA, 32 nt, Human
ggcaucuuaucuagguccgugcagcccaaggg

SEQ ID NO: 456686 - RNA, 32 nt, Human
ggcaucuucucaggcagaggugcaaccugucg

SEQ ID NO: 456687 - RNA, 32 nt, Human
ggcaucuucuugugguguaguccccuuggaac

SEQ ID NO: 456688 - RNA, 18 nt, Human
ggcaucuugccccuugac

SEQ ID NO: 456689 - RNA, 22 nt, Human
ggcaucuugcucaccgcccuga

SEQ ID NO: 456690 - RNA, 20 nt, Human
ggcaucuuuagacaccugga

SEQ ID NO: 456691 - RNA, 32 nt, Human
ggcaucuuugcaugaagaaagcagaaguuuac

SEQ ID NO: 456692 - RNA, 32 nt, Human
ggcaucuuugccugcccugccuugcuuggccc

SEQ ID NO: 456693 - RNA, 32 nt, Human
ggcaugaaaaccuuggcuucagccucugagau

SEQ ID NO: 456694 - RNA, 32 nt, Human
ggcaugaaccaccacgccuggccuaaaauguu

SEQ ID NO: 456695 - RNA, 32 nt, Human
ggcaugaaccccaggcuggagugcaguggcuc

SEQ ID NO: 456696 - RNA, 32 nt, Human
ggcaugaagcugcauaugauagaugacaaauu

SEQ ID NO: 456697 - RNA, 32 nt, Human
ggcaugaauauggcagagucuucauauggaaa

SEQ ID NO: 456698 - RNA, 17 nt, Human
ggcaugaaugccugggc

SEQ ID NO: 456699 - RNA, 32 nt, Human
ggcaugacaagaaaaucuuaaaaacaggaaaa

SEQ ID NO: 456700 - RNA, 32 nt, Human
ggcaugacagcccuuggcuugcugggggagga

SEQ ID NO: 456701 - RNA, 25 nt, Human
ggcaugaccaagaacaccuggcuac

SEQ ID NO: 456702 - RNA, 32 nt, Human
ggcaugacccagccuaugguuugccauacucc

SEQ ID NO: 456703 - RNA, 32 nt, Human
ggcaugaccucagcuccacuuuugaggcugca

SEQ ID NO: 456704 - RNA, 32 nt, Human
ggcaugacucuucaaccccgaggucccuguug

SEQ ID NO: 456705 - RNA, 32 nt, Human
ggcaugacugacauacauacucaaauauaggc

SEQ ID NO: 456706 - RNA, 32 nt, Human
ggcaugacuuaggcucuuuacccuccaacuua

SEQ ID NO: 456707 - RNA, 32 nt, Human
ggcaugacuuccuggcaccacagggaaaaucg

SEQ ID NO: 456708 - RNA, 32 nt, Human
ggcaugagccaccacacccagccccuuuccaa

SEQ ID NO: 456709 - RNA, 32 nt, Human
ggcaugagccaccacacccagcccggacagcu

SEQ ID NO: 456710 - RNA, 32 nt, Human
ggcaugagccaccacacccagccuccucuucu

SEQ ID NO: 456711 - RNA, 32 nt, Human
ggcaugagccaccacacccagccuucagcugu

SEQ ID NO: 456712 - RNA, 32 nt, Human
ggcaugagccaccacacccagccuuuauugca

SEQ ID NO: 456713 - RNA, 32 nt, Human
ggcaugagccaccacacccagcuccucccccu

SEQ ID NO: 456714 - RNA, 32 nt, Human
ggcaugagccaccacacccggccugaguagag

SEQ ID NO: 456715 - RNA, 32 nt, Human
ggcaugagccaccacacccugcccauguguuc

SEQ ID NO: 456716 - RNA, 32 nt, Human
ggcaugagccaccacaccuggauugccauauu

SEQ ID NO: 456717 - RNA, 32 nt, Human
ggcaugagccaccacaccuggcuacuuuauau

SEQ ID NO: 456718 - RNA, 32 nt, Human
ggcaugagccaccacaccuugccacaaaugug

SEQ ID NO: 456719 - RNA, 32 nt, Human
ggcaugagccaccacacuggcaaaugucuaca

SEQ ID NO: 456720 - RNA, 32 nt, Human
ggcaugagccaccacauccggccuaauuacuu

SEQ ID NO: 456721 - RNA, 32 nt, Human
ggcaugagccaccacaucuggccuaggaccuu

SEQ ID NO: 456722 - RNA, 19 nt, Human
ggcaugagccaccacggcc

SEQ ID NO: 456723 - RNA, 32 nt, Human
ggcaugagccaccgcacccagccugguuauug

SEQ ID NO: 456724 - RNA, 32 nt, Human
ggcaugagccacugcacccaaccccuggaaaa

SEQ ID NO: 456725 - RNA, 32 nt, Human
ggcaugagccacugcacccagccuuggcgggc

SEQ ID NO: 456726 - RNA, 32 nt, Human
ggcaugagccacugcacccggccgguggaaag

SEQ ID NO: 456727 - RNA, 32 nt, Human
ggcaugagccacugcaccuggcccacuuuaac

SEQ ID NO: 456728 - RNA, 32 nt, Human
ggcaugagccacugcaccuggccgguuauucu

SEQ ID NO: 456729 - RNA, 32 nt, Human
ggcaugagccacugcaccuggccuacguauua

SEQ ID NO: 456730 - RNA, 32 nt, Human
ggcaugagccacugcaccuggccuaggacugg

SEQ ID NO: 456731 - RNA, 32 nt, Human
ggcaugagccacugugccuggccaacauaaug

SEQ ID NO: 456732 - RNA, 32 nt, Human
ggcaugaguuagucgcagacauggacaccaaa

SEQ ID NO: 456733 - RNA, 22 nt, Human
ggcaugaucucagcucacugca

SEQ ID NO: 456734 - RNA, 32 nt, Human
ggcaugaucucagcuccgccuccuggguucac

SEQ ID NO: 456735 - RNA, 32 nt, Human
ggcaugaucucggcucacuacaagcucugccu

SEQ ID NO: 456736 - RNA, 32 nt, Human
ggcaugauggggagagaccagacugaaucuac

SEQ ID NO: 456737 - RNA, 32 nt, Human
ggcaugauguucugcuucugucaguuauucuu

SEQ ID NO: 456738 - RNA, 32 nt, Human
ggcaugauucucucaggcuucugccccgaggc

SEQ ID NO: 456739 - RNA, 19 nt, Human
ggcaugcaaccacaaggug

SEQ ID NO: 456740 - RNA, 19 nt, Human
ggcaugcacacauaucucc

SEQ ID NO: 456741 - RNA, 32 nt, Human
ggcaugcaccaccacaccuggcuaguuuuugu

SEQ ID NO: 456742 - RNA, 32 nt, Human
ggcaugcaccaccacgcccagcuuauuuugua

SEQ ID NO: 456743 - RNA, 32 nt, Human
ggcaugcaccaccacgcccagcuuugaauccg

SEQ ID NO: 456744 - RNA, 32 nt, Human
ggcaugcaccuguaaucccagcuacuugggag

SEQ ID NO: 456745 - RNA, 32 nt, Human
ggcaugcagccugucggcagagugucuuaaca

SEQ ID NO: 456746 - RNA, 32 nt, Human
ggcaugcaggagguggaggaauuaagugaaac

SEQ ID NO: 456747 - RNA, 32 nt, Human
ggcaugcagggaaucccauccagcgucccucu

SEQ ID NO: 456748 - RNA, 32 nt, Human
ggcaugcaggguggaaccaggccugccuucca

SEQ ID NO: 456749 - RNA, 32 nt, Human
ggcaugcaucugugagcuuuagaucauuaaau

SEQ ID NO: 456750 - RNA, 18 nt, Human
ggcaugccaagggggcug

SEQ ID NO: 456751 - RNA, 19 nt, Human
ggcaugccaaguccugcug

SEQ ID NO: 456752 - RNA, 32 nt, Human
ggcaugccagccugggcgaugcugcagugacc

SEQ ID NO: 456753 - RNA, 32 nt, Human
ggcaugccauuacauugcuuuuucuuguuugu

SEQ ID NO: 456754 - RNA, 32 nt, Human
ggcaugcccaagggaggaagcagagggaggca

SEQ ID NO: 456755 - RNA, 32 nt, Human
ggcaugccccuggguuggggugggugggagga

SEQ ID NO: 456756 - RNA, 32 nt, Human
ggcaugcccugguccaaguccucugucuuugu

SEQ ID NO: 456757 - RNA, 32 nt, Human
ggcaugcccuucucccccaucuccguguccuc

SEQ ID NO: 456758 - RNA, 32 nt, Human
ggcaugccuguaaucccagaauuuugggaggc

SEQ ID NO: 456759 - RNA, 32 nt, Human
ggcaugccuguacugcccucucccaagaaugc

SEQ ID NO: 456760 - RNA, 32 nt, Human
ggcaugccuuacuccaggugccuguguuuggc

SEQ ID NO: 456761 - RNA, 32 nt, Human
ggcaugcgccuguaaucccagcuacucaggaa

SEQ ID NO: 456762 - RNA, 32 nt, Human
ggcaugcgccuguaaucccagcuacucaggag

SEQ ID NO: 456763 - RNA, 32 nt, Human
ggcaugcgccuguaaucccagcuacucgggag

SEQ ID NO: 456764 - RNA, 32 nt, Human
ggcaugcgccuguaaucccagcuacuucggag

SEQ ID NO: 456765 - RNA, 32 nt, Human
ggcaugcgccuguaaucccggcuacucgggag

SEQ ID NO: 456766 - RNA, 32 nt, Human
ggcaugcgccugugaucccagcuacuuggaag

SEQ ID NO: 456767 - RNA, 32 nt, Human
ggcaugcggacccuucagggugccccaggcgc

SEQ ID NO: 456768 - RNA, 32 nt, Human
ggcaugcuccccucccccacagccucuuccuc

SEQ ID NO: 456769 - RNA, 32 nt, Human
ggcaugcugcaaggaucagagccagacaccag

SEQ ID NO: 456770 - RNA, 32 nt, Human
ggcaugcuggccucaugggcuugggggccuac

SEQ ID NO: 456771 - RNA, 22 nt, Human
ggcaugcuggcucaugccugua

SEQ ID NO: 456772 - RNA, 32 nt, Human
ggcaugcuuggaugcccagcuguguccagagg

SEQ ID NO: 456773 - RNA, 32 nt, Human
ggcauggaaggcagaggcuggguggggugggg

SEQ ID NO: 456774 - RNA, 19 nt, Human
ggcauggaauaaugccuag

SEQ ID NO: 456775 - RNA, 32 nt, Human
ggcauggaaucaggaccgugaacugccuagug

SEQ ID NO: 456776 - RNA, 32 nt, Human
ggcauggacugcugccaggcugcgugcgcccu

SEQ ID NO: 456777 - RNA, 17 nt, Human
ggcauggagcagaguga

SEQ ID NO: 456778 - RNA, 32 nt, Human
ggcauggaggagggugcaaagauauggguugc

SEQ ID NO: 456779 - RNA, 28 nt, Human
ggcauggaggggccccggagcuccaccc

SEQ ID NO: 456780 - RNA, 32 nt, Human
ggcauggagguggcaggcccugguucccucag

SEQ ID NO: 456781 - RNA, 28 nt, Human
ggcauggagguggcgcugcagacugagc

SEQ ID NO: 456782 - RNA, 32 nt, Human
ggcauggcacagcaguugcugcacaggagccc

SEQ ID NO: 456783 - RNA, 28 nt, Human
ggcauggcagaggcgcgaucccagcccu

SEQ ID NO: 456784 - RNA, 32 nt, Human
ggcauggcagcacuuaugcucugugacaguau

SEQ ID NO: 456785 - RNA, 32 nt, Human
ggcauggcaguggccucagccuuaaacuuuug

SEQ ID NO: 456786 - RNA, 32 nt, Human
ggcauggcauuacauauuauauguucuagaaa

SEQ ID NO: 456787 - RNA, 17 nt, Human
ggcauggcccugggguc

SEQ ID NO: 456788 - RNA, 32 nt, Human
ggcauggccuccaccaagcucagcccuuggga

SEQ ID NO: 456789 - RNA, 32 nt, Human
ggcauggcucuaccucccaaccccucccaacc

SEQ ID NO: 456790 - RNA, 32 nt, Human
ggcauggcugaguaccccagacgucuggucca

SEQ ID NO: 456791 - RNA, 32 nt, Human
ggcauggcugcugugguggacaagauacgaga

SEQ ID NO: 456792 - RNA, 28 nt, Human
ggcauggcuggaaaugugcagcuuugcu

SEQ ID NO: 456793 - RNA, 32 nt, Human
ggcauggcuuguaucugcaguguccuugcugu

SEQ ID NO: 456794 - RNA, 32 nt, Human
ggcaugggaagcccucucuaggaggaugcugu

SEQ ID NO: 456795 - RNA, 32 nt, Human
ggcaugggaaugaaugucagugugacugaucu

SEQ ID NO: 456796 - RNA, 32 nt, Human
ggcaugggacuggcccaggcacacaggucccg

SEQ ID NO: 456797 - RNA, 32 nt, Human
ggcaugggagagaaacgggcuggggagugagg

SEQ ID NO: 456798 - RNA, 32 nt, Human
ggcaugggagagaagggaggaggugggcacag

SEQ ID NO: 456799 - RNA, 32 nt, Human
ggcaugggagagagugggaugaacagaccucu

SEQ ID NO: 456800 - RNA, 32 nt, Human
ggcaugggagcuaaaaauccugugauacuaag

SEQ ID NO: 456801 - RNA, 32 nt, Human
ggcaugggaugcuccaggaggucugggguacc

SEQ ID NO: 456802 - RNA, 32 nt, Human
ggcauggggaaagaggaggaagagcauuagga

SEQ ID NO: 456803 - RNA, 32 nt, Human
ggcauggggcacuccuagccagugagucaugg

SEQ ID NO: 456804 - RNA, 32 nt, Human
ggcauggggcaggaggcagccacccacaccuu

SEQ ID NO: 456805 - RNA, 32 nt, Human
ggcaugggggcagaggugaaucagaugacagc

SEQ ID NO: 456806 - RNA, 31 nt, Human
ggcauggggguggggccucagaugcuggggc

SEQ ID NO: 456807 - RNA, 31 nt, Human
ggcauggguaccugcauuucacuggaauggg

SEQ ID NO: 456808 - RNA, 22 nt, Human
ggcaugguagcucaugccugua

SEQ ID NO: 456809 - RNA, 19 nt, Human
ggcaugguaguucacaccu

SEQ ID NO: 456810 - RNA, 28 nt, Human
ggcaugguccaagaacuggaccuuaccc

SEQ ID NO: 456811 - RNA, 32 nt, Human
ggcauggucccucccauucuggcuccaccugc

SEQ ID NO: 456812 - RNA, 32 nt, Human
ggcaugguccucaagugaguucuuaguauuuu

SEQ ID NO: 456813 - RNA, 32 nt, Human
ggcaugguccuggaggaugaccaggacuaaug

SEQ ID NO: 456814 - RNA, 32 nt, Human
ggcauggucucaucuccgcaucaggaauucac

SEQ ID NO: 456815 - RNA, 24 nt, Human
ggcauggucugcccucugcauccu

SEQ ID NO: 456816 - RNA, 22 nt, Human
ggcauggugacucauaccugua

SEQ ID NO: 456817 - RNA, 31 nt, Human
ggcauggugcuuuucugagcagaucaauacu

SEQ ID NO: 456818 - RNA, 22 nt, Human
ggcaugguggcaaguaccugua

SEQ ID NO: 456819 - RNA, 22 nt, Human
ggcaugguggcacaugccugua

SEQ ID NO: 456820 - RNA, 22 nt, Human
ggcaugguggcacaugcuugua

SEQ ID NO: 456821 - RNA, 22 nt, Human
ggcaugguggcauaugccugua

SEQ ID NO: 456822 - RNA, 22 nt, Human
ggcaugguggcgcaugccugua

SEQ ID NO: 456823 - RNA, 22 nt, Human
ggcaugguggcgcgugccugua

SEQ ID NO: 456824 - RNA, 22 nt, Human
ggcaugguggcguaugccugua

SEQ ID NO: 456825 - RNA, 22 nt, Human
ggcaugguggcucaagccugua

SEQ ID NO: 456826 - RNA, 22 nt, Human
ggcaugguggcucacaccugua

SEQ ID NO: 456827 - RNA, 22 nt, Human
ggcaugguggcucacgccugua

SEQ ID NO: 456828 - RNA, 32 nt, Human
ggcaugguggcucagagguuugggaggcccag

SEQ ID NO: 456829 - RNA, 22 nt, Human
ggcaugguggcucaggccugua

SEQ ID NO: 456830 - RNA, 22 nt, Human
ggcaugguggcucaugccugua

SEQ ID NO: 456831 - RNA, 22 nt, Human
ggcaugguggcucaugccugug

SEQ ID NO: 456832 - RNA, 22 nt, Human
ggcaugguggcucaugcuugua

SEQ ID NO: 456833 - RNA, 22 nt, Human
ggcaugguggugcaugccugua

SEQ ID NO: 456834 - RNA, 32 nt, Human
ggcauggugguggcacccaucuguagucccag

SEQ ID NO: 456835 - RNA, 20 nt, Human
ggcauggugguuuacaccua

SEQ ID NO: 456836 - RNA, 32 nt, Human
ggcaugguuacaucauuugaacucucugacaa

SEQ ID NO: 456837 - RNA, 32 nt, Human
ggcaugguuucacagagacucauuccagugga

SEQ ID NO: 456838 - RNA, 22 nt, Human
ggcaugguuugcggagguuaga

SEQ ID NO: 456839 - RNA, 32 nt, Human
ggcccugcuucaggaagcaucaggacuaacua

SEQ ID NO: 456840 - RNA, 23 nt, Human
ggcccugcuucccauccuccucu

SEQ ID NO: 456841 - RNA, 18 nt, Human
ggcccugcuuccccaggg

SEQ ID NO: 456842 - RNA, 32 nt, Human
ggcccugcuucucugcuccccugggugauggg

SEQ ID NO: 456843 - RNA, 32 nt, Human
ggcccugcuugccuggccccagaagcuguuuu

SEQ ID NO: 456844 - RNA, 32 nt, Human
ggcccugcuugggaacaucucacgagcuuucc

SEQ ID NO: 456845 - RNA, 21 nt, Human
ggcccugcuuuccccagggug

SEQ ID NO: 456846 - RNA, 32 nt, Human
ggcccuggaagacaagggaggagccugugagc

SEQ ID NO: 456847 - RNA, 32 nt, Human
ggcccuggaagagacccgggucgccuccggag

SEQ ID NO: 456848 - RNA, 32 nt, Human
ggcccuggaagagacgucgccucgccuucauc

SEQ ID NO: 456849 - RNA, 22 nt, Human
ggcccuggaauugugggugagg

SEQ ID NO: 456850 - RNA, 21 nt, Human
ggcccuggacacccugccuga

SEQ ID NO: 456851 - RNA, 20 nt, Human
ggcccuggacaugcugcaga

SEQ ID NO: 456852 - RNA, 21 nt, Human
ggcccuggacccgucaggugc

SEQ ID NO: 456853 - RNA, 20 nt, Human
ggcccuggaccggcggcaga

SEQ ID NO: 456854 - RNA, 32 nt, Human
ggcccuggagagugggccugggugguaccugc

SEQ ID NO: 456855 - RNA, 32 nt, Human
ggcccuggagcagccaccccaugcuggccuug

SEQ ID NO: 456856 - RNA, 32 nt, Human
ggcccuggaggucaaggcugcagugagucaag

SEQ ID NO: 456857 - RNA, 18 nt, Human
ggcccuggagucgccaga

SEQ ID NO: 456858 - RNA, 32 nt, Human
ggcccuggauggcagcucuggcccagacauga

SEQ ID NO: 456859 - RNA, 18 nt, Human
ggcccuggcaggcagcca

SEQ ID NO: 456860 - RNA, 32 nt, Human
ggcccuggccagacguuuucuuugauuuuuaa

SEQ ID NO: 456861 - RNA, 32 nt, Human
ggcccuggcccagcucuggagugcaugugugu

SEQ ID NO: 456862 - RNA, 18 nt, Human
ggcccuggcccugagcca

SEQ ID NO: 456863 - RNA, 19 nt, Human
ggcccuggcccugcgcaga

SEQ ID NO: 456864 - RNA, 32 nt, Human
ggcccuggcccuggcccugauccugcuccuga

SEQ ID NO: 456865 - RNA, 32 nt, Human
ggcccuggccugauuccaagccaggcuuacuc

SEQ ID NO: 456866 - RNA, 32 nt, Human
ggcccuggccuuucacuccaguucugggugag

SEQ ID NO: 456867 - RNA, 19 nt, Human
ggcccuggcggggcaggcu

SEQ ID NO: 456868 - RNA, 20 nt, Human
ggcccuggcucaccagcguc

SEQ ID NO: 456869 - RNA, 18 nt, Human
ggcccuggcucugccaga

SEQ ID NO: 456870 - RNA, 18 nt, Human
ggcccuggcucugcuguc

SEQ ID NO: 456871 - RNA, 32 nt, Human
ggcccuggcucuguaaccauuaaccucuuccc

SEQ ID NO: 456872 - RNA, 32 nt, Human
ggcccuggcugcagagaccuucagugccaucc

SEQ ID NO: 456873 - RNA, 32 nt, Human
ggcccuggcugcagcuauggcucaagguggau

SEQ ID NO: 456874 - RNA, 23 nt, Human
ggcccuggcugcuucaugccaga

SEQ ID NO: 456875 - RNA, 32 nt, Human
ggcccuggcuuccuggguggcggugcggacug

SEQ ID NO: 456876 - RNA, 32 nt, Human
ggcccugggacgcugggcugcccgcucugccc

SEQ ID NO: 456877 - RNA, 32 nt, Human
ggcccugggacugcuucuccagccaggcuggg

SEQ ID NO: 456878 - RNA, 32 nt, Human
ggcccugggagagccguguccugagaagggcc

SEQ ID NO: 456879 - RNA, 32 nt, Human
ggcccugggaggaagcuggcugugguagcgua

SEQ ID NO: 456880 - RNA, 32 nt, Human
ggcccugggaggagagaagggggcagagucuu

SEQ ID NO: 456881 - RNA, 32 nt, Human
ggcccugggaggagguugagccuggggaagga

SEQ ID NO: 456882 - RNA, 19 nt, Human
ggcccugggagggcagcuu

SEQ ID NO: 456883 - RNA, 32 nt, Human
ggcccugggaggggcgcccggagccagccgcg

SEQ ID NO: 456884 - RNA, 32 nt, Human
ggcccugggaggucuugugaggucacacagag

SEQ ID NO: 456885 - RNA, 32 nt, Human
ggcccugggaucagccaaggcuugccugacug

SEQ ID NO: 456886 - RNA, 23 nt, Human
ggcccugggcagacccuggcaga

SEQ ID NO: 456887 - RNA, 32 nt, Human
ggcccugggcagccuccaggugcagugcccuc

SEQ ID NO: 456888 - RNA, 32 nt, Human
ggcccugggcaggcgguagccauggagcugug

SEQ ID NO: 456889 - RNA, 32 nt, Human
ggcccugggccaguggguuggaaggggagggu

SEQ ID NO: 456890 - RNA, 23 nt, Human
ggcccugggcccuuccuaucaga

SEQ ID NO: 456891 - RNA, 32 nt, Human
ggcccugggccuuaagagccagcucuuccuau

SEQ ID NO: 456892 - RNA, 18 nt, Human
ggcccugggcugggccuc

SEQ ID NO: 456893 - RNA, 32 nt, Human
ggcccugggcugggccuucucaccccuuccug

SEQ ID NO: 456894 - RNA, 32 nt, Human
ggcccuggggacccaugggagggggcugcugc

SEQ ID NO: 456895 - RNA, 32 nt, Human
ggcccuggggacgcauggcugaggcaggaaca

SEQ ID NO: 456896 - RNA, 23 nt, Human
ggcccuggggagcagccuucccu

SEQ ID NO: 456897 - RNA, 32 nt, Human
ggcccuggggaggcagggguuggugcccugac

SEQ ID NO: 456898 - RNA, 32 nt, Human
ggcccuggggagugucagaugggaagugcuuu

SEQ ID NO: 456899 - RNA, 32 nt, Human
ggcccuggggcaucucacagggaccaagcccu

SEQ ID NO: 456900 - RNA, 32 nt, Human
ggcccuggggccagcccgcacacaccaugccu

SEQ ID NO: 456901 - RNA, 18 nt, Human
ggcccuggggccccgggg

SEQ ID NO: 456902 - RNA, 20 nt, Human
ggcccuggggcccugccgga

SEQ ID NO: 456903 - RNA, 25 nt, Human
ggcccugggggucuaggggugcagg

SEQ ID NO: 456904 - RNA, 32 nt, Human
ggcccuggggucuugcuggggcccauaggcau

SEQ ID NO: 456905 - RNA, 32 nt, Human
ggcccugggguuuuagccucuggcccaggagu

SEQ ID NO: 456906 - RNA, 32 nt, Human
ggcccugggguuuuagccucuggcccgggagu

SEQ ID NO: 456907 - RNA, 32 nt, Human
ggcccuggguggguaccaacagcugcucgcug

SEQ ID NO: 456908 - RNA, 32 nt, Human
ggcccuggguuagagucugggcguggacgcgc

SEQ ID NO: 456909 - RNA, 23 nt, Human
ggcccuggguucuugcugcugcc

SEQ ID NO: 456910 - RNA, 32 nt, Human
ggcccuggucccagcaugucaguccucucuug

SEQ ID NO: 456911 - RNA, 22 nt, Human
ggcccugguggacuccagggug

SEQ ID NO: 456912 - RNA, 23 nt, Human
ggcccugguggaggagcccaggg

SEQ ID NO: 456913 - RNA, 22 nt, Human
ggcccugguggccuccagggug

SEQ ID NO: 456914 - RNA, 19 nt, Human
ggcccugguuccugcuguc

SEQ ID NO: 456915 - RNA, 32 nt, Human
ggcccugucaccgacgggucaccucgcccaca

SEQ ID NO: 456916 - RNA, 21 nt, Human
ggcccugucacuccacagaug

SEQ ID NO: 456917 - RNA, 32 nt, Human
ggcccugucacugacccuggccuguggugguc

SEQ ID NO: 456918 - RNA, 32 nt, Human
ggcccuguccuggcccaggccucugcccucug

SEQ ID NO: 456919 - RNA, 21 nt, Human
ggcccuguccuugcugccaga

SEQ ID NO: 456920 - RNA, 32 nt, Human
ggcccugucgauggacuuaacugugaaaauca

SEQ ID NO: 456921 - RNA, 32 nt, Human
ggcccugucgcccaggcuggagugccauggcg

SEQ ID NO: 456922 - RNA, 32 nt, Human
ggcccugucucccagccacuuucccuccuggc

SEQ ID NO: 456923 - RNA, 32 nt, Human
ggcccugucuucugaagucucaggcuuagaag

SEQ ID NO: 456924 - RNA, 22 nt, Human
ggcccugugauuuugccuccca

SEQ ID NO: 456925 - RNA, 32 nt, Human
ggcccugugcaggagugcgauccgggcugggc

SEQ ID NO: 456926 - RNA, 32 nt, Human
ggcccugugcaggugcccggggcaugaggggc

SEQ ID NO: 456927 - RNA, 32 nt, Human
ggcccugugccacccuuccccucacauguagg

SEQ ID NO: 456928 - RNA, 32 nt, Human
ggcccugugccagugaggacaggagacccuaa

SEQ ID NO: 456929 - RNA, 18 nt, Human
ggcccugugccccuugac

SEQ ID NO: 456930 - RNA, 32 nt, Human
ggcccugugcccucgaucuauuuccuucuucc

SEQ ID NO: 456931 - RNA, 32 nt, Human
ggcccugugcuagacagugcuggagacauagu

SEQ ID NO: 456932 - RNA, 32 nt, Human
ggcccugugcugccugccucauaguaucugcc

SEQ ID NO: 456933 - RNA, 32 nt, Human
ggcccugugcugggggugguagaaaggaugcu

SEQ ID NO: 456934 - RNA, 32 nt, Human
ggcccuguggacuuucacccagcacugugggg

SEQ ID NO: 456935 - RNA, 23 nt, Human
ggcccuguggccaggcaccagcc

SEQ ID NO: 456936 - RNA, 32 nt, Human
ggcccuguggcuccaggagcagcgugcaggag

SEQ ID NO: 456937 - RNA, 32 nt, Human
ggcccuguggucacagccucagggggccaggc

SEQ ID NO: 456938 - RNA, 20 nt, Human
ggcccugugguggggcagcu

SEQ ID NO: 456939 - RNA, 32 nt, Human
ggcccugugugggcauaacagaaggcucgcac

SEQ ID NO: 456940 - RNA, 21 nt, Human
ggcccuguucaaccccagggu

SEQ ID NO: 456941 - RNA, 32 nt, Human
ggcccuguucucucuggggucccacacugggg

SEQ ID NO: 456942 - RNA, 19 nt, Human
ggcccuguucuugccccag

SEQ ID NO: 456943 - RNA, 32 nt, Human
ggcccuguuggggaggggaggggagcucaagg

SEQ ID NO: 456944 - RNA, 32 nt, Human
ggcccuguugggggaggugggcccggagcugg

SEQ ID NO: 456945 - RNA, 32 nt, Human
ggcccuuagggaggaggaggcgagaagauggc

SEQ ID NO: 456946 - RNA, 18 nt, Human
ggcccuuauccuguuacc

SEQ ID NO: 456947 - RNA, 32 nt, Human
ggcccuucacccagagccaguguggucaguau

SEQ ID NO: 456948 - RNA, 18 nt, Human
ggcccuucagccccaggg

SEQ ID NO: 456949 - RNA, 32 nt, Human
ggcccuucagccuuugggaacagggucagcau

SEQ ID NO: 456950 - RNA, 32 nt, Human
ggcccuucaggggauggccacugugaaggacg

SEQ ID NO: 456951 - RNA, 18 nt, Human
ggcccuucaucugcugcu

SEQ ID NO: 456952 - RNA, 32 nt, Human
ggcccuucaugaccuugcugggcacagaaaac

SEQ ID NO: 456953 - RNA, 32 nt, Human
ggcccuuccagcagccaugagggaaggacagg

SEQ ID NO: 456954 - RNA, 20 nt, Human
ggcccuuccagccccagccu

SEQ ID NO: 456955 - RNA, 32 nt, Human
ggcccuuccagcuccaguucugcccaggucac

SEQ ID NO: 456956 - RNA, 32 nt, Human
ggcccuuccaggagucauggucugccugccug

SEQ ID NO: 456957 - RNA, 32 nt, Human
ggcccuuccauuucucuucuuugaccgugcua

SEQ ID NO: 456958 - RNA, 26 nt, Human
ggcccuucccauucugccccagagug

SEQ ID NO: 456959 - RNA, 32 nt, Human
ggcccuucccauucugccccagagugggucuu

SEQ ID NO: 456960 - RNA, 17 nt, Human
ggcccuucccccagcug

SEQ ID NO: 456961 - RNA, 18 nt, Human
ggcccuuccccugccagg

SEQ ID NO: 456962 - RNA, 20 nt, Human
ggcccuucccuucugcugcc

SEQ ID NO: 456963 - RNA, 20 nt, Human
ggcccuuccucaccaggguc

SEQ ID NO: 456964 - RNA, 32 nt, Human
ggcccuuccuggccgccugccacaccgcaagc

SEQ ID NO: 456965 - RNA, 32 nt, Human
ggcccuucgcucucccccagccccaccaugau

SEQ ID NO: 456966 - RNA, 20 nt, Human
ggcccuucgcucuugcugcc

SEQ ID NO: 456967 - RNA, 32 nt, Human
ggcccuucucagccacacuucccaccccaggg

SEQ ID NO: 456968 - RNA, 19 nt, Human
ggcccuucucagccccucc

SEQ ID NO: 456969 - RNA, 32 nt, Human
ggcccuucucaguuuucucccacauucacccc

SEQ ID NO: 456970 - RNA, 32 nt, Human
ggcccuucuccucuuccuggacucaaggcucu

SEQ ID NO: 456971 - RNA, 32 nt, Human
ggcccuucucuaggaagcaggagucgcggcga

SEQ ID NO: 456972 - RNA, 32 nt, Human
ggcccuucucugcuuggauggugucuuccucu

SEQ ID NO: 456973 - RNA, 32 nt, Human
ggcccuucucuucugugggucugcaccaggua

SEQ ID NO: 456974 - RNA, 32 nt, Human
ggcccuucuuuauuccagggacuuagaaacuu

SEQ ID NO: 456975 - RNA, 32 nt, Human
ggcccuugaagcuccuugaggggcaaggccca

SEQ ID NO: 456976 - RNA, 32 nt, Human
ggcccuugccaagagaggacaagagggagcca

SEQ ID NO: 456977 - RNA, 22 nt, Human
ggcccuugcccucuccuugcca

SEQ ID NO: 456978 - RNA, 19 nt, Human
ggcccuugcccuggcugcc

SEQ ID NO: 456979 - RNA, 32 nt, Human
ggcccuugccuguagucucagcacuuugggag

SEQ ID NO: 456980 - RNA, 32 nt, Human
ggcccuugcuuugcacgauuccugccucgacg

SEQ ID NO: 456981 - RNA, 32 nt, Human
ggcccuuggauggugccugugugccuggccuu

SEQ ID NO: 456982 - RNA, 19 nt, Human
ggcccuuggcccgcugcag

SEQ ID NO: 456983 - RNA, 20 nt, Human
ggcccuugggguguccugcc

SEQ ID NO: 456984 - RNA, 32 nt, Human
ggcccuuggucagagugggcagugccaggcuc

SEQ ID NO: 456985 - RNA, 32 nt, Human
ggcccuuggucuggacugaauugcccaagccc

SEQ ID NO: 456986 - RNA, 18 nt, Human
ggcccuugguggggagcu

SEQ ID NO: 456987 - RNA, 21 nt, Human
ggcccuuguugcccuagagug

SEQ ID NO: 456988 - RNA, 23 nt, Human
ggcccuuguuggggcacaaggug

SEQ ID NO: 456989 - RNA, 32 nt, Human
ggcccuuucacucccccgcccugggccucugc

SEQ ID NO: 456990 - RNA, 32 nt, Human
ggcccuuucuuauucuuuggcuccucauccac

SEQ ID NO: 456991 - RNA, 32 nt, Human
ggcccuuugaacugccuuguguucugugagaa

SEQ ID NO: 456992 - RNA, 32 nt, Human
ggcccuuugugcagugaacagcccuggcuggg

SEQ ID NO: 456993 - RNA, 32 nt, Human
ggcccuuuucagacuccugggcccuuggauac

SEQ ID NO: 456994 - RNA, 32 nt, Human
ggcccuuuuccuagucccugcaaccuguuuca

SEQ ID NO: 456995 - RNA, 32 nt, Human
ggcccuuuuccugcaugugccaccuccagugg

SEQ ID NO: 456996 - RNA, 32 nt, Human
ggcccuuuucuuccucuuccaagcucugagca

SEQ ID NO: 456997 - RNA, 32 nt, Human
ggcccuuuugucuggcugauucuguccucaaa

SEQ ID NO: 456998 - RNA, 18 nt, Human
ggccgaaccuccgcgaag

SEQ ID NO: 456999 - RNA, 32 nt, Human
ggccgaaccugauaccugccugggacagccac

SEQ ID NO: 457000 - RNA, 32 nt, Human
ggccgaagcaugcagaagcucaucaugggauu

SEQ ID NO: 457001 - RNA, 20 nt, Human
ggccgaagcccccagccagg

SEQ ID NO: 457002 - RNA, 32 nt, Human
ggccgaaggagaaggaggaagaggagaaggcg

SEQ ID NO: 457003 - RNA, 32 nt, Human
ggccgacaccacuccugccagcccggcucggc

SEQ ID NO: 457004 - RNA, 31 nt, Human
ggccgacacuuucauuaaaaaguuuccugag

SEQ ID NO: 457005 - RNA, 32 nt, Human
ggccgacagagcaagauucugucucaaaaaua

SEQ ID NO: 457006 - RNA, 32 nt, Human
ggccgacaugguaaaaccccacgucuaccaaa

SEQ ID NO: 457007 - RNA, 29 nt, Human
ggccgacauggugaaaccccaucucuacu

SEQ ID NO: 457008 - RNA, 32 nt, Human
ggccgacauggugaaaccccaucucuacuaaa

SEQ ID NO: 457009 - RNA, 32 nt, Human
ggccgacauggugaaacccugucucuacuaaa

SEQ ID NO: 457010 - RNA, 21 nt, Human
ggccgacgacucuucccgccg

SEQ ID NO: 457011 - RNA, 32 nt, Human
ggccgacuacaaucccgagcccugccagccgg

SEQ ID NO: 457012 - RNA, 32 nt, Human
ggccgacuaccugagcggcuccgaggacccac

SEQ ID NO: 457013 - RNA, 32 nt, Human
ggccgacuccuucuccccuccuggcagucagg

SEQ ID NO: 457014 - RNA, 32 nt, Human
ggccgacucguucuccccuccuggcagucagg

SEQ ID NO: 457015 - RNA, 32 nt, Human
ggccgacucugcacucuccacccuggcuggga

SEQ ID NO: 457016 - RNA, 32 nt, Human
ggccgagaaccucuggccucaggaagcgcaug

SEQ ID NO: 457017 - RNA, 32 nt, Human
ggccgagaaggguggaucaugaggucaggaga

SEQ ID NO: 457018 - RNA, 32 nt, Human
ggccgagagaucuggaaucggggucagcgggg

SEQ ID NO: 457019 - RNA, 19 nt, Human
ggccgagaguagggcagcu

SEQ ID NO: 457020 - RNA, 21 nt, Human
ggccgagaguugcccgugccg

SEQ ID NO: 457021 - RNA, 32 nt, Human
ggccgagauaaauacaagacccugugccagau

SEQ ID NO: 457022 - RNA, 32 nt, Human
ggccgagaugacgccgagcccccuguugcugc

SEQ ID NO: 457023 - RNA, 32 nt, Human
ggccgagaugagcguucccacagggaaaguga

SEQ ID NO: 457024 - RNA, 32 nt, Human
ggccgagaugcugcagauggaccugaucgacg

SEQ ID NO: 457025 - RNA, 32 nt, Human
ggccgagaugggugaaucaugaggucaggagu

SEQ ID NO: 457026 - RNA, 32 nt, Human
ggccgagauggguggaucaugaggucagcagu

SEQ ID NO: 457027 - RNA, 23 nt, Human
ggccgagcaaagccggagccgga

SEQ ID NO: 457028 - RNA, 32 nt, Human
ggccgagcaagcggaggcaggagcggcggcga

SEQ ID NO: 457029 - RNA, 32 nt, Human
ggccgagcaaugaggaguacacccuccgggcc

SEQ ID NO: 457030 - RNA, 32 nt, Human
ggccgagcagaggcgccccucaccucccggac

SEQ ID NO: 457031 - RNA, 18 nt, Human
ggccgagcagagggggca

SEQ ID NO: 457032 - RNA, 32 nt, Human
ggccgagcaggaggaggaggaagccggagcug

SEQ ID NO: 457033 - RNA, 32 nt, Human
ggccgagcaguggcagcagagaguggccucgg

SEQ ID NO: 457034 - RNA, 32 nt, Human
ggccgagcauuuugcacuaaugugucccacgg

SEQ ID NO: 457035 - RNA, 32 nt, Human
ggccgagccagccccuucaccaccagccggcc

SEQ ID NO: 457036 - RNA, 32 nt, Human
ggccgagcccacaccaucuggcccaggcuggc

SEQ ID NO: 457037 - RNA, 21 nt, Human
ggccgagccggggagcccggg

SEQ ID NO: 457038 - RNA, 32 nt, Human
ggccgagcggaggaggcgucccagggacacgc

SEQ ID NO: 457039 - RNA, 32 nt, Human
ggccgagcggggcaggugaggagggugagccg

SEQ ID NO: 457040 - RNA, 32 nt, Human
ggccgagcuccuggggagcuccugggacccuu

SEQ ID NO: 457041 - RNA, 32 nt, Human
ggccgagcuguucauagcccucacagcaguca

SEQ ID NO: 457042 - RNA, 20 nt, Human
ggccgaggaccaccagcagg

SEQ ID NO: 457043 - RNA, 32 nt, Human
ggccgaggaggaagaagaggggcagugggagc

SEQ ID NO: 457044 - RNA, 32 nt, Human
ggccgaggaggaggaggaggaggaggaggagg

SEQ ID NO: 457045 - RNA, 32 nt, Human
ggccgaggaggguggaucaugaggucagaagu

SEQ ID NO: 457046 - RNA, 32 nt, Human
ggccgaggauggaugcccugugccagugacca

SEQ ID NO: 457047 - RNA, 32 nt, Human
ggccgaggcaggcagaucacgaggucaggaga

SEQ ID NO: 457048 - RNA, 32 nt, Human
ggccgaggcaggcagaucacgaggucaggagg

SEQ ID NO: 457049 - RNA, 32 nt, Human
ggccgaggcaggcagaucacggggucaggaga

SEQ ID NO: 457050 - RNA, 32 nt, Human
ggccgaggcaggcggaucaugaggucaggaga

SEQ ID NO: 457051 - RNA, 32 nt, Human
ggccgaggcaggcggaucaugaggucaggagu

SEQ ID NO: 457052 - RNA, 32 nt, Human
ggccgaggcaggcggaucaugaggucgagaga

SEQ ID NO: 457053 - RNA, 32 nt, Human
ggccgaggcaggggcugggcagaggggaggag

SEQ ID NO: 457054 - RNA, 19 nt, Human
ggccgaggcagggggacug

SEQ ID NO: 457055 - RNA, 32 nt, Human
ggccgaggcagguagaucaugaggucaggaga

SEQ ID NO: 457056 - RNA, 32 nt, Human
ggccgaggcagguggaucaugaggucaggaga

SEQ ID NO: 457057 - RNA, 32 nt, Human
ggccgaggcagguggaucaugaggucaggagu

SEQ ID NO: 457058 - RNA, 32 nt, Human
ggccgaggcagguggaucaugaggucaugaga

SEQ ID NO: 457059 - RNA, 21 nt, Human
ggccgaggcccuccgcccuga

SEQ ID NO: 457060 - RNA, 22 nt, Human
ggccgaggccggcagaagacag

SEQ ID NO: 457061 - RNA, 32 nt, Human
ggccgaggcgggcagaucaugaggucaggaga

SEQ ID NO: 457062 - RNA, 32 nt, Human
ggccgaggcgggcggaucaugaggucagcaga

SEQ ID NO: 457063 - RNA, 32 nt, Human
ggccgaggcgggcggaucaugaggucaggaga

SEQ ID NO: 457064 - RNA, 32 nt, Human
ggccgaggcgggcggaucaugaggucaggagu

SEQ ID NO: 457065 - RNA, 32 nt, Human
ggccgaggcgggugaaucaugaggucaggaga

SEQ ID NO: 457066 - RNA, 32 nt, Human
ggccgaggcggguggaucaugaggucaggaga

SEQ ID NO: 457067 - RNA, 32 nt, Human
ggccgaggcggguggaucaugaggucaggagg

SEQ ID NO: 457068 - RNA, 32 nt, Human
ggccgaggcugcagcucagggcaacggcaggc

SEQ ID NO: 457069 - RNA, 32 nt, Human
ggccgaggcugugcuccaagaugaggaggacg

SEQ ID NO: 457070 - RNA, 32 nt, Human
ggccgagggcugggguuccacuuagacccuug

SEQ ID NO: 457071 - RNA, 32 nt, Human
ggccgagggcuggucggcgcccauccugaccc

SEQ ID NO: 457072 - RNA, 32 nt, Human
ggccgaggggcagagguggcucucggcccugc

SEQ ID NO: 457073 - RNA, 21 nt, Human
ggccgaggugagacgggaaga

SEQ ID NO: 457074 - RNA, 32 nt, Human
ggccgaggugcacaccccaacccacugggcca

SEQ ID NO: 457075 - RNA, 32 nt, Human
ggccgaggugggcaaaucaugaggucaggaga

SEQ ID NO: 457076 - RNA, 32 nt, Human
ggccgaggugggcagaucaugaggucagaaga

SEQ ID NO: 457077 - RNA, 32 nt, Human
ggccgaggugggcagaucaugaggucaggaga

SEQ ID NO: 457078 - RNA, 32 nt, Human
ggccgagguggguggaucaugaggucaggaga

SEQ ID NO: 457079 - RNA, 32 nt, Human
ggccgagguggguggaucaugaggucaguagu

SEQ ID NO: 457080 - RNA, 32 nt, Human
ggccgagucguagcccccuggagcccagcuuc

SEQ ID NO: 457081 - RNA, 32 nt, Human
ggccgauagucccagaugagguuccagcaaca

SEQ ID NO: 457082 - RNA, 32 nt, Human
ggccgaucccucuccucacuguaagcugagcc

SEQ ID NO: 457083 - RNA, 32 nt, Human
ggccgauggagacaccaaccgacaggcccugg

SEQ ID NO: 457084 - RNA, 32 nt, Human
ggccgaugggagggcgguggaggcucuguacc

SEQ ID NO: 457085 - RNA, 32 nt, Human
ggccgauuccaggguguuccacuuuuccagug

SEQ ID NO: 457086 - RNA, 21 nt, Human
ggccgauugcuugagcccagg

SEQ ID NO: 457087 - RNA, 32 nt, Human
ggccgcaaaacacacagucaggcuuccagcac

SEQ ID NO: 457088 - RNA, 32 nt, Human
ggccgcaacauuagcaagacccgcggguggca

SEQ ID NO: 457089 - RNA, 32 nt, Human
ggccgcacaccacguccugcucuggcuuuugc

SEQ ID NO: 457090 - RNA, 32 nt, Human
ggccgcaccacugcacuccagccugggugaca

SEQ ID NO: 457091 - RNA, 32 nt, Human
ggccgcagaccagacaaaaugagaauccaguu

SEQ ID NO: 457092 - RNA, 31 nt, Human
ggccgcagaggauccaucacagacggauacu

SEQ ID NO: 457093 - RNA, 32 nt, Human
ggccgcagcaagaggggcaagugccuucagag

SEQ ID NO: 457094 - RNA, 20 nt, Human
ggccgcagcccccugcugcc

SEQ ID NO: 457095 - RNA, 19 nt, Human
ggccgcagccugugugauc

SEQ ID NO: 457096 - RNA, 32 nt, Human
ggccgcagcucaccacuggccuagagaugccc

SEQ ID NO: 457097 - RNA, 32 nt, Human
ggccgcagcugcagagagccacuucaccugag

SEQ ID NO: 457098 - RNA, 32 nt, Human
ggccgcagggagaggagcaggacacgcaccuu

SEQ ID NO: 457099 - RNA, 21 nt, Human
ggccgcagggcagggggacug

SEQ ID NO: 457100 - RNA, 32 nt, Human
ggccgcaggggaggcaggggauggucagcccc

SEQ ID NO: 457101 - RNA, 19 nt, Human
ggccgcaggggucugggca

SEQ ID NO: 457102 - RNA, 32 nt, Human
ggccgcaggguaggggagagacucugcagugu

SEQ ID NO: 457103 - RNA, 32 nt, Human
ggccgcagugugcugagacauggcuaacaacc

SEQ ID NO: 457104 - RNA, 32 nt, Human
ggccgcauccaccggggcccugccuccagucg

SEQ ID NO: 457105 - RNA, 32 nt, Human
ggccgcaucugccuccccuuacagaaccagug

SEQ ID NO: 457106 - RNA, 32 nt, Human
ggccgcaugguccugcccuuccucgcucccug

SEQ ID NO: 457107 - RNA, 32 nt, Human
ggccgccaccaaggagcagcagcuggggcaga

SEQ ID NO: 457108 - RNA, 32 nt, Human
ggccgccaccaccaccaccacccacugccugc

SEQ ID NO: 457109 - RNA, 32 nt, Human
ggccgccaccacugcuccuugacucugccguu

SEQ ID NO: 457110 - RNA, 32 nt, Human
ggccgccaccgcccaucccagaccauggagcg

SEQ ID NO: 457111 - RNA, 20 nt, Human
ggccgccacggcagcgcggg

SEQ ID NO: 457112 - RNA, 28 nt, Human
ggccgccagaaagaugccucauccucga

SEQ ID NO: 457113 - RNA, 23 nt, Human
ggccgccagaacauccgccugca

SEQ ID NO: 457114 - RNA, 19 nt, Human
ggccgccagccgccgcagc

SEQ ID NO: 457115 - RNA, 32 nt, Human
ggccgccaggcaggccaagggccgaggugacu

SEQ ID NO: 457116 - RNA, 32 nt, Human
ggccgccagggaggucugggcccagcggggcu

SEQ ID NO: 457117 - RNA, 19 nt, Human
ggccgccagugcgcgcgga

SEQ ID NO: 457118 - RNA, 32 nt, Human
ggccgccaucccucggcgccccgcccggaacc

SEQ ID NO: 457119 - RNA, 20 nt, Human
ggccgccaucuuggucccag

SEQ ID NO: 457120 - RNA, 32 nt, Human
ggccgccaugcugaguguggccgcgccuuaaa

SEQ ID NO: 457121 - RNA, 32 nt, Human
ggccgccauggggcagacucucugaugccagu

SEQ ID NO: 457122 - RNA, 32 nt, Human
ggccgcccaaagcgcugggauuacaggcguga

SEQ ID NO: 457123 - RNA, 32 nt, Human
ggccgcccaagugcccuguccagugucugcuu

SEQ ID NO: 457124 - RNA, 19 nt, Human
ggccgcccaccccgugccg

SEQ ID NO: 457125 - RNA, 32 nt, Human
ggccgcccacuggaugagcggugagacgaaca

SEQ ID NO: 457126 - RNA, 32 nt, Human
ggccgccccaaaagagccacuuugaccaggcu

SEQ ID NO: 457127 - RNA, 32 nt, Human
ggccgccccaaaagagccgcuuugaccaggcu

SEQ ID NO: 457128 - RNA, 32 nt, Human
ggccgccccacagcccgagccggagagggagc

SEQ ID NO: 457129 - RNA, 20 nt, Human
ggccgccccaccaucuggga

SEQ ID NO: 457130 - RNA, 32 nt, Human
ggccgccccacccuccccacccggggaagcca

SEQ ID NO: 457131 - RNA, 20 nt, Human
ggccgccccaccgucuggga

SEQ ID NO: 457132 - RNA, 32 nt, Human
ggccgccccagccgggcgcagcagccggaggu

SEQ ID NO: 457133 - RNA, 18 nt, Human
ggccgcccccgccaggcg

SEQ ID NO: 457134 - RNA, 18 nt, Human
ggccgccccgcggcuggu

SEQ ID NO: 457135 - RNA, 21 nt, Human
ggccgccccugccccccggga

SEQ ID NO: 457136 - RNA, 32 nt, Human
ggccgccccugcccgucgcccgcccgcugcug

SEQ ID NO: 457137 - RNA, 32 nt, Human
ggccgccccuggcgaggguccugucuauagca

SEQ ID NO: 457138 - RNA, 32 nt, Human
ggccgcccgccccuucagccccggcucuccgu

SEQ ID NO: 457139 - RNA, 18 nt, Human
ggccgcccgccucugaga

SEQ ID NO: 457140 - RNA, 32 nt, Human
ggccgcccggggccauggcgacacucagcuuc

SEQ ID NO: 457141 - RNA, 32 nt, Human
ggccgcccuccccuccugcucucuucccagca

SEQ ID NO: 457142 - RNA, 32 nt, Human
ggccgcccucccggcuggagagcucaggugcu

SEQ ID NO: 457143 - RNA, 32 nt, Human
ggccgcccuccuggcccugaagcugcgccggc

SEQ ID NO: 457144 - RNA, 19 nt, Human
ggccgcccucuccucggga

SEQ ID NO: 457145 - RNA, 21 nt, Human
ggccgcccugccuucccgccg

SEQ ID NO: 457146 - RNA, 32 nt, Human
ggccgcccugcucccccaaugaaaggccagcu

SEQ ID NO: 457147 - RNA, 32 nt, Human
ggccgccgaacucaucuccugccugcaggccc

SEQ ID NO: 457148 - RNA, 24 nt, Human
ggccgccgcagaggcccggccgca

SEQ ID NO: 457149 - RNA, 24 nt, Human
ggccgccgccaguccccgccccga

SEQ ID NO: 457150 - RNA, 32 nt, Human
ggccgccgccuccccgcugaccccgcgaucug

SEQ ID NO: 457151 - RNA, 32 nt, Human
ggccgccgcgcuccgagguccccgggccucug

SEQ ID NO: 457152 - RNA, 32 nt, Human
ggccgccgcugcugcuugggccugguauguac

SEQ ID NO: 457153 - RNA, 28 nt, Human
ggccgccgcuuuccuguucucuggcugu

SEQ ID NO: 457154 - RNA, 32 nt, Human
ggccgccggcgccaugggcaaccgcgggaugg

SEQ ID NO: 457155 - RNA, 32 nt, Human
ggccgccggcgccgcgggaggugguggaggcc

SEQ ID NO: 457156 - RNA, 32 nt, Human
ggccgccggcuuagggcgcagcgcgguugguc

SEQ ID NO: 457157 - RNA, 23 nt, Human
ggccgccgggcuccuuuccgcga

SEQ ID NO: 457158 - RNA, 22 nt, Human
ggccgccuagggugauuggcug

SEQ ID NO: 457159 - RNA, 21 nt, Human
ggccgccucagcccaccagcc

SEQ ID NO: 457160 - RNA, 23 nt, Human
ggccgccucauugguccgcgcug

SEQ ID NO: 457161 - RNA, 16 nt, Human
ggccgccuccacaccc

SEQ ID NO: 457162 - RNA, 32 nt, Human
ggccgccuccaggaagcggaaaagcaagcggc

SEQ ID NO: 457163 - RNA, 32 nt, Human
ggccgccuccucggggcuccaggcuggcuugc

SEQ ID NO: 457164 - RNA, 17 nt, Human
ggccgccuccucuggga

SEQ ID NO: 457165 - RNA, 32 nt, Human
ggccgccucguggagaaggcagugccacgugg

SEQ ID NO: 457166 - RNA, 32 nt, Human
ggccgccucuacuccgagagcucacgccgcgu

SEQ ID NO: 457167 - RNA, 32 nt, Human
ggccgccucuuccgcucccugccaucagucaa

SEQ ID NO: 457168 - RNA, 32 nt, Human
ggccgccugaaggugagcgggcaucucacaug

SEQ ID NO: 457169 - RNA, 32 nt, Human
ggccgccugaugaccugcagccuggaccugga

SEQ ID NO: 457170 - RNA, 32 nt, Human
ggccgccugcagucuccucucugggugauugc

SEQ ID NO: 457171 - RNA, 32 nt, Human
ggccgccugcccccucugccaccuggggcggu

SEQ ID NO: 457172 - RNA, 32 nt, Human
ggccgccugccugcccgcccgcccgcagcccc

SEQ ID NO: 457173 - RNA, 32 nt, Human
ggccgccugccugucauuccugacucaccacc

SEQ ID NO: 457174 - RNA, 32 nt, Human
ggccgccugcugggaagugcuaccucagcuaa

SEQ ID NO: 457175 - RNA, 32 nt, Human
ggccgccugggguccccugccuccugccuguc

SEQ ID NO: 457176 - RNA, 21 nt, Human
ggccgccuggucccugcgaag

SEQ ID NO: 457177 - RNA, 32 nt, Human
ggccgccuguaaucccagcuacucaggaggcu

SEQ ID NO: 457178 - RNA, 32 nt, Human
ggccgccuguagucccagcuacucgggaggcu

SEQ ID NO: 457179 - RNA, 32 nt, Human
ggccgccuguggccaccaugucggcccucuuu

SEQ ID NO: 457180 - RNA, 32 nt, Human
ggccgccugugggaacagcuauucucugcaca

SEQ ID NO: 457181 - RNA, 22 nt, Human
ggccgccugugucgcgcuccug

SEQ ID NO: 457182 - RNA, 20 nt, Human
ggccgcgaccugcugcugcc

SEQ ID NO: 457183 - RNA, 22 nt, Human
ggccgcgacgcccagccugcca

SEQ ID NO: 457184 - RNA, 32 nt, Human
ggccgcgacuccgcuccaggcaggacccccaa

SEQ ID NO: 457185 - RNA, 32 nt, Human
ggccgcgagugcaucuuccacgaaccuaauuc

SEQ ID NO: 457186 - RNA, 31 nt, Human
ggccgcgcaaugucgcacggagccgggcucg

SEQ ID NO: 457187 - RNA, 19 nt, Human
ggccgcgcagcagcaggag

SEQ ID NO: 457188 - RNA, 32 nt, Human
ggccgcgcaggagagcgcgcguccgccgggug

SEQ ID NO: 457189 - RNA, 19 nt, Human
ggccgcgcccagccccagc

SEQ ID NO: 457190 - RNA, 18 nt, Human
ggccgcgcccccuuggcg

SEQ ID NO: 457191 - RNA, 23 nt, Human
ggccgcgcccgcgcccccucccg

SEQ ID NO: 457192 - RNA, 19 nt, Human
ggccgcgccucugcgggag

SEQ ID NO: 457193 - RNA, 32 nt, Human
ggccgcgcggaugcagaucuguggauccagcg

SEQ ID NO: 457194 - RNA, 22 nt, Human
ggccgcgcugcccgcgcuccug

SEQ ID NO: 457195 - RNA, 18 nt, Human
ggccgcggaagccuggag

SEQ ID NO: 457196 - RNA, 32 nt, Human
ggccgcggaggaggaggaaggggaggagggcg

SEQ ID NO: 457197 - RNA, 32 nt, Human
ggccgcggaggaggaggagguggaguugcugc

SEQ ID NO: 457198 - RNA, 32 nt, Human
ggccgcggagugugcugggcuuggggguaagg

SEQ ID NO: 457199 - RNA, 19 nt, Human
ggccgcggcagagcucccu

SEQ ID NO: 457200 - RNA, 32 nt, Human
ggccgcggcaggcgaagagagaagagacuauc

SEQ ID NO: 457201 - RNA, 19 nt, Human
ggccgcggccggcgggccu

SEQ ID NO: 457202 - RNA, 32 nt, Human
ggccgcggcgcaaugucagagcagacgccggc

SEQ ID NO: 457203 - RNA, 32 nt, Human
ggccgcggcggcggaggcagcagcggcggcgg

SEQ ID NO: 457204 - RNA, 20 nt, Human
ggccgcggcggcggcgcagg

SEQ ID NO: 457205 - RNA, 23 nt, Human
ggccgcggcggcucaugccugua

SEQ ID NO: 457206 - RNA, 18 nt, Human
ggccgcggcggggcagcu

SEQ ID NO: 457207 - RNA, 32 nt, Human
ggccgcgggacccugggcugagcaccgaccca

SEQ ID NO: 457208 - RNA, 21 nt, Human
ggccgcgggaggcagcggggc

SEQ ID NO: 457209 - RNA, 17 nt, Human
ggccgcgggcgcgcggg

SEQ ID NO: 457210 - RNA, 24 nt, Human
ggccgcggggagcaccuggcuaca

SEQ ID NO: 457211 - RNA, 32 nt, Human
ggccgcgggguugguuuccacccuggagguug

SEQ ID NO: 457212 - RNA, 32 nt, Human
ggccgcgggugcaggccgcagugacagggccg

SEQ ID NO: 457213 - RNA, 32 nt, Human
ggccgcgguggagcgagggcccaggcgaggcg

SEQ ID NO: 457214 - RNA, 32 nt, Human
ggccgcgucacuucucugauuaugugcccugg

SEQ ID NO: 457215 - RNA, 32 nt, Human
ggccgcgucgaccugcaguggauuuccuuccu

SEQ ID NO: 457216 - RNA, 32 nt, Human
ggccgcuaacagacaggagccgaacgggggcu

SEQ ID NO: 457217 - RNA, 32 nt, Human
ggccgcuacacguguacggccgccaacagccu

SEQ ID NO: 457218 - RNA, 20 nt, Human
ggccgcuagcagcgcagcgg

SEQ ID NO: 457219 - RNA, 32 nt, Human
ggccgcuagcgcacaggaaaauccuaccugau

SEQ ID NO: 457220 - RNA, 32 nt, Human
ggccgcuccaaaccacaaaaucuccaacgccg

SEQ ID NO: 457221 - RNA, 32 nt, Human
ggccgcuccccgaggcgcgggcucuggcggcc

SEQ ID NO: 457222 - RNA, 32 nt, Human
ggccgcuccccucuccccgcgggccgggggac

SEQ ID NO: 457223 - RNA, 32 nt, Human
ggccgcuccuccccucuccccacccuccuccu

SEQ ID NO: 457224 - RNA, 16 nt, Human
ggccgcuccugagcug

SEQ ID NO: 457225 - RNA, 32 nt, Human
ggccgcuccugagcugcugucucccucucuga

SEQ ID NO: 457226 - RNA, 32 nt, Human
ggccgcucgcccaggauggagaggcggguccc

SEQ ID NO: 457227 - RNA, 32 nt, Human
ggccgcucucucucacuuuuucuggaacucau

SEQ ID NO: 457228 - RNA, 32 nt, Human
ggccgcucuguggaugcuuccaucuguaucca

SEQ ID NO: 457229 - RNA, 32 nt, Human
ggccgcucuuugcaucuugucuugcccacagc

SEQ ID NO: 457230 - RNA, 19 nt, Human
ggccgcugacggcgggaag

SEQ ID NO: 457231 - RNA, 32 nt, Human
ggccgcugacggcgggaaggaaaaugagugag

SEQ ID NO: 457232 - RNA, 32 nt, Human
ggccgcugacugccagcuccagccuggccccg

SEQ ID NO: 457233 - RNA, 32 nt, Human
ggccgcugacuggccucggucaccucccgggg

SEQ ID NO: 457234 - RNA, 32 nt, Human
ggccgcugagccacaguccuccuaggcaaugc

SEQ ID NO: 457235 - RNA, 32 nt, Human
ggccgcugaggggcuccccugccccuccuggg

SEQ ID NO: 457236 - RNA, 32 nt, Human
ggccgcugcacuccagccugggggacagagcg

SEQ ID NO: 457237 - RNA, 32 nt, Human
ggccgcugcagcccuggcagcgggcacacccc

SEQ ID NO: 457238 - RNA, 22 nt, Human
ggccgcugccccccggguccgg

SEQ ID NO: 457239 - RNA, 19 nt, Human
ggccgcugccggaggcucg

SEQ ID NO: 457240 - RNA, 18 nt, Human
ggccgcugccucccggga

SEQ ID NO: 457241 - RNA, 32 nt, Human
ggccgcugcucuccagacccaggaugccgggg

SEQ ID NO: 457242 - RNA, 32 nt, Human
ggccgcugcugccgcuccuugugguggccgcg

SEQ ID NO: 457243 - RNA, 19 nt, Human
ggccgcugcugccucuccu

SEQ ID NO: 457244 - RNA, 32 nt, Human
ggccgcugcugccucuccuugugguggccgcg

SEQ ID NO: 457245 - RNA, 32 nt, Human
ggccgcugcugcgggccaggggacgggggcgg

SEQ ID NO: 457246 - RNA, 19 nt, Human
ggccgcugcugcuccggga

SEQ ID NO: 457247 - RNA, 32 nt, Human
ggccgcugcuuugcgcugguggaccacaggca

SEQ ID NO: 457248 - RNA, 32 nt, Human
ggccgcuggcuggcuggacaggcgggugugag

SEQ ID NO: 457249 - RNA, 32 nt, Human
ggccgcugggcacuuggcaccuccccaagagc

SEQ ID NO: 457250 - RNA, 32 nt, Human
ggccgcuggggucacccaagagaagcagcccu

SEQ ID NO: 457251 - RNA, 32 nt, Human
ggccgcuucccaccaucuucugcaguugccuc

SEQ ID NO: 457252 - RNA, 32 nt, Human
ggccgcuuccuuggcuaccugguuccaggggg

SEQ ID NO: 457253 - RNA, 23 nt, Human
ggccggaagccuccucgccgccg

SEQ ID NO: 457254 - RNA, 19 nt, Human
ggccggaagucuaucccgc

SEQ ID NO: 457255 - RNA, 32 nt, Human
ggccggacacaggcucacaggucuccacauug

SEQ ID NO: 457256 - RNA, 32 nt, Human
ggccggacacauauguauaaacuuuucagcag

SEQ ID NO: 457257 - RNA, 24 nt, Human
ggccggacagcuccaucuacagcc

SEQ ID NO: 457258 - RNA, 32 nt, Human
ggccggaccggagauggcgccgccagcgggcg

SEQ ID NO: 457259 - RNA, 32 nt, Human
ggccggacgagagagcgcgccuuuucggcgug

SEQ ID NO: 457260 - RNA, 22 nt, Human
ggccggagagacgcggaggagg

SEQ ID NO: 457261 - RNA, 32 nt, Human
ggccggagaggaccggcggcucggaggaagcc

SEQ ID NO: 457262 - RNA, 19 nt, Human
ggccggagaggaguucagg

SEQ ID NO: 457263 - RNA, 18 nt, Human
ggccggagccagcucccu

SEQ ID NO: 457264 - RNA, 32 nt, Human
ggccggagcgcccgccgcucacggucaggggu

SEQ ID NO: 457265 - RNA, 32 nt, Human
ggccggagcugcugccgccgucuacacggucc

SEQ ID NO: 457266 - RNA, 32 nt, Human
ggccggagcuggucgggucaagagucgggauu

SEQ ID NO: 457267 - RNA, 32 nt, Human
ggccggaggaagagagaguuuaccaagagaga

SEQ ID NO: 457268 - RNA, 32 nt, Human
ggccggaggccacacaaauggucuccaugcug

SEQ ID NO: 457269 - RNA, 16 nt, Human
ggccggaggcgcggug

SEQ ID NO: 457270 - RNA, 32 nt, Human
ggccggaggcuggcccgggcagugagugugga

SEQ ID NO: 457271 - RNA, 32 nt, Human
ggccggagggaggcggaggaaccgguguucgc

SEQ ID NO: 457272 - RNA, 32 nt, Human
ggccggaguaggagcacuggggugggggcgga

SEQ ID NO: 457273 - RNA, 32 nt, Human
ggccggcacaacagguguuacaucagggguuu

SEQ ID NO: 457274 - RNA, 18 nt, Human
ggccggcagcagcagcag

SEQ ID NO: 457275 - RNA, 32 nt, Human
ggccggcagccccagccugcuagcuagcucaa

SEQ ID NO: 457276 - RNA, 32 nt, Human
ggccggcagcccugggcugaggcacagacuca

SEQ ID NO: 457277 - RNA, 22 nt, Human
ggccggcaggcgggggcugggg

SEQ ID NO: 457278 - RNA, 32 nt, Human
ggccggccaauacauaggaacacuuggguccc

SEQ ID NO: 457279 - RNA, 32 nt, Human
ggccggccaccugccacugggcccacagcugg

SEQ ID NO: 457280 - RNA, 32 nt, Human
ggccggccaccuggaccgccgacacacagccu

SEQ ID NO: 457281 - RNA, 32 nt, Human
ggccggccagccagggcaggcaggggcggccu

SEQ ID NO: 457282 - RNA, 32 nt, Human
ggccggcccucagagcaaacccucuccccaca

SEQ ID NO: 457283 - RNA, 32 nt, Human
ggccggcccugccuccacguggcuccggcucc

SEQ ID NO: 457284 - RNA, 32 nt, Human
ggccggcccugccuugcgcuagcagagccucu

SEQ ID NO: 457285 - RNA, 32 nt, Human
ggccggccugcuggcauggcugggcaucccca

SEQ ID NO: 457286 - RNA, 32 nt, Human
ggccggccugggggcugggagggccaggggca

SEQ ID NO: 457287 - RNA, 18 nt, Human
ggccggccuucugccgcu

SEQ ID NO: 457288 - RNA, 32 nt, Human
ggccggcgccuguaaucccagcuacuagggag

SEQ ID NO: 457289 - RNA, 32 nt, Human
ggccggcgccuguaaucccagcuacucgggag

SEQ ID NO: 457290 - RNA, 32 nt, Human
ggccggcgcggguauggagcuugggggucacu

SEQ ID NO: 457291 - RNA, 23 nt, Human
ggccggcggaucacgaggucagg

SEQ ID NO: 457292 - RNA, 20 nt, Human
ggccggcggccacugcugcc

SEQ ID NO: 457293 - RNA, 32 nt, Human
ggccggcgggcggggcgcagagccaggcagcg

SEQ ID NO: 457294 - RNA, 32 nt, Human
ggccggcgugagccaccaugcccggcuccacg

SEQ ID NO: 457295 - RNA, 32 nt, Human
ggccggcuagaaacauuuuccccaagcggcuc

SEQ ID NO: 457296 - RNA, 23 nt, Human
ggccggcucaccucauuccugcc

SEQ ID NO: 457297 - RNA, 32 nt, Human
ggccggcuccgcgcccccuccgcggcccccgc

SEQ ID NO: 457298 - RNA, 32 nt, Human
ggccggcuccguugcugaccgccgacugucaa

SEQ ID NO: 457299 - RNA, 32 nt, Human
ggccggcuccugcaggaucaugcagcuggggc

SEQ ID NO: 457300 - RNA, 32 nt, Human
ggccggcuggacugugcugggguuuguuguga

SEQ ID NO: 457301 - RNA, 32 nt, Human
ggccggcugggaguaggcggcagugaguuucc

SEQ ID NO: 457302 - RNA, 32 nt, Human
ggccgggaaggaaaugggacuggaguccagag

SEQ ID NO: 457303 - RNA, 32 nt, Human
ggccgggaagggucaguuggaggcaggcgcuc

SEQ ID NO: 457304 - RNA, 20 nt, Human
ggccgggacccucugcugcu

SEQ ID NO: 457305 - RNA, 17 nt, Human
ggccgggacucucagca

SEQ ID NO: 457306 - RNA, 32 nt, Human
ggccgggagagggaggaagaggauggcagggc

SEQ ID NO: 457307 - RNA, 32 nt, Human
ggccgggagaugauggcugaugaagaggaaga

SEQ ID NO: 457308 - RNA, 32 nt, Human
ggccgggagcagucaucuguggugaggcugau

SEQ ID NO: 457309 - RNA, 32 nt, Human
ggccgggagcccggcugcacaccaggcugcug

SEQ ID NO: 457310 - RNA, 32 nt, Human
ggccgggagcccuuugggaggaagggaggcgu

SEQ ID NO: 457311 - RNA, 32 nt, Human
ggccgggagccgcggaaagaguagggcucccc

SEQ ID NO: 457312 - RNA, 19 nt, Human
ggccgggagcgcgcgcgga

SEQ ID NO: 457313 - RNA, 32 nt, Human
ggccgggagggcgcggccggaggcagaggcca

SEQ ID NO: 457314 - RNA, 32 nt, Human
ggccgggaugcagcacgcauccauguucuguu

SEQ ID NO: 457315 - RNA, 32 nt, Human
ggccgggcacggcggaucaugaggucaggaaa

SEQ ID NO: 457316 - RNA, 32 nt, Human
ggccgggcagaggcaccccucaccucccggac

SEQ ID NO: 457317 - RNA, 32 nt, Human
ggccgggcagaggcaccccucaccuccuggac

SEQ ID NO: 457318 - RNA, 28 nt, Human
ggccgggcagaggcgccccucaccuccc

SEQ ID NO: 457319 - RNA, 32 nt, Human
ggccgggcagaggcgccccucaccuccccgau

SEQ ID NO: 457320 - RNA, 32 nt, Human
ggccgggcagaggcgccccucaccucccggac

SEQ ID NO: 457321 - RNA, 32 nt, Human
ggccgggcagaggcgccccucaccucccggau

SEQ ID NO: 457322 - RNA, 32 nt, Human
ggccgggcagaggcgccccucaccuccuggac

SEQ ID NO: 457323 - RNA, 32 nt, Human
ggccgggcagaggcgccccucaccuccuggau

SEQ ID NO: 457324 - RNA, 32 nt, Human
ggccgggcagaggcgccccucaccugccggac

SEQ ID NO: 457325 - RNA, 32 nt, Human
ggccgggcagaggcgccccucacuucccggac

SEQ ID NO: 457326 - RNA, 31 nt, Human
ggccgggcagaggcgcuccucacaucccaga

SEQ ID NO: 457327 - RNA, 32 nt, Human
ggccgggcagaggcgcuccucacaucccagau

SEQ ID NO: 457328 - RNA, 32 nt, Human
ggccgggcagaggugcuccucacuucccagag

SEQ ID NO: 457329 - RNA, 32 nt, Human
ggccgggcagaggugcuccucacuucccagua

SEQ ID NO: 457330 - RNA, 32 nt, Human
ggccgggcaggcguggugcgcgguaggagcug

SEQ ID NO: 457331 - RNA, 15 nt, Human
ggccgggcaggggga

SEQ ID NO: 457332 - RNA, 18 nt, Human
ggccgggcagggggccug

SEQ ID NO: 457333 - RNA, 32 nt, Human
ggccgggccaacuccggcuucugccgcgcgug

SEQ ID NO: 457334 - RNA, 19 nt, Human
ggccgggccccuccugcca

SEQ ID NO: 457335 - RNA, 32 nt, Human
ggccgggccgagguaaugcacaagggucacgu

SEQ ID NO: 457336 - RNA, 32 nt, Human
ggccgggccugcggcgcugagcgcggcggcgg

SEQ ID NO: 457337 - RNA, 32 nt, Human
ggccgggcgagucucccgccuccucaggcccu

SEQ ID NO: 457338 - RNA, 32 nt, Human
ggccgggcgcaguggcuguaaucccagcacuu

SEQ ID NO: 457339 - RNA, 32 nt, Human
ggccgggcgcccgcucuuccuuccgcuugcgc

SEQ ID NO: 457340 - RNA, 23 nt, Human
ggccgggcggagccagagccaga

SEQ ID NO: 457341 - RNA, 32 nt, Human
ggccgggcggcgcuccagccucggggcaggug

SEQ ID NO: 457342 - RNA, 32 nt, Human
ggccgggcggggcgcaggcgggcgggcgggua

SEQ ID NO: 457343 - RNA, 25 nt, Human
ggccgggcggugcacagcucugugg

SEQ ID NO: 457344 - RNA, 20 nt, Human
ggccgggcucccgccccagc

SEQ ID NO: 457345 - RNA, 32 nt, Human
ggccgggcuccgaggcgagaggcugcauggag

SEQ ID NO: 457346 - RNA, 32 nt, Human
ggccgggcucucaugguacuuccucugugaac

SEQ ID NO: 457347 - RNA, 32 nt, Human
ggccgggcugccucccuguggcuccugcgcgc

SEQ ID NO: 457348 - RNA, 32 nt, Human
ggccgggcugcguucgcuccagccgcggcucu

SEQ ID NO: 457349 - RNA, 16 nt, Human
ggccgggcugcugcag

SEQ ID NO: 457350 - RNA, 32 nt, Human
ggccgggcugcugcugcugcugcuccaggugc

SEQ ID NO: 457351 - RNA, 32 nt, Human
ggccgggcugggaggcggcggcggcggcucgg

SEQ ID NO: 457352 - RNA, 32 nt, Human
ggccggggaaagcaggagggagaggggccgcc

SEQ ID NO: 457353 - RNA, 20 nt, Human
ggccggggaagagcccgggg

SEQ ID NO: 457354 - RNA, 32 nt, Human
ggccggggacagcuccagcagcucaggcucca

SEQ ID NO: 457355 - RNA, 25 nt, Human
ggccggggacccagcguggaggaag

SEQ ID NO: 457356 - RNA, 32 nt, Human
ggccggggagaagguguuguugccggagcuga

SEQ ID NO: 457357 - RNA, 32 nt, Human
ggccggggaggcggcggcggcggcaggauucc

SEQ ID NO: 457358 - RNA, 32 nt, Human
ggccggggcagcugguaccugggaucgggcag

SEQ ID NO: 457359 - RNA, 30 nt, Human
ggccggggcaggcuuagggcacaguuaggg

SEQ ID NO: 457360 - RNA, 19 nt, Human
ggccggggcccagcuccag

SEQ ID NO: 457361 - RNA, 32 nt, Human
ggccggggcccaggcaggagcugacagcccac

SEQ ID NO: 457362 - RNA, 20 nt, Human
ggccggggccccccagggug

SEQ ID NO: 457363 - RNA, 18 nt, Human
ggccggggccccgcgaag

SEQ ID NO: 457364 - RNA, 32 nt, Human
ggccggggccccucccuuccacauauaccuug

SEQ ID NO: 457365 - RNA, 20 nt, Human
ggccggggcgcggcacgcgg

SEQ ID NO: 457366 - RNA, 18 nt, Human
ggccggggcucgccagca

SEQ ID NO: 457367 - RNA, 21 nt, Human
ggccggggcugaauggaggga

SEQ ID NO: 457368 - RNA, 32 nt, Human
ggccggggcugagggugcccuuuuccagccuc

SEQ ID NO: 457369 - RNA, 32 nt, Human
ggccggggcuggagcggagaccccagggccuc

SEQ ID NO: 457370 - RNA, 32 nt, Human
ggccgggggcugggguguggggcagucugggu

SEQ ID NO: 457371 - RNA, 20 nt, Human
ggccggggguggggcugcuu

SEQ ID NO: 457372 - RNA, 24 nt, Human
ggccgggguccuccacagccccca

SEQ ID NO: 457373 - RNA, 32 nt, Human
ggccgggguggugaaaccccaucucuacuaaa

SEQ ID NO: 457374 - RNA, 32 nt, Human
ggccgggguucccaggguucacgccacacucu

SEQ ID NO: 457375 - RNA, 32 nt, Human
ggccgggguuucacccgggcccucucuguuug

SEQ ID NO: 457376 - RNA, 32 nt, Human
ggccggguagcagcuguuugugccucuugccc

SEQ ID NO: 457377 - RNA, 32 nt, Human
ggccggguccuccaccaucaggaagaucccau

SEQ ID NO: 457378 - RNA, 32 nt, Human
ggccgggugcaguggcucacacuguaaugcca

SEQ ID NO: 457379 - RNA, 32 nt, Human
ggccgggugcgguggcucaugccugaaauucu

SEQ ID NO: 457380 - RNA, 32 nt, Human
ggccggucacaauccagcacucagacagagcc

SEQ ID NO: 457381 - RNA, 32 nt, Human
ggccggucaucuucccugucgcaggucccugc

SEQ ID NO: 457382 - RNA, 32 nt, Human
ggccgguccuagcagggauuguccccauuucc

SEQ ID NO: 457383 - RNA, 19 nt, Human
ggccggucgccugcugacc

SEQ ID NO: 457384 - RNA, 32 nt, Human
ggccggucuaggacuugccucaggaggaagga

SEQ ID NO: 457385 - RNA, 32 nt, Human
ggccggucucaaacuccugaccucaggugauc

SEQ ID NO: 457386 - RNA, 32 nt, Human
ggccggucucaaacuccugaccucaggugaug

SEQ ID NO: 457387 - RNA, 32 nt, Human
ggccggucuccuccucuccgccguccuccgcc

SEQ ID NO: 457388 - RNA, 20 nt, Human
ggccggugaggcccaggcug

SEQ ID NO: 457389 - RNA, 21 nt, Human
ggccggugagggcccaggcug

SEQ ID NO: 457390 - RNA, 32 nt, Human
ggccggugauucacaaggucaggaguucaaga

SEQ ID NO: 457391 - RNA, 21 nt, Human
ggccgguggcucaugccugua

SEQ ID NO: 457392 - RNA, 32 nt, Human
ggccggugggcgcugccucuucaucugaugga

SEQ ID NO: 457393 - RNA, 32 nt, Human
ggccgguggggaggggcaugaggcgcucgcag

SEQ ID NO: 457394 - RNA, 32 nt, Human
ggccgguuccuggucugugcugcucuccugga

SEQ ID NO: 457395 - RNA, 32 nt, Human
ggccgguucuccccaucaccucucuggggcag

SEQ ID NO: 457396 - RNA, 32 nt, Human
ggccguagagggaaacagccacugugacaacc

SEQ ID NO: 457397 - RNA, 21 nt, Human
ggccguagauuuucacaucca

SEQ ID NO: 457398 - RNA, 32 nt, Human
ggccguaggcagccaugacgcccagccggaau

SEQ ID NO: 457399 - RNA, 32 nt, Human
ggccguaggcagccauggcgcccagccggaau

SEQ ID NO: 457400 - RNA, 32 nt, Human
ggccguagggaccagaccccacccuaagccca

SEQ ID NO: 457401 - RNA, 32 nt, Human
ggccguagggacccccucacacaccaccgaga

SEQ ID NO: 457402 - RNA, 32 nt, Human
ggccgucaggacccaccaugucugccccauca

SEQ ID NO: 457403 - RNA, 20 nt, Human
ggccgucccaaagcuggcug

SEQ ID NO: 457404 - RNA, 32 nt, Human
ggccguccccucuccccuugguucugcacugu

SEQ ID NO: 457405 - RNA, 19 nt, Human
ggccgucccggaggccgcg

SEQ ID NO: 457406 - RNA, 19 nt, Human
ggccguccgcucugcugcc

SEQ ID NO: 457407 - RNA, 32 nt, Human
ggccguccucccgggcccucccuuggaaaccu

SEQ ID NO: 457408 - RNA, 32 nt, Human
ggccguccuccuccucuucaaauuggcuugaa

SEQ ID NO: 457409 - RNA, 32 nt, Human
ggccguccugagcgaaagaaccgcccccagca

SEQ ID NO: 457410 - RNA, 21 nt, Human
ggccgucgcccaagccaagcc

SEQ ID NO: 457411 - RNA, 21 nt, Human
ggccgucucaguucacugcag

SEQ ID NO: 457412 - RNA, 32 nt, Human
ggccgucuccaucgcugccuucugcaccuucc

SEQ ID NO: 457413 - RNA, 32 nt, Human
ggccgucuccccucuucugcgucuguuccgug

SEQ ID NO: 457414 - RNA, 32 nt, Human
ggccgucucugccucuggauugcacacuggcc

SEQ ID NO: 457415 - RNA, 32 nt, Human
ggccgucugccucacccgccaccucaccgccu

SEQ ID NO: 457416 - RNA, 32 nt, Human
ggccgugaagaagauagaagaaaacaacacgc

SEQ ID NO: 457417 - RNA, 32 nt, Human
ggccgugaaugagaagaagugcaacugccucc

SEQ ID NO: 457418 - RNA, 32 nt, Human
ggccgugaccagcccucugccuccagggaggc

SEQ ID NO: 457419 - RNA, 32 nt, Human
ggccgugacuuaggcagaggagugcagaggag

SEQ ID NO: 457420 - RNA, 32 nt, Human
ggccgugagauaguaucccuacccacaacugu

SEQ ID NO: 457421 - RNA, 32 nt, Human
ggccgugaguccccgccccagcaaagacuucc

SEQ ID NO: 457422 - RNA, 22 nt, Human
ggccgugagugcgugcuggacc

SEQ ID NO: 457423 - RNA, 31 nt, Human
ggccgugcagagcagcaccuccaucaggcug

SEQ ID NO: 457424 - RNA, 32 nt, Human
ggccgugcaggacagccuggagagugaccucc

SEQ ID NO: 457425 - RNA, 16 nt, Human
ggccgugcagggggcu

SEQ ID NO: 457426 - RNA, 32 nt, Human
ggccgugcagggggcucaguucugagccccag

SEQ ID NO: 457427 - RNA, 32 nt, Human
ggccgugcaggugggaggugggacaggggcaa

SEQ ID NO: 457428 - RNA, 32 nt, Human
ggccgugcccuugcuguugcugggcagugucc

SEQ ID NO: 457429 - RNA, 32 nt, Human
ggccgugcccuugcuguugcugggcagugucu

SEQ ID NO: 457430 - RNA, 32 nt, Human
ggccgugccugggcauggccucuuccugcaau

SEQ ID NO: 457431 - RNA, 32 nt, Human
ggccgugccuucucucgcuucggacugcgcaa

SEQ ID NO: 457432 - RNA, 19 nt, Human
ggccgugccuugaggccag

SEQ ID NO: 457433 - RNA, 23 nt, Human
ggccgugcgcgcgcccucccccg

SEQ ID NO: 457434 - RNA, 32 nt, Human
ggccgugcgcuacuuccacuccagcgccaacu

SEQ ID NO: 457435 - RNA, 32 nt, Human
ggccgugcgcucugcacuccggagcgguuccc

SEQ ID NO: 457436 - RNA, 32 nt, Human
ggccgugcggcacuggaccucgcuauuauuuu

SEQ ID NO: 457437 - RNA, 24 nt, Human
ggccgugcucgggcucgccugcuc

SEQ ID NO: 457438 - RNA, 22 nt, Human
ggccgugcuuaggccucugugg

SEQ ID NO: 457439 - RNA, 32 nt, Human
ggccguggaccucuaugucuccaccuccuaug

SEQ ID NO: 457440 - RNA, 32 nt, Human
ggccguggacguggccccugcccacucaccug

SEQ ID NO: 457441 - RNA, 22 nt, Human
ggccguggcccgccagaccacc

SEQ ID NO: 457442 - RNA, 31 nt, Human
ggccguggccguuuggagcacgcuguagaca

SEQ ID NO: 457443 - RNA, 24 nt, Human
ggccguggccugcaugaacuacca

SEQ ID NO: 457444 - RNA, 18 nt, Human
ggccguggcggccugagc

SEQ ID NO: 457445 - RNA, 32 nt, Human
ggccgugggaauuauuuagaaugugaucugcc

SEQ ID NO: 457446 - RNA, 32 nt, Human
ggccgugggaggcuuccugaggugggggccgg

SEQ ID NO: 457447 - RNA, 32 nt, Human
ggccgugguggucaugugccucgugucuauca

SEQ ID NO: 457448 - RNA, 32 nt, Human
ggccgugguggugagaggaagcaaucaguaug

SEQ ID NO: 457449 - RNA, 32 nt, Human
ggccgugguuaggaaggacggagaaggggcgu

SEQ ID NO: 457450 - RNA, 32 nt, Human
ggccgugucuuccucucucucugccauuuucu

SEQ ID NO: 457451 - RNA, 32 nt, Human
ggccgugugcgugagaccagagcccaggacug

SEQ ID NO: 457452 - RNA, 32 nt, Human
ggccgugugugcuggggaagccccaggaaacg

SEQ ID NO: 457453 - RNA, 32 nt, Human
ggccguguucguguuggcaaagaaggucggcu

SEQ ID NO: 457454 - RNA, 32 nt, Human
ggccguguugcagaaucggggcaggggguugc

SEQ ID NO: 457455 - RNA, 32 nt, Human
ggccguuaaccgcccuugccggagcccuaggc

SEQ ID NO: 457456 - RNA, 32 nt, Human
ggccguuccaaggagcgcgaggucgggaugga

SEQ ID NO: 457457 - RNA, 32 nt, Human
ggccguucguggaggaguacauccccacacag

SEQ ID NO: 457458 - RNA, 32 nt, Human
ggccguucuuccccagccuccccacugcuccc

SEQ ID NO: 457459 - RNA, 15 nt, Human
ggccguucuugcagu

SEQ ID NO: 457460 - RNA, 32 nt, Human
ggccguucuuuuccacccuguuucuuccccca

SEQ ID NO: 457461 - RNA, 32 nt, Human
ggccguugauguuggcugggaacucaccuggg

SEQ ID NO: 457462 - RNA, 20 nt, Human
ggccguugccgccaccaggg

SEQ ID NO: 457463 - RNA, 32 nt, Human
ggccguugcugccuggaggccaugucaguguc

SEQ ID NO: 457464 - RNA, 32 nt, Human
ggccguugcuguggagacgccuggagaguugu

SEQ ID NO: 457465 - RNA, 32 nt, Human
ggccguuuccugacacuaccagccugggaggc

SEQ ID NO: 457466 - RNA, 32 nt, Human
ggccguuuuaagacaacuaaagccugaaugcu

SEQ ID NO: 457467 - RNA, 32 nt, Human
ggccguuuuuccucuuguccaggcucacgagu

SEQ ID NO: 457468 - RNA, 19 nt, Human
ggccuaaacacagcugccu

SEQ ID NO: 457469 - RNA, 32 nt, Human
ggccuaaaccaggacuaucccaggaagccugg

SEQ ID NO: 457470 - RNA, 18 nt, Human
ggccuaaacugucaggua

SEQ ID NO: 457471 - RNA, 32 nt, Human
ggccuaaagaagccggugcugaaggagguggc

SEQ ID NO: 457472 - RNA, 32 nt, Human
ggccuaaagagccccacagggaaagggaggag

SEQ ID NO: 457473 - RNA, 32 nt, Human
ggccuaacaacaacaaaaauacuuacagguca

SEQ ID NO: 457474 - RNA, 32 nt, Human
ggccuaacaacaaggcacuuugcccuuaaucc

SEQ ID NO: 457475 - RNA, 32 nt, Human
ggccuaacacugaccuuggacuggauuugcag

SEQ ID NO: 457476 - RNA, 16 nt, Human
ggccuaacacuuggac

SEQ ID NO: 457477 - RNA, 32 nt, Human
ggccuaacauauggcauaucccagaaaauguu

SEQ ID NO: 457478 - RNA, 32 nt, Human
ggccuaaccaggcuggagugcaguggugggau

SEQ ID NO: 457479 - RNA, 32 nt, Human
ggccuaaccuggcuaauuuuuauauuuuuagu

SEQ ID NO: 457480 - RNA, 32 nt, Human
ggccuaagaacaaaccuuuucccuucaugaua

SEQ ID NO: 457481 - RNA, 32 nt, Human
ggccuaagaccggaagcaggaaggagggcgca

SEQ ID NO: 457482 - RNA, 32 nt, Human
ggccuaagagacccuauaauuucuuuggaauu

SEQ ID NO: 457483 - RNA, 32 nt, Human
ggccuaagaggagagggaaccagggagaaaag

SEQ ID NO: 457484 - RNA, 23 nt, Human
ggccuaagccccauagcagcugg

SEQ ID NO: 457485 - RNA, 32 nt, Human
ggccuaaggagguugucucaguuuuugucagc

SEQ ID NO: 457486 - RNA, 32 nt, Human
ggccuaagggaugggcacggagcccaggcugu

SEQ ID NO: 457487 - RNA, 32 nt, Human
ggccuaaguucagcuuuucugaagacacucga

SEQ ID NO: 457488 - RNA, 31 nt, Human
ggccuaaugggugaccugcaggauuuauccc

SEQ ID NO: 457489 - RNA, 32 nt, Human
ggccuaauuguaccaacaaagguagaagauac

SEQ ID NO: 457490 - RNA, 32 nt, Human
ggccuacacaccgggcucuagagccauaauuu

SEQ ID NO: 457491 - RNA, 31 nt, Human
ggccuacacagacaaaucaggagggaacaga

SEQ ID NO: 457492 - RNA, 32 nt, Human
ggccuacagagguguggcaagcagagcaccuc

SEQ ID NO: 457493 - RNA, 32 nt, Human
ggccuacaggggccugguuuucucccaucuaa

SEQ ID NO: 457494 - RNA, 32 nt, Human
ggccuacaggguggguaggcgggcgugccgca

SEQ ID NO: 457495 - RNA, 32 nt, Human
ggccuacaugggcccaagacugggugagaguc

SEQ ID NO: 457496 - RNA, 32 nt, Human
ggccuacauggugaaaccccgucucuacuaaa

SEQ ID NO: 457497 - RNA, 32 nt, Human
ggccuacaugguugaaaccccaucucuacuaa

SEQ ID NO: 457498 - RNA, 32 nt, Human
ggccuaccaaagugcugggauuacaggcguga

SEQ ID NO: 457499 - RNA, 20 nt, Human
ggccuaccagcaacugcagc

SEQ ID NO: 457500 - RNA, 32 nt, Human
ggccuacccugccuccggcccagcaugcgccu

SEQ ID NO: 457501 - RNA, 32 nt, Human
ggccuaccgaagugcuaggauuacagacguaa

SEQ ID NO: 457502 - RNA, 32 nt, Human
ggccuaccgaguagcugggacuacaggcacgc

SEQ ID NO: 457503 - RNA, 32 nt, Human
ggccuaccugccugccccaggccaugccugcc

SEQ ID NO: 457504 - RNA, 20 nt, Human
ggccuacgagugaaguggga

SEQ ID NO: 457505 - RNA, 32 nt, Human
ggccuacuaaagugcugggauuacaggcguga

SEQ ID NO: 457506 - RNA, 32 nt, Human
ggccuacucaguuggccaaggugcagguggcu

SEQ ID NO: 457507 - RNA, 32 nt, Human
ggccuacuucacagaaugauguggaaaucagu

SEQ ID NO: 457508 - RNA, 32 nt, Human
ggccuagaaagcaguguggguccuccaugggg

SEQ ID NO: 457509 - RNA, 32 nt, Human
ggccuagaaagccaagugcaaagaugagggca

SEQ ID NO: 457510 - RNA, 32 nt, Human
ggccuagaaaugucacugagggcagccacauc

SEQ ID NO: 457511 - RNA, 32 nt, Human
ggccuagaagcaguuauucucucuccauauug

SEQ ID NO: 457512 - RNA, 20 nt, Human
ggccuagacccccugcugcc

SEQ ID NO: 457513 - RNA, 32 nt, Human
ggccuagagauauuucacaaugccuucuguaa

SEQ ID NO: 457514 - RNA, 32 nt, Human
ggccuagagccaggaguacugcauucaguuga

SEQ ID NO: 457515 - RNA, 32 nt, Human
ggccuagaugguacuucuccagccuuccguuu

SEQ ID NO: 457516 - RNA, 32 nt, Human
ggccuagcagccaggcccggcccagggagcua

SEQ ID NO: 457517 - RNA, 32 nt, Human
ggccuagcagccauuccacuccaugucucacu

SEQ ID NO: 457518 - RNA, 32 nt, Human
ggccuagcccuuguagucagaaccaccaggga

SEQ ID NO: 457519 - RNA, 17 nt, Human
ggccuagcuuugaacug

SEQ ID NO: 457520 - RNA, 26 nt, Human
ggccuaggagcagauauccugccaca

SEQ ID NO: 457521 - RNA, 17 nt, Human
ggccuaggcccgggcca

SEQ ID NO: 457522 - RNA, 18 nt, Human
ggccuagggcgggcagcu

SEQ ID NO: 457523 - RNA, 32 nt, Human
ggccuagggugggaagauggcaggugggggcg

SEQ ID NO: 457524 - RNA, 32 nt, Human
ggccuaggugggcagaucaugaggucaggagu

SEQ ID NO: 457525 - RNA, 32 nt, Human
ggccuagucuagcaagaggacauagcacccuc

SEQ ID NO: 457526 - RNA, 32 nt, Human
ggccuagucugaaucuggacaggggaggugcc

SEQ ID NO: 457527 - RNA, 32 nt, Human
ggccuagugccacccuccucccuccaagccug

SEQ ID NO: 457528 - RNA, 32 nt, Human
ggccuagugcuucgcgcuuccggagaaaauca

SEQ ID NO: 457529 - RNA, 32 nt, Human
ggccuaguggugcugagggccccuuucugcuu

SEQ ID NO: 457530 - RNA, 32 nt, Human
ggccuaguguggauugacuccuuuccaccaca

SEQ ID NO: 457531 - RNA, 32 nt, Human
ggccuaguuacuggcccugcagcuugucucca

SEQ ID NO: 457532 - RNA, 32 nt, Human
ggccuaguuuaaaucacaauuccgaaucuggg

SEQ ID NO: 457533 - RNA, 32 nt, Human
ggccuauaccggcuggcucuuucagaaucaug

SEQ ID NO: 457534 - RNA, 32 nt, Human
ggccuauaugccagcgcccagggaggagucag

SEQ ID NO: 457535 - RNA, 32 nt, Human
ggccuaucaaaguguugggauuacaggcuuga

SEQ ID NO: 457536 - RNA, 32 nt, Human
ggccuaucacccuugucagagauauaaauuac

SEQ ID NO: 457537 - RNA, 32 nt, Human
ggccuaucaggaggacacaggcugcagccugg

SEQ ID NO: 457538 - RNA, 32 nt, Human
ggccuaucgugggagagccugggcaggauccc

SEQ ID NO: 457539 - RNA, 21 nt, Human
ggccuaugccaccugcagcgu

SEQ ID NO: 457540 - RNA, 32 nt, Human
ggccuauggaccuggcccaucugccacucuag

SEQ ID NO: 457541 - RNA, 20 nt, Human
ggccuauggcgaaacuccgu

SEQ ID NO: 457542 - RNA, 32 nt, Human
ggccuauugcugugaaacagagagaagguaaa

SEQ ID NO: 457543 - RNA, 32 nt, Human
ggccuauuuucauauuuauccuaagccaucaa

SEQ ID NO: 457544 - RNA, 20 nt, Human
ggccuauuuucugcuggauc

SEQ ID NO: 457545 - RNA, 32 nt, Human
ggccucaaaguauugagauuacaggcaugagc

SEQ ID NO: 457546 - RNA, 22 nt, Human
ggccucaaccuucagggcucaa

SEQ ID NO: 457547 - RNA, 21 nt, Human
ggccucaacguccucaucugu

SEQ ID NO: 457548 - RNA, 25 nt, Human
ggccucaagcaauccucccaccuca

SEQ ID NO: 457549 - RNA, 25 nt, Human
ggccucaagcaauccuuccaccuca

SEQ ID NO: 457550 - RNA, 20 nt, Human
ggccucaagcaauccuuccu

SEQ ID NO: 457551 - RNA, 21 nt, Human
ggccucaagcaguccccaccu

SEQ ID NO: 457552 - RNA, 19 nt, Human
ggccucaagcaguccuccc

SEQ ID NO: 457553 - RNA, 25 nt, Human
ggccucaagcgauccucccaccuca

SEQ ID NO: 457554 - RNA, 32 nt, Human
ggccucaaggagaccgagggggcagauagccc

SEQ ID NO: 457555 - RNA, 32 nt, Human
ggccucaaggagcagaggaaggggcuggugac

SEQ ID NO: 457556 - RNA, 32 nt, Human
ggccucaaggagcuggccugaccugaggcugg

SEQ ID NO: 457557 - RNA, 32 nt, Human
ggccucaaggcagagauggaggacaugcgggg

SEQ ID NO: 457558 - RNA, 32 nt, Human
ggccucaagggcaccaucugaagaucccauaa

SEQ ID NO: 457559 - RNA, 25 nt, Human
ggccucaagugauccacccaccuca

SEQ ID NO: 457560 - RNA, 20 nt, Human
ggccucaagugauccuccca

SEQ ID NO: 457561 - RNA, 32 nt, Human
ggccucaagugugggaacuuccccuacucccu

SEQ ID NO: 457562 - RNA, 22 nt, Human
ggccucaaucucccaucuguga

SEQ ID NO: 457563 - RNA, 23 nt, Human
ggccucaaucucccaucugugaa

SEQ ID NO: 457564 - RNA, 32 nt, Human
ggccucacaaagugcugggauuacaggcguga

SEQ ID NO: 457565 - RNA, 32 nt, Human
ggccucacaaagugcugggauuacagguguaa

SEQ ID NO: 457566 - RNA, 32 nt, Human
ggccucacaaagugcugggauuauaggcaaga

SEQ ID NO: 457567 - RNA, 32 nt, Human
ggccucacacucauucagcagacuggaaaguc

SEQ ID NO: 457568 - RNA, 32 nt, Human
ggccucacccgcucaggagcaaugcugccuuc

SEQ ID NO: 457569 - RNA, 32 nt, Human
ggccucacccugccaccaacaggaagccacac

SEQ ID NO: 457570 - RNA, 18 nt, Human
ggccucacccuguccccu

SEQ ID NO: 457571 - RNA, 32 nt, Human
ggccucaccgccucccgggccugcugucagcu

SEQ ID NO: 457572 - RNA, 21 nt, Human
ggccucaccugccacucaacc

SEQ ID NO: 457573 - RNA, 32 nt, Human
ggccucaccuuggacagaggucaauccuugau

SEQ ID NO: 457574 - RNA, 23 nt, Human
ggccucacgcccagccuccuccc

SEQ ID NO: 457575 - RNA, 21 nt, Human
ggccucacgccuguaauccca

SEQ ID NO: 457576 - RNA, 32 nt, Human
ggccucacgccuguaaucccagcacuuuggga

SEQ ID NO: 457577 - RNA, 32 nt, Human
ggccucacuccaggaaggggcuggacuggcug

SEQ ID NO: 457578 - RNA, 32 nt, Human
ggccucacucuuuucccugacccuuggggccc

SEQ ID NO: 457579 - RNA, 32 nt, Human
ggccucacugcaacacaaagcuccaccaggag

SEQ ID NO: 457580 - RNA, 32 nt, Human
ggccucacugcaauuugauaugccugcugauc

SEQ ID NO: 457581 - RNA, 32 nt, Human
ggccucacuguaccagugguucccucucugcc

SEQ ID NO: 457582 - RNA, 32 nt, Human
ggccucacuguggcuccucuguuuuacauacu

SEQ ID NO: 457583 - RNA, 32 nt, Human
ggccucacuguuucccuggccugcugucagcu

SEQ ID NO: 457584 - RNA, 32 nt, Human
ggccucacuuccuuugagccugaggcccuugg

SEQ ID NO: 457585 - RNA, 32 nt, Human
ggccucagaagcaggagagcugggugguauaa

SEQ ID NO: 457586 - RNA, 32 nt, Human
ggccucagaaguuuggccggagagggggcagc

SEQ ID NO: 457587 - RNA, 32 nt, Human
ggccucagaauccaccccgugccugcagggga

SEQ ID NO: 457588 - RNA, 32 nt, Human
ggccucagaaugcgccucaccucucccucccc

SEQ ID NO: 457589 - RNA, 19 nt, Human
ggccucagaccaaggucac

SEQ ID NO: 457590 - RNA, 20 nt, Human
ggccucagagccacucccag

SEQ ID NO: 457591 - RNA, 21 nt, Human
ggccucagagcgucuggugag

SEQ ID NO: 457592 - RNA, 32 nt, Human
ggccucagaggcuucucagacuguaagaggcc

SEQ ID NO: 457593 - RNA, 32 nt, Human
ggccucagccaagcauugaacuugcccucccc

SEQ ID NO: 457594 - RNA, 32 nt, Human
ggccucagccaggaauaauccaggaagugucc

SEQ ID NO: 457595 - RNA, 23 nt, Human
ggccucagcccgccacaucaccc

SEQ ID NO: 457596 - RNA, 17 nt, Human
ggccucagccucaggau

SEQ ID NO: 457597 - RNA, 32 nt, Human
ggccucagccucccuucccugcuccucugaga

SEQ ID NO: 457598 - RNA, 32 nt, Human
ggccucagccuccggcccuggaacccucucca

SEQ ID NO: 457599 - RNA, 32 nt, Human
ggccucagccuggcuggacccugcugccugug

SEQ ID NO: 457600 - RNA, 32 nt, Human
ggccucagcgaagaugggccgggcagggacca

SEQ ID NO: 457601 - RNA, 20 nt, Human
ggccucagcgcggcggcggg

SEQ ID NO: 457602 - RNA, 32 nt, Human
ggccucagcucccuccagugguggccgcccug

SEQ ID NO: 457603 - RNA, 18 nt, Human
ggccucagcuucccagcc

SEQ ID NO: 457604 - RNA, 22 nt, Human
ggccucagcuucccagccucca

SEQ ID NO: 457605 - RNA, 32 nt, Human
ggccucaggaagaggcgaguccuguucacgca

SEQ ID NO: 457606 - RNA, 32 nt, Human
ggccucaggaauacgaggaaaagagcuggagc

SEQ ID NO: 457607 - RNA, 22 nt, Human
ggccucaggauugucugcugaa

SEQ ID NO: 457608 - RNA, 32 nt, Human
ggccucaggcagcaguggacaguggccaggag

SEQ ID NO: 457609 - RNA, 22 nt, Human
ggccucagggacuauuggugaa

SEQ ID NO: 457610 - RNA, 19 nt, Human
ggccucagggccucuggug

SEQ ID NO: 457611 - RNA, 18 nt, Human
ggccucaggucagggaga

SEQ ID NO: 457612 - RNA, 32 nt, Human
ggccucaggucuggccagccagggcuggugcu

SEQ ID NO: 457613 - RNA, 24 nt, Human
ggccucaggugauccacccaccuc

SEQ ID NO: 457614 - RNA, 32 nt, Human
ggccucagguguugaguccagacuucugcuuu

SEQ ID NO: 457615 - RNA, 20 nt, Human
ggccucagucuccacugugg

SEQ ID NO: 457616 - RNA, 20 nt, Human
ggccucagucuccugucugu

SEQ ID NO: 457617 - RNA, 32 nt, Human
ggccucagucuggagugggauaggagcaguga

SEQ ID NO: 457618 - RNA, 23 nt, Human
ggccucagugccagcagccccgc

SEQ ID NO: 457619 - RNA, 21 nt, Human
ggccucaguggcuucugugga

SEQ ID NO: 457620 - RNA, 21 nt, Human
ggccucaguggugaccaggaa

SEQ ID NO: 457621 - RNA, 19 nt, Human
ggccucaguguccucaucu

SEQ ID NO: 457622 - RNA, 21 nt, Human
ggccucagugugcccaucugu

SEQ ID NO: 457623 - RNA, 32 nt, Human
ggccucaguguggaagagaaggcagcaggauu

SEQ ID NO: 457624 - RNA, 24 nt, Human
ggccucaguguuccccgccuggga

SEQ ID NO: 457625 - RNA, 23 nt, Human
ggccucaguuaagccuuugugga

SEQ ID NO: 457626 - RNA, 24 nt, Human
ggccucaguucgcucaccugugaa

SEQ ID NO: 457627 - RNA, 22 nt, Human
ggccucaguuucccucugugaa

SEQ ID NO: 457628 - RNA, 19 nt, Human
ggccucaucgucccgggag

SEQ ID NO: 457629 - RNA, 32 nt, Human
ggccucaucugcuccuagcccagcagagagag

SEQ ID NO: 457630 - RNA, 18 nt, Human
ggccucaugccaggguga

SEQ ID NO: 457631 - RNA, 21 nt, Human
ggccucaugccuauaauccca

SEQ ID NO: 457632 - RNA, 32 nt, Human
ggccucaugccuauaaucccagcacuuuggaa

SEQ ID NO: 457633 - RNA, 32 nt, Human
ggccucauuccaugugugccugugccuggggc

SEQ ID NO: 457634 - RNA, 32 nt, Human
ggccucauuguggagcugcaaacacgaacguc

SEQ ID NO: 457635 - RNA, 32 nt, Human
ggccucauuucacuagagacaaaucuuuaaga

SEQ ID NO: 457636 - RNA, 32 nt, Human
ggccuccaaaagugcuggaauuacaggcguga

SEQ ID NO: 457637 - RNA, 32 nt, Human
ggccuccaaaagugcugggauuacaggcauga

SEQ ID NO: 457638 - RNA, 32 nt, Human
ggccuccaaaagugcugggauuacagguguca

SEQ ID NO: 457639 - RNA, 32 nt, Human
ggccuccaaaagugcugggauuacuagcacga

SEQ ID NO: 457640 - RNA, 32 nt, Human
ggccuccaaaaguucugggauuauaggugcga

SEQ ID NO: 457641 - RNA, 32 nt, Human
ggccuccaaagccacagauguuggccggccca

SEQ ID NO: 457642 - RNA, 32 nt, Human
ggccuccaaaguucccuuaacacuugcaaagu

SEQ ID NO: 457643 - RNA, 32 nt, Human
ggccuccaagaguucuggacaggaggcagaca

SEQ ID NO: 457644 - RNA, 22 nt, Human
ggccuccaagccaggugccacc

SEQ ID NO: 457645 - RNA, 22 nt, Human
ggccuccaagcugcugcucacc

SEQ ID NO: 457646 - RNA, 32 nt, Human
ggccuccacaagugcugggauuacagguguga

SEQ ID NO: 457647 - RNA, 32 nt, Human
ggccuccacagcccagguggccccagaaaaug

SEQ ID NO: 457648 - RNA, 21 nt, Human
ggccuccaccagccucucacc

SEQ ID NO: 457649 - RNA, 18 nt, Human
ggccuccaccccugcacc

SEQ ID NO: 457650 - RNA, 18 nt, Human
ggccuccaccccugcgcc

SEQ ID NO: 457651 - RNA, 32 nt, Human
ggccuccaccgccuuccccggcugcccggcag

SEQ ID NO: 457652 - RNA, 32 nt, Human
ggccuccaccugccauggagaaguuuccgcua

SEQ ID NO: 457653 - RNA, 32 nt, Human
ggccuccacuggaagcuuuggaacuuuauucc

SEQ ID NO: 457654 - RNA, 32 nt, Human
ggccuccacuucuugaggucugaggcccagca

SEQ ID NO: 457655 - RNA, 24 nt, Human
ggccuccacuuguccaucugugaa

SEQ ID NO: 457656 - RNA, 32 nt, Human
ggccuccagcagcccccacaucugccagcggg

SEQ ID NO: 457657 - RNA, 17 nt, Human
ggccuccagcccacccc

SEQ ID NO: 457658 - RNA, 32 nt, Human
ggccuccagccccuguacacacagaggcaagc

SEQ ID NO: 457659 - RNA, 19 nt, Human
ggccuccagcgcccugccc

SEQ ID NO: 457660 - RNA, 32 nt, Human
ggccuccagcggugagaucacauacugguagg

SEQ ID NO: 457661 - RNA, 18 nt, Human
ggccuccagcugcgcagg

SEQ ID NO: 457662 - RNA, 21 nt, Human
ggccuccagcuuccccugccc

SEQ ID NO: 457663 - RNA, 32 nt, Human
ggccuccaggauuugccugcagcuuucucccu

SEQ ID NO: 457664 - RNA, 32 nt, Human
ggccuccaggcaggccgggcuggaccgcguga

SEQ ID NO: 457665 - RNA, 17 nt, Human
ggccuccaggcuggcug

SEQ ID NO: 457666 - RNA, 32 nt, Human
ggccuccagugaacuguagacuccugcauagc

SEQ ID NO: 457667 - RNA, 31 nt, Human
ggccuccaguuucaccccuuaacccauccca

SEQ ID NO: 457668 - RNA, 32 nt, Human
ggccucccaaaaccauuagggcucagaggaag

SEQ ID NO: 457669 - RNA, 32 nt, Human
ggccucccaaaauacugggauuacagggguga

SEQ ID NO: 457670 - RNA, 32 nt, Human
ggccucccaaaaugcugagauuacagguguga

SEQ ID NO: 457671 - RNA, 32 nt, Human
ggccucccaaaaugcugggauuacaggcauga

SEQ ID NO: 457672 - RNA, 32 nt, Human
ggccucccaaaaugcugggauuacaggccuga

SEQ ID NO: 457673 - RNA, 32 nt, Human
ggccucccaaaaugcugggauuacaggcguga

SEQ ID NO: 457674 - RNA, 32 nt, Human
ggccucccaaaaugcugggauuacagggguaa

SEQ ID NO: 457675 - RNA, 32 nt, Human
ggccucccaaaaugcugggauuacagguguga

SEQ ID NO: 457676 - RNA, 32 nt, Human
ggccucccaaaaugcugggauuacaugcauga

SEQ ID NO: 457677 - RNA, 32 nt, Human
ggccucccaaaaugcugggauuaccgguguga

SEQ ID NO: 457678 - RNA, 32 nt, Human
ggccucccaaaaugcugggauuagagguguga

SEQ ID NO: 457679 - RNA, 32 nt, Human
ggccucccaaaaugcugggauuauaggcauga

SEQ ID NO: 457680 - RNA, 32 nt, Human
ggccucccaaaauguugggauuacaggcauga

SEQ ID NO: 457681 - RNA, 32 nt, Human
ggccucccaaaauucugggauuacaggcauga

SEQ ID NO: 457682 - RNA, 32 nt, Human
ggccucccaaacugcuggcauuacagguguga

SEQ ID NO: 457683 - RNA, 32 nt, Human
ggccucccaaacugcugggauuacaggcguga

SEQ ID NO: 457684 - RNA, 32 nt, Human
ggccucccaaagaacugggauuacaggcauga

SEQ ID NO: 457685 - RNA, 32 nt, Human
ggccucccaaagagcugagauuacaggcguga

SEQ ID NO: 457686 - RNA, 32 nt, Human
ggccucccaaagagcuggaauuacaggagaag

SEQ ID NO: 457687 - RNA, 32 nt, Human
ggccucccaaagagcugggauuacaggcauga

SEQ ID NO: 457688 - RNA, 32 nt, Human
ggccucccaaagcacuaggauuacaggcguga

SEQ ID NO: 457689 - RNA, 32 nt, Human
ggccucccaaagcacugggauuacaggcaucu

SEQ ID NO: 457690 - RNA, 32 nt, Human
ggccucccaaagcacugggauuacaggcauga

SEQ ID NO: 457691 - RNA, 32 nt, Human
ggccucccaaagcacugggauuacaggcguga

SEQ ID NO: 457692 - RNA, 32 nt, Human
ggccucccaaagcagugguauuacaggcauga

SEQ ID NO: 457693 - RNA, 32 nt, Human
ggccucccaaagcgauaggauuacaggcguaa

SEQ ID NO: 457694 - RNA, 32 nt, Human
ggccucccaaagcgcuaggauuacagguguga

SEQ ID NO: 457695 - RNA, 32 nt, Human
ggccucccaaagcgcugggauuacaggcauga

SEQ ID NO: 457696 - RNA, 32 nt, Human
ggccucccaaagcgcugggauuacaggcguga

SEQ ID NO: 457697 - RNA, 32 nt, Human
ggccucccaaagcgcugggauuacagguguga

SEQ ID NO: 457698 - RNA, 32 nt, Human
ggccucccaaagcgcugggauuauaggcguga

SEQ ID NO: 457699 - RNA, 32 nt, Human
ggccucccaaagcgcugggauuauaggucugu

SEQ ID NO: 457700 - RNA, 32 nt, Human
ggccucccaaagcgcugguauuacagguguga

SEQ ID NO: 457701 - RNA, 32 nt, Human
ggccucccaaagcguugggauuauaggcauga

SEQ ID NO: 457702 - RNA, 32 nt, Human
ggccucccaaagggcugugauuacaggcguga

SEQ ID NO: 457703 - RNA, 32 nt, Human
ggccucccaaaggguugggauuacagguguaa

SEQ ID NO: 457704 - RNA, 32 nt, Human
ggccucccaaaguacugggauuacaggcauga

SEQ ID NO: 457705 - RNA, 32 nt, Human
ggccucccaaaguacugggauuacaggccuga

SEQ ID NO: 457706 - RNA, 32 nt, Human
ggccucccaaaguacugggauuacaggcguga

SEQ ID NO: 457707 - RNA, 32 nt, Human
ggccucccaaaguacugggauuauaggcguga

SEQ ID NO: 457708 - RNA, 32 nt, Human
ggccucccaaaguacugggauuauagguguga

SEQ ID NO: 457709 - RNA, 32 nt, Human
ggccucccaaaguauugggauuacccgcguga

SEQ ID NO: 457710 - RNA, 32 nt, Human
ggccucccaaaguccucggauuacaggcauga

SEQ ID NO: 457711 - RNA, 32 nt, Human
ggccucccaaaguccuggaauuacaggcauga

SEQ ID NO: 457712 - RNA, 32 nt, Human
ggccucccaaaguccugggauuacaggcguga

SEQ ID NO: 457713 - RNA, 32 nt, Human
ggccucccaaagugauggaauuacagguguga

SEQ ID NO: 457714 - RNA, 32 nt, Human
ggccucccaaagugaugggauuacaggcauga

SEQ ID NO: 457715 - RNA, 32 nt, Human
ggccucccaaagugccaggauuacaggcauga

SEQ ID NO: 457716 - RNA, 32 nt, Human
ggccucccaaagugccaggauuacaggcguga

SEQ ID NO: 457717 - RNA, 32 nt, Human
ggccucccaaagugccgagauuacagguguga

SEQ ID NO: 457718 - RNA, 32 nt, Human
ggccucccaaagugccgggauuacaggcauaa

SEQ ID NO: 457719 - RNA, 32 nt, Human
ggccucccaaagugccgggauuacaggcauga

SEQ ID NO: 457720 - RNA, 32 nt, Human
ggccucccaaagugccgggauuacaggcguga

SEQ ID NO: 457721 - RNA, 32 nt, Human
ggccucccaaagugcuaagauuacaggcaugg

SEQ ID NO: 457722 - RNA, 32 nt, Human
ggccucccaaagugcuaagauuacaggcguga

SEQ ID NO: 457723 - RNA, 32 nt, Human
ggccucccaaagugcuagaauuacagguguga

SEQ ID NO: 457724 - RNA, 32 nt, Human
ggccucccaaagugcuaggauuacaggaguga

SEQ ID NO: 457725 - RNA, 32 nt, Human
ggccucccaaagugcuaggauuacaggcauca

SEQ ID NO: 457726 - RNA, 32 nt, Human
ggccucccaaagugcuaggauuacaggcauga

SEQ ID NO: 457727 - RNA, 32 nt, Human
ggccucccaaagugcuaggauuacaggcccgu

SEQ ID NO: 457728 - RNA, 32 nt, Human
ggccucccaaagugcuaggauuacaggcguga

SEQ ID NO: 457729 - RNA, 32 nt, Human
ggccucccaaagugcuaggauuacaggcugga

SEQ ID NO: 457730 - RNA, 32 nt, Human
ggccucccaaagugcuaggauuacagguauga

SEQ ID NO: 457731 - RNA, 32 nt, Human
ggccucccaaagugcuaggauuacagguguga

SEQ ID NO: 457732 - RNA, 32 nt, Human
ggccucccaaagugcugacauuacaggccuga

SEQ ID NO: 457733 - RNA, 32 nt, Human
ggccucccaaagugcugagauuacagaaguga

SEQ ID NO: 457734 - RNA, 32 nt, Human
ggccucccaaagugcugagauuacagacguga

SEQ ID NO: 457735 - RNA, 32 nt, Human
ggccucccaaagugcugagauuacagauguga

SEQ ID NO: 457736 - RNA, 32 nt, Human
ggccucccaaagugcugagauuacaggcauga

SEQ ID NO: 457737 - RNA, 32 nt, Human
ggccucccaaagugcugagauuacaggccuga

SEQ ID NO: 457738 - RNA, 32 nt, Human
ggccucccaaagugcugagauuacaggcguga

SEQ ID NO: 457739 - RNA, 32 nt, Human
ggccucccaaagugcugagauuacaggcuuga

SEQ ID NO: 457740 - RNA, 32 nt, Human
ggccucccaaagugcugagauuacagggguga

SEQ ID NO: 457741 - RNA, 32 nt, Human
ggccucccaaagugcugagauuacagguguaa

SEQ ID NO: 457742 - RNA, 32 nt, Human
ggccucccaaagugcugagauuacagguguga

SEQ ID NO: 457743 - RNA, 32 nt, Human
ggccucccaaagugcugagauuacgggcauga

SEQ ID NO: 457744 - RNA, 32 nt, Human
ggccucccaaagugcugagauuauaggcauga

SEQ ID NO: 457745 - RNA, 32 nt, Human
ggccucccaaagugcugcgauuacaggcauga

SEQ ID NO: 457746 - RNA, 32 nt, Human
ggccucccaaagugcugcgauuacaggcguga

SEQ ID NO: 457747 - RNA, 32 nt, Human
ggccucccaaagugcuggaauuacaggcauga

SEQ ID NO: 457748 - RNA, 32 nt, Human
ggccucccaaagugcuggaauuacaggcgaac

SEQ ID NO: 457749 - RNA, 32 nt, Human
ggccucccaaagugcuggaauuacaggcguga

SEQ ID NO: 457750 - RNA, 32 nt, Human
ggccucccaaagugcuggcauuacaggcguga

SEQ ID NO: 457751 - RNA, 32 nt, Human
ggccucccaaagugcuggcauuacagguauga

SEQ ID NO: 457752 - RNA, 32 nt, Human
ggccucccaaagugcuggcauuacagguggga

SEQ ID NO: 457753 - RNA, 32 nt, Human
ggccucccaaagugcuggcauuacagguguga

SEQ ID NO: 457754 - RNA, 32 nt, Human
ggccucccaaagugcugggauaauagguguca

SEQ ID NO: 457755 - RNA, 32 nt, Human
ggccucccaaagugcugggaucacaggcauga

SEQ ID NO: 457756 - RNA, 32 nt, Human
ggccucccaaagugcugggaucacaggcgcca

SEQ ID NO: 457757 - RNA, 32 nt, Human
ggccucccaaagugcugggaucacaggcguga

SEQ ID NO: 457758 - RNA, 32 nt, Human
ggccucccaaagugcugggaugacaggcauga

SEQ ID NO: 457759 - RNA, 32 nt, Human
ggccucccaaagugcugggaugacaggcguga

SEQ ID NO: 457760 - RNA, 32 nt, Human
ggccucccaaagugcugggauuaaaggcguga

SEQ ID NO: 457761 - RNA, 32 nt, Human
ggccucccaaagugcugggauuaaagguguga

SEQ ID NO: 457762 - RNA, 32 nt, Human
ggccucccaaagugcugggauuaaggcgugag

SEQ ID NO: 457763 - RNA, 32 nt, Human
ggccucccaaagugcugggauuacaagcauga

SEQ ID NO: 457764 - RNA, 32 nt, Human
ggccucccaaagugcugggauuacaagcguga

SEQ ID NO: 457765 - RNA, 32 nt, Human
ggccucccaaagugcugggauuacaaggguga

SEQ ID NO: 457766 - RNA, 32 nt, Human
ggccucccaaagugcugggauuacacgcguga

SEQ ID NO: 457767 - RNA, 32 nt, Human
ggccucccaaagugcugggauuacagacacga

SEQ ID NO: 457768 - RNA, 32 nt, Human
ggccucccaaagugcugggauuacagacauga

SEQ ID NO: 457769 - RNA, 32 nt, Human
ggccucccaaagugcugggauuacagacguga

SEQ ID NO: 457770 - RNA, 32 nt, Human
ggccucccaaagugcugggauuacagagugug

SEQ ID NO: 457771 - RNA, 32 nt, Human
ggccucccaaagugcugggauuacagauguga

SEQ ID NO: 457772 - RNA, 32 nt, Human
ggccucccaaagugcugggauuacagccacug

SEQ ID NO: 457773 - RNA, 32 nt, Human
ggccucccaaagugcugggauuacagccguga

SEQ ID NO: 457774 - RNA, 32 nt, Human
ggccucccaaagugcugggauuacagcuguga

SEQ ID NO: 457775 - RNA, 32 nt, Human
ggccucccaaagugcugggauuacaggaguga

SEQ ID NO: 457776 - RNA, 32 nt, Human
ggccucccaaagugcugggauuacaggcaccg

SEQ ID NO: 457777 - RNA, 32 nt, Human
ggccucccaaagugcugggauuacaggcacga

SEQ ID NO: 457778 - RNA, 32 nt, Human
ggccucccaaagugcugggauuacaggcagga

SEQ ID NO: 457779 - RNA, 32 nt, Human
ggccucccaaagugcugggauuacaggcauaa

SEQ ID NO: 457780 - RNA, 32 nt, Human
ggccucccaaagugcugggauuacaggcauca

SEQ ID NO: 457781 - RNA, 32 nt, Human
ggccucccaaagugcugggauuacaggcauga

SEQ ID NO: 457782 - RNA, 32 nt, Human
ggccucccaaagugcugggauuacaggcaugg

SEQ ID NO: 457783 - RNA, 32 nt, Human
ggccucccaaagugcugggauuacaggccuga

SEQ ID NO: 457784 - RNA, 32 nt, Human
ggccucccaaagugcugggauuacaggccugg

SEQ ID NO: 457785 - RNA, 32 nt, Human
ggccucccaaagugcugggauuacaggcgcaa

SEQ ID NO: 457786 - RNA, 32 nt, Human
ggccucccaaagugcugggauuacaggcgcca

SEQ ID NO: 457787 - RNA, 32 nt, Human
ggccucccaaagugcugggauuacaggcgcga

SEQ ID NO: 457788 - RNA, 32 nt, Human
ggccucccaaagugcugggauuacaggcggga

SEQ ID NO: 457789 - RNA, 32 nt, Human
ggccucccaaagugcugggauuacaggcguca

SEQ ID NO: 457790 - RNA, 32 nt, Human
ggccucccaaagugcugggauuacaggcguga

SEQ ID NO: 457791 - RNA, 32 nt, Human
ggccucccaaagugcugggauuacaggcgugg

SEQ ID NO: 457792 - RNA, 32 nt, Human
ggccucccaaagugcugggauuacaggcguua

SEQ ID NO: 457793 - RNA, 32 nt, Human
ggccucccaaagugcugggauuacaggcucau

SEQ ID NO: 457794 - RNA, 32 nt, Human
ggccucccaaagugcugggauuacaggcugua

SEQ ID NO: 457795 - RNA, 32 nt, Human
ggccucccaaagugcugggauuacaggcuuga

SEQ ID NO: 457796 - RNA, 32 nt, Human
ggccucccaaagugcugggauuacagggauga

SEQ ID NO: 457797 - RNA, 32 nt, Human
ggccucccaaagugcugggauuacagggcacu

SEQ ID NO: 457798 - RNA, 32 nt, Human
ggccucccaaagugcugggauuacaggggagc

SEQ ID NO: 457799 - RNA, 32 nt, Human
ggccucccaaagugcugggauuacagguacga

SEQ ID NO: 457800 - RNA, 32 nt, Human
ggccucccaaagugcugggauuacaggugcga

SEQ ID NO: 457801 - RNA, 32 nt, Human
ggccucccaaagugcugggauuacagguggga

SEQ ID NO: 457802 - RNA, 32 nt, Human
ggccucccaaagugcugggauuacagguguaa

SEQ ID NO: 457803 - RNA, 32 nt, Human
ggccucccaaagugcugggauuacagguguca

SEQ ID NO: 457804 - RNA, 32 nt, Human
ggccucccaaagugcugggauuacagguguga

SEQ ID NO: 457805 - RNA, 32 nt, Human
ggccucccaaagugcugggauuacaggugugc

SEQ ID NO: 457806 - RNA, 32 nt, Human
ggccucccaaagugcugggauuacaggugugg

SEQ ID NO: 457807 - RNA, 32 nt, Human
ggccucccaaagugcugggauuacagguuuga

SEQ ID NO: 457808 - RNA, 32 nt, Human
ggccucccaaagugcugggauuacagucauga

SEQ ID NO: 457809 - RNA, 32 nt, Human
ggccucccaaagugcugggauuacaugcguga

SEQ ID NO: 457810 - RNA, 32 nt, Human
ggccucccaaagugcugggauuaccagcauaa

SEQ ID NO: 457811 - RNA, 32 nt, Human
ggccucccaaagugcugggauuaccggcauga

SEQ ID NO: 457812 - RNA, 32 nt, Human
ggccucccaaagugcugggauuacgggcauga

SEQ ID NO: 457813 - RNA, 32 nt, Human
ggccucccaaagugcugggauuacggguguga

SEQ ID NO: 457814 - RNA, 32 nt, Human
ggccucccaaagugcugggauuacuggcauga

SEQ ID NO: 457815 - RNA, 32 nt, Human
ggccucccaaagugcugggauuacugguauga

SEQ ID NO: 457816 - RNA, 32 nt, Human
ggccucccaaagugcugggauuacuuuacagg

SEQ ID NO: 457817 - RNA, 32 nt, Human
ggccucccaaagugcugggauuagaagcguga

SEQ ID NO: 457818 - RNA, 32 nt, Human
ggccucccaaagugcugggauuagaggcauga

SEQ ID NO: 457819 - RNA, 32 nt, Human
ggccucccaaagugcugggauuagaggcguga

SEQ ID NO: 457820 - RNA, 32 nt, Human
ggccucccaaagugcugggauuagaggcuuga

SEQ ID NO: 457821 - RNA, 32 nt, Human
ggccucccaaagugcugggauuauacauguga

SEQ ID NO: 457822 - RNA, 32 nt, Human
ggccucccaaagugcugggauuauagauguga

SEQ ID NO: 457823 - RNA, 32 nt, Human
ggccucccaaagugcugggauuauaggaguga

SEQ ID NO: 457824 - RNA, 32 nt, Human
ggccucccaaagugcugggauuauaggcacaa

SEQ ID NO: 457825 - RNA, 32 nt, Human
ggccucccaaagugcugggauuauaggcauga

SEQ ID NO: 457826 - RNA, 32 nt, Human
ggccucccaaagugcugggauuauaggcaugc

SEQ ID NO: 457827 - RNA, 32 nt, Human
ggccucccaaagugcugggauuauaggcguaa

SEQ ID NO: 457828 - RNA, 32 nt, Human
ggccucccaaagugcugggauuauaggcguga

SEQ ID NO: 457829 - RNA, 32 nt, Human
ggccucccaaagugcugggauuauaggcgugu

SEQ ID NO: 457830 - RNA, 32 nt, Human
ggccucccaaagugcugggauuauagguguga

SEQ ID NO: 457831 - RNA, 32 nt, Human
ggccucccaaagugcugggauuauggacguga

SEQ ID NO: 457832 - RNA, 32 nt, Human
ggccucccaaagugcugggauuccaggcguga

SEQ ID NO: 457833 - RNA, 32 nt, Human
ggccucccaaagugcugggauucccggcguga

SEQ ID NO: 457834 - RNA, 32 nt, Human
ggccucccaaagugcugggauugcagccguga

SEQ ID NO: 457835 - RNA, 32 nt, Human
ggccucccaaagugcugggauugcaggcauga

SEQ ID NO: 457836 - RNA, 32 nt, Human
ggccucccaaagugcugggauugcaggcguga

SEQ ID NO: 457837 - RNA, 32 nt, Human
ggccucccaaagugcugggauugcagguguga

SEQ ID NO: 457838 - RNA, 32 nt, Human
ggccucccaaagugcugggauuguggguguga

SEQ ID NO: 457839 - RNA, 32 nt, Human
ggccucccaaagugcugggauuucaggcguga

SEQ ID NO: 457840 - RNA, 32 nt, Human
ggccucccaaagugcuguaauuacaggcauga

SEQ ID NO: 457841 - RNA, 32 nt, Human
ggccucccaaagugcugugauuacagguguga

SEQ ID NO: 457842 - RNA, 32 nt, Human
ggccucccaaagugcuuggauuacaggcauga

SEQ ID NO: 457843 - RNA, 32 nt, Human
ggccucccaaagugcuuggauuacagguguaa

SEQ ID NO: 457844 - RNA, 32 nt, Human
ggccucccaaaguggugggauuacagacguga

SEQ ID NO: 457845 - RNA, 32 nt, Human
ggccucccaaaguguagggauuacaggcguga

SEQ ID NO: 457846 - RNA, 32 nt, Human
ggccucccaaaguguggggauuacggguguga

SEQ ID NO: 457847 - RNA, 32 nt, Human
ggccucccaaaguguuaggauuacaggcauga

SEQ ID NO: 457848 - RNA, 32 nt, Human
ggccucccaaaguguuaggauuacaggcguga

SEQ ID NO: 457849 - RNA, 32 nt, Human
ggccucccaaaguguugggauuacaggcaaga

SEQ ID NO: 457850 - RNA, 32 nt, Human
ggccucccaaaguguugggauuacaggcauga

SEQ ID NO: 457851 - RNA, 32 nt, Human
ggccucccaaaguguugggauuacaggcguga

SEQ ID NO: 457852 - RNA, 32 nt, Human
ggccucccaaaguguugggauuacagguguga

SEQ ID NO: 457853 - RNA, 32 nt, Human
ggccucccaaaguguugggauuacaugcauga

SEQ ID NO: 457854 - RNA, 32 nt, Human
ggccucccaaaguguugggauuauaggcauga

SEQ ID NO: 457855 - RNA, 32 nt, Human
ggccucccaaaguguugggauuauaggcguga

SEQ ID NO: 457856 - RNA, 32 nt, Human
ggccucccaaaguguugggauuauagguauga

SEQ ID NO: 457857 - RNA, 32 nt, Human
ggccucccaaaguucagggauuacaggcauga

SEQ ID NO: 457858 - RNA, 32 nt, Human
ggccucccaaaguucuaggauuacagguguga

SEQ ID NO: 457859 - RNA, 32 nt, Human
ggccucccaaaguucucggauuacaggcguga

SEQ ID NO: 457860 - RNA, 32 nt, Human
ggccucccaaaguucugggauuaaaugcguga

SEQ ID NO: 457861 - RNA, 32 nt, Human
ggccucccaaaguucugggauuacaggcauga

SEQ ID NO: 457862 - RNA, 32 nt, Human
ggccucccaaaguucugggauuacaggcguga

SEQ ID NO: 457863 - RNA, 32 nt, Human
ggccucccaaaguucugggauuacaggcuuga

SEQ ID NO: 457864 - RNA, 32 nt, Human
ggccucccaaaguucugggauuacagggguga

SEQ ID NO: 457865 - RNA, 32 nt, Human
ggccucccaaaguucugggauuacaggguguu

SEQ ID NO: 457866 - RNA, 32 nt, Human
ggccucccaaaguucugggauuacagguauga

SEQ ID NO: 457867 - RNA, 32 nt, Human
ggccucccaaaguucugggauuacagguguga

SEQ ID NO: 457868 - RNA, 32 nt, Human
ggccucccaaaguucugggauuacgggcguga

SEQ ID NO: 457869 - RNA, 32 nt, Human
ggccucccaaaguucugggauuauggguguga

SEQ ID NO: 457870 - RNA, 32 nt, Human
ggccucccaaauugcugggauuacagguguga

SEQ ID NO: 457871 - RNA, 32 nt, Human
ggccucccaaauuguugggauuauaggcguga

SEQ ID NO: 457872 - RNA, 32 nt, Human
ggccucccaacaugcugggauuacaggcguga

SEQ ID NO: 457873 - RNA, 32 nt, Human
ggccucccaacgugcuggaauuacaggcauga

SEQ ID NO: 457874 - RNA, 32 nt, Human
ggccucccaacgugcugggauuacagguguga

SEQ ID NO: 457875 - RNA, 32 nt, Human
ggccucccaacgugcugggauuauaggcguga

SEQ ID NO: 457876 - RNA, 22 nt, Human
ggccucccaacucaccccagcc

SEQ ID NO: 457877 - RNA, 32 nt, Human
ggccucccaagcccugauaacaacauggccaa

SEQ ID NO: 457878 - RNA, 32 nt, Human
ggccucccaaggugcuaggauuacaggcauga

SEQ ID NO: 457879 - RNA, 32 nt, Human
ggccucccaaggugcuggaauuacagguguga

SEQ ID NO: 457880 - RNA, 32 nt, Human
ggccucccaaggugcugggauuacaggcauga

SEQ ID NO: 457881 - RNA, 32 nt, Human
ggccucccaaggugcugggauugcaggcguga

SEQ ID NO: 457882 - RNA, 32 nt, Human
ggccucccaaguagcugagacuacaggcacac

SEQ ID NO: 457883 - RNA, 32 nt, Human
ggccucccaaguagcugggacuacaagcgcgc

SEQ ID NO: 457884 - RNA, 32 nt, Human
ggccucccaaguagcugggacuacaggcgccu

SEQ ID NO: 457885 - RNA, 32 nt, Human
ggccucccaaguagcugggacuauaggugcgu

SEQ ID NO: 457886 - RNA, 32 nt, Human
ggccucccaaguagcugggauuacaggugccu

SEQ ID NO: 457887 - RNA, 32 nt, Human
ggccucccaaguagcugggauuacaggugugu

SEQ ID NO: 457888 - RNA, 32 nt, Human
ggccucccaaguagcugggauugcaggugccc

SEQ ID NO: 457889 - RNA, 32 nt, Human
ggccucccaaguaguugggucuacaggcacgc

SEQ ID NO: 457890 - RNA, 32 nt, Human
ggccucccaaguaugugggacuacagguacuc

SEQ ID NO: 457891 - RNA, 32 nt, Human
ggccucccaaguugcugggauuacugacacaa

SEQ ID NO: 457892 - RNA, 32 nt, Human
ggccucccaaguuuugaaaggcuuuccucagc

SEQ ID NO: 457893 - RNA, 32 nt, Human
ggccucccaaugugcuaggauuacaggcgugg

SEQ ID NO: 457894 - RNA, 32 nt, Human
ggccucccaauguguugggauuacaggcguga

SEQ ID NO: 457895 - RNA, 32 nt, Human
ggccucccacaaugcuggaauuacagguguua

SEQ ID NO: 457896 - RNA, 32 nt, Human
ggccucccacagugcugagauuacagguggga

SEQ ID NO: 457897 - RNA, 32 nt, Human
ggccucccacagugcugggauuacaggaguga

SEQ ID NO: 457898 - RNA, 32 nt, Human
ggccucccacagugcugggauuacaggccuga

SEQ ID NO: 457899 - RNA, 32 nt, Human
ggccucccacagugcugggauuacaggcguga

SEQ ID NO: 457900 - RNA, 32 nt, Human
ggccucccacagugcugggauuaccggcguga

SEQ ID NO: 457901 - RNA, 26 nt, Human
ggccucccacaugcccucuuuccucu

SEQ ID NO: 457902 - RNA, 22 nt, Human
ggccucccaccacugcccagcc

SEQ ID NO: 457903 - RNA, 23 nt, Human
ggccucccacccguacaccugcc

SEQ ID NO: 457904 - RNA, 21 nt, Human
ggccucccaccuuaaguucag

SEQ ID NO: 457905 - RNA, 24 nt, Human
ggccucccacgagccccuccagcc

SEQ ID NO: 457906 - RNA, 23 nt, Human
ggccucccacuacagagaugcgu

SEQ ID NO: 457907 - RNA, 24 nt, Human
ggccucccacucagagucuggguc

SEQ ID NO: 457908 - RNA, 21 nt, Human
ggccucccacuccucccagcc

SEQ ID NO: 457909 - RNA, 32 nt, Human
ggccucccagaaccugcuggucugcaggacac

SEQ ID NO: 457910 - RNA, 32 nt, Human
ggccucccagaaugcugggauuacaggcguga

SEQ ID NO: 457911 - RNA, 32 nt, Human
ggccucccagaguauugggauuacagacauga

SEQ ID NO: 457912 - RNA, 32 nt, Human
ggccucccagagugcugagauuacagacguga

SEQ ID NO: 457913 - RNA, 32 nt, Human
ggccucccagagugcugagauuacaggcguga

SEQ ID NO: 457914 - RNA, 32 nt, Human
ggccucccagagugcugagauuuacaggcgug

SEQ ID NO: 457915 - RNA, 32 nt, Human
ggccucccagagugcugggauuacaggcauga

SEQ ID NO: 457916 - RNA, 32 nt, Human
ggccucccagagugcugggauuacaggcguga

SEQ ID NO: 457917 - RNA, 32 nt, Human
ggccucccagagugcugggauuacagggggag

SEQ ID NO: 457918 - RNA, 32 nt, Human
ggccucccagagugcugggauuacagguguga

SEQ ID NO: 457919 - RNA, 32 nt, Human
ggccucccagagugcugggauuagucgucauc

SEQ ID NO: 457920 - RNA, 32 nt, Human
ggccucccagagugcugggauuauaggcguga

SEQ ID NO: 457921 - RNA, 32 nt, Human
ggccucccagagugcugggauuuacaggcaug

SEQ ID NO: 457922 - RNA, 32 nt, Human
ggccucccagcagagcuggaggagggggugac

SEQ ID NO: 457923 - RNA, 24 nt, Human
ggccucccagcagugccgcagcgu

SEQ ID NO: 457924 - RNA, 25 nt, Human
ggccucccagccacauggaacugug

SEQ ID NO: 457925 - RNA, 24 nt, Human
ggccucccagccauguggaacugc

SEQ ID NO: 457926 - RNA, 24 nt, Human
ggccucccagcccaaaucaagcca

SEQ ID NO: 457927 - RNA, 21 nt, Human
ggccucccagcuucccuagcc

SEQ ID NO: 457928 - RNA, 32 nt, Human
ggccucccaggaagugcugggauuacaggcau

SEQ ID NO: 457929 - RNA, 32 nt, Human
ggccucccagguagcugggauuauaggcgugu

SEQ ID NO: 457930 - RNA, 32 nt, Human
ggccucccauaaugcugggauuacaggcguga

SEQ ID NO: 457931 - RNA, 32 nt, Human
ggccucccauagugcugggauuacaggcauga

SEQ ID NO: 457932 - RNA, 32 nt, Human
ggccucccauagugcugggauuacagguguga

SEQ ID NO: 457933 - RNA, 32 nt, Human
ggccucccaugcagaggucagugagagcccaa

SEQ ID NO: 457934 - RNA, 32 nt, Human
ggccuccccaagugcuaggauuacagauguga

SEQ ID NO: 457935 - RNA, 32 nt, Human
ggccuccccaagugcugggauuauaggcauga

SEQ ID NO: 457936 - RNA, 32 nt, Human
ggccuccccaaguguugggauuacaggcguga

SEQ ID NO: 457937 - RNA, 21 nt, Human
ggccuccccaccacaccagcc

SEQ ID NO: 457938 - RNA, 22 nt, Human
ggccuccccacuucuuuccucu

SEQ ID NO: 457939 - RNA, 32 nt, Human
ggccuccccagccaugugaaacugagucaauu

SEQ ID NO: 457940 - RNA, 32 nt, Human
ggccuccccagccauguggaacagugagucaa

SEQ ID NO: 457941 - RNA, 32 nt, Human
ggccuccccagccauguuaaacuuugaguuaa

SEQ ID NO: 457942 - RNA, 32 nt, Human
ggccuccccagccucccucuccaccucccugc

SEQ ID NO: 457943 - RNA, 21 nt, Human
ggccucccccagcuggacccu

SEQ ID NO: 457944 - RNA, 32 nt, Human
ggccuccccugccaugccuccuguacagccug

SEQ ID NO: 457945 - RNA, 32 nt, Human
ggccuccccugccccuccccgcccugccuggc

SEQ ID NO: 457946 - RNA, 32 nt, Human
ggccuccccugccgcugugccaggcaggcagu

SEQ ID NO: 457947 - RNA, 32 nt, Human
ggccuccccugccuuuucuccgguggggauga

SEQ ID NO: 457948 - RNA, 20 nt, Human
ggccuccccugggacugcgu

SEQ ID NO: 457949 - RNA, 32 nt, Human
ggccucccgaaaugcugggauuacaggcauga

SEQ ID NO: 457950 - RNA, 32 nt, Human
ggccucccgaaauguugguauuacaggcauga

SEQ ID NO: 457951 - RNA, 32 nt, Human
ggccucccgaaguccugaagcugggcggcagu

SEQ ID NO: 457952 - RNA, 32 nt, Human
ggccucccgaagugaugagauuauaggcguga

SEQ ID NO: 457953 - RNA, 32 nt, Human
ggccucccgaagugcuaagauuacaggcguga

SEQ ID NO: 457954 - RNA, 32 nt, Human
ggccucccgaagugcuggaauuacaggcguga

SEQ ID NO: 457955 - RNA, 32 nt, Human
ggccucccgaagugcuggcauuacaggcauga

SEQ ID NO: 457956 - RNA, 32 nt, Human
ggccucccgaagugcugggauuacagaaguga

SEQ ID NO: 457957 - RNA, 32 nt, Human
ggccucccgaagugcugggauuacaggcauga

SEQ ID NO: 457958 - RNA, 32 nt, Human
ggccucccgaagugcugggauuacaggcggga

SEQ ID NO: 457959 - RNA, 32 nt, Human
ggccucccgaagugcugggauuacaggcguga

SEQ ID NO: 457960 - RNA, 32 nt, Human
ggccucccgaagugcugggauuauagguguga

SEQ ID NO: 457961 - RNA, 32 nt, Human
ggccucccgaagugcugggauugcaggcauaa

SEQ ID NO: 457962 - RNA, 32 nt, Human
ggccucccgaagugcugggauugcaggcguga

SEQ ID NO: 457963 - RNA, 26 nt, Human
ggccucccgaaucgccuucuuccucu

SEQ ID NO: 457964 - RNA, 32 nt, Human
ggccucccgaguagcuggaaguacagauaauc

SEQ ID NO: 457965 - RNA, 32 nt, Human
ggccucccgaguagcugggacuggaggcgugu

SEQ ID NO: 457966 - RNA, 32 nt, Human
ggccucccgaguagcugggauuacaggugugc

SEQ ID NO: 457967 - RNA, 32 nt, Human
ggccucccgcaaugcugcaauuacagguguua

SEQ ID NO: 457968 - RNA, 23 nt, Human
ggccucccgcacgccccgcaggu

SEQ ID NO: 457969 - RNA, 21 nt, Human
ggccucccgcagccgccgcgg

SEQ ID NO: 457970 - RNA, 22 nt, Human
ggccucccgcaguacgagaagc

SEQ ID NO: 457971 - RNA, 22 nt, Human
ggccucccgccccauccccgcc

SEQ ID NO: 457972 - RNA, 20 nt, Human
ggccucccgcgaucacagcg

SEQ ID NO: 457973 - RNA, 22 nt, Human
ggccucccggcgaccgccgcag

SEQ ID NO: 457974 - RNA, 23 nt, Human
ggccucccggggaccccgcagcg

SEQ ID NO: 457975 - RNA, 32 nt, Human
ggccucccggggugcugggauuauaggcguga

SEQ ID NO: 457976 - RNA, 32 nt, Human
ggccucccggguggcugggauugcaggcaccc

SEQ ID NO: 457977 - RNA, 18 nt, Human
ggccucccgucugucacc

SEQ ID NO: 457978 - RNA, 24 nt, Human
ggccucccgucuugugaacuucaa

SEQ ID NO: 457979 - RNA, 32 nt, Human
ggccucccuaaaugccgggauuacaggcauga

SEQ ID NO: 457980 - RNA, 32 nt, Human
ggccucccuaacagcugggauuacaggcguga

SEQ ID NO: 457981 - RNA, 32 nt, Human
ggccucccuaacagcugggauuuacaggcgug

SEQ ID NO: 457982 - RNA, 32 nt, Human
ggccucccuaagugcugagauuccaggccuga

SEQ ID NO: 457983 - RNA, 32 nt, Human
ggccucccuaagugcugggauuauaggcguga

SEQ ID NO: 457984 - RNA, 32 nt, Human
ggccucccuaaguguugggauuauagguguga

SEQ ID NO: 457985 - RNA, 32 nt, Human
ggccucccuagguguugggauuacaggcguga

SEQ ID NO: 457986 - RNA, 32 nt, Human
ggccucccuaguagcugggauuacaggcgcac

SEQ ID NO: 457987 - RNA, 32 nt, Human
ggccucccuaguaucugugauuacaggcacgu

SEQ ID NO: 457988 - RNA, 17 nt, Human
ggccucccucccacccc

SEQ ID NO: 457989 - RNA, 32 nt, Human
ggccucccuccccugugacucccuccacacag

SEQ ID NO: 457990 - RNA, 32 nt, Human
ggccucccucccgcacacuccugcugcccccg

SEQ ID NO: 457991 - RNA, 22 nt, Human
ggccucccucucccuucccucu

SEQ ID NO: 457992 - RNA, 24 nt, Human
ggccucccucugaugaccccagcc

SEQ ID NO: 457993 - RNA, 23 nt, Human
ggccucccucuuacuaaaaacaa

SEQ ID NO: 457994 - RNA, 19 nt, Human
ggccucccugaaacacugc

SEQ ID NO: 457995 - RNA, 32 nt, Human
ggccucccugaggagcagaggccaacagcacg

SEQ ID NO: 457996 - RNA, 32 nt, Human
ggccucccuggaccagcagcucugacucacac

SEQ ID NO: 457997 - RNA, 20 nt, Human
ggccucccugggcugcugug

SEQ ID NO: 457998 - RNA, 20 nt, Human
ggccucccuggggacauugu

SEQ ID NO: 457999 - RNA, 24 nt, Human
ggccucccuuccccagaggcuggu

SEQ ID NO: 458000 - RNA, 32 nt, Human
ggccucccuuccccucuucuuucuuuguucuc

SEQ ID NO: 458001 - RNA, 32 nt, Human
ggccucccuucccuuacaaugugccuuugggg

SEQ ID NO: 458002 - RNA, 32 nt, Human
ggccucccuugaauucaccacacacauaccag

SEQ ID NO: 458003 - RNA, 32 nt, Human
ggccuccgaaaaugcugggauuacaggcguga

SEQ ID NO: 458004 - RNA, 32 nt, Human
ggccuccgaaaaugcugggauuacagguguga

SEQ ID NO: 458005 - RNA, 32 nt, Human
ggccuccgaaagugcuaggauuacagguguga

SEQ ID NO: 458006 - RNA, 32 nt, Human
ggccuccgaaagugcugggauuacaggcguga

SEQ ID NO: 458007 - RNA, 25 nt, Human
ggccuccgcagguucugcgcuccag

SEQ ID NO: 458008 - RNA, 21 nt, Human
ggccuccgccaugaaccccag

SEQ ID NO: 458009 - RNA, 22 nt, Human
ggccuccgcccucuccuccucu

SEQ ID NO: 458010 - RNA, 32 nt, Human
ggccuccgccuggggaaggcuugugcggcggu

SEQ ID NO: 458011 - RNA, 32 nt, Human
ggccuccgcuggaaaugcaaagugauucuaga

SEQ ID NO: 458012 - RNA, 25 nt, Human
ggccuccgcuuuccucucucccccu

SEQ ID NO: 458013 - RNA, 32 nt, Human
ggccuccggaagugcugggauuacaggcguga

SEQ ID NO: 458014 - RNA, 19 nt, Human
ggccuccguccccauggcc

SEQ ID NO: 458015 - RNA, 32 nt, Human
ggccuccgucugcacacaguguucgucugcac

SEQ ID NO: 458016 - RNA, 32 nt, Human
ggccuccuaaagugcugagauuacagguguga

SEQ ID NO: 458017 - RNA, 28 nt, Human
ggccuccuaaagugcuggcauuacaggc

SEQ ID NO: 458018 - RNA, 32 nt, Human
ggccuccuaaagugcugggauaacaggcguga

SEQ ID NO: 458019 - RNA, 32 nt, Human
ggccuccuaaagugcugggaucacaggcguga

SEQ ID NO: 458020 - RNA, 32 nt, Human
ggccuccuaaagugcugggauuacaggcacgc

SEQ ID NO: 458021 - RNA, 32 nt, Human
ggccuccuaaagugcugggauuacaggcaucu

SEQ ID NO: 458022 - RNA, 32 nt, Human
ggccuccuaaagugcugggauuacaggcauga

SEQ ID NO: 458023 - RNA, 32 nt, Human
ggccuccuaaagugcugggauuacaggcguga

SEQ ID NO: 458024 - RNA, 32 nt, Human
ggccuccuaaagugcugggauuacagguguga

SEQ ID NO: 458025 - RNA, 32 nt, Human
ggccuccuaaagugcugggauuacaugagcca

SEQ ID NO: 458026 - RNA, 32 nt, Human
ggccuccuaaagugcugggauuccagguguga

SEQ ID NO: 458027 - RNA, 32 nt, Human
ggccuccuaaaguucugggauuacaggaguga

SEQ ID NO: 458028 - RNA, 32 nt, Human
ggccuccuaaguagcagggauuacaggcaugc

SEQ ID NO: 458029 - RNA, 22 nt, Human
ggccuccuacaagaccaagcca

SEQ ID NO: 458030 - RNA, 22 nt, Human
ggccuccuaccuccacgagguc

SEQ ID NO: 458031 - RNA, 32 nt, Human
ggccuccuagagugcugggauuacagguguga

SEQ ID NO: 458032 - RNA, 32 nt, Human
ggccuccuagggugcugggauugcaggccuga

SEQ ID NO: 458033 - RNA, 21 nt, Human
ggccuccucacgggagcugcg

SEQ ID NO: 458034 - RNA, 22 nt, Human
ggccuccucagccucuuuccuc

SEQ ID NO: 458035 - RNA, 32 nt, Human
ggccuccucaugcuggccuuucuuggaagaag

SEQ ID NO: 458036 - RNA, 20 nt, Human
ggccuccuccagcagagacc

SEQ ID NO: 458037 - RNA, 18 nt, Human
ggccuccucccugcugcc

SEQ ID NO: 458038 - RNA, 32 nt, Human
ggccuccucccuucugagcacacacacaaccg

SEQ ID NO: 458039 - RNA, 22 nt, Human
ggccuccucucugccaccaccc

SEQ ID NO: 458040 - RNA, 23 nt, Human
ggccuccucuugcuaccucuuua

SEQ ID NO: 458041 - RNA, 32 nt, Human
ggccuccugaagugcugggauuacaggcauga

SEQ ID NO: 458042 - RNA, 32 nt, Human
ggccuccugaagugcugggauuacaggcgugg

SEQ ID NO: 458043 - RNA, 32 nt, Human
ggccuccugaaguguuaggauuacaggcguga

SEQ ID NO: 458044 - RNA, 32 nt, Human
ggccuccugaaguguugggauuacaggcguga

SEQ ID NO: 458045 - RNA, 32 nt, Human
ggccuccugagcagcugggacuacaggcgcau

SEQ ID NO: 458046 - RNA, 23 nt, Human
ggccuccugagcguggagcugcg

SEQ ID NO: 458047 - RNA, 21 nt, Human
ggccuccugaggaccacagcc

SEQ ID NO: 458048 - RNA, 21 nt, Human
ggccuccugaguaccugggau

SEQ ID NO: 458049 - RNA, 32 nt, Human
ggccuccugaguaccugggauuauaggcacaa

SEQ ID NO: 458050 - RNA, 32 nt, Human
ggccuccugaguagcuaagaccacaggugugu

SEQ ID NO: 458051 - RNA, 32 nt, Human
ggccuccugaguagcuaagggaggagucuuga

SEQ ID NO: 458052 - RNA, 32 nt, Human
ggccuccugaguagcugggacgacaggcgugc

SEQ ID NO: 458053 - RNA, 32 nt, Human
ggccuccugaguagcugggacuacagggacua

SEQ ID NO: 458054 - RNA, 32 nt, Human
ggccuccugaguagcugggacugcaguuguaa

SEQ ID NO: 458055 - RNA, 32 nt, Human
ggccuccugaguagcugggauuacaggcaugc

SEQ ID NO: 458056 - RNA, 32 nt, Human
ggccuccugaguagcugggauugcagguaugc

SEQ ID NO: 458057 - RNA, 32 nt, Human
ggccuccugaguagcugggauuucaggccaug

SEQ ID NO: 458058 - RNA, 32 nt, Human
ggccuccugaguagcugggguugcaggugugc

SEQ ID NO: 458059 - RNA, 32 nt, Human
ggccuccugaguggcugggauugcaggugugc

SEQ ID NO: 458060 - RNA, 32 nt, Human
ggccuccugauuagcugggauuacaggcaugu

SEQ ID NO: 458061 - RNA, 32 nt, Human
ggccuccugcagccccuacuuccacgccaugu

SEQ ID NO: 458062 - RNA, 32 nt, Human
ggccuccugcagcuggacuccagcgccugccc

SEQ ID NO: 458063 - RNA, 32 nt, Human
ggccuccugccugaacagguaguugggguugg

SEQ ID NO: 458064 - RNA, 30 nt, Human
ggccuccugccuggcacuucauguuucucu

SEQ ID NO: 458065 - RNA, 32 nt, Human
ggccuccugccuggccgcccagggcuggccgc

SEQ ID NO: 458066 - RNA, 32 nt, Human
ggccuccugccugggccugccuugcagcuggc

SEQ ID NO: 458067 - RNA, 32 nt, Human
ggccuccuggaggaggaaguggaggccgcugc

SEQ ID NO: 458068 - RNA, 20 nt, Human
ggccuccuggccucucccuc

SEQ ID NO: 458069 - RNA, 23 nt, Human
ggccuccuggggugcucucgcca

SEQ ID NO: 458070 - RNA, 32 nt, Human
ggccuccuguaaucccagcuacuugggaggcu

SEQ ID NO: 458071 - RNA, 21 nt, Human
ggccuccugucgcaacugcgu

SEQ ID NO: 458072 - RNA, 32 nt, Human
ggccuccugucuacagcagcuuccucaguuuc

SEQ ID NO: 458073 - RNA, 32 nt, Human
ggccuccugugcagaacuggaccccaggggug

SEQ ID NO: 458074 - RNA, 26 nt, Human
ggccuccuucacaaugugaagcugug

SEQ ID NO: 458075 - RNA, 32 nt, Human
ggccuccuucagcccccuccuccugggggaug

SEQ ID NO: 458076 - RNA, 32 nt, Human
ggccuccuuccugcccuucugccugccugugu

SEQ ID NO: 458077 - RNA, 19 nt, Human
ggccuccuugcugacugcg

SEQ ID NO: 458078 - RNA, 32 nt, Human
ggccuccuuggcuggcaugguucuguguuacg

SEQ ID NO: 458079 - RNA, 19 nt, Human
ggccuccuuuccuccuccu

SEQ ID NO: 458080 - RNA, 32 nt, Human
ggccucgagauggcagagcggaggcguucccu

SEQ ID NO: 458081 - RNA, 32 nt, Human
ggccucgagccgggaggaagggggcuuccgga

SEQ ID NO: 458082 - RNA, 32 nt, Human
ggccucgaggcagguggaucaccugaggucag

SEQ ID NO: 458083 - RNA, 20 nt, Human
ggccucgaggggccucccgg

SEQ ID NO: 458084 - RNA, 23 nt, Human
ggccucgaggugccaggcagcau

SEQ ID NO: 458085 - RNA, 19 nt, Human
ggccucgauccgccuuccc

SEQ ID NO: 458086 - RNA, 24 nt, Human
ggccucgaucuccugaccucguga

SEQ ID NO: 458087 - RNA, 24 nt, Human
ggccucgaucucuugaccucguga

SEQ ID NO: 458088 - RNA, 32 nt, Human
ggccucgcaguggauggaggaggcccagcccu

SEQ ID NO: 458089 - RNA, 32 nt, Human
ggccucgccaugaggcucuuccugucgcuccc

SEQ ID NO: 458090 - RNA, 25 nt, Human
ggccucgccugggcccuucuuccuc

SEQ ID NO: 458091 - RNA, 22 nt, Human
ggccucgcggaaggcccgcucg

SEQ ID NO: 458092 - RNA, 23 nt, Human
ggccucgcucccucccuucaccu

SEQ ID NO: 458093 - RNA, 32 nt, Human
ggccucgcucucgccucaccccggcuccuggg

SEQ ID NO: 458094 - RNA, 21 nt, Human
ggccucgcucuguuuuuucca

SEQ ID NO: 458095 - RNA, 32 nt, Human
ggccucgcugcacucauggcuucuccuagcaa

SEQ ID NO: 458096 - RNA, 16 nt, Human
ggccucgcugcugcug

SEQ ID NO: 458097 - RNA, 32 nt, Human
ggccucgcugggacucccugggagaugaggcc

SEQ ID NO: 458098 - RNA, 21 nt, Human
ggccucggaaaacaauggagu

SEQ ID NO: 458099 - RNA, 32 nt, Human
ggccucggaaagugcugggauuacggggguga

SEQ ID NO: 458100 - RNA, 32 nt, Human
ggccucggaaccagcuuuucucucuuacgaug

SEQ ID NO: 458101 - RNA, 32 nt, Human
ggccucggaccagccauuucgguguagaagug

SEQ ID NO: 458102 - RNA, 19 nt, Human
ggccucggaccgcccacuc

SEQ ID NO: 458103 - RNA, 21 nt, Human
ggccucggacuccgccgcucg

SEQ ID NO: 458104 - RNA, 32 nt, Human
ggccucggagacuuggaggaggacgcucugga

SEQ ID NO: 458105 - RNA, 32 nt, Human
ggccucggagccgccuccgccgggaggggucg

SEQ ID NO: 458106 - RNA, 21 nt, Human
ggccucggcagccaugcccgc

SEQ ID NO: 458107 - RNA, 21 nt, Human
ggccucggcgcgcccgccucg

SEQ ID NO: 458108 - RNA, 32 nt, Human
ggccucgggauguccagcccagugcuccuucc

SEQ ID NO: 458109 - RNA, 21 nt, Human
ggccucgggauucgcccgccg

SEQ ID NO: 458110 - RNA, 21 nt, Human
ggccucgggcuccucugccca

SEQ ID NO: 458111 - RNA, 32 nt, Human
ggccucggggcuguccuucauugcccacaugg

SEQ ID NO: 458112 - RNA, 32 nt, Human
ggccucgggguuucccccugugcccugacagc

SEQ ID NO: 458113 - RNA, 32 nt, Human
ggccucggucccuccugcaccugcugccugga

SEQ ID NO: 458114 - RNA, 32 nt, Human
ggccucggucugcgggcggugcagcccggaac

SEQ ID NO: 458115 - RNA, 23 nt, Human
ggccucggugcaccccagccucc

SEQ ID NO: 458116 - RNA, 22 nt, Human
ggccucggugcagguacagcuc

SEQ ID NO: 458117 - RNA, 21 nt, Human
ggccucggugccacccagccg

SEQ ID NO: 458118 - RNA, 21 nt, Human
ggccucgguguccuuaucugu

SEQ ID NO: 458119 - RNA, 17 nt, Human
ggccucgucccucugcu

SEQ ID NO: 458120 - RNA, 32 nt, Human
ggccucgugcagggacgcucaggcugcuccca

SEQ ID NO: 458121 - RNA, 21 nt, Human
ggccucuacuaggucugcucc

SEQ ID NO: 458122 - RNA, 32 nt, Human
ggccucuacucucuccucccucuggcucugcc

SEQ ID NO: 458123 - RNA, 32 nt, Human
ggccucuacugcccuggcugcagucagugccc

SEQ ID NO: 458124 - RNA, 20 nt, Human
ggccucuagccuccauggcu

SEQ ID NO: 458125 - RNA, 32 nt, Human
ggccucucaaaaugcugggauuacagguguga

SEQ ID NO: 458126 - RNA, 32 nt, Human
ggccucucaaacugcugggauuacaggcacgc

SEQ ID NO: 458127 - RNA, 32 nt, Human
ggccucucaaagcacugggauuacagguguga

SEQ ID NO: 458128 - RNA, 32 nt, Human
ggccucucaaagugcugggauuaaaggcguaa

SEQ ID NO: 458129 - RNA, 32 nt, Human
ggccucucaaagugcugggauuacaggcauga

SEQ ID NO: 458130 - RNA, 32 nt, Human
ggccucucaaagugcugggauuacaggcguga

SEQ ID NO: 458131 - RNA, 32 nt, Human
ggccucucaaagugcugggauuacaggcgugg

SEQ ID NO: 458132 - RNA, 32 nt, Human
ggccucucaaagugcugggauuacaggcuuac

SEQ ID NO: 458133 - RNA, 32 nt, Human
ggccucucaaagugcugggauuacagguguga

SEQ ID NO: 458134 - RNA, 32 nt, Human
ggccucucaaagugcugggauuacgggcguga

SEQ ID NO: 458135 - RNA, 32 nt, Human
ggccucucaaagugcugggauuauaggcauga

SEQ ID NO: 458136 - RNA, 32 nt, Human
ggccucucaaagugcugggauuauaggcguga

SEQ ID NO: 458137 - RNA, 32 nt, Human
ggccucucaaaguguugggauuacaggcguga

SEQ ID NO: 458138 - RNA, 32 nt, Human
ggccucucaaaguguugggauuacguguguaa

SEQ ID NO: 458139 - RNA, 32 nt, Human
ggccucucacuccugccgucauggccuccaaa

SEQ ID NO: 458140 - RNA, 32 nt, Human
ggccucucagaaccauguuccccagccaggug

SEQ ID NO: 458141 - RNA, 21 nt, Human
ggccucucaucccccuucuuc

SEQ ID NO: 458142 - RNA, 32 nt, Human
ggccucucauuuccuuacacucugacaugaau

SEQ ID NO: 458143 - RNA, 23 nt, Human
ggccucuccacccucagcccccu

SEQ ID NO: 458144 - RNA, 23 nt, Human
ggccucuccacugucuccacucu

SEQ ID NO: 458145 - RNA, 32 nt, Human
ggccucuccacugucuccacucuccagcgccc

SEQ ID NO: 458146 - RNA, 20 nt, Human
ggccucuccagcccuccucu

SEQ ID NO: 458147 - RNA, 23 nt, Human
ggccucuccagccucagcccccu

SEQ ID NO: 458148 - RNA, 18 nt, Human
ggccucuccaggugcaaa

SEQ ID NO: 458149 - RNA, 32 nt, Human
ggccucuccaguagcugggauuacaggugugc

SEQ ID NO: 458150 - RNA, 19 nt, Human
ggccucuccaguuugcacc

SEQ ID NO: 458151 - RNA, 32 nt, Human
ggccucuccccaucccccucuucuccgcacgu

SEQ ID NO: 458152 - RNA, 17 nt, Human
ggccucucccccacccc

SEQ ID NO: 458153 - RNA, 32 nt, Human
ggccucuccccugcaggacuggcauugcacua

SEQ ID NO: 458154 - RNA, 32 nt, Human
ggccucuccccuuuaccccuccagagaagggg

SEQ ID NO: 458155 - RNA, 20 nt, Human
ggccucucccucccucccuc

SEQ ID NO: 458156 - RNA, 32 nt, Human
ggccucucccucccucccucccucucuguccc

SEQ ID NO: 458157 - RNA, 32 nt, Human
ggccucucccuuucuccuuuaaaacaaaugaa

SEQ ID NO: 458158 - RNA, 21 nt, Human
ggccucucccuuuuccccccu

SEQ ID NO: 458159 - RNA, 21 nt, Human
ggccucuccuccccuccccuc

SEQ ID NO: 458160 - RNA, 21 nt, Human
ggccucuccuccucauccucu

SEQ ID NO: 458161 - RNA, 20 nt, Human
ggccucuccuccucccuucc

SEQ ID NO: 458162 - RNA, 24 nt, Human
ggccucuccucggccugcuccucu

SEQ ID NO: 458163 - RNA, 23 nt, Human
ggccucuccugaugucccucucc

SEQ ID NO: 458164 - RNA, 32 nt, Human
ggccucuccugcugcugaccugaucaccucug

SEQ ID NO: 458165 - RNA, 32 nt, Human
ggccucuccuuuccuuucccugccuggagccu

SEQ ID NO: 458166 - RNA, 32 nt, Human
ggccucucgaagugcugggauuccaggcguga

SEQ ID NO: 458167 - RNA, 32 nt, Human
ggccucucgaguagaugggauuauaggcaugu

SEQ ID NO: 458168 - RNA, 32 nt, Human
ggccucucgcucacuccucccagcccaguaau

SEQ ID NO: 458169 - RNA, 18 nt, Human
ggccucucgucuacugcc

SEQ ID NO: 458170 - RNA, 32 nt, Human
ggccucucuaaaugcugggauugcaggcguga

SEQ ID NO: 458171 - RNA, 31 nt, Human
ggccucucuagcuugcggccugugucuaugg

SEQ ID NO: 458172 - RNA, 23 nt, Human
ggccucucuagggaagucugguu

SEQ ID NO: 458173 - RNA, 24 nt, Human
ggccucucuauccucucuuccucu

SEQ ID NO: 458174 - RNA, 32 nt, Human
ggccucucucagaacaaccugcgggugcacua

SEQ ID NO: 458175 - RNA, 32 nt, Human
ggccucucucaggugaguccagguuaaacugu

SEQ ID NO: 458176 - RNA, 32 nt, Human
ggccucucuccccucucucuuuuccuccuucu

SEQ ID NO: 458177 - RNA, 23 nt, Human
ggccucucuccgaacccuuucuc

SEQ ID NO: 458178 - RNA, 32 nt, Human
ggccucucuccucucaucgggccugauaaggg

SEQ ID NO: 458179 - RNA, 32 nt, Human
ggccucucuccugccugcccugccucagccag

SEQ ID NO: 458180 - RNA, 18 nt, Human
ggccucucuccugcugcu

SEQ ID NO: 458181 - RNA, 32 nt, Human
ggccucucucucgcucucucucccucuaaucu

SEQ ID NO: 458182 - RNA, 23 nt, Human
ggccucucucuguuccucccucu

SEQ ID NO: 458183 - RNA, 22 nt, Human
ggccucucugaggacucugggu

SEQ ID NO: 458184 - RNA, 22 nt, Human
ggccucucugcagaccucuucc

SEQ ID NO: 458185 - RNA, 26 nt, Human
ggccucucugcaguccucucacccuc

SEQ ID NO: 458186 - RNA, 32 nt, Human
ggccucucugcaguccucucacccucccucag

SEQ ID NO: 458187 - RNA, 23 nt, Human
ggccucucugcggggcucacucu

SEQ ID NO: 458188 - RNA, 22 nt, Human
ggccucucugcucacccacucu

SEQ ID NO: 458189 - RNA, 23 nt, Human
ggccucucuggcuauggaugugu

SEQ ID NO: 458190 - RNA, 22 nt, Human
ggccucucugggccuuuccucu

SEQ ID NO: 458191 - RNA, 21 nt, Human
ggccucucugggccuuugugu

SEQ ID NO: 458192 - RNA, 21 nt, Human
ggccucucuuacuagacugcg

SEQ ID NO: 458193 - RNA, 32 nt, Human
ggccucucuuauaucagacugcagcuccuggu

SEQ ID NO: 458194 - RNA, 32 nt, Human
ggccucugaaagugcugggauuacaggcguga

SEQ ID NO: 458195 - RNA, 32 nt, Human
ggccucugaagggauuccucacugugggcagc

SEQ ID NO: 458196 - RNA, 24 nt, Human
ggccucugacaaauaaacaagcca

SEQ ID NO: 458197 - RNA, 32 nt, Human
ggccucugacccugcugcccauucuuuccaac

SEQ ID NO: 458198 - RNA, 32 nt, Human
ggccucugagcaccuucuagcucacggguagu

SEQ ID NO: 458199 - RNA, 22 nt, Human
ggccucugagcccaagccaagc

SEQ ID NO: 458200 - RNA, 24 nt, Human
ggccucugagcccaagccaagcca

SEQ ID NO: 458201 - RNA, 24 nt, Human
ggccucugagcccaagcuaagcca

SEQ ID NO: 458202 - RNA, 32 nt, Human
ggccucugaggaugucagcuccuggcucccug

SEQ ID NO: 458203 - RNA, 32 nt, Human
ggccucugagugugucuggcucugagagaguc

SEQ ID NO: 458204 - RNA, 23 nt, Human
ggccucugaucagcugguucccu

SEQ ID NO: 458205 - RNA, 32 nt, Human
ggccucugauugcuguccucucuuguccucuu

SEQ ID NO: 458206 - RNA, 20 nt, Human
ggccucugcaccugggucca

SEQ ID NO: 458207 - RNA, 32 nt, Human
ggccucugcacuccagccugggugacagagug

SEQ ID NO: 458208 - RNA, 32 nt, Human
ggccucugcagaagccaagggaagacaguggu

SEQ ID NO: 458209 - RNA, 32 nt, Human
ggccucugcaggagcaaaacugccucaagucg

SEQ ID NO: 458210 - RNA, 32 nt, Human
ggccucugcaucccuggcuggagaaugcgcac

SEQ ID NO: 458211 - RNA, 32 nt, Human
ggccucugccaaggaaauaauauggaccauuu

SEQ ID NO: 458212 - RNA, 32 nt, Human
ggccucugccaguguccccagcacuuuuaggu

SEQ ID NO: 458213 - RNA, 32 nt, Human
ggccucugccccaagagcaggaggugccugaa

SEQ ID NO: 458214 - RNA, 22 nt, Human
ggccucugcgcgccucgccccg

SEQ ID NO: 458215 - RNA, 20 nt, Human
ggccucugcggagcccuggg

SEQ ID NO: 458216 - RNA, 18 nt, Human
ggccucugcguccgggag

SEQ ID NO: 458217 - RNA, 22 nt, Human
ggccucugcuucucucuugcuc

SEQ ID NO: 458218 - RNA, 28 nt, Human
ggccucugcuuuggggaugggaaugugu

SEQ ID NO: 458219 - RNA, 32 nt, Human
ggccucuggaguagcugggacuacaggugccc

SEQ ID NO: 458220 - RNA, 23 nt, Human
ggccucuggcaccaccaccaccg

SEQ ID NO: 458221 - RNA, 20 nt, Human
ggccucuggcgugccugcca

SEQ ID NO: 458222 - RNA, 23 nt, Human
ggccucuggcuccuucuuccucu

SEQ ID NO: 458223 - RNA, 32 nt, Human
ggccucuggcugcagugaugccgcagaauccu

SEQ ID NO: 458224 - RNA, 29 nt, Human
ggccucuggcugcucacacccugccagag

SEQ ID NO: 458225 - RNA, 19 nt, Human
ggccucuggcuuccaggcc

SEQ ID NO: 458226 - RNA, 32 nt, Human
ggccucugggacugaaggcuuccccaagauca

SEQ ID NO: 458227 - RNA, 32 nt, Human
ggccucugggagccaccuccaaucccucacca

SEQ ID NO: 458228 - RNA, 32 nt, Human
ggccucugggaggccaggauggcacuguuggc

SEQ ID NO: 458229 - RNA, 32 nt, Human
ggccucugggcagaggaugcaauggcacggac

SEQ ID NO: 458230 - RNA, 32 nt, Human
ggccucugggccaccagcgucugaaucccgga

SEQ ID NO: 458231 - RNA, 32 nt, Human
ggccucuggggagggggugcaaaagaggagcg

SEQ ID NO: 458232 - RNA, 22 nt, Human
ggccucuguaaagccaccagcc

SEQ ID NO: 458233 - RNA, 24 nt, Human
ggccucuguagcuccaucugugga

SEQ ID NO: 458234 - RNA, 32 nt, Human
ggccucugucccggaagagucaugggagguga

SEQ ID NO: 458235 - RNA, 32 nt, Human
ggccucugucuccaucucugcccuuugaaaca

SEQ ID NO: 458236 - RNA, 32 nt, Human
ggccucugucugagcaaaccugggugugaauu

SEQ ID NO: 458237 - RNA, 32 nt, Human
ggccucugugaccugcuagggugcaggaggcu

SEQ ID NO: 458238 - RNA, 32 nt, Human
ggccucugugaucuccccugggaacaggacgg

SEQ ID NO: 458239 - RNA, 32 nt, Human
ggccucugugcagccucaucuccuggaaucug

SEQ ID NO: 458240 - RNA, 32 nt, Human
ggccucuguguggggagagaucaggaauguuc

SEQ ID NO: 458241 - RNA, 24 nt, Human
ggccucuguuucuuuaucugugaa

SEQ ID NO: 458242 - RNA, 24 nt, Human
ggccucuguuuucucaucugugaa

SEQ ID NO: 458243 - RNA, 32 nt, Human
ggccucuuaaagugcugggauuacaggcguga

SEQ ID NO: 458244 - RNA, 32 nt, Human
ggccucuucagucugucucaggagacugggag

SEQ ID NO: 458245 - RNA, 19 nt, Human
ggccucuuccacccaccca

SEQ ID NO: 458246 - RNA, 21 nt, Human
ggccucuucccccuucccucu

SEQ ID NO: 458247 - RNA, 19 nt, Human
ggccucuuccccucuuccu

SEQ ID NO: 458248 - RNA, 32 nt, Human
ggccucuuccgugacgucacuggaccacuggg

SEQ ID NO: 458249 - RNA, 32 nt, Human
ggccucuuccucagcuuuaucucccuuuccuu

SEQ ID NO: 458250 - RNA, 32 nt, Human
ggccucuucuacccauccauguuucuaccucc

SEQ ID NO: 458251 - RNA, 20 nt, Human
ggccucuucucccuucacuc

SEQ ID NO: 458252 - RNA, 32 nt, Human
ggccucuucuuucccagcuccugccuccuggu

SEQ ID NO: 458253 - RNA, 32 nt, Human
ggccucuucuuuguaccagcagcccugcauac

SEQ ID NO: 458254 - RNA, 20 nt, Human
ggccucuugagccaggggga

SEQ ID NO: 458255 - RNA, 24 nt, Human
ggccucuugcugaaagccaaggca

SEQ ID NO: 458256 - RNA, 32 nt, Human
ggccucuuggcagaggcuggaggacucugggg

SEQ ID NO: 458257 - RNA, 24 nt, Human
ggccucuuuauuucucuccacccu

SEQ ID NO: 458258 - RNA, 32 nt, Human
ggccucuuucccucugucugugcuuguguugu

SEQ ID NO: 458259 - RNA, 32 nt, Human
ggccucuuucuucucaagcuccuccugacagc

SEQ ID NO: 458260 - RNA, 32 nt, Human
ggccucuuugaagaaauggccagaagugagcg

SEQ ID NO: 458261 - RNA, 21 nt, Human
ggccucuuugcucuccccucu

SEQ ID NO: 458262 - RNA, 32 nt, Human
ggccucuuugcucuccccucuugccucaggaa

SEQ ID NO: 458263 - RNA, 32 nt, Human
ggccucuuugcugccaggacagcaucagcuca

SEQ ID NO: 458264 - RNA, 32 nt, Human
ggccucuuuguuacaaaaugauuugcaaagaa

SEQ ID NO: 458265 - RNA, 32 nt, Human
ggccucuuuugucacauauugcucaucuguga

SEQ ID NO: 458266 - RNA, 32 nt, Human
ggccugaaacagcccugccagccccggcgguc

SEQ ID NO: 458267 - RNA, 30 nt, Human
ggccugaacagcuggguggucagugaaccc

SEQ ID NO: 458268 - RNA, 32 nt, Human
ggccugaagaacugaaagaaccucuuauuuug

SEQ ID NO: 458269 - RNA, 32 nt, Human
ggccugaagccuaggcuggaggguucagucgg

SEQ ID NO: 458270 - RNA, 32 nt, Human
ggccugaagggaaaugaggcagcugcuguguc

SEQ ID NO: 458271 - RNA, 32 nt, Human
ggccugaagggagaguuucaguucuucauuga

SEQ ID NO: 458272 - RNA, 22 nt, Human
ggccugaaguccuggguuccag

SEQ ID NO: 458273 - RNA, 32 nt, Human
ggccugacacuggcugccccagcggggaccac

SEQ ID NO: 458274 - RNA, 32 nt, Human
ggccugacagacaagcagaugaccucacagga

SEQ ID NO: 458275 - RNA, 21 nt, Human
ggccugacaugcugggccccu

SEQ ID NO: 458276 - RNA, 32 nt, Human
ggccugacccagcauccucugccuucuaggaa

SEQ ID NO: 458277 - RNA, 18 nt, Human
ggccugaccccagagugg

SEQ ID NO: 458278 - RNA, 32 nt, Human
ggccugaccuggcuguugauguucuagagagg

SEQ ID NO: 458279 - RNA, 32 nt, Human
ggccugaccuucagcaaaguucuugaaauuua

SEQ ID NO: 458280 - RNA, 18 nt, Human
ggccugacgcagcucccu

SEQ ID NO: 458281 - RNA, 32 nt, Human
ggccugacucagacugcauucuccacuucuug

SEQ ID NO: 458282 - RNA, 32 nt, Human
ggccugacuccaauuaacaaagaaggacgugg

SEQ ID NO: 458283 - RNA, 19 nt, Human
ggccugacugaaaggagac

SEQ ID NO: 458284 - RNA, 32 nt, Human
ggccugacuggggucugaagaucagggucagu

SEQ ID NO: 458285 - RNA, 32 nt, Human
ggccugacuguauuuuucauccaucuuuucug

SEQ ID NO: 458286 - RNA, 18 nt, Human
ggccugacuucugcuggc

SEQ ID NO: 458287 - RNA, 20 nt, Human
ggccugagacaccugcccca

SEQ ID NO: 458288 - RNA, 32 nt, Human
ggccugagaccacccaaggucuuuuaacagaa

SEQ ID NO: 458289 - RNA, 32 nt, Human
ggccugagagcugaagagcaccagguuuggug

SEQ ID NO: 458290 - RNA, 32 nt, Human
ggccugagauucugcauuuuucccaagucccu

SEQ ID NO: 458291 - RNA, 32 nt, Human
ggccugagcaggaggaagaggaggaggcccgu

SEQ ID NO: 458292 - RNA, 17 nt, Human
ggccugagccaggguga

SEQ ID NO: 458293 - RNA, 20 nt, Human
ggccugagcccccugcugcc

SEQ ID NO: 458294 - RNA, 22 nt, Human
ggccugagccccuccaccugcu

SEQ ID NO: 458295 - RNA, 19 nt, Human
ggccugagccgcugcugcc

SEQ ID NO: 458296 - RNA, 32 nt, Human
ggccugagccuccugaaguugcugcugugaau

SEQ ID NO: 458297 - RNA, 31 nt, Human
ggccugagccucucucccugugucucuguau

SEQ ID NO: 458298 - RNA, 17 nt, Human
ggccugagcuccagguc

SEQ ID NO: 458299 - RNA, 32 nt, Human
ggccugagcucccuccagcuguuuucacucau

SEQ ID NO: 458300 - RNA, 32 nt, Human
ggccugagcuuagucacauggccacacccagc

SEQ ID NO: 458301 - RNA, 17 nt, Human
ggccugaggacuauaga

SEQ ID NO: 458302 - RNA, 32 nt, Human
ggccugaggagcagcaguugcugguggcuaau

SEQ ID NO: 458303 - RNA, 32 nt, Human
ggccugaggagcagcccugccugcugcucuuc

SEQ ID NO: 458304 - RNA, 22 nt, Human
ggccugaggccaucgccaggua

SEQ ID NO: 458305 - RNA, 32 nt, Human
ggccugaggccucgcucaguggcgucuggggu

SEQ ID NO: 458306 - RNA, 17 nt, Human
ggccugaggccugugcc

SEQ ID NO: 458307 - RNA, 32 nt, Human
ggccugaggcuucacaguaccuggaccagcag

SEQ ID NO: 458308 - RNA, 32 nt, Human
ggccugagggagaagcagggauaggugggcug

SEQ ID NO: 458309 - RNA, 32 nt, Human
ggccugagggccucggacgcgggugccuacac

SEQ ID NO: 458310 - RNA, 32 nt, Human
ggccugaggggccugggcucagaguccacguc

SEQ ID NO: 458311 - RNA, 32 nt, Human
ggccugagguagcagugggucacuuugaucca

SEQ ID NO: 458312 - RNA, 16 nt, Human
ggccugaguggccagg

SEQ ID NO: 458313 - RNA, 22 nt, Human
ggccugaguuuccagccuacca

SEQ ID NO: 458314 - RNA, 32 nt, Human
ggccugaugacauccaauacagaguucuggua

SEQ ID NO: 458315 - RNA, 32 nt, Human
ggccugaugcagccccucccagccucucccgc

SEQ ID NO: 458316 - RNA, 32 nt, Human
ggccugcaauggcuguguguacacuacaucua

SEQ ID NO: 458317 - RNA, 21 nt, Human
ggccugcacacagcucugugg

SEQ ID NO: 458318 - RNA, 32 nt, Human
ggccugcacacagcugcucagcaccauuucau

SEQ ID NO: 458319 - RNA, 32 nt, Human
ggccugcacagcuguggccguggagcugaccu

SEQ ID NO: 458320 - RNA, 21 nt, Human
ggccugcacaucccgccacga

SEQ ID NO: 458321 - RNA, 32 nt, Human
ggccugcacaugacccccuccuuggguuaggc

SEQ ID NO: 458322 - RNA, 19 nt, Human
ggccugcaccugaugugga

SEQ ID NO: 458323 - RNA, 32 nt, Human
ggccugcaccugcugcucaagugggccccggc

SEQ ID NO: 458324 - RNA, 22 nt, Human
ggccugcacuccacacaaugca

SEQ ID NO: 458325 - RNA, 23 nt, Human
ggccugcagccaggcacugggca

SEQ ID NO: 458326 - RNA, 20 nt, Human
ggccugcagccccugcugcc

SEQ ID NO: 458327 - RNA, 23 nt, Human
ggccugcagccucccccagggug

SEQ ID NO: 458328 - RNA, 22 nt, Human
ggccugcagcgcggggcccgga

SEQ ID NO: 458329 - RNA, 24 nt, Human
ggccugcagcgcucccacccccgg

SEQ ID NO: 458330 - RNA, 32 nt, Human
ggccugcagcucccuucuccugggacuuagag

SEQ ID NO: 458331 - RNA, 22 nt, Human
ggccugcagcuucauuugcgag

SEQ ID NO: 458332 - RNA, 23 nt, Human
ggccugcaggagcuguuuuucca

SEQ ID NO: 458333 - RNA, 32 nt, Human
ggccugcagggaccugagcuuugcuacccaac

SEQ ID NO: 458334 - RNA, 32 nt, Human
ggccugcagggcgggguaggggagggcagggg

SEQ ID NO: 458335 - RNA, 22 nt, Human
ggccugcaggugggcgccccga

SEQ ID NO: 458336 - RNA, 32 nt, Human
ggccugcagguguggcgccgaggggagaucag

SEQ ID NO: 458337 - RNA, 22 nt, Human
ggccugcagugccagacucuga

SEQ ID NO: 458338 - RNA, 32 nt, Human
ggccugcagugggagagcaggaugggggcucc

SEQ ID NO: 458339 - RNA, 32 nt, Human
ggccugcaguguauuauauguuuuuaauauau

SEQ ID NO: 458340 - RNA, 31 nt, Human
ggccugcaguuuccaucacccacugcaacca

SEQ ID NO: 458341 - RNA, 22 nt, Human
ggccugcauagcgacauuuuca

SEQ ID NO: 458342 - RNA, 32 nt, Human
ggccugcauagugccaugauuggaacccagga

SEQ ID NO: 458343 - RNA, 32 nt, Human
ggccugcauccucaggcucccaauacugccug

SEQ ID NO: 458344 - RNA, 32 nt, Human
ggccugcaugcacucuggccugcauggcagaa

SEQ ID NO: 458345 - RNA, 32 nt, Human
ggccugcauggugggagcugguugaauugucu

SEQ ID NO: 458346 - RNA, 32 nt, Human
ggccugccaaacugcugggauuauaggcguga

SEQ ID NO: 458347 - RNA, 32 nt, Human
ggccugccaaagcugcagccagcauccuuauc

SEQ ID NO: 458348 - RNA, 32 nt, Human
ggccugccaaagugcugggauuacaggcuuga

SEQ ID NO: 458349 - RNA, 32 nt, Human
ggccugccaaguagcugggacuacaagugcac

SEQ ID NO: 458350 - RNA, 32 nt, Human
ggccugccacagagaacugagcucuuuuauua

SEQ ID NO: 458351 - RNA, 18 nt, Human
ggccugccaccacagcac

SEQ ID NO: 458352 - RNA, 16 nt, Human
ggccugccaccuggac

SEQ ID NO: 458353 - RNA, 32 nt, Human
ggccugccagugccccugagcuugcuuuccac

SEQ ID NO: 458354 - RNA, 32 nt, Human
ggccugccauggaauuuuggcugcaauuuugg

SEQ ID NO: 458355 - RNA, 32 nt, Human
ggccugccaugggucaucagacugcuuccuaa

SEQ ID NO: 458356 - RNA, 32 nt, Human
ggccugcccacacaacuccaggguucccuccc

SEQ ID NO: 458357 - RNA, 32 nt, Human
ggccugcccagccucaaugucacuuggcggcg

SEQ ID NO: 458358 - RNA, 32 nt, Human
ggccugcccagccuccuggaacugcgcccugg

SEQ ID NO: 458359 - RNA, 21 nt, Human
ggccugccccauccuagcugg

SEQ ID NO: 458360 - RNA, 20 nt, Human
ggccugccccucauacgcca

SEQ ID NO: 458361 - RNA, 21 nt, Human
ggccugccccucaucugcgaa

SEQ ID NO: 458362 - RNA, 32 nt, Human
ggccugccccugcccccaccuccuggagggcc

SEQ ID NO: 458363 - RNA, 32 nt, Human
ggccugcccuaccugaggggaaccagccaucc

SEQ ID NO: 458364 - RNA, 20 nt, Human
ggccugcccucccugcugcc

SEQ ID NO: 458365 - RNA, 32 nt, Human
ggccugcccugcucugagcacuuccguggacu

SEQ ID NO: 458366 - RNA, 32 nt, Human
ggccugcccuggauccuggaggcuacacagcu

SEQ ID NO: 458367 - RNA, 32 nt, Human
ggccugccgaagccagcugccugcugccucag

SEQ ID NO: 458368 - RNA, 32 nt, Human
ggccugccggacacagcaccgugccaacccca

SEQ ID NO: 458369 - RNA, 29 nt, Human
ggccugccggguagcugggacuacaggca

SEQ ID NO: 458370 - RNA, 21 nt, Human
ggccugccucccagcccugcc

SEQ ID NO: 458371 - RNA, 32 nt, Human
ggccugccucccagcccugccagggggcugcg

SEQ ID NO: 458372 - RNA, 19 nt, Human
ggccugccuccugcuggcc

SEQ ID NO: 458373 - RNA, 32 nt, Human
ggccugccugcaccagcugccugggccccacc

SEQ ID NO: 458374 - RNA, 26 nt, Human
ggccugccugccccacccaccccaca

SEQ ID NO: 458375 - RNA, 20 nt, Human
ggccugccugccugccagcc

SEQ ID NO: 458376 - RNA, 32 nt, Human
ggccugccugcucuggccaagaggaccagcca

SEQ ID NO: 458377 - RNA, 17 nt, Human
ggccugccuggguccag

SEQ ID NO: 458378 - RNA, 32 nt, Human
ggccugccugugugacugucaugcaggccugu

SEQ ID NO: 458379 - RNA, 22 nt, Human
ggccugccuucucccuuccucu

SEQ ID NO: 458380 - RNA, 32 nt, Human
ggccugcgaggaagggcugagguggggccggc

SEQ ID NO: 458381 - RNA, 17 nt, Human
ggccugcgccagaguga

SEQ ID NO: 458382 - RNA, 19 nt, Human
ggccugcgccuucccgcca

SEQ ID NO: 458383 - RNA, 32 nt, Human
ggccugcgcuccucagccuggcgguucuaccu

SEQ ID NO: 458384 - RNA, 32 nt, Human
ggccugcggagccucaagaagccagaccgcaa

SEQ ID NO: 458385 - RNA, 32 nt, Human
ggccugcggagggaggggacagcuggacccgc

SEQ ID NO: 458386 - RNA, 32 nt, Human
ggccugcggccuaggccucagcgcggcggcgg

SEQ ID NO: 458387 - RNA, 19 nt, Human
ggccugcgggcugacccag

SEQ ID NO: 458388 - RNA, 32 nt, Human
ggccugcggugagcucgcgcugggcgggcugu

SEQ ID NO: 458389 - RNA, 18 nt, Human
ggccugcuaccugcugcc

SEQ ID NO: 458390 - RNA, 32 nt, Human
ggccugcuagcgcuucaaauucccaggugucc

SEQ ID NO: 458391 - RNA, 21 nt, Human
ggccugcuaggguuaggaggu

SEQ ID NO: 458392 - RNA, 32 nt, Human
ggccugcucacagacagcauggagcagggaag

SEQ ID NO: 458393 - RNA, 32 nt, Human
ggccugcucacuccucagcugcaggagccaga

SEQ ID NO: 458394 - RNA, 32 nt, Human
ggccugcuccacccuccucagcgccugagaau

SEQ ID NO: 458395 - RNA, 32 nt, Human
ggccugcucccagcucugccuccugcccgccu

SEQ ID NO: 458396 - RNA, 32 nt, Human
ggccugcucccuccuggacggccugaccgcgg

SEQ ID NO: 458397 - RNA, 32 nt, Human
ggccugcuccucugggccaccucucuccaccu

SEQ ID NO: 458398 - RNA, 23 nt, Human
ggccugcuccugucucucuggca

SEQ ID NO: 458399 - RNA, 32 nt, Human
ggccugcucuacuggguggccucucggaccca

SEQ ID NO: 458400 - RNA, 32 nt, Human
ggccugcucuccccagcucuuuuccaguccuc

SEQ ID NO: 458401 - RNA, 22 nt, Human
ggccugcugagcugauucucca

SEQ ID NO: 458402 - RNA, 19 nt, Human
ggccugcugaucuuucaaa

SEQ ID NO: 458403 - RNA, 32 nt, Human
ggccugcugcagccaccaacacugcccaggac

SEQ ID NO: 458404 - RNA, 32 nt, Human
ggccugcugccugcacaccacaucgccuaccu

SEQ ID NO: 458405 - RNA, 20 nt, Human
ggccugcugccugcuauacc

SEQ ID NO: 458406 - RNA, 21 nt, Human
ggccugcugcuccugcuggcc

SEQ ID NO: 458407 - RNA, 32 nt, Human
ggccugcugcuggugaagacgccccuuacuag

SEQ ID NO: 458408 - RNA, 32 nt, Human
ggccugcugcugugcuucagugacacaguaaa

SEQ ID NO: 458409 - RNA, 32 nt, Human
ggccugcuggccugggcgucagggcgcaucaa

SEQ ID NO: 458410 - RNA, 32 nt, Human
ggccugcugggaggaggagggggaagaggagg

SEQ ID NO: 458411 - RNA, 32 nt, Human
ggccugcugguguggacagagauuccagcaac

SEQ ID NO: 458412 - RNA, 32 nt, Human
ggccugcuguccaggcuccagcuccccugccc

SEQ ID NO: 458413 - RNA, 32 nt, Human
ggccugcuucccagcacacacuucuuuggccu

SEQ ID NO: 458414 - RNA, 23 nt, Human
ggccugcuuccucuucuuccucu

SEQ ID NO: 458415 - RNA, 32 nt, Human
ggccugcuugacuuuccagaaugaccuugagu

SEQ ID NO: 458416 - RNA, 32 nt, Human
ggccugcuuguguccuccagcccagcccaccc

SEQ ID NO: 458417 - RNA, 23 nt, Human
ggccugcuuugcucaccagcguc

SEQ ID NO: 458418 - RNA, 32 nt, Human
ggccugcuuuucuaccagacaugggagcagca

SEQ ID NO: 458419 - RNA, 32 nt, Human
ggccugcuuuuuguuuuugaagacaggacuua

SEQ ID NO: 458420 - RNA, 32 nt, Human
ggccuggaaagugccccugccuggugcucugg

SEQ ID NO: 458421 - RNA, 32 nt, Human
ggccuggaaccagcagagccacauggaggaca

SEQ ID NO: 458422 - RNA, 32 nt, Human
ggccuggaaggcaggccaaccagcaaaauccu

SEQ ID NO: 458423 - RNA, 32 nt, Human
ggccuggaagggagguggagguccaguaaggg

SEQ ID NO: 458424 - RNA, 19 nt, Human
ggccuggaaggucugcacc

SEQ ID NO: 458425 - RNA, 19 nt, Human
ggccuggaaguuagaguga

SEQ ID NO: 458426 - RNA, 23 nt, Human
ggccuggacagccaggggcuccu

SEQ ID NO: 458427 - RNA, 32 nt, Human
ggccuggacaggugaagugaccagagagcaaa

SEQ ID NO: 458428 - RNA, 32 nt, Human
ggccuggaccccacccuccacacucucaggcc

SEQ ID NO: 458429 - RNA, 20 nt, Human
ggccuggaccguuggagugg

SEQ ID NO: 458430 - RNA, 32 nt, Human
ggccuggaccuccugggcaggaaagggugcag

SEQ ID NO: 458431 - RNA, 32 nt, Human
ggccuggaccugggcuggacaguguaucccuu

SEQ ID NO: 458432 - RNA, 17 nt, Human
ggccuggacgggagugg

SEQ ID NO: 458433 - RNA, 21 nt, Human
ggccuggacucccuuugcuca

SEQ ID NO: 458434 - RNA, 19 nt, Human
ggccuggacugcagagugg

SEQ ID NO: 458435 - RNA, 19 nt, Human
ggccuggagaacccaggag

SEQ ID NO: 458436 - RNA, 32 nt, Human
ggccuggagaggacaggagcugguaaggacuc

SEQ ID NO: 458437 - RNA, 32 nt, Human
ggccuggagaggguuagcacaggagccaggcu

SEQ ID NO: 458438 - RNA, 32 nt, Human
ggccuggagauggagcugcagucccagcucag

SEQ ID NO: 458439 - RNA, 17 nt, Human
ggccuggagcaggguga

SEQ ID NO: 458440 - RNA, 32 nt, Human
ggccuggagcccaagcccuguguuccugggga

SEQ ID NO: 458441 - RNA, 19 nt, Human
ggccuggagcuugggguga

SEQ ID NO: 458442 - RNA, 32 nt, Human
ggccuggaggaaaugcuagagcagagggaaag

SEQ ID NO: 458443 - RNA, 32 nt, Human
ggccuggaggagcccgggucaggcuggggagg

SEQ ID NO: 458444 - RNA, 21 nt, Human
ggccuggaggagcucagagug

SEQ ID NO: 458445 - RNA, 32 nt, Human
ggccuggaggagggagguugugguuggaugga

SEQ ID NO: 458446 - RNA, 32 nt, Human
ggccuggagggcaguggcauuggucagaggca

SEQ ID NO: 458447 - RNA, 20 nt, Human
ggccuggaggggccagagga

SEQ ID NO: 458448 - RNA, 32 nt, Human
ggccuggaguacgaggggcacccugggggcuc

SEQ ID NO: 458449 - RNA, 32 nt, Human
ggccuggagugaggacugaacacugggguagg

SEQ ID NO: 458450 - RNA, 21 nt, Human
ggccuggauccgaguccugcc

SEQ ID NO: 458451 - RNA, 32 nt, Human
ggccuggaugaugaggaggaggaugaggauga

SEQ ID NO: 458452 - RNA, 32 nt, Human
ggccuggaugucgauggaaugccugagggugg

SEQ ID NO: 458453 - RNA, 32 nt, Human
ggccuggcaaaaugcugggauuacaggcauaa

SEQ ID NO: 458454 - RNA, 32 nt, Human
ggccuggcacugggaggugggggugagccccu

SEQ ID NO: 458455 - RNA, 21 nt, Human
ggccuggcaggcggcgcgcgg

SEQ ID NO: 458456 - RNA, 32 nt, Human
ggccuggcagggcgcaagaccugugcacagag

SEQ ID NO: 458457 - RNA, 32 nt, Human
ggccuggcaguccugcucacaguguucugugc

SEQ ID NO: 458458 - RNA, 32 nt, Human
ggccuggcaugaaagagaauguucacaacacu

SEQ ID NO: 458459 - RNA, 32 nt, Human
ggccuggcaugaaccuggccucccggggagcu

SEQ ID NO: 458460 - RNA, 32 nt, Human
ggccuggcauuuuccagacaucuauucugcaa

SEQ ID NO: 458461 - RNA, 32 nt, Human
ggccuggccaaccuccgccuccuggguucaag

SEQ ID NO: 458462 - RNA, 32 nt, Human
ggccuggccagccugcacagcgugcuguuccg

SEQ ID NO: 458463 - RNA, 32 nt, Human
ggccuggccaguggcugaaagccaggccucca

SEQ ID NO: 458464 - RNA, 19 nt, Human
ggccuggcccagcaagccc

SEQ ID NO: 458465 - RNA, 24 nt, Human
ggccuggcccagcuuccagaggga

SEQ ID NO: 458466 - RNA, 21 nt, Human
ggccuggcccagggugccgua

SEQ ID NO: 458467 - RNA, 32 nt, Human
ggccuggcccaguugcaccacgagcgcugcgg

SEQ ID NO: 458468 - RNA, 19 nt, Human
ggccuggccccagcgcccg

SEQ ID NO: 458469 - RNA, 23 nt, Human
ggccuggccccagggcagcuggu

SEQ ID NO: 458470 - RNA, 18 nt, Human
ggccuggccccugcugcc

SEQ ID NO: 458471 - RNA, 32 nt, Human
ggccuggcccgagcugucucuguggugcuuuu

SEQ ID NO: 458472 - RNA, 21 nt, Human
ggccuggcccgcgcccucccg

SEQ ID NO: 458473 - RNA, 18 nt, Human
ggccuggcccggagcccg

SEQ ID NO: 458474 - RNA, 32 nt, Human
ggccuggcccucacucaagaccaggcugcagc

SEQ ID NO: 458475 - RNA, 32 nt, Human
ggccuggccuaaucaggugagccacucacccu

SEQ ID NO: 458476 - RNA, 21 nt, Human
ggccuggccucccugcccuga

SEQ ID NO: 458477 - RNA, 32 nt, Human
ggccuggccucguucucucuucuugcccuugg

SEQ ID NO: 458478 - RNA, 18 nt, Human
ggccuggccucuucugcc

SEQ ID NO: 458479 - RNA, 21 nt, Human
ggccuggccuuccucugccug

SEQ ID NO: 458480 - RNA, 18 nt, Human
ggccuggccuuucugccc

SEQ ID NO: 458481 - RNA, 32 nt, Human
ggccuggcgacugccccugccuuuuagacccg

SEQ ID NO: 458482 - RNA, 19 nt, Human
ggccuggcggagcuguagc

SEQ ID NO: 458483 - RNA, 23 nt, Human
ggccuggcggcccuccuuccucu

SEQ ID NO: 458484 - RNA, 32 nt, Human
ggccuggcucaaggugaccucaccuucaccau

SEQ ID NO: 458485 - RNA, 32 nt, Human
ggccuggcucccaggaccaguccaguccucua

SEQ ID NO: 458486 - RNA, 32 nt, Human
ggccuggcugacuggagcagagucauuugcuu

SEQ ID NO: 458487 - RNA, 32 nt, Human
ggccuggcugggaagaggcggggagaugucuc

SEQ ID NO: 458488 - RNA, 32 nt, Human
ggccuggcuugcccucugggccuuugcucccc

SEQ ID NO: 458489 - RNA, 32 nt, Human
ggccugggaaggagggugcuguggagggggcu

SEQ ID NO: 458490 - RNA, 17 nt, Human
ggccugggaauggggug

SEQ ID NO: 458491 - RNA, 32 nt, Human
ggccugggacagagccucccacggagccucaa

SEQ ID NO: 458492 - RNA, 32 nt, Human
ggccugggacuucugccucugccgccuccaga

SEQ ID NO: 458493 - RNA, 32 nt, Human
ggccugggagacacacagaggccaggccuuag

SEQ ID NO: 458494 - RNA, 32 nt, Human
ggccugggagcugagagaaggcacugagaggg

SEQ ID NO: 458495 - RNA, 32 nt, Human
ggccugggaggcauagguugcagugagccgag

SEQ ID NO: 458496 - RNA, 32 nt, Human
ggccugggaggcggagguugcagugagccgag

SEQ ID NO: 458497 - RNA, 32 nt, Human
ggccugggaggcgggggccggcgggagccaag

SEQ ID NO: 458498 - RNA, 32 nt, Human
ggccugggaggucgaggcugcagugagcugug

SEQ ID NO: 458499 - RNA, 21 nt, Human
ggccugggaucccccacccca

SEQ ID NO: 458500 - RNA, 32 nt, Human
ggccugggauggagguggccagagucuuuggg

SEQ ID NO: 458501 - RNA, 32 nt, Human
ggccugggcacccuccugggagcaggccuucc

SEQ ID NO: 458502 - RNA, 32 nt, Human
ggccugggcaccuguccuccugcugugccguc

SEQ ID NO: 458503 - RNA, 32 nt, Human
ggccugggcagcagguguggccagucccucug

SEQ ID NO: 458504 - RNA, 21 nt, Human
ggccugggcagcgcucgcccg

SEQ ID NO: 458505 - RNA, 32 nt, Human
ggccugggccacccuucuuccuucacugggca

SEQ ID NO: 458506 - RNA, 32 nt, Human
ggccugggccagggccccagagcuccugccug

SEQ ID NO: 458507 - RNA, 19 nt, Human
ggccugggccauauuccag

SEQ ID NO: 458508 - RNA, 22 nt, Human
ggccugggcccagcgagccccc

SEQ ID NO: 458509 - RNA, 21 nt, Human
ggccugggcccagggcgcccu

SEQ ID NO: 458510 - RNA, 18 nt, Human
ggccugggcccaggguuc

SEQ ID NO: 458511 - RNA, 32 nt, Human
ggccugggcccccugcacugccugguccagaa

SEQ ID NO: 458512 - RNA, 21 nt, Human
ggccugggcccggggccuccc

SEQ ID NO: 458513 - RNA, 25 nt, Human
ggccugggcccucaguggacugccu

SEQ ID NO: 458514 - RNA, 20 nt, Human
ggccugggccuccugcugcu

SEQ ID NO: 458515 - RNA, 32 nt, Human
ggccugggccucucugccugcuguagccgucu

SEQ ID NO: 458516 - RNA, 18 nt, Human
ggccugggccucuggcca

SEQ ID NO: 458517 - RNA, 22 nt, Human
ggccugggccucugggauucca

SEQ ID NO: 458518 - RNA, 32 nt, Human
ggccugggccugccaggcagaggcgcucuugc

SEQ ID NO: 458519 - RNA, 21 nt, Human
ggccugggccuggcucccuca

SEQ ID NO: 458520 - RNA, 22 nt, Human
ggccugggcgggcccugcguca

SEQ ID NO: 458521 - RNA, 32 nt, Human
ggccugggcucugccagaggcugaggugccca

SEQ ID NO: 458522 - RNA, 32 nt, Human
ggccugggcugaacccccuccuggggagccag

SEQ ID NO: 458523 - RNA, 32 nt, Human
ggccugggcugcaggagggcggagcuggggcc

SEQ ID NO: 458524 - RNA, 32 nt, Human
ggccugggcugcucugagacauggaggaagcc

SEQ ID NO: 458525 - RNA, 32 nt, Human
ggccugggcugggaaucuuuguugacuucuuu

SEQ ID NO: 458526 - RNA, 22 nt, Human
ggccugggcugggcacacucca

SEQ ID NO: 458527 - RNA, 32 nt, Human
ggccugggcugggucucacugcucugaaaaga

SEQ ID NO: 458528 - RNA, 32 nt, Human
ggccugggcuguuggguauuucauggccccga

SEQ ID NO: 458529 - RNA, 32 nt, Human
ggccugggcuuccuggccugaguggguagacg

SEQ ID NO: 458530 - RNA, 32 nt, Human
ggccuggggagcccacugaggggccagggagg

SEQ ID NO: 458531 - RNA, 32 nt, Human
ggccuggggagucggaacagggcuaggagggg

SEQ ID NO: 458532 - RNA, 23 nt, Human
ggccuggggcagggcuucugaug

SEQ ID NO: 458533 - RNA, 32 nt, Human
ggccuggggcagggguguggccccuaaauguc

SEQ ID NO: 458534 - RNA, 21 nt, Human
ggccuggggcccgggcuccag

SEQ ID NO: 458535 - RNA, 32 nt, Human
ggccuggggccuccucuucaucuuggcacaga

SEQ ID NO: 458536 - RNA, 22 nt, Human
ggccuggggcuccgaaauucca

SEQ ID NO: 458537 - RNA, 18 nt, Human
ggccuggggcugggcagc

SEQ ID NO: 458538 - RNA, 21 nt, Human
ggccuggggcuggggcugccc

SEQ ID NO: 458539 - RNA, 32 nt, Human
ggccugggggaggcgggacagugggagaggcg

SEQ ID NO: 458540 - RNA, 32 nt, Human
ggccugggggcaguuugagccuccucucccuu

SEQ ID NO: 458541 - RNA, 21 nt, Human
ggccugggggccacugcugcc

SEQ ID NO: 458542 - RNA, 22 nt, Human
ggccugggggccucucccgccg

SEQ ID NO: 458543 - RNA, 20 nt, Human
ggccugggggcggggcggga

SEQ ID NO: 458544 - RNA, 22 nt, Human
ggccugggggguggggccuccu

SEQ ID NO: 458545 - RNA, 32 nt, Human
ggccuggggguagugucaaugccccuccaggg

SEQ ID NO: 458546 - RNA, 22 nt, Human
ggccugggggucgcgucgggag

SEQ ID NO: 458547 - RNA, 23 nt, Human
ggccugggguggggccccgggug

SEQ ID NO: 458548 - RNA, 32 nt, Human
ggccugggguugggguggagggugcggcccgg

SEQ ID NO: 458549 - RNA, 22 nt, Human
ggccuggguagagccagggcga

SEQ ID NO: 458550 - RNA, 32 nt, Human
ggccugggucucucaacccccugucaugagcu

SEQ ID NO: 458551 - RNA, 19 nt, Human
ggccugggucuuugcugcc

SEQ ID NO: 458552 - RNA, 19 nt, Human
ggccugggugacagaguga

SEQ ID NO: 458553 - RNA, 32 nt, Human
ggccugggugagggcaggcuggcugcucugac

SEQ ID NO: 458554 - RNA, 32 nt, Human
ggccugggugcuggcugcccagacccucuggc

SEQ ID NO: 458555 - RNA, 32 nt, Human
ggccuggguguccaccuaggaaccugauguau

SEQ ID NO: 458556 - RNA, 32 nt, Human
ggccugggugugccaccugggucacuggagga

SEQ ID NO: 458557 - RNA, 32 nt, Human
ggccuggguuuuguugcauaccacagauuguc

SEQ ID NO: 458558 - RNA, 32 nt, Human
ggccugguacccauccucuuuccacugugagc

SEQ ID NO: 458559 - RNA, 32 nt, Human
ggccugguacccgugccgggcagccuuacacc

SEQ ID NO: 458560 - RNA, 19 nt, Human
ggccugguacucggaggga

SEQ ID NO: 458561 - RNA, 32 nt, Human
ggccuggucacugcaguguaccccacuuuccc

SEQ ID NO: 458562 - RNA, 32 nt, Human
ggccuggucagccugcaguaccucuaccucca

SEQ ID NO: 458563 - RNA, 17 nt, Human
ggccugguccaggagga

SEQ ID NO: 458564 - RNA, 32 nt, Human
ggccuggucccagcagguaugggcagguugcu

SEQ ID NO: 458565 - RNA, 21 nt, Human
ggccugguccuagcccugccu

SEQ ID NO: 458566 - RNA, 18 nt, Human
ggccugguccucgcugcc

SEQ ID NO: 458567 - RNA, 32 nt, Human
ggccugguccugcugcucauuugccaggugac

SEQ ID NO: 458568 - RNA, 32 nt, Human
ggccuggucuccggcugccagaccaugcugag

SEQ ID NO: 458569 - RNA, 32 nt, Human
ggccuggugaccucgccgcucuucuugaauca

SEQ ID NO: 458570 - RNA, 32 nt, Human
ggccuggugcaagcccaugcaggauggggccc

SEQ ID NO: 458571 - RNA, 32 nt, Human
ggccugguggagaaggaggugcuggcugcgag

SEQ ID NO: 458572 - RNA, 17 nt, Human
ggccugguggaggagga

SEQ ID NO: 458573 - RNA, 32 nt, Human
ggccugguggagggggaggggagaagccaagg

SEQ ID NO: 458574 - RNA, 20 nt, Human
ggccugguggcagugugggg

SEQ ID NO: 458575 - RNA, 22 nt, Human
ggccugguggcucacgccugua

SEQ ID NO: 458576 - RNA, 32 nt, Human
ggccugguggcugaucacuuguggggucaguc

SEQ ID NO: 458577 - RNA, 28 nt, Human
ggccuggugggcgggguggggggugcgg

SEQ ID NO: 458578 - RNA, 32 nt, Human
ggccugguguucuaccccaucuggccccuggc

SEQ ID NO: 458579 - RNA, 19 nt, Human
ggccugguguucuguggga

SEQ ID NO: 458580 - RNA, 24 nt, Human
ggccuguaaucccagcuacucggg

SEQ ID NO: 458581 - RNA, 24 nt, Human
ggccuguaaucccagcuacuuggg

SEQ ID NO: 458582 - RNA, 32 nt, Human
ggccuguacagcuguuuccuaccuacucuucu

SEQ ID NO: 458583 - RNA, 32 nt, Human
ggccuguaccccugcaccuccagccuccaccc

SEQ ID NO: 458584 - RNA, 32 nt, Human
ggccuguacugaccagccugcgccuugcaggc

SEQ ID NO: 458585 - RNA, 32 nt, Human
ggccuguagacagaugggccaccaggcaggag

SEQ ID NO: 458586 - RNA, 24 nt, Human
ggccuguagucccagcuacuuggg

SEQ ID NO: 458587 - RNA, 32 nt, Human
ggccuguauuagaccccguaaacgccugaacu

SEQ ID NO: 458588 - RNA, 23 nt, Human
ggccugucacauccugcuggacc

SEQ ID NO: 458589 - RNA, 32 nt, Human
ggccugucaccggcugagacacggugauaggc

SEQ ID NO: 458590 - RNA, 32 nt, Human
ggccugucaccuccugaaaggcugcuuuagcu

SEQ ID NO: 458591 - RNA, 21 nt, Human
ggccugucagccugcuggucc

SEQ ID NO: 458592 - RNA, 32 nt, Human
ggccuguccagcccucucccgccauccuuccc

SEQ ID NO: 458593 - RNA, 32 nt, Human
ggccuguccgcauugcccugugcccacaagca

SEQ ID NO: 458594 - RNA, 19 nt, Human
ggccuguccucugcuggcc

SEQ ID NO: 458595 - RNA, 21 nt, Human
ggccuguccuuuccagcugcc

SEQ ID NO: 458596 - RNA, 32 nt, Human
ggccugucgaccucuuuacccauuccauuguu

SEQ ID NO: 458597 - RNA, 22 nt, Human
ggccugucggccgaccccaccu

SEQ ID NO: 458598 - RNA, 32 nt, Human
ggccugucgugcugaagcucuuggggaccguu

SEQ ID NO: 458599 - RNA, 32 nt, Human
ggccugucuauaucucaggaagcgccaggguc

SEQ ID NO: 458600 - RNA, 32 nt, Human
ggccugucugcguggguuuuuguauccagagc

SEQ ID NO: 458601 - RNA, 26 nt, Human
ggccugucuucucguucaggccugcc

SEQ ID NO: 458602 - RNA, 32 nt, Human
ggccugucuucugggguauagcuuggaugucu

SEQ ID NO: 458603 - RNA, 18 nt, Human
ggccugugaagaauggga

SEQ ID NO: 458604 - RNA, 32 nt, Human
ggccugugaauaagaugagcaugugaaccaaa

SEQ ID NO: 458605 - RNA, 32 nt, Human
ggccugugacuaugggcucugagggggcagga

SEQ ID NO: 458606 - RNA, 19 nt, Human
ggccugugaggcagugggg

SEQ ID NO: 458607 - RNA, 16 nt, Human
ggccugugaggcuggg

SEQ ID NO: 458608 - RNA, 32 nt, Human
ggccugugcacacaccagcccacccugagaga

SEQ ID NO: 458609 - RNA, 32 nt, Human
ggccugugcagaauguaaacagcagacucaua

SEQ ID NO: 458610 - RNA, 21 nt, Human
ggccugugcagcugggcccuu

SEQ ID NO: 458611 - RNA, 32 nt, Human
ggccugugcaggacacggggagaaguguagcc

SEQ ID NO: 458612 - RNA, 32 nt, Human
ggccugugcaugcucucccaugacaucuccau

SEQ ID NO: 458613 - RNA, 32 nt, Human
ggccugugccaaccccuccuuguugcgccuca

SEQ ID NO: 458614 - RNA, 32 nt, Human
ggccugugccagcuugcagagcucaccaggug

SEQ ID NO: 458615 - RNA, 32 nt, Human
ggccugugcccacucccuaucuccuucccacc

SEQ ID NO: 458616 - RNA, 20 nt, Human
ggccugugcccacugcugcc

SEQ ID NO: 458617 - RNA, 32 nt, Human
ggccugugccuguaaacccagcuacucaggag

SEQ ID NO: 458618 - RNA, 21 nt, Human
ggccugugcugcgaggggcug

SEQ ID NO: 458619 - RNA, 18 nt, Human
ggccuguggaugggggga

SEQ ID NO: 458620 - RNA, 24 nt, Human
ggccuguggcagcgccgcuggacc

SEQ ID NO: 458621 - RNA, 32 nt, Human
ggccuguggcagggacccucaugguugagccc

SEQ ID NO: 458622 - RNA, 18 nt, Human
ggccuguggcggugguga

SEQ ID NO: 458623 - RNA, 32 nt, Human
ggccuguggcgguggugagcagcagcgucugg

SEQ ID NO: 458624 - RNA, 32 nt, Human
ggccuguggcugaccucugccccagcccucuu

SEQ ID NO: 458625 - RNA, 32 nt, Human
ggccugugggagccuacuggagcccagcacuu

SEQ ID NO: 458626 - RNA, 18 nt, Human
ggccuguggguagugggg

SEQ ID NO: 458627 - RNA, 31 nt, Human
ggccuguggguggaaggucucuggccuugga

SEQ ID NO: 458628 - RNA, 22 nt, Human
ggccuguggucccagcugcucg

SEQ ID NO: 458629 - RNA, 32 nt, Human
ggccuguggugacugcacacagcucgcaaaac

SEQ ID NO: 458630 - RNA, 32 nt, Human
ggccuguguagagcccccuccugugcccucag

SEQ ID NO: 458631 - RNA, 32 nt, Human
ggccugugucccucccgaacccagggucaacc

SEQ ID NO: 458632 - RNA, 19 nt, Human
ggccugugucucagcucuc

SEQ ID NO: 458633 - RNA, 32 nt, Human
ggccugugugagccaggauggcugccugcgcg

SEQ ID NO: 458634 - RNA, 32 nt, Human
ggccugugugauacaagagucagcaucauuaa

SEQ ID NO: 458635 - RNA, 32 nt, Human
ggccuguguucauacacagaaggggccugaga

SEQ ID NO: 458636 - RNA, 17 nt, Human
ggccuguguucuggggg

SEQ ID NO: 458637 - RNA, 25 nt, Human
ggccuguguuuugagucucuuucca

SEQ ID NO: 458638 - RNA, 32 nt, Human
ggccuguucugguggggagacgccagaggagc

SEQ ID NO: 458639 - RNA, 32 nt, Human
ggccuguuguacccuggagccuggguguaaac

SEQ ID NO: 458640 - RNA, 32 nt, Human
ggccuguuguacccuggagccuggguguacac

SEQ ID NO: 458641 - RNA, 32 nt, Human
ggccuguugugggacagucucuguaaucgcga

SEQ ID NO: 458642 - RNA, 22 nt, Human
ggccuguugugugugugcguuc

SEQ ID NO: 458643 - RNA, 21 nt, Human
ggccuguuuagccacauggug

SEQ ID NO: 458644 - RNA, 32 nt, Human
ggccuguuucuccugcugucugggugagugag

SEQ ID NO: 458645 - RNA, 32 nt, Human
ggccuguuucugcuuuuuagccucacccuauu

SEQ ID NO: 458646 - RNA, 32 nt, Human
ggccuuaaaacauuucagacacuauuaaauac

SEQ ID NO: 458647 - RNA, 22 nt, Human
ggccuuaaaauucuucugugaa

SEQ ID NO: 458648 - RNA, 32 nt, Human
ggccuuaagagcaaaaccaguuucuuggagag

SEQ ID NO: 458649 - RNA, 32 nt, Human
ggccuuaagccccugaggguccuggugacuca

SEQ ID NO: 458650 - RNA, 21 nt, Human
ggccuuaaggacaugggccuc

SEQ ID NO: 458651 - RNA, 32 nt, Human
ggccuuaagggcccuuggaccagugucugucu

SEQ ID NO: 458652 - RNA, 25 nt, Human
ggccuuaagugauccucccaccuca

SEQ ID NO: 458653 - RNA, 32 nt, Human
ggccuuaauucugcaaacauuuccuguuguua

SEQ ID NO: 458654 - RNA, 32 nt, Human
ggccuuacuaauccauaccaaauuagccuaaa

SEQ ID NO: 458655 - RNA, 32 nt, Human
ggccuuacucuguuguucaaagccacuuugga

SEQ ID NO: 458656 - RNA, 32 nt, Human
ggccuuagacuccacauguccauuuuuguuca

SEQ ID NO: 458657 - RNA, 32 nt, Human
ggccuuagaggauuuuauuugaguaaauuaua

SEQ ID NO: 458658 - RNA, 32 nt, Human
ggccuuagagucagagguaagguagcaacaga

SEQ ID NO: 458659 - RNA, 32 nt, Human
ggccuuagcucuagagugagggguggguggaa

SEQ ID NO: 458660 - RNA, 32 nt, Human
ggccuuaggaggcggccggagcggugggcaca

SEQ ID NO: 458661 - RNA, 32 nt, Human
ggccuuaguagaaaucucugaaggcagcagcc

SEQ ID NO: 458662 - RNA, 21 nt, Human
ggccuuagugaguuuguugaa

SEQ ID NO: 458663 - RNA, 23 nt, Human
ggccuuaguguccacaggaugaa

SEQ ID NO: 458664 - RNA, 32 nt, Human
ggccuuaguugccuccaggucuucccagggug

SEQ ID NO: 458665 - RNA, 32 nt, Human
ggccuuauaaaaggcuugacugagggagcuca

SEQ ID NO: 458666 - RNA, 32 nt, Human
ggccuuauauuuacagcucccuucccuuccug

SEQ ID NO: 458667 - RNA, 32 nt, Human
ggccuuaugaccagugagaacucucucccugg

SEQ ID NO: 458668 - RNA, 32 nt, Human
ggccuuaugcaaaccucagugggugaugcagg

SEQ ID NO: 458669 - RNA, 21 nt, Human
ggccuuauucucucuuucuca

SEQ ID NO: 458670 - RNA, 32 nt, Human
ggccuuauuucuucccugucaccuccccuccu

SEQ ID NO: 458671 - RNA, 32 nt, Human
ggccuucaaacaguggccgagcugcagaacuc

SEQ ID NO: 458672 - RNA, 32 nt, Human
ggccuucacagccuccauccuuagcuuuggcg

SEQ ID NO: 458673 - RNA, 21 nt, Human
ggccuucaccuggucugugga

SEQ ID NO: 458674 - RNA, 32 nt, Human
ggccuucacugcagccccaucuccuccuccuc

SEQ ID NO: 458675 - RNA, 22 nt, Human
ggccuucagacuuggacugugu

SEQ ID NO: 458676 - RNA, 32 nt, Human
ggccuucagcacuuuaguaguggaugucagcg

SEQ ID NO: 458677 - RNA, 25 nt, Human
ggccuucagcaguucuuuuugugaa

SEQ ID NO: 458678 - RNA, 32 nt, Human
ggccuucagccccgaacuuggagcucagcuau

SEQ ID NO: 458679 - RNA, 32 nt, Human
ggccuucagcccucugugguccccucuccccg

SEQ ID NO: 458680 - RNA, 20 nt, Human
ggccuucagcuggagcugug

SEQ ID NO: 458681 - RNA, 32 nt, Human
ggccuucaggcagagcagcaaguggcccuuag

SEQ ID NO: 458682 - RNA, 32 nt, Human
ggccuucaggggugcugggauuacaggcauca

SEQ ID NO: 458683 - RNA, 32 nt, Human
ggccuucaggguggacagagggaggaucgguc

SEQ ID NO: 458684 - RNA, 31 nt, Human
ggccuucaguuucaguuucucauccaggaag

SEQ ID NO: 458685 - RNA, 32 nt, Human
ggccuucaguuuccauccccaggauccacuug

SEQ ID NO: 458686 - RNA, 32 nt, Human
ggccuucaucccucucuacgauaagguugcag

SEQ ID NO: 458687 - RNA, 32 nt, Human
ggccuucaugccauggccuguggauggagaau

SEQ ID NO: 458688 - RNA, 32 nt, Human
ggccuuccaaagugcugagauuacaggcguga

SEQ ID NO: 458689 - RNA, 32 nt, Human
ggccuuccaaagugcugggauaucaggcacug

SEQ ID NO: 458690 - RNA, 32 nt, Human
ggccuuccaaagugcugggauuacaaguuuga

SEQ ID NO: 458691 - RNA, 32 nt, Human
ggccuuccaaagugcugggauuacaggcauga

SEQ ID NO: 458692 - RNA, 32 nt, Human
ggccuuccaaagugcugggauuacaggccuga

SEQ ID NO: 458693 - RNA, 32 nt, Human
ggccuuccaaagugcugggauuacaggcguga

SEQ ID NO: 458694 - RNA, 32 nt, Human
ggccuuccaaagugcugggauuacagguguga

SEQ ID NO: 458695 - RNA, 32 nt, Human
ggccuuccaaagugcugggauuacggacguga

SEQ ID NO: 458696 - RNA, 32 nt, Human
ggccuuccaaagugcugggauuccagaugcga

SEQ ID NO: 458697 - RNA, 32 nt, Human
ggccuuccaaaguguuggaauuacaggcguga

SEQ ID NO: 458698 - RNA, 32 nt, Human
ggccuuccaaaguguugggauuacaggcauga

SEQ ID NO: 458699 - RNA, 32 nt, Human
ggccuuccaaaguguugggauuacaggcguga

SEQ ID NO: 458700 - RNA, 32 nt, Human
ggccuuccaaaguguugggauuaccggcguga

SEQ ID NO: 458701 - RNA, 32 nt, Human
ggccuuccaaaguguugggauuaugggcguga

SEQ ID NO: 458702 - RNA, 32 nt, Human
ggccuuccaaaguucugggauuacaggcguga

SEQ ID NO: 458703 - RNA, 32 nt, Human
ggccuuccaaguagcugggacuacaggugccc

SEQ ID NO: 458704 - RNA, 32 nt, Human
ggccuuccacacacaaacacuucuagaguugc

SEQ ID NO: 458705 - RNA, 32 nt, Human
ggccuuccagaagcgccagcagcagcagagcg

SEQ ID NO: 458706 - RNA, 32 nt, Human
ggccuuccagagugcugggauuacaggcguga

SEQ ID NO: 458707 - RNA, 32 nt, Human
ggccuuccagagugcugggauuauaggcguga

SEQ ID NO: 458708 - RNA, 32 nt, Human
ggccuuccagugaucuggaccaggaagacgga

SEQ ID NO: 458709 - RNA, 32 nt, Human
ggccuucccaaucaagucucuucaggcccuca

SEQ ID NO: 458710 - RNA, 32 nt, Human
ggccuucccaguagcugggauuacaggcacau

SEQ ID NO: 458711 - RNA, 23 nt, Human
ggccuucccgccggaggccagcu

SEQ ID NO: 458712 - RNA, 32 nt, Human
ggccuucccucgggucccuggcagaaagacau

SEQ ID NO: 458713 - RNA, 32 nt, Human
ggccuucccugacccagccaggaacaaacaag

SEQ ID NO: 458714 - RNA, 23 nt, Human
ggccuucccuggcgccugccccu

SEQ ID NO: 458715 - RNA, 32 nt, Human
ggccuuccgaguagcugggauugcaggcgugu

SEQ ID NO: 458716 - RNA, 32 nt, Human
ggccuuccuagaggacacuaugucuuccugaa

SEQ ID NO: 458717 - RNA, 32 nt, Human
ggccuuccucaggggcucugcagcacaguggc

SEQ ID NO: 458718 - RNA, 32 nt, Human
ggccuuccuccagggaaggaggcugggguggg

SEQ ID NO: 458719 - RNA, 32 nt, Human
ggccuuccugcaggcccugccccugugcuggg

SEQ ID NO: 458720 - RNA, 23 nt, Human
ggccuuccugccuuugaacugcg

SEQ ID NO: 458721 - RNA, 23 nt, Human
ggccuuccuggugacggagcugc

SEQ ID NO: 458722 - RNA, 32 nt, Human
ggccuuccugucacccccuccgugccacgcac

SEQ ID NO: 458723 - RNA, 20 nt, Human
ggccuuccuguuggcugugu

SEQ ID NO: 458724 - RNA, 22 nt, Human
ggccuuccuucccuagcugugu

SEQ ID NO: 458725 - RNA, 32 nt, Human
ggccuuccuuccucagcuccugcagccucauc

SEQ ID NO: 458726 - RNA, 32 nt, Human
ggccuuccuuuccucuuuccuccucacucucc

SEQ ID NO: 458727 - RNA, 32 nt, Human
ggccuucgaccucggaccuccgucuuccagaa

SEQ ID NO: 458728 - RNA, 32 nt, Human
ggccuucgggaggcgcggcccgggaggaggcc

SEQ ID NO: 458729 - RNA, 23 nt, Human
ggccuucgggcaguggacugugu

SEQ ID NO: 458730 - RNA, 32 nt, Human
ggccuucggggugacaaagcacacuucaggag

SEQ ID NO: 458731 - RNA, 32 nt, Human
ggccuucgugaacuuugcuccaacacacugau

SEQ ID NO: 458732 - RNA, 32 nt, Human
ggccuucuaaagugcugggauuacaggcguga

SEQ ID NO: 458733 - RNA, 32 nt, Human
ggccuucuaacguugguggaaguggcuuuggc

SEQ ID NO: 458734 - RNA, 32 nt, Human
ggccuucucagccucacaccccuuccucccag

SEQ ID NO: 458735 - RNA, 32 nt, Human
ggccuucuccauaggaagaggaggcgaguccc

SEQ ID NO: 458736 - RNA, 32 nt, Human
ggccuucucccagggugugcucggugggcagu

SEQ ID NO: 458737 - RNA, 32 nt, Human
ggccuucuccccucuucugagcuaguugguug

SEQ ID NO: 458738 - RNA, 32 nt, Human
ggccuucuccuggccuuguucuugcucauaaa

SEQ ID NO: 458739 - RNA, 19 nt, Human
ggccuucucgggcccugcc

SEQ ID NO: 458740 - RNA, 32 nt, Human
ggccuucucugcaggccagcaagccugcagca

SEQ ID NO: 458741 - RNA, 32 nt, Human
ggccuucugaagugcugggauucaggugugag

SEQ ID NO: 458742 - RNA, 32 nt, Human
ggccuucugccaccuuugccucccagggugcu

SEQ ID NO: 458743 - RNA, 32 nt, Human
ggccuucugccuccuucagccucaguuuccuc

SEQ ID NO: 458744 - RNA, 21 nt, Human
ggccuucuggcuggagcucgu

SEQ ID NO: 458745 - RNA, 32 nt, Human
ggccuucugggaaccuauggagaaagggaauc

SEQ ID NO: 458746 - RNA, 32 nt, Human
ggccuucuggucuaaagcuguguccugaauau

SEQ ID NO: 458747 - RNA, 32 nt, Human
ggccuucuguaucugugccuggccaguggcag

SEQ ID NO: 458748 - RNA, 32 nt, Human
ggccuucuugcagcaaggcaggggcuugaugg

SEQ ID NO: 458749 - RNA, 32 nt, Human
ggccuugaaaacaggccgaaccuggagggccu

SEQ ID NO: 458750 - RNA, 32 nt, Human
ggccuugaaggaugagaaagaucuggcugaga

SEQ ID NO: 458751 - RNA, 32 nt, Human
ggccuugaagucagagacucuccugcaggauu

SEQ ID NO: 458752 - RNA, 32 nt, Human
ggccuugaaguccuggggcucuccaggcagug

SEQ ID NO: 458753 - RNA, 32 nt, Human
ggccuugacucugcccuugaggggccuagggg

SEQ ID NO: 458754 - RNA, 32 nt, Human
ggccuugagagacagagaaaacagguaucugc

SEQ ID NO: 458755 - RNA, 32 nt, Human
ggccuugaguagcuuugggugcagagccagga

SEQ ID NO: 458756 - RNA, 32 nt, Human
ggccuugaguggagagguaauaaaauaauacc

SEQ ID NO: 458757 - RNA, 32 nt, Human
ggccuugauagaauagaguuggaaaagauggu

SEQ ID NO: 458758 - RNA, 20 nt, Human
ggccuugaucccuuccgcca

SEQ ID NO: 458759 - RNA, 18 nt, Human
ggccuugauccuccugcc

SEQ ID NO: 458760 - RNA, 32 nt, Human
ggccuugcaaaaugcugggauuacaggcauga

SEQ ID NO: 458761 - RNA, 32 nt, Human
ggccuugcacaagaaccacuaaccccaggcaa

SEQ ID NO: 458762 - RNA, 32 nt, Human
ggccuugcagaagaagcuggaagagcuagagc

SEQ ID NO: 458763 - RNA, 32 nt, Human
ggccuugcagaggcgccucucaaggccccauc

SEQ ID NO: 458764 - RNA, 22 nt, Human
ggccuugcagcugaagcugcgu

SEQ ID NO: 458765 - RNA, 19 nt, Human
ggccuugcccccgcccgcc

SEQ ID NO: 458766 - RNA, 31 nt, Human
ggccuugcccucucuggucugggcugucuac

SEQ ID NO: 458767 - RNA, 32 nt, Human
ggccuugcgcccguuccaccucccaggccacc

SEQ ID NO: 458768 - RNA, 17 nt, Human
ggccuugcucccccagg

SEQ ID NO: 458769 - RNA, 32 nt, Human
ggccuugcuguggagcuccacugccauguacc

SEQ ID NO: 458770 - RNA, 32 nt, Human
ggccuugcuugauccagugacuaugcauccau

SEQ ID NO: 458771 - RNA, 32 nt, Human
ggccuugcuuucuagcagaggucaccugaagu

SEQ ID NO: 458772 - RNA, 32 nt, Human
ggccuuggaaccugagcugccaaugccagccc

SEQ ID NO: 458773 - RNA, 32 nt, Human
ggccuuggacaagccauguagguucucugggc

SEQ ID NO: 458774 - RNA, 32 nt, Human
ggccuuggauuccaacacaguuucuuccacau

SEQ ID NO: 458775 - RNA, 32 nt, Human
ggccuuggcagaggcagguguggccucguaga

SEQ ID NO: 458776 - RNA, 25 nt, Human
ggccuuggccaagcugcugcuuuga

SEQ ID NO: 458777 - RNA, 32 nt, Human
ggccuuggcccaggggucagcagagcuucaga

SEQ ID NO: 458778 - RNA, 23 nt, Human
ggccuuggccccgcccacucuga

SEQ ID NO: 458779 - RNA, 32 nt, Human
ggccuuggcgagggcuggucugugcauagaag

SEQ ID NO: 458780 - RNA, 32 nt, Human
ggccuuggcugcauuugugcacaaggagcagg

SEQ ID NO: 458781 - RNA, 32 nt, Human
ggccuugggagguggucauguccagggggaug

SEQ ID NO: 458782 - RNA, 32 nt, Human
ggccuugggcaggggcagggagagcugcugag

SEQ ID NO: 458783 - RNA, 32 nt, Human
ggccuugggccaguggguuggaagggaggggg

SEQ ID NO: 458784 - RNA, 32 nt, Human
ggccuugggcucagccacugggagacaguugg

SEQ ID NO: 458785 - RNA, 32 nt, Human
ggccuugggcuggccgggguugcuggguggcc

SEQ ID NO: 458786 - RNA, 32 nt, Human
ggccuugggggucugggcugggcauccauggu

SEQ ID NO: 458787 - RNA, 21 nt, Human
ggccuugggucacagcucccu

SEQ ID NO: 458788 - RNA, 32 nt, Human
ggccuuggguccccauccucuggaaccagggg

SEQ ID NO: 458789 - RNA, 32 nt, Human
ggccuugggucgcguuccgagcuccaggacgg

SEQ ID NO: 458790 - RNA, 32 nt, Human
ggccuugggugaguggcucaggaacaguuugc

SEQ ID NO: 458791 - RNA, 32 nt, Human
ggccuugguauucucauccaguauaugcaaga

SEQ ID NO: 458792 - RNA, 32 nt, Human
ggccuugguccucacagcuccaaaaagaaaca

SEQ ID NO: 458793 - RNA, 19 nt, Human
ggccuuggucuaccugcca

SEQ ID NO: 458794 - RNA, 23 nt, Human
ggccuuggucuaccugccaggcc

SEQ ID NO: 458795 - RNA, 32 nt, Human
ggccuuggugagguggacaggaagggaccucg

SEQ ID NO: 458796 - RNA, 32 nt, Human
ggccuuggugcuaggauucaaagaggaaagga

SEQ ID NO: 458797 - RNA, 32 nt, Human
ggccuugguggacagaggauggggaaaggggu

SEQ ID NO: 458798 - RNA, 32 nt, Human
ggccuuggugggggugggggaggagguugagg

SEQ ID NO: 458799 - RNA, 22 nt, Human
ggccuuguaggaaaaggccccg

SEQ ID NO: 458800 - RNA, 23 nt, Human
ggccuugucaaggccucagaggc

SEQ ID NO: 458801 - RNA, 32 nt, Human
ggccuuguccuccuuguguucauacacugugg

SEQ ID NO: 458802 - RNA, 32 nt, Human
ggccuugugagagacuccaggagcaaagagcg

SEQ ID NO: 458803 - RNA, 32 nt, Human
ggccuuguggcuccuccccucgcuccucgccc

SEQ ID NO: 458804 - RNA, 32 nt, Human
ggccuuguguguggagagcuuucuaucuuacc

SEQ ID NO: 458805 - RNA, 32 nt, Human
ggccuuguuccuucacccucaguuccaugagc

SEQ ID NO: 458806 - RNA, 32 nt, Human
ggccuuguucugacagcauucuggcugaggcu

SEQ ID NO: 458807 - RNA, 32 nt, Human
ggccuuguuuccaaauccugucuuccauguug

SEQ ID NO: 458808 - RNA, 32 nt, Human
ggccuuuaaccagcuccugagcugcugcaacu

SEQ ID NO: 458809 - RNA, 20 nt, Human
ggccuuuacacagcaucacc

SEQ ID NO: 458810 - RNA, 32 nt, Human
ggccuuuacauacauuuucuccacuucuaauu

SEQ ID NO: 458811 - RNA, 32 nt, Human
ggccuuuauuucuccucuuccagugggaguuu

SEQ ID NO: 458812 - RNA, 32 nt, Human
ggccuuucaaagugcugggauuacaggcauga

SEQ ID NO: 458813 - RNA, 32 nt, Human
ggccuuucacuggguccagcucugauucgggu

SEQ ID NO: 458814 - RNA, 21 nt, Human
ggccuuucccccucucccuuu

SEQ ID NO: 458815 - RNA, 22 nt, Human
ggccuuucccucaacaccugcu

SEQ ID NO: 458816 - RNA, 32 nt, Human
ggccuuucccucagguuuuccucuuccccacu

SEQ ID NO: 458817 - RNA, 32 nt, Human
ggccuuucccuccaucccuugaggcacggggc

SEQ ID NO: 458818 - RNA, 32 nt, Human
ggccuuucccuuccuuuccuuucucaggccuu

SEQ ID NO: 458819 - RNA, 32 nt, Human
ggccuuuccuacaggggguggagagaccagcc

SEQ ID NO: 458820 - RNA, 19 nt, Human
ggccuuucuagccuggcua

SEQ ID NO: 458821 - RNA, 32 nt, Human
ggccuuucucucugcauagcaucucauccucu

SEQ ID NO: 458822 - RNA, 20 nt, Human
ggccuuucugaacuauuucc

SEQ ID NO: 458823 - RNA, 22 nt, Human
ggccuuucugauuuugccucca

SEQ ID NO: 458824 - RNA, 19 nt, Human
ggccuuucugcccuguucc

SEQ ID NO: 458825 - RNA, 17 nt, Human
ggccuuucuuccugagg

SEQ ID NO: 458826 - RNA, 32 nt, Human
ggccuuucuuucucccucuugcaaccaagauc

SEQ ID NO: 458827 - RNA, 20 nt, Human
ggccuuugaaggggcagcuu

SEQ ID NO: 458828 - RNA, 21 nt, Human
ggccuuugcccuucugccacu

SEQ ID NO: 458829 - RNA, 21 nt, Human
ggccuuugcggcgcgcagggg

SEQ ID NO: 458830 - RNA, 32 nt, Human
ggccuuugcucagggcugucugugcugcuccu

SEQ ID NO: 458831 - RNA, 32 nt, Human
ggccuuugcuguggcuggagcuggacagugca

SEQ ID NO: 458832 - RNA, 18 nt, Human
ggccuuugcuucucugcc

SEQ ID NO: 458833 - RNA, 32 nt, Human
ggccuuugucucucgcugcagucgcagcucca

SEQ ID NO: 458834 - RNA, 32 nt, Human
ggccuuugucugucccugucauggcuuuggac

SEQ ID NO: 458835 - RNA, 32 nt, Human
ggccuuuguuauauacaugcuuugcaauguac

SEQ ID NO: 458836 - RNA, 32 nt, Human
ggccuuuucccuagguuucugccuccucguuu

SEQ ID NO: 458837 - RNA, 27 nt, Human
ggccuuuuccugcccccugccuugcca

SEQ ID NO: 458838 - RNA, 32 nt, Human
ggccuuuuccugcccccugccuugccaaagac

SEQ ID NO: 458839 - RNA, 23 nt, Human
ggccuuuucuccuuacugcaucu

SEQ ID NO: 458840 - RNA, 32 nt, Human
ggccuuuugcuauccuuccugcuaugccugaa

SEQ ID NO: 458841 - RNA, 32 nt, Human
ggccuuuugcuuccagccaaagaacaccgcca

SEQ ID NO: 458842 - RNA, 32 nt, Human
ggccuuuuggggcaaucagaggcugccacaag

SEQ ID NO: 458843 - RNA, 23 nt, Human
ggccuuuuugcaaaaagcugugu

SEQ ID NO: 458844 - RNA, 24 nt, Human
ggccuuuuuguucugaauuuucca

SEQ ID NO: 458845 - RNA, 18 nt, Human
ggcgaaacagccagguga

SEQ ID NO: 458846 - RNA, 21 nt, Human
ggcgaaaccccaucucuacua

SEQ ID NO: 458847 - RNA, 21 nt, Human
ggcgaaaccccaucucugcua

SEQ ID NO: 458848 - RNA, 21 nt, Human
ggcgaaaccccauuucuacua

SEQ ID NO: 458849 - RNA, 21 nt, Human
ggcgaaaccccgucucuacua

SEQ ID NO: 458850 - RNA, 20 nt, Human
ggcgaaaccccucucuacua

SEQ ID NO: 458851 - RNA, 21 nt, Human
ggcgaaacccugucucuacua

SEQ ID NO: 458852 - RNA, 21 nt, Human
ggcgaaaccucaucucuacua

SEQ ID NO: 458853 - RNA, 32 nt, Human
ggcgaaaggagagagggagggaagggugggua

SEQ ID NO: 458854 - RNA, 32 nt, Human
ggcgaacagaacuucuuccucccaaacaauga

SEQ ID NO: 458855 - RNA, 32 nt, Human
ggcgaacauggugaaaccccaucucuacuaaa

SEQ ID NO: 458856 - RNA, 32 nt, Human
ggcgaacauggugagacccaucucuacuaaaa

SEQ ID NO: 458857 - RNA, 32 nt, Human
ggcgaacccacuguuggaccugaggagccagc

SEQ ID NO: 458858 - RNA, 32 nt, Human
ggcgaaccuaggaggcagaguuugcagugagc

SEQ ID NO: 458859 - RNA, 32 nt, Human
ggcgaagaaagcccagcggacgagccuccuuu

SEQ ID NO: 458860 - RNA, 32 nt, Human
ggcgaagacagcccgguagcugcgucgcccga

SEQ ID NO: 458861 - RNA, 32 nt, Human
ggcgaagacggaguuguaaacuucuuaaaauu

SEQ ID NO: 458862 - RNA, 32 nt, Human
ggcgaagcaggugauaucaagcccagagcccc

SEQ ID NO: 458863 - RNA, 18 nt, Human
ggcgaagcaguugugcuu

SEQ ID NO: 458864 - RNA, 32 nt, Human
ggcgaagcccaauggcgcgacagggaaggcgg

SEQ ID NO: 458865 - RNA, 32 nt, Human
ggcgaagcuggcugggcuccugagucaggugg

SEQ ID NO: 458866 - RNA, 32 nt, Human
ggcgaaggaaugaagauaggagggaagaggau

SEQ ID NO: 458867 - RNA, 32 nt, Human
ggcgaaggaggaagaggaggaggaggaagagg

SEQ ID NO: 458868 - RNA, 32 nt, Human
ggcgaaggcaggaaggggagugagaaagaggc

SEQ ID NO: 458869 - RNA, 21 nt, Human
ggcgaaggccugcggccgcgg

SEQ ID NO: 458870 - RNA, 32 nt, Human
ggcgaagggauaaugagcuggggaugggagca

SEQ ID NO: 458871 - RNA, 32 nt, Human
ggcgaagggggcaggccagggagaggcgcagg

SEQ ID NO: 458872 - RNA, 32 nt, Human
ggcgaaggugaugggauaucacucccuugauc

SEQ ID NO: 458873 - RNA, 32 nt, Human
ggcgaaggugugagcaugagccuaucggacac

SEQ ID NO: 458874 - RNA, 32 nt, Human
ggcgaagucgcugagacucugccugcuucuca

SEQ ID NO: 458875 - RNA, 32 nt, Human
ggcgaaguuuucuagaggguucuugggcucuu

SEQ ID NO: 458876 - RNA, 32 nt, Human
ggcgaaucccuaaggcggggcauccccaaucc

SEQ ID NO: 458877 - RNA, 32 nt, Human
ggcgaaucgccugaggccaggaauucaagacc

SEQ ID NO: 458878 - RNA, 32 nt, Human
ggcgaaucugcugcuaccaauguaaaggucag

SEQ ID NO: 458879 - RNA, 32 nt, Human
ggcgaaugacuguaaucccagcuacucaggag

SEQ ID NO: 458880 - RNA, 32 nt, Human
ggcgacaaccgaggaggaggggcgggacgccg

SEQ ID NO: 458881 - RNA, 32 nt, Human
ggcgacaauguucauuacucacaaauuguguu

SEQ ID NO: 458882 - RNA, 32 nt, Human
ggcgacacaggcacccagcuuugggguggugc

SEQ ID NO: 458883 - RNA, 24 nt, Human
ggcgacaccacgaguuauuuccca

SEQ ID NO: 458884 - RNA, 32 nt, Human
ggcgacacccacccaacuccucccucuccgcc

SEQ ID NO: 458885 - RNA, 21 nt, Human
ggcgacacggugaaaccccgu

SEQ ID NO: 458886 - RNA, 32 nt, Human
ggcgacacugcacugcaggcugggcuacaaag

SEQ ID NO: 458887 - RNA, 32 nt, Human
ggcgacacuuggccucacucccggcuaggcgc

SEQ ID NO: 458888 - RNA, 32 nt, Human
ggcgacagaacaugauguugacacgggcuggg

SEQ ID NO: 458889 - RNA, 23 nt, Human
ggcgacagagcaagacucugucu

SEQ ID NO: 458890 - RNA, 23 nt, Human
ggcgacagagcgagacucugucu

SEQ ID NO: 458891 - RNA, 23 nt, Human
ggcgacagagugagacccugucu

SEQ ID NO: 458892 - RNA, 23 nt, Human
ggcgacagagugagacuccaucu

SEQ ID NO: 458893 - RNA, 23 nt, Human
ggcgacagagugagacuccgucu

SEQ ID NO: 458894 - RNA, 22 nt, Human
ggcgacagagugagacucuguc

SEQ ID NO: 458895 - RNA, 22 nt, Human
ggcgacagcuccucuaguucca

SEQ ID NO: 458896 - RNA, 32 nt, Human
ggcgacauuguuuggaaugcugguucugcuuu

SEQ ID NO: 458897 - RNA, 32 nt, Human
ggcgaccacggugucuucaaaagccccgucag

SEQ ID NO: 458898 - RNA, 20 nt, Human
ggcgaccagaguccaggcug

SEQ ID NO: 458899 - RNA, 32 nt, Human
ggcgaccccugcccucagugcucucugucucu

SEQ ID NO: 458900 - RNA, 32 nt, Human
ggcgaccccuucugccaagugucccaaaauga

SEQ ID NO: 458901 - RNA, 32 nt, Human
ggcgacccggagguagcauuucccaggaggca

SEQ ID NO: 458902 - RNA, 32 nt, Human
ggcgacccugaccccaccacacugccuugagg

SEQ ID NO: 458903 - RNA, 32 nt, Human
ggcgaccggccagcaaccgcagcgucggcgcc

SEQ ID NO: 458904 - RNA, 32 nt, Human
ggcgaccggugcaggugcacgacgccagcucc

SEQ ID NO: 458905 - RNA, 23 nt, Human
ggcgaccgugcucgccguuggca

SEQ ID NO: 458906 - RNA, 32 nt, Human
ggcgaccuccacccucaucacccugcuggugc

SEQ ID NO: 458907 - RNA, 32 nt, Human
ggcgaccugaaggacguggccaaggaacuuaa

SEQ ID NO: 458908 - RNA, 32 nt, Human
ggcgacgccaaggacuuuccacaucaacugcu

SEQ ID NO: 458909 - RNA, 31 nt, Human
ggcgacggcaaaggagcggaauucuccacga

SEQ ID NO: 458910 - RNA, 32 nt, Human
ggcgacggcagaggcgaagggagccggaucgc

SEQ ID NO: 458911 - RNA, 23 nt, Human
ggcgacggggcaagacucugucu

SEQ ID NO: 458912 - RNA, 32 nt, Human
ggcgacgggugaggcacagcugagcgccaaag

SEQ ID NO: 458913 - RNA, 32 nt, Human
ggcgacgguggaggaggguggucugggaccgg

SEQ ID NO: 458914 - RNA, 32 nt, Human
ggcgacuccagagggugagcugagggcaagcu

SEQ ID NO: 458915 - RNA, 32 nt, Human
ggcgacuccgggaggcacagggcgcgcgaggu

SEQ ID NO: 458916 - RNA, 32 nt, Human
ggcgacugccugccaggcagacgcugcagcua

SEQ ID NO: 458917 - RNA, 32 nt, Human
ggcgacuggaggaagccaggcgaguggggccc

SEQ ID NO: 458918 - RNA, 32 nt, Human
ggcgacugggaggggcagcggcagcaguggca

SEQ ID NO: 458919 - RNA, 32 nt, Human
ggcgacugggggcugaagagcgcgccgcccuc

SEQ ID NO: 458920 - RNA, 28 nt, Human
ggcgacuguagucccagcuacucaggag

SEQ ID NO: 458921 - RNA, 32 nt, Human
ggcgagaagagggaaguuggagagggaaaagu

SEQ ID NO: 458922 - RNA, 32 nt, Human
ggcgagaaggggaagagcaggcugcgccaggg

SEQ ID NO: 458923 - RNA, 32 nt, Human
ggcgagagaaugaucuggccucaggggacagg

SEQ ID NO: 458924 - RNA, 32 nt, Human
ggcgagagccccucuucuucccgagcaguggg

SEQ ID NO: 458925 - RNA, 32 nt, Human
ggcgagagccugggguggggcgggagggggaa

SEQ ID NO: 458926 - RNA, 32 nt, Human
ggcgagagcuaguggggugcagagggccccau

SEQ ID NO: 458927 - RNA, 32 nt, Human
ggcgagaggaggaggaggaggaggagaaggcu

SEQ ID NO: 458928 - RNA, 18 nt, Human
ggcgagaggaggaggcag

SEQ ID NO: 458929 - RNA, 32 nt, Human
ggcgagaggaguuugaccuggaugugauugcu

SEQ ID NO: 458930 - RNA, 23 nt, Human
ggcgagaggauugcuugagccca

SEQ ID NO: 458931 - RNA, 32 nt, Human
ggcgagaggcggagcuggcccggcgcgccccg

SEQ ID NO: 458932 - RNA, 32 nt, Human
ggcgagaggugagcccucccuccuggagaggu

SEQ ID NO: 458933 - RNA, 32 nt, Human
ggcgagaguagggaccaggaagagccggaaaa

SEQ ID NO: 458934 - RNA, 20 nt, Human
ggcgagcaccuguaauccca

SEQ ID NO: 458935 - RNA, 32 nt, Human
ggcgagcaccuguaaucccagcuacucgggag

SEQ ID NO: 458936 - RNA, 32 nt, Human
ggcgagcaccuguaaucucagcacuuugggag

SEQ ID NO: 458937 - RNA, 32 nt, Human
ggcgagcagcuggcagagagcccagugccggc

SEQ ID NO: 458938 - RNA, 32 nt, Human
ggcgagcagggugggcaagugggaggagggga

SEQ ID NO: 458939 - RNA, 32 nt, Human
ggcgagcagguucuacccucucugcuaagggc

SEQ ID NO: 458940 - RNA, 32 nt, Human
ggcgagccccaaucucuagccucccaacuugg

SEQ ID NO: 458941 - RNA, 32 nt, Human
ggcgagcccuggaggagggaggccacaacucc

SEQ ID NO: 458942 - RNA, 32 nt, Human
ggcgagccggagcgaggaagggaaagcgcaag

SEQ ID NO: 458943 - RNA, 32 nt, Human
ggcgagccuccaccgcaaacccaauccagaug

SEQ ID NO: 458944 - RNA, 32 nt, Human
ggcgagcgacagcggccucagccccggcagcg

SEQ ID NO: 458945 - RNA, 32 nt, Human
ggcgagcgccuguaaucccagguauuccggaa

SEQ ID NO: 458946 - RNA, 32 nt, Human
ggcgagcggggcgccggaggaagaggaggacc

SEQ ID NO: 458947 - RNA, 32 nt, Human
ggcgagcgugcgggccaacaccuauugccgcc

SEQ ID NO: 458948 - RNA, 32 nt, Human
ggcgagcuccccucugucuggggcaggguggg

SEQ ID NO: 458949 - RNA, 32 nt, Human
ggcgagcugcaacaagucgugugggacgaacc

SEQ ID NO: 458950 - RNA, 32 nt, Human
ggcgagcuggaaauauguguaacacaggcuug

SEQ ID NO: 458951 - RNA, 32 nt, Human
ggcgagcugguccgcaccacuaguucugcuuc

SEQ ID NO: 458952 - RNA, 21 nt, Human
ggcgagcuugccaucguggcc

SEQ ID NO: 458953 - RNA, 32 nt, Human
ggcgaggagacaccuugaucagcgucccaguu

SEQ ID NO: 458954 - RNA, 32 nt, Human
ggcgaggagagggaagggggcggaggagacag

SEQ ID NO: 458955 - RNA, 21 nt, Human
ggcgaggagccgccgcagccg

SEQ ID NO: 458956 - RNA, 22 nt, Human
ggcgaggagccuccgcccccca

SEQ ID NO: 458957 - RNA, 32 nt, Human
ggcgaggaggaaaguggagaccaccuggcacg

SEQ ID NO: 458958 - RNA, 19 nt, Human
ggcgaggaggaggaggaga

SEQ ID NO: 458959 - RNA, 32 nt, Human
ggcgaggaggaggcggagguggagcuggcgga

SEQ ID NO: 458960 - RNA, 32 nt, Human
ggcgaggaggcguuuccacccccuggugccua

SEQ ID NO: 458961 - RNA, 32 nt, Human
ggcgaggaggcugacugagguucagagccugg

SEQ ID NO: 458962 - RNA, 32 nt, Human
ggcgaggagguggaggaggaggaggaggagga

SEQ ID NO: 458963 - RNA, 32 nt, Human
ggcgaggaguccagagagccauggccgcccug

SEQ ID NO: 458964 - RNA, 32 nt, Human
ggcgaggcacuggccagcccagcuccacgagg

SEQ ID NO: 458965 - RNA, 32 nt, Human
ggcgaggcaggcggacgaggcgcagagacagc

SEQ ID NO: 458966 - RNA, 32 nt, Human
ggcgaggcccaccugggcucuguccucugcca

SEQ ID NO: 458967 - RNA, 19 nt, Human
ggcgaggccccucccagua

SEQ ID NO: 458968 - RNA, 32 nt, Human
ggcgaggccugagcccucacacaugcccacgc

SEQ ID NO: 458969 - RNA, 32 nt, Human
ggcgaggcgggcagagccagaggcacgcagcc

SEQ ID NO: 458970 - RNA, 32 nt, Human
ggcgaggcuguggagaaaaaggaaugcuuaua

SEQ ID NO: 458971 - RNA, 32 nt, Human
ggcgagggcgagcggcggggacuggggaaggg

SEQ ID NO: 458972 - RNA, 32 nt, Human
ggcgagggcgcacagguucuguuuuucgccgg

SEQ ID NO: 458973 - RNA, 19 nt, Human
ggcgagggcgccgcaccca

SEQ ID NO: 458974 - RNA, 32 nt, Human
ggcgagggcucaggaacagccccuuuccugug

SEQ ID NO: 458975 - RNA, 32 nt, Human
ggcgagggcugccucuuguucucccgccgcug

SEQ ID NO: 458976 - RNA, 32 nt, Human
ggcgagggcugcgggaaggaaagggggcggcg

SEQ ID NO: 458977 - RNA, 32 nt, Human
ggcgaggggaggguggcaggugaccuucuggg

SEQ ID NO: 458978 - RNA, 22 nt, Human
ggcgaggggccgagucccgccu

SEQ ID NO: 458979 - RNA, 32 nt, Human
ggcgaggggcggggcagauggcgagggagcgg

SEQ ID NO: 458980 - RNA, 32 nt, Human
ggcgagggggagaaagggagagagggaggggg

SEQ ID NO: 458981 - RNA, 32 nt, Human
ggcgaggguggcugaggcuguugugcaguagg

SEQ ID NO: 458982 - RNA, 32 nt, Human
ggcgagggugucuauggagaggcggcggccgc

SEQ ID NO: 458983 - RNA, 32 nt, Human
ggcgaggugccuggccugccauguaggggcuc

SEQ ID NO: 458984 - RNA, 22 nt, Human
ggcgagguggcucacaccugua

SEQ ID NO: 458985 - RNA, 32 nt, Human
ggcgagguuuuauacaccugaaagaagagaau

SEQ ID NO: 458986 - RNA, 32 nt, Human
ggcgaguagggagugggggagguggguccaag

SEQ ID NO: 458987 - RNA, 27 nt, Human
ggcgaguccacgugcuccccgcggccg

SEQ ID NO: 458988 - RNA, 32 nt, Human
ggcgagugucuguaaucccagcuacucaggag

SEQ ID NO: 458989 - RNA, 32 nt, Human
ggcgaguuaaauaggcaagguacccagugaua

SEQ ID NO: 458990 - RNA, 32 nt, Human
ggcgaguucagcuuggggugugagugagacag

SEQ ID NO: 458991 - RNA, 32 nt, Human
ggcgaguuguuggaaacagucauuuucuuaga

SEQ ID NO: 458992 - RNA, 32 nt, Human
ggcgauccaccugucucagccucccagagugc

SEQ ID NO: 458993 - RNA, 32 nt, Human
ggcgauccaggcgcuccagacuuaccagagcc

SEQ ID NO: 458994 - RNA, 32 nt, Human
ggcgaucccucaccugcuuacucacucagcag

SEQ ID NO: 458995 - RNA, 32 nt, Human
ggcgaucggagugggccuuuucuuucuuuuug

SEQ ID NO: 458996 - RNA, 32 nt, Human
ggcgaucucccagggcucucuggaccauacgc

SEQ ID NO: 458997 - RNA, 32 nt, Human
ggcgaucugagcacucaggcugaucuagagga

SEQ ID NO: 458998 - RNA, 21 nt, Human
ggcgaucugccugccuuggca

SEQ ID NO: 458999 - RNA, 32 nt, Human
ggcgaucuucuggggcccacagcuggugauau

SEQ ID NO: 459000 - RNA, 32 nt, Human
ggcgauggcaggacacagcauaauguuuggcu

SEQ ID NO: 459001 - RNA, 32 nt, Human
ggcgauggcauccuuccuuuccauccuaagac

SEQ ID NO: 459002 - RNA, 29 nt, Human
ggcgauggccacucucccagcagcagaaa

SEQ ID NO: 459003 - RNA, 22 nt, Human
ggcgauggccucuucugcaucu

SEQ ID NO: 459004 - RNA, 32 nt, Human
ggcgauggccuuuggagauugcgugugguguu

SEQ ID NO: 459005 - RNA, 32 nt, Human
ggcgaugggauuauaggacucuccccaucucg

SEQ ID NO: 459006 - RNA, 32 nt, Human
ggcgaugggauuauggggcagaguccucacaa

SEQ ID NO: 459007 - RNA, 32 nt, Human
ggcgauguccccacauggagggaacacccgac

SEQ ID NO: 459008 - RNA, 29 nt, Human
ggcgauguuccacugcaucccccuguggc

SEQ ID NO: 459009 - RNA, 32 nt, Human
ggcgauucuggugcaagugcccagggccuccg

SEQ ID NO: 459010 - RNA, 32 nt, Human
ggcgauugaggguucaccucugccuuggggag

SEQ ID NO: 459011 - RNA, 32 nt, Human
ggcgauuggcaucgaucucuccaucccuuccg

SEQ ID NO: 459012 - RNA, 32 nt, Human
ggcgauuuacaaagggggaugcuuacagaagg

SEQ ID NO: 459013 - RNA, 32 nt, Human
ggcgauuugggggcucggggaggcagagaauc

SEQ ID NO: 459014 - RNA, 32 nt, Human
ggcgcaaauuccucucguucaggcuggagaga

SEQ ID NO: 459015 - RNA, 32 nt, Human
ggcgcaacauggccgcagccucgccucugcgc

SEQ ID NO: 459016 - RNA, 32 nt, Human
ggcgcaagccuguaaucccagcuacucaggag

SEQ ID NO: 459017 - RNA, 32 nt, Human
ggcgcaagccuguaaucccagcuauuugggag

SEQ ID NO: 459018 - RNA, 32 nt, Human
ggcgcaaggagaggagggauccaguggggccg

SEQ ID NO: 459019 - RNA, 21 nt, Human
ggcgcaagggugagggcggcc

SEQ ID NO: 459020 - RNA, 22 nt, Human
ggcgcaaucucagcucacugca

SEQ ID NO: 459021 - RNA, 32 nt, Human
ggcgcaauuacggcccgacuccugggcucaag

SEQ ID NO: 459022 - RNA, 32 nt, Human
ggcgcacaccaccacacuggcuaauuuuugua

SEQ ID NO: 459023 - RNA, 32 nt, Human
ggcgcacaccaccacauccagcuuauuuuugu

SEQ ID NO: 459024 - RNA, 32 nt, Human
ggcgcacaccuguaaucccagcuacucaggaa

SEQ ID NO: 459025 - RNA, 32 nt, Human
ggcgcacaccuguaaucccagcuacucaggag

SEQ ID NO: 459026 - RNA, 32 nt, Human
ggcgcacaccuguaaucccagcuacucgggag

SEQ ID NO: 459027 - RNA, 32 nt, Human
ggcgcacaccuguaauccuagcuacucgggag

SEQ ID NO: 459028 - RNA, 32 nt, Human
ggcgcacaccuguaaucucagcuacucgggag

SEQ ID NO: 459029 - RNA, 20 nt, Human
ggcgcacacguguaauccca

SEQ ID NO: 459030 - RNA, 32 nt, Human
ggcgcacacucccggucuccacucgcucuucc

SEQ ID NO: 459031 - RNA, 24 nt, Human
ggcgcacagcgcggggccaggcug

SEQ ID NO: 459032 - RNA, 32 nt, Human
ggcgcacaucuguaaucccagcuacucgggag

SEQ ID NO: 459033 - RNA, 32 nt, Human
ggcgcaccacggucacuuuggccuggaaacca

SEQ ID NO: 459034 - RNA, 32 nt, Human
ggcgcaccgcaagcccugccuccuggguucaa

SEQ ID NO: 459035 - RNA, 32 nt, Human
ggcgcacgccuguaaucccagcuacucaagag

SEQ ID NO: 459036 - RNA, 32 nt, Human
ggcgcacgccuguaaucccagcuacucgggag

SEQ ID NO: 459037 - RNA, 32 nt, Human
ggcgcacgccuguaaugccagcuacuugggag

SEQ ID NO: 459038 - RNA, 32 nt, Human
ggcgcacgcugggcaguggccugggcaacccc

SEQ ID NO: 459039 - RNA, 21 nt, Human
ggcgcacggaggcccgcgcug

SEQ ID NO: 459040 - RNA, 32 nt, Human
ggcgcacggggugggagcggagcccaggccgg

SEQ ID NO: 459041 - RNA, 32 nt, Human
ggcgcacgucaaacccugccuuuccuuuacuu

SEQ ID NO: 459042 - RNA, 32 nt, Human
ggcgcacguguuuguucacauguccagcguug

SEQ ID NO: 459043 - RNA, 32 nt, Human
ggcgcacuccgacuccgagcagucucuguccu

SEQ ID NO: 459044 - RNA, 24 nt, Human
ggcgcacugcagccuugaccuccu

SEQ ID NO: 459045 - RNA, 32 nt, Human
ggcgcacugcagccuugaccuccugagcucaa

SEQ ID NO: 459046 - RNA, 25 nt, Human
ggcgcacuuuuuauuuuuauuuuau

SEQ ID NO: 459047 - RNA, 22 nt, Human
ggcgcagaaggguugggggccu

SEQ ID NO: 459048 - RNA, 17 nt, Human
ggcgcagaccugaggcg

SEQ ID NO: 459049 - RNA, 32 nt, Human
ggcgcagacucucccagcuggcaccaaagccu

SEQ ID NO: 459050 - RNA, 32 nt, Human
ggcgcagaggccucgccuccugaaggacgcag

SEQ ID NO: 459051 - RNA, 18 nt, Human
ggcgcagagggccgggca

SEQ ID NO: 459052 - RNA, 32 nt, Human
ggcgcagaugccgcaucugaggaaggugcgag

SEQ ID NO: 459053 - RNA, 19 nt, Human
ggcgcagauggcuaacuga

SEQ ID NO: 459054 - RNA, 32 nt, Human
ggcgcagauguuuguguugccuccucaggcac

SEQ ID NO: 459055 - RNA, 32 nt, Human
ggcgcagauugcagcgcagcuguguuggaggc

SEQ ID NO: 459056 - RNA, 21 nt, Human
ggcgcagcacuggagcggggg

SEQ ID NO: 459057 - RNA, 23 nt, Human
ggcgcagcagcagguggcagggg

SEQ ID NO: 459058 - RNA, 21 nt, Human
ggcgcagcagcccagcggagg

SEQ ID NO: 459059 - RNA, 21 nt, Human
ggcgcagcaguuccuggcgag

SEQ ID NO: 459060 - RNA, 32 nt, Human
ggcgcagccagcccugaagugccugucuggcu

SEQ ID NO: 459061 - RNA, 32 nt, Human
ggcgcagcccaggaggcgggagccccugcaca

SEQ ID NO: 459062 - RNA, 32 nt, Human
ggcgcagccgacaucagcacccuagaccagaa

SEQ ID NO: 459063 - RNA, 20 nt, Human
ggcgcagccugccaccuccc

SEQ ID NO: 459064 - RNA, 32 nt, Human
ggcgcagcgacggcccguuccaccucgcgauc

SEQ ID NO: 459065 - RNA, 21 nt, Human
ggcgcagcggagcgcgguccc

SEQ ID NO: 459066 - RNA, 16 nt, Human
ggcgcagcggcuggcu

SEQ ID NO: 459067 - RNA, 32 nt, Human
ggcgcagcgggcggaggcggccgugggccgcc

SEQ ID NO: 459068 - RNA, 24 nt, Human
ggcgcagcggggagcugcucccca

SEQ ID NO: 459069 - RNA, 21 nt, Human
ggcgcagcuuggccaccuccc

SEQ ID NO: 459070 - RNA, 18 nt, Human
ggcgcaggaagggggcgg

SEQ ID NO: 459071 - RNA, 32 nt, Human
ggcgcaggaauaagcaaagagacccuggaccc

SEQ ID NO: 459072 - RNA, 20 nt, Human
ggcgcaggaggcgggcggcc

SEQ ID NO: 459073 - RNA, 32 nt, Human
ggcgcaggauucagccggagggaagggacggg

SEQ ID NO: 459074 - RNA, 32 nt, Human
ggcgcaggccgaguuccagaccagccugggaa

SEQ ID NO: 459075 - RNA, 23 nt, Human
ggcgcagggcacggugggcgccu

SEQ ID NO: 459076 - RNA, 32 nt, Human
ggcgcagggucugggacgcaguugggagugca

SEQ ID NO: 459077 - RNA, 32 nt, Human
ggcgcaguggccgaggcuggagcggcaggcgg

SEQ ID NO: 459078 - RNA, 22 nt, Human
ggcgcaguggcucaugccugua

SEQ ID NO: 459079 - RNA, 32 nt, Human
ggcgcaguggcuguaaucccagcacuuuggga

SEQ ID NO: 459080 - RNA, 31 nt, Human
ggcgcaguguuucagcaucuaggggucaaaa

SEQ ID NO: 459081 - RNA, 32 nt, Human
ggcgcaguucccagcuaucuccccugcuccuc

SEQ ID NO: 459082 - RNA, 32 nt, Human
ggcgcaguuugagagaauggacucccauuuua

SEQ ID NO: 459083 - RNA, 32 nt, Human
ggcgcauaccuguaaucccagcuacuugggag

SEQ ID NO: 459084 - RNA, 32 nt, Human
ggcgcauacuuguaaucccagcuacucaggag

SEQ ID NO: 459085 - RNA, 32 nt, Human
ggcgcauauggaguagaugcucaccagaggcu

SEQ ID NO: 459086 - RNA, 18 nt, Human
ggcgcaucaccugagguc

SEQ ID NO: 459087 - RNA, 32 nt, Human
ggcgcaucccuguaaucccagcuacuuuacuu

SEQ ID NO: 459088 - RNA, 32 nt, Human
ggcgcauccucccaggccaccaacccagccau

SEQ ID NO: 459089 - RNA, 32 nt, Human
ggcgcaucggaaacucgcuuccuaugggucag

SEQ ID NO: 459090 - RNA, 30 nt, Human
ggcgcaugacuguaaucccagcuacucggg

SEQ ID NO: 459091 - RNA, 32 nt, Human
ggcgcaugccuauaaucccagcuacucgagug

SEQ ID NO: 459092 - RNA, 32 nt, Human
ggcgcaugccuauaaucccagcuacuugggag

SEQ ID NO: 459093 - RNA, 32 nt, Human
ggcgcaugccuauaaucccagguacucaggag

SEQ ID NO: 459094 - RNA, 23 nt, Human
ggcgcaugccugcaaucccagcu

SEQ ID NO: 459095 - RNA, 32 nt, Human
ggcgcaugccugcaaucccagcuacuuggaag

SEQ ID NO: 459096 - RNA, 32 nt, Human
ggcgcaugccuguaaucccaacuacucaggag

SEQ ID NO: 459097 - RNA, 32 nt, Human
ggcgcaugccuguaaucccagaacuuugggag

SEQ ID NO: 459098 - RNA, 32 nt, Human
ggcgcaugccuguaaucccagcacuuugggag

SEQ ID NO: 459099 - RNA, 32 nt, Human
ggcgcaugccuguaaucccagcuacuagagag

SEQ ID NO: 459100 - RNA, 32 nt, Human
ggcgcaugccuguaaucccagcuacucaggaa

SEQ ID NO: 459101 - RNA, 32 nt, Human
ggcgcaugccuguaaucccagcuacucaggag

SEQ ID NO: 459102 - RNA, 32 nt, Human
ggcgcaugccuguaaucccagcuacucgggag

SEQ ID NO: 459103 - RNA, 32 nt, Human
ggcgcaugccuguaaucccagcuacugggaag

SEQ ID NO: 459104 - RNA, 32 nt, Human
ggcgcaugccuguaaucccagcuacuuaggag

SEQ ID NO: 459105 - RNA, 32 nt, Human
ggcgcaugccuguaaucccagcuacuugggag

SEQ ID NO: 459106 - RNA, 32 nt, Human
ggcgcaugccuguaaucccagcugcuugggag

SEQ ID NO: 459107 - RNA, 32 nt, Human
ggcgcaugccuguaaucccaguuacucaggag

SEQ ID NO: 459108 - RNA, 32 nt, Human
ggcgcaugccuguaauccuagcuacucaggag

SEQ ID NO: 459109 - RNA, 32 nt, Human
ggcgcaugccuguaauccuagcuacucgggag

SEQ ID NO: 459110 - RNA, 32 nt, Human
ggcgcaugccuguaaucucagcuacucaggag

SEQ ID NO: 459111 - RNA, 32 nt, Human
ggcgcaugccuguagucccagcuaacugggag

SEQ ID NO: 459112 - RNA, 32 nt, Human
ggcgcaugccuguagucccagcuacuugggag

SEQ ID NO: 459113 - RNA, 32 nt, Human
ggcgcaugccuguagucccagguacucaggag

SEQ ID NO: 459114 - RNA, 32 nt, Human
ggcgcaugccuguaguuccagcuacucaggag

SEQ ID NO: 459115 - RNA, 32 nt, Human
ggcgcaugccuguaguuccagcuacuugugag

SEQ ID NO: 459116 - RNA, 32 nt, Human
ggcgcaugccugugaucccagcuacuugagag

SEQ ID NO: 459117 - RNA, 32 nt, Human
ggcgcaugccuguggucccgguuacucaggag

SEQ ID NO: 459118 - RNA, 32 nt, Human
ggcgcaugccuguuguagccccagcuacucaa

SEQ ID NO: 459119 - RNA, 32 nt, Human
ggcgcaugcuuguaaucccagcuacucgggag

SEQ ID NO: 459120 - RNA, 32 nt, Human
ggcgcaugucuguaaucccagcuacuggggaa

SEQ ID NO: 459121 - RNA, 32 nt, Human
ggcgcaugucuguaaucccagcuacuggggag

SEQ ID NO: 459122 - RNA, 32 nt, Human
ggcgcauucccacacuccagucuggauccagg

SEQ ID NO: 459123 - RNA, 32 nt, Human
ggcgcauugccuguaaucccagcuacuaggga

SEQ ID NO: 459124 - RNA, 21 nt, Human
ggcgccaacugucccuuggca

SEQ ID NO: 459125 - RNA, 32 nt, Human
ggcgccaccaaccccacccacacugcugccug

SEQ ID NO: 459126 - RNA, 32 nt, Human
ggcgccaccacugaugccacccaggaccucgg

SEQ ID NO: 459127 - RNA, 20 nt, Human
ggcgccaccgucuccaagga

SEQ ID NO: 459128 - RNA, 19 nt, Human
ggcgccaccuucugcugcc

SEQ ID NO: 459129 - RNA, 23 nt, Human
ggcgccacgccgccguggccgca

SEQ ID NO: 459130 - RNA, 32 nt, Human
ggcgccacuacacuccagccugggcaacagag

SEQ ID NO: 459131 - RNA, 32 nt, Human
ggcgccacuacacuccagccugggcgacagag

SEQ ID NO: 459132 - RNA, 23 nt, Human
ggcgccacucaggaguccuaccc

SEQ ID NO: 459133 - RNA, 32 nt, Human
ggcgccacucucugcccugccaugcggcuggu

SEQ ID NO: 459134 - RNA, 32 nt, Human
ggcgccacugcacuccagcccgggcgacagag

SEQ ID NO: 459135 - RNA, 32 nt, Human
ggcgccacugcacuccagccuaggcaacagag

SEQ ID NO: 459136 - RNA, 32 nt, Human
ggcgccacugcacuccagccugagugacagag

SEQ ID NO: 459137 - RNA, 32 nt, Human
ggcgccacugcacuccagccugggcgacagag

SEQ ID NO: 459138 - RNA, 32 nt, Human
ggcgccacugcacuccagccugggcgucagag

SEQ ID NO: 459139 - RNA, 32 nt, Human
ggcgccacugcacuccagccuggguaacagag

SEQ ID NO: 459140 - RNA, 32 nt, Human
ggcgccacugcacuccagccugggugacagag

SEQ ID NO: 459141 - RNA, 32 nt, Human
ggcgccacugcacuccagccugggugagagag

SEQ ID NO: 459142 - RNA, 32 nt, Human
ggcgccacugcacuccagucugggcaacagag

SEQ ID NO: 459143 - RNA, 32 nt, Human
ggcgccacugcacuccagucugggcgauagag

SEQ ID NO: 459144 - RNA, 32 nt, Human
ggcgccacugcacucccgucugggggagagag

SEQ ID NO: 459145 - RNA, 32 nt, Human
ggcgccacugcacuucagccuuggagacaggg

SEQ ID NO: 459146 - RNA, 32 nt, Human
ggcgccacugcauuccagccugggcaacagag

SEQ ID NO: 459147 - RNA, 32 nt, Human
ggcgccacugcgcuccagccugggcaacagag

SEQ ID NO: 459148 - RNA, 32 nt, Human
ggcgccacuucacugcagccuggguggcagag

SEQ ID NO: 459149 - RNA, 32 nt, Human
ggcgccagaaguggcggcagcagcagccgcag

SEQ ID NO: 459150 - RNA, 32 nt, Human
ggcgccagcagguggagcuugacgugacgucu

SEQ ID NO: 459151 - RNA, 28 nt, Human
ggcgccagcagguggcgcuggacgcgca

SEQ ID NO: 459152 - RNA, 24 nt, Human
ggcgccagccaacacacccggcua

SEQ ID NO: 459153 - RNA, 25 nt, Human
ggcgccagccacugcgcccggccca

SEQ ID NO: 459154 - RNA, 21 nt, Human
ggcgccagccggcggauuaca

SEQ ID NO: 459155 - RNA, 22 nt, Human
ggcgccagcgaggccucggcca

SEQ ID NO: 459156 - RNA, 23 nt, Human
ggcgccagcgcuuccccgaccac

SEQ ID NO: 459157 - RNA, 17 nt, Human
ggcgccagcguggacgg

SEQ ID NO: 459158 - RNA, 21 nt, Human
ggcgccagcucccaggccgca

SEQ ID NO: 459159 - RNA, 21 nt, Human
ggcgccagcucgcuccaggga

SEQ ID NO: 459160 - RNA, 21 nt, Human
ggcgccaggacacaguggcug

SEQ ID NO: 459161 - RNA, 23 nt, Human
ggcgccaggcagccgugaucaca

SEQ ID NO: 459162 - RNA, 23 nt, Human
ggcgccagggaaaauucugguua

SEQ ID NO: 459163 - RNA, 19 nt, Human
ggcgccagggccucuggug

SEQ ID NO: 459164 - RNA, 32 nt, Human
ggcgccaguagucccagcuacuugggaggccu

SEQ ID NO: 459165 - RNA, 32 nt, Human
ggcgccauagccacagcaacgguaccaaguuc

SEQ ID NO: 459166 - RNA, 18 nt, Human
ggcgccaucuucgugccc

SEQ ID NO: 459167 - RNA, 32 nt, Human
ggcgccauugcacuccagccugggcaaaaaga

SEQ ID NO: 459168 - RNA, 32 nt, Human
ggcgccauugcacuccagccugggugacaaga

SEQ ID NO: 459169 - RNA, 32 nt, Human
ggcgccauuucacuccagccugggcgacagag

SEQ ID NO: 459170 - RNA, 31 nt, Human
ggcgcccacaaugcucccaugacaaggagcu

SEQ ID NO: 459171 - RNA, 32 nt, Human
ggcgcccacacuggcccugcagugaugcaggg

SEQ ID NO: 459172 - RNA, 32 nt, Human
ggcgcccaccuguaauccuagcugcucagggg

SEQ ID NO: 459173 - RNA, 32 nt, Human
ggcgcccacggagagaaaagaaagggcugaga

SEQ ID NO: 459174 - RNA, 32 nt, Human
ggcgcccacucccacuuuaaugagggugaaga

SEQ ID NO: 459175 - RNA, 32 nt, Human
ggcgcccagccugucaaguccucuucugccuc

SEQ ID NO: 459176 - RNA, 32 nt, Human
ggcgcccagccugugucugaauccuccuacug

SEQ ID NO: 459177 - RNA, 16 nt, Human
ggcgcccagcuggcug

SEQ ID NO: 459178 - RNA, 24 nt, Human
ggcgcccaggcucggugcuggaga

SEQ ID NO: 459179 - RNA, 24 nt, Human
ggcgcccagguccugcaaaggagc

SEQ ID NO: 459180 - RNA, 32 nt, Human
ggcgccccaccaccacccaguuuggggaccca

SEQ ID NO: 459181 - RNA, 32 nt, Human
ggcgccccaggaggaggaagaaaccagggccc

SEQ ID NO: 459182 - RNA, 21 nt, Human
ggcgcccccuucuuucaccca

SEQ ID NO: 459183 - RNA, 21 nt, Human
ggcgccccgcgcagcuggcug

SEQ ID NO: 459184 - RNA, 32 nt, Human
ggcgccccuaggacagcgucccuucacgucgg

SEQ ID NO: 459185 - RNA, 32 nt, Human
ggcgccccucccucccuguccccucuucuggc

SEQ ID NO: 459186 - RNA, 25 nt, Human
ggcgcccgagcaccugcagaggagc

SEQ ID NO: 459187 - RNA, 32 nt, Human
ggcgcccgagugagccuuaacauccaggggcu

SEQ ID NO: 459188 - RNA, 21 nt, Human
ggcgcccgcacgccccgggug

SEQ ID NO: 459189 - RNA, 19 nt, Human
ggcgcccgccaccacggcc

SEQ ID NO: 459190 - RNA, 32 nt, Human
ggcgcccgcgcagaaccagcugucugagcugc

SEQ ID NO: 459191 - RNA, 25 nt, Human
ggcgcccggcugggggagccccggg

SEQ ID NO: 459192 - RNA, 32 nt, Human
ggcgcccgggagcuggcugagcgccggggccc

SEQ ID NO: 459193 - RNA, 22 nt, Human
ggcgcccgggcugccuggccgc

SEQ ID NO: 459194 - RNA, 16 nt, Human
ggcgcccguaauccca

SEQ ID NO: 459195 - RNA, 32 nt, Human
ggcgcccguucccagcauccuccuuggcaggu

SEQ ID NO: 459196 - RNA, 32 nt, Human
ggcgcccuagggcagcggcgugcaguguucgg

SEQ ID NO: 459197 - RNA, 32 nt, Human
ggcgcccuccuggacuuacuggcuccauugag

SEQ ID NO: 459198 - RNA, 32 nt, Human
ggcgcccugaggggaagagcggcccggcccga

SEQ ID NO: 459199 - RNA, 32 nt, Human
ggcgcccugcagauggggcgggcagggaacgg

SEQ ID NO: 459200 - RNA, 32 nt, Human
ggcgcccugcagcugucuccucggccauccug

SEQ ID NO: 459201 - RNA, 32 nt, Human
ggcgcccuggacccacuuucucucucaaacug

SEQ ID NO: 459202 - RNA, 32 nt, Human
ggcgcccuucguuccuccucugcuucccuucc

SEQ ID NO: 459203 - RNA, 32 nt, Human
ggcgccgcacacacacauuaacacacuugagc

SEQ ID NO: 459204 - RNA, 23 nt, Human
ggcgccgcagcccgcucggcccg

SEQ ID NO: 459205 - RNA, 32 nt, Human
ggcgccgcagccgccugcguuucgguuuguga

SEQ ID NO: 459206 - RNA, 23 nt, Human
ggcgccgccacuguccggccaca

SEQ ID NO: 459207 - RNA, 21 nt, Human
ggcgccgccccacccggccca

SEQ ID NO: 459208 - RNA, 20 nt, Human
ggcgccgcccgggucccugc

SEQ ID NO: 459209 - RNA, 32 nt, Human
ggcgccgccggggccuccagacuggccuuccg

SEQ ID NO: 459210 - RNA, 32 nt, Human
ggcgccgccucccagcccagagcccagcgcuc

SEQ ID NO: 459211 - RNA, 21 nt, Human
ggcgccgccuccccuccccca

SEQ ID NO: 459212 - RNA, 32 nt, Human
ggcgccgccucuccacccgcagccugcggagg

SEQ ID NO: 459213 - RNA, 19 nt, Human
ggcgccgcgcuucccagcc

SEQ ID NO: 459214 - RNA, 32 nt, Human
ggcgccgcugcgcgcaugggccuguuccuggc

SEQ ID NO: 459215 - RNA, 22 nt, Human
ggcgccgcugcugucccccgcc

SEQ ID NO: 459216 - RNA, 32 nt, Human
ggcgccgcuggcaggagcgcuuggggauccuc

SEQ ID NO: 459217 - RNA, 32 nt, Human
ggcgccgcuucuuccgcuuucucgucaggcuc

SEQ ID NO: 459218 - RNA, 20 nt, Human
ggcgccggaaauccucaaag

SEQ ID NO: 459219 - RNA, 32 nt, Human
ggcgccggacaagaggagggggcgugcagcgg

SEQ ID NO: 459220 - RNA, 24 nt, Human
ggcgccggcccccugcccgaccgc

SEQ ID NO: 459221 - RNA, 25 nt, Human
ggcgccggcccguccgucugccgca

SEQ ID NO: 459222 - RNA, 26 nt, Human
ggcgccggcgaggacuccccggccac

SEQ ID NO: 459223 - RNA, 32 nt, Human
ggcgccgggaggccgagccagcgacuaagagg

SEQ ID NO: 459224 - RNA, 32 nt, Human
ggcgccgggaggcgcgggcuuugcuccugggg

SEQ ID NO: 459225 - RNA, 23 nt, Human
ggcgccgggcaaagacggcugcg

SEQ ID NO: 459226 - RNA, 23 nt, Human
ggcgccgggcccugccggccaca

SEQ ID NO: 459227 - RNA, 29 nt, Human
ggcgccgggcugcuauucuucccccgggu

SEQ ID NO: 459228 - RNA, 32 nt, Human
ggcgccggggagaagagacauggagccggccc

SEQ ID NO: 459229 - RNA, 32 nt, Human
ggcgccgucuucuccuccuugucacccgcggu

SEQ ID NO: 459230 - RNA, 32 nt, Human
ggcgccguggcggaauggcggcuuccaucucu

SEQ ID NO: 459231 - RNA, 20 nt, Human
ggcgccguggggccgggaca

SEQ ID NO: 459232 - RNA, 32 nt, Human
ggcgccuauaaccccagcuauuugggaggcug

SEQ ID NO: 459233 - RNA, 16 nt, Human
ggcgccuauaauccca

SEQ ID NO: 459234 - RNA, 32 nt, Human
ggcgccuauaaucccagcuacuugggaggcca

SEQ ID NO: 459235 - RNA, 32 nt, Human
ggcgccuauaaucccagcuacuugggaggcug

SEQ ID NO: 459236 - RNA, 32 nt, Human
ggcgccuauaaucccagcuauucuggaggcug

SEQ ID NO: 459237 - RNA, 32 nt, Human
ggcgccuauagucccagcuacuugggaggcug

SEQ ID NO: 459238 - RNA, 32 nt, Human
ggcgccucagccgccucacuccugggccugcu

SEQ ID NO: 459239 - RNA, 32 nt, Human
ggcgccucagccgccucacuccugguucugcu

SEQ ID NO: 459240 - RNA, 32 nt, Human
ggcgccucaucugcaucucugccucaccccau

SEQ ID NO: 459241 - RNA, 32 nt, Human
ggcgccuccacccacccuccugccucaccccu

SEQ ID NO: 459242 - RNA, 32 nt, Human
ggcgccuccucccagaggcuuccaggagcacg

SEQ ID NO: 459243 - RNA, 32 nt, Human
ggcgccucggcagccuugccagggaggccggg

SEQ ID NO: 459244 - RNA, 32 nt, Human
ggcgccucggcugccuggcaggaggaccucgg

SEQ ID NO: 459245 - RNA, 32 nt, Human
ggcgccucuagucccagcuacccgggaggcug

SEQ ID NO: 459246 - RNA, 32 nt, Human
ggcgccugaggaggaggaggagaagcggauga

SEQ ID NO: 459247 - RNA, 32 nt, Human
ggcgccugauugcugagugucaucucaacccc

SEQ ID NO: 459248 - RNA, 32 nt, Human
ggcgccugcagcucucccuggaguucgacuuu

SEQ ID NO: 459249 - RNA, 32 nt, Human
ggcgccugccuguaaucccagcuacuaaggag

SEQ ID NO: 459250 - RNA, 32 nt, Human
ggcgccugcucagcgacugaugcacagacugc

SEQ ID NO: 459251 - RNA, 23 nt, Human
ggcgccuggaucaccugagguca

SEQ ID NO: 459252 - RNA, 32 nt, Human
ggcgccuggccuggccggugcugcacauccac

SEQ ID NO: 459253 - RNA, 32 nt, Human
ggcgccuggcucuuaccagcgucuggccuaga

SEQ ID NO: 459254 - RNA, 29 nt, Human
ggcgccuggcugccaucuuuuccuccaga

SEQ ID NO: 459255 - RNA, 32 nt, Human
ggcgccugggcugggggcggggaccaggcggg

SEQ ID NO: 459256 - RNA, 18 nt, Human
ggcgccuggguggauggg

SEQ ID NO: 459257 - RNA, 16 nt, Human
ggcgccuguaauccca

SEQ ID NO: 459258 - RNA, 18 nt, Human
ggcgccuguaaucccagc

SEQ ID NO: 459259 - RNA, 19 nt, Human
ggcgccuguaaucccagcu

SEQ ID NO: 459260 - RNA, 32 nt, Human
ggcgccuguaaucccagcuaaaggaggcugag

SEQ ID NO: 459261 - RNA, 32 nt, Human
ggcgccuguaaucccagcuaaucaggaggcug

SEQ ID NO: 459262 - RNA, 32 nt, Human
ggcgccuguaaucccagcuacuagggaggcug

SEQ ID NO: 459263 - RNA, 32 nt, Human
ggcgccuguaaucccagcuacucgggaagcug

SEQ ID NO: 459264 - RNA, 32 nt, Human
ggcgccuguaaucccagcuacucgggagacug

SEQ ID NO: 459265 - RNA, 32 nt, Human
ggcgccuguaaucccagcuacucgggaggcca

SEQ ID NO: 459266 - RNA, 32 nt, Human
ggcgccuguaaucccagcuacucgggaggcug

SEQ ID NO: 459267 - RNA, 32 nt, Human
ggcgccuguaaucccagcuacucgggagguuu

SEQ ID NO: 459268 - RNA, 32 nt, Human
ggcgccuguaaucccagcuacugagggggcug

SEQ ID NO: 459269 - RNA, 32 nt, Human
ggcgccuguaaucccagcuacuggggaggcug

SEQ ID NO: 459270 - RNA, 32 nt, Human
ggcgccuguaaucccagcuacuuggaaggcug

SEQ ID NO: 459271 - RNA, 32 nt, Human
ggcgccuguaaucccagcuacuugggaagcug

SEQ ID NO: 459272 - RNA, 32 nt, Human
ggcgccuguaaucccagcuacuugggaggcug

SEQ ID NO: 459273 - RNA, 32 nt, Human
ggcgccuguaaucccagcuaggaggcugagac

SEQ ID NO: 459274 - RNA, 32 nt, Human
ggcgccuguaaucccagcuauuugggaggcug

SEQ ID NO: 459275 - RNA, 19 nt, Human
ggcgccuguaaucccaguu

SEQ ID NO: 459276 - RNA, 16 nt, Human
ggcgccuguaauccua

SEQ ID NO: 459277 - RNA, 16 nt, Human
ggcgccuguaauucca

SEQ ID NO: 459278 - RNA, 19 nt, Human
ggcgccuguaauuccagcu

SEQ ID NO: 459279 - RNA, 32 nt, Human
ggcgccuguagccccagcuacuugggaggcug

SEQ ID NO: 459280 - RNA, 16 nt, Human
ggcgccuguaguccca

SEQ ID NO: 459281 - RNA, 32 nt, Human
ggcgccuguagucccaacuacuugggaggcug

SEQ ID NO: 459282 - RNA, 32 nt, Human
ggcgccuguagucccagcacuuugggaggccg

SEQ ID NO: 459283 - RNA, 32 nt, Human
ggcgccuguagucccagcagcuugggaggcug

SEQ ID NO: 459284 - RNA, 19 nt, Human
ggcgccuguagucccagcu

SEQ ID NO: 459285 - RNA, 32 nt, Human
ggcgccuguagucccagcuacgugggaggcug

SEQ ID NO: 459286 - RNA, 32 nt, Human
ggcgccuguagucccagcuacucaggaggcug

SEQ ID NO: 459287 - RNA, 32 nt, Human
ggcgccuguagucccagcuacucggaaggcua

SEQ ID NO: 459288 - RNA, 32 nt, Human
ggcgccuguagucccagcuacucggaggcuga

SEQ ID NO: 459289 - RNA, 32 nt, Human
ggcgccuguagucccagcuacucgggagacug

SEQ ID NO: 459290 - RNA, 32 nt, Human
ggcgccuguagucccagcuacucgggaggcug

SEQ ID NO: 459291 - RNA, 32 nt, Human
ggcgccuguagucccagcuacucugaagacug

SEQ ID NO: 459292 - RNA, 32 nt, Human
ggcgccuguagucccagcuacucuggaggcug

SEQ ID NO: 459293 - RNA, 32 nt, Human
ggcgccuguagucccagcuacuggggaggcug

SEQ ID NO: 459294 - RNA, 32 nt, Human
ggcgccuguagucccagcuacuuggaaggcug

SEQ ID NO: 459295 - RNA, 32 nt, Human
ggcgccuguagucccagcuacuugggaagcug

SEQ ID NO: 459296 - RNA, 32 nt, Human
ggcgccuguagucccagcuacuugggaggcag

SEQ ID NO: 459297 - RNA, 32 nt, Human
ggcgccuguagucccagcuacuugggaggcca

SEQ ID NO: 459298 - RNA, 32 nt, Human
ggcgccuguagucccagcuacuugggaggcug

SEQ ID NO: 459299 - RNA, 32 nt, Human
ggcgccuguagucccagcuaugcgagaggcug

SEQ ID NO: 459300 - RNA, 32 nt, Human
ggcgccuguagucccagcuauucgggaggcug

SEQ ID NO: 459301 - RNA, 32 nt, Human
ggcgccuguagucccagcuauuugggaggcua

SEQ ID NO: 459302 - RNA, 32 nt, Human
ggcgccuguagucccagcugcucgggaggcug

SEQ ID NO: 459303 - RNA, 16 nt, Human
ggcgccugugauccca

SEQ ID NO: 459304 - RNA, 19 nt, Human
ggcgccugugaucccagcu

SEQ ID NO: 459305 - RNA, 32 nt, Human
ggcgccuguggaauguccagggcucugguccg

SEQ ID NO: 459306 - RNA, 32 nt, Human
ggcgccugugggcuccagggccuccggcuucc

SEQ ID NO: 459307 - RNA, 32 nt, Human
ggcgccuguggucccagcuacucgggaggcug

SEQ ID NO: 459308 - RNA, 32 nt, Human
ggcgccuguggucccagcuacuggggaggcug

SEQ ID NO: 459309 - RNA, 32 nt, Human
ggcgccugugguggccagcuacucaggaggcu

SEQ ID NO: 459310 - RNA, 32 nt, Human
ggcgccuguuaucccagcuacuugggaggcua

SEQ ID NO: 459311 - RNA, 32 nt, Human
ggcgccuguucccccaggcucucagugccacc

SEQ ID NO: 459312 - RNA, 19 nt, Human
ggcgccuguuuccucagag

SEQ ID NO: 459313 - RNA, 32 nt, Human
ggcgccuucagcccaaccuccccagccccacg

SEQ ID NO: 459314 - RNA, 32 nt, Human
ggcgccuuccucccaccugccagcccagggua

SEQ ID NO: 459315 - RNA, 32 nt, Human
ggcgccuuccuggagcgcggggagauguaaag

SEQ ID NO: 459316 - RNA, 32 nt, Human
ggcgccuuuuuccucagcugucuuccaaguau

SEQ ID NO: 459317 - RNA, 32 nt, Human
ggcgcgaacccaccaugcagcugcaguuccgg

SEQ ID NO: 459318 - RNA, 32 nt, Human
ggcgcgaaccgcccaucuccccagacccgccc

SEQ ID NO: 459319 - RNA, 20 nt, Human
ggcgcgaagcccggguggcc

SEQ ID NO: 459320 - RNA, 32 nt, Human
ggcgcgaccucaggacucuccguguccccucc

SEQ ID NO: 459321 - RNA, 32 nt, Human
ggcgcgacucggcugcacuccucacgcgccug

SEQ ID NO: 459322 - RNA, 32 nt, Human
ggcgcgacugcacuccagccugggcgagagag

SEQ ID NO: 459323 - RNA, 32 nt, Human
ggcgcgagaacagcacuacuacugcggcgaga

SEQ ID NO: 459324 - RNA, 32 nt, Human
ggcgcgagaggaggggaugggcggggcgcgcg

SEQ ID NO: 459325 - RNA, 24 nt, Human
ggcgcgagcagcgcagggcggccu

SEQ ID NO: 459326 - RNA, 32 nt, Human
ggcgcgaggcccgggcccugagcaccuaucgc

SEQ ID NO: 459327 - RNA, 25 nt, Human
ggcgcgaggcggagcgcgggcggcc

SEQ ID NO: 459328 - RNA, 32 nt, Human
ggcgcgauucagcucacugcaaucuccgccuc

SEQ ID NO: 459329 - RNA, 32 nt, Human
ggcgcgcacagcugcacucagcggcuuccuuc

SEQ ID NO: 459330 - RNA, 32 nt, Human
ggcgcgcacaggcaggagguugcaguugggcg

SEQ ID NO: 459331 - RNA, 32 nt, Human
ggcgcgcaccuguaaucccagcuacucgggag

SEQ ID NO: 459332 - RNA, 32 nt, Human
ggcgcgcaccuguaaucccagcuacuugggag

SEQ ID NO: 459333 - RNA, 32 nt, Human
ggcgcgcaccuguaaucccagcugcucgggag

SEQ ID NO: 459334 - RNA, 20 nt, Human
ggcgcgcacuuggccaggua

SEQ ID NO: 459335 - RNA, 32 nt, Human
ggcgcgcagcacacccggggaccaugggcucc

SEQ ID NO: 459336 - RNA, 32 nt, Human
ggcgcgcaugguccgccagggcugugggccgu

SEQ ID NO: 459337 - RNA, 32 nt, Human
ggcgcgccagggcggggcugaccugcccgcga

SEQ ID NO: 459338 - RNA, 32 nt, Human
ggcgcgcccaccgcuguguccucucugcccag

SEQ ID NO: 459339 - RNA, 32 nt, Human
ggcgcgcccagccugccagccgcgcugcugcu

SEQ ID NO: 459340 - RNA, 18 nt, Human
ggcgcgcccugcagaggg

SEQ ID NO: 459341 - RNA, 32 nt, Human
ggcgcgcccugccucuguggcucugccugugg

SEQ ID NO: 459342 - RNA, 32 nt, Human
ggcgcgccgagggcggagguggugcgugcgug

SEQ ID NO: 459343 - RNA, 32 nt, Human
ggcgcgccgcggaacccggaaguggucacgga

SEQ ID NO: 459344 - RNA, 32 nt, Human
ggcgcgccuggaccccugccccucucugggug

SEQ ID NO: 459345 - RNA, 32 nt, Human
ggcgcgcggaagucugaaggugcccuccagac

SEQ ID NO: 459346 - RNA, 19 nt, Human
ggcgcgcggcagcgcgggg

SEQ ID NO: 459347 - RNA, 32 nt, Human
ggcgcgcggcaggcgacaggucucagcccgga

SEQ ID NO: 459348 - RNA, 32 nt, Human
ggcgcgcggcgccgcggccauuggcccgaggc

SEQ ID NO: 459349 - RNA, 32 nt, Human
ggcgcgcgggcugaggccgcccgggauggcgc

SEQ ID NO: 459350 - RNA, 32 nt, Human
ggcgcgcggucccagcccucccgcucggccgg

SEQ ID NO: 459351 - RNA, 32 nt, Human
ggcgcgcgugagcucgggcugcccggccgggc

SEQ ID NO: 459352 - RNA, 32 nt, Human
ggcgcgcucucauucauagcagccucuucaug

SEQ ID NO: 459353 - RNA, 32 nt, Human
ggcgcgcugagggaaaaccuugcugaagcugu

SEQ ID NO: 459354 - RNA, 32 nt, Human
ggcgcgcugcuccuuccgccucgcggaccccg

SEQ ID NO: 459355 - RNA, 32 nt, Human
ggcgcggacucugccagccccagcuucagccc

SEQ ID NO: 459356 - RNA, 21 nt, Human
ggcgcggagcagagucccggg

SEQ ID NO: 459357 - RNA, 20 nt, Human
ggcgcggagcucgggcggcc

SEQ ID NO: 459358 - RNA, 32 nt, Human
ggcgcggagcuugggagcggagcccaggccgu

SEQ ID NO: 459359 - RNA, 21 nt, Human
ggcgcggaggagcgggcggcc

SEQ ID NO: 459360 - RNA, 32 nt, Human
ggcgcggaggcagaaggcgguguccgaguagg

SEQ ID NO: 459361 - RNA, 24 nt, Human
ggcgcggaggcuccccgggcggcu

SEQ ID NO: 459362 - RNA, 32 nt, Human
ggcgcggaguuccaggucgagcaguuaggccg

SEQ ID NO: 459363 - RNA, 26 nt, Human
ggcgcggcagccaggaacccgacuac

SEQ ID NO: 459364 - RNA, 16 nt, Human
ggcgcggcaggggggc

SEQ ID NO: 459365 - RNA, 22 nt, Human
ggcgcggccaccgcauccgugg

SEQ ID NO: 459366 - RNA, 32 nt, Human
ggcgcggccgccgugcuggacauggugcggcc

SEQ ID NO: 459367 - RNA, 20 nt, Human
ggcgcggccucagaguccca

SEQ ID NO: 459368 - RNA, 24 nt, Human
ggcgcggccugagcgcccggcccg

SEQ ID NO: 459369 - RNA, 22 nt, Human
ggcgcggcgcccagagcucagg

SEQ ID NO: 459370 - RNA, 25 nt, Human
ggcgcggcggcaggcgccccaccac

SEQ ID NO: 459371 - RNA, 32 nt, Human
ggcgcggcggcugggagccgggcgcgggcggc

SEQ ID NO: 459372 - RNA, 32 nt, Human
ggcgcggcguagccccgcucuccugagagcuc

SEQ ID NO: 459373 - RNA, 32 nt, Human
ggcgcggcucgcagcggcgggugcaggggcga

SEQ ID NO: 459374 - RNA, 18 nt, Human
ggcgcggcugccccgggg

SEQ ID NO: 459375 - RNA, 32 nt, Human
ggcgcgggagacauuguauacacaucaugcua

SEQ ID NO: 459376 - RNA, 32 nt, Human
ggcgcgggagagagcgcgggcggccgccgggg

SEQ ID NO: 459377 - RNA, 19 nt, Human
ggcgcgggagccagagcgg

SEQ ID NO: 459378 - RNA, 32 nt, Human
ggcgcgggaggaagaggaggaggaggaggagg

SEQ ID NO: 459379 - RNA, 32 nt, Human
ggcgcgggaggcggcagccgcagcgaggaggc

SEQ ID NO: 459380 - RNA, 32 nt, Human
ggcgcgggagugagagagggugagucagccac

SEQ ID NO: 459381 - RNA, 31 nt, Human
ggcgcgggaguuggcauucggugguccuggc

SEQ ID NO: 459382 - RNA, 32 nt, Human
ggcgcgggcagccucuugauucuuuuacaguc

SEQ ID NO: 459383 - RNA, 23 nt, Human
ggcgcgggcgggcgcaggcggcc

SEQ ID NO: 459384 - RNA, 20 nt, Human
ggcgcgggcgugcgggcggc

SEQ ID NO: 459385 - RNA, 23 nt, Human
ggcgcgggcucggcggagcggcc

SEQ ID NO: 459386 - RNA, 32 nt, Human
ggcgcgggcuuccuuccguggccguggacggg

SEQ ID NO: 459387 - RNA, 21 nt, Human
ggcgcgggcuugccccgggcc

SEQ ID NO: 459388 - RNA, 32 nt, Human
ggcgcggggacgaagcagcacagccaucgggg

SEQ ID NO: 459389 - RNA, 24 nt, Human
ggcgcggggagagcugggcgggcc

SEQ ID NO: 459390 - RNA, 22 nt, Human
ggcgcggggagcugagcugccu

SEQ ID NO: 459391 - RNA, 32 nt, Human
ggcgcggggagcugugggcggcagcugcgucu

SEQ ID NO: 459392 - RNA, 32 nt, Human
ggcgcggggcacacaggccggccggcagccgc

SEQ ID NO: 459393 - RNA, 19 nt, Human
ggcgcggggcaggggcggc

SEQ ID NO: 459394 - RNA, 19 nt, Human
ggcgcggggccacgcagcc

SEQ ID NO: 459395 - RNA, 21 nt, Human
ggcgcggggcccgcugcggcc

SEQ ID NO: 459396 - RNA, 23 nt, Human
ggcgcggggcccugcgguagccu

SEQ ID NO: 459397 - RNA, 22 nt, Human
ggcgcggggccugcgggcggcu

SEQ ID NO: 459398 - RNA, 22 nt, Human
ggcgcggggcgcgaugagcggc

SEQ ID NO: 459399 - RNA, 21 nt, Human
ggcgcggggcgggcggcggcc

SEQ ID NO: 459400 - RNA, 18 nt, Human
ggcgcggggcucggcggc

SEQ ID NO: 459401 - RNA, 21 nt, Human
ggcgcggggcugacgcggacc

SEQ ID NO: 459402 - RNA, 16 nt, Human
ggcgcggggcuggcug

SEQ ID NO: 459403 - RNA, 21 nt, Human
ggcgcggggcugguagcggcc

SEQ ID NO: 459404 - RNA, 24 nt, Human
ggcgcggggggugcagggcaggcc

SEQ ID NO: 459405 - RNA, 23 nt, Human
ggcgcggggugggccuucgggga

SEQ ID NO: 459406 - RNA, 20 nt, Human
ggcgcgggugcugcgccuag

SEQ ID NO: 459407 - RNA, 22 nt, Human
ggcgcgguggcucaagccugua

SEQ ID NO: 459408 - RNA, 22 nt, Human
ggcgcgguggcucacaccugua

SEQ ID NO: 459409 - RNA, 22 nt, Human
ggcgcgguggcucacaccugug

SEQ ID NO: 459410 - RNA, 22 nt, Human
ggcgcgguggcucaggccugua

SEQ ID NO: 459411 - RNA, 22 nt, Human
ggcgcgguggcucaugccugua

SEQ ID NO: 459412 - RNA, 22 nt, Human
ggcgcgguggcucgugccugua

SEQ ID NO: 459413 - RNA, 22 nt, Human
ggcgcgguggcucuugccugua

SEQ ID NO: 459414 - RNA, 22 nt, Human
ggcgcggugguucaugccugua

SEQ ID NO: 459415 - RNA, 32 nt, Human
ggcgcguccggcggaggguugaggggagcggg

SEQ ID NO: 459416 - RNA, 22 nt, Human
ggcgcgucggcuuuggcggcuc

SEQ ID NO: 459417 - RNA, 32 nt, Human
ggcgcgugacugguugagcgggcaggccagcc

SEQ ID NO: 459418 - RNA, 32 nt, Human
ggcgcgugcagcccugguucugcagggaacag

SEQ ID NO: 459419 - RNA, 32 nt, Human
ggcgcgugccuauaaucccagcuacucgggag

SEQ ID NO: 459420 - RNA, 32 nt, Human
ggcgcgugccuguaaucccagcuacuaggggg

SEQ ID NO: 459421 - RNA, 32 nt, Human
ggcgcgugccuguaaucccagcuacucgggaa

SEQ ID NO: 459422 - RNA, 32 nt, Human
ggcgcgugccuguaaucccagcuacuugggag

SEQ ID NO: 459423 - RNA, 32 nt, Human
ggcgcgugccuguaauccuagcuacucaggag

SEQ ID NO: 459424 - RNA, 24 nt, Human
ggcucaggugauccucccaccuca

SEQ ID NO: 459425 - RNA, 24 nt, Human
ggcucaggugauccucccaucuca

SEQ ID NO: 459426 - RNA, 24 nt, Human
ggcucaggugauccucuugccuca

SEQ ID NO: 459427 - RNA, 24 nt, Human
ggcucaggugauucucccaucuca

SEQ ID NO: 459428 - RNA, 24 nt, Human
ggcucaggugauucucccgccuca

SEQ ID NO: 459429 - RNA, 32 nt, Human
ggcucaggugcgcuucucccaccuggcagcuc

SEQ ID NO: 459430 - RNA, 32 nt, Human
ggcucagguucacacuucugcuuugagaccag

SEQ ID NO: 459431 - RNA, 18 nt, Human
ggcucagguugggucuag

SEQ ID NO: 459432 - RNA, 32 nt, Human
ggcucaguaaaugacagaacuauuuuucauua

SEQ ID NO: 459433 - RNA, 32 nt, Human
ggcucaguaccgcuccagcagccugggccccg

SEQ ID NO: 459434 - RNA, 23 nt, Human
ggcucagucggacugggguccag

SEQ ID NO: 459435 - RNA, 32 nt, Human
ggcucagugcaaccuccccaccccgggcucca

SEQ ID NO: 459436 - RNA, 24 nt, Human
ggcucagugcaaccuccgccuccu

SEQ ID NO: 459437 - RNA, 32 nt, Human
ggcucagugcaaccuccgccuccuggguucaa

SEQ ID NO: 459438 - RNA, 23 nt, Human
ggcucagugcaaccucugccucc

SEQ ID NO: 459439 - RNA, 32 nt, Human
ggcucagugcaaccucugccucccagguugaa

SEQ ID NO: 459440 - RNA, 32 nt, Human
ggcucagugcaaccuugaccuccugggcucaa

SEQ ID NO: 459441 - RNA, 32 nt, Human
ggcucagugcaauccgccucccagguucaagc

SEQ ID NO: 459442 - RNA, 32 nt, Human
ggcucagugcagccucaaacucuugggcucaa

SEQ ID NO: 459443 - RNA, 18 nt, Human
ggcucagugccucacaga

SEQ ID NO: 459444 - RNA, 17 nt, Human
ggcucaguggcuccaga

SEQ ID NO: 459445 - RNA, 32 nt, Human
ggcucagugggaaacaaaggaagcacuugggc

SEQ ID NO: 459446 - RNA, 32 nt, Human
ggcucaguucagcagagcuggaguugaacaac

SEQ ID NO: 459447 - RNA, 32 nt, Human
ggcucaguuggacuccauagcagaugaaaugg

SEQ ID NO: 459448 - RNA, 32 nt, Human
ggcucaguugucuggggcugggagaaguuccc

SEQ ID NO: 459449 - RNA, 19 nt, Human
ggcucauaauagggcccag

SEQ ID NO: 459450 - RNA, 32 nt, Human
ggcucauaauguccgaccagagguggacaaag

SEQ ID NO: 459451 - RNA, 32 nt, Human
ggcucauaccuguaaaucccagcacuuuggga

SEQ ID NO: 459452 - RNA, 20 nt, Human
ggcucauaccuguaauccca

SEQ ID NO: 459453 - RNA, 32 nt, Human
ggcucauaccuguaaucccagcacuuugggaa

SEQ ID NO: 459454 - RNA, 32 nt, Human
ggcucauaccuguaaucccagcacuuugggag

SEQ ID NO: 459455 - RNA, 32 nt, Human
ggcucauaccuguaaucccagcaguuugggag

SEQ ID NO: 459456 - RNA, 32 nt, Human
ggcucauaccuguaaucccggcacuuugggag

SEQ ID NO: 459457 - RNA, 32 nt, Human
ggcucauaccuguaaugccagcacuuugggag

SEQ ID NO: 459458 - RNA, 22 nt, Human
ggcucauaccuguuaauuccag

SEQ ID NO: 459459 - RNA, 32 nt, Human
ggcucauaccuguuaauuccagcacuuuggga

SEQ ID NO: 459460 - RNA, 32 nt, Human
ggcucauaccuguuauaccagcacuuugggag

SEQ ID NO: 459461 - RNA, 20 nt, Human
ggcucauaccuuuaauccca

SEQ ID NO: 459462 - RNA, 21 nt, Human
ggcucauaccuuuaaucccag

SEQ ID NO: 459463 - RNA, 32 nt, Human
ggcucauacguguaaucccaguacuuuggaag

SEQ ID NO: 459464 - RNA, 32 nt, Human
ggcucauagcaagcuccgccuccuggguucau

SEQ ID NO: 459465 - RNA, 32 nt, Human
ggcucauaucugugauuccagcacuuugagag

SEQ ID NO: 459466 - RNA, 32 nt, Human
ggcucauaugugaaggcacguucuccagccau

SEQ ID NO: 459467 - RNA, 24 nt, Human
ggcucauauuucuuuucuaucuca

SEQ ID NO: 459468 - RNA, 24 nt, Human
ggcucauauuucuuuucuuucuca

SEQ ID NO: 459469 - RNA, 32 nt, Human
ggcucauauuucuuuucuuucucaucuugaug

SEQ ID NO: 459470 - RNA, 32 nt, Human
ggcucaucacaaccucugcuuccuggguucaa

SEQ ID NO: 459471 - RNA, 32 nt, Human
ggcucaucacgaccuucgccucccagguucaa

SEQ ID NO: 459472 - RNA, 32 nt, Human
ggcucaucagacugaaacuugcucacagacuu

SEQ ID NO: 459473 - RNA, 32 nt, Human
ggcucaucccuguaaucccagcacuuaaggag

SEQ ID NO: 459474 - RNA, 32 nt, Human
ggcucaucccuguaaucccagugcuuugggag

SEQ ID NO: 459475 - RNA, 32 nt, Human
ggcucaucccuguaauuccagcacuuuggaag

SEQ ID NO: 459476 - RNA, 32 nt, Human
ggcucauccuaccuguuaggagcagguagggc

SEQ ID NO: 459477 - RNA, 23 nt, Human
ggcucaucguaaccuccaccucc

SEQ ID NO: 459478 - RNA, 32 nt, Human
ggcucaucguaaccuccaccucccggguucaa

SEQ ID NO: 459479 - RNA, 32 nt, Human
ggcucaucucaaaauccugggcucaagugauc

SEQ ID NO: 459480 - RNA, 24 nt, Human
ggcucaucuuuucucuccccugcc

SEQ ID NO: 459481 - RNA, 32 nt, Human
ggcucaucuuuucucuccccugccuucuccuc

SEQ ID NO: 459482 - RNA, 32 nt, Human
ggcucaugacuguaaucccaacacuuuggagg

SEQ ID NO: 459483 - RNA, 32 nt, Human
ggcucaugacuguaaucccagcacuuugggag

SEQ ID NO: 459484 - RNA, 32 nt, Human
ggcucaugacuguaaucccaguacuuugggaa

SEQ ID NO: 459485 - RNA, 32 nt, Human
ggcucaugcaauccuccugccuuggccuccca

SEQ ID NO: 459486 - RNA, 32 nt, Human
ggcucaugcauguaaucccagcacuuugggag

SEQ ID NO: 459487 - RNA, 32 nt, Human
ggcucaugccacaggaucccagcacuuuggga

SEQ ID NO: 459488 - RNA, 32 nt, Human
ggcucaugccagcaauccuagcacuuugggag

SEQ ID NO: 459489 - RNA, 32 nt, Human
ggcucaugccaguuaucccagcacuuugggag

SEQ ID NO: 459490 - RNA, 20 nt, Human
ggcucaugcccauaauccca

SEQ ID NO: 459491 - RNA, 32 nt, Human
ggcucaugcccauaaucccagcacuuugggag

SEQ ID NO: 459492 - RNA, 32 nt, Human
ggcucaugcccauaaucccagcccuuugggaa

SEQ ID NO: 459493 - RNA, 20 nt, Human
ggcucaugcccguaauccca

SEQ ID NO: 459494 - RNA, 32 nt, Human
ggcucaugcccguaaucccagcacuuugggag

SEQ ID NO: 459495 - RNA, 32 nt, Human
ggcucaugcccguaaucucagcacuuugggag

SEQ ID NO: 459496 - RNA, 20 nt, Human
ggcucaugccgauaauccca

SEQ ID NO: 459497 - RNA, 20 nt, Human
ggcucaugccuacaauccca

SEQ ID NO: 459498 - RNA, 20 nt, Human
ggcucaugccuauaacccca

SEQ ID NO: 459499 - RNA, 19 nt, Human
ggcucaugccuauaauccc

SEQ ID NO: 459500 - RNA, 20 nt, Human
ggcucaugccuauaauccca

SEQ ID NO: 459501 - RNA, 32 nt, Human
ggcucaugccuauaaucccaacacuuuggaag

SEQ ID NO: 459502 - RNA, 22 nt, Human
ggcucaugccuauaaucccagc

SEQ ID NO: 459503 - RNA, 32 nt, Human
ggcucaugccuauaaucccagcacuuuaggag

SEQ ID NO: 459504 - RNA, 32 nt, Human
ggcucaugccuauaaucccagcacuuugagag

SEQ ID NO: 459505 - RNA, 32 nt, Human
ggcucaugccuauaaucccagcacuuuggcag

SEQ ID NO: 459506 - RNA, 32 nt, Human
ggcucaugccuauaaucccagcacuuugggaa

SEQ ID NO: 459507 - RNA, 32 nt, Human
ggcucaugccuauaaucccagcacuuugggag

SEQ ID NO: 459508 - RNA, 32 nt, Human
ggcucaugccuauaaucccagcacuuuuggag

SEQ ID NO: 459509 - RNA, 32 nt, Human
ggcucaugccuauaaucccagcucuuagggag

SEQ ID NO: 459510 - RNA, 32 nt, Human
ggcucaugccuauaaucccagugcuuugggaa

SEQ ID NO: 459511 - RNA, 20 nt, Human
ggcucaugccuauaauccua

SEQ ID NO: 459512 - RNA, 32 nt, Human
ggcucaugccuauaauccuagcacuuugagag

SEQ ID NO: 459513 - RNA, 32 nt, Human
ggcucaugccuauaauccuagcacuuugggag

SEQ ID NO: 459514 - RNA, 20 nt, Human
ggcucaugccuauaaucuca

SEQ ID NO: 459515 - RNA, 32 nt, Human
ggcucaugccuauaaucucagcacuuuuggga

SEQ ID NO: 459516 - RNA, 32 nt, Human
ggcucaugccuauaaucuuagcacuuugggag

SEQ ID NO: 459517 - RNA, 20 nt, Human
ggcucaugccuauaauucca

SEQ ID NO: 459518 - RNA, 32 nt, Human
ggcucaugccuauaauuccagcacuuuggagg

SEQ ID NO: 459519 - RNA, 32 nt, Human
ggcucaugccuauaauuccagcacuuugggag

SEQ ID NO: 459520 - RNA, 32 nt, Human
ggcucaugccuauagucccagcacuuugggag

SEQ ID NO: 459521 - RNA, 32 nt, Human
ggcucaugccuauauuccagcacuuugggagg

SEQ ID NO: 459522 - RNA, 32 nt, Human
ggcucaugccuauauucccagcacuuugagag

SEQ ID NO: 459523 - RNA, 32 nt, Human
ggcucaugccuauuaucccagcacuuugggag

SEQ ID NO: 459524 - RNA, 21 nt, Human
ggcucaugccuccaaucccag

SEQ ID NO: 459525 - RNA, 21 nt, Human
ggcucaugccucuaaucccag

SEQ ID NO: 459526 - RNA, 32 nt, Human
ggcucaugccucuaaucccagcacuuugggag

SEQ ID NO: 459527 - RNA, 32 nt, Human
ggcucaugccugaaauccuagcacuuugggaa

SEQ ID NO: 459528 - RNA, 20 nt, Human
ggcucaugccugaaucucag

SEQ ID NO: 459529 - RNA, 32 nt, Human
ggcucaugccugaaucucagcacuuugggagg

SEQ ID NO: 459530 - RNA, 32 nt, Human
ggcucaugccugcaaucccagcacuguagaag

SEQ ID NO: 459531 - RNA, 32 nt, Human
ggcucaugccugcaaucccagcacuuugggag

SEQ ID NO: 459532 - RNA, 32 nt, Human
ggcucaugccugcaauuccagcacuuugggag

SEQ ID NO: 459533 - RNA, 32 nt, Human
ggcucaugccuggaaucccagcacuuugagag

SEQ ID NO: 459534 - RNA, 32 nt, Human
ggcucaugccuggaaucccagcacuuugggag

SEQ ID NO: 459535 - RNA, 21 nt, Human
ggcucaugccuguaaacccag

SEQ ID NO: 459536 - RNA, 32 nt, Human
ggcucaugccuguaaacccagcacuuugggag

SEQ ID NO: 459537 - RNA, 32 nt, Human
ggcucaugccuguaaaucccagcacuuuggua

SEQ ID NO: 459538 - RNA, 20 nt, Human
ggcucaugccuguaacccca

SEQ ID NO: 459539 - RNA, 32 nt, Human
ggcucaugccuguaaccccagcacuuugggag

SEQ ID NO: 459540 - RNA, 20 nt, Human
ggcucaugccuguaaccuca

SEQ ID NO: 459541 - RNA, 22 nt, Human
ggcucaugccuguaaccucagc

SEQ ID NO: 459542 - RNA, 32 nt, Human
ggcucaugccuguaaccucagcacuuugggag

SEQ ID NO: 459543 - RNA, 20 nt, Human
ggcucaugccuguaagccca

SEQ ID NO: 459544 - RNA, 32 nt, Human
ggcucaugccuguaagcccaacacuuugggag

SEQ ID NO: 459545 - RNA, 21 nt, Human
ggcucaugccuguaagcccag

SEQ ID NO: 459546 - RNA, 32 nt, Human
ggcucaugccuguaagcccagcacuuugggag

SEQ ID NO: 459547 - RNA, 32 nt, Human
ggcucaugccuguaauagcagcuacucgggag

SEQ ID NO: 459548 - RNA, 32 nt, Human
ggcucaugccuguaaucaaucccagcacuuug

SEQ ID NO: 459549 - RNA, 32 nt, Human
ggcucaugccuguaauccaagcauuuugagag

SEQ ID NO: 459550 - RNA, 20 nt, Human
ggcucaugccuguaauccag

SEQ ID NO: 459551 - RNA, 32 nt, Human
ggcucaugccuguaauccagcacuuugggagg

SEQ ID NO: 459552 - RNA, 32 nt, Human
ggcucaugccuguaauccaguacuuuaggagg

SEQ ID NO: 459553 - RNA, 20 nt, Human
ggcucaugccuguaauccca

SEQ ID NO: 459554 - RNA, 32 nt, Human
ggcucaugccuguaaucccaaaacuuugggag

SEQ ID NO: 459555 - RNA, 32 nt, Human
ggcucaugccuguaaucccaacacucugggag

SEQ ID NO: 459556 - RNA, 32 nt, Human
ggcucaugccuguaaucccaacacuuagggag

SEQ ID NO: 459557 - RNA, 32 nt, Human
ggcucaugccuguaaucccaacacuuagggug

SEQ ID NO: 459558 - RNA, 32 nt, Human
ggcucaugccuguaaucccaacacuuugagaa

SEQ ID NO: 459559 - RNA, 32 nt, Human
ggcucaugccuguaaucccaacacuuugagag

SEQ ID NO: 459560 - RNA, 32 nt, Human
ggcucaugccuguaaucccaacacuuugggag

SEQ ID NO: 459561 - RNA, 32 nt, Human
ggcucaugccuguaaucccaacacuuuuggga

SEQ ID NO: 459562 - RNA, 32 nt, Human
ggcucaugccuguaaucccaacauucugggag

SEQ ID NO: 459563 - RNA, 32 nt, Human
ggcucaugccuguaaucccaccacugagguca

SEQ ID NO: 459564 - RNA, 32 nt, Human
ggcucaugccuguaaucccaccacuuugggag

SEQ ID NO: 459565 - RNA, 32 nt, Human
ggcucaugccuguaaucccaccacuuugggug

SEQ ID NO: 459566 - RNA, 21 nt, Human
ggcucaugccuguaaucccag

SEQ ID NO: 459567 - RNA, 32 nt, Human
ggcucaugccuguaaucccagaacuuugggag

SEQ ID NO: 459568 - RNA, 32 nt, Human
ggcucaugccuguaaucccagaauuuugggag

SEQ ID NO: 459569 - RNA, 22 nt, Human
ggcucaugccuguaaucccagc

SEQ ID NO: 459570 - RNA, 32 nt, Human
ggcucaugccuguaaucccagcacauugggaa

SEQ ID NO: 459571 - RNA, 32 nt, Human
ggcucaugccuguaaucccagcacccugggag

SEQ ID NO: 459572 - RNA, 32 nt, Human
ggcucaugccuguaaucccagcaccuugaagg

SEQ ID NO: 459573 - RNA, 32 nt, Human
ggcucaugccuguaaucccagcaccuugggag

SEQ ID NO: 459574 - RNA, 32 nt, Human
ggcucaugccuguaaucccagcacuaugggag

SEQ ID NO: 459575 - RNA, 32 nt, Human
ggcucaugccuguaaucccagcacucuggaag

SEQ ID NO: 459576 - RNA, 32 nt, Human
ggcucaugccuguaaucccagcacucugggag

SEQ ID NO: 459577 - RNA, 32 nt, Human
ggcucaugccuguaaucccagcacuguaggcg

SEQ ID NO: 459578 - RNA, 32 nt, Human
ggcucaugccuguaaucccagcacugugggag

SEQ ID NO: 459579 - RNA, 32 nt, Human
ggcucaugccuguaaucccagcacuuauuuua

SEQ ID NO: 459580 - RNA, 32 nt, Human
ggcucaugccuguaaucccagcacuucaggag

SEQ ID NO: 459581 - RNA, 32 nt, Human
ggcucaugccuguaaucccagcacuuggagag

SEQ ID NO: 459582 - RNA, 32 nt, Human
ggcucaugccuguaaucccagcacuugggagg

SEQ ID NO: 459583 - RNA, 32 nt, Human
ggcucaugccuguaaucccagcacuuggggag

SEQ ID NO: 459584 - RNA, 32 nt, Human
ggcucaugccuguaaucccagcacuuucaaag

SEQ ID NO: 459585 - RNA, 32 nt, Human
ggcucaugccuguaaucccagcacuuucagag

SEQ ID NO: 459586 - RNA, 32 nt, Human
ggcucaugccuguaaucccagcacuuucggag

SEQ ID NO: 459587 - RNA, 32 nt, Human
ggcucaugccuguaaucccagcacuuugagag

SEQ ID NO: 459588 - RNA, 32 nt, Human
ggcucaugccuguaaucccagcacuuugauag

SEQ ID NO: 459589 - RNA, 32 nt, Human
ggcucaugccuguaaucccagcacuuugcgag

SEQ ID NO: 459590 - RNA, 32 nt, Human
ggcucaugccuguaaucccagcacuuuggaag

SEQ ID NO: 459591 - RNA, 32 nt, Human
ggcucaugccuguaaucccagcacuuuggcag

SEQ ID NO: 459592 - RNA, 32 nt, Human
ggcucaugccuguaaucccagcacuuugggaa

SEQ ID NO: 459593 - RNA, 32 nt, Human
ggcucaugccuguaaucccagcacuuugggag

SEQ ID NO: 459594 - RNA, 32 nt, Human
ggcucaugccuguaaucccagcacuuugggau

SEQ ID NO: 459595 - RNA, 32 nt, Human
ggcucaugccuguaaucccagcacuuugggga

SEQ ID NO: 459596 - RNA, 32 nt, Human
ggcucaugccuguaaucccagcacuuuggggg

SEQ ID NO: 459597 - RNA, 32 nt, Human
ggcucaugccuguaaucccagcacuuugguag

SEQ ID NO: 459598 - RNA, 32 nt, Human
ggcucaugccuguaaucccagcacuuuucgga

SEQ ID NO: 459599 - RNA, 32 nt, Human
ggcucaugccuguaaucccagcacuuuugagg

SEQ ID NO: 459600 - RNA, 32 nt, Human
ggcucaugccuguaaucccagcacuuuuggag

SEQ ID NO: 459601 - RNA, 32 nt, Human
ggcucaugccuguaaucccagcauuuugagag

SEQ ID NO: 459602 - RNA, 32 nt, Human
ggcucaugccuguaaucccagcauuuuggaag

SEQ ID NO: 459603 - RNA, 32 nt, Human
ggcucaugccuguaaucccagcauuuugggag

SEQ ID NO: 459604 - RNA, 32 nt, Human
ggcucaugccuguaaucccagcauuuugguag

SEQ ID NO: 459605 - RNA, 32 nt, Human
ggcucaugccuguaaucccagcccuuugggag

SEQ ID NO: 459606 - RNA, 32 nt, Human
ggcucaugccuguaaucccagcgcuuugggag

SEQ ID NO: 459607 - RNA, 23 nt, Human
ggcucaugccuguaaucccagcu

SEQ ID NO: 459608 - RNA, 32 nt, Human
ggcucaugccuguaaucccagcuacgcaggag

SEQ ID NO: 459609 - RNA, 32 nt, Human
ggcucaugccuguaaucccagcuacucaggag

SEQ ID NO: 459610 - RNA, 32 nt, Human
ggcucaugccuguaaucccaggacuuugggag

SEQ ID NO: 459611 - RNA, 32 nt, Human
ggcucaugccuguaaucccaggacuuugguag

SEQ ID NO: 459612 - RNA, 32 nt, Human
ggcucaugccuguaaucccaguacuuugggag

SEQ ID NO: 459613 - RNA, 32 nt, Human
ggcucaugccuguaaucccagugcuuugggag

SEQ ID NO: 459614 - RNA, 32 nt, Human
ggcucaugccuguaaucccgacacuuugggag

SEQ ID NO: 459615 - RNA, 32 nt, Human
ggcucaugccuguaaucccggcacuuugggag

SEQ ID NO: 459616 - RNA, 32 nt, Human
ggcucaugccuguaaucccugcacuuugggag

SEQ ID NO: 459617 - RNA, 32 nt, Human
ggcucaugccuguaaucccugcacuuugggau

SEQ ID NO: 459618 - RNA, 32 nt, Human
ggcucaugccuguaauccgagcacuucgggaa

SEQ ID NO: 459619 - RNA, 32 nt, Human
ggcucaugccuguaauccgagcacuuugggag

SEQ ID NO: 459620 - RNA, 32 nt, Human
ggcucaugccuguaauccuaacacuuugggag

SEQ ID NO: 459621 - RNA, 32 nt, Human
ggcucaugccuguaauccuagcacuuugagag

SEQ ID NO: 459622 - RNA, 32 nt, Human
ggcucaugccuguaauccuagcacuuuggaag

SEQ ID NO: 459623 - RNA, 32 nt, Human
ggcucaugccuguaauccuagcacuuugggaa

SEQ ID NO: 459624 - RNA, 32 nt, Human
ggcucaugccuguaauccuagcacuuugggag

SEQ ID NO: 459625 - RNA, 32 nt, Human
ggcucaugccuguaauccuagcacuuuggggg

SEQ ID NO: 459626 - RNA, 32 nt, Human
ggcucaugccuguaauccuagcacuuugggug

SEQ ID NO: 459627 - RNA, 32 nt, Human
ggcucaugccuguaauccuagcagcuugggag

SEQ ID NO: 459628 - RNA, 32 nt, Human
ggcucaugccuguaauccuagcauuuugggag

SEQ ID NO: 459629 - RNA, 32 nt, Human
ggcucaugccuguaauccuggcacuuugggag

SEQ ID NO: 459630 - RNA, 32 nt, Human
ggcucaugccuguaaucgcagcacuuugggag

SEQ ID NO: 459631 - RNA, 32 nt, Human
ggcucaugccuguaaucguagcacuuugagag

SEQ ID NO: 459632 - RNA, 32 nt, Human
ggcucaugccuguaaucucaacacuuugggaa

SEQ ID NO: 459633 - RNA, 32 nt, Human
ggcucaugccuguaaucucagaacuuugggag

SEQ ID NO: 459634 - RNA, 32 nt, Human
ggcucaugccuguaaucucagcacuguaggag

SEQ ID NO: 459635 - RNA, 32 nt, Human
ggcucaugccuguaaucucagcacuuugagag

SEQ ID NO: 459636 - RNA, 32 nt, Human
ggcucaugccuguaaucucagcacuuugggag

SEQ ID NO: 459637 - RNA, 32 nt, Human
ggcucaugccuguaaucucagcuacuuggcug

SEQ ID NO: 459638 - RNA, 32 nt, Human
ggcucaugccuguaaucucaguacauugggag

SEQ ID NO: 459639 - RNA, 32 nt, Human
ggcucaugccuguaaucucaguacuuugggag

SEQ ID NO: 459640 - RNA, 32 nt, Human
ggcucaugccuguaaucugagcacuuugggag

SEQ ID NO: 459641 - RNA, 32 nt, Human
ggcucaugccuguaaucuuaucacuuugggag

SEQ ID NO: 459642 - RNA, 32 nt, Human
ggcucaugccuguaaugccagcacuuugccaa

SEQ ID NO: 459643 - RNA, 32 nt, Human
ggcucaugccuguaauuccagcacuuuaggag

SEQ ID NO: 459644 - RNA, 32 nt, Human
ggcucaugccuguaauuccagcacuuugggag

SEQ ID NO: 459645 - RNA, 32 nt, Human
ggcucaugccuguaauuccggcacuuugggag

SEQ ID NO: 459646 - RNA, 32 nt, Human
ggcucaugccuguaauuucaguacuuugggag

SEQ ID NO: 459647 - RNA, 32 nt, Human
ggcucaugccuguagucccagcacucgggaag

SEQ ID NO: 459648 - RNA, 32 nt, Human
ggcucaugccuguagucccagcacucuguggg

SEQ ID NO: 459649 - RNA, 32 nt, Human
ggcucaugccuguagucccagcacuuugggag

SEQ ID NO: 459650 - RNA, 32 nt, Human
ggcucaugccuguagucccagcacuuuggggg

SEQ ID NO: 459651 - RNA, 32 nt, Human
ggcucaugccuguagucccagcuacucuggag

SEQ ID NO: 459652 - RNA, 32 nt, Human
ggcucaugccuguagucccagcuacuugggag

SEQ ID NO: 459653 - RNA, 32 nt, Human
ggcucaugccuguagucccugcuacuugggag

SEQ ID NO: 459654 - RNA, 32 nt, Human
ggcucaugccuguaguccuagcacuuugggag

SEQ ID NO: 459655 - RNA, 32 nt, Human
ggcucaugccuguaguuccagcgcuuugggag

SEQ ID NO: 459656 - RNA, 32 nt, Human
ggcucaugccuguauaaucccagcacuuuggg

SEQ ID NO: 459657 - RNA, 32 nt, Human
ggcucaugccuguauccagcacuuugggaggc

SEQ ID NO: 459658 - RNA, 32 nt, Human
ggcucaugccuguaucccagcacuuugggagg

SEQ ID NO: 459659 - RNA, 32 nt, Human
ggcucaugccuguauucccaccacuuugggag

SEQ ID NO: 459660 - RNA, 32 nt, Human
ggcucaugccuguauucccaguacuuugggag

SEQ ID NO: 459661 - RNA, 32 nt, Human
ggcucaugccugucaucccagcacuuugggaa

SEQ ID NO: 459662 - RNA, 32 nt, Human
ggcucaugccugucaucccagcacuuugggag

SEQ ID NO: 459663 - RNA, 32 nt, Human
ggcucaugccugucaucccagcauuugggagg

SEQ ID NO: 459664 - RNA, 32 nt, Human
ggcucaugccugugaucccaacacuuugggag

SEQ ID NO: 459665 - RNA, 32 nt, Human
ggcucaugccugugaucccagcacuuugggag

SEQ ID NO: 459666 - RNA, 32 nt, Human
ggcucaugccugugaucccagcacuuugggug

SEQ ID NO: 459667 - RNA, 32 nt, Human
ggcucaugccugugaucccagcuacucgggag

SEQ ID NO: 459668 - RNA, 32 nt, Human
ggcucaugccugugauccuagcacuuugcgag

SEQ ID NO: 459669 - RNA, 32 nt, Human
ggcucaugccugugauccuagcacuuugggag

SEQ ID NO: 459670 - RNA, 32 nt, Human
ggcucaugccugugaucgcagcacuuugggag

SEQ ID NO: 459671 - RNA, 32 nt, Human
ggcucaugccuguggucccaacauuuugggag

SEQ ID NO: 459672 - RNA, 32 nt, Human
ggcucaugccuguggucccagcacuuugggag

SEQ ID NO: 459673 - RNA, 32 nt, Human
ggcucaugccuguggucccagcgcuuugggag

SEQ ID NO: 459674 - RNA, 32 nt, Human
ggcucaugccuguggucccagcuacuugagag

SEQ ID NO: 459675 - RNA, 32 nt, Human
ggcucaugccuguuaucccaacacuuugggag

SEQ ID NO: 459676 - RNA, 32 nt, Human
ggcucaugccuuaaucccagcacuuugggagg

SEQ ID NO: 459677 - RNA, 32 nt, Human
ggcucaugccuuaaucccagcacuuuuggagg

SEQ ID NO: 459678 - RNA, 21 nt, Human
ggcucaugccuuuaaucccag

SEQ ID NO: 459679 - RNA, 32 nt, Human
ggcucaugccuuuaaucccagcacuuugggag

SEQ ID NO: 459680 - RNA, 32 nt, Human
ggcucaugccuuuaaucccagcauuuugggag

SEQ ID NO: 459681 - RNA, 32 nt, Human
ggcucaugcguguaaucccagcacuuugggag

SEQ ID NO: 459682 - RNA, 32 nt, Human
ggcucaugcucuggggcagcagcuccaucguu

SEQ ID NO: 459683 - RNA, 32 nt, Human
ggcucaugcucugggucagcagcuccaugguu

SEQ ID NO: 459684 - RNA, 32 nt, Human
ggcucaugcuuguaaucccaacacuuugggaa

SEQ ID NO: 459685 - RNA, 32 nt, Human
ggcucaugcuuguaaucccagcacuuggggag

SEQ ID NO: 459686 - RNA, 32 nt, Human
ggcucaugcuuguaaucccagcacuuugggaa

SEQ ID NO: 459687 - RNA, 32 nt, Human
ggcucaugcuuguaaucccagcacuuugggag

SEQ ID NO: 459688 - RNA, 32 nt, Human
ggcucaugcuuguaaucccagcacuuugguag

SEQ ID NO: 459689 - RNA, 32 nt, Human
ggcucaugcuuguaaucccaguacuuuaggag

SEQ ID NO: 459690 - RNA, 32 nt, Human
ggcucaugcuuguaauccuagcacuuuuugag

SEQ ID NO: 459691 - RNA, 32 nt, Human
ggcucaugcuuguaaucucagcacuuugggag

SEQ ID NO: 459692 - RNA, 32 nt, Human
ggcucaugcuuguaauuccagcacuguggaag

SEQ ID NO: 459693 - RNA, 32 nt, Human
ggcucauggcaagcuccgccuccuggauucaa

SEQ ID NO: 459694 - RNA, 24 nt, Human
ggcucaugggugccuccugcccca

SEQ ID NO: 459695 - RNA, 32 nt, Human
ggcucaugucuauaaucccagcacuuugggag

SEQ ID NO: 459696 - RNA, 32 nt, Human
ggcucaugucucuaaucccagcacuuugggag

SEQ ID NO: 459697 - RNA, 32 nt, Human
ggcucaugucugaaaaaugccugcugcugcca

SEQ ID NO: 459698 - RNA, 32 nt, Human
ggcucaugucuguaaucccagcacucuggggg

SEQ ID NO: 459699 - RNA, 32 nt, Human
ggcucaugucuguaaucccagcacuuugggag

SEQ ID NO: 459700 - RNA, 24 nt, Human
ggcucaugugauccucccaccuca

SEQ ID NO: 459701 - RNA, 24 nt, Human
ggcucaugugauccucccaucuca

SEQ ID NO: 459702 - RNA, 18 nt, Human
ggcucaugugggccccag

SEQ ID NO: 459703 - RNA, 32 nt, Human
ggcucauguggugcugccuggugucagagccu

SEQ ID NO: 459704 - RNA, 32 nt, Human
ggcucauguguguaaucccagcacucugggag

SEQ ID NO: 459705 - RNA, 18 nt, Human
ggcucauguugggaccag

SEQ ID NO: 459706 - RNA, 32 nt, Human
ggcucauguuuguaaaucccagcacuuuggga

SEQ ID NO: 459707 - RNA, 32 nt, Human
ggcucauguuuguaaucccagcacuuuggggg

SEQ ID NO: 459708 - RNA, 32 nt, Human
ggcucauguuuguaauccuagcacuuugggag

SEQ ID NO: 459709 - RNA, 22 nt, Human
ggcucauuaaaagccaugaaaa

SEQ ID NO: 459710 - RNA, 32 nt, Human
ggcucauuaagcucugucccccugacuggauu

SEQ ID NO: 459711 - RNA, 32 nt, Human
ggcucauuacaaccuccaccucccggguucag

SEQ ID NO: 459712 - RNA, 32 nt, Human
ggcucauuacagccuccgccuccugggcucaa

SEQ ID NO: 459713 - RNA, 32 nt, Human
ggcucauuccuguaaucccagcacuuugggag

SEQ ID NO: 459714 - RNA, 32 nt, Human
ggcucauuccuguaaucccagcucuuugggag

SEQ ID NO: 459715 - RNA, 32 nt, Human
ggcucauucucuccaagcugcuuuucauuuac

SEQ ID NO: 459716 - RNA, 32 nt, Human
ggcucauugcaaccuccaccuuccagauucuc

SEQ ID NO: 459717 - RNA, 23 nt, Human
ggcucauugcaaccuccgccucc

SEQ ID NO: 459718 - RNA, 32 nt, Human
ggcucauugcaaccuccgccucccggcuucaa

SEQ ID NO: 459719 - RNA, 32 nt, Human
ggcucauugcaaccuccgccucccggguucaa

SEQ ID NO: 459720 - RNA, 32 nt, Human
ggcucauugcaaccuccgccucccucccaggu

SEQ ID NO: 459721 - RNA, 32 nt, Human
ggcucauugcaaccuccgccuccuggguucaa

SEQ ID NO: 459722 - RNA, 32 nt, Human
ggcucauugcaaccuccgccuuccggguucac

SEQ ID NO: 459723 - RNA, 23 nt, Human
ggcucauugcaaccucugccucc

SEQ ID NO: 459724 - RNA, 32 nt, Human
ggcucauugcaaccucugccucccaggucagc

SEQ ID NO: 459725 - RNA, 32 nt, Human
ggcucauugcaaccucugccucccggguucaa

SEQ ID NO: 459726 - RNA, 32 nt, Human
ggcucauugcaaccucugcuuccugggcucaa

SEQ ID NO: 459727 - RNA, 32 nt, Human
ggcucauugcaaccuugaauuccugggcacaa

SEQ ID NO: 459728 - RNA, 32 nt, Human
ggcucauugcaacuuccacuucccagguucaa

SEQ ID NO: 459729 - RNA, 32 nt, Human
ggcucauugcaagcuccgccucccagguucaa

SEQ ID NO: 459730 - RNA, 32 nt, Human
ggcucauugcagccucgaacuccugggcucau

SEQ ID NO: 459731 - RNA, 32 nt, Human
ggcucauugcagccucgaccucccaggugauc

SEQ ID NO: 459732 - RNA, 32 nt, Human
ggcucauugcagccucgaccugcugggcucgg

SEQ ID NO: 459733 - RNA, 32 nt, Human
ggcucauugcagccucgacuucucggggccaa

SEQ ID NO: 459734 - RNA, 32 nt, Human
ggcucauugcaucuuugaccuccugggcucag

SEQ ID NO: 459735 - RNA, 32 nt, Human
ggcucauuguaaccuccgucucccagguucaa

SEQ ID NO: 459736 - RNA, 32 nt, Human
ggcucauuguagccucaaacucccaggcucaa

SEQ ID NO: 459737 - RNA, 32 nt, Human
ggcucauuuccuggccgcuccugggcuucgcg

SEQ ID NO: 459738 - RNA, 24 nt, Human
ggcucauuuguacucucuuccccu

SEQ ID NO: 459739 - RNA, 32 nt, Human
ggcuccaaaauggcagcucaucagaggagucc

SEQ ID NO: 459740 - RNA, 32 nt, Human
ggcuccaaaccagcaaacaucugggccucagu

SEQ ID NO: 459741 - RNA, 32 nt, Human
ggcuccaaacuuccuuucugugccucaucaug

SEQ ID NO: 459742 - RNA, 24 nt, Human
ggcuccaacaauccucccaucuca

SEQ ID NO: 459743 - RNA, 32 nt, Human
ggcuccaacaccuuucgcuaggucuggcucug

SEQ ID NO: 459744 - RNA, 32 nt, Human
ggcuccaacagccucugugagagaugccccac

SEQ ID NO: 459745 - RNA, 19 nt, Human
ggcuccaaccaaccccucc

SEQ ID NO: 459746 - RNA, 32 nt, Human
ggcuccaacccaacaugccaccauguugacau

SEQ ID NO: 459747 - RNA, 32 nt, Human
ggcuccaagaaaagaaccaaagagggcagagg

SEQ ID NO: 459748 - RNA, 32 nt, Human
ggcuccaaggauugacaaauauauuuaugauc

SEQ ID NO: 459749 - RNA, 32 nt, Human
ggcuccaccacugauauccuccuuuggggaaa

SEQ ID NO: 459750 - RNA, 32 nt, Human
ggcuccacccacccuggcuuccuccagcucac

SEQ ID NO: 459751 - RNA, 32 nt, Human
ggcuccacccaccuucuugcucuaccaguucg

SEQ ID NO: 459752 - RNA, 21 nt, Human
ggcuccacccagaggccaguc

SEQ ID NO: 459753 - RNA, 32 nt, Human
ggcuccaccuccagagaucgggauuuuaaaug

SEQ ID NO: 459754 - RNA, 32 nt, Human
ggcuccaccucucacuagcuguguggccuugg

SEQ ID NO: 459755 - RNA, 32 nt, Human
ggcuccaccugcucacauuucucccucccaua

SEQ ID NO: 459756 - RNA, 32 nt, Human
ggcuccacgaacagaaaagcaagagcaaaaac

SEQ ID NO: 459757 - RNA, 32 nt, Human
ggcuccacgacccugagagaaggguugagaag

SEQ ID NO: 459758 - RNA, 22 nt, Human
ggcuccacucuguagccaggug

SEQ ID NO: 459759 - RNA, 22 nt, Human
ggcuccacugaaacaccagcuc

SEQ ID NO: 459760 - RNA, 32 nt, Human
ggcuccacuggcugaugggaucaaagacccuc

SEQ ID NO: 459761 - RNA, 32 nt, Human
ggcuccacugggccccuggccucgggagcggc

SEQ ID NO: 459762 - RNA, 32 nt, Human
ggcuccagaaggauuucuagaucgcuucaagc

SEQ ID NO: 459763 - RNA, 32 nt, Human
ggcuccagacaaggaggaaggggcccugcuca

SEQ ID NO: 459764 - RNA, 21 nt, Human
ggcuccagacaaugccuuucc

SEQ ID NO: 459765 - RNA, 32 nt, Human
ggcuccagacaggaggagugggacagacagca

SEQ ID NO: 459766 - RNA, 32 nt, Human
ggcuccagacauacucaccucuaccucgacca

SEQ ID NO: 459767 - RNA, 21 nt, Human
ggcuccagagcaugccuucca

SEQ ID NO: 459768 - RNA, 32 nt, Human
ggcuccagagucccucgggucucaggucaugg

SEQ ID NO: 459769 - RNA, 23 nt, Human
ggcuccagcaccauccgccaggg

SEQ ID NO: 459770 - RNA, 24 nt, Human
ggcuccagcagacccacuguccca

SEQ ID NO: 459771 - RNA, 22 nt, Human
ggcuccagcaggugggcagggg

SEQ ID NO: 459772 - RNA, 23 nt, Human
ggcuccagccagaccuucagugg

SEQ ID NO: 459773 - RNA, 21 nt, Human
ggcuccagcccaaugccccag

SEQ ID NO: 459774 - RNA, 23 nt, Human
ggcuccagcccucugccuuuuca

SEQ ID NO: 459775 - RNA, 24 nt, Human
ggcuccagccggcgcggcgcgagg

SEQ ID NO: 459776 - RNA, 22 nt, Human
ggcuccagccuccccgcgaggg

SEQ ID NO: 459777 - RNA, 32 nt, Human
ggcuccagccugggcgacagagugagagucug

SEQ ID NO: 459778 - RNA, 18 nt, Human
ggcuccagccugguccag

SEQ ID NO: 459779 - RNA, 32 nt, Human
ggcuccagccugguccagagagaaagagacag

SEQ ID NO: 459780 - RNA, 18 nt, Human
ggcuccagccuuggccag

SEQ ID NO: 459781 - RNA, 19 nt, Human
ggcuccagcgagcgcgcgg

SEQ ID NO: 459782 - RNA, 32 nt, Human
ggcuccagcguccucgucccuccugggccugu

SEQ ID NO: 459783 - RNA, 19 nt, Human
ggcuccagcuaggaagggg

SEQ ID NO: 459784 - RNA, 22 nt, Human
ggcuccagcucuggcacagugg

SEQ ID NO: 459785 - RNA, 21 nt, Human
ggcuccagcucuucgccgggg

SEQ ID NO: 459786 - RNA, 32 nt, Human
ggcuccagcugccaacccuggagcccagaccg

SEQ ID NO: 459787 - RNA, 20 nt, Human
ggcuccagcugcccuuggua

SEQ ID NO: 459788 - RNA, 21 nt, Human
ggcuccagcuggagggauggg

SEQ ID NO: 459789 - RNA, 19 nt, Human
ggcuccagcuggcgcacag

SEQ ID NO: 459790 - RNA, 32 nt, Human
ggcuccagcuggucccuccauucagggucccu

SEQ ID NO: 459791 - RNA, 32 nt, Human
ggcuccaggaauagaaccaaaagaagcugaac

SEQ ID NO: 459792 - RNA, 21 nt, Human
ggcuccaggcagggcgggcug

SEQ ID NO: 459793 - RNA, 20 nt, Human
ggcuccaggcccugugcacg

SEQ ID NO: 459794 - RNA, 23 nt, Human
ggcuccaggcggcagagcaaggg

SEQ ID NO: 459795 - RNA, 22 nt, Human
ggcuccaggcggcagggcaagg

SEQ ID NO: 459796 - RNA, 32 nt, Human
ggcuccaggcuagccuggaggcugagcaggaa

SEQ ID NO: 459797 - RNA, 32 nt, Human
ggcuccagggagcagugucagggccagggaga

SEQ ID NO: 459798 - RNA, 19 nt, Human
ggcuccagggcccagcaug

SEQ ID NO: 459799 - RNA, 22 nt, Human
ggcuccagggccuggacagggg

SEQ ID NO: 459800 - RNA, 32 nt, Human
ggcuccaggguaagacagggcuggcaggagca

SEQ ID NO: 459801 - RNA, 32 nt, Human
ggcuccaggugaggagccagcaggcaggggag

SEQ ID NO: 459802 - RNA, 22 nt, Human
ggcuccagucugcugcccucca

SEQ ID NO: 459803 - RNA, 24 nt, Human
ggcuccagugauccucucaccuca

SEQ ID NO: 459804 - RNA, 32 nt, Human
ggcuccagugccagugccuguccugggaagau

SEQ ID NO: 459805 - RNA, 20 nt, Human
ggcuccaguggcgaggcagg

SEQ ID NO: 459806 - RNA, 32 nt, Human
ggcuccagugugaagggugcccuggggcugag

SEQ ID NO: 459807 - RNA, 32 nt, Human
ggcuccaguucggaggaggaggaggaagauua

SEQ ID NO: 459808 - RNA, 23 nt, Human
ggcuccauccaccucaccaguug

SEQ ID NO: 459809 - RNA, 32 nt, Human
ggcuccauccccaaagcggccgccagcuucgg

SEQ ID NO: 459810 - RNA, 32 nt, Human
ggcuccauccuucuccccaaggucuguggcuc

SEQ ID NO: 459811 - RNA, 32 nt, Human
ggcuccaucuucccuucucugccagccgcgug

SEQ ID NO: 459812 - RNA, 32 nt, Human
ggcuccaugaaagguacgucugaaaaguuucu

SEQ ID NO: 459813 - RNA, 32 nt, Human
ggcuccauggcagaaggguuccaagaaggcag

SEQ ID NO: 459814 - RNA, 32 nt, Human
ggcuccauggcauaaggaaagggagaugcugg

SEQ ID NO: 459815 - RNA, 18 nt, Human
ggcuccauggccagauga

SEQ ID NO: 459816 - RNA, 32 nt, Human
ggcuccaugggcagaccuacaaggcugcgcaa

SEQ ID NO: 459817 - RNA, 32 nt, Human
ggcucccaauccaguccuccaaguacucagag

SEQ ID NO: 459818 - RNA, 32 nt, Human
ggcucccacacagccgccucugcuccagcaag

SEQ ID NO: 459819 - RNA, 24 nt, Human
ggcucccacaccgucagguacucc

SEQ ID NO: 459820 - RNA, 32 nt, Human
ggcucccacagcacccugccucccucucucca

SEQ ID NO: 459821 - RNA, 32 nt, Human
ggcucccacaggcuggagugcaauggugugau

SEQ ID NO: 459822 - RNA, 32 nt, Human
ggcucccaccaccaccaccaccagcaccacca

SEQ ID NO: 459823 - RNA, 32 nt, Human
ggcucccaccuauaaucccagcaguuugggag

SEQ ID NO: 459824 - RNA, 32 nt, Human
ggcucccaccuauaauccuagcacuuugggag

SEQ ID NO: 459825 - RNA, 32 nt, Human
ggcucccaccuguagucccagcacuuugggag

SEQ ID NO: 459826 - RNA, 19 nt, Human
ggcucccacugccaccacc

SEQ ID NO: 459827 - RNA, 32 nt, Human
ggcucccacugccaccaccgccaucgccucac

SEQ ID NO: 459828 - RNA, 32 nt, Human
ggcucccacuuccuuuuccuuaauaagaacca

SEQ ID NO: 459829 - RNA, 23 nt, Human
ggcucccacuugccucccgugcc

SEQ ID NO: 459830 - RNA, 32 nt, Human
ggcucccagaccccugagcuuugagucagugg

SEQ ID NO: 459831 - RNA, 17 nt, Human
ggcucccagcagaguga

SEQ ID NO: 459832 - RNA, 18 nt, Human
ggcucccagcagccaccc

SEQ ID NO: 459833 - RNA, 21 nt, Human
ggcucccagcagugcuucccu

SEQ ID NO: 459834 - RNA, 32 nt, Human
ggcucccagcauuuugggaggcugaggugggu

SEQ ID NO: 459835 - RNA, 32 nt, Human
ggcucccaggaagggccgcugcuggagauggg

SEQ ID NO: 459836 - RNA, 20 nt, Human
ggcucccaggagccugccca

SEQ ID NO: 459837 - RNA, 32 nt, Human
ggcucccaggaggcaguagugugugccugucu

SEQ ID NO: 459838 - RNA, 21 nt, Human
ggcucccaggcgcccggcgca

SEQ ID NO: 459839 - RNA, 32 nt, Human
ggcucccagggagggggaagagaaguccucag

SEQ ID NO: 459840 - RNA, 32 nt, Human
ggcucccaguuggccaagcacuccugcgcuga

SEQ ID NO: 459841 - RNA, 31 nt, Human
ggcucccaguuucagcguggccgcauuugga

SEQ ID NO: 459842 - RNA, 17 nt, Human
ggcucccauccauggcc

SEQ ID NO: 459843 - RNA, 32 nt, Human
ggcucccaucguccuucugucccaggccuugc

SEQ ID NO: 459844 - RNA, 32 nt, Human
ggcucccaugccacacagugagaacuguagcc

SEQ ID NO: 459845 - RNA, 24 nt, Human
ggcucccauggcccacauacccag

SEQ ID NO: 459846 - RNA, 32 nt, Human
ggcucccauucaaccuccuuagccaggaggac

SEQ ID NO: 459847 - RNA, 32 nt, Human
ggcuccccaaagugcugggauugcaggcguga

SEQ ID NO: 459848 - RNA, 32 nt, Human
ggcuccccacugcacuugccaccugagucaca

SEQ ID NO: 459849 - RNA, 32 nt, Human
ggcuccccagcagccaagaggagaggaauguc

SEQ ID NO: 459850 - RNA, 32 nt, Human
ggcucccccagccucagguugcuggagcuguc

SEQ ID NO: 459851 - RNA, 18 nt, Human
ggcuccccccggguauca

SEQ ID NO: 459852 - RNA, 21 nt, Human
ggcucccccgugcccugccuc

SEQ ID NO: 459853 - RNA, 18 nt, Human
ggcucccccuucauggcc

SEQ ID NO: 459854 - RNA, 32 nt, Human
ggcuccccgcuucucuggaggggaggcggugc

SEQ ID NO: 459855 - RNA, 32 nt, Human
ggcuccccggccgccuccacccggggaacgcg

SEQ ID NO: 459856 - RNA, 21 nt, Human
ggcuccccucagccgcagggg

SEQ ID NO: 459857 - RNA, 32 nt, Human
ggcuccccugcaggagggaggcuccaggguaa

SEQ ID NO: 459858 - RNA, 32 nt, Human
ggcuccccugcucccucccagguccugcacac

SEQ ID NO: 459859 - RNA, 32 nt, Human
ggcuccccugggaggcugcaguugugguacac

SEQ ID NO: 459860 - RNA, 32 nt, Human
ggcuccccuggguggccugccagcacagccag

SEQ ID NO: 459861 - RNA, 32 nt, Human
ggcuccccuuccucugggcaagagcacccacu

SEQ ID NO: 459862 - RNA, 32 nt, Human
ggcuccccuuuccuuggguccuuguguuccuu

SEQ ID NO: 459863 - RNA, 32 nt, Human
ggcuccccuuucucucccuaacccaccacccc

SEQ ID NO: 459864 - RNA, 32 nt, Human
ggcucccgaagaaugaacccaagagcaagggc

SEQ ID NO: 459865 - RNA, 30 nt, Human
ggcucccgaagccacaggccacaguccccc

SEQ ID NO: 459866 - RNA, 32 nt, Human
ggcucccgccuguaaucccagaacuuugggag

SEQ ID NO: 459867 - RNA, 32 nt, Human
ggcucccgccuguaaucccagcacuuugggaa

SEQ ID NO: 459868 - RNA, 32 nt, Human
ggcucccgccuguaaucccagcacuuugggag

SEQ ID NO: 459869 - RNA, 32 nt, Human
ggcucccgccuguaaucccaguacuuugggaa

SEQ ID NO: 459870 - RNA, 32 nt, Human
ggcucccgccuguaaucccauuacuuugggag

SEQ ID NO: 459871 - RNA, 32 nt, Human
ggcucccgccuguaauccuagcacuuugggag

SEQ ID NO: 459872 - RNA, 32 nt, Human
ggcucccgcggcagcucuuccuccagggcgug

SEQ ID NO: 459873 - RNA, 32 nt, Human
ggcucccgcggcgugggcugggcagcagccgg

SEQ ID NO: 459874 - RNA, 22 nt, Human
ggcucccggcugagcgccccag

SEQ ID NO: 459875 - RNA, 20 nt, Human
ggcucccggcuucagcacuc

SEQ ID NO: 459876 - RNA, 18 nt, Human
ggcucccgggccucaaga

SEQ ID NO: 459877 - RNA, 32 nt, Human
ggcucccgggcugggcagggaccaugggcugu

SEQ ID NO: 459878 - RNA, 32 nt, Human
ggcucccggggcugagguggagccgcgggacg

SEQ ID NO: 459879 - RNA, 32 nt, Human
ggcucccgggucuccccucccucgccacccca

SEQ ID NO: 459880 - RNA, 32 nt, Human
ggcucccgguuccuugggaagagggugcccau

SEQ ID NO: 459881 - RNA, 32 nt, Human
ggcucccuaagagaggauggagagggagagac

SEQ ID NO: 459882 - RNA, 32 nt, Human
ggcucccuacaacuuccaccucccagguucaa

SEQ ID NO: 459883 - RNA, 21 nt, Human
ggcucccuagccaccgcggcc

SEQ ID NO: 459884 - RNA, 32 nt, Human
ggcucccucaggcugcagcccugacccccaag

SEQ ID NO: 459885 - RNA, 32 nt, Human
ggcucccucaucgcccccuccuggguccucuc

SEQ ID NO: 459886 - RNA, 32 nt, Human
ggcucccucccuccuucucuccuuccuuccuu

SEQ ID NO: 459887 - RNA, 32 nt, Human
ggcucccucuccucacccuccugcaccuaacu

SEQ ID NO: 459888 - RNA, 32 nt, Human
ggcucccucuuggucuucccaggcuggggcug

SEQ ID NO: 459889 - RNA, 19 nt, Human
ggcucccugagggccaggc

SEQ ID NO: 459890 - RNA, 23 nt, Human
ggcucccugcaaccuccaccucc

SEQ ID NO: 459891 - RNA, 32 nt, Human
ggcucccugcaaccuccaccucccggguucaa

SEQ ID NO: 459892 - RNA, 32 nt, Human
ggcucccugcaaccuccaccuccuggguucaa

SEQ ID NO: 459893 - RNA, 24 nt, Human
ggcucccugcaaccuccgccuccu

SEQ ID NO: 459894 - RNA, 32 nt, Human
ggcucccugcaaccuccgccuccuggauucca

SEQ ID NO: 459895 - RNA, 32 nt, Human
ggcucccugcaaccucugcuuccuggguucag

SEQ ID NO: 459896 - RNA, 32 nt, Human
ggcucccugcaaccuucgccucccggguucaa

SEQ ID NO: 459897 - RNA, 32 nt, Human
ggcucccugcaaucuccaccucccagguucaa

SEQ ID NO: 459898 - RNA, 32 nt, Human
ggcucccugcagccucaaacuccugggcucaa

SEQ ID NO: 459899 - RNA, 32 nt, Human
ggcucccugcagccuugaccuccugggcucaa

SEQ ID NO: 459900 - RNA, 32 nt, Human
ggcucccugccuggauccagcucugggagccc

SEQ ID NO: 459901 - RNA, 32 nt, Human
ggcucccugccugucccauccccaugccccgu

SEQ ID NO: 459902 - RNA, 32 nt, Human
ggcucccugcuggcccucuugggccucugcuc

SEQ ID NO: 459903 - RNA, 32 nt, Human
ggcucccuggaacuucccugcagcugcaggcc

SEQ ID NO: 459904 - RNA, 32 nt, Human
ggcucccuggagccgacgcagagcagcgcccu

SEQ ID NO: 459905 - RNA, 32 nt, Human
ggcucccuggggagccagacagaggcuggggg

SEQ ID NO: 459906 - RNA, 32 nt, Human
ggcucccuggugcaaaacaauuagcaguuaug

SEQ ID NO: 459907 - RNA, 32 nt, Human
ggcucccuuccagcuguggcaaagcuauauuu

SEQ ID NO: 459908 - RNA, 32 nt, Human
ggcucccuucuuggugggcugggagccucagu

SEQ ID NO: 459909 - RNA, 23 nt, Human
ggcucccuuucccucagcagccg

SEQ ID NO: 459910 - RNA, 32 nt, Human
ggcucccuuugguuugggggucugccugaggu

SEQ ID NO: 459911 - RNA, 32 nt, Human
ggcuccgaggggcacagguccaggcuccugcg

SEQ ID NO: 459912 - RNA, 32 nt, Human
ggcuccgcaggugggagcccauggggcgggca

SEQ ID NO: 459913 - RNA, 32 nt, Human
ggcuccgccacugcaugcucccgccggaccga

SEQ ID NO: 459914 - RNA, 32 nt, Human
ggcuccgccagccugcugcugcccucccgccc

SEQ ID NO: 459915 - RNA, 32 nt, Human
ggcuccgcccacccugcucccuuccggacaau

SEQ ID NO: 459916 - RNA, 32 nt, Human
ggcuccgcccaggaggcggcugcacgguucuc

SEQ ID NO: 459917 - RNA, 24 nt, Human
ggcuccgcccccaccugcuggacc

SEQ ID NO: 459918 - RNA, 21 nt, Human
ggcuccgcccgagucccaccu

SEQ ID NO: 459919 - RNA, 32 nt, Human
ggcuccgcgggaugcaccgugguagccgaggg

SEQ ID NO: 459920 - RNA, 32 nt, Human
ggcuccggacgcagagguggcaguggcaccag

SEQ ID NO: 459921 - RNA, 22 nt, Human
ggcuccggacggcagccagagg

SEQ ID NO: 459922 - RNA, 32 nt, Human
ggcuccggaucccagccucuccccugcucccg

SEQ ID NO: 459923 - RNA, 32 nt, Human
ggcuccggccuccugccaaggcucuugucccc

SEQ ID NO: 459924 - RNA, 20 nt, Human
ggcuccggcggccagagugg

SEQ ID NO: 459925 - RNA, 32 nt, Human
ggcuccggcugcuggaggaagcagcuauccac

SEQ ID NO: 459926 - RNA, 32 nt, Human
ggcuccggcuucaagaucaaaggaaauguuuc

SEQ ID NO: 459927 - RNA, 32 nt, Human
ggcuccgggacgccugcgguucccuggucccg

SEQ ID NO: 459928 - RNA, 32 nt, Human
ggcuccgggaggugcugccugccaggggaagc

SEQ ID NO: 459929 - RNA, 18 nt, Human
ggcuccgggccaggguga

SEQ ID NO: 459930 - RNA, 32 nt, Human
ggcuccgggccuggcccaauugcuucucaagc

SEQ ID NO: 459931 - RNA, 19 nt, Human
ggcuccgggcuuuccccca

SEQ ID NO: 459932 - RNA, 32 nt, Human
ggcuccggggagaaggaccuggagucacagcg

SEQ ID NO: 459933 - RNA, 32 nt, Human
ggcuccgguacccucgacccuccuggguguug

SEQ ID NO: 459934 - RNA, 32 nt, Human
ggcuccgugcagcuguggacucgagugccauc

SEQ ID NO: 459935 - RNA, 32 nt, Human
ggcuccgugcaggagccaugcccacucuccug

SEQ ID NO: 459936 - RNA, 18 nt, Human
ggcuccgugugacuuccg

SEQ ID NO: 459937 - RNA, 32 nt, Human
ggcuccguucaaaggcucggggugucuuugag

SEQ ID NO: 459938 - RNA, 32 nt, Human
ggcuccuaacucucaggaaacacuugucggcu

SEQ ID NO: 459939 - RNA, 32 nt, Human
ggcuccuacauuggaccuuggagcacccccac

SEQ ID NO: 459940 - RNA, 32 nt, Human
ggcuccuagaggcagagggauggagguaauga

SEQ ID NO: 459941 - RNA, 32 nt, Human
ggcuccuagcagggaauuccaggaagccuccu

SEQ ID NO: 459942 - RNA, 16 nt, Human
ggcuccuauaauccca

SEQ ID NO: 459943 - RNA, 32 nt, Human
ggcuccuauugaaggaaccacccccauuccua

SEQ ID NO: 459944 - RNA, 32 nt, Human
ggcuccucaaccacaacuucugaccucccagg

SEQ ID NO: 459945 - RNA, 32 nt, Human
ggcuccucaagggacuuccuggagaguagcgc

SEQ ID NO: 459946 - RNA, 32 nt, Human
ggcuccucacggggguggagggagccggagcc

SEQ ID NO: 459947 - RNA, 31 nt, Human
ggcuccucagaacuggagcauuuguauaaua

SEQ ID NO: 459948 - RNA, 32 nt, Human
ggcuccucagccaggacacagggugaggcccc

SEQ ID NO: 459949 - RNA, 32 nt, Human
ggcuccuccacuaaauugcugugugacuucag

SEQ ID NO: 459950 - RNA, 32 nt, Human
ggcuccuccagcucccccugggaccuccagca

SEQ ID NO: 459951 - RNA, 27 nt, Human
ggcuccuccagcuucgccgccgcagcc

SEQ ID NO: 459952 - RNA, 32 nt, Human
ggcuccuccauggcuucuauggaggacuccuc

SEQ ID NO: 459953 - RNA, 32 nt, Human
ggcuccucccgaggaggaaggaaggagagacc

SEQ ID NO: 459954 - RNA, 32 nt, Human
ggcuccuccuccuccucccggcggugggugcc

SEQ ID NO: 459955 - RNA, 32 nt, Human
ggcuccuccucuuccuucugcuccaagaagcc

SEQ ID NO: 459956 - RNA, 32 nt, Human
ggcuccuccuguccuguccugccuguggaggg

SEQ ID NO: 459957 - RNA, 32 nt, Human
ggcuccuccuucugucuuaagagaaagccaag

SEQ ID NO: 459958 - RNA, 32 nt, Human
ggcuccuccuucuguuucccagaccgagagcc

SEQ ID NO: 459959 - RNA, 32 nt, Human
ggcuccuccuugcccagacuacagggcuuagg

SEQ ID NO: 459960 - RNA, 32 nt, Human
ggcuccucucaggguucacccugucaccgggg

SEQ ID NO: 459961 - RNA, 32 nt, Human
ggcuccucuccucuuuggggaucaccagcucu

SEQ ID NO: 459962 - RNA, 32 nt, Human
ggcuccucucgaccccacaccgccggucgaca

SEQ ID NO: 459963 - RNA, 32 nt, Human
ggcuccucucuccaccaaauuaggauagaaua

SEQ ID NO: 459964 - RNA, 22 nt, Human
ggcuccucucugcugcuggacc

SEQ ID NO: 459965 - RNA, 32 nt, Human
ggcuccucugcagccugcccugccuucccccg

SEQ ID NO: 459966 - RNA, 32 nt, Human
ggcuccucuggaacagggaguagugagaagac

SEQ ID NO: 459967 - RNA, 32 nt, Human
ggcuccucuggcccagcuuggauggcugaggg

SEQ ID NO: 459968 - RNA, 32 nt, Human
ggcuccucugggaguuucucccagagaaacca

SEQ ID NO: 459969 - RNA, 32 nt, Human
ggcuccucugucccacugcugcuucuugagug

SEQ ID NO: 459970 - RNA, 32 nt, Human
ggcuccucuuguagaacugccucuuugaaauu

SEQ ID NO: 459971 - RNA, 21 nt, Human
ggcuccucuuguggccaugua

SEQ ID NO: 459972 - RNA, 32 nt, Human
ggcuccugacaaccuccuccccucggcggacg

SEQ ID NO: 459973 - RNA, 22 nt, Human
ggcuccugacccgacccagccc

SEQ ID NO: 459974 - RNA, 32 nt, Human
ggcuccugagcagcaauaaaggaccaagaaga

SEQ ID NO: 459975 - RNA, 32 nt, Human
ggcuccugaggcuagcuugucacuuucugcaa

SEQ ID NO: 459976 - RNA, 32 nt, Human
ggcuccugaguagcuggggauuacaggugccu

SEQ ID NO: 459977 - RNA, 32 nt, Human
ggcuccugaguguguagggaaggacacgggag

SEQ ID NO: 459978 - RNA, 32 nt, Human
ggcuccugcaccugcuggauauucuccuuuuc

SEQ ID NO: 459979 - RNA, 32 nt, Human
ggcuccugcaggcggaggccccggcggagaau

SEQ ID NO: 459980 - RNA, 32 nt, Human
ggcuccugcaggcgugaauacacacaugcaca

SEQ ID NO: 459981 - RNA, 32 nt, Human
ggcuccugcagucccagcuacuugggaggcug

SEQ ID NO: 459982 - RNA, 32 nt, Human
ggcuccugcauagcucaccccaccucaucaug

SEQ ID NO: 459983 - RNA, 17 nt, Human
ggcuccugcccuugaac

SEQ ID NO: 459984 - RNA, 24 nt, Human
ggcuccugccgaggagcccaaggg

SEQ ID NO: 459985 - RNA, 32 nt, Human
ggcuccugccuauaaucccagcacuuugggag

SEQ ID NO: 459986 - RNA, 32 nt, Human
ggcuccugccuguaaucccagcacuuugggag

SEQ ID NO: 459987 - RNA, 32 nt, Human
ggcuccugccuguaaucgcagcacuuugggag

SEQ ID NO: 459988 - RNA, 32 nt, Human
ggcuccugccugugauccuagcacuuugggag

SEQ ID NO: 459989 - RNA, 19 nt, Human
ggcuccugcgggcucacca

SEQ ID NO: 459990 - RNA, 32 nt, Human
ggcuccugcucugauuuccuccuugccuuucu

SEQ ID NO: 459991 - RNA, 32 nt, Human
ggcuccuggaaccaugggccucaggcccugag

SEQ ID NO: 459992 - RNA, 32 nt, Human
ggcuccuggcagagcacauagcaggaguuugu

SEQ ID NO: 459993 - RNA, 29 nt, Human
ggcuccuggcugcgucagccucccccacc

SEQ ID NO: 459994 - RNA, 32 nt, Human
ggcuccugggaaauuaaggagggauuugcaca

SEQ ID NO: 459995 - RNA, 32 nt, Human
ggcuccugggccugggcuuuagucugggcuac

SEQ ID NO: 459996 - RNA, 32 nt, Human
ggcuccugggcuguggccguggagagacacug

SEQ ID NO: 459997 - RNA, 32 nt, Human
ggcuccugggcuugggcugcagguuugggggu

SEQ ID NO: 459998 - RNA, 22 nt, Human
ggcuccuggggauggccaggua

SEQ ID NO: 459999 - RNA, 32 nt, Human
ggcuccugguagcauccuuuuccuucaccauc

SEQ ID NO: 460000 - RNA, 32 nt, Human
ggcuccuguaacccuccuccaggaugaaccac

SEQ ID NO: 460001 - RNA, 16 nt, Human
ggcuccuguaguccca

SEQ ID NO: 460002 - RNA, 32 nt, Human
ggcuccuguagucccagccaagcuggaggcug

SEQ ID NO: 460003 - RNA, 19 nt, Human
ggcuccuguagucccagcu

SEQ ID NO: 460004 - RNA, 32 nt, Human
ggcuccuguagucccagcuacucaggaggcua

SEQ ID NO: 460005 - RNA, 32 nt, Human
ggcuccuguagucccagcuacuugggaggcug

SEQ ID NO: 460006 - RNA, 20 nt, Human
ggcuccugucaccugggucc

SEQ ID NO: 460007 - RNA, 32 nt, Human
ggcuccugucuauaaucgcagcacuuugggag

SEQ ID NO: 460008 - RNA, 32 nt, Human
ggcuccugugugggucuucauccugccugacc

SEQ ID NO: 460009 - RNA, 23 nt, Human
ggcuccuguuucucauuugugag

SEQ ID NO: 460010 - RNA, 32 nt, Human
ggcuccuuacugcaccuguggcugacagagaa

SEQ ID NO: 460011 - RNA, 32 nt, Human
ggcuccuucgcccucuggcuccuggucauguu

SEQ ID NO: 460012 - RNA, 32 nt, Human
ggcuccuucucggcugccccugcccacccagu

SEQ ID NO: 460013 - RNA, 32 nt, Human
ggcuccuucucucugggguggcagcagggaca

SEQ ID NO: 460014 - RNA, 32 nt, Human
ggcuccuucucuucucccaucugcuaccagag

SEQ ID NO: 460015 - RNA, 32 nt, Human
ggcuccuucuuaguggauucucuucucuacug

SEQ ID NO: 460016 - RNA, 32 nt, Human
ggcuccuugaagcugcucagucagaggccccc

SEQ ID NO: 460017 - RNA, 32 nt, Human
ggcuccuugggcaagccauuguguccacccga

SEQ ID NO: 460018 - RNA, 32 nt, Human
ggcuccuuggguggauuagagagcuggccgag

SEQ ID NO: 460019 - RNA, 32 nt, Human
ggcuccuuuaucucccuguguccccuuccugc

SEQ ID NO: 460020 - RNA, 32 nt, Human
ggcuccuuuccuuuuugaccacgaccuuggcc

SEQ ID NO: 460021 - RNA, 23 nt, Human
ggcucgaauaugggggccaggug

SEQ ID NO: 460022 - RNA, 32 nt, Human
ggcucgacuggaggggaggaggaggagcaggc

SEQ ID NO: 460023 - RNA, 24 nt, Human
ggcucgagcaauccucccacuuca

SEQ ID NO: 460024 - RNA, 18 nt, Human
ggcucgagugcagcgcgg

SEQ ID NO: 460025 - RNA, 18 nt, Human
ggcucgaugccugugcca

SEQ ID NO: 460026 - RNA, 32 nt, Human
ggcucgcacagccuccccauccuuccuuccca

SEQ ID NO: 460027 - RNA, 32 nt, Human
ggcucgcaccuguaaucccagcacuuugggag

SEQ ID NO: 460028 - RNA, 32 nt, Human
ggcucgcaccuguaaucccagcacuuuggggg

SEQ ID NO: 460029 - RNA, 17 nt, Human
ggcucgcacgaguccgg

SEQ ID NO: 460030 - RNA, 32 nt, Human
ggcucgcacucuucuggucucccaggcccaac

SEQ ID NO: 460031 - RNA, 32 nt, Human
ggcucgcagaugcauccugcaucccagucccc

SEQ ID NO: 460032 - RNA, 32 nt, Human
ggcucgcagggugcaggagcgccucguucucu

SEQ ID NO: 460033 - RNA, 18 nt, Human
ggcucgcccaugguguca

SEQ ID NO: 460034 - RNA, 32 nt, Human
ggcucgcccauuggcuaaccaggcuccgagag

SEQ ID NO: 460035 - RNA, 32 nt, Human
ggcucgccccguguccucucaccaacaccaca

SEQ ID NO: 460036 - RNA, 23 nt, Human
ggcucgccgcccgcgcccgcucg

SEQ ID NO: 460037 - RNA, 32 nt, Human
ggcucgccgugucucagccucugccagcgcca

SEQ ID NO: 460038 - RNA, 32 nt, Human
ggcucgccucucuggccgggugcagugaacgg

SEQ ID NO: 460039 - RNA, 32 nt, Human
ggcucgccuggcaccaccacacggccacagcc

SEQ ID NO: 460040 - RNA, 32 nt, Human
ggcucgccuguaaucccagcacuuugggaggc

SEQ ID NO: 460041 - RNA, 32 nt, Human
ggcucgcgagcugagaggagcagguagagggg

SEQ ID NO: 460042 - RNA, 32 nt, Human
ggcucgcgccuguaaucccagcacuuugggag

SEQ ID NO: 460043 - RNA, 18 nt, Human
ggcucgcgcggaccccag

SEQ ID NO: 460044 - RNA, 32 nt, Human
ggcucgcgcgggagagcagggaagagaaacuu

SEQ ID NO: 460045 - RNA, 20 nt, Human
ggcucgcgcucucccgugcc

SEQ ID NO: 460046 - RNA, 21 nt, Human
ggcucgcgcugagucccgccu

SEQ ID NO: 460047 - RNA, 32 nt, Human
ggcucgcgcuugugaucccagcacuuugggag

SEQ ID NO: 460048 - RNA, 21 nt, Human
ggcucgcggauccagcugcag

SEQ ID NO: 460049 - RNA, 24 nt, Human
ggcucgcggccgcgcccgccgccg

SEQ ID NO: 460050 - RNA, 32 nt, Human
ggcucgcggggccggagccaggccugcguccg

SEQ ID NO: 460051 - RNA, 22 nt, Human
ggcucgcgucauccugcccccg

SEQ ID NO: 460052 - RNA, 21 nt, Human
ggcucgcgucgcgcgcgcacg

SEQ ID NO: 460053 - RNA, 32 nt, Human
ggcucgcguggugcugggguugcugugugagc

SEQ ID NO: 460054 - RNA, 23 nt, Human
ggcucgcuacaaccuccaccucc

SEQ ID NO: 460055 - RNA, 32 nt, Human
ggcucgcuacaaccuccaccucccagcaaccc

SEQ ID NO: 460056 - RNA, 32 nt, Human
ggcucgcucccuguagcucugccucccucucc

SEQ ID NO: 460057 - RNA, 21 nt, Human
ggcucgcucgcuucugcaucc

SEQ ID NO: 460058 - RNA, 32 nt, Human
ggcucgcugcaaacucugccucccagguucac

SEQ ID NO: 460059 - RNA, 32 nt, Human
ggcucgcugcaaccucagcuuccagaguucaa

SEQ ID NO: 460060 - RNA, 23 nt, Human
ggcucgcugcaaccuccgccucc

SEQ ID NO: 460061 - RNA, 32 nt, Human
ggcucgcugcaaccuccgccucccagguucaa

SEQ ID NO: 460062 - RNA, 32 nt, Human
ggcucgcugcaaccuccgccucccggguucaa

SEQ ID NO: 460063 - RNA, 32 nt, Human
ggcucgcugcaaccuccuccuccuggguucaa

SEQ ID NO: 460064 - RNA, 32 nt, Human
ggcucgcugcaaccucugacucccugguucaa

SEQ ID NO: 460065 - RNA, 26 nt, Human
ggcucgcugcaaccucugccuccugg

SEQ ID NO: 460066 - RNA, 32 nt, Human
ggcucgcugcaaccuucacccuucaccuccca

SEQ ID NO: 460067 - RNA, 32 nt, Human
ggcucgcugcagccacugccuccuggguucag

SEQ ID NO: 460068 - RNA, 20 nt, Human
ggcucgcugcagcccaaaca

SEQ ID NO: 460069 - RNA, 32 nt, Human
ggcucgcugcagccuccaccucccagguucaa

SEQ ID NO: 460070 - RNA, 32 nt, Human
ggcucgcugcagccucugccuccuggguucaa

SEQ ID NO: 460071 - RNA, 21 nt, Human
ggcucgcugcccccugcugcc

SEQ ID NO: 460072 - RNA, 32 nt, Human
ggcucgcugcccgccuuccucaagcucuggau

SEQ ID NO: 460073 - RNA, 31 nt, Human
ggcucgcugcucucugggccucaguuucccc

SEQ ID NO: 460074 - RNA, 32 nt, Human
ggcucgcuggaaggcacugcucagagccugaa

SEQ ID NO: 460075 - RNA, 32 nt, Human
ggcucgcuggcccugcacuccgccuuaguccu

SEQ ID NO: 460076 - RNA, 20 nt, Human
ggcucggacagagggggcgg

SEQ ID NO: 460077 - RNA, 22 nt, Human
ggcucggaggagaguuugcugg

SEQ ID NO: 460078 - RNA, 32 nt, Human
ggcucggaggcagcgguugggcucgcggcgag

SEQ ID NO: 460079 - RNA, 32 nt, Human
ggcucggcacaugcagagaugacagggcaggg

SEQ ID NO: 460080 - RNA, 19 nt, Human
ggcucggcaggucugcagc

SEQ ID NO: 460081 - RNA, 32 nt, Human
ggcucggcaguguggcuaguuuguguggcccu

SEQ ID NO: 460082 - RNA, 32 nt, Human
ggcucggccucaaggacagggugcucggcuga

SEQ ID NO: 460083 - RNA, 32 nt, Human
ggcucggccuucgccucugggcucgggagagu

SEQ ID NO: 460084 - RNA, 32 nt, Human
ggcucggcugcuucuguccaccucuuacacuu

SEQ ID NO: 460085 - RNA, 32 nt, Human
ggcucggcugggccccaccccagauccggccu

SEQ ID NO: 460086 - RNA, 32 nt, Human
ggcucgggagagagggacgcgggcugcaggcg

SEQ ID NO: 460087 - RNA, 32 nt, Human
ggcucgggaggcgggcagugggcacaggcucc

SEQ ID NO: 460088 - RNA, 32 nt, Human
ggcucgggaggcguuccuggggccaaggccau

SEQ ID NO: 460089 - RNA, 32 nt, Human
ggcucgggcaaggcuagaaagaugcuacguug

SEQ ID NO: 460090 - RNA, 17 nt, Human
ggcucgggccagagugg

SEQ ID NO: 460091 - RNA, 22 nt, Human
ggcucgggcccugacacugcca

SEQ ID NO: 460092 - RNA, 32 nt, Human
ggcucgggccuguaaucccagcacuuucggag

SEQ ID NO: 460093 - RNA, 21 nt, Human
ggcucgggcucuggggccuac

SEQ ID NO: 460094 - RNA, 19 nt, Human
ggcucggggcccagagaga

SEQ ID NO: 460095 - RNA, 32 nt, Human
ggcucggggccugggauggccuguaaucagcu

SEQ ID NO: 460096 - RNA, 32 nt, Human
ggcucggggcuuccucuccucugauggggcuc

SEQ ID NO: 460097 - RNA, 32 nt, Human
ggcucggggguggaggagccuuagugugucca

SEQ ID NO: 460098 - RNA, 32 nt, Human
ggcucggggucugccaugaauucuuggcuccu

SEQ ID NO: 460099 - RNA, 24 nt, Human
ggcucgggugauccuccugucuua

SEQ ID NO: 460100 - RNA, 32 nt, Human
ggcucgggugugggcuggagaggcagaagccc

SEQ ID NO: 460101 - RNA, 32 nt, Human
ggcucggucauccccagucccgucgcggccac

SEQ ID NO: 460102 - RNA, 20 nt, Human
ggcucggugcagcagcccug

SEQ ID NO: 460103 - RNA, 32 nt, Human
ggcucggugcugcaccugccuccuggcgccug

SEQ ID NO: 460104 - RNA, 32 nt, Human
ggcucggugcugcugcucgucagcgaccccag

SEQ ID NO: 460105 - RNA, 20 nt, Human
ggcucguaccuguaauccag

SEQ ID NO: 460106 - RNA, 32 nt, Human
ggcucguaccuguaauccagcacuuugggaag

SEQ ID NO: 460107 - RNA, 19 nt, Human
ggcucguagcuggguucag

SEQ ID NO: 460108 - RNA, 32 nt, Human
ggcucguaucuguaaucccagcacuuugagag

SEQ ID NO: 460109 - RNA, 21 nt, Human
ggcucgucccccaggccugcc

SEQ ID NO: 460110 - RNA, 32 nt, Human
ggcucgucccuccuccccaucucggcccugag

SEQ ID NO: 460111 - RNA, 32 nt, Human
ggcucgucccuggcuagggaggugagacucuc

SEQ ID NO: 460112 - RNA, 32 nt, Human
ggcucgucuaacucuguuccccuggccuccug

SEQ ID NO: 460113 - RNA, 32 nt, Human
ggcucgucucaaacuccugaccucaggugauc

SEQ ID NO: 460114 - RNA, 32 nt, Human
ggcucgucucggaacuccugaccucaggugau

SEQ ID NO: 460115 - RNA, 22 nt, Human
ggcucgugauccuccugccuca

SEQ ID NO: 460116 - RNA, 32 nt, Human
ggcucgugcauguaauccuagcacuuugggag

SEQ ID NO: 460117 - RNA, 19 nt, Human
ggcucgugcccuguugugg

SEQ ID NO: 460118 - RNA, 32 nt, Human
ggcucgugccuacaaucccagcacuuugggag

SEQ ID NO: 460119 - RNA, 32 nt, Human
ggcucgugccuguaaucccagcacuuugggag

SEQ ID NO: 460120 - RNA, 32 nt, Human
ggcucgugccuguacucccagcacuuugggag

SEQ ID NO: 460121 - RNA, 32 nt, Human
ggcucgugccuguagucccagcacuuugggag

SEQ ID NO: 460122 - RNA, 32 nt, Human
ggcucgugccugucaucccagcacuuugggag

SEQ ID NO: 460123 - RNA, 32 nt, Human
ggcucgugccugugaucucagcacuugggaaa

SEQ ID NO: 460124 - RNA, 32 nt, Human
ggcucgugcuuguaaucccagcacuuugggag

SEQ ID NO: 460125 - RNA, 32 nt, Human
ggcucgugggauguccuacuaucacugaacaa

SEQ ID NO: 460126 - RNA, 23 nt, Human
ggcucguuccagcccucccagug

SEQ ID NO: 460127 - RNA, 32 nt, Human
ggcucuaagcuagauaucuuucccucuuuuuc

SEQ ID NO: 460128 - RNA, 31 nt, Human
ggcucuaauaauagaauuuuguuucucacuc

SEQ ID NO: 460129 - RNA, 32 nt, Human
ggcucuaaugagaaauuccucucuccccaggu

SEQ ID NO: 460130 - RNA, 32 nt, Human
ggcucuaccccaggaaccucccggccugggcu

SEQ ID NO: 460131 - RNA, 32 nt, Human
ggcucuacgagauguugcuggggcuccaccuu

SEQ ID NO: 460132 - RNA, 32 nt, Human
ggcucuacucagagaccugaaaccacuucaga

SEQ ID NO: 460133 - RNA, 32 nt, Human
ggcucuacuucccuugcugguucuuauuucua

SEQ ID NO: 460134 - RNA, 32 nt, Human
ggcucuagagggaaagguuacaugggggaggu

SEQ ID NO: 460135 - RNA, 32 nt, Human
ggcucuagcaauccuccugccuuggccuccca

SEQ ID NO: 460136 - RNA, 23 nt, Human
ggcucuagcucugugggugaagg

SEQ ID NO: 460137 - RNA, 32 nt, Human
ggcucuagcugguaaccuuucugcuauuuccu

SEQ ID NO: 460138 - RNA, 32 nt, Human
ggcucuagcuguccuccagcacuuugggcccu

SEQ ID NO: 460139 - RNA, 32 nt, Human
ggcucuaggaaggcuuccaugcagugacaacu

SEQ ID NO: 460140 - RNA, 32 nt, Human
ggcucuaggacaucuguccaggaggcugggcg

SEQ ID NO: 460141 - RNA, 31 nt, Human
ggcucuaugauggagcccccgaagcccgagc

SEQ ID NO: 460142 - RNA, 20 nt, Human
ggcucuaugcaaccuccacc

SEQ ID NO: 460143 - RNA, 24 nt, Human
ggcucuaugcaaccuccaccuccu

SEQ ID NO: 460144 - RNA, 32 nt, Human
ggcucuaugcaaccuccaccuccuggguucau

SEQ ID NO: 460145 - RNA, 32 nt, Human
ggcucucaaauuuucuauagaaucaagauaga

SEQ ID NO: 460146 - RNA, 32 nt, Human
ggcucucaagccuuuagccuugaacuuaguua

SEQ ID NO: 460147 - RNA, 32 nt, Human
ggcucucaauccagcacaugcacauugaagca

SEQ ID NO: 460148 - RNA, 22 nt, Human
ggcucucacacuccagccuccu

SEQ ID NO: 460149 - RNA, 32 nt, Human
ggcucucacaguuguuucucaucuucauaaua

SEQ ID NO: 460150 - RNA, 32 nt, Human
ggcucucacauuccagccuccuccagggccca

SEQ ID NO: 460151 - RNA, 20 nt, Human
ggcucucaccacucagccuu

SEQ ID NO: 460152 - RNA, 32 nt, Human
ggcucucaccgcaaccuccgucuccuggguuc

SEQ ID NO: 460153 - RNA, 24 nt, Human
ggcucucaccugccaguuguuugc

SEQ ID NO: 460154 - RNA, 32 nt, Human
ggcucucagacaccucuguuuugucugcugug

SEQ ID NO: 460155 - RNA, 32 nt, Human
ggcucucagcagaggggaagaagagcagaggc

SEQ ID NO: 460156 - RNA, 32 nt, Human
ggcucucagcaggaaggagagcagaaaagggg

SEQ ID NO: 460157 - RNA, 21 nt, Human
ggcucucauucugacagcucc

SEQ ID NO: 460158 - RNA, 32 nt, Human
ggcucuccacauguaugcuuuucuuuuucccc

SEQ ID NO: 460159 - RNA, 32 nt, Human
ggcucuccagccugucccagucucagcaggga

SEQ ID NO: 460160 - RNA, 32 nt, Human
ggcucuccagcugcagaggcaggugugaugac

SEQ ID NO: 460161 - RNA, 32 nt, Human
ggcucuccauggcucuguccucaggcuguuuc

SEQ ID NO: 460162 - RNA, 32 nt, Human
ggcucuccauuucuggccucaguugucuacag

SEQ ID NO: 460163 - RNA, 32 nt, Human
ggcucuccauuuucuuuuuccucacuaaagug

SEQ ID NO: 460164 - RNA, 32 nt, Human
ggcucuccccacugcuucgugauuccagggcc

SEQ ID NO: 460165 - RNA, 20 nt, Human
ggcucucccuccuccugcca

SEQ ID NO: 460166 - RNA, 25 nt, Human
ggcucucccucuccucucucccucu

SEQ ID NO: 460167 - RNA, 32 nt, Human
ggcucucccugccucugagcucuggacucugu

SEQ ID NO: 460168 - RNA, 32 nt, Human
ggcucucccugcucccuucuauacaggaaucu

SEQ ID NO: 460169 - RNA, 32 nt, Human
ggcucucccuggcaaaaacgcgguccuguuug

SEQ ID NO: 460170 - RNA, 32 nt, Human
ggcucuccggaagcuucaggugugggcuagcu

SEQ ID NO: 460171 - RNA, 32 nt, Human
ggcucuccuaacccucuccacacauuccauuu

SEQ ID NO: 460172 - RNA, 32 nt, Human
ggcucuccuacucugcuuccaggcuggggccu

SEQ ID NO: 460173 - RNA, 32 nt, Human
ggcucuccucaccccaugcccugggccaaggu

SEQ ID NO: 460174 - RNA, 32 nt, Human
ggcucuccuccaccgcucccccggagccuccc

SEQ ID NO: 460175 - RNA, 32 nt, Human
ggcucuccucugguucaccuuuacagagcaua

SEQ ID NO: 460176 - RNA, 32 nt, Human
ggcucuccugcagggagaaugcaggggucugu

SEQ ID NO: 460177 - RNA, 32 nt, Human
ggcucuccuugcagcugcuuagacgcuggauu

SEQ ID NO: 460178 - RNA, 20 nt, Human
ggcucucgccuguaauccca

SEQ ID NO: 460179 - RNA, 22 nt, Human
ggcucucgccuguaaucccagc

SEQ ID NO: 460180 - RNA, 32 nt, Human
ggcucucgccuguaaucccagcacuuugggag

SEQ ID NO: 460181 - RNA, 32 nt, Human
ggcucucgccuguaaucucagcacuuugggag

SEQ ID NO: 460182 - RNA, 32 nt, Human
ggcucucuagaagcugcauccccagcccuuuc

SEQ ID NO: 460183 - RNA, 32 nt, Human
ggcucucuccaccacgcugccucaggcccuag

SEQ ID NO: 460184 - RNA, 32 nt, Human
ggcucucuccauccuccuuuucuccuugccuu

SEQ ID NO: 460185 - RNA, 32 nt, Human
ggcucucuccccuccccuccccuccccuccuc

SEQ ID NO: 460186 - RNA, 32 nt, Human
ggcucucucuccccacugucucucuucuuucu

SEQ ID NO: 460187 - RNA, 28 nt, Human
ggcucucucucugcugccucuucauacg

SEQ ID NO: 460188 - RNA, 32 nt, Human
ggcucucucuucuccagggcaccaagaggcug

SEQ ID NO: 460189 - RNA, 32 nt, Human
ggcucucucuuuuccccucuugcuccuuucuu

SEQ ID NO: 460190 - RNA, 23 nt, Human
ggcucucugcaaccuccgccucc

SEQ ID NO: 460191 - RNA, 32 nt, Human
ggcucucugcaaccuccgccucccagguucaa

SEQ ID NO: 460192 - RNA, 23 nt, Human
ggcucucugcaaccucugccucc

SEQ ID NO: 460193 - RNA, 32 nt, Human
ggcucucugcaaccucugccucccagguucaa

SEQ ID NO: 460194 - RNA, 32 nt, Human
ggcucucugcaaccucugccucccggguucaa

SEQ ID NO: 460195 - RNA, 32 nt, Human
ggcucucugcaaccucugucucccggguucaa

SEQ ID NO: 460196 - RNA, 32 nt, Human
ggcucucugcaaccugggccucccggguucaa

SEQ ID NO: 460197 - RNA, 32 nt, Human
ggcucucugcaacuuccgccuccuggguucaa

SEQ ID NO: 460198 - RNA, 32 nt, Human
ggcucucugccuucucuucauguuggccucug

SEQ ID NO: 460199 - RNA, 32 nt, Human
ggcucucuggugagcuagugucuccacagccu

SEQ ID NO: 460200 - RNA, 18 nt, Human
ggcucucuguaggcacag

SEQ ID NO: 460201 - RNA, 32 nt, Human
ggcucucugucgcccaggcuggagugcagugg

SEQ ID NO: 460202 - RNA, 32 nt, Human
ggcucucuguucuucaccuccacgcgcccucu

SEQ ID NO: 460203 - RNA, 32 nt, Human
ggcucucuuccugucuuuguggcuccggaaag

SEQ ID NO: 460204 - RNA, 32 nt, Human
ggcucucuucuuucuuccucauccuacucaaa

SEQ ID NO: 460205 - RNA, 32 nt, Human
ggcucucuugacagucagcgugccaucuugau

SEQ ID NO: 460206 - RNA, 32 nt, Human
ggcucucuuugguagggagaggggcuccaaua

SEQ ID NO: 460207 - RNA, 32 nt, Human
ggcucugaaaacacaggaauggacaagguaau

SEQ ID NO: 460208 - RNA, 21 nt, Human
ggcucugaaaucuggggcagg

SEQ ID NO: 460209 - RNA, 32 nt, Human
ggcucugaacagccccgguccagacagcagcc

SEQ ID NO: 460210 - RNA, 21 nt, Human
ggcucugaaggcgcucucugc

SEQ ID NO: 460211 - RNA, 32 nt, Human
ggcucugaaggcucagcccugccuuguucucu

SEQ ID NO: 460212 - RNA, 32 nt, Human
ggcucugaaggugauuuuagguagaagaguuu

SEQ ID NO: 460213 - RNA, 32 nt, Human
ggcucugaccacaaacuccccuccaggcugcc

SEQ ID NO: 460214 - RNA, 32 nt, Human
ggcucugacccagugagauuacagaggaaguu

SEQ ID NO: 460215 - RNA, 32 nt, Human
ggcucugaccuggccccugccccaccagcccc

SEQ ID NO: 460216 - RNA, 17 nt, Human
ggcucugaccugggguc

SEQ ID NO: 460217 - RNA, 32 nt, Human
ggcucugacugcaagcccuggcugaggccaau

SEQ ID NO: 460218 - RNA, 32 nt, Human
ggcucugagagggacagacggugcucagccug

SEQ ID NO: 460219 - RNA, 32 nt, Human
ggcucugagauagcuguccacgcccacguguu

SEQ ID NO: 460220 - RNA, 24 nt, Human
ggcucugagcccggcgugggcagg

SEQ ID NO: 460221 - RNA, 20 nt, Human
ggcucugagcuggcaggcgg

SEQ ID NO: 460222 - RNA, 21 nt, Human
ggcucugagcugggggcucag

SEQ ID NO: 460223 - RNA, 21 nt, Human
ggcucugaggaggggguaagg

SEQ ID NO: 460224 - RNA, 22 nt, Human
ggcucugaggagugggcgcugg

SEQ ID NO: 460225 - RNA, 20 nt, Human
ggcucugagucucaggucag

SEQ ID NO: 460226 - RNA, 22 nt, Human
ggcucugagucucugcuugagg

SEQ ID NO: 460227 - RNA, 21 nt, Human
ggcucugaguguucacaucca

SEQ ID NO: 460228 - RNA, 25 nt, Human
ggcucugaguuggacugaggacagg

SEQ ID NO: 460229 - RNA, 20 nt, Human
ggcucugaucagcgcagggg

SEQ ID NO: 460230 - RNA, 32 nt, Human
ggcucugaucccaggcuggauggaguggcugg

SEQ ID NO: 460231 - RNA, 32 nt, Human
ggcucugaucuaccagcccugguguaguuuau

SEQ ID NO: 460232 - RNA, 32 nt, Human
ggcucugaucuccaucagcaucagggcccaua

SEQ ID NO: 460233 - RNA, 32 nt, Human
ggcucugaucugcuaagguugguguccuuaua

SEQ ID NO: 460234 - RNA, 32 nt, Human
ggcucugauggagccaguuaaaaugcuucauu

SEQ ID NO: 460235 - RNA, 32 nt, Human
ggcucugcaaacuggggcaauaggugagcagg

SEQ ID NO: 460236 - RNA, 32 nt, Human
ggcucugcacaguggcuagaccccaaaaagcc

SEQ ID NO: 460237 - RNA, 32 nt, Human
ggcucugcacauuauucaucuccuggaauuuc

SEQ ID NO: 460238 - RNA, 32 nt, Human
ggcucugcagacccagagguaaggcugccugg

SEQ ID NO: 460239 - RNA, 32 nt, Human
ggcucugcagcccucuggggagccugcggaau

SEQ ID NO: 460240 - RNA, 32 nt, Human
ggcucugcagcgccaaggaggcggcguggcgu

SEQ ID NO: 460241 - RNA, 32 nt, Human
ggcucugcaguggaugcagccauugcagcccu

SEQ ID NO: 460242 - RNA, 21 nt, Human
ggcucugcauagccaggauga

SEQ ID NO: 460243 - RNA, 32 nt, Human
ggcucugccaaaggaagccugugaucucuagg

SEQ ID NO: 460244 - RNA, 32 nt, Human
ggcucugccacuugccuggccaugucaccuug

SEQ ID NO: 460245 - RNA, 19 nt, Human
ggcucugccagcagaguga

SEQ ID NO: 460246 - RNA, 32 nt, Human
ggcucugccaggacaccacaugggagggggcu

SEQ ID NO: 460247 - RNA, 22 nt, Human
ggcucugccaggucggugcagg

SEQ ID NO: 460248 - RNA, 32 nt, Human
ggcucugccauuuacugaucauggcccuuggg

SEQ ID NO: 460249 - RNA, 32 nt, Human
ggcucugccccauccugucacuccuggaauaa

SEQ ID NO: 460250 - RNA, 32 nt, Human
ggcucugcccugcccagugaccaacugcacug

SEQ ID NO: 460251 - RNA, 20 nt, Human
ggcucugcggggcaggggug

SEQ ID NO: 460252 - RNA, 32 nt, Human
ggcucugcgugcaggcgcuccugcugcucugg

SEQ ID NO: 460253 - RNA, 32 nt, Human
ggcucugcuccaggacuccuuccuucuuccuu

SEQ ID NO: 460254 - RNA, 32 nt, Human
ggcucugcugcccaggcuggaaugcaguggug

SEQ ID NO: 460255 - RNA, 18 nt, Human
ggcucugcugcccgggau

SEQ ID NO: 460256 - RNA, 32 nt, Human
ggcucugcugugcccuuuucaaaugcauauuu

SEQ ID NO: 460257 - RNA, 32 nt, Human
ggcucugcuuacacuuucucuccaucaccaaa

SEQ ID NO: 460258 - RNA, 32 nt, Human
ggcucuggaaaccacauggcuucaccuguccc

SEQ ID NO: 460259 - RNA, 32 nt, Human
ggcucuggaaccugggcugagauggauucggg

SEQ ID NO: 460260 - RNA, 32 nt, Human
ggcucuggaacugauugcucccaggaucuccu

SEQ ID NO: 460261 - RNA, 32 nt, Human
ggcucuggaagcucccagguccuugaagaacu

SEQ ID NO: 460262 - RNA, 20 nt, Human
ggcucuggaccagcggcagg

SEQ ID NO: 460263 - RNA, 32 nt, Human
ggcucuggacgaagacaaggaggcagaaggug

SEQ ID NO: 460264 - RNA, 32 nt, Human
ggcucuggagauuguuaccaucugcuacauau

SEQ ID NO: 460265 - RNA, 18 nt, Human
ggcucuggagccagagga

SEQ ID NO: 460266 - RNA, 32 nt, Human
ggcucuggagcuaugaaaggccccacuuucaa

SEQ ID NO: 460267 - RNA, 32 nt, Human
ggcucuggagugagggccagguucaggucucc

SEQ ID NO: 460268 - RNA, 32 nt, Human
ggcucuggcaccacuaggguccuggcccucuu

SEQ ID NO: 460269 - RNA, 32 nt, Human
ggcucuggccacacccucaggauuuccaaggu

SEQ ID NO: 460270 - RNA, 32 nt, Human
ggcucuggccagagggagagaggacucuggac

SEQ ID NO: 460271 - RNA, 32 nt, Human
ggcucuggcccaggcuagagugcaguggugcg

SEQ ID NO: 460272 - RNA, 32 nt, Human
ggcucuggccgagggcgagacaggaguauucu

SEQ ID NO: 460273 - RNA, 32 nt, Human
ggcucuggccugaucacugggcucaggucagg

SEQ ID NO: 460274 - RNA, 22 nt, Human
ggcucuggcuaaacccaccuca

SEQ ID NO: 460275 - RNA, 32 nt, Human
ggcucugggaaggcugaggcuggagaagcgua

SEQ ID NO: 460276 - RNA, 18 nt, Human
ggcucugggacccagggg

SEQ ID NO: 460277 - RNA, 32 nt, Human
ggcucugggacccuaccccuuccaaccuuccc

SEQ ID NO: 460278 - RNA, 32 nt, Human
ggcucugggaccugggcugggccggaccuggg

SEQ ID NO: 460279 - RNA, 32 nt, Human
ggcucugggagaccccagcuucccaggcuccg

SEQ ID NO: 460280 - RNA, 32 nt, Human
ggcucugggagccaugauuuuaaucacauucu

SEQ ID NO: 460281 - RNA, 32 nt, Human
ggcucugggaucucccccuuguggggcaggcu

SEQ ID NO: 460282 - RNA, 32 nt, Human
ggcucugggccaagccaccaauccagagcucc

SEQ ID NO: 460283 - RNA, 17 nt, Human
ggcucugggccucaaug

SEQ ID NO: 460284 - RNA, 32 nt, Human
ggcucugggcggggcucccgagggucuuggcg

SEQ ID NO: 460285 - RNA, 21 nt, Human
ggcucuggggacaggggcagg

SEQ ID NO: 460286 - RNA, 32 nt, Human
ggcucuggggagccauggaaggugcuggauaa

SEQ ID NO: 460287 - RNA, 32 nt, Human
ggcucuggggcuaaguaaggcaaauggucuau

SEQ ID NO: 460288 - RNA, 22 nt, Human
ggcucuggggcugcggggcagg

SEQ ID NO: 460289 - RNA, 32 nt, Human
ggcucugggggcagagguggcaggaauggugc

SEQ ID NO: 460290 - RNA, 32 nt, Human
ggcucugggugagguaggcgggaaaggaugga

SEQ ID NO: 460291 - RNA, 32 nt, Human
ggcucuggguuccucugcccuggaagggcucc

SEQ ID NO: 460292 - RNA, 32 nt, Human
ggcucuggucaucagaaggacuggucacagag

SEQ ID NO: 460293 - RNA, 32 nt, Human
ggcucuggugaagcccucugagcccaggagga

SEQ ID NO: 460294 - RNA, 24 nt, Human
ggcucuguaaaaucagaccauagu

SEQ ID NO: 460295 - RNA, 32 nt, Human
ggcucugucaccaaggcuggagugcaggggca

SEQ ID NO: 460296 - RNA, 32 nt, Human
ggcucugucacccaggcuagagugcaauggca

SEQ ID NO: 460297 - RNA, 32 nt, Human
ggcucugucacccaggcugaagugcaguggag

SEQ ID NO: 460298 - RNA, 32 nt, Human
ggcucugucacccaggcuggagugcaguggag

SEQ ID NO: 460299 - RNA, 32 nt, Human
ggcucugucacccaggcuggagugcaguggca

SEQ ID NO: 460300 - RNA, 32 nt, Human
ggcucugucacccaggcuggagugcaguggcg

SEQ ID NO: 460301 - RNA, 32 nt, Human
ggcucugucacccgggcuggagugcaguggcg

SEQ ID NO: 460302 - RNA, 32 nt, Human
ggcucugucacuuaggcuggagugcaguggcg

SEQ ID NO: 460303 - RNA, 32 nt, Human
ggcucugucauccaggcuggagugcaguggcg

SEQ ID NO: 460304 - RNA, 32 nt, Human
ggcucugucaucugaaauuuuaaccacuuaau

SEQ ID NO: 460305 - RNA, 32 nt, Human
ggcucugucccccaggcuggcgugcaguagca

SEQ ID NO: 460306 - RNA, 32 nt, Human
ggcucugucgcccaggcuggagcgcaauggca

SEQ ID NO: 460307 - RNA, 32 nt, Human
ggcucugucgcccaggcuggagugcaggggcg

SEQ ID NO: 460308 - RNA, 32 nt, Human
ggcucugucgcccaggcuggagugcagugccg

SEQ ID NO: 460309 - RNA, 32 nt, Human
ggcucugucuacccccuuccuucuuugucuug

SEQ ID NO: 460310 - RNA, 32 nt, Human
ggcucugucucccaggcuggagugcaguggcg

SEQ ID NO: 460311 - RNA, 23 nt, Human
ggcucugucuccuuccugcugcc

SEQ ID NO: 460312 - RNA, 32 nt, Human
ggcucugucugaguaagaaacagaauccucug

SEQ ID NO: 460313 - RNA, 21 nt, Human
ggcucugugccuccugccuca

SEQ ID NO: 460314 - RNA, 32 nt, Human
ggcucugugccuuggucucuccuuccucuugg

SEQ ID NO: 460315 - RNA, 22 nt, Human
ggcucugugcgaaacagaguga

SEQ ID NO: 460316 - RNA, 32 nt, Human
ggcucuguggacaccaggaggucagggcacag

SEQ ID NO: 460317 - RNA, 32 nt, Human
ggcucuguggcccaggcugagagcagcagggu

SEQ ID NO: 460318 - RNA, 32 nt, Human
ggcucuguggcgagccauuugucccaagugcc

SEQ ID NO: 460319 - RNA, 32 nt, Human
ggcucugugggcucccccugggcucugugggc

SEQ ID NO: 460320 - RNA, 32 nt, Human
ggcucuguuagaacucuguccaaaaagugcau

SEQ ID NO: 460321 - RNA, 32 nt, Human
ggcucuguuaucagcugggcagugccagccaa

SEQ ID NO: 460322 - RNA, 20 nt, Human
ggcucuguuuuguguauuua

SEQ ID NO: 460323 - RNA, 32 nt, Human
ggcucuuaaagauggcacagacccaaagagug

SEQ ID NO: 460324 - RNA, 32 nt, Human
ggcucuuaccagcgucuggccuagaggaagcc

SEQ ID NO: 460325 - RNA, 32 nt, Human
ggcucuuaggguaaugagauggaugguggccc

SEQ ID NO: 460326 - RNA, 32 nt, Human
ggcucuuagggucuugacacaggacgggccug

SEQ ID NO: 460327 - RNA, 32 nt, Human
ggcucuucacuguggggcaugggagaggagua

SEQ ID NO: 460328 - RNA, 32 nt, Human
ggcucuucagccccuggacggacgccuuggcu

SEQ ID NO: 460329 - RNA, 32 nt, Human
ggcucuucagcccuccugggagcucaguggcu

SEQ ID NO: 460330 - RNA, 32 nt, Human
ggcucuucaggcagcaccucagccuggcaccc

SEQ ID NO: 460331 - RNA, 15 nt, Human
ggcucuucuggacug

SEQ ID NO: 460332 - RNA, 22 nt, Human
ggcucuucugggggccaggcug

SEQ ID NO: 460333 - RNA, 32 nt, Human
ggcucuucuggucagccccacccugggggcca

SEQ ID NO: 460334 - RNA, 32 nt, Human
ggcucuugaacccauagaccccaguugaagau

SEQ ID NO: 460335 - RNA, 32 nt, Human
ggcucuugagccacuugcucuagcccacuccc

SEQ ID NO: 460336 - RNA, 20 nt, Human
ggcucuugauuuugucugcc

SEQ ID NO: 460337 - RNA, 19 nt, Human
ggcucuugcaacaucuccc

SEQ ID NO: 460338 - RNA, 31 nt, Human
ggcucuugcagcuagaguugacucagaagcc

SEQ ID NO: 460339 - RNA, 32 nt, Human
ggcucuugcccgaggugcccugaaccauugug

SEQ ID NO: 460340 - RNA, 32 nt, Human
ggcucuugccuguaaucccagcacuuugauag

SEQ ID NO: 460341 - RNA, 32 nt, Human
ggcucuugccuguaaucccagcacuuugggag

SEQ ID NO: 460342 - RNA, 32 nt, Human
ggcucuugccuguaaucccagcacuuugggga

SEQ ID NO: 460343 - RNA, 32 nt, Human
ggcucuugccuguaaucccagcauucugggag

SEQ ID NO: 460344 - RNA, 32 nt, Human
ggcucuugccuguaaucuuagcacuuugggag

SEQ ID NO: 460345 - RNA, 32 nt, Human
ggcucuugccuguaauuccagcuacuugggag

SEQ ID NO: 460346 - RNA, 32 nt, Human
ggcucuugccuguagucccggcacuuugggag

SEQ ID NO: 460347 - RNA, 31 nt, Human
ggcucuugucucucugggucuuagucccacu

SEQ ID NO: 460348 - RNA, 32 nt, Human
ggcucuugucuguaaucccagcgcucugggag

SEQ ID NO: 460349 - RNA, 32 nt, Human
ggcucuuuaaggcuuuguaggugagguuucca

SEQ ID NO: 460350 - RNA, 32 nt, Human
ggcucuuuacagggguguucucaccagguaga

SEQ ID NO: 460351 - RNA, 32 nt, Human
ggcucuuuaccaggaaccgcugcuuggauggu

SEQ ID NO: 460352 - RNA, 32 nt, Human
ggcucuuucucuaaucgccuuacuuagcuuuu

SEQ ID NO: 460353 - RNA, 32 nt, Human
ggcucuuucucucccgucucaguggcuucucu

SEQ ID NO: 460354 - RNA, 32 nt, Human
ggcucuuugauuugagucucagguuaauccuc

SEQ ID NO: 460355 - RNA, 32 nt, Human
ggcucuuugcaaccucugccuccugggcucaa

SEQ ID NO: 460356 - RNA, 32 nt, Human
ggcucuuugccuggccccgccuucccaucugu

SEQ ID NO: 460357 - RNA, 32 nt, Human
ggcucuuuggcugcucccacugccucagccaa

SEQ ID NO: 460358 - RNA, 32 nt, Human
ggcucuuuggggucagccagggccaggggucu

SEQ ID NO: 460359 - RNA, 32 nt, Human
ggcucuuugguuucccugcucuguuucauuua

SEQ ID NO: 460360 - RNA, 32 nt, Human
ggcucuuuuccccaggagagugaugauggagc

SEQ ID NO: 460361 - RNA, 22 nt, Human
ggcucuuuuucccaagccgcca

SEQ ID NO: 460362 - RNA, 32 nt, Human
ggcucuuuuuggacggucccaaaggaggcagc

SEQ ID NO: 460363 - RNA, 32 nt, Human
ggcugaaaaagcuguuucuggaaucaccccua

SEQ ID NO: 460364 - RNA, 21 nt, Human
ggcugaaaacgagggcccagg

SEQ ID NO: 460365 - RNA, 32 nt, Human
ggcugaaaccaccaccuccaccaccuugggac

SEQ ID NO: 460366 - RNA, 32 nt, Human
ggcugaaacuacaggcacaugccaccaugccc

SEQ ID NO: 460367 - RNA, 32 nt, Human
ggcugaaacugcuuucuuaggcauuuucuuaa

SEQ ID NO: 460368 - RNA, 32 nt, Human
ggcugaaagagucccuggugcgcagugcaggu

SEQ ID NO: 460369 - RNA, 28 nt, Human
ggcugaaauaguaaagcaccugaccaca

SEQ ID NO: 460370 - RNA, 32 nt, Human
ggcugaaauuaaagagaaagauccucacucaa

SEQ ID NO: 460371 - RNA, 32 nt, Human
ggcugaacacccugcggagcgggugagaucgg

SEQ ID NO: 460372 - RNA, 32 nt, Human
ggcugaacaccucgaccuucucugcacagcag

SEQ ID NO: 460373 - RNA, 32 nt, Human
ggcugaaccagccccggcugggcagcagcggg

SEQ ID NO: 460374 - RNA, 32 nt, Human
ggcugaacuaagugggcucuaggggaagguau

SEQ ID NO: 460375 - RNA, 18 nt, Human
ggcugaagaaacuauaga

SEQ ID NO: 460376 - RNA, 32 nt, Human
ggcugaagaagaacccgcacagcuaugugguc

SEQ ID NO: 460377 - RNA, 31 nt, Human
ggcugaagaagaccuguuggacuggaucuuc

SEQ ID NO: 460378 - RNA, 32 nt, Human
ggcugaagaauagaauuggccaggaccuaggu

SEQ ID NO: 460379 - RNA, 31 nt, Human
ggcugaagacaaggggccggcauucaguggg

SEQ ID NO: 460380 - RNA, 21 nt, Human
ggcugaagaggaggaggaaga

SEQ ID NO: 460381 - RNA, 32 nt, Human
ggcugaagcagcagaaccacagagguggcuga

SEQ ID NO: 460382 - RNA, 32 nt, Human
ggcugaagccaacagagucccaaccagugggc

SEQ ID NO: 460383 - RNA, 32 nt, Human
ggcugaagccaauaaucccagcacuuugagag

SEQ ID NO: 460384 - RNA, 24 nt, Human
ggcugaagcgauccucccaccuca

SEQ ID NO: 460385 - RNA, 24 nt, Human
ggcugaagcgauccucccaucuca

SEQ ID NO: 460386 - RNA, 32 nt, Human
ggcugaagcggguggaucaugaggucagaaga

SEQ ID NO: 460387 - RNA, 32 nt, Human
ggcugaagcugggaggugagccagucuccugg

SEQ ID NO: 460388 - RNA, 32 nt, Human
ggcugaaggagguggagcuggggaggaagaug

SEQ ID NO: 460389 - RNA, 32 nt, Human
ggcugaaggccccaccacccagccuguggaug

SEQ ID NO: 460390 - RNA, 32 nt, Human
ggcugaagggaaaaguacacagaggaagauau

SEQ ID NO: 460391 - RNA, 32 nt, Human
ggcugaagggagggaaaggcggcuugggccuc

SEQ ID NO: 460392 - RNA, 22 nt, Human
ggcugaaggugaagggaggaag

SEQ ID NO: 460393 - RNA, 32 nt, Human
ggcugaagucuguaauccuagcacuuugggag

SEQ ID NO: 460394 - RNA, 24 nt, Human
ggcugaagugauucucccaucuca

SEQ ID NO: 460395 - RNA, 32 nt, Human
ggcugaaucuuucuccucuaagcagucugguc

SEQ ID NO: 460396 - RNA, 23 nt, Human
ggcugaaugagugcguggaggaa

SEQ ID NO: 460397 - RNA, 32 nt, Human
ggcugaauguccagcagagcuauuuccuucca

SEQ ID NO: 460398 - RNA, 32 nt, Human
ggcugaauucuuuugcagaacuacuguguguc

SEQ ID NO: 460399 - RNA, 32 nt, Human
ggcugaauuugccuuuucccauguggaaugga

SEQ ID NO: 460400 - RNA, 32 nt, Human
ggcugacaaaggaaguagccuggggcauccuu

SEQ ID NO: 460401 - RNA, 32 nt, Human
ggcugacaacacucccucuccugggaccuccu

SEQ ID NO: 460402 - RNA, 32 nt, Human
ggcugacaauauugcugccuccccuaaauuga

SEQ ID NO: 460403 - RNA, 24 nt, Human
ggcugacaaugacuccuguuuuca

SEQ ID NO: 460404 - RNA, 32 nt, Human
ggcugacacagcagcagccuuucccacccagc

SEQ ID NO: 460405 - RNA, 32 nt, Human
ggcugacacccccauucccucucuucuuccac

SEQ ID NO: 460406 - RNA, 32 nt, Human
ggcugacaccgugaaaccuugucucuacuaaa

SEQ ID NO: 460407 - RNA, 32 nt, Human
ggcugacaccuauaaucucagcacuuugggag

SEQ ID NO: 460408 - RNA, 32 nt, Human
ggcugacaccuguaaucccagcacuuugggag

SEQ ID NO: 460409 - RNA, 32 nt, Human
ggcugacaccuguaaucccagcauuuugggag

SEQ ID NO: 460410 - RNA, 24 nt, Human
ggcugacagagcaagacucugucu

SEQ ID NO: 460411 - RNA, 32 nt, Human
ggcugacagagcucuggguugugcacauuucu

SEQ ID NO: 460412 - RNA, 32 nt, Human
ggcugacagcccugaagugaggcugcacacac

SEQ ID NO: 460413 - RNA, 32 nt, Human
ggcugacagggugaggcccaagccuggagcuu

SEQ ID NO: 460414 - RNA, 32 nt, Human
ggcugacaucuguaauccccgcacuuugugag

SEQ ID NO: 460415 - RNA, 32 nt, Human
ggcugacauggugaaacuccaucucuacuaaa

SEQ ID NO: 460416 - RNA, 32 nt, Human
ggcugacaugugccauuauauguaguauguaa

SEQ ID NO: 460417 - RNA, 18 nt, Human
ggcugaccaagcgccaaa

SEQ ID NO: 460418 - RNA, 32 nt, Human
ggcugaccaccagaaugagcauucagggcugu

SEQ ID NO: 460419 - RNA, 32 nt, Human
ggcugacccaaguguugaggggaccaaagcca

SEQ ID NO: 460420 - RNA, 32 nt, Human
ggcugacccaggcuggaggacaggaccagcca

SEQ ID NO: 460421 - RNA, 22 nt, Human
ggcugaccccauccuccucucc

SEQ ID NO: 460422 - RNA, 32 nt, Human
ggcugaccccauccuccucucccuccaggagc

SEQ ID NO: 460423 - RNA, 32 nt, Human
ggcugacccccacaccucccuccuggacgggg

SEQ ID NO: 460424 - RNA, 20 nt, Human
ggcugacccuccugcuggug

SEQ ID NO: 460425 - RNA, 32 nt, Human
ggcugacccugccuugggcgccgagggguugg

SEQ ID NO: 460426 - RNA, 32 nt, Human
ggcugaccgcgccagacccagacagagcaucg

SEQ ID NO: 460427 - RNA, 32 nt, Human
ggcugaccucaaacuccugaccucaggugauc

SEQ ID NO: 460428 - RNA, 32 nt, Human
ggcugaccuugaacuccugggcucaagcaguc

SEQ ID NO: 460429 - RNA, 32 nt, Human
ggcugaccuugagcucuugggcucaggugauc

SEQ ID NO: 460430 - RNA, 32 nt, Human
ggcugacgccuguaaucccagcacuuugggag

SEQ ID NO: 460431 - RNA, 32 nt, Human
ggcugacgcuacaccuuggucuuuccgggucc

SEQ ID NO: 460432 - RNA, 32 nt, Human
ggcugacgugggcagaucaugaggucaggaga

SEQ ID NO: 460433 - RNA, 32 nt, Human
ggcugacuccagcuucugguggaccuggauau

SEQ ID NO: 460434 - RNA, 32 nt, Human
ggcugacucccccaccucccuccuggacgggg

SEQ ID NO: 460435 - RNA, 32 nt, Human
ggcugacuccuccucugaggccuguguuggcc

SEQ ID NO: 460436 - RNA, 32 nt, Human
ggcugacuccuugagaaucuugcccaguccca

SEQ ID NO: 460437 - RNA, 32 nt, Human
ggcugacucugcugccccaaccuuucaaggag

SEQ ID NO: 460438 - RNA, 32 nt, Human
ggcugacugaauugcugacccuucaagcucug

SEQ ID NO: 460439 - RNA, 32 nt, Human
ggcugacugagcucaaaggaacaggauggcac

SEQ ID NO: 460440 - RNA, 32 nt, Human
ggcugacugcaaacucugccucccagguuuaa

SEQ ID NO: 460441 - RNA, 32 nt, Human
ggcugacugcaaccacugccuccaggguucaa

SEQ ID NO: 460442 - RNA, 23 nt, Human
ggcugacugcaaccuccaccucc

SEQ ID NO: 460443 - RNA, 32 nt, Human
ggcugacugcaaccuccaccucccgggugcaa

SEQ ID NO: 460444 - RNA, 24 nt, Human
ggcugacugcaaccuccaccuccu

SEQ ID NO: 460445 - RNA, 32 nt, Human
ggcugacugcaaccuccaccuccuggguucaa

SEQ ID NO: 460446 - RNA, 32 nt, Human
ggcugacugcaacuucugccuccuggguucaa

SEQ ID NO: 460447 - RNA, 32 nt, Human
ggcugacugcaaggcugucuccuuaaggcacu

SEQ ID NO: 460448 - RNA, 32 nt, Human
ggcugacugcaaucugugccuccugggcucaa

SEQ ID NO: 460449 - RNA, 32 nt, Human
ggcugacugcagucugugccuccugggcucaa

SEQ ID NO: 460450 - RNA, 32 nt, Human
ggcugacuggcagaggaagauugcagugacag

SEQ ID NO: 460451 - RNA, 32 nt, Human
ggcugacugggggccucugccuccaggagggc

SEQ ID NO: 460452 - RNA, 32 nt, Human
ggcugagaaauguaagaauuuuccaugguguu

SEQ ID NO: 460453 - RNA, 32 nt, Human
ggcugagaaccuuucagacccucugugugggc

SEQ ID NO: 460454 - RNA, 18 nt, Human
ggcugagaacucguucac

SEQ ID NO: 460455 - RNA, 18 nt, Human
ggcugagaaggggcagcu

SEQ ID NO: 460456 - RNA, 32 nt, Human
ggcugagaaucccagaggaggccgugaacugu

SEQ ID NO: 460457 - RNA, 32 nt, Human
ggcugagacuacaggugcuugccacuaugccc

SEQ ID NO: 460458 - RNA, 32 nt, Human
ggcugagacugcagaggagccaccugggcugg

SEQ ID NO: 460459 - RNA, 21 nt, Human
ggcugagagaagagcuugcgg

SEQ ID NO: 460460 - RNA, 32 nt, Human
ggcugagagagggagggcgacgggggugagaa

SEQ ID NO: 460461 - RNA, 32 nt, Human
ggcugagagauaugaugacaucgcagccugca

SEQ ID NO: 460462 - RNA, 32 nt, Human
ggcugagagauggaaggggugggauuugcucc

SEQ ID NO: 460463 - RNA, 32 nt, Human
ggcugagagauugagccugcagugagcuauga

SEQ ID NO: 460464 - RNA, 32 nt, Human
ggcugagagcugacaugaggaugaggaugggu

SEQ ID NO: 460465 - RNA, 20 nt, Human
ggcugagagcugggagccgg

SEQ ID NO: 460466 - RNA, 23 nt, Human
ggcugagaggacaccuggccgca

SEQ ID NO: 460467 - RNA, 32 nt, Human
ggcugagaggccucugggaaccccugugccaa

SEQ ID NO: 460468 - RNA, 32 nt, Human
ggcugagagggugggggcuggaaccccucccc

SEQ ID NO: 460469 - RNA, 20 nt, Human
ggcugagaggucaagguugc

SEQ ID NO: 460470 - RNA, 32 nt, Human
ggcugagaggucaagguugcagugagccauaa

SEQ ID NO: 460471 - RNA, 32 nt, Human
ggcugagaguuggagcucuccagcaacaugcc

SEQ ID NO: 460472 - RNA, 32 nt, Human
ggcugagauaggaucacuugggcccaggaguu

SEQ ID NO: 460473 - RNA, 32 nt, Human
ggcugagauggaaaacaagcccuuuauugaau

SEQ ID NO: 460474 - RNA, 32 nt, Human
ggcugagauggggugggcagggcagagcugau

SEQ ID NO: 460475 - RNA, 32 nt, Human
ggcugagauggguggccagcuuguacaccagu

SEQ ID NO: 460476 - RNA, 23 nt, Human
ggcugagaugucgacaggcagug

SEQ ID NO: 460477 - RNA, 21 nt, Human
ggcugagauugcagcccaugg

SEQ ID NO: 460478 - RNA, 32 nt, Human
ggcugagauuuaugggucuuccuugcccucca

SEQ ID NO: 460479 - RNA, 32 nt, Human
ggcugagcaagguggguggaucacuugaggcc

SEQ ID NO: 460480 - RNA, 32 nt, Human
ggcugagcaggagcugaaagugaacagcucac

SEQ ID NO: 460481 - RNA, 32 nt, Human
ggcugagcagugagcucugauuaugccagugc

SEQ ID NO: 460482 - RNA, 20 nt, Human
ggcugagcauccuccugccc

SEQ ID NO: 460483 - RNA, 32 nt, Human
ggcugagcauuuagugugagccagugacccau

SEQ ID NO: 460484 - RNA, 32 nt, Human
ggcugagcauuuccuuuugugcauccucucca

SEQ ID NO: 460485 - RNA, 32 nt, Human
ggcugagccaggacccaccacacucaacuccc

SEQ ID NO: 460486 - RNA, 32 nt, Human
ggcugagcccuccacaggcugcuuagugaggg

SEQ ID NO: 460487 - RNA, 18 nt, Human
ggcugagccgggguccag

SEQ ID NO: 460488 - RNA, 32 nt, Human
ggcugagccugaggccuuccagaaagcaggag

SEQ ID NO: 460489 - RNA, 32 nt, Human
ggcugagccugucagcauccucgacgcacccu

SEQ ID NO: 460490 - RNA, 32 nt, Human
ggcugagccuugggaguuucagcucuuuggcg

SEQ ID NO: 460491 - RNA, 32 nt, Human
ggcugagcggcugucuugccucuugucauugu

SEQ ID NO: 460492 - RNA, 32 nt, Human
ggcugagcugagaccaguugcuggugaaacug

SEQ ID NO: 460493 - RNA, 32 nt, Human
ggcugagcugcugaagcugcacuacaugcagg

SEQ ID NO: 460494 - RNA, 32 nt, Human
ggcugagcugggcagcuggaaguggcucuggg

SEQ ID NO: 460495 - RNA, 32 nt, Human
ggcugagcuuucugugcuucuagguggagcug

SEQ ID NO: 460496 - RNA, 32 nt, Human
ggcugaggaaagcaggaggagguggcggcggc

SEQ ID NO: 460497 - RNA, 32 nt, Human
ggcugaggaaagcaggaggaggugguggcggc

SEQ ID NO: 460498 - RNA, 32 nt, Human
ggcugaggacaccacugucagcacagacagug

SEQ ID NO: 460499 - RNA, 32 nt, Human
ggcugaggacagaugugccugcuuguggagac

SEQ ID NO: 460500 - RNA, 32 nt, Human
ggcugaggacaggggagggagugaaguugguu

SEQ ID NO: 460501 - RNA, 32 nt, Human
ggcugaggagagaaaagggugauuagcguggg

SEQ ID NO: 460502 - RNA, 32 nt, Human
ggcugaggaggacaagccagacgggcaggcac

SEQ ID NO: 460503 - RNA, 32 nt, Human
ggcugaggaggcgggaaggcggcagugguuga

SEQ ID NO: 460504 - RNA, 32 nt, Human
ggcugaggaggcugaggggcugaggggcugag

SEQ ID NO: 460505 - RNA, 21 nt, Human
ggcugaggagggaagccaggg

SEQ ID NO: 460506 - RNA, 24 nt, Human
ggcugaggagggacgcggaggagg

SEQ ID NO: 460507 - RNA, 32 nt, Human
ggcugaggaggugaaaguuucuccccaggaag

SEQ ID NO: 460508 - RNA, 32 nt, Human
ggcugaggcagaagaauugaacccaggaggug

SEQ ID NO: 460509 - RNA, 23 nt, Human
ggcugaggcagaaggaucacugg

SEQ ID NO: 460510 - RNA, 32 nt, Human
ggcugaggcaggaggaggauaacuugaaccca

SEQ ID NO: 460511 - RNA, 32 nt, Human
ggcugaggcaggaggaucgcuugaguguguga

SEQ ID NO: 460512 - RNA, 32 nt, Human
ggcugaggcaggcagaucacgaggucaggagu

SEQ ID NO: 460513 - RNA, 32 nt, Human
ggcugaggcaggcagaucaugaggucaagaga

SEQ ID NO: 460514 - RNA, 32 nt, Human
ggcugaggcaggcagauugcuugagcucagga

SEQ ID NO: 460515 - RNA, 32 nt, Human
ggcugaggcaggcggaucaugaggucaggaga

SEQ ID NO: 460516 - RNA, 32 nt, Human
ggcugaggcauggagaaucgcuugaacccagg

SEQ ID NO: 460517 - RNA, 32 nt, Human
ggcugaggccagagucaccuuuucuguggcug

SEQ ID NO: 460518 - RNA, 17 nt, Human
ggcugaggccaggguga

SEQ ID NO: 460519 - RNA, 32 nt, Human
ggcugaggccauggcaggacagcugcuguggg

SEQ ID NO: 460520 - RNA, 32 nt, Human
ggcugaggcccaaaccgucuuuucucucagag

SEQ ID NO: 460521 - RNA, 32 nt, Human
ggcugaggcccccacccuccccuggaacgcgc

SEQ ID NO: 460522 - RNA, 32 nt, Human
ggcugaggcggaggcaggauugcuugauauga

SEQ ID NO: 460523 - RNA, 32 nt, Human
ggcugaggcgggcagaucaugaggucagaaga

SEQ ID NO: 460524 - RNA, 32 nt, Human
ggcugaggcgggcagaucaugaggucaggaga

SEQ ID NO: 460525 - RNA, 32 nt, Human
ggcugaggcgggcggaucaugaggucaggaga

SEQ ID NO: 460526 - RNA, 32 nt, Human
ggcugaggcgggcggaucaugaggucaggagu

SEQ ID NO: 460527 - RNA, 32 nt, Human
ggcugaggcgggugaaucaugaggucaggagu

SEQ ID NO: 460528 - RNA, 32 nt, Human
ggcugaggcggguggaucaugaggucaagaga

SEQ ID NO: 460529 - RNA, 32 nt, Human
ggcugaggcggguggaucaugaggucaggagu

SEQ ID NO: 460530 - RNA, 32 nt, Human
ggcugaggcuugagcccaggagguggagguug

SEQ ID NO: 460531 - RNA, 32 nt, Human
ggcugagggaaaggaagaggagugggccugag

SEQ ID NO: 460532 - RNA, 32 nt, Human
ggcugagggaauuguccucuguggaagggacu

SEQ ID NO: 460533 - RNA, 32 nt, Human
ggcugagggacacguccaagcugcagucggcu

SEQ ID NO: 460534 - RNA, 32 nt, Human
ggcugagggagaaucacuugggcucaggagcu

SEQ ID NO: 460535 - RNA, 32 nt, Human
ggcugagggaggcagaaagggaaaguauuagc

SEQ ID NO: 460536 - RNA, 32 nt, Human
ggcugagggcccugugugcucacugaaggcug

SEQ ID NO: 460537 - RNA, 21 nt, Human
ggcugagggccuuguggagga

SEQ ID NO: 460538 - RNA, 32 nt, Human
ggcugagggcggaggggccggggaagagcccg

SEQ ID NO: 460539 - RNA, 32 nt, Human
ggcugagggcgggugguacagauguguauggg

SEQ ID NO: 460540 - RNA, 32 nt, Human
ggcugaggggcugaggaggcugaggggcugag

SEQ ID NO: 460541 - RNA, 32 nt, Human
ggcugaggggcugaggcggcugaggggcugag

SEQ ID NO: 460542 - RNA, 32 nt, Human
ggcugaggggucgggggaagaaaacagaugac

SEQ ID NO: 460543 - RNA, 32 nt, Human
ggcugaggggugggagggagggcagagcucug

SEQ ID NO: 460544 - RNA, 32 nt, Human
ggcugaggguaaggaaaagaagagacuaggaa

SEQ ID NO: 460545 - RNA, 32 nt, Human
ggcugagggucugagagcaggacaggaaaacc

SEQ ID NO: 460546 - RNA, 32 nt, Human
ggcugagggugagggaacagccuggaugugag

SEQ ID NO: 460547 - RNA, 32 nt, Human
ggcugagggugagguguggaagggacaggggg

SEQ ID NO: 460548 - RNA, 32 nt, Human
ggcugaggguggucacaccugagccuucagca

SEQ ID NO: 460549 - RNA, 32 nt, Human
ggcugaggguucugcuguccugugccacccca

SEQ ID NO: 460550 - RNA, 23 nt, Human
ggcugaggguuggggggaggaag

SEQ ID NO: 460551 - RNA, 23 nt, Human
ggcugagguacaagaauugcugg

SEQ ID NO: 460552 - RNA, 32 nt, Human
ggcugagguagguggaucaugaggucaggaga

SEQ ID NO: 460553 - RNA, 32 nt, Human
ggcugaggugcugggcaaccagccugcuccca

SEQ ID NO: 460554 - RNA, 21 nt, Human
ggcugagguggacggaucacg

SEQ ID NO: 460555 - RNA, 23 nt, Human
ggcugagguggaggcggagggag

SEQ ID NO: 460556 - RNA, 32 nt, Human
ggcugagguggaggcggagggaggcggcggcg

SEQ ID NO: 460557 - RNA, 32 nt, Human
ggcugaggugggaggauccucugaucugggga

SEQ ID NO: 460558 - RNA, 32 nt, Human
ggcugaggugggggacacaggagaaaccaggc

SEQ ID NO: 460559 - RNA, 32 nt, Human
ggcugagguggguggaugccgaggugagugga

SEQ ID NO: 460560 - RNA, 32 nt, Human
ggcugaggugugaggaucauuuaggccuggaa

SEQ ID NO: 460561 - RNA, 32 nt, Human
ggcugaggugugaggaucuuugagcccgggag

SEQ ID NO: 460562 - RNA, 32 nt, Human
ggcugagucacuccucgggucucuccauaauu

SEQ ID NO: 460563 - RNA, 32 nt, Human
ggcugagucagccagauccucccccuacuucu

SEQ ID NO: 460564 - RNA, 24 nt, Human
ggcugagucuacccagcucaaggu

SEQ ID NO: 460565 - RNA, 20 nt, Human
ggcugagucucagcccaagg

SEQ ID NO: 460566 - RNA, 22 nt, Human
ggcugagucuccagcucaaggu

SEQ ID NO: 460567 - RNA, 32 nt, Human
ggcugagugaaauggacgucaccagaacuuuc

SEQ ID NO: 460568 - RNA, 32 nt, Human
ggcugagugaacauacacauugccaauauucu

SEQ ID NO: 460569 - RNA, 32 nt, Human
ggcugagugaauuuggauagauauaauaugca

SEQ ID NO: 460570 - RNA, 32 nt, Human
ggcugagugagggugaguaaagagguagagga

SEQ ID NO: 460571 - RNA, 32 nt, Human
ggcugaguguaugccaccucagauucauaugu

SEQ ID NO: 460572 - RNA, 32 nt, Human
ggcugaguuggcagccaaggagaacucgccaa

SEQ ID NO: 460573 - RNA, 32 nt, Human
ggcugaguugggggcccuaggcagggguaagc

SEQ ID NO: 460574 - RNA, 32 nt, Human
ggcugaguuuuccuccccagacucuccugcgu

SEQ ID NO: 460575 - RNA, 20 nt, Human
ggcugauaccaccuaccuca

SEQ ID NO: 460576 - RNA, 16 nt, Human
ggcugauaccugaggc

SEQ ID NO: 460577 - RNA, 32 nt, Human
ggcugauaccuuugugaaguugcccaccaaaa

SEQ ID NO: 460578 - RNA, 32 nt, Human
ggcugauagcugguaucacauaguuggaguca

SEQ ID NO: 460579 - RNA, 32 nt, Human
ggcugaucaaagaacucugacugcagaacugc

SEQ ID NO: 460580 - RNA, 32 nt, Human
ggcugauccuggcucgagcacacacaucuaag

SEQ ID NO: 460581 - RNA, 32 nt, Human
ggcugaucgcuguuccuugagcaaggcgcuua

SEQ ID NO: 460582 - RNA, 32 nt, Human
ggcugaucucaaacuccugaccucaugaucca

SEQ ID NO: 460583 - RNA, 32 nt, Human
ggcugaucucaaacuccugaucucaagugauc

SEQ ID NO: 460584 - RNA, 32 nt, Human
ggcugaucucaaacuccuggacucaagcgauc

SEQ ID NO: 460585 - RNA, 32 nt, Human
ggcugaucucaaacuccuggccucaagugauc

SEQ ID NO: 460586 - RNA, 32 nt, Human
ggcugaucucaaacuccugggcuccaacgauc

SEQ ID NO: 460587 - RNA, 32 nt, Human
ggcugaucucaaacuucugaccucaggugauc

SEQ ID NO: 460588 - RNA, 32 nt, Human
ggcugaucucagaaaggaauaaggaugaggca

SEQ ID NO: 460589 - RNA, 25 nt, Human
ggcugaucucgaacuccugaccgca

SEQ ID NO: 460590 - RNA, 32 nt, Human
ggcugaucucgaacuccugacuuuaggugauc

SEQ ID NO: 460591 - RNA, 32 nt, Human
ggcugaucucgagcuccugaccucaggugauc

SEQ ID NO: 460592 - RNA, 32 nt, Human
ggcugaucucgagcuccugggcucaagugauc

SEQ ID NO: 460593 - RNA, 32 nt, Human
ggcugaucuggaacuccugaccucaggugauc

SEQ ID NO: 460594 - RNA, 32 nt, Human
ggcugaucuugaacuccugaccucaggugauc

SEQ ID NO: 460595 - RNA, 32 nt, Human
ggcugaucuugaacuccugaccucgggaucca

SEQ ID NO: 460596 - RNA, 32 nt, Human
ggcugaucuugaacuccugagcucaugaucca

SEQ ID NO: 460597 - RNA, 32 nt, Human
ggcugaucuugaacuccugaggucaggcaauc

SEQ ID NO: 460598 - RNA, 32 nt, Human
ggcugaucuugaacuccugggcucaagagauc

SEQ ID NO: 460599 - RNA, 32 nt, Human
ggcugaucuugcacucccagccucaggugauc

SEQ ID NO: 460600 - RNA, 32 nt, Human
ggcugaugagacuaauuauucccacuagccag

SEQ ID NO: 460601 - RNA, 32 nt, Human
ggcugaugagauacugagcucauuaucaguuc

SEQ ID NO: 460602 - RNA, 22 nt, Human
ggcugaugaggaaggaugacgg

SEQ ID NO: 460603 - RNA, 32 nt, Human
ggcugaugagugugugggguauggggcagcag

SEQ ID NO: 460604 - RNA, 32 nt, Human
ggcugaugcagcgcugcugggcccucagcccc

SEQ ID NO: 460605 - RNA, 32 nt, Human
ggcugaugccuguaaucccagcacuuugggag

SEQ ID NO: 460606 - RNA, 32 nt, Human
ggcugaugccugucaucccaacgcuuugggag

SEQ ID NO: 460607 - RNA, 32 nt, Human
ggcugaugcuuggagcagagaugaggacucag

SEQ ID NO: 460608 - RNA, 32 nt, Human
ggcugaugcuuguauucccagcauuuggggag

SEQ ID NO: 460609 - RNA, 32 nt, Human
ggcugauggaaaugaccucugugcagcuaagg

SEQ ID NO: 460610 - RNA, 32 nt, Human
ggcugauggcagcuaggcccuaggaaggagcc

SEQ ID NO: 460611 - RNA, 32 nt, Human
ggcugaugggagcagugagcgggcuccgcugc

SEQ ID NO: 460612 - RNA, 21 nt, Human
ggcugauggggaagggggcug

SEQ ID NO: 460613 - RNA, 23 nt, Human
ggcugauugcagagcacuaugag

SEQ ID NO: 460614 - RNA, 32 nt, Human
ggcugauugcagccuugaccuccuugacucaa

SEQ ID NO: 460615 - RNA, 32 nt, Human
ggcugauuggcugggcaggaacagcgccgggg

SEQ ID NO: 460616 - RNA, 31 nt, Human
ggcugauugguggaaaguaggguggaccaaa

SEQ ID NO: 460617 - RNA, 19 nt, Human
ggcugauugucuuuuauca

SEQ ID NO: 460618 - RNA, 18 nt, Human
ggcugauuucagauucuc

SEQ ID NO: 460619 - RNA, 32 nt, Human
ggcugauuucaggaugauuacaugggccaggg

SEQ ID NO: 460620 - RNA, 32 nt, Human
ggcugauuucgaacuccugaccucagaugacc

SEQ ID NO: 460621 - RNA, 32 nt, Human
ggcugauuuugaacuccugaccucaggugauc

SEQ ID NO: 460622 - RNA, 32 nt, Human
ggcugcaaaaggugaaaagcaccaagagguuu

SEQ ID NO: 460623 - RNA, 32 nt, Human
ggcugcaaacaccucccugugcuccaccugcc

SEQ ID NO: 460624 - RNA, 32 nt, Human
ggcugcaaagcgagaagagagccgguggagug

SEQ ID NO: 460625 - RNA, 32 nt, Human
ggcugcaacacccagaccuccaggagagacca

SEQ ID NO: 460626 - RNA, 32 nt, Human
ggcugcaagcucugcugccuccuugccuuucc

SEQ ID NO: 460627 - RNA, 32 nt, Human
ggcugcaagggguggaggcugagcuggaaggg

SEQ ID NO: 460628 - RNA, 32 nt, Human
ggcugcacaccuagacucgcccugccagggcc

SEQ ID NO: 460629 - RNA, 19 nt, Human
ggcugcacacgcagaguga

SEQ ID NO: 460630 - RNA, 32 nt, Human
ggcugcacagcccaaccaggaggggucugccu

SEQ ID NO: 460631 - RNA, 32 nt, Human
ggcugcacagcccgagggucucuggcugcggg

SEQ ID NO: 460632 - RNA, 32 nt, Human
ggcugcacagggaagggaaagacugggcuuug

SEQ ID NO: 460633 - RNA, 32 nt, Human
ggcugcaccacaccccuuccccuagaugacug

SEQ ID NO: 460634 - RNA, 32 nt, Human
ggcugcacccaccuccuccccuuccuaccccc

SEQ ID NO: 460635 - RNA, 24 nt, Human
ggcugcaccggcagaggcugcggg

SEQ ID NO: 460636 - RNA, 32 nt, Human
ggcugcacggccguccuggccaugccucugcc

SEQ ID NO: 460637 - RNA, 19 nt, Human
ggcugcacggcucgugcca

SEQ ID NO: 460638 - RNA, 24 nt, Human
ggcugcacugcuacuugugcuguc

SEQ ID NO: 460639 - RNA, 32 nt, Human
ggcugcacuggcccaagccaaggggucuccuu

SEQ ID NO: 460640 - RNA, 19 nt, Human
ggcugcacuuuggguccag

SEQ ID NO: 460641 - RNA, 32 nt, Human
ggcugcagaaauaccuggugcucaagucaugg

SEQ ID NO: 460642 - RNA, 21 nt, Human
ggcugcagaacauccgccgca

SEQ ID NO: 460643 - RNA, 32 nt, Human
ggcugcagaagaaaguugucacuccagugagu

SEQ ID NO: 460644 - RNA, 21 nt, Human
ggcugcagaaugcgcuuuaga

SEQ ID NO: 460645 - RNA, 21 nt, Human
ggcugcagaccccugcaucag

SEQ ID NO: 460646 - RNA, 21 nt, Human
ggcugcagaccccugugccag

SEQ ID NO: 460647 - RNA, 32 nt, Human
ggcugcagagcaaggaugaagccucaggaggg

SEQ ID NO: 460648 - RNA, 32 nt, Human
ggcugcagagccugggcucagccccagggagg

SEQ ID NO: 460649 - RNA, 19 nt, Human
ggcugcagagccuguggca

SEQ ID NO: 460650 - RNA, 22 nt, Human
ggcugcagagcuuggggggcug

SEQ ID NO: 460651 - RNA, 32 nt, Human
ggcugcagaggaaguguggggaggaaggaagu

SEQ ID NO: 460652 - RNA, 22 nt, Human
ggcugcagaggccaucgcagcu

SEQ ID NO: 460653 - RNA, 32 nt, Human
ggcugcagagggcuccagguucugggccccug

SEQ ID NO: 460654 - RNA, 32 nt, Human
ggcugcagagugggcucccugccccucucugc

SEQ ID NO: 460655 - RNA, 26 nt, Human
ggcugcagauucuuuccaccauggcc

SEQ ID NO: 460656 - RNA, 23 nt, Human
ggcugcagcacccagcugugguc

SEQ ID NO: 460657 - RNA, 32 nt, Human
ggcugcagcaggagcuggacgacgccaccaug

SEQ ID NO: 460658 - RNA, 32 nt, Human
ggcugcagccaucugaagcuuggcuggagcug

SEQ ID NO: 460659 - RNA, 20 nt, Human
ggcugcagcccaggccaugg

SEQ ID NO: 460660 - RNA, 23 nt, Human
ggcugcagccucaugccaugucu

SEQ ID NO: 460661 - RNA, 32 nt, Human
ggcugcagccuccccagcucuccucugccagc

SEQ ID NO: 460662 - RNA, 32 nt, Human
ggcugcagccuccucuuucugucucugaucag

SEQ ID NO: 460663 - RNA, 32 nt, Human
ggcugcagccugaccccucugccaucggccuc

SEQ ID NO: 460664 - RNA, 32 nt, Human
ggcugcagccugggugacagagcaagacccug

SEQ ID NO: 460665 - RNA, 19 nt, Human
ggcugcagcgacaccaugg

SEQ ID NO: 460666 - RNA, 32 nt, Human
ggcugcagcgcagcagcacccaacgcaaggca

SEQ ID NO: 460667 - RNA, 23 nt, Human
ggcugcagcgcuaccgcccggcc

SEQ ID NO: 460668 - RNA, 19 nt, Human
ggcugcagcggcaccgcgg

SEQ ID NO: 460669 - RNA, 26 nt, Human
ggcugcagcggcaggaccgccauggu

SEQ ID NO: 460670 - RNA, 32 nt, Human
ggcugcagcucaccauguaugccugaccaggc

SEQ ID NO: 460671 - RNA, 23 nt, Human
ggcugcagcucgggacuucggcc

SEQ ID NO: 460672 - RNA, 23 nt, Human
ggcugcagcucgggccuucggcc

SEQ ID NO: 460673 - RNA, 26 nt, Human
ggcugcagcugcaggacccuguggcc

SEQ ID NO: 460674 - RNA, 27 nt, Human
ggcugcagcugccgcggcuaccauggc

SEQ ID NO: 460675 - RNA, 27 nt, Human
ggcugcagcuuacugcccgccgcggcc

SEQ ID NO: 460676 - RNA, 25 nt, Human
ggcugcagcuucaggggccauggcu

SEQ ID NO: 460677 - RNA, 19 nt, Human
ggcugcagcuuccacagcc

SEQ ID NO: 460678 - RNA, 25 nt, Human
ggcugcagcuuccacagccacugcc

SEQ ID NO: 460679 - RNA, 20 nt, Human
ggcugcagcuuuuugcucuc

SEQ ID NO: 460680 - RNA, 32 nt, Human
ggcugcaggacccucuacacacagacagcugu

SEQ ID NO: 460681 - RNA, 32 nt, Human
ggcugcaggacgcucucuucuugagugcaggu

SEQ ID NO: 460682 - RNA, 32 nt, Human
ggcugcaggagcaagugaccaggagcaggacu

SEQ ID NO: 460683 - RNA, 32 nt, Human
ggcugcaggagcaggcuucggacauuaaagga

SEQ ID NO: 460684 - RNA, 32 nt, Human
ggcugcaggaggccaugaagguggccguggac

SEQ ID NO: 460685 - RNA, 22 nt, Human
ggcugcaggcaucuccauggcc

SEQ ID NO: 460686 - RNA, 21 nt, Human
ggcugcaggcuagugcucuca

SEQ ID NO: 460687 - RNA, 24 nt, Human
ggcugcaggcugagcucuaaccag

SEQ ID NO: 460688 - RNA, 32 nt, Human
ggcugcaggcuggagugcagugggacagcgcu

SEQ ID NO: 460689 - RNA, 21 nt, Human
ggcugcaggcuucauuaggcu

SEQ ID NO: 460690 - RNA, 22 nt, Human
ggcugcagggagccgcugggcc

SEQ ID NO: 460691 - RNA, 23 nt, Human
ggcugcagggauggggggaguuu

SEQ ID NO: 460692 - RNA, 32 nt, Human
ggcugcagggcaggggacagcagagcagagag

SEQ ID NO: 460693 - RNA, 26 nt, Human
ggcugcagggcgugcaccgcgcggcc

SEQ ID NO: 460694 - RNA, 25 nt, Human
ggcugcaggggauucuguguuuuca

SEQ ID NO: 460695 - RNA, 19 nt, Human
ggcugcaggggcugggcca

SEQ ID NO: 460696 - RNA, 32 nt, Human
ggcugcaggggguagcccugccgcacuuuguc

SEQ ID NO: 460697 - RNA, 32 nt, Human
ggcugcaguauugacuccagugacauaaaguu

SEQ ID NO: 460698 - RNA, 32 nt, Human
ggcugcagucgcugcauuuguaccgcugccag

SEQ ID NO: 460699 - RNA, 22 nt, Human
ggcugcagucugggccggggcc

SEQ ID NO: 460700 - RNA, 32 nt, Human
ggcugcagugagccaugaucauuccacugcau

SEQ ID NO: 460701 - RNA, 20 nt, Human
ggcugcagugagccaugguu

SEQ ID NO: 460702 - RNA, 22 nt, Human
ggcugcagugagcuaucauggu

SEQ ID NO: 460703 - RNA, 32 nt, Human
ggcugcagugagcugggauuacaccauugcau

SEQ ID NO: 460704 - RNA, 23 nt, Human
ggcugcagugagcugugcuccca

SEQ ID NO: 460705 - RNA, 23 nt, Human
ggcugcaguggcggcgugucuca

SEQ ID NO: 460706 - RNA, 22 nt, Human
ggcugcagugggaccacuggcc

SEQ ID NO: 460707 - RNA, 32 nt, Human
ggcugcagugggagccgccagucugacccuug

SEQ ID NO: 460708 - RNA, 18 nt, Human
ggcugcagugggggguca

SEQ ID NO: 460709 - RNA, 18 nt, Human
ggcugcagugggguccag

SEQ ID NO: 460710 - RNA, 21 nt, Human
ggcugcaguucuacucaggcu

SEQ ID NO: 460711 - RNA, 32 nt, Human
ggcugcaguucuggacgggcuggccgagcugc

SEQ ID NO: 460712 - RNA, 22 nt, Human
ggcugcaguugcaccuccggcc

SEQ ID NO: 460713 - RNA, 24 nt, Human
ggcugcaguuuugcuaucugggcu

SEQ ID NO: 460714 - RNA, 32 nt, Human
ggcugcauccugcaaagccacaggggaagagc

SEQ ID NO: 460715 - RNA, 32 nt, Human
ggcugcaucugaaucggaaguuuagcggugag

SEQ ID NO: 460716 - RNA, 32 nt, Human
ggcugcaucuguggggcccugggagagacuca

SEQ ID NO: 460717 - RNA, 32 nt, Human
ggcugcaucuuaagacuucuugucccauuagu

SEQ ID NO: 460718 - RNA, 24 nt, Human
ggcugcaugaggacagcccugugg

SEQ ID NO: 460719 - RNA, 18 nt, Human
ggcugcaugcaggggagg

SEQ ID NO: 460720 - RNA, 25 nt, Human
ggcugcaugccccacagcccugugg

SEQ ID NO: 460721 - RNA, 32 nt, Human
ggcugcaugcucugcuuggccuugccaugccg

SEQ ID NO: 460722 - RNA, 32 nt, Human
ggcugcauggaggacgacgcaccccacaagag

SEQ ID NO: 460723 - RNA, 32 nt, Human
ggcugcaugggagagccagggaggggaguuuc

SEQ ID NO: 460724 - RNA, 21 nt, Human
ggcugcaugugccacuugguc

SEQ ID NO: 460725 - RNA, 32 nt, Human
ggcugcauucccagacaggccaugcucucgug

SEQ ID NO: 460726 - RNA, 32 nt, Human
ggcugccaacacccugcacuccugcuugcgcc

SEQ ID NO: 460727 - RNA, 32 nt, Human
ggcugccaaccugauccugccugggcaacccu

SEQ ID NO: 460728 - RNA, 32 nt, Human
ggcugccaagaguccaagccaucuggcccaac

SEQ ID NO: 460729 - RNA, 32 nt, Human
ggcugccacagcuggacccagccuuguucuca

SEQ ID NO: 460730 - RNA, 32 nt, Human
ggcugccaccagcgaaugaaacuuuuguauga

SEQ ID NO: 460731 - RNA, 32 nt, Human
ggcugccacccucccuccugccugugucccag

SEQ ID NO: 460732 - RNA, 32 nt, Human
ggcugccacugcacuuagcacuuucaggcucc

SEQ ID NO: 460733 - RNA, 32 nt, Human
ggcugccagacagcugcccuggcguugccguc

SEQ ID NO: 460734 - RNA, 32 nt, Human
ggcugccagacgucacuccacccgccagggag

SEQ ID NO: 460735 - RNA, 17 nt, Human
ggcugccagcagcgggc

SEQ ID NO: 460736 - RNA, 32 nt, Human
ggcugccagcagcugcugcaccugugugucca

SEQ ID NO: 460737 - RNA, 32 nt, Human
ggcugccagcguccuuguagcagagcaguuuc

SEQ ID NO: 460738 - RNA, 21 nt, Human
ggcugccagcuaaggucccuu

SEQ ID NO: 460739 - RNA, 32 nt, Human
ggcugccagcuggaaccugaguugucagcuca

SEQ ID NO: 460740 - RNA, 20 nt, Human
ggcugccagcuguuuuacca

SEQ ID NO: 460741 - RNA, 32 nt, Human
ggcugccaggaagcagagaugcagaccccaag

SEQ ID NO: 460742 - RNA, 32 nt, Human
ggcugccaggacgcgagccacugaggagccgc

SEQ ID NO: 460743 - RNA, 32 nt, Human
ggcugccaggccccaaauugaggaaguugacu

SEQ ID NO: 460744 - RNA, 32 nt, Human
ggcugccaggccugcugcuccugccgagaagc

SEQ ID NO: 460745 - RNA, 32 nt, Human
ggcugccagggaccucacuuucccagggccuc

SEQ ID NO: 460746 - RNA, 32 nt, Human
ggcugccagggaccuucagcucccagaggcag

SEQ ID NO: 460747 - RNA, 32 nt, Human
ggcugccagggacugcucacucugcagagcca

SEQ ID NO: 460748 - RNA, 32 nt, Human
ggcugccagguaaguucuucaaagaggcucuc

SEQ ID NO: 460749 - RNA, 31 nt, Human
ggcugccauaggugaaucacagcagaggccu

SEQ ID NO: 460750 - RNA, 32 nt, Human
ggcugccaucccucggggcccaggcccucacc

SEQ ID NO: 460751 - RNA, 32 nt, Human
ggcugccauggaggaggaagaggaggcgauag

SEQ ID NO: 460752 - RNA, 32 nt, Human
ggcugccauggucuccuugccugcuccaaggc

SEQ ID NO: 460753 - RNA, 32 nt, Human
ggcugccaugguuauucuguuuggaaaacacu

SEQ ID NO: 460754 - RNA, 32 nt, Human
ggcugccauuggaggcuguuaucugugaagaa

SEQ ID NO: 460755 - RNA, 32 nt, Human
ggcugccauuuccagcaugcaggugacuucca

SEQ ID NO: 460756 - RNA, 22 nt, Human
ggcugcccaaaccaccacugcu

SEQ ID NO: 460757 - RNA, 32 nt, Human
ggcugcccaaagcagaacuacuccuucaauga

SEQ ID NO: 460758 - RNA, 32 nt, Human
ggcugcccaaagugcugggauuacaggcaaga

SEQ ID NO: 460759 - RNA, 32 nt, Human
ggcugcccaaccagcuccaacacugcuggagg

SEQ ID NO: 460760 - RNA, 32 nt, Human
ggcugcccaacuguguggaggcugagugauug

SEQ ID NO: 460761 - RNA, 32 nt, Human
ggcugcccacaagaccaugagccacccuguga

SEQ ID NO: 460762 - RNA, 32 nt, Human
ggcugcccagaacccugccaaccaaggcacgg

SEQ ID NO: 460763 - RNA, 32 nt, Human
ggcugcccagagagguggagucgguagcgggg

SEQ ID NO: 460764 - RNA, 32 nt, Human
ggcugcccagcccuggcaccugcuucacacgg

SEQ ID NO: 460765 - RNA, 21 nt, Human
ggcugcccaggaggccuugga

SEQ ID NO: 460766 - RNA, 19 nt, Human
ggcugcccaggcccugccu

SEQ ID NO: 460767 - RNA, 23 nt, Human
ggcugcccagugcccacccccgg

SEQ ID NO: 460768 - RNA, 32 nt, Human
ggcugccccagcccugggggucgugggcagcu

SEQ ID NO: 460769 - RNA, 23 nt, Human
ggcugccccagcuacgcugggag

SEQ ID NO: 460770 - RNA, 28 nt, Human
ggcugccccagugcugccacagucccac

SEQ ID NO: 460771 - RNA, 32 nt, Human
ggcugccccagugcugccacagucccacuucu

SEQ ID NO: 460772 - RNA, 28 nt, Human
ggcugccccagugcugccacagucccau

SEQ ID NO: 460773 - RNA, 32 nt, Human
ggcugccccagugcugccacagucccauuucu

SEQ ID NO: 460774 - RNA, 32 nt, Human
ggcugccccuccucccugggccugcuggggcc

SEQ ID NO: 460775 - RNA, 32 nt, Human
ggcugccccucggcgggcgccccgccauguac

SEQ ID NO: 460776 - RNA, 32 nt, Human
ggcugccccugaccuucuggccagagagacau

SEQ ID NO: 460777 - RNA, 32 nt, Human
ggcugccccugccacuccccugguaaugcaua

SEQ ID NO: 460778 - RNA, 32 nt, Human
ggcugccccugcccuggcugagcucauggugu

SEQ ID NO: 460779 - RNA, 32 nt, Human
ggcugccccugccucccaucacagacagcaga

SEQ ID NO: 460780 - RNA, 32 nt, Human
ggcugccccuggcuucuuccucccuuucccgc

SEQ ID NO: 460781 - RNA, 32 nt, Human
ggcugcccgccgccccuccacccauccagugg

SEQ ID NO: 460782 - RNA, 20 nt, Human
ggcugcccgccucccugcca

SEQ ID NO: 460783 - RNA, 21 nt, Human
ggcugcccgcggcacggcggg

SEQ ID NO: 460784 - RNA, 32 nt, Human
ggcugcccgcucccagugucuuccuguggggg

SEQ ID NO: 460785 - RNA, 23 nt, Human
ggcugcccggccgggcgugcggg

SEQ ID NO: 460786 - RNA, 19 nt, Human
ggcugcccuagccaaucca

SEQ ID NO: 460787 - RNA, 32 nt, Human
ggcugcccucaccugucccccuugccugugaa

SEQ ID NO: 460788 - RNA, 32 nt, Human
ggcugcccuccacccucacccuccacccuuug

SEQ ID NO: 460789 - RNA, 32 nt, Human
ggcugcccuccagaaagccgggguaggaacuc

SEQ ID NO: 460790 - RNA, 32 nt, Human
ggcugcccuccccucacaguuccugcaccuca

SEQ ID NO: 460791 - RNA, 22 nt, Human
ggcugcccucgccgccaagguc

SEQ ID NO: 460792 - RNA, 17 nt, Human
ggcugcccucugcugcc

SEQ ID NO: 460793 - RNA, 32 nt, Human
ggcugcccugacucaaccccagccuggggcuu

SEQ ID NO: 460794 - RNA, 32 nt, Human
ggcugcccugcagaggccaggucugcccagca

SEQ ID NO: 460795 - RNA, 24 nt, Human
ggcugcccugcccauacugugcag

SEQ ID NO: 460796 - RNA, 32 nt, Human
ggcugcccugcucacucucauugucuggccuc

SEQ ID NO: 460797 - RNA, 31 nt, Human
ggcugcccugcuugugggccuguguggcaca

SEQ ID NO: 460798 - RNA, 32 nt, Human
ggcugcccuggaacugggagacagggagaauc

SEQ ID NO: 460799 - RNA, 28 nt, Human
ggcugcccuggugcugccacacuucagg

SEQ ID NO: 460800 - RNA, 32 nt, Human
ggcugccgcaccuguccagacacacauguucu

SEQ ID NO: 460801 - RNA, 32 nt, Human
ggcugccgcaucugccuggagccugggcagca

SEQ ID NO: 460802 - RNA, 32 nt, Human
ggcugccgccaucucggcuucuucccaccagc

SEQ ID NO: 460803 - RNA, 32 nt, Human
ggcugccgccgcaccagccucaguggcagaug

SEQ ID NO: 460804 - RNA, 32 nt, Human
ggcugccgcgcagacccagcugcguccugcgc

SEQ ID NO: 460805 - RNA, 23 nt, Human
ggcugccgcucggcgccgcgguc

SEQ ID NO: 460806 - RNA, 22 nt, Human
ggcugccggacaccuggucaca

SEQ ID NO: 460807 - RNA, 32 nt, Human
ggcugccggacaccuggucacagggagccacg

SEQ ID NO: 460808 - RNA, 32 nt, Human
ggcugccggagggcgggaggcaggagcgggcc

SEQ ID NO: 460809 - RNA, 22 nt, Human
ggcugccgugcccaccacggcu

SEQ ID NO: 460810 - RNA, 20 nt, Human
ggcugccuaaggaggaguuu

SEQ ID NO: 460811 - RNA, 32 nt, Human
ggcugccucagaccacacagggugcagcuccu

SEQ ID NO: 460812 - RNA, 32 nt, Human
ggcugccucauauagcacuuuugaagaggccu

SEQ ID NO: 460813 - RNA, 32 nt, Human
ggcugccucauugccaccuccaccugcaggaa

SEQ ID NO: 460814 - RNA, 32 nt, Human
ggcugccuccagauaauccuggcuccaggcca

SEQ ID NO: 460815 - RNA, 31 nt, Human
ggcugccuccagcccgggccugugucuugga

SEQ ID NO: 460816 - RNA, 32 nt, Human
ggcugccuccagccugcacgcuggcuggcucg

SEQ ID NO: 460817 - RNA, 23 nt, Human
ggcugccuccgggagcacuugag

SEQ ID NO: 460818 - RNA, 19 nt, Human
ggcugccucgcaggggcug

SEQ ID NO: 460819 - RNA, 32 nt, Human
ggcugccucugaagaggaguugcuugauuuua

SEQ ID NO: 460820 - RNA, 32 nt, Human
ggcugccucugagugugguguugaacuucggg

SEQ ID NO: 460821 - RNA, 17 nt, Human
ggcugccucugggucca

SEQ ID NO: 460822 - RNA, 25 nt, Human
ggcugccugcauucauuccacgguc

SEQ ID NO: 460823 - RNA, 19 nt, Human
ggcugccugcccugggcca

SEQ ID NO: 460824 - RNA, 32 nt, Human
ggcugccugccugccagccucaguuuauuucc

SEQ ID NO: 460825 - RNA, 32 nt, Human
ggcugccugccugccgggcccagcucagcgcc

SEQ ID NO: 460826 - RNA, 32 nt, Human
ggcugccugccugccugccugccucaguuuau

SEQ ID NO: 460827 - RNA, 32 nt, Human
ggcugccugccugggccagccuguuugggagc

SEQ ID NO: 460828 - RNA, 22 nt, Human
ggcugccugcugugcacuuggg

SEQ ID NO: 460829 - RNA, 20 nt, Human
ggcugccuggaggaggcggc

SEQ ID NO: 460830 - RNA, 32 nt, Human
ggcugccuggccuaucccuccuggcucagugc

SEQ ID NO: 460831 - RNA, 17 nt, Human
ggcugccuguaauccca

SEQ ID NO: 460832 - RNA, 19 nt, Human
ggcugccuguaaucccagc

SEQ ID NO: 460833 - RNA, 32 nt, Human
ggcugccuguaaucccagcacuuugggaggcu

SEQ ID NO: 460834 - RNA, 32 nt, Human
ggcugccuguaaucccagcuacuccagaagcu

SEQ ID NO: 460835 - RNA, 17 nt, Human
ggcugccuguaguccca

SEQ ID NO: 460836 - RNA, 20 nt, Human
ggcugccuguagucccagcu

SEQ ID NO: 460837 - RNA, 32 nt, Human
ggcugccuguagucccagcuacucagaaggcc

SEQ ID NO: 460838 - RNA, 23 nt, Human
ggcugccugucaccacuguggcc

SEQ ID NO: 460839 - RNA, 32 nt, Human
ggcugccugugcuuuugcucauggccuugaca

SEQ ID NO: 460840 - RNA, 32 nt, Human
ggcugccuguggagaacuggugugaggaggaa

SEQ ID NO: 460841 - RNA, 32 nt, Human
ggcugccuguucccaacucuuucacucuguaa

SEQ ID NO: 460842 - RNA, 18 nt, Human
ggcugccuguuuuacuca

SEQ ID NO: 460843 - RNA, 32 nt, Human
ggcugccuuccccucagccucuccccacacca

SEQ ID NO: 460844 - RNA, 20 nt, Human
ggcugccuuccucuuauuua

SEQ ID NO: 460845 - RNA, 32 nt, Human
ggcugccuuccucuuauuuauuuggggacauu

SEQ ID NO: 460846 - RNA, 18 nt, Human
ggcugccuucugcauuua

SEQ ID NO: 460847 - RNA, 32 nt, Human
ggcugccuugcacaggcccuucccagggcgcu

SEQ ID NO: 460848 - RNA, 32 nt, Human
ggcugcgaauagcguguuccucuccggcggaa

SEQ ID NO: 460849 - RNA, 32 nt, Human
ggcugcgacaccccaaccccagcccucuaauc

SEQ ID NO: 460850 - RNA, 32 nt, Human
ggcugcgacauguagaagcauuggcuuaaggu

SEQ ID NO: 460851 - RNA, 32 nt, Human
ggcugcgacuaggagcagggcugccucuucuc

SEQ ID NO: 460852 - RNA, 32 nt, Human
ggcugcgagaggagggcgggcgggaggcuagc

SEQ ID NO: 460853 - RNA, 32 nt, Human
ggcugcgaggcuggggaagggguuggaggggg

SEQ ID NO: 460854 - RNA, 32 nt, Human
ggcugcgaugagccaugaaugccccacugcac

SEQ ID NO: 460855 - RNA, 32 nt, Human
ggcugcgauggcggaggccguggagcgcacug

SEQ ID NO: 460856 - RNA, 32 nt, Human
ggcugcgcagcgggcuggccgggggucuccug

SEQ ID NO: 460857 - RNA, 32 nt, Human
ggcugcgcaggguggagggaguggccagcggc

SEQ ID NO: 460858 - RNA, 32 nt, Human
ggcugcgcagugaagaaaaugaguagcagcuc

SEQ ID NO: 460859 - RNA, 22 nt, Human
ggcugcgcccucccccgcggcc

SEQ ID NO: 460860 - RNA, 17 nt, Human
ggcugcgcccugggucc

SEQ ID NO: 460861 - RNA, 23 nt, Human
ggcugcgccgccaggccccaaca

SEQ ID NO: 460862 - RNA, 32 nt, Human
ggcugcgccucuccugacuccagcuugcccgu

SEQ ID NO: 460863 - RNA, 21 nt, Human
ggcugcgcgacggcgcagggg

SEQ ID NO: 460864 - RNA, 32 nt, Human
ggcugcgcgaggcagagaucgaagccguggag

SEQ ID NO: 460865 - RNA, 32 nt, Human
ggcugcgcgcccggaagagcuggagagaugaa

SEQ ID NO: 460866 - RNA, 32 nt, Human
ggcugcgcgccgggaaccucgcggggcuggcg

SEQ ID NO: 460867 - RNA, 21 nt, Human
ggcugcgcgcgggugcggggc

SEQ ID NO: 460868 - RNA, 23 nt, Human
ggcugcgcggccgccgcugugcu

SEQ ID NO: 460869 - RNA, 32 nt, Human
ggcugcgcugggugcugaggccacugcuguca

SEQ ID NO: 460870 - RNA, 32 nt, Human
ggcugcgcuucucaaugaacucugaggcagaa

SEQ ID NO: 460871 - RNA, 23 nt, Human
ggcugcgcuuucucagcccuggg

SEQ ID NO: 460872 - RNA, 32 nt, Human
ggcugcggaacggguguggauuugaaugugga

SEQ ID NO: 460873 - RNA, 32 nt, Human
ggcugcggacacacuggcggagggcuugaggc

SEQ ID NO: 460874 - RNA, 32 nt, Human
ggcugcggacacagcaggcccccuacagccuc

SEQ ID NO: 460875 - RNA, 32 nt, Human
ggcugcggagaggcgggccgggccaagcggag

SEQ ID NO: 460876 - RNA, 32 nt, Human
ggcugcggaggaacccucauuuccucaaaagu

SEQ ID NO: 460877 - RNA, 32 nt, Human
ggcugcggagugaacgcggccaggagcccgcc

SEQ ID NO: 460878 - RNA, 21 nt, Human
ggcugcggcagcaccagggcc

SEQ ID NO: 460879 - RNA, 21 nt, Human
ggcugcggcagggacucggcc

SEQ ID NO: 460880 - RNA, 32 nt, Human
ggcugcggccauggcagcaucuucccugacgg

SEQ ID NO: 460881 - RNA, 22 nt, Human
ggcugcggccccggcuccggcc

SEQ ID NO: 460882 - RNA, 23 nt, Human
ggcugcggcccgccgcccugguc

SEQ ID NO: 460883 - RNA, 21 nt, Human
ggcugcggccuccucgcggcc

SEQ ID NO: 460884 - RNA, 20 nt, Human
ggcugcggcgcugccgcggc

SEQ ID NO: 460885 - RNA, 22 nt, Human
ggcugcggcgcuuugugcucca

SEQ ID NO: 460886 - RNA, 20 nt, Human
ggcugcggcggcggcgcagg

SEQ ID NO: 460887 - RNA, 28 nt, Human
ggcugcggcgggcagaucacuugcgguc

SEQ ID NO: 460888 - RNA, 23 nt, Human
ggcugcggcggucucgcucggcu

SEQ ID NO: 460889 - RNA, 22 nt, Human
ggcugcggcuaagacuggggcc

SEQ ID NO: 460890 - RNA, 22 nt, Human
ggcugcggcuccauccucggcu

SEQ ID NO: 460891 - RNA, 25 nt, Human
ggcugcggcucccgcccccgcggcc

SEQ ID NO: 460892 - RNA, 22 nt, Human
ggcugcggcuccgcucccggcc

SEQ ID NO: 460893 - RNA, 22 nt, Human
ggcugcggcucgaggccacgcc

SEQ ID NO: 460894 - RNA, 23 nt, Human
ggcugcggcuucgcgagagggcc

SEQ ID NO: 460895 - RNA, 20 nt, Human
ggcugcggcuucgggcggcc

SEQ ID NO: 460896 - RNA, 32 nt, Human
ggcugcgggaggcggggguuggcgugccugag

SEQ ID NO: 460897 - RNA, 32 nt, Human
ggcugcgggaggggaggagagcagagaacguc

SEQ ID NO: 460898 - RNA, 32 nt, Human
ggcugcgggcaccugcaauccccgacccccga

SEQ ID NO: 460899 - RNA, 32 nt, Human
ggcugcgggccucugagcaggugcaggcugug

SEQ ID NO: 460900 - RNA, 23 nt, Human
ggcugcggggcacuguguucuca

SEQ ID NO: 460901 - RNA, 23 nt, Human
ggcugcggggcuucccugcggcu

SEQ ID NO: 460902 - RNA, 19 nt, Human
ggcugcggggggcugcacc

SEQ ID NO: 460903 - RNA, 32 nt, Human
ggcugcggugacugcacuuucccuggagugga

SEQ ID NO: 460904 - RNA, 23 nt, Human
ggcugcggugcaggcaccuggcc

SEQ ID NO: 460905 - RNA, 32 nt, Human
ggcugcggugcaggcaccuggccaugcuggcu

SEQ ID NO: 460906 - RNA, 32 nt, Human
ggcugcgguggaggccgaggacagccaggacc

SEQ ID NO: 460907 - RNA, 21 nt, Human
ggcugcgguggccaccgcggc

SEQ ID NO: 460908 - RNA, 32 nt, Human
ggcugcggugucugcugcuacucuccgagcuu

SEQ ID NO: 460909 - RNA, 32 nt, Human
ggcugcgguucugcuuccuccuggggcugagc

SEQ ID NO: 460910 - RNA, 32 nt, Human
ggcugcguaaagggagugggugcgcuugaagg

SEQ ID NO: 460911 - RNA, 31 nt, Human
ggcugcguccuuucugggccuuuucuuuuug

SEQ ID NO: 460912 - RNA, 19 nt, Human
ggcugcgucggaggagcug

SEQ ID NO: 460913 - RNA, 18 nt, Human
ggcugcgucuggaggggc

SEQ ID NO: 460914 - RNA, 32 nt, Human
ggcugcgugaaaaacccagcugggccuggggu

SEQ ID NO: 460915 - RNA, 32 nt, Human
ggcugcgugaccgccccuccuccagucuacug

SEQ ID NO: 460916 - RNA, 16 nt, Human
ggcugcgugcaggugc

SEQ ID NO: 460917 - RNA, 32 nt, Human
ggcugcgugccacaucgcuacgcccaggaggu

SEQ ID NO: 460918 - RNA, 19 nt, Human
ggcugcguguuuuucauuu

SEQ ID NO: 460919 - RNA, 32 nt, Human
ggcugcuaaaggacaguggaugcugcugggcc

SEQ ID NO: 460920 - RNA, 32 nt, Human
ggcugcuaaggccugugcuccaaagcaacggg

SEQ ID NO: 460921 - RNA, 32 nt, Human
ggcugcuaauaaacacauacuugagacugggu

SEQ ID NO: 460922 - RNA, 19 nt, Human
ggcugcuaggagccaggua

SEQ ID NO: 460923 - RNA, 32 nt, Human
ggcugcuaggaggcaccgaggcagcggcgggg

SEQ ID NO: 460924 - RNA, 31 nt, Human
ggcugcucaauaaacacuuguugaaccauca

SEQ ID NO: 460925 - RNA, 32 nt, Human
ggcugcucacuggcuuuagcugcugucuuccc

SEQ ID NO: 460926 - RNA, 32 nt, Human
ggcugcucagcagccacuggguggauccaggg

SEQ ID NO: 460927 - RNA, 24 nt, Human
ggcugcucagcgcgcuccgcgguc

SEQ ID NO: 460928 - RNA, 32 nt, Human
ggcugcucagcgguuauaacaggccugacugc

SEQ ID NO: 460929 - RNA, 32 nt, Human
ggcugcucagugcuuugguagcacaaggugac

SEQ ID NO: 460930 - RNA, 32 nt, Human
ggcugcuccaccuccagcacggagaacauagc

SEQ ID NO: 460931 - RNA, 32 nt, Human
ggcugcuccagccccacuucuuagcauucuua

SEQ ID NO: 460932 - RNA, 32 nt, Human
ggcugcuccagccugcaacuuaguggaaggaa

SEQ ID NO: 460933 - RNA, 32 nt, Human
ggcugcuccaggaguaaggagcccagucuuug

SEQ ID NO: 460934 - RNA, 32 nt, Human
ggcugcuccaguucauggccucccaggggugc

SEQ ID NO: 460935 - RNA, 32 nt, Human
ggcugcuccaugagcccuuuguggaccacaug

SEQ ID NO: 460936 - RNA, 23 nt, Human
ggcugcucccacaccugcgccag

SEQ ID NO: 460937 - RNA, 32 nt, Human
ggcugcucccagagguggggaacccuucauag

SEQ ID NO: 460938 - RNA, 22 nt, Human
ggcugcuccccaggacuaugag

SEQ ID NO: 460939 - RNA, 32 nt, Human
ggcugcuccccuuuuagaauuuaccucuuaug

SEQ ID NO: 460940 - RNA, 32 nt, Human
ggcugcucccuugcuggggcucagcuggaguc

SEQ ID NO: 460941 - RNA, 22 nt, Human
ggcugcucgaacagauugcgag

SEQ ID NO: 460942 - RNA, 32 nt, Human
ggcugcucgcgccuccccaacucggguaaagc

SEQ ID NO: 460943 - RNA, 23 nt, Human
ggcugcucgcgcgcaccugcggg

SEQ ID NO: 460944 - RNA, 32 nt, Human
ggcugcucgcgcucgggcaggcgggcugagga

SEQ ID NO: 460945 - RNA, 32 nt, Human
ggcugcucucaaacuccugaccucaggugauc

SEQ ID NO: 460946 - RNA, 32 nt, Human
ggcugcucucagaacuccugagcucaggcagu

SEQ ID NO: 460947 - RNA, 32 nt, Human
ggcugcucucaugccaggaagggagcuuccau

SEQ ID NO: 460948 - RNA, 32 nt, Human
ggcugcucuccuggugcagccugugggcucuu

SEQ ID NO: 460949 - RNA, 32 nt, Human
ggcugcucucgaacuccugaccucaggugauc

SEQ ID NO: 460950 - RNA, 32 nt, Human
ggcugcucucgaacuccugaccucaugauccg

SEQ ID NO: 460951 - RNA, 32 nt, Human
ggcugcucugacaccauggggagcugcugcag

SEQ ID NO: 460952 - RNA, 19 nt, Human
ggcugcucugcacccggac

SEQ ID NO: 460953 - RNA, 32 nt, Human
ggcugcucugcagauucuaguuuggcuuucag

SEQ ID NO: 460954 - RNA, 21 nt, Human
ggcugcucugccauacgcggg

SEQ ID NO: 460955 - RNA, 21 nt, Human
ggcugcucugcggacugcgag

SEQ ID NO: 460956 - RNA, 32 nt, Human
ggcugcucuuccagacuggcugugccugccug

SEQ ID NO: 460957 - RNA, 32 nt, Human
ggcugcucuuccuggcaggccugggccaucag

SEQ ID NO: 460958 - RNA, 32 nt, Human
ggcugcucuugaacuccugaccucagguaauc

SEQ ID NO: 460959 - RNA, 32 nt, Human
ggcugcucuugaacuccugaccucaggugauc

SEQ ID NO: 460960 - RNA, 22 nt, Human
ggcugcucuuggggacugcgag

SEQ ID NO: 460961 - RNA, 32 nt, Human
ggcugcugacugacuccagccaaggugcaaag

SEQ ID NO: 460962 - RNA, 32 nt, Human
ggcugcugaggcaggcgaauugcuugaaccug

SEQ ID NO: 460963 - RNA, 32 nt, Human
ggcugcugagggcagaggaugcaacacuagaa

SEQ ID NO: 460964 - RNA, 32 nt, Human
ggcugcugcaccugaacagagucaucaugccu

SEQ ID NO: 460965 - RNA, 32 nt, Human
ggcugcugcacguuugggcuugaauaaagaag

SEQ ID NO: 460966 - RNA, 32 nt, Human
ggcugcugcaggaggccccugggaagcugagc

SEQ ID NO: 460967 - RNA, 32 nt, Human
ggcugcugcagucucuucccagccuggcccug

SEQ ID NO: 460968 - RNA, 32 nt, Human
ggcugcugcauggcacugaccgccgcuuccag

SEQ ID NO: 460969 - RNA, 22 nt, Human
ggcugcugccaccaccgccgcu

SEQ ID NO: 460970 - RNA, 19 nt, Human
ggcugcugcccccuccuug

SEQ ID NO: 460971 - RNA, 32 nt, Human
ggcugcugccccgucucccaccccuguccccg

SEQ ID NO: 460972 - RNA, 32 nt, Human
ggcugcugcccuucucugggcauguucugaau

SEQ ID NO: 460973 - RNA, 22 nt, Human
ggcugcugccgccgccgccgcc

SEQ ID NO: 460974 - RNA, 32 nt, Human
ggcugcugccgcugccuccuccuggguaaggg

SEQ ID NO: 460975 - RNA, 32 nt, Human
ggcugcugccuaacugagccucccggggaaca

SEQ ID NO: 460976 - RNA, 32 nt, Human
ggcugcugccuuccuguccucuggagagaacc

SEQ ID NO: 460977 - RNA, 20 nt, Human
ggcugcugccuugggcccgg

SEQ ID NO: 460978 - RNA, 23 nt, Human
ggcugcugcgcccccuccugcca

SEQ ID NO: 460979 - RNA, 32 nt, Human
ggcugcugcuacaauguccuaacugaaagaug

SEQ ID NO: 460980 - RNA, 19 nt, Human
ggcugcugcuccugcugcc

SEQ ID NO: 460981 - RNA, 22 nt, Human
ggcugcugcugccaccgcugcu

SEQ ID NO: 460982 - RNA, 32 nt, Human
ggcugcugcugcugcugacgcugcugcugccc

SEQ ID NO: 460983 - RNA, 18 nt, Human
ggcugcugcuggguccag

SEQ ID NO: 460984 - RNA, 22 nt, Human
ggcugcugcugugcagucccug

SEQ ID NO: 460985 - RNA, 32 nt, Human
ggcugcuggaagaaggaagaagccagacuggu

SEQ ID NO: 460986 - RNA, 19 nt, Human
ggcugcuggaaggcagcuu

SEQ ID NO: 460987 - RNA, 32 nt, Human
ggcugcuggacaagggguaggagcugcuggaa

SEQ ID NO: 460988 - RNA, 32 nt, Human
ggcugcuggacuugaggcagagccugcagcag

SEQ ID NO: 460989 - RNA, 22 nt, Human
ggcugcuggagccauucauuca

SEQ ID NO: 460990 - RNA, 19 nt, Human
ggcugcuggagcccagagg

SEQ ID NO: 460991 - RNA, 32 nt, Human
ggcugcuggagugcaguggcacaaucucggcc

SEQ ID NO: 460992 - RNA, 32 nt, Human
ggcugcuggaucagggcagccggggagguggc

SEQ ID NO: 460993 - RNA, 32 nt, Human
ggcugcuggcaggccagcuugaagauauaggg

SEQ ID NO: 460994 - RNA, 32 nt, Human
ggcugcuggccggauucuuguuacucugggga

SEQ ID NO: 460995 - RNA, 32 nt, Human
ggcugcuggccuggcccuugaguggggcagcc

SEQ ID NO: 460996 - RNA, 32 nt, Human
ggcugcugggagagcccaugggaaccuugcuu

SEQ ID NO: 460997 - RNA, 32 nt, Human
ggcugcugggagagggcuguggaggaaggagc

SEQ ID NO: 460998 - RNA, 32 nt, Human
ggcugcugggaggugcgggacuggguguggcc

SEQ ID NO: 460999 - RNA, 21 nt, Human
ggcugcugggccaggacacuu

SEQ ID NO: 461000 - RNA, 32 nt, Human
ggcugcugggcugagugacacaagcacuuuaa

SEQ ID NO: 461001 - RNA, 32 nt, Human
ggcugcuggggccuccacaccugccucaucac

SEQ ID NO: 461002 - RNA, 32 nt, Human
ggcugcugggugcacagaugaggggagguggg

SEQ ID NO: 461003 - RNA, 25 nt, Human
ggcugcuggugcgggacacuccggg

SEQ ID NO: 461004 - RNA, 32 nt, Human
ggcugcuguaagccaugauggcagcacggcac

SEQ ID NO: 461005 - RNA, 32 nt, Human
ggcugcuguagugcugggugaaugugggcagu

SEQ ID NO: 461006 - RNA, 20 nt, Human
ggcugcuguauuuucauuua

SEQ ID NO: 461007 - RNA, 23 nt, Human
ggcugcuguccaccaggcagcug

SEQ ID NO: 461008 - RNA, 32 nt, Human
ggcugcugugggcuccuggggagguggcccuc

SEQ ID NO: 461009 - RNA, 25 nt, Human
ggcugcuuacucaacuugugucuua

SEQ ID NO: 461010 - RNA, 18 nt, Human
ggcugcuuacuucccuua

SEQ ID NO: 461011 - RNA, 32 nt, Human
ggcugcuuagagucagccuggguggcaccagg

SEQ ID NO: 461012 - RNA, 22 nt, Human
ggcugcuuaugccuuucguuua

SEQ ID NO: 461013 - RNA, 32 nt, Human
ggcugcuuccucugcugacuucuguccuuuuu

SEQ ID NO: 461014 - RNA, 32 nt, Human
ggcugcuucucacauccugggcuggauguggg

SEQ ID NO: 461015 - RNA, 18 nt, Human
ggcugcuucuccucuuca

SEQ ID NO: 461016 - RNA, 32 nt, Human
ggcugcuucugagcuucagccugggagcaagc

SEQ ID NO: 461017 - RNA, 32 nt, Human
ggcugcuucuggacucaaggaggaggagagag

SEQ ID NO: 461018 - RNA, 32 nt, Human
ggcugcuucuucaagcaaaccaccucaccaca

SEQ ID NO: 461019 - RNA, 18 nt, Human
ggcugcuucuuuggccca

SEQ ID NO: 461020 - RNA, 32 nt, Human
ggcugcuugagauugguucugcucuuuucuuc

SEQ ID NO: 461021 - RNA, 18 nt, Human
ggcugcuugauuauguca

SEQ ID NO: 461022 - RNA, 32 nt, Human
ggcugcuuggugucaaccauucuggcucuucu

SEQ ID NO: 461023 - RNA, 20 nt, Human
ggcugcuuucuccuuuacuu

SEQ ID NO: 461024 - RNA, 31 nt, Human
ggcugcuuucucucugggcuguuuucuuacu

SEQ ID NO: 461025 - RNA, 21 nt, Human
ggcugcuuugugguuuuauuu

SEQ ID NO: 461026 - RNA, 32 nt, Human
ggcugcuuuugcucgcuuuggccagagagcug

SEQ ID NO: 461027 - RNA, 18 nt, Human
ggcuggaaaaggaguggg

SEQ ID NO: 461028 - RNA, 19 nt, Human
ggcuggaaaagggagugug

SEQ ID NO: 461029 - RNA, 32 nt, Human
ggcuggaaaauguaugaauucuucaacugucu

SEQ ID NO: 461030 - RNA, 32 nt, Human
ggcuggaaagaauggacuggcagagugugggc

SEQ ID NO: 461031 - RNA, 32 nt, Human
ggcuggaaaugcaaagacacauuuuucuauaa

SEQ ID NO: 461032 - RNA, 32 nt, Human
ggcuggaacaugggaucuccucuuccaccucu

SEQ ID NO: 461033 - RNA, 32 nt, Human
ggcuggaaccacaggcacgugccaccaugccu

SEQ ID NO: 461034 - RNA, 32 nt, Human
ggcuggaaccacugcgccgccuggagguggca

SEQ ID NO: 461035 - RNA, 32 nt, Human
ggcuggaacccaagccccuuccuccacagcug

SEQ ID NO: 461036 - RNA, 32 nt, Human
ggcuggaacucucucccuuucucccuccaucc

SEQ ID NO: 461037 - RNA, 32 nt, Human
ggcuggaacugacccaggcuggacuugcgggg

SEQ ID NO: 461038 - RNA, 32 nt, Human
ggcuggaagaugaaggcaggaggcagcagcuc

SEQ ID NO: 461039 - RNA, 32 nt, Human
ggcuggaagcauauuccccaagagcacugccc

SEQ ID NO: 461040 - RNA, 32 nt, Human
ggcuggaagcuugggcuugcaaguggauccgg

SEQ ID NO: 461041 - RNA, 32 nt, Human
ggcuggaaggcagagccuggggagggcacccg

SEQ ID NO: 461042 - RNA, 17 nt, Human
ggcuggaaggggacggu

SEQ ID NO: 461043 - RNA, 32 nt, Human
ggcuggaauaagaggacacuagaugauauuac

SEQ ID NO: 461044 - RNA, 32 nt, Human
ggcuggaaucauuuucuuucucucugccaggg

SEQ ID NO: 461045 - RNA, 32 nt, Human
ggcuggaaugaugggccaggguguaggauuca

SEQ ID NO: 461046 - RNA, 32 nt, Human
ggcuggacacaauccugaagcaugcagauucc

SEQ ID NO: 461047 - RNA, 32 nt, Human
ggcuggacagagggucuccaggcccuucugac

SEQ ID NO: 461048 - RNA, 17 nt, Human
ggcuggacagggcgcgg

SEQ ID NO: 461049 - RNA, 21 nt, Human
ggcuggacaugcagacagugg

SEQ ID NO: 461050 - RNA, 32 nt, Human
ggcuggaccagccggccagcgggagcccccuu

SEQ ID NO: 461051 - RNA, 32 nt, Human
ggcuggaccggcuccggcaggcuggcugggag

SEQ ID NO: 461052 - RNA, 32 nt, Human
ggcuggacgcugucugagccccggcugugaug

SEQ ID NO: 461053 - RNA, 32 nt, Human
ggcuggacggggacgaggcgcggagaggaggc

SEQ ID NO: 461054 - RNA, 32 nt, Human
ggcuggacgguggaggaccugcuggggucucc

SEQ ID NO: 461055 - RNA, 32 nt, Human
ggcuggacucaaugcaaccuucucccacgagc

SEQ ID NO: 461056 - RNA, 32 nt, Human
ggcuggacuuaucuugugauuuggggccaugg

SEQ ID NO: 461057 - RNA, 32 nt, Human
ggcuggagaacagcguccacgcaguccugccu

SEQ ID NO: 461058 - RNA, 32 nt, Human
ggcuggagaagaaggugccagcuguagccuau

SEQ ID NO: 461059 - RNA, 32 nt, Human
ggcuggagaagaccgggaaaaagggaguacug

SEQ ID NO: 461060 - RNA, 32 nt, Human
ggcuggagaaggacaugagaucagggccugcc

SEQ ID NO: 461061 - RNA, 32 nt, Human
ggcuggagaaucgcuugaggcuagugagcugu

SEQ ID NO: 461062 - RNA, 20 nt, Human
ggcuggagaauugcuugaac

SEQ ID NO: 461063 - RNA, 32 nt, Human
ggcuggagaauugcuugaggcuagugagcugu

SEQ ID NO: 461064 - RNA, 32 nt, Human
ggcuggagacacacagccacaauuacgaagag

SEQ ID NO: 461065 - RNA, 32 nt, Human
ggcuggagacaggcaccauugccauggggcug

SEQ ID NO: 461066 - RNA, 32 nt, Human
ggcuggagagaagcagaucugugcaacgugca

SEQ ID NO: 461067 - RNA, 32 nt, Human
ggcuggagagagaagcgaugguuuugccagag

SEQ ID NO: 461068 - RNA, 32 nt, Human
ggcuggagagagaggaccaucccaggcugcag

SEQ ID NO: 461069 - RNA, 32 nt, Human
ggcuggagaggaaggggcaccacccacucaac

SEQ ID NO: 461070 - RNA, 32 nt, Human
ggcuggagaggaaggugugggguggaacaggu

SEQ ID NO: 461071 - RNA, 20 nt, Human
ggcuggagaggcagacggug

SEQ ID NO: 461072 - RNA, 32 nt, Human
ggcuggagaggggugcggggcagugaugccca

SEQ ID NO: 461073 - RNA, 32 nt, Human
ggcuggagauccugccugugccccagagucag

SEQ ID NO: 461074 - RNA, 32 nt, Human
ggcuggagcacaccuugggccucagugguuuc

SEQ ID NO: 461075 - RNA, 32 nt, Human
ggcuggagcagcugaggaggaggcaggagaga

SEQ ID NO: 461076 - RNA, 22 nt, Human
ggcuggagccaagauccugccu

SEQ ID NO: 461077 - RNA, 32 nt, Human
ggcuggagccuccugauuggguuucggagucc

SEQ ID NO: 461078 - RNA, 32 nt, Human
ggcuggagcgccguaagagcucugccucccuc

SEQ ID NO: 461079 - RNA, 16 nt, Human
ggcuggagcgcgcggu

SEQ ID NO: 461080 - RNA, 32 nt, Human
ggcuggagcggcugugccagagggucccuaug

SEQ ID NO: 461081 - RNA, 18 nt, Human
ggcuggagcgggcggggu

SEQ ID NO: 461082 - RNA, 21 nt, Human
ggcuggagcguggacgcggug

SEQ ID NO: 461083 - RNA, 32 nt, Human
ggcuggagcuagggugacaucuccagggcaga

SEQ ID NO: 461084 - RNA, 15 nt, Human
ggcuggagcugcagc

SEQ ID NO: 461085 - RNA, 32 nt, Human
ggcuggaggacaaccugaaaugcugagggcag

SEQ ID NO: 461086 - RNA, 18 nt, Human
ggcuggaggagcgcagug

SEQ ID NO: 461087 - RNA, 32 nt, Human
ggcuggaggagggcaacagccacugggugagc

SEQ ID NO: 461088 - RNA, 32 nt, Human
ggcuggaggagucagagugagagccaguggcc

SEQ ID NO: 461089 - RNA, 32 nt, Human
ggcuggaggauuaggagaaggaagagggaacg

SEQ ID NO: 461090 - RNA, 32 nt, Human
ggcuggaggccugggagucacaggugcuugga

SEQ ID NO: 461091 - RNA, 32 nt, Human
ggcuggaggcugcacagacaggaguucaaguu

SEQ ID NO: 461092 - RNA, 32 nt, Human
ggcuggaggcuucucuuucucagucccugccu

SEQ ID NO: 461093 - RNA, 32 nt, Human
ggcuggagggaccagauggaggaggccagcag

SEQ ID NO: 461094 - RNA, 17 nt, Human
ggcuggagggcaggcgg

SEQ ID NO: 461095 - RNA, 17 nt, Human
ggcuggagggcagggug

SEQ ID NO: 461096 - RNA, 32 nt, Human
ggcuggagguccaggccagggugacugggaga

SEQ ID NO: 461097 - RNA, 32 nt, Human
ggcuggagucuaugacuucuuccuucagauug

SEQ ID NO: 461098 - RNA, 21 nt, Human
ggcuggagugagguggaagga

SEQ ID NO: 461099 - RNA, 32 nt, Human
ggcuggagugauuuuuagacauuucucuaccu

SEQ ID NO: 461100 - RNA, 32 nt, Human
ggcuggagugcaaugugcaauggcacaaucuu

SEQ ID NO: 461101 - RNA, 31 nt, Human
ggcuggagugcaguagagugaucucagcuca

SEQ ID NO: 461102 - RNA, 32 nt, Human
ggcuggagugcaguagcaugaucagggaucac

SEQ ID NO: 461103 - RNA, 32 nt, Human
ggcuggagugcagugauccacucaccucagcc

SEQ ID NO: 461104 - RNA, 31 nt, Human
ggcuggagugcaguggagugaucucggcuca

SEQ ID NO: 461105 - RNA, 32 nt, Human
ggcuggagugguagccgggagacucugcacau

SEQ ID NO: 461106 - RNA, 32 nt, Human
ggcuggaguguagugacaugaucucgguucac

SEQ ID NO: 461107 - RNA, 32 nt, Human
ggcuggauccaccaaggcagcucacagcggga

SEQ ID NO: 461108 - RNA, 32 nt, Human
ggcuggauccagacugcagauccagagcugcg

SEQ ID NO: 461109 - RNA, 32 nt, Human
ggcuggauccugcucagccucugccucggcug

SEQ ID NO: 461110 - RNA, 32 nt, Human
ggcuggaucugggggcuagcagugaguacccg

SEQ ID NO: 461111 - RNA, 20 nt, Human
ggcuggaugcagagguggaa

SEQ ID NO: 461112 - RNA, 32 nt, Human
ggcuggaugccaugguaaggaucccgcaaugc

SEQ ID NO: 461113 - RNA, 32 nt, Human
ggcuggauggggaccuggcugaagacaucugg

SEQ ID NO: 461114 - RNA, 23 nt, Human
ggcuggauuaaacacacacuguu

SEQ ID NO: 461115 - RNA, 32 nt, Human
ggcuggauuuucugguuguggaagugggggcg

SEQ ID NO: 461116 - RNA, 32 nt, Human
ggcuggcaaaagagcagugcugaaggaggaga

SEQ ID NO: 461117 - RNA, 32 nt, Human
ggcuggcaacauggcucagcaggcuugcccca

SEQ ID NO: 461118 - RNA, 19 nt, Human
ggcuggcaaccccacccca

SEQ ID NO: 461119 - RNA, 18 nt, Human
ggcuggcaagcucugggc

SEQ ID NO: 461120 - RNA, 32 nt, Human
ggcuggcaauggcugcucucaaucccuugagg

SEQ ID NO: 461121 - RNA, 32 nt, Human
ggcuggcacagccccaggcuuggugaggaaga

SEQ ID NO: 461122 - RNA, 16 nt, Human
ggcuggcacaggugac

SEQ ID NO: 461123 - RNA, 20 nt, Human
ggcuggcaccuauaauccca

SEQ ID NO: 461124 - RNA, 25 nt, Human
ggcuggcaccugggaacgcuauggg

SEQ ID NO: 461125 - RNA, 32 nt, Human
ggcuggcaccuguaaucccagcauuuugggag

SEQ ID NO: 461126 - RNA, 32 nt, Human
ggcuggcaccuugaucuuggacuucccaugcu

SEQ ID NO: 461127 - RNA, 32 nt, Human
ggcuggcaccuugucugcucaucccuaacucc

SEQ ID NO: 461128 - RNA, 32 nt, Human
ggcuggcacugcacccgggcaugaggacacau

SEQ ID NO: 461129 - RNA, 22 nt, Human
ggcuggcagacaccccguggcu

SEQ ID NO: 461130 - RNA, 32 nt, Human
ggcuggcagagcuggagccaguuggggagcac

SEQ ID NO: 461131 - RNA, 32 nt, Human
ggcuggcagaggcgagggagguugcggguagg

SEQ ID NO: 461132 - RNA, 21 nt, Human
ggcuggcagcagaaccagcag

SEQ ID NO: 461133 - RNA, 32 nt, Human
ggcuggcagcugcucuguggaggaccuccagg

SEQ ID NO: 461134 - RNA, 32 nt, Human
ggcuggcagggacuggcaggaggcaggugcag

SEQ ID NO: 461135 - RNA, 32 nt, Human
ggcuggcaguccugccuggugccccaaggggc

SEQ ID NO: 461136 - RNA, 18 nt, Human
ggcuggcaguggcgcggu

SEQ ID NO: 461137 - RNA, 32 nt, Human
ggcuggcaugaauaaauuuuuaucucagcuug

SEQ ID NO: 461138 - RNA, 32 nt, Human
ggcuggcauuggcacugggcugugcugaccua

SEQ ID NO: 461139 - RNA, 32 nt, Human
ggcuggccacagaaagcuguuaaagaaaugag

SEQ ID NO: 461140 - RNA, 32 nt, Human
ggcuggccacucucugccucaguggccucccu

SEQ ID NO: 461141 - RNA, 32 nt, Human
ggcuggccagaggcacucuucacuucccagac

SEQ ID NO: 461142 - RNA, 21 nt, Human
ggcuggccagcccucagcggg

SEQ ID NO: 461143 - RNA, 32 nt, Human
ggcuggcccacaauaccugcucccccgacccc

SEQ ID NO: 461144 - RNA, 32 nt, Human
ggcuggcccagccaacugccccgggugccuca

SEQ ID NO: 461145 - RNA, 32 nt, Human
ggcuggcccagccugugcuccccgggcugcua

SEQ ID NO: 461146 - RNA, 32 nt, Human
ggcuggcccaucucccccagagggcuguccca

SEQ ID NO: 461147 - RNA, 32 nt, Human
ggcuggccccgagcacagacucucccccaagg

SEQ ID NO: 461148 - RNA, 32 nt, Human
ggcuggcccgggaggggagugacagagggacg

SEQ ID NO: 461149 - RNA, 32 nt, Human
ggcuggcccugaggcugcacuguggcagucua

SEQ ID NO: 461150 - RNA, 20 nt, Human
ggcuggcccugcaauggggc

SEQ ID NO: 461151 - RNA, 32 nt, Human
ggcuggccgcccgccugggccgcuggccccgc

SEQ ID NO: 461152 - RNA, 32 nt, Human
ggcuggccgggacugcugcucucccaaggguu

SEQ ID NO: 461153 - RNA, 22 nt, Human
ggcuggccgggcaggcguggug

SEQ ID NO: 461154 - RNA, 32 nt, Human
ggcuggccgggggcaaagucaccucccagugu

SEQ ID NO: 461155 - RNA, 16 nt, Human
ggcuggccgggucugg

SEQ ID NO: 461156 - RNA, 32 nt, Human
ggcuggccucaaacucccgaccucaggugauc

SEQ ID NO: 461157 - RNA, 32 nt, Human
ggcuggccucaaacuccggagcucaagcaguc

SEQ ID NO: 461158 - RNA, 32 nt, Human
ggcuggccucaaacuccugaccucaggugauc

SEQ ID NO: 461159 - RNA, 32 nt, Human
ggcuggccucaaacuccugggcucaagcaauc

SEQ ID NO: 461160 - RNA, 32 nt, Human
ggcuggccucaaacuccugggcucaagugauc

SEQ ID NO: 461161 - RNA, 32 nt, Human
ggcuggccucaaaguccugaccucaggugauc

SEQ ID NO: 461162 - RNA, 32 nt, Human
ggcuggccucaaauuccugggcucaagccauc

SEQ ID NO: 461163 - RNA, 32 nt, Human
ggcuggccucaagugauccuccugccuuggcc

SEQ ID NO: 461164 - RNA, 22 nt, Human
ggcuggccucaccaccaccguc

SEQ ID NO: 461165 - RNA, 32 nt, Human
ggcuggccucagaacccagcauuccuguuauu

SEQ ID NO: 461166 - RNA, 32 nt, Human
ggcuggccucaucugcaccauguccccggacc

SEQ ID NO: 461167 - RNA, 32 nt, Human
ggcuggccucgaacuccugaccccaggugauc

SEQ ID NO: 461168 - RNA, 32 nt, Human
ggcuggccucgaacuccugaccucaggugauc

SEQ ID NO: 461169 - RNA, 32 nt, Human
ggcuggccucuccagaccaguucccaggcugg

SEQ ID NO: 461170 - RNA, 32 nt, Human
ggcuggccucucuggcugggugcagugaaugg

SEQ ID NO: 461171 - RNA, 32 nt, Human
ggcuggccugaggauggcccugccuggcagag

SEQ ID NO: 461172 - RNA, 32 nt, Human
ggcuggccugcaggugucuagggucucagcuu

SEQ ID NO: 461173 - RNA, 32 nt, Human
ggcuggccugcgcagagauuggcugugggccu

SEQ ID NO: 461174 - RNA, 32 nt, Human
ggcuggccuggaccauggugcugcucugggag

SEQ ID NO: 461175 - RNA, 32 nt, Human
ggcuggccuuccuucucuucugagcccucccc

SEQ ID NO: 461176 - RNA, 32 nt, Human
ggcuggccuugaaauccugggcucaggcgauu

SEQ ID NO: 461177 - RNA, 32 nt, Human
ggcuggccuugaacuccugaccucaggugauc

SEQ ID NO: 461178 - RNA, 32 nt, Human
ggcuggccuugaacuccugggcucaagcaauc

SEQ ID NO: 461179 - RNA, 32 nt, Human
ggcuggcgagcuacuguaaacuuuaaagaauu

SEQ ID NO: 461180 - RNA, 32 nt, Human
ggcuggcgccuguaaucccagcuacucaggag

SEQ ID NO: 461181 - RNA, 32 nt, Human
ggcuggcggaggaggagagacggaggaggccg

SEQ ID NO: 461182 - RNA, 17 nt, Human
ggcuggcggaggcccgg

SEQ ID NO: 461183 - RNA, 32 nt, Human
ggcuggcggccggcgggggucgcggcggcggc

SEQ ID NO: 461184 - RNA, 32 nt, Human
ggcuggcgggaggcauggaggcugaguccccu

SEQ ID NO: 461185 - RNA, 32 nt, Human
ggcuggcgggguggguucacagcuggacuggg

SEQ ID NO: 461186 - RNA, 18 nt, Human
ggcuggcgugcagugggc

SEQ ID NO: 461187 - RNA, 23 nt, Human
ggcuggcgugggccauccgggga

SEQ ID NO: 461188 - RNA, 32 nt, Human
ggcuggcucacugucuccaguucucaauggcc

SEQ ID NO: 461189 - RNA, 32 nt, Human
ggcuggcucagaggggcccaccuugcguggaa

SEQ ID NO: 461190 - RNA, 32 nt, Human
ggcuggcucccucuuggucuucccaggcuggg

SEQ ID NO: 461191 - RNA, 32 nt, Human
ggcuggcucugccugcgccucacucucuccug

SEQ ID NO: 461192 - RNA, 32 nt, Human
ggcuggcucugccuucccagggaccguucugc

SEQ ID NO: 461193 - RNA, 32 nt, Human
ggcuggcugagggcaguucgcagccacccuga

SEQ ID NO: 461194 - RNA, 32 nt, Human
ggcuggcugcagagaaaccgcagggagagccu

SEQ ID NO: 461195 - RNA, 32 nt, Human
ggcuggcugcagccucuauuucccaggcucaa

SEQ ID NO: 461196 - RNA, 32 nt, Human
ggcuggcugccucuguuccuacuguacuguaa

SEQ ID NO: 461197 - RNA, 32 nt, Human
ggcuggcugcugagaugaaugugaaccagguu

SEQ ID NO: 461198 - RNA, 32 nt, Human
ggcuggcugcuuggagcgcugccucgaaggga

SEQ ID NO: 461199 - RNA, 32 nt, Human
ggcuggcuggacugagcccaggccuguugccc

SEQ ID NO: 461200 - RNA, 32 nt, Human
ggcuggcugggcagcacgucucuccccacagg

SEQ ID NO: 461201 - RNA, 32 nt, Human
ggcuggcuggguccucugcccucucuggaguu

SEQ ID NO: 461202 - RNA, 31 nt, Human
ggcuggcugucucccaagccuguguuucucu

SEQ ID NO: 461203 - RNA, 32 nt, Human
ggcuggcuucaaacuccuggccucaagugauc

SEQ ID NO: 461204 - RNA, 32 nt, Human
ggcuggcuucucccucccuccugccgaggucu

SEQ ID NO: 461205 - RNA, 32 nt, Human
ggcuggcuugugagggguuaaggcugggaggc

SEQ ID NO: 461206 - RNA, 17 nt, Human
ggcuggcuuuacuaaca

SEQ ID NO: 461207 - RNA, 32 nt, Human
ggcuggcuuugaacuccugaccucaggugauc

SEQ ID NO: 461208 - RNA, 21 nt, Human
ggcuggcuuuguuuuucauuu

SEQ ID NO: 461209 - RNA, 32 nt, Human
ggcugggaaagaaaugugugugucuaaaagca

SEQ ID NO: 461210 - RNA, 32 nt, Human
ggcugggaacugggccagcagagcauguugga

SEQ ID NO: 461211 - RNA, 32 nt, Human
ggcugggaagggcggggcccugccuggggauu

SEQ ID NO: 461212 - RNA, 32 nt, Human
ggcugggaauaccucacccacgcccaguucca

SEQ ID NO: 461213 - RNA, 32 nt, Human
ggcugggaaucaccuuucgaggcccuucagac

SEQ ID NO: 461214 - RNA, 32 nt, Human
ggcugggaauggaggggcagagccaggaagau

SEQ ID NO: 461215 - RNA, 32 nt, Human
ggcugggaauuugccauucugcuguacagaca

SEQ ID NO: 461216 - RNA, 32 nt, Human
ggcugggacaagggaucccccuucccuguggu

SEQ ID NO: 461217 - RNA, 32 nt, Human
ggcugggaccacagaagugcaccaccaugccu

SEQ ID NO: 461218 - RNA, 32 nt, Human
ggcugggaccgcaggugugugccaccauuucu

SEQ ID NO: 461219 - RNA, 32 nt, Human
ggcugggaccuguaaucccagcuacuugggag

SEQ ID NO: 461220 - RNA, 20 nt, Human
ggcugggacggcgggugcgg

SEQ ID NO: 461221 - RNA, 32 nt, Human
ggcugggacuacagauguuugccaccaugccc

SEQ ID NO: 461222 - RNA, 32 nt, Human
ggcugggacuacaggcacccaccaccacgccu

SEQ ID NO: 461223 - RNA, 32 nt, Human
ggcugggacuacaggcgcgugccaccacgcca

SEQ ID NO: 461224 - RNA, 32 nt, Human
ggcugggacuauaggugcaugccaccacaccc

SEQ ID NO: 461225 - RNA, 32 nt, Human
ggcugggacucacucuagcuugcccagcaacu

SEQ ID NO: 461226 - RNA, 32 nt, Human
ggcugggacucgaacuccugaccuugugaucu

SEQ ID NO: 461227 - RNA, 32 nt, Human
ggcugggacugcaggagcaugccaucaugccc

SEQ ID NO: 461228 - RNA, 32 nt, Human
ggcugggacugcaggcaugugccaccacgccu

SEQ ID NO: 461229 - RNA, 32 nt, Human
ggcugggacugcaggugcaugcacuaccaugc

SEQ ID NO: 461230 - RNA, 32 nt, Human
ggcugggacuugguugggcaugcugugguugc

SEQ ID NO: 461231 - RNA, 21 nt, Human
ggcugggacuuuacuccgggu

SEQ ID NO: 461232 - RNA, 32 nt, Human
ggcugggagagggagcagggcggcggcccggg

SEQ ID NO: 461233 - RNA, 32 nt, Human
ggcugggagaggggaacgugggaauagcacag

SEQ ID NO: 461234 - RNA, 32 nt, Human
ggcugggagaggguaccacaggggaguaugau

SEQ ID NO: 461235 - RNA, 32 nt, Human
ggcugggagcagagagggaggggacucuguua

SEQ ID NO: 461236 - RNA, 32 nt, Human
ggcugggagcagauguggaggcugacagccag

SEQ ID NO: 461237 - RNA, 32 nt, Human
ggcugggagcagugcuggaggaucaaggaagc

SEQ ID NO: 461238 - RNA, 32 nt, Human
ggcugggaggagaaggagcccccagcccagcc

SEQ ID NO: 461239 - RNA, 32 nt, Human
ggcugggaggagaagggaggggcuggggguuc

SEQ ID NO: 461240 - RNA, 21 nt, Human
ggcugggaggagggcccaggg

SEQ ID NO: 461241 - RNA, 25 nt, Human
ggcugggaggcagagguugcaguga

SEQ ID NO: 461242 - RNA, 32 nt, Human
ggcugggaggcagagguugcagugagcugaga

SEQ ID NO: 461243 - RNA, 25 nt, Human
ggcugggaggcggagguugcaguga

SEQ ID NO: 461244 - RNA, 32 nt, Human
ggcugggaggcggagguugcagugagcugaga

SEQ ID NO: 461245 - RNA, 32 nt, Human
ggcugggagggaguuggagaccagccuggaug

SEQ ID NO: 461246 - RNA, 32 nt, Human
ggcugggaggggaagugaugaggaucacuucu

SEQ ID NO: 461247 - RNA, 32 nt, Human
ggcugggaggggcgaggucacgcuagcaaccu

SEQ ID NO: 461248 - RNA, 32 nt, Human
ggcugggaggggcugaguguacuugguggagg

SEQ ID NO: 461249 - RNA, 32 nt, Human
ggcugggaggggcugugaggggcuggcaccuc

SEQ ID NO: 461250 - RNA, 32 nt, Human
ggcugggaucauaggugugagccaccucaccc

SEQ ID NO: 461251 - RNA, 32 nt, Human
ggcugggauccugggagccggggcacugauug

SEQ ID NO: 461252 - RNA, 21 nt, Human
ggcugggaucuucucugugaa

SEQ ID NO: 461253 - RNA, 32 nt, Human
ggcugggaugaggcuaauacauucaugcaaua

SEQ ID NO: 461254 - RNA, 32 nt, Human
ggcugggaugaggguggagacaaguagucuug

SEQ ID NO: 461255 - RNA, 32 nt, Human
ggcugggauuacaggcauccgccaccaugccc

SEQ ID NO: 461256 - RNA, 32 nt, Human
ggcugggauuacaggcaugagccacugcaccc

SEQ ID NO: 461257 - RNA, 32 nt, Human
ggcugggauuacaggcaugcaccaccaugccc

SEQ ID NO: 461258 - RNA, 32 nt, Human
ggcugggauuacaggcaugcaccaccugacug

SEQ ID NO: 461259 - RNA, 32 nt, Human
ggcugggauuacaggcaugugccaccacaccc

SEQ ID NO: 461260 - RNA, 32 nt, Human
ggcugggauuacagguaugcaccaccacgccc

SEQ ID NO: 461261 - RNA, 32 nt, Human
ggcugggauuagcggcaugcaccaccacgccc

SEQ ID NO: 461262 - RNA, 32 nt, Human
ggcugggauuauaggcgugcaccaccacgccc

SEQ ID NO: 461263 - RNA, 32 nt, Human
ggcugggauuauaggugugugccaccaugcac

SEQ ID NO: 461264 - RNA, 32 nt, Human
ggcugggauugcaggcacccaccaccacgucc

SEQ ID NO: 461265 - RNA, 32 nt, Human
ggcugggauugcaggcaugagcuaccacgccu

SEQ ID NO: 461266 - RNA, 32 nt, Human
ggcugggauuguaggagugugccaccacgcau

SEQ ID NO: 461267 - RNA, 32 nt, Human
ggcugggcaauauuuucucucaucuaacaaac

SEQ ID NO: 461268 - RNA, 32 nt, Human
ggcugggcaaugacugggagacuugccugggu

SEQ ID NO: 461269 - RNA, 32 nt, Human
ggcugggcacaguggcucaugccugaaauccu

SEQ ID NO: 461270 - RNA, 32 nt, Human
ggcugggcaccguguccuccucugaggaagca

SEQ ID NO: 461271 - RNA, 22 nt, Human
ggcugggcaccuggcuguccca

SEQ ID NO: 461272 - RNA, 18 nt, Human
ggcugggcagaagggcug

SEQ ID NO: 461273 - RNA, 32 nt, Human
ggcugggcagagcagaggggcagcgauagacu

SEQ ID NO: 461274 - RNA, 28 nt, Human
ggcugggcagaggcgccccucaccuccc

SEQ ID NO: 461275 - RNA, 32 nt, Human
ggcugggcagaggcgccccucaccucccggac

SEQ ID NO: 461276 - RNA, 32 nt, Human
ggcugggcagaggggaggaggaagcacaagaa

SEQ ID NO: 461277 - RNA, 32 nt, Human
ggcugggcaggcaggggcuugccucuugcuga

SEQ ID NO: 461278 - RNA, 32 nt, Human
ggcugggcagggcacucucagcagcucaacug

SEQ ID NO: 461279 - RNA, 32 nt, Human
ggcugggcauggacaggaggagggaaaaggga

SEQ ID NO: 461280 - RNA, 32 nt, Human
ggcugggccagccugcugcugucugcuucagg

SEQ ID NO: 461281 - RNA, 32 nt, Human
ggcugggcccaggagcgagccugcagaccggg

SEQ ID NO: 461282 - RNA, 32 nt, Human
ggcugggcccaggaggucagguucauuuuguu

SEQ ID NO: 461283 - RNA, 16 nt, Human
ggcugggccccugggg

SEQ ID NO: 461284 - RNA, 21 nt, Human
ggcugggcccgagggucccaa

SEQ ID NO: 461285 - RNA, 20 nt, Human
ggcugggccggacucggggc

SEQ ID NO: 461286 - RNA, 32 nt, Human
ggcugggccgugagcaggugggccguugaguu

SEQ ID NO: 461287 - RNA, 32 nt, Human
ggcugggccugggacaggcuccuccucucccu

SEQ ID NO: 461288 - RNA, 18 nt, Human
ggcugggcgacagaguga

SEQ ID NO: 461289 - RNA, 32 nt, Human
ggcugggcgagcuccacugacaaguggguagg

SEQ ID NO: 461290 - RNA, 20 nt, Human
ggcugggcggaaggaugcgg

SEQ ID NO: 461291 - RNA, 32 nt, Human
ggcugggcgggccuggccgggccagcggaggg

SEQ ID NO: 461292 - RNA, 32 nt, Human
ggcugggcggggcaggccuccuuuguucucca

SEQ ID NO: 461293 - RNA, 32 nt, Human
ggcugggcgugcuagagguugcagcaugagac

SEQ ID NO: 461294 - RNA, 32 nt, Human
ggcugggcucaagaaccugauaccuggguuga

SEQ ID NO: 461295 - RNA, 32 nt, Human
ggcugggcucagagggccagggcaucaagaac

SEQ ID NO: 461296 - RNA, 32 nt, Human
ggcugggcucagcucagcucuccuccucuagc

SEQ ID NO: 461297 - RNA, 21 nt, Human
ggcugggcucucagcccgcca

SEQ ID NO: 461298 - RNA, 32 nt, Human
ggcugggcucuggccugaucacugggcucagg

SEQ ID NO: 461299 - RNA, 32 nt, Human
ggcugggcugaggcacggaucccugggccaca

SEQ ID NO: 461300 - RNA, 32 nt, Human
ggcugggcuggcacaguggagagcgacaggug

SEQ ID NO: 461301 - RNA, 32 nt, Human
ggcugggcuggcugcaccaugggcaggguuga

SEQ ID NO: 461302 - RNA, 32 nt, Human
ggcugggcugguagcaggggccaguccucccc

SEQ ID NO: 461303 - RNA, 32 nt, Human
ggcugggcugugcugcacacugggcaggaggc

SEQ ID NO: 461304 - RNA, 32 nt, Human
ggcugggcuuuucuguaauaagcuuccuuuua

SEQ ID NO: 461305 - RNA, 32 nt, Human
ggcuggggaaaaugacagcgcuucuccuaauc

SEQ ID NO: 461306 - RNA, 32 nt, Human
ggcuggggaaaucauuuucauuuuugagagua

SEQ ID NO: 461307 - RNA, 32 nt, Human
ggcuggggacagggacacuaggagggccuggc

SEQ ID NO: 461308 - RNA, 32 nt, Human
ggcuggggacccagagggaaggcagaaggaga

SEQ ID NO: 461309 - RNA, 20 nt, Human
ggcuggggacgggcccggug

SEQ ID NO: 461310 - RNA, 32 nt, Human
ggcuggggagaacuaaaacaccuucacuggug

SEQ ID NO: 461311 - RNA, 32 nt, Human
ggcuggggagagaagggugaccaggcgaggag

SEQ ID NO: 461312 - RNA, 32 nt, Human
ggcuggggagaggaaggggcagagggaccggu

SEQ ID NO: 461313 - RNA, 32 nt, Human
ggcuggggagagguggaggcugacagcugaga

SEQ ID NO: 461314 - RNA, 32 nt, Human
ggcuggggagcagggagguccgggagggugcg

SEQ ID NO: 461315 - RNA, 32 nt, Human
ggcuggggagccuuggaugggguggggaccug

SEQ ID NO: 461316 - RNA, 32 nt, Human
ggcuggggaggcaccucccuggugcgcaggaa

SEQ ID NO: 461317 - RNA, 21 nt, Human
ggcuggggaggcacggaggaa

SEQ ID NO: 461318 - RNA, 32 nt, Human
ggcuggggaggcaggggcccagcaucagaggg

SEQ ID NO: 461319 - RNA, 32 nt, Human
ggcuggggaggccucaaaauagugguggaagg

SEQ ID NO: 461320 - RNA, 21 nt, Human
ggcuggggagggcagagcaag

SEQ ID NO: 461321 - RNA, 32 nt, Human
ggcuggggagugagaggaugagcuagugagug

SEQ ID NO: 461322 - RNA, 32 nt, Human
ggcuggggauggagagaguugcucugggaguu

SEQ ID NO: 461323 - RNA, 21 nt, Human
ggcuggggauuuguggaggga

SEQ ID NO: 461324 - RNA, 24 nt, Human
ggcuggggcaagcgaguagagaag

SEQ ID NO: 461325 - RNA, 20 nt, Human
ggcuggggcaggggagaaag

SEQ ID NO: 461326 - RNA, 32 nt, Human
ggcuggggcaggggagaaagacagcagacuca

SEQ ID NO: 461327 - RNA, 21 nt, Human
ggcuggggcaucaccgcgggc

SEQ ID NO: 461328 - RNA, 32 nt, Human
ggcuggggcaucucaauagcacugagggcagc

SEQ ID NO: 461329 - RNA, 21 nt, Human
ggcuggggcauggaaggcaag

SEQ ID NO: 461330 - RNA, 32 nt, Human
ggcuggggcauguggggccaggaggcagcuca

SEQ ID NO: 461331 - RNA, 32 nt, Human
ggcuggggccaaggacucugcugagaggcccc

SEQ ID NO: 461332 - RNA, 32 nt, Human
ggcuggggccaguggaccugacaguaccuuac

SEQ ID NO: 461333 - RNA, 32 nt, Human
ggcuggggcccaggcaccugugccggccauuc

SEQ ID NO: 461334 - RNA, 23 nt, Human
ggcuggggccuggaaagaggaag

SEQ ID NO: 461335 - RNA, 32 nt, Human
ggcuggggcgagcggaucaugaggucaacgga

SEQ ID NO: 461336 - RNA, 17 nt, Human
ggcuggggcggcaggug

SEQ ID NO: 461337 - RNA, 20 nt, Human
ggcuggggcgggguggggaa

SEQ ID NO: 461338 - RNA, 32 nt, Human
ggcuggggcugcagccauggggcugggucagc

SEQ ID NO: 461339 - RNA, 32 nt, Human
ggcuggggcugcagccugcagggagaagcaag

SEQ ID NO: 461340 - RNA, 32 nt, Human
ggcuggggcuguuccggggcauggaagauucc

SEQ ID NO: 461341 - RNA, 32 nt, Human
ggcuggggcuuccugggaaaaggaaggccaug

SEQ ID NO: 461342 - RNA, 32 nt, Human
ggcugggggaguucuggcuggggaaugacaac

SEQ ID NO: 461343 - RNA, 23 nt, Human
ggcugggggaucaccugagguca

SEQ ID NO: 461344 - RNA, 20 nt, Human
ggcugggggccauggaggaa

SEQ ID NO: 461345 - RNA, 21 nt, Human
ggcugggggccgagccuggga

SEQ ID NO: 461346 - RNA, 32 nt, Human
ggcugggggcugggcaugcugcaucuuaaccu

SEQ ID NO: 461347 - RNA, 23 nt, Human
ggcuggggggcuacacaaggaag

SEQ ID NO: 461348 - RNA, 23 nt, Human
ggcugggggguggcagagagaag

SEQ ID NO: 461349 - RNA, 32 nt, Human
ggcugggggugaggagucccuggcuucucuua

SEQ ID NO: 461350 - RNA, 23 nt, Human
ggcugggggugggauugaaggaa

SEQ ID NO: 461351 - RNA, 32 nt, Human
ggcugggguacugccacuguuguuaucagcua

SEQ ID NO: 461352 - RNA, 32 nt, Human
ggcuggggucaggagaggagaauaggagugac

SEQ ID NO: 461353 - RNA, 21 nt, Human
ggcuggggucagggaaggaag

SEQ ID NO: 461354 - RNA, 32 nt, Human
ggcuggggucucaaggcuggagucaaggugau

SEQ ID NO: 461355 - RNA, 32 nt, Human
ggcuggggucugcagugcagcauuaaugggcc

SEQ ID NO: 461356 - RNA, 22 nt, Human
ggcuggggugauggguaaggag

SEQ ID NO: 461357 - RNA, 23 nt, Human
ggcuggggugcgcuccggaggaa

SEQ ID NO: 461358 - RNA, 26 nt, Human
ggcuggggugcugggguugaaggaag

SEQ ID NO: 461359 - RNA, 32 nt, Human
ggcuggggugggaacaggauggcgggcaauag

SEQ ID NO: 461360 - RNA, 21 nt, Human
ggcuggggugggagaaggaag

SEQ ID NO: 461361 - RNA, 32 nt, Human
ggcuggggugggguguggcaggaggacaggaa

SEQ ID NO: 461362 - RNA, 21 nt, Human
ggcuggggugugaaaaagaag

SEQ ID NO: 461363 - RNA, 32 nt, Human
ggcuggggugugugggguggucugagccccag

SEQ ID NO: 461364 - RNA, 32 nt, Human
ggcugggguugugggugccucuucugaaaggu

SEQ ID NO: 461365 - RNA, 32 nt, Human
ggcugggguuugaaccuuuaggauuucacagc

SEQ ID NO: 461366 - RNA, 32 nt, Human
ggcuggguaguuaccggaggaggcagagccgg

SEQ ID NO: 461367 - RNA, 32 nt, Human
ggcuggguccuugggccuggccagucuuccuc

SEQ ID NO: 461368 - RNA, 32 nt, Human
ggcugggucgcucccauuuggccugggcuuca

SEQ ID NO: 461369 - RNA, 32 nt, Human
ggcugggucucccccuaccucuuccagcuccc

SEQ ID NO: 461370 - RNA, 32 nt, Human
ggcugggucuguagguuguugcagugaacgac

SEQ ID NO: 461371 - RNA, 32 nt, Human
ggcugggucuuuccucauuucugcuucuggga

SEQ ID NO: 461372 - RNA, 18 nt, Human
ggcugggugacagaguga

SEQ ID NO: 461373 - RNA, 32 nt, Human
ggcugggugacagauuaagcaagacucugucu

SEQ ID NO: 461374 - RNA, 32 nt, Human
ggcugggugacugggucuagccccugauccca

SEQ ID NO: 461375 - RNA, 32 nt, Human
ggcugggugcagcuccaacaccacagcaaggg

SEQ ID NO: 461376 - RNA, 32 nt, Human
ggcugggugcauaggggccacccuggagacuu

SEQ ID NO: 461377 - RNA, 32 nt, Human
ggcugggugcccaccaugccccuuccucuuuc

SEQ ID NO: 461378 - RNA, 20 nt, Human
ggcugggugccugccagacc

SEQ ID NO: 461379 - RNA, 32 nt, Human
ggcugggugcgguggcucacaccugucauccc

SEQ ID NO: 461380 - RNA, 32 nt, Human
ggcugggugcugggaaugagaauaauccuaau

SEQ ID NO: 461381 - RNA, 32 nt, Human
ggcugggugcuguggcucaugccuguaauccc

SEQ ID NO: 461382 - RNA, 16 nt, Human
ggcugggugggcgcgg

SEQ ID NO: 461383 - RNA, 32 nt, Human
ggcugggugggugggaaguguggcugguaacc

SEQ ID NO: 461384 - RNA, 32 nt, Human
ggcuggguggguggguggggaagaaaugggcc

SEQ ID NO: 461385 - RNA, 19 nt, Human
ggcugggugugcagagcug

SEQ ID NO: 461386 - RNA, 32 nt, Human
ggcuggguugggcgguaaacaggccgugggua

SEQ ID NO: 461387 - RNA, 32 nt, Human
ggcuggguuggggguuggguggggcuggacgg

SEQ ID NO: 461388 - RNA, 32 nt, Human
ggcuggguuucuaccuagguugccagguuauc

SEQ ID NO: 461389 - RNA, 32 nt, Human
ggcugguaaagagcaggaccagaggaagaauc

SEQ ID NO: 461390 - RNA, 32 nt, Human
ggcugguacccaggccuggagcagcgguacag

SEQ ID NO: 461391 - RNA, 32 nt, Human
ggcugguagagcaggaagcucugugaugucag

SEQ ID NO: 461392 - RNA, 19 nt, Human
ggcugguaugaagcccagg

SEQ ID NO: 461393 - RNA, 19 nt, Human
ggcugguauucuuugcuua

SEQ ID NO: 461394 - RNA, 32 nt, Human
ggcuggucacaaacuccagagcucaggcaauc

SEQ ID NO: 461395 - RNA, 32 nt, Human
ggcuggucacaaacuccugaccucaggugauc

SEQ ID NO: 461396 - RNA, 32 nt, Human
ggcuggucaucugcugaccacaccccagaucc

SEQ ID NO: 461397 - RNA, 32 nt, Human
ggcuggucaugaacuccugaccucaggugauc

SEQ ID NO: 461398 - RNA, 32 nt, Human
ggcugguccagggccugcccaggcuggggcac

SEQ ID NO: 461399 - RNA, 32 nt, Human
ggcuggucccaagccugcugugcuccuguggc

SEQ ID NO: 461400 - RNA, 22 nt, Human
ggcuggucccaggccaccaggc

SEQ ID NO: 461401 - RNA, 32 nt, Human
ggcugguccccaggcugggccggggcgcacgu

SEQ ID NO: 461402 - RNA, 32 nt, Human
ggcuggucccgaacuccugaccucaggugauc

SEQ ID NO: 461403 - RNA, 32 nt, Human
ggcugguccgaaguuggccacauugcugccag

SEQ ID NO: 461404 - RNA, 32 nt, Human
ggcugguccgggacauggaaauucggacucag

SEQ ID NO: 461405 - RNA, 16 nt, Human
ggcugguccugggguc

SEQ ID NO: 461406 - RNA, 32 nt, Human
ggcuggucgcgaacuccugagcucaggcaauc

SEQ ID NO: 461407 - RNA, 32 nt, Human
ggcuggucgggaguucgagaccagccugacca

SEQ ID NO: 461408 - RNA, 32 nt, Human
ggcuggucucaaaacuccugaccucaagugau

SEQ ID NO: 461409 - RNA, 32 nt, Human
ggcuggucucaaaacuccugaccucaggugau

SEQ ID NO: 461410 - RNA, 32 nt, Human
ggcuggucucaaaacuccugagcucaagugau

SEQ ID NO: 461411 - RNA, 32 nt, Human
ggcuggucucaaacuccagaccucaugauuua

SEQ ID NO: 461412 - RNA, 32 nt, Human
ggcuggucucaaacuccagagcucaagagauc

SEQ ID NO: 461413 - RNA, 32 nt, Human
ggcuggucucaaacuccagggcucaagcaguc

SEQ ID NO: 461414 - RNA, 32 nt, Human
ggcuggucucaaacucccaaccucaggugauc

SEQ ID NO: 461415 - RNA, 32 nt, Human
ggcuggucucaaacucccgaccucaggugauc

SEQ ID NO: 461416 - RNA, 32 nt, Human
ggcuggucucaaacucccgacuucaggugauc

SEQ ID NO: 461417 - RNA, 32 nt, Human
ggcuggucucaaacuccuaaccucgugauccg

SEQ ID NO: 461418 - RNA, 32 nt, Human
ggcuggucucaaacuccuaaccuugugauucg

SEQ ID NO: 461419 - RNA, 32 nt, Human
ggcuggucucaaacuccuagguucacuuuggc

SEQ ID NO: 461420 - RNA, 32 nt, Human
ggcuggucucaaacuccucgguucaagcaauu

SEQ ID NO: 461421 - RNA, 32 nt, Human
ggcuggucucaaacuccugaccuagugaucca

SEQ ID NO: 461422 - RNA, 32 nt, Human
ggcuggucucaaacuccugaccucagaugauc

SEQ ID NO: 461423 - RNA, 32 nt, Human
ggcuggucucaaacuccugaccucagaugauu

SEQ ID NO: 461424 - RNA, 32 nt, Human
ggcuggucucaaacuccugaccucaggcaauc

SEQ ID NO: 461425 - RNA, 32 nt, Human
ggcuggucucaaacuccugaccucaggcgauc

SEQ ID NO: 461426 - RNA, 32 nt, Human
ggcuggucucaaacuccugaccucaggggauc

SEQ ID NO: 461427 - RNA, 32 nt, Human
ggcuggucucaaacuccugaccucagguaauc

SEQ ID NO: 461428 - RNA, 32 nt, Human
ggcuggucucaaacuccugaccucagguacuc

SEQ ID NO: 461429 - RNA, 32 nt, Human
ggcuggucucaaacuccugaccucaggugauc

SEQ ID NO: 461430 - RNA, 32 nt, Human
ggcuggucucaaacuccugaccucaggugauu

SEQ ID NO: 461431 - RNA, 32 nt, Human
ggcuggucucaaacuccugaccucagguguuc

SEQ ID NO: 461432 - RNA, 32 nt, Human
ggcuggucucaaacuccugaccucaugaucca

SEQ ID NO: 461433 - RNA, 32 nt, Human
ggcuggucucaaacuccugaccucaugaucug

SEQ ID NO: 461434 - RNA, 32 nt, Human
ggcuggucucaaacuccugaccuccggugauc

SEQ ID NO: 461435 - RNA, 32 nt, Human
ggcuggucucaaacuccugaccucgugauacg

SEQ ID NO: 461436 - RNA, 32 nt, Human
ggcuggucucaaacuccugaccucgugaucca

SEQ ID NO: 461437 - RNA, 32 nt, Human
ggcuggucucaaacuccugaccucuggugauc

SEQ ID NO: 461438 - RNA, 32 nt, Human
ggcuggucucaaacuccugaccucuugauccg

SEQ ID NO: 461439 - RNA, 32 nt, Human
ggcuggucucaaacuccugaccuugugaucca

SEQ ID NO: 461440 - RNA, 32 nt, Human
ggcuggucucaaacuccugaccuugugauccg

SEQ ID NO: 461441 - RNA, 32 nt, Human
ggcuggucucaaacuccugaccuugugaucug

SEQ ID NO: 461442 - RNA, 32 nt, Human
ggcuggucucaaacuccugacgccaggugauc

SEQ ID NO: 461443 - RNA, 32 nt, Human
ggcuggucucaaacuccugacuucaggugauc

SEQ ID NO: 461444 - RNA, 32 nt, Human
ggcuggucucaaacuccugacuucgugaucug

SEQ ID NO: 461445 - RNA, 32 nt, Human
ggcuggucucaaacuccugagcucaagcaauc

SEQ ID NO: 461446 - RNA, 32 nt, Human
ggcuggucucaaacuccugagcucaagccauc

SEQ ID NO: 461447 - RNA, 32 nt, Human
ggcuggucucaaacuccugagcucaagcgauc

SEQ ID NO: 461448 - RNA, 32 nt, Human
ggcuggucucaaacuccugagcucaggcaauc

SEQ ID NO: 461449 - RNA, 32 nt, Human
ggcuggucucaaacuccugagcucaggcagau

SEQ ID NO: 461450 - RNA, 32 nt, Human
ggcuggucucaaacuccugagcucaggccauc

SEQ ID NO: 461451 - RNA, 32 nt, Human
ggcuggucucaaacuccugaucucaagagaug

SEQ ID NO: 461452 - RNA, 32 nt, Human
ggcuggucucaaacuccugauuucuuagucug

SEQ ID NO: 461453 - RNA, 32 nt, Human
ggcuggucucaaacuccugcccucaggugauc

SEQ ID NO: 461454 - RNA, 32 nt, Human
ggcuggucucaaacuccuggacucaagcaauc

SEQ ID NO: 461455 - RNA, 32 nt, Human
ggcuggucucaaacuccuggacucaagggauc

SEQ ID NO: 461456 - RNA, 32 nt, Human
ggcuggucucaaacuccuggccucaagcaauc

SEQ ID NO: 461457 - RNA, 32 nt, Human
ggcuggucucaaacuccuggccucaagugacc

SEQ ID NO: 461458 - RNA, 32 nt, Human
ggcuggucucaaacuccuggccucaagugauc

SEQ ID NO: 461459 - RNA, 32 nt, Human
ggcuggucucaaacuccuggccucaggugauc

SEQ ID NO: 461460 - RNA, 32 nt, Human
ggcuggucucaaacuccugggcacaagcaauc

SEQ ID NO: 461461 - RNA, 32 nt, Human
ggcuggucucaaacuccugggcucaagcaauc

SEQ ID NO: 461462 - RNA, 32 nt, Human
ggcuggucucaaacuccugggcucaagcaaug

SEQ ID NO: 461463 - RNA, 32 nt, Human
ggcuggucucaaacuccugggcucaagcgauc

SEQ ID NO: 461464 - RNA, 32 nt, Human
ggcuggucucaaacuccugggcucaagugaac

SEQ ID NO: 461465 - RNA, 32 nt, Human
ggcuggucucaaacuccugggcucaagugauc

SEQ ID NO: 461466 - RNA, 32 nt, Human
ggcuggucucaaacuccugggcucaggcgauc

SEQ ID NO: 461467 - RNA, 32 nt, Human
ggcuggucucaaacuccuggguucaagcaauc

SEQ ID NO: 461468 - RNA, 32 nt, Human
ggcuggucucaaacuccuggguucaagccuca

SEQ ID NO: 461469 - RNA, 32 nt, Human
ggcuggucucaaacuccuggguucaagugauc

SEQ ID NO: 461470 - RNA, 32 nt, Human
ggcuggucucaaacucucgggcucaagcaguc

SEQ ID NO: 461471 - RNA, 32 nt, Human
ggcuggucucaaacucuugaccucaggugauc

SEQ ID NO: 461472 - RNA, 32 nt, Human
ggcuggucucaaacucuugaccucgugauuug

SEQ ID NO: 461473 - RNA, 32 nt, Human
ggcuggucucaaacucuugacuucagaugauc

SEQ ID NO: 461474 - RNA, 32 nt, Human
ggcuggucucaaacucuugacuucagguaauc

SEQ ID NO: 461475 - RNA, 32 nt, Human
ggcuggucucaaacucuugagcucaagcccac

SEQ ID NO: 461476 - RNA, 32 nt, Human
ggcuggucucaaacucuuuggcucaagccauc

SEQ ID NO: 461477 - RNA, 32 nt, Human
ggcuggucucaaacugcugacuucaggugauc

SEQ ID NO: 461478 - RNA, 32 nt, Human
ggcuggucucaaacuucucacuucaggugauc

SEQ ID NO: 461479 - RNA, 32 nt, Human
ggcuggucucaaacuucugaccucaggugauc

SEQ ID NO: 461480 - RNA, 32 nt, Human
ggcuggucucaaacuucugaccucgugaucca

SEQ ID NO: 461481 - RNA, 32 nt, Human
ggcuggucucaaacuucugaccuugugaucug

SEQ ID NO: 461482 - RNA, 32 nt, Human
ggcuggucucaaacuucugaucucaagugauc

SEQ ID NO: 461483 - RNA, 32 nt, Human
ggcuggucucaaacuucugggcucaagcaauu

SEQ ID NO: 461484 - RNA, 32 nt, Human
ggcuggucucaaacuugugagcucaagaaauc

SEQ ID NO: 461485 - RNA, 32 nt, Human
ggcuggucucaaauuccugaccccaggugauc

SEQ ID NO: 461486 - RNA, 32 nt, Human
ggcuggucucaaauucuugaucucaagugauc

SEQ ID NO: 461487 - RNA, 32 nt, Human
ggcuggucucaaauuucugggcucaggugauc

SEQ ID NO: 461488 - RNA, 32 nt, Human
ggcuggucucaaccuccugggcucaagcaauc

SEQ ID NO: 461489 - RNA, 32 nt, Human
ggcuggucucagaauucuggugagugauccuc

SEQ ID NO: 461490 - RNA, 32 nt, Human
ggcuggucucaggcuccugggcucagaugguc

SEQ ID NO: 461491 - RNA, 20 nt, Human
ggcuggucuccaacuccucg

SEQ ID NO: 461492 - RNA, 32 nt, Human
ggcuggucuccaacuccugaccucaggcgauc

SEQ ID NO: 461493 - RNA, 32 nt, Human
ggcuggucuccaacuccugaccucaggugauc

SEQ ID NO: 461494 - RNA, 32 nt, Human
ggcuggucuccaacuccugaccucgggugauc

SEQ ID NO: 461495 - RNA, 32 nt, Human
ggcuggucuccaacuccugagcucaggugauc

SEQ ID NO: 461496 - RNA, 32 nt, Human
ggcuggucuccaacuccugggcucaagcaauc

SEQ ID NO: 461497 - RNA, 32 nt, Human
ggcuggucucgaacaccugggcucaacugauc

SEQ ID NO: 461498 - RNA, 32 nt, Human
ggcuggucucgaacuccuaaucucaaguuauc

SEQ ID NO: 461499 - RNA, 32 nt, Human
ggcuggucucgaacuccugaacuuaggugauu

SEQ ID NO: 461500 - RNA, 32 nt, Human
ggcuggucucgaacuccugacaucaggugauc

SEQ ID NO: 461501 - RNA, 32 nt, Human
ggcuggucucgaacuccugaccacagguaauc

SEQ ID NO: 461502 - RNA, 32 nt, Human
ggcuggucucgaacuccugaccccaggugauc

SEQ ID NO: 461503 - RNA, 32 nt, Human
ggcuggucucgaacuccugaccuagugaucug

SEQ ID NO: 461504 - RNA, 32 nt, Human
ggcuggucucgaacuccugaccucagacgauc

SEQ ID NO: 461505 - RNA, 32 nt, Human
ggcuggucucgaacuccugaccucagauaauc

SEQ ID NO: 461506 - RNA, 32 nt, Human
ggcuggucucgaacuccugaccucagaugauc

SEQ ID NO: 461507 - RNA, 32 nt, Human
ggcuggucucgaacuccugaccucaggcaauc

SEQ ID NO: 461508 - RNA, 32 nt, Human
ggcuggucucgaacuccugaccucaggcgauc

SEQ ID NO: 461509 - RNA, 32 nt, Human
ggcuggucucgaacuccugaccucaggggauc

SEQ ID NO: 461510 - RNA, 32 nt, Human
ggcuggucucgaacuccugaccucagguaauc

SEQ ID NO: 461511 - RNA, 29 nt, Human
ggcuggucucgaacuccugaccucaggug

SEQ ID NO: 461512 - RNA, 32 nt, Human
ggcuggucucgaacuccugaccucaggugagc

SEQ ID NO: 461513 - RNA, 32 nt, Human
ggcuggucucgaacuccugaccucaggugauc

SEQ ID NO: 461514 - RNA, 32 nt, Human
ggcuggucucgaacuccugaccucaggugaug

SEQ ID NO: 461515 - RNA, 32 nt, Human
ggcuggucucgaacuccugaccucaggugauu

SEQ ID NO: 461516 - RNA, 32 nt, Human
ggcuggucucgaacuccugaccucaguugauc

SEQ ID NO: 461517 - RNA, 32 nt, Human
ggcuggucucgaacuccugaccucaugagccg

SEQ ID NO: 461518 - RNA, 32 nt, Human
ggcuggucucgaacuccugaccucaugaucca

SEQ ID NO: 461519 - RNA, 32 nt, Human
ggcuggucucgaacuccugaccucaugauccg

SEQ ID NO: 461520 - RNA, 32 nt, Human
ggcuggucucgaacuccugaccucaugauccu

SEQ ID NO: 461521 - RNA, 32 nt, Human
ggcuggucucgaacuccugaccucaugaucug

SEQ ID NO: 461522 - RNA, 32 nt, Human
ggcuggucucgaacuccugaccucaugauuug

SEQ ID NO: 461523 - RNA, 32 nt, Human
ggcuggucucgaacuccugaccucgugaucca

SEQ ID NO: 461524 - RNA, 32 nt, Human
ggcuggucucgaacuccugaccucgugauccg

SEQ ID NO: 461525 - RNA, 32 nt, Human
ggcuggucucgaacuccugaccucgugaucga

SEQ ID NO: 461526 - RNA, 32 nt, Human
ggcuggucucgaacuccugaccucgugaucug

SEQ ID NO: 461527 - RNA, 32 nt, Human
ggcuggucucgaacuccugaccucgugauugg

SEQ ID NO: 461528 - RNA, 32 nt, Human
ggcuggucucgaacuccugaccucgugauuug

SEQ ID NO: 461529 - RNA, 32 nt, Human
ggcuggucucgaacuccugaccuuaggugauc

SEQ ID NO: 461530 - RNA, 32 nt, Human
ggcuggucucgaacuccugaccuuggguaauc

SEQ ID NO: 461531 - RNA, 32 nt, Human
ggcuggucucgaacuccugaccuugugauaca

SEQ ID NO: 461532 - RNA, 32 nt, Human
ggcuggucucgaacuccugaccuugugaucca

SEQ ID NO: 461533 - RNA, 32 nt, Human
ggcuggucucgaacuccugaccuugugauccg

SEQ ID NO: 461534 - RNA, 32 nt, Human
ggcuggucucgaacuccugaccuugugaucug

SEQ ID NO: 461535 - RNA, 32 nt, Human
ggcuggucucgaacuccugagcucaagugauc

SEQ ID NO: 461536 - RNA, 32 nt, Human
ggcuggucucgaacuccugagcucaggcaauc

SEQ ID NO: 461537 - RNA, 32 nt, Human
ggcuggucucgaacuccugagcucaggcaguc

SEQ ID NO: 461538 - RNA, 32 nt, Human
ggcuggucucgaacuccugagcucaggugauc

SEQ ID NO: 461539 - RNA, 32 nt, Human
ggcuggucucgaacuccugaucucaugauccg

SEQ ID NO: 461540 - RNA, 32 nt, Human
ggcuggucucgaacuccugcccucaggugauc

SEQ ID NO: 461541 - RNA, 32 nt, Human
ggcuggucucgaacuccuggccauaggugauc

SEQ ID NO: 461542 - RNA, 32 nt, Human
ggcuggucucgaacuccuggccuaaugaucug

SEQ ID NO: 461543 - RNA, 32 nt, Human
ggcuggucucgaacuccuggccuaggugaucc

SEQ ID NO: 461544 - RNA, 32 nt, Human
ggcuggucucgaacuccuggccucagguguga

SEQ ID NO: 461545 - RNA, 32 nt, Human
ggcuggucucgaacuccuggccucgugaucug

SEQ ID NO: 461546 - RNA, 32 nt, Human
ggcuggucucgaacuccugggcucaagccguu

SEQ ID NO: 461547 - RNA, 32 nt, Human
ggcuggucucgaacuccugggcucaagcgauc

SEQ ID NO: 461548 - RNA, 32 nt, Human
ggcuggucucgaacuccugggcucaagcgguc

SEQ ID NO: 461549 - RNA, 32 nt, Human
ggcuggucucgaacuccugggcucaagugauc

SEQ ID NO: 461550 - RNA, 32 nt, Human
ggcuggucucgaacuccugggcucgggugauc

SEQ ID NO: 461551 - RNA, 32 nt, Human
ggcuggucucgaacuccugggcuuaaaugacu

SEQ ID NO: 461552 - RNA, 32 nt, Human
ggcuggucucgaacuccuguccucagguaauc

SEQ ID NO: 461553 - RNA, 32 nt, Human
ggcuggucucgaacuucugagcucgagcgauc

SEQ ID NO: 461554 - RNA, 32 nt, Human
ggcuggucucgaacuucugggcucaagcaauu

SEQ ID NO: 461555 - RNA, 32 nt, Human
ggcuggucucgagcuccugagcucaggcaauc

SEQ ID NO: 461556 - RNA, 32 nt, Human
ggcuggucucggaacuccugacugcaggugau

SEQ ID NO: 461557 - RNA, 32 nt, Human
ggcuggucucggacuccugggcucaagcaauc

SEQ ID NO: 461558 - RNA, 32 nt, Human
ggcuggucucuaacuccugggcucagugaucc

SEQ ID NO: 461559 - RNA, 32 nt, Human
ggcuggucucucggcccugccggugucgcagc

SEQ ID NO: 461560 - RNA, 22 nt, Human
ggcuggucugaagcugcugggc

SEQ ID NO: 461561 - RNA, 32 nt, Human
ggcuggucuggaacuccugaccucaggugauc

SEQ ID NO: 461562 - RNA, 32 nt, Human
ggcuggucuggaacuccugaccuucaggugau

SEQ ID NO: 461563 - RNA, 32 nt, Human
ggcuggucuuaaacgccugggcucaagcaacc

SEQ ID NO: 461564 - RNA, 32 nt, Human
ggcuggucuuaaacuccugggcucaagugauc

SEQ ID NO: 461565 - RNA, 32 nt, Human
ggcuggucuucgaacucccaaccucaggugau

SEQ ID NO: 461566 - RNA, 32 nt, Human
ggcuggucuugaacucccgagcucaggugauc

SEQ ID NO: 461567 - RNA, 32 nt, Human
ggcuggucuugaacuccugaccucaggcgauc

SEQ ID NO: 461568 - RNA, 32 nt, Human
ggcuggucuugaacuccugaccucagguaauc

SEQ ID NO: 461569 - RNA, 32 nt, Human
ggcuggucuugaacuccugaccucaggugagc

SEQ ID NO: 461570 - RNA, 32 nt, Human
ggcuggucuugaacuccugaccucaggugaua

SEQ ID NO: 461571 - RNA, 32 nt, Human
ggcuggucuugaacuccugaccucaggugauc

SEQ ID NO: 461572 - RNA, 32 nt, Human
ggcuggucuugaacuccugaccucaugaucca

SEQ ID NO: 461573 - RNA, 32 nt, Human
ggcuggucuugaacuccugaccucgugaccca

SEQ ID NO: 461574 - RNA, 32 nt, Human
ggcuggucuugaacuccugaccucgugaucca

SEQ ID NO: 461575 - RNA, 32 nt, Human
ggcuggucuugaacuccugaccucgugauccg

SEQ ID NO: 461576 - RNA, 32 nt, Human
ggcuggucuugaacuccugaccucgugaucug

SEQ ID NO: 461577 - RNA, 32 nt, Human
ggcuggucuugaacuccugaccucgugauugu

SEQ ID NO: 461578 - RNA, 32 nt, Human
ggcuggucuugaacuccugacuucaggugacc

SEQ ID NO: 461579 - RNA, 32 nt, Human
ggcuggucuugaacuccugagccucgugaguc

SEQ ID NO: 461580 - RNA, 32 nt, Human
ggcuggucuugaacuccugagcucaggugauc

SEQ ID NO: 461581 - RNA, 32 nt, Human
ggcuggucuugaacuccuggacuuagacgauc

SEQ ID NO: 461582 - RNA, 32 nt, Human
ggcuggucuugaacuccuggcucaagaaauca

SEQ ID NO: 461583 - RNA, 32 nt, Human
ggcuggucuugaacuccuggcuucgggugauc

SEQ ID NO: 461584 - RNA, 32 nt, Human
ggcuggucuugaacuccugggcuccagugauc

SEQ ID NO: 461585 - RNA, 32 nt, Human
ggcuggucuugaacuccuugaccucagguaau

SEQ ID NO: 461586 - RNA, 32 nt, Human
ggcuggucuugaacugcuggccuaagcgaucc

SEQ ID NO: 461587 - RNA, 32 nt, Human
ggcuggucuuggaacuccugaccucgugagcc

SEQ ID NO: 461588 - RNA, 32 nt, Human
ggcuggucuuuaacuccugaccucagguguuc

SEQ ID NO: 461589 - RNA, 32 nt, Human
ggcuggucuuuaauuccugggcucgagagagc

SEQ ID NO: 461590 - RNA, 32 nt, Human
ggcuggucuuuacccuucuuccucacugucau

SEQ ID NO: 461591 - RNA, 32 nt, Human
ggcuggugagucuagaaugcucuggaacccua

SEQ ID NO: 461592 - RNA, 32 nt, Human
ggcuggugcagccuuuucucuccccuccugau

SEQ ID NO: 461593 - RNA, 32 nt, Human
ggcuggugccagugccccaggggccuccuggg

SEQ ID NO: 461594 - RNA, 32 nt, Human
ggcuggugccuguagucccagcuacucaggag

SEQ ID NO: 461595 - RNA, 32 nt, Human
ggcuggugccuugucccaggggagagggaaau

SEQ ID NO: 461596 - RNA, 32 nt, Human
ggcuggugcucacagcuguaaucccagcacuu

SEQ ID NO: 461597 - RNA, 18 nt, Human
ggcugguggagaggguug

SEQ ID NO: 461598 - RNA, 32 nt, Human
ggcugguggcuugcacugagggccuggcugcc

SEQ ID NO: 461599 - RNA, 32 nt, Human
ggcuggugggaaagaguuuguuuuuggggccu

SEQ ID NO: 461600 - RNA, 32 nt, Human
ggcuggugggacaguuuuggaccuggaaucau

SEQ ID NO: 461601 - RNA, 32 nt, Human
ggcuggugggaggcagggggcaggccugcgga

SEQ ID NO: 461602 - RNA, 32 nt, Human
ggcuggugggcaugcuguccacuguguggugc

SEQ ID NO: 461603 - RNA, 32 nt, Human
ggcuggugucaaacuccugacuucaggugauc

SEQ ID NO: 461604 - RNA, 32 nt, Human
ggcuggugucaaacuccugggcucagucaguc

SEQ ID NO: 461605 - RNA, 32 nt, Human
ggcuggugucgaacuccugaccucaggugauc

SEQ ID NO: 461606 - RNA, 32 nt, Human
ggcuggugucgaauuccugggcuccagggauc

SEQ ID NO: 461607 - RNA, 32 nt, Human
ggcuggugugagagcaggccuugggugagaug

SEQ ID NO: 461608 - RNA, 32 nt, Human
ggcugguguguagugaucucagcucacugcaa

SEQ ID NO: 461609 - RNA, 18 nt, Human
ggcugguguguggccagg

SEQ ID NO: 461610 - RNA, 19 nt, Human
ggcugguuccuggguccgg

SEQ ID NO: 461611 - RNA, 32 nt, Human
ggcugguucuucccaccacuucccaggcucug

SEQ ID NO: 461612 - RNA, 23 nt, Human
ggcugguugguggccuccagaua

SEQ ID NO: 461613 - RNA, 32 nt, Human
ggcugguugugaaaucaguuugagugcagaau

SEQ ID NO: 461614 - RNA, 32 nt, Human
ggcugguuguuccguugcgagcugcagcugcg

SEQ ID NO: 461615 - RNA, 32 nt, Human
ggcugguuuaaggggaacuugagggaaguagg

SEQ ID NO: 461616 - RNA, 32 nt, Human
ggcugguuucaaacuccugaccucaggugauc

SEQ ID NO: 461617 - RNA, 32 nt, Human
ggcugguuucaaacuccugaccucaguugauc

SEQ ID NO: 461618 - RNA, 32 nt, Human
ggcugguuucaaacuccugagcucaaaugauc

SEQ ID NO: 461619 - RNA, 32 nt, Human
ggcugguuuccuuuucuuuucccacaaaccuu

SEQ ID NO: 461620 - RNA, 32 nt, Human
ggcugguuucgaacuccugaccucaggugauc

SEQ ID NO: 461621 - RNA, 32 nt, Human
ggcugguuucgaacuccugaccucgugaucca

SEQ ID NO: 461622 - RNA, 32 nt, Human
ggcugguuucgaacuccuggccucaggugauc

SEQ ID NO: 461623 - RNA, 32 nt, Human
ggcugguuucgaacuccugggcuuaagugauu

SEQ ID NO: 461624 - RNA, 32 nt, Human
ggcugguuucgaacucuguaaucccagcacuu

SEQ ID NO: 461625 - RNA, 32 nt, Human
ggcugguuugagucucucaaaucauggauuag

SEQ ID NO: 461626 - RNA, 32 nt, Human
ggcugguuuugaacuccugaccucaggugagc

SEQ ID NO: 461627 - RNA, 32 nt, Human
ggcuguacaguuugaaaaagcauauucaauau

SEQ ID NO: 461628 - RNA, 32 nt, Human
ggcuguacauucagcacagcuguggugucccc

SEQ ID NO: 461629 - RNA, 32 nt, Human
ggcuguacccugcaaagccacagguggggagc

SEQ ID NO: 461630 - RNA, 22 nt, Human
ggcuguaccuggugcccugugg

SEQ ID NO: 461631 - RNA, 32 nt, Human
ggcuguacgcuaccacagcuucccaggccgug

SEQ ID NO: 461632 - RNA, 32 nt, Human
ggcuguagaaauuuaaaaacuacaaugugauu

SEQ ID NO: 461633 - RNA, 32 nt, Human
ggcuguagauuuaagggcacucaaggggaaaa

SEQ ID NO: 461634 - RNA, 26 nt, Human
ggcuguagcagugugccuccauggcc

SEQ ID NO: 461635 - RNA, 32 nt, Human
ggcuguagcugaugcaacuaacaaguacuggg

SEQ ID NO: 461636 - RNA, 26 nt, Human
ggcuguagcuuuccacagccacugcc

SEQ ID NO: 461637 - RNA, 23 nt, Human
ggcuguagcuuucuugcucauca

SEQ ID NO: 461638 - RNA, 32 nt, Human
ggcuguaggaagagggaagcucuuccuuggca

SEQ ID NO: 461639 - RNA, 21 nt, Human
ggcuguaggcacaccgcggcc

SEQ ID NO: 461640 - RNA, 20 nt, Human
ggcuguaggguucccgggaa

SEQ ID NO: 461641 - RNA, 32 nt, Human
ggcuguaguucugcagggagagccugaagucc

SEQ ID NO: 461642 - RNA, 32 nt, Human
ggcuguauaagaauacuuuucucuccacaacg

SEQ ID NO: 461643 - RNA, 32 nt, Human
ggcuguauggagucugcagguaaacaugccug

SEQ ID NO: 461644 - RNA, 32 nt, Human
ggcuguaugugggugggcauguggccuccccc

SEQ ID NO: 461645 - RNA, 32 nt, Human
ggcugucaaguauuccaugagccacauagccc

SEQ ID NO: 461646 - RNA, 32 nt, Human
ggcugucacagaggcuggagaaauaagcagug

SEQ ID NO: 461647 - RNA, 32 nt, Human
ggcugucaccacgugcaguaucucaagauauu

SEQ ID NO: 461648 - RNA, 23 nt, Human
ggcugucacccgaucgccagcaa

SEQ ID NO: 461649 - RNA, 32 nt, Human
ggcugucaccucccagcucacacacacucuuc

SEQ ID NO: 461650 - RNA, 21 nt, Human
ggcugucacugcagaagucuu

SEQ ID NO: 461651 - RNA, 32 nt, Human
ggcugucagcagcacuguguccaggcucuugu

SEQ ID NO: 461652 - RNA, 32 nt, Human
ggcugucagccucugggcaggcuugcuuuuau

SEQ ID NO: 461653 - RNA, 32 nt, Human
ggcugucagggagggccuggggugggggccag

SEQ ID NO: 461654 - RNA, 32 nt, Human
ggcugucaucaacagugggaccagcuucuuug

SEQ ID NO: 461655 - RNA, 32 nt, Human
ggcugucaucaggaaaaugguugggagauuuc

SEQ ID NO: 461656 - RNA, 32 nt, Human
ggcugucaugggcucccaggggcuccaggcau

SEQ ID NO: 461657 - RNA, 18 nt, Human
ggcugucauuucauugca

SEQ ID NO: 461658 - RNA, 32 nt, Human
ggcuguccacaguucucagauguguuaaugug

SEQ ID NO: 461659 - RNA, 32 nt, Human
ggcuguccagaacugcucacccugccuuuuuc

SEQ ID NO: 461660 - RNA, 32 nt, Human
ggcuguccauuggugaugaugacuguaacuuc

SEQ ID NO: 461661 - RNA, 32 nt, Human
ggcugucccacucccagcucuggcagaaucaa

SEQ ID NO: 461662 - RNA, 32 nt, Human
ggcugucccagagagguccgcguucuccccac

SEQ ID NO: 461663 - RNA, 32 nt, Human
ggcugucccauagagcccauuguaaaggacac

SEQ ID NO: 461664 - RNA, 32 nt, Human
ggcuguccccauccucauguggcuguguggag

SEQ ID NO: 461665 - RNA, 21 nt, Human
ggcugucccccggccccagcg

SEQ ID NO: 461666 - RNA, 32 nt, Human
ggcugucccgggcuguuacugucucuucuggu

SEQ ID NO: 461667 - RNA, 20 nt, Human
ggcugucccuggacagugac

SEQ ID NO: 461668 - RNA, 22 nt, Human
ggcuguccgucuuuacugugag

SEQ ID NO: 461669 - RNA, 24 nt, Human
ggcuguccuccugcagcccagugg

SEQ ID NO: 461670 - RNA, 22 nt, Human
ggcuguccugaaaacccugugg

SEQ ID NO: 461671 - RNA, 21 nt, Human
ggcuguccuggacacuguggg

SEQ ID NO: 461672 - RNA, 32 nt, Human
ggcuguccugggagccccugcccacccugaca

SEQ ID NO: 461673 - RNA, 22 nt, Human
ggcuguccugggccagcgggag

SEQ ID NO: 461674 - RNA, 32 nt, Human
ggcuguccugggcucccugacccacugaagcu

SEQ ID NO: 461675 - RNA, 21 nt, Human
ggcuguccuguacauuguggg

SEQ ID NO: 461676 - RNA, 25 nt, Human
ggcuguccuguuggagaacuaugag

SEQ ID NO: 461677 - RNA, 24 nt, Human
ggcuguccuuuuugacccaggggu

SEQ ID NO: 461678 - RNA, 32 nt, Human
ggcugucgaauagaggaggagagagaaauggu

SEQ ID NO: 461679 - RNA, 32 nt, Human
ggcugucgccuguaaugccagcgcuuugggag

SEQ ID NO: 461680 - RNA, 32 nt, Human
ggcugucgcugcuuuuuguccucugccguguu

SEQ ID NO: 461681 - RNA, 32 nt, Human
ggcugucggacugcgcucccagccugggcucu

SEQ ID NO: 461682 - RNA, 18 nt, Human
ggcugucggccagaggga

SEQ ID NO: 461683 - RNA, 21 nt, Human
ggcugucggcgcgccgcggcc

SEQ ID NO: 461684 - RNA, 32 nt, Human
ggcugucgggguggggcugagcugccggggag

SEQ ID NO: 461685 - RNA, 32 nt, Human
ggcugucgggucucccccucucugacccugcg

SEQ ID NO: 461686 - RNA, 32 nt, Human
ggcugucggucagguugguccagugaggggug

SEQ ID NO: 461687 - RNA, 32 nt, Human
ggcugucuccauucuguccccuucccauaaaa

SEQ ID NO: 461688 - RNA, 32 nt, Human
ggcugucucccaggccacuaggcaugggggcu

SEQ ID NO: 461689 - RNA, 18 nt, Human
ggcugucuccucauggcc

SEQ ID NO: 461690 - RNA, 32 nt, Human
ggcugucucucccuuucucccccucucucucu

SEQ ID NO: 461691 - RNA, 32 nt, Human
ggcugucucugucccucacugccuuccaggag

SEQ ID NO: 461692 - RNA, 32 nt, Human
ggcugucucuguuccuucuauuuugcugauuu

SEQ ID NO: 461693 - RNA, 31 nt, Human
ggcugucugagcagggagguugggaccccug

SEQ ID NO: 461694 - RNA, 20 nt, Human
ggcugucugaugcagaugau

SEQ ID NO: 461695 - RNA, 24 nt, Human
ggcugucugcccaccucagccucc

SEQ ID NO: 461696 - RNA, 32 nt, Human
ggcugucugccuguauuuucggacuuugacau

SEQ ID NO: 461697 - RNA, 23 nt, Human
ggcugucuggaaccuggaggaag

SEQ ID NO: 461698 - RNA, 32 nt, Human
ggcugucugggauggcuuccaauuuuaaugac

SEQ ID NO: 461699 - RNA, 32 nt, Human
ggcugucugucugucugucuaaccuggcauua

SEQ ID NO: 461700 - RNA, 32 nt, Human
ggcugucuuacugcuagcucuucuaacagggg

SEQ ID NO: 461701 - RNA, 32 nt, Human
ggcugucuuccuucuaagaaagcuauuuauaa

SEQ ID NO: 461702 - RNA, 22 nt, Human
ggcugucuuggaucccaacagg

SEQ ID NO: 461703 - RNA, 32 nt, Human
ggcugucuuggcucuggaauucaugcauccug

SEQ ID NO: 461704 - RNA, 32 nt, Human
ggcugucuugggugcacuggacuuggagcacu

SEQ ID NO: 461705 - RNA, 32 nt, Human
ggcugucuuucccauuccuuguccagcuagga

SEQ ID NO: 461706 - RNA, 32 nt, Human
ggcugucuuucuucccccucuucucccuaauc

SEQ ID NO: 461707 - RNA, 32 nt, Human
ggcugugaaagccacaggugggggcugagcga

SEQ ID NO: 461708 - RNA, 32 nt, Human
ggcugugaaaucugcaaaaagagcugacauuc

SEQ ID NO: 461709 - RNA, 19 nt, Human
ggcugugaacaggggaggc

SEQ ID NO: 461710 - RNA, 32 nt, Human
ggcugugaacuucacccaggaggaauggacuu

SEQ ID NO: 461711 - RNA, 18 nt, Human
ggcugugaaugguagaca

SEQ ID NO: 461712 - RNA, 32 nt, Human
ggcugugacacccagaggaauuccugugagag

SEQ ID NO: 461713 - RNA, 32 nt, Human
ggcugugacacuuaccuccacccccauccagc

SEQ ID NO: 461714 - RNA, 32 nt, Human
ggcugugacaucaguugucaggagaacuggga

SEQ ID NO: 461715 - RNA, 32 nt, Human
ggcugugacccaugggccucugaggaggcguu

SEQ ID NO: 461716 - RNA, 32 nt, Human
ggcugugaccccaggagggcccugccacgggc

SEQ ID NO: 461717 - RNA, 32 nt, Human
ggcugugacgucacuggauguguccugaucua

SEQ ID NO: 461718 - RNA, 32 nt, Human
ggcugugacuccacaucccgaggucgcugccu

SEQ ID NO: 461719 - RNA, 32 nt, Human
ggcugugacugcugcaagcucugccuucacca

SEQ ID NO: 461720 - RNA, 32 nt, Human
ggcugugacuuacuccugccuccaggggcggg

SEQ ID NO: 461721 - RNA, 32 nt, Human
ggcugugagacaagccacuggguucuucaaag

SEQ ID NO: 461722 - RNA, 32 nt, Human
ggcugugagaggacaggguggagaggaggaga

SEQ ID NO: 461723 - RNA, 32 nt, Human
ggcugugagaggaucaucuggggcaggcccuc

SEQ ID NO: 461724 - RNA, 32 nt, Human
ggcugugagagggaggcuggggugccugggcg

SEQ ID NO: 461725 - RNA, 32 nt, Human
ggcugugagcccgcagccuccucaaauguagc

SEQ ID NO: 461726 - RNA, 32 nt, Human
ggcugugagcugggcuucuguccuccucugug

SEQ ID NO: 461727 - RNA, 32 nt, Human
ggcugugaggacggcuuccagcagggagcuuc

SEQ ID NO: 461728 - RNA, 32 nt, Human
ggcugugaggggguuggauccaggaagcagcc

SEQ ID NO: 461729 - RNA, 32 nt, Human
ggcugugaggugaccccagacacugcagaacg

SEQ ID NO: 461730 - RNA, 32 nt, Human
ggcugugagguggcagcggcugcagcggcgga

SEQ ID NO: 461731 - RNA, 32 nt, Human
ggcugugagucaccucugccucaugugggugg

SEQ ID NO: 461732 - RNA, 18 nt, Human
ggcugugaguccagguca

SEQ ID NO: 461733 - RNA, 32 nt, Human
ggcugugauccaggcuggggcgagaccauguc

SEQ ID NO: 461734 - RNA, 32 nt, Human
ggcugugauggaaauucaaaagccccuucuca

SEQ ID NO: 461735 - RNA, 32 nt, Human
ggcugugaugggcaggaaguggucaggaccca

SEQ ID NO: 461736 - RNA, 32 nt, Human
ggcugugauuccauucccucugcuuucuugaa

SEQ ID NO: 461737 - RNA, 32 nt, Human
ggcugugcaccagcaaaccuccaggaaggauc

SEQ ID NO: 461738 - RNA, 17 nt, Human
ggcugugcaggaggguu

SEQ ID NO: 461739 - RNA, 18 nt, Human
ggcugugcaggggggcug

SEQ ID NO: 461740 - RNA, 23 nt, Human
ggcugugccaagugugcccaggg

SEQ ID NO: 461741 - RNA, 23 nt, Human
ggcugugccagcggcuccgcagg

SEQ ID NO: 461742 - RNA, 27 nt, Human
ggcugugccaggacagagcccugcugg

SEQ ID NO: 461743 - RNA, 22 nt, Human
ggcugugccaguggcguguagg

SEQ ID NO: 461744 - RNA, 32 nt, Human
ggcugugccauagccacacaggaagcugccuu

SEQ ID NO: 461745 - RNA, 21 nt, Human
ggcugugcccagagccccagg

SEQ ID NO: 461746 - RNA, 23 nt, Human
ggcugugcccagccagcccuggg

SEQ ID NO: 461747 - RNA, 24 nt, Human
ggcugugcccccuaugcccugugg

SEQ ID NO: 461748 - RNA, 26 nt, Human
ggcugugccccugaugcagccugugg

SEQ ID NO: 461749 - RNA, 21 nt, Human
ggcugugcccuggcuccgugg

SEQ ID NO: 461750 - RNA, 27 nt, Human
ggcugugccucuagucgcagcucugug

SEQ ID NO: 461751 - RNA, 32 nt, Human
ggcugugccugggaguggcuucagcccaggcg

SEQ ID NO: 461752 - RNA, 22 nt, Human
ggcugugcgcagcagccccagg

SEQ ID NO: 461753 - RNA, 32 nt, Human
ggcugugcggagcuggugcugccugaaacccc

SEQ ID NO: 461754 - RNA, 32 nt, Human
ggcugugcggccgcgcugccuccaggaagccu

SEQ ID NO: 461755 - RNA, 23 nt, Human
ggcugugcuagauuuucccaugg

SEQ ID NO: 461756 - RNA, 32 nt, Human
ggcugugcugagagcacuggccucugcacuca

SEQ ID NO: 461757 - RNA, 21 nt, Human
ggcugugcuggagcccggugg

SEQ ID NO: 461758 - RNA, 32 nt, Human
ggcugugcuggcacagaccugagaauggggac

SEQ ID NO: 461759 - RNA, 32 nt, Human
ggcugugcuggcugcacuggcccugcggcggg

SEQ ID NO: 461760 - RNA, 32 nt, Human
ggcugugcuguugccaacaguaaaccugcucu

SEQ ID NO: 461761 - RNA, 32 nt, Human
ggcugugcuuguucuuaaccucaggcucuguc

SEQ ID NO: 461762 - RNA, 32 nt, Human
ggcuguggaaguaccugucauuccugcaggag

SEQ ID NO: 461763 - RNA, 32 nt, Human
ggcuguggacacugucuugaggauguggacuu

SEQ ID NO: 461764 - RNA, 32 nt, Human
ggcuguggacuucacccaggaggagugggguc

SEQ ID NO: 461765 - RNA, 24 nt, Human
ggcuguggaggggaccaccugcca

SEQ ID NO: 461766 - RNA, 32 nt, Human
ggcuguggagguggagaacguugggccacgcu

SEQ ID NO: 461767 - RNA, 32 nt, Human
ggcuguggaugagagacauagacgagagagug

SEQ ID NO: 461768 - RNA, 24 nt, Human
ggcuguggaugucuucagccucug

SEQ ID NO: 461769 - RNA, 32 nt, Human
ggcuguggcacagggcagcgacaacuugggac

SEQ ID NO: 461770 - RNA, 32 nt, Human
ggcuguggccaggccagcugggcucggggagc

SEQ ID NO: 461771 - RNA, 20 nt, Human
ggcuguggccaggcucaggc

SEQ ID NO: 461772 - RNA, 32 nt, Human
ggcuguggcccaggcacuaccugcuggcuccc

SEQ ID NO: 461773 - RNA, 32 nt, Human
ggcuguggccgagaagaugcuccaguaccggc

SEQ ID NO: 461774 - RNA, 32 nt, Human
ggcuguggccgucaguggaaugcagcugucag

SEQ ID NO: 461775 - RNA, 20 nt, Human
ggcuguggcggcggcgggag

SEQ ID NO: 461776 - RNA, 32 nt, Human
ggcuguggcucuccaaggccccucucuuccau

SEQ ID NO: 461777 - RNA, 32 nt, Human
ggcuguggcugaagcuggcggaucgcuugagg

SEQ ID NO: 461778 - RNA, 23 nt, Human
ggcuguggcuguuccacgcggcc

SEQ ID NO: 461779 - RNA, 22 nt, Human
ggcuguggcuucagccgugguc

SEQ ID NO: 461780 - RNA, 32 nt, Human
ggcuguggcuucugacacucaggucauagccu

SEQ ID NO: 461781 - RNA, 32 nt, Human
ggcugugggagaguugaccguauucugggcaa

SEQ ID NO: 461782 - RNA, 32 nt, Human
ggcugugggagcagcaguggucaugguggguc

SEQ ID NO: 461783 - RNA, 32 nt, Human
ggcugugggaggagggaggaaagaugaaaaac

SEQ ID NO: 461784 - RNA, 32 nt, Human
ggcugugggaggcagcggagcaggcgaugaag

SEQ ID NO: 461785 - RNA, 25 nt, Human
ggcugugggcaaguuccugaccaca

SEQ ID NO: 461786 - RNA, 32 nt, Human
ggcugugggcaggagccagggguccugucuga

SEQ ID NO: 461787 - RNA, 32 nt, Human
ggcugugggcuggguggccccauccuaccagg

SEQ ID NO: 461788 - RNA, 32 nt, Human
ggcuguggggaccccaggugggccuggcagga

SEQ ID NO: 461789 - RNA, 32 nt, Human
ggcuguggggaccugucagagucuggggacuc

SEQ ID NO: 461790 - RNA, 32 nt, Human
ggcuguggggccagaagcugggccaagcccuc

SEQ ID NO: 461791 - RNA, 32 nt, Human
ggcuguggggcugaguggcaucauggcggcuc

SEQ ID NO: 461792 - RNA, 32 nt, Human
ggcugugggggcaucuguccugagcuuggcug

SEQ ID NO: 461793 - RNA, 32 nt, Human
ggcuguggguggcucaugucaccaucuggaag

SEQ ID NO: 461794 - RNA, 32 nt, Human
ggcugugguacaacaugguccuuggugaagac

SEQ ID NO: 461795 - RNA, 32 nt, Human
ggcuguggugcauggcuguggagcucagggug

SEQ ID NO: 461796 - RNA, 32 nt, Human
ggcuguggugugaaagguggccagccugguuc

SEQ ID NO: 461797 - RNA, 32 nt, Human
ggcugugguguuuggcaaugcuaauucaaugc

SEQ ID NO: 461798 - RNA, 32 nt, Human
ggcuguguacaugugugugcccaggggugagu

SEQ ID NO: 461799 - RNA, 32 nt, Human
ggcuguguccacaugagcuaccaccuugcguu

SEQ ID NO: 461800 - RNA, 32 nt, Human
ggcuguguccccaccaaauugaauuguguuaa

SEQ ID NO: 461801 - RNA, 20 nt, Human
ggcuguguccuuggcuccag

SEQ ID NO: 461802 - RNA, 32 nt, Human
ggcuguguccuuuccaugauucugcccaggau

SEQ ID NO: 461803 - RNA, 32 nt, Human
ggcugugucucuucacucuguuucuggggcug

SEQ ID NO: 461804 - RNA, 19 nt, Human
ggcugugucucuuuauuua

SEQ ID NO: 461805 - RNA, 21 nt, Human
ggcugugugaccccagccucc

SEQ ID NO: 461806 - RNA, 22 nt, Human
ggcugugugagacgcagggaag

SEQ ID NO: 461807 - RNA, 32 nt, Human
ggcugugugcaggagugugagugagcaagagc

SEQ ID NO: 461808 - RNA, 32 nt, Human
ggcugugugcaggcaagcaggcauaggccaag

SEQ ID NO: 461809 - RNA, 32 nt, Human
ggcugugugcaggcugcaggauaucuggguau

SEQ ID NO: 461810 - RNA, 32 nt, Human
ggcugugugcccucucugccuuccucugacua

SEQ ID NO: 461811 - RNA, 19 nt, Human
ggcugugugccuuuucuca

SEQ ID NO: 461812 - RNA, 32 nt, Human
ggcuguguggagccaccacuccuagccacagc

SEQ ID NO: 461813 - RNA, 32 nt, Human
ggcuguguggggagguggguggagaggugagc

SEQ ID NO: 461814 - RNA, 32 nt, Human
ggcugugugucaguguuugcugggcuuguggc

SEQ ID NO: 461815 - RNA, 32 nt, Human
ggcugugugugccuguguguaggucccacggc

SEQ ID NO: 461816 - RNA, 32 nt, Human
ggcuguguuccuucuggaggcuccagggcagg

SEQ ID NO: 461817 - RNA, 32 nt, Human
ggcuguguucucugaucuaggccuucccagag

SEQ ID NO: 461818 - RNA, 32 nt, Human
ggcuguguugcccaggcuggagugcaguagcu

SEQ ID NO: 461819 - RNA, 32 nt, Human
ggcuguguuggggcauggugagagagggucuu

SEQ ID NO: 461820 - RNA, 20 nt, Human
ggcuguguugucagcacugu

SEQ ID NO: 461821 - RNA, 22 nt, Human
ggcuguguuucucaccgcgguc

SEQ ID NO: 461822 - RNA, 32 nt, Human
ggcuguuaaaaagggaguugauuugaggaagu

SEQ ID NO: 461823 - RNA, 32 nt, Human
ggcuguuauaaauaaagcuguuaugaacauuu

SEQ ID NO: 461824 - RNA, 32 nt, Human
ggcuguuauggugauggauggauguggauuug

SEQ ID NO: 461825 - RNA, 32 nt, Human
ggcuguucacaggaacccacaggccaccggcu

SEQ ID NO: 461826 - RNA, 32 nt, Human
ggcuguucacuuacuaagcaccuacugugugc

SEQ ID NO: 461827 - RNA, 26 nt, Human
ggcuguuccgcuuagaaugcaauggg

SEQ ID NO: 461828 - RNA, 32 nt, Human
ggcuguucuaaaacuccugaacucagguaauc

SEQ ID NO: 461829 - RNA, 32 nt, Human
ggcuguucucaaacuccuggccucaggcgauc

SEQ ID NO: 461830 - RNA, 32 nt, Human
ggcuguucuccaccacgccaaacuccgggccc

SEQ ID NO: 461831 - RNA, 32 nt, Human
ggcuguucuccccucacugcugagucucccag

SEQ ID NO: 461832 - RNA, 32 nt, Human
ggcuguucucgaacuccugaccucaggugauc

SEQ ID NO: 461833 - RNA, 32 nt, Human
ggcuguucucuugagcagcguucauuuaucuc

SEQ ID NO: 461834 - RNA, 32 nt, Human
ggcuguucugcagcaccgcagggaagggagga

SEQ ID NO: 461835 - RNA, 32 nt, Human
ggcuguucuucaacuccugggcucaagcaguc

SEQ ID NO: 461836 - RNA, 32 nt, Human
ggcuguugagccuggauggguggaggcuuagg

SEQ ID NO: 461837 - RNA, 32 nt, Human
ggcuguugcccgguguuucagcacuuucaguu

SEQ ID NO: 461838 - RNA, 32 nt, Human
ggcuguugcgaucacagaaggugguggagugu

SEQ ID NO: 461839 - RNA, 32 nt, Human
ggcuguuggcauuuugggaggcugaggcaggu

SEQ ID NO: 461840 - RNA, 19 nt, Human
ggcuguuggguuucgcuca

SEQ ID NO: 461841 - RNA, 20 nt, Human
ggcuguugugcuucauggcc

SEQ ID NO: 461842 - RNA, 32 nt, Human
ggcuguuuaagcugccaauuguagcacucagc

SEQ ID NO: 461843 - RNA, 32 nt, Human
ggcuguuuacacaccacuuuccugccuccucu

SEQ ID NO: 461844 - RNA, 32 nt, Human
ggcuguuuagaaaacugcugcccaaauuuauu

SEQ ID NO: 461845 - RNA, 32 nt, Human
ggcuguuucccaggcugaagugcaguggcaug

SEQ ID NO: 461846 - RNA, 32 nt, Human
ggcuguuucggugucaggagacaaagcuggca

SEQ ID NO: 461847 - RNA, 32 nt, Human
ggcuguuucucuaggcuggaugcugucaggaa

SEQ ID NO: 461848 - RNA, 18 nt, Human
ggcuguuucuuccaauua

SEQ ID NO: 461849 - RNA, 32 nt, Human
ggcuguuugcccaggaacuuaggguggguacc

SEQ ID NO: 461850 - RNA, 32 nt, Human
ggcuguuuggcuuaggagaugcuguaguagua

SEQ ID NO: 461851 - RNA, 32 nt, Human
ggcuguuuguguccuugggcgcugcuuggaga

SEQ ID NO: 461852 - RNA, 32 nt, Human
ggcuguuuuaccugggcuucugaccaaccagc

SEQ ID NO: 461853 - RNA, 19 nt, Human
ggcuguuuucacaaaugac

SEQ ID NO: 461854 - RNA, 21 nt, Human
ggcuguuuucccucugcugcu

SEQ ID NO: 461855 - RNA, 32 nt, Human
ggcuguuuucccucugcugcuuuuggggaaug

SEQ ID NO: 461856 - RNA, 32 nt, Human
ggcuguuuugugaauaaaacgaaugcauguuu

SEQ ID NO: 461857 - RNA, 32 nt, Human
ggcuguuuuuccuuguugccccgcucuagacu

SEQ ID NO: 461858 - RNA, 19 nt, Human
ggcuuaaagguuggccagg

SEQ ID NO: 461859 - RNA, 32 nt, Human
ggcuuaaagguuggccagggauggaguaaacc

SEQ ID NO: 461860 - RNA, 32 nt, Human
ggcuuaaaucuguguaaagaaaaucugucuuu

SEQ ID NO: 461861 - RNA, 18 nt, Human
ggcuuaacccuccucaca

SEQ ID NO: 461862 - RNA, 32 nt, Human
ggcuuaacucacagguuucccaucagcuuucu

SEQ ID NO: 461863 - RNA, 32 nt, Human
ggcuuaagcuguuccuuggauacuuuugguaa

SEQ ID NO: 461864 - RNA, 32 nt, Human
ggcuuaaggagaggagaaacugagaaaugaau

SEQ ID NO: 461865 - RNA, 32 nt, Human
ggcuuaagggaguggguucauuaccuucuauc

SEQ ID NO: 461866 - RNA, 17 nt, Human
ggcuuaaggucagagga

SEQ ID NO: 461867 - RNA, 24 nt, Human
ggcuuaagugacccucccaccuca

SEQ ID NO: 461868 - RNA, 24 nt, Human
ggcuuaagugauccucccaccuca

SEQ ID NO: 461869 - RNA, 25 nt, Human
ggcuuaagugauuucuccugucuca

SEQ ID NO: 461870 - RNA, 32 nt, Human
ggcuuaaguucaguccuccugcccuggagcug

SEQ ID NO: 461871 - RNA, 32 nt, Human
ggcuuaaucuuaaaauugguggucauuucaau

SEQ ID NO: 461872 - RNA, 21 nt, Human
ggcuuaauucggggaagaaga

SEQ ID NO: 461873 - RNA, 32 nt, Human
ggcuuacaccaguaaucccagcacuuugggag

SEQ ID NO: 461874 - RNA, 32 nt, Human
ggcuuacaccuguaaccccagcacuuugggag

SEQ ID NO: 461875 - RNA, 21 nt, Human
ggcuuacaccuguaagcccag

SEQ ID NO: 461876 - RNA, 32 nt, Human
ggcuuacaccuguaagcccagcacuuugggag

SEQ ID NO: 461877 - RNA, 32 nt, Human
ggcuuacaccuguaaucccaacacuuugcgag

SEQ ID NO: 461878 - RNA, 32 nt, Human
ggcuuacaccuguaaucccaacacuuugggaa

SEQ ID NO: 461879 - RNA, 32 nt, Human
ggcuuacaccuguaaucccaaugcuuugggag

SEQ ID NO: 461880 - RNA, 32 nt, Human
ggcuuacaccuguaaucccagcacuuugggag

SEQ ID NO: 461881 - RNA, 32 nt, Human
ggcuuacaccuguaaucccagcuacucaggag

SEQ ID NO: 461882 - RNA, 32 nt, Human
ggcuuacaccuguaaucccaguacuuugggag

SEQ ID NO: 461883 - RNA, 32 nt, Human
ggcuuacaccuguaauccuaguacuuugggag

SEQ ID NO: 461884 - RNA, 32 nt, Human
ggcuuacaccuguaaucgcagcauuuugggag

SEQ ID NO: 461885 - RNA, 32 nt, Human
ggcuuacaccuguaauuccagcacuuugggac

SEQ ID NO: 461886 - RNA, 32 nt, Human
ggcuuacaccugugaucccagcacuuugggag

SEQ ID NO: 461887 - RNA, 30 nt, Human
ggcuuacacggugaaacccacgucucuacu

SEQ ID NO: 461888 - RNA, 32 nt, Human
ggcuuacaggcacccaccaccaugcccggcua

SEQ ID NO: 461889 - RNA, 32 nt, Human
ggcuuacaucuguaaucccagcacuuugggag

SEQ ID NO: 461890 - RNA, 32 nt, Human
ggcuuacauggugaaaccccaucucuacuaaa

SEQ ID NO: 461891 - RNA, 21 nt, Human
ggcuuacauuuucucugugga

SEQ ID NO: 461892 - RNA, 23 nt, Human
ggcuuacccagcacgggcucccu

SEQ ID NO: 461893 - RNA, 32 nt, Human
ggcuuacccagccucuucgucugcccugcuuu

SEQ ID NO: 461894 - RNA, 32 nt, Human
ggcuuaccccucucuaggguugcaguugcuuu

SEQ ID NO: 461895 - RNA, 24 nt, Human
ggcuuaccugacagccagccugcc

SEQ ID NO: 461896 - RNA, 32 nt, Human
ggcuuacgccuauaaucccagcacuuugggag

SEQ ID NO: 461897 - RNA, 32 nt, Human
ggcuuacgccuauaaucccagcuacucaggag

SEQ ID NO: 461898 - RNA, 32 nt, Human
ggcuuacgccuguaaucccaauacuuugggag

SEQ ID NO: 461899 - RNA, 32 nt, Human
ggcuuacgccuguaaucccagcacuuugggac

SEQ ID NO: 461900 - RNA, 32 nt, Human
ggcuuacgccuguaaucccagcacuuugggag

SEQ ID NO: 461901 - RNA, 32 nt, Human
ggcuuacgccuguaaucccagcgcuuugggag

SEQ ID NO: 461902 - RNA, 32 nt, Human
ggcuuacgccuguaaucccaggacuuugggag

SEQ ID NO: 461903 - RNA, 32 nt, Human
ggcuuacgccuguaauccuagcacuuugggag

SEQ ID NO: 461904 - RNA, 32 nt, Human
ggcuuacgccuguaauuccagcacuuugggag

SEQ ID NO: 461905 - RNA, 32 nt, Human
ggcuuacgcuuguagucccagcacuuugggag

SEQ ID NO: 461906 - RNA, 24 nt, Human
ggcuuacuacaaccuccgccuccu

SEQ ID NO: 461907 - RNA, 32 nt, Human
ggcuuacuacaaccuccgccuccuggguucaa

SEQ ID NO: 461908 - RNA, 32 nt, Human
ggcuuacuacagccuccaccuucagguucaag

SEQ ID NO: 461909 - RNA, 32 nt, Human
ggcuuacuacgaccucugccuccuggguucaa

SEQ ID NO: 461910 - RNA, 32 nt, Human
ggcuuacucagagauuugauugcucaacaugc

SEQ ID NO: 461911 - RNA, 23 nt, Human
ggcuuacuccaaccucugccucc

SEQ ID NO: 461912 - RNA, 32 nt, Human
ggcuuacugaaaccucugccucccagguucaa

SEQ ID NO: 461913 - RNA, 32 nt, Human
ggcuuacugagcaguggguugcaggaggagga

SEQ ID NO: 461914 - RNA, 23 nt, Human
ggcuuacugcaaccuccaccucc

SEQ ID NO: 461915 - RNA, 32 nt, Human
ggcuuacugcaaccuccaccucccaggugcaa

SEQ ID NO: 461916 - RNA, 32 nt, Human
ggcuuacugcaaccuccaccucccagguucaa

SEQ ID NO: 461917 - RNA, 32 nt, Human
ggcuuacugcaaccuccaccucccggguucaa

SEQ ID NO: 461918 - RNA, 24 nt, Human
ggcuuacugcaaccuccaccuccu

SEQ ID NO: 461919 - RNA, 32 nt, Human
ggcuuacugcaaccuccaccuccuggguucaa

SEQ ID NO: 461920 - RNA, 32 nt, Human
ggcuuacugcaaccuccgccuacuggguucaa

SEQ ID NO: 461921 - RNA, 23 nt, Human
ggcuuacugcaaccuccgccucc

SEQ ID NO: 461922 - RNA, 32 nt, Human
ggcuuacugcaaccuccgccucccagguucaa

SEQ ID NO: 461923 - RNA, 24 nt, Human
ggcuuacugcaaccuccgccuccu

SEQ ID NO: 461924 - RNA, 32 nt, Human
ggcuuacugcaaccuccgccuccuggguucaa

SEQ ID NO: 461925 - RNA, 32 nt, Human
ggcuuacugcaaccuccgccuucccagauuca

SEQ ID NO: 461926 - RNA, 32 nt, Human
ggcuuacugcaaccucugccucccagguuuaa

SEQ ID NO: 461927 - RNA, 32 nt, Human
ggcuuacugcaaccuuugccucccagguuuaa

SEQ ID NO: 461928 - RNA, 32 nt, Human
ggcuuacugcaacuuccagcuccuggguucga

SEQ ID NO: 461929 - RNA, 32 nt, Human
ggcuuacugcaacuuccgacucccagguucaa

SEQ ID NO: 461930 - RNA, 32 nt, Human
ggcuuacugcaagcuccgccucccagguucau

SEQ ID NO: 461931 - RNA, 32 nt, Human
ggcuuacugcaagcucugccuccuggguucaa

SEQ ID NO: 461932 - RNA, 32 nt, Human
ggcuuacugcagccuugaucucccaggcucaa

SEQ ID NO: 461933 - RNA, 32 nt, Human
ggcuuacugcagccuuugccuccccggcucga

SEQ ID NO: 461934 - RNA, 32 nt, Human
ggcuuacugugacauccgccuccuggguucaa

SEQ ID NO: 461935 - RNA, 32 nt, Human
ggcuuacuuccuccuguccucgguguuacuug

SEQ ID NO: 461936 - RNA, 32 nt, Human
ggcuuacuuccuggucuacuugaggcugcaau

SEQ ID NO: 461937 - RNA, 32 nt, Human
ggcuuagaggcucaccuacucuaacaggaccu

SEQ ID NO: 461938 - RNA, 19 nt, Human
ggcuuagagggcagagugg

SEQ ID NO: 461939 - RNA, 32 nt, Human
ggcuuagaggggcuggcucucaguccccgccu

SEQ ID NO: 461940 - RNA, 32 nt, Human
ggcuuagagugguaccugcuugcucaagcaac

SEQ ID NO: 461941 - RNA, 32 nt, Human
ggcuuagccaugaccucacagagcugagauga

SEQ ID NO: 461942 - RNA, 32 nt, Human
ggcuuagccggaggaagcacauuuugaaccug

SEQ ID NO: 461943 - RNA, 18 nt, Human
ggcuuagcuuggguucag

SEQ ID NO: 461944 - RNA, 24 nt, Human
ggcuuaggauaucccagccuacca

SEQ ID NO: 461945 - RNA, 32 nt, Human
ggcuuaggggcaacaguguguucaagaggacu

SEQ ID NO: 461946 - RNA, 32 nt, Human
ggcuuagggggugguuauguacuucacaagcc

SEQ ID NO: 461947 - RNA, 32 nt, Human
ggcuuaggucuggacuggucagcuguggcacc

SEQ ID NO: 461948 - RNA, 24 nt, Human
ggcuuaggugaccccccaaccuca

SEQ ID NO: 461949 - RNA, 32 nt, Human
ggcuuaggugagaucgugaggguggggcucgc

SEQ ID NO: 461950 - RNA, 17 nt, Human
ggcuuaguccagagugg

SEQ ID NO: 461951 - RNA, 32 nt, Human
ggcuuaguccagucugugcuccugggcuacaa

SEQ ID NO: 461952 - RNA, 32 nt, Human
ggcuuagugauggguaaauggaagacugguug

SEQ ID NO: 461953 - RNA, 32 nt, Human
ggcuuagugcagagcagccaauggguacugag

SEQ ID NO: 461954 - RNA, 19 nt, Human
ggcuuaguucccugaggca

SEQ ID NO: 461955 - RNA, 32 nt, Human
ggcuuauaaaguguuuggucacaguaagacaa

SEQ ID NO: 461956 - RNA, 20 nt, Human
ggcuuauaaguugcuuuuug

SEQ ID NO: 461957 - RNA, 32 nt, Human
ggcuuauccuuaaagaucaucucccauccucc

SEQ ID NO: 461958 - RNA, 32 nt, Human
ggcuuaucuggaacuccugggcucaagaggga

SEQ ID NO: 461959 - RNA, 32 nt, Human
ggcuuaugaguuuccaggugguuaucacugga

SEQ ID NO: 461960 - RNA, 19 nt, Human
ggcuuaugcccaggucuag

SEQ ID NO: 461961 - RNA, 32 nt, Human
ggcuuaugccuauaauccuagcacuuugggag

SEQ ID NO: 461962 - RNA, 32 nt, Human
ggcuuaugccuauaauuccagcacuuggggag

SEQ ID NO: 461963 - RNA, 32 nt, Human
ggcuuaugccuguaaucccacuuugggaggcc

SEQ ID NO: 461964 - RNA, 32 nt, Human
ggcuuaugccuguaaucccagcacucugggag

SEQ ID NO: 461965 - RNA, 32 nt, Human
ggcuuaugccuguaaucccagcacuuggggaa

SEQ ID NO: 461966 - RNA, 32 nt, Human
ggcuuaugccuguaaucccagcacuuugcagg

SEQ ID NO: 461967 - RNA, 32 nt, Human
ggcuuaugccuguaaucccagcacuuuggaag

SEQ ID NO: 461968 - RNA, 32 nt, Human
ggcuuaugccuguaaucccagcacuuugggag

SEQ ID NO: 461969 - RNA, 32 nt, Human
ggcuuaugccuguaaucccagcacuuugggug

SEQ ID NO: 461970 - RNA, 32 nt, Human
ggcuuaugccuguaaucccagcaugcugggag

SEQ ID NO: 461971 - RNA, 32 nt, Human
ggcuuaugccuguaaucccgguacuuugggag

SEQ ID NO: 461972 - RNA, 32 nt, Human
ggcuuaugccuguaaucccugcacuuugggaa

SEQ ID NO: 461973 - RNA, 19 nt, Human
gggaggagaugaaggauga

SEQ ID NO: 461974 - RNA, 19 nt, Human
gggaggagaugggaaggga

SEQ ID NO: 461975 - RNA, 16 nt, Human
gggaggagaugggagg

SEQ ID NO: 461976 - RNA, 19 nt, Human
gggaggagcagcccgggga

SEQ ID NO: 461977 - RNA, 19 nt, Human
gggaggagcagcgggaaga

SEQ ID NO: 461978 - RNA, 19 nt, Human
gggaggagcaggcaggaga

SEQ ID NO: 461979 - RNA, 18 nt, Human
gggaggagcaggcuagga

SEQ ID NO: 461980 - RNA, 18 nt, Human
gggaggagcaggcugaga

SEQ ID NO: 461981 - RNA, 31 nt, Human
gggaggagcaucaugaguaggagggaggcag

SEQ ID NO: 461982 - RNA, 20 nt, Human
gggaggagcccgccgggagg

SEQ ID NO: 461983 - RNA, 19 nt, Human
gggaggagcccgggggaga

SEQ ID NO: 461984 - RNA, 21 nt, Human
gggaggagccgcagccggagg

SEQ ID NO: 461985 - RNA, 32 nt, Human
gggaggagcgacaccuccaggcuuccgggagc

SEQ ID NO: 461986 - RNA, 19 nt, Human
gggaggagcgccggggagg

SEQ ID NO: 461987 - RNA, 18 nt, Human
gggaggagcggagguaga

SEQ ID NO: 461988 - RNA, 19 nt, Human
gggaggagcucuagggagg

SEQ ID NO: 461989 - RNA, 18 nt, Human
gggaggagcugaggggga

SEQ ID NO: 461990 - RNA, 32 nt, Human
gggaggagcugcagggagcugguggcggggca

SEQ ID NO: 461991 - RNA, 20 nt, Human
gggaggagcugguagggaga

SEQ ID NO: 461992 - RNA, 32 nt, Human
gggaggaggaacauucagguuucugagagcug

SEQ ID NO: 461993 - RNA, 32 nt, Human
gggaggaggaagaagagaaggaagaggagagg

SEQ ID NO: 461994 - RNA, 32 nt, Human
gggaggaggaagaggagaauaaggaggagcag

SEQ ID NO: 461995 - RNA, 32 nt, Human
gggaggaggaagaggagaggaggaagcaaaga

SEQ ID NO: 461996 - RNA, 18 nt, Human
gggaggaggaccgggaga

SEQ ID NO: 461997 - RNA, 20 nt, Human
gggaggaggacgcugaggag

SEQ ID NO: 461998 - RNA, 18 nt, Human
gggaggaggacuuggagg

SEQ ID NO: 461999 - RNA, 32 nt, Human
gggaggaggagaaagguggaggagaagggagg

SEQ ID NO: 462000 - RNA, 32 nt, Human
gggaggaggagaaggaggaggaggagagcgcg

SEQ ID NO: 462001 - RNA, 32 nt, Human
gggaggaggagagaugggugaagacaaaagag

SEQ ID NO: 462002 - RNA, 32 nt, Human
gggaggaggaggaggaagaagagcggagagag

SEQ ID NO: 462003 - RNA, 32 nt, Human
gggaggaggaggaggaagagguauggcauggg

SEQ ID NO: 462004 - RNA, 32 nt, Human
gggaggaggaggaggagaagguggagaggaag

SEQ ID NO: 462005 - RNA, 32 nt, Human
gggaggaggaggaggaggaagaggaggagaag

SEQ ID NO: 462006 - RNA, 32 nt, Human
gggaggaggaggaggaggagaggagcagucag

SEQ ID NO: 462007 - RNA, 32 nt, Human
gggaggaggaggaggaggaggaggucguggau

SEQ ID NO: 462008 - RNA, 32 nt, Human
gggaggaggaggaggagguugcagugagccga

SEQ ID NO: 462009 - RNA, 32 nt, Human
gggaggaggaggaggaucaugaaggccggagu

SEQ ID NO: 462010 - RNA, 32 nt, Human
gggaggaggaggcggaggaggcggaggaggag

SEQ ID NO: 462011 - RNA, 32 nt, Human
gggaggaggaggcggcagcggcggaggaaggc

SEQ ID NO: 462012 - RNA, 32 nt, Human
gggaggaggaggcggcggcggcgaagggaggc

SEQ ID NO: 462013 - RNA, 23 nt, Human
gggaggaggcaaggagggggaga

SEQ ID NO: 462014 - RNA, 20 nt, Human
gggaggaggcacggccgagg

SEQ ID NO: 462015 - RNA, 22 nt, Human
gggaggaggcacuucuggggga

SEQ ID NO: 462016 - RNA, 32 nt, Human
gggaggaggcagcagacacuggagaugacauu

SEQ ID NO: 462017 - RNA, 18 nt, Human
gggaggaggcagcugcgg

SEQ ID NO: 462018 - RNA, 20 nt, Human
gggaggaggcaggccagagg

SEQ ID NO: 462019 - RNA, 19 nt, Human
gggaggaggcagugggagg

SEQ ID NO: 462020 - RNA, 32 nt, Human
gggaggaggcagugggagggcggagggcgggg

SEQ ID NO: 462021 - RNA, 18 nt, Human
gggaggaggcaugagagg

SEQ ID NO: 462022 - RNA, 16 nt, Human
gggaggaggccgggag

SEQ ID NO: 462023 - RNA, 17 nt, Human
gggaggaggccugugga

SEQ ID NO: 462024 - RNA, 19 nt, Human
gggaggaggccuuggaaga

SEQ ID NO: 462025 - RNA, 21 nt, Human
gggaggaggcgaaggaggagg

SEQ ID NO: 462026 - RNA, 18 nt, Human
gggaggaggcgcggcugg

SEQ ID NO: 462027 - RNA, 18 nt, Human
gggaggaggcgcuccaga

SEQ ID NO: 462028 - RNA, 18 nt, Human
gggaggaggcggaggcag

SEQ ID NO: 462029 - RNA, 17 nt, Human
gggaggaggcggccgag

SEQ ID NO: 462030 - RNA, 18 nt, Human
gggaggaggcggcggcga

SEQ ID NO: 462031 - RNA, 18 nt, Human
gggaggaggcggcggcgg

SEQ ID NO: 462032 - RNA, 18 nt, Human
gggaggaggcggcugaga

SEQ ID NO: 462033 - RNA, 16 nt, Human
gggaggaggcgggaga

SEQ ID NO: 462034 - RNA, 20 nt, Human
gggaggaggcggugcggcga

SEQ ID NO: 462035 - RNA, 19 nt, Human
gggaggaggcugccggagg

SEQ ID NO: 462036 - RNA, 16 nt, Human
gggaggaggcugggga

SEQ ID NO: 462037 - RNA, 20 nt, Human
gggaggaggcugugaugaga

SEQ ID NO: 462038 - RNA, 18 nt, Human
gggaggagggacgggagg

SEQ ID NO: 462039 - RNA, 19 nt, Human
gggaggagggagagggagg

SEQ ID NO: 462040 - RNA, 32 nt, Human
gggaggagggagagggaggucacuggaaaggg

SEQ ID NO: 462041 - RNA, 32 nt, Human
gggaggagggagcccugaaaagagguacuaag

SEQ ID NO: 462042 - RNA, 18 nt, Human
gggaggagggagcggaga

SEQ ID NO: 462043 - RNA, 19 nt, Human
gggaggagggaggaggaga

SEQ ID NO: 462044 - RNA, 23 nt, Human
gggaggagggaggaggagacaga

SEQ ID NO: 462045 - RNA, 17 nt, Human
gggaggagggagggagg

SEQ ID NO: 462046 - RNA, 17 nt, Human
gggaggagggaggggga

SEQ ID NO: 462047 - RNA, 32 nt, Human
gggaggagggagggggaaguggagaggggagc

SEQ ID NO: 462048 - RNA, 32 nt, Human
gggaggagggagugacgagucaaggaggagac

SEQ ID NO: 462049 - RNA, 19 nt, Human
gggaggagggaguggaagg

SEQ ID NO: 462050 - RNA, 20 nt, Human
gggaggagggaguggagaga

SEQ ID NO: 462051 - RNA, 19 nt, Human
gggaggagggaguggggga

SEQ ID NO: 462052 - RNA, 18 nt, Human
gggaggagggcaggcaga

SEQ ID NO: 462053 - RNA, 32 nt, Human
gggaggagggcaggcgguaggaagggagaggg

SEQ ID NO: 462054 - RNA, 17 nt, Human
gggaggagggccagaga

SEQ ID NO: 462055 - RNA, 18 nt, Human
gggaggagggcgaagagg

SEQ ID NO: 462056 - RNA, 20 nt, Human
gggaggagggcgccuaggag

SEQ ID NO: 462057 - RNA, 18 nt, Human
gggaggagggcggggagg

SEQ ID NO: 462058 - RNA, 20 nt, Human
gggaggagggcggggggagg

SEQ ID NO: 462059 - RNA, 20 nt, Human
gggaggagggcggugggagg

SEQ ID NO: 462060 - RNA, 17 nt, Human
gggaggaggggaaggag

SEQ ID NO: 462061 - RNA, 17 nt, Human
gggaggaggggaggaga

SEQ ID NO: 462062 - RNA, 18 nt, Human
gggaggaggggagggagg

SEQ ID NO: 462063 - RNA, 17 nt, Human
gggaggaggggcagaga

SEQ ID NO: 462064 - RNA, 32 nt, Human
gggaggaggggccagguggacaggaggcccug

SEQ ID NO: 462065 - RNA, 19 nt, Human
gggaggaggggcucaagga

SEQ ID NO: 462066 - RNA, 19 nt, Human
gggaggaggggcugaggag

SEQ ID NO: 462067 - RNA, 32 nt, Human
gggaggaggggcugcccggaguuggguccuug

SEQ ID NO: 462068 - RNA, 18 nt, Human
gggaggaggggcugggga

SEQ ID NO: 462069 - RNA, 18 nt, Human
gggaggagggggaggagg

SEQ ID NO: 462070 - RNA, 19 nt, Human
gggaggagggggaggguga

SEQ ID NO: 462071 - RNA, 32 nt, Human
gggaggagggggcaucuucugacagccugccu

SEQ ID NO: 462072 - RNA, 19 nt, Human
gggaggagggggcugagga

SEQ ID NO: 462073 - RNA, 18 nt, Human
gggaggaggggggaggga

SEQ ID NO: 462074 - RNA, 18 nt, Human
gggaggaggggguagagg

SEQ ID NO: 462075 - RNA, 18 nt, Human
gggaggaggguaggaaga

SEQ ID NO: 462076 - RNA, 19 nt, Human
gggaggagggucuguagga

SEQ ID NO: 462077 - RNA, 18 nt, Human
gggaggaggguggggaga

SEQ ID NO: 462078 - RNA, 19 nt, Human
gggaggaggucagaggaga

SEQ ID NO: 462079 - RNA, 20 nt, Human
gggaggaggucuguugguga

SEQ ID NO: 462080 - RNA, 20 nt, Human
gggaggaggugaggcuccgg

SEQ ID NO: 462081 - RNA, 20 nt, Human
gggaggaggugccggccgag

SEQ ID NO: 462082 - RNA, 20 nt, Human
gggaggaggugcuuucggga

SEQ ID NO: 462083 - RNA, 18 nt, Human
gggaggagguggaggaga

SEQ ID NO: 462084 - RNA, 19 nt, Human
gggaggagguggcauugga

SEQ ID NO: 462085 - RNA, 19 nt, Human
gggaggagguggcccagag

SEQ ID NO: 462086 - RNA, 20 nt, Human
gggaggagguggcgccggga

SEQ ID NO: 462087 - RNA, 19 nt, Human
gggaggagguggggcgagg

SEQ ID NO: 462088 - RNA, 17 nt, Human
gggaggaggugguagag

SEQ ID NO: 462089 - RNA, 18 nt, Human
gggaggagguguaggaga

SEQ ID NO: 462090 - RNA, 19 nt, Human
gggaggaggugugaggagg

SEQ ID NO: 462091 - RNA, 18 nt, Human
gggaggagucgggggcga

SEQ ID NO: 462092 - RNA, 17 nt, Human
gggaggagucgugggag

SEQ ID NO: 462093 - RNA, 18 nt, Human
gggaggaguuguggggga

SEQ ID NO: 462094 - RNA, 21 nt, Human
gggaggauaaguaggcuggga

SEQ ID NO: 462095 - RNA, 18 nt, Human
gggaggauaccugggaga

SEQ ID NO: 462096 - RNA, 31 nt, Human
gggaggaucaagcuuugaaccaaagccaauc

SEQ ID NO: 462097 - RNA, 22 nt, Human
gggaggaucacaugagcccagg

SEQ ID NO: 462098 - RNA, 20 nt, Human
gggaggaucaccugauguca

SEQ ID NO: 462099 - RNA, 22 nt, Human
gggaggaucacuugagcccagg

SEQ ID NO: 462100 - RNA, 20 nt, Human
gggaggaucacuugaggcca

SEQ ID NO: 462101 - RNA, 32 nt, Human
gggaggaucacuugaguccaggaggcggaggc

SEQ ID NO: 462102 - RNA, 32 nt, Human
gggaggaucacuugaguccaggaguuugagac

SEQ ID NO: 462103 - RNA, 32 nt, Human
gggaggaucauucugacgucggggcagccauu

SEQ ID NO: 462104 - RNA, 32 nt, Human
gggaggaucccuugaggccaggaguucggguc

SEQ ID NO: 462105 - RNA, 32 nt, Human
gggaggaucccuugaucccaggaauuugaggu

SEQ ID NO: 462106 - RNA, 22 nt, Human
gggaggaucgccagagcccagg

SEQ ID NO: 462107 - RNA, 20 nt, Human
gggaggaucgcuugagacca

SEQ ID NO: 462108 - RNA, 32 nt, Human
gggaggaucgcuugagaccagccuggggaaca

SEQ ID NO: 462109 - RNA, 22 nt, Human
gggaggaucgcuugagccaagg

SEQ ID NO: 462110 - RNA, 21 nt, Human
gggaggaucgcuugagcccag

SEQ ID NO: 462111 - RNA, 22 nt, Human
gggaggaucgcuugagcccagg

SEQ ID NO: 462112 - RNA, 24 nt, Human
gggaggaugauaagggaucccgga

SEQ ID NO: 462113 - RNA, 32 nt, Human
gggaggaugccuggcucaaccuccugcccuag

SEQ ID NO: 462114 - RNA, 32 nt, Human
gggaggauggaggcaggagcuggucuggggag

SEQ ID NO: 462115 - RNA, 32 nt, Human
gggaggaugggacuuagguaugccugcuagac

SEQ ID NO: 462116 - RNA, 31 nt, Human
gggaggauguacuuaucucagaugcuagagc

SEQ ID NO: 462117 - RNA, 20 nt, Human
gggaggauuacuugagacca

SEQ ID NO: 462118 - RNA, 22 nt, Human
gggaggauuacuugagcccagg

SEQ ID NO: 462119 - RNA, 32 nt, Human
gggaggauuccagaacagcagcacugagcucc

SEQ ID NO: 462120 - RNA, 32 nt, Human
gggaggauucgagggucacagagcaggcugac

SEQ ID NO: 462121 - RNA, 20 nt, Human
gggaggauugccugagacca

SEQ ID NO: 462122 - RNA, 32 nt, Human
gggaggauugccugagaccaggagguugaggc

SEQ ID NO: 462123 - RNA, 20 nt, Human
gggaggauugcuuaaggcca

SEQ ID NO: 462124 - RNA, 22 nt, Human
gggaggauugcuugaauccagg

SEQ ID NO: 462125 - RNA, 20 nt, Human
gggaggauugcuugagacca

SEQ ID NO: 462126 - RNA, 19 nt, Human
gggaggauugcuugagcca

SEQ ID NO: 462127 - RNA, 22 nt, Human
gggaggauugcuugagcccagg

SEQ ID NO: 462128 - RNA, 20 nt, Human
gggaggauugcuugaggcca

SEQ ID NO: 462129 - RNA, 22 nt, Human
gggaggauugcuugaggccagg

SEQ ID NO: 462130 - RNA, 22 nt, Human
gggaggauugcuugaguccagg

SEQ ID NO: 462131 - RNA, 32 nt, Human
gggaggauugcuugaguccaggaauuugagac

SEQ ID NO: 462132 - RNA, 32 nt, Human
gggaggauugcuugaguccaggagguugaggc

SEQ ID NO: 462133 - RNA, 32 nt, Human
gggaggauugcuugaguccaggaguucaaggc

SEQ ID NO: 462134 - RNA, 32 nt, Human
gggaggauuuggagcuuuuaagccaguuucag

SEQ ID NO: 462135 - RNA, 32 nt, Human
gggaggauuuuucuuuucucucugucuuuagg

SEQ ID NO: 462136 - RNA, 23 nt, Human
gggaggcaaaggcagguggauca

SEQ ID NO: 462137 - RNA, 23 nt, Human
gggaggcaacagacacgcuggag

SEQ ID NO: 462138 - RNA, 23 nt, Human
gggaggcaaccacacaguuugga

SEQ ID NO: 462139 - RNA, 21 nt, Human
gggaggcaaccgguuccagag

SEQ ID NO: 462140 - RNA, 32 nt, Human
gggaggcaagaguucaccauuaguccaagucu

SEQ ID NO: 462141 - RNA, 32 nt, Human
gggaggcacagcacuccugagaccuggaagcc

SEQ ID NO: 462142 - RNA, 32 nt, Human
gggaggcacaggacagaaggaauuggaagggg

SEQ ID NO: 462143 - RNA, 32 nt, Human
gggaggcacagguuccagugggccaagguugu

SEQ ID NO: 462144 - RNA, 32 nt, Human
gggaggcaccuguaaucccagcuacuugggag

SEQ ID NO: 462145 - RNA, 31 nt, Human
gggaggcacuagcaagagguuggagggccgg

SEQ ID NO: 462146 - RNA, 32 nt, Human
gggaggcacucccaucugcgcaccaggcugca

SEQ ID NO: 462147 - RNA, 20 nt, Human
gggaggcagaaaguccugga

SEQ ID NO: 462148 - RNA, 32 nt, Human
gggaggcagagaaggucccccgggaggagcgg

SEQ ID NO: 462149 - RNA, 32 nt, Human
gggaggcagagccaggccuccucaaguuggcc

SEQ ID NO: 462150 - RNA, 19 nt, Human
gggaggcagagcuggggga

SEQ ID NO: 462151 - RNA, 24 nt, Human
gggaggcagaggcaggagaaucau

SEQ ID NO: 462152 - RNA, 23 nt, Human
gggaggcagaggcgggcagauca

SEQ ID NO: 462153 - RNA, 23 nt, Human
gggaggcagaggcgggcggauca

SEQ ID NO: 462154 - RNA, 32 nt, Human
gggaggcagaggcugcacucuagccugggcaa

SEQ ID NO: 462155 - RNA, 32 nt, Human
gggaggcagaggcugcagagagccaaggagug

SEQ ID NO: 462156 - RNA, 32 nt, Human
gggaggcagaggcugcagugagccgagaucgu

SEQ ID NO: 462157 - RNA, 32 nt, Human
gggaggcagaggcugcagugagccgagauugc

SEQ ID NO: 462158 - RNA, 32 nt, Human
gggaggcagagggaggagggaaggcugggcuu

SEQ ID NO: 462159 - RNA, 23 nt, Human
gggaggcagagguggcacuggag

SEQ ID NO: 462160 - RNA, 32 nt, Human
gggaggcagagguugcaaugagcugagaucgc

SEQ ID NO: 462161 - RNA, 18 nt, Human
gggaggcagagguugcag

SEQ ID NO: 462162 - RNA, 22 nt, Human
gggaggcagagguugcagugag

SEQ ID NO: 462163 - RNA, 22 nt, Human
gggaggcagagguugcggugag

SEQ ID NO: 462164 - RNA, 18 nt, Human
gggaggcagagguuguag

SEQ ID NO: 462165 - RNA, 32 nt, Human
gggaggcagaguuugcagugagcggagaugau

SEQ ID NO: 462166 - RNA, 23 nt, Human
gggaggcagcauggcaccgugga

SEQ ID NO: 462167 - RNA, 23 nt, Human
gggaggcagccacaguccuggag

SEQ ID NO: 462168 - RNA, 21 nt, Human
gggaggcagccagagucggag

SEQ ID NO: 462169 - RNA, 23 nt, Human
gggaggcagccagcggggcguga

SEQ ID NO: 462170 - RNA, 22 nt, Human
gggaggcagcccuucccaggga

SEQ ID NO: 462171 - RNA, 24 nt, Human
gggaggcagccgcgcagccccgag

SEQ ID NO: 462172 - RNA, 21 nt, Human
gggaggcagccucagcaccug

SEQ ID NO: 462173 - RNA, 22 nt, Human
gggaggcagccuucaccaggga

SEQ ID NO: 462174 - RNA, 32 nt, Human
gggaggcagcgcgggaguggggcguugagggg

SEQ ID NO: 462175 - RNA, 23 nt, Human
gggaggcagcuagcugcccagag

SEQ ID NO: 462176 - RNA, 21 nt, Human
gggaggcagcucaccccaggg

SEQ ID NO: 462177 - RNA, 19 nt, Human
gggaggcagcuggcugggg

SEQ ID NO: 462178 - RNA, 24 nt, Human
gggaggcaggagccacccagguga

SEQ ID NO: 462179 - RNA, 32 nt, Human
gggaggcaggaggguuagagugaguaguaaga

SEQ ID NO: 462180 - RNA, 32 nt, Human
gggaggcaggaggugagguuggaaguugagca

SEQ ID NO: 462181 - RNA, 32 nt, Human
gggaggcaggcagaaggugacaauugacacga

SEQ ID NO: 462182 - RNA, 32 nt, Human
gggaggcaggcagaucacgaugucaggagauc

SEQ ID NO: 462183 - RNA, 32 nt, Human
gggaggcaggcaggcaugcaugugggccucug

SEQ ID NO: 462184 - RNA, 32 nt, Human
gggaggcagggacuuggggcuguuggagccaa

SEQ ID NO: 462185 - RNA, 19 nt, Human
gggaggcagggcugagagg

SEQ ID NO: 462186 - RNA, 23 nt, Human
gggaggcaggggcggguggauca

SEQ ID NO: 462187 - RNA, 20 nt, Human
gggaggcaguagguccugga

SEQ ID NO: 462188 - RNA, 21 nt, Human
gggaggcagucauaccuguuc

SEQ ID NO: 462189 - RNA, 20 nt, Human
gggaggcagucgcccugcgg

SEQ ID NO: 462190 - RNA, 18 nt, Human
gggaggcaguggcugggg

SEQ ID NO: 462191 - RNA, 32 nt, Human
gggaggcauaagccaccaugcccagccacgug

SEQ ID NO: 462192 - RNA, 32 nt, Human
gggaggcaucagugaauuuucagcugacaccu

SEQ ID NO: 462193 - RNA, 32 nt, Human
gggaggcauucaucucacagccacuugcccac

SEQ ID NO: 462194 - RNA, 23 nt, Human
gggaggccaaagcaggacgauca

SEQ ID NO: 462195 - RNA, 23 nt, Human
gggaggccaaagcaggaggauca

SEQ ID NO: 462196 - RNA, 23 nt, Human
gggaggccaaagcaggaggaucg

SEQ ID NO: 462197 - RNA, 23 nt, Human
gggaggccaaagcaggcggauca

SEQ ID NO: 462198 - RNA, 23 nt, Human
gggaggccaaagcagguggauua

SEQ ID NO: 462199 - RNA, 23 nt, Human
gggaggccaaagugggagaucau

SEQ ID NO: 462200 - RNA, 23 nt, Human
gggaggccaaaguggguggauca

SEQ ID NO: 462201 - RNA, 32 nt, Human
gggaggccaaaugggagaauugcuugaagcca

SEQ ID NO: 462202 - RNA, 23 nt, Human
gggaggccaacacaggaggauca

SEQ ID NO: 462203 - RNA, 32 nt, Human
gggaggccaacgccgaggcgggcggaucauga

SEQ ID NO: 462204 - RNA, 24 nt, Human
gggaggccaacgccuaaagaucau

SEQ ID NO: 462205 - RNA, 23 nt, Human
gggaggccaacgggggcggauca

SEQ ID NO: 462206 - RNA, 23 nt, Human
gggaggccaacguggauggauca

SEQ ID NO: 462207 - RNA, 23 nt, Human
gggaggccaagacagaaggauca

SEQ ID NO: 462208 - RNA, 23 nt, Human
gggaggccaagacaggaggauca

SEQ ID NO: 462209 - RNA, 22 nt, Human
gggaggccaagacaggcggauc

SEQ ID NO: 462210 - RNA, 24 nt, Human
gggaggccaagacagguagacugu

SEQ ID NO: 462211 - RNA, 23 nt, Human
gggaggccaagacagguagauca

SEQ ID NO: 462212 - RNA, 23 nt, Human
gggaggccaagacaggugcauca

SEQ ID NO: 462213 - RNA, 23 nt, Human
gggaggccaagacagguggauca

SEQ ID NO: 462214 - RNA, 22 nt, Human
gggaggccaagacgggcggauc

SEQ ID NO: 462215 - RNA, 23 nt, Human
gggaggccaagacgggcggauca

SEQ ID NO: 462216 - RNA, 24 nt, Human
gggaggccaagacgggcggaucau

SEQ ID NO: 462217 - RNA, 32 nt, Human
gggaggccaagauggaggauugcuugaagcca

SEQ ID NO: 462218 - RNA, 23 nt, Human
gggaggccaagaugggcggauca

SEQ ID NO: 462219 - RNA, 24 nt, Human
gggaggccaagaugggcggaucau

SEQ ID NO: 462220 - RNA, 23 nt, Human
gggaggccaagauggguggauca

SEQ ID NO: 462221 - RNA, 23 nt, Human
gggaggccaagauggguggauua

SEQ ID NO: 462222 - RNA, 24 nt, Human
gggaggccaagccagauggaucau

SEQ ID NO: 462223 - RNA, 23 nt, Human
gggaggccaagcuugguggaucg

SEQ ID NO: 462224 - RNA, 32 nt, Human
gggaggccaaggaaggaggaaugcuugagccc

SEQ ID NO: 462225 - RNA, 32 nt, Human
gggaggccaaggaaggaggacugcuuaaagug

SEQ ID NO: 462226 - RNA, 32 nt, Human
gggaggccaaggaaggaggauugcuugagcuc

SEQ ID NO: 462227 - RNA, 23 nt, Human
gggaggccaaggaaggcagauca

SEQ ID NO: 462228 - RNA, 23 nt, Human
gggaggccaaggagggcagauca

SEQ ID NO: 462229 - RNA, 23 nt, Human
gggaggccaaggaggguggauca

SEQ ID NO: 462230 - RNA, 22 nt, Human
gggaggccaaggcaaaaggauu

SEQ ID NO: 462231 - RNA, 23 nt, Human
gggaggccaaggcaagaggauca

SEQ ID NO: 462232 - RNA, 23 nt, Human
gggaggccaaggcaagcaaauca

SEQ ID NO: 462233 - RNA, 23 nt, Human
gggaggccaaggcaagcagauca

SEQ ID NO: 462234 - RNA, 23 nt, Human
gggaggccaaggcaaggggauca

SEQ ID NO: 462235 - RNA, 23 nt, Human
gggaggccaaggcacauagguca

SEQ ID NO: 462236 - RNA, 21 nt, Human
gggaggccaaggcagaaggau

SEQ ID NO: 462237 - RNA, 23 nt, Human
gggaggccaaggcagaaggauca

SEQ ID NO: 462238 - RNA, 23 nt, Human
gggaggccaaggcagauggaaca

SEQ ID NO: 462239 - RNA, 24 nt, Human
gggaggccaaggcagauggaucau

SEQ ID NO: 462240 - RNA, 21 nt, Human
gggaggccaaggcaggaagau

SEQ ID NO: 462241 - RNA, 23 nt, Human
gggaggccaaggcaggaagauca

SEQ ID NO: 462242 - RNA, 22 nt, Human
gggaggccaaggcaggaagauu

SEQ ID NO: 462243 - RNA, 20 nt, Human
gggaggccaaggcaggagga

SEQ ID NO: 462244 - RNA, 23 nt, Human
gggaggccaaggcaggaggauca

SEQ ID NO: 462245 - RNA, 23 nt, Human
gggaggccaaggcaggaggaucg

SEQ ID NO: 462246 - RNA, 24 nt, Human
gggaggccaaggcaggaggaucgu

SEQ ID NO: 462247 - RNA, 22 nt, Human
gggaggccaaggcaggaggauu

SEQ ID NO: 462248 - RNA, 23 nt, Human
gggaggccaaggcaggcagacca

SEQ ID NO: 462249 - RNA, 21 nt, Human
gggaggccaaggcaggcagau

SEQ ID NO: 462250 - RNA, 23 nt, Human
gggaggccaaggcaggcagauca

SEQ ID NO: 462251 - RNA, 24 nt, Human
gggaggccaaggcaggcagaucau

SEQ ID NO: 462252 - RNA, 23 nt, Human
gggaggccaaggcaggcagaucg

SEQ ID NO: 462253 - RNA, 23 nt, Human
gggaggccaaggcaggcauauca

SEQ ID NO: 462254 - RNA, 23 nt, Human
gggaggccaaggcaggcggacca

SEQ ID NO: 462255 - RNA, 32 nt, Human
gggaggccaaggcaggcggaccaccugaaguc

SEQ ID NO: 462256 - RNA, 23 nt, Human
gggaggccaaggcaggcggauca

SEQ ID NO: 462257 - RNA, 23 nt, Human
gggaggccaaggcagggggauca

SEQ ID NO: 462258 - RNA, 23 nt, Human
gggaggccaaggcagggggauua

SEQ ID NO: 462259 - RNA, 23 nt, Human
gggaggccaaggcagguagauca

SEQ ID NO: 462260 - RNA, 21 nt, Human
gggaggccaaggcagguggau

SEQ ID NO: 462261 - RNA, 23 nt, Human
gggaggccaaggcagguggauca

SEQ ID NO: 462262 - RNA, 24 nt, Human
gggaggccaaggcagguggaucau

SEQ ID NO: 462263 - RNA, 32 nt, Human
gggaggccaaggccaaguagguggccaugagc

SEQ ID NO: 462264 - RNA, 23 nt, Human
gggaggccaaggccagcggauca

SEQ ID NO: 462265 - RNA, 24 nt, Human
gggaggccaaggcgagcggaucau

SEQ ID NO: 462266 - RNA, 32 nt, Human
gggaggccaaggcggacagaccaccugagguc

SEQ ID NO: 462267 - RNA, 23 nt, Human
gggaggccaaggcggacggauca

SEQ ID NO: 462268 - RNA, 23 nt, Human
gggaggccaaggcgggaggauca

SEQ ID NO: 462269 - RNA, 23 nt, Human
gggaggccaaggcgggaggaucg

SEQ ID NO: 462270 - RNA, 24 nt, Human
gggaggccaaggcgggcagaccau

SEQ ID NO: 462271 - RNA, 23 nt, Human
gggaggccaaggcgggcagauca

SEQ ID NO: 462272 - RNA, 23 nt, Human
gggaggccaaggcgggcagauua

SEQ ID NO: 462273 - RNA, 23 nt, Human
gggaggccaaggcgggcggauca

SEQ ID NO: 462274 - RNA, 24 nt, Human
gggaggccaaggcgggcggaucau

SEQ ID NO: 462275 - RNA, 23 nt, Human
gggaggccaaggcgggcguauca

SEQ ID NO: 462276 - RNA, 23 nt, Human
gggaggccaaggcgggucaauca

SEQ ID NO: 462277 - RNA, 22 nt, Human
gggaggccaaggcgggugaauc

SEQ ID NO: 462278 - RNA, 23 nt, Human
gggaggccaaggcgggugaauca

SEQ ID NO: 462279 - RNA, 21 nt, Human
gggaggccaaggcggguggau

SEQ ID NO: 462280 - RNA, 23 nt, Human
gggaggccaaggcggguggauca

SEQ ID NO: 462281 - RNA, 24 nt, Human
gggaggccaaggcggguggaucau

SEQ ID NO: 462282 - RNA, 23 nt, Human
gggaggccaaggcggguggauua

SEQ ID NO: 462283 - RNA, 23 nt, Human
gggaggccaaggcggguggcuca

SEQ ID NO: 462284 - RNA, 23 nt, Human
gggaggccaaggcggguggguca

SEQ ID NO: 462285 - RNA, 23 nt, Human
gggaggccaaggcguguggauca

SEQ ID NO: 462286 - RNA, 23 nt, Human
gggaggccaaggcuggcagauca

SEQ ID NO: 462287 - RNA, 23 nt, Human
gggaggccaaggcugguggauca

SEQ ID NO: 462288 - RNA, 23 nt, Human
gggaggccaagggagaaggauca

SEQ ID NO: 462289 - RNA, 22 nt, Human
gggaggccaagggaguggauca

SEQ ID NO: 462290 - RNA, 22 nt, Human
gggaggccaagggggcagauca

SEQ ID NO: 462291 - RNA, 22 nt, Human
gggaggccaaggggggagauca

SEQ ID NO: 462292 - RNA, 23 nt, Human
gggaggccaagguaggcagauca

SEQ ID NO: 462293 - RNA, 21 nt, Human
gggaggccaagguagguggau

SEQ ID NO: 462294 - RNA, 32 nt, Human
gggaggccaaggugagcaagucacuugagguc

SEQ ID NO: 462295 - RNA, 23 nt, Human
gggaggccaaggugagcggauca

SEQ ID NO: 462296 - RNA, 23 nt, Human
gggaggccaaggugaguggauca

SEQ ID NO: 462297 - RNA, 32 nt, Human
gggaggccaaggugggaggaccaccugagguc

SEQ ID NO: 462298 - RNA, 23 nt, Human
gggaggccaaggugggaggauca

SEQ ID NO: 462299 - RNA, 23 nt, Human
gggaggccaaggugggcagauca

SEQ ID NO: 462300 - RNA, 24 nt, Human
gggaggccaaggugggcagaucau

SEQ ID NO: 462301 - RNA, 23 nt, Human
gggaggccaaggugggcggauca

SEQ ID NO: 462302 - RNA, 24 nt, Human
gggaggccaaggugggcggaucau

SEQ ID NO: 462303 - RNA, 23 nt, Human
gggaggccaagguggggggauca

SEQ ID NO: 462304 - RNA, 24 nt, Human
gggaggccaagguggguagaucau

SEQ ID NO: 462305 - RNA, 23 nt, Human
gggaggccaaggugggucgauca

SEQ ID NO: 462306 - RNA, 23 nt, Human
gggaggccaaggugggugaauca

SEQ ID NO: 462307 - RNA, 23 nt, Human
gggaggccaagguggguggacca

SEQ ID NO: 462308 - RNA, 23 nt, Human
gggaggccaagguggguggauca

SEQ ID NO: 462309 - RNA, 24 nt, Human
gggaggccaagguggguggaucau

SEQ ID NO: 462310 - RNA, 23 nt, Human
gggaggccaagguggguggguca

SEQ ID NO: 462311 - RNA, 24 nt, Human
gggaggccaaggugggugggucau

SEQ ID NO: 462312 - RNA, 23 nt, Human
gggaggccaagguuggcagauca

SEQ ID NO: 462313 - RNA, 32 nt, Human
gggaggccaaguugucagcuuuuugauccucu

SEQ ID NO: 462314 - RNA, 19 nt, Human
gggaggccaaucccucccu

SEQ ID NO: 462315 - RNA, 23 nt, Human
gggaggccaaugcauguggauca

SEQ ID NO: 462316 - RNA, 24 nt, Human
gggaggccaauguggguggaucau

SEQ ID NO: 462317 - RNA, 32 nt, Human
gggaggccaauuuggaaagaacccaaaggcuc

SEQ ID NO: 462318 - RNA, 32 nt, Human
gggaggccaccaacuuggcuggcauguugcuu

SEQ ID NO: 462319 - RNA, 24 nt, Human
gggaggccacggcagguggaucau

SEQ ID NO: 462320 - RNA, 32 nt, Human
gggaggccagacggcacgaggucuccaaggcc

SEQ ID NO: 462321 - RNA, 21 nt, Human
gggaggccagagaagagccag

SEQ ID NO: 462322 - RNA, 32 nt, Human
gggaggccagagaagagccaggcagagaaaac

SEQ ID NO: 462323 - RNA, 18 nt, Human
gggaggccagcugggagg

SEQ ID NO: 462324 - RNA, 32 nt, Human
gggaggccaggaguucgagaccagccuggcca

SEQ ID NO: 462325 - RNA, 22 nt, Human
gggaggccaggcgggcggauca

SEQ ID NO: 462326 - RNA, 24 nt, Human
gggaggccagggcaggcagaucau

SEQ ID NO: 462327 - RNA, 32 nt, Human
gggaggccagguggagagaccuggaggaguga

SEQ ID NO: 462328 - RNA, 23 nt, Human
gggaggccagugcagguggauca

SEQ ID NO: 462329 - RNA, 24 nt, Human
gggaggccagugcgggcggaucau

SEQ ID NO: 462330 - RNA, 23 nt, Human
gggaggccauggcagguggauca

SEQ ID NO: 462331 - RNA, 23 nt, Human
gggaggccauuuccuguccugga

SEQ ID NO: 462332 - RNA, 22 nt, Human
gggaggcccaaaugauggauca

SEQ ID NO: 462333 - RNA, 23 nt, Human
gggaggcccagacuggcggauca

SEQ ID NO: 462334 - RNA, 19 nt, Human
gggaggcccagcugggagg

SEQ ID NO: 462335 - RNA, 24 nt, Human
gggaggcccaggcaagcagaucau

SEQ ID NO: 462336 - RNA, 23 nt, Human
gggaggcccaggcaggcagauca

SEQ ID NO: 462337 - RNA, 23 nt, Human
gggaggcccaggcaggcggauca

SEQ ID NO: 462338 - RNA, 24 nt, Human
gggaggcccaggcaggcgggucau

SEQ ID NO: 462339 - RNA, 23 nt, Human
gggaggcccaggccggcggauca

SEQ ID NO: 462340 - RNA, 23 nt, Human
gggaggcccaggcgggcagauca

SEQ ID NO: 462341 - RNA, 23 nt, Human
gggaggcccaggcgggcggauca

SEQ ID NO: 462342 - RNA, 32 nt, Human
gggaggcccaggcggguggaucaaaggucagg

SEQ ID NO: 462343 - RNA, 32 nt, Human
gggaggcccagggcuccucuggucccaagcga

SEQ ID NO: 462344 - RNA, 24 nt, Human
gggaggcccaggucaggggaucau

SEQ ID NO: 462345 - RNA, 24 nt, Human
gggaggcccaucccccaccugcca

SEQ ID NO: 462346 - RNA, 20 nt, Human
gggaggcccaugguggagca

SEQ ID NO: 462347 - RNA, 32 nt, Human
gggaggccccacccuucuccccuaggcgcugu

SEQ ID NO: 462348 - RNA, 19 nt, Human
gggaggccccagcaaccac

SEQ ID NO: 462349 - RNA, 20 nt, Human
gggaggccccggggcuggga

SEQ ID NO: 462350 - RNA, 18 nt, Human
gggaggccccuggccggg

SEQ ID NO: 462351 - RNA, 32 nt, Human
gggaggccccuggcuccaggaggcgggagucg

SEQ ID NO: 462352 - RNA, 32 nt, Human
gggaggcccuacugccuucucaaagcagagag

SEQ ID NO: 462353 - RNA, 32 nt, Human
gggaggcccugagaacuaaauuuugccccaaa

SEQ ID NO: 462354 - RNA, 32 nt, Human
gggaggcccuggaggguggauugccugagguc

SEQ ID NO: 462355 - RNA, 23 nt, Human
gggaggccgaaacaggcgaauca

SEQ ID NO: 462356 - RNA, 24 nt, Human
gggaggccgaagacagcggaucau

SEQ ID NO: 462357 - RNA, 23 nt, Human
gggaggccgaagcaggcagauca

SEQ ID NO: 462358 - RNA, 23 nt, Human
gggaggccgaagcaggcggauca

SEQ ID NO: 462359 - RNA, 23 nt, Human
gggaggccgaagcgggcggauca

SEQ ID NO: 462360 - RNA, 23 nt, Human
gggaggccgaagcggguggauca

SEQ ID NO: 462361 - RNA, 23 nt, Human
gggaggccgaagggggcgaauca

SEQ ID NO: 462362 - RNA, 23 nt, Human
gggaggccgaaguaagcagauca

SEQ ID NO: 462363 - RNA, 23 nt, Human
gggaggccgaagugggcggauca

SEQ ID NO: 462364 - RNA, 23 nt, Human
gggaggccgaaguggguggauca

SEQ ID NO: 462365 - RNA, 23 nt, Human
gggaggccgaaguggguggaucg

SEQ ID NO: 462366 - RNA, 22 nt, Human
gggaggccgaaugggcagauca

SEQ ID NO: 462367 - RNA, 23 nt, Human
gggaggccgagaagggaggauca

SEQ ID NO: 462368 - RNA, 24 nt, Human
gggaggccgagaaggguggaucau

SEQ ID NO: 462369 - RNA, 22 nt, Human
gggaggccgagacaggcagauu

SEQ ID NO: 462370 - RNA, 23 nt, Human
gggaggccgagacaggcggauca

SEQ ID NO: 462371 - RNA, 23 nt, Human
gggaggccgagacagguggauca

SEQ ID NO: 462372 - RNA, 23 nt, Human
gggaggccgagacgggcagauca

SEQ ID NO: 462373 - RNA, 23 nt, Human
gggaggccgagacgggcggauca

SEQ ID NO: 462374 - RNA, 23 nt, Human
gggaggccgagacggguggauca

SEQ ID NO: 462375 - RNA, 22 nt, Human
gggaggccgagaugggcggauc

SEQ ID NO: 462376 - RNA, 23 nt, Human
gggaggccgagaugggcggauca

SEQ ID NO: 462377 - RNA, 24 nt, Human
gggaggccgagaugggugaaucau

SEQ ID NO: 462378 - RNA, 23 nt, Human
gggaggccgagauggguggauca

SEQ ID NO: 462379 - RNA, 24 nt, Human
gggaggccgagauggguggaucau

SEQ ID NO: 462380 - RNA, 23 nt, Human
gggaggccgagccaaguggauca

SEQ ID NO: 462381 - RNA, 20 nt, Human
gggaggccgagccccgcgag

SEQ ID NO: 462382 - RNA, 23 nt, Human
gggaggccgagccgggcggauca

SEQ ID NO: 462383 - RNA, 19 nt, Human
gggaggccgagccugaauc

SEQ ID NO: 462384 - RNA, 23 nt, Human
gggaggccgaggagagaggauca

SEQ ID NO: 462385 - RNA, 23 nt, Human
gggaggccgaggagggaggauca

SEQ ID NO: 462386 - RNA, 23 nt, Human
gggaggccgaggagggcagauca

SEQ ID NO: 462387 - RNA, 23 nt, Human
gggaggccgaggaggguggauca

SEQ ID NO: 462388 - RNA, 24 nt, Human
gggaggccgaggaggguggaucau

SEQ ID NO: 462389 - RNA, 24 nt, Human
gggaggccgaggcaagagggucau

SEQ ID NO: 462390 - RNA, 23 nt, Human
gggaggccgaggcaagcagauca

SEQ ID NO: 462391 - RNA, 23 nt, Human
gggaggccgaggcaaguggauca

SEQ ID NO: 462392 - RNA, 23 nt, Human
gggaggccgaggcagacagauca

SEQ ID NO: 462393 - RNA, 23 nt, Human
gggaggccgaggcagacggauca

SEQ ID NO: 462394 - RNA, 23 nt, Human
gggaggccgaggcagauggauca

SEQ ID NO: 462395 - RNA, 24 nt, Human
gggaggccgaggcagccggaucau

SEQ ID NO: 462396 - RNA, 23 nt, Human
gggaggccgaggcaggaagauca

SEQ ID NO: 462397 - RNA, 24 nt, Human
gggaggccgaggcaggaagaucau

SEQ ID NO: 462398 - RNA, 22 nt, Human
gggaggccgaggcaggaagauu

SEQ ID NO: 462399 - RNA, 23 nt, Human
gggaggccgaggcaggagaaucg

SEQ ID NO: 462400 - RNA, 23 nt, Human
gggaggccgaggcaggagcaucg

SEQ ID NO: 462401 - RNA, 22 nt, Human
gggaggccgaggcaggaggauc

SEQ ID NO: 462402 - RNA, 23 nt, Human
gggaggccgaggcaggaggauca

SEQ ID NO: 462403 - RNA, 23 nt, Human
gggaggccgaggcaggcagauca

SEQ ID NO: 462404 - RNA, 24 nt, Human
gggaggccgaggcaggcagauuau

SEQ ID NO: 462405 - RNA, 23 nt, Human
gggaggccgaggcaggcagguca

SEQ ID NO: 462406 - RNA, 23 nt, Human
gggaggccgaggcaggcgaauca

SEQ ID NO: 462407 - RNA, 23 nt, Human
gggaggccgaggcaggcggacca

SEQ ID NO: 462408 - RNA, 23 nt, Human
gggaggccgaggcaggcggagca

SEQ ID NO: 462409 - RNA, 23 nt, Human
gggaggccgaggcaggcggauca

SEQ ID NO: 462410 - RNA, 24 nt, Human
gggaggccgaggcaggcggaucau

SEQ ID NO: 462411 - RNA, 23 nt, Human
gggaggccgaggcaggcggauua

SEQ ID NO: 462412 - RNA, 23 nt, Human
gggaggccgaggcaggcggcuca

SEQ ID NO: 462413 - RNA, 20 nt, Human
gggaggccgaggcaggggga

SEQ ID NO: 462414 - RNA, 23 nt, Human
gggaggccgaggcagggggauca

SEQ ID NO: 462415 - RNA, 23 nt, Human
gggaggccgaggcagguacauca

SEQ ID NO: 462416 - RNA, 24 nt, Human
gggaggccgaggcagguagaucau

SEQ ID NO: 462417 - RNA, 23 nt, Human
gggaggccgaggcagguggaaca

SEQ ID NO: 462418 - RNA, 21 nt, Human
gggaggccgaggcagguggau

SEQ ID NO: 462419 - RNA, 23 nt, Human
gggaggccgaggcagguggauca

SEQ ID NO: 462420 - RNA, 24 nt, Human
gggaggccgaggcagguggaucau

SEQ ID NO: 462421 - RNA, 23 nt, Human
gggaggccgaggcagguggaucg

SEQ ID NO: 462422 - RNA, 24 nt, Human
gggaggccgaggcagguggaucgu

SEQ ID NO: 462423 - RNA, 22 nt, Human
gggaggccgaggcagguggauu

SEQ ID NO: 462424 - RNA, 24 nt, Human
gggaggccgaggcaggugguucau

SEQ ID NO: 462425 - RNA, 23 nt, Human
gggaggccgaggcagguugauca

SEQ ID NO: 462426 - RNA, 23 nt, Human
gggaggccgaggcaguuggauca

SEQ ID NO: 462427 - RNA, 23 nt, Human
gggaggccgaggcaugagaauca

SEQ ID NO: 462428 - RNA, 23 nt, Human
gggaggccgaggccaguggauca

SEQ ID NO: 462429 - RNA, 23 nt, Human
gggaggccgaggccggugauuca

SEQ ID NO: 462430 - RNA, 23 nt, Human
gggaggccgaggcgagcagauca

SEQ ID NO: 462431 - RNA, 23 nt, Human
gggaggccgaggcgaguggauca

SEQ ID NO: 462432 - RNA, 23 nt, Human
gggaggccgaggcgccuggauca

SEQ ID NO: 462433 - RNA, 23 nt, Human
gggaggccgaggcggacagauca

SEQ ID NO: 462434 - RNA, 23 nt, Human
gggaggccgaggcggacggauca

SEQ ID NO: 462435 - RNA, 23 nt, Human
gggaggccgaggcggauggauca

SEQ ID NO: 462436 - RNA, 23 nt, Human
gggaggccgaggcggcugaauca

SEQ ID NO: 462437 - RNA, 23 nt, Human
gggaggccgaggcgggaagauca

SEQ ID NO: 462438 - RNA, 23 nt, Human
gggaggccgaggcgggaggauca

SEQ ID NO: 462439 - RNA, 24 nt, Human
gggaggccgaggcgggaggaucau

SEQ ID NO: 462440 - RNA, 21 nt, Human
gggaggccgaggcgggcagau

SEQ ID NO: 462441 - RNA, 23 nt, Human
gggaggccgaggcgggcagauca

SEQ ID NO: 462442 - RNA, 24 nt, Human
gggaggccgaggcgggcagaucau

SEQ ID NO: 462443 - RNA, 23 nt, Human
gggaggccgaggcgggccgauca

SEQ ID NO: 462444 - RNA, 23 nt, Human
gggaggccgaggcgggcgaauca

SEQ ID NO: 462445 - RNA, 23 nt, Human
gggaggccgaggcgggcgcauca

SEQ ID NO: 462446 - RNA, 21 nt, Human
gggaggccgaggcgggcggau

SEQ ID NO: 462447 - RNA, 22 nt, Human
gggaggccgaggcgggcggauc

SEQ ID NO: 462448 - RNA, 23 nt, Human
gggaggccgaggcgggcggauca

SEQ ID NO: 462449 - RNA, 24 nt, Human
gggaggccgaggcgggcggaucau

SEQ ID NO: 462450 - RNA, 23 nt, Human
gggaggccgaggcgggcggaucg

SEQ ID NO: 462451 - RNA, 23 nt, Human
gggaggccgaggcgggcggcuca

SEQ ID NO: 462452 - RNA, 23 nt, Human
gggaggccgaggcgggcggguca

SEQ ID NO: 462453 - RNA, 23 nt, Human
gggaggccgaggcggggagauca

SEQ ID NO: 462454 - RNA, 23 nt, Human
gggaggccgaggcggguggacca

SEQ ID NO: 462455 - RNA, 23 nt, Human
gggaggccgaggcggguggauca

SEQ ID NO: 462456 - RNA, 24 nt, Human
gggaggccgaggcggguggaucau

SEQ ID NO: 462457 - RNA, 23 nt, Human
gggaggccgaggcggguggaucg

SEQ ID NO: 462458 - RNA, 23 nt, Human
gggaggccgaggcgguuggauca

SEQ ID NO: 462459 - RNA, 23 nt, Human
gggaggccgaggcuggcggauca

SEQ ID NO: 462460 - RNA, 20 nt, Human
gggaggccgaggcuggggga

SEQ ID NO: 462461 - RNA, 23 nt, Human
gggaggccgaggcugguggauca

SEQ ID NO: 462462 - RNA, 23 nt, Human
gggaggccgaggggaguggauca

SEQ ID NO: 462463 - RNA, 24 nt, Human
gggaggccgaggggggcggaucgu

SEQ ID NO: 462464 - RNA, 23 nt, Human
gggaggccgagguaggcagauca

SEQ ID NO: 462465 - RNA, 22 nt, Human
gggaggccgagguaggcggauc

SEQ ID NO: 462466 - RNA, 23 nt, Human
gggaggccgagguaggcggauca

SEQ ID NO: 462467 - RNA, 23 nt, Human
gggaggccgagguagguggaucg

SEQ ID NO: 462468 - RNA, 23 nt, Human
gggaggccgaggugaaaggauca

SEQ ID NO: 462469 - RNA, 24 nt, Human
gggaggccgaggugacaggaucgu

SEQ ID NO: 462470 - RNA, 23 nt, Human
gggaggccgaggugagcagauca

SEQ ID NO: 462471 - RNA, 23 nt, Human
gggaggccgaggugagcggauca

SEQ ID NO: 462472 - RNA, 23 nt, Human
gggaggccgaggugaguggauca

SEQ ID NO: 462473 - RNA, 23 nt, Human
gggaggccgagguggauagauca

SEQ ID NO: 462474 - RNA, 23 nt, Human
gggaggccgagguggccagauca

SEQ ID NO: 462475 - RNA, 23 nt, Human
gggaggccgaggugggaagauca

SEQ ID NO: 462476 - RNA, 24 nt, Human
gggaggccgaggugggaagaucau

SEQ ID NO: 462477 - RNA, 23 nt, Human
gggaggccgaggugggagaauca

SEQ ID NO: 462478 - RNA, 23 nt, Human
gggaggccgaggugggaggauca

SEQ ID NO: 462479 - RNA, 24 nt, Human
gggaggccgaggugggaggaucau

SEQ ID NO: 462480 - RNA, 24 nt, Human
gggaggccgaggugggcaaaucau

SEQ ID NO: 462481 - RNA, 23 nt, Human
gggaggccgaggugggcagauca

SEQ ID NO: 462482 - RNA, 24 nt, Human
gggaggccgaggugggcagaucau

SEQ ID NO: 462483 - RNA, 23 nt, Human
gggaggccgaggugggccgauca

SEQ ID NO: 462484 - RNA, 23 nt, Human
gggaggccgaggugggcggauca

SEQ ID NO: 462485 - RNA, 21 nt, Human
gggaggccgagguggguagau

SEQ ID NO: 462486 - RNA, 23 nt, Human
gggaggccgagguggguagaucg

SEQ ID NO: 462487 - RNA, 22 nt, Human
gggaggccgaggugggugauca

SEQ ID NO: 462488 - RNA, 23 nt, Human
gggaggccgagguggguggacca

SEQ ID NO: 462489 - RNA, 32 nt, Human
gggaggccgagguggguggaccaccugagguu

SEQ ID NO: 462490 - RNA, 23 nt, Human
gggaggccgagguggguggauca

SEQ ID NO: 462491 - RNA, 24 nt, Human
gggaggccgagguggguggaucau

SEQ ID NO: 462492 - RNA, 23 nt, Human
gggaggccgaggugugcagauca

SEQ ID NO: 462493 - RNA, 24 nt, Human
gggaggccgagguugggggaucau

SEQ ID NO: 462494 - RNA, 23 nt, Human
gggaggccgagucagguggauca

SEQ ID NO: 462495 - RNA, 32 nt, Human
gggaggccgagucgguggauugcuugaggcua

SEQ ID NO: 462496 - RNA, 32 nt, Human
gggaggccgagugggaggauugccugagccua

SEQ ID NO: 462497 - RNA, 23 nt, Human
gggaggccgaguugggcggauca

SEQ ID NO: 462498 - RNA, 23 nt, Human
gggaggccgaugugggcagauca

SEQ ID NO: 462499 - RNA, 23 nt, Human
gggaggccgauguggguggauca

SEQ ID NO: 462500 - RNA, 23 nt, Human
gggaggccgcggcagaaggauca

SEQ ID NO: 462501 - RNA, 23 nt, Human
gggaggccgcggcggguggauca

SEQ ID NO: 462502 - RNA, 16 nt, Human
gggaggccgcggugag

SEQ ID NO: 462503 - RNA, 23 nt, Human
gggaggccgcgguggguggauca

SEQ ID NO: 462504 - RNA, 23 nt, Human
gggaggccgggacagguggauca

SEQ ID NO: 462505 - RNA, 24 nt, Human
gggaggccgggcaugguggcucau

SEQ ID NO: 462506 - RNA, 23 nt, Human
gggaggccggggcaggaggauca

SEQ ID NO: 462507 - RNA, 22 nt, Human
gggaggccggugggcagaucau

SEQ ID NO: 462508 - RNA, 23 nt, Human
gggaggccguggugggcggauca

SEQ ID NO: 462509 - RNA, 23 nt, Human
gggaggccuaggcaggcagauca

SEQ ID NO: 462510 - RNA, 23 nt, Human
gggaggccuaggcgggcagauca

SEQ ID NO: 462511 - RNA, 23 nt, Human
gggaggccuaggcgggcggauca

SEQ ID NO: 462512 - RNA, 23 nt, Human
gggaggccuaggcggguggauca

SEQ ID NO: 462513 - RNA, 25 nt, Human
gggaggccucgaggcagguggauca

SEQ ID NO: 462514 - RNA, 32 nt, Human
gggaggccucgaggcagguggaucaccugagg

SEQ ID NO: 462515 - RNA, 20 nt, Human
gggaggccugagugggagug

SEQ ID NO: 462516 - RNA, 32 nt, Human
gggaggccugggaacagagcccccacccucuc

SEQ ID NO: 462517 - RNA, 32 nt, Human
gggaggccugggccggagcagagcagagguga

SEQ ID NO: 462518 - RNA, 23 nt, Human
gggaggccuuggcagguggauca

SEQ ID NO: 462519 - RNA, 18 nt, Human
gggaggccuuggcuggga

SEQ ID NO: 462520 - RNA, 32 nt, Human
gggaggcgaccacuccuuaguuuccaagugcu

SEQ ID NO: 462521 - RNA, 22 nt, Human
gggaggcgaggaucccggcaga

SEQ ID NO: 462522 - RNA, 23 nt, Human
gggaggcgaggcagguagaucau

SEQ ID NO: 462523 - RNA, 23 nt, Human
gggaggcgauggccaccccagag

SEQ ID NO: 462524 - RNA, 32 nt, Human
gggaggcgaugggauuauggggcagaguccuc

SEQ ID NO: 462525 - RNA, 32 nt, Human
gggaggcgcagguugcagggaggcggagguug

SEQ ID NO: 462526 - RNA, 32 nt, Human
gggaggcgcaucuggcgcuucgguaccagcgg

SEQ ID NO: 462527 - RNA, 32 nt, Human
gggaggcgccacccauggcugcaguggagggg

SEQ ID NO: 462528 - RNA, 32 nt, Human
gggaggcgcccagcguggcugcagaggaaggg

SEQ ID NO: 462529 - RNA, 25 nt, Human
gggaggcgccuguggaauaggggga

SEQ ID NO: 462530 - RNA, 23 nt, Human
gggaggcggaggcaggagaauca

SEQ ID NO: 462531 - RNA, 23 nt, Human
gggaggcggaggcagguggauca

SEQ ID NO: 462532 - RNA, 23 nt, Human
gggaggcggaggcggguggauca

SEQ ID NO: 462533 - RNA, 32 nt, Human
gggaggcggagguuauggagagccaagaucgc

SEQ ID NO: 462534 - RNA, 32 nt, Human
gggaggcggagguuccagagagccaagaucgc

SEQ ID NO: 462535 - RNA, 18 nt, Human
gggaggcggagguugcag

SEQ ID NO: 462536 - RNA, 21 nt, Human
gggaggcggagguugcaguga

SEQ ID NO: 462537 - RNA, 22 nt, Human
gggaggcggagguugcagugag

SEQ ID NO: 462538 - RNA, 32 nt, Human
gggaggcggagguugcagugagccaaaaucgc

SEQ ID NO: 462539 - RNA, 32 nt, Human
gggaggcggagguugcagugagccaaaauuac

SEQ ID NO: 462540 - RNA, 32 nt, Human
gggaggcggaguuugcagugagccaagauagu

SEQ ID NO: 462541 - RNA, 32 nt, Human
gggaggcggcaacauuguuucaaguuggccaa

SEQ ID NO: 462542 - RNA, 32 nt, Human
gggaggcggccuggggagcccccaacuuaugc

SEQ ID NO: 462543 - RNA, 19 nt, Human
gggaggcgggaguggagug

SEQ ID NO: 462544 - RNA, 16 nt, Human
gggaggcgggugcaag

SEQ ID NO: 462545 - RNA, 32 nt, Human
gggaggcgugagccaccgcgccuguccaggaa

SEQ ID NO: 462546 - RNA, 23 nt, Human
gggaggcuaagacaggaagauca

SEQ ID NO: 462547 - RNA, 23 nt, Human
gggaggcuaagacaggcagauca

SEQ ID NO: 462548 - RNA, 23 nt, Human
gggaggcuaaggcaggagaauca

SEQ ID NO: 462549 - RNA, 23 nt, Human
gggaggcuaaggcaggcagauca

SEQ ID NO: 462550 - RNA, 23 nt, Human
gggaggcuaaggcaggcggacca

SEQ ID NO: 462551 - RNA, 23 nt, Human
gggaggcuaaggcaggcggauca

SEQ ID NO: 462552 - RNA, 23 nt, Human
gggaggcuaaggcagguggaucg

SEQ ID NO: 462553 - RNA, 20 nt, Human
gggaggcuaagguaggauca

SEQ ID NO: 462554 - RNA, 32 nt, Human
gggaggcuaggcacggcaccagccugggaugc

SEQ ID NO: 462555 - RNA, 32 nt, Human
gggaggcuagggcaauggagcaggccaccagc

SEQ ID NO: 462556 - RNA, 32 nt, Human
gggaggcucagcaggccaggaggcccaaggac

SEQ ID NO: 462557 - RNA, 23 nt, Human
gggaggcucaggcaggagaauca

SEQ ID NO: 462558 - RNA, 28 nt, Human
gggaggcucagggcugccuccucgaguu

SEQ ID NO: 462559 - RNA, 32 nt, Human
gggaggcucugacugucucgggugucagcuua

SEQ ID NO: 462560 - RNA, 32 nt, Human
gggaggcucuuucaaggcagcucacccaucag

SEQ ID NO: 462561 - RNA, 23 nt, Human
gggaggcugaaacaggagaauca

SEQ ID NO: 462562 - RNA, 32 nt, Human
gggaggcugaacaggagaaucgcuugaacccg

SEQ ID NO: 462563 - RNA, 23 nt, Human
gggaggcugaagcaagcagauca

SEQ ID NO: 462564 - RNA, 23 nt, Human
gggaggcugaagcaggagaauca

SEQ ID NO: 462565 - RNA, 23 nt, Human
gggaggcugaagcaggaggacca

SEQ ID NO: 462566 - RNA, 23 nt, Human
gggaggcugaagcaggaggauca

SEQ ID NO: 462567 - RNA, 23 nt, Human
gggaggcugaagcaggcagauca

SEQ ID NO: 462568 - RNA, 23 nt, Human
gggaggcugaagcggguagauca

SEQ ID NO: 462569 - RNA, 23 nt, Human
gggaggcugaagcggguggauca

SEQ ID NO: 462570 - RNA, 23 nt, Human
gggaggcugagacagaagaauca

SEQ ID NO: 462571 - RNA, 23 nt, Human
gggaggcugagacaggagaauca

SEQ ID NO: 462572 - RNA, 32 nt, Human
gggaggcugagacaggagacuugcuugaaugu

SEQ ID NO: 462573 - RNA, 23 nt, Human
gggaggcugagacaggcagauca

SEQ ID NO: 462574 - RNA, 23 nt, Human
gggaggcugagacaggcggauca

SEQ ID NO: 462575 - RNA, 24 nt, Human
gggaggcugagacagguagaucau

SEQ ID NO: 462576 - RNA, 23 nt, Human
gggaggcugagacagguggauca

SEQ ID NO: 462577 - RNA, 23 nt, Human
gggaggcugagacgggcagauca

SEQ ID NO: 462578 - RNA, 32 nt, Human
gggaggcugagcaggaggauggcuugggccca

SEQ ID NO: 462579 - RNA, 23 nt, Human
gggaggcugaggaaagcagauca

SEQ ID NO: 462580 - RNA, 23 nt, Human
gggaggcugaggaaggcaaauca

SEQ ID NO: 462581 - RNA, 32 nt, Human
gggaggcugaggagggagaaucgguugaaccu

SEQ ID NO: 462582 - RNA, 24 nt, Human
gggaggcugaggcaagagaaucau

SEQ ID NO: 462583 - RNA, 32 nt, Human
gggaggcugaggcaagagaguugcuugaaccc

SEQ ID NO: 462584 - RNA, 23 nt, Human
gggaggcugaggcaagaggauca

SEQ ID NO: 462585 - RNA, 23 nt, Human
gggaggcugaggcaagugaauca

SEQ ID NO: 462586 - RNA, 21 nt, Human
gggaggcugaggcaaguggau

SEQ ID NO: 462587 - RNA, 23 nt, Human
gggaggcugaggcaaguggauca

SEQ ID NO: 462588 - RNA, 32 nt, Human
gggaggcugaggcacgagacuugcuuaauacc

SEQ ID NO: 462589 - RNA, 23 nt, Human
gggaggcugaggcagaagaauca

SEQ ID NO: 462590 - RNA, 23 nt, Human
gggaggcugaggcagaaggauca

SEQ ID NO: 462591 - RNA, 32 nt, Human
gggaggcugaggcagaaguauugcuugaaccc

SEQ ID NO: 462592 - RNA, 32 nt, Human
gggaggcugaggcagaauugcuugaacccagg

SEQ ID NO: 462593 - RNA, 22 nt, Human
gggaggcugaggcagagaauca

SEQ ID NO: 462594 - RNA, 32 nt, Human
gggaggcugaggcagagaauugcuugaaccca

SEQ ID NO: 462595 - RNA, 32 nt, Human
gggaggcugaggcagagaauugcuugaacccu

SEQ ID NO: 462596 - RNA, 32 nt, Human
gggaggcugaggcagagaauugcuugaacgcg

SEQ ID NO: 462597 - RNA, 32 nt, Human
gggaggcugaggcagagaauugcuugaaucca

SEQ ID NO: 462598 - RNA, 23 nt, Human
gggaggcugaggcaggaaaauca

SEQ ID NO: 462599 - RNA, 23 nt, Human
gggaggcugaggcaggagaauca

SEQ ID NO: 462600 - RNA, 24 nt, Human
gggaggcugaggcaggagaaucau

SEQ ID NO: 462601 - RNA, 32 nt, Human
gggaggcugaggcaggagaauggugcgaaccc

SEQ ID NO: 462602 - RNA, 32 nt, Human
gggaggcugaggcaggagaauggugcggagcu

SEQ ID NO: 462603 - RNA, 23 nt, Human
gggaggcugaggcaggaggauca

SEQ ID NO: 462604 - RNA, 23 nt, Human
gggaggcugaggcaggcagauca

SEQ ID NO: 462605 - RNA, 24 nt, Human
gggaggcugaggcaggcagaucau

SEQ ID NO: 462606 - RNA, 23 nt, Human
gggaggcugaggcaggccaauca

SEQ ID NO: 462607 - RNA, 22 nt, Human
gggaggcugaggcaggcggaca

SEQ ID NO: 462608 - RNA, 22 nt, Human
gggaggcugaggcaggcggauc

SEQ ID NO: 462609 - RNA, 23 nt, Human
gggaggcugaggcaggcggauca

SEQ ID NO: 462610 - RNA, 24 nt, Human
gggaggcugaggcaggcggaucau

SEQ ID NO: 462611 - RNA, 23 nt, Human
gggaggcugaggcaggcggaucg

SEQ ID NO: 462612 - RNA, 23 nt, Human
gggaggcugaggcaggcggguca

SEQ ID NO: 462613 - RNA, 23 nt, Human
gggaggcugaggcaggggaauca

SEQ ID NO: 462614 - RNA, 23 nt, Human
gggaggcugaggcaggucgauca

SEQ ID NO: 462615 - RNA, 23 nt, Human
gggaggcugaggcaggugaaucg

SEQ ID NO: 462616 - RNA, 23 nt, Human
gggaggcugaggcagguggauca

SEQ ID NO: 462617 - RNA, 23 nt, Human
gggaggcugaggcagguggaucg

SEQ ID NO: 462618 - RNA, 23 nt, Human
gggaggcugaggcagguggcuca

SEQ ID NO: 462619 - RNA, 23 nt, Human
gggaggcugaggcaggugguuca

SEQ ID NO: 462620 - RNA, 23 nt, Human
gggaggcugaggccgguggauca

SEQ ID NO: 462621 - RNA, 23 nt, Human
gggaggcugaggcgggcagauca

SEQ ID NO: 462622 - RNA, 24 nt, Human
gggaggcugaggcgggcagaucau

SEQ ID NO: 462623 - RNA, 24 nt, Human
gggaggcugaggcgggcgaaucau

SEQ ID NO: 462624 - RNA, 23 nt, Human
gggaggcugaggcgggcggauca

SEQ ID NO: 462625 - RNA, 24 nt, Human
gggaggcugaggcgggcggaucau

SEQ ID NO: 462626 - RNA, 23 nt, Human
gggaggcugaggcggguagauca

SEQ ID NO: 462627 - RNA, 23 nt, Human
gggaggcugaggcgggugaauca

SEQ ID NO: 462628 - RNA, 24 nt, Human
gggaggcugaggcgggugaaucau

SEQ ID NO: 462629 - RNA, 23 nt, Human
gggaggcugaggcggguggauca

SEQ ID NO: 462630 - RNA, 24 nt, Human
gggaggcugaggcggguggaucau

SEQ ID NO: 462631 - RNA, 32 nt, Human
gggaggcugaggcuggagaauggugugaaccc

SEQ ID NO: 462632 - RNA, 32 nt, Human
gggaggcugaggcuggagaguugcucaaaccc

SEQ ID NO: 462633 - RNA, 32 nt, Human
gggaggcugaggcuggagguucaaucgcuuga

SEQ ID NO: 462634 - RNA, 24 nt, Human
gggaggcugaggcuggcggaucau

SEQ ID NO: 462635 - RNA, 20 nt, Human
gggaggcugaggcuggggga

SEQ ID NO: 462636 - RNA, 23 nt, Human
gggaggcugaggcugguggauca

SEQ ID NO: 462637 - RNA, 23 nt, Human
gggaggcugagggaggcggauca

SEQ ID NO: 462638 - RNA, 32 nt, Human
gggaggcugagguagagaaucgcuugaaccug

SEQ ID NO: 462639 - RNA, 32 nt, Human
gggaggcugagguaggagaauuacuugaaucu

SEQ ID NO: 462640 - RNA, 23 nt, Human
gggaggcugagguaggcagauca

SEQ ID NO: 462641 - RNA, 23 nt, Human
gggaggcugagguagguggauca

SEQ ID NO: 462642 - RNA, 24 nt, Human
gggaggcugagguagguggaucau

SEQ ID NO: 462643 - RNA, 32 nt, Human
gggaggcugagguggagaauugcuugaaccca

SEQ ID NO: 462644 - RNA, 32 nt, Human
gggaggcugaggugggcagaucacgagaccag

SEQ ID NO: 462645 - RNA, 23 nt, Human
gggaggcugagucaggcggauca

SEQ ID NO: 462646 - RNA, 32 nt, Human
gggaggcugcagagggugcugggagccccuag

SEQ ID NO: 462647 - RNA, 23 nt, Human
gggaggcugcggcaggcggauca

SEQ ID NO: 462648 - RNA, 32 nt, Human
gggaggcugcugcugcucuuggcuggacccag

SEQ ID NO: 462649 - RNA, 32 nt, Human
gggaggcuggagccccaggugcaguggcucuu

SEQ ID NO: 462650 - RNA, 32 nt, Human
gggaggcuggaggacuuucuuucccuuuaugg

SEQ ID NO: 462651 - RNA, 32 nt, Human
gggaggcuggagugcaauggugccaucuuggc

SEQ ID NO: 462652 - RNA, 18 nt, Human
gggaggcuggauucuggg

SEQ ID NO: 462653 - RNA, 32 nt, Human
gggaggcuggcauccaggucuuggcucugccc

SEQ ID NO: 462654 - RNA, 18 nt, Human
gggaggcuggcuggggga

SEQ ID NO: 462655 - RNA, 32 nt, Human
gggaggcugggaagaggugggaggaggggcag

SEQ ID NO: 462656 - RNA, 32 nt, Human
gggaggcugggagcugggccuccugcgugggg

SEQ ID NO: 462657 - RNA, 19 nt, Human
gggaggcugggcugggaga

SEQ ID NO: 462658 - RNA, 32 nt, Human
gggaggcuggggacccagacuuuuggccccag

SEQ ID NO: 462659 - RNA, 23 nt, Human
gggaggcuggggcaggagaauca

SEQ ID NO: 462660 - RNA, 23 nt, Human
gggaggcuggggcaggcggauca

SEQ ID NO: 462661 - RNA, 32 nt, Human
gggaggcuggugggugucggggguggagaugu

SEQ ID NO: 462662 - RNA, 32 nt, Human
gggaggcuguaauccuagcuacucgggaggcu

SEQ ID NO: 462663 - RNA, 32 nt, Human
gggaggcugugagacccacagggcuaggccca

SEQ ID NO: 462664 - RNA, 32 nt, Human
gggaggcugugcauauguuggggaaggugaua

SEQ ID NO: 462665 - RNA, 23 nt, Human
gggaggcuguggcaggaaaauca

SEQ ID NO: 462666 - RNA, 23 nt, Human
gggaggcuguggcagguggauca

SEQ ID NO: 462667 - RNA, 23 nt, Human
gggaggcuguggcgggcggauca

SEQ ID NO: 462668 - RNA, 32 nt, Human
gggaggcuguuucuucucaggauuccuugcca

SEQ ID NO: 462669 - RNA, 32 nt, Human
gggaggcuuccccucacuauccuaccccaccc

SEQ ID NO: 462670 - RNA, 32 nt, Human
gggaggcuuuugaacccaggaggcagagguug

SEQ ID NO: 462671 - RNA, 32 nt, Human
gggagggaaaaugugaaacacauuagcaauaa

SEQ ID NO: 462672 - RNA, 32 nt, Human
gggagggaaagaggaggaaggaagaugcgaga

SEQ ID NO: 462673 - RNA, 32 nt, Human
gggagggaaagccaaagcauggugcuucacca

SEQ ID NO: 462674 - RNA, 32 nt, Human
gggagggaaagcuuccuccuaaaucaagcauc

SEQ ID NO: 462675 - RNA, 32 nt, Human
gggagggaaauguuugccuguugaacuucuuu

SEQ ID NO: 462676 - RNA, 32 nt, Human
gggagggaacaccggcuucaguuuuucauguc

SEQ ID NO: 462677 - RNA, 32 nt, Human
gggagggaacacugggguuuaggaccacaacu

SEQ ID NO: 462678 - RNA, 19 nt, Human
gggagggaagaaaguacca

SEQ ID NO: 462679 - RNA, 32 nt, Human
gggagggaagagaagaaagcgagcgguuaggg

SEQ ID NO: 462680 - RNA, 18 nt, Human
gggagggaagagagcaga

SEQ ID NO: 462681 - RNA, 32 nt, Human
gggagggaagcggggaaggaaaggaaugaggg

SEQ ID NO: 462682 - RNA, 21 nt, Human
gggagggaaggaggcagcaga

SEQ ID NO: 462683 - RNA, 22 nt, Human
gggagggaaggggcugcaccag

SEQ ID NO: 462684 - RNA, 32 nt, Human
gggagggaagggggaggaaggagucggggacg

SEQ ID NO: 462685 - RNA, 22 nt, Human
gggagggaaggguggucacaga

SEQ ID NO: 462686 - RNA, 20 nt, Human
gggagggaaucaauccgggg

SEQ ID NO: 462687 - RNA, 20 nt, Human
gggagggacaagggggagga

SEQ ID NO: 462688 - RNA, 19 nt, Human
gggagggacacacugcggg

SEQ ID NO: 462689 - RNA, 19 nt, Human
gggagggacacagccuggg

SEQ ID NO: 462690 - RNA, 20 nt, Human
gggagggacacagccuggga

SEQ ID NO: 462691 - RNA, 15 nt, Human
gggagggacaccggg

SEQ ID NO: 462692 - RNA, 21 nt, Human
gggagggacacuuacccaagg

SEQ ID NO: 462693 - RNA, 22 nt, Human
gggagggacagaaaagagaaga

SEQ ID NO: 462694 - RNA, 32 nt, Human
gggagggacagaagccgagaacaccaggcaca

SEQ ID NO: 462695 - RNA, 19 nt, Human
gggagggacauggccccgg

SEQ ID NO: 462696 - RNA, 24 nt, Human
gggagggaccauggcccgcagggu

SEQ ID NO: 462697 - RNA, 32 nt, Human
gggagggacuggucagugcugaagucucacag

SEQ ID NO: 462698 - RNA, 32 nt, Human
gggagggagaaaaggugggggaaagagagaaa

SEQ ID NO: 462699 - RNA, 32 nt, Human
gggagggagacucaggcccacacuuggguauu

SEQ ID NO: 462700 - RNA, 32 nt, Human
gggagggagacucugcggccacacacaacaug

SEQ ID NO: 462701 - RNA, 18 nt, Human
gggagggagagcggagaa

SEQ ID NO: 462702 - RNA, 32 nt, Human
gggagggagaggcaccaugcaugugggugauu

SEQ ID NO: 462703 - RNA, 32 nt, Human
gggagggagagggaaugauaagcugcugcggc

SEQ ID NO: 462704 - RNA, 32 nt, Human
gggagggagagggagugaagagccugcccucc

SEQ ID NO: 462705 - RNA, 32 nt, Human
gggagggagagggcaggaaggaggcagagcug

SEQ ID NO: 462706 - RNA, 32 nt, Human
gggagggagagggcaguuuguaguauuugcug

SEQ ID NO: 462707 - RNA, 32 nt, Human
gggagggagaggggcuccggcuuucucugaaa

SEQ ID NO: 462708 - RNA, 32 nt, Human
gggagggagagggggcguguugaacauccugc

SEQ ID NO: 462709 - RNA, 32 nt, Human
gggagggagaguuugcggccacacacaacacg

SEQ ID NO: 462710 - RNA, 32 nt, Human
gggagggagcaggggaagguuguaugugucau

SEQ ID NO: 462711 - RNA, 21 nt, Human
gggagggagccacccggguga

SEQ ID NO: 462712 - RNA, 22 nt, Human
gggagggagcggaagucccggg

SEQ ID NO: 462713 - RNA, 32 nt, Human
gggagggaggagagaagggcggcagugggagg

SEQ ID NO: 462714 - RNA, 32 nt, Human
gggagggaggagagagaggagaagggaggcaa

SEQ ID NO: 462715 - RNA, 32 nt, Human
gggagggaggagagagaggagaagggaggcag

SEQ ID NO: 462716 - RNA, 32 nt, Human
gggagggaggagggagaaagggauaaugaugc

SEQ ID NO: 462717 - RNA, 32 nt, Human
gggagggaggcagugguggcuggagggugcgc

SEQ ID NO: 462718 - RNA, 32 nt, Human
gggagggaggccaaggcgggcagaucaccuga

SEQ ID NO: 462719 - RNA, 32 nt, Human
gggagggaggcgggagucgggggaagacgcgg

SEQ ID NO: 462720 - RNA, 32 nt, Human
gggagggaggcgggguuggggccacgugagca

SEQ ID NO: 462721 - RNA, 32 nt, Human
gggagggaggcugagggggcacugaggcagcu

SEQ ID NO: 462722 - RNA, 32 nt, Human
gggagggaggcugggcaucagggaucacauca

SEQ ID NO: 462723 - RNA, 23 nt, Human
gggagggagggagggaaggcaga

SEQ ID NO: 462724 - RNA, 32 nt, Human
gggagggagggagggaugaggcagcguccccc

SEQ ID NO: 462725 - RNA, 20 nt, Human
gggagggagggcgccccggg

SEQ ID NO: 462726 - RNA, 32 nt, Human
gggagggaggggagauggaggcccgguggagc

SEQ ID NO: 462727 - RNA, 32 nt, Human
gggagggaggggaggaagguuagggaggcgga

SEQ ID NO: 462728 - RNA, 32 nt, Human
gggagggaggggcagaguggagugucauucca

SEQ ID NO: 462729 - RNA, 32 nt, Human
gggagggaggggcagggagcugucuaccagcu

SEQ ID NO: 462730 - RNA, 32 nt, Human
gggagggaggggcccuggaggccacauccugc

SEQ ID NO: 462731 - RNA, 32 nt, Human
gggagggaggugggggcagcagaggccugggc

SEQ ID NO: 462732 - RNA, 32 nt, Human
gggagggaguaguuuggggaggagggugggaa

SEQ ID NO: 462733 - RNA, 32 nt, Human
gggagggaucacuguucuucuugcuuuuggcc

SEQ ID NO: 462734 - RNA, 23 nt, Human
gggagggaucuugguuccagggu

SEQ ID NO: 462735 - RNA, 32 nt, Human
gggagggauuccggaauugaggggcacgcagg

SEQ ID NO: 462736 - RNA, 32 nt, Human
gggagggcacgcgggcaagccuaggagaguag

SEQ ID NO: 462737 - RNA, 32 nt, Human
gggagggcagaggacagacagccccggggcug

SEQ ID NO: 462738 - RNA, 32 nt, Human
gggagggcagaggcaagguuaccagggcacca

SEQ ID NO: 462739 - RNA, 32 nt, Human
gggagggcagaggggaggcagcagggagagga

SEQ ID NO: 462740 - RNA, 32 nt, Human
gggagggcagggaggcuuuggugacaucauca

SEQ ID NO: 462741 - RNA, 32 nt, Human
gggagggcagggcaguuggaucacuugaggcc

SEQ ID NO: 462742 - RNA, 32 nt, Human
gggagggcagggcuggaucuucccugguggcu

SEQ ID NO: 462743 - RNA, 32 nt, Human
gggagggcaguuacaggagagaguagguggug

SEQ ID NO: 462744 - RNA, 19 nt, Human
gggagggccagcucuggga

SEQ ID NO: 462745 - RNA, 32 nt, Human
gggagggccaggauuccucucucaggucacuc

SEQ ID NO: 462746 - RNA, 32 nt, Human
gggagggccucauguuuuaucugguucuuaaa

SEQ ID NO: 462747 - RNA, 19 nt, Human
gggagggccuccugcggug

SEQ ID NO: 462748 - RNA, 32 nt, Human
gggagggccuggacugagggggaccaggucuu

SEQ ID NO: 462749 - RNA, 32 nt, Human
gggagggccuggcagagacugagcacuggccc

SEQ ID NO: 462750 - RNA, 32 nt, Human
gggagggcgaagaggaggaggaaggggaggac

SEQ ID NO: 462751 - RNA, 32 nt, Human
gggagggcgcugagggucacgcgaacaccgca

SEQ ID NO: 462752 - RNA, 32 nt, Human
gggagggcucccgagucucugccuucagcucc

SEQ ID NO: 462753 - RNA, 32 nt, Human
gggagggcugcccagcccuggccucacagccg

SEQ ID NO: 462754 - RNA, 19 nt, Human
gggagggcugccuggagga

SEQ ID NO: 462755 - RNA, 32 nt, Human
gggagggcugcugacuccaggcucagauuaaa

SEQ ID NO: 462756 - RNA, 17 nt, Human
gggagggcugcugggag

SEQ ID NO: 462757 - RNA, 32 nt, Human
gggagggcuggaagaaggggcagcagcuggca

SEQ ID NO: 462758 - RNA, 19 nt, Human
gggagggcuggggcuggga

SEQ ID NO: 462759 - RNA, 32 nt, Human
gggagggcuggggcuuucucugccugguacac

SEQ ID NO: 462760 - RNA, 32 nt, Human
gggagggcuguggugccggugcuuccaacaag

SEQ ID NO: 462761 - RNA, 22 nt, Human
gggaggggaaagaggaaacaga

SEQ ID NO: 462762 - RNA, 32 nt, Human
gggaggggaacagggaaggaagggauggaugg

SEQ ID NO: 462763 - RNA, 32 nt, Human
gggaggggacagaggcccugccacgucccgcu

SEQ ID NO: 462764 - RNA, 32 nt, Human
gggaggggaccuugguguucaggaagcgccag

SEQ ID NO: 462765 - RNA, 21 nt, Human
gggaggggacucgguccgggg

SEQ ID NO: 462766 - RNA, 32 nt, Human
gggaggggagaaaggggccaggggaugcgggg

SEQ ID NO: 462767 - RNA, 32 nt, Human
gggaggggagagaagagaaggagggaaggauu

SEQ ID NO: 462768 - RNA, 32 nt, Human
gggaggggagagaccacagccggguguguguc

SEQ ID NO: 462769 - RNA, 32 nt, Human
gggaggggagagaggugggggcaagggggaaa

SEQ ID NO: 462770 - RNA, 32 nt, Human
gggaggggagccuggcugcccugcugcuucuc

SEQ ID NO: 462771 - RNA, 18 nt, Human
gggaggggagcugaaagg

SEQ ID NO: 462772 - RNA, 32 nt, Human
gggaggggagcugcgcccucccugaccuccca

SEQ ID NO: 462773 - RNA, 32 nt, Human
gggaggggaggaggcaggagggcgcauggggc

SEQ ID NO: 462774 - RNA, 32 nt, Human
gggaggggaguguggcagggaggaggaagagg

SEQ ID NO: 462775 - RNA, 32 nt, Human
gggaggggcacgagaagagaggagcagggagg

SEQ ID NO: 462776 - RNA, 32 nt, Human
gggaggggcagaggaggggaaggaggagggcc

SEQ ID NO: 462777 - RNA, 20 nt, Human
gggaggggcagaguggagug

SEQ ID NO: 462778 - RNA, 32 nt, Human
gggaggggcaggaagaggugagaagaucagau

SEQ ID NO: 462779 - RNA, 24 nt, Human
gggaggggcaggggagaugugggg

SEQ ID NO: 462780 - RNA, 32 nt, Human
gggaggggcaggggagauguggggaaguccag

SEQ ID NO: 462781 - RNA, 32 nt, Human
gggaggggcagggggagaggcccccaucaggg

SEQ ID NO: 462782 - RNA, 32 nt, Human
gggaggggcccaggcagcugugcugguccaag

SEQ ID NO: 462783 - RNA, 32 nt, Human
gggaggggccccaguggcugagcuccaagugc

SEQ ID NO: 462784 - RNA, 32 nt, Human
gggaggggcccgccucggccccggcucagccc

SEQ ID NO: 462785 - RNA, 32 nt, Human
gggaggggccgccggcgaaaggagggggcccu

SEQ ID NO: 462786 - RNA, 26 nt, Human
gggaggggccggccggaccccggggu

SEQ ID NO: 462787 - RNA, 23 nt, Human
gggaggggccgguaaccccuggg

SEQ ID NO: 462788 - RNA, 32 nt, Human
gggaggggccgugcugaccucucccggggauc

SEQ ID NO: 462789 - RNA, 17 nt, Human
gggaggggcgccgggag

SEQ ID NO: 462790 - RNA, 32 nt, Human
gggaggggcgcgccauggaggcgccgggucgc

SEQ ID NO: 462791 - RNA, 32 nt, Human
gggaggggcggggcggggaggggccaggcggg

SEQ ID NO: 462792 - RNA, 20 nt, Human
gggaggggcuauagaguuuc

SEQ ID NO: 462793 - RNA, 32 nt, Human
gggaggggcucaagggagcccagcugggaggg

SEQ ID NO: 462794 - RNA, 32 nt, Human
gggaggggcuccauuuuaauauuauggcucag

SEQ ID NO: 462795 - RNA, 32 nt, Human
gggagggggaaagagcagcgaggagugaagcg

SEQ ID NO: 462796 - RNA, 18 nt, Human
gggagggggaagagcaga

SEQ ID NO: 462797 - RNA, 32 nt, Human
gggagggggacagaugugcuguguacaggaca

SEQ ID NO: 462798 - RNA, 32 nt, Human
gggagggggacaugaacagacacucuaccaca

SEQ ID NO: 462799 - RNA, 32 nt, Human
gggagggggagggagaaaauggggcuaugccu

SEQ ID NO: 462800 - RNA, 32 nt, Human
gggagggggagggagauagagggagagaugca

SEQ ID NO: 462801 - RNA, 32 nt, Human
gggagggggaggucaggggcagaggggaccca

SEQ ID NO: 462802 - RNA, 19 nt, Human
gggagggggcaccgggagg

SEQ ID NO: 462803 - RNA, 32 nt, Human
gggagggggcaggccaaugaggucugcauggc

SEQ ID NO: 462804 - RNA, 32 nt, Human
gggagggggcgcccaggagggguggggagggg

SEQ ID NO: 462805 - RNA, 19 nt, Human
gggagggggcggccggagg

SEQ ID NO: 462806 - RNA, 32 nt, Human
gggagggggcucaggccucagccucaagaucu

SEQ ID NO: 462807 - RNA, 21 nt, Human
gggagggggcugguugggaga

SEQ ID NO: 462808 - RNA, 32 nt, Human
gggagggggcuugaagccaaagaaaaauaacc

SEQ ID NO: 462809 - RNA, 20 nt, Human
gggaggggggaacuuacucu

SEQ ID NO: 462810 - RNA, 19 nt, Human
gggaggggggacugcgaga

SEQ ID NO: 462811 - RNA, 21 nt, Human
gggaggggggagggggaagca

SEQ ID NO: 462812 - RNA, 16 nt, Human
gggaggggggcaggga

SEQ ID NO: 462813 - RNA, 18 nt, Human
gggaggggggcgaggaga

SEQ ID NO: 462814 - RNA, 16 nt, Human
gggaggggggcuagga

SEQ ID NO: 462815 - RNA, 32 nt, Human
gggagggggucaggcugugcagaggagagaga

SEQ ID NO: 462816 - RNA, 32 nt, Human
gggagggggugagguggaauggggugggggaa

SEQ ID NO: 462817 - RNA, 32 nt, Human
gggagggggugcuuguauuuaucuuauuucca

SEQ ID NO: 462818 - RNA, 20 nt, Human
gggaggggguggccaaggga

SEQ ID NO: 462819 - RNA, 19 nt, Human
gggagggggugguaagaga

SEQ ID NO: 462820 - RNA, 32 nt, Human
gggaggggguuuuucccgcacccugggauggc

SEQ ID NO: 462821 - RNA, 32 nt, Human
gggagggguaggaggagagggaggaggguagg

SEQ ID NO: 462822 - RNA, 23 nt, Human
gggaggggucgcuggccccgggg

SEQ ID NO: 462823 - RNA, 21 nt, Human
gggaggggugaauaguguuuc

SEQ ID NO: 462824 - RNA, 32 nt, Human
gggaggggugccccagaggcaccagcuccugg

SEQ ID NO: 462825 - RNA, 18 nt, Human
gggaggggugcuggaaga

SEQ ID NO: 462826 - RNA, 19 nt, Human
gggaggggugugcuagaga

SEQ ID NO: 462827 - RNA, 20 nt, Human
gggagggguuaucugggaga

SEQ ID NO: 462828 - RNA, 32 nt, Human
gggaggguaaguggccuggugaguggagguag

SEQ ID NO: 462829 - RNA, 32 nt, Human
gggaggguaggcaggauuggggaagagagccu

SEQ ID NO: 462830 - RNA, 32 nt, Human
gggagggucccuuggaagcuggugaaguccug

SEQ ID NO: 462831 - RNA, 23 nt, Human
gggagggucgcuccacccuggag

SEQ ID NO: 462832 - RNA, 32 nt, Human
gggagggucugccuccccuuccucgcccugug

SEQ ID NO: 462833 - RNA, 32 nt, Human
gggagggugaacaguccccacagcagacagcu

SEQ ID NO: 462834 - RNA, 32 nt, Human
gggagggugacaggguggauagguacaggauu

SEQ ID NO: 462835 - RNA, 18 nt, Human
gggagggugacugggagg

SEQ ID NO: 462836 - RNA, 23 nt, Human
gggagggugaggcaggagaauca

SEQ ID NO: 462837 - RNA, 23 nt, Human
gggagggugaggcggguggauca

SEQ ID NO: 462838 - RNA, 32 nt, Human
gggagggugcggcagggcaggagcuuggcaga

SEQ ID NO: 462839 - RNA, 32 nt, Human
gggaggguggagggaggcaguguccuuccuga

SEQ ID NO: 462840 - RNA, 32 nt, Human
gggaggguggcauucuggacaugaggagcaaa

SEQ ID NO: 462841 - RNA, 32 nt, Human
gggaggguggccaggacaugcccgaggccgaa

SEQ ID NO: 462842 - RNA, 32 nt, Human
gggaggguggcguggcuuuaccccauggaggc

SEQ ID NO: 462843 - RNA, 23 nt, Human
gggagggugggaggccucggggu

SEQ ID NO: 462844 - RNA, 32 nt, Human
gggagggugggcaguggucuggaagcuugaug

SEQ ID NO: 462845 - RNA, 21 nt, Human
gggagggugggcccacugcuu

SEQ ID NO: 462846 - RNA, 32 nt, Human
gggaggguggggaugggaggggagagacagaa

SEQ ID NO: 462847 - RNA, 22 nt, Human
gggaggguguucaggacaggga

SEQ ID NO: 462848 - RNA, 32 nt, Human
gggaggguuagccugcaccgccgccacccugc

SEQ ID NO: 462849 - RNA, 32 nt, Human
gggaggguucagaaagaggaaugaagauguug

SEQ ID NO: 462850 - RNA, 32 nt, Human
gggaggguugggggaugugaggagggcaggga

SEQ ID NO: 462851 - RNA, 32 nt, Human
gggagguaaagaaaaaggacguuuacuaaaag

SEQ ID NO: 462852 - RNA, 22 nt, Human
gggagguagagguuacagcgag

SEQ ID NO: 462853 - RNA, 22 nt, Human
gggagguagauauaggccuguu

SEQ ID NO: 462854 - RNA, 19 nt, Human
gggagguagcugcuggcug

SEQ ID NO: 462855 - RNA, 22 nt, Human
gggagguaggacccgcuccgga

SEQ ID NO: 462856 - RNA, 32 nt, Human
gggagguagggaggggagcaggagcaagagcu

SEQ ID NO: 462857 - RNA, 32 nt, Human
gggagguaggguggggagcgggaacaagagcu

SEQ ID NO: 462858 - RNA, 32 nt, Human
gggagguaggguggggagcgggacgaagagcu

SEQ ID NO: 462859 - RNA, 32 nt, Human
gggagguaggguggggagcgggagaaagaccu

SEQ ID NO: 462860 - RNA, 32 nt, Human
gggaggucaaagaagaaagaauaugaaaaguu

SEQ ID NO: 462861 - RNA, 32 nt, Human
gggaggucaaagcugcagucagccaagaucuu

SEQ ID NO: 462862 - RNA, 23 nt, Human
gggaggucaaggcaggaagauca

SEQ ID NO: 462863 - RNA, 23 nt, Human
gggaggucaagguagguggauca

SEQ ID NO: 462864 - RNA, 32 nt, Human
gggaggucagggaacuccaggaccuuguucuc

SEQ ID NO: 462865 - RNA, 32 nt, Human
gggaggucagguggucaauguccuggugauuu

SEQ ID NO: 462866 - RNA, 23 nt, Human
gggagguccaggcaggaggauca

SEQ ID NO: 462867 - RNA, 22 nt, Human
gggagguccaggcagguggauc

SEQ ID NO: 462868 - RNA, 32 nt, Human
gggaggucccagaggugggaggcuggcaucca

SEQ ID NO: 462869 - RNA, 32 nt, Human
gggagguccugagugaggaaggcaugaccucu

SEQ ID NO: 462870 - RNA, 21 nt, Human
gggagguccuggccugggaga

SEQ ID NO: 462871 - RNA, 23 nt, Human
gggaggucgaggcaggaggauca

SEQ ID NO: 462872 - RNA, 23 nt, Human
gggaggucgaggcaggcagauca

SEQ ID NO: 462873 - RNA, 23 nt, Human
gggaggucgaggcaggcggauca

SEQ ID NO: 462874 - RNA, 23 nt, Human
gggaggucgaggcagguagauca

SEQ ID NO: 462875 - RNA, 23 nt, Human
gggaggucgaggcagguggauca

SEQ ID NO: 462876 - RNA, 23 nt, Human
gggaggucgaggcagguggaucg

SEQ ID NO: 462877 - RNA, 23 nt, Human
gggaggucgaggcgggcagauca

SEQ ID NO: 462878 - RNA, 23 nt, Human
gggaggucgagguaggcagauca

SEQ ID NO: 462879 - RNA, 23 nt, Human
gggaggucgagguagguggauca

SEQ ID NO: 462880 - RNA, 17 nt, Human
gggaggucgaguggggu

SEQ ID NO: 462881 - RNA, 32 nt, Human
gggaggucgucacuggggugggagaagagggg

SEQ ID NO: 462882 - RNA, 32 nt, Human
gggaggucgucucucaucccugccucaucuuc

SEQ ID NO: 462883 - RNA, 25 nt, Human
gggaggucugaucauuguuggugga

SEQ ID NO: 462884 - RNA, 20 nt, Human
gggaggucuggaccacccag

SEQ ID NO: 462885 - RNA, 32 nt, Human
gggaggucuugcuauguugcccaggcuggucu

SEQ ID NO: 462886 - RNA, 32 nt, Human
gggaggucuugucuccccuccugggcuuuccu

SEQ ID NO: 462887 - RNA, 32 nt, Human
gggaggugaaggcagagguggaggacauggac

SEQ ID NO: 462888 - RNA, 32 nt, Human
gggaggugacauagcaagacccugucaaagaa

SEQ ID NO: 462889 - RNA, 32 nt, Human
gggaggugacuccggcggaagaggacaaggca

SEQ ID NO: 462890 - RNA, 19 nt, Human
gggaggugagggagugggg

SEQ ID NO: 462891 - RNA, 23 nt, Human
gggaggugauuggaucauggggg

SEQ ID NO: 462892 - RNA, 24 nt, Human
gggaggugauuggaucauggggga

SEQ ID NO: 462893 - RNA, 23 nt, Human
gggaggugcaaugggaugggagg

SEQ ID NO: 462894 - RNA, 32 nt, Human
gggaggugcaaugggaugggaggcaggaugcu

SEQ ID NO: 462895 - RNA, 32 nt, Human
gggaggugcaauuucucagauugguaaaaauu

SEQ ID NO: 462896 - RNA, 24 nt, Human
gggaggugcauggggcaggcggga

SEQ ID NO: 462897 - RNA, 32 nt, Human
gggaggugcccagguggguggaccaguacucc

SEQ ID NO: 462898 - RNA, 32 nt, Human
gggaggugcugaccccucagaaaccccuuccc

SEQ ID NO: 462899 - RNA, 32 nt, Human
gggagguggaaguugcagugggccaagaucau

SEQ ID NO: 462900 - RNA, 32 nt, Human
gggagguggaggcaggcacugaauaagguccc

SEQ ID NO: 462901 - RNA, 32 nt, Human
gggagguggaggcagugagcugagaucgugcc

SEQ ID NO: 462902 - RNA, 23 nt, Human
gggagguggaggcggguggauca

SEQ ID NO: 462903 - RNA, 32 nt, Human
gggagguggaggcugcaaugagcugagaucau

SEQ ID NO: 462904 - RNA, 32 nt, Human
gggagguggagggagacaggagagaaacgaag

SEQ ID NO: 462905 - RNA, 32 nt, Human
gggagguggaggggaggcugcagugagcugag

SEQ ID NO: 462906 - RNA, 32 nt, Human
gggagguggagguggaaaacgugauugagugg

SEQ ID NO: 462907 - RNA, 32 nt, Human
gggagguggagguggagguugcagugagccga

SEQ ID NO: 462908 - RNA, 32 nt, Human
gggagguggagguggcagugagccgagauagc

SEQ ID NO: 462909 - RNA, 32 nt, Human
gggagguggagguggcagugagccgagaucac

SEQ ID NO: 462910 - RNA, 32 nt, Human
gggagguggagguggcagugagccgagauugc

SEQ ID NO: 462911 - RNA, 32 nt, Human
gggagguggaggugggaggauuauaaauagag

SEQ ID NO: 462912 - RNA, 32 nt, Human
gggagguggagguugaggugagcucagauugc

SEQ ID NO: 462913 - RNA, 32 nt, Human
gggagguggagguugcagugggccaagaucgc

SEQ ID NO: 462914 - RNA, 32 nt, Human
gggagguggagguugcagugggccaagaucgu

SEQ ID NO: 462915 - RNA, 32 nt, Human
gggagguggcacgggccagggcgcgggggccg

SEQ ID NO: 462916 - RNA, 32 nt, Human
gggagguggcucagaguccaccucucauugcu

SEQ ID NO: 462917 - RNA, 19 nt, Human
gggagguggcugcuggcug

SEQ ID NO: 462918 - RNA, 20 nt, Human
gggagguggggaccagcaga

SEQ ID NO: 462919 - RNA, 19 nt, Human
gggagguggggcuggggga

SEQ ID NO: 462920 - RNA, 32 nt, Human
gggaggugggguagggaggaguguaggaugcc

SEQ ID NO: 462921 - RNA, 32 nt, Human
gggaggugggugagacagaggguggggaggau

SEQ ID NO: 462922 - RNA, 32 nt, Human
gggagguggguggaucaccugaggucgggagu

SEQ ID NO: 462923 - RNA, 31 nt, Human
gggaggugggugggucaggugaguggaaggg

SEQ ID NO: 462924 - RNA, 24 nt, Human
gggagguggguggugugcuugcua

SEQ ID NO: 462925 - RNA, 32 nt, Human
gggaggugguaagaacaccugacaacuucuga

SEQ ID NO: 462926 - RNA, 23 nt, Human
gggagguggucauagagucaggg

SEQ ID NO: 462927 - RNA, 23 nt, Human
gggagguggucauguccaggggg

SEQ ID NO: 462928 - RNA, 24 nt, Human
gggagguggugcugccccaguggg

SEQ ID NO: 462929 - RNA, 32 nt, Human
gggaggugugugaccuggggaugguggagggu

SEQ ID NO: 462930 - RNA, 23 nt, Human
gggagguuaaggcaggcggauca

SEQ ID NO: 462931 - RNA, 32 nt, Human
gggagguuagggagguuugaagagugagaaga

SEQ ID NO: 462932 - RNA, 32 nt, Human
gggagguuauaugugguaggggagggcaugag

SEQ ID NO: 462933 - RNA, 32 nt, Human
gggagguuccaccgcaccccugcccucaaccg

SEQ ID NO: 462934 - RNA, 32 nt, Human
gggagguucuccugccucuccucggccaggag

SEQ ID NO: 462935 - RNA, 32 nt, Human
gggagguugagcaggaggauugcuugagccca

SEQ ID NO: 462936 - RNA, 23 nt, Human
gggagguugaggcaggagaauca

SEQ ID NO: 462937 - RNA, 24 nt, Human
gggagguugaggcaggagaaucau

SEQ ID NO: 462938 - RNA, 23 nt, Human
gggagguugaggcagguggauca

SEQ ID NO: 462939 - RNA, 23 nt, Human
gggagguugaggcggguggauca

SEQ ID NO: 462940 - RNA, 32 nt, Human
gggagguugaggcuacagggagccaugaucac

SEQ ID NO: 462941 - RNA, 32 nt, Human
gggagguugagugggcaucuuccugggaugca

SEQ ID NO: 462942 - RNA, 23 nt, Human
gggagguugaugcaggagaauca

SEQ ID NO: 462943 - RNA, 32 nt, Human
gggagguugcccauuguuugguugccagucau

SEQ ID NO: 462944 - RNA, 19 nt, Human
gggagguuucaugagcuca

SEQ ID NO: 462945 - RNA, 32 nt, Human
gggagguuugaaggggauccugggcuugggca

SEQ ID NO: 462946 - RNA, 32 nt, Human
gggagguuugcugggaccuuggcuccacccag

SEQ ID NO: 462947 - RNA, 19 nt, Human
gggagguuuuagggcccuc

SEQ ID NO: 462948 - RNA, 32 nt, Human
gggagguuuuccaacuguuggaggcgccuuug

SEQ ID NO: 462949 - RNA, 21 nt, Human
gggaguaaagggcugccuucc

SEQ ID NO: 462950 - RNA, 32 nt, Human
gggaguaaggagaaugaauuccaaucugugau

SEQ ID NO: 462951 - RNA, 32 nt, Human
gggaguagcagaggcccugucuucugaagucu

SEQ ID NO: 462952 - RNA, 30 nt, Human
gggaguagccucugauccuuuuguuacuua

SEQ ID NO: 462953 - RNA, 32 nt, Human
gggaguagcuacagcaagccucauaccaaaug

SEQ ID NO: 462954 - RNA, 32 nt, Human
gggaguaggaacgggagcaggagcgcgaccuu

SEQ ID NO: 462955 - RNA, 32 nt, Human
gggaguaggagaggggacaauuuaggacuggg

SEQ ID NO: 462956 - RNA, 19 nt, Human
gggaguaggaggccucagg

SEQ ID NO: 462957 - RNA, 32 nt, Human
gggaguaggcuugagcccuaccuuacacgucu

SEQ ID NO: 462958 - RNA, 32 nt, Human
gggaguagggcccggcagggaggcagggaggc

SEQ ID NO: 462959 - RNA, 32 nt, Human
gggagucaaaaugcuuccuggugccgggagug

SEQ ID NO: 462960 - RNA, 18 nt, Human
gggagucaaggcugcagu

SEQ ID NO: 462961 - RNA, 21 nt, Human
gggagucacaaaccugcucug

SEQ ID NO: 462962 - RNA, 31 nt, Human
gggagucacagcuaugccagcugggccauuu

SEQ ID NO: 462963 - RNA, 32 nt, Human
gggagucacccaagccuucuucucccagauac

SEQ ID NO: 462964 - RNA, 32 nt, Human
gggagucacugaugcugccucugccuucugau

SEQ ID NO: 462965 - RNA, 32 nt, Human
gggagucagagcccuggcuggguucagguccc

SEQ ID NO: 462966 - RNA, 32 nt, Human
gggagucagcugcucaucugcaggcuaauggc

SEQ ID NO: 462967 - RNA, 32 nt, Human
gggagucaggagacccggguucuuguguuggc

SEQ ID NO: 462968 - RNA, 32 nt, Human
gggagucaugccacuccccacuguggccauag

SEQ ID NO: 462969 - RNA, 32 nt, Human
gggaguccaaggagggggaucgcuugagucca

SEQ ID NO: 462970 - RNA, 32 nt, Human
gggaguccacaucuggcuuucucagccacugu

SEQ ID NO: 462971 - RNA, 32 nt, Human
gggaguccagagaggcaggaggauggagcucg

SEQ ID NO: 462972 - RNA, 20 nt, Human
gggaguccagccccaaggga

SEQ ID NO: 462973 - RNA, 32 nt, Human
gggaguccaugucccagccacaccucagggcu

SEQ ID NO: 462974 - RNA, 32 nt, Human
gggagucccugccucuccucccugggacaaua

SEQ ID NO: 462975 - RNA, 23 nt, Human
gggaguccgaggcagguggauca

SEQ ID NO: 462976 - RNA, 23 nt, Human
gggaguccgaggcaugcggauca

SEQ ID NO: 462977 - RNA, 23 nt, Human
gggaguccgaggcgagugaauca

SEQ ID NO: 462978 - RNA, 23 nt, Human
gggaguccgaggcgggcggauca

SEQ ID NO: 462979 - RNA, 32 nt, Human
gggaguccuccacgggcaucucucuccuggcg

SEQ ID NO: 462980 - RNA, 27 nt, Human
gggaguccuggggaggcaggaggcaga

SEQ ID NO: 462981 - RNA, 32 nt, Human
gggaguccugguuuguuuuguuuuguuauuuu

SEQ ID NO: 462982 - RNA, 32 nt, Human
gggagucgcccaggcuggagagcgguggcgcg

SEQ ID NO: 462983 - RNA, 32 nt, Human
gggagucgcugcccgagcggagcugcucagcc

SEQ ID NO: 462984 - RNA, 24 nt, Human
gggagucggaaggaggaggacaga

SEQ ID NO: 462985 - RNA, 20 nt, Human
gggagucggggucucagaga

SEQ ID NO: 462986 - RNA, 32 nt, Human
gggagucgggguggcggccaggaggaaaggca

SEQ ID NO: 462987 - RNA, 32 nt, Human
gggagucucagcggggaacuucuaucaguauc

SEQ ID NO: 462988 - RNA, 23 nt, Human
gggagucugaggcaaggggauca

SEQ ID NO: 462989 - RNA, 21 nt, Human
gggagucugccuacccuccua

SEQ ID NO: 462990 - RNA, 32 nt, Human
gggagucuggaauuuugguaugugccaggcag

SEQ ID NO: 462991 - RNA, 32 nt, Human
gggagucuggggacucagcgggccagagagcg

SEQ ID NO: 462992 - RNA, 24 nt, Human
gggagucuguggccguccagguga

SEQ ID NO: 462993 - RNA, 32 nt, Human
gggagucuucagaauagaaacuacccaucuca

SEQ ID NO: 462994 - RNA, 32 nt, Human
gggagucuugcugugccacacagcuccccacc

SEQ ID NO: 462995 - RNA, 32 nt, Human
gggagucuuguucugucacccaggcuggagug

SEQ ID NO: 462996 - RNA, 32 nt, Human
gggagugaacgguccaaccucugcauucaguu

SEQ ID NO: 462997 - RNA, 32 nt, Human
gggagugaagacaaucagaacuuugagaguuc

SEQ ID NO: 462998 - RNA, 24 nt, Human
gggagugaagagccugcccuccua

SEQ ID NO: 462999 - RNA, 19 nt, Human
gggagugaagcuccaggca

SEQ ID NO: 463000 - RNA, 32 nt, Human
gggagugaauaaggagacuuuuagguguugcc

SEQ ID NO: 463001 - RNA, 20 nt, Human
gggagugacaagcucagaga

SEQ ID NO: 463002 - RNA, 21 nt, Human
gggagugacaguggcuggaga

SEQ ID NO: 463003 - RNA, 21 nt, Human
gggagugagagccaccccgug

SEQ ID NO: 463004 - RNA, 32 nt, Human
gggagugagagggguauuuaauuccccuacua

SEQ ID NO: 463005 - RNA, 32 nt, Human
gggagugagccccagccguggcucaaggcaca

SEQ ID NO: 463006 - RNA, 32 nt, Human
gggagugagcggcuggcucucaguccccgccu

SEQ ID NO: 463007 - RNA, 21 nt, Human
gggagugaggaaugugggaga

SEQ ID NO: 463008 - RNA, 32 nt, Human
gggagugagggaagggacagggaggggaagcc

SEQ ID NO: 463009 - RNA, 32 nt, Human
gggagugaggggcaguggugcccuuccugcag

SEQ ID NO: 463010 - RNA, 31 nt, Human
gggagugcacuuuuugacuguagauuguucg

SEQ ID NO: 463011 - RNA, 32 nt, Human
gggagugcagaagucucagggccuggcugcga

SEQ ID NO: 463012 - RNA, 32 nt, Human
gggagugcagagccagggagagggguaccagg

SEQ ID NO: 463013 - RNA, 32 nt, Human
gggagugcagcaguuggccugcuugucuggcg

SEQ ID NO: 463014 - RNA, 32 nt, Human
gggagugcaguggcaguggcaugauaucagcu

SEQ ID NO: 463015 - RNA, 32 nt, Human
gggagugcaguggcaucauaggucacuguagc

SEQ ID NO: 463016 - RNA, 32 nt, Human
gggagugcaguggcaugaucucagcucacuga

SEQ ID NO: 463017 - RNA, 32 nt, Human
gggaguggaagaaggaucuaaagggaaaaacu

SEQ ID NO: 463018 - RNA, 21 nt, Human
gggaguggagcagcccgggcc

SEQ ID NO: 463019 - RNA, 32 nt, Human
gggaguggagcagcccgggccagccuucuccu

SEQ ID NO: 463020 - RNA, 32 nt, Human
gggaguggagccugggccugaggucuccugug

SEQ ID NO: 463021 - RNA, 32 nt, Human
gggaguggagcugggcuggcugggcaggcagg

SEQ ID NO: 463022 - RNA, 32 nt, Human
gggaguggaggcaccggcuggcgggcgggggu

SEQ ID NO: 463023 - RNA, 32 nt, Human
gggaguggaggguggaggaacguguggaguuu

SEQ ID NO: 463024 - RNA, 32 nt, Human
gggaguggcaacugucaggcagaggaaagaac

SEQ ID NO: 463025 - RNA, 32 nt, Human
gggaguggccagcggcccugcccagauuaagc

SEQ ID NO: 463026 - RNA, 32 nt, Human
gggaguggccaggucaggcaggccagucgucu

SEQ ID NO: 463027 - RNA, 32 nt, Human
gggaguggcgagcccagcugcccagcccugcc

SEQ ID NO: 463028 - RNA, 19 nt, Human
gggagugggcugaagggag

SEQ ID NO: 463029 - RNA, 26 nt, Human
gggagugggcugaaggugaagggagg

SEQ ID NO: 463030 - RNA, 17 nt, Human
gggaguggggcugggga

SEQ ID NO: 463031 - RNA, 32 nt, Human
gggagugggggaaacacuuuucacugcagagu

SEQ ID NO: 463032 - RNA, 28 nt, Human
gggagugggugaccugccucaucacugc

SEQ ID NO: 463033 - RNA, 32 nt, Human
gggaguggucguauuaacuucuugcccaaaga

SEQ ID NO: 463034 - RNA, 32 nt, Human
gggaguggugccuguggacacaggacuagacc

SEQ ID NO: 463035 - RNA, 32 nt, Human
gggagugguggagccggaggggauaguggggg

SEQ ID NO: 463036 - RNA, 32 nt, Human
gggagugguggagcugggccaggcaggaagac

SEQ ID NO: 463037 - RNA, 19 nt, Human
gggaguggugggaagggag

SEQ ID NO: 463038 - RNA, 20 nt, Human
gggaguguagagaagacaga

SEQ ID NO: 463039 - RNA, 32 nt, Human
gggagugucauccuuacaaaccacagcaugcc

SEQ ID NO: 463040 - RNA, 22 nt, Human
gggaguguccaucaucagggga

SEQ ID NO: 463041 - RNA, 32 nt, Human
gggagugucucauuuuucuacuucccucuuuc

SEQ ID NO: 463042 - RNA, 32 nt, Human
gggagugugaggagaggguggcaucaggagcu

SEQ ID NO: 463043 - RNA, 32 nt, Human
gggaguguuauuagaaugaaaaguaauuaguu

SEQ ID NO: 463044 - RNA, 32 nt, Human
gggaguguuuagagcaguuucaaagaugagag

SEQ ID NO: 463045 - RNA, 32 nt, Human
gggaguuaaagaccagccugaccgacauggag

SEQ ID NO: 463046 - RNA, 32 nt, Human
gggaguuaacacagcagcugacuccucuaggc

SEQ ID NO: 463047 - RNA, 22 nt, Human
gggaguuacggguggagggagg

SEQ ID NO: 463048 - RNA, 32 nt, Human
gggaguuagaaaccagccuggccaacauggca

SEQ ID NO: 463049 - RNA, 32 nt, Human
gggaguucaaaaccagccugggcaacauagca

SEQ ID NO: 463050 - RNA, 32 nt, Human
gggaguucaagaccagccuagcccacauggcc

SEQ ID NO: 463051 - RNA, 32 nt, Human
gggaguucaagaccagccugaccaacacggag

SEQ ID NO: 463052 - RNA, 32 nt, Human
gggaguucaagaccagccugaccaacauggag

SEQ ID NO: 463053 - RNA, 32 nt, Human
gggaguucaagaccagccugaccaacguggag

SEQ ID NO: 463054 - RNA, 32 nt, Human
gggaguucaagaccagccugaugaacauggag

SEQ ID NO: 463055 - RNA, 32 nt, Human
gggaguucaagaccagccuggccaacauagug

SEQ ID NO: 463056 - RNA, 32 nt, Human
gggaguucaagaccagccuggccaacauggcg

SEQ ID NO: 463057 - RNA, 32 nt, Human
gggaguucaagaccagccuggccaacaugggg

SEQ ID NO: 463058 - RNA, 32 nt, Human
gggaguucaagaccagccuggccaacauggug

SEQ ID NO: 463059 - RNA, 32 nt, Human
gggaguucaagaccagccuggccaacauguca

SEQ ID NO: 463060 - RNA, 32 nt, Human
gggaguucaagaccagccuggccaucauggug

SEQ ID NO: 463061 - RNA, 32 nt, Human
gggaguucaagaccagccugggcaacauagug

SEQ ID NO: 463062 - RNA, 32 nt, Human
gggaguucaagaccagccugggcaacauggca

SEQ ID NO: 463063 - RNA, 32 nt, Human
gggaguucaagaccagccuggucaacauggug

SEQ ID NO: 463064 - RNA, 32 nt, Human
gggaguucacaaccagccugaccaacauggag

SEQ ID NO: 463065 - RNA, 32 nt, Human
gggaguucagaaccagccuggacaacauagug

SEQ ID NO: 463066 - RNA, 32 nt, Human
gggaguucagcugcuucucuugccuaaguauu

SEQ ID NO: 463067 - RNA, 32 nt, Human
gggaguucagguaggcugggccugugccucua

SEQ ID NO: 463068 - RNA, 32 nt, Human
gggaguucagguaucuguugugacuggugaag

SEQ ID NO: 463069 - RNA, 32 nt, Human
gggaguucauuucugaccuccucgcucuucag

SEQ ID NO: 463070 - RNA, 20 nt, Human
gggaguuccuacacacacuu

SEQ ID NO: 463071 - RNA, 32 nt, Human
gggaguuccucugaggcccaguccuggccccg

SEQ ID NO: 463072 - RNA, 32 nt, Human
gggaguucgaaaccagccugaccaaccuggag

SEQ ID NO: 463073 - RNA, 32 nt, Human
gggaguucgaaaccagccuggccaacaaggug

SEQ ID NO: 463074 - RNA, 32 nt, Human
gggaguucgagaccaaccugaccaacauggag

SEQ ID NO: 463075 - RNA, 32 nt, Human
gggaguucgagaccacccugaccaacauagag

SEQ ID NO: 463076 - RNA, 32 nt, Human
gggaguucgagaccagccugaccaacacggag

SEQ ID NO: 463077 - RNA, 32 nt, Human
gggaguucgagaccagccugaccaacauggag

SEQ ID NO: 463078 - RNA, 32 nt, Human
gggaguucgagaccagccugaccaacauggug

SEQ ID NO: 463079 - RNA, 32 nt, Human
gggaguucgagaccagccugaccagcauggug

SEQ ID NO: 463080 - RNA, 32 nt, Human
gggaguucgagaccagccugagcaacauggcg

SEQ ID NO: 463081 - RNA, 32 nt, Human
gggaguucgagaccagccuggccaacacuggu

SEQ ID NO: 463082 - RNA, 32 nt, Human
gggaguucgagaccagccuggccaacauagca

SEQ ID NO: 463083 - RNA, 32 nt, Human
gggaguucgagaccagccuggccaacaugccu

SEQ ID NO: 463084 - RNA, 32 nt, Human
gggaguucgagaccagccuggccaacuuggug

SEQ ID NO: 463085 - RNA, 32 nt, Human
gggaguucgagaccagccuggccaauauggug

SEQ ID NO: 463086 - RNA, 32 nt, Human
gggaguucgagaccagccugggcaacauagug

SEQ ID NO: 463087 - RNA, 32 nt, Human
gggaguucgagaccagccugggcaacauggug

SEQ ID NO: 463088 - RNA, 32 nt, Human
gggaguucgagaccagccuguccaacauggcg

SEQ ID NO: 463089 - RNA, 32 nt, Human
gggaguucgagaccagccuuaccaacauggag

SEQ ID NO: 463090 - RNA, 32 nt, Human
gggaguucgagaccagcgugaccaacguggag

SEQ ID NO: 463091 - RNA, 32 nt, Human
gggaguucgagaccagucugaccaacacggag

SEQ ID NO: 463092 - RNA, 32 nt, Human
gggaguucgagacuaaacugaccaacauggag

SEQ ID NO: 463093 - RNA, 32 nt, Human
gggaguucgagacuagccugaccaacauggag

SEQ ID NO: 463094 - RNA, 32 nt, Human
gggaguucgaggccagccugaccaacauggag

SEQ ID NO: 463095 - RNA, 32 nt, Human
gggaguucgaggccagccugaccaacguggag

SEQ ID NO: 463096 - RNA, 32 nt, Human
gggaguucgcgaccagccugaccaacauggaa

SEQ ID NO: 463097 - RNA, 32 nt, Human
gggaguucgggaccagccuagccuacauggug

SEQ ID NO: 463098 - RNA, 32 nt, Human
gggaguucuaaaggaaauuaaacauagcauga

SEQ ID NO: 463099 - RNA, 32 nt, Human
gggaguucuagaccagccugaccaacauggag

SEQ ID NO: 463100 - RNA, 32 nt, Human
gggaguugaagcuggaggauuacuugaggcca

SEQ ID NO: 463101 - RNA, 32 nt, Human
gggaguugaggguaggguggugucagcaauuc

SEQ ID NO: 463102 - RNA, 32 nt, Human
gggaguugccccuucccaguaaaagaguugca

SEQ ID NO: 463103 - RNA, 32 nt, Human
gggaguugcucaggcauccaggaaaagugggg

SEQ ID NO: 463104 - RNA, 32 nt, Human
gggaguuggaagcuggugugaggcucucaugg

SEQ ID NO: 463105 - RNA, 32 nt, Human
gggaguuggagaccagccugaccaacauggag

SEQ ID NO: 463106 - RNA, 32 nt, Human
gggaguuggagaccagccugagcaacauagug

SEQ ID NO: 463107 - RNA, 32 nt, Human
gggaguuggagaccagccuggaugacauaaug

SEQ ID NO: 463108 - RNA, 32 nt, Human
gggaguuggagaccagccugggcaacauagca

SEQ ID NO: 463109 - RNA, 32 nt, Human
gggaguuggcugcugaggagccuagauacgga

SEQ ID NO: 463110 - RNA, 23 nt, Human
gggaguuggggagagaaggcaga

SEQ ID NO: 463111 - RNA, 32 nt, Human
gggaguuggugcuucuugucucugggucucca

SEQ ID NO: 463112 - RNA, 32 nt, Human
gggaguuuaagaccagccuggccaacuuggug

SEQ ID NO: 463113 - RNA, 32 nt, Human
gggaguuuagguccaauuugggcaagguuguu

SEQ ID NO: 463114 - RNA, 32 nt, Human
gggaguuucuauuuuccucccuucucagacag

SEQ ID NO: 463115 - RNA, 32 nt, Human
gggaguuugacagaggaaguggaugccuuugg

SEQ ID NO: 463116 - RNA, 32 nt, Human
gggaguuugagaccagccucaucaacacagug

SEQ ID NO: 463117 - RNA, 32 nt, Human
gggaguuugagaccagccugaccaacauggag

SEQ ID NO: 463118 - RNA, 32 nt, Human
gggaguuugagaccagccugaccaacauggug

SEQ ID NO: 463119 - RNA, 32 nt, Human
gggaguuugagaccagccugacuaacacagug

SEQ ID NO: 463120 - RNA, 32 nt, Human
gggaguuugagaccagccuggccaacauggug

SEQ ID NO: 463121 - RNA, 32 nt, Human
gggaguuugagaccagccugggcaacauagcg

SEQ ID NO: 463122 - RNA, 32 nt, Human
gggaguuugagaccagccugggcaacaugggg

SEQ ID NO: 463123 - RNA, 32 nt, Human
gggaguuugagaccagucugaccaacauggag

SEQ ID NO: 463124 - RNA, 32 nt, Human
gggaguuuuccuaaacgaucacucuggugcgg

SEQ ID NO: 463125 - RNA, 30 nt, Human
gggaguuuucuuuguuugcuccuguguuug

SEQ ID NO: 463126 - RNA, 32 nt, Human
gggauaaaagugggcugggcgcaguggcucac

SEQ ID NO: 463127 - RNA, 32 nt, Human
gggauaaagagcuuccucacuggaugggaccc

SEQ ID NO: 463128 - RNA, 32 nt, Human
gggauaaagcugucucaugggugcuccauaua

SEQ ID NO: 463129 - RNA, 32 nt, Human
gggauaagccaccacacccagccuagagaccu

SEQ ID NO: 463130 - RNA, 32 nt, Human
gggauaaggaaaaauaaugugaaaguugcagu

SEQ ID NO: 463131 - RNA, 32 nt, Human
gggauaaggcuaaguucagaggauguggggag

SEQ ID NO: 463132 - RNA, 32 nt, Human
gggauaagguaaagcaacucagcugcuacagg

SEQ ID NO: 463133 - RNA, 32 nt, Human
gggauaaucuguucuucccaucugagaaaaga

SEQ ID NO: 463134 - RNA, 32 nt, Human
gggauaaugagcuggagggugcugggcaggag

SEQ ID NO: 463135 - RNA, 32 nt, Human
gggauaauggauuggagauggcuauguguaaa

SEQ ID NO: 463136 - RNA, 32 nt, Human
gggauaauuguuauggacccaugugugggcau

SEQ ID NO: 463137 - RNA, 32 nt, Human
gggauacagagccaggaguggaacugcugagu

SEQ ID NO: 463138 - RNA, 25 nt, Human
gggauacagguguuauuucagguga

SEQ ID NO: 463139 - RNA, 25 nt, Human
gggauacauagggucaaauugagaa

SEQ ID NO: 463140 - RNA, 32 nt, Human
gggauacauaugcaaaacaugcauguuuguua

SEQ ID NO: 463141 - RNA, 32 nt, Human
gggauaccacuuccuguccacaccccgaccag

SEQ ID NO: 463142 - RNA, 32 nt, Human
gggauacccuuguugccuaccuccaaguaauu

SEQ ID NO: 463143 - RNA, 32 nt, Human
gggauaccugggaggaugggguggaaucugag

SEQ ID NO: 463144 - RNA, 32 nt, Human
gggauaccuuguuuauaguaccuucucuuugc

SEQ ID NO: 463145 - RNA, 32 nt, Human
gggauacggcucccguuccuccagcaggcccu

SEQ ID NO: 463146 - RNA, 22 nt, Human
gggauacgguuaaauccaguga

SEQ ID NO: 463147 - RNA, 28 nt, Human
gggauacuggauagggcugaccagguga

SEQ ID NO: 463148 - RNA, 32 nt, Human
gggauagagagggagccagacggacagccagc

SEQ ID NO: 463149 - RNA, 31 nt, Human
gggauaggcaaagggaccaguaucagguuau

SEQ ID NO: 463150 - RNA, 32 nt, Human
gggauaggggcagaggaggcgaggaggccguu

SEQ ID NO: 463151 - RNA, 32 nt, Human
gggauagguagaggagagagacagcaagaaaa

SEQ ID NO: 463152 - RNA, 21 nt, Human
gggauaggugccauuuggugg

SEQ ID NO: 463153 - RNA, 32 nt, Human
gggauagucgucucuucaucagucucccccga

SEQ ID NO: 463154 - RNA, 32 nt, Human
gggauagugauggacaucugaggaagagguaa

SEQ ID NO: 463155 - RNA, 21 nt, Human
gggauaguuaccaagaaccuc

SEQ ID NO: 463156 - RNA, 32 nt, Human
gggauauaauuucucuucuuggcuccaccagu

SEQ ID NO: 463157 - RNA, 30 nt, Human
gggauaugaauagcuucuucggaaccccag

SEQ ID NO: 463158 - RNA, 24 nt, Human
gggauaugacuuagaaccaggugg

SEQ ID NO: 463159 - RNA, 32 nt, Human
gggauauggcaggaaucaaaauaaacuuaucu

SEQ ID NO: 463160 - RNA, 20 nt, Human
gggauauggcuggcuggcug

SEQ ID NO: 463161 - RNA, 32 nt, Human
gggauauucuucuucuccugcccuuggacauc

SEQ ID NO: 463162 - RNA, 32 nt, Human
gggauauucuugaagccacacauggcuggcgg

SEQ ID NO: 463163 - RNA, 32 nt, Human
gggauauuuaagguagcuucagcuagcuuuua

SEQ ID NO: 463164 - RNA, 20 nt, Human
gggaucaaagcuauccaggu

SEQ ID NO: 463165 - RNA, 32 nt, Human
gggaucaaaugagauaaugucugggacaguac

SEQ ID NO: 463166 - RNA, 32 nt, Human
gggaucaagggacaggccaggagccaggagug

SEQ ID NO: 463167 - RNA, 32 nt, Human
gggaucaaugccggcggccucugugaugguug

SEQ ID NO: 463168 - RNA, 32 nt, Human
gggaucacaaauucuguucauuggaaaggguu

SEQ ID NO: 463169 - RNA, 32 nt, Human
gggaucacaccacugcacuccagccuggguga

SEQ ID NO: 463170 - RNA, 32 nt, Human
gggaucacaccacugcacuucagccugggcaa

SEQ ID NO: 463171 - RNA, 32 nt, Human
gggaucacagccccuccaggcaagggagaagu

SEQ ID NO: 463172 - RNA, 32 nt, Human
gggaucacagcugcaggccacgcccagcuucc

SEQ ID NO: 463173 - RNA, 19 nt, Human
gggaucacaggcaugagcc

SEQ ID NO: 463174 - RNA, 32 nt, Human
gggaucaccugagcccaggaguuuggaccagc

SEQ ID NO: 463175 - RNA, 32 nt, Human
gggaucacgccacugaacuccagccuggguga

SEQ ID NO: 463176 - RNA, 32 nt, Human
gggaucacgccacugcacuccagcuuggguga

SEQ ID NO: 463177 - RNA, 32 nt, Human
gggaucacgccuguaaucccagcacuuaggga

SEQ ID NO: 463178 - RNA, 32 nt, Human
gggaucacgucacugcauuccagccuggauaa

SEQ ID NO: 463179 - RNA, 32 nt, Human
gggaucacugcaaccucugccuccuggguuca

SEQ ID NO: 463180 - RNA, 32 nt, Human
gggaucagacacaccugucuucaguggcuugc

SEQ ID NO: 463181 - RNA, 32 nt, Human
gggaucagagcagaaaccuccuugucccucuc

SEQ ID NO: 463182 - RNA, 32 nt, Human
gggaucagcucauccaugagcuuguauugcuc

SEQ ID NO: 463183 - RNA, 22 nt, Human
gggaucaggaugacaguccuuc

SEQ ID NO: 463184 - RNA, 32 nt, Human
gggaucaggcaggaggaguuugggagaaaccu

SEQ ID NO: 463185 - RNA, 32 nt, Human
gggaucaggccccagagcuugcuguccccuga

SEQ ID NO: 463186 - RNA, 32 nt, Human
gggaucagggagguggagggacagugugaaua

SEQ ID NO: 463187 - RNA, 32 nt, Human
gggaucaucacuucucggaugcucugugcagg

SEQ ID NO: 463188 - RNA, 31 nt, Human
gggaucaugguggcguugcggggccuuggua

SEQ ID NO: 463189 - RNA, 32 nt, Human
gggaucauugcagacucugccucucaggcuca

SEQ ID NO: 463190 - RNA, 32 nt, Human
gggauccacuuguuuaccgacagccccaagga

SEQ ID NO: 463191 - RNA, 32 nt, Human
gggauccagcacucaaggcagcucccuagggc

SEQ ID NO: 463192 - RNA, 17 nt, Human
gggauccagcccccuuc

SEQ ID NO: 463193 - RNA, 32 nt, Human
gggauccaggaggagcaggggccagcaguggg

SEQ ID NO: 463194 - RNA, 32 nt, Human
gggauccaggggaccugguuccaaucucagcc

SEQ ID NO: 463195 - RNA, 18 nt, Human
gggauccaggguggggug

SEQ ID NO: 463196 - RNA, 32 nt, Human
gggauccagugcagagauggggaggaggggcu

SEQ ID NO: 463197 - RNA, 32 nt, Human
gggauccauucccuguccccugcccacuaccu

SEQ ID NO: 463198 - RNA, 32 nt, Human
gggaucccacaaagugcugggauuacaggugu

SEQ ID NO: 463199 - RNA, 32 nt, Human
gggauccccugccuggugcccacacugccucg

SEQ ID NO: 463200 - RNA, 22 nt, Human
gggaucccggccagccagguga

SEQ ID NO: 463201 - RNA, 32 nt, Human
gggaucccguggggagagguuauaucagacug

SEQ ID NO: 463202 - RNA, 32 nt, Human
gggaucccuaacgugcccagcauguagauucu

SEQ ID NO: 463203 - RNA, 25 nt, Human
gggaucccugggggccauucaggga

SEQ ID NO: 463204 - RNA, 19 nt, Human
gggauccgaccccgggccg

SEQ ID NO: 463205 - RNA, 32 nt, Human
gggauccggccaggguggagugggugaggcag

SEQ ID NO: 463206 - RNA, 32 nt, Human
gggauccgggaccucagacuacucggguuugg

SEQ ID NO: 463207 - RNA, 32 nt, Human
gggauccucccaucucagcuuccugaggagcu

SEQ ID NO: 463208 - RNA, 32 nt, Human
gggauccucccccagccgcaaguccacgaaga

SEQ ID NO: 463209 - RNA, 32 nt, Human
gggauccugauugauugaaauucauguuuucu

SEQ ID NO: 463210 - RNA, 32 nt, Human
gggauccugcccuccagccccaacaaaggguu

SEQ ID NO: 463211 - RNA, 32 nt, Human
gggauccugccugccccuacccuggacuugcc

SEQ ID NO: 463212 - RNA, 32 nt, Human
gggauccugcgggaggaaguggggaaguuggg

SEQ ID NO: 463213 - RNA, 32 nt, Human
gggauccugggcuggaagaaaguucauaaaug

SEQ ID NO: 463214 - RNA, 32 nt, Human
gggauccuguacaacccuuuguggacccuuuu

SEQ ID NO: 463215 - RNA, 32 nt, Human
gggauccugugcaggggccaccugggagauag

SEQ ID NO: 463216 - RNA, 32 nt, Human
gggauccuucuuccugucccuggcuguugcug

SEQ ID NO: 463217 - RNA, 32 nt, Human
gggauccuuucauggcgucuucccaggaccuc

SEQ ID NO: 463218 - RNA, 32 nt, Human
gggaucgauauggagucaagcagcgggaacua

SEQ ID NO: 463219 - RNA, 32 nt, Human
gggaucgcaccacugcacuccagccugggcua

SEQ ID NO: 463220 - RNA, 32 nt, Human
gggaucgcaccacugcacuccagccuggguua

SEQ ID NO: 463221 - RNA, 32 nt, Human
gggaucgcaccgcugcacuccagccuggguga

SEQ ID NO: 463222 - RNA, 32 nt, Human
gggaucgcaguuuggaaacuccggcggcugcg

SEQ ID NO: 463223 - RNA, 32 nt, Human
gggaucgcgccacugcauuccagccuggacga

SEQ ID NO: 463224 - RNA, 32 nt, Human
gggaucgcgccacuguacuccagccuggguga

SEQ ID NO: 463225 - RNA, 32 nt, Human
gggaucgcgccauugcacuccagccuggcuga

SEQ ID NO: 463226 - RNA, 32 nt, Human
gggaucggaccagccacuguggcagaugggag

SEQ ID NO: 463227 - RNA, 32 nt, Human
gggaucggcugggugaggcugggcaggccuga

SEQ ID NO: 463228 - RNA, 32 nt, Human
gggaucgggcugagcaggagaacaucaccggc

SEQ ID NO: 463229 - RNA, 32 nt, Human
gggaucguaccacugcacuccagccugggcua

SEQ ID NO: 463230 - RNA, 32 nt, Human
gggaucguacuacugcacuccagcauggaaga

SEQ ID NO: 463231 - RNA, 32 nt, Human
gggaucgugccgcugcauccagccugagcaac

SEQ ID NO: 463232 - RNA, 32 nt, Human
gggaucguguggcagugaugcugccccgagug

SEQ ID NO: 463233 - RNA, 32 nt, Human
gggaucuagggcugugcaggacuugccuuguu

SEQ ID NO: 463234 - RNA, 32 nt, Human
gggaucucacuagguugcccaggcuggugucg

SEQ ID NO: 463235 - RNA, 32 nt, Human
gggaucucacuccaucacucaggcuggaguac

SEQ ID NO: 463236 - RNA, 32 nt, Human
gggaucucauggaccagaauggcccguggaga

SEQ ID NO: 463237 - RNA, 32 nt, Human
gggaucuccaucucucuucccuuccugcuguc

SEQ ID NO: 463238 - RNA, 29 nt, Human
gggaucuccauggcucaggagggacauag

SEQ ID NO: 463239 - RNA, 32 nt, Human
gggaucucugaggacaucuuaguucugaccuu

SEQ ID NO: 463240 - RNA, 32 nt, Human
gggaucucugcugaggcccggggaguuggggg

SEQ ID NO: 463241 - RNA, 32 nt, Human
gggaucucuguggcacugggccaccucauugg

SEQ ID NO: 463242 - RNA, 32 nt, Human
gggaucucuucucuccccuucaccauuacuca

SEQ ID NO: 463243 - RNA, 32 nt, Human
gggaucucuugaggcugggaggcggagguugc

SEQ ID NO: 463244 - RNA, 32 nt, Human
gggaucucuuucaaaugaaaaaggacagagcc

SEQ ID NO: 463245 - RNA, 19 nt, Human
gggaucugaaaaguggggu

SEQ ID NO: 463246 - RNA, 32 nt, Human
gggaucugagcuuguucaucuccagucgugac

SEQ ID NO: 463247 - RNA, 32 nt, Human
gggaucugcauuucuaacaggcuccugccccc

SEQ ID NO: 463248 - RNA, 32 nt, Human
gggaucugcccaggaauguugucaaguguaau

SEQ ID NO: 463249 - RNA, 31 nt, Human
gggaucugccucucuguggucuccauccuga

SEQ ID NO: 463250 - RNA, 32 nt, Human
gggaucugcgccaccagaaccuagccuccugc

SEQ ID NO: 463251 - RNA, 18 nt, Human
gggaucugcugggguggg

SEQ ID NO: 463252 - RNA, 32 nt, Human
gggaucugcuguccucccuuuugagucaguuc

SEQ ID NO: 463253 - RNA, 20 nt, Human
gggaucuggacaccugcccc

SEQ ID NO: 463254 - RNA, 32 nt, Human
gggaucugggcaaggugggugauuccucccag

SEQ ID NO: 463255 - RNA, 19 nt, Human
gggaucuggggauggggug

SEQ ID NO: 463256 - RNA, 32 nt, Human
gggaucuguaggagcaggacugcuagggccuc

SEQ ID NO: 463257 - RNA, 29 nt, Human
gggaucugucugugcuugcaggaaagucc

SEQ ID NO: 463258 - RNA, 32 nt, Human
gggaucuguuggggauuugaggugagaugaga

SEQ ID NO: 463259 - RNA, 32 nt, Human
gggaucuuacucuuucaucugauaccuuguuc

SEQ ID NO: 463260 - RNA, 32 nt, Human
gggaucuucaggaacuucugaccucaccaagu

SEQ ID NO: 463261 - RNA, 32 nt, Human
gggaucuuggguuggagggacagugaagcuua

SEQ ID NO: 463262 - RNA, 21 nt, Human
gggaugaaaggaaacaacaga

SEQ ID NO: 463263 - RNA, 32 nt, Human
gggaugaaauuucacagaacuaccacacaauc

SEQ ID NO: 463264 - RNA, 32 nt, Human
gggaugaagaauugacugggagcugaggaggg

SEQ ID NO: 463265 - RNA, 23 nt, Human
gggaugaagaccccacugggguu

SEQ ID NO: 463266 - RNA, 32 nt, Human
gggaugaagucuuggaaacacaucacaaacuc

SEQ ID NO: 463267 - RNA, 31 nt, Human
gggaugaaguuucaggacuauuucacucccu

SEQ ID NO: 463268 - RNA, 32 nt, Human
gggaugacaggaaggaaggaacacugggcaga

SEQ ID NO: 463269 - RNA, 32 nt, Human
gggaugacagggguucaaagagacaggguggu

SEQ ID NO: 463270 - RNA, 22 nt, Human
gggaugaccccacucagcucca

SEQ ID NO: 463271 - RNA, 32 nt, Human
gggaugacuccacccucagcuacugcccgugc

SEQ ID NO: 463272 - RNA, 32 nt, Human
gggaugacugauucuccuccgccaggccaccc

SEQ ID NO: 463273 - RNA, 32 nt, Human
gggaugagccucccaagcaucuuucccacuug

SEQ ID NO: 463274 - RNA, 30 nt, Human
gggaugagccucuccuugccccaguccugg

SEQ ID NO: 463275 - RNA, 28 nt, Human
gggaugagcgagguggaggcggcagcgg

SEQ ID NO: 463276 - RNA, 32 nt, Human
gggaugagcuuuugauuucuucucacuccccu

SEQ ID NO: 463277 - RNA, 32 nt, Human
gggaugaggaaggcuucaacuucuggcacuga

SEQ ID NO: 463278 - RNA, 19 nt, Human
gggaugaggacagcugggg

SEQ ID NO: 463279 - RNA, 32 nt, Human
gggaugaggagaggagaacagagggaugguga

SEQ ID NO: 463280 - RNA, 32 nt, Human
gggaugaggagguggagugcaggggauguuag

SEQ ID NO: 463281 - RNA, 32 nt, Human
gggaugaggaugacagagcaacccuucuccug

SEQ ID NO: 463282 - RNA, 20 nt, Human
gggaugaggcaaggcugccu

SEQ ID NO: 463283 - RNA, 32 nt, Human
gggaugaggcagcagguaggacagugaccucg

SEQ ID NO: 463284 - RNA, 32 nt, Human
gggaugaggcugggguugggaucugauguaug

SEQ ID NO: 463285 - RNA, 32 nt, Human
gggaugagggagcagagucuagggcaggcucc

SEQ ID NO: 463286 - RNA, 32 nt, Human
gggaugagggcagagagaggggagcccccucu

SEQ ID NO: 463287 - RNA, 32 nt, Human
gggaugagggcagggcccugccgcuccaccgc

SEQ ID NO: 463288 - RNA, 32 nt, Human
gggaugagucaggaggccuggaggcuugggga

SEQ ID NO: 463289 - RNA, 32 nt, Human
gggaugagucuauucuuggauuuugauguuua

SEQ ID NO: 463290 - RNA, 32 nt, Human
gggaugagucuugguguguucugcagggacag

SEQ ID NO: 463291 - RNA, 32 nt, Human
gggaugaucuggaggaggaggaaaaagauaca

SEQ ID NO: 463292 - RNA, 32 nt, Human
gggaugaugauacugaauagucuggaaugugg

SEQ ID NO: 463293 - RNA, 32 nt, Human
gggaugauucaccuccauauuuccuaagcagg

SEQ ID NO: 463294 - RNA, 22 nt, Human
gggaugauugcuugagcucagg

SEQ ID NO: 463295 - RNA, 32 nt, Human
gggaugauuguaggucaagagacugaagcaau

SEQ ID NO: 463296 - RNA, 32 nt, Human
gggaugauuguuugaguccaggaguuggaggc

SEQ ID NO: 463297 - RNA, 32 nt, Human
gggaugcaaaggccaacuucagccuggcacgg

SEQ ID NO: 463298 - RNA, 32 nt, Human
gggaugcacagagagggaaaauaaccugucca

SEQ ID NO: 463299 - RNA, 19 nt, Human
gggaugcagagccucagag

SEQ ID NO: 463300 - RNA, 32 nt, Human
gggaugcagauggccaagcucccacccugggu

SEQ ID NO: 463301 - RNA, 28 nt, Human
gggaugcagcagagaggagcagcuggaa

SEQ ID NO: 463302 - RNA, 32 nt, Human
gggaugcagcgaggcccugccuuccuagcaga

SEQ ID NO: 463303 - RNA, 19 nt, Human
gggaugcaggagcccuaua

SEQ ID NO: 463304 - RNA, 32 nt, Human
gggaugcagucaacaacacagagugcuggaag

SEQ ID NO: 463305 - RNA, 32 nt, Human
gggaugcaguuccagggcaggcaguagaggcc

SEQ ID NO: 463306 - RNA, 32 nt, Human
gggaugcauaauacacaaaggccagggagccu

SEQ ID NO: 463307 - RNA, 32 nt, Human
gggaugcauccccagcccaagucuccagccca

SEQ ID NO: 463308 - RNA, 32 nt, Human
gggaugcaucugugacuguuacugcaaaaggu

SEQ ID NO: 463309 - RNA, 32 nt, Human
gggaugcauuaggacuggccuaugcaucgaaa

SEQ ID NO: 463310 - RNA, 31 nt, Human
gggaugcauuauuucugacacccacaagcag

SEQ ID NO: 463311 - RNA, 32 nt, Human
gggaugccaccuggagccccacccaggagcug

SEQ ID NO: 463312 - RNA, 32 nt, Human
gggaugccagccaggcuugcagcugcuccauc

SEQ ID NO: 463313 - RNA, 32 nt, Human
gggaugccagcucuccccuuugugcuucccug

SEQ ID NO: 463314 - RNA, 28 nt, Human
gggaugcccaggaacgccucaucucagc

SEQ ID NO: 463315 - RNA, 32 nt, Human
gggaugcccaggagaggccauacuuucagggu

SEQ ID NO: 463316 - RNA, 32 nt, Human
gggaugccccuggcaugggguggguggaggcc

SEQ ID NO: 463317 - RNA, 32 nt, Human
gggaugcccugaguugcuucccauuuccucuu

SEQ ID NO: 463318 - RNA, 32 nt, Human
gggaugcccuggagguggcugagccccugucu

SEQ ID NO: 463319 - RNA, 32 nt, Human
gggaugccgcaaccucgacuucucagccuccu

SEQ ID NO: 463320 - RNA, 18 nt, Human
gggaugccgcagccuggc

SEQ ID NO: 463321 - RNA, 32 nt, Human
gggaugccuaucucccccuggcugagagugcc

SEQ ID NO: 463322 - RNA, 32 nt, Human
gggaugccuggcugcuggaguacauguguuca

SEQ ID NO: 463323 - RNA, 32 nt, Human
gggaugccuuagacggggugugcaguauuuua

SEQ ID NO: 463324 - RNA, 32 nt, Human
gggaugccuugguuuuuacugcucugagaauu

SEQ ID NO: 463325 - RNA, 22 nt, Human
gggaugcgaagccagcaagcuu

SEQ ID NO: 463326 - RNA, 22 nt, Human
gggaugcgaggguggccaguga

SEQ ID NO: 463327 - RNA, 24 nt, Human
gggaugcgccugaucaccagguga

SEQ ID NO: 463328 - RNA, 32 nt, Human
gggaugcgggcccuucuuccucccagaacacu

SEQ ID NO: 463329 - RNA, 32 nt, Human
gggaugcggggucuuugacugaagggguaggc

SEQ ID NO: 463330 - RNA, 17 nt, Human
gggaugcgguagcggcc

SEQ ID NO: 463331 - RNA, 18 nt, Human
gggaugcuaacuacaaca

SEQ ID NO: 463332 - RNA, 32 nt, Human
gggaugcuacagaugucauuugucucccgccc

SEQ ID NO: 463333 - RNA, 32 nt, Human
gggaugcuagccccagagaugccagcccuuca

SEQ ID NO: 463334 - RNA, 32 nt, Human
gggaugcuaugggagcuccuugcagccugaga

SEQ ID NO: 463335 - RNA, 32 nt, Human
gggaugcucaaggagcccugaggagaggccca

SEQ ID NO: 463336 - RNA, 32 nt, Human
gggaugcucaggggacagagaggcagagggac

SEQ ID NO: 463337 - RNA, 32 nt, Human
gggaugcuccucccuucucuaccucauggggg

SEQ ID NO: 463338 - RNA, 32 nt, Human
gggaugcucggcccuggcucugugccaggccg

SEQ ID NO: 463339 - RNA, 23 nt, Human
gggaugcugaggcgggcggauca

SEQ ID NO: 463340 - RNA, 32 nt, Human
gggaugcugaguggcccuguuuguagcugcug

SEQ ID NO: 463341 - RNA, 32 nt, Human
gggaugcugauggguuggagugccuaauggcu

SEQ ID NO: 463342 - RNA, 32 nt, Human
gggaugcugccucugcugcuucugccuucuuu

SEQ ID NO: 463343 - RNA, 32 nt, Human
gggaugcugccugagucacccaugaagacagg

SEQ ID NO: 463344 - RNA, 32 nt, Human
gggaugcugcuggcugcgcggcgcugagggcc

SEQ ID NO: 463345 - RNA, 32 nt, Human
gggaugcugggaagaacuagacacugggguca

SEQ ID NO: 463346 - RNA, 32 nt, Human
gggaugcuugcucuccacuuuucaaguggguc

SEQ ID NO: 463347 - RNA, 32 nt, Human
gggaugcuugggccugggucucuccgccagca

SEQ ID NO: 463348 - RNA, 32 nt, Human
gggauggaaauggugauuuuuacauguguccu

SEQ ID NO: 463349 - RNA, 21 nt, Human
gggauggaagggagcgcggug

SEQ ID NO: 463350 - RNA, 32 nt, Human
gggauggaaugcuccacggagcuccaggcuua

SEQ ID NO: 463351 - RNA, 28 nt, Human
gggauggacaacaagggcauauacccag

SEQ ID NO: 463352 - RNA, 32 nt, Human
gggauggacaucgagcgagucaacaucgucuu

SEQ ID NO: 463353 - RNA, 32 nt, Human
gggauggagaaagagaaagauggagagaguau

SEQ ID NO: 463354 - RNA, 32 nt, Human
gggauggagaccugcuccccagcucuuccugu

SEQ ID NO: 463355 - RNA, 31 nt, Human
gggauggagcacuucuucugguccuucauuc

SEQ ID NO: 463356 - RNA, 32 nt, Human
gggauggagccccagccccaccacucaccagc

SEQ ID NO: 463357 - RNA, 20 nt, Human
gggauggagcgagcgccgag

SEQ ID NO: 463358 - RNA, 32 nt, Human
gggauggagcugcuccccucacggcagcacca

SEQ ID NO: 463359 - RNA, 28 nt, Human
gggauggaggggacagaggcggcggcgg

SEQ ID NO: 463360 - RNA, 32 nt, Human
gggauggagguggaugcagcaguaguccccag

SEQ ID NO: 463361 - RNA, 32 nt, Human
gggauggagugcagggagccagcuggaaggga

SEQ ID NO: 463362 - RNA, 32 nt, Human
gggauggaguuucgcuguuguugcccaggcug

SEQ ID NO: 463363 - RNA, 32 nt, Human
gggauggauaaauacaaacacaucacaacgcc

SEQ ID NO: 463364 - RNA, 32 nt, Human
gggauggcacacugauguguuuaugcaccugu

SEQ ID NO: 463365 - RNA, 32 nt, Human
gggauggcacaggcaccauccaugcagauggc

SEQ ID NO: 463366 - RNA, 32 nt, Human
gggauggcagaggaggugaggagggaggaagc

SEQ ID NO: 463367 - RNA, 32 nt, Human
gggauggccagagaugcuggacuugccuaaaa

SEQ ID NO: 463368 - RNA, 32 nt, Human
gggauggccagugcacuccaaugaugggacag

SEQ ID NO: 463369 - RNA, 32 nt, Human
gggauggcccgcagccucaucggggccaagga

SEQ ID NO: 463370 - RNA, 28 nt, Human
gggauggcgcggagcugccucuccggga

SEQ ID NO: 463371 - RNA, 32 nt, Human
gggauggcgucgggacacuccugcggggguag

SEQ ID NO: 463372 - RNA, 32 nt, Human
gggauggcugagaaagcggcgcuaggaccccc

SEQ ID NO: 463373 - RNA, 31 nt, Human
gggauggcuuaacuguaccuguuuggaugcu

SEQ ID NO: 463374 - RNA, 32 nt, Human
gggaugggacaagaaguagggaacaggcaggg

SEQ ID NO: 463375 - RNA, 32 nt, Human
gggaugggacacagcacugggcugccaggauu

SEQ ID NO: 463376 - RNA, 32 nt, Human
gggaugggacgucccggggcugugcugacccc

SEQ ID NO: 463377 - RNA, 32 nt, Human
gggaugggagagaaggugagggagccggcgag

SEQ ID NO: 463378 - RNA, 17 nt, Human
gggaugggagaggggug

SEQ ID NO: 463379 - RNA, 32 nt, Human
gggaugggagcgaugcuuaucucucacagugu

SEQ ID NO: 463380 - RNA, 32 nt, Human
gggaugggaggcggaggguagagaugaacuca

SEQ ID NO: 463381 - RNA, 32 nt, Human
gggaugggaggggguagagggagccaggagca

SEQ ID NO: 463382 - RNA, 16 nt, Human
gggaugggaguggggu

SEQ ID NO: 463383 - RNA, 32 nt, Human
gggaugggauuccaaguaaacaguggaccguc

SEQ ID NO: 463384 - RNA, 32 nt, Human
gggaugggcaaggccuuccaggauaggcucag

SEQ ID NO: 463385 - RNA, 32 nt, Human
gggaugggcugaaggggcuccaggcaacugag

SEQ ID NO: 463386 - RNA, 32 nt, Human
gggaugggcugcagaauggggucuggccaccu

SEQ ID NO: 463387 - RNA, 32 nt, Human
gggaugggcuucacuggcagagcuggguacug

SEQ ID NO: 463388 - RNA, 18 nt, Human
gggauggggaagggagga

SEQ ID NO: 463389 - RNA, 32 nt, Human
gggauggggacccagaggugcaguggccgccc

SEQ ID NO: 463390 - RNA, 32 nt, Human
gggauggggaggaagagagagacuguggagcu

SEQ ID NO: 463391 - RNA, 21 nt, Human
gggauggggaggaggagcaga

SEQ ID NO: 463392 - RNA, 32 nt, Human
gggauggggaggaggagcagagagguauggga

SEQ ID NO: 463393 - RNA, 21 nt, Human
gggauggggauaauacaggga

SEQ ID NO: 463394 - RNA, 32 nt, Human
gggauggggaugaaguaaggagagggacugga

SEQ ID NO: 463395 - RNA, 18 nt, Human
gggauggggauuggggug

SEQ ID NO: 463396 - RNA, 32 nt, Human
gggauggggcuaucaucuuuucuugaauaggg

SEQ ID NO: 463397 - RNA, 32 nt, Human
gggauggggcuugggaguugcagugaauguca

SEQ ID NO: 463398 - RNA, 32 nt, Human
gggaugggggauccggaggaaaguaggugugg

SEQ ID NO: 463399 - RNA, 20 nt, Human
gggaugggggaugggccagg

SEQ ID NO: 463400 - RNA, 32 nt, Human
gggaugggggucucaccauguugcccaggcug

SEQ ID NO: 463401 - RNA, 18 nt, Human
gggauggggucaggggga

SEQ ID NO: 463402 - RNA, 32 nt, Human
gggauggggucggggaaucugcauuuuaguag

SEQ ID NO: 463403 - RNA, 32 nt, Human
gggauggggugagugggcuccaggcaacagag

SEQ ID NO: 463404 - RNA, 32 nt, Human
gggauggggugcuguguaggaauggccucagc

SEQ ID NO: 463405 - RNA, 32 nt, Human
gggauggggugggacauugaacaggcaaagag

SEQ ID NO: 463406 - RNA, 19 nt, Human
gggaugggugaguggggug

SEQ ID NO: 463407 - RNA, 32 nt, Human
gggaugggugcugaaguaucaggcucuggcuc

SEQ ID NO: 463408 - RNA, 32 nt, Human
gggauggguguuccuuggaaauggcauuguau

SEQ ID NO: 463409 - RNA, 32 nt, Human
gggauggguugaaggggcuccaggcaacugag

SEQ ID NO: 463410 - RNA, 28 nt, Human
gggaugguaacagcaauggcucugagua

SEQ ID NO: 463411 - RNA, 24 nt, Human
gggauggucagcugugaggggagg

SEQ ID NO: 463412 - RNA, 32 nt, Human
gggaugguccugccaugaggaggcugcaacgc

SEQ ID NO: 463413 - RNA, 32 nt, Human
gggaugguccuuuuucacacagcuaggucuuu

SEQ ID NO: 463414 - RNA, 32 nt, Human
gggauggucggaucucacaggcugagaacucg

SEQ ID NO: 463415 - RNA, 32 nt, Human
gggauggucucgaucuccugaccucgugaucc

SEQ ID NO: 463416 - RNA, 32 nt, Human
gggauggucucgaucuccugaccuugucaucc

SEQ ID NO: 463417 - RNA, 32 nt, Human
gggauggucucgaucucuugaccucaugaucu

SEQ ID NO: 463418 - RNA, 32 nt, Human
gggauggucuugaucuccugaccucaugaucc

SEQ ID NO: 463419 - RNA, 20 nt, Human
gggauggugccauccaggga

SEQ ID NO: 463420 - RNA, 32 nt, Human
gggaugguggccaggccgugcccuugcuguug

SEQ ID NO: 463421 - RNA, 32 nt, Human
gggaugguucaagggcuucacuguccagugcu

SEQ ID NO: 463422 - RNA, 32 nt, Human
gggaugguuguugaccccucucuccuagagac

SEQ ID NO: 463423 - RNA, 32 nt, Human
gggaugguuucaucaacauaagaggccaggaa

SEQ ID NO: 463424 - RNA, 18 nt, Human
gggauguaauccagguca

SEQ ID NO: 463425 - RNA, 32 nt, Human
gggauguacaguuuacaguugaagagcaaaca

SEQ ID NO: 463426 - RNA, 20 nt, Human
gggauguacaucucucccuc

SEQ ID NO: 463427 - RNA, 32 nt, Human
gggauguaggagggggaaggaggaaacaggaa

SEQ ID NO: 463428 - RNA, 32 nt, Human
gggaugucagagccagggagcaaggcaugauc

SEQ ID NO: 463429 - RNA, 20 nt, Human
gggaugucaggugccaccca

SEQ ID NO: 463430 - RNA, 32 nt, Human
gggaugucaugaauuuaggcaauguuucucau

SEQ ID NO: 463431 - RNA, 32 nt, Human
gggaugugagcaugaguuuaggaaauggugua

SEQ ID NO: 463432 - RNA, 17 nt, Human
gggauguggaagugggg

SEQ ID NO: 463433 - RNA, 32 nt, Human
gggaugugggagggagcagacaggaggaauca

SEQ ID NO: 463434 - RNA, 21 nt, Human
gggaugugguagcucaugccu

SEQ ID NO: 463435 - RNA, 32 nt, Human
gggauguguccagggcagcacaggaggcaggu

SEQ ID NO: 463436 - RNA, 32 nt, Human
gggaugugugguuauaguucugugggagaaau

SEQ ID NO: 463437 - RNA, 32 nt, Human
gggauguguucuuugaaaugcaucacuacaug

SEQ ID NO: 463438 - RNA, 32 nt, Human
gggauguuccuauaugggagaaaguuggguua

SEQ ID NO: 463439 - RNA, 32 nt, Human
gggauguugcucguacuguugcucugagggga

SEQ ID NO: 463440 - RNA, 32 nt, Human
gggauguuuaggauaaguuagaugugugccac

SEQ ID NO: 463441 - RNA, 32 nt, Human
gggauuaaggcgccugccaccaugcccggcua

SEQ ID NO: 463442 - RNA, 32 nt, Human
gggauuacaaaccugccauucugcauuaucug

SEQ ID NO: 463443 - RNA, 32 nt, Human
gggauuacaccauugcauuccagccugggcaa

SEQ ID NO: 463444 - RNA, 32 nt, Human
gggauuacagaagugagccacuguaccuggcc

SEQ ID NO: 463445 - RNA, 32 nt, Human
gggauuacagacaggcaugugcuauuacaccu

SEQ ID NO: 463446 - RNA, 32 nt, Human
gggauuacagcacccgccaccaugccgagcua

SEQ ID NO: 463447 - RNA, 32 nt, Human
gggauuacagccacugcacccagccuaaucuu

SEQ ID NO: 463448 - RNA, 20 nt, Human
gggauuacaggcacaagcca

SEQ ID NO: 463449 - RNA, 32 nt, Human
gggauuacaggcagccaccacgcccagcuaau

SEQ ID NO: 463450 - RNA, 20 nt, Human
gggauuacaggcaugagcca

SEQ ID NO: 463451 - RNA, 20 nt, Human
gggauuacaggcgugagcca

SEQ ID NO: 463452 - RNA, 32 nt, Human
gggauuacaggcgugagccacccggccuggcc

SEQ ID NO: 463453 - RNA, 32 nt, Human
gggauuacaggcuugagccaccgcacccggcc

SEQ ID NO: 463454 - RNA, 32 nt, Human
gggauuacaggcuugagccaccgcaccuggcc

SEQ ID NO: 463455 - RNA, 32 nt, Human
gggauuacaggcuugagccacugcaccuagcc

SEQ ID NO: 463456 - RNA, 32 nt, Human
gggauuacaggcuugugccaccgcacccagcu

SEQ ID NO: 463457 - RNA, 32 nt, Human
gggauuacaggugggagccacaacacccggcc

SEQ ID NO: 463458 - RNA, 32 nt, Human
gggauuacaggugggagccacuacagcuggcc

SEQ ID NO: 463459 - RNA, 32 nt, Human
gggauuacagugccugccaccaugcccagcua

SEQ ID NO: 463460 - RNA, 32 nt, Human
gggauuacgccuguaaucccagcacuuuggga

SEQ ID NO: 463461 - RNA, 32 nt, Human
gggauuacgggcaugagccacugugcgcaauc

SEQ ID NO: 463462 - RNA, 32 nt, Human
gggauuagagucaggccagaaagagaacauuc

SEQ ID NO: 463463 - RNA, 32 nt, Human
gggauuagcaaggugaagggaaagcaucuggu

SEQ ID NO: 463464 - RNA, 16 nt, Human
gggauuaggggugggg

SEQ ID NO: 463465 - RNA, 32 nt, Human
gggauuagggguucugugcucuugccuaauua

SEQ ID NO: 463466 - RNA, 32 nt, Human
gggauucaagcaauucucccaccucagccucu

SEQ ID NO: 463467 - RNA, 32 nt, Human
gggauucacuggccucuccauccgccccgacu

SEQ ID NO: 463468 - RNA, 18 nt, Human
gggauucagaguggggug

SEQ ID NO: 463469 - RNA, 32 nt, Human
gggauucagcaaccugcuuaaagggacccagu

SEQ ID NO: 463470 - RNA, 32 nt, Human
gggauucagcacuuugggcaagugguugcaca

SEQ ID NO: 463471 - RNA, 32 nt, Human
gggauucagcaggagugccaggagaauucaac

SEQ ID NO: 463472 - RNA, 32 nt, Human
gggauucagcucuagaggucacaguauccucg

SEQ ID NO: 463473 - RNA, 32 nt, Human
gggauuccacaccucucuuccccagccggcaa

SEQ ID NO: 463474 - RNA, 32 nt, Human
gggauuccagccuucagaagguucuugggaua

SEQ ID NO: 463475 - RNA, 32 nt, Human
gggauuccauuuucuuuguucaccucuacuug

SEQ ID NO: 463476 - RNA, 25 nt, Human
gggauuccggggaaguggaggcaga

SEQ ID NO: 463477 - RNA, 32 nt, Human
gggauuccggggaaguggaggcagagggagcg

SEQ ID NO: 463478 - RNA, 32 nt, Human
gggauuccugcuuccuggcuguguggcagaga

SEQ ID NO: 463479 - RNA, 32 nt, Human
gggauuccugggcccuuuggaaaagaguuggu

SEQ ID NO: 463480 - RNA, 32 nt, Human
gggauuccuuucuccccucuuuguguggcccc

SEQ ID NO: 463481 - RNA, 32 nt, Human
gggauuccuuuucagaaguaccuguguguauc

SEQ ID NO: 463482 - RNA, 32 nt, Human
gggauucgagaagaaaauacaugugggaucuu

SEQ ID NO: 463483 - RNA, 32 nt, Human
gggauucgggaaguggcugaagagcacuggaa

SEQ ID NO: 463484 - RNA, 32 nt, Human
gggauucuaccauguugcccaggcuggucuca

SEQ ID NO: 463485 - RNA, 32 nt, Human
gggauucuaggaaacccaaggaacaagagaaa

SEQ ID NO: 463486 - RNA, 32 nt, Human
gggauucucaggggcuccauuauggcuugauu

SEQ ID NO: 463487 - RNA, 32 nt, Human
gggauucuccaccuguuacaucguucacugga

SEQ ID NO: 463488 - RNA, 32 nt, Human
gggauucuccagagcuagcacagggaaugugg

SEQ ID NO: 463489 - RNA, 32 nt, Human
gggauucuccccaccccagccccacaccugcu

SEQ ID NO: 463490 - RNA, 32 nt, Human
gggauucucuucagaaagauggcaucuaagug

SEQ ID NO: 463491 - RNA, 32 nt, Human
gggauucucuucugagugggugccaucccggc

SEQ ID NO: 463492 - RNA, 32 nt, Human
gggauucugaguagcaggggcagcaugcccag

SEQ ID NO: 463493 - RNA, 32 nt, Human
gggauucugaugcuggugaucucauaccugaa

SEQ ID NO: 463494 - RNA, 32 nt, Human
gggauucugcacuuuagccagccugggucggc

SEQ ID NO: 463495 - RNA, 32 nt, Human
gggauucuggcaucugccucccuagaccuccu

SEQ ID NO: 463496 - RNA, 32 nt, Human
gggauucugggaagcuugagccucccccaaag

SEQ ID NO: 463497 - RNA, 32 nt, Human
gggauucugggagcuuucugggaauucaguug

SEQ ID NO: 463498 - RNA, 32 nt, Human
gggauucuucauuucuucuuccuacugccucc

SEQ ID NO: 463499 - RNA, 32 nt, Human
gggauucuuuguaguccagggcagcaguucuu

SEQ ID NO: 463500 - RNA, 32 nt, Human
gggauugaacuagacacagacacaugagcagg

SEQ ID NO: 463501 - RNA, 32 nt, Human
gggauugacugagaucuuaacaacagcagcaa

SEQ ID NO: 463502 - RNA, 32 nt, Human
gggauugagacccaggccuggcugguccugcc

SEQ ID NO: 463503 - RNA, 32 nt, Human
gggauugauauuuccgcaggaaguuuggaagu

SEQ ID NO: 463504 - RNA, 32 nt, Human
gggauugcacagaacaccagaggcuggggauu

SEQ ID NO: 463505 - RNA, 32 nt, Human
gggauugcaccacugcacuccagccugggcua

SEQ ID NO: 463506 - RNA, 32 nt, Human
gggauugcaccuuccaaaucuguuucuguacc

SEQ ID NO: 463507 - RNA, 32 nt, Human
gggauugcaucacugcacuccagccuggguga

SEQ ID NO: 463508 - RNA, 32 nt, Human
gggauugccugggaccagaggaaaggucuaaa

SEQ ID NO: 463509 - RNA, 32 nt, Human
gggauugcgccacugcacuccagccuggguga

SEQ ID NO: 463510 - RNA, 21 nt, Human
gggauugcucacuccagguua

SEQ ID NO: 463511 - RNA, 32 nt, Human
gggauugcucacuccagguuacugcaacccua

SEQ ID NO: 463512 - RNA, 32 nt, Human
gggauugcuuaaccagagaaacagacacauuu

SEQ ID NO: 463513 - RNA, 32 nt, Human
gggauugcuugaguccagccugggcaguauag

SEQ ID NO: 463514 - RNA, 16 nt, Human
gggauuggaagugggg

SEQ ID NO: 463515 - RNA, 32 nt, Human
gggauuggacaguaguggugcaucugguccuu

SEQ ID NO: 463516 - RNA, 32 nt, Human
gggauuggagaaaggggaccugagggagggac

SEQ ID NO: 463517 - RNA, 32 nt, Human
gggauuggcccagcuuggagugcuuguguggu

SEQ ID NO: 463518 - RNA, 32 nt, Human
gggauugggaggacagaggggaagaaagcugg

SEQ ID NO: 463519 - RNA, 32 nt, Human
gggauugggcucuccugggccauggcagccga

SEQ ID NO: 463520 - RNA, 32 nt, Human
gggauuggggaggaggggaugggcagcggagg

SEQ ID NO: 463521 - RNA, 32 nt, Human
gggauugggggaggggccccagagggguuuua

SEQ ID NO: 463522 - RNA, 32 nt, Human
gggauuggggugagauggaugggagcccgcug

SEQ ID NO: 463523 - RNA, 32 nt, Human
gggauugggucacuuuugaauguggcuuucau

SEQ ID NO: 463524 - RNA, 32 nt, Human
gggauuguagaccuguaugcuccugggucuga

SEQ ID NO: 463525 - RNA, 32 nt, Human
gggauugucagaacugaacacauaucauuuga

SEQ ID NO: 463526 - RNA, 32 nt, Human
gggauugugggaggacacggaccuagacucca

SEQ ID NO: 463527 - RNA, 32 nt, Human
gggauuguggugagugagaaucaaggccaccu

SEQ ID NO: 463528 - RNA, 32 nt, Human
gggauugugugucuggggcaagugaccuuacc

SEQ ID NO: 463529 - RNA, 32 nt, Human
gggauuguugcgucccauaucuggacccagaa

SEQ ID NO: 463530 - RNA, 32 nt, Human
gggauuguuuggcugcuuagugggacuggugg

SEQ ID NO: 463531 - RNA, 32 nt, Human
gggauuuaaggagaauugagagaauguaccca

SEQ ID NO: 463532 - RNA, 32 nt, Human
gggauuuauaccaaauuauguauuugcuaaac

SEQ ID NO: 463533 - RNA, 32 nt, Human
gggauuuaugagaccaguaccugaacugucau

SEQ ID NO: 463534 - RNA, 21 nt, Human
gggauuucaccauguuggcca

SEQ ID NO: 463535 - RNA, 21 nt, Human
gggauuucaccauguuggccg

SEQ ID NO: 463536 - RNA, 32 nt, Human
gggauuucuccauguugaucaggcuggucaug

SEQ ID NO: 463537 - RNA, 32 nt, Human
gggauuucuccuccuaaucugggccucuuguc

SEQ ID NO: 463538 - RNA, 32 nt, Human
gggauuucucucuucaaggccauaacagugga

SEQ ID NO: 463539 - RNA, 32 nt, Human
gggauuucuggggcauaaggacaggaaaaggg

SEQ ID NO: 463540 - RNA, 22 nt, Human
gggauuucuguccugcagggug

SEQ ID NO: 463541 - RNA, 32 nt, Human
gggauuucuugagcuaggaaaggugguuggcu

SEQ ID NO: 463542 - RNA, 32 nt, Human
gggauuucuuuuucucuucuuucugcucuucc

SEQ ID NO: 463543 - RNA, 32 nt, Human
gggauuugacuuuucuuccuugccugcagcug

SEQ ID NO: 463544 - RNA, 32 nt, Human
gggauuugagcaucaggaaaacuguugaaggg

SEQ ID NO: 463545 - RNA, 32 nt, Human
gggauuugaggccagggggagagccaggcucu

SEQ ID NO: 463546 - RNA, 31 nt, Human
gggauuugcagagaugaaaaagacuggguga

SEQ ID NO: 463547 - RNA, 23 nt, Human
gggauuuggaagccauuugggga

SEQ ID NO: 463548 - RNA, 32 nt, Human
gggauuugggaaaggugaagcugugacuggag

SEQ ID NO: 463549 - RNA, 32 nt, Human
gggauuugggaggcuuccuagagcgcucagca

SEQ ID NO: 463550 - RNA, 32 nt, Human
gggauuuggggaggggcuggaggacuuccgca

SEQ ID NO: 463551 - RNA, 32 nt, Human
gggauuuggggugcuggaggcaguggccaagc

SEQ ID NO: 463552 - RNA, 32 nt, Human
gggauuuggucuucagcaguagacauccuucc

SEQ ID NO: 463553 - RNA, 32 nt, Human
gggauuugucgacucauuuugucugaauuuuc

SEQ ID NO: 463554 - RNA, 32 nt, Human
gggauuuugaccuuuuccccacccucaccuuc

SEQ ID NO: 463555 - RNA, 32 nt, Human
gggauuuugagaccagccugaccaacacugag

SEQ ID NO: 463556 - RNA, 32 nt, Human
gggauuuugccucccagccaaaaugcuccagg

SEQ ID NO: 463557 - RNA, 19 nt, Human
gggauuuugggcccaggag

SEQ ID NO: 463558 - RNA, 32 nt, Human
gggauuuuucugcugguaagugaggcauggag

SEQ ID NO: 463559 - RNA, 32 nt, Human
gggauuuuugcucaagaucacauagcugguaa

SEQ ID NO: 463560 - RNA, 20 nt, Human
gggcaaaacauuaguugaua

SEQ ID NO: 463561 - RNA, 32 nt, Human
gggcaaaauggugaaaccaugucucuacaaaa

SEQ ID NO: 463562 - RNA, 19 nt, Human
gggcaaaauucccagggaa

SEQ ID NO: 463563 - RNA, 32 nt, Human
gggcaaacagccgccaucaggguucaccucgg

SEQ ID NO: 463564 - RNA, 32 nt, Human
gggcaaaccacugcuccguucugagccucggu

SEQ ID NO: 463565 - RNA, 32 nt, Human
gggcaaaccgggccccucugcccacacaccuc

SEQ ID NO: 463566 - RNA, 32 nt, Human
gggcaaaccuaugucuaaccagauacagacca

SEQ ID NO: 463567 - RNA, 32 nt, Human
gggcaaacgaccucaacagacacuuuacagaa

SEQ ID NO: 463568 - RNA, 32 nt, Human
gggcaaacugaggcccagaggggcagggaguu

SEQ ID NO: 463569 - RNA, 32 nt, Human
gggcaaagcaagggguaugguugagccagaaa

SEQ ID NO: 463570 - RNA, 32 nt, Human
gggcaaaggcugauggccucuaccuuuguauc

SEQ ID NO: 463571 - RNA, 31 nt, Human
gggcaaagggcaggagggugggugaauucca

SEQ ID NO: 463572 - RNA, 32 nt, Human
gggcaaaguaaucaucguucaggcccaacccu

SEQ ID NO: 463573 - RNA, 20 nt, Human
gggcaaaguccuccagguga

SEQ ID NO: 463574 - RNA, 32 nt, Human
gggcaaagugagugaccugcuuuuggggguga

SEQ ID NO: 463575 - RNA, 32 nt, Human
gggcaaauccaucccucucucccucacaguuc

SEQ ID NO: 463576 - RNA, 32 nt, Human
gggcaaaucuuuaucagccacugccuucugcu

SEQ ID NO: 463577 - RNA, 22 nt, Human
gggcaacaaaccagggcagcug

SEQ ID NO: 463578 - RNA, 32 nt, Human
gggcaacaaagugagacccccaucucuacaaa

SEQ ID NO: 463579 - RNA, 31 nt, Human
gggcaacaaagugagacccccaucucuauag

SEQ ID NO: 463580 - RNA, 24 nt, Human
gggcaacaaagugagacuccaucu

SEQ ID NO: 463581 - RNA, 32 nt, Human
gggcaacaaagugagacuccaucucuauauaa

SEQ ID NO: 463582 - RNA, 24 nt, Human
gggcaacaaagugagacucuaucu

SEQ ID NO: 463583 - RNA, 24 nt, Human
gggcaacaaagugagacucugccu

SEQ ID NO: 463584 - RNA, 24 nt, Human
gggcaacaaagugagacucugucu

SEQ ID NO: 463585 - RNA, 32 nt, Human
gggcaacaaauugaggcccccaucucuacaaa

SEQ ID NO: 463586 - RNA, 32 nt, Human
gggcaacaacaacaaaaaugccagguguggug

SEQ ID NO: 463587 - RNA, 25 nt, Human
gggcaacaagagcaagacucugucu

SEQ ID NO: 463588 - RNA, 25 nt, Human
gggcaacaagagcgaaacucugccu

SEQ ID NO: 463589 - RNA, 25 nt, Human
gggcaacaagagcgaaacucugucu

SEQ ID NO: 463590 - RNA, 25 nt, Human
gggcaacaagaguaagacucugucu

SEQ ID NO: 463591 - RNA, 25 nt, Human
gggcaacaagagugaaacucugucu

SEQ ID NO: 463592 - RNA, 25 nt, Human
gggcaacaagagugagacuccaucu

SEQ ID NO: 463593 - RNA, 23 nt, Human
gggcaacaagcgaaacucugucu

SEQ ID NO: 463594 - RNA, 32 nt, Human
gggcaacacagcaagacaccgcaucuacagaa

SEQ ID NO: 463595 - RNA, 32 nt, Human
gggcaacacagcaagaccccaucuaagaaaaa

SEQ ID NO: 463596 - RNA, 32 nt, Human
gggcaacacagcaagaccccaucucuacaaaa

SEQ ID NO: 463597 - RNA, 24 nt, Human
gggcaacacagcaagacucugucu

SEQ ID NO: 463598 - RNA, 32 nt, Human
gggcaacacagcaagacucugucucaaaaaua

SEQ ID NO: 463599 - RNA, 32 nt, Human
gggcaacacagcaagauccugucuaaaaauaa

SEQ ID NO: 463600 - RNA, 32 nt, Human
gggcaacacaggaugaccccaucuuuacauuu

SEQ ID NO: 463601 - RNA, 24 nt, Human
gggcaacacagggagacucugucu

SEQ ID NO: 463602 - RNA, 32 nt, Human
gggcaacacagggcgacccccaucucuacaaa

SEQ ID NO: 463603 - RNA, 24 nt, Human
gggcaacacagugagacuccaucu

SEQ ID NO: 463604 - RNA, 32 nt, Human
gggcaacacagugagacuccaucucuuaaaaa

SEQ ID NO: 463605 - RNA, 28 nt, Human
gggcaacacagugagugagacccugucu

SEQ ID NO: 463606 - RNA, 32 nt, Human
gggcaacaccugggugacagagcaagacccca

SEQ ID NO: 463607 - RNA, 32 nt, Human
gggcaacacgaugaaaccccaucucuacuaaa

SEQ ID NO: 463608 - RNA, 32 nt, Human
gggcaacacggagcacaggucucugcugcuga

SEQ ID NO: 463609 - RNA, 32 nt, Human
gggcaacacggugaaaccccaucucuauuaaa

SEQ ID NO: 463610 - RNA, 32 nt, Human
gggcaacacggugaaaccccgucucuacuaaa

SEQ ID NO: 463611 - RNA, 24 nt, Human
gggcaacagaacaagauucugucu

SEQ ID NO: 463612 - RNA, 24 nt, Human
gggcaacagaacgagacucugucu

SEQ ID NO: 463613 - RNA, 24 nt, Human
gggcaacagaacgagauucugucu

SEQ ID NO: 463614 - RNA, 32 nt, Human
gggcaacagaacgagauucugucuuaaaugaa

SEQ ID NO: 463615 - RNA, 28 nt, Human
gggcaacagacagagcgagacucugucu

SEQ ID NO: 463616 - RNA, 28 nt, Human
gggcaacagacagagugagacuccaucu

SEQ ID NO: 463617 - RNA, 24 nt, Human
gggcaacagagcaaaacucugucu

SEQ ID NO: 463618 - RNA, 32 nt, Human
gggcaacagagcaagaccccaucucuaaauaa

SEQ ID NO: 463619 - RNA, 24 nt, Human
gggcaacagagcaagacucugccu

SEQ ID NO: 463620 - RNA, 24 nt, Human
gggcaacagagcaagacucugucu

SEQ ID NO: 463621 - RNA, 32 nt, Human
gggcaacagagcaagacucugucucgggggaa

SEQ ID NO: 463622 - RNA, 22 nt, Human
gggcaacagagcaagacugccu

SEQ ID NO: 463623 - RNA, 24 nt, Human
gggcaacagagccagacucugucu

SEQ ID NO: 463624 - RNA, 32 nt, Human
gggcaacagagcgagacuccaucucuaaauaa

SEQ ID NO: 463625 - RNA, 24 nt, Human
gggcaacagagcgagacucuaucu

SEQ ID NO: 463626 - RNA, 24 nt, Human
gggcaacagagcgagacucuguuu

SEQ ID NO: 463627 - RNA, 24 nt, Human
gggcaacagagcgaggcucugucu

SEQ ID NO: 463628 - RNA, 24 nt, Human
gggcaacagagggagacucugucu

SEQ ID NO: 463629 - RNA, 23 nt, Human
gggcaacagaguaaaacucuguc

SEQ ID NO: 463630 - RNA, 24 nt, Human
gggcaacagaguaagacucugucu

SEQ ID NO: 463631 - RNA, 24 nt, Human
gggcaacagagugaaacccuguuu

SEQ ID NO: 463632 - RNA, 24 nt, Human
gggcaacagagugaaacucugucu

SEQ ID NO: 463633 - RNA, 24 nt, Human
gggcaacagagugacacucugucu

SEQ ID NO: 463634 - RNA, 32 nt, Human
gggcaacagagugagaccccaucucuuuaaaa

SEQ ID NO: 463635 - RNA, 24 nt, Human
gggcaacagagugagacccugucu

SEQ ID NO: 463636 - RNA, 24 nt, Human
gggcaacagagugagacccuguuu

SEQ ID NO: 463637 - RNA, 23 nt, Human
gggcaacagagugagaccugucu

SEQ ID NO: 463638 - RNA, 24 nt, Human
gggcaacagagugagacuccaucu

SEQ ID NO: 463639 - RNA, 22 nt, Human
gggcaacagagugagacucccu

SEQ ID NO: 463640 - RNA, 24 nt, Human
gggcaacagagugagacuccgucu

SEQ ID NO: 463641 - RNA, 24 nt, Human
gggcaacagagugagacucuaucu

SEQ ID NO: 463642 - RNA, 22 nt, Human
gggcaacagagugagacucucu

SEQ ID NO: 463643 - RNA, 24 nt, Human
gggcaacagagugagacucugcuu

SEQ ID NO: 463644 - RNA, 23 nt, Human
gggcaacagagugagacucuguc

SEQ ID NO: 463645 - RNA, 24 nt, Human
gggcaacagagugagacucugucu

SEQ ID NO: 463646 - RNA, 24 nt, Human
gggcaacagagugagacucuguuu

SEQ ID NO: 463647 - RNA, 32 nt, Human
gggcaacagagugagacucuguuucuaaauaa

SEQ ID NO: 463648 - RNA, 24 nt, Human
gggcaacagagugagacugggucu

SEQ ID NO: 463649 - RNA, 22 nt, Human
gggcaacagagugagacugucu

SEQ ID NO: 463650 - RNA, 24 nt, Human
gggcaacagagugagacuucaucu

SEQ ID NO: 463651 - RNA, 24 nt, Human
gggcaacagagugagacuucgucu

SEQ ID NO: 463652 - RNA, 24 nt, Human
gggcaacagagugagacuuugucu

SEQ ID NO: 463653 - RNA, 24 nt, Human
gggcaacagagugagauccugacu

SEQ ID NO: 463654 - RNA, 24 nt, Human
gggcaacagagugagauucugucu

SEQ ID NO: 463655 - RNA, 32 nt, Human
gggcaacagagugagauucugucuccaaauaa

SEQ ID NO: 463656 - RNA, 20 nt, Human
gggcaacagagugaggcccu

SEQ ID NO: 463657 - RNA, 24 nt, Human
gggcaacagagugaggcugugucu

SEQ ID NO: 463658 - RNA, 24 nt, Human
gggcaacagagugagucccugucu

SEQ ID NO: 463659 - RNA, 24 nt, Human
gggcaacagagugagucucugucu

SEQ ID NO: 463660 - RNA, 24 nt, Human
gggcaacagagugggacuccaucu

SEQ ID NO: 463661 - RNA, 32 nt, Human
gggcaacagauggggcggcggggagcgcagag

SEQ ID NO: 463662 - RNA, 24 nt, Human
gggcaacagggcaagacucugucu

SEQ ID NO: 463663 - RNA, 24 nt, Human
gggcaacagggugagacucugucu

SEQ ID NO: 463664 - RNA, 23 nt, Human
gggcaacagguaagacucugucu

SEQ ID NO: 463665 - RNA, 20 nt, Human
gggcaacagugagacucugc

SEQ ID NO: 463666 - RNA, 25 nt, Human
gggcaacaguguuaagacucugucu

SEQ ID NO: 463667 - RNA, 32 nt, Human
gggcaacauaccaagacccccgucucuuuaaa

SEQ ID NO: 463668 - RNA, 32 nt, Human
gggcaacauaccgagaccccaucccuaccaaa

SEQ ID NO: 463669 - RNA, 32 nt, Human
gggcaacauagagagaccccaucucugcaaaa

SEQ ID NO: 463670 - RNA, 30 nt, Human
gggcaacauagcaaaaccucaucucuauuu

SEQ ID NO: 463671 - RNA, 32 nt, Human
gggcaacauagcaaaaucucaucucuacaaaa

SEQ ID NO: 463672 - RNA, 32 nt, Human
gggcaacauagcaagaccccaucucuacaaaa

SEQ ID NO: 463673 - RNA, 32 nt, Human
gggcaacauagcaagaccccaucucuaccaaa

SEQ ID NO: 463674 - RNA, 32 nt, Human
gggcaacauagcaagaccccaucucuauaaaa

SEQ ID NO: 463675 - RNA, 32 nt, Human
gggcaacauagcaagacccccaucucugcaaa

SEQ ID NO: 463676 - RNA, 32 nt, Human
gggcaacauagcaagacuccaucucuaaguaa

SEQ ID NO: 463677 - RNA, 24 nt, Human
gggcaacauagcaagacucugucu

SEQ ID NO: 463678 - RNA, 32 nt, Human
gggcaacauagcaagauucugucucuuaaaaa

SEQ ID NO: 463679 - RNA, 32 nt, Human
gggcaacauagcaggaccccaucucuacuauu

SEQ ID NO: 463680 - RNA, 32 nt, Human
gggcaacauagcgagaccccaucucuacaaaa

SEQ ID NO: 463681 - RNA, 32 nt, Human
gggcaacauagcgagacuccaucucuauaaau

SEQ ID NO: 463682 - RNA, 24 nt, Human
gggcaacauagcgagacucugucu

SEQ ID NO: 463683 - RNA, 32 nt, Human
gggcaacauagcgagacugcaucucuacaaaa

SEQ ID NO: 463684 - RNA, 32 nt, Human
gggcaacauagggagaccccaucucuacagaa

SEQ ID NO: 463685 - RNA, 32 nt, Human
gggcaacauagggggaucccaucucuacacac

SEQ ID NO: 463686 - RNA, 32 nt, Human
gggcaacauaguaagaccccaucucuaugaag

SEQ ID NO: 463687 - RNA, 32 nt, Human
gggcaacauaguaagacccccaucucuacaaa

SEQ ID NO: 463688 - RNA, 32 nt, Human
gggcaacauagugaaacccugucucuacuaaa

SEQ ID NO: 463689 - RNA, 28 nt, Human
gggcaacauagugaaaccuggucucugc

SEQ ID NO: 463690 - RNA, 32 nt, Human
gggcaacauagugaagccccaucucugcaaaa

SEQ ID NO: 463691 - RNA, 32 nt, Human
gggcaacauagugagaaugcaucucuacaaaa

SEQ ID NO: 463692 - RNA, 32 nt, Human
gggcaacauagugagaccccaucucuacaaag

SEQ ID NO: 463693 - RNA, 32 nt, Human
gggcaacauagugagaccccaucucuacaauu

SEQ ID NO: 463694 - RNA, 32 nt, Human
gggcaacauagugagaccccaucucuacaucc

SEQ ID NO: 463695 - RNA, 32 nt, Human
gggcaacauagugagaccccaucucuacuuaa

SEQ ID NO: 463696 - RNA, 32 nt, Human
gggcaacauagugagaccccaucucuuuaaaa

SEQ ID NO: 463697 - RNA, 32 nt, Human
gggcaacauagugagacccccaucucuacaaa

SEQ ID NO: 463698 - RNA, 32 nt, Human
gggcaacauagugagacccccaucucuacaau

SEQ ID NO: 463699 - RNA, 32 nt, Human
gggcaacauagugagacccccaucucuacaga

SEQ ID NO: 463700 - RNA, 24 nt, Human
gggcaacauagugagacccugucu

SEQ ID NO: 463701 - RNA, 28 nt, Human
gggcaacauagugagaccucaucucuac

SEQ ID NO: 463702 - RNA, 32 nt, Human
gggcaacauagugagaccuccaucucuacaaa

SEQ ID NO: 463703 - RNA, 22 nt, Human
gggcaacauagugagaccugcc

SEQ ID NO: 463704 - RNA, 24 nt, Human
gggcaacauagugagaccuugccu

SEQ ID NO: 463705 - RNA, 32 nt, Human
gggcaacauagugagaucccaucucuacaaaa

SEQ ID NO: 463706 - RNA, 32 nt, Human
gggcaacauagugagaucucaucucuaccaaa

SEQ ID NO: 463707 - RNA, 32 nt, Human
gggcaacauagugaggccccaucucuagaaaa

SEQ ID NO: 463708 - RNA, 32 nt, Human
gggcaacauagugauaccccaucucuuaaaaa

SEQ ID NO: 463709 - RNA, 32 nt, Human
gggcaacauagugggacuucaucucuaaaaca

SEQ ID NO: 463710 - RNA, 32 nt, Human
gggcaacaucaugagacgucaucucuaauaaa

SEQ ID NO: 463711 - RNA, 32 nt, Human
gggcaacaucgggagaccccaucucuacaaaa

SEQ ID NO: 463712 - RNA, 32 nt, Human
gggcaacaucuccagcaaucugaucuccuuca

SEQ ID NO: 463713 - RNA, 32 nt, Human
gggcaacaugacaagaccccaucucuacaaaa

SEQ ID NO: 463714 - RNA, 32 nt, Human
gggcaacaugaugaaaacuccgucucuaccaa

SEQ ID NO: 463715 - RNA, 31 nt, Human
gggcaacaugaugaaaccccaucuccacugc

SEQ ID NO: 463716 - RNA, 32 nt, Human
gggcaacauggagaaaccccaucuuuaccaaa

SEQ ID NO: 463717 - RNA, 32 nt, Human
gggcaacauggagaaaccccguuucuacuaaa

SEQ ID NO: 463718 - RNA, 19 nt, Human
gggcaacauggcaaaaccc

SEQ ID NO: 463719 - RNA, 32 nt, Human
gggcaacauggcaaaaccccaucucuacaaaa

SEQ ID NO: 463720 - RNA, 32 nt, Human
gggcaacauggcaaaaccccauuucuacaaaa

SEQ ID NO: 463721 - RNA, 32 nt, Human
gggcaacauggcaaagccccaucucuacaaaa

SEQ ID NO: 463722 - RNA, 32 nt, Human
gggcaacauggcgaaaacccaucucuacaaaa

SEQ ID NO: 463723 - RNA, 32 nt, Human
gggcaacauggcgaaaccccauuucuacuaaa

SEQ ID NO: 463724 - RNA, 32 nt, Human
gggcaacauggcgaaaccccgucucuacuaaa

SEQ ID NO: 463725 - RNA, 32 nt, Human
gggcaacauggcgagaccccaucucuacuaaa

SEQ ID NO: 463726 - RNA, 32 nt, Human
gggcaacauggggaaaccccagcucuacaaaa

SEQ ID NO: 463727 - RNA, 32 nt, Human
gggcaacauggggaaacuccaucucuacaaaa

SEQ ID NO: 463728 - RNA, 32 nt, Human
gggcaacauggugaaacacugucucuacaaaa

SEQ ID NO: 463729 - RNA, 32 nt, Human
gggcaacauggugaaacacugucucuacauaa

SEQ ID NO: 463730 - RNA, 32 nt, Human
gggcaacauggugaaacccaguuucuacaaag

SEQ ID NO: 463731 - RNA, 20 nt, Human
gggcaacauggugaaacccc

SEQ ID NO: 463732 - RNA, 32 nt, Human
gggcaacauggugaaaccccagcucuccuaaa

SEQ ID NO: 463733 - RNA, 32 nt, Human
gggcaacauggugaaaccccaucuccaccaaa

SEQ ID NO: 463734 - RNA, 28 nt, Human
gggcaacauggugaaaccccaucucuac

SEQ ID NO: 463735 - RNA, 32 nt, Human
gggcaacauggugaaaccccaucucuacaaaa

SEQ ID NO: 463736 - RNA, 32 nt, Human
gggcaacauggugaaaccccaucucuacuaaa

SEQ ID NO: 463737 - RNA, 22 nt, Human
gggcaacauggugaaaccccgu

SEQ ID NO: 463738 - RNA, 32 nt, Human
gggcaacauggugaaaccccgucucuacaaaa

SEQ ID NO: 463739 - RNA, 32 nt, Human
gggcaacauggugaaaccccgucucuaccaaa

SEQ ID NO: 463740 - RNA, 32 nt, Human
gggcaacauggugaaaccccgucucuaccccc

SEQ ID NO: 463741 - RNA, 32 nt, Human
gggcaacauggugaaaccccgucucuacuaaa

SEQ ID NO: 463742 - RNA, 32 nt, Human
gggcaacauggugaaaccccugucucuacaaa

SEQ ID NO: 463743 - RNA, 32 nt, Human
gggcaacauggugaaaccccuucucuacuaaa

SEQ ID NO: 463744 - RNA, 32 nt, Human
gggcaacauggugaaacccgucucuaccaaac

SEQ ID NO: 463745 - RNA, 32 nt, Human
gggcaacauggugaaacccuaucuccgugaaa

SEQ ID NO: 463746 - RNA, 32 nt, Human
gggcaacauggugaaacccugucuacuaaaau

SEQ ID NO: 463747 - RNA, 26 nt, Human
gggcaacauggugaaacccugucucu

SEQ ID NO: 463748 - RNA, 32 nt, Human
gggcaacauggugaaacccugucucuaccaaa

SEQ ID NO: 463749 - RNA, 32 nt, Human
gggcaacauggugaaacccugucucuacuaaa

SEQ ID NO: 463750 - RNA, 32 nt, Human
gggcaacauggugaaacccugucucuacugaa

SEQ ID NO: 463751 - RNA, 32 nt, Human
gggcaacauggugaaacccugucuuuacaaaa

SEQ ID NO: 463752 - RNA, 32 nt, Human
gggcaacauggugaaacccuguuucuacaaaa

SEQ ID NO: 463753 - RNA, 32 nt, Human
gggcaacauggugaaacccuguuucuauaaaa

SEQ ID NO: 463754 - RNA, 32 nt, Human
gggcaacauggugaaaccucaucucuacaaaa

SEQ ID NO: 463755 - RNA, 32 nt, Human
gggcaacauggugaaaccucgucucuacuaaa

SEQ ID NO: 463756 - RNA, 32 nt, Human
gggcaacauggugaaaccugucucuacaaaaa

SEQ ID NO: 463757 - RNA, 32 nt, Human
gggcaacauggugaaaccugucucuacuaaaa

SEQ ID NO: 463758 - RNA, 32 nt, Human
gggcaacauggugaaaccuugucucuacauaa

SEQ ID NO: 463759 - RNA, 32 nt, Human
gggcaacauggugaaaccuugucucuacuaaa

SEQ ID NO: 463760 - RNA, 24 nt, Human
gggcaacauggugaaacucugucu

SEQ ID NO: 463761 - RNA, 32 nt, Human
gggcaacauggugaaacugucucuaucaaaaa

SEQ ID NO: 463762 - RNA, 27 nt, Human
gggcaacauggugaaacuucucuacaa

SEQ ID NO: 463763 - RNA, 32 nt, Human
gggcaacauggugaaagcccgucucuaccgaa

SEQ ID NO: 463764 - RNA, 32 nt, Human
gggcaacauggugaaaucccaugucuacuaaa

SEQ ID NO: 463765 - RNA, 32 nt, Human
gggcaacauggugaaauccugucucuaccaaa

SEQ ID NO: 463766 - RNA, 32 nt, Human
gggcaacauggugaagccccaucucuacaaaa

SEQ ID NO: 463767 - RNA, 29 nt, Human
gggcaacauggugaagccucauaucuacc

SEQ ID NO: 463768 - RNA, 31 nt, Human
gggcaacauggugaccucccgucucucucgg

SEQ ID NO: 463769 - RNA, 32 nt, Human
gggcaacauggugagaccaauugacuguaggg

SEQ ID NO: 463770 - RNA, 32 nt, Human
gggcaacauggugagaccccaucucuacaaaa

SEQ ID NO: 463771 - RNA, 32 nt, Human
gggcaacauggugagaccccaucucuauuuaa

SEQ ID NO: 463772 - RNA, 32 nt, Human
gggcaacauggugagaccccgucucuacaaaa

SEQ ID NO: 463773 - RNA, 32 nt, Human
gggcaacauggugagacccucgucucuacaaa

SEQ ID NO: 463774 - RNA, 24 nt, Human
gggcaacauggugagacccugucu

SEQ ID NO: 463775 - RNA, 32 nt, Human
gggcaacauggugagaccucaucucuacaaaa

SEQ ID NO: 463776 - RNA, 24 nt, Human
gggcaacauggugagacucugccu

SEQ ID NO: 463777 - RNA, 32 nt, Human
gggcaacauggugagacucugccucuacaaaa

SEQ ID NO: 463778 - RNA, 28 nt, Human
gggcaacauggugagauuucaucucuac

SEQ ID NO: 463779 - RNA, 32 nt, Human
gggcaacaugguggagcccugucucuacagaa

SEQ ID NO: 463780 - RNA, 32 nt, Human
gggcaacauugggagacuccaucucuacaaaa

SEQ ID NO: 463781 - RNA, 32 nt, Human
gggcaaccaaccauugcacuggcuaaaucauu

SEQ ID NO: 463782 - RNA, 20 nt, Human
gggcaaccaagcccccagcg

SEQ ID NO: 463783 - RNA, 32 nt, Human
gggcaaccaauugccacagucaggguugggga

SEQ ID NO: 463784 - RNA, 21 nt, Human
gggcaaccccagccuaggcug

SEQ ID NO: 463785 - RNA, 23 nt, Human
gggcaaccugucgagcugggagg

SEQ ID NO: 463786 - RNA, 26 nt, Human
gggcaacgaaaagugaaacucugucu

SEQ ID NO: 463787 - RNA, 25 nt, Human
gggcaacgagagcgaaacucugucu

SEQ ID NO: 463788 - RNA, 32 nt, Human
gggcaacgaggguggaggucccacugagccuc

SEQ ID NO: 463789 - RNA, 32 nt, Human
gggcaacggaggggaaauaaaagggaacggcu

SEQ ID NO: 463790 - RNA, 24 nt, Human
gggcaacggagugagacccugucu

SEQ ID NO: 463791 - RNA, 24 nt, Human
gggcaacggagugagacuccaucu

SEQ ID NO: 463792 - RNA, 24 nt, Human
gggcaacggagugagacucugucu

SEQ ID NO: 463793 - RNA, 24 nt, Human
gggcaacggauugagacucugucu

SEQ ID NO: 463794 - RNA, 32 nt, Human
gggcaacguagucagaccccaucucuacaaaa

SEQ ID NO: 463795 - RNA, 32 nt, Human
gggcaacguagugaaacccugccucuagaaaa

SEQ ID NO: 463796 - RNA, 32 nt, Human
gggcaacgugacgaaaccccaucucuacgaaa

SEQ ID NO: 463797 - RNA, 24 nt, Human
gggcaacgugaugagacuccgucu

SEQ ID NO: 463798 - RNA, 32 nt, Human
gggcaacguggcgaaauccccgucuuuacaaa

SEQ ID NO: 463799 - RNA, 32 nt, Human
gggcaacguggugaaaccccaucucuacaaaa

SEQ ID NO: 463800 - RNA, 32 nt, Human
gggcaacguggugaaacccugucucuacuaaa

SEQ ID NO: 463801 - RNA, 22 nt, Human
gggcaacucucacaucuugcug

SEQ ID NO: 463802 - RNA, 32 nt, Human
gggcaacugaaggugaaguggaucaccaaugg

SEQ ID NO: 463803 - RNA, 32 nt, Human
gggcaacuggggccagggagaggggagggaga

SEQ ID NO: 463804 - RNA, 32 nt, Human
gggcaacuuccucuguccugugcucaaauaaa

SEQ ID NO: 463805 - RNA, 22 nt, Human
gggcaagaaauagaagucuccu

SEQ ID NO: 463806 - RNA, 21 nt, Human
gggcaagaaauggcgucugcu

SEQ ID NO: 463807 - RNA, 32 nt, Human
gggcaagaaccagcuggagauucagaaucuac

SEQ ID NO: 463808 - RNA, 32 nt, Human
gggcaagaacggaguugcuucuauaacauuau

SEQ ID NO: 463809 - RNA, 32 nt, Human
gggcaagaacugcuucaauuccuuaacaaaug

SEQ ID NO: 463810 - RNA, 21 nt, Human
gggcaagaagcugcuucugcc

SEQ ID NO: 463811 - RNA, 32 nt, Human
gggcaagacgagcugugcuugaaggaagaggg

SEQ ID NO: 463812 - RNA, 32 nt, Human
gggcaagacguuugguuucauuugucaccauu

SEQ ID NO: 463813 - RNA, 32 nt, Human
gggcaagacuccaugaccccucugauucugca

SEQ ID NO: 463814 - RNA, 32 nt, Human
gggcaagacugggcuguaggggagcuggacua

SEQ ID NO: 463815 - RNA, 32 nt, Human
gggcaagagacagagcaggucccugugucucc

SEQ ID NO: 463816 - RNA, 32 nt, Human
gggcaagagcccaggagacugugugguuuguc

SEQ ID NO: 463817 - RNA, 32 nt, Human
gggcaagaggagaaauagcuguaauguagggg

SEQ ID NO: 463818 - RNA, 32 nt, Human
gggcaagaggccacccuggaagcugccaaucu

SEQ ID NO: 463819 - RNA, 32 nt, Human
gggcaagagguggauugagcaggaucucaggg

SEQ ID NO: 463820 - RNA, 32 nt, Human
gggcaagauccagguggucccauaggucuugu

SEQ ID NO: 463821 - RNA, 32 nt, Human
gggcaagaucccuguccuccugggcccugagg

SEQ ID NO: 463822 - RNA, 32 nt, Human
gggcaagauggugaaaccccaucucuacugga

SEQ ID NO: 463823 - RNA, 32 nt, Human
gggcaagcaaaaacaauaacacugcuuauaaa

SEQ ID NO: 463824 - RNA, 32 nt, Human
gggcaagcagccgccgccauggccgagcaccu

SEQ ID NO: 463825 - RNA, 19 nt, Human
gggcaagcagguggggcug

SEQ ID NO: 463826 - RNA, 32 nt, Human
gggcaagccaguggcguggccucugccucuaa

SEQ ID NO: 463827 - RNA, 32 nt, Human
gggcaagcuacuuccccucuguuaccuguaaa

SEQ ID NO: 463828 - RNA, 32 nt, Human
gggcaagcuauagccauggcuguggcuguagc

SEQ ID NO: 463829 - RNA, 32 nt, Human
gggcaaggaagaaugugagcaagaguagagag

SEQ ID NO: 463830 - RNA, 32 nt, Human
gggcaaggaagaggaguuggccaacaggcagc

SEQ ID NO: 463831 - RNA, 32 nt, Human
gggcaaggagaaacaacuagcuggacaauacu

SEQ ID NO: 463832 - RNA, 32 nt, Human
gggcaaggagaccaccaacagcccucagguca

SEQ ID NO: 463833 - RNA, 32 nt, Human
gggcaaggagccaaggaccacagagccucagc

SEQ ID NO: 463834 - RNA, 18 nt, Human
gggcaaggagcuggggug

SEQ ID NO: 463835 - RNA, 32 nt, Human
gggcaaggaggaagaggggcagggguuaaaaa

SEQ ID NO: 463836 - RNA, 32 nt, Human
gggcaaggaggacuccaagaacuucgacgagc

SEQ ID NO: 463837 - RNA, 21 nt, Human
gggcaaggaggagcaggccag

SEQ ID NO: 463838 - RNA, 32 nt, Human
gggcaaggaggcaaggaccccgucucucccac

SEQ ID NO: 463839 - RNA, 32 nt, Human
gggcaaggauagaaaugccaucaggaaauagc

SEQ ID NO: 463840 - RNA, 32 nt, Human
gggcaaggauagaaaugucaucaggaaauagc

SEQ ID NO: 463841 - RNA, 32 nt, Human
gggcaaggcaaagcacuaagggccaguaccag

SEQ ID NO: 463842 - RNA, 32 nt, Human
gggcaaggccaagugggggugggcuuugggca

SEQ ID NO: 463843 - RNA, 32 nt, Human
gggcaaggcccaggacuuucagauuaacugag

SEQ ID NO: 463844 - RNA, 32 nt, Human
gggcaaggcccaucugucugcaaggcugguag

SEQ ID NO: 463845 - RNA, 32 nt, Human
gggcaaggcggguucuagcugcauagacagga

SEQ ID NO: 463846 - RNA, 32 nt, Human
gggcaaggcugaagaaaggggacuggguacuu

SEQ ID NO: 463847 - RNA, 32 nt, Human
gggcaagggagccgggcaagcccagggcagcc

SEQ ID NO: 463848 - RNA, 32 nt, Human
gggcaagggagggagaugacagccugggucac

SEQ ID NO: 463849 - RNA, 32 nt, Human
gggcaagggcugaaggaggccacuccaucuca

SEQ ID NO: 463850 - RNA, 32 nt, Human
gggcaagggggaacaaaucacaccucugggcu

SEQ ID NO: 463851 - RNA, 32 nt, Human
gggcaagggguuguuuccucccagcucagugg

SEQ ID NO: 463852 - RNA, 32 nt, Human
gggcaagggugggagguuuuuagaagaguaua

SEQ ID NO: 463853 - RNA, 32 nt, Human
gggcaaggucaggccagcucagaaaaauggau

SEQ ID NO: 463854 - RNA, 23 nt, Human
gggcaaggucgcagcaucugccu

SEQ ID NO: 463855 - RNA, 32 nt, Human
gggcaaggucugagggcccaccgaugagagag

SEQ ID NO: 463856 - RNA, 20 nt, Human
gggcaagucaguggcuccag

SEQ ID NO: 463857 - RNA, 32 nt, Human
gggcaagugaggcaagagaaaugaggaagaau

SEQ ID NO: 463858 - RNA, 32 nt, Human
gggcaaguuuguuguggacagaucugugccua

SEQ ID NO: 463859 - RNA, 32 nt, Human
gggcaaguuuuuaaauuaaaacuuucuauauu

SEQ ID NO: 463860 - RNA, 25 nt, Human
gggcaauaagagugaaacucugucu

SEQ ID NO: 463861 - RNA, 32 nt, Human
gggcaauacagcaagaccucaucucuacaaaa

SEQ ID NO: 463862 - RNA, 32 nt, Human
gggcaauacuuacuauccccuggguaacaguu

SEQ ID NO: 463863 - RNA, 24 nt, Human
gggcaauagagcaagacucugucu

SEQ ID NO: 463864 - RNA, 24 nt, Human
gggcaauagagugagacccugucu

SEQ ID NO: 463865 - RNA, 24 nt, Human
gggcaauagagugagacuccgucu

SEQ ID NO: 463866 - RNA, 24 nt, Human
gggcaauagagugagacucugucu

SEQ ID NO: 463867 - RNA, 32 nt, Human
gggcaauauaaggagaccccaucucuacaaaa

SEQ ID NO: 463868 - RNA, 32 nt, Human
gggcaauauagugaaaccccaucucuuaaaga

SEQ ID NO: 463869 - RNA, 32 nt, Human
gggcaauauagugagaccccaucucuagaaga

SEQ ID NO: 463870 - RNA, 32 nt, Human
gggcaauaucgugagaccccaucucuacaaaa

SEQ ID NO: 463871 - RNA, 32 nt, Human
gggcaauauggcaaaaccccaucuuuaccaaa

SEQ ID NO: 463872 - RNA, 28 nt, Human
gggcaauauggcgagaccucaucucuac

SEQ ID NO: 463873 - RNA, 32 nt, Human
gggcaauauggcgagaccucaucucuacaaaa

SEQ ID NO: 463874 - RNA, 32 nt, Human
gggcaauauggugacaccccaucucuacaaaa

SEQ ID NO: 463875 - RNA, 31 nt, Human
gggcaauaugucaucuaccuaccucaaaggg

SEQ ID NO: 463876 - RNA, 32 nt, Human
gggcaaugcaucuuuccaaccugagcgagugg

SEQ ID NO: 463877 - RNA, 32 nt, Human
gggcaaugcggaacuccuuuuuacagcccacc

SEQ ID NO: 463878 - RNA, 32 nt, Human
gggcaaugcugguacugugaggcugauggagc

SEQ ID NO: 463879 - RNA, 32 nt, Human
gggcaaugcugugagagccauuggaagacugu

SEQ ID NO: 463880 - RNA, 22 nt, Human
gggcaauggagcaggccaccag

SEQ ID NO: 463881 - RNA, 32 nt, Human
gggcaauggcgggcgccucucccccagccucg

SEQ ID NO: 463882 - RNA, 23 nt, Human
gggcaauguagcaagauccuguc

SEQ ID NO: 463883 - RNA, 32 nt, Human
gggcaaugugagagguaaaauagcccuugaca

SEQ ID NO: 463884 - RNA, 32 nt, Human
gggcaaugugauaaaaccccaucucuacaaaa

SEQ ID NO: 463885 - RNA, 32 nt, Human
gggcaauguggcgaaacuccaucucuacaaaa

SEQ ID NO: 463886 - RNA, 29 nt, Human
gggcaauguggggagaccccaucucuaca

SEQ ID NO: 463887 - RNA, 21 nt, Human
gggcaauugccagggcuccag

SEQ ID NO: 463888 - RNA, 20 nt, Human
gggcacaaagaugggggcag

SEQ ID NO: 463889 - RNA, 23 nt, Human
gggcacaacccaggggccaggcu

SEQ ID NO: 463890 - RNA, 23 nt, Human
gggcacaagcccagguccugcug

SEQ ID NO: 463891 - RNA, 23 nt, Human
gggcacaagcucagguccugcug

SEQ ID NO: 463892 - RNA, 32 nt, Human
gggcacaagggugagcucuucgcaggggcuga

SEQ ID NO: 463893 - RNA, 32 nt, Human
gggcacaagguggcaggaugucucagugguac

SEQ ID NO: 463894 - RNA, 32 nt, Human
gggcacaaguccuggauguuguguguaucgag

SEQ ID NO: 463895 - RNA, 32 nt, Human
gggcacaaucaaaaugagaugcacucauuuaa

SEQ ID NO: 463896 - RNA, 32 nt, Human
gggcacaaucaccacacacugccgcuucaauc

SEQ ID NO: 463897 - RNA, 32 nt, Human
gggcacacacaguggagagagcacaggacugg

SEQ ID NO: 463898 - RNA, 21 nt, Human
gggcacaccagcccucagaga

SEQ ID NO: 463899 - RNA, 32 nt, Human
gggcacacccucccacugccccucucugccuc

SEQ ID NO: 463900 - RNA, 32 nt, Human
gggcacacgcagguggaggugguugugggugc

SEQ ID NO: 463901 - RNA, 22 nt, Human
gggcacacgccucggcuauggg

SEQ ID NO: 463902 - RNA, 32 nt, Human
gggcacacgugcccuggcugaggccagcggca

SEQ ID NO: 463903 - RNA, 21 nt, Human
gggcacacguuagggcugccc

SEQ ID NO: 463904 - RNA, 22 nt, Human
gggcacacuaaggggccacaag

SEQ ID NO: 463905 - RNA, 32 nt, Human
gggcacacucccaugcugucacccucaggaag

SEQ ID NO: 463906 - RNA, 32 nt, Human
gggcacacugacaccucacacggcaggguauu

SEQ ID NO: 463907 - RNA, 32 nt, Human
gggcacacuggcagaggguaucugaaguggga

SEQ ID NO: 463908 - RNA, 20 nt, Human
gggcacagaaccaccagcaa

SEQ ID NO: 463909 - RNA, 17 nt, Human
gggcacagaacccugug

SEQ ID NO: 463910 - RNA, 32 nt, Human
gggcacagaaguagcucuggugaccuugauca

SEQ ID NO: 463911 - RNA, 32 nt, Human
gggcacagacuuuucuggaagcagagcgagcc

SEQ ID NO: 463912 - RNA, 32 nt, Human
gggcacagagagacagagguucauggacugag

SEQ ID NO: 463913 - RNA, 32 nt, Human
gggcacagagggcagagguugggcgggguggg

SEQ ID NO: 463914 - RNA, 32 nt, Human
gggcacagaugucuguucagcagguguguggg

SEQ ID NO: 463915 - RNA, 32 nt, Human
gggcacagauuaucuaaaauuagccagcucuu

SEQ ID NO: 463916 - RNA, 32 nt, Human
gggcacagauugcagagguaaugcuguggcau

SEQ ID NO: 463917 - RNA, 32 nt, Human
gggcacagcacugggaaaugggagcauaguac

SEQ ID NO: 463918 - RNA, 16 nt, Human
gggcacagcagagcag

SEQ ID NO: 463919 - RNA, 16 nt, Human
gggcacagcagggcag

SEQ ID NO: 463920 - RNA, 18 nt, Human
gggcacagcaggggacag

SEQ ID NO: 463921 - RNA, 32 nt, Human
gggcacagccagcagagccggggacugcagug

SEQ ID NO: 463922 - RNA, 32 nt, Human
gggcacagccaggcacaagugcaugugugagc

SEQ ID NO: 463923 - RNA, 32 nt, Human
gggcacagccuccgauuugagccucuccggcu

SEQ ID NO: 463924 - RNA, 32 nt, Human
gggcacagccugggcagaugggcuggggcuua

SEQ ID NO: 463925 - RNA, 30 nt, Human
gggcacagcgggaauacagaaagauacagc

SEQ ID NO: 463926 - RNA, 18 nt, Human
gggcacagcuagugcaaa

SEQ ID NO: 463927 - RNA, 23 nt, Human
gggcacagcugauuugaccucuu

SEQ ID NO: 463928 - RNA, 25 nt, Human
gggcacaggaccguggugcugcacc

SEQ ID NO: 463929 - RNA, 22 nt, Human
gggcacaggagggagagcugca

SEQ ID NO: 463930 - RNA, 19 nt, Human
gggcacaggcagagggcag

SEQ ID NO: 463931 - RNA, 32 nt, Human
gggcacagggagguggguuggggugaggccac

SEQ ID NO: 463932 - RNA, 32 nt, Human
gggcacagggccagggcaggcggggcagggcu

SEQ ID NO: 463933 - RNA, 32 nt, Human
gggcacagggccaucugucaccaggggcuuag

SEQ ID NO: 463934 - RNA, 32 nt, Human
gggcacagggccuggcccauguauggccagga

SEQ ID NO: 463935 - RNA, 32 nt, Human
gggcacaguggaagcuauggaggcagagacca

SEQ ID NO: 463936 - RNA, 32 nt, Human
gggcacaguggacagggagaccucacagagaa

SEQ ID NO: 463937 - RNA, 23 nt, Human
gggcacaguggcgcaugccugua

SEQ ID NO: 463938 - RNA, 23 nt, Human
gggcacaguggcucacaccugua

SEQ ID NO: 463939 - RNA, 23 nt, Human
gggcacaguggcucauaccugua

SEQ ID NO: 463940 - RNA, 23 nt, Human
gggcacaguggcucaugccugua

SEQ ID NO: 463941 - RNA, 23 nt, Human
gggcacaguggcucaugccugug

SEQ ID NO: 463942 - RNA, 32 nt, Human
gggcacauaaucaaacuagaccaaugagucuc

SEQ ID NO: 463943 - RNA, 22 nt, Human
gggcacaucauauguccaugaa

SEQ ID NO: 463944 - RNA, 32 nt, Human
gggcacauguaaucccagcuacuugggaggcu

SEQ ID NO: 463945 - RNA, 32 nt, Human
gggcacauguacugcaggugugcagugagcac

SEQ ID NO: 463946 - RNA, 32 nt, Human
gggcacaugucuucguucccucccgacuggga

SEQ ID NO: 463947 - RNA, 32 nt, Human
gggcaccaaacaggaagagaccagcaacuucg

SEQ ID NO: 463948 - RNA, 32 nt, Human
gggcaccaaagaccaggcccagagccagggga

SEQ ID NO: 463949 - RNA, 32 nt, Human
gggcaccaacccaucauggucgaaaaucugua

SEQ ID NO: 463950 - RNA, 22 nt, Human
gggcaccaagaccccaaaggcc

SEQ ID NO: 463951 - RNA, 21 nt, Human
gggcaccaaggaggguggcag

SEQ ID NO: 463952 - RNA, 32 nt, Human
gggcaccaagggcacaggccaagccuuggggg

SEQ ID NO: 463953 - RNA, 32 nt, Human
gggcaccacccuggcaguuccagccuguaggg

SEQ ID NO: 463954 - RNA, 22 nt, Human
gggcaccagagagguucacuug

SEQ ID NO: 463955 - RNA, 32 nt, Human
gggcaccagcuggccuugcccucucuggucug

SEQ ID NO: 463956 - RNA, 32 nt, Human
gggcaccagcuuuucuggacagccuggcuucu

SEQ ID NO: 463957 - RNA, 32 nt, Human
gggcaccaggagaggucucugaggauccccgg

SEQ ID NO: 463958 - RNA, 32 nt, Human
gggcaccaggagcagagggaagggaggauggc

SEQ ID NO: 463959 - RNA, 32 nt, Human
gggcaccagugggcauaggcacaggaugagcc

SEQ ID NO: 463960 - RNA, 32 nt, Human
gggcaccaucauuccugccgccuugggcacag

SEQ ID NO: 463961 - RNA, 32 nt, Human
gggcaccaucuucucauucaucuccaaggacg

SEQ ID NO: 463962 - RNA, 32 nt, Human
gggcaccaugggccacuccaggaugggacacg

SEQ ID NO: 463963 - RNA, 32 nt, Human
gggcaccauggugaaaccucgucuuuaccaaa

SEQ ID NO: 463964 - RNA, 32 nt, Human
gggcaccauggugagaccccaucucuauuauu

SEQ ID NO: 463965 - RNA, 32 nt, Human
gggcaccauuuuuaaucccagaacacauuuca

SEQ ID NO: 463966 - RNA, 32 nt, Human
gggcacccaagcucccuauuugucccgggcac

SEQ ID NO: 463967 - RNA, 28 nt, Human
gggcacccaagugcccccugucugcgaa

SEQ ID NO: 463968 - RNA, 32 nt, Human
gggcacccaagugcccccugucugcgaagucc

SEQ ID NO: 463969 - RNA, 20 nt, Human
gggcacccacaggcuggcug

SEQ ID NO: 463970 - RNA, 24 nt, Human
gggcacccaccaugagaaaggggc

SEQ ID NO: 463971 - RNA, 17 nt, Human
gggcacccagagcagca

SEQ ID NO: 463972 - RNA, 32 nt, Human
gggcacccagagccacccagccuggaagcccc

SEQ ID NO: 463973 - RNA, 32 nt, Human
gggcacccagcacucugcugggcaucacccuc

SEQ ID NO: 463974 - RNA, 32 nt, Human
gggcacccaugcuggccagcaguuucccaggg

SEQ ID NO: 463975 - RNA, 32 nt, Human
gggcacccauguccgagcccccuggcauuucu

SEQ ID NO: 463976 - RNA, 20 nt, Human
gggcaccccaaagagggggc

SEQ ID NO: 463977 - RNA, 32 nt, Human
gggcaccccagccacuccagaaacccaauggg

SEQ ID NO: 463978 - RNA, 20 nt, Human
gggcaccccauggcuggcug

SEQ ID NO: 463979 - RNA, 20 nt, Human
gggcaccccuguggaggggc

SEQ ID NO: 463980 - RNA, 32 nt, Human
gggcacccgcaacgugcugggcucugcuacug

SEQ ID NO: 463981 - RNA, 32 nt, Human
gggcacccguaaucccagcuacucaggaggcu

SEQ ID NO: 463982 - RNA, 32 nt, Human
gggcacccguauucccagcuacucagaggcug

SEQ ID NO: 463983 - RNA, 21 nt, Human
gggcacccucagcaaaggggc

SEQ ID NO: 463984 - RNA, 32 nt, Human
gggcacccuccaaacacugggcucugaggagu

SEQ ID NO: 463985 - RNA, 18 nt, Human
gggcacccuccccaggga

SEQ ID NO: 463986 - RNA, 32 nt, Human
gggcacccugcaggcaggcagaccacggugug

SEQ ID NO: 463987 - RNA, 32 nt, Human
gggcaccgaacuaagccagcucagccuuccaa

SEQ ID NO: 463988 - RNA, 27 nt, Human
gggcaccgaugagggcugguccuagga

SEQ ID NO: 463989 - RNA, 32 nt, Human
gggcaccgcggagcaagauggaagagaagagg

SEQ ID NO: 463990 - RNA, 32 nt, Human
gggcaccgcggaggcuggagccgcaauggugc

SEQ ID NO: 463991 - RNA, 32 nt, Human
gggcaccgcgggccauguguguuugcaugagg

SEQ ID NO: 463992 - RNA, 16 nt, Human
gggcaccggcuggcug

SEQ ID NO: 463993 - RNA, 32 nt, Human
gggcaccgggacccccucaccauccagugggc

SEQ ID NO: 463994 - RNA, 32 nt, Human
gggcaccgugggaggcagcggcuccuggccgu

SEQ ID NO: 463995 - RNA, 32 nt, Human
gggcaccuauaauaccagcuacuccggaggcu

SEQ ID NO: 463996 - RNA, 32 nt, Human
gggcaccuauuaucccagcuacucgggaggcc

SEQ ID NO: 463997 - RNA, 21 nt, Human
gggcaccucccucccacccuu

SEQ ID NO: 463998 - RNA, 21 nt, Human
gggcaccucgcucaugcaagg

SEQ ID NO: 463999 - RNA, 22 nt, Human
gggcaccucgcucuaccccagg

SEQ ID NO: 464000 - RNA, 32 nt, Human
gggcaccucuaaucccagcuacuugggaggcu

SEQ ID NO: 464001 - RNA, 32 nt, Human
gggcaccucuggcugcugcaggccucccaaga

SEQ ID NO: 464002 - RNA, 32 nt, Human
gggcaccucugucugguuuccucuuuggaaaa

SEQ ID NO: 464003 - RNA, 32 nt, Human
gggcaccucuuccagggaugccucccucuaag

SEQ ID NO: 464004 - RNA, 32 nt, Human
gggcaccucuuccagggaugucucccucuaag

SEQ ID NO: 464005 - RNA, 32 nt, Human
gggcaccucuuucuggccugugcaccucucuc

SEQ ID NO: 464006 - RNA, 32 nt, Human
gggcaccugcaaucccagcuacuugggaggcu

SEQ ID NO: 464007 - RNA, 32 nt, Human
gggcaccugcaauccccgacccccgacgcccu

SEQ ID NO: 464008 - RNA, 32 nt, Human
gggcaccugcagcugcugcuguggcugccagc

SEQ ID NO: 464009 - RNA, 18 nt, Human
gggcaccugcccccuccu

SEQ ID NO: 464010 - RNA, 32 nt, Human
gggcaccugcggucccagcuacuugggaggcu

SEQ ID NO: 464011 - RNA, 32 nt, Human
gggcaccuggacgcugaugguggccaggaugc

SEQ ID NO: 464012 - RNA, 32 nt, Human
gggcaccuggagucccagcuacuccggaggcu

SEQ ID NO: 464013 - RNA, 32 nt, Human
gggcaccugggcagccgccgcggcgcuggcua

SEQ ID NO: 464014 - RNA, 32 nt, Human
gggcaccuggugccugcccccugccgggcagc

SEQ ID NO: 464015 - RNA, 32 nt, Human
gggcaccuguaaccccagcuacucgggaggcu

SEQ ID NO: 464016 - RNA, 32 nt, Human
gggcaccuguaauaccaacuguucgggagggu

SEQ ID NO: 464017 - RNA, 32 nt, Human
gggcaccuguaaucccaccuacucgggaggcu

SEQ ID NO: 464018 - RNA, 32 nt, Human
gggcaccuguaaucccagauacucgggaggcu

SEQ ID NO: 464019 - RNA, 32 nt, Human
gggcaccuguaaucccagccacuugggaggcu

SEQ ID NO: 464020 - RNA, 32 nt, Human
gggcaccuguaaucccagcuacccgggaggcu

SEQ ID NO: 464021 - RNA, 32 nt, Human
gggcaccuguaaucccagcuacuagggagacu

SEQ ID NO: 464022 - RNA, 32 nt, Human
gggcaccuguaaucccagcuacucaggaggcu

SEQ ID NO: 464023 - RNA, 32 nt, Human
gggcaccuguaaucccagcuacucgagaggcu

SEQ ID NO: 464024 - RNA, 32 nt, Human
gggcaccuguaaucccagcuacucgggaggcc

SEQ ID NO: 464025 - RNA, 32 nt, Human
gggcaccuguaaucccagcuacucgggaggcu

SEQ ID NO: 464026 - RNA, 32 nt, Human
gggcaccuguaaucccagcuacucuggaggcu

SEQ ID NO: 464027 - RNA, 32 nt, Human
gggcaccuguaaucccagcuacuuggaaggcu

SEQ ID NO: 464028 - RNA, 32 nt, Human
gggcaccuguaaucccagcuacuugggaggcu

SEQ ID NO: 464029 - RNA, 32 nt, Human
gggcaccuguaaucccagcuacuuggguggcc

SEQ ID NO: 464030 - RNA, 32 nt, Human
gggcaccuguaaucccagguacucgggaggcu

SEQ ID NO: 464031 - RNA, 32 nt, Human
gggcaccuguaaucccaguuacucgggaggcu

SEQ ID NO: 464032 - RNA, 32 nt, Human
gggcaccuguaauccuggcuacucgggaggcu

SEQ ID NO: 464033 - RNA, 32 nt, Human
gggcaccuguaaucucagcuacucaggaggcu

SEQ ID NO: 464034 - RNA, 32 nt, Human
gggcaccuguaaucucagcuacuugggaggcu

SEQ ID NO: 464035 - RNA, 32 nt, Human
gggcaccuguagucccagcuacacgggaggcu

SEQ ID NO: 464036 - RNA, 32 nt, Human
gggcaccuguagucccagcuacuagggaggcu

SEQ ID NO: 464037 - RNA, 32 nt, Human
gggcaccuguagucccagcuacucaggaggcu

SEQ ID NO: 464038 - RNA, 32 nt, Human
gggcaccuguagucccagcuacucgagaggcu

SEQ ID NO: 464039 - RNA, 32 nt, Human
gggcaccuguagucccagcuacucgggaggcu

SEQ ID NO: 464040 - RNA, 32 nt, Human
gggcaccuguagucccagcuacuugggaggcu

SEQ ID NO: 464041 - RNA, 32 nt, Human
gggcaccuguaguccuagcuacucgagaggcu

SEQ ID NO: 464042 - RNA, 32 nt, Human
gggcaccuguagucucagcuacuugggaggcu

SEQ ID NO: 464043 - RNA, 32 nt, Human
gggcaccuguagugccagcuacucgggagguu

SEQ ID NO: 464044 - RNA, 32 nt, Human
gggcaccuguaguuccagcuacucggagacug

SEQ ID NO: 464045 - RNA, 32 nt, Human
gggcaccuguauucccagcuacuuggaaggcu

SEQ ID NO: 464046 - RNA, 32 nt, Human
gggcaccuguauucccagcuacuugggaggcu

SEQ ID NO: 464047 - RNA, 32 nt, Human
gggcaccugucaucccagcuacuugggaggcu

SEQ ID NO: 464048 - RNA, 32 nt, Human
gggcaccugucgucccagcuacuagggaggcu

SEQ ID NO: 464049 - RNA, 32 nt, Human
gggcaccugugaucccagcuaccugggaggcu

SEQ ID NO: 464050 - RNA, 32 nt, Human
gggcaccugugaucccagcuuccugggaggcu

SEQ ID NO: 464051 - RNA, 32 nt, Human
gggcaccuguggucucagcuacucagggggcu

SEQ ID NO: 464052 - RNA, 32 nt, Human
gggcaccuucaaggaacccaggguucuagaga

SEQ ID NO: 464053 - RNA, 32 nt, Human
gggcacgaacuggccaagacccccaucagccg

SEQ ID NO: 464054 - RNA, 19 nt, Human
gggcacgaaggccaggcca

SEQ ID NO: 464055 - RNA, 22 nt, Human
gggcacgaagggagagaggccu

SEQ ID NO: 464056 - RNA, 24 nt, Human
gggcacgagccagagugucugccu

SEQ ID NO: 464057 - RNA, 32 nt, Human
gggcacgaggagcugguacucuaccuucuggc

SEQ ID NO: 464058 - RNA, 32 nt, Human
gggcacgaggcuucccgccacacuccagagcg

SEQ ID NO: 464059 - RNA, 32 nt, Human
gggcacgagggcagagccaguuccuagcgcag

SEQ ID NO: 464060 - RNA, 32 nt, Human
gggcacgauguggucagccaggaagcauagga

SEQ ID NO: 464061 - RNA, 32 nt, Human
gggcacgcacacacggaagcacgccuccacuu

SEQ ID NO: 464062 - RNA, 32 nt, Human
gggcacgccccuggccccuugcuguucccaag

SEQ ID NO: 464063 - RNA, 32 nt, Human
gggcacgcccuucaccuuaucccccaccacuu

SEQ ID NO: 464064 - RNA, 19 nt, Human
gggcacgccuguaauccca

SEQ ID NO: 464065 - RNA, 32 nt, Human
gggcacgccuguaaucccagcuacucgggagg

SEQ ID NO: 464066 - RNA, 20 nt, Human
gggcacgcgccgucuccggg

SEQ ID NO: 464067 - RNA, 20 nt, Human
gggcacgcugaaacccuggg

SEQ ID NO: 464068 - RNA, 32 nt, Human
gggcacggcggaggccacggaggcaggcgcgg

SEQ ID NO: 464069 - RNA, 32 nt, Human
gggcacggcugcugcagucucuucccagccug

SEQ ID NO: 464070 - RNA, 32 nt, Human
gggcacgggauggagugaaagagcgagugccu

SEQ ID NO: 464071 - RNA, 18 nt, Human
gggcacgggcacccuggg

SEQ ID NO: 464072 - RNA, 32 nt, Human
gggcacggggacccacaacgacggcugucccu

SEQ ID NO: 464073 - RNA, 22 nt, Human
gggcacggugaagggcugcagc

SEQ ID NO: 464074 - RNA, 20 nt, Human
gggcacggugcaaagugggc

SEQ ID NO: 464075 - RNA, 32 nt, Human
gggcacgguggcaguggcuguuggaggaugau

SEQ ID NO: 464076 - RNA, 23 nt, Human
gggcacgguggcccaugccugua

SEQ ID NO: 464077 - RNA, 23 nt, Human
gggcacgguggcucaagccugua

SEQ ID NO: 464078 - RNA, 23 nt, Human
gggcacgguggcucacaccugua

SEQ ID NO: 464079 - RNA, 23 nt, Human
gggcacgguggcucacaccugug

SEQ ID NO: 464080 - RNA, 23 nt, Human
gggcacgguggcucacgccugua

SEQ ID NO: 464081 - RNA, 23 nt, Human
gggcacgguggcucaggccugua

SEQ ID NO: 464082 - RNA, 23 nt, Human
gggcacgguggcucaugccugua

SEQ ID NO: 464083 - RNA, 23 nt, Human
gggcacgguggcuuacaucugua

SEQ ID NO: 464084 - RNA, 32 nt, Human
gggcacguccauggggaggguggagaggcugc

SEQ ID NO: 464085 - RNA, 32 nt, Human
gggcacgugcgggaggaaguggagcucccugu

SEQ ID NO: 464086 - RNA, 32 nt, Human
gggcacgugcuggcuaggacaggaagccaggc

SEQ ID NO: 464087 - RNA, 22 nt, Human
gggcacguggcuucaugucagu

SEQ ID NO: 464088 - RNA, 32 nt, Human
gggcacuaacacccgccugccugccaggguga

SEQ ID NO: 464089 - RNA, 32 nt, Human
gggcacuaaggguggagaguugggggccagca

SEQ ID NO: 464090 - RNA, 32 nt, Human
gggcacuagaagcagcggggagggguucuaga

SEQ ID NO: 464091 - RNA, 24 nt, Human
gggcacuagagugagacucugucu

SEQ ID NO: 464092 - RNA, 16 nt, Human
gggcacuagggccuuc

SEQ ID NO: 464093 - RNA, 32 nt, Human
gggcacuauuaaaauacuucucuccuucccug

SEQ ID NO: 464094 - RNA, 32 nt, Human
gggcacucaaauaaugugauuuuaugaggcua

SEQ ID NO: 464095 - RNA, 32 nt, Human
gggcacucaccaggcugcaagaacagugcugg

SEQ ID NO: 464096 - RNA, 32 nt, Human
gggcacucauuucuuagcagccucucuacaua

SEQ ID NO: 464097 - RNA, 19 nt, Human
gggcacucccugcaggagc

SEQ ID NO: 464098 - RNA, 22 nt, Human
gggcacucgcacuggggggcug

SEQ ID NO: 464099 - RNA, 21 nt, Human
gggcacucgccccccuccuua

SEQ ID NO: 464100 - RNA, 32 nt, Human
gggcacucgcugccacaagugccuccuggaaa

SEQ ID NO: 464101 - RNA, 32 nt, Human
gggcacucugcagguucugccuuugaguccuc

SEQ ID NO: 464102 - RNA, 32 nt, Human
gggcacucugcauccucugucauuuuaaccuc

SEQ ID NO: 464103 - RNA, 32 nt, Human
gggcacugaaccuggugccgcccacaccuccu

SEQ ID NO: 464104 - RNA, 32 nt, Human
gggcacugaacucugggcugcuucucugugug

SEQ ID NO: 464105 - RNA, 32 nt, Human
gggcacugacaggacaggagagccaaguuccu

SEQ ID NO: 464106 - RNA, 32 nt, Human
gggcacugacgcugaauggugcagugagaaag

SEQ ID NO: 464107 - RNA, 32 nt, Human
gggcacugagcugccgccuggugaagggggcg

SEQ ID NO: 464108 - RNA, 32 nt, Human
gggcacugaggguggcacagcacaggccugca

SEQ ID NO: 464109 - RNA, 32 nt, Human
gggcacugcccuuuugaaaugaucauguagau

SEQ ID NO: 464110 - RNA, 32 nt, Human
gggcacugcuuuccccagaggcuuccucaugg

SEQ ID NO: 464111 - RNA, 32 nt, Human
gggcacuggaagcacaauacggugaccaaucu

SEQ ID NO: 464112 - RNA, 32 nt, Human
gggcacuggagcugucuuguccuugcugguuu

SEQ ID NO: 464113 - RNA, 32 nt, Human
gggcacuggcagucaaaguggagagaguggaa

SEQ ID NO: 464114 - RNA, 17 nt, Human
gggcacugggccucaga

SEQ ID NO: 464115 - RNA, 32 nt, Human
gggcacugggcugcaaugggccuaggccggag

SEQ ID NO: 464116 - RNA, 32 nt, Human
gggcacugggcugcagguuggagaggcagcau

SEQ ID NO: 464117 - RNA, 32 nt, Human
gggcacugggcugugccuggaaggcgagccuu

SEQ ID NO: 464118 - RNA, 32 nt, Human
gggcacuggggucuguucccccuuccccgucc

SEQ ID NO: 464119 - RNA, 32 nt, Human
gggcacugguaaucccagguacucaagaggcu

SEQ ID NO: 464120 - RNA, 32 nt, Human
gggcacugguaggggacagaggguuagggauc

SEQ ID NO: 464121 - RNA, 32 nt, Human
gggcacuguacuuuagccugggcgacagagag

SEQ ID NO: 464122 - RNA, 32 nt, Human
gggcacugucauguaggagucugcuuaggcug

SEQ ID NO: 464123 - RNA, 32 nt, Human
gggcacugucugaacuccugacugucaggaua

SEQ ID NO: 464124 - RNA, 32 nt, Human
gggcacugugggccgccugccugcugaugugg

SEQ ID NO: 464125 - RNA, 32 nt, Human
gggcacuguuaucuucguuuguuuucaaugau

SEQ ID NO: 464126 - RNA, 32 nt, Human
gggcacuuagcagccuggaggaagaugugggc

SEQ ID NO: 464127 - RNA, 32 nt, Human
gggcacuucauugagaguuuugucuugccaua

SEQ ID NO: 464128 - RNA, 32 nt, Human
gggcacuuccuugacaauuccuauuggcauca

SEQ ID NO: 464129 - RNA, 32 nt, Human
gggcacuucuccccaccucggccccgcgccca

SEQ ID NO: 464130 - RNA, 32 nt, Human
gggcacuuguaaucccagcuacucccaaggcu

SEQ ID NO: 464131 - RNA, 32 nt, Human
gggcacuuguagucccagcuacucaggaggcu

SEQ ID NO: 464132 - RNA, 32 nt, Human
gggcacuuguauuccagccucgcugcauuugc

SEQ ID NO: 464133 - RNA, 32 nt, Human
gggcacuuucuacuugugcaugggcuugguuu

SEQ ID NO: 464134 - RNA, 32 nt, Human
gggcacuuugggcuuggcuagaucacucacug

SEQ ID NO: 464135 - RNA, 32 nt, Human
gggcacuuugguuuuuguacugucuuuuguga

SEQ ID NO: 464136 - RNA, 32 nt, Human
gggcacuuuuaaaaauagagaaaugagugaau

SEQ ID NO: 464137 - RNA, 32 nt, Human
gggcagaaaaccaccaaaaggccagugccuca

SEQ ID NO: 464138 - RNA, 32 nt, Human
gggcagaaacuggauacaguucugagcacagc

SEQ ID NO: 464139 - RNA, 32 nt, Human
gggcagaaagcaaaccuaguuaaauaggugag

SEQ ID NO: 464140 - RNA, 20 nt, Human
gggcagaacuggguugggag

SEQ ID NO: 464141 - RNA, 32 nt, Human
gggcagaagcacaaacacacaugcugacaggg

SEQ ID NO: 464142 - RNA, 32 nt, Human
gggcagaauucacacugaagcugucguccugc

SEQ ID NO: 464143 - RNA, 32 nt, Human
gggcagacacacaaccuccuccuccucuucca

SEQ ID NO: 464144 - RNA, 32 nt, Human
gggcagacaggugggagauggagguagggcug

SEQ ID NO: 464145 - RNA, 32 nt, Human
gggcagaccagagagcucaaguuucagaguca

SEQ ID NO: 464146 - RNA, 20 nt, Human
gggcagaccgagggccaggu

SEQ ID NO: 464147 - RNA, 17 nt, Human
gggcagacgcggcgcug

SEQ ID NO: 464148 - RNA, 24 nt, Human
gggcagacggcggcaggagaagca

SEQ ID NO: 464149 - RNA, 21 nt, Human
gggcagagaaagccgagcaga

SEQ ID NO: 464150 - RNA, 32 nt, Human
gggcagagaacugucuuucauuuuugaacccu

SEQ ID NO: 464151 - RNA, 32 nt, Human
gggcagagaagcgguucugaccacagagcucc

SEQ ID NO: 464152 - RNA, 32 nt, Human
gggcagagaauacugaccucaccuugggaugu

SEQ ID NO: 464153 - RNA, 32 nt, Human
gggcagagacaucccuuccucagacgccuugu

SEQ ID NO: 464154 - RNA, 16 nt, Human
gggcagagagaggcag

SEQ ID NO: 464155 - RNA, 21 nt, Human
gggcagagaggauccagcgaa

SEQ ID NO: 464156 - RNA, 32 nt, Human
gggcagagaggcaagcucaggagcagccucgu

SEQ ID NO: 464157 - RNA, 32 nt, Human
gggcagagagggugguggacaccaggcuuauc

SEQ ID NO: 464158 - RNA, 32 nt, Human
gggcagagaguggugggaaugagggggugggc

SEQ ID NO: 464159 - RNA, 32 nt, Human
gggcagagaguuucugugagucccacugagaa

SEQ ID NO: 464160 - RNA, 32 nt, Human
gggcagagauggcccugcagagccaggugugg

SEQ ID NO: 464161 - RNA, 32 nt, Human
gggcagagcacaaccucauccucccagugguu

SEQ ID NO: 464162 - RNA, 32 nt, Human
gggcagagccgagcgcagcggaggcuccggcg

SEQ ID NO: 464163 - RNA, 32 nt, Human
gggcagagccugccaaguugaguucagcuuca

SEQ ID NO: 464164 - RNA, 32 nt, Human
gggcagagccugcugcagcccaacucugguug

SEQ ID NO: 464165 - RNA, 32 nt, Human
gggcagagccugcugcagcccagcucugguug

SEQ ID NO: 464166 - RNA, 32 nt, Human
gggcagagccuggguggucagaggccggggcu

SEQ ID NO: 464167 - RNA, 32 nt, Human
gggcagagcugguuccuaccacuccauucaca

SEQ ID NO: 464168 - RNA, 19 nt, Human
gggcagaggagacuauggg

SEQ ID NO: 464169 - RNA, 20 nt, Human
gggcagaggaggcggcgcgg

SEQ ID NO: 464170 - RNA, 32 nt, Human
gggcagaggccuccuuucaaggaguucacagu

SEQ ID NO: 464171 - RNA, 32 nt, Human
gggcagagggcagaggcuggaggcaggccuug

SEQ ID NO: 464172 - RNA, 32 nt, Human
gggcagaggggaggcagcagggagaggaagga

SEQ ID NO: 464173 - RNA, 32 nt, Human
gggcagaggggugggggcuggggagaggcgug

SEQ ID NO: 464174 - RNA, 22 nt, Human
gggcagagguggcgcccagggg

SEQ ID NO: 464175 - RNA, 19 nt, Human
gggcagagguugcagugag

SEQ ID NO: 464176 - RNA, 32 nt, Human
gggcagaguaaaaggugccaggaggagcaugg

SEQ ID NO: 464177 - RNA, 32 nt, Human
gggcagaguaauucaggcacauguguucagag

SEQ ID NO: 464178 - RNA, 32 nt, Human
gggcagaguagguccccuccauggcccugaau

SEQ ID NO: 464179 - RNA, 32 nt, Human
gggcagagucagcucugugcugagccuccugg

SEQ ID NO: 464180 - RNA, 24 nt, Human
gggcagaguccccugcaaggaggc

SEQ ID NO: 464181 - RNA, 32 nt, Human
gggcagagugcagcuuaacauguugcuauccc

SEQ ID NO: 464182 - RNA, 32 nt, Human
gggcagaguugcacuuuuccaggcuuuuuagg

SEQ ID NO: 464183 - RNA, 32 nt, Human
gggcagaguuugucccucugucaucagaggca

SEQ ID NO: 464184 - RNA, 32 nt, Human
gggcagauagugaaacacauuguuaggggaga

SEQ ID NO: 464185 - RNA, 17 nt, Human
gggcagaucacaagguc

SEQ ID NO: 464186 - RNA, 22 nt, Human
gggcagaucaccuaaggucagg

SEQ ID NO: 464187 - RNA, 22 nt, Human
gggcagaucaccugagaucggg

SEQ ID NO: 464188 - RNA, 22 nt, Human
gggcagaucaccugaggccagg

SEQ ID NO: 464189 - RNA, 21 nt, Human
gggcagaucaccugaggucag

SEQ ID NO: 464190 - RNA, 22 nt, Human
gggcagaucaccugaggucagg

SEQ ID NO: 464191 - RNA, 20 nt, Human
gggcagaucacgaggucagg

SEQ ID NO: 464192 - RNA, 22 nt, Human
gggcagaucacucaaggucagg

SEQ ID NO: 464193 - RNA, 32 nt, Human
gggcagaucacugaggucaggaguacgagauc

SEQ ID NO: 464194 - RNA, 22 nt, Human
gggcagaucacuugaagucagg

SEQ ID NO: 464195 - RNA, 22 nt, Human
gggcagaucacuugagaucagg

SEQ ID NO: 464196 - RNA, 22 nt, Human
gggcagaucacuugagcucagg

SEQ ID NO: 464197 - RNA, 22 nt, Human
gggcagaucacuugaggccagg

SEQ ID NO: 464198 - RNA, 22 nt, Human
gggcagaucacuugaggucagg

SEQ ID NO: 464199 - RNA, 22 nt, Human
gggcagaucgccugaggucagg

SEQ ID NO: 464200 - RNA, 32 nt, Human
gggcagaugaacacggaggcucucuguugucu

SEQ ID NO: 464201 - RNA, 32 nt, Human
gggcagaugcagcuuccaucuaccugagggcu

SEQ ID NO: 464202 - RNA, 32 nt, Human
gggcagaugggcuggggcuuagcaccacccac

SEQ ID NO: 464203 - RNA, 32 nt, Human
gggcagaugguggagucaagggugggcagcgu

SEQ ID NO: 464204 - RNA, 22 nt, Human
gggcagauucaagagccagcag

SEQ ID NO: 464205 - RNA, 32 nt, Human
gggcagauugcaugagcccaggaguucgagac

SEQ ID NO: 464206 - RNA, 22 nt, Human
gggcagauugccugagcucagg

SEQ ID NO: 464207 - RNA, 22 nt, Human
gggcagauugcuugaacccagg

SEQ ID NO: 464208 - RNA, 32 nt, Human
gggcagauuuauucuaaccugcccucaaaucu

SEQ ID NO: 464209 - RNA, 32 nt, Human
gggcagcaaacaguaacuaccaaaaccaauga

SEQ ID NO: 464210 - RNA, 32 nt, Human
gggcagcaaaccugcuguuuaacaucagggug

SEQ ID NO: 464211 - RNA, 32 nt, Human
gggcagcaacuggcccuccugucccucacccc

SEQ ID NO: 464212 - RNA, 32 nt, Human
gggcagcaagaugccauuucugcaucucccag

SEQ ID NO: 464213 - RNA, 32 nt, Human
gggcagcaagggagcagcaaggccucaaaccc

SEQ ID NO: 464214 - RNA, 32 nt, Human
gggcagcacacagcagcucauggcagagccgc

SEQ ID NO: 464215 - RNA, 32 nt, Human
gggcagcacacugggagccauuuacuuuaugc

SEQ ID NO: 464216 - RNA, 24 nt, Human
gggcagcacaggaggguccugcug

SEQ ID NO: 464217 - RNA, 32 nt, Human
gggcagcacauacuuccagugccagggccaca

SEQ ID NO: 464218 - RNA, 32 nt, Human
gggcagcaccacuucgcuuuaaagacucugaa

SEQ ID NO: 464219 - RNA, 25 nt, Human
gggcagcacccgcgggauucugcug

SEQ ID NO: 464220 - RNA, 20 nt, Human
gggcagcacccuuccugcug

SEQ ID NO: 464221 - RNA, 32 nt, Human
gggcagcacgcagcaggcgccgagcgccgggc

SEQ ID NO: 464222 - RNA, 32 nt, Human
gggcagcacugagggacccugccccgccccuc

SEQ ID NO: 464223 - RNA, 32 nt, Human
gggcagcagaacugugcgugacaugucuucgu

SEQ ID NO: 464224 - RNA, 32 nt, Human
gggcagcagagaaaggaaguccucucccugga

SEQ ID NO: 464225 - RNA, 24 nt, Human
gggcagcagagcaaaacucugucu

SEQ ID NO: 464226 - RNA, 24 nt, Human
gggcagcagagcaagacucugucu

SEQ ID NO: 464227 - RNA, 24 nt, Human
gggcagcagagcgagacucugucu

SEQ ID NO: 464228 - RNA, 24 nt, Human
gggcagcagagugagacccugucu

SEQ ID NO: 464229 - RNA, 20 nt, Human
gggcagcagcaggaggccug

SEQ ID NO: 464230 - RNA, 32 nt, Human
gggcagcagccccugggcaggcaucggagcuu

SEQ ID NO: 464231 - RNA, 32 nt, Human
gggcagcagcgaacuaggccaggccugacugg

SEQ ID NO: 464232 - RNA, 27 nt, Human
gggcagcagcuccagcagcgccagcag

SEQ ID NO: 464233 - RNA, 32 nt, Human
gggcagcagcugcugccacagccuccagcggc

SEQ ID NO: 464234 - RNA, 32 nt, Human
gggcagcagcuggucuggccccugaaagccuu

SEQ ID NO: 464235 - RNA, 32 nt, Human
gggcagcaggaaaauaauacaaaacuuaaguu

SEQ ID NO: 464236 - RNA, 32 nt, Human
gggcagcaggcccaggccccacccucgaagcc

SEQ ID NO: 464237 - RNA, 32 nt, Human
gggcagcagguguuccaugcugcuagguggcg

SEQ ID NO: 464238 - RNA, 32 nt, Human
gggcagcauagcgagaccccaucucuauauaa

SEQ ID NO: 464239 - RNA, 32 nt, Human
gggcagcauccagcuggugaccugagagggca

SEQ ID NO: 464240 - RNA, 32 nt, Human
gggcagcaugcugcuuuccuccugugcccacu

SEQ ID NO: 464241 - RNA, 32 nt, Human
gggcagcauggcgaaaucccaucucuacaaaa

SEQ ID NO: 464242 - RNA, 32 nt, Human
gggcagcauggugaaacccuguaucuacaaaa

SEQ ID NO: 464243 - RNA, 32 nt, Human
gggcagcaugguucacuccagcaugggggcuc

SEQ ID NO: 464244 - RNA, 22 nt, Human
gggcagccaaccugccccagag

SEQ ID NO: 464245 - RNA, 18 nt, Human
gggcagccaagcccaggc

SEQ ID NO: 464246 - RNA, 25 nt, Human
gggcagccagcaacaaagccagcag

SEQ ID NO: 464247 - RNA, 32 nt, Human
gggcagccagcggucuucccugccugguguuu

SEQ ID NO: 464248 - RNA, 32 nt, Human
gggcagccaugcacucccccugggugucgcuc

SEQ ID NO: 464249 - RNA, 32 nt, Human
gggcagccauuuucucccgggagaggcuggag

SEQ ID NO: 464250 - RNA, 32 nt, Human
gggcagcccagccucugucccucuuugccugu

SEQ ID NO: 464251 - RNA, 17 nt, Human
gggcagcccagcuccag

SEQ ID NO: 464252 - RNA, 21 nt, Human
gggcagcccaggcuccugcug

SEQ ID NO: 464253 - RNA, 17 nt, Human
gggcagcccaggggggu

SEQ ID NO: 464254 - RNA, 32 nt, Human
gggcagccccucuccguccucagggcugugcc

SEQ ID NO: 464255 - RNA, 32 nt, Human
gggcagccccuggggagggaggagaggaccca

SEQ ID NO: 464256 - RNA, 32 nt, Human
gggcagcccucuccaccuuuugguacuuucua

SEQ ID NO: 464257 - RNA, 32 nt, Human
gggcagcccuggaagcucggaggagaggccac

SEQ ID NO: 464258 - RNA, 32 nt, Human
gggcagcccuggaggaacaaggggcuggcugu

SEQ ID NO: 464259 - RNA, 32 nt, Human
gggcagcccuggaggagccacugugggcucca

SEQ ID NO: 464260 - RNA, 32 nt, Human
gggcagcccuucucuucugcuguuuaauucca

SEQ ID NO: 464261 - RNA, 18 nt, Human
gggcagccgcgcccgccg

SEQ ID NO: 464262 - RNA, 32 nt, Human
gggcagccggagggcagggcucagggagcagg

SEQ ID NO: 464263 - RNA, 32 nt, Human
gggcagccgggagacugggcucugccuaggcu

SEQ ID NO: 464264 - RNA, 17 nt, Human
gggcagccggggggcag

SEQ ID NO: 464265 - RNA, 32 nt, Human
gggcagccuagagguguugggaacccuggccu

SEQ ID NO: 464266 - RNA, 32 nt, Human
gggcagccucggcagucugggcuccgggcccc

SEQ ID NO: 464267 - RNA, 32 nt, Human
gggcagccucugucugugugguuaauguucug

SEQ ID NO: 464268 - RNA, 32 nt, Human
gggcagccugcaggaguccauuuuacacaggu

SEQ ID NO: 464269 - RNA, 21 nt, Human
gggcagccugcagggcagcug

SEQ ID NO: 464270 - RNA, 32 nt, Human
gggcagccugcucuccuccuggggcccuguuc

SEQ ID NO: 464271 - RNA, 32 nt, Human
gggcagccuggaccggcugcugcugcacggga

SEQ ID NO: 464272 - RNA, 32 nt, Human
gggcagccugggaagagccaggaagcugggag

SEQ ID NO: 464273 - RNA, 32 nt, Human
gggcagcgagggccuaccaccaugaucacugg

SEQ ID NO: 464274 - RNA, 20 nt, Human
gggcagcgcagggcgcagag

SEQ ID NO: 464275 - RNA, 19 nt, Human
gggcagcggaacccagaga

SEQ ID NO: 464276 - RNA, 32 nt, Human
gggcagcggaggaggaaauggcagguccuaau

SEQ ID NO: 464277 - RNA, 32 nt, Human
gggcagcggcgaggaggaggaagaggaggcgg

SEQ ID NO: 464278 - RNA, 24 nt, Human
gggcagcggcggcagcggaggcag

SEQ ID NO: 464279 - RNA, 32 nt, Human
gggcagcggcuucccccucuagccccuccccu

SEQ ID NO: 464280 - RNA, 32 nt, Human
gggcagcggggagccucacaagaggacuacag

SEQ ID NO: 464281 - RNA, 19 nt, Human
gggcagcguaugggggcag

SEQ ID NO: 464282 - RNA, 32 nt, Human
gggcagcgugccugugccaacccuuccaggga

SEQ ID NO: 464283 - RNA, 20 nt, Human
gggcagcgugcugaguggga

SEQ ID NO: 464284 - RNA, 32 nt, Human
gggcagcguggugggggauaaauaaauaaaag

SEQ ID NO: 464285 - RNA, 32 nt, Human
gggcagcuaacaagggcugagccccagguaca

SEQ ID NO: 464286 - RNA, 32 nt, Human
gggcagcuacauguugagaaccacagcguccu

SEQ ID NO: 464287 - RNA, 18 nt, Human
gggcagcucaaggcuccu

SEQ ID NO: 464288 - RNA, 32 nt, Human
gggcagcucagaccucaucggacaucagguaa

SEQ ID NO: 464289 - RNA, 32 nt, Human
gggcagcucaugggauggucaggagucccacg

SEQ ID NO: 464290 - RNA, 32 nt, Human
gggcagcuccauccucuugaucuucuaaaugc

SEQ ID NO: 464291 - RNA, 32 nt, Human
gggcagcucccaggauauccugccuuccaacu

SEQ ID NO: 464292 - RNA, 32 nt, Human
gggcagcucccaggcccuugggcaggcugggg

SEQ ID NO: 464293 - RNA, 32 nt, Human
gggcagcuccucaccaugauccugcaccaguu

SEQ ID NO: 464294 - RNA, 24 nt, Human
gggcagcuccuuccccagccagga

SEQ ID NO: 464295 - RNA, 32 nt, Human
gggcagcucgaggcacgacuccagccucuucg

SEQ ID NO: 464296 - RNA, 32 nt, Human
gggcagcucuccccucacucuccuccaccugc

SEQ ID NO: 464297 - RNA, 21 nt, Human
gggcagcucugagcucgcgga

SEQ ID NO: 464298 - RNA, 32 nt, Human
gggcagcucugccccuguggcuuuguagggua

SEQ ID NO: 464299 - RNA, 32 nt, Human
gggcagcucugccuccuccucccaugaggugg

SEQ ID NO: 464300 - RNA, 32 nt, Human
gggcagcucuggaaggguugggggcuccccug

SEQ ID NO: 464301 - RNA, 32 nt, Human
gggcagcugaaaagcuggcgcagcccaaggag

SEQ ID NO: 464302 - RNA, 32 nt, Human
gggcagcugaacugagcguaugugccacgccg

SEQ ID NO: 464303 - RNA, 22 nt, Human
gggcagcugcaggacugagccu

SEQ ID NO: 464304 - RNA, 20 nt, Human
gggcagcugcaggagcgcug

SEQ ID NO: 464305 - RNA, 17 nt, Human
gggcagcugcccuggca

SEQ ID NO: 464306 - RNA, 32 nt, Human
gggcagcugccuggccaugcugucccugcacu

SEQ ID NO: 464307 - RNA, 32 nt, Human
gggcagcugcuugugggagagcugaggucuag

SEQ ID NO: 464308 - RNA, 21 nt, Human
gggcagcuggccugccacgga

SEQ ID NO: 464309 - RNA, 32 nt, Human
gggcagcuggcgugguggcucacaccuguaau

SEQ ID NO: 464310 - RNA, 23 nt, Human
gggcagcuggcugacagcuggga

SEQ ID NO: 464311 - RNA, 32 nt, Human
gggcagcugggagacaggcucauggcucaugg

SEQ ID NO: 464312 - RNA, 18 nt, Human
gggcagcugggccccaga

SEQ ID NO: 464313 - RNA, 32 nt, Human
gggcagcugggcugaggacuggaacauucugu

SEQ ID NO: 464314 - RNA, 19 nt, Human
gggcagcuggggccacaag

SEQ ID NO: 464315 - RNA, 32 nt, Human
gggcagcugugggcacagcuucaggacacuua

SEQ ID NO: 464316 - RNA, 32 nt, Human
gggcagcuucacaagccaucucuuucauuucu

SEQ ID NO: 464317 - RNA, 32 nt, Human
gggcagcuucaggggaggacaccccacuggcc

SEQ ID NO: 464318 - RNA, 32 nt, Human
gggcagcuucuggaaguggcugagacuggaag

SEQ ID NO: 464319 - RNA, 32 nt, Human
gggcagcuugggcccagacuccuccgcugugu

SEQ ID NO: 464320 - RNA, 22 nt, Human
gggcagcuuuaaucagguuggg

SEQ ID NO: 464321 - RNA, 32 nt, Human
gggcaggaaccgcggaauuccugcucuucguu

SEQ ID NO: 464322 - RNA, 32 nt, Human
gggcaggaagcccacggcccacagggguguag

SEQ ID NO: 464323 - RNA, 32 nt, Human
gggcaggaagggacaggagcggagcaggacac

SEQ ID NO: 464324 - RNA, 32 nt, Human
gggcaggacaggcucuggagggaaaagccaga

SEQ ID NO: 464325 - RNA, 32 nt, Human
gggcaggacagguccucccugcagagagagac

SEQ ID NO: 464326 - RNA, 21 nt, Human
gggcaggacauuggcugggag

SEQ ID NO: 464327 - RNA, 18 nt, Human
gggcaggaccaggacaga

SEQ ID NO: 464328 - RNA, 16 nt, Human
gggcaggaccuagcug

SEQ ID NO: 464329 - RNA, 18 nt, Human
gggcaggaccugcaggga

SEQ ID NO: 464330 - RNA, 24 nt, Human
gggcaggaccugucagcugggagg

SEQ ID NO: 464331 - RNA, 32 nt, Human
gggcaggacugaagauuucacuacuuagcaua

SEQ ID NO: 464332 - RNA, 20 nt, Human
gggcaggagaagcccgggag

SEQ ID NO: 464333 - RNA, 32 nt, Human
gggcaggagacagacacguaacaggaacucgg

SEQ ID NO: 464334 - RNA, 21 nt, Human
gggcaggagagagggccgccc

SEQ ID NO: 464335 - RNA, 32 nt, Human
gggcaggagagcuuugggggaaaggaaaaggc

SEQ ID NO: 464336 - RNA, 32 nt, Human
gggcaggagauuguuucuucauucuucugaca

SEQ ID NO: 464337 - RNA, 32 nt, Human
gggcaggagcuugcacgaaaucacacagccaa

SEQ ID NO: 464338 - RNA, 22 nt, Human
gggcaggaggaaaggugggagg

SEQ ID NO: 464339 - RNA, 32 nt, Human
gggcaggaggagagaggaaaagggagggcgag

SEQ ID NO: 464340 - RNA, 20 nt, Human
gggcaggaggaggggugugg

SEQ ID NO: 464341 - RNA, 21 nt, Human
gggcaggaggcagcugagagg

SEQ ID NO: 464342 - RNA, 32 nt, Human
gggcaggaggcaggagauggcaauggaagcga

SEQ ID NO: 464343 - RNA, 22 nt, Human
gggcaggaggcggcgggcugcg

SEQ ID NO: 464344 - RNA, 32 nt, Human
gggcaggaggcuggggaugggggugggauaug

SEQ ID NO: 464345 - RNA, 32 nt, Human
gggcaggaggggcagggcgggccagguggagu

SEQ ID NO: 464346 - RNA, 32 nt, Human
gggcaggagggggcuggggcagcauccacugu

SEQ ID NO: 464347 - RNA, 26 nt, Human
gggcaggaggugcacggauccugcug

SEQ ID NO: 464348 - RNA, 32 nt, Human
gggcaggagguggacaucuuugggggacauua

SEQ ID NO: 464349 - RNA, 32 nt, Human
gggcaggagguggcagcggcagcagcuguguu

SEQ ID NO: 464350 - RNA, 32 nt, Human
gggcaggaguagcugagcucacaaggcagcaa

SEQ ID NO: 464351 - RNA, 20 nt, Human
gggcaggaucuagcagggag

SEQ ID NO: 464352 - RNA, 32 nt, Human
gggcaggaugcagagaaugacaaggcugaaag

SEQ ID NO: 464353 - RNA, 32 nt, Human
gggcaggaugcagugagccagccccagggcca

SEQ ID NO: 464354 - RNA, 31 nt, Human
gggcaggcaaagugcagauguaggagcugcu

SEQ ID NO: 464355 - RNA, 32 nt, Human
gggcaggcaagccagucuucugucuuccuuug

SEQ ID NO: 464356 - RNA, 32 nt, Human
gggcaggcaagcucguggagguggugguugaa

SEQ ID NO: 464357 - RNA, 32 nt, Human
gggcaggcagaagaagugguauacagagaauu

SEQ ID NO: 464358 - RNA, 32 nt, Human
gggcaggcagaagggagaaccagcucaagaca

SEQ ID NO: 464359 - RNA, 32 nt, Human
gggcaggcagaggcacuuuguacuugcuccaa

SEQ ID NO: 464360 - RNA, 25 nt, Human
gggcaggcagcagcagugcuaguag

SEQ ID NO: 464361 - RNA, 22 nt, Human
gggcaggcagcagccgggcagg

SEQ ID NO: 464362 - RNA, 32 nt, Human
gggcaggcagcaggcucaggcccacaccuugu

SEQ ID NO: 464363 - RNA, 32 nt, Human
gggcaggcaggagguggaguugcagcuguugg

SEQ ID NO: 464364 - RNA, 32 nt, Human
gggcaggcaggcaauggguggaaaucagggga

SEQ ID NO: 464365 - RNA, 16 nt, Human
gggcaggcaggggcag

SEQ ID NO: 464366 - RNA, 32 nt, Human
gggcaggcaucggagcuuccagccuggggaga

SEQ ID NO: 464367 - RNA, 32 nt, Human
gggcaggccagagagagagggcagauggacuc

SEQ ID NO: 464368 - RNA, 32 nt, Human
gggcaggccagcagggcagacaccaggaaaag

SEQ ID NO: 464369 - RNA, 32 nt, Human
gggcaggcccacccuccucuuugcgcccuuuc

SEQ ID NO: 464370 - RNA, 32 nt, Human
gggcaggccccuccucuguccaccgagacucu

SEQ ID NO: 464371 - RNA, 22 nt, Human
gggcaggccccucucugcaucu

SEQ ID NO: 464372 - RNA, 20 nt, Human
gggcaggccgcagagcaagg

SEQ ID NO: 464373 - RNA, 32 nt, Human
gggcaggccgggaguguacugugugcagcuga

SEQ ID NO: 464374 - RNA, 31 nt, Human
gggcaggccgggucucccaucccgaggccag

SEQ ID NO: 464375 - RNA, 32 nt, Human
gggcaggccugaggcugggaucccgugcugcu

SEQ ID NO: 464376 - RNA, 32 nt, Human
gggcaggccuuguucugaacuguuucgcuucu

SEQ ID NO: 464377 - RNA, 32 nt, Human
gggcaggcgaggggcucagggcucucgaauug

SEQ ID NO: 464378 - RNA, 32 nt, Human
gggcaggcucacugcccgcuucuuuuccuucu

SEQ ID NO: 464379 - RNA, 32 nt, Human
gggcaggcucagacaggcccagcuccaccaag

SEQ ID NO: 464380 - RNA, 20 nt, Human
gggcaggcuccaggcucacc

SEQ ID NO: 464381 - RNA, 32 nt, Human
gggcaggcuccuggauggacaccagcuacacu

SEQ ID NO: 464382 - RNA, 32 nt, Human
gggcaggcuggcugcuggcucuaccagguucu

SEQ ID NO: 464383 - RNA, 21 nt, Human
gggcaggcuucuccugcaccu

SEQ ID NO: 464384 - RNA, 32 nt, Human
gggcagggaagagagcgcccggcucaguacug

SEQ ID NO: 464385 - RNA, 32 nt, Human
gggcagggacgguccccacccccagggacaca

SEQ ID NO: 464386 - RNA, 32 nt, Human
gggcagggacguugccgggcagaggaagcugg

SEQ ID NO: 464387 - RNA, 32 nt, Human
gggcagggacuggcgcccugugccugaguggg

SEQ ID NO: 464388 - RNA, 32 nt, Human
gggcagggagagaggaccagggucagggggaa

SEQ ID NO: 464389 - RNA, 18 nt, Human
gggcagggagaugucaug

SEQ ID NO: 464390 - RNA, 32 nt, Human
gggcagggagccucagaugggaagaagucaga

SEQ ID NO: 464391 - RNA, 32 nt, Human
gggcagggagcugaaggacuccaccgcugccc

SEQ ID NO: 464392 - RNA, 32 nt, Human
gggcagggaggcaccauucaggaaccuggacc

SEQ ID NO: 464393 - RNA, 32 nt, Human
gggcagggagggagcaugaaguacgaggaaaa

SEQ ID NO: 464394 - RNA, 32 nt, Human
gggcagggagggcuggcauuucccccagaaga

SEQ ID NO: 464395 - RNA, 20 nt, Human
gggcagggaggggcagggug

SEQ ID NO: 464396 - RNA, 17 nt, Human
gggcagggagggggcgg

SEQ ID NO: 464397 - RNA, 32 nt, Human
gggcagggaggugaggacuucaucucaacauc

SEQ ID NO: 464398 - RNA, 32 nt, Human
gggcagggagucgaggaaggcccaggguucgg

SEQ ID NO: 464399 - RNA, 28 nt, Human
gggcagggcaggacugccucauccucug

SEQ ID NO: 464400 - RNA, 32 nt, Human
gggcagggcaugaguuagggagacugaagagu

SEQ ID NO: 464401 - RNA, 32 nt, Human
gggcagggccagacugcaccuuuauuagaguc

SEQ ID NO: 464402 - RNA, 32 nt, Human
gggcagggccagcuuccaucccuucuccagcc

SEQ ID NO: 464403 - RNA, 21 nt, Human
gggcagggccccggcgcugga

SEQ ID NO: 464404 - RNA, 32 nt, Human
gggcagggccccugacccucccggccuggcuu

SEQ ID NO: 464405 - RNA, 16 nt, Human
gggcagggccuggaca

SEQ ID NO: 464406 - RNA, 32 nt, Human
gggcagggccuggagcuucccacuaaaaacau

SEQ ID NO: 464407 - RNA, 22 nt, Human
gggcagggcuagcaacaucgua

SEQ ID NO: 464408 - RNA, 32 nt, Human
gggcagggcucagggagcaggaggcugcaucc

SEQ ID NO: 464409 - RNA, 32 nt, Human
gggcagggcugaggccucucauuccagaggaa

SEQ ID NO: 464410 - RNA, 32 nt, Human
gggcagggcugcagugggguccaggugguguu

SEQ ID NO: 464411 - RNA, 32 nt, Human
gggcagggcugccuccagccugcacgcuggcu

SEQ ID NO: 464412 - RNA, 32 nt, Human
gggcagggcugccuccucaccucucuucggcc

SEQ ID NO: 464413 - RNA, 32 nt, Human
gggcagggcuguaguuggugacuggguguuca

SEQ ID NO: 464414 - RNA, 32 nt, Human
gggcaggggaaagagaaagaagaugagagauu

SEQ ID NO: 464415 - RNA, 32 nt, Human
gggcaggggaaagagaaagaaggugagagauu

SEQ ID NO: 464416 - RNA, 32 nt, Human
gggcaggggaagcucucacucuguugccauua

SEQ ID NO: 464417 - RNA, 32 nt, Human
gggcaggggacagcagagcagagaggcccagg

SEQ ID NO: 464418 - RNA, 32 nt, Human
gggcaggggagagacucucuccccaccaccca

SEQ ID NO: 464419 - RNA, 32 nt, Human
gggcaggggagagacucucuccccaccacccg

SEQ ID NO: 464420 - RNA, 32 nt, Human
gggcaggggcaguggcuggauggugccuacug

SEQ ID NO: 464421 - RNA, 32 nt, Human
gggcaggggcgguggaggacucaggaacugcc

SEQ ID NO: 464422 - RNA, 32 nt, Human
gggcaggggcuccaggugaggagccagcaggc

SEQ ID NO: 464423 - RNA, 20 nt, Human
gggcaggggcugaaaggggc

SEQ ID NO: 464424 - RNA, 32 nt, Human
gggcaggggcugcagagggagguggaaaugaa

SEQ ID NO: 464425 - RNA, 32 nt, Human
gggcaggggcuggggcugagaacugcagcccu

SEQ ID NO: 464426 - RNA, 32 nt, Human
gggcagggggcagagagcagagaggagcggca

SEQ ID NO: 464427 - RNA, 32 nt, Human
gggcagggggccugagcgggacaggccuggcc

SEQ ID NO: 464428 - RNA, 32 nt, Human
gggcaggggguguggcaggagcucccagcacu

SEQ ID NO: 464429 - RNA, 32 nt, Human
gggcagggguagaggcucguagauggaacugg

SEQ ID NO: 464430 - RNA, 32 nt, Human
gggcaggggucaggagaacaggagaacagggg

SEQ ID NO: 464431 - RNA, 23 nt, Human
gggcaggggucccugcugggagg

SEQ ID NO: 464432 - RNA, 32 nt, Human
gggcaggggugagagagcaagggggcaggggu

SEQ ID NO: 464433 - RNA, 32 nt, Human
gggcaggggugagagagcaggagagcaggggu

SEQ ID NO: 464434 - RNA, 32 nt, Human
gggcaggggugaggagagcaagagggcagggg

SEQ ID NO: 464435 - RNA, 32 nt, Human
gggcaggggugaggagggagcaggagggcagg

SEQ ID NO: 464436 - RNA, 32 nt, Human
gggcaggggugagggggagcagaagagggaug

SEQ ID NO: 464437 - RNA, 32 nt, Human
gggcaggggugagggggagcaggagggcaggg

SEQ ID NO: 464438 - RNA, 32 nt, Human
gggcaggggugguggagagauggaagggcauc

SEQ ID NO: 464439 - RNA, 21 nt, Human
gggcaggguccuggccagcag

SEQ ID NO: 464440 - RNA, 32 nt, Human
gggcagggucucaaacaguccugacucacagg

SEQ ID NO: 464441 - RNA, 32 nt, Human
gggcagggucuggcgggcucucaggccagggg

SEQ ID NO: 464442 - RNA, 32 nt, Human
gggcagggugcagaggaaaacaugccgcaugg

SEQ ID NO: 464443 - RNA, 32 nt, Human
gggcaggguggggcaggaugcagugagccagc

SEQ ID NO: 464444 - RNA, 17 nt, Human
gggcagggugggggcag

SEQ ID NO: 464445 - RNA, 32 nt, Human
gggcagggugugggaacagagcuggggucaga

SEQ ID NO: 464446 - RNA, 32 nt, Human
gggcagguagcagucccuggccucucccccug

SEQ ID NO: 464447 - RNA, 32 nt, Human
gggcaggucuucuccuccucuccaucccuauu

SEQ ID NO: 464448 - RNA, 32 nt, Human
gggcaggugaguggcagcugugcuccagcucc

SEQ ID NO: 464449 - RNA, 32 nt, Human
gggcaggugcaaguucauaggucuccaagacc

SEQ ID NO: 464450 - RNA, 32 nt, Human
gggcaggugccuguaaucccagcacuuuggga

SEQ ID NO: 464451 - RNA, 32 nt, Human
gggcagguggaggagcugggccucccacaggg

SEQ ID NO: 464452 - RNA, 20 nt, Human
gggcagguggcguaacccag

SEQ ID NO: 464453 - RNA, 32 nt, Human
gggcagguggggcaauccagagcugugggggc

SEQ ID NO: 464454 - RNA, 32 nt, Human
gggcaggugggggaauggaggcugcaggacug

SEQ ID NO: 464455 - RNA, 32 nt, Human
gggcagguggguaggagagggaaagccagagu

SEQ ID NO: 464456 - RNA, 23 nt, Human
gggcaggugguccuagacagcag

SEQ ID NO: 464457 - RNA, 16 nt, Human
gggcagguguggggug

SEQ ID NO: 464458 - RNA, 21 nt, Human
gggcagguuagaagacagcag

SEQ ID NO: 464459 - RNA, 32 nt, Human
gggcagguugagaagccaggggccaagaugga

SEQ ID NO: 464460 - RNA, 21 nt, Human
gggcagguugugaggccacag

SEQ ID NO: 464461 - RNA, 32 nt, Human
gggcagguuucugcuucuucuguuuugcccca

SEQ ID NO: 464462 - RNA, 32 nt, Human
gggcagguuuuaaacucuugaccucauguucc

SEQ ID NO: 464463 - RNA, 32 nt, Human
gggcagguuuuccaggcuggagucgguuccac

SEQ ID NO: 464464 - RNA, 32 nt, Human
gggcaguaagacgacccccagccccgggcccc

SEQ ID NO: 464465 - RNA, 32 nt, Human
gggcaguaagugggguggagcccagugagacu

SEQ ID NO: 464466 - RNA, 32 nt, Human
gggcaguagcagcagaggccaguggacucuga

SEQ ID NO: 464467 - RNA, 32 nt, Human
gggcaguaggggaaauggaguugcuucaaccu

SEQ ID NO: 464468 - RNA, 32 nt, Human
gggcagucaccacccagcccuuccuugggcgu

SEQ ID NO: 464469 - RNA, 32 nt, Human
gggcagucagacagcagccacagggagagggu

SEQ ID NO: 464470 - RNA, 17 nt, Human
gggcagucagggagcag

SEQ ID NO: 464471 - RNA, 32 nt, Human
gggcagucguaggagacucugaaaaagcaaau

SEQ ID NO: 464472 - RNA, 32 nt, Human
gggcagucuuccucccccuccccgaccaaacc

SEQ ID NO: 464473 - RNA, 32 nt, Human
gggcagugaacagaccacuagccccggcuggg

SEQ ID NO: 464474 - RNA, 32 nt, Human
gggcagugaagguagguuucagguuugguuuu

SEQ ID NO: 464475 - RNA, 21 nt, Human
gggcagugaccagucuguauc

SEQ ID NO: 464476 - RNA, 32 nt, Human
gggcagugacuucagaccccaaaggagucaga

SEQ ID NO: 464477 - RNA, 32 nt, Human
gggcagugagccaggcuagccacagaggguuc

SEQ ID NO: 464478 - RNA, 32 nt, Human
gggcagugaggaagggaaauauggggcuguag

SEQ ID NO: 464479 - RNA, 32 nt, Human
gggcagugagucuggccaaaauguaaacccca

SEQ ID NO: 464480 - RNA, 19 nt, Human
gggcagugcaggggaccug

SEQ ID NO: 464481 - RNA, 32 nt, Human
gggcagugccugauaagcuucaaagcugcuuu

SEQ ID NO: 464482 - RNA, 31 nt, Human
gggcagugcguggaaaggccggggaggugca

SEQ ID NO: 464483 - RNA, 32 nt, Human
gggcagugcugguaggguuucaaggugcuauu

SEQ ID NO: 464484 - RNA, 32 nt, Human
gggcaguggaaugcugauggaggcagacgcug

SEQ ID NO: 464485 - RNA, 32 nt, Human
gggcaguggacccuugacaaaauuuaauuacc

SEQ ID NO: 464486 - RNA, 32 nt, Human
gggcaguggagaggggacuuggauaggagcuu

SEQ ID NO: 464487 - RNA, 32 nt, Human
gggcaguggaggggcccgaggagccagguugc

SEQ ID NO: 464488 - RNA, 32 nt, Human
gggcaguggcugacacagaccacccacuccac

SEQ ID NO: 464489 - RNA, 22 nt, Human
gggcaguggcugacagcuggga

SEQ ID NO: 464490 - RNA, 29 nt, Human
gggcaguggcugcucguguccucugccac

SEQ ID NO: 464491 - RNA, 32 nt, Human
gggcagugggcucugagcuaggaggagguggc

SEQ ID NO: 464492 - RNA, 32 nt, Human
gggcagugggggaaggaaggggagaggugguu

SEQ ID NO: 464493 - RNA, 32 nt, Human
gggcaguggggugagaagguccuggcuccccu

SEQ ID NO: 464494 - RNA, 31 nt, Human
gggcaguggguggagggcugccaggaaacau

SEQ ID NO: 464495 - RNA, 32 nt, Human
gggcagugguucaugccuuaaucccagcacuu

SEQ ID NO: 464496 - RNA, 32 nt, Human
gggcagugugggcucauggcacugggauggua

SEQ ID NO: 464497 - RNA, 32 nt, Human
gggcaguuaccugcaugccuaaaggaguaggc

SEQ ID NO: 464498 - RNA, 32 nt, Human
gggcaguuacuggagacuguaucugcagcaga

SEQ ID NO: 464499 - RNA, 32 nt, Human
gggcaguucauuccaaauccagcacugcuguu

SEQ ID NO: 464500 - RNA, 32 nt, Human
gggcaguuccugaccagcaccccaccaagucc

SEQ ID NO: 464501 - RNA, 22 nt, Human
gggcaguugcgugacccugcug

SEQ ID NO: 464502 - RNA, 32 nt, Human
gggcaguuguuggagccccacccugggcugcc

SEQ ID NO: 464503 - RNA, 32 nt, Human
gggcauaaaggagcacucaauugcagagauuu

SEQ ID NO: 464504 - RNA, 32 nt, Human
gggcauaagggaugaaaacuuggccgagacua

SEQ ID NO: 464505 - RNA, 32 nt, Human
gggcauaauuuaugggcucagaaagggaagaa

SEQ ID NO: 464506 - RNA, 32 nt, Human
gggcauacaagaaacugcacgucuuuaaagug

SEQ ID NO: 464507 - RNA, 32 nt, Human
gggcauacacagaacgaacggggcagagaggu

SEQ ID NO: 464508 - RNA, 32 nt, Human
gggcauacagaagaaggcaggaguugauuuuu

SEQ ID NO: 464509 - RNA, 32 nt, Human
gggcauacagcauccgauuuaaucuggaucca

SEQ ID NO: 464510 - RNA, 32 nt, Human
gggcauacauguuagccaaaucuacacucagc

SEQ ID NO: 464511 - RNA, 18 nt, Human
gggcauaccacuucucca

SEQ ID NO: 464512 - RNA, 32 nt, Human
gggcauagaguagagaauagcuucauauguuu

SEQ ID NO: 464513 - RNA, 32 nt, Human
gggcauagagugaguggaugugaugggcugug

SEQ ID NO: 464514 - RNA, 20 nt, Human
gggcauagcagauggggcag

SEQ ID NO: 464515 - RNA, 32 nt, Human
gggcauagcuccaugucuucugacauuccugg

SEQ ID NO: 464516 - RNA, 24 nt, Human
gggcauaggagggagggccgcagc

SEQ ID NO: 464517 - RNA, 23 nt, Human
gggcauagugguggucaccugua

SEQ ID NO: 464518 - RNA, 22 nt, Human
gggcauaguuucacaaaagcuu

SEQ ID NO: 464519 - RNA, 18 nt, Human
gggcauauaagcuauggg

SEQ ID NO: 464520 - RNA, 32 nt, Human
gggcauauagugagacaguggcagggaaccca

SEQ ID NO: 464521 - RNA, 32 nt, Human
gggcauaugccccagccccuguaccaccccug

SEQ ID NO: 464522 - RNA, 32 nt, Human
gggcaucacccaggugaaugguguccagguga

SEQ ID NO: 464523 - RNA, 32 nt, Human
gggcaucagagaauggcauggaagagacaguc

SEQ ID NO: 464524 - RNA, 19 nt, Human
gggcaucagcuccagguca

SEQ ID NO: 464525 - RNA, 32 nt, Human
gggcaucagcuuucccuggcucagggaucuuc

SEQ ID NO: 464526 - RNA, 32 nt, Human
gggcaucaugagguagagaugggggcucgcau

SEQ ID NO: 464527 - RNA, 32 nt, Human
gggcaucaugaucuuugccuuccuugaaaaua

SEQ ID NO: 464528 - RNA, 32 nt, Human
gggcaucaugcuguaugggguggacagccgga

SEQ ID NO: 464529 - RNA, 20 nt, Human
gggcauccacgggcgccgag

SEQ ID NO: 464530 - RNA, 23 nt, Human
gggcauccagacgggauccagug

SEQ ID NO: 464531 - RNA, 23 nt, Human
gggcauccaggcagguccagcag

SEQ ID NO: 464532 - RNA, 32 nt, Human
gggcauccaguggcagcuccccaaaccaggcc

SEQ ID NO: 464533 - RNA, 32 nt, Human
gggcaucccggaagcugggaaaugggacuguu

SEQ ID NO: 464534 - RNA, 32 nt, Human
gggcaucccuagugaaggggcaaaccugagau

SEQ ID NO: 464535 - RNA, 19 nt, Human
gggcaucccugcaaaaggg

SEQ ID NO: 464536 - RNA, 32 nt, Human
gggcauccgggccugguagggacggggcgggu

SEQ ID NO: 464537 - RNA, 32 nt, Human
gggcauccguggugccuucuagcuuagaacca

SEQ ID NO: 464538 - RNA, 32 nt, Human
gggcauccugaacaaauacauggagauccaug

SEQ ID NO: 464539 - RNA, 32 nt, Human
gggcauccuggaccagcucuccacugaggagc

SEQ ID NO: 464540 - RNA, 32 nt, Human
gggcauccugggcccgggaagggaggccccug

SEQ ID NO: 464541 - RNA, 32 nt, Human
gggcauccuuguccuuugucuggcagacagcc

SEQ ID NO: 464542 - RNA, 32 nt, Human
gggcaucgaggggugcuuagccccagggcacu

SEQ ID NO: 464543 - RNA, 32 nt, Human
gggcaucgaugcugccccgggcuaccuggcug

SEQ ID NO: 464544 - RNA, 32 nt, Human
gggcaucgcugaggcccugagcaucccaggag

SEQ ID NO: 464545 - RNA, 16 nt, Human
gggcaucggggggcag

SEQ ID NO: 464546 - RNA, 21 nt, Human
gggcaucggucagcggggcag

SEQ ID NO: 464547 - RNA, 32 nt, Human
gggcaucguagugagacuccaucucugucuuu

SEQ ID NO: 464548 - RNA, 32 nt, Human
gggcaucuacccaagaagggagcacagggcaa

SEQ ID NO: 464549 - RNA, 19 nt, Human
gggcaucucaccacgacuu

SEQ ID NO: 464550 - RNA, 32 nt, Human
gggcaucucauccagggauucucaaaccaugu

SEQ ID NO: 464551 - RNA, 32 nt, Human
gggcaucucgacaaaaaggaauugaaagcccu

SEQ ID NO: 464552 - RNA, 32 nt, Human
gggcaucugaaaaaccuagaacaaguuuaacu

SEQ ID NO: 464553 - RNA, 32 nt, Human
gggcaucugggaggcucuggcugccuucugca

SEQ ID NO: 464554 - RNA, 20 nt, Human
gggcaucuggggaagggcag

SEQ ID NO: 464555 - RNA, 32 nt, Human
gggcaucuggugaucuuaggccugguuauuag

SEQ ID NO: 464556 - RNA, 32 nt, Human
gggcaucuguaauccuagcugcucgggaggcu

SEQ ID NO: 464557 - RNA, 32 nt, Human
gggcaucuguagucccagcuacucaggaggcu

SEQ ID NO: 464558 - RNA, 32 nt, Human
gggcaucugucugucugugggcuucagcacuu

SEQ ID NO: 464559 - RNA, 32 nt, Human
gggcaucugugauaccagcuacuugggaggcu

SEQ ID NO: 464560 - RNA, 32 nt, Human
gggcaucuuccagguggggaaacagucuuaga

SEQ ID NO: 464561 - RNA, 32 nt, Human
gggcaucuugccugcggggaccugugugugcc

SEQ ID NO: 464562 - RNA, 23 nt, Human
gggcaugaaaacaaagaaaugcc

SEQ ID NO: 464563 - RNA, 21 nt, Human
gggcaugaaaacaagaggucu

SEQ ID NO: 464564 - RNA, 32 nt, Human
gggcaugaaaguuguuuagauugucuucccag

SEQ ID NO: 464565 - RNA, 23 nt, Human
gggcaugaagacugagcaaagcu

SEQ ID NO: 464566 - RNA, 32 nt, Human
gggcaugaaggccucggaggcaacugugccug

SEQ ID NO: 464567 - RNA, 23 nt, Human
gggcaugacggcucaugccugua

SEQ ID NO: 464568 - RNA, 32 nt, Human
gggcaugagaccgagggugaggcuggaggguc

SEQ ID NO: 464569 - RNA, 32 nt, Human
gggcaugagaggcagagugcacaguggucaag

SEQ ID NO: 464570 - RNA, 32 nt, Human
gggcaugagccaccgcacccagcuugcauuga

SEQ ID NO: 464571 - RNA, 32 nt, Human
gggcaugagccacugcacccggcccugagaau

SEQ ID NO: 464572 - RNA, 32 nt, Human
gggcaugagccccugcgccugaccuucaacag

SEQ ID NO: 464573 - RNA, 32 nt, Human
gggcaugauaacacaucccuguagucccagcu

SEQ ID NO: 464574 - RNA, 23 nt, Human
gggcaugauggcucaugccugua

SEQ ID NO: 464575 - RNA, 23 nt, Human
gggcaugauggugguggccugua

SEQ ID NO: 464576 - RNA, 20 nt, Human
gggcaugcacuggggggcug

SEQ ID NO: 464577 - RNA, 32 nt, Human
gggcaugcagauuaguagaacuuucaaguaaa

SEQ ID NO: 464578 - RNA, 32 nt, Human
gggcaugccaggugccaaggagccaaacagau

SEQ ID NO: 464579 - RNA, 17 nt, Human
gggcaugccaugucuga

SEQ ID NO: 464580 - RNA, 32 nt, Human
gggcaugccuguaaucccagaauuuugggagg

SEQ ID NO: 464581 - RNA, 32 nt, Human
gggcaugccuguagucccagcuauucuggagg

SEQ ID NO: 464582 - RNA, 32 nt, Human
gggcaugcgugcaccauuccagcauccggcaa

SEQ ID NO: 464583 - RNA, 32 nt, Human
gggcauggaaccuggacacccucagcucuccu

SEQ ID NO: 464584 - RNA, 32 nt, Human
gggcauggaccagccuucagauggcagaagug

SEQ ID NO: 464585 - RNA, 32 nt, Human
gggcauggacuucaccuccugguccucucuuc

SEQ ID NO: 464586 - RNA, 32 nt, Human
gggcauggagaaaggugacccugaucccaaac

SEQ ID NO: 464587 - RNA, 32 nt, Human
gggcauggagccaccgggaccccaggaggaga

SEQ ID NO: 464588 - RNA, 32 nt, Human
gggcauggagcuucacuccuugcuggccaggg

SEQ ID NO: 464589 - RNA, 22 nt, Human
gggcauggcagggccaggccuc

SEQ ID NO: 464590 - RNA, 23 nt, Human
gggcauggccugcacaaaggucu

SEQ ID NO: 464591 - RNA, 21 nt, Human
gggcauggccugggucgcacc

SEQ ID NO: 464592 - RNA, 23 nt, Human
gggcaugggaaggauuuaacacc

SEQ ID NO: 464593 - RNA, 32 nt, Human
gggcaugggagagaggcaaguggaaaaugauu

SEQ ID NO: 464594 - RNA, 22 nt, Human
gggcaugggaggaaggaggcac

SEQ ID NO: 464595 - RNA, 32 nt, Human
gggcaugggauaggacaggagaggaggugaug

SEQ ID NO: 464596 - RNA, 32 nt, Human
gggcaugggauggugaccucagcuggaacaug

SEQ ID NO: 464597 - RNA, 32 nt, Human
gggcaugggcaggccagcuggccgagcuccug

SEQ ID NO: 464598 - RNA, 22 nt, Human
gggcauggggcgcagccgcgcc

SEQ ID NO: 464599 - RNA, 25 nt, Human
gggcauggguggauuuagccaagga

SEQ ID NO: 464600 - RNA, 32 nt, Human
gggcaugguagcaggugucuguuaucccaguu

SEQ ID NO: 464601 - RNA, 23 nt, Human
gggcauggugacacaugccugua

SEQ ID NO: 464602 - RNA, 23 nt, Human
gggcauggugaugcaugccugua

SEQ ID NO: 464603 - RNA, 32 nt, Human
gggcauggugcaugccuguaaucccagccacu

SEQ ID NO: 464604 - RNA, 32 nt, Human
gggcauggugcaugccuguaaucccagcugcu

SEQ ID NO: 464605 - RNA, 32 nt, Human
ggggaaagugcaguaccgucaucuucaagccu

SEQ ID NO: 464606 - RNA, 32 nt, Human
ggggaaaguguauccauauacacgcacaggug

SEQ ID NO: 464607 - RNA, 32 nt, Human
ggggaaauaaagugccuuacugacuguagcca

SEQ ID NO: 464608 - RNA, 32 nt, Human
ggggaaauauauucugauuccuaacaaccaac

SEQ ID NO: 464609 - RNA, 32 nt, Human
ggggaaaugcaggacugagaggcaacguggcu

SEQ ID NO: 464610 - RNA, 32 nt, Human
ggggaaauggccacugcagauggaguuuuaga

SEQ ID NO: 464611 - RNA, 32 nt, Human
ggggaaauggguaugagagacugaggcuugag

SEQ ID NO: 464612 - RNA, 32 nt, Human
ggggaaaugugugugucaguucugucagcugc

SEQ ID NO: 464613 - RNA, 32 nt, Human
ggggaacaaaggaaggagcaucagcagggucu

SEQ ID NO: 464614 - RNA, 31 nt, Human
ggggaacaaguguccuucagaacccagagaa

SEQ ID NO: 464615 - RNA, 21 nt, Human
ggggaacagagaagagacagg

SEQ ID NO: 464616 - RNA, 32 nt, Human
ggggaacagagauucagccaaagucaagaaac

SEQ ID NO: 464617 - RNA, 21 nt, Human
ggggaacagaugaauauuuca

SEQ ID NO: 464618 - RNA, 24 nt, Human
ggggaacagaugggacaauaaaga

SEQ ID NO: 464619 - RNA, 32 nt, Human
ggggaacagauguggccacaguccuuccugac

SEQ ID NO: 464620 - RNA, 32 nt, Human
ggggaacaggaaagucuggggagccacaggag

SEQ ID NO: 464621 - RNA, 32 nt, Human
ggggaacaggaugcccagcccagggggcaagg

SEQ ID NO: 464622 - RNA, 32 nt, Human
ggggaacaggcagaggggcgguaaggaagggc

SEQ ID NO: 464623 - RNA, 32 nt, Human
ggggaacaggcagugaggaaggagacaggggu

SEQ ID NO: 464624 - RNA, 32 nt, Human
ggggaacagggcggagcugagcuuaaaaucgg

SEQ ID NO: 464625 - RNA, 32 nt, Human
ggggaacauggcaagaccccaucucuacaaaa

SEQ ID NO: 464626 - RNA, 22 nt, Human
ggggaaccacauugauauucua

SEQ ID NO: 464627 - RNA, 28 nt, Human
ggggaacccaagccaagcgccugccuuu

SEQ ID NO: 464628 - RNA, 28 nt, Human
ggggaacccaaguguggcagcugccucu

SEQ ID NO: 464629 - RNA, 32 nt, Human
ggggaacccacugccggagcaguccuaucaca

SEQ ID NO: 464630 - RNA, 32 nt, Human
ggggaacccacuguaugccccucuccagcauu

SEQ ID NO: 464631 - RNA, 28 nt, Human
ggggaacccaggcaucacaccugccucu

SEQ ID NO: 464632 - RNA, 28 nt, Human
ggggaacccaggcugugcgccugccccu

SEQ ID NO: 464633 - RNA, 28 nt, Human
ggggaacccaggugcaccgccugccucu

SEQ ID NO: 464634 - RNA, 28 nt, Human
ggggaacccgaacucgcggccugccucu

SEQ ID NO: 464635 - RNA, 28 nt, Human
ggggaacccgaauguggcggcugccucu

SEQ ID NO: 464636 - RNA, 28 nt, Human
ggggaacccggacucagcuccugccucu

SEQ ID NO: 464637 - RNA, 32 nt, Human
ggggaaccuaggcagggcuggcuuucuuagcg

SEQ ID NO: 464638 - RNA, 18 nt, Human
ggggaacgcaauauucca

SEQ ID NO: 464639 - RNA, 28 nt, Human
ggggaacuaagugcugacuaguuuguuu

SEQ ID NO: 464640 - RNA, 32 nt, Human
ggggaacuaggagagcaggaguagaagugaga

SEQ ID NO: 464641 - RNA, 32 nt, Human
ggggaacuaucuuccuugauguuaacauuuca

SEQ ID NO: 464642 - RNA, 32 nt, Human
ggggaacucgcagccuugcagcgcggguggga

SEQ ID NO: 464643 - RNA, 32 nt, Human
ggggaacugcucacugacagcuucucuguaac

SEQ ID NO: 464644 - RNA, 32 nt, Human
ggggaacuugcagcuuaaagccagccaccccc

SEQ ID NO: 464645 - RNA, 32 nt, Human
ggggaacuuguagccagaaugcccuguucaug

SEQ ID NO: 464646 - RNA, 32 nt, Human
ggggaagaaagaacaagaaagucagaccugag

SEQ ID NO: 464647 - RNA, 32 nt, Human
ggggaagaaaugggcccagccccacauggccu

SEQ ID NO: 464648 - RNA, 32 nt, Human
ggggaagaaggaggagaagaugaagaagcacc

SEQ ID NO: 464649 - RNA, 21 nt, Human
ggggaagaaucaaagagcaga

SEQ ID NO: 464650 - RNA, 32 nt, Human
ggggaagaaugcaggagggguaggauuucuuu

SEQ ID NO: 464651 - RNA, 23 nt, Human
ggggaagaauugaaagagagaga

SEQ ID NO: 464652 - RNA, 17 nt, Human
ggggaagacagccggcc

SEQ ID NO: 464653 - RNA, 15 nt, Human
ggggaagacaggaau

SEQ ID NO: 464654 - RNA, 32 nt, Human
ggggaagacauugucucucaaaggggccagac

SEQ ID NO: 464655 - RNA, 32 nt, Human
ggggaagaccuagaacccuuuccccagcacuu

SEQ ID NO: 464656 - RNA, 22 nt, Human
ggggaagacugagagagacaga

SEQ ID NO: 464657 - RNA, 32 nt, Human
ggggaagagaggaggggagaggagaagggaaa

SEQ ID NO: 464658 - RNA, 32 nt, Human
ggggaagagaggcacagacacagauaggagaa

SEQ ID NO: 464659 - RNA, 32 nt, Human
ggggaagagaggcagagagggaaagaggcaga

SEQ ID NO: 464660 - RNA, 32 nt, Human
ggggaagagaggcaggcucucaguccccgcuu

SEQ ID NO: 464661 - RNA, 32 nt, Human
ggggaagagagggaagagaaagcacagagcag

SEQ ID NO: 464662 - RNA, 32 nt, Human
ggggaagagcagcuccaggagucaggcaaccu

SEQ ID NO: 464663 - RNA, 32 nt, Human
ggggaagagcucgccugcuccugagggaagca

SEQ ID NO: 464664 - RNA, 32 nt, Human
ggggaagaggaacccuuguucucugcaaggga

SEQ ID NO: 464665 - RNA, 32 nt, Human
ggggaagaggacacgcagaggagcagcuggcu

SEQ ID NO: 464666 - RNA, 32 nt, Human
ggggaagaggagaagaggguaagggggcuuca

SEQ ID NO: 464667 - RNA, 32 nt, Human
ggggaagaggaggaggagguuguugaugacac

SEQ ID NO: 464668 - RNA, 32 nt, Human
ggggaagagggacuggcucucagucccugccu

SEQ ID NO: 464669 - RNA, 32 nt, Human
ggggaagaggggcuggcucucaguccccgacu

SEQ ID NO: 464670 - RNA, 32 nt, Human
ggggaagaggggcuggcucucaguccccgccu

SEQ ID NO: 464671 - RNA, 32 nt, Human
ggggaagaggggcuggcucucaguccccgucu

SEQ ID NO: 464672 - RNA, 32 nt, Human
ggggaagaggggcuggcucucagucccugccu

SEQ ID NO: 464673 - RNA, 32 nt, Human
ggggaagaggggcugguucucaguccccgccu

SEQ ID NO: 464674 - RNA, 32 nt, Human
ggggaagagguucuggcucucaguccccgccu

SEQ ID NO: 464675 - RNA, 32 nt, Human
ggggaagaguagacacugcugaaggaaagaac

SEQ ID NO: 464676 - RNA, 32 nt, Human
ggggaagaguccaaggaagggagggagcagcc

SEQ ID NO: 464677 - RNA, 22 nt, Human
ggggaagauagagaaaagcaga

SEQ ID NO: 464678 - RNA, 32 nt, Human
ggggaagauggacccggcgcccucgcugggcu

SEQ ID NO: 464679 - RNA, 32 nt, Human
ggggaagauggcggcguccucccuggaacaga

SEQ ID NO: 464680 - RNA, 32 nt, Human
ggggaagcaaaaggcugccucggguguuuuaa

SEQ ID NO: 464681 - RNA, 32 nt, Human
ggggaagcaaaugaauucucagaggaaguggu

SEQ ID NO: 464682 - RNA, 18 nt, Human
ggggaagcagcagcggcc

SEQ ID NO: 464683 - RNA, 32 nt, Human
ggggaagcauggggauccgggagaagcaccca

SEQ ID NO: 464684 - RNA, 32 nt, Human
ggggaagccaccucaccucccuagagccucug

SEQ ID NO: 464685 - RNA, 32 nt, Human
ggggaagccccaggaaacgcacaugcccacac

SEQ ID NO: 464686 - RNA, 32 nt, Human
ggggaagccgcccugcgguucaucucacagcg

SEQ ID NO: 464687 - RNA, 32 nt, Human
ggggaagccggucacauggacacaccugugca

SEQ ID NO: 464688 - RNA, 32 nt, Human
ggggaagccugagguagucaacccaggagcca

SEQ ID NO: 464689 - RNA, 18 nt, Human
ggggaagcgagcccgccg

SEQ ID NO: 464690 - RNA, 32 nt, Human
ggggaagcgugugagagagugagaccgacaga

SEQ ID NO: 464691 - RNA, 32 nt, Human
ggggaagcugagagacagaggaggaacucaga

SEQ ID NO: 464692 - RNA, 32 nt, Human
ggggaagcuucaaaauauaucugugacucugu

SEQ ID NO: 464693 - RNA, 32 nt, Human
ggggaaggaacacuguaggggauagcugucca

SEQ ID NO: 464694 - RNA, 22 nt, Human
ggggaaggaacggcgaggccgg

SEQ ID NO: 464695 - RNA, 32 nt, Human
ggggaaggaagggcaugaggaauggccccggc

SEQ ID NO: 464696 - RNA, 32 nt, Human
ggggaaggacaguguggugugacuauuggcuu

SEQ ID NO: 464697 - RNA, 20 nt, Human
ggggaaggagaagagacuga

SEQ ID NO: 464698 - RNA, 32 nt, Human
ggggaaggagagaagggcagcucaggguggau

SEQ ID NO: 464699 - RNA, 32 nt, Human
ggggaaggagcacggggcugaucaagccaucc

SEQ ID NO: 464700 - RNA, 32 nt, Human
ggggaaggagccaagauggccgaauaggaaca

SEQ ID NO: 464701 - RNA, 32 nt, Human
ggggaaggagcucauccaggaggacugggauc

SEQ ID NO: 464702 - RNA, 32 nt, Human
ggggaaggaggaggagcuuaaaagaggcuacu

SEQ ID NO: 464703 - RNA, 32 nt, Human
ggggaaggaggcggugguggaggaggcaaagg

SEQ ID NO: 464704 - RNA, 32 nt, Human
ggggaaggauuuaugaauacaccaccaccaga

SEQ ID NO: 464705 - RNA, 32 nt, Human
ggggaaggcagcgccucucuagcuacucaagg

SEQ ID NO: 464706 - RNA, 32 nt, Human
ggggaaggccguugcgcagccuggaggaagcg

SEQ ID NO: 464707 - RNA, 32 nt, Human
ggggaaggcggggcuggugacaaggcagggca

SEQ ID NO: 464708 - RNA, 32 nt, Human
ggggaagggaaagaaagacagaggagagagag

SEQ ID NO: 464709 - RNA, 32 nt, Human
ggggaagggaaagacuggggagggagagugaa

SEQ ID NO: 464710 - RNA, 32 nt, Human
ggggaagggaaagguaugagggaaagagaguc

SEQ ID NO: 464711 - RNA, 18 nt, Human
ggggaagggaagaggcag

SEQ ID NO: 464712 - RNA, 32 nt, Human
ggggaagggaagggagaggcaagcuggcugug

SEQ ID NO: 464713 - RNA, 32 nt, Human
ggggaagggaggagggagagggaggacaggga

SEQ ID NO: 464714 - RNA, 32 nt, Human
ggggaagggcacacccccugcccaugcauggu

SEQ ID NO: 464715 - RNA, 32 nt, Human
ggggaagggcagggguguggagagggggugcc

SEQ ID NO: 464716 - RNA, 32 nt, Human
ggggaagggcgagcagcgggaggcacgggcuc

SEQ ID NO: 464717 - RNA, 32 nt, Human
ggggaaggggaaagagggaggaaggggagggg

SEQ ID NO: 464718 - RNA, 32 nt, Human
ggggaaggggaggaaagaggaaaacaaaggga

SEQ ID NO: 464719 - RNA, 32 nt, Human
ggggaaggggcagagccaacuccagaggcgga

SEQ ID NO: 464720 - RNA, 32 nt, Human
ggggaaggggcagugucugacagagaguggga

SEQ ID NO: 464721 - RNA, 32 nt, Human
ggggaaggggcugggagccaggguacuccaau

SEQ ID NO: 464722 - RNA, 32 nt, Human
ggggaaggggugacugaacugggaguccaggg

SEQ ID NO: 464723 - RNA, 32 nt, Human
ggggaagggucaggaugagaggcugcagccuc

SEQ ID NO: 464724 - RNA, 32 nt, Human
ggggaagggucugaaucccacccuuggcauug

SEQ ID NO: 464725 - RNA, 32 nt, Human
ggggaagggugaguuuacaggugaggaguggc

SEQ ID NO: 464726 - RNA, 32 nt, Human
ggggaaggugugagucgugaacggcccggguc

SEQ ID NO: 464727 - RNA, 32 nt, Human
ggggaaguaccacaaacauagagcagagacuu

SEQ ID NO: 464728 - RNA, 32 nt, Human
ggggaaguaguaaaccaaaaagacagggaaaa

SEQ ID NO: 464729 - RNA, 32 nt, Human
ggggaaguauggugaauaaacugacaugcaug

SEQ ID NO: 464730 - RNA, 32 nt, Human
ggggaaguccagggaggcucauggacaguggc

SEQ ID NO: 464731 - RNA, 32 nt, Human
ggggaagucuguucuuugguauggaauuuuuc

SEQ ID NO: 464732 - RNA, 32 nt, Human
ggggaagugcguguguugggccagguaggaua

SEQ ID NO: 464733 - RNA, 32 nt, Human
ggggaagugcugggaagggaaggguguggucc

SEQ ID NO: 464734 - RNA, 32 nt, Human
ggggaaguggccucugucagggccagggcuca

SEQ ID NO: 464735 - RNA, 32 nt, Human
ggggaaguucugccuuucugaucaaucuuuug

SEQ ID NO: 464736 - RNA, 32 nt, Human
ggggaauagaagggagaaagagaauaucaugg

SEQ ID NO: 464737 - RNA, 32 nt, Human
ggggaauagacccauuccuuccccugucucag

SEQ ID NO: 464738 - RNA, 32 nt, Human
ggggaauaggaguuuggauagccuucuaauua

SEQ ID NO: 464739 - RNA, 32 nt, Human
ggggaauagggaggggaggagaggagaggaga

SEQ ID NO: 464740 - RNA, 32 nt, Human
ggggaaucaguggaugaagacgucccuccucc

SEQ ID NO: 464741 - RNA, 32 nt, Human
ggggaauccuucucagagguuugaaaggagac

SEQ ID NO: 464742 - RNA, 32 nt, Human
ggggaaugaccaggcagccacagggaggacau

SEQ ID NO: 464743 - RNA, 32 nt, Human
ggggaaugaggugauaagcaaggaggguguaa

SEQ ID NO: 464744 - RNA, 32 nt, Human
ggggaaugcaacgugaggccaacugaacaauu

SEQ ID NO: 464745 - RNA, 32 nt, Human
ggggaaugcacuggcccuagaccucaacucua

SEQ ID NO: 464746 - RNA, 32 nt, Human
ggggaauggagugcucauuugcagaggcuaau

SEQ ID NO: 464747 - RNA, 32 nt, Human
ggggaauggcccaggcgggcugcgguuccucc

SEQ ID NO: 464748 - RNA, 32 nt, Human
ggggaaugggaugaauccccaucugugccucg

SEQ ID NO: 464749 - RNA, 32 nt, Human
ggggaaugggauggggacagcauuugauuuac

SEQ ID NO: 464750 - RNA, 32 nt, Human
ggggaaugucuggcuuuuccucagcuuauuga

SEQ ID NO: 464751 - RNA, 32 nt, Human
ggggaaugugccugcugaaucuguaccugagc

SEQ ID NO: 464752 - RNA, 32 nt, Human
ggggaauguggggaucagggagguggagggac

SEQ ID NO: 464753 - RNA, 22 nt, Human
ggggaauuaacuggacauuuca

SEQ ID NO: 464754 - RNA, 32 nt, Human
ggggaauuauaaggauaccauuuguaagaaag

SEQ ID NO: 464755 - RNA, 32 nt, Human
ggggaauugcugcucuuuaccaaagaaugguu

SEQ ID NO: 464756 - RNA, 32 nt, Human
ggggacaaaaagucuauuuuuccuucacuuuu

SEQ ID NO: 464757 - RNA, 32 nt, Human
ggggacaaaaggaaaccucugacuugcuaaug

SEQ ID NO: 464758 - RNA, 32 nt, Human
ggggacaacgccuguggcuggguccggaggug

SEQ ID NO: 464759 - RNA, 32 nt, Human
ggggacaaguuguguuucuguuuuccgccacg

SEQ ID NO: 464760 - RNA, 32 nt, Human
ggggacaaugucccaccuuggagcucuccuug

SEQ ID NO: 464761 - RNA, 32 nt, Human
ggggacacaaauucuguugccugguggaaaga

SEQ ID NO: 464762 - RNA, 32 nt, Human
ggggacacaaccugcuggagugcaauggcacg

SEQ ID NO: 464763 - RNA, 18 nt, Human
ggggacacacagcuucca

SEQ ID NO: 464764 - RNA, 32 nt, Human
ggggacacagcccaaccauaucagaggccuug

SEQ ID NO: 464765 - RNA, 32 nt, Human
ggggacacaggagaaaccaggccaggcccauc

SEQ ID NO: 464766 - RNA, 32 nt, Human
ggggacacaggggcuguguccuggccaaggcc

SEQ ID NO: 464767 - RNA, 19 nt, Human
ggggacacaguggcuucca

SEQ ID NO: 464768 - RNA, 19 nt, Human
ggggacacaugggugucca

SEQ ID NO: 464769 - RNA, 32 nt, Human
ggggacaccaacacccaaggccagacccaaau

SEQ ID NO: 464770 - RNA, 18 nt, Human
ggggacaccggcacucca

SEQ ID NO: 464771 - RNA, 32 nt, Human
ggggacaccucaggagcuuuacucauggcaga

SEQ ID NO: 464772 - RNA, 19 nt, Human
ggggacaccuguacauucu

SEQ ID NO: 464773 - RNA, 32 nt, Human
ggggacaccuuucuuuugccacccugaauugc

SEQ ID NO: 464774 - RNA, 32 nt, Human
ggggacacgagacagagggaguucuccguaau

SEQ ID NO: 464775 - RNA, 23 nt, Human
ggggacacgggcagcucagguca

SEQ ID NO: 464776 - RNA, 20 nt, Human
ggggacacuggcugcauucc

SEQ ID NO: 464777 - RNA, 20 nt, Human
ggggacacuuaacaaaucca

SEQ ID NO: 464778 - RNA, 18 nt, Human
ggggacacuuggggucca

SEQ ID NO: 464779 - RNA, 20 nt, Human
ggggacacuuucagcuucua

SEQ ID NO: 464780 - RNA, 32 nt, Human
ggggacagaagcugcaggggagagggaagcag

SEQ ID NO: 464781 - RNA, 32 nt, Human
ggggacagaagggguccucucguccuccccuc

SEQ ID NO: 464782 - RNA, 32 nt, Human
ggggacagagagagucugagcucuguuaacag

SEQ ID NO: 464783 - RNA, 32 nt, Human
ggggacagagagauucacgcacccucaagagu

SEQ ID NO: 464784 - RNA, 32 nt, Human
ggggacagaggaaggccuccugagggaggggc

SEQ ID NO: 464785 - RNA, 18 nt, Human
ggggacagaggccagcug

SEQ ID NO: 464786 - RNA, 32 nt, Human
ggggacagagggcaggacgcccaggcuggggg

SEQ ID NO: 464787 - RNA, 32 nt, Human
ggggacagagguggccgggacgugagcuguga

SEQ ID NO: 464788 - RNA, 32 nt, Human
ggggacagaguguccuuccucuguccucucau

SEQ ID NO: 464789 - RNA, 22 nt, Human
ggggacagauuaugaaauuuca

SEQ ID NO: 464790 - RNA, 19 nt, Human
ggggacagcgaaccgaggg

SEQ ID NO: 464791 - RNA, 32 nt, Human
ggggacagcuccagcagcucaggcuccagccc

SEQ ID NO: 464792 - RNA, 18 nt, Human
ggggacagcuccaggccg

SEQ ID NO: 464793 - RNA, 32 nt, Human
ggggacagcuggacggcugccucccaggggca

SEQ ID NO: 464794 - RNA, 32 nt, Human
ggggacaggagacggcccugcugcggacggag

SEQ ID NO: 464795 - RNA, 32 nt, Human
ggggacaggagugggagcagggagauaggaga

SEQ ID NO: 464796 - RNA, 32 nt, Human
ggggacaggcagcggggcaguggugaucagga

SEQ ID NO: 464797 - RNA, 23 nt, Human
ggggacaggcagggaaaaggggu

SEQ ID NO: 464798 - RNA, 32 nt, Human
ggggacagggaguggggcaggcagugguuggu

SEQ ID NO: 464799 - RNA, 32 nt, Human
ggggacagggcaggcccggaccagugccucac

SEQ ID NO: 464800 - RNA, 32 nt, Human
ggggacaggggcaggaggaagggguaggauua

SEQ ID NO: 464801 - RNA, 32 nt, Human
ggggacagggguuucucuuucuggccuaagga

SEQ ID NO: 464802 - RNA, 18 nt, Human
ggggacaggugacagugg

SEQ ID NO: 464803 - RNA, 32 nt, Human
ggggacaguaagguuuggaggaagggggaucg

SEQ ID NO: 464804 - RNA, 22 nt, Human
ggggacagugagucuccagguc

SEQ ID NO: 464805 - RNA, 32 nt, Human
ggggacaguggagccucugagcagaggacucc

SEQ ID NO: 464806 - RNA, 23 nt, Human
ggggacauacaggcccacaggga

SEQ ID NO: 464807 - RNA, 21 nt, Human
ggggacauagugacaauuucu

SEQ ID NO: 464808 - RNA, 32 nt, Human
ggggacaucaggguagcugaaggaaauccaca

SEQ ID NO: 464809 - RNA, 32 nt, Human
ggggacaucggaaaggagggaccccgccaccc

SEQ ID NO: 464810 - RNA, 21 nt, Human
ggggacaugagguucaguucu

SEQ ID NO: 464811 - RNA, 23 nt, Human
ggggacaugaguaaagcaugucu

SEQ ID NO: 464812 - RNA, 18 nt, Human
ggggacaugaguuuucca

SEQ ID NO: 464813 - RNA, 24 nt, Human
ggggacaugaguuuuccagcuuuu

SEQ ID NO: 464814 - RNA, 32 nt, Human
ggggacaugccagcuacacuggccuuggcgcc

SEQ ID NO: 464815 - RNA, 32 nt, Human
ggggacaugggcgauuccaaaagcaccgagga

SEQ ID NO: 464816 - RNA, 18 nt, Human
ggggacauuaauagucca

SEQ ID NO: 464817 - RNA, 21 nt, Human
ggggacauuauauauaugcca

SEQ ID NO: 464818 - RNA, 21 nt, Human
ggggacauugcccccauuuca

SEQ ID NO: 464819 - RNA, 32 nt, Human
ggggacauuggaaaggagggaccccgccaccc

SEQ ID NO: 464820 - RNA, 32 nt, Human
ggggaccaacagcuggccgaggcucagggaua

SEQ ID NO: 464821 - RNA, 32 nt, Human
ggggaccaauaugccaggcaugggcuuuuauc

SEQ ID NO: 464822 - RNA, 18 nt, Human
ggggaccacgggccacug

SEQ ID NO: 464823 - RNA, 32 nt, Human
ggggaccacucuuccucuguccuuccucucuc

SEQ ID NO: 464824 - RNA, 19 nt, Human
ggggaccagaacugugugg

SEQ ID NO: 464825 - RNA, 32 nt, Human
ggggaccagcagcugcuuccacccagaacaag

SEQ ID NO: 464826 - RNA, 32 nt, Human
ggggaccagcccacagcacaccaagguggccc

SEQ ID NO: 464827 - RNA, 32 nt, Human
ggggaccagcccaggccgcuguuuccacaaaa

SEQ ID NO: 464828 - RNA, 32 nt, Human
ggggaccaggagaaagucaggaucccuaagag

SEQ ID NO: 464829 - RNA, 32 nt, Human
ggggaccaggagacuuuaaaggaguuuggggu

SEQ ID NO: 464830 - RNA, 32 nt, Human
ggggaccaggcaccugguugaagggacuggga

SEQ ID NO: 464831 - RNA, 32 nt, Human
ggggaccaggcagccacugugcaucagauagg

SEQ ID NO: 464832 - RNA, 32 nt, Human
ggggaccagucauuuauuuuccauuuuguugc

SEQ ID NO: 464833 - RNA, 32 nt, Human
ggggaccauggccugcccucagucugcuaggu

SEQ ID NO: 464834 - RNA, 32 nt, Human
ggggaccaugggacuccuccagccuggcucuu

SEQ ID NO: 464835 - RNA, 32 nt, Human
ggggaccaugggguggcagggaagggacaggc

SEQ ID NO: 464836 - RNA, 32 nt, Human
ggggacccaaagauucuagugagucaacaucc

SEQ ID NO: 464837 - RNA, 32 nt, Human
ggggacccacacccuggcugggcagaggugcu

SEQ ID NO: 464838 - RNA, 24 nt, Human
ggggacccagacauccugucccca

SEQ ID NO: 464839 - RNA, 32 nt, Human
ggggacccagauuuucuuuucuuaugccauug

SEQ ID NO: 464840 - RNA, 17 nt, Human
ggggacccagccagggg

SEQ ID NO: 464841 - RNA, 32 nt, Human
ggggacccaggacaccuggccacggggaggcg

SEQ ID NO: 464842 - RNA, 19 nt, Human
ggggacccaggacccucca

SEQ ID NO: 464843 - RNA, 20 nt, Human
ggggacccauggucugugga

SEQ ID NO: 464844 - RNA, 32 nt, Human
ggggaccccacacacauguggcuaccauacuc

SEQ ID NO: 464845 - RNA, 19 nt, Human
ggggaccccucugucucca

SEQ ID NO: 464846 - RNA, 18 nt, Human
ggggaccccugcccccca

SEQ ID NO: 464847 - RNA, 32 nt, Human
ggggaccccuggaaagugggggcugugccucc

SEQ ID NO: 464848 - RNA, 32 nt, Human
ggggacccgagccugcagccgagcuccgcugc

SEQ ID NO: 464849 - RNA, 21 nt, Human
ggggacccggggaggggccgc

SEQ ID NO: 464850 - RNA, 32 nt, Human
ggggacccuacccccaccucagguugggcuuc

SEQ ID NO: 464851 - RNA, 32 nt, Human
ggggacccuccagaagcccagccggcuucccc

SEQ ID NO: 464852 - RNA, 23 nt, Human
ggggacccucccacccaccgcca

SEQ ID NO: 464853 - RNA, 32 nt, Human
ggggacccugaagaaagggggccagcagcagg

SEQ ID NO: 464854 - RNA, 32 nt, Human
ggggacccugcacccuccgggaagccauggag

SEQ ID NO: 464855 - RNA, 32 nt, Human
ggggacccugcucggucagugguccuggugau

SEQ ID NO: 464856 - RNA, 32 nt, Human
ggggaccgcuuucugcaauuggccucgacacu

SEQ ID NO: 464857 - RNA, 19 nt, Human
ggggaccggagcggcccgg

SEQ ID NO: 464858 - RNA, 32 nt, Human
ggggaccggggagggggcgggggccgggccgg

SEQ ID NO: 464859 - RNA, 32 nt, Human
ggggaccugaguuugggugggguggcaguugg

SEQ ID NO: 464860 - RNA, 32 nt, Human
ggggaccugcagcacugcagaaaugccucugc

SEQ ID NO: 464861 - RNA, 32 nt, Human
ggggaccugcagccacaacuucucugguccuc

SEQ ID NO: 464862 - RNA, 32 nt, Human
ggggaccugcagcccgccaugccugagccucc

SEQ ID NO: 464863 - RNA, 32 nt, Human
ggggaccugcccacgcugucuccuggaggccu

SEQ ID NO: 464864 - RNA, 32 nt, Human
ggggaccugccugcuccuuuggcuugggcucu

SEQ ID NO: 464865 - RNA, 32 nt, Human
ggggaccugcuauucuucgaggcaguggaccc

SEQ ID NO: 464866 - RNA, 32 nt, Human
ggggaccuggggacucgggugcugggagugug

SEQ ID NO: 464867 - RNA, 32 nt, Human
ggggaccuucuuccagaugccuucccaguugu

SEQ ID NO: 464868 - RNA, 32 nt, Human
ggggaccuugauagagaacuuuauaaacuucu

SEQ ID NO: 464869 - RNA, 32 nt, Human
ggggacgaagugagaacagagacccagaagga

SEQ ID NO: 464870 - RNA, 32 nt, Human
ggggacgacccugagcucgagcuccagggcgg

SEQ ID NO: 464871 - RNA, 32 nt, Human
ggggacgacucagaguuggggucucacugugu

SEQ ID NO: 464872 - RNA, 32 nt, Human
ggggacgaggggcaagaagcggccuccgaggg

SEQ ID NO: 464873 - RNA, 32 nt, Human
ggggacgcgcgggucuggaggagguagcgcgg

SEQ ID NO: 464874 - RNA, 32 nt, Human
ggggacgcgggauggaacacaccccacacagc

SEQ ID NO: 464875 - RNA, 21 nt, Human
ggggacgcucagggcuuucca

SEQ ID NO: 464876 - RNA, 32 nt, Human
ggggacgcuggcacugguggggagcuguuggg

SEQ ID NO: 464877 - RNA, 19 nt, Human
ggggacggaaggaggcgac

SEQ ID NO: 464878 - RNA, 32 nt, Human
ggggacggaggagggaaugagugaagaggagc

SEQ ID NO: 464879 - RNA, 32 nt, Human
ggggacggcagcaguagcgggagcagcagcgu

SEQ ID NO: 464880 - RNA, 32 nt, Human
ggggacggccacucccuggcugagggcccucc

SEQ ID NO: 464881 - RNA, 24 nt, Human
ggggacggcgcggagcgggugcgg

SEQ ID NO: 464882 - RNA, 20 nt, Human
ggggacgggaugaggagcgg

SEQ ID NO: 464883 - RNA, 32 nt, Human
ggggacgggccaggcugggccaggucgggggc

SEQ ID NO: 464884 - RNA, 32 nt, Human
ggggacgggcguccgcugucuccuggguuccc

SEQ ID NO: 464885 - RNA, 19 nt, Human
ggggacggggcggggaccg

SEQ ID NO: 464886 - RNA, 32 nt, Human
ggggacggggucaggacugagacagcuccaca

SEQ ID NO: 464887 - RNA, 32 nt, Human
ggggacggguguuccuucugggugggggccug

SEQ ID NO: 464888 - RNA, 23 nt, Human
ggggacgguguauggaggggagg

SEQ ID NO: 464889 - RNA, 32 nt, Human
ggggacuaagcuggggacagggcaggcccgga

SEQ ID NO: 464890 - RNA, 18 nt, Human
ggggacucaaacauucca

SEQ ID NO: 464891 - RNA, 32 nt, Human
ggggacucaaagccaaaacugcccaaagagga

SEQ ID NO: 464892 - RNA, 32 nt, Human
ggggacucaacagcagagcucugagcagcagc

SEQ ID NO: 464893 - RNA, 22 nt, Human
ggggacucagaggaagugucca

SEQ ID NO: 464894 - RNA, 32 nt, Human
ggggacucagcgggccagagagcgcggcgggc

SEQ ID NO: 464895 - RNA, 32 nt, Human
ggggacuccagcccgcgcucuuccgcaccccu

SEQ ID NO: 464896 - RNA, 32 nt, Human
ggggacuccagccugggcggggugauaaugaa

SEQ ID NO: 464897 - RNA, 32 nt, Human
ggggacuccagggguggcugggagacugggca

SEQ ID NO: 464898 - RNA, 32 nt, Human
ggggacuccaguaccuggagaugugauuccau

SEQ ID NO: 464899 - RNA, 32 nt, Human
ggggacuccauggcuuccgaguugcugacuga

SEQ ID NO: 464900 - RNA, 32 nt, Human
ggggacucugcaccaggaucuccagggcccac

SEQ ID NO: 464901 - RNA, 32 nt, Human
ggggacucuucuucaaagagcuugccaaugaa

SEQ ID NO: 464902 - RNA, 32 nt, Human
ggggacucuuuccaccaucagggcuggaagga

SEQ ID NO: 464903 - RNA, 32 nt, Human
ggggacugacucuggcaucucugccgaggcug

SEQ ID NO: 464904 - RNA, 32 nt, Human
ggggacugagagcccagcucugaaaagugcau

SEQ ID NO: 464905 - RNA, 32 nt, Human
ggggacugagccaccagccugacacccagaag

SEQ ID NO: 464906 - RNA, 32 nt, Human
ggggacugagcuggggagggaggcaggugggu

SEQ ID NO: 464907 - RNA, 32 nt, Human
ggggacugaggcccuggcggaucacgggugcc

SEQ ID NO: 464908 - RNA, 32 nt, Human
ggggacugaguuguuugggucaccucugcagg

SEQ ID NO: 464909 - RNA, 32 nt, Human
ggggacugauaagugcuuuaagcaauguccau

SEQ ID NO: 464910 - RNA, 32 nt, Human
ggggacugaucaggaagauauauuccugcaua

SEQ ID NO: 464911 - RNA, 32 nt, Human
ggggacugauggguucaggugggagcugcugg

SEQ ID NO: 464912 - RNA, 32 nt, Human
ggggacugcaccuuagaagccugcucugcauc

SEQ ID NO: 464913 - RNA, 32 nt, Human
ggggacugccuggccuuccagaugcgaacugg

SEQ ID NO: 464914 - RNA, 32 nt, Human
ggggacugcgguggacaccagaggaagcuguu

SEQ ID NO: 464915 - RNA, 30 nt, Human
ggggacugcucaauacagauacgguggacg

SEQ ID NO: 464916 - RNA, 32 nt, Human
ggggacugcucacggauaaggucuccccaacu

SEQ ID NO: 464917 - RNA, 32 nt, Human
ggggacugcugcugccuggccacugcucccua

SEQ ID NO: 464918 - RNA, 32 nt, Human
ggggacuggaaugaccuccugaccacucccuc

SEQ ID NO: 464919 - RNA, 21 nt, Human
ggggacuggcaaaacauucca

SEQ ID NO: 464920 - RNA, 29 nt, Human
ggggacuggcugcugugaucuucuaaggg

SEQ ID NO: 464921 - RNA, 32 nt, Human
ggggacugggagaagcagaagccggugccggu

SEQ ID NO: 464922 - RNA, 20 nt, Human
ggggacugggagcaguucca

SEQ ID NO: 464923 - RNA, 32 nt, Human
ggggacugggcugagaggguggacgaguucag

SEQ ID NO: 464924 - RNA, 32 nt, Human
ggggacuggggugcaggugaaggaggcucuca

SEQ ID NO: 464925 - RNA, 32 nt, Human
ggggacuguccaccccuccuuccagggcccag

SEQ ID NO: 464926 - RNA, 32 nt, Human
ggggacuguccuggguggagggcaggugaaca

SEQ ID NO: 464927 - RNA, 32 nt, Human
ggggacuguggacccauaauuucagccccagc

SEQ ID NO: 464928 - RNA, 32 nt, Human
ggggacuguggaccccacccugcugcacggag

SEQ ID NO: 464929 - RNA, 32 nt, Human
ggggacuguggccugggcugaucuugagccuu

SEQ ID NO: 464930 - RNA, 32 nt, Human
ggggacuuacuacccaaauucaucacauuagu

SEQ ID NO: 464931 - RNA, 32 nt, Human
ggggacuuccuaagcucugacagucuaauauu

SEQ ID NO: 464932 - RNA, 32 nt, Human
ggggacuugaaccucuucuaacuuugaacaag

SEQ ID NO: 464933 - RNA, 32 nt, Human
ggggacuuggccgcuucccuacccacagggcc

SEQ ID NO: 464934 - RNA, 32 nt, Human
ggggacuuucucaugugccugaugugguggag

SEQ ID NO: 464935 - RNA, 32 nt, Human
ggggagaaaaguuggccucccaaaauuucugu

SEQ ID NO: 464936 - RNA, 32 nt, Human
ggggagaaacagaagcccagagagggaaaggg

SEQ ID NO: 464937 - RNA, 32 nt, Human
ggggagaaacccugaacuccagccaggucuua

SEQ ID NO: 464938 - RNA, 22 nt, Human
ggggagaaacuugauucuggga

SEQ ID NO: 464939 - RNA, 19 nt, Human
ggggagaaaucucaguaga

SEQ ID NO: 464940 - RNA, 32 nt, Human
ggggagaacauacaaacucugccuucggucau

SEQ ID NO: 464941 - RNA, 32 nt, Human
ggggagaacauacgguccagagccugagaucg

SEQ ID NO: 464942 - RNA, 22 nt, Human
ggggagaacgucuccagacaga

SEQ ID NO: 464943 - RNA, 17 nt, Human
ggggagaagaacagcaa

SEQ ID NO: 464944 - RNA, 32 nt, Human
ggggagaagcaaggguugggcccagugucccc

SEQ ID NO: 464945 - RNA, 32 nt, Human
ggggagaaggaggaggagcagcaggccuccgg

SEQ ID NO: 464946 - RNA, 32 nt, Human
ggggagaaggauuguagaugggccagugacuc

SEQ ID NO: 464947 - RNA, 19 nt, Human
ggggagaagggaauggagg

SEQ ID NO: 464948 - RNA, 20 nt, Human
ggggagaagggagacacaga

SEQ ID NO: 464949 - RNA, 32 nt, Human
ggggagaagggccauaugucacuaauagaaag

SEQ ID NO: 464950 - RNA, 32 nt, Human
ggggagaagugcuggguaacuggcugggggcg

SEQ ID NO: 464951 - RNA, 32 nt, Human
ggggagaaguucaaggaauuucugcucggcca

SEQ ID NO: 464952 - RNA, 19 nt, Human
ggggagaauaagaggcaga

SEQ ID NO: 464953 - RNA, 32 nt, Human
ggggagaaucuccugucaccaccagaaaagca

SEQ ID NO: 464954 - RNA, 32 nt, Human
ggggagaaucugguggaugcuggaccuugcug

SEQ ID NO: 464955 - RNA, 25 nt, Human
ggggagaauggacaaggacuuagga

SEQ ID NO: 464956 - RNA, 20 nt, Human
ggggagacagccaucucaaa

SEQ ID NO: 464957 - RNA, 32 nt, Human
ggggagacagguggagaugaggugaagaucac

SEQ ID NO: 464958 - RNA, 32 nt, Human
ggggagaccaaaggggaugaguagggaggggu

SEQ ID NO: 464959 - RNA, 32 nt, Human
ggggagaccauggcucagaggaaggguggagc

SEQ ID NO: 464960 - RNA, 32 nt, Human
ggggagacgggccggaggagcagugggggccg

SEQ ID NO: 464961 - RNA, 32 nt, Human
ggggagacuaagggcuacaggccagcguggau

SEQ ID NO: 464962 - RNA, 32 nt, Human
ggggagacucacucuccaucucaggaaauucu

SEQ ID NO: 464963 - RNA, 32 nt, Human
ggggagacugaggaagggcagagccagaagca

SEQ ID NO: 464964 - RNA, 32 nt, Human
ggggagacuguggcugaaaacugugucuuccu

SEQ ID NO: 464965 - RNA, 32 nt, Human
ggggagacuugugagcggccaucuugguccug

SEQ ID NO: 464966 - RNA, 32 nt, Human
ggggagagaagaaaggagggggcaagggagaa

SEQ ID NO: 464967 - RNA, 19 nt, Human
ggggagagaagaagaugcu

SEQ ID NO: 464968 - RNA, 32 nt, Human
ggggagagaagagggaacgagcaagggaagga

SEQ ID NO: 464969 - RNA, 32 nt, Human
ggggagagaagggagagggugggccugcugug

SEQ ID NO: 464970 - RNA, 32 nt, Human
ggggagagacagagaagugggcaggggcaccc

SEQ ID NO: 464971 - RNA, 32 nt, Human
ggggagagaccagcucuccagccuggcaggaa

SEQ ID NO: 464972 - RNA, 32 nt, Human
ggggagagacuuuuucuuguauaugcuuauau

SEQ ID NO: 464973 - RNA, 32 nt, Human
ggggagagagggacucuuucugcucccucaga

SEQ ID NO: 464974 - RNA, 32 nt, Human
ggggagagagugagggguugggggaucggcag

SEQ ID NO: 464975 - RNA, 32 nt, Human
ggggagagcagcuuccagccugggucagaagg

SEQ ID NO: 464976 - RNA, 32 nt, Human
ggggagagccacccacaggccauguccagccc

SEQ ID NO: 464977 - RNA, 32 nt, Human
ggggagagcccgaaggagaggcauccugacag

SEQ ID NO: 464978 - RNA, 32 nt, Human
ggggagagcuugacacuucgccucccugaugg

SEQ ID NO: 464979 - RNA, 32 nt, Human
ggggagagcuuugugcuugucauuccagagug

SEQ ID NO: 464980 - RNA, 32 nt, Human
ggggagaggaacagcccucuguucccaagucc

SEQ ID NO: 464981 - RNA, 32 nt, Human
ggggagaggaagaggagucggaagggaggcgg

SEQ ID NO: 464982 - RNA, 32 nt, Human
ggggagaggaagagugguagggggagggagag

SEQ ID NO: 464983 - RNA, 32 nt, Human
ggggagaggagaagggaaauggaggugagggg

SEQ ID NO: 464984 - RNA, 32 nt, Human
ggggagaggagaggagaaauguggacagaggg

SEQ ID NO: 464985 - RNA, 32 nt, Human
ggggagaggaggggaaggggaggcagaggagg

SEQ ID NO: 464986 - RNA, 32 nt, Human
ggggagaggagugccaggcacacagacucagg

SEQ ID NO: 464987 - RNA, 32 nt, Human
ggggagaggcauucagccgcugcuuuugaugc

SEQ ID NO: 464988 - RNA, 32 nt, Human
ggggagaggcuucuuucguuuccucgucaaac

SEQ ID NO: 464989 - RNA, 32 nt, Human
ggggagagggaagguagcuggggagaaacaca

SEQ ID NO: 464990 - RNA, 32 nt, Human
ggggagagggcuggggcaggggagagggaaag

SEQ ID NO: 464991 - RNA, 21 nt, Human
ggggagaggggacccggcgag

SEQ ID NO: 464992 - RNA, 32 nt, Human
ggggagaggggauaggaggagggaaacacuag

SEQ ID NO: 464993 - RNA, 32 nt, Human
ggggagagucccuuccuaccugacugaccucc

SEQ ID NO: 464994 - RNA, 32 nt, Human
ggggagaguucauggagagagcauguguucuc

SEQ ID NO: 464995 - RNA, 32 nt, Human
ggggagaucucagggccucuguugggaggaau

SEQ ID NO: 464996 - RNA, 32 nt, Human
ggggagaucugccugcucacccggggccaccg

SEQ ID NO: 464997 - RNA, 32 nt, Human
ggggagaucuuagcugaagaugacugacagug

SEQ ID NO: 464998 - RNA, 31 nt, Human
ggggagauggcggcgcgauggagcagcgaaa

SEQ ID NO: 464999 - RNA, 32 nt, Human
ggggagauuagacaugcacagaaggccgacca

SEQ ID NO: 465000 - RNA, 32 nt, Human
ggggagauugcucuacuuccccaaaucacugu

SEQ ID NO: 465001 - RNA, 32 nt, Human
ggggagauuggacuagaggaguccugagagga

SEQ ID NO: 465002 - RNA, 32 nt, Human
ggggagcaacagcaaacaggugcuaauuuguu

SEQ ID NO: 465003 - RNA, 32 nt, Human
ggggagcaacccauggcucacaggucacuaag

SEQ ID NO: 465004 - RNA, 32 nt, Human
ggggagcacacagcugaccucgcugggcccug

SEQ ID NO: 465005 - RNA, 32 nt, Human
ggggagcaccacgcgcugcaguucaccgaccu

SEQ ID NO: 465006 - RNA, 32 nt, Human
ggggagcacccaggcggaucugcaagcaccuc

SEQ ID NO: 465007 - RNA, 32 nt, Human
ggggagcagacaggcccagcaggcagggugcc

SEQ ID NO: 465008 - RNA, 21 nt, Human
ggggagcagacucgggggcca

SEQ ID NO: 465009 - RNA, 32 nt, Human
ggggagcagagaauccccacucauauccucuc

SEQ ID NO: 465010 - RNA, 32 nt, Human
ggggagcagagacuuaacccccaacucagagg

SEQ ID NO: 465011 - RNA, 32 nt, Human
ggggagcagaugagggcccugcccccgcccca

SEQ ID NO: 465012 - RNA, 32 nt, Human
ggggagcagccucuacccucagcauccuggcc

SEQ ID NO: 465013 - RNA, 32 nt, Human
ggggagcagcugcuccauugugccucgaggcc

SEQ ID NO: 465014 - RNA, 32 nt, Human
ggggagcagcugggcacggugccccucccuau

SEQ ID NO: 465015 - RNA, 32 nt, Human
ggggagcagcuuuuggggcucagaggccaguc

SEQ ID NO: 465016 - RNA, 32 nt, Human
ggggagcaggagccccaggaacagggguguug

SEQ ID NO: 465017 - RNA, 32 nt, Human
ggggagcaggcagagaggggcgguugaaggaa

SEQ ID NO: 465018 - RNA, 32 nt, Human
ggggagcaggcaggugacaaccaguguccuac

SEQ ID NO: 465019 - RNA, 32 nt, Human
ggggagcaggccacagaacgcagggugaaacc

SEQ ID NO: 465020 - RNA, 32 nt, Human
ggggagcagggccuggaaaccugcauuuuagu

SEQ ID NO: 465021 - RNA, 32 nt, Human
ggggagcaggggagggaaagaaaccaggcauc

SEQ ID NO: 465022 - RNA, 32 nt, Human
ggggagcagggugggcaggaauacuguuaucu

SEQ ID NO: 465023 - RNA, 32 nt, Human
ggggagcaggguggggaagaggggaccauucc

SEQ ID NO: 465024 - RNA, 32 nt, Human
ggggagcaggguggggaagaggggagcauucc

SEQ ID NO: 465025 - RNA, 32 nt, Human
ggggagcagguguggggaaagcaccuuccacc

SEQ ID NO: 465026 - RNA, 20 nt, Human
ggggagcaguccuccaguuc

SEQ ID NO: 465027 - RNA, 22 nt, Human
ggggagccaaagcagcauauua

SEQ ID NO: 465028 - RNA, 32 nt, Human
ggggagccaaaucucagguaccgagaccuucc

SEQ ID NO: 465029 - RNA, 32 nt, Human
ggggagccagagaagagguuggaaaccuuuuc

SEQ ID NO: 465030 - RNA, 32 nt, Human
ggggagccagcuucuccuaaaccacguggauc

SEQ ID NO: 465031 - RNA, 32 nt, Human
ggggagcccagccccuggcccugccucccgcg

SEQ ID NO: 465032 - RNA, 32 nt, Human
ggggagcccugaggcuuuucuucuccugcccc

SEQ ID NO: 465033 - RNA, 32 nt, Human
ggggagcccugagggcugccucucugccaguc

SEQ ID NO: 465034 - RNA, 32 nt, Human
ggggagcccuggaagcagggcuuuuccggaug

SEQ ID NO: 465035 - RNA, 32 nt, Human
ggggagccucgggggcagaggugauagaugug

SEQ ID NO: 465036 - RNA, 32 nt, Human
ggggagccugcaggaggguggccaacagugga

SEQ ID NO: 465037 - RNA, 32 nt, Human
ggggagcgcgggacaggaggcuucggggaaga

SEQ ID NO: 465038 - RNA, 32 nt, Human
ggggagcgggcggcgggcgggagccaggcccg

SEQ ID NO: 465039 - RNA, 32 nt, Human
ggggagcggggaggggcacugagaugggcagg

SEQ ID NO: 465040 - RNA, 32 nt, Human
ggggagcggggaggggcagaggaguuccccgg

SEQ ID NO: 465041 - RNA, 32 nt, Human
ggggagcggggccgggaguggagcagccgccg

SEQ ID NO: 465042 - RNA, 32 nt, Human
ggggagcgguugggccugagccccagggacaa

SEQ ID NO: 465043 - RNA, 32 nt, Human
ggggagcgugagcgaugcccagcugcacccgg

SEQ ID NO: 465044 - RNA, 32 nt, Human
ggggagcguggaggcagggccuccaggugcug

SEQ ID NO: 465045 - RNA, 21 nt, Human
ggggagcuagaagagaccaga

SEQ ID NO: 465046 - RNA, 32 nt, Human
ggggagcucaggcaaaagagguuuccaggaug

SEQ ID NO: 465047 - RNA, 32 nt, Human
ggggagcucaggggccgcaggagccgggccgg

SEQ ID NO: 465048 - RNA, 32 nt, Human
ggggagcuccaggagagaggggagcccagcug

SEQ ID NO: 465049 - RNA, 32 nt, Human
ggggagcucccaagcugccaagccccugccuc

SEQ ID NO: 465050 - RNA, 32 nt, Human
ggggagcucugagacgccuccugucccacgcu

SEQ ID NO: 465051 - RNA, 20 nt, Human
ggggagcugagacccagaag

SEQ ID NO: 465052 - RNA, 32 nt, Human
ggggagcugcacccaccucccuuccagggauu

SEQ ID NO: 465053 - RNA, 32 nt, Human
ggggagcugccuggcugccucaguuugcagau

SEQ ID NO: 465054 - RNA, 21 nt, Human
ggggagcugcugcagcuccug

SEQ ID NO: 465055 - RNA, 32 nt, Human
ggggagcugcuggccauggcugcuuuguaguu

SEQ ID NO: 465056 - RNA, 32 nt, Human
ggggagcugcuggccgcuuagcguuguuugau

SEQ ID NO: 465057 - RNA, 32 nt, Human
ggggagcuggaccaggagguggaggcucaggg

SEQ ID NO: 465058 - RNA, 32 nt, Human
ggggagcuggcagaggagagagacgucucagc

SEQ ID NO: 465059 - RNA, 32 nt, Human
ggggagcugggggcagagggcggugccaagug

SEQ ID NO: 465060 - RNA, 32 nt, Human
ggggagcugucaccacgaauguucccaaacuu

SEQ ID NO: 465061 - RNA, 32 nt, Human
ggggagcuguugcagcagcccaagccgcagga

SEQ ID NO: 465062 - RNA, 32 nt, Human
ggggagcuuguccuggagggcacauuccgcgu

SEQ ID NO: 465063 - RNA, 32 nt, Human
ggggaggaaagccacgagcacugagcgccucc

SEQ ID NO: 465064 - RNA, 32 nt, Human
ggggaggaaaggcuguucugugucugaaccca

SEQ ID NO: 465065 - RNA, 19 nt, Human
ggggaggaaagugcauccc

SEQ ID NO: 465066 - RNA, 31 nt, Human
ggggaggaagagagagacuguggagcucugg

SEQ ID NO: 465067 - RNA, 32 nt, Human
ggggaggaaggaaggaaggaagggcggcgugg

SEQ ID NO: 465068 - RNA, 32 nt, Human
ggggaggaaggcagggaggaaaagcggucuuc

SEQ ID NO: 465069 - RNA, 32 nt, Human
ggggaggacaaggggguggguaaggggcucaa

SEQ ID NO: 465070 - RNA, 32 nt, Human
ggggaggacagcuugucugcugcuccaaauca

SEQ ID NO: 465071 - RNA, 32 nt, Human
ggggaggacaguucuuuuggagguuggagggg

SEQ ID NO: 465072 - RNA, 32 nt, Human
ggggaggacgcugguggcucccaccuggauuu

SEQ ID NO: 465073 - RNA, 24 nt, Human
ggggaggacguuggggacccuggg

SEQ ID NO: 465074 - RNA, 32 nt, Human
ggggaggacucugccuguguccuguguucccc

SEQ ID NO: 465075 - RNA, 32 nt, Human
ggggaggacuucacucagcagcaaagagaaga

SEQ ID NO: 465076 - RNA, 31 nt, Human
ggggaggagaagagagaagaaacuggagcag

SEQ ID NO: 465077 - RNA, 32 nt, Human
ggggaggagaaguggggaaagguggagcagag

SEQ ID NO: 465078 - RNA, 32 nt, Human
ggggaggagagggaaccccaggcgcgagcggg

SEQ ID NO: 465079 - RNA, 32 nt, Human
ggggaggagauggggaaguggagccacccugc

SEQ ID NO: 465080 - RNA, 32 nt, Human
ggggaggagcaguccgaggggaacguggguug

SEQ ID NO: 465081 - RNA, 26 nt, Human
ggggaggagcaguuaauggauucugg

SEQ ID NO: 465082 - RNA, 32 nt, Human
ggggaggagcaucugcccuccuccuucucagg

SEQ ID NO: 465083 - RNA, 32 nt, Human
ggggaggagccagcucucaggacuguggcugg

SEQ ID NO: 465084 - RNA, 32 nt, Human
ggggaggagcccaaaccacugcccacagacuc

SEQ ID NO: 465085 - RNA, 32 nt, Human
ggggaggagccgggcucugccugcgcccgggg

SEQ ID NO: 465086 - RNA, 32 nt, Human
ggggaggaggaaggggacagagggagcaggua

SEQ ID NO: 465087 - RNA, 32 nt, Human
ggggaggaggagagaauggaauggcuggacuu

SEQ ID NO: 465088 - RNA, 32 nt, Human
ggggaggaggagagucccuucucggaaggccu

SEQ ID NO: 465089 - RNA, 32 nt, Human
ggggaggaggaggaggaggagaggagcaguca

SEQ ID NO: 465090 - RNA, 32 nt, Human
ggggaggaggaggaggaggaggaggucgugga

SEQ ID NO: 465091 - RNA, 32 nt, Human
ggggaggaggaggaggaggaguucguggauga

SEQ ID NO: 465092 - RNA, 32 nt, Human
ggggaggaggaggcagguggucuaagugcuga

SEQ ID NO: 465093 - RNA, 32 nt, Human
ggggaggaggcaggagggcgcauggggcgccc

SEQ ID NO: 465094 - RNA, 32 nt, Human
ggggaggagggaggggcgccagcaccugauga

SEQ ID NO: 465095 - RNA, 20 nt, Human
ggggaggagggccucucaug

SEQ ID NO: 465096 - RNA, 32 nt, Human
ggggaggaggggaagaaggaaagggaagaguc

SEQ ID NO: 465097 - RNA, 32 nt, Human
ggggaggaggggcaaggccccagcaagccucu

SEQ ID NO: 465098 - RNA, 32 nt, Human
ggggaggaggggcaggugcugcaggcuccccc

SEQ ID NO: 465099 - RNA, 32 nt, Human
ggggaggaggggcagugcagguggacggggag

SEQ ID NO: 465100 - RNA, 32 nt, Human
ggggaggaggggcggcgggcugcuccugucac

SEQ ID NO: 465101 - RNA, 32 nt, Human
ggggaggaggggcggggaagcgcuuccaggga

SEQ ID NO: 465102 - RNA, 32 nt, Human
ggggaggagggggaggaggagcgggaggaggg

SEQ ID NO: 465103 - RNA, 32 nt, Human
ggggaggagggggaucagcuucugcuauuacc

SEQ ID NO: 465104 - RNA, 32 nt, Human
ggggaggaggucagaggagaugggggcuggcu

SEQ ID NO: 465105 - RNA, 32 nt, Human
ggggaggagguccuuccucuccgccacugccc

SEQ ID NO: 465106 - RNA, 32 nt, Human
ggggaggaggugguggccguggguuccugaug

SEQ ID NO: 465107 - RNA, 32 nt, Human
ggggaggaguguuaugaaagaagaugagucug

SEQ ID NO: 465108 - RNA, 32 nt, Human
ggggaggaguuggagagcacaguugccccguu

SEQ ID NO: 465109 - RNA, 32 nt, Human
ggggaggauacuuggguugauuuauccauuau

SEQ ID NO: 465110 - RNA, 32 nt, Human
ggggaggaucacuggagcccaggaguuugagg

SEQ ID NO: 465111 - RNA, 32 nt, Human
ggggaggauggaggcaggagcuggucugggga

SEQ ID NO: 465112 - RNA, 32 nt, Human
ggggaggcaaaaagccuugggcacuacccucc

SEQ ID NO: 465113 - RNA, 32 nt, Human
ggggaggcaaaggauauaauauauucaucuuu

SEQ ID NO: 465114 - RNA, 32 nt, Human
ggggaggcacucuccucuggaccuaaccugaa

SEQ ID NO: 465115 - RNA, 32 nt, Human
ggggaggcagagccaggaagcuaagccagggc

SEQ ID NO: 465116 - RNA, 32 nt, Human
ggggaggcagccaagagagccgugcagauggc

SEQ ID NO: 465117 - RNA, 32 nt, Human
ggggaggcagccggcacccacaagugccacug

SEQ ID NO: 465118 - RNA, 32 nt, Human
ggggaggcaggaagaaaggaaggaaggaaaga

SEQ ID NO: 465119 - RNA, 32 nt, Human
ggggaggcaggcaggugggugagcagcagaug

SEQ ID NO: 465120 - RNA, 32 nt, Human
ggggaggcaggcggaggccaugggcagcgagg

SEQ ID NO: 465121 - RNA, 32 nt, Human
ggggaggcaggcggaucaugaugucaggagau

SEQ ID NO: 465122 - RNA, 32 nt, Human
ggggaggcaggcggggcugacagcucaggagu

SEQ ID NO: 465123 - RNA, 32 nt, Human
ggggaggcagggccacaggaaaugaguggggu

SEQ ID NO: 465124 - RNA, 32 nt, Human
ggggaggccacagcagggcugagggaacucug

SEQ ID NO: 465125 - RNA, 32 nt, Human
ggggaggccagcccagugcgggcacagcacaa

SEQ ID NO: 465126 - RNA, 32 nt, Human
ggggaggccaggguagaggcugacggcgcaag

SEQ ID NO: 465127 - RNA, 32 nt, Human
ggggaggccauucccaugagacugccugucac

SEQ ID NO: 465128 - RNA, 32 nt, Human
ggggaggcccagaagcagggaugccaucuguu

SEQ ID NO: 465129 - RNA, 32 nt, Human
ggggaggcccucaccuuccagagaggacagac

SEQ ID NO: 465130 - RNA, 32 nt, Human
ggggaggccgugccaggcagggccgguucgug

SEQ ID NO: 465131 - RNA, 32 nt, Human
ggggaggccugggaacagagcccccacccucu

SEQ ID NO: 465132 - RNA, 32 nt, Human
ggggaggcugaggcaggagaauugcuuugaac

SEQ ID NO: 465133 - RNA, 32 nt, Human
ggggaggcuuucucaauaacauggcccuuugc

SEQ ID NO: 465134 - RNA, 32 nt, Human
ggggagggaacccagaggcuggggaugagacu

SEQ ID NO: 465135 - RNA, 32 nt, Human
ggggagggaagaggaggagaggggaggggacc

SEQ ID NO: 465136 - RNA, 24 nt, Human
ggggagggacaagggauucuggga

SEQ ID NO: 465137 - RNA, 24 nt, Human
ggggagggaccagcaaaucugaga

SEQ ID NO: 465138 - RNA, 19 nt, Human
ggggagggacguccuguga

SEQ ID NO: 465139 - RNA, 22 nt, Human
ggggagggacuggccccuggga

SEQ ID NO: 465140 - RNA, 32 nt, Human
ggggagggagaaaaggugggggaaagagagaa

SEQ ID NO: 465141 - RNA, 32 nt, Human
ggggagggagagagagggagggagagggagug

SEQ ID NO: 465142 - RNA, 20 nt, Human
ggggagggagcacucuggga

SEQ ID NO: 465143 - RNA, 32 nt, Human
ggggagggagcagcugggcaaggaaguggcuu

SEQ ID NO: 465144 - RNA, 32 nt, Human
ggggagggaggaagaaggaagagaggcagaag

SEQ ID NO: 465145 - RNA, 32 nt, Human
ggggagggaggcaauaagcaaagaaauaaaug

SEQ ID NO: 465146 - RNA, 32 nt, Human
ggggagggaggcaggugggugguaagagggaa

SEQ ID NO: 465147 - RNA, 32 nt, Human
ggggagggaggcagugguggcuggagggugcg

SEQ ID NO: 465148 - RNA, 32 nt, Human
ggggagggaggcaucuagggagaggggucccc

SEQ ID NO: 465149 - RNA, 32 nt, Human
ggggagggaggcggggguggacagggaggcag

SEQ ID NO: 465150 - RNA, 32 nt, Human
ggggagggaggcgggguuggggccacgugagc

SEQ ID NO: 465151 - RNA, 23 nt, Human
ggggagggaggcgucccggcgga

SEQ ID NO: 465152 - RNA, 32 nt, Human
ggggagggagggagggaguuggcaguuucaaa

SEQ ID NO: 465153 - RNA, 32 nt, Human
ggggagggagguggagggagggaaggguuucu

SEQ ID NO: 465154 - RNA, 32 nt, Human
ggggagggagguucaccugaggaggacugugg

SEQ ID NO: 465155 - RNA, 32 nt, Human
ggggagggaucgagaacggugugggagagcua

SEQ ID NO: 465156 - RNA, 32 nt, Human
ggggagggaugggguuauagcuguuuuguuua

SEQ ID NO: 465157 - RNA, 32 nt, Human
ggggagggcaaggugcugccccagggaaaagg

SEQ ID NO: 465158 - RNA, 32 nt, Human
ggggagggcaccggagccuugccaccauccca

SEQ ID NO: 465159 - RNA, 32 nt, Human
ggggagggcagaguucaaggacugccuucaag

SEQ ID NO: 465160 - RNA, 19 nt, Human
ggggagggcaugauccugg

SEQ ID NO: 465161 - RNA, 24 nt, Human
ggggagggccucugacugcuggga

SEQ ID NO: 465162 - RNA, 32 nt, Human
ggggagggccuggcaaggggaggcaggagggu

SEQ ID NO: 465163 - RNA, 32 nt, Human
ggggagggcgaagaggaggaggaaggggagga

SEQ ID NO: 465164 - RNA, 32 nt, Human
ggggagggcgacggagcgggugaccuuccgga

SEQ ID NO: 465165 - RNA, 32 nt, Human
ggggagggcggcaggccagggcgaaggccaag

SEQ ID NO: 465166 - RNA, 32 nt, Human
ggggagggcugaggucagggaggucugaagcu

SEQ ID NO: 465167 - RNA, 32 nt, Human
ggggagggcuugguggggagggggacuuacaa

SEQ ID NO: 465168 - RNA, 21 nt, Human
ggggaggggaagagacuggaa

SEQ ID NO: 465169 - RNA, 32 nt, Human
ggggaggggaaggagcggcacaugggguugag

SEQ ID NO: 465170 - RNA, 21 nt, Human
ggggaggggaagucccuggga

SEQ ID NO: 465171 - RNA, 32 nt, Human
ggggaggggagcagcagagggaggccaaggcc

SEQ ID NO: 465172 - RNA, 32 nt, Human
ggggaggggagggcacguucuugacacauggg

SEQ ID NO: 465173 - RNA, 32 nt, Human
ggggaggggccagugagcucugggcucagcca

SEQ ID NO: 465174 - RNA, 32 nt, Human
ggggaggggcccagagcaaagggcaucaggga

SEQ ID NO: 465175 - RNA, 32 nt, Human
ggggaggggcuaaagagcaggaaacaagcuug

SEQ ID NO: 465176 - RNA, 32 nt, Human
ggggaggggcugagagggugggggcuggaacc

SEQ ID NO: 465177 - RNA, 32 nt, Human
ggggaggggcugcagacagcagggggagagga

SEQ ID NO: 465178 - RNA, 22 nt, Human
ggggagggggaaaagagagaga

SEQ ID NO: 465179 - RNA, 32 nt, Human
ggggagggggagggaugaccagcucucaggga

SEQ ID NO: 465180 - RNA, 32 nt, Human
ggggagggggagggguccuccgggaggagcuc

SEQ ID NO: 465181 - RNA, 32 nt, Human
ggggagggggcaccgccucccacccacugagg

SEQ ID NO: 465182 - RNA, 32 nt, Human
ggggagggggcagaggcccucgggggcccgug

SEQ ID NO: 465183 - RNA, 32 nt, Human
ggggagggggcaguuagauuccccagcuuccu

SEQ ID NO: 465184 - RNA, 32 nt, Human
ggggagggggccaaggacacagcacugggcug

SEQ ID NO: 465185 - RNA, 23 nt, Human
ggggagggggccagacucuggga

SEQ ID NO: 465186 - RNA, 18 nt, Human
ggggagggggguggugaa

SEQ ID NO: 465187 - RNA, 32 nt, Human
ggggagggggucuguggaagauucaggagaaa

SEQ ID NO: 465188 - RNA, 32 nt, Human
ggggaggguagacugggaguccugaccacgca

SEQ ID NO: 465189 - RNA, 32 nt, Human
ggggaggguaggcaggauuggggaagagagcc

SEQ ID NO: 465190 - RNA, 16 nt, Human
ggggaggguaggggga

SEQ ID NO: 465191 - RNA, 32 nt, Human
ggggagggugcucaagcaggggugggggaggg

SEQ ID NO: 465192 - RNA, 32 nt, Human
ggggaggguggcaggugaccuucugggaaaug

SEQ ID NO: 465193 - RNA, 32 nt, Human
ggggaggguggggaugggaggggagagacaga

SEQ ID NO: 465194 - RNA, 32 nt, Human
ggggagguacauuccugcaucuucucaccccc

SEQ ID NO: 465195 - RNA, 32 nt, Human
ggggaggucugagugguggucuuugggauaac

SEQ ID NO: 465196 - RNA, 22 nt, Human
ggggaggugagagcuucuggga

SEQ ID NO: 465197 - RNA, 32 nt, Human
ggggaggugcccagguggguggaccaguacuc

SEQ ID NO: 465198 - RNA, 32 nt, Human
ggggagguggccaggccaguggccaggcccug

SEQ ID NO: 465199 - RNA, 32 nt, Human
ggggagguguggagggagaggcgcggugggaa

SEQ ID NO: 465200 - RNA, 32 nt, Human
ggggagguguggguucccugggccaagaccag

SEQ ID NO: 465201 - RNA, 32 nt, Human
ggggaguacagaagguaugggcagaagcugua

SEQ ID NO: 465202 - RNA, 32 nt, Human
ggggaguacauggcagaagugggcauauuuca

SEQ ID NO: 465203 - RNA, 32 nt, Human
ggggaguagauaugagagggagccgcuccugg

SEQ ID NO: 465204 - RNA, 32 nt, Human
ggggaguaggaaagaagaggaugguugcuuaa

SEQ ID NO: 465205 - RNA, 32 nt, Human
ggggagucgggcguggggcgggcagggagugg

SEQ ID NO: 465206 - RNA, 32 nt, Human
ggggagucucugugccugggaauuaggacccc

SEQ ID NO: 465207 - RNA, 32 nt, Human
ggggagucugguuuuucucuucauccugucuc

SEQ ID NO: 465208 - RNA, 32 nt, Human
ggggagugaaggcagagccuggugcagaugga

SEQ ID NO: 465209 - RNA, 32 nt, Human
ggggagugaagugccuuaagaaacaaagcccu

SEQ ID NO: 465210 - RNA, 32 nt, Human
ggggagugagaguucagggaggcccuucccac

SEQ ID NO: 465211 - RNA, 32 nt, Human
ggggagugaguccagagagggacuuaaggggc

SEQ ID NO: 465212 - RNA, 32 nt, Human
ggggaguggaaagaggaaggggugaaggagcu

SEQ ID NO: 465213 - RNA, 21 nt, Human
ggggagugggaaacucugggg

SEQ ID NO: 465214 - RNA, 32 nt, Human
ggggagugggaauucagccacauucagaauuc

SEQ ID NO: 465215 - RNA, 32 nt, Human
ggggagugggccagggcagcagccgggcugaa

SEQ ID NO: 465216 - RNA, 32 nt, Human
ggggaguggggugggagucaggggaauagaug

SEQ ID NO: 465217 - RNA, 31 nt, Human
ggggaguggguggcaggugggggugggcugc

SEQ ID NO: 465218 - RNA, 32 nt, Human
ggggagugguggguuuauagggggaggaggag

SEQ ID NO: 465219 - RNA, 32 nt, Human
ggggagugucuagccaugacgagaagauuccc

SEQ ID NO: 465220 - RNA, 32 nt, Human
ggggaguguucuguuccggcauauccuggccg

SEQ ID NO: 465221 - RNA, 32 nt, Human
ggggaguguugggcaugugaucacgccuggcu

SEQ ID NO: 465222 - RNA, 32 nt, Human
ggggaguugggguucucauaccagcagauuuc

SEQ ID NO: 465223 - RNA, 32 nt, Human
ggggaguugugcaggcuggggugacccuuccc

SEQ ID NO: 465224 - RNA, 32 nt, Human
ggggauaacccuuccuucgauaccaaacacua

SEQ ID NO: 465225 - RNA, 32 nt, Human
ggggauaagacggaagaaguuggcucauauca

SEQ ID NO: 465226 - RNA, 32 nt, Human
ggggauaaggggaugugcagcaucugugugga

SEQ ID NO: 465227 - RNA, 32 nt, Human
ggggauacagagaagcuccccgucucugcauc

SEQ ID NO: 465228 - RNA, 20 nt, Human
ggggauacaguggauaucua

SEQ ID NO: 465229 - RNA, 32 nt, Human
ggggauacuguacaucuuuaucccacugugac

SEQ ID NO: 465230 - RNA, 32 nt, Human
ggggauacuuccugcagggcccuuggaaaguu

SEQ ID NO: 465231 - RNA, 32 nt, Human
ggggauacuuugggucugggcuggcaggggcu

SEQ ID NO: 465232 - RNA, 32 nt, Human
ggggauagaaaaucgggagucugcccucauua

SEQ ID NO: 465233 - RNA, 32 nt, Human
ggggauagaaaauggaauaaagauagaaggga

SEQ ID NO: 465234 - RNA, 24 nt, Human
ggggauagaacuugagcaauuucu

SEQ ID NO: 465235 - RNA, 32 nt, Human
ggggauagaagucugguggagguggagugggc

SEQ ID NO: 465236 - RNA, 32 nt, Human
ggggauagaguccugaggaauguggucacagc

SEQ ID NO: 465237 - RNA, 32 nt, Human
ggggauaggaggugggggagucgagagcugga

SEQ ID NO: 465238 - RNA, 32 nt, Human
ggggauaggcaaagggaccaguaucagguuau

SEQ ID NO: 465239 - RNA, 15 nt, Human
ggggauagggcccuc

SEQ ID NO: 465240 - RNA, 18 nt, Human
ggggaucacagcguuuca

SEQ ID NO: 465241 - RNA, 20 nt, Human
ggggaucacuugagcccagg

SEQ ID NO: 465242 - RNA, 32 nt, Human
ggggaucacuugagcccaggagucuaggacca

SEQ ID NO: 465243 - RNA, 32 nt, Human
ggggaucacuugagcccaggaguuggaggcca

SEQ ID NO: 465244 - RNA, 32 nt, Human
ggggaucagacauaccuguccgggcaucaacc

SEQ ID NO: 465245 - RNA, 25 nt, Human
ggggaucagaguuuguuuuugcgga

SEQ ID NO: 465246 - RNA, 32 nt, Human
ggggaucagcuggcugggaggauuagugagca

SEQ ID NO: 465247 - RNA, 32 nt, Human
ggggaucaggaaccacacaauccccaggguuc

SEQ ID NO: 465248 - RNA, 32 nt, Human
ggggauccaagaaugucuugucauacaagccg

SEQ ID NO: 465249 - RNA, 32 nt, Human
ggggauccaccaggucaucuagcucuggcccu

SEQ ID NO: 465250 - RNA, 32 nt, Human
ggggauccaggauuuguaauuucuugaucuaa

SEQ ID NO: 465251 - RNA, 32 nt, Human
ggggaucccaggcuacuagugcaaagggagug

SEQ ID NO: 465252 - RNA, 32 nt, Human
ggggaucccccagcugaaggaggcuggcagga

SEQ ID NO: 465253 - RNA, 32 nt, Human
ggggaucccuccauccgcaaagccaggguccu

SEQ ID NO: 465254 - RNA, 32 nt, Human
ggggauccucaccgaccauggccacagcugcc

SEQ ID NO: 465255 - RNA, 32 nt, Human
ggggauccuguggcccacagagcugccccagc

SEQ ID NO: 465256 - RNA, 32 nt, Human
ggggauccuugcaggccuccagcuggggcuga

SEQ ID NO: 465257 - RNA, 32 nt, Human
ggggaucgagggcuggcggggagaagcagaca

SEQ ID NO: 465258 - RNA, 32 nt, Human
ggggaucgcuugaaccugggaggcagagguug

SEQ ID NO: 465259 - RNA, 20 nt, Human
ggggaucgcuugagcccagg

SEQ ID NO: 465260 - RNA, 32 nt, Human
ggggaucgcuugagcccaggaguuggaggcug

SEQ ID NO: 465261 - RNA, 32 nt, Human
ggggaucgcuugagcccaggaguuugaggcug

SEQ ID NO: 465262 - RNA, 32 nt, Human
ggggaucgugccgcugcauccagccugagcaa

SEQ ID NO: 465263 - RNA, 32 nt, Human
ggggaucuauaaucuuguaacagggucuaucu

SEQ ID NO: 465264 - RNA, 32 nt, Human
ggggaucugcauuucuaacaggcuccugcccc

SEQ ID NO: 465265 - RNA, 32 nt, Human
ggggaucugggagcugagcacuugucuauacu

SEQ ID NO: 465266 - RNA, 32 nt, Human
ggggaucugggcaccccaggaaccgccauugc

SEQ ID NO: 465267 - RNA, 22 nt, Human
ggggaucugggguagagggagg

SEQ ID NO: 465268 - RNA, 32 nt, Human
ggggaucuuuucuugaaaaccuacagugcuaa

SEQ ID NO: 465269 - RNA, 32 nt, Human
ggggaugaaaggaagagaggggccaauugggc

SEQ ID NO: 465270 - RNA, 29 nt, Human
ggggaugacccaugggcuucuggagcugg

SEQ ID NO: 465271 - RNA, 32 nt, Human
ggggaugagccaggcuggggacaguggggcug

SEQ ID NO: 465272 - RNA, 32 nt, Human
ggggaugaggggcaaguggaggggacggcuca

SEQ ID NO: 465273 - RNA, 32 nt, Human
ggggaugaggugggagaaagcaaccacaacgu

SEQ ID NO: 465274 - RNA, 32 nt, Human
ggggaugagugcagggcagaggugagggaacc

SEQ ID NO: 465275 - RNA, 32 nt, Human
ggggaugauuguaggucaagagacugaagcaa

SEQ ID NO: 465276 - RNA, 17 nt, Human
ggggaugcaguuuggca

SEQ ID NO: 465277 - RNA, 32 nt, Human
ggggaugcaugggaaagccaggagggcccuga

SEQ ID NO: 465278 - RNA, 32 nt, Human
ggggaugccaagaauuuuuagaauuuuugaga

SEQ ID NO: 465279 - RNA, 32 nt, Human
ggggaugccauucaaucagagccugggccugg

SEQ ID NO: 465280 - RNA, 32 nt, Human
ggggaugcccauuugucccaagcuuauccugu

SEQ ID NO: 465281 - RNA, 32 nt, Human
ggggaugccccagggacuguggcccacagaga

SEQ ID NO: 465282 - RNA, 22 nt, Human
ggggaugccgggcuccaggccg

SEQ ID NO: 465283 - RNA, 32 nt, Human
ggggaugccuaugucugugcuucauuggcguc

SEQ ID NO: 465284 - RNA, 19 nt, Human
ggggaugcguuuccagguc

SEQ ID NO: 465285 - RNA, 22 nt, Human
ggggaugcucaggggccugcag

SEQ ID NO: 465286 - RNA, 32 nt, Human
ggggaugcucugguagccugaauacagaacug

SEQ ID NO: 465287 - RNA, 32 nt, Human
ggggaugcuucuuagagcaucuuccacaucaa

SEQ ID NO: 465288 - RNA, 21 nt, Human
ggggauggacucugucaggga

SEQ ID NO: 465289 - RNA, 32 nt, Human
ggggauggagcaguagaaggaaucacuguuuc

SEQ ID NO: 465290 - RNA, 32 nt, Human
ggggauggagucucacuuuguugcccaggcug

SEQ ID NO: 465291 - RNA, 32 nt, Human
ggggauggagucucccucuguugcccaggcug

SEQ ID NO: 465292 - RNA, 32 nt, Human
ggggauggagugagcccauggugaccucggga

SEQ ID NO: 465293 - RNA, 22 nt, Human
ggggauggcagaaacucaggga

SEQ ID NO: 465294 - RNA, 22 nt, Human
ggggauggcagacagucaagga

SEQ ID NO: 465295 - RNA, 32 nt, Human
ggggauggcagaggaggugaggagggaggaag

SEQ ID NO: 465296 - RNA, 21 nt, Human
ggggauggccagcgucaggga

SEQ ID NO: 465297 - RNA, 32 nt, Human
ggggauggcccggagcccccaaggguggcagg

SEQ ID NO: 465298 - RNA, 32 nt, Human
ggggauggcuugagcccaggagguugagguca

SEQ ID NO: 465299 - RNA, 32 nt, Human
ggggaugggaggggacagggauucacgaucca

SEQ ID NO: 465300 - RNA, 32 nt, Human
ggggaugggcagggugcucucuggacccccac

SEQ ID NO: 465301 - RNA, 32 nt, Human
ggggauggggaggguagaaaugaaucagacau

SEQ ID NO: 465302 - RNA, 32 nt, Human
ggggauggggcagaggucuggaucugggaucg

SEQ ID NO: 465303 - RNA, 29 nt, Human
ggggauggggccgccgcucccgcugcugc

SEQ ID NO: 465304 - RNA, 32 nt, Human
ggggauggggcugugggggcggggcggcaugg

SEQ ID NO: 465305 - RNA, 24 nt, Human
ggggaugggggacuaugacagaga

SEQ ID NO: 465306 - RNA, 31 nt, Human
ggggaugggguggaaucugaggggugagccu

SEQ ID NO: 465307 - RNA, 32 nt, Human
ggggauggggugugugcccacugugcucauca

SEQ ID NO: 465308 - RNA, 32 nt, Human
ggggaugggguuucaccauguuggccaggcug

SEQ ID NO: 465309 - RNA, 32 nt, Human
ggggaugggguuucaucauguuggccaggcug

SEQ ID NO: 465310 - RNA, 32 nt, Human
ggggaugggguuuuaccauguuggccaggcug

SEQ ID NO: 465311 - RNA, 23 nt, Human
ggggaugguaaugauacagugga

SEQ ID NO: 465312 - RNA, 32 nt, Human
ggggaugguccacugucacuguuucucugcug

SEQ ID NO: 465313 - RNA, 23 nt, Human
ggggaugguggcggugguggugg

SEQ ID NO: 465314 - RNA, 23 nt, Human
ggggauggugggagugaaggggg

SEQ ID NO: 465315 - RNA, 32 nt, Human
ggggauggugucucacucugucacucaggcug

SEQ ID NO: 465316 - RNA, 32 nt, Human
ggggauguccacacagauuuagguacuuacgu

SEQ ID NO: 465317 - RNA, 32 nt, Human
ggggaugugagcaaaauucgggcuuguguucu

SEQ ID NO: 465318 - RNA, 32 nt, Human
ggggauguggccaggggugcuccugugcucac

SEQ ID NO: 465319 - RNA, 32 nt, Human
ggggaugugggagggagcagacaggaggaauc

SEQ ID NO: 465320 - RNA, 32 nt, Human
ggggaugugggauggcagcagccagguaugua

SEQ ID NO: 465321 - RNA, 32 nt, Human
ggggauguggggaccaggagaaagucaggauc

SEQ ID NO: 465322 - RNA, 24 nt, Human
ggggaugugggggagggcgguuuu

SEQ ID NO: 465323 - RNA, 32 nt, Human
ggggauguggucucauuagguugcccaagcug

SEQ ID NO: 465324 - RNA, 32 nt, Human
ggggauguguguguuuuuaucugagcagcucc

SEQ ID NO: 465325 - RNA, 32 nt, Human
ggggauuaacacuuuugcugagggagaaaaag

SEQ ID NO: 465326 - RNA, 32 nt, Human
ggggauuaccauuguuccuggaguacuccuac

SEQ ID NO: 465327 - RNA, 32 nt, Human
ggggauuagagugauuaugggagcagcuaaag

SEQ ID NO: 465328 - RNA, 25 nt, Human
ggggauuagggguggggcaguuuuu

SEQ ID NO: 465329 - RNA, 32 nt, Human
ggggauucuacgggggcaguagcucaacaagg

SEQ ID NO: 465330 - RNA, 32 nt, Human
ggggauucugcacuuuagccagccugggucgg

SEQ ID NO: 465331 - RNA, 32 nt, Human
ggggauugaagcaggcggaucacuugagccca

SEQ ID NO: 465332 - RNA, 32 nt, Human
ggggauugaauagauuucaccuggacaugggg

SEQ ID NO: 465333 - RNA, 32 nt, Human
ggggauugagcagcccaggagaagagagaugg

SEQ ID NO: 465334 - RNA, 32 nt, Human
ggggauugagucuugcugcucugcccagcccu

SEQ ID NO: 465335 - RNA, 32 nt, Human
ggggauuggagguggguguuagugguuagaag

SEQ ID NO: 465336 - RNA, 32 nt, Human
ggggauuucagcugugugcaggcacagaugca

SEQ ID NO: 465337 - RNA, 32 nt, Human
ggggauuucuguguccugacaccaccucccca

SEQ ID NO: 465338 - RNA, 32 nt, Human
ggggauuucuucuuggcucccugcuuucccca

SEQ ID NO: 465339 - RNA, 32 nt, Human
ggggauuugcacacaaaugcagcagagucugg

SEQ ID NO: 465340 - RNA, 32 nt, Human
ggggauuuuaucuguucaaugugcaaccugau

SEQ ID NO: 465341 - RNA, 32 nt, Human
ggggauuuuugaccaggaugugagugaccaga

SEQ ID NO: 465342 - RNA, 32 nt, Human
ggggcaaaaccauacggaugcgcugcugucug

SEQ ID NO: 465343 - RNA, 32 nt, Human
ggggcaaaccauugaugguuuucaaguauaug

SEQ ID NO: 465344 - RNA, 18 nt, Human
ggggcaaagaccugaaca

SEQ ID NO: 465345 - RNA, 19 nt, Human
ggggcaaagaggggugcag

SEQ ID NO: 465346 - RNA, 24 nt, Human
ggggcaaaggggugggcgauuucu

SEQ ID NO: 465347 - RNA, 32 nt, Human
ggggcaaaugugcccugaguccuugggguggu

SEQ ID NO: 465348 - RNA, 32 nt, Human
ggggcaacauauggagacuccgucucuacaga

SEQ ID NO: 465349 - RNA, 32 nt, Human
ggggcaacaugaugaaaucccaucucuaaaaa

SEQ ID NO: 465350 - RNA, 32 nt, Human
ggggcaacauggcaaaacccugucucuacuaa

SEQ ID NO: 465351 - RNA, 21 nt, Human
ggggcaaccccgugagcguca

SEQ ID NO: 465352 - RNA, 32 nt, Human
ggggcaaccuaaauucagagagcacccuggcu

SEQ ID NO: 465353 - RNA, 32 nt, Human
ggggcaacgaggguggaggucccacugagccu

SEQ ID NO: 465354 - RNA, 32 nt, Human
ggggcaacucaggauuuuaaguuccauaaagu

SEQ ID NO: 465355 - RNA, 32 nt, Human
ggggcaacugguuggagggaaggugaaguuca

SEQ ID NO: 465356 - RNA, 32 nt, Human
ggggcaagaauguacauuuucuuuuuagaaaa

SEQ ID NO: 465357 - RNA, 18 nt, Human
ggggcaagagcaacaacg

SEQ ID NO: 465358 - RNA, 19 nt, Human
ggggcaagagcauguacaa

SEQ ID NO: 465359 - RNA, 32 nt, Human
ggggcaagaggaagaaugugggggugaagagg

SEQ ID NO: 465360 - RNA, 19 nt, Human
ggggcaagaugcaguacaa

SEQ ID NO: 465361 - RNA, 32 nt, Human
ggggcaagcagaaccucuggccuccuaucagg

SEQ ID NO: 465362 - RNA, 18 nt, Human
ggggcaagcagcacaccg

SEQ ID NO: 465363 - RNA, 31 nt, Human
ggggcaagccucucugcaccugcguguccag

SEQ ID NO: 465364 - RNA, 32 nt, Human
ggggcaaggaagaggaguuggccaacaggcag

SEQ ID NO: 465365 - RNA, 32 nt, Human
ggggcaaggagaaaggagaggugacugcugau

SEQ ID NO: 465366 - RNA, 32 nt, Human
ggggcaaggcccugagaaggagaacaucgugu

SEQ ID NO: 465367 - RNA, 32 nt, Human
ggggcaaggcuccgagggcagcauucaguagc

SEQ ID NO: 465368 - RNA, 32 nt, Human
ggggcaagggccgugggcucugcccgcaccug

SEQ ID NO: 465369 - RNA, 32 nt, Human
ggggcaagguaacccugaagguggaguaggaa

SEQ ID NO: 465370 - RNA, 32 nt, Human
ggggcaaggucugagggcccaccgaugagaga

SEQ ID NO: 465371 - RNA, 32 nt, Human
ggggcaagucagcgccucuaaguggcuuagcg

SEQ ID NO: 465372 - RNA, 17 nt, Human
ggggcaaguccagguca

SEQ ID NO: 465373 - RNA, 31 nt, Human
ggggcaagugagagccggacgggcacugggc

SEQ ID NO: 465374 - RNA, 32 nt, Human
ggggcaagugaguuaggggcccaggggcaauu

SEQ ID NO: 465375 - RNA, 20 nt, Human
ggggcaaguggaggggacgg

SEQ ID NO: 465376 - RNA, 32 nt, Human
ggggcaaguggaggggacggcucagacgcaca

SEQ ID NO: 465377 - RNA, 32 nt, Human
ggggcaauauaaggagaccccaucucuacaaa

SEQ ID NO: 465378 - RNA, 18 nt, Human
ggggcaaugcaccuuugc

SEQ ID NO: 465379 - RNA, 32 nt, Human
ggggcaauggccaauucuaaucucaagucauu

SEQ ID NO: 465380 - RNA, 32 nt, Human
ggggcaauugauaaaggaaggacucuagugac

SEQ ID NO: 465381 - RNA, 32 nt, Human
ggggcacaauagcucugaagcugcagugaccc

SEQ ID NO: 465382 - RNA, 20 nt, Human
ggggcacacgccccaaggga

SEQ ID NO: 465383 - RNA, 32 nt, Human
ggggcacacgcugggccaaggugcaggcggcc

SEQ ID NO: 465384 - RNA, 32 nt, Human
ggggcacacguauccugaggggcuugggccau

SEQ ID NO: 465385 - RNA, 32 nt, Human
ggggcacacuccuaaauugcuggaugacugaa

SEQ ID NO: 465386 - RNA, 32 nt, Human
ggggcacagaagaagaaaaagaacuggggugc

SEQ ID NO: 465387 - RNA, 23 nt, Human
ggggcacagcaacuuccgggccu

SEQ ID NO: 465388 - RNA, 32 nt, Human
ggggcacagcacagaccccagagccaggaacc

SEQ ID NO: 465389 - RNA, 32 nt, Human
ggggcacagcacagaccccagaggcaggaacc

SEQ ID NO: 465390 - RNA, 32 nt, Human
ggggcacagccugucacugcucugccuaagag

SEQ ID NO: 465391 - RNA, 32 nt, Human
ggggcacagggagggacagcgggaggugucgc

SEQ ID NO: 465392 - RNA, 32 nt, Human
ggggcacagggaggggcagcgagcaggugggg

SEQ ID NO: 465393 - RNA, 32 nt, Human
ggggcacagugaagugcugaagggcuucucag

SEQ ID NO: 465394 - RNA, 32 nt, Human
ggggcacagugaauguguguauguaugaaggc

SEQ ID NO: 465395 - RNA, 32 nt, Human
ggggcacauagaagcccucacacacacaugcc

SEQ ID NO: 465396 - RNA, 32 nt, Human
ggggcacaucccucagcaggacagcaacaguc

SEQ ID NO: 465397 - RNA, 21 nt, Human
ggggcacauggagugggacag

SEQ ID NO: 465398 - RNA, 21 nt, Human
ggggcaccaagaaccugcuca

SEQ ID NO: 465399 - RNA, 32 nt, Human
ggggcaccaagggagagaggggcccaggggua

SEQ ID NO: 465400 - RNA, 32 nt, Human
ggggcaccacuacuccagcccagaaggaaagg

SEQ ID NO: 465401 - RNA, 32 nt, Human
ggggcaccagaggcaguaaccaugcccgcaua

SEQ ID NO: 465402 - RNA, 22 nt, Human
ggggcaccccaaagagggggca

SEQ ID NO: 465403 - RNA, 32 nt, Human
ggggcacccuccucucagcaccaaaauggccc

SEQ ID NO: 465404 - RNA, 32 nt, Human
ggggcacccucgggccauccagcccaguguuu

SEQ ID NO: 465405 - RNA, 32 nt, Human
ggggcacccugugagguggccccugagaggug

SEQ ID NO: 465406 - RNA, 32 nt, Human
ggggcaccugggaggucaaaggucuccaccac

SEQ ID NO: 465407 - RNA, 22 nt, Human
ggggcacgaacaggucugguga

SEQ ID NO: 465408 - RNA, 25 nt, Human
ggggcacgaagugggcccuggguga

SEQ ID NO: 465409 - RNA, 21 nt, Human
ggggcacgaggcaucaguugg

SEQ ID NO: 465410 - RNA, 22 nt, Human
ggggcacgagggccugggcugg

SEQ ID NO: 465411 - RNA, 32 nt, Human
ggggcacgaguggcugcggagugugggugguu

SEQ ID NO: 465412 - RNA, 20 nt, Human
ggggcacgcucggggccugc

SEQ ID NO: 465413 - RNA, 26 nt, Human
ggggcacggagggcagucccgggugg

SEQ ID NO: 465414 - RNA, 32 nt, Human
ggggcacgggagaaggguggggaccguugcug

SEQ ID NO: 465415 - RNA, 22 nt, Human
ggggcacggggcgcggggccgg

SEQ ID NO: 465416 - RNA, 24 nt, Human
ggggcacgguggcucaugccugua

SEQ ID NO: 465417 - RNA, 32 nt, Human
ggggcacguggacugguucugcuguuuuuggc

SEQ ID NO: 465418 - RNA, 32 nt, Human
ggggcacuccugggcagcuuuugcucagugga

SEQ ID NO: 465419 - RNA, 32 nt, Human
ggggcacuggcccuguggagcugcaguaagag

SEQ ID NO: 465420 - RNA, 32 nt, Human
ggggcacuggcucauuccaagacuguucuugu

SEQ ID NO: 465421 - RNA, 32 nt, Human
ggggcacuggcugccuggcugccuccuggagu

SEQ ID NO: 465422 - RNA, 32 nt, Human
ggggcacuguacccuucuagccccaucagggg

SEQ ID NO: 465423 - RNA, 32 nt, Human
ggggcacugucuccucuucccuccucuuggga

SEQ ID NO: 465424 - RNA, 32 nt, Human
ggggcacuuccucuucucuuuucuagucaggg

SEQ ID NO: 465425 - RNA, 32 nt, Human
ggggcacuuggcuaugcugauucgcgugaagg

SEQ ID NO: 465426 - RNA, 32 nt, Human
ggggcagaaagagggcgagagagcuccccgag

SEQ ID NO: 465427 - RNA, 32 nt, Human
ggggcagaacaaggcuggugcuuccuucuagu

SEQ ID NO: 465428 - RNA, 32 nt, Human
ggggcagaaccaauuggaaggaagaaagggac

SEQ ID NO: 465429 - RNA, 32 nt, Human
ggggcagaaccagcacaucuggagccacacag

SEQ ID NO: 465430 - RNA, 32 nt, Human
ggggcagaagugagagaaugagccaacccaug

SEQ ID NO: 465431 - RNA, 32 nt, Human
ggggcagacaccucuggacugacaaugguauc

SEQ ID NO: 465432 - RNA, 22 nt, Human
ggggcagacgcgauucagguga

SEQ ID NO: 465433 - RNA, 32 nt, Human
ggggcagagaaaggaagggaacuggagcuggc

SEQ ID NO: 465434 - RNA, 32 nt, Human
ggggcagagagaauacugacagcagaggucuu

SEQ ID NO: 465435 - RNA, 32 nt, Human
ggggcagagagggagagccgguccuagcuccu

SEQ ID NO: 465436 - RNA, 20 nt, Human
ggggcagagccaggaggcag

SEQ ID NO: 465437 - RNA, 32 nt, Human
ggggcagagccccagccagggcagcugcuucc

SEQ ID NO: 465438 - RNA, 32 nt, Human
ggggcagaggagcggaguugaggcagaagcca

SEQ ID NO: 465439 - RNA, 19 nt, Human
ggggcagaggcaggggcgg

SEQ ID NO: 465440 - RNA, 32 nt, Human
ggggcagaggcucauagcaccucagacucuca

SEQ ID NO: 465441 - RNA, 32 nt, Human
ggggcagagggagggagccaaggucacuccaa

SEQ ID NO: 465442 - RNA, 32 nt, Human
ggggcagcaaacaguaacuaccaaaaccaaug

SEQ ID NO: 465443 - RNA, 32 nt, Human
ggggcagcacagguucugggauugugaggcug

SEQ ID NO: 465444 - RNA, 19 nt, Human
ggggcagcacugccugcug

SEQ ID NO: 465445 - RNA, 19 nt, Human
ggggcagcagaacaaugca

SEQ ID NO: 465446 - RNA, 19 nt, Human
ggggcagcagcagccuccu

SEQ ID NO: 465447 - RNA, 32 nt, Human
ggggcagcagccuggccugugccauggugggu

SEQ ID NO: 465448 - RNA, 24 nt, Human
ggggcagcagcugcuucggaucca

SEQ ID NO: 465449 - RNA, 32 nt, Human
ggggcagcaggcccaaaccccaacaggguauu

SEQ ID NO: 465450 - RNA, 18 nt, Human
ggggcagcaguacugcug

SEQ ID NO: 465451 - RNA, 32 nt, Human
ggggcagcauacgggguugcaagugaagccgc

SEQ ID NO: 465452 - RNA, 20 nt, Human
ggggcagcaugacccaagca

SEQ ID NO: 465453 - RNA, 32 nt, Human
ggggcagccacuggcuccgcgggcacaggccu

SEQ ID NO: 465454 - RNA, 32 nt, Human
ggggcagccagcccuggcuggagagcgggacg

SEQ ID NO: 465455 - RNA, 32 nt, Human
ggggcagcccagggcaguguugcugcauauug

SEQ ID NO: 465456 - RNA, 32 nt, Human
ggggcagcccucccccuuuccuucucucccug

SEQ ID NO: 465457 - RNA, 32 nt, Human
ggggcagccgcugacagcaugcagagcaaguu

SEQ ID NO: 465458 - RNA, 32 nt, Human
ggggcagccuaggaggcccacccucuuuggag

SEQ ID NO: 465459 - RNA, 32 nt, Human
ggggcagccuccagucugcucucagcuugugc

SEQ ID NO: 465460 - RNA, 18 nt, Human
ggggcagccucugccuca

SEQ ID NO: 465461 - RNA, 32 nt, Human
ggggcagccucuggcuuggacagggucuguuu

SEQ ID NO: 465462 - RNA, 32 nt, Human
ggggcagcgcagaccucugcggcccgggcggg

SEQ ID NO: 465463 - RNA, 32 nt, Human
ggggcagcgcagggcagacggcggcaggagaa

SEQ ID NO: 465464 - RNA, 23 nt, Human
ggggcagcgcccaccugccggug

SEQ ID NO: 465465 - RNA, 32 nt, Human
ggggcagcgcuaugggcucucgugcggacggc

SEQ ID NO: 465466 - RNA, 32 nt, Human
ggggcagcggcgccgcagccugggcuggcgga

SEQ ID NO: 465467 - RNA, 32 nt, Human
ggggcagcuccuggggagcaucagggaagagg

SEQ ID NO: 465468 - RNA, 32 nt, Human
ggggcagcucgggagagccggagcgguagcgg

SEQ ID NO: 465469 - RNA, 32 nt, Human
ggggcagcucgggagagcgggagcgguggcgg

SEQ ID NO: 465470 - RNA, 32 nt, Human
ggggcagcucuaggcuggggcuugcgcugggc

SEQ ID NO: 465471 - RNA, 32 nt, Human
ggggcagcucucuucucuccccaggacccagg

SEQ ID NO: 465472 - RNA, 32 nt, Human
ggggcagcugccgcgguggucgccucuggcag

SEQ ID NO: 465473 - RNA, 32 nt, Human
ggggcagcugcugcacuggcccagggagggcc

SEQ ID NO: 465474 - RNA, 32 nt, Human
ggggcagcuggugugacacaaggagcugcggg

SEQ ID NO: 465475 - RNA, 20 nt, Human
ggggcagcuugggcuggaga

SEQ ID NO: 465476 - RNA, 32 nt, Human
ggggcaggaacagcaggccuggccagcccaaa

SEQ ID NO: 465477 - RNA, 32 nt, Human
ggggcaggaaccuggggaggggcccagagcaa

SEQ ID NO: 465478 - RNA, 32 nt, Human
ggggcaggaagaggagcagaaaagaagggcug

SEQ ID NO: 465479 - RNA, 32 nt, Human
ggggcaggaaggcagaaggucuugguggcccu

SEQ ID NO: 465480 - RNA, 20 nt, Human
ggggcaggaagggaggcggc

SEQ ID NO: 465481 - RNA, 32 nt, Human
ggggcaggacagcagaggaugugcugggauua

SEQ ID NO: 465482 - RNA, 32 nt, Human
ggggcaggagaaugggguguucccugcugucc

SEQ ID NO: 465483 - RNA, 16 nt, Human
ggggcaggagcccccu

SEQ ID NO: 465484 - RNA, 32 nt, Human
ggggcaggaggaagauugcaggggcgggaaga

SEQ ID NO: 465485 - RNA, 32 nt, Human
ggggcaggaggagagaggaaaagggagggcga

SEQ ID NO: 465486 - RNA, 20 nt, Human
ggggcaggaggcagaggcag

SEQ ID NO: 465487 - RNA, 24 nt, Human
ggggcaggaggcagggcggggagg

SEQ ID NO: 465488 - RNA, 32 nt, Human
ggggcaggaggccagugguggggacgcagagg

SEQ ID NO: 465489 - RNA, 20 nt, Human
ggggcaggaggugagggcag

SEQ ID NO: 465490 - RNA, 32 nt, Human
ggggcaggaguuagcacacacgcagcacagca

SEQ ID NO: 465491 - RNA, 32 nt, Human
ggggcaggaugccugccaggguguucuggggg

SEQ ID NO: 465492 - RNA, 32 nt, Human
ggggcaggcccaggcgcggccgccgaaucacg

SEQ ID NO: 465493 - RNA, 32 nt, Human
ggggcaggcugcagaggacucaugacaggcua

SEQ ID NO: 465494 - RNA, 32 nt, Human
ggggcagggaaaggucagcauaggagagaaag

SEQ ID NO: 465495 - RNA, 32 nt, Human
ggggcagggacccccggaagccccagcaaucc

SEQ ID NO: 465496 - RNA, 32 nt, Human
ggggcagggagccagguacagagcagauuugg

SEQ ID NO: 465497 - RNA, 32 nt, Human
ggggcagggagcugaaggacuccaccgcugcc

SEQ ID NO: 465498 - RNA, 32 nt, Human
ggggcagggaggaucacuggaguacaggaguu

SEQ ID NO: 465499 - RNA, 32 nt, Human
ggggcagggaggcgcagccacacuccugcucu

SEQ ID NO: 465500 - RNA, 32 nt, Human
ggggcagggagguggggguugggggaguagug

SEQ ID NO: 465501 - RNA, 18 nt, Human
ggggcagggagucgagga

SEQ ID NO: 465502 - RNA, 20 nt, Human
ggggcagggcagaagcagga

SEQ ID NO: 465503 - RNA, 32 nt, Human
ggggcagggcagcagagggagggacccugaag

SEQ ID NO: 465504 - RNA, 32 nt, Human
ggggcagggcaggccucuuggagcaccuccuc

SEQ ID NO: 465505 - RNA, 32 nt, Human
ggggcagggccugaggcaagaggugggaggag

SEQ ID NO: 465506 - RNA, 32 nt, Human
ggggcagggccugggccucauggcuuuugcuu

SEQ ID NO: 465507 - RNA, 19 nt, Human
ggggcaggggcaggggcag

SEQ ID NO: 465508 - RNA, 32 nt, Human
ggggcaggggcaguggcagugugcaaagaauu

SEQ ID NO: 465509 - RNA, 32 nt, Human
ggggcagggugaaggcuucagcucacuguugu

SEQ ID NO: 465510 - RNA, 32 nt, Human
ggggcagggugugaggacuggcugcucuggga

SEQ ID NO: 465511 - RNA, 32 nt, Human
ggggcaggguuagaggguugugaggggaagag

SEQ ID NO: 465512 - RNA, 32 nt, Human
ggggcaggucuccagcugaaucugugccuaca

SEQ ID NO: 465513 - RNA, 32 nt, Human
ggggcaggucuccagcugaaucugugccuacg

SEQ ID NO: 465514 - RNA, 32 nt, Human
ggggcaggucucucaaccaggcauauuuuuaa

SEQ ID NO: 465515 - RNA, 22 nt, Human
ggggcaggugcagagguggcag

SEQ ID NO: 465516 - RNA, 20 nt, Human
ggggcagguggagggagcag

SEQ ID NO: 465517 - RNA, 32 nt, Human
ggggcaggugggggaauggaggcugcaggacu

SEQ ID NO: 465518 - RNA, 32 nt, Human
ggggcaggugugaaguugcugagggcagaggg

SEQ ID NO: 465519 - RNA, 32 nt, Human
ggggcagguguuuucugugacaguuggaaaua

SEQ ID NO: 465520 - RNA, 32 nt, Human
ggggcagguuagacgcuggggagccaguuggc

SEQ ID NO: 465521 - RNA, 32 nt, Human
ggggcagguugcuaagucaggugcagagguuc

SEQ ID NO: 465522 - RNA, 32 nt, Human
ggggcagguuuuuaaaaauuagcuaggcauca

SEQ ID NO: 465523 - RNA, 32 nt, Human
ggggcaguaacaugaauggagcugucaucucc

SEQ ID NO: 465524 - RNA, 32 nt, Human
ggggcagucaaauuagcaccuacuggcucuga

SEQ ID NO: 465525 - RNA, 32 nt, Human
ggggcagucaccgagugaccaccaagaggaag

SEQ ID NO: 465526 - RNA, 23 nt, Human
ggggcagugaaguguuuagguga

SEQ ID NO: 465527 - RNA, 19 nt, Human
ggggcaguggggccugcag

SEQ ID NO: 465528 - RNA, 32 nt, Human
ggggcagugguugugucuggggccaaguuucu

SEQ ID NO: 465529 - RNA, 32 nt, Human
ggggcaguuaacccuucucuugcugcggcaga

SEQ ID NO: 465530 - RNA, 32 nt, Human
ggggcaguuccucuuuccuucccaagcaccga

SEQ ID NO: 465531 - RNA, 23 nt, Human
ggggcauaagaguuuccaggugg

SEQ ID NO: 465532 - RNA, 20 nt, Human
ggggcauagcaugggggcag

SEQ ID NO: 465533 - RNA, 32 nt, Human
ggggcaucacccaggugaaugguguccaggug

SEQ ID NO: 465534 - RNA, 22 nt, Human
ggggcaucagcagagggggcag

SEQ ID NO: 465535 - RNA, 20 nt, Human
ggggcaucaggaaagggcag

SEQ ID NO: 465536 - RNA, 20 nt, Human
ggggcaucccagagggggca

SEQ ID NO: 465537 - RNA, 32 nt, Human
ggggcaucucuccccugcuccagcgcaucucc

SEQ ID NO: 465538 - RNA, 32 nt, Human
ggggcaucugugugucccgucacacacugcag

SEQ ID NO: 465539 - RNA, 19 nt, Human
ggggcaugaaagagggcag

SEQ ID NO: 465540 - RNA, 22 nt, Human
ggggcaugaaagagggcaguga

SEQ ID NO: 465541 - RNA, 21 nt, Human
ggggcaugagacacacaggga

SEQ ID NO: 465542 - RNA, 32 nt, Human
ggggcaugagacacacagggaggcuggggcug

SEQ ID NO: 465543 - RNA, 21 nt, Human
ggggcaugagccccuggguga

SEQ ID NO: 465544 - RNA, 32 nt, Human
ggggcaugcaggugcccaccucccaggguagg

SEQ ID NO: 465545 - RNA, 30 nt, Human
ggggcaugcccaggcagagugacaggagag

SEQ ID NO: 465546 - RNA, 25 nt, Human
ggggcaugcccggccaucaggguga

SEQ ID NO: 465547 - RNA, 32 nt, Human
ggggcaugccuauaaucccaauacuuuaggag

SEQ ID NO: 465548 - RNA, 32 nt, Human
  misc_feature (23)..(23): n is a, c, g, or u
  misc_feature (31)..(31): n is a, c, g, or u
ggggcaugccuguaaucccagcnacucgccng

SEQ ID NO: 465549 - RNA, 32 nt, Human
ggggcaugccuguagucccaccuacuugggag

SEQ ID NO: 465550 - RNA, 32 nt, Human
ggggcaugccuguagucccacuuacuugggag

SEQ ID NO: 465551 - RNA, 32 nt, Human
ggggcaugccuguagucccagcuacucagaag

SEQ ID NO: 465552 - RNA, 23 nt, Human
ggggcauggaagugccagggugg

SEQ ID NO: 465553 - RNA, 32 nt, Human
ggggcaugggaaggugggcgggcaggggaggg

SEQ ID NO: 465554 - RNA, 23 nt, Human
ggggcauggguggcuccaggaga

SEQ ID NO: 465555 - RNA, 32 nt, Human
ggggcauguggacagcagggaccugcgcuacc

SEQ ID NO: 465556 - RNA, 32 nt, Human
ggggcaugugguuccagagaaagagaggauac

SEQ ID NO: 465557 - RNA, 32 nt, Human
ggggcauguugggagagggggagggaggggag

SEQ ID NO: 465558 - RNA, 32 nt, Human
ggggcauuucuagagcagugacccuggaaaac

SEQ ID NO: 465559 - RNA, 32 nt, Human
ggggcauuuucaaauucugccuaccacaggca

SEQ ID NO: 465560 - RNA, 32 nt, Human
ggggcauuuugugccugccuagcuauccagac

SEQ ID NO: 465561 - RNA, 32 nt, Human
ggggcauuuuguggguggagggccagagugug

SEQ ID NO: 465562 - RNA, 32 nt, Human
ggggccaaaagcuucuccugaucuaccgugga

SEQ ID NO: 465563 - RNA, 28 nt, Human
ggggccaaacauuuacaccuugcuucau

SEQ ID NO: 465564 - RNA, 22 nt, Human
ggggccaaaguuuuuauguggg

SEQ ID NO: 465565 - RNA, 32 nt, Human
ggggccaaccagcuacuggagcucuuugaccu

SEQ ID NO: 465566 - RNA, 32 nt, Human
ggggccaacgcuaguauggaggcugcaauaga

SEQ ID NO: 465567 - RNA, 32 nt, Human
ggggccaaggaugccaccccacccucagcugu

SEQ ID NO: 465568 - RNA, 32 nt, Human
ggggccaaggcaaaggggaagcauucacagac

SEQ ID NO: 465569 - RNA, 32 nt, Human
ggggccaaggcagaggaggaggacgacauccu

SEQ ID NO: 465570 - RNA, 32 nt, Human
ggggccaaggggauggacaggagaagucaugc

SEQ ID NO: 465571 - RNA, 32 nt, Human
ggggccaagucagugcuuccaaaggagggugc

SEQ ID NO: 465572 - RNA, 32 nt, Human
ggggccaaugggggccucagggggaggccccc

SEQ ID NO: 465573 - RNA, 32 nt, Human
ggggccacacggggcuucuaaguuagguugcc

SEQ ID NO: 465574 - RNA, 32 nt, Human
ggggccacagccacagccugcuggucucgaac

SEQ ID NO: 465575 - RNA, 32 nt, Human
ggggccacagccggcacaggcgcaggggcagu

SEQ ID NO: 465576 - RNA, 32 nt, Human
ggggccacagccggucucagcuuucuguguuc

SEQ ID NO: 465577 - RNA, 19 nt, Human
ggggccacagccugggugg

SEQ ID NO: 465578 - RNA, 22 nt, Human
ggggccacaguugcugcuucau

SEQ ID NO: 465579 - RNA, 23 nt, Human
ggggccacauucuuugccuucau

SEQ ID NO: 465580 - RNA, 19 nt, Human
ggggccaccagagcccccu

SEQ ID NO: 465581 - RNA, 32 nt, Human
ggggccacccuccagccuggggcaucugaugg

SEQ ID NO: 465582 - RNA, 22 nt, Human
ggggccacccuggagacuugga

SEQ ID NO: 465583 - RNA, 22 nt, Human
ggggccaccgcccaggccagcu

SEQ ID NO: 465584 - RNA, 32 nt, Human
ggggccaccgggcgggaguggggaaggguggg

SEQ ID NO: 465585 - RNA, 32 nt, Human
ggggccaccucacccucuuguuacagcagauc

SEQ ID NO: 465586 - RNA, 23 nt, Human
ggggccaccucacguucugcuuc

SEQ ID NO: 465587 - RNA, 24 nt, Human
ggggccaccuuugugcagcuucga

SEQ ID NO: 465588 - RNA, 21 nt, Human
ggggccacggguccagcccag

SEQ ID NO: 465589 - RNA, 22 nt, Human
ggggccacguggcagcgcccga

SEQ ID NO: 465590 - RNA, 32 nt, Human
ggggccacugauuuucaaagagaucugugauc

SEQ ID NO: 465591 - RNA, 32 nt, Human
ggggccacugcacugcagccugugugacaaag

SEQ ID NO: 465592 - RNA, 32 nt, Human
ggggccacugccuccagcugugucuagugcug

SEQ ID NO: 465593 - RNA, 32 nt, Human
ggggccacuguggccuaccugcugauuuucag

SEQ ID NO: 465594 - RNA, 24 nt, Human
ggggccacuuggaccaagcuccag

SEQ ID NO: 465595 - RNA, 18 nt, Human
ggggccagaacccaagag

SEQ ID NO: 465596 - RNA, 18 nt, Human
ggggccagaaccgaggag

SEQ ID NO: 465597 - RNA, 32 nt, Human
ggggccagaacuccagcccuggggagugggca

SEQ ID NO: 465598 - RNA, 32 nt, Human
ggggccagaaggacccuccccaacccuggaga

SEQ ID NO: 465599 - RNA, 32 nt, Human
ggggccagaccaccccauuguccauccuuguu

SEQ ID NO: 465600 - RNA, 32 nt, Human
ggggccagacuccagccuguuuccccagcccu

SEQ ID NO: 465601 - RNA, 32 nt, Human
ggggccagacuggcacaaggcacucgugccca

SEQ ID NO: 465602 - RNA, 22 nt, Human
ggggccagaggcaaggccggcu

SEQ ID NO: 465603 - RNA, 32 nt, Human
ggggccagaguguuggcuuuggauucaggagg

SEQ ID NO: 465604 - RNA, 32 nt, Human
ggggccagcacccacacugggucuccacagcg

SEQ ID NO: 465605 - RNA, 19 nt, Human
ggggccagcacccccgcug

SEQ ID NO: 465606 - RNA, 17 nt, Human
ggggccagcagccgccc

SEQ ID NO: 465607 - RNA, 32 nt, Human
ggggccagcagcugucauccuccugggaagcc

SEQ ID NO: 465608 - RNA, 32 nt, Human
ggggccagccugggaccagcagaguggaaaag

SEQ ID NO: 465609 - RNA, 32 nt, Human
ggggccagcgggcaccaggcuugggggcugag

SEQ ID NO: 465610 - RNA, 32 nt, Human
ggggccagcuacccuucuggccuuuuagcguc

SEQ ID NO: 465611 - RNA, 17 nt, Human
ggggccagcucagugga

SEQ ID NO: 465612 - RNA, 23 nt, Human
ggggccagcucaguggagcagcu

SEQ ID NO: 465613 - RNA, 32 nt, Human
ggggccagcucccuccuggggacccggagccg

SEQ ID NO: 465614 - RNA, 32 nt, Human
ggggccagcugcugccccagaguccugccccc

SEQ ID NO: 465615 - RNA, 32 nt, Human
ggggccagcugcugugugaguacagcaucuuc

SEQ ID NO: 465616 - RNA, 32 nt, Human
ggggccaggaagaggauccuucagcgaccugc

SEQ ID NO: 465617 - RNA, 32 nt, Human
ggggccaggaaggggaaguaggagagcuuugg

SEQ ID NO: 465618 - RNA, 32 nt, Human
ggggccaggaaggggacaggauugucugcugc

SEQ ID NO: 465619 - RNA, 22 nt, Human
ggggccaggacacagcucagcu

SEQ ID NO: 465620 - RNA, 21 nt, Human
ggggccaggacaggaccaguu

SEQ ID NO: 465621 - RNA, 31 nt, Human
ggggccaggacagugccucagagcugcuccg

SEQ ID NO: 465622 - RNA, 21 nt, Human
ggggccaggagcucucuugga

SEQ ID NO: 465623 - RNA, 32 nt, Human
ggggccaggagcugccccaaguccuuuccaca

SEQ ID NO: 465624 - RNA, 24 nt, Human
ggggccaggagggcaggaccgucu

SEQ ID NO: 465625 - RNA, 32 nt, Human
ggggccaggagggucagaguggugccaggugc

SEQ ID NO: 465626 - RNA, 32 nt, Human
ggggccaggcacugugcuaggcaccagcaggg

SEQ ID NO: 465627 - RNA, 32 nt, Human
ggggccaggcagcugagggccaggaaagaugu

SEQ ID NO: 465628 - RNA, 22 nt, Human
ggggccaggcagggaggccagu

SEQ ID NO: 465629 - RNA, 21 nt, Human
ggggccaggccacccugcggg

SEQ ID NO: 465630 - RNA, 25 nt, Human
ggggccaggccaggccaggccagcu

SEQ ID NO: 465631 - RNA, 32 nt, Human
ggggccaggccaggccagugccuucgccucuc

SEQ ID NO: 465632 - RNA, 23 nt, Human
ggggccaggcccggggccggcag

SEQ ID NO: 465633 - RNA, 32 nt, Human
ggggccaggccgcggcugcggcccaggcaacg

SEQ ID NO: 465634 - RNA, 32 nt, Human
ggggccaggccugcaucaggggcuaggcucug

SEQ ID NO: 465635 - RNA, 18 nt, Human
ggggccaggccugcucca

SEQ ID NO: 465636 - RNA, 23 nt, Human
ggggccaggccuucgaucaccca

SEQ ID NO: 465637 - RNA, 32 nt, Human
ggggccaggcuccacucccaaaugagacuggc

SEQ ID NO: 465638 - RNA, 23 nt, Human
ggggccaggcugccaaggcggcu

SEQ ID NO: 465639 - RNA, 32 nt, Human
ggggccaggcugggagcccacagccaccccac

SEQ ID NO: 465640 - RNA, 25 nt, Human
ggggccagggagcagcaagccagcu

SEQ ID NO: 465641 - RNA, 20 nt, Human
ggggccagggcacagccggc

SEQ ID NO: 465642 - RNA, 20 nt, Human
ggggccagggcaggaccagc

SEQ ID NO: 465643 - RNA, 32 nt, Human
ggggccagggcaggcaccagccccaggcggcc

SEQ ID NO: 465644 - RNA, 32 nt, Human
ggggccagggcccagacccaagaggagagggu

SEQ ID NO: 465645 - RNA, 20 nt, Human
ggggccagggcccaggccag

SEQ ID NO: 465646 - RNA, 20 nt, Human
ggggccagggcugagccggc

SEQ ID NO: 465647 - RNA, 32 nt, Human
ggggccagggcugcugccauccuggccuggug

SEQ ID NO: 465648 - RNA, 32 nt, Human
ggggccaggggaggggcgggcagguaggugca

SEQ ID NO: 465649 - RNA, 32 nt, Human
ggggccagggguagcugagcuuaaaggcccug

SEQ ID NO: 465650 - RNA, 22 nt, Human
ggggccagggguucugggcagc

SEQ ID NO: 465651 - RNA, 19 nt, Human
ggggccaggguggcucuuc

SEQ ID NO: 465652 - RNA, 32 nt, Human
ggggccaggugggaacaguguguccucugccc

SEQ ID NO: 465653 - RNA, 26 nt, Human
ggggccagugagggcugggcccacag

SEQ ID NO: 465654 - RNA, 32 nt, Human
ggggccaguggggccagcucagggaggaccug

SEQ ID NO: 465655 - RNA, 32 nt, Human
ggggccauauaguuugguuaugacaucaauau

SEQ ID NO: 465656 - RNA, 23 nt, Human
ggggccauauguucaccugcuuu

SEQ ID NO: 465657 - RNA, 32 nt, Human
ggggccaucugggcagagacuuguggaauccc

SEQ ID NO: 465658 - RNA, 19 nt, Human
ggggccaugcagcccuccu

SEQ ID NO: 465659 - RNA, 32 nt, Human
ggggccaugccuugguggggccugugucgggc

SEQ ID NO: 465660 - RNA, 32 nt, Human
ggggccauggugcacuguagguggcugcaaug

SEQ ID NO: 465661 - RNA, 32 nt, Human
ggggccaugguggagggcacuucagguccgug

SEQ ID NO: 465662 - RNA, 24 nt, Human
ggggccauguauacgcugccucgc

SEQ ID NO: 465663 - RNA, 32 nt, Human
ggggccauuagggagagcagagcgaggcagcu

SEQ ID NO: 465664 - RNA, 32 nt, Human
ggggccauucuuauucaguucuuucuguagcu

SEQ ID NO: 465665 - RNA, 32 nt, Human
ggggcccaacacgugguaggcacuccaucagu

SEQ ID NO: 465666 - RNA, 24 nt, Human
ggggcccaacccugcccacuucag

SEQ ID NO: 465667 - RNA, 32 nt, Human
ggggcccaagagucuggggaccagcuuggcuc

SEQ ID NO: 465668 - RNA, 32 nt, Human
ggggcccacagcccuggcugcaggcaucauga

SEQ ID NO: 465669 - RNA, 21 nt, Human
ggggcccaccaccgcgcccgg

SEQ ID NO: 465670 - RNA, 23 nt, Human
ggggcccacccugcccagcucag

SEQ ID NO: 465671 - RNA, 32 nt, Human
ggggcccacgucucccagaggucuccgagucg

SEQ ID NO: 465672 - RNA, 22 nt, Human
ggggcccagaacuucauaucag

SEQ ID NO: 465673 - RNA, 32 nt, Human
ggggcccagacuccugcggccucaccagggcu

SEQ ID NO: 465674 - RNA, 23 nt, Human
ggggcccagacugcaguggcuca

SEQ ID NO: 465675 - RNA, 24 nt, Human
ggggcccagagcaaagggcaucag

SEQ ID NO: 465676 - RNA, 24 nt, Human
ggggcccagagcccccugcuccag

SEQ ID NO: 465677 - RNA, 32 nt, Human
ggggcccagaguuugccuuuucugccaggcag

SEQ ID NO: 465678 - RNA, 32 nt, Human
ggggcccagcauggucauggcggauggcccga

SEQ ID NO: 465679 - RNA, 32 nt, Human
ggggcccagccccuucucuucucccccgccaa

SEQ ID NO: 465680 - RNA, 32 nt, Human
ggggcccagcucccaguuuacuugguuucccu

SEQ ID NO: 465681 - RNA, 32 nt, Human
ggggcccagcugguucugauucgguggccaga

SEQ ID NO: 465682 - RNA, 22 nt, Human
ggggcccaggaaggccugggca

SEQ ID NO: 465683 - RNA, 32 nt, Human
ggggcccaggaggcagguguaagggagugaaa

SEQ ID NO: 465684 - RNA, 32 nt, Human
ggggcccaggcagaaugcgagaacaccacgug

SEQ ID NO: 465685 - RNA, 32 nt, Human
ggggcccaggccaagguggggugcaggaggaa

SEQ ID NO: 465686 - RNA, 23 nt, Human
ggggcccaggccgcagggggccc

SEQ ID NO: 465687 - RNA, 32 nt, Human
ggggcccagggaggggcaggccgggcggccga

SEQ ID NO: 465688 - RNA, 32 nt, Human
ggggcccagggaggggcaggugugaaguugcu

SEQ ID NO: 465689 - RNA, 22 nt, Human
ggggcccaggggucaggcccag

SEQ ID NO: 465690 - RNA, 22 nt, Human
ggggcccagucagccgcuccag

SEQ ID NO: 465691 - RNA, 32 nt, Human
ggggcccauguggcccaucacacagaagauuc

SEQ ID NO: 465692 - RNA, 32 nt, Human
ggggcccauucagccucgucucuuuacagaag

SEQ ID NO: 465693 - RNA, 32 nt, Human
ggggccccacagaguccuugugcucaguguag

SEQ ID NO: 465694 - RNA, 32 nt, Human
ggggccccacugcaccugcuggcaggaaauaa

SEQ ID NO: 465695 - RNA, 32 nt, Human
ggggccccaggcagggcaggaggugguggaaa

SEQ ID NO: 465696 - RNA, 16 nt, Human
ggggccccccaagagg

SEQ ID NO: 465697 - RNA, 32 nt, Human
ggggcccccucaccuugucccuccucagccag

SEQ ID NO: 465698 - RNA, 32 nt, Human
ggggcccccuccuccaucccugacuggcugag

SEQ ID NO: 465699 - RNA, 32 nt, Human
ggggcccccugccagccccuucccaggcuggg

SEQ ID NO: 465700 - RNA, 23 nt, Human
ggggccccgaacgguggggccgg

SEQ ID NO: 465701 - RNA, 32 nt, Human
ggggccccgagucugcaugggucuccacaugc

SEQ ID NO: 465702 - RNA, 22 nt, Human
ggggccccucaccccaaggggu

SEQ ID NO: 465703 - RNA, 32 nt, Human
ggggccccugcggccucuggccccagacugaa

SEQ ID NO: 465704 - RNA, 32 nt, Human
ggggccccuuuguaaacaagcuucugccaggu

SEQ ID NO: 465705 - RNA, 32 nt, Human
ggggcccgaagcaucuucccuuccgcuuggcg

SEQ ID NO: 465706 - RNA, 19 nt, Human
ggggcccgaggcccgggcc

SEQ ID NO: 465707 - RNA, 18 nt, Human
ggggcccggaugggaggg

SEQ ID NO: 465708 - RNA, 18 nt, Human
ggggcccggccaagaagg

SEQ ID NO: 465709 - RNA, 32 nt, Human
ggggcccgggacuccucgcaaaugugggacac

SEQ ID NO: 465710 - RNA, 32 nt, Human
ggggcccgggcccagccgccgccaccgcugcc

SEQ ID NO: 465711 - RNA, 32 nt, Human
ggggcccggggucggggcuggggaaggggagc

SEQ ID NO: 465712 - RNA, 32 nt, Human
ggggcccgguccugccugucagcuccaggucc

SEQ ID NO: 465713 - RNA, 18 nt, Human
ggggcccguagggcccuc

SEQ ID NO: 465714 - RNA, 32 nt, Human
ggggcccgugagccacucuuagcggccggggc

SEQ ID NO: 465715 - RNA, 32 nt, Human
ggggcccucaggcugggcgcgcuggcgauccc

SEQ ID NO: 465716 - RNA, 32 nt, Human
ggggcccucaucugcuuucccgccacccuauc

SEQ ID NO: 465717 - RNA, 32 nt, Human
ggggcccuccacugcccagagaccugcagggc

SEQ ID NO: 465718 - RNA, 32 nt, Human
ggggcccuccuagcccagggcugccagcugag

SEQ ID NO: 465719 - RNA, 21 nt, Human
ggggcccuccugcucuccaca

SEQ ID NO: 465720 - RNA, 32 nt, Human
ggggcccucuuggaggcagcagugaguuggga

SEQ ID NO: 465721 - RNA, 32 nt, Human
ggggcccugagugcccagccauccuuguucgu

SEQ ID NO: 465722 - RNA, 32 nt, Human
ggggcccugcacaccauggcccccgggugggc

SEQ ID NO: 465723 - RNA, 18 nt, Human
ggggcccugcagcuccag

SEQ ID NO: 465724 - RNA, 32 nt, Human
ggggcccugcagcucucaugcugccccugccu

SEQ ID NO: 465725 - RNA, 32 nt, Human
ggggcccugccaacaccacuuccucagcagaa

SEQ ID NO: 465726 - RNA, 23 nt, Human
ggggcccugcuccaagccugcag

SEQ ID NO: 465727 - RNA, 32 nt, Human
ggggcccugcuggccugcuccuucucucgaaa

SEQ ID NO: 465728 - RNA, 32 nt, Human
ggggcccuggcuuuccagggagugcagcaagc

SEQ ID NO: 465729 - RNA, 32 nt, Human
ggggcccugggcugcaggagguugcggcggcc

SEQ ID NO: 465730 - RNA, 32 nt, Human
ggggcccuguggggucuggcccccaggagcaa

SEQ ID NO: 465731 - RNA, 32 nt, Human
ggggcccuguucugggggaccagcacugucag

SEQ ID NO: 465732 - RNA, 32 nt, Human
ggggcccuugguucccccucauuggaggcuga

SEQ ID NO: 465733 - RNA, 32 nt, Human
ggggcccuuguccugggccauggcccagaagg

SEQ ID NO: 465734 - RNA, 32 nt, Human
ggggcccuuugguggggccguuggacuucugg

SEQ ID NO: 465735 - RNA, 32 nt, Human
ggggccgaagccccaagcugggcacaaaguag

SEQ ID NO: 465736 - RNA, 32 nt, Human
ggggccgagacagguggaucaccugaggucag

SEQ ID NO: 465737 - RNA, 18 nt, Human
ggggccgagcagggggca

SEQ ID NO: 465738 - RNA, 32 nt, Human
ggggccgagccugggaaugggggugaguggag

SEQ ID NO: 465739 - RNA, 22 nt, Human
ggggccgagcguccgagccacu

SEQ ID NO: 465740 - RNA, 32 nt, Human
ggggccgaggagagagcggccgccacccggcc

SEQ ID NO: 465741 - RNA, 32 nt, Human
ggggccgaggcggguggaucaccugaggucag

SEQ ID NO: 465742 - RNA, 32 nt, Human
ggggccgagguggcagggggcuggcaugucaa

SEQ ID NO: 465743 - RNA, 20 nt, Human
ggggccgaguucagcuccgg

SEQ ID NO: 465744 - RNA, 21 nt, Human
ggggccgaguucagcuccgga

SEQ ID NO: 465745 - RNA, 20 nt, Human
ggggccgcagaggggacauu

SEQ ID NO: 465746 - RNA, 32 nt, Human
ggggccgcaggcggacguacucugugagcggc

SEQ ID NO: 465747 - RNA, 32 nt, Human
ggggccgcagggccaaggggugcuugcgccac

SEQ ID NO: 465748 - RNA, 32 nt, Human
ggggccgcaggggcuggccacugugggcucgg

SEQ ID NO: 465749 - RNA, 32 nt, Human
ggggccgccacccuccccuaugcugguagaug

SEQ ID NO: 465750 - RNA, 32 nt, Human
ggggccgccccaggguuccugcgcacugccug

SEQ ID NO: 465751 - RNA, 22 nt, Human
ggggccgccugugcagaugcca

SEQ ID NO: 465752 - RNA, 32 nt, Human
ggggccgcgcucucuucugggagggcagcggc

SEQ ID NO: 465753 - RNA, 32 nt, Human
ggggccgcgcugcuuagccacugggaccccac

SEQ ID NO: 465754 - RNA, 20 nt, Human
ggggccgcggccggaccggc

SEQ ID NO: 465755 - RNA, 32 nt, Human
ggggccgcugggagccgggugagacccccaca

SEQ ID NO: 465756 - RNA, 32 nt, Human
ggggccgcuugggggagggaagaggcagcccg

SEQ ID NO: 465757 - RNA, 32 nt, Human
ggggccggaacacaaccagucuuuuuguauuu

SEQ ID NO: 465758 - RNA, 21 nt, Human
ggggccggaaguggccugcgg

SEQ ID NO: 465759 - RNA, 20 nt, Human
ggggccggacgccaccuucc

SEQ ID NO: 465760 - RNA, 24 nt, Human
ggggccggagaagcagaaccagcu

SEQ ID NO: 465761 - RNA, 32 nt, Human
ggggccggaggcggggugugagugggugugug

SEQ ID NO: 465762 - RNA, 24 nt, Human
ggggccggcaagccagcgaagcuu

SEQ ID NO: 465763 - RNA, 32 nt, Human
ggggccggcaggggguuggggaagaagagggc

SEQ ID NO: 465764 - RNA, 23 nt, Human
ggggccggcccgcacgggcuuca

SEQ ID NO: 465765 - RNA, 19 nt, Human
ggggccggcgaggccgcag

SEQ ID NO: 465766 - RNA, 21 nt, Human
ggggccggcgcccagaguucc

SEQ ID NO: 465767 - RNA, 32 nt, Human
ggggccggcuucuccccucuugugaagcacaa

SEQ ID NO: 465768 - RNA, 32 nt, Human
ggggccgggaaagaggcacaaggaagaaagua

SEQ ID NO: 465769 - RNA, 32 nt, Human
ggggccgggagaccccagcaaaggguagcgag

SEQ ID NO: 465770 - RNA, 23 nt, Human
ggggccgggagcgaggggcagcu

SEQ ID NO: 465771 - RNA, 20 nt, Human
ggggccgggagcguccgcag

SEQ ID NO: 465772 - RNA, 32 nt, Human
ggggccgggaggcgugggggagccgggcccuc

SEQ ID NO: 465773 - RNA, 26 nt, Human
ggggccgggccagagacgggggccgg

SEQ ID NO: 465774 - RNA, 25 nt, Human
ggggccgggcccggggcccgggcuu

SEQ ID NO: 465775 - RNA, 20 nt, Human
ggggccgggccggagccggc

SEQ ID NO: 465776 - RNA, 22 nt, Human
ggggccgggccggggccgcgcu

SEQ ID NO: 465777 - RNA, 17 nt, Human
ggggccgggcgcccccu

SEQ ID NO: 465778 - RNA, 32 nt, Human
ggggccgggcgguguaaacagccccggaggcg

SEQ ID NO: 465779 - RNA, 19 nt, Human
ggggccgggcucucuccag

SEQ ID NO: 465780 - RNA, 32 nt, Human
ggggccggggaaguuugcgccgccgcgaccag

SEQ ID NO: 465781 - RNA, 25 nt, Human
ggggccggggagugaggggccggcu

SEQ ID NO: 465782 - RNA, 32 nt, Human
ggggccggggcaggccaggguuuguuugugga

SEQ ID NO: 465783 - RNA, 24 nt, Human
ggggccggggcauucagcucagcu

SEQ ID NO: 465784 - RNA, 32 nt, Human
ggggccggggccaagaccgcggaguucgcgga

SEQ ID NO: 465785 - RNA, 21 nt, Human
ggggccggggccggggccggc

SEQ ID NO: 465786 - RNA, 32 nt, Human
ggggccggggcugaggccgcggccgggucugc

SEQ ID NO: 465787 - RNA, 22 nt, Human
ggggccgggguccugcccggcu

SEQ ID NO: 465788 - RNA, 32 nt, Human
ggggccgguaacgagagcagucgcggcaccug

SEQ ID NO: 465789 - RNA, 22 nt, Human
ggggccgguggaagccgcgcag

SEQ ID NO: 465790 - RNA, 32 nt, Human
ggggccgucaucuccccucugccuccugcuuu

SEQ ID NO: 465791 - RNA, 32 nt, Human
ggggccgucuaauuuauuacugcccagcauuc

SEQ ID NO: 465792 - RNA, 22 nt, Human
ggggccguggccggggccagcu

SEQ ID NO: 465793 - RNA, 22 nt, Human
ggggccguggcugaagccggcu

SEQ ID NO: 465794 - RNA, 32 nt, Human
ggggccguguggccagcagcagcaucugccuu

SEQ ID NO: 465795 - RNA, 32 nt, Human
ggggccguugcguuuggcuuuguggagggccu

SEQ ID NO: 465796 - RNA, 32 nt, Human
ggggccuaaggagggucuccacacugcugcua

SEQ ID NO: 465797 - RNA, 32 nt, Human
ggggccuagauccacacacagaggaagagcag

SEQ ID NO: 465798 - RNA, 18 nt, Human
ggggccuagccugugugg

SEQ ID NO: 465799 - RNA, 32 nt, Human
ggggccuagcggagggcaucgaaggccuccgc

SEQ ID NO: 465800 - RNA, 32 nt, Human
ggggccuagugccacccuccucccuccaagcc

SEQ ID NO: 465801 - RNA, 32 nt, Human
ggggccucaauccagucuugauaacagcgagg

SEQ ID NO: 465802 - RNA, 32 nt, Human
ggggccucacauccaucuccuucccagcucuc

SEQ ID NO: 465803 - RNA, 32 nt, Human
ggggccucacccagaaggaacccggucccagg

SEQ ID NO: 465804 - RNA, 32 nt, Human
ggggccucaccccucuggagggccggaggcag

SEQ ID NO: 465805 - RNA, 21 nt, Human
ggggccucagcagaggaagca

SEQ ID NO: 465806 - RNA, 32 nt, Human
ggggccucagcagaggaagcacgggcagcagc

SEQ ID NO: 465807 - RNA, 32 nt, Human
ggggccucagcaggugcccaagcugcuacaac

SEQ ID NO: 465808 - RNA, 32 nt, Human
ggggccucagccccaggaggucccuucucugu

SEQ ID NO: 465809 - RNA, 32 nt, Human
ggggccucagcccuugggaggggacaccugag

SEQ ID NO: 465810 - RNA, 32 nt, Human
ggggccucaguucucgcccucuugccgucgcc

SEQ ID NO: 465811 - RNA, 32 nt, Human
ggggccucauacaacccuucaucugcacucaa

SEQ ID NO: 465812 - RNA, 32 nt, Human
ggggccucauggugaaauuugugcccuuguaa

SEQ ID NO: 465813 - RNA, 32 nt, Human
ggggccuccagccugggacugcugugaugggg

SEQ ID NO: 465814 - RNA, 16 nt, Human
ggggccuccaggugca

SEQ ID NO: 465815 - RNA, 28 nt, Human
ggggccuccagugcugccccuccucccu

SEQ ID NO: 465816 - RNA, 32 nt, Human
ggggccucccacccucaucuagcucuguucag

SEQ ID NO: 465817 - RNA, 20 nt, Human
ggggccuccccucccugcua

SEQ ID NO: 465818 - RNA, 18 nt, Human
ggggccuccugcgcccuc

SEQ ID NO: 465819 - RNA, 32 nt, Human
ggggccuccuguuccuccucuagcugggagua

SEQ ID NO: 465820 - RNA, 32 nt, Human
ggggccucuagggugauggaccagccccguua

SEQ ID NO: 465821 - RNA, 32 nt, Human
ggggccucucuagcuugcggccugugucuaug

SEQ ID NO: 465822 - RNA, 32 nt, Human
ggggccucucucccucucccuguccccacccc

SEQ ID NO: 465823 - RNA, 32 nt, Human
ggggccucucucugagaucggguccuccuccu

SEQ ID NO: 465824 - RNA, 32 nt, Human
ggggccucugagcugcucagcugggucuccug

SEQ ID NO: 465825 - RNA, 32 nt, Human
ggggccucuggcucgguguguggagaaaagag

SEQ ID NO: 465826 - RNA, 32 nt, Human
ggggccucuguccucacgguccugggccugcc

SEQ ID NO: 465827 - RNA, 32 nt, Human
ggggccucuucaaccaccggcaccccuugccc

SEQ ID NO: 465828 - RNA, 32 nt, Human
ggggccucuuccccgcaggcucuggcuggccg

SEQ ID NO: 465829 - RNA, 32 nt, Human
ggggccucuuucugugcuucucuuugucccca

SEQ ID NO: 465830 - RNA, 32 nt, Human
ggggccucuuugaaucagaagcccuuuguaua

SEQ ID NO: 465831 - RNA, 23 nt, Human
ggggccugagaauucacauuucc

SEQ ID NO: 465832 - RNA, 32 nt, Human
ggggccugaggagagaggggaaggguacagag

SEQ ID NO: 465833 - RNA, 32 nt, Human
ggggccugaggcacgagaaucgcuugaauucg

SEQ ID NO: 465834 - RNA, 24 nt, Human
ggggccugaggcggagaccggaga

SEQ ID NO: 465835 - RNA, 32 nt, Human
ggggccugcaacagcaaaucaccagcuuucuc

SEQ ID NO: 465836 - RNA, 32 nt, Human
ggggccugccaaggcaggaagcggaggacugu

SEQ ID NO: 465837 - RNA, 18 nt, Human
ggggccugccacacacuc

SEQ ID NO: 465838 - RNA, 32 nt, Human
ggggccugcuucuuaucugacacagcagcuau

SEQ ID NO: 465839 - RNA, 32 nt, Human
ggggccuggccaccccuuuccccacuccacga

SEQ ID NO: 465840 - RNA, 32 nt, Human
ggggccuggccacugggugccacccagccugu

SEQ ID NO: 465841 - RNA, 21 nt, Human
ggggccuggcggcaggggcgg

SEQ ID NO: 465842 - RNA, 32 nt, Human
ggggccuggcugaccccuccagcuucagccuc

SEQ ID NO: 465843 - RNA, 32 nt, Human
ggggccuggcuguggccuguuuuccuuugacc

SEQ ID NO: 465844 - RNA, 32 nt, Human
ggggccugggacauuccaucugagguccuucc

SEQ ID NO: 465845 - RNA, 32 nt, Human
ggggccugggagaugccaggaggaugagagcg

SEQ ID NO: 465846 - RNA, 32 nt, Human
ggggccugggcuguugugucuggagccugcag

SEQ ID NO: 465847 - RNA, 32 nt, Human
ggggccuggggccugggcuucgggcgcggcgu

SEQ ID NO: 465848 - RNA, 17 nt, Human
ggggccugggggccugc

SEQ ID NO: 465849 - RNA, 32 nt, Human
ggggccugggguuccuggacagaggaggacua

SEQ ID NO: 465850 - RNA, 21 nt, Human
ggggccuggucuccggguucu

SEQ ID NO: 465851 - RNA, 32 nt, Human
ggggccuguccacccucccaggccgacgucag

SEQ ID NO: 465852 - RNA, 32 nt, Human
ggggccugucugugccccuccugcccugcagg

SEQ ID NO: 465853 - RNA, 31 nt, Human
ggggccugugggagagaaaggcugugagaga

SEQ ID NO: 465854 - RNA, 32 nt, Human
ggggccuguucccagcacauuuuccuguaagc

SEQ ID NO: 465855 - RNA, 32 nt, Human
ggggccuuauucuguccuccaggcuggagugc

SEQ ID NO: 465856 - RNA, 32 nt, Human
ggggccuuccaagcacagccacggccaugggg

SEQ ID NO: 465857 - RNA, 32 nt, Human
ggggccuuccuaaccuuccaucauccucagcu

SEQ ID NO: 465858 - RNA, 32 nt, Human
ggggccuuccucucuucuccagccucucccuu

SEQ ID NO: 465859 - RNA, 32 nt, Human
ggggccuuccuugagaccuucccuuggggcug

SEQ ID NO: 465860 - RNA, 32 nt, Human
ggggccuucggcgagucuuuuuguuugguuuu

SEQ ID NO: 465861 - RNA, 32 nt, Human
ggggccuucggucucuccccagccucuuccuu

SEQ ID NO: 465862 - RNA, 32 nt, Human
ggggccuucgugggagcuggcagccacaagaa

SEQ ID NO: 465863 - RNA, 32 nt, Human
ggggccuugccacccuucccuguccacugcug

SEQ ID NO: 465864 - RNA, 32 nt, Human
ggggccuugcccucccccucccagcccagggu

SEQ ID NO: 465865 - RNA, 32 nt, Human
ggggccuuggagagacagaaacauggggguuu

SEQ ID NO: 465866 - RNA, 32 nt, Human
ggggccuuggaguugugacugccggggccgua

SEQ ID NO: 465867 - RNA, 21 nt, Human
ggggccuuguaccugcuucau

SEQ ID NO: 465868 - RNA, 32 nt, Human
ggggccuugugagcugcuucuaagaggcuaac

SEQ ID NO: 465869 - RNA, 32 nt, Human
ggggccuugugucugugccugccugucugaca

SEQ ID NO: 465870 - RNA, 32 nt, Human
ggggccuuucccucggacccauggccccaggc

SEQ ID NO: 465871 - RNA, 20 nt, Human
ggggcgaaaaggggggacag

SEQ ID NO: 465872 - RNA, 32 nt, Human
ggggcgaaggggucagcccugcccuucagcau

SEQ ID NO: 465873 - RNA, 32 nt, Human
ggggcgaaggugcuguaaacagguuugggcag

SEQ ID NO: 465874 - RNA, 32 nt, Human
ggggcgaaucucacggaccugaccucagaggu

SEQ ID NO: 465875 - RNA, 32 nt, Human
ggggcgacacagauuucugugaaugccagugc

SEQ ID NO: 465876 - RNA, 32 nt, Human
ggggcgacaucccggcggccgcgcugaggcca

SEQ ID NO: 465877 - RNA, 32 nt, Human
ggggcgacgacgagacggacagugauguccag

SEQ ID NO: 465878 - RNA, 18 nt, Human
ggggcgacgcgagggggc

SEQ ID NO: 465879 - RNA, 32 nt, Human
ggggcgagaguccuccgaguagucuggaaaau

SEQ ID NO: 465880 - RNA, 19 nt, Human
ggggcgagcggcggcgcgg

SEQ ID NO: 465881 - RNA, 32 nt, Human
ggggcgagcuccccucugucuggggcagggug

SEQ ID NO: 465882 - RNA, 32 nt, Human
ggggcgaggagguggaggaggaggaggaggag

SEQ ID NO: 465883 - RNA, 19 nt, Human
ggggcgaggcagaggacag

SEQ ID NO: 465884 - RNA, 32 nt, Human
ggggcgagggccaggucagguggcugcacugu

SEQ ID NO: 465885 - RNA, 32 nt, Human
ggggcgagggcugaggacucucuggcucuacc

SEQ ID NO: 465886 - RNA, 19 nt, Human
ggggcgaguuggcuauggc

SEQ ID NO: 465887 - RNA, 21 nt, Human
ggggcgauagaaggauggcag

SEQ ID NO: 465888 - RNA, 24 nt, Human
ggggcgaucgccagucacccauca

SEQ ID NO: 465889 - RNA, 32 nt, Human
ggggcgaugccaccccucauccuucacccagc

SEQ ID NO: 465890 - RNA, 32 nt, Human
ggggcgaugcuugugacccugcagcuccucaa

SEQ ID NO: 465891 - RNA, 32 nt, Human
ggggcgcagagggagcccggagcccggcgccc

SEQ ID NO: 465892 - RNA, 32 nt, Human
ggggcgcagcgcugaggucacccuggagguag

SEQ ID NO: 465893 - RNA, 32 nt, Human
ggggcgcaggagggagaaguugcuaagugcug

SEQ ID NO: 465894 - RNA, 21 nt, Human
ggggcgcaggggcgggugcgg

SEQ ID NO: 465895 - RNA, 32 nt, Human
ggggcgcaucccucgccacccgcggucgccca

SEQ ID NO: 465896 - RNA, 32 nt, Human
ggggcgccagccgcccaugccgccccggcgcc

SEQ ID NO: 465897 - RNA, 19 nt, Human
ggggcgccaguccgggcag

SEQ ID NO: 465898 - RNA, 21 nt, Human
ggggcgcccagcacugguuca

SEQ ID NO: 465899 - RNA, 32 nt, Human
ggggcgccccgacccguccccucugcccucca

SEQ ID NO: 465900 - RNA, 19 nt, Human
ggggcgccgagcgcugucg

SEQ ID NO: 465901 - RNA, 32 nt, Human
ggggcgccguccgcgagcggccuggacugucg

SEQ ID NO: 465902 - RNA, 32 nt, Human
ggggcgccugcagcucucccuggaguucgacu

SEQ ID NO: 465903 - RNA, 19 nt, Human
ggggcgcgaaggcggucgc

SEQ ID NO: 465904 - RNA, 32 nt, Human
ggggcgcgcuggggcuucgaccuggcugcacu

SEQ ID NO: 465905 - RNA, 32 nt, Human
ggggcgcggaggaggaggaucugggggaagag

SEQ ID NO: 465906 - RNA, 32 nt, Human
ggggcgcgggaacaugaggcuuggcuaggagc

SEQ ID NO: 465907 - RNA, 32 nt, Human
ggggcgcgggcggcccagcagagcuggccuga

SEQ ID NO: 465908 - RNA, 32 nt, Human
ggggcgcggggcggaggcugcgagggcgcgcg

SEQ ID NO: 465909 - RNA, 23 nt, Human
ggggcgcgggggccggaccauga

SEQ ID NO: 465910 - RNA, 32 nt, Human
ggggcgcguggaggaggaggaaaaggagggaa

SEQ ID NO: 465911 - RNA, 23 nt, Human
ggggcgcucagagaugggggcag

SEQ ID NO: 465912 - RNA, 32 nt, Human
ggggcgcucucccacacucacacuccuaggug

SEQ ID NO: 465913 - RNA, 32 nt, Human
ggggcgcugcggugccagccugaggcugggcu

SEQ ID NO: 465914 - RNA, 32 nt, Human
ggggcgcugggagcccguugggccgcgaacgc

SEQ ID NO: 465915 - RNA, 21 nt, Human
ggggcgcugggcaaggugcag

SEQ ID NO: 465916 - RNA, 32 nt, Human
ggggcgcugggcuggagagcagguucgggcag

SEQ ID NO: 465917 - RNA, 32 nt, Human
ggggcgcuggggcuggaggggcggggcgcgcg

SEQ ID NO: 465918 - RNA, 21 nt, Human
ggggcgcuguccugcguucag

SEQ ID NO: 465919 - RNA, 32 nt, Human
ggggcggaagaggaggaggaggaggaggaagg

SEQ ID NO: 465920 - RNA, 19 nt, Human
ggggcggaccgcggggcgg

SEQ ID NO: 465921 - RNA, 20 nt, Human
ggggcggacgcagagacaga

SEQ ID NO: 465922 - RNA, 19 nt, Human
ggggcggagaagggugcgg

SEQ ID NO: 465923 - RNA, 18 nt, Human
ggggcggagagagggggc

SEQ ID NO: 465924 - RNA, 31 nt, Human
ggggcggagagcgcgagaaggagggaggagg

SEQ ID NO: 465925 - RNA, 32 nt, Human
ggggcggaggcagcggcuguagcggggcugua

SEQ ID NO: 465926 - RNA, 19 nt, Human
ggggcggaggcggaggcag

SEQ ID NO: 465927 - RNA, 18 nt, Human
ggggcggaggcggggcgg

SEQ ID NO: 465928 - RNA, 32 nt, Human
ggggcggaggggaaggaagcccuggggagcag

SEQ ID NO: 465929 - RNA, 32 nt, Human
ggggcggagguugcaaugagccaaggucgcgc

SEQ ID NO: 465930 - RNA, 18 nt, Human
ggggcggaguugcccgcc

SEQ ID NO: 465931 - RNA, 32 nt, Human
ggggcggaguuucacucuuguugcccaggcug

SEQ ID NO: 465932 - RNA, 32 nt, Human
ggggcggaugcagccuaccuccugggcaguga

SEQ ID NO: 465933 - RNA, 32 nt, Human
ggggcggcaccccagcccugcccuugcuuccu

SEQ ID NO: 465934 - RNA, 32 nt, Human
ggggcggcagaggcaccagccgacccgucagu

SEQ ID NO: 465935 - RNA, 32 nt, Human
ggggcggcagcggugguagcagcugguaccuc

SEQ ID NO: 465936 - RNA, 32 nt, Human
ggggcggcagcugaggaagaaagacgcagugc

SEQ ID NO: 465937 - RNA, 32 nt, Human
ggggcggcaggcggcggcggcccggggcucga

SEQ ID NO: 465938 - RNA, 32 nt, Human
ggggcggccacuggucagaggcaggacagcag

SEQ ID NO: 465939 - RNA, 21 nt, Human
ggggcggccgccuccagguga

SEQ ID NO: 465940 - RNA, 19 nt, Human
ggggcggccgcggaggcgg

SEQ ID NO: 465941 - RNA, 32 nt, Human
ggggcggccggcggaggagcagcaggauccca

SEQ ID NO: 465942 - RNA, 32 nt, Human
ggggcggccuggcccgggaccugcugcugcuc

SEQ ID NO: 465943 - RNA, 32 nt, Human
ggggcggcgcgcaggagggaggagaacugggg

SEQ ID NO: 465944 - RNA, 22 nt, Human
ggggcggcggcgcgagcggcgg

SEQ ID NO: 465945 - RNA, 17 nt, Human
ggggcggcggcggggcg

SEQ ID NO: 465946 - RNA, 32 nt, Human
ggggcggcgggaggggcaggagacguuggccc

SEQ ID NO: 465947 - RNA, 32 nt, Human
ggggcggcuggcgcgcacuacacgcuugggaa

SEQ ID NO: 465948 - RNA, 32 nt, Human
ggggcggcuugcuguccagccugugugggggc

SEQ ID NO: 465949 - RNA, 32 nt, Human
ggggcgggacagggucucucuccgucucccag

SEQ ID NO: 465950 - RNA, 32 nt, Human
ggggcgggaccagacaguugcgcgcacagaag

SEQ ID NO: 465951 - RNA, 31 nt, Human
ggggcgggacuucuccgggucaaggccaggu

SEQ ID NO: 465952 - RNA, 32 nt, Human
ggggcgggagaaaguggccgcccggaggacgu

SEQ ID NO: 465953 - RNA, 32 nt, Human
ggggcgggagagacgguagagaagugagauga

SEQ ID NO: 465954 - RNA, 32 nt, Human
ggggcgggagagaggcaagggguggacggagc

SEQ ID NO: 465955 - RNA, 32 nt, Human
ggggcgggagcagcgcggagcccggcucggcc

SEQ ID NO: 465956 - RNA, 25 nt, Human
ggggcgggagcugaggcgggagcgg

SEQ ID NO: 465957 - RNA, 32 nt, Human
ggggcgggaggagcugcccgaggcucugggug

SEQ ID NO: 465958 - RNA, 21 nt, Human
ggggcgggaggcgcgcgcggg

SEQ ID NO: 465959 - RNA, 22 nt, Human
ggggcgggaggggacggggugg

SEQ ID NO: 465960 - RNA, 20 nt, Human
ggggcgggaugggggugugg

SEQ ID NO: 465961 - RNA, 32 nt, Human
ggggcgggcaggcagggguuagugaaaggaca

SEQ ID NO: 465962 - RNA, 32 nt, Human
ggggcgggcagggagaggcuggagccggugac

SEQ ID NO: 465963 - RNA, 22 nt, Human
ggggcgggcccggcgcgcgcgg

SEQ ID NO: 465964 - RNA, 32 nt, Human
ggggcgggccgccagccccagcaguuuacaga

SEQ ID NO: 465965 - RNA, 19 nt, Human
ggggcgggcgccgggcagg

SEQ ID NO: 465966 - RNA, 19 nt, Human
ggggcgggcgugggggcag

SEQ ID NO: 465967 - RNA, 32 nt, Human
ggggcggggaauggggcgcagugaggcuggga

SEQ ID NO: 465968 - RNA, 32 nt, Human
ggggcggggaggacggcgcccggggacagaga

SEQ ID NO: 465969 - RNA, 19 nt, Human
ggggcggggaugggggcag

SEQ ID NO: 465970 - RNA, 21 nt, Human
ggggcggggcaggcggcgcgg

SEQ ID NO: 465971 - RNA, 32 nt, Human
ggggcggggccagaacggcgccaaggccaacc

SEQ ID NO: 465972 - RNA, 32 nt, Human
ggggcggggcccggaagagcaggauggcggcg

SEQ ID NO: 465973 - RNA, 19 nt, Human
ggggcggggcccggagcgg

SEQ ID NO: 465974 - RNA, 32 nt, Human
ggggcggggcgcggggccagaggguggggcag

SEQ ID NO: 465975 - RNA, 22 nt, Human
ggggcggggcggcguggcgcgg

SEQ ID NO: 465976 - RNA, 19 nt, Human
ggggcggggcucggagcgg

SEQ ID NO: 465977 - RNA, 32 nt, Human
ggggcggggcugccugcggaaggggccgugcg

SEQ ID NO: 465978 - RNA, 19 nt, Human
ggggcgggggacggguggg

SEQ ID NO: 465979 - RNA, 32 nt, Human
ggggcgggggcacggccuggcauuucacgcau

SEQ ID NO: 465980 - RNA, 20 nt, Human
ggggcgggggcccggggcgg

SEQ ID NO: 465981 - RNA, 19 nt, Human
ggggcgggggccggcgcgg

SEQ ID NO: 465982 - RNA, 32 nt, Human
ggggcgggggcggggcggcagugagcucggcc

SEQ ID NO: 465983 - RNA, 20 nt, Human
ggggcggggggcuggugcgg

SEQ ID NO: 465984 - RNA, 32 nt, Human
ggggcggggucaaacacuguugcccaggcugg

SEQ ID NO: 465985 - RNA, 32 nt, Human
ggggcggggugaggacagagaggagucgaggg

SEQ ID NO: 465986 - RNA, 19 nt, Human
ggggcggggugcggagcgg

SEQ ID NO: 465987 - RNA, 32 nt, Human
ggggcgggguggaucacuugaggucagggguu

SEQ ID NO: 465988 - RNA, 32 nt, Human
ggggcgggguggggaaaggaugguucugaggu

SEQ ID NO: 465989 - RNA, 32 nt, Human
ggggcggguaggagccuggcucugccugagcu

SEQ ID NO: 465990 - RNA, 19 nt, Human
ggggcgggucugggugcgg

SEQ ID NO: 465991 - RNA, 32 nt, Human
ggggcgggugggaugcacagagcacagcgcgg

SEQ ID NO: 465992 - RNA, 19 nt, Human
ggggcgggugggggcgcgg

SEQ ID NO: 465993 - RNA, 23 nt, Human
ggggcgguacuuguucuugcgga

SEQ ID NO: 465994 - RNA, 32 nt, Human
ggggcggugaggugggggcagcggccccgcac

SEQ ID NO: 465995 - RNA, 32 nt, Human
ggggcggugaguguaaggaugcagugggagca

SEQ ID NO: 465996 - RNA, 20 nt, Human
ggggcggugcagagggggca

SEQ ID NO: 465997 - RNA, 18 nt, Human
ggggcgguggagggggca

SEQ ID NO: 465998 - RNA, 22 nt, Human
ggggcgguggcucacgccugua

SEQ ID NO: 465999 - RNA, 32 nt, Human
ggggcggugggugggaugguggagcagccugg

SEQ ID NO: 466000 - RNA, 32 nt, Human
ggggcgguguggcgcuagagccugggcgggcc

SEQ ID NO: 466001 - RNA, 32 nt, Human
ggggcgguguggcugcagccucagucccugcc

SEQ ID NO: 466002 - RNA, 23 nt, Human
ggggcgucacagucggcaggcag

SEQ ID NO: 466003 - RNA, 22 nt, Human
ggggcgucagaacgaaaggcag

SEQ ID NO: 466004 - RNA, 21 nt, Human
ggggcgucagcagaggggcag

SEQ ID NO: 466005 - RNA, 20 nt, Human
ggggcgucagcccugcaggg

SEQ ID NO: 466006 - RNA, 19 nt, Human
ggggcgucgagacaagaag

SEQ ID NO: 466007 - RNA, 20 nt, Human
ggggcgucgagaggcagcag

SEQ ID NO: 466008 - RNA, 32 nt, Human
ggggcgucuaaaaggccagcccaugcaucuug

SEQ ID NO: 466009 - RNA, 32 nt, Human
ggggcgucuagagacuggcugcgggagggaga

SEQ ID NO: 466010 - RNA, 32 nt, Human
ggggcgucuccaggacccagagcuguuccugc

SEQ ID NO: 466011 - RNA, 19 nt, Human
ggggcgucugccgggaggc

SEQ ID NO: 466012 - RNA, 32 nt, Human
ggggcgucugccugagcccgcuuuucuacaag

SEQ ID NO: 466013 - RNA, 32 nt, Human
ggggcgugccuggugagucugccugugguuca

SEQ ID NO: 466014 - RNA, 32 nt, Human
ggggcgugccuguagucccauguacuugggag

SEQ ID NO: 466015 - RNA, 20 nt, Human
ggggcgugcgcuagaggggg

SEQ ID NO: 466016 - RNA, 32 nt, Human
ggggcguggaggaggaggcgggcuggguugcg

SEQ ID NO: 466017 - RNA, 32 nt, Human
ggggcguggaguuuugucuuguauuuuggccu

SEQ ID NO: 466018 - RNA, 19 nt, Human
ggggcguggcagggcccuc

SEQ ID NO: 466019 - RNA, 32 nt, Human
ggggcguggccacuucacaugauggcgggccu

SEQ ID NO: 466020 - RNA, 32 nt, Human
ggggcguggcuggccuuucagguccaggccag

SEQ ID NO: 466021 - RNA, 32 nt, Human
ggggcguggcugggaacuggaaccuccugaag

SEQ ID NO: 466022 - RNA, 20 nt, Human
ggggcguggggcgggcgugg

SEQ ID NO: 466023 - RNA, 32 nt, Human
ggggcguggucugguccccauugcgggcccgg

SEQ ID NO: 466024 - RNA, 23 nt, Human
ggggcguguuaucgcgggggcag

SEQ ID NO: 466025 - RNA, 23 nt, Human
ggggcguuaccccaagggcccuc

SEQ ID NO: 466026 - RNA, 32 nt, Human
ggggcguugggagcgggagugcagagcguggu

SEQ ID NO: 466027 - RNA, 32 nt, Human
ggggcuaaagaggaggacgaagaaaagcagag

SEQ ID NO: 466028 - RNA, 20 nt, Human
ggggcuaagaaugggggcag

SEQ ID NO: 466029 - RNA, 32 nt, Human
ggggcuaauaccuguauccaaccaagggagua

SEQ ID NO: 466030 - RNA, 32 nt, Human
ggggcuacugugaccauggaggccagugccag

SEQ ID NO: 466031 - RNA, 32 nt, Human
ggggcuacuuccugugcugaaggaaguccucu

SEQ ID NO: 466032 - RNA, 19 nt, Human
ggggcuagaacuccaggag

SEQ ID NO: 466033 - RNA, 32 nt, Human
ggggcuagaagagcgagaaaauucaagaaaau

SEQ ID NO: 466034 - RNA, 32 nt, Human
ggggcuagcgggagccgagagcagggugcuga

SEQ ID NO: 466035 - RNA, 25 nt, Human
ggggcuagcuagcugucucugcgga

SEQ ID NO: 466036 - RNA, 23 nt, Human
ggggcuaggaguucuaagaacag

SEQ ID NO: 466037 - RNA, 22 nt, Human
ggggcuaggcugccgggccacu

SEQ ID NO: 466038 - RNA, 32 nt, Human
ggggcuaggcuggagcccagggagcggaaagc

SEQ ID NO: 466039 - RNA, 23 nt, Human
ggggcuagggcuggaagccaguu

SEQ ID NO: 466040 - RNA, 32 nt, Human
ggggcuagucaaucccagcugucucggaccag

SEQ ID NO: 466041 - RNA, 18 nt, Human
ggggcuauccgggucuga

SEQ ID NO: 466042 - RNA, 32 nt, Human
ggggcuaucgagaggagcucacugugggaugg

SEQ ID NO: 466043 - RNA, 24 nt, Human
ggggcuauucccugucucuguggg

SEQ ID NO: 466044 - RNA, 32 nt, Human
ggggcucaaaggacgucuggggugggaauggg

SEQ ID NO: 466045 - RNA, 32 nt, Human
ggggcucaagccuguauuccagcacuuuggga

SEQ ID NO: 466046 - RNA, 32 nt, Human
ggggcucaaggcgcaggaaggccgagcccggc

SEQ ID NO: 466047 - RNA, 32 nt, Human
ggggcucacaccugacauguauguccuccagg

SEQ ID NO: 466048 - RNA, 32 nt, Human
ggggcucacagggcagucccaggaguucugac

SEQ ID NO: 466049 - RNA, 32 nt, Human
ggggcucacaucuccccucugauucccccaug

SEQ ID NO: 466050 - RNA, 32 nt, Human
ggggcucacauucucaccuagcaacaacuggc

SEQ ID NO: 466051 - RNA, 32 nt, Human
ggggcucaccugguggauucacauuaaaccgg

SEQ ID NO: 466052 - RNA, 32 nt, Human
ggggcucacuacugcugugcccucaggcuggg

SEQ ID NO: 466053 - RNA, 32 nt, Human
ggggcucacugcuugcacugugcuuaggguag

SEQ ID NO: 466054 - RNA, 32 nt, Human
ggggcucagaggaggaggacaaagacggcggg

SEQ ID NO: 466055 - RNA, 32 nt, Human
ggggcucagauuggcacagaauucuuugugaa

SEQ ID NO: 466056 - RNA, 32 nt, Human
ggggcucagauuggcacagaauucuuuuguga

SEQ ID NO: 466057 - RNA, 32 nt, Human
ggggcucagauugggacagaauucuuuuguga

SEQ ID NO: 466058 - RNA, 18 nt, Human
ggggcucagcagccuccu

SEQ ID NO: 466059 - RNA, 32 nt, Human
ggggcucagcagugaccuggagugugcaaaua

SEQ ID NO: 466060 - RNA, 32 nt, Human
ggggcucaggagacagaagggacagugggccu

SEQ ID NO: 466061 - RNA, 32 nt, Human
ggggcucaggaggaggaaggaggacccgugcg

SEQ ID NO: 466062 - RNA, 22 nt, Human
ggggcucaggcacccgucccca

SEQ ID NO: 466063 - RNA, 16 nt, Human
ggggcucagggcccuu

SEQ ID NO: 466064 - RNA, 28 nt, Human
ggggcuccaagugccuuguucauccuuu

SEQ ID NO: 466065 - RNA, 19 nt, Human
ggggcuccagcaaaccccu

SEQ ID NO: 466066 - RNA, 32 nt, Human
ggggcuccagccugcaccugcaccaggcacag

SEQ ID NO: 466067 - RNA, 32 nt, Human
ggggcucccacaggcuggagugcaauggugug

SEQ ID NO: 466068 - RNA, 32 nt, Human
ggggcucccaggcugggugugccuuagccaca

SEQ ID NO: 466069 - RNA, 32 nt, Human
ggggcucccccacauccuuuccuugccuauga

SEQ ID NO: 466070 - RNA, 32 nt, Human
ggggcucccucccuccuucucuccuuccuucc

SEQ ID NO: 466071 - RNA, 32 nt, Human
ggggcuccgcccacccugcucccuuccggaca

SEQ ID NO: 466072 - RNA, 32 nt, Human
ggggcuccggcaggccgggguagugcucucac

SEQ ID NO: 466073 - RNA, 32 nt, Human
ggggcuccgggccagggugacaggaggcgugc

SEQ ID NO: 466074 - RNA, 32 nt, Human
ggggcuccugccuguagcaggugacagggcug

SEQ ID NO: 466075 - RNA, 32 nt, Human
ggggcuccuggaccaggcucaucagcaagcuu

SEQ ID NO: 466076 - RNA, 32 nt, Human
ggggcuccuggcccugaaugugguguuccugg

SEQ ID NO: 466077 - RNA, 32 nt, Human
ggggcuccugucucugccuccugggccuucag

SEQ ID NO: 466078 - RNA, 18 nt, Human
ggggcuccuucagccccc

SEQ ID NO: 466079 - RNA, 32 nt, Human
ggggcucgacccacccacccucccucucagac

SEQ ID NO: 466080 - RNA, 18 nt, Human
ggggcucggacgcccccu

SEQ ID NO: 466081 - RNA, 32 nt, Human
ggggcucggagggagaaaggcccagggcagug

SEQ ID NO: 466082 - RNA, 20 nt, Human
ggggcucggcgggggcgcgg

SEQ ID NO: 466083 - RNA, 32 nt, Human
ggggcucgggcaggagcacuccugggcucucc

SEQ ID NO: 466084 - RNA, 32 nt, Human
ggggcucuacuaccugcugcuauucaaggacc

SEQ ID NO: 466085 - RNA, 32 nt, Human
ggggcucuccacccccucuggccccagucgaa

SEQ ID NO: 466086 - RNA, 32 nt, Human
ggggcucugaucucccauccaucccacccucc

SEQ ID NO: 466087 - RNA, 32 nt, Human
ggggcucugccacucccagccugggaaugaag

SEQ ID NO: 466088 - RNA, 32 nt, Human
ggggcucugcucauuauaguugcccacggccu

SEQ ID NO: 466089 - RNA, 32 nt, Human
ggggcucugggagacuuugaagaccaguccug

SEQ ID NO: 466090 - RNA, 32 nt, Human
ggggcucuguccucagccugguggacagcagu

SEQ ID NO: 466091 - RNA, 32 nt, Human
ggggcucuucaccaauuuuuccagccucauuu

SEQ ID NO: 466092 - RNA, 32 nt, Human
ggggcucuucacuguggggcaugggagaggag

SEQ ID NO: 466093 - RNA, 32 nt, Human
ggggcucuuguccuguccuguguuccucgugg

SEQ ID NO: 466094 - RNA, 32 nt, Human
ggggcugaaagacacacagaagucuucaugga

SEQ ID NO: 466095 - RNA, 32 nt, Human
ggggcugaaaucauuuguucuccuucacauug

SEQ ID NO: 466096 - RNA, 20 nt, Human
ggggcugaagcgaagggggg

SEQ ID NO: 466097 - RNA, 21 nt, Human
ggggcugaaucacacauuucc

SEQ ID NO: 466098 - RNA, 19 nt, Human
ggggcugaaucagcuccag

SEQ ID NO: 466099 - RNA, 17 nt, Human
ggggcugacacacacuc

SEQ ID NO: 466100 - RNA, 32 nt, Human
ggggcugaccaccaccaccuggccucuccgag

SEQ ID NO: 466101 - RNA, 20 nt, Human
ggggcugagagagauggggg

SEQ ID NO: 466102 - RNA, 32 nt, Human
ggggcugagagugcugggguaguggguguggu

SEQ ID NO: 466103 - RNA, 32 nt, Human
ggggcugagcagcuaggaagcuaggaagugga

SEQ ID NO: 466104 - RNA, 21 nt, Human
ggggcugaggaggaggagcag

SEQ ID NO: 466105 - RNA, 32 nt, Human
ggggcugaggcagaggcagggauagcugggug

SEQ ID NO: 466106 - RNA, 32 nt, Human
ggggcugaggcaggcagccgggagagccaugg

SEQ ID NO: 466107 - RNA, 31 nt, Human
ggggcugaggcucuggggccugucucccugc

SEQ ID NO: 466108 - RNA, 32 nt, Human
ggggcugaggcugaggcacuggcgaggagagg

SEQ ID NO: 466109 - RNA, 27 nt, Human
ggggcugagggaauuguccucugugga

SEQ ID NO: 466110 - RNA, 32 nt, Human
ggggcugagggcccuguccccacccccgcccu

SEQ ID NO: 466111 - RNA, 32 nt, Human
ggggcugaggugggacuggaggauuucgaggg

SEQ ID NO: 466112 - RNA, 32 nt, Human
ggggcugagguggguggaucaccugagaccag

SEQ ID NO: 466113 - RNA, 30 nt, Human
ggggcugagguuuucuugcuccuguggaug

SEQ ID NO: 466114 - RNA, 32 nt, Human
ggggcugauacuuggaaagaaugugguaaagc

SEQ ID NO: 466115 - RNA, 32 nt, Human
ggggcugauuccagaugguuuuucugaaauuu

SEQ ID NO: 466116 - RNA, 28 nt, Human
ggggcugcaagugcuaccucgcgcuugu

SEQ ID NO: 466117 - RNA, 32 nt, Human
ggggcugcacacacucaggagcucugucacaa

SEQ ID NO: 466118 - RNA, 32 nt, Human
ggggcugcacaucugacggacuaaggugacuc

SEQ ID NO: 466119 - RNA, 32 nt, Human
ggggcugcaccugcgggccugggaagcauugc

SEQ ID NO: 466120 - RNA, 32 nt, Human
ggggcugcagagcuggagggugggcgugguac

SEQ ID NO: 466121 - RNA, 20 nt, Human
ggggcugcagcagggaggca

SEQ ID NO: 466122 - RNA, 16 nt, Human
ggggcugcagcccccu

SEQ ID NO: 466123 - RNA, 15 nt, Human
ggggcugcagcgcag

SEQ ID NO: 466124 - RNA, 22 nt, Human
ggggcugcagcggagggaacag

SEQ ID NO: 466125 - RNA, 32 nt, Human
ggggcugcaggcaccugccacuaccgcagagg

SEQ ID NO: 466126 - RNA, 32 nt, Human
ggggcugcagggaaggcagcuuucauuuguuu

SEQ ID NO: 466127 - RNA, 32 nt, Human
ggggcugcagggccacuggaaggaacauggag

SEQ ID NO: 466128 - RNA, 32 nt, Human
ggggcugcagugagccaagaucacgccacugc

SEQ ID NO: 466129 - RNA, 32 nt, Human
ggggcugcaguuggggcuccuccuggguugau

SEQ ID NO: 466130 - RNA, 22 nt, Human
ggggcugcauccaaggcuuugu

SEQ ID NO: 466131 - RNA, 17 nt, Human
ggggcugccaaaggggc

SEQ ID NO: 466132 - RNA, 32 nt, Human
ggggcugccaucagccucucacagaggcaucu

SEQ ID NO: 466133 - RNA, 32 nt, Human
ggggcugccaucccauuucuccugccucugga

SEQ ID NO: 466134 - RNA, 32 nt, Human
ggggcugccccagcugacuuggaggcccuggc

SEQ ID NO: 466135 - RNA, 32 nt, Human
ggggcugcccucuccacauuaucaguugacag

SEQ ID NO: 466136 - RNA, 32 nt, Human
ggggcugccgagccaccaugcuugccugaagc

SEQ ID NO: 466137 - RNA, 32 nt, Human
ggggcugccucugaccccuccuguggugguga

SEQ ID NO: 466138 - RNA, 32 nt, Human
ggggcugccugcaugccuccccugcaccuggg

SEQ ID NO: 466139 - RNA, 32 nt, Human
ggggcugccuguaaaugacacugugaauaaac

SEQ ID NO: 466140 - RNA, 32 nt, Human
ggggcugcgacuucugaagcacaagaggcaga

SEQ ID NO: 466141 - RNA, 32 nt, Human
ggggcugcggccagggcggagggaggaagacc

SEQ ID NO: 466142 - RNA, 32 nt, Human
ggggcugcggcucucccgcgugggccgcggcc

SEQ ID NO: 466143 - RNA, 21 nt, Human
ggggcugcguccaggccggcu

SEQ ID NO: 466144 - RNA, 23 nt, Human
ggggcugcguggggggcgggagg

SEQ ID NO: 466145 - RNA, 32 nt, Human
ggggcugcucaggccgccuagcugccccuuug

SEQ ID NO: 466146 - RNA, 32 nt, Human
ggggcugcuccuggugagaggacgugggcagg

SEQ ID NO: 466147 - RNA, 32 nt, Human
ggggcugcugcagcuucuggggccuccacaga

SEQ ID NO: 466148 - RNA, 21 nt, Human
ggggcugcugccuccaggugg

SEQ ID NO: 466149 - RNA, 21 nt, Human
ggggcugcugcgccgcuucga

SEQ ID NO: 466150 - RNA, 32 nt, Human
ggggcugcuggggccaaggagggaccuugacc

SEQ ID NO: 466151 - RNA, 32 nt, Human
ggggcugcuggugggaaaugggagccagggca

SEQ ID NO: 466152 - RNA, 32 nt, Human
ggggcugcuugcuuuugccucugcccaaccag

SEQ ID NO: 466153 - RNA, 32 nt, Human
ggggcuggaaccugggguuuugcuugggugug

SEQ ID NO: 466154 - RNA, 30 nt, Human
ggggcuggaagccacggguacgguuaaccu

SEQ ID NO: 466155 - RNA, 32 nt, Human
ggggcuggaauguccuguggccgcaucucuca

SEQ ID NO: 466156 - RNA, 21 nt, Human
ggggcuggacccgagccggcu

SEQ ID NO: 466157 - RNA, 32 nt, Human
ggggcuggacccucagguagaggaucaaugug

SEQ ID NO: 466158 - RNA, 24 nt, Human
ggggcuggaccgacauccugaaca

SEQ ID NO: 466159 - RNA, 32 nt, Human
ggggcuggacucagguuaguuugggggugggg

SEQ ID NO: 466160 - RNA, 20 nt, Human
ggggcuggagaaggggagaa

SEQ ID NO: 466161 - RNA, 32 nt, Human
ggggcuggagccaaagggagaggaagaggaaa

SEQ ID NO: 466162 - RNA, 25 nt, Human
ggggcuggagccuuccaaacaggcu

SEQ ID NO: 466163 - RNA, 32 nt, Human
ggggcuggaggaagauccggagggcaggggug

SEQ ID NO: 466164 - RNA, 32 nt, Human
ggggcuggaggcgguggcugcgguugcgggac

SEQ ID NO: 466165 - RNA, 18 nt, Human
ggggcuggaggggggcag

SEQ ID NO: 466166 - RNA, 23 nt, Human
ggggcuggcaggcagaggcccag

SEQ ID NO: 466167 - RNA, 20 nt, Human
ggggcuggcagggacccuag

SEQ ID NO: 466168 - RNA, 19 nt, Human
ggggcuggcagggccucca

SEQ ID NO: 466169 - RNA, 32 nt, Human
ggggcuggcagucccuggcugcagaccccgag

SEQ ID NO: 466170 - RNA, 32 nt, Human
ggggcuggccacuuccguacuuccgcuuuccg

SEQ ID NO: 466171 - RNA, 32 nt, Human
ggggcuggccagcugcucguccgcccuaggua

SEQ ID NO: 466172 - RNA, 21 nt, Human
ggggcuggccaguggggacag

SEQ ID NO: 466173 - RNA, 32 nt, Human
ggggcuggcccaggcuacggcggcugcagggc

SEQ ID NO: 466174 - RNA, 20 nt, Human
ggggcuggccccaagcccag

SEQ ID NO: 466175 - RNA, 20 nt, Human
ggggcuggcccgggguucca

SEQ ID NO: 466176 - RNA, 32 nt, Human
ggggcuggcgcugaagccggauccggauccgg

SEQ ID NO: 466177 - RNA, 21 nt, Human
ggggcuggcggagagucacag

SEQ ID NO: 466178 - RNA, 32 nt, Human
ggggcuggcuaguaggggaacauguaguagcc

SEQ ID NO: 466179 - RNA, 18 nt, Human
ggggcuggcuccaggcca

SEQ ID NO: 466180 - RNA, 32 nt, Human
ggggcuggcugguucggaggcucugcuauuuc

SEQ ID NO: 466181 - RNA, 22 nt, Human
ggggcugggaaagagggggcag

SEQ ID NO: 466182 - RNA, 32 nt, Human
ggggcugggaccccagucgaggggacacaacc

SEQ ID NO: 466183 - RNA, 32 nt, Human
ggggcugggaccccuucccaucccaaccuuga

SEQ ID NO: 466184 - RNA, 32 nt, Human
ggggcugggagggagaggggcuccggcuuucu

SEQ ID NO: 466185 - RNA, 32 nt, Human
ggggcugggagguggagggccccugauucgaa

SEQ ID NO: 466186 - RNA, 22 nt, Human
ggggcugggcagcagccuuccu

SEQ ID NO: 466187 - RNA, 19 nt, Human
ggggcugggcagcugccag

SEQ ID NO: 466188 - RNA, 32 nt, Human
ggggcugggcaggccagccgggcauccugacc

SEQ ID NO: 466189 - RNA, 32 nt, Human
ggggcugggcaggcccauugagggccaccgcc

SEQ ID NO: 466190 - RNA, 32 nt, Human
ggggcugggcagggaugccaggugggcccagc

SEQ ID NO: 466191 - RNA, 32 nt, Human
ggggcugggcaggggcagcugggcuggcuccc

SEQ ID NO: 466192 - RNA, 32 nt, Human
ggggcugggcaggggcgguggaggacucagga

SEQ ID NO: 466193 - RNA, 32 nt, Human
ggggcugggcauugugucugaccugugcaucu

SEQ ID NO: 466194 - RNA, 32 nt, Human
ggggcugggccauggagcuggcccagaggccc

SEQ ID NO: 466195 - RNA, 32 nt, Human
ggggcugggcccuggccuccuaacggggcugc

SEQ ID NO: 466196 - RNA, 32 nt, Human
ggggcugggcccugggaccugaaggagguaac

SEQ ID NO: 466197 - RNA, 32 nt, Human
ggggcugggccuuggccacagccucuuggaug

SEQ ID NO: 466198 - RNA, 32 nt, Human
ggggcugggcugagccagggaggaaggaccca

SEQ ID NO: 466199 - RNA, 32 nt, Human
ggggcuggggaaagggaugggagccaggaaag

SEQ ID NO: 466200 - RNA, 32 nt, Human
ggggcuggggacccucacaggugacagggaca

SEQ ID NO: 466201 - RNA, 32 nt, Human
ggggcuggggagaggaaggggcagagggaccg

SEQ ID NO: 466202 - RNA, 32 nt, Human
ggggcuggggagggggacagggagugaguguu

SEQ ID NO: 466203 - RNA, 32 nt, Human
ggggcuggggcaaugcaggcugggugaccgac

SEQ ID NO: 466204 - RNA, 32 nt, Human
ggggcuggggcauggcaggcugggugaccgac

SEQ ID NO: 466205 - RNA, 32 nt, Human
ggggcuggggcgucccucuccucucuccccag

SEQ ID NO: 466206 - RNA, 32 nt, Human
ggggcuggggcuggggccggaggcggggugug

SEQ ID NO: 466207 - RNA, 20 nt, Human
ggggcugggggucaguccag

SEQ ID NO: 466208 - RNA, 32 nt, Human
ggggcugggggugcuggauggacagugggcau

SEQ ID NO: 466209 - RNA, 32 nt, Human
ggggcugggggugggauugaaggaaacccucu

SEQ ID NO: 466210 - RNA, 32 nt, Human
ggggcuggggguuggagaauaaaagcaggaga

SEQ ID NO: 466211 - RNA, 32 nt, Human
ggggcuggggugagagaggaaagaccuacauu

SEQ ID NO: 466212 - RNA, 32 nt, Human
ggggcugggugggagaugggagggccaacugc

SEQ ID NO: 466213 - RNA, 20 nt, Human
ggggcugguccaugauguca

SEQ ID NO: 466214 - RNA, 32 nt, Human
ggggcugguggagauuugagguggguuuaagu

SEQ ID NO: 466215 - RNA, 32 nt, Human
ggggcuggugggguggaggaugcugaguggug

SEQ ID NO: 466216 - RNA, 32 nt, Human
ggggcuguaggcaccggacggaagcaggcggu

SEQ ID NO: 466217 - RNA, 32 nt, Human
ggggcuguaggcgccaaggccauguccgacuc

SEQ ID NO: 466218 - RNA, 24 nt, Human
ggggcugucccaggucucuguggg

SEQ ID NO: 466219 - RNA, 18 nt, Human
ggggcugugaaggucugg

SEQ ID NO: 466220 - RNA, 32 nt, Human
ggggcugugaccugggcagcucaagacuggug

SEQ ID NO: 466221 - RNA, 32 nt, Human
ggggcugugcuacaaucucugcagccuuuuca

SEQ ID NO: 466222 - RNA, 19 nt, Human
ggggcugugucucugacug

SEQ ID NO: 466223 - RNA, 32 nt, Human
ggggcugugugagacgcagggaaggaggcaca

SEQ ID NO: 466224 - RNA, 32 nt, Human
ggggcugugugccacagggugaagaguuugug

SEQ ID NO: 466225 - RNA, 32 nt, Human
ggggcuguguuggaggagaggaagaaagagag

SEQ ID NO: 466226 - RNA, 32 nt, Human
ggggcuguuaggugccuggaugacaaguggac

SEQ ID NO: 466227 - RNA, 32 nt, Human
ggggcuguuggcuagaccccuugucagacuug

SEQ ID NO: 466228 - RNA, 17 nt, Human
ggggcuguuuccagguc

SEQ ID NO: 466229 - RNA, 32 nt, Human
ggggcuguuugggcaucuguggaggguggugc

SEQ ID NO: 466230 - RNA, 32 nt, Human
ggggcuuagggaugagguccugguuuuucuug

SEQ ID NO: 466231 - RNA, 32 nt, Human
ggggcuuaucucugauacaugcuggagcccug

SEQ ID NO: 466232 - RNA, 32 nt, Human
ggggcuucaaaccacuuaggaccgacugcuga

SEQ ID NO: 466233 - RNA, 21 nt, Human
ggggcuucaagagaggggcag

SEQ ID NO: 466234 - RNA, 32 nt, Human
ggggcuucagccuccauucucacuuuccuucu

SEQ ID NO: 466235 - RNA, 32 nt, Human
ggggcuucaucauccugaaaagaaggagacag

SEQ ID NO: 466236 - RNA, 32 nt, Human
ggggcuucauucaccacauuggccagccuggu

SEQ ID NO: 466237 - RNA, 32 nt, Human
ggggcuuccaggggccccaggagaagcugggc

SEQ ID NO: 466238 - RNA, 15 nt, Human
ggggcuuccagguca

SEQ ID NO: 466239 - RNA, 32 nt, Human
ggggcuucccaugggagcugauggcuucgugc

SEQ ID NO: 466240 - RNA, 17 nt, Human
ggggcuuccugagcguc

SEQ ID NO: 466241 - RNA, 18 nt, Human
ggggcuuccuggcugcag

SEQ ID NO: 466242 - RNA, 32 nt, Human
ggggcuuccuguaccuccuuuugccuggcucu

SEQ ID NO: 466243 - RNA, 32 nt, Human
ggggcuuccuuucugcagcugagaugcacgca

SEQ ID NO: 466244 - RNA, 19 nt, Human
ggggcuucuagacaggaca

SEQ ID NO: 466245 - RNA, 32 nt, Human
ggggcuucuccaagccucacugcgccagccuc

SEQ ID NO: 466246 - RNA, 32 nt, Human
ggggcuucuccaggacugucuguggcucguug

SEQ ID NO: 466247 - RNA, 32 nt, Human
ggggcuucuccauccaggucccuggaguuccu

SEQ ID NO: 466248 - RNA, 32 nt, Human
ggggcuucuccauguuggucaggcuggucugg

SEQ ID NO: 466249 - RNA, 32 nt, Human
ggggcuucucccccucagcucucccucacacc

SEQ ID NO: 466250 - RNA, 32 nt, Human
ggggcuucuccccucgcugcugcacccuggcu

SEQ ID NO: 466251 - RNA, 19 nt, Human
ggggcuucuggaaggagca

SEQ ID NO: 466252 - RNA, 32 nt, Human
ggggcuucuggguggggagugggagagagacu

SEQ ID NO: 466253 - RNA, 32 nt, Human
ggggcuucugucuagcucugcagcuguggcug

SEQ ID NO: 466254 - RNA, 32 nt, Human
ggggcuucuuucuuuucgaauguggcuaccgu

SEQ ID NO: 466255 - RNA, 32 nt, Human
ggggcuugagggguggggaauggggagggaag

SEQ ID NO: 466256 - RNA, 32 nt, Human
ggggcuugaguccagcccugggggucccggac

SEQ ID NO: 466257 - RNA, 21 nt, Human
ggggcuugcccuuggauuuca

SEQ ID NO: 466258 - RNA, 32 nt, Human
ggggcuugcgcuucugucgggucugugccgcu

SEQ ID NO: 466259 - RNA, 32 nt, Human
ggggcuuggaaaggaagguauuuuggaaucac

SEQ ID NO: 466260 - RNA, 32 nt, Human
ggggcuuggacagaagcugcccuccgaccccc

SEQ ID NO: 466261 - RNA, 32 nt, Human
ggggcuuggaggugggcggcuggacucaaucc

SEQ ID NO: 466262 - RNA, 32 nt, Human
ggggcuuggcccuggcccuggcccagaucuua

SEQ ID NO: 466263 - RNA, 32 nt, Human
ggggcuuggcugcugcuguugcugcucuguau

SEQ ID NO: 466264 - RNA, 32 nt, Human
ggggcuuggggaggggagggggcgccuuguuc

SEQ ID NO: 466265 - RNA, 32 nt, Human
ggggcuuggggcugucugggcuacagaaguga

SEQ ID NO: 466266 - RNA, 32 nt, Human
ggggcuugucauucugaucucagcagucuucu

SEQ ID NO: 466267 - RNA, 32 nt, Human
ggggcuuguggaggcagcaggugaagaggcag

SEQ ID NO: 466268 - RNA, 31 nt, Human
ggggcuugugguacuuaacacuuguagccau

SEQ ID NO: 466269 - RNA, 22 nt, Human
ggggcuuguguguucucugcgg

SEQ ID NO: 466270 - RNA, 32 nt, Human
ggggcuuguuugcugacuugcugcugcacgug

SEQ ID NO: 466271 - RNA, 32 nt, Human
ggggcuuucaacccucucccccaccacccagc

SEQ ID NO: 466272 - RNA, 32 nt, Human
ggggcuuugcugcuuuugccugcagcauccgc

SEQ ID NO: 466273 - RNA, 19 nt, Human
ggggcuuuuccaagcccag

SEQ ID NO: 466274 - RNA, 32 nt, Human
ggggcuuuugaggacccagcugcgucaggagu

SEQ ID NO: 466275 - RNA, 32 nt, Human
gggggaaaacugugccccaggaugucuggccc

SEQ ID NO: 466276 - RNA, 32 nt, Human
gggggaaaaggaggugggagugcagaugaaac

SEQ ID NO: 466277 - RNA, 32 nt, Human
gggggaaaaguagaucacuuaucuuagcaaac

SEQ ID NO: 466278 - RNA, 32 nt, Human
gggggaaacauacauuuauucaugccagucug

SEQ ID NO: 466279 - RNA, 32 nt, Human
gggggaaagaaaagggaagaagaaaggaaaag

SEQ ID NO: 466280 - RNA, 32 nt, Human
gggggaaagagaggguuaaucuuaucauaugu

SEQ ID NO: 466281 - RNA, 32 nt, Human
gggggaaagagcaaaccaucuuucuuccaggc

SEQ ID NO: 466282 - RNA, 32 nt, Human
gggggaaaggacucuguccccuuggggcucau

SEQ ID NO: 466283 - RNA, 32 nt, Human
gggggaaagugaauuacagugacaucagagca

SEQ ID NO: 466284 - RNA, 32 nt, Human
gggggaacacaugacaugauuugugaauauca

SEQ ID NO: 466285 - RNA, 32 nt, Human
gggggaacagcuuucgcccuggagcggugcgc

SEQ ID NO: 466286 - RNA, 32 nt, Human
gggggaacucggcggagcuuccuggcggcauc

SEQ ID NO: 466287 - RNA, 32 nt, Human
gggggaacuucugccuuccugguuuccuugac

SEQ ID NO: 466288 - RNA, 32 nt, Human
gggggaagaaggaggagaagaugaagaagcac

SEQ ID NO: 466289 - RNA, 22 nt, Human
gggggaagagaauuacauuucc

SEQ ID NO: 466290 - RNA, 32 nt, Human
gggggaagaggaagaaaagucggauuacaaga

SEQ ID NO: 466291 - RNA, 32 nt, Human
gggggaagaggugaggcuaggggagugcugug

SEQ ID NO: 466292 - RNA, 32 nt, Human
gggggaagauggcggagcuggggaagaaguac

SEQ ID NO: 466293 - RNA, 22 nt, Human
gggggaagcaagucuggucucu

SEQ ID NO: 466294 - RNA, 18 nt, Human
gggggaagcagaggcgcc

SEQ ID NO: 466295 - RNA, 19 nt, Human
gggggaagcagggcgggcc

SEQ ID NO: 466296 - RNA, 23 nt, Human
gggggaagcagggggcaguuucu

SEQ ID NO: 466297 - RNA, 18 nt, Human
gggggaagccaggcggcc

SEQ ID NO: 466298 - RNA, 32 nt, Human
gggggaagccauagggcgcuuucacaggccug

SEQ ID NO: 466299 - RNA, 27 nt, Human
gggggaagcccgccugagcaguguuuu

SEQ ID NO: 466300 - RNA, 24 nt, Human
gggggaagcccggaggcagugcuc

SEQ ID NO: 466301 - RNA, 32 nt, Human
gggggaagccuuuauucuuuacuguugucccu

SEQ ID NO: 466302 - RNA, 32 nt, Human
gggggaagcugcugagagucccuaucacugcu

SEQ ID NO: 466303 - RNA, 32 nt, Human
gggggaaggagagaggcguggguaagggacau

SEQ ID NO: 466304 - RNA, 32 nt, Human
gggggaagggagccacccugggggagucugag

SEQ ID NO: 466305 - RNA, 32 nt, Human
gggggaagggcggggugagggaagaaagaccc

SEQ ID NO: 466306 - RNA, 32 nt, Human
gggggaaggggacaugggcaggaagcaccgag

SEQ ID NO: 466307 - RNA, 32 nt, Human
gggggaaggggcuggggagugggggugggaag

SEQ ID NO: 466308 - RNA, 32 nt, Human
gggggaagggucugagacucccuuuccuuuug

SEQ ID NO: 466309 - RNA, 32 nt, Human
gggggaagucaaccccuccugugcugccgguc

SEQ ID NO: 466310 - RNA, 20 nt, Human
gggggaaguuccgggugccu

SEQ ID NO: 466311 - RNA, 32 nt, Human
gggggaaucccuugagcccaggaguuggagag

SEQ ID NO: 466312 - RNA, 32 nt, Human
gggggaauuaggggauuagauuaagaguaggu

SEQ ID NO: 466313 - RNA, 32 nt, Human
gggggacaaggagccucuagacuuaagagaca

SEQ ID NO: 466314 - RNA, 32 nt, Human
gggggacacuccagggaacccaaaacucaaag

SEQ ID NO: 466315 - RNA, 32 nt, Human
gggggacacuggcuccugccaucuccucugcc

SEQ ID NO: 466316 - RNA, 32 nt, Human
gggggacacuggcugcauucccccgcccccag

SEQ ID NO: 466317 - RNA, 31 nt, Human
gggggacagacgcagcaccuucuuagcgauc

SEQ ID NO: 466318 - RNA, 32 nt, Human
gggggacagagcccugggaggccgggccgggc

SEQ ID NO: 466319 - RNA, 32 nt, Human
gggggacagcagcuccagggaugucuucucuu

SEQ ID NO: 466320 - RNA, 32 nt, Human
gggggacagcugaggaugggccuagcagauga

SEQ ID NO: 466321 - RNA, 22 nt, Human
gggggacagcuggacggugucu

SEQ ID NO: 466322 - RNA, 32 nt, Human
gggggacagggagugaguguuucauggggaca

SEQ ID NO: 466323 - RNA, 32 nt, Human
gggggacaggugugcacggggcggccaagggc

SEQ ID NO: 466324 - RNA, 32 nt, Human
gggggacaguggcggugggacugaccugcuga

SEQ ID NO: 466325 - RNA, 32 nt, Human
gggggaccaccagguugccuaaggagugguga

SEQ ID NO: 466326 - RNA, 32 nt, Human
gggggaccauggacuucaucagcauucagcag

SEQ ID NO: 466327 - RNA, 24 nt, Human
gggggacccacccaccgucuccca

SEQ ID NO: 466328 - RNA, 24 nt, Human
gggggacccagacaccugucccca

SEQ ID NO: 466329 - RNA, 22 nt, Human
gggggacccugggaggugcuuu

SEQ ID NO: 466330 - RNA, 32 nt, Human
gggggacccugggaggugcuuuacagaccgcu

SEQ ID NO: 466331 - RNA, 21 nt, Human
gggggaccguguccuccccca

SEQ ID NO: 466332 - RNA, 32 nt, Human
gggggaccuagcucugucuucccagccccuug

SEQ ID NO: 466333 - RNA, 32 nt, Human
gggggaccucauuccugggacuaugcuguaac

SEQ ID NO: 466334 - RNA, 32 nt, Human
gggggaccuccaccaggaccccggcccugcac

SEQ ID NO: 466335 - RNA, 32 nt, Human
gggggaccucuacaccucugcugugggcacgg

SEQ ID NO: 466336 - RNA, 18 nt, Human
gggggacgccgaccgcuc

SEQ ID NO: 466337 - RNA, 32 nt, Human
gggggacgggauggccuguugcuucuggacca

SEQ ID NO: 466338 - RNA, 32 nt, Human
gggggacggggcggggcuugaccugcgggugc

SEQ ID NO: 466339 - RNA, 32 nt, Human
gggggacucaauguggcccucucacucauccc

SEQ ID NO: 466340 - RNA, 32 nt, Human
gggggacuccgagacagggaagaccggggccc

SEQ ID NO: 466341 - RNA, 32 nt, Human
gggggacugcucacggauaaggucuccccaac

SEQ ID NO: 466342 - RNA, 21 nt, Human
gggggacugcuugagcucagg

SEQ ID NO: 466343 - RNA, 22 nt, Human
gggggagaacagaagggggacg

SEQ ID NO: 466344 - RNA, 24 nt, Human
gggggagaacagagaaggugugga

SEQ ID NO: 466345 - RNA, 32 nt, Human
gggggagaacagagaggagcugggcuauggga

SEQ ID NO: 466346 - RNA, 22 nt, Human
gggggagaacagaguggacgga

SEQ ID NO: 466347 - RNA, 32 nt, Human
gggggagaagacgaagacagggccgggucucu

SEQ ID NO: 466348 - RNA, 32 nt, Human
gggggagaaggugggugggcucagggagaacg

SEQ ID NO: 466349 - RNA, 32 nt, Human
gggggagaagugagaaguguuaugacauuagu

SEQ ID NO: 466350 - RNA, 32 nt, Human
gggggagaauuaagccaaagaaguauauuuau

SEQ ID NO: 466351 - RNA, 32 nt, Human
gggggagacacuacuccuacuuaucuugcuca

SEQ ID NO: 466352 - RNA, 32 nt, Human
gggggagacagacagauacauacacauacacc

SEQ ID NO: 466353 - RNA, 32 nt, Human
gggggagacccccauuuuccuccgccccucuc

SEQ ID NO: 466354 - RNA, 32 nt, Human
gggggagacgagcaaugcagcacucuaggaag

SEQ ID NO: 466355 - RNA, 32 nt, Human
gggggagacgaggaggaggaggacaugacuuu

SEQ ID NO: 466356 - RNA, 32 nt, Human
gggggagacucccuccaugguggaagcccuug

SEQ ID NO: 466357 - RNA, 31 nt, Human
gggggagagaagagagaaagaggcugacccu

SEQ ID NO: 466358 - RNA, 32 nt, Human
gggggagagaagcagagggagagagaagguga

SEQ ID NO: 466359 - RNA, 32 nt, Human
gggggagagaggggaaggaaauggaacaaguu

SEQ ID NO: 466360 - RNA, 32 nt, Human
gggggagagauggggcggggcuuggaaggagc

SEQ ID NO: 466361 - RNA, 32 nt, Human
gggggagagccuggcccuguccuuugcuaccc

SEQ ID NO: 466362 - RNA, 32 nt, Human
gggggagaggaggggaaagcuagaccugcaga

SEQ ID NO: 466363 - RNA, 32 nt, Human
gggggagaggauggcccagcaggccuggccca

SEQ ID NO: 466364 - RNA, 32 nt, Human
gggggagagggagggaaggaaggugcggcugc

SEQ ID NO: 466365 - RNA, 32 nt, Human
gggggagaggggcaaaugccuccgggacugac

SEQ ID NO: 466366 - RNA, 32 nt, Human
gggggagagguggauugcagcaguauccucaa

SEQ ID NO: 466367 - RNA, 26 nt, Human
gggggagaguacgucggcggugcucu

SEQ ID NO: 466368 - RNA, 32 nt, Human
gggggagauggaccaccccuggaacugucccc

SEQ ID NO: 466369 - RNA, 32 nt, Human
gggggagcagaggggucggaaagggaaaacaa

SEQ ID NO: 466370 - RNA, 32 nt, Human
gggggagcagguuggagaggggaccaaaggca

SEQ ID NO: 466371 - RNA, 32 nt, Human
gggggagccaggcuucggaaucacugagagag

SEQ ID NO: 466372 - RNA, 32 nt, Human
gggggagcccagggcggggagggcgcggccgg

SEQ ID NO: 466373 - RNA, 32 nt, Human
gggggagccccgaccaccccagccucucaucu

SEQ ID NO: 466374 - RNA, 32 nt, Human
gggggagcccuggcuuucaccaaaggagccca

SEQ ID NO: 466375 - RNA, 32 nt, Human
gggggagcugcugggccuaaagcccacuccug

SEQ ID NO: 466376 - RNA, 32 nt, Human
gggggagcuggcagaggagagagacgucucag

SEQ ID NO: 466377 - RNA, 32 nt, Human
gggggaggaagaggaagagaaaagaagaagaa

SEQ ID NO: 466378 - RNA, 32 nt, Human
gggggaggaagaggagguggagaaggaggggg

SEQ ID NO: 466379 - RNA, 21 nt, Human
gggggaggaagcagugacuuu

SEQ ID NO: 466380 - RNA, 32 nt, Human
gggggaggacgccgagcguugaggcaggggcc

SEQ ID NO: 466381 - RNA, 32 nt, Human
gggggaggacucugcugcuucuuaagcuccag

SEQ ID NO: 466382 - RNA, 32 nt, Human
gggggaggacugcccacccuuccagauccccg

SEQ ID NO: 466383 - RNA, 32 nt, Human
gggggaggagaagagagaagaaacuggagcag

SEQ ID NO: 466384 - RNA, 21 nt, Human
gggggaggagaagcagugccu

SEQ ID NO: 466385 - RNA, 32 nt, Human
gggggaggagacacuggcaggagaugugcugu

SEQ ID NO: 466386 - RNA, 32 nt, Human
gggggaggagauggggaaguggagccacccug

SEQ ID NO: 466387 - RNA, 32 nt, Human
gggggaggagccaagauggccgaauaggaaca

SEQ ID NO: 466388 - RNA, 32 nt, Human
gggggaggaggaagaagagaaggaagaggaga

SEQ ID NO: 466389 - RNA, 32 nt, Human
gggggaggaggaagaggggaaggaggaggaag

SEQ ID NO: 466390 - RNA, 32 nt, Human
gggggaggaggaggaggagaagguggagagga

SEQ ID NO: 466391 - RNA, 32 nt, Human
gggggaggaggaggaggaggaguucguggaug

SEQ ID NO: 466392 - RNA, 32 nt, Human
gggggaggagggagggaggaaaagaggaggag

SEQ ID NO: 466393 - RNA, 32 nt, Human
gggggaggagggccuggccucagucccgggug

SEQ ID NO: 466394 - RNA, 32 nt, Human
gggggaggaucacggggucaggagaucgagac

SEQ ID NO: 466395 - RNA, 32 nt, Human
gggggaggcagccacccugcucugccugccag

SEQ ID NO: 466396 - RNA, 32 nt, Human
gggggaggcagcugggaugggagccagcccca

SEQ ID NO: 466397 - RNA, 32 nt, Human
gggggaggcaggaggaugccugccuggacccu

SEQ ID NO: 466398 - RNA, 32 nt, Human
gggggaggcaggcgguggugacaggacagggu

SEQ ID NO: 466399 - RNA, 32 nt, Human
gggggaggcagggcacagggagaugcucaggg

SEQ ID NO: 466400 - RNA, 32 nt, Human
gggggaggcauucgcguuuccccaaaugagaa

SEQ ID NO: 466401 - RNA, 32 nt, Human
gggggaggccgaggcaggggcugggcagaggg

SEQ ID NO: 466402 - RNA, 21 nt, Human
gggggaggcgauaaagacaga

SEQ ID NO: 466403 - RNA, 32 nt, Human
gggggaggcgcugaagucggggcccgcccugu

SEQ ID NO: 466404 - RNA, 32 nt, Human
gggggaggcucccagcuacaccuugcuguccu

SEQ ID NO: 466405 - RNA, 20 nt, Human
gggggaggcucuggccccuc

SEQ ID NO: 466406 - RNA, 32 nt, Human
gggggaggcuggcugcugcccaccucucucgc

SEQ ID NO: 466407 - RNA, 32 nt, Human
gggggaggcugggagagguugggugcucuccu

SEQ ID NO: 466408 - RNA, 32 nt, Human
gggggagggaaagggagaggggaagggcaggg

SEQ ID NO: 466409 - RNA, 32 nt, Human
gggggagggaaagugggccaguggggaggggg

SEQ ID NO: 466410 - RNA, 32 nt, Human
gggggagggacugacuguacucauggcuaacu

SEQ ID NO: 466411 - RNA, 32 nt, Human
gggggagggagaggagauuccuggagaggaac

SEQ ID NO: 466412 - RNA, 32 nt, Human
gggggagggaggagguuccgucagcagcuggc

SEQ ID NO: 466413 - RNA, 32 nt, Human
gggggagggaggcagugguggcuggagggugc

SEQ ID NO: 466414 - RNA, 32 nt, Human
gggggagggagggagacgugaagccuauuuaa

SEQ ID NO: 466415 - RNA, 32 nt, Human
gggggagggagggcauuguggggaaggagagg

SEQ ID NO: 466416 - RNA, 32 nt, Human
gggggagggagguggagggagggaaggguuuc

SEQ ID NO: 466417 - RNA, 32 nt, Human
gggggagggaggugggccaccauguuuggacc

SEQ ID NO: 466418 - RNA, 32 nt, Human
gggggagggaguggcucggaaggggcccccac

SEQ ID NO: 466419 - RNA, 32 nt, Human
gggggagggaugaccagcucucagggacccag

SEQ ID NO: 466420 - RNA, 32 nt, Human
gggggagggcagcucugggcacgccgcaccca

SEQ ID NO: 466421 - RNA, 32 nt, Human
gggggagggcggucuucccacuuccucuccag

SEQ ID NO: 466422 - RNA, 32 nt, Human
gggggagggcugggacuguuucguuucugcuu

SEQ ID NO: 466423 - RNA, 32 nt, Human
gggggagggcuggggcaaaucgccaccugugc

SEQ ID NO: 466424 - RNA, 32 nt, Human
gggggagggcuggggcuuucucugccugguac

SEQ ID NO: 466425 - RNA, 32 nt, Human
gggggaggggaagaagaaggccucacuuuugc

SEQ ID NO: 466426 - RNA, 16 nt, Human
gggggaggggaggcga

SEQ ID NO: 466427 - RNA, 32 nt, Human
gggggagggggaggagaaggggcaguugugac

SEQ ID NO: 466428 - RNA, 32 nt, Human
gggggagggggagggggaguggcaguguguuc

SEQ ID NO: 466429 - RNA, 32 nt, Human
gggggagggggcucagccccuccaccccuccc

SEQ ID NO: 466430 - RNA, 32 nt, Human
gggggaggguaggaggugggaggcagauacuu

SEQ ID NO: 466431 - RNA, 32 nt, Human
gggggagggugcagaugagggagcgacccaga

SEQ ID NO: 466432 - RNA, 32 nt, Human
gggggagguagggaagaaugagcugaauuugu

SEQ ID NO: 466433 - RNA, 32 nt, Human
gggggaggugauguaguuacagcugacuaaua

SEQ ID NO: 466434 - RNA, 32 nt, Human
gggggaguccacccucuccuugaugcagcuug

SEQ ID NO: 466435 - RNA, 31 nt, Human
gggggaguccuggaaagauggggcggacuga

SEQ ID NO: 466436 - RNA, 32 nt, Human
gggggagucgugcgugucagauuuaggccagg

SEQ ID NO: 466437 - RNA, 32 nt, Human
gggggagucugaagcagaugcaaagaggcaag

SEQ ID NO: 466438 - RNA, 32 nt, Human
gggggaguggggagccaagaggucccauauuc

SEQ ID NO: 466439 - RNA, 32 nt, Human
gggggauaaggaaaggaagugggcguuugagg

SEQ ID NO: 466440 - RNA, 32 nt, Human
gggggauaaggguguuuaaccaccucccaacu

SEQ ID NO: 466441 - RNA, 32 nt, Human
gggggauaaggguguuuaaccaccucccagcu

SEQ ID NO: 466442 - RNA, 32 nt, Human
gggggauagcaccccuguccuccugaggcaga

SEQ ID NO: 466443 - RNA, 32 nt, Human
gggggauauauguaugugugugugcgugcaua

SEQ ID NO: 466444 - RNA, 32 nt, Human
gggggaucacaaggucaggagaucgagaccau

SEQ ID NO: 466445 - RNA, 32 nt, Human
gggggaucccuaauauccccagccccagccag

SEQ ID NO: 466446 - RNA, 32 nt, Human
gggggaucccuggccgcgcauccucuggaggc

SEQ ID NO: 466447 - RNA, 32 nt, Human
gggggaucgcgccuggcagaccccagaccgag

SEQ ID NO: 466448 - RNA, 31 nt, Human
gggggaucgcuggagcccaugccagguuacg

SEQ ID NO: 466449 - RNA, 21 nt, Human
gggggaucgcuugagcccagg

SEQ ID NO: 466450 - RNA, 32 nt, Human
gggggaucucccagaauauuugaaccugguua

SEQ ID NO: 466451 - RNA, 32 nt, Human
gggggaucugaggcugugucucugccuugucu

SEQ ID NO: 466452 - RNA, 32 nt, Human
gggggaucuguuguguacguggagagggauga

SEQ ID NO: 466453 - RNA, 32 nt, Human
gggggaucuuaguugcuuauuuguuuugacuc

SEQ ID NO: 466454 - RNA, 31 nt, Human
gggggaugaaaucucccuuccuaagucuuug

SEQ ID NO: 466455 - RNA, 32 nt, Human
gggggaugaggauauggcagggaagcuuucac

SEQ ID NO: 466456 - RNA, 32 nt, Human
gggggaugccccuggcaugggguggguggagg

SEQ ID NO: 466457 - RNA, 32 nt, Human
gggggauggaaagggagaaauggaagggaaaa

SEQ ID NO: 466458 - RNA, 32 nt, Human
gggggauggaguuucgcuguuguugcccaggc

SEQ ID NO: 466459 - RNA, 18 nt, Human
gggggauggccaaggggu

SEQ ID NO: 466460 - RNA, 32 nt, Human
gggggauggcuugggccuuuucucucaaccuu

SEQ ID NO: 466461 - RNA, 32 nt, Human
gggggaugggagaagagggaaggggccucaga

SEQ ID NO: 466462 - RNA, 32 nt, Human
gggggaugggccuugcccucuucucuuuuccc

SEQ ID NO: 466463 - RNA, 32 nt, Human
gggggauggggugggagaggguuaauugguau

SEQ ID NO: 466464 - RNA, 32 nt, Human
gggggauggguagaggaugacuggcacacuug

SEQ ID NO: 466465 - RNA, 32 nt, Human
gggggaugguaagagaaaagagagaaacacug

SEQ ID NO: 466466 - RNA, 32 nt, Human
gggggauguggagacugagcuguggagagugu

SEQ ID NO: 466467 - RNA, 32 nt, Human
gggggaugugugugugaggugugcacaccccc

SEQ ID NO: 466468 - RNA, 32 nt, Human
gggggauguuuccaauggugggcagccuggcc

SEQ ID NO: 466469 - RNA, 21 nt, Human
gggggauuacuucagcccagg

SEQ ID NO: 466470 - RNA, 32 nt, Human
gggggauucugagcagugccucuugucugagg

SEQ ID NO: 466471 - RNA, 21 nt, Human
gggggauugcuugaguccagg

SEQ ID NO: 466472 - RNA, 32 nt, Human
gggggauuggagguggguguuagugguuagaa

SEQ ID NO: 466473 - RNA, 32 nt, Human
gggggauuguagcagacgucugggcuuuuccc

SEQ ID NO: 466474 - RNA, 32 nt, Human
gggggauuuaccugaccagccaccccauagcc

SEQ ID NO: 466475 - RNA, 19 nt, Human
gggggcaaaacccagugga

SEQ ID NO: 466476 - RNA, 25 nt, Human
gggggcaaaaggcgccauugggcgg

SEQ ID NO: 466477 - RNA, 32 nt, Human
gggggcaaagccucaguuccacugccuuccuc

SEQ ID NO: 466478 - RNA, 32 nt, Human
gggggcaagagcccaggagacugugugguuug

SEQ ID NO: 466479 - RNA, 32 nt, Human
gggggcaauaaaccgagccacccgggcgucca

SEQ ID NO: 466480 - RNA, 19 nt, Human
gggggcacacuauauucca

SEQ ID NO: 466481 - RNA, 32 nt, Human
gggggcacacuauauuccaccacuuuggagac

SEQ ID NO: 466482 - RNA, 32 nt, Human
gggggcacagagagaacaacauuccucucugu

SEQ ID NO: 466483 - RNA, 32 nt, Human
gggggcacagcacagaccccagagccaggaac

SEQ ID NO: 466484 - RNA, 32 nt, Human
gggggcacagggaggggcagcgagcagguggg

SEQ ID NO: 466485 - RNA, 32 nt, Human
gggggcacagugguguguagugcugcugugua

SEQ ID NO: 466486 - RNA, 32 nt, Human
gggggcaccaugugugccuuugcccacguguc

SEQ ID NO: 466487 - RNA, 32 nt, Human
gggggcaccgcgaagguggaggcggggccgcg

SEQ ID NO: 466488 - RNA, 19 nt, Human
gggggcaccgcgcgggugc

SEQ ID NO: 466489 - RNA, 17 nt, Human
gggggcaccgcguucca

SEQ ID NO: 466490 - RNA, 32 nt, Human
gggggcaccugggggucagagaacaaaugacg

SEQ ID NO: 466491 - RNA, 19 nt, Human
gggggcacucggacaucua

SEQ ID NO: 466492 - RNA, 32 nt, Human
gggggcacugagccuccagacccugcuaacca

SEQ ID NO: 466493 - RNA, 20 nt, Human
gggggcacuggcucauucca

SEQ ID NO: 466494 - RNA, 32 nt, Human
gggggcacuggcugcuucuguauuuugggguu

SEQ ID NO: 466495 - RNA, 18 nt, Human
gggggcacuuuucaucca

SEQ ID NO: 466496 - RNA, 32 nt, Human
gggggcagagagaaggucugaguccggggcag

SEQ ID NO: 466497 - RNA, 32 nt, Human
gggggcagagggcuuucagcgcccccaggccu

SEQ ID NO: 466498 - RNA, 32 nt, Human
gggggcagaguccuaggaugaggcuugggcag

SEQ ID NO: 466499 - RNA, 22 nt, Human
gggggcagcaagccagcugcgg

SEQ ID NO: 466500 - RNA, 24 nt, Human
gggggcagcaaggaugcagucucc

SEQ ID NO: 466501 - RNA, 32 nt, Human
gggggcagcaggcaggccccagccucugaacu

SEQ ID NO: 466502 - RNA, 32 nt, Human
gggggcagccaagaagccggagcuggcagcau

SEQ ID NO: 466503 - RNA, 32 nt, Human
gggggcagccugcucuccuccuggggcccugu

SEQ ID NO: 466504 - RNA, 32 nt, Human
gggggcagcgagcuccagcccucggcgguggc

SEQ ID NO: 466505 - RNA, 32 nt, Human
gggggcagcggcgccgcagccugggcuggcgg

SEQ ID NO: 466506 - RNA, 23 nt, Human
gggggcagcgguggggagggagg

SEQ ID NO: 466507 - RNA, 31 nt, Human
gggggcagcugugccaaucuaccucacaggc

SEQ ID NO: 466508 - RNA, 31 nt, Human
gggggcaggaaacuaccucuggcuuaauucu

SEQ ID NO: 466509 - RNA, 32 nt, Human
gggggcaggaaccuggggaggggcccagagca

SEQ ID NO: 466510 - RNA, 23 nt, Human
gggggcaggaaggcagggguggg

SEQ ID NO: 466511 - RNA, 32 nt, Human
gggggcaggacugaaguauggaagagcaucau

SEQ ID NO: 466512 - RNA, 32 nt, Human
gggggcaggagaagcccgggagaggcccacug

SEQ ID NO: 466513 - RNA, 32 nt, Human
gggggcaggagaucccuucaagaggcugcacc

SEQ ID NO: 466514 - RNA, 32 nt, Human
gggggcaggaggagagaggaaaagggagggcg

SEQ ID NO: 466515 - RNA, 32 nt, Human
gggggcaggagguggacaucuuugggggacau

SEQ ID NO: 466516 - RNA, 32 nt, Human
gggggcaggauggcggaaaggaaggggcgugg

SEQ ID NO: 466517 - RNA, 32 nt, Human
gggggcaggcccacccuccucuuugcgcccuu

SEQ ID NO: 466518 - RNA, 32 nt, Human
gggggcagggaccauggcagagcgagaguucu

SEQ ID NO: 466519 - RNA, 32 nt, Human
gggggcagggagcaauccagcaggaaggccag

SEQ ID NO: 466520 - RNA, 32 nt, Human
gggggcagggagcaguguugggagagggcucc

SEQ ID NO: 466521 - RNA, 23 nt, Human
gggggcagggcagcagagggagg

SEQ ID NO: 466522 - RNA, 32 nt, Human
gggggcagggccagggcagggaggcuuccagc

SEQ ID NO: 466523 - RNA, 21 nt, Human
gggggcagggcccgggggcgg

SEQ ID NO: 466524 - RNA, 32 nt, Human
gggggcaggggcgggcgcgggagcagcccagg

SEQ ID NO: 466525 - RNA, 32 nt, Human
gggggcagggggcagagagcagagaggagcgg

SEQ ID NO: 466526 - RNA, 21 nt, Human
gggggcagggggugagggagg

SEQ ID NO: 466527 - RNA, 32 nt, Human
gggggcaggggugggaggaagacaaagaaauu

SEQ ID NO: 466528 - RNA, 32 nt, Human
gggggcaggguuccgcucugucaucugucacc

SEQ ID NO: 466529 - RNA, 32 nt, Human
gggggcaggugugggagcacagcuggaacaau

SEQ ID NO: 466530 - RNA, 32 nt, Human
gggggcagugagagagagcuggaaaggggcaa

SEQ ID NO: 466531 - RNA, 20 nt, Human
gggggcaguuccucagguca

SEQ ID NO: 466532 - RNA, 32 nt, Human
gggggcauccugcaggggcucccaccagagcc

SEQ ID NO: 466533 - RNA, 32 nt, Human
gggggcaugagacacacagggaggcuggggcu

SEQ ID NO: 466534 - RNA, 32 nt, Human
gggggcaugcuggccucugagcgaucaggcga

SEQ ID NO: 466535 - RNA, 32 nt, Human
gggggcauggaggccaggucucaguccgcgcu

SEQ ID NO: 466536 - RNA, 19 nt, Human
gggggcauugugacaccca

SEQ ID NO: 466537 - RNA, 32 nt, Human
gggggcauuugguggagguaccccaaacucga

SEQ ID NO: 466538 - RNA, 32 nt, Human
gggggccaacaggguaccagagccaagacccu

SEQ ID NO: 466539 - RNA, 23 nt, Human
gggggccaaggaugccccguccc

SEQ ID NO: 466540 - RNA, 32 nt, Human
gggggccaaggcaggagaauugcuugagccug

SEQ ID NO: 466541 - RNA, 32 nt, Human
gggggccacaggccucuagcugugcugcucaa

SEQ ID NO: 466542 - RNA, 32 nt, Human
gggggccacgcaagugugggugugugagugug

SEQ ID NO: 466543 - RNA, 23 nt, Human
gggggccacgccugcacaucucc

SEQ ID NO: 466544 - RNA, 18 nt, Human
gggggccacgcgggccgg

SEQ ID NO: 466545 - RNA, 32 nt, Human
gggggccacugaaaccaggccuaggagggaga

SEQ ID NO: 466546 - RNA, 32 nt, Human
gggggccacuguagugagcguggagaaauuug

SEQ ID NO: 466547 - RNA, 32 nt, Human
gggggccagaggagcuucucuccucugggcgc

SEQ ID NO: 466548 - RNA, 31 nt, Human
gggggccagaguagcugauguaggaguacug

SEQ ID NO: 466549 - RNA, 32 nt, Human
gggggccagaguagcugauguaggaguacugg

SEQ ID NO: 466550 - RNA, 32 nt, Human
gggggccagaucugccugcuguuuccaugggu

SEQ ID NO: 466551 - RNA, 32 nt, Human
gggggccagcagcagguaggugccaucaggga

SEQ ID NO: 466552 - RNA, 32 nt, Human
gggggccagcaggauggaggaaagcauggaag

SEQ ID NO: 466553 - RNA, 24 nt, Human
gggggccagcccuggauagguuuu

SEQ ID NO: 466554 - RNA, 26 nt, Human
gggggccagcgggagcagggccugca

SEQ ID NO: 466555 - RNA, 20 nt, Human
gggggccaggaaccagcucc

SEQ ID NO: 466556 - RNA, 24 nt, Human
gggggccaggcccugcacgucucu

SEQ ID NO: 466557 - RNA, 32 nt, Human
gggggccagggacaguggaggaagggcccaug

SEQ ID NO: 466558 - RNA, 32 nt, Human
gggggccagggccugggcuuuacucaauugca

SEQ ID NO: 466559 - RNA, 32 nt, Human
gggggccaguccugcacccaccucuaccccuc

SEQ ID NO: 466560 - RNA, 32 nt, Human
gggggccaguggggccagcucagggaggaccu

SEQ ID NO: 466561 - RNA, 32 nt, Human
gggggccaucaguaaaauuaagaggaauuuuu

SEQ ID NO: 466562 - RNA, 32 nt, Human
gggggccauggagcugcuaaagcugaaccgga

SEQ ID NO: 466563 - RNA, 32 nt, Human
gggggcccagcaaucuucccaccccagacguc

SEQ ID NO: 466564 - RNA, 32 nt, Human
gggggcccagcccaaaguucuugucaccuccu

SEQ ID NO: 466565 - RNA, 32 nt, Human
gggggcccagccgguaucccaggucucccuuc

SEQ ID NO: 466566 - RNA, 22 nt, Human
gggggcccauguccacaucucc

SEQ ID NO: 466567 - RNA, 32 nt, Human
gggggccccaauggagcauggaagaugacccc

SEQ ID NO: 466568 - RNA, 32 nt, Human
gggggccccaggagguagagauucugggaaug

SEQ ID NO: 466569 - RNA, 32 nt, Human
gggggcccccuucucugguucagcccccacgc

SEQ ID NO: 466570 - RNA, 20 nt, Human
gggggccccgggagguugaa

SEQ ID NO: 466571 - RNA, 17 nt, Human
gggggccccucagguca

SEQ ID NO: 466572 - RNA, 32 nt, Human
gggggccccucuccccacuccuggggcagcuc

SEQ ID NO: 466573 - RNA, 32 nt, Human
gggggccccugccggagccucagacacacugg

SEQ ID NO: 466574 - RNA, 32 nt, Human
gggggccccuuguggaccucacccagccagag

SEQ ID NO: 466575 - RNA, 32 nt, Human
gggggcccggucgccaggcaaaaagcccucca

SEQ ID NO: 466576 - RNA, 32 nt, Human
gggggcccugcaggagucugugcugggcucuc

SEQ ID NO: 466577 - RNA, 32 nt, Human
gggggcccugcucgccccucgccagggggacu

SEQ ID NO: 466578 - RNA, 32 nt, Human
gggggcccugcucuucuggcccgucucccgga

SEQ ID NO: 466579 - RNA, 32 nt, Human
gggggccgaccccugcgggcucagggcucuuu

SEQ ID NO: 466580 - RNA, 21 nt, Human
gggggccgagcggcgggccgg

SEQ ID NO: 466581 - RNA, 22 nt, Human
gggggccgagcucgcgcgccgc

SEQ ID NO: 466582 - RNA, 24 nt, Human
gggggccgcagucgagguccgcag

SEQ ID NO: 466583 - RNA, 18 nt, Human
gggggccgccccgggccg

SEQ ID NO: 466584 - RNA, 32 nt, Human
gggggccgcccggucgucaccugcacucaucu

SEQ ID NO: 466585 - RNA, 22 nt, Human
gggggccgccgcggcccugcag

SEQ ID NO: 466586 - RNA, 32 nt, Human
gggggccgcggagcgcuggggagcagcggccg

SEQ ID NO: 466587 - RNA, 32 nt, Human
gggggccgcgggagcccccacccggggagaug

SEQ ID NO: 466588 - RNA, 32 nt, Human
gggggccgcucccagccagccacugggaccag

SEQ ID NO: 466589 - RNA, 32 nt, Human
gggggccggaaccuggccccggggagggcgcg

SEQ ID NO: 466590 - RNA, 19 nt, Human
gggggccggacagccugca

SEQ ID NO: 466591 - RNA, 32 nt, Human
gggggccggcagcuggagcccaaagcaggcgg

SEQ ID NO: 466592 - RNA, 18 nt, Human
gggggccggcgggggcgg

SEQ ID NO: 466593 - RNA, 21 nt, Human
gggggccgggccguccuccag

SEQ ID NO: 466594 - RNA, 23 nt, Human
gggggccgggcggugcgcugcag

SEQ ID NO: 466595 - RNA, 32 nt, Human
gggggccggggcaggagaaucgcuugaaccug

SEQ ID NO: 466596 - RNA, 25 nt, Human
gggggccggggcccggcgcaucucc

SEQ ID NO: 466597 - RNA, 21 nt, Human
gggggccggguucaccagcag

SEQ ID NO: 466598 - RNA, 23 nt, Human
gggggccggguuugggcccucag

SEQ ID NO: 466599 - RNA, 32 nt, Human
gggggccgugcacaccccaaacccugagcuuc

SEQ ID NO: 466600 - RNA, 22 nt, Human
gggggccguggggggccuggag

SEQ ID NO: 466601 - RNA, 32 nt, Human
gggggccuaaagcgacagucucaggggccauc

SEQ ID NO: 466602 - RNA, 32 nt, Human
gggggccucaacccucuccuggagcgccugug

SEQ ID NO: 466603 - RNA, 32 nt, Human
gggggccucacugcagccgccgcugcuguugg

SEQ ID NO: 466604 - RNA, 32 nt, Human
gggggccucacugccuuguuggucuccaccuu

SEQ ID NO: 466605 - RNA, 32 nt, Human
gggggccucagccugcccugaagucccgccag

SEQ ID NO: 466606 - RNA, 32 nt, Human
gggggccuccccugcuaucccuccucccaucc

SEQ ID NO: 466607 - RNA, 26 nt, Human
gggggccucgggagggugaaaggagg

SEQ ID NO: 466608 - RNA, 32 nt, Human
gggggccucuccucacucagagggugaugggg

SEQ ID NO: 466609 - RNA, 32 nt, Human
gggggccucuucuuccuccccugggccguccc

SEQ ID NO: 466610 - RNA, 32 nt, Human
gggggccugaccucccccuccuucccagcugc

SEQ ID NO: 466611 - RNA, 32 nt, Human
gggggccugcgaaguggaggggagacgggcag

SEQ ID NO: 466612 - RNA, 32 nt, Human
gggggccuggacugcacggcccggcagcaggu

SEQ ID NO: 466613 - RNA, 32 nt, Human
gggggccuggaggagggcaggagccgcgggag

SEQ ID NO: 466614 - RNA, 32 nt, Human
gggggccuggcaggcggcccacgggcagcugg

SEQ ID NO: 466615 - RNA, 32 nt, Human
gggggccuggcgggggcauccggcggagcugg

SEQ ID NO: 466616 - RNA, 32 nt, Human
gggggccugggcugccccugacaccccuucug

SEQ ID NO: 466617 - RNA, 32 nt, Human
gggggccuggucaguggaggccuaggccauca

SEQ ID NO: 466618 - RNA, 17 nt, Human
gggggccuguaauccca

SEQ ID NO: 466619 - RNA, 32 nt, Human
gggggccuguaaucccagcuacucaggaggcu

SEQ ID NO: 466620 - RNA, 32 nt, Human
gggggccuguaauccuagcuacuuggggugcu

SEQ ID NO: 466621 - RNA, 20 nt, Human
gggggcgaacgcagcacaga

SEQ ID NO: 466622 - RNA, 21 nt, Human
gggggcgacguggcgggucgg

SEQ ID NO: 466623 - RNA, 32 nt, Human
gggggcgagagggaagugggcgggagccgcga

SEQ ID NO: 466624 - RNA, 32 nt, Human
gggggcgagcggacaggaagaugaagggagca

SEQ ID NO: 466625 - RNA, 18 nt, Human
gggggcgagcgggcccgg

SEQ ID NO: 466626 - RNA, 32 nt, Human
gggggcgcaggcggagagcgcagggcggggag

SEQ ID NO: 466627 - RNA, 32 nt, Human
gggggcgccaaggagccagggggaaaaccaag

SEQ ID NO: 466628 - RNA, 32 nt, Human
gggggcgccauggacgaggccgugggcgaccu

SEQ ID NO: 466629 - RNA, 21 nt, Human
gggggcgccgagccgaggccg

SEQ ID NO: 466630 - RNA, 32 nt, Human
gggggcgccgcgccccucacaccaacgcguag

SEQ ID NO: 466631 - RNA, 19 nt, Human
gggggcgccggggggccgg

SEQ ID NO: 466632 - RNA, 20 nt, Human
gggggcgcgaggcgggggcg

SEQ ID NO: 466633 - RNA, 24 nt, Human
gggggcgcgcugagacggcgggug

SEQ ID NO: 466634 - RNA, 32 nt, Human
gggggcgcgcugccuucugccuggaaguguug

SEQ ID NO: 466635 - RNA, 21 nt, Human
gggggcgcuggcgggccgcgg

SEQ ID NO: 466636 - RNA, 21 nt, Human
gggggcgcugggcaggggcgg

SEQ ID NO: 466637 - RNA, 18 nt, Human
gggggcgcuuccugugga

SEQ ID NO: 466638 - RNA, 19 nt, Human
gggggcggaagcgggagcg

SEQ ID NO: 466639 - RNA, 23 nt, Human
gggggcggaagggcggcgggcgg

SEQ ID NO: 466640 - RNA, 21 nt, Human
gggggcggagccagcgggcgg

SEQ ID NO: 466641 - RNA, 24 nt, Human
gggggcggaggcggcgggccacgg

SEQ ID NO: 466642 - RNA, 32 nt, Human
gggggcggaggcgggagugagaggagaaggga

SEQ ID NO: 466643 - RNA, 23 nt, Human
gggggcggcaggagcagaagcgg

SEQ ID NO: 466644 - RNA, 23 nt, Human
gggggcggccccgggugggcgcg

SEQ ID NO: 466645 - RNA, 32 nt, Human
gggggcggccgagagcgaggaggacuuccugc

SEQ ID NO: 466646 - RNA, 21 nt, Human
gggggcggccggaggaugcgg

SEQ ID NO: 466647 - RNA, 24 nt, Human
gggggcggccggcggcgaaggggg

SEQ ID NO: 466648 - RNA, 21 nt, Human
gggggcggccggcgggggcgg

SEQ ID NO: 466649 - RNA, 20 nt, Human
gggggcggcgcagcgggcgg

SEQ ID NO: 466650 - RNA, 22 nt, Human
gggggcggcgcgaacggcgcgg

SEQ ID NO: 466651 - RNA, 23 nt, Human
gggggcggcgcgcaggagggagg

SEQ ID NO: 466652 - RNA, 21 nt, Human
gggggcggcgcggcggcgcgg

SEQ ID NO: 466653 - RNA, 17 nt, Human
gggggcggcggcugcgg

SEQ ID NO: 466654 - RNA, 21 nt, Human
gggggcggcggcugcgggcgc

SEQ ID NO: 466655 - RNA, 32 nt, Human
gggggcggcgggggcgggccagcuggacgggc

SEQ ID NO: 466656 - RNA, 20 nt, Human
gggggcggcugcagcugcug

SEQ ID NO: 466657 - RNA, 19 nt, Human
gggggcgggaaggaggggc

SEQ ID NO: 466658 - RNA, 32 nt, Human
gggggcgggacagggucucucuccgucuccca

SEQ ID NO: 466659 - RNA, 24 nt, Human
gggggcgggacggggcgggggcgg

SEQ ID NO: 466660 - RNA, 32 nt, Human
gggggcgggacugggcugggccugcggugagc

SEQ ID NO: 466661 - RNA, 24 nt, Human
gggggcgggagcagcgcggggcgg

SEQ ID NO: 466662 - RNA, 19 nt, Human
gggggcgggagcggaggug

SEQ ID NO: 466663 - RNA, 21 nt, Human
gggggcgggcaggcggacggg

SEQ ID NO: 466664 - RNA, 17 nt, Human
gggggcgggcaggugca

SEQ ID NO: 466665 - RNA, 22 nt, Human
gggggcgggccgagcggggcgg

SEQ ID NO: 466666 - RNA, 21 nt, Human
gggggcgggccgagggcgcgg

SEQ ID NO: 466667 - RNA, 21 nt, Human
gggggcgggcgcggggcgcgg

SEQ ID NO: 466668 - RNA, 32 nt, Human
gggggcgggcuggagggagggggcgggcgcug

SEQ ID NO: 466669 - RNA, 32 nt, Human
gggggcgggcugggagggcugucggugggcca

SEQ ID NO: 466670 - RNA, 23 nt, Human
gggggcggggaccggcaaggcgg

SEQ ID NO: 466671 - RNA, 24 nt, Human
gggggcggggcacgcaagugacgg

SEQ ID NO: 466672 - RNA, 24 nt, Human
gggggcggggcgagggcggagcgg

SEQ ID NO: 466673 - RNA, 32 nt, Human
gggggcggggcgaucgggucucagccccugcc

SEQ ID NO: 466674 - RNA, 20 nt, Human
gggggcggggcgcggcgcgc

SEQ ID NO: 466675 - RNA, 21 nt, Human
gggggcgggggccgagcgcgg

SEQ ID NO: 466676 - RNA, 21 nt, Human
gggggcgggggcggcaggagc

SEQ ID NO: 466677 - RNA, 21 nt, Human
gggggcggggggaagaugcgg

SEQ ID NO: 466678 - RNA, 23 nt, Human
gggggcggggggaggcggggcgg

SEQ ID NO: 466679 - RNA, 20 nt, Human
gggggcggggggagggcgcg

SEQ ID NO: 466680 - RNA, 32 nt, Human
gggggcgggguggaucacuugaggucaggggu

SEQ ID NO: 466681 - RNA, 32 nt, Human
gggggcgggucugagugguaccccggaggaga

SEQ ID NO: 466682 - RNA, 19 nt, Human
gggggcggguugggggugc

SEQ ID NO: 466683 - RNA, 20 nt, Human
gggggcgguaggauauuuua

SEQ ID NO: 466684 - RNA, 21 nt, Human
gggggcggucggaaggcgcgg

SEQ ID NO: 466685 - RNA, 19 nt, Human
gggggcggugaucagguca

SEQ ID NO: 466686 - RNA, 32 nt, Human
gggggcgguggaggccgugcagggaggcggga

SEQ ID NO: 466687 - RNA, 32 nt, Human
gggggcgguggagguggcggcggcagcggcaa

SEQ ID NO: 466688 - RNA, 23 nt, Human
gggggcgguggcucacaccugua

SEQ ID NO: 466689 - RNA, 32 nt, Human
gggggcguacggagguggcagcugugggagga

SEQ ID NO: 466690 - RNA, 32 nt, Human
gggggcguggugagucgcggucuguucucacg

SEQ ID NO: 466691 - RNA, 19 nt, Human
gggggcguguuccauucca

SEQ ID NO: 466692 - RNA, 32 nt, Human
gggggcuaaagaggaaggaggggaggaggucg

SEQ ID NO: 466693 - RNA, 23 nt, Human
gggggcuaaaguguauauauucc

SEQ ID NO: 466694 - RNA, 32 nt, Human
gggggcuaaggaugcaaccucugacguucugc

SEQ ID NO: 466695 - RNA, 32 nt, Human
gggggcuacaucugguaacgcccucagaagcc

SEQ ID NO: 466696 - RNA, 32 nt, Human
gggggcuagcugguggaggagguaagaguagc

SEQ ID NO: 466697 - RNA, 32 nt, Human
gggggcucagaucuuggcuucggguugagaug

SEQ ID NO: 466698 - RNA, 32 nt, Human
gggggcucagugccauggaagcuacuccaagu

SEQ ID NO: 466699 - RNA, 32 nt, Human
gggggcucccuauguugcccaggcuggucuca

SEQ ID NO: 466700 - RNA, 32 nt, Human
gggggcucccuggcgcaugccugcuccugucc

SEQ ID NO: 466701 - RNA, 32 nt, Human
gggggcuccgacuccagcucugggcaagaucc

SEQ ID NO: 466702 - RNA, 22 nt, Human
gggggcuccggcggcggcgcgg

SEQ ID NO: 466703 - RNA, 32 nt, Human
gggggcucggcggccaccgcugccucaaggga

SEQ ID NO: 466704 - RNA, 32 nt, Human
gggggcucucauccuccucggauucugaagag

SEQ ID NO: 466705 - RNA, 32 nt, Human
gggggcucucgauguagcaccaugacaggcau

SEQ ID NO: 466706 - RNA, 32 nt, Human
gggggcucugcagcugcccagcucuuccagcu

SEQ ID NO: 466707 - RNA, 32 nt, Human
gggggcucugcuccucuucauuugcugguagc

SEQ ID NO: 466708 - RNA, 32 nt, Human
gggggcucuggaaggaugggccagcuugcagg

SEQ ID NO: 466709 - RNA, 32 nt, Human
gggggcucuggaccaggaagauguucugacag

SEQ ID NO: 466710 - RNA, 18 nt, Human
gggggcucugggccccuu

SEQ ID NO: 466711 - RNA, 32 nt, Human
gggggcucuuccgccagcaccggaggaagaaa

SEQ ID NO: 466712 - RNA, 17 nt, Human
gggggcucuuccugcug

SEQ ID NO: 466713 - RNA, 32 nt, Human
gggggcugaaaccuuuugccaucagcgaacag

SEQ ID NO: 466714 - RNA, 32 nt, Human
gggggcugaauuccagcucacacacaccucaa

SEQ ID NO: 466715 - RNA, 22 nt, Human
gggggcugaccccagcuuccag

SEQ ID NO: 466716 - RNA, 32 nt, Human
gggggcugagcuccagcacugggcaggcacag

SEQ ID NO: 466717 - RNA, 32 nt, Human
gggggcugaggcaggagaaucgcuugaaccug

SEQ ID NO: 466718 - RNA, 32 nt, Human
gggggcugaggcaggagaauugcuugaaccug

SEQ ID NO: 466719 - RNA, 32 nt, Human
gggggcugaggcaggaggaucaguugaacgug

SEQ ID NO: 466720 - RNA, 32 nt, Human
gggggcugaggcaggaggaucgcuugaaccca

SEQ ID NO: 466721 - RNA, 32 nt, Human
gggggcugaggcaggaggaucgcuugaaccug

SEQ ID NO: 466722 - RNA, 32 nt, Human
gggggcugaggcaggcagaucgcuugagcuca

SEQ ID NO: 466723 - RNA, 32 nt, Human
gggggcugaggcaugagaaucacuugaaccug

SEQ ID NO: 466724 - RNA, 32 nt, Human
gggggcugaggcgggaggauugcuugagccug

SEQ ID NO: 466725 - RNA, 32 nt, Human
gggggcugagguaaaagaauugcuugaacccg

SEQ ID NO: 466726 - RNA, 32 nt, Human
gggggcugcaccugccugccuuugccuaaggc

SEQ ID NO: 466727 - RNA, 32 nt, Human
gggggcugcauucuuguugguagcauguacuc

SEQ ID NO: 466728 - RNA, 32 nt, Human
gggggcugcccagcuggacagauggcuuccug

SEQ ID NO: 466729 - RNA, 21 nt, Human
gggggcugcccccggggccug

SEQ ID NO: 466730 - RNA, 32 nt, Human
gggggcugccugcacgcuccccuagccuacuc

SEQ ID NO: 466731 - RNA, 32 nt, Human
gggggcugcggaaugcgcgaggagaacaaggg

SEQ ID NO: 466732 - RNA, 19 nt, Human
gggggcugcguccaggccg

SEQ ID NO: 466733 - RNA, 24 nt, Human
gggggcugcugaacccagcaccag

SEQ ID NO: 466734 - RNA, 21 nt, Human
gggggcugcuucccgccccag

SEQ ID NO: 466735 - RNA, 22 nt, Human
gggggcuggcacaauagcccag

SEQ ID NO: 466736 - RNA, 24 nt, Human
gggggcuggcagagccacacccca

SEQ ID NO: 466737 - RNA, 18 nt, Human
gggggcuggcagcugcgg

SEQ ID NO: 466738 - RNA, 19 nt, Human
gggggcuggcagggcucca

SEQ ID NO: 466739 - RNA, 22 nt, Human
gggggcuggcaucccagcucca

SEQ ID NO: 466740 - RNA, 24 nt, Human
gggggcuggcccagggcccugcag

SEQ ID NO: 466741 - RNA, 19 nt, Human
gggggcuggcgggggccgg

SEQ ID NO: 466742 - RNA, 24 nt, Human
gggggcuggcucugagagccccag

SEQ ID NO: 466743 - RNA, 32 nt, Human
gggggcuggcucugcuggccgucacgagcacu

SEQ ID NO: 466744 - RNA, 32 nt, Human
gggggcugggaaggacccccacccucaauuuu

SEQ ID NO: 466745 - RNA, 32 nt, Human
gggggcugggagaggaaauuagaggggaggcg

SEQ ID NO: 466746 - RNA, 32 nt, Human
gggggcugggcagaggguggaggagguccugc

SEQ ID NO: 466747 - RNA, 19 nt, Human
gggggcugggcggaggcgg

SEQ ID NO: 466748 - RNA, 32 nt, Human
gggggcugggcuggagugagagagaggcaggu

SEQ ID NO: 466749 - RNA, 32 nt, Human
gggggcugggcuggggguuagggcugggacug

SEQ ID NO: 466750 - RNA, 32 nt, Human
gggggcuggggacugcagccccacucccgccc

SEQ ID NO: 466751 - RNA, 18 nt, Human
gggggcugggggcagcag

SEQ ID NO: 466752 - RNA, 22 nt, Human
gggggcugggucggcagcccag

SEQ ID NO: 466753 - RNA, 32 nt, Human
gggggcuggucuucagcucuggcgccuucauc

SEQ ID NO: 466754 - RNA, 32 nt, Human
gggggcugguggccgucuccacucccuaggca

SEQ ID NO: 466755 - RNA, 32 nt, Human
gggggcuguaggaggaggcagggauuccaggg

SEQ ID NO: 466756 - RNA, 21 nt, Human
gggggcuguccagagcugcag

SEQ ID NO: 466757 - RNA, 32 nt, Human
gggggcugugccaaccuguucuuagaguguag

SEQ ID NO: 466758 - RNA, 24 nt, Human
gggggcugugcuagggaccugcag

SEQ ID NO: 466759 - RNA, 18 nt, Human
gggggcuguggccgucag

SEQ ID NO: 466760 - RNA, 32 nt, Human
gggggcuuccaccauucccagaacugaucaaa

SEQ ID NO: 466761 - RNA, 32 nt, Human
gggggcuuccuggucugugcuuuacuuggcuu

SEQ ID NO: 466762 - RNA, 32 nt, Human
gggggcuucugaacuuggacuccugggaacau

SEQ ID NO: 466763 - RNA, 27 nt, Human
gggggcuucugagggaugcucaucuuu

SEQ ID NO: 466764 - RNA, 32 nt, Human
gggggcuucugaugccugguccaaggcucuua

SEQ ID NO: 466765 - RNA, 32 nt, Human
gggggcuugcccacugccugccuccccuccgc

SEQ ID NO: 466766 - RNA, 32 nt, Human
gggggcuuggagaagggcggagcccaccagcc

SEQ ID NO: 466767 - RNA, 16 nt, Human
gggggcuugggucuga

SEQ ID NO: 466768 - RNA, 32 nt, Human
gggggcuuugcaccuggagggaagcccaccug

SEQ ID NO: 466769 - RNA, 32 nt, Human
gggggcuuugggcauggaggaggcagaagagg

SEQ ID NO: 466770 - RNA, 32 nt, Human
gggggcuuugucuuggcugagccacaucucuc

SEQ ID NO: 466771 - RNA, 21 nt, Human
ggggggagggguggugcugcu

SEQ ID NO: 466772 - RNA, 21 nt, Human
ggggggagucucacagugccu

SEQ ID NO: 466773 - RNA, 22 nt, Human
ggggggaucacuugagcccagg

SEQ ID NO: 466774 - RNA, 20 nt, Human
ggggggcgagcggacaggaa

SEQ ID NO: 466775 - RNA, 22 nt, Human
ggggggugaucaccugagguca

SEQ ID NO: 466776 - RNA, 24 nt, Human
ggggggugggugggaucggugggg

SEQ ID NO: 466777 - RNA, 32 nt, Human
ggggguaaaaugcagaggugguugccugaagg

SEQ ID NO: 466778 - RNA, 32 nt, Human
ggggguaacagucugcaucaucaucacaaccu

SEQ ID NO: 466779 - RNA, 32 nt, Human
ggggguaaggccaagacuggguagauuuuaaa

SEQ ID NO: 466780 - RNA, 32 nt, Human
ggggguaccacagccagaccuaggggccuggg

SEQ ID NO: 466781 - RNA, 32 nt, Human
ggggguacucagaaagaggagccgcagaguuc

SEQ ID NO: 466782 - RNA, 32 nt, Human
ggggguacugaucuuuggaaaugucaguccug

SEQ ID NO: 466783 - RNA, 32 nt, Human
ggggguagaaggcagugagagcgugaggggga

SEQ ID NO: 466784 - RNA, 21 nt, Human
ggggguagagaugaggggagg

SEQ ID NO: 466785 - RNA, 23 nt, Human
ggggguaggagggacagagcuuu

SEQ ID NO: 466786 - RNA, 32 nt, Human
ggggguaggccugcugauucagaggguccucu

SEQ ID NO: 466787 - RNA, 32 nt, Human
ggggguaggcugggaccgucauuucuucugac

SEQ ID NO: 466788 - RNA, 25 nt, Human
ggggguagggggcggcaaagggagg

SEQ ID NO: 466789 - RNA, 32 nt, Human
ggggguagggggugacgcugaagaggaagagu

SEQ ID NO: 466790 - RNA, 21 nt, Human
ggggguagguuuggagggagg

SEQ ID NO: 466791 - RNA, 32 nt, Human
ggggguaugaggaggaggagggggaggagcaa

SEQ ID NO: 466792 - RNA, 32 nt, Human
gggggucaagacguccccugaggacccaggcc

SEQ ID NO: 466793 - RNA, 32 nt, Human
gggggucaagacuggaaacacacagaaaauag

SEQ ID NO: 466794 - RNA, 22 nt, Human
gggggucaagggauccacacuc

SEQ ID NO: 466795 - RNA, 32 nt, Human
gggggucacagccacagaguggaguuuuauug

SEQ ID NO: 466796 - RNA, 32 nt, Human
gggggucagacuccugaggcucucccuucccu

SEQ ID NO: 466797 - RNA, 32 nt, Human
gggggucagcuggucucaaaacuggccacugc

SEQ ID NO: 466798 - RNA, 32 nt, Human
gggggucaggcagaggccagccugcacuggag

SEQ ID NO: 466799 - RNA, 21 nt, Human
gggggucagggacgcagcucc

SEQ ID NO: 466800 - RNA, 32 nt, Human
gggggucagggugguuuugagagagcagggua

SEQ ID NO: 466801 - RNA, 18 nt, Human
ggggguccaggaggccgg

SEQ ID NO: 466802 - RNA, 32 nt, Human
ggggguccaggggacauccuggaaggcugggc

SEQ ID NO: 466803 - RNA, 32 nt, Human
ggggguccauguccaagagacccugacaagga

SEQ ID NO: 466804 - RNA, 32 nt, Human
ggggguccauuauaaaaccacccauuaggucu

SEQ ID NO: 466805 - RNA, 32 nt, Human
gggggucccacuguguuggccaaacuaguccc

SEQ ID NO: 466806 - RNA, 32 nt, Human
ggggguccccuucacauggccucaggcuuccc

SEQ ID NO: 466807 - RNA, 32 nt, Human
gggggucccugccuuagccccacacaaggcuu

SEQ ID NO: 466808 - RNA, 23 nt, Human
ggggguccgucccgagaagggag

SEQ ID NO: 466809 - RNA, 32 nt, Human
ggggguccucauucccuucuguaugacaggua

SEQ ID NO: 466810 - RNA, 32 nt, Human
ggggguccuccaggaccucagcugcacccauu

SEQ ID NO: 466811 - RNA, 32 nt, Human
ggggguccugacucacacuuacugcaaaggcu

SEQ ID NO: 466812 - RNA, 32 nt, Human
ggggguccugcucuucgucgugggcuucaucg

SEQ ID NO: 466813 - RNA, 32 nt, Human
ggggguccugguaugucucaccaggaaauucu

SEQ ID NO: 466814 - RNA, 32 nt, Human
ggggguccuguauccuggaguauuaugucucc

SEQ ID NO: 466815 - RNA, 32 nt, Human
gggggucucagggagcuucuccccagcgcugc

SEQ ID NO: 466816 - RNA, 32 nt, Human
gggggucuccagccagagacguugggugagac

SEQ ID NO: 466817 - RNA, 32 nt, Human
gggggucucccguuuccugugccugcaccagc

SEQ ID NO: 466818 - RNA, 18 nt, Human
gggggucucgcggggcgg

SEQ ID NO: 466819 - RNA, 32 nt, Human
gggggucugccauucccucccccaggccuucc

SEQ ID NO: 466820 - RNA, 32 nt, Human
gggggucugccugggccccuccugguguguca

SEQ ID NO: 466821 - RNA, 32 nt, Human
gggggucuggggcaucccuggagcucagaagc

SEQ ID NO: 466822 - RNA, 32 nt, Human
gggggucuguggauuucuaguuuaugauaaau

SEQ ID NO: 466823 - RNA, 32 nt, Human
gggggugagauaagcggccaugugaucccacc

SEQ ID NO: 466824 - RNA, 32 nt, Human
gggggugaggcagaggaucacuugagcccagg

SEQ ID NO: 466825 - RNA, 19 nt, Human
gggggugaucaccagggga

SEQ ID NO: 466826 - RNA, 21 nt, Human
gggggugaugaaaaggggagg

SEQ ID NO: 466827 - RNA, 20 nt, Human
gggggugauuggaagggagg

SEQ ID NO: 466828 - RNA, 32 nt, Human
gggggugauuugcaaugaaauuuugggaccca

SEQ ID NO: 466829 - RNA, 18 nt, Human
gggggugcaagaggguua

SEQ ID NO: 466830 - RNA, 32 nt, Human
gggggugcaaguguccaccaaaccagauaggc

SEQ ID NO: 466831 - RNA, 17 nt, Human
gggggugcagaagggca

SEQ ID NO: 466832 - RNA, 32 nt, Human
gggggugcagagacagaggcugaggugcaggg

SEQ ID NO: 466833 - RNA, 17 nt, Human
gggggugcagagcguua

SEQ ID NO: 466834 - RNA, 20 nt, Human
gggggugcagcccaggguca

SEQ ID NO: 466835 - RNA, 20 nt, Human
gggggugcagccggugggca

SEQ ID NO: 466836 - RNA, 17 nt, Human
gggggugcagcgcuuca

SEQ ID NO: 466837 - RNA, 17 nt, Human
gggggugcaggcgggca

SEQ ID NO: 466838 - RNA, 17 nt, Human
gggggugcaggugggca

SEQ ID NO: 466839 - RNA, 32 nt, Human
gggggugcagguguggaggcagcagcuguccu

SEQ ID NO: 466840 - RNA, 20 nt, Human
gggggugcagucugaggcca

SEQ ID NO: 466841 - RNA, 32 nt, Human
gggggugcagugguguguagugcugcugugua

SEQ ID NO: 466842 - RNA, 32 nt, Human
gggggugcaugggaaacugcaccccacaaccc

SEQ ID NO: 466843 - RNA, 18 nt, Human
gggggugcauuugagguc

SEQ ID NO: 466844 - RNA, 32 nt, Human
gggggugccacagccuuuugggauggggguga

SEQ ID NO: 466845 - RNA, 19 nt, Human
gggggugccaggaagggca

SEQ ID NO: 466846 - RNA, 20 nt, Human
gggggugccaggaccaguca

SEQ ID NO: 466847 - RNA, 32 nt, Human
gggggugccggcgcauucuaccagucucaggg

SEQ ID NO: 466848 - RNA, 21 nt, Human
gggggugccuagccaggugca

SEQ ID NO: 466849 - RNA, 19 nt, Human
gggggugccucucaaguua

SEQ ID NO: 466850 - RNA, 32 nt, Human
gggggugccucucggaggagccuguguccacc

SEQ ID NO: 466851 - RNA, 32 nt, Human
gggggugccugggaagagguuuaucuguccug

SEQ ID NO: 466852 - RNA, 20 nt, Human
gggggugccugugccaggca

SEQ ID NO: 466853 - RNA, 32 nt, Human
gggggugcgaggggcucaguggggcuucucuu

SEQ ID NO: 466854 - RNA, 18 nt, Human
gggggugcgcccaaguca

SEQ ID NO: 466855 - RNA, 25 nt, Human
gggggugcgcgccgggagccugcag

SEQ ID NO: 466856 - RNA, 32 nt, Human
gggggugcggagagacaggcggaggggcgggg

SEQ ID NO: 466857 - RNA, 20 nt, Human
gggggugcggccaccagguc

SEQ ID NO: 466858 - RNA, 20 nt, Human
gggggugcggcgucugguca

SEQ ID NO: 466859 - RNA, 19 nt, Human
gggggugcggggcaguuca

SEQ ID NO: 466860 - RNA, 32 nt, Human
gggggugcuaucaggguaacacugccugcagc

SEQ ID NO: 466861 - RNA, 32 nt, Human
gggggugcucagcagcagcccagauuuagggg

SEQ ID NO: 466862 - RNA, 17 nt, Human
gggggugcucuguaggu

SEQ ID NO: 466863 - RNA, 32 nt, Human
gggggugcugcuggcccuccugcaggccuucu

SEQ ID NO: 466864 - RNA, 18 nt, Human
gggggugcugugcaggca

SEQ ID NO: 466865 - RNA, 32 nt, Human
gggggugcuuugcagggcaguggugcagccgc

SEQ ID NO: 466866 - RNA, 32 nt, Human
ggggguggaaggagugccuggcccuggggagg

SEQ ID NO: 466867 - RNA, 32 nt, Human
ggggguggacaacauucaacacugcagaaugg

SEQ ID NO: 466868 - RNA, 32 nt, Human
ggggguggagccaaugccaggccagaagccuu

SEQ ID NO: 466869 - RNA, 32 nt, Human
ggggguggaggguggaggagggagcaggaaca

SEQ ID NO: 466870 - RNA, 20 nt, Human
ggggguggagguugcaguga

SEQ ID NO: 466871 - RNA, 32 nt, Human
ggggguggagugaagcucagggcuugcagcca

SEQ ID NO: 466872 - RNA, 32 nt, Human
ggggguggauccacuuggggaggcaggcaacc

SEQ ID NO: 466873 - RNA, 32 nt, Human
ggggguggaugcugaguccaggaggugaugag

SEQ ID NO: 466874 - RNA, 24 nt, Human
ggggguggcagagggaaaaggagg

SEQ ID NO: 466875 - RNA, 20 nt, Human
ggggguggcaguggagggag

SEQ ID NO: 466876 - RNA, 32 nt, Human
  misc_feature (24)..(24): n is a, c, g, or u
ggggguggccacuccugggccccnagaaagcc

SEQ ID NO: 466877 - RNA, 20 nt, Human
ggggguggcccaagggaagg

SEQ ID NO: 466878 - RNA, 24 nt, Human
ggggguggcggcacgguccgggag

SEQ ID NO: 466879 - RNA, 19 nt, Human
ggggguggcgggauggagg

SEQ ID NO: 466880 - RNA, 19 nt, Human
ggggguggcgguggaggga

SEQ ID NO: 466881 - RNA, 32 nt, Human
ggggguggcuccaccagucgccuggccucuuc

SEQ ID NO: 466882 - RNA, 24 nt, Human
ggggguggcugggaggggaaggga

SEQ ID NO: 466883 - RNA, 23 nt, Human
gggggugggaaaaucgaagggag

SEQ ID NO: 466884 - RNA, 32 nt, Human
gggggugggaaagaagagggacguggggagaa

SEQ ID NO: 466885 - RNA, 32 nt, Human
gggggugggaaugggguggggucacuaaggag

SEQ ID NO: 466886 - RNA, 32 nt, Human
gggggugggagcagggucacaaaagugagugu

SEQ ID NO: 466887 - RNA, 32 nt, Human
gggggugggaggagagagcggcagagaagcuc

SEQ ID NO: 466888 - RNA, 32 nt, Human
gggggugggaggaugcgggcgggccgguagcc

SEQ ID NO: 466889 - RNA, 32 nt, Human
gggggugggaggauuugagggagcucacugcc

SEQ ID NO: 466890 - RNA, 32 nt, Human
gggggugggagggagaaugggcacagccagag

SEQ ID NO: 466891 - RNA, 23 nt, Human
gggggugggagggguguagggag

SEQ ID NO: 466892 - RNA, 32 nt, Human
gggggugggcagcccuuggagcacacaguggu

SEQ ID NO: 466893 - RNA, 32 nt, Human
gggggugggcaggcuuggaggggacgcuggga

SEQ ID NO: 466894 - RNA, 21 nt, Human
gggggugggcauuucagguca

SEQ ID NO: 466895 - RNA, 32 nt, Human
gggggugggcuuuggucuuagcacuuuccuuc

SEQ ID NO: 466896 - RNA, 32 nt, Human
ggggguggggacacuuguuuauaaaugcagaa

SEQ ID NO: 466897 - RNA, 32 nt, Human
ggggguggggagaaagaaaaaguguauuacuu

SEQ ID NO: 466898 - RNA, 32 nt, Human
ggggguggggagcuucuguucuggugaaggga

SEQ ID NO: 466899 - RNA, 32 nt, Human
ggggguggggcagaggcggagucugaggagcu

SEQ ID NO: 466900 - RNA, 32 nt, Human
gggggugggggaggagguugagggaacagggg

SEQ ID NO: 466901 - RNA, 32 nt, Human
gggggugggggcagccaaguccagccacucuu

SEQ ID NO: 466902 - RNA, 21 nt, Human
gggggugggguuugauaggga

SEQ ID NO: 466903 - RNA, 32 nt, Human
gggggugggugagagagacaggcagcucggau

SEQ ID NO: 466904 - RNA, 32 nt, Human
gggggugggugaggaauggggugaggguaucu

SEQ ID NO: 466905 - RNA, 18 nt, Human
ggggguggguggggugaa

SEQ ID NO: 466906 - RNA, 22 nt, Human
gggggugguacaggguagggag

SEQ ID NO: 466907 - RNA, 20 nt, Human
gggggugguauggaagggag

SEQ ID NO: 466908 - RNA, 32 nt, Human
gggggugguaugggugggggaggggaauugcc

SEQ ID NO: 466909 - RNA, 32 nt, Human
ggggguggucuggagugcgcugcagccuucug

SEQ ID NO: 466910 - RNA, 32 nt, Human
gggggugguggagagcgggggcggggauucag

SEQ ID NO: 466911 - RNA, 23 nt, Human
gggggugguggaugaacaaagag

SEQ ID NO: 466912 - RNA, 32 nt, Human
gggggugguggcagauaccugccuuggccugc

SEQ ID NO: 466913 - RNA, 32 nt, Human
gggggugguggcaucuggacaaaugccaccac

SEQ ID NO: 466914 - RNA, 22 nt, Human
gggggugguggcauuggggcag

SEQ ID NO: 466915 - RNA, 21 nt, Human
ggggguggugggagaaggagg

SEQ ID NO: 466916 - RNA, 21 nt, Human
ggggguggugggcagggaugg

SEQ ID NO: 466917 - RNA, 32 nt, Human
ggggguggugggcugguggcccaggagaaguc

SEQ ID NO: 466918 - RNA, 21 nt, Human
ggggguggugggguacaggga

SEQ ID NO: 466919 - RNA, 20 nt, Human
gggggugguggugaagagag

SEQ ID NO: 466920 - RNA, 32 nt, Human
gggggugguuucaggaguuccuuguggagagg

SEQ ID NO: 466921 - RNA, 17 nt, Human
ggggguguaccugguca

SEQ ID NO: 466922 - RNA, 32 nt, Human
ggggguguaggcaguagggaaaugagugaggc

SEQ ID NO: 466923 - RNA, 18 nt, Human
ggggguguaucacaguca

SEQ ID NO: 466924 - RNA, 31 nt, Human
ggggguguaugggguagauggguggagaggg

SEQ ID NO: 466925 - RNA, 32 nt, Human
ggggguguccccucagcggaggccaagggagg

SEQ ID NO: 466926 - RNA, 32 nt, Human
gggggugucuuaacaugacgcauuucagcaau

SEQ ID NO: 466927 - RNA, 17 nt, Human
gggggugugcacaauca

SEQ ID NO: 466928 - RNA, 32 nt, Human
gggggugugcaggccagggacuggccaggcag

SEQ ID NO: 466929 - RNA, 32 nt, Human
gggggugugcugacauguuugcucuugguuga

SEQ ID NO: 466930 - RNA, 32 nt, Human
gggggugugggauggaggagggucugcagcca

SEQ ID NO: 466931 - RNA, 19 nt, Human
gggggugugggcccaggca

SEQ ID NO: 466932 - RNA, 32 nt, Human
ggggguguguuucugagcuuggcaucaaggcu

SEQ ID NO: 466933 - RNA, 32 nt, Human
ggggguguuagagcaaaaacaggcuucagaaa

SEQ ID NO: 466934 - RNA, 17 nt, Human
ggggguguucaaggcca

SEQ ID NO: 466935 - RNA, 32 nt, Human
ggggguguugggguccgcagggggagggaggg

SEQ ID NO: 466936 - RNA, 32 nt, Human
ggggguguuugcugagugagugagugaaacac

SEQ ID NO: 466937 - RNA, 32 nt, Human
ggggguuaagucaggaugggguagguccccuc

SEQ ID NO: 466938 - RNA, 32 nt, Human
ggggguuacagcuguucugaaggucugguugg

SEQ ID NO: 466939 - RNA, 32 nt, Human
ggggguuaccaaaggccuagugcuuggccucg

SEQ ID NO: 466940 - RNA, 32 nt, Human
ggggguucaaugagcagcuucaacagaaaacu

SEQ ID NO: 466941 - RNA, 32 nt, Human
ggggguucagaaccagccuggccaaaaauuac

SEQ ID NO: 466942 - RNA, 32 nt, Human
ggggguucaggaagcgggucucaggccgcugg

SEQ ID NO: 466943 - RNA, 32 nt, Human
ggggguuccaggaauccaaauccagcauggcu

SEQ ID NO: 466944 - RNA, 32 nt, Human
ggggguucccagagcccuguacccucgacccg

SEQ ID NO: 466945 - RNA, 32 nt, Human
ggggguucccagagcccuguagcccucgaccc

SEQ ID NO: 466946 - RNA, 32 nt, Human
ggggguuccggguggaggcuugcagcugcuuc

SEQ ID NO: 466947 - RNA, 32 nt, Human
ggggguucuacaacauugaaguuggacuagug

SEQ ID NO: 466948 - RNA, 32 nt, Human
ggggguucucucucggguccgcacucaacugg

SEQ ID NO: 466949 - RNA, 32 nt, Human
ggggguucuucgcucaaccucuucuucccuag

SEQ ID NO: 466950 - RNA, 32 nt, Human
ggggguuggagaagaaccauuagaaagggaaa

SEQ ID NO: 466951 - RNA, 32 nt, Human
ggggguuggagaagggugaggggcuuccccca

SEQ ID NO: 466952 - RNA, 32 nt, Human
ggggguuggccugggagccuccuccgcuuccc

SEQ ID NO: 466953 - RNA, 32 nt, Human
ggggguugggagaaagguggcggugcuuucgg

SEQ ID NO: 466954 - RNA, 32 nt, Human
ggggguugggcuguaggcagggacagucacag

SEQ ID NO: 466955 - RNA, 32 nt, Human
ggggguuggggagcaggccagauggagguggu

SEQ ID NO: 466956 - RNA, 32 nt, Human
ggggguugggggcugugucucuccaucccuua

SEQ ID NO: 466957 - RNA, 32 nt, Human
ggggguuggggugggagccuggagauagcgcu

SEQ ID NO: 466958 - RNA, 32 nt, Human
ggggguuggguaagggaauggucaagacugag

SEQ ID NO: 466959 - RNA, 29 nt, Human
ggggguugucugugugucugugaauauuu

SEQ ID NO: 466960 - RNA, 32 nt, Human
ggggguugugggagagaggcagcugggagaca

SEQ ID NO: 466961 - RNA, 32 nt, Human
ggggguugugggcuggcggggcugugggaagg

SEQ ID NO: 466962 - RNA, 32 nt, Human
ggggguuuaagcucugccccuuccccaugaac

SEQ ID NO: 466963 - RNA, 31 nt, Human
ggggguuuggcaaucucacuaaccaccauua

SEQ ID NO: 466964 - RNA, 32 nt, Human
ggggguuuuccauauugcccaggcuggucccg

SEQ ID NO: 466965 - RNA, 32 nt, Human
ggggguuuuguuguguaaauauucuauuuuau

SEQ ID NO: 466966 - RNA, 32 nt, Human
gggguaaaaccagcuuaagguucagcgagcag

SEQ ID NO: 466967 - RNA, 32 nt, Human
gggguaaaacuagaggacacuggugagcagcu

SEQ ID NO: 466968 - RNA, 32 nt, Human
gggguaaagacaccuggaucagacuccaaggg

SEQ ID NO: 466969 - RNA, 32 nt, Human
gggguaaaggaaagcaggaaggggaauuuuua

SEQ ID NO: 466970 - RNA, 32 nt, Human
gggguaaagggggccuggaguugcuugacacg

SEQ ID NO: 466971 - RNA, 21 nt, Human
gggguaacccagcaagggcca

SEQ ID NO: 466972 - RNA, 32 nt, Human
gggguaacuggaagccaugaaggaaggacuua

SEQ ID NO: 466973 - RNA, 32 nt, Human
gggguaagaaaagcuggucuggaguugcugaa

SEQ ID NO: 466974 - RNA, 32 nt, Human
gggguaagacuacuuaaccucuguguuccucu

SEQ ID NO: 466975 - RNA, 32 nt, Human
gggguaagcuaaaucauaguuucugacaauaa

SEQ ID NO: 466976 - RNA, 32 nt, Human
gggguaaggaaaugugcugaagacagagcuau

SEQ ID NO: 466977 - RNA, 32 nt, Human
gggguaaggggcaguggugugaagggaccaaa

SEQ ID NO: 466978 - RNA, 32 nt, Human
gggguaagggggaccagagaggcgggcuggug

SEQ ID NO: 466979 - RNA, 32 nt, Human
gggguaaugagcuccagccccuaagcaaccgg

SEQ ID NO: 466980 - RNA, 32 nt, Human
gggguacaaaggaaaggacagaggugugggag

SEQ ID NO: 466981 - RNA, 32 nt, Human
gggguacaacagcagccaaauucuuccccacc

SEQ ID NO: 466982 - RNA, 32 nt, Human
gggguacaccauugacuucauuuguacuuagu

SEQ ID NO: 466983 - RNA, 32 nt, Human
gggguacagagggagggcuggagaacuuagcu

SEQ ID NO: 466984 - RNA, 32 nt, Human
gggguacagauggggcaggggcacuugugaga

SEQ ID NO: 466985 - RNA, 32 nt, Human
gggguacaguagcuggcuauucacaggcauca

SEQ ID NO: 466986 - RNA, 32 nt, Human
gggguacccuggggauucaucuguuuucuuca

SEQ ID NO: 466987 - RNA, 22 nt, Human
gggguacgagagcugcuggugg

SEQ ID NO: 466988 - RNA, 32 nt, Human
gggguacuacacucaccaccugggugacggga

SEQ ID NO: 466989 - RNA, 32 nt, Human
gggguacucugccucucugcucccugggggcc

SEQ ID NO: 466990 - RNA, 32 nt, Human
gggguacuggcagaggauggcagagcuggcug

SEQ ID NO: 466991 - RNA, 17 nt, Human
gggguacuuccagguca

SEQ ID NO: 466992 - RNA, 18 nt, Human
gggguagacguuccaccu

SEQ ID NO: 466993 - RNA, 32 nt, Human
gggguagaggcuucuuagauucucccagcauc

SEQ ID NO: 466994 - RNA, 32 nt, Human
gggguagagggagccaggagcacuggguucuc

SEQ ID NO: 466995 - RNA, 32 nt, Human
gggguagaggggaauccaggaggccggggaca

SEQ ID NO: 466996 - RNA, 32 nt, Human
gggguagaggggcuggcucucaguccccgccu

SEQ ID NO: 466997 - RNA, 32 nt, Human
gggguagagugggucagcaggagggagcuggu

SEQ ID NO: 466998 - RNA, 32 nt, Human
gggguagaguucuguguguggcauuuuaggcc

SEQ ID NO: 466999 - RNA, 32 nt, Human
gggguagaugcugggggcugcggccacgguca

SEQ ID NO: 467000 - RNA, 32 nt, Human
gggguagauggguggagagggaggggauaaga

SEQ ID NO: 467001 - RNA, 32 nt, Human
gggguagcacggaagggucucccaggcggcgu

SEQ ID NO: 467002 - RNA, 32 nt, Human
gggguagcagaaaguccugggcuaggagagug

SEQ ID NO: 467003 - RNA, 22 nt, Human
gggguagcagagggaagggagg

SEQ ID NO: 467004 - RNA, 32 nt, Human
gggguagcagggacccaggcacugugaccauc

SEQ ID NO: 467005 - RNA, 32 nt, Human
gggguagcaguggaggcugggguuaaccgccg

SEQ ID NO: 467006 - RNA, 32 nt, Human
gggguagccagcuugggcuguccccuugagac

SEQ ID NO: 467007 - RNA, 32 nt, Human
gggguagccauugugcagucauggcccggggg

SEQ ID NO: 467008 - RNA, 32 nt, Human
gggguagcccugcucagugagagcagugaaag

SEQ ID NO: 467009 - RNA, 20 nt, Human
gggguagcgggggagggggg

SEQ ID NO: 467010 - RNA, 32 nt, Human
gggguagcucacucccccuccugcugcuaugc

SEQ ID NO: 467011 - RNA, 22 nt, Human
gggguagcuguauuccagguca

SEQ ID NO: 467012 - RNA, 30 nt, Human
gggguaggaagcccgagggcugcagucacc

SEQ ID NO: 467013 - RNA, 32 nt, Human
gggguaggaaugguuguuggggcagagccagu

SEQ ID NO: 467014 - RNA, 32 nt, Human
gggguaggagggacagagagacagggagaguc

SEQ ID NO: 467015 - RNA, 32 nt, Human
gggguagggaucugcauuucuucauaucaacc

SEQ ID NO: 467016 - RNA, 32 nt, Human
gggguagggcugacuagaagggccaguccugc

SEQ ID NO: 467017 - RNA, 32 nt, Human
gggguagggcuggaggaucgcuccuguggaaa

SEQ ID NO: 467018 - RNA, 32 nt, Human
gggguaggggaggggcgucuggagaggacccc

SEQ ID NO: 467019 - RNA, 32 nt, Human
gggguaggggcagagucaggggcuggccagag

SEQ ID NO: 467020 - RNA, 32 nt, Human
gggguagggugagggaggacaggccaguaggg

SEQ ID NO: 467021 - RNA, 21 nt, Human
gggguagugcgaggccgggca

SEQ ID NO: 467022 - RNA, 32 nt, Human
gggguagugggauggugggguaccagccacug

SEQ ID NO: 467023 - RNA, 32 nt, Human
gggguaguuuucuaucugucaugggcucuagc

SEQ ID NO: 467024 - RNA, 32 nt, Human
gggguauagcccauaggugguggagagaaaag

SEQ ID NO: 467025 - RNA, 32 nt, Human
gggguauccccaccaacuuucccuucaaaaua

SEQ ID NO: 467026 - RNA, 32 nt, Human
gggguaucguccucaaaacaggacagccaagu

SEQ ID NO: 467027 - RNA, 32 nt, Human
gggguaucuccaccucuccaacacaagcucaa

SEQ ID NO: 467028 - RNA, 32 nt, Human
gggguaucugacccagucuucuuuucagcugg

SEQ ID NO: 467029 - RNA, 32 nt, Human
gggguaugaaccugugucuccuuuguaucccu

SEQ ID NO: 467030 - RNA, 32 nt, Human
gggguauguugggggauuggaagcacuugaac

SEQ ID NO: 467031 - RNA, 32 nt, Human
ggggucaacuguacccagccuagagccaagaa

SEQ ID NO: 467032 - RNA, 32 nt, Human
ggggucaagacccagugcuacuugggccagcg

SEQ ID NO: 467033 - RNA, 19 nt, Human
ggggucaaggaacauuuca

SEQ ID NO: 467034 - RNA, 16 nt, Human
ggggucaagggcccuc

SEQ ID NO: 467035 - RNA, 32 nt, Human
ggggucacaauggggaaauggaagugguacau

SEQ ID NO: 467036 - RNA, 21 nt, Human
ggggucacaccuguaauccca

SEQ ID NO: 467037 - RNA, 32 nt, Human
ggggucacaccuguaaucccagcacuuuggga

SEQ ID NO: 467038 - RNA, 32 nt, Human
ggggucacagccgcuucuucagcauggaccaa

SEQ ID NO: 467039 - RNA, 32 nt, Human
ggggucacauaaccacacuguugacuaccuca

SEQ ID NO: 467040 - RNA, 23 nt, Human
ggggucacgcggccccucgugcu

SEQ ID NO: 467041 - RNA, 32 nt, Human
ggggucacuaaggagagagggucaggagccag

SEQ ID NO: 467042 - RNA, 32 nt, Human
ggggucacuccagcccgggccucccagaacac

SEQ ID NO: 467043 - RNA, 32 nt, Human
ggggucacugcugaggccgugaggggaaucug

SEQ ID NO: 467044 - RNA, 32 nt, Human
ggggucacuguaccauggcaaaggcugaggug

SEQ ID NO: 467045 - RNA, 32 nt, Human
ggggucacuucuacuucacacacacaggauuc

SEQ ID NO: 467046 - RNA, 32 nt, Human
ggggucagaaccccugagcuucagcccccaca

SEQ ID NO: 467047 - RNA, 32 nt, Human
ggggucagacacaggcccugccccugcccuca

SEQ ID NO: 467048 - RNA, 32 nt, Human
ggggucagacuggccaucagcaccugagcgug

SEQ ID NO: 467049 - RNA, 32 nt, Human
ggggucagagaaggggaagcaacggcucucac

SEQ ID NO: 467050 - RNA, 32 nt, Human
ggggucagagggcaaagggcgacgccccgucg

SEQ ID NO: 467051 - RNA, 32 nt, Human
ggggucagcagcaggagaagcguguugaacac

SEQ ID NO: 467052 - RNA, 32 nt, Human
ggggucagccuggggcaaagcaggacuggggg

SEQ ID NO: 467053 - RNA, 24 nt, Human
ggggucaggaagaggcgaacagcu

SEQ ID NO: 467054 - RNA, 19 nt, Human
ggggucaggaggcacugcu

SEQ ID NO: 467055 - RNA, 32 nt, Human
ggggucaggagguggcucgggugugggcugga

SEQ ID NO: 467056 - RNA, 23 nt, Human
ggggucaggaguucaagaccagc

SEQ ID NO: 467057 - RNA, 23 nt, Human
ggggucaggaguucgagaccagc

SEQ ID NO: 467058 - RNA, 32 nt, Human
ggggucaggaguuugagaccagccuggccaac

SEQ ID NO: 467059 - RNA, 32 nt, Human
ggggucaggauuucgagaccagccuggccaac

SEQ ID NO: 467060 - RNA, 24 nt, Human
ggggucaggcagacuuggauucua

SEQ ID NO: 467061 - RNA, 20 nt, Human
ggggucaggcagaggccagc

SEQ ID NO: 467062 - RNA, 32 nt, Human
ggggucaggcauucgaguuuuugucuuucuuc

SEQ ID NO: 467063 - RNA, 21 nt, Human
ggggucaggccugccugcgga

SEQ ID NO: 467064 - RNA, 32 nt, Human
ggggucagggacgcagcuccacccucaccacu

SEQ ID NO: 467065 - RNA, 26 nt, Human
ggggucaggggagacgaggccaagcu

SEQ ID NO: 467066 - RNA, 26 nt, Human
ggggucaggguggcauuagcccagcu

SEQ ID NO: 467067 - RNA, 21 nt, Human
ggggucagguggacucuggga

SEQ ID NO: 467068 - RNA, 21 nt, Human
ggggucaggugucgaaccagc

SEQ ID NO: 467069 - RNA, 23 nt, Human
ggggucagguuauuuuuguaggg

SEQ ID NO: 467070 - RNA, 21 nt, Human
ggggucagguucccugccggg

SEQ ID NO: 467071 - RNA, 31 nt, Human
ggggucagguugugggccaugccaggccugu

SEQ ID NO: 467072 - RNA, 31 nt, Human
ggggucagugagagaaaugggaaugguagcu

SEQ ID NO: 467073 - RNA, 23 nt, Human
ggggucagugcagcagaggacag

SEQ ID NO: 467074 - RNA, 21 nt, Human
ggggucagugguucucucggg

SEQ ID NO: 467075 - RNA, 32 nt, Human
ggggucaguuauggaacaggacuugcccauua

SEQ ID NO: 467076 - RNA, 32 nt, Human
ggggucaguugggugcccaguuggccuuggaa

SEQ ID NO: 467077 - RNA, 32 nt, Human
ggggucauagauguuuccuugccuuguugaug

SEQ ID NO: 467078 - RNA, 32 nt, Human
ggggucaucaaauuauuaaucugaaaauagca

SEQ ID NO: 467079 - RNA, 32 nt, Human
ggggucaucaaauuguuaaucugaaaauagca

SEQ ID NO: 467080 - RNA, 32 nt, Human
ggggucauggcgguuguggcagcuggggaggu

SEQ ID NO: 467081 - RNA, 32 nt, Human
ggggucaugucuuccccaagguguggggagcu

SEQ ID NO: 467082 - RNA, 20 nt, Human
ggggucauuauggcauuuua

SEQ ID NO: 467083 - RNA, 32 nt, Human
gggguccacaggccccuccaccuuccagcuaa

SEQ ID NO: 467084 - RNA, 32 nt, Human
gggguccaccuucugcuccagccagaggaggg

SEQ ID NO: 467085 - RNA, 31 nt, Human
gggguccagagaggcaggcuggggaggcaag

SEQ ID NO: 467086 - RNA, 32 nt, Human
gggguccagagaggcaggcuggggaggcaagg

SEQ ID NO: 467087 - RNA, 19 nt, Human
gggguccagcacaggcugu

SEQ ID NO: 467088 - RNA, 32 nt, Human
gggguccagcaggguggcuggugacaggccug

SEQ ID NO: 467089 - RNA, 32 nt, Human
gggguccagccuugccuguuuccgaagccccc

SEQ ID NO: 467090 - RNA, 32 nt, Human
gggguccaggagacccagaaugaaggugucag

SEQ ID NO: 467091 - RNA, 32 nt, Human
gggguccaugggaccccucuccccagugccca

SEQ ID NO: 467092 - RNA, 17 nt, Human
ggggucccagggcccuu

SEQ ID NO: 467093 - RNA, 32 nt, Human
gggguccccgcuggaauccuguguuccucgcc

SEQ ID NO: 467094 - RNA, 32 nt, Human
gggguccccuccacucccaucugcuucccuuu

SEQ ID NO: 467095 - RNA, 17 nt, Human
gggguccccuccaggag

SEQ ID NO: 467096 - RNA, 32 nt, Human
gggguccccugccuccugccugucgcugccgu

SEQ ID NO: 467097 - RNA, 32 nt, Human
gggguccccugucuccccuuccagcccugacc

SEQ ID NO: 467098 - RNA, 32 nt, Human
gggguccccuuauccucccuugcuggcugugu

SEQ ID NO: 467099 - RNA, 32 nt, Human
ggggucccgcuuuccucagccuggaugugcca

SEQ ID NO: 467100 - RNA, 32 nt, Human
ggggucccggcaccuggcgugaguuucaugua

SEQ ID NO: 467101 - RNA, 21 nt, Human
ggggucccgggaggcgggugc

SEQ ID NO: 467102 - RNA, 32 nt, Human
ggggucccuagcagcccucccugcugcuggug

SEQ ID NO: 467103 - RNA, 32 nt, Human
ggggucccuauguguacccccuugucuccagc

SEQ ID NO: 467104 - RNA, 32 nt, Human
ggggucccuccagggaggagcguggagcggca

SEQ ID NO: 467105 - RNA, 32 nt, Human
ggggucccuccccucuccuguaccccuuggac

SEQ ID NO: 467106 - RNA, 32 nt, Human
ggggucccuccuuccuccuuccaagucugugc

SEQ ID NO: 467107 - RNA, 32 nt, Human
ggggucccugcacgagcccucugggaggcaug

SEQ ID NO: 467108 - RNA, 32 nt, Human
ggggucccugcagggcugaagccuaagcuacu

SEQ ID NO: 467109 - RNA, 32 nt, Human
gggguccggaggcagagacggccaugaacagc

SEQ ID NO: 467110 - RNA, 21 nt, Human
gggguccgggcccggguucca

SEQ ID NO: 467111 - RNA, 32 nt, Human
gggguccgguggauaccaggaggcagcagugc

SEQ ID NO: 467112 - RNA, 28 nt, Human
gggguccucaaggcugccuccuuccuuu

SEQ ID NO: 467113 - RNA, 32 nt, Human
gggguccucacugcagcuggccucuggcagcg

SEQ ID NO: 467114 - RNA, 32 nt, Human
gggguccucagcugccucgggacuggcuccgc

SEQ ID NO: 467115 - RNA, 32 nt, Human
gggguccuccaggaccucagcugcacccauuu

SEQ ID NO: 467116 - RNA, 27 nt, Human
gggguccuccaggaguucuggacagcu

SEQ ID NO: 467117 - RNA, 32 nt, Human
gggguccucgaggcggagcgagcugugguugg

SEQ ID NO: 467118 - RNA, 18 nt, Human
gggguccucucguccucc

SEQ ID NO: 467119 - RNA, 22 nt, Human
gggguccugaaaggcggggccg

SEQ ID NO: 467120 - RNA, 32 nt, Human
gggguccuggcacagacccaggcccaggggau

SEQ ID NO: 467121 - RNA, 32 nt, Human
gggguccuguccuccacuccaggucauuccuu

SEQ ID NO: 467122 - RNA, 32 nt, Human
gggguccuuguccugcucaggcaucccugccc

SEQ ID NO: 467123 - RNA, 32 nt, Human
gggguccuugugcugcucaggcaucccugccc

SEQ ID NO: 467124 - RNA, 32 nt, Human
ggggucgaggugggcagaucaccugaggucag

SEQ ID NO: 467125 - RNA, 32 nt, Human
ggggucgcacgcacgcccgccucggcggcugg

SEQ ID NO: 467126 - RNA, 32 nt, Human
ggggucgccacugcacccagccugugucuucc

SEQ ID NO: 467127 - RNA, 32 nt, Human
ggggucgccucccaggugucccagcaagcccg

SEQ ID NO: 467128 - RNA, 32 nt, Human
ggggucgccuugaccucugccucagccaguag

SEQ ID NO: 467129 - RNA, 24 nt, Human
ggggucgcguugcauuguguucau

SEQ ID NO: 467130 - RNA, 32 nt, Human
ggggucgcuccugcugugucuuccgcuccagc

SEQ ID NO: 467131 - RNA, 32 nt, Human
ggggucggaguccgagucgcugugcugggaga

SEQ ID NO: 467132 - RNA, 19 nt, Human
ggggucggcgggggcgcgg

SEQ ID NO: 467133 - RNA, 32 nt, Human
ggggucggggcuggggaaggggagccccaggg

SEQ ID NO: 467134 - RNA, 32 nt, Human
ggggucgggggaggagaaagggagacagcaga

SEQ ID NO: 467135 - RNA, 32 nt, Human
ggggucggggucgcggccagggccaagccgca

SEQ ID NO: 467136 - RNA, 19 nt, Human
ggggucgggucaucugcgg

SEQ ID NO: 467137 - RNA, 24 nt, Human
ggggucgggucuguccuuuguugg

SEQ ID NO: 467138 - RNA, 32 nt, Human
ggggucgggugaggcagaggucagaaacagaa

SEQ ID NO: 467139 - RNA, 32 nt, Human
ggggucguaagccugguuugcuucuauuacuu

SEQ ID NO: 467140 - RNA, 32 nt, Human
ggggucgucaaaccacagggguguuuagaaau

SEQ ID NO: 467141 - RNA, 32 nt, Human
ggggucuaaucuccuagaagguaggggcuuuu

SEQ ID NO: 467142 - RNA, 32 nt, Human
ggggucuaggcagcaguggauggugcagggga

SEQ ID NO: 467143 - RNA, 32 nt, Human
ggggucucaccauguuacccaggcuggucuca

SEQ ID NO: 467144 - RNA, 32 nt, Human
ggggucucaccauguugcccaggcuggucuca

SEQ ID NO: 467145 - RNA, 32 nt, Human
ggggucucaccugugaacgucucaccugugcc

SEQ ID NO: 467146 - RNA, 32 nt, Human
ggggucucagggaccuguguccuuccgccucc

SEQ ID NO: 467147 - RNA, 32 nt, Human
ggggucuccagaguugcugaaacccuuacucc

SEQ ID NO: 467148 - RNA, 32 nt, Human
ggggucuccagccagagacguugggugagaca

SEQ ID NO: 467149 - RNA, 32 nt, Human
ggggucuccagccuggcugcugcugggcccug

SEQ ID NO: 467150 - RNA, 32 nt, Human
ggggucuccauccuggaccaggaccuggacua

SEQ ID NO: 467151 - RNA, 32 nt, Human
ggggucucccuaugcugcccaggcuggucucg

SEQ ID NO: 467152 - RNA, 32 nt, Human
ggggucucccuauguugcccaggcuggccuca

SEQ ID NO: 467153 - RNA, 32 nt, Human
ggggucucccucugucacccaggcuggagugc

SEQ ID NO: 467154 - RNA, 32 nt, Human
ggggucucccuguguuacccaggcuggucuca

SEQ ID NO: 467155 - RNA, 32 nt, Human
ggggucuccugccucuccuggugucgccggug

SEQ ID NO: 467156 - RNA, 32 nt, Human
ggggucucgcugaacuccuggccuccagugau

SEQ ID NO: 467157 - RNA, 32 nt, Human
ggggucucguuugcccagggagggcuuggcuc

SEQ ID NO: 467158 - RNA, 32 nt, Human
ggggucucuacgccagcucaucagugccuccu

SEQ ID NO: 467159 - RNA, 32 nt, Human
ggggucucuauauguuucccaggcuggucuug

SEQ ID NO: 467160 - RNA, 32 nt, Human
ggggucucuccauguuggucaggcuggucuca

SEQ ID NO: 467161 - RNA, 32 nt, Human
ggggucucugcuggguguuagauuuguggagu

SEQ ID NO: 467162 - RNA, 32 nt, Human
ggggucucuggaggcagacagggugggcuggg

SEQ ID NO: 467163 - RNA, 32 nt, Human
ggggucucuggguggagagcugacccaggaag

SEQ ID NO: 467164 - RNA, 32 nt, Human
ggggucucuguugggaaugccugcugagacgg

SEQ ID NO: 467165 - RNA, 32 nt, Human
ggggucugaccccucccuccucccucuggagg

SEQ ID NO: 467166 - RNA, 32 nt, Human
ggggucugagucuauguucaaagacugugaac

SEQ ID NO: 467167 - RNA, 32 nt, Human
ggggucugauuugcugagacaccagcuucacc

SEQ ID NO: 467168 - RNA, 32 nt, Human
ggggucugcccagagaagccuggacccagggg

SEQ ID NO: 467169 - RNA, 31 nt, Human
ggggucugccucuuucacgcgccugucuccc

SEQ ID NO: 467170 - RNA, 32 nt, Human
ggggucugcuccuguggcggugcaguggcaaa

SEQ ID NO: 467171 - RNA, 32 nt, Human
ggggucugcuugagggcacuaaccucaacaga

SEQ ID NO: 467172 - RNA, 32 nt, Human
ggggucuggaggcauaagucuagaugcccaga

SEQ ID NO: 467173 - RNA, 32 nt, Human
ggggucuggcagcguggggagagggaccaacc

SEQ ID NO: 467174 - RNA, 32 nt, Human
gguaaccugcucacuccagaacuccagcuccc

SEQ ID NO: 467175 - RNA, 32 nt, Human
gguaaccuggaacuuccaccugggcucugcgc

SEQ ID NO: 467176 - RNA, 20 nt, Human
gguaacgggugcaggcugga

SEQ ID NO: 467177 - RNA, 19 nt, Human
gguaacuaggauccuaggg

SEQ ID NO: 467178 - RNA, 32 nt, Human
gguaacucaagaggacagaggcuggugaggag

SEQ ID NO: 467179 - RNA, 26 nt, Human
gguaacucacucugcagcccuugaac

SEQ ID NO: 467180 - RNA, 32 nt, Human
gguaacucauuuucucauuauuuucuagcugg

SEQ ID NO: 467181 - RNA, 32 nt, Human
gguaacucccacagaagugaccuuuuccuucg

SEQ ID NO: 467182 - RNA, 32 nt, Human
gguaacucucuuccuucuuuuucucccuaccc

SEQ ID NO: 467183 - RNA, 32 nt, Human
gguaacugaaguaaggagagcagugaauguca

SEQ ID NO: 467184 - RNA, 32 nt, Human
gguaacugagguaaaauguuccagcucagaag

SEQ ID NO: 467185 - RNA, 32 nt, Human
gguaacugcccaugcccgaggauuuuccagcc

SEQ ID NO: 467186 - RNA, 32 nt, Human
gguaacuggaaccucuccugagggggaauccu

SEQ ID NO: 467187 - RNA, 32 nt, Human
gguaacugggacuugcccaacuuuaaaaacau

SEQ ID NO: 467188 - RNA, 32 nt, Human
gguaacuguggaaugagcucuguuagggacag

SEQ ID NO: 467189 - RNA, 32 nt, Human
gguaacuuauuuuccagcacaugaagccacca

SEQ ID NO: 467190 - RNA, 32 nt, Human
gguaacuucucccuucuccugaccuacuuccu

SEQ ID NO: 467191 - RNA, 32 nt, Human
gguaacuucuuggcuuucuuuuguaccacaac

SEQ ID NO: 467192 - RNA, 32 nt, Human
gguaacuugcaggaauauucuauuggaaaaga

SEQ ID NO: 467193 - RNA, 32 nt, Human
gguaagaaaagggauggagagagaugggauga

SEQ ID NO: 467194 - RNA, 32 nt, Human
gguaagaaaguguggaaaguauaaaauaaauu

SEQ ID NO: 467195 - RNA, 32 nt, Human
gguaagaauguucagggggcugcccaggaggg

SEQ ID NO: 467196 - RNA, 31 nt, Human
gguaagacaccaaccuuuacauucuucccug

SEQ ID NO: 467197 - RNA, 32 nt, Human
gguaagagaaaugcuagauucuguacuucuau

SEQ ID NO: 467198 - RNA, 32 nt, Human
gguaagaggaagggaaaugcagccucaguaag

SEQ ID NO: 467199 - RNA, 32 nt, Human
gguaagagggcccauauucauucuuugccaug

SEQ ID NO: 467200 - RNA, 32 nt, Human
gguaagaggggugcuggaggacauggacagcg

SEQ ID NO: 467201 - RNA, 32 nt, Human
gguaagauugccacgugccugcugguacugug

SEQ ID NO: 467202 - RNA, 32 nt, Human
gguaagauuggaaacacaugaggcagagggaa

SEQ ID NO: 467203 - RNA, 32 nt, Human
gguaagccgagaucaccuccagccuggacacu

SEQ ID NO: 467204 - RNA, 32 nt, Human
gguaagcuccauccuuucucauggccucagcc

SEQ ID NO: 467205 - RNA, 32 nt, Human
gguaagcugcagcucugcucaacugcgucuuc

SEQ ID NO: 467206 - RNA, 32 nt, Human
gguaagcuuugcucaccucccucucucuugcu

SEQ ID NO: 467207 - RNA, 32 nt, Human
gguaaggaagagagagugggaggcagagugug

SEQ ID NO: 467208 - RNA, 30 nt, Human
gguaaggacucaagagaggugaaucauggg

SEQ ID NO: 467209 - RNA, 32 nt, Human
gguaaggagacugaauaucucaaucaguauuu

SEQ ID NO: 467210 - RNA, 32 nt, Human
gguaaggauuccaggaaugaagcugccauuuc

SEQ ID NO: 467211 - RNA, 32 nt, Human
gguaaggcccggugccuggaagaccucccagc

SEQ ID NO: 467212 - RNA, 22 nt, Human
gguaaggcgggcaccccgcgag

SEQ ID NO: 467213 - RNA, 22 nt, Human
gguaagggacgagucuucugga

SEQ ID NO: 467214 - RNA, 32 nt, Human
gguaagggcagccugcagcaccaugccaaggg

SEQ ID NO: 467215 - RNA, 32 nt, Human
gguaagggccaaaucacucuccuccauagcag

SEQ ID NO: 467216 - RNA, 32 nt, Human
gguaagggugaggccugcuggguggggagugg

SEQ ID NO: 467217 - RNA, 32 nt, Human
gguaagguauccacccucgaugcaauccaccu

SEQ ID NO: 467218 - RNA, 32 nt, Human
gguaaguagaggcacaugcagacucuggccac

SEQ ID NO: 467219 - RNA, 32 nt, Human
gguaaguauuaucuucagauuuccagagcucu

SEQ ID NO: 467220 - RNA, 32 nt, Human
gguaaguuuuagucaaaagaauucuuucuuga

SEQ ID NO: 467221 - RNA, 32 nt, Human
gguaauaaaauauauuaaaauaguuuaauuuu

SEQ ID NO: 467222 - RNA, 32 nt, Human
gguaauaaacacucuuuucaguuggaaauaaa

SEQ ID NO: 467223 - RNA, 32 nt, Human
gguaauacuacugauauuugcuuuucuauaua

SEQ ID NO: 467224 - RNA, 32 nt, Human
gguaauagcuucuauaaaaucugccauaguug

SEQ ID NO: 467225 - RNA, 21 nt, Human
gguaauaguacacccgaucau

SEQ ID NO: 467226 - RNA, 32 nt, Human
gguaaucaacuacuggcuccuccagcagcuca

SEQ ID NO: 467227 - RNA, 32 nt, Human
gguaaucaaucugcaucccauuuuggaugaga

SEQ ID NO: 467228 - RNA, 32 nt, Human
gguaaucacauacuuguucacaucuacaccgu

SEQ ID NO: 467229 - RNA, 32 nt, Human
gguaaucaucugcauuuggcuacugcaaagcu

SEQ ID NO: 467230 - RNA, 32 nt, Human
gguaauccaagggccugugacucuuuugguaa

SEQ ID NO: 467231 - RNA, 32 nt, Human
gguaaucgugcagaacagcaugugggcucugg

SEQ ID NO: 467232 - RNA, 32 nt, Human
gguaaucuaccaaucuaccaucgagcuuaggg

SEQ ID NO: 467233 - RNA, 32 nt, Human
gguaaucuggucaguaagauugagacuuaguu

SEQ ID NO: 467234 - RNA, 32 nt, Human
gguaaugagcuuguuucuugucuauuuugucu

SEQ ID NO: 467235 - RNA, 32 nt, Human
gguaaugaggugcagagguguggggaagaccu

SEQ ID NO: 467236 - RNA, 32 nt, Human
gguaaugauaaauauuucccuuaaauaauuga

SEQ ID NO: 467237 - RNA, 32 nt, Human
gguaaugaucaaagaugccugaaguguugggg

SEQ ID NO: 467238 - RNA, 32 nt, Human
gguaaugauucaaggaaacauaaucacacacg

SEQ ID NO: 467239 - RNA, 32 nt, Human
gguaaugccuaauguggucugccugugaaucu

SEQ ID NO: 467240 - RNA, 32 nt, Human
gguaaugcucuguggcuguccucuagcuagug

SEQ ID NO: 467241 - RNA, 32 nt, Human
gguaaugcuuugguauuuucuuggggaagacc

SEQ ID NO: 467242 - RNA, 29 nt, Human
gguaauggaguuuccuaaagugugcucug

SEQ ID NO: 467243 - RNA, 32 nt, Human
gguaauggauaugaaagagaaaaugcuuucuc

SEQ ID NO: 467244 - RNA, 32 nt, Human
gguaauguaaaaucauuucauuuaucauucau

SEQ ID NO: 467245 - RNA, 32 nt, Human
gguaaugucuuucccuaauacaggguugcgcu

SEQ ID NO: 467246 - RNA, 32 nt, Human
gguaaugugaggacgaagcgggcacggagcca

SEQ ID NO: 467247 - RNA, 31 nt, Human
gguaauuaguuucagacccugcacugaggcc

SEQ ID NO: 467248 - RNA, 32 nt, Human
gguaauucaguauuuauuauguuauuagagaa

SEQ ID NO: 467249 - RNA, 32 nt, Human
gguaauucaguuauuugcacaaguucagugag

SEQ ID NO: 467250 - RNA, 32 nt, Human
gguaauuccuccagagcuguuugcuggcuuca

SEQ ID NO: 467251 - RNA, 32 nt, Human
gguaauucuaacccacacauugucauucccaa

SEQ ID NO: 467252 - RNA, 32 nt, Human
gguaauucuucaccucuuuucucagcucccug

SEQ ID NO: 467253 - RNA, 32 nt, Human
gguaauuggggaggggagagaggugggggcaa

SEQ ID NO: 467254 - RNA, 32 nt, Human
gguaauuucauggcuguuacugcccagucaua

SEQ ID NO: 467255 - RNA, 32 nt, Human
gguaauuucccugaugucuguauaaaaucaag

SEQ ID NO: 467256 - RNA, 32 nt, Human
gguacaaaauuccaucucagccacuuucgagg

SEQ ID NO: 467257 - RNA, 32 nt, Human
gguacaaagcccagaggaagugguagagcagc

SEQ ID NO: 467258 - RNA, 32 nt, Human
gguacaacacaaaucuucaucaacagaagaau

SEQ ID NO: 467259 - RNA, 32 nt, Human
gguacaacaggguaggaccauccaggcagaac

SEQ ID NO: 467260 - RNA, 32 nt, Human
gguacaacuuuaggccacaggaaagguuauuu

SEQ ID NO: 467261 - RNA, 32 nt, Human
gguacaagauguggagguggaagacagugaua

SEQ ID NO: 467262 - RNA, 32 nt, Human
gguacaaggaagcacaacgccccaauccgcuu

SEQ ID NO: 467263 - RNA, 24 nt, Human
gguacaagugauucuccugccuca

SEQ ID NO: 467264 - RNA, 32 nt, Human
gguacaagugcagcaacaggaagaugucuuuu

SEQ ID NO: 467265 - RNA, 32 nt, Human
gguacaaguggcaaccugcuuccauggccgug

SEQ ID NO: 467266 - RNA, 32 nt, Human
gguacaauuccuuuauuccaaggccugcuaga

SEQ ID NO: 467267 - RNA, 32 nt, Human
gguacacacaaaguucuccugucucaccaucu

SEQ ID NO: 467268 - RNA, 32 nt, Human
gguacacacagcucaggagacacugcuuguuc

SEQ ID NO: 467269 - RNA, 24 nt, Human
gguacacaccagacauugaccaua

SEQ ID NO: 467270 - RNA, 24 nt, Human
gguacacaccagauaucgaccaua

SEQ ID NO: 467271 - RNA, 21 nt, Human
gguacacauacacagcuuccu

SEQ ID NO: 467272 - RNA, 32 nt, Human
gguacacauccucagaaugcaggaagugccug

SEQ ID NO: 467273 - RNA, 32 nt, Human
gguacacauggggcugggagggcaaagauggg

SEQ ID NO: 467274 - RNA, 32 nt, Human
gguacaccacuacacuccagccugggcaacag

SEQ ID NO: 467275 - RNA, 32 nt, Human
gguacaccauugacuucauuuguacuuaguua

SEQ ID NO: 467276 - RNA, 32 nt, Human
gguacaccccuaacagagccagugccaacaaa

SEQ ID NO: 467277 - RNA, 32 nt, Human
gguacaccuacaggcuggaguguaaaauggac

SEQ ID NO: 467278 - RNA, 32 nt, Human
gguacacgccuguaaucccagcuacucaggag

SEQ ID NO: 467279 - RNA, 32 nt, Human
gguacacgcuuucuccccagacggcacccacu

SEQ ID NO: 467280 - RNA, 32 nt, Human
gguacacgggcccagaggacuggggugacuca

SEQ ID NO: 467281 - RNA, 32 nt, Human
gguacacuagcacaccucugguuauacaugca

SEQ ID NO: 467282 - RNA, 32 nt, Human
gguacagaaacagauaccuagacuaugcaaca

SEQ ID NO: 467283 - RNA, 31 nt, Human
gguacagaaagaagagaaaagacugaacuga

SEQ ID NO: 467284 - RNA, 23 nt, Human
gguacagaaagccauuugaguga

SEQ ID NO: 467285 - RNA, 32 nt, Human
gguacagaaggugaguuaaagcugguggaaaa

SEQ ID NO: 467286 - RNA, 32 nt, Human
gguacagagggagggcuggagaacuuagcugg

SEQ ID NO: 467287 - RNA, 32 nt, Human
gguacagaugggcauaggugcagugagugcag

SEQ ID NO: 467288 - RNA, 21 nt, Human
gguacagauguuccugccuua

SEQ ID NO: 467289 - RNA, 20 nt, Human
gguacagauugccuacuuga

SEQ ID NO: 467290 - RNA, 32 nt, Human
gguacagcagucaggggucaggugucaggccc

SEQ ID NO: 467291 - RNA, 32 nt, Human
gguacagcuugaaaagcacuuuuuacuacaua

SEQ ID NO: 467292 - RNA, 32 nt, Human
gguacaggaaggcaaaguugacuggggcccac

SEQ ID NO: 467293 - RNA, 32 nt, Human
gguacaggaguccacaggaggccagguuuugg

SEQ ID NO: 467294 - RNA, 32 nt, Human
gguacaggcaccugccaccacacccagcuaau

SEQ ID NO: 467295 - RNA, 32 nt, Human
gguacaggugggcauaggugcagugagugcag

SEQ ID NO: 467296 - RNA, 32 nt, Human
gguacagguggguucccucaucuggaguuccc

SEQ ID NO: 467297 - RNA, 32 nt, Human
gguacagguuccccauucuagcacugaguauu

SEQ ID NO: 467298 - RNA, 23 nt, Human
gguacaguaagucuuugaccaca

SEQ ID NO: 467299 - RNA, 32 nt, Human
gguacagucucagcucacagcaaccacucucu

SEQ ID NO: 467300 - RNA, 32 nt, Human
gguacagugagaaguucucccucccagggcca

SEQ ID NO: 467301 - RNA, 32 nt, Human
gguacagugaugggaauuuggaagcaccccug

SEQ ID NO: 467302 - RNA, 22 nt, Human
gguacaguggcucaugccugua

SEQ ID NO: 467303 - RNA, 22 nt, Human
gguacagugguucaugccugua

SEQ ID NO: 467304 - RNA, 32 nt, Human
gguacagugugcacugcuugggugaugagugc

SEQ ID NO: 467305 - RNA, 32 nt, Human
gguacaguguucagcauggggguggggugguc

SEQ ID NO: 467306 - RNA, 32 nt, Human
gguacaguuaaguuuuuggugccucggaggua

SEQ ID NO: 467307 - RNA, 20 nt, Human
gguacaugccuauaguccca

SEQ ID NO: 467308 - RNA, 20 nt, Human
gguacaugccuguaauccca

SEQ ID NO: 467309 - RNA, 32 nt, Human
gguacaugccuguaaucccagcuacacuggag

SEQ ID NO: 467310 - RNA, 32 nt, Human
gguacaugccuguaaucccagcuacucaggag

SEQ ID NO: 467311 - RNA, 32 nt, Human
gguacaugccuguaaucccagcuacuugggag

SEQ ID NO: 467312 - RNA, 32 nt, Human
gguacaugccuguagucccagauacucgggag

SEQ ID NO: 467313 - RNA, 32 nt, Human
gguacauguuuaccuauguaacaaaccugcac

SEQ ID NO: 467314 - RNA, 32 nt, Human
gguacauuuauugcuuuaaucugcacucauug

SEQ ID NO: 467315 - RNA, 32 nt, Human
gguacauuuuaaaauccugauuuuggagacuu

SEQ ID NO: 467316 - RNA, 32 nt, Human
gguaccaaaacaggaagccucacuaggaauga

SEQ ID NO: 467317 - RNA, 32 nt, Human
gguaccaagagacuccuugagagaccaggcaa

SEQ ID NO: 467318 - RNA, 20 nt, Human
gguaccaaggacacaggcac

SEQ ID NO: 467319 - RNA, 32 nt, Human
gguaccacaccagggccucagccuggccccuc

SEQ ID NO: 467320 - RNA, 23 nt, Human
gguaccacagauggcugaucaca

SEQ ID NO: 467321 - RNA, 32 nt, Human
gguaccacaggaagccgccuagugcagagagg

SEQ ID NO: 467322 - RNA, 32 nt, Human
gguaccacccccagggcaggauggggacagga

SEQ ID NO: 467323 - RNA, 32 nt, Human
gguaccacugcacuccagccugggugacagag

SEQ ID NO: 467324 - RNA, 32 nt, Human
gguaccagccauacugaaugcuuacucugagc

SEQ ID NO: 467325 - RNA, 32 nt, Human
gguaccagccugagacuggagccagguuccuc

SEQ ID NO: 467326 - RNA, 21 nt, Human
gguaccagcguccuggcccac

SEQ ID NO: 467327 - RNA, 32 nt, Human
gguaccagcugggauguuggcagcagccgcuc

SEQ ID NO: 467328 - RNA, 32 nt, Human
gguaccaucaaaacggaaggcgagcaugaccc

SEQ ID NO: 467329 - RNA, 32 nt, Human
gguaccaucuuauuuuccccuuauacagauaa

SEQ ID NO: 467330 - RNA, 32 nt, Human
gguaccaucuuguauacacauauauacccaca

SEQ ID NO: 467331 - RNA, 32 nt, Human
gguaccaugccaucaguugcuggugggcccag

SEQ ID NO: 467332 - RNA, 26 nt, Human
gguaccauggugucugucauucaggg

SEQ ID NO: 467333 - RNA, 32 nt, Human
gguacccacacuugcccuuucucccucucucc

SEQ ID NO: 467334 - RNA, 32 nt, Human
gguacccaggcagagucaggagagguggucuu

SEQ ID NO: 467335 - RNA, 19 nt, Human
gguacccaggcccacucca

SEQ ID NO: 467336 - RNA, 32 nt, Human
gguacccaugagcagaggguagugggagagug

SEQ ID NO: 467337 - RNA, 32 nt, Human
gguaccccaagucccugcggccuccagcagug

SEQ ID NO: 467338 - RNA, 17 nt, Human
gguacccccagcacuuu

SEQ ID NO: 467339 - RNA, 32 nt, Human
gguacccccaggcuggggaaaaugacagcgcu

SEQ ID NO: 467340 - RNA, 32 nt, Human
gguaccccggccccucuggcccuucccucaag

SEQ ID NO: 467341 - RNA, 32 nt, Human
gguaccccucuggcccucagagcaccaauauc

SEQ ID NO: 467342 - RNA, 19 nt, Human
gguaccccuggcgcagcga

SEQ ID NO: 467343 - RNA, 32 nt, Human
gguaccccuucauguggcuguuguucaucugu

SEQ ID NO: 467344 - RNA, 32 nt, Human
gguacccucgagcacaccagacuugcagaaaa

SEQ ID NO: 467345 - RNA, 32 nt, Human
gguacccugcagcugucuccucagccacccug

SEQ ID NO: 467346 - RNA, 32 nt, Human
gguacccuguggcauggagaagccucagggaa

SEQ ID NO: 467347 - RNA, 32 nt, Human
gguacccuucccugucugcucucccaugccau

SEQ ID NO: 467348 - RNA, 32 nt, Human
gguaccgccagccuccgguaccacaguacccg

SEQ ID NO: 467349 - RNA, 32 nt, Human
gguaccgccugcugcccccgccuggcgucagu

SEQ ID NO: 467350 - RNA, 32 nt, Human
gguaccgcgccgguggcacuaggaccacuccu

SEQ ID NO: 467351 - RNA, 32 nt, Human
gguaccggaccuguacaugagcucagagcuac

SEQ ID NO: 467352 - RNA, 24 nt, Human
gguaccggcaggccgcggcgggag

SEQ ID NO: 467353 - RNA, 22 nt, Human
gguaccggcgaaacgggaucac

SEQ ID NO: 467354 - RNA, 32 nt, Human
gguaccggcgccggcgcagcugugacugucgc

SEQ ID NO: 467355 - RNA, 32 nt, Human
gguaccggugcgcccagggcagccaggagccc

SEQ ID NO: 467356 - RNA, 32 nt, Human
gguaccuaauuagacaguucuccaaacacaga

SEQ ID NO: 467357 - RNA, 32 nt, Human
gguaccuagagaccagcucccuucucuggggu

SEQ ID NO: 467358 - RNA, 31 nt, Human
gguaccuaggucuucuuuaauuucucuuggu

SEQ ID NO: 467359 - RNA, 32 nt, Human
gguaccuauaaucccagcuacuugggaggcug

SEQ ID NO: 467360 - RNA, 32 nt, Human
gguaccuaucaguuuguaucccuccccuccuu

SEQ ID NO: 467361 - RNA, 32 nt, Human
gguaccucauuuuggggagaaccuuaaaccca

SEQ ID NO: 467362 - RNA, 32 nt, Human
gguaccucccucucccucuccuggggcauuug

SEQ ID NO: 467363 - RNA, 32 nt, Human
gguaccucugcacugcagccugggcaacagaa

SEQ ID NO: 467364 - RNA, 32 nt, Human
gguaccucugcuucuugcuuugcccaccucca

SEQ ID NO: 467365 - RNA, 32 nt, Human
gguaccugcauccuuguuuuuguuuaguggau

SEQ ID NO: 467366 - RNA, 32 nt, Human
gguaccuggauggagaccugagcuggagaagg

SEQ ID NO: 467367 - RNA, 32 nt, Human
gguaccuguaaucccagcuacuagggaggcug

SEQ ID NO: 467368 - RNA, 32 nt, Human
gguaccuguaaucccagcuacucgggaggcug

SEQ ID NO: 467369 - RNA, 32 nt, Human
gguaccuguaaucccagcuacucgggagguga

SEQ ID NO: 467370 - RNA, 32 nt, Human
gguaccuguaaucccagcuacuugggaggcug

SEQ ID NO: 467371 - RNA, 32 nt, Human
gguaccuguagucccagcuacuagggaggcug

SEQ ID NO: 467372 - RNA, 32 nt, Human
gguaccuguagucccagcuacuccggaggcug

SEQ ID NO: 467373 - RNA, 32 nt, Human
gguaccugucacugcaaaugcuuugucucugg

SEQ ID NO: 467374 - RNA, 32 nt, Human
gguaccuguggagccacagcugccucagccca

SEQ ID NO: 467375 - RNA, 32 nt, Human
gguaccuugcaaguuugcacagaaaguggagc

SEQ ID NO: 467376 - RNA, 32 nt, Human
gguaccuugccaggaacaucggaaguagggca

SEQ ID NO: 467377 - RNA, 32 nt, Human
gguacgaagauacaauacuguuauucauuuau

SEQ ID NO: 467378 - RNA, 32 nt, Human
gguacgaauguccugcaucgccuuccucuuca

SEQ ID NO: 467379 - RNA, 32 nt, Human
gguacgacggggaacagcaggagcagggcgag

SEQ ID NO: 467380 - RNA, 21 nt, Human
gguacgcagacuccacacuca

SEQ ID NO: 467381 - RNA, 32 nt, Human
gguacgcauuccagggcugaauacuauugcuu

SEQ ID NO: 467382 - RNA, 32 nt, Human
gguacgcccacugcaaggccucccucccaccg

SEQ ID NO: 467383 - RNA, 32 nt, Human
gguacgcucacuguacagccaaugccuccaua

SEQ ID NO: 467384 - RNA, 32 nt, Human
gguacgcuguagaccagaccgcgacaggccag

SEQ ID NO: 467385 - RNA, 32 nt, Human
gguacggggcuguuggugacucugccuacagc

SEQ ID NO: 467386 - RNA, 21 nt, Human
gguacgggucuuccugccuca

SEQ ID NO: 467387 - RNA, 22 nt, Human
gguacgguggcucacgccugua

SEQ ID NO: 467388 - RNA, 32 nt, Human
gguacgucucccaggaguggccggacaguacc

SEQ ID NO: 467389 - RNA, 32 nt, Human
gguacgugcagcacuacggccugggcagugcc

SEQ ID NO: 467390 - RNA, 32 nt, Human
gguacgugccuguaggccuagcuacuuaggag

SEQ ID NO: 467391 - RNA, 32 nt, Human
gguacgugccuguagucccagcuacuucgggg

SEQ ID NO: 467392 - RNA, 32 nt, Human
gguacuaauuacugcccagccuggggagauca

SEQ ID NO: 467393 - RNA, 32 nt, Human
gguacuagaggaccacuggcucuggaccgucg

SEQ ID NO: 467394 - RNA, 32 nt, Human
gguacuauguagagaagacagcugaggaugcc

SEQ ID NO: 467395 - RNA, 32 nt, Human
gguacucagauguccagccgcacucucuacau

SEQ ID NO: 467396 - RNA, 20 nt, Human
gguacucagcuccaucucca

SEQ ID NO: 467397 - RNA, 24 nt, Human
gguacucagcuggcccacuccaca

SEQ ID NO: 467398 - RNA, 32 nt, Human
gguacucaucuuccuucaagacugagcaguca

SEQ ID NO: 467399 - RNA, 32 nt, Human
gguacuccagcuuugagguccuaggaaaaagg

SEQ ID NO: 467400 - RNA, 32 nt, Human
gguacuccuugaucuuuaugaaugaccgguua

SEQ ID NO: 467401 - RNA, 32 nt, Human
gguacuccuuguaguaagcuguuuucugcuca

SEQ ID NO: 467402 - RNA, 32 nt, Human
gguacucgagcagugggcgcccaggguccgag

SEQ ID NO: 467403 - RNA, 32 nt, Human
gguacucuccuguuccagccuugugaaggaac

SEQ ID NO: 467404 - RNA, 32 nt, Human
gguacucugacugcaacaucuuucaccccauu

SEQ ID NO: 467405 - RNA, 32 nt, Human
gguacucugagacaaaacacagugauggggcg

SEQ ID NO: 467406 - RNA, 32 nt, Human
gguacucugccucucugcucccugggggccaa

SEQ ID NO: 467407 - RNA, 31 nt, Human
gguacucugggaccuguuuccuggaggcccu

SEQ ID NO: 467408 - RNA, 32 nt, Human
gguacucuucagggaugagucauguggcagug

SEQ ID NO: 467409 - RNA, 32 nt, Human
gguacugaucagcgcccccacccaggacauac

SEQ ID NO: 467410 - RNA, 32 nt, Human
gguacugcaacugcuuuccucuugcccagaaa

SEQ ID NO: 467411 - RNA, 32 nt, Human
gguacugcagaacagagccugcagugagacac

SEQ ID NO: 467412 - RNA, 22 nt, Human
gguacugcauaagccgaccaca

SEQ ID NO: 467413 - RNA, 32 nt, Human
gguacugcauuucccguuucuaccuccacugc

SEQ ID NO: 467414 - RNA, 32 nt, Human
gguacugccacauuuucucuagagcagcuggc

SEQ ID NO: 467415 - RNA, 32 nt, Human
gguacuggacugggagucaggagaccuggauu

SEQ ID NO: 467416 - RNA, 32 nt, Human
gguacuggagaagcagcagggcaacuucaagg

SEQ ID NO: 467417 - RNA, 32 nt, Human
gguacuggaggguggguaccuucaggcugugg

SEQ ID NO: 467418 - RNA, 32 nt, Human
gguacuggccacggccaugcugggcagcucua

SEQ ID NO: 467419 - RNA, 32 nt, Human
gguacuggccugggugacagagcaggacauga

SEQ ID NO: 467420 - RNA, 32 nt, Human
gguacuggggacacaggaaggacgaggcagag

SEQ ID NO: 467421 - RNA, 32 nt, Human
gguacugguggaaaaacugagauacggaaacc

SEQ ID NO: 467422 - RNA, 17 nt, Human
gguacuguaacauucca

SEQ ID NO: 467423 - RNA, 32 nt, Human
gguacugucugggccugggaggcgagagcagu

SEQ ID NO: 467424 - RNA, 32 nt, Human
gguacugugaggaagagcaggcaccagcagca

SEQ ID NO: 467425 - RNA, 32 nt, Human
gguacugugguuucugugcucucuccuuccug

SEQ ID NO: 467426 - RNA, 32 nt, Human
gguacuguuguucacaugauuuauuuaccaua

SEQ ID NO: 467427 - RNA, 21 nt, Human
gguacuguuuauuugcuccuu

SEQ ID NO: 467428 - RNA, 18 nt, Human
gguacuguuucugccuca

SEQ ID NO: 467429 - RNA, 32 nt, Human
gguacuuaggaagaagucuaggaugugaauua

SEQ ID NO: 467430 - RNA, 32 nt, Human
gguacuucagauuuucuuuuugucuuguguca

SEQ ID NO: 467431 - RNA, 24 nt, Human
gguacuucuggggaccuccuggca

SEQ ID NO: 467432 - RNA, 21 nt, Human
gguacuugaccggaagaagac

SEQ ID NO: 467433 - RNA, 32 nt, Human
gguacuugauucuaaaccugugccagucuaua

SEQ ID NO: 467434 - RNA, 32 nt, Human
gguacuuggcacccuguuggguauuggguaca

SEQ ID NO: 467435 - RNA, 32 nt, Human
gguacuugucauggagcuggcacugcggcgcu

SEQ ID NO: 467436 - RNA, 32 nt, Human
gguacuuguccacccugccuccucuguucuga

SEQ ID NO: 467437 - RNA, 32 nt, Human
gguacuuguggacacagcucuucuccaggcug

SEQ ID NO: 467438 - RNA, 32 nt, Human
gguagaaaccaucuacccucuaccaccuugca

SEQ ID NO: 467439 - RNA, 32 nt, Human
gguagaaagaggagugaugggggagggggauu

SEQ ID NO: 467440 - RNA, 32 nt, Human
gguagaaaguagggcauaaucagaauauagag

SEQ ID NO: 467441 - RNA, 32 nt, Human
gguagaaauguucaagcuuaugcacaggcuug

SEQ ID NO: 467442 - RNA, 32 nt, Human
gguagaacaacaaaagcacuuuuccaucuugu

SEQ ID NO: 467443 - RNA, 32 nt, Human
gguagaacacauaggauugcaaaaccaauuag

SEQ ID NO: 467444 - RNA, 32 nt, Human
gguagaacaggugucguacacugugaaauguu

SEQ ID NO: 467445 - RNA, 19 nt, Human
gguagaaccaguauuuuug

SEQ ID NO: 467446 - RNA, 32 nt, Human
gguagaaccaguauuuuuguuguuuauuuaua

SEQ ID NO: 467447 - RNA, 32 nt, Human
gguagaaccaugagcuuuguugauguugauca

SEQ ID NO: 467448 - RNA, 32 nt, Human
gguagaaccccuggauacauuauuugcccucu

SEQ ID NO: 467449 - RNA, 32 nt, Human
gguagaagccacccuucccugccuccagcugu

SEQ ID NO: 467450 - RNA, 32 nt, Human
gguagaagcuggcuaaccuccacuuccacauu

SEQ ID NO: 467451 - RNA, 32 nt, Human
gguagaaggagagaaggggaguggaggaagca

SEQ ID NO: 467452 - RNA, 32 nt, Human
gguagaaggagagagaaaggggagagaaagga

SEQ ID NO: 467453 - RNA, 22 nt, Human
gguagaaggggaggacacuggu

SEQ ID NO: 467454 - RNA, 32 nt, Human
gguagaagguuaagaagagaaaaugcuaaaua

SEQ ID NO: 467455 - RNA, 32 nt, Human
gguagaaguauuagcuugcauuugaugaccuu

SEQ ID NO: 467456 - RNA, 32 nt, Human
gguagaauauaaaagcucauuaaucauccugg

SEQ ID NO: 467457 - RNA, 32 nt, Human
gguagaauggacaagugacacuguggacaaug

SEQ ID NO: 467458 - RNA, 19 nt, Human
gguagaauugugguucccu

SEQ ID NO: 467459 - RNA, 32 nt, Human
gguagacaaacaacagcugcaguugagaacug

SEQ ID NO: 467460 - RNA, 32 nt, Human
gguagacacuuaggugaugauagccaaaacau

SEQ ID NO: 467461 - RNA, 32 nt, Human
gguagacagcgcaaucuguggagcuuuuacuc

SEQ ID NO: 467462 - RNA, 32 nt, Human
gguagacagguggggaaaaggcccgugaguca

SEQ ID NO: 467463 - RNA, 32 nt, Human
gguagaccagauggucugggaaaguucugugc

SEQ ID NO: 467464 - RNA, 32 nt, Human
gguagacccaacucaucaggcagcggguaggg

SEQ ID NO: 467465 - RNA, 32 nt, Human
gguagacgcugguaggguaagggagcuaagua

SEQ ID NO: 467466 - RNA, 32 nt, Human
gguagacggggcuguuuggugccugaaggaug

SEQ ID NO: 467467 - RNA, 32 nt, Human
gguagacuuggagcuguccuccagagggguca

SEQ ID NO: 467468 - RNA, 32 nt, Human
gguagagaccgagccucugucacugcaggcac

SEQ ID NO: 467469 - RNA, 32 nt, Human
gguagagcacgcgcagcugggccaggccuacg

SEQ ID NO: 467470 - RNA, 32 nt, Human
gguagagccgugccucuugggcaggcucccau

SEQ ID NO: 467471 - RNA, 19 nt, Human
gguagagccucuacuuucc

SEQ ID NO: 467472 - RNA, 17 nt, Human
gguagagcggcaggacu

SEQ ID NO: 467473 - RNA, 19 nt, Human
gguagagcggccacuucug

SEQ ID NO: 467474 - RNA, 32 nt, Human
gguagaggagagaauugggggaguugcagggg

SEQ ID NO: 467475 - RNA, 32 nt, Human
gguagaggaggaaacuccucuccacaaaucca

SEQ ID NO: 467476 - RNA, 31 nt, Human
gguagaggaugacuggcacacuuguauagua

SEQ ID NO: 467477 - RNA, 32 nt, Human
gguagaggaugagaggaugaagagagguuaug

SEQ ID NO: 467478 - RNA, 32 nt, Human
gguagagggcuggccccuccucucaucuuccc

SEQ ID NO: 467479 - RNA, 21 nt, Human
gguagaggggcccaggauucc

SEQ ID NO: 467480 - RNA, 19 nt, Human
gguagaggggguauuucug

SEQ ID NO: 467481 - RNA, 31 nt, Human
gguagaggucacuucuucccagcccugccuc

SEQ ID NO: 467482 - RNA, 21 nt, Human
gguagaggugggaggacugau

SEQ ID NO: 467483 - RNA, 18 nt, Human
gguagagguugcagugag

SEQ ID NO: 467484 - RNA, 32 nt, Human
gguagagugugaacaucaugaaauugccaaug

SEQ ID NO: 467485 - RNA, 32 nt, Human
gguagaguuacuugacauguaucauguaauaa

SEQ ID NO: 467486 - RNA, 20 nt, Human
gguagaguugagcauuuuug

SEQ ID NO: 467487 - RNA, 32 nt, Human
gguagaguugauugaggcccuagaucaggacc

SEQ ID NO: 467488 - RNA, 32 nt, Human
gguagauacaggauaagauagauacaggguaa

SEQ ID NO: 467489 - RNA, 32 nt, Human
gguagauaggggcacugugcuuaaacaaaaug

SEQ ID NO: 467490 - RNA, 32 nt, Human
gguagauaguaaaaucacuggcuuuuuccagc

SEQ ID NO: 467491 - RNA, 32 nt, Human
gguagauaguacauacuugccauuucuauacu

SEQ ID NO: 467492 - RNA, 32 nt, Human
gguagaucacaaggucaggaaaucgagaccau

SEQ ID NO: 467493 - RNA, 32 nt, Human
gguagaucacaaggucaggaaauugagaccau

SEQ ID NO: 467494 - RNA, 32 nt, Human
gguagaucacugcauccgguuccuccucuuuc

SEQ ID NO: 467495 - RNA, 32 nt, Human
gguagaucacuugaggucaggagaccagccgg

SEQ ID NO: 467496 - RNA, 32 nt, Human
gguagaucacuugaugccaggaguuccagacc

SEQ ID NO: 467497 - RNA, 32 nt, Human
gguagaugaggccuucccauggcuacagugug

SEQ ID NO: 467498 - RNA, 32 nt, Human
gguagaugccuguaauuccagcuacucaggag

SEQ ID NO: 467499 - RNA, 32 nt, Human
gguagaugcuuagcuggcaguaugaguugugu

SEQ ID NO: 467500 - RNA, 22 nt, Human
gguagauggaaggaucccugga

SEQ ID NO: 467501 - RNA, 32 nt, Human
gguagauggugugugugaaacagugaagucuc

SEQ ID NO: 467502 - RNA, 32 nt, Human
gguagauucaaagcuccacccaccucauccca

SEQ ID NO: 467503 - RNA, 32 nt, Human
gguagauuccaggguguggaaguggcuuugug

SEQ ID NO: 467504 - RNA, 32 nt, Human
gguagauuugcugaaauggagaaacaaagaca

SEQ ID NO: 467505 - RNA, 32 nt, Human
gguagcaccacugcacuucagccuggacaaca

SEQ ID NO: 467506 - RNA, 32 nt, Human
gguagcagaaaauccuauugauuucaucucac

SEQ ID NO: 467507 - RNA, 32 nt, Human
gguagcagacuccucagaguccucuugacaca

SEQ ID NO: 467508 - RNA, 32 nt, Human
gguagcagaggacuagguguuaggacagacuc

SEQ ID NO: 467509 - RNA, 32 nt, Human
gguagcagauuggggaaaaugaagcagcccac

SEQ ID NO: 467510 - RNA, 20 nt, Human
gguagcagcaggcucaggca

SEQ ID NO: 467511 - RNA, 32 nt, Human
gguagcagcuccaaagcauuggaugcuggaua

SEQ ID NO: 467512 - RNA, 32 nt, Human
gguagcagcucucuucugucagcugaauguua

SEQ ID NO: 467513 - RNA, 32 nt, Human
gguagcaggaggcuggaagaaaggacagaagu

SEQ ID NO: 467514 - RNA, 23 nt, Human
gguagcagggcugucugguuuua

SEQ ID NO: 467515 - RNA, 32 nt, Human
gguagcaguaacucucugaagcauuuugaggu

SEQ ID NO: 467516 - RNA, 32 nt, Human
gguagcagugccuguguguuggagcucaguua

SEQ ID NO: 467517 - RNA, 32 nt, Human
gguagcaugauggcuguagcuguuucaugggc

SEQ ID NO: 467518 - RNA, 32 nt, Human
gguagcauggauggagagaggauucugaauaa

SEQ ID NO: 467519 - RNA, 32 nt, Human
gguagcauggcagaggcuggagaggauuaaca

SEQ ID NO: 467520 - RNA, 22 nt, Human
gguagccaacacgcugugcuca

SEQ ID NO: 467521 - RNA, 32 nt, Human
gguagccacauuuugaauccucuaccacaagu

SEQ ID NO: 467522 - RNA, 32 nt, Human
gguagccacuucagaggaagcucggcggcugu

SEQ ID NO: 467523 - RNA, 32 nt, Human
gguagccaggugggugaaggggagcgaggacg

SEQ ID NO: 467524 - RNA, 32 nt, Human
gguagccaugauuuaucccagccuggggcucc

SEQ ID NO: 467525 - RNA, 32 nt, Human
gguagcccagcacugugaagacccagcaggaa

SEQ ID NO: 467526 - RNA, 32 nt, Human
gguagccgagacuggagccuaaggcuggaucu

SEQ ID NO: 467527 - RNA, 32 nt, Human
gguagccgggcaguggaggucccggaugaggc

SEQ ID NO: 467528 - RNA, 32 nt, Human
gguagccuacuuccuuacccccgaauauuggu

SEQ ID NO: 467529 - RNA, 32 nt, Human
gguagccucccacugcaucccauccugaauau

SEQ ID NO: 467530 - RNA, 32 nt, Human
gguagccugaagugggagauugcuugagucca

SEQ ID NO: 467531 - RNA, 32 nt, Human
gguagccugcugcuucucacagacaccucaca

SEQ ID NO: 467532 - RNA, 32 nt, Human
gguagccugguagcaccaaaucccaauuaaug

SEQ ID NO: 467533 - RNA, 32 nt, Human
gguagccuuugucccuucaugccuuucaauuc

SEQ ID NO: 467534 - RNA, 32 nt, Human
gguagcgacccccucccccaaccccucucccu

SEQ ID NO: 467535 - RNA, 32 nt, Human
gguagcgcugggaguguagaaguggccugccc

SEQ ID NO: 467536 - RNA, 21 nt, Human
gguagcggcaaaacucaggca

SEQ ID NO: 467537 - RNA, 32 nt, Human
gguagcuaggguauaguggcuggugaggcugc

SEQ ID NO: 467538 - RNA, 32 nt, Human
gguagcuauggaugggacaggaagcugccaac

SEQ ID NO: 467539 - RNA, 23 nt, Human
gguagcucacaccuauaauccca

SEQ ID NO: 467540 - RNA, 23 nt, Human
gguagcucacaccuguaauccca

SEQ ID NO: 467541 - RNA, 23 nt, Human
gguagcucacgccuguaauccca

SEQ ID NO: 467542 - RNA, 23 nt, Human
gguagcucaugccuauaauccca

SEQ ID NO: 467543 - RNA, 23 nt, Human
gguagcucaugccuguaauccca

SEQ ID NO: 467544 - RNA, 23 nt, Human
gguagcucaugcuuguaauccca

SEQ ID NO: 467545 - RNA, 21 nt, Human
gguagcuccacaguguuucau

SEQ ID NO: 467546 - RNA, 32 nt, Human
gguagcuccaccccaacucccuucugcugggu

SEQ ID NO: 467547 - RNA, 32 nt, Human
gguagcuccagcgauggugcugcccaggccuc

SEQ ID NO: 467548 - RNA, 32 nt, Human
gguagcucccaccaggacagagcugccaacug

SEQ ID NO: 467549 - RNA, 32 nt, Human
gguagcucucucccucggcuuccagaguccac

SEQ ID NO: 467550 - RNA, 32 nt, Human
gguagcucugggauuugccuuccuucaugucc

SEQ ID NO: 467551 - RNA, 32 nt, Human
gguagcucuugugucuguggacucugcucagc

SEQ ID NO: 467552 - RNA, 32 nt, Human
gguagcugagcugagaggacauauggcccacg

SEQ ID NO: 467553 - RNA, 32 nt, Human
gguagcugcacugggcaugggguggugguggg

SEQ ID NO: 467554 - RNA, 32 nt, Human
gguagcugcaggcucagaagagacugagcuug

SEQ ID NO: 467555 - RNA, 32 nt, Human
gguagcugcuuugcugaagaccucacacgaug

SEQ ID NO: 467556 - RNA, 32 nt, Human
gguagcuggccucuguggggauuguaagugcc

SEQ ID NO: 467557 - RNA, 21 nt, Human
gguagcugggagcucugguca

SEQ ID NO: 467558 - RNA, 32 nt, Human
gguagcugggauuacaggcacccaccaccacg

SEQ ID NO: 467559 - RNA, 32 nt, Human
gguagcugggauuacaggcacgcgcugccaca

SEQ ID NO: 467560 - RNA, 32 nt, Human
gguagcugggauuacaggcaugugccacaacg

SEQ ID NO: 467561 - RNA, 32 nt, Human
gguagcugggauuacaggcaugugccaccaca

SEQ ID NO: 467562 - RNA, 32 nt, Human
gguagcugggauuacaggcaugugccaccacg

SEQ ID NO: 467563 - RNA, 32 nt, Human
gguagcugggauuacaggcucccgccaccacg

SEQ ID NO: 467564 - RNA, 32 nt, Human
gguagcugggauuacaggugcccaccaacaug

SEQ ID NO: 467565 - RNA, 32 nt, Human
gguagcugggauuacaggugugagccacugca

SEQ ID NO: 467566 - RNA, 32 nt, Human
gguagcugggcugggacgcugggacaggaccc

SEQ ID NO: 467567 - RNA, 21 nt, Human
gguagcuggggcucccaagaa

SEQ ID NO: 467568 - RNA, 32 nt, Human
gguagcugugguguugaaacacuggacuugga

SEQ ID NO: 467569 - RNA, 32 nt, Human
gguagcugugugcagucacugcagcuugccag

SEQ ID NO: 467570 - RNA, 22 nt, Human
gguagcuuccuuuuagucuuca

SEQ ID NO: 467571 - RNA, 32 nt, Human
gguagcuucuuuccucuucguccugaugcugc

SEQ ID NO: 467572 - RNA, 32 nt, Human
gguagcuugaagcacaccacuguccauuuauu

SEQ ID NO: 467573 - RNA, 32 nt, Human
gguagcuugcaggagcaucugaugaaugaucc

SEQ ID NO: 467574 - RNA, 22 nt, Human
gguagcuuuacguguggcuaca

SEQ ID NO: 467575 - RNA, 32 nt, Human
gguagcuuugggcacugcagcucuggacuuuu

SEQ ID NO: 467576 - RNA, 19 nt, Human
gguaggaaaagagcaggau

SEQ ID NO: 467577 - RNA, 32 nt, Human
gguaggaaaggaugauauuacaagggucaaaa

SEQ ID NO: 467578 - RNA, 32 nt, Human
gguaggaagugauugcaaacaggcuggauuug

SEQ ID NO: 467579 - RNA, 32 nt, Human
gguaggaagugggggccaggagagcagcgggc

SEQ ID NO: 467580 - RNA, 32 nt, Human
gguaggaauuguuacuuguuacugcagcagca

SEQ ID NO: 467581 - RNA, 32 nt, Human
gguaggaccaggcuucccggcuaggcacgccu

SEQ ID NO: 467582 - RNA, 20 nt, Human
gguaggaccauccgcuucca

SEQ ID NO: 467583 - RNA, 32 nt, Human
gguaggacucacuggagagaaacccuaugagu

SEQ ID NO: 467584 - RNA, 32 nt, Human
gguaggagauaaggagaaagaacagauacggu

SEQ ID NO: 467585 - RNA, 32 nt, Human
gguaggagcugcuggaacaggagaggcuucag

SEQ ID NO: 467586 - RNA, 32 nt, Human
gguaggagcuggagaugaagagacugcuagaa

SEQ ID NO: 467587 - RNA, 32 nt, Human
gguaggaggagaagaaacacagggaaagagac

SEQ ID NO: 467588 - RNA, 32 nt, Human
gguaggaggagagaaggcuggggagggcuggg

SEQ ID NO: 467589 - RNA, 32 nt, Human
gguaggaucccuccccuuccgucuucuccacu

SEQ ID NO: 467590 - RNA, 32 nt, Human
gguaggauuguuggcaggccagccugcaguga

SEQ ID NO: 467591 - RNA, 21 nt, Human
gguaggcaaagcagucugaga

SEQ ID NO: 467592 - RNA, 32 nt, Human
gguaggcaagaggaauagaaaagggaagaaug

SEQ ID NO: 467593 - RNA, 32 nt, Human
gguaggcaccuguaaucccagcuacucgggag

SEQ ID NO: 467594 - RNA, 32 nt, Human
gguaggcaccuuucugagcuuauucuauuccc

SEQ ID NO: 467595 - RNA, 32 nt, Human
gguaggcagagggcaggcaggagaaaagaaau

SEQ ID NO: 467596 - RNA, 32 nt, Human
gguaggcagcagcaggcugaagggaucauggu

SEQ ID NO: 467597 - RNA, 32 nt, Human
gguaggcaggagccccgcccucccaggcacag

SEQ ID NO: 467598 - RNA, 32 nt, Human
gguaggccccuggcaaguaggugagaagcuuu

SEQ ID NO: 467599 - RNA, 19 nt, Human
gguaggcgcaugguuuccu

SEQ ID NO: 467600 - RNA, 32 nt, Human
gguaggcgccuguaaucucagcuacuugaaag

SEQ ID NO: 467601 - RNA, 32 nt, Human
gguaggcucagggaguucaguggggacagguc

SEQ ID NO: 467602 - RNA, 21 nt, Human
gguagggaaauggaacugagg

SEQ ID NO: 467603 - RNA, 32 nt, Human
gguagggaagggggaggggcagaggaggggaa

SEQ ID NO: 467604 - RNA, 32 nt, Human
gguagggacacguguccaugcaccacagacac

SEQ ID NO: 467605 - RNA, 32 nt, Human
gguagggacccccuuuccccagagacccucua

SEQ ID NO: 467606 - RNA, 32 nt, Human
gguagggagaaauauucucuccacuuuggggg

SEQ ID NO: 467607 - RNA, 32 nt, Human
gguagggagaggaggggcagaggcugugaaca

SEQ ID NO: 467608 - RNA, 32 nt, Human
gguagggagaggguauaacaggaagagcuuug

SEQ ID NO: 467609 - RNA, 32 nt, Human
gguagggagaucaagaccauccuggcuaacac

SEQ ID NO: 467610 - RNA, 32 nt, Human
gguagggaggcaggagccaugucaguucugaa

SEQ ID NO: 467611 - RNA, 32 nt, Human
gguagggaggggcuuagaggucaucaacucca

SEQ ID NO: 467612 - RNA, 32 nt, Human
gguagggcagcaucuguuaugggcccugagaa

SEQ ID NO: 467613 - RNA, 32 nt, Human
gguagggcagggcccuggagacgacauggugu

SEQ ID NO: 467614 - RNA, 20 nt, Human
gguagggccuggagcugcug

SEQ ID NO: 467615 - RNA, 32 nt, Human
gguagggcucacagacugugugaaguccugug

SEQ ID NO: 467616 - RNA, 32 nt, Human
gguagggcugagcuugcaagaggaucaacaug

SEQ ID NO: 467617 - RNA, 32 nt, Human
gguaggggaagaggaggggcaggagggagagu

SEQ ID NO: 467618 - RNA, 21 nt, Human
gguaggggacucacuuucuca

SEQ ID NO: 467619 - RNA, 32 nt, Human
gguaggggagcauucugccuaacagaaauuag

SEQ ID NO: 467620 - RNA, 32 nt, Human
gguaggggaucugcuucccacugugacugggc

SEQ ID NO: 467621 - RNA, 32 nt, Human
gguaggggcaagggaagagagcugaggagagg

SEQ ID NO: 467622 - RNA, 32 nt, Human
gguaggggcagcuucuggagccuugggacaga

SEQ ID NO: 467623 - RNA, 32 nt, Human
gguagggggugggcugggggaggcgggugagg

SEQ ID NO: 467624 - RNA, 32 nt, Human
gguaggggugggcugaagaacuaccuguuggg

SEQ ID NO: 467625 - RNA, 31 nt, Human
gguagggucaucaucucuacauuccuuagga

SEQ ID NO: 467626 - RNA, 32 nt, Human
gguagguaacaucuuacauucuguuuucuucc

SEQ ID NO: 467627 - RNA, 32 nt, Human
gguagguagguuuuaaaaauacuaguuaaaau

SEQ ID NO: 467628 - RNA, 32 nt, Human
gguaggucaagaagugccaccugcugaagagu

SEQ ID NO: 467629 - RNA, 32 nt, Human
gguagguccuuuucuccuccggccuaguaggg

SEQ ID NO: 467630 - RNA, 23 nt, Human
gguaggucugaacaacugccgca

SEQ ID NO: 467631 - RNA, 32 nt, Human
gguaggucugcagcuagccuacucccuuugga

SEQ ID NO: 467632 - RNA, 23 nt, Human
gguaggucuguggcccuuagaca

SEQ ID NO: 467633 - RNA, 32 nt, Human
gguaggugagggaagcgcggaggcggggcgcg

SEQ ID NO: 467634 - RNA, 32 nt, Human
gguaggugccuguaaucccagcuacuugggag

SEQ ID NO: 467635 - RNA, 22 nt, Human
gguaggugcgaggcgguuaccc

SEQ ID NO: 467636 - RNA, 32 nt, Human
gguaggugcggcagggauggggccagugcuca

SEQ ID NO: 467637 - RNA, 32 nt, Human
gguaggugcucaauaaauguuggucauuguua

SEQ ID NO: 467638 - RNA, 32 nt, Human
gguaggugcuccauuacaauccaggaaagucu

SEQ ID NO: 467639 - RNA, 32 nt, Human
gguagguggaucaccugaggucgggaguucga

SEQ ID NO: 467640 - RNA, 32 nt, Human
gguaggugggguggcuugaggucugggagggu

SEQ ID NO: 467641 - RNA, 32 nt, Human
gguaggugugcaucacauugggcuuguucuca

SEQ ID NO: 467642 - RNA, 32 nt, Human
gguagguugucaaaccaaacagagccaccgug

SEQ ID NO: 467643 - RNA, 32 nt, Human
gguaguagcugugucuguguccccucgugaaa

SEQ ID NO: 467644 - RNA, 32 nt, Human
gguaguaggacugcgcggcuccaggcugaggg

SEQ ID NO: 467645 - RNA, 32 nt, Human
gguaguaggagagcaaaaaguaugaaugggau

SEQ ID NO: 467646 - RNA, 32 nt, Human
gguaguauaagaaugaggaaaaagagguaaua

SEQ ID NO: 467647 - RNA, 32 nt, Human
gguagucaaggaaagaagcaaagggaauaccu

SEQ ID NO: 467648 - RNA, 25 nt, Human
gguagucacauggaaagcucuuuua

SEQ ID NO: 467649 - RNA, 22 nt, Human
gguagucacgccuguaauccca

SEQ ID NO: 467650 - RNA, 32 nt, Human
gguagucagaggagggaggaggaauaagggga

SEQ ID NO: 467651 - RNA, 32 nt, Human
gguagucagagugagcuacauccugccccgcc

SEQ ID NO: 467652 - RNA, 32 nt, Human
gguagucaggggcucaggagcagaucccgagg

SEQ ID NO: 467653 - RNA, 32 nt, Human
gguagucaugaaaaucaaaugaugcaaaauau

SEQ ID NO: 467654 - RNA, 32 nt, Human
gguaguccaugucugauuguaauuguuucuuu

SEQ ID NO: 467655 - RNA, 32 nt, Human
gguagucccugcucuuggcuucaccaaaucuc

SEQ ID NO: 467656 - RNA, 32 nt, Human
gguagucuagagagggucgucuggccugcuug

SEQ ID NO: 467657 - RNA, 32 nt, Human
gguagucugccccuuccuuccucucucuuuuu

SEQ ID NO: 467658 - RNA, 21 nt, Human
gguagugacugagauuuggug

SEQ ID NO: 467659 - RNA, 32 nt, Human
gguagugagacaaaauugaugauccauuaagu

SEQ ID NO: 467660 - RNA, 32 nt, Human
gguagugagcuuccacuucugcccugacugca

SEQ ID NO: 467661 - RNA, 32 nt, Human
gguagugaguagaguccucaggcacagugggc

SEQ ID NO: 467662 - RNA, 32 nt, Human
gguagugaguagcugguacuacaggugugugc

SEQ ID NO: 467663 - RNA, 32 nt, Human
gguagugcaaauucaacuucaaauauggugua

SEQ ID NO: 467664 - RNA, 32 nt, Human
gguagugccugggggcuguggcgguccucccc

SEQ ID NO: 467665 - RNA, 32 nt, Human
gguagugcggugccuuucccccagaucaugcu

SEQ ID NO: 467666 - RNA, 23 nt, Human
gguaguggaaccagacagcaggu

SEQ ID NO: 467667 - RNA, 24 nt, Human
gguaguggaacgcagacccuggug

SEQ ID NO: 467668 - RNA, 32 nt, Human
gguaguggaugggguuucuguuguaucuugug

SEQ ID NO: 467669 - RNA, 32 nt, Human
gguaguggcaugcgccuguaaucccagcuacu

SEQ ID NO: 467670 - RNA, 32 nt, Human
gguaguggcauugugcuguauccugccugggc

SEQ ID NO: 467671 - RNA, 22 nt, Human
gguaguggcgguggaccaggug

SEQ ID NO: 467672 - RNA, 32 nt, Human
gguagugggagagaggaaaggagggaaggcaa

SEQ ID NO: 467673 - RNA, 32 nt, Human
gguagugggaggagaacggucagaaucaaagu

SEQ ID NO: 467674 - RNA, 32 nt, Human
gguagugggaggugggagggaagggcuuuggg

SEQ ID NO: 467675 - RNA, 23 nt, Human
gguaguggguugcugguaguuaa

SEQ ID NO: 467676 - RNA, 32 nt, Human
gguaguggugaaggaccgauaucagaaaaaug

SEQ ID NO: 467677 - RNA, 22 nt, Human
gguaguggugguagaccuggug

SEQ ID NO: 467678 - RNA, 32 nt, Human
gguaguggugugugccuauaaucccagcuacu

SEQ ID NO: 467679 - RNA, 32 nt, Human
gguagugucaguucaacuuucagaagugccac

SEQ ID NO: 467680 - RNA, 32 nt, Human
gguagugugacugaggaggaaaccccacccuu

SEQ ID NO: 467681 - RNA, 32 nt, Human
gguaguuaacacaucaaauauuucuugcugcu

SEQ ID NO: 467682 - RNA, 32 nt, Human
gguaguuauuccugccuguguugcccaccugu

SEQ ID NO: 467683 - RNA, 32 nt, Human
gguaguuauuuugcaccagcagugccuuucuc

SEQ ID NO: 467684 - RNA, 32 nt, Human
gguaguucaagaaaugaagagcuguugauggg

SEQ ID NO: 467685 - RNA, 32 nt, Human
gguaguuccacucuugaguaugguaguccccu

SEQ ID NO: 467686 - RNA, 32 nt, Human
gguaguucuugccucuggggugaguggcuuuc

SEQ ID NO: 467687 - RNA, 32 nt, Human
gguaguugagggugacuuuuccugcugccugg

SEQ ID NO: 467688 - RNA, 32 nt, Human
gguaguuggcagaaauacagucuuccacaaag

SEQ ID NO: 467689 - RNA, 32 nt, Human
gguaguuucuacaguugggcagcugguuaggu

SEQ ID NO: 467690 - RNA, 32 nt, Human
gguaguuucugugguuggcugggaaaucgagu

SEQ ID NO: 467691 - RNA, 32 nt, Human
gguaguuugaccuccguuggugcaaugccaga

SEQ ID NO: 467692 - RNA, 32 nt, Human
gguaguuugacuuccucucuuuuuauuuggag

SEQ ID NO: 467693 - RNA, 32 nt, Human
gguaguuuggagaaggagguguugagucaguu

SEQ ID NO: 467694 - RNA, 32 nt, Human
gguaguuuuuauuuucuuccuucuacuucucu

SEQ ID NO: 467695 - RNA, 32 nt, Human
gguauaaaccucaauuuuuguaacccuauuuu

SEQ ID NO: 467696 - RNA, 32 nt, Human
gguauaaaggcuaaaagggaaaaaggauaugu

SEQ ID NO: 467697 - RNA, 32 nt, Human
gguauaacaugccacggcgguccuccaggcag

SEQ ID NO: 467698 - RNA, 32 nt, Human
gguauaagcagcuguacucaaauguucuuaaa

SEQ ID NO: 467699 - RNA, 32 nt, Human
gguauaauacaacagagcacuuuuugaggcaa

SEQ ID NO: 467700 - RNA, 32 nt, Human
gguauacacagcagaaaggguacuguccacuu

SEQ ID NO: 467701 - RNA, 32 nt, Human
gguauacaggguggaguagggagaagcugccc

SEQ ID NO: 467702 - RNA, 32 nt, Human
gguauacaucuuccccuaaugccuaucugacc

SEQ ID NO: 467703 - RNA, 32 nt, Human
gguauaccuaguccagcacugccaucaauaac

SEQ ID NO: 467704 - RNA, 32 nt, Human
gguauaccucagacuucacugugcucacaauc

SEQ ID NO: 467705 - RNA, 32 nt, Human
gguauaccugggaggauccagcaguaaucccc

SEQ ID NO: 467706 - RNA, 32 nt, Human
gguauacuguaacccagguucugccugucgug

SEQ ID NO: 467707 - RNA, 32 nt, Human
gguauagaacugcuuuucucauagguaaaagg

SEQ ID NO: 467708 - RNA, 32 nt, Human
gguauagaagagguuuccugaagaaacagacc

SEQ ID NO: 467709 - RNA, 32 nt, Human
gguauagggaaaaggcuccaggcaggagaccu

SEQ ID NO: 467710 - RNA, 32 nt, Human
gguauagggaaagguuugaggcgggaauaguc

SEQ ID NO: 467711 - RNA, 32 nt, Human
gguauaguauuuugguuuugguuccagauugu

SEQ ID NO: 467712 - RNA, 32 nt, Human
gguauagucucuaggaguuuuauuaauaguaa

SEQ ID NO: 467713 - RNA, 32 nt, Human
gguauauaaacugacauacaucagcuugaaac

SEQ ID NO: 467714 - RNA, 32 nt, Human
gguauauaaagaacccaguuccagcagggaga

SEQ ID NO: 467715 - RNA, 32 nt, Human
gguauauaaaguguuuuucaaagcggaaagau

SEQ ID NO: 467716 - RNA, 32 nt, Human
gguauaugccuguagucccagcuacucaggag

SEQ ID NO: 467717 - RNA, 32 nt, Human
gguauauguguacacacauacacaggguggau

SEQ ID NO: 467718 - RNA, 32 nt, Human
gguauauucuaggaguaagugcaggaauucag

SEQ ID NO: 467719 - RNA, 32 nt, Human
gguaucaaaaggugagaaagacgucauccacc

SEQ ID NO: 467720 - RNA, 32 nt, Human
gguaucaaaaggugagaaagacgucauccgcc

SEQ ID NO: 467721 - RNA, 32 nt, Human
gguaucacaauaaaauccuuccauuuuacuca

SEQ ID NO: 467722 - RNA, 32 nt, Human
gguaucacacuauaccagccauuugagccagc

SEQ ID NO: 467723 - RNA, 19 nt, Human
gguaucaccaucucuugaa

SEQ ID NO: 467724 - RNA, 32 nt, Human
gguaucagaaagcaagcucacauugcucucca

SEQ ID NO: 467725 - RNA, 32 nt, Human
gguaucagaacagcuucccucacuguguacag

SEQ ID NO: 467726 - RNA, 32 nt, Human
gguaucagaaccggcugcagacugcacccucg

SEQ ID NO: 467727 - RNA, 32 nt, Human
gguaucagcaacuguccucaucagucuccaua

SEQ ID NO: 467728 - RNA, 22 nt, Human
gguaucagcacucuggccugca

SEQ ID NO: 467729 - RNA, 32 nt, Human
gguaucagcuuugugcuggcuuugugaaauga

SEQ ID NO: 467730 - RNA, 32 nt, Human
gguaucaguucugcugacacuuuggcccgaaa

SEQ ID NO: 467731 - RNA, 32 nt, Human
gguaucaguuuucuuuauuuucuugaauaaaa

SEQ ID NO: 467732 - RNA, 32 nt, Human
gguaucaucucacuuuucuaauuuacaggcug

SEQ ID NO: 467733 - RNA, 32 nt, Human
gguaucaucuuccucuguccuuacuguccacg

SEQ ID NO: 467734 - RNA, 32 nt, Human
gguauccaaucacaguggccacaaauucuaga

SEQ ID NO: 467735 - RNA, 32 nt, Human
gguauccacugcacgugcgccgcccgggcuuc

SEQ ID NO: 467736 - RNA, 32 nt, Human
gguauccagcagaggggagaagaaagagagau

SEQ ID NO: 467737 - RNA, 32 nt, Human
gguauccauucugccaauucccacccauucag

SEQ ID NO: 467738 - RNA, 24 nt, Human
gguaucccagaagcauuuaccaca

SEQ ID NO: 467739 - RNA, 32 nt, Human
gguaucccaucccgaucugccucccagaacug

SEQ ID NO: 467740 - RNA, 32 nt, Human
gguauccccucccaggguccaccaagggcucc

SEQ ID NO: 467741 - RNA, 19 nt, Human
gguaucccuccacccaagu

SEQ ID NO: 467742 - RNA, 32 nt, Human
gguaucccuucugagaucaucucccccaagaa

SEQ ID NO: 467743 - RNA, 32 nt, Human
gguauccggaaggggaaaugaguuaccuuaag

SEQ ID NO: 467744 - RNA, 32 nt, Human
gguauccugcugagauuuugauuugcauuucc

SEQ ID NO: 467745 - RNA, 32 nt, Human
gguauccuggggccacccucccugccuccaaa

SEQ ID NO: 467746 - RNA, 32 nt, Human
gguauccuuuuucacacaccuuaaacuccaaa

SEQ ID NO: 467747 - RNA, 32 nt, Human
gguaucgcguugcucaggggcuuuucaacccu

SEQ ID NO: 467748 - RNA, 32 nt, Human
gguaucuauuaccaagcugcccuucagagagg

SEQ ID NO: 467749 - RNA, 32 nt, Human
gguaucucagguccuuucuaagugucccuuuc

SEQ ID NO: 467750 - RNA, 32 nt, Human
gguaucucaguuuggacaugaagagaagaccg

SEQ ID NO: 467751 - RNA, 32 nt, Human
gguaucucauuggaauuauagcuuaaauaucc

SEQ ID NO: 467752 - RNA, 32 nt, Human
gguaucucauugugguuuugauuugcauuucu

SEQ ID NO: 467753 - RNA, 32 nt, Human
gguaucuccuccuccugccucuucuauuguuc

SEQ ID NO: 467754 - RNA, 32 nt, Human
gguaucuccuugugguuuugauuuacauuucc

SEQ ID NO: 467755 - RNA, 32 nt, Human
gguaucucuguguuaagauuaguguuauuauu

SEQ ID NO: 467756 - RNA, 32 nt, Human
gguaucugacagcugugguggcugagggccgu

SEQ ID NO: 467757 - RNA, 32 nt, Human
gguaucugagucugccauaauucugagaagaa

SEQ ID NO: 467758 - RNA, 32 nt, Human
gguaucugggaggcagaguuugccgugagcug

SEQ ID NO: 467759 - RNA, 32 nt, Human
gguaucuucauacuguauuuuguaucaaaaca

SEQ ID NO: 467760 - RNA, 18 nt, Human
gguaucuugagaguuuug

SEQ ID NO: 467761 - RNA, 32 nt, Human
gguaucuugagcuugguucugggcucuuuccu

SEQ ID NO: 467762 - RNA, 32 nt, Human
gguaucuugggaucaagacugcaguuugggaa

SEQ ID NO: 467763 - RNA, 32 nt, Human
gguaucuugguugugcucuggggugggggugg

SEQ ID NO: 467764 - RNA, 32 nt, Human
gguaucuugugaguuugcaagcaaugggauga

SEQ ID NO: 467765 - RNA, 32 nt, Human
gguaucuuuucaauuaauguaucuguaaaagu

SEQ ID NO: 467766 - RNA, 19 nt, Human
gguaugaaaaaggcuccag

SEQ ID NO: 467767 - RNA, 32 nt, Human
gguaugaaaucaccaucagauccaucagcgcu

SEQ ID NO: 467768 - RNA, 32 nt, Human
gguaugaaccaccacaaccugccaggaauuuu

SEQ ID NO: 467769 - RNA, 32 nt, Human
gguaugaaccacugcaccuggcccuggauugc

SEQ ID NO: 467770 - RNA, 32 nt, Human
gguaugaagcagagcucgggaacucacagaaa

SEQ ID NO: 467771 - RNA, 32 nt, Human
gguaugaauaccaggaaacagauaacucagaa

SEQ ID NO: 467772 - RNA, 32 nt, Human
gguaugacacggccugaaccucuggcuucaga

SEQ ID NO: 467773 - RNA, 32 nt, Human
gguaugacugccucuccaacccugugggcugu

SEQ ID NO: 467774 - RNA, 32 nt, Human
gguaugagcagaggaagagaucccagauagua

SEQ ID NO: 467775 - RNA, 32 nt, Human
gguaugagcaggaggaacaaaggaaaggggag

SEQ ID NO: 467776 - RNA, 32 nt, Human
gguaugagccaccacacccagcccaacucauu

SEQ ID NO: 467777 - RNA, 32 nt, Human
gguaugagccuucugcagagcuagugcagacu

SEQ ID NO: 467778 - RNA, 32 nt, Human
gguaugagucucauccagucugugcugaucug

SEQ ID NO: 467779 - RNA, 32 nt, Human
gguaugaguggaaagaggaugggcgaggaggc

SEQ ID NO: 467780 - RNA, 32 nt, Human
gguaugaguuggggcucaguagaguuggggau

SEQ ID NO: 467781 - RNA, 32 nt, Human
gguaugaucaugagcucacugcagccuugaca

SEQ ID NO: 467782 - RNA, 32 nt, Human
gguaugcaccuguaaucccagcuacucgggag

SEQ ID NO: 467783 - RNA, 32 nt, Human
gguaugcagccgcgguaaagcagggccccucc

SEQ ID NO: 467784 - RNA, 32 nt, Human
gguaugcagccgcgguaaagcagggcuccucc

SEQ ID NO: 467785 - RNA, 32 nt, Human
gguaugcaggcccacgggcaccccagacacug

SEQ ID NO: 467786 - RNA, 32 nt, Human
gguaugccucaccaauuugcccgucuuuaaua

SEQ ID NO: 467787 - RNA, 28 nt, Human
gguaugcuggggguggaggauuuggugg

SEQ ID NO: 467788 - RNA, 32 nt, Human
gguaugcuguccucacugggccuguccacagu

SEQ ID NO: 467789 - RNA, 32 nt, Human
gguauggaauugcacauccaucucauaggaau

SEQ ID NO: 467790 - RNA, 32 nt, Human
gguauggagcagagcucgggaacucacagaaa

SEQ ID NO: 467791 - RNA, 32 nt, Human
gguauggagcagagcucgggaacucacauaaa

SEQ ID NO: 467792 - RNA, 32 nt, Human
gguauggagccugaauuuaaaugcaggucugc

SEQ ID NO: 467793 - RNA, 32 nt, Human
gguauggaggcaggauugcagaggcauuuuca

SEQ ID NO: 467794 - RNA, 32 nt, Human
gguauggagguucacugguaaucccagcacuu

SEQ ID NO: 467795 - RNA, 32 nt, Human
gguaugggaaguggcauguucuaacuccuaga

SEQ ID NO: 467796 - RNA, 32 nt, Human
gguaugggcagcccaagguugcaugggaaaac

SEQ ID NO: 467797 - RNA, 32 nt, Human
gguaugggcagguugcuugaggcuccagacau

SEQ ID NO: 467798 - RNA, 32 nt, Human
gguauggggugggggaggggccuggaccguug

SEQ ID NO: 467799 - RNA, 25 nt, Human
gguauggguucagagcaaugccuag

SEQ ID NO: 467800 - RNA, 22 nt, Human
gguaugguggcacauaccugug

SEQ ID NO: 467801 - RNA, 22 nt, Human
gguaugguggcucaagccugua

SEQ ID NO: 467802 - RNA, 22 nt, Human
gguaugguggcucaugccugua

SEQ ID NO: 467803 - RNA, 32 nt, Human
gguaugguggucaccuuugcuccagucaacgu

SEQ ID NO: 467804 - RNA, 22 nt, Human
gguaugguggugcauaccugua

SEQ ID NO: 467805 - RNA, 32 nt, Human
gguaugguuuggcuguuucuccacccaaaucu

SEQ ID NO: 467806 - RNA, 32 nt, Human
gguaugguuuucccugucccuuguacacauuc

SEQ ID NO: 467807 - RNA, 32 nt, Human
gguauguaaugcacguuccugccugcagggag

SEQ ID NO: 467808 - RNA, 23 nt, Human
gguauguacuuauaaagacauuu

SEQ ID NO: 467809 - RNA, 32 nt, Human
gguaugucacagacaccagagcagugucuuug

SEQ ID NO: 467810 - RNA, 32 nt, Human
gguaugucuaacuguaugucaaccccagaggc

SEQ ID NO: 467811 - RNA, 32 nt, Human
gguaugucucaugaauguucacacagaaggag

SEQ ID NO: 467812 - RNA, 32 nt, Human
gguaugucucugcugccugccucuuuccucug

SEQ ID NO: 467813 - RNA, 32 nt, Human
gguaugugacucugaugccccagcacaguuac

SEQ ID NO: 467814 - RNA, 32 nt, Human
gguaugugcacucccauguucacugcaguauu

SEQ ID NO: 467815 - RNA, 32 nt, Human
gguaugugccagcugguuuagcauucaauaug

SEQ ID NO: 467816 - RNA, 32 nt, Human
gguaugugcccaccccucucccauuauccuuu

SEQ ID NO: 467817 - RNA, 32 nt, Human
gguaugugccuguaaucccagcuacuugggag

SEQ ID NO: 467818 - RNA, 32 nt, Human
gguaugugccuguagucccagguacucaggag

SEQ ID NO: 467819 - RNA, 32 nt, Human
gguaugugccuguagucucagcuacucaggag

SEQ ID NO: 467820 - RNA, 32 nt, Human
gguaugugggaagcccaucucaguuccuguga

SEQ ID NO: 467821 - RNA, 32 nt, Human
gguaugugggaggcugggcugcuuagugucuu

SEQ ID NO: 467822 - RNA, 19 nt, Human
gguauguguagaggcccag

SEQ ID NO: 467823 - RNA, 32 nt, Human
gguaugugugagaaccaggggccagagcuggg

SEQ ID NO: 467824 - RNA, 32 nt, Human
gguaugugugugaccaucagcaguggugugca

SEQ ID NO: 467825 - RNA, 32 nt, Human
gguaugugugugugagugugcauguaugcaca

SEQ ID NO: 467826 - RNA, 32 nt, Human
gguauguguuucugcugccuuauucaauccac

SEQ ID NO: 467827 - RNA, 32 nt, Human
gguauguuugucucccagucugggcaaaggag

SEQ ID NO: 467828 - RNA, 32 nt, Human
gguauuaaaggccaacugcaaagaucacccug

SEQ ID NO: 467829 - RNA, 18 nt, Human
gguauuacauacccagug

SEQ ID NO: 467830 - RNA, 32 nt, Human
gguauuagacaucccugaaacucaguuaaccg

SEQ ID NO: 467831 - RNA, 23 nt, Human
gguauuaggcaaaucuuacuaua

SEQ ID NO: 467832 - RNA, 25 nt, Human
gguauuauuaaguauccugacuaca

SEQ ID NO: 467833 - RNA, 32 nt, Human
gguauuauuuccaauauuauuugguuuauuau

SEQ ID NO: 467834 - RNA, 32 nt, Human
gguauucaaccagcaaguuguuuucuuucaga

SEQ ID NO: 467835 - RNA, 23 nt, Human
gguauucagaucaucugcuucuu

SEQ ID NO: 467836 - RNA, 32 nt, Human
gguauucaguaauacaaugaaaagcaaaauug

SEQ ID NO: 467837 - RNA, 32 nt, Human
gguauucaucuucuucuucaucaagcucugau

SEQ ID NO: 467838 - RNA, 32 nt, Human
gguauucccugcucuuacuccaaaaagaugga

SEQ ID NO: 467839 - RNA, 32 nt, Human
gguauuccucaagcccagcauccaucugguga

SEQ ID NO: 467840 - RNA, 32 nt, Human
gguauuccucaccuuucuugccuuuaccagac

SEQ ID NO: 467841 - RNA, 32 nt, Human
gguauuccuccuggauggaaaggcuguuggca

SEQ ID NO: 467842 - RNA, 32 nt, Human
gguauuccuggguccugucuguccccaaccgu

SEQ ID NO: 467843 - RNA, 32 nt, Human
gguauucuacaugugacuggcuuucuugcccu

SEQ ID NO: 467844 - RNA, 32 nt, Human
gguauucuauaucuuaaccagcugagggagcu

SEQ ID NO: 467845 - RNA, 32 nt, Human
gguauucucaacagcaaaggggugaaaaaucu

SEQ ID NO: 467846 - RNA, 32 nt, Human
gguauucuucaugcaggagaccccaggcccug

SEQ ID NO: 467847 - RNA, 23 nt, Human
gguauucuuuaaaguucugguca

SEQ ID NO: 467848 - RNA, 32 nt, Human
gguauugaaucuuuuaaaaucuggucacaaau

SEQ ID NO: 467849 - RNA, 32 nt, Human
gguauugagaagagagaaagaagauagugaga

SEQ ID NO: 467850 - RNA, 32 nt, Human
gguauugagcacguauuuugcaaaagcuacuu

SEQ ID NO: 467851 - RNA, 32 nt, Human
gguauugagugugagguugaggugggacauuu

SEQ ID NO: 467852 - RNA, 32 nt, Human
gguauugaguucaucuucaacuucucccaaca

SEQ ID NO: 467853 - RNA, 32 nt, Human
gguauugcauagccuugcuuucuugaacuaaa

SEQ ID NO: 467854 - RNA, 32 nt, Human
gguauugcuccccugaguguauaugagugcug

SEQ ID NO: 467855 - RNA, 32 nt, Human
gguauugcugagacaugaugcagagaguuaag

SEQ ID NO: 467856 - RNA, 32 nt, Human
gguauuggggaaggcaggaaagggaaaaggag

SEQ ID NO: 467857 - RNA, 32 nt, Human
gguauuggggguggggucuuggagaggugauu

SEQ ID NO: 467858 - RNA, 32 nt, Human
gguauugguuuguggagaaggaagcauucuuu

SEQ ID NO: 467859 - RNA, 32 nt, Human
gguauugugaccacugaauucacuccagucaa

SEQ ID NO: 467860 - RNA, 32 nt, Human
gguauugugauugggcagaacucccccuccag

SEQ ID NO: 467861 - RNA, 32 nt, Human
gguauuguucagaccucagcuccugggggccg

SEQ ID NO: 467862 - RNA, 32 nt, Human
gguauuguuucuuaaguaaauauugggacaau

SEQ ID NO: 467863 - RNA, 32 nt, Human
gguauuuaaagccacacaaggauaaugagcac

SEQ ID NO: 467864 - RNA, 32 nt, Human
gguauuuaaguaguugggcauggugguguggu

SEQ ID NO: 467865 - RNA, 32 nt, Human
gguauuuaauuuccaaccacacuucuuauuuu

SEQ ID NO: 467866 - RNA, 32 nt, Human
gguauuuacuuaggugauagcagccugaaucu

SEQ ID NO: 467867 - RNA, 32 nt, Human
gguauuuaucugccaaaacaaggacaaaucuu

SEQ ID NO: 467868 - RNA, 32 nt, Human
gguauuucagauccgcucuggcccagugggca

SEQ ID NO: 467869 - RNA, 32 nt, Human
gguauuucauuucuccuguccccuccccuccc

SEQ ID NO: 467870 - RNA, 32 nt, Human
gguauuuccuucagaaaagacuuuucuacuuu

SEQ ID NO: 467871 - RNA, 32 nt, Human
gguauuucgggcccuccucuucaggaaucuuc

SEQ ID NO: 467872 - RNA, 32 nt, Human
gguauuucuguguuguucuugaucuuaaaguc

SEQ ID NO: 467873 - RNA, 32 nt, Human
gguauuucuucauagcagugugagaauggauu

SEQ ID NO: 467874 - RNA, 32 nt, Human
gguauuugcuccaggccaggcagcaggcugug

SEQ ID NO: 467875 - RNA, 32 nt, Human
gguauuuggaggucaggcagcagcauaaaucu

SEQ ID NO: 467876 - RNA, 32 nt, Human
gguauuugugcaaaagagaugaagacuucuca

SEQ ID NO: 467877 - RNA, 32 nt, Human
gguauuuucccuuggauauuaacuugcauauc

SEQ ID NO: 467878 - RNA, 32 nt, Human
gguauuuucuguggcccugggagcugucuguc

SEQ ID NO: 467879 - RNA, 32 nt, Human
gguauuuuucaaugcuaagucuugccuuuuau

SEQ ID NO: 467880 - RNA, 32 nt, Human
ggucaaaaacauaaaaucccugccuucuugag

SEQ ID NO: 467881 - RNA, 32 nt, Human
ggucaaaaagagaauaauuuggccuauaaugu

SEQ ID NO: 467882 - RNA, 32 nt, Human
ggucaaaagcaauaccagaaguaaagggaaau

SEQ ID NO: 467883 - RNA, 32 nt, Human
ggucaaaagcagcugccugaaugaguuguugu

SEQ ID NO: 467884 - RNA, 32 nt, Human
ggucaaaauggaauauugggggcuguuguaaa

SEQ ID NO: 467885 - RNA, 32 nt, Human
ggucaaacguuccuaauggugccugaaccuac

SEQ ID NO: 467886 - RNA, 32 nt, Human
ggucaaagaaggaggaggaggguggggagcug

SEQ ID NO: 467887 - RNA, 32 nt, Human
ggucaaaggaagggaaagcaugucaggggcug

SEQ ID NO: 467888 - RNA, 32 nt, Human
ggucaaaggagagucaacauaugugauuguuc

SEQ ID NO: 467889 - RNA, 32 nt, Human
ggucaaauccccaauguaucaacucagcuuua

SEQ ID NO: 467890 - RNA, 32 nt, Human
ggucaaaucucuccaccucuagucagaguaua

SEQ ID NO: 467891 - RNA, 32 nt, Human
ggucaaaugcagaguccugggcccuacaucaa

SEQ ID NO: 467892 - RNA, 32 nt, Human
ggucaaauugaauauaacccaauaaaggcuuc

SEQ ID NO: 467893 - RNA, 22 nt, Human
ggucaacaaguccuugacuccu

SEQ ID NO: 467894 - RNA, 32 nt, Human
ggucaacacuagcugccagcaggauggagacc

SEQ ID NO: 467895 - RNA, 32 nt, Human
ggucaacacugcacuccagccugggcgacaga

SEQ ID NO: 467896 - RNA, 24 nt, Human
ggucaacagagugagacucugucu

SEQ ID NO: 467897 - RNA, 32 nt, Human
ggucaacagccaucuuuucagcaguugccaac

SEQ ID NO: 467898 - RNA, 32 nt, Human
ggucaacagggacugaguggggcagaggccca

SEQ ID NO: 467899 - RNA, 32 nt, Human
ggucaacauagugaaaccccgucucuaauaaa

SEQ ID NO: 467900 - RNA, 32 nt, Human
ggucaacaugaugaaacccugucuacuaaaaa

SEQ ID NO: 467901 - RNA, 32 nt, Human
ggucaacauggcaaaagcccaucucuacuaaa

SEQ ID NO: 467902 - RNA, 32 nt, Human
ggucaacauggcgaaaccccaucucuacuaaa

SEQ ID NO: 467903 - RNA, 32 nt, Human
ggucaacauggcgaaaccccaucucuacugaa

SEQ ID NO: 467904 - RNA, 32 nt, Human
ggucaacaugguaaaaccccauuucugcuaaa

SEQ ID NO: 467905 - RNA, 32 nt, Human
ggucaacauggugaaacccagccucuacuaaa

SEQ ID NO: 467906 - RNA, 32 nt, Human
ggucaacauggugaaaccccaucuccacuaaa

SEQ ID NO: 467907 - RNA, 32 nt, Human
ggucaacauggugaaaccccaucucuacuaaa

SEQ ID NO: 467908 - RNA, 32 nt, Human
ggucaacauggugaaacccccuaucuacuaaa

SEQ ID NO: 467909 - RNA, 32 nt, Human
ggucaacauggugaaaccccgucuccacuaaa

SEQ ID NO: 467910 - RNA, 32 nt, Human
ggucaacauggugaaaccccgucucuacuaaa

SEQ ID NO: 467911 - RNA, 32 nt, Human
ggucaacauggugaaaccccuucucuacuaaa

SEQ ID NO: 467912 - RNA, 32 nt, Human
ggucaacauggugaaacccugucccuacuaaa

SEQ ID NO: 467913 - RNA, 32 nt, Human
ggucaacauggugaaacccugucucuacuaaa

SEQ ID NO: 467914 - RNA, 32 nt, Human
ggucaacauggugaaacccugucucuaguaaa

SEQ ID NO: 467915 - RNA, 32 nt, Human
ggucaacauggugaaacccugucucuccuaaa

SEQ ID NO: 467916 - RNA, 32 nt, Human
ggucaacauggugaaacccugucucugcuaaa

SEQ ID NO: 467917 - RNA, 32 nt, Human
ggucaacauggugaaaccuugucucuacuaaa

SEQ ID NO: 467918 - RNA, 32 nt, Human
ggucaacauggugaaacucugucucuacucaa

SEQ ID NO: 467919 - RNA, 32 nt, Human
ggucaacauggugaaacugugucucuacuaaa

SEQ ID NO: 467920 - RNA, 32 nt, Human
ggucaacauggugaaaucuugucucuaguaaa

SEQ ID NO: 467921 - RNA, 32 nt, Human
ggucaacaugguguaaccccaucucuacuaaa

SEQ ID NO: 467922 - RNA, 32 nt, Human
ggucaacccuguaauuccagcacuuugggagg

SEQ ID NO: 467923 - RNA, 32 nt, Human
ggucaacguggugaaaccccaucucuacuaaa

SEQ ID NO: 467924 - RNA, 32 nt, Human
ggucaacucccaggccucagaugcaggggccc

SEQ ID NO: 467925 - RNA, 24 nt, Human
ggucaacuccuuuguuuuccgccu

SEQ ID NO: 467926 - RNA, 32 nt, Human
ggucaacugaauuccccacuuccuggguaaga

SEQ ID NO: 467927 - RNA, 32 nt, Human
ggucaacugcggccucacagcugggccugucc

SEQ ID NO: 467928 - RNA, 32 nt, Human
ggucaagaaagcuggaguagagagggacugaa

SEQ ID NO: 467929 - RNA, 32 nt, Human
ggucaagaagugacgcaucucuggccugugag

SEQ ID NO: 467930 - RNA, 32 nt, Human
ggucaagacagaaaugucgcaugcuuggccga

SEQ ID NO: 467931 - RNA, 32 nt, Human
ggucaagaccagccuggccaacguggugaaac

SEQ ID NO: 467932 - RNA, 32 nt, Human
ggucaagagaucaagaccauccuggccaacau

SEQ ID NO: 467933 - RNA, 32 nt, Human
ggucaagagaucaagaccauucuggccaacau

SEQ ID NO: 467934 - RNA, 32 nt, Human
ggucaagagaucaagacuauccuggccaacau

SEQ ID NO: 467935 - RNA, 32 nt, Human
ggucaagauauucagugagaccagcuuaaaug

SEQ ID NO: 467936 - RNA, 32 nt, Human
ggucaagauggugaaaccccaucucuacuaaa

SEQ ID NO: 467937 - RNA, 32 nt, Human
ggucaagauggugaaacuccgucuguacuaaa

SEQ ID NO: 467938 - RNA, 32 nt, Human
ggucaagauucacacagccacccuuggagcug

SEQ ID NO: 467939 - RNA, 23 nt, Human
ggucaagcaauucuccugccuca

SEQ ID NO: 467940 - RNA, 32 nt, Human
ggucaagcaauucuccugccucagcuucccga

SEQ ID NO: 467941 - RNA, 32 nt, Human
ggucaagcagcagaaaggacagcuggauccau

SEQ ID NO: 467942 - RNA, 32 nt, Human
ggucaagcaguggcagacgcaaggcuuucugu

SEQ ID NO: 467943 - RNA, 23 nt, Human
ggucaagcaguugcuuggcggga

SEQ ID NO: 467944 - RNA, 32 nt, Human
ggucaagccagggcagucacagcugcuugggg

SEQ ID NO: 467945 - RNA, 32 nt, Human
ggucaagccggugggcugggcccgugggccgc

SEQ ID NO: 467946 - RNA, 32 nt, Human
ggucaagcgaagugccuggcauaccaugaugg

SEQ ID NO: 467947 - RNA, 32 nt, Human
ggucaagcugagacacagaggagucagggccu

SEQ ID NO: 467948 - RNA, 19 nt, Human
ggucaagcugucagacauc

SEQ ID NO: 467949 - RNA, 32 nt, Human
ggucaaggaacaggaagcugaccuggauggaa

SEQ ID NO: 467950 - RNA, 32 nt, Human
ggucaaggaacugagagaagaggcuuaagaaa

SEQ ID NO: 467951 - RNA, 32 nt, Human
ggucaaggcagaggaggagaggaggaaaggau

SEQ ID NO: 467952 - RNA, 19 nt, Human
ggucaaggcuuccccugag

SEQ ID NO: 467953 - RNA, 20 nt, Human
ggucaagggauccacacuca

SEQ ID NO: 467954 - RNA, 17 nt, Human
ggucaaggggcagcagg

SEQ ID NO: 467955 - RNA, 32 nt, Human
ggucaaggggugcagccaggagggcaggggga

SEQ ID NO: 467956 - RNA, 21 nt, Human
ggucaagguauccuccugaga

SEQ ID NO: 467957 - RNA, 32 nt, Human
ggucaaggugggcagaucaugaggucaggagu

SEQ ID NO: 467958 - RNA, 32 nt, Human
ggucaagucaugccuccaagaagggcuugacc

SEQ ID NO: 467959 - RNA, 21 nt, Human
ggucaaguccagguucaggga

SEQ ID NO: 467960 - RNA, 32 nt, Human
ggucaagucuguuugccuuagauuuugauguc

SEQ ID NO: 467961 - RNA, 32 nt, Human
ggucaagugagucugggaaacacuaugucugu

SEQ ID NO: 467962 - RNA, 32 nt, Human
ggucaagugauccucucaccucagccucccaa

SEQ ID NO: 467963 - RNA, 32 nt, Human
ggucaaguucucuccaccucucuaucuauguc

SEQ ID NO: 467964 - RNA, 32 nt, Human
ggucaaguucucucccgcucaggguagggcug

SEQ ID NO: 467965 - RNA, 25 nt, Human
ggucaaguuguuucuuauuugugag

SEQ ID NO: 467966 - RNA, 19 nt, Human
ggucaaguuugcccuuaga

SEQ ID NO: 467967 - RNA, 32 nt, Human
ggucaauaccagccugggcaacauaguaagac

SEQ ID NO: 467968 - RNA, 20 nt, Human
ggucaauaggcuuauauuua

SEQ ID NO: 467969 - RNA, 32 nt, Human
ggucaauauggugaaaccccaucucuacuaaa

SEQ ID NO: 467970 - RNA, 32 nt, Human
ggucaaucuauuucccccacccucucuccucc

SEQ ID NO: 467971 - RNA, 22 nt, Human
ggucaaucuccugaccuuguga

SEQ ID NO: 467972 - RNA, 32 nt, Human
ggucaaugagaaagaauggaagaugguaaaca

SEQ ID NO: 467973 - RNA, 21 nt, Human
ggucacaaacuccugaccuca

SEQ ID NO: 467974 - RNA, 32 nt, Human
ggucacaaagcgaggcccaaaggggcgcucuc

SEQ ID NO: 467975 - RNA, 32 nt, Human
ggucacaaggcuccgugcucaggcugggauuc

SEQ ID NO: 467976 - RNA, 32 nt, Human
ggucacaaguacagugucuucaaucuucauaa

SEQ ID NO: 467977 - RNA, 32 nt, Human
ggucacaagugacuggccaucccugggcugcu

SEQ ID NO: 467978 - RNA, 32 nt, Human
ggucacacagcaguagagcugggcuggggcag

SEQ ID NO: 467979 - RNA, 32 nt, Human
ggucacaccacugcacuccagccugggcaaua

SEQ ID NO: 467980 - RNA, 32 nt, Human
ggucacaccacugcacuccagccugggcuaca

SEQ ID NO: 467981 - RNA, 32 nt, Human
ggucacaccacuguauuccagccugggugaca

SEQ ID NO: 467982 - RNA, 32 nt, Human
ggucacaccauugcacuccaaccugggcgaca

SEQ ID NO: 467983 - RNA, 20 nt, Human
ggucacaccccugugugaua

SEQ ID NO: 467984 - RNA, 32 nt, Human
ggucacaccgcugcacuccagccugggcaaca

SEQ ID NO: 467985 - RNA, 32 nt, Human
ggucacaccuguaaucccagcacguugggagg

SEQ ID NO: 467986 - RNA, 32 nt, Human
ggucacaccuguaaucccagcacuuugggagg

SEQ ID NO: 467987 - RNA, 32 nt, Human
ggucacacugcagcucccagugccccaguguc

SEQ ID NO: 467988 - RNA, 21 nt, Human
ggucacagaaugccuuuuaaa

SEQ ID NO: 467989 - RNA, 32 nt, Human
ggucacagacagcuccagcaagagcaguuguu

SEQ ID NO: 467990 - RNA, 32 nt, Human
ggucacagagaggaauggcaagcccuggaaac

SEQ ID NO: 467991 - RNA, 31 nt, Human
ggucacagagcacagaauaccugggcgggug

SEQ ID NO: 467992 - RNA, 32 nt, Human
ggucacagagcaucauuuuaucacuucuggaa

SEQ ID NO: 467993 - RNA, 32 nt, Human
ggucacagaucuucccccgaccaugcugggaa

SEQ ID NO: 467994 - RNA, 20 nt, Human
ggucacagauguuuaccuca

SEQ ID NO: 467995 - RNA, 25 nt, Human
ggucacagcacaauguccacaucca

SEQ ID NO: 467996 - RNA, 23 nt, Human
ggucacagcagacaccugauaca

SEQ ID NO: 467997 - RNA, 32 nt, Human
ggucacagccucagggggccaggcugggggaa

SEQ ID NO: 467998 - RNA, 20 nt, Human
ggucacagccuccucugucu

SEQ ID NO: 467999 - RNA, 23 nt, Human
ggucacagccucgcucuccgcuu

SEQ ID NO: 468000 - RNA, 32 nt, Human
ggucacagcuacuaggaaugaggugauuucug

SEQ ID NO: 468001 - RNA, 32 nt, Human
ggucacagcuacucagaaggcugaggugggag

SEQ ID NO: 468002 - RNA, 32 nt, Human
ggucacagcuacuuggaaggcugagaugugaa

SEQ ID NO: 468003 - RNA, 32 nt, Human
ggucacagcucucauggcugcagcuagcguga

SEQ ID NO: 468004 - RNA, 32 nt, Human
ggucacaggaucagaaggcaagggauaggcag

SEQ ID NO: 468005 - RNA, 32 nt, Human
ggucacagggagggcucagaggagccugacuc

SEQ ID NO: 468006 - RNA, 32 nt, Human
ggucacagguucugggcucucaacugauauuu

SEQ ID NO: 468007 - RNA, 32 nt, Human
ggucacauccauggaaucagagcaagauuucc

SEQ ID NO: 468008 - RNA, 32 nt, Human
ggucacaucuguaaucucagcucuuuggaagg

SEQ ID NO: 468009 - RNA, 32 nt, Human
ggucacaugcccacugcagcccuccagccucu

SEQ ID NO: 468010 - RNA, 32 nt, Human
ggucacauggugccuagggaugcagggcugga

SEQ ID NO: 468011 - RNA, 32 nt, Human
ggucacauucucgagaacugugcucagccccc

SEQ ID NO: 468012 - RNA, 32 nt, Human
ggucacauuugcaggcugcgggcaguggcacc

SEQ ID NO: 468013 - RNA, 19 nt, Human
ggucacauuugcuuucaaa

SEQ ID NO: 468014 - RNA, 32 nt, Human
ggucacauuugcuuucaaaaagcuauuguccu

SEQ ID NO: 468015 - RNA, 32 nt, Human
ggucaccaaaaaugaaauaauaguuuaaaaca

SEQ ID NO: 468016 - RNA, 32 nt, Human
ggucaccaaacaggaaguggacauucuaaggg

SEQ ID NO: 468017 - RNA, 32 nt, Human
ggucaccaaaggcccuaugcaggcuucaaaau

SEQ ID NO: 468018 - RNA, 32 nt, Human
ggucaccaagaugcagcaggaaaucacuuuuc

SEQ ID NO: 468019 - RNA, 32 nt, Human
ggucaccacccccaccaugucccaggugaugu

SEQ ID NO: 468020 - RNA, 24 nt, Human
ggucaccagaaucgcccgaucaca

SEQ ID NO: 468021 - RNA, 32 nt, Human
ggucaccagacggggcuggagugugagggucc

SEQ ID NO: 468022 - RNA, 21 nt, Human
ggucaccagagccugaccaua

SEQ ID NO: 468023 - RNA, 32 nt, Human
ggucaccagagggaagagaacauggcauuaaa

SEQ ID NO: 468024 - RNA, 32 nt, Human
ggucaccagcagacacacugggcauggacccc

SEQ ID NO: 468025 - RNA, 32 nt, Human
ggucaccauggugggagcggaagacaauuuca

SEQ ID NO: 468026 - RNA, 22 nt, Human
ggucacccacagccuguguaua

SEQ ID NO: 468027 - RNA, 24 nt, Human
ggucacccagacgucacugugaua

SEQ ID NO: 468028 - RNA, 26 nt, Human
ggucacccccagguccccagggcucc

SEQ ID NO: 468029 - RNA, 32 nt, Human
ggucacccccuucccaucuacacgucccuccc

SEQ ID NO: 468030 - RNA, 20 nt, Human
ggucacccguugccagcucu

SEQ ID NO: 468031 - RNA, 32 nt, Human
ggucacccuccugguucugcccugucccauuc

SEQ ID NO: 468032 - RNA, 32 nt, Human
ggucacccugcucccucgugggucgccuucgc

SEQ ID NO: 468033 - RNA, 19 nt, Human
ggucacccuucaacgcucc

SEQ ID NO: 468034 - RNA, 19 nt, Human
ggucaccgcccaggguucc

SEQ ID NO: 468035 - RNA, 22 nt, Human
ggucaccgcggacaccugccgc

SEQ ID NO: 468036 - RNA, 24 nt, Human
ggucaccggaaucgcccgaucaca

SEQ ID NO: 468037 - RNA, 24 nt, Human
ggucaccggaaucgcccggucaca

SEQ ID NO: 468038 - RNA, 32 nt, Human
ggucaccuaagcugguccucacaggggccuuu

SEQ ID NO: 468039 - RNA, 32 nt, Human
ggucaccuaccacaaauugauggcuagagcaa

SEQ ID NO: 468040 - RNA, 23 nt, Human
ggucaccuaggggacugccucug

SEQ ID NO: 468041 - RNA, 32 nt, Human
ggucaccucaaagguaugcuaugccguguggc

SEQ ID NO: 468042 - RNA, 21 nt, Human
ggucaccucaggaagaggcag

SEQ ID NO: 468043 - RNA, 32 nt, Human
ggucaccuccccucgggcucugggcaacuguc

SEQ ID NO: 468044 - RNA, 23 nt, Human
ggucaccuccuugcgcuucuccu

SEQ ID NO: 468045 - RNA, 32 nt, Human
ggucaccucuggugcgcagcaagugcaaagcc

SEQ ID NO: 468046 - RNA, 32 nt, Human
ggucaccugcagcaguacguggccaccuauca

SEQ ID NO: 468047 - RNA, 32 nt, Human
ggucaccuggacucugcucccaggaagcugug

SEQ ID NO: 468048 - RNA, 32 nt, Human
ggucaccugggacuucagggaggcucagcuug

SEQ ID NO: 468049 - RNA, 32 nt, Human
ggucaccugggugucacacggcaaggcuacag

SEQ ID NO: 468050 - RNA, 32 nt, Human
ggucaccuguaacccaagcuacuugggagucu

SEQ ID NO: 468051 - RNA, 32 nt, Human
ggucaccuguagucccagcuacucgggaggcu

SEQ ID NO: 468052 - RNA, 32 nt, Human
ggucaccuguagucccagcugcucgggagggu

SEQ ID NO: 468053 - RNA, 32 nt, Human
ggucaccuguaguccuagcuacucaggaggcu

SEQ ID NO: 468054 - RNA, 18 nt, Human
ggucaccuuuguccuguu

SEQ ID NO: 468055 - RNA, 32 nt, Human
ggucaccuuuugucucuuccuuccuaggcucu

SEQ ID NO: 468056 - RNA, 21 nt, Human
ggucacgaacuccugaccuca

SEQ ID NO: 468057 - RNA, 32 nt, Human
ggucacgacuucccuccugccugcagccuggg

SEQ ID NO: 468058 - RNA, 32 nt, Human
ggucacgagguuccccucccaccucugucaca

SEQ ID NO: 468059 - RNA, 21 nt, Human
ggucacgagucauuucugccu

SEQ ID NO: 468060 - RNA, 32 nt, Human
ggucacgcaccaguuugggccugagauaaaac

SEQ ID NO: 468061 - RNA, 32 nt, Human
ggucacgccugccuccacaucucuguuucuuc

SEQ ID NO: 468062 - RNA, 32 nt, Human
ggucacgccuguaaucccagcacuuugggagg

SEQ ID NO: 468063 - RNA, 20 nt, Human
ggucacggcggccgcgcuca

SEQ ID NO: 468064 - RNA, 32 nt, Human
ggucacggugacccaugcugcccagccuggag

SEQ ID NO: 468065 - RNA, 23 nt, Human
ggucacgguggcucacgccugua

SEQ ID NO: 468066 - RNA, 32 nt, Human
ggucacgucacugcacucuagccugggcaaca

SEQ ID NO: 468067 - RNA, 32 nt, Human
ggucacgucuuucuccuucuccuuccuccuuc

SEQ ID NO: 468068 - RNA, 32 nt, Human
ggucacgugacacggagggggccgaauucugc

SEQ ID NO: 468069 - RNA, 23 nt, Human
ggucacgugggcagcuucugccu

SEQ ID NO: 468070 - RNA, 32 nt, Human
ggucacuaauuaucucaaaauauuucauacua

SEQ ID NO: 468071 - RNA, 32 nt, Human
ggucacuacagccugauugguccuccagguca

SEQ ID NO: 468072 - RNA, 32 nt, Human
ggucacuacaggaugguggagcagggggcauc

SEQ ID NO: 468073 - RNA, 32 nt, Human
ggucacuacagucucagauuccugggcuuaag

SEQ ID NO: 468074 - RNA, 32 nt, Human
ggucacuacugagagcugccuccuggaagcuu

SEQ ID NO: 468075 - RNA, 32 nt, Human
ggucacuagggaggguacaggccugugugcca

SEQ ID NO: 468076 - RNA, 32 nt, Human
ggucacuagucuauagaagaugacacagaaau

SEQ ID NO: 468077 - RNA, 32 nt, Human
ggucacuauuucuuccucugcuuggugaauug

SEQ ID NO: 468078 - RNA, 31 nt, Human
ggucacucaauaaaugugcuggaguaacaca

SEQ ID NO: 468079 - RNA, 32 nt, Human
ggucacucaccacuccccuggucuccaucugg

SEQ ID NO: 468080 - RNA, 32 nt, Human
ggucacucagcuuggaugcuauggaacaggga

SEQ ID NO: 468081 - RNA, 24 nt, Human
ggucacuccaccauccccacccca

SEQ ID NO: 468082 - RNA, 20 nt, Human
ggucacucccccacaccugc

SEQ ID NO: 468083 - RNA, 24 nt, Human
ggucacucuccccaaaauauuaua

SEQ ID NO: 468084 - RNA, 32 nt, Human
ggucacucucccuggcacaccuuccaggcugg

SEQ ID NO: 468085 - RNA, 32 nt, Human
ggucacucugugggucauuugcagccauuuuu

SEQ ID NO: 468086 - RNA, 32 nt, Human
ggucacugagaggcugccagagggccauuuuc

SEQ ID NO: 468087 - RNA, 19 nt, Human
ggucacugauucacaccca

SEQ ID NO: 468088 - RNA, 32 nt, Human
ggucacugcaaccuccaccucccggguucaag

SEQ ID NO: 468089 - RNA, 22 nt, Human
ggucacugcaaccuccgccucc

SEQ ID NO: 468090 - RNA, 23 nt, Human
ggucacugcaaccucugccuccu

SEQ ID NO: 468091 - RNA, 32 nt, Human
ggucacugcaaccucugccuccuggguucaaa

SEQ ID NO: 468092 - RNA, 32 nt, Human
ggucacugcaaccucugccuccuggguucaag

SEQ ID NO: 468093 - RNA, 32 nt, Human
ggucacugcacgcaccuggccuccauggacga

SEQ ID NO: 468094 - RNA, 32 nt, Human
ggucacugcacuaccacccaccucuggaagac

SEQ ID NO: 468095 - RNA, 32 nt, Human
ggucacugcacuccagccuggcuacagaguga

SEQ ID NO: 468096 - RNA, 32 nt, Human
ggucacugcagcccugaccuccugggcucaag

SEQ ID NO: 468097 - RNA, 20 nt, Human
ggucacugccccuccugcca

SEQ ID NO: 468098 - RNA, 32 nt, Human
ggucacugccuaacucauucucuguuaucagu

SEQ ID NO: 468099 - RNA, 32 nt, Human
ggucacugcggccuugauuucccaggcucaag

SEQ ID NO: 468100 - RNA, 32 nt, Human
ggucacugcucucccagcccugccugggccua

SEQ ID NO: 468101 - RNA, 32 nt, Human
ggucacugcugggccugcuaggagcccacacg

SEQ ID NO: 468102 - RNA, 22 nt, Human
ggucacuggagucuccucccca

SEQ ID NO: 468103 - RNA, 32 nt, Human
ggucacuggcaggacauccgcgucuguggccc

SEQ ID NO: 468104 - RNA, 32 nt, Human
ggucacuggcauuccagaagacagcgugccgg

SEQ ID NO: 468105 - RNA, 32 nt, Human
ggucacugggccuggccacuucugucccucug

SEQ ID NO: 468106 - RNA, 32 nt, Human
ggucacuuaaaaugugcaguaauagcacugcc

SEQ ID NO: 468107 - RNA, 32 nt, Human
ggucacuucaugcugauuagaaugacaucucu

SEQ ID NO: 468108 - RNA, 18 nt, Human
ggucacuucgcacaccca

SEQ ID NO: 468109 - RNA, 32 nt, Human
ggucacuuucugacuccagccuugccagccug

SEQ ID NO: 468110 - RNA, 32 nt, Human
ggucacuuuucuuuccugccuucugcugugag

SEQ ID NO: 468111 - RNA, 32 nt, Human
ggucagaaaauauuaagcaaguagaagugugg

SEQ ID NO: 468112 - RNA, 32 nt, Human
ggucagaagacaugccuggagggaugucuggc

SEQ ID NO: 468113 - RNA, 32 nt, Human
ggucagaagaucaagaccauccuggccaacau

SEQ ID NO: 468114 - RNA, 32 nt, Human
ggucagaaguaccaggugccccaugaagugcu

SEQ ID NO: 468115 - RNA, 32 nt, Human
ggucagaaguucaagacuagccuggucaacau

SEQ ID NO: 468116 - RNA, 32 nt, Human
ggucagaaguuugaaaccagccuggacuacau

SEQ ID NO: 468117 - RNA, 32 nt, Human
ggucagaaugauuuguuuuauucauugacuuu

SEQ ID NO: 468118 - RNA, 32 nt, Human
ggucagacucugaagccgaguugcugugggcg

SEQ ID NO: 468119 - RNA, 32 nt, Human
ggucagacuggaggugggggcagcagcuccca

SEQ ID NO: 468120 - RNA, 32 nt, Human
ggucagacuugaccauucaccuccaguaccug

SEQ ID NO: 468121 - RNA, 32 nt, Human
ggucagagaacacgaggcuugccaccaucuug

SEQ ID NO: 468122 - RNA, 32 nt, Human
ggucagagaagaggaaaagagacucagagaaa

SEQ ID NO: 468123 - RNA, 32 nt, Human
ggucagagacacccaguggcccaggugggcgu

SEQ ID NO: 468124 - RNA, 32 nt, Human
ggucagagagaagggagaggccuccuucugag

SEQ ID NO: 468125 - RNA, 32 nt, Human
ggucagagaggaagaaacaaaggcagcugugg

SEQ ID NO: 468126 - RNA, 32 nt, Human
ggucagagagguuucuguggacugcagaugag

SEQ ID NO: 468127 - RNA, 32 nt, Human
ggucagagaguaaauggagcagaggaacaggu

SEQ ID NO: 468128 - RNA, 32 nt, Human
ggucagagcaagcaucuuccugacagcauuuu

SEQ ID NO: 468129 - RNA, 32 nt, Human
ggucagagcccaugggcgguucugggacaugg

SEQ ID NO: 468130 - RNA, 32 nt, Human
ggucagagcgaagugacagucaguaucgugua

SEQ ID NO: 468131 - RNA, 32 nt, Human
ggucagagcugcugcugaagcucucuuaacug

SEQ ID NO: 468132 - RNA, 25 nt, Human
ggucagaggagaugggggccggcuu

SEQ ID NO: 468133 - RNA, 32 nt, Human
ggucagaggauuucuuuauggcuaucuguuuu

SEQ ID NO: 468134 - RNA, 32 nt, Human
ggucagaggcagcuuccagccugggggcuggu

SEQ ID NO: 468135 - RNA, 32 nt, Human
ggucagagguccagccucuauacccgugcccc

SEQ ID NO: 468136 - RNA, 19 nt, Human
ggucagagguggagcaggu

SEQ ID NO: 468137 - RNA, 32 nt, Human
ggucagauaagcagcuacagcugcaguuuggu

SEQ ID NO: 468138 - RNA, 32 nt, Human
ggucagauaguggccagcaggccagguacuga

SEQ ID NO: 468139 - RNA, 19 nt, Human
ggucagauucggcggcagg

SEQ ID NO: 468140 - RNA, 32 nt, Human
ggucagauuugaaaagaacagaaggacugaag

SEQ ID NO: 468141 - RNA, 21 nt, Human
ggucagcaaaggggugggguu

SEQ ID NO: 468142 - RNA, 32 nt, Human
ggucagcaaauggugccagcucuggcucauga

SEQ ID NO: 468143 - RNA, 32 nt, Human
ggucagcaacucccgaagauugcccagcaagu

SEQ ID NO: 468144 - RNA, 26 nt, Human
ggucagcaaggagagggggugggguu

SEQ ID NO: 468145 - RNA, 32 nt, Human
ggucagcacaaaccgauucuguuccucuuuaa

SEQ ID NO: 468146 - RNA, 32 nt, Human
ggucagcacggaagcuccaccuucugggugga

SEQ ID NO: 468147 - RNA, 32 nt, Human
ggucagcagcagagagagcaacgggaaggaca

SEQ ID NO: 468148 - RNA, 32 nt, Human
ggucagcagggcggagcggcuuuuccaggaga

SEQ ID NO: 468149 - RNA, 32 nt, Human
ggucagcaggugccgaacccacggccaggcuu

SEQ ID NO: 468150 - RNA, 32 nt, Human
ggucagcagugcccccagccccacccaagagg

SEQ ID NO: 468151 - RNA, 32 nt, Human
ggucagcaucuccagccaccuggcuuugcugg

SEQ ID NO: 468152 - RNA, 31 nt, Human
ggucagcaucuuuucugucaucaggaagucu

SEQ ID NO: 468153 - RNA, 32 nt, Human
ggucagcaucuuuucugucaucaggaagucuc

SEQ ID NO: 468154 - RNA, 32 nt, Human
ggucagcauggugaaacgccaucccuacuaag

SEQ ID NO: 468155 - RNA, 32 nt, Human
ggucagccacugcagccuccugagauauuuuu

SEQ ID NO: 468156 - RNA, 32 nt, Human
ggucagccagagcucuggaaugcacugcuugc

SEQ ID NO: 468157 - RNA, 19 nt, Human
ggucagccauucacaccca

SEQ ID NO: 468158 - RNA, 23 nt, Human
ggucagcccacucccagggcccc

SEQ ID NO: 468159 - RNA, 32 nt, Human
ggucagcccaggaauuggcagaggaaguaggu

SEQ ID NO: 468160 - RNA, 32 nt, Human
ggucagcccaugcaccugcccugggugaggaa

SEQ ID NO: 468161 - RNA, 23 nt, Human
ggucagccccagugaucugcuuc

SEQ ID NO: 468162 - RNA, 32 nt, Human
ggucagcccuaguggcugccugcacacuguag

SEQ ID NO: 468163 - RNA, 19 nt, Human
ggucagcccuccauaucca

SEQ ID NO: 468164 - RNA, 20 nt, Human
ggucagcccuucucuucccu

SEQ ID NO: 468165 - RNA, 32 nt, Human
ggucagccucacugccugcuuauugccucuuu

SEQ ID NO: 468166 - RNA, 16 nt, Human
ggucagccucccagca

SEQ ID NO: 468167 - RNA, 32 nt, Human
ggucagccuccccuccaccacuuccuucccug

SEQ ID NO: 468168 - RNA, 23 nt, Human
ggucagccucucucacacaagga

SEQ ID NO: 468169 - RNA, 20 nt, Human
ggucagccucuucacaccca

SEQ ID NO: 468170 - RNA, 32 nt, Human
ggucagccuggcuccugagacgcccaggcccg

SEQ ID NO: 468171 - RNA, 32 nt, Human
ggucagccuguccccaaggagaucuugugucu

SEQ ID NO: 468172 - RNA, 20 nt, Human
ggucagccuucccuguucuc

SEQ ID NO: 468173 - RNA, 32 nt, Human
ggucagcgugagccccuagccucacaccggcu

SEQ ID NO: 468174 - RNA, 32 nt, Human
ggucagcgugagccccuugccucacaccggcc

SEQ ID NO: 468175 - RNA, 32 nt, Human
ggucagcgugagccccuugccucaccccggcc

SEQ ID NO: 468176 - RNA, 32 nt, Human
ggucagcucccaggucggucgugcugggccag

SEQ ID NO: 468177 - RNA, 32 nt, Human
ggucagcucuucuguggauugcauggcgugug

SEQ ID NO: 468178 - RNA, 32 nt, Human
ggucagcucuuucugccaccuccgccuucgcg

SEQ ID NO: 468179 - RNA, 32 nt, Human
ggucagcugcccacagcccucuugccugaccc

SEQ ID NO: 468180 - RNA, 18 nt, Human
ggucagcugccuuuccug

SEQ ID NO: 468181 - RNA, 32 nt, Human
ggucagcugucugcuuuccuugcucagcacgg

SEQ ID NO: 468182 - RNA, 20 nt, Human
ggucagcuucuuuuaccuca

SEQ ID NO: 468183 - RNA, 32 nt, Human
ggucaggaaacagcuggaauccacacucaccu

SEQ ID NO: 468184 - RNA, 32 nt, Human
ggucaggacacuuggucuccuucucuuugguc

SEQ ID NO: 468185 - RNA, 32 nt, Human
ggucaggagagggagcaagaggaguuuuuagu

SEQ ID NO: 468186 - RNA, 32 nt, Human
ggucaggagaggggcagaacagccgcuccugu

SEQ ID NO: 468187 - RNA, 32 nt, Human
ggucaggagaucaagaccacccuggcuaacac

SEQ ID NO: 468188 - RNA, 32 nt, Human
ggucaggagaucaagaccauccuggccaacau

SEQ ID NO: 468189 - RNA, 32 nt, Human
ggucaggagaucaagaccauccuggcuaacaa

SEQ ID NO: 468190 - RNA, 32 nt, Human
ggucaggagaucaagaccauccuggcuaacac

SEQ ID NO: 468191 - RNA, 32 nt, Human
ggucaggagaucaagaccauccuggcuaacau

SEQ ID NO: 468192 - RNA, 32 nt, Human
ggucaggagaucaagaccauccuggcuaaugc

SEQ ID NO: 468193 - RNA, 32 nt, Human
ggucaggagaucaagaccauccuggcuauggu

SEQ ID NO: 468194 - RNA, 32 nt, Human
ggucaggagaucaagaccaucuuggcuaacac

SEQ ID NO: 468195 - RNA, 32 nt, Human
ggucaggagaucaagaccauucuggccaacau

SEQ ID NO: 468196 - RNA, 32 nt, Human
ggucaggagaucaagacuauccuggcuaacac

SEQ ID NO: 468197 - RNA, 32 nt, Human
ggucaggagaucgagaccguccuggccgacau

SEQ ID NO: 468198 - RNA, 32 nt, Human
ggucaggagcuguagagauggagcucaagcac

SEQ ID NO: 468199 - RNA, 32 nt, Human
ggucaggaggcaauuugccugccuuguacaaa

SEQ ID NO: 468200 - RNA, 31 nt, Human
ggucaggaguuccagaccagcccagccaaca

SEQ ID NO: 468201 - RNA, 32 nt, Human
ggucaggaguucgagaccauccuggccaacau

SEQ ID NO: 468202 - RNA, 32 nt, Human
ggucaggaguucgagagcauccuggccaacgu

SEQ ID NO: 468203 - RNA, 32 nt, Human
ggucaggaguucgggaccauccuggccaacau

SEQ ID NO: 468204 - RNA, 32 nt, Human
ggucaggaguuugagaccagccuggacaacau

SEQ ID NO: 468205 - RNA, 32 nt, Human
ggucaggaguuugagaucagccuggacaacag

SEQ ID NO: 468206 - RNA, 32 nt, Human
ggucaggaugagaauuccaaacacacugccag

SEQ ID NO: 468207 - RNA, 32 nt, Human
ggucaggauguaagugagagaccuugggacca

SEQ ID NO: 468208 - RNA, 32 nt, Human
ggucaggauugaaagagaaauauuucaacacc

SEQ ID NO: 468209 - RNA, 32 nt, Human
ggucaggcagggugcaguaucaugcccugugc

SEQ ID NO: 468210 - RNA, 32 nt, Human
ggucaggcauuauuauuacuaaccuuauuguu

SEQ ID NO: 468211 - RNA, 24 nt, Human
ggucaggccaaggcagguggauca

SEQ ID NO: 468212 - RNA, 21 nt, Human
ggucaggccaaggcccgggga

SEQ ID NO: 468213 - RNA, 32 nt, Human
ggucaggccauucuguugcccaccucgugcug

SEQ ID NO: 468214 - RNA, 21 nt, Human
ggucaggcccccacagcaggu

SEQ ID NO: 468215 - RNA, 32 nt, Human
ggucaggcgccugggaaggggccuuugguggc

SEQ ID NO: 468216 - RNA, 32 nt, Human
ggucaggcuagucuugaacuccugggcccaag

SEQ ID NO: 468217 - RNA, 24 nt, Human
ggucaggcucugauaccugcuuuu

SEQ ID NO: 468218 - RNA, 32 nt, Human
ggucaggcucuuaccuccaccuccagggcaca

SEQ ID NO: 468219 - RNA, 18 nt, Human
ggucaggcuguccacacc

SEQ ID NO: 468220 - RNA, 32 nt, Human
ggucagggaagguuugggaggaugcugaggcc

SEQ ID NO: 468221 - RNA, 22 nt, Human
ggucagggaccaccagcauggu

SEQ ID NO: 468222 - RNA, 21 nt, Human
ggucagggagacgcccccagg

SEQ ID NO: 468223 - RNA, 23 nt, Human
ggucagggagggaugcucaggga

SEQ ID NO: 468224 - RNA, 23 nt, Human
ggucagggccaggacaccugaga

SEQ ID NO: 468225 - RNA, 32 nt, Human
ggucagggcucaauaaggauuugcugaaugaa

SEQ ID NO: 468226 - RNA, 23 nt, Human
ggucagggcugggacccccagga

SEQ ID NO: 468227 - RNA, 32 nt, Human
ggucaggggagaaggaaaagaggucaacauga

SEQ ID NO: 468228 - RNA, 20 nt, Human
ggucaggggcuucccuaaga

SEQ ID NO: 468229 - RNA, 32 nt, Human
ggucaggggugaggggaccaggaagagaaagu

SEQ ID NO: 468230 - RNA, 32 nt, Human
ggucaggguggagguccugggugggcuaaggc

SEQ ID NO: 468231 - RNA, 20 nt, Human
ggucaggguguccauuccua

SEQ ID NO: 468232 - RNA, 32 nt, Human
ggucaggugagcugucuaggagagggacagag

SEQ ID NO: 468233 - RNA, 32 nt, Human
ggucagguguuuccguaccacagcaggagcag

SEQ ID NO: 468234 - RNA, 19 nt, Human
ggucagguugacaggaggu

SEQ ID NO: 468235 - RNA, 32 nt, Human
ggucaguacugcaggcugccucaccuugguga

SEQ ID NO: 468236 - RNA, 25 nt, Human
ggucaguaguuucauguuuuaggga

SEQ ID NO: 468237 - RNA, 32 nt, Human
ggucagucagcagcuuacaugaucucauugac

SEQ ID NO: 468238 - RNA, 32 nt, Human
ggucagucucagauggaagcugggccugggug

SEQ ID NO: 468239 - RNA, 32 nt, Human
ggucagucuccgugcaggaugugagcagcguc

SEQ ID NO: 468240 - RNA, 21 nt, Human
ggucagucuucaccacagaga

SEQ ID NO: 468241 - RNA, 32 nt, Human
ggucagugacgacgcauuuccucccaguacag

SEQ ID NO: 468242 - RNA, 32 nt, Human
ggucagugacggccuggacgggccaaggagac

SEQ ID NO: 468243 - RNA, 32 nt, Human
ggucagugacucgccugugauguggcccacaa

SEQ ID NO: 468244 - RNA, 32 nt, Human
ggucaguggagaugggugaggagcagcacaga

SEQ ID NO: 468245 - RNA, 32 nt, Human
ggucagugggcagcaacuuaagacugaccucg

SEQ ID NO: 468246 - RNA, 31 nt, Human
ggucagugggggagcuugcuucugagccccc

SEQ ID NO: 468247 - RNA, 19 nt, Human
ggucagugggucagaagga

SEQ ID NO: 468248 - RNA, 32 nt, Human
ggucaguggguggcagggggcuggcaaugagc

SEQ ID NO: 468249 - RNA, 18 nt, Human
ggucagugguccacaucc

SEQ ID NO: 468250 - RNA, 32 nt, Human
ggucagugucccacccuucacuucccgagggc

SEQ ID NO: 468251 - RNA, 32 nt, Human
ggucagugugcaaagaaaagaacugcuugcau

SEQ ID NO: 468252 - RNA, 23 nt, Human
ggucaguguggcgggcucagggg

SEQ ID NO: 468253 - RNA, 16 nt, Human
ggucaguucaggggga

SEQ ID NO: 468254 - RNA, 32 nt, Human
ggucaguucccagaggagaguggggugggucu

SEQ ID NO: 468255 - RNA, 32 nt, Human
ggucaguuuccaagccuuuccagauggacuuc

SEQ ID NO: 468256 - RNA, 32 nt, Human
ggucaguuuucugugcaaacaaaccuguuuag

SEQ ID NO: 468257 - RNA, 32 nt, Human
ggucaguuuugugguuucugcuuucuugccua

SEQ ID NO: 468258 - RNA, 23 nt, Human
ggucauaaauguguucauaccca

SEQ ID NO: 468259 - RNA, 22 nt, Human
ggucauaacagugccuguuucu

SEQ ID NO: 468260 - RNA, 19 nt, Human
ggucauaaguuucuaccca

SEQ ID NO: 468261 - RNA, 32 nt, Human
ggucauaaucaugccacuguacuccagccugg

SEQ ID NO: 468262 - RNA, 23 nt, Human
ggucauaccaacucuggauccuc

SEQ ID NO: 468263 - RNA, 32 nt, Human
ggucauaccacagccuucaucugcgcccuggg

SEQ ID NO: 468264 - RNA, 32 nt, Human
ggucauaccaccgcacuccagccugagcaaca

SEQ ID NO: 468265 - RNA, 32 nt, Human
ggucauaccagugcacuccaggcgggugacag

SEQ ID NO: 468266 - RNA, 20 nt, Human
ggucauagacaauuccucca

SEQ ID NO: 468267 - RNA, 19 nt, Human
ggucauagacccauuuuca

SEQ ID NO: 468268 - RNA, 21 nt, Human
ggucauagagucagggaucua

SEQ ID NO: 468269 - RNA, 18 nt, Human
ggucauagaguccucuca

SEQ ID NO: 468270 - RNA, 32 nt, Human
ggucauagaucugguucuggaggacagaaguu

SEQ ID NO: 468271 - RNA, 18 nt, Human
ggucauagcacccacuca

SEQ ID NO: 468272 - RNA, 18 nt, Human
ggucauagccgugaucca

SEQ ID NO: 468273 - RNA, 32 nt, Human
ggucauagccucuuugcuauucuauuggagua

SEQ ID NO: 468274 - RNA, 20 nt, Human
ggucauaggagucaugucca

SEQ ID NO: 468275 - RNA, 20 nt, Human
ggucauaggauaucuacacc

SEQ ID NO: 468276 - RNA, 21 nt, Human
ggucauaggcucuagucaccu

SEQ ID NO: 468277 - RNA, 19 nt, Human
ggucauaggggccugccca

SEQ ID NO: 468278 - RNA, 23 nt, Human
ggucauaugacggacugcauuca

SEQ ID NO: 468279 - RNA, 32 nt, Human
ggucauaugagguccuaaugaaguacuacagu

SEQ ID NO: 468280 - RNA, 32 nt, Human
ggucauaugcggggguaugauccugcuuaauu

SEQ ID NO: 468281 - RNA, 19 nt, Human
ggucaucaaacacauacaa

SEQ ID NO: 468282 - RNA, 32 nt, Human
ggucaucaaacacucuuuucuccucaucaguc

SEQ ID NO: 468283 - RNA, 32 nt, Human
ggucaucaacuugcaauaccucacagagccag

SEQ ID NO: 468284 - RNA, 32 nt, Human
ggucaucaauaugaccaagcucauauccuuac

SEQ ID NO: 468285 - RNA, 18 nt, Human
ggucaucacucuacaccc

SEQ ID NO: 468286 - RNA, 32 nt, Human
ggucaucacugccaugguccggagcggcccug

SEQ ID NO: 468287 - RNA, 32 nt, Human
ggucaucagaugcuuauugcacccucaccaug

SEQ ID NO: 468288 - RNA, 32 nt, Human
ggucaucagcaguggagaacugugggagcugg

SEQ ID NO: 468289 - RNA, 32 nt, Human
ggucaucagcaugucccagucacugcagcaac

SEQ ID NO: 468290 - RNA, 32 nt, Human
ggucaucagcccagggcuucagucuuccuuua

SEQ ID NO: 468291 - RNA, 32 nt, Human
ggucaucaucccuacccacacacagauggcca

SEQ ID NO: 468292 - RNA, 17 nt, Human
ggucauccagagcagua

SEQ ID NO: 468293 - RNA, 32 nt, Human
ggucauccagcaccagaaugcgcaccucacac

SEQ ID NO: 468294 - RNA, 18 nt, Human
ggucaucccucuugcccu

SEQ ID NO: 468295 - RNA, 19 nt, Human
ggucauccgcgccgcacuc

SEQ ID NO: 468296 - RNA, 32 nt, Human
ggucauccucuccuauacuagggccuauugac

SEQ ID NO: 468297 - RNA, 32 nt, Human
ggucaucguccucagucccugccugcaacuag

SEQ ID NO: 468298 - RNA, 32 nt, Human
ggucaucuccugggcucuuccugcugcugcuc

SEQ ID NO: 468299 - RNA, 32 nt, Human
ggucaucucuccuuaaggaaucauggaccauu

SEQ ID NO: 468300 - RNA, 32 nt, Human
ggucaucucuguucuuaucagggcacuaaucc

SEQ ID NO: 468301 - RNA, 19 nt, Human
ggucaucugaacacaucca

SEQ ID NO: 468302 - RNA, 32 nt, Human
ggucaucugcagaggacagagagaugguaagc

SEQ ID NO: 468303 - RNA, 32 nt, Human
ggucaucugcagcucuggcccagucauagaua

SEQ ID NO: 468304 - RNA, 32 nt, Human
ggucaucugcuccagccuguccucucgucagc

SEQ ID NO: 468305 - RNA, 32 nt, Human
ggucaucugcuuguuuggugacuuagauauac

SEQ ID NO: 468306 - RNA, 16 nt, Human
ggucaugaacuauggg

SEQ ID NO: 468307 - RNA, 32 nt, Human
ggucaugaaggagaagggcaagagauccucug

SEQ ID NO: 468308 - RNA, 32 nt, Human
ggucaugacauacugaagcuccagccaggggg

SEQ ID NO: 468309 - RNA, 32 nt, Human
ggucaugaccauggugugggugcagugacugc

SEQ ID NO: 468310 - RNA, 32 nt, Human
ggucaugaggcuggggcccaggagacacgguc

SEQ ID NO: 468311 - RNA, 32 nt, Human
ggucaugauagggagagcaggcagcugggucc

SEQ ID NO: 468312 - RNA, 20 nt, Human
ggucaugauggugcacaccu

SEQ ID NO: 468313 - RNA, 18 nt, Human
ggucaugauuuccacauc

SEQ ID NO: 468314 - RNA, 32 nt, Human
ggucaugccacugcacuccagccuggccuggg

SEQ ID NO: 468315 - RNA, 32 nt, Human
ggucaugccacugcacuccagccugggagaca

SEQ ID NO: 468316 - RNA, 32 nt, Human
ggucaugccacugcacuccagccugggcaaca

SEQ ID NO: 468317 - RNA, 32 nt, Human
ggucaugccacugcacuccagccugggugaca

SEQ ID NO: 468318 - RNA, 32 nt, Human
ggucaugccacugcacucuagccugggugaca

SEQ ID NO: 468319 - RNA, 32 nt, Human
ggucaugccacugcacugcagccugggcgaca

SEQ ID NO: 468320 - RNA, 32 nt, Human
ggucaugccauuguacuccagccugggcaaca

SEQ ID NO: 468321 - RNA, 32 nt, Human
ggucaugccuguaaucccagcauuuuggaagg

SEQ ID NO: 468322 - RNA, 18 nt, Human
ggucaugcuaccuaccca

SEQ ID NO: 468323 - RNA, 20 nt, Human
ggucauggaauucucaucca

SEQ ID NO: 468324 - RNA, 19 nt, Human
ggucauggaccuuacaucc

SEQ ID NO: 468325 - RNA, 21 nt, Human
ggucauggacguggucagcca

SEQ ID NO: 468326 - RNA, 24 nt, Human
ggucauggacugggucguggcuca

SEQ ID NO: 468327 - RNA, 29 nt, Human
ggucauggauccugaacaaagugucaagg

SEQ ID NO: 468328 - RNA, 18 nt, Human
ggucauggcaaaacccca

SEQ ID NO: 468329 - RNA, 32 nt, Human
ggucauggcacacaccugugcccagacgccaa

SEQ ID NO: 468330 - RNA, 19 nt, Human
ggucauggcagccacaccu

SEQ ID NO: 468331 - RNA, 32 nt, Human
ggucauggccuaccucuucaccaucaucaaca

SEQ ID NO: 468332 - RNA, 32 nt, Human
ggucauggcugcagagagccaugaucaugcca

SEQ ID NO: 468333 - RNA, 32 nt, Human
ggucauggcuuaugccuguaaucccagcaugc

SEQ ID NO: 468334 - RNA, 22 nt, Human
ggucaugggccaugccauaccc

SEQ ID NO: 468335 - RNA, 32 nt, Human
ggucaugggggaagaauguaggguuguggcac

SEQ ID NO: 468336 - RNA, 32 nt, Human
ggucauggucagcccuguagcagacaccucgg

SEQ ID NO: 468337 - RNA, 21 nt, Human
ggucaugguggcacgcgccua

SEQ ID NO: 468338 - RNA, 23 nt, Human
ggucaugguggcucacgccugua

SEQ ID NO: 468339 - RNA, 21 nt, Human
ggucaugguggcucaugccua

SEQ ID NO: 468340 - RNA, 23 nt, Human
ggucaugguggcucaugccugua

SEQ ID NO: 468341 - RNA, 18 nt, Human
ggucauggugucaccccc

SEQ ID NO: 468342 - RNA, 32 nt, Human
ggucaugguucauuucgaguuccaaugcuauu

SEQ ID NO: 468343 - RNA, 18 nt, Human
ggucaugguucuacuuca

SEQ ID NO: 468344 - RNA, 32 nt, Human
ggucaugucuguaaucccagcaauuuggaggc

SEQ ID NO: 468345 - RNA, 32 nt, Human
ggucaugugggucuugcugggcucuguggagc

SEQ ID NO: 468346 - RNA, 32 nt, Human
ggucauguguucaccaucacugaggcacugug

SEQ ID NO: 468347 - RNA, 32 nt, Human
ggucauguugccagccauguugcccaggcugg

SEQ ID NO: 468348 - RNA, 32 nt, Human
ggucauguuguugccacccugugugacuuuug

SEQ ID NO: 468349 - RNA, 32 nt, Human
ggucauguuuaccucuccauuugggagccugc

SEQ ID NO: 468350 - RNA, 32 nt, Human
ggucauguuuuuauuuggcaagauugugguuu

SEQ ID NO: 468351 - RNA, 32 nt, Human
ggucauuaaauacuauuugucuccuuuucugg

SEQ ID NO: 468352 - RNA, 32 nt, Human
ggucauuaagaaggaaggaaugugaggaagaa

SEQ ID NO: 468353 - RNA, 20 nt, Human
ggucauuaaggccacaucca

SEQ ID NO: 468354 - RNA, 32 nt, Human
ggucauuauuuaugcuuugagaguuucaauau

SEQ ID NO: 468355 - RNA, 32 nt, Human
ggucauuccugccucuuggcaccagguugggg

SEQ ID NO: 468356 - RNA, 24 nt, Human
ggucauucuguggauuccgcaccu

SEQ ID NO: 468357 - RNA, 32 nt, Human
ggucauucuuccagccuccaugucaccacgug

SEQ ID NO: 468358 - RNA, 32 nt, Human
ggucauugcacucaagccugggcaauaagaag

SEQ ID NO: 468359 - RNA, 32 nt, Human
ggucauuggcugcucuacucuguccccuaccu

SEQ ID NO: 468360 - RNA, 32 nt, Human
ggucauugggcugagggugagcucagggcagg

SEQ ID NO: 468361 - RNA, 32 nt, Human
ggucauugucuccccuccagcucuacucacag

SEQ ID NO: 468362 - RNA, 20 nt, Human
ggucauugugcccauaucca

SEQ ID NO: 468363 - RNA, 32 nt, Human
ggucauugugguugccuuuccuuuccucaugu

SEQ ID NO: 468364 - RNA, 32 nt, Human
ggucauuuaaagggacuugaggaagcuaccca

SEQ ID NO: 468365 - RNA, 32 nt, Human
ggucauuuauuaauuuucacuaauccauauau

SEQ ID NO: 468366 - RNA, 32 nt, Human
ggucauuucauucauuuaucacacaugggcac

SEQ ID NO: 468367 - RNA, 32 nt, Human
ggucauuucgucgcugggaagggacggcccuc

SEQ ID NO: 468368 - RNA, 32 nt, Human
ggucauuucuguccuucaaguuuggccaacua

SEQ ID NO: 468369 - RNA, 27 nt, Human
ggucauuugccagguuuccugacucca

SEQ ID NO: 468370 - RNA, 32 nt, Human
ggucauuugccuccuccgcccugcuucccggu

SEQ ID NO: 468371 - RNA, 32 nt, Human
ggucauuuucccucucagcccugagagaagca

SEQ ID NO: 468372 - RNA, 32 nt, Human
ggucauuuucuccuucuuucucccucuugagu

SEQ ID NO: 468373 - RNA, 32 nt, Human
gguccaaaccauccuggguagaugcugccaga

SEQ ID NO: 468374 - RNA, 32 nt, Human
gguccaaaggccagcggugaccagccugucac

SEQ ID NO: 468375 - RNA, 32 nt, Human
gguccaaaugcccuagucacauggcagaccca

SEQ ID NO: 468376 - RNA, 32 nt, Human
gguccaacacagauucugccugguccaacaca

SEQ ID NO: 468377 - RNA, 32 nt, Human
gguccaacagaacacauggccuagaggcaaug

SEQ ID NO: 468378 - RNA, 32 nt, Human
gguccaaccccuucauccccagcugcuccuag

SEQ ID NO: 468379 - RNA, 32 nt, Human
gguccaagagggcugggucccacaccaugcug

SEQ ID NO: 468380 - RNA, 24 nt, Human
gguccaagcaauuauugugccuca

SEQ ID NO: 468381 - RNA, 22 nt, Human
gguccaagcgauucucuugccu

SEQ ID NO: 468382 - RNA, 24 nt, Human
gguccaagcgauucucuugccuca

SEQ ID NO: 468383 - RNA, 32 nt, Human
gguccaaggaagcccucuguugcaaccagaua

SEQ ID NO: 468384 - RNA, 24 nt, Human
gguccaagugauucuccugccuca

SEQ ID NO: 468385 - RNA, 24 nt, Human
gguccaagugauucuccugcuuca

SEQ ID NO: 468386 - RNA, 32 nt, Human
gguccaauggcugguugugugagagggcuugg

SEQ ID NO: 468387 - RNA, 21 nt, Human
gguccacacuccccgcccugg

SEQ ID NO: 468388 - RNA, 32 nt, Human
gguccacagaaaucuacagcuguaauggaacc

SEQ ID NO: 468389 - RNA, 32 nt, Human
gguccacagcacaaugaggcuuuucacaggca

SEQ ID NO: 468390 - RNA, 22 nt, Human
gguccacaggaaccagcucccu

SEQ ID NO: 468391 - RNA, 32 nt, Human
gguccacaggcagcaacacucccuccuuccug

SEQ ID NO: 468392 - RNA, 32 nt, Human
gguccacauaguggggaaguagccaggaaaug

SEQ ID NO: 468393 - RNA, 18 nt, Human
gguccacaugcagcuucc

SEQ ID NO: 468394 - RNA, 32 nt, Human
gguccacauggcaaaaccccaucuguaccaaa

SEQ ID NO: 468395 - RNA, 19 nt, Human
gguccacauugcuuucaag

SEQ ID NO: 468396 - RNA, 17 nt, Human
gguccaccacaugcucc

SEQ ID NO: 468397 - RNA, 32 nt, Human
gguccaccagucucccccuuugguucccuucc

SEQ ID NO: 468398 - RNA, 32 nt, Human
gguccacccagggauggggagauguuugcucu

SEQ ID NO: 468399 - RNA, 19 nt, Human
gguccacccucaccauccg

SEQ ID NO: 468400 - RNA, 32 nt, Human
gguccacccugugaaucuuaucagcccaggcu

SEQ ID NO: 468401 - RNA, 32 nt, Human
gguccaccugagcacuggacggugcucccagg

SEQ ID NO: 468402 - RNA, 32 nt, Human
gguccaccuucucuggcucacagaggaggccc

SEQ ID NO: 468403 - RNA, 32 nt, Human
gguccacggaagcacagcagggcccaaacuca

SEQ ID NO: 468404 - RNA, 32 nt, Human
gguccacgucuccaaaagacucuuccacuugu

SEQ ID NO: 468405 - RNA, 32 nt, Human
gguccacguuucuccccggcuccucugggcua

SEQ ID NO: 468406 - RNA, 32 nt, Human
gguccacugcaaccuccacuucccggguucaa

SEQ ID NO: 468407 - RNA, 32 nt, Human
gguccacugcccggggagcagcucccuuccca

SEQ ID NO: 468408 - RNA, 32 nt, Human
gguccacuggcagagggacacacgaucggggc

SEQ ID NO: 468409 - RNA, 32 nt, Human
gguccacuggcggguaaaggggaccaggacgg

SEQ ID NO: 468410 - RNA, 24 nt, Human
gguccacuucaugugccuuucaga

SEQ ID NO: 468411 - RNA, 18 nt, Human
gguccacuucucuucacu

SEQ ID NO: 468412 - RNA, 32 nt, Human
gguccagaaagacucagccacuggagucugug

SEQ ID NO: 468413 - RNA, 19 nt, Human
gguccagaggccuuucaga

SEQ ID NO: 468414 - RNA, 32 nt, Human
gguccagaguuucuuucugaagugcucuuuga

SEQ ID NO: 468415 - RNA, 32 nt, Human
gguccagaugaauccugcagggccaaggucug

SEQ ID NO: 468416 - RNA, 32 nt, Human
gguccagauugaaaaguguccucuggcugagu

SEQ ID NO: 468417 - RNA, 32 nt, Human
gguccagcauguagguugugugguguugcuuu

SEQ ID NO: 468418 - RNA, 32 nt, Human
gguccagccacagccuugcaugaagcuggcac

SEQ ID NO: 468419 - RNA, 32 nt, Human
gguccagccagacccugggcccucucuccuca

SEQ ID NO: 468420 - RNA, 32 nt, Human
gguccagcccacaagcugcaucagggucucug

SEQ ID NO: 468421 - RNA, 32 nt, Human
gguccagccguggagaaacauccgggacccuc

SEQ ID NO: 468422 - RNA, 32 nt, Human
gguccagccguuccgcccagcauacaagcuua

SEQ ID NO: 468423 - RNA, 32 nt, Human
gguccagccguuccgcccggcauacaagcuua

SEQ ID NO: 468424 - RNA, 32 nt, Human
gguccagcuagcagcucuccauuccugagugg

SEQ ID NO: 468425 - RNA, 32 nt, Human
gguccagcuagugccgcucagcccuagacccu

SEQ ID NO: 468426 - RNA, 32 nt, Human
gguccagcucuccccaaaaauuggguuuuuag

SEQ ID NO: 468427 - RNA, 32 nt, Human
gguccagcugggccuccugccuccgggcaggc

SEQ ID NO: 468428 - RNA, 32 nt, Human
gguccagcuuggccuuuucuucccagggacuc

SEQ ID NO: 468429 - RNA, 32 nt, Human
gguccaggaagaaaaugucacacuugccugug

SEQ ID NO: 468430 - RNA, 32 nt, Human
gguccaggacagugaccaucugggucugugua

SEQ ID NO: 468431 - RNA, 32 nt, Human
gguccaggacaguucacgccgggugcggagga

SEQ ID NO: 468432 - RNA, 32 nt, Human
gguccaggacccguggaggagcccacagcuac

SEQ ID NO: 468433 - RNA, 32 nt, Human
gguccaggagagacugggcugaagggagcuag

SEQ ID NO: 468434 - RNA, 32 nt, Human
gguccaggaggccaaggagcuggggagcugug

SEQ ID NO: 468435 - RNA, 26 nt, Human
gguccaggagguggaggcugcaguga

SEQ ID NO: 468436 - RNA, 32 nt, Human
gguccaggagguggaggcugcagugagcuaug

SEQ ID NO: 468437 - RNA, 32 nt, Human
gguccaggcaccacucagcucuggcucuuccu

SEQ ID NO: 468438 - RNA, 22 nt, Human
gguccaggcagccaggcucccu

SEQ ID NO: 468439 - RNA, 32 nt, Human
gguccaggcaggcggggaugugcggugaccac

SEQ ID NO: 468440 - RNA, 32 nt, Human
gguccaggcggcaacauguccaugcuuuuagu

SEQ ID NO: 468441 - RNA, 32 nt, Human
gguccaggcugcagccugggugacagagcaag

SEQ ID NO: 468442 - RNA, 32 nt, Human
gguccaggcuguacccgcugcucucagcuggg

SEQ ID NO: 468443 - RNA, 21 nt, Human
gguccaggcuguccagcuccc

SEQ ID NO: 468444 - RNA, 24 nt, Human
gguccaggcuugccucaaguucca

SEQ ID NO: 468445 - RNA, 32 nt, Human
gguccagggaaguuaguccucuggccucaauu

SEQ ID NO: 468446 - RNA, 32 nt, Human
gguccagggaugggcucugaugagaggguaaa

SEQ ID NO: 468447 - RNA, 32 nt, Human
gguccagggccugggaaauuucuacuuauccu

SEQ ID NO: 468448 - RNA, 32 nt, Human
gguccaggggaggccuuccagggacgaagaag

SEQ ID NO: 468449 - RNA, 24 nt, Human
gguccaggugccucaccaccugcu

SEQ ID NO: 468450 - RNA, 32 nt, Human
gguccagugauacccacuagaucuuccaagga

SEQ ID NO: 468451 - RNA, 23 nt, Human
gguccaguggcacccagcucccu

SEQ ID NO: 468452 - RNA, 32 nt, Human
gguccaguuuauucuaacaucuugcugacuuc

SEQ ID NO: 468453 - RNA, 32 nt, Human
gguccauagagugugcagagaauccaguaaag

SEQ ID NO: 468454 - RNA, 25 nt, Human
gguccauauaacccugacucuccug

SEQ ID NO: 468455 - RNA, 32 nt, Human
gguccauccuacaggcacugguguggggcaca

SEQ ID NO: 468456 - RNA, 21 nt, Human
gguccaucuccagcagcuggu

SEQ ID NO: 468457 - RNA, 22 nt, Human
gguccaucuguaagagcuccuu

SEQ ID NO: 468458 - RNA, 18 nt, Human
gguccaugaccacaucca

SEQ ID NO: 468459 - RNA, 32 nt, Human
gguccaugaugauguuguggcugagcuuagaa

SEQ ID NO: 468460 - RNA, 20 nt, Human
gguccauggagccuuucaaa

SEQ ID NO: 468461 - RNA, 32 nt, Human
gguccauggccauccagcaccuguaaggccgg

SEQ ID NO: 468462 - RNA, 32 nt, Human
gguccauggcuuccccagcccagggaggguau

SEQ ID NO: 468463 - RNA, 32 nt, Human
gguccaugucccagaccccucuauucugcucc

SEQ ID NO: 468464 - RNA, 32 nt, Human
gguccaugugcgcagugaguggcgcuauuccu

SEQ ID NO: 468465 - RNA, 18 nt, Human
gguccauucagagcaccu

SEQ ID NO: 468466 - RNA, 32 nt, Human
gguccauucagaugaauagauggaauuuggaa

SEQ ID NO: 468467 - RNA, 17 nt, Human
gguccauuccagauccc

SEQ ID NO: 468468 - RNA, 32 nt, Human
gguccauugcccacauucucugucuccuucuc

SEQ ID NO: 468469 - RNA, 19 nt, Human
gguccauuguggcgccccu

SEQ ID NO: 468470 - RNA, 21 nt, Human
gguccauuugaaugcaucccu

SEQ ID NO: 468471 - RNA, 21 nt, Human
gguccauuuguuuuucuuccu

SEQ ID NO: 468472 - RNA, 32 nt, Human
gguccauuuuggcuucuuuccacacccacagu

SEQ ID NO: 468473 - RNA, 32 nt, Human
ggucccaagagucgcgcuuggugagagaaauc

SEQ ID NO: 468474 - RNA, 30 nt, Human
ggucccaagccugcugugcuccuguggcag

SEQ ID NO: 468475 - RNA, 20 nt, Human
ggucccaaggccccagccaa

SEQ ID NO: 468476 - RNA, 32 nt, Human
ggucccaauaccagcaccucuaguuagaguua

SEQ ID NO: 468477 - RNA, 32 nt, Human
ggucccacacaaaagcagaccugcgagaucuc

SEQ ID NO: 468478 - RNA, 32 nt, Human
ggucccacagccgacagugcccagagcaugca

SEQ ID NO: 468479 - RNA, 32 nt, Human
ggucccacaguccucaggccccucucuggcug

SEQ ID NO: 468480 - RNA, 32 nt, Human
ggucccaccgcacuccagccugggcaacagag

SEQ ID NO: 468481 - RNA, 32 nt, Human
ggucccacucacugcacugggguccuuggggu

SEQ ID NO: 468482 - RNA, 32 nt, Human
ggucccacucugucuuugccuauggggauucg

SEQ ID NO: 468483 - RNA, 32 nt, Human
ggucccacugccuguccagccuggcucccuuc

SEQ ID NO: 468484 - RNA, 32 nt, Human
ggucccacuggcaggcgggcaagaggggaguc

SEQ ID NO: 468485 - RNA, 32 nt, Human
ggucccagaaggaggggacagaggagcugaga

SEQ ID NO: 468486 - RNA, 32 nt, Human
ggucccagagggccagaaacaccugacuuacc

SEQ ID NO: 468487 - RNA, 17 nt, Human
ggucccagcaucuuccc

SEQ ID NO: 468488 - RNA, 32 nt, Human
ggucccagccccuuuuccccagucccagacaa

SEQ ID NO: 468489 - RNA, 32 nt, Human
ggucccagccgcucgggaggcugaggcaggag

SEQ ID NO: 468490 - RNA, 32 nt, Human
ggucccagccucccagucccugcucugaaagc

SEQ ID NO: 468491 - RNA, 24 nt, Human
ggucccagcgauucuccugccuca

SEQ ID NO: 468492 - RNA, 32 nt, Human
ggucccagcuacuagggaggcugagccaggaa

SEQ ID NO: 468493 - RNA, 32 nt, Human
ggucccagcuacucaacaggcugagguuggga

SEQ ID NO: 468494 - RNA, 32 nt, Human
ggucccagcuacucaagagacggaggugggag

SEQ ID NO: 468495 - RNA, 32 nt, Human
ggucccagcuacucaagaggcugaggugagag

SEQ ID NO: 468496 - RNA, 32 nt, Human
ggucccagcuacucaagagguggaggcaggaa

SEQ ID NO: 468497 - RNA, 32 nt, Human
ggucccagcuacucagagggcugaggugggag

SEQ ID NO: 468498 - RNA, 32 nt, Human
ggucccagcuacucaggagacugaggugggag

SEQ ID NO: 468499 - RNA, 32 nt, Human
ggucccagcuacucaggaggcugaggcagaag

SEQ ID NO: 468500 - RNA, 32 nt, Human
ggucccagcuacucaggaggcugaggcuggag

SEQ ID NO: 468501 - RNA, 32 nt, Human
ggucccagcuacucaggaggcugagguggaag

SEQ ID NO: 468502 - RNA, 32 nt, Human
ggucccagcuacucaggaggcugaggugggaa

SEQ ID NO: 468503 - RNA, 32 nt, Human
ggucccagcuacucaggaggcugaggugggag

SEQ ID NO: 468504 - RNA, 32 nt, Human
ggucccagcuacucaggaggcugagguuggag

SEQ ID NO: 468505 - RNA, 32 nt, Human
ggucccagcuacuccagaggcugaggugggaa

SEQ ID NO: 468506 - RNA, 32 nt, Human
ggucccagcuacucgagaggcuaaggcaggaa

SEQ ID NO: 468507 - RNA, 32 nt, Human
ggucccagcuacucgggacgcugaggugggag

SEQ ID NO: 468508 - RNA, 32 nt, Human
ggucccagcuacucgggagacucaugcaggag

SEQ ID NO: 468509 - RNA, 32 nt, Human
ggucccagcuacucgggaggcugaggcacaag

SEQ ID NO: 468510 - RNA, 32 nt, Human
ggucccagcuacucgggaggcugaggcaggag

SEQ ID NO: 468511 - RNA, 32 nt, Human
ggucccagcuacucgggaggcugagggggaag

SEQ ID NO: 468512 - RNA, 32 nt, Human
ggucccagcuacucgggaggcugaggugggag

SEQ ID NO: 468513 - RNA, 32 nt, Human
ggucccagcuacucgggaggcuguggugggag

SEQ ID NO: 468514 - RNA, 32 nt, Human
ggucccagcuacucgggaggcuuagacaugag

SEQ ID NO: 468515 - RNA, 32 nt, Human
ggucccagcuacucuggaagcugaggugagag

SEQ ID NO: 468516 - RNA, 32 nt, Human
ggucccagcuacucuggaggcuaaggugggag

SEQ ID NO: 468517 - RNA, 32 nt, Human
ggucccagcuacucuggaggcugaggcggaac

SEQ ID NO: 468518 - RNA, 32 nt, Human
ggucccagcuacucuggaggcugaggugggaa

SEQ ID NO: 468519 - RNA, 32 nt, Human
ggucccagcuacugaggaggcugaggugggag

SEQ ID NO: 468520 - RNA, 32 nt, Human
ggucccagcuacuggggaggcugaagcaggaa

SEQ ID NO: 468521 - RNA, 32 nt, Human
ggucccagcuacuggggaggcugaggcaggac

SEQ ID NO: 468522 - RNA, 32 nt, Human
ggucccagcuacuggggaggcugaggugggag

SEQ ID NO: 468523 - RNA, 18 nt, Human
ggucccagcuacuugaga

SEQ ID NO: 468524 - RNA, 32 nt, Human
ggucccagcuacuugagaggcugagccaggag

SEQ ID NO: 468525 - RNA, 32 nt, Human
ggucccagcuacuugagaggcugaggugggag

SEQ ID NO: 468526 - RNA, 32 nt, Human
ggucccagcuacuuggaaggcuaagguaggag

SEQ ID NO: 468527 - RNA, 32 nt, Human
ggucccagcuacuugggaagcugagguaggag

SEQ ID NO: 468528 - RNA, 32 nt, Human
ggucccagcuacuugggaggcuaagguagaag

SEQ ID NO: 468529 - RNA, 32 nt, Human
ggucccagcuacuugggaggcugaagcaggag

SEQ ID NO: 468530 - RNA, 32 nt, Human
ggucccagcuacuugggaggcugaggcgggag

SEQ ID NO: 468531 - RNA, 32 nt, Human
ggucccagcuacuugggaggcugaggugggag

SEQ ID NO: 468532 - RNA, 32 nt, Human
ggucccagcuacuuugggagguugaggcagga

SEQ ID NO: 468533 - RNA, 32 nt, Human
ggucccagcuccaggcuggagccagugaaggg

SEQ ID NO: 468534 - RNA, 32 nt, Human
ggucccagcucucagagugcaaggguucuccc

SEQ ID NO: 468535 - RNA, 32 nt, Human
ggucccagcugcucgggaggcugagcaggagg

SEQ ID NO: 468536 - RNA, 32 nt, Human
ggucccagcugcucgggaggcugaggcaggag

SEQ ID NO: 468537 - RNA, 32 nt, Human
ggucccagcugcucgggagguugaugcaggag

SEQ ID NO: 468538 - RNA, 32 nt, Human
ggucccagcuuaguuaagucacccaugcaccu

SEQ ID NO: 468539 - RNA, 32 nt, Human
ggucccaggaacucaggcuucaggugagaagg

SEQ ID NO: 468540 - RNA, 32 nt, Human
ggucccaggagggucuggaggaaaacuggcua

SEQ ID NO: 468541 - RNA, 23 nt, Human
ggucccaggccgcggccuggcug

SEQ ID NO: 468542 - RNA, 32 nt, Human
ggucccaggcucuggucaucagaaggacuggu

SEQ ID NO: 468543 - RNA, 32 nt, Human
ggucccaggcuggauugccguggcacaaucuc

SEQ ID NO: 468544 - RNA, 32 nt, Human
ggucccaggcuggucucaaacuccugagcuca

SEQ ID NO: 468545 - RNA, 32 nt, Human
ggucccagggugagacaggugagaagagggau

SEQ ID NO: 468546 - RNA, 32 nt, Human
ggucccagguacuugggggacugaggcgggag

SEQ ID NO: 468547 - RNA, 32 nt, Human
ggucccaggugcagcggaugcagaggagagag

SEQ ID NO: 468548 - RNA, 32 nt, Human
ggucccagguguggagcagagcucgggaacuc

SEQ ID NO: 468549 - RNA, 32 nt, Human
ggucccagucugugucuccaucaggcuuaagc

SEQ ID NO: 468550 - RNA, 32 nt, Human
ggucccaguucuguguagcuugcccugcccca

SEQ ID NO: 468551 - RNA, 32 nt, Human
ggucccaucccaccccugccuccuccagaccg

SEQ ID NO: 468552 - RNA, 32 nt, Human
ggucccaucugaugccgaggcugaaggagucu

SEQ ID NO: 468553 - RNA, 32 nt, Human
ggucccaucugggggugaugggagacagugac

SEQ ID NO: 468554 - RNA, 32 nt, Human
ggucccaucuuaccuggugaccaccaucauug

SEQ ID NO: 468555 - RNA, 19 nt, Human
ggucccaugaccagcuccc

SEQ ID NO: 468556 - RNA, 32 nt, Human
ggucccaugggccaccuccugcaugucuccgc

SEQ ID NO: 468557 - RNA, 19 nt, Human
ggucccauuuucagugccc

SEQ ID NO: 468558 - RNA, 32 nt, Human
gguccccaaagaacuaaagagucagcuccaca

SEQ ID NO: 468559 - RNA, 22 nt, Human
gguccccaagggcaguauucag

SEQ ID NO: 468560 - RNA, 20 nt, Human
gguccccacacagagucugg

SEQ ID NO: 468561 - RNA, 32 nt, Human
gguccccacaugcacacagaacucugacacag

SEQ ID NO: 468562 - RNA, 32 nt, Human
gguccccacucagaccagcaccagugucugcc

SEQ ID NO: 468563 - RNA, 32 nt, Human
gguccccacuccuguaccgggggugggguggg

SEQ ID NO: 468564 - RNA, 32 nt, Human
gguccccacuggcaccucucucucuuuggguu

SEQ ID NO: 468565 - RNA, 32 nt, Human
gguccccagaagcagggaccucaggcaggagu

SEQ ID NO: 468566 - RNA, 32 nt, Human
gguccccagagucauucugcucugccucuuug

SEQ ID NO: 468567 - RNA, 32 nt, Human
gguccccagauggggagacugaggccguggcu

SEQ ID NO: 468568 - RNA, 32 nt, Human
gguccccagcagugccugguucugagcaaacu

SEQ ID NO: 468569 - RNA, 32 nt, Human
gguccccagcccucgucgcagccccggccgcc

SEQ ID NO: 468570 - RNA, 18 nt, Human
gguccccagcugguccag

SEQ ID NO: 468571 - RNA, 32 nt, Human
gguccccaggcccacgggcacagggagaggga

SEQ ID NO: 468572 - RNA, 18 nt, Human
gguccccagggcaggcuc

SEQ ID NO: 468573 - RNA, 32 nt, Human
gguccccagugcugcacucccacccugggcuc

SEQ ID NO: 468574 - RNA, 32 nt, Human
gguccccauggacuuagggggaccaggcaaga

SEQ ID NO: 468575 - RNA, 32 nt, Human
gguccccauguccagccuugugcagugaguuc

SEQ ID NO: 468576 - RNA, 23 nt, Human
ggucccccacaccgguucccuga

SEQ ID NO: 468577 - RNA, 17 nt, Human
ggucccccagcccucca

SEQ ID NO: 468578 - RNA, 32 nt, Human
ggucccccagcgugcaccaccuggcccggcac

SEQ ID NO: 468579 - RNA, 32 nt, Human
ggucccccagggugggcucagcuccagggaga

SEQ ID NO: 468580 - RNA, 32 nt, Human
ggucccccgagcucugugaccuuaugcuccac

SEQ ID NO: 468581 - RNA, 32 nt, Human
ggucccccuccccacuaagugccucuuugcau

SEQ ID NO: 468582 - RNA, 32 nt, Human
ggucccccugguuguuguagcagcuuaacugu

SEQ ID NO: 468583 - RNA, 17 nt, Human
ggucccccuuccugcca

SEQ ID NO: 468584 - RNA, 32 nt, Human
gguccccgaagaucucaggaauuuuuguaggg

SEQ ID NO: 468585 - RNA, 32 nt, Human
gguccccgaaguccuugcucccgcuccugcgg

SEQ ID NO: 468586 - RNA, 32 nt, Human
gguccccgacuggccagggccacucagcugcc

SEQ ID NO: 468587 - RNA, 32 nt, Human
gguccccgagcaagccugggaacucaggaaaa

SEQ ID NO: 468588 - RNA, 18 nt, Human
gguccccgcgccugccuu

SEQ ID NO: 468589 - RNA, 32 nt, Human
gguccccgcgcggcgcaucccagccugggcgg

SEQ ID NO: 468590 - RNA, 32 nt, Human
gguccccgcuggcugcuuucuuccugccccug

SEQ ID NO: 468591 - RNA, 32 nt, Human
gguccccggaaaaauuccaaccagacugcgcc

SEQ ID NO: 468592 - RNA, 32 nt, Human
gguccccggcuuccugcucccuucgccuacgc

SEQ ID NO: 468593 - RNA, 32 nt, Human
gguccccgggaggcuagagaucauggaaggga

SEQ ID NO: 468594 - RNA, 32 nt, Human
gguccccgggcgaacagaggcugcgguggacu

SEQ ID NO: 468595 - RNA, 32 nt, Human
gguccccgguccucccgggcaggauggaggcu

SEQ ID NO: 468596 - RNA, 32 nt, Human
gguccccgguugcuggucagguccccauggcu

SEQ ID NO: 468597 - RNA, 32 nt, Human
gguccccuaccuuaagucucccccucuuuuau

SEQ ID NO: 468598 - RNA, 32 nt, Human
gguccccucaaaagguagacaaaacagcagcu

SEQ ID NO: 468599 - RNA, 32 nt, Human
gguccccuccauggcccugaauccuccucugc

SEQ ID NO: 468600 - RNA, 32 nt, Human
gguccccuccccucucagcauuuccuuguccc

SEQ ID NO: 468601 - RNA, 20 nt, Human
gguccccucccugcuggacc

SEQ ID NO: 468602 - RNA, 20 nt, Human
gguccccuccucugccauca

SEQ ID NO: 468603 - RNA, 32 nt, Human
gguccccucuuuucccuucagucuucuucacu

SEQ ID NO: 468604 - RNA, 32 nt, Human
gguccccugaagugcugggauuacagguguga

SEQ ID NO: 468605 - RNA, 32 nt, Human
gguccccugcaaccucccaucaaaggaugacc

SEQ ID NO: 468606 - RNA, 32 nt, Human
gguccccuguucuccccgcucaggugcggcgc

SEQ ID NO: 468607 - RNA, 32 nt, Human
gguccccuucacauggccucaggcuucccaca

SEQ ID NO: 468608 - RNA, 32 nt, Human
gguccccuucucaaagaacuucagaggaaaag

SEQ ID NO: 468609 - RNA, 32 nt, Human
gguccccuugcuucuguuuucuaccucuccag

SEQ ID NO: 468610 - RNA, 32 nt, Human
ggucccgaaggacacugccacagggacgccuu

SEQ ID NO: 468611 - RNA, 32 nt, Human
ggucccgcagaggcggggugggaguggggcuc

SEQ ID NO: 468612 - RNA, 24 nt, Human
ggucccgcagggaugaggcugcca

SEQ ID NO: 468613 - RNA, 32 nt, Human
ggucccgccacugcacuccagccugggugaca

SEQ ID NO: 468614 - RNA, 32 nt, Human
ggucccgccagccccucacacucccagcaaaa

SEQ ID NO: 468615 - RNA, 19 nt, Human
ggucccgccucccuugacg

SEQ ID NO: 468616 - RNA, 32 nt, Human
ggucccgcgagugcccuauaaggacugccagg

SEQ ID NO: 468617 - RNA, 21 nt, Human
ggucccgcggcccgcaccugc

SEQ ID NO: 468618 - RNA, 32 nt, Human
ggucccgcggggugcccccgcccacacgcuau

SEQ ID NO: 468619 - RNA, 32 nt, Human
ggucccgcuccugguggcccacuguggcugcc

SEQ ID NO: 468620 - RNA, 32 nt, Human
ggucccgcuggcuguccccuugucggccugac

SEQ ID NO: 468621 - RNA, 21 nt, Human
ggucccggaaccaccgcgcug

SEQ ID NO: 468622 - RNA, 32 nt, Human
ggucccggaagugacgucucccagaggggccg

SEQ ID NO: 468623 - RNA, 32 nt, Human
ggucccggagaauguugugagggguuuauuuu

SEQ ID NO: 468624 - RNA, 32 nt, Human
ggucccggaguaacuucucuccaggcugaagg

SEQ ID NO: 468625 - RNA, 32 nt, Human
ggucccggcccuggcccagccagcccagcccu

SEQ ID NO: 468626 - RNA, 32 nt, Human
ggucccggcugcucgggaggcugaggcagggg

SEQ ID NO: 468627 - RNA, 32 nt, Human
ggucccgucugccugcuccucaggaccacuca

SEQ ID NO: 468628 - RNA, 31 nt, Human
ggucccuaccucucugcugugucuucauguc

SEQ ID NO: 468629 - RNA, 32 nt, Human
ggucccucacagccacaccacagcccuuuggg

SEQ ID NO: 468630 - RNA, 32 nt, Human
ggucccucagccccuucucccccgucagcccu

SEQ ID NO: 468631 - RNA, 32 nt, Human
ggucccucaggguugaugcguggagaaggacu

SEQ ID NO: 468632 - RNA, 24 nt, Human
ggucccuccccagguccccugaga

SEQ ID NO: 468633 - RNA, 32 nt, Human
ggucccucccuauacuccucaggcuccugggu

SEQ ID NO: 468634 - RNA, 32 nt, Human
ggucccuccgcccucugucaugcggccuuaug

SEQ ID NO: 468635 - RNA, 32 nt, Human
ggucccuccugcaccugcugccuggauccccg

SEQ ID NO: 468636 - RNA, 32 nt, Human
ggucccuccugguccccugccucuacugccgg

SEQ ID NO: 468637 - RNA, 21 nt, Human
ggucccuccuucacagccgcu

SEQ ID NO: 468638 - RNA, 32 nt, Human
ggucccuccuucuauuuugugaaaggguagca

SEQ ID NO: 468639 - RNA, 32 nt, Human
ggucccuccuugaggcaaacagccugggcuuc

SEQ ID NO: 468640 - RNA, 32 nt, Human
ggucccucuagccuguggacaccagcuggggg

SEQ ID NO: 468641 - RNA, 32 nt, Human
ggucccucuccucggaagaacugcccagccac

SEQ ID NO: 468642 - RNA, 32 nt, Human
ggucccucucuccuccucuuccucucucugga

SEQ ID NO: 468643 - RNA, 32 nt, Human
ggucccucuguccaucugggccuuuguaugag

SEQ ID NO: 468644 - RNA, 32 nt, Human
ggucccucugucccaagaagcugguggugcca

SEQ ID NO: 468645 - RNA, 32 nt, Human
ggucccucugucucccuggggccuuggguucu

SEQ ID NO: 468646 - RNA, 32 nt, Human
ggucccugaccuucugagaggggccugccuca

SEQ ID NO: 468647 - RNA, 32 nt, Human
ggucccugcagaggggcuccaggcuggugaga

SEQ ID NO: 468648 - RNA, 32 nt, Human
ggucccugccagauccacccagaagaaaggga

SEQ ID NO: 468649 - RNA, 32 nt, Human
ggucccugccuccccuuccuucacuggcugau

SEQ ID NO: 468650 - RNA, 21 nt, Human
ggucccugcgucuccugccca

SEQ ID NO: 468651 - RNA, 32 nt, Human
ggucccugcucacugugcuagcuuucuagcug

SEQ ID NO: 468652 - RNA, 29 nt, Human
ggucccuggcugcuguggccuccccugac

SEQ ID NO: 468653 - RNA, 32 nt, Human
ggucccugucccagcugcuccuggggaguaga

SEQ ID NO: 468654 - RNA, 32 nt, Human
ggucccugugccaggccucaauacugccaggg

SEQ ID NO: 468655 - RNA, 32 nt, Human
ggucccugugccagggcacagggggucaggca

SEQ ID NO: 468656 - RNA, 32 nt, Human
ggucccuguggucccagcuacucuggaggcug

SEQ ID NO: 468657 - RNA, 32 nt, Human
ggucccuuacuagagagguugagugaauuugc

SEQ ID NO: 468658 - RNA, 32 nt, Human
ggucccuuucuacugugguguuggagcaggac

SEQ ID NO: 468659 - RNA, 32 nt, Human
ggucccuuucugucugucuccuugcucugccc

SEQ ID NO: 468660 - RNA, 32 nt, Human
ggucccuuuuugaggcaguagcagguaaggaa

SEQ ID NO: 468661 - RNA, 20 nt, Human
gguccgaaaccaagcucccu

SEQ ID NO: 468662 - RNA, 32 nt, Human
gguccgacacaggcuggacugaucuggagagc

SEQ ID NO: 468663 - RNA, 32 nt, Human
gguccgagaggucaggggucagcuggagaggg

SEQ ID NO: 468664 - RNA, 17 nt, Human
gguccgaggcgaggaag

SEQ ID NO: 468665 - RNA, 32 nt, Human
gguccgcagaucaguccuccugggaauuuagu

SEQ ID NO: 468666 - RNA, 32 nt, Human
gguccgcaggccaguccucccaggaacugaaa

SEQ ID NO: 468667 - RNA, 32 nt, Human
gguccgccaauugcucguuugcacugagagag

SEQ ID NO: 468668 - RNA, 21 nt, Human
gguccgccccccagggccacc

SEQ ID NO: 468669 - RNA, 32 nt, Human
gguccgcgggcgcgucaggagaacuaugccau

SEQ ID NO: 468670 - RNA, 32 nt, Human
gguccgcuacccacgugggggcucagcgugca

SEQ ID NO: 468671 - RNA, 32 nt, Human
gguccgcugccucuucggccauggaagcugcc

SEQ ID NO: 468672 - RNA, 32 nt, Human
gguccggagagggcgcggcgcggagcgcagcc

SEQ ID NO: 468673 - RNA, 32 nt, Human
gguccggccugccugccugccugccugccucu

SEQ ID NO: 468674 - RNA, 21 nt, Human
gguccggcggcagcgcuuccu

SEQ ID NO: 468675 - RNA, 32 nt, Human
gguccggcucagacugaauaagaagagauaaa

SEQ ID NO: 468676 - RNA, 32 nt, Human
gguccggcuccuggaggacagcgggaugggag

SEQ ID NO: 468677 - RNA, 32 nt, Human
gguccggcugggguagcggagcccccagugcg

SEQ ID NO: 468678 - RNA, 23 nt, Human
gguccgggagaagcggcgggguc

SEQ ID NO: 468679 - RNA, 32 nt, Human
gguccgggccuggaguucagugggugcagccu

SEQ ID NO: 468680 - RNA, 21 nt, Human
gguccggguauuccacgccca

SEQ ID NO: 468681 - RNA, 32 nt, Human
gguccgggucaguuguucaugguguaagcuuu

SEQ ID NO: 468682 - RNA, 21 nt, Human
gguccggguggggggcggguu

SEQ ID NO: 468683 - RNA, 32 nt, Human
gguccggugccaauaaauccuuguggaaucug

SEQ ID NO: 468684 - RNA, 32 nt, Human
gguccguccaccacagcagccccagguggagg

SEQ ID NO: 468685 - RNA, 32 nt, Human
gguccgucccccucagacgucucccccaacgc

SEQ ID NO: 468686 - RNA, 32 nt, Human
gguccgugaaggacggccucaggccuuggcau

SEQ ID NO: 468687 - RNA, 32 nt, Human
gguccgugcccaggcccuuggcugcaggcaac

SEQ ID NO: 468688 - RNA, 32 nt, Human
gguccgugcucugccagugggguucacaacaa

SEQ ID NO: 468689 - RNA, 32 nt, Human
gguccgugugggcuuccaccucagacaguugc

SEQ ID NO: 468690 - RNA, 32 nt, Human
gguccguguguaguaaggugcgcagccucggc

SEQ ID NO: 468691 - RNA, 25 nt, Human
gguccguguucucacagugcugcca

SEQ ID NO: 468692 - RNA, 32 nt, Human
gguccuaaaggccuuugauccuuugaagaaga

SEQ ID NO: 468693 - RNA, 32 nt, Human
gguccuaauuuguguucugagaucccaguuua

SEQ ID NO: 468694 - RNA, 32 nt, Human
gguccuacucucuuucugugccuguuacccac

SEQ ID NO: 468695 - RNA, 18 nt, Human
gguccuagaaguucaguu

SEQ ID NO: 468696 - RNA, 32 nt, Human
gguccuagaggaagcauuggggugggggaggg

SEQ ID NO: 468697 - RNA, 32 nt, Human
gguccuagagguuccucagugcagcuggacuc

SEQ ID NO: 468698 - RNA, 32 nt, Human
gguccuagcuacucaggaggcugaggcaggag

SEQ ID NO: 468699 - RNA, 32 nt, Human
gguccuagcuacucgggagacugaaguggaag

SEQ ID NO: 468700 - RNA, 32 nt, Human
gguccuagcuacucgggaggcugaggcaggag

SEQ ID NO: 468701 - RNA, 32 nt, Human
gguccuagcuccucgggaggcugaggcaggag

SEQ ID NO: 468702 - RNA, 32 nt, Human
gguccuagggguagcagagggaagggaggauu

SEQ ID NO: 468703 - RNA, 19 nt, Human
gguccuagggucacaccca

SEQ ID NO: 468704 - RNA, 32 nt, Human
gguccuaguuacucggaagacugaggcaggag

SEQ ID NO: 468705 - RNA, 32 nt, Human
gguccuaucagaugcugggccuccucagccau

SEQ ID NO: 468706 - RNA, 18 nt, Human
gguccuaucugacuccug

SEQ ID NO: 468707 - RNA, 32 nt, Human
gguccucaagacugugggagacccuggcugcu

SEQ ID NO: 468708 - RNA, 21 nt, Human
gguccucacacccagcucccu

SEQ ID NO: 468709 - RNA, 32 nt, Human
gguccucacacccuuccucagccccaucaucu

SEQ ID NO: 468710 - RNA, 32 nt, Human
gguccucacuucugucuccugucuucagagca

SEQ ID NO: 468711 - RNA, 32 nt, Human
gguccucagagaaaaugcccauuuucucggag

SEQ ID NO: 468712 - RNA, 32 nt, Human
gguccucagccaucugccccucgagagccaag

SEQ ID NO: 468713 - RNA, 32 nt, Human
gguccucagcccagggugagcugcagucaggc

SEQ ID NO: 468714 - RNA, 23 nt, Human
gguccucauacacagagcucccu

SEQ ID NO: 468715 - RNA, 32 nt, Human
gguccucauagagccugugguggcuacuuuug

SEQ ID NO: 468716 - RNA, 32 nt, Human
gguccucaugccuguaucccagcacuuuggga

SEQ ID NO: 468717 - RNA, 32 nt, Human
gguccucauggaagaagagcaagauuuaccag

SEQ ID NO: 468718 - RNA, 22 nt, Human
gguccucauucacaguauccga

SEQ ID NO: 468719 - RNA, 32 nt, Human
gguccucauucauguuguaaauuuuuggagca

SEQ ID NO: 468720 - RNA, 32 nt, Human
gguccuccacagccacaagcauggacccacug

SEQ ID NO: 468721 - RNA, 32 nt, Human
gguccuccagugcccagguaggagguuucacu

SEQ ID NO: 468722 - RNA, 32 nt, Human
gguccucccugccuaaggcccaagucaacuuu

SEQ ID NO: 468723 - RNA, 32 nt, Human
gguccuccuaucucccuggcucacuggcaggu

SEQ ID NO: 468724 - RNA, 32 nt, Human
gguccuccucaccucuaucuuucuuucucucu

SEQ ID NO: 468725 - RNA, 22 nt, Human
gguccuccucccagcuaccccu

SEQ ID NO: 468726 - RNA, 32 nt, Human
gguccuccugcagaaguggccccugugguccu

SEQ ID NO: 468727 - RNA, 32 nt, Human
gguccuccugcaggagcccaacccuggcaucg

SEQ ID NO: 468728 - RNA, 32 nt, Human
gguccuccugccacagucaagcuuucagauga

SEQ ID NO: 468729 - RNA, 32 nt, Human
gguccuccugccucagcuuccaaaggcacagg

SEQ ID NO: 468730 - RNA, 32 nt, Human
gguccuccuggggccuuccugccuuugaacug

SEQ ID NO: 468731 - RNA, 32 nt, Human
gguccucgcugauguccuccagccgccuggcu

SEQ ID NO: 468732 - RNA, 32 nt, Human
gguccucgcuucaugcucacacaggcuauggg

SEQ ID NO: 468733 - RNA, 32 nt, Human
gguccucgggcgcgcaccgcucucuuacacuc

SEQ ID NO: 468734 - RNA, 25 nt, Human
gguccucgguuuccucauuugugaa

SEQ ID NO: 468735 - RNA, 32 nt, Human
gguccucgugcugaccgcgcucugccucagcg

SEQ ID NO: 468736 - RNA, 32 nt, Human
gguccucuaggccugggcugggcuccaggcca

SEQ ID NO: 468737 - RNA, 32 nt, Human
gguccucucacugcagccucccaacaggcugg

SEQ ID NO: 468738 - RNA, 32 nt, Human
gguccucucccaggagcagccccuggaugccc

SEQ ID NO: 468739 - RNA, 32 nt, Human
gguccucucgguccucuccauccugugcuucu

SEQ ID NO: 468740 - RNA, 32 nt, Human
gguccucugcguuguagugcuaccucaaucuc

SEQ ID NO: 468741 - RNA, 32 nt, Human
gguccucuggauggcaggugaguaaaggugac

SEQ ID NO: 468742 - RNA, 20 nt, Human
gguccucuggcccugcucuc

SEQ ID NO: 468743 - RNA, 32 nt, Human
gguccucugggagucggaagagcugucugggu

SEQ ID NO: 468744 - RNA, 32 nt, Human
gguccucuucuuucuagcuucugacaagucug

SEQ ID NO: 468745 - RNA, 21 nt, Human
gguccugaauccagagacaaa

SEQ ID NO: 468746 - RNA, 32 nt, Human
gguccugaccuucccuuccucccaaguuagca

SEQ ID NO: 468747 - RNA, 32 nt, Human
gguccugacucugccaggucucuuaucccuag

SEQ ID NO: 468748 - RNA, 32 nt, Human
gguccugagaacaugugcccaagguggucggg

SEQ ID NO: 468749 - RNA, 32 nt, Human
gguccugagagggagaggagagcaagagaauc

SEQ ID NO: 468750 - RNA, 18 nt, Human
gguccugagcacugauca

SEQ ID NO: 468751 - RNA, 32 nt, Human
gguccugagcugggucccacccuccgagccau

SEQ ID NO: 468752 - RNA, 32 nt, Human
gguccugaggcucaucugccuucuccugguca

SEQ ID NO: 468753 - RNA, 32 nt, Human
gguccugagucaggagguugaggcugcaguga

SEQ ID NO: 468754 - RNA, 32 nt, Human
gguccugaguccuguguguggggccuauauca

SEQ ID NO: 468755 - RNA, 32 nt, Human
gguccugauacuuguuucuuuucacguuuucc

SEQ ID NO: 468756 - RNA, 24 nt, Human
gguccugaucuccugaccuuguga

SEQ ID NO: 468757 - RNA, 32 nt, Human
gguccugauggccauuaugggaauagaggcug

SEQ ID NO: 468758 - RNA, 21 nt, Human
gguccugcacagauucccagg

SEQ ID NO: 468759 - RNA, 32 nt, Human
gguccugcacuucuccccagaggugggcccuc

SEQ ID NO: 468760 - RNA, 32 nt, Human
gguccugcaguaggaugggagggaagguuaaa

SEQ ID NO: 468761 - RNA, 32 nt, Human
gguccugccacauccuucucaaggugguagac

SEQ ID NO: 468762 - RNA, 32 nt, Human
gguccugccagaccuccuuccugaccucugag

SEQ ID NO: 468763 - RNA, 32 nt, Human
gguccugccagcugccucccugaucccucccc

SEQ ID NO: 468764 - RNA, 32 nt, Human
gguccugccagcugccugaggaaguccugaaa

SEQ ID NO: 468765 - RNA, 32 nt, Human
gguccugcccugcuguucuuugcuggagauga

SEQ ID NO: 468766 - RNA, 22 nt, Human
gguccugccgccuccgcaucug

SEQ ID NO: 468767 - RNA, 32 nt, Human
gguccugccggcucccccuccugcucccaagg

SEQ ID NO: 468768 - RNA, 20 nt, Human
gguccugccucuuuaccaca

SEQ ID NO: 468769 - RNA, 32 nt, Human
gguccugcugaccugcacuguccaggccucac

SEQ ID NO: 468770 - RNA, 32 nt, Human
gguccugcugcucgggaaggccugagggaagc

SEQ ID NO: 468771 - RNA, 32 nt, Human
gguccugcugcuucaucucucccccagccugc

SEQ ID NO: 468772 - RNA, 32 nt, Human
gguccugcuggugaccggccuggaccuuggcc

SEQ ID NO: 468773 - RNA, 32 nt, Human
gguccugcuguagugccuucugcgccaggccc

SEQ ID NO: 468774 - RNA, 32 nt, Human
gguccugcugugccaucucccugugcgccuga

SEQ ID NO: 468775 - RNA, 32 nt, Human
gguccugcuucaccuuccccugaccugaguag

SEQ ID NO: 468776 - RNA, 32 nt, Human
gguccugcuuugcccucuuugauauuccuggu

SEQ ID NO: 468777 - RNA, 32 nt, Human
gguccuggacucacugcugcaggauggggaau

SEQ ID NO: 468778 - RNA, 32 nt, Human
gguccuggagccacguccagcacagaguggac

SEQ ID NO: 468779 - RNA, 32 nt, Human
gguccuggagccugucucuucuuucuggaggu

SEQ ID NO: 468780 - RNA, 20 nt, Human
gguccuggcauucuaccauc

SEQ ID NO: 468781 - RNA, 32 nt, Human
gguccuggcccaggccuguccaaagagaagcc

SEQ ID NO: 468782 - RNA, 32 nt, Human
gguccuggcuaacacggugaaaccccggcucu

SEQ ID NO: 468783 - RNA, 32 nt, Human
gguccuggcucugccacuggcuugcuuuugga

SEQ ID NO: 468784 - RNA, 32 nt, Human
gguccuggcugcacucuugaacugggcgaaug

SEQ ID NO: 468785 - RNA, 32 nt, Human
gguccuggcugcagggaaacaagcugggcuuu

SEQ ID NO: 468786 - RNA, 18 nt, Human
gguccuggcuggcuuugu

SEQ ID NO: 468787 - RNA, 32 nt, Human
gguccugggagaaaauagagacccauccccaa

SEQ ID NO: 468788 - RNA, 32 nt, Human
gguccugggagguggucgcccugcagugcaag

SEQ ID NO: 468789 - RNA, 32 nt, Human
gguccugggcaaagcuggcaaauucacuuccu

SEQ ID NO: 468790 - RNA, 32 nt, Human
gguccugggcagguugcaagacuggucuuaga

SEQ ID NO: 468791 - RNA, 19 nt, Human
gguccugggcccccacugc

SEQ ID NO: 468792 - RNA, 32 nt, Human
gguccugggccgcacugcuccgccggggucug

SEQ ID NO: 468793 - RNA, 32 nt, Human
gguccugggcuggggccacaucccugauggca

SEQ ID NO: 468794 - RNA, 32 nt, Human
gguccugggcuguggguaggggcuagggccgg

SEQ ID NO: 468795 - RNA, 32 nt, Human
gguccuggguagaguccuagccccagagcccc

SEQ ID NO: 468796 - RNA, 32 nt, Human
gguccugguggagaaagaaaggcuaggaccau

SEQ ID NO: 468797 - RNA, 32 nt, Human
gguccugguugcacuccgugcuuugcacaaag

SEQ ID NO: 468798 - RNA, 32 nt, Human
gguccugguuucaacauggaagugagauagcu

SEQ ID NO: 468799 - RNA, 32 nt, Human
gguccugguuucccuaugacauggaagcaaga

SEQ ID NO: 468800 - RNA, 20 nt, Human
gguccugucaccgccaccgc

SEQ ID NO: 468801 - RNA, 19 nt, Human
gguccuguccuugcuauca

SEQ ID NO: 468802 - RNA, 32 nt, Human
gguccugucuccaagccugguugcucuuacgc

SEQ ID NO: 468803 - RNA, 32 nt, Human
gguccugucuguccuucugaaguguguccauc

SEQ ID NO: 468804 - RNA, 32 nt, Human
gguccugugagggcgagcggaggcggagaaag

SEQ ID NO: 468805 - RNA, 32 nt, Human
gguccugugcaccgcuuuggggcacagucuga

SEQ ID NO: 468806 - RNA, 32 nt, Human
gguccugugcccuuuacuugcuggugaggugu

SEQ ID NO: 468807 - RNA, 32 nt, Human
gguccuguuaacccuccaccuccucucuugga

SEQ ID NO: 468808 - RNA, 31 nt, Human
gguccuguuagagaggagaaagacuguaaug

SEQ ID NO: 468809 - RNA, 32 nt, Human
gguccuguuccucaucacccuacuucccugag

SEQ ID NO: 468810 - RNA, 20 nt, Human
gguccuguuguuuauuauca

SEQ ID NO: 468811 - RNA, 32 nt, Human
gguccuuccagccugaggggcuucggagcuga

SEQ ID NO: 468812 - RNA, 32 nt, Human
gguccuuccccaguuccuaucucccacccgcc

SEQ ID NO: 468813 - RNA, 22 nt, Human
gguccuucguuacgcagccccc

SEQ ID NO: 468814 - RNA, 32 nt, Human
gguccuucuaccucagccucuggagcaacugg

SEQ ID NO: 468815 - RNA, 32 nt, Human
gguccuucuggugggaagggaggcgggaggug

SEQ ID NO: 468816 - RNA, 32 nt, Human
gguccuugaacuguguaucuauuucauagggc

SEQ ID NO: 468817 - RNA, 32 nt, Human
gguccuugaacuguguaucuauuucauagggu

SEQ ID NO: 468818 - RNA, 32 nt, Human
gguccuugaggagagcgccucccguccgaggc

SEQ ID NO: 468819 - RNA, 32 nt, Human
gguccuugagguggagggaagauggcugaugu

SEQ ID NO: 468820 - RNA, 32 nt, Human
gguccuuggagugcugcagcuuugggaaagcc

SEQ ID NO: 468821 - RNA, 18 nt, Human
gguccuuggaguggcgug

SEQ ID NO: 468822 - RNA, 24 nt, Human
gguccuuggcgccguccacaucca

SEQ ID NO: 468823 - RNA, 32 nt, Human
gguccuuguuucugcccugccagcugcagccu

SEQ ID NO: 468824 - RNA, 32 nt, Human
gguccuuucaucuggcuccguuucuggugcuu

SEQ ID NO: 468825 - RNA, 33 nt, Human
gguccuuuucuugcuccaguuuucaugguaaca

SEQ ID NO: 468826 - RNA, 32 nt, Human
gguccuuuugucccaucucucucgcugagaug

SEQ ID NO: 468827 - RNA, 32 nt, Human
ggucgaacucuggcucucaggaauaugaccga

SEQ ID NO: 468828 - RNA, 32 nt, Human
ggucgaagcucacaccaccucugcagacucau

SEQ ID NO: 468829 - RNA, 24 nt, Human
ggucgacagagugagacuccaucu

SEQ ID NO: 468830 - RNA, 32 nt, Human
ggucgacaugggaccucugccccacaucuuac

SEQ ID NO: 468831 - RNA, 32 nt, Human
ggucgacugagccauuggaaacccagcucacg

SEQ ID NO: 468832 - RNA, 32 nt, Human
ggucgacuugccaaaggguuuaggcuucauug

SEQ ID NO: 468833 - RNA, 32 nt, Human
ggucgagaaccgggugcugggccgggcgcggg

SEQ ID NO: 468834 - RNA, 32 nt, Human
ggucgaggcccaggaggaaggggaggguucac

SEQ ID NO: 468835 - RNA, 32 nt, Human
ggucgaggcugcagugagccaagauggcgcca

SEQ ID NO: 468836 - RNA, 32 nt, Human
ggucgaggcuggcucuggaagcagcaccaugg

SEQ ID NO: 468837 - RNA, 32 nt, Human
ggucgaguagaugcggggcagccggagcuguu

SEQ ID NO: 468838 - RNA, 32 nt, Human
ggucgaguaggugauagaagacaagggggaga

SEQ ID NO: 468839 - RNA, 32 nt, Human
ggucgaucuucccacguguuaggguuuauuuu

SEQ ID NO: 468840 - RNA, 32 nt, Human
ggucgcaccacugcacuccagccugggugaca

SEQ ID NO: 468841 - RNA, 32 nt, Human
ggucgcaccacugcacuccagucuggguaaca

SEQ ID NO: 468842 - RNA, 32 nt, Human
ggucgcaccacugcacugcagccugggugaca

SEQ ID NO: 468843 - RNA, 32 nt, Human
ggucgcaccgcuacacuccagccugggugaca

SEQ ID NO: 468844 - RNA, 32 nt, Human
ggucgcaccguuguacuccagccuggugauag

SEQ ID NO: 468845 - RNA, 32 nt, Human
ggucgcacggagcuuuucuuggguaaggcagu

SEQ ID NO: 468846 - RNA, 32 nt, Human
ggucgcagagcacagaucuuuaaagaagcgag

SEQ ID NO: 468847 - RNA, 32 nt, Human
ggucgcagagcagaggagacccaggcaguguc

SEQ ID NO: 468848 - RNA, 32 nt, Human
ggucgcagaggcaggaggcgugcguggcagga

SEQ ID NO: 468849 - RNA, 24 nt, Human
ggucgcagcaaauggcuucagccu

SEQ ID NO: 468850 - RNA, 32 nt, Human
ggucgcagcaaauggcuucagccugggacgcc

SEQ ID NO: 468851 - RNA, 32 nt, Human
ggucgcagcugcucgggaggcugaggcaggag

SEQ ID NO: 468852 - RNA, 32 nt, Human
ggucgcauucucucccgccugagacuucuuuu

SEQ ID NO: 468853 - RNA, 18 nt, Human
ggucgccacggccauccc

SEQ ID NO: 468854 - RNA, 32 nt, Human
ggucgccacugcacccagccugugucuuccag

SEQ ID NO: 468855 - RNA, 22 nt, Human
ggucgccagagcccugccccca

SEQ ID NO: 468856 - RNA, 32 nt, Human
ggucgccaugaucaccccaacucuagaggccg

SEQ ID NO: 468857 - RNA, 32 nt, Human
ggucgccccgagagaagagccaggguccuuca

SEQ ID NO: 468858 - RNA, 32 nt, Human
ggucgcccuccccaccaugaagaagacccgga

SEQ ID NO: 468859 - RNA, 32 nt, Human
ggucgcccugguuccuggcagcuccuggugcc

SEQ ID NO: 468860 - RNA, 32 nt, Human
ggucgccgccguugcugcuccugcugccgcag

SEQ ID NO: 468861 - RNA, 32 nt, Human
ggucgccucccaggugucccagcaagcccgug

SEQ ID NO: 468862 - RNA, 32 nt, Human
ggucgccucugccccacugccagccugagugg

SEQ ID NO: 468863 - RNA, 32 nt, Human
ggucgccucuuaggugacgcugggaagugccu

SEQ ID NO: 468864 - RNA, 32 nt, Human
ggucgccuggggaccccagaagggacaggcug

SEQ ID NO: 468865 - RNA, 32 nt, Human
ggucgccuguagucccagcuacucgggaggcu

SEQ ID NO: 468866 - RNA, 32 nt, Human
ggucgccugugaucgcagcuacucgggaggug

SEQ ID NO: 468867 - RNA, 28 nt, Human
ggucgccuguggagcucagccccgagcu

SEQ ID NO: 468868 - RNA, 28 nt, Human
ggucgccuguggagcucagcccugagcu

SEQ ID NO: 468869 - RNA, 32 nt, Human
ggucgcgccacugcacuccagccugggagaaa

SEQ ID NO: 468870 - RNA, 32 nt, Human
ggucgcgccacugcacuccagccugggcagca

SEQ ID NO: 468871 - RNA, 32 nt, Human
ggucgcgccacugcacuccagccugggcgaca

SEQ ID NO: 468872 - RNA, 32 nt, Human
ggucgcgccacugcacuucagccugggugaca

SEQ ID NO: 468873 - RNA, 32 nt, Human
ggucgcgccacugcgcuccagccuggacaaca

SEQ ID NO: 468874 - RNA, 32 nt, Human
ggucgcgccauugcacuccagccugggcaaca

SEQ ID NO: 468875 - RNA, 32 nt, Human
ggucgcgccauugcacuccagccugggcgaca

SEQ ID NO: 468876 - RNA, 32 nt, Human
ggucgcgcucacugcgacggcaggcuuugagu

SEQ ID NO: 468877 - RNA, 32 nt, Human
ggucgcggaagaggaggcugagagggucaaaa

SEQ ID NO: 468878 - RNA, 32 nt, Human
ggucgcggaggaggcagggggaaggugcccau

SEQ ID NO: 468879 - RNA, 25 nt, Human
ggucgcggcgccccgcgcuuccgcu

SEQ ID NO: 468880 - RNA, 22 nt, Human
ggucgcggcuugggcuccgcuu

SEQ ID NO: 468881 - RNA, 32 nt, Human
ggucgcgggaggugacgcgcggcgaggauggc

SEQ ID NO: 468882 - RNA, 32 nt, Human
ggucgcguagcccaggguggaggcagaacgau

SEQ ID NO: 468883 - RNA, 24 nt, Human
ggucgcgucgggagcccugcgcug

SEQ ID NO: 468884 - RNA, 32 nt, Human
ggucgcguugcauuguguucaugaccauguag

SEQ ID NO: 468885 - RNA, 32 nt, Human
ggucgcucagggagguggaguguccacuguuc

SEQ ID NO: 468886 - RNA, 32 nt, Human
ggucgcuccauugcacuccagccugggcaaca

SEQ ID NO: 468887 - RNA, 19 nt, Human
ggucgcucccguuccgcgc

SEQ ID NO: 468888 - RNA, 32 nt, Human
ggucgcuccugguucugccagcuccccugaga

SEQ ID NO: 468889 - RNA, 32 nt, Human
ggucgcucucuccuccccgccaccccacgcac

SEQ ID NO: 468890 - RNA, 32 nt, Human
ggucgcucuugggaggcacaggcaugggugug

SEQ ID NO: 468891 - RNA, 32 nt, Human
ggucgcugaggguuuggggaggcuuuucugag

SEQ ID NO: 468892 - RNA, 32 nt, Human
ggucgcugcagccucaaccuccugggcucaag

SEQ ID NO: 468893 - RNA, 20 nt, Human
ggucgcugcccuucacuccu

SEQ ID NO: 468894 - RNA, 21 nt, Human
ggucgcugccuguaccgcucc

SEQ ID NO: 468895 - RNA, 32 nt, Human
ggucgcugcguuuccucugccugcgccgggca

SEQ ID NO: 468896 - RNA, 32 nt, Human
ggucgcuggaaccagggcugccuuccagcacu

SEQ ID NO: 468897 - RNA, 32 nt, Human
ggucgcugggagacagaagguuuugugcccug

SEQ ID NO: 468898 - RNA, 32 nt, Human
ggucgcugggccugcuuguguccuccagccca

SEQ ID NO: 468899 - RNA, 32 nt, Human
ggucgcuguaaccuccgucuccuggguucaag

SEQ ID NO: 468900 - RNA, 22 nt, Human
ggucgcuguggaucugcgccca

SEQ ID NO: 468901 - RNA, 32 nt, Human
ggucgcuucuguagcuccgagggcagguugcg

SEQ ID NO: 468902 - RNA, 32 nt, Human
ggucggaaauggcagagguggaggagacacug

SEQ ID NO: 468903 - RNA, 32 nt, Human
ggucggagggccuugggcaagaucgccuccuc

SEQ ID NO: 468904 - RNA, 32 nt, Human
ggucggaguuaccugaucacaucgagagagug

SEQ ID NO: 468905 - RNA, 32 nt, Human
ggucggaucugagauaucucccagggagguuc

SEQ ID NO: 468906 - RNA, 32 nt, Human
ggucggaugggacuuccggccucaccccugaa

SEQ ID NO: 468907 - RNA, 32 nt, Human
ggucggauucugccaguuucugcucugcagcc

SEQ ID NO: 468908 - RNA, 32 nt, Human
ggucggcacaagauacagaucacaaagaccuu

SEQ ID NO: 468909 - RNA, 32 nt, Human
ggucggcagcaugggucgggagucacgccacu

SEQ ID NO: 468910 - RNA, 32 nt, Human
ggucggcauaggugcccacagagcagacugaa

SEQ ID NO: 468911 - RNA, 32 nt, Human
ggucggcccucgcccccucccccaggcccagc

SEQ ID NO: 468912 - RNA, 32 nt, Human
ggucggccuggagucccugcagccacucaugc

SEQ ID NO: 468913 - RNA, 32 nt, Human
ggucggcgcggguggagggggcgugaggccgc

SEQ ID NO: 468914 - RNA, 24 nt, Human
ggucggcgguuuccagccaaugga

SEQ ID NO: 468915 - RNA, 32 nt, Human
ggucggcugcagugccagcauccugccccucc

SEQ ID NO: 468916 - RNA, 26 nt, Human
ggucggcuuagcccugcuuuccgccu

SEQ ID NO: 468917 - RNA, 32 nt, Human
ggucggcuuggcugggagagauggauggcggg

SEQ ID NO: 468918 - RNA, 32 nt, Human
ggucgggaugccgaugccggcuuggaguuaga

SEQ ID NO: 468919 - RNA, 32 nt, Human
ggucgggauugaggcuguugaccugggcagua

SEQ ID NO: 468920 - RNA, 24 nt, Human
ggucgggcagcugggcucgggcgg

SEQ ID NO: 468921 - RNA, 32 nt, Human
ggucgggcagucaagccaggugaccccaugag

SEQ ID NO: 468922 - RNA, 32 nt, Human
ggucgggccugacugcagcgcagguccuaaaa

SEQ ID NO: 468923 - RNA, 32 nt, Human
ggucgggccugggccguuaucuccccacaacc

SEQ ID NO: 468924 - RNA, 32 nt, Human
ggucgggcugguggccugguggcccugagcgg

SEQ ID NO: 468925 - RNA, 32 nt, Human
ggucgggcuuccaggcuggauggagugcccug

SEQ ID NO: 468926 - RNA, 32 nt, Human
ggucggggcgagcagagggugcgaaggugcgg

SEQ ID NO: 468927 - RNA, 32 nt, Human
ggucggggcucaauggcuacguggaggcggga

SEQ ID NO: 468928 - RNA, 32 nt, Human
ggucgggggaauggcugaggagauggagucgu

SEQ ID NO: 468929 - RNA, 32 nt, Human
ggucgggguccaguagcugccccagaaacaag

SEQ ID NO: 468930 - RNA, 32 nt, Human
ggucggucaacacacacucacgcacuugcaca

SEQ ID NO: 468931 - RNA, 32 nt, Human
ggucggucacccagacagcucuguggaggcag

SEQ ID NO: 468932 - RNA, 32 nt, Human
ggucggugcaccacugcgugaccuccaggcag

SEQ ID NO: 468933 - RNA, 32 nt, Human
ggucggugcgaguggucggcugggcagagugc

SEQ ID NO: 468934 - RNA, 32 nt, Human
ggucgguggcggaggcugaggagaaggaggag

SEQ ID NO: 468935 - RNA, 32 nt, Human
ggucgguucuggagcgggugacccagauggcc

SEQ ID NO: 468936 - RNA, 23 nt, Human
ggucguagacgugucuguaccca

SEQ ID NO: 468937 - RNA, 32 nt, Human
ggucguagugcuguuucugguauucucaucgc

SEQ ID NO: 468938 - RNA, 32 nt, Human
ggucgucacagaaaggucucucuguuccucac

SEQ ID NO: 468939 - RNA, 32 nt, Human
ggucgucaccugcacucaucuuggguuuuccu

SEQ ID NO: 468940 - RNA, 22 nt, Human
ggucgucacgccuguaauccca

SEQ ID NO: 468941 - RNA, 32 nt, Human
ggucgucaggagguggagguugcagugagcca

SEQ ID NO: 468942 - RNA, 32 nt, Human
ggucguccucacugcuacacuccugacagcac

SEQ ID NO: 468943 - RNA, 32 nt, Human
ggucgucugaagaggagggccaggagucccca

SEQ ID NO: 468944 - RNA, 32 nt, Human
ggucgugaggggacagugacucccuuccaacc

SEQ ID NO: 468945 - RNA, 21 nt, Human
ggucgugauccuccugccuca

SEQ ID NO: 468946 - RNA, 32 nt, Human
ggucgugccacugcacuccagccugggcaaca

SEQ ID NO: 468947 - RNA, 32 nt, Human
ggucgugccacugcacuccagccugggcagca

SEQ ID NO: 468948 - RNA, 32 nt, Human
ggucgugccacugcacuccagccugggcgaca

SEQ ID NO: 468949 - RNA, 24 nt, Human
ggucgugccacugcacuucagccu

SEQ ID NO: 468950 - RNA, 32 nt, Human
ggucgugccacugcacuucagccugggugaca

SEQ ID NO: 468951 - RNA, 32 nt, Human
ggucgugccacugcaugccagccugggcaaca

SEQ ID NO: 468952 - RNA, 32 nt, Human
ggucgugccacugcgcuccagccugggugaca

SEQ ID NO: 468953 - RNA, 32 nt, Human
ggucgugccauugcacuccagccugggugaca

SEQ ID NO: 468954 - RNA, 32 nt, Human
ggucgugccugacgugcaccuuccucgggcac

SEQ ID NO: 468955 - RNA, 32 nt, Human
ggucgugcuacugcacucccgccugggugaca

SEQ ID NO: 468956 - RNA, 21 nt, Human
ggucguggaagaaacaaccca

SEQ ID NO: 468957 - RNA, 19 nt, Human
ggucguggaccauccccca

SEQ ID NO: 468958 - RNA, 18 nt, Human
ggucguggaccccggcca

SEQ ID NO: 468959 - RNA, 19 nt, Human
ggucguggagcuccgcacc

SEQ ID NO: 468960 - RNA, 32 nt, Human
ggucguggauggauggaaggcacacagcccgu

SEQ ID NO: 468961 - RNA, 21 nt, Human
ggucguggccauucacuccca

SEQ ID NO: 468962 - RNA, 32 nt, Human
ggucgugggaaagaagguggaagagcgagcuu

SEQ ID NO: 468963 - RNA, 32 nt, Human
ggucgugggucugagagucacuggagcuacca

SEQ ID NO: 468964 - RNA, 32 nt, Human
ggucgugguagucuuggaagaggucgaggggg

SEQ ID NO: 468965 - RNA, 23 nt, Human
ggucgugguggcucaugccugua

SEQ ID NO: 468966 - RNA, 23 nt, Human
ggucgugucuccuccugacccca

SEQ ID NO: 468967 - RNA, 32 nt, Human
ggucguugcacuccagccugucgcugugcaga

SEQ ID NO: 468968 - RNA, 19 nt, Human
ggucuaaauccagcucccu

SEQ ID NO: 468969 - RNA, 32 nt, Human
ggucuaacagggagcccggcugccucaccugg

SEQ ID NO: 468970 - RNA, 32 nt, Human
ggucuaacaucuaacaaauaguggcuuuagaa

SEQ ID NO: 468971 - RNA, 32 nt, Human
ggucuaacgagaagguugagcaccuucccguu

SEQ ID NO: 468972 - RNA, 32 nt, Human
ggucuaagagagaguccucagcagagucuucu

SEQ ID NO: 468973 - RNA, 32 nt, Human
ggucuaaguauaaaggcacuaccccagagaag

SEQ ID NO: 468974 - RNA, 32 nt, Human
ggucuaaguuuugggucauccaauugucaucc

SEQ ID NO: 468975 - RNA, 32 nt, Human
ggucuaauucucucacccaggugcaaaugacc

SEQ ID NO: 468976 - RNA, 32 nt, Human
ggucuaauuuccucucuguuuuuaacuauucu

SEQ ID NO: 468977 - RNA, 32 nt, Human
ggucuacacccacuuucugguagccucucugc

SEQ ID NO: 468978 - RNA, 32 nt, Human
ggucuacagcagacaaauagugaaccagagag

SEQ ID NO: 468979 - RNA, 32 nt, Human
ggucuacaggcacgcaccaccacacccagcua

SEQ ID NO: 468980 - RNA, 32 nt, Human
ggucuacaggugcauaccaccaugccuggcua

SEQ ID NO: 468981 - RNA, 32 nt, Human
ggucuacauggugaaaccccaucucaacuaaa

SEQ ID NO: 468982 - RNA, 32 nt, Human
ggucuacauuuuagggaagagcagguacaugg

SEQ ID NO: 468983 - RNA, 23 nt, Human
ggucuaccagcguggcggcuggu

SEQ ID NO: 468984 - RNA, 32 nt, Human
ggucuaccuagagguuucacauggcaccacuu

SEQ ID NO: 468985 - RNA, 32 nt, Human
ggucuaccugacagaugaguuugcuaaaggaa

SEQ ID NO: 468986 - RNA, 32 nt, Human
ggucuacuccauuccuccuggcccaccugggg

SEQ ID NO: 468987 - RNA, 32 nt, Human
ggucuacugugggaacaguuaucccuaaccac

SEQ ID NO: 468988 - RNA, 32 nt, Human
ggucuacuuggcucacccuccaccugcauccc

SEQ ID NO: 468989 - RNA, 32 nt, Human
ggucuacuuuccaauugguugucuggccauau

SEQ ID NO: 468990 - RNA, 20 nt, Human
ggucuacuuugacuuucaaa

SEQ ID NO: 468991 - RNA, 32 nt, Human
ggucuagacccucccuuuccugucacuuagcu

SEQ ID NO: 468992 - RNA, 32 nt, Human
ggucuagagaggaggagggcggggcuggagga

SEQ ID NO: 468993 - RNA, 32 nt, Human
ggucuagagccauaucugaaauauugcuaagc

SEQ ID NO: 468994 - RNA, 32 nt, Human
ggucuagaggaaugaguguccaggcagaguuc

SEQ ID NO: 468995 - RNA, 21 nt, Human
ggucuagaggggucuggggca

SEQ ID NO: 468996 - RNA, 32 nt, Human
ggucuagaucacauucucgauccagaggaagg

SEQ ID NO: 468997 - RNA, 24 nt, Human
ggucuagaucuccugaccuuguga

SEQ ID NO: 468998 - RNA, 32 nt, Human
ggucuagcaaacauaaugcuaguccuagauua

SEQ ID NO: 468999 - RNA, 32 nt, Human
ggucuagccaggggagguugugugugugggag

SEQ ID NO: 469000 - RNA, 32 nt, Human
ggucuagcuaguucuuguaaaagugaugccuc

SEQ ID NO: 469001 - RNA, 32 nt, Human
ggucuagcuaucucuuuuacuguaccauuuua

SEQ ID NO: 469002 - RNA, 32 nt, Human
ggucuaggacacaccuucccugagacucauga

SEQ ID NO: 469003 - RNA, 32 nt, Human
ggucuaggcagcaguggauggugcaggggaaa

SEQ ID NO: 469004 - RNA, 32 nt, Human
ggucuaggcagggcagccgguucuccaccucc

SEQ ID NO: 469005 - RNA, 22 nt, Human
ggucuaggcuaaccuuugguca

SEQ ID NO: 469006 - RNA, 32 nt, Human
ggucuagggcaggaguccagcggagaagggaa

SEQ ID NO: 469007 - RNA, 32 nt, Human
ggucuaggugugaguccuuccucagauaugug

SEQ ID NO: 469008 - RNA, 31 nt, Human
ggucuauaaagaaaaucugcucuuuaaccac

SEQ ID NO: 469009 - RNA, 32 nt, Human
ggucuauaaagaaaaucugcucuuuaaccacu

SEQ ID NO: 469010 - RNA, 25 nt, Human
ggucuauaugcugggugcugagaca

SEQ ID NO: 469011 - RNA, 32 nt, Human
ggucuauaugcugggugcugagacacugaucc

SEQ ID NO: 469012 - RNA, 31 nt, Human
ggucuaucagaauccuaacucacuuagacca

SEQ ID NO: 469013 - RNA, 32 nt, Human
ggucuaucucagaggaaggaacaggaaacaaa

SEQ ID NO: 469014 - RNA, 32 nt, Human
ggucuaugccaaggaacagcuguuugcugaag

SEQ ID NO: 469015 - RNA, 32 nt, Human
ggucuauucauagggucccaaaccacuuuggc

SEQ ID NO: 469016 - RNA, 24 nt, Human
ggucucaaacaccugaccuuguga

SEQ ID NO: 469017 - RNA, 24 nt, Human
ggucucaaacuccuaaccuuguga

SEQ ID NO: 469018 - RNA, 24 nt, Human
ggucucaaacuccugacccuguga

SEQ ID NO: 469019 - RNA, 24 nt, Human
ggucucaaacuccugaccuaguga

SEQ ID NO: 469020 - RNA, 32 nt, Human
ggucucaaacuccugaccucaggugcccaccu

SEQ ID NO: 469021 - RNA, 24 nt, Human
ggucucaaacuccugaccucauga

SEQ ID NO: 469022 - RNA, 22 nt, Human
ggucucaaacuccugaccucgu

SEQ ID NO: 469023 - RNA, 24 nt, Human
ggucucaaacuccugaccucguga

SEQ ID NO: 469024 - RNA, 24 nt, Human
ggucucaaacuccugaccucuuga

SEQ ID NO: 469025 - RNA, 20 nt, Human
ggucucaaacuccugaccuu

SEQ ID NO: 469026 - RNA, 24 nt, Human
ggucucaaacuccugaccuuguga

SEQ ID NO: 469027 - RNA, 24 nt, Human
ggucucaaacuccugaccuugugg

SEQ ID NO: 469028 - RNA, 24 nt, Human
ggucucaaacucuugaccucguga

SEQ ID NO: 469029 - RNA, 24 nt, Human
ggucucaaacuucugaccucguga

SEQ ID NO: 469030 - RNA, 32 nt, Human
ggucucaaagauaacugcauccuucauuccag

SEQ ID NO: 469031 - RNA, 20 nt, Human
ggucucaagauggaacugug

SEQ ID NO: 469032 - RNA, 25 nt, Human
ggucucaagugauucuacugccuca

SEQ ID NO: 469033 - RNA, 24 nt, Human
ggucucaauccccugaccucguga

SEQ ID NO: 469034 - RNA, 22 nt, Human
ggucucaauccuggccucuuga

SEQ ID NO: 469035 - RNA, 24 nt, Human
ggucucaaucucccggccucguga

SEQ ID NO: 469036 - RNA, 24 nt, Human
ggucucaaucuccuaaccuugaga

SEQ ID NO: 469037 - RNA, 19 nt, Human
ggucucaaucuccugaccu

SEQ ID NO: 469038 - RNA, 24 nt, Human
ggucucaaucuccugaccucauga

SEQ ID NO: 469039 - RNA, 24 nt, Human
ggucucaaucuccugaccucguga

SEQ ID NO: 469040 - RNA, 24 nt, Human
ggucucaaucuccugaccuuguga

SEQ ID NO: 469041 - RNA, 24 nt, Human
ggucucaaucuccugacuucaugg

SEQ ID NO: 469042 - RNA, 22 nt, Human
ggucucaaucucgaccucguga

SEQ ID NO: 469043 - RNA, 24 nt, Human
ggucucaaucucuugaccuccuga

SEQ ID NO: 469044 - RNA, 22 nt, Human
ggucucaaucucuugaccucgu

SEQ ID NO: 469045 - RNA, 24 nt, Human
ggucucaaucucuugaccucuuga

SEQ ID NO: 469046 - RNA, 24 nt, Human
ggucucaaucucuugaccuuguga

SEQ ID NO: 469047 - RNA, 32 nt, Human
ggucucaaugggucucauuugagucucgcggg

SEQ ID NO: 469048 - RNA, 32 nt, Human
ggucucaccaacaagugaggauauagccuuau

SEQ ID NO: 469049 - RNA, 32 nt, Human
ggucucacccccacuuccuuccagucauacac

SEQ ID NO: 469050 - RNA, 32 nt, Human
ggucucaccugucaguuguuugcugaguuuau

SEQ ID NO: 469051 - RNA, 32 nt, Human
ggucucaccugucgcuggagugcaguggugug

SEQ ID NO: 469052 - RNA, 21 nt, Human
ggucucaccuuccgcgcaagg

SEQ ID NO: 469053 - RNA, 32 nt, Human
ggucucacgccugugaucccagcacuuuggga

SEQ ID NO: 469054 - RNA, 22 nt, Human
ggucucacguuuguugccauua

SEQ ID NO: 469055 - RNA, 32 nt, Human
ggucucacuauauugcccagacuggucucgaa

SEQ ID NO: 469056 - RNA, 21 nt, Human
ggucucacucaggcaccagcc

SEQ ID NO: 469057 - RNA, 24 nt, Human
ggucucacugcaaccucuaccucc

SEQ ID NO: 469058 - RNA, 32 nt, Human
ggucucacugcaaccucuaccucccagguuca

SEQ ID NO: 469059 - RNA, 32 nt, Human
ggucucacuggaccaucaggacugcugccgcc

SEQ ID NO: 469060 - RNA, 32 nt, Human
ggucucacuggacugaauuccugccaccuccc

SEQ ID NO: 469061 - RNA, 32 nt, Human
ggucucagagaacucccccaccugugguuuua

SEQ ID NO: 469062 - RNA, 32 nt, Human
ggucucagcauucugucauacucaacagcuau

SEQ ID NO: 469063 - RNA, 23 nt, Human
ggucucagcauuucaucugugaa

SEQ ID NO: 469064 - RNA, 32 nt, Human
ggucucagccaagacaugugauaaucacugua

SEQ ID NO: 469065 - RNA, 32 nt, Human
ggucucagccuccucccgaccccuuccugcgc

SEQ ID NO: 469066 - RNA, 32 nt, Human
ggucucagccugggcccaggucgaggaaggcc

SEQ ID NO: 469067 - RNA, 32 nt, Human
ggucucagccuggggguggcagggguggggca

SEQ ID NO: 469068 - RNA, 32 nt, Human
ggucucagcuacucaggaggcugagaugagag

SEQ ID NO: 469069 - RNA, 32 nt, Human
ggucucagcuacucaggaggcugaggugggag

SEQ ID NO: 469070 - RNA, 32 nt, Human
ggucucagcuacucagggggcugaggcuggac

SEQ ID NO: 469071 - RNA, 32 nt, Human
ggucucagcuacucggcauucugaggugggag

SEQ ID NO: 469072 - RNA, 32 nt, Human
ggucucagcuacucgggaggcugaggugggag

SEQ ID NO: 469073 - RNA, 32 nt, Human
ggucucagcuacuugggaggcugaggcaggag

SEQ ID NO: 469074 - RNA, 32 nt, Human
ggucucagcuacuugggaggcugaggugggag

SEQ ID NO: 469075 - RNA, 32 nt, Human
ggucucagcuacuugggaggcuggggugggag

SEQ ID NO: 469076 - RNA, 23 nt, Human
ggucucaggccaauuacugugga

SEQ ID NO: 469077 - RNA, 32 nt, Human
ggucucaggccuguguggggagcuggugccuc

SEQ ID NO: 469078 - RNA, 32 nt, Human
ggucucagggagccaguucaaggucuggcugu

SEQ ID NO: 469079 - RNA, 32 nt, Human
ggucucaggggcuggggcucuaccuccccugg

SEQ ID NO: 469080 - RNA, 32 nt, Human
ggucucagucccggcuccaucugugcccucgc

SEQ ID NO: 469081 - RNA, 24 nt, Human
ggucucagucuccagacccuguga

SEQ ID NO: 469082 - RNA, 32 nt, Human
ggucucaguggaggggacaaaggcaagcaaaa

SEQ ID NO: 469083 - RNA, 21 nt, Human
ggucucaguguccucaucugu

SEQ ID NO: 469084 - RNA, 23 nt, Human
ggucucauaauuccauuugugga

SEQ ID NO: 469085 - RNA, 32 nt, Human
ggucucauauuggauucuuucugucauccuau

SEQ ID NO: 469086 - RNA, 32 nt, Human
ggucucauccgccugcacagcugaguccagug

SEQ ID NO: 469087 - RNA, 32 nt, Human
ggucucaucugaauauuguggucucaucuaaa

SEQ ID NO: 469088 - RNA, 32 nt, Human
ggucucaugguucagacagagggagguggacg

SEQ ID NO: 469089 - RNA, 22 nt, Human
ggucucauucauggcuugggga

SEQ ID NO: 469090 - RNA, 32 nt, Human
ggucuccaaaagugcugggauuacaggcauga

SEQ ID NO: 469091 - RNA, 24 nt, Human
ggucuccaacuccugacuucauga

SEQ ID NO: 469092 - RNA, 32 nt, Human
ggucuccaagccccaaaugaguccuugugaac

SEQ ID NO: 469093 - RNA, 31 nt, Human
ggucuccaagugucaacucccagugaaagaa

SEQ ID NO: 469094 - RNA, 32 nt, Human
ggucuccacaucuuccuucucugaaguccagg

SEQ ID NO: 469095 - RNA, 19 nt, Human
ggucuccagaaccccuuug

SEQ ID NO: 469096 - RNA, 19 nt, Human
ggucuccagaagcccugca

SEQ ID NO: 469097 - RNA, 19 nt, Human
ggucuccagagcgcuugca

SEQ ID NO: 469098 - RNA, 32 nt, Human
ggucuccagagggagacaugacaguaauugua

SEQ ID NO: 469099 - RNA, 32 nt, Human
ggucuccagcaggaguggaggcuggucugggc

SEQ ID NO: 469100 - RNA, 32 nt, Human
ggucuccagccucaucgaauucuugaagcaga

SEQ ID NO: 469101 - RNA, 32 nt, Human
ggucuccagcugcaguggguggccgccaauug

SEQ ID NO: 469102 - RNA, 32 nt, Human
ggucuccagcuuauagaugacagaucauggga

SEQ ID NO: 469103 - RNA, 32 nt, Human
ggucuccagcuucucugcuucucagcugccau

SEQ ID NO: 469104 - RNA, 32 nt, Human
ggucuccagggccuggcagaccccagagucag

SEQ ID NO: 469105 - RNA, 23 nt, Human
ggucuccagggggucccugugca

SEQ ID NO: 469106 - RNA, 32 nt, Human
ggucuccaggugguccagaggauagcauugcg

SEQ ID NO: 469107 - RNA, 32 nt, Human
ggucuccauauguugcccaggcuggucucgaa

SEQ ID NO: 469108 - RNA, 24 nt, Human
ggucuccaucuccugaccucauga

SEQ ID NO: 469109 - RNA, 24 nt, Human
ggucuccaucuccugaccuccuga

SEQ ID NO: 469110 - RNA, 24 nt, Human
ggucuccaucuccugaccucguga

SEQ ID NO: 469111 - RNA, 24 nt, Human
ggucuccaucuccugaccuuguga

SEQ ID NO: 469112 - RNA, 24 nt, Human
ggucuccaucucuugaccucguga

SEQ ID NO: 469113 - RNA, 21 nt, Human
ggucuccaucuucuuucacuc

SEQ ID NO: 469114 - RNA, 32 nt, Human
ggucuccaucuucuuucacuccuguggcccug

SEQ ID NO: 469115 - RNA, 32 nt, Human
ggucuccaucuucuuugacuccuguggcccuc

SEQ ID NO: 469116 - RNA, 32 nt, Human
ggucucccaaaaugcugggauuacagggguga

SEQ ID NO: 469117 - RNA, 32 nt, Human
ggucucccaaagcgcugggauuacaggcguga

SEQ ID NO: 469118 - RNA, 32 nt, Human
ggucucccaaagugaugggauuacaggcguga

SEQ ID NO: 469119 - RNA, 32 nt, Human
ggucucccaaagugcugggauuacagacauga

SEQ ID NO: 469120 - RNA, 32 nt, Human
ggucucccaaagugcugggauuacagauguga

SEQ ID NO: 469121 - RNA, 32 nt, Human
ggucucccaaagugcugggauuacaggaguga

SEQ ID NO: 469122 - RNA, 32 nt, Human
ggucucccaaagugcugggauuacaggcauga

SEQ ID NO: 469123 - RNA, 32 nt, Human
ggucucccaaagugcugggauuacaggcguga

SEQ ID NO: 469124 - RNA, 32 nt, Human
ggucucccaaagugcugggauuacaggcuuga

SEQ ID NO: 469125 - RNA, 32 nt, Human
ggucucccaaagugcugggauuacagggauaa

SEQ ID NO: 469126 - RNA, 32 nt, Human
ggucucccaaagugcugggauuacagguguga

SEQ ID NO: 469127 - RNA, 32 nt, Human
ggucucccaaagugcugggauuacccacaucc

SEQ ID NO: 469128 - RNA, 32 nt, Human
ggucucccaaagugcugggauuacgguguuag

SEQ ID NO: 469129 - RNA, 32 nt, Human
ggucucccaaagugcugggauuauaggcauga

SEQ ID NO: 469130 - RNA, 32 nt, Human
ggucucccaaaguguugggauuacaggcauga

SEQ ID NO: 469131 - RNA, 32 nt, Human
ggucucccaacgugcugggauuacaggcauga

SEQ ID NO: 469132 - RNA, 28 nt, Human
ggucucccaagugcacucauccagguca

SEQ ID NO: 469133 - RNA, 32 nt, Human
ggucucccagaguguuaggauuacaggcguga

SEQ ID NO: 469134 - RNA, 32 nt, Human
ggucuccccaccccaccugugcuggugugugu

SEQ ID NO: 469135 - RNA, 32 nt, Human
ggucuccccagccuuaguuuagguugguguau

SEQ ID NO: 469136 - RNA, 32 nt, Human
ggucuccccaguuccuccucucagaacuccca

SEQ ID NO: 469137 - RNA, 32 nt, Human
ggucuccccaugugccugcaccaggagacaga

SEQ ID NO: 469138 - RNA, 32 nt, Human
ggucucccccacccccaggagguuuuaugauu

SEQ ID NO: 469139 - RNA, 32 nt, Human
ggucucccccucccagcuucuuaccucggcuu

SEQ ID NO: 469140 - RNA, 24 nt, Human
ggucuccccugacgcccacaccca

SEQ ID NO: 469141 - RNA, 32 nt, Human
ggucucccgaagugcugggauuacagguguga

SEQ ID NO: 469142 - RNA, 32 nt, Human
ggucucccgaguggcugggauuauaggcgugc

SEQ ID NO: 469143 - RNA, 21 nt, Human
ggucucccguaggaaacugug

SEQ ID NO: 469144 - RNA, 32 nt, Human
ggucucccgugaggcuggagucagccgugggu

SEQ ID NO: 469145 - RNA, 32 nt, Human
ggucucccuacaaaugaagacuuaucagggcc

SEQ ID NO: 469146 - RNA, 32 nt, Human
ggucucccuauguugcccaggcuggucuagaa

SEQ ID NO: 469147 - RNA, 32 nt, Human
ggucucccuauguugcccaggcuggucuugaa

SEQ ID NO: 469148 - RNA, 32 nt, Human
ggucucccugggggcuccccaguggcucugcc

SEQ ID NO: 469149 - RNA, 32 nt, Human
ggucucccuguguuacccaggcuggucucaaa

SEQ ID NO: 469150 - RNA, 32 nt, Human
ggucucccuuugacuucauguguucucccugu

SEQ ID NO: 469151 - RNA, 32 nt, Human
ggucuccgagaugucacgauggcuguggccau

SEQ ID NO: 469152 - RNA, 32 nt, Human
ggucuccgcacuuggaaagguuucaagacuug

SEQ ID NO: 469153 - RNA, 19 nt, Human
ggucuccgccggcgcccgc

SEQ ID NO: 469154 - RNA, 32 nt, Human
ggucuccgggguccgcuuuggccagaggcgcg

SEQ ID NO: 469155 - RNA, 24 nt, Human
ggucuccgucuccugaccucguga

SEQ ID NO: 469156 - RNA, 32 nt, Human
ggucuccuaaaguacugggauuacaggcguga

SEQ ID NO: 469157 - RNA, 32 nt, Human
ggucuccucccuccucccccuucaccaaugcc

SEQ ID NO: 469158 - RNA, 32 nt, Human
ggucuccucgugccuccucccagaucacccuu

SEQ ID NO: 469159 - RNA, 22 nt, Human
ggucuccugaacugagcugugu

SEQ ID NO: 469160 - RNA, 32 nt, Human
ggucuccugaguagcugggacuacaggugcau

SEQ ID NO: 469161 - RNA, 32 nt, Human
ggucuccugauccguccgaggcugcuucccag

SEQ ID NO: 469162 - RNA, 22 nt, Human
ggucuccugcacugagcugugu

SEQ ID NO: 469163 - RNA, 32 nt, Human
ggucuccugcagcccucugcuccucccggccg

SEQ ID NO: 469164 - RNA, 32 nt, Human
ggucuccugcagggcccugccucccaagcccc

SEQ ID NO: 469165 - RNA, 19 nt, Human
ggucuccuguccuccugca

SEQ ID NO: 469166 - RNA, 22 nt, Human
ggucuccugugcuuggugugug

SEQ ID NO: 469167 - RNA, 32 nt, Human
ggucuccuugcccugugaacgcuccauuugug

SEQ ID NO: 469168 - RNA, 32 nt, Human
ggucuccuugggacguucaucuccuguacucc

SEQ ID NO: 469169 - RNA, 23 nt, Human
ggucucgaaccccgaucucguga

SEQ ID NO: 469170 - RNA, 24 nt, Human
ggucucgaacgccugaccucauga

SEQ ID NO: 469171 - RNA, 23 nt, Human
ggucucgaacgccugaccucgug

SEQ ID NO: 469172 - RNA, 24 nt, Human
ggucucgaacuacugaccucguga

SEQ ID NO: 469173 - RNA, 19 nt, Human
ggucucgaacuccugaccu

SEQ ID NO: 469174 - RNA, 24 nt, Human
ggucucgaacuccugaccucauga

SEQ ID NO: 469175 - RNA, 24 nt, Human
ggucucgaacuccugaccucggga

SEQ ID NO: 469176 - RNA, 24 nt, Human
ggucucgaacuccugaccucguga

SEQ ID NO: 469177 - RNA, 24 nt, Human
ggucucgaacuccugaccugguga

SEQ ID NO: 469178 - RNA, 20 nt, Human
ggucucgaacuccugaccuu

SEQ ID NO: 469179 - RNA, 24 nt, Human
ggucucgaacuccugaccuuguga

SEQ ID NO: 469180 - RNA, 24 nt, Human
ggucucgaacuccugaucucauga

SEQ ID NO: 469181 - RNA, 24 nt, Human
ggucucgaacuccuggccucguga

SEQ ID NO: 469182 - RNA, 32 nt, Human
ggucucgaacuccuggcuucaagggauccucc

SEQ ID NO: 469183 - RNA, 23 nt, Human
ggucucgaacucugaccuuguga

SEQ ID NO: 469184 - RNA, 24 nt, Human
ggucucgaacucuugaccuuguga

SEQ ID NO: 469185 - RNA, 22 nt, Human
ggucucgaauuccugaccucug

SEQ ID NO: 469186 - RNA, 23 nt, Human
ggucucgacccuggaccuccuga

SEQ ID NO: 469187 - RNA, 32 nt, Human
ggucucgacuccuguuuuguucugcgguuccc

SEQ ID NO: 469188 - RNA, 25 nt, Human
ggucucgagucuccugaccucguga

SEQ ID NO: 469189 - RNA, 24 nt, Human
ggucucgauauccugaccuuguga

SEQ ID NO: 469190 - RNA, 23 nt, Human
ggucucgauaucugaucucguga

SEQ ID NO: 469191 - RNA, 22 nt, Human
ggucucgaucucaaccucguga

SEQ ID NO: 469192 - RNA, 24 nt, Human
ggucucgaucuccuaaccugguga

SEQ ID NO: 469193 - RNA, 24 nt, Human
ggucucgaucuccucaccucguga

SEQ ID NO: 469194 - RNA, 19 nt, Human
ggucucgaucuccugaccu

SEQ ID NO: 469195 - RNA, 24 nt, Human
ggucucgaucuccugaccucauga

SEQ ID NO: 469196 - RNA, 24 nt, Human
ggucucgaucuccugaccucguga

SEQ ID NO: 469197 - RNA, 24 nt, Human
ggucucgaucuccugaccugguga

SEQ ID NO: 469198 - RNA, 22 nt, Human
ggucucgaucuccugaccuugu

SEQ ID NO: 469199 - RNA, 24 nt, Human
ggucucgaucuccugaccuuguga

SEQ ID NO: 469200 - RNA, 24 nt, Human
ggucucgaucuccugacgucguga

SEQ ID NO: 469201 - RNA, 24 nt, Human
ggucucgaucuccugacuucauga

SEQ ID NO: 469202 - RNA, 22 nt, Human
ggucucgaucuccugacuucgu

SEQ ID NO: 469203 - RNA, 24 nt, Human
ggucucgaucuccugcccucguga

SEQ ID NO: 469204 - RNA, 23 nt, Human
ggucucgaucuccugcccuggug

SEQ ID NO: 469205 - RNA, 24 nt, Human
ggucucgaucuccugcccugguga

SEQ ID NO: 469206 - RNA, 24 nt, Human
ggucucgaucucuuaaccuuguga

SEQ ID NO: 469207 - RNA, 24 nt, Human
ggucucgaucucuugaccucauga

SEQ ID NO: 469208 - RNA, 24 nt, Human
ggucucgaucucuugaccucguga

SEQ ID NO: 469209 - RNA, 24 nt, Human
ggucucgaucucuugaccugguga

SEQ ID NO: 469210 - RNA, 24 nt, Human
ggucucgaucucuugacgucguga

SEQ ID NO: 469211 - RNA, 24 nt, Human
ggucucgaucucuugaucucauga

SEQ ID NO: 469212 - RNA, 21 nt, Human
ggucucgaucugaccucauga

SEQ ID NO: 469213 - RNA, 24 nt, Human
ggucucgaucuucugaccucguga

SEQ ID NO: 469214 - RNA, 24 nt, Human
ggucucgaugaucugaccucguga

SEQ ID NO: 469215 - RNA, 24 nt, Human
ggucucgauuuccugaccuaguga

SEQ ID NO: 469216 - RNA, 24 nt, Human
ggucucgauuuccugaccucguga

SEQ ID NO: 469217 - RNA, 24 nt, Human
ggucucgauuuccugaccuuguga

SEQ ID NO: 469218 - RNA, 32 nt, Human
ggucucgcagccucugucucuuccgcucucug

SEQ ID NO: 469219 - RNA, 32 nt, Human
ggucucgcccaccaaagccagaaagugcaagc

SEQ ID NO: 469220 - RNA, 24 nt, Human
ggucucgcccuccugaccuuguga

SEQ ID NO: 469221 - RNA, 24 nt, Human
ggucucgcucuccugaccucguga

SEQ ID NO: 469222 - RNA, 24 nt, Human
ggucucggacccuugaccuuguga

SEQ ID NO: 469223 - RNA, 32 nt, Human
ggucucggacuccugaccucaggugucugccc

SEQ ID NO: 469224 - RNA, 22 nt, Human
ggucucggcaguggcuguaagg

SEQ ID NO: 469225 - RNA, 32 nt, Human
ggucucgggacaucuccagacccuaccaacug

SEQ ID NO: 469226 - RNA, 32 nt, Human
ggucucgggccagccccuccucuccccgccuu

SEQ ID NO: 469227 - RNA, 21 nt, Human
ggucucggguauccuuucaaa

SEQ ID NO: 469228 - RNA, 32 nt, Human
ggucucggguccagggaguggagggggcugcc

SEQ ID NO: 469229 - RNA, 23 nt, Human
ggucucggucccuccgcgcaagg

SEQ ID NO: 469230 - RNA, 32 nt, Human
ggucucgugaugcucccucccucuccggagug

SEQ ID NO: 469231 - RNA, 18 nt, Human
ggucucguggcuggggga

SEQ ID NO: 469232 - RNA, 32 nt, Human
ggucucuacuaaaaauacaaaaauuaacuggg

SEQ ID NO: 469233 - RNA, 32 nt, Human
ggucucuacuaaaaauacaaaaauuagccagg

SEQ ID NO: 469234 - RNA, 32 nt, Human
ggucucuacuaaaaauacaaaaauuagcgggg

SEQ ID NO: 469235 - RNA, 32 nt, Human
ggucucuacuaaaaauucaaaaauuaccuagg

SEQ ID NO: 469236 - RNA, 32 nt, Human
ggucucuaggaugccagaggcagcgcacacaa

SEQ ID NO: 469237 - RNA, 32 nt, Human
ggucucuaguaguucuggcccaccucuuuccc

SEQ ID NO: 469238 - RNA, 32 nt, Human
ggucucuauacauuauaccaucugcugaaguu

SEQ ID NO: 469239 - RNA, 24 nt, Human
ggucucuaucuccugaccucguga

SEQ ID NO: 469240 - RNA, 32 nt, Human
ggucucuaugagcaaggaauacaagacaaaac

SEQ ID NO: 469241 - RNA, 32 nt, Human
ggucucucaaagugcugggauuacaggcauaa

SEQ ID NO: 469242 - RNA, 28 nt, Human
ggucucucaagugcuuaugcuuuucuuc

SEQ ID NO: 469243 - RNA, 32 nt, Human
ggucucucaccucucugaccucagcuuccuca

SEQ ID NO: 469244 - RNA, 32 nt, Human
ggucucucauuacccagcuaauacucagcagg

SEQ ID NO: 469245 - RNA, 32 nt, Human
ggucucuccagccucuggucccugggagcaag

SEQ ID NO: 469246 - RNA, 32 nt, Human
ggucucucccuucauuugucucuggugggaca

SEQ ID NO: 469247 - RNA, 32 nt, Human
ggucucuccgggucacgaucuuccaaaguucg

SEQ ID NO: 469248 - RNA, 32 nt, Human
ggucucuccucccugcugaagucccucuccug

SEQ ID NO: 469249 - RNA, 32 nt, Human
ggucucuccugcugcuuuccugguauagcacc

SEQ ID NO: 469250 - RNA, 32 nt, Human
ggucucucucacucugcccccuccucacgcag

SEQ ID NO: 469251 - RNA, 32 nt, Human
ggucucucuccaggacugccaggcugcuggag

SEQ ID NO: 469252 - RNA, 32 nt, Human
ggucucucugagaagcaggaaucucccuguau

SEQ ID NO: 469253 - RNA, 20 nt, Human
ggucucucugucaccaggcu

SEQ ID NO: 469254 - RNA, 32 nt, Human
ggucucucuguggugaccauucacagcauaac

SEQ ID NO: 469255 - RNA, 32 nt, Human
ggucucugcagcaacagaggcaauuuagcaug

SEQ ID NO: 469256 - RNA, 21 nt, Human
ggucucugcauguaguuguca

SEQ ID NO: 469257 - RNA, 32 nt, Human
ggucucugccuucuccccuuacccucccgccu

SEQ ID NO: 469258 - RNA, 19 nt, Human
ggucucugcuagaguuguu

SEQ ID NO: 469259 - RNA, 32 nt, Human
ggucucugcucugcuacccaaggaacuggugg

SEQ ID NO: 469260 - RNA, 21 nt, Human
ggucucugcugugcguugucc

SEQ ID NO: 469261 - RNA, 32 nt, Human
ggucucuggagacaucuucagcaggugggugc

SEQ ID NO: 469262 - RNA, 32 nt, Human
ggucucugggaacccucagaauacggcucagu

SEQ ID NO: 469263 - RNA, 32 nt, Human
ggucucugggagaggaaggaagagggagggag

SEQ ID NO: 469264 - RNA, 32 nt, Human
ggucucugggcuccuguuucugcucuuuuccu

SEQ ID NO: 469265 - RNA, 32 nt, Human
ggucucugggcugaggcggcgacagcuccucu

SEQ ID NO: 469266 - RNA, 32 nt, Human
ggucucuguaacuguggggugagggaaggcag

SEQ ID NO: 469267 - RNA, 32 nt, Human
ggucucugucuccgucccuccuccuuugcugc

SEQ ID NO: 469268 - RNA, 32 nt, Human
ggucucuguucacauggcucaacuggaaaccu

SEQ ID NO: 469269 - RNA, 32 nt, Human
ggucucuuaccuuuuccaagcuacucagaccu

SEQ ID NO: 469270 - RNA, 32 nt, Human
ggucucuuacuaacuccauuacacucucucuc

SEQ ID NO: 469271 - RNA, 32 nt, Human
ggucucuucagccucagaugguucacuccugg

SEQ ID NO: 469272 - RNA, 32 nt, Human
ggucucuucaugcucuccccaucccaguuuuu

SEQ ID NO: 469273 - RNA, 32 nt, Human
ggucucuucccaaccagaccccacccaggcac

SEQ ID NO: 469274 - RNA, 32 nt, Human
ggucucuuccucuccaggccuugccguccccc

SEQ ID NO: 469275 - RNA, 32 nt, Human
ggucucuucuauucucccuuggguuuuauggg

SEQ ID NO: 469276 - RNA, 32 nt, Human
ggucucuucuucuuucugguuguuuuuguucu

SEQ ID NO: 469277 - RNA, 32 nt, Human
ggucucuugccaguacaauccccaggcguuuu

SEQ ID NO: 469278 - RNA, 23 nt, Human
ggucucuuugcuuucugguggug

SEQ ID NO: 469279 - RNA, 32 nt, Human
ggucucuuuuccucaggcauuccagaggugaa

SEQ ID NO: 469280 - RNA, 32 nt, Human
ggucucuuuuugcuuugguugccuguguguuc

SEQ ID NO: 469281 - RNA, 23 nt, Human
ggucugaaagggguguuugggca

SEQ ID NO: 469282 - RNA, 32 nt, Human
ggucugaaaguaggaggugggggaagaggcaa

SEQ ID NO: 469283 - RNA, 32 nt, Human
ggucugaacguggugucucacucugaaaagca

SEQ ID NO: 469284 - RNA, 32 nt, Human
ggucugaacucacuccaaaagauaauaacugc

SEQ ID NO: 469285 - RNA, 32 nt, Human
ggucugaacugcggccccagagccuuuggccu

SEQ ID NO: 469286 - RNA, 32 nt, Human
ggucugaacuguggguggauggguggauugcc

SEQ ID NO: 469287 - RNA, 32 nt, Human
ggucugaaggccaggagcccugugcucuugac

SEQ ID NO: 469288 - RNA, 32 nt, Human
ggucugaaggcuggcuucugaagaaucccuga

SEQ ID NO: 469289 - RNA, 32 nt, Human
ggucugaaguagaauuuucacuuuauguuaga

SEQ ID NO: 469290 - RNA, 32 nt, Human
ggucugaauguggacccucucuccccgaccuc

SEQ ID NO: 469291 - RNA, 32 nt, Human
ggucugacaccugggcuggagugcaguggugc

SEQ ID NO: 469292 - RNA, 32 nt, Human
ggucugacucacccacaauccaucagccugcu

SEQ ID NO: 469293 - RNA, 32 nt, Human
ggucugacugcacugucuccaucuuaugcaaa

SEQ ID NO: 469294 - RNA, 32 nt, Human
ggucugacuguguuacccaggcuggucuucaa

SEQ ID NO: 469295 - RNA, 16 nt, Human
ggucugacuugagguc

SEQ ID NO: 469296 - RNA, 32 nt, Human
ggucugagaacagcggagcgcggaaaccgcgg

SEQ ID NO: 469297 - RNA, 32 nt, Human
ggucugagaacugucagccuuuugccauucaa

SEQ ID NO: 469298 - RNA, 32 nt, Human
ggucugagacaaagggcccuguuucucagcau

SEQ ID NO: 469299 - RNA, 24 nt, Human
ggucugagacucucuuuccuuuug

SEQ ID NO: 469300 - RNA, 32 nt, Human
ggucugagagagaacuccugaccucgugaucc

SEQ ID NO: 469301 - RNA, 32 nt, Human
ggucugagcagagacauugauuugguuucauu

SEQ ID NO: 469302 - RNA, 18 nt, Human
ggucugagcccgcaccca

SEQ ID NO: 469303 - RNA, 20 nt, Human
ggucugagccugcugggccc

SEQ ID NO: 469304 - RNA, 21 nt, Human
ggucugagccuugccuggggc

SEQ ID NO: 469305 - RNA, 32 nt, Human
ggucugagcucccugcccugagaggucggugc

SEQ ID NO: 469306 - RNA, 32 nt, Human
ggucugagcucuccagccuguggcaucuacuc

SEQ ID NO: 469307 - RNA, 32 nt, Human
ggucugagcucuuggguggaagggacccuccu

SEQ ID NO: 469308 - RNA, 32 nt, Human
ggucugaggcccaaauccuuccucacuaaggg

SEQ ID NO: 469309 - RNA, 32 nt, Human
ggucugaggcccauccucccacucucacuguc

SEQ ID NO: 469310 - RNA, 32 nt, Human
ggucugaggccugggagagucucuacugucua

SEQ ID NO: 469311 - RNA, 32 nt, Human
ggucugaggucccagcccuguugccaagugac

SEQ ID NO: 469312 - RNA, 23 nt, Human
ggucugaggucuugcuugggcca

SEQ ID NO: 469313 - RNA, 32 nt, Human
ggucugaggucuugcuugggccagucaccucc

SEQ ID NO: 469314 - RNA, 32 nt, Human
ggucugaggugaugguaacuuggacucggaug

SEQ ID NO: 469315 - RNA, 32 nt, Human
ggucugagguucuugccugccuucccucccau

SEQ ID NO: 469316 - RNA, 32 nt, Human
ggucugagucaggccuucugguuauauugugc

SEQ ID NO: 469317 - RNA, 32 nt, Human
ggucugaguucagggguguggagggagcagac

SEQ ID NO: 469318 - RNA, 32 nt, Human
ggucugaucuggggauaccauguccaagcccc

SEQ ID NO: 469319 - RNA, 20 nt, Human
ggucugaugucucgcaccua

SEQ ID NO: 469320 - RNA, 32 nt, Human
ggucugauguguaagcagccucuccccaucua

SEQ ID NO: 469321 - RNA, 32 nt, Human
ggucugauguguagcagccucuccccaucuac

SEQ ID NO: 469322 - RNA, 32 nt, Human
ggucugauuuucucuuuggauucuuccaaaau

SEQ ID NO: 469323 - RNA, 21 nt, Human
ggucugauuuugcccuggggc

SEQ ID NO: 469324 - RNA, 32 nt, Human
ggucugcaagucagaggauggccagugucugu

SEQ ID NO: 469325 - RNA, 20 nt, Human
ggucugcacagggagucaag

SEQ ID NO: 469326 - RNA, 32 nt, Human
ggucugcacuccccugcggccugcugcuggau

SEQ ID NO: 469327 - RNA, 32 nt, Human
ggucugcagagugcccucccaccagcgaugga

SEQ ID NO: 469328 - RNA, 32 nt, Human
ggucugcagcagccccugguccugagcaggcg

SEQ ID NO: 469329 - RNA, 18 nt, Human
ggucugcagcuauuucaa

SEQ ID NO: 469330 - RNA, 24 nt, Human
ggucugcaggacugaccccaagga

SEQ ID NO: 469331 - RNA, 20 nt, Human
ggucugcagguccgcgccca

SEQ ID NO: 469332 - RNA, 18 nt, Human
ggucugcaguguuuuaaa

SEQ ID NO: 469333 - RNA, 22 nt, Human
ggucugcauagcagacuuuuaa

SEQ ID NO: 469334 - RNA, 20 nt, Human
ggucugcaucacugccauca

SEQ ID NO: 469335 - RNA, 21 nt, Human
ggucugcaucauccuuuucaa

SEQ ID NO: 469336 - RNA, 22 nt, Human
ggucugcaucauccuuuucaaa

SEQ ID NO: 469337 - RNA, 22 nt, Human
ggucugcauugccgggcccccu

SEQ ID NO: 469338 - RNA, 23 nt, Human
ggucugcauugcguccauuucaa

SEQ ID NO: 469339 - RNA, 32 nt, Human
ggucugcauuuuggagaguccacaccacggac

SEQ ID NO: 469340 - RNA, 32 nt, Human
ggucugccaggcucugcccugcccagugacca

SEQ ID NO: 469341 - RNA, 32 nt, Human
ggucugccaggggccaacgggcaggcaucgcc

SEQ ID NO: 469342 - RNA, 32 nt, Human
ggucugcccaggccugccucccuucccuaggc

SEQ ID NO: 469343 - RNA, 21 nt, Human
ggucugcccauagagcagcgg

SEQ ID NO: 469344 - RNA, 18 nt, Human
ggucugccccuccgcagc

SEQ ID NO: 469345 - RNA, 18 nt, Human
ggucugccccuuuucaaa

SEQ ID NO: 469346 - RNA, 32 nt, Human
ggucugcccucugcauccucuggagccagccg

SEQ ID NO: 469347 - RNA, 31 nt, Human
ggucugcccugagcugugccugugugcucca

SEQ ID NO: 469348 - RNA, 32 nt, Human
ggucugccugcaggaaguucacguucuaguau

SEQ ID NO: 469349 - RNA, 32 nt, Human
ggucugccugccucccugugcaguccagcccu

SEQ ID NO: 469350 - RNA, 32 nt, Human
ggucugcggaaggugggaggaggcagacaccc

SEQ ID NO: 469351 - RNA, 20 nt, Human
ggucugcgucuucugccauu

SEQ ID NO: 469352 - RNA, 32 nt, Human
ggucugcuagcacccucagccugggagcuacu

SEQ ID NO: 469353 - RNA, 32 nt, Human
ggucugcuccccacaucucuccuaauuccacu

SEQ ID NO: 469354 - RNA, 32 nt, Human
ggucugcucccuggacagagaggaaggaggug

SEQ ID NO: 469355 - RNA, 32 nt, Human
ggucugcugccagggauugaggagacugaaga

SEQ ID NO: 469356 - RNA, 32 nt, Human
ggucugcugccuggcccacaugucccuuuugu

SEQ ID NO: 469357 - RNA, 21 nt, Human
ggucugcugcuccacgagcug

SEQ ID NO: 469358 - RNA, 32 nt, Human
ggucugcuggcuguggaggguggguugcacgg

SEQ ID NO: 469359 - RNA, 32 nt, Human
ggucugcuggguggcagaaaugguuccuuccg

SEQ ID NO: 469360 - RNA, 32 nt, Human
ggucugcuucaaggaggucgaccuucuaaugu

SEQ ID NO: 469361 - RNA, 20 nt, Human
ggucugcuugagcaacuggu

SEQ ID NO: 469362 - RNA, 32 nt, Human
ggucuggaaaguuggcuugucucauaauaccc

SEQ ID NO: 469363 - RNA, 24 nt, Human
ggucuggaacuccugacccuguga

SEQ ID NO: 469364 - RNA, 24 nt, Human
ggucuggaacuccugaccucguga

SEQ ID NO: 469365 - RNA, 32 nt, Human
ggucuggaagcagagccggcggagggagcgcc

SEQ ID NO: 469366 - RNA, 23 nt, Human
ggucuggaagcugcagggcucuc

SEQ ID NO: 469367 - RNA, 32 nt, Human
ggucuggagagggaagcgaggcgcuguuagag

SEQ ID NO: 469368 - RNA, 32 nt, Human
ggucuggaggaaaacuggcuaucagaaccucc

SEQ ID NO: 469369 - RNA, 32 nt, Human
ggucuggaggcagaggaaugggcauagcugag

SEQ ID NO: 469370 - RNA, 32 nt, Human
ggucuggaggcugaggaccaggcagacaaaca

SEQ ID NO: 469371 - RNA, 32 nt, Human
ggucuggaggcugcaggccugagcaggugggc

SEQ ID NO: 469372 - RNA, 32 nt, Human
ggucuggaggggccauggggcaguccugggug

SEQ ID NO: 469373 - RNA, 32 nt, Human
ggucuggaggggccucaggggugcccagcccg

SEQ ID NO: 469374 - RNA, 32 nt, Human
ggucuggagguaugggcagcugugggggccgg

SEQ ID NO: 469375 - RNA, 32 nt, Human
ggucuggauacuugcuaugauuuucacuuuuu

SEQ ID NO: 469376 - RNA, 32 nt, Human
ggucuggauccaguugagcagcacagcagaua

SEQ ID NO: 469377 - RNA, 24 nt, Human
ggucuggaucuccugaccucguga

SEQ ID NO: 469378 - RNA, 24 nt, Human
ggucuggaucuccugaccuuguga

SEQ ID NO: 469379 - RNA, 32 nt, Human
ggucuggaugcugccacccucuucugacccug

SEQ ID NO: 469380 - RNA, 20 nt, Human
ggucuggauuuuuauaccua

SEQ ID NO: 469381 - RNA, 25 nt, Human
ggucuggcaaagucaggcucaggga

SEQ ID NO: 469382 - RNA, 21 nt, Human
ggucuggcagagccucugaga

SEQ ID NO: 469383 - RNA, 32 nt, Human
ggucuggcagcccucccgggaugggcccacau

SEQ ID NO: 469384 - RNA, 32 nt, Human
ggucuggccagaggaacagaccagcuuuugca

SEQ ID NO: 469385 - RNA, 32 nt, Human
ggucuggcccccucccuguccaggccccgcag

SEQ ID NO: 469386 - RNA, 32 nt, Human
ggucuggccguuggcccuggcuaaugucucuc

SEQ ID NO: 469387 - RNA, 32 nt, Human
ggucuggccucuccccagagcugucuggacag

SEQ ID NO: 469388 - RNA, 18 nt, Human
ggucuggcuccuuucaga

SEQ ID NO: 469389 - RNA, 19 nt, Human
ggucuggcuuuuuuacuua

SEQ ID NO: 469390 - RNA, 32 nt, Human
ggucugggaccuggcuccacaccaguuaccug

SEQ ID NO: 469391 - RNA, 32 nt, Human
ggucugggagaaagauggaaacuagggagaug

SEQ ID NO: 469392 - RNA, 32 nt, Human
ggucugggagagagagcagagggcggcagggc

SEQ ID NO: 469393 - RNA, 23 nt, Human
ggucugggagcuguucuggggca

SEQ ID NO: 469394 - RNA, 32 nt, Human
ggucugggaguccucaguguccacuuguccca

SEQ ID NO: 469395 - RNA, 22 nt, Human
ggucugggauccucagggcucc

SEQ ID NO: 469396 - RNA, 32 nt, Human
ggucugggauucuaagugaccugcucuguguu

SEQ ID NO: 469397 - RNA, 21 nt, Human
ggucugggauuucugcuuuca

SEQ ID NO: 469398 - RNA, 32 nt, Human
ggucugggcacauggugguggacaguggcuau

SEQ ID NO: 469399 - RNA, 32 nt, Human
ggucugggcaggacucagcuccccagaguccu

SEQ ID NO: 469400 - RNA, 32 nt, Human
ggucugggccagacugccuugcuuucuggugc

SEQ ID NO: 469401 - RNA, 24 nt, Human
ggucugggcccagcggggcucccu

SEQ ID NO: 469402 - RNA, 32 nt, Human
ggucugggcccagguuugagggagaaguuugc

SEQ ID NO: 469403 - RNA, 22 nt, Human
ggucugggcccuguggcccucu

SEQ ID NO: 469404 - RNA, 18 nt, Human
ggucugggccucggcccc

SEQ ID NO: 469405 - RNA, 32 nt, Human
ggucugggcuccugccucaccgcugguucagc

SEQ ID NO: 469406 - RNA, 20 nt, Human
ggucugggcuuuaggccccu

SEQ ID NO: 469407 - RNA, 21 nt, Human
ggucuggggaguuuccucuca

SEQ ID NO: 469408 - RNA, 20 nt, Human
ggucuggggcaggccagcag

SEQ ID NO: 469409 - RNA, 32 nt, Human
ggucuggggcaggccagcagggcagacaccag

SEQ ID NO: 469410 - RNA, 32 nt, Human
ggucuggggcagguggggcuggggaagggagc

SEQ ID NO: 469411 - RNA, 31 nt, Human
ggucugggggagauaagauggguggugaaga

SEQ ID NO: 469412 - RNA, 32 nt, Human
ggucugggggcagagguggcaugcagggcuuu

SEQ ID NO: 469413 - RNA, 32 nt, Human
ggucuggggucccaccccugccccacuuuacc

SEQ ID NO: 469414 - RNA, 32 nt, Human
ggucuggggucugggacuaggcuaucuggaca

SEQ ID NO: 469415 - RNA, 32 nt, Human
ggucuggguagcccaacuccucccucuccuug

SEQ ID NO: 469416 - RNA, 18 nt, Human
ggucuggguccaugccua

SEQ ID NO: 469417 - RNA, 32 nt, Human
ggucugggugccccuuuuccuccccugggaag

SEQ ID NO: 469418 - RNA, 19 nt, Human
ggucugggugggggcuccc

SEQ ID NO: 469419 - RNA, 24 nt, Human
ggucuggguuuccaaaacuacccu

SEQ ID NO: 469420 - RNA, 32 nt, Human
ggucugguagcagccugucacuccagacuguc

SEQ ID NO: 469421 - RNA, 32 nt, Human
ggucuggucugcagcagugugugguggcaugc

SEQ ID NO: 469422 - RNA, 18 nt, Human
ggucugguggaugaggug

SEQ ID NO: 469423 - RNA, 23 nt, Human
ggucugguucaccaauggggaca

SEQ ID NO: 469424 - RNA, 17 nt, Human
ggucugguucaggggga

SEQ ID NO: 469425 - RNA, 32 nt, Human
ggucugguugaugaucuagcacuuucaccaag

SEQ ID NO: 469426 - RNA, 32 nt, Human
ggucugguuggggcaggcaggagcaguguggu

SEQ ID NO: 469427 - RNA, 32 nt, Human
ggucugguuucuucccuucccagagggucuua

SEQ ID NO: 469428 - RNA, 24 nt, Human
ggucugguuugcagagcuugaaca

SEQ ID NO: 469429 - RNA, 32 nt, Human
ggucugguuugugucuguguucauguuuguuu

SEQ ID NO: 469430 - RNA, 32 nt, Human
ggucuguacaaaggaaugaaguucugaaaaug

SEQ ID NO: 469431 - RNA, 32 nt, Human
ggucuguacugauucaauuugauguggugaaa

SEQ ID NO: 469432 - RNA, 32 nt, Human
ggucuguauaagcuuugagagcaacgucacug

SEQ ID NO: 469433 - RNA, 32 nt, Human
ggucugucacccaggcuggagugcaguggugc

SEQ ID NO: 469434 - RNA, 18 nt, Human
ggucugucacucacguca

SEQ ID NO: 469435 - RNA, 32 nt, Human
ggucuguccuucaaggccuccuccgauagugc

SEQ ID NO: 469436 - RNA, 32 nt, Human
ggucuguccuuccugggauuccuagccgaggc

SEQ ID NO: 469437 - RNA, 32 nt, Human
ggucugucgccaggcuggagugcaguggcgcg

SEQ ID NO: 469438 - RNA, 32 nt, Human
ggucugucgcccaggcuggagugcaguagcac

SEQ ID NO: 469439 - RNA, 32 nt, Human
ggucugucuccucugaacuugcaccugggccu

SEQ ID NO: 469440 - RNA, 18 nt, Human
ggucugucucuugcuuca

SEQ ID NO: 469441 - RNA, 32 nt, Human
ggucugucugcaggaacucucccgucugugag

SEQ ID NO: 469442 - RNA, 32 nt, Human
ggucugucuggauguggagaagcucuguguga

SEQ ID NO: 469443 - RNA, 18 nt, Human
ggucugucuguacaguua

SEQ ID NO: 469444 - RNA, 20 nt, Human
ggucugucuuccuuaucauc

SEQ ID NO: 469445 - RNA, 25 nt, Human
ggucugugaauagaguuuacaucca

SEQ ID NO: 469446 - RNA, 21 nt, Human
ggucugugagaacagcucccu

SEQ ID NO: 469447 - RNA, 30 nt, Human
ggucugugccucuccagaaucuugucuuac

SEQ ID NO: 469448 - RNA, 19 nt, Human
ggucugugcuccuuuuaaa

SEQ ID NO: 469449 - RNA, 32 nt, Human
ggucugugcugaggccuuaucauucauucuua

SEQ ID NO: 469450 - RNA, 32 nt, Human
ggucuguggcagcaagcacauuauuuccauuc

SEQ ID NO: 469451 - RNA, 32 nt, Human
ggucugugggcaggggacagggcguggguggg

SEQ ID NO: 469452 - RNA, 31 nt, Human
ggucuguggguggugauggaggagggacuca

SEQ ID NO: 469453 - RNA, 29 nt, Human
ggucugugucugugugugccuguaagugu

SEQ ID NO: 469454 - RNA, 32 nt, Human
ggucugugugggcugaaggcuuggugaccagg

SEQ ID NO: 469455 - RNA, 32 nt, Human
ggucuguuacccaggcuggagugcaguggcau

SEQ ID NO: 469456 - RNA, 32 nt, Human
ggucuguucagauuuuucuacuucuucauuau

SEQ ID NO: 469457 - RNA, 32 nt, Human
ggucuguucccccagccccuugggcucaccug

SEQ ID NO: 469458 - RNA, 21 nt, Human
ggucuguuccuuuuacuacca

SEQ ID NO: 469459 - RNA, 32 nt, Human
ggucuguucucccacuugauugaccucaccag

SEQ ID NO: 469460 - RNA, 32 nt, Human
ggucuguugcccaggcuggaaugcaguggugu

SEQ ID NO: 469461 - RNA, 32 nt, Human
ggucuguugcccaggcuggagugcaguggugu

SEQ ID NO: 469462 - RNA, 32 nt, Human
ggucuguugcccagguuggagugcaguggcgg

SEQ ID NO: 469463 - RNA, 32 nt, Human
ggucuguugccuaggcgggagugcaguggcau

SEQ ID NO: 469464 - RNA, 32 nt, Human
ggucuguuucagaaaccaacagugauggcauu

SEQ ID NO: 469465 - RNA, 32 nt, Human
ggucuguuucagacugugucucuggucauaag

SEQ ID NO: 469466 - RNA, 17 nt, Human
ggucuguuuccccauca

SEQ ID NO: 469467 - RNA, 27 nt, Human
ggucuguuucuggagaaguucugguca

SEQ ID NO: 469468 - RNA, 32 nt, Human
ggucuguuugucuuuucuaccucuuucucuug

SEQ ID NO: 469469 - RNA, 18 nt, Human
ggucuguuuuuagaauua

SEQ ID NO: 469470 - RNA, 18 nt, Human
ggucuguuuuuauguuca

SEQ ID NO: 469471 - RNA, 32 nt, Human
ggucuuaagacauggaaaucuccauccaauga

SEQ ID NO: 469472 - RNA, 32 nt, Human
ggucuuaagaugacuuuaguaauuuaacuguu

SEQ ID NO: 469473 - RNA, 32 nt, Human
ggucuuaccauuugccccagcuggucucaaac

SEQ ID NO: 469474 - RNA, 17 nt, Human
ggucuuacuugggucca

SEQ ID NO: 469475 - RNA, 32 nt, Human
ggucuuagagagaaggggagacuagagacgga

SEQ ID NO: 469476 - RNA, 32 nt, Human
ggucuuagcuguucuugcauaggcucuuaagc

SEQ ID NO: 469477 - RNA, 32 nt, Human
ggucuuagcuguucuugcaugggcucuuaagc

SEQ ID NO: 469478 - RNA, 32 nt, Human
ggucuuagggcagaggguugaguuuggauucc

SEQ ID NO: 469479 - RNA, 32 nt, Human
ggucuuaugagcugcuauugaacacggcagag

SEQ ID NO: 469480 - RNA, 32 nt, Human
ggucuucacagaaauauauuucagaaagacgu

SEQ ID NO: 469481 - RNA, 32 nt, Human
ggucuucacagaaauauauuucagaaagaggu

SEQ ID NO: 469482 - RNA, 32 nt, Human
ggucuucacagaaauauauuucagaaaggggu

SEQ ID NO: 469483 - RNA, 32 nt, Human
ggucuucacgcaggcugguugguaacgugcug

SEQ ID NO: 469484 - RNA, 28 nt, Human
ggucuucagaguugucuuuauaugugaa

SEQ ID NO: 469485 - RNA, 24 nt, Human
ggucuucaggagcugguccaagga

SEQ ID NO: 469486 - RNA, 18 nt, Human
ggucuucauccugcugcc

SEQ ID NO: 469487 - RNA, 32 nt, Human
ggucuucaugauaaaucuugcugcugcucacu

SEQ ID NO: 469488 - RNA, 32 nt, Human
ggucuucaugcaauuuuccaccucgcaguagu

SEQ ID NO: 469489 - RNA, 32 nt, Human
ggucuucaugcugcugugggugauauuacugg

SEQ ID NO: 469490 - RNA, 32 nt, Human
ggucuuccaaagugcugggauuacagguguga

SEQ ID NO: 469491 - RNA, 32 nt, Human
ggucuuccauuuuaaagacagaggccaagauc

SEQ ID NO: 469492 - RNA, 19 nt, Human
ggucuucccugcugagcca

SEQ ID NO: 469493 - RNA, 32 nt, Human
ggucuuccuccaccccucugggaaucaccauu

SEQ ID NO: 469494 - RNA, 32 nt, Human
ggucuuccuccaggaugccugcaugggacccc

SEQ ID NO: 469495 - RNA, 18 nt, Human
ggucuuccugcugcugcc

SEQ ID NO: 469496 - RNA, 18 nt, Human
ggucuuccuucagugccu

SEQ ID NO: 469497 - RNA, 32 nt, Human
ggucuucgggugcuucccagcacaagcugccc

SEQ ID NO: 469498 - RNA, 32 nt, Human
ggucuucuacacuaagacaccaugaaggagua

SEQ ID NO: 469499 - RNA, 32 nt, Human
ggucuucuacagacuuccccaguaaucccuca

SEQ ID NO: 469500 - RNA, 32 nt, Human
ggucuucuaccgacuucaugguauuuaggaaa

SEQ ID NO: 469501 - RNA, 21 nt, Human
ggucuucuauagcuuuuuuca

SEQ ID NO: 469502 - RNA, 32 nt, Human
ggucuucucccaggcuggaucugggcgaagug

SEQ ID NO: 469503 - RNA, 32 nt, Human
ggucuucucucugcaaccacuuccccuaugcc

SEQ ID NO: 469504 - RNA, 32 nt, Human
ggucuucugaguagcugggacuacaggcaugc

SEQ ID NO: 469505 - RNA, 24 nt, Human
ggucuucugccagggucccuaaga

SEQ ID NO: 469506 - RNA, 18 nt, Human
ggucuucuggcuuucaaa

SEQ ID NO: 469507 - RNA, 32 nt, Human
ggucuucuucagccuguuuccccagccacagg

SEQ ID NO: 469508 - RNA, 32 nt, Human
ggucuucuuuaccuuccagcugcucacagaac

SEQ ID NO: 469509 - RNA, 32 nt, Human
ggucuucuuuccagagacauuuucggagccga

SEQ ID NO: 469510 - RNA, 24 nt, Human
ggucuugaaccccugaccucauga

SEQ ID NO: 469511 - RNA, 24 nt, Human
ggucuugaacgccugaccuuguga

SEQ ID NO: 469512 - RNA, 24 nt, Human
ggucuugaacucccgaccuuguga

SEQ ID NO: 469513 - RNA, 24 nt, Human
ggucuugaacuccugaccucauga

SEQ ID NO: 469514 - RNA, 24 nt, Human
ggucuugaacuccugaccuccuga

SEQ ID NO: 469515 - RNA, 24 nt, Human
ggucuugaacuccugaccucguga

SEQ ID NO: 469516 - RNA, 24 nt, Human
ggucuugaacuccugaccugguga

SEQ ID NO: 469517 - RNA, 24 nt, Human
ggucuugaacuccugaccuuguga

SEQ ID NO: 469518 - RNA, 24 nt, Human
ggucuugaacuccugaccuugugg

SEQ ID NO: 469519 - RNA, 32 nt, Human
ggucuugaacuccugaccuugugguccacccg

SEQ ID NO: 469520 - RNA, 32 nt, Human
ggucuugaacuccuggcuucgggugauccgcu

SEQ ID NO: 469521 - RNA, 24 nt, Human
ggucuugaacucuugaccucauga

SEQ ID NO: 469522 - RNA, 24 nt, Human
ggucuugaacucuugaccucguga

SEQ ID NO: 469523 - RNA, 21 nt, Human
ggucuugaacugaccucauga

SEQ ID NO: 469524 - RNA, 32 nt, Human
ggucuugaagacagguccaccuucaaaaucua

SEQ ID NO: 469525 - RNA, 32 nt, Human
ggucuugacuccugaccucaugaccugcccac

SEQ ID NO: 469526 - RNA, 32 nt, Human
ggucuugagaugggcaacagagcuguaagauc

SEQ ID NO: 469527 - RNA, 24 nt, Human
ggucuugauauccugaccucguga

SEQ ID NO: 469528 - RNA, 24 nt, Human
ggucuugaucucccgaccucguga

SEQ ID NO: 469529 - RNA, 24 nt, Human
ggucuugaucuccuaaccucuuga

SEQ ID NO: 469530 - RNA, 24 nt, Human
ggucuugaucuccugaccucauga

SEQ ID NO: 469531 - RNA, 24 nt, Human
ggucuugaucuccugaccucguga

SEQ ID NO: 469532 - RNA, 24 nt, Human
ggucuugaucuccugaccuuguga

SEQ ID NO: 469533 - RNA, 24 nt, Human
ggucuugaucuccugagcucguga

SEQ ID NO: 469534 - RNA, 24 nt, Human
ggucuugaucucuugaccucauga

SEQ ID NO: 469535 - RNA, 24 nt, Human
ggucuugaucucuugaccucguga

SEQ ID NO: 469536 - RNA, 32 nt, Human
ggucuugcagugagcagagaucgcgccaccgc

SEQ ID NO: 469537 - RNA, 23 nt, Human
ggucuugccaacuccaucuucaa

SEQ ID NO: 469538 - RNA, 32 nt, Human
ggucuugccuccaggaugaaaaugagaaggag

SEQ ID NO: 469539 - RNA, 32 nt, Human
ggucuugcuguguuacccaggcuggucucaca

SEQ ID NO: 469540 - RNA, 25 nt, Human
ggucuuggaacuccugaccucguga

SEQ ID NO: 469541 - RNA, 32 nt, Human
ggucuuggaagacagaggggagcugcuuuaga

SEQ ID NO: 469542 - RNA, 32 nt, Human
ggucuuggaccaguagaggacacggaggguuc

SEQ ID NO: 469543 - RNA, 24 nt, Human
ggucuuggacuccugaccucguga

SEQ ID NO: 469544 - RNA, 24 nt, Human
ggucuuggacuccugacgucguga

SEQ ID NO: 469545 - RNA, 32 nt, Human
ggucuuggagcugggagagggacagcagcagc

SEQ ID NO: 469546 - RNA, 32 nt, Human
ggucuuggcuagacugccuagauucccacagc

SEQ ID NO: 469547 - RNA, 32 nt, Human
ggucuuggcuggguugaagguuccaagcugcu

SEQ ID NO: 469548 - RNA, 18 nt, Human
ggucuuggggcagcgggg

SEQ ID NO: 469549 - RNA, 32 nt, Human
ggucuugggggcacuauagccacuaaacgagg

SEQ ID NO: 469550 - RNA, 32 nt, Human
ggucuuggguuagagccaaaauggauuugagg

SEQ ID NO: 469551 - RNA, 24 nt, Human
ggucuuguacuccugaccuuguga

SEQ ID NO: 469552 - RNA, 32 nt, Human
ggucuugucuccaggaugaaaaugggaaggag

SEQ ID NO: 469553 - RNA, 32 nt, Human
ggucuugucuucccagccgcagucuaggaaug

SEQ ID NO: 469554 - RNA, 32 nt, Human
ggucuugugguuguguguguucuguccccauc

SEQ ID NO: 469555 - RNA, 32 nt, Human
ggucuugugucacccaggcuggagugcaaugg

SEQ ID NO: 469556 - RNA, 32 nt, Human
ggucuugugucacccaggcuggcgugcagggc

SEQ ID NO: 469557 - RNA, 32 nt, Human
ggucuuguguugcuucuggucucuccaggcuu

SEQ ID NO: 469558 - RNA, 22 nt, Human
ggucuuguuucuuugcuuucua

SEQ ID NO: 469559 - RNA, 32 nt, Human
ggucuuuacuuuuuauggauguuuucaaggaa

SEQ ID NO: 469560 - RNA, 32 nt, Human
ggucuuuagagcucagcuuucugaggcccuga

SEQ ID NO: 469561 - RNA, 32 nt, Human
ggucuuuaguaaaguaaaacaauuucccaauc

SEQ ID NO: 469562 - RNA, 32 nt, Human
ggucuuuaucgucuaugaugggagaaaaggag

SEQ ID NO: 469563 - RNA, 24 nt, Human
ggucuuuaucuccugaccucauga

SEQ ID NO: 469564 - RNA, 24 nt, Human
ggucuuuaucuccugcccuuguga

SEQ ID NO: 469565 - RNA, 32 nt, Human
ggucuuucacccaggcuggagugcagugcugu

SEQ ID NO: 469566 - RNA, 32 nt, Human
ggucuuucacccaggcuggagugcuguggcac

SEQ ID NO: 469567 - RNA, 32 nt, Human
ggucuuucauuucuauuuuuccccuccuuucc

SEQ ID NO: 469568 - RNA, 32 nt, Human
ggucuuucauuucuuguucgcuuacuuucgug

SEQ ID NO: 469569 - RNA, 32 nt, Human
ggucuuuccuggggcaagaggcugcugagaag

SEQ ID NO: 469570 - RNA, 32 nt, Human
ggucuuucucugacccugucccccucucacgu

SEQ ID NO: 469571 - RNA, 32 nt, Human
ggucuuugaaauucucuacucucugaacacag

SEQ ID NO: 469572 - RNA, 32 nt, Human
ggucuuugcagauguccugggugcagggccuu

SEQ ID NO: 469573 - RNA, 32 nt, Human
ggucuuuggaagcugcucuacaaugccuguuc

SEQ ID NO: 469574 - RNA, 32 nt, Human
ggucuuuggggagggggugccgaggcuacgca

SEQ ID NO: 469575 - RNA, 32 nt, Human
ggucuuuguccuggcagugccucugccaguca

SEQ ID NO: 469576 - RNA, 32 nt, Human
ggucuuuguggacugaagguagacaccagcca

SEQ ID NO: 469577 - RNA, 32 nt, Human
ggucuuuucccaaggcucuuccagaccugcag

SEQ ID NO: 469578 - RNA, 32 nt, Human
ggucuuuucuuugacagucuguacaccuuuau

SEQ ID NO: 469579 - RNA, 32 nt, Human
ggucuuuugcaaauauuuuccucccaggcugu

SEQ ID NO: 469580 - RNA, 32 nt, Human
ggucuuuugugauuuccucugaugcaggagag

SEQ ID NO: 469581 - RNA, 32 nt, Human
ggucuuuuuccucugcggucauguuggcuuuc

SEQ ID NO: 469582 - RNA, 32 nt, Human
ggucuuuuucugcuugaaaucugaucacaccc

SEQ ID NO: 469583 - RNA, 21 nt, Human
ggugaaaacccaucucuacua

SEQ ID NO: 469584 - RNA, 32 nt, Human
ggugaaaacuccaggcucuaaguggacaacca

SEQ ID NO: 469585 - RNA, 32 nt, Human
ggugaaaagcucagcuagguccuggcucuggu

SEQ ID NO: 469586 - RNA, 32 nt, Human
ggugaaaauggcugagaacuugcuggacggac

SEQ ID NO: 469587 - RNA, 21 nt, Human
ggugaaacaccgucucuacua

SEQ ID NO: 469588 - RNA, 32 nt, Human
ggugaaacagggcuugucccuccaacugcagg

SEQ ID NO: 469589 - RNA, 32 nt, Human
ggugaaacauggugaaaccccgucucuacuaa

SEQ ID NO: 469590 - RNA, 32 nt, Human
ggugaaacauuucaacaucacaucacucacca

SEQ ID NO: 469591 - RNA, 32 nt, Human
ggugaaaccaacacccccagcucagacucugc

SEQ ID NO: 469592 - RNA, 32 nt, Human
ggugaaaccaggaggcagagaguuucaaaauc

SEQ ID NO: 469593 - RNA, 21 nt, Human
ggugaaacccaaucucuacua

SEQ ID NO: 469594 - RNA, 21 nt, Human
ggugaaacccagccucuacua

SEQ ID NO: 469595 - RNA, 32 nt, Human
ggugaaacccaggaggagaguguggaguccag

SEQ ID NO: 469596 - RNA, 21 nt, Human
ggugaaacccagucucuacua

SEQ ID NO: 469597 - RNA, 19 nt, Human
ggugaaaccccaccucuac

SEQ ID NO: 469598 - RNA, 21 nt, Human
ggugaaaccccaccucuacua

SEQ ID NO: 469599 - RNA, 21 nt, Human
ggugaaaccccaucuccacua

SEQ ID NO: 469600 - RNA, 19 nt, Human
ggugaaaccccaucucuac

SEQ ID NO: 469601 - RNA, 20 nt, Human
ggugaaaccccaucucuacu

SEQ ID NO: 469602 - RNA, 21 nt, Human
ggugaaaccccaucucuacua

SEQ ID NO: 469603 - RNA, 21 nt, Human
ggugaaaccccaucucuacug

SEQ ID NO: 469604 - RNA, 21 nt, Human
ggugaaaccccaucucuauua

SEQ ID NO: 469605 - RNA, 20 nt, Human
ggugaaaccccaucucucua

SEQ ID NO: 469606 - RNA, 21 nt, Human
ggugaaaccccaucucugcua

SEQ ID NO: 469607 - RNA, 21 nt, Human
ggugaaaccccaucucuucua

SEQ ID NO: 469608 - RNA, 21 nt, Human
ggugaaaccccaucuguacua

SEQ ID NO: 469609 - RNA, 21 nt, Human
ggugaaaccccaucuucacua

SEQ ID NO: 469610 - RNA, 21 nt, Human
ggugaaaccccaugucuacua

SEQ ID NO: 469611 - RNA, 21 nt, Human
ggugaaaccccauuuccacua

SEQ ID NO: 469612 - RNA, 21 nt, Human
ggugaaaccccauuucuacua

SEQ ID NO: 469613 - RNA, 22 nt, Human
ggugaaacccccaucucuacua

SEQ ID NO: 469614 - RNA, 21 nt, Human
ggugaaacccccucucuacua

SEQ ID NO: 469615 - RNA, 21 nt, Human
ggugaaaccccgacucuacua

SEQ ID NO: 469616 - RNA, 21 nt, Human
ggugaaaccccgccucuacua

SEQ ID NO: 469617 - RNA, 21 nt, Human
ggugaaaccccggcucuacua

SEQ ID NO: 469618 - RNA, 21 nt, Human
ggugaaaccccgucccuacua

SEQ ID NO: 469619 - RNA, 21 nt, Human
ggugaaaccccgucuccacua

SEQ ID NO: 469620 - RNA, 19 nt, Human
ggugaaaccccgucucuac

SEQ ID NO: 469621 - RNA, 21 nt, Human
ggugaaaccccgucucuacua

SEQ ID NO: 469622 - RNA, 21 nt, Human
ggugaaaccccuucucuacua

SEQ ID NO: 469623 - RNA, 21 nt, Human
ggugaaacccgaucccuacua

SEQ ID NO: 469624 - RNA, 21 nt, Human
ggugaaacccggucucuacua

SEQ ID NO: 469625 - RNA, 20 nt, Human
ggugaaacccgucucuacua

SEQ ID NO: 469626 - RNA, 21 nt, Human
ggugaaacccuaucucuacua

SEQ ID NO: 469627 - RNA, 32 nt, Human
ggugaaacccugaaauacaaaaauuagucagg

SEQ ID NO: 469628 - RNA, 21 nt, Human
ggugaaacccuguaucuacua

SEQ ID NO: 469629 - RNA, 19 nt, Human
ggugaaacccugucuccac

SEQ ID NO: 469630 - RNA, 21 nt, Human
ggugaaacccugucucuacua

SEQ ID NO: 469631 - RNA, 21 nt, Human
ggugaaacccuguuuccacua

SEQ ID NO: 469632 - RNA, 21 nt, Human
ggugaaaccucaucucuacua

SEQ ID NO: 469633 - RNA, 21 nt, Human
ggugaaaccucgucucuacua

SEQ ID NO: 469634 - RNA, 20 nt, Human
ggugaaaccugucucuacua

SEQ ID NO: 469635 - RNA, 21 nt, Human
ggugaaacgcugucucuacua

SEQ ID NO: 469636 - RNA, 21 nt, Human
ggugaaacuccaucucuacua

SEQ ID NO: 469637 - RNA, 21 nt, Human
ggugaaacuccgucucuacua

SEQ ID NO: 469638 - RNA, 32 nt, Human
ggugaaacugcaggagcucagcauagacccag

SEQ ID NO: 469639 - RNA, 26 nt, Human
ggugaaagaaagggacccaccugcua

SEQ ID NO: 469640 - RNA, 32 nt, Human
ggugaaagauccagagagugggggugaggggu

SEQ ID NO: 469641 - RNA, 31 nt, Human
ggugaaagcugacucuagcacuuguacuuuu

SEQ ID NO: 469642 - RNA, 32 nt, Human
ggugaaaggaagaaggaaguggcugaguuauu

SEQ ID NO: 469643 - RNA, 32 nt, Human
ggugaaaggaagcaccaccagcauggccccug

SEQ ID NO: 469644 - RNA, 32 nt, Human
ggugaaaggagggagaggaucagcaaaaagca

SEQ ID NO: 469645 - RNA, 31 nt, Human
ggugaaaggcacuucugacaugcugguggca

SEQ ID NO: 469646 - RNA, 32 nt, Human
ggugaaaggcuucucaugcaguuagccuugcu

SEQ ID NO: 469647 - RNA, 32 nt, Human
ggugaaagggaugaacugccuuuugcuggaag

SEQ ID NO: 469648 - RNA, 32 nt, Human
ggugaaagggugauggauuucacugugaauau

SEQ ID NO: 469649 - RNA, 32 nt, Human
ggugaaagucuccaaggaaagaggugucucgg

SEQ ID NO: 469650 - RNA, 32 nt, Human
ggugaaaguuauaaccuccugccugggagaaa

SEQ ID NO: 469651 - RNA, 32 nt, Human
ggugaaaugccagagaccuagacgggguggaa

SEQ ID NO: 469652 - RNA, 32 nt, Human
ggugaacaaagaucauuacaaacaaaaacugu

SEQ ID NO: 469653 - RNA, 32 nt, Human
ggugaacaccugcagcugaggcuuggaaacgu

SEQ ID NO: 469654 - RNA, 32 nt, Human
ggugaacaccugcugcucaugguacccaguga

SEQ ID NO: 469655 - RNA, 32 nt, Human
ggugaacaccuguaaucccagcuacuuggaag

SEQ ID NO: 469656 - RNA, 32 nt, Human
ggugaacagaaaccacaaguguccagcccucg

SEQ ID NO: 469657 - RNA, 32 nt, Human
ggugaacagugaacauauuuacauuugauuua

SEQ ID NO: 469658 - RNA, 32 nt, Human
ggugaacccacugccagcugugcccagaagac

SEQ ID NO: 469659 - RNA, 32 nt, Human
ggugaacccgggaggaagagcuugcagugagc

SEQ ID NO: 469660 - RNA, 32 nt, Human
ggugaaccuaaggaugaaagcaaaggagggcc

SEQ ID NO: 469661 - RNA, 32 nt, Human
ggugaaccugagcucucccaggagacaacuua

SEQ ID NO: 469662 - RNA, 32 nt, Human
ggugaaccugggaggcggagcuugcagugagc

SEQ ID NO: 469663 - RNA, 32 nt, Human
ggugaaccugggagguggagcuugcagugagc

SEQ ID NO: 469664 - RNA, 32 nt, Human
ggugaacgggcagaggaaguauggcgggccac

SEQ ID NO: 469665 - RNA, 32 nt, Human
ggugaagaacaagcacaagauuaaggaguaag

SEQ ID NO: 469666 - RNA, 32 nt, Human
ggugaagaacuccaaagggaccuaacgcagca

SEQ ID NO: 469667 - RNA, 32 nt, Human
ggugaagaagaggaguuugaugaagaagauga

SEQ ID NO: 469668 - RNA, 32 nt, Human
ggugaagaauuuugcaggugggagauuuggau

SEQ ID NO: 469669 - RNA, 32 nt, Human
ggugaagacagggccagcaggagacaccaugg

SEQ ID NO: 469670 - RNA, 32 nt, Human
ggugaagaccacgccacaccacccuccagcuc

SEQ ID NO: 469671 - RNA, 32 nt, Human
ggugaagacccccauccccauguccuuccagc

SEQ ID NO: 469672 - RNA, 32 nt, Human
ggugaagagcacuacagugacugugaauauau

SEQ ID NO: 469673 - RNA, 32 nt, Human
ggugaagaggaggguucuagaggcagagagcc

SEQ ID NO: 469674 - RNA, 32 nt, Human
ggugaagaggcuagguuguuuaaggagguggg

SEQ ID NO: 469675 - RNA, 16 nt, Human
ggugaagaggcuccag

SEQ ID NO: 469676 - RNA, 32 nt, Human
ggugaagcaguccaggcccggcuggucaccag

SEQ ID NO: 469677 - RNA, 32 nt, Human
ggugaagcagucccucaccccuagucagccca

SEQ ID NO: 469678 - RNA, 32 nt, Human
ggugaagccacuguggaaacagccuggcaguc

SEQ ID NO: 469679 - RNA, 32 nt, Human
ggugaagccagccacgguuuuccccagggcca

SEQ ID NO: 469680 - RNA, 32 nt, Human
ggugaagccagggagggagacaggagggcagg

SEQ ID NO: 469681 - RNA, 32 nt, Human
ggugaagccagggcaccccucuccccacuuaa

SEQ ID NO: 469682 - RNA, 32 nt, Human
ggugaagccauagaaaaguuacccgagggaaa

SEQ ID NO: 469683 - RNA, 32 nt, Human
ggugaagccugccuggccuguggugcuuucca

SEQ ID NO: 469684 - RNA, 32 nt, Human
ggugaagcuagaggaaccagaccucaucagcc

SEQ ID NO: 469685 - RNA, 32 nt, Human
ggugaagcucucuauuguccugaccccacggu

SEQ ID NO: 469686 - RNA, 32 nt, Human
ggugaagcucuuccuucaagaguuucuagauc

SEQ ID NO: 469687 - RNA, 32 nt, Human
ggugaagcugggcucccaguagugcaggaggu

SEQ ID NO: 469688 - RNA, 32 nt, Human
ggugaaggaccugccgagucagcuggcugaga

SEQ ID NO: 469689 - RNA, 32 nt, Human
ggugaaggagaaagaggcuggcuaggaccagg

SEQ ID NO: 469690 - RNA, 32 nt, Human
ggugaaggagagaaguagcaggaccagagggg

SEQ ID NO: 469691 - RNA, 32 nt, Human
ggugaaggauacucccuucuuucauacagaag

SEQ ID NO: 469692 - RNA, 32 nt, Human
ggugaaggcccagagaccagcagaacggcauc

SEQ ID NO: 469693 - RNA, 32 nt, Human
ggugaagggaacaaagcuggaggcucuggagc

SEQ ID NO: 469694 - RNA, 32 nt, Human
ggugaagggacagagagaggagaggaggaaga

SEQ ID NO: 469695 - RNA, 32 nt, Human
ggugaagggacugaucaagaucauucagcaau

SEQ ID NO: 469696 - RNA, 32 nt, Human
ggugaaggggaugggguaagaggcagaaaccc

SEQ ID NO: 469697 - RNA, 32 nt, Human
ggugaaggggcagaacaggcagguucccucga

SEQ ID NO: 469698 - RNA, 32 nt, Human
ggugaagguacuuuguucuggaagauguuguc

SEQ ID NO: 469699 - RNA, 32 nt, Human
ggugaaggucuuuccugauucuuccaagcuuu

SEQ ID NO: 469700 - RNA, 32 nt, Human
ggugaaggugucugcagcacacacagugagaa

SEQ ID NO: 469701 - RNA, 32 nt, Human
ggugaaguaaaggggcaaggagaagacggccu

SEQ ID NO: 469702 - RNA, 32 nt, Human
ggugaagucuagauggggaggagaagugaggc

SEQ ID NO: 469703 - RNA, 32 nt, Human
ggugaagugcccagcgcuggagugcagcgugc

SEQ ID NO: 469704 - RNA, 32 nt, Human
ggugaaguggggcugaaaaugcugacccucua

SEQ ID NO: 469705 - RNA, 32 nt, Human
ggugaaguucacuguauugcuauauuuuugua

SEQ ID NO: 469706 - RNA, 32 nt, Human
ggugaauaaccuuugagaccccuuaacagaaa

SEQ ID NO: 469707 - RNA, 32 nt, Human
ggugaaucaucccggcagacaccaagagccgc

SEQ ID NO: 469708 - RNA, 32 nt, Human
ggugaauccauuucacgaggaggagcucaguc

SEQ ID NO: 469709 - RNA, 32 nt, Human
ggugaaucccuuaaggucaggaguucaagacc

SEQ ID NO: 469710 - RNA, 32 nt, Human
ggugaaugcugcagcugccgggagacucacgc

SEQ ID NO: 469711 - RNA, 32 nt, Human
ggugaaugcuggccugugaugaauggcuggcc

SEQ ID NO: 469712 - RNA, 32 nt, Human
ggugaauggaagacacuuaccuaacaaguacu

SEQ ID NO: 469713 - RNA, 32 nt, Human
ggugaaugggcaaaagcuggaagcauuccccu

SEQ ID NO: 469714 - RNA, 32 nt, Human
ggugaaugggcagagggauuuggggauuacuu

SEQ ID NO: 469715 - RNA, 32 nt, Human
ggugaaugugcugccagugaaagcucagagcu

SEQ ID NO: 469716 - RNA, 30 nt, Human
ggugaauguggagaauuucuuuagccaaag

SEQ ID NO: 469717 - RNA, 32 nt, Human
ggugaaugugucuugcggcagcugcagcaagu

SEQ ID NO: 469718 - RNA, 32 nt, Human
ggugaauguuuaaugcucaugaaaauuggggg

SEQ ID NO: 469719 - RNA, 32 nt, Human
ggugaauuaaugcacauccuuaucucauugcu

SEQ ID NO: 469720 - RNA, 32 nt, Human
ggugaauucccugccccucccccaccacugag

SEQ ID NO: 469721 - RNA, 32 nt, Human
ggugaauugaguagaggguucauuccaauucc

SEQ ID NO: 469722 - RNA, 32 nt, Human
ggugaauuucuccccaggauaugguuuaugcu

SEQ ID NO: 469723 - RNA, 32 nt, Human
gguguguuugcguagccuuagggaaggaaggc

SEQ ID NO: 469724 - RNA, 32 nt, Human
gguguuacagaacauggagggaaccaggaaaa

SEQ ID NO: 469725 - RNA, 32 nt, Human
gguguuaccagggaacugggcgggauguuuga

SEQ ID NO: 469726 - RNA, 32 nt, Human
gguguuaccaucccagcucccgggagcccuua

SEQ ID NO: 469727 - RNA, 32 nt, Human
gguguuacgggaaguccaaccccagcauuaug

SEQ ID NO: 469728 - RNA, 32 nt, Human
gguguuacugauuuuuaaaccucuuugaccau

SEQ ID NO: 469729 - RNA, 32 nt, Human
gguguuaggaagaggaagagggugguagagga

SEQ ID NO: 469730 - RNA, 32 nt, Human
gguguuaguucugcagaggagucuuccugcuu

SEQ ID NO: 469731 - RNA, 26 nt, Human
gguguuaucaucgaggaacuuucuca

SEQ ID NO: 469732 - RNA, 32 nt, Human
gguguuaugaggaagaauaaaggggauaaaag

SEQ ID NO: 469733 - RNA, 24 nt, Human
gguguuauguaaacaccuggcaca

SEQ ID NO: 469734 - RNA, 31 nt, Human
gguguucacagcugccauauaaaguucuacu

SEQ ID NO: 469735 - RNA, 32 nt, Human
gguguucaccuuucacucaugagcaaugugcc

SEQ ID NO: 469736 - RNA, 19 nt, Human
gguguucacguccacaccu

SEQ ID NO: 469737 - RNA, 32 nt, Human
gguguucagggcccuggacacagacacagagc

SEQ ID NO: 469738 - RNA, 18 nt, Human
gguguucccaccacccua

SEQ ID NO: 469739 - RNA, 32 nt, Human
gguguucccgggaggagagggcggagggcgga

SEQ ID NO: 469740 - RNA, 32 nt, Human
gguguuccucgcgucccuguccuugaaggacc

SEQ ID NO: 469741 - RNA, 32 nt, Human
gguguuccugcagggacccuccgucuccugua

SEQ ID NO: 469742 - RNA, 32 nt, Human
gguguucgagguggagguuaggcgggugaagu

SEQ ID NO: 469743 - RNA, 32 nt, Human
gguguucgccugagcugggcucagggaggucc

SEQ ID NO: 469744 - RNA, 23 nt, Human
gguguucuaaggaauagcugcau

SEQ ID NO: 469745 - RNA, 32 nt, Human
gguguucuaauccaauugcaugauguaguaag

SEQ ID NO: 469746 - RNA, 21 nt, Human
gguguucucagcaugaagcuc

SEQ ID NO: 469747 - RNA, 32 nt, Human
gguguucucagugaccuaccucccaggcuccu

SEQ ID NO: 469748 - RNA, 32 nt, Human
gguguucucagugguugcugaaggcagguaga

SEQ ID NO: 469749 - RNA, 23 nt, Human
gguguucuccuggaagcuccuua

SEQ ID NO: 469750 - RNA, 32 nt, Human
gguguucugccuucccauucucuuagcccguc

SEQ ID NO: 469751 - RNA, 32 nt, Human
gguguucuguguuuguuggaggggcagauagu

SEQ ID NO: 469752 - RNA, 31 nt, Human
gguguugaacaaugcaacuuuuuauuuaaaa

SEQ ID NO: 469753 - RNA, 32 nt, Human
gguguugaagauaaauaagcuuaaacaaauaa

SEQ ID NO: 469754 - RNA, 32 nt, Human
gguguugacagaaaguauguucaaacaucuuc

SEQ ID NO: 469755 - RNA, 32 nt, Human
gguguugagagcaaguggccucuagucagagu

SEQ ID NO: 469756 - RNA, 32 nt, Human
gguguugaggaucuugagaaaauaaaucaagg

SEQ ID NO: 469757 - RNA, 32 nt, Human
gguguugcagugaaccaagaucacaccacugc

SEQ ID NO: 469758 - RNA, 32 nt, Human
gguguugccagguguggcuggggaagggucug

SEQ ID NO: 469759 - RNA, 32 nt, Human
gguguugccauuuuggaaauaaaaguccccua

SEQ ID NO: 469760 - RNA, 32 nt, Human
gguguugccugccuccccugugcuugugccuu

SEQ ID NO: 469761 - RNA, 32 nt, Human
gguguugcgcggggcugggauuagggccgggg

SEQ ID NO: 469762 - RNA, 32 nt, Human
gguguuggaaaaagacaaaaagaaccuggucc

SEQ ID NO: 469763 - RNA, 20 nt, Human
gguguuggaagggcagcggg

SEQ ID NO: 469764 - RNA, 32 nt, Human
gguguuggacaagcuucugagacgucaugagg

SEQ ID NO: 469765 - RNA, 18 nt, Human
gguguuggagcgccggag

SEQ ID NO: 469766 - RNA, 23 nt, Human
gguguuggcaaagucuucuuuga

SEQ ID NO: 469767 - RNA, 18 nt, Human
gguguuggcagccggggg

SEQ ID NO: 469768 - RNA, 19 nt, Human
gguguuggcagccugggag

SEQ ID NO: 469769 - RNA, 32 nt, Human
gguguuggccacucuugaugugaggcgugucg

SEQ ID NO: 469770 - RNA, 32 nt, Human
gguguuggccaggaagguaaagaaaugguguc

SEQ ID NO: 469771 - RNA, 21 nt, Human
gguguuggcgggggcggaggg

SEQ ID NO: 469772 - RNA, 18 nt, Human
gguguuggcgugugggag

SEQ ID NO: 469773 - RNA, 32 nt, Human
gguguuggcucuagacuggucucaucuccauu

SEQ ID NO: 469774 - RNA, 32 nt, Human
gguguuggcucugagaggaggagguggucuua

SEQ ID NO: 469775 - RNA, 20 nt, Human
gguguugggaaagcgcggag

SEQ ID NO: 469776 - RNA, 32 nt, Human
gguguugggaaggaaaggggagagggagauuc

SEQ ID NO: 469777 - RNA, 32 nt, Human
gguguugggaaggccugcgucucaggucacag

SEQ ID NO: 469778 - RNA, 18 nt, Human
gguguugggacagcagga

SEQ ID NO: 469779 - RNA, 32 nt, Human
gguguugggauuacagaugugagccaccacac

SEQ ID NO: 469780 - RNA, 32 nt, Human
gguguugggauuacaggcgugagccaccgugc

SEQ ID NO: 469781 - RNA, 32 nt, Human
gguguugggauuacaggcgugagccacugcac

SEQ ID NO: 469782 - RNA, 32 nt, Human
gguguugggauugcaggugugagccacugcgc

SEQ ID NO: 469783 - RNA, 32 nt, Human
gguguuggggagaaaauggagaguaaaucaga

SEQ ID NO: 469784 - RNA, 20 nt, Human
gguguugggggagacaggag

SEQ ID NO: 469785 - RNA, 19 nt, Human
gguguugggggcaguggga

SEQ ID NO: 469786 - RNA, 32 nt, Human
gguguugggguccgcagggggagggaggggag

SEQ ID NO: 469787 - RNA, 18 nt, Human
gguguugguccucaggag

SEQ ID NO: 469788 - RNA, 19 nt, Human
gguguuggugcauggagag

SEQ ID NO: 469789 - RNA, 19 nt, Human
gguguuggugucggcaggg

SEQ ID NO: 469790 - RNA, 18 nt, Human
gguguugguguggacggg

SEQ ID NO: 469791 - RNA, 32 nt, Human
gguguugguuggagcagaacuggugaggaugu

SEQ ID NO: 469792 - RNA, 29 nt, Human
gguguugguuuguguguggacaagaggug

SEQ ID NO: 469793 - RNA, 20 nt, Human
gguguugucuuucugccauc

SEQ ID NO: 469794 - RNA, 32 nt, Human
gguguugugcugugucuggcugugggauaaau

SEQ ID NO: 469795 - RNA, 32 nt, Human
gguguuguggggauggugauggagagggaugg

SEQ ID NO: 469796 - RNA, 32 nt, Human
gguguuguuucugcgcccucuuuuggcuaauu

SEQ ID NO: 469797 - RNA, 18 nt, Human
gguguuuaaagggcccuc

SEQ ID NO: 469798 - RNA, 32 nt, Human
gguguuuagucuuccuguugcauuucaugggc

SEQ ID NO: 469799 - RNA, 32 nt, Human
gguguuuauacugauuugauugugcuggcaaa

SEQ ID NO: 469800 - RNA, 32 nt, Human
gguguuuauaucuccuuuguauucugucuuca

SEQ ID NO: 469801 - RNA, 32 nt, Human
gguguuucaccaacuucggccuauggcucugu

SEQ ID NO: 469802 - RNA, 32 nt, Human
gguguuuccauucacuuucaaaauuacacagu

SEQ ID NO: 469803 - RNA, 32 nt, Human
gguguuuccccaugucauccaggcuggucugg

SEQ ID NO: 469804 - RNA, 32 nt, Human
gguguuucccuuacacaagugccuucacaggu

SEQ ID NO: 469805 - RNA, 32 nt, Human
gguguuuccucucugcuggcucguagccggaa

SEQ ID NO: 469806 - RNA, 32 nt, Human
gguguuuccuggaggcuggaaaugcuauuccu

SEQ ID NO: 469807 - RNA, 32 nt, Human
gguguuuccugggcacugcuuccagugaggcu

SEQ ID NO: 469808 - RNA, 32 nt, Human
gguguuucuccccucuauucuuugucucaggu

SEQ ID NO: 469809 - RNA, 20 nt, Human
gguguuucuguggucaggua

SEQ ID NO: 469810 - RNA, 32 nt, Human
gguguuucuuggggguguugggagggcaggag

SEQ ID NO: 469811 - RNA, 32 nt, Human
gguguuugaggacuacaguucaucucaggguu

SEQ ID NO: 469812 - RNA, 31 nt, Human
gguguuugauuaaaguaucuguugaauuuuu

SEQ ID NO: 469813 - RNA, 22 nt, Human
gguguuugcacacacaagugca

SEQ ID NO: 469814 - RNA, 32 nt, Human
gguguuugcaggagguugcaguacucgcuggg

SEQ ID NO: 469815 - RNA, 32 nt, Human
gguguuuggagauucuguuuuacucugccuag

SEQ ID NO: 469816 - RNA, 32 nt, Human
gguguuuggcgaggacugcucucugcuuccaa

SEQ ID NO: 469817 - RNA, 32 nt, Human
gguguuuggggagcuggagucccaggccgugg

SEQ ID NO: 469818 - RNA, 24 nt, Human
gguguuuguggacugguucaggga

SEQ ID NO: 469819 - RNA, 32 nt, Human
gguguuuuaaagcaguguugcauuuuaaucag

SEQ ID NO: 469820 - RNA, 32 nt, Human
gguguuuuaagcuugagugaaaggagggugag

SEQ ID NO: 469821 - RNA, 32 nt, Human
gguguuuuagggaccguccuucuccccuaccc

SEQ ID NO: 469822 - RNA, 32 nt, Human
gguguuuuaguaagaauccugggucccauaac

SEQ ID NO: 469823 - RNA, 32 nt, Human
gguguuuucccaaggcucccuucccaagcuca

SEQ ID NO: 469824 - RNA, 32 nt, Human
gguguuuuugggggagcccuguuuuccauagu

SEQ ID NO: 469825 - RNA, 20 nt, Human
gguuaaaaauucuccugccu

SEQ ID NO: 469826 - RNA, 22 nt, Human
gguuaaaaauucuccugccuca

SEQ ID NO: 469827 - RNA, 32 nt, Human
gguuaaacuucugcacuuucuuaguuaccaca

SEQ ID NO: 469828 - RNA, 32 nt, Human
gguuaaagaagcugcauguuaagugccauuac

SEQ ID NO: 469829 - RNA, 32 nt, Human
gguuaaagaggugaggugacgggaaauacaca

SEQ ID NO: 469830 - RNA, 32 nt, Human
gguuaaagagguggagaaagagaaaagaaaug

SEQ ID NO: 469831 - RNA, 32 nt, Human
gguuaaagcuuaaaaagugaaaaagaaacagg

SEQ ID NO: 469832 - RNA, 32 nt, Human
gguuaaagugcucuccuguguaggacccuucc

SEQ ID NO: 469833 - RNA, 32 nt, Human
gguuaaaguucaauaaauacuuuguugaauuu

SEQ ID NO: 469834 - RNA, 24 nt, Human
gguuaaauaacuuaccugugguua

SEQ ID NO: 469835 - RNA, 32 nt, Human
gguuaacacggugaaaccccgacucuacuaaa

SEQ ID NO: 469836 - RNA, 32 nt, Human
gguuaacacggugaaacccugucucuacaaaa

SEQ ID NO: 469837 - RNA, 32 nt, Human
gguuaacauggugaaacaccaucucuaguaaa

SEQ ID NO: 469838 - RNA, 32 nt, Human
gguuaacauggugaaacccugucuguacuaaa

SEQ ID NO: 469839 - RNA, 32 nt, Human
gguuaaccagaacucaccgacacagcaggaga

SEQ ID NO: 469840 - RNA, 32 nt, Human
gguuaacccacugguuucaaccaguucaggaa

SEQ ID NO: 469841 - RNA, 32 nt, Human
gguuaacccuugugugaaaugaaggaacuguc

SEQ ID NO: 469842 - RNA, 32 nt, Human
gguuaacgcugacagaauggaggcucaggcug

SEQ ID NO: 469843 - RNA, 32 nt, Human
gguuaacuuugcaacuggacugucuuuuacuu

SEQ ID NO: 469844 - RNA, 32 nt, Human
gguuaacuuugcuuaauuccucaggcuuugcg

SEQ ID NO: 469845 - RNA, 32 nt, Human
gguuaagaagagaagacagccagaggcucaca

SEQ ID NO: 469846 - RNA, 32 nt, Human
gguuaagagacacaguugggcgaacucucaaa

SEQ ID NO: 469847 - RNA, 31 nt, Human
gguuaagcaauguccagugcuaggauuauuu

SEQ ID NO: 469848 - RNA, 32 nt, Human
gguuaagcuguguacagaugauggagaguuug

SEQ ID NO: 469849 - RNA, 32 nt, Human
gguuaaggccuuccagcaucagucacauguaa

SEQ ID NO: 469850 - RNA, 32 nt, Human
gguuaaggcuggucuaaacuuauuuucacuuu

SEQ ID NO: 469851 - RNA, 32 nt, Human
gguuaagggaaagcgugggugugaguaggagu

SEQ ID NO: 469852 - RNA, 32 nt, Human
gguuaagggaggaguuccugcccaccaggaac

SEQ ID NO: 469853 - RNA, 32 nt, Human
gguuaagguauccagccuuuaucauauaagca

SEQ ID NO: 469854 - RNA, 32 nt, Human
gguuaagguaugauuauaagagagcuuauugu

SEQ ID NO: 469855 - RNA, 32 nt, Human
gguuaagguuggcucuggccaggauuccaggc

SEQ ID NO: 469856 - RNA, 24 nt, Human
gguuaaguaaccaaccuaagguca

SEQ ID NO: 469857 - RNA, 24 nt, Human
gguuaaguaacuugugcaagauca

SEQ ID NO: 469858 - RNA, 23 nt, Human
gguuaaguauauucccaagguca

SEQ ID NO: 469859 - RNA, 32 nt, Human
gguuaagucuaagaaggugggggugagcaggg

SEQ ID NO: 469860 - RNA, 21 nt, Human
gguuaaguuuccuuucacuca

SEQ ID NO: 469861 - RNA, 32 nt, Human
gguuaaguuuuuguuucuccuggcuuggaacu

SEQ ID NO: 469862 - RNA, 32 nt, Human
gguuaaucacuaccauccuguaacuaguuaua

SEQ ID NO: 469863 - RNA, 32 nt, Human
gguuaaucuucucuugagaauggcagucaaga

SEQ ID NO: 469864 - RNA, 30 nt, Human
gguuaaugaaggagaagcagcgucugagca

SEQ ID NO: 469865 - RNA, 32 nt, Human
gguuaaugcagauggcaagugcaccaaggaga

SEQ ID NO: 469866 - RNA, 32 nt, Human
gguuaauggaaaggaaaaauguugaacagaua

SEQ ID NO: 469867 - RNA, 32 nt, Human
gguuaauguguggcauauggaagggacuccca

SEQ ID NO: 469868 - RNA, 32 nt, Human
gguuaauuuugcucagaguauccagaguuagc

SEQ ID NO: 469869 - RNA, 32 nt, Human
gguuacaauuagaacuccugaccccagauuca

SEQ ID NO: 469870 - RNA, 32 nt, Human
gguuacaccuguaaucccagcacuuugggagg

SEQ ID NO: 469871 - RNA, 20 nt, Human
gguuacagagccaucacggu

SEQ ID NO: 469872 - RNA, 31 nt, Human
gguuacagagcuagucccaccaaagcuacuc

SEQ ID NO: 469873 - RNA, 32 nt, Human
gguuacagauggccaaugaucucuccaacuau

SEQ ID NO: 469874 - RNA, 32 nt, Human
gguuacagccugacaccugugcguugcaucgg

SEQ ID NO: 469875 - RNA, 25 nt, Human
gguuacaggcaugcaccaccaugcc

SEQ ID NO: 469876 - RNA, 25 nt, Human
gguuacaggcauuugccaccgggcc

SEQ ID NO: 469877 - RNA, 25 nt, Human
gguuacaggcgugcaccaccaugcc

SEQ ID NO: 469878 - RNA, 23 nt, Human
gguuacagggcaaaagggcagcu

SEQ ID NO: 469879 - RNA, 25 nt, Human
gguuacaggugugugccaccacgcc

SEQ ID NO: 469880 - RNA, 21 nt, Human
gguuacaguggccacuaggcu

SEQ ID NO: 469881 - RNA, 32 nt, Human
gguuacaucauuuuucuugcugucuugggcau

SEQ ID NO: 469882 - RNA, 32 nt, Human
gguuacaugguguaaauauuagugcaguuaag

SEQ ID NO: 469883 - RNA, 32 nt, Human
gguuaccaacuggccagcaggcugugucccug

SEQ ID NO: 469884 - RNA, 32 nt, Human
gguuaccaagcaggguucccccuucccuuuuc

SEQ ID NO: 469885 - RNA, 32 nt, Human
gguuaccacacuggucucucuuccuaggcuau

SEQ ID NO: 469886 - RNA, 32 nt, Human
gguuaccaccuugcucaacaccugugcccgga

SEQ ID NO: 469887 - RNA, 32 nt, Human
gguuaccacucaccuggggauucagcaacagg

SEQ ID NO: 469888 - RNA, 21 nt, Human
gguuaccauguaucacaccua

SEQ ID NO: 469889 - RNA, 32 nt, Human
gguuacccagcacauaguaguacuggauucca

SEQ ID NO: 469890 - RNA, 32 nt, Human
gguuacccggcccggcccuuccucgcuucccu

SEQ ID NO: 469891 - RNA, 32 nt, Human
gguuacccuucagauaaagaagggaagaagcc

SEQ ID NO: 469892 - RNA, 23 nt, Human
gguuaccugugccauucauggcc

SEQ ID NO: 469893 - RNA, 32 nt, Human
gguuaccuuagcaaccuuccaccauccaggaa

SEQ ID NO: 469894 - RNA, 32 nt, Human
gguuaccuugauaaagcuguuauucaugaaau

SEQ ID NO: 469895 - RNA, 31 nt, Human
gguuaccuuucugccugcccugugucguaaa

SEQ ID NO: 469896 - RNA, 20 nt, Human
gguuacggaacuccucaagg

SEQ ID NO: 469897 - RNA, 21 nt, Human
gguuacggcuggcuccuggcc

SEQ ID NO: 469898 - RNA, 32 nt, Human
gguuacuagaauuauguuacugugucuuauug

SEQ ID NO: 469899 - RNA, 32 nt, Human
gguuacucaaagcugauucaaagccgauuaaa

SEQ ID NO: 469900 - RNA, 32 nt, Human
gguuacucauccugggcucagguaagagggcc

SEQ ID NO: 469901 - RNA, 32 nt, Human
gguuacugaggggcucaggaaggggccccucg

SEQ ID NO: 469902 - RNA, 32 nt, Human
gguuacugauuuuccucuacccucuuaguuuu

SEQ ID NO: 469903 - RNA, 32 nt, Human
gguuacugccaagcaggauuuagucuggauuu

SEQ ID NO: 469904 - RNA, 32 nt, Human
gguuacugugaaucccagaggagucucucccu

SEQ ID NO: 469905 - RNA, 32 nt, Human
gguuacuguggacuugauagauuugagguacc

SEQ ID NO: 469906 - RNA, 32 nt, Human
gguuacuuaagaggcagagaagcccuaggcaa

SEQ ID NO: 469907 - RNA, 32 nt, Human
gguuacuucuuucuucugccucgacucacaug

SEQ ID NO: 469908 - RNA, 32 nt, Human
gguuagaacagcugccugaggcuccucccuga

SEQ ID NO: 469909 - RNA, 32 nt, Human
gguuagaagggaaggaaggaaagaucaaggaa

SEQ ID NO: 469910 - RNA, 32 nt, Human
gguuagaauggcccucauauugccugccuaaa

SEQ ID NO: 469911 - RNA, 32 nt, Human
gguuagacugggucggggccaggggagaagca

SEQ ID NO: 469912 - RNA, 32 nt, Human
gguuagagagguggagaaagagaaaagaaaug

SEQ ID NO: 469913 - RNA, 32 nt, Human
gguuagagagguggagaaagagaaaggaaaug

SEQ ID NO: 469914 - RNA, 32 nt, Human
gguuagagcuaacauuuuuggugaggaaagca

SEQ ID NO: 469915 - RNA, 32 nt, Human
gguuagagcugaaaggggacagcuggagucaa

SEQ ID NO: 469916 - RNA, 32 nt, Human
gguuagagcuuggcccugccacugaguggccu

SEQ ID NO: 469917 - RNA, 32 nt, Human
gguuagauaaugaaugauaagcaggaaggaug

SEQ ID NO: 469918 - RNA, 32 nt, Human
gguuagauggcugcuacucugaguacccccuc

SEQ ID NO: 469919 - RNA, 32 nt, Human
gguuagauugguucccuguggugaccuagaga

SEQ ID NO: 469920 - RNA, 32 nt, Human
gguuagcaaauaagggcauuggaccugagaac

SEQ ID NO: 469921 - RNA, 32 nt, Human
gguuagcagacugguguguguggaucugcagu

SEQ ID NO: 469922 - RNA, 32 nt, Human
gguuagcauuaccuuaaucuuuguugcucaag

SEQ ID NO: 469923 - RNA, 32 nt, Human
gguuagccccuucaguccauuauccuccaaua

SEQ ID NO: 469924 - RNA, 32 nt, Human
gguuagccuccuggcgcugcaaggcugccugc

SEQ ID NO: 469925 - RNA, 32 nt, Human
gguuagccugaagaaaauugccucagccucca

SEQ ID NO: 469926 - RNA, 32 nt, Human
gguuagccugcuuaggggaagggcuaggggua

SEQ ID NO: 469927 - RNA, 32 nt, Human
gguuagcucugcccucuccucuccucucuacg

SEQ ID NO: 469928 - RNA, 32 nt, Human
gguuagcugccucugcuuccagcuuuguauaa

SEQ ID NO: 469929 - RNA, 32 nt, Human
gguuagcugccucugcuuccagcuuuguguaa

SEQ ID NO: 469930 - RNA, 32 nt, Human
gguuaggaagaaagaggagacaaggacagaca

SEQ ID NO: 469931 - RNA, 32 nt, Human
gguuaggacuguccggcaguugccugcuuuug

SEQ ID NO: 469932 - RNA, 32 nt, Human
gguuaggacuucagaaaccagagcacaagccc

SEQ ID NO: 469933 - RNA, 32 nt, Human
gguuaggagaagggguuucuugaucaugucau

SEQ ID NO: 469934 - RNA, 32 nt, Human
gguuaggaggagagaggacgaaguacagaaca

SEQ ID NO: 469935 - RNA, 32 nt, Human
gguuaggagggacagaguguuccaggaggagg

SEQ ID NO: 469936 - RNA, 32 nt, Human
gguuaggcauguuaagcuugagaugucuguua

SEQ ID NO: 469937 - RNA, 32 nt, Human
gguuagggaauuuggggugagguuccucagga

SEQ ID NO: 469938 - RNA, 32 nt, Human
gguuagggacugucacccucagcacugugaac

SEQ ID NO: 469939 - RNA, 19 nt, Human
gguuagggcaggguagcuc

SEQ ID NO: 469940 - RNA, 32 nt, Human
gguuaggggagaaaaguuggccucccaaaauu

SEQ ID NO: 469941 - RNA, 32 nt, Human
gguuaggggagaggugacccugagggacagcc

SEQ ID NO: 469942 - RNA, 32 nt, Human
gguuaggggagcaccuguuucagacugggcau

SEQ ID NO: 469943 - RNA, 17 nt, Human
gguuagguggcgcgagg

SEQ ID NO: 469944 - RNA, 32 nt, Human
gguuagguggggugaaugugguacaggaaugu

SEQ ID NO: 469945 - RNA, 32 nt, Human
gguuagguuaugagacuggcagagguaggagu

SEQ ID NO: 469946 - RNA, 32 nt, Human
gguuaguaagagaagggggagauggccagccu

SEQ ID NO: 469947 - RNA, 32 nt, Human
gguuaguacugguccccuucugggcaacaugg

SEQ ID NO: 469948 - RNA, 32 nt, Human
gguuagucagcaaaauaaaaucaaccuaauga

SEQ ID NO: 469949 - RNA, 32 nt, Human
gguuaguccucagacuaaugauagugucugcu

SEQ ID NO: 469950 - RNA, 32 nt, Human
gguuagucuuacagaagaaauguggauuugau

SEQ ID NO: 469951 - RNA, 32 nt, Human
gguuagugacucugcaggacuucacagagaga

SEQ ID NO: 469952 - RNA, 32 nt, Human
gguuagugcucgagugaaaaccucuuucagcu

SEQ ID NO: 469953 - RNA, 32 nt, Human
gguuagugguucagaaagguaaccucaagaag

SEQ ID NO: 469954 - RNA, 32 nt, Human
gguuauaaaacagcucaaucggggaguacaac

SEQ ID NO: 469955 - RNA, 25 nt, Human
gguuauaaaauuauacaccauggcc

SEQ ID NO: 469956 - RNA, 32 nt, Human
gguuauaaagguuuggauuggagagggcucac

SEQ ID NO: 469957 - RNA, 19 nt, Human
gguuauaaagucauaucca

SEQ ID NO: 469958 - RNA, 18 nt, Human
gguuauaacuggauccua

SEQ ID NO: 469959 - RNA, 32 nt, Human
gguuauagaauuucaggguuaggguuuaaaga

SEQ ID NO: 469960 - RNA, 21 nt, Human
gguuauagacagucguuccca

SEQ ID NO: 469961 - RNA, 23 nt, Human
gguuauagagaugacuguagcuu

SEQ ID NO: 469962 - RNA, 21 nt, Human
gguuauagauuaucuaauuca

SEQ ID NO: 469963 - RNA, 21 nt, Human
gguuauagcuggucccagguc

SEQ ID NO: 469964 - RNA, 21 nt, Human
gguuauagcuucccauaugcc

SEQ ID NO: 469965 - RNA, 22 nt, Human
gguuauagcuucccauaugcca

SEQ ID NO: 469966 - RNA, 23 nt, Human
gguuauagcuuuccaucacagcu

SEQ ID NO: 469967 - RNA, 19 nt, Human
gguuauagggguacacuua

SEQ ID NO: 469968 - RNA, 32 nt, Human
gguuauagucagcucauuuccauuccacuauu

SEQ ID NO: 469969 - RNA, 21 nt, Human
gguuauaguugcuaauucuaa

SEQ ID NO: 469970 - RNA, 32 nt, Human
gguuauauacaaaguggcaaugcugagauuca

SEQ ID NO: 469971 - RNA, 32 nt, Human
gguuauauggcagccaagaaacaccuggagau

SEQ ID NO: 469972 - RNA, 22 nt, Human
gguuaucacaccaucgcuggcc

SEQ ID NO: 469973 - RNA, 26 nt, Human
gguuaucagcaccagccgccauggcc

SEQ ID NO: 469974 - RNA, 32 nt, Human
gguuaucaguugcuggcugugccugagcagcu

SEQ ID NO: 469975 - RNA, 32 nt, Human
gguuauccagucaacagaacucuaucccaaag

SEQ ID NO: 469976 - RNA, 32 nt, Human
gguuauccccuuggacugugugcagcacgaug

SEQ ID NO: 469977 - RNA, 32 nt, Human
gguuauccuggagaaaauggacucaggagcua

SEQ ID NO: 469978 - RNA, 32 nt, Human
gguuauccuguuugaagaaaaaggacaaauaa

SEQ ID NO: 469979 - RNA, 32 nt, Human
gguuaucgggauaccugggaggauggggugga

SEQ ID NO: 469980 - RNA, 32 nt, Human
gguuaucugaaggggagauuaucaauggcaaa

SEQ ID NO: 469981 - RNA, 32 nt, Human
gguuaucugcaagugaggugugucacaaugag

SEQ ID NO: 469982 - RNA, 32 nt, Human
gguuaucuguaucuggagguuccacuguugcu

SEQ ID NO: 469983 - RNA, 32 nt, Human
gguuaucuguuagaacagucucuguacacaau

SEQ ID NO: 469984 - RNA, 32 nt, Human
gguuaucuucuuuuucucccugauauuuuaau

SEQ ID NO: 469985 - RNA, 23 nt, Human
gguuaugaaucauuaccauggcu

SEQ ID NO: 469986 - RNA, 20 nt, Human
gguuaugauauccauacuca

SEQ ID NO: 469987 - RNA, 32 nt, Human
gguuaugaugaaacaccacauuuuagcaaaac

SEQ ID NO: 469988 - RNA, 32 nt, Human
gguuaugcacacuaaauuaaaugugacauaaa

SEQ ID NO: 469989 - RNA, 29 nt, Human
gguuaugcagcgcgugaacaugaucaugg

SEQ ID NO: 469990 - RNA, 24 nt, Human
gguuaugccuggccccacccagca

SEQ ID NO: 469991 - RNA, 22 nt, Human
gguuaugcucuuuucuuucuca

SEQ ID NO: 469992 - RNA, 18 nt, Human
gguuauggacagcagcca

SEQ ID NO: 469993 - RNA, 21 nt, Human
gguuauggacauucaugccca

SEQ ID NO: 469994 - RNA, 29 nt, Human
gguuauggacggcaccauggaggacuccg

SEQ ID NO: 469995 - RNA, 22 nt, Human
gguuauggacuauacacaccua

SEQ ID NO: 469996 - RNA, 22 nt, Human
gguuaugggggugccagaggca

SEQ ID NO: 469997 - RNA, 32 nt, Human
gguuauguauuuuugugggauccugcaguaaa

SEQ ID NO: 469998 - RNA, 32 nt, Human
gguuaugucaagcaucuggcacagcugaaggc

SEQ ID NO: 469999 - RNA, 32 nt, Human
gguuaugugugccaggcuggcuggcaggaacu

SEQ ID NO: 470000 - RNA, 32 nt, Human
gguuauguuagaauuuacacugaggagaaaau

SEQ ID NO: 470001 - RNA, 19 nt, Human
gguuauguuucugcuacca

SEQ ID NO: 470002 - RNA, 32 nt, Human
gguuauuagaaauaacauaaauggcugguaug

SEQ ID NO: 470003 - RNA, 32 nt, Human
gguuauuagugggaagagaguaauagguugcu

SEQ ID NO: 470004 - RNA, 32 nt, Human
gguuauucagaaccuaaaaguauuauucaaac

SEQ ID NO: 470005 - RNA, 32 nt, Human
gguuauucguuucuaaacuuggauggaauuag

SEQ ID NO: 470006 - RNA, 32 nt, Human
gguuauugauguggcccuggcugccggcacgg

SEQ ID NO: 470007 - RNA, 32 nt, Human
gguuauuggagccugagcuugaccucaaacgg

SEQ ID NO: 470008 - RNA, 32 nt, Human
gguuauuguguguuauauuacuuuccagggac

SEQ ID NO: 470009 - RNA, 32 nt, Human
gguuauuuccucagcuauuuccaccaaauccu

SEQ ID NO: 470010 - RNA, 32 nt, Human
gguuauuuccucagcuguuuccaccaaauccu

SEQ ID NO: 470011 - RNA, 32 nt, Human
gguuauuuuauuuauuguaagcauuuugacau

SEQ ID NO: 470012 - RNA, 32 nt, Human
gguucaaaacucaggcaaagggcgcagaggug

SEQ ID NO: 470013 - RNA, 22 nt, Human
gguucaaacaauuccugccuca

SEQ ID NO: 470014 - RNA, 24 nt, Human
gguucaaacaauucucaugccuca

SEQ ID NO: 470015 - RNA, 24 nt, Human
gguucaaacaauucuccugccuca

SEQ ID NO: 470016 - RNA, 24 nt, Human
gguucaaacaauuuuccugccuca

SEQ ID NO: 470017 - RNA, 24 nt, Human
gguucaaaccauucuccugccuca

SEQ ID NO: 470018 - RNA, 24 nt, Human
gguucaaacgauucuccuaccuca

SEQ ID NO: 470019 - RNA, 24 nt, Human
gguucaaacgauucuccugcccca

SEQ ID NO: 470020 - RNA, 22 nt, Human
gguucaaacgauucuccugccu

SEQ ID NO: 470021 - RNA, 24 nt, Human
gguucaaacgauucuccugccuca

SEQ ID NO: 470022 - RNA, 22 nt, Human
gguucaaacgauucucuugccu

SEQ ID NO: 470023 - RNA, 24 nt, Human
gguucaaacgauucucuugccuca

SEQ ID NO: 470024 - RNA, 24 nt, Human
gguucaaacgauuguccugccuca

SEQ ID NO: 470025 - RNA, 21 nt, Human
gguucaaauaacuuuuccacu

SEQ ID NO: 470026 - RNA, 24 nt, Human
gguucaaaugauacuccugccuca

SEQ ID NO: 470027 - RNA, 24 nt, Human
gguucaaaugauucuccugccuca

SEQ ID NO: 470028 - RNA, 25 nt, Human
gguucaaauguuguucucuucuuua

SEQ ID NO: 470029 - RNA, 24 nt, Human
gguucaaccgauucuccugccuca

SEQ ID NO: 470030 - RNA, 21 nt, Human
gguucaagaacugcugccuua

SEQ ID NO: 470031 - RNA, 24 nt, Human
gguucaagagacucuccugccuca

SEQ ID NO: 470032 - RNA, 24 nt, Human
gguucaagagauccuccugccuca

SEQ ID NO: 470033 - RNA, 24 nt, Human
gguucaagagauuccccugccuca

SEQ ID NO: 470034 - RNA, 22 nt, Human
gguucaagagauucuccugccu

SEQ ID NO: 470035 - RNA, 24 nt, Human
gguucaagagauucuccugccuca

SEQ ID NO: 470036 - RNA, 22 nt, Human
gguucaagagauucuccugucu

SEQ ID NO: 470037 - RNA, 24 nt, Human
gguucaagagauucuccugucuca

SEQ ID NO: 470038 - RNA, 21 nt, Human
gguucaagagauucugccuca

SEQ ID NO: 470039 - RNA, 22 nt, Human
gguucaagagauucuucugccu

SEQ ID NO: 470040 - RNA, 24 nt, Human
gguucaagagauucuucugccuca

SEQ ID NO: 470041 - RNA, 24 nt, Human
gguucaagagauucuucugucuca

SEQ ID NO: 470042 - RNA, 24 nt, Human
gguucaagagauucuugugccuca

SEQ ID NO: 470043 - RNA, 22 nt, Human
gguucaagagauuuuccugccu

SEQ ID NO: 470044 - RNA, 24 nt, Human
gguucaagagauuuuccugccuca

SEQ ID NO: 470045 - RNA, 24 nt, Human
gguucaagauauucuccugccuca

SEQ ID NO: 470046 - RNA, 22 nt, Human
gguucaagauuguuccugcuuu

SEQ ID NO: 470047 - RNA, 24 nt, Human
gguucaagcaaaucuccugccuca

SEQ ID NO: 470048 - RNA, 21 nt, Human
gguucaagcaacccugccuca

SEQ ID NO: 470049 - RNA, 24 nt, Human
gguucaagcaagucuccugccuca

SEQ ID NO: 470050 - RNA, 24 nt, Human
gguucaagcaauccucccaccuca

SEQ ID NO: 470051 - RNA, 24 nt, Human
gguucaagcaauccucccacuuca

SEQ ID NO: 470052 - RNA, 24 nt, Human
gguucaagcaauccuccugccuca

SEQ ID NO: 470053 - RNA, 24 nt, Human
gguucaagcaauccuccugccuua

SEQ ID NO: 470054 - RNA, 32 nt, Human
gguucaagcaauuaacugccucagcuucccua

SEQ ID NO: 470055 - RNA, 22 nt, Human
gguucaagcaauuauccugccu

SEQ ID NO: 470056 - RNA, 24 nt, Human
gguucaagcaauuauccugccuca

SEQ ID NO: 470057 - RNA, 23 nt, Human
gguucaagcaauuaucugccuca

SEQ ID NO: 470058 - RNA, 23 nt, Human
gguucaagcaauuauuugccuca

SEQ ID NO: 470059 - RNA, 22 nt, Human
gguucaagcaauuccccugccu

SEQ ID NO: 470060 - RNA, 23 nt, Human
gguucaagcaauucccugccuca

SEQ ID NO: 470061 - RNA, 24 nt, Human
gguucaagcaauucucaugccuca

SEQ ID NO: 470062 - RNA, 24 nt, Human
gguucaagcaauucuccagccuca

SEQ ID NO: 470063 - RNA, 24 nt, Human
gguucaagcaauucuccuaccuca

SEQ ID NO: 470064 - RNA, 24 nt, Human
gguucaagcaauucuccugcauca

SEQ ID NO: 470065 - RNA, 21 nt, Human
gguucaagcaauucuccugcc

SEQ ID NO: 470066 - RNA, 24 nt, Human
gguucaagcaauucuccugcccca

SEQ ID NO: 470067 - RNA, 24 nt, Human
gguucaagcaauucuccugccgca

SEQ ID NO: 470068 - RNA, 22 nt, Human
gguucaagcaauucuccugccu

SEQ ID NO: 470069 - RNA, 23 nt, Human
gguucaagcaauucuccugccuc

SEQ ID NO: 470070 - RNA, 24 nt, Human
gguucaagcaauucuccugccuca

SEQ ID NO: 470071 - RNA, 23 nt, Human
gguucaagcaauucuccugccuu

SEQ ID NO: 470072 - RNA, 24 nt, Human
gguucaagcaauucuccugccuua

SEQ ID NO: 470073 - RNA, 24 nt, Human
gguucaagcaauucuccugcuuca

SEQ ID NO: 470074 - RNA, 22 nt, Human
gguucaagcaauucuccugucu

SEQ ID NO: 470075 - RNA, 24 nt, Human
gguucaagcaauucuccugucuca

SEQ ID NO: 470076 - RNA, 24 nt, Human
gguucaagcaauucuccugucuua

SEQ ID NO: 470077 - RNA, 22 nt, Human
gguucaagcaauucuccuguuu

SEQ ID NO: 470078 - RNA, 24 nt, Human
gguucaagcaauucuccuguuuca

SEQ ID NO: 470079 - RNA, 24 nt, Human
gguucaagcaauucuccuuccuca

SEQ ID NO: 470080 - RNA, 24 nt, Human
gguucaagcaauucuccuucuuca

SEQ ID NO: 470081 - RNA, 25 nt, Human
gguucaagcaauucucguugucuca

SEQ ID NO: 470082 - RNA, 23 nt, Human
gguucaagcaauucucugccuca

SEQ ID NO: 470083 - RNA, 23 nt, Human
gguucaagcaauucucugucuca

SEQ ID NO: 470084 - RNA, 22 nt, Human
gguucaagcaauucucuugccu

SEQ ID NO: 470085 - RNA, 24 nt, Human
gguucaagcaauucucuugccuca

SEQ ID NO: 470086 - RNA, 21 nt, Human
gguucaagcaauucugcccca

SEQ ID NO: 470087 - RNA, 24 nt, Human
gguucaagcaauucuucugacuca

SEQ ID NO: 470088 - RNA, 22 nt, Human
gguucaagcaauucuucugccu

SEQ ID NO: 470089 - RNA, 24 nt, Human
gguucaagcaauucuucugccuca

SEQ ID NO: 470090 - RNA, 22 nt, Human
gguucaagcaauuguccugccu

SEQ ID NO: 470091 - RNA, 24 nt, Human
gguucaagcaauuguccugccuca

SEQ ID NO: 470092 - RNA, 23 nt, Human
gguucaagcaauugucugccuca

SEQ ID NO: 470093 - RNA, 23 nt, Human
gguucaagcaauuuccugccuca

SEQ ID NO: 470094 - RNA, 22 nt, Human
gguucaagcaauuuuccugcuu

SEQ ID NO: 470095 - RNA, 24 nt, Human
gguucaagcaauuuuccugcuuca

SEQ ID NO: 470096 - RNA, 24 nt, Human
gguucaagcaauuuucgugccuca

SEQ ID NO: 470097 - RNA, 24 nt, Human
gguucaagcacuucucguaccuca

SEQ ID NO: 470098 - RNA, 23 nt, Human
gguucaagcagucuuccugccuu

SEQ ID NO: 470099 - RNA, 24 nt, Human
gguucaagcaguucucccgccuca

SEQ ID NO: 470100 - RNA, 22 nt, Human
gguucaagcaguucuccugccu

SEQ ID NO: 470101 - RNA, 24 nt, Human
gguucaagcaguucuccugccuca

SEQ ID NO: 470102 - RNA, 22 nt, Human
gguucaagcaguucuccugucu

SEQ ID NO: 470103 - RNA, 24 nt, Human
gguucaagcaguucuccugucuca

SEQ ID NO: 470104 - RNA, 23 nt, Human
gguucaagcaguucucugccuca

SEQ ID NO: 470105 - RNA, 24 nt, Human
gguucaagcaguucucuugccuca

SEQ ID NO: 470106 - RNA, 21 nt, Human
gguucaagcaguucugccuca

SEQ ID NO: 470107 - RNA, 21 nt, Human
gguucaagcaguucuuccuca

SEQ ID NO: 470108 - RNA, 23 nt, Human
gguucaagcaguuuccugcuuca

SEQ ID NO: 470109 - RNA, 22 nt, Human
gguucaagcauuucuccugccu

SEQ ID NO: 470110 - RNA, 24 nt, Human
gguucaagcauuucuccugccuca

SEQ ID NO: 470111 - RNA, 24 nt, Human
gguucaagcauuucuccugucuca

SEQ ID NO: 470112 - RNA, 25 nt, Human
gguucaagccaucccuccugccuca

SEQ ID NO: 470113 - RNA, 24 nt, Human
gguucaagccauucucaugccuca

SEQ ID NO: 470114 - RNA, 24 nt, Human
gguucaagccauucuccucccuca

SEQ ID NO: 470115 - RNA, 22 nt, Human
gguucaagccauucuccugccu

SEQ ID NO: 470116 - RNA, 24 nt, Human
gguucaagccauucuccugccuca

SEQ ID NO: 470117 - RNA, 24 nt, Human
gguucaagccauucuccugucuca

SEQ ID NO: 470118 - RNA, 21 nt, Human
gguucaagccauucugccuca

SEQ ID NO: 470119 - RNA, 24 nt, Human
gguucaagccauucuucugccuca

SEQ ID NO: 470120 - RNA, 24 nt, Human
gguucaagcgaaccuccugccuca

SEQ ID NO: 470121 - RNA, 24 nt, Human
gguucaagcgaaucuccugccuca

SEQ ID NO: 470122 - RNA, 22 nt, Human
gguucaagcgacucuccugccu

SEQ ID NO: 470123 - RNA, 24 nt, Human
gguucaagcgacucuccugccuca

SEQ ID NO: 470124 - RNA, 22 nt, Human
gguucaagcgagucuccugccu

SEQ ID NO: 470125 - RNA, 24 nt, Human
gguucaagcgagucuccugccuca

SEQ ID NO: 470126 - RNA, 24 nt, Human
gguucaagcgauccucccacuuca

SEQ ID NO: 470127 - RNA, 24 nt, Human
gguucaagcgauccuccugccuca

SEQ ID NO: 470128 - RNA, 21 nt, Human
gguucaagcgauccugccuca

SEQ ID NO: 470129 - RNA, 24 nt, Human
gguucaagcgaugcuccugccuca

SEQ ID NO: 470130 - RNA, 24 nt, Human
gguucaagcgauuauccugccuca

SEQ ID NO: 470131 - RNA, 24 nt, Human
gguucaagcgauucaccugccuca

SEQ ID NO: 470132 - RNA, 22 nt, Human
gguucaagcgauuccccugccu

SEQ ID NO: 470133 - RNA, 24 nt, Human
gguucaagcgauuccccugccuca

SEQ ID NO: 470134 - RNA, 24 nt, Human
gguucaagcgauuccucugccuca

SEQ ID NO: 470135 - RNA, 22 nt, Human
gguucaagcgauucucaugccu

SEQ ID NO: 470136 - RNA, 23 nt, Human
gguucaagcgauucucaugccuc

SEQ ID NO: 470137 - RNA, 24 nt, Human
gguucaagcgauucucaugccuca

SEQ ID NO: 470138 - RNA, 24 nt, Human
gguucaagcgauucucaugccuua

SEQ ID NO: 470139 - RNA, 24 nt, Human
gguucaagcgauucucaugucuca

SEQ ID NO: 470140 - RNA, 24 nt, Human
gguucaagcgauucuccagccuca

SEQ ID NO: 470141 - RNA, 24 nt, Human
gguucaagcgauucuccagccuua

SEQ ID NO: 470142 - RNA, 22 nt, Human
gguucaagcgauucucccgccu

SEQ ID NO: 470143 - RNA, 24 nt, Human
gguucaagcgauucucccgccuca

SEQ ID NO: 470144 - RNA, 24 nt, Human
gguucaagcgauucuccuaccuca

SEQ ID NO: 470145 - RNA, 22 nt, Human
gguucaagcgauucuccugacu

SEQ ID NO: 470146 - RNA, 24 nt, Human
gguucaagcgauucuccugacuca

SEQ ID NO: 470147 - RNA, 20 nt, Human
gguucaagcgauucuccugc

SEQ ID NO: 470148 - RNA, 24 nt, Human
gguucaagcgauucuccugcauca

SEQ ID NO: 470149 - RNA, 22 nt, Human
gguucaagcgauucuccugccu

SEQ ID NO: 470150 - RNA, 23 nt, Human
gguucaagcgauucuccugccuc

SEQ ID NO: 470151 - RNA, 24 nt, Human
gguucaagcgauucuccugccuca

SEQ ID NO: 470152 - RNA, 24 nt, Human
gguucaagcgauucuccugccuua

SEQ ID NO: 470153 - RNA, 22 nt, Human
gguucaagcgauucuccugcuu

SEQ ID NO: 470154 - RNA, 24 nt, Human
gguucaagcgauucuccugcuuca

SEQ ID NO: 470155 - RNA, 23 nt, Human
gguucaagcgauucuccugcuuu

SEQ ID NO: 470156 - RNA, 20 nt, Human
gguucaagcgauucuccugu

SEQ ID NO: 470157 - RNA, 24 nt, Human
gguucaagcgauucuccugucuca

SEQ ID NO: 470158 - RNA, 24 nt, Human
gguucaagcgauucuccuguguca

SEQ ID NO: 470159 - RNA, 22 nt, Human
gguucaagcgauucucgugccu

SEQ ID NO: 470160 - RNA, 24 nt, Human
gguucaagcgauucucgugccuca

SEQ ID NO: 470161 - RNA, 22 nt, Human
gguucaagcgauucucguggcu

SEQ ID NO: 470162 - RNA, 21 nt, Human
gguucaagcgauucucucacu

SEQ ID NO: 470163 - RNA, 22 nt, Human
gguucaagcgauucucuugccu

SEQ ID NO: 470164 - RNA, 23 nt, Human
gguucaagcgauucucuugccuc

SEQ ID NO: 470165 - RNA, 24 nt, Human
gguucaagcgauucucuugccuca

SEQ ID NO: 470166 - RNA, 21 nt, Human
gguucaagcgauucugccucg

SEQ ID NO: 470167 - RNA, 24 nt, Human
gguucaagcgauucugcugccuca

SEQ ID NO: 470168 - RNA, 22 nt, Human
gguucaagcgauucuuaugccu

SEQ ID NO: 470169 - RNA, 24 nt, Human
gguucaagcgauucuuaugccuca

SEQ ID NO: 470170 - RNA, 22 nt, Human
gguucaagcgauucuucugccu

SEQ ID NO: 470171 - RNA, 23 nt, Human
gguucaagcgauucuucugccuc

SEQ ID NO: 470172 - RNA, 24 nt, Human
gguucaagcgauucuucugccuca

SEQ ID NO: 470173 - RNA, 24 nt, Human
gguucaagcgauucuucugcuuca

SEQ ID NO: 470174 - RNA, 23 nt, Human
gguucaagcgauucuugugccuc

SEQ ID NO: 470175 - RNA, 24 nt, Human
gguucaagcgauucuugugccuca

SEQ ID NO: 470176 - RNA, 22 nt, Human
gguucaagcgauugucccgccu

SEQ ID NO: 470177 - RNA, 22 nt, Human
gguucaagcgauuguccugccu

SEQ ID NO: 470178 - RNA, 24 nt, Human
gguucaagcgauuguccugccuca

SEQ ID NO: 470179 - RNA, 22 nt, Human
gguucaagcgauuuuccugccu

SEQ ID NO: 470180 - RNA, 24 nt, Human
gguucaagcgauuuuccugccuca

SEQ ID NO: 470181 - RNA, 24 nt, Human
gguucaagcgauuuuccugcuuca

SEQ ID NO: 470182 - RNA, 24 nt, Human
gguucaagcgcuucuccagccuca

SEQ ID NO: 470183 - RNA, 24 nt, Human
gguucaagcgcuucuccugccuca

SEQ ID NO: 470184 - RNA, 24 nt, Human
gguucaagcgguucuacugccuca

SEQ ID NO: 470185 - RNA, 18 nt, Human
gguucaagcuauucuacu

SEQ ID NO: 470186 - RNA, 24 nt, Human
gguucaagcuauucuacugccuca

SEQ ID NO: 470187 - RNA, 24 nt, Human
gguucaagcuauucucaugccuca

SEQ ID NO: 470188 - RNA, 22 nt, Human
gguucaagcuauucuccugccu

SEQ ID NO: 470189 - RNA, 24 nt, Human
gguucaagcuauucuccugccuca

SEQ ID NO: 470190 - RNA, 32 nt, Human
gguucaagcuccgugggccacacugcugcugu

SEQ ID NO: 470191 - RNA, 32 nt, Human
gguucaagcugaaaauguuacacaggaagaca

SEQ ID NO: 470192 - RNA, 21 nt, Human
gguucaaggauucuccugccu

SEQ ID NO: 470193 - RNA, 23 nt, Human
gguucaaggauucuccugccuca

SEQ ID NO: 470194 - RNA, 32 nt, Human
gguucaaggcacagucauucucuggcuuucau

SEQ ID NO: 470195 - RNA, 22 nt, Human
gguucaagggauucuccugccu

SEQ ID NO: 470196 - RNA, 24 nt, Human
gguucaagggauucuccugccuca

SEQ ID NO: 470197 - RNA, 24 nt, Human
gguucaagggauucuccugucuua

SEQ ID NO: 470198 - RNA, 24 nt, Human
gguucaagggauucucgugccuca

SEQ ID NO: 470199 - RNA, 21 nt, Human
gguucaagggauucugccuca

SEQ ID NO: 470200 - RNA, 22 nt, Human
gguucaaguaauucuccugccu

SEQ ID NO: 470201 - RNA, 24 nt, Human
gguucaaguaauucuccugccuca

SEQ ID NO: 470202 - RNA, 24 nt, Human
gguucaaguaauucugcugucuca

SEQ ID NO: 470203 - RNA, 22 nt, Human
gguucaaguaguucuccugccu

SEQ ID NO: 470204 - RNA, 24 nt, Human
gguucaaguaguucuccugccuca

SEQ ID NO: 470205 - RNA, 21 nt, Human
gguucaagucugcuuuccaca

SEQ ID NO: 470206 - RNA, 24 nt, Human
gguucaagugacccucccaccuca

SEQ ID NO: 470207 - RNA, 24 nt, Human
gguucaagugacucuugugccuca

SEQ ID NO: 470208 - RNA, 24 nt, Human
gguucaagugagucucaugccuca

SEQ ID NO: 470209 - RNA, 24 nt, Human
gguucaagugagucuccugccuca

SEQ ID NO: 470210 - RNA, 24 nt, Human
gguucaagugagucucgugccuca

SEQ ID NO: 470211 - RNA, 24 nt, Human
gguucaagugauccucccaccuca

SEQ ID NO: 470212 - RNA, 22 nt, Human
gguucaagugauccuccugccu

SEQ ID NO: 470213 - RNA, 24 nt, Human
gguucaagugauccuccugccuca

SEQ ID NO: 470214 - RNA, 24 nt, Human
gguucaagugauccucucaccuca

SEQ ID NO: 470215 - RNA, 24 nt, Human
gguucaagugauccucuugucuca

SEQ ID NO: 470216 - RNA, 24 nt, Human
gguucaagugaucguccugccuca

SEQ ID NO: 470217 - RNA, 24 nt, Human
gguucaagugaucguccugccuua

SEQ ID NO: 470218 - RNA, 24 nt, Human
gguucaagugaugcuccugccuca

SEQ ID NO: 470219 - RNA, 24 nt, Human
gguucaagugauucaccugccuca

SEQ ID NO: 470220 - RNA, 24 nt, Human
gguucaagugauuccccuaccuca

SEQ ID NO: 470221 - RNA, 23 nt, Human
gguucaagugauucccugccuca

SEQ ID NO: 470222 - RNA, 22 nt, Human
gguucaagugauucucaucuca

SEQ ID NO: 470223 - RNA, 32 nt, Human
gguucaagugauucucaucucagccucccaag

SEQ ID NO: 470224 - RNA, 22 nt, Human
gguucaagugauucucaugccu

SEQ ID NO: 470225 - RNA, 24 nt, Human
gguucaagugauucucaugccuca

SEQ ID NO: 470226 - RNA, 24 nt, Human
gguucaagugauucuccagccuca

SEQ ID NO: 470227 - RNA, 20 nt, Human
gguucaagugauucucccac

SEQ ID NO: 470228 - RNA, 22 nt, Human
gguucaagugauucucccaccu

SEQ ID NO: 470229 - RNA, 24 nt, Human
gguucaagugauucucccaccuca

SEQ ID NO: 470230 - RNA, 23 nt, Human
gguucaagugauucuccuaccuc

SEQ ID NO: 470231 - RNA, 32 nt, Human
gguucaagugauucuccuaucucagccuccug

SEQ ID NO: 470232 - RNA, 22 nt, Human
gguucaagugauucuccucccu

SEQ ID NO: 470233 - RNA, 24 nt, Human
gguucaagugauucuccucccuca

SEQ ID NO: 470234 - RNA, 32 nt, Human
gguucaagugauucuccucccucagccuccca

SEQ ID NO: 470235 - RNA, 21 nt, Human
gguucaagugauucuccugcc

SEQ ID NO: 470236 - RNA, 24 nt, Human
gguucaagugauucuccugcccca

SEQ ID NO: 470237 - RNA, 22 nt, Human
gguucaagugauucuccugccu

SEQ ID NO: 470238 - RNA, 23 nt, Human
gguucaagugauucuccugccuc

SEQ ID NO: 470239 - RNA, 24 nt, Human
gguucaagugauucuccugccuca

SEQ ID NO: 470240 - RNA, 24 nt, Human
gguucaagugauucuccugccuua

SEQ ID NO: 470241 - RNA, 22 nt, Human
gguucaagugauucuccugcuu

SEQ ID NO: 470242 - RNA, 24 nt, Human
gguucaagugauucuccugcuuca

SEQ ID NO: 470243 - RNA, 23 nt, Human
gguucaagugauucuccugcuuu

SEQ ID NO: 470244 - RNA, 24 nt, Human
gguucaagugauucuccugcuuua

SEQ ID NO: 470245 - RNA, 22 nt, Human
gguucaagugauucuccugucu

SEQ ID NO: 470246 - RNA, 24 nt, Human
gguucaagugauucuccugucuca

SEQ ID NO: 470247 - RNA, 24 nt, Human
gguucaagugauucucguaccuca

SEQ ID NO: 470248 - RNA, 24 nt, Human
gguucaagugauucucgugccuca

SEQ ID NO: 470249 - RNA, 24 nt, Human
gguucaagugauucucgugcuuca

SEQ ID NO: 470250 - RNA, 24 nt, Human
gguucaagugauucucuggccuca

SEQ ID NO: 470251 - RNA, 22 nt, Human
gguucaagugauucucuugccu

SEQ ID NO: 470252 - RNA, 24 nt, Human
gguucaagugauucucuugccuca

SEQ ID NO: 470253 - RNA, 24 nt, Human
gguucaagugauucucuugucuca

SEQ ID NO: 470254 - RNA, 24 nt, Human
gguucaagugauucuuaugccuca

SEQ ID NO: 470255 - RNA, 24 nt, Human
gguucaagugauucuuccaccuca

SEQ ID NO: 470256 - RNA, 22 nt, Human
gguucaagugauucuucugccu

SEQ ID NO: 470257 - RNA, 24 nt, Human
gguucaagugauucuucugccuca

SEQ ID NO: 470258 - RNA, 24 nt, Human
gguucaagugauucuucugcuuca

SEQ ID NO: 470259 - RNA, 25 nt, Human
gguucaagugauucuucuugccuca

SEQ ID NO: 470260 - RNA, 24 nt, Human
gguucaagugauucuugugccuca

SEQ ID NO: 470261 - RNA, 24 nt, Human
gguucaagugauuuuccugccuca

SEQ ID NO: 470262 - RNA, 23 nt, Human
gguucaagugcuucuccagccuc

SEQ ID NO: 470263 - RNA, 22 nt, Human
gguucaagugcuucuccugccu

SEQ ID NO: 470264 - RNA, 24 nt, Human
gguucaagugcuucuccugccuca

SEQ ID NO: 470265 - RNA, 24 nt, Human
gguucaagugguucuccugcccca

SEQ ID NO: 470266 - RNA, 24 nt, Human
gguucaagugguucuccugccuca

SEQ ID NO: 470267 - RNA, 22 nt, Human
gguucaagugguucuccuuccu

SEQ ID NO: 470268 - RNA, 24 nt, Human
gguucaagugguucuccuuccuca

SEQ ID NO: 470269 - RNA, 24 nt, Human
gguucaauagauucuccagccuca

SEQ ID NO: 470270 - RNA, 24 nt, Human
gguucaaucaauucuccuaccuca

SEQ ID NO: 470271 - RNA, 24 nt, Human
gguucaaucgauucuccugccuca

SEQ ID NO: 470272 - RNA, 22 nt, Human
gguucaaucgguuuuccugccu

SEQ ID NO: 470273 - RNA, 24 nt, Human
gguucaaucgguuuuccugccuca

SEQ ID NO: 470274 - RNA, 22 nt, Human
gguucaauugauucuccugccu

SEQ ID NO: 470275 - RNA, 24 nt, Human
gguucaauugauucuccugccuca

SEQ ID NO: 470276 - RNA, 24 nt, Human
gguucacaccauucuccggccuca

SEQ ID NO: 470277 - RNA, 24 nt, Human
gguucacaccauucuccuaccuca

SEQ ID NO: 470278 - RNA, 22 nt, Human
gguucacaccauucuccugccu

SEQ ID NO: 470279 - RNA, 24 nt, Human
gguucacaccauucuccugccuca

SEQ ID NO: 470280 - RNA, 24 nt, Human
gguucacaccauucucuugccuca

SEQ ID NO: 470281 - RNA, 32 nt, Human
gguucacaccuguaauccaagcacuuugggag

SEQ ID NO: 470282 - RNA, 32 nt, Human
gguucacaccuguaaucccaacacuuugggag

SEQ ID NO: 470283 - RNA, 32 nt, Human
gguucacaccuguaaucccagcacuuugggag

SEQ ID NO: 470284 - RNA, 32 nt, Human
gguucacaccuguaauccccgcacuuuggaag

SEQ ID NO: 470285 - RNA, 32 nt, Human
gguucacaccuguaaucccggcacuuugggag

SEQ ID NO: 470286 - RNA, 32 nt, Human
gguucacaccuguaaucccggcauuuugggag

SEQ ID NO: 470287 - RNA, 32 nt, Human
gguucacaccuguaauccuagaacuuugggag

SEQ ID NO: 470288 - RNA, 32 nt, Human
gguucacaccuguaauccuagcaguuugggag

SEQ ID NO: 470289 - RNA, 32 nt, Human
gguucacaccuguaauugcagcacuuugggag

SEQ ID NO: 470290 - RNA, 32 nt, Human
gguucacacguguguucacagagcuacggcca

SEQ ID NO: 470291 - RNA, 32 nt, Human
gguucacagaggcagagugggcagggacaagg

SEQ ID NO: 470292 - RNA, 24 nt, Human
gguucacaucauucuccugccuca

SEQ ID NO: 470293 - RNA, 24 nt, Human
gguucacaugauucuccugccuca

SEQ ID NO: 470294 - RNA, 32 nt, Human
gguucacauuuguaaucccagcacuuuggaag

SEQ ID NO: 470295 - RNA, 24 nt, Human
gguucaccccauucuccuguuuca

SEQ ID NO: 470296 - RNA, 32 nt, Human
gguucacccugucuuugggauguggcccuuga

SEQ ID NO: 470297 - RNA, 32 nt, Human
gguucaccugaacacagaguguauuuucuuau

SEQ ID NO: 470298 - RNA, 24 nt, Human
gguucacgccacucucccgccuca

SEQ ID NO: 470299 - RNA, 23 nt, Human
gguucacgccauccuccugccuc

SEQ ID NO: 470300 - RNA, 24 nt, Human
gguucacgccauccuccugccuca

SEQ ID NO: 470301 - RNA, 24 nt, Human
gguucacgccauuccccugccuca

SEQ ID NO: 470302 - RNA, 24 nt, Human
gguucacgccauucuccugcccca

SEQ ID NO: 470303 - RNA, 22 nt, Human
gguucacgccauucuccugccu

SEQ ID NO: 470304 - RNA, 24 nt, Human
gguucacgccauucuccugccuca

SEQ ID NO: 470305 - RNA, 24 nt, Human
gguucacgccauucuccuggcuca

SEQ ID NO: 470306 - RNA, 24 nt, Human
gguucacgccauucucuugccuca

SEQ ID NO: 470307 - RNA, 24 nt, Human
gguucacgccauuguccugccuca

SEQ ID NO: 470308 - RNA, 24 nt, Human
gguucacgcccuucuccugccuca

SEQ ID NO: 470309 - RNA, 24 nt, Human
gguucacgccguucuccugccuca

SEQ ID NO: 470310 - RNA, 32 nt, Human
gguucacgccuggaaucccagcacuugaggcc

SEQ ID NO: 470311 - RNA, 32 nt, Human
gguucacgccuggaaucccagcauuuugggag

SEQ ID NO: 470312 - RNA, 20 nt, Human
gguucacgccuguaauccca

SEQ ID NO: 470313 - RNA, 32 nt, Human
gguucacgccuguaaucccaauacuuugggag

SEQ ID NO: 470314 - RNA, 32 nt, Human
gguucacgccuguaaucccagcacuuugggag

SEQ ID NO: 470315 - RNA, 32 nt, Human
gguucacgccuguaaucccagcacuuugggau

SEQ ID NO: 470316 - RNA, 32 nt, Human
gguucacgccuguaaucccagcacuuuggggg

SEQ ID NO: 470317 - RNA, 32 nt, Human
gguucacgccuguaaugccagcacuuugggag

SEQ ID NO: 470318 - RNA, 32 nt, Human
gguucacgccuguaauuccagcacuuugagag

SEQ ID NO: 470319 - RNA, 32 nt, Human
gguucacgccuguauucccagcauuuugggag

SEQ ID NO: 470320 - RNA, 32 nt, Human
gguucacgcuuguaaucccaucacuuugggag

SEQ ID NO: 470321 - RNA, 24 nt, Human
gguucacgucauucuccugccuca

SEQ ID NO: 470322 - RNA, 24 nt, Human
gguucacgugauucucaugccuca

SEQ ID NO: 470323 - RNA, 24 nt, Human
gguucacuacaaccuccgccuccu

SEQ ID NO: 470324 - RNA, 32 nt, Human
gguucacuacaaccuccgccuccuggguccaa

SEQ ID NO: 470325 - RNA, 32 nt, Human
gguucacuaucuguuugcuggaagauauacaa

SEQ ID NO: 470326 - RNA, 32 nt, Human
gguucacucauucaacacauacauucaaaaca

SEQ ID NO: 470327 - RNA, 32 nt, Human
gguucacuccaucauauacagcucucugcucc

SEQ ID NO: 470328 - RNA, 32 nt, Human
gguucacugcaacauucaccucccagguucau

SEQ ID NO: 470329 - RNA, 23 nt, Human
gguucacugcaaccuccaccucc

SEQ ID NO: 470330 - RNA, 32 nt, Human
gguucacugcaaccuccaccuccaggguucag

SEQ ID NO: 470331 - RNA, 32 nt, Human
gguucacugcaaccuccaccucccagguucaa

SEQ ID NO: 470332 - RNA, 32 nt, Human
gguucacugcaaccuccaccucccgaguucaa

SEQ ID NO: 470333 - RNA, 32 nt, Human
gguucacugcaaccuccaccucucagauucaa

SEQ ID NO: 470334 - RNA, 32 nt, Human
gguucacugcaaccuccaccucuuggguucaa

SEQ ID NO: 470335 - RNA, 32 nt, Human
gguucacugcaaccuccgcauccgggguucaa

SEQ ID NO: 470336 - RNA, 32 nt, Human
gguucacugcaaccuccgccuccagguucaag

SEQ ID NO: 470337 - RNA, 32 nt, Human
gguucacugcaaccuccgccucccgguucagg

SEQ ID NO: 470338 - RNA, 32 nt, Human
gguucacugcaaccuccgccuccuggauucaa

SEQ ID NO: 470339 - RNA, 32 nt, Human
gguucacugcaaccuccgccucuuggguucaa

SEQ ID NO: 470340 - RNA, 32 nt, Human
gguucacugcaaccucugccacccauguucaa

SEQ ID NO: 470341 - RNA, 23 nt, Human
gguucacugcaaccucugccucc

SEQ ID NO: 470342 - RNA, 32 nt, Human
gguucacugcaaccucugccuccagguucaag

SEQ ID NO: 470343 - RNA, 32 nt, Human
gguucacugcaaccucugccucccaggaucaa

SEQ ID NO: 470344 - RNA, 32 nt, Human
gguucacugcaaccucugccucccagguucaa

SEQ ID NO: 470345 - RNA, 32 nt, Human
gguucacugcaaccucugccucccggguucaa

SEQ ID NO: 470346 - RNA, 24 nt, Human
gguucacugcaaccucugccuccu

SEQ ID NO: 470347 - RNA, 32 nt, Human
gguucacugcaaccucugccuccugggcucaa

SEQ ID NO: 470348 - RNA, 32 nt, Human
gguucacugcaaccucugccuccuggguucaa

SEQ ID NO: 470349 - RNA, 32 nt, Human
gguucacugcaaccucugccucucagguucaa

SEQ ID NO: 470350 - RNA, 32 nt, Human
gguucacugcaaccuuggccuccuagguucaa

SEQ ID NO: 470351 - RNA, 32 nt, Human
gguucacugcaagcuccaccucccggguucac

SEQ ID NO: 470352 - RNA, 32 nt, Human
gguucacugcaaucucgacuuccaguuucagg

SEQ ID NO: 470353 - RNA, 32 nt, Human
gguucacugcacccucugccucccagguucaa

SEQ ID NO: 470354 - RNA, 32 nt, Human
gguucacugcagacuccaccucuccaggcuca

SEQ ID NO: 470355 - RNA, 32 nt, Human
gguucacugcagccucgaccucccaggcucaa

SEQ ID NO: 470356 - RNA, 32 nt, Human
gguucacugcagccucugccuucugggcucac

SEQ ID NO: 470357 - RNA, 32 nt, Human
gguucacugcagccuugaccuccagggcucaa

SEQ ID NO: 470358 - RNA, 32 nt, Human
gguucacugcagcuccugucacaagcugggau

SEQ ID NO: 470359 - RNA, 32 nt, Human
gguucacugcagucuugaccucccaggcuuag

SEQ ID NO: 470360 - RNA, 32 nt, Human
gguucacugcuuugguggaaauugguggaaau

SEQ ID NO: 470361 - RNA, 32 nt, Human
gguucacugguaaucccagcacuuugggaggc

SEQ ID NO: 470362 - RNA, 32 nt, Human
gguucacuuacauauaucauuuaacaucagug

SEQ ID NO: 470363 - RNA, 32 nt, Human
gguucacuucaaccccuaccuccugggcucaa

SEQ ID NO: 470364 - RNA, 32 nt, Human
gguucacuucaaccucaaccucccaggcucaa

SEQ ID NO: 470365 - RNA, 32 nt, Human
gguucagaaaacaucaaaacacugcagcaguu

SEQ ID NO: 470366 - RNA, 32 nt, Human
gguucagaaagccaguacagagggagucgcca

SEQ ID NO: 470367 - RNA, 32 nt, Human
gguucagaccaguaggaaccaggcugggucag

SEQ ID NO: 470368 - RNA, 32 nt, Human
gguucagacucugcaucgaagccugacugaag

SEQ ID NO: 470369 - RNA, 32 nt, Human
gguucagagaaaagagcgacaaggaaaaguua

SEQ ID NO: 470370 - RNA, 32 nt, Human
gguucagagaacaccccacggggcuguuuguc

SEQ ID NO: 470371 - RNA, 32 nt, Human
gguucagagcaucagaugaagacuucauuggg

SEQ ID NO: 470372 - RNA, 32 nt, Human
gguucagagcaugggugcucugagggacaaag

SEQ ID NO: 470373 - RNA, 32 nt, Human
gguucagagccacucuggaggcugggcuggca

SEQ ID NO: 470374 - RNA, 32 nt, Human
gguucagagguugguagcacuuggggagagua

SEQ ID NO: 470375 - RNA, 32 nt, Human
gguucagaguagcugggacuacaggcccacac

SEQ ID NO: 470376 - RNA, 32 nt, Human
gguucagaguuauacaacuaaucccaggugau

SEQ ID NO: 470377 - RNA, 24 nt, Human
gguucagaugauuccccugccuca

SEQ ID NO: 470378 - RNA, 24 nt, Human
gguucagaugauucuucugcuuca

SEQ ID NO: 470379 - RNA, 18 nt, Human
gguucagauucacaccua

SEQ ID NO: 470380 - RNA, 32 nt, Human
gguucagccagggccucccaggaagagugcug

SEQ ID NO: 470381 - RNA, 21 nt, Human
gguucagcccacccaccccca

SEQ ID NO: 470382 - RNA, 32 nt, Human
gguucagccccggggaggagguuccacaggac

SEQ ID NO: 470383 - RNA, 32 nt, Human
gguucaggaaccugcugguucugauacauaaa

SEQ ID NO: 470384 - RNA, 21 nt, Human
gguucaggaagauggccauga

SEQ ID NO: 470385 - RNA, 32 nt, Human
gguucaggagggagaagagcaaagccgcuucc

SEQ ID NO: 470386 - RNA, 24 nt, Human
gguucaggcaauucucccaccuca

SEQ ID NO: 470387 - RNA, 24 nt, Human
gguucaggcaauucuccugccuca

SEQ ID NO: 470388 - RNA, 24 nt, Human
gguucaggcaauucuugugucuca

SEQ ID NO: 470389 - RNA, 24 nt, Human
gguucaggccauucuccugccuca

SEQ ID NO: 470390 - RNA, 32 nt, Human
gguucaggccuguaauuccagcacuuugggag

SEQ ID NO: 470391 - RNA, 22 nt, Human
gguucaggcgauucccgugccu

SEQ ID NO: 470392 - RNA, 22 nt, Human
gguucaggcgauucuccugccu

SEQ ID NO: 470393 - RNA, 24 nt, Human
gguucaggcgauucuccugccuca

SEQ ID NO: 470394 - RNA, 24 nt, Human
gguucaggcgauucuuccgucuca

SEQ ID NO: 470395 - RNA, 24 nt, Human
gguucaggcuauucuccugccuca

SEQ ID NO: 470396 - RNA, 23 nt, Human
gguucaggcuauucuccugcuca

SEQ ID NO: 470397 - RNA, 32 nt, Human
gguucaggcuugcuuugaaccugagcucuuag

SEQ ID NO: 470398 - RNA, 32 nt, Human
gguucagggaaggaggggaaaagggaggugca

SEQ ID NO: 470399 - RNA, 32 nt, Human
gguucagggacccugagggugcauuuacaucc

SEQ ID NO: 470400 - RNA, 22 nt, Human
gguucagggagugagggccuga

SEQ ID NO: 470401 - RNA, 32 nt, Human
gguucagggcagcaaugcugaguucaagaaaa

SEQ ID NO: 470402 - RNA, 22 nt, Human
gguucaggggacucagcccuga

SEQ ID NO: 470403 - RNA, 32 nt, Human
gguucaggggguacaugugcagguuuguuaca

SEQ ID NO: 470404 - RNA, 22 nt, Human
gguucagggguguuucugucuc

SEQ ID NO: 470405 - RNA, 32 nt, Human
gguucaggucacuucggacaccugccauggac

SEQ ID NO: 470406 - RNA, 32 nt, Human
gguucaggugaaguuuucccagcuggaacaau

SEQ ID NO: 470407 - RNA, 21 nt, Human
gguucaggugagaguggcuca

SEQ ID NO: 470408 - RNA, 24 nt, Human
gguucaggugauccucccgccuca

SEQ ID NO: 470409 - RNA, 24 nt, Human
gguucaggugauccuccugccuca

SEQ ID NO: 470410 - RNA, 24 nt, Human
gguucaggugauuauuuugccuca

SEQ ID NO: 470411 - RNA, 23 nt, Human
gguucaggugauucuccauccuc

SEQ ID NO: 470412 - RNA, 22 nt, Human
gguucaggugauucuccucccu

SEQ ID NO: 470413 - RNA, 24 nt, Human
gguucaggugauucuccugacuua

SEQ ID NO: 470414 - RNA, 22 nt, Human
gguucaggugauucuccugccu

SEQ ID NO: 470415 - RNA, 24 nt, Human
gguucaggugauucuccugccuca

SEQ ID NO: 470416 - RNA, 24 nt, Human
gguucaggugauucuccuguccca

SEQ ID NO: 470417 - RNA, 32 nt, Human
gguucaggugauucuccugucccagccuuccg

SEQ ID NO: 470418 - RNA, 24 nt, Human
gguucaggugauucucuugccuca

SEQ ID NO: 470419 - RNA, 24 nt, Human
gguucaggugauucuucuggcuua

SEQ ID NO: 470420 - RNA, 22 nt, Human
gguucagucagccuuccacuga

SEQ ID NO: 470421 - RNA, 32 nt, Human
gguucagucccucccaacucccuccuuguguc

SEQ ID NO: 470422 - RNA, 32 nt, Human
gguucagucuaucacagcucccauggaguuag

SEQ ID NO: 470423 - RNA, 32 nt, Human
gguucaguucucucagccccagguucaaccug

SEQ ID NO: 470424 - RNA, 32 nt, Human
gguucaguuucuucugcgccucaggcugcugg

SEQ ID NO: 470425 - RNA, 32 nt, Human
gguucauaaucagcugucugaccacguuccua

SEQ ID NO: 470426 - RNA, 32 nt, Human
gguucauaggguggagaaggaggaguuaucuc

SEQ ID NO: 470427 - RNA, 32 nt, Human
gguucauaucuguaauccuaacacuuugacag

SEQ ID NO: 470428 - RNA, 32 nt, Human
gguucaucagaagaaagaaaggacaaaaugac

SEQ ID NO: 470429 - RNA, 21 nt, Human
gguucauccucuucugcuuca

SEQ ID NO: 470430 - RNA, 32 nt, Human
gguucaugaggccaccucuuugcucaauccau

SEQ ID NO: 470431 - RNA, 19 nt, Human
gguucaugccaccauggcc

SEQ ID NO: 470432 - RNA, 32 nt, Human
gguucaugccaguaaucccagcacuuucggag

SEQ ID NO: 470433 - RNA, 24 nt, Human
gguucaugccauucuccugcccca

SEQ ID NO: 470434 - RNA, 22 nt, Human
gguucaugccauucuccugccu

SEQ ID NO: 470435 - RNA, 24 nt, Human
gguucaugccauucuccugccuca

SEQ ID NO: 470436 - RNA, 32 nt, Human
gguucaugccauucuccugccucggccuucca

SEQ ID NO: 470437 - RNA, 24 nt, Human
gguucaugccauucuccugcuuca

SEQ ID NO: 470438 - RNA, 24 nt, Human
gguucaugccauuuuccugccuca

SEQ ID NO: 470439 - RNA, 20 nt, Human
gguucaugccuauaauccca

SEQ ID NO: 470440 - RNA, 32 nt, Human
gguucaugccuauaaucccaacacuuuaggag

SEQ ID NO: 470441 - RNA, 32 nt, Human
gguucaugccuauaaucccagcacuuugggag

SEQ ID NO: 470442 - RNA, 32 nt, Human
gguucaugccuauaaucccagcgcuuugggag

SEQ ID NO: 470443 - RNA, 32 nt, Human
gguucaugccuauaaucccagugcuuuacaag

SEQ ID NO: 470444 - RNA, 32 nt, Human
gguucaugccuaucaucccagcacuuugggag

SEQ ID NO: 470445 - RNA, 32 nt, Human
gguucaugccuggaaucccagcacuuugggag

SEQ ID NO: 470446 - RNA, 32 nt, Human
gguucaugccuggaauccuagcacuuugggag

SEQ ID NO: 470447 - RNA, 32 nt, Human
gguucaugccuguaauaccagcguuuugggag

SEQ ID NO: 470448 - RNA, 32 nt, Human
gguucaugccuguaauccagcacuuugggagg

SEQ ID NO: 470449 - RNA, 20 nt, Human
gguucaugccuguaauccca

SEQ ID NO: 470450 - RNA, 32 nt, Human
gguucaugccuguaaucccaaugcuuugggag

SEQ ID NO: 470451 - RNA, 32 nt, Human
gguucaugccuguaaucccagcacuaugggag

SEQ ID NO: 470452 - RNA, 32 nt, Human
gguucaugccuguaaucccagcacuucacuuu

SEQ ID NO: 470453 - RNA, 32 nt, Human
gguucaugccuguaaucccagcacuugggagg

SEQ ID NO: 470454 - RNA, 32 nt, Human
gguucaugccuguaaucccagcacuuuggaag

SEQ ID NO: 470455 - RNA, 32 nt, Human
gguucaugccuguaaucccagcacuuugggag

SEQ ID NO: 470456 - RNA, 32 nt, Human
gguucaugccuguaaucccaguacuuuggaaa

SEQ ID NO: 470457 - RNA, 32 nt, Human
gguucaugccuguaaucccaguacuuugggag

SEQ ID NO: 470458 - RNA, 32 nt, Human
gguucaugccuuaaucccagcacuuugggagg

SEQ ID NO: 470459 - RNA, 22 nt, Human
gguucaugcgauucuccugccu

SEQ ID NO: 470460 - RNA, 24 nt, Human
gguucaugcgauucuccugccuca

SEQ ID NO: 470461 - RNA, 32 nt, Human
gguucaugcuguaaucccaucacuuugggagg

SEQ ID NO: 470462 - RNA, 24 nt, Human
gguucauggcauucuccugccuca

SEQ ID NO: 470463 - RNA, 32 nt, Human
gguucaugggaggcggaggugacuggcuggcu

SEQ ID NO: 470464 - RNA, 24 nt, Human
gguucaugucauucuccugccuca

SEQ ID NO: 470465 - RNA, 32 nt, Human
gguucaugucccaaugaaaacgcucaccucag

SEQ ID NO: 470466 - RNA, 32 nt, Human
gguucaugucuguaaucccagcacuuugugag

SEQ ID NO: 470467 - RNA, 24 nt, Human
gguucaugugauucuccugccuca

SEQ ID NO: 470468 - RNA, 32 nt, Human
gguucauguggacuauggcacucuguagguaa

SEQ ID NO: 470469 - RNA, 19 nt, Human
gguucauguuuaagugggg

SEQ ID NO: 470470 - RNA, 32 nt, Human
gguucauucucaggcugggguggacucagaug

SEQ ID NO: 470471 - RNA, 32 nt, Human
gguucauugcaaccuccgccucccgaguucaa

SEQ ID NO: 470472 - RNA, 32 nt, Human
gguucauugcaaccuccgccuccugcguucgg

SEQ ID NO: 470473 - RNA, 32 nt, Human
gguucauuguagccuccgccucagccucugga

SEQ ID NO: 470474 - RNA, 32 nt, Human
gguucauuuucaucuucuguuuuccaaaugaa

SEQ ID NO: 470475 - RNA, 22 nt, Human
gguuccaaccaggacuuggcuc

SEQ ID NO: 470476 - RNA, 24 nt, Human
gguuccaacgauucuccugccuca

SEQ ID NO: 470477 - RNA, 25 nt, Human
gguuccacagcauacaguuucugca

SEQ ID NO: 470478 - RNA, 23 nt, Human
gguuccacaggccccugaccgca

SEQ ID NO: 470479 - RNA, 22 nt, Human
gguuccacagucccaccagagu

SEQ ID NO: 470480 - RNA, 32 nt, Human
gguuccaccgugugucagaggcugcaaguuua

SEQ ID NO: 470481 - RNA, 32 nt, Human
gguuccacucagcucaccugugcucacucccu

SEQ ID NO: 470482 - RNA, 24 nt, Human
gguuccagaaguggcgccugcucu

SEQ ID NO: 470483 - RNA, 32 nt, Human
gguuccagagagaagcuagaagucccccuuga

SEQ ID NO: 470484 - RNA, 22 nt, Human
gguuccagcaauucuccugccu

SEQ ID NO: 470485 - RNA, 24 nt, Human
gguuccagcaauucuccugccuca

SEQ ID NO: 470486 - RNA, 24 nt, Human
gguuccagcaauucuucugccuca

SEQ ID NO: 470487 - RNA, 32 nt, Human
gguuccagcacuccgugagccauguccagucc

SEQ ID NO: 470488 - RNA, 32 nt, Human
gguuccagcacucugugagccauguccagucc

SEQ ID NO: 470489 - RNA, 32 nt, Human
gguuccagcagccuguuccacacccccacacc

SEQ ID NO: 470490 - RNA, 32 nt, Human
gguuccagccaucagcagacuuccugcucauc

SEQ ID NO: 470491 - RNA, 22 nt, Human
gguuccagcgauucuccugccu

SEQ ID NO: 470492 - RNA, 24 nt, Human
gguuccagcgauucuccugccuca

SEQ ID NO: 470493 - RNA, 32 nt, Human
gguuccagcuacucaagaggcugaggcaggag

SEQ ID NO: 470494 - RNA, 32 nt, Human
gguuccagcuacucaggaggcugaggugggag

SEQ ID NO: 470495 - RNA, 32 nt, Human
gguuccagcuacuugggaggcucaggcaggag

SEQ ID NO: 470496 - RNA, 24 nt, Human
gguuccagcuauuguccugccuca

SEQ ID NO: 470497 - RNA, 32 nt, Human
gguuccagcugcucgggagguugagggagaag

SEQ ID NO: 470498 - RNA, 32 nt, Human
gguuccaggaacagcccuucccccaccacugg

SEQ ID NO: 470499 - RNA, 32 nt, Human
gguuccaggaaugagcucaccuaacagauagc

SEQ ID NO: 470500 - RNA, 21 nt, Human
gguuccaggauccuccacuga

SEQ ID NO: 470501 - RNA, 32 nt, Human
gguuccaggccugggggucgcuuccagcugcc

SEQ ID NO: 470502 - RNA, 32 nt, Human
gguuccagggacugguggagguggauggcagg

SEQ ID NO: 470503 - RNA, 25 nt, Human
gguuccagggagacaagcagcaugu

SEQ ID NO: 470504 - RNA, 32 nt, Human
gguuccagguagacacuagaauccaaaucaac

SEQ ID NO: 470505 - RNA, 23 nt, Human
gguuccagugauucuccugccuc

SEQ ID NO: 470506 - RNA, 24 nt, Human
gguuccagugauucuccugccuca

SEQ ID NO: 470507 - RNA, 32 nt, Human
gguuccaguggguucuggagggagggugggcu

SEQ ID NO: 470508 - RNA, 32 nt, Human
gguuccauacucgucccuccccuccuggcucu

SEQ ID NO: 470509 - RNA, 20 nt, Human
gguuccauccaccaccuugc

SEQ ID NO: 470510 - RNA, 32 nt, Human
gguuccaugcagcccccgaccucccgggcuca

SEQ ID NO: 470511 - RNA, 32 nt, Human
gguuccauggaagaaaaaggccaaggaguuug

SEQ ID NO: 470512 - RNA, 21 nt, Human
gguuccauuccuucugccacc

SEQ ID NO: 470513 - RNA, 20 nt, Human
gguucccaacgucuccugcc

SEQ ID NO: 470514 - RNA, 32 nt, Human
gguucccaagccccaagacccgccucagaacu

SEQ ID NO: 470515 - RNA, 32 nt, Human
gguucccacacucgugcauacacacacaucca

SEQ ID NO: 470516 - RNA, 32 nt, Human
gguucccacaugcauuuaugcacagaagaaaa

SEQ ID NO: 470517 - RNA, 32 nt, Human
gguucccacucagcuucugccggucggcagcc

SEQ ID NO: 470518 - RNA, 32 nt, Human
gguucccacugaggcccuuugcaggauggaac

SEQ ID NO: 470519 - RNA, 32 nt, Human
gguucccacugauccuucugggccacguugug

SEQ ID NO: 470520 - RNA, 31 nt, Human
gguucccagaacagaccuaggaggcggccuc

SEQ ID NO: 470521 - RNA, 32 nt, Human
gguucccagcuccagcccuagucagcuuaacu

SEQ ID NO: 470522 - RNA, 32 nt, Human
gguucccaggagggagaaagagaagacaagag

SEQ ID NO: 470523 - RNA, 32 nt, Human
gguucccaggcaggaaccgcucggccuggcug

SEQ ID NO: 470524 - RNA, 32 nt, Human
gguucccaucaacccccauuucccuagggucc

SEQ ID NO: 470525 - RNA, 21 nt, Human
gguucccauggcccaugccca

SEQ ID NO: 470526 - RNA, 20 nt, Human
gguuccccaccggccuacug

SEQ ID NO: 470527 - RNA, 22 nt, Human
gguuccccagaguccugccccu

SEQ ID NO: 470528 - RNA, 32 nt, Human
gguuccccagggaagcagagccugugugcggg

SEQ ID NO: 470529 - RNA, 32 nt, Human
gguuccccaucaugggcaaggaagggaauucc

SEQ ID NO: 470530 - RNA, 19 nt, Human
gguuccccaucggccucca

SEQ ID NO: 470531 - RNA, 32 nt, Human
gguucccccaggaguauaaacacaaggagcca

SEQ ID NO: 470532 - RNA, 18 nt, Human
gguuccccccaugccucu

SEQ ID NO: 470533 - RNA, 32 nt, Human
gguucccccucagcccgugagcagccaugucc

SEQ ID NO: 470534 - RNA, 32 nt, Human
gguucccccuuucugccagcaguucugguucu

SEQ ID NO: 470535 - RNA, 32 nt, Human
gguuccccgcaaaaucaggcuugagugcagug

SEQ ID NO: 470536 - RNA, 23 nt, Human
gguuccccggaagcuuucccuga

SEQ ID NO: 470537 - RNA, 18 nt, Human
gguuccccucccaccucu

SEQ ID NO: 470538 - RNA, 18 nt, Human
gguuccccuucccuccuc

SEQ ID NO: 470539 - RNA, 18 nt, Human
gguuccccuuccucccuc

SEQ ID NO: 470540 - RNA, 32 nt, Human
gguucccgacuucuuugcuuugggagaauuug

SEQ ID NO: 470541 - RNA, 24 nt, Human
gguucccgccauucuucugccuca

SEQ ID NO: 470542 - RNA, 32 nt, Human
gguucccgcccgugccucucccuccacaccuc

SEQ ID NO: 470543 - RNA, 23 nt, Human
gguucccgcucaccgccgccgcc

SEQ ID NO: 470544 - RNA, 32 nt, Human
gguucccggaagggacacuaggaggacgagcg

SEQ ID NO: 470545 - RNA, 32 nt, Human
gguucccgggacugcagguccaggcaggguag

SEQ ID NO: 470546 - RNA, 32 nt, Human
gguucccgugucugagccuggaagaggcucgg

SEQ ID NO: 470547 - RNA, 32 nt, Human
gguucccuccacccagguccccaucacgccau

SEQ ID NO: 470548 - RNA, 32 nt, Human
gguucccugagcuauaugcacacucacaccuc

SEQ ID NO: 470549 - RNA, 32 nt, Human
gguucccugagcugugggauucugcacuggug

SEQ ID NO: 470550 - RNA, 32 nt, Human
gguucccugcaacccccgcccuccagcccacc

SEQ ID NO: 470551 - RNA, 32 nt, Human
gguucccugcagccucaugccuggccccuuga

SEQ ID NO: 470552 - RNA, 32 nt, Human
gguucccugcagccuugcucugcauaggcucu

SEQ ID NO: 470553 - RNA, 18 nt, Human
gguucccugggccaggua

SEQ ID NO: 470554 - RNA, 23 nt, Human
gguucccuggucucuugcacuga

SEQ ID NO: 470555 - RNA, 32 nt, Human
gguucccuuccacgcugugaagcuuuguucuu

SEQ ID NO: 470556 - RNA, 32 nt, Human
gguucccuuucuucccuacccuugccacuccc

SEQ ID NO: 470557 - RNA, 32 nt, Human
gguuccgcagaugcagagguugagguggcugc

SEQ ID NO: 470558 - RNA, 19 nt, Human
gguuccgccuguaauccca

SEQ ID NO: 470559 - RNA, 21 nt, Human
gguuccgccuguaaucccagc

SEQ ID NO: 470560 - RNA, 32 nt, Human
gguuccgccuguaaucccagcacuuugggagg

SEQ ID NO: 470561 - RNA, 32 nt, Human
gguuccggcgaggccugagcugugcugucguc

SEQ ID NO: 470562 - RNA, 22 nt, Human
gguuccggcuccgccacccuca

SEQ ID NO: 470563 - RNA, 32 nt, Human
gguuccggguaggagcuaggugacccucggcu

SEQ ID NO: 470564 - RNA, 32 nt, Human
gguuccggguggaggcuugcagcugcuuccag

SEQ ID NO: 470565 - RNA, 32 nt, Human
gguuccggugauguguuuagggaucuucucug

SEQ ID NO: 470566 - RNA, 24 nt, Human
gguuccggugauucucaugccuca

SEQ ID NO: 470567 - RNA, 32 nt, Human
gguuccgugccagagucgggggccacacgagg

SEQ ID NO: 470568 - RNA, 32 nt, Human
gguuccguggcugcaaggaagggaaacagucu

SEQ ID NO: 470569 - RNA, 32 nt, Human
gguuccuagaggcagagguugaagauggaaga

SEQ ID NO: 470570 - RNA, 32 nt, Human
gguuccuaucaccucuuguccucaguuucggu

SEQ ID NO: 470571 - RNA, 32 nt, Human
gguuccucagugugggacaugcagcaugugga

SEQ ID NO: 470572 - RNA, 32 nt, Human
gguuccucauggcuguuaucugucuuuaugau

SEQ ID NO: 470573 - RNA, 32 nt, Human
gguuccucccaggagcucuggagguacaggau

SEQ ID NO: 470574 - RNA, 21 nt, Human
gguuccuccccucaccccaua

SEQ ID NO: 470575 - RNA, 31 nt, Human
gguuccucccucucuggccugugccgccuca

SEQ ID NO: 470576 - RNA, 32 nt, Human
gguuccucuccucaccccacaugccugaaaag

SEQ ID NO: 470577 - RNA, 32 nt, Human
gguuccucuccuccuuccugaugucugccauu

SEQ ID NO: 470578 - RNA, 32 nt, Human
gguuccucucuccucucccccucucuccuccc

SEQ ID NO: 470579 - RNA, 32 nt, Human
gguuccucugcucaccgcccaucaggguucuc

SEQ ID NO: 470580 - RNA, 32 nt, Human
gguuccucuggcccucuccaggguguuuucca

SEQ ID NO: 470581 - RNA, 21 nt, Human
gguuccugaaucuuccugcca

SEQ ID NO: 470582 - RNA, 32 nt, Human
gguuccugacggccaggcagggaugcuaaggu

SEQ ID NO: 470583 - RNA, 25 nt, Human
gguuccugaggggugauuugggaca

SEQ ID NO: 470584 - RNA, 32 nt, Human
gguuccugcaccuggaauccaguguguccaag

SEQ ID NO: 470585 - RNA, 32 nt, Human
gguuccugcagcagccacugcccugcccaauc

SEQ ID NO: 470586 - RNA, 32 nt, Human
gguuccugccuccuuuuuccguucugguuuuu

SEQ ID NO: 470587 - RNA, 29 nt, Human
gguuccuggcugcugccaugucucagaug

SEQ ID NO: 470588 - RNA, 32 nt, Human
gguuccugggaugagccauacccuggaacugg

SEQ ID NO: 470589 - RNA, 32 nt, Human
gguuccuggggcugcagccagccugggacuuu

SEQ ID NO: 470590 - RNA, 32 nt, Human
gguuccuguaugguggaagcugggugagccaa

SEQ ID NO: 470591 - RNA, 32 nt, Human
gguuccuguguguuuggcccgggcacaauccc

SEQ ID NO: 470592 - RNA, 32 nt, Human
gguuccuuaucugucacaccugugccuccuca

SEQ ID NO: 470593 - RNA, 32 nt, Human
gguuccuucaauuggcauuuuccccagaauug

SEQ ID NO: 470594 - RNA, 32 nt, Human
gguuccuucccagcacucccagccugggauaa

SEQ ID NO: 470595 - RNA, 32 nt, Human
gguuccuuccuuggagccauaguuacccugcc

SEQ ID NO: 470596 - RNA, 32 nt, Human
gguuccuucucccuuuccuguccccauguuuc

SEQ ID NO: 470597 - RNA, 23 nt, Human
gguuccuugaguucuccugucuc

SEQ ID NO: 470598 - RNA, 32 nt, Human
gguuccuugccugaaaaaugaaagaggcgcug

SEQ ID NO: 470599 - RNA, 32 nt, Human
gguuccuuguauugcauuucuuugcacauauu

SEQ ID NO: 470600 - RNA, 19 nt, Human
gguuccuuucagugucaua

SEQ ID NO: 470601 - RNA, 32 nt, Human
gguuccuuuccaggaagggaggcaggagcacc

SEQ ID NO: 470602 - RNA, 32 nt, Human
gguuccuuuggcuccugcugagguccccuuuc

SEQ ID NO: 470603 - RNA, 32 nt, Human
gguucgaaaccagccaggccaacuuggcaaaa

SEQ ID NO: 470604 - RNA, 32 nt, Human
gguucgagacccaaacccccaaaauccaaaac

SEQ ID NO: 470605 - RNA, 24 nt, Human
gguucgagcaauucuccugccuca

SEQ ID NO: 470606 - RNA, 23 nt, Human
gguucgagcgauucuccugccuc

SEQ ID NO: 470607 - RNA, 24 nt, Human
gguucgagcgauucuccugccuca

SEQ ID NO: 470608 - RNA, 32 nt, Human
gguucgaggaauaggcauuggaggugguuucu

SEQ ID NO: 470609 - RNA, 20 nt, Human
gguucgaggccucuugccuu

SEQ ID NO: 470610 - RNA, 32 nt, Human
gguucgagggacuuaguggaguucucaucccu

SEQ ID NO: 470611 - RNA, 20 nt, Human
gguucgaucauaguaucaua

SEQ ID NO: 470612 - RNA, 32 nt, Human
gguucgauuccccuguuggcauaugauuauuu

SEQ ID NO: 470613 - RNA, 22 nt, Human
gguucgcaagaagcauacacug

SEQ ID NO: 470614 - RNA, 24 nt, Human
gguucgcaccauucuccugccuca

SEQ ID NO: 470615 - RNA, 32 nt, Human
gguucgcagaagcagcagugaagagaagcuac

SEQ ID NO: 470616 - RNA, 32 nt, Human
gguucgcgcucucgccgccucugagggaauug

SEQ ID NO: 470617 - RNA, 22 nt, Human
gguucgcggguucuccgccuca

SEQ ID NO: 470618 - RNA, 22 nt, Human
gguucggaaucacccgaucaca

SEQ ID NO: 470619 - RNA, 24 nt, Human
gguucgggcaauucuccugccuua

SEQ ID NO: 470620 - RNA, 24 nt, Human
gguucgggcaguucuccugccuca

SEQ ID NO: 470621 - RNA, 22 nt, Human
gguucgggcgagucuccugccu

SEQ ID NO: 470622 - RNA, 24 nt, Human
gguucgggcgagucuccugccuca

SEQ ID NO: 470623 - RNA, 32 nt, Human
gguucgggcucgcgagucuccgucugggguag

SEQ ID NO: 470624 - RNA, 23 nt, Human
gguucgggcuucaccgccuggcc

SEQ ID NO: 470625 - RNA, 24 nt, Human
gguucgggugauucuccugccuca

SEQ ID NO: 470626 - RNA, 23 nt, Human
gguucgggugguucuccugccuc

SEQ ID NO: 470627 - RNA, 32 nt, Human
gguucggguguuucaccaugccagcacagcgc

SEQ ID NO: 470628 - RNA, 23 nt, Human
gguucggugauucuccugccuca

SEQ ID NO: 470629 - RNA, 32 nt, Human
gguucgguuucugcaucuucuggaucaauuca

SEQ ID NO: 470630 - RNA, 32 nt, Human
gguucgucgccgcggcgcugcggcucgccucc

SEQ ID NO: 470631 - RNA, 32 nt, Human
gguucgugcccugcugcggccagccugacuag

SEQ ID NO: 470632 - RNA, 32 nt, Human
gguucgugccuguaaucccagcucuuugggag

SEQ ID NO: 470633 - RNA, 32 nt, Human
gguucgugggcuguggaggcgacggagcaggg

SEQ ID NO: 470634 - RNA, 32 nt, Human
gguucguggucucccugacuucagaagugaag

SEQ ID NO: 470635 - RNA, 32 nt, Human
gguucgugguuaucccauuguggaaauucauc

SEQ ID NO: 470636 - RNA, 19 nt, Human
gguucguuguccacaucca

SEQ ID NO: 470637 - RNA, 32 nt, Human
gguucuaaaaucccaaaccccaaacagccugg

SEQ ID NO: 470638 - RNA, 31 nt, Human
gguucuaaagugucccgcggaguacagauaa

SEQ ID NO: 470639 - RNA, 32 nt, Human
gguucuaccacuggcauaugacuugggcaagu

SEQ ID NO: 470640 - RNA, 32 nt, Human
gguucuagaacugcccaccucuuccauuucag

SEQ ID NO: 470641 - RNA, 32 nt, Human
gguucuagacuucuucccugagguucucagaa

SEQ ID NO: 470642 - RNA, 19 nt, Human
gguucuagcauuccauaua

SEQ ID NO: 470643 - RNA, 24 nt, Human
gguucuagcgagucuccucccuca

SEQ ID NO: 470644 - RNA, 32 nt, Human
gguucuagcuggcaaggcccacaucucagagc

SEQ ID NO: 470645 - RNA, 32 nt, Human
gguucuagggcugggagcugggauuugaacca

SEQ ID NO: 470646 - RNA, 32 nt, Human
gguucuaguucucauacagaacuccagaauuu

SEQ ID NO: 470647 - RNA, 32 nt, Human
gguucucaaugguaacgagcuccauacugcug

SEQ ID NO: 470648 - RNA, 32 nt, Human
gguucucacauccagucuuugcacuucagcug

SEQ ID NO: 470649 - RNA, 24 nt, Human
gguucucaccauucuccugccuca

SEQ ID NO: 470650 - RNA, 19 nt, Human
gguucucagagccugccuc

SEQ ID NO: 470651 - RNA, 32 nt, Human
gguucucagcuuuccuuaagcgacccagcagc

SEQ ID NO: 470652 - RNA, 32 nt, Human
gguucucaggcagggccccugcuguguccgug

SEQ ID NO: 470653 - RNA, 32 nt, Human
gguucucaggggacagggagagcaagagguca

SEQ ID NO: 470654 - RNA, 32 nt, Human
gguucucaucauuucuccucuggauucaucug

SEQ ID NO: 470655 - RNA, 32 nt, Human
gguucucauuucucagcucuuucccuuaucac

SEQ ID NO: 470656 - RNA, 32 nt, Human
gguucuccaugccuauaaucccggcuacucgg

SEQ ID NO: 470657 - RNA, 32 nt, Human
gguucucccagcacgcagauggagaucugaga

SEQ ID NO: 470658 - RNA, 32 nt, Human
gguucucccaggagcucagggccugucagacc

SEQ ID NO: 470659 - RNA, 32 nt, Human
gguucuccugccuggaaucaagugaugcgugu

SEQ ID NO: 470660 - RNA, 32 nt, Human
gguucucgcucucucuuugccugcugccaugu

SEQ ID NO: 470661 - RNA, 32 nt, Human
gguucucgucugcagacccucuggaccugguc

SEQ ID NO: 470662 - RNA, 32 nt, Human
gguucucguucucccagcuccagccuuucuag

SEQ ID NO: 470663 - RNA, 32 nt, Human
gguucucuauuugagucuguguuuucaauaaa

SEQ ID NO: 470664 - RNA, 32 nt, Human
gguucucucagccccaccucagcaggucucca

SEQ ID NO: 470665 - RNA, 32 nt, Human
gguucucugaacuacauacccccagcugugaa

SEQ ID NO: 470666 - RNA, 32 nt, Human
gguucucugcagccacacaaucagcccggcuc

SEQ ID NO: 470667 - RNA, 32 nt, Human
gguucucugcagcccaggacugugcaugugug

SEQ ID NO: 470668 - RNA, 32 nt, Human
gguucucugcucccucccagcuccugaaccug

SEQ ID NO: 470669 - RNA, 32 nt, Human
gguucucugcuugugaaguggcucgagcucuu

SEQ ID NO: 470670 - RNA, 16 nt, Human
gguucucuggguccag

SEQ ID NO: 470671 - RNA, 32 nt, Human
gguucucugucugggguuggcucucuuaaccc

SEQ ID NO: 470672 - RNA, 32 nt, Human
gguucucuguuccccucagccccuggugcauu

SEQ ID NO: 470673 - RNA, 32 nt, Human
gguucucuucauuccuugggccagcuucucag

SEQ ID NO: 470674 - RNA, 32 nt, Human
gguucucuuccucuggucccuucuggggacuc

SEQ ID NO: 470675 - RNA, 32 nt, Human
gguucucuugagcaagucuguuccuucuggaa

SEQ ID NO: 470676 - RNA, 32 nt, Human
gguucucuuuagcuucugguucuugaaagaaa

SEQ ID NO: 470677 - RNA, 32 nt, Human
gguucugaaccuagauguuggccaagggagca

SEQ ID NO: 470678 - RNA, 32 nt, Human
gguucugaacuaaguguaaucaucucaccaaa

SEQ ID NO: 470679 - RNA, 32 nt, Human
gguucugaagaaaauggaugugcaaaggcuug

SEQ ID NO: 470680 - RNA, 32 nt, Human
gguucugaaguucuucaguacauugcuguagg

SEQ ID NO: 470681 - RNA, 32 nt, Human
gguucugacuccagaucccuggcuccucagcc

SEQ ID NO: 470682 - RNA, 32 nt, Human
gguucugagaugcagugagggaagaaaggauc

SEQ ID NO: 470683 - RNA, 32 nt, Human
gguucugaggggacaggcugaccuggaggacc

SEQ ID NO: 470684 - RNA, 32 nt, Human
gguucugaguucugagauauucacaagucccc

SEQ ID NO: 470685 - RNA, 32 nt, Human
gguucugaguuugagaagggaucuucuaaagg

SEQ ID NO: 470686 - RNA, 32 nt, Human
gguucugaucuugccuucauguggaccuucau

SEQ ID NO: 470687 - RNA, 23 nt, Human
gguucugcaaccaguucauaugu

SEQ ID NO: 470688 - RNA, 32 nt, Human
gguucugcaaggggugacucauugcauagagg

SEQ ID NO: 470689 - RNA, 32 nt, Human
gguucugcaauaucucugaggugcaaagaaug

SEQ ID NO: 470690 - RNA, 32 nt, Human
gguucugcagcagaaaggggagaggacacagg

SEQ ID NO: 470691 - RNA, 24 nt, Human
gguucugcagcgucuccugcucca

SEQ ID NO: 470692 - RNA, 32 nt, Human
gguucugcagggccuuccuccuccagguuggg

SEQ ID NO: 470693 - RNA, 32 nt, Human
gguucugcaugaccuagccacugcuggggguu

SEQ ID NO: 470694 - RNA, 24 nt, Human
gguucugcauuaaccccugccuca

SEQ ID NO: 470695 - RNA, 32 nt, Human
gguucugcauuagauuugaugacucuuuuucu

SEQ ID NO: 470696 - RNA, 32 nt, Human
gguucugccaccaccaggaggauuucaagaaa

SEQ ID NO: 470697 - RNA, 32 nt, Human
gguucugccuguaauugagccucucugaugau

SEQ ID NO: 470698 - RNA, 32 nt, Human
gguucugcggauaaaggaggaauaagacagag

SEQ ID NO: 470699 - RNA, 32 nt, Human
gguucugcucuuccucccuauguugaucagug

SEQ ID NO: 470700 - RNA, 32 nt, Human
gguucugcucuucuugccucuggagagcccca

SEQ ID NO: 470701 - RNA, 32 nt, Human
gguucugcugacccucagucuccuggacccua

SEQ ID NO: 470702 - RNA, 32 nt, Human
gguucugcuguuugcucugauccuguugauau

SEQ ID NO: 470703 - RNA, 32 nt, Human
gguucuggagguuggagguuccgcucagugac

SEQ ID NO: 470704 - RNA, 32 nt, Human
gguucuggauuaucuggguggguccuuaggga

SEQ ID NO: 470705 - RNA, 32 nt, Human
gguucuggcaccaccugagcccacugggcauc

SEQ ID NO: 470706 - RNA, 32 nt, Human
gguucuggccuccagaccaggguaagggcagg

SEQ ID NO: 470707 - RNA, 32 nt, Human
gguucugggaggcgagggcucaggaacagccc

SEQ ID NO: 470708 - RNA, 32 nt, Human
gguucugggaggugagggcucaggaacagccc

SEQ ID NO: 470709 - RNA, 32 nt, Human
gguucugggccuuccuguggagcugagcugcc

SEQ ID NO: 470710 - RNA, 33 nt, Human
gguucugggguuuaccuguucggccuccugccu

SEQ ID NO: 470711 - RNA, 32 nt, Human
gguucugggucagcuucuuuuaccucaauuuu

SEQ ID NO: 470712 - RNA, 32 nt, Human
gguucuggguccuggagugcaggccugucaac

SEQ ID NO: 470713 - RNA, 32 nt, Human
gguucugguucuuggcugauguucuguaucuu

SEQ ID NO: 470714 - RNA, 32 nt, Human
gguucugucacaugaccuauccuaaccgaggc

SEQ ID NO: 470715 - RNA, 32 nt, Human
gguucuguccagagcaguucaggcuggggcug

SEQ ID NO: 470716 - RNA, 32 nt, Human
gguucuguccccgaggccggagugcaauggcg

SEQ ID NO: 470717 - RNA, 32 nt, Human
gguucugucugugucaaugucccagcgggaac

SEQ ID NO: 470718 - RNA, 22 nt, Human
gguucugugagcccaucgggga

SEQ ID NO: 470719 - RNA, 21 nt, Human
gguucugugcaucaccacagu

SEQ ID NO: 470720 - RNA, 21 nt, Human
gguucuguguuugcugcggug

SEQ ID NO: 470721 - RNA, 32 nt, Human
gguucuguuccagauaaacagaguaacugacc

SEQ ID NO: 470722 - RNA, 32 nt, Human
gguucuguuucccaggcuggagugcaguggug

SEQ ID NO: 470723 - RNA, 21 nt, Human
gguucuguuugucucuuuuca

SEQ ID NO: 470724 - RNA, 24 nt, Human
gguucuuaagggauucuccguuuu

SEQ ID NO: 470725 - RNA, 32 nt, Human
gguucuuaaugauugaccacaagcagaucuuu

SEQ ID NO: 470726 - RNA, 32 nt, Human
gguucuuacccccuuuuccuucucugaagugu

SEQ ID NO: 470727 - RNA, 32 nt, Human
gguucuuagcuugucugugaucucugcugggg

SEQ ID NO: 470728 - RNA, 32 nt, Human
gguucuuaguuugccuggaauuguucuguacc

SEQ ID NO: 470729 - RNA, 32 nt, Human
gguucuuauccaaauacccaaccugugaagau

SEQ ID NO: 470730 - RNA, 32 nt, Human
gguucuuccagccucaggucccagcugucuca

SEQ ID NO: 470731 - RNA, 32 nt, Human
gguucuuccaggugauggugugcagccaccgc

SEQ ID NO: 470732 - RNA, 32 nt, Human
gguucuucccuccugcccucaauuguuuuucu

SEQ ID NO: 470733 - RNA, 32 nt, Human
gguucuuccugacugcuuucuccaacuguuca

SEQ ID NO: 470734 - RNA, 32 nt, Human
gguucuucuacacugcugggaucucuguuuua

SEQ ID NO: 470735 - RNA, 32 nt, Human
gguucuucuaucuccccucuauacuuccucug

SEQ ID NO: 470736 - RNA, 32 nt, Human
gguucuucucucaugguagcucuccaacagca

SEQ ID NO: 470737 - RNA, 32 nt, Human
gguucuucugugacaugugccucccagcagug

SEQ ID NO: 470738 - RNA, 32 nt, Human
gguucuugaccugguggauguggcugcagucc

SEQ ID NO: 470739 - RNA, 32 nt, Human
gguucuugagcagagauugggaggacuuuacu

SEQ ID NO: 470740 - RNA, 32 nt, Human
gguucuugagccagccaggcccugccaguggg

SEQ ID NO: 470741 - RNA, 32 nt, Human
gguucuugaugucauguacuuccuguguacuc

SEQ ID NO: 470742 - RNA, 22 nt, Human
gguucuugauucuccuguguca

SEQ ID NO: 470743 - RNA, 18 nt, Human
gguucuugcccugagcca

SEQ ID NO: 470744 - RNA, 32 nt, Human
gguucuugcuauauugccccaggcuggucucg

SEQ ID NO: 470745 - RNA, 32 nt, Human
gguucuugcucucccaggcuggagugcagugg

SEQ ID NO: 470746 - RNA, 32 nt, Human
gguucuuggaaagauaaggaccagaacaagcu

SEQ ID NO: 470747 - RNA, 32 nt, Human
gguucuuggaagagguggaguuuggagaggcu

SEQ ID NO: 470748 - RNA, 32 nt, Human
gguucuuggccaggcuguaggugguggcucac

SEQ ID NO: 470749 - RNA, 32 nt, Human
gguucuugggagagaggggaagagucgggacu

SEQ ID NO: 470750 - RNA, 32 nt, Human
gguucuugggaggaagggagaaaagaagcaga

SEQ ID NO: 470751 - RNA, 32 nt, Human
gguucuuggguagccuuuggggugaggggacu

SEQ ID NO: 470752 - RNA, 31 nt, Human
gguucuugucuccauagccuguugaguguuc

SEQ ID NO: 470753 - RNA, 32 nt, Human
gguucuuugcugcauucugccucucuaggacc

SEQ ID NO: 470754 - RNA, 32 nt, Human
gguucuuugguuacugcacuguaguuucaaau

SEQ ID NO: 470755 - RNA, 32 nt, Human
gguucuuuuccuucuccuccgccagaggccac

SEQ ID NO: 470756 - RNA, 32 nt, Human
gguucuuuugggguaauguacacaccuaacug

SEQ ID NO: 470757 - RNA, 32 nt, Human
gguucuuuuuaagaguucagcugcgagauauc

SEQ ID NO: 470758 - RNA, 32 nt, Human
gguucuuuuuauuuuaaccaguuauuuuuauu

SEQ ID NO: 470759 - RNA, 32 nt, Human
gguugaaaagaaugugaacacuguagaaguua

SEQ ID NO: 470760 - RNA, 32 nt, Human
gguugaaagaagcgcagggaagagacugggug

SEQ ID NO: 470761 - RNA, 32 nt, Human
gguugaacccaggaggcggagguugcagugag

SEQ ID NO: 470762 - RNA, 32 nt, Human
gguugaacuggagucuugagugcgcugcgguc

SEQ ID NO: 470763 - RNA, 32 nt, Human
gguugaagaaagaggaucuggcugaaagaccc

SEQ ID NO: 470764 - RNA, 32 nt, Human
gguugaagaaguggccagaaaaagaaaaguau

SEQ ID NO: 470765 - RNA, 24 nt, Human
gguugaagagguucuccugccuca

SEQ ID NO: 470766 - RNA, 32 nt, Human
gguugaagcaauucuucugccucagccuccgg

SEQ ID NO: 470767 - RNA, 32 nt, Human
gguugaagcccaccuucucuuuucacauagga

SEQ ID NO: 470768 - RNA, 22 nt, Human
gguugaagcgauucuccugccu

SEQ ID NO: 470769 - RNA, 24 nt, Human
gguugaagcgauucuccugccuca

SEQ ID NO: 470770 - RNA, 32 nt, Human
gguugaagcugcagugaguugugaucaugcca

SEQ ID NO: 470771 - RNA, 20 nt, Human
gguugaagggccacaaggug

SEQ ID NO: 470772 - RNA, 24 nt, Human
gguugaagugauacuccugccuca

SEQ ID NO: 470773 - RNA, 24 nt, Human
gguugaagugauucuccugccuca

SEQ ID NO: 470774 - RNA, 24 nt, Human
gguugaagugauucucgugccuca

SEQ ID NO: 470775 - RNA, 32 nt, Human
gguugaagugauucucgugucucagucuuccg

SEQ ID NO: 470776 - RNA, 24 nt, Human
gguugaagugauucucuugccuca

SEQ ID NO: 470777 - RNA, 32 nt, Human
gguugaauacuugccuaaggcgguaagaaauc

SEQ ID NO: 470778 - RNA, 32 nt, Human
gguugaaucucuuccugagggcagagcucuua

SEQ ID NO: 470779 - RNA, 32 nt, Human
gguugaaucuggagaagaaaagggagauuuga

SEQ ID NO: 470780 - RNA, 32 nt, Human
gguugaaugccacagauucccuuuuaaacuua

SEQ ID NO: 470781 - RNA, 24 nt, Human
gguugacagagcaagacuccgucu

SEQ ID NO: 470782 - RNA, 24 nt, Human
gguugacagagugagaccccgucu

SEQ ID NO: 470783 - RNA, 24 nt, Human
gguugacagagugagacuccgucu

SEQ ID NO: 470784 - RNA, 32 nt, Human
gguugacagcuaggcuggaggcucaugguuuc

SEQ ID NO: 470785 - RNA, 32 nt, Human
gguugacaucuucauuucugggcuacuacuau

SEQ ID NO: 470786 - RNA, 32 nt, Human
gguugacaugauacacuauggccuuagaaaag

SEQ ID NO: 470787 - RNA, 32 nt, Human
gguugaccagaacucaccgacacagcaggaga

SEQ ID NO: 470788 - RNA, 32 nt, Human
gguugacccagaggauccugauaaugugcaau

SEQ ID NO: 470789 - RNA, 32 nt, Human
gguugacccugacacacaagcagaaagugagg

SEQ ID NO: 470790 - RNA, 32 nt, Human
gguugacccugcacucguccaacuugggccaa

SEQ ID NO: 470791 - RNA, 32 nt, Human
gguugaccuaggcugaauauccacuuuguuuu

SEQ ID NO: 470792 - RNA, 32 nt, Human
gguugacucaacuacuggaaagcccaguaaug

SEQ ID NO: 470793 - RNA, 18 nt, Human
gguugacucucucuggga

SEQ ID NO: 470794 - RNA, 32 nt, Human
gguugagaacaacagucaaacccucuucuucc

SEQ ID NO: 470795 - RNA, 32 nt, Human
gguugagaaggagagaaaaagguggcaggaau

SEQ ID NO: 470796 - RNA, 32 nt, Human
gguugagacagggccuuucucuucauuacuuc

SEQ ID NO: 470797 - RNA, 32 nt, Human
gguugagaccagcagagacugcugugaguuuc

SEQ ID NO: 470798 - RNA, 32 nt, Human
gguugagacgcacucccacccugggugcugca

SEQ ID NO: 470799 - RNA, 32 nt, Human
gguugagaggagaaaagggaagaaaagucggg

SEQ ID NO: 470800 - RNA, 32 nt, Human
gguugagauccaguguggccaugccagcuagu

SEQ ID NO: 470801 - RNA, 19 nt, Human
gguugagcacuucaggaua

SEQ ID NO: 470802 - RNA, 32 nt, Human
gguugagcccaggagguuguggcugcagugag

SEQ ID NO: 470803 - RNA, 32 nt, Human
gguugagcccaggaguucgaagcugcagggac

SEQ ID NO: 470804 - RNA, 32 nt, Human
gguugagccucuacuuucuucuugccaccuuu

SEQ ID NO: 470805 - RNA, 32 nt, Human
gguugagcuuaggagguugaggcugcagugag

SEQ ID NO: 470806 - RNA, 32 nt, Human
gguugaggaaacaaacaugacccuaaaucuug

SEQ ID NO: 470807 - RNA, 32 nt, Human
gguugaggaggagccaguuuuagguucgaaga

SEQ ID NO: 470808 - RNA, 32 nt, Human
gguugaggagggggaggagaccccugagaccc

SEQ ID NO: 470809 - RNA, 18 nt, Human
gguugaggcacagccugu

SEQ ID NO: 470810 - RNA, 32 nt, Human
gguugaggccaggaguuugaggcugcagugag

SEQ ID NO: 470811 - RNA, 32 nt, Human
gguugaggcugcagagaguggugaucaugccu

SEQ ID NO: 470812 - RNA, 32 nt, Human
gguugaggcugugggggcagcagaucaggagc

SEQ ID NO: 470813 - RNA, 32 nt, Human
gguugagggaggcaguaauaugaagugacugc

SEQ ID NO: 470814 - RNA, 32 nt, Human
gguugagguggguggaucaugaggucaggagu

SEQ ID NO: 470815 - RNA, 32 nt, Human
gguugagguuucaaaccucccuuuccaaaugc

SEQ ID NO: 470816 - RNA, 32 nt, Human
gguugaguaggcuccagcuaggaaggggccag

SEQ ID NO: 470817 - RNA, 32 nt, Human
gguugauaggacugcuuggguccuccacuguc

SEQ ID NO: 470818 - RNA, 32 nt, Human
gguugauauuuuuauaguggcguguaaucucc

SEQ ID NO: 470819 - RNA, 32 nt, Human
gguugaucucagacugcugugcuagcaaucag

SEQ ID NO: 470820 - RNA, 16 nt, Human
gguugaucucaggaua

SEQ ID NO: 470821 - RNA, 32 nt, Human
gguugaugauaccaccaccaccugccuaccca

SEQ ID NO: 470822 - RNA, 32 nt, Human
gguugauggcgaguggugcugaagggacagcu

SEQ ID NO: 470823 - RNA, 32 nt, Human
gguugauuacacaaugccuuguacaugauaua

SEQ ID NO: 470824 - RNA, 32 nt, Human
gguugauuacuccuuagagagcuccccacugc

SEQ ID NO: 470825 - RNA, 18 nt, Human
gguugauuucuuucuuca

SEQ ID NO: 470826 - RNA, 32 nt, Human
gguugauuucuuucuucagcuuucugacaugu

SEQ ID NO: 470827 - RNA, 32 nt, Human
gguugauuuuugucccucugcgcuugcucccc

SEQ ID NO: 470828 - RNA, 32 nt, Human
gguugcaaaguuagccgagaucacgccaucac

SEQ ID NO: 470829 - RNA, 32 nt, Human
gguugcaacacuguacuccagccugggcaaca

SEQ ID NO: 470830 - RNA, 21 nt, Human
gguugcaaccucucuuccucu

SEQ ID NO: 470831 - RNA, 32 nt, Human
gguugcaaccucucuuccucugggacuuuugc

SEQ ID NO: 470832 - RNA, 32 nt, Human
gguugcaaugaagcggagguugcagugagccg

SEQ ID NO: 470833 - RNA, 23 nt, Human
gguugcaaugccucacuuugccu

SEQ ID NO: 470834 - RNA, 32 nt, Human
gguugcaauguuuugcucccagaagagaauca

SEQ ID NO: 470835 - RNA, 32 nt, Human
gguugcacacuggccucuguggaggucaggga

SEQ ID NO: 470836 - RNA, 32 nt, Human
gguugcaccacuacacuguagccugggugaca

SEQ ID NO: 470837 - RNA, 32 nt, Human
gguugcaccacugcucuccaggcuugagugac

SEQ ID NO: 470838 - RNA, 32 nt, Human
gguugcaccacuguacuccagccugggcgaua

SEQ ID NO: 470839 - RNA, 32 nt, Human
gguugcaccauuguacuccagccugggcaaca

SEQ ID NO: 470840 - RNA, 32 nt, Human
gguugcacccuuaagaguauucagagagcauc

SEQ ID NO: 470841 - RNA, 32 nt, Human
gguugcacuauggccucaucuguggcucugaa

SEQ ID NO: 470842 - RNA, 20 nt, Human
gguugcacucuuccuauagc

SEQ ID NO: 470843 - RNA, 32 nt, Human
gguugcacugaauuugggggagcugcauggua

SEQ ID NO: 470844 - RNA, 32 nt, Human
gguugcacuucagcuucaucuccuuggcaggg

SEQ ID NO: 470845 - RNA, 22 nt, Human
gguugcagaaaugggaagagcu

SEQ ID NO: 470846 - RNA, 32 nt, Human
gguugcagaacuucaugaaagcuuuacuaaua

SEQ ID NO: 470847 - RNA, 32 nt, Human
gguugcagagcaggccaggcagacaguggggg

SEQ ID NO: 470848 - RNA, 32 nt, Human
gguugcagaggcuggccgcugccuggaagugu

SEQ ID NO: 470849 - RNA, 32 nt, Human
gguugcagauacaauagaagaaaaauuugucc

SEQ ID NO: 470850 - RNA, 32 nt, Human
gguugcagccaugucgagacugacgcugagga

SEQ ID NO: 470851 - RNA, 32 nt, Human
gguugcagccugaccaaaagugagaugggaag

SEQ ID NO: 470852 - RNA, 24 nt, Human
gguugcagccugcacaccauagcc

SEQ ID NO: 470853 - RNA, 22 nt, Human
gguugcaggcuuucccaugguc

SEQ ID NO: 470854 - RNA, 32 nt, Human
gguugcagggaggcggagguugcagugagccg

SEQ ID NO: 470855 - RNA, 25 nt, Human
gguugcaggugugcaccaccgcgcc

SEQ ID NO: 470856 - RNA, 32 nt, Human
gguugcagguucaaggcaaacaggcuucuagc

SEQ ID NO: 470857 - RNA, 22 nt, Human
gguugcaguaccagccacagcc

SEQ ID NO: 470858 - RNA, 21 nt, Human
gguugcaguacucgcugggcu

SEQ ID NO: 470859 - RNA, 24 nt, Human
gguugcagucucggccucguggcc

SEQ ID NO: 470860 - RNA, 32 nt, Human
gguugcagugaacuuagaucaugccacugcac

SEQ ID NO: 470861 - RNA, 32 nt, Human
gguugcagugagccaagauugcagugagccaa

SEQ ID NO: 470862 - RNA, 32 nt, Human
gguugcagugagccacugcacuccagccugau

SEQ ID NO: 470863 - RNA, 32 nt, Human
gguugcagugagccgggauugcagugagccac

SEQ ID NO: 470864 - RNA, 32 nt, Human
gguugcagugagcugagguugcggugagcuga

SEQ ID NO: 470865 - RNA, 32 nt, Human
gguugcaguuaagccgagaucaugcuacugca

SEQ ID NO: 470866 - RNA, 32 nt, Human
gguugcauagagaagaguaagaauguagacca

SEQ ID NO: 470867 - RNA, 32 nt, Human
gguugcaugccuguaaucccagcauuuuggga

SEQ ID NO: 470868 - RNA, 32 nt, Human
gguugcauuuuugagcauggggugcaggagcc

SEQ ID NO: 470869 - RNA, 32 nt, Human
gguugccaacccacaaucucauugaucagcag

SEQ ID NO: 470870 - RNA, 32 nt, Human
gguugccaacuacaucugucccuucccaucaa

SEQ ID NO: 470871 - RNA, 32 nt, Human
gguugccacucaccuggagauucagcaacagg

SEQ ID NO: 470872 - RNA, 32 nt, Human
gguugccagaaguggaaaugggaguuaacuau

SEQ ID NO: 470873 - RNA, 32 nt, Human
gguugccaugaagacccgguccgggagcaguc

SEQ ID NO: 470874 - RNA, 32 nt, Human
gguugccaugguaccgagggacucauuccugg

SEQ ID NO: 470875 - RNA, 32 nt, Human
gguugcccccuucaccuucuugcaaccucuuc

SEQ ID NO: 470876 - RNA, 32 nt, Human
gguugcccgaaggaugacgguggagacagauu

SEQ ID NO: 470877 - RNA, 32 nt, Human
gguugcccuguauacaugauccagucugugac

SEQ ID NO: 470878 - RNA, 19 nt, Human
gguugccgcccccucggga

SEQ ID NO: 470879 - RNA, 22 nt, Human
gguugccgccgccgccgccgcc

SEQ ID NO: 470880 - RNA, 24 nt, Human
gguugccgugagcugagauugcgu

SEQ ID NO: 470881 - RNA, 32 nt, Human
gguugccucuccccugcucacuccagucacau

SEQ ID NO: 470882 - RNA, 32 nt, Human
gguugccucuuccucuucccucacuuacuugu

SEQ ID NO: 470883 - RNA, 32 nt, Human
gguugccugccugggccccauguggaaggcag

SEQ ID NO: 470884 - RNA, 32 nt, Human
gguugccugcggcguccacuuccuuggccgcc

SEQ ID NO: 470885 - RNA, 32 nt, Human
gguugccuggccugggcugcgcccagcagcuu

SEQ ID NO: 470886 - RNA, 32 nt, Human
gguugccuggcuaccugcucaugagggacuug

SEQ ID NO: 470887 - RNA, 32 nt, Human
gguugccuuagucaucuuccuacagcaccauc

SEQ ID NO: 470888 - RNA, 32 nt, Human
gguugccuucuaacggcaggugggcauaaggc

SEQ ID NO: 470889 - RNA, 32 nt, Human
gguugccuugaaaucacugugguccaaaugua

SEQ ID NO: 470890 - RNA, 32 nt, Human
gguugcgaggggcgguguugaagaaugugugg

SEQ ID NO: 470891 - RNA, 32 nt, Human
gguugcgcaaagugcugaacuggcugaaguuc

SEQ ID NO: 470892 - RNA, 32 nt, Human
gguugcgccacuacacuccagccugggugaca

SEQ ID NO: 470893 - RNA, 32 nt, Human
gguugcgccacugcacuccagccugggcaaca

SEQ ID NO: 470894 - RNA, 32 nt, Human
gguugcgccacugcacucuagccugggcuaca

SEQ ID NO: 470895 - RNA, 32 nt, Human
gguugcgccacuguacuccagccugggugagg

SEQ ID NO: 470896 - RNA, 32 nt, Human
gguugcgcuacugcacuccagccuggacaaca

SEQ ID NO: 470897 - RNA, 24 nt, Human
gguugcggagccgacaucacggcc

SEQ ID NO: 470898 - RNA, 20 nt, Human
gguugcggcuguaccauggc

SEQ ID NO: 470899 - RNA, 32 nt, Human
gguugcgggaggcuggacucuggugacuguaa

SEQ ID NO: 470900 - RNA, 32 nt, Human
gguugcgggggagaggggagaauggaguagag

SEQ ID NO: 470901 - RNA, 23 nt, Human
gguugcgguggcucaugccugua

SEQ ID NO: 470902 - RNA, 22 nt, Human
gguugcuacgcgcaccauggcu

SEQ ID NO: 470903 - RNA, 23 nt, Human
gguugcuagcugccgccgcugcu

SEQ ID NO: 470904 - RNA, 32 nt, Human
gguugcuauguccuuuugacauggcccaucau

SEQ ID NO: 470905 - RNA, 21 nt, Human
gguugcuccucaggcacccug

SEQ ID NO: 470906 - RNA, 32 nt, Human
gguugcucucaaacuccugaccucaggugauc

SEQ ID NO: 470907 - RNA, 32 nt, Human
gguugcugaccagcaaucagccauguuuggag

SEQ ID NO: 470908 - RNA, 31 nt, Human
gguugcugacuucuuuauuucagagcucugg

SEQ ID NO: 470909 - RNA, 32 nt, Human
gguugcugagaguugaggggaaaggagggaug

SEQ ID NO: 470910 - RNA, 32 nt, Human
gguugcugcugaaggaggaggcagcagcgagg

SEQ ID NO: 470911 - RNA, 19 nt, Human
gguugcugcuuuugcuaca

SEQ ID NO: 470912 - RNA, 32 nt, Human
gguugcuggagcucaccagucuugagggaggu

SEQ ID NO: 470913 - RNA, 20 nt, Human
gguugcugggguuacaggug

SEQ ID NO: 470914 - RNA, 31 nt, Human
gguugcuuaaggcgaggaguuggagaccagc

SEQ ID NO: 470915 - RNA, 18 nt, Human
gguugcuuauuucccuca

SEQ ID NO: 470916 - RNA, 18 nt, Human
gguugcuuauuugucuca

SEQ ID NO: 470917 - RNA, 22 nt, Human
gguugcuucugcuauucgcuua

SEQ ID NO: 470918 - RNA, 32 nt, Human
gguugcuucuggaagggcccggauggggccug

SEQ ID NO: 470919 - RNA, 32 nt, Human
gguugcuuggagaagggacauggggcugaauc

SEQ ID NO: 470920 - RNA, 32 nt, Human
gguugcuugugucugugacugcagcuauggcc

SEQ ID NO: 470921 - RNA, 31 nt, Human
gguugcuuuagcucaggaguuggagacaagc

SEQ ID NO: 470922 - RNA, 32 nt, Human
gguugcuuucagauaaagaugacaugggaagg

SEQ ID NO: 470923 - RNA, 32 nt, Human
gguugcuuugagagaggcauggggaaggggau

SEQ ID NO: 470924 - RNA, 22 nt, Human
gguugcuuuugaguuuuacuca

SEQ ID NO: 470925 - RNA, 18 nt, Human
gguugcuuuuucuuccuc

SEQ ID NO: 470926 - RNA, 32 nt, Human
gguugcuuuuucuuccuccugggcaacuauuu

SEQ ID NO: 470927 - RNA, 32 nt, Human
gguuggaacagggagagcagcagccaugucag

SEQ ID NO: 470928 - RNA, 32 nt, Human
gguuggaagaaauaucccaaaacccauugucu

SEQ ID NO: 470929 - RNA, 32 nt, Human
gguuggaagagaguaaccaguuuccagagagc

SEQ ID NO: 470930 - RNA, 32 nt, Human
gguuggaagcagggagcuggaccgcagugucc

SEQ ID NO: 470931 - RNA, 16 nt, Human
gguuggaaucaggaua

SEQ ID NO: 470932 - RNA, 32 nt, Human
gguuggaccccuccccaagaggccaacccagu

SEQ ID NO: 470933 - RNA, 32 nt, Human
gguuggaccgggaggcaguggcuuggagaggc

SEQ ID NO: 470934 - RNA, 32 nt, Human
gguuggacucaaacuccugaccuugugauuug

SEQ ID NO: 470935 - RNA, 32 nt, Human
gguuggagaggagccauuuacagauuuuaagc

SEQ ID NO: 470936 - RNA, 32 nt, Human
gguuggaggaaaccccucccuauucaugucca

SEQ ID NO: 470937 - RNA, 32 nt, Human
gguuggaggagagagguggagacuguggcuca

SEQ ID NO: 470938 - RNA, 32 nt, Human
gguuggaggagggagaagugggaaguagcuug

SEQ ID NO: 470939 - RNA, 32 nt, Human
gguuggaggccugaggccucuuggaacucuug

SEQ ID NO: 470940 - RNA, 32 nt, Human
gguuggagggccggaagaggaaagaaaccaga

SEQ ID NO: 470941 - RNA, 32 nt, Human
gguuggaggucuggacagggagcccagucccg

SEQ ID NO: 470942 - RNA, 22 nt, Human
gguuggaggucuuaucugugga

SEQ ID NO: 470943 - RNA, 32 nt, Human
gguuggagugcaguggcccaucagggcucacu

SEQ ID NO: 470944 - RNA, 32 nt, Human
gguuggaguuccagggcugggcccugguggag

SEQ ID NO: 470945 - RNA, 32 nt, Human
gguuggaucuuccugcuacccucuuggauucu

SEQ ID NO: 470946 - RNA, 32 nt, Human
gguuggcaccuugacugcagccccaugagaca

SEQ ID NO: 470947 - RNA, 32 nt, Human
gguuggcagagaacacucacacacggggaagc

SEQ ID NO: 470948 - RNA, 32 nt, Human
gguuggcagagggagaaauaagccagccacgg

SEQ ID NO: 470949 - RNA, 32 nt, Human
gguuggcagaugagugaggaaaaagggguguc

SEQ ID NO: 470950 - RNA, 32 nt, Human
gguuggcagcagcggcgcuuggaggaaaggaa

SEQ ID NO: 470951 - RNA, 24 nt, Human
gguuggcagccacccaccccagag

SEQ ID NO: 470952 - RNA, 19 nt, Human
gguuggcaggggcugcagg

SEQ ID NO: 470953 - RNA, 32 nt, Human
gguuggcagggggaggguaggagcagcuggag

SEQ ID NO: 470954 - RNA, 32 nt, Human
gguuggcagggugggcguuuggggcccucaug

SEQ ID NO: 470955 - RNA, 32 nt, Human
gguuggcagggugugcuggggccuggaggagg

SEQ ID NO: 470956 - RNA, 32 nt, Human
gguuggcaucaucugauggcauguccaagugu

SEQ ID NO: 470957 - RNA, 32 nt, Human
gguuggcauggagucagcacaggaagccggga

SEQ ID NO: 470958 - RNA, 22 nt, Human
gguuggcauucuucuuaaugua

SEQ ID NO: 470959 - RNA, 32 nt, Human
gguuggccagggauggaguaaaccccacuucc

SEQ ID NO: 470960 - RNA, 32 nt, Human
gguuggccagucuguaccuggacuucgaauaa

SEQ ID NO: 470961 - RNA, 28 nt, Human
gguuggccaugacagcuagcccuccccu

SEQ ID NO: 470962 - RNA, 32 nt, Human
gguuggcccagccugcgagcgcgauccugacu

SEQ ID NO: 470963 - RNA, 32 nt, Human
gguuggccuuucuuauuuauauagagaacacu

SEQ ID NO: 470964 - RNA, 32 nt, Human
gguuggcgccuguaaucccagcuacucgggag

SEQ ID NO: 470965 - RNA, 32 nt, Human
gguuggcgucgccuugaaaucccaggccguga

SEQ ID NO: 470966 - RNA, 32 nt, Human
gguuggcuccagcaaaggagguugaacaucac

SEQ ID NO: 470967 - RNA, 32 nt, Human
gguuggcucugagcuccuuccaaaagaugaau

SEQ ID NO: 470968 - RNA, 32 nt, Human
gguuggcucugccuuugcugucuuuaccugaa

SEQ ID NO: 470969 - RNA, 21 nt, Human
gguuggcugaggccaccagcc

SEQ ID NO: 470970 - RNA, 32 nt, Human
gguuggcugggaguucaagaccagccuggcca

SEQ ID NO: 470971 - RNA, 32 nt, Human
gguuggcuucaaugcuaaggaagcccacaaua

SEQ ID NO: 470972 - RNA, 32 nt, Human
gguuggcuuuaacccaggaggcagagguugca

SEQ ID NO: 470973 - RNA, 32 nt, Human
gguugggaaauggaucaaggagagggaagcgu

SEQ ID NO: 470974 - RNA, 32 nt, Human
gguugggaaggcaccugcucccacagaagggg

SEQ ID NO: 470975 - RNA, 32 nt, Human
gguugggaauauucucugaugcucugacucac

SEQ ID NO: 470976 - RNA, 32 nt, Human
gguugggaauauucugugaugcucugacuccc

SEQ ID NO: 470977 - RNA, 32 nt, Human
gguugggacguguaagcgccugggagagccua

SEQ ID NO: 470978 - RNA, 30 nt, Human
gguugggacuugugaucagaaaaacugaag

SEQ ID NO: 470979 - RNA, 32 nt, Human
gguugggagaggggcugggcauggacaggagg

SEQ ID NO: 470980 - RNA, 32 nt, Human
gguugggagaugucucccaacugcugauuaau

SEQ ID NO: 470981 - RNA, 32 nt, Human
gguugggagcugagggaaggcugagaauccuc

SEQ ID NO: 470982 - RNA, 32 nt, Human
gguugggaggcuaacgagucuaccucccucuu

SEQ ID NO: 470983 - RNA, 32 nt, Human
gguugggaugggauaggacuagcaccauuuua

SEQ ID NO: 470984 - RNA, 32 nt, Human
gguugggauuugggggcugagcugucuggggu

SEQ ID NO: 470985 - RNA, 32 nt, Human
gguugggcaggcaggagccaggagaguagcua

SEQ ID NO: 470986 - RNA, 32 nt, Human
gguugggcuccuugguaccaugugggaagcgc

SEQ ID NO: 470987 - RNA, 32 nt, Human
gguugggcucuuccuccuccagcucaggagcc

SEQ ID NO: 470988 - RNA, 32 nt, Human
gguuggggacaguggggugcgugggagugggg

SEQ ID NO: 470989 - RNA, 32 nt, Human
gguuggggagagacagagaagugggcaggggc

SEQ ID NO: 470990 - RNA, 32 nt, Human
gguuggggaggaaguucuccagccccuugugc

SEQ ID NO: 470991 - RNA, 32 nt, Human
gguuggggaggcacagagcagagguucagguc

SEQ ID NO: 470992 - RNA, 22 nt, Human
gguuggggaugggggguaccuu

SEQ ID NO: 470993 - RNA, 32 nt, Human
gguuggggcaaaagaagggaaacccauccagu

SEQ ID NO: 470994 - RNA, 32 nt, Human
gguuggggcaggcaggagcagugugguaguac

SEQ ID NO: 470995 - RNA, 32 nt, Human
gguugggggaggcagagguggcacuggaggcc

SEQ ID NO: 470996 - RNA, 32 nt, Human
gguugggggaggcagcgggugauggcucugaa

SEQ ID NO: 470997 - RNA, 32 nt, Human
gguugggggaggcgggugcaggaccgaggccu

SEQ ID NO: 470998 - RNA, 32 nt, Human
gguugggggaugaggucagggggucuugggug

SEQ ID NO: 470999 - RNA, 32 nt, Human
gguugggggauggagcagggaauaagacauug

SEQ ID NO: 471000 - RNA, 32 nt, Human
gguugggggcagaggcccaucuggccugaacu

SEQ ID NO: 471001 - RNA, 32 nt, Human
gguugggggugggggagagggagagagcgaac

SEQ ID NO: 471002 - RNA, 32 nt, Human
gguugggguccugcaagaaggccuccucagcc

SEQ ID NO: 471003 - RNA, 32 nt, Human
gguugggucacauuugaaaaacaggccaguau

SEQ ID NO: 471004 - RNA, 32 nt, Human
gguugggucccugaggccuuccucggagcauu

SEQ ID NO: 471005 - RNA, 32 nt, Human
gguugggugcugcuguugugguccuucccaga

SEQ ID NO: 471006 - RNA, 32 nt, Human
gguugggugggaggaggaagaaagggaagaau

SEQ ID NO: 471007 - RNA, 32 nt, Human
gguugggugguggaggguggguccccuucccc

SEQ ID NO: 471008 - RNA, 32 nt, Human
gguugguaauucaggauucauuuggaaagugg

SEQ ID NO: 471009 - RNA, 32 nt, Human
gguugguacauggauaccuguucuuuaaaagg

SEQ ID NO: 471010 - RNA, 32 nt, Human
gguugguccacagcacuccauucuggguggca

SEQ ID NO: 471011 - RNA, 32 nt, Human
gguuggucucaaacuccugagcucaagcaauc

SEQ ID NO: 471012 - RNA, 32 nt, Human
gguuggucucaaacuccugagcucaagcaguc

SEQ ID NO: 471013 - RNA, 32 nt, Human
gguuggucucaaacuccuggacucaagugauc

SEQ ID NO: 471014 - RNA, 32 nt, Human
gguuggucucaaacuccuggguucaagcaguc

SEQ ID NO: 471015 - RNA, 19 nt, Human
gguuggucuccagauucuc

SEQ ID NO: 471016 - RNA, 32 nt, Human
gguuggucucgaacuccugaccucaggugauu

SEQ ID NO: 471017 - RNA, 32 nt, Human
gguuggucucgaacuccugaccuugugaugcu

SEQ ID NO: 471018 - RNA, 32 nt, Human
gguuggucucgaacuccugaucucaugaucca

SEQ ID NO: 471019 - RNA, 32 nt, Human
gguuggucucgaacuccugggcucaagcaguc

SEQ ID NO: 471020 - RNA, 32 nt, Human
gguuggucuguggagugccugaagugaccagc

SEQ ID NO: 471021 - RNA, 32 nt, Human
gguuggucuugaacuccugaccucaggugauc

SEQ ID NO: 471022 - RNA, 32 nt, Human
gguuggucuugcugucucagguggcagaggug

SEQ ID NO: 471023 - RNA, 18 nt, Human
gguuggugagugcuggug

SEQ ID NO: 471024 - RNA, 32 nt, Human
gguuggugauggagccacaacagcagcgagca

SEQ ID NO: 471025 - RNA, 32 nt, Human
gguuggugcaugugccuguaaucccagcuacu

SEQ ID NO: 471026 - RNA, 21 nt, Human
gguuggugccaccaccaggcu

SEQ ID NO: 471027 - RNA, 32 nt, Human
gguuggugccuuucccccuccuuccuccccac

SEQ ID NO: 471028 - RNA, 32 nt, Human
gguuggugcucacugacuacuacauguugauu

SEQ ID NO: 471029 - RNA, 32 nt, Human
gguugguguacuuggcuuaaguacuucaugcu

SEQ ID NO: 471030 - RNA, 32 nt, Human
gguugguguccagguuuguggcacuguuccaa

SEQ ID NO: 471031 - RNA, 32 nt, Human
gguugguguggaagagguggggcagauuaaag

SEQ ID NO: 471032 - RNA, 32 nt, Human
gguugguuaggcaaucauucuagggcagaaag

SEQ ID NO: 471033 - RNA, 32 nt, Human
gguugguugaguagcugguguuugcauccugg

SEQ ID NO: 471034 - RNA, 32 nt, Human
gguugguuggcugauugguggaaaguagggug

SEQ ID NO: 471035 - RNA, 32 nt, Human
gguugguugggggaggaaguggggaggagugu

SEQ ID NO: 471036 - RNA, 32 nt, Human
gguuguaaacaaacaguacacaugucauuuug

SEQ ID NO: 471037 - RNA, 32 nt, Human
gguuguaaagaugucuuggccucccagacagu

SEQ ID NO: 471038 - RNA, 32 nt, Human
gguuguaccacugcacuccagccuggcugaca

SEQ ID NO: 471039 - RNA, 32 nt, Human
gguuguacugaagacacgagaccugagacuug

SEQ ID NO: 471040 - RNA, 32 nt, Human
gguuguagacacacccuccccuaacaaaaaca

SEQ ID NO: 471041 - RNA, 25 nt, Human
gguuguagauguugcucuacauuca

SEQ ID NO: 471042 - RNA, 20 nt, Human
gguuguagcccacuucgccu

SEQ ID NO: 471043 - RNA, 32 nt, Human
gguuguauacuucuugaccaugugggacuaau

SEQ ID NO: 471044 - RNA, 32 nt, Human
gguuguauagaacacugaagcaucugauuuca

SEQ ID NO: 471045 - RNA, 31 nt, Human
gguuguauggguugcucugagggaccuugga

SEQ ID NO: 471046 - RNA, 24 nt, Human
gguugucacucaacaaaagugcuu

SEQ ID NO: 471047 - RNA, 32 nt, Human
gguugucacuuaaguuuggagugcaguggcau

SEQ ID NO: 471048 - RNA, 32 nt, Human
gguugucauggacuggcugccuuacaaaagcu

SEQ ID NO: 471049 - RNA, 21 nt, Human
gguugucauguuaaagugcuu

SEQ ID NO: 471050 - RNA, 32 nt, Human
gguuguccaacauuuucuaauacgcauucuac

SEQ ID NO: 471051 - RNA, 32 nt, Human
gguuguccacggucacaucugccccagugccu

SEQ ID NO: 471052 - RNA, 32 nt, Human
gguugucccucccagggaugcagccagacccg

SEQ ID NO: 471053 - RNA, 32 nt, Human
gguuguccuccaccccgcuggaaauccuguuc

SEQ ID NO: 471054 - RNA, 32 nt, Human
gguugucgccgggcgggccaggagcagcgcgg

SEQ ID NO: 471055 - RNA, 32 nt, Human
gguugucugcaggagagcaagccaggaggaca

SEQ ID NO: 471056 - RNA, 32 nt, Human
gguugucugccuccccucagauuuccugauag

SEQ ID NO: 471057 - RNA, 32 nt, Human
gguugucugcuaaaccugcuccuccaaagcca

SEQ ID NO: 471058 - RNA, 32 nt, Human
gguugucugcuaaaccugcuuuuccaaagccg

SEQ ID NO: 471059 - RNA, 32 nt, Human
gguugucugcuuagccacaugccuguauaguu

SEQ ID NO: 471060 - RNA, 32 nt, Human
gguugucugggguggguggaguggcgacagga

SEQ ID NO: 471061 - RNA, 32 nt, Human
gguugucuucauacccggcuucaugccagggu

SEQ ID NO: 471062 - RNA, 32 nt, Human
gguugucuuuaaagauauaaaaauuaggaugc

SEQ ID NO: 471063 - RNA, 32 nt, Human
gguugucuuuggucaggcaugugcccugagca

SEQ ID NO: 471064 - RNA, 32 nt, Human
gguugugaaguuaaugggaguacagagagcgu

SEQ ID NO: 471065 - RNA, 21 nt, Human
gguugugagacgccgcgcuca

SEQ ID NO: 471066 - RNA, 32 nt, Human
gguugugccacugcacuccagccugggcaaaa

SEQ ID NO: 471067 - RNA, 32 nt, Human
gguugugccacugcacuccagccuggguaaga

SEQ ID NO: 471068 - RNA, 32 nt, Human
gguugugccacugcacuccagccugggugaca

SEQ ID NO: 471069 - RNA, 32 nt, Human
gguugugccacugcacugcagccugggcuaca

SEQ ID NO: 471070 - RNA, 32 nt, Human
gguugugccuguaaucccagcuacuugggagg

SEQ ID NO: 471071 - RNA, 32 nt, Human
gguugugcgucugaagccuacaagaaaguuug

SEQ ID NO: 471072 - RNA, 32 nt, Human
gguugugcguggcuccugaccugcugcuaaga

SEQ ID NO: 471073 - RNA, 32 nt, Human
gguugugcuuugacuaacugaucuguucuuuc

SEQ ID NO: 471074 - RNA, 19 nt, Human
gguuguggccuccacccca

SEQ ID NO: 471075 - RNA, 32 nt, Human
gguuguggccuguaaucccagcuacucgggag

SEQ ID NO: 471076 - RNA, 24 nt, Human
gguugugggaaggguggguggcuu

SEQ ID NO: 471077 - RNA, 22 nt, Human
gguugugggagggccugggcca

SEQ ID NO: 471078 - RNA, 32 nt, Human
gguuguggggcaucuggagcagggugccugua

SEQ ID NO: 471079 - RNA, 32 nt, Human
gguuguggggugagaggaugugaguggccggg

SEQ ID NO: 471080 - RNA, 32 nt, Human
gguugugggugcgggugcacacaaaugagugg

SEQ ID NO: 471081 - RNA, 32 nt, Human
gguuguggugcagcugagugaggaccugcugu

SEQ ID NO: 471082 - RNA, 32 nt, Human
gguuguggugugcaccuguaguccuaguuacu

SEQ ID NO: 471083 - RNA, 32 nt, Human
gguuguguaaccaccagugcagucaaggcaua

SEQ ID NO: 471084 - RNA, 32 nt, Human
gguugugucauugcacuccagccuggggaaca

SEQ ID NO: 471085 - RNA, 32 nt, Human
gguugugugcagauggcccuucaaucucgaaa

SEQ ID NO: 471086 - RNA, 32 nt, Human
gguugugugggugggcuguugggagugaggau

SEQ ID NO: 471087 - RNA, 32 nt, Human
gguuguuacugccucuucccuaggugaagagg

SEQ ID NO: 471088 - RNA, 32 nt, Human
gguuguucuuuguccuaagugagcucuguuca

SEQ ID NO: 471089 - RNA, 22 nt, Human
gguuguugaaucucuccucuug

SEQ ID NO: 471090 - RNA, 32 nt, Human
gguuguugcccaggcuggagugcaguggcgcc

SEQ ID NO: 471091 - RNA, 32 nt, Human
gguuguugcuucuccccucgccacgcccuucu

SEQ ID NO: 471092 - RNA, 32 nt, Human
gguuguuggccagacaagucccagaaacugcc

SEQ ID NO: 471093 - RNA, 32 nt, Human
gguuguuuccaguuuggggcuguuauaaauaa

SEQ ID NO: 471094 - RNA, 18 nt, Human
gguuguuucuuaaauuua

SEQ ID NO: 471095 - RNA, 32 nt, Human
gguuguuugacaccuucuuuccacuuucaccu

SEQ ID NO: 471096 - RNA, 20 nt, Human
gguuguuuuuacuuuauuua

SEQ ID NO: 471097 - RNA, 32 nt, Human
gguuuaaaaagaaucacagcuucggaacuuuu

SEQ ID NO: 471098 - RNA, 32 nt, Human
gguuuaaaaccagcaccgaggcccaguggggg

SEQ ID NO: 471099 - RNA, 32 nt, Human
gguuuaaaaggccgagagaagcuguauucugg

SEQ ID NO: 471100 - RNA, 32 nt, Human
gguuuaaaguacaguuucucuaaagaucagac

SEQ ID NO: 471101 - RNA, 32 nt, Human
gguuuaaaucuguuuuacauccuugagauucu

SEQ ID NO: 471102 - RNA, 32 nt, Human
gguuuaacaagcccgucaggugauucugauuu

SEQ ID NO: 471103 - RNA, 32 nt, Human
gguuuaacugauuuugugcuggaauucaaagg

SEQ ID NO: 471104 - RNA, 24 nt, Human
gguuuaagcaaugcuucugccuca

SEQ ID NO: 471105 - RNA, 24 nt, Human
gguuuaagcaauucuccugccuca

SEQ ID NO: 471106 - RNA, 22 nt, Human
gguuuaagcaauucuccugcuu

SEQ ID NO: 471107 - RNA, 24 nt, Human
gguuuaagcaauucuccugcuuca

SEQ ID NO: 471108 - RNA, 24 nt, Human
gguuuaagcaguucuccugccuca

SEQ ID NO: 471109 - RNA, 24 nt, Human
gguuuaagccauucuucugccuca

SEQ ID NO: 471110 - RNA, 22 nt, Human
gguuuaagcgauucucaugccu

SEQ ID NO: 471111 - RNA, 24 nt, Human
gguuuaagcgauucucaugccuca

SEQ ID NO: 471112 - RNA, 24 nt, Human
gguuuaagcgauucuccugccuca

SEQ ID NO: 471113 - RNA, 22 nt, Human
gguuuaagcgauucucuugccu

SEQ ID NO: 471114 - RNA, 24 nt, Human
gguuuaagcgauucucuugccuca

SEQ ID NO: 471115 - RNA, 22 nt, Human
gguuuaagcgauucuucugccu

SEQ ID NO: 471116 - RNA, 24 nt, Human
gguuuaagcgauucuucugccuca

SEQ ID NO: 471117 - RNA, 22 nt, Human
gguuuaagcuauucuccugccu

SEQ ID NO: 471118 - RNA, 24 nt, Human
gguuuaagcuauucuccugccuca

SEQ ID NO: 471119 - RNA, 32 nt, Human
gguuuaaggaugacauuucugaccauuugugu

SEQ ID NO: 471120 - RNA, 24 nt, Human
gguuuaagggauucuccugccuca

SEQ ID NO: 471121 - RNA, 32 nt, Human
gguuuaagucuguggaaaaggaagcacgggag

SEQ ID NO: 471122 - RNA, 27 nt, Human
gguuuaagugauucuucuucugccuca

SEQ ID NO: 471123 - RNA, 24 nt, Human
gguuuaagugguugugcugcuuca

SEQ ID NO: 471124 - RNA, 32 nt, Human
gguuuacaccacugcacuccagucuggaugac

SEQ ID NO: 471125 - RNA, 32 nt, Human
gguuuacaccuguaaucccagcacuuugggag

SEQ ID NO: 471126 - RNA, 32 nt, Human
gguuuacagaacaccuguccugccugugccag

SEQ ID NO: 471127 - RNA, 32 nt, Human
gguuuacaggcacccaccaccaugcccagcua

SEQ ID NO: 471128 - RNA, 32 nt, Human
gguuuacagguaugcaccaccacgcccagcua

SEQ ID NO: 471129 - RNA, 32 nt, Human
gguuuacauccagcaggaguuggcccugagcu

SEQ ID NO: 471130 - RNA, 32 nt, Human
gguuuacaugcugcugggccugagcagcagga

SEQ ID NO: 471131 - RNA, 21 nt, Human
gguuuacgccacaaaagugcu

SEQ ID NO: 471132 - RNA, 32 nt, Human
gguuuacgccuauaaucccagcauuuugggac

SEQ ID NO: 471133 - RNA, 23 nt, Human
gguuuacucaccacaucugugga

SEQ ID NO: 471134 - RNA, 32 nt, Human
gguuuacuccuugaguuuuccugcugcgaugc

SEQ ID NO: 471135 - RNA, 32 nt, Human
gguuuacucugguuauaaaaacaguacaauaa

SEQ ID NO: 471136 - RNA, 32 nt, Human
gguuuacugagugcccacuaugugccaagcac

SEQ ID NO: 471137 - RNA, 32 nt, Human
gguuuacugcaaccuccaccuccuaggcucaa

SEQ ID NO: 471138 - RNA, 32 nt, Human
gguuuacugcugucauuguccaugccuacaga

SEQ ID NO: 471139 - RNA, 32 nt, Human
gguuuacugcugucauuguccaugccuauaga

SEQ ID NO: 471140 - RNA, 32 nt, Human
gguuuagacucuuguacauuucucccauaacu

SEQ ID NO: 471141 - RNA, 32 nt, Human
gguuuagagagggaugaagaggugagaguaag

SEQ ID NO: 471142 - RNA, 32 nt, Human
gguuuagauaaauacuuauacuuugcaaaguc

SEQ ID NO: 471143 - RNA, 32 nt, Human
gguuuagcaagagguuuauuguuaucaaaugc

SEQ ID NO: 471144 - RNA, 32 nt, Human
gguuuagcuuuugcuuucgaaguggccagcug

SEQ ID NO: 471145 - RNA, 32 nt, Human
gguuuaggaagagaugugguucaggugcuaaa

SEQ ID NO: 471146 - RNA, 32 nt, Human
gguuuaggcauuuggaaaaucugguucacauc

SEQ ID NO: 471147 - RNA, 24 nt, Human
gguuuaggccauucuccugcccca

SEQ ID NO: 471148 - RNA, 32 nt, Human
gguuuaggucuaauuucacucaguaguuuuua

SEQ ID NO: 471149 - RNA, 22 nt, Human
gguuuagguguuagccuucuua

SEQ ID NO: 471150 - RNA, 32 nt, Human
gguuuaguaaagcuuuuaucuuuagaaaaaug

SEQ ID NO: 471151 - RNA, 32 nt, Human
gguuuagugcugcugcuuucacugcugcaccc

SEQ ID NO: 471152 - RNA, 32 nt, Human
gguuuagugucccacggaaagagaccagaccu

SEQ ID NO: 471153 - RNA, 32 nt, Human
gguuuaguuaaaugucuuacucuacugugccu

SEQ ID NO: 471154 - RNA, 32 nt, Human
gguuuauagucaucugucgcauugccucgagu

SEQ ID NO: 471155 - RNA, 32 nt, Human
gguuuauauagcagggaagaaauguaacuaca

SEQ ID NO: 471156 - RNA, 32 nt, Human
gguuuauaucugugugaccuuaggcaagucac

SEQ ID NO: 471157 - RNA, 32 nt, Human
gguuuaucaagcaaagcuuuucuucauuugaa

SEQ ID NO: 471158 - RNA, 32 nt, Human
gguuuaucaguauuucuauuauaaaccucuau

SEQ ID NO: 471159 - RNA, 32 nt, Human
gguuuauccugacaguaaccucuccccagguc

SEQ ID NO: 471160 - RNA, 32 nt, Human
gguuuaucugcuggccuugcaucagccaauuc

SEQ ID NO: 471161 - RNA, 24 nt, Human
gguuuaugccauucuccugucuca

SEQ ID NO: 471162 - RNA, 32 nt, Human
gguuuaugccuguaaucccagcacugugggag

SEQ ID NO: 471163 - RNA, 32 nt, Human
gguuuauggcagcacuuccaucaaaagacacc

SEQ ID NO: 471164 - RNA, 32 nt, Human
gguuuaugggaugcaggauaauggagcaugcu

SEQ ID NO: 471165 - RNA, 32 nt, Human
gguuuauguguaugugauguugguguguguaa

SEQ ID NO: 471166 - RNA, 22 nt, Human
gguuuauuccucauucugugga

SEQ ID NO: 471167 - RNA, 22 nt, Human
gguuuauucuuaccaccuugcu

SEQ ID NO: 471168 - RNA, 32 nt, Human
gguuuauuuucugggaggucucuccuuugugu

SEQ ID NO: 471169 - RNA, 25 nt, Human
gguuucaaacacuucuccugccuca

SEQ ID NO: 471170 - RNA, 31 nt, Human
gguuucaaacagugggauaggagggacacuu

SEQ ID NO: 471171 - RNA, 32 nt, Human
gguuucaacauguuggccaggcuggucaugaa

SEQ ID NO: 471172 - RNA, 32 nt, Human
gguuucaacauguuggccaggcuggucuugaa

SEQ ID NO: 471173 - RNA, 21 nt, Human
gguuucaaccuccuggccuca

SEQ ID NO: 471174 - RNA, 23 nt, Human
gguuucaagcaauucuccugccu

SEQ ID NO: 471175 - RNA, 25 nt, Human
gguuucaagcaauucuccugccuca

SEQ ID NO: 471176 - RNA, 32 nt, Human
gguuucaagccaaaugugaauuuauuuggguu

SEQ ID NO: 471177 - RNA, 32 nt, Human
gguuucaagcccuuagggaugcagccugucua

SEQ ID NO: 471178 - RNA, 24 nt, Human
gguuucaagugauucuccugccuc

SEQ ID NO: 471179 - RNA, 25 nt, Human
gguuucaagugauucuccugccuca

SEQ ID NO: 471180 - RNA, 32 nt, Human
gguuucaauguucuuggaccucagggccuucg

SEQ ID NO: 471181 - RNA, 32 nt, Human
gguuucacaauguugaccaggcuggucucgaa

SEQ ID NO: 471182 - RNA, 32 nt, Human
gguuucacaauguuggccaggcuggucucaaa

SEQ ID NO: 471183 - RNA, 32 nt, Human
gguuucacagaauuuuaaaauagaguuaaagg

SEQ ID NO: 471184 - RNA, 19 nt, Human
gguuucaccaucuugguca

SEQ ID NO: 471185 - RNA, 19 nt, Human
gguuucaccaugcugguca

SEQ ID NO: 471186 - RNA, 32 nt, Human
gguuucaccauggcuaggcuggucucaaacuc

SEQ ID NO: 471187 - RNA, 32 nt, Human
gguuucaccauguaggccaggauggucucgaa

SEQ ID NO: 471188 - RNA, 32 nt, Human
gguuucaccauguugcccagacuggucuugaa

SEQ ID NO: 471189 - RNA, 19 nt, Human
gguuucaccauguuggcca

SEQ ID NO: 471190 - RNA, 19 nt, Human
gguuucaccauguugguca

SEQ ID NO: 471191 - RNA, 19 nt, Human
gguuucaccguguugguca

SEQ ID NO: 471192 - RNA, 32 nt, Human
gguuucacgauguuggccaggcuggucuuaau

SEQ ID NO: 471193 - RNA, 32 nt, Human
gguuucacuguguaggccaggcuggucucgaa

SEQ ID NO: 471194 - RNA, 32 nt, Human
gguuucacuguguuggccaggcuggucgugaa

SEQ ID NO: 471195 - RNA, 32 nt, Human
gguuucacuguguuggccaggcuggucucgaa

SEQ ID NO: 471196 - RNA, 32 nt, Human
gguuucacuguguuggccaggcuggucuugaa

SEQ ID NO: 471197 - RNA, 21 nt, Human
gguuucacuucuccuggcuca

SEQ ID NO: 471198 - RNA, 32 nt, Human
gguuucagaagaagcauggcucugccaacacc

SEQ ID NO: 471199 - RNA, 32 nt, Human
gguuucagcaagaaagucugugaugugaccag

SEQ ID NO: 471200 - RNA, 32 nt, Human
gguuucagcauauggucaacaaaagaacauuu

SEQ ID NO: 471201 - RNA, 32 nt, Human
gguuucagcgcugaggaggccugaguuccguc

SEQ ID NO: 471202 - RNA, 32 nt, Human
gguuucagcuggccccagcccagaagugaccc

SEQ ID NO: 471203 - RNA, 32 nt, Human
gguuucagucaucuccccauuugguccccugg

SEQ ID NO: 471204 - RNA, 23 nt, Human
gguuucagugauuuuucugccuc

SEQ ID NO: 471205 - RNA, 23 nt, Human
gguuucaguguacuaguuuugaa

SEQ ID NO: 471206 - RNA, 32 nt, Human
gguuucaguuacucucagucagucauggucca

SEQ ID NO: 471207 - RNA, 24 nt, Human
gguuucaguuuccuuauuucugag

SEQ ID NO: 471208 - RNA, 32 nt, Human
gguuucauauccagcaacuuugcuaaaauuca

SEQ ID NO: 471209 - RNA, 32 nt, Human
gguuucaucacggugaaacccccucucugcua

SEQ ID NO: 471210 - RNA, 32 nt, Human
gguuucaucacguugaccaggcuggucucgaa

SEQ ID NO: 471211 - RNA, 23 nt, Human
gguuucaucacuaacaaaagugc

SEQ ID NO: 471212 - RNA, 32 nt, Human
gguuucaucaugguggccaggauggucuaucu

SEQ ID NO: 471213 - RNA, 32 nt, Human
gguuucaucauguugcccaggcuggucucaaa

SEQ ID NO: 471214 - RNA, 32 nt, Human
gguuucaucauguuggccaggauggucucuua

SEQ ID NO: 471215 - RNA, 32 nt, Human
gguuucaucauguuggccaggauggucuugau

SEQ ID NO: 471216 - RNA, 32 nt, Human
gguuucaucauguuggccaggcuggucucaaa

SEQ ID NO: 471217 - RNA, 32 nt, Human
gguuucaucauguuggccaggcuggucucgaa

SEQ ID NO: 471218 - RNA, 32 nt, Human
gguuucaucauguuggccaggcuggucucgag

SEQ ID NO: 471219 - RNA, 32 nt, Human
gguuucaucauguuggccaggcuggucuugaa

SEQ ID NO: 471220 - RNA, 32 nt, Human
gguuucaucauguuggccuggcuggucucaaa

SEQ ID NO: 471221 - RNA, 32 nt, Human
gguuucaucauguuguccaggcuggucuugaa

SEQ ID NO: 471222 - RNA, 32 nt, Human
gguuucaucccugaaacagggccucacuuccu

SEQ ID NO: 471223 - RNA, 23 nt, Human
gguuucaucuaucaaaugucucc

SEQ ID NO: 471224 - RNA, 32 nt, Human
gguuucauuauguuggccaggcuggucuccaa

SEQ ID NO: 471225 - RNA, 32 nt, Human
gguuucauuauguuggccaggcuggucucgaa

SEQ ID NO: 471226 - RNA, 32 nt, Human
gguuucauuccagcauggcacauguauacaua

SEQ ID NO: 471227 - RNA, 32 nt, Human
gguuucauuuugaugcuaugugcuugccuuua

SEQ ID NO: 471228 - RNA, 32 nt, Human
gguuuccacaggaagcagauggagcuccuuuc

SEQ ID NO: 471229 - RNA, 32 nt, Human
gguuuccacaguugcugcuccuuuggggcaac

SEQ ID NO: 471230 - RNA, 32 nt, Human
gguuuccacucucgccaaagagagaagacgcc

SEQ ID NO: 471231 - RNA, 32 nt, Human
gguuuccacugaggacauucagccugggaagg

SEQ ID NO: 471232 - RNA, 31 nt, Human
gguuuccagagagagucaugcuggaggagaa

SEQ ID NO: 471233 - RNA, 32 nt, Human
gguuuccaggccaccguucuccugccuacauc

SEQ ID NO: 471234 - RNA, 32 nt, Human
gguuuccagguggacgggcagagccagugaac

SEQ ID NO: 471235 - RNA, 32 nt, Human
gguuuccagguuuucucccaggugacgcuguu

SEQ ID NO: 471236 - RNA, 32 nt, Human
gguuucccaaaguguugggauuacaggcauga

SEQ ID NO: 471237 - RNA, 32 nt, Human
gguuucccaagcucugggaccuugcucccagc

SEQ ID NO: 471238 - RNA, 21 nt, Human
gguuucccagcagcucaggca

SEQ ID NO: 471239 - RNA, 32 nt, Human
gguuucccaggaggaggaggccccugaagggg

SEQ ID NO: 471240 - RNA, 32 nt, Human
gguuucccauuugucuggccagucucuaugug

SEQ ID NO: 471241 - RNA, 32 nt, Human
gguuucccauuugucuggccagucucugugug

SEQ ID NO: 471242 - RNA, 32 nt, Human
gguuuccccaagugcugggauuacagguguga

SEQ ID NO: 471243 - RNA, 32 nt, Human
gguuuccccugaaccagcccuggaccuuucug

SEQ ID NO: 471244 - RNA, 32 nt, Human
gguuuccccuuuugcuuagcucucauucauuc

SEQ ID NO: 471245 - RNA, 32 nt, Human
gguuucccucaccucggucuucccaagaugga

SEQ ID NO: 471246 - RNA, 32 nt, Human
gguuucccuccaggucugguagggacugggcu

SEQ ID NO: 471247 - RNA, 21 nt, Human
gguuucccugucugucugugu

SEQ ID NO: 471248 - RNA, 32 nt, Human
gguuucccuucaugggaaaagccauuauauuu

SEQ ID NO: 471249 - RNA, 32 nt, Human
gguuuccgaggcccucuccagccaaggaaaag

SEQ ID NO: 471250 - RNA, 22 nt, Human
gguuuccggucagugguguggu

SEQ ID NO: 471251 - RNA, 32 nt, Human
gguuuccgucggcacugguggagggggugcgc

SEQ ID NO: 471252 - RNA, 32 nt, Human
gguuuccucaaccaccuuuccucagcuuucuu

SEQ ID NO: 471253 - RNA, 32 nt, Human
gguuuccucuuuccuuucccucuugucagguc

SEQ ID NO: 471254 - RNA, 32 nt, Human
gguuuccugaagugggaggaguguugaguaag

SEQ ID NO: 471255 - RNA, 32 nt, Human
gguuuccugcaagcccugacauuccuuggcuu

SEQ ID NO: 471256 - RNA, 32 nt, Human
gguuuccuggcuaguuuguguggugugguugg

SEQ ID NO: 471257 - RNA, 32 nt, Human
gguuuccuggggacccaggcuugcaaagugac

SEQ ID NO: 471258 - RNA, 24 nt, Human
gguuucgaacuccugaccucguga

SEQ ID NO: 471259 - RNA, 32 nt, Human
gguuucgagcugucucaaaauauugcccaaua

SEQ ID NO: 471260 - RNA, 24 nt, Human
gguuucgaucuccucaccucgcga

SEQ ID NO: 471261 - RNA, 24 nt, Human
gguuucgaucuccugaccuuguga

SEQ ID NO: 471262 - RNA, 32 nt, Human
gguuucgccauguuacccagacuggucuugaa

SEQ ID NO: 471263 - RNA, 32 nt, Human
gguuucgucauguugcccaggcuggucuccaa

SEQ ID NO: 471264 - RNA, 32 nt, Human
gguuucgucauguuggccaggcuggucuccaa

SEQ ID NO: 471265 - RNA, 32 nt, Human
gguuucgucauguuggccaggcuggucucgaa

SEQ ID NO: 471266 - RNA, 32 nt, Human
gguuucguuguauuuacaccauguguggaggc

SEQ ID NO: 471267 - RNA, 32 nt, Human
gguuucuagcacuaccggucacggccaugucg

SEQ ID NO: 471268 - RNA, 23 nt, Human
gguuucuagcggugccugaggca

SEQ ID NO: 471269 - RNA, 32 nt, Human
gguuucuaguguuucaguuacuauguuguauu

SEQ ID NO: 471270 - RNA, 32 nt, Human
gguuucuaucuuucuuccaccagacuccaagc

SEQ ID NO: 471271 - RNA, 32 nt, Human
gguuucucacagaauggauucccagcggaacu

SEQ ID NO: 471272 - RNA, 32 nt, Human
gguuucuccauguauugcccaggcuggucucg

SEQ ID NO: 471273 - RNA, 19 nt, Human
gguuucuccauguugguca

SEQ ID NO: 471274 - RNA, 32 nt, Human
gguuucucgauguuggccaggcuggucucaaa

SEQ ID NO: 471275 - RNA, 32 nt, Human
gguuucucuaauuuccuccacucccaguucga

SEQ ID NO: 471276 - RNA, 32 nt, Human
gguuucucucgaccucgcagagcuccugacaa

SEQ ID NO: 471277 - RNA, 32 nt, Human
gguuucucugauccuccuccacucccgcugcu

SEQ ID NO: 471278 - RNA, 32 nt, Human
gguuucucugcagaagcucucuuuuugccucc

SEQ ID NO: 471279 - RNA, 32 nt, Human
gguuucucuguucauauccaauucuggugcuu

SEQ ID NO: 471280 - RNA, 22 nt, Human
gguuucucuguugaggaugcgu

SEQ ID NO: 471281 - RNA, 32 nt, Human
gguuucugauaccuagcuccccaagcugacug

SEQ ID NO: 471282 - RNA, 32 nt, Human
gguuucugauuagucucuccaaaggaggcaau

SEQ ID NO: 471283 - RNA, 32 nt, Human
gguuucugcaauauuuuucuuauguccacccu

SEQ ID NO: 471284 - RNA, 32 nt, Human
gguuucugccuaccacuuccuccccuaccacc

SEQ ID NO: 471285 - RNA, 32 nt, Human
gguuucuggccaaacacauucaagcucacauu

SEQ ID NO: 471286 - RNA, 32 nt, Human
gguuucuggggaggcagagaggcagggacuuu

SEQ ID NO: 471287 - RNA, 32 nt, Human
gguuucuggggccucaggguucugggaaagca

SEQ ID NO: 471288 - RNA, 32 nt, Human
gguuucuguccuugguucuguccuccuuagca

SEQ ID NO: 471289 - RNA, 32 nt, Human
gguuucuguucagcucuuuucaguuaacagau

SEQ ID NO: 471290 - RNA, 32 nt, Human
gguuucuuagauagcauuguggccaaauagcu

SEQ ID NO: 471291 - RNA, 32 nt, Human
gguuucuuccagagucaucuaccugaguccug

SEQ ID NO: 471292 - RNA, 32 nt, Human
gguuucuucccuuccuccugcacaaucgcuuc

SEQ ID NO: 471293 - RNA, 32 nt, Human
gguuucuuccucacguggcuuuuucuuccaug

SEQ ID NO: 471294 - RNA, 32 nt, Human
gguuucuucuuagaucacuccucugccaaaga

SEQ ID NO: 471295 - RNA, 32 nt, Human
gguuucuugggagucgggcagggaccugcagg

SEQ ID NO: 471296 - RNA, 32 nt, Human
gguuucuuggggucccagggaugaggaaucgc

SEQ ID NO: 471297 - RNA, 32 nt, Human
gguuucuugguauugcgcguuucucuuccuug

SEQ ID NO: 471298 - RNA, 32 nt, Human
gguuucuuguugcacugugauacacaugaagc

SEQ ID NO: 471299 - RNA, 19 nt, Human
gguuucuuuucuucacuca

SEQ ID NO: 471300 - RNA, 32 nt, Human
gguuucuuuuuauuuguguaaaggagguuaag

SEQ ID NO: 471301 - RNA, 32 nt, Human
gguuugaaagccucuggaaaacucaggauucu

SEQ ID NO: 471302 - RNA, 32 nt, Human
gguuugaagacugcuucauucugccucuagua

SEQ ID NO: 471303 - RNA, 32 nt, Human
gguuugaagggcagucuucucuggcuuguuuu

SEQ ID NO: 471304 - RNA, 19 nt, Human
gguuugacagagaaaagac

SEQ ID NO: 471305 - RNA, 32 nt, Human
gguuugagacgucaaucaccacugagaaagaa

SEQ ID NO: 471306 - RNA, 32 nt, Human
gguuugagagagcagccaggagagcuuagggu

SEQ ID NO: 471307 - RNA, 32 nt, Human
gguuugagagcaucauggggcagacagauggu

SEQ ID NO: 471308 - RNA, 32 nt, Human
gguuugagcugcugaagagggagcccuugcau

SEQ ID NO: 471309 - RNA, 24 nt, Human
gguuugaggaauuguccugccuca

SEQ ID NO: 471310 - RNA, 32 nt, Human
gguuugaggagaaagggccuacucauuugcaa

SEQ ID NO: 471311 - RNA, 32 nt, Human
gguuugaggccccacagcaacagaaguccagg

SEQ ID NO: 471312 - RNA, 32 nt, Human
gguuugaggcgggaauagucagcucugaucac

SEQ ID NO: 471313 - RNA, 32 nt, Human
gguuugaggucauagaucugguucuggaggac

SEQ ID NO: 471314 - RNA, 32 nt, Human
gguuugagucaaggcagggaaaacuuggguuu

SEQ ID NO: 471315 - RNA, 24 nt, Human
gguuugagugauucucaugccuca

SEQ ID NO: 471316 - RNA, 32 nt, Human
gguuugaguguucuucaucagcugaccuuaaa

SEQ ID NO: 471317 - RNA, 32 nt, Human
gguuugauaccacauuuaacauugacauuuaa

SEQ ID NO: 471318 - RNA, 32 nt, Human
gguuugaucccuggcaggucccucgagcagua

SEQ ID NO: 471319 - RNA, 32 nt, Human
gguuugaucuguggaugaaaugaaucaugauu

SEQ ID NO: 471320 - RNA, 32 nt, Human
gguuugcaaaggacugggaguuccugaggaag

SEQ ID NO: 471321 - RNA, 32 nt, Human
gguuugcaauccaagcaggaagaaggaaaaga

SEQ ID NO: 471322 - RNA, 31 nt, Human
gguuugcacagcuagaggccgcgcagcagca

SEQ ID NO: 471323 - RNA, 24 nt, Human
gguuugcaccauucuccugccuca

SEQ ID NO: 471324 - RNA, 32 nt, Human
gguuugcacugagaaauuagcauucaggccuu

SEQ ID NO: 471325 - RNA, 32 nt, Human
gguuugcagcaaguccagacaggaagcaauga

SEQ ID NO: 471326 - RNA, 32 nt, Human
gguuugcagcuccuugccagagcccagauucc

SEQ ID NO: 471327 - RNA, 23 nt, Human
gguuugcaggcgcuuuccucuug

SEQ ID NO: 471328 - RNA, 23 nt, Human
gguuugcagguugcugugccuga

SEQ ID NO: 471329 - RNA, 32 nt, Human
gguuugcaguugagaggggagggcaggagggg

SEQ ID NO: 471330 - RNA, 31 nt, Human
gguuugcaguuucacuccugaaaucagugua

SEQ ID NO: 471331 - RNA, 32 nt, Human
gguuugcaguuucacuccugaaaucaguguag

SEQ ID NO: 471332 - RNA, 32 nt, Human
gguuugcaguuuucacucaaguuuugcaugaa

SEQ ID NO: 471333 - RNA, 26 nt, Human
gguuugcauccaucaccaucacggcc

SEQ ID NO: 471334 - RNA, 32 nt, Human
gguuugccaccugagcccagggaucaggcagg

SEQ ID NO: 471335 - RNA, 32 nt, Human
gguuugccaucagggcccuguggcugggucug

SEQ ID NO: 471336 - RNA, 32 nt, Human
gguuugcccuccuaugaguggagggagggccu

SEQ ID NO: 471337 - RNA, 32 nt, Human
gguuugcgccuguaaucccagccacucgagaa

SEQ ID NO: 471338 - RNA, 21 nt, Human
gguuugcgucaucaucaggcc

SEQ ID NO: 471339 - RNA, 32 nt, Human
gguuugcucacagauggaggagaaggagcucu

SEQ ID NO: 471340 - RNA, 32 nt, Human
gguuugcucaguugagugucagcuguguaugu

SEQ ID NO: 471341 - RNA, 32 nt, Human
gguuugcuccuuggauuccccuucccacucca

SEQ ID NO: 471342 - RNA, 32 nt, Human
gguuugcucuucagucaucuagccacuaaaug

SEQ ID NO: 471343 - RNA, 32 nt, Human
gguuugcugauggggacuuggaugccgugcug

SEQ ID NO: 471344 - RNA, 32 nt, Human
gguuugcuuaaaggagcuuggcugguuugggc

SEQ ID NO: 471345 - RNA, 32 nt, Human
gguuugcuuuccauaucugaucuuuaauccac

SEQ ID NO: 471346 - RNA, 32 nt, Human
gguuugcuuucuuuaccauaagcaaucccuug

SEQ ID NO: 471347 - RNA, 20 nt, Human
gguuugcuuucuuuuaguua

SEQ ID NO: 471348 - RNA, 32 nt, Human
gguuugcuuuggcucacucgcuuuuuacaaac

SEQ ID NO: 471349 - RNA, 18 nt, Human
gguuugcuuuuaucauua

SEQ ID NO: 471350 - RNA, 32 nt, Human
gguuugcuuuuuguuuugggggagaggauuua

SEQ ID NO: 471351 - RNA, 32 nt, Human
gguuuggaccugggucacuagagcagagccuc

SEQ ID NO: 471352 - RNA, 32 nt, Human
gguuuggagagcuguaucuguugggccuuggg

SEQ ID NO: 471353 - RNA, 32 nt, Human
gguuuggaggcaaggcggaggggccagggugg

SEQ ID NO: 471354 - RNA, 32 nt, Human
gguuuggaggggauugggggauagugggacag

SEQ ID NO: 471355 - RNA, 32 nt, Human
gguuuggagugacaaugguagguuucuucucu

SEQ ID NO: 471356 - RNA, 32 nt, Human
gguuuggauuuucaagagaugauugggcuucu

SEQ ID NO: 471357 - RNA, 32 nt, Human
gguuuggcaaaggcagaacaaauaucccauau

SEQ ID NO: 471358 - RNA, 32 nt, Human
gguuuggcagugccccucagagcccaggccug

SEQ ID NO: 471359 - RNA, 18 nt, Human
gguuuggccaguuucuaa

SEQ ID NO: 471360 - RNA, 24 nt, Human
gguuuggcccaaguuucuaaggga

SEQ ID NO: 471361 - RNA, 22 nt, Human
gguuuggcccccagggcuccua

SEQ ID NO: 471362 - RNA, 21 nt, Human
gguuuggccucaggagaguca

SEQ ID NO: 471363 - RNA, 32 nt, Human
gguuuggccuccauccucaucucucuugggcc

SEQ ID NO: 471364 - RNA, 32 nt, Human
gguuuggcuacggaggcugggugcagcuccaa

SEQ ID NO: 471365 - RNA, 32 nt, Human
gguuuggcuccucuguguguguccguaucuug

SEQ ID NO: 471366 - RNA, 32 nt, Human
gguuuggcuuccuucucacauuucuuuagcuu

SEQ ID NO: 471367 - RNA, 22 nt, Human
gguuugggaagguccuggggca

SEQ ID NO: 471368 - RNA, 32 nt, Human
gguuugggagagaggagcaugcgcgagagagu

SEQ ID NO: 471369 - RNA, 32 nt, Human
gguuugggagagaguagggaagccacagcugc

SEQ ID NO: 471370 - RNA, 32 nt, Human
gguuugggagagauagugagggccugucaaag

SEQ ID NO: 471371 - RNA, 32 nt, Human
gguuugggaggcaaaaaucuaugaaggguuuu

SEQ ID NO: 471372 - RNA, 32 nt, Human
gguuugggcauuuaagaauggcaaacacucgg

SEQ ID NO: 471373 - RNA, 32 nt, Human
gguuuggggaaaggaaggcuggcuuggcgaga

SEQ ID NO: 471374 - RNA, 32 nt, Human
gguuuggggaaaggggaagcaggggcauaguc

SEQ ID NO: 471375 - RNA, 32 nt, Human
gguuuggggaagccucucagaggaggaggagc

SEQ ID NO: 471376 - RNA, 25 nt, Human
gguuuggggaaguguuucuaggaga

SEQ ID NO: 471377 - RNA, 32 nt, Human
gguuuggggcgaauguccugaggcagagaugg

SEQ ID NO: 471378 - RNA, 32 nt, Human
gguuuggggcuuccacauauccuguucucaag

SEQ ID NO: 471379 - RNA, 32 nt, Human
gguuugggggagaagaaguagggguggcccga

SEQ ID NO: 471380 - RNA, 21 nt, Human
gguuugggggaugccugggac

SEQ ID NO: 471381 - RNA, 32 nt, Human
gguuuggggguugaggccccuugagaagcuca

SEQ ID NO: 471382 - RNA, 32 nt, Human
gguuugggugggggcuguggcccugcccuugg

SEQ ID NO: 471383 - RNA, 32 nt, Human
gguuugggugugagauuucagagccccaggua

SEQ ID NO: 471384 - RNA, 32 nt, Human
gguuuggguuaguggcugcuggcguuuuggcc

SEQ ID NO: 471385 - RNA, 32 nt, Human
gguuugguaugggacaugcacacacacucaca

SEQ ID NO: 471386 - RNA, 32 nt, Human
gguuuggucaucugacuaaguucuagccaaag

SEQ ID NO: 471387 - RNA, 32 nt, Human
gguuuggugcaguuuccagggugcaguacagc

SEQ ID NO: 471388 - RNA, 23 nt, Human
gguuugguggugguggcggugua

SEQ ID NO: 471389 - RNA, 32 nt, Human
gguuugguguugagucucucuccugcugccua

SEQ ID NO: 471390 - RNA, 32 nt, Human
gguuugguuccugaccuaggcuugggaagaca

SEQ ID NO: 471391 - RNA, 24 nt, Human
gguuugguuuccagaccugaggca

SEQ ID NO: 471392 - RNA, 32 nt, Human
gguuugguuuugucuaggcagccucuggccag

SEQ ID NO: 471393 - RNA, 19 nt, Human
gguuugguuuuuauuauua

SEQ ID NO: 471394 - RNA, 32 nt, Human
gguuuguagccaucuggccagucgcugggugc

SEQ ID NO: 471395 - RNA, 22 nt, Human
gguuuguauguucucucuguca

SEQ ID NO: 471396 - RNA, 17 nt, Human
gguuugucugcccauua

SEQ ID NO: 471397 - RNA, 32 nt, Human
gguuugucugucccugacuucugccucugaga

SEQ ID NO: 471398 - RNA, 18 nt, Human
gguuugucuguguccuca

SEQ ID NO: 471399 - RNA, 32 nt, Human
gguuugucuuccaggacaagucauucuacaac

SEQ ID NO: 471400 - RNA, 18 nt, Human
gguuugucuuccccacca

SEQ ID NO: 471401 - RNA, 32 nt, Human
gguuugucuucugugugccuguguccucaucu

SEQ ID NO: 471402 - RNA, 17 nt, Human
gguuugugcaggggggc

SEQ ID NO: 471403 - RNA, 32 nt, Human
gguuugugcugagcuggcugcagccgcucuca

SEQ ID NO: 471404 - RNA, 29 nt, Human
gguuuguggcugugugugugacugugagu

SEQ ID NO: 471405 - RNA, 32 nt, Human
gguuugugggaccugggcugaugucugaugaa

SEQ ID NO: 471406 - RNA, 32 nt, Human
gguuuguguggaccccgaguuccaccagguga

SEQ ID NO: 471407 - RNA, 32 nt, Human
gguuuguguguguauauagugucugugugugu

SEQ ID NO: 471408 - RNA, 32 nt, Human
gguuuguguugacuuaacauugaguucaagcc

SEQ ID NO: 471409 - RNA, 24 nt, Human
gguuuguguuugccuugccuggug

SEQ ID NO: 471410 - RNA, 19 nt, Human
gguuuguuaguugccauua

SEQ ID NO: 471411 - RNA, 18 nt, Human
gguuuguugacuaccauu

SEQ ID NO: 471412 - RNA, 32 nt, Human
gguuuguugagguggaggaacagaagugaaau

SEQ ID NO: 471413 - RNA, 32 nt, Human
gguuuguuguuuguuuggauuacuugaaaacc

SEQ ID NO: 471414 - RNA, 32 nt, Human
gguuuguuucucaagcgcuauccacagaaccu

SEQ ID NO: 471415 - RNA, 32 nt, Human
gguuuguuucuggggagcucuuaauuucuauu

SEQ ID NO: 471416 - RNA, 32 nt, Human
gguuuguuuggaugguggagggagacagggcc

SEQ ID NO: 471417 - RNA, 20 nt, Human
gguuuguuuucuuucauuua

SEQ ID NO: 471418 - RNA, 22 nt, Human
gguuuguuuuugguuauuauca

SEQ ID NO: 471419 - RNA, 18 nt, Human
gguuuguuuuuucauuca

SEQ ID NO: 471420 - RNA, 32 nt, Human
gguuuuaaaaaccaaaccaauaaaauuuuuau

SEQ ID NO: 471421 - RNA, 30 nt, Human
gguuuuaacuugcaauacggaaaagacauu

SEQ ID NO: 471422 - RNA, 32 nt, Human
gguuuuaagaccucugcuuucucacuuugaag

SEQ ID NO: 471423 - RNA, 32 nt, Human
gguuuuaagucauucauuuccaaaucauuuuu

SEQ ID NO: 471424 - RNA, 32 nt, Human
gguuuuacaauagugauguuauccugaggagc

SEQ ID NO: 471425 - RNA, 32 nt, Human
gguuuuacacagagaaauacaaaauaaagauc

SEQ ID NO: 471426 - RNA, 32 nt, Human
gguuuuaccacugcacgaccaucuggcucucc

SEQ ID NO: 471427 - RNA, 32 nt, Human
gguuuuaccauguuggccagagugguuuugaa

SEQ ID NO: 471428 - RNA, 32 nt, Human
gguuuuacuaugcuguccagacuggucuuaaa

SEQ ID NO: 471429 - RNA, 32 nt, Human
gguuuuacugguuuuaaaaauugaugcauugg

SEQ ID NO: 471430 - RNA, 32 nt, Human
gguuuuacugguuuuaauaguacucuggaagg

SEQ ID NO: 471431 - RNA, 32 nt, Human
gguuuuagagguuucaaaucugugaacuuugg

SEQ ID NO: 471432 - RNA, 32 nt, Human
gguuuuagagugagagaaugaagggggugagg

SEQ ID NO: 471433 - RNA, 32 nt, Human
gguuuuagcccaaacucugcuucuaugguagg

SEQ ID NO: 471434 - RNA, 32 nt, Human
gguuuuaggcggggcuuaucuggcauccacca

SEQ ID NO: 471435 - RNA, 32 nt, Human
gguuuuaguagagacaggguuucuccauguug

SEQ ID NO: 471436 - RNA, 32 nt, Human
gguuuuaguagagacuuggccucccagaaccc

SEQ ID NO: 471437 - RNA, 32 nt, Human
gguuuuagugcagcuucugccguuaacuaggu

SEQ ID NO: 471438 - RNA, 24 nt, Human
gguuuuaguguguguaugugugaa

SEQ ID NO: 471439 - RNA, 32 nt, Human
gguuuuauggcuaaaacauuucuccagauuaa

SEQ ID NO: 471440 - RNA, 32 nt, Human
gguuuuauucaggguuuucacuguggacagaa

SEQ ID NO: 471441 - RNA, 32 nt, Human
gguuuuauugaaugucuauuugaguaucauuu

SEQ ID NO: 471442 - RNA, 32 nt, Human
gguuuuauuucagggcccuuuucaagaugccc

SEQ ID NO: 471443 - RNA, 22 nt, Human
gguuuuauuuugguucuuucca

SEQ ID NO: 471444 - RNA, 32 nt, Human
gguuuucaaagcaguuaucuugggaaacuguu

SEQ ID NO: 471445 - RNA, 24 nt, Human
gguuuucaagcaauucuccugccu

SEQ ID NO: 471446 - RNA, 26 nt, Human
gguuuucaagcaauucuccugccuca

SEQ ID NO: 471447 - RNA, 32 nt, Human
gguuuucaagccuucaaguugaaugagucuua

SEQ ID NO: 471448 - RNA, 32 nt, Human
gguuuucacugucucugucucaucuaguaccu

SEQ ID NO: 471449 - RNA, 32 nt, Human
gguuuucaucuauuuccuggcuuauaacuccc

SEQ ID NO: 471450 - RNA, 32 nt, Human
gguuuucauuguuccccgccuccugcgacucg

SEQ ID NO: 471451 - RNA, 32 nt, Human
gguuuuccaaagagcugggauuacaggcauga

SEQ ID NO: 471452 - RNA, 32 nt, Human
gguuuuccaauacacaagugcuagaaaauaca

SEQ ID NO: 471453 - RNA, 32 nt, Human
gguuuuccacgcuagggcggggcacagauugg

SEQ ID NO: 471454 - RNA, 32 nt, Human
gguuuuccauucuuaacugucuccuuauaccu

SEQ ID NO: 471455 - RNA, 18 nt, Human
gguuuucccacugcugcc

SEQ ID NO: 471456 - RNA, 19 nt, Human
gguuuucccuacugcugcc

SEQ ID NO: 471457 - RNA, 32 nt, Human
gguuuucccuacugcugccugaucccucggcu

SEQ ID NO: 471458 - RNA, 32 nt, Human
gguuuuccuagcuccauaccacacaccuaaac

SEQ ID NO: 471459 - RNA, 32 nt, Human
gguuuuccucaaggaacauuuuugagcuagaa

SEQ ID NO: 471460 - RNA, 22 nt, Human
gguuuuccugcccagccugcca

SEQ ID NO: 471461 - RNA, 28 nt, Human
gguuuuccugggacagcuggagcugugu

SEQ ID NO: 471462 - RNA, 32 nt, Human
gguuuuccuuaugaacaaaccuuacaggguaa

SEQ ID NO: 471463 - RNA, 19 nt, Human
gguuuuccuuuuucacuca

SEQ ID NO: 471464 - RNA, 32 nt, Human
gguuuucuagaaaguuguuacauaucauggcu

SEQ ID NO: 471465 - RNA, 25 nt, Human
gguuuucucaaagccacacagcaag

SEQ ID NO: 471466 - RNA, 32 nt, Human
gguuuucucccagaagagggucugccuugaga

SEQ ID NO: 471467 - RNA, 32 nt, Human
gguuuucuccuugguccugcaguaggauggga

SEQ ID NO: 471468 - RNA, 32 nt, Human
gguuuucucuucguuccagauaccaaauaaau

SEQ ID NO: 471469 - RNA, 32 nt, Human
gguuuucugaaacuccagcuucaugugacccu

SEQ ID NO: 471470 - RNA, 32 nt, Human
gguuuucuggugucuuuugaaaaauccaaaga

SEQ ID NO: 471471 - RNA, 32 nt, Human
gguuuucuguaacugaagccagugccacuucc

SEQ ID NO: 471472 - RNA, 32 nt, Human
gguuuucuucacugccaggaguagugagcugu

SEQ ID NO: 471473 - RNA, 32 nt, Human
gguuuucuucccaucacuggagcaccaggcac

SEQ ID NO: 471474 - RNA, 32 nt, Human
gguuuucuucuuucuccuuuaagcacuuacau

SEQ ID NO: 471475 - RNA, 32 nt, Human
gguuuucuugaccugccugccugcucuugaga

SEQ ID NO: 471476 - RNA, 32 nt, Human
gguuuucuugguaaaucuaaaaagcaaaaaua

SEQ ID NO: 471477 - RNA, 32 nt, Human
gguuuucuuguggggagguuacagaggcugac

SEQ ID NO: 471478 - RNA, 22 nt, Human
gguuuucuuuacaaccauggcc

SEQ ID NO: 471479 - RNA, 32 nt, Human
gguuuugaaaucucagcuauaaaagacaucca

SEQ ID NO: 471480 - RNA, 32 nt, Human
gguuuugaagcagcauugaaacuuuuguagca

SEQ ID NO: 471481 - RNA, 32 nt, Human
gguuuugacucuuccagcacccauggaugugc

SEQ ID NO: 471482 - RNA, 32 nt, Human
gguuuugacuuuuucuguugaaugaacaacug

SEQ ID NO: 471483 - RNA, 32 nt, Human
gguuuugagccccuccucugcagggaaugcuu

SEQ ID NO: 471484 - RNA, 32 nt, Human
gguuuugaugcuugggggaucauagaguauuu

SEQ ID NO: 471485 - RNA, 32 nt, Human
gguuuugauucugccacgagccagcuguguga

SEQ ID NO: 471486 - RNA, 32 nt, Human
gguuuugcaggucacuguuccacccaccuggg

SEQ ID NO: 471487 - RNA, 32 nt, Human
gguuuugccaagaaugacacuguaaauauaac

SEQ ID NO: 471488 - RNA, 32 nt, Human
gguuuugccaagaaugacacuguaaauguaac

SEQ ID NO: 471489 - RNA, 32 nt, Human
gguuuugccacauugcccaggauggccuugaa

SEQ ID NO: 471490 - RNA, 32 nt, Human
gguuuugcgauguugcccaggcuggucucaaa

SEQ ID NO: 471491 - RNA, 32 nt, Human
gguuuugcugccaugcauccugggcgaacuac

SEQ ID NO: 471492 - RNA, 32 nt, Human
gguuuugcuuguauuuuccuccagagauuuug

SEQ ID NO: 471493 - RNA, 32 nt, Human
gguuuuggaacucaaggccucugacaaugcca

SEQ ID NO: 471494 - RNA, 32 nt, Human
gguuuuggaauuacaggugugagccaccaugc

SEQ ID NO: 471495 - RNA, 19 nt, Human
gguuuuggaggaagaagac

SEQ ID NO: 471496 - RNA, 32 nt, Human
gguuuuggccacuacaacugcagaguugaaua

SEQ ID NO: 471497 - RNA, 32 nt, Human
gguuuugggggcaccuuccagaagguacaggu

SEQ ID NO: 471498 - RNA, 32 nt, Human
gguuuugggguccugggcuggggccacauccc

SEQ ID NO: 471499 - RNA, 32 nt, Human
gguuuugggguuuuuuguagugccuuuuguuu

SEQ ID NO: 471500 - RNA, 32 nt, Human
gguuuuggguuggaguucuuguuuuccucugu

SEQ ID NO: 471501 - RNA, 32 nt, Human
gguuuuggugacucugugcccuugcucucuaa

SEQ ID NO: 471502 - RNA, 31 nt, Human
gguuuuggugagagauaauauugauugaagg

SEQ ID NO: 471503 - RNA, 29 nt, Human
gguuuugugcagugugugccugggaggcg

SEQ ID NO: 471504 - RNA, 32 nt, Human
gguuuuguggggaucacugagaugaggcacgg

SEQ ID NO: 471505 - RNA, 32 nt, Human
gguuuuguguuagucuuccugcagcugagcuu

SEQ ID NO: 471506 - RNA, 22 nt, Human
gguuuuguucauauuuucucca

SEQ ID NO: 471507 - RNA, 32 nt, Human
gguuuuguuccuuuuuguggcugcaaaguuuu

SEQ ID NO: 471508 - RNA, 23 nt, Human
gguuuuguucugaguuauuucua

SEQ ID NO: 471509 - RNA, 32 nt, Human
gguuuuguucuggccuucuguacugaucugug

SEQ ID NO: 471510 - RNA, 32 nt, Human
gguuuuguuguuguuguuuuucaaacuaagaa

SEQ ID NO: 471511 - RNA, 32 nt, Human
gguuuuguuuacccuacuccccaaaucccuga

SEQ ID NO: 471512 - RNA, 32 nt, Human
gguuuuguuucugccucaaagcauuuugaagu

SEQ ID NO: 471513 - RNA, 26 nt, Human
gguuuuguuuuguuuucauuuuucca

SEQ ID NO: 471514 - RNA, 32 nt, Human
gguuuuguuuuuaauacuacuuuuuaaaagga

SEQ ID NO: 471515 - RNA, 23 nt, Human
gguuuuguuuuuaucuuguuuuc

SEQ ID NO: 471516 - RNA, 22 nt, Human
gguuuuguuuuuguuuuugcca

SEQ ID NO: 471517 - RNA, 32 nt, Human
gguuuuuaagaaaacaaaguguucuuuuuauu

SEQ ID NO: 471518 - RNA, 32 nt, Human
gguuuuuaaugucuuguggaaauuugcagagg

SEQ ID NO: 471519 - RNA, 32 nt, Human
gguuuuuaauuuaaaauaggagggccccagau

SEQ ID NO: 471520 - RNA, 32 nt, Human
gguuuuuacuauugaacccuuguacuuugccu

SEQ ID NO: 471521 - RNA, 32 nt, Human
gguuuuuaguuuuaucuacucuucuauugaag

SEQ ID NO: 471522 - RNA, 21 nt, Human
gguuuuuaguuuuuaccauca

SEQ ID NO: 471523 - RNA, 32 nt, Human
gguuuuuauaaauuucucaauuuggggacaag

SEQ ID NO: 471524 - RNA, 32 nt, Human
gguuuuuaucacuuguaaagacaugcagaugg

SEQ ID NO: 471525 - RNA, 32 nt, Human
gguuuuuauuucauuuuggcucugucauuuuc

SEQ ID NO: 471526 - RNA, 32 nt, Human
gguuuuucaagcaaauucugauaccaaccucu

SEQ ID NO: 471527 - RNA, 32 nt, Human
gguuuuuccacuucauuuugugacuuugugug

SEQ ID NO: 471528 - RNA, 32 nt, Human
gguuuuucuauggaaaguucugauacagcugg

SEQ ID NO: 471529 - RNA, 32 nt, Human
gguuuuucucccuuucugugcuugccaauagu

SEQ ID NO: 471530 - RNA, 32 nt, Human
gguuuuucucuagcuuuuugccagaacaaagg

SEQ ID NO: 471531 - RNA, 32 nt, Human
gguuuuucucucaugguagcucuccaacagca

SEQ ID NO: 471532 - RNA, 32 nt, Human
gguuuuucugaacuuuugccucugcggaauca

SEQ ID NO: 471533 - RNA, 32 nt, Human
gguuuuucugcagcuauuuucuagcauuugcc

SEQ ID NO: 471534 - RNA, 32 nt, Human
gguuuuucuuucucccugauggacagacccaa

SEQ ID NO: 471535 - RNA, 32 nt, Human
gguuuuucuuuuauuuucuaagaagguugaag

SEQ ID NO: 471536 - RNA, 32 nt, Human
gguuuuucuuuuccuuuuuaauuuuucuucuu

SEQ ID NO: 471537 - RNA, 32 nt, Human
gguuuuugacccuggaugucagaguugaucua

SEQ ID NO: 471538 - RNA, 32 nt, Human
gguuuuuggcuguuucucaucaucucauggaa

SEQ ID NO: 471539 - RNA, 32 nt, Human
  misc_feature (2)..(4): n is a, c, g, or u
gnnncacgccuguaaucccagcacuuugggag

SEQ ID NO: 471540 - RNA, 32 nt, Human
  misc_feature (2)..(2): n is a, c, g, or u
  misc_feature (5)..(5): n is a, c, g, or u
gnuanuacuaugugcaggaacccuuggucaca

SEQ ID NO: 471541 - RNA, 32 nt, Human
guaaaaacaacaacaacaaaacaccucuguca

SEQ ID NO: 471542 - RNA, 32 nt, Human
guaaaaacaagaaaccauccacucuguauauu

SEQ ID NO: 471543 - RNA, 32 nt, Human
guaaaaacaaguuugaaaugcauuuuggggua

SEQ ID NO: 471544 - RNA, 32 nt, Human
guaaaaacuaccaagagaacacgaggaaggca

SEQ ID NO: 471545 - RNA, 32 nt, Human
guaaaaagcagagcaaaugcauggacaguggg

SEQ ID NO: 471546 - RNA, 32 nt, Human
guaaaaagcagcuuuggaaacugugaaugauc

SEQ ID NO: 471547 - RNA, 32 nt, Human
guaaaaagcaggaacuccuacuuuuucuuuau

SEQ ID NO: 471548 - RNA, 21 nt, Human
guaaaaaguaaugaauccuga

SEQ ID NO: 471549 - RNA, 32 nt, Human
guaaaaaguacacuuuaaaauauuuuaaucag

SEQ ID NO: 471550 - RNA, 25 nt, Human
guaaaaaguauuuuuucaaguugua

SEQ ID NO: 471551 - RNA, 32 nt, Human
guaaaaagugccacccacggaggcaggacaca

SEQ ID NO: 471552 - RNA, 32 nt, Human
guaaaaauacaaaaauuagcugggcacggugg

SEQ ID NO: 471553 - RNA, 32 nt, Human
guaaaaauacaaaaauuagcugggcguggcgg

SEQ ID NO: 471554 - RNA, 32 nt, Human
guaaaaaucucucauuuguguggagucauuuc

SEQ ID NO: 471555 - RNA, 32 nt, Human
guaaaaaugagaacauguuaguauuuaucuau

SEQ ID NO: 471556 - RNA, 32 nt, Human
guaaaaauguguuugcuugagaaaagcaaaaa

SEQ ID NO: 471557 - RNA, 32 nt, Human
guaaaaauucccccaagagccgcauaugaauc

SEQ ID NO: 471558 - RNA, 32 nt, Human
guaaaaauuuggacccuuaucaugcauacccc

SEQ ID NO: 471559 - RNA, 32 nt, Human
guaaaacacaaaccccgcucuccauaaugaga

SEQ ID NO: 471560 - RNA, 32 nt, Human
guaaaacacuguaguuacaagaucucauuuaa

SEQ ID NO: 471561 - RNA, 32 nt, Human
guaaaacagaagccacacuguauuccagauga

SEQ ID NO: 471562 - RNA, 32 nt, Human
guaaaacagaucuuuuauguaagaaaaauaca

SEQ ID NO: 471563 - RNA, 32 nt, Human
guaaaacagcugggagcagugggagcuguggc

SEQ ID NO: 471564 - RNA, 32 nt, Human
guaaaacauucugcuuucuuagucuuaccuag

SEQ ID NO: 471565 - RNA, 32 nt, Human
guaaaacauugaguccccucccugccuugguu

SEQ ID NO: 471566 - RNA, 32 nt, Human
guaaaacauuugguacaguaugugacacauag

SEQ ID NO: 471567 - RNA, 32 nt, Human
guaaaacccaagacauuaaaucugccaucuca

SEQ ID NO: 471568 - RNA, 32 nt, Human
guaaaacccaggaggcagagcuugcagugagc

SEQ ID NO: 471569 - RNA, 32 nt, Human
guaaaacggggacagucccugccccucccuac

SEQ ID NO: 471570 - RNA, 32 nt, Human
guaaaacuaaggcuucagccauaauauggagg

SEQ ID NO: 471571 - RNA, 32 nt, Human
guaaaacucuaucauccagaacagagaucuua

SEQ ID NO: 471572 - RNA, 32 nt, Human
guaaaacucucaucucauuuuacauugauauu

SEQ ID NO: 471573 - RNA, 32 nt, Human
guaaaacucugcaacucuaggaauucuaagau

SEQ ID NO: 471574 - RNA, 32 nt, Human
guaaaacugcaacacugugacuucuuaaauga

SEQ ID NO: 471575 - RNA, 32 nt, Human
guaaaacugguaaaggaaguaucagaacgguu

SEQ ID NO: 471576 - RNA, 32 nt, Human
guaaaagaaaggcauuggggacaaaugaaaga

SEQ ID NO: 471577 - RNA, 32 nt, Human
guaaaagaagcagcuacaucaugcuuuuagug

SEQ ID NO: 471578 - RNA, 32 nt, Human
guaaaagaagguguauuuguguggacaagaug

SEQ ID NO: 471579 - RNA, 32 nt, Human
guaaaagacccaaccccagcagaaagacaccg

SEQ ID NO: 471580 - RNA, 32 nt, Human
guaaaagacggcuaguuggccuccucauuuua

SEQ ID NO: 471581 - RNA, 32 nt, Human
guaaaagaugacgcuugauaucuccggagcau

SEQ ID NO: 471582 - RNA, 32 nt, Human
guaaaagcaaaaagcuuuuacaaaacacagcc

SEQ ID NO: 471583 - RNA, 32 nt, Human
guaaaagcaaaggagguggggagcaggagaga

SEQ ID NO: 471584 - RNA, 32 nt, Human
guaaaagcauuuucauucucuuagaaauucaa

SEQ ID NO: 471585 - RNA, 32 nt, Human
guaaaagcauuuuccacagauuguuaucaccu

SEQ ID NO: 471586 - RNA, 32 nt, Human
guaaaagcccccgagaccucccagaagccaag

SEQ ID NO: 471587 - RNA, 32 nt, Human
guaaaagcccuccugaguucaugggcuguacc

SEQ ID NO: 471588 - RNA, 32 nt, Human
guaaaagcccucuuuucuguuuucagguuuuu

SEQ ID NO: 471589 - RNA, 25 nt, Human
guaaaagcuaugguaaccacuaccc

SEQ ID NO: 471590 - RNA, 32 nt, Human
guaaaagggagagagggagggaggaaggaagg

SEQ ID NO: 471591 - RNA, 32 nt, Human
guaaaagggcauucaucauugugccucauauc

SEQ ID NO: 471592 - RNA, 32 nt, Human
guaaaaggggcagcaggguagagcaggugaug

SEQ ID NO: 471593 - RNA, 32 nt, Human
guaaaagguacccuugccuuacuccaucuuau

SEQ ID NO: 471594 - RNA, 32 nt, Human
guaaaaggugaagccaagaacagcauuacuga

SEQ ID NO: 471595 - RNA, 31 nt, Human
guaaaaguacccauuguuucacuuccuggag

SEQ ID NO: 471596 - RNA, 32 nt, Human
guaaaagugccuggcagcuuggcugccgugga

SEQ ID NO: 471597 - RNA, 32 nt, Human
guaaaagugggguaaagauggguuuuuaauga

SEQ ID NO: 471598 - RNA, 32 nt, Human
guaaaaguuacugccuaugcuuuuuaccuuag

SEQ ID NO: 471599 - RNA, 32 nt, Human
guaaaaguucacaauaugguucaaauguaaca

SEQ ID NO: 471600 - RNA, 32 nt, Human
guaaaauaagguaagaaguaaauauguaaaag

SEQ ID NO: 471601 - RNA, 32 nt, Human
guaaaauaaugaagguagaaauuauaacacua

SEQ ID NO: 471602 - RNA, 32 nt, Human
guaaaauaggaccacuucucuucaucuacacu

SEQ ID NO: 471603 - RNA, 32 nt, Human
guaaaauagggcagugcccagcuggggaggua

SEQ ID NO: 471604 - RNA, 32 nt, Human
guaaaauaugaaaacuuaacucugcugugugu

SEQ ID NO: 471605 - RNA, 32 nt, Human
guaaaauauguaugaagaaaagguguacaaaa

SEQ ID NO: 471606 - RNA, 32 nt, Human
guaaaaucaacugauuguacauguguggguuc

SEQ ID NO: 471607 - RNA, 32 nt, Human
guaaaaucacuuuugaaaacaguuuggcaguu

SEQ ID NO: 471608 - RNA, 32 nt, Human
guaaaaucccagaggaauccaaagcccucucu

SEQ ID NO: 471609 - RNA, 32 nt, Human
guaaaaucucaccuccuaucuuuccuuucucu

SEQ ID NO: 471610 - RNA, 32 nt, Human
guaaaaucucuacucuuccugagaguuuugag

SEQ ID NO: 471611 - RNA, 32 nt, Human
guaaaaucucuucugucacacacagaugaacu

SEQ ID NO: 471612 - RNA, 32 nt, Human
guaaaaucuuucucaacccugcuuuucaucau

SEQ ID NO: 471613 - RNA, 32 nt, Human
guaaaaugaacugcaguggguucuccaaacua

SEQ ID NO: 471614 - RNA, 32 nt, Human
guaaaaugaagcagucuuaagagugacuaaua

SEQ ID NO: 471615 - RNA, 31 nt, Human
guaaaaugacuucuguuuucucaaaggccau

SEQ ID NO: 471616 - RNA, 32 nt, Human
guaaaaugccagaagcaggugaagagcaacca

SEQ ID NO: 471617 - RNA, 32 nt, Human
guaaaauggaccaaucagcaggaugugggugg

SEQ ID NO: 471618 - RNA, 32 nt, Human
guaaaauggaccagucagcaggaugugggcgg

SEQ ID NO: 471619 - RNA, 32 nt, Human
guaaaauggagaccaauugcacuaggcaagug

SEQ ID NO: 471620 - RNA, 32 nt, Human
guaaaaugggagaagguucgugggaggggccu

SEQ ID NO: 471621 - RNA, 32 nt, Human
guaaaaugggccaaucagcaggaugugggugg

SEQ ID NO: 471622 - RNA, 32 nt, Human
guaaaaugguaguuggcucuugugcucaauuu

SEQ ID NO: 471623 - RNA, 32 nt, Human
guaaaaugugcacaccugacuugcaauguugu

SEQ ID NO: 471624 - RNA, 32 nt, Human
guaaaauguuacuguccaauguuggauuauug

SEQ ID NO: 471625 - RNA, 32 nt, Human
guaaaauuagccacugcguggcuuuguguaua

SEQ ID NO: 471626 - RNA, 32 nt, Human
guaaaauuauuuuucaagcaaauguuuaaaau

SEQ ID NO: 471627 - RNA, 23 nt, Human
guaaaauucaaacugguacugua

SEQ ID NO: 471628 - RNA, 32 nt, Human
guaaaauucaauauuuuuauauucccagaaau

SEQ ID NO: 471629 - RNA, 32 nt, Human
guaaaauucccuagcucucugcacugagcuga

SEQ ID NO: 471630 - RNA, 32 nt, Human
guaaaauuugccacacacccagccugaaguuc

SEQ ID NO: 471631 - RNA, 32 nt, Human
guaaaauuuuccuguccacugugaaucaaagc

SEQ ID NO: 471632 - RNA, 32 nt, Human
guaaacaaaaggaguuugugaccaacuauguu

SEQ ID NO: 471633 - RNA, 32 nt, Human
guaaacaaccugcucagggcucuggugaacaa

SEQ ID NO: 471634 - RNA, 32 nt, Human
guaaacacaugagccauucggcaccaaacaca

SEQ ID NO: 471635 - RNA, 32 nt, Human
guaaacaccagccuguugcuguacuuuucugc

SEQ ID NO: 471636 - RNA, 32 nt, Human
guaaacacuuggaaaugguggugcuuuaaaaa

SEQ ID NO: 471637 - RNA, 32 nt, Human
guaaacagacaggcucuggcagugcagaucug

SEQ ID NO: 471638 - RNA, 32 nt, Human
guaaacagagacaguuugauuuccugucuauu

SEQ ID NO: 471639 - RNA, 32 nt, Human
guaaacaggaaggaaggaggccaucuguucaa

SEQ ID NO: 471640 - RNA, 32 nt, Human
guaaacaggcucaucucugaguucucaggacc

SEQ ID NO: 471641 - RNA, 32 nt, Human
guaaacaguucauccaugaucucacuuaacca

SEQ ID NO: 471642 - RNA, 32 nt, Human
guaaacaguucugcacucuuguacaaaagaaa

SEQ ID NO: 471643 - RNA, 32 nt, Human
guaaacaguuugaaaagacaaaugggccugcc

SEQ ID NO: 471644 - RNA, 32 nt, Human
guaaacaguuuuuguuucugauaguaauggac

SEQ ID NO: 471645 - RNA, 32 nt, Human
guaaacauacagauuccuaauucuaugacagu

SEQ ID NO: 471646 - RNA, 32 nt, Human
guaaacaugaauguucaggaacuacugaugua

SEQ ID NO: 471647 - RNA, 32 nt, Human
guaaacauuuugcucaauaucauuguauuuug

SEQ ID NO: 471648 - RNA, 32 nt, Human
guaaaccaggagacacagaagacguaccagau

SEQ ID NO: 471649 - RNA, 32 nt, Human
guaaacccacugggcaccacagaggcagaagg

SEQ ID NO: 471650 - RNA, 32 nt, Human
guaaacccagcacuuugggagacugaggaggg

SEQ ID NO: 471651 - RNA, 32 nt, Human
guaaaccccaacaacaucaagcacauuugucu

SEQ ID NO: 471652 - RNA, 32 nt, Human
guaaaccccaagaguaucugagacaaguguca

SEQ ID NO: 471653 - RNA, 32 nt, Human
guaaacccuucuuuggcuuuccuugcccauug

SEQ ID NO: 471654 - RNA, 32 nt, Human
guaaaccugcagccguuuugcacacccugguc

SEQ ID NO: 471655 - RNA, 32 nt, Human
guaaaccugggauguagagccgcauuccccca

SEQ ID NO: 471656 - RNA, 32 nt, Human
guaaacgccccagucccacccugcugcugcuc

SEQ ID NO: 471657 - RNA, 32 nt, Human
guaaacgccucagucucacccugcugcugcuc

SEQ ID NO: 471658 - RNA, 32 nt, Human
guaaacgcucacugccauucugcgaucauuau

SEQ ID NO: 471659 - RNA, 32 nt, Human
guaaacggaauggugccauuguacuucaugua

SEQ ID NO: 471660 - RNA, 32 nt, Human
guaaacgggggagggggcaaaagaccaugcua

SEQ ID NO: 471661 - RNA, 32 nt, Human
guaaacggguacagcucauucuuucugagaag

SEQ ID NO: 471662 - RNA, 32 nt, Human
guaaacguucgguggauccucugucuuuguaa

SEQ ID NO: 471663 - RNA, 32 nt, Human
guaaacguuugucguguacaagcucagagcuu

SEQ ID NO: 471664 - RNA, 32 nt, Human
guaaacuaaagaaagauaaaguauacuaaaaa

SEQ ID NO: 471665 - RNA, 32 nt, Human
guaaacuaagggugucaagccccauucccucu

SEQ ID NO: 471666 - RNA, 32 nt, Human
guaaacuacugcaacccucacauccucaaagg

SEQ ID NO: 471667 - RNA, 32 nt, Human
guaaacuaguucaaccauuguggaagucagug

SEQ ID NO: 471668 - RNA, 32 nt, Human
guaaacuaucucugccuucaaggagcuugcag

SEQ ID NO: 471669 - RNA, 32 nt, Human
guaaacucaaauaucaauauuuuaaauguccg

SEQ ID NO: 471670 - RNA, 32 nt, Human
guaaacucaauuugccucccuaccucacacaa

SEQ ID NO: 471671 - RNA, 32 nt, Human
guaaacucagcagauagagccaggcugcaucu

SEQ ID NO: 471672 - RNA, 32 nt, Human
guaaacuccucagccagcacccuggggugugg

SEQ ID NO: 471673 - RNA, 32 nt, Human
guaaacugaaaccuaagacacacgaagaaauu

SEQ ID NO: 471674 - RNA, 32 nt, Human
guaaacugagguaaugagagggggacacugau

SEQ ID NO: 471675 - RNA, 32 nt, Human
guaaacugccaagaaaggaaguucacuaauau

SEQ ID NO: 471676 - RNA, 30 nt, Human
guaaacugccuguccaugcucuuuguuuuu

SEQ ID NO: 471677 - RNA, 32 nt, Human
guaaacugguaaaaacagccauuuaaggcuuc

SEQ ID NO: 471678 - RNA, 32 nt, Human
guaaacuguggaccuugaaguuagcagcgugg

SEQ ID NO: 471679 - RNA, 32 nt, Human
guaaacuucucccagccuccgcccugcccuca

SEQ ID NO: 471680 - RNA, 32 nt, Human
guaaacuugugucaugggggcuuguuguacag

SEQ ID NO: 471681 - RNA, 32 nt, Human
guaaagaaaagagguuuaauugacucacaguu

SEQ ID NO: 471682 - RNA, 32 nt, Human
guaaagaaaagagguuuaauuggcucauggcu

SEQ ID NO: 471683 - RNA, 32 nt, Human
guaaagaaaauguaaaaauguaacuauagcau

SEQ ID NO: 471684 - RNA, 32 nt, Human
guaaagaaaauguaaaauugcugcuagucaaa

SEQ ID NO: 471685 - RNA, 32 nt, Human
guaaagaaaauuacuucugguauuuaggcugu

SEQ ID NO: 471686 - RNA, 32 nt, Human
guaaagaacacugccuuguuccccaucaguaa

SEQ ID NO: 471687 - RNA, 32 nt, Human
guaaagaacccaagguugagugcaacuggggu

SEQ ID NO: 471688 - RNA, 32 nt, Human
guaaagaagaaauguaguuuacauuuguauuu

SEQ ID NO: 471689 - RNA, 32 nt, Human
guaaagaagggaagcuuuguuugaaaauugua

SEQ ID NO: 471690 - RNA, 32 nt, Human
guaaagacaguucagagagaccuguugauuug

SEQ ID NO: 471691 - RNA, 32 nt, Human
guaaagacauuuccaugugcagcgaggaaaag

SEQ ID NO: 471692 - RNA, 32 nt, Human
guaaagacccuccaccaccccuauaaguuuga

SEQ ID NO: 471693 - RNA, 32 nt, Human
guaaagacgggggauuucaccauguuggccag

SEQ ID NO: 471694 - RNA, 32 nt, Human
guaaagacgggguuucgccuuguugcccaggg

SEQ ID NO: 471695 - RNA, 32 nt, Human
guaaagacugggaugguuguguggaaaacuuu

SEQ ID NO: 471696 - RNA, 32 nt, Human
guaaagagaacagcagguccuggacuaaagca

SEQ ID NO: 471697 - RNA, 32 nt, Human
guaaagagagagagccagcccagcccuguuuc

SEQ ID NO: 471698 - RNA, 32 nt, Human
guaaagaggggcuggaaauacgcugguugcug

SEQ ID NO: 471699 - RNA, 32 nt, Human
guaaagaucccaauguucuaccucucccuguc

SEQ ID NO: 471700 - RNA, 32 nt, Human
guaaagaucugaaauaaaaagaugcaucuuua

SEQ ID NO: 471701 - RNA, 16 nt, Human
guaaagauggcggaaa

SEQ ID NO: 471702 - RNA, 32 nt, Human
guaaagauguuggccuugaagcagaaaauuca

SEQ ID NO: 471703 - RNA, 32 nt, Human
guaaagcaagcaaccucugcuuacuugcccaa

SEQ ID NO: 471704 - RNA, 32 nt, Human
guaaagcacuauauucuuguuuguuaguccuu

SEQ ID NO: 471705 - RNA, 32 nt, Human
guaaagcagaucuguggauggggagccuacgg

SEQ ID NO: 471706 - RNA, 32 nt, Human
guaaagcagccugucgcuugccgggcagcugg

SEQ ID NO: 471707 - RNA, 32 nt, Human
guaaagcaggaaauggugugggagaugugaga

SEQ ID NO: 471708 - RNA, 32 nt, Human
guaaagccaagaggguuuagagagggauuugc

SEQ ID NO: 471709 - RNA, 32 nt, Human
guaaagccccucucccuucguucgaccaaccc

SEQ ID NO: 471710 - RNA, 32 nt, Human
guaaagcccuugauaccacgugcauugcaaag

SEQ ID NO: 471711 - RNA, 32 nt, Human
guaaagcgcuccagagccacauggacggagcu

SEQ ID NO: 471712 - RNA, 32 nt, Human
guaaagcuaccugaggcagugcgcuggaggau

SEQ ID NO: 471713 - RNA, 32 nt, Human
guaaagcucuacuuuccuacugcagccuucag

SEQ ID NO: 471714 - RNA, 32 nt, Human
guaaagcugcuugugaauuuucugagacggau

SEQ ID NO: 471715 - RNA, 32 nt, Human
guaaagcuggcuuucuggagucugccaggucc

SEQ ID NO: 471716 - RNA, 32 nt, Human
guaaagcuguugggggaagaagaguuuuugga

SEQ ID NO: 471717 - RNA, 32 nt, Human
guaaaggaaaugauugaggagugaggaaggca

SEQ ID NO: 471718 - RNA, 32 nt, Human
guaaaggaguggggcugcugcagccauucaga

SEQ ID NO: 471719 - RNA, 32 nt, Human
guaaaggaguuggggaaggaagagggcgagau

SEQ ID NO: 471720 - RNA, 31 nt, Human
guaaaggcaaugucuauuucagggauuguaa

SEQ ID NO: 471721 - RNA, 32 nt, Human
guaaaggccauggccaugcagaaaaucuuugc

SEQ ID NO: 471722 - RNA, 32 nt, Human
guaaaggcccccagucccugagacgggccagu

SEQ ID NO: 471723 - RNA, 32 nt, Human
guaaaggccugggagcuagacccuccccaagc

SEQ ID NO: 471724 - RNA, 32 nt, Human
guaaaggcuacacacacauauggagcacccca

SEQ ID NO: 471725 - RNA, 32 nt, Human
guaaagggagagaaguuggugcucaacgugag

SEQ ID NO: 471726 - RNA, 32 nt, Human
guaaagggaucagggcuucaguuauucuauau

SEQ ID NO: 471727 - RNA, 32 nt, Human
guaaagggaucauuucugugccaagcugcaca

SEQ ID NO: 471728 - RNA, 32 nt, Human
guaaaggggaacagaagccaagcaucagcuuc

SEQ ID NO: 471729 - RNA, 32 nt, Human
guaaagguguucaaauaaagggcuguuucuac

SEQ ID NO: 471730 - RNA, 32 nt, Human
guaaaguaaaacauaacagguuauggcaaagc

SEQ ID NO: 471731 - RNA, 32 nt, Human
guaaaguauuuauugcuacaucauaguugaua

SEQ ID NO: 471732 - RNA, 32 nt, Human
guaaaguauuugacuuacuaguucucaauaaa

SEQ ID NO: 471733 - RNA, 32 nt, Human
guaaagucuccucuggaaaugccaauccaucc

SEQ ID NO: 471734 - RNA, 32 nt, Human
guaaagucucuccugaaaauguuggcauagua

SEQ ID NO: 471735 - RNA, 32 nt, Human
guaaaguguuaaggaauagggacagcugguca

SEQ ID NO: 471736 - RNA, 32 nt, Human
guaaaguucucuuccuuuuguugccuaccucu

SEQ ID NO: 471737 - RNA, 32 nt, Human
guaaaguuugcaaaaguuugguguuuugauuu

SEQ ID NO: 471738 - RNA, 32 nt, Human
guaaauaaacacacacauuaaggagagauuaa

SEQ ID NO: 471739 - RNA, 32 nt, Human
guaaauaauaaccaaccaaccaaccaaccaaa

SEQ ID NO: 471740 - RNA, 19 nt, Human
guaaauaauguacauuuaa

SEQ ID NO: 471741 - RNA, 32 nt, Human
guaaauacacuucaaaaugccuaugauccggu

SEQ ID NO: 471742 - RNA, 32 nt, Human
guaaauacaguacacauuuuauuucuuggauu

SEQ ID NO: 471743 - RNA, 32 nt, Human
guaaauacaugugcauaaggcacagaagcaca

SEQ ID NO: 471744 - RNA, 32 nt, Human
guaaauaccuugaggcaggagugagguuuuua

SEQ ID NO: 471745 - RNA, 32 nt, Human
guaaauacuaacgacaugaaaaugcaaguguc

SEQ ID NO: 471746 - RNA, 32 nt, Human
guaaauagcuauugcacuccagccuuggcaac

SEQ ID NO: 471747 - RNA, 32 nt, Human
guaaauaggcucaucuaccucuaccucugggg

SEQ ID NO: 471748 - RNA, 32 nt, Human
guaaauaggcuguggccagugccuggucauca

SEQ ID NO: 471749 - RNA, 32 nt, Human
guaaauaguauuugagaguucuaaauuuuguc

SEQ ID NO: 471750 - RNA, 32 nt, Human
guaaauaucaauauaauguaccaaugaaauaa

SEQ ID NO: 471751 - RNA, 32 nt, Human
guaaauaugagggaagacacagcaaauggcca

SEQ ID NO: 471752 - RNA, 32 nt, Human
guaaauaugcaaaucagcuuuauagguuuauu

SEQ ID NO: 471753 - RNA, 32 nt, Human
guaaauaugcugcaguuaauugugcuaaguua

SEQ ID NO: 471754 - RNA, 32 nt, Human
guaaauauuccaguggauacaagcuuggacuc

SEQ ID NO: 471755 - RNA, 32 nt, Human
guaaauauuguuuuaaaaugcaucagccuaug

SEQ ID NO: 471756 - RNA, 32 nt, Human
guaaauauuuggacuaacuuuuagaaaaguuu

SEQ ID NO: 471757 - RNA, 32 nt, Human
guaaaucagaugggaccucugaccucagugcg

SEQ ID NO: 471758 - RNA, 32 nt, Human
guaaaucaugacucaguacagugcaaguuuuu

SEQ ID NO: 471759 - RNA, 32 nt, Human
guaaauccaccuuugagaauuuaggcgaagga

SEQ ID NO: 471760 - RNA, 32 nt, Human
guaaauccccacacugcagcccugccacuugc

SEQ ID NO: 471761 - RNA, 32 nt, Human
guaaauccuuucuaccucuggcugaaggagug

SEQ ID NO: 471762 - RNA, 32 nt, Human
guaaaucgaccuuuaagaauuccuggggugga

SEQ ID NO: 471763 - RNA, 32 nt, Human
guaaaucgccuggagcaagcuguuguaaauuu

SEQ ID NO: 471764 - RNA, 32 nt, Human
guaaaucuaaguaaacauguauuacucaaagu

SEQ ID NO: 471765 - RNA, 32 nt, Human
guaaaucuaguuuuugacacagugcaugaacu

SEQ ID NO: 471766 - RNA, 30 nt, Human
guaaaucuccaauaaaguuaucgucuguuc

SEQ ID NO: 471767 - RNA, 32 nt, Human
guaaaucuggaauaauggaaggaaaacauaga

SEQ ID NO: 471768 - RNA, 32 nt, Human
guaaaucugucugguccugggcuuuucuuggu

SEQ ID NO: 471769 - RNA, 32 nt, Human
guaaaucuguggugagagaagcuuccuuucug

SEQ ID NO: 471770 - RNA, 32 nt, Human
guaaaucuuccacuuaaccacugaaaauuauu

SEQ ID NO: 471771 - RNA, 24 nt, Human
guaaaucuuucaacacacuuccac

SEQ ID NO: 471772 - RNA, 32 nt, Human
guaaaugaagaaagaggaagauuccaggaccu

SEQ ID NO: 471773 - RNA, 22 nt, Human
guaaaugaagcccaggaaaaca

SEQ ID NO: 471774 - RNA, 32 nt, Human
guaaaugaccuuguauauaaauauugccauau

SEQ ID NO: 471775 - RNA, 32 nt, Human
guaaaugacgccgcucgauuccaggcuccaag

SEQ ID NO: 471776 - RNA, 32 nt, Human
guaaaugacucuccucugagcuguaauaaaua

SEQ ID NO: 471777 - RNA, 32 nt, Human
guaaaugagcugauggaagagcuguuugaaac

SEQ ID NO: 471778 - RNA, 32 nt, Human
guaaaugagguaacugaggcucagggaggcac

SEQ ID NO: 471779 - RNA, 32 nt, Human
guaaaugaucacuucgaucauguuuccaugca

SEQ ID NO: 471780 - RNA, 32 nt, Human
guaaaugauguguugguuuacaggguauauuu

SEQ ID NO: 471781 - RNA, 32 nt, Human
guaaaugcaaacauguaucuauauugagagau

SEQ ID NO: 471782 - RNA, 32 nt, Human
guaaaugcauuuucacccauucugugguucau

SEQ ID NO: 471783 - RNA, 32 nt, Human
guaaaugccggagguggagcugggcagcugug

SEQ ID NO: 471784 - RNA, 32 nt, Human
guaaaugccucaauacguucugggagaaaacu

SEQ ID NO: 471785 - RNA, 32 nt, Human
guaaaugggaaagaagugagcaacuuaagauu

SEQ ID NO: 471786 - RNA, 29 nt, Human
guaaauggggucuugcuguguugcccaga

SEQ ID NO: 471787 - RNA, 32 nt, Human
guaaaugguaguugaaaggagcaggggcccug

SEQ ID NO: 471788 - RNA, 32 nt, Human
guaaauggugccucuaggcaaaggaggcuugu

SEQ ID NO: 471789 - RNA, 32 nt, Human
guaaauguagguagcagugcaggggugaucuc

SEQ ID NO: 471790 - RNA, 32 nt, Human
guaaauguauccugaagguggggaggaauguu

SEQ ID NO: 471791 - RNA, 32 nt, Human
guaaaugucccaagcagccucuugccagcagu

SEQ ID NO: 471792 - RNA, 32 nt, Human
guaaaugugauggagagggaacaacuguguac

SEQ ID NO: 471793 - RNA, 32 nt, Human
guaaauguggagccuuuaagaacugagcgcaa

SEQ ID NO: 471794 - RNA, 32 nt, Human
guaaauguguacauauuaaaggaagcacucug

SEQ ID NO: 471795 - RNA, 32 nt, Human
guaaauuacugccccucacugggucucugucu

SEQ ID NO: 471796 - RNA, 32 nt, Human
guaaauuaguaaaguaauaauuuggcuucaga

SEQ ID NO: 471797 - RNA, 32 nt, Human
guaaauuauaaaggaggcuacucugguaaggg

SEQ ID NO: 471798 - RNA, 32 nt, Human
guaaauuauauacuguugucuuucuaauaaaa

SEQ ID NO: 471799 - RNA, 32 nt, Human
guaaauuaucuuucuaaugcucugugaggcca

SEQ ID NO: 471800 - RNA, 32 nt, Human
guaaauucauuaguugguauuuauuuaaaagc

SEQ ID NO: 471801 - RNA, 32 nt, Human
guaaauugacccuagccagagaauagaucagu

SEQ ID NO: 471802 - RNA, 32 nt, Human
guaaauugagaugucuggaaguccaggaugac

SEQ ID NO: 471803 - RNA, 32 nt, Human
guaaauuuauaaauauauucaggaguuggaau

SEQ ID NO: 471804 - RNA, 32 nt, Human
guaaauuugaagaugggaccgucuaguugcaa

SEQ ID NO: 471805 - RNA, 32 nt, Human
guaacaaacagcuuugaacugagagcaauuuc

SEQ ID NO: 471806 - RNA, 32 nt, Human
guaacaaacccccaugacacaccuuuauguau

SEQ ID NO: 471807 - RNA, 32 nt, Human
guaacaaaguaaucacuuugucuaucacuaag

SEQ ID NO: 471808 - RNA, 32 nt, Human
guaacaacuaugauuaacuuguuuacuuuuuc

SEQ ID NO: 471809 - RNA, 32 nt, Human
guaacaacucacaugagcucguguuuggcuca

SEQ ID NO: 471810 - RNA, 32 nt, Human
guaacaagaugggguugaccauaugugaaccc

SEQ ID NO: 471811 - RNA, 32 nt, Human
guaacaagcuguuccuuguuucugauacauaa

SEQ ID NO: 471812 - RNA, 32 nt, Human
guaacaaggaaagaaggauggaagagaaggca

SEQ ID NO: 471813 - RNA, 32 nt, Human
guaacaagggugugugcacacuugagaagcca

SEQ ID NO: 471814 - RNA, 32 nt, Human
guaacaauuccuggcauacagugggcagccaa

SEQ ID NO: 471815 - RNA, 32 nt, Human
guaacaauuuugcuucucagcuuccacucuaa

SEQ ID NO: 471816 - RNA, 32 nt, Human
guaacacaaucagaaaucccaugugcccauaa

SEQ ID NO: 471817 - RNA, 32 nt, Human
guaacacacaguuugggauacguaucuguuga

SEQ ID NO: 471818 - RNA, 32 nt, Human
guaacacagccaagacccaguuuacagugucu

SEQ ID NO: 471819 - RNA, 32 nt, Human
guaacaccacugcacuccaaccugggcaacag

SEQ ID NO: 471820 - RNA, 32 nt, Human
guaacaccagcuggccuuguccaagggacaga

SEQ ID NO: 471821 - RNA, 32 nt, Human
guaacacuacucauauccaccucggcagaaau

SEQ ID NO: 471822 - RNA, 32 nt, Human
guaacacucauuuuaacgcuacuuuaguggca

SEQ ID NO: 471823 - RNA, 32 nt, Human
guaacacucugacuucuaagguccagacauaa

SEQ ID NO: 471824 - RNA, 32 nt, Human
guaacacugagccagccacuacccagagagca

SEQ ID NO: 471825 - RNA, 32 nt, Human
guaacacugaucugcuagugcuguaauauugu

SEQ ID NO: 471826 - RNA, 32 nt, Human
guaacacugcauguucauauccugaauuacaa

SEQ ID NO: 471827 - RNA, 32 nt, Human
guaacacuggugccuguaucccugucuucuuu

SEQ ID NO: 471828 - RNA, 32 nt, Human
guaacacugugauuuaucuuucaagagucucu

SEQ ID NO: 471829 - RNA, 32 nt, Human
guaacagaacagacccaggacagggaaaagca

SEQ ID NO: 471830 - RNA, 32 nt, Human
guaacagaagagaagacuguggagccagcuac

SEQ ID NO: 471831 - RNA, 32 nt, Human
guaacagauggaggaauugaauccaagagaug

SEQ ID NO: 471832 - RNA, 32 nt, Human
guaacagcagaaaaggaaagaaacaaagaaca

SEQ ID NO: 471833 - RNA, 32 nt, Human
guaacagcuagcacuaucaugaguuacuaccu

SEQ ID NO: 471834 - RNA, 32 nt, Human
guaacagcuuuauauuugugaagugagaacau

SEQ ID NO: 471835 - RNA, 32 nt, Human
guaacaggaauagucagcauuucacauaaauu

SEQ ID NO: 471836 - RNA, 23 nt, Human
guaacaggacguggauucugccu

SEQ ID NO: 471837 - RNA, 32 nt, Human
guaacaggcccaggcauaguggcugaacaacu

SEQ ID NO: 471838 - RNA, 32 nt, Human
guaacagggagggagacaccuagauuagcagc

SEQ ID NO: 471839 - RNA, 32 nt, Human
guaacaguccacacaagaugguauaggccuga

SEQ ID NO: 471840 - RNA, 32 nt, Human
guaacagucucugcgcuuuccuuuguaauuuc

SEQ ID NO: 471841 - RNA, 32 nt, Human
guaacaguuccuuuccaccagauuuaauauuu

SEQ ID NO: 471842 - RNA, 32 nt, Human
guaacauaacuaguggcucucaguuaaaaugu

SEQ ID NO: 471843 - RNA, 32 nt, Human
guaacaucacuagcgaccggugaccucuuuuu

SEQ ID NO: 471844 - RNA, 31 nt, Human
guaacaugcacacuuuggccugugucaguuu

SEQ ID NO: 471845 - RNA, 32 nt, Human
guaacaugcagagcacuuacacaaagcucccu

SEQ ID NO: 471846 - RNA, 32 nt, Human
guaacaugggaagacgugaagaagaaauaauc

SEQ ID NO: 471847 - RNA, 32 nt, Human
guaacauggguuaccuuugcaccagcuucagu

SEQ ID NO: 471848 - RNA, 32 nt, Human
guaacaugguauuggcuuaucguuuuuaucuc

SEQ ID NO: 471849 - RNA, 32 nt, Human
guaacauguaaaaggcaggacgcacauaaagg

SEQ ID NO: 471850 - RNA, 32 nt, Human
guaacauguaggaaguaggaaguaaauuauag

SEQ ID NO: 471851 - RNA, 32 nt, Human
guaacauuacucugcuucagaaauguuuugua

SEQ ID NO: 471852 - RNA, 32 nt, Human
guaacauugucaggacuuccugaaggauuaga

SEQ ID NO: 471853 - RNA, 32 nt, Human
guaacauuguuuugaaaaauagaguuaacaca

SEQ ID NO: 471854 - RNA, 32 nt, Human
guaacauuucaaacuauugaaaaggaugcuuu

SEQ ID NO: 471855 - RNA, 32 nt, Human
guaacauuuucuaguuuuuguuucugguuaaa

SEQ ID NO: 471856 - RNA, 32 nt, Human
guaaccaacaccugguccagaccucaugggua

SEQ ID NO: 471857 - RNA, 32 nt, Human
guaaccaacagcuuugucugaacuugaaguca

SEQ ID NO: 471858 - RNA, 32 nt, Human
guaaccacagcccuaaauccaugauaaagcua

SEQ ID NO: 471859 - RNA, 32 nt, Human
guaaccacugcugcuacuguuuuuauuuguuu

SEQ ID NO: 471860 - RNA, 32 nt, Human
guaaccacuugucgccuuagggccagauuccc

SEQ ID NO: 471861 - RNA, 32 nt, Human
guaaccagagacagcugauuauagcuuucugc

SEQ ID NO: 471862 - RNA, 32 nt, Human
guaaccagguccuaagggugcagcccucauga

SEQ ID NO: 471863 - RNA, 32 nt, Human
guaaccaguauuacaggagggacuuucagagc

SEQ ID NO: 471864 - RNA, 32 nt, Human
guaaccaucacagcugcugcuauggucugaau

SEQ ID NO: 471865 - RNA, 32 nt, Human
guaaccauuaacacagcacccuuucaagccau

SEQ ID NO: 471866 - RNA, 32 nt, Human
guaaccauuguuuggauuuggaaguacucugc

SEQ ID NO: 471867 - RNA, 32 nt, Human
guaacccagcacuuugggaagccgaggcgggc

SEQ ID NO: 471868 - RNA, 32 nt, Human
guaacccagcuacucaggaggcugaggcacaa

SEQ ID NO: 471869 - RNA, 32 nt, Human
guaacccagcuauucaagaggcugaggcauga

SEQ ID NO: 471870 - RNA, 24 nt, Human
guaacccaggcuggaaugcaaugg

SEQ ID NO: 471871 - RNA, 32 nt, Human
guaaccccaccacugcccacauuccugaagug

SEQ ID NO: 471872 - RNA, 32 nt, Human
guaaccccagcacuucgggaggcugagguggg

SEQ ID NO: 471873 - RNA, 32 nt, Human
guaaccccagcacuuugggaggcugagacagg

SEQ ID NO: 471874 - RNA, 32 nt, Human
guaaccccagcacuuugggaggcugagauggg

SEQ ID NO: 471875 - RNA, 32 nt, Human
guaaccccagcacuuugggaggcugagguggg

SEQ ID NO: 471876 - RNA, 32 nt, Human
guaaccccuguucugucuucauugacaggauu

SEQ ID NO: 471877 - RNA, 32 nt, Human
guaacccuaaagcagaggggcaugaugaaggg

SEQ ID NO: 471878 - RNA, 32 nt, Human
guaacccuagaacuugggaggcugaggugggc

SEQ ID NO: 471879 - RNA, 32 nt, Human
guaacccugccuuguucugucauccagggcuc

SEQ ID NO: 471880 - RNA, 32 nt, Human
guaacccugugggucacagagcugaugugaga

SEQ ID NO: 471881 - RNA, 32 nt, Human
guaacccuugcagcagucacaggcaggugcca

SEQ ID NO: 471882 - RNA, 32 nt, Human
guaacccuuucuguauugagugcaguguuuuu

SEQ ID NO: 471883 - RNA, 32 nt, Human
guaaccgaggcggcaaggaggccagguagucc

SEQ ID NO: 471884 - RNA, 32 nt, Human
guaaccgcuccugggagcaguggggaaccguc

SEQ ID NO: 471885 - RNA, 32 nt, Human
guaaccgcuccugggagcaguggggaacuguc

SEQ ID NO: 471886 - RNA, 32 nt, Human
guaaccuagguggggucacugccccuccuggg

SEQ ID NO: 471887 - RNA, 24 nt, Human
guaaccucaaacucaugggcucaa

SEQ ID NO: 471888 - RNA, 24 nt, Human
guaaccucaaacucuggggcucaa

SEQ ID NO: 471889 - RNA, 32 nt, Human
guaaccucaagugaugcucccaccucagccuc

SEQ ID NO: 471890 - RNA, 32 nt, Human
guaaccucaguuaacuuuaacaacaagcauuc

SEQ ID NO: 471891 - RNA, 24 nt, Human
guaaccuccgacuccuggguucaa

SEQ ID NO: 471892 - RNA, 24 nt, Human
guaaccuccgccuccuggguucaa

SEQ ID NO: 471893 - RNA, 32 nt, Human
guaaccucugcagacuuaagugucccugucug

SEQ ID NO: 471894 - RNA, 32 nt, Human
guaaccucuugagaccucucccugaccaggga

SEQ ID NO: 471895 - RNA, 32 nt, Human
guaaccugacacucucaggagacauuaagaua

SEQ ID NO: 471896 - RNA, 32 nt, Human
guaaccugaucguggagagugaggcugugaga

SEQ ID NO: 471897 - RNA, 32 nt, Human
guaaccugcugcccccuccacccccaacccag

SEQ ID NO: 471898 - RNA, 32 nt, Human
guaaccuguuuacuuugugcuaacagugccgg

SEQ ID NO: 471899 - RNA, 32 nt, Human
guaaccuuauauuuacaauaaaugaagauuac

SEQ ID NO: 471900 - RNA, 32 nt, Human
guaaccuuccacuaccuaucccaaaccuauaa

SEQ ID NO: 471901 - RNA, 32 nt, Human
guaaccuuccugcccauggcuuccagaggacg

SEQ ID NO: 471902 - RNA, 24 nt, Human
guaaccuugaacuccugggcucaa

SEQ ID NO: 471903 - RNA, 32 nt, Human
guaaccuugcaucucauugcucuggcugaguu

SEQ ID NO: 471904 - RNA, 32 nt, Human
guaaccuuuaaaugaaacuugccuaaaaucuu

SEQ ID NO: 471905 - RNA, 32 nt, Human
guaaccuuucaucaugaucauaggcaguugaa

SEQ ID NO: 471906 - RNA, 32 nt, Human
guaaccuuugaggacguguccauggacuucuc

SEQ ID NO: 471907 - RNA, 32 nt, Human
guaacgagaagagauccucagcagaacacuca

SEQ ID NO: 471908 - RNA, 32 nt, Human
guaacgcagacaucagcuuuacacuucacagg

SEQ ID NO: 471909 - RNA, 32 nt, Human
guaacgcagugcgggguuagggauuccccggg

SEQ ID NO: 471910 - RNA, 32 nt, Human
guaacgccaccuggaugccccauccaccgcau

SEQ ID NO: 471911 - RNA, 32 nt, Human
guaacggagccaccuccaacucuaacaauaaa

SEQ ID NO: 471912 - RNA, 32 nt, Human
guaacggagcgguuuggguggcggagccugcg

SEQ ID NO: 471913 - RNA, 32 nt, Human
guaacgugaaguauuucucauugaaaugcuuu

SEQ ID NO: 471914 - RNA, 32 nt, Human
guaacgugccgggcacacacuaaacucaguua

SEQ ID NO: 471915 - RNA, 32 nt, Human
guaacgugcugccagcacagggcugggugaua

SEQ ID NO: 471916 - RNA, 32 nt, Human
guaacguguuuucugugucugccgcuuccagc

SEQ ID NO: 471917 - RNA, 32 nt, Human
guaacuaacuugcuuuuuaauuuuacaggcuu

SEQ ID NO: 471918 - RNA, 32 nt, Human
guaacuaagaucuauguuuggguuuguaaaau

SEQ ID NO: 471919 - RNA, 32 nt, Human
guaacuaagccauaugugaucacguuauugga

SEQ ID NO: 471920 - RNA, 32 nt, Human
guaacuacagcuuggaaacuaugcaaaugguc

SEQ ID NO: 471921 - RNA, 32 nt, Human
guaacuagaaguuguacgaaguagaaggcugu

SEQ ID NO: 471922 - RNA, 32 nt, Human
guaacuaguggggcuuaaugaaggucauaagu

SEQ ID NO: 471923 - RNA, 32 nt, Human
guaacuaguggugcuauuaugugcccagcacg

SEQ ID NO: 471924 - RNA, 32 nt, Human
guaacuaguuaaaaaugaaaaauucaguuccu

SEQ ID NO: 471925 - RNA, 32 nt, Human
guaacucacagcccugcugucuucagaguaua

SEQ ID NO: 471926 - RNA, 22 nt, Human
guaacucacgccuguaauccca

SEQ ID NO: 471927 - RNA, 32 nt, Human
guaacucagauucauuucaaaaggacagugaa

SEQ ID NO: 471928 - RNA, 32 nt, Human
guaacucaggaaauauuuggcacauucuauca

SEQ ID NO: 471929 - RNA, 32 nt, Human
guaacucaguauuacugaaaagguacccacau

SEQ ID NO: 471930 - RNA, 32 nt, Human
guaacucaugcuuucaaaauaucaggaagcaa

SEQ ID NO: 471931 - RNA, 32 nt, Human
guaacuccagccugggcaacagagugagaccc

SEQ ID NO: 471932 - RNA, 32 nt, Human
guaacuccgccccuuucucucccucucaguaa

SEQ ID NO: 471933 - RNA, 32 nt, Human
guaacuccugaaaaacaucgagcuagaaaaag

SEQ ID NO: 471934 - RNA, 32 nt, Human
guaacuccugaaaaauaucgagcuagaaaaag

SEQ ID NO: 471935 - RNA, 32 nt, Human
guaacuccuuugugcuaccaacuuacugcucu

SEQ ID NO: 471936 - RNA, 32 nt, Human
guaacucuaauugagcccgaaaccagaauaaa

SEQ ID NO: 471937 - RNA, 32 nt, Human
guaacucuacccacuguggguuuccuccuugc

SEQ ID NO: 471938 - RNA, 32 nt, Human
guaacucugcugucugaaugccuccuuucucc

SEQ ID NO: 471939 - RNA, 32 nt, Human
guaacucuguuuccugaggugagggcaugaaa

SEQ ID NO: 471940 - RNA, 32 nt, Human
guaacucuucaaaggccaguuuccccucacgc

SEQ ID NO: 471941 - RNA, 32 nt, Human
guaacugagcacucaagguggggaucauugag

SEQ ID NO: 471942 - RNA, 32 nt, Human
guaacugagcaggggcuacaaagaggucuccu

SEQ ID NO: 471943 - RNA, 32 nt, Human
guaacugaggccagcaaucugagugcagcaaa

SEQ ID NO: 471944 - RNA, 32 nt, Human
guaacugaucuccugccccacuaaccuuaacg

SEQ ID NO: 471945 - RNA, 32 nt, Human
guaacugcaaccugcagaaucaaauuuagggu

SEQ ID NO: 471946 - RNA, 32 nt, Human
guaacugcauuuuucaccuuaaaaguuaaaug

SEQ ID NO: 471947 - RNA, 32 nt, Human
guaacugccuggucagugcccagagacaagug

SEQ ID NO: 471948 - RNA, 32 nt, Human
guaacugcgguuucagccaacacucuucaugg

SEQ ID NO: 471949 - RNA, 32 nt, Human
guaacugcugugcacugcuguaaacuuguuag

SEQ ID NO: 471950 - RNA, 32 nt, Human
guaacugcuuucuguuccaaauucaguuucau

SEQ ID NO: 471951 - RNA, 22 nt, Human
guaacuggaacaggccugggca

SEQ ID NO: 471952 - RNA, 32 nt, Human
guaacuggaaucuuuugccucucccagccacc

SEQ ID NO: 471953 - RNA, 32 nt, Human
guaacuggaauugcaggucagagcagagcaug

SEQ ID NO: 471954 - RNA, 32 nt, Human
guaacuggagcuuggaugaggaugagacaagc

SEQ ID NO: 471955 - RNA, 32 nt, Human
guaacuggcugcagagaaaucuaccgagcaag

SEQ ID NO: 471956 - RNA, 32 nt, Human
guaacugggagagaggcugugccugaaacuag

SEQ ID NO: 471957 - RNA, 32 nt, Human
guaacugggauuacaagugacugccacuaugc

SEQ ID NO: 471958 - RNA, 32 nt, Human
guaacugggauuacaggcaugcgccaccauac

SEQ ID NO: 471959 - RNA, 32 nt, Human
guaacugggauuacaggcaugcgccaccaugc

SEQ ID NO: 471960 - RNA, 32 nt, Human
guaacugggauuacaggcaugcgccacuaagg

SEQ ID NO: 471961 - RNA, 32 nt, Human
guaacugggauuacaggcaugugccaucacgc

SEQ ID NO: 471962 - RNA, 32 nt, Human
guaacugggauuacaggcaugugucaccaugc

SEQ ID NO: 471963 - RNA, 32 nt, Human
guaacugggauuacaggcgggcgccaccacgc

SEQ ID NO: 471964 - RNA, 32 nt, Human
guaacugggauuacaggcuugugccaccgcac

SEQ ID NO: 471965 - RNA, 32 nt, Human
guaacugggauuacaggugugugccaccacac

SEQ ID NO: 471966 - RNA, 32 nt, Human
guaacugggauuacagucgugugccaccacgc

SEQ ID NO: 471967 - RNA, 32 nt, Human
guaacugggauuauaggcaugcaccaccacgc

SEQ ID NO: 471968 - RNA, 32 nt, Human
guaacuggggaaacugaguauguucuguagac

SEQ ID NO: 471969 - RNA, 32 nt, Human
guaacugguuccuaauaaaaagaauuauaaaa

SEQ ID NO: 471970 - RNA, 32 nt, Human
guaacugucaguguacacgucuggaccccguu

SEQ ID NO: 471971 - RNA, 32 nt, Human
guaacuguccgagaugggaugccugagcucuu

SEQ ID NO: 471972 - RNA, 32 nt, Human
guaacugucugacgcuuuugccugugugucca

SEQ ID NO: 471973 - RNA, 32 nt, Human
guaacuuaaccagcacauuucuccuguuuaca

SEQ ID NO: 471974 - RNA, 32 nt, Human
guaacuuaggggccagaaucuccaugcacuuu

SEQ ID NO: 471975 - RNA, 32 nt, Human
guaacuucacauauggaaaaguuaaagacuca

SEQ ID NO: 471976 - RNA, 24 nt, Human
guaacuucgaccaccugggcucaa

SEQ ID NO: 471977 - RNA, 31 nt, Human
guaacuucugucuuugggccugggucugucc

SEQ ID NO: 471978 - RNA, 32 nt, Human
guaacuugagaugucugugguugugggggugu

SEQ ID NO: 471979 - RNA, 32 nt, Human
guaacuugccucugagccugggcugaucugag

SEQ ID NO: 471980 - RNA, 32 nt, Human
guaacuugcuacccucuugagcagcucuucug

SEQ ID NO: 471981 - RNA, 32 nt, Human
guaacuuucacucauucaaaggcagguuauaa

SEQ ID NO: 471982 - RNA, 32 nt, Human
guaacuuucucuaugaacucuguuuucuuucu

SEQ ID NO: 471983 - RNA, 22 nt, Human
guaacuuucuucaucccuugaa

SEQ ID NO: 471984 - RNA, 32 nt, Human
guaacuuuuaaucccuauguuugucucacuuu

SEQ ID NO: 471985 - RNA, 32 nt, Human
guaacuuuuacguuguugugggagauuuacug

SEQ ID NO: 471986 - RNA, 32 nt, Human
guaacuuuucuaaggauugaauaaauugagcu

SEQ ID NO: 471987 - RNA, 32 nt, Human
guaagaaaagaaugcuggcaggaaaguggcca

SEQ ID NO: 471988 - RNA, 32 nt, Human
guaagaaacagagcuggagaugagcucaggcc

SEQ ID NO: 471989 - RNA, 32 nt, Human
guaagaaacaucuggguauuuggaaacaagug

SEQ ID NO: 471990 - RNA, 32 nt, Human
guaagaaaccaaucaagauaaaggacagugaa

SEQ ID NO: 471991 - RNA, 32 nt, Human
guaagaaagaugaugugcaugucuguaucaug

SEQ ID NO: 471992 - RNA, 32 nt, Human
guaagaaaguagaagaaaguaaacuguaauaa

SEQ ID NO: 471993 - RNA, 32 nt, Human
guaagaaaugguaucaagcucuccaguucugu

SEQ ID NO: 471994 - RNA, 32 nt, Human
guaagaacaguuucagcaucaacuaacgaaca

SEQ ID NO: 471995 - RNA, 32 nt, Human
guaagaaccccacccugcuugcagagaaccuu

SEQ ID NO: 471996 - RNA, 32 nt, Human
guaagaacgcccugcgcgucagccuggaacgg

SEQ ID NO: 471997 - RNA, 32 nt, Human
guaagaacucagaacauaauaccugagugccu

SEQ ID NO: 471998 - RNA, 32 nt, Human
guaagaagaacugcuuucuuauagcacaaaac

SEQ ID NO: 471999 - RNA, 32 nt, Human
guaagaaguaccucuaggccugggaggcauug

SEQ ID NO: 472000 - RNA, 32 nt, Human
guaagaaguuuagagggggaagaaaagaauga

SEQ ID NO: 472001 - RNA, 22 nt, Human
guaagaaugagaagaaggaaca

SEQ ID NO: 472002 - RNA, 32 nt, Human
guaagacaccaaccuuuacauucuucccugag

SEQ ID NO: 472003 - RNA, 32 nt, Human
guaagacaugacuuuuuccuccuugccuucca

SEQ ID NO: 472004 - RNA, 32 nt, Human
guaagacaugccuuugcucuuccuucacauuc

SEQ ID NO: 472005 - RNA, 32 nt, Human
guaagaccaggagguugguaagagugacuaac

SEQ ID NO: 472006 - RNA, 32 nt, Human
guaagacccuugcuguuuggaggguggucuug

SEQ ID NO: 472007 - RNA, 28 nt, Human
guaagaccuugggcugccucuucugucu

SEQ ID NO: 472008 - RNA, 32 nt, Human
guaagacguugcagaggucuaggaaggcuggu

SEQ ID NO: 472009 - RNA, 32 nt, Human
guaagacuccucuauguugccugcuguccagg

SEQ ID NO: 472010 - RNA, 23 nt, Human
guaagacucuacaccauauugua

SEQ ID NO: 472011 - RNA, 32 nt, Human
guaagacuugaccuuuaucuggaacacuccuu

SEQ ID NO: 472012 - RNA, 32 nt, Human
guaagagagcccuggaggauaaggacuuuggc

SEQ ID NO: 472013 - RNA, 32 nt, Human
guaagagagcgcuacucuggggccaguaccaa

SEQ ID NO: 472014 - RNA, 32 nt, Human
guaagagcaaaaaguguaauuccacaucaugu

SEQ ID NO: 472015 - RNA, 32 nt, Human
guaagagcacugcacugacgguuuggagaccu

SEQ ID NO: 472016 - RNA, 32 nt, Human
guaagagcugacucaucgcuucccaggaagac

SEQ ID NO: 472017 - RNA, 32 nt, Human
guaagagcuuccagaggucacccaacaucaca

SEQ ID NO: 472018 - RNA, 32 nt, Human
guaagagcuuuguuucuuuauggaacuccccu

SEQ ID NO: 472019 - RNA, 32 nt, Human
guaagagggaaaggaaaagagguaucaaguaa

SEQ ID NO: 472020 - RNA, 32 nt, Human
guaagagggagagagaagaagaggaagaagag

SEQ ID NO: 472021 - RNA, 32 nt, Human
guaagagguacuguaagcgccuccaggugcug

SEQ ID NO: 472022 - RNA, 32 nt, Human
guaagagugagggagggaaggaaggaacuaca

SEQ ID NO: 472023 - RNA, 32 nt, Human
guaagaguggucucuucuuauugaacaaccuc

SEQ ID NO: 472024 - RNA, 32 nt, Human
guaagauacuccugacaucuugcuuuagcaca

SEQ ID NO: 472025 - RNA, 32 nt, Human
guaagauacucugccaaguuuccucuguagag

SEQ ID NO: 472026 - RNA, 32 nt, Human
guaagauauaaauaacaacacuuuccuuaaaa

SEQ ID NO: 472027 - RNA, 32 nt, Human
guaagauauauguacuaaacauauguguugcu

SEQ ID NO: 472028 - RNA, 31 nt, Human
guaagaugagcuagagaaaauaaccuggucu

SEQ ID NO: 472029 - RNA, 32 nt, Human
guaagaugcaucaaaugugaugcagcucuugu

SEQ ID NO: 472030 - RNA, 32 nt, Human
guaagaugcccuuuuaaauauaaggaucagug

SEQ ID NO: 472031 - RNA, 32 nt, Human
guaagauggauuucacccccaggccaaugcag

SEQ ID NO: 472032 - RNA, 32 nt, Human
guaagauguguauauguauagcuauguagcgc

SEQ ID NO: 472033 - RNA, 32 nt, Human
guaagaugugugacccugcaaggaauaacaaa

SEQ ID NO: 472034 - RNA, 32 nt, Human
guaagauuccccaaggagggaaaaguggagcu

SEQ ID NO: 472035 - RNA, 32 nt, Human
guaagcaaauuuaugaaucuuuguacaccaua

SEQ ID NO: 472036 - RNA, 32 nt, Human
guaagcaacagcuccuucaugggcugagaagg

SEQ ID NO: 472037 - RNA, 32 nt, Human
guaagcaagucuuccugaagcaagcagagucc

SEQ ID NO: 472038 - RNA, 32 nt, Human
guaagcaauaaauauggagugucaguagucuc

SEQ ID NO: 472039 - RNA, 32 nt, Human
guaagcacacaggguauccacauguuacccug

SEQ ID NO: 472040 - RNA, 32 nt, Human
guaagcaccagcugccucuuugcugcuuuguu

SEQ ID NO: 472041 - RNA, 32 nt, Human
guaagcacguugcccaagguugcacagcaaga

SEQ ID NO: 472042 - RNA, 32 nt, Human
guaagcagacguccauuaccacccucacccac

SEQ ID NO: 472043 - RNA, 32 nt, Human
guaagcagccacugcaagcucugaaucaguuu

SEQ ID NO: 472044 - RNA, 32 nt, Human
guaagcagugaagauuuuagcauggucuguau

SEQ ID NO: 472045 - RNA, 32 nt, Human
guaagcauaugggaauuucugagcuauaacau

SEQ ID NO: 472046 - RNA, 32 nt, Human
guaagcaucuggagaaaauucaguuaaaagaa

SEQ ID NO: 472047 - RNA, 32 nt, Human
guaagccaagcagcuuugcuucugccucuguu

SEQ ID NO: 472048 - RNA, 32 nt, Human
guaagccaagcugcucagaaguacgaggcacu

SEQ ID NO: 472049 - RNA, 32 nt, Human
guaagccacagugcccagcccgaauuggauau

SEQ ID NO: 472050 - RNA, 18 nt, Human
guaagccaggcauggagg

SEQ ID NO: 472051 - RNA, 32 nt, Human
guaagcccacacaagcucuucuuaucucuacu

SEQ ID NO: 472052 - RNA, 32 nt, Human
guaagcccaguucuucucuguauagaaaggaa

SEQ ID NO: 472053 - RNA, 32 nt, Human
guaagccuaggucacaacaucuguaaacuagg

SEQ ID NO: 472054 - RNA, 32 nt, Human
guaagccuuagcagcaaacauucuuccuaaaa

SEQ ID NO: 472055 - RNA, 22 nt, Human
guaagccuucaaagaaaaaaca

SEQ ID NO: 472056 - RNA, 32 nt, Human
guaagccuugaagaaguaugugagagggccac

SEQ ID NO: 472057 - RNA, 32 nt, Human
guaagcgccagagccacuaguggacgccaggu

SEQ ID NO: 472058 - RNA, 32 nt, Human
guaagcggagcaagugccaagcagaacagacc

SEQ ID NO: 472059 - RNA, 32 nt, Human
guaagcggcucaagcccaggagggagcagagg

SEQ ID NO: 472060 - RNA, 32 nt, Human
guaagcuagucuuccccucugcuuucucgaaa

SEQ ID NO: 472061 - RNA, 32 nt, Human
guaagcuauuaaugcuaacucuugcaugucaa

SEQ ID NO: 472062 - RNA, 32 nt, Human
guaagcucccuucugucauuuucauugauuua

SEQ ID NO: 472063 - RNA, 32 nt, Human
guaagcugaaaccucaaugaauaacaagaaaa

SEQ ID NO: 472064 - RNA, 32 nt, Human
guaagcugcaucacuucugcuuucuuccuacu

SEQ ID NO: 472065 - RNA, 32 nt, Human
guaagcuggaccugcaaccugccugagccccg

SEQ ID NO: 472066 - RNA, 32 nt, Human
guaagcuggaugaccuguggugcugaccuuuu

SEQ ID NO: 472067 - RNA, 32 nt, Human
guaagcugguuuacagauguuuuccacugagc

SEQ ID NO: 472068 - RNA, 32 nt, Human
guaagcuucagucuuauuuauagugugggaau

SEQ ID NO: 472069 - RNA, 32 nt, Human
guaagcuuccccagcccugccugagcagccuu

SEQ ID NO: 472070 - RNA, 31 nt, Human
guaagcuugcucucuggccuccucuuaaaaa

SEQ ID NO: 472071 - RNA, 32 nt, Human
guaaggaaaugcaguguguugcaguggccuuu

SEQ ID NO: 472072 - RNA, 32 nt, Human
guaaggacaacaaaggccauucagugcccucc

SEQ ID NO: 472073 - RNA, 32 nt, Human
guaaggacaggcacccucccacagugucaggg

SEQ ID NO: 472074 - RNA, 32 nt, Human
guaaggacauagagaaauuggaacccuuguuc

SEQ ID NO: 472075 - RNA, 32 nt, Human
guaaggaccuucuccccacaaugggucccuag

SEQ ID NO: 472076 - RNA, 32 nt, Human
guaaggacuuggacuccucuguccagcuuuua

SEQ ID NO: 472077 - RNA, 32 nt, Human
guaaggagagguagcuacacagcaucuguuac

SEQ ID NO: 472078 - RNA, 32 nt, Human
guaaggagcaaaguuacaggccaguuuuuacu

SEQ ID NO: 472079 - RNA, 32 nt, Human
guaaggagccaguuccagaccuggguuugugc

SEQ ID NO: 472080 - RNA, 32 nt, Human
guaaggagcccucagcccacacccagcagaga

SEQ ID NO: 472081 - RNA, 32 nt, Human
guaaggagugaugauuuaaaguauuuacucag

SEQ ID NO: 472082 - RNA, 32 nt, Human
guaaggauggagaggagggagagccagaaaaa

SEQ ID NO: 472083 - RNA, 32 nt, Human
guaaggauuuuucaucugaaguacaauaaugc

SEQ ID NO: 472084 - RNA, 32 nt, Human
guaaggcacagagagguugaauaacuugccug

SEQ ID NO: 472085 - RNA, 32 nt, Human
guaaggcaguauaugauugugccaaaccuaca

SEQ ID NO: 472086 - RNA, 32 nt, Human
guaaggcauuggagaaggacaauguaaaagac

SEQ ID NO: 472087 - RNA, 32 nt, Human
guaaggcauuggugauguuugcauuuacccuc

SEQ ID NO: 472088 - RNA, 32 nt, Human
guaaggcccaaguuauugagcagcagcuuccu

SEQ ID NO: 472089 - RNA, 32 nt, Human
guaaggccuuuaguaaugaauguaaugagaga

SEQ ID NO: 472090 - RNA, 32 nt, Human
guaaggcucagggcugcugggcucugauguca

SEQ ID NO: 472091 - RNA, 32 nt, Human
guaaggcugaccucccugugugaccugcccac

SEQ ID NO: 472092 - RNA, 32 nt, Human
guaaggcuggcagaaggacagaagagaaaaga

SEQ ID NO: 472093 - RNA, 32 nt, Human
guaaggcugggcccugggcacaagugccagaa

SEQ ID NO: 472094 - RNA, 32 nt, Human
guaaggcuuaauaaguaguucauugacccugu

SEQ ID NO: 472095 - RNA, 32 nt, Human
guaagggacagcugagauugagugucaguauu

SEQ ID NO: 472096 - RNA, 32 nt, Human
guaagggagagggagggagccgggagccguag

SEQ ID NO: 472097 - RNA, 32 nt, Human
guaagggagggagggguagggacagaagcuag

SEQ ID NO: 472098 - RNA, 32 nt, Human
guaagggagggcaggggugagggggagcagaa

SEQ ID NO: 472099 - RNA, 32 nt, Human
guaagggagggcaggggugagggggagcagga

SEQ ID NO: 472100 - RNA, 32 nt, Human
guaagggauucugcaagggacagggggccuga

SEQ ID NO: 472101 - RNA, 32 nt, Human
guaagggcuuuguuuuccuaauagcugacuuu

SEQ ID NO: 472102 - RNA, 32 nt, Human
guaaggggacagcuccaggccggggcugucuc

SEQ ID NO: 472103 - RNA, 32 nt, Human
guaaggggagaaaggacccugcccucccuguu

SEQ ID NO: 472104 - RNA, 32 nt, Human
guaaggggcuagugugauagggagaggggugg

SEQ ID NO: 472105 - RNA, 32 nt, Human
guaagggggcuccauuuuccucccucucuuua

SEQ ID NO: 472106 - RNA, 32 nt, Human
guaagggggcuucacucucuagaucagccugc

SEQ ID NO: 472107 - RNA, 32 nt, Human
guaaggggguccagagaccaaaaguuuuagag

SEQ ID NO: 472108 - RNA, 32 nt, Human
guaaggggucagccccuccuucuggcccgaga

SEQ ID NO: 472109 - RNA, 32 nt, Human
guaagggucaguuuuugcuauuuggaagcuua

SEQ ID NO: 472110 - RNA, 32 nt, Human
guaagguagauggcagaggcagagacauggaa

SEQ ID NO: 472111 - RNA, 32 nt, Human
guaaggucaaauacuauaguuuucagcauaug

SEQ ID NO: 472112 - RNA, 32 nt, Human
guaaggucauuagcggucaacaugguucccaa

SEQ ID NO: 472113 - RNA, 32 nt, Human
guaagguccuggaaguucagcaaaguuucgug

SEQ ID NO: 472114 - RNA, 32 nt, Human
guaagguggccauaccagcacaugcugcacua

SEQ ID NO: 472115 - RNA, 24 nt, Human
guaagguggcucacaccuauaauc

SEQ ID NO: 472116 - RNA, 31 nt, Human
guaagguggcuggaaagaaccuugaggagag

SEQ ID NO: 472117 - RNA, 32 nt, Human
guaagguguauucauagggaugguggcucaac

SEQ ID NO: 472118 - RNA, 32 nt, Human
guaagguucccaagccagccccaacacccuuc

SEQ ID NO: 472119 - RNA, 32 nt, Human
guaaguaaaagcuaaaugaggggccaggugca

SEQ ID NO: 472120 - RNA, 32 nt, Human
guaaguaaacagucagaagauuagcaugaaag

SEQ ID NO: 472121 - RNA, 32 nt, Human
guaaguaaaguguuaugguaggguucuucaga

SEQ ID NO: 472122 - RNA, 32 nt, Human
guaaguacaaaggauauucuguuucuaucugc

SEQ ID NO: 472123 - RNA, 32 nt, Human
guaaguaggcuggauaaauggugcuuaaaugg

SEQ ID NO: 472124 - RNA, 32 nt, Human
guaaguaucuggaggaagaaaacaggugaaag

SEQ ID NO: 472125 - RNA, 32 nt, Human
guaaguauuucuaugucaaaggcacagccuug

SEQ ID NO: 472126 - RNA, 32 nt, Human
guaagucacugcagaccgaccucccugcaguu

SEQ ID NO: 472127 - RNA, 32 nt, Human
guaagucacuugucuaaggucacauagcuagc

SEQ ID NO: 472128 - RNA, 32 nt, Human
guaaguccacuuacaaaaaccccgcucugucu

SEQ ID NO: 472129 - RNA, 32 nt, Human
guaagucccuguggccauggugcauuggccuu

SEQ ID NO: 472130 - RNA, 32 nt, Human
guaaguccuguaugguaggaaguggguguggc

SEQ ID NO: 472131 - RNA, 32 nt, Human
guaagucuccucuucccagcauguucaacagg

SEQ ID NO: 472132 - RNA, 32 nt, Human
guaagucucucuuccuccuucucaccccuggc

SEQ ID NO: 472133 - RNA, 31 nt, Human
guaagugaacaaugcauuacuucuaccuuag

SEQ ID NO: 472134 - RNA, 32 nt, Human
guaagugacucaucuuccuguuguuccaauuc

SEQ ID NO: 472135 - RNA, 32 nt, Human
guaagugagguugccccacacagccgucuccc

SEQ ID NO: 472136 - RNA, 32 nt, Human
guaagugauuuuuccaguucaaagucaagaca

SEQ ID NO: 472137 - RNA, 32 nt, Human
guaagugcucagaaaaaugugcaggucaauaa

SEQ ID NO: 472138 - RNA, 32 nt, Human
guaagugcuuucuuucuuuuuaagcuacuucu

SEQ ID NO: 472139 - RNA, 32 nt, Human
guaaguggaagagcuugcccuuugucuucccc

SEQ ID NO: 472140 - RNA, 32 nt, Human
guaaguggagcauuuggaaggaaaggaauaua

SEQ ID NO: 472141 - RNA, 31 nt, Human
guaaguggcacaaucucggcucacugcaacc

SEQ ID NO: 472142 - RNA, 32 nt, Human
guaaguggccauacugcuacugccucauguag

SEQ ID NO: 472143 - RNA, 32 nt, Human
guaagugggaaagccuuuugauguggcauggc

SEQ ID NO: 472144 - RNA, 32 nt, Human
guaagugggauuaugaugaguaacuggagggg

SEQ ID NO: 472145 - RNA, 32 nt, Human
guaaguggguaagucuguauguguguaucaua

SEQ ID NO: 472146 - RNA, 32 nt, Human
guaaguggucccuuagggcugaaggacuucag

SEQ ID NO: 472147 - RNA, 32 nt, Human
guaaguggucuugaaggauucauuuagucacc

SEQ ID NO: 472148 - RNA, 32 nt, Human
guaaguguaagguccacauccuuggggaagua

SEQ ID NO: 472149 - RNA, 32 nt, Human
guaagugugcaggagugaauguauguggcagg

SEQ ID NO: 472150 - RNA, 32 nt, Human
guaaguguuguauguaccguugauguugauaa

SEQ ID NO: 472151 - RNA, 32 nt, Human
guaaguguuuucuccauugccucuugccaggg

SEQ ID NO: 472152 - RNA, 32 nt, Human
guaaguuagaucccucccuuuggggagccuau

SEQ ID NO: 472153 - RNA, 32 nt, Human
guaaguucauucuuguaccaacuaauccagug

SEQ ID NO: 472154 - RNA, 32 nt, Human
guaaguucauuugaguagcagaccuaacaaau

SEQ ID NO: 472155 - RNA, 32 nt, Human
guaaguucucacuucaaagcuauggaauggau

SEQ ID NO: 472156 - RNA, 32 nt, Human
guaaguucucagcugcuggccugcacucauca

SEQ ID NO: 472157 - RNA, 32 nt, Human
guaaguugagauguuguguggcaaugggauuu

SEQ ID NO: 472158 - RNA, 32 nt, Human
guaaguugcaggaagccagaggaggcaauaca

SEQ ID NO: 472159 - RNA, 32 nt, Human
guaaguugcccucccucuccuggccuuacaag

SEQ ID NO: 472160 - RNA, 32 nt, Human
guaaguuggugacuugcaucuguggccuugaa

SEQ ID NO: 472161 - RNA, 32 nt, Human
guaaguuuauacuugaggacugaagugugacu

SEQ ID NO: 472162 - RNA, 32 nt, Human
guaauaaacuuuuaucaguuauuuagaaaaag

SEQ ID NO: 472163 - RNA, 29 nt, Human
guaauaaauaugugaggccuuucguuuuu

SEQ ID NO: 472164 - RNA, 32 nt, Human
guaauaaggagaggguugggggugggcagggc

SEQ ID NO: 472165 - RNA, 18 nt, Human
guaauaagggggcuccag

SEQ ID NO: 472166 - RNA, 32 nt, Human
guaauaaguuuagcauaagucuugccugccaa

SEQ ID NO: 472167 - RNA, 32 nt, Human
guaauaauacaaaaauuagcugggcguggugg

SEQ ID NO: 472168 - RNA, 32 nt, Human
guaauaauugcaucaagcuuagaugagaaauu

SEQ ID NO: 472169 - RNA, 32 nt, Human
guaauacaagggccagccuggccaacauggug

SEQ ID NO: 472170 - RNA, 32 nt, Human
guaauacacucugauccccucagucugaaucu

SEQ ID NO: 472171 - RNA, 32 nt, Human
guaauaccagcacuuugggaaguggagguggg

SEQ ID NO: 472172 - RNA, 32 nt, Human
guaauacguacauguuuauggcaauuuaacau

SEQ ID NO: 472173 - RNA, 32 nt, Human
guaauagauggaaggucagccccggcuuaacc

SEQ ID NO: 472174 - RNA, 32 nt, Human
guaauaggguaguucuggagagaugguaugca

SEQ ID NO: 472175 - RNA, 32 nt, Human
guaauaguaaaucguucuccuuacaaucaagu

SEQ ID NO: 472176 - RNA, 32 nt, Human
guaauagugauacauggauauacuuccuuuua

SEQ ID NO: 472177 - RNA, 31 nt, Human
guaauauaaggaccuguucuggacacagcac

SEQ ID NO: 472178 - RNA, 32 nt, Human
guaauauaauuugccauuuuuauuagaaauuu

SEQ ID NO: 472179 - RNA, 32 nt, Human
guaauauaggcaauauaaugaaacaccgaguu

SEQ ID NO: 472180 - RNA, 32 nt, Human
guaauaucacuaugcauuucuacacauuuuau

SEQ ID NO: 472181 - RNA, 32 nt, Human
guaauaucagaacaggaaggaggaauggcuug

SEQ ID NO: 472182 - RNA, 32 nt, Human
guaauaucaguuacaguggcaguauugacaau

SEQ ID NO: 472183 - RNA, 32 nt, Human
guaauauggagacugagcugcaugguaguugg

SEQ ID NO: 472184 - RNA, 32 nt, Human
guaauauuacacaaacacauauucacuguggu

SEQ ID NO: 472185 - RNA, 32 nt, Human
guaauauucauauuggaaaaauuuccuacaag

SEQ ID NO: 472186 - RNA, 32 nt, Human
guaauauuuccacaggacuggaaagggcgaga

SEQ ID NO: 472187 - RNA, 32 nt, Human
guaauauuuccuccuuuuccaagaccaaggcc

SEQ ID NO: 472188 - RNA, 32 nt, Human
guaauauuugugaauggaaugccuugcaauau

SEQ ID NO: 472189 - RNA, 32 nt, Human
guaauauuuuuccuacuacauuggaguuuagc

SEQ ID NO: 472190 - RNA, 32 nt, Human
guaaucaaacauguuuuccaauacuugauaac

SEQ ID NO: 472191 - RNA, 32 nt, Human
guaaucaaagagaugugucugagaucuaauag

SEQ ID NO: 472192 - RNA, 32 nt, Human
guaaucaacuccugcucuacuucauauucauc

SEQ ID NO: 472193 - RNA, 32 nt, Human
guaaucacaccacugcacuccagcuuggggga

SEQ ID NO: 472194 - RNA, 19 nt, Human
guaaucacagcuacuuggg

SEQ ID NO: 472195 - RNA, 32 nt, Human
guaaucaccuacuggauucaagcaauucuccu

SEQ ID NO: 472196 - RNA, 32 nt, Human
guaaucacugcacuccaaccuggcaacagagu

SEQ ID NO: 472197 - RNA, 32 nt, Human
guaaucacugcacuuugggaagcugagguggg

SEQ ID NO: 472198 - RNA, 32 nt, Human
guaaucagcuacucgggaggcugaggcagggg

SEQ ID NO: 472199 - RNA, 32 nt, Human
guaaucaguauuaagaguguguuuuaccauuc

SEQ ID NO: 472200 - RNA, 32 nt, Human
guaaucagugcauccacaccucccaggaucca

SEQ ID NO: 472201 - RNA, 32 nt, Human
guaaucagugcauuugaaaauucaagccagca

SEQ ID NO: 472202 - RNA, 32 nt, Human
guaaucaucugaagaaauuggucccaagacau

SEQ ID NO: 472203 - RNA, 32 nt, Human
guaaucaugacagcugucuguuguuuuaugaa

SEQ ID NO: 472204 - RNA, 32 nt, Human
guaaucauggacccuucuccuggggcauuugu

SEQ ID NO: 472205 - RNA, 31 nt, Human
guaaucauggcggcggggguggcagcguggc

SEQ ID NO: 472206 - RNA, 32 nt, Human
guaaucauuucaaccaaaugaauuucaagcaa

SEQ ID NO: 472207 - RNA, 32 nt, Human
guaaucauuuuuaggccgggugcaguggcuca

SEQ ID NO: 472208 - RNA, 32 nt, Human
guaauccaacacuuugagaggcugaggcgggc

SEQ ID NO: 472209 - RNA, 32 nt, Human
guaauccaacuacccaggaggcugaggcauga

SEQ ID NO: 472210 - RNA, 32 nt, Human
guaauccacauccuccaucuugaguuacuccu

SEQ ID NO: 472211 - RNA, 32 nt, Human
guaauccagcacuuugggaggccgaggugggc

SEQ ID NO: 472212 - RNA, 32 nt, Human
guaauccagcuacucaggaggcugaggcagga

SEQ ID NO: 472213 - RNA, 32 nt, Human
guaauccagcuacucgggaggcugaggcagga

SEQ ID NO: 472214 - RNA, 32 nt, Human
guaauccagcuacuugggaggcugaggcagga

SEQ ID NO: 472215 - RNA, 32 nt, Human
guaauccagguaugugggaggcugagacacga

SEQ ID NO: 472216 - RNA, 32 nt, Human
guaauccauccaccuccaccucccaaggugcu

SEQ ID NO: 472217 - RNA, 32 nt, Human
guaaucccaaagugcugggauuacaggcguga

SEQ ID NO: 472218 - RNA, 32 nt, Human
guaaucccaaagugcugggauuacagguguga

SEQ ID NO: 472219 - RNA, 32 nt, Human
guaaucccaacacuuugagaggcugagguggg

SEQ ID NO: 472220 - RNA, 32 nt, Human
guaaucccaacacuuugggaggccgagguggg

SEQ ID NO: 472221 - RNA, 19 nt, Human
guaaucccaacuacuuggg

SEQ ID NO: 472222 - RNA, 32 nt, Human
guaaucccaagcagcugggauuacaggcacac

SEQ ID NO: 472223 - RNA, 19 nt, Human
guaaucccaccuacuuggg

SEQ ID NO: 472224 - RNA, 32 nt, Human
guaaucccacuacugcauuccagccugggugg

SEQ ID NO: 472225 - RNA, 32 nt, Human
guaaucccagaacaauggcuauucauguggga

SEQ ID NO: 472226 - RNA, 19 nt, Human
guaaucccagauacuuggg

SEQ ID NO: 472227 - RNA, 32 nt, Human
guaaucccagcaauuuggaggcugagguggga

SEQ ID NO: 472228 - RNA, 32 nt, Human
guaaucccagcacauugggaagaucacuugag

SEQ ID NO: 472229 - RNA, 32 nt, Human
guaaucccagcaccuugggaggcugagguggg

SEQ ID NO: 472230 - RNA, 32 nt, Human
guaaucccagcacuaugggaggcugaggugag

SEQ ID NO: 472231 - RNA, 32 nt, Human
guaaucccagcacuaugggaggcugagguggg

SEQ ID NO: 472232 - RNA, 32 nt, Human
guaaucccagcacucuggaaggcugagguggg

SEQ ID NO: 472233 - RNA, 32 nt, Human
guaaucccagcacucugggaggcugagacagg

SEQ ID NO: 472234 - RNA, 32 nt, Human
guaaucccagcacucugggaggcugagguggg

SEQ ID NO: 472235 - RNA, 32 nt, Human
guaaucccagcacugugagaggcugaggcggg

SEQ ID NO: 472236 - RNA, 32 nt, Human
guaaucccagcacugugggaagcugaggcggg

SEQ ID NO: 472237 - RNA, 32 nt, Human
guaaucccagcacugugggaggcugagguggu

SEQ ID NO: 472238 - RNA, 32 nt, Human
guaaucccagcacuuagggaggucaacguagg

SEQ ID NO: 472239 - RNA, 32 nt, Human
guaaucccagcacuucgggaggucaagguagg

SEQ ID NO: 472240 - RNA, 32 nt, Human
guaaucccagcacuuggagaggcugagguugc

SEQ ID NO: 472241 - RNA, 32 nt, Human
guaaucccagcacuuggggaagccgagucagg

SEQ ID NO: 472242 - RNA, 32 nt, Human
guaaucccagcacuuggggaagcugagguggg

SEQ ID NO: 472243 - RNA, 32 nt, Human
guaaucccagcacuuggggaggccaaagcggu

SEQ ID NO: 472244 - RNA, 32 nt, Human
guaaucccagcacuuggggaggccaaggaggg

SEQ ID NO: 472245 - RNA, 32 nt, Human
guaaucccagcacuuggggaggcugagauggg

SEQ ID NO: 472246 - RNA, 32 nt, Human
guaaucccagcacuuggggaggcugaggcagg

SEQ ID NO: 472247 - RNA, 32 nt, Human
guaaucccagcacuuugagagacugagacagg

SEQ ID NO: 472248 - RNA, 32 nt, Human
guaaucccagcacuuugagaggccaagacagg

SEQ ID NO: 472249 - RNA, 32 nt, Human
guaaucccagcacuuugagaggccaaggaggg

SEQ ID NO: 472250 - RNA, 32 nt, Human
guaaucccagcacuuugagaugcugaggcagg

SEQ ID NO: 472251 - RNA, 32 nt, Human
guaaucccagcacuuugcgauaccaaggcggg

SEQ ID NO: 472252 - RNA, 32 nt, Human
guaaucccagcacuuuggaaggccaagguaga

SEQ ID NO: 472253 - RNA, 32 nt, Human
guaaucccagcacuuugggaagccaagaugag

SEQ ID NO: 472254 - RNA, 32 nt, Human
guaaucccagcacuuugggaagcugaagcagg

SEQ ID NO: 472255 - RNA, 32 nt, Human
guaaucccagcacuuugggaagcugagauggg

SEQ ID NO: 472256 - RNA, 32 nt, Human
guaaucccagcacuuugggaagcugaggcagg

SEQ ID NO: 472257 - RNA, 32 nt, Human
guaaucccagcacuuugggaagcugagguggg

SEQ ID NO: 472258 - RNA, 32 nt, Human
guaaucccagcacuuugggaagucaaggcagg

SEQ ID NO: 472259 - RNA, 32 nt, Human
guaaucccagcacuuugggagaccgaggcagg

SEQ ID NO: 472260 - RNA, 32 nt, Human
guaaucccagcacuuugggagacugagauggg

SEQ ID NO: 472261 - RNA, 32 nt, Human
guaaucccagcacuuugggagacugaggaggg

SEQ ID NO: 472262 - RNA, 32 nt, Human
guaaucccagcacuuugggagacugaggcggg

SEQ ID NO: 472263 - RNA, 32 nt, Human
guaaucccagcacuuugggaggccaacacagg

SEQ ID NO: 472264 - RNA, 32 nt, Human
guaaucccagcacuuugggaggccaagacagg

SEQ ID NO: 472265 - RNA, 32 nt, Human
guaaucccagcacuuugggaggccaagaccaa

SEQ ID NO: 472266 - RNA, 32 nt, Human
guaaucccagcacuuugggaggccaaggaagg

SEQ ID NO: 472267 - RNA, 32 nt, Human
guaaucccagcacuuugggaggccaagggagg

SEQ ID NO: 472268 - RNA, 32 nt, Human
guaaucccagcacuuugggaggccaagguugg

SEQ ID NO: 472269 - RNA, 32 nt, Human
guaaucccagcacuuugggaggccaaugcagg

SEQ ID NO: 472270 - RNA, 32 nt, Human
guauguauguuacuaaguuaaacuuagaaaca

SEQ ID NO: 472271 - RNA, 32 nt, Human
guauguauuucaauaagaacuaaaugcaguaa

SEQ ID NO: 472272 - RNA, 32 nt, Human
guauguauuugcuugugaaauuaaagucaccu

SEQ ID NO: 472273 - RNA, 32 nt, Human
guaugucaccuguagauuuccacacgccaagc

SEQ ID NO: 472274 - RNA, 32 nt, Human
guaugucaugcuguuuaugugugacuaccggg

SEQ ID NO: 472275 - RNA, 32 nt, Human
guauguccagaagaaagagaaagaccaucaau

SEQ ID NO: 472276 - RNA, 32 nt, Human
guauguccauuauaggacacugugggccauaa

SEQ ID NO: 472277 - RNA, 32 nt, Human
guauguccugcugccgaugccuucauuaaaau

SEQ ID NO: 472278 - RNA, 32 nt, Human
guaugucucugaguaggacuuggaccuuuccu

SEQ ID NO: 472279 - RNA, 32 nt, Human
guaugucucugcugccugccucuuuccucuga

SEQ ID NO: 472280 - RNA, 32 nt, Human
guaugucugauacuagaaacuaauuugcuuau

SEQ ID NO: 472281 - RNA, 32 nt, Human
guaugucugguucucaauuccaacaguuuaau

SEQ ID NO: 472282 - RNA, 32 nt, Human
guaugucuuuauuagcagugugagaauggacu

SEQ ID NO: 472283 - RNA, 32 nt, Human
guaugugagauguuuugacacaggcaugcaau

SEQ ID NO: 472284 - RNA, 32 nt, Human
guaugugaugcuguaggcuuggcuccaaacca

SEQ ID NO: 472285 - RNA, 32 nt, Human
guaugugauugugugagugugggcaggugagu

SEQ ID NO: 472286 - RNA, 32 nt, Human
guaugugcacacaaaaguauucaagagacagu

SEQ ID NO: 472287 - RNA, 32 nt, Human
guaugugcagagauugaaaaauaaccuugaga

SEQ ID NO: 472288 - RNA, 32 nt, Human
guaugugcaguauuuaagaaaaugacauucua

SEQ ID NO: 472289 - RNA, 32 nt, Human
guaugugccaggcacuaugcuaagcacuuuac

SEQ ID NO: 472290 - RNA, 32 nt, Human
guaugugccaggcuugccugggcugggcagcc

SEQ ID NO: 472291 - RNA, 32 nt, Human
guaugugcccugucaccugccauuccagaacu

SEQ ID NO: 472292 - RNA, 32 nt, Human
guaugugcccuucuucacacagacacuaacga

SEQ ID NO: 472293 - RNA, 32 nt, Human
guaugugccuguaaucccagcuacuugggagg

SEQ ID NO: 472294 - RNA, 32 nt, Human
guaugugccuguagucucagcuacucaggagg

SEQ ID NO: 472295 - RNA, 32 nt, Human
guaugugcuagguaggaguggagggagauaug

SEQ ID NO: 472296 - RNA, 32 nt, Human
guaugugcuaucucuaauacgcuacuucgaua

SEQ ID NO: 472297 - RNA, 32 nt, Human
guauguggacucccagcuaagcagaaaacuau

SEQ ID NO: 472298 - RNA, 32 nt, Human
guauguggauagcgugaaagaagcuugugauc

SEQ ID NO: 472299 - RNA, 32 nt, Human
guaugugggaccccagaccaucccagccaccc

SEQ ID NO: 472300 - RNA, 32 nt, Human
guaugugggagguggauaggucggugaugugu

SEQ ID NO: 472301 - RNA, 32 nt, Human
guauguguauauguuucauguacaagcaagca

SEQ ID NO: 472302 - RNA, 32 nt, Human
guaugugugugacaggaaaaucuguagagaag

SEQ ID NO: 472303 - RNA, 32 nt, Human
guauguguuugcuuuugcuugcacugaaaauu

SEQ ID NO: 472304 - RNA, 32 nt, Human
guauguguuuuuaaacccuuucuaaauaugca

SEQ ID NO: 472305 - RNA, 32 nt, Human
guauguuaaagccacagagauagagcugagga

SEQ ID NO: 472306 - RNA, 32 nt, Human
guauguuauacagacauauacacauacauaca

SEQ ID NO: 472307 - RNA, 32 nt, Human
guauguuauauaagagaaugacauacuguggc

SEQ ID NO: 472308 - RNA, 29 nt, Human
guauguuauuaaagauacaaaauguuggg

SEQ ID NO: 472309 - RNA, 32 nt, Human
guauguucaguuaacaaauuauuuguaaugua

SEQ ID NO: 472310 - RNA, 32 nt, Human
guauguucucagaacauuuuucacaaugugua

SEQ ID NO: 472311 - RNA, 32 nt, Human
guauguucuggggacgugucugcuugcccaug

SEQ ID NO: 472312 - RNA, 32 nt, Human
guauguugagccacuguugucaugccagccag

SEQ ID NO: 472313 - RNA, 32 nt, Human
guauguuuaagcucaggcuggaaaaggaucac

SEQ ID NO: 472314 - RNA, 32 nt, Human
guauguuugcuccuuguccauccaccaguccc

SEQ ID NO: 472315 - RNA, 32 nt, Human
guauguuuggaaagaauuuuuguauuuauucc

SEQ ID NO: 472316 - RNA, 32 nt, Human
guauguuuucucuccaggugcagccagaucuc

SEQ ID NO: 472317 - RNA, 32 nt, Human
guauguuuuguuguuuuguuuuggaaacugga

SEQ ID NO: 472318 - RNA, 32 nt, Human
guauuaaccccagagcacugaagagacuugug

SEQ ID NO: 472319 - RNA, 32 nt, Human
guauuaagcaagaauuaggagaauggcugucc

SEQ ID NO: 472320 - RNA, 32 nt, Human
guauuaagugagaguuccuguucugcauccuc

SEQ ID NO: 472321 - RNA, 32 nt, Human
guauuaaucuuucucucaguguuuuauaggag

SEQ ID NO: 472322 - RNA, 32 nt, Human
guauuaauguacagaguggccccucaccuggg

SEQ ID NO: 472323 - RNA, 32 nt, Human
guauuaaugucaguacuaccagcacuuugcca

SEQ ID NO: 472324 - RNA, 32 nt, Human
guauuacaggcgugagccaccaugcccagccu

SEQ ID NO: 472325 - RNA, 32 nt, Human
guauuacccacugggaaacagugguaacccac

SEQ ID NO: 472326 - RNA, 32 nt, Human
guauuacccuugcuuuuucaaaugauaaaagg

SEQ ID NO: 472327 - RNA, 32 nt, Human
guauuacccuugcuuuuucaaaugauaaaaua

SEQ ID NO: 472328 - RNA, 32 nt, Human
guauuacugagucuuggagucaucucugagag

SEQ ID NO: 472329 - RNA, 32 nt, Human
guauuacugcagcugcccaaagaugcuuuauu

SEQ ID NO: 472330 - RNA, 32 nt, Human
guauuacuguggugaaacaaaauaucuuuaaa

SEQ ID NO: 472331 - RNA, 32 nt, Human
guauuagagguccacaaagaacuauuuggagc

SEQ ID NO: 472332 - RNA, 32 nt, Human
guauuagauauggcagaaaaaccauuuccacu

SEQ ID NO: 472333 - RNA, 32 nt, Human
guauuagccagccucgccucccugccccacgu

SEQ ID NO: 472334 - RNA, 32 nt, Human
guauuaggaaguggggcuuggggaggugauua

SEQ ID NO: 472335 - RNA, 32 nt, Human
guauuaggauaguuccagcaguaaugccucaa

SEQ ID NO: 472336 - RNA, 32 nt, Human
guauuagucauuuagagguauaguuacuauua

SEQ ID NO: 472337 - RNA, 32 nt, Human
guauuaguuaugaguuugguugcaguguucuu

SEQ ID NO: 472338 - RNA, 32 nt, Human
guauuaguuccuguaacucaaaccagaauuuu

SEQ ID NO: 472339 - RNA, 32 nt, Human
guauuauaaguauuguuacacaggguuaugca

SEQ ID NO: 472340 - RNA, 32 nt, Human
guauuaucucaaggaauguacaaacuuuaguu

SEQ ID NO: 472341 - RNA, 32 nt, Human
guauuaucucacuaaugugcuaugucagccag

SEQ ID NO: 472342 - RNA, 32 nt, Human
guauuaucuccacuuucaaucucccuccaagc

SEQ ID NO: 472343 - RNA, 32 nt, Human
guauuaucuguaaauuccagacauuguaggaa

SEQ ID NO: 472344 - RNA, 32 nt, Human
guauuaugaauccauuccuuugaauuucauuu

SEQ ID NO: 472345 - RNA, 32 nt, Human
guauuaugacaugugacaggugaacucuggga

SEQ ID NO: 472346 - RNA, 32 nt, Human
guauuaugagggcuggauaauuucaugcccac

SEQ ID NO: 472347 - RNA, 32 nt, Human
guauuauggagcugcuuccucucuccaggcuc

SEQ ID NO: 472348 - RNA, 32 nt, Human
guauuaugggcgugaaccaccaugcccagccg

SEQ ID NO: 472349 - RNA, 32 nt, Human
guauuauugaaggugccagggaugggaaaggu

SEQ ID NO: 472350 - RNA, 32 nt, Human
guauucacagcugcuuggauggcugaggcagg

SEQ ID NO: 472351 - RNA, 32 nt, Human
guauucaccaugggguaccccaugcaagcaca

SEQ ID NO: 472352 - RNA, 32 nt, Human
guauucacugucacuuuuucucauguucuaau

SEQ ID NO: 472353 - RNA, 32 nt, Human
guauucagcaccuguugcaguaugaaugacac

SEQ ID NO: 472354 - RNA, 32 nt, Human
guauucaguaaacaggcugccucuccagggag

SEQ ID NO: 472355 - RNA, 32 nt, Human
guauucagugaugucauucuuuauuuauuuuu

SEQ ID NO: 472356 - RNA, 32 nt, Human
guauucagugccuggcgcggugcuagaugcug

SEQ ID NO: 472357 - RNA, 31 nt, Human
guauucaugcuuugguugcauuuaaauugcu

SEQ ID NO: 472358 - RNA, 32 nt, Human
guauuccaaagcccaauuaugugaugguuuuc

SEQ ID NO: 472359 - RNA, 24 nt, Human
guauuccacaauaguacuuacucu

SEQ ID NO: 472360 - RNA, 32 nt, Human
guauuccacacagcauugccucugaccaaggc

SEQ ID NO: 472361 - RNA, 32 nt, Human
guauuccagcacuuugggaggccgaggcgggu

SEQ ID NO: 472362 - RNA, 32 nt, Human
guauuccagcacuuugggaggccgaggugggc

SEQ ID NO: 472363 - RNA, 32 nt, Human
guauuccagggagccuuucuuggcccucaguu

SEQ ID NO: 472364 - RNA, 32 nt, Human
guauuccaggugcucaggaggcugaggcagga

SEQ ID NO: 472365 - RNA, 32 nt, Human
guauuccauauguacaugugaaaugauguuuu

SEQ ID NO: 472366 - RNA, 32 nt, Human
guauuccaucaucuuccuuuuucauuccaguc

SEQ ID NO: 472367 - RNA, 32 nt, Human
guauuccaugagcugcucaucacaguucuuuc

SEQ ID NO: 472368 - RNA, 32 nt, Human
guauuccaugagcugcucauuacaguucuuuc

SEQ ID NO: 472369 - RNA, 32 nt, Human
guauucccaacacuuuuggaggcugagguugg

SEQ ID NO: 472370 - RNA, 32 nt, Human
guauucccagcuacucagaggcugaggcagga

SEQ ID NO: 472371 - RNA, 32 nt, Human
guauucccagcugcuugggaggcugaggcagg

SEQ ID NO: 472372 - RNA, 18 nt, Human
guauucccuuuugcugcc

SEQ ID NO: 472373 - RNA, 32 nt, Human
guauuccugacaggagcccugaugucuuaaau

SEQ ID NO: 472374 - RNA, 32 nt, Human
guauuccugcauucaaaugucagccguuugua

SEQ ID NO: 472375 - RNA, 32 nt, Human
guauuccugccacucugcuccgccucagccuu

SEQ ID NO: 472376 - RNA, 32 nt, Human
guauuccugccugggccuccuggcacaagaga

SEQ ID NO: 472377 - RNA, 32 nt, Human
guauuccugcugucuguguuguccagagagcg

SEQ ID NO: 472378 - RNA, 32 nt, Human
guauuccuggugcugaauaaaggguguugcug

SEQ ID NO: 472379 - RNA, 32 nt, Human
guauuccuuggcccaguuauguucuugaauug

SEQ ID NO: 472380 - RNA, 32 nt, Human
guauuccuuuuugagaaggcaccugaagaaga

SEQ ID NO: 472381 - RNA, 32 nt, Human
guauucgguacuggacaaaaagacuggacugc

SEQ ID NO: 472382 - RNA, 32 nt, Human
guauucuaacuuuaaaagacaagugcaacaaa

SEQ ID NO: 472383 - RNA, 32 nt, Human
guauucuaccucacacuccagcgugggcuuuu

SEQ ID NO: 472384 - RNA, 32 nt, Human
guauucuagacagauccucaguuggguuuucu

SEQ ID NO: 472385 - RNA, 32 nt, Human
guauucuagacagauccucgguuggguuuucu

SEQ ID NO: 472386 - RNA, 32 nt, Human
guauucucaccacauuucguuuagucuacuca

SEQ ID NO: 472387 - RNA, 32 nt, Human
guauucucaguuuacagaccacugaccagagg

SEQ ID NO: 472388 - RNA, 32 nt, Human
guauucucauuucucacaccagccuuccaccc

SEQ ID NO: 472389 - RNA, 32 nt, Human
guauucucauuuguuuggcugcauaaucaagc

SEQ ID NO: 472390 - RNA, 32 nt, Human
guauucugccuguguucuccuccagucccacc

SEQ ID NO: 472391 - RNA, 32 nt, Human
guauucugcuuccacaugugccaguugccugg

SEQ ID NO: 472392 - RNA, 32 nt, Human
guauucuguaccauagcgcugcucuuaugcca

SEQ ID NO: 472393 - RNA, 21 nt, Human
guauucuguauagcuuacucu

SEQ ID NO: 472394 - RNA, 32 nt, Human
guauucuguguagugggaugagcagagaacaa

SEQ ID NO: 472395 - RNA, 32 nt, Human
guauucuguucuaauuucugcuucacugugag

SEQ ID NO: 472396 - RNA, 32 nt, Human
guauucuuagcacugaguauaaggcugcuacu

SEQ ID NO: 472397 - RNA, 32 nt, Human
guauucuucucuuccuuuuaucaguaggugcc

SEQ ID NO: 472398 - RNA, 32 nt, Human
guauucuugugggggcucucaaaggaaacaag

SEQ ID NO: 472399 - RNA, 32 nt, Human
guauucuuuagauccuaguauuuggaaaacaa

SEQ ID NO: 472400 - RNA, 32 nt, Human
guauugaaaggcaguuuuaccaggccucaagc

SEQ ID NO: 472401 - RNA, 32 nt, Human
guauugaacuccuggccucaagcaauccuccc

SEQ ID NO: 472402 - RNA, 32 nt, Human
guauugaaggcugcucucugaagcucccugcc

SEQ ID NO: 472403 - RNA, 32 nt, Human
guauugaauauauguaaggaaguauuggaaac

SEQ ID NO: 472404 - RNA, 32 nt, Human
guauugacugccuucacugccuggugauccuc

SEQ ID NO: 472405 - RNA, 32 nt, Human
guauugagacugaggagaaugauagagaguga

SEQ ID NO: 472406 - RNA, 32 nt, Human
guauugagggagauuguguccauaccaagcca

SEQ ID NO: 472407 - RNA, 32 nt, Human
guauugaggugcaggcuucuuccccuuuguuc

SEQ ID NO: 472408 - RNA, 32 nt, Human
guauugagucuuccuuucaaggaccauaaggu

SEQ ID NO: 472409 - RNA, 32 nt, Human
guauugagugugagguugaggugggacauuug

SEQ ID NO: 472410 - RNA, 32 nt, Human
guauugaucugagccagcaucccccaagacuu

SEQ ID NO: 472411 - RNA, 32 nt, Human
guauugauuacauuguggacuuugaaugugag

SEQ ID NO: 472412 - RNA, 32 nt, Human
guauugauuaggaaaagagacagaguaauuug

SEQ ID NO: 472413 - RNA, 32 nt, Human
guauugcaaaggccgcuuauggucuguuuggg

SEQ ID NO: 472414 - RNA, 32 nt, Human
guauugcaccagacaaacaccagacgucaagg

SEQ ID NO: 472415 - RNA, 32 nt, Human
guauugcaugaagauggcuggcagcugagucc

SEQ ID NO: 472416 - RNA, 32 nt, Human
guauugccaaggucaaggccaacuggaagcau

SEQ ID NO: 472417 - RNA, 32 nt, Human
guauugccaucuccuguaaauucaaaggcaca

SEQ ID NO: 472418 - RNA, 32 nt, Human
guauugcccaggcuggagugcaguggcgcgau

SEQ ID NO: 472419 - RNA, 32 nt, Human
guauugcccaggcuggagugugguggcacaau

SEQ ID NO: 472420 - RNA, 32 nt, Human
guauugcccugaggcuuauauucugccucagu

SEQ ID NO: 472421 - RNA, 32 nt, Human
guauugcucacugcagccccucugccccuauc

SEQ ID NO: 472422 - RNA, 32 nt, Human
guauugcucauuuccuucucuacccaaccuga

SEQ ID NO: 472423 - RNA, 32 nt, Human
guauugcuuuuaacauucuacuuugccaguuu

SEQ ID NO: 472424 - RNA, 32 nt, Human
guauuggaggucuuuaggaggagagaagcgug

SEQ ID NO: 472425 - RNA, 32 nt, Human
guauuggcaccugccuccucuucggccacccc

SEQ ID NO: 472426 - RNA, 32 nt, Human
guauuggcucuuuuaucaucagaauaggaaaa

SEQ ID NO: 472427 - RNA, 32 nt, Human
guauugggagguuucugggaagggcagaggau

SEQ ID NO: 472428 - RNA, 32 nt, Human
guauugggggacugugcuagcuuuacccccgc

SEQ ID NO: 472429 - RNA, 32 nt, Human
guauuggggucugaccccaaacaccuuccagc

SEQ ID NO: 472430 - RNA, 32 nt, Human
guauugggguggagguugcagugagcagagau

SEQ ID NO: 472431 - RNA, 32 nt, Human
guauugggguggagguugcagugagcggagau

SEQ ID NO: 472432 - RNA, 32 nt, Human
guauugguagagcugaggaagaguuagggccu

SEQ ID NO: 472433 - RNA, 32 nt, Human
guauuguaaauguguguuccuccuagguugga

SEQ ID NO: 472434 - RNA, 32 nt, Human
guauuguaaauucccuuuaguuuguuacagua

SEQ ID NO: 472435 - RNA, 32 nt, Human
guauuguaacagcaacuugucaaaccuaagca

SEQ ID NO: 472436 - RNA, 32 nt, Human
guauugucagugugugcuagcugugugucugu

SEQ ID NO: 472437 - RNA, 32 nt, Human
guauuguccugccucugccuuuucugucucag

SEQ ID NO: 472438 - RNA, 32 nt, Human
guauugugacauaaugcugggcccaacaccug

SEQ ID NO: 472439 - RNA, 32 nt, Human
guauugugaccgcggagccacaggggacccca

SEQ ID NO: 472440 - RNA, 32 nt, Human
guauuguggcaucagauaaugccaccaaagga

SEQ ID NO: 472441 - RNA, 32 nt, Human
guauuguggggaggggaguuccaagugugccc

SEQ ID NO: 472442 - RNA, 32 nt, Human
guauuguggugugguuucauuucucagagaag

SEQ ID NO: 472443 - RNA, 32 nt, Human
guauuguucagaccucagcuccugggggccgg

SEQ ID NO: 472444 - RNA, 32 nt, Human
guauuguucagugggauuuggaaaagaugccu

SEQ ID NO: 472445 - RNA, 32 nt, Human
guauuguuugugcuaagcauuguguuagauuu

SEQ ID NO: 472446 - RNA, 32 nt, Human
guauuuaaacuaaggcauuaagagauauuaga

SEQ ID NO: 472447 - RNA, 32 nt, Human
guauuuaaaguuaggaagaucugggagauagg

SEQ ID NO: 472448 - RNA, 32 nt, Human
guauuuaacucauaugaucucccuucagcaac

SEQ ID NO: 472449 - RNA, 32 nt, Human
guauuuaagcucaggccuagcagaugcaaagu

SEQ ID NO: 472450 - RNA, 32 nt, Human
guauuuacauuagaagucugauucacaggucg

SEQ ID NO: 472451 - RNA, 32 nt, Human
guauuuaccaggggagugggaaaaagaguuga

SEQ ID NO: 472452 - RNA, 32 nt, Human
guauuuacuguacauagacuucaaugauuuua

SEQ ID NO: 472453 - RNA, 32 nt, Human
guauuuagaaauuucuguucaaaauuucaggc

SEQ ID NO: 472454 - RNA, 32 nt, Human
guauuuauacagcugcuucugccacacgcacc

SEQ ID NO: 472455 - RNA, 32 nt, Human
guauuuauccaaugccaacuguaugcuaggua

SEQ ID NO: 472456 - RNA, 32 nt, Human
guauuuauccaaugccuguacucucauuguau

SEQ ID NO: 472457 - RNA, 32 nt, Human
guauuuauccacccaaaccccagacugagaua

SEQ ID NO: 472458 - RNA, 32 nt, Human
guauuuaugaaucaggguuaggcuccauauuu

SEQ ID NO: 472459 - RNA, 32 nt, Human
guauuuaugcaaggaaggauauacugagcuga

SEQ ID NO: 472460 - RNA, 32 nt, Human
guauuuauggcagaaggaccuaaauaaacugu

SEQ ID NO: 472461 - RNA, 32 nt, Human
guauuuauuuaaucucccaaaacaacugagaa

SEQ ID NO: 472462 - RNA, 32 nt, Human
guauuuauuuucccuguguuugucucuagugu

SEQ ID NO: 472463 - RNA, 32 nt, Human
guauuuauuuugcuuugagaagaggcuccucu

SEQ ID NO: 472464 - RNA, 32 nt, Human
guauuucagaaggagaaggcuggagaaggaca

SEQ ID NO: 472465 - RNA, 32 nt, Human
guauuucagauccgcucuggcccagugggcag

SEQ ID NO: 472466 - RNA, 32 nt, Human
guauuucaucccuagagcaggucagccuccuu

SEQ ID NO: 472467 - RNA, 23 nt, Human
guauuucaucucaagcuugcucu

SEQ ID NO: 472468 - RNA, 32 nt, Human
guauuucaugaaauuaaaacagugaugcuaaa

SEQ ID NO: 472469 - RNA, 32 nt, Human
guauuuccaguuuuggaaaguuuucaauacau

SEQ ID NO: 472470 - RNA, 32 nt, Human
guauuucccaagaaaguauccuuuguaaaaac

SEQ ID NO: 472471 - RNA, 32 nt, Human
guauuucccaggcuggagugcagaggcacgau

SEQ ID NO: 472472 - RNA, 32 nt, Human
guauuuccgcagcaaccaacuggcaugaagaa

SEQ ID NO: 472473 - RNA, 32 nt, Human
guauuuccuaacaacagagagauucucuuaug

SEQ ID NO: 472474 - RNA, 32 nt, Human
guauuuccuaauuuauguaucuuggucagcuu

SEQ ID NO: 472475 - RNA, 32 nt, Human
guauuuccucuucccauugucaggcccugugg

SEQ ID NO: 472476 - RNA, 32 nt, Human
guauuuccuggcaucccucccccugagacacc

SEQ ID NO: 472477 - RNA, 32 nt, Human
guauuuccuucuucaacaaagaagaaaugccc

SEQ ID NO: 472478 - RNA, 32 nt, Human
guauuucuauagcaccucucuauuggguuuau

SEQ ID NO: 472479 - RNA, 32 nt, Human
guauuucucccauuucucccucuccuucccug

SEQ ID NO: 472480 - RNA, 32 nt, Human
guauuucucccuucccacucugccucaaguga

SEQ ID NO: 472481 - RNA, 32 nt, Human
guauuucugauucucccucucuucgaauuauc

SEQ ID NO: 472482 - RNA, 32 nt, Human
guauuucugcucaugaaagaguuucacuauuu

SEQ ID NO: 472483 - RNA, 32 nt, Human
guauuucuuaccauuuuaucuuccucaugcca

SEQ ID NO: 472484 - RNA, 32 nt, Human
guauuugaaauggcaaaggaugugcuucaucc

SEQ ID NO: 472485 - RNA, 32 nt, Human
guauuugaaccaggcauccuggcuccagagcc

SEQ ID NO: 472486 - RNA, 32 nt, Human
guauuugaagaagaaugaugcauuuugacaag

SEQ ID NO: 472487 - RNA, 31 nt, Human
guauuugacaggagguaaacagcagacaaaa

SEQ ID NO: 472488 - RNA, 32 nt, Human
guauuugauaggguauugaguguauuuugugu

SEQ ID NO: 472489 - RNA, 32 nt, Human
guauuugauugaugucucaugccuuccuaaaa

SEQ ID NO: 472490 - RNA, 32 nt, Human
guauuugcaaacugagcuuguuggagggaagg

SEQ ID NO: 472491 - RNA, 32 nt, Human
guauuugcaauuuuucuuugucaguguggcuu

SEQ ID NO: 472492 - RNA, 32 nt, Human
guauuugcccacugaauaauguaugucuauga

SEQ ID NO: 472493 - RNA, 32 nt, Human
guauuugcucuaccaucucucccuagagcacu

SEQ ID NO: 472494 - RNA, 32 nt, Human
guauuugcuugucccaauacaagaaugccaaa

SEQ ID NO: 472495 - RNA, 32 nt, Human
guauuuggaagaugauuuaaauucagcaacgc

SEQ ID NO: 472496 - RNA, 32 nt, Human
guauuuggaagauuuaaaaaccuagcauccug

SEQ ID NO: 472497 - RNA, 32 nt, Human
guauuuggagguggugccaccgccucuuccug

SEQ ID NO: 472498 - RNA, 32 nt, Human
guauuuggcaguguucaucacaggcuagagag

SEQ ID NO: 472499 - RNA, 32 nt, Human
guauuugggaaguggaaaagagcccucaguug

SEQ ID NO: 472500 - RNA, 32 nt, Human
guauuuggguucaagcuuugaagguucuggga

SEQ ID NO: 472501 - RNA, 23 nt, Human
guauuugguaaaaguguaaagua

SEQ ID NO: 472502 - RNA, 32 nt, Human
guauuugucuuuuuacuacauguaggaacucu

SEQ ID NO: 472503 - RNA, 32 nt, Human
guauuuuaaaguaugugucucuaaaggaagaa

SEQ ID NO: 472504 - RNA, 22 nt, Human
guauuuuaaguaaagcuucucu

SEQ ID NO: 472505 - RNA, 32 nt, Human
guauuuuauauacucaguuuuauaaggugaua

SEQ ID NO: 472506 - RNA, 29 nt, Human
guauuuuaucugugugugcucaggaggug

SEQ ID NO: 472507 - RNA, 32 nt, Human
guauuuucaccaagccuuuucauaaucaaguu

SEQ ID NO: 472508 - RNA, 31 nt, Human
guauuuucaucaaguagcguuggagacauac

SEQ ID NO: 472509 - RNA, 32 nt, Human
guauuuucauuucucucaagcucuuucaauaa

SEQ ID NO: 472510 - RNA, 32 nt, Human
guauuuuccaaaagaagagcaagggcccggcu

SEQ ID NO: 472511 - RNA, 32 nt, Human
guauuuuccacuuauuauuacuguauaacaua

SEQ ID NO: 472512 - RNA, 32 nt, Human
guauuuuccucaugcccuggagauaauggagc

SEQ ID NO: 472513 - RNA, 32 nt, Human
guauuuuccuuaggaauucaguggaacuuauc

SEQ ID NO: 472514 - RNA, 32 nt, Human
guauuuuccuucuuuguuucccccucuuucuu

SEQ ID NO: 472515 - RNA, 32 nt, Human
guauuuucggacuuugacauuugacauuuggu

SEQ ID NO: 472516 - RNA, 32 nt, Human
guauuuucugccauuuuucagggucuaagauu

SEQ ID NO: 472517 - RNA, 32 nt, Human
guauuuucuuggggaagaccuucaccuuugca

SEQ ID NO: 472518 - RNA, 32 nt, Human
guauuuugaaguuugacugcuugaaaaagauu

SEQ ID NO: 472519 - RNA, 32 nt, Human
guauuuugauucauccaaggguuuccaaacuu

SEQ ID NO: 472520 - RNA, 32 nt, Human
guauuuugcauuggaaaaaggaagcacugugu

SEQ ID NO: 472521 - RNA, 32 nt, Human
guauuuugcccaggcaacaguacuucaaacag

SEQ ID NO: 472522 - RNA, 32 nt, Human
guauuuuggcagcccuuuccccuagacaucua

SEQ ID NO: 472523 - RNA, 32 nt, Human
guauuuugguagaguauauacauaccucacug

SEQ ID NO: 472524 - RNA, 32 nt, Human
guauuuuggugucaauaaauaucuuguaccuc

SEQ ID NO: 472525 - RNA, 32 nt, Human
guauuuugugcaaugaagcccugcucccagcc

SEQ ID NO: 472526 - RNA, 32 nt, Human
guauuuuguuucacauuugaacagucauucuu

SEQ ID NO: 472527 - RNA, 32 nt, Human
guauuuuuaaagggauuagggauucuuaguau

SEQ ID NO: 472528 - RNA, 32 nt, Human
guauuuuuaagaauugaguuguuccugcuguu

SEQ ID NO: 472529 - RNA, 32 nt, Human
guauuuuuccagaauucuuuuguccuaugcag

SEQ ID NO: 472530 - RNA, 32 nt, Human
guauuuuuccagauucuuuguagccuuugaaa

SEQ ID NO: 472531 - RNA, 32 nt, Human
guauuuuuccagcuuacauuaacccuguugau

SEQ ID NO: 472532 - RNA, 32 nt, Human
guauuuuucuccccauuuuccagggagaaauc

SEQ ID NO: 472533 - RNA, 32 nt, Human
guauuuuucuggaaagaaaacuuucuuuaccc

SEQ ID NO: 472534 - RNA, 32 nt, Human
guauuuuucuuguacauuacuuccaguaaaua

SEQ ID NO: 472535 - RNA, 32 nt, Human
guauuuuucuuuuucuauaauaccuuuaacug

SEQ ID NO: 472536 - RNA, 32 nt, Human
guauuuuugccggcuggugaauucaaacaacc

SEQ ID NO: 472537 - RNA, 32 nt, Human
guauuuuuguaugaaaagugggagacuucuga

SEQ ID NO: 472538 - RNA, 32 nt, Human
gucaaaaaucaggcuggagugcaguggcauga

SEQ ID NO: 472539 - RNA, 32 nt, Human
gucaaaaauggagugacaccccagacucaguc

SEQ ID NO: 472540 - RNA, 31 nt, Human
gucaaaacauacucagaacauuuaaaaaugu

SEQ ID NO: 472541 - RNA, 22 nt, Human
gucaaaagaacaggaauucgga

SEQ ID NO: 472542 - RNA, 32 nt, Human
gucaaaagcaugagaagagcaaacagaaacag

SEQ ID NO: 472543 - RNA, 22 nt, Human
gucaaaaggcaggugcuagaca

SEQ ID NO: 472544 - RNA, 32 nt, Human
gucaaaauacaaaugcauagauaguaaaugau

SEQ ID NO: 472545 - RNA, 32 nt, Human
gucaaaauagaaaugcauagauaguaaaugau

SEQ ID NO: 472546 - RNA, 32 nt, Human
gucaaaauagccacuuuuauccuuaacauugu

SEQ ID NO: 472547 - RNA, 32 nt, Human
gucaaaauaucuuuggccauuuugcuaagaaa

SEQ ID NO: 472548 - RNA, 21 nt, Human
gucaaacaaaacccaauuuaa

SEQ ID NO: 472549 - RNA, 32 nt, Human
gucaaacaaugagguuguagggggagguaggg

SEQ ID NO: 472550 - RNA, 32 nt, Human
gucaaacacacaaaaauacugccuuguacugg

SEQ ID NO: 472551 - RNA, 32 nt, Human
gucaaacaccugcaccuugagauauccuacaa

SEQ ID NO: 472552 - RNA, 23 nt, Human
gucaaacauuccaaguacucuuu

SEQ ID NO: 472553 - RNA, 32 nt, Human
gucaaaccaacucccucucagaagaaccugau

SEQ ID NO: 472554 - RNA, 32 nt, Human
gucaaaccaagccaggccuggugggcuggacg

SEQ ID NO: 472555 - RNA, 32 nt, Human
gucaaaccacugcaauccagccugggcaacga

SEQ ID NO: 472556 - RNA, 32 nt, Human
gucaaacccugccuuuccuuuacuuuuacuuu

SEQ ID NO: 472557 - RNA, 32 nt, Human
gucaaaccuucccagggacauuccuaacaucu

SEQ ID NO: 472558 - RNA, 32 nt, Human
gucaaacgucauaccuuguguaccaucguaga

SEQ ID NO: 472559 - RNA, 22 nt, Human
gucaaacuacaucacuuguauc

SEQ ID NO: 472560 - RNA, 32 nt, Human
gucaaacucacagcagcacuguccucucaguu

SEQ ID NO: 472561 - RNA, 32 nt, Human
gucaaacucuccccaucucuacugccucaccc

SEQ ID NO: 472562 - RNA, 32 nt, Human
gucaaacucuuauuucagagcuucaugaauuu

SEQ ID NO: 472563 - RNA, 24 nt, Human
gucaaacugcaaacauuuugcauc

SEQ ID NO: 472564 - RNA, 32 nt, Human
gucaaacugucacaguaucugcuccauagguu

SEQ ID NO: 472565 - RNA, 32 nt, Human
gucaaagaagacugcaaagccuaugaugauaa

SEQ ID NO: 472566 - RNA, 32 nt, Human
gucaaagaaggaggaggaggguggggagcugg

SEQ ID NO: 472567 - RNA, 32 nt, Human
gucaaagaagucaaaggggcugccuggaggag

SEQ ID NO: 472568 - RNA, 32 nt, Human
gucaaagacagaaugguggaguguagccucca

SEQ ID NO: 472569 - RNA, 32 nt, Human
gucaaagaccuccuggccaaguccugcccucu

SEQ ID NO: 472570 - RNA, 32 nt, Human
gucaaagcaaaacaaaaacaauaaccaugauu

SEQ ID NO: 472571 - RNA, 32 nt, Human
gucaaagcaacaguccacacuuuguccaaugg

SEQ ID NO: 472572 - RNA, 32 nt, Human
gucaaagcaauccugccucaggcccccuagua

SEQ ID NO: 472573 - RNA, 19 nt, Human
gucaaagcaggcccugagg

SEQ ID NO: 472574 - RNA, 32 nt, Human
gucaaagccugcaggcgaaggacaggacagca

SEQ ID NO: 472575 - RNA, 32 nt, Human
gucaaagcguggcauugagauaauuggacuga

SEQ ID NO: 472576 - RNA, 32 nt, Human
gucaaagcuuucuagugacggucaguccuacu

SEQ ID NO: 472577 - RNA, 32 nt, Human
gucaaaggcaggcagggacugugaaauguuau

SEQ ID NO: 472578 - RNA, 18 nt, Human
gucaaaggcuccaagcga

SEQ ID NO: 472579 - RNA, 32 nt, Human
gucaaagguaauccaaucucacccucaucuug

SEQ ID NO: 472580 - RNA, 32 nt, Human
gucaaaggugugcagcuuccaaauggcauccc

SEQ ID NO: 472581 - RNA, 32 nt, Human
gucaaagguuaaggggcagcagcuggucuggc

SEQ ID NO: 472582 - RNA, 32 nt, Human
gucaaaguggacggauaccugaggucaggagc

SEQ ID NO: 472583 - RNA, 32 nt, Human
gucaaauaaaaauuuguuuuucagagauuuac

SEQ ID NO: 472584 - RNA, 32 nt, Human
gucaaauauauagugauaauguuaacauguuu

SEQ ID NO: 472585 - RNA, 32 nt, Human
gucaaauaucaggucacagcaugcagaagaac

SEQ ID NO: 472586 - RNA, 32 nt, Human
gucaaauauuacugccuugguagcauuuauuu

SEQ ID NO: 472587 - RNA, 23 nt, Human
gucaaaucauaguauccuaagca

SEQ ID NO: 472588 - RNA, 32 nt, Human
gucaaauccuacucuucaacuaccaucucugg

SEQ ID NO: 472589 - RNA, 21 nt, Human
gucaaauccucuuuccuuccc

SEQ ID NO: 472590 - RNA, 32 nt, Human
gucaaaugaacaaaccaguguucuaagagugu

SEQ ID NO: 472591 - RNA, 23 nt, Human
gucaaaugacuguguccuggaca

SEQ ID NO: 472592 - RNA, 32 nt, Human
gucaaaugagaguaaucaugcccacccucauu

SEQ ID NO: 472593 - RNA, 32 nt, Human
gucaaaugcccaggcagauagggguggguacc

SEQ ID NO: 472594 - RNA, 32 nt, Human
gucaaauguaaacccuggaaccugagucccaa

SEQ ID NO: 472595 - RNA, 32 nt, Human
gucaaauuacguauuuuuaugaccacguaaug

SEQ ID NO: 472596 - RNA, 32 nt, Human
gucaaauucggacuuguaggcgaucagggcug

SEQ ID NO: 472597 - RNA, 32 nt, Human
gucaaauucugacacuuuaaguggugagggag

SEQ ID NO: 472598 - RNA, 32 nt, Human
gucaaauuucaaaucacccaguguugaagaau

SEQ ID NO: 472599 - RNA, 21 nt, Human
gucaacaaaagccagcucuag

SEQ ID NO: 472600 - RNA, 32 nt, Human
gucaacaaagaaugguuaaaugcuaaggaagc

SEQ ID NO: 472601 - RNA, 21 nt, Human
gucaacaaagcaagacccuuu

SEQ ID NO: 472602 - RNA, 20 nt, Human
gucaacaaauucaggcucuu

SEQ ID NO: 472603 - RNA, 23 nt, Human
gucaacaacagaauaaagcucug

SEQ ID NO: 472604 - RNA, 22 nt, Human
gucaacaacaggagaagcucua

SEQ ID NO: 472605 - RNA, 32 nt, Human
gucaacaaccagccuguucugcuacuggugaa

SEQ ID NO: 472606 - RNA, 32 nt, Human
gucaacaaguauuuuaacucucaguccaacau

SEQ ID NO: 472607 - RNA, 19 nt, Human
gucaacaauaaaacacuga

SEQ ID NO: 472608 - RNA, 32 nt, Human
gucaacaaucccagaccugccaagccccauuu

SEQ ID NO: 472609 - RNA, 19 nt, Human
gucaacaaucucaacucug

SEQ ID NO: 472610 - RNA, 19 nt, Human
gucaacaauuaaaaaacug

SEQ ID NO: 472611 - RNA, 32 nt, Human
gucaacaauucagguguaucuauauucagaca

SEQ ID NO: 472612 - RNA, 32 nt, Human
gucaacacagaauuuauacagcagcuggugcu

SEQ ID NO: 472613 - RNA, 32 nt, Human
gucaacaccagaaagccuccucuggagaaucu

SEQ ID NO: 472614 - RNA, 32 nt, Human
gucaacaccauggacugaacacuugcugggcu

SEQ ID NO: 472615 - RNA, 32 nt, Human
gucaacacugcacuccagccugggcgacagag

SEQ ID NO: 472616 - RNA, 20 nt, Human
gucaacagagugagacucug

SEQ ID NO: 472617 - RNA, 19 nt, Human
gucaacagcugaacucuga

SEQ ID NO: 472618 - RNA, 23 nt, Human
gucaacaguaugaaggauucuga

SEQ ID NO: 472619 - RNA, 32 nt, Human
gucaacaguaugaaggauucugaccccugugc

SEQ ID NO: 472620 - RNA, 20 nt, Human
gucaacagugaaaccuuuga

SEQ ID NO: 472621 - RNA, 20 nt, Human
gucaacaguggaaaaucuga

SEQ ID NO: 472622 - RNA, 19 nt, Human
gucaacauagaagcuuuag

SEQ ID NO: 472623 - RNA, 32 nt, Human
gucaacauguagagucugcuucccucauuauu

SEQ ID NO: 472624 - RNA, 32 nt, Human
gucaacauguuucugauguggcauuuuuguuu

SEQ ID NO: 472625 - RNA, 23 nt, Human
gucaaccaggccagagugcagug

SEQ ID NO: 472626 - RNA, 32 nt, Human
gucaacccaggagccaagaaaagagaacuacg

SEQ ID NO: 472627 - RNA, 32 nt, Human
gucaacccccuucaaccuccucaccucucuaa

SEQ ID NO: 472628 - RNA, 32 nt, Human
gucaacccucugaggauggaaggcagugucuu

SEQ ID NO: 472629 - RNA, 23 nt, Human
gucaacccugcacugggagcuua

SEQ ID NO: 472630 - RNA, 32 nt, Human
gucaacccuguaauuccagcacuuugggaggg

SEQ ID NO: 472631 - RNA, 32 nt, Human
gucaaccgcaguaggaggugggggcgaagaga

SEQ ID NO: 472632 - RNA, 32 nt, Human
gucaaccugucugaaccuuaguauccuuuccu

SEQ ID NO: 472633 - RNA, 32 nt, Human
gucaaccuuucugagccacagcuucccgcugg

SEQ ID NO: 472634 - RNA, 32 nt, Human
gucaaccuuuucugcacaucuaguuuccuacc

SEQ ID NO: 472635 - RNA, 25 nt, Human
gucaacgcagacuggagugcagugg

SEQ ID NO: 472636 - RNA, 32 nt, Human
gucaacgggcgggugcuggagcuguuccgggc

SEQ ID NO: 472637 - RNA, 32 nt, Human
gucaacgggcuggggacacaaaauacucagag

SEQ ID NO: 472638 - RNA, 32 nt, Human
gucaacgguaugauuaacugccuuuguucugc

SEQ ID NO: 472639 - RNA, 32 nt, Human
gucaacgugagcuggugcuucgugugcuccaa

SEQ ID NO: 472640 - RNA, 23 nt, Human
gucaacuccaaggaauacugaga

SEQ ID NO: 472641 - RNA, 32 nt, Human
gucaacucugcuuaauuaagcacuuugaugau

SEQ ID NO: 472642 - RNA, 32 nt, Human
gucaacugaauuccccacuuccuggguaagaa

SEQ ID NO: 472643 - RNA, 24 nt, Human
gucaacugacaucuaugcuacaua

SEQ ID NO: 472644 - RNA, 32 nt, Human
gucaacugacuuccugcguggcugucggacug

SEQ ID NO: 472645 - RNA, 32 nt, Human
gucaacugagacugagacugggagcagaguug

SEQ ID NO: 472646 - RNA, 32 nt, Human
gucaacuggagacuaucugagaacaaaaggac

SEQ ID NO: 472647 - RNA, 32 nt, Human
gucaacuucacuucucacucuuauggucucaa

SEQ ID NO: 472648 - RNA, 32 nt, Human
gucaacuucuaucaacuucaggccaggcccgu

SEQ ID NO: 472649 - RNA, 32 nt, Human
gucaacuucucccaccugaccacaaaggacua

SEQ ID NO: 472650 - RNA, 32 nt, Human
gucaacuugucauauacaccuccagggaccaa

SEQ ID NO: 472651 - RNA, 32 nt, Human
gucaacuuugauccuuugucucccaggaaggu

SEQ ID NO: 472652 - RNA, 32 nt, Human
gucaacuuuucucuuggcuaacucuugaagcu

SEQ ID NO: 472653 - RNA, 32 nt, Human
gucaagaaaacgauucuagcucuggcucuguc

SEQ ID NO: 472654 - RNA, 32 nt, Human
gucaagaaaugagaugguucacuugacuacug

SEQ ID NO: 472655 - RNA, 32 nt, Human
gucaagaaggaaucugcucagagcagauucug

SEQ ID NO: 472656 - RNA, 32 nt, Human
gucaagaaucacccuuuccaaauccucugggu

SEQ ID NO: 472657 - RNA, 32 nt, Human
gucaagacagaugacaccagcacuuuaaacuc

SEQ ID NO: 472658 - RNA, 32 nt, Human
gucaagacagcuaggucucuguccuaaccucc

SEQ ID NO: 472659 - RNA, 32 nt, Human
gucaagaccaagggccuccuggaaacaccagc

SEQ ID NO: 472660 - RNA, 32 nt, Human
gucaagaccagccagggcaacaugaugagacc

SEQ ID NO: 472661 - RNA, 32 nt, Human
gucaagaccagccuggccaacguggugaaaca

SEQ ID NO: 472662 - RNA, 32 nt, Human
gucaagaccagccugggcaacacggugaaacc

SEQ ID NO: 472663 - RNA, 32 nt, Human
gucaagaccagccuugcagccaggugcagugg

SEQ ID NO: 472664 - RNA, 32 nt, Human
gucaagaccauccuggcuaacauggugaaacc

SEQ ID NO: 472665 - RNA, 32 nt, Human
gucaagaccccuggcccugcugagcgugaaac

SEQ ID NO: 472666 - RNA, 32 nt, Human
gucaagacucucagaagaaccuggaguaauug

SEQ ID NO: 472667 - RNA, 18 nt, Human
gucaagagaagacucuaa

SEQ ID NO: 472668 - RNA, 32 nt, Human
gucaagagacgcagagggccccugccaggguu

SEQ ID NO: 472669 - RNA, 32 nt, Human
gucaagagagaagaggaggagaagggaggggg

SEQ ID NO: 472670 - RNA, 32 nt, Human
gucaagagaggaagagagggaggagggguagg

SEQ ID NO: 472671 - RNA, 32 nt, Human
gucaagagccaagacacagguaaugcacgaca

SEQ ID NO: 472672 - RNA, 20 nt, Human
gucaagagcccuguguucca

SEQ ID NO: 472673 - RNA, 32 nt, Human
gucaagaggaagguccccauacacauguaccu

SEQ ID NO: 472674 - RNA, 31 nt, Human
gucaagaggcacuucuuuauuaauuaccaaa

SEQ ID NO: 472675 - RNA, 32 nt, Human
gucaagagggggcaagucacaugggcagagau

SEQ ID NO: 472676 - RNA, 32 nt, Human
gucaagaggugggagaggaaagggguagaugg

SEQ ID NO: 472677 - RNA, 32 nt, Human
gucaagagugagagaagagaagaaaauuagua

SEQ ID NO: 472678 - RNA, 32 nt, Human
gucaagaguuucagacuagccuugccaacaug

SEQ ID NO: 472679 - RNA, 20 nt, Human
gucaagauagccaagcaguu

SEQ ID NO: 472680 - RNA, 32 nt, Human
gucaagauaggauaugccucacccucagcuac

SEQ ID NO: 472681 - RNA, 32 nt, Human
gucaagaucagacuggccaacagaaugaaacc

SEQ ID NO: 472682 - RNA, 32 nt, Human
gucaagaucagccugaccaacaugaugaaacc

SEQ ID NO: 472683 - RNA, 32 nt, Human
gucaagaucagcucuggcuaguucucacaggu

SEQ ID NO: 472684 - RNA, 32 nt, Human
gucaagauugcagugagcuaugaucaugccac

SEQ ID NO: 472685 - RNA, 32 nt, Human
gucaagcagagcugggugggcugagaccagca

SEQ ID NO: 472686 - RNA, 32 nt, Human
gucaagcagaggaggaaggcagggguaccacc

SEQ ID NO: 472687 - RNA, 32 nt, Human
gucaagcauucauuauucugaagaggaggaga

SEQ ID NO: 472688 - RNA, 17 nt, Human
gucaagccaggugugga

SEQ ID NO: 472689 - RNA, 32 nt, Human
gucaagcccccuuugauugaguucaucaugag

SEQ ID NO: 472690 - RNA, 20 nt, Human
gucaagccccuggccugagg

SEQ ID NO: 472691 - RNA, 32 nt, Human
gucaagccggggagggcgaaaagggaaccugg

SEQ ID NO: 472692 - RNA, 32 nt, Human
gucaagccugaagauaguggcucugcuguuuu

SEQ ID NO: 472693 - RNA, 32 nt, Human
gucaagccuguaaucccaacacuuugggagac

SEQ ID NO: 472694 - RNA, 32 nt, Human
gucaagcgcaggcucuucagaaaccuagaaac

SEQ ID NO: 472695 - RNA, 32 nt, Human
gucaagcgccggcguucucugccaucacccuu

SEQ ID NO: 472696 - RNA, 32 nt, Human
gucaagcgguucugcucuggccccagaagauc

SEQ ID NO: 472697 - RNA, 32 nt, Human
gucaagcuacuuccugagcuucucucagauuu

SEQ ID NO: 472698 - RNA, 32 nt, Human
gucaagcucagugagcauucucagcacauugc

SEQ ID NO: 472699 - RNA, 32 nt, Human
gucaagcuggugucauugacuaccacauccac

SEQ ID NO: 472700 - RNA, 32 nt, Human
gucaagcuguuucuucaggcagccucucaaau

SEQ ID NO: 472701 - RNA, 32 nt, Human
gucaagcuugccucuucuugaggagcaccaac

SEQ ID NO: 472702 - RNA, 32 nt, Human
gucaaggaagaaaggaaggaaggaaggcgaga

SEQ ID NO: 472703 - RNA, 32 nt, Human
gucaaggagaggguguggacuggaggaaaucu

SEQ ID NO: 472704 - RNA, 32 nt, Human
gucaaggagcucagaggagggcccugaggucu

SEQ ID NO: 472705 - RNA, 32 nt, Human
gucaaggaggccagaaaacaagccagaauuuu

SEQ ID NO: 472706 - RNA, 18 nt, Human
gucaaggaggccccugag

SEQ ID NO: 472707 - RNA, 32 nt, Human
gucaaggccaacaccccagggagacccauuuc

SEQ ID NO: 472708 - RNA, 32 nt, Human
gucaaggccacccccaccccagaacagaaccg

SEQ ID NO: 472709 - RNA, 32 nt, Human
gucaaggccacccugggcuugaagggaccggc

SEQ ID NO: 472710 - RNA, 32 nt, Human
gucaaggccagcaagguggaguggaugccuca

SEQ ID NO: 472711 - RNA, 32 nt, Human
gucaaggccccauucuccucuggaaagccuuc

SEQ ID NO: 472712 - RNA, 32 nt, Human
gucaaggccgaacuccagccugguggcuuugc

SEQ ID NO: 472713 - RNA, 32 nt, Human
gucaaggccugcucccuguaggguccaaccag

SEQ ID NO: 472714 - RNA, 32 nt, Human
gucaaggcguagggcuggagggcaggggcggg

SEQ ID NO: 472715 - RNA, 32 nt, Human
gucaaggcucagagguaacaagacagaaaauu

SEQ ID NO: 472716 - RNA, 32 nt, Human
gucaaggcugcagugagccaugaucaugccac

SEQ ID NO: 472717 - RNA, 32 nt, Human
gucaaggcugggcccugcaguggggcgggccg

SEQ ID NO: 472718 - RNA, 32 nt, Human
gucaagggaagcuuccugugaaccaaaguucu

SEQ ID NO: 472719 - RNA, 31 nt, Human
gucaagggaauugcuuuccagaugcuaagaa

SEQ ID NO: 472720 - RNA, 32 nt, Human
gucaaggggcuuccaacuccagccucucaugg

SEQ ID NO: 472721 - RNA, 32 nt, Human
gucaagggggaccagagguugaccacugugga

SEQ ID NO: 472722 - RNA, 32 nt, Human
gucaagguaacagaacaaaagggaauccugau

SEQ ID NO: 472723 - RNA, 32 nt, Human
gucaaggucagccuggagcuggguggcggccu

SEQ ID NO: 472724 - RNA, 32 nt, Human
gucaaggugaagcacauacggcagaccucuua

SEQ ID NO: 472725 - RNA, 32 nt, Human
gucaaggugaagccccacgacaaggaugccaa

SEQ ID NO: 472726 - RNA, 32 nt, Human
gucaagguugcauccuuuugagcccaggaccu

SEQ ID NO: 472727 - RNA, 32 nt, Human
gucaaguaaaaauuuguuuuucagagauuuac

SEQ ID NO: 472728 - RNA, 18 nt, Human
gucaaguaaguuuaggga

SEQ ID NO: 472729 - RNA, 32 nt, Human
gucaaguagaggcaaugcaaagauucacauag

SEQ ID NO: 472730 - RNA, 32 nt, Human
gucaaguagccagaaacagguguucuggcuuu

SEQ ID NO: 472731 - RNA, 32 nt, Human
gucaaguaguaagucgaaccauccuaagucag

SEQ ID NO: 472732 - RNA, 22 nt, Human
gucaagucagagcaccuggaca

SEQ ID NO: 472733 - RNA, 32 nt, Human
gucaagucagaggaggaagcugagggccccga

SEQ ID NO: 472734 - RNA, 32 nt, Human
gucaagucuuacaugagugaagagacacgcag

SEQ ID NO: 472735 - RNA, 32 nt, Human
gucaagugaaacccccuuuuccagucauaaaa

SEQ ID NO: 472736 - RNA, 32 nt, Human
gucaagugauucugccuguaaucccagaauuu

SEQ ID NO: 472737 - RNA, 32 nt, Human
gucaaguggcugggggccaggaugccuggguu

SEQ ID NO: 472738 - RNA, 31 nt, Human
gucaaguggcuucucccugcccuaaggaggg

SEQ ID NO: 472739 - RNA, 32 nt, Human
gucaagugugcccagugcuuucucucagaacu

SEQ ID NO: 472740 - RNA, 32 nt, Human
gucaaguuccaaaagcagaggcggccuuggcg

SEQ ID NO: 472741 - RNA, 32 nt, Human
gucaaguucuguuuucuuuuuacccucugaga

SEQ ID NO: 472742 - RNA, 32 nt, Human
gucaaguuucuguucuguuuccuuccuuucua

SEQ ID NO: 472743 - RNA, 20 nt, Human
gucaauaauuaucgcuuuaa

SEQ ID NO: 472744 - RNA, 32 nt, Human
gucaauaccaaguugaaaaccaucugggagag

SEQ ID NO: 472745 - RNA, 32 nt, Human
gucaauaccagccugggcaacauaguaagacc

SEQ ID NO: 472746 - RNA, 32 nt, Human
gucaauaccaugcuuuccuguaauauuugugg

SEQ ID NO: 472747 - RNA, 18 nt, Human
gucaauaguuauaaccua

SEQ ID NO: 472748 - RNA, 20 nt, Human
gucaauauacaaaacuuuaa

SEQ ID NO: 472749 - RNA, 32 nt, Human
gucaauaucacaguauuacaggugcuauuuuu

SEQ ID NO: 472750 - RNA, 32 nt, Human
gucaauauguuuauuuccucugucuacagcag

SEQ ID NO: 472751 - RNA, 32 nt, Human
gucaaucaguaggcaguagaggagccagcaua

SEQ ID NO: 472752 - RNA, 32 nt, Human
gucaauccaaguguccaucaaugguagacugg

SEQ ID NO: 472753 - RNA, 32 nt, Human
gucaaucccaguugcuuuuccccagauuuggu

SEQ ID NO: 472754 - RNA, 32 nt, Human
gucaauccugguguuucucuguaucuucucac

SEQ ID NO: 472755 - RNA, 22 nt, Human
gucaaucgauucugaacucuga

SEQ ID NO: 472756 - RNA, 32 nt, Human
gucaaugaacagcaucaaagggaggcugaaga

SEQ ID NO: 472757 - RNA, 32 nt, Human
gucaaugaagugaugaaagcuuagagccagua

SEQ ID NO: 472758 - RNA, 32 nt, Human
gucaaugagcaucuccuuccuugccaaagcau

SEQ ID NO: 472759 - RNA, 32 nt, Human
gucaaugaggggcacccagugcuucuagggca

SEQ ID NO: 472760 - RNA, 32 nt, Human
gucaaugcaacaaaacacucuucuguccuuuu

SEQ ID NO: 472761 - RNA, 32 nt, Human
gucaaugcccacucuugccacacugcuaauau

SEQ ID NO: 472762 - RNA, 32 nt, Human
gucaaugcucacugaaagucugucuuagcugc

SEQ ID NO: 472763 - RNA, 32 nt, Human
gucaauggaagaaaccaccaagguccaaagcg

SEQ ID NO: 472764 - RNA, 32 nt, Human
gucaauggaaguuggcugcacuugauguuugu

SEQ ID NO: 472765 - RNA, 32 nt, Human
gucaauggcugugucucaccagccuggagaug

SEQ ID NO: 472766 - RNA, 32 nt, Human
gucaaugggacgacaguggcaagagggguugg

SEQ ID NO: 472767 - RNA, 32 nt, Human
gucaauggggaaaggacacagaaacaggaacu

SEQ ID NO: 472768 - RNA, 32 nt, Human
gucaauggucaccaagguccugaagccuuccu

SEQ ID NO: 472769 - RNA, 32 nt, Human
gucaauggucugcucuguagcagucucagagc

SEQ ID NO: 472770 - RNA, 32 nt, Human
gucaaugugggcagccucauggugccugucuu

SEQ ID NO: 472771 - RNA, 32 nt, Human
gucaaugugggcugcugagcacugcuuggaua

SEQ ID NO: 472772 - RNA, 32 nt, Human
gucaaugugugugacauguguguccuuucagu

SEQ ID NO: 472773 - RNA, 32 nt, Human
gucaauucaguuugagaaagugcuauuaacuu

SEQ ID NO: 472774 - RNA, 31 nt, Human
gucaauuccaagaaauaucuguugaauauuu

SEQ ID NO: 472775 - RNA, 32 nt, Human
gucaauugccauuauuuguauugaaguaucag

SEQ ID NO: 472776 - RNA, 32 nt, Human
gucaauugccuagucaggcuuaugcaaugcag

SEQ ID NO: 472777 - RNA, 32 nt, Human
gucaauuuagaacaguuacuaggauaaacucc

SEQ ID NO: 472778 - RNA, 31 nt, Human
gucaauuugcacuucuuuauaauccucuggu

SEQ ID NO: 472779 - RNA, 32 nt, Human
gucaauuugccucugugugccucaguggagac

SEQ ID NO: 472780 - RNA, 32 nt, Human
gucaauuuguucccucaccaacauggaugccu

SEQ ID NO: 472781 - RNA, 32 nt, Human
gucaauuuucuccaaaacaaaccccaccgggc

SEQ ID NO: 472782 - RNA, 32 nt, Human
gucacaaaagacugagcaauugagaaaacaaa

SEQ ID NO: 472783 - RNA, 32 nt, Human
gucacaaacaugucagacaaaagugaauuaaa

SEQ ID NO: 472784 - RNA, 32 nt, Human
gucacaaagcuuugagcaacaggagaaccacu

SEQ ID NO: 472785 - RNA, 32 nt, Human
gucacaaaggccaucagggcuuguccgggagc

SEQ ID NO: 472786 - RNA, 32 nt, Human
gucacaacacaaauaccccucuugaaagagau

SEQ ID NO: 472787 - RNA, 32 nt, Human
gucacaacucacugcagccuggaccuccuagc

SEQ ID NO: 472788 - RNA, 32 nt, Human
gucacaagagggaaggacuuggagaggagaau

SEQ ID NO: 472789 - RNA, 32 nt, Human
gucacaaggagagcaggcugaguuuggagcag

SEQ ID NO: 472790 - RNA, 32 nt, Human
gucacaagguuuaaggugacccaaugauucag

SEQ ID NO: 472791 - RNA, 32 nt, Human
gucacaaucugaagaaucaaacuuccauccug

SEQ ID NO: 472792 - RNA, 32 nt, Human
gucacaaugaacagccaugcugcaggugacgg

SEQ ID NO: 472793 - RNA, 32 nt, Human
gucacaaugagaaccucgggguuugagguggc

SEQ ID NO: 472794 - RNA, 32 nt, Human
gucacacacagcaacgaauacagacuuuauaa

SEQ ID NO: 472795 - RNA, 32 nt, Human
gucacacagauggugggacagaaacgaucucu

SEQ ID NO: 472796 - RNA, 32 nt, Human
gucacacagcacaucaguggcuacaugugagc

SEQ ID NO: 472797 - RNA, 20 nt, Human
gucacacagcuaauggcaga

SEQ ID NO: 472798 - RNA, 24 nt, Human
gucacacagcuaguuagcggcaga

SEQ ID NO: 472799 - RNA, 32 nt, Human
gucacacagcuauuauggagguuaaguucauu

SEQ ID NO: 472800 - RNA, 23 nt, Human
gucacacagcucagauccccaga

SEQ ID NO: 472801 - RNA, 23 nt, Human
gucacacagcugcugggucaguc

SEQ ID NO: 472802 - RNA, 32 nt, Human
gucacacagcuggcuggggcaggauuggguuu

SEQ ID NO: 472803 - RNA, 32 nt, Human
gucacacaggaaguuggcagcucugcuccauc

SEQ ID NO: 472804 - RNA, 32 nt, Human
gucacacaggcaggggugaaacaugggcucug

SEQ ID NO: 472805 - RNA, 32 nt, Human
gucacacaggcugcucagagggcugcugaaca

SEQ ID NO: 472806 - RNA, 24 nt, Human
gucacacaggcuggagggcagugg

SEQ ID NO: 472807 - RNA, 32 nt, Human
gucacacaggcuggagugcaguacaauuacgg

SEQ ID NO: 472808 - RNA, 24 nt, Human
gucacacaggcuggagugcagugg

SEQ ID NO: 472809 - RNA, 32 nt, Human
gucacacaguaucccacacacacuggugccca

SEQ ID NO: 472810 - RNA, 32 nt, Human
gucacacaguuggccaccaccaucucuagaug

SEQ ID NO: 472811 - RNA, 32 nt, Human
gucacacaucaauuuuucuccugacuuuugcu

SEQ ID NO: 472812 - RNA, 32 nt, Human
gucacacauccugguuguauaaccaggagguc

SEQ ID NO: 472813 - RNA, 32 nt, Human
gucacacaugucuagccuccaggcgcugugcu

SEQ ID NO: 472814 - RNA, 32 nt, Human
gucacacaugugccuguuagguugugaaaguu

SEQ ID NO: 472815 - RNA, 32 nt, Human
gucacacauucagaacugucucuggcagucga

SEQ ID NO: 472816 - RNA, 32 nt, Human
gucacaccacugcacuccagccugggcaauag

SEQ ID NO: 472817 - RNA, 32 nt, Human
gucacaccacugcacuccagccugggcuacag

SEQ ID NO: 472818 - RNA, 32 nt, Human
gucacaccacuguauuccagccugggugacag

SEQ ID NO: 472819 - RNA, 32 nt, Human
gucacaccagguggccagcauuucugugaagg

SEQ ID NO: 472820 - RNA, 32 nt, Human
gucacaccauugcacuccaaccugggcgacag

SEQ ID NO: 472821 - RNA, 32 nt, Human
gucacaccccugcacuccagccugggugacag

SEQ ID NO: 472822 - RNA, 32 nt, Human
gucacaccgcugcacuccagccugggcaacaa

SEQ ID NO: 472823 - RNA, 32 nt, Human
gucacaccguuuuaggacucugugccacuuug

SEQ ID NO: 472824 - RNA, 32 nt, Human
gucacaccuauaaucccagcacuuugggaggc

SEQ ID NO: 472825 - RNA, 32 nt, Human
gucacaccuguaaucccagcacguugggaggc

SEQ ID NO: 472826 - RNA, 32 nt, Human
gucacaccuguaaucccagcacuuugggagga

SEQ ID NO: 472827 - RNA, 32 nt, Human
gucacacgcuggugccgggggugcuuuggggg

SEQ ID NO: 472828 - RNA, 32 nt, Human
gucacacgggcauccauuggaaaagagaagca

SEQ ID NO: 472829 - RNA, 32 nt, Human
gucacacgguacaauguccuacccacaacucc

SEQ ID NO: 472830 - RNA, 32 nt, Human
gucacacuauuaccacugcccaaccaaccuau

SEQ ID NO: 472831 - RNA, 32 nt, Human
gucacacucccagaccccugaggggcccacgg

SEQ ID NO: 472832 - RNA, 32 nt, Human
gucacacucccagaccccugggggcccacggu

SEQ ID NO: 472833 - RNA, 32 nt, Human
gucacacucccagcaccuaguaugcucaguaa

SEQ ID NO: 472834 - RNA, 32 nt, Human
gucacacucccaggaugaugaagaggggaucu

SEQ ID NO: 472835 - RNA, 32 nt, Human
gucacacucuccaggcuggagugcaguggcac

SEQ ID NO: 472836 - RNA, 32 nt, Human
gucacacugaccuucagcauugcccacagucc

SEQ ID NO: 472837 - RNA, 32 nt, Human
gucacacuggaggcuucauuuacuccagacuc

SEQ ID NO: 472838 - RNA, 32 nt, Human
gucacacuggauccuuggccuccaggguccau

SEQ ID NO: 472839 - RNA, 32 nt, Human
gucacacuggugcugagugaccgggggcugcu

SEQ ID NO: 472840 - RNA, 25 nt, Human
gucacacuguggaauacaagacagu

SEQ ID NO: 472841 - RNA, 32 nt, Human
gucacacuucaaggaggcagcucucuagacag

SEQ ID NO: 472842 - RNA, 32 nt, Human
gucacagaaaaaugaaacugugacugguuuuc

SEQ ID NO: 472843 - RNA, 21 nt, Human
gucacagaacauaaaugcaua

SEQ ID NO: 472844 - RNA, 23 nt, Human
gucacagaauuuugagacccauu

SEQ ID NO: 472845 - RNA, 24 nt, Human
gucacagaauuuugagacccauua

SEQ ID NO: 472846 - RNA, 32 nt, Human
gucacagacacacagagcccagccguggcagg

SEQ ID NO: 472847 - RNA, 32 nt, Human
gucacagacugugugggggccacccaggggcu

SEQ ID NO: 472848 - RNA, 32 nt, Human
gucacagaggagccugcugagcuccagacugc

SEQ ID NO: 472849 - RNA, 32 nt, Human
gucacagagguagaauugagcacucacagaug

SEQ ID NO: 472850 - RNA, 32 nt, Human
gucacagaguuccacuuuuuccacucuuauua

SEQ ID NO: 472851 - RNA, 32 nt, Human
gucacagauagucucugccacuccccugccuc

SEQ ID NO: 472852 - RNA, 32 nt, Human
gucacagaucccuaccugccuggcuaagaccc

SEQ ID NO: 472853 - RNA, 24 nt, Human
gucacagaugaaacuuaaaugaua

SEQ ID NO: 472854 - RNA, 32 nt, Human
gucacagaugcugggaaguauggcccgaaaga

SEQ ID NO: 472855 - RNA, 32 nt, Human
gucacagauggcagucacugaccugcugugau

SEQ ID NO: 472856 - RNA, 32 nt, Human
gucacagaugugagccagggcacugcucagcu

SEQ ID NO: 472857 - RNA, 32 nt, Human
gucacagauuccauugaaaggagcagauucua

SEQ ID NO: 472858 - RNA, 32 nt, Human
gucacagcagugagcuagagccugaccccuga

SEQ ID NO: 472859 - RNA, 32 nt, Human
gucacagcaguggugaaagacugcucggucau

SEQ ID NO: 472860 - RNA, 32 nt, Human
gucacagccccucagucucuucuccuuccccu

SEQ ID NO: 472861 - RNA, 22 nt, Human
gucacagcggcccuuucugaug

SEQ ID NO: 472862 - RNA, 32 nt, Human
gucacagcuacuugggagacugagguuggagg

SEQ ID NO: 472863 - RNA, 32 nt, Human
gucacagcuauggauguggaagagauaggaaa

SEQ ID NO: 472864 - RNA, 32 nt, Human
gucacagcucacugcagccucgaccucccggg

SEQ ID NO: 472865 - RNA, 32 nt, Human
gucacagcucacuguagccucgaccuuccagg

SEQ ID NO: 472866 - RNA, 32 nt, Human
gucacagcugcccagugggauucuccaggggg

SEQ ID NO: 472867 - RNA, 32 nt, Human
gucacaggaacccagagcaccaagugagauga

SEQ ID NO: 472868 - RNA, 32 nt, Human
gucacaggaccuucccuaagagcccgcaggga

SEQ ID NO: 472869 - RNA, 32 nt, Human
gucacaggagagugugagucagcucugugugu

SEQ ID NO: 472870 - RNA, 32 nt, Human
gucacaggagauuauaugcaccaaugacaaau

SEQ ID NO: 472871 - RNA, 32 nt, Human
gucacaggagggugugagucagcucugggugg

SEQ ID NO: 472872 - RNA, 32 nt, Human
gucacaggagggugugagucagcucuguccau

SEQ ID NO: 472873 - RNA, 32 nt, Human
gucacaggagggugugagucagcucugucucu

SEQ ID NO: 472874 - RNA, 32 nt, Human
gucacaggagggugugagucagcucugucuga

SEQ ID NO: 472875 - RNA, 32 nt, Human
gucacaggagggugugagucagcucugucugu

SEQ ID NO: 472876 - RNA, 32 nt, Human
gucacaggagggugugagucagcucugugugg

SEQ ID NO: 472877 - RNA, 32 nt, Human
gucacaggagggugugugucagcucuguccgu

SEQ ID NO: 472878 - RNA, 32 nt, Human
gucacaggagggugugugucagcucugucugu

SEQ ID NO: 472879 - RNA, 32 nt, Human
gucacaggcagugaggaugagagggggugaug

SEQ ID NO: 472880 - RNA, 32 nt, Human
gucacaggcccaggaaggcggcaggcagagaa

SEQ ID NO: 472881 - RNA, 32 nt, Human
gucacaggcgggugugagucagcucugucucu

SEQ ID NO: 472882 - RNA, 32 nt, Human
gucacaggcugcauagacugcaggaaagcgaa

SEQ ID NO: 472883 - RNA, 32 nt, Human
gucacaggcugcauagauugcaggaaagcgaa

SEQ ID NO: 472884 - RNA, 32 nt, Human
gucacaggcuguuggacgcagccuggguggca

SEQ ID NO: 472885 - RNA, 32 nt, Human
gucacagguagaaaaaccuauuuaguuaauuc

SEQ ID NO: 472886 - RNA, 32 nt, Human
gucacaguaagccuugcagcuugagcugaaag

SEQ ID NO: 472887 - RNA, 19 nt, Human
gucacaguauaaaauucua

SEQ ID NO: 472888 - RNA, 32 nt, Human
gucacagugagcugugauugcaccacuuguaa

SEQ ID NO: 472889 - RNA, 32 nt, Human
gucacagugccuuagaaguggcagaggugagg

SEQ ID NO: 472890 - RNA, 32 nt, Human
gucacaguggguggcaggugacuuuccggagg

SEQ ID NO: 472891 - RNA, 32 nt, Human
gucacagugucuuccgggacagcuggggacag

SEQ ID NO: 472892 - RNA, 32 nt, Human
gucacagugugccugaggaaggcugcuaggga

SEQ ID NO: 472893 - RNA, 32 nt, Human
gucacagugugucuggacagccuggacauugg

SEQ ID NO: 472894 - RNA, 20 nt, Human
gucacaguucaaaauucuaa

SEQ ID NO: 472895 - RNA, 32 nt, Human
gucacaguucccucgacucuuucaaagcuuca

SEQ ID NO: 472896 - RNA, 32 nt, Human
gucacaguuuggaagcagucuauuccaucaac

SEQ ID NO: 472897 - RNA, 32 nt, Human
gucacauauacaaaagcaagacuuccagguag

SEQ ID NO: 472898 - RNA, 32 nt, Human
gucacaucaucuacaccaacagugguauccua

SEQ ID NO: 472899 - RNA, 32 nt, Human
gucacauccuaaaaguccaggagggggccagg

SEQ ID NO: 472900 - RNA, 32 nt, Human
gucacaucuguaaucucagcucuuuggaaggc

SEQ ID NO: 472901 - RNA, 32 nt, Human
gucacaugacugcauccugccugccagggcug

SEQ ID NO: 472902 - RNA, 32 nt, Human
gucacaugcccacagcagccucggugacgaga

SEQ ID NO: 472903 - RNA, 32 nt, Human
gucacaugcccacugcagcccuccagccucug

SEQ ID NO: 472904 - RNA, 32 nt, Human
gucacauggccacacccagcagaaagaacucu

SEQ ID NO: 472905 - RNA, 32 nt, Human
gucacauguaagaaggaagaaaagagauaggg

SEQ ID NO: 472906 - RNA, 32 nt, Human
gucacauguucacuugcuuuuccuuccaucug

SEQ ID NO: 472907 - RNA, 32 nt, Human
gucacauucaaggucaccagguacaguuguac

SEQ ID NO: 472908 - RNA, 32 nt, Human
gucacauuccagauuugaagcuguguuuuugu

SEQ ID NO: 472909 - RNA, 32 nt, Human
gucacauucucagagaguuggagggauuaugc

SEQ ID NO: 472910 - RNA, 32 nt, Human
gucacauugaugaugaugagugcaguggggug

SEQ ID NO: 472911 - RNA, 32 nt, Human
gucacauugguuugucucccuuguacauucuu

SEQ ID NO: 472912 - RNA, 32 nt, Human
gucaccaaaagcuuucugaaaaugccuuucug

SEQ ID NO: 472913 - RNA, 32 nt, Human
gucaccaacauggcugggccugggacaggcuc

SEQ ID NO: 472914 - RNA, 18 nt, Human
gucaccaagaaacucuga

SEQ ID NO: 472915 - RNA, 23 nt, Human
gucaccaagcuggacugcagugg

SEQ ID NO: 472916 - RNA, 32 nt, Human
gucaccaaggcugggcgggacagagcagucaa

SEQ ID NO: 472917 - RNA, 32 nt, Human
gucaccacacccuugcuuggaugaggaaggaa

SEQ ID NO: 472918 - RNA, 32 nt, Human
gucaccacacuccagccugggugacagagcaa

SEQ ID NO: 472919 - RNA, 32 nt, Human
gucaccacaguggcuggagaugagcccacacg

SEQ ID NO: 472920 - RNA, 32 nt, Human
gucaccaccaauaucuuauuucaaccucacag

SEQ ID NO: 472921 - RNA, 32 nt, Human
gucaccacuccccucccuauauacccccaccc

SEQ ID NO: 472922 - RNA, 32 nt, Human
gucaccacugacugggcaaggcuucuugggca

SEQ ID NO: 472923 - RNA, 32 nt, Human
gucaccacugcaacccagggucccagcuggcu

SEQ ID NO: 472924 - RNA, 32 nt, Human
gucaccacugcccuccagccugggugacagag

SEQ ID NO: 472925 - RNA, 23 nt, Human
gucaccagacuggagugcagugg

SEQ ID NO: 472926 - RNA, 32 nt, Human
gucaccagacuggagugcaguggcgccaucuc

SEQ ID NO: 472927 - RNA, 32 nt, Human
gucaccagagagcuuucagcugagggagaguu

SEQ ID NO: 472928 - RNA, 21 nt, Human
gucaccagcaguagaaccaua

SEQ ID NO: 472929 - RNA, 32 nt, Human
gucaccagccacggcaauggaucccguccacc

SEQ ID NO: 472930 - RNA, 32 nt, Human
gucaccagccacuccaggggcagggaccauuu

SEQ ID NO: 472931 - RNA, 32 nt, Human
gucaccagccuucuguacacugccuuugguuu

SEQ ID NO: 472932 - RNA, 32 nt, Human
gucaccaggaaggacaagggugcucuguuguu

SEQ ID NO: 472933 - RNA, 32 nt, Human
gucaccaggagaauggacccuuccuccaccuc

SEQ ID NO: 472934 - RNA, 32 nt, Human
gucaccaggagaauggacgcuuccuccaccuc

SEQ ID NO: 472935 - RNA, 32 nt, Human
gucaccaggagcccaccaccucccucuaggau

SEQ ID NO: 472936 - RNA, 32 nt, Human
gucaccaggaggggcccaggagcugggugacg

SEQ ID NO: 472937 - RNA, 32 nt, Human
gucaccaggaggguaugcauagggagggcaag

SEQ ID NO: 472938 - RNA, 23 nt, Human
gucaccaggauggagugcagugg

SEQ ID NO: 472939 - RNA, 32 nt, Human
gucaccaggauggcagagagccagggcagaga

SEQ ID NO: 472940 - RNA, 32 nt, Human
gucaccaggcagugaagacaggauguggccca

SEQ ID NO: 472941 - RNA, 32 nt, Human
gucaccaggccacugugcagugggcgcagagc

SEQ ID NO: 472942 - RNA, 23 nt, Human
gucaccaggccggagugcagugg

SEQ ID NO: 472943 - RNA, 32 nt, Human
gucaccaggccggagugcaguggugucaucuc

SEQ ID NO: 472944 - RNA, 32 nt, Human
gucaccaggccugaaacucccuuuccaggacu

SEQ ID NO: 472945 - RNA, 23 nt, Human
gucaccaggcuagagugcagugg

SEQ ID NO: 472946 - RNA, 23 nt, Human
gucaccaggcuggaaugcagugg

SEQ ID NO: 472947 - RNA, 23 nt, Human
gucaccaggcuggagggcagugg

SEQ ID NO: 472948 - RNA, 32 nt, Human
gucaccaggcuggagggcaguggcgccaucuc

SEQ ID NO: 472949 - RNA, 32 nt, Human
gucaccaggcuggagggcaguggugcgaucuc

SEQ ID NO: 472950 - RNA, 22 nt, Human
gucaccaggcuggaguacagug

SEQ ID NO: 472951 - RNA, 23 nt, Human
gucaccaggcuggagugcagcgg

SEQ ID NO: 472952 - RNA, 32 nt, Human
gucaccaggcuggagugcagcggcgcaaucuc

SEQ ID NO: 472953 - RNA, 21 nt, Human
gucaccaggcuggagugcagu

SEQ ID NO: 472954 - RNA, 22 nt, Human
gucaccaggcuggagugcagug

SEQ ID NO: 472955 - RNA, 32 nt, Human
gucaccaggcuggagugcagugccgcaaucuc

SEQ ID NO: 472956 - RNA, 23 nt, Human
gucaccaggcuggagugcagugg

SEQ ID NO: 472957 - RNA, 32 nt, Human
gucaccaggcuggagugcaguggaggcaucuc

SEQ ID NO: 472958 - RNA, 32 nt, Human
gucaccaggcuggagugcaguggcgcaauugu

SEQ ID NO: 472959 - RNA, 32 nt, Human
gucaccaggcuggagugcaguggcgcgaucuc

SEQ ID NO: 472960 - RNA, 32 nt, Human
gucaccaggcuggagugcaguggcgcgauuuc

SEQ ID NO: 472961 - RNA, 32 nt, Human
gucaccaggcuggagugcaguggugcaaucuc

SEQ ID NO: 472962 - RNA, 32 nt, Human
gucaccaggcuggagugcaguggugcgaucgc

SEQ ID NO: 472963 - RNA, 32 nt, Human
gucaccaggcuggagugcaguggugugaucuc

SEQ ID NO: 472964 - RNA, 32 nt, Human
gucaccaggcuguauuacaguggugcaaucau

SEQ ID NO: 472965 - RNA, 32 nt, Human
gucaccaggcuugagugcaguggugugaucuu

SEQ ID NO: 472966 - RNA, 32 nt, Human
gucaccauccacccucguaacaacagucuccc

SEQ ID NO: 472967 - RNA, 32 nt, Human
gucaccauccaccuucccuucuacaaggacuc

SEQ ID NO: 472968 - RNA, 32 nt, Human
gucaccauccucauccccaucuucauggaacc

SEQ ID NO: 472969 - RNA, 32 nt, Human
gucaccaucuggaagccagcugggccacagca

SEQ ID NO: 472970 - RNA, 32 nt, Human
gucaccaugaugccuuugaucgaugcugcucc

SEQ ID NO: 472971 - RNA, 32 nt, Human
gucaccaugccuggcuaauuuuguauuuuuag

SEQ ID NO: 472972 - RNA, 32 nt, Human
gucaccaugccuggcuaauuuuuguauuuuua

SEQ ID NO: 472973 - RNA, 18 nt, Human
gucaccaugcugcugguc

SEQ ID NO: 472974 - RNA, 32 nt, Human
gucaccaugguggcgagcacagcaaccccagg

SEQ ID NO: 472975 - RNA, 32 nt, Human
gucaccauggugggauucuuucagaaugagac

SEQ ID NO: 472976 - RNA, 32 nt, Human
gucaccauuuaucauggacgguugucaugagu

SEQ ID NO: 472977 - RNA, 32 nt, Human
gucacccaaagucaugaucaauucaggagacu

SEQ ID NO: 472978 - RNA, 22 nt, Human
gucacccaagcuggagugcagu

SEQ ID NO: 472979 - RNA, 23 nt, Human
gucacccaagcuggagugcagug

SEQ ID NO: 472980 - RNA, 24 nt, Human
gucacccaagcuggagugcagugg

SEQ ID NO: 472981 - RNA, 23 nt, Human
gucacccaaggcggagugcagug

SEQ ID NO: 472982 - RNA, 32 nt, Human
gucacccaaggcggagugcagugacgacauca

SEQ ID NO: 472983 - RNA, 24 nt, Human
gucacccaaguuggagugcagugg

SEQ ID NO: 472984 - RNA, 24 nt, Human
gucacccacgcuggaaugcagugg

SEQ ID NO: 472985 - RNA, 24 nt, Human
gucacccacgcuggagugcaaugg

SEQ ID NO: 472986 - RNA, 23 nt, Human
gucacccacgcuggagugcugug

SEQ ID NO: 472987 - RNA, 32 nt, Human
gucacccacucugccagggccuggcugaccca

SEQ ID NO: 472988 - RNA, 32 nt, Human
gucacccagaacuucuccccaggaugagacca

SEQ ID NO: 472989 - RNA, 22 nt, Human
gucacccagacuagaggucagu

SEQ ID NO: 472990 - RNA, 22 nt, Human
gucacccagacuagagugcagu

SEQ ID NO: 472991 - RNA, 24 nt, Human
gucacccagacuagagugcagugg

SEQ ID NO: 472992 - RNA, 22 nt, Human
gucacccagacuggaacacagu

SEQ ID NO: 472993 - RNA, 22 nt, Human
gucacccagacuggaaugcagu

SEQ ID NO: 472994 - RNA, 24 nt, Human
gucacccagacuggaaugcaguga

SEQ ID NO: 472995 - RNA, 21 nt, Human
gucacccagacuggagugcag

SEQ ID NO: 472996 - RNA, 23 nt, Human
gucacccagacuggagugcaggg

SEQ ID NO: 472997 - RNA, 22 nt, Human
gucacccagacuggagugcagu

SEQ ID NO: 472998 - RNA, 23 nt, Human
gucacccagacuggagugcagug

SEQ ID NO: 472999 - RNA, 24 nt, Human
gucacccagacuggagugcagugg

SEQ ID NO: 473000 - RNA, 23 nt, Human
gucacccagacuggagugcgaug

SEQ ID NO: 473001 - RNA, 24 nt, Human
gucacccagacuggagugcgaugg

SEQ ID NO: 473002 - RNA, 32 nt, Human
gucacccagagcccgaugaggggugccagcag

SEQ ID NO: 473003 - RNA, 32 nt, Human
gucacccagagccggaugagggaugccagcag

SEQ ID NO: 473004 - RNA, 32 nt, Human
gucacccagcagaggcuucuccccauagcacg

SEQ ID NO: 473005 - RNA, 18 nt, Human
gucacccagccaccagcc

SEQ ID NO: 473006 - RNA, 32 nt, Human
gucacccagccaucccgucucugugcuggaug

SEQ ID NO: 473007 - RNA, 24 nt, Human
gucacccagccuggaauguagugg

SEQ ID NO: 473008 - RNA, 23 nt, Human
gucacccaggacacagccacucg

SEQ ID NO: 473009 - RNA, 23 nt, Human
gucacccaggauggagugcagug

SEQ ID NO: 473010 - RNA, 24 nt, Human
gucacccaggcaggagugcagugg

SEQ ID NO: 473011 - RNA, 32 nt, Human
gucacccaggcaggagugcaguggcacaguca

SEQ ID NO: 473012 - RNA, 32 nt, Human
gucacccaggcaggagugcaguggcguuaucu

SEQ ID NO: 473013 - RNA, 32 nt, Human
gucacccaggccaaguucaauggugcaaucug

SEQ ID NO: 473014 - RNA, 22 nt, Human
gucacccaggccggagugcagu

SEQ ID NO: 473015 - RNA, 23 nt, Human
gucacccaggccggagugcagug

SEQ ID NO: 473016 - RNA, 24 nt, Human
gucacccaggccggagugcagugg

SEQ ID NO: 473017 - RNA, 22 nt, Human
gucacccaggcuagaaugcagu

SEQ ID NO: 473018 - RNA, 24 nt, Human
gucacccaggcuagaaugcagugg

SEQ ID NO: 473019 - RNA, 22 nt, Human
gucacccaggcuagaggguggu

SEQ ID NO: 473020 - RNA, 22 nt, Human
gucacccaggcuagaguacagu

SEQ ID NO: 473021 - RNA, 24 nt, Human
gucacccaggcuagaguacagugg

SEQ ID NO: 473022 - RNA, 23 nt, Human
gucacccaggcuagagugcaaug

SEQ ID NO: 473023 - RNA, 24 nt, Human
gucacccaggcuagagugcaaugg

SEQ ID NO: 473024 - RNA, 22 nt, Human
gucacccaggcuagagugcagu

SEQ ID NO: 473025 - RNA, 24 nt, Human
gucacccaggcuagagugcaguag

SEQ ID NO: 473026 - RNA, 23 nt, Human
gucacccaggcuagagugcagug

SEQ ID NO: 473027 - RNA, 24 nt, Human
gucacccaggcuagagugcagugg

SEQ ID NO: 473028 - RNA, 22 nt, Human
gucacccaggcugaacugcagu

SEQ ID NO: 473029 - RNA, 24 nt, Human
gucacccaggcugaacugcagugg

SEQ ID NO: 473030 - RNA, 22 nt, Human
gucacccaggcugaagugcagu

SEQ ID NO: 473031 - RNA, 23 nt, Human
gucacccaggcugaagugcagug

SEQ ID NO: 473032 - RNA, 24 nt, Human
gucacccaggcugaagugcagugg

SEQ ID NO: 473033 - RNA, 32 nt, Human
gucacccaggcugaagugcaguggagcaaucu

SEQ ID NO: 473034 - RNA, 18 nt, Human
gucacccaggcugcagug

SEQ ID NO: 473035 - RNA, 24 nt, Human
gucacccaggcugcagugcaaugg

SEQ ID NO: 473036 - RNA, 22 nt, Human
gucacccaggcugcaguguagu

SEQ ID NO: 473037 - RNA, 24 nt, Human
gucacccaggcugcaguguagugg

SEQ ID NO: 473038 - RNA, 20 nt, Human
gucacccaggcugcaguuca

SEQ ID NO: 473039 - RNA, 24 nt, Human
gucacccaggcugcaguucacugg

SEQ ID NO: 473040 - RNA, 32 nt, Human
gucacccaggcugcuggaguacaguggcacaa

SEQ ID NO: 473041 - RNA, 22 nt, Human
gucacccaggcuggaauccagu

SEQ ID NO: 473042 - RNA, 24 nt, Human
gucacccaggcuggaauccagugg

SEQ ID NO: 473043 - RNA, 22 nt, Human
gucacccaggcuggaaugcagu

SEQ ID NO: 473044 - RNA, 23 nt, Human
gucacccaggcuggaaugcagug

SEQ ID NO: 473045 - RNA, 24 nt, Human
gucacccaggcuggaaugcagugg

SEQ ID NO: 473046 - RNA, 23 nt, Human
gucacccaggcuggacugcaaug

SEQ ID NO: 473047 - RNA, 24 nt, Human
gucacccaggcuggacugcaauga

SEQ ID NO: 473048 - RNA, 22 nt, Human
gucacccaggcuggacugcagu

SEQ ID NO: 473049 - RNA, 24 nt, Human
gucacccaggcuggacugcagugg

SEQ ID NO: 473050 - RNA, 22 nt, Human
gucacccaggcuggagagcagu

SEQ ID NO: 473051 - RNA, 24 nt, Human
gucacccaggcuggagagcagugg

SEQ ID NO: 473052 - RNA, 18 nt, Human
gucacccaggcuggagca

SEQ ID NO: 473053 - RNA, 24 nt, Human
gucacccaggcuggagcacacugg

SEQ ID NO: 473054 - RNA, 22 nt, Human
gucacccaggcuggagcgcagu

SEQ ID NO: 473055 - RNA, 23 nt, Human
gucacccaggcuggagcgcagug

SEQ ID NO: 473056 - RNA, 24 nt, Human
gucacccaggcuggagcgcagugg

SEQ ID NO: 473057 - RNA, 24 nt, Human
gucacccaggcuggaguacaauag

SEQ ID NO: 473058 - RNA, 23 nt, Human
gucacccaggcuggaguacaaug

SEQ ID NO: 473059 - RNA, 24 nt, Human
gucacccaggcuggaguacaauga

SEQ ID NO: 473060 - RNA, 24 nt, Human
gucacccaggcuggaguacacugg

SEQ ID NO: 473061 - RNA, 22 nt, Human
gucacccaggcuggaguacagu

SEQ ID NO: 473062 - RNA, 23 nt, Human
gucacccaggcuggaguacagug

SEQ ID NO: 473063 - RNA, 24 nt, Human
gucacccaggcuggaguacaguga

SEQ ID NO: 473064 - RNA, 24 nt, Human
gucacccaggcuggaguacagugg

SEQ ID NO: 473065 - RNA, 23 nt, Human
gucacccaggcuggaguaccggu

SEQ ID NO: 473066 - RNA, 24 nt, Human
gucacccaggcuggaguaccggug

SEQ ID NO: 473067 - RNA, 22 nt, Human
gucacccaggcuggaguauagu

SEQ ID NO: 473068 - RNA, 24 nt, Human
gucacccaggcuggaguauagugg

SEQ ID NO: 473069 - RNA, 18 nt, Human
gucacccaggcuggaguc

SEQ ID NO: 473070 - RNA, 22 nt, Human
gucacccaggcuggaguccaau

SEQ ID NO: 473071 - RNA, 24 nt, Human
gucacccaggcuggaguccaaugg

SEQ ID NO: 473072 - RNA, 22 nt, Human
gucacccaggcuggaguccagu

SEQ ID NO: 473073 - RNA, 24 nt, Human
gucacccaggcuggaguccagugg

SEQ ID NO: 473074 - RNA, 22 nt, Human
gucacccaggcuggagucuagu

SEQ ID NO: 473075 - RNA, 23 nt, Human
gucacccaggcuggagucuagug

SEQ ID NO: 473076 - RNA, 20 nt, Human
gucacccaggcuggagugag

SEQ ID NO: 473077 - RNA, 24 nt, Human
gucacccaggcuggagugaggugg

SEQ ID NO: 473078 - RNA, 19 nt, Human
gucacccaggcuggagugc

SEQ ID NO: 473079 - RNA, 20 nt, Human
gucacccaggcuggagugca

SEQ ID NO: 473080 - RNA, 22 nt, Human
gucacccaggcuggagugcaau

SEQ ID NO: 473081 - RNA, 23 nt, Human
gucacccaggcuggagugcaaug

SEQ ID NO: 473082 - RNA, 24 nt, Human
gucacccaggcuggagugcaauga

SEQ ID NO: 473083 - RNA, 24 nt, Human
gucacccaggcuggagugcaaugg

SEQ ID NO: 473084 - RNA, 24 nt, Human
gucacccaggcuggagugcacugg

SEQ ID NO: 473085 - RNA, 21 nt, Human
gucacccaggcuggagugcag

SEQ ID NO: 473086 - RNA, 22 nt, Human
gucacccaggcuggagugcagu

SEQ ID NO: 473087 - RNA, 24 nt, Human
gucacccaggcuggagugcaguag

SEQ ID NO: 473088 - RNA, 23 nt, Human
gucacccaggcuggagugcagug

SEQ ID NO: 473089 - RNA, 24 nt, Human
gucacccaggcuggagugcagugg

SEQ ID NO: 473090 - RNA, 22 nt, Human
gucacccaggcuggagugcaug

SEQ ID NO: 473091 - RNA, 24 nt, Human
gucacccaggcuggagugccauag

SEQ ID NO: 473092 - RNA, 24 nt, Human
gucacccaggcuggagugccaugg

SEQ ID NO: 473093 - RNA, 23 nt, Human
gucacccaggcuggagugccgug

SEQ ID NO: 473094 - RNA, 24 nt, Human
gucacccaggcuggagugccgugg

SEQ ID NO: 473095 - RNA, 23 nt, Human
gucacccaggcuggagugcgaug

SEQ ID NO: 473096 - RNA, 24 nt, Human
gucacccaggcuggagugcgaugg

SEQ ID NO: 473097 - RNA, 22 nt, Human
gucacccaggcuggagugcggu

SEQ ID NO: 473098 - RNA, 23 nt, Human
gucacccaggcuggagugcggug

SEQ ID NO: 473099 - RNA, 24 nt, Human
gucacccaggcuggagugcggugg

SEQ ID NO: 473100 - RNA, 24 nt, Human
gucacccaggcuggagugcuaugg

SEQ ID NO: 473101 - RNA, 24 nt, Human
gucacccaggcuggagugcugugg

SEQ ID NO: 473102 - RNA, 22 nt, Human
gucacccaggcuggaguguagu

SEQ ID NO: 473103 - RNA, 24 nt, Human
gucacccaggcuggaguguagugg

SEQ ID NO: 473104 - RNA, 32 nt, Human
gucacccaggcuggaguguaguggcgcaaucu

SEQ ID NO: 473105 - RNA, 19 nt, Human
gucacccaggcuggaguua

SEQ ID NO: 473106 - RNA, 24 nt, Human
gucacccaggcuggaguuauagug

SEQ ID NO: 473107 - RNA, 22 nt, Human
gucacccaggcuggaguucagu

SEQ ID NO: 473108 - RNA, 24 nt, Human
gucacccaggcuggaguucagugg

SEQ ID NO: 473109 - RNA, 24 nt, Human
gucacccaggcuggcgugcaaugg

SEQ ID NO: 473110 - RNA, 23 nt, Human
gucacccaggcugggaauugcag

SEQ ID NO: 473111 - RNA, 26 nt, Human
gucacccaggcugggaauugcagugg

SEQ ID NO: 473112 - RNA, 22 nt, Human
gucacccaggcugggaugcagu

SEQ ID NO: 473113 - RNA, 24 nt, Human
gucacccaggcugggaugcagugg

SEQ ID NO: 473114 - RNA, 21 nt, Human
gucacccaggcugggguacgg

SEQ ID NO: 473115 - RNA, 24 nt, Human
gucacccaggcugggguacggugg

SEQ ID NO: 473116 - RNA, 22 nt, Human
gucacccaggcuggggugcagu

SEQ ID NO: 473117 - RNA, 24 nt, Human
gucacccaggcuggggugcagugg

SEQ ID NO: 473118 - RNA, 22 nt, Human
gucacccaggcuguagugcagu

SEQ ID NO: 473119 - RNA, 24 nt, Human
gucacccaggcuguagugcagugg

SEQ ID NO: 473120 - RNA, 24 nt, Human
gucacccaggcuguaguggagugg

SEQ ID NO: 473121 - RNA, 24 nt, Human
gucacccaggcuugagugcagugg

SEQ ID NO: 473122 - RNA, 20 nt, Human
gucacccaggggucuccguc

SEQ ID NO: 473123 - RNA, 32 nt, Human
gucacccaggguggugugcaguggagcuauca

SEQ ID NO: 473124 - RNA, 32 nt, Human
gucacccagguggcuggaguacaguggccuga

SEQ ID NO: 473125 - RNA, 24 nt, Human
gucacccagguuagaguguagugg

SEQ ID NO: 473126 - RNA, 24 nt, Human
gucacccagguucgaguucagugg

SEQ ID NO: 473127 - RNA, 24 nt, Human
gucacccagguuggagugcagugg

SEQ ID NO: 473128 - RNA, 24 nt, Human
gucacccagucuggagugcagugg

SEQ ID NO: 473129 - RNA, 32 nt, Human
gucacccaguugcacacugggcauuuucuugg

SEQ ID NO: 473130 - RNA, 24 nt, Human
gucacccaguuuggagugcagugg

SEQ ID NO: 473131 - RNA, 32 nt, Human
gucacccaucauucuugcguguuguaugcuuu

SEQ ID NO: 473132 - RNA, 22 nt, Human
gucacccauccuagagugcagu

SEQ ID NO: 473133 - RNA, 32 nt, Human
gucacccauugaucggcccacucugaaccccc

SEQ ID NO: 473134 - RNA, 32 nt, Human
gucaccccaauguucuggaggcugcgguucug

SEQ ID NO: 473135 - RNA, 32 nt, Human
gucaccccacgcugccccaucuugccugcugu

SEQ ID NO: 473136 - RNA, 32 nt, Human
gucaccccacuuuaacuuucuaccaggacccc

SEQ ID NO: 473137 - RNA, 22 nt, Human
gucaccccagcuggagugcagu

SEQ ID NO: 473138 - RNA, 23 nt, Human
gucaccccagcuggagugcagug

SEQ ID NO: 473139 - RNA, 24 nt, Human
gucaccccagcuggagugcagugg

SEQ ID NO: 473140 - RNA, 32 nt, Human
gucacccccaacaacaagcccugcugaaggug

SEQ ID NO: 473141 - RNA, 32 nt, Human
gucaccccgcuuuccaugacccuccuugccug

SEQ ID NO: 473142 - RNA, 15 nt, Human
gucaccccuaccacu

SEQ ID NO: 473143 - RNA, 32 nt, Human
gucaccccucauuuuccucuggggaccccagg

SEQ ID NO: 473144 - RNA, 32 nt, Human
gucaccccucuguccagccagcuccugcacaa

SEQ ID NO: 473145 - RNA, 32 nt, Human
gucaccccugcacuccugccuucccgugggca

SEQ ID NO: 473146 - RNA, 24 nt, Human
gucacccgagcuggagugcagugg

SEQ ID NO: 473147 - RNA, 32 nt, Human
gucacccggaaccugggaggggagggaacacu

SEQ ID NO: 473148 - RNA, 32 nt, Human
gucacccggaagcagaguuuaaugugacuaaa

SEQ ID NO: 473149 - RNA, 23 nt, Human
gucacccgggcuggagugcagug

SEQ ID NO: 473150 - RNA, 24 nt, Human
gucacccgggcuggagugcagugg

SEQ ID NO: 473151 - RNA, 21 nt, Human
gucacccgggcuggaguguaa

SEQ ID NO: 473152 - RNA, 31 nt, Human
gucacccucaauaaauacuguuaauuggaga

SEQ ID NO: 473153 - RNA, 32 nt, Human
gucacccucccggaauggggcuuccuuucucg

SEQ ID NO: 473154 - RNA, 19 nt, Human
gucacccuccugagccuca

SEQ ID NO: 473155 - RNA, 32 nt, Human
gucacccuccuuggacuuauucaguaacucau

SEQ ID NO: 473156 - RNA, 32 nt, Human
gucacccucguucugucugccaccugaaggga

SEQ ID NO: 473157 - RNA, 32 nt, Human
gucacccucuucccucuccuuucauaccaguc

SEQ ID NO: 473158 - RNA, 32 nt, Human
gucacccugaccgguccaauugccugucacuc

SEQ ID NO: 473159 - RNA, 32 nt, Human
gucacccugcaaccgugccacguggaggagcu

SEQ ID NO: 473160 - RNA, 32 nt, Human
gucacccugcagcuccuuuacaguucaaucca

SEQ ID NO: 473161 - RNA, 32 nt, Human
gucacccugccuuccuccuugcuggcccagcu

SEQ ID NO: 473162 - RNA, 22 nt, Human
gucacccuggcuggagugcagu

SEQ ID NO: 473163 - RNA, 23 nt, Human
gucacccugggccuggggucacc

SEQ ID NO: 473164 - RNA, 32 nt, Human
gucacccuuccaccauuguccuagcuacuugg

SEQ ID NO: 473165 - RNA, 23 nt, Human
gucaccgaggcuggagugcaaug

SEQ ID NO: 473166 - RNA, 24 nt, Human
gucaccgaggcuggagugcaauga

SEQ ID NO: 473167 - RNA, 24 nt, Human
gucaccgaggcuggagugcagugg

SEQ ID NO: 473168 - RNA, 32 nt, Human
gucaccgccccaugcagggcucccaggggaag

SEQ ID NO: 473169 - RNA, 32 nt, Human
gucaccgcgccuggccaauguuguuguuguuu

SEQ ID NO: 473170 - RNA, 32 nt, Human
gucaccgcgggggccgaugguggagaauccga

SEQ ID NO: 473171 - RNA, 20 nt, Human
gucaccgcuuucuauggcgu

SEQ ID NO: 473172 - RNA, 32 nt, Human
gucaccgggaaggccaaguccuuugcugugag

SEQ ID NO: 473173 - RNA, 32 nt, Human
gucaccgguaacaauggcaaugccaguggaac

SEQ ID NO: 473174 - RNA, 32 nt, Human
gucaccguccgugcucagaggauccagaacgg

SEQ ID NO: 473175 - RNA, 32 nt, Human
gucaccuaaacucuggaucucagucaccuuuu

SEQ ID NO: 473176 - RNA, 23 nt, Human
gucaccuaagcuggaguacagug

SEQ ID NO: 473177 - RNA, 32 nt, Human
gucaccuaaggaaaugcauuugaugagugcug

SEQ ID NO: 473178 - RNA, 16 nt, Human
gucaccuacugugaua

SEQ ID NO: 473179 - RNA, 32 nt, Human
gucaccuagacuagacuggagugcaauggccu

SEQ ID NO: 473180 - RNA, 24 nt, Human
gucaccuagacuggagugcaaugg

SEQ ID NO: 473181 - RNA, 23 nt, Human
gucaccuaggcuagagggcagug

SEQ ID NO: 473182 - RNA, 24 nt, Human
gucaccuaggcugcagugcagugg

SEQ ID NO: 473183 - RNA, 24 nt, Human
gucaccuaggcuggaaugcagugg

SEQ ID NO: 473184 - RNA, 23 nt, Human
gucaccuaggcuggagugcagug

SEQ ID NO: 473185 - RNA, 24 nt, Human
gucaccuaggcuggagugcagugg

SEQ ID NO: 473186 - RNA, 25 nt, Human
gucaccuaggcuggaguugcagugg

SEQ ID NO: 473187 - RNA, 24 nt, Human
gucaccuaggcuggauugcaaugg

SEQ ID NO: 473188 - RNA, 24 nt, Human
gucaccuagguuggagugcagugg

SEQ ID NO: 473189 - RNA, 32 nt, Human
gucaccuagugagcagggacagagccaggagu

SEQ ID NO: 473190 - RNA, 32 nt, Human
gucaccuaucuaguccauaugucugcaggaau

SEQ ID NO: 473191 - RNA, 32 nt, Human
gucaccuaucucagcaauaaagguucugaccc

SEQ ID NO: 473192 - RNA, 32 nt, Human
gucaccuaugacaagagcagugaaggugaggu

SEQ ID NO: 473193 - RNA, 32 nt, Human
gucaccucaguggaccagccugggggaaggag

SEQ ID NO: 473194 - RNA, 32 nt, Human
gucaccucauugguccaugaaggagcagccag

SEQ ID NO: 473195 - RNA, 32 nt, Human
gucaccucauuuugcauuacugucuuccgugg

SEQ ID NO: 473196 - RNA, 32 nt, Human
gucaccuccaccucucuccaugacccggcucu

SEQ ID NO: 473197 - RNA, 32 nt, Human
gucaccucccaccucuugccaccugcugcugc

SEQ ID NO: 473198 - RNA, 32 nt, Human
gucaccuccccuccaccagagugcuccauggc

SEQ ID NO: 473199 - RNA, 32 nt, Human
gucaccuccucucagguucaagugauucuccu

SEQ ID NO: 473200 - RNA, 31 nt, Human
gucaccucgcacuucauuacauuccuguacu

SEQ ID NO: 473201 - RNA, 32 nt, Human
gucaccucuaacuacuuucauuucccucaaua

SEQ ID NO: 473202 - RNA, 32 nt, Human
gucaccucucacucuucugucuuugcaaaccg

SEQ ID NO: 473203 - RNA, 32 nt, Human
gucaccucugugguggcccugucguccgccuc

SEQ ID NO: 473204 - RNA, 32 nt, Human
gucaccucuuugcccagcuucuccccugcccu

SEQ ID NO: 473205 - RNA, 32 nt, Human
gucaccugacccuucucauuucauaggcaucu

SEQ ID NO: 473206 - RNA, 32 nt, Human
gucaccugagccugguaggcugaggcugcagu

SEQ ID NO: 473207 - RNA, 32 nt, Human
gucaccugagucuaacagcaguuugacuuugu

SEQ ID NO: 473208 - RNA, 32 nt, Human
gucaccugcacucccagccaaguggugaugua

SEQ ID NO: 473209 - RNA, 32 nt, Human
gucaccugccauuccagaacuggaccacagaa

SEQ ID NO: 473210 - RNA, 32 nt, Human
gucaccugcccuggccccuccucugggcagcc

SEQ ID NO: 473211 - RNA, 31 nt, Human
gucaccugccucuuucccuuguucccggaug

SEQ ID NO: 473212 - RNA, 32 nt, Human
gucaccuggaaagaacagagauuacccuuuca

SEQ ID NO: 473213 - RNA, 32 nt, Human
gucaccuggagaugggggccagguugugcaga

SEQ ID NO: 473214 - RNA, 32 nt, Human
gucaccugggagguggggcaaggaugguguuu

SEQ ID NO: 473215 - RNA, 32 nt, Human
gucaccugggagguggggcagggaugguguuu

SEQ ID NO: 473216 - RNA, 24 nt, Human
gucaccugggcuggaguccagugg

SEQ ID NO: 473217 - RNA, 32 nt, Human
gucaccugggcugugaugugaagacaccugca

SEQ ID NO: 473218 - RNA, 32 nt, Human
gucaccugguugcacuauggccucaucugugg

SEQ ID NO: 473219 - RNA, 32 nt, Human
gucaccuguaaucccagcuacuugggaggcug

SEQ ID NO: 473220 - RNA, 32 nt, Human
gucaccuguaccaaacauuugaaaucaacuac

SEQ ID NO: 473221 - RNA, 32 nt, Human
gucaccuguagucccagcuacucgggaggcug

SEQ ID NO: 473222 - RNA, 32 nt, Human
gucaccuguagucccagcuacuugggaggaug

SEQ ID NO: 473223 - RNA, 32 nt, Human
gucaccuguagucccagcugcucgggagggug

SEQ ID NO: 473224 - RNA, 32 nt, Human
gucaccuguggcagaggugugcagaggcagag

SEQ ID NO: 473225 - RNA, 32 nt, Human
gucaccuugcacaaggaggacagugguauggc

SEQ ID NO: 473226 - RNA, 32 nt, Human
gucaccuugucuucuuugccuucagggagcug

SEQ ID NO: 473227 - RNA, 32 nt, Human
gucaccuuuacuccaguucccaacaaguuccu

SEQ ID NO: 473228 - RNA, 32 nt, Human
gucaccuuugcuccaguucccaacaaguuauu

SEQ ID NO: 473229 - RNA, 32 nt, Human
gucaccuuuguuccaguucccaacaaguuccu

SEQ ID NO: 473230 - RNA, 32 nt, Human
gucacgaacccccgccuugguuuuugaacacg

SEQ ID NO: 473231 - RNA, 32 nt, Human
gucacgaagcucaugguagacugaggccacua

SEQ ID NO: 473232 - RNA, 32 nt, Human
gucacgagagcacggcccugcgcuccccacaa

SEQ ID NO: 473233 - RNA, 32 nt, Human
gucacgauuuuucugccacuucaccuuaggga

SEQ ID NO: 473234 - RNA, 24 nt, Human
gucacgcaggcuagagugcagugg

SEQ ID NO: 473235 - RNA, 32 nt, Human
gucacgcaggguuccagguauuucuggggcuc

SEQ ID NO: 473236 - RNA, 32 nt, Human
gucacgcaguugaggucagggaaggaguaacu

SEQ ID NO: 473237 - RNA, 32 nt, Human
gucacgcauaucuggcagauggugcaggaaga

SEQ ID NO: 473238 - RNA, 32 nt, Human
gucacgccacugcacuccagccugggugacag

SEQ ID NO: 473239 - RNA, 32 nt, Human
gucacgccacugcauucuauccugggcaacag

SEQ ID NO: 473240 - RNA, 32 nt, Human
gucacgccaggccaggccaggccaggugggga

SEQ ID NO: 473241 - RNA, 32 nt, Human
gucacgccuguaaucccagcacuuuggcaggc

SEQ ID NO: 473242 - RNA, 32 nt, Human
gucacgccuguaaucccagcacuuugggaggc

SEQ ID NO: 473243 - RNA, 32 nt, Human
gucacgccuguaaucccagcacuuugggaggu

SEQ ID NO: 473244 - RNA, 32 nt, Human
gucacgccuguaaucccaguacuuugggaggc

SEQ ID NO: 473245 - RNA, 23 nt, Human
gucacgccuugugccuuccgccu

SEQ ID NO: 473246 - RNA, 32 nt, Human
gucacgcgccuguaaucccagcuacuuggggg

SEQ ID NO: 473247 - RNA, 32 nt, Human
gucacgcucgguaccaggcgcagaucauggca

SEQ ID NO: 473248 - RNA, 32 nt, Human
gucacggacaggagguaggauccugccgcucg

SEQ ID NO: 473249 - RNA, 32 nt, Human
gucacggagauccaaggggcugcaggagacuc

SEQ ID NO: 473250 - RNA, 32 nt, Human
gucacggcucacugcagccucaaacuccuagg

SEQ ID NO: 473251 - RNA, 32 nt, Human
gucacggcucacugcauccucaaccuccuggg

SEQ ID NO: 473252 - RNA, 32 nt, Human
gucacggcugcuucccaccagcaaagaccacg

SEQ ID NO: 473253 - RNA, 32 nt, Human
gucacgggagggugugagucagcucuguccac

SEQ ID NO: 473254 - RNA, 32 nt, Human
gucacgggagggugugagucagcucugucugu

SEQ ID NO: 473255 - RNA, 32 nt, Human
gucacgggagggugugugucagcucuguccgu

SEQ ID NO: 473256 - RNA, 32 nt, Human
gucacgggagggugugugucagcucugucugu

SEQ ID NO: 473257 - RNA, 32 nt, Human
gucacggggcgcgcacgccggggaagacuaca

SEQ ID NO: 473258 - RNA, 32 nt, Human
gucacgguggaccauucccuacuugcuuuuuc

SEQ ID NO: 473259 - RNA, 32 nt, Human
gucacgguuagaagaagcuaauauuugaaaca

SEQ ID NO: 473260 - RNA, 32 nt, Human
gucacguaccgccugcuugcucaaaucaauga

SEQ ID NO: 473261 - RNA, 32 nt, Human
gucacguacuccccagcacuguugagggauug

SEQ ID NO: 473262 - RNA, 32 nt, Human
gucacgucacugcacucuagccugggcaacag

SEQ ID NO: 473263 - RNA, 32 nt, Human
gucacgucuuucuccuucuccuuccuccuucu

SEQ ID NO: 473264 - RNA, 32 nt, Human
gucacgugggcugacccagagccggggcggaa

SEQ ID NO: 473265 - RNA, 32 nt, Human
gucacguuuggucaccauggaagcuuuuauug

SEQ ID NO: 473266 - RNA, 20 nt, Human
gucacuaaacaaaucccaga

SEQ ID NO: 473267 - RNA, 32 nt, Human
gucacuaaagcaaaguguggauuugaguuacu

SEQ ID NO: 473268 - RNA, 32 nt, Human
gucacuaaggagagagggucaggagccagagu

SEQ ID NO: 473269 - RNA, 32 nt, Human
gucacuacacuccaggcugggugacagauuaa

SEQ ID NO: 473270 - RNA, 32 nt, Human
gucacuaccuggaggacagcugccuggacagu

SEQ ID NO: 473271 - RNA, 23 nt, Human
gucacuacuacuuaaaacucuga

SEQ ID NO: 473272 - RNA, 32 nt, Human
gucacuacugcaauccaucuguggccgauuuu

SEQ ID NO: 473273 - RNA, 32 nt, Human
gucacuagaaaugggccagcugggucaaugug

SEQ ID NO: 473274 - RNA, 32 nt, Human
gucacuagagauacccugagguucaugucauc

SEQ ID NO: 473275 - RNA, 32 nt, Human
gucacuagcagaaggaaugaaagggaauuuau

SEQ ID NO: 473276 - RNA, 32 nt, Human
gucacuagccugugaucccagcacuuugggag

SEQ ID NO: 473277 - RNA, 21 nt, Human
gucacuagcuuaucuugaaca

SEQ ID NO: 473278 - RNA, 32 nt, Human
gucacuaggggguuccaugagaggugugugac

SEQ ID NO: 473279 - RNA, 32 nt, Human
gucacuaucuguggcugggugaacggcugugu

SEQ ID NO: 473280 - RNA, 32 nt, Human
gucacucaagaggacuucagcucugcuguugg

SEQ ID NO: 473281 - RNA, 24 nt, Human
gucacucaaucuggaaugcagugg

SEQ ID NO: 473282 - RNA, 32 nt, Human
gucacucacaaaaggcuggaugugcuuucauc

SEQ ID NO: 473283 - RNA, 32 nt, Human
gucacucacaggcgaagacacaaccugaaguc

SEQ ID NO: 473284 - RNA, 32 nt, Human
gucacucacucacccugacccugggcaaguua

SEQ ID NO: 473285 - RNA, 32 nt, Human
gucacucacugugucugaucugucucacucac

SEQ ID NO: 473286 - RNA, 32 nt, Human
gucacucaggaucaccaaagaaacagucauca

SEQ ID NO: 473287 - RNA, 24 nt, Human
gucacucaggcuagagugcagugg

SEQ ID NO: 473288 - RNA, 24 nt, Human
gucacucaggcugcagugcagugg

SEQ ID NO: 473289 - RNA, 24 nt, Human
gucacucaggcuggaaugcagugg

SEQ ID NO: 473290 - RNA, 24 nt, Human
gucacucaggcuggaguacagugg

SEQ ID NO: 473291 - RNA, 23 nt, Human
gucacucaggcuggagugcaaug

SEQ ID NO: 473292 - RNA, 24 nt, Human
gucacucaggcuggagugcaauga

SEQ ID NO: 473293 - RNA, 23 nt, Human
gucacucaggcuggagugcagug

SEQ ID NO: 473294 - RNA, 24 nt, Human
gucacucaggcuggagugcagugg

SEQ ID NO: 473295 - RNA, 24 nt, Human
gucacucaggcuggagugcggugg

SEQ ID NO: 473296 - RNA, 32 nt, Human
gucacucagugaucacggguaaagagaacugu

SEQ ID NO: 473297 - RNA, 32 nt, Human
gucacucauggaggccuaggggaacagcgaga

SEQ ID NO: 473298 - RNA, 32 nt, Human
gucacuccaaaccuugaaacugucagggucag

SEQ ID NO: 473299 - RNA, 32 nt, Human
gucacuccagccugggcaacagagugagacuc

SEQ ID NO: 473300 - RNA, 32 nt, Human
gucacuccagugguucccuccuuguccaaguc

SEQ ID NO: 473301 - RNA, 21 nt, Human
gucacucccugaacacaggga

SEQ ID NO: 473302 - RNA, 32 nt, Human
gucacuccucccaccccaccuaccucacaggg

SEQ ID NO: 473303 - RNA, 22 nt, Human
gucacuccucuuucccuuggua

SEQ ID NO: 473304 - RNA, 23 nt, Human
gucacucgcugugagauggggag

SEQ ID NO: 473305 - RNA, 32 nt, Human
gucacucuaaauggacaccacaugaaccucug

SEQ ID NO: 473306 - RNA, 19 nt, Human
gucacucuccacccagcca

SEQ ID NO: 473307 - RNA, 32 nt, Human
gucacucuccacccuucccuucugccugccca

SEQ ID NO: 473308 - RNA, 32 nt, Human
gucacucucccaugcccgccuuugaagcugag

SEQ ID NO: 473309 - RNA, 32 nt, Human
gucacucucccucugcuacugcugcugaucug

SEQ ID NO: 473310 - RNA, 32 nt, Human
gucacucucuucacauuuuucuucuauuccuc

SEQ ID NO: 473311 - RNA, 32 nt, Human
gucacucucuugcccaggcuggagugcagugg

SEQ ID NO: 473312 - RNA, 32 nt, Human
gucacucugaucaugguaacagcaucccuauu

SEQ ID NO: 473313 - RNA, 32 nt, Human
gucacucuguugcccaggcuggagugcagugg

SEQ ID NO: 473314 - RNA, 32 nt, Human
gucacucuuaccucccugucugcuuacucacc

SEQ ID NO: 473315 - RNA, 19 nt, Human
gucacucuuagaauucuaa

SEQ ID NO: 473316 - RNA, 32 nt, Human
gucacucuuccaccccuuuucucccucucccc

SEQ ID NO: 473317 - RNA, 32 nt, Human
gucacucuugaugggcaccuggauaacucagg

SEQ ID NO: 473318 - RNA, 32 nt, Human
gucacucuugcagucuuugaggcaggauaagu

SEQ ID NO: 473319 - RNA, 32 nt, Human
gucacugaaaaauauaaaaauuagcugagcau

SEQ ID NO: 473320 - RNA, 32 nt, Human
gucacugaaagccugagacuccuggcuucuuu

SEQ ID NO: 473321 - RNA, 32 nt, Human
gucacugaacuccggccugggugacagaagga

SEQ ID NO: 473322 - RNA, 32 nt, Human
gucacugaagacugugauuacaugcaccugcc

SEQ ID NO: 473323 - RNA, 32 nt, Human
gucacugacagcccuguguugugcucaggacu

SEQ ID NO: 473324 - RNA, 24 nt, Human
gucacugaccucauuuccuugaug

SEQ ID NO: 473325 - RNA, 32 nt, Human
gucacugacucagaugcagggucugcucaccc

SEQ ID NO: 473326 - RNA, 32 nt, Human
gucacugacuucaugacagucuggcccuccag

SEQ ID NO: 473327 - RNA, 24 nt, Human
gucacugaggcuggagugcagugg

SEQ ID NO: 473328 - RNA, 32 nt, Human
gucacugaggguugacugacuggagagcucaa

SEQ ID NO: 473329 - RNA, 32 nt, Human
gucacugauugcauuccagccugggugacaga

SEQ ID NO: 473330 - RNA, 32 nt, Human
gucacugcaaccucugccuccuggguucaaac

SEQ ID NO: 473331 - RNA, 32 nt, Human
gucacugcaaccucugccuccuggguucaaga

SEQ ID NO: 473332 - RNA, 32 nt, Human
gucacugcaaccucugccuccuggguucaagc

SEQ ID NO: 473333 - RNA, 32 nt, Human
gucacugcacuccaaccugggugacagagcga

SEQ ID NO: 473334 - RNA, 32 nt, Human
gucacugcacuccagccugggugacagaguga

SEQ ID NO: 473335 - RNA, 32 nt, Human
gucacugcacuccagccugggugacagugagu

SEQ ID NO: 473336 - RNA, 32 nt, Human
gucacugcacuccagcuugggugacagagacc

SEQ ID NO: 473337 - RNA, 32 nt, Human
gucacugcacuccggccugggugacagagcca

SEQ ID NO: 473338 - RNA, 32 nt, Human
gucacugcacugcagccugggugacagaaugu

SEQ ID NO: 473339 - RNA, 32 nt, Human
gucacugcauuccagccugggugacagagcga

SEQ ID NO: 473340 - RNA, 32 nt, Human
gucacugccaacaacaacgagguuccuauaau

SEQ ID NO: 473341 - RNA, 32 nt, Human
gucacugccagccugccgggccugccuucccu

SEQ ID NO: 473342 - RNA, 32 nt, Human
gucacugccaggaacgugcugaggaauggagu

SEQ ID NO: 473343 - RNA, 32 nt, Human
gucacugccccagagaauauacacacccuguc

SEQ ID NO: 473344 - RNA, 32 nt, Human
gucacugccccaggaacuagaagagagcgagg

SEQ ID NO: 473345 - RNA, 32 nt, Human
gucacugcccucucccugccugggggcuaugu

SEQ ID NO: 473346 - RNA, 32 nt, Human
gucacugccgacaucccucccccagcagaaug

SEQ ID NO: 473347 - RNA, 32 nt, Human
gucacugccuguuccccacugccuguguucgc

SEQ ID NO: 473348 - RNA, 32 nt, Human
gucacugcuacugccacggucagcauucccgc

SEQ ID NO: 473349 - RNA, 32 nt, Human
gucacugcucacuguagccuugacucuggagc

SEQ ID NO: 473350 - RNA, 26 nt, Human
gucacugcuggggaagggaugggguc

SEQ ID NO: 473351 - RNA, 32 nt, Human
gucacugcugucaaacagaagguaaacagucu

SEQ ID NO: 473352 - RNA, 32 nt, Human
gucacugcuuugucugugcugguaguuuguga

SEQ ID NO: 473353 - RNA, 32 nt, Human
gucacuggaaccucccugggccugucucagau

SEQ ID NO: 473354 - RNA, 32 nt, Human
gucacuggagaaaggggcugugcuggggccag

SEQ ID NO: 473355 - RNA, 32 nt, Human
gucacuggauaucuugagcucuguauugaaga

SEQ ID NO: 473356 - RNA, 32 nt, Human
gucacuggccuggaacucagccuugauucacu

SEQ ID NO: 473357 - RNA, 32 nt, Human
gucacuggcgagcccacccacacucaccagaa

SEQ ID NO: 473358 - RNA, 32 nt, Human
gucacugggauuauagacaugaaccaccucau

SEQ ID NO: 473359 - RNA, 32 nt, Human
gucacuggguaguggccguggcuccugacgau

SEQ ID NO: 473360 - RNA, 32 nt, Human
gucacugguccuuucucagccucucucgugcu

SEQ ID NO: 473361 - RNA, 32 nt, Human
gucacuggucucaaagaaucuacggaauucag

SEQ ID NO: 473362 - RNA, 32 nt, Human
gucacugguguuccucacccaccagcuguaac

SEQ ID NO: 473363 - RNA, 32 nt, Human
gucacuguacuccagccugggugacagaguga

SEQ ID NO: 473364 - RNA, 32 nt, Human
gucacugucaaucugcuauauuuuucacuauc

SEQ ID NO: 473365 - RNA, 32 nt, Human
gucacugucauaagaauaaacguguacugggg

SEQ ID NO: 473366 - RNA, 32 nt, Human
gucacugucauccucaccacagccagggguga

SEQ ID NO: 473367 - RNA, 32 nt, Human
gucacugucuccccugaacccccacacagugg

SEQ ID NO: 473368 - RNA, 31 nt, Human
gucacugucugcccugggccucaguuucccu

SEQ ID NO: 473369 - RNA, 32 nt, Human
gucacugugcccucauuggcccccagcaauca

SEQ ID NO: 473370 - RNA, 32 nt, Human
gucacugugcugcucugcagaguuacuucagg

SEQ ID NO: 473371 - RNA, 32 nt, Human
gucacuguggccaaacagugcccagcuuaagc

SEQ ID NO: 473372 - RNA, 32 nt, Human
gucacuguggugaugcagagauaauacggcug

SEQ ID NO: 473373 - RNA, 32 nt, Human
gucacugugguucagugagcacauggguggac

SEQ ID NO: 473374 - RNA, 31 nt, Human
gucacuuaagcgucucuuacagcagagagac

SEQ ID NO: 473375 - RNA, 20 nt, Human
gucacuuagggcaucuccug

SEQ ID NO: 473376 - RNA, 32 nt, Human
gucacuucaaaacuccagcuugcccaauaagg

SEQ ID NO: 473377 - RNA, 32 nt, Human
gucacuucacacuuggcaugcacugugaaagc

SEQ ID NO: 473378 - RNA, 32 nt, Human
gucacuucagacaggagccacagggagccugu

SEQ ID NO: 473379 - RNA, 18 nt, Human
gucacuucagggcuccuu

SEQ ID NO: 473380 - RNA, 32 nt, Human
gucacuuccaagcuagaaggaggaaucagaua

SEQ ID NO: 473381 - RNA, 32 nt, Human
gucacuucccugcucacaaucuuccaaugacu

SEQ ID NO: 473382 - RNA, 32 nt, Human
gucacuuccuucagcaucucacuucuucuucu

SEQ ID NO: 473383 - RNA, 32 nt, Human
gucacuucuccuccuccuuucuccagccagcc

SEQ ID NO: 473384 - RNA, 32 nt, Human
gucacuucuccucuguagaucucagucucccu

SEQ ID NO: 473385 - RNA, 32 nt, Human
gucacuugaacccaggaggcagagguugcagu

SEQ ID NO: 473386 - RNA, 32 nt, Human
gucacuugaacccgggaggcggaggcugcagu

SEQ ID NO: 473387 - RNA, 21 nt, Human
gucacuugaauagaagauggu

SEQ ID NO: 473388 - RNA, 32 nt, Human
gucacuugcagcuccauuuccaucacguggua

SEQ ID NO: 473389 - RNA, 32 nt, Human
gucacuugcccaggugcgguggcucacaccug

SEQ ID NO: 473390 - RNA, 22 nt, Human
gucacuugcugcuuuuucugcg

SEQ ID NO: 473391 - RNA, 32 nt, Human
gucacuuggaccacugucaguauuccaugccg

SEQ ID NO: 473392 - RNA, 32 nt, Human
gucacuugggcauuagaaugaaguuuuccuga

SEQ ID NO: 473393 - RNA, 32 nt, Human
gucacuuguugacugucucuguggaccagagu

SEQ ID NO: 473394 - RNA, 32 nt, Human
gucacuuugucacccaggcuggagugcaaugg

SEQ ID NO: 473395 - RNA, 32 nt, Human
gucacuuugucacucgaugucauuccaaaguu

SEQ ID NO: 473396 - RNA, 32 nt, Human
gucacuuugucccccaggcuggagugcagugg

SEQ ID NO: 473397 - RNA, 32 nt, Human
gucacuuuugaacucuucuccccaccaaaccc

SEQ ID NO: 473398 - RNA, 32 nt, Human
gucagaaacagaucugcuucauggacaucccc

SEQ ID NO: 473399 - RNA, 32 nt, Human
gucagaaaggaacuuuuacacaguuugccuuc

SEQ ID NO: 473400 - RNA, 32 nt, Human
gucagaaaguaguuuguaauugauauuaaaag

SEQ ID NO: 473401 - RNA, 32 nt, Human
gucagaaaguccuaaucauuucaguccugugc

SEQ ID NO: 473402 - RNA, 32 nt, Human
gucagaaaugcaggaagcuauaugagauucca

SEQ ID NO: 473403 - RNA, 32 nt, Human
gucagaaauucugcccuuugccuccaccacau

SEQ ID NO: 473404 - RNA, 19 nt, Human
gucagaacagguucuccaa

SEQ ID NO: 473405 - RNA, 32 nt, Human
gucagaacauucgaaucucugccccucacuug

SEQ ID NO: 473406 - RNA, 32 nt, Human
gucagaaccaguccugcccugugaauuacugc

SEQ ID NO: 473407 - RNA, 32 nt, Human
gucagaaccaguccugcccugugauuacugcu

SEQ ID NO: 473408 - RNA, 32 nt, Human
gucagaaccucaccccuuuucacuugucucuc

SEQ ID NO: 473409 - RNA, 32 nt, Human
gucagaacucacaccuugucagucaucaaaga

SEQ ID NO: 473410 - RNA, 32 nt, Human
gucagaacucacugcagccucuacaucccugg

SEQ ID NO: 473411 - RNA, 32 nt, Human
gucagaacugaggagggaaguggucagguuua

SEQ ID NO: 473412 - RNA, 32 nt, Human
gucagaacugaguucuugcugagguuugcauu

SEQ ID NO: 473413 - RNA, 32 nt, Human
gucagaagacuccagaagcagccacuuaguag

SEQ ID NO: 473414 - RNA, 32 nt, Human
gucagaaggaagaggcccagcagaagggacuc

SEQ ID NO: 473415 - RNA, 32 nt, Human
gucagaaggcggcacuucuggccaggucucug

SEQ ID NO: 473416 - RNA, 32 nt, Human
gucagaagucauaccuugcaugccaucguagc

SEQ ID NO: 473417 - RNA, 32 nt, Human
gucagaagugugaagggugccuguucugaauc

SEQ ID NO: 473418 - RNA, 32 nt, Human
gucagaaguuugucaggcagagauguuuaugg

SEQ ID NO: 473419 - RNA, 32 nt, Human
gucagaaugcaagcccugccucagcuucuccc

SEQ ID NO: 473420 - RNA, 32 nt, Human
gucagacaacacaagaaaagccaguagaaauu

SEQ ID NO: 473421 - RNA, 32 nt, Human
gucagacacagcaccucaggccgcugcucaga

SEQ ID NO: 473422 - RNA, 32 nt, Human
gucagacacuccucaaauauuguggacagggg

SEQ ID NO: 473423 - RNA, 20 nt, Human
gucagacaguggaugggcuc

SEQ ID NO: 473424 - RNA, 32 nt, Human
gucagacauggaaaugguggggagacaaaaau

SEQ ID NO: 473425 - RNA, 32 nt, Human
gucagacauggaaaugguggggagacagaaau

SEQ ID NO: 473426 - RNA, 21 nt, Human
gucagacccaggaggaggcau

SEQ ID NO: 473427 - RNA, 32 nt, Human
gucagacccaggaggaggcauugccagcucuc

SEQ ID NO: 473428 - RNA, 32 nt, Human
gucagacccaggcugguuugagcucagguucg

SEQ ID NO: 473429 - RNA, 32 nt, Human
gucagacccuccaggcuucggggaaauguggg

SEQ ID NO: 473430 - RNA, 32 nt, Human
gucagaccuuggacaguagucuugacuuccug

SEQ ID NO: 473431 - RNA, 32 nt, Human
gucagacguggaaaugguggggagacaaaaau

SEQ ID NO: 473432 - RNA, 32 nt, Human
gucagacucagccugugaacagacgcuaaccu

SEQ ID NO: 473433 - RNA, 32 nt, Human
gucagacuccaucccuccucugccgccaccgc

SEQ ID NO: 473434 - RNA, 32 nt, Human
gucagacugcccuggguggagggagacgccgg

SEQ ID NO: 473435 - RNA, 32 nt, Human
gucagacuuauuuuuaccuguacaccaucuuc

SEQ ID NO: 473436 - RNA, 32 nt, Human
gucagacuucuggucuugcuucuccacgugga

SEQ ID NO: 473437 - RNA, 32 nt, Human
gucagacuuugcugcauuuuacacaugugcug

SEQ ID NO: 473438 - RNA, 32 nt, Human
gucagagaaugccacagacaccaggguaagua

SEQ ID NO: 473439 - RNA, 32 nt, Human
gucagagagcacugcaauaugugcuucauggg

SEQ ID NO: 473440 - RNA, 32 nt, Human
gucagagaggagaguggagagugaaucuaggg

SEQ ID NO: 473441 - RNA, 32 nt, Human
gucagagcaaagcauuucaugaugacuguaac

SEQ ID NO: 473442 - RNA, 31 nt, Human
gucagagcaauguccaacugucaggcucuca

SEQ ID NO: 473443 - RNA, 32 nt, Human
gucagagcagcuuuaccacagcuucaggccac

SEQ ID NO: 473444 - RNA, 32 nt, Human
gucagagcaguggaggggagacaucgcccaug

SEQ ID NO: 473445 - RNA, 32 nt, Human
gucagagcauuuuaacuagccacucagaugag

SEQ ID NO: 473446 - RNA, 32 nt, Human
gucagagccaacagguuggggagagacagaga

SEQ ID NO: 473447 - RNA, 32 nt, Human
gucagagccacugggcaucgcuugggugagau

SEQ ID NO: 473448 - RNA, 32 nt, Human
gucagagcccucuggguuuguggagcacacag

SEQ ID NO: 473449 - RNA, 32 nt, Human
gucagagccugaugccgccucggucucugggu

SEQ ID NO: 473450 - RNA, 32 nt, Human
gucagagccuuccuccccaucuggaauucaca

SEQ ID NO: 473451 - RNA, 32 nt, Human
gucagagcucacuguaaccucaaaauccuggg

SEQ ID NO: 473452 - RNA, 32 nt, Human
gucagagcuguuggccucgccugggcccaggc

SEQ ID NO: 473453 - RNA, 32 nt, Human
gucagagcuuuagagccugcaaggagcucccg

SEQ ID NO: 473454 - RNA, 32 nt, Human
gucagaggaagagacuucuucuguucucugga

SEQ ID NO: 473455 - RNA, 32 nt, Human
gucagaggaguccagauuuucccaccugaccu

SEQ ID NO: 473456 - RNA, 32 nt, Human
gucagaggaugcaucuucuucuagucuuggag

SEQ ID NO: 473457 - RNA, 32 nt, Human
gucagaggcaggagugggggaucagggaaggu

SEQ ID NO: 473458 - RNA, 32 nt, Human
gucagaggcccuggacagaagcuccagauagg

SEQ ID NO: 473459 - RNA, 32 nt, Human
gucagaggccggggcuagaggcagauggaagg

SEQ ID NO: 473460 - RNA, 32 nt, Human
gucagaggccuggcccuucuuuacagauguag

SEQ ID NO: 473461 - RNA, 32 nt, Human
gucagaggcgacaugagugccgcggggcugcu

SEQ ID NO: 473462 - RNA, 32 nt, Human
gucagaggcugcaggaagcgcuugccucuccc

SEQ ID NO: 473463 - RNA, 21 nt, Human
gucagaggcuggagugcaaug

SEQ ID NO: 473464 - RNA, 22 nt, Human
gucagaggcuggagugcaaugg

SEQ ID NO: 473465 - RNA, 32 nt, Human
gucagagggccagauuuggcccuuggucuaua

SEQ ID NO: 473466 - RNA, 32 nt, Human
gucagagggcggggcuggugaggguuuguccu

SEQ ID NO: 473467 - RNA, 32 nt, Human
gucagaggguccuguucccaucagcgauuccc

SEQ ID NO: 473468 - RNA, 32 nt, Human
gucagagguggcugugccagaggugcggcuuc

SEQ ID NO: 473469 - RNA, 32 nt, Human
gucagaguaaagcugcuccacccccagauugc

SEQ ID NO: 473470 - RNA, 32 nt, Human
gucagagugauacgcaguuuuaaagggaggaa

SEQ ID NO: 473471 - RNA, 32 nt, Human
gucagagugggagguugucaacagaagagucc

SEQ ID NO: 473472 - RNA, 32 nt, Human
gucagaguguguagagugaaguugcugugccc

SEQ ID NO: 473473 - RNA, 32 nt, Human
gucagaguguugaacccugccucccaguuaaa

SEQ ID NO: 473474 - RNA, 32 nt, Human
gucagaguugggucagggccacugugaguggg

SEQ ID NO: 473475 - RNA, 32 nt, Human
gucagaguuuucuaccaacuggcaucugugau

SEQ ID NO: 473476 - RNA, 32 nt, Human
gucagauaaagaaaaaggugaaggaggucaga

SEQ ID NO: 473477 - RNA, 32 nt, Human
gucagauagauuuuucucccagcauguucuac

SEQ ID NO: 473478 - RNA, 21 nt, Human
gucagauaguuagaauuguaa

SEQ ID NO: 473479 - RNA, 32 nt, Human
gucagaucccagguucuaugaccaaauaagua

SEQ ID NO: 473480 - RNA, 32 nt, Human
gucagaugaaguucacaucucuaaaggguaaa

SEQ ID NO: 473481 - RNA, 32 nt, Human
gucagaugccuguagucccagcuacuugugag

SEQ ID NO: 473482 - RNA, 32 nt, Human
gucagauggaagcucuguggccuuuccuaacu

SEQ ID NO: 473483 - RNA, 32 nt, Human
gucagauggagugccggucugcagaggacugc

SEQ ID NO: 473484 - RNA, 32 nt, Human
gucagaugguggggugggcccucuccaggggg

SEQ ID NO: 473485 - RNA, 32 nt, Human
gucagauguagaggagagagagcgagagaaca

SEQ ID NO: 473486 - RNA, 32 nt, Human
gucagauguggaggcccagggaauagacccuc

SEQ ID NO: 473487 - RNA, 20 nt, Human
gucagauuaaaacaagaugg

SEQ ID NO: 473488 - RNA, 32 nt, Human
gucagcaaccgcacucaucagaccaugcacua

SEQ ID NO: 473489 - RNA, 22 nt, Human
gucagcaaccucagaacucuga

SEQ ID NO: 473490 - RNA, 32 nt, Human
gucagcaacguggcuggggaggccgugcggac

SEQ ID NO: 473491 - RNA, 32 nt, Human
gucagcaagagaaacucuacggcuaugggaga

SEQ ID NO: 473492 - RNA, 32 nt, Human
gucagcaagcuggagacccaggagagcugaug

SEQ ID NO: 473493 - RNA, 20 nt, Human
gucagcaaggaagacccuga

SEQ ID NO: 473494 - RNA, 19 nt, Human
gucagcaagguggcucuga

SEQ ID NO: 473495 - RNA, 17 nt, Human
gucagcaauaccucuga

SEQ ID NO: 473496 - RNA, 19 nt, Human
gucagcaaugaagacuuug

SEQ ID NO: 473497 - RNA, 20 nt, Human
gucagcaauucugauucuga

SEQ ID NO: 473498 - RNA, 20 nt, Human
gucagcaauuuucuuucuga

SEQ ID NO: 473499 - RNA, 32 nt, Human
gucagcacaaaggaggcuuuuucugugcuuug

SEQ ID NO: 473500 - RNA, 32 nt, Human
gucagcacaccuaggguaugggcagugcuuag

SEQ ID NO: 473501 - RNA, 31 nt, Human
gucagcacacucaagcuggcuugggacgagg

SEQ ID NO: 473502 - RNA, 32 nt, Human
gucagcacagcagaggaggcccaggcaauauc

SEQ ID NO: 473503 - RNA, 32 nt, Human
gucagcacagcagaggaggcccaggcagugcc

SEQ ID NO: 473504 - RNA, 32 nt, Human
gucagcacaggcuggccagagagauguucuug

SEQ ID NO: 473505 - RNA, 32 nt, Human
gucagcaccaaguaacaccacacacacgcagc

SEQ ID NO: 473506 - RNA, 32 nt, Human
gucagcaccagccucagcaacugugcagagac

SEQ ID NO: 473507 - RNA, 20 nt, Human
gucagcaccugaaggagagg

SEQ ID NO: 473508 - RNA, 32 nt, Human
gucagcaccuggaaguggagugcaggcugcag

SEQ ID NO: 473509 - RNA, 32 nt, Human
gucagcaccuuugaaguuaagggaaggacagg

SEQ ID NO: 473510 - RNA, 32 nt, Human
gucagcacggaagcuccaccuucuggguggag

SEQ ID NO: 473511 - RNA, 32 nt, Human
gucagcacucacugaaccucacuuuacaggga

SEQ ID NO: 473512 - RNA, 32 nt, Human
gucagcagagagacccugaacucugcuaaggg

SEQ ID NO: 473513 - RNA, 32 nt, Human
gucagcagagcugaaagagaaaguagaaggau

SEQ ID NO: 473514 - RNA, 32 nt, Human
gucagcagaugaagaugcaauggcugccucag

SEQ ID NO: 473515 - RNA, 32 nt, Human
gucagcagauggugacaacgugcaucugguuc

SEQ ID NO: 473516 - RNA, 32 nt, Human
gucagcagccucccugaagaccaaaauuagaa

SEQ ID NO: 473517 - RNA, 32 nt, Human
gucagcagcuacuugguagucacuguggcaug

SEQ ID NO: 473518 - RNA, 32 nt, Human
gucagcagcugccugcuuuucugugauguaug

SEQ ID NO: 473519 - RNA, 19 nt, Human
gucagcaggaggaacucua

SEQ ID NO: 473520 - RNA, 32 nt, Human
gucagcaggauggaccuggagaugucagggcu

SEQ ID NO: 473521 - RNA, 32 nt, Human
gucagcaggcacugugcccaggaagagccugc

SEQ ID NO: 473522 - RNA, 32 nt, Human
gucagcagggccugagccaggcucguccccug

SEQ ID NO: 473523 - RNA, 32 nt, Human
gucagcaggugaugagcugggagcagcuccuu

SEQ ID NO: 473524 - RNA, 32 nt, Human
gucagcaguaagguuucaagguacaguuaugg

SEQ ID NO: 473525 - RNA, 32 nt, Human
gucagcagugcugcagacacaggacagaacgu

SEQ ID NO: 473526 - RNA, 21 nt, Human
gucagcaguuaacaguuuuga

SEQ ID NO: 473527 - RNA, 22 nt, Human
gucagcaguuuuguaaacucug

SEQ ID NO: 473528 - RNA, 20 nt, Human
gucagcauaaaaaauuuuaa

SEQ ID NO: 473529 - RNA, 23 nt, Human
gucagcauacuuuggcggaccuu

SEQ ID NO: 473530 - RNA, 32 nt, Human
gucagcauaggagagaaaguucaugaaucugg

SEQ ID NO: 473531 - RNA, 32 nt, Human
gucagcauauacaagcucuuaauauucuguuu

SEQ ID NO: 473532 - RNA, 32 nt, Human
gucagcaucucaagggcacugugguauggaaa

SEQ ID NO: 473533 - RNA, 21 nt, Human
gucagcaucugagaacuuuaa

SEQ ID NO: 473534 - RNA, 32 nt, Human
gucagcaucuggaaggugcccguguccuaugc

SEQ ID NO: 473535 - RNA, 32 nt, Human
gucagccacaccugucagcccaagcagaguga

SEQ ID NO: 473536 - RNA, 32 nt, Human
gucagccacagcucucuuccagcacuguccuc

SEQ ID NO: 473537 - RNA, 32 nt, Human
gucagccacccaggcccaacauguugugaguu

SEQ ID NO: 473538 - RNA, 32 nt, Human
gucagccaccgcacccagccuggaguggccuu

SEQ ID NO: 473539 - RNA, 32 nt, Human
gucagccagagcuggggaaacccagaacugac

SEQ ID NO: 473540 - RNA, 32 nt, Human
gucagccagauagucuggaucuauggugugac

SEQ ID NO: 473541 - RNA, 32 nt, Human
gucagccagcagcuccaugagaggcucuacca

SEQ ID NO: 473542 - RNA, 18 nt, Human
gucagccaggacccugug

SEQ ID NO: 473543 - RNA, 32 nt, Human
gucagccaggcugcccuuaucagcuguccccu

SEQ ID NO: 473544 - RNA, 23 nt, Human
gucagccaggcuggagugcagug

SEQ ID NO: 473545 - RNA, 32 nt, Human
gucagccauugcacccagcccagauugucuua

SEQ ID NO: 473546 - RNA, 32 nt, Human
gucagcccaaaaucugauaaucaugucuaacc

SEQ ID NO: 473547 - RNA, 32 nt, Human
gucagcccaaagcagaggcucggccaugaacu

SEQ ID NO: 473548 - RNA, 32 nt, Human
gucagcccaccaggagcccugccuucgucucc

SEQ ID NO: 473549 - RNA, 24 nt, Human
gucagcccagucuggaugcacagg

SEQ ID NO: 473550 - RNA, 32 nt, Human
gucagcccagucuggaugcacaggaggaugcu

SEQ ID NO: 473551 - RNA, 32 nt, Human
gucagcccaugcaccugcccugggugaggaag

SEQ ID NO: 473552 - RNA, 32 nt, Human
gucagcccauggugauuuagcuccuugcuguu

SEQ ID NO: 473553 - RNA, 32 nt, Human
gucagcccauuggcucccaucugaaccacuuu

SEQ ID NO: 473554 - RNA, 32 nt, Human
gucagccccaggagaguccugagaugauuuug

SEQ ID NO: 473555 - RNA, 24 nt, Human
gucagccccucggugcuggccucu

SEQ ID NO: 473556 - RNA, 32 nt, Human
gucagcccggaggaggaggaggaggaggagga

SEQ ID NO: 473557 - RNA, 32 nt, Human
gucagcccuacccugaccaugaccugagguug

SEQ ID NO: 473558 - RNA, 32 nt, Human
gucagcccuccucauuccuaaauaacuugccu

SEQ ID NO: 473559 - RNA, 32 nt, Human
gucagcccugcuccccacagggccaggcuggc

SEQ ID NO: 473560 - RNA, 32 nt, Human
gucagccgccacugcugcaguaacccuucuag

SEQ ID NO: 473561 - RNA, 32 nt, Human
gucagccgcgggccgcugggaacuccacucgg

SEQ ID NO: 473562 - RNA, 32 nt, Human
gucagccuaggaggaggaagggcucccggaag

SEQ ID NO: 473563 - RNA, 32 nt, Human
gucagccuaggaggaggaagggcuuccggaag

SEQ ID NO: 473564 - RNA, 32 nt, Human
gucagccucaaaggcauggcuuucucucuggc

SEQ ID NO: 473565 - RNA, 32 nt, Human
gucagccucagggggaguucaaggucaucugg

SEQ ID NO: 473566 - RNA, 32 nt, Human
gucagccuccaccugcuuuuccuggguccugu

SEQ ID NO: 473567 - RNA, 32 nt, Human
gucagccuccacugcuguacguccuuggcuac

SEQ ID NO: 473568 - RNA, 32 nt, Human
gucagccucccucucuggaauuuaguuucacc

SEQ ID NO: 473569 - RNA, 32 nt, Human
gucagccucugcagcugccucaguuuccccag

SEQ ID NO: 473570 - RNA, 32 nt, Human
gucagccucuucuccccaugcuucuaggaacu

SEQ ID NO: 473571 - RNA, 32 nt, Human
gucagccugacuggugguuacacagggcuaua

SEQ ID NO: 473572 - RNA, 32 nt, Human
gucagccugagacucucagagcacgacggcca

SEQ ID NO: 473573 - RNA, 32 nt, Human
gucagccugccugaggcuucucuccuggggca

SEQ ID NO: 473574 - RNA, 32 nt, Human
gucagccugccuggcguccccuugccucagca

SEQ ID NO: 473575 - RNA, 32 nt, Human
gucagccuggcucucgggaaauucagccauga

SEQ ID NO: 473576 - RNA, 32 nt, Human
gucagccuggguggcugggcccggcuuagggc

SEQ ID NO: 473577 - RNA, 32 nt, Human
gucagccugugcaaaggccccguggccagggg

SEQ ID NO: 473578 - RNA, 32 nt, Human
gucagccuucaauccccuuuccuuccucuuuu

SEQ ID NO: 473579 - RNA, 32 nt, Human
gucagccuuccacugaauacacgauugagucu

SEQ ID NO: 473580 - RNA, 32 nt, Human
gucagccuucccuguucuccagccuagguggu

SEQ ID NO: 473581 - RNA, 32 nt, Human
gucagccuucccuuugauccucaggcccuacc

SEQ ID NO: 473582 - RNA, 32 nt, Human
gucagccuucucucccccauaaggacuggcug

SEQ ID NO: 473583 - RNA, 24 nt, Human
gucagcgagccgugagaugcgugg

SEQ ID NO: 473584 - RNA, 32 nt, Human
gucagcgagggaagguugaggaggagccagag

SEQ ID NO: 473585 - RNA, 32 nt, Human
gucagcgccgcucggacgccgccggcaccaug

SEQ ID NO: 473586 - RNA, 32 nt, Human
gucagcggaaggcaggugcggagauaaaggag

SEQ ID NO: 473587 - RNA, 32 nt, Human
gucagcggagucguggcugagcagaacacgcc

SEQ ID NO: 473588 - RNA, 32 nt, Human
gucagcgggcaccagccgcuuccugugcccau

SEQ ID NO: 473589 - RNA, 32 nt, Human
gucagcggggugggcucagaccugcagacucc

SEQ ID NO: 473590 - RNA, 32 nt, Human
gucagcgugcagaaaccagcugucugcugaug

SEQ ID NO: 473591 - RNA, 32 nt, Human
gucagcguguggugucgccugcaugggucgua

SEQ ID NO: 473592 - RNA, 32 nt, Human
gucagcuaacuucagccugugcugcugggccc

SEQ ID NO: 473593 - RNA, 23 nt, Human
gucagcuagauugaaaacucuga

SEQ ID NO: 473594 - RNA, 24 nt, Human
gucagcuaggcugaaguguagugg

SEQ ID NO: 473595 - RNA, 32 nt, Human
gucagcuaggggcugguguggaagaggagcuc

SEQ ID NO: 473596 - RNA, 32 nt, Human
gucagcuagucauuccugucauauucccagua

SEQ ID NO: 473597 - RNA, 32 nt, Human
gucagcucacugcaaccuccaccuccuggauu

SEQ ID NO: 473598 - RNA, 32 nt, Human
gucagcucagccuccaaaggagccagccucuc

SEQ ID NO: 473599 - RNA, 18 nt, Human
gucagcucagggcccugu

SEQ ID NO: 473600 - RNA, 32 nt, Human
gucagcucauucuugccuuacuccaaugaugg

SEQ ID NO: 473601 - RNA, 32 nt, Human
gucagcucauuuccauuccacuauuucccaua

SEQ ID NO: 473602 - RNA, 32 nt, Human
gucagcuccccuacacacaccccacaccuuca

SEQ ID NO: 473603 - RNA, 18 nt, Human
gucagcuccuccugcaag

SEQ ID NO: 473604 - RNA, 32 nt, Human
gucagcuccuggcucccugccucucucccacu

SEQ ID NO: 473605 - RNA, 20 nt, Human
gucagcuccugugcauucuc

SEQ ID NO: 473606 - RNA, 32 nt, Human
gucagcucuaauuguucaccacagaacucaua

SEQ ID NO: 473607 - RNA, 32 nt, Human
gucagcucuggccucugcuucuacacauggac

SEQ ID NO: 473608 - RNA, 32 nt, Human
gucagcucuguaauuauaguaucacuuagaca

SEQ ID NO: 473609 - RNA, 32 nt, Human
gucagcucugugcugagccuccuggccuggcc

SEQ ID NO: 473610 - RNA, 32 nt, Human
gucagcugagaagagugaggcagcgccuccgg

SEQ ID NO: 473611 - RNA, 19 nt, Human
gucagcugagagcauccuc

SEQ ID NO: 473612 - RNA, 21 nt, Human
gucagcugaggggccugcaca

SEQ ID NO: 473613 - RNA, 32 nt, Human
gucagcugcagcaauggaauacgugcuggaag

SEQ ID NO: 473614 - RNA, 32 nt, Human
gucagcugcccgccugcgccuccugagccaga

SEQ ID NO: 473615 - RNA, 32 nt, Human
gucagcugcgggcucccaggccuaggcgccca

SEQ ID NO: 473616 - RNA, 32 nt, Human
gucagcugcguggacuaugacauccuauuugc

SEQ ID NO: 473617 - RNA, 20 nt, Human
gucagcuggaugaugccaca

SEQ ID NO: 473618 - RNA, 32 nt, Human
gucagcuggccaaacaacuaaagcccacuugc

SEQ ID NO: 473619 - RNA, 32 nt, Human
gucagcuggucuucagcuugacccuagaauug

SEQ ID NO: 473620 - RNA, 25 nt, Human
gucagcuguaaguaggagcuacaca

SEQ ID NO: 473621 - RNA, 32 nt, Human
gucagcugucacccaggaccuaggcagggaug

SEQ ID NO: 473622 - RNA, 32 nt, Human
gucagcugucuuucagaagaccugguggggca

SEQ ID NO: 473623 - RNA, 32 nt, Human
gucagcuguguaugucccuugaugucacccug

SEQ ID NO: 473624 - RNA, 32 nt, Human
gucagcuuaaccauuuccuaugugccaagcug

SEQ ID NO: 473625 - RNA, 32 nt, Human
gucagcuucagcuuucuccaucgaaaucccau

SEQ ID NO: 473626 - RNA, 32 nt, Human
gucagcuucauugcuuacuacugugaaauaag

SEQ ID NO: 473627 - RNA, 32 nt, Human
gucagcuuccuugagccugggccacuccuccc

SEQ ID NO: 473628 - RNA, 18 nt, Human
gucagcuuggcucgggga

SEQ ID NO: 473629 - RNA, 32 nt, Human
gucagcuugugccgcauccccaaccaauccac

SEQ ID NO: 473630 - RNA, 32 nt, Human
gucagcuuucagggcucugaaacccuauuccc

SEQ ID NO: 473631 - RNA, 32 nt, Human
gucagcuuucuuuccugagucuuccuuaccua

SEQ ID NO: 473632 - RNA, 32 nt, Human
gucagcuuugcaccaggagacagaggcagcug

SEQ ID NO: 473633 - RNA, 32 nt, Human
gucagcuuuugcuacaauuccaugccuguccc

SEQ ID NO: 473634 - RNA, 32 nt, Human
gucaggaaaccagcucguggacaggggcuuug

SEQ ID NO: 473635 - RNA, 32 nt, Human
gucaggaaagaguagacuguuaagaagaccga

SEQ ID NO: 473636 - RNA, 32 nt, Human
gucaggaaauuccaaguugguuaucacaacuc

SEQ ID NO: 473637 - RNA, 32 nt, Human
gucaggaaggugcaguuuuucuucucaaucua

SEQ ID NO: 473638 - RNA, 31 nt, Human
gucaggaauguaggaacugguauccauucug

SEQ ID NO: 473639 - RNA, 32 nt, Human
gucaggacaagaggaagcaagggaugcagcua

SEQ ID NO: 473640 - RNA, 22 nt, Human
gucaggacaauuaggauuguaa

SEQ ID NO: 473641 - RNA, 18 nt, Human
gucaggaccagccugguc

SEQ ID NO: 473642 - RNA, 31 nt, Human
gucaggacccaacucacuugguguaacagau

SEQ ID NO: 473643 - RNA, 32 nt, Human
gucaggaccucuggcccuacuaggcuguagac

SEQ ID NO: 473644 - RNA, 32 nt, Human
gucaggaccuugccuugaaagccgggcggcgc

SEQ ID NO: 473645 - RNA, 32 nt, Human
gucaggacugcagcuccagccucuucaggccc

SEQ ID NO: 473646 - RNA, 32 nt, Human
gucaggagaauggugugaucaccugucacaga

SEQ ID NO: 473647 - RNA, 32 nt, Human
gucaggagaccucuguauggcuuuucaauuuu

SEQ ID NO: 473648 - RNA, 32 nt, Human
gucaggagaccugggucccucucccagcuugu

SEQ ID NO: 473649 - RNA, 32 nt, Human
gucaggagagaaggccugauaggagccuucag

SEQ ID NO: 473650 - RNA, 32 nt, Human
gucaggagagaggugcagggaggaaggccuug

SEQ ID NO: 473651 - RNA, 32 nt, Human
gucaggagagcccucugcugcuuuccaacaca

SEQ ID NO: 473652 - RNA, 32 nt, Human
gucaggagagccuucugggcaguggcucuaac

SEQ ID NO: 473653 - RNA, 32 nt, Human
gucaggagcccaggccagugagauggggccug

SEQ ID NO: 473654 - RNA, 21 nt, Human
gucaggaggaagucacaggga

SEQ ID NO: 473655 - RNA, 32 nt, Human
gucaggaggcuggaguggagggaaggcagggg

SEQ ID NO: 473656 - RNA, 32 nt, Human
gucaggagguggagguugcagugagccaagau

SEQ ID NO: 473657 - RNA, 32 nt, Human
gucaggagguugaggcugcagugagcuaugac

SEQ ID NO: 473658 - RNA, 32 nt, Human
gucaggaguaggcugaggcagccuucuggugc

SEQ ID NO: 473659 - RNA, 32 nt, Human
gucaggagucacugagaaggaggcagauggag

SEQ ID NO: 473660 - RNA, 32 nt, Human
gucaggaguucaagacaagaccagccuggcca

SEQ ID NO: 473661 - RNA, 32 nt, Human
gucaggaguucaagaucaggaccaacauggug

SEQ ID NO: 473662 - RNA, 32 nt, Human
gucaggaguucacgcaaaucagggggcccgug

SEQ ID NO: 473663 - RNA, 32 nt, Human
gucaggaguucgagaccaaccuagccaacaug

SEQ ID NO: 473664 - RNA, 32 nt, Human
gucaggaguucgagaccagccuagccaacaug

SEQ ID NO: 473665 - RNA, 32 nt, Human
gucaggaguuugagaccagccuagccaacaug

SEQ ID NO: 473666 - RNA, 32 nt, Human
gucaggaguuugagaccagugugcaaaacaua

SEQ ID NO: 473667 - RNA, 32 nt, Human
gucaggauacagauuuccaaggccaacuguug

SEQ ID NO: 473668 - RNA, 32 nt, Human
gucaggaucaaaacacauuuagugugacuuag

SEQ ID NO: 473669 - RNA, 31 nt, Human
gucaggauggcagaggagcaggaguucaccc

SEQ ID NO: 473670 - RNA, 32 nt, Human
gucaggauguucuccaacuccugacuucauga

SEQ ID NO: 473671 - RNA, 32 nt, Human
gucaggauucaaaaccagccuggccaacauag

SEQ ID NO: 473672 - RNA, 32 nt, Human
gucaggauugugccuccagucagaaggaccau

SEQ ID NO: 473673 - RNA, 32 nt, Human
gucaggcaaaacuaaugaacguggaguuaaug

SEQ ID NO: 473674 - RNA, 32 nt, Human
gucaggcaaauuuaacaaaccugcacaugugc

SEQ ID NO: 473675 - RNA, 32 nt, Human
gucaggcaauaugcccuugagcaggucacccc

SEQ ID NO: 473676 - RNA, 32 nt, Human
gucaggcacaaggguuuggauuuugugcaagc

SEQ ID NO: 473677 - RNA, 32 nt, Human
gucaggcaccagcauggagaccucaugacaaa

SEQ ID NO: 473678 - RNA, 32 nt, Human
gucaggcacugagcuccuacacaggucacugu

SEQ ID NO: 473679 - RNA, 32 nt, Human
gucaggcagaggcugaaaaugcccggcugcag

SEQ ID NO: 473680 - RNA, 32 nt, Human
gucaggcagggagcccuucuccccacagagcu

SEQ ID NO: 473681 - RNA, 31 nt, Human
gucaggcaguuuccaucuucucacaaucuuc

SEQ ID NO: 473682 - RNA, 32 nt, Human
gucaggcauuccucacucccaccaggcagaag

SEQ ID NO: 473683 - RNA, 32 nt, Human
gucaggccaaaauccuuggagccacccucaac

SEQ ID NO: 473684 - RNA, 32 nt, Human
gucaggccacacacuuuagucuuccgucuuuu

SEQ ID NO: 473685 - RNA, 32 nt, Human
gucaggccaccagggggcgccagagaaccaca

SEQ ID NO: 473686 - RNA, 32 nt, Human
gucaggccacuggccaguggggaccagccucu

SEQ ID NO: 473687 - RNA, 32 nt, Human
gucaggccaggccaccaccacuggggagcggg

SEQ ID NO: 473688 - RNA, 20 nt, Human
gucaggccaggccgggucca

SEQ ID NO: 473689 - RNA, 32 nt, Human
gucaggcccagaagggcucuggggaggggaag

SEQ ID NO: 473690 - RNA, 32 nt, Human
gucaggcccaggcugagugagaugagcugcag

SEQ ID NO: 473691 - RNA, 32 nt, Human
gucaggcccauccugguugucaccaugaggac

SEQ ID NO: 473692 - RNA, 18 nt, Human
gucaggccccagaggagc

SEQ ID NO: 473693 - RNA, 32 nt, Human
gucaggccuaaagagccccacagggaaaggga

SEQ ID NO: 473694 - RNA, 32 nt, Human
gucaggccucacgguggccucuccaggaugag

SEQ ID NO: 473695 - RNA, 32 nt, Human
gucaggccucugggucaggccucugccaccuc

SEQ ID NO: 473696 - RNA, 32 nt, Human
gucaggccuggaccuccugggcaggaaagggu

SEQ ID NO: 473697 - RNA, 32 nt, Human
gucaggccuggcccagguccuuauacuccccu

SEQ ID NO: 473698 - RNA, 32 nt, Human
gucaggcgggggcgcuccugcccaggccacgg

SEQ ID NO: 473699 - RNA, 32 nt, Human
gucaggcggguguucaccacugccuuuucuuc

SEQ ID NO: 473700 - RNA, 32 nt, Human
gucaggcuacugucugugauucuuuuguuugu

SEQ ID NO: 473701 - RNA, 32 nt, Human
gucaggcuagucuugaacuccugggcccaagc

SEQ ID NO: 473702 - RNA, 22 nt, Human
gucaggcucagguuccauggga

SEQ ID NO: 473703 - RNA, 32 nt, Human
gucaggcucagguuucccugcuguuggcuuuc

SEQ ID NO: 473704 - RNA, 32 nt, Human
gucaggcucuuaccuccaccuccagggcacag

SEQ ID NO: 473705 - RNA, 32 nt, Human
gucaggcuggucucaaacugaccucaggugau

SEQ ID NO: 473706 - RNA, 32 nt, Human
gucaggcuuagaagauggagaaagcacuggaa

SEQ ID NO: 473707 - RNA, 32 nt, Human
gucaggcuuccuggugagccucagggagugca

SEQ ID NO: 473708 - RNA, 19 nt, Human
gucaggcuuggcucuggga

SEQ ID NO: 473709 - RNA, 32 nt, Human
gucaggcuuguccugggccaggaggagcugag

SEQ ID NO: 473710 - RNA, 32 nt, Human
gucagggaaaagcagaagcgucugccacagau

SEQ ID NO: 473711 - RNA, 32 nt, Human
gucagggaaauguuaaaaacugcaagagaaag

SEQ ID NO: 473712 - RNA, 32 nt, Human
gucagggaagaaagacuucucaaggaggugcc

SEQ ID NO: 473713 - RNA, 32 nt, Human
gucagggaagaccacagaagccuagcacagcu

SEQ ID NO: 473714 - RNA, 32 nt, Human
gucagggaagcacagugaagcuugcuuaaagg

SEQ ID NO: 473715 - RNA, 32 nt, Human
gucagggaauuucauaucuuugcucaaaaucu

SEQ ID NO: 473716 - RNA, 32 nt, Human
gucagggacuggucacagggagggcucagagg

SEQ ID NO: 473717 - RNA, 32 nt, Human
gucagggagaggaggcggcgagagaggacugc

SEQ ID NO: 473718 - RNA, 32 nt, Human
gucagggagauggagucaguggggcauugcag

SEQ ID NO: 473719 - RNA, 32 nt, Human
gucagggagggaaaggaggagggagagagaug

SEQ ID NO: 473720 - RNA, 32 nt, Human
gucagggagggcagaggguggcagcgagggca

SEQ ID NO: 473721 - RNA, 32 nt, Human
gucagggaggugggaaggugggugggccugaa

SEQ ID NO: 473722 - RNA, 32 nt, Human
gucagggcacacucugcuccaccagcuucuug

SEQ ID NO: 473723 - RNA, 32 nt, Human
gucagggcagugccaugcugaccugcugaccg

SEQ ID NO: 473724 - RNA, 32 nt, Human
gucagggccacauugggcucacagaccucagc

SEQ ID NO: 473725 - RNA, 32 nt, Human
gucagggccaggaaguagaggcugggaacucu

SEQ ID NO: 473726 - RNA, 20 nt, Human
gucagggccagggccagaga

SEQ ID NO: 473727 - RNA, 32 nt, Human
gucagggcccagagaguggguggagaagcucu

SEQ ID NO: 473728 - RNA, 31 nt, Human
gucagggccuaggaugggccugugucaccag

SEQ ID NO: 473729 - RNA, 32 nt, Human
gucagggccucgggggcccagcuauguacaac

SEQ ID NO: 473730 - RNA, 32 nt, Human
gucagggcuaggaggcaggggcugcaggcuca

SEQ ID NO: 473731 - RNA, 32 nt, Human
gucagggcucccgcuucauauuuccuuuucuu

SEQ ID NO: 473732 - RNA, 32 nt, Human
gucagggcugaggaggagaagcaggggcagga

SEQ ID NO: 473733 - RNA, 32 nt, Human
gucagggcuucuggguucccuuaacuuugugc

SEQ ID NO: 473734 - RNA, 32 nt, Human
gucaggggacucaggcuuaugaggagguauug

SEQ ID NO: 473735 - RNA, 32 nt, Human
gucaggggagagaggggaggaaagccaaggga

SEQ ID NO: 473736 - RNA, 32 nt, Human
gucaggggcuggugccugggagcugaugaagc

SEQ ID NO: 473737 - RNA, 32 nt, Human
gucagggguccaccuucucuggcucacagagg

SEQ ID NO: 473738 - RNA, 32 nt, Human
gucagggguuguuucuaccugcuuugucuaaa

SEQ ID NO: 473739 - RNA, 32 nt, Human
gucaggguccaagaggaauggguguucugugg

SEQ ID NO: 473740 - RNA, 32 nt, Human
gucagggugagaggcugcucuggagaacaaug

SEQ ID NO: 473741 - RNA, 32 nt, Human
gucagggugagugggagcccaggaaggagcga

SEQ ID NO: 473742 - RNA, 32 nt, Human
gucagggugaugaucuucugaagcucuuggau

SEQ ID NO: 473743 - RNA, 32 nt, Human
gucagggugggaggaaaacuguugaaguauua

SEQ ID NO: 473744 - RNA, 32 nt, Human
gucagggugguguggcgguugcagcggccccu

SEQ ID NO: 473745 - RNA, 32 nt, Human
gucaggguugcagaaucagccggacuuuccug

SEQ ID NO: 473746 - RNA, 32 nt, Human
gucaggguuucaggaguccagccccaggaggc

SEQ ID NO: 473747 - RNA, 32 nt, Human
gucagguaaggguuuccacucugcacauugua

SEQ ID NO: 473748 - RNA, 32 nt, Human
gucagguacaagguuuguagcuugccaauaug

SEQ ID NO: 473749 - RNA, 19 nt, Human
gucagguagggcacagggg

SEQ ID NO: 473750 - RNA, 32 nt, Human
gucagguagggugagagaggcccugaagauag

SEQ ID NO: 473751 - RNA, 32 nt, Human
gucagguaggguggggccggugggagaggccc

SEQ ID NO: 473752 - RNA, 32 nt, Human
gucagguauaccaaagcauuccucugacugcu

SEQ ID NO: 473753 - RNA, 32 nt, Human
gucaggucagcugccuugauuucccucuccca

SEQ ID NO: 473754 - RNA, 32 nt, Human
gucaggucauguuugaaaccaugcuuggcugg

SEQ ID NO: 473755 - RNA, 32 nt, Human
gucaggugcugaagggacauugggagaaguga

SEQ ID NO: 473756 - RNA, 32 nt, Human
gucaggugcugcaaauuggaaagaagacuugu

SEQ ID NO: 473757 - RNA, 32 nt, Human
gucagguggggaggggacaccaagggcccauu

SEQ ID NO: 473758 - RNA, 32 nt, Human
gucaggugucgcgugguccugaucuaggaaga

SEQ ID NO: 473759 - RNA, 31 nt, Human
gucagguguuuccguaccacagcaggagcag

SEQ ID NO: 473760 - RNA, 32 nt, Human
gucagguucaugguuacgaagcugcugacccc

SEQ ID NO: 473761 - RNA, 32 nt, Human
gucagguuguaauacaggccaagcagacgggc

SEQ ID NO: 473762 - RNA, 32 nt, Human
gucaguaacacaaaugauguauucagugaaua

SEQ ID NO: 473763 - RNA, 32 nt, Human
gucaguaacacauguguaagagccgcggaggg

SEQ ID NO: 473764 - RNA, 32 nt, Human
gucaguaaccaccaacaccaugccucugguuc

SEQ ID NO: 473765 - RNA, 21 nt, Human
gucaguaagugguguguucaa

SEQ ID NO: 473766 - RNA, 32 nt, Human
gucaguaauuuccaaugggcgggaggcauuaa

SEQ ID NO: 473767 - RNA, 32 nt, Human
gucaguacauccuucagcgagugccuuacucu

SEQ ID NO: 473768 - RNA, 32 nt, Human
gucaguaccagcccuuguccucugccugugga

SEQ ID NO: 473769 - RNA, 32 nt, Human
gucaguacccuuaccagccacugguaaccauu

SEQ ID NO: 473770 - RNA, 32 nt, Human
gucaguacugcacugcaagaauggcagauuuu

SEQ ID NO: 473771 - RNA, 32 nt, Human
gucaguacuguacaucugcacacugguguuaa

SEQ ID NO: 473772 - RNA, 32 nt, Human
gucaguacuguuggacccauagguagccucau

SEQ ID NO: 473773 - RNA, 32 nt, Human
gucaguagcugcuuucugagcuacucaacaag

SEQ ID NO: 473774 - RNA, 32 nt, Human
gucaguaggaugaccuccacccuccuuggaca

SEQ ID NO: 473775 - RNA, 32 nt, Human
gucagucacaaaccaaacgaagguucuacuua

SEQ ID NO: 473776 - RNA, 32 nt, Human
gucagucaccaugugugggcucagggaccccc

SEQ ID NO: 473777 - RNA, 32 nt, Human
gucagucaggcagggagggaguggcuguguug

SEQ ID NO: 473778 - RNA, 32 nt, Human
gucaguccaggcccugaauggcuggucuccag

SEQ ID NO: 473779 - RNA, 32 nt, Human
gucaguccauacagcaagacaccuggcacuug

SEQ ID NO: 473780 - RNA, 32 nt, Human
gucagucccaggugaggccaaggcuuucuggc

SEQ ID NO: 473781 - RNA, 32 nt, Human
gucaguccccauccuccuccccucagccccca

SEQ ID NO: 473782 - RNA, 32 nt, Human
gucagucccuguucuugagccucuuuucuccu

SEQ ID NO: 473783 - RNA, 32 nt, Human
gucaguccuaggcuggaugggaggguggcccc

SEQ ID NO: 473784 - RNA, 32 nt, Human
gucaguccucaccaaguuuuccagaucauucc

SEQ ID NO: 473785 - RNA, 32 nt, Human
gucaguccugaggaaaaauauuggggacucca

SEQ ID NO: 473786 - RNA, 32 nt, Human
gucaguccuggacuugugcaggccuguuuugu

SEQ ID NO: 473787 - RNA, 32 nt, Human
gucaguccuguguauaccuagauauuagucag

SEQ ID NO: 473788 - RNA, 32 nt, Human
gucagucgggugccgagauuugggagagacgc

SEQ ID NO: 473789 - RNA, 19 nt, Human
gucagucucacuucugcug

SEQ ID NO: 473790 - RNA, 32 nt, Human
gucagucucuacugggacauguuaggcccuug

SEQ ID NO: 473791 - RNA, 32 nt, Human
gucagucucuuccugcacccaaaggcagaaca

SEQ ID NO: 473792 - RNA, 32 nt, Human
gucagucucuuuucacacauugcaucaguuuc

SEQ ID NO: 473793 - RNA, 32 nt, Human
gucagucugcagaauggucgcacuggagguuc

SEQ ID NO: 473794 - RNA, 32 nt, Human
gucagucuggccugagggguggauggcuggcc

SEQ ID NO: 473795 - RNA, 32 nt, Human
gucagucugucucuuuuucagcucaauuguau

SEQ ID NO: 473796 - RNA, 32 nt, Human
gucagucuuaauucccaugccaaaggacaaac

SEQ ID NO: 473797 - RNA, 32 nt, Human
gucagucuuccacguguaaacaacagugugug

SEQ ID NO: 473798 - RNA, 20 nt, Human
gucagugaaaauauguacaa

SEQ ID NO: 473799 - RNA, 20 nt, Human
gucagugaagaggggcucag

SEQ ID NO: 473800 - RNA, 23 nt, Human
gucagugacucaaauaucucuuu

SEQ ID NO: 473801 - RNA, 32 nt, Human
gucagugacuccugccccuuggucuucagugu

SEQ ID NO: 473802 - RNA, 32 nt, Human
gucagugacugagaaagggugggugggacuag

SEQ ID NO: 473803 - RNA, 32 nt, Human
gucagugacugucagacaucuuccugcuuauu

SEQ ID NO: 473804 - RNA, 32 nt, Human
gucagugacuuucuccaauucucccuccuuuu

SEQ ID NO: 473805 - RNA, 20 nt, Human
gucagugagaggaaugucca

SEQ ID NO: 473806 - RNA, 32 nt, Human
gucagugagccccuuccuuggccaugaagcuc

SEQ ID NO: 473807 - RNA, 32 nt, Human
gucagugaggaagaauugggccaugcuaacgu

SEQ ID NO: 473808 - RNA, 21 nt, Human
gucagugaggaugaggcucag

SEQ ID NO: 473809 - RNA, 32 nt, Human
gucagugagggugggguggaggacuccuaaag

SEQ ID NO: 473810 - RNA, 24 nt, Human
gucagugagguggggaaaggaagu

SEQ ID NO: 473811 - RNA, 32 nt, Human
gucagugcaauaacaaaccuuccuuuuuaaga

SEQ ID NO: 473812 - RNA, 32 nt, Human
gucagugcagcgguuacucugggagguggagg

SEQ ID NO: 473813 - RNA, 32 nt, Human
gucagugcccaacuguuauagguuguuggaua

SEQ ID NO: 473814 - RNA, 32 nt, Human
gucagugccgggcucacacugcagucuauccc

SEQ ID NO: 473815 - RNA, 32 nt, Human
gucagugccugagauacaccuacaagagcgcc

SEQ ID NO: 473816 - RNA, 32 nt, Human
gucagugccugccucgauaccucucucugcag

SEQ ID NO: 473817 - RNA, 32 nt, Human
gucagugcgguggaggaagugcgaagccaugu

SEQ ID NO: 473818 - RNA, 32 nt, Human
gucagugcucucagcuggcagugcaaugcuug

SEQ ID NO: 473819 - RNA, 21 nt, Human
gucaguggaaaagggguucaa

SEQ ID NO: 473820 - RNA, 32 nt, Human
gucaguggaagagaguagagcucaaaacugga

SEQ ID NO: 473821 - RNA, 32 nt, Human
gucaguggagccagcacccucugcugcuucag

SEQ ID NO: 473822 - RNA, 26 nt, Human
gucaguggaguguucgggaugcaggg

SEQ ID NO: 473823 - RNA, 32 nt, Human
gucaguggcaaagcugcaucugaagggcggcc

SEQ ID NO: 473824 - RNA, 21 nt, Human
gucaguggccaaggcuacaca

SEQ ID NO: 473825 - RNA, 32 nt, Human
gucaguggccuuuccuccuucugggugcccag

SEQ ID NO: 473826 - RNA, 32 nt, Human
gucaguggcggcuguccccuccccagcccagc

SEQ ID NO: 473827 - RNA, 20 nt, Human
gucagugggaaagagcucaa

SEQ ID NO: 473828 - RNA, 32 nt, Human
gucaguggggcucucugaguccuggcccaaag

SEQ ID NO: 473829 - RNA, 32 nt, Human
gucagugggggucagccaggagcccagggagu

SEQ ID NO: 473830 - RNA, 32 nt, Human
gucagugggugagguguuccgccugggccggc

SEQ ID NO: 473831 - RNA, 32 nt, Human
gucagugguggcaccaggauggaagggcaagg

SEQ ID NO: 473832 - RNA, 32 nt, Human
gucagugguguaacuuggaggaagaugcuuag

SEQ ID NO: 473833 - RNA, 32 nt, Human
gucagugguuccaccuucacaggccacuuuga

SEQ ID NO: 473834 - RNA, 32 nt, Human
gucaguguaaucuccaagguccuggccuuucc

SEQ ID NO: 473835 - RNA, 32 nt, Human
gucaguguagcagcguagcagagaagcagaga

SEQ ID NO: 473836 - RNA, 32 nt, Human
gucaguguccccaucaugguggcuaugaagcu

SEQ ID NO: 473837 - RNA, 32 nt, Human
gucagugucuccugcccugacuccacaucauu

SEQ ID NO: 473838 - RNA, 32 nt, Human
gucagugucuugcucauucuucaugacacucc

SEQ ID NO: 473839 - RNA, 32 nt, Human
gucagugugagaagaagauuguuucugagcuu

SEQ ID NO: 473840 - RNA, 19 nt, Human
gucagugugauaccagcag

SEQ ID NO: 473841 - RNA, 32 nt, Human
gucagugugcaggggacucaggggcuuggccc

SEQ ID NO: 473842 - RNA, 32 nt, Human
gucaguguuuuguucuauccaggcuuucagau

SEQ ID NO: 473843 - RNA, 32 nt, Human
gucaguuauagaggaggcucaggaggaucugg

SEQ ID NO: 473844 - RNA, 32 nt, Human
gucaguuaucaugucccugaaagggacauucu

SEQ ID NO: 473845 - RNA, 32 nt, Human
gucaguuauguuauggaccaaaagccaaaucu

SEQ ID NO: 473846 - RNA, 31 nt, Human
gucaguuauucauguuuucauuuaaaguuuu

SEQ ID NO: 473847 - RNA, 32 nt, Human
gucaguucaagaccagccuggccaaacauggu

SEQ ID NO: 473848 - RNA, 32 nt, Human
gucaguucaagaccagccuggccaacauggug

SEQ ID NO: 473849 - RNA, 32 nt, Human
gucaguucagggcauuuuagggcugucuugcu

SEQ ID NO: 473850 - RNA, 32 nt, Human
gucaguucaguaggagaguucacacuggcccc

SEQ ID NO: 473851 - RNA, 32 nt, Human
gucaguucauguccaaagcacuuuaggaggcu

SEQ ID NO: 473852 - RNA, 32 nt, Human
gucaguucccagagguccugggacaggggaga

SEQ ID NO: 473853 - RNA, 32 nt, Human
gucaguucccucaucagcaccagaggcucagc

SEQ ID NO: 473854 - RNA, 32 nt, Human
gucaguuccugccuuuucucaucagcagaaca

SEQ ID NO: 473855 - RNA, 32 nt, Human
gucaguuccuggcgaagccucucuucuagguu

SEQ ID NO: 473856 - RNA, 32 nt, Human
gucaguucugaaggagggugaggcgguggggg

SEQ ID NO: 473857 - RNA, 32 nt, Human
gucaguugacucugauauucauucccaaauga

SEQ ID NO: 473858 - RNA, 32 nt, Human
gucaguugauuuucaacaauggugcuaaaaca

SEQ ID NO: 473859 - RNA, 32 nt, Human
gucaguugccuggcuccuggggccagaguuuc

SEQ ID NO: 473860 - RNA, 32 nt, Human
gucaguugcuuacuuauuuugcucuggaugag

SEQ ID NO: 473861 - RNA, 32 nt, Human
gucaguugggcaacagugaaaauuuucuuuua

SEQ ID NO: 473862 - RNA, 32 nt, Human
gucaguugugcaucaaggcuacucgggggaua

SEQ ID NO: 473863 - RNA, 23 nt, Human
gucaguuguuguuccuguacucg

SEQ ID NO: 473864 - RNA, 32 nt, Human
gucaguuuagagaccuuucuguguuaaugccu

SEQ ID NO: 473865 - RNA, 32 nt, Human
gucaguuuagaggcaguggccugggaacuggc

SEQ ID NO: 473866 - RNA, 24 nt, Human
gucaguuuaggcugggcgcagugg

SEQ ID NO: 473867 - RNA, 32 nt, Human
gucaguuuaguuaaguagaugcaguccccgca

SEQ ID NO: 473868 - RNA, 32 nt, Human
gucaguuucuauaauggcaucuuacauggcau

SEQ ID NO: 473869 - RNA, 32 nt, Human
gucaguuugagaccagccugggcaacauggug

SEQ ID NO: 473870 - RNA, 32 nt, Human
gucaguuugggauucucuucagaaagauggca

SEQ ID NO: 473871 - RNA, 32 nt, Human
gucaguuuucccucaaugcccaaggcucagca

SEQ ID NO: 473872 - RNA, 32 nt, Human
gucauaaaccuacaccaaugcccagcaaucac

SEQ ID NO: 473873 - RNA, 32 nt, Human
gucauaaagaggaggagaaacagggugaguca

SEQ ID NO: 473874 - RNA, 32 nt, Human
gucauaaaguccuccuugagcccagggaccau

SEQ ID NO: 473875 - RNA, 21 nt, Human
gucauaaauuauuuccccggu

SEQ ID NO: 473876 - RNA, 32 nt, Human
gucauaaccaacauaugaacagacagauuuau

SEQ ID NO: 473877 - RNA, 32 nt, Human
gucauaacuucuguuacuccuuuggcccauag

SEQ ID NO: 473878 - RNA, 32 nt, Human
gucauacaacacagcuaaccauuaugccaauc

SEQ ID NO: 473879 - RNA, 18 nt, Human
gucauacaguaaacucug

SEQ ID NO: 473880 - RNA, 32 nt, Human
gucauaccagugcacuccaggcgggugacaga

SEQ ID NO: 473881 - RNA, 32 nt, Human
gucauaccauuucaccuaucauaguacucaaa

SEQ ID NO: 473882 - RNA, 32 nt, Human
gucauaccuaggacagguaugaccucugccca

SEQ ID NO: 473883 - RNA, 32 nt, Human
gucauaccucacugcggccucaaacuccuggg

SEQ ID NO: 473884 - RNA, 32 nt, Human
gucauaccuccuucuauuaggaauggcauaua

SEQ ID NO: 473885 - RNA, 32 nt, Human
gucauacuguuuucuuugccuugaaggggaac

SEQ ID NO: 473886 - RNA, 32 nt, Human
gucauagaauggggacauuagacugaaaacug

SEQ ID NO: 473887 - RNA, 32 nt, Human
gucauagacuuuucuuuuuaaccuucugcaaa

SEQ ID NO: 473888 - RNA, 19 nt, Human
gucauagaugaagcucuga

SEQ ID NO: 473889 - RNA, 32 nt, Human
gucauagcucacugcagccucgaacuccuggg

SEQ ID NO: 473890 - RNA, 32 nt, Human
gucauagcuguagaggggcagaugugguuuga

SEQ ID NO: 473891 - RNA, 32 nt, Human
gucauaguggccaccagugagucacaucuaug

SEQ ID NO: 473892 - RNA, 32 nt, Human
gucauaguucacugcagccuugaacucuuugg

SEQ ID NO: 473893 - RNA, 32 nt, Human
gucauaucaggccacaggaagcggggcaggga

SEQ ID NO: 473894 - RNA, 32 nt, Human
gucauaucugcugccucuguccagagcgccag

SEQ ID NO: 473895 - RNA, 32 nt, Human
gucauaugacaaaggcauucacugcagcauua

SEQ ID NO: 473896 - RNA, 32 nt, Human
gucauauguuaaaaauaaagagauguagaaau

SEQ ID NO: 473897 - RNA, 32 nt, Human
gucauauugaacaccagucucuuagaaaguua

SEQ ID NO: 473898 - RNA, 23 nt, Human
gucauauugacacugguauuuua

SEQ ID NO: 473899 - RNA, 32 nt, Human
gucauauuuguaacguggagagaacacggagc

SEQ ID NO: 473900 - RNA, 23 nt, Human
gucaucaaacagagcuucuuccu

SEQ ID NO: 473901 - RNA, 32 nt, Human
gucaucaaacuggccauguccuggccccgucu

SEQ ID NO: 473902 - RNA, 32 nt, Human
gucaucacagaggcagguacacgacaccacgg

SEQ ID NO: 473903 - RNA, 32 nt, Human
gucaucacccucuacaccauguuugucaccug

SEQ ID NO: 473904 - RNA, 20 nt, Human
gucaucacuuaaaauauuga

SEQ ID NO: 473905 - RNA, 32 nt, Human
gucaucagaagaggaaaaaugaagguaauguu

SEQ ID NO: 473906 - RNA, 32 nt, Human
gucaucagaagagggaggaggagcccaggcgu

SEQ ID NO: 473907 - RNA, 32 nt, Human
gucaucagagagguggcaguggagguuuguua

SEQ ID NO: 473908 - RNA, 32 nt, Human
gucaucagaucuucuccugaaaaugggagaca

SEQ ID NO: 473909 - RNA, 32 nt, Human
gucaucaggagaggagaaugaggaugaggccc

SEQ ID NO: 473910 - RNA, 23 nt, Human
gucaucaggcuggagugcagugg

SEQ ID NO: 473911 - RNA, 32 nt, Human
gucaucaggcuggagugcaguggcgcaauuuc

SEQ ID NO: 473912 - RNA, 32 nt, Human
gucaucaggcuggagugcaguggcucacugca

SEQ ID NO: 473913 - RNA, 32 nt, Human
gucaucagguccuagacgugggagaaggagcc

SEQ ID NO: 473914 - RNA, 32 nt, Human
gucaucagugugucaaaagcacaaagaucccc

SEQ ID NO: 473915 - RNA, 23 nt, Human
gucaucauacauguacauuucca

SEQ ID NO: 473916 - RNA, 32 nt, Human
gucaucaucauuguuguggugcugcuaauggg

SEQ ID NO: 473917 - RNA, 32 nt, Human
gucaucaucugucagcaguaccacacugucuu

SEQ ID NO: 473918 - RNA, 32 nt, Human
gucaucaugccacugcacuuccagccugggug

SEQ ID NO: 473919 - RNA, 32 nt, Human
gucaucauucaccauuuauccaggauggccgc

SEQ ID NO: 473920 - RNA, 32 nt, Human
gucaucauucagaacauacagccucgaagggc

SEQ ID NO: 473921 - RNA, 24 nt, Human
gucauccaaacuggagugcagugg

SEQ ID NO: 473922 - RNA, 22 nt, Human
gucauccaagcuggagugcagu

SEQ ID NO: 473923 - RNA, 23 nt, Human
gucauccaagcuggagugcagug

SEQ ID NO: 473924 - RNA, 24 nt, Human
gucauccaagcuggagugcagugg

SEQ ID NO: 473925 - RNA, 32 nt, Human
gucauccaaguggcauuccuaguaaguugggu

SEQ ID NO: 473926 - RNA, 32 nt, Human
gucauccaaucagccaccaaauggcauuaccu

SEQ ID NO: 473927 - RNA, 32 nt, Human
gucauccacugagccuucaucucccaugaacu

SEQ ID NO: 473928 - RNA, 20 nt, Human
gucauccagcagccuccccu

SEQ ID NO: 473929 - RNA, 32 nt, Human
gucauccaggaaaaucggaaagaagcacagua

SEQ ID NO: 473930 - RNA, 24 nt, Human
gucauccaggcuagagugcagugg

SEQ ID NO: 473931 - RNA, 23 nt, Human
gucauccaggcuggagugcagug

SEQ ID NO: 473932 - RNA, 24 nt, Human
gucauccaggcuggagugcagugg

SEQ ID NO: 473933 - RNA, 32 nt, Human
gucaucccaaagugcugagauuacaguuggcg

SEQ ID NO: 473934 - RNA, 32 nt, Human
gucaucccagcacuuugggaagcugaggcgag

SEQ ID NO: 473935 - RNA, 32 nt, Human
gucaucccagcacuuugggaggcugaggcagg

SEQ ID NO: 473936 - RNA, 32 nt, Human
gucaucccagcauuugggaggcugaggcaggc

SEQ ID NO: 473937 - RNA, 17 nt, Human
gucauccccuucuuuga

SEQ ID NO: 473938 - RNA, 32 nt, Human
gucaucccugauuccuccuucuucuuaacccu

SEQ ID NO: 473939 - RNA, 32 nt, Human
gucauccucacagcugcagggccaggugcaug

SEQ ID NO: 473940 - RNA, 32 nt, Human
gucauccucaccaagcucauuacaucugccag

SEQ ID NO: 473941 - RNA, 32 nt, Human
gucauccucccuugccccaggccagguagcaa

SEQ ID NO: 473942 - RNA, 32 nt, Human
gucauccucucaccucacccaccuccgaauga

SEQ ID NO: 473943 - RNA, 32 nt, Human
gucauccugauacuucccugaggucucuuuuc

SEQ ID NO: 473944 - RNA, 32 nt, Human
gucauccugcccagcccugccuccuggccaug

SEQ ID NO: 473945 - RNA, 32 nt, Human
gucauccuggagcacagcucuucccacgcucc

SEQ ID NO: 473946 - RNA, 32 nt, Human
gucauccugucuccuguaccuccugggaaagg

SEQ ID NO: 473947 - RNA, 32 nt, Human
gucauccuuauuauuaaaaugcagccuccaaa

SEQ ID NO: 473948 - RNA, 32 nt, Human
gucaucgaugccugugccgccccaggcaauaa

SEQ ID NO: 473949 - RNA, 32 nt, Human
gucaucggaaguggugccuucagcacagaaga

SEQ ID NO: 473950 - RNA, 32 nt, Human
gucaucgggaaaggcaaagaaacugaaggcag

SEQ ID NO: 473951 - RNA, 32 nt, Human
gucaucgggccagaaggcgugcuggcaggcaa

SEQ ID NO: 473952 - RNA, 32 nt, Human
gucaucguaggugauuugaaggucuugauuug

SEQ ID NO: 473953 - RNA, 17 nt, Human
gucaucguccugcugcc

SEQ ID NO: 473954 - RNA, 32 nt, Human
gucaucguggucgccaucaugagcucgggcau

SEQ ID NO: 473955 - RNA, 32 nt, Human
gucaucguuggagcuuccuaagacucccagag

SEQ ID NO: 473956 - RNA, 32 nt, Human
gucaucuaaaaacuuucuguuuucuggggucu

SEQ ID NO: 473957 - RNA, 32 nt, Human
gucaucuagucgaguccucucauuaguaaagg

SEQ ID NO: 473958 - RNA, 32 nt, Human
gucaucucagaacucuauguccagccauggaa

SEQ ID NO: 473959 - RNA, 32 nt, Human
gucaucucagucuggaacucagucccacuucu

SEQ ID NO: 473960 - RNA, 27 nt, Human
gucaucucauauugaucagguauuuua

SEQ ID NO: 473961 - RNA, 32 nt, Human
gucaucucauccauuuccuccaugucuuugua

SEQ ID NO: 473962 - RNA, 32 nt, Human
gucaucucaugacaacagaagggagguggccg

SEQ ID NO: 473963 - RNA, 32 nt, Human
gucaucuccagaauuauuggggucacauaugu

SEQ ID NO: 473964 - RNA, 32 nt, Human
gucaucuccgggguggccacaggcuagauccc

SEQ ID NO: 473965 - RNA, 32 nt, Human
gucaucuccugggggcccucucuggagccacc

SEQ ID NO: 473966 - RNA, 32 nt, Human
gucaucucugaccuuguuucagcaaaguaaac

SEQ ID NO: 473967 - RNA, 32 nt, Human
gucaucugcagccucugccuccagcccggcag

SEQ ID NO: 473968 - RNA, 32 nt, Human
gucaucugcccagucacccaggaaucagagaa

SEQ ID NO: 473969 - RNA, 31 nt, Human
gucaucugccucugagggaccguccucaccg

SEQ ID NO: 473970 - RNA, 32 nt, Human
gucaucugcugaccacaccccagauccgcccu

SEQ ID NO: 473971 - RNA, 32 nt, Human
gucaucugcuguggccccaucuggccgcuagc

SEQ ID NO: 473972 - RNA, 32 nt, Human
gucaucuggcggaggucucugggagcccagaa

SEQ ID NO: 473973 - RNA, 32 nt, Human
gucaucugggccaccagcuccacuggcccccg

SEQ ID NO: 473974 - RNA, 32 nt, Human
gucaucuggugaugaagagaaaagguuaaucu

SEQ ID NO: 473975 - RNA, 32 nt, Human
gucaucuguaccucugccuccuuuccccuccc

SEQ ID NO: 473976 - RNA, 24 nt, Human
gucaucugugaauaaaguauuuua

SEQ ID NO: 473977 - RNA, 22 nt, Human
gucaucugugguuugguuuuua

SEQ ID NO: 473978 - RNA, 20 nt, Human
gucaucuguguuuguguuuu

SEQ ID NO: 473979 - RNA, 32 nt, Human
gucaucuuagggcaggagccacuguggcaucu

SEQ ID NO: 473980 - RNA, 32 nt, Human
gucaucuucacucguguauuaagucauucacu

SEQ ID NO: 473981 - RNA, 32 nt, Human
gucaucuucucccuugacaugcccaucagauu

SEQ ID NO: 473982 - RNA, 32 nt, Human
gucaucuucucucugcugcuguagcugccaug

SEQ ID NO: 473983 - RNA, 32 nt, Human
gucaucuuucugcagaaaaccauuagaccauc

SEQ ID NO: 473984 - RNA, 32 nt, Human
gucaugaaaaauaugaacauuuccuguggaaa

SEQ ID NO: 473985 - RNA, 28 nt, Human
gucaugaacagccacagcuacaauggca

SEQ ID NO: 473986 - RNA, 32 nt, Human
gucaugaagccgcgcagcagccauggcuuuua

SEQ ID NO: 473987 - RNA, 32 nt, Human
gucaugaaugaggaggugugugagcagggaac

SEQ ID NO: 473988 - RNA, 32 nt, Human
gucaugacacugcccuccagccuggacaacag

SEQ ID NO: 473989 - RNA, 32 nt, Human
gucaugaccagaaaacaagcccugccagccuc

SEQ ID NO: 473990 - RNA, 32 nt, Human
gucaugacuccaagagcagagcagggaagagc

SEQ ID NO: 473991 - RNA, 32 nt, Human
gucaugagaaaggauuaucacaccuguagcaa

SEQ ID NO: 473992 - RNA, 32 nt, Human
gucaugagcuuuguuaauuuucaauguuuucc

SEQ ID NO: 473993 - RNA, 32 nt, Human
gucaugaggaaggguucuuuuaacacucggca

SEQ ID NO: 473994 - RNA, 32 nt, Human
gucaugaggagaccucaccaccagucggucaa

SEQ ID NO: 473995 - RNA, 32 nt, Human
gucaugaggguggagaucaugaaugggguuag

SEQ ID NO: 473996 - RNA, 32 nt, Human
gucaugaugcuuggccuggcaggaugacucaa

SEQ ID NO: 473997 - RNA, 32 nt, Human
gucaugcaacacauaaugacguucuaguuagu

SEQ ID NO: 473998 - RNA, 32 nt, Human
gucaugcaaucaauaggguccuaacaacugag

SEQ ID NO: 473999 - RNA, 32 nt, Human
gucaugcaauuaagggcagaucugggccagug

SEQ ID NO: 474000 - RNA, 24 nt, Human
gucaugcagacuggagugcagugg

SEQ ID NO: 474001 - RNA, 32 nt, Human
gucaugcagaguauuucuaaaguaauugguua

SEQ ID NO: 474002 - RNA, 32 nt, Human
gucaugcagcucauacuguccacccuuguauu

SEQ ID NO: 474003 - RNA, 18 nt, Human
gucaugcaggaacucuaa

SEQ ID NO: 474004 - RNA, 24 nt, Human
gucaugcaggcuggagugcggugg

SEQ ID NO: 474005 - RNA, 19 nt, Human
gucaugcaugagauccaua

SEQ ID NO: 474006 - RNA, 23 nt, Human
gucaugccaaagagcuccugaga

SEQ ID NO: 474007 - RNA, 32 nt, Human
gucaugccaaccuagacaccucaugcuucugu

SEQ ID NO: 474008 - RNA, 32 nt, Human
gucaugccacugcacuccagccuggccugggc

SEQ ID NO: 474009 - RNA, 32 nt, Human
gucaugccacugcacuccagccugggagacag

SEQ ID NO: 474010 - RNA, 32 nt, Human
gucaugccacugcacuccagccugggcaacag

SEQ ID NO: 474011 - RNA, 32 nt, Human
gucaugccacugcacuccagccugggugacag

SEQ ID NO: 474012 - RNA, 32 nt, Human
gucaugccacugcacucuagccugggugacag

SEQ ID NO: 474013 - RNA, 32 nt, Human
gucaugccacugcacugcagccugggcgacag

SEQ ID NO: 474014 - RNA, 32 nt, Human
gucaugccauuguacuccagccugggcaacaa

SEQ ID NO: 474015 - RNA, 32 nt, Human
gucaugcccagcuuggagugccacauggccgc

SEQ ID NO: 474016 - RNA, 32 nt, Human
gucaugcccagcuuggagugccacguggccgc

SEQ ID NO: 474017 - RNA, 32 nt, Human
gucaugccugcaaucccagcacuuugggaggc

SEQ ID NO: 474018 - RNA, 32 nt, Human
gucaugccuguaaucccagcauuuuggaaggc

SEQ ID NO: 474019 - RNA, 32 nt, Human
gucaugcgccugucaucccagcuacuugagag

SEQ ID NO: 474020 - RNA, 32 nt, Human
gucaugcgucacugcagccuccaccucccggg

SEQ ID NO: 474021 - RNA, 32 nt, Human
gucaugcgugccacgcucuccucuacgcgccg

SEQ ID NO: 474022 - RNA, 32 nt, Human
gucaugcucagcacgcuacagauguguuguuu

SEQ ID NO: 474023 - RNA, 32 nt, Human
gucaugcucagccugugccaccauugcucugu

SEQ ID NO: 474024 - RNA, 32 nt, Human
gucaugcugaagauaaguucuguuauaucaua

SEQ ID NO: 474025 - RNA, 18 nt, Human
gucauggaaaggugccaa

SEQ ID NO: 474026 - RNA, 32 nt, Human
gucauggaccuuacauccucacugcagucacc

SEQ ID NO: 474027 - RNA, 28 nt, Human
gucauggagacauccucaaaaggucugc

SEQ ID NO: 474028 - RNA, 28 nt, Human
gucauggagauggaaaaggaguucgagc

SEQ ID NO: 474029 - RNA, 32 nt, Human
gucauggauaugucuaucaaaaucucaauaaa

SEQ ID NO: 474030 - RNA, 32 nt, Human
gucauggaugccugugccaccccaggcaauaa

SEQ ID NO: 474031 - RNA, 32 nt, Human
gucauggcaaauucaggugauauauggguaug

SEQ ID NO: 474032 - RNA, 32 nt, Human
gucauggcagugaugaaaaccuaacagggugg

SEQ ID NO: 474033 - RNA, 32 nt, Human
gucauggcaugcgccuguagucucagcuaccu

SEQ ID NO: 474034 - RNA, 32 nt, Human
gucauggccacauagcccccagccaggagaga

SEQ ID NO: 474035 - RNA, 32 nt, Human
gucauggcccgggggaaacuugccaaccuucg

SEQ ID NO: 474036 - RNA, 28 nt, Human
gucauggcguacuccacagugcagagag

SEQ ID NO: 474037 - RNA, 32 nt, Human
gucauggcgugccaggguggugacaguugaac

SEQ ID NO: 474038 - RNA, 32 nt, Human
gucauggcucacugcagccucaaccugcuggg

SEQ ID NO: 474039 - RNA, 32 nt, Human
gucauggcucacugcagcuuaagcucacugcc

SEQ ID NO: 474040 - RNA, 32 nt, Human
gucauggcucugcuguugcuuccagaaccaaa

SEQ ID NO: 474041 - RNA, 28 nt, Human
gucaugggaacccgcaccuguuuucccg

SEQ ID NO: 474042 - RNA, 32 nt, Human
gucaugggaggcagagcugggggagcgaggcu

SEQ ID NO: 474043 - RNA, 19 nt, Human
gucaugggcguccagcuca

SEQ ID NO: 474044 - RNA, 32 nt, Human
gucauggggccagcccuagcugcuggagggac

SEQ ID NO: 474045 - RNA, 31 nt, Human
gucauggggcugucuccccugacaggcacaa

SEQ ID NO: 474046 - RNA, 20 nt, Human
gucauggguguccccaccca

SEQ ID NO: 474047 - RNA, 32 nt, Human
gucauggucaugauuauaaacaucagccccuu

SEQ ID NO: 474048 - RNA, 32 nt, Human
gucauggucucgucccauuccacaccauuugu

SEQ ID NO: 474049 - RNA, 32 nt, Human
gucauggugauaauuggaaacuccuuucaggu

SEQ ID NO: 474050 - RNA, 31 nt, Human
gucaugguuucuguuuggccuguguucauau

SEQ ID NO: 474051 - RNA, 32 nt, Human
gucauguaccgccugcuugcucaaaucaauca

SEQ ID NO: 474052 - RNA, 32 nt, Human
gucauguaccgccuguuugcucaaaucaauca

SEQ ID NO: 474053 - RNA, 32 nt, Human
gucauguaucugcagugccuggcacaucacug

SEQ ID NO: 474054 - RNA, 32 nt, Human
gucaugucaaggggguagcagauuccauucgu

SEQ ID NO: 474055 - RNA, 28 nt, Human
gucauguccacucaagacgagaggcaga

SEQ ID NO: 474056 - RNA, 32 nt, Human
gucauguccuucaggaucucugcccucaaaau

SEQ ID NO: 474057 - RNA, 32 nt, Human
gucaugucuguaaucccagcaauuuggaggcu

SEQ ID NO: 474058 - RNA, 32 nt, Human
gucaugugacagaaacuuuuccuuuguccauc

SEQ ID NO: 474059 - RNA, 32 nt, Human
gucaugugaccacacccuccucccucugcccc

SEQ ID NO: 474060 - RNA, 32 nt, Human
gucaugugacgaggaagaggugaucugaccca

SEQ ID NO: 474061 - RNA, 32 nt, Human
gucaugugagacaaccuuuuauugggacauca

SEQ ID NO: 474062 - RNA, 32 nt, Human
gucaugugaggacgugcuuccugcuucauaga

SEQ ID NO: 474063 - RNA, 32 nt, Human
gucaugugagugggugggauggggacauuuga

SEQ ID NO: 474064 - RNA, 32 nt, Human
gucaugugccacagaagcucagccugggcuuc

SEQ ID NO: 474065 - RNA, 32 nt, Human
gucaugugcugaguuaaaacucagggauucug

SEQ ID NO: 474066 - RNA, 32 nt, Human
gucaugugggugacucuucuucauuugaccaa

SEQ ID NO: 474067 - RNA, 32 nt, Human
gucaugugguucacccuucaccccagauacaa

SEQ ID NO: 474068 - RNA, 26 nt, Human
gucauguucaguugcauuccuuggug

SEQ ID NO: 474069 - RNA, 32 nt, Human
gucauguuccucuccauugucaggcaccccug

SEQ ID NO: 474070 - RNA, 24 nt, Human
gucauguugcccaggcuggucuca

SEQ ID NO: 474071 - RNA, 32 nt, Human
gucauguugcccaggcuggucucaggagucac

SEQ ID NO: 474072 - RNA, 32 nt, Human
gucauguuuacaguccucagugccccacaccg

SEQ ID NO: 474073 - RNA, 32 nt, Human
gucauguuucaaaucaaggcugaaauuuucaa

SEQ ID NO: 474074 - RNA, 32 nt, Human
gucauuaaauacuauuugucuccuuuucuggu

SEQ ID NO: 474075 - RNA, 32 nt, Human
gucauuacacaauuucaucauugugcuaucau

SEQ ID NO: 474076 - RNA, 32 nt, Human
gucauuaccuuuccuguccuccuguuauauga

SEQ ID NO: 474077 - RNA, 32 nt, Human
gucauuacugauuuuaaagguucuguuuucag

SEQ ID NO: 474078 - RNA, 32 nt, Human
gucauuacuguccuuuuccccuacagaauuuu

SEQ ID NO: 474079 - RNA, 32 nt, Human
gucauuagaaaggacauuucugccauuguuca

SEQ ID NO: 474080 - RNA, 32 nt, Human
gucauuaggagagagauuuaagaccgaaggag

SEQ ID NO: 474081 - RNA, 32 nt, Human
gucauuagggcugagggcucggcuguaggggc

SEQ ID NO: 474082 - RNA, 32 nt, Human
gucauuaucaguugaaccuccaugccacacau

SEQ ID NO: 474083 - RNA, 32 nt, Human
gucauucaagggacagcacaaccucauccaag

SEQ ID NO: 474084 - RNA, 32 nt, Human
gucauucagccugggagaccacggugacauuc

SEQ ID NO: 474085 - RNA, 32 nt, Human
gucauucagcggcuggccagaggaugagacuc

SEQ ID NO: 474086 - RNA, 32 nt, Human
gucauucaggacaacauggauggaauuggagg

SEQ ID NO: 474087 - RNA, 22 nt, Human
gucauucaggcaagagugcagu

SEQ ID NO: 474088 - RNA, 24 nt, Human
gucauucaggcuggagugcagugg

SEQ ID NO: 474089 - RNA, 32 nt, Human
gucauucauauguauauguuguugugcuuguc

SEQ ID NO: 474090 - RNA, 32 nt, Human
gucauucaugcugcuguccccuggugaaguga

SEQ ID NO: 474091 - RNA, 32 nt, Human
gucauuccagcaucccugccucuugucacaaa

SEQ ID NO: 474092 - RNA, 32 nt, Human
gucauuccaggagacaaaaagaaacaaauccu

SEQ ID NO: 474093 - RNA, 32 nt, Human
gucauuccaucuuuuggaaggcagucuuucua

SEQ ID NO: 474094 - RNA, 32 nt, Human
gucauuccauggcugcuguuuucuccucugua

SEQ ID NO: 474095 - RNA, 32 nt, Human
gucauucccagaggaaauguucucuucacggu

SEQ ID NO: 474096 - RNA, 32 nt, Human
gucauucccaucuuguuuucagaagagaaggu

SEQ ID NO: 474097 - RNA, 32 nt, Human
gucauuccuaaccuaaccuuagagucccuccc

SEQ ID NO: 474098 - RNA, 32 nt, Human
gucauuccucaauuacugccugcagcaauucc

SEQ ID NO: 474099 - RNA, 32 nt, Human
gucauucgcucauguaagaguuuuuaagagag

SEQ ID NO: 474100 - RNA, 23 nt, Human
gucauucgggcugggcgcagcgg

SEQ ID NO: 474101 - RNA, 32 nt, Human
gucauucuacaaccugcacagagcuccggagc

SEQ ID NO: 474102 - RNA, 32 nt, Human
gucauucuagcaccugugggugacuuccucau

SEQ ID NO: 474103 - RNA, 32 nt, Human
gucauucucauugaauuauaaaagccagcagg

SEQ ID NO: 474104 - RNA, 25 nt, Human
gucauucuccaucucuuuguuuuag

SEQ ID NO: 474105 - RNA, 32 nt, Human
gucauucuccugccucagccucuugcgagcug

SEQ ID NO: 474106 - RNA, 32 nt, Human
gucauucucugccugcauccagccccuugccc

SEQ ID NO: 474107 - RNA, 32 nt, Human
gucauucugaaacugucccuccagagguucuu

SEQ ID NO: 474108 - RNA, 32 nt, Human
gucauucugacuccugggcuuacccuacaccc

SEQ ID NO: 474109 - RNA, 32 nt, Human
gucauucugccuggcggccaggccuccagcuu

SEQ ID NO: 474110 - RNA, 32 nt, Human
gucauucugggaacauguuguaagcacugacu

SEQ ID NO: 474111 - RNA, 32 nt, Human
gucauucugggaggccuuggggcccucagccc

SEQ ID NO: 474112 - RNA, 32 nt, Human
gucauucugucuguccggaucuucugaaggcc

SEQ ID NO: 474113 - RNA, 32 nt, Human
gucauucuuaguaaccugcucuguccuuaguc

SEQ ID NO: 474114 - RNA, 32 nt, Human
gucauucuucaaucagauaguggaaauagaac

SEQ ID NO: 474115 - RNA, 32 nt, Human
gucauucuucucuuacagaggggcaguagagu

SEQ ID NO: 474116 - RNA, 32 nt, Human
gucauucuuuggaagucucccuucccaucucc

SEQ ID NO: 474117 - RNA, 32 nt, Human
gucauugaaggguguucacccaucccacccaa

SEQ ID NO: 474118 - RNA, 32 nt, Human
gucauugaagugaggaagagugaguugggccu

SEQ ID NO: 474119 - RNA, 32 nt, Human
gucauugaagugcuagaagugaaggaaaaagg

SEQ ID NO: 474120 - RNA, 32 nt, Human
gucauugauacuugccaacuaccaccuaccuc

SEQ ID NO: 474121 - RNA, 32 nt, Human
gucauugauuugugcugggacugcuauacuug

SEQ ID NO: 474122 - RNA, 32 nt, Human
gucauugcgccacugcaaaccagccugggcaa

SEQ ID NO: 474123 - RNA, 32 nt, Human
gucauuggcucugggaagcggcagcagaggca

SEQ ID NO: 474124 - RNA, 32 nt, Human
gucauuggugcugaaguugaggaacccugccc

SEQ ID NO: 474125 - RNA, 32 nt, Human
gucauugguggaggucugaaugugaggcuggg

SEQ ID NO: 474126 - RNA, 32 nt, Human
gucauuguagccucaaccucccaggcuccaag

SEQ ID NO: 474127 - RNA, 32 nt, Human
gucauuguauuuuuaacaccagaaagaaccuu

SEQ ID NO: 474128 - RNA, 32 nt, Human
gucauugucaaaggaaaucuguggcccugaga

SEQ ID NO: 474129 - RNA, 32 nt, Human
gucauugugguuuauuggaaccuauuuucacc

SEQ ID NO: 474130 - RNA, 32 nt, Human
gucauuguuacccauagacuguaaaccagagc

SEQ ID NO: 474131 - RNA, 32 nt, Human
gucauuguucauucagccuccuuuguacccca

SEQ ID NO: 474132 - RNA, 32 nt, Human
gucauuuacucugcugcaaccucucuuucucc

SEQ ID NO: 474133 - RNA, 32 nt, Human
gucauuuaucucugugacuucgggcuagaugu

SEQ ID NO: 474134 - RNA, 32 nt, Human
gucauuucaaaccauuguggucuucaagcaac

SEQ ID NO: 474135 - RNA, 32 nt, Human
gucauuucagcccuaacuucuguguggaucac

SEQ ID NO: 474136 - RNA, 32 nt, Human
gucauuucaguauuuuugcuggauaaauccau

SEQ ID NO: 474137 - RNA, 32 nt, Human
gucauuucguacaccacagcucagucagccca

SEQ ID NO: 474138 - RNA, 32 nt, Human
gucauuucuaacucuuaaaaccaacucaguuc

SEQ ID NO: 474139 - RNA, 21 nt, Human
gucauuucucaaccugaggug

SEQ ID NO: 474140 - RNA, 32 nt, Human
gucauuucucagaacugaccguagucacugua

SEQ ID NO: 474141 - RNA, 32 nt, Human
gucauuucugacaacaugaaugaaccuggagg

SEQ ID NO: 474142 - RNA, 32 nt, Human
gucauuucuggucugugcaccaaaggaugcau

SEQ ID NO: 474143 - RNA, 32 nt, Human
gucauuucuuuaggucuugccuucccaaguag

SEQ ID NO: 474144 - RNA, 32 nt, Human
gucauuugaccacguccauuguuuccaucuuu

SEQ ID NO: 474145 - RNA, 32 nt, Human
gucauuugcuauuccccucugauauucaaccc

SEQ ID NO: 474146 - RNA, 32 nt, Human
gucauuuggacacuuggggaaaagugaggcca

SEQ ID NO: 474147 - RNA, 32 nt, Human
gucauuuguaagacaucucaugucauauaaaa

SEQ ID NO: 474148 - RNA, 32 nt, Human
gucauuugugaucccuggcucuugugauaugc

SEQ ID NO: 474149 - RNA, 32 nt, Human
gucauuuucaaaggggcaacagugauaccauc

SEQ ID NO: 474150 - RNA, 32 nt, Human
gucauuuuccugaaguccugguacauaacaag

SEQ ID NO: 474151 - RNA, 18 nt, Human
guccaaaaauaaagacca

SEQ ID NO: 474152 - RNA, 17 nt, Human
guccaaaaauauuucca

SEQ ID NO: 474153 - RNA, 32 nt, Human
guccaaaacauuccuuucagccuuuuuauuuc

SEQ ID NO: 474154 - RNA, 32 nt, Human
guccaaaacucagaagguacagaagggaagua

SEQ ID NO: 474155 - RNA, 32 nt, Human
guccaaaacuccugccucucggccgcuucagc

SEQ ID NO: 474156 - RNA, 32 nt, Human
guccaaaacuccugccuuuuggcagcuucgac

SEQ ID NO: 474157 - RNA, 24 nt, Human
guccaaaagccauuccagaugcca

SEQ ID NO: 474158 - RNA, 32 nt, Human
guccaaaagccucuucccucccuuuccuuuuc

SEQ ID NO: 474159 - RNA, 32 nt, Human
guccaaacacuccucuuccuccaggucauuug

SEQ ID NO: 474160 - RNA, 32 nt, Human
guccaaacccaaaagaaacugacaugcccucc

SEQ ID NO: 474161 - RNA, 32 nt, Human
guccaaaccccaggaagagagcucuaaagaug

SEQ ID NO: 474162 - RNA, 32 nt, Human
guccaaacccuugugccucccaguucuuccaa

SEQ ID NO: 474163 - RNA, 32 nt, Human
guccaaacugcuugccaccucuacucgccacc

SEQ ID NO: 474164 - RNA, 32 nt, Human
guccaaagaguccucagaaccugccuggagaa

SEQ ID NO: 474165 - RNA, 32 nt, Human
guccaaagccagccugggcaacauggugaaac

SEQ ID NO: 474166 - RNA, 32 nt, Human
guccaaagcgagcaagagaaucccaggacaga

SEQ ID NO: 474167 - RNA, 32 nt, Human
guccaaagcuccugccuuucggccacuucagc

SEQ ID NO: 474168 - RNA, 32 nt, Human
guccaaagcuccugccuuucggccacuucggc

SEQ ID NO: 474169 - RNA, 32 nt, Human
guccaaaggacagugugucacugugaacugga

SEQ ID NO: 474170 - RNA, 32 nt, Human
guccaaagucccaggcccagugcaguccuugc

SEQ ID NO: 474171 - RNA, 32 nt, Human
guccaaauaccggcucgacuccuggguacgcu

SEQ ID NO: 474172 - RNA, 22 nt, Human
guccaaauuugaacuccuuccu

SEQ ID NO: 474173 - RNA, 32 nt, Human
guccaacaagccccacagccccucaaagacuu

SEQ ID NO: 474174 - RNA, 32 nt, Human
guccaacacaucucccuuuuccaugcuguggu

SEQ ID NO: 474175 - RNA, 22 nt, Human
guccaacagacaccaccuguca

SEQ ID NO: 474176 - RNA, 32 nt, Human
guccaacagggccagcuucccuugggggcccu

SEQ ID NO: 474177 - RNA, 32 nt, Human
guccaacauggugaaacccccaucucuacuaa

SEQ ID NO: 474178 - RNA, 20 nt, Human
guccaacauucccagcuccc

SEQ ID NO: 474179 - RNA, 17 nt, Human
guccaaccacaaaagaa

SEQ ID NO: 474180 - RNA, 32 nt, Human
guccaaccucagcuucccagccagcagcucag

SEQ ID NO: 474181 - RNA, 32 nt, Human
guccaaccucuggugcugaaucagccaagaga

SEQ ID NO: 474182 - RNA, 32 nt, Human
guccaaccugcacucgcguaggacaagaagac

SEQ ID NO: 474183 - RNA, 32 nt, Human
guccaacgucaacuuccuauccuugccugaca

SEQ ID NO: 474184 - RNA, 32 nt, Human
guccaacgucaacuuccuguccuugccugaca

SEQ ID NO: 474185 - RNA, 32 nt, Human
guccaacguggugaaaccccgucuguacuaaa

SEQ ID NO: 474186 - RNA, 32 nt, Human
guccaacucuuuucaucccucuccugggucug

SEQ ID NO: 474187 - RNA, 32 nt, Human
guccaacuucguuguccuuuguucuguaaccu

SEQ ID NO: 474188 - RNA, 32 nt, Human
guccaacuuuggcccaggcuuguccaugcacu

SEQ ID NO: 474189 - RNA, 18 nt, Human
guccaagaacaaaugcca

SEQ ID NO: 474190 - RNA, 32 nt, Human
guccaagaccagccuggccaacauggugaaac

SEQ ID NO: 474191 - RNA, 32 nt, Human
guccaagaccagccuggccaacauggugaaau

SEQ ID NO: 474192 - RNA, 24 nt, Human
guccaagaccuuuuguugauuuca

SEQ ID NO: 474193 - RNA, 32 nt, Human
guccaagaguaaaccccaccugccacagggcc

SEQ ID NO: 474194 - RNA, 32 nt, Human
guccaagaugugcuugaaaauacucauuaggu

SEQ ID NO: 474195 - RNA, 32 nt, Human
guccaagcaaaauggagcuggggaagauaacc

SEQ ID NO: 474196 - RNA, 32 nt, Human
guccaagcacaucugggcggggaggccgugga

SEQ ID NO: 474197 - RNA, 32 nt, Human
guccaagcacaucuugucaacaugcauugcca

SEQ ID NO: 474198 - RNA, 19 nt, Human
guccaagccaucuccuuca

SEQ ID NO: 474199 - RNA, 32 nt, Human
guccaagcccaucagccccaaacuccugucuc

SEQ ID NO: 474200 - RNA, 18 nt, Human
guccaagccgugcugcug

SEQ ID NO: 474201 - RNA, 32 nt, Human
guccaagcucaaagcuggagugcaauggcgca

SEQ ID NO: 474202 - RNA, 32 nt, Human
guccaagcuggucucaaacuccuggguucaag

SEQ ID NO: 474203 - RNA, 32 nt, Human
guccaaggaagagaggguggccucgacaucaa

SEQ ID NO: 474204 - RNA, 32 nt, Human
guccaaggaggaacuguacugcccccguguca

SEQ ID NO: 474205 - RNA, 32 nt, Human
guccaaggcaauggucagccacugcagccucc

SEQ ID NO: 474206 - RNA, 21 nt, Human
guccaaggccgggcgcagugg

SEQ ID NO: 474207 - RNA, 32 nt, Human
guccaaggccuccccuuccccuuugcuggugg

SEQ ID NO: 474208 - RNA, 32 nt, Human
guccaaggcuggccacuuuucucuccaaggug

SEQ ID NO: 474209 - RNA, 32 nt, Human
guccaagggagaagccccagacccccuucucu

SEQ ID NO: 474210 - RNA, 20 nt, Human
guccaaggggcagauggcca

SEQ ID NO: 474211 - RNA, 32 nt, Human
guccaagggucuauguggugggcaguuugagc

SEQ ID NO: 474212 - RNA, 32 nt, Human
guccaagguaauggcacacauauucaugcaca

SEQ ID NO: 474213 - RNA, 32 nt, Human
guccaagguagaccagagcaaauggaacagga

SEQ ID NO: 474214 - RNA, 32 nt, Human
guccaagguggcuucccacugaagggacacag

SEQ ID NO: 474215 - RNA, 21 nt, Human
guccaaggugggcugaugcca

SEQ ID NO: 474216 - RNA, 32 nt, Human
guccaagucgcgaucaaggacucucucacaca

SEQ ID NO: 474217 - RNA, 32 nt, Human
guccaaguucaccgucaccaucaagccacugg

SEQ ID NO: 474218 - RNA, 32 nt, Human
guccaauagcuggugggaaucaaaacaaggaa

SEQ ID NO: 474219 - RNA, 32 nt, Human
guccaaucacagucuucuagcacaauuuuucc

SEQ ID NO: 474220 - RNA, 32 nt, Human
guccaauggcugguugugugagagggcuuggc

SEQ ID NO: 474221 - RNA, 32 nt, Human
guccaaugucaacuuccuguccuugccugaca

SEQ ID NO: 474222 - RNA, 32 nt, Human
guccaauucccugagcuuugcucacucagcua

SEQ ID NO: 474223 - RNA, 32 nt, Human
guccaauuuacaggcuggagcagcagcugcau

SEQ ID NO: 474224 - RNA, 32 nt, Human
guccacaaagugcugggauuacaggugugagc

SEQ ID NO: 474225 - RNA, 21 nt, Human
guccacaaauacaagaugcca

SEQ ID NO: 474226 - RNA, 32 nt, Human
guccacaaauuccaucagccugccucagcaga

SEQ ID NO: 474227 - RNA, 18 nt, Human
guccacaaccaagaggaa

SEQ ID NO: 474228 - RNA, 22 nt, Human
guccacaagcccucagaugcca

SEQ ID NO: 474229 - RNA, 32 nt, Human
guccacacacccuucaggaagggggagcacug

SEQ ID NO: 474230 - RNA, 32 nt, Human
guccacaccagccugggcaacacagcaagaca

SEQ ID NO: 474231 - RNA, 32 nt, Human
guccacacccgccucagaguccggagucuguc

SEQ ID NO: 474232 - RNA, 19 nt, Human
guccacacccuggaucccc

SEQ ID NO: 474233 - RNA, 32 nt, Human
guccacacucguaaccguuacacucaccugga

SEQ ID NO: 474234 - RNA, 22 nt, Human
guccacacucgucuccucucug

SEQ ID NO: 474235 - RNA, 32 nt, Human
guccacagaagccacaggggcagggggagcag

SEQ ID NO: 474236 - RNA, 32 nt, Human
guccacagagccugggcugggcccgguggagg

SEQ ID NO: 474237 - RNA, 32 nt, Human
guccacagagcuaugaccuuggcaucauccca

SEQ ID NO: 474238 - RNA, 32 nt, Human
guccacagaguauaaauaaccaauuccucauu

SEQ ID NO: 474239 - RNA, 32 nt, Human
guccacagaguccaagacugggugcucuugca

SEQ ID NO: 474240 - RNA, 32 nt, Human
guccacagaguccuggagcgucucccucucag

SEQ ID NO: 474241 - RNA, 22 nt, Human
guccacagauuauuagauggca

SEQ ID NO: 474242 - RNA, 32 nt, Human
guccacagcacuccauucuggguggcagagug

SEQ ID NO: 474243 - RNA, 32 nt, Human
guccacagccuccuggugcugaaaaccuacgu

SEQ ID NO: 474244 - RNA, 32 nt, Human
guccacagcuccugccuuucggccacuucggc

SEQ ID NO: 474245 - RNA, 32 nt, Human
guccacaggcacaacuguuccuuggggccccu

SEQ ID NO: 474246 - RNA, 32 nt, Human
guccacaggcuccccaucuucuccuuacugca

SEQ ID NO: 474247 - RNA, 32 nt, Human
guccacagggcagcagcaccugcuugagacca

SEQ ID NO: 474248 - RNA, 32 nt, Human
guccacaguucagcauccggaaacccaggucc

SEQ ID NO: 474249 - RNA, 32 nt, Human
guccacauaauuguuguacaaaccagagcuuu

SEQ ID NO: 474250 - RNA, 32 nt, Human
guccacaucaagauagcugggcccagugugga

SEQ ID NO: 474251 - RNA, 32 nt, Human
guccacaucugccuccucuccuccucagcugc

SEQ ID NO: 474252 - RNA, 32 nt, Human
guccacaugaggacagggaagcucgggaaggg

SEQ ID NO: 474253 - RNA, 32 nt, Human
guccacauugccuguuucuuguguacaugggg

SEQ ID NO: 474254 - RNA, 24 nt, Human
guccacauuuggggccuauccuua

SEQ ID NO: 474255 - RNA, 24 nt, Human
guccacauuuucugccccaccuua

SEQ ID NO: 474256 - RNA, 32 nt, Human
guccaccaccagccagaagagcagggauggug

SEQ ID NO: 474257 - RNA, 32 nt, Human
guccaccacuuggcuagaguucagagacagga

SEQ ID NO: 474258 - RNA, 32 nt, Human
guccaccagcgucuuggcuuggugggagggcu

SEQ ID NO: 474259 - RNA, 32 nt, Human
guccaccagcuauucuccuggcgccggaacug

SEQ ID NO: 474260 - RNA, 32 nt, Human
guccaccaggagaccgagauugcugaugagug

SEQ ID NO: 474261 - RNA, 32 nt, Human
guccaccagggagggagacacacaagccuuuu

SEQ ID NO: 474262 - RNA, 32 nt, Human
guccaccaugaucuucaucacagucuuugaua

SEQ ID NO: 474263 - RNA, 32 nt, Human
guccaccaugccacccaugcuguggcugcugc

SEQ ID NO: 474264 - RNA, 32 nt, Human
guccaccauguuuacaggugggagacuugaga

SEQ ID NO: 474265 - RNA, 20 nt, Human
guccacccaccuuggccuca

SEQ ID NO: 474266 - RNA, 32 nt, Human
guccaccccguccuucauguucuaucacugcu

SEQ ID NO: 474267 - RNA, 32 nt, Human
guccaccccugaacuccugagcgacagaagcc

SEQ ID NO: 474268 - RNA, 32 nt, Human
guccaccccugccuccccuucacuggggacug

SEQ ID NO: 474269 - RNA, 32 nt, Human
guccaccccugccugccuuguuugauuuggcu

SEQ ID NO: 474270 - RNA, 32 nt, Human
guccaccccuucucucugggcuuguugagaag

SEQ ID NO: 474271 - RNA, 32 nt, Human
guccacccugcagccgcugccuccugggcccc

SEQ ID NO: 474272 - RNA, 20 nt, Human
guccacccugccccagggug

SEQ ID NO: 474273 - RNA, 32 nt, Human
guccacccuucccagcucagcucaguaccuca

SEQ ID NO: 474274 - RNA, 32 nt, Human
guccaccgagacucuggacuugcucagguccc

SEQ ID NO: 474275 - RNA, 32 nt, Human
guccaccgugggaggcagaggccugggcugca

SEQ ID NO: 474276 - RNA, 32 nt, Human
guccaccuccacuccccucugacccucaggcu

SEQ ID NO: 474277 - RNA, 32 nt, Human
guccaccucuacugggcccucaugcuugccuu

SEQ ID NO: 474278 - RNA, 32 nt, Human
guccaccugacgcaaaugcccaguccuuccag

SEQ ID NO: 474279 - RNA, 19 nt, Human
guccaccugcguggccuug

SEQ ID NO: 474280 - RNA, 32 nt, Human
guccaccugggcaaaguggccagguggaugaa

SEQ ID NO: 474281 - RNA, 32 nt, Human
guccaccugggcucagcucacacccaagacau

SEQ ID NO: 474282 - RNA, 32 nt, Human
guccaccuggugcuggggcuguggugcuaggg

SEQ ID NO: 474283 - RNA, 32 nt, Human
guccaccuucuccaagucuggcagcuauuuug

SEQ ID NO: 474284 - RNA, 32 nt, Human
guccaccuuuguccagugcuagauucaccuca

SEQ ID NO: 474285 - RNA, 32 nt, Human
guccacgaacugcccacguccucuccaggaag

SEQ ID NO: 474286 - RNA, 32 nt, Human
guccacgaggcagggauucucaucucuggugc

SEQ ID NO: 474287 - RNA, 32 nt, Human
guccacgcagccgccggccggccagcacccag

SEQ ID NO: 474288 - RNA, 22 nt, Human
guccacgcaucucagcacuucc

SEQ ID NO: 474289 - RNA, 32 nt, Human
guccacgccccgaggccugggcucaggccgaa

SEQ ID NO: 474290 - RNA, 21 nt, Human
guccacgcgccggaacucgga

SEQ ID NO: 474291 - RNA, 32 nt, Human
guccacggaagccucggggagguggagcugcu

SEQ ID NO: 474292 - RNA, 16 nt, Human
guccacggccugaggc

SEQ ID NO: 474293 - RNA, 32 nt, Human
guccacguccuaaagacaccucuccuuuacaa

SEQ ID NO: 474294 - RNA, 23 nt, Human
guccacgugacaguccccacagc

SEQ ID NO: 474295 - RNA, 32 nt, Human
guccacgugcgccuugcggucucuccauuuau

SEQ ID NO: 474296 - RNA, 32 nt, Human
guccacguucacugccccaccacaggcccagc

SEQ ID NO: 474297 - RNA, 32 nt, Human
guccacuccagccugagcaacagagcgagacc

SEQ ID NO: 474298 - RNA, 32 nt, Human
guccacucggggguggagugagacugacugca

SEQ ID NO: 474299 - RNA, 32 nt, Human
guccacugcaaccuccacauccuggguucaag

SEQ ID NO: 474300 - RNA, 32 nt, Human
guccacugcaaccucugcccucccggguuuaa

SEQ ID NO: 474301 - RNA, 32 nt, Human
guccacugcagucgcuuaagacaguguaacga

SEQ ID NO: 474302 - RNA, 22 nt, Human
guccacugcccuguguggccuu

SEQ ID NO: 474303 - RNA, 32 nt, Human
guccacugggagaggcagcuugguggaggccu

SEQ ID NO: 474304 - RNA, 32 nt, Human
guccacugggaggcugggaaaacgugacuccc

SEQ ID NO: 474305 - RNA, 32 nt, Human
guccacuggggcaacagacacugccacaauuu

SEQ ID NO: 474306 - RNA, 32 nt, Human
guccacugguucuucuuggucucagugucaau

SEQ ID NO: 474307 - RNA, 27 nt, Human
guccacugugggaggccgacgcaggag

SEQ ID NO: 474308 - RNA, 32 nt, Human
guccacugugggccuagcacagugcaggaacc

SEQ ID NO: 474309 - RNA, 32 nt, Human
guccacuuccuuggccgcccuugcuacacugg

SEQ ID NO: 474310 - RNA, 32 nt, Human
guccacuucucagcgaggauggcacuucaggg

SEQ ID NO: 474311 - RNA, 32 nt, Human
guccacuucuccccucacuuuccccucaccca

SEQ ID NO: 474312 - RNA, 32 nt, Human
guccacuucugccucugccacuacugcugcca

SEQ ID NO: 474313 - RNA, 32 nt, Human
guccacuuucucaaacacaaaccucacuaugc

SEQ ID NO: 474314 - RNA, 32 nt, Human
guccagaaacgaaccccagcuggcuggccucu

SEQ ID NO: 474315 - RNA, 32 nt, Human
guccagaaaguggcaguugcagugaguggaga

SEQ ID NO: 474316 - RNA, 21 nt, Human
guccagaaaugggaaagggaa

SEQ ID NO: 474317 - RNA, 32 nt, Human
guccagaacuagugggaguggaggcaggcccu

SEQ ID NO: 474318 - RNA, 32 nt, Human
guccagaagaauaccuggcaguagaagaaaug

SEQ ID NO: 474319 - RNA, 32 nt, Human
guccagaagacucuccucugacuguuaccuuu

SEQ ID NO: 474320 - RNA, 20 nt, Human
guccagaagauaguaggauc

SEQ ID NO: 474321 - RNA, 32 nt, Human
guccagaaggagacaggcagagcugcuccccu

SEQ ID NO: 474322 - RNA, 22 nt, Human
guccagaaggcaguagggaucc

SEQ ID NO: 474323 - RNA, 32 nt, Human
guccagaagugaggaggaagagaagcuggugc

SEQ ID NO: 474324 - RNA, 32 nt, Human
guccagaaucccaaaccagcugagaugaaaug

SEQ ID NO: 474325 - RNA, 32 nt, Human
guccagaaucuacagaccugccaggaaagaaa

SEQ ID NO: 474326 - RNA, 17 nt, Human
guccagacaggaagcag

SEQ ID NO: 474327 - RNA, 32 nt, Human
guccagaccagccugggcaacacagcgggacc

SEQ ID NO: 474328 - RNA, 32 nt, Human
guccagacuggucucaaacuccugggcucaag

SEQ ID NO: 474329 - RNA, 32 nt, Human
guccagacuggucuuaaacuccugggcucaag

SEQ ID NO: 474330 - RNA, 32 nt, Human
guccagagagaagggagugggugggcaggggu

SEQ ID NO: 474331 - RNA, 32 nt, Human
guccagagagccaagcacggcagaggacugca

SEQ ID NO: 474332 - RNA, 32 nt, Human
guccagagaggcaggaggauggagcucggaag

SEQ ID NO: 474333 - RNA, 32 nt, Human
guccagagaucuauucauauagucugaggaag

SEQ ID NO: 474334 - RNA, 32 nt, Human
guccagagcagcagagauuugcagcccucgcc

SEQ ID NO: 474335 - RNA, 32 nt, Human
guccagagccacugccuuugcuccagccgcug

SEQ ID NO: 474336 - RNA, 32 nt, Human
guccagaggaaggaggccagcaggaccuggug

SEQ ID NO: 474337 - RNA, 32 nt, Human
guccagaggaagggggaguaucugugggcaac

SEQ ID NO: 474338 - RNA, 32 nt, Human
guccagaggaaggucuuuuuaccaucagcauu

SEQ ID NO: 474339 - RNA, 32 nt, Human
guccagagggacagucaguuuuaggguugccu

SEQ ID NO: 474340 - RNA, 32 nt, Human
guccagagggcucccugcaggccagggguccc

SEQ ID NO: 474341 - RNA, 32 nt, Human
guccagaucugccuccagccccucgaaaccag

SEQ ID NO: 474342 - RNA, 19 nt, Human
guccagauguccccaucca

SEQ ID NO: 474343 - RNA, 32 nt, Human
guccagauucaccacccucaaccuucuguggg

SEQ ID NO: 474344 - RNA, 32 nt, Human
guccagauuucucaucaacuggcaauacaaag

SEQ ID NO: 474345 - RNA, 32 nt, Human
guccagcaaccugcacuccagccugggugaca

SEQ ID NO: 474346 - RNA, 32 nt, Human
guccagcaccuacagaccuagagccagggcug

SEQ ID NO: 474347 - RNA, 32 nt, Human
guccagcaccugcuguuagcccagugguuccu

SEQ ID NO: 474348 - RNA, 32 nt, Human
guccagcacuagcuccacggccccagacaccu

SEQ ID NO: 474349 - RNA, 32 nt, Human
guccagcagaagcagaugcaccugacaaaaau

SEQ ID NO: 474350 - RNA, 32 nt, Human
guccagcagagggaguggaggaagggccacug

SEQ ID NO: 474351 - RNA, 32 nt, Human
guccagcagcagaggggacagggggcaggugu

SEQ ID NO: 474352 - RNA, 32 nt, Human
guccagcagcagggguggaggcuggggccaca

SEQ ID NO: 474353 - RNA, 32 nt, Human
guccagcagggugggaaggagggaguuugggc

SEQ ID NO: 474354 - RNA, 32 nt, Human
guccagcauggguuucagcacagcagacggcg

SEQ ID NO: 474355 - RNA, 32 nt, Human
guccagcauguauuguuccaaauaugacuccc

SEQ ID NO: 474356 - RNA, 32 nt, Human
guccagccaagaccauucaucucuccagcacu

SEQ ID NO: 474357 - RNA, 32 nt, Human
guccagccacagccccagcccaggcagcccac

SEQ ID NO: 474358 - RNA, 21 nt, Human
guccagccaccaucacccgga

SEQ ID NO: 474359 - RNA, 22 nt, Human
guccagccacccccacggaggg

SEQ ID NO: 474360 - RNA, 32 nt, Human
guccagccagaagccaggucucaggcuagaau

SEQ ID NO: 474361 - RNA, 32 nt, Human
guccagccagauguuccacagaccuccggagc

SEQ ID NO: 474362 - RNA, 28 nt, Human
guccagccaggggcugccuccauguccu

SEQ ID NO: 474363 - RNA, 32 nt, Human
guccagccaguaaauacacagaauagcagaag

SEQ ID NO: 474364 - RNA, 32 nt, Human
guccagcccagccauggugcaugacucuucca

SEQ ID NO: 474365 - RNA, 32 nt, Human
guccagcccagccuugugccugcaguggaggu

SEQ ID NO: 474366 - RNA, 32 nt, Human
guccagccccaccuccagcccaucagaaacau

SEQ ID NO: 474367 - RNA, 32 nt, Human
guccagccccaggcacaucuugcuccagacuc

SEQ ID NO: 474368 - RNA, 32 nt, Human
guccagccccuccagacaccaccacucagaaa

SEQ ID NO: 474369 - RNA, 32 nt, Human
guccagcccuagcgucgacuccacacuagagg

SEQ ID NO: 474370 - RNA, 32 nt, Human
guccagcccugccucucugcggauucccugcc

SEQ ID NO: 474371 - RNA, 32 nt, Human
guccagcccuggagccagccagugcauuuauu

SEQ ID NO: 474372 - RNA, 32 nt, Human
guccagccuagucucaaacuccuggguucaag

SEQ ID NO: 474373 - RNA, 32 nt, Human
guccagccucacucucccucccuggugcugua

SEQ ID NO: 474374 - RNA, 17 nt, Human
guccagccucucucuga

SEQ ID NO: 474375 - RNA, 32 nt, Human
guccagccucugccgagagccugcugcgugca

SEQ ID NO: 474376 - RNA, 32 nt, Human
guccagccuguucacacugcaccucagguauc

SEQ ID NO: 474377 - RNA, 32 nt, Human
guccagcgcgaaccacacgucguccacgggca

SEQ ID NO: 474378 - RNA, 32 nt, Human
guccagcgugugaacccaggggagaccuugcu

SEQ ID NO: 474379 - RNA, 32 nt, Human
guccagcuaccugacucuuuugcaauaacaac

SEQ ID NO: 474380 - RNA, 32 nt, Human
guccagcuacuuccagaaacacucaguguccc

SEQ ID NO: 474381 - RNA, 32 nt, Human
guccagcuccgagaacugggguccgccagccg

SEQ ID NO: 474382 - RNA, 32 nt, Human
guccagcuccgucggcacuaccacccugcucc

SEQ ID NO: 474383 - RNA, 32 nt, Human
guccagcucguuuccagcaccaugucggugcg

SEQ ID NO: 474384 - RNA, 32 nt, Human
guccagcucuaugacccugacuauaugaaggu

SEQ ID NO: 474385 - RNA, 23 nt, Human
guccagcucucucucccccaccc

SEQ ID NO: 474386 - RNA, 18 nt, Human
guccagcucuggagcccc

SEQ ID NO: 474387 - RNA, 32 nt, Human
guccagcugcaacccagagauaguggaaacug

SEQ ID NO: 474388 - RNA, 32 nt, Human
guccagcugcacucuccucuccugggacccag

SEQ ID NO: 474389 - RNA, 32 nt, Human
guccagcugccccugccgucucccaggcccuc

SEQ ID NO: 474390 - RNA, 32 nt, Human
guccagcugcugccucccaacccaugcccgcu

SEQ ID NO: 474391 - RNA, 32 nt, Human
guccagcuggaacggcagcccaguccagccuu

SEQ ID NO: 474392 - RNA, 32 nt, Human
guccagcugggccuccugccuccgggcaggca

SEQ ID NO: 474393 - RNA, 32 nt, Human
guccagcugggggaugccugccuggauaucga

SEQ ID NO: 474394 - RNA, 32 nt, Human
guccagcuucugucugugucacuaaucuuucc

SEQ ID NO: 474395 - RNA, 32 nt, Human
guccaggaagauuggcuguggccaggugcugg

SEQ ID NO: 474396 - RNA, 32 nt, Human
guccaggaaugagacucuuuuaagaaacacau

SEQ ID NO: 474397 - RNA, 32 nt, Human
guccaggaauuagagguugcagugagguauga

SEQ ID NO: 474398 - RNA, 32 nt, Human
guccaggagaagcaggcgccagggauccagug

SEQ ID NO: 474399 - RNA, 32 nt, Human
guccaggagaaggugcugcucuccuugcuuuc

SEQ ID NO: 474400 - RNA, 32 nt, Human
guccaggagagggagcgccccuggcugccccu

SEQ ID NO: 474401 - RNA, 32 nt, Human
guccaggagauggagagaggugagcacuauga

SEQ ID NO: 474402 - RNA, 32 nt, Human
guccaggaggcggaggcugcagugagcuguga

SEQ ID NO: 474403 - RNA, 32 nt, Human
guccaggaggucgaggcugcagugagccaaga

SEQ ID NO: 474404 - RNA, 32 nt, Human
guccaggagguggaggcugcagugagcuauga

SEQ ID NO: 474405 - RNA, 32 nt, Human
guccaggagguugaggcugcagugagcuguga

SEQ ID NO: 474406 - RNA, 32 nt, Human
guccaggaguucaaggcugcagugaguuguga

SEQ ID NO: 474407 - RNA, 32 nt, Human
guccaggaguucaagguggcagugagcuauuc

SEQ ID NO: 474408 - RNA, 32 nt, Human
guccaggaguuggaggcuacagugagccauga

SEQ ID NO: 474409 - RNA, 32 nt, Human
guccaggaguuuaagaccagccuggacaacau

SEQ ID NO: 474410 - RNA, 32 nt, Human
guccaggaguuugagaccagccuggacaacau

SEQ ID NO: 474411 - RNA, 32 nt, Human
guccaggaucaaggagucgcucagugcaggac

SEQ ID NO: 474412 - RNA, 21 nt, Human
guccaggauggagugcagugg

SEQ ID NO: 474413 - RNA, 32 nt, Human
guccaggauuccucuuuucucugccauaaaug

SEQ ID NO: 474414 - RNA, 32 nt, Human
guccaggcaccagcucagcuccacacuagccu

SEQ ID NO: 474415 - RNA, 21 nt, Human
guccaggcaggagugcagugg

SEQ ID NO: 474416 - RNA, 23 nt, Human
guccaggcaggagugcaguggug

SEQ ID NO: 474417 - RNA, 32 nt, Human
guccaggcaggcggggaugugcggugaccacc

SEQ ID NO: 474418 - RNA, 32 nt, Human
guccaggcagugagccaagauugugccaccac

SEQ ID NO: 474419 - RNA, 20 nt, Human
guccaggcauaguaccuucc

SEQ ID NO: 474420 - RNA, 21 nt, Human
guccaggcaugggucccuucc

SEQ ID NO: 474421 - RNA, 32 nt, Human
guccaggcauguuggacucugagcucauuugg

SEQ ID NO: 474422 - RNA, 32 nt, Human
guccaggccacaugggcacaugcuauuauaau

SEQ ID NO: 474423 - RNA, 32 nt, Human
guccaggccaggucuucauccugcugccaagu

SEQ ID NO: 474424 - RNA, 30 nt, Human
guccaggcccucuccauggaccuguaugug

SEQ ID NO: 474425 - RNA, 32 nt, Human
guccaggcccuguggcaggacacacaugguga

SEQ ID NO: 474426 - RNA, 23 nt, Human
guccaggccugugaggugcagag

SEQ ID NO: 474427 - RNA, 32 nt, Human
guccaggccuucucccccacacccucaggccg

SEQ ID NO: 474428 - RNA, 32 nt, Human
guccaggccuucuuuacuuucuccccuguauu

SEQ ID NO: 474429 - RNA, 32 nt, Human
guccaggcuaagaggugggauuugagcugaga

SEQ ID NO: 474430 - RNA, 32 nt, Human
guccaggcuacagagggugacuccagguucca

SEQ ID NO: 474431 - RNA, 21 nt, Human
guccaggcuagagugcagugg

SEQ ID NO: 474432 - RNA, 24 nt, Human
guccaggcuagagugcaguggugu

SEQ ID NO: 474433 - RNA, 32 nt, Human
guccaggcuagauucaaacuccugggcucaag

SEQ ID NO: 474434 - RNA, 32 nt, Human
guccaggcuagucucgaauuccugggcucaag

SEQ ID NO: 474435 - RNA, 32 nt, Human
guccaggcucaauccuaggcccuggccugauu

SEQ ID NO: 474436 - RNA, 20 nt, Human
guccaggcuggagggcagug

SEQ ID NO: 474437 - RNA, 19 nt, Human
guccaggcuggagugcaau

SEQ ID NO: 474438 - RNA, 21 nt, Human
guccaggcuggagugcaauag

SEQ ID NO: 474439 - RNA, 20 nt, Human
guccaggcuggagugcaaug

SEQ ID NO: 474440 - RNA, 21 nt, Human
guccaggcuggagugcaaugg

SEQ ID NO: 474441 - RNA, 24 nt, Human
guccaggcuggagugcaauggugu

SEQ ID NO: 474442 - RNA, 18 nt, Human
guccaggcuggagugcag

SEQ ID NO: 474443 - RNA, 19 nt, Human
guccaggcuggagugcagu

SEQ ID NO: 474444 - RNA, 21 nt, Human
guccaggcuggagugcaguag

SEQ ID NO: 474445 - RNA, 20 nt, Human
guccaggcuggagugcagug

SEQ ID NO: 474446 - RNA, 23 nt, Human
guccaggcuggagugcagugcug

SEQ ID NO: 474447 - RNA, 32 nt, Human
guccaggcuggagugcagugcugcaaucuugg

SEQ ID NO: 474448 - RNA, 21 nt, Human
guccaggcuggagugcagugg

SEQ ID NO: 474449 - RNA, 24 nt, Human
guccaggcuggagugcaguggcgu

SEQ ID NO: 474450 - RNA, 23 nt, Human
guccaggcuggagugcaguggug

SEQ ID NO: 474451 - RNA, 24 nt, Human
guccaggcuggagugcaguggugu

SEQ ID NO: 474452 - RNA, 20 nt, Human
guccaggcuggaguucagug

SEQ ID NO: 474453 - RNA, 21 nt, Human
guccaggcuggaguucagugg

SEQ ID NO: 474454 - RNA, 32 nt, Human
guccaggcuggauucaaacuccugggcucaag

SEQ ID NO: 474455 - RNA, 32 nt, Human
guccaggcuggccucuguggcugcccucuggg

SEQ ID NO: 474456 - RNA, 32 nt, Human
guccaggcuggucacgaacuccugggcucaag

SEQ ID NO: 474457 - RNA, 32 nt, Human
guccaggcuggucucagaauucuggugaguga

SEQ ID NO: 474458 - RNA, 32 nt, Human
guccaggcuguguuuggcuuucagggaggccc

SEQ ID NO: 474459 - RNA, 32 nt, Human
guccagggaaagagccaggaauggcagugucu

SEQ ID NO: 474460 - RNA, 18 nt, Human
guccagggacagcucccu

SEQ ID NO: 474461 - RNA, 32 nt, Human
guccagggaggcaggcaguuaacugagaauug

SEQ ID NO: 474462 - RNA, 32 nt, Human
guccagggaggguggaggcccaggagaccaaa

SEQ ID NO: 474463 - RNA, 32 nt, Human
guccagggcaaggacguggccagugggagcug

SEQ ID NO: 474464 - RNA, 32 nt, Human
guccagggccagccugcaguacagaggcugga

SEQ ID NO: 474465 - RNA, 19 nt, Human
guccagggccugggcuccc

SEQ ID NO: 474466 - RNA, 32 nt, Human
guccagggcucccacaggucucagacugacag

SEQ ID NO: 474467 - RNA, 32 nt, Human
guccagggcucccggagagggagucagucuuc

SEQ ID NO: 474468 - RNA, 32 nt, Human
guccagggcucucuaggagucugcaccugcag

SEQ ID NO: 474469 - RNA, 32 nt, Human
guccagggcugcuuccuguccuggaggggcca

SEQ ID NO: 474470 - RNA, 32 nt, Human
guccagggcugugacagaccaggccuuccccu

SEQ ID NO: 474471 - RNA, 32 nt, Human
guccagggcuucagauauuuugcacgaauuuu

SEQ ID NO: 474472 - RNA, 32 nt, Human
guccagggucaccaagcagcagagcucugggg

SEQ ID NO: 474473 - RNA, 32 nt, Human
guccaggguccaggguccagagaagggagugg

SEQ ID NO: 474474 - RNA, 32 nt, Human
guccaggguucugcagggccuuccuccuccag

SEQ ID NO: 474475 - RNA, 32 nt, Human
guccagguaaaaaugugaagaccaugguuuug

SEQ ID NO: 474476 - RNA, 32 nt, Human
guccaggucagaaaguggcccaggaagggggc

SEQ ID NO: 474477 - RNA, 32 nt, Human
guccaggucgaguuccagagauuacucagaac

SEQ ID NO: 474478 - RNA, 32 nt, Human
guccaggugcccuguccagcugacugcaagga

SEQ ID NO: 474479 - RNA, 32 nt, Human
guccaguacaguagccaguggccacauaaacc

SEQ ID NO: 474480 - RNA, 32 nt, Human
guccagucaccaccugcagccucggcagggca

SEQ ID NO: 474481 - RNA, 32 nt, Human
guccagucccuccaaauccggcuacacucuac

SEQ ID NO: 474482 - RNA, 32 nt, Human
guccaguccucaggugagguuaaguccuucua

SEQ ID NO: 474483 - RNA, 32 nt, Human
guccaguccuucagaaggcaucaggaaggcaa

SEQ ID NO: 474484 - RNA, 32 nt, Human
guccagucucaagugaguucuuggccugggcc

SEQ ID NO: 474485 - RNA, 20 nt, Human
guccagucuggagugcaaug

SEQ ID NO: 474486 - RNA, 21 nt, Human
guccagucuggagugcaaugg

SEQ ID NO: 474487 - RNA, 32 nt, Human
guccagugacuuucaggaauugcccauuguuu

SEQ ID NO: 474488 - RNA, 32 nt, Human
guccagugaggugauugggagagguuauuuuc

SEQ ID NO: 474489 - RNA, 24 nt, Human
guccagugcccaucucuugcuugu

SEQ ID NO: 474490 - RNA, 32 nt, Human
guccagugcccuuuucagugcuaccggccucu

SEQ ID NO: 474491 - RNA, 32 nt, Human
guccagugcgggcucccgcugcugggggagag

SEQ ID NO: 474492 - RNA, 32 nt, Human
guccagugcuccaggcugggggccguggaucc

SEQ ID NO: 474493 - RNA, 32 nt, Human
guccagugcuugguccugcucuggucacuggg

SEQ ID NO: 474494 - RNA, 32 nt, Human
guccaguggaaugggggccaggagugcuggcu

SEQ ID NO: 474495 - RNA, 32 nt, Human
guccaguggccccucaccacacugacuuauuu

SEQ ID NO: 474496 - RNA, 24 nt, Human
guccaguggcucacaccuguaauc

SEQ ID NO: 474497 - RNA, 24 nt, Human
guccaguggcucacgccuguaauc

SEQ ID NO: 474498 - RNA, 32 nt, Human
guccagugggugugaggcugacuugccgacgg

SEQ ID NO: 474499 - RNA, 32 nt, Human
guccaguguguauccugcaucugccuuuccug

SEQ ID NO: 474500 - RNA, 32 nt, Human
guccaguguugucaugucaucaugcccccuca

SEQ ID NO: 474501 - RNA, 32 nt, Human
guccaguguuugagccaagguugccaccuguc

SEQ ID NO: 474502 - RNA, 32 nt, Human
guccaguugaggcagaggcaauaaccucccau

SEQ ID NO: 474503 - RNA, 32 nt, Human
guccaguuuacagcgucucugcccccuagcgu

SEQ ID NO: 474504 - RNA, 32 nt, Human
guccaguuucucuccccucugaccccuagaag

SEQ ID NO: 474505 - RNA, 32 nt, Human
guccaguuugucucccccguucaggccgccag

SEQ ID NO: 474506 - RNA, 32 nt, Human
guccauaaaggauuguaucaaguagaugggac

SEQ ID NO: 474507 - RNA, 32 nt, Human
guccauaaccaaagggagcacagucugcaccc

SEQ ID NO: 474508 - RNA, 32 nt, Human
guccauacacagaaacauaauaaacaaucuuc

SEQ ID NO: 474509 - RNA, 22 nt, Human
guccauaccccuuuuacuuccu

SEQ ID NO: 474510 - RNA, 32 nt, Human
guccauacuugagagaaaaacuuagaucugag

SEQ ID NO: 474511 - RNA, 32 nt, Human
guccauagcccagccagaugagcuugcagccu

SEQ ID NO: 474512 - RNA, 32 nt, Human
guccauagccucuguucguuuucacugcagga

SEQ ID NO: 474513 - RNA, 32 nt, Human
guccauaguauuauugcuaaucuuuugguuua

SEQ ID NO: 474514 - RNA, 32 nt, Human
guccauagucauuacucagucaaaacuugugu

SEQ ID NO: 474515 - RNA, 32 nt, Human
guccauaguggagggcccagagcccagugagg

SEQ ID NO: 474516 - RNA, 21 nt, Human
guccauaucaucagacucccu

SEQ ID NO: 474517 - RNA, 32 nt, Human
guccauauuugaaggcugccucaggccuggca

SEQ ID NO: 474518 - RNA, 32 nt, Human
guccaucaaaggagguugcugaccugaccgug

SEQ ID NO: 474519 - RNA, 32 nt, Human
guccaucaaggcagagcggcaagagccaggug

SEQ ID NO: 474520 - RNA, 21 nt, Human
guccaucacagugagcucccu

SEQ ID NO: 474521 - RNA, 32 nt, Human
guccaucaccagcaaccaauccaccaacagaa

SEQ ID NO: 474522 - RNA, 21 nt, Human
guccaucaguuaaaauuuuaa

SEQ ID NO: 474523 - RNA, 32 nt, Human
guccaucaugaagaacauggccacggagcugg

SEQ ID NO: 474524 - RNA, 32 nt, Human
guccauccacgggacccugaaacuccacuugg

SEQ ID NO: 474525 - RNA, 32 nt, Human
guccauccaucuaugcugcuuccacagagaaa

SEQ ID NO: 474526 - RNA, 32 nt, Human
guccaucccaaagcugcccugcagccuagccc

SEQ ID NO: 474527 - RNA, 32 nt, Human
guccaucccagagcauucaugaagucuucccg

SEQ ID NO: 474528 - RNA, 25 nt, Human
guccauccgugaccgcguggccuug

SEQ ID NO: 474529 - RNA, 22 nt, Human
guccauccucccuauggcccug

SEQ ID NO: 474530 - RNA, 32 nt, Human
guccauccucucaacagccccaugaagaaggg

SEQ ID NO: 474531 - RNA, 32 nt, Human
guccauccuuuccccaucccugccuccugccc

SEQ ID NO: 474532 - RNA, 32 nt, Human
guccaucggggaacuuacagccuagcaaggaa

SEQ ID NO: 474533 - RNA, 32 nt, Human
guccaucguggguaacagccuuggggagggug

SEQ ID NO: 474534 - RNA, 32 nt, Human
guccaucuccuccugcccgcagacacaggagu

SEQ ID NO: 474535 - RNA, 31 nt, Human
guccaucuccucucugagccucaguuuaccc

SEQ ID NO: 474536 - RNA, 32 nt, Human
guccaucugacuccugagccugugcuuuuccc

SEQ ID NO: 474537 - RNA, 32 nt, Human
guccaucugcaccaggcucugccuucacuccc

SEQ ID NO: 474538 - RNA, 32 nt, Human
guccaucugccaggaccccugcguccaaauuc

SEQ ID NO: 474539 - RNA, 32 nt, Human
guccaucuggggaccaugaggguugguguggg

SEQ ID NO: 474540 - RNA, 32 nt, Human
guccaucuguucccucuccucuccucauuccc

SEQ ID NO: 474541 - RNA, 32 nt, Human
guccaucuuuacccuucucugagcuaugcagc

SEQ ID NO: 474542 - RNA, 32 nt, Human
guccaucuuuggcaggcgcaaauguuuggcga

SEQ ID NO: 474543 - RNA, 32 nt, Human
guccaugaagggggugugagggggaggguauu

SEQ ID NO: 474544 - RNA, 32 nt, Human
guccaugagaacagccaugaaauaagucacua

SEQ ID NO: 474545 - RNA, 32 nt, Human
guccaugagagggcaggguaaugaggaggagu

SEQ ID NO: 474546 - RNA, 32 nt, Human
guccaugagggagagguugcugagaaguacau

SEQ ID NO: 474547 - RNA, 32 nt, Human
guccaugcaggggccacauccaaaaaggggag

SEQ ID NO: 474548 - RNA, 32 nt, Human
guccaugcauguuggagggaccaggccaucgu

SEQ ID NO: 474549 - RNA, 32 nt, Human
guccaugccagcaacacaaucacucaaagucc

SEQ ID NO: 474550 - RNA, 32 nt, Human
guccaugccaggacaccagcugacaauuucuu

SEQ ID NO: 474551 - RNA, 32 nt, Human
guccaugcccccugugcccacccuccccaggu

SEQ ID NO: 474552 - RNA, 32 nt, Human
guccaugcccucagggagucaggcugguggag

SEQ ID NO: 474553 - RNA, 22 nt, Human
guccaugcccuuugugauuuca

SEQ ID NO: 474554 - RNA, 29 nt, Human
guccaugcugccccucugccucguggccg

SEQ ID NO: 474555 - RNA, 32 nt, Human
guccaugcuggcugccuucaggaagcuaaagu

SEQ ID NO: 474556 - RNA, 32 nt, Human
guccauggagcugagcagcaggaggaggagcc

SEQ ID NO: 474557 - RNA, 32 nt, Human
guccauggagcugagggucggaggaaccuucc

SEQ ID NO: 474558 - RNA, 23 nt, Human
guccauggccacucaaccuguca

SEQ ID NO: 474559 - RNA, 32 nt, Human
guccauggucgcggcguccugaggcgggggac

SEQ ID NO: 474560 - RNA, 21 nt, Human
guccaugguuagaauuugauc

SEQ ID NO: 474561 - RNA, 20 nt, Human
guccauguacccuccuuccu

SEQ ID NO: 474562 - RNA, 32 nt, Human
guccauguacccuccuuccucacuacagucau

SEQ ID NO: 474563 - RNA, 32 nt, Human
guccaugucugugcuggcuggaagagggcuug

SEQ ID NO: 474564 - RNA, 32 nt, Human
guccauguuccaacugcuguacauccaaaagu

SEQ ID NO: 474565 - RNA, 32 nt, Human
guccauuaaaugucuuucuuuuguaaguugcc

SEQ ID NO: 474566 - RNA, 29 nt, Human
guccauuaugucugugugccuggaugucu

SEQ ID NO: 474567 - RNA, 32 nt, Human
guccauucacccucaccucucccugcauggag

SEQ ID NO: 474568 - RNA, 32 nt, Human
guccauuccauguaccagcuuaguuaugauac

SEQ ID NO: 474569 - RNA, 22 nt, Human
guccauuccccuuuucccuccu

SEQ ID NO: 474570 - RNA, 32 nt, Human
guccauuccccuuuucccuccugugcucuguc

SEQ ID NO: 474571 - RNA, 32 nt, Human
guccauuccucuuucaucuuaaucaaggacau

SEQ ID NO: 474572 - RNA, 32 nt, Human
guccauuccuuccaaagaagcuaaggcuaugc

SEQ ID NO: 474573 - RNA, 32 nt, Human
guccauucucacugcugggacacucaugaaaa

SEQ ID NO: 474574 - RNA, 32 nt, Human
guccauucucagcaugcugcuaauucaaacuc

SEQ ID NO: 474575 - RNA, 32 nt, Human
guccauucucauuccugcucugggccauuugu

SEQ ID NO: 474576 - RNA, 32 nt, Human
guccauucugcagcguuucucuuucccuugga

SEQ ID NO: 474577 - RNA, 32 nt, Human
guccauucugcccucgcugccuggugaggacc

SEQ ID NO: 474578 - RNA, 32 nt, Human
guccauucugcccucugaauggaucugagacg

SEQ ID NO: 474579 - RNA, 32 nt, Human
guccauugaugcuuugagauucugagcuauuu

SEQ ID NO: 474580 - RNA, 32 nt, Human
guccauuggcagcaccugccuccuggugucuc

SEQ ID NO: 474581 - RNA, 32 nt, Human
guccauuggcaugcuucugcugggugagcagg

SEQ ID NO: 474582 - RNA, 32 nt, Human
guccauuuaaguuagggggacaggaggcuaca

SEQ ID NO: 474583 - RNA, 32 nt, Human
guccauuuggcagggguggcugccucauuuag

SEQ ID NO: 474584 - RNA, 32 nt, Human
guccauuugggugacaaccagugacuugggaa

SEQ ID NO: 474585 - RNA, 32 nt, Human
guccauuuucccuccugggaccagagcugacu

SEQ ID NO: 474586 - RNA, 19 nt, Human
guccauuuucuagcugccu

SEQ ID NO: 474587 - RNA, 21 nt, Human
gucccaaaaccucauucccuu

SEQ ID NO: 474588 - RNA, 18 nt, Human
gucccaaaaggcacuguc

SEQ ID NO: 474589 - RNA, 20 nt, Human
gucccaaagaucaaguuguc

SEQ ID NO: 474590 - RNA, 32 nt, Human
gucccaaagugcuaggauuacaggcaugagcc

SEQ ID NO: 474591 - RNA, 32 nt, Human
gucccaaagugcugggauuauaggcgugagcc

SEQ ID NO: 474592 - RNA, 32 nt, Human
gucccaacagaggaggccagugaggcagagac

SEQ ID NO: 474593 - RNA, 32 nt, Human
gucccaaccuugaggcguggagcccagucuuu

SEQ ID NO: 474594 - RNA, 32 nt, Human
gucccaacuccuuuucccuauuuccuucuccu

SEQ ID NO: 474595 - RNA, 32 nt, Human
gucccaagaaauggaggaagaaaacaaagaau

SEQ ID NO: 474596 - RNA, 32 nt, Human
gucccaagaccuccugaaggaggagcuugcuc

SEQ ID NO: 474597 - RNA, 32 nt, Human
gucccaagauggcugcuguauccccaagaauc

SEQ ID NO: 474598 - RNA, 32 nt, Human
gucccaagcccaccccuccucccaccaucacc

SEQ ID NO: 474599 - RNA, 32 nt, Human
gucccaagcuuugccuacaucaccgccuuggu

SEQ ID NO: 474600 - RNA, 32 nt, Human
gucccaaggagaaggaagagcugaaauucauc

SEQ ID NO: 474601 - RNA, 32 nt, Human
gucccaaguagcuggaauuacagccaugcggc

SEQ ID NO: 474602 - RNA, 32 nt, Human
gucccaagucaauggaaagggaaagggugggg

SEQ ID NO: 474603 - RNA, 32 nt, Human
gucccaaugacuuuccuuuacccuccagcugu

SEQ ID NO: 474604 - RNA, 32 nt, Human
gucccaaugccacuugcuuccuuuccaagccg

SEQ ID NO: 474605 - RNA, 31 nt, Human
gucccaaugucagugaaacccagcugggggc

SEQ ID NO: 474606 - RNA, 32 nt, Human
gucccaauuccaaccugacucugguguagauc

SEQ ID NO: 474607 - RNA, 32 nt, Human
gucccaauuuucucccucccugugugucacua

SEQ ID NO: 474608 - RNA, 32 nt, Human
gucccacaagcagaguaggagaauacucuuuu

SEQ ID NO: 474609 - RNA, 32 nt, Human
gucccacacagccccagcuggggcaaacagcc

SEQ ID NO: 474610 - RNA, 32 nt, Human
gucccacacugaaauccccucuagucacccau

SEQ ID NO: 474611 - RNA, 32 nt, Human
gucccacacugugcagacccagucccacacug

SEQ ID NO: 474612 - RNA, 32 nt, Human
gucccacagaagacccagacggucuguguggc

SEQ ID NO: 474613 - RNA, 32 nt, Human
gucccacagauguguucacagggccagcacug

SEQ ID NO: 474614 - RNA, 32 nt, Human
gucccacagcaagggagagcaagaacgcacaa

SEQ ID NO: 474615 - RNA, 18 nt, Human
gucccacagcaucuccua

SEQ ID NO: 474616 - RNA, 32 nt, Human
gucccacagccaccaccucucuccucagccag

SEQ ID NO: 474617 - RNA, 32 nt, Human
gucccacaggcaggagggaucuggaccggcgg

SEQ ID NO: 474618 - RNA, 20 nt, Human
gucccacaggugccuaaggg

SEQ ID NO: 474619 - RNA, 22 nt, Human
gucccaccagccaacugcaacu

SEQ ID NO: 474620 - RNA, 32 nt, Human
gucccaccauuuucucaguuucucccucucuc

SEQ ID NO: 474621 - RNA, 32 nt, Human
gucccaccgcacuccagccugggcaacagagu

SEQ ID NO: 474622 - RNA, 32 nt, Human
gucccaccucacugccccgccucgccucucug

SEQ ID NO: 474623 - RNA, 32 nt, Human
gucccaccucagaguaaggacuacccaggggu

SEQ ID NO: 474624 - RNA, 32 nt, Human
gucccaccucccacuuuccaucauggccugaa

SEQ ID NO: 474625 - RNA, 32 nt, Human
gucccaccucucccccuccacuuccucuccuc

SEQ ID NO: 474626 - RNA, 32 nt, Human
gucccaccuggaggaggagguuggaggguuga

SEQ ID NO: 474627 - RNA, 32 nt, Human
gucccaccuggcucccccugcuggugucuagu

SEQ ID NO: 474628 - RNA, 32 nt, Human
gucccaccuuuguccccuggcugcugcccucc

SEQ ID NO: 474629 - RNA, 21 nt, Human
gucccacgcucccuggcgcgu

SEQ ID NO: 474630 - RNA, 20 nt, Human
gucccacgcucucagggggg

SEQ ID NO: 474631 - RNA, 32 nt, Human
gucccacggaggaggggcagagccaggaggca

SEQ ID NO: 474632 - RNA, 23 nt, Human
gucccacguggggcccacgggug

SEQ ID NO: 474633 - RNA, 32 nt, Human
gucccacguucucugcugacaucccccaauaa

SEQ ID NO: 474634 - RNA, 32 nt, Human
gucccacuccaucacccaggcuggaguccagu

SEQ ID NO: 474635 - RNA, 32 nt, Human
gucccacugcacuccagcccgggcaacagagu

SEQ ID NO: 474636 - RNA, 32 nt, Human
gucccacugcacuccagccugggcaacagagu

SEQ ID NO: 474637 - RNA, 27 nt, Human
gucccacuggccagccaucuuugcuca

SEQ ID NO: 474638 - RNA, 32 nt, Human
gucccacugucucucuccuucucuccaguuuu

SEQ ID NO: 474639 - RNA, 32 nt, Human
gucccacuguguucccagcuuccagagugaca

SEQ ID NO: 474640 - RNA, 32 nt, Human
gucccacuucagccucccaaauagcugggacu

SEQ ID NO: 474641 - RNA, 32 nt, Human
gucccacuuccaacguuggggauuacacuuca

SEQ ID NO: 474642 - RNA, 32 nt, Human
gucccacuuccccuuggcacauagaagaggca

SEQ ID NO: 474643 - RNA, 32 nt, Human
gucccacuugcaacuucuuucuguugagagaa

SEQ ID NO: 474644 - RNA, 32 nt, Human
gucccagaaagccggggguaggggccacccug

SEQ ID NO: 474645 - RNA, 32 nt, Human
gucccagaaauucccaggagggucagagaaga

SEQ ID NO: 474646 - RNA, 32 nt, Human
gucccagaagccucuggguugcagauugcuug

SEQ ID NO: 474647 - RNA, 32 nt, Human
gucccagaaggacuguggcuugugugugucca

SEQ ID NO: 474648 - RNA, 32 nt, Human
gucccagaaggaggggacagaggagcugagag

SEQ ID NO: 474649 - RNA, 32 nt, Human
gucccagaaggaugucaguaauugugacuagg

SEQ ID NO: 474650 - RNA, 32 nt, Human
gucccagaaguaaacccucacugugaaucaga

SEQ ID NO: 474651 - RNA, 32 nt, Human
gucccagacacauuucagcagcuuugagaaau

SEQ ID NO: 474652 - RNA, 32 nt, Human
gucccagaccaacugcuuccauggcccaaacg

SEQ ID NO: 474653 - RNA, 32 nt, Human
gucccagaccuagguacauggauauagggcuc

SEQ ID NO: 474654 - RNA, 32 nt, Human
gucccagagaaaagcaggcuguggaaaacugg

SEQ ID NO: 474655 - RNA, 20 nt, Human
gucccagagaaacugccaca

SEQ ID NO: 474656 - RNA, 32 nt, Human
gucccagagaacuacuucuaugugccagaccu

SEQ ID NO: 474657 - RNA, 32 nt, Human
gucccagagacaccugagccaccccacagaac

SEQ ID NO: 474658 - RNA, 32 nt, Human
gucccagagacauuuucccauggcaguccucc

SEQ ID NO: 474659 - RNA, 32 nt, Human
gucccagagugcugggauuacaguugugagcc

SEQ ID NO: 474660 - RNA, 32 nt, Human
gucccagauaaccuugaggccugggcacuggc

SEQ ID NO: 474661 - RNA, 22 nt, Human
gucccagaucaagccugccuca

SEQ ID NO: 474662 - RNA, 32 nt, Human
gucccagaucagugaggggagaagguugagcu

SEQ ID NO: 474663 - RNA, 32 nt, Human
gucccagcaacuugggaggcugaggcagaagu

SEQ ID NO: 474664 - RNA, 32 nt, Human
gucccagcacccuuggccugaguaaacuugga

SEQ ID NO: 474665 - RNA, 32 nt, Human
gucccagcagcaucugcccugugaaguuuguu

SEQ ID NO: 474666 - RNA, 32 nt, Human
gucccagcagccucccccuggccagggccauc

SEQ ID NO: 474667 - RNA, 32 nt, Human
gucccagcaggggcggcaggagagagaggcug

SEQ ID NO: 474668 - RNA, 32 nt, Human
gucccagcagguaugggcagguugcuugaggc

SEQ ID NO: 474669 - RNA, 32 nt, Human
gucccagccaacacccucuagguccuaaaagu

SEQ ID NO: 474670 - RNA, 32 nt, Human
gucccagccacugaagccagaggaucgauuga

SEQ ID NO: 474671 - RNA, 32 nt, Human
gucccagccagugaggaugacagugacaccca

SEQ ID NO: 474672 - RNA, 32 nt, Human
gucccagccaugguccgcccaaugcucuugcu

SEQ ID NO: 474673 - RNA, 32 nt, Human
gucccagcccacauagaugccccuugcugagg

SEQ ID NO: 474674 - RNA, 19 nt, Human
gucccagcccaccuacuca

SEQ ID NO: 474675 - RNA, 32 nt, Human
gucccagcccagugcugggacagggaaggaug

SEQ ID NO: 474676 - RNA, 32 nt, Human
gucccagccuccagaacugagcgaugaaauuc

SEQ ID NO: 474677 - RNA, 19 nt, Human
gucccagcggaugcugcca

SEQ ID NO: 474678 - RNA, 22 nt, Human
gucccagcgggugcgucugcag

SEQ ID NO: 474679 - RNA, 23 nt, Human
gucccagcuacucagaaggauga

SEQ ID NO: 474680 - RNA, 23 nt, Human
gucccagcuacucagaaggccga

SEQ ID NO: 474681 - RNA, 23 nt, Human
gucccagcuacucagaaggguga

SEQ ID NO: 474682 - RNA, 23 nt, Human
gucccagcuacucaggagacuga

SEQ ID NO: 474683 - RNA, 32 nt, Human
gucccagcuacucaggagacugaggcgggaga

SEQ ID NO: 474684 - RNA, 32 nt, Human
gucccagcuacucaggagacugaggcuagaag

SEQ ID NO: 474685 - RNA, 32 nt, Human
gucccagcuacucaggagacugaggugggagg

SEQ ID NO: 474686 - RNA, 23 nt, Human
gucccagcuacucaggaggccga

SEQ ID NO: 474687 - RNA, 26 nt, Human
gucccagcuacucaggaggcucagca

SEQ ID NO: 474688 - RNA, 32 nt, Human
gucccagcuacucaggaggcugggcaggagaa

SEQ ID NO: 474689 - RNA, 31 nt, Human
gucccagcuacucaggagguugaagugggag

SEQ ID NO: 474690 - RNA, 31 nt, Human
gucccagcuacucaggagguugaggcagaag

SEQ ID NO: 474691 - RNA, 31 nt, Human
gucccagcuacucaggagguugagguaggag

SEQ ID NO: 474692 - RNA, 31 nt, Human
gucccagcuacucaggagguugaggugggaa

SEQ ID NO: 474693 - RNA, 32 nt, Human
gucccagcuacucccagcuauucaggaggcug

SEQ ID NO: 474694 - RNA, 32 nt, Human
gucccagcuacucgcgagacugaggcaggaga

SEQ ID NO: 474695 - RNA, 32 nt, Human
gucccagcuacucgggagacucaugcaggagg

SEQ ID NO: 474696 - RNA, 23 nt, Human
gucccagcuacucgggagacuga

SEQ ID NO: 474697 - RNA, 32 nt, Human
gucccagcuacucgggagacugaggcaggaga

SEQ ID NO: 474698 - RNA, 32 nt, Human
gucccagcuacucgggagacugaggcaggagg

SEQ ID NO: 474699 - RNA, 23 nt, Human
gucccagcuacucgggaggccga

SEQ ID NO: 474700 - RNA, 31 nt, Human
gucccagcuacucgggagguugaggcaggag

SEQ ID NO: 474701 - RNA, 23 nt, Human
gucccagcuacucugaagacuga

SEQ ID NO: 474702 - RNA, 32 nt, Human
gucccagcuacuuagggaggcuaagauaggag

SEQ ID NO: 474703 - RNA, 32 nt, Human
gucccagcuacuugggagguugaggcuggaag

SEQ ID NO: 474704 - RNA, 32 nt, Human
gucccagcuccaggcuggagccagugaagggu

SEQ ID NO: 474705 - RNA, 31 nt, Human
gucccagcucccaaggagguugcagaaguac

SEQ ID NO: 474706 - RNA, 32 nt, Human
gucccagcucuggagcaagcuguagacggaca

SEQ ID NO: 474707 - RNA, 32 nt, Human
gucccagcugccugccugccucuuaggagucc

SEQ ID NO: 474708 - RNA, 32 nt, Human
gucccagcugcuggucacggagcggagaaagc

SEQ ID NO: 474709 - RNA, 32 nt, Human
gucccagcuggcuggguccucuucugccccca

SEQ ID NO: 474710 - RNA, 32 nt, Human
gucccagcugugcaucaccaaugucagcaguc

SEQ ID NO: 474711 - RNA, 21 nt, Human
gucccaggaaacagugcuuuc

SEQ ID NO: 474712 - RNA, 17 nt, Human
gucccaggaaagcuguu

SEQ ID NO: 474713 - RNA, 20 nt, Human
gucccaggaacucaggcuuc

SEQ ID NO: 474714 - RNA, 32 nt, Human
gucccaggaagagacaggccaggcuuaugggc

SEQ ID NO: 474715 - RNA, 17 nt, Human
gucccaggaagagcuuc

SEQ ID NO: 474716 - RNA, 18 nt, Human
gucccaggaagccgcuuc

SEQ ID NO: 474717 - RNA, 19 nt, Human
gucccaggaagcucauguc

SEQ ID NO: 474718 - RNA, 20 nt, Human
gucccaggaaguccagcucc

SEQ ID NO: 474719 - RNA, 32 nt, Human
gucccaggacccagggagaguguggggacagg

SEQ ID NO: 474720 - RNA, 20 nt, Human
gucccaggaccuugaguguc

SEQ ID NO: 474721 - RNA, 32 nt, Human
gucccaggacgugccucauacaugacuugagc

SEQ ID NO: 474722 - RNA, 16 nt, Human
gucccaggagcagcug

SEQ ID NO: 474723 - RNA, 17 nt, Human
gucccaggagcagcugu

SEQ ID NO: 474724 - RNA, 19 nt, Human
gucccaggaggcagcucuc

SEQ ID NO: 474725 - RNA, 17 nt, Human
gucccaggaggcagcug

SEQ ID NO: 474726 - RNA, 17 nt, Human
gucccaggaucaggcug

SEQ ID NO: 474727 - RNA, 17 nt, Human
gucccaggauggagcug

SEQ ID NO: 474728 - RNA, 32 nt, Human
gucccaggcacuaucuggagugcuuuacacau

SEQ ID NO: 474729 - RNA, 32 nt, Human
gucccaggcagugaugaugguggagaacagcc

SEQ ID NO: 474730 - RNA, 32 nt, Human
gucccaggcaucucucuagaguuuauuuacag

SEQ ID NO: 474731 - RNA, 17 nt, Human
gucccaggccagcuguc

SEQ ID NO: 474732 - RNA, 18 nt, Human
gucccaggcccaaugccu

SEQ ID NO: 474733 - RNA, 32 nt, Human
gucccaggcccugggggugagggggaggggac

SEQ ID NO: 474734 - RNA, 17 nt, Human
gucccaggccgcccucc

SEQ ID NO: 474735 - RNA, 32 nt, Human
gucccaggccugggacccagagccaagaaagc

SEQ ID NO: 474736 - RNA, 32 nt, Human
gucccaggccuggugcccagacuccuugcaug

SEQ ID NO: 474737 - RNA, 32 nt, Human
gucccaggcgccggcgccuggagcccaacugc

SEQ ID NO: 474738 - RNA, 22 nt, Human
gucccaggcuagagugcagugg

SEQ ID NO: 474739 - RNA, 22 nt, Human
gucccaggcuggagugcagugg

SEQ ID NO: 474740 - RNA, 32 nt, Human
gucccaggcuguggugccacccucucuggcau

SEQ ID NO: 474741 - RNA, 32 nt, Human
gucccagggcaggcgggacagcacagaggcag

SEQ ID NO: 474742 - RNA, 32 nt, Human
gucccagggccccuccuggggaugcucgccag

SEQ ID NO: 474743 - RNA, 32 nt, Human
gucccaggggccugaaaaggaaggaccaggcu

SEQ ID NO: 474744 - RNA, 32 nt, Human
gucccaggggucuuggcuguugccccacgaaa

SEQ ID NO: 474745 - RNA, 32 nt, Human
gucccagggucuuccugucacccaggcuggag

SEQ ID NO: 474746 - RNA, 32 nt, Human
gucccaggugcucaggaagcugaggugggagg

SEQ ID NO: 474747 - RNA, 32 nt, Human
gucccaggugugaaagagggucugugccuccg

SEQ ID NO: 474748 - RNA, 32 nt, Human
gucccaguauacucacuuaucucauccaugga

SEQ ID NO: 474749 - RNA, 32 nt, Human
gucccaguauuuuuagccccaaaggagaagug

SEQ ID NO: 474750 - RNA, 32 nt, Human
gucccagucaguccggaggcugcggcugcaga

SEQ ID NO: 474751 - RNA, 32 nt, Human
gucccagugcgaggccgggagcgaauggaaaa

SEQ ID NO: 474752 - RNA, 32 nt, Human
gucccagugcugcugcagcucugagcauuccc

SEQ ID NO: 474753 - RNA, 16 nt, Human
gucccaguggaagcug

SEQ ID NO: 474754 - RNA, 32 nt, Human
gucccaguggauugauguuguuuuuaauggau

SEQ ID NO: 474755 - RNA, 32 nt, Human
gucccauaaggguuggaaguuguguagcauuc

SEQ ID NO: 474756 - RNA, 32 nt, Human
gucccauagggaggucacaaagaaguccuuau

SEQ ID NO: 474757 - RNA, 32 nt, Human
gucccaucaauuccaaagauguuuccaguggu

SEQ ID NO: 474758 - RNA, 32 nt, Human
gucccaucaccugaaccuucagucucccccau

SEQ ID NO: 474759 - RNA, 18 nt, Human
gucccaucacucacugcc

SEQ ID NO: 474760 - RNA, 32 nt, Human
gucccaucauuucccagaaggcagcagacaga

SEQ ID NO: 474761 - RNA, 21 nt, Human
gucccauccacaccagcuccc

SEQ ID NO: 474762 - RNA, 22 nt, Human
gucccaucugccccagagcgcu

SEQ ID NO: 474763 - RNA, 32 nt, Human
gucccaugaaauauauguauacauuccccacu

SEQ ID NO: 474764 - RNA, 32 nt, Human
gucccaugggugggggacaggagcugcuuccc

SEQ ID NO: 474765 - RNA, 32 nt, Human
gucccaugucaugcagaggugacaggguaucc

SEQ ID NO: 474766 - RNA, 32 nt, Human
gucccaugugagccacggugccccaccuuuua

SEQ ID NO: 474767 - RNA, 32 nt, Human
gucccauuagagauguaucaccaccuugucac

SEQ ID NO: 474768 - RNA, 22 nt, Human
gucccauucaagccaccgagcu

SEQ ID NO: 474769 - RNA, 20 nt, Human
gucccauucuccacucacug

SEQ ID NO: 474770 - RNA, 32 nt, Human
gucccauuuuccgacuaggagacaucuuccga

SEQ ID NO: 474771 - RNA, 32 nt, Human
gucccauuuuccugagugcuuuugccagacuu

SEQ ID NO: 474772 - RNA, 32 nt, Human
guccccaaagagagccucgccacuggcuucag

SEQ ID NO: 474773 - RNA, 32 nt, Human
guccccaaagugucacagauauugaacccacu

SEQ ID NO: 474774 - RNA, 32 nt, Human
guccccaacgcugggcuugcuugggggcagcc

SEQ ID NO: 474775 - RNA, 32 nt, Human
guccccaagagauucagagaaaagaggucaau

SEQ ID NO: 474776 - RNA, 24 nt, Human
guccccaaggcuggagugcagugg

SEQ ID NO: 474777 - RNA, 31 nt, Human
guccccaauguguccauugaugccagagaau

SEQ ID NO: 474778 - RNA, 18 nt, Human
guccccacaccagccugu

SEQ ID NO: 474779 - RNA, 32 nt, Human
guccccacagccagccccagaugcuucugaca

SEQ ID NO: 474780 - RNA, 32 nt, Human
guccccaccaacaccaggaauuuagaccuuuu

SEQ ID NO: 474781 - RNA, 18 nt, Human
guccccaccaccccugcc

SEQ ID NO: 474782 - RNA, 19 nt, Human
guccccaccagggcucccu

SEQ ID NO: 474783 - RNA, 32 nt, Human
guccccaccagugcccagcccaggcaggguca

SEQ ID NO: 474784 - RNA, 20 nt, Human
guccccaccccccuccgccc

SEQ ID NO: 474785 - RNA, 32 nt, Human
guccccacccgcacgcucucuggaccacuaca

SEQ ID NO: 474786 - RNA, 32 nt, Human
guccccacccuaacccccaccucccggcccug

SEQ ID NO: 474787 - RNA, 32 nt, Human
guccccacccugccuccucccugcugcuuugc

SEQ ID NO: 474788 - RNA, 20 nt, Human
guccccacccuuccccgccc

SEQ ID NO: 474789 - RNA, 32 nt, Human
guccccacgguuccuuucugcuuuucugaaug

SEQ ID NO: 474790 - RNA, 32 nt, Human
guccccacuagccaggcucuuugagggcaggg

SEQ ID NO: 474791 - RNA, 32 nt, Human
guccccacugcacccccuccagaggcgacuuu

SEQ ID NO: 474792 - RNA, 32 nt, Human
guccccacuggcccugagcacgacagcccuuc

SEQ ID NO: 474793 - RNA, 32 nt, Human
guccccacuguggccuucuccuuuggcgcucc

SEQ ID NO: 474794 - RNA, 32 nt, Human
gucugaccccucucuccaccccugggcuaugc

SEQ ID NO: 474795 - RNA, 20 nt, Human
gucugacccgccuccuuccc

SEQ ID NO: 474796 - RNA, 32 nt, Human
gucugacccuagaggcagaugcugcacugcac

SEQ ID NO: 474797 - RNA, 32 nt, Human
gucugaccucaggccuuuuagccauauuucag

SEQ ID NO: 474798 - RNA, 32 nt, Human
gucugacucccgcucuuccugccugaaggugc

SEQ ID NO: 474799 - RNA, 32 nt, Human
gucugacucuaucacccaggcuggagugcagu

SEQ ID NO: 474800 - RNA, 32 nt, Human
gucugacucuggagcccagccugcugcuuccc

SEQ ID NO: 474801 - RNA, 32 nt, Human
gucugacucuuccucuuccuccugcucccugg

SEQ ID NO: 474802 - RNA, 32 nt, Human
gucugacugcaagcgcugaguccuuccagagg

SEQ ID NO: 474803 - RNA, 32 nt, Human
gucugacugcaccugcauccuuagcucagagc

SEQ ID NO: 474804 - RNA, 32 nt, Human
gucugacuggcacugccuuuuguuugcccuug

SEQ ID NO: 474805 - RNA, 32 nt, Human
gucugacuguugcccaggcuggaguguaaugg

SEQ ID NO: 474806 - RNA, 32 nt, Human
gucugacuucaaggaacucaguuuaauuuuga

SEQ ID NO: 474807 - RNA, 32 nt, Human
gucugacuucucucccccaccugcugugcccu

SEQ ID NO: 474808 - RNA, 32 nt, Human
gucugacuucugcaucuccuuccaggucagcu

SEQ ID NO: 474809 - RNA, 32 nt, Human
gucugacuugauaacuccagugccaguauagu

SEQ ID NO: 474810 - RNA, 32 nt, Human
gucugacuugcagccaacucucaaggcaaggc

SEQ ID NO: 474811 - RNA, 32 nt, Human
gucugagaagccccuucucuccuuccuuuauc

SEQ ID NO: 474812 - RNA, 32 nt, Human
gucugagacaggacccaggcacccucacggca

SEQ ID NO: 474813 - RNA, 32 nt, Human
gucugagacaguguugcuacugcugagggaac

SEQ ID NO: 474814 - RNA, 32 nt, Human
gucugagaccagccuggcuaacauggugaaac

SEQ ID NO: 474815 - RNA, 32 nt, Human
gucugagaccagccugggcaacauggugaaac

SEQ ID NO: 474816 - RNA, 32 nt, Human
gucugagacucacaggaaggaggagccgaccg

SEQ ID NO: 474817 - RNA, 32 nt, Human
gucugagagaucugaaauaaccuuucccagug

SEQ ID NO: 474818 - RNA, 32 nt, Human
gucugagagcuagccagaacugggguacagcc

SEQ ID NO: 474819 - RNA, 32 nt, Human
gucugagaggagaacuuccuggagccagugcc

SEQ ID NO: 474820 - RNA, 32 nt, Human
gucugagauacauucaccuaacauacaagauu

SEQ ID NO: 474821 - RNA, 32 nt, Human
gucugagaugguaggagcaguugugugaagau

SEQ ID NO: 474822 - RNA, 32 nt, Human
gucugagcacagaagacagugucuuggacgcc

SEQ ID NO: 474823 - RNA, 32 nt, Human
gucugagccaagcaggacccugucccagagca

SEQ ID NO: 474824 - RNA, 32 nt, Human
gucugagcccagccaccugaguuuuuaguacu

SEQ ID NO: 474825 - RNA, 32 nt, Human
gucugagcccaggauucgugcaacaccaggaa

SEQ ID NO: 474826 - RNA, 32 nt, Human
gucugagccccagcugaagggacugagccuca

SEQ ID NO: 474827 - RNA, 32 nt, Human
gucugagcuaaaaucuaggugauuguucauca

SEQ ID NO: 474828 - RNA, 18 nt, Human
gucugagcucgggcuccc

SEQ ID NO: 474829 - RNA, 21 nt, Human
gucugagcuguggaaaaggga

SEQ ID NO: 474830 - RNA, 32 nt, Human
gucugaggaggugacaucggagcugagaacug

SEQ ID NO: 474831 - RNA, 32 nt, Human
gucugaggcccagguugacccguggucauggu

SEQ ID NO: 474832 - RNA, 32 nt, Human
gucugagggaagggaggcaggcagcuuacuac

SEQ ID NO: 474833 - RNA, 32 nt, Human
gucugagggaugaccucuccuagccaccucug

SEQ ID NO: 474834 - RNA, 32 nt, Human
gucugagggauggacgagacgagcccacuagu

SEQ ID NO: 474835 - RNA, 32 nt, Human
gucugagggcuaucguuccagcagagaucaac

SEQ ID NO: 474836 - RNA, 32 nt, Human
gucugaggugacaccaucauuaaggauucgac

SEQ ID NO: 474837 - RNA, 32 nt, Human
gucugagguggagggagucauggcaggacagg

SEQ ID NO: 474838 - RNA, 32 nt, Human
gucugagguucuugccugccuucccucccauu

SEQ ID NO: 474839 - RNA, 32 nt, Human
gucugaguacaaguuccacuucaggauggcgc

SEQ ID NO: 474840 - RNA, 32 nt, Human
gucugagucagguuuguugagaacaagcccuc

SEQ ID NO: 474841 - RNA, 32 nt, Human
gucugaguccaaccucagcuucccagccagca

SEQ ID NO: 474842 - RNA, 32 nt, Human
gucugaguccagauuucuucucuccuuacuuc

SEQ ID NO: 474843 - RNA, 32 nt, Human
gucugagucugaguccugucucugccugcggc

SEQ ID NO: 474844 - RNA, 32 nt, Human
gucugagucugcagucccgagaucccagccau

SEQ ID NO: 474845 - RNA, 32 nt, Human
gucugagugaagauagcagggaugcuguguuc

SEQ ID NO: 474846 - RNA, 32 nt, Human
gucugagugcguguggggaccucagaacacug

SEQ ID NO: 474847 - RNA, 32 nt, Human
gucugaguggccuggcccaucuggcccaccug

SEQ ID NO: 474848 - RNA, 32 nt, Human
gucugaguuagaaccacuuguuuuggggaagu

SEQ ID NO: 474849 - RNA, 32 nt, Human
gucugaguucucucuuccuuccccugcauaga

SEQ ID NO: 474850 - RNA, 32 nt, Human
gucugaguuggcagcaaggacccccagcucuc

SEQ ID NO: 474851 - RNA, 27 nt, Human
gucugauaaguauugucagugugcaaa

SEQ ID NO: 474852 - RNA, 32 nt, Human
gucugauacuaauccaggcacacugcugcugu

SEQ ID NO: 474853 - RNA, 32 nt, Human
gucugauagauaacuaacaaaauaguuuuagu

SEQ ID NO: 474854 - RNA, 32 nt, Human
gucugauagauggggaacggcaucucugagga

SEQ ID NO: 474855 - RNA, 31 nt, Human
gucugauaguccuaggagguucuggaagaaa

SEQ ID NO: 474856 - RNA, 18 nt, Human
gucugaucccagagggug

SEQ ID NO: 474857 - RNA, 32 nt, Human
gucugauccucccuggcccacucaccaggguc

SEQ ID NO: 474858 - RNA, 32 nt, Human
gucugauccugguuuccaccuccagcccuggg

SEQ ID NO: 474859 - RNA, 32 nt, Human
gucugaucuaaauguggagaaacuguagucuc

SEQ ID NO: 474860 - RNA, 32 nt, Human
gucugaugaaggcagggguggugauucaugcu

SEQ ID NO: 474861 - RNA, 21 nt, Human
gucugaugacuuccucuuccc

SEQ ID NO: 474862 - RNA, 32 nt, Human
gucugauggagguuugcucuuguugcccaggc

SEQ ID NO: 474863 - RNA, 32 nt, Human
gucugauguguaagcagccucuccccaucuac

SEQ ID NO: 474864 - RNA, 32 nt, Human
gucugauguucuguuccauuguacaucgaaga

SEQ ID NO: 474865 - RNA, 32 nt, Human
gucugauuacaauggacuugacucccacgcuu

SEQ ID NO: 474866 - RNA, 32 nt, Human
gucugauucccaagcucugcuccucuccccag

SEQ ID NO: 474867 - RNA, 32 nt, Human
gucugauucgauccucccugauggcaauggag

SEQ ID NO: 474868 - RNA, 32 nt, Human
gucugauuggcacaucaagaguuaacucugcc

SEQ ID NO: 474869 - RNA, 32 nt, Human
gucugauugguugcaggaggggaccaaucaga

SEQ ID NO: 474870 - RNA, 32 nt, Human
gucugauuuaauaaaugguucauuuuaaaagu

SEQ ID NO: 474871 - RNA, 32 nt, Human
gucugcaaaaugaagauugaggaggugaagag

SEQ ID NO: 474872 - RNA, 32 nt, Human
gucugcaaaaugcagaggucaccagagccaag

SEQ ID NO: 474873 - RNA, 32 nt, Human
gucugcaaagguguaaucuuuggaagacuuca

SEQ ID NO: 474874 - RNA, 32 nt, Human
gucugcaaaguagagcuguuauguuuuucuug

SEQ ID NO: 474875 - RNA, 32 nt, Human
gucugcaaaguagagggccaucgcucaccaau

SEQ ID NO: 474876 - RNA, 32 nt, Human
gucugcaacuuccugaggccuguucugaaaua

SEQ ID NO: 474877 - RNA, 32 nt, Human
gucugcaagggcccagagugaaccguccuuuc

SEQ ID NO: 474878 - RNA, 32 nt, Human
gucugcaaugcuguuuauauuuugggugauga

SEQ ID NO: 474879 - RNA, 32 nt, Human
gucugcacaagccuggacaaguucuuccauau

SEQ ID NO: 474880 - RNA, 32 nt, Human
gucugcacaccguugagcacagcagcuuagac

SEQ ID NO: 474881 - RNA, 32 nt, Human
gucugcacaccucgcucugccugccauggcug

SEQ ID NO: 474882 - RNA, 32 nt, Human
gucugcacacuggccucugcagccagauuucu

SEQ ID NO: 474883 - RNA, 18 nt, Human
gucugcacaguuuccaaa

SEQ ID NO: 474884 - RNA, 32 nt, Human
gucugcacccacccuuccacccucagggccug

SEQ ID NO: 474885 - RNA, 32 nt, Human
gucugcacugacagccugaagggucuacaccc

SEQ ID NO: 474886 - RNA, 32 nt, Human
gucugcacugcaaccuccaccaggaccaggau

SEQ ID NO: 474887 - RNA, 32 nt, Human
gucugcacugcaacuucuguauccuuccuucc

SEQ ID NO: 474888 - RNA, 32 nt, Human
gucugcacuggagcugccuggugaccagaagu

SEQ ID NO: 474889 - RNA, 32 nt, Human
gucugcacuugggaacaaucauucucccccag

SEQ ID NO: 474890 - RNA, 30 nt, Human
gucugcagaaaucucauguuguguucuuuc

SEQ ID NO: 474891 - RNA, 19 nt, Human
gucugcagagugcucucua

SEQ ID NO: 474892 - RNA, 32 nt, Human
gucugcagaguguugggucuguagccagcaaa

SEQ ID NO: 474893 - RNA, 32 nt, Human
gucugcagcaagggcauuacugcccagguaag

SEQ ID NO: 474894 - RNA, 32 nt, Human
gucugcagcucccagcgagaucaaugaagaag

SEQ ID NO: 474895 - RNA, 32 nt, Human
gucugcagcugcugcccuucucccaggccccc

SEQ ID NO: 474896 - RNA, 32 nt, Human
gucugcaggaauuggcuuauuucuguaugcca

SEQ ID NO: 474897 - RNA, 32 nt, Human
gucugcaggagagcaagccaggaggacauggg

SEQ ID NO: 474898 - RNA, 20 nt, Human
gucugcaggcaccaggcugg

SEQ ID NO: 474899 - RNA, 32 nt, Human
gucugcaggccaggagagaugcugcccaggcc

SEQ ID NO: 474900 - RNA, 23 nt, Human
gucugcagggacagccaccggca

SEQ ID NO: 474901 - RNA, 32 nt, Human
gucugcagggccagaggccaggagggugccuc

SEQ ID NO: 474902 - RNA, 22 nt, Human
gucugcagggucccuccuuccu

SEQ ID NO: 474903 - RNA, 24 nt, Human
gucugcagguccagccggcuggca

SEQ ID NO: 474904 - RNA, 23 nt, Human
gucugcagguuccaugggugaca

SEQ ID NO: 474905 - RNA, 22 nt, Human
gucugcagguugcaaggcagca

SEQ ID NO: 474906 - RNA, 23 nt, Human
gucugcagucagagccacugaca

SEQ ID NO: 474907 - RNA, 32 nt, Human
gucugcaguccugugcucacagacaucugaaa

SEQ ID NO: 474908 - RNA, 32 nt, Human
gucugcagucgcugcaaccuacccucucucug

SEQ ID NO: 474909 - RNA, 23 nt, Human
gucugcauaaacuucaucuucaa

SEQ ID NO: 474910 - RNA, 32 nt, Human
gucugcauaaccugaaugaaagaaggaaauga

SEQ ID NO: 474911 - RNA, 18 nt, Human
gucugcauaacuuucgaa

SEQ ID NO: 474912 - RNA, 32 nt, Human
gucugcaucaaaggaacauuugcuucacuggg

SEQ ID NO: 474913 - RNA, 32 nt, Human
gucugcauccaccuccccagccuuugucaccg

SEQ ID NO: 474914 - RNA, 32 nt, Human
gucugcauccccuuuccaaggcugcuucccug

SEQ ID NO: 474915 - RNA, 32 nt, Human
gucugcaugaacuacugaaagcugcugagugu

SEQ ID NO: 474916 - RNA, 32 nt, Human
gucugcauggcagagagcgcccugccaugaga

SEQ ID NO: 474917 - RNA, 21 nt, Human
gucugcaugggaccauuucaa

SEQ ID NO: 474918 - RNA, 32 nt, Human
gucugcauuccaccacauauccacccuugaga

SEQ ID NO: 474919 - RNA, 18 nt, Human
gucugccaccaccaugcc

SEQ ID NO: 474920 - RNA, 17 nt, Human
gucugccaccauaccca

SEQ ID NO: 474921 - RNA, 32 nt, Human
gucugccacccaggcuggaguccaguggcgug

SEQ ID NO: 474922 - RNA, 32 nt, Human
gucugccacuaccacugugcugugcugugggg

SEQ ID NO: 474923 - RNA, 32 nt, Human
gucugccacuggcuuucaugcccuauuccagg

SEQ ID NO: 474924 - RNA, 32 nt, Human
gucugccacuugucaaagaaggugcugauccu

SEQ ID NO: 474925 - RNA, 22 nt, Human
gucugccacuuuccgggccaug

SEQ ID NO: 474926 - RNA, 32 nt, Human
gucugccagcagaggcaguagggcacagaggg

SEQ ID NO: 474927 - RNA, 23 nt, Human
gucugccaggauggagugcagug

SEQ ID NO: 474928 - RNA, 24 nt, Human
gucugccaggauggagugcagugg

SEQ ID NO: 474929 - RNA, 32 nt, Human
gucugccaggcugggagcuggagcuugcugag

SEQ ID NO: 474930 - RNA, 32 nt, Human
gucugccagggagccagaaggaagggccuugc

SEQ ID NO: 474931 - RNA, 32 nt, Human
gucugccaucagcuuaguuagccauugaugca

SEQ ID NO: 474932 - RNA, 32 nt, Human
gucugccaugcgcuucuuccucccaggcuacc

SEQ ID NO: 474933 - RNA, 22 nt, Human
gucugccaugcucugugcaaug

SEQ ID NO: 474934 - RNA, 32 nt, Human
gucugccauuuggagaaauuuaaaugcuauuu

SEQ ID NO: 474935 - RNA, 32 nt, Human
gucugcccaagugucuuaggaaccaaaagcaa

SEQ ID NO: 474936 - RNA, 32 nt, Human
gucugcccacaaagaauccagcuuugacauua

SEQ ID NO: 474937 - RNA, 32 nt, Human
gucugcccacuucccucccccugccgaggcug

SEQ ID NO: 474938 - RNA, 32 nt, Human
gucugccccacccucaaacccuguggggccug

SEQ ID NO: 474939 - RNA, 20 nt, Human
gucugccccacugggucugg

SEQ ID NO: 474940 - RNA, 32 nt, Human
gucugcccccauguuucagucaccucccucca

SEQ ID NO: 474941 - RNA, 18 nt, Human
gucugccccucaguuggu

SEQ ID NO: 474942 - RNA, 23 nt, Human
gucugccccucccguggcugcca

SEQ ID NO: 474943 - RNA, 32 nt, Human
gucugccccuuucacauaauuuuaaccugguu

SEQ ID NO: 474944 - RNA, 32 nt, Human
gucugcccgggcccgcccaucgggguccccaa

SEQ ID NO: 474945 - RNA, 32 nt, Human
gucugcccgugagccucagcagauauggcucc

SEQ ID NO: 474946 - RNA, 20 nt, Human
gucugcccuauccacagcug

SEQ ID NO: 474947 - RNA, 32 nt, Human
gucugcccucugcauccucuggagccagccga

SEQ ID NO: 474948 - RNA, 32 nt, Human
gucugcccugagcugugccugugugcuccagc

SEQ ID NO: 474949 - RNA, 32 nt, Human
gucugcccugcaggaugccgcagcugagccug

SEQ ID NO: 474950 - RNA, 32 nt, Human
gucugcccugcagggaguaccgaccuauccca

SEQ ID NO: 474951 - RNA, 32 nt, Human
gucugcccugggccucaguuucccucuuaacg

SEQ ID NO: 474952 - RNA, 32 nt, Human
gucugcccuucaggagcucgcagcuggugugc

SEQ ID NO: 474953 - RNA, 18 nt, Human
gucugccgggcacagugg

SEQ ID NO: 474954 - RNA, 32 nt, Human
gucugccgggggcccaggcugugcugucccug

SEQ ID NO: 474955 - RNA, 32 nt, Human
gucugccguccuggacuccaucaaggcccagc

SEQ ID NO: 474956 - RNA, 32 nt, Human
gucugccuaaacucagugucucuccuagaaaa

SEQ ID NO: 474957 - RNA, 23 nt, Human
gucugccuacuggguugacgcca

SEQ ID NO: 474958 - RNA, 23 nt, Human
gucugccuaggagcuggcuggca

SEQ ID NO: 474959 - RNA, 23 nt, Human
gucugccuaggucacugcugcca

SEQ ID NO: 474960 - RNA, 32 nt, Human
gucugccuagugagugagcaggagaacaucau

SEQ ID NO: 474961 - RNA, 32 nt, Human
gucugccuccaggacucugagccuucugccuc

SEQ ID NO: 474962 - RNA, 22 nt, Human
gucugccuccgcacggcuggca

SEQ ID NO: 474963 - RNA, 32 nt, Human
gucugccucuacugugucucacaucaccaugu

SEQ ID NO: 474964 - RNA, 32 nt, Human
gucugccucuccucaaaugcugugugcugcaa

SEQ ID NO: 474965 - RNA, 32 nt, Human
gucugccucugccucugccucacccugcuggc

SEQ ID NO: 474966 - RNA, 32 nt, Human
gucugccucuguggauccacagccuggcagag

SEQ ID NO: 474967 - RNA, 32 nt, Human
gucugccugcagcaguacuacugucaacauag

SEQ ID NO: 474968 - RNA, 24 nt, Human
gucugccugcccagccaugcucca

SEQ ID NO: 474969 - RNA, 32 nt, Human
gucugccugccugagccucccaaagugcuggg

SEQ ID NO: 474970 - RNA, 32 nt, Human
gucugccugccugggccacccuuccugccugg

SEQ ID NO: 474971 - RNA, 32 nt, Human
gucugccugccuggggcauuccaggcuucgac

SEQ ID NO: 474972 - RNA, 32 nt, Human
gucugccugccuguuucugucugggugucuga

SEQ ID NO: 474973 - RNA, 20 nt, Human
gucugccugcgagggcugcc

SEQ ID NO: 474974 - RNA, 32 nt, Human
gucugccugcgguccuuccuccggccagagug

SEQ ID NO: 474975 - RNA, 32 nt, Human
gucugccugcugcugugcgguagcuccagaac

SEQ ID NO: 474976 - RNA, 32 nt, Human
gucugccuguggucccagcuacucgggaggcu

SEQ ID NO: 474977 - RNA, 32 nt, Human
gucugccuguucuccccucgucgguggcuaag

SEQ ID NO: 474978 - RNA, 32 nt, Human
gucugccuuccagguugaagagguucuccugc

SEQ ID NO: 474979 - RNA, 32 nt, Human
gucugccuugugaagguggcaggggccagguc

SEQ ID NO: 474980 - RNA, 32 nt, Human
gucugccuuucaaccaugccccugucccuggg

SEQ ID NO: 474981 - RNA, 32 nt, Human
gucugccuuucuguuuggcuucaguccuuaaa

SEQ ID NO: 474982 - RNA, 32 nt, Human
gucugccuuugagggcuugggcagcagcggca

SEQ ID NO: 474983 - RNA, 23 nt, Human
gucugccuuugcugccacugcca

SEQ ID NO: 474984 - RNA, 32 nt, Human
gucugcggcacaaccucucuugccuggugucg

SEQ ID NO: 474985 - RNA, 32 nt, Human
gucugcggccucuccaguccaaagcugcuccu

SEQ ID NO: 474986 - RNA, 32 nt, Human
gucugcgggagaaagaggagaaucacccaagc

SEQ ID NO: 474987 - RNA, 32 nt, Human
gucugcgggagaaagaggagaaucgcccaagc

SEQ ID NO: 474988 - RNA, 32 nt, Human
gucugcgggaggcggguuauggcggcggcggc

SEQ ID NO: 474989 - RNA, 32 nt, Human
gucugcgggcugggaacucucguccucggucc

SEQ ID NO: 474990 - RNA, 32 nt, Human
gucugcggggacugaggcauggcagggaaacu

SEQ ID NO: 474991 - RNA, 32 nt, Human
gucugcguccaauacacgcgugugcuccucuc

SEQ ID NO: 474992 - RNA, 32 nt, Human
gucugcuaaccaauuccagucugguccaugaa

SEQ ID NO: 474993 - RNA, 32 nt, Human
gucugcuagagcagugccaucugggucuggau

SEQ ID NO: 474994 - RNA, 32 nt, Human
gucugcuagaggcagaggaagaagggugagga

SEQ ID NO: 474995 - RNA, 32 nt, Human
gucugcucaagccucaggaucuggagaugcag

SEQ ID NO: 474996 - RNA, 32 nt, Human
gucugcucccucuccacucucuucucaaaugg

SEQ ID NO: 474997 - RNA, 32 nt, Human
gucugcuccugccuccuccaggcaaugagcac

SEQ ID NO: 474998 - RNA, 32 nt, Human
gucugcuccuucagccuccuugcucuuguugg

SEQ ID NO: 474999 - RNA, 32 nt, Human
gucugcucuccuccuuuuugguuugguuuugg

SEQ ID NO: 475000 - RNA, 32 nt, Human
gucugcucuccucucucuuccaacacagccca

SEQ ID NO: 475001 - RNA, 32 nt, Human
gucugcucugcagguucuucauacagcugccu

SEQ ID NO: 475002 - RNA, 32 nt, Human
gucugcucuucacccagcaccacagaggcacc

SEQ ID NO: 475003 - RNA, 32 nt, Human
gucugcucuuucccuccccauccucuggcaga

SEQ ID NO: 475004 - RNA, 32 nt, Human
gucugcugagcggcgcugugaccugcggccug

SEQ ID NO: 475005 - RNA, 31 nt, Human
gucugcugaugucucccuuuagucacgaggg

SEQ ID NO: 475006 - RNA, 32 nt, Human
gucugcugcaggccuccucccugcugccccaa

SEQ ID NO: 475007 - RNA, 32 nt, Human
gucugcugcaguaaaacacagaaggcuuuaaa

SEQ ID NO: 475008 - RNA, 32 nt, Human
gucugcugcauacuugacuagccuggacucca

SEQ ID NO: 475009 - RNA, 32 nt, Human
gucugcugccucuccaguccaaagcugcgccu

SEQ ID NO: 475010 - RNA, 32 nt, Human
gucugcugccuugguaauucuugguguggccu

SEQ ID NO: 475011 - RNA, 19 nt, Human
gucugcugcugccugggga

SEQ ID NO: 475012 - RNA, 23 nt, Human
gucugcugcuuugcucuuucaaa

SEQ ID NO: 475013 - RNA, 32 nt, Human
gucugcuggaagaguuuaucagcuggauaaug

SEQ ID NO: 475014 - RNA, 23 nt, Human
gucugcugggcaggccucgggga

SEQ ID NO: 475015 - RNA, 32 nt, Human
gucugcugguggucugcuuaccacagaauccu

SEQ ID NO: 475016 - RNA, 32 nt, Human
gucugcugucagccccuccuggugcuggugcc

SEQ ID NO: 475017 - RNA, 32 nt, Human
gucugcugucuuuucucccacagagcucuuga

SEQ ID NO: 475018 - RNA, 32 nt, Human
gucugcugugaaaggccagcucucggcagccc

SEQ ID NO: 475019 - RNA, 32 nt, Human
gucugcugugcccugaccacaggcugcuucau

SEQ ID NO: 475020 - RNA, 32 nt, Human
gucugcuucauacuuuuuccuaggcuuggcac

SEQ ID NO: 475021 - RNA, 32 nt, Human
gucugcuuccaaguucuuccaacugggcauau

SEQ ID NO: 475022 - RNA, 32 nt, Human
gucugcuucccaacugcaucccccacccagcu

SEQ ID NO: 475023 - RNA, 31 nt, Human
gucugcuugaacucugggcuuggugcagagu

SEQ ID NO: 475024 - RNA, 32 nt, Human
gucugcuuucuuucuccuucuacuaugcugga

SEQ ID NO: 475025 - RNA, 32 nt, Human
gucugcuuugcaauagcaaagacuuggaacca

SEQ ID NO: 475026 - RNA, 32 nt, Human
gucugcuuugucagaggccagaauucugacuu

SEQ ID NO: 475027 - RNA, 32 nt, Human
gucuggaaaauagaagaguguguugggcaggu

SEQ ID NO: 475028 - RNA, 32 nt, Human
gucuggaaaugaaguacagagagcaaggcucc

SEQ ID NO: 475029 - RNA, 22 nt, Human
gucuggaacagcaagcucgaga

SEQ ID NO: 475030 - RNA, 32 nt, Human
gucuggaacuccugggcucaagcaauccuccc

SEQ ID NO: 475031 - RNA, 32 nt, Human
gucuggaagaagaggaggaagacucuggagcc

SEQ ID NO: 475032 - RNA, 17 nt, Human
gucuggaagacccaagg

SEQ ID NO: 475033 - RNA, 32 nt, Human
gucuggaagaugaccacugacuccuacucucc

SEQ ID NO: 475034 - RNA, 32 nt, Human
gucuggaagcauccugugcugugcacaccugc

SEQ ID NO: 475035 - RNA, 32 nt, Human
gucuggaaguggugggaggcagcuguggugca

SEQ ID NO: 475036 - RNA, 32 nt, Human
gucuggacugcggaggccggggcgguggcgug

SEQ ID NO: 475037 - RNA, 32 nt, Human
gucuggacuuugcuuccccuccaggagggacc

SEQ ID NO: 475038 - RNA, 32 nt, Human
gucuggagacguucccucugcccagguggggg

SEQ ID NO: 475039 - RNA, 24 nt, Human
gucuggagagccaugaagagggaa

SEQ ID NO: 475040 - RNA, 32 nt, Human
gucuggagaggauuuugugugaaaguaaaugg

SEQ ID NO: 475041 - RNA, 32 nt, Human
gucuggagagucucuucagaccuccaauaaaa

SEQ ID NO: 475042 - RNA, 32 nt, Human
gucuggagcaguggggcacaccccggaggagg

SEQ ID NO: 475043 - RNA, 32 nt, Human
gucuggagccugaauucauuuggaagaguuag

SEQ ID NO: 475044 - RNA, 32 nt, Human
gucuggagccuggcuacucugcauuugggauu

SEQ ID NO: 475045 - RNA, 32 nt, Human
gucuggagccugggagccuccugaagucccgg

SEQ ID NO: 475046 - RNA, 32 nt, Human
gucuggagcgaauuccagccugcagggcugau

SEQ ID NO: 475047 - RNA, 19 nt, Human
gucuggagcucacccaagg

SEQ ID NO: 475048 - RNA, 23 nt, Human
gucuggagcuggggaaagaggaa

SEQ ID NO: 475049 - RNA, 32 nt, Human
gucuggaggaggggacaugaggugagagguau

SEQ ID NO: 475050 - RNA, 32 nt, Human
gucuggaggcagcagggaugcugcugggaguc

SEQ ID NO: 475051 - RNA, 32 nt, Human
gucuggaguccgugagacugaaaggacccgug

SEQ ID NO: 475052 - RNA, 32 nt, Human
gucuggaguggaccuccagcaaacuccagcag

SEQ ID NO: 475053 - RNA, 32 nt, Human
gucuggagugggauaggagcagugagugacaa

SEQ ID NO: 475054 - RNA, 32 nt, Human
gucuggaguuccacgguguggugggccagagg

SEQ ID NO: 475055 - RNA, 32 nt, Human
gucuggaguuguuuccuucugguggguucaug

SEQ ID NO: 475056 - RNA, 19 nt, Human
gucuggauacaggcucccu

SEQ ID NO: 475057 - RNA, 32 nt, Human
gucuggauccugcgacagggaggcccuggacu

SEQ ID NO: 475058 - RNA, 32 nt, Human
gucuggaucuguggugagaugggggaaguggg

SEQ ID NO: 475059 - RNA, 32 nt, Human
gucuggauuucuaacaguccuugcuucggggc

SEQ ID NO: 475060 - RNA, 32 nt, Human
gucuggcaacuaugaaccuaauggugcccuaa

SEQ ID NO: 475061 - RNA, 32 nt, Human
gucuggcaagggacaggaagcugauagaaagu

SEQ ID NO: 475062 - RNA, 32 nt, Human
gucuggcacacaguaggugcucauuggcuccc

SEQ ID NO: 475063 - RNA, 32 nt, Human
gucuggcacauccuuaauccugugccccugcc

SEQ ID NO: 475064 - RNA, 32 nt, Human
gucuggcagagcugacaccaggauucaguggg

SEQ ID NO: 475065 - RNA, 32 nt, Human
gucuggcagagcuggugugagacgagacaauc

SEQ ID NO: 475066 - RNA, 32 nt, Human
gucuggcagccuggauauccucuccuaccggc

SEQ ID NO: 475067 - RNA, 32 nt, Human
gucuggcagcguggggagagggaccaaccgac

SEQ ID NO: 475068 - RNA, 27 nt, Human
gucuggcagggcugguguggggugcag

SEQ ID NO: 475069 - RNA, 32 nt, Human
gucuggcaggugggggaaugagaugagaaagu

SEQ ID NO: 475070 - RNA, 32 nt, Human
gucuggccaggguugacuugagcugagacacc

SEQ ID NO: 475071 - RNA, 32 nt, Human
gucuggcccaaucucugugucaucauugucau

SEQ ID NO: 475072 - RNA, 19 nt, Human
gucuggcccacauuuucaa

SEQ ID NO: 475073 - RNA, 19 nt, Human
gucuggcccaguucagaga

SEQ ID NO: 475074 - RNA, 32 nt, Human
gucuggccccacccuggagucuugccucacag

SEQ ID NO: 475075 - RNA, 32 nt, Human
gucuggcccuccugcugcagcuggauucucug

SEQ ID NO: 475076 - RNA, 32 nt, Human
gucuggccgggacuugggccuggguggcuuuu

SEQ ID NO: 475077 - RNA, 32 nt, Human
gucuggccuccagggaccuagagaaugggagg

SEQ ID NO: 475078 - RNA, 32 nt, Human
gucuggccucuacaacaaguuuugcauuguag

SEQ ID NO: 475079 - RNA, 32 nt, Human
gucuggccucuuucacucagcacaauucuuuu

SEQ ID NO: 475080 - RNA, 32 nt, Human
gucuggccugggaacacugcgccuuagacaac

SEQ ID NO: 475081 - RNA, 32 nt, Human
gucuggccuuggccuccagccuggagaagggc

SEQ ID NO: 475082 - RNA, 32 nt, Human
gucuggccuuggggcucuaaguugaccucucu

SEQ ID NO: 475083 - RNA, 32 nt, Human
gucuggcggggaacagggaccaagagacaaca

SEQ ID NO: 475084 - RNA, 20 nt, Human
gucuggcucagcagcccccu

SEQ ID NO: 475085 - RNA, 32 nt, Human
gucuggcucuacugaugauggauaggccccuu

SEQ ID NO: 475086 - RNA, 32 nt, Human
gucuggcucugucccccaccucuuggccagcc

SEQ ID NO: 475087 - RNA, 18 nt, Human
gucuggcugaacugcaga

SEQ ID NO: 475088 - RNA, 32 nt, Human
gucuggcugccugggaugcccccugcccccuc

SEQ ID NO: 475089 - RNA, 23 nt, Human
gucuggcugcuguggcauugugu

SEQ ID NO: 475090 - RNA, 21 nt, Human
gucuggcugucaacugacaaa

SEQ ID NO: 475091 - RNA, 32 nt, Human
gucuggcugucaccuucacaagccacagaaac

SEQ ID NO: 475092 - RNA, 32 nt, Human
gucuggcuucugcaggggaaauuucaaggcca

SEQ ID NO: 475093 - RNA, 32 nt, Human
gucuggcuugcccaggcuggagugcgguggcu

SEQ ID NO: 475094 - RNA, 21 nt, Human
gucuggcuugcugaguguaaa

SEQ ID NO: 475095 - RNA, 32 nt, Human
gucuggcuugggagaugcuuucagguugcagc

SEQ ID NO: 475096 - RNA, 32 nt, Human
gucugggaagauuuugaaaacaggacaaagaa

SEQ ID NO: 475097 - RNA, 32 nt, Human
gucugggaagcauauggaccagugggaaggau

SEQ ID NO: 475098 - RNA, 20 nt, Human
gucugggaagugaaguucua

SEQ ID NO: 475099 - RNA, 32 nt, Human
gucugggacagacugcuccugacagaaggaug

SEQ ID NO: 475100 - RNA, 32 nt, Human
gucugggacagugccaagagugggguguguga

SEQ ID NO: 475101 - RNA, 21 nt, Human
gucugggaccuccuucuuccc

SEQ ID NO: 475102 - RNA, 32 nt, Human
gucugggaccugccuccaccccauccagggau

SEQ ID NO: 475103 - RNA, 32 nt, Human
gucugggagaaggaggcuacagugagcugugc

SEQ ID NO: 475104 - RNA, 32 nt, Human
gucugggaggcggagguugcagugagcugaga

SEQ ID NO: 475105 - RNA, 32 nt, Human
gucugggagggcaugggagcagugagcaggcc

SEQ ID NO: 475106 - RNA, 32 nt, Human
gucugggagguggaggcugcagugagccguga

SEQ ID NO: 475107 - RNA, 32 nt, Human
gucugggagguugaggcugcagugagcuguga

SEQ ID NO: 475108 - RNA, 32 nt, Human
gucugggagugagcaccaugcccaucacccag

SEQ ID NO: 475109 - RNA, 23 nt, Human
gucugggagugggguggggaggc

SEQ ID NO: 475110 - RNA, 32 nt, Human
gucugggauaagagguuaaugaauaucucaua

SEQ ID NO: 475111 - RNA, 32 nt, Human
gucugggaucuguucuggaacggaagccaacc

SEQ ID NO: 475112 - RNA, 28 nt, Human
gucugggcaagugcucccucacucccuu

SEQ ID NO: 475113 - RNA, 32 nt, Human
gucugggcacacacgagcagguggcaucuugg

SEQ ID NO: 475114 - RNA, 32 nt, Human
gucugggcacuggaugcaugaauuccacuccu

SEQ ID NO: 475115 - RNA, 32 nt, Human
gucugggcaggccacuuuuggaaguaggcguu

SEQ ID NO: 475116 - RNA, 32 nt, Human
gucugggcagucccuccucuccccagugucca

SEQ ID NO: 475117 - RNA, 32 nt, Human
gucugggccaacccuuccaugggugaagacaa

SEQ ID NO: 475118 - RNA, 32 nt, Human
gucugggccaagcacgaagcccuuucccaccc

SEQ ID NO: 475119 - RNA, 32 nt, Human
gucugggcccacccuucacaacugccuuucaa

SEQ ID NO: 475120 - RNA, 32 nt, Human
gucugggcccagccaguguggcuccaggugcc

SEQ ID NO: 475121 - RNA, 22 nt, Human
gucugggcccuagcgacgcccc

SEQ ID NO: 475122 - RNA, 18 nt, Human
gucugggcccugcucccu

SEQ ID NO: 475123 - RNA, 32 nt, Human
gucugggccgcuccaguguuuuggggcacaga

SEQ ID NO: 475124 - RNA, 19 nt, Human
gucugggccuguggcuccc

SEQ ID NO: 475125 - RNA, 32 nt, Human
gucugggcucacugcaaccucugccucccggg

SEQ ID NO: 475126 - RNA, 32 nt, Human
gucugggcuccagccagagaacaaucuuuuau

SEQ ID NO: 475127 - RNA, 32 nt, Human
gucugggcuccaggaguggaggcuggucuggg

SEQ ID NO: 475128 - RNA, 32 nt, Human
gucugggcucucauuacccaaacaucugagau

SEQ ID NO: 475129 - RNA, 32 nt, Human
gucugggcugagccggagggaggcgggaggac

SEQ ID NO: 475130 - RNA, 32 nt, Human
gucugggcugcagggacauugcagugucccau

SEQ ID NO: 475131 - RNA, 32 nt, Human
gucugggcuggagcgcaguccccagcuagcgu

SEQ ID NO: 475132 - RNA, 32 nt, Human
gucugggcugggacggacaggagaggcugucg

SEQ ID NO: 475133 - RNA, 32 nt, Human
gucugggcuguaauguggcacuggugggcugg

SEQ ID NO: 475134 - RNA, 32 nt, Human
gucugggcuguuuuugaaaaaguuuccauuaa

SEQ ID NO: 475135 - RNA, 20 nt, Human
gucuggggaagagaacccca

SEQ ID NO: 475136 - RNA, 32 nt, Human
gucuggggagagaaaagguggccaggauccua

SEQ ID NO: 475137 - RNA, 32 nt, Human
gucuggggagagagcuacaccuccccaggccc

SEQ ID NO: 475138 - RNA, 32 nt, Human
gucuggggagaggccuggggaggcgugguaug

SEQ ID NO: 475139 - RNA, 32 nt, Human
gucuggggaggacauugaacaggcugggcuga

SEQ ID NO: 475140 - RNA, 32 nt, Human
gucuggggaggcacauuuaugcacuuuguauc

SEQ ID NO: 475141 - RNA, 32 nt, Human
gucuggggcaccagguggagaccauggcagcc

SEQ ID NO: 475142 - RNA, 32 nt, Human
gucuggggcacucugcagguucugccuuugag

SEQ ID NO: 475143 - RNA, 16 nt, Human
gucuggggcaggggga

SEQ ID NO: 475144 - RNA, 32 nt, Human
gucuggggcagguggggcuggggaagggagca

SEQ ID NO: 475145 - RNA, 21 nt, Human
gucuggggccaggggagccca

SEQ ID NO: 475146 - RNA, 32 nt, Human
gucuggggccugauucucaggaaugccagugg

SEQ ID NO: 475147 - RNA, 32 nt, Human
gucuggggcucaggcuggugugggaugcagcc

SEQ ID NO: 475148 - RNA, 32 nt, Human
gucuggggcuccagggcuggacaugcagacag

SEQ ID NO: 475149 - RNA, 32 nt, Human
gucugggggaggaggagagaaggaaggggugg

SEQ ID NO: 475150 - RNA, 32 nt, Human
gucugggggccagaccaccccauuguccaucc

SEQ ID NO: 475151 - RNA, 32 nt, Human
gucugggggccagcggcagcgggucagucugg

SEQ ID NO: 475152 - RNA, 32 nt, Human
gucugggggccuggaguuuguauuugauuugc

SEQ ID NO: 475153 - RNA, 32 nt, Human
gucugggggcuggagucuggugguggcaagga

SEQ ID NO: 475154 - RNA, 32 nt, Human
gucugggggcugggcagcuaagaaaauuucuu

SEQ ID NO: 475155 - RNA, 32 nt, Human
gucuggggguugggacuggacccccugauugc

SEQ ID NO: 475156 - RNA, 32 nt, Human
gucuggggucacccucuccagcaagagaaccc

SEQ ID NO: 475157 - RNA, 32 nt, Human
gucuggggucagcaggagugagagcacugacc

SEQ ID NO: 475158 - RNA, 32 nt, Human
gucuggggucuggcugcugccugcuucuugcu

SEQ ID NO: 475159 - RNA, 32 nt, Human
gucugggguuaguguuuuacaaggucauuaca

SEQ ID NO: 475160 - RNA, 22 nt, Human
gucugggguuccuuuccuuucc

SEQ ID NO: 475161 - RNA, 32 nt, Human
gucugggucacuuuggaaacaggaauccucuc

SEQ ID NO: 475162 - RNA, 20 nt, Human
gucuggguccauccugguca

SEQ ID NO: 475163 - RNA, 32 nt, Human
gucugggucugcugccgaaacacugcccccag

SEQ ID NO: 475164 - RNA, 23 nt, Human
gucugggugccccuuuuccuccc

SEQ ID NO: 475165 - RNA, 32 nt, Human
gucuggguggggcuggagucuccacccucuga

SEQ ID NO: 475166 - RNA, 32 nt, Human
gucuggguggguuaugggaugugggcaucccu

SEQ ID NO: 475167 - RNA, 32 nt, Human
gucuggguucacucccugucaugacguccgcc

SEQ ID NO: 475168 - RNA, 32 nt, Human
gucuggguuccagggcugcugucuccuggcua

SEQ ID NO: 475169 - RNA, 32 nt, Human
gucuggguuugaggacaggggagugggaaaac

SEQ ID NO: 475170 - RNA, 32 nt, Human
gucugguagaaaccauauuuugguuaacagca

SEQ ID NO: 475171 - RNA, 32 nt, Human
gucugguagccuugcuccagaagccuguuccu

SEQ ID NO: 475172 - RNA, 32 nt, Human
gucugguaggagagagugcugcagagccacgu

SEQ ID NO: 475173 - RNA, 32 nt, Human
gucugguaggggugcuaggaccagccucgccu

SEQ ID NO: 475174 - RNA, 32 nt, Human
gucugguaucaggaccaaagcauuuuauucgc

SEQ ID NO: 475175 - RNA, 20 nt, Human
gucuggucagagccacaggg

SEQ ID NO: 475176 - RNA, 32 nt, Human
gucuggucagcauauguguauguaugcguaug

SEQ ID NO: 475177 - RNA, 32 nt, Human
gucuggucaggcaaugcccugcggcucuggaa

SEQ ID NO: 475178 - RNA, 32 nt, Human
gucugguccuccugcguguccuccccuccacu

SEQ ID NO: 475179 - RNA, 32 nt, Human
gucugguccucugagccccagugagaguuucc

SEQ ID NO: 475180 - RNA, 32 nt, Human
gucugguccuucaucccucccgcuucaccaga

SEQ ID NO: 475181 - RNA, 20 nt, Human
gucugguccuuuuccuuccc

SEQ ID NO: 475182 - RNA, 32 nt, Human
gucuggucgcagagacaggaacguguaauccu

SEQ ID NO: 475183 - RNA, 32 nt, Human
gucuggucucaaacucccaaccucaggugaua

SEQ ID NO: 475184 - RNA, 32 nt, Human
gucuggucucaaacucccgaccucaggugauc

SEQ ID NO: 475185 - RNA, 32 nt, Human
gucuggucucagaaucacuuuucccaucugua

SEQ ID NO: 475186 - RNA, 32 nt, Human
gucuggucugagucugccccagggagaaagaa

SEQ ID NO: 475187 - RNA, 32 nt, Human
gucuggucugugcagaaguggggagugauggg

SEQ ID NO: 475188 - RNA, 32 nt, Human
gucuggucuuccucucuucugaaacucugcca

SEQ ID NO: 475189 - RNA, 32 nt, Human
gucuggugccaccgucccucugcagauacacu

SEQ ID NO: 475190 - RNA, 21 nt, Human
gucuggugggaggaaagggaa

SEQ ID NO: 475191 - RNA, 32 nt, Human
gucugguguguguggugggcacacauagaaca

SEQ ID NO: 475192 - RNA, 32 nt, Human
gucugguuaauacccaaaggcucucgacaugu

SEQ ID NO: 475193 - RNA, 32 nt, Human
gucugguuccugcugucugcagccagguaucu

SEQ ID NO: 475194 - RNA, 32 nt, Human
gucugguuccugugugacccugggcaguuccu

SEQ ID NO: 475195 - RNA, 32 nt, Human
gucugguugcaauguuuugcucccagaagaga

SEQ ID NO: 475196 - RNA, 32 nt, Human
gucugguugugccaggaaaacagauguuauau

SEQ ID NO: 475197 - RNA, 32 nt, Human
gucugguuuagaugagauucugguuuuuggac

SEQ ID NO: 475198 - RNA, 32 nt, Human
gucugguuugugucuguguucauguuuguuua

SEQ ID NO: 475199 - RNA, 32 nt, Human
gucugguuuucacgcccucuagccccuacccc

SEQ ID NO: 475200 - RNA, 32 nt, Human
gucuguaagcaaccacaagcccugccacuggg

SEQ ID NO: 475201 - RNA, 32 nt, Human
gucuguaagcugcagugucugugauucugugu

SEQ ID NO: 475202 - RNA, 32 nt, Human
gucuguaaguucuuaaagaaccagcuucuuag

SEQ ID NO: 475203 - RNA, 32 nt, Human
gucuguaauauacacacacauauacauuugaa

SEQ ID NO: 475204 - RNA, 32 nt, Human
gucuguacaggcugcuacagcaaaauaccaua

SEQ ID NO: 475205 - RNA, 22 nt, Human
gucuguacccccacuccauccc

SEQ ID NO: 475206 - RNA, 21 nt, Human
gucuguacuaaaaauacaaaa

SEQ ID NO: 475207 - RNA, 22 nt, Human
gucuguacuaaaaauacaaaau

SEQ ID NO: 475208 - RNA, 23 nt, Human
gucuguacucccuuuuccuuccc

SEQ ID NO: 475209 - RNA, 32 nt, Human
gucuguagccuggaggggcuugaguggauggg

SEQ ID NO: 475210 - RNA, 21 nt, Human
gucuguagcuauuuuccuccc

SEQ ID NO: 475211 - RNA, 18 nt, Human
gucuguagggccaagcag

SEQ ID NO: 475212 - RNA, 32 nt, Human
gucuguagggcugggacagggaaggaagucag

SEQ ID NO: 475213 - RNA, 32 nt, Human
gucuguaucauguguuuacgugccaucaugaa

SEQ ID NO: 475214 - RNA, 32 nt, Human
gucuguauccagacaucuaugugcuuggacaa

SEQ ID NO: 475215 - RNA, 23 nt, Human
gucuguauguagcagggcucccu

SEQ ID NO: 475216 - RNA, 21 nt, Human
gucuguauuaauccccauccc

SEQ ID NO: 475217 - RNA, 32 nt, Human
gucugucaagccuugaggacacccacgaaugg

SEQ ID NO: 475218 - RNA, 32 nt, Human
gucugucacccaggcuggaguacaguggcaug

SEQ ID NO: 475219 - RNA, 32 nt, Human
gucugucacccaggcuggagugaucucagcuc

SEQ ID NO: 475220 - RNA, 32 nt, Human
gucugucacccaggcuggagugcaguggcgug

SEQ ID NO: 475221 - RNA, 32 nt, Human
gucugucacccaggcuggagugcaguggugca

SEQ ID NO: 475222 - RNA, 32 nt, Human
gucugucacccagguuggagugcaguggcgug

SEQ ID NO: 475223 - RNA, 32 nt, Human
gucugucaccuccucgcugugugaucuugaga

SEQ ID NO: 475224 - RNA, 32 nt, Human
gucugucacuggcuuguuuguucccuaccaau

SEQ ID NO: 475225 - RNA, 32 nt, Human
gucugucaucucagucuggaguaaaugcagug

SEQ ID NO: 475226 - RNA, 32 nt, Human
gucuguccagaggcugacguagacagugaagg

SEQ ID NO: 475227 - RNA, 32 nt, Human
gucuguccauggcuccuuaucacauccgcaaa

SEQ ID NO: 475228 - RNA, 32 nt, Human
gucuguccccuucggaggagaugauguagagg

SEQ ID NO: 475229 - RNA, 32 nt, Human
gucugucccuccggccgguccccagcugcagu

SEQ ID NO: 475230 - RNA, 32 nt, Human
gucugucccugacuucugccucugagauuguc

SEQ ID NO: 475231 - RNA, 32 nt, Human
gucuguccuaaagggaagugggcgcuggauuu

SEQ ID NO: 475232 - RNA, 32 nt, Human
gucuguccuaaagggaagugggugcuggauuu

SEQ ID NO: 475233 - RNA, 32 nt, Human
gucuguccucaccggcuuagugaucacgaaug

SEQ ID NO: 475234 - RNA, 32 nt, Human
gucuguccugcucugcucccugcagggcuggu

SEQ ID NO: 475235 - RNA, 32 nt, Human
gucuguccuuguucuccuccagguggagcugc

SEQ ID NO: 475236 - RNA, 32 nt, Human
gucugucgcccaggcuggagugcaguagcacg

SEQ ID NO: 475237 - RNA, 21 nt, Human
gucugucuaauacaugccaga

SEQ ID NO: 475238 - RNA, 32 nt, Human
gucugucuccaccccauccccucuugucucug

SEQ ID NO: 475239 - RNA, 32 nt, Human
gucugucuccauccuucccucuccuuuucugu

SEQ ID NO: 475240 - RNA, 32 nt, Human
gucugucuccgucauggggagggucccugcuc

SEQ ID NO: 475241 - RNA, 32 nt, Human
gucugucucugucacccaggcuggagugcagu

SEQ ID NO: 475242 - RNA, 32 nt, Human
gucugucucuuuucuucucuucaaaaacuuug

SEQ ID NO: 475243 - RNA, 32 nt, Human
gucugucugcagcgaguugauaugagaguuua

SEQ ID NO: 475244 - RNA, 32 nt, Human
gucugucugggaggccuuaggcaaguuugauc

SEQ ID NO: 475245 - RNA, 32 nt, Human
gucugucugguccauagcugugguguaggggc

SEQ ID NO: 475246 - RNA, 32 nt, Human
gucugucugucauuuucccuuccuaccccaac

SEQ ID NO: 475247 - RNA, 32 nt, Human
gucugucugucccaaagaaguucugguaugaa

SEQ ID NO: 475248 - RNA, 32 nt, Human
gucugucuguccuuguccuuguggugauccug

SEQ ID NO: 475249 - RNA, 21 nt, Human
gucugucugucuguccuuccc

SEQ ID NO: 475250 - RNA, 32 nt, Human
gucugucugucuguccuuguccuuguggugau

SEQ ID NO: 475251 - RNA, 32 nt, Human
gucugucugucugucugucuaucuaucuaucu

SEQ ID NO: 475252 - RNA, 32 nt, Human
gucugucugucugucugucugucuaucuaucu

SEQ ID NO: 475253 - RNA, 32 nt, Human
gucugucugucugucugucugucugucuaucu

SEQ ID NO: 475254 - RNA, 32 nt, Human
gucugucugucugucugucugucugucugucu

SEQ ID NO: 475255 - RNA, 32 nt, Human
gucugugaaauuaggcacacaugugagcucag

SEQ ID NO: 475256 - RNA, 32 nt, Human
gucugugacaaccuggccagacauagggcuca

SEQ ID NO: 475257 - RNA, 32 nt, Human
gucugugacuguccacuucccuucccccagag

SEQ ID NO: 475258 - RNA, 28 nt, Human
gucugugacuuagcugcagacuaggaga

SEQ ID NO: 475259 - RNA, 32 nt, Human
gucugugagagcgcgggagugcauggcagcuc

SEQ ID NO: 475260 - RNA, 24 nt, Human
gucugugagagucaauucagggga

SEQ ID NO: 475261 - RNA, 32 nt, Human
gucugugaggaggcaggagcuggggaguggga

SEQ ID NO: 475262 - RNA, 32 nt, Human
gucugugaggggagagcagagagcagaaccug

SEQ ID NO: 475263 - RNA, 32 nt, Human
gucugugagggugggcuggcaggaggccuagg

SEQ ID NO: 475264 - RNA, 21 nt, Human
gucugugaguaaaacuggggg

SEQ ID NO: 475265 - RNA, 32 nt, Human
gucugugagugggaagagacuggaguguagau

SEQ ID NO: 475266 - RNA, 21 nt, Human
gucugugaguuuauuuggaga

SEQ ID NO: 475267 - RNA, 32 nt, Human
gucugugaguuucuuagguauuagcaaucuug

SEQ ID NO: 475268 - RNA, 32 nt, Human
gucugugauucugcugauggucuucagugccu

SEQ ID NO: 475269 - RNA, 32 nt, Human
gucugugcaaagugccugagugucugcuuuca

SEQ ID NO: 475270 - RNA, 32 nt, Human
gucugugcagagcugaggcccgggcgcuggcu

SEQ ID NO: 475271 - RNA, 32 nt, Human
gucugugcagccuuacacucugucuuuacaga

SEQ ID NO: 475272 - RNA, 32 nt, Human
gucugugcaguuggagagauuuaaaggauuuu

SEQ ID NO: 475273 - RNA, 23 nt, Human
gucugugcauccacugugccgug

SEQ ID NO: 475274 - RNA, 31 nt, Human
gucugugcauucaugcaucuaccucauuccg

SEQ ID NO: 475275 - RNA, 32 nt, Human
gucugugccacaucugacacuggaguagcgau

SEQ ID NO: 475276 - RNA, 32 nt, Human
gucugugccaugaccuucaugauaccagugag

SEQ ID NO: 475277 - RNA, 32 nt, Human
gucugugcgggaaucagcucugcaguuguguc

SEQ ID NO: 475278 - RNA, 20 nt, Human
gucugugcguccugcaccca

SEQ ID NO: 475279 - RNA, 32 nt, Human
gucugugcgugagacuccuucgauuguagcuc

SEQ ID NO: 475280 - RNA, 32 nt, Human
gucugugcguggaaagacuggcugucuuccuc

SEQ ID NO: 475281 - RNA, 32 nt, Human
gucugugcuacugaaaucuaacuuuuuacaaa

SEQ ID NO: 475282 - RNA, 32 nt, Human
gucugugcuguccagcauagcagccacaagcc

SEQ ID NO: 475283 - RNA, 32 nt, Human
gucugugcuuucuaagauaagagcuugauccc

SEQ ID NO: 475284 - RNA, 32 nt, Human
gucuguggaagacauggcccgguggggcccca

SEQ ID NO: 475285 - RNA, 32 nt, Human
gucuguggauggacaugaucagugcuaaggaa

SEQ ID NO: 475286 - RNA, 20 nt, Human
gucuguggcacagcaccaag

SEQ ID NO: 475287 - RNA, 23 nt, Human
gucuguggcucucauuccuuccc

SEQ ID NO: 475288 - RNA, 32 nt, Human
gucuguggcugcauauuuugcaaaaccagaaa

SEQ ID NO: 475289 - RNA, 32 nt, Human
gucugugggaagagagagccaccuagcauguc

SEQ ID NO: 475290 - RNA, 32 nt, Human
gucugugggaggaacccggugggaggugauuu

SEQ ID NO: 475291 - RNA, 32 nt, Human
gucugugggcaggccgauuacuggaagggccg

SEQ ID NO: 475292 - RNA, 32 nt, Human
gucuguggggaccuguugaaggacuggggcag

SEQ ID NO: 475293 - RNA, 32 nt, Human
gucuguggggguuucucugccagcagggggcu

SEQ ID NO: 475294 - RNA, 32 nt, Human
gucuguggggucauuacccucugccuccugga

SEQ ID NO: 475295 - RNA, 24 nt, Human
gucuguggggugggguggggaagc

SEQ ID NO: 475296 - RNA, 32 nt, Human
gucuguguaccucugaauucaugagagaugaa

SEQ ID NO: 475297 - RNA, 32 nt, Human
gucuguguaugugugugucugugcgucugugu

SEQ ID NO: 475298 - RNA, 32 nt, Human
gucugugucacuaaucuuuccugcuuucagcg

SEQ ID NO: 475299 - RNA, 32 nt, Human
gucugugucagcccagcucugccucgcagccc

SEQ ID NO: 475300 - RNA, 32 nt, Human
gucugugucugggaacuaccugcccagcuguu

SEQ ID NO: 475301 - RNA, 32 nt, Human
gucugugucugugugugccuguaagugugaaa

SEQ ID NO: 475302 - RNA, 32 nt, Human
gucugugucugugugugccugugagccagcau

SEQ ID NO: 475303 - RNA, 21 nt, Human
gucugugugccccuccugccc

SEQ ID NO: 475304 - RNA, 32 nt, Human
gucuguguggcacccugugagcucaggcaucc

SEQ ID NO: 475305 - RNA, 18 nt, Human
gucugugugucccggcga

SEQ ID NO: 475306 - RNA, 32 nt, Human
gucugugugugccugugugcgagucugaguca

SEQ ID NO: 475307 - RNA, 24 nt, Human
gucuguguguucccguccccuccc

SEQ ID NO: 475308 - RNA, 32 nt, Human
gucuguguucugacucuuuggaaaagagcuua

SEQ ID NO: 475309 - RNA, 32 nt, Human
gucuguguugcaccuaggacugccauggcgga

SEQ ID NO: 475310 - RNA, 32 nt, Human
gucuguguugcuacaagacugcagcuuuggau

SEQ ID NO: 475311 - RNA, 32 nt, Human
gucuguguuggcacagaugaguaacugccaug

SEQ ID NO: 475312 - RNA, 16 nt, Human
gucuguguuguggagg

SEQ ID NO: 475313 - RNA, 32 nt, Human
gucuguguuucacccauugucuguguuuaguc

SEQ ID NO: 475314 - RNA, 31 nt, Human
gucuguuacacaugugaaaccaaagccugcu

SEQ ID NO: 475315 - RNA, 32 nt, Human
gucuguuaccaugacaaccagccgcugcaguc

SEQ ID NO: 475316 - RNA, 32 nt, Human
gucuguuacccaggcuggagugcaguggcaug

SEQ ID NO: 475317 - RNA, 32 nt, Human
gucuguuacuccugacccacuuuguuucauga

SEQ ID NO: 475318 - RNA, 18 nt, Human
gucuguuagccuuucaga

SEQ ID NO: 475319 - RNA, 32 nt, Human
gucuguucagcuggagaacacauucaaaucag

SEQ ID NO: 475320 - RNA, 32 nt, Human
gucuguuccagccuacauccuuccuggguguu

SEQ ID NO: 475321 - RNA, 32 nt, Human
gucuguuccuguucuucucccagccucugccc

SEQ ID NO: 475322 - RNA, 32 nt, Human
gucuguuccuucuaggcacuguauuuaacuaa

SEQ ID NO: 475323 - RNA, 32 nt, Human
gucuguucuaagccacaaccccugucucaggu

SEQ ID NO: 475324 - RNA, 32 nt, Human
gucuguucuggaggguggagagagacaccagu

SEQ ID NO: 475325 - RNA, 32 nt, Human
gucuguugaauucauuuguccaauuguauaac

SEQ ID NO: 475326 - RNA, 32 nt, Human
gucuguugaguuggccuggccauguccaagag

SEQ ID NO: 475327 - RNA, 32 nt, Human
gucuguugaucugccuuuuguucucccaaaau

SEQ ID NO: 475328 - RNA, 32 nt, Human
gucuguugcccaggcuggaaugcaguggugug

SEQ ID NO: 475329 - RNA, 32 nt, Human
gucuguugcccaggcuggagugcaguggcgcg

SEQ ID NO: 475330 - RNA, 32 nt, Human
gucuguugcccaggcuggagugcaguggugug

SEQ ID NO: 475331 - RNA, 32 nt, Human
gucuguugcccagguuggagugcaguggcggg

SEQ ID NO: 475332 - RNA, 32 nt, Human
gucuguugccuaggcgggagugcaguggcauc

SEQ ID NO: 475333 - RNA, 32 nt, Human
gucuguugcucaccucugucccuccagaacuc

SEQ ID NO: 475334 - RNA, 32 nt, Human
gucuguuggucuccauggccacuguggaccgg

SEQ ID NO: 475335 - RNA, 32 nt, Human
gucuguugucaaaccuaaauaucuuuguuuga

SEQ ID NO: 475336 - RNA, 32 nt, Human
gucuguuuaacuucugcagugccuucacuaca

SEQ ID NO: 475337 - RNA, 32 nt, Human
gucuguuuacuacccagaacucuuugggucag

SEQ ID NO: 475338 - RNA, 32 nt, Human
gucuguuucccaggcuggaguguagugauaca

SEQ ID NO: 475339 - RNA, 32 nt, Human
gucuguuucucccacuguccuuggcucagcuc

SEQ ID NO: 475340 - RNA, 32 nt, Human
gucuguuucuccccuagacucugggccuggcc

SEQ ID NO: 475341 - RNA, 32 nt, Human
gucuguuucugcuuccuuacacauagauauaa

SEQ ID NO: 475342 - RNA, 32 nt, Human
gucuguuuucccaaccuccugugggccucaag

SEQ ID NO: 475343 - RNA, 32 nt, Human
gucuguuuucuuaccugcaaauggcagguacu

SEQ ID NO: 475344 - RNA, 32 nt, Human
gucuguuuucuucgcugucauuuccuuaguag

SEQ ID NO: 475345 - RNA, 32 nt, Human
gucuguuuuguuaaugcagcugugccacaaau

SEQ ID NO: 475346 - RNA, 32 nt, Human
gucuguuuuuaucuccccucucaggaccaguc

SEQ ID NO: 475347 - RNA, 32 nt, Human
gucuuaaaauaggauguaaguguuacaucuug

SEQ ID NO: 475348 - RNA, 32 nt, Human
gucuuaaacuccuggccucaagcaauccuucu

SEQ ID NO: 475349 - RNA, 32 nt, Human
gucuuaaaggcagcacgucuggaguuguucgu

SEQ ID NO: 475350 - RNA, 32 nt, Human
gucuuaaccuggaagguggggcugucuuaucc

SEQ ID NO: 475351 - RNA, 32 nt, Human
gucuuaagcuguucuugcacggacucuuaagc

SEQ ID NO: 475352 - RNA, 32 nt, Human
gucuuaagcuguucuugcauaggcucuuaagc

SEQ ID NO: 475353 - RNA, 32 nt, Human
gucuuaagcuguucuugcaugggcucuuaagc

SEQ ID NO: 475354 - RNA, 32 nt, Human
gucuuaaggaagaggaaguaggagagcacguu

SEQ ID NO: 475355 - RNA, 32 nt, Human
gucuuaaggacacgucuccaugauauuuuggu

SEQ ID NO: 475356 - RNA, 32 nt, Human
gucuuaagguuugaggcuaagcugcuaaccug

SEQ ID NO: 475357 - RNA, 32 nt, Human
gucuuaauauucaguucuggaucucuucuuau

SEQ ID NO: 475358 - RNA, 32 nt, Human
gucuuaaucuaucccuccagcuggcaguuacu

SEQ ID NO: 475359 - RNA, 32 nt, Human
gucuuaaucucuuccacugaugcauccuccaa

SEQ ID NO: 475360 - RNA, 32 nt, Human
gucuuaaugccacaccacuauuccagcgaauu

SEQ ID NO: 475361 - RNA, 32 nt, Human
gucuuaauucagcauuuucagguuuuauauug

SEQ ID NO: 475362 - RNA, 32 nt, Human
gucuuaauugcacuuauacccauguccugugg

SEQ ID NO: 475363 - RNA, 22 nt, Human
gucuuacagcugggugcagugg

SEQ ID NO: 475364 - RNA, 32 nt, Human
gucuuacaggaaagggcauccccaggcugccc

SEQ ID NO: 475365 - RNA, 32 nt, Human
gucuuacauuggcuuuuuaaauuuuccauuaa

SEQ ID NO: 475366 - RNA, 32 nt, Human
gucuuacccagcccagggauucuugaacuauc

SEQ ID NO: 475367 - RNA, 32 nt, Human
gucuuaccucccaacuggaagacagcucgaga

SEQ ID NO: 475368 - RNA, 32 nt, Human
gucuuaccuuucuccccuagugcucaugcccc

SEQ ID NO: 475369 - RNA, 22 nt, Human
gucuuacgucuuuuucccuccc

SEQ ID NO: 475370 - RNA, 32 nt, Human
gucuuacucaucugcgauuccaucaucagggu

SEQ ID NO: 475371 - RNA, 32 nt, Human
gucuuacuccagcccuuccuggguguuaacug

SEQ ID NO: 475372 - RNA, 32 nt, Human
gucuuacuuaauacagugugggcagaggccuu

SEQ ID NO: 475373 - RNA, 22 nt, Human
gucuuacuuccuaccccuuccc

SEQ ID NO: 475374 - RNA, 20 nt, Human
gucuuagaagaaaguggaau

SEQ ID NO: 475375 - RNA, 22 nt, Human
gucuuagacaggauaaggaagc

SEQ ID NO: 475376 - RNA, 20 nt, Human
gucuuagacauguuauuuua

SEQ ID NO: 475377 - RNA, 32 nt, Human
gucuuagagaccagcagagaaucugugagaga

SEQ ID NO: 475378 - RNA, 32 nt, Human
gucuuagaugcugcacauaguaccuggugcua

SEQ ID NO: 475379 - RNA, 32 nt, Human
gucuuagauuccaguagauggaauugcaaucc

SEQ ID NO: 475380 - RNA, 32 nt, Human
gucuuagcacccaggaaacagaacuuuaagau

SEQ ID NO: 475381 - RNA, 32 nt, Human
gucuuagcaguggagccaugccuggguuucag

SEQ ID NO: 475382 - RNA, 32 nt, Human
gucuuagcucacugcagccuccaccucccagg

SEQ ID NO: 475383 - RNA, 32 nt, Human
gucuuaggcaacacucagagcagaucucccuu

SEQ ID NO: 475384 - RNA, 28 nt, Human
gucuuaggcaggcaagagaauugaaaug

SEQ ID NO: 475385 - RNA, 32 nt, Human
gucuuaggcaggcaagagaauugaaaugaggg

SEQ ID NO: 475386 - RNA, 32 nt, Human
gucuuaggcgauuuguggggugcagugaauga

SEQ ID NO: 475387 - RNA, 32 nt, Human
gucuuagggaaaggaauggggaagcaacauuu

SEQ ID NO: 475388 - RNA, 21 nt, Human
gucuuaguaaaaauacaaaau

SEQ ID NO: 475389 - RNA, 32 nt, Human
gucuuaguggguggaugggcauggauagaaau

SEQ ID NO: 475390 - RNA, 32 nt, Human
gucuuaguuggcuacucgccauggacgaagcg

SEQ ID NO: 475391 - RNA, 32 nt, Human
gucuuaguuucugggaauuggauuuauuucuc

SEQ ID NO: 475392 - RNA, 23 nt, Human
gucuuauaaauggaguacaggga

SEQ ID NO: 475393 - RNA, 32 nt, Human
gucuuaucaaguuuucauucucugucaauaug

SEQ ID NO: 475394 - RNA, 32 nt, Human
gucuuauccaagauuucucuggcuccaggggc

SEQ ID NO: 475395 - RNA, 32 nt, Human
gucuuaucccuuauuuauggagcuagacugac

SEQ ID NO: 475396 - RNA, 32 nt, Human
gucuuaucuccccagggaaugcuccagcaacc

SEQ ID NO: 475397 - RNA, 32 nt, Human
gucuuaucugccaggaaagaccagccucacuc

SEQ ID NO: 475398 - RNA, 22 nt, Human
gucuuauugggugugaggaagc

SEQ ID NO: 475399 - RNA, 32 nt, Human
gucuuauugugaugagucucgacugucaaauc

SEQ ID NO: 475400 - RNA, 32 nt, Human
gucuuauugugaugagucucgacugucauauc

SEQ ID NO: 475401 - RNA, 32 nt, Human
gucuucaaagucuaugauucucaccuagagca

SEQ ID NO: 475402 - RNA, 32 nt, Human
gucuucaaauacuaaggaaggagaaugagggg

SEQ ID NO: 475403 - RNA, 32 nt, Human
gucuucaacagguuuccaggcauacaacuacu

SEQ ID NO: 475404 - RNA, 32 nt, Human
gucuucaaccagcugcugauucacgcggccuu

SEQ ID NO: 475405 - RNA, 32 nt, Human
gucuucaacucagcagagauggcccucuggga

SEQ ID NO: 475406 - RNA, 32 nt, Human
gucuucaacuccugaccucaagcaauuguccu

SEQ ID NO: 475407 - RNA, 32 nt, Human
gucuucaagggagauuacgggggaagaaggcu

SEQ ID NO: 475408 - RNA, 32 nt, Human
gucuucaaguuuucacuccagcuacacagaug

SEQ ID NO: 475409 - RNA, 32 nt, Human
gucuucaaugguuagcagaagggagaaaagaa

SEQ ID NO: 475410 - RNA, 32 nt, Human
gucuucaccagcugggcugggccagccuggcc

SEQ ID NO: 475411 - RNA, 32 nt, Human
gucuucaccagggacaucaacaaggcccugua

SEQ ID NO: 475412 - RNA, 32 nt, Human
gucuucacuccagccagcaucauggucuucgg

SEQ ID NO: 475413 - RNA, 20 nt, Human
gucuucacucucuccuuccc

SEQ ID NO: 475414 - RNA, 32 nt, Human
gucuucacugccuccuuuucccugucaugcuc

SEQ ID NO: 475415 - RNA, 21 nt, Human
gucuucacugcucuguguccu

SEQ ID NO: 475416 - RNA, 32 nt, Human
gucuucacuggcaguagggggagauggggaga

SEQ ID NO: 475417 - RNA, 32 nt, Human
gucuucacuuucugcauuauccccacauuuua

SEQ ID NO: 475418 - RNA, 32 nt, Human
gucuucagacuccucagagucccuuggugaga

SEQ ID NO: 475419 - RNA, 32 nt, Human
gucuucagaguuuccugggaccgcggugggug

SEQ ID NO: 475420 - RNA, 32 nt, Human
gucuucagcaucagcauguuggacacacugcu

SEQ ID NO: 475421 - RNA, 32 nt, Human
gucuucagcauucccucccaucaugcccgguc

SEQ ID NO: 475422 - RNA, 32 nt, Human
gucuucagcccagcuacuucccuauuuuugug

SEQ ID NO: 475423 - RNA, 32 nt, Human
gucuucagcugggcugggguuggggcugcugu

SEQ ID NO: 475424 - RNA, 32 nt, Human
gucuucaguguucuucaggguaguugggaucu

SEQ ID NO: 475425 - RNA, 20 nt, Human
gucuucauaugcccuuuaaa

SEQ ID NO: 475426 - RNA, 32 nt, Human
gucuucaucccuccaucaaccuuaaucacaua

SEQ ID NO: 475427 - RNA, 32 nt, Human
gucuucaucucaaccagcuaaugguaggucuu

SEQ ID NO: 475428 - RNA, 32 nt, Human
gucuucaucuuccuccucaagacagcuggugc

SEQ ID NO: 475429 - RNA, 32 nt, Human
gucuucaugaaaugcuaugucauuucaugucc

SEQ ID NO: 475430 - RNA, 32 nt, Human
gucuucaugaagcagauuugcacuggaaccau

SEQ ID NO: 475431 - RNA, 32 nt, Human
gucuucaugucccugagggucuugggcucugg

SEQ ID NO: 475432 - RNA, 32 nt, Human
gucuucauucuccacgcagccuggugauggca

SEQ ID NO: 475433 - RNA, 32 nt, Human
gucuuccaauuuaaccaaagauaaaggacuag

SEQ ID NO: 475434 - RNA, 32 nt, Human
gucuuccacaccacagaggcacaaagcugacu

SEQ ID NO: 475435 - RNA, 32 nt, Human
gucuuccacagccgccugaaagccacaaugag

SEQ ID NO: 475436 - RNA, 32 nt, Human
gucuuccacaguuccggagccuucagugaggg

SEQ ID NO: 475437 - RNA, 32 nt, Human
gucuuccacuauaucuguuuuccucuuaguuc

SEQ ID NO: 475438 - RNA, 30 nt, Human
gucuuccagcucuaaucagaaagcugcuug

SEQ ID NO: 475439 - RNA, 32 nt, Human
gucuuccagcugguggaucugggcccagcaaa

SEQ ID NO: 475440 - RNA, 32 nt, Human
gucuuccaggagacaggugauuguggcuugga

SEQ ID NO: 475441 - RNA, 24 nt, Human
gucuuccaggcuggagugcagugg

SEQ ID NO: 475442 - RNA, 32 nt, Human
gucuuccaggguggcuggagagcacagacgcg

SEQ ID NO: 475443 - RNA, 32 nt, Human
gucuuccaguggggcacggggguggggagcug

SEQ ID NO: 475444 - RNA, 31 nt, Human
gucuuccauuuccucccgccagucuccauug

SEQ ID NO: 475445 - RNA, 32 nt, Human
gucuuccauuuccucccgccagucuccauuga

SEQ ID NO: 475446 - RNA, 32 nt, Human
gucuucccaauccucugcuuuagacagcucgg

SEQ ID NO: 475447 - RNA, 32 nt, Human
gucuuccccaaaauugaucacuccgccuucuc

SEQ ID NO: 475448 - RNA, 32 nt, Human
gucuuccccuaaaggagaacauggggauaaca

SEQ ID NO: 475449 - RNA, 32 nt, Human
gucuucccugcaggacacaggcggcuuucugg

SEQ ID NO: 475450 - RNA, 32 nt, Human
gucuucccugcucuccgagguagagcugggua

SEQ ID NO: 475451 - RNA, 32 nt, Human
gucuucccuucucuccaagaggccucaguccc

SEQ ID NO: 475452 - RNA, 19 nt, Human
gucuuccgcccccagccca

SEQ ID NO: 475453 - RNA, 32 nt, Human
gucuuccuagccccgagacuuucaaguccaua

SEQ ID NO: 475454 - RNA, 32 nt, Human
gucuuccuaguuaaggcucuuuauaaagagcu

SEQ ID NO: 475455 - RNA, 21 nt, Human
gucuuccuaucucuuaguuuc

SEQ ID NO: 475456 - RNA, 32 nt, Human
gucuuccuccaagagaagguggaccuggcagu

SEQ ID NO: 475457 - RNA, 32 nt, Human
gucuuccuccacccgccucuuccuucccagcc

SEQ ID NO: 475458 - RNA, 32 nt, Human
gucuuccucccaggguucuuugggguaaagaa

SEQ ID NO: 475459 - RNA, 32 nt, Human
gucuuccucccucccucccuuccucuuacucu

SEQ ID NO: 475460 - RNA, 32 nt, Human
gucuuccucuacuggggucguucuggcuuuuu

SEQ ID NO: 475461 - RNA, 32 nt, Human
gucuuccucuuccucucucuuccagagcccag

SEQ ID NO: 475462 - RNA, 32 nt, Human
gucuuccugaacagccugaagcagaagguggu

SEQ ID NO: 475463 - RNA, 32 nt, Human
gucuuccugagacccaggcugguguggacaca

SEQ ID NO: 475464 - RNA, 32 nt, Human
gucuuccuggggauggggccugaagccucagg

SEQ ID NO: 475465 - RNA, 32 nt, Human
gucuuccugguccccaccuccuggggccgacg

SEQ ID NO: 475466 - RNA, 32 nt, Human
gucuuccugucacccaggcuggaguacagugg

SEQ ID NO: 475467 - RNA, 18 nt, Human
gucuuccuuuuguucuca

SEQ ID NO: 475468 - RNA, 32 nt, Human
gucuucgcaagugccaugaugcaugccuuaga

SEQ ID NO: 475469 - RNA, 32 nt, Human
gucuucgccacgcgcccuccccugggcucgcg

SEQ ID NO: 475470 - RNA, 32 nt, Human
gucuucggacaacagguaguucuaauuucuua

SEQ ID NO: 475471 - RNA, 32 nt, Human
gucuucgggaggcagaauugaagugaacauga

SEQ ID NO: 475472 - RNA, 32 nt, Human
gucuucgggccccagcccuggagcugcaggag

SEQ ID NO: 475473 - RNA, 32 nt, Human
gucuucggggagaaggcccuuggagccgggcu

SEQ ID NO: 475474 - RNA, 32 nt, Human
gucuucgguuucuuagcuucaggcuggacuuc

SEQ ID NO: 475475 - RNA, 32 nt, Human
gucuucguucuuccuccccucaguggcaguuu

SEQ ID NO: 475476 - RNA, 32 nt, Human
gucuucuaaacagguauuuauaccuuuuuaua

SEQ ID NO: 475477 - RNA, 32 nt, Human
gucuucuacgaaaagcucuccccaccuuccca

SEQ ID NO: 475478 - RNA, 32 nt, Human
gucuucuacgugagguuccuuggcguuguuua

SEQ ID NO: 475479 - RNA, 32 nt, Human
gucuucuagacauuuacuaucacugcaccuga

SEQ ID NO: 475480 - RNA, 32 nt, Human
gucuucucacgcccucuccucuggggccucgu

SEQ ID NO: 475481 - RNA, 32 nt, Human
gucuucucagccgggacgccagcgguucugau

SEQ ID NO: 475482 - RNA, 32 nt, Human
gucuucucaggccaugagcugcagugacuggu

SEQ ID NO: 475483 - RNA, 32 nt, Human
gucuucucagggagacucugaggcucuguuga

SEQ ID NO: 475484 - RNA, 32 nt, Human
gucuucucccccagggucuugcucugucaccc

SEQ ID NO: 475485 - RNA, 32 nt, Human
gucuucucccuaaaaaccaaaacaucucccug

SEQ ID NO: 475486 - RNA, 20 nt, Human
gucuucucccucugacccca

SEQ ID NO: 475487 - RNA, 32 nt, Human
gucuucucccugccaugucccuugccaggcuc

SEQ ID NO: 475488 - RNA, 32 nt, Human
gucuucucuaugcccaugacuuugggacccuc

SEQ ID NO: 475489 - RNA, 32 nt, Human
gucuucucuccacuccccagcauggaggaagg

SEQ ID NO: 475490 - RNA, 32 nt, Human
gucuucucucccuucacaaaaaucugagggcu

SEQ ID NO: 475491 - RNA, 32 nt, Human
gucuucucugaggcugggccaagccugaggga

SEQ ID NO: 475492 - RNA, 32 nt, Human
gucuucucugcagacaccagccugguguccuc

SEQ ID NO: 475493 - RNA, 32 nt, Human
gucuucucugcaggaccccuugauuuacauug

SEQ ID NO: 475494 - RNA, 32 nt, Human
gucuucucuggccucugccugcccacagaauc

SEQ ID NO: 475495 - RNA, 32 nt, Human
gucuucucuucacccuuccuggccuuauuucc

SEQ ID NO: 475496 - RNA, 32 nt, Human
gucuucugaaucuagaguaaguccucugucuu

SEQ ID NO: 475497 - RNA, 32 nt, Human
gucuucugagacaagcauuucugugagcugcc

SEQ ID NO: 475498 - RNA, 32 nt, Human
gucuucugaucccauucccuucuuccccaaaa

SEQ ID NO: 475499 - RNA, 32 nt, Human
gucuucugcccuucugcagccgucgacauuuu

SEQ ID NO: 475500 - RNA, 31 nt, Human
gucuucugccucucucucguuucuuccccca

SEQ ID NO: 475501 - RNA, 32 nt, Human
gucuucugcucaacucagguaccagcugacac

SEQ ID NO: 475502 - RNA, 32 nt, Human
gucuucugcuccaugcucuuccucgggucaaa

SEQ ID NO: 475503 - RNA, 19 nt, Human
gucuucugcugccuggaga

SEQ ID NO: 475504 - RNA, 32 nt, Human
gucuucugggugacagacaaaauagcuugucu

SEQ ID NO: 475505 - RNA, 31 nt, Human
gucuucuggguggacacguggagaaagagaa

SEQ ID NO: 475506 - RNA, 32 nt, Human
gucuucugugcguuuaguuuucuugcugagcg

SEQ ID NO: 475507 - RNA, 32 nt, Human
gucuucuguggccagggacacaggcuuggggc

SEQ ID NO: 475508 - RNA, 19 nt, Human
gucuucuguuuucauuuga

SEQ ID NO: 475509 - RNA, 32 nt, Human
gucuucuucaaaaaggagaaaagcugugguuu

SEQ ID NO: 475510 - RNA, 21 nt, Human
gucuucuucagaggucaggga

SEQ ID NO: 475511 - RNA, 32 nt, Human
gucuucuucagguccugagauuacacggugga

SEQ ID NO: 475512 - RNA, 32 nt, Human
gucuucuucccaagagaguuuuuaauuguaaa

SEQ ID NO: 475513 - RNA, 32 nt, Human
gucuucuucgaaagugaaaagugguaacagcu

SEQ ID NO: 475514 - RNA, 32 nt, Human
gucuucuucucauuuaaagcuguuuauacuca

SEQ ID NO: 475515 - RNA, 32 nt, Human
gucuucuucugcacgagacuuugaggcuguca

SEQ ID NO: 475516 - RNA, 32 nt, Human
gucuucuucuucuucuucuucuucuucuucuu

SEQ ID NO: 475517 - RNA, 32 nt, Human
gucuucuuuaauuucucuugguaauguuuugu

SEQ ID NO: 475518 - RNA, 32 nt, Human
gucuucuuucucucucugcccccaccaagugc

SEQ ID NO: 475519 - RNA, 32 nt, Human
gucuucuuucuuauccccuuggugggcugggu

SEQ ID NO: 475520 - RNA, 32 nt, Human
gucuucuuuuucucccaacuucgccacucagc

SEQ ID NO: 475521 - RNA, 22 nt, Human
gucuugaaaagugaaaaugguu

SEQ ID NO: 475522 - RNA, 32 nt, Human
gucuugaacuccugaguucaagcaguccuccu

SEQ ID NO: 475523 - RNA, 32 nt, Human
gucuugaacuccugaguucaagcgauccaccu

SEQ ID NO: 475524 - RNA, 32 nt, Human
gucuugaacuccuggacucaagcaaucccccc

SEQ ID NO: 475525 - RNA, 32 nt, Human
gucuugaacuccuggccucaagcaauccgccu

SEQ ID NO: 475526 - RNA, 32 nt, Human
gucuugaacuccuggccucaagcaauccuccu

SEQ ID NO: 475527 - RNA, 32 nt, Human
gucuugaacuccuggccucaagcaauccucuc

SEQ ID NO: 475528 - RNA, 32 nt, Human
gucuugaacuccuggccucaagcaauccuucc

SEQ ID NO: 475529 - RNA, 32 nt, Human
gucuugaacuccugggcccaagcaaucuuccc

SEQ ID NO: 475530 - RNA, 32 nt, Human
gucuugaacuccugggcucaagcaaucagccc

SEQ ID NO: 475531 - RNA, 32 nt, Human
gucuugaacuccugggcucaagcaauccuccc

SEQ ID NO: 475532 - RNA, 32 nt, Human
gucuugaacuccuggguucaagcagucuuccu

SEQ ID NO: 475533 - RNA, 32 nt, Human
gucuugaacuucucuucaagaacccgggcugc

SEQ ID NO: 475534 - RNA, 32 nt, Human
gucuugaagcuugacaggauguuuucauuacu

SEQ ID NO: 475535 - RNA, 19 nt, Human
gucuugaagucucuuccca

SEQ ID NO: 475536 - RNA, 23 nt, Human
gucuugaauuccugaccuccuga

SEQ ID NO: 475537 - RNA, 32 nt, Human
gucuugaauuccugggcucaagcaauucuucc

SEQ ID NO: 475538 - RNA, 32 nt, Human
gucuugacucacugcaauucugccuccugggu

SEQ ID NO: 475539 - RNA, 32 nt, Human
gucuugacuuccaguuugauacugugguuaaa

SEQ ID NO: 475540 - RNA, 32 nt, Human
gucuugagacaguaccaggcaucugggaugaa

SEQ ID NO: 475541 - RNA, 22 nt, Human
gucuugagaccagccugccagg

SEQ ID NO: 475542 - RNA, 32 nt, Human
gucuugagaccagccugggcaacaggcuauuu

SEQ ID NO: 475543 - RNA, 32 nt, Human
gucuugagcccaagccccaucuuccuccuuca

SEQ ID NO: 475544 - RNA, 32 nt, Human
gucuugagccugggguugacuggguuagagaa

SEQ ID NO: 475545 - RNA, 32 nt, Human
gucuugagggucacuaccaaagaauuacccuc

SEQ ID NO: 475546 - RNA, 32 nt, Human
gucuugagguccgaagcugggguggggguguc

SEQ ID NO: 475547 - RNA, 32 nt, Human
gucuugaucaaaucaaacuaagaagaccuuag

SEQ ID NO: 475548 - RNA, 23 nt, Human
gucuugaucuccugaccucauga

SEQ ID NO: 475549 - RNA, 23 nt, Human
gucuugaucuccugaccucguga

SEQ ID NO: 475550 - RNA, 31 nt, Human
gucuugaugauguacuaacauuuaaaaauuu

SEQ ID NO: 475551 - RNA, 32 nt, Human
gucuugaugcaggagagucuggaaaaggaaga

SEQ ID NO: 475552 - RNA, 32 nt, Human
gucuugaugccaucaaaggacauccccugccc

SEQ ID NO: 475553 - RNA, 31 nt, Human
gucuugaugcucucugggcuuuguugaggcg

SEQ ID NO: 475554 - RNA, 32 nt, Human
gucuugauuagaauguugaacaugacaaggcu

SEQ ID NO: 475555 - RNA, 32 nt, Human
gucuugauuugugcuauuauguucuguuaguu

SEQ ID NO: 475556 - RNA, 32 nt, Human
gucuugcagagcuagggugugugacugccucc

SEQ ID NO: 475557 - RNA, 32 nt, Human
gucuugcagagcuaggugugugacugccuccc

SEQ ID NO: 475558 - RNA, 24 nt, Human
gucuugcagaguauccuuuuuuga

SEQ ID NO: 475559 - RNA, 32 nt, Human
gucuugcagcuuuuauucccugugcaacaaaa

SEQ ID NO: 475560 - RNA, 32 nt, Human
gucuugcaggacuggagaagguggugguucua

SEQ ID NO: 475561 - RNA, 32 nt, Human
gucuugcaggccugggccucuaccuaaccccc

SEQ ID NO: 475562 - RNA, 32 nt, Human
gucuugccaaugcucccggccgaauaaagccc

SEQ ID NO: 475563 - RNA, 26 nt, Human
gucuugcccaggcuggagugcagugg

SEQ ID NO: 475564 - RNA, 32 nt, Human
gucuugcccaggcuggagugcaguggccugaa

SEQ ID NO: 475565 - RNA, 32 nt, Human
gucuugcccaggcuggaguucaggggcuauuc

SEQ ID NO: 475566 - RNA, 32 nt, Human
gucuugcccugaccccaagcacaaggucuuuc

SEQ ID NO: 475567 - RNA, 32 nt, Human
gucuugccucauucaugagcuggucagcguuu

SEQ ID NO: 475568 - RNA, 32 nt, Human
gucuugccuccaggaccugggaagggugaugc

SEQ ID NO: 475569 - RNA, 32 nt, Human
gucuugccucuugucauugucuguccccaccc

SEQ ID NO: 475570 - RNA, 32 nt, Human
gucuugccuucucagcgccacagggaaggcca

SEQ ID NO: 475571 - RNA, 32 nt, Human
gucuugcgccuguacucccagcacuuugggag

SEQ ID NO: 475572 - RNA, 32 nt, Human
gucuugcuaguuaaccucacgaggacuggggg

SEQ ID NO: 475573 - RNA, 32 nt, Human
gucuugcuccagcccaggcuggagugcagugg

SEQ ID NO: 475574 - RNA, 32 nt, Human
gucuugcucuaucacccaggcuggagugcagu

SEQ ID NO: 475575 - RNA, 32 nt, Human
gucuugcucugccuuagcacucccuucuccuu

SEQ ID NO: 475576 - RNA, 32 nt, Human
gucuugcucugcuccuuucauccucgucuccc

SEQ ID NO: 475577 - RNA, 25 nt, Human
gucuugcucugcuggagugcggugg

SEQ ID NO: 475578 - RNA, 32 nt, Human
gucuugcucugucacccagacuggaacacagu

SEQ ID NO: 475579 - RNA, 32 nt, Human
gucuugcucugucacccagacuggaguacaau

SEQ ID NO: 475580 - RNA, 32 nt, Human
gucuugcucugucacccagacuggagugcagu

SEQ ID NO: 475581 - RNA, 32 nt, Human
gucuugcucugucacccaggcuggggcgcaau

SEQ ID NO: 475582 - RNA, 32 nt, Human
gucuugcucugucacccagucuggagugcagu

SEQ ID NO: 475583 - RNA, 32 nt, Human
gucuugcucuguugcccacauuggagugcagu

SEQ ID NO: 475584 - RNA, 32 nt, Human
gucuugcucuucccuuucauauccaaugucaa

SEQ ID NO: 475585 - RNA, 32 nt, Human
gucuugcugcagagucugacacuggauucccc

SEQ ID NO: 475586 - RNA, 32 nt, Human
gucuugcugguguggauagaaaccaggcagga

SEQ ID NO: 475587 - RNA, 32 nt, Human
gucuugcugugugaugggaacaugcuuguaaa

SEQ ID NO: 475588 - RNA, 24 nt, Human
gucuugcuucaggaaggugaagug

SEQ ID NO: 475589 - RNA, 32 nt, Human
gucuugcuucuuucuccaggccuggcuccuua

SEQ ID NO: 475590 - RNA, 32 nt, Human
gucuuggaacugcuccugcuauccccacaccc

SEQ ID NO: 475591 - RNA, 32 nt, Human
gucuuggacuccugaccucaugcuccacccgc

SEQ ID NO: 475592 - RNA, 32 nt, Human
gucuuggacuccugaccucgugauccacccac

SEQ ID NO: 475593 - RNA, 32 nt, Human
gucuuggacuccugacgucgugauccacccgc

SEQ ID NO: 475594 - RNA, 32 nt, Human
gucuuggacuccuggccucaagcaauccuccc

SEQ ID NO: 475595 - RNA, 22 nt, Human
gucuuggagacaggcaggaggu

SEQ ID NO: 475596 - RNA, 32 nt, Human
gucuuggagacauuacuccugagagacugcag

SEQ ID NO: 475597 - RNA, 32 nt, Human
gucuuggagaggagguguggaguggagggguc

SEQ ID NO: 475598 - RNA, 32 nt, Human
gucuuggagaucuucuguucaaaguacagugc

SEQ ID NO: 475599 - RNA, 32 nt, Human
gucuuggagcagcuccaggucaucggugaugu

SEQ ID NO: 475600 - RNA, 32 nt, Human
gucuuggagcaucugccuugugccuggcacuc

SEQ ID NO: 475601 - RNA, 32 nt, Human
gucuuggaggcuggcuaccacauucaauuaac

SEQ ID NO: 475602 - RNA, 32 nt, Human
gucuuggauccaggcugggcacgguggcucac

SEQ ID NO: 475603 - RNA, 32 nt, Human
gucuuggauccuucagagccucagccacuagc

SEQ ID NO: 475604 - RNA, 32 nt, Human
gucuuggccaugucuaguaauugcuauguguu

SEQ ID NO: 475605 - RNA, 32 nt, Human
gucuuggcccaggaugggagagccgccugccc

SEQ ID NO: 475606 - RNA, 32 nt, Human
gucuuggccucagauggauggauguguuugga

SEQ ID NO: 475607 - RNA, 32 nt, Human
gucuuggcguaaggacacagcccaaguaacug

SEQ ID NO: 475608 - RNA, 32 nt, Human
gucuuggcguacccucuccacgugcccguccc

SEQ ID NO: 475609 - RNA, 32 nt, Human
gucuuggcuagacugccuagauucccacagca

SEQ ID NO: 475610 - RNA, 32 nt, Human
gucuuggcucaccucaaccucugccucccagg

SEQ ID NO: 475611 - RNA, 32 nt, Human
gucuuggcucacugcaaccuccaccucccagg

SEQ ID NO: 475612 - RNA, 32 nt, Human
gucuuggcucacugcaaccuccaccuccuggg

SEQ ID NO: 475613 - RNA, 32 nt, Human
gucuuggcucacugcaaccuccgccucccggg

SEQ ID NO: 475614 - RNA, 32 nt, Human
gucuuggcucacugcaaccucugccuccuugg

SEQ ID NO: 475615 - RNA, 32 nt, Human
gucuuggcucacugcaacuucugccucuuggg

SEQ ID NO: 475616 - RNA, 32 nt, Human
gucuuggcucacugcaagcuccgccucccggg

SEQ ID NO: 475617 - RNA, 32 nt, Human
gucuuggcucacugcaagcuccgucugccggg

SEQ ID NO: 475618 - RNA, 32 nt, Human
gucuuggcucacugcagccuccaccuccuggg

SEQ ID NO: 475619 - RNA, 32 nt, Human
gucuuggcucacugcagccucugccuccugag

SEQ ID NO: 475620 - RNA, 32 nt, Human
gucuuggcuccaccucuguccucucucuagcc

SEQ ID NO: 475621 - RNA, 32 nt, Human
gucuuggcugcugauggguggggugagcccca

SEQ ID NO: 475622 - RNA, 32 nt, Human
gucuuggcuuacugcaaccuccgccucccagg

SEQ ID NO: 475623 - RNA, 32 nt, Human
gucuuggcuuauugaagccucugccuccuggg

SEQ ID NO: 475624 - RNA, 32 nt, Human
gucuuggcuugugcuuucuccucuccccaucg

SEQ ID NO: 475625 - RNA, 32 nt, Human
gucuugggagaagggugaggaugggcauuuag

SEQ ID NO: 475626 - RNA, 32 nt, Human
gucuuggggaagaggugcaggagaagcugugu

SEQ ID NO: 475627 - RNA, 32 nt, Human
gucuuggggagagaggaggaggugacugcuua

SEQ ID NO: 475628 - RNA, 32 nt, Human
gucuugggggagaaaggaaugggagcccagac

SEQ ID NO: 475629 - RNA, 31 nt, Human
gucuuggggguggaaagggagggaugaauug

SEQ ID NO: 475630 - RNA, 32 nt, Human
gucuuggggguguaggggaucgcuugagccca

SEQ ID NO: 475631 - RNA, 31 nt, Human
gucuugggugagagagagggaccugcaggau

SEQ ID NO: 475632 - RNA, 32 nt, Human
gucuugggugagagagagggaccugcaggaug

SEQ ID NO: 475633 - RNA, 32 nt, Human
gucuugggugggagacggcaggucccucuguc

SEQ ID NO: 475634 - RNA, 32 nt, Human
gucuuggguuacugcaaccucugccccucggg

SEQ ID NO: 475635 - RNA, 32 nt, Human
gucuugguagccuuugccauuuugaauuuaga

SEQ ID NO: 475636 - RNA, 32 nt, Human
gucuugguaggaggagaagaaacacagggaaa

SEQ ID NO: 475637 - RNA, 32 nt, Human
gucuuggugagggccaggggacaggucggggc

SEQ ID NO: 475638 - RNA, 31 nt, Human
gucuuggugcacuucucacucuuccugccug

SEQ ID NO: 475639 - RNA, 32 nt, Human
gucuuggugccacccucuccacuccuacugcc

SEQ ID NO: 475640 - RNA, 32 nt, Human
gucuugguugacugagagucugggggagaggg

SEQ ID NO: 475641 - RNA, 32 nt, Human
gucuugguuuaccuguggugacaaccgggugu

SEQ ID NO: 475642 - RNA, 32 nt, Human
gucuugucagcucuggguguuuguucccugcc

SEQ ID NO: 475643 - RNA, 32 nt, Human
gucuugucucaaacuccugggcucaagcgauc

SEQ ID NO: 475644 - RNA, 32 nt, Human
gucuugucucaccaaccccagcccaucaucug

SEQ ID NO: 475645 - RNA, 32 nt, Human
gucuugucuccucuccucaggccccuggaccu

SEQ ID NO: 475646 - RNA, 32 nt, Human
gucuugucucucaagagcaucucggauccaga

SEQ ID NO: 475647 - RNA, 32 nt, Human
gucuugucuuauucccugaggcucccuugacu

SEQ ID NO: 475648 - RNA, 32 nt, Human
gucuuguggcaagcccagcuucaguuuauguu

SEQ ID NO: 475649 - RNA, 32 nt, Human
gucuuguggcuucagaaacagcuuaaaauaau

SEQ ID NO: 475650 - RNA, 22 nt, Human
gucuuguggguuuucuguuuga

SEQ ID NO: 475651 - RNA, 32 nt, Human
gucuuguggguuuucuguuugaaaaggaguca

SEQ ID NO: 475652 - RNA, 29 nt, Human
gucuugugucuguguggcuagauggccuc

SEQ ID NO: 475653 - RNA, 18 nt, Human
gucuugugugccuggcga

SEQ ID NO: 475654 - RNA, 32 nt, Human
gucuuguguucuauguggagucuguuacugug

SEQ ID NO: 475655 - RNA, 32 nt, Human
gucuuguuacagacaccuuccucuguguaagu

SEQ ID NO: 475656 - RNA, 22 nt, Human
gucuuguucuacccagauucag

SEQ ID NO: 475657 - RNA, 32 nt, Human
gucuuguucugucacccaggcuggagugcagu

SEQ ID NO: 475658 - RNA, 32 nt, Human
gucuuguucugucacccaggcuggggugcagu

SEQ ID NO: 475659 - RNA, 32 nt, Human
gucuuguugcccaggcuggagugcaauggcgu

SEQ ID NO: 475660 - RNA, 32 nt, Human
gucuuguuucccaggcuggagugcaauggcac

SEQ ID NO: 475661 - RNA, 32 nt, Human
gucuuguuugccaggcugaggcugaguugcau

SEQ ID NO: 475662 - RNA, 32 nt, Human
gucuuguuuguagccaauacaugguguauagc

SEQ ID NO: 475663 - RNA, 32 nt, Human
gucuuguuuuaggauaacuacuuuaaaauuuu

SEQ ID NO: 475664 - RNA, 32 nt, Human
gucuuguuuugcuuuccagagaucuugcucau

SEQ ID NO: 475665 - RNA, 32 nt, Human
gucuuguuuugucacccaggcuggagugcagu

SEQ ID NO: 475666 - RNA, 26 nt, Human
gucuuguuuuuuccugguuuguuuga

SEQ ID NO: 475667 - RNA, 32 nt, Human
gucuuuaaaggaugaauuagcauggucuuaaa

SEQ ID NO: 475668 - RNA, 32 nt, Human
gucuuuaagccucccuugccucagcaaggaga

SEQ ID NO: 475669 - RNA, 32 nt, Human
gucuuuaauacuucaugaucacuugaauuaaa

SEQ ID NO: 475670 - RNA, 20 nt, Human
gucuuuaaugugccuggaga

SEQ ID NO: 475671 - RNA, 32 nt, Human
gucuuuaauguucuuuuuggaguuaggaccuc

SEQ ID NO: 475672 - RNA, 32 nt, Human
gucuuuacaaugaaacauuuugcuuaauuuuu

SEQ ID NO: 475673 - RNA, 32 nt, Human
gucuuuacagcuuacauuuccauuccauuauu

SEQ ID NO: 475674 - RNA, 32 nt, Human
gucuuuaccuucuuagacauuuugucauacca

SEQ ID NO: 475675 - RNA, 21 nt, Human
gucuuuacuaaaaauacaaaa

SEQ ID NO: 475676 - RNA, 22 nt, Human
gucuuuacuaaaaauacaaaau

SEQ ID NO: 475677 - RNA, 32 nt, Human
gucuuuacugccccuucugccccuccacccac

SEQ ID NO: 475678 - RNA, 32 nt, Human
gucuuuacugcucagaaccucuacuucucauc

SEQ ID NO: 475679 - RNA, 32 nt, Human
gucuuuagagcucagcuuucugaggcccugag

SEQ ID NO: 475680 - RNA, 32 nt, Human
gucuuuagauggaaggaauccaggcaacauuc

SEQ ID NO: 475681 - RNA, 32 nt, Human
gucuuuaggauuugcagcuccaggaagcgaga

SEQ ID NO: 475682 - RNA, 32 nt, Human
gucuuuaguacaaaacugcucuagggacaccu

SEQ ID NO: 475683 - RNA, 32 nt, Human
gucuuuauucuguccuguuugacauuuuuauu

SEQ ID NO: 475684 - RNA, 32 nt, Human
gucuuuauuuacuuugcuucgugugugggcaa

SEQ ID NO: 475685 - RNA, 32 nt, Human
gucuuucaaauacaugacgccuuuaguaugcc

SEQ ID NO: 475686 - RNA, 32 nt, Human
gucuuucaaauacgagauaacugcaaaauauu

SEQ ID NO: 475687 - RNA, 32 nt, Human
gucuuucaauacaggcauaaaccuuccacucu

SEQ ID NO: 475688 - RNA, 32 nt, Human
gucuuucacaucggguugcacuguccaugaaa

SEQ ID NO: 475689 - RNA, 32 nt, Human
gucuuucacccaggcuggagugcagugcugug

SEQ ID NO: 475690 - RNA, 32 nt, Human
gucuuucacccaggcuggagugcuguggcacg

SEQ ID NO: 475691 - RNA, 32 nt, Human
gucuuucaccuguaaucccagcacuuugggag

SEQ ID NO: 475692 - RNA, 32 nt, Human
gucuuucacugauuucugaaucauguucuacu

SEQ ID NO: 475693 - RNA, 32 nt, Human
gucuuucacugauuucugaaucauguucuagu

SEQ ID NO: 475694 - RNA, 32 nt, Human
gucuuucaggauucaggaugacuuuucuuuua

SEQ ID NO: 475695 - RNA, 32 nt, Human
gucuuucaggcagugcaggucagccuggagcc

SEQ ID NO: 475696 - RNA, 22 nt, Human
gucuuucaguucguuuguuuga

SEQ ID NO: 475697 - RNA, 32 nt, Human
gucuuucauaggugaaaagcaccagagaauac

SEQ ID NO: 475698 - RNA, 32 nt, Human
gucuuucaucaucacaccacuccgcugccugg

SEQ ID NO: 475699 - RNA, 32 nt, Human
gucuuucauggggagagaaggagacugaauua

SEQ ID NO: 475700 - RNA, 32 nt, Human
gucuuucauuuugccugaguguauuuuacuau

SEQ ID NO: 475701 - RNA, 32 nt, Human
gucuuuccagccugguccaguccacacuuguu

SEQ ID NO: 475702 - RNA, 32 nt, Human
gucuuuccccucccaucuccucagaucggugg

SEQ ID NO: 475703 - RNA, 32 nt, Human
gucuuucccuggugaugguccccugcccuguc

SEQ ID NO: 475704 - RNA, 32 nt, Human
gucuuucccuggugauggucucucgcucuguc

SEQ ID NO: 475705 - RNA, 32 nt, Human
gucuuuccucuccgccucuccuccccagccgg

SEQ ID NO: 475706 - RNA, 32 nt, Human
gucuuuccuuauccucuccaugcugagcuuga

SEQ ID NO: 475707 - RNA, 32 nt, Human
gucuuuccuucuuuaagucugauaccauuaac

SEQ ID NO: 475708 - RNA, 32 nt, Human
gucuuucucaaagagaagucaagcagacuccc

SEQ ID NO: 475709 - RNA, 32 nt, Human
gucuuucucaaggucucugagguccagacagc

SEQ ID NO: 475710 - RNA, 32 nt, Human
gucuuucuccccugcagcuuccucugcuucug

SEQ ID NO: 475711 - RNA, 32 nt, Human
gucuuucuccccugggcuccugucucacacua

SEQ ID NO: 475712 - RNA, 32 nt, Human
gucuuucucuccccucacuuccaccccuucac

SEQ ID NO: 475713 - RNA, 32 nt, Human
gucuuucucugcacuccagccuaggcaacaga

SEQ ID NO: 475714 - RNA, 32 nt, Human
gucuuucucugucacccaggauggagugcagu

SEQ ID NO: 475715 - RNA, 32 nt, Human
gucuuucucugucacccaggcuggaaugcagu

SEQ ID NO: 475716 - RNA, 32 nt, Human
gucuuucucugucacccaggcuggagugcagu

SEQ ID NO: 475717 - RNA, 32 nt, Human
gucuuucugaccgggaaugagugcaaagcaca

SEQ ID NO: 475718 - RNA, 32 nt, Human
gucuuucuggccgucccgccucuagaugccgg

SEQ ID NO: 475719 - RNA, 32 nt, Human
gucuuucugguggacuccaaucccuuucucuu

SEQ ID NO: 475720 - RNA, 32 nt, Human
gucuuucuguuuagagggaaguguaacauauc

SEQ ID NO: 475721 - RNA, 32 nt, Human
gucuuucuuaaaacugacauuuguuguuaaug

SEQ ID NO: 475722 - RNA, 32 nt, Human
gucuuucuuauaaacuaacagagcagguauau

SEQ ID NO: 475723 - RNA, 32 nt, Human
gucuuucuuauauaacugcagaaagauaaaua

SEQ ID NO: 475724 - RNA, 32 nt, Human
gucuuucuucucagguguauuucuugguaccc

SEQ ID NO: 475725 - RNA, 32 nt, Human
gucuuucuucucccacccuccaccuuccaaaa

SEQ ID NO: 475726 - RNA, 32 nt, Human
gucuuucuuggccccugucucucuccauguug

SEQ ID NO: 475727 - RNA, 32 nt, Human
gucuuugaaacuuaagaaagcuuaaguuuuaa

SEQ ID NO: 475728 - RNA, 32 nt, Human
gucuuugaaagccagacgcuguggccugcugu

SEQ ID NO: 475729 - RNA, 32 nt, Human
gucuuugaaauacgacaucuaaaagaguggcc

SEQ ID NO: 475730 - RNA, 25 nt, Human
gucuuugaaucgugggaggggaggc

SEQ ID NO: 475731 - RNA, 32 nt, Human
gucuuugaauugccaguucuguaagugccauc

SEQ ID NO: 475732 - RNA, 32 nt, Human
gucuuugaccgacacagaaugccuggcauuug

SEQ ID NO: 475733 - RNA, 18 nt, Human
gucuuugagauuugauca

SEQ ID NO: 475734 - RNA, 32 nt, Human
gucuuugaggagcuccaggccagagcagaugc

SEQ ID NO: 475735 - RNA, 32 nt, Human
gucuuugaggaggcucacaaaauacuaaagcu

SEQ ID NO: 475736 - RNA, 20 nt, Human
gucuuugcacacacagugca

SEQ ID NO: 475737 - RNA, 32 nt, Human
gucuuugcacacacauauagguauauucugaa

SEQ ID NO: 475738 - RNA, 32 nt, Human
gucuuugcacaucccaacccgugaccuuccac

SEQ ID NO: 475739 - RNA, 32 nt, Human
gucuuugccacauuugacugaauugagcuguc

SEQ ID NO: 475740 - RNA, 32 nt, Human
gucuuugccugucccaacuacaaggacuguac

SEQ ID NO: 475741 - RNA, 31 nt, Human
gucuuugccuuugcugggccuucugugcagg

SEQ ID NO: 475742 - RNA, 32 nt, Human
gucuuugcggagcuggaguuccaggcuggacc

SEQ ID NO: 475743 - RNA, 32 nt, Human
gucuuugcuauacaaaaguguuuuccacuaau

SEQ ID NO: 475744 - RNA, 32 nt, Human
gucuuugcucccuccccucucuuagagacugu

SEQ ID NO: 475745 - RNA, 32 nt, Human
gucuuugcugcuguccccagaccuccugugac

SEQ ID NO: 475746 - RNA, 32 nt, Human
gucuuugcuggaaaguguauuugugcauaaau

SEQ ID NO: 475747 - RNA, 32 nt, Human
gucuuugcuguacucuugcugauggcugcuag

SEQ ID NO: 475748 - RNA, 32 nt, Human
gucuuuggaaagguuuggaaaugcagaaauaa

SEQ ID NO: 475749 - RNA, 32 nt, Human
gucuuuggaagagguagccccugaacgcagag

SEQ ID NO: 475750 - RNA, 32 nt, Human
gucuuuggaauagcaguaguuuuggaaauauu

SEQ ID NO: 475751 - RNA, 32 nt, Human
gucuuuggagcagccacggcccacaaucaccc

SEQ ID NO: 475752 - RNA, 27 nt, Human
gucuuuggagucggggauggaggaggu

SEQ ID NO: 475753 - RNA, 21 nt, Human
gucuuugggagguaagcaagu

SEQ ID NO: 475754 - RNA, 21 nt, Human
gucuuugggaucuggggaggc

SEQ ID NO: 475755 - RNA, 32 nt, Human
gucuuugggcagggaauuaaugacagaaugag

SEQ ID NO: 475756 - RNA, 32 nt, Human
gucuuugggccagccagucucuccccacugcu

SEQ ID NO: 475757 - RNA, 32 nt, Human
gucuuuggggagaggggagugcauuuagacuu

SEQ ID NO: 475758 - RNA, 32 nt, Human
gucuuugggggaggacagccaccaaaguuuaa

SEQ ID NO: 475759 - RNA, 32 nt, Human
gucuuugguagugcuucugcugcugccaccaa

SEQ ID NO: 475760 - RNA, 32 nt, Human
gucuuugguggcaccuuccuugcuggccucca

SEQ ID NO: 475761 - RNA, 23 nt, Human
gucuuugguggggauggggaggc

SEQ ID NO: 475762 - RNA, 23 nt, Human
gucuuugucaagugucugcucca

SEQ ID NO: 475763 - RNA, 32 nt, Human
gucuuugucccaccagggguugcaguggcuug

SEQ ID NO: 475764 - RNA, 32 nt, Human
gucuuugugaaaugaaauaacaugcuucauuu

SEQ ID NO: 475765 - RNA, 32 nt, Human
gucuuugugcguugcuuuuccaaggauaggaa

SEQ ID NO: 475766 - RNA, 32 nt, Human
gucuuuguggcuguuuaagucaccaacaauag

SEQ ID NO: 475767 - RNA, 32 nt, Human
gucuuugugggggaaggcccuggcuuuguauu

SEQ ID NO: 475768 - RNA, 32 nt, Human
gucuuugugguccggggcugagacccacgagg

SEQ ID NO: 475769 - RNA, 32 nt, Human
gucuuuguuacccaggcuggaguacaguggug

SEQ ID NO: 475770 - RNA, 32 nt, Human
gucuuuguuccuucuuauuuuggcauucgaua

SEQ ID NO: 475771 - RNA, 21 nt, Human
gucuuuguucggggcugucca

SEQ ID NO: 475772 - RNA, 32 nt, Human
gucuuuguugcucaggcuggaguacaguggca

SEQ ID NO: 475773 - RNA, 32 nt, Human
gucuuuuacaccauuuagugcccuugcuuuug

SEQ ID NO: 475774 - RNA, 32 nt, Human
gucuuuuagccuucaacuuuguauccaucaga

SEQ ID NO: 475775 - RNA, 32 nt, Human
gucuuuuagggagggugacugggaggugcccc

SEQ ID NO: 475776 - RNA, 32 nt, Human
gucuuuucauuuuguacauucuucccauucug

SEQ ID NO: 475777 - RNA, 18 nt, Human
gucuuuucccagcugcca

SEQ ID NO: 475778 - RNA, 32 nt, Human
gucuuuuccccaccaucuuuaaaucaaaguug

SEQ ID NO: 475779 - RNA, 28 nt, Human
gucuuuuccccugcugccucacucccca

SEQ ID NO: 475780 - RNA, 32 nt, Human
gucuuuuccuauucagaacuaugugcuuguca

SEQ ID NO: 475781 - RNA, 32 nt, Human
gucuuuuccuugugguuccuuucuccggcauc

SEQ ID NO: 475782 - RNA, 32 nt, Human
gucuuuucuagcaaagggauaaaacuuagaug

SEQ ID NO: 475783 - RNA, 32 nt, Human
gucuuuucuagcaacgucgacaggcuuuccaa

SEQ ID NO: 475784 - RNA, 32 nt, Human
gucuuuucuaucuccaugccuggcuuuuucua

SEQ ID NO: 475785 - RNA, 32 nt, Human
gucuuuucucauuccuuugacucugccggacu

SEQ ID NO: 475786 - RNA, 32 nt, Human
gucuuuucugugggauacacaggacagugcca

SEQ ID NO: 475787 - RNA, 32 nt, Human
gucuuuucuuccaugaguucugucugaacuga

SEQ ID NO: 475788 - RNA, 32 nt, Human
gucuuuucuuugccaucucugcuccaaccggg

SEQ ID NO: 475789 - RNA, 32 nt, Human
gucuuuugaagaaaaagauucuuuagaaaugu

SEQ ID NO: 475790 - RNA, 24 nt, Human
gucuuuugacauguggaaagugaa

SEQ ID NO: 475791 - RNA, 32 nt, Human
gucuuuugagauacagguuuauaacacugcuu

SEQ ID NO: 475792 - RNA, 32 nt, Human
gucuuuugcaaauauuuuccucccaggcugug

SEQ ID NO: 475793 - RNA, 32 nt, Human
gucuuuugcuccacuugcugguguuuuauaga

SEQ ID NO: 475794 - RNA, 32 nt, Human
gucuuuuggaaaugcagguuuaaggacaaauu

SEQ ID NO: 475795 - RNA, 21 nt, Human
gucuuuugggggugagggagc

SEQ ID NO: 475796 - RNA, 32 nt, Human
gucuuuuggucugaauuuguuuuccuuugguu

SEQ ID NO: 475797 - RNA, 32 nt, Human
gucuuuuguuucucccuucugugguuuaugag

SEQ ID NO: 475798 - RNA, 31 nt, Human
gucuuuuuccucuuggcauuuccuaauaaca

SEQ ID NO: 475799 - RNA, 32 nt, Human
gucuuuuucuaguuugugcucuucuguuccaa

SEQ ID NO: 475800 - RNA, 30 nt, Human
gucuuuuucugcuuucccuuagaguagcug

SEQ ID NO: 475801 - RNA, 32 nt, Human
gucuuuuugaagcacaguuacauucauguuau

SEQ ID NO: 475802 - RNA, 32 nt, Human
gucuuuuuguggcuucugguuuggaaagcaca

SEQ ID NO: 475803 - RNA, 20 nt, Human
gugaaaaaauaaauuucugu

SEQ ID NO: 475804 - RNA, 32 nt, Human
gugaaaaagaugaccccuuucugauuaggauc

SEQ ID NO: 475805 - RNA, 32 nt, Human
gugaaaaaggaaaugucaggagggauaagaca

SEQ ID NO: 475806 - RNA, 32 nt, Human
gugaaaaaggugccuuucuucugguuugccuu

SEQ ID NO: 475807 - RNA, 22 nt, Human
gugaaaaaucugaugacuuuaa

SEQ ID NO: 475808 - RNA, 31 nt, Human
gugaaaacacucaaggccuagggggaggaca

SEQ ID NO: 475809 - RNA, 32 nt, Human
gugaaaacacucuuaacuuucucuuuacccuu

SEQ ID NO: 475810 - RNA, 32 nt, Human
gugaaaaccacauuaccagcaugguaaagggu

SEQ ID NO: 475811 - RNA, 32 nt, Human
gugaaaacccuccaucauaaggaggaaguuau

SEQ ID NO: 475812 - RNA, 32 nt, Human
gugaaaacuaggagaacagagaugagauuuga

SEQ ID NO: 475813 - RNA, 32 nt, Human
gugaaaacugggaaugugaauguaauauaugu

SEQ ID NO: 475814 - RNA, 32 nt, Human
gugaaaagaaaauuucuagugucuauccauug

SEQ ID NO: 475815 - RNA, 32 nt, Human
gugaaaagaggagugacaggagggaaaggggg

SEQ ID NO: 475816 - RNA, 22 nt, Human
gugaaaagcugcgcuuuuugaa

SEQ ID NO: 475817 - RNA, 32 nt, Human
gugaaaaggagaggguaacagaaaaagaggaa

SEQ ID NO: 475818 - RNA, 32 nt, Human
gugaaaaggggaggggaugugguaagcagaaa

SEQ ID NO: 475819 - RNA, 32 nt, Human
gugaaaagggugccacuggcaccacugggugg

SEQ ID NO: 475820 - RNA, 20 nt, Human
gugaaaagucucccuuucca

SEQ ID NO: 475821 - RNA, 18 nt, Human
gugaaaaguuccuuuaaa

SEQ ID NO: 475822 - RNA, 22 nt, Human
gugaaaaguuguugaucuugaa

SEQ ID NO: 475823 - RNA, 32 nt, Human
gugaaaaguuugggagcacugcuuuauaauaa

SEQ ID NO: 475824 - RNA, 32 nt, Human
gugaaaauacuuuugggcugggcacgguggcu

SEQ ID NO: 475825 - RNA, 31 nt, Human
gugaaaaugaacacagggcgugauucucagu

SEQ ID NO: 475826 - RNA, 32 nt, Human
gugaaaaugaugucuaccugccuugcugauga

SEQ ID NO: 475827 - RNA, 32 nt, Human
gugaaaaugccacucuccugugccuaccaaua

SEQ ID NO: 475828 - RNA, 32 nt, Human
gugaaaauguucaucaauucccauugcaucac

SEQ ID NO: 475829 - RNA, 32 nt, Human
gugaaacacagcuguucuucuguucugcagac

SEQ ID NO: 475830 - RNA, 32 nt, Human
gugaaacagcaaaccccaaaucuucaaaguug

SEQ ID NO: 475831 - RNA, 32 nt, Human
gugaaacagcauauuacaaguuugaaaauuca

SEQ ID NO: 475832 - RNA, 32 nt, Human
gugaaacagggaagguuguuaaacagcaccgu

SEQ ID NO: 475833 - RNA, 32 nt, Human
gugaaacauccuugcaaacucuucccaccucc

SEQ ID NO: 475834 - RNA, 32 nt, Human
gugaaacaucuucagggcgggaaaggggccac

SEQ ID NO: 475835 - RNA, 32 nt, Human
gugaaacaucuucagggugggaaaggggccac

SEQ ID NO: 475836 - RNA, 32 nt, Human
gugaaacauggugaaaccccgucucuacuaaa

SEQ ID NO: 475837 - RNA, 32 nt, Human
gugaaaccagacaaagccgcgagcccagggau

SEQ ID NO: 475838 - RNA, 32 nt, Human
gugaaaccagagaugauuuggaagaugggggu

SEQ ID NO: 475839 - RNA, 32 nt, Human
gugaaacccaggaggagaguguggaguccaga

SEQ ID NO: 475840 - RNA, 20 nt, Human
gugaaaccccagcucuacua

SEQ ID NO: 475841 - RNA, 20 nt, Human
gugaaaccccaucucuacua

SEQ ID NO: 475842 - RNA, 20 nt, Human
gugaaaccccaugucuacua

SEQ ID NO: 475843 - RNA, 20 nt, Human
gugaaaccccgucuccacua

SEQ ID NO: 475844 - RNA, 20 nt, Human
gugaaaccccgucucuacua

SEQ ID NO: 475845 - RNA, 32 nt, Human
gugaaacccugccucuacuaaaaauacaaaaa

SEQ ID NO: 475846 - RNA, 32 nt, Human
gugaaacccugccucuacuaaauauacaaaaa

SEQ ID NO: 475847 - RNA, 20 nt, Human
gugaaacccugucuccacua

SEQ ID NO: 475848 - RNA, 20 nt, Human
gugaaacccugucucuacua

SEQ ID NO: 475849 - RNA, 20 nt, Human
gugaaaccucaucucuacua

SEQ ID NO: 475850 - RNA, 32 nt, Human
gugaaaccucucgcugcugcuagguuuacaaa

SEQ ID NO: 475851 - RNA, 32 nt, Human
gugaaacggggugcggggguggggacggcggu

SEQ ID NO: 475852 - RNA, 32 nt, Human
gugaaacuaagcaaccuggucggcuuuacugu

SEQ ID NO: 475853 - RNA, 32 nt, Human
gugaaacuauuaaaccuagaaauuguauucau

SEQ ID NO: 475854 - RNA, 32 nt, Human
gugaaacugaaggaggcuggaaguauucaccc

SEQ ID NO: 475855 - RNA, 32 nt, Human
gugaaacuggaaggcugccauggcuagcccag

SEQ ID NO: 475856 - RNA, 32 nt, Human
gugaaacuggcaguugacggcuccugggacua

SEQ ID NO: 475857 - RNA, 32 nt, Human
gugaaacugggcugaagugagguuugcagccu

SEQ ID NO: 475858 - RNA, 32 nt, Human
gugaaacuuguuucuaacaggauuucauguga

SEQ ID NO: 475859 - RNA, 23 nt, Human
gugaaagaaauguuucuugaaga

SEQ ID NO: 475860 - RNA, 32 nt, Human
gugaaagaagugaaaagaagcaaccacagcua

SEQ ID NO: 475861 - RNA, 32 nt, Human
gugaaagaagugagaauggggguagccaagug

SEQ ID NO: 475862 - RNA, 32 nt, Human
gugaaagacugaggcagcguggaugggaagua

SEQ ID NO: 475863 - RNA, 19 nt, Human
gugaaagagagcuagcugg

SEQ ID NO: 475864 - RNA, 32 nt, Human
gugaaagagagggaggggugcagcaacaugug

SEQ ID NO: 475865 - RNA, 32 nt, Human
gugaaagagcccccuccuccccucucuccugg

SEQ ID NO: 475866 - RNA, 32 nt, Human
gugaaagagucucaguucagugaacacaaaac

SEQ ID NO: 475867 - RNA, 32 nt, Human
gugaaagauaaauuguucuucagacagagugc

SEQ ID NO: 475868 - RNA, 32 nt, Human
gugaaagaugacguccuuagcccagcagcugc

SEQ ID NO: 475869 - RNA, 19 nt, Human
gugaaagcaaaauagcuug

SEQ ID NO: 475870 - RNA, 20 nt, Human
gugaaagcccaucucuacua

SEQ ID NO: 475871 - RNA, 32 nt, Human
gugaaagccugagucccaccagaaggaccuuc

SEQ ID NO: 475872 - RNA, 32 nt, Human
gugaaagcugugguagagugguuaacagauac

SEQ ID NO: 475873 - RNA, 32 nt, Human
gugaaaggaaggcagcuuguauugagccuuuu

SEQ ID NO: 475874 - RNA, 32 nt, Human
gugaaaggacuugccagguuuuguucagguuu

SEQ ID NO: 475875 - RNA, 32 nt, Human
gugaaaggagaugagaagauggguggagagga

SEQ ID NO: 475876 - RNA, 32 nt, Human
gugaaaggaggaaugaaagcaagugaaggaug

SEQ ID NO: 475877 - RNA, 24 nt, Human
gugaaaggaucacuugagcccagg

SEQ ID NO: 475878 - RNA, 23 nt, Human
gugaaaggauugcuugagccagg

SEQ ID NO: 475879 - RNA, 32 nt, Human
gugaaaggccacugcacuccagccugagugac

SEQ ID NO: 475880 - RNA, 32 nt, Human
gugaaaggccuggcggggaggaaagugaaacg

SEQ ID NO: 475881 - RNA, 32 nt, Human
gugaaaggcugaaggagguggagcuggggagg

SEQ ID NO: 475882 - RNA, 32 nt, Human
gugaaagggcaucauauacuucaaggaagacu

SEQ ID NO: 475883 - RNA, 32 nt, Human
gugaaagggccuacacuaaaacaacaaauuuu

SEQ ID NO: 475884 - RNA, 21 nt, Human
gugaaaggggacgagcagggg

SEQ ID NO: 475885 - RNA, 32 nt, Human
gugaaaggggcucuugauuagcuuaaaaucac

SEQ ID NO: 475886 - RNA, 21 nt, Human
gugaaaggggggaaccaguga

SEQ ID NO: 475887 - RNA, 22 nt, Human
gugaaaggggugacuuuuagga

SEQ ID NO: 475888 - RNA, 31 nt, Human
gugaaagggugauggauuucacugugaauau

SEQ ID NO: 475889 - RNA, 32 nt, Human
gugaaagggugauggauuucacugugaauaug

SEQ ID NO: 475890 - RNA, 32 nt, Human
gugaaaguagagucugggaaguagcugccuau

SEQ ID NO: 475891 - RNA, 32 nt, Human
gugaaagucgaugccuucuagucucagugaau

SEQ ID NO: 475892 - RNA, 32 nt, Human
gugaaagucuccuguaucauuucuugguauga

SEQ ID NO: 475893 - RNA, 32 nt, Human
gugaaaguucugauucucuuccuucccuguuu

SEQ ID NO: 475894 - RNA, 21 nt, Human
gugaaaguuggacaguugggg

SEQ ID NO: 475895 - RNA, 21 nt, Human
gugaaaguuggggcugaagua

SEQ ID NO: 475896 - RNA, 32 nt, Human
gugaaauaagaggcuguaguacauggcgagcu

SEQ ID NO: 475897 - RNA, 32 nt, Human
gugaaauacuaccagaacuguucucuaaaccc

SEQ ID NO: 475898 - RNA, 32 nt, Human
gugaaauauguuacagaacaugcacuugcccu

SEQ ID NO: 475899 - RNA, 32 nt, Human
gugaaaucagccccugcccaccaaaauaaucu

SEQ ID NO: 475900 - RNA, 32 nt, Human
gugaaaucuccaugguuccugcuuuguguucc

SEQ ID NO: 475901 - RNA, 32 nt, Human
gugaaaucugagaagaaauccuuggaucucuu

SEQ ID NO: 475902 - RNA, 32 nt, Human
gugaaaugacaugcaaaggccauaguugucaa

SEQ ID NO: 475903 - RNA, 32 nt, Human
gugaaaugacuuaccaaugucacauaacuagu

SEQ ID NO: 475904 - RNA, 32 nt, Human
gugaaaugagccagggcgaggagggaggguga

SEQ ID NO: 475905 - RNA, 32 nt, Human
gugaaaugcauccuuguaacaucauuguauuc

SEQ ID NO: 475906 - RNA, 32 nt, Human
gugaaaugccaaauuugaaaggccuguacugc

SEQ ID NO: 475907 - RNA, 32 nt, Human
gugaaauggaccugacagcccaaacugucaga

SEQ ID NO: 475908 - RNA, 32 nt, Human
gugaaauggagucucuuugugguucugauuug

SEQ ID NO: 475909 - RNA, 32 nt, Human
gugaaaugggcugaggcaggaaaugggaaaaa

SEQ ID NO: 475910 - RNA, 24 nt, Human
gugaaauguagacagggcaggcug

SEQ ID NO: 475911 - RNA, 32 nt, Human
gugaaauguaucuuucaacuguuuaguuaccc

SEQ ID NO: 475912 - RNA, 32 nt, Human
gugaaaugucacuccauugacccaccgaaaaa

SEQ ID NO: 475913 - RNA, 32 nt, Human
gugaaauguguguguauacaauaaacugaaaa

SEQ ID NO: 475914 - RNA, 32 nt, Human
gugaaauuaauauuaugcagaugaugaaaggg

SEQ ID NO: 475915 - RNA, 21 nt, Human
gugaaauucagaauuuuucuu

SEQ ID NO: 475916 - RNA, 32 nt, Human
gugaaauucugaguuguuggggcuaagccuga

SEQ ID NO: 475917 - RNA, 24 nt, Human
gugaaauuguaggccauuuucuua

SEQ ID NO: 475918 - RNA, 32 nt, Human
gugaaauuucaaaagugugaacuuuuuauucu

SEQ ID NO: 475919 - RNA, 21 nt, Human
gugaacaaaacuguguuuuga

SEQ ID NO: 475920 - RNA, 22 nt, Human
gugaacaaaaugacugauaucu

SEQ ID NO: 475921 - RNA, 32 nt, Human
gugaacaaagaucauuacaaacaaaaacugua

SEQ ID NO: 475922 - RNA, 32 nt, Human
gugaacaaagcacgacuauuuuguaaagggaa

SEQ ID NO: 475923 - RNA, 20 nt, Human
gugaacaaaguacggaaucu

SEQ ID NO: 475924 - RNA, 32 nt, Human
gugaacaaaucugucuuugacuuacgacccau

SEQ ID NO: 475925 - RNA, 32 nt, Human
gugaacaaggugucagcucugaagggaagguu

SEQ ID NO: 475926 - RNA, 21 nt, Human
gugaacacacgccacuuccca

SEQ ID NO: 475927 - RNA, 19 nt, Human
gugaacaccuguaauccca

SEQ ID NO: 475928 - RNA, 32 nt, Human
gugaacacgagugacagggcuccgggggaagu

SEQ ID NO: 475929 - RNA, 32 nt, Human
gugaacacugcaauauccccugggagacucuc

SEQ ID NO: 475930 - RNA, 26 nt, Human
gugaacagaauacuguuuucugggga

SEQ ID NO: 475931 - RNA, 23 nt, Human
gugaacagaauugcaaauagucu

SEQ ID NO: 475932 - RNA, 21 nt, Human
gugaacagauguuuucuagga

SEQ ID NO: 475933 - RNA, 32 nt, Human
gugaacagcagcaggaggagccgcuagagcag

SEQ ID NO: 475934 - RNA, 32 nt, Human
gugaacagcagcuacuacaguaguggaagccg

SEQ ID NO: 475935 - RNA, 32 nt, Human
gugaacaggcugggcugcuggagguggggcga

SEQ ID NO: 475936 - RNA, 32 nt, Human
gugaacagguucuccaggugauucugaucccu

SEQ ID NO: 475937 - RNA, 21 nt, Human
gugaacaguccuucuagggga

SEQ ID NO: 475938 - RNA, 32 nt, Human
gugaacagugugugugcgugcgugagaccaca

SEQ ID NO: 475939 - RNA, 20 nt, Human
gugaacaguuguguuugaag

SEQ ID NO: 475940 - RNA, 32 nt, Human
gugaacaucuguggcuguccucuccuuuucuu

SEQ ID NO: 475941 - RNA, 32 nt, Human
gugaacaugccaccguauucuucauuccuucu

SEQ ID NO: 475942 - RNA, 32 nt, Human
gugaacauguacauggucugcucucauuuauu

SEQ ID NO: 475943 - RNA, 32 nt, Human
gugaaccaacccagaaacagaaaaugaaaugc

SEQ ID NO: 475944 - RNA, 32 nt, Human
gugaaccaacccccaucucccuagcccacccc

SEQ ID NO: 475945 - RNA, 32 nt, Human
gugaaccaagaugucaguuuuguauuggggau

SEQ ID NO: 475946 - RNA, 32 nt, Human
gugaaccacugcacccagccaauggguguaau

SEQ ID NO: 475947 - RNA, 32 nt, Human
gugaaccacugcacccagccuaucuuuugcau

SEQ ID NO: 475948 - RNA, 32 nt, Human
gugaaccacugcacccagccugcugauccuuu

SEQ ID NO: 475949 - RNA, 23 nt, Human
gugaaccagcuucuagaugacau

SEQ ID NO: 475950 - RNA, 32 nt, Human
gugaaccagggaggggcagggcaaggcagggc

SEQ ID NO: 475951 - RNA, 32 nt, Human
gugaaccagggccuggagagccuggaccugca

SEQ ID NO: 475952 - RNA, 32 nt, Human
gugaaccaucugagaagcuuggaagaggaccc

SEQ ID NO: 475953 - RNA, 32 nt, Human
gugaaccaugaucacaccacugcacucuagcc

SEQ ID NO: 475954 - RNA, 32 nt, Human
gugaaccaugauugcacuccaaccugggcgac

SEQ ID NO: 475955 - RNA, 32 nt, Human
gugaaccauggacuuaaucaaccagcgguuuc

SEQ ID NO: 475956 - RNA, 32 nt, Human
gugaaccauggaggccgcaaggcccuucgccc

SEQ ID NO: 475957 - RNA, 32 nt, Human
gugaacccaggagacggagcuugcagugagcc

SEQ ID NO: 475958 - RNA, 32 nt, Human
gugaacccaggaggaggagcuugcagugagcc

SEQ ID NO: 475959 - RNA, 32 nt, Human
gugaacccaggaggcacagcuugcagugagcg

SEQ ID NO: 475960 - RNA, 32 nt, Human
gugaacccaggaggcagagcuugcagugagcc

SEQ ID NO: 475961 - RNA, 32 nt, Human
gugaacccaggaggcagagcuugcagugagcu

SEQ ID NO: 475962 - RNA, 32 nt, Human
gugaacccaggaggcagagguugcagugagcc

SEQ ID NO: 475963 - RNA, 32 nt, Human
gugaacccaggaggcggaccuuguagugagcc

SEQ ID NO: 475964 - RNA, 32 nt, Human
gugaacccaggaggcggagcuggcagugagcu

SEQ ID NO: 475965 - RNA, 32 nt, Human
gugaacccaggaggcggagcuugcagugagca

SEQ ID NO: 475966 - RNA, 32 nt, Human
gugaacccaggaggcggagcuugcagugagcc

SEQ ID NO: 475967 - RNA, 32 nt, Human
gugaacccaggaggcggagcuugcagugagcu

SEQ ID NO: 475968 - RNA, 32 nt, Human
gugaacccaggaggcggaggcugcagugagcu

SEQ ID NO: 475969 - RNA, 32 nt, Human
gugaacccaggaggcggagguugcagugagcc

SEQ ID NO: 475970 - RNA, 32 nt, Human
gugaacccaggaggcggcgguugcagugagcc

SEQ ID NO: 475971 - RNA, 32 nt, Human
gugaacccaggagguggagcuugcaaugagcc

SEQ ID NO: 475972 - RNA, 32 nt, Human
gugaacccaggagguggagcuugcagugagcc

SEQ ID NO: 475973 - RNA, 32 nt, Human
gugaacccagugagccgagaucgugccacugc

SEQ ID NO: 475974 - RNA, 32 nt, Human
gugaaccccaaagugucccccuuguggaacca

SEQ ID NO: 475975 - RNA, 32 nt, Human
gugaaccccuuuugguugcacacaugcucccc

SEQ ID NO: 475976 - RNA, 32 nt, Human
gugaacccgggacgcagggguugcagugagcg

SEQ ID NO: 475977 - RNA, 32 nt, Human
gugaacccgggagcggagguugcagugagcug

SEQ ID NO: 475978 - RNA, 32 nt, Human
gugaacccgggaggcagagguugcagugaacc

SEQ ID NO: 475979 - RNA, 32 nt, Human
gugaacccgggaggcagagguugcagugagcc

SEQ ID NO: 475980 - RNA, 32 nt, Human
gugaacccgggaggcgagcuugcagugagccg

SEQ ID NO: 475981 - RNA, 32 nt, Human
gugaacccgggaggcggagguugcagugagcc

SEQ ID NO: 475982 - RNA, 32 nt, Human
gugaacccgggcccgguggaggcugcagugag

SEQ ID NO: 475983 - RNA, 32 nt, Human
gugaacccugcagcgggccagcuaugguggga

SEQ ID NO: 475984 - RNA, 32 nt, Human
gugaacccuguaguguugcaggcccagcagac

SEQ ID NO: 475985 - RNA, 32 nt, Human
gugaaccgagaggugguuacuguaguguuugu

SEQ ID NO: 475986 - RNA, 32 nt, Human
gugaaccgcgcugcugcuccagccugacuucc

SEQ ID NO: 475987 - RNA, 32 nt, Human
gugaaccgcuggcugcuguugugccucaucuc

SEQ ID NO: 475988 - RNA, 32 nt, Human
gugaaccucaaagcuggacucuggguucucac

SEQ ID NO: 475989 - RNA, 32 nt, Human
gugaaccugcaaucccagugcuuugggaggcu

SEQ ID NO: 475990 - RNA, 32 nt, Human
gugaaccugcaggagcugcggggcagguguug

SEQ ID NO: 475991 - RNA, 32 nt, Human
gugaaccugcugcagacagaagcagaggaaag

SEQ ID NO: 475992 - RNA, 32 nt, Human
gugaaccugggaggcggagguugcagugagcu

SEQ ID NO: 475993 - RNA, 32 nt, Human
gugaaccuggggagccucgggggcagagguga

SEQ ID NO: 475994 - RNA, 32 nt, Human
gugaaccuguguucuccacauuuguccugacu

SEQ ID NO: 475995 - RNA, 32 nt, Human
gugaacuacaucucauuccuguuuccaacuag

SEQ ID NO: 475996 - RNA, 18 nt, Human
gugaacuacugcuguaaa

SEQ ID NO: 475997 - RNA, 32 nt, Human
gugaacuagagaaugcugagucuggaggagac

SEQ ID NO: 475998 - RNA, 23 nt, Human
gugaacucuagagcacaguaguu

SEQ ID NO: 475999 - RNA, 32 nt, Human
gugaacucuccccuccccaucuguguucuaac

SEQ ID NO: 476000 - RNA, 32 nt, Human
gugaacucucucacucagugaccucagucacc

SEQ ID NO: 476001 - RNA, 32 nt, Human
gugaacugaauugaauccauuguugggcuuaa

SEQ ID NO: 476002 - RNA, 32 nt, Human
gugaacugaguauuuuugucaaaagucacagg

SEQ ID NO: 476003 - RNA, 32 nt, Human
gugaacugaucaucuucucuauauucauuuca

SEQ ID NO: 476004 - RNA, 32 nt, Human
gugaacugcuuagguaggagugcacugcaguu

SEQ ID NO: 476005 - RNA, 32 nt, Human
gugaacuggcccauccugcggacaguuguggu

SEQ ID NO: 476006 - RNA, 32 nt, Human
gugaacugguuacuuucugucucugugcucua

SEQ ID NO: 476007 - RNA, 32 nt, Human
gugaacugguuguaccugaugaucugagaucc

SEQ ID NO: 476008 - RNA, 24 nt, Human
gugaacuuaguccuguuauagacg

SEQ ID NO: 476009 - RNA, 32 nt, Human
gugaacuugcaggugcacaaaauaagagggcc

SEQ ID NO: 476010 - RNA, 24 nt, Human
gugaacuuggguuugcaaguaucu

SEQ ID NO: 476011 - RNA, 32 nt, Human
gugaacuuggugggcccaggagggaacaggag

SEQ ID NO: 476012 - RNA, 32 nt, Human
gugaacuuguguaauaguauaauaggagauau

SEQ ID NO: 476013 - RNA, 32 nt, Human
gugaacuuuuccaguaaaugaagcaagcacug

SEQ ID NO: 476014 - RNA, 22 nt, Human
gugaagaaacaaggaggcacuu

SEQ ID NO: 476015 - RNA, 23 nt, Human
gugaagaaaccaucagcaggcug

SEQ ID NO: 476016 - RNA, 32 nt, Human
gugaagaaaguucccaauagugaggaguauca

SEQ ID NO: 476017 - RNA, 32 nt, Human
gugaagaagaaccagaugaggccaggcacggu

SEQ ID NO: 476018 - RNA, 32 nt, Human
gugaagaagacaagcucaacugccauucucug

SEQ ID NO: 476019 - RNA, 32 nt, Human
gugaagaagagaggaagcaggaucccacugag

SEQ ID NO: 476020 - RNA, 32 nt, Human
gugaagaagccacaccuuccagaggccaggca

SEQ ID NO: 476021 - RNA, 32 nt, Human
gugaagaagugaguauguuucaccuggacauu

SEQ ID NO: 476022 - RNA, 32 nt, Human
gugaagacagaggcagagauuggagugacgca

SEQ ID NO: 476023 - RNA, 32 nt, Human
gugaagaccaaucccuuccuuugguccuuugg

SEQ ID NO: 476024 - RNA, 32 nt, Human
gugaagaccaugguuuugagguuucuuaauaa

SEQ ID NO: 476025 - RNA, 32 nt, Human
gugaagacccuccagacucugggagaggcugg

SEQ ID NO: 476026 - RNA, 32 nt, Human
gugaagaccugacaguaauuuuugucuuaaga

SEQ ID NO: 476027 - RNA, 24 nt, Human
gugaagacgagaagaaggcaacug

SEQ ID NO: 476028 - RNA, 25 nt, Human
gugaagagaaaagaggaggacugau

SEQ ID NO: 476029 - RNA, 32 nt, Human
gugaagagacagaaggaggauggcaggaguua

SEQ ID NO: 476030 - RNA, 32 nt, Human
gugaagagcacaggcuguggggacaaccagac

SEQ ID NO: 476031 - RNA, 32 nt, Human
gugaagagcagugugcugucacacaccguuaa

SEQ ID NO: 476032 - RNA, 32 nt, Human
gugaagagccggcaggaaggggaccagucaca

SEQ ID NO: 476033 - RNA, 32 nt, Human
gugaagagcuaaaccacuggccugggcaccug

SEQ ID NO: 476034 - RNA, 32 nt, Human
gugaagaggagaacgauguccaggcaggggcc

SEQ ID NO: 476035 - RNA, 32 nt, Human
gugaagagggagaagggauggaggucacacug

SEQ ID NO: 476036 - RNA, 32 nt, Human
gugaagagggcggagagagggggcaggcucgg

SEQ ID NO: 476037 - RNA, 32 nt, Human
gugaagaggggccagaugacacccuaaagcag

SEQ ID NO: 476038 - RNA, 32 nt, Human
gugaagaguaguucuuguuuguuacaaccuuu

SEQ ID NO: 476039 - RNA, 32 nt, Human
gugaagagugggauugggagaggugggggugg

SEQ ID NO: 476040 - RNA, 32 nt, Human
gugaagaguuggacacaugaaugaacgcauga

SEQ ID NO: 476041 - RNA, 32 nt, Human
gugaagaucuacugcucccucucuccacacgg

SEQ ID NO: 476042 - RNA, 32 nt, Human
gugaagaugacaccccuccccaccaccucuca

SEQ ID NO: 476043 - RNA, 32 nt, Human
gugaagaugacccccaguaccaaaaaggucuu

SEQ ID NO: 476044 - RNA, 32 nt, Human
gugaagaugaggugaggaaggaagggguugcu

SEQ ID NO: 476045 - RNA, 32 nt, Human
gugaagaugaugucucgcugggagguccugga

SEQ ID NO: 476046 - RNA, 32 nt, Human
gugaagaugauugagaccugcgaugggaagcu

SEQ ID NO: 476047 - RNA, 32 nt, Human
gugaagaugcagaagggaaauggggagccuca

SEQ ID NO: 476048 - RNA, 32 nt, Human
gugaagauggccaagauccccguaucgcuggg

SEQ ID NO: 476049 - RNA, 32 nt, Human
gugaagauggcugauacccacccugggaugga

SEQ ID NO: 476050 - RNA, 32 nt, Human
gugaagaugguaggguggaaagacuuaauuuc

SEQ ID NO: 476051 - RNA, 32 nt, Human
gugaagcaaauacauucagcuuacugaucacu

SEQ ID NO: 476052 - RNA, 24 nt, Human
gugaagcaaguggagugguuggga

SEQ ID NO: 476053 - RNA, 32 nt, Human
gugaagcacaaauccuccuggcagaugggaag

SEQ ID NO: 476054 - RNA, 32 nt, Human
gugaagcacacagcucugcagccugggcucug

SEQ ID NO: 476055 - RNA, 32 nt, Human
gugaagcagcagcuaugagaaaagugguaaaa

SEQ ID NO: 476056 - RNA, 32 nt, Human
gugaagcagcagcuccagccccgggauaaaca

SEQ ID NO: 476057 - RNA, 32 nt, Human
gugaagcaggaaacauggugaugcugggugac

SEQ ID NO: 476058 - RNA, 32 nt, Human
gugaagccagaggcagcuccagccugggggac

SEQ ID NO: 476059 - RNA, 32 nt, Human
gugaagccagcagaggagugauagcugcuccc

SEQ ID NO: 476060 - RNA, 32 nt, Human
gugaagcccagccuggcgccugcccugccccc

SEQ ID NO: 476061 - RNA, 32 nt, Human
gugaagcccaggaggugguguuggcugcaggg

SEQ ID NO: 476062 - RNA, 32 nt, Human
gugaagcccuuggaucgagcagucuucuggau

SEQ ID NO: 476063 - RNA, 22 nt, Human
gugaagccgagucacaggaccc

SEQ ID NO: 476064 - RNA, 32 nt, Human
gugaagccgcggccaccggaagagucgcgguc

SEQ ID NO: 476065 - RNA, 32 nt, Human
gugaagccuggaguagggagagcgaguuuggg

SEQ ID NO: 476066 - RNA, 32 nt, Human
gugaagccugggaaugaguguuacugcagcau

SEQ ID NO: 476067 - RNA, 32 nt, Human
gugaagccuguauucaccuuuuucaguguauu

SEQ ID NO: 476068 - RNA, 32 nt, Human
gugaagcgggcagaucacuugaggucaggagu

SEQ ID NO: 476069 - RNA, 32 nt, Human
gugaagcucccacauguggaauggaagcccuu

SEQ ID NO: 476070 - RNA, 32 nt, Human
gugaagcugccugguguuaggucucugcaaga

SEQ ID NO: 476071 - RNA, 32 nt, Human
gugaagcugggagcuucgccagcaucugauuu

SEQ ID NO: 476072 - RNA, 32 nt, Human
gugaaggaaccgccuuucucuccgcgugucuc

SEQ ID NO: 476073 - RNA, 32 nt, Human
gugaaggaaggggccaaaaaugaacgagaucc

SEQ ID NO: 476074 - RNA, 19 nt, Human
gugaaggacauccaggcgg

SEQ ID NO: 476075 - RNA, 32 nt, Human
gugaaggagaggguggggagggaggcaucuag

SEQ ID NO: 476076 - RNA, 32 nt, Human
gugaaggaggaggcggggcugcacugugagcc

SEQ ID NO: 476077 - RNA, 32 nt, Human
gugaaggagggaaagugcagaggcuuucuggg

SEQ ID NO: 476078 - RNA, 32 nt, Human
gugaaggagggaaggagcaggagagcaggaag

SEQ ID NO: 476079 - RNA, 32 nt, Human
gugaaggauacucccuucuuucauacagaagc

SEQ ID NO: 476080 - RNA, 32 nt, Human
gugaaggauccagugagauuuuccagguuaac

SEQ ID NO: 476081 - RNA, 32 nt, Human
gugaaggaugguuuggaagaugaggacccggc

SEQ ID NO: 476082 - RNA, 32 nt, Human
gugaaggcacacugucccaccacaacugaacc

SEQ ID NO: 476083 - RNA, 32 nt, Human
gugaaggcagaacugcucacaccagcuccaga

SEQ ID NO: 476084 - RNA, 32 nt, Human
gugaaggcagagugagcagguaagagagggau

SEQ ID NO: 476085 - RNA, 32 nt, Human
gugaaggcagggggaaggugggguacuggagc

SEQ ID NO: 476086 - RNA, 32 nt, Human
gugaaggcauuagcuggguguuugugugggau

SEQ ID NO: 476087 - RNA, 21 nt, Human
gugaaggccugaggcaggcug

SEQ ID NO: 476088 - RNA, 32 nt, Human
gugaaggccugauggggaggaggacccggcau

SEQ ID NO: 476089 - RNA, 32 nt, Human
gugaaggcuaucuggggcaggcacaaauuggu

SEQ ID NO: 476090 - RNA, 32 nt, Human
gugaaggcugccuuaggucucuccagugccau

SEQ ID NO: 476091 - RNA, 32 nt, Human
gugaaggcugggugggguggguguggggacug

SEQ ID NO: 476092 - RNA, 32 nt, Human
gugaaggcuguaagacuguaacuuggaagaac

SEQ ID NO: 476093 - RNA, 32 nt, Human
gugaaggcuugaggggaugccucugccucucu

SEQ ID NO: 476094 - RNA, 32 nt, Human
gugaagggaacuccaguucuggggucagaaga

SEQ ID NO: 476095 - RNA, 32 nt, Human
gugaagggaagggaggaggaggaggacgccgg

SEQ ID NO: 476096 - RNA, 32 nt, Human
gugaagggaaguggggaguauuugaacacagu

SEQ ID NO: 476097 - RNA, 20 nt, Human
gugaagggacccgggcaggc

SEQ ID NO: 476098 - RNA, 32 nt, Human
gugaagggacccugccuuucagggcacuacgc

SEQ ID NO: 476099 - RNA, 32 nt, Human
gugaagggagagaaguggauuugggagacauu

SEQ ID NO: 476100 - RNA, 32 nt, Human
gugaagggagagugugaguguguaugugugug

SEQ ID NO: 476101 - RNA, 20 nt, Human
gugaagggagguaggugggg

SEQ ID NO: 476102 - RNA, 23 nt, Human
gugaagggagugccucucuggga

SEQ ID NO: 476103 - RNA, 32 nt, Human
gugaagggaguggcagaaucaaauugcuacau

SEQ ID NO: 476104 - RNA, 20 nt, Human
gugaagggaguggguagggg

SEQ ID NO: 476105 - RNA, 32 nt, Human
gugaagggcaaucagggcagacugccuggagg

SEQ ID NO: 476106 - RNA, 32 nt, Human
gugaagggcgcgaaugggcagagcagaacuuc

SEQ ID NO: 476107 - RNA, 32 nt, Human
gugaaggggaggcggugggcgucuuggagaac

SEQ ID NO: 476108 - RNA, 32 nt, Human
gugaagggggcagaggacugggaguuuucauc

SEQ ID NO: 476109 - RNA, 32 nt, Human
gugaaggggugaggauauucuaaacaaacaaa

SEQ ID NO: 476110 - RNA, 32 nt, Human
gugaagggugaggaguuccuucuguuaaggcc

SEQ ID NO: 476111 - RNA, 32 nt, Human
gugaagggugccuguucugaaucccagagccu

SEQ ID NO: 476112 - RNA, 32 nt, Human
gugaaggguuguguucuuuauggcagguucua

SEQ ID NO: 476113 - RNA, 32 nt, Human
gugaagguaaggucuugugagcacaacagcaa

SEQ ID NO: 476114 - RNA, 32 nt, Human
gugaagguagcaggugcuccuggcagaagaac

SEQ ID NO: 476115 - RNA, 32 nt, Human
gugaaggucaggccagggucucagccuccccu

SEQ ID NO: 476116 - RNA, 32 nt, Human
gugaaggucaggcucuucaaugcugaagaaug

SEQ ID NO: 476117 - RNA, 32 nt, Human
gugaaggucaugcgaugccuggaacaccccaa

SEQ ID NO: 476118 - RNA, 32 nt, Human
gugaaggucugcagcuucacuccuggagucag

SEQ ID NO: 476119 - RNA, 32 nt, Human
gugaaggugaagcacccagcccaagacucagc

SEQ ID NO: 476120 - RNA, 32 nt, Human
gugaaggugcaucuuucccugcccuccccugu

SEQ ID NO: 476121 - RNA, 32 nt, Human
gugaagguggaggccgaccaguagcugcagac

SEQ ID NO: 476122 - RNA, 32 nt, Human
gugaaggugggguuuggggagcuuggccgauu

SEQ ID NO: 476123 - RNA, 32 nt, Human
gugaagguggguggaguugaccagagaaaggg

SEQ ID NO: 476124 - RNA, 22 nt, Human
gugaagguucucgggacaggcu

SEQ ID NO: 476125 - RNA, 32 nt, Human
gugaaguagaggggugaggaaggguaaggggc

SEQ ID NO: 476126 - RNA, 32 nt, Human
gugaaguagccgccccucccaccccggcacga

SEQ ID NO: 476127 - RNA, 32 nt, Human
gugaaguagugucuuccaaaagcugauggaaa

SEQ ID NO: 476128 - RNA, 32 nt, Human
gugaagucaaacuguuauucagagauguuuaa

SEQ ID NO: 476129 - RNA, 32 nt, Human
gugaaguccaacuacgcugaacaucagagaac

SEQ ID NO: 476130 - RNA, 32 nt, Human
gugaaguccaacuggaaacagaaaaauaauua

SEQ ID NO: 476131 - RNA, 32 nt, Human
gugaaguccaacuggaaacagaaaaauauuua

SEQ ID NO: 476132 - RNA, 32 nt, Human
gugaagucucucucuuaaagucuuuugcaaac

SEQ ID NO: 476133 - RNA, 32 nt, Human
gugaagugaagaaaaauaagaaguauuacaac

SEQ ID NO: 476134 - RNA, 31 nt, Human
gugaagugacuuccagcuugcacaaggaaau

SEQ ID NO: 476135 - RNA, 32 nt, Human
gugaagugcaagagcuaggauuacaacugagu

SEQ ID NO: 476136 - RNA, 32 nt, Human
gugaagugcacgucuugggaaagggaugcaau

SEQ ID NO: 476137 - RNA, 32 nt, Human
gugaagugcccagcgcuggagugcagcgugcc

SEQ ID NO: 476138 - RNA, 32 nt, Human
gugaagugccuucuguuuuagcacuuuaaguu

SEQ ID NO: 476139 - RNA, 32 nt, Human
gugaagugcuggcaaccacuaagaauucaaac

SEQ ID NO: 476140 - RNA, 32 nt, Human
gugaagugcuucccauugcugcaggugaagaa

SEQ ID NO: 476141 - RNA, 32 nt, Human
gugaagugucaaccauccagaacacaaggaug

SEQ ID NO: 476142 - RNA, 32 nt, Human
gugaagugucugcugugccuuuacuuauuugg

SEQ ID NO: 476143 - RNA, 32 nt, Human
gugaagugugggcuaaauagggcugaggcuug

SEQ ID NO: 476144 - RNA, 32 nt, Human
gugaagugugggcucuuaggaagccugugggc

SEQ ID NO: 476145 - RNA, 32 nt, Human
gugaaguguucguggcaguagacucugaagcu

SEQ ID NO: 476146 - RNA, 32 nt, Human
gugaaguuaaauggcaaaaggccaggcgagca

SEQ ID NO: 476147 - RNA, 32 nt, Human
gugaaguuaacauugccaggacgauucuucua

SEQ ID NO: 476148 - RNA, 32 nt, Human
gugaaguucacugucaaccucuuauaguccau

SEQ ID NO: 476149 - RNA, 32 nt, Human
gugaaguuccaaucuaaugacaccugcuguga

SEQ ID NO: 476150 - RNA, 32 nt, Human
gugaaguuccucacacccugcuaccacccuaa

SEQ ID NO: 476151 - RNA, 32 nt, Human
gugaaguuguauguauguuugccugaggcugc

SEQ ID NO: 476152 - RNA, 32 nt, Human
gugaaguuguguauuuaaugcauuauagcaug

SEQ ID NO: 476153 - RNA, 32 nt, Human
gugaaguuugaaaacuuuucaaacuuuucuag

SEQ ID NO: 476154 - RNA, 32 nt, Human
gugaaguuuuuaauugguguucauccuauuuu

SEQ ID NO: 476155 - RNA, 32 nt, Human
gugaauaaaacauaaaugcacaaccuaacaca

SEQ ID NO: 476156 - RNA, 32 nt, Human
gugaauaaaucucauaucaaaugucaaacuuu

SEQ ID NO: 476157 - RNA, 32 nt, Human
gugaauaacugcacuccagccugggcaacaua

SEQ ID NO: 476158 - RNA, 32 nt, Human
gugaauaagccagugaccagauuucccccaga

SEQ ID NO: 476159 - RNA, 32 nt, Human
gugaauacauucuuugcuaguuggagugcuug

SEQ ID NO: 476160 - RNA, 32 nt, Human
gugaauacccagagguugggcagaucaguguc

SEQ ID NO: 476161 - RNA, 32 nt, Human
gugaauacucuccaccaagcccuugacccauu

SEQ ID NO: 476162 - RNA, 32 nt, Human
gugaauacugcaacacugucucaaagguuucu

SEQ ID NO: 476163 - RNA, 32 nt, Human
gugaauagccacugcacuccagccugggcaac

SEQ ID NO: 476164 - RNA, 32 nt, Human
gugaauagccacugcacuccaucuugggcaac

SEQ ID NO: 476165 - RNA, 32 nt, Human
gugaauagccacugcacucuagucuggggaac

SEQ ID NO: 476166 - RNA, 32 nt, Human
gugaauagccacugcacuucagccugggcaac

SEQ ID NO: 476167 - RNA, 32 nt, Human
gugaauagccacugcacuugagccucuuggga

SEQ ID NO: 476168 - RNA, 32 nt, Human
gugaauagugccacaauaaacauacacgugca

SEQ ID NO: 476169 - RNA, 32 nt, Human
gugaauaugccuguaauucaguguauuucagu

SEQ ID NO: 476170 - RNA, 32 nt, Human
gugaauauggggaccaggaaaaaugaggaugg

SEQ ID NO: 476171 - RNA, 32 nt, Human
gugaauauuaagguaguuauucacaaaaauug

SEQ ID NO: 476172 - RNA, 32 nt, Human
gugaauauugaaugguagcuugagucauucgu

SEQ ID NO: 476173 - RNA, 32 nt, Human
gugaaucaaagaaugagugggcaaguguugau

SEQ ID NO: 476174 - RNA, 22 nt, Human
gugaaucacaccuguaauccca

SEQ ID NO: 476175 - RNA, 32 nt, Human
gugaaucacugcaucugacuauggcaaggauc

SEQ ID NO: 476176 - RNA, 32 nt, Human
gugaaucagaccccauuccugccuucggggag

SEQ ID NO: 476177 - RNA, 32 nt, Human
gugaaucauugccuuuuucuuuaaaaagaugg

SEQ ID NO: 476178 - RNA, 32 nt, Human
gugaauccagugguggagguugcagugagcca

SEQ ID NO: 476179 - RNA, 32 nt, Human
gugaaucccacugugguauagauuccauaaua

SEQ ID NO: 476180 - RNA, 21 nt, Human
gugaaucccagacgaggcauu

SEQ ID NO: 476181 - RNA, 32 nt, Human
gugaaucccagaggagucucucccugugccca

SEQ ID NO: 476182 - RNA, 32 nt, Human
gugaauccuggcaagaaagcuugagucucaag

SEQ ID NO: 476183 - RNA, 23 nt, Human
gugaauccuggggcagggcacuu

SEQ ID NO: 476184 - RNA, 32 nt, Human
gugaauccugugagcuaauacagucuauacuu

SEQ ID NO: 476185 - RNA, 32 nt, Human
gugaauccuuguguuccauaugacuuuggaaa

SEQ ID NO: 476186 - RNA, 32 nt, Human
gugaaucgcuugaacccaggaggcagaguuug

SEQ ID NO: 476187 - RNA, 32 nt, Human
gugaaucuccaccugucuucuccagggagcuc

SEQ ID NO: 476188 - RNA, 21 nt, Human
gugaaucuccucacugucacu

SEQ ID NO: 476189 - RNA, 22 nt, Human
gugaaucuccucaugaauacuu

SEQ ID NO: 476190 - RNA, 32 nt, Human
gugaaucuccuuccuuucucucccugcuuugc

SEQ ID NO: 476191 - RNA, 32 nt, Human
gugaaucucuggggccaggaagacccugcugc

SEQ ID NO: 476192 - RNA, 32 nt, Human
gugaaucuuggaaacucaagccccagugcaaa

SEQ ID NO: 476193 - RNA, 32 nt, Human
gugaaugacucuguaaugaggccugagucuua

SEQ ID NO: 476194 - RNA, 32 nt, Human
gugaaugagaaaguauuugucucuccaacuug

SEQ ID NO: 476195 - RNA, 32 nt, Human
gugaaugauucugcacuuuguaaacagcacug

SEQ ID NO: 476196 - RNA, 32 nt, Human
gugaaugcacacaugcagaaaugcagagucaa

SEQ ID NO: 476197 - RNA, 32 nt, Human
gugaaugcagaagggaaugcaccccacauucc

SEQ ID NO: 476198 - RNA, 32 nt, Human
gugaaugcauuuuccccucuccuccucccugc

SEQ ID NO: 476199 - RNA, 20 nt, Human
gugaaugccaucuucuuccu

SEQ ID NO: 476200 - RNA, 32 nt, Human
gugaaugcuggccugugaugaauggcuggccu

SEQ ID NO: 476201 - RNA, 32 nt, Human
gugaauggauacagagcugaaugaguagguuc

SEQ ID NO: 476202 - RNA, 32 nt, Human
gugaauggauuaauggaacagaaaggaggugu

SEQ ID NO: 476203 - RNA, 32 nt, Human
gugaauggcaaauguugggauuugaacccagg

SEQ ID NO: 476204 - RNA, 32 nt, Human
gugaauggcauguucagcaggugcagaaaggg

SEQ ID NO: 476205 - RNA, 32 nt, Human
gugaauggccaggaucagauugugcccggccu

SEQ ID NO: 476206 - RNA, 32 nt, Human
gugaauggcuggaggugcagggccaggaggag

SEQ ID NO: 476207 - RNA, 32 nt, Human
gugaauggcuuuguauagaaccucuuugucua

SEQ ID NO: 476208 - RNA, 32 nt, Human
gugaaugggacggauucgaagugagcaaaggg

SEQ ID NO: 476209 - RNA, 32 nt, Human
gugaaugggagguggaggaggguugcagcucc

SEQ ID NO: 476210 - RNA, 32 nt, Human
gugaaugggauggaagccagagggucucuacc

SEQ ID NO: 476211 - RNA, 32 nt, Human
gugaaugggccacgugcccccacgcuggauac

SEQ ID NO: 476212 - RNA, 32 nt, Human
gugaaugggccuguggcccacccggggucacc

SEQ ID NO: 476213 - RNA, 32 nt, Human
gugaaugggccuguggcccaccuggggucacu

SEQ ID NO: 476214 - RNA, 32 nt, Human
gugaaugggcuucaaguggucacaaagagggu

SEQ ID NO: 476215 - RNA, 32 nt, Human
gugaaugguggugaccaggugggcagggcagg

SEQ ID NO: 476216 - RNA, 32 nt, Human
gugaauguacugggccuucuaaagcggcgcuu

SEQ ID NO: 476217 - RNA, 32 nt, Human
gugaaugucaagaguuagcuccuauagcaguu

SEQ ID NO: 476218 - RNA, 23 nt, Human
gugaaugugucuugcggcagcug

SEQ ID NO: 476219 - RNA, 32 nt, Human
gugaaugugugaaggucuugccugaauccauc

SEQ ID NO: 476220 - RNA, 32 nt, Human
gugaaugugugugaugucuucuaauuaauuuu

SEQ ID NO: 476221 - RNA, 32 nt, Human
gugaauuagcaaaccucagccuauguguuucu

SEQ ID NO: 476222 - RNA, 32 nt, Human
gugaauuauaccuuugugcaugccuaggaugu

SEQ ID NO: 476223 - RNA, 32 nt, Human
gugaauucaagaccagccuggccaacauggug

SEQ ID NO: 476224 - RNA, 32 nt, Human
gugaauucaucagcucugcaggcacagaccuu

SEQ ID NO: 476225 - RNA, 32 nt, Human
gugaauuccucuucaaagauuuuagccuguaa

SEQ ID NO: 476226 - RNA, 32 nt, Human
gugaauucucacucuuuguuucugcaaggucu

SEQ ID NO: 476227 - RNA, 32 nt, Human
gugaauucuuuagggcacuuuuguggccggau

SEQ ID NO: 476228 - RNA, 32 nt, Human
gugaauugaaguuucaaguuuuaaaguucauu

SEQ ID NO: 476229 - RNA, 32 nt, Human
gugaauugagugugagacuuaauaggaagacc

SEQ ID NO: 476230 - RNA, 32 nt, Human
gugaauugauccaucccaucucuucauuuuga

SEQ ID NO: 476231 - RNA, 32 nt, Human
gugaauugccacugcacuccagccuaagcaaa

SEQ ID NO: 476232 - RNA, 23 nt, Human
gugaauuguuagaugugcacuga

SEQ ID NO: 476233 - RNA, 32 nt, Human
gugaauuucaaaaauagacacuucuuaauugu

SEQ ID NO: 476234 - RNA, 32 nt, Human
gugaauuuccuuuaacaccgccugaaacaugc

SEQ ID NO: 476235 - RNA, 32 nt, Human
gugaauuucuacugcugaggaggcuugagcuu

SEQ ID NO: 476236 - RNA, 32 nt, Human
gugaauuucugucucaaaauguauaauauaga

SEQ ID NO: 476237 - RNA, 32 nt, Human
gugaauuuuugaaagaugaguaauuucuuugg

SEQ ID NO: 476238 - RNA, 21 nt, Human
gugacaaaagucuuuucuggg

SEQ ID NO: 476239 - RNA, 31 nt, Human
gugacaaacagcuagagcaucagagcccuuu

SEQ ID NO: 476240 - RNA, 32 nt, Human
gugacaaagaagcugaagaugggugguggaga

SEQ ID NO: 476241 - RNA, 32 nt, Human
gugacaaagucaaauaaacccccaaggacgac

SEQ ID NO: 476242 - RNA, 32 nt, Human
gugacaaauuuuuacuggugugaauugggaag

SEQ ID NO: 476243 - RNA, 32 nt, Human
gugacaacacucaucacacuucauuguaaauc

SEQ ID NO: 476244 - RNA, 32 nt, Human
gugacaacagugugugguguguuauuacagcu

SEQ ID NO: 476245 - RNA, 32 nt, Human
gugacaacccccagaaaugugaaaggagguuu

SEQ ID NO: 476246 - RNA, 32 nt, Human
gugacaaccuaugggaaaaggaaaggucgaga

SEQ ID NO: 476247 - RNA, 32 nt, Human
gugacaacugucuggauugccugcugcaaacg

SEQ ID NO: 476248 - RNA, 21 nt, Human
gugacaacugugagcauucca

SEQ ID NO: 476249 - RNA, 32 nt, Human
gugacaagaggaaggaaugggcccgugggaug

SEQ ID NO: 476250 - RNA, 32 nt, Human
gugacaagccuggguuucucccaggauaggug

SEQ ID NO: 476251 - RNA, 32 nt, Human
gugacaaggaagcagagaaagacgggaagagg

SEQ ID NO: 476252 - RNA, 23 nt, Human
gugacaaggcagaauucuuuaaa

SEQ ID NO: 476253 - RNA, 17 nt, Human
gugacaaggguccuggg

SEQ ID NO: 476254 - RNA, 32 nt, Human
gugacaagguaggggcuagguacuggacuacc

SEQ ID NO: 476255 - RNA, 21 nt, Human
gugacaagugaggcccuaccu

SEQ ID NO: 476256 - RNA, 32 nt, Human
gugacaagugccaguguuagugccaguuccag

SEQ ID NO: 476257 - RNA, 22 nt, Human
gugacaagugccuguaaucuca

SEQ ID NO: 476258 - RNA, 32 nt, Human
gugacaaguuaucuuggcugcugagaaagagu

SEQ ID NO: 476259 - RNA, 32 nt, Human
gugacaaugaccacugcagccuccaccuccua

SEQ ID NO: 476260 - RNA, 32 nt, Human
gugacaaugcaaaggaaagcaucuaacaguaa

SEQ ID NO: 476261 - RNA, 32 nt, Human
gugacaauuuccucuucuguuugacuauugua

SEQ ID NO: 476262 - RNA, 32 nt, Human
gugacacaaaccuauacuucauaugcugcuuu

SEQ ID NO: 476263 - RNA, 22 nt, Human
gugacacacaccuguaaucuca

SEQ ID NO: 476264 - RNA, 32 nt, Human
gugacacaccugcaggugucaggcauggcacu

SEQ ID NO: 476265 - RNA, 22 nt, Human
gugacacacgccuguaauccca

SEQ ID NO: 476266 - RNA, 32 nt, Human
gugacacagaaacacagcuccuccggauggug

SEQ ID NO: 476267 - RNA, 32 nt, Human
gugacacagaaaggaagaaacuagcgguguuc

SEQ ID NO: 476268 - RNA, 32 nt, Human
gugacacagacacacguuuggacugucuugua

SEQ ID NO: 476269 - RNA, 19 nt, Human
gugacacagcccugucauc

SEQ ID NO: 476270 - RNA, 32 nt, Human
gugacacaggacagccauaguauaguguguca

SEQ ID NO: 476271 - RNA, 32 nt, Human
gugacacagggugguuuggagcuggucacugu

SEQ ID NO: 476272 - RNA, 32 nt, Human
gugacacaugagacucacaguuggaguucucc

SEQ ID NO: 476273 - RNA, 22 nt, Human
gugacacaugccuguaguccca

SEQ ID NO: 476274 - RNA, 32 nt, Human
gugacacaugcucugcccucugaggcagucag

SEQ ID NO: 476275 - RNA, 32 nt, Human
gugacaccaccacugugucccagugucuggcc

SEQ ID NO: 476276 - RNA, 32 nt, Human
gugacacccugagaaucccaugacauuaucau

SEQ ID NO: 476277 - RNA, 32 nt, Human
gugacaccuucaccaauaacauagucauguau

SEQ ID NO: 476278 - RNA, 32 nt, Human
gugacaccuugaucuuggacugacacucauga

SEQ ID NO: 476279 - RNA, 32 nt, Human
gugacacgcaugcacacauggaguuccacaug

SEQ ID NO: 476280 - RNA, 32 nt, Human
gugacacgugucugacagagacgggagcucug

SEQ ID NO: 476281 - RNA, 32 nt, Human
gugacacuacagaaaaacacaaaaaggugaug

SEQ ID NO: 476282 - RNA, 32 nt, Human
gugacacucaggcuggaguggugguaagggac

SEQ ID NO: 476283 - RNA, 32 nt, Human
gugacacucaugcacagcagccauugcacgug

SEQ ID NO: 476284 - RNA, 32 nt, Human
gugacacucuccugccuggaaagaggacgaac

SEQ ID NO: 476285 - RNA, 32 nt, Human
gugacacugcacuccagccugggcaacagagc

SEQ ID NO: 476286 - RNA, 32 nt, Human
gugacacugcacuccagccugggcaacagagu

SEQ ID NO: 476287 - RNA, 32 nt, Human
gugacacugcacuccagccugggcgacagagu

SEQ ID NO: 476288 - RNA, 32 nt, Human
gugacacugcacuucagccuggcugacagagc

SEQ ID NO: 476289 - RNA, 32 nt, Human
gugacacugcccuccagccugggugacagagu

SEQ ID NO: 476290 - RNA, 32 nt, Human
gugacagaaaaccuguuaugcugcuuuguagu

SEQ ID NO: 476291 - RNA, 22 nt, Human
gugacagaaugagaccuugucu

SEQ ID NO: 476292 - RNA, 22 nt, Human
gugacagaaugagacuccaucu

SEQ ID NO: 476293 - RNA, 18 nt, Human
gugacagacacaugggua

SEQ ID NO: 476294 - RNA, 32 nt, Human
gugacagacccccauucggagcgcucucugca

SEQ ID NO: 476295 - RNA, 32 nt, Human
gugacagagaaacugagagagccacugguggu

SEQ ID NO: 476296 - RNA, 32 nt, Human
gugacagagaggaaggaggaggaaugagaggg

SEQ ID NO: 476297 - RNA, 32 nt, Human
gugacagagagggauauuggaggcuuuuuccc

SEQ ID NO: 476298 - RNA, 32 nt, Human
gugacagagauggguggaggggcuggggaaag

SEQ ID NO: 476299 - RNA, 22 nt, Human
gugacagagcaagacccugucu

SEQ ID NO: 476300 - RNA, 22 nt, Human
gugacagagcagacuccugucu

SEQ ID NO: 476301 - RNA, 32 nt, Human
gugacagagccucauggcuggggcaggcgggg

SEQ ID NO: 476302 - RNA, 24 nt, Human
gugacagagcgagaccaugucuca

SEQ ID NO: 476303 - RNA, 22 nt, Human
gugacagagcgagacccugucu

SEQ ID NO: 476304 - RNA, 22 nt, Human
gugacagagcgagacuccaucu

SEQ ID NO: 476305 - RNA, 22 nt, Human
gugacagagcgagacucugucu

SEQ ID NO: 476306 - RNA, 22 nt, Human
gugacagaguaagacucugucu

SEQ ID NO: 476307 - RNA, 32 nt, Human
gugacagaguaugguguuccuguagggaaaca

SEQ ID NO: 476308 - RNA, 22 nt, Human
gugacagagugagacccugucu

SEQ ID NO: 476309 - RNA, 22 nt, Human
gugacagagugagacuccaucu

SEQ ID NO: 476310 - RNA, 32 nt, Human
gugacagaguggggaaagauggggacugaggg

SEQ ID NO: 476311 - RNA, 19 nt, Human
gugacagaguugcuucuau

SEQ ID NO: 476312 - RNA, 32 nt, Human
gugacagaucacugcagccuccaacuccuggg

SEQ ID NO: 476313 - RNA, 27 nt, Human
gugacagcaagagaucuugucucagaa

SEQ ID NO: 476314 - RNA, 21 nt, Human
gugacagcacgcuccuuugaa

SEQ ID NO: 476315 - RNA, 32 nt, Human
gugacagcacuugcauggucacuugagcccac

SEQ ID NO: 476316 - RNA, 32 nt, Human
gugacagcagccgcccauccuaccuggaugga

SEQ ID NO: 476317 - RNA, 32 nt, Human
gugacagcauuuuuccccucugugcuggauac

SEQ ID NO: 476318 - RNA, 32 nt, Human
gugacagccuccagaaugucauggaagcagaa

SEQ ID NO: 476319 - RNA, 32 nt, Human
gugacagccuugccuguucugccuuguauguc

SEQ ID NO: 476320 - RNA, 32 nt, Human
gugacagcuucaaagccacugacucaugacac

SEQ ID NO: 476321 - RNA, 32 nt, Human
gugacagcuuccucuuagucaaggacacugcg

SEQ ID NO: 476322 - RNA, 32 nt, Human
gugacaggaagaaaggagggaagagcugaugu

SEQ ID NO: 476323 - RNA, 32 nt, Human
gugacaggaagaggagggagagggugacgaac

SEQ ID NO: 476324 - RNA, 18 nt, Human
gugacaggaagcccaagg

SEQ ID NO: 476325 - RNA, 32 nt, Human
gugacaggaaggccacguuccaaugucacagu

SEQ ID NO: 476326 - RNA, 32 nt, Human
gugacaggaauggggaaaaagagggauuucgc

SEQ ID NO: 476327 - RNA, 32 nt, Human
gugacaggaggcagcagaaguugcagagaaga

SEQ ID NO: 476328 - RNA, 18 nt, Human
gugacaggaucauacgua

SEQ ID NO: 476329 - RNA, 22 nt, Human
gugacaggcaccuauaauccca

SEQ ID NO: 476330 - RNA, 21 nt, Human
gugacaggcaggugcccugug

SEQ ID NO: 476331 - RNA, 16 nt, Human
gugacaggcaucaggu

SEQ ID NO: 476332 - RNA, 32 nt, Human
gugacaggccaaucagacagggcccagagcau

SEQ ID NO: 476333 - RNA, 32 nt, Human
gugacaggcccaggacgagguggccaggcggc

SEQ ID NO: 476334 - RNA, 17 nt, Human
gugacaggcccagggug

SEQ ID NO: 476335 - RNA, 32 nt, Human
gugacaggcccaguggaacagucacccuucug

SEQ ID NO: 476336 - RNA, 32 nt, Human
gugacaggccuggcuucaucaccccgcccacc

SEQ ID NO: 476337 - RNA, 15 nt, Human
gugacaggccuuagg

SEQ ID NO: 476338 - RNA, 19 nt, Human
gugacaggcgaauccuggg

SEQ ID NO: 476339 - RNA, 19 nt, Human
gugacaggcgcugccccug

SEQ ID NO: 476340 - RNA, 32 nt, Human
gugacaggcucuagguuugagcuagacuauuu

SEQ ID NO: 476341 - RNA, 15 nt, Human
gugacaggcuucagg

SEQ ID NO: 476342 - RNA, 19 nt, Human
gugacaggcuuugcggggu

SEQ ID NO: 476343 - RNA, 19 nt, Human
gugacaggcuuuuaaggua

SEQ ID NO: 476344 - RNA, 32 nt, Human
gugacaggggauccuggagcugugcuguggcu

SEQ ID NO: 476345 - RNA, 32 nt, Human
gugacagggucugcggcaccgcgccuggccag

SEQ ID NO: 476346 - RNA, 19 nt, Human
gugacaggguggauaggua

SEQ ID NO: 476347 - RNA, 32 nt, Human
gugacagguaacggggcccagccccggugucc

SEQ ID NO: 476348 - RNA, 32 nt, Human
gugacaggugauuuuauaugucagcuugacua

SEQ ID NO: 476349 - RNA, 22 nt, Human
gugacaggugccuguaauccca

SEQ ID NO: 476350 - RNA, 32 nt, Human
gugacaggugggaggauggcucugggugugug

SEQ ID NO: 476351 - RNA, 32 nt, Human
gugacaguaaagggcaggaagggaauacaaag

SEQ ID NO: 476352 - RNA, 32 nt, Human
gugacaguaggugagggcagaggaggagauca

SEQ ID NO: 476353 - RNA, 32 nt, Human
gugacaguccggaagcaauggaggcuucagug

SEQ ID NO: 476354 - RNA, 32 nt, Human
gugacagugaugacuaugcuggaucuuucgaa

SEQ ID NO: 476355 - RNA, 32 nt, Human
gugacagugcaucgaugcucccccgcguggcc

SEQ ID NO: 476356 - RNA, 32 nt, Human
gugacaguggcaggacggaugggcggguuuga

SEQ ID NO: 476357 - RNA, 32 nt, Human
gugacaguuaccggcuggagagccggaggugg

SEQ ID NO: 476358 - RNA, 32 nt, Human
gugacaguucacugcauauuuugagaccuuau

SEQ ID NO: 476359 - RNA, 32 nt, Human
gugacauaagcccucugggugguuaaccaggg

SEQ ID NO: 476360 - RNA, 32 nt, Human
gugacauagaccugcauauuugucagugccau

SEQ ID NO: 476361 - RNA, 32 nt, Human
gugacauaugaagaacaaagcaaucuaaacug

SEQ ID NO: 476362 - RNA, 32 nt, Human
gugacauauguaaucccagcacuuugggaggc

SEQ ID NO: 476363 - RNA, 20 nt, Human
gugacaucacccccagaucc

SEQ ID NO: 476364 - RNA, 32 nt, Human
gugacaucaucaucauggcaacaagagcugca

SEQ ID NO: 476365 - RNA, 21 nt, Human
gugacaucaugcaggaauucc

SEQ ID NO: 476366 - RNA, 32 nt, Human
gugacaucauggggcugaaagacuggacagaa

SEQ ID NO: 476367 - RNA, 19 nt, Human
gugacaucauuagcaagcc

SEQ ID NO: 476368 - RNA, 32 nt, Human
gugacauccucucccuccuuuccuuucucccu

SEQ ID NO: 476369 - RNA, 32 nt, Human
gugacauccuucagucccucacaucucugaca

SEQ ID NO: 476370 - RNA, 32 nt, Human
gugacauccuuccccuuccacccugcucccug

SEQ ID NO: 476371 - RNA, 20 nt, Human
gugacaucgucuuuaaaccc

SEQ ID NO: 476372 - RNA, 32 nt, Human
gugacaucuaccuagaaaucccuucccucuaa

SEQ ID NO: 476373 - RNA, 32 nt, Human
gugacaucugcauuuaauuuccagaaauuaaa

SEQ ID NO: 476374 - RNA, 21 nt, Human
gugacaucuuuucuucaagcc

SEQ ID NO: 476375 - RNA, 32 nt, Human
gugacaugaaugcacacaucacaaugaaauuu

SEQ ID NO: 476376 - RNA, 22 nt, Human
gugacaugcaccuguaauccca

SEQ ID NO: 476377 - RNA, 32 nt, Human
gugacaugcuuugccagcaccccuccccauca

SEQ ID NO: 476378 - RNA, 31 nt, Human
gugacauggacaaucuugggccuccauggag

SEQ ID NO: 476379 - RNA, 32 nt, Human
gugacauggggaaggcagaggcuggcaccaug

SEQ ID NO: 476380 - RNA, 32 nt, Human
gugacauggggaaggcagaggcuggcacgaug

SEQ ID NO: 476381 - RNA, 22 nt, Human
gugacaugugccuguaauccca

SEQ ID NO: 476382 - RNA, 32 nt, Human
gugacauuaggcagaaauggccagucaaacac

SEQ ID NO: 476383 - RNA, 32 nt, Human
gugacauucaguguuagaggugggccuaguag

SEQ ID NO: 476384 - RNA, 32 nt, Human
gugacauuccaggggucguuugcuuuucaggg

SEQ ID NO: 476385 - RNA, 32 nt, Human
gugacauuccucaaugaccucucccaaaccuc

SEQ ID NO: 476386 - RNA, 32 nt, Human
gugacauuccuucucccaucucuuccuugaca

SEQ ID NO: 476387 - RNA, 32 nt, Human
gugacauucucaaacuaaauguaaagugguug

SEQ ID NO: 476388 - RNA, 19 nt, Human
gugacauucucucucagca

SEQ ID NO: 476389 - RNA, 32 nt, Human
gugacauucugcagcuaguccacuacuccaag

SEQ ID NO: 476390 - RNA, 32 nt, Human
gugacauugcacaaucugccucugaagcugga

SEQ ID NO: 476391 - RNA, 32 nt, Human
gugacauuugcagagauauacacacacuuuuu

SEQ ID NO: 476392 - RNA, 32 nt, Human
gugaccaaaaccuugcuuggauuuuuaccuga

SEQ ID NO: 476393 - RNA, 32 nt, Human
gugaccaaagauggccagcuagagauucagca

SEQ ID NO: 476394 - RNA, 32 nt, Human
gugaccaaaucaacagcucuuuccaagaaaaa

SEQ ID NO: 476395 - RNA, 32 nt, Human
gugaccaacauagugaaaccccaucucuacug

SEQ ID NO: 476396 - RNA, 24 nt, Human
gugaccaaccaggcuccugugaua

SEQ ID NO: 476397 - RNA, 32 nt, Human
gugaccaagagaaaggcacugagcccuccgag

SEQ ID NO: 476398 - RNA, 32 nt, Human
gugaccacagagagcuauagcuaccagcuacc

SEQ ID NO: 476399 - RNA, 32 nt, Human
gugaccacaggcugguguguaggugguaaaac

SEQ ID NO: 476400 - RNA, 32 nt, Human
gugaccaccacacuccaggaggcagccccauc

SEQ ID NO: 476401 - RNA, 32 nt, Human
gugaccaccauggacugcccuuccccucugag

SEQ ID NO: 476402 - RNA, 32 nt, Human
gugaccaccccuccaauaucccagaaugaaua

SEQ ID NO: 476403 - RNA, 32 nt, Human
gugaccacgaagcagcugacugugcaucacgc

SEQ ID NO: 476404 - RNA, 32 nt, Human
gugaccacgccuuuugcuggggccugcuggag

SEQ ID NO: 476405 - RNA, 32 nt, Human
gugaccacuccugggagcggggguggucgggg

SEQ ID NO: 476406 - RNA, 24 nt, Human
gugaccagacagaaccuccacuca

SEQ ID NO: 476407 - RNA, 32 nt, Human
gugaccagagcugggaugagagaggggaaggg

SEQ ID NO: 476408 - RNA, 32 nt, Human
gugaccagagcuugccucugaaugccccuugu

SEQ ID NO: 476409 - RNA, 32 nt, Human
gugaccagagggcaaaggacccauucucagua

SEQ ID NO: 476410 - RNA, 32 nt, Human
gugaccagcacugucucaguuucacuuucaca

SEQ ID NO: 476411 - RNA, 32 nt, Human
gugaccagccauggucuggacugugaguuuac

SEQ ID NO: 476412 - RNA, 25 nt, Human
gugaccagcuaugcuucuugugaua

SEQ ID NO: 476413 - RNA, 24 nt, Human
gugaccagcuccugccaccacuca

SEQ ID NO: 476414 - RNA, 32 nt, Human
gugaccagcugaggaccucaggcugcagcgga

SEQ ID NO: 476415 - RNA, 32 nt, Human
gugaccagcuggcagacucgggaccaauacua

SEQ ID NO: 476416 - RNA, 32 nt, Human
gugaccaggagaacaaggagcuccuccagcaa

SEQ ID NO: 476417 - RNA, 32 nt, Human
gugaccaggccucacuacaggccugguuggau

SEQ ID NO: 476418 - RNA, 32 nt, Human
gugaccagggaccacguugcugccugugaaug

SEQ ID NO: 476419 - RNA, 32 nt, Human
gugaccagggaggccagccugggagguccaga

SEQ ID NO: 476420 - RNA, 32 nt, Human
gugaccaggggcaccggcugcccacagggaac

SEQ ID NO: 476421 - RNA, 21 nt, Human
gugaccagggugccccaucca

SEQ ID NO: 476422 - RNA, 32 nt, Human
gugaccagucccggaagagagcuggggaugag

SEQ ID NO: 476423 - RNA, 32 nt, Human
gugaccaguucuuuaauucuguaagugaacuc

SEQ ID NO: 476424 - RNA, 32 nt, Human
gugaccauacacaaccaucacagcggagguga

SEQ ID NO: 476425 - RNA, 32 nt, Human
gugaccauagaggcagagauuggagugaagug

SEQ ID NO: 476426 - RNA, 32 nt, Human
gugaccaucuagggcaguaccugcugggcuua

SEQ ID NO: 476427 - RNA, 32 nt, Human
gugaccauggccagcaggaagccacugaugag

SEQ ID NO: 476428 - RNA, 32 nt, Human
gugaccaugguguuguucuugaugacauugcu

SEQ ID NO: 476429 - RNA, 32 nt, Human
gugaccauguucauuauaaucucaaaggagaa

SEQ ID NO: 476430 - RNA, 32 nt, Human
gugaccauuuggaugucugggcccugccaagg

SEQ ID NO: 476431 - RNA, 32 nt, Human
gugacccaauccccuuccuccuggccuggacg

SEQ ID NO: 476432 - RNA, 22 nt, Human
gugacccacaccuguaauccca

SEQ ID NO: 476433 - RNA, 32 nt, Human
gugacccagacuugagaggucguuugggcuuu

SEQ ID NO: 476434 - RNA, 32 nt, Human
gugacccagcagaggugugacgggaggcuggg

SEQ ID NO: 476435 - RNA, 32 nt, Human
gugacccagccaugggcacuagcucaucuuuc

SEQ ID NO: 476436 - RNA, 32 nt, Human
gugacccagcccaggacgaaguuuacaaacac

SEQ ID NO: 476437 - RNA, 22 nt, Human
gugacccaggcuggaaugcaau

SEQ ID NO: 476438 - RNA, 23 nt, Human
gugacccaggcuggaaugcaaug

SEQ ID NO: 476439 - RNA, 22 nt, Human
gugacccaggcuggaguguagu

SEQ ID NO: 476440 - RNA, 32 nt, Human
gugacccaggguggggacaggggcuggcccag

SEQ ID NO: 476441 - RNA, 32 nt, Human
gugacccaucuauuuuuguuugggaagaggaa

SEQ ID NO: 476442 - RNA, 32 nt, Human
gugacccaugacccacagugcuggccuccugu

SEQ ID NO: 476443 - RNA, 32 nt, Human
gugacccaugcgcuagggucucugcugaggaa

SEQ ID NO: 476444 - RNA, 32 nt, Human
gugacccauugccucuguuggaagacagaggu

SEQ ID NO: 476445 - RNA, 32 nt, Human
gugaccccaaccuaugcucucggucuuuccug

SEQ ID NO: 476446 - RNA, 32 nt, Human
gugaccccaggccccaggaaagggagcgagga

SEQ ID NO: 476447 - RNA, 32 nt, Human
gugaccccagugcuuuucagacguuucuuagc

SEQ ID NO: 476448 - RNA, 32 nt, Human
gugaccccauccccauccccaggauucccacc

SEQ ID NO: 476449 - RNA, 32 nt, Human
gugacccccagagggauaccgauucaaaagau

SEQ ID NO: 476450 - RNA, 32 nt, Human
gugacccccagcuaucgccucuugccuucccc

SEQ ID NO: 476451 - RNA, 32 nt, Human
gugacccccaggaggaggauuccuggggcugg

SEQ ID NO: 476452 - RNA, 32 nt, Human
gugacccccuagugcuuccuggagcugaggcu

SEQ ID NO: 476453 - RNA, 32 nt, Human
gugaccccgggggcacacaggcuccacacugc

SEQ ID NO: 476454 - RNA, 32 nt, Human
gugacccgggcccugaccuucucccucuuccc

SEQ ID NO: 476455 - RNA, 32 nt, Human
gugacccuccaggauaaggucugugcgugaga

SEQ ID NO: 476456 - RNA, 32 nt, Human
gugacccugcagcuccucaaaccagccuguau

SEQ ID NO: 476457 - RNA, 32 nt, Human
gugacccugccuggccucccacacccccugca

SEQ ID NO: 476458 - RNA, 32 nt, Human
gugacccuggcuggcccuguuugucugugggu

SEQ ID NO: 476459 - RNA, 32 nt, Human
gugacccugggugugaggagacguggucugug

SEQ ID NO: 476460 - RNA, 32 nt, Human
gugacccuggucacuuggugcugguguagggg

SEQ ID NO: 476461 - RNA, 32 nt, Human
gugacccugguuucugagcuccagaaacucug

SEQ ID NO: 476462 - RNA, 21 nt, Human
gugacccugucagugcuuuca

SEQ ID NO: 476463 - RNA, 32 nt, Human
gugacccuucaaggaguucagaccugggggcu

SEQ ID NO: 476464 - RNA, 32 nt, Human
gugacccuuccuguaaccauaacugaaagauu

SEQ ID NO: 476465 - RNA, 32 nt, Human
gugaccgaaugagagacucuacaggggcaggu

SEQ ID NO: 476466 - RNA, 32 nt, Human
gugaccgaauugcuguaaccucaggaucaaac

SEQ ID NO: 476467 - RNA, 24 nt, Human
gugaccgacucaugcuucuggaua

SEQ ID NO: 476468 - RNA, 32 nt, Human
gugaccgagacuaagucuagcacacagcacuu

SEQ ID NO: 476469 - RNA, 32 nt, Human
gugaccgagcccagcggagccugagcaaggag

SEQ ID NO: 476470 - RNA, 24 nt, Human
gugaccgaucaugcugcugugaua

SEQ ID NO: 476471 - RNA, 32 nt, Human
gugaccgcaagcgauucacccaccucagccuc

SEQ ID NO: 476472 - RNA, 20 nt, Human
gugaccgcgccuguaauccc

SEQ ID NO: 476473 - RNA, 32 nt, Human
gugaccgcgcuccagacacagcucugcguccu

SEQ ID NO: 476474 - RNA, 32 nt, Human
gugaccggagagaaagaggagcccucccgcuc

SEQ ID NO: 476475 - RNA, 32 nt, Human
gugaccggaggagacaucggccucugcaggcu

SEQ ID NO: 476476 - RNA, 32 nt, Human
gugaccggcucuggaaguucccaugaauggac

SEQ ID NO: 476477 - RNA, 18 nt, Human
gugaccggcugugcggga

SEQ ID NO: 476478 - RNA, 32 nt, Human
gugaccgggaagggaagucagggucuggggcc

SEQ ID NO: 476479 - RNA, 32 nt, Human
gugaccggugccuguucuccccugaccgagcc

SEQ ID NO: 476480 - RNA, 32 nt, Human
gugaccgucccucucagaagcuuuucccugga

SEQ ID NO: 476481 - RNA, 32 nt, Human
gugaccgucucccuuuguacauacuugcacac

SEQ ID NO: 476482 - RNA, 32 nt, Human
gugaccgucuguccuucaggagaggacaccag

SEQ ID NO: 476483 - RNA, 32 nt, Human
gugaccguuggcccuccugccugguggcgcug

SEQ ID NO: 476484 - RNA, 32 nt, Human
gugaccuaccgcugcccucccuuucuaagaga

SEQ ID NO: 476485 - RNA, 30 nt, Human
gugaccuacuaaaaauauaaaaauuagcug

SEQ ID NO: 476486 - RNA, 32 nt, Human
gugaccuacuaaaaauauaaaaauuagcuggg

SEQ ID NO: 476487 - RNA, 32 nt, Human
gugaccuaggacaaguaccucacuucucugag

SEQ ID NO: 476488 - RNA, 32 nt, Human
gugaccuaugaccacaucacuguacgccagcc

SEQ ID NO: 476489 - RNA, 32 nt, Human
gugaccuaugccugcaauccagcacuuuggga

SEQ ID NO: 476490 - RNA, 32 nt, Human
gugaccucagccaaguugcuugacuauucuca

SEQ ID NO: 476491 - RNA, 32 nt, Human
gugaccucauacauccccugagccucacuaga

SEQ ID NO: 476492 - RNA, 32 nt, Human
gugaccuccaggcagcagucucugcuccagaa

SEQ ID NO: 476493 - RNA, 32 nt, Human
gugaccuccguccucuccccagccuggcacag

SEQ ID NO: 476494 - RNA, 32 nt, Human
gugaccucucucuccucagauuuccuucuugg

SEQ ID NO: 476495 - RNA, 24 nt, Human
gugaccucugauaaauuacugcua

SEQ ID NO: 476496 - RNA, 32 nt, Human
gugaccucugcaguacuccuuagccugcguuu

SEQ ID NO: 476497 - RNA, 32 nt, Human
gugaccucuggcucuuucacuuccuccccacc

SEQ ID NO: 476498 - RNA, 32 nt, Human
gugaccucuggguaguccuggcaugccaacau

SEQ ID NO: 476499 - RNA, 32 nt, Human
gugaccugauguaaacagugucuucuuaaaau

SEQ ID NO: 476500 - RNA, 32 nt, Human
gugaccugauguaaacagugucuucuuaaaug

SEQ ID NO: 476501 - RNA, 32 nt, Human
gugaccugccgaaguccacugccuuugcccca

SEQ ID NO: 476502 - RNA, 32 nt, Human
gugaccugcuccugggacuuugcuggcucacg

SEQ ID NO: 476503 - RNA, 32 nt, Human
gugaccuggaaaggguacuagauggaaacuug

SEQ ID NO: 476504 - RNA, 32 nt, Human
gugaccuggagagagaaagaaagaugaccccu

SEQ ID NO: 476505 - RNA, 32 nt, Human
gugaccuggaggacagugugugccaugucucc

SEQ ID NO: 476506 - RNA, 32 nt, Human
gugaccuggagggagacagggugacagcacca

SEQ ID NO: 476507 - RNA, 32 nt, Human
gugaccuggcccagaugagcucugccugcuug

SEQ ID NO: 476508 - RNA, 29 nt, Human
gugaccuggcugccuuccaccccuuguac

SEQ ID NO: 476509 - RNA, 32 nt, Human
gugaccuggcuggaguuaccuggugcacauag

SEQ ID NO: 476510 - RNA, 32 nt, Human
gugaccugggcugaguccugggagugggaaga

SEQ ID NO: 476511 - RNA, 32 nt, Human
gugaccuggguauccccugccuccugccaccc

SEQ ID NO: 476512 - RNA, 32 nt, Human
gugaccugggugaggaaggucauuuggguuuu

SEQ ID NO: 476513 - RNA, 32 nt, Human
gugaccugguccugaccaucuggggcacgagg

SEQ ID NO: 476514 - RNA, 32 nt, Human
gugaccugucacacucaccuggcuccagccuc

SEQ ID NO: 476515 - RNA, 32 nt, Human
gugaccuguccccagggcugcagcuguaucca

SEQ ID NO: 476516 - RNA, 32 nt, Human
gugaccugugguucugggcuggugagggcacc

SEQ ID NO: 476517 - RNA, 19 nt, Human
gugaccuguuuucccagca

SEQ ID NO: 476518 - RNA, 32 nt, Human
gugaccuuauugcugcucagacucuauguucc

SEQ ID NO: 476519 - RNA, 32 nt, Human
gugaccuuccucacuuucucuugucccagcuu

SEQ ID NO: 476520 - RNA, 32 nt, Human
gugaccuugagauccugauaccaccuucaagg

SEQ ID NO: 476521 - RNA, 32 nt, Human
gugaccuugccuccuucuccuugccaacuuug

SEQ ID NO: 476522 - RNA, 32 nt, Human
gugaccuuggaugcccccuccagggauccccc

SEQ ID NO: 476523 - RNA, 32 nt, Human
gugaccuuggcaugucuuggcagcagcuagau

SEQ ID NO: 476524 - RNA, 32 nt, Human
gugaccuuggcccaucuccacccuccaaccug

SEQ ID NO: 476525 - RNA, 32 nt, Human
gugaccuuggccccagcuccgcaagggaaucc

SEQ ID NO: 476526 - RNA, 18 nt, Human
gugaccuuggcucccagc

SEQ ID NO: 476527 - RNA, 32 nt, Human
gugaccuugucugccaagaucuuucuuuugaa

SEQ ID NO: 476528 - RNA, 32 nt, Human
gugacgaacugggugugaggcacacagccuaa

SEQ ID NO: 476529 - RNA, 32 nt, Human
gugacgacaacagggacaaggacuccgagaag

SEQ ID NO: 476530 - RNA, 32 nt, Human
gugacgaccccaaaugccaagacagcuacaaa

SEQ ID NO: 476531 - RNA, 32 nt, Human
gugacgagcgcuccucccuggaguucagcccu

SEQ ID NO: 476532 - RNA, 32 nt, Human
gugacgaggccuggccaggggugcaggagcag

SEQ ID NO: 476533 - RNA, 32 nt, Human
gugacgauggagcucuugaggacucugcacuu

SEQ ID NO: 476534 - RNA, 32 nt, Human
gugacgaugggaagacauggaaaacaaggaga

SEQ ID NO: 476535 - RNA, 32 nt, Human
gugacgauggguguugcuguuuuucuuguguu

SEQ ID NO: 476536 - RNA, 24 nt, Human
gugacgcacgugcccacaccccca

SEQ ID NO: 476537 - RNA, 32 nt, Human
gugacgcacugccucccuuucacuguuucgcc

SEQ ID NO: 476538 - RNA, 32 nt, Human
gugacgcccagccccggacacaguacuccaga

SEQ ID NO: 476539 - RNA, 32 nt, Human
gugacgcccgggcugcuuggucacaacucugu

SEQ ID NO: 476540 - RNA, 32 nt, Human
gugacgcccugagacccugcuuggccuagcua

SEQ ID NO: 476541 - RNA, 22 nt, Human
gugacgccugccuguaguccca

SEQ ID NO: 476542 - RNA, 25 nt, Human
gugacgcgcacacccugcaccacca

SEQ ID NO: 476543 - RNA, 32 nt, Human
gugacgcgcugacaguggaugcgaaugcguga

SEQ ID NO: 476544 - RNA, 32 nt, Human
gugacgcggcacugcgucuccagccuaccucc

SEQ ID NO: 476545 - RNA, 22 nt, Human
gugacgcguaccugugauccca

SEQ ID NO: 476546 - RNA, 32 nt, Human
gugacgcuaggacacccucugccugcauguca

SEQ ID NO: 476547 - RNA, 32 nt, Human
gugacgcuccagagaacuacccugaguggaga

SEQ ID NO: 476548 - RNA, 32 nt, Human
gugacgcugcugcaccacgugcuggaggaagc

SEQ ID NO: 476549 - RNA, 32 nt, Human
gugacgcugugcucugaucuugcuggaggcga

SEQ ID NO: 476550 - RNA, 21 nt, Human
gugacgcuugccuguauccca

SEQ ID NO: 476551 - RNA, 32 nt, Human
gugacggaguuucccucuuguugcccaggcug

SEQ ID NO: 476552 - RNA, 19 nt, Human
gugacggcacauucaaguc

SEQ ID NO: 476553 - RNA, 32 nt, Human
gugacggcacccgagcccugagggucccagcc

SEQ ID NO: 476554 - RNA, 32 nt, Human
gugacggcgacccugcagcccaaggagcgcuc

SEQ ID NO: 476555 - RNA, 32 nt, Human
gugacggcucacugcagccugcgccucccagc

SEQ ID NO: 476556 - RNA, 32 nt, Human
gugacgggagaggagguuggagguguagcgau

SEQ ID NO: 476557 - RNA, 22 nt, Human
gugacgggcaccuguaguccca

SEQ ID NO: 476558 - RNA, 32 nt, Human
gugacgggcagcuucgcagagugcaguacagc

SEQ ID NO: 476559 - RNA, 32 nt, Human
gugacgggcagcuucgcggagugcaguacagc

SEQ ID NO: 476560 - RNA, 22 nt, Human
gugacgggcgccuguaauccca

SEQ ID NO: 476561 - RNA, 32 nt, Human
gugacggggagggagacgggauaguguuucug

SEQ ID NO: 476562 - RNA, 32 nt, Human
gugacggggccagcuggacacacggugagauu

SEQ ID NO: 476563 - RNA, 32 nt, Human
gugacgggggagcacccccauccagacugcga

SEQ ID NO: 476564 - RNA, 32 nt, Human
gugacgggugcccagaacaugaucucaggaac

SEQ ID NO: 476565 - RNA, 22 nt, Human
gugacgggugccuguaauccca

SEQ ID NO: 476566 - RNA, 32 nt, Human
gugacggucuuuauucccaucuggcuucugca

SEQ ID NO: 476567 - RNA, 32 nt, Human
gugacggugaucucggggugggcaggacucca

SEQ ID NO: 476568 - RNA, 32 nt, Human
gugacggugcccaggauagauguaauauuucu

SEQ ID NO: 476569 - RNA, 32 nt, Human
gugacgucaugcccuucucaugugggcagcuu

SEQ ID NO: 476570 - RNA, 24 nt, Human
gugacguccuguuuccucugaaga

SEQ ID NO: 476571 - RNA, 32 nt, Human
gugacgugagccacggggaagccaccuagguc

SEQ ID NO: 476572 - RNA, 32 nt, Human
gugacgugcaccuguacucaggaggcugaggg

SEQ ID NO: 476573 - RNA, 32 nt, Human
gugacgugggcuccugaguuccucccacagaa

SEQ ID NO: 476574 - RNA, 32 nt, Human
gugacguggucaccaaggcagugagccccgcu

SEQ ID NO: 476575 - RNA, 32 nt, Human
gugacuaacacagugaaaccccgucucuaaua

SEQ ID NO: 476576 - RNA, 32 nt, Human
gugacuaaucuagacacuuccaugcaccuggg

SEQ ID NO: 476577 - RNA, 32 nt, Human
gugacuaaugaccacaccugccucucccgucg

SEQ ID NO: 476578 - RNA, 32 nt, Human
gugacuaccuccacucaugucccauuuuagcc

SEQ ID NO: 476579 - RNA, 32 nt, Human
gugacuacuugaccaacagaauacagcagaag

SEQ ID NO: 476580 - RNA, 32 nt, Human
gugacuagauuuccacuaaugugucuuaaucu

SEQ ID NO: 476581 - RNA, 32 nt, Human
gugacuagcuacugcacuccaaccugggcaac

SEQ ID NO: 476582 - RNA, 32 nt, Human
gugacuaggcagcagggggucaggaugcggcg

SEQ ID NO: 476583 - RNA, 32 nt, Human
gugacuagggcugggggagagguuaggaggag

SEQ ID NO: 476584 - RNA, 32 nt, Human
gugacuaugaaugacugccgggcaguaacuuc

SEQ ID NO: 476585 - RNA, 32 nt, Human
gugacuaugccuccucuucugcacagaaugcu

SEQ ID NO: 476586 - RNA, 32 nt, Human
gugacucaacaaagacaggacacaugggguac

SEQ ID NO: 476587 - RNA, 17 nt, Human
gugacucaaccaaggcc

SEQ ID NO: 476588 - RNA, 32 nt, Human
gugacucaacuccaggggcaagauggggagug

SEQ ID NO: 476589 - RNA, 32 nt, Human
gugacucaagccuguaucccagcacuuuggga

SEQ ID NO: 476590 - RNA, 32 nt, Human
gugacucaaggccugcuguuuaaucacagaua

SEQ ID NO: 476591 - RNA, 22 nt, Human
gugacucacaccuauaauccca

SEQ ID NO: 476592 - RNA, 19 nt, Human
gugacucacaccuguaauc

SEQ ID NO: 476593 - RNA, 20 nt, Human
gugacucacaccuguaaucc

SEQ ID NO: 476594 - RNA, 22 nt, Human
gugacucacaccuguaauccca

SEQ ID NO: 476595 - RNA, 22 nt, Human
gugacucacaccuguaauccua

SEQ ID NO: 476596 - RNA, 22 nt, Human
gugacucacaccuguaaucuca

SEQ ID NO: 476597 - RNA, 19 nt, Human
gugacucacacugauccca

SEQ ID NO: 476598 - RNA, 22 nt, Human
gugacucacacuuguaauccca

SEQ ID NO: 476599 - RNA, 22 nt, Human
gugacucacagccguaauccca

SEQ ID NO: 476600 - RNA, 32 nt, Human
gugacucacauaaaaucaggaacuugacacag

SEQ ID NO: 476601 - RNA, 19 nt, Human
gugacucacaucuguaauc

SEQ ID NO: 476602 - RNA, 20 nt, Human
gugacucacaucuguaaucc

SEQ ID NO: 476603 - RNA, 22 nt, Human
gugacucacaucuguaauccca

SEQ ID NO: 476604 - RNA, 22 nt, Human
gugacucacgccuauaauccca

SEQ ID NO: 476605 - RNA, 22 nt, Human
gugacucacgccuauaaucuca

SEQ ID NO: 476606 - RNA, 22 nt, Human
gugacucacgccuguaacccca

SEQ ID NO: 476607 - RNA, 19 nt, Human
gugacucacgccuguaauc

SEQ ID NO: 476608 - RNA, 22 nt, Human
gugacucacgccuguaauccca

SEQ ID NO: 476609 - RNA, 22 nt, Human
gugacucacgucuguaauccca

SEQ ID NO: 476610 - RNA, 32 nt, Human
gugacucacuuccaaagaguggaguauggaaa

SEQ ID NO: 476611 - RNA, 32 nt, Human
gugacucagaggacagggcuaggcaggagacc

SEQ ID NO: 476612 - RNA, 32 nt, Human
gugacucagaucaaagagagcaaauggcaaag

SEQ ID NO: 476613 - RNA, 32 nt, Human
gugacucaggcagaggaagggcuacacaggug

SEQ ID NO: 476614 - RNA, 22 nt, Human
gugacucaggccuguaauccca

SEQ ID NO: 476615 - RNA, 32 nt, Human
gugacucaguugaaacucaguguugcauacau

SEQ ID NO: 476616 - RNA, 22 nt, Human
gugacucauaccuguaauccca

SEQ ID NO: 476617 - RNA, 18 nt, Human
gugacucauccucuugaa

SEQ ID NO: 476618 - RNA, 32 nt, Human
gugacucauccugggaggaucugagcugguuc

SEQ ID NO: 476619 - RNA, 32 nt, Human
gugacucaucgaggagcuccagcuguugggac

SEQ ID NO: 476620 - RNA, 19 nt, Human
gugacucaugccuguaauc

SEQ ID NO: 476621 - RNA, 22 nt, Human
gugacucaugccuguaauccca

SEQ ID NO: 476622 - RNA, 22 nt, Human
gugacucaugccuguaauccua

SEQ ID NO: 476623 - RNA, 22 nt, Human
gugacucaugcuuguaauccca

SEQ ID NO: 476624 - RNA, 32 nt, Human
gugacucaugggaucaugagguccauggcugg

SEQ ID NO: 476625 - RNA, 32 nt, Human
gugacuccaggauauucaacacaggaaggagc

SEQ ID NO: 476626 - RNA, 24 nt, Human
gugacucccacaccuguaacccca

SEQ ID NO: 476627 - RNA, 32 nt, Human
gugacucccacugcacuccagcucggggaaca

SEQ ID NO: 476628 - RNA, 20 nt, Human
gugacucccagcccaagccc

SEQ ID NO: 476629 - RNA, 32 nt, Human
gugacuccccuugacagagugcccccaccccc

SEQ ID NO: 476630 - RNA, 32 nt, Human
gugacuccccuuucucuucucgucccuccucc

SEQ ID NO: 476631 - RNA, 32 nt, Human
gugacucccuuguguguaucugugccagccuc

SEQ ID NO: 476632 - RNA, 21 nt, Human
gugacuccgcagcuucugaca

SEQ ID NO: 476633 - RNA, 32 nt, Human
gugacuccugcugggagagguaaguugaagua

SEQ ID NO: 476634 - RNA, 18 nt, Human
gugacuccuguugucguc

SEQ ID NO: 476635 - RNA, 32 nt, Human
gugacuccuucaucccgcucagugccaugucc

SEQ ID NO: 476636 - RNA, 32 nt, Human
gugacuccuugaucuucuuccugcguggagag

SEQ ID NO: 476637 - RNA, 22 nt, Human
gugacucgcaccuguaauccca

SEQ ID NO: 476638 - RNA, 22 nt, Human
gugacucgggggaggaggcgac

SEQ ID NO: 476639 - RNA, 32 nt, Human
gugacucuaagcucagugcucucuccacuacc

SEQ ID NO: 476640 - RNA, 32 nt, Human
gugacucuccagagagcaacagugauggcucu

SEQ ID NO: 476641 - RNA, 32 nt, Human
gugacucucgccccgccagccccagcccugca

SEQ ID NO: 476642 - RNA, 32 nt, Human
gugacucugcagcuccuggccagcugauucag

SEQ ID NO: 476643 - RNA, 32 nt, Human
gugacucuggaccugagguugcgugagauccc

SEQ ID NO: 476644 - RNA, 31 nt, Human
gugacucugggcgcggagguuggcgacuggc

SEQ ID NO: 476645 - RNA, 32 nt, Human
gugacucugugguguggagcugacuuccagag

SEQ ID NO: 476646 - RNA, 32 nt, Human
gugacucuuagcaaccucauuucgacaguggu

SEQ ID NO: 476647 - RNA, 32 nt, Human
gugacucuuccuuagacagcuagaaagaugcu

SEQ ID NO: 476648 - RNA, 20 nt, Human
gugacucuucugcccuugag

SEQ ID NO: 476649 - RNA, 32 nt, Human
gugacucuucuguggagcuuuacccucugagu

SEQ ID NO: 476650 - RNA, 32 nt, Human
gugacugaaacggcaucugccucacagugcau

SEQ ID NO: 476651 - RNA, 32 nt, Human
gugacugaagaauuuucaaaccagcuuuacac

SEQ ID NO: 476652 - RNA, 32 nt, Human
gugacugaagugaaaaucaacgaggcccgaga

SEQ ID NO: 476653 - RNA, 32 nt, Human
gugacugacccgugacccagcaugcaaagaag

SEQ ID NO: 476654 - RNA, 32 nt, Human
gugacugagccccucuucggggccacgcagcu

SEQ ID NO: 476655 - RNA, 21 nt, Human
gugacugagccuguguccugu

SEQ ID NO: 476656 - RNA, 32 nt, Human
gugacugagcuacaagccuggcggcgggugug

SEQ ID NO: 476657 - RNA, 32 nt, Human
gugacugagcuacgagccuggcggcgggugug

SEQ ID NO: 476658 - RNA, 32 nt, Human
gugacugagcucuauucuguaccugccacucu

SEQ ID NO: 476659 - RNA, 32 nt, Human
gugacugagcuucccucccguguguucuccgu

SEQ ID NO: 476660 - RNA, 32 nt, Human
gugacugaggcccugcgagccugguggucuug

SEQ ID NO: 476661 - RNA, 32 nt, Human
gugacugagggggcagaggcaguggcucuuua

SEQ ID NO: 476662 - RNA, 32 nt, Human
gugacugaggugagcaagauaucccuuaaacu

SEQ ID NO: 476663 - RNA, 32 nt, Human
gugacugauccacgccagccucucugagccaa

SEQ ID NO: 476664 - RNA, 19 nt, Human
gugacugaugccuguaauc

SEQ ID NO: 476665 - RNA, 22 nt, Human
gugacugaugccuguaauccca

SEQ ID NO: 476666 - RNA, 32 nt, Human
gugacugcaaccacugccucccagguucaaga

SEQ ID NO: 476667 - RNA, 32 nt, Human
gugacugcacacaucugggcucuaaaugaauu

SEQ ID NO: 476668 - RNA, 32 nt, Human
gugacugcaccacugcacagucugggcgacag

SEQ ID NO: 476669 - RNA, 32 nt, Human
gugacugcaccacugcacuccacccugggcag

SEQ ID NO: 476670 - RNA, 32 nt, Human
gugacugcaccauggcacuggcaccagggcga

SEQ ID NO: 476671 - RNA, 32 nt, Human
gugacugcagagcagggauaccaaggcaggcc

SEQ ID NO: 476672 - RNA, 32 nt, Human
gugacugcagagccguccaaccccaguccugu

SEQ ID NO: 476673 - RNA, 32 nt, Human
gugacugcagccuguguaggaccauggggagu

SEQ ID NO: 476674 - RNA, 32 nt, Human
gugacugcaucuguucaaucugcuccagagac

SEQ ID NO: 476675 - RNA, 32 nt, Human
gugacugccaagcaggcaaccccugaugauuu

SEQ ID NO: 476676 - RNA, 21 nt, Human
gugacugccgaguguucugug

SEQ ID NO: 476677 - RNA, 32 nt, Human
gugacugcgccacugcacuccagucugggaca

SEQ ID NO: 476678 - RNA, 32 nt, Human
gugacugcucaggaguuugggggcuccaggac

SEQ ID NO: 476679 - RNA, 32 nt, Human
gugacugcugcaagcucugccuucaccaguag

SEQ ID NO: 476680 - RNA, 32 nt, Human
gugacugcuguugccaauaccucagacuccag

SEQ ID NO: 476681 - RNA, 21 nt, Human
gugacugcuucauugccaugg

SEQ ID NO: 476682 - RNA, 32 nt, Human
gugacuggagccacgaugcacggccaggcgcg

SEQ ID NO: 476683 - RNA, 32 nt, Human
gugacuggaguccugagcugugucugaagacu

SEQ ID NO: 476684 - RNA, 32 nt, Human
gugacuggaucccuagcuccagccucuuccug

SEQ ID NO: 476685 - RNA, 32 nt, Human
gugacuggaugauuccggcauuccugggucuu

SEQ ID NO: 476686 - RNA, 32 nt, Human
gugacuggcaggcaggugaggggcacagcacc

SEQ ID NO: 476687 - RNA, 21 nt, Human
gugacuggcaggcugcccucg

SEQ ID NO: 476688 - RNA, 18 nt, Human
gugacuggcccuguccug

SEQ ID NO: 476689 - RNA, 20 nt, Human
gugacuggcuggcugucuug

SEQ ID NO: 476690 - RNA, 22 nt, Human
gugacuggcuuuucguucugug

SEQ ID NO: 476691 - RNA, 32 nt, Human
gugacugggaggaccagcggaggauaaaagac

SEQ ID NO: 476692 - RNA, 32 nt, Human
gugacugggcgggcuucagccaugaagacccu

SEQ ID NO: 476693 - RNA, 32 nt, Human
gugacuggucugcugcugcaggcuucaucuaa

SEQ ID NO: 476694 - RNA, 32 nt, Human
gugacuggugccucgccgccuccucucggugc

SEQ ID NO: 476695 - RNA, 32 nt, Human
gugacuguaccugcucagggcuugccucuagc

SEQ ID NO: 476696 - RNA, 32 nt, Human
gugacugucagcacugggccucuuguccaucu

SEQ ID NO: 476697 - RNA, 32 nt, Human
gugacugucucugccacuucuuaccugcugaa

SEQ ID NO: 476698 - RNA, 32 nt, Human
gugacugugcguguaagcggcacuuuguugag

SEQ ID NO: 476699 - RNA, 19 nt, Human
gugacuguggaacugcugc

SEQ ID NO: 476700 - RNA, 32 nt, Human
gugacuguggacugacacccacugccucugug

SEQ ID NO: 476701 - RNA, 32 nt, Human
gugacugugucaaauguugcaguagaugggca

SEQ ID NO: 476702 - RNA, 32 nt, Human
gugacugugucauuucuccuacugccacagau

SEQ ID NO: 476703 - RNA, 32 nt, Human
gugacugugugugaugacucucuuuccauucu

SEQ ID NO: 476704 - RNA, 32 nt, Human
gugacuguuucuugcuuccugccucugacuuu

SEQ ID NO: 476705 - RNA, 21 nt, Human
gugacuuacacaguguccuug

SEQ ID NO: 476706 - RNA, 22 nt, Human
gugacuuacgccuguaaucuca

SEQ ID NO: 476707 - RNA, 32 nt, Human
gugacuuagauacugcuuuuugggagguuaag

SEQ ID NO: 476708 - RNA, 32 nt, Human
gugacuuaggcagaggagugcagaggaggguc

SEQ ID NO: 476709 - RNA, 32 nt, Human
gugacuuaugaagguuuuguuucuugaauuuu

SEQ ID NO: 476710 - RNA, 32 nt, Human
gugacuucauuucccuuccuucuguccuccuc

SEQ ID NO: 476711 - RNA, 32 nt, Human
gugacuuccccaggaguguggaggggguggug

SEQ ID NO: 476712 - RNA, 32 nt, Human
gugacuuccucgggggauucccaggacacagu

SEQ ID NO: 476713 - RNA, 32 nt, Human
gugacuucucauuuuccuguuuacacugggga

SEQ ID NO: 476714 - RNA, 32 nt, Human
gugacuucucuccuccccuuugcucacugucc

SEQ ID NO: 476715 - RNA, 32 nt, Human
gugacuucugacucuccuuccaccuccccacu

SEQ ID NO: 476716 - RNA, 32 nt, Human
gugacuucugaguaguuaucacugugucugcc

SEQ ID NO: 476717 - RNA, 32 nt, Human
gugacuucuguggugaggaggcuucaguguuc

SEQ ID NO: 476718 - RNA, 32 nt, Human
gugacuucuuuuucucuucauuagccagagau

SEQ ID NO: 476719 - RNA, 32 nt, Human
gugacuugagguguugggaugggugagggagc

SEQ ID NO: 476720 - RNA, 22 nt, Human
gugacuugcaccuguaauccca

SEQ ID NO: 476721 - RNA, 32 nt, Human
gugacuugcccagggcagagguuuuugaagug

SEQ ID NO: 476722 - RNA, 32 nt, Human
gugacuugcuucccaccuccuuucucuguccu

SEQ ID NO: 476723 - RNA, 32 nt, Human
gugacuugggaagcuuucagugcugcuguuug

SEQ ID NO: 476724 - RNA, 32 nt, Human
gugacuugggucucagugcuaggguauugagu

SEQ ID NO: 476725 - RNA, 32 nt, Human
gugacuuuauucuuuagcagugcucaagugua

SEQ ID NO: 476726 - RNA, 32 nt, Human
gugacuuucucagaggugacagagaugaugga

SEQ ID NO: 476727 - RNA, 32 nt, Human
gugacuuucugcagugaaugcaucacccuuua

SEQ ID NO: 476728 - RNA, 23 nt, Human
gugacuuugcucauucugucauc

SEQ ID NO: 476729 - RNA, 32 nt, Human
gugacuuugcuuguuuacuuucugccucagau

SEQ ID NO: 476730 - RNA, 32 nt, Human
gugacuuuggagccaugagaccccagauccug

SEQ ID NO: 476731 - RNA, 16 nt, Human
gugagaaaaccaccua

SEQ ID NO: 476732 - RNA, 32 nt, Human
gugagaaagaggaugagagggauggucagcug

SEQ ID NO: 476733 - RNA, 32 nt, Human
gugagaaaggaaaaggaagaagaaaagaaaca

SEQ ID NO: 476734 - RNA, 24 nt, Human
gugagaaagugaugcuaguugggg

SEQ ID NO: 476735 - RNA, 19 nt, Human
gugagaaauaaauuucugu

SEQ ID NO: 476736 - RNA, 32 nt, Human
gugagaaaugucccucuuugccuuggacuucu

SEQ ID NO: 476737 - RNA, 32 nt, Human
gugagaaauguucaugcacuuuggccaggguu

SEQ ID NO: 476738 - RNA, 32 nt, Human
gugagaaauuccucuuggguucuugaacagcc

SEQ ID NO: 476739 - RNA, 32 nt, Human
gugagaacaagaacugagggaaagcaccuucc

SEQ ID NO: 476740 - RNA, 32 nt, Human
gugagaacagcacccaugaagagaugcggaag

SEQ ID NO: 476741 - RNA, 32 nt, Human
gugagaacagguuuguguuucauaaaaugaau

SEQ ID NO: 476742 - RNA, 32 nt, Human
gugagaacaguaggggcaggaaaaugaucagg

SEQ ID NO: 476743 - RNA, 19 nt, Human
gugagaaccgaggguuaga

SEQ ID NO: 476744 - RNA, 32 nt, Human
gugagaacugauuucugcaucagaauaucucc

SEQ ID NO: 476745 - RNA, 32 nt, Human
gugagaagagguccuccagaccccagaauggu

SEQ ID NO: 476746 - RNA, 32 nt, Human
gugagaagauggagaacacagaggcagagaaa

SEQ ID NO: 476747 - RNA, 32 nt, Human
gugagaagauucacagccuaaaagagaaaauc

SEQ ID NO: 476748 - RNA, 32 nt, Human
gugagaagcaauauuugucauuucuaaaacug

SEQ ID NO: 476749 - RNA, 32 nt, Human
gugagaagcugccugacuucauggcaccuccu

SEQ ID NO: 476750 - RNA, 32 nt, Human
gugagaaggaagccaggacagcgcagucccca

SEQ ID NO: 476751 - RNA, 31 nt, Human
gugagaagugagagaucugaugguuuaaaag

SEQ ID NO: 476752 - RNA, 32 nt, Human
gugagaauccccuugacacucccaccaucuuc

SEQ ID NO: 476753 - RNA, 32 nt, Human
gugagaauccugcugaccccagucccaucccc

SEQ ID NO: 476754 - RNA, 32 nt, Human
gugagaaugagcagcugcaggagcacugcgcc

SEQ ID NO: 476755 - RNA, 32 nt, Human
gugagaauggacuaauacaaacaggaacuuac

SEQ ID NO: 476756 - RNA, 32 nt, Human
gugagaauuaguuccacuaucuuucuccaagu

SEQ ID NO: 476757 - RNA, 31 nt, Human
gugagacaaagggcccugucacuggaagcca

SEQ ID NO: 476758 - RNA, 32 nt, Human
gugagacaacacagcugagcagcccagccaga

SEQ ID NO: 476759 - RNA, 32 nt, Human
gugagacaacacaggagccuucuauaguaugu

SEQ ID NO: 476760 - RNA, 32 nt, Human
gugagacacagcaggacccuuccccaaauacu

SEQ ID NO: 476761 - RNA, 18 nt, Human
gugagacacaggauucua

SEQ ID NO: 476762 - RNA, 32 nt, Human
gugagacaccuacaaucaccagucucaaaugc

SEQ ID NO: 476763 - RNA, 32 nt, Human
gugagacacugcgcccagccucaucccuguga

SEQ ID NO: 476764 - RNA, 32 nt, Human
gugagacagaguuucacucuuguugcccaggc

SEQ ID NO: 476765 - RNA, 21 nt, Human
gugagacaggagaggcugagc

SEQ ID NO: 476766 - RNA, 32 nt, Human
gugagacaggcacugugcgggccagguauacc

SEQ ID NO: 476767 - RNA, 32 nt, Human
gugagacaggcaggaccggguggaggcgucuc

SEQ ID NO: 476768 - RNA, 32 nt, Human
gugagacaucuacagagacaaaauuaggaagg

SEQ ID NO: 476769 - RNA, 32 nt, Human
gugagacaucuuagggaaggagacaccacagu

SEQ ID NO: 476770 - RNA, 32 nt, Human
gugagacauggagccuaaggagaucauuuugg

SEQ ID NO: 476771 - RNA, 32 nt, Human
gugagaccaagaagucucucuuuccucucugu

SEQ ID NO: 476772 - RNA, 32 nt, Human
gugagaccagcccagccaacauggucccaggu

SEQ ID NO: 476773 - RNA, 32 nt, Human
gugagaccgggaaugcuugggcccccgccuuc

SEQ ID NO: 476774 - RNA, 32 nt, Human
gugagacggccgcggcggcggcgacagcgcgg

SEQ ID NO: 476775 - RNA, 32 nt, Human
gugagacucacagagcaaauagcccaaggaaa

SEQ ID NO: 476776 - RNA, 32 nt, Human
gugagacucagcucucaugcaggagaugggua

SEQ ID NO: 476777 - RNA, 32 nt, Human
gugagacuccacccuccccaccuggcucauuu

SEQ ID NO: 476778 - RNA, 32 nt, Human
gugagacuccagcacagacacaugguggaaga

SEQ ID NO: 476779 - RNA, 32 nt, Human
gugagacuccagcacagcuacaugguggaaga

SEQ ID NO: 476780 - RNA, 32 nt, Human
gugagacucggugucaucaccaauccaucgcc

SEQ ID NO: 476781 - RNA, 32 nt, Human
gugagacugaaguugcuuagaguacuucuuug

SEQ ID NO: 476782 - RNA, 32 nt, Human
gugagacuggcuuauggcaugaguuguggaca

SEQ ID NO: 476783 - RNA, 32 nt, Human
gugagacuugggcuggagugcccacguggcug

SEQ ID NO: 476784 - RNA, 32 nt, Human
gugagagaaagccacaaagucagugccuggag

SEQ ID NO: 476785 - RNA, 32 nt, Human
gugagagaaagcccgggcaggagagcacagag

SEQ ID NO: 476786 - RNA, 32 nt, Human
gugagagacugaagaagcagagccuguaucau

SEQ ID NO: 476787 - RNA, 32 nt, Human
gugagagagcaggagagcaggggugaggagag

SEQ ID NO: 476788 - RNA, 32 nt, Human
gugagagagcccaggccacaggacaugcugcc

SEQ ID NO: 476789 - RNA, 32 nt, Human
gugagagaggaguuggccuagagcaggccacu

SEQ ID NO: 476790 - RNA, 32 nt, Human
gugagagaggauccaggagagccugacugcgu

SEQ ID NO: 476791 - RNA, 32 nt, Human
gugagagauggcugugagagaagauuaaaaca

SEQ ID NO: 476792 - RNA, 32 nt, Human
gugagagcacacaauuauuagcaucauuucug

SEQ ID NO: 476793 - RNA, 32 nt, Human
gugagagcacuucaaaucacacagacagaauu

SEQ ID NO: 476794 - RNA, 32 nt, Human
gugagagcagaacccccauuccccagccucug

SEQ ID NO: 476795 - RNA, 29 nt, Human
gugagagcauugaauaaauaucuuaagcu

SEQ ID NO: 476796 - RNA, 32 nt, Human
gugagagcccaggggucuuugguugcaccucc

SEQ ID NO: 476797 - RNA, 32 nt, Human
gugagagccuaaaacccagcuugccugucuuu

SEQ ID NO: 476798 - RNA, 32 nt, Human
gugagagcggcuguuccaggcuaacagcugug

SEQ ID NO: 476799 - RNA, 32 nt, Human
gugagagcugggaugggcaggaaggggcucaa

SEQ ID NO: 476800 - RNA, 32 nt, Human
gugagaggaagcacaggggaagacugaaagca

SEQ ID NO: 476801 - RNA, 32 nt, Human
gugagaggagagaaggaaguggcuguuuggcu

SEQ ID NO: 476802 - RNA, 20 nt, Human
gugagaggagagggcugggg

SEQ ID NO: 476803 - RNA, 32 nt, Human
gugagaggagccaaggaggguggggauuagga

SEQ ID NO: 476804 - RNA, 32 nt, Human
gugagaggaggagaggccaggaagggagaggg

SEQ ID NO: 476805 - RNA, 22 nt, Human
gugagaggagguuccagcuggg

SEQ ID NO: 476806 - RNA, 24 nt, Human
gugagaggauagcuuaagcccagg

SEQ ID NO: 476807 - RNA, 23 nt, Human
gugagaggaucacuugagccagg

SEQ ID NO: 476808 - RNA, 24 nt, Human
gugagaggaucacuugagcccagg

SEQ ID NO: 476809 - RNA, 24 nt, Human
gugagaggaucacuugagcccugg

SEQ ID NO: 476810 - RNA, 24 nt, Human
gugagaggaucacuugagcucagg

SEQ ID NO: 476811 - RNA, 32 nt, Human
gugagaggaucucuagagcccaggaauucaag

SEQ ID NO: 476812 - RNA, 32 nt, Human
gugagaggaugagggggagggagccaacgccu

SEQ ID NO: 476813 - RNA, 32 nt, Human
gugagaggaugggaaggagcagccaggcgugg

SEQ ID NO: 476814 - RNA, 24 nt, Human
gugagaggauugcuugaggccagg

SEQ ID NO: 476815 - RNA, 32 nt, Human
gugagaggcacaguuggaucagcagacucagc

SEQ ID NO: 476816 - RNA, 32 nt, Human
gugagaggccagcaggaggcucagggaggacg

SEQ ID NO: 476817 - RNA, 31 nt, Human
gugagaggccucucuggaaguugucccgggu

SEQ ID NO: 476818 - RNA, 32 nt, Human
gugagaggcggugggcugacugggaaggagag

SEQ ID NO: 476819 - RNA, 20 nt, Human
gugagaggcuugcugccauc

SEQ ID NO: 476820 - RNA, 32 nt, Human
gugagagggacggcucacagggcuuggaccgg

SEQ ID NO: 476821 - RNA, 32 nt, Human
gugagaggggcagacucuguggucugagacac

SEQ ID NO: 476822 - RNA, 32 nt, Human
gugagaggggcgcgcagcagcagcuccucaac

SEQ ID NO: 476823 - RNA, 24 nt, Human
gugagagggucacuugagcccagg

SEQ ID NO: 476824 - RNA, 32 nt, Human
gugagagguagaguuaccaaagagcucaggga

SEQ ID NO: 476825 - RNA, 32 nt, Human
gugagaggucuggggaggaugaagagcagaaa

SEQ ID NO: 476826 - RNA, 22 nt, Human
gugagaggugacacuguugggg

SEQ ID NO: 476827 - RNA, 32 nt, Human
gugagaguaagccuuguguuagucagaacucu

SEQ ID NO: 476828 - RNA, 32 nt, Human
gugagagugaacacauugucucugcuguggca

SEQ ID NO: 476829 - RNA, 32 nt, Human
gugagagugagcuguaggugugcgggaccggu

SEQ ID NO: 476830 - RNA, 32 nt, Human
gugagagugcuagaaaggacguggaugaagca

SEQ ID NO: 476831 - RNA, 32 nt, Human
gugagagugcugcuguuccauuccuggggucc

SEQ ID NO: 476832 - RNA, 32 nt, Human
gugagaguuagcaaguguccggcuccagcaac

SEQ ID NO: 476833 - RNA, 32 nt, Human
gugagauaagucagaggugacuuuccugggga

SEQ ID NO: 476834 - RNA, 32 nt, Human
gugagauaaguuaacccggccugacagaauca

SEQ ID NO: 476835 - RNA, 32 nt, Human
gugagauacagcaacagccggauuaguuacag

SEQ ID NO: 476836 - RNA, 32 nt, Human
gugagauaucuauuuccuugccuccuucuuuc

SEQ ID NO: 476837 - RNA, 32 nt, Human
gugagaucacccagggaagcaguaaaauauca

SEQ ID NO: 476838 - RNA, 32 nt, Human
gugagaucauagcucacaccuguaaucccagc

SEQ ID NO: 476839 - RNA, 32 nt, Human
gugagauccaggagaaguaaggcccuggagug

SEQ ID NO: 476840 - RNA, 32 nt, Human
gugagaucuggaaaucaagaaaugggugucca

SEQ ID NO: 476841 - RNA, 32 nt, Human
gugagaugaauaggaggagucuucaggaggag

SEQ ID NO: 476842 - RNA, 32 nt, Human
gugagaugccaauuuggggucuugaggcugac

SEQ ID NO: 476843 - RNA, 32 nt, Human
gugagaugcucagugggcucaauccuccacua

SEQ ID NO: 476844 - RNA, 32 nt, Human
gugagaugcuggagaagagaggagaggagaga

SEQ ID NO: 476845 - RNA, 32 nt, Human
gugagauggcuucaguucaugagacgggaucu

SEQ ID NO: 476846 - RNA, 32 nt, Human
gugagauucagcucuaguuugcaccuugauuu

SEQ ID NO: 476847 - RNA, 32 nt, Human
gugagauuggaauuuagaguuguuaaauugaa

SEQ ID NO: 476848 - RNA, 32 nt, Human
gugagauuuuuacucaaacagaaacaaaacau

SEQ ID NO: 476849 - RNA, 32 nt, Human
gugagcaacugcacccagccuaguugaguaua

SEQ ID NO: 476850 - RNA, 32 nt, Human
gugagcaagcagauugccccagaggggccggu

SEQ ID NO: 476851 - RNA, 32 nt, Human
gugagcaccacugcacuaagccagugcggagc

SEQ ID NO: 476852 - RNA, 32 nt, Human
gugagcaccccuguucagucuuugacaauugc

SEQ ID NO: 476853 - RNA, 32 nt, Human
gugagcaccuguaaucccagcuacucuggagg

SEQ ID NO: 476854 - RNA, 32 nt, Human
gugagcacucaggaugacuguggagaaggagg

SEQ ID NO: 476855 - RNA, 32 nt, Human
gugagcacugguuaguacugguccccuucugg

SEQ ID NO: 476856 - RNA, 32 nt, Human
gugagcagaagggagagagggagggcgcaagg

SEQ ID NO: 476857 - RNA, 32 nt, Human
gugagcagacacaaaacgguggcagguuuggc

SEQ ID NO: 476858 - RNA, 32 nt, Human
gugagcagaggggagagcggccgccgccgcug

SEQ ID NO: 476859 - RNA, 32 nt, Human
gugagcagaguguucuguucuucacuuccagc

SEQ ID NO: 476860 - RNA, 32 nt, Human
gugagcagcagcccuggggucacagacaugga

SEQ ID NO: 476861 - RNA, 32 nt, Human
gugagcagccaagauauggcuagagagaucau

SEQ ID NO: 476862 - RNA, 32 nt, Human
gugagcagcggggcuccugccucccggccugg

SEQ ID NO: 476863 - RNA, 32 nt, Human
gugagcagcucgcugguacagcccucccuguu

SEQ ID NO: 476864 - RNA, 31 nt, Human
gugagcagcugaagggcuaggagggaagccg

SEQ ID NO: 476865 - RNA, 32 nt, Human
gugagcaggacagcuccuguccccagcgaaga

SEQ ID NO: 476866 - RNA, 23 nt, Human
gugagcaggacucaggcugugug

SEQ ID NO: 476867 - RNA, 32 nt, Human
gugagcaggacuguucuucccacugcaaucug

SEQ ID NO: 476868 - RNA, 32 nt, Human
gugagcaggagacagggagggcugaaggcugu

SEQ ID NO: 476869 - RNA, 32 nt, Human
gugagcaggaggucuucccacgcccugucauu

SEQ ID NO: 476870 - RNA, 32 nt, Human
gugagcaggaggugaugugccagguauggacc

SEQ ID NO: 476871 - RNA, 32 nt, Human
gugagcaggaguuugaacagaccuggccccag

SEQ ID NO: 476872 - RNA, 32 nt, Human
gugagcaggcaguguggguggggaggggcuac

SEQ ID NO: 476873 - RNA, 32 nt, Human
gugagcagggagaggcugggcacuguggaauu

SEQ ID NO: 476874 - RNA, 32 nt, Human
gugagcaggggagcaacugagcaggaagagga

SEQ ID NO: 476875 - RNA, 32 nt, Human
gugagcaggguaaggguacgugaggggucuga

SEQ ID NO: 476876 - RNA, 24 nt, Human
gugagcagguugcuugagcccagg

SEQ ID NO: 476877 - RNA, 32 nt, Human
gugagcauaaccuugugaaccagcacuagcuu

SEQ ID NO: 476878 - RNA, 32 nt, Human
gugagcaucaaaaggcgucagucaggccgcag

SEQ ID NO: 476879 - RNA, 32 nt, Human
gugagcaucuugccagccucaggcuugaggga

SEQ ID NO: 476880 - RNA, 32 nt, Human
gugagcaugcauggcaggaggcugucugagac

SEQ ID NO: 476881 - RNA, 21 nt, Human
gugagcauggagcaucuccua

SEQ ID NO: 476882 - RNA, 21 nt, Human
gugagccaaacacacuuccca

SEQ ID NO: 476883 - RNA, 32 nt, Human
gugagccaaauaaaccucuuuucuuucuaaaa

SEQ ID NO: 476884 - RNA, 32 nt, Human
gugagccaacaucacguuuuguuagcugugau

SEQ ID NO: 476885 - RNA, 32 nt, Human
gugagccaagauccagccugggcgacagagcc

SEQ ID NO: 476886 - RNA, 32 nt, Human
gugagccaagauugcacacugcacuccagccu

SEQ ID NO: 476887 - RNA, 28 nt, Human
gugagccaauuaaaccucuuuucucuau

SEQ ID NO: 476888 - RNA, 32 nt, Human
gugagccaauuaaaccucuuuucuuuauaaaa

SEQ ID NO: 476889 - RNA, 32 nt, Human
gugagccacacagcagucacacaacucagagu

SEQ ID NO: 476890 - RNA, 32 nt, Human
gugagccaccacacccagccuaauguaacugu

SEQ ID NO: 476891 - RNA, 32 nt, Human
gugagccaccacaccuagcuggaagaggagau

SEQ ID NO: 476892 - RNA, 32 nt, Human
gugagccaccacgccugggcccaugaaccaag

SEQ ID NO: 476893 - RNA, 32 nt, Human
gugagccaccacguccaacugccuuauuuugu

SEQ ID NO: 476894 - RNA, 32 nt, Human
gugagccaccaugccuggccccaugaauacac

SEQ ID NO: 476895 - RNA, 32 nt, Human
gugagccaccgcauccggccucauguucuuuu

SEQ ID NO: 476896 - RNA, 32 nt, Human
gugagccaccgcccccagccuggccuggcauu

SEQ ID NO: 476897 - RNA, 32 nt, Human
gugagccacgaucacaccacaguacuccagcc

SEQ ID NO: 476898 - RNA, 32 nt, Human
gugagccacggcacuccacccugggcaacaga

SEQ ID NO: 476899 - RNA, 32 nt, Human
gugagccacggcgcccagcccaggaagaguuu

SEQ ID NO: 476900 - RNA, 31 nt, Human
gugagccacucugcccggccugugcauauuu

SEQ ID NO: 476901 - RNA, 32 nt, Human
gugagccacugcacccacccaagacaagugau

SEQ ID NO: 476902 - RNA, 32 nt, Human
gugagccacugcacccacccacgccuggcuga

SEQ ID NO: 476903 - RNA, 32 nt, Human
gugagccacugcacccagcccucuuagccauu

SEQ ID NO: 476904 - RNA, 32 nt, Human
gugagccacugcacccagccgagugagaauuu

SEQ ID NO: 476905 - RNA, 32 nt, Human
gugagccacugcacccagccuagaaucuugua

SEQ ID NO: 476906 - RNA, 32 nt, Human
gugagccacugcacccagccuauucuaugcau

SEQ ID NO: 476907 - RNA, 32 nt, Human
gugagccacugcacccagccucauguugaccc

SEQ ID NO: 476908 - RNA, 32 nt, Human
gugagccacugcacccagccugggagaggggu

SEQ ID NO: 476909 - RNA, 32 nt, Human
gugagccacugcacccagccuguaaaauauuu

SEQ ID NO: 476910 - RNA, 32 nt, Human
gugagccacugcacccagccugugauguuucu

SEQ ID NO: 476911 - RNA, 32 nt, Human
gugagccacugcacccagcugagagugcuucu

SEQ ID NO: 476912 - RNA, 32 nt, Human
gugagccacugcacccggccgggaauuuauca

SEQ ID NO: 476913 - RNA, 32 nt, Human
gugagccacugcacccggccgugaccaacauu

SEQ ID NO: 476914 - RNA, 32 nt, Human
gugagccacugcacccggccuccaagccagca

SEQ ID NO: 476915 - RNA, 32 nt, Human
gugagccacugcaccgggccacagagaaagua

SEQ ID NO: 476916 - RNA, 32 nt, Human
gugagccacugcaccugaccuaagaggaagca

SEQ ID NO: 476917 - RNA, 32 nt, Human
gugagccacugcaccuggcagugaugucauuc

SEQ ID NO: 476918 - RNA, 32 nt, Human
gugagccacugcaccuggccucuguugcaguc

SEQ ID NO: 476919 - RNA, 32 nt, Human
gugagccacugcaccuggccuggagcucaguu

SEQ ID NO: 476920 - RNA, 32 nt, Human
gugagccacugcaccuggcucuaauaguugau

SEQ ID NO: 476921 - RNA, 32 nt, Human
gugagccacugcacguggccuaaaaguuuuaa

SEQ ID NO: 476922 - RNA, 32 nt, Human
gugagccacugcacuccagccugaugacagag

SEQ ID NO: 476923 - RNA, 32 nt, Human
gugagccacugcgcccagccuauacauguuau

SEQ ID NO: 476924 - RNA, 32 nt, Human
gugagccacugugcccagccuaauugcaguaa

SEQ ID NO: 476925 - RNA, 31 nt, Human
gugagccagagaguauuaugagggaggccga

SEQ ID NO: 476926 - RNA, 32 nt, Human
gugagccagaggcuugacagagcuguuacuua

SEQ ID NO: 476927 - RNA, 32 nt, Human
gugagccagccuggcccuguacagauguggaa

SEQ ID NO: 476928 - RNA, 32 nt, Human
gugagccagccuggccgcuccacccugcagaa

SEQ ID NO: 476929 - RNA, 32 nt, Human
gugagccaggcaggguagggauuagugucccc

SEQ ID NO: 476930 - RNA, 32 nt, Human
gugagccagggagguguggaagucaccugcug

SEQ ID NO: 476931 - RNA, 32 nt, Human
gugagccagguaaugagggacuggaaccaggg

SEQ ID NO: 476932 - RNA, 32 nt, Human
gugagccagguccugaggguugaagaggaguu

SEQ ID NO: 476933 - RNA, 32 nt, Human
gugagccaugacuguugcugcacuccagccug

SEQ ID NO: 476934 - RNA, 32 nt, Human
gugagccaugauauugccagccugggugacag

SEQ ID NO: 476935 - RNA, 32 nt, Human
gugagccaugaucaugccacugcacucugggc

SEQ ID NO: 476936 - RNA, 32 nt, Human
gugagccaugccaaugcacuccagucugggca

SEQ ID NO: 476937 - RNA, 32 nt, Human
gugagcccaagaggaagcaugaacaggacgcu

SEQ ID NO: 476938 - RNA, 32 nt, Human
gugagcccagcgugggcaccgggccgucucag

SEQ ID NO: 476939 - RNA, 32 nt, Human
gugagcccaggaauucaaggcugcagugaacu

SEQ ID NO: 476940 - RNA, 32 nt, Human
gugagcccaggaggcggagcuugcagugaguc

SEQ ID NO: 476941 - RNA, 32 nt, Human
gugagcccaggaguucaaggcugcaaugagcu

SEQ ID NO: 476942 - RNA, 32 nt, Human
gugagcccaggaguuugagaccagcuaaggca

SEQ ID NO: 476943 - RNA, 32 nt, Human
gugagcccaguuguuggugaauuuaaagcuua

SEQ ID NO: 476944 - RNA, 32 nt, Human
gugagccccgcuccggguccccgggcgggcuu

SEQ ID NO: 476945 - RNA, 32 nt, Human
gugagccccgggcuccugcucagccuugugcc

SEQ ID NO: 476946 - RNA, 32 nt, Human
gugagccccugccucccugaacauaggaaacc

SEQ ID NO: 476947 - RNA, 32 nt, Human
gugagcccggaaagggaaggagggggcgggga

SEQ ID NO: 476948 - RNA, 32 nt, Human
gugagcccugcaaaggugaugguggucccggc

SEQ ID NO: 476949 - RNA, 32 nt, Human
gugagcccugcaggagcacccugaggccuagg

SEQ ID NO: 476950 - RNA, 32 nt, Human
gugagcccugcucuauccgccuggcuggauuc

SEQ ID NO: 476951 - RNA, 32 nt, Human
gugagcccugcucuucucuccccagcccccuc

SEQ ID NO: 476952 - RNA, 32 nt, Human
gugagcccugggcaccuccugauguccugcga

SEQ ID NO: 476953 - RNA, 32 nt, Human
gugagccgagacugugcuccagccugggcgac

SEQ ID NO: 476954 - RNA, 32 nt, Human
gugagccgaggcauuccagccugggcaacaga

SEQ ID NO: 476955 - RNA, 32 nt, Human
gugagccgcaucuucuccaucuggcagggugg

SEQ ID NO: 476956 - RNA, 32 nt, Human
gugagccggacuccccaacuccggacgaucag

SEQ ID NO: 476957 - RNA, 32 nt, Human
gugagccggcucggccugacugcuccaacuuc

SEQ ID NO: 476958 - RNA, 32 nt, Human
gugagccgugaagggacccugccuuucagggc

SEQ ID NO: 476959 - RNA, 32 nt, Human
gugagccguuucuccccugggcucggaggcgg

SEQ ID NO: 476960 - RNA, 32 nt, Human
gugagccuccaggacuguccugcugugccucu

SEQ ID NO: 476961 - RNA, 32 nt, Human
gugagccugagcugcccaaggcgaugcccuuu

SEQ ID NO: 476962 - RNA, 32 nt, Human
gugagccugcaggcuuuggaaguggcccuguc

SEQ ID NO: 476963 - RNA, 32 nt, Human
gugagccuggacaacaacguggagccugcacc

SEQ ID NO: 476964 - RNA, 22 nt, Human
gugagccuggaggaggaccuga

SEQ ID NO: 476965 - RNA, 32 nt, Human
gugagccugggagccugacagggccaguguug

SEQ ID NO: 476966 - RNA, 32 nt, Human
gugagccugggaggucaaggcugcagugagcc

SEQ ID NO: 476967 - RNA, 32 nt, Human
gugagccugggaguucgaggcugcagugagca

SEQ ID NO: 476968 - RNA, 32 nt, Human
gugagccuggggaacuugcagcuuaaagccag

SEQ ID NO: 476969 - RNA, 32 nt, Human
gugagccuggggaaucagcaaaaggggaggag

SEQ ID NO: 476970 - RNA, 32 nt, Human
gugagccuguaaucccagcuacucagaaggcu

SEQ ID NO: 476971 - RNA, 32 nt, Human
gugagccuguagucccagcuacucgagaggcu

SEQ ID NO: 476972 - RNA, 32 nt, Human
gugagccuguaguccuagcuacucgggaggcu

SEQ ID NO: 476973 - RNA, 32 nt, Human
gugagccugucgucccagcuacucaggaggcu

SEQ ID NO: 476974 - RNA, 32 nt, Human
gugagccugugccuggcuggucuuucuugagg

SEQ ID NO: 476975 - RNA, 32 nt, Human
gugagcgcccucucucuccggcggagcggaga

SEQ ID NO: 476976 - RNA, 32 nt, Human
gugagcgcgagcuggggacucucucaaagaua

SEQ ID NO: 476977 - RNA, 32 nt, Human
gugagcgcugccucuauggggcacugagugac

SEQ ID NO: 476978 - RNA, 32 nt, Human
gugagcgcuuccaggcugguaccaggucucac

SEQ ID NO: 476979 - RNA, 32 nt, Human
gugagcgcuuccucccugugcacuguccuggc

SEQ ID NO: 476980 - RNA, 32 nt, Human
gugagcggagaggggcccugcuucccacacaa

SEQ ID NO: 476981 - RNA, 32 nt, Human
gugagcggagccaccaggaggccaugucgggu

SEQ ID NO: 476982 - RNA, 32 nt, Human
gugagcggcgcccgggcgccugggcaggcgcc

SEQ ID NO: 476983 - RNA, 32 nt, Human
gugagcgggggaggggcugggggaguaauaac

SEQ ID NO: 476984 - RNA, 32 nt, Human
gugagcgucuggccacauggagcugcuuucug

SEQ ID NO: 476985 - RNA, 32 nt, Human
gugagcguuuucucaagaccuuccucaagcau

SEQ ID NO: 476986 - RNA, 32 nt, Human
gugagcuacugugcccagccugcaauuauucu

SEQ ID NO: 476987 - RNA, 31 nt, Human
gugagcuagcacuucugcguuccuuuugauu

SEQ ID NO: 476988 - RNA, 32 nt, Human
gugagcuagggugggagaaagguggugcugaa

SEQ ID NO: 476989 - RNA, 32 nt, Human
gugagcuaugaauuacucucagucuccuuuuu

SEQ ID NO: 476990 - RNA, 32 nt, Human
gugagcucacuacaaucucuggcuucugguuc

SEQ ID NO: 476991 - RNA, 32 nt, Human
gugagcucacuggccucagugccagguaagga

SEQ ID NO: 476992 - RNA, 32 nt, Human
gugagcucaguggauugcaguggugugcuggu

SEQ ID NO: 476993 - RNA, 32 nt, Human
gugagcuccaccugccccaguucuccuggcuu

SEQ ID NO: 476994 - RNA, 32 nt, Human
gugagcucccugcccagcaccaccuccugcac

SEQ ID NO: 476995 - RNA, 32 nt, Human
gugagcuccugggaaugagauuaaaggaggca

SEQ ID NO: 476996 - RNA, 32 nt, Human
gugagcucgaaccugggcgcgagggaccggcc

SEQ ID NO: 476997 - RNA, 32 nt, Human
gugagcucgcugaguccagccucguggucuuc

SEQ ID NO: 476998 - RNA, 32 nt, Human
gugagcucuucugccaaggggguccuccuggc

SEQ ID NO: 476999 - RNA, 30 nt, Human
gugagcugaagccacaggcagcgaucccac

SEQ ID NO: 477000 - RNA, 32 nt, Human
gugagcugacaccuuucaaugcccccugguug

SEQ ID NO: 477001 - RNA, 32 nt, Human
gugagcugacugccuuggccucccagagugcu

SEQ ID NO: 477002 - RNA, 32 nt, Human
gugagcugagauugcacuccagccugggcgac

SEQ ID NO: 477003 - RNA, 32 nt, Human
gugagcugagcaaagcccugggcucacagcac

SEQ ID NO: 477004 - RNA, 32 nt, Human
gugagcugagcacgguagcucacaccuguaau

SEQ ID NO: 477005 - RNA, 32 nt, Human
gugagcugcacugcauuccagccugggugaca

SEQ ID NO: 477006 - RNA, 32 nt, Human
gugagcugcaggcugugcuccagauccaccga

SEQ ID NO: 477007 - RNA, 20 nt, Human
gugagcugccucugccccug

SEQ ID NO: 477008 - RNA, 32 nt, Human
gugagcugcuggcacagcaguucuggcccugg

SEQ ID NO: 477009 - RNA, 32 nt, Human
gugagcuggacgacacagccuaggcagaaaug

SEQ ID NO: 477010 - RNA, 32 nt, Human
gugagcuggagagagaaaaggugguaacugga

SEQ ID NO: 477011 - RNA, 31 nt, Human
gugagcuggcuggaaagagggggcggagugc

SEQ ID NO: 477012 - RNA, 32 nt, Human
gugagcugggagagggcaucccaggccgugcg

SEQ ID NO: 477013 - RNA, 32 nt, Human
gugagcugggcuucuguccuccucuguguccc

SEQ ID NO: 477014 - RNA, 32 nt, Human
gugagcugucuggccuuuuguccuugauccuu

SEQ ID NO: 477015 - RNA, 32 nt, Human
gugagcuuagaggaagaaagaaaacaauuuuu

SEQ ID NO: 477016 - RNA, 32 nt, Human
gugagcuuugcucugugcugggcauagagaau

SEQ ID NO: 477017 - RNA, 32 nt, Human
gugaggaaaauacagcaucccaccucacaggc

SEQ ID NO: 477018 - RNA, 32 nt, Human
gugaggaagaaggggaagaagauugucaaacu

SEQ ID NO: 477019 - RNA, 32 nt, Human
gugaggaagagggagaugaagugcagcgagaa

SEQ ID NO: 477020 - RNA, 32 nt, Human
gugaggaagagggagggauggacaagucugaa

SEQ ID NO: 477021 - RNA, 32 nt, Human
gugaggaagccagacuccagagacacggagaa

SEQ ID NO: 477022 - RNA, 32 nt, Human
gugaggaagccaucagaucugugcaccauuaa

SEQ ID NO: 477023 - RNA, 32 nt, Human
gugaggaaggcaggaagagagcaugagaggaa

SEQ ID NO: 477024 - RNA, 31 nt, Human
gugaggaaggguuuaaccucacuggaaggaa

SEQ ID NO: 477025 - RNA, 32 nt, Human
gugaggaccaggcacuauuuccuccgagguua

SEQ ID NO: 477026 - RNA, 32 nt, Human
gugaggaccuguaauccagcauucuuguuaaa

SEQ ID NO: 477027 - RNA, 32 nt, Human
gugaggacgaagcgggcacggagccagauggc

SEQ ID NO: 477028 - RNA, 32 nt, Human
gugaggacucacugagugcaccuccaucucca

SEQ ID NO: 477029 - RNA, 32 nt, Human
gugaggacucaggaaaaauaaauaaauaaaag

SEQ ID NO: 477030 - RNA, 32 nt, Human
gugaggacugcaccuuaaccugggcacuggga

SEQ ID NO: 477031 - RNA, 32 nt, Human
gugaggacuggucucccgggggugggggucug

SEQ ID NO: 477032 - RNA, 32 nt, Human
gugaggagagguggaggugcuuuggggacacu

SEQ ID NO: 477033 - RNA, 32 nt, Human
gugaggagagugagucaauguagaagaaguug

SEQ ID NO: 477034 - RNA, 32 nt, Human
gugaggagcagcacagagcagcagggaucauc

SEQ ID NO: 477035 - RNA, 32 nt, Human
gugaggagcagcagagucugauacuaggucua

SEQ ID NO: 477036 - RNA, 32 nt, Human
gugaggagcccagcagaggccacuccacaccc

SEQ ID NO: 477037 - RNA, 32 nt, Human
gugaggagccuggaacagggcucugaauuguc

SEQ ID NO: 477038 - RNA, 32 nt, Human
gugaggaggaagagaagcuggugcagccacac

SEQ ID NO: 477039 - RNA, 32 nt, Human
gugaggaggaagggaaggcgguucagagaugu

SEQ ID NO: 477040 - RNA, 32 nt, Human
gugaggaggagccacagcacauggggugccac

SEQ ID NO: 477041 - RNA, 32 nt, Human
gugaggaggaggaggaagaaaaugagaguggg

SEQ ID NO: 477042 - RNA, 32 nt, Human
gugaggaggaggaggaggagaaggaggaggag

SEQ ID NO: 477043 - RNA, 32 nt, Human
gugaggaggaggauuauaacuuaggccuagcc

SEQ ID NO: 477044 - RNA, 32 nt, Human
gugaggaggccugucugcaucuccuuccggcc

SEQ ID NO: 477045 - RNA, 32 nt, Human
gugaggagggagaacuuggaagggugcagccc

SEQ ID NO: 477046 - RNA, 32 nt, Human
gugaggaggggguugggaggggagaggacgcg

SEQ ID NO: 477047 - RNA, 32 nt, Human
gugaggagguaaagaaaggcagaccucuccgg

SEQ ID NO: 477048 - RNA, 32 nt, Human
gugaggauacauaacauuuucucuacaaugaa

SEQ ID NO: 477049 - RNA, 22 nt, Human
gugaggaucacuugagcccagg

SEQ ID NO: 477050 - RNA, 32 nt, Human
gugaggaugggacagagaagagcgaccacugg

SEQ ID NO: 477051 - RNA, 22 nt, Human
gugaggcaagagaagcuggaac

SEQ ID NO: 477052 - RNA, 32 nt, Human
gugaggcaagcccccuccuaugaggaugagca

SEQ ID NO: 477053 - RNA, 32 nt, Human
gugaggcaccugaggcagagaaaguaaagaaa

SEQ ID NO: 477054 - RNA, 24 nt, Human
gugaggcagaaaacuugacuugaa

SEQ ID NO: 477055 - RNA, 24 nt, Human
gugaggcagaagcauugcuugagc

SEQ ID NO: 477056 - RNA, 32 nt, Human
gugaggcagaagcauugcuugagcuugggaga

SEQ ID NO: 477057 - RNA, 23 nt, Human
gugaggcagaggaucacuugagc

SEQ ID NO: 477058 - RNA, 32 nt, Human
gugaggcagaggaucacuugagcccaggaguu

SEQ ID NO: 477059 - RNA, 32 nt, Human
gugaggcagagggagacguuaguccagcauuu

SEQ ID NO: 477060 - RNA, 32 nt, Human
gugaggcagcucuggaacgugaagagcuguuu

SEQ ID NO: 477061 - RNA, 32 nt, Human
gugaggcagcugcggaagaaaaguaggagacu

SEQ ID NO: 477062 - RNA, 27 nt, Human
gugaggcaggacuucccucgcuugaac

SEQ ID NO: 477063 - RNA, 24 nt, Human
gugaggcaggagaaucacuucaac

SEQ ID NO: 477064 - RNA, 24 nt, Human
gugaggcaggagaaucacuugaac

SEQ ID NO: 477065 - RNA, 24 nt, Human
gugaggcaggagaaucgcuugaac

SEQ ID NO: 477066 - RNA, 24 nt, Human
gugaggcaggagaaucuuucgagc

SEQ ID NO: 477067 - RNA, 24 nt, Human
gugaggcaggagaauggcaugaac

SEQ ID NO: 477068 - RNA, 24 nt, Human
gugaggcaggagaauggcuugagc

SEQ ID NO: 477069 - RNA, 24 nt, Human
gugaggcaggagauuugcuugaac

SEQ ID NO: 477070 - RNA, 32 nt, Human
gugaggcaggaucuguuucagcaaaggcccug

SEQ ID NO: 477071 - RNA, 24 nt, Human
gugaggcaggcgaaucucuugaac

SEQ ID NO: 477072 - RNA, 23 nt, Human
gugaggcaggcggaucacuugaa

SEQ ID NO: 477073 - RNA, 32 nt, Human
gugaggcagggggcauucacugccugggucag

SEQ ID NO: 477074 - RNA, 32 nt, Human
gugaggcagguggaucaccugaggucgggagc

SEQ ID NO: 477075 - RNA, 32 nt, Human
gugaggcauuggucccaagcugugcugaggac

SEQ ID NO: 477076 - RNA, 23 nt, Human
gugaggccaaagcacuguccugu

SEQ ID NO: 477077 - RNA, 32 nt, Human
gugaggccaccaggcugaagucagcucagacc

SEQ ID NO: 477078 - RNA, 32 nt, Human
gugaggccauuugaggccugagccugguccuc

SEQ ID NO: 477079 - RNA, 32 nt, Human
gugaggcccaccagcagaggaagaggagcuuc

SEQ ID NO: 477080 - RNA, 17 nt, Human
gugaggcccccaggcgg

SEQ ID NO: 477081 - RNA, 32 nt, Human
gugaggcccugcugaggacuccggacacugcc

SEQ ID NO: 477082 - RNA, 32 nt, Human
gugaggccgugccucuuugggggcuaaagguc

SEQ ID NO: 477083 - RNA, 22 nt, Human
gugaggccucugagggccucca

SEQ ID NO: 477084 - RNA, 32 nt, Human
gugaggccuucugcccuggccuuggggagaag

SEQ ID NO: 477085 - RNA, 32 nt, Human
gugaggcgcguguucgggcucuugccgucccc

SEQ ID NO: 477086 - RNA, 32 nt, Human
gugaggcgcuccugccauuuucucuccugcgg

SEQ ID NO: 477087 - RNA, 32 nt, Human
gugaggcggagcagagguuuaauggaggugug

SEQ ID NO: 477088 - RNA, 32 nt, Human
gugaggcggaggacaggcugggggaucccaaa

SEQ ID NO: 477089 - RNA, 32 nt, Human
gugaggcggcagcggcccuggcccccgcgccg

SEQ ID NO: 477090 - RNA, 24 nt, Human
gugaggcggcucacaccuguaauc

SEQ ID NO: 477091 - RNA, 32 nt, Human
gugaggcggcuggagcaaagucaaagucaugc

SEQ ID NO: 477092 - RNA, 32 nt, Human
gugaggcgggcaaaucaccugaggucagcagu

SEQ ID NO: 477093 - RNA, 32 nt, Human
gugaggcuaggggagugcugugcugauucucc

SEQ ID NO: 477094 - RNA, 32 nt, Human
gugaggcucugggaacaccuucuugccuuccu

SEQ ID NO: 477095 - RNA, 32 nt, Human
gugaggcugagaugagaaugcggauuaaaaug

SEQ ID NO: 477096 - RNA, 32 nt, Human
gugaggcugagggugccaagauuuccccaggg

SEQ ID NO: 477097 - RNA, 32 nt, Human
gugaggcugcuuguggcggauuccucaccaag

SEQ ID NO: 477098 - RNA, 32 nt, Human
gugaggcugggagcuucucuugggccugcugg

SEQ ID NO: 477099 - RNA, 19 nt, Human
gugaggcugggugcagugg

SEQ ID NO: 477100 - RNA, 23 nt, Human
gugaggcuucugcagaaccccca

SEQ ID NO: 477101 - RNA, 32 nt, Human
gugaggcuuugagaggccccaaagaugagcgc

SEQ ID NO: 477102 - RNA, 32 nt, Human
gugaggcuuuguuuuugccuuuauggagagua

SEQ ID NO: 477103 - RNA, 20 nt, Human
gugaggcuuuugugcuccca

SEQ ID NO: 477104 - RNA, 32 nt, Human
gugagggaacguuggcucugacugccuuugga

SEQ ID NO: 477105 - RNA, 32 nt, Human
gugagggaacuuucauauaccacugggaggaa

SEQ ID NO: 477106 - RNA, 32 nt, Human
gugagggaagacgccuuucuccuccaacccaa

SEQ ID NO: 477107 - RNA, 32 nt, Human
gugagggaagacuguaacacagcugaacuauu

SEQ ID NO: 477108 - RNA, 22 nt, Human
gugagggacagagcuagugggg

SEQ ID NO: 477109 - RNA, 32 nt, Human
gugagggagagggacgcagggagggaaaagcg

SEQ ID NO: 477110 - RNA, 32 nt, Human
gugagggagcagcacagacaaaagguggcaca

SEQ ID NO: 477111 - RNA, 32 nt, Human
gugagggaggagaauggacagaauacugacug

SEQ ID NO: 477112 - RNA, 32 nt, Human
gugagggagggaaggaaggaacuacaagagag

SEQ ID NO: 477113 - RNA, 32 nt, Human
gugagggagguggacggugccagcugaggcug

SEQ ID NO: 477114 - RNA, 32 nt, Human
gugagggaguuacuaagcugaaggcggaagau

SEQ ID NO: 477115 - RNA, 32 nt, Human
gugagggaucugccuccugagcaaagagcucu

SEQ ID NO: 477116 - RNA, 32 nt, Human
gugagggaugcagagccagggaaggcuggugg

SEQ ID NO: 477117 - RNA, 32 nt, Human
gugagggcaccccuccucugaagaucccugua

SEQ ID NO: 477118 - RNA, 32 nt, Human
gugagggcaucagccugcuggcucagaacacc

SEQ ID NO: 477119 - RNA, 32 nt, Human
gugagggccaagggggacccccagaaaaaggu

SEQ ID NO: 477120 - RNA, 16 nt, Human
gugagggcccaggugg

SEQ ID NO: 477121 - RNA, 32 nt, Human
gugagggccugugggauucuccggauauggcc

SEQ ID NO: 477122 - RNA, 32 nt, Human
gugagggcgaggaggaugacgagggcgaggag

SEQ ID NO: 477123 - RNA, 32 nt, Human
gugagggcgccugggagcugauggguuaagcc

SEQ ID NO: 477124 - RNA, 32 nt, Human
gugagggcgggcaaggggccccagccgcugca

SEQ ID NO: 477125 - RNA, 32 nt, Human
gugagggcugaaguagaguaagaaaaaucaca

SEQ ID NO: 477126 - RNA, 32 nt, Human
gugagggcuucgaucccuucucugauuugcug

SEQ ID NO: 477127 - RNA, 24 nt, Human
gugagggcuuugaaaggccuucca

SEQ ID NO: 477128 - RNA, 25 nt, Human
gugaggggaaucucaguagcuggga

SEQ ID NO: 477129 - RNA, 32 nt, Human
gugaggggagagaagggagagggugggccugc

SEQ ID NO: 477130 - RNA, 32 nt, Human
gugaggggagggcuguggggaacuccauucag

SEQ ID NO: 477131 - RNA, 32 nt, Human
gugaggggagggugaggagcuggagggagggg

SEQ ID NO: 477132 - RNA, 32 nt, Human
gugaggggaguccuaggcagagcugcugauug

SEQ ID NO: 477133 - RNA, 32 nt, Human
gugaggggcugagaggaauacuugaaacaaca

SEQ ID NO: 477134 - RNA, 32 nt, Human
gugaggggcugggcuggacaccagggcccgcc

SEQ ID NO: 477135 - RNA, 32 nt, Human
gugagggggcuugcuugguaugcuuaccuggg

SEQ ID NO: 477136 - RNA, 32 nt, Human
gugaggggugguggaaagaggggaggagggag

SEQ ID NO: 477137 - RNA, 32 nt, Human
gugaggggugugaggccccagccuggagccag

SEQ ID NO: 477138 - RNA, 32 nt, Human
gugagggucaaauaagcuaaaagcagcugaaa

SEQ ID NO: 477139 - RNA, 22 nt, Human
gugagggugcaagggucuuuca

SEQ ID NO: 477140 - RNA, 32 nt, Human
gugagggugggacccugugaaggucugaccac

SEQ ID NO: 477141 - RNA, 32 nt, Human
gugagggugggaggcagaaaagaggcacaggu

SEQ ID NO: 477142 - RNA, 22 nt, Human
gugagguagagcugugcauuaa

SEQ ID NO: 477143 - RNA, 24 nt, Human
gugagguagcucacaccuguaauc

SEQ ID NO: 477144 - RNA, 32 nt, Human
gugaggucaagagaucgagaccagccuggcca

SEQ ID NO: 477145 - RNA, 32 nt, Human
gugaggucaagaguucaagaccagccuggcca

SEQ ID NO: 477146 - RNA, 32 nt, Human
gugaggucacuguccaggucugggacucagcc

SEQ ID NO: 477147 - RNA, 32 nt, Human
gugaggucaggaguucgagaccagccugacca

SEQ ID NO: 477148 - RNA, 32 nt, Human
gugaggucaggaguuugagaccagccuggcca

SEQ ID NO: 477149 - RNA, 32 nt, Human
gugaggucgggaguucaagaccagccuggcca

SEQ ID NO: 477150 - RNA, 32 nt, Human
gugaggucugagauucccuuguuccuggggug

SEQ ID NO: 477151 - RNA, 32 nt, Human
gugaggugagcaugagcuugagcugagagaca

SEQ ID NO: 477152 - RNA, 32 nt, Human
gugaggugaggcucuguugcagugucguaggc

SEQ ID NO: 477153 - RNA, 17 nt, Human
gugaggugcccaggugg

SEQ ID NO: 477154 - RNA, 32 nt, Human
gugaggugccuguaaaguaguauuuuugauca

SEQ ID NO: 477155 - RNA, 32 nt, Human
gugaggugcugauguccuugccuugcuggaag

SEQ ID NO: 477156 - RNA, 32 nt, Human
gugagguggagugccuagaacucccguggugg

SEQ ID NO: 477157 - RNA, 32 nt, Human
gugagguggauaacuauaaugagaaucucuua

SEQ ID NO: 477158 - RNA, 32 nt, Human
gugagguggauagaucaccuggagucccucgu

SEQ ID NO: 477159 - RNA, 24 nt, Human
gugagguggcucacgccuauaauc

SEQ ID NO: 477160 - RNA, 24 nt, Human
gugagguggcucaugccuguaauc

SEQ ID NO: 477161 - RNA, 32 nt, Human
gugaggugggaggaucaccugaggucgaaagu

SEQ ID NO: 477162 - RNA, 32 nt, Human
gugaggugggaggucaggggucagccucuccg

SEQ ID NO: 477163 - RNA, 31 nt, Human
gugaggugggugggagaggaagaaaguuggg

SEQ ID NO: 477164 - RNA, 32 nt, Human
gugaggugguggaacaaaaggccagguagagg

SEQ ID NO: 477165 - RNA, 32 nt, Human
gugaggugguuuagcuuuugcuuucgaagugg

SEQ ID NO: 477166 - RNA, 32 nt, Human
gugagguguaugccacaccuggccuuaaagag

SEQ ID NO: 477167 - RNA, 32 nt, Human
gugagguguccagccugcaaagcuauuccagc

SEQ ID NO: 477168 - RNA, 32 nt, Human
gugaggugugggaguagccaccagccucccac

SEQ ID NO: 477169 - RNA, 32 nt, Human
gugagguuacagacacggcccuggugaugggc

SEQ ID NO: 477170 - RNA, 32 nt, Human
gugagguuccucacuuugcuucuccaacagcc

SEQ ID NO: 477171 - RNA, 32 nt, Human
gugagguucucagccgauguguuagagguuga

SEQ ID NO: 477172 - RNA, 32 nt, Human
gugagguugaccacucuguagguggacgagcc

SEQ ID NO: 477173 - RNA, 32 nt, Human
gugagguugcugccaacaguccuggccucccc

SEQ ID NO: 477174 - RNA, 32 nt, Human
gugagguuuccgagccucucccugcccauccu

SEQ ID NO: 477175 - RNA, 32 nt, Human
gugagguuugguggauccacgccccucucccc

SEQ ID NO: 477176 - RNA, 32 nt, Human
gugaguaaauaccucagauguccuccugcagc

SEQ ID NO: 477177 - RNA, 32 nt, Human
gugaguaacuugcccauuucuccacagagacc

SEQ ID NO: 477178 - RNA, 32 nt, Human
gugaguaaugugccccugaaaccaguggggug

SEQ ID NO: 477179 - RNA, 32 nt, Human
gugaguacauuguccuuccaaaccugauucau

SEQ ID NO: 477180 - RNA, 32 nt, Human
gugaguaccuguuugucuccaggccaaaccuu

SEQ ID NO: 477181 - RNA, 32 nt, Human
gugaguagaggggccugggggcuuccaaggcc

SEQ ID NO: 477182 - RNA, 32 nt, Human
gugaguagccuaugaaugaaauucuuuuauaa

SEQ ID NO: 477183 - RNA, 32 nt, Human
gugaguaggcuaaguuggggaggcucaaacca

SEQ ID NO: 477184 - RNA, 32 nt, Human
gugaguagugcuuuucauucuucucacuugcc

SEQ ID NO: 477185 - RNA, 32 nt, Human
gugaguauauuuuucuuccagcugaacuuuaa

SEQ ID NO: 477186 - RNA, 32 nt, Human
gugaguauuaaugucaguacuaccagcacuuu

SEQ ID NO: 477187 - RNA, 32 nt, Human
gugaguauuuggaccauugaagugggaguuau

SEQ ID NO: 477188 - RNA, 32 nt, Human
gugagucaaagcaggcccugaggucuccuguu

SEQ ID NO: 477189 - RNA, 32 nt, Human
gugagucaagaaccgcauaggucuccaguccc

SEQ ID NO: 477190 - RNA, 24 nt, Human
gugagucaagagaauugcuugaac

SEQ ID NO: 477191 - RNA, 32 nt, Human
gugagucaauuaaaccucuuuucuuuauaaau

SEQ ID NO: 477192 - RNA, 32 nt, Human
gugagucacagcccucuccgucugcucuagcc

SEQ ID NO: 477193 - RNA, 32 nt, Human
gugagucaccgugcccagccuggaugaggguc

SEQ ID NO: 477194 - RNA, 32 nt, Human
gugagucacugcacccaagccuccuuucucuu

SEQ ID NO: 477195 - RNA, 32 nt, Human
gugagucacugcacccagccgaguugcuuucu

SEQ ID NO: 477196 - RNA, 32 nt, Human
gugagucagcuggucaaguuguguguugagca

SEQ ID NO: 477197 - RNA, 32 nt, Human
gugagucagggcagggcagcugguaucgaggu

SEQ ID NO: 477198 - RNA, 32 nt, Human
gugagucaggggcagagcagggcggucugagc

SEQ ID NO: 477199 - RNA, 32 nt, Human
gugagucaguuaaaccucuuuucuuuauaaau

SEQ ID NO: 477200 - RNA, 32 nt, Human
gugaguccaagccagacuuuguggcugucccc

SEQ ID NO: 477201 - RNA, 32 nt, Human
gugaguccaggaguuugagaccagccugggca

SEQ ID NO: 477202 - RNA, 32 nt, Human
gugaguccaugggaacagccccacugcaaaca

SEQ ID NO: 477203 - RNA, 32 nt, Human
gugaguccauuaaaccucuuuuucucuauaaa

SEQ ID NO: 477204 - RNA, 32 nt, Human
gugagucccagaggaccucgugguccucaauu

SEQ ID NO: 477205 - RNA, 32 nt, Human
gugagucccgucgcauccccucccucuuccug

SEQ ID NO: 477206 - RNA, 32 nt, Human
gugagucccugagaugugcucuuguuguuugg

SEQ ID NO: 477207 - RNA, 31 nt, Human
gugaguccgggcaaggagguuaggaggcagc

SEQ ID NO: 477208 - RNA, 32 nt, Human
gugaguccgggcaaggagguuaggaggcagcu

SEQ ID NO: 477209 - RNA, 32 nt, Human
gugaguccucagagccuccaucugccaagaac

SEQ ID NO: 477210 - RNA, 32 nt, Human
gugaguccuggguggagaaagaagagaagcag

SEQ ID NO: 477211 - RNA, 32 nt, Human
gugagucuacagcaguaucucugccugguguc

SEQ ID NO: 477212 - RNA, 32 nt, Human
gugagucugaaauuccagggaaugccgugagg

SEQ ID NO: 477213 - RNA, 32 nt, Human
gugagucugcaggcccuggacccgcuggccag

SEQ ID NO: 477214 - RNA, 32 nt, Human
gugagucuggccaaaauguaaaccccacccuc

SEQ ID NO: 477215 - RNA, 32 nt, Human
gugagucugucaggagcuucagccuagcugau

SEQ ID NO: 477216 - RNA, 32 nt, Human
gugagucugucaugagagcuguccugaaugcc

SEQ ID NO: 477217 - RNA, 32 nt, Human
gugagucugucuuuaacacauuuccuuccaau

SEQ ID NO: 477218 - RNA, 32 nt, Human
gugagucuucacuaaaaucagugacucacuuc

SEQ ID NO: 477219 - RNA, 32 nt, Human
gugagugaaaccagcuagugugucaacaguga

SEQ ID NO: 477220 - RNA, 32 nt, Human
gugagugaagauggcagagaggacgugaccag

SEQ ID NO: 477221 - RNA, 32 nt, Human
gugagugaauuccuggauaaagcaagauuucc

SEQ ID NO: 477222 - RNA, 32 nt, Human
gugagugacagcagcccuggugccccagccug

SEQ ID NO: 477223 - RNA, 32 nt, Human
gugagugaccgcggccccgagccuggggcugg

SEQ ID NO: 477224 - RNA, 32 nt, Human
gugagugaccuguuuucccagcaacucacccu

SEQ ID NO: 477225 - RNA, 32 nt, Human
gugagugaggaggaggaggaggagaaggagga

SEQ ID NO: 477226 - RNA, 32 nt, Human
gugagugcacacacuaugcgaggagcaagcau

SEQ ID NO: 477227 - RNA, 29 nt, Human
gugagugcagcgugugugcgugugccugu

SEQ ID NO: 477228 - RNA, 32 nt, Human
gugagugccagugugagggagcagggguguug

SEQ ID NO: 477229 - RNA, 32 nt, Human
gugagugccuguaaucacagcuacuugggagg

SEQ ID NO: 477230 - RNA, 32 nt, Human
gugagugccuguaaucccagcuacucgggagg

SEQ ID NO: 477231 - RNA, 32 nt, Human
gugagugccuguaaucccagcuacuugggagg

SEQ ID NO: 477232 - RNA, 32 nt, Human
gugagugccuguaaucucaguuacucaggagg

SEQ ID NO: 477233 - RNA, 32 nt, Human
gugaguggaacaggagccgggcauucagagag

SEQ ID NO: 477234 - RNA, 32 nt, Human
gugaguggagaggaggaggaggaugaagaagg

SEQ ID NO: 477235 - RNA, 24 nt, Human
gugaguggauugcuugaguccggg

SEQ ID NO: 477236 - RNA, 20 nt, Human
gugagugggagcugagccca

SEQ ID NO: 477237 - RNA, 32 nt, Human
gugagugggaggcggcggcgcugguggcugca

SEQ ID NO: 477238 - RNA, 32 nt, Human
gugagugggcagguuuggaggagcagccaggg

SEQ ID NO: 477239 - RNA, 32 nt, Human
gugaguggggcgagguugagggcuuauucagu

SEQ ID NO: 477240 - RNA, 32 nt, Human
gugagugguagcgauguggcccagugagacgg

SEQ ID NO: 477241 - RNA, 32 nt, Human
gugagugguccccuccuccaucagccuggaca

SEQ ID NO: 477242 - RNA, 32 nt, Human
gugaguggugagugguguucuacuggaagaac

SEQ ID NO: 477243 - RNA, 31 nt, Human
gugagugugaagauggugguuagcaguuucg

SEQ ID NO: 477244 - RNA, 32 nt, Human
gugagugugacggggguugggguggggcggga

SEQ ID NO: 477245 - RNA, 32 nt, Human
gugagugugaugggccaccggggcaagaggga

SEQ ID NO: 477246 - RNA, 32 nt, Human
gugaguguggcaguccccacagcuccacaaug

SEQ ID NO: 477247 - RNA, 32 nt, Human
gugaguguguauccuaggaaaggcgagcugga

SEQ ID NO: 477248 - RNA, 32 nt, Human
gugagugugugugagagagaauuggugaguuu

SEQ ID NO: 477249 - RNA, 32 nt, Human
gugaguguuggaugucugcaugugugugugcc

SEQ ID NO: 477250 - RNA, 32 nt, Human
gugaguuacuccugcauucuuuccagggaccg

SEQ ID NO: 477251 - RNA, 32 nt, Human
gugaguuauagucugcuuauuuaauuaccacu

SEQ ID NO: 477252 - RNA, 32 nt, Human
gugaguucacauuuagcaacagcuuauuaaua

SEQ ID NO: 477253 - RNA, 20 nt, Human
gugaguucagacucccagca

SEQ ID NO: 477254 - RNA, 32 nt, Human
gugaguuccuucuuccccuugaggaaucagca

SEQ ID NO: 477255 - RNA, 32 nt, Human
gugaguucucaagaaaaggaaagggaggcuga

SEQ ID NO: 477256 - RNA, 32 nt, Human
gugaguucuuucucccuauccugggccucugu

SEQ ID NO: 477257 - RNA, 21 nt, Human
gugaguugaguguggcuggga

SEQ ID NO: 477258 - RNA, 32 nt, Human
gugaguugauguagaggagagccaccugacag

SEQ ID NO: 477259 - RNA, 32 nt, Human
gugaguugcccagaguggaagcuccuaguaga

SEQ ID NO: 477260 - RNA, 32 nt, Human
gugaguuggaguccuuucugucugucuccaug

SEQ ID NO: 477261 - RNA, 29 nt, Human
gugaguuggcugcucucuccccauagugg

SEQ ID NO: 477262 - RNA, 32 nt, Human
gugaguugggaaaguugauuagucgggucgga

SEQ ID NO: 477263 - RNA, 32 nt, Human
gugaguuucccuugaguuccucccccgacagg

SEQ ID NO: 477264 - RNA, 32 nt, Human
gugaguuucuacagucaucccuugguauccau

SEQ ID NO: 477265 - RNA, 32 nt, Human
gugaguuucugcuuuguagguuguggucacau

SEQ ID NO: 477266 - RNA, 32 nt, Human
gugaguuucuggcaaguagcuuggggaagcug

SEQ ID NO: 477267 - RNA, 32 nt, Human
gugaguuucuggcugugaaccugugaggcuga

SEQ ID NO: 477268 - RNA, 32 nt, Human
gugaguuuguuuaggugggaagguggcauggg

SEQ ID NO: 477269 - RNA, 32 nt, Human
gugauaaaaauuaaaaucacacuacuauuuga

SEQ ID NO: 477270 - RNA, 32 nt, Human
gugauaaaacaacaugguauguagaagccuag

SEQ ID NO: 477271 - RNA, 21 nt, Human
gugauaacaugaacaugagua

SEQ ID NO: 477272 - RNA, 32 nt, Human
gugauaaccuugaagcuauucuccccuaauua

SEQ ID NO: 477273 - RNA, 32 nt, Human
gugauaagaacauaugcugucggcgacucacu

SEQ ID NO: 477274 - RNA, 32 nt, Human
gugauaagaugaagcacaaagugcugggauua

SEQ ID NO: 477275 - RNA, 32 nt, Human
gugauaagggaugaggaagaagaagagacaga

SEQ ID NO: 477276 - RNA, 32 nt, Human
gugauaagggugucgguuggcagaucaaaggg

SEQ ID NO: 477277 - RNA, 32 nt, Human
gugauaauaagaaagauguaguagggauagag

SEQ ID NO: 477278 - RNA, 32 nt, Human
gugauaaucccaccacccuuugcugacucucu

SEQ ID NO: 477279 - RNA, 32 nt, Human
gugauaaugaacacauggacuucuguuuauua

SEQ ID NO: 477280 - RNA, 32 nt, Human
gugauacaaagaaugaagagaaggaaggugcu

SEQ ID NO: 477281 - RNA, 21 nt, Human
gugauacaacagcuccacuca

SEQ ID NO: 477282 - RNA, 17 nt, Human
gugauacagaaguacua

SEQ ID NO: 477283 - RNA, 32 nt, Human
gugauacagcacugucuccaaauguggagcug

SEQ ID NO: 477284 - RNA, 32 nt, Human
gugauacagcacugucuccaaauguggggcug

SEQ ID NO: 477285 - RNA, 32 nt, Human
gugauacaucuucagcaccucagucugggaag

SEQ ID NO: 477286 - RNA, 31 nt, Human
gugauacauuccuuuuccugccaaaguucug

SEQ ID NO: 477287 - RNA, 32 nt, Human
gugauaccagaccacauugacagggaggauca

SEQ ID NO: 477288 - RNA, 32 nt, Human
gugauaccaguucagacacuaccccauauaca

SEQ ID NO: 477289 - RNA, 32 nt, Human
gugauaccccacucucuccauuauuguccagc

SEQ ID NO: 477290 - RNA, 32 nt, Human
gugauaccuccccuaaguuacucucacaauaa

SEQ ID NO: 477291 - RNA, 32 nt, Human
gugauaccuugaucuuucccacuuucuguuuu

SEQ ID NO: 477292 - RNA, 32 nt, Human
gugauacggagagcaacaguuccccagcaaca

SEQ ID NO: 477293 - RNA, 32 nt, Human
gugauacuccugccucagccuccugagaagcu

SEQ ID NO: 477294 - RNA, 32 nt, Human
gugauacugauugccacauuaagguugaacag

SEQ ID NO: 477295 - RNA, 32 nt, Human
gugauacuguacuccagccugagcaacagagc

SEQ ID NO: 477296 - RNA, 32 nt, Human
gugauagaaaucuaggccccagaagaggaaag

SEQ ID NO: 477297 - RNA, 22 nt, Human
gugauagagugagacucugucu

SEQ ID NO: 477298 - RNA, 32 nt, Human
gugcuugccaacaaucgcagagaagcugaaga

SEQ ID NO: 477299 - RNA, 32 nt, Human
gugcuugcccucucuacugucccggcggcauc

SEQ ID NO: 477300 - RNA, 32 nt, Human
gugcuugccgugagggccccaggauuuggccg

SEQ ID NO: 477301 - RNA, 32 nt, Human
gugcuugccucaccagcucucugcucacauuu

SEQ ID NO: 477302 - RNA, 32 nt, Human
gugcuugccucaccagcucucugcucacuuuu

SEQ ID NO: 477303 - RNA, 32 nt, Human
gugcuugcuaucugucucauguuacagagcuu

SEQ ID NO: 477304 - RNA, 32 nt, Human
gugcuugcucagaaaaacaaacaaacaaacag

SEQ ID NO: 477305 - RNA, 32 nt, Human
gugcuuggaagagaugaaagaucuucauggcu

SEQ ID NO: 477306 - RNA, 22 nt, Human
gugcuuggcauauuguagggug

SEQ ID NO: 477307 - RNA, 32 nt, Human
gugcuuggcuaugacucuaccuccagguuuac

SEQ ID NO: 477308 - RNA, 32 nt, Human
gugcuuggcuucccuaggcaugcaguaccaua

SEQ ID NO: 477309 - RNA, 32 nt, Human
gugcuuggguuaugauggcaggagucaagaag

SEQ ID NO: 477310 - RNA, 32 nt, Human
gugcuuggucuuaaaauacaugguuggacaga

SEQ ID NO: 477311 - RNA, 20 nt, Human
gugcuugucaggagguccag

SEQ ID NO: 477312 - RNA, 32 nt, Human
gugcuugugccacuguacuccagccuggccca

SEQ ID NO: 477313 - RNA, 32 nt, Human
gugcuugugggggugaaggguuggggugagaa

SEQ ID NO: 477314 - RNA, 32 nt, Human
gugcuugugugguccaaccucagucuggcccc

SEQ ID NO: 477315 - RNA, 32 nt, Human
gugcuuguuccucucaucuccccaccgguguc

SEQ ID NO: 477316 - RNA, 32 nt, Human
gugcuuguucuuccucuuaccuguaauagccu

SEQ ID NO: 477317 - RNA, 32 nt, Human
gugcuuguugcccaggcuggagugcaguggug

SEQ ID NO: 477318 - RNA, 32 nt, Human
gugcuuguuuacagcacuacucugugccagcc

SEQ ID NO: 477319 - RNA, 32 nt, Human
gugcuuguuugcucaccuggggugugggaggc

SEQ ID NO: 477320 - RNA, 32 nt, Human
gugcuuuaaaaaccagccuggcgaggacagcc

SEQ ID NO: 477321 - RNA, 32 nt, Human
gugcuuuaacaucaguugaaaccuaaauuuuc

SEQ ID NO: 477322 - RNA, 32 nt, Human
gugcuuuagaagauacuugcuguuggcugggc

SEQ ID NO: 477323 - RNA, 32 nt, Human
gugcuuuagaagggagaaagcaaaaacauuuu

SEQ ID NO: 477324 - RNA, 19 nt, Human
gugcuuuaggcccaggcgg

SEQ ID NO: 477325 - RNA, 32 nt, Human
gugcuuuauucaaaucuaaucuuauauggaac

SEQ ID NO: 477326 - RNA, 32 nt, Human
gugcuuucagcccggcccccuggagucgggcc

SEQ ID NO: 477327 - RNA, 32 nt, Human
gugcuuucaguuagccuucuguaggaaguaga

SEQ ID NO: 477328 - RNA, 32 nt, Human
gugcuuucauuauauaaugauacauuuagaca

SEQ ID NO: 477329 - RNA, 21 nt, Human
gugcuuuccggccgcccucug

SEQ ID NO: 477330 - RNA, 32 nt, Human
gugcuuuccucaggcuggguagauggagcucu

SEQ ID NO: 477331 - RNA, 32 nt, Human
gugcuuuccucccucuccccugcccaccucaa

SEQ ID NO: 477332 - RNA, 32 nt, Human
gugcuuucuaguugucaggaaugcugaagaau

SEQ ID NO: 477333 - RNA, 32 nt, Human
gugcuuucucugacgucucugccccuggcagg

SEQ ID NO: 477334 - RNA, 32 nt, Human
gugcuuucucugcuauugggcccagccuugcu

SEQ ID NO: 477335 - RNA, 32 nt, Human
gugcuuugaucaaagcagagcuggcagaauug

SEQ ID NO: 477336 - RNA, 32 nt, Human
gugcuuuggaaacugccagguggggucauguc

SEQ ID NO: 477337 - RNA, 32 nt, Human
gugcuuuguaugcuaaggaagugcuacgaugc

SEQ ID NO: 477338 - RNA, 32 nt, Human
gugcuuuguggcuucucuuuacagcuuuguuu

SEQ ID NO: 477339 - RNA, 32 nt, Human
gugcuuuguguagaguccagggcagcuggagc

SEQ ID NO: 477340 - RNA, 32 nt, Human
gugcuuuguuuccucuguuucuuccaauucuc

SEQ ID NO: 477341 - RNA, 32 nt, Human
gugcuuuuauguuuaauuuuaugagggccacg

SEQ ID NO: 477342 - RNA, 32 nt, Human
gugcuuuucaaucuaguaaaucuagaggguug

SEQ ID NO: 477343 - RNA, 32 nt, Human
gugcuuuucacuuugggacaaaguucuauaau

SEQ ID NO: 477344 - RNA, 32 nt, Human
gugcuuuuccacagaagguuagacccugaaag

SEQ ID NO: 477345 - RNA, 32 nt, Human
gugcuuuucccaagggucugggcucugaguug

SEQ ID NO: 477346 - RNA, 32 nt, Human
gugcuuuucgacgggcccucguggcuuggaac

SEQ ID NO: 477347 - RNA, 32 nt, Human
gugcuuuuguauuaaauuuaaauuuucacaua

SEQ ID NO: 477348 - RNA, 32 nt, Human
gugcuuuuuaaugugcagucuauuuccagagc

SEQ ID NO: 477349 - RNA, 32 nt, Human
gugcuuuuucgcuuuccuaagcuccugucgcu

SEQ ID NO: 477350 - RNA, 32 nt, Human
guggaaaaacccacuccugguuguuuagacgu

SEQ ID NO: 477351 - RNA, 32 nt, Human
guggaaaaacugccuuccacuaaaccaguccc

SEQ ID NO: 477352 - RNA, 23 nt, Human
guggaaaaauuuucaaguaacau

SEQ ID NO: 477353 - RNA, 31 nt, Human
guggaaaacaucuuuguacauuuaagucugu

SEQ ID NO: 477354 - RNA, 32 nt, Human
guggaaaagaaagaaugagaggugcgccguuu

SEQ ID NO: 477355 - RNA, 22 nt, Human
guggaaaagaccaagaugccau

SEQ ID NO: 477356 - RNA, 32 nt, Human
guggaaaagcaguaccagagagccuccgaggc

SEQ ID NO: 477357 - RNA, 24 nt, Human
guggaaaagccuucaagaugacau

SEQ ID NO: 477358 - RNA, 21 nt, Human
guggaaaagccuucagcugga

SEQ ID NO: 477359 - RNA, 20 nt, Human
guggaaaagccuuuauugac

SEQ ID NO: 477360 - RNA, 22 nt, Human
guggaaaaggccaaaccauagg

SEQ ID NO: 477361 - RNA, 32 nt, Human
guggaaaaugaacugaaggaugccacccaggg

SEQ ID NO: 477362 - RNA, 32 nt, Human
guggaaaauggacugggcuacugagauauuuu

SEQ ID NO: 477363 - RNA, 32 nt, Human
guggaaaauguucuugaucauuugcaguuaag

SEQ ID NO: 477364 - RNA, 32 nt, Human
guggaaacauuuuaaguuuucucuccggacug

SEQ ID NO: 477365 - RNA, 32 nt, Human
guggaaaccucccagggauauuguucccacga

SEQ ID NO: 477366 - RNA, 21 nt, Human
guggaaacuaugcauuuucug

SEQ ID NO: 477367 - RNA, 32 nt, Human
guggaaagaaggacaaagggagagggaggugc

SEQ ID NO: 477368 - RNA, 32 nt, Human
guggaaagaguuaagagcaagauggaaugauu

SEQ ID NO: 477369 - RNA, 32 nt, Human
guggaaagcgugugagugagggagacaggaac

SEQ ID NO: 477370 - RNA, 32 nt, Human
guggaaaggaagagugagcgagcaaguuaagg

SEQ ID NO: 477371 - RNA, 32 nt, Human
guggaaaggccuucaaucggagugcacaucuu

SEQ ID NO: 477372 - RNA, 32 nt, Human
guggaaaggccuucauucgggccucacaccuu

SEQ ID NO: 477373 - RNA, 31 nt, Human
guggaaagggacuucuuuggguuuuccuuuu

SEQ ID NO: 477374 - RNA, 32 nt, Human
guggaaagucucucuccuuccucauaagacau

SEQ ID NO: 477375 - RNA, 32 nt, Human
guggaaauagccaugacccagggaaagccaaa

SEQ ID NO: 477376 - RNA, 32 nt, Human
guggaaauauagaaaaauauuuuauaauauaa

SEQ ID NO: 477377 - RNA, 32 nt, Human
guggaaaucaacccucuccugucugcccucug

SEQ ID NO: 477378 - RNA, 31 nt, Human
guggaaaugaagagucuuccaauccuacugu

SEQ ID NO: 477379 - RNA, 32 nt, Human
guggaaaugaaugaggcacagccguagagcug

SEQ ID NO: 477380 - RNA, 19 nt, Human
guggaaaugaggauggagg

SEQ ID NO: 477381 - RNA, 32 nt, Human
guggaaaugcauuugagauggugacagggcug

SEQ ID NO: 477382 - RNA, 32 nt, Human
guggaaauggccuggaggaugugagggcaccc

SEQ ID NO: 477383 - RNA, 32 nt, Human
guggaaauggggaagggggccuggagagggga

SEQ ID NO: 477384 - RNA, 32 nt, Human
guggaacaaauaccaacauccauccaaaauga

SEQ ID NO: 477385 - RNA, 32 nt, Human
guggaacaacagcaagucacccaucagauacc

SEQ ID NO: 477386 - RNA, 32 nt, Human
guggaacaacccaguaauaucagacucgaauu

SEQ ID NO: 477387 - RNA, 32 nt, Human
guggaacaacgauaauucacacugcuuuauga

SEQ ID NO: 477388 - RNA, 32 nt, Human
guggaacagccuucuauagagccuucugcaag

SEQ ID NO: 477389 - RNA, 25 nt, Human
guggaacaggaaggaugugcuuuaa

SEQ ID NO: 477390 - RNA, 32 nt, Human
guggaacaggcaugugacagaguggggagccu

SEQ ID NO: 477391 - RNA, 19 nt, Human
guggaacauaaagccgccu

SEQ ID NO: 477392 - RNA, 32 nt, Human
guggaacauuuaauaaaaugaggggaaaugga

SEQ ID NO: 477393 - RNA, 32 nt, Human
guggaaccaagccagggaugggcuggccauug

SEQ ID NO: 477394 - RNA, 19 nt, Human
guggaaccacacugcuuga

SEQ ID NO: 477395 - RNA, 32 nt, Human
guggaaccagaacaaggccccgacagggguag

SEQ ID NO: 477396 - RNA, 32 nt, Human
guggaaccagugucacaugccugugcaucucu

SEQ ID NO: 477397 - RNA, 32 nt, Human
guggaacccgccauggcccccaaccaauguac

SEQ ID NO: 477398 - RNA, 32 nt, Human
guggaacccugccucuacuaaaaacacacaca

SEQ ID NO: 477399 - RNA, 32 nt, Human
guggaaccgggcugccccugggggccuggacu

SEQ ID NO: 477400 - RNA, 32 nt, Human
guggaaccuccaugcuaccaugugcacaaacc

SEQ ID NO: 477401 - RNA, 32 nt, Human
guggaaccucugucucauccuccuggaaccuu

SEQ ID NO: 477402 - RNA, 19 nt, Human
guggaaccugguauggagg

SEQ ID NO: 477403 - RNA, 32 nt, Human
guggaacgaauucaucaauucauuucaucaac

SEQ ID NO: 477404 - RNA, 32 nt, Human
guggaacgaugccucuggagguggugguggag

SEQ ID NO: 477405 - RNA, 32 nt, Human
guggaacggggcggguuggcagaggaggucac

SEQ ID NO: 477406 - RNA, 32 nt, Human
guggaacggugccucccacugcagccucugcc

SEQ ID NO: 477407 - RNA, 19 nt, Human
guggaacuaccaucuuuua

SEQ ID NO: 477408 - RNA, 32 nt, Human
guggaacuucuuuaagcauucagugugcccac

SEQ ID NO: 477409 - RNA, 32 nt, Human
guggaagaaaaggggugugcagcuggagcguu

SEQ ID NO: 477410 - RNA, 21 nt, Human
guggaagaaaccaugggcagg

SEQ ID NO: 477411 - RNA, 32 nt, Human
guggaagaaaggaggcugucucugccuucucu

SEQ ID NO: 477412 - RNA, 32 nt, Human
guggaagaaaggcuguuaaaaugauuacaaau

SEQ ID NO: 477413 - RNA, 32 nt, Human
guggaagaacuucugaaaauugcagugggagc

SEQ ID NO: 477414 - RNA, 32 nt, Human
guggaagaagacagagagaaucaaugugagga

SEQ ID NO: 477415 - RNA, 32 nt, Human
guggaagaagcgaaggaggagaagaagaaggg

SEQ ID NO: 477416 - RNA, 32 nt, Human
guggaagaagugagggugcagcgugucagaca

SEQ ID NO: 477417 - RNA, 32 nt, Human
guggaagaauuucgugccauguggaaacuuuu

SEQ ID NO: 477418 - RNA, 32 nt, Human
guggaagacagcuuccuguacuggcggauucg

SEQ ID NO: 477419 - RNA, 22 nt, Human
guggaagaccccaugaugacau

SEQ ID NO: 477420 - RNA, 32 nt, Human
guggaagacucgggcuuugagcuccagcucag

SEQ ID NO: 477421 - RNA, 32 nt, Human
guggaagaggagaagagggaccuggaaggcau

SEQ ID NO: 477422 - RNA, 32 nt, Human
guggaagaggagaggguggaaggggaauaaga

SEQ ID NO: 477423 - RNA, 32 nt, Human
guggaagaggcugagguuguggaacacacuga

SEQ ID NO: 477424 - RNA, 32 nt, Human
guggaagauccagagucaacagaggcucguca

SEQ ID NO: 477425 - RNA, 32 nt, Human
guggaagauucaggagaaagaaaggagaggcu

SEQ ID NO: 477426 - RNA, 32 nt, Human
guggaagcaccggaaguccagggagggccaag

SEQ ID NO: 477427 - RNA, 32 nt, Human
guggaagcagaggcccugcccccaccccuucc

SEQ ID NO: 477428 - RNA, 32 nt, Human
guggaagcagauuggcugggcuucugucccag

SEQ ID NO: 477429 - RNA, 32 nt, Human
guggaagcagguguauugugggcaguuuuguc

SEQ ID NO: 477430 - RNA, 19 nt, Human
guggaagccuguaguccca

SEQ ID NO: 477431 - RNA, 32 nt, Human
guggaagccuuucugugccuugcccuuugccc

SEQ ID NO: 477432 - RNA, 22 nt, Human
guggaagcguccaaaccugcuu

SEQ ID NO: 477433 - RNA, 31 nt, Human
guggaagcuaaaggaacuugggcauucaggg

SEQ ID NO: 477434 - RNA, 32 nt, Human
guggaagcuguggugggcagagccccaaaaca

SEQ ID NO: 477435 - RNA, 32 nt, Human
guggaagcuucucaaggccucaccagaagaag

SEQ ID NO: 477436 - RNA, 32 nt, Human
guggaagcuuuguccuugcagucuucacagua

SEQ ID NO: 477437 - RNA, 32 nt, Human
guggaaggaaagcaggagagagacugaguggc

SEQ ID NO: 477438 - RNA, 32 nt, Human
guggaaggaagccacacacuggucagucauuu

SEQ ID NO: 477439 - RNA, 32 nt, Human
guggaaggaaggaggaaaggagaggggccucc

SEQ ID NO: 477440 - RNA, 31 nt, Human
guggaaggacacuucuuucuaucacccucuu

SEQ ID NO: 477441 - RNA, 32 nt, Human
guggaaggacagcaucaacaccuggcauggga

SEQ ID NO: 477442 - RNA, 22 nt, Human
guggaaggagaaaaggauggga

SEQ ID NO: 477443 - RNA, 32 nt, Human
guggaaggagaaaggggcuagcacuggaugga

SEQ ID NO: 477444 - RNA, 24 nt, Human
guggaaggagacccccagaugaca

SEQ ID NO: 477445 - RNA, 24 nt, Human
guggaaggagcacugggcuagggg

SEQ ID NO: 477446 - RNA, 32 nt, Human
guggaaggaggcggaggcgcaggaggaagggg

SEQ ID NO: 477447 - RNA, 24 nt, Human
guggaaggaucauuugagcccagg

SEQ ID NO: 477448 - RNA, 24 nt, Human
guggaaggaucgcuugagcccagg

SEQ ID NO: 477449 - RNA, 24 nt, Human
guggaaggauggcuuaagcucagg

SEQ ID NO: 477450 - RNA, 24 nt, Human
guggaaggauugcucgaggccagg

SEQ ID NO: 477451 - RNA, 24 nt, Human
guggaaggauugcuugaguccagg

SEQ ID NO: 477452 - RNA, 32 nt, Human
guggaaggcccaguagagcugcccuuccccag

SEQ ID NO: 477453 - RNA, 32 nt, Human
guggaaggccgaggcaggaggaucacuugagu

SEQ ID NO: 477454 - RNA, 32 nt, Human
guggaaggccggccacaaggaggaggccacca

SEQ ID NO: 477455 - RNA, 32 nt, Human
guggaaggccggccgcaaggaggaggccacca

SEQ ID NO: 477456 - RNA, 32 nt, Human
guggaaggcuugagcccaggaguuugagggug

SEQ ID NO: 477457 - RNA, 19 nt, Human
guggaagggacuaggagca

SEQ ID NO: 477458 - RNA, 22 nt, Human
guggaagggacuugccuuguuu

SEQ ID NO: 477459 - RNA, 23 nt, Human
guggaagggguucugagguggga

SEQ ID NO: 477460 - RNA, 22 nt, Human
guggaaggugacucccagucuc

SEQ ID NO: 477461 - RNA, 32 nt, Human
guggaaggugcugagggggcccugaggcagga

SEQ ID NO: 477462 - RNA, 23 nt, Human
guggaaggugguggcuccugcuc

SEQ ID NO: 477463 - RNA, 20 nt, Human
guggaaggugucgccugcuc

SEQ ID NO: 477464 - RNA, 32 nt, Human
guggaaguccuccagggauccgcuacaucccc

SEQ ID NO: 477465 - RNA, 32 nt, Human
guggaagugccuguagucccagcuacucugga

SEQ ID NO: 477466 - RNA, 32 nt, Human
guggaaguggauguggaggagugaccagacca

SEQ ID NO: 477467 - RNA, 32 nt, Human
guggaauaagagaauuuugagauggaaaugau

SEQ ID NO: 477468 - RNA, 32 nt, Human
guggaaucacuggaucguaggcccagaugucu

SEQ ID NO: 477469 - RNA, 19 nt, Human
guggaaucagaaagagcaa

SEQ ID NO: 477470 - RNA, 18 nt, Human
guggaaucagcaggcagg

SEQ ID NO: 477471 - RNA, 32 nt, Human
guggaauccuaaggccccuuccucauucucuu

SEQ ID NO: 477472 - RNA, 21 nt, Human
guggaaucucucgagugcaaa

SEQ ID NO: 477473 - RNA, 32 nt, Human
guggaaugaauccauacuucugccucacuucg

SEQ ID NO: 477474 - RNA, 32 nt, Human
guggaaugacaguaaccaaaucugugaaaaua

SEQ ID NO: 477475 - RNA, 32 nt, Human
guggaaugagccuggaucaggagaaguaugcu

SEQ ID NO: 477476 - RNA, 23 nt, Human
guggaaugcgggggagcaggcag

SEQ ID NO: 477477 - RNA, 32 nt, Human
guggaaugcuaaaaauacauuaauuucuaaaa

SEQ ID NO: 477478 - RNA, 18 nt, Human
guggaaugucucucagca

SEQ ID NO: 477479 - RNA, 32 nt, Human
guggaaugugaggggagguggaggagauggcg

SEQ ID NO: 477480 - RNA, 32 nt, Human
guggaauucagucuacuggauuuaagggaaug

SEQ ID NO: 477481 - RNA, 32 nt, Human
guggaauucuaaagugaagguacuguggauuc

SEQ ID NO: 477482 - RNA, 32 nt, Human
guggaauucugcuugauaaagcugcuggguuu

SEQ ID NO: 477483 - RNA, 32 nt, Human
guggaauuguccugagucauugcuuugggcug

SEQ ID NO: 477484 - RNA, 32 nt, Human
guggaauuuccagauuuccugagagcuuggua

SEQ ID NO: 477485 - RNA, 32 nt, Human
guggacaaauugacuucuccuggguggaucuu

SEQ ID NO: 477486 - RNA, 22 nt, Human
guggacaaccuggacagccugc

SEQ ID NO: 477487 - RNA, 32 nt, Human
guggacaagaagccugagaagcugcuggagga

SEQ ID NO: 477488 - RNA, 32 nt, Human
guggacaagacaccuccaggagcccagcucac

SEQ ID NO: 477489 - RNA, 32 nt, Human
guggacaagguggaggagagagaauuccuugg

SEQ ID NO: 477490 - RNA, 32 nt, Human
guggacaaguagaaggugagcaaggugaagag

SEQ ID NO: 477491 - RNA, 32 nt, Human
guggacaaguucaugcaggaccuacagugacc

SEQ ID NO: 477492 - RNA, 32 nt, Human
guggacaauucgaacucugaccugagagcaag

SEQ ID NO: 477493 - RNA, 32 nt, Human
guggacacagcacuccaacuuacuccagggcu

SEQ ID NO: 477494 - RNA, 31 nt, Human
guggacaccugugccaaacucacuuaaaacg

SEQ ID NO: 477495 - RNA, 31 nt, Human
guggacacguuggagauuaccaaagccgaac

SEQ ID NO: 477496 - RNA, 32 nt, Human
guggacagaaggaagagaggagagggugagug

SEQ ID NO: 477497 - RNA, 32 nt, Human
guggacagacccaguagacaauggaagcccag

SEQ ID NO: 477498 - RNA, 20 nt, Human
guggacagacccuguccaca

SEQ ID NO: 477499 - RNA, 32 nt, Human
guggacagaggagggagccagcuaagccaaau

SEQ ID NO: 477500 - RNA, 20 nt, Human
guggacagcagggaccugcg

SEQ ID NO: 477501 - RNA, 32 nt, Human
guggacagcaugguccucacacccagcucccu

SEQ ID NO: 477502 - RNA, 32 nt, Human
guggacagcccaccccuccgcagccccauccc

SEQ ID NO: 477503 - RNA, 32 nt, Human
guggacagcccaucccagcccucagaggcuca

SEQ ID NO: 477504 - RNA, 32 nt, Human
guggacagccugugggagacucgcacgcccac

SEQ ID NO: 477505 - RNA, 32 nt, Human
guggacaggaaggcacaggaguuugucuggga

SEQ ID NO: 477506 - RNA, 32 nt, Human
guggacaggagaaggaacgccuuccaggaacc

SEQ ID NO: 477507 - RNA, 32 nt, Human
guggacaggaucaggauucccuugaaagccca

SEQ ID NO: 477508 - RNA, 18 nt, Human
guggacaggcaucagccu

SEQ ID NO: 477509 - RNA, 32 nt, Human
guggacagggggaaaaaucaagaggcaaaaag

SEQ ID NO: 477510 - RNA, 32 nt, Human
guggacaggguuucaccauguuggccaggcug

SEQ ID NO: 477511 - RNA, 24 nt, Human
guggacagucaugagucuagagga

SEQ ID NO: 477512 - RNA, 32 nt, Human
guggacaguccugggagaaccucaggcuuccu

SEQ ID NO: 477513 - RNA, 32 nt, Human
guggacagugauuugcguggggagacacagug

SEQ ID NO: 477514 - RNA, 32 nt, Human
guggacauagagagaggggaaggguuggaaag

SEQ ID NO: 477515 - RNA, 32 nt, Human
guggacauagcauguacaggcaguuuucuguc

SEQ ID NO: 477516 - RNA, 32 nt, Human
guggacaucacuguugacccuaccucacgugc

SEQ ID NO: 477517 - RNA, 32 nt, Human
guggacaucaugggagaggaugaggauggacu

SEQ ID NO: 477518 - RNA, 32 nt, Human
guggacaugccaucccuggucuccuuagacug

SEQ ID NO: 477519 - RNA, 32 nt, Human
guggacaugguggcgagcaccuguaaucccag

SEQ ID NO: 477520 - RNA, 32 nt, Human
guggacauuaagcaucuucuagaaacucuucu

SEQ ID NO: 477521 - RNA, 32 nt, Human
guggacauucagcagagugcgaguggagagag

SEQ ID NO: 477522 - RNA, 32 nt, Human
guggacauuugagaucagagagcaccacaggg

SEQ ID NO: 477523 - RNA, 32 nt, Human
guggaccaacuugcucuuaaucacagggcaag

SEQ ID NO: 477524 - RNA, 32 nt, Human
guggaccacugcuccugauuucccaggucuua

SEQ ID NO: 477525 - RNA, 32 nt, Human
guggaccagaaacaaacguuuuuccaaaggau

SEQ ID NO: 477526 - RNA, 19 nt, Human
guggaccaggcaucuccug

SEQ ID NO: 477527 - RNA, 32 nt, Human
guggaccauccuaguuuauucucccauaaguc

SEQ ID NO: 477528 - RNA, 32 nt, Human
guggaccauuccacuuuuuagcuccuauugau

SEQ ID NO: 477529 - RNA, 32 nt, Human
guggacccaggaggcagagcuugcagugagcc

SEQ ID NO: 477530 - RNA, 32 nt, Human
guggacccaucccgcgggugaccggugccugu

SEQ ID NO: 477531 - RNA, 32 nt, Human
guggacccaucuuccuccucugccaccccgau

SEQ ID NO: 477532 - RNA, 19 nt, Human
guggacccggucucccaca

SEQ ID NO: 477533 - RNA, 21 nt, Human
guggacccuaccagccugcgg

SEQ ID NO: 477534 - RNA, 32 nt, Human
guggaccgagagaagaaggggcccagggaagc

SEQ ID NO: 477535 - RNA, 32 nt, Human
guggaccgcagcgcgcagccacaugcccuggc

SEQ ID NO: 477536 - RNA, 32 nt, Human
guggaccucacuguagccuggucauggcuucc

SEQ ID NO: 477537 - RNA, 32 nt, Human
guggaccuccaggaaugccucccuuugcaucu

SEQ ID NO: 477538 - RNA, 32 nt, Human
guggaccugcuguuggccucuggggcugucau

SEQ ID NO: 477539 - RNA, 32 nt, Human
guggaccugggaacccucaggucucuagguga

SEQ ID NO: 477540 - RNA, 32 nt, Human
guggaccugugucugugucuguccugagaacu

SEQ ID NO: 477541 - RNA, 32 nt, Human
guggaccuuugugcuccuggggcagagccucc

SEQ ID NO: 477542 - RNA, 32 nt, Human
guggacgacgcuggcggcccagccugggcagg

SEQ ID NO: 477543 - RNA, 32 nt, Human
guggacgacgcuugcggcccagccugggcagg

SEQ ID NO: 477544 - RNA, 32 nt, Human
guggacgagccuguggagugggagacaccuga

SEQ ID NO: 477545 - RNA, 32 nt, Human
guggacgaggagcacugugacccccugggccg

SEQ ID NO: 477546 - RNA, 32 nt, Human
guggacgcaggcggaucucugaagagcugggu

SEQ ID NO: 477547 - RNA, 32 nt, Human
guggacgccaggguucugggaacgcgcuggca

SEQ ID NO: 477548 - RNA, 32 nt, Human
guggacgccgcucuuccucuccccacaucucc

SEQ ID NO: 477549 - RNA, 32 nt, Human
guggacgccguugguccugccagggauggaga

SEQ ID NO: 477550 - RNA, 32 nt, Human
guggacgccguuuguccugccagggcaggaug

SEQ ID NO: 477551 - RNA, 32 nt, Human
guggacgccuguaaucccagcuacuugggagg

SEQ ID NO: 477552 - RNA, 32 nt, Human
guggacgcgcccugggcgcacgcccaggcagc

SEQ ID NO: 477553 - RNA, 32 nt, Human
guggacgcucaggggcuggaggcucagcggaa

SEQ ID NO: 477554 - RNA, 32 nt, Human
guggacgcugggagguggaugcugcagugagc

SEQ ID NO: 477555 - RNA, 20 nt, Human
guggacggagaucacccgcg

SEQ ID NO: 477556 - RNA, 32 nt, Human
guggacggcgugccucucccaggagccuuccc

SEQ ID NO: 477557 - RNA, 32 nt, Human
guggacgggcguuuucacagggcucugagugg

SEQ ID NO: 477558 - RNA, 19 nt, Human
guggacggggcgucuccua

SEQ ID NO: 477559 - RNA, 32 nt, Human
guggacgggggaggaggaaggggacagaggga

SEQ ID NO: 477560 - RNA, 21 nt, Human
guggacgguuggucuugaaga

SEQ ID NO: 477561 - RNA, 32 nt, Human
guggacguuguuuucugccuucccaggauucu

SEQ ID NO: 477562 - RNA, 32 nt, Human
guggacuaaugcaagaaaauuauuaccagagu

SEQ ID NO: 477563 - RNA, 32 nt, Human
guggacuaauggaagcuacagagcagggaagg

SEQ ID NO: 477564 - RNA, 32 nt, Human
guggacuauuuguacacauacacacaugcaca

SEQ ID NO: 477565 - RNA, 32 nt, Human
guggacuccagaaagccugaaaagcuaucaug

SEQ ID NO: 477566 - RNA, 32 nt, Human
guggacuccagguucaggagggagaagagcaa

SEQ ID NO: 477567 - RNA, 32 nt, Human
guggacuccauuuugaccaguuaacccauucu

SEQ ID NO: 477568 - RNA, 32 nt, Human
guggacucgagucccuggagcaggcagugugg

SEQ ID NO: 477569 - RNA, 21 nt, Human
guggacucgccuguaaucuca

SEQ ID NO: 477570 - RNA, 16 nt, Human
guggacucuacagagu

SEQ ID NO: 477571 - RNA, 32 nt, Human
guggacucuacagagugcuugaccucaacaca

SEQ ID NO: 477572 - RNA, 32 nt, Human
guggacucugcugcaaaauggugcuucaggcu

SEQ ID NO: 477573 - RNA, 32 nt, Human
guggacucuggacuuggggaccaccuguuauc

SEQ ID NO: 477574 - RNA, 32 nt, Human
guggacucugggauguguagccuucuccccaa

SEQ ID NO: 477575 - RNA, 32 nt, Human
guggacugauuugcuggaguucagggaacuac

SEQ ID NO: 477576 - RNA, 32 nt, Human
guggacugcagcccuggggguugcaggcugcg

SEQ ID NO: 477577 - RNA, 32 nt, Human
guggacugcaggggaaagagcagugauuuggg

SEQ ID NO: 477578 - RNA, 32 nt, Human
guggacugccacugcuggcugccuccucucca

SEQ ID NO: 477579 - RNA, 32 nt, Human
guggacugcgccccuggcugggaggaaggacu

SEQ ID NO: 477580 - RNA, 32 nt, Human
guggacugcuaaaaauaucacaaauggcaaug

SEQ ID NO: 477581 - RNA, 32 nt, Human
guggacuggagaccaggauucaugcuggucug

SEQ ID NO: 477582 - RNA, 32 nt, Human
guggacugugugucccagcucuggagcaagcu

SEQ ID NO: 477583 - RNA, 21 nt, Human
guggacuuaacuuuuaaggua

SEQ ID NO: 477584 - RNA, 32 nt, Human
guggacuuccaaagugcugggauuacaggugu

SEQ ID NO: 477585 - RNA, 19 nt, Human
guggacuuccugccagggc

SEQ ID NO: 477586 - RNA, 32 nt, Human
guggacuucggaaucccaggaggcaggggccg

SEQ ID NO: 477587 - RNA, 18 nt, Human
guggacuucuucaggacu

SEQ ID NO: 477588 - RNA, 32 nt, Human
guggacuucuucugccccuccuccuuuucugu

SEQ ID NO: 477589 - RNA, 19 nt, Human
guggacuugaucauggacu

SEQ ID NO: 477590 - RNA, 20 nt, Human
guggagaaaauuuaucaccu

SEQ ID NO: 477591 - RNA, 32 nt, Human
guggagaaacuagagcuucaguucauccaccu

SEQ ID NO: 477592 - RNA, 32 nt, Human
guggagaaacugcagccccacuucuguuuccc

SEQ ID NO: 477593 - RNA, 19 nt, Human
guggagaaagcgguccucu

SEQ ID NO: 477594 - RNA, 32 nt, Human
guggagaacagcgcggaggcaccccacgagau

SEQ ID NO: 477595 - RNA, 23 nt, Human
guggagaacuccauguagcuucu

SEQ ID NO: 477596 - RNA, 32 nt, Human
guggagaagagggagggagcgagagcgagaga

SEQ ID NO: 477597 - RNA, 32 nt, Human
guggagaagcggcggcacaagcgcggcggcgg

SEQ ID NO: 477598 - RNA, 32 nt, Human
guggagaaggagagagaaauaugugagguagu

SEQ ID NO: 477599 - RNA, 32 nt, Human
guggagaaggagcaaugcugaggggugaggcc

SEQ ID NO: 477600 - RNA, 32 nt, Human
guggagaagguagaggauggaguugcagacuc

SEQ ID NO: 477601 - RNA, 18 nt, Human
guggagaaucucucagca

SEQ ID NO: 477602 - RNA, 32 nt, Human
guggagaaugucccucguuuccauccuguuuc

SEQ ID NO: 477603 - RNA, 32 nt, Human
guggagaauugggacaggcagagccaggaugc

SEQ ID NO: 477604 - RNA, 32 nt, Human
guggagacuguggagcugggcagcuaugagaa

SEQ ID NO: 477605 - RNA, 32 nt, Human
guggagagacacaccugcuccaauuuccccac

SEQ ID NO: 477606 - RNA, 32 nt, Human
guggagagacagguauuccucacuuuguggca

SEQ ID NO: 477607 - RNA, 32 nt, Human
guggagagagcaggcaggcccacugcugcuga

SEQ ID NO: 477608 - RNA, 32 nt, Human
guggagagagggacagaggcuggagaaggaug

SEQ ID NO: 477609 - RNA, 32 nt, Human
guggagagcauaguaaauuuucagagaacuug

SEQ ID NO: 477610 - RNA, 32 nt, Human
guggagagccugccuuuggguuuaguucccga

SEQ ID NO: 477611 - RNA, 19 nt, Human
guggagagcucuuugccca

SEQ ID NO: 477612 - RNA, 32 nt, Human
guggagagcugggagagcgcagccagcucgcu

SEQ ID NO: 477613 - RNA, 32 nt, Human
guggagaggagagaguggagggagaucaugcc

SEQ ID NO: 477614 - RNA, 32 nt, Human
guggagaggaggaggaggaugaagaagguuau

SEQ ID NO: 477615 - RNA, 32 nt, Human
guggagaggaugagguuugaggagcagaggga

SEQ ID NO: 477616 - RNA, 32 nt, Human
guggagaggcccgcucucacaccgggucgggc

SEQ ID NO: 477617 - RNA, 32 nt, Human
guggagagggagaggcuggaggccugggcaga

SEQ ID NO: 477618 - RNA, 32 nt, Human
guggagagggagaugugugagcauccugcaag

SEQ ID NO: 477619 - RNA, 22 nt, Human
guggagaggggaucagcccagg

SEQ ID NO: 477620 - RNA, 32 nt, Human
guggagagggugggugcaggaggcagacccuc

SEQ ID NO: 477621 - RNA, 32 nt, Human
guggagaguagcacuggcagcccugccuggac

SEQ ID NO: 477622 - RNA, 32 nt, Human
guggagagucauucauuuagcacaagcagcug

SEQ ID NO: 477623 - RNA, 32 nt, Human
guggagaguggagagacaagaagugugagcua

SEQ ID NO: 477624 - RNA, 32 nt, Human
guggagaguuggggaccaggguguuugaggcg

SEQ ID NO: 477625 - RNA, 32 nt, Human
guggagauauguggaacuucuccaacccuguu

SEQ ID NO: 477626 - RNA, 32 nt, Human
guggagaucacgccacugcaacuccagcuugg

SEQ ID NO: 477627 - RNA, 32 nt, Human
guggagaugacagcaaccacacaagguuaagg

SEQ ID NO: 477628 - RNA, 31 nt, Human
guggagaugcccaggaaucugcuuuauucuc

SEQ ID NO: 477629 - RNA, 32 nt, Human
guggagauggaaggagaaacagcauccgguca

SEQ ID NO: 477630 - RNA, 31 nt, Human
guggagauggcaguguaucuaccucacaaag

SEQ ID NO: 477631 - RNA, 32 nt, Human
guggagauggccuguagguagcaaaugcagga

SEQ ID NO: 477632 - RNA, 32 nt, Human
guggagauggcggcuggagcaguguccgaggu

SEQ ID NO: 477633 - RNA, 32 nt, Human
guggagaugggaagacagggaaaggaaggcag

SEQ ID NO: 477634 - RNA, 32 nt, Human
guggagaugggggcgggggugguggugaagag

SEQ ID NO: 477635 - RNA, 19 nt, Human
guggagcaaaaaggcaaga

SEQ ID NO: 477636 - RNA, 32 nt, Human
guggagcaaguuggacugcauagggacccacc

SEQ ID NO: 477637 - RNA, 32 nt, Human
guggagcaccuaguccaaaagggaagcagaaa

SEQ ID NO: 477638 - RNA, 18 nt, Human
guggagcagaaggcagga

SEQ ID NO: 477639 - RNA, 32 nt, Human
guggagcagcacaucagcagggacuggucuag

SEQ ID NO: 477640 - RNA, 32 nt, Human
guggagcagcagccacugcacaggaggaggug

SEQ ID NO: 477641 - RNA, 32 nt, Human
guggagcagcagugucagcaucagggcggaag

SEQ ID NO: 477642 - RNA, 32 nt, Human
guggagcagcuggggcugggggcacagccugg

SEQ ID NO: 477643 - RNA, 32 nt, Human
guggagcagggcucccucugugcacuguguac

SEQ ID NO: 477644 - RNA, 25 nt, Human
guggagcagggcuuagcaggagcag

SEQ ID NO: 477645 - RNA, 32 nt, Human
guggagcaguuacugucaaaaguuuucugucu

SEQ ID NO: 477646 - RNA, 32 nt, Human
guggagccaagauuugaacccagcuagaaugu

SEQ ID NO: 477647 - RNA, 32 nt, Human
guggagccaccugaacagaagaugaccaucau

SEQ ID NO: 477648 - RNA, 19 nt, Human
guggagccagcacagcgga

SEQ ID NO: 477649 - RNA, 32 nt, Human
guggagccagcagaaccacaggagagugcccu

SEQ ID NO: 477650 - RNA, 32 nt, Human
guggagccaggcagccuccaccucacaagacc

SEQ ID NO: 477651 - RNA, 32 nt, Human
guggagccaugguggugcguccuuuacucaac

SEQ ID NO: 477652 - RNA, 32 nt, Human
guggagcccagggagagggagcgcgagagagg

SEQ ID NO: 477653 - RNA, 32 nt, Human
guggagcccgggagguaauugggggugaggaa

SEQ ID NO: 477654 - RNA, 32 nt, Human
guggagcccuggaggccugagccggcccccgg

SEQ ID NO: 477655 - RNA, 32 nt, Human
guggagccgggcuggggguggggaagggaggc

SEQ ID NO: 477656 - RNA, 18 nt, Human
guggagccugucccuaca

SEQ ID NO: 477657 - RNA, 32 nt, Human
guggagcgacgucacugacccugucuuugucc

SEQ ID NO: 477658 - RNA, 32 nt, Human
guggagcgggagaaggagcgggaccccgagca

SEQ ID NO: 477659 - RNA, 32 nt, Human
guggagcgucggacauggaugggugaacugac

SEQ ID NO: 477660 - RNA, 32 nt, Human
guggagcucagcaacaaggcugcacagcucaa

SEQ ID NO: 477661 - RNA, 32 nt, Human
guggagcuccccugcacccaccagggagcuug

SEQ ID NO: 477662 - RNA, 32 nt, Human
guggagcucucauuggcucguugcaugugagu

SEQ ID NO: 477663 - RNA, 32 nt, Human
guggagcugagagcucaggucugggcucagcc

SEQ ID NO: 477664 - RNA, 32 nt, Human
guggagcugagcacugccuagccugggccaga

SEQ ID NO: 477665 - RNA, 32 nt, Human
guggagcugagcagagaggccuaaccaggauc

SEQ ID NO: 477666 - RNA, 32 nt, Human
guggagcugcuagaaagauuccuuuggggaga

SEQ ID NO: 477667 - RNA, 32 nt, Human
guggagcuggagugugaggagggcgagcuguc

SEQ ID NO: 477668 - RNA, 32 nt, Human
guggagcuugccaagguccguggcucccaggg

SEQ ID NO: 477669 - RNA, 32 nt, Human
guggaggaaagccaacauaaugaccgagcccc

SEQ ID NO: 477670 - RNA, 32 nt, Human
guggaggaaaggaggugaauucaucugcuagc

SEQ ID NO: 477671 - RNA, 32 nt, Human
guggaggaagaaggaaggagaggcuuggaaag

SEQ ID NO: 477672 - RNA, 32 nt, Human
guggaggaagccagcuugcagagagagcaaga

SEQ ID NO: 477673 - RNA, 32 nt, Human
guggaggaagccaggaggaggguggcuugcuu

SEQ ID NO: 477674 - RNA, 32 nt, Human
guggaggaagcugaggcucagagagguuaagc

SEQ ID NO: 477675 - RNA, 32 nt, Human
guggaggaaggagcaggugcugccugugacuc

SEQ ID NO: 477676 - RNA, 32 nt, Human
guggaggaauacacauacacacacaaacauac

SEQ ID NO: 477677 - RNA, 32 nt, Human
guggaggacaugccgggacugaggcagccacc

SEQ ID NO: 477678 - RNA, 32 nt, Human
guggaggaccugcccuacacacucagcauggu

SEQ ID NO: 477679 - RNA, 32 nt, Human
guggaggacgagguaucucagcagcaauguca

SEQ ID NO: 477680 - RNA, 32 nt, Human
guggaggacucagccuggccucugccuggccu

SEQ ID NO: 477681 - RNA, 32 nt, Human
guggaggacuccugccuuuccuguuuagacac

SEQ ID NO: 477682 - RNA, 31 nt, Human
guggaggagacgucucccaugaggccaaggc

SEQ ID NO: 477683 - RNA, 32 nt, Human
guggaggagaggcgggguaauggggaagcuga

SEQ ID NO: 477684 - RNA, 32 nt, Human
guggaggagauggugacagccggcgcuacagc

SEQ ID NO: 477685 - RNA, 32 nt, Human
guggaggaggaagaggaggaggaagaggacuu

SEQ ID NO: 477686 - RNA, 32 nt, Human
guggaggaggaaggaggaucacuguggaaauc

SEQ ID NO: 477687 - RNA, 32 nt, Human
guggaggaggaggaggaagagguggaggagga

SEQ ID NO: 477688 - RNA, 21 nt, Human
guggaggaggaggaggagccu

SEQ ID NO: 477689 - RNA, 32 nt, Human
guggaggaggaggaggaggaggaaggcaaagc

SEQ ID NO: 477690 - RNA, 32 nt, Human
guggaggaggaggaggaggaggaggagguggc

SEQ ID NO: 477691 - RNA, 32 nt, Human
guggaggaggaggaggaggaggugguggagga

SEQ ID NO: 477692 - RNA, 32 nt, Human
guggaggaggcagugggggcagcagcagccuc

SEQ ID NO: 477693 - RNA, 32 nt, Human
guggaggaggccccucggucagggagcggccu

SEQ ID NO: 477694 - RNA, 32 nt, Human
guggaggaggcgcuggagcugaaggaauggac

SEQ ID NO: 477695 - RNA, 32 nt, Human
guggaggagggaggggaggagcaggugggcug

SEQ ID NO: 477696 - RNA, 32 nt, Human
guggaggaggggcacggggccuccgagcucca

SEQ ID NO: 477697 - RNA, 32 nt, Human
guggaggagguggcaggccucggcggguaacc

SEQ ID NO: 477698 - RNA, 32 nt, Human
guggaggagguggugaccaccaccgcuccucc

SEQ ID NO: 477699 - RNA, 31 nt, Human
guggaggagucagucgugguuggagguucau

SEQ ID NO: 477700 - RNA, 32 nt, Human
guggaggcaaagcauucuuucugugacuauuu

SEQ ID NO: 477701 - RNA, 32 nt, Human
guggaggcagcagccuggggcagggacugugc

SEQ ID NO: 477702 - RNA, 32 nt, Human
guggaggcagugagcugagaucgugccacugu

SEQ ID NO: 477703 - RNA, 32 nt, Human
guggaggcagugucauuugcucugccuaauua

SEQ ID NO: 477704 - RNA, 32 nt, Human
guggaggcaugcaggggagacgacucagggau

SEQ ID NO: 477705 - RNA, 32 nt, Human
guggaggccaggaagguggagaagccugggug

SEQ ID NO: 477706 - RNA, 32 nt, Human
guggaggccaggcuggggugggguguggcagg

SEQ ID NO: 477707 - RNA, 32 nt, Human
guggaggccccaggcugcuagcacagguggaa

SEQ ID NO: 477708 - RNA, 32 nt, Human
guggaggcccccucccugucuggaccccggcc

SEQ ID NO: 477709 - RNA, 32 nt, Human
guggaggccuccuucccacagcuccugguuua

SEQ ID NO: 477710 - RNA, 32 nt, Human
guggaggcgacggagcagggggccaguggggc

SEQ ID NO: 477711 - RNA, 23 nt, Human
guggaggcgccagcugccuguuc

SEQ ID NO: 477712 - RNA, 16 nt, Human
guggaggcgcgcgagg

SEQ ID NO: 477713 - RNA, 32 nt, Human
guggaggcgcugucugucccucugucccucug

SEQ ID NO: 477714 - RNA, 32 nt, Human
guggaggcucaaguuuucugcucacuugguga

SEQ ID NO: 477715 - RNA, 22 nt, Human
guggaggcucaugccuguaauc

SEQ ID NO: 477716 - RNA, 32 nt, Human
guggaggcuccaggcugggagaagguggaagg

SEQ ID NO: 477717 - RNA, 32 nt, Human
guggaggcuccucugugagcucuaccugccuc

SEQ ID NO: 477718 - RNA, 32 nt, Human
guggaggcucuuccuuugaucucagaaaggau

SEQ ID NO: 477719 - RNA, 32 nt, Human
guggaggcugaggaggcggcggcggagaucug

SEQ ID NO: 477720 - RNA, 32 nt, Human
guggaggcugcuggcccugccaucuguaagaa

SEQ ID NO: 477721 - RNA, 32 nt, Human
guggaggcugggccaccauggcagaccuucca

SEQ ID NO: 477722 - RNA, 32 nt, Human
guggaggcugugagcccgcagccuggaauucu

SEQ ID NO: 477723 - RNA, 20 nt, Human
guggaggcugugcugcagcu

SEQ ID NO: 477724 - RNA, 32 nt, Human
guggaggcuucaucugaaagccaagaaaagag

SEQ ID NO: 477725 - RNA, 32 nt, Human
guggaggcuugaugaggaggugguggccugug

SEQ ID NO: 477726 - RNA, 32 nt, Human
guggagggaacagcaggugcugggggcaggga

SEQ ID NO: 477727 - RNA, 32 nt, Human
guggagggaagguggugccauugaaaggcacu

SEQ ID NO: 477728 - RNA, 32 nt, Human
guggagggagagaggacuuaagucagauggac

SEQ ID NO: 477729 - RNA, 32 nt, Human
guggagggagcagcuccccacucagcccuggg

SEQ ID NO: 477730 - RNA, 32 nt, Human
guggagggaggaacuuuggcacuagcccuugg

SEQ ID NO: 477731 - RNA, 22 nt, Human
guggagggaggaagggcuggga

SEQ ID NO: 477732 - RNA, 32 nt, Human
guggagggaggcaaaggccaggcugaggauca

SEQ ID NO: 477733 - RNA, 32 nt, Human
guggagggagggagggaggggagcaugguguc

SEQ ID NO: 477734 - RNA, 32 nt, Human
guggagggagggccccuugcucuccagcaaaa

SEQ ID NO: 477735 - RNA, 32 nt, Human
guggagggaggugcuuggggaggcagagguua

SEQ ID NO: 477736 - RNA, 32 nt, Human
guggagggagucagggucugucuggaagcauc

SEQ ID NO: 477737 - RNA, 23 nt, Human
guggagggaguucccgcuugcuc

SEQ ID NO: 477738 - RNA, 32 nt, Human
guggagggcagaggagaggggacaagacaggg

SEQ ID NO: 477739 - RNA, 21 nt, Human
guggagggccagcuuuuguuc

SEQ ID NO: 477740 - RNA, 20 nt, Human
guggagggcccugcgccugc

SEQ ID NO: 477741 - RNA, 32 nt, Human
guggagggccucgccauguccugcugcccgac

SEQ ID NO: 477742 - RNA, 24 nt, Human
guggagggccugacuguccugcuc

SEQ ID NO: 477743 - RNA, 32 nt, Human
guggagggccuggaugaugaggaggaggauga

SEQ ID NO: 477744 - RNA, 32 nt, Human
guggagggcgaacggcugcaggcuccagacuu

SEQ ID NO: 477745 - RNA, 32 nt, Human
guggagggcguagggugggggcagugaggaau

SEQ ID NO: 477746 - RNA, 32 nt, Human
guggagggcugcagagccugcagggugaccug

SEQ ID NO: 477747 - RNA, 32 nt, Human
guggaggggaaagggauagaaagcggauagaa

SEQ ID NO: 477748 - RNA, 32 nt, Human
guggaggggaaaguaggaggccuguacaagaa

SEQ ID NO: 477749 - RNA, 23 nt, Human
guggaggggagcggagaccugau

SEQ ID NO: 477750 - RNA, 32 nt, Human
guggaggggaggccaguguacauguaaaugcc

SEQ ID NO: 477751 - RNA, 32 nt, Human
guggaggggcagccugugccugccuuuguguc

SEQ ID NO: 477752 - RNA, 32 nt, Human
guggaggggcaugccuguggucucagcuauuc

SEQ ID NO: 477753 - RNA, 32 nt, Human
guggaggggccaccucagcagguggguucuga

SEQ ID NO: 477754 - RNA, 32 nt, Human
guggaggggcccaggcucugagcuccacaggu

SEQ ID NO: 477755 - RNA, 32 nt, Human
guggaggggcgacaauggagggaaauccaugg

SEQ ID NO: 477756 - RNA, 32 nt, Human
guggaggggcuggggguacacacagcucagga

SEQ ID NO: 477757 - RNA, 32 nt, Human
guggaggggcugucucuggacauaucaucccu

SEQ ID NO: 477758 - RNA, 18 nt, Human
guggagggggaagaucug

SEQ ID NO: 477759 - RNA, 32 nt, Human
guggagggggauaaguggggacuggggacaug

SEQ ID NO: 477760 - RNA, 18 nt, Human
guggagggggcaggggag

SEQ ID NO: 477761 - RNA, 23 nt, Human
guggagggggugaaagugaggga

SEQ ID NO: 477762 - RNA, 32 nt, Human
guggaggggucaacaccaaggugguguucgug

SEQ ID NO: 477763 - RNA, 22 nt, Human
guggagggugccuguaauccca

SEQ ID NO: 477764 - RNA, 32 nt, Human
guggaggguggaggagggagcaggaacagccc

SEQ ID NO: 477765 - RNA, 32 nt, Human
guggagguagguguggggaagguuggagaaga

SEQ ID NO: 477766 - RNA, 32 nt, Human
guggaggucacugcacuaccacccaccucugg

SEQ ID NO: 477767 - RNA, 32 nt, Human
guggaggucgagguggggagggggaggcgggc

SEQ ID NO: 477768 - RNA, 32 nt, Human
guggaggugcgcaguggacucacagcugacuc

SEQ ID NO: 477769 - RNA, 21 nt, Human
guggagguggacgacaugaug

SEQ ID NO: 477770 - RNA, 32 nt, Human
guggagguggacugcauagcccagagcccuuc

SEQ ID NO: 477771 - RNA, 32 nt, Human
guggagguggcggagagcaagguggcagccgg

SEQ ID NO: 477772 - RNA, 32 nt, Human
guggagguggucugggugagucugaaggccuc

SEQ ID NO: 477773 - RNA, 32 nt, Human
guggaggugguugugggugcaggugugugcag

SEQ ID NO: 477774 - RNA, 32 nt, Human
guggagguucucaaacaacuccuuaagcuccu

SEQ ID NO: 477775 - RNA, 32 nt, Human
guggagguucucucucuuuuaggcuugcagua

SEQ ID NO: 477776 - RNA, 32 nt, Human
guggagguucucugcccaccucaggcacugga

SEQ ID NO: 477777 - RNA, 23 nt, Human
guggagguugcagugagcuggga

SEQ ID NO: 477778 - RNA, 32 nt, Human
guggagguuguaccacugcacuccagccuggc

SEQ ID NO: 477779 - RNA, 23 nt, Human
guggagguuucagugagcuggga

SEQ ID NO: 477780 - RNA, 32 nt, Human
guggagguuuuacauuuguuugcacaucucag

SEQ ID NO: 477781 - RNA, 32 nt, Human
guggaguaagaugcccucccacuuuuaucagu

SEQ ID NO: 477782 - RNA, 32 nt, Human
guggaguacagaaccaggagccucuuccauac

SEQ ID NO: 477783 - RNA, 32 nt, Human
guggaguaccuuccuuucucaagucucgagau

SEQ ID NO: 477784 - RNA, 32 nt, Human
guggaguagggaggaggcaaggagggggagaa

SEQ ID NO: 477785 - RNA, 32 nt, Human
guggaguauaggcugcaucaucuuugaauacu

SEQ ID NO: 477786 - RNA, 32 nt, Human
guggaguaucuggcugggcagcauugccagca

SEQ ID NO: 477787 - RNA, 32 nt, Human
guggaguauggggcugucuccaggggagaggu

SEQ ID NO: 477788 - RNA, 32 nt, Human
guggaguccacagucccucccugagagacaug

SEQ ID NO: 477789 - RNA, 32 nt, Human
guggaguccagccuuuucccucugggcccagc

SEQ ID NO: 477790 - RNA, 32 nt, Human
guggaguccgaggaggaggagaaggaggccug

SEQ ID NO: 477791 - RNA, 32 nt, Human
guggagucgucugguccccauacagagggacc

SEQ ID NO: 477792 - RNA, 32 nt, Human
guggagucuacccccaagcccuucuccucuuc

SEQ ID NO: 477793 - RNA, 32 nt, Human
guggagucuauguugcccaggcuggucucuua

SEQ ID NO: 477794 - RNA, 32 nt, Human
guggagucuccaggaguggagccccgggcgcc

SEQ ID NO: 477795 - RNA, 32 nt, Human
guggagucucugcugaaaugaaucaggauucg

SEQ ID NO: 477796 - RNA, 32 nt, Human
guggagugaaaauugggcaugccauuacauug

SEQ ID NO: 477797 - RNA, 32 nt, Human
guggagugacuggcacuggacccacugcagag

SEQ ID NO: 477798 - RNA, 22 nt, Human
guggagugaggccagcaugcag

SEQ ID NO: 477799 - RNA, 32 nt, Human
guggagugaggccccugcagagcugcugauga

SEQ ID NO: 477800 - RNA, 21 nt, Human
guggagugaugaggaccugau

SEQ ID NO: 477801 - RNA, 21 nt, Human
guggagugcaaaggaggcgac

SEQ ID NO: 477802 - RNA, 32 nt, Human
guggagugcaguggcaggaucacagcuuacug

SEQ ID NO: 477803 - RNA, 24 nt, Human
guggagugcaguucagagcuuaua

SEQ ID NO: 477804 - RNA, 32 nt, Human
guggagugccagggaggaggaggcacacggag

SEQ ID NO: 477805 - RNA, 23 nt, Human
guggagugcccaggaccuuggua

SEQ ID NO: 477806 - RNA, 32 nt, Human
guggaguggagauuugucuggaaucuaaaaau

SEQ ID NO: 477807 - RNA, 24 nt, Human
guggaguggcucauaccuguaauc

SEQ ID NO: 477808 - RNA, 32 nt, Human
guggagugucggcugcaaaggcagcaguagcu

SEQ ID NO: 477809 - RNA, 32 nt, Human
guggaguguggagaggaaggaggcagauucau

SEQ ID NO: 477810 - RNA, 32 nt, Human
guggaguguucuacugggaaauggaguuauga

SEQ ID NO: 477811 - RNA, 32 nt, Human
guggaguuacugaacaguaacauagcugugau

SEQ ID NO: 477812 - RNA, 32 nt, Human
guggaguuauugcaagaguuccuuaauuccuc

SEQ ID NO: 477813 - RNA, 32 nt, Human
guggaguuccaucauguuggccaggcuggucu

SEQ ID NO: 477814 - RNA, 23 nt, Human
guggaguugggugccugagcuca

SEQ ID NO: 477815 - RNA, 32 nt, Human
guggauaagaugaccuguguaauaaucuuugu

SEQ ID NO: 477816 - RNA, 32 nt, Human
guggauaauagcguucagcagcacucaccuuc

SEQ ID NO: 477817 - RNA, 32 nt, Human
guggauaccauguaauugucagguaauuucag

SEQ ID NO: 477818 - RNA, 32 nt, Human
guggauacccucaguaagacucagggagccuu

SEQ ID NO: 477819 - RNA, 32 nt, Human
guggauagaggaaggggaagagucgaggauga

SEQ ID NO: 477820 - RNA, 32 nt, Human
guggauagcauuguuuucuuuuacagacuagc

SEQ ID NO: 477821 - RNA, 32 nt, Human
guggauagccugggaggcagguagaacagaac

SEQ ID NO: 477822 - RNA, 32 nt, Human
guggauagcgugaaagaagcuugugauccugc

SEQ ID NO: 477823 - RNA, 23 nt, Human
guggauagucuguuuucucugag

SEQ ID NO: 477824 - RNA, 32 nt, Human
guggauauuguugccaucaaugaccccuucau

SEQ ID NO: 477825 - RNA, 32 nt, Human
guggaucaacugaacugucacuccagagauuu

SEQ ID NO: 477826 - RNA, 32 nt, Human
guggaucaauugagcccaggaguucaagacca

SEQ ID NO: 477827 - RNA, 32 nt, Human
guggaucaccaggucaggagaucaagaccauc

SEQ ID NO: 477828 - RNA, 20 nt, Human
guggaucaccugaggucagg

SEQ ID NO: 477829 - RNA, 32 nt, Human
guggaucaccugcugguggaaauguggacauc

SEQ ID NO: 477830 - RNA, 22 nt, Human
guggaucacgccuguaauccca

SEQ ID NO: 477831 - RNA, 20 nt, Human
guggaucacuugagcccagg

SEQ ID NO: 477832 - RNA, 32 nt, Human
guggaucacuugagcccaggagucugagacca

SEQ ID NO: 477833 - RNA, 32 nt, Human
guggaucacuugagcccaggaguuugaaacca

SEQ ID NO: 477834 - RNA, 32 nt, Human
guggaucacuugagcccaggaguuugagacca

SEQ ID NO: 477835 - RNA, 32 nt, Human
guggaucagguuuacuagcaccugccagggag

SEQ ID NO: 477836 - RNA, 32 nt, Human
guggaucauccuuccuuguggguuagcaggca

SEQ ID NO: 477837 - RNA, 32 nt, Human
guggaucaugccagaguucguagauccuguuu

SEQ ID NO: 477838 - RNA, 26 nt, Human
guggaucauuauuauggcauuucuua

SEQ ID NO: 477839 - RNA, 32 nt, Human
guggauccaagaaaccagggccaugaccaggu

SEQ ID NO: 477840 - RNA, 20 nt, Human
guggauccagggaaagcuuu

SEQ ID NO: 477841 - RNA, 20 nt, Human
guggauccagggaacgcuuu

SEQ ID NO: 477842 - RNA, 32 nt, Human
guggaucccagaguggcucugauguccacauu

SEQ ID NO: 477843 - RNA, 32 nt, Human
guggaucccauggguguggcucugaggaaauu

SEQ ID NO: 477844 - RNA, 32 nt, Human
guggaucccgagagugcagagcucggggcagg

SEQ ID NO: 477845 - RNA, 32 nt, Human
guggaucccuacugcugguuucugccuucucc

SEQ ID NO: 477846 - RNA, 32 nt, Human
guggaucccuuagcccuuggggcagagacccc

SEQ ID NO: 477847 - RNA, 32 nt, Human
guggaucccuugagcccaggaguucgagacca

SEQ ID NO: 477848 - RNA, 32 nt, Human
guggauccuuaguuuucucuucacugccugcc

SEQ ID NO: 477849 - RNA, 22 nt, Human
guggaucgcaccuguaauccca

SEQ ID NO: 477850 - RNA, 32 nt, Human
guggaucgccgcggccccuccucccagagcgg

SEQ ID NO: 477851 - RNA, 19 nt, Human
guggaucgcuugagcccag

SEQ ID NO: 477852 - RNA, 20 nt, Human
guggaucgcuugagcccagg

SEQ ID NO: 477853 - RNA, 32 nt, Human
guggaucgcuugaucccaggaggucgagacca

SEQ ID NO: 477854 - RNA, 32 nt, Human
guggaucggccuccucuucaccccggcaggcc

SEQ ID NO: 477855 - RNA, 32 nt, Human
guggaucgguccagcaccugcuguuagcccag

SEQ ID NO: 477856 - RNA, 23 nt, Human
guggaucuaaggggaaugcuuua

SEQ ID NO: 477857 - RNA, 32 nt, Human
guggaucucagccucagacccuccucuggccc

SEQ ID NO: 477858 - RNA, 32 nt, Human
guggaucuccuugagauccugauagccuguua

SEQ ID NO: 477859 - RNA, 32 nt, Human
guggaucucuugagcccaggaguuugaggcca

SEQ ID NO: 477860 - RNA, 32 nt, Human
guggaucuggggacugagugugggagugcaga

SEQ ID NO: 477861 - RNA, 18 nt, Human
guggaugaaggaugggga

SEQ ID NO: 477862 - RNA, 32 nt, Human
guggaugaggagaagaagcaggugaccaugga

SEQ ID NO: 477863 - RNA, 32 nt, Human
guggaugcacuucccgcaccuccagucuucug

SEQ ID NO: 477864 - RNA, 32 nt, Human
guggaugcagaggccaguccauauaccaccca

SEQ ID NO: 477865 - RNA, 32 nt, Human
guggaugcaggucauuuugggggagggaggaa

SEQ ID NO: 477866 - RNA, 32 nt, Human
guggaugcccgggugagugugugugcaugcac

SEQ ID NO: 477867 - RNA, 32 nt, Human
guggaugccuauaaucccagcuacucagaagg

SEQ ID NO: 477868 - RNA, 32 nt, Human
guggaugcuaaggugagagggaugcaggcaug

SEQ ID NO: 477869 - RNA, 32 nt, Human
guggaugcugcacucgggcucgggauccgccc

SEQ ID NO: 477870 - RNA, 32 nt, Human
guggaugcuggcgggugacuugcagugggcgc

SEQ ID NO: 477871 - RNA, 32 nt, Human
guggaugcugggaggcaggaggcucaugcucc

SEQ ID NO: 477872 - RNA, 32 nt, Human
guggaugcugucuucucucuucuugaucccuu

SEQ ID NO: 477873 - RNA, 32 nt, Human
guggaugcuguugccaaacaccucagggcaag

SEQ ID NO: 477874 - RNA, 32 nt, Human
guggauggagcugccuuucagacccaucaccg

SEQ ID NO: 477875 - RNA, 30 nt, Human
guggauggaggcaccgugcauucugagggg

SEQ ID NO: 477876 - RNA, 32 nt, Human
guggauggagggaagggugaggaagagagcgu

SEQ ID NO: 477877 - RNA, 24 nt, Human
guggauggaucaccugagccuggg

SEQ ID NO: 477878 - RNA, 32 nt, Human
guggauggaucucuugaggucaggaguuugag

SEQ ID NO: 477879 - RNA, 32 nt, Human
guggauggcaggcaggagcauggagcccucag

SEQ ID NO: 477880 - RNA, 32 nt, Human
guggauggcccaggaggugcuggagcuagguc

SEQ ID NO: 477881 - RNA, 32 nt, Human
guggauggccuggagcuauguuuuuaaaauug

SEQ ID NO: 477882 - RNA, 32 nt, Human
guggauggcugagguuuucagcagcaagagac

SEQ ID NO: 477883 - RNA, 32 nt, Human
guggauggcuggaggugcagggccaggaggaa

SEQ ID NO: 477884 - RNA, 32 nt, Human
guggauggcuugagcccaggaguuugagacca

SEQ ID NO: 477885 - RNA, 32 nt, Human
guggaugggcagaagguguagcauucggagau

SEQ ID NO: 477886 - RNA, 32 nt, Human
guggaugggccaccgccuugcccagccuggau

SEQ ID NO: 477887 - RNA, 32 nt, Human
guggauggggagaaggaauuauaggagcugga

SEQ ID NO: 477888 - RNA, 32 nt, Human
guggaugggggaguucagacgugcuuguuccc

SEQ ID NO: 477889 - RNA, 32 nt, Human
guggauggugaugcagaggaugucucuaugcu

SEQ ID NO: 477890 - RNA, 32 nt, Human
guggaugguucagguugggaagaagagcagug

SEQ ID NO: 477891 - RNA, 32 nt, Human
guggaugucugucauguagaagugaggaccuu

SEQ ID NO: 477892 - RNA, 32 nt, Human
guggauguugugaccacagagcaggauugugc

SEQ ID NO: 477893 - RNA, 32 nt, Human
guggauguuuucccucuccuacguuagaaacc

SEQ ID NO: 477894 - RNA, 32 nt, Human
guggauuagugagucuguggccugugcccucc

SEQ ID NO: 477895 - RNA, 32 nt, Human
guggauucacauuucuguggagauuuucggaa

SEQ ID NO: 477896 - RNA, 19 nt, Human
guggauucagaacugcagc

SEQ ID NO: 477897 - RNA, 32 nt, Human
guggauucauguccagagcucauuucgggguc

SEQ ID NO: 477898 - RNA, 27 nt, Human
guggauuccaucaggagcugguuuuga

SEQ ID NO: 477899 - RNA, 32 nt, Human
guggauuccauucaagcaugcacauaacuagc

SEQ ID NO: 477900 - RNA, 32 nt, Human
guggauucccaaauuucaaagcucuuuuaaug

SEQ ID NO: 477901 - RNA, 22 nt, Human
guggauucucacugaguuuuga

SEQ ID NO: 477902 - RNA, 32 nt, Human
guggauucucccccugucuucuccccucagca

SEQ ID NO: 477903 - RNA, 32 nt, Human
guggauucugugagacauaccugcuggaguug

SEQ ID NO: 477904 - RNA, 32 nt, Human
guggauucuuuaaggcacuuuuguggccagcc

SEQ ID NO: 477905 - RNA, 32 nt, Human
guggauugagagaaagggagagagggagggag

SEQ ID NO: 477906 - RNA, 32 nt, Human
guggauugcgccacugcacuccagccugggca

SEQ ID NO: 477907 - RNA, 20 nt, Human
guggauugcuugaacccagg

SEQ ID NO: 477908 - RNA, 32 nt, Human
guggauugcuugaacccaggaguucgagacca

SEQ ID NO: 477909 - RNA, 20 nt, Human
guggauugcuugagcccagg

SEQ ID NO: 477910 - RNA, 32 nt, Human
guggauugcuugagcccaggagucugagacca

SEQ ID NO: 477911 - RNA, 32 nt, Human
guggauugcuugagcccaggaguucaagacca

SEQ ID NO: 477912 - RNA, 32 nt, Human
guggauugcuugagcccaggaguucaagagca

SEQ ID NO: 477913 - RNA, 32 nt, Human
guggauugcuugagcccaggaguuggagacca

SEQ ID NO: 477914 - RNA, 32 nt, Human
guggauugcuugagcccaggaguuugagacca

SEQ ID NO: 477915 - RNA, 32 nt, Human
guggauugcuuugaggccaggaguucuagacc

SEQ ID NO: 477916 - RNA, 32 nt, Human
guggauuggacaguccaucaaguggacugggg

SEQ ID NO: 477917 - RNA, 32 nt, Human
guggauuguggguggcaccaggagcucuaaaa

SEQ ID NO: 477918 - RNA, 22 nt, Human
guggauuuauuagucugguaga

SEQ ID NO: 477919 - RNA, 32 nt, Human
guggauuuccccucaaaucagaugccucuaag

SEQ ID NO: 477920 - RNA, 32 nt, Human
guggauuugcauauugaaguggagauuccaua

SEQ ID NO: 477921 - RNA, 32 nt, Human
guggauuuucaggccagcacaaggaugcagga

SEQ ID NO: 477922 - RNA, 23 nt, Human
guggcaaaacccugucuccacua

SEQ ID NO: 477923 - RNA, 32 nt, Human
guggcaaaacuaaguuaauaaaaaugaaacau

SEQ ID NO: 477924 - RNA, 32 nt, Human
guggcaaaauggagguuucacaggcugugcgg

SEQ ID NO: 477925 - RNA, 22 nt, Human
guggcaaacgccuguaauccca

SEQ ID NO: 477926 - RNA, 32 nt, Human
guggcaaacuccucaugaguucaaguauuaau

SEQ ID NO: 477927 - RNA, 32 nt, Human
guggcaaagagcuugacccaggaaauagaugg

SEQ ID NO: 477928 - RNA, 32 nt, Human
guggcaaagccuugagacaauccacaguucug

SEQ ID NO: 477929 - RNA, 32 nt, Human
guggcaaagcuuuuaaccuaucuuacaacuua

SEQ ID NO: 477930 - RNA, 32 nt, Human
guggcaaaguguuugccaaagcucaggagaga

SEQ ID NO: 477931 - RNA, 32 nt, Human
guggcaaaucacuuauaaauggugcugaagca

SEQ ID NO: 477932 - RNA, 32 nt, Human
guggcaaaugaagccaggcugugcggcaggau

SEQ ID NO: 477933 - RNA, 22 nt, Human
guggcaaaugccuguaauccca

SEQ ID NO: 477934 - RNA, 32 nt, Human
guggcaaccaguuucaagcagggcugaaccuu

SEQ ID NO: 477935 - RNA, 32 nt, Human
guggcaacugggucaaucguguuaacaacugu

SEQ ID NO: 477936 - RNA, 32 nt, Human
guggcaagaaggagccuggugcaggggaggaa

SEQ ID NO: 477937 - RNA, 32 nt, Human
guggcaagacccagaggucauuagguccagcu

SEQ ID NO: 477938 - RNA, 22 nt, Human
guggcaagagccuguaaucuca

SEQ ID NO: 477939 - RNA, 22 nt, Human
guggcaagcgccuguaguccca

SEQ ID NO: 477940 - RNA, 32 nt, Human
guggcaaggaagcuggacagggcaggccucug

SEQ ID NO: 477941 - RNA, 20 nt, Human
guggcaaggcggcacuccug

SEQ ID NO: 477942 - RNA, 32 nt, Human
guggcaaguccucaauccugugucccagaggu

SEQ ID NO: 477943 - RNA, 32 nt, Human
guggcaagugacccucccuguggcugaagugu

SEQ ID NO: 477944 - RNA, 32 nt, Human
guggcaagugauuggaguugugcuucaaaaau

SEQ ID NO: 477945 - RNA, 22 nt, Human
guggcaagugccuuuaauccca

SEQ ID NO: 477946 - RNA, 28 nt, Human
guggcaagugcuccucauccaaaugauc

SEQ ID NO: 477947 - RNA, 32 nt, Human
guggcaauaaagauuuucugugccucacaaaa

SEQ ID NO: 477948 - RNA, 32 nt, Human
guggcaaugcuuguaacuaaaucucaaacuuu

SEQ ID NO: 477949 - RNA, 32 nt, Human
guggcacaaagucccuggggccagugugugug

SEQ ID NO: 477950 - RNA, 23 nt, Human
guggcacaaaucaaagcugcaug

SEQ ID NO: 477951 - RNA, 32 nt, Human
guggcacaagaauggcucaacucuccaaauag

SEQ ID NO: 477952 - RNA, 32 nt, Human
guggcacaaugucgguucacuucaaccucaac

SEQ ID NO: 477953 - RNA, 22 nt, Human
guggcacacaccaguaauccca

SEQ ID NO: 477954 - RNA, 22 nt, Human
guggcacacacccguaauccca

SEQ ID NO: 477955 - RNA, 22 nt, Human
guggcacacaccuauaaucuca

SEQ ID NO: 477956 - RNA, 22 nt, Human
guggcacacaccuauaguccca

SEQ ID NO: 477957 - RNA, 19 nt, Human
guggcacacaccuguaauc

SEQ ID NO: 477958 - RNA, 22 nt, Human
guggcacacaccuguaauccca

SEQ ID NO: 477959 - RNA, 22 nt, Human
guggcacacaccuguaguccca

SEQ ID NO: 477960 - RNA, 22 nt, Human
guggcacacaccugucauccca

SEQ ID NO: 477961 - RNA, 32 nt, Human
guggcacacacguguuaugaccgcggcugcug

SEQ ID NO: 477962 - RNA, 22 nt, Human
guggcacaccccuguaguccca

SEQ ID NO: 477963 - RNA, 22 nt, Human
guggcacacgccuguaaaccca

SEQ ID NO: 477964 - RNA, 19 nt, Human
guggcacacgccuguaauc

SEQ ID NO: 477965 - RNA, 22 nt, Human
guggcacacgccuguaauccca

SEQ ID NO: 477966 - RNA, 22 nt, Human
guggcacacgccuguaaucuca

SEQ ID NO: 477967 - RNA, 22 nt, Human
guggcacacgccuguaguccca

SEQ ID NO: 477968 - RNA, 22 nt, Human
guggcacacgccugucauccca

SEQ ID NO: 477969 - RNA, 22 nt, Human
guggcacacuccuguaauccca

SEQ ID NO: 477970 - RNA, 22 nt, Human
guggcacagaugcccacguaug

SEQ ID NO: 477971 - RNA, 22 nt, Human
guggcacagauggugcugugua

SEQ ID NO: 477972 - RNA, 32 nt, Human
guggcacagcuucaaaaugacaucuaaguagc

SEQ ID NO: 477973 - RNA, 32 nt, Human
guggcacaggacgccuacucuccaguugccac

SEQ ID NO: 477974 - RNA, 32 nt, Human
guggcacagggaggggagaaaggggccagggg

SEQ ID NO: 477975 - RNA, 19 nt, Human
guggcacagggcucgcugc

SEQ ID NO: 477976 - RNA, 32 nt, Human
guggcacagugaugaugucaaaaauauuauac

SEQ ID NO: 477977 - RNA, 32 nt, Human
guggcacaguugggaagcguccuggccaugcc

SEQ ID NO: 477978 - RNA, 22 nt, Human
guggcacauaccuguaaugcca

SEQ ID NO: 477979 - RNA, 22 nt, Human
guggcacaucccuguaauucca

SEQ ID NO: 477980 - RNA, 25 nt, Human
guggcacauccuuucaggauguaug

SEQ ID NO: 477981 - RNA, 22 nt, Human
guggcacaugccuauaauccca

SEQ ID NO: 477982 - RNA, 22 nt, Human
guggcacaugccuauaguccca

SEQ ID NO: 477983 - RNA, 22 nt, Human
guggcacaugccuaugauccca

SEQ ID NO: 477984 - RNA, 22 nt, Human
guggcacaugccuguaacucca

SEQ ID NO: 477985 - RNA, 19 nt, Human
guggcacaugccuguaauc

SEQ ID NO: 477986 - RNA, 20 nt, Human
guggcacaugccuguaaucc

SEQ ID NO: 477987 - RNA, 22 nt, Human
guggcacaugccuguaauccca

SEQ ID NO: 477988 - RNA, 22 nt, Human
guggcacaugccuguaaucgca

SEQ ID NO: 477989 - RNA, 22 nt, Human
guggcacaugccuguaaucuca

SEQ ID NO: 477990 - RNA, 22 nt, Human
guggcacaugccuguaaugcca

SEQ ID NO: 477991 - RNA, 22 nt, Human
guggcacaugccuguaauucca

SEQ ID NO: 477992 - RNA, 22 nt, Human
guggcacaugccuguaguccca

SEQ ID NO: 477993 - RNA, 22 nt, Human
guggcacaugccuguauuccca

SEQ ID NO: 477994 - RNA, 22 nt, Human
guggcacaugccugugauccca

SEQ ID NO: 477995 - RNA, 22 nt, Human
guggcacaugcuuguaauccca

SEQ ID NO: 477996 - RNA, 22 nt, Human
guggcacauuccuguaauccca

SEQ ID NO: 477997 - RNA, 32 nt, Human
guggcaccaacggggucagccucccagcagac

SEQ ID NO: 477998 - RNA, 32 nt, Human
guggcaccaagcuccuggcccuguccgccaaa

SEQ ID NO: 477999 - RNA, 19 nt, Human
guggcaccaauaucucuua

SEQ ID NO: 478000 - RNA, 32 nt, Human
guggcaccacugcacuccagccugggugacag

SEQ ID NO: 478001 - RNA, 32 nt, Human
guggcaccacugcccuccagccuggaugacag

SEQ ID NO: 478002 - RNA, 32 nt, Human
guggcaccacugccgucauuucagcuucuggc

SEQ ID NO: 478003 - RNA, 20 nt, Human
guggcaccagaggacugugu

SEQ ID NO: 478004 - RNA, 32 nt, Human
guggcacccaccacagaauacaguguguguua

SEQ ID NO: 478005 - RNA, 22 nt, Human
guggcacccgccuguaauccca

SEQ ID NO: 478006 - RNA, 32 nt, Human
guggcacccgguggaaccgaggagaacgugga

SEQ ID NO: 478007 - RNA, 32 nt, Human
guggcaccgugaggguugggacccaccgaggc

SEQ ID NO: 478008 - RNA, 25 nt, Human
guggcaccucaccucacaccugcuc

SEQ ID NO: 478009 - RNA, 22 nt, Human
guggcaccugccuauaauccca

SEQ ID NO: 478010 - RNA, 22 nt, Human
guggcaccugccuguaauccca

SEQ ID NO: 478011 - RNA, 32 nt, Human
guggcaccugcggguggaguccagccuuuucc

SEQ ID NO: 478012 - RNA, 32 nt, Human
guggcaccugggaccccuggcugcaguggcca

SEQ ID NO: 478013 - RNA, 32 nt, Human
guggcacgaucauagguggucacuacagucuc

SEQ ID NO: 478014 - RNA, 32 nt, Human
guggcacgaucucggcggcucacuacaaccuc

SEQ ID NO: 478015 - RNA, 22 nt, Human
guggcacgcaccuauaguccca

SEQ ID NO: 478016 - RNA, 22 nt, Human
guggcacgcaccuguaauccca

SEQ ID NO: 478017 - RNA, 22 nt, Human
guggcacgcaccuguaguccca

SEQ ID NO: 478018 - RNA, 22 nt, Human
guggcacgcgccuaugauccca

SEQ ID NO: 478019 - RNA, 22 nt, Human
guggcacgcgccuguaauacca

SEQ ID NO: 478020 - RNA, 22 nt, Human
guggcacgcgccuguaauccca

SEQ ID NO: 478021 - RNA, 22 nt, Human
guggcacgcgccuguaguccca

SEQ ID NO: 478022 - RNA, 22 nt, Human
guggcacgcuccuguaguccca

SEQ ID NO: 478023 - RNA, 21 nt, Human
guggcacgcucuguaauccca

SEQ ID NO: 478024 - RNA, 32 nt, Human
guggcacggucucagcucacucugugcaggac

SEQ ID NO: 478025 - RNA, 22 nt, Human
guggcacguaccuguaaucuca

SEQ ID NO: 478026 - RNA, 32 nt, Human
guggcacgucuguaaucccagcuacuccagag

SEQ ID NO: 478027 - RNA, 22 nt, Human
guggcacgugccuguaauccca

SEQ ID NO: 478028 - RNA, 22 nt, Human
guggcacgugccuguaauucca

SEQ ID NO: 478029 - RNA, 22 nt, Human
guggcacgugccuguaguccca

SEQ ID NO: 478030 - RNA, 22 nt, Human
guggcacgugccuguauuccca

SEQ ID NO: 478031 - RNA, 22 nt, Human
guggcacgugccugugauccca

SEQ ID NO: 478032 - RNA, 32 nt, Human
guggcacugaggcuggaugggcuggcagagga

SEQ ID NO: 478033 - RNA, 32 nt, Human
guggcacugcacuccagucugggugacagagu

SEQ ID NO: 478034 - RNA, 32 nt, Human
guggcacugcagcuccccgcuccugcaggucc

SEQ ID NO: 478035 - RNA, 32 nt, Human
guggcacugccacaucccacuggcagaaacuc

SEQ ID NO: 478036 - RNA, 32 nt, Human
guggcacugccaggugguggccuguguggagg

SEQ ID NO: 478037 - RNA, 21 nt, Human
guggcacugccucuugggcug

SEQ ID NO: 478038 - RNA, 32 nt, Human
guggcacuggacaagcuagugggcuuuucguu

SEQ ID NO: 478039 - RNA, 32 nt, Human
guggcacuguagccugcgucauggcucaagga

SEQ ID NO: 478040 - RNA, 32 nt, Human
guggcacugucaccccagccucgaugugugau

SEQ ID NO: 478041 - RNA, 32 nt, Human
guggcacuuccuggucuaaagcucugcuagac

SEQ ID NO: 478042 - RNA, 32 nt, Human
guggcacuucugagcuccugaccuaggccaag

SEQ ID NO: 478043 - RNA, 22 nt, Human
guggcacuugccuguaauccca

SEQ ID NO: 478044 - RNA, 32 nt, Human
guggcagaacagaucaaagcccaagagagcug

SEQ ID NO: 478045 - RNA, 32 nt, Human
guggcagaagauuuuaauuagaaacaaagcuu

SEQ ID NO: 478046 - RNA, 32 nt, Human
guggcagaccgggggccagacacagauacaug

SEQ ID NO: 478047 - RNA, 32 nt, Human
guggcagagccuggagcugagcucuuggugac

SEQ ID NO: 478048 - RNA, 32 nt, Human
guggcagagcuggguucuccuccugggggccc

SEQ ID NO: 478049 - RNA, 32 nt, Human
guggcagaggcaggccagaggaccuaagugug

SEQ ID NO: 478050 - RNA, 32 nt, Human
guggcagaggccugcaugugggugccagaggc

SEQ ID NO: 478051 - RNA, 22 nt, Human
guggcagaggccuguaauccca

SEQ ID NO: 478052 - RNA, 32 nt, Human
guggcagagggguaaggagagccuucuuggcu

SEQ ID NO: 478053 - RNA, 32 nt, Human
guggcagagggguugagggacaggggcccuua

SEQ ID NO: 478054 - RNA, 32 nt, Human
guggcagauccuggcuagaucugccucuguuu

SEQ ID NO: 478055 - RNA, 23 nt, Human
guggcagaucgcuugagccuagg

SEQ ID NO: 478056 - RNA, 32 nt, Human
guggcagaugagugggagacugguugcaaggu

SEQ ID NO: 478057 - RNA, 32 nt, Human
guggcagcaccacugccugcucccuggaaggu

SEQ ID NO: 478058 - RNA, 32 nt, Human
guggcagcagagaguggccucggagggaagcc

SEQ ID NO: 478059 - RNA, 20 nt, Human
guggcagcagaggccaagga

SEQ ID NO: 478060 - RNA, 32 nt, Human
guggcagcagagucccagaauaugagaccguu

SEQ ID NO: 478061 - RNA, 20 nt, Human
guggcagcaggggucaggga

SEQ ID NO: 478062 - RNA, 22 nt, Human
guggcagcaguaggagugugua

SEQ ID NO: 478063 - RNA, 32 nt, Human
guggcagcauugagaguuggacacccgggucc

SEQ ID NO: 478064 - RNA, 32 nt, Human
guggcagcauugagggaaaccaggucaccauc

SEQ ID NO: 478065 - RNA, 32 nt, Human
guggcagccaugagggccaucaacaucgcaga

SEQ ID NO: 478066 - RNA, 32 nt, Human
guggcagccccagaacugggaccaccgggggu

SEQ ID NO: 478067 - RNA, 32 nt, Human
guggcagccccgggugggugugaucuguggcu

SEQ ID NO: 478068 - RNA, 32 nt, Human
guggcagcccucucuuuccagggcaaggucug

SEQ ID NO: 478069 - RNA, 32 nt, Human
guggcagccuccaucuccagcaagucuccugg

SEQ ID NO: 478070 - RNA, 32 nt, Human
guggcagccuggauggacaggagagguuucuc

SEQ ID NO: 478071 - RNA, 32 nt, Human
guggcagcggugaccgccuccuggguuauuuu

SEQ ID NO: 478072 - RNA, 32 nt, Human
guggcagcucacucuaugcaacuugauccucu

SEQ ID NO: 478073 - RNA, 32 nt, Human
guggcagcugagccacugaggccagccucgug

SEQ ID NO: 478074 - RNA, 32 nt, Human
guggcagcugguccccagcccuaggagagaag

SEQ ID NO: 478075 - RNA, 32 nt, Human
guggcagcuggugaccuggccagaggggcugg

SEQ ID NO: 478076 - RNA, 32 nt, Human
guggcagcuguugccacacacaugcggaggga

SEQ ID NO: 478077 - RNA, 30 nt, Human
guggcaggaagccacaggaaucucacagag

SEQ ID NO: 478078 - RNA, 23 nt, Human
guggcaggacccaccggcaccuc

SEQ ID NO: 478079 - RNA, 32 nt, Human
guggcaggacugaguccuucucuuuaaggcag

SEQ ID NO: 478080 - RNA, 32 nt, Human
guggcaggagagaacaacaggggcugggaaug

SEQ ID NO: 478081 - RNA, 32 nt, Human
guggcaggagcagcccgcacgccgcgcucucu

SEQ ID NO: 478082 - RNA, 22 nt, Human
guggcaggagcccguaguccca

SEQ ID NO: 478083 - RNA, 22 nt, Human
guggcaggagccuguaauccca

SEQ ID NO: 478084 - RNA, 22 nt, Human
guggcaggagccuguaauccua

SEQ ID NO: 478085 - RNA, 22 nt, Human
guggcaggcaccuguaauccca

SEQ ID NO: 478086 - RNA, 22 nt, Human
guggcaggcaccuguaguccca

SEQ ID NO: 478087 - RNA, 32 nt, Human
guggcaggccaagaaugggaggcugacucaaa

SEQ ID NO: 478088 - RNA, 22 nt, Human
guggcaggccccuguaauccca

SEQ ID NO: 478089 - RNA, 32 nt, Human
guggcaggccuggucaggcucuccaggugguc

SEQ ID NO: 478090 - RNA, 22 nt, Human
guggcaggcgccuauaauccca

SEQ ID NO: 478091 - RNA, 22 nt, Human
guggcaggcgccuauaguccca

SEQ ID NO: 478092 - RNA, 20 nt, Human
guggcaggcgccuguaaucc

SEQ ID NO: 478093 - RNA, 22 nt, Human
guggcaggcgccuguaauccca

SEQ ID NO: 478094 - RNA, 22 nt, Human
guggcaggcgccuguaguccca

SEQ ID NO: 478095 - RNA, 22 nt, Human
guggcaggcgucuguaauccca

SEQ ID NO: 478096 - RNA, 32 nt, Human
guggcagggaaagcagcgugcggggaagucac

SEQ ID NO: 478097 - RNA, 32 nt, Human
guggcagggaagggacaggcaggaucuggaca

SEQ ID NO: 478098 - RNA, 32 nt, Human
guggcagggagaaaagaacaucagggugggug

SEQ ID NO: 478099 - RNA, 20 nt, Human
guggcagggagcgcggcagc

SEQ ID NO: 478100 - RNA, 32 nt, Human
guggcagggaggaggaagaggaaggugagaau

SEQ ID NO: 478101 - RNA, 32 nt, Human
guggcagggaggcagucgcccugcggugcaag

SEQ ID NO: 478102 - RNA, 32 nt, Human
guggcagggaggcggcguugcgguggcugcau

SEQ ID NO: 478103 - RNA, 22 nt, Human
guggcagggccccucggcacuc

SEQ ID NO: 478104 - RNA, 21 nt, Human
guggcaggggggcagcagcuc

SEQ ID NO: 478105 - RNA, 22 nt, Human
guggcagguaccuguaauccca

SEQ ID NO: 478106 - RNA, 21 nt, Human
guggcaggugccuguaauccc

SEQ ID NO: 478107 - RNA, 22 nt, Human
guggcaggugccuguaauccca

SEQ ID NO: 478108 - RNA, 22 nt, Human
guggcaggugccuguaguccca

SEQ ID NO: 478109 - RNA, 32 nt, Human
guggcaggugcuccaggcugugaucugcaccc

SEQ ID NO: 478110 - RNA, 22 nt, Human
guggcaggugcuuguaauccca

SEQ ID NO: 478111 - RNA, 32 nt, Human
guggcaggugguuggaaaagaaauggcuuccu

SEQ ID NO: 478112 - RNA, 32 nt, Human
guggcagguguuuucagcuuggaggaggaagu

SEQ ID NO: 478113 - RNA, 32 nt, Human
guggcagguuccacccuucucuaccagccccg

SEQ ID NO: 478114 - RNA, 32 nt, Human
guggcagguuccagagaaugcaguagaccuuu

SEQ ID NO: 478115 - RNA, 32 nt, Human
guggcagguugagagaggagaaugcuggaaag

SEQ ID NO: 478116 - RNA, 32 nt, Human
guggcaguaaaggguaaagggagggcaguggg

SEQ ID NO: 478117 - RNA, 32 nt, Human
guggcaguaagaaaggucccuggggcuucagg

SEQ ID NO: 478118 - RNA, 23 nt, Human
guggcaguagaccacaucuguuc

SEQ ID NO: 478119 - RNA, 32 nt, Human
guggcaguagugccauaagaaguuaucauacu

SEQ ID NO: 478120 - RNA, 32 nt, Human
guggcaguauuuuuauuuuuggcauuucccag

SEQ ID NO: 478121 - RNA, 22 nt, Human
guggcagucaccuguaauccca

SEQ ID NO: 478122 - RNA, 22 nt, Human
guggcagucaccuguaguccca

SEQ ID NO: 478123 - RNA, 32 nt, Human
guggcagugaagagaacaggucuuucaaaaag

SEQ ID NO: 478124 - RNA, 32 nt, Human
guggcagugaagauggggucugaaaggcuaug

SEQ ID NO: 478125 - RNA, 21 nt, Human
guggcagugccuguaauccca

SEQ ID NO: 478126 - RNA, 32 nt, Human
guggcagugccuguaaucccagcuauuuggga

SEQ ID NO: 478127 - RNA, 32 nt, Human
guggcagugccuguagucccagcugcucggga

SEQ ID NO: 478128 - RNA, 32 nt, Human
guggcaguggaggccgucagauuacugauacu

SEQ ID NO: 478129 - RNA, 32 nt, Human
guggcaguggcagcaguggcccaaaggcagga

SEQ ID NO: 478130 - RNA, 20 nt, Human
guggcagugggaacuucagc

SEQ ID NO: 478131 - RNA, 32 nt, Human
guggcaguugcagaugagaaaugcuuacagcu

SEQ ID NO: 478132 - RNA, 22 nt, Human
guggcaguugccuguaauccua

SEQ ID NO: 478133 - RNA, 32 nt, Human
guggcaguugggccuggugaggguuaggacuu

SEQ ID NO: 478134 - RNA, 32 nt, Human
guggcauaauuugagucuucuggcaacauuug

SEQ ID NO: 478135 - RNA, 22 nt, Human
guggcauacaccuguaguccca

SEQ ID NO: 478136 - RNA, 22 nt, Human
guggcauacgccuguaauccca

SEQ ID NO: 478137 - RNA, 22 nt, Human
guggcauacuccuguaguccca

SEQ ID NO: 478138 - RNA, 22 nt, Human
guggcauauaccuguaacccca

SEQ ID NO: 478139 - RNA, 22 nt, Human
guggcauauauggcaucugcug

SEQ ID NO: 478140 - RNA, 32 nt, Human
guggcauaugccuauauucuagcuacucagga

SEQ ID NO: 478141 - RNA, 22 nt, Human
guggcauaugccuguaguccca

SEQ ID NO: 478142 - RNA, 32 nt, Human
guggcaucacccaggugaaugguguccaggug

SEQ ID NO: 478143 - RNA, 32 nt, Human
guggcaucacuuccaacugauauaccuccuug

SEQ ID NO: 478144 - RNA, 32 nt, Human
guggcauccagaggagacuggcuggccccucc

SEQ ID NO: 478145 - RNA, 26 nt, Human
guggcaucccaggcuccgggcagcuc

SEQ ID NO: 478146 - RNA, 32 nt, Human
guggcauccucccagauucugacuagaaugac

SEQ ID NO: 478147 - RNA, 32 nt, Human
guggcauccugccuguggucugggugagauuu

SEQ ID NO: 478148 - RNA, 32 nt, Human
guggcaucucccaggugccacugcagggauag

SEQ ID NO: 478149 - RNA, 32 nt, Human
guggcaucuccugagggcaggaaggggaguuc

SEQ ID NO: 478150 - RNA, 32 nt, Human
guggcaucuuuauggaaucacuguggauacug

SEQ ID NO: 478151 - RNA, 32 nt, Human
guggcaugaccagcuguaucugaaagagaaaa

SEQ ID NO: 478152 - RNA, 19 nt, Human
guggcaugaucacaccuca

SEQ ID NO: 478153 - RNA, 31 nt, Human
guggcaugaucuugauaacuguugaaucugg

SEQ ID NO: 478154 - RNA, 22 nt, Human
guggcaugcaccugcaauccca

SEQ ID NO: 478155 - RNA, 22 nt, Human
guggcaugcaccugcauuccca

SEQ ID NO: 478156 - RNA, 22 nt, Human
guggcaugcaccuguaauccca

SEQ ID NO: 478157 - RNA, 22 nt, Human
guggcaugcaccuguaguccca

SEQ ID NO: 478158 - RNA, 22 nt, Human
guggcaugcaccugucauccca

SEQ ID NO: 478159 - RNA, 32 nt, Human
guggcaugccaugccaagagcaacguguaaag

SEQ ID NO: 478160 - RNA, 32 nt, Human
guggcaugccuguguucccagcuacucaggag

SEQ ID NO: 478161 - RNA, 22 nt, Human
guggcaugcgccuauaaucuca

SEQ ID NO: 478162 - RNA, 22 nt, Human
guggcaugcgccuauaguccca

SEQ ID NO: 478163 - RNA, 21 nt, Human
guggcaugcgccuguaauccc

SEQ ID NO: 478164 - RNA, 22 nt, Human
guggcaugcgccuguaauccca

SEQ ID NO: 478165 - RNA, 22 nt, Human
guggcaugcgccuguaguccca

SEQ ID NO: 478166 - RNA, 22 nt, Human
guggcaugcgccugugauccca

SEQ ID NO: 478167 - RNA, 22 nt, Human
guggcaugcuucuguaauccca

SEQ ID NO: 478168 - RNA, 32 nt, Human
guggcauggaaggcagaggcuggguggggugg

SEQ ID NO: 478169 - RNA, 32 nt, Human
guggcauggcccuguuuccuguugauauggug

SEQ ID NO: 478170 - RNA, 32 nt, Human
guggcauggcuccagucugcugcccuccaucc

SEQ ID NO: 478171 - RNA, 22 nt, Human
guggcauguaccugcauuccca

SEQ ID NO: 478172 - RNA, 23 nt, Human
guggcaugugaccucggagcugc

SEQ ID NO: 478173 - RNA, 22 nt, Human
guggcaugugccugcaauccca

SEQ ID NO: 478174 - RNA, 22 nt, Human
guggcaugugccuguaauccca

SEQ ID NO: 478175 - RNA, 22 nt, Human
guggcaugugccuguaguccca

SEQ ID NO: 478176 - RNA, 22 nt, Human
guggcaugugccuguauuccca

SEQ ID NO: 478177 - RNA, 22 nt, Human
guggcaugugcuuguaauccca

SEQ ID NO: 478178 - RNA, 32 nt, Human
guggcauguggcagcugcaggcugugguccag

SEQ ID NO: 478179 - RNA, 32 nt, Human
guggcauuagauucuuauagaagcacgaacac

SEQ ID NO: 478180 - RNA, 32 nt, Human
guggcauuaggacgaugaaggccaugcuucag

SEQ ID NO: 478181 - RNA, 32 nt, Human
guggcauuauguucuggugcucauguuuccug

SEQ ID NO: 478182 - RNA, 20 nt, Human
guggcauucagaaacugcag

SEQ ID NO: 478183 - RNA, 32 nt, Human
guggcauucccccuggugcaggccgguggguc

SEQ ID NO: 478184 - RNA, 32 nt, Human
guggcauugaaggaacaaagauacaggggcac

SEQ ID NO: 478185 - RNA, 32 nt, Human
guggcauugcgcucacaccaggaugcuggagc

SEQ ID NO: 478186 - RNA, 22 nt, Human
guggcauuugccuguaauccca

SEQ ID NO: 478187 - RNA, 32 nt, Human
guggccaaaaccagaaccagcagucuccugcc

SEQ ID NO: 478188 - RNA, 32 nt, Human
guggccaaaaucaauaaccaauuuggauacca

SEQ ID NO: 478189 - RNA, 32 nt, Human
guggccaaacugagggcaucagcaguauuggg

SEQ ID NO: 478190 - RNA, 21 nt, Human
guggccaaagugacugcagua

SEQ ID NO: 478191 - RNA, 18 nt, Human
guggccaaauaucccagc

SEQ ID NO: 478192 - RNA, 23 nt, Human
guggccaacaacagcaucuccug

SEQ ID NO: 478193 - RNA, 19 nt, Human
guggccaacaccccaggca

SEQ ID NO: 478194 - RNA, 32 nt, Human
guggccaacauggugaaaccccgucucuacua

SEQ ID NO: 478195 - RNA, 18 nt, Human
guggccaagagaucagca

SEQ ID NO: 478196 - RNA, 17 nt, Human
guggccaagaucacagu

SEQ ID NO: 478197 - RNA, 18 nt, Human
guggccaagcagccagca

SEQ ID NO: 478198 - RNA, 21 nt, Human
guggccaagccugaaggaccc

SEQ ID NO: 478199 - RNA, 32 nt, Human
guggccaagcgaggucucaggugcaaagcaaa

SEQ ID NO: 478200 - RNA, 18 nt, Human
guggccaaggacaccagc

SEQ ID NO: 478201 - RNA, 17 nt, Human
guggccaaggagcagcg

SEQ ID NO: 478202 - RNA, 32 nt, Human
guggccaaggcaggcagcaguggggcugugac

SEQ ID NO: 478203 - RNA, 15 nt, Human
guggccaaggccagu

SEQ ID NO: 478204 - RNA, 16 nt, Human
guggccaaggccaugu

SEQ ID NO: 478205 - RNA, 18 nt, Human
guggccaaggccccagca

SEQ ID NO: 478206 - RNA, 18 nt, Human
guggccaaggcccucggu

SEQ ID NO: 478207 - RNA, 18 nt, Human
guggccaaggcuacacag

SEQ ID NO: 478208 - RNA, 18 nt, Human
guggccaaggcugagagc

SEQ ID NO: 478209 - RNA, 19 nt, Human
guggccaaggggcccacca

SEQ ID NO: 478210 - RNA, 19 nt, Human
guggccaagguaauaggca

SEQ ID NO: 478211 - RNA, 18 nt, Human
guggccaagguagacuag

SEQ ID NO: 478212 - RNA, 20 nt, Human
guggccaaggucucggaggc

SEQ ID NO: 478213 - RNA, 19 nt, Human
guggccaaggugaauagca

SEQ ID NO: 478214 - RNA, 32 nt, Human
guggccaaggugggcggaucaccugaggucag

SEQ ID NO: 478215 - RNA, 19 nt, Human
guggccaauuccccaggca

SEQ ID NO: 478216 - RNA, 32 nt, Human
guggccacaaaccaaggaacaccuggagccac

SEQ ID NO: 478217 - RNA, 32 nt, Human
guggccacaauccacgcuucuccggaucgcgg

SEQ ID NO: 478218 - RNA, 20 nt, Human
guggccacaccuggaacacu

SEQ ID NO: 478219 - RNA, 32 nt, Human
guggccacccaccugcuccccgacauaucuaa

SEQ ID NO: 478220 - RNA, 24 nt, Human
guggccaccuccuuggagcacuua

SEQ ID NO: 478221 - RNA, 32 nt, Human
guggccaccucuaagaccacacugacuucuuc

SEQ ID NO: 478222 - RNA, 21 nt, Human
guggccaccugggucccagca

SEQ ID NO: 478223 - RNA, 32 nt, Human
guggccaccugguacaccacacuggagccgga

SEQ ID NO: 478224 - RNA, 32 nt, Human
guggccaccuugagugagccagugccaccccc

SEQ ID NO: 478225 - RNA, 32 nt, Human
guggccacggcaaauuaugaacaucucugagu

SEQ ID NO: 478226 - RNA, 32 nt, Human
guggccacgggggcagugugaggaccucccug

SEQ ID NO: 478227 - RNA, 32 nt, Human
guggccacugaacugcugggcccgggagacug

SEQ ID NO: 478228 - RNA, 32 nt, Human
guggccacugcaauccagccugggcgauagag

SEQ ID NO: 478229 - RNA, 20 nt, Human
guggccacugccucccggca

SEQ ID NO: 478230 - RNA, 32 nt, Human
guggccacugccucccggcacuguggcagacu

SEQ ID NO: 478231 - RNA, 32 nt, Human
guggccacugccuuugaucaaccuuugugugc

SEQ ID NO: 478232 - RNA, 32 nt, Human
guggccacugggggaaaggcagccuucugucu

SEQ ID NO: 478233 - RNA, 32 nt, Human
guggccacuuauuucacuaucuucuucaaaua

SEQ ID NO: 478234 - RNA, 20 nt, Human
guggccacuucauuccagca

SEQ ID NO: 478235 - RNA, 18 nt, Human
guggccagaagcucagca

SEQ ID NO: 478236 - RNA, 18 nt, Human
guggccagacucccacca

SEQ ID NO: 478237 - RNA, 32 nt, Human
guggccagagaagggaaaggauaagucauugc

SEQ ID NO: 478238 - RNA, 32 nt, Human
guggccagcagcagcuacaacauggucauccg

SEQ ID NO: 478239 - RNA, 32 nt, Human
guggccagcagucugggcacacacgagcaggu

SEQ ID NO: 478240 - RNA, 17 nt, Human
guggccagcauccccag

SEQ ID NO: 478241 - RNA, 19 nt, Human
guggccagcccugcugcca

SEQ ID NO: 478242 - RNA, 21 nt, Human
guggccagccugacuggcuuc

SEQ ID NO: 478243 - RNA, 32 nt, Human
guggccagcuacucaggaggcugaggcaggag

SEQ ID NO: 478244 - RNA, 32 nt, Human
guggccaggaaggauguucaguucaccucugg

SEQ ID NO: 478245 - RNA, 32 nt, Human
guggccaggagaacagagccccaccuggacca

SEQ ID NO: 478246 - RNA, 32 nt, Human
guggccaggagagaggccaggugacaggggcc

SEQ ID NO: 478247 - RNA, 25 nt, Human
guggccaggcacgccuguaauccca

SEQ ID NO: 478248 - RNA, 18 nt, Human
guggccaggcccccagcg

SEQ ID NO: 478249 - RNA, 19 nt, Human
guggccaggcggcccgagg

SEQ ID NO: 478250 - RNA, 24 nt, Human
guggccaggcugcagagcugcgug

SEQ ID NO: 478251 - RNA, 32 nt, Human
guggccagggaugaaccuugcccagccguggu

SEQ ID NO: 478252 - RNA, 32 nt, Human
guggccagggccugguggccugguggccagga

SEQ ID NO: 478253 - RNA, 23 nt, Human
guggccagggcuggagcugugug

SEQ ID NO: 478254 - RNA, 32 nt, Human
guggccaggggcccuggacgcuagccacggag

SEQ ID NO: 478255 - RNA, 32 nt, Human
guggccagggguggaggagaauaugugggugu

SEQ ID NO: 478256 - RNA, 32 nt, Human
guggccaggguaguucucagguugugcuagag

SEQ ID NO: 478257 - RNA, 32 nt, Human
guggccaggugcacuccucagaccugugcaca

SEQ ID NO: 478258 - RNA, 21 nt, Human
guggccagguggcccuuggug

SEQ ID NO: 478259 - RNA, 18 nt, Human
guggccagguucccagca

SEQ ID NO: 478260 - RNA, 32 nt, Human
guggccaguaaaauuauaccauuggcaugaag

SEQ ID NO: 478261 - RNA, 32 nt, Human
guggccagucuuccugaucuccaucuuucugc

SEQ ID NO: 478262 - RNA, 19 nt, Human
guggccauaccucccagca

SEQ ID NO: 478263 - RNA, 24 nt, Human
guggccauagcagcaguccucccc

SEQ ID NO: 478264 - RNA, 32 nt, Human
guggccaucacugucucaccccucacgggcag

SEQ ID NO: 478265 - RNA, 32 nt, Human
guggccaucccucccugcaccccuuagccauc

SEQ ID NO: 478266 - RNA, 23 nt, Human
guggccaucuucacaacugcagc

SEQ ID NO: 478267 - RNA, 32 nt, Human
guggccaugagagagaagcugagagcaaccag

SEQ ID NO: 478268 - RNA, 22 nt, Human
guggccaugcucuuggagcacu

SEQ ID NO: 478269 - RNA, 31 nt, Human
guggccauggggagccucagcggucugcgcc

SEQ ID NO: 478270 - RNA, 31 nt, Human
guggccauggugcugcugcugcugguggcca

SEQ ID NO: 478271 - RNA, 19 nt, Human
guggccauucagggguagu

SEQ ID NO: 478272 - RNA, 32 nt, Human
guggccauugacuucucucaggaggaguggga

SEQ ID NO: 478273 - RNA, 32 nt, Human
guggccauuucugcagccuccuggccucaccu

SEQ ID NO: 478274 - RNA, 18 nt, Human
guggcccaacucuccugg

SEQ ID NO: 478275 - RNA, 32 nt, Human
guggcccaagagugaguuccggccugagugcu

SEQ ID NO: 478276 - RNA, 22 nt, Human
guggcccaagccuguaguccca

SEQ ID NO: 478277 - RNA, 32 nt, Human
guggcccaaggcccucuucacacuccaucuug

SEQ ID NO: 478278 - RNA, 32 nt, Human
guggcccaaguaaaccuagcucggcgaucggc

SEQ ID NO: 478279 - RNA, 22 nt, Human
guggcccacaccugugguccca

SEQ ID NO: 478280 - RNA, 20 nt, Human
guggcccacaccuguuccua

SEQ ID NO: 478281 - RNA, 32 nt, Human
guggcccacacucggucaugugcucagacaac

SEQ ID NO: 478282 - RNA, 22 nt, Human
guggcccacagcuguaauccca

SEQ ID NO: 478283 - RNA, 32 nt, Human
guggcccacaguuuccuuucucuccacaccuc

SEQ ID NO: 478284 - RNA, 32 nt, Human
guggcccacaucugaccuggcagcccauguau

SEQ ID NO: 478285 - RNA, 22 nt, Human
guggcccacaucuguaauccca

SEQ ID NO: 478286 - RNA, 32 nt, Human
guggcccaccugggugggaggcugccaccgcg

SEQ ID NO: 478287 - RNA, 22 nt, Human
guggcccacgccuguaauccca

SEQ ID NO: 478288 - RNA, 32 nt, Human
guggcccacguucuacucaucuggagcccagg

SEQ ID NO: 478289 - RNA, 32 nt, Human
guggcccacucccggcccaggcugcuuuccgu

SEQ ID NO: 478290 - RNA, 32 nt, Human
guggcccacugcagcccuggcgagcaggcuuc

SEQ ID NO: 478291 - RNA, 32 nt, Human
guggcccacuugggcacccacgcuucugucca

SEQ ID NO: 478292 - RNA, 32 nt, Human
guggcccagaagcuggaaguuugggaaaggcc

SEQ ID NO: 478293 - RNA, 32 nt, Human
guggcccagagaggaugccacagggaaaguau

SEQ ID NO: 478294 - RNA, 32 nt, Human
guggcccagcaccgccuagcccugccacccca

SEQ ID NO: 478295 - RNA, 32 nt, Human
guggcccagccgcgggagcgguggggcggggg

SEQ ID NO: 478296 - RNA, 32 nt, Human
guggcccagcuggaggggcagcuggaggagcu

SEQ ID NO: 478297 - RNA, 32 nt, Human
guggcccagcuggcuggaguccaggcagccaa

SEQ ID NO: 478298 - RNA, 32 nt, Human
guggcccagcuuggccagcacacacuuuccuc

SEQ ID NO: 478299 - RNA, 32 nt, Human
guggcccaggcaggcugagugggugggccacc

SEQ ID NO: 478300 - RNA, 32 nt, Human
guggcccaggcucuccccugacccauccucgc

SEQ ID NO: 478301 - RNA, 24 nt, Human
guggcccaggcugaagugcagugg

SEQ ID NO: 478302 - RNA, 24 nt, Human
guggcccaggcuggagugcagugg

SEQ ID NO: 478303 - RNA, 24 nt, Human
guggcccaggcuggaguguagugg

SEQ ID NO: 478304 - RNA, 24 nt, Human
guggcccaggcuggcgugcagugg

SEQ ID NO: 478305 - RNA, 32 nt, Human
guggcccagggagugugaggcugcagccucag

SEQ ID NO: 478306 - RNA, 32 nt, Human
guggcccagggcaguggcuuuccugaggcagc

SEQ ID NO: 478307 - RNA, 22 nt, Human
guggcccaugccuauaauccca

SEQ ID NO: 478308 - RNA, 22 nt, Human
guggcccaugccuguaauccca

SEQ ID NO: 478309 - RNA, 22 nt, Human
guggcccaugccuguaaucuca

SEQ ID NO: 478310 - RNA, 22 nt, Human
guggcccaugccuguagcccca

SEQ ID NO: 478311 - RNA, 22 nt, Human
guggcccaugccuguuauccca

SEQ ID NO: 478312 - RNA, 32 nt, Human
guggccccacgauguccaccacagcgaugucc

SEQ ID NO: 478313 - RNA, 32 nt, Human
guggccccagaaccucagcucuguaaauaauc

SEQ ID NO: 478314 - RNA, 32 nt, Human
guggccccagaggagaacgugccagugaggca

SEQ ID NO: 478315 - RNA, 32 nt, Human
guggccccagaucaagucaugggaggaagcua

SEQ ID NO: 478316 - RNA, 32 nt, Human
guggccccaggccuguuuggaggaugggcugg

SEQ ID NO: 478317 - RNA, 19 nt, Human
guggccccaggggguuaga

SEQ ID NO: 478318 - RNA, 32 nt, Human
guggcccccacacacccagccugugaaaccua

SEQ ID NO: 478319 - RNA, 32 nt, Human
guggcccccagaggcgucccgacucccgcgcg

SEQ ID NO: 478320 - RNA, 20 nt, Human
guggccccccacccaucuca

SEQ ID NO: 478321 - RNA, 32 nt, Human
guggcccccucaccugccuucucuuuuuagcu

SEQ ID NO: 478322 - RNA, 32 nt, Human
guggcccccugcggcccuagccugacccggag

SEQ ID NO: 478323 - RNA, 32 nt, Human
guggccccgacuggcccugccgugcgggcuca

SEQ ID NO: 478324 - RNA, 32 nt, Human
guggccccgagugccuccccucccucccucug

SEQ ID NO: 478325 - RNA, 32 nt, Human
guggccccgcaaucucggcucacugcaaccuc

SEQ ID NO: 478326 - RNA, 32 nt, Human
guggccccucaccacacugacuuauuucccua

SEQ ID NO: 478327 - RNA, 32 nt, Human
guggccccucacugcucuuuuccuauucaaac

SEQ ID NO: 478328 - RNA, 32 nt, Human
guggccccuccaccacgcuucuucaaucccuc

SEQ ID NO: 478329 - RNA, 32 nt, Human
guggccccuccacccucucccccagccgcacg

SEQ ID NO: 478330 - RNA, 32 nt, Human
guggccccucccaagcuggagauucuacgggc

SEQ ID NO: 478331 - RNA, 32 nt, Human
guggccccuccccaacuccuuccucuuugcuu

SEQ ID NO: 478332 - RNA, 32 nt, Human
guggccccuccccauccccucccucuguucgu

SEQ ID NO: 478333 - RNA, 32 nt, Human
guggccccucccccuccuucucacccuuaagg

SEQ ID NO: 478334 - RNA, 32 nt, Human
guggccccucccccucuccuuuugcucucuuc

SEQ ID NO: 478335 - RNA, 32 nt, Human
guggccccucccucccccuccuccccucuuuu

SEQ ID NO: 478336 - RNA, 32 nt, Human
guggccccuccuggccccugggccuccugccu

SEQ ID NO: 478337 - RNA, 32 nt, Human
guggccccuucuucugcuuaaacacacggcag

SEQ ID NO: 478338 - RNA, 32 nt, Human
guggcccgagcagcggcgagcccagggcgccg

SEQ ID NO: 478339 - RNA, 32 nt, Human
guggcccgcacgucucuguucucuccaaguaa

SEQ ID NO: 478340 - RNA, 32 nt, Human
guggcccggaagcagaggcugaccaggagcag

SEQ ID NO: 478341 - RNA, 32 nt, Human
guggcccggaagguggugcgcauggugauccg

SEQ ID NO: 478342 - RNA, 32 nt, Human
guggcccggccuggcccgugccccgcugccgc

SEQ ID NO: 478343 - RNA, 32 nt, Human
guggcccgugcacugaaggucaacacagcccu

SEQ ID NO: 478344 - RNA, 22 nt, Human
guggcccgugccaaagcacuua

SEQ ID NO: 478345 - RNA, 32 nt, Human
guggcccuaaaauggugaaucagagcauaucu

SEQ ID NO: 478346 - RNA, 32 nt, Human
guggcccucagccaccaccuugucgcccgagu

SEQ ID NO: 478347 - RNA, 32 nt, Human
guggcccucagcccuccaccuccggcgggggc

SEQ ID NO: 478348 - RNA, 32 nt, Human
guggcccucaucacagcccuccaggagauauc

SEQ ID NO: 478349 - RNA, 32 nt, Human
guggcccugaacaucccaggaggccgaucgua

SEQ ID NO: 478350 - RNA, 32 nt, Human
guggcccugagcaucccaggaggccgaucgua

SEQ ID NO: 478351 - RNA, 32 nt, Human
guggcccugcacucaagcuccgcaauaaucag

SEQ ID NO: 478352 - RNA, 32 nt, Human
guggcccugcagccccugugcuccgagggugg

SEQ ID NO: 478353 - RNA, 23 nt, Human
guggcccugccaucuucccagca

SEQ ID NO: 478354 - RNA, 32 nt, Human
guggcccuggcccuccccuuccucacucccgc

SEQ ID NO: 478355 - RNA, 32 nt, Human
guggcccuggcuuuguuccuccaccucuugcu

SEQ ID NO: 478356 - RNA, 32 nt, Human
guggcccugggagcugucugucuuuccccuac

SEQ ID NO: 478357 - RNA, 32 nt, Human
guggcccuggggacaagagggaggagcccagg

SEQ ID NO: 478358 - RNA, 32 nt, Human
guggcccugggguggacccugcccuuuggaca

SEQ ID NO: 478359 - RNA, 32 nt, Human
guggcccugugcccaguggcccacaggacacg

SEQ ID NO: 478360 - RNA, 20 nt, Human
guggcccuuccuugccuucc

SEQ ID NO: 478361 - RNA, 22 nt, Human
guggcccuugccuguagucuca

SEQ ID NO: 478362 - RNA, 32 nt, Human
guggcccuuuagaaacacacagcuccauuuca

SEQ ID NO: 478363 - RNA, 32 nt, Human
guggccgaacaugccucauaggcacagcugac

SEQ ID NO: 478364 - RNA, 32 nt, Human
guggccgagacggguggaucaccugaggucaa

SEQ ID NO: 478365 - RNA, 17 nt, Human
guggccgaggcgggagg

SEQ ID NO: 478366 - RNA, 32 nt, Human
guggccgccaggggacuggaccgucagucugu

SEQ ID NO: 478367 - RNA, 24 nt, Human
guggccgcccuuacacgucuccua

SEQ ID NO: 478368 - RNA, 23 nt, Human
guggccgccgccuaagcugcagc

SEQ ID NO: 478369 - RNA, 32 nt, Human
guggccgccgcugcugccccagcuggagcccg

SEQ ID NO: 478370 - RNA, 32 nt, Human
guggccgccgggucuccugggcugaggcuccc

SEQ ID NO: 478371 - RNA, 19 nt, Human
guggccgccucugucccug

SEQ ID NO: 478372 - RNA, 32 nt, Human
guggccgccugcccuuucucuccgcuccagcc

SEQ ID NO: 478373 - RNA, 32 nt, Human
guggccgccuucagaccacaccaccucuacca

SEQ ID NO: 478374 - RNA, 19 nt, Human
guggccgccuuuuccagca

SEQ ID NO: 478375 - RNA, 32 nt, Human
guggccgcgcguuccucccagaggggcguccc

SEQ ID NO: 478376 - RNA, 22 nt, Human
guggccgcguccauuccgcgcg

SEQ ID NO: 478377 - RNA, 32 nt, Human
guggccgcugccgccuccgcagggccgggcac

SEQ ID NO: 478378 - RNA, 32 nt, Human
guggccgcugccgccuccgccccagguuuugc

SEQ ID NO: 478379 - RNA, 32 nt, Human
guggccggaagcugcugcugcccacgccccug

SEQ ID NO: 478380 - RNA, 32 nt, Human
guggccggaccagcuuccccaccuucauuagg

SEQ ID NO: 478381 - RNA, 32 nt, Human
guggccggaccugacagucagcacuuggcagu

SEQ ID NO: 478382 - RNA, 16 nt, Human
guggccggacucccag

SEQ ID NO: 478383 - RNA, 32 nt, Human
guggccggcagcucgcgaacagcagcugaucc

SEQ ID NO: 478384 - RNA, 32 nt, Human
guggccggccggccgcucucaucccccguaag

SEQ ID NO: 478385 - RNA, 22 nt, Human
guggccggcgccuguaauccca

SEQ ID NO: 478386 - RNA, 32 nt, Human
guggccggcgggauggagaaaaguaggaugaa

SEQ ID NO: 478387 - RNA, 32 nt, Human
guggccggcugcagggacugcacggugaggca

SEQ ID NO: 478388 - RNA, 32 nt, Human
guggccgggaagcagaguucaugugaggguca

SEQ ID NO: 478389 - RNA, 32 nt, Human
guggccgggccuguacagcagccugggccaug

SEQ ID NO: 478390 - RNA, 32 nt, Human
guggccgggccuugccuuugggauucuaccug

SEQ ID NO: 478391 - RNA, 32 nt, Human
guggccggggcugaagccacacagcccagaag

SEQ ID NO: 478392 - RNA, 17 nt, Human
guggccgggugcagugg

SEQ ID NO: 478393 - RNA, 22 nt, Human
guggccgucaguggaaugcagc

SEQ ID NO: 478394 - RNA, 19 nt, Human
guggccgucauucugcagu

SEQ ID NO: 478395 - RNA, 18 nt, Human
guggccguccaggcuagc

SEQ ID NO: 478396 - RNA, 20 nt, Human
guggccguccagggcgucgc

SEQ ID NO: 478397 - RNA, 32 nt, Human
guggccgucggggcggagggcgguggccggcc

SEQ ID NO: 478398 - RNA, 20 nt, Human
guggccgucuccaccucagc

SEQ ID NO: 478399 - RNA, 21 nt, Human
guggccgucuccucccucagc

SEQ ID NO: 478400 - RNA, 22 nt, Human
guggccgucugccaacuccagc

SEQ ID NO: 478401 - RNA, 22 nt, Human
guggccgugccugagcugcagc

SEQ ID NO: 478402 - RNA, 19 nt, Human
guggccguggacuaaguga

SEQ ID NO: 478403 - RNA, 32 nt, Human
guggccguggagguggugucugcugugcuuaa

SEQ ID NO: 478404 - RNA, 32 nt, Human
guggccgugguggagaugaugcagcccauggc

SEQ ID NO: 478405 - RNA, 21 nt, Human
guggccguuauggaacgcagc

SEQ ID NO: 478406 - RNA, 21 nt, Human
guggccguucacaucacgcgc

SEQ ID NO: 478407 - RNA, 32 nt, Human
guggccguucgggaggcggaaaaagaugagcg

SEQ ID NO: 478408 - RNA, 32 nt, Human
guggccuauuucucccugucagguugcacaga

SEQ ID NO: 478409 - RNA, 32 nt, Human
guggccucaagcaauccuuccaccucagacuc

SEQ ID NO: 478410 - RNA, 23 nt, Human
guggccucacgccuguaauccca

SEQ ID NO: 478411 - RNA, 32 nt, Human
guggccucagcaggacaggccccgggcacugc

SEQ ID NO: 478412 - RNA, 24 nt, Human
guggccucagcaucucauaacuca

SEQ ID NO: 478413 - RNA, 32 nt, Human
guggccucagugugcacgucugucuguccguc

SEQ ID NO: 478414 - RNA, 18 nt, Human
guggccucaugcccugug

SEQ ID NO: 478415 - RNA, 23 nt, Human
guggccucaugccuauaauccca

SEQ ID NO: 478416 - RNA, 32 nt, Human
guggccuccagggugccuccaccugcacaacc

SEQ ID NO: 478417 - RNA, 32 nt, Human
guggccucccaaagcgcuaggauuacaagcau

SEQ ID NO: 478418 - RNA, 32 nt, Human
guggccucccaaagugcugggauuacagacac

SEQ ID NO: 478419 - RNA, 32 nt, Human
guggccucccaaagugcugggauuacaggcau

SEQ ID NO: 478420 - RNA, 32 nt, Human
guggccucccagaccuccugaccugggugguu

SEQ ID NO: 478421 - RNA, 32 nt, Human
guggccuccgcuggcucugccugcuccugcaa

SEQ ID NO: 478422 - RNA, 32 nt, Human
guggccuccucagcuuccuccccaucugggug

SEQ ID NO: 478423 - RNA, 32 nt, Human
guggccuccuuccucuauccucaaagccagca

SEQ ID NO: 478424 - RNA, 32 nt, Human
guggccucuaucugcuaccaucuguguuuuau

SEQ ID NO: 478425 - RNA, 32 nt, Human
guggccucucagaauuggggugaagggcacgg

SEQ ID NO: 478426 - RNA, 32 nt, Human
guggccucucccagggcagccggcaggagcca

SEQ ID NO: 478427 - RNA, 21 nt, Human
guggccucucggccaauccca

SEQ ID NO: 478428 - RNA, 32 nt, Human
guggccucucuccccucucucuuuuccuccuu

SEQ ID NO: 478429 - RNA, 32 nt, Human
guggccucucuggaacucugcagaccaccugc

SEQ ID NO: 478430 - RNA, 32 nt, Human
guggccucugcaggagcaaaacugccucaagu

SEQ ID NO: 478431 - RNA, 32 nt, Human
guggccucuggcccaccaagcucccugucacc

SEQ ID NO: 478432 - RNA, 32 nt, Human
guggccucuggcugccucaggcauuuuccucu

SEQ ID NO: 478433 - RNA, 32 nt, Human
guggccucuguggagaugaaggcacgggaagc

SEQ ID NO: 478434 - RNA, 32 nt, Human
guggccucuuugagugucugcagcagcccugg

SEQ ID NO: 478435 - RNA, 32 nt, Human
guggccugaagaguccucugaaugaaccuucu

SEQ ID NO: 478436 - RNA, 22 nt, Human
guggccugagagagcccuggua

SEQ ID NO: 478437 - RNA, 32 nt, Human
guggccugaggacagugagcacugacugguca

SEQ ID NO: 478438 - RNA, 32 nt, Human
guggccugaggagaugguuggaucauuccaaa

SEQ ID NO: 478439 - RNA, 32 nt, Human
guggccugaggccaggaggcugcagcugcuuc

SEQ ID NO: 478440 - RNA, 32 nt, Human
guggccugaguauuucacuggcagguugugaa

SEQ ID NO: 478441 - RNA, 32 nt, Human
guggccugauucagcaggaagcaucucagaca

SEQ ID NO: 478442 - RNA, 22 nt, Human
guggccugcaccuguaguccca

SEQ ID NO: 478443 - RNA, 32 nt, Human
guggccugcagaccucagcuucucccucugaa

SEQ ID NO: 478444 - RNA, 32 nt, Human
guggccugcagaguccauuccaucaugaugcu

SEQ ID NO: 478445 - RNA, 32 nt, Human
guggccugcagcccugcgcagggccagugccu

SEQ ID NO: 478446 - RNA, 32 nt, Human
guggccugccccagcucucuucuggcuuucug

SEQ ID NO: 478447 - RNA, 31 nt, Human
guggccugccucucuuccgagucuuccagug

SEQ ID NO: 478448 - RNA, 32 nt, Human
guggccuggaaaugauucagcaggagaaauua

SEQ ID NO: 478449 - RNA, 31 nt, Human
guggccuggacaauccagccugacaaggagc

SEQ ID NO: 478450 - RNA, 32 nt, Human
guggccuggcaugguagguacuacccaaugaa

SEQ ID NO: 478451 - RNA, 32 nt, Human
guggccuggccggcuccagugcagagaggaag

SEQ ID NO: 478452 - RNA, 32 nt, Human
guggccuggcugucugucugucugucuaaccu

SEQ ID NO: 478453 - RNA, 32 nt, Human
guggccugggagaggcagugagccuucucucc

SEQ ID NO: 478454 - RNA, 32 nt, Human
guggccugggcaagauaacgcacuucuaacua

SEQ ID NO: 478455 - RNA, 32 nt, Human
guggccugggcuaggucacuccaccucucugu

SEQ ID NO: 478456 - RNA, 32 nt, Human
guggccugggcugagcugggugggccgggaga

SEQ ID NO: 478457 - RNA, 32 nt, Human
guggccuggggagggggccguggcacugaggc

SEQ ID NO: 478458 - RNA, 32 nt, Human
guggccugggugccucugcacacugaguggag

SEQ ID NO: 478459 - RNA, 32 nt, Human
guggccuggguuuccucauaccaaugguggcu

SEQ ID NO: 478460 - RNA, 32 nt, Human
guggccuggugcuggggugaaggugagcuggg

SEQ ID NO: 478461 - RNA, 32 nt, Human
guggccuguaaucccagcuacucgggaggcug

SEQ ID NO: 478462 - RNA, 32 nt, Human
guggccuguaaucccagcuacuugggaggcug

SEQ ID NO: 478463 - RNA, 32 nt, Human
guggccuguacaguucuagcacugguuagaga

SEQ ID NO: 478464 - RNA, 32 nt, Human
guggccuguagucccagcuaucccagaggucg

SEQ ID NO: 478465 - RNA, 32 nt, Human
guggccugugcccuccccacucccaggcgggg

SEQ ID NO: 478466 - RNA, 22 nt, Human
guggccugugccuauaguccca

SEQ ID NO: 478467 - RNA, 22 nt, Human
guggccugugccuguaaaccca

SEQ ID NO: 478468 - RNA, 32 nt, Human
guggccuguucaaggcagaaccacgacccuug

SEQ ID NO: 478469 - RNA, 32 nt, Human
guggccuucaggcagagcagcaaguggcccuu

SEQ ID NO: 478470 - RNA, 32 nt, Human
guggccuuccaucacaggaacagagacugaau

SEQ ID NO: 478471 - RNA, 32 nt, Human
guggccuucccaggccccgcuuuugcuuuugg

SEQ ID NO: 478472 - RNA, 22 nt, Human
guggccuuccuggaugccuucc

SEQ ID NO: 478473 - RNA, 32 nt, Human
guggccuuccuuggaaaucugucucaaaucuc

SEQ ID NO: 478474 - RNA, 32 nt, Human
guggccuuccuuggggcuucucugaccacaug

SEQ ID NO: 478475 - RNA, 32 nt, Human
guggccuugcccacgccucucaccucugccuu

SEQ ID NO: 478476 - RNA, 17 nt, Human
guggccuuggcccgagg

SEQ ID NO: 478477 - RNA, 22 nt, Human
guggccuugguccuuaauccca

SEQ ID NO: 478478 - RNA, 32 nt, Human
guggccuuguaaugaagccucacuucugcuuu

SEQ ID NO: 478479 - RNA, 32 nt, Human
guggccuuuccaggccuagcuuucgcuuuuug

SEQ ID NO: 478480 - RNA, 32 nt, Human
guggccuuucuuccucugggcaaagaagggcu

SEQ ID NO: 478481 - RNA, 32 nt, Human
guggcgaagagugcuggagcgcggcgaugggg

SEQ ID NO: 478482 - RNA, 22 nt, Human
guggcgaaugccuguaaucuca

SEQ ID NO: 478483 - RNA, 32 nt, Human
guggcgacagccgcacugacaucuuucaggac

SEQ ID NO: 478484 - RNA, 32 nt, Human
guggcgaccagcuguucuccauaugcacuaag

SEQ ID NO: 478485 - RNA, 32 nt, Human
guggcgagcaguuucccacuugccaaagaucc

SEQ ID NO: 478486 - RNA, 22 nt, Human
guggcgagcgccuguaguccca

SEQ ID NO: 478487 - RNA, 32 nt, Human
guggcgaggagccgcccgaggagcagccacac

SEQ ID NO: 478488 - RNA, 32 nt, Human
guggcgagggggaagcgaaggaaggggaaggg

SEQ ID NO: 478489 - RNA, 22 nt, Human
guggcgagugccuguaauccca

SEQ ID NO: 478490 - RNA, 32 nt, Human
guggcgauggcauguaaccacaucaaacucaa

SEQ ID NO: 478491 - RNA, 32 nt, Human
guggcgcaagagccuggacgcacgugugggag

SEQ ID NO: 478492 - RNA, 22 nt, Human
guggcgcacaccuauaaucuca

SEQ ID NO: 478493 - RNA, 19 nt, Human
guggcgcacaccuguaauc

SEQ ID NO: 478494 - RNA, 22 nt, Human
guggcgcacaccuguaauccca

SEQ ID NO: 478495 - RNA, 22 nt, Human
guggcgcacaccuguaauccua

SEQ ID NO: 478496 - RNA, 22 nt, Human
guggcgcacaccuguaaucuca

SEQ ID NO: 478497 - RNA, 22 nt, Human
guggcgcacaccuguaguccca

SEQ ID NO: 478498 - RNA, 22 nt, Human
guggcgcacaccuguauuccca

SEQ ID NO: 478499 - RNA, 22 nt, Human
guggcgcaccccuguaaucuca

SEQ ID NO: 478500 - RNA, 22 nt, Human
guggcgcacgccucuaauccca

SEQ ID NO: 478501 - RNA, 22 nt, Human
guggcgcacgccuguaauccca

SEQ ID NO: 478502 - RNA, 22 nt, Human
guggcgcacgccuguaguccca

SEQ ID NO: 478503 - RNA, 22 nt, Human
guggcgcacuacuauaauccca

SEQ ID NO: 478504 - RNA, 21 nt, Human
guggcgcagaccaugcuguau

SEQ ID NO: 478505 - RNA, 22 nt, Human
guggcgcagcgcagcgucccua

SEQ ID NO: 478506 - RNA, 32 nt, Human
guggcgcagcuuucugugugaugcagaugugu

SEQ ID NO: 478507 - RNA, 21 nt, Human
guggcgcaggcuuaguaacgc

SEQ ID NO: 478508 - RNA, 22 nt, Human
guggcgcauaccuguaauccca

SEQ ID NO: 478509 - RNA, 22 nt, Human
guggcgcauaccuguaauucca

SEQ ID NO: 478510 - RNA, 22 nt, Human
guggcgcauaccuguaguccca

SEQ ID NO: 478511 - RNA, 22 nt, Human
guggcgcaugccuauaauccca

SEQ ID NO: 478512 - RNA, 22 nt, Human
guggcgcaugccuauaguccca

SEQ ID NO: 478513 - RNA, 22 nt, Human
guggcgcaugccuguaacccca

SEQ ID NO: 478514 - RNA, 19 nt, Human
guggcgcaugccuguaauc

SEQ ID NO: 478515 - RNA, 22 nt, Human
guggcgcaugccuguaauccca

SEQ ID NO: 478516 - RNA, 22 nt, Human
guggcgcaugccuguaauccua

SEQ ID NO: 478517 - RNA, 22 nt, Human
guggcgcaugccuguaaucuca

SEQ ID NO: 478518 - RNA, 22 nt, Human
guggcgcaugccuguaauucca

SEQ ID NO: 478519 - RNA, 22 nt, Human
guggcgcaugccuguaguccca

SEQ ID NO: 478520 - RNA, 22 nt, Human
guggcgcaugccugugauccca

SEQ ID NO: 478521 - RNA, 22 nt, Human
guggcgcaugcuuguaauccca

SEQ ID NO: 478522 - RNA, 22 nt, Human
guggcgcaugucuguaauccca

SEQ ID NO: 478523 - RNA, 24 nt, Human
guggcgcaugugccuguaauccca

SEQ ID NO: 478524 - RNA, 23 nt, Human
guggcgcauugccuguaauccca

SEQ ID NO: 478525 - RNA, 32 nt, Human
guggcgccagcaggcuuggacacugcccuggc

SEQ ID NO: 478526 - RNA, 32 nt, Human
guggcgcccaggaaagcggggaagcagagcag

SEQ ID NO: 478527 - RNA, 32 nt, Human
guggcgcccccuggagggaggaaggggaacug

SEQ ID NO: 478528 - RNA, 32 nt, Human
guggcgccccuccaaccguccuaacgccgggc

SEQ ID NO: 478529 - RNA, 32 nt, Human
guggcgcccgggcagcuuguccauuuucagau

SEQ ID NO: 478530 - RNA, 32 nt, Human
guggcgcccugcauaggggagcagggggaacg

SEQ ID NO: 478531 - RNA, 32 nt, Human
guggcgcccuuuccuucuuguuuguuccucug

SEQ ID NO: 478532 - RNA, 22 nt, Human
guggcgccugccuguaauccca

SEQ ID NO: 478533 - RNA, 32 nt, Human
guggcgcgauggagggacuggaagagaaugga

SEQ ID NO: 478534 - RNA, 22 nt, Human
guggcgcgcaccuguaauccca

SEQ ID NO: 478535 - RNA, 22 nt, Human
guggcgcgcaccuguaguccca

SEQ ID NO: 478536 - RNA, 22 nt, Human
guggcgcgcgccuauaauccca

SEQ ID NO: 478537 - RNA, 22 nt, Human
guggcgcgcgccuguaauccca

SEQ ID NO: 478538 - RNA, 22 nt, Human
guggcgcgcgucuguaauccca

SEQ ID NO: 478539 - RNA, 32 nt, Human
guggcgcgggcgguggaggaggagguggggcu

SEQ ID NO: 478540 - RNA, 22 nt, Human
guggcgcgugccuguaauccca

SEQ ID NO: 478541 - RNA, 22 nt, Human
guggcgcgugccuguaauccua

SEQ ID NO: 478542 - RNA, 22 nt, Human
guggcgcgugccuguaauucca

SEQ ID NO: 478543 - RNA, 22 nt, Human
guggcgcgugccuguaguccca

SEQ ID NO: 478544 - RNA, 22 nt, Human
guggcgcgugcuuguaauccca

SEQ ID NO: 478545 - RNA, 32 nt, Human
guggcgcucaagguccaugcagucucuuuccu

SEQ ID NO: 478546 - RNA, 21 nt, Human
guggcgcucaccuguaauccc

SEQ ID NO: 478547 - RNA, 22 nt, Human
guggcgcucaccuguaauccca

SEQ ID NO: 478548 - RNA, 32 nt, Human
guggcgcucgucaggggagaaacagugaaguc

SEQ ID NO: 478549 - RNA, 22 nt, Human
guggcggacaccuguaauccca

SEQ ID NO: 478550 - RNA, 32 nt, Human
guggcggagauggagaugaggauggaucugcc

SEQ ID NO: 478551 - RNA, 32 nt, Human
guggcggaggcugaggagaaggaggagcgggc

SEQ ID NO: 478552 - RNA, 32 nt, Human
guggcggaguuuggagguuggagagaaaucca

SEQ ID NO: 478553 - RNA, 32 nt, Human
guggcggcagaggcagagaugggagugaugcg

SEQ ID NO: 478554 - RNA, 32 nt, Human
guggcggcagcugucuguguuucuccuguucu

SEQ ID NO: 478555 - RNA, 32 nt, Human
guggcggcgccgcagccauggagggaggcggc

SEQ ID NO: 478556 - RNA, 31 nt, Human
guggcggcgccuguaaucccagcuacuuggg

SEQ ID NO: 478557 - RNA, 32 nt, Human
guggcggcguccuggggccaggaggagcgaac

SEQ ID NO: 478558 - RNA, 32 nt, Human
guggcggcgugggagcaccucuggggcuaugg

SEQ ID NO: 478559 - RNA, 32 nt, Human
guggcggcuacugggcccugcccagccccgga

SEQ ID NO: 478560 - RNA, 32 nt, Human
guggcggcuagagcguuccuccccagcucgaa

SEQ ID NO: 478561 - RNA, 22 nt, Human
guggcggcucacgccuguaauc

SEQ ID NO: 478562 - RNA, 22 nt, Human
guggcggcucaugccuauaauc

SEQ ID NO: 478563 - RNA, 22 nt, Human
guggcggcucaugccuguaauc

SEQ ID NO: 478564 - RNA, 32 nt, Human
guggcggcucccacucgcuucucccucggguc

SEQ ID NO: 478565 - RNA, 32 nt, Human
guggcgggacugggugaagagugggauuggga

SEQ ID NO: 478566 - RNA, 22 nt, Human
guggcgggagccuguaguccca

SEQ ID NO: 478567 - RNA, 32 nt, Human
guggcgggcaagcggggagaccccggcgcagc

SEQ ID NO: 478568 - RNA, 22 nt, Human
guggcgggcaccuauaauccca

SEQ ID NO: 478569 - RNA, 22 nt, Human
guggcgggcaccuauaguccca

SEQ ID NO: 478570 - RNA, 22 nt, Human
guggcgggcaccuguaauacca

SEQ ID NO: 478571 - RNA, 22 nt, Human
guggcgggcaccuguaauccca

SEQ ID NO: 478572 - RNA, 22 nt, Human
guggcgggcaccuguaaucgca

SEQ ID NO: 478573 - RNA, 22 nt, Human
guggcgggcaccuguaguccca

SEQ ID NO: 478574 - RNA, 22 nt, Human
guggcgggcaccuguauuccca

SEQ ID NO: 478575 - RNA, 22 nt, Human
guggcgggcaccugucauccca

SEQ ID NO: 478576 - RNA, 22 nt, Human
guggcgggcacuuguaauccca

SEQ ID NO: 478577 - RNA, 22 nt, Human
guggcgggcccccguaguccca

SEQ ID NO: 478578 - RNA, 22 nt, Human
guggcgggccccuguaauccca

SEQ ID NO: 478579 - RNA, 22 nt, Human
guggcgggccccuguaguccca

SEQ ID NO: 478580 - RNA, 22 nt, Human
guggcgggcgcccguaauccca

SEQ ID NO: 478581 - RNA, 22 nt, Human
guggcgggcgccuauaauccca

SEQ ID NO: 478582 - RNA, 22 nt, Human
guggcgggcgccuauaauccua

SEQ ID NO: 478583 - RNA, 22 nt, Human
guggcgggcgccuguaauccca

SEQ ID NO: 478584 - RNA, 22 nt, Human
guggcgggcgccuguaauccua

SEQ ID NO: 478585 - RNA, 22 nt, Human
guggcgggcgccuguagcccca

SEQ ID NO: 478586 - RNA, 22 nt, Human
guggcgggcgccuguaguccca

SEQ ID NO: 478587 - RNA, 22 nt, Human
guggcgggcgccuguauuccca

SEQ ID NO: 478588 - RNA, 22 nt, Human
guggcgggcgccuguuauccca

SEQ ID NO: 478589 - RNA, 22 nt, Human
guggcgggcuccuguaguccca

SEQ ID NO: 478590 - RNA, 32 nt, Human
guggcggggcagcaggagcgguagaaaggggu

SEQ ID NO: 478591 - RNA, 32 nt, Human
guggcggggccagcaggcugucccagcccuca

SEQ ID NO: 478592 - RNA, 32 nt, Human
guggcggggcuggagggcuggggugcacuuua

SEQ ID NO: 478593 - RNA, 22 nt, Human
guggcgggggccuguaauccca

SEQ ID NO: 478594 - RNA, 32 nt, Human
guggcggguccagcuacucgggaggcugaggc

SEQ ID NO: 478595 - RNA, 22 nt, Human
guggcgggugccuauaauccca

SEQ ID NO: 478596 - RNA, 21 nt, Human
guggcgggugccuguaauccc

SEQ ID NO: 478597 - RNA, 22 nt, Human
guggcgggugccuguaauccca

SEQ ID NO: 478598 - RNA, 22 nt, Human
guggcgggugccuguaguccca

SEQ ID NO: 478599 - RNA, 32 nt, Human
guggcggguguagaaggagcuaaagagaucug

SEQ ID NO: 478600 - RNA, 21 nt, Human
guggcggucaccuguaaccca

SEQ ID NO: 478601 - RNA, 22 nt, Human
guggcggucaccuguaguccca

SEQ ID NO: 478602 - RNA, 32 nt, Human
guggcggucaucauccccuuuaacaccgggaa

SEQ ID NO: 478603 - RNA, 21 nt, Human
guggcggucucuguaauccca

SEQ ID NO: 478604 - RNA, 32 nt, Human
guggcggugcaggaggccgggcaggggugcgg

SEQ ID NO: 478605 - RNA, 32 nt, Human
guggcgguggaccaaaggaaggaagcaagcau

SEQ ID NO: 478606 - RNA, 32 nt, Human
guggcgguggaggugugcugagcucagccuau

SEQ ID NO: 478607 - RNA, 32 nt, Human
guggcgguguuggaggauaugaugguuacaau

SEQ ID NO: 478608 - RNA, 22 nt, Human
guggcguacgccuauaguccca

SEQ ID NO: 478609 - RNA, 22 nt, Human
guggcguacgccuguaguccca

SEQ ID NO: 478610 - RNA, 22 nt, Human
guggcguaugccuguaauccca

SEQ ID NO: 478611 - RNA, 32 nt, Human
guggcgucagcccagcugcaggagaagcuggc

SEQ ID NO: 478612 - RNA, 32 nt, Human
guggcgucaucuuuacauucuaguccuccugc

SEQ ID NO: 478613 - RNA, 32 nt, Human
guggcguccagcucuucaacaggcgccggcag

SEQ ID NO: 478614 - RNA, 32 nt, Human
guggcgucuacaccacuuguuccaagcaggcg

SEQ ID NO: 478615 - RNA, 32 nt, Human
guggcgucuccacacgcaaccaugaaguugaa

SEQ ID NO: 478616 - RNA, 22 nt, Human
guggcgugcaccuguaauccca

SEQ ID NO: 478617 - RNA, 22 nt, Human
guggcgugcaccuguaguccca

SEQ ID NO: 478618 - RNA, 20 nt, Human
guggcgugccuguauuccca

SEQ ID NO: 478619 - RNA, 22 nt, Human
guggcgugcgccuguaauccca

SEQ ID NO: 478620 - RNA, 22 nt, Human
guggcgugcgccuguaaucuca

SEQ ID NO: 478621 - RNA, 22 nt, Human
guggcgugcgccuguaguccca

SEQ ID NO: 478622 - RNA, 24 nt, Human
guggcguggcggggucucgcggcg

SEQ ID NO: 478623 - RNA, 23 nt, Human
guggcguggcguggaguggcgug

SEQ ID NO: 478624 - RNA, 26 nt, Human
guggcguggcguggcggggucucgcg

SEQ ID NO: 478625 - RNA, 32 nt, Human
guggcgugggggcugaggaggggcuaaggcgg

SEQ ID NO: 478626 - RNA, 22 nt, Human
guggcgugugccuguaauccca

SEQ ID NO: 478627 - RNA, 22 nt, Human
guggcgugugccuguaaucuca

SEQ ID NO: 478628 - RNA, 22 nt, Human
guggcgugugccuguaaugcca

SEQ ID NO: 478629 - RNA, 22 nt, Human
guggcgugugccuguaguccca

SEQ ID NO: 478630 - RNA, 22 nt, Human
guggcgugugccugugauccca

SEQ ID NO: 478631 - RNA, 32 nt, Human
guggcgugugugugccacauauuuccccguca

SEQ ID NO: 478632 - RNA, 32 nt, Human
guggcguguugggcgacuucucucccccgucc

SEQ ID NO: 478633 - RNA, 32 nt, Human
guggcuaaacacccuccuacugcagagacaga

SEQ ID NO: 478634 - RNA, 22 nt, Human
guggcuaaagccuguaauccca

SEQ ID NO: 478635 - RNA, 32 nt, Human
guggcuaacacggugaaaccccgucucuacua

SEQ ID NO: 478636 - RNA, 32 nt, Human
guggcuaacauggugaaacccuggcucuacua

SEQ ID NO: 478637 - RNA, 22 nt, Human
guggcuaacgccuguaauccca

SEQ ID NO: 478638 - RNA, 32 nt, Human
guggcuaaggcagaggcugagggggcugggcg

SEQ ID NO: 478639 - RNA, 32 nt, Human
guggcuaagggguggggugaggggauggagag

SEQ ID NO: 478640 - RNA, 32 nt, Human
guggcuaaggugagaggguggcuugagcccgg

SEQ ID NO: 478641 - RNA, 32 nt, Human
guggcuacagcacccagcacugugcuguuguu

SEQ ID NO: 478642 - RNA, 22 nt, Human
guggcuaccaaccaggguccca

SEQ ID NO: 478643 - RNA, 32 nt, Human
guggcuaccuuggcagcagcugugaagcugcu

SEQ ID NO: 478644 - RNA, 32 nt, Human
guggcuacgccuguaaucccagcacuuuggga

SEQ ID NO: 478645 - RNA, 32 nt, Human
guggcuacugagcgccaugaagguugucccag

SEQ ID NO: 478646 - RNA, 32 nt, Human
guggcuacuguggcugcgcuguggucaccuga

SEQ ID NO: 478647 - RNA, 32 nt, Human
guggcuacuuuuggucugaaacccacuuggcc

SEQ ID NO: 478648 - RNA, 32 nt, Human
guggcuagaccccaaaaagccgauucuccugu

SEQ ID NO: 478649 - RNA, 32 nt, Human
guggcuagagagaaaaguagaaaaccagagug

SEQ ID NO: 478650 - RNA, 32 nt, Human
guggcuagagcaaaaauccagaccuuguuucu

SEQ ID NO: 478651 - RNA, 32 nt, Human
guggcuagagguggggugggaagagaggaggc

SEQ ID NO: 478652 - RNA, 32 nt, Human
guggcuagccacugugcuccagccugggcaac

SEQ ID NO: 478653 - RNA, 32 nt, Human
guggcuagcuacacagaguccaucuaauuuuu

SEQ ID NO: 478654 - RNA, 32 nt, Human
guggcuaguggucagacugaagucaccagcug

SEQ ID NO: 478655 - RNA, 23 nt, Human
guggcuauaaugagaauugcaug

SEQ ID NO: 478656 - RNA, 32 nt, Human
guggcuaugggaaucagcugguggcuagguuu

SEQ ID NO: 478657 - RNA, 32 nt, Human
guggcuauugaccacucggcauuaugguuagu

SEQ ID NO: 478658 - RNA, 24 nt, Human
guggcucaaaugccuguaauccca

SEQ ID NO: 478659 - RNA, 22 nt, Human
guggcucaagcccauaauccca

SEQ ID NO: 478660 - RNA, 22 nt, Human
guggcucaagccuauaauccca

SEQ ID NO: 478661 - RNA, 22 nt, Human
guggcucaagccuguaauccca

SEQ ID NO: 478662 - RNA, 32 nt, Human
guggcucaagccuguaaugucagcacuuuaaa

SEQ ID NO: 478663 - RNA, 19 nt, Human
guggcucacaacuguaauc

SEQ ID NO: 478664 - RNA, 21 nt, Human
guggcucacaacuguaauccc

SEQ ID NO: 478665 - RNA, 22 nt, Human
guggcucacaacuguaauccua

SEQ ID NO: 478666 - RNA, 22 nt, Human
guggcucacacauguaauccca

SEQ ID NO: 478667 - RNA, 22 nt, Human
guggcucacacccauaauccca

SEQ ID NO: 478668 - RNA, 22 nt, Human
guggcucacacccguaauccca

SEQ ID NO: 478669 - RNA, 22 nt, Human
guggcucacaccgguaauccca

SEQ ID NO: 478670 - RNA, 20 nt, Human
guggcucacaccuaauccca

SEQ ID NO: 478671 - RNA, 19 nt, Human
guggcucacaccuauaauc

SEQ ID NO: 478672 - RNA, 22 nt, Human
guggcucacaccuauaauccca

SEQ ID NO: 478673 - RNA, 21 nt, Human
guggcucacaccuauaauccu

SEQ ID NO: 478674 - RNA, 22 nt, Human
guggcucacaccuauaauccua

SEQ ID NO: 478675 - RNA, 22 nt, Human
guggcucacaccuauaauucca

SEQ ID NO: 478676 - RNA, 22 nt, Human
guggcucacaccuauaguccca

SEQ ID NO: 478677 - RNA, 22 nt, Human
guggcucacaccucuaauccca

SEQ ID NO: 478678 - RNA, 19 nt, Human
guggcucacaccugaaauc

SEQ ID NO: 478679 - RNA, 19 nt, Human
guggcucacaccugcaauc

SEQ ID NO: 478680 - RNA, 20 nt, Human
guggcucacaccuguaaccc

SEQ ID NO: 478681 - RNA, 22 nt, Human
guggcucacaccuguaacccca

SEQ ID NO: 478682 - RNA, 22 nt, Human
guggcucacaccuguaauacca

SEQ ID NO: 478683 - RNA, 19 nt, Human
guggcucacaccuguaauc

SEQ ID NO: 478684 - RNA, 21 nt, Human
guggcucacaccuguaauccc

SEQ ID NO: 478685 - RNA, 22 nt, Human
guggcucacaccuguaauccca

SEQ ID NO: 478686 - RNA, 22 nt, Human
guggcucacaccuguaauccua

SEQ ID NO: 478687 - RNA, 20 nt, Human
guggcucacaccuguaaucu

SEQ ID NO: 478688 - RNA, 22 nt, Human
guggcucacaccuguaaucuca

SEQ ID NO: 478689 - RNA, 19 nt, Human
guggcucacaccuguaauu

SEQ ID NO: 478690 - RNA, 22 nt, Human
guggcucacaccuguaauucca

SEQ ID NO: 478691 - RNA, 22 nt, Human
guggcucacaccuguaauugca

SEQ ID NO: 478692 - RNA, 22 nt, Human
guggcucacaccuguaauuuca

SEQ ID NO: 478693 - RNA, 22 nt, Human
guggcucacaccuguacuccca

SEQ ID NO: 478694 - RNA, 22 nt, Human
guggcucacaccuguaguccca

SEQ ID NO: 478695 - RNA, 32 nt, Human
guggcucacaccuguaucccagcacuuuggga

SEQ ID NO: 478696 - RNA, 19 nt, Human
guggcucacaccuguauuc

SEQ ID NO: 478697 - RNA, 22 nt, Human
guggcucacaccuguauuccca

SEQ ID NO: 478698 - RNA, 22 nt, Human
guggcucacaccugucauccca

SEQ ID NO: 478699 - RNA, 21 nt, Human
guggcucacaccugucauucc

SEQ ID NO: 478700 - RNA, 19 nt, Human
guggcucacaccugugauc

SEQ ID NO: 478701 - RNA, 21 nt, Human
guggcucacaccugugauccc

SEQ ID NO: 478702 - RNA, 22 nt, Human
guggcucacaccugugauccca

SEQ ID NO: 478703 - RNA, 22 nt, Human
guggcucacaccugugaucuca

SEQ ID NO: 478704 - RNA, 22 nt, Human
guggcucacaccuguggaaucc

SEQ ID NO: 478705 - RNA, 22 nt, Human
guggcucacaccuguguucuca

SEQ ID NO: 478706 - RNA, 21 nt, Human
guggcucacaccuuaauccca

SEQ ID NO: 478707 - RNA, 23 nt, Human
guggcucacaccuuguaauccca

SEQ ID NO: 478708 - RNA, 22 nt, Human
guggcucacaccuuuaauccca

SEQ ID NO: 478709 - RNA, 22 nt, Human
guggcucacaccuuuaauccua

SEQ ID NO: 478710 - RNA, 22 nt, Human
guggcucacacguguaauccca

SEQ ID NO: 478711 - RNA, 22 nt, Human
guggcucacacuuauaauccca

SEQ ID NO: 478712 - RNA, 22 nt, Human
guggcucacacuuauaauccua

SEQ ID NO: 478713 - RNA, 19 nt, Human
guggcucacacuuguaacc

SEQ ID NO: 478714 - RNA, 19 nt, Human
guggcucacacuuguaauc

SEQ ID NO: 478715 - RNA, 22 nt, Human
guggcucacacuuguaauccca

SEQ ID NO: 478716 - RNA, 32 nt, Human
guggcucacagaacccuuggagccaauggaga

SEQ ID NO: 478717 - RNA, 22 nt, Human
guggcucacagcuauaaucuca

SEQ ID NO: 478718 - RNA, 31 nt, Human
guggcucacagcuauaaucucagcacuuugg

SEQ ID NO: 478719 - RNA, 31 nt, Human
guggcucacagcuuugaaccugccaaaggac

SEQ ID NO: 478720 - RNA, 22 nt, Human
guggcucacaucuguaacccca

SEQ ID NO: 478721 - RNA, 18 nt, Human
guggcucacaucuguaau

SEQ ID NO: 478722 - RNA, 22 nt, Human
guggcucacaucuguaauacca

SEQ ID NO: 478723 - RNA, 19 nt, Human
guggcucacaucuguaauc

SEQ ID NO: 478724 - RNA, 22 nt, Human
guggcucacaucuguaauccca

SEQ ID NO: 478725 - RNA, 22 nt, Human
guggcucacaucuguaaucuca

SEQ ID NO: 478726 - RNA, 22 nt, Human
guggcucacauguguaauccca

SEQ ID NO: 478727 - RNA, 22 nt, Human
guggcucacauucguaauccca

SEQ ID NO: 478728 - RNA, 23 nt, Human
guggcucacccccuguaauccca

SEQ ID NO: 478729 - RNA, 19 nt, Human
guggcucaccccuguaauc

SEQ ID NO: 478730 - RNA, 22 nt, Human
guggcucaccccuguaauccca

SEQ ID NO: 478731 - RNA, 22 nt, Human
guggcucaccccuguaauccua

SEQ ID NO: 478732 - RNA, 22 nt, Human
guggcucaccccuguaaucuca

SEQ ID NO: 478733 - RNA, 22 nt, Human
guggcucaccccuguaauucca

SEQ ID NO: 478734 - RNA, 32 nt, Human
guggcucacccuagauuguggcccagaucuca

SEQ ID NO: 478735 - RNA, 32 nt, Human
guggcucaccucucugccucuccagaugugag

SEQ ID NO: 478736 - RNA, 19 nt, Human
guggcucaccucuguaauc

SEQ ID NO: 478737 - RNA, 22 nt, Human
guggcucaccucuguaauccca

SEQ ID NO: 478738 - RNA, 32 nt, Human
guggcucaccuguaaucccaacacuuugggag

SEQ ID NO: 478739 - RNA, 32 nt, Human
guggcucaccuguaaucccagcacuuugggag

SEQ ID NO: 478740 - RNA, 22 nt, Human
guggcucacgacuguaauucca

SEQ ID NO: 478741 - RNA, 22 nt, Human
guggcucacgcauguaauccca

SEQ ID NO: 478742 - RNA, 22 nt, Human
guggcucacgcauguaauccua

SEQ ID NO: 478743 - RNA, 22 nt, Human
guggcucacgccacuaauccca

SEQ ID NO: 478744 - RNA, 22 nt, Human
guggcucacgccaguaauccca

SEQ ID NO: 478745 - RNA, 32 nt, Human
guggcucacgcccaauacuuugggagaccaag

SEQ ID NO: 478746 - RNA, 22 nt, Human
guggcucacgcccguaauccca

SEQ ID NO: 478747 - RNA, 22 nt, Human
guggcucacgccgguaauccca

SEQ ID NO: 478748 - RNA, 22 nt, Human
guggcucacgccuauaauccca

SEQ ID NO: 478749 - RNA, 22 nt, Human
guggcucacgccuauaauccua

SEQ ID NO: 478750 - RNA, 22 nt, Human
guggcucacgccuauaaucuca

SEQ ID NO: 478751 - RNA, 22 nt, Human
guggcucacgccuauaauucca

SEQ ID NO: 478752 - RNA, 22 nt, Human
guggcucacgccuaugauccca

SEQ ID NO: 478753 - RNA, 22 nt, Human
guggcucacgccucuaauccca

SEQ ID NO: 478754 - RNA, 22 nt, Human
guggcucacgccugcaauccca

SEQ ID NO: 478755 - RNA, 22 nt, Human
guggcucacgccuguaaaccca

SEQ ID NO: 478756 - RNA, 22 nt, Human
guggcucacgccuguaacccca

SEQ ID NO: 478757 - RNA, 22 nt, Human
guggcucacgccuguaaccuca

SEQ ID NO: 478758 - RNA, 22 nt, Human
guggcucacgccuguaauacca

SEQ ID NO: 478759 - RNA, 19 nt, Human
guggcucacgccuguaauc

SEQ ID NO: 478760 - RNA, 20 nt, Human
guggcucacgccuguaaucc

SEQ ID NO: 478761 - RNA, 32 nt, Human
guggcucacgccuguaauccagcacuuuggga

SEQ ID NO: 478762 - RNA, 21 nt, Human
guggcucacgccuguaauccc

SEQ ID NO: 478763 - RNA, 22 nt, Human
guggcucacgccuguaauccca

SEQ ID NO: 478764 - RNA, 22 nt, Human
guggcucacgccuguaauccua

SEQ ID NO: 478765 - RNA, 22 nt, Human
guggcucacgccuguaaucgca

SEQ ID NO: 478766 - RNA, 22 nt, Human
guggcucacgccuguaaucuca

SEQ ID NO: 478767 - RNA, 22 nt, Human
guggcucacgccuguaauucca

SEQ ID NO: 478768 - RNA, 22 nt, Human
guggcucacgccuguaguccca

SEQ ID NO: 478769 - RNA, 32 nt, Human
guggcucacgccuguaucccagcacuuuggga

SEQ ID NO: 478770 - RNA, 32 nt, Human
guggcucacgccuguauuccagcacuuuggga

SEQ ID NO: 478771 - RNA, 22 nt, Human
guggcucacgccugucauccca

SEQ ID NO: 478772 - RNA, 22 nt, Human
guggcucacgccugugauccca

SEQ ID NO: 478773 - RNA, 22 nt, Human
guggcucacgccuguuauccca

SEQ ID NO: 478774 - RNA, 22 nt, Human
guggcucacgcuuauaauccca

SEQ ID NO: 478775 - RNA, 24 nt, Human
guggcucacgcuuauguaguccca

SEQ ID NO: 478776 - RNA, 22 nt, Human
guggcucacgcuuguaauccca

SEQ ID NO: 478777 - RNA, 22 nt, Human
guggcucacgcuuguaaucgca

SEQ ID NO: 478778 - RNA, 22 nt, Human
guggcucacgcuuguaauucca

SEQ ID NO: 478779 - RNA, 22 nt, Human
guggcucacguauguaauccca

SEQ ID NO: 478780 - RNA, 22 nt, Human
guggcucacgucuauaauccca

SEQ ID NO: 478781 - RNA, 19 nt, Human
guggcucacgucuguaauc

SEQ ID NO: 478782 - RNA, 22 nt, Human
guggcucacgucuguaauccca

SEQ ID NO: 478783 - RNA, 22 nt, Human
guggcucacguuuguaauccca

SEQ ID NO: 478784 - RNA, 22 nt, Human
guggcucacuacucuaauucca

SEQ ID NO: 478785 - RNA, 32 nt, Human
guggcucacuccguaauuccggcacuuuggga

SEQ ID NO: 478786 - RNA, 19 nt, Human
guggcucacuccuguaauc

SEQ ID NO: 478787 - RNA, 20 nt, Human
guggcucacuccuguaaucc

SEQ ID NO: 478788 - RNA, 21 nt, Human
guggcucacuccuguaauccc

SEQ ID NO: 478789 - RNA, 22 nt, Human
guggcucacuccuguaauccca

SEQ ID NO: 478790 - RNA, 22 nt, Human
guggcucacuccuguaauccua

SEQ ID NO: 478791 - RNA, 22 nt, Human
guggcucacuccuguaaucuca

SEQ ID NO: 478792 - RNA, 22 nt, Human
guggcucacuccuguaguccca

SEQ ID NO: 478793 - RNA, 22 nt, Human
guggcucacucuuguaauccca

SEQ ID NO: 478794 - RNA, 32 nt, Human
guggcucacugcagccuccaccuccugggcuc

SEQ ID NO: 478795 - RNA, 32 nt, Human
guggcucacugcagccuccaucucccggggcu

SEQ ID NO: 478796 - RNA, 22 nt, Human
guggcucagaccuauaauccca

SEQ ID NO: 478797 - RNA, 32 nt, Human
guggcucagagacaggacccugguuuuaaauc

SEQ ID NO: 478798 - RNA, 32 nt, Human
guggcucagagauaggacccugguuuuaaauc

SEQ ID NO: 478799 - RNA, 32 nt, Human
guggcucagcaacagucagaggcccucagaca

SEQ ID NO: 478800 - RNA, 22 nt, Human
guggcucagccuuguaauccca

SEQ ID NO: 478801 - RNA, 21 nt, Human
guggcucagcuucuaauccca

SEQ ID NO: 478802 - RNA, 19 nt, Human
guggcucaggccuguaauc

SEQ ID NO: 478803 - RNA, 22 nt, Human
guggcucaggccuguaauccca

SEQ ID NO: 478804 - RNA, 22 nt, Human
guggcucaggccuguaauccua

SEQ ID NO: 478805 - RNA, 32 nt, Human
guggcucagggaccagcuuggggaaggaaagg

SEQ ID NO: 478806 - RNA, 32 nt, Human
guggcucaguggaaagagagcaggcaucugua

SEQ ID NO: 478807 - RNA, 28 nt, Human
guggcucauaaagacucaaagcuguaua

SEQ ID NO: 478808 - RNA, 22 nt, Human
guggcucauaccuauaauccua

SEQ ID NO: 478809 - RNA, 19 nt, Human
guggcucauaccuguaauc

SEQ ID NO: 478810 - RNA, 22 nt, Human
guggcucauaccuguaauccca

SEQ ID NO: 478811 - RNA, 22 nt, Human
guggcucauaccuguaauccua

SEQ ID NO: 478812 - RNA, 22 nt, Human
guggcucauaccuguaaugcca

SEQ ID NO: 478813 - RNA, 22 nt, Human
guggcucauaccuuuaauccca

SEQ ID NO: 478814 - RNA, 22 nt, Human
guggcucauacguguaauccca

SEQ ID NO: 478815 - RNA, 21 nt, Human
guggcucauacuuguaauccc

SEQ ID NO: 478816 - RNA, 19 nt, Human
guggcucaucccuguaauc

SEQ ID NO: 478817 - RNA, 22 nt, Human
guggcucaucccuguaauccca

SEQ ID NO: 478818 - RNA, 22 nt, Human
guggcucaucccuguaauucca

SEQ ID NO: 478819 - RNA, 22 nt, Human
guggcucaugacuauaauccca

SEQ ID NO: 478820 - RNA, 26 nt, Human
guggcucaugcacaccuguaauccca

SEQ ID NO: 478821 - RNA, 32 nt, Human
guggcucaugcacaccuguaaucccaaagugc

SEQ ID NO: 478822 - RNA, 22 nt, Human
guggcucaugcacguaauccca

SEQ ID NO: 478823 - RNA, 32 nt, Human
guggcucaugccaguaauugcagccucccuua

SEQ ID NO: 478824 - RNA, 22 nt, Human
guggcucaugcccauaauccca

SEQ ID NO: 478825 - RNA, 22 nt, Human
guggcucaugcccguaauccca

SEQ ID NO: 478826 - RNA, 22 nt, Human
guggcucaugccgauaauccca

SEQ ID NO: 478827 - RNA, 32 nt, Human
guggcucaugccuaauccuagcacuuugggag

SEQ ID NO: 478828 - RNA, 21 nt, Human
guggcucaugccuauaauccc

SEQ ID NO: 478829 - RNA, 22 nt, Human
guggcucaugccuauaauccca

SEQ ID NO: 478830 - RNA, 22 nt, Human
guggcucaugccuauaauccua

SEQ ID NO: 478831 - RNA, 22 nt, Human
guggcucaugccuauaaucuca

SEQ ID NO: 478832 - RNA, 22 nt, Human
guggcucaugccuauaauucca

SEQ ID NO: 478833 - RNA, 32 nt, Human
guggcucaugccuauauuccagcacuuuggga

SEQ ID NO: 478834 - RNA, 19 nt, Human
guggcucaugccucuaauc

SEQ ID NO: 478835 - RNA, 22 nt, Human
guggcucaugccucuaauccca

SEQ ID NO: 478836 - RNA, 32 nt, Human
guggcucaugccugaaucucagcacuuuggga

SEQ ID NO: 478837 - RNA, 32 nt, Human
guggcucaugccugccuguaaucccagcacug

SEQ ID NO: 478838 - RNA, 22 nt, Human
guggcucaugccuguaaaccca

SEQ ID NO: 478839 - RNA, 22 nt, Human
guggcucaugccuguaacccca

SEQ ID NO: 478840 - RNA, 22 nt, Human
guggcucaugccuguaagccca

SEQ ID NO: 478841 - RNA, 19 nt, Human
guggcucaugccuguaauc

SEQ ID NO: 478842 - RNA, 32 nt, Human
guggcucaugccuguaaucaaucccagcacuu

SEQ ID NO: 478843 - RNA, 20 nt, Human
guggcucaugccuguaaucc

SEQ ID NO: 478844 - RNA, 32 nt, Human
guggcucaugccuguaauccagcacuuuggga

SEQ ID NO: 478845 - RNA, 21 nt, Human
guggcucaugccuguaauccc

SEQ ID NO: 478846 - RNA, 22 nt, Human
guggcucaugccuguaauccca

SEQ ID NO: 478847 - RNA, 22 nt, Human
guggcucaugccuguaauccua

SEQ ID NO: 478848 - RNA, 22 nt, Human
guggcucaugccuguaaucgca

SEQ ID NO: 478849 - RNA, 22 nt, Human
guggcucaugccuguaaucuca

SEQ ID NO: 478850 - RNA, 19 nt, Human
guggcucaugccuguaauu

SEQ ID NO: 478851 - RNA, 22 nt, Human
guggcucaugccuguaauucca

SEQ ID NO: 478852 - RNA, 20 nt, Human
guggcucaugccuguagucc

SEQ ID NO: 478853 - RNA, 22 nt, Human
guggcucaugccuguaguccca

SEQ ID NO: 478854 - RNA, 24 nt, Human
guggcucaugccuguauaauccca

SEQ ID NO: 478855 - RNA, 32 nt, Human
guggcucaugccuguauccagcacuuugggag

SEQ ID NO: 478856 - RNA, 32 nt, Human
guggcucaugccuguaucccagcacuuuggga

SEQ ID NO: 478857 - RNA, 22 nt, Human
guggcucaugccuguauuccca

SEQ ID NO: 478858 - RNA, 19 nt, Human
guggcucaugccugucauc

SEQ ID NO: 478859 - RNA, 22 nt, Human
guggcucaugccugucauccca

SEQ ID NO: 478860 - RNA, 19 nt, Human
guggcucaugccugugauc

SEQ ID NO: 478861 - RNA, 22 nt, Human
guggcucaugccugugauccca

SEQ ID NO: 478862 - RNA, 20 nt, Human
guggcucaugccuguggucc

SEQ ID NO: 478863 - RNA, 32 nt, Human
guggcucaugccuuaaucccagcacuuuggga

SEQ ID NO: 478864 - RNA, 32 nt, Human
guggcucaugccuuaaucccagcacuuuugga

SEQ ID NO: 478865 - RNA, 19 nt, Human
guggcucaugccuuuaauc

SEQ ID NO: 478866 - RNA, 22 nt, Human
guggcucaugccuuuaauccca

SEQ ID NO: 478867 - RNA, 19 nt, Human
guggcucaugcuuguaauc

SEQ ID NO: 478868 - RNA, 22 nt, Human
guggcucaugcuuguaauccca

SEQ ID NO: 478869 - RNA, 22 nt, Human
guggcucaugcuuguaauccua

SEQ ID NO: 478870 - RNA, 22 nt, Human
guggcucaugcuuguaaucuca

SEQ ID NO: 478871 - RNA, 22 nt, Human
guggcucaugcuuguaauucca

SEQ ID NO: 478872 - RNA, 32 nt, Human
guggcucauggcuacgcuccagccccgggugu

SEQ ID NO: 478873 - RNA, 32 nt, Human
guggcucaugggcggaggagggcagauuacuu

SEQ ID NO: 478874 - RNA, 22 nt, Human
guggcucauguauguaauccua

SEQ ID NO: 478875 - RNA, 22 nt, Human
guggcucaugucuauaauccca

SEQ ID NO: 478876 - RNA, 22 nt, Human
guggcucaugucuguaauccca

SEQ ID NO: 478877 - RNA, 22 nt, Human
guggcucauguguguaauccca

SEQ ID NO: 478878 - RNA, 22 nt, Human
guggcucauguuuguaauccua

SEQ ID NO: 478879 - RNA, 19 nt, Human
guggcucauuccuguaauc

SEQ ID NO: 478880 - RNA, 22 nt, Human
guggcucauuccuguaauccca

SEQ ID NO: 478881 - RNA, 22 nt, Human
guggcucccaccuauaauccca

SEQ ID NO: 478882 - RNA, 22 nt, Human
guggcucccaccuauaauccua

SEQ ID NO: 478883 - RNA, 22 nt, Human
guggcucccaccuguaaucuca

SEQ ID NO: 478884 - RNA, 22 nt, Human
guggcucccaccuguaguccca

SEQ ID NO: 478885 - RNA, 17 nt, Human
guggcucccagcagagg

SEQ ID NO: 478886 - RNA, 32 nt, Human
guggcuccccacuuccgacuggcucccuucgg

SEQ ID NO: 478887 - RNA, 20 nt, Human
guggcucccccagagcacuu

SEQ ID NO: 478888 - RNA, 32 nt, Human
guggcuccccucaucagcuccccacaccaguc

SEQ ID NO: 478889 - RNA, 22 nt, Human
guggcucccgccuguaauccca

SEQ ID NO: 478890 - RNA, 22 nt, Human
guggcucccgccuguaauccua

SEQ ID NO: 478891 - RNA, 32 nt, Human
guggcucccugcagcggauccugggugcaggg

SEQ ID NO: 478892 - RNA, 32 nt, Human
guggcucccugccuaugccucuaagcuguauu

SEQ ID NO: 478893 - RNA, 22 nt, Human
guggcuccgaccuguaauccca

SEQ ID NO: 478894 - RNA, 32 nt, Human
guggcuccgagggcgggagcugagccgggccc

SEQ ID NO: 478895 - RNA, 32 nt, Human
guggcuccgggacacgccagcuccagcaggcg

SEQ ID NO: 478896 - RNA, 32 nt, Human
guggcuccuaaaggaggcagaucuuuccaagg

SEQ ID NO: 478897 - RNA, 32 nt, Human
guggcuccucaagccugccuguccugcagagu

SEQ ID NO: 478898 - RNA, 32 nt, Human
guggcuccuccaccaccuucaaacccaggaca

SEQ ID NO: 478899 - RNA, 32 nt, Human
guggcuccuccccucgcuccucgcccugggcc

SEQ ID NO: 478900 - RNA, 19 nt, Human
guggcuccugccuguaauc

SEQ ID NO: 478901 - RNA, 22 nt, Human
guggcuccugccuguaauccca

SEQ ID NO: 478902 - RNA, 22 nt, Human
guggcuccugccuguaaucgca

SEQ ID NO: 478903 - RNA, 22 nt, Human
guggcuccugccuguauuccca

SEQ ID NO: 478904 - RNA, 32 nt, Human
guggcuccugggagacuuuuccucccugccuc

SEQ ID NO: 478905 - RNA, 32 nt, Human
guggcuccuuucucccuuccucuuggccucca

SEQ ID NO: 478906 - RNA, 32 nt, Human
guggcucgccuguaaucccagcacuuugggag

SEQ ID NO: 478907 - RNA, 22 nt, Human
guggcucgcgccuguaauccca

SEQ ID NO: 478908 - RNA, 22 nt, Human
guggcucgcgcuugugauccca

SEQ ID NO: 478909 - RNA, 32 nt, Human
guggcucggcaggccggccauggagccaggca

SEQ ID NO: 478910 - RNA, 22 nt, Human
guggcucgggccuguaauccca

SEQ ID NO: 478911 - RNA, 20 nt, Human
guggcucguaccuguaaucc

SEQ ID NO: 478912 - RNA, 32 nt, Human
guggcucguaccuguaauccagcacuuuggga

SEQ ID NO: 478913 - RNA, 19 nt, Human
guggcucgugccuguaauc

SEQ ID NO: 478914 - RNA, 22 nt, Human
guggcucgugccuguaauccca

SEQ ID NO: 478915 - RNA, 22 nt, Human
guggcucgugccuguaaucuca

SEQ ID NO: 478916 - RNA, 22 nt, Human
guggcucgugccuguaguccca

SEQ ID NO: 478917 - RNA, 22 nt, Human
guggcucgugcuuguaauccca

SEQ ID NO: 478918 - RNA, 32 nt, Human
guggcucuagaugaccuagaguucugggacug

SEQ ID NO: 478919 - RNA, 32 nt, Human
guggcucuagcucagggaaagccaggcccacc

SEQ ID NO: 478920 - RNA, 32 nt, Human
guggcucuaguuuuuggaccucaguaaugcca

SEQ ID NO: 478921 - RNA, 32 nt, Human
guggcucuccugauucuucacucuggggugcg

SEQ ID NO: 478922 - RNA, 22 nt, Human
guggcucucgccuauaauccca

SEQ ID NO: 478923 - RNA, 22 nt, Human
guggcucucgccuguaauccca

SEQ ID NO: 478924 - RNA, 22 nt, Human
guggcucucgccuguaaucuca

SEQ ID NO: 478925 - RNA, 32 nt, Human
guggcucugaagcugccuucagacaaggcuag

SEQ ID NO: 478926 - RNA, 32 nt, Human
guggcucugcagccccugcuccuuucugcggc

SEQ ID NO: 478927 - RNA, 32 nt, Human
guggcucugcguauacuacacacucauucucc

SEQ ID NO: 478928 - RNA, 32 nt, Human
guggcucuggacugcgcggacguuggcgucag

SEQ ID NO: 478929 - RNA, 32 nt, Human
guggcucugggccccaucucuccacuguccug

SEQ ID NO: 478930 - RNA, 32 nt, Human
guggcucugugggaaggagggagccgggagcc

SEQ ID NO: 478931 - RNA, 19 nt, Human
guggcucuugccuguaauc

SEQ ID NO: 478932 - RNA, 22 nt, Human
guggcucuugccuguaauccca

SEQ ID NO: 478933 - RNA, 22 nt, Human
guggcucuugucuguaauccca

SEQ ID NO: 478934 - RNA, 25 nt, Human
guggcucuugugcccugaaaucuca

SEQ ID NO: 478935 - RNA, 22 nt, Human
guggcugaagccugugauccca

SEQ ID NO: 478936 - RNA, 19 nt, Human
guggcugacaccuguaauc

SEQ ID NO: 478937 - RNA, 22 nt, Human
guggcugacaccuguaauccca

SEQ ID NO: 478938 - RNA, 19 nt, Human
guggcugacaucuguaauc

SEQ ID NO: 478939 - RNA, 21 nt, Human
guggcugacaucuguaauccc

SEQ ID NO: 478940 - RNA, 32 nt, Human
guggcugaccucugccccagcccucuuucuuc

SEQ ID NO: 478941 - RNA, 22 nt, Human
guggcugacgccuguaauccca

SEQ ID NO: 478942 - RNA, 32 nt, Human
guggcugagaaacugggcuggagucaggaggc

SEQ ID NO: 478943 - RNA, 32 nt, Human
guggcugagacgugggcucuccagggagccaa

SEQ ID NO: 478944 - RNA, 32 nt, Human
guggcugagcacuggggugggcuuggcacugu

SEQ ID NO: 478945 - RNA, 32 nt, Human
guggcugagcccccagccccuggaauaugcag

SEQ ID NO: 478946 - RNA, 20 nt, Human
guggcugagcucacccagca

SEQ ID NO: 478947 - RNA, 32 nt, Human
guggcugaggcaggagggauugcuugaaccug

SEQ ID NO: 478948 - RNA, 32 nt, Human
guggcugaggcccugaguguccagccacaugg

SEQ ID NO: 478949 - RNA, 32 nt, Human
guggcugagguggacggaucaccugaggucag

SEQ ID NO: 478950 - RNA, 17 nt, Human
guggcugagugguucua

SEQ ID NO: 478951 - RNA, 22 nt, Human
guggcugaugccuauaauccca

SEQ ID NO: 478952 - RNA, 22 nt, Human
guggcugaugccuguaauccca

SEQ ID NO: 478953 - RNA, 22 nt, Human
guggcugaugccugucauccca

SEQ ID NO: 478954 - RNA, 32 nt, Human
guggcugcaaggaagggaaacagucuauuaua

SEQ ID NO: 478955 - RNA, 18 nt, Human
guggcugcaccacuucca

SEQ ID NO: 478956 - RNA, 32 nt, Human
guggcugcagccugugcccccagcagguaggc

SEQ ID NO: 478957 - RNA, 32 nt, Human
guggcugcaggccuuuguuuuccaauggugcu

SEQ ID NO: 478958 - RNA, 32 nt, Human
guggcugcaguaagccaagaucacaccacugg

SEQ ID NO: 478959 - RNA, 32 nt, Human
guggcugcagugagcugagaucgugccacugc

SEQ ID NO: 478960 - RNA, 32 nt, Human
guggcugcagugagcugugaugugcccuuaug

SEQ ID NO: 478961 - RNA, 32 nt, Human
guggcugcagugguagccugaggaaggccaag

SEQ ID NO: 478962 - RNA, 32 nt, Human
guggcugcauuugugguacaggcuccucuucc

SEQ ID NO: 478963 - RNA, 32 nt, Human
guggcugccacaucuaccugcaagggccaggc

SEQ ID NO: 478964 - RNA, 32 nt, Human
guggcugccagcccacugccuccugccugggg

SEQ ID NO: 478965 - RNA, 32 nt, Human
guggcugccaucauuccuugguuugugacugc

SEQ ID NO: 478966 - RNA, 32 nt, Human
guggcugccauggaggaggacaagcucuuauc

SEQ ID NO: 478967 - RNA, 32 nt, Human
guggcugccgccgcaccagccucaguggcaga

SEQ ID NO: 478968 - RNA, 28 nt, Human
guggcugccggagcugccuccuccuccu

SEQ ID NO: 478969 - RNA, 32 nt, Human
guggcugccuaaagugcuucuuuucuaaccca

SEQ ID NO: 478970 - RNA, 32 nt, Human
guggcugccucugggggcaccagcaccuucug

SEQ ID NO: 478971 - RNA, 31 nt, Human
guggcugccugagggagucacuuguaugguc

SEQ ID NO: 478972 - RNA, 32 nt, Human
guggcugccugccugccugccugccucaguuu

SEQ ID NO: 478973 - RNA, 32 nt, Human
guggcugccugggacuggggccucucuccauc

SEQ ID NO: 478974 - RNA, 32 nt, Human
guggcugccugggcaccucucccaggaagugg

SEQ ID NO: 478975 - RNA, 31 nt, Human
guggcugccuucucugggccauggaucacac

SEQ ID NO: 478976 - RNA, 32 nt, Human
guggcugcggccguagccuguggcgggcaagc

SEQ ID NO: 478977 - RNA, 32 nt, Human
guggcugcuccagcuacugggcauuuugucug

SEQ ID NO: 478978 - RNA, 32 nt, Human
guggcugcugcuugcuugccuccucguggaga

SEQ ID NO: 478979 - RNA, 32 nt, Human
guggcuggaaacccaggcagggcugcaccaca

SEQ ID NO: 478980 - RNA, 32 nt, Human
guggcuggaagcacugaaccuaccucauccuc

SEQ ID NO: 478981 - RNA, 21 nt, Human
guggcuggacaggacugcagc

SEQ ID NO: 478982 - RNA, 22 nt, Human
guggcuggcaccuguaauccca

SEQ ID NO: 478983 - RNA, 22 nt, Human
guggcuggcaccuguaguccca

SEQ ID NO: 478984 - RNA, 32 nt, Human
guggcuggcaggugggugaggggcaggcuugg

SEQ ID NO: 478985 - RNA, 32 nt, Human
guggcuggccagauucugcccuuaggauccaa

SEQ ID NO: 478986 - RNA, 32 nt, Human
guggcuggccauggcgcuguucuacgucgcgc

SEQ ID NO: 478987 - RNA, 22 nt, Human
guggcuggcgccuguaauccca

SEQ ID NO: 478988 - RNA, 22 nt, Human
guggcuggcgccuguaguccca

SEQ ID NO: 478989 - RNA, 32 nt, Human
guggcuggcucucggcccugcccagcuuuguu

SEQ ID NO: 478990 - RNA, 32 nt, Human
guggcuggcugugccaucgucauagugcacag

SEQ ID NO: 478991 - RNA, 32 nt, Human
guggcugggaacaccuuccaccaugaccaccu

SEQ ID NO: 478992 - RNA, 32 nt, Human
guggcugggacuacaauugugagccaccaugc

SEQ ID NO: 478993 - RNA, 19 nt, Human
guggcugggagggcuccag

SEQ ID NO: 478994 - RNA, 32 nt, Human
guggcugggagguggggugcugaagcuugaag

SEQ ID NO: 478995 - RNA, 32 nt, Human
guggcugggauuacaggcaugugccaccacac

SEQ ID NO: 478996 - RNA, 32 nt, Human
guggcugggauuacaggugugcgccaccaugc

SEQ ID NO: 478997 - RNA, 32 nt, Human
guggcugggauuauaggcgugcaccaccacgc

SEQ ID NO: 478998 - RNA, 32 nt, Human
guggcugggauuauaggugcccaucaccacgc

SEQ ID NO: 478999 - RNA, 32 nt, Human
guggcugggauuauaggugugugccaccaugc

SEQ ID NO: 479000 - RNA, 32 nt, Human
guggcugggcaggcaaguucugugacaaagau

SEQ ID NO: 479001 - RNA, 32 nt, Human
guggcugggcagggcugggcagggccgcggac

SEQ ID NO: 479002 - RNA, 32 nt, Human
guggcugggccagcaggggcccucacucuuga

SEQ ID NO: 479003 - RNA, 20 nt, Human
guggcugggccucaccagca

SEQ ID NO: 479004 - RNA, 32 nt, Human
guggcugggcucuguguguggccugugucccc

SEQ ID NO: 479005 - RNA, 32 nt, Human
guggcugggcuggagugcaauggcgcgaucuu

SEQ ID NO: 479006 - RNA, 32 nt, Human
guggcugggcugggaauggagcugucagcacu

SEQ ID NO: 479007 - RNA, 32 nt, Human
guggcuggggccaagccccgagggccccugca

SEQ ID NO: 479008 - RNA, 32 nt, Human
guggcuggggccugacacugagcuguagggaa

SEQ ID NO: 479009 - RNA, 32 nt, Human
guggcuggggccugggagaggccaggugaaug

SEQ ID NO: 479010 - RNA, 32 nt, Human
guggcugggggaggcaggcucacuggccauuu

SEQ ID NO: 479011 - RNA, 32 nt, Human
guggcugggugagcgcucaucagucccagaca

SEQ ID NO: 479012 - RNA, 32 nt, Human
guggcuggucucaaacuccugggcucaaguga

SEQ ID NO: 479013 - RNA, 32 nt, Human
guggcuggucugguucucauguaaacccacuc

SEQ ID NO: 479014 - RNA, 32 nt, Human
guggcuggugaggcugcacagagcagauucaa

SEQ ID NO: 479015 - RNA, 22 nt, Human
guggcuggugccuguaguccca

SEQ ID NO: 479016 - RNA, 32 nt, Human
guggcuggugucauucugggucugacuggagc

SEQ ID NO: 479017 - RNA, 22 nt, Human
guggcuggugucuguaauccca

SEQ ID NO: 479018 - RNA, 32 nt, Human
guggcuguaggccuuuguuuuccaauggugcu

SEQ ID NO: 479019 - RNA, 32 nt, Human
guggcugucagacccgaagggguggggagcca

SEQ ID NO: 479020 - RNA, 32 nt, Human
guggcugucuacccacccucccuucuagcaga

SEQ ID NO: 479021 - RNA, 32 nt, Human
guggcugucucagggauacugccauuuguuuu

SEQ ID NO: 479022 - RNA, 32 nt, Human
guggcugugcaggauucaggguuugcagaaau

SEQ ID NO: 479023 - RNA, 32 nt, Human
guggcugugcccucaguugcccccagggcugg

SEQ ID NO: 479024 - RNA, 32 nt, Human
guggcuguggacuaagggagaaggauuaaggg

SEQ ID NO: 479025 - RNA, 32 nt, Human
guggcuguggcuuugcccuuuggccuuugcug

SEQ ID NO: 479026 - RNA, 32 nt, Human
guggcugugggacagagguuggaaggaaagga

SEQ ID NO: 479027 - RNA, 32 nt, Human
guggcugugggcaccaggcaugggacugagcc

SEQ ID NO: 479028 - RNA, 32 nt, Human
guggcuguggugaggaguaugucgccugccuc

SEQ ID NO: 479029 - RNA, 32 nt, Human
guggcugugugccgggacaagauguuuguauu

SEQ ID NO: 479030 - RNA, 32 nt, Human
guggcuguguggagcucagcuguguugugugg

SEQ ID NO: 479031 - RNA, 32 nt, Human
guggcuguguucucuccauggguggggucggc

SEQ ID NO: 479032 - RNA, 19 nt, Human
guggcuguuucucccggca

SEQ ID NO: 479033 - RNA, 32 nt, Human
guggcuguuuuuaaaaaguaaaguucuuagag

SEQ ID NO: 479034 - RNA, 20 nt, Human
guggcuuaaaauaaauccca

SEQ ID NO: 479035 - RNA, 32 nt, Human
guggcuuaaucugaagguucucagucaaauuc

SEQ ID NO: 479036 - RNA, 22 nt, Human
guggcuuacaccuauaauccca

SEQ ID NO: 479037 - RNA, 20 nt, Human
guggcuuacaccuguaaccc

SEQ ID NO: 479038 - RNA, 22 nt, Human
guggcuuacaccuguaacccca

SEQ ID NO: 479039 - RNA, 19 nt, Human
guggcuuacaccuguaauc

SEQ ID NO: 479040 - RNA, 22 nt, Human
guggcuuacaccuguaauccca

SEQ ID NO: 479041 - RNA, 22 nt, Human
guggcuuacaccuguaauccua

SEQ ID NO: 479042 - RNA, 22 nt, Human
guggcuuacacggugaaaccca

SEQ ID NO: 479043 - RNA, 32 nt, Human
guggcuuacacggugaaacccacgucucuacu

SEQ ID NO: 479044 - RNA, 20 nt, Human
guggcuuacacuuguaaccc

SEQ ID NO: 479045 - RNA, 20 nt, Human
guggcuuacagaugaaccca

SEQ ID NO: 479046 - RNA, 19 nt, Human
guggcuuacaucuguaauc

SEQ ID NO: 479047 - RNA, 22 nt, Human
guggcuuacaucuguaauccca

SEQ ID NO: 479048 - RNA, 22 nt, Human
guggcuuaccccuguaauccca

SEQ ID NO: 479049 - RNA, 22 nt, Human
guggcuuacgccuauaauccca

SEQ ID NO: 479050 - RNA, 22 nt, Human
guggcuuacgccuguaauccca

SEQ ID NO: 479051 - RNA, 22 nt, Human
guggcuuacgccuguaauccua

SEQ ID NO: 479052 - RNA, 22 nt, Human
guggcuuacgcuuguaguccca

SEQ ID NO: 479053 - RNA, 32 nt, Human
guggcuuaggccagggugggagcagugaacgg

SEQ ID NO: 479054 - RNA, 32 nt, Human
guggcuuaucuggagccaccugcccaagucuu

SEQ ID NO: 479055 - RNA, 22 nt, Human
guggcuuaugccuguaacccca

SEQ ID NO: 479056 - RNA, 19 nt, Human
guggcuuaugccuguaauc

SEQ ID NO: 479057 - RNA, 21 nt, Human
guggcuuaugccuguaauccc

SEQ ID NO: 479058 - RNA, 22 nt, Human
guggcuuaugccuguaauccca

SEQ ID NO: 479059 - RNA, 22 nt, Human
guggcuuaugccuguaauccua

SEQ ID NO: 479060 - RNA, 20 nt, Human
guggcuuaugccuguaaucu

SEQ ID NO: 479061 - RNA, 22 nt, Human
guggcuuaugccuguaaucuca

SEQ ID NO: 479062 - RNA, 22 nt, Human
guggcuuaugcuuguaauccca

SEQ ID NO: 479063 - RNA, 22 nt, Human
guggcuuauuccuguaauccca

SEQ ID NO: 479064 - RNA, 32 nt, Human
guggcuucaaacauuauggagaugucuuuaau

SEQ ID NO: 479065 - RNA, 32 nt, Human
guggcuucaaucuccccaccuaggaugucagc

SEQ ID NO: 479066 - RNA, 23 nt, Human
guggcuucacgccuguaauacca

SEQ ID NO: 479067 - RNA, 20 nt, Human
guggcuucacuuguaauccc

SEQ ID NO: 479068 - RNA, 26 nt, Human
guggcuucagaacuucagggcagcug

SEQ ID NO: 479069 - RNA, 32 nt, Human
guggcuucagauuggagaccagccugggacuu

SEQ ID NO: 479070 - RNA, 32 nt, Human
guggcuucagcaugucguccucggugaaaacc

SEQ ID NO: 479071 - RNA, 32 nt, Human
guggcuuccaccucagcucuagaagccugcuc

SEQ ID NO: 479072 - RNA, 27 nt, Human
guggcuuccaggccucagagcugugug

SEQ ID NO: 479073 - RNA, 32 nt, Human
guggcuucccuucucccuccaggccaaagugc

SEQ ID NO: 479074 - RNA, 32 nt, Human
guggcuuccucuuuucuugcugacccuucgga

SEQ ID NO: 479075 - RNA, 32 nt, Human
guggcuuccugccucugaagacagcacacaac

SEQ ID NO: 479076 - RNA, 32 nt, Human
guggcuuccuugcauccuccauccuguuacuc

SEQ ID NO: 479077 - RNA, 32 nt, Human
guggcuucucauuuuccauucccuucacugug

SEQ ID NO: 479078 - RNA, 32 nt, Human
guggcuucucucucagggguaacauuuacuuc

SEQ ID NO: 479079 - RNA, 32 nt, Human
guggcuucuguaaccagggcugucuucagaug

SEQ ID NO: 479080 - RNA, 32 nt, Human
guggcuucuguaaucccaggacuuugggaggc

SEQ ID NO: 479081 - RNA, 19 nt, Human
guggcuugaauauauccca

SEQ ID NO: 479082 - RNA, 32 nt, Human
guggcuugacaaucauuugagcuuugaaagca

SEQ ID NO: 479083 - RNA, 32 nt, Human
guggcuugaggcaggccguccuggagggggcu

SEQ ID NO: 479084 - RNA, 22 nt, Human
guggcuugcaccuguaauccca

SEQ ID NO: 479085 - RNA, 32 nt, Human
guggcuuggaguuuuguuguuguuuucuuggu

SEQ ID NO: 479086 - RNA, 32 nt, Human
guggcuuggcucugcuguggcccuccuggcug

SEQ ID NO: 479087 - RNA, 32 nt, Human
guggcuugggcaacagugagggaaauguugga

SEQ ID NO: 479088 - RNA, 20 nt, Human
guggcuugggcuucccagca

SEQ ID NO: 479089 - RNA, 32 nt, Human
guggcuugguuacugugacuguagcuggagug

SEQ ID NO: 479090 - RNA, 22 nt, Human
guggcuuguacccguaauccca

SEQ ID NO: 479091 - RNA, 20 nt, Human
guggcuugugccuguaaucc

SEQ ID NO: 479092 - RNA, 22 nt, Human
guggcuugugccuguaauccca

SEQ ID NO: 479093 - RNA, 22 nt, Human
guggcuuguuccuguaguccca

SEQ ID NO: 479094 - RNA, 32 nt, Human
guggcuuguuucaugguuuuuguauuuguguc

SEQ ID NO: 479095 - RNA, 32 nt, Human
guggcuuucccaagccuuggcaaaccagcuuc

SEQ ID NO: 479096 - RNA, 32 nt, Human
guggcuuuccugaggcagcagccuucguggca

SEQ ID NO: 479097 - RNA, 32 nt, Human
guggcuuucuuguggccccaugggaugcagcg

SEQ ID NO: 479098 - RNA, 32 nt, Human
guggcuuuggauuuccuuaugugucuuacagg

SEQ ID NO: 479099 - RNA, 32 nt, Human
guggcuuugugcggucuccuagggaaggggca

SEQ ID NO: 479100 - RNA, 32 nt, Human
guggcuuuucauggaugucucuagucagagaa

SEQ ID NO: 479101 - RNA, 32 nt, Human
guggcuuuucugcgaguucuucugccuccugc

SEQ ID NO: 479102 - RNA, 22 nt, Human
guggcuuuugccuguaauccca

SEQ ID NO: 479103 - RNA, 32 nt, Human
gugggaaaacagucagcuguccuggccaaagg

SEQ ID NO: 479104 - RNA, 24 nt, Human
gugggaaaaucacuugagcccagg

SEQ ID NO: 479105 - RNA, 24 nt, Human
gugggaaaaugacuugagcccagg

SEQ ID NO: 479106 - RNA, 32 nt, Human
gugggaaacaauucugguuuagugcaaacaug

SEQ ID NO: 479107 - RNA, 32 nt, Human
gugggaaacauccuggauuuuguuacuuggca

SEQ ID NO: 479108 - RNA, 32 nt, Human
gugggaaaccuucuagcaacaggaugacucug

SEQ ID NO: 479109 - RNA, 32 nt, Human
gugggaaacugaggcccagcuuggggaaggcc

SEQ ID NO: 479110 - RNA, 32 nt, Human
gugggaaagaaaugccuagaaaguguugucaa

SEQ ID NO: 479111 - RNA, 32 nt, Human
gugggaaagaggagcaggucuggagguuugug

SEQ ID NO: 479112 - RNA, 19 nt, Human
gugggaaagaggaggggga

SEQ ID NO: 479113 - RNA, 32 nt, Human
gugggaaagccucuaacagauccucaauucuu

SEQ ID NO: 479114 - RNA, 17 nt, Human
gugggaaaucucccagc

SEQ ID NO: 479115 - RNA, 32 nt, Human
gugggaaaugauuuaauuuuuccuauugcucu

SEQ ID NO: 479116 - RNA, 19 nt, Human
gugggaacagggaauugaa

SEQ ID NO: 479117 - RNA, 19 nt, Human
gugggaacauuaauuguca

SEQ ID NO: 479118 - RNA, 32 nt, Human
gugggaaccaauauguacauguuugcaauuau

SEQ ID NO: 479119 - RNA, 32 nt, Human
gugggaaccgggcacaacuaggaacaaugcca

SEQ ID NO: 479120 - RNA, 32 nt, Human
gugggaaccuguccguguuccugcguggaucc

SEQ ID NO: 479121 - RNA, 32 nt, Human
gugggaacgauggcagaugaucagggcuguau

SEQ ID NO: 479122 - RNA, 32 nt, Human
gugggaacugcagacauuccucucacagcuag

SEQ ID NO: 479123 - RNA, 32 nt, Human
gugggaacuggguggaacugaaaaggaagaaa

SEQ ID NO: 479124 - RNA, 32 nt, Human
gugggaacugucaugggugaucccagaauggg

SEQ ID NO: 479125 - RNA, 32 nt, Human
gugggaagagaagggaagccucuucaggguga

SEQ ID NO: 479126 - RNA, 32 nt, Human
gugggaagagaggaggccaggccaggcccuca

SEQ ID NO: 479127 - RNA, 32 nt, Human
gugggaagagggguuaaggugcagugaugaug

SEQ ID NO: 479128 - RNA, 32 nt, Human
gugggaagagugagccaggcaagaaagaaaag

SEQ ID NO: 479129 - RNA, 24 nt, Human
gugggaagaucacuugagcccagg

SEQ ID NO: 479130 - RNA, 24 nt, Human
gugggaagaucauuugagcccagg

SEQ ID NO: 479131 - RNA, 24 nt, Human
gugggaagaucccuugagcccagg

SEQ ID NO: 479132 - RNA, 22 nt, Human
gugggaagaucucuugagccca

SEQ ID NO: 479133 - RNA, 32 nt, Human
gugggaagaugccuuacgucugaucuugaugg

SEQ ID NO: 479134 - RNA, 24 nt, Human
gugggaagauggcuugagcccagg

SEQ ID NO: 479135 - RNA, 24 nt, Human
gugggaagauugccugagcucagg

SEQ ID NO: 479136 - RNA, 24 nt, Human
gugggaagauugcuugaacucagg

SEQ ID NO: 479137 - RNA, 24 nt, Human
gugggaagauugcuugagcccagg

SEQ ID NO: 479138 - RNA, 32 nt, Human
gugggaagauuggggaugggauccucacucag

SEQ ID NO: 479139 - RNA, 19 nt, Human
gugggaagcagcucugggg

SEQ ID NO: 479140 - RNA, 32 nt, Human
gugggaagccacggaagcagguucuuuauguc

SEQ ID NO: 479141 - RNA, 32 nt, Human
gugggaagccagggguuggagaaggugcuaca

SEQ ID NO: 479142 - RNA, 32 nt, Human
gugggaagccuguaaucccagcuacuugggag

SEQ ID NO: 479143 - RNA, 32 nt, Human
gugggaaggaaaggagcuuggcauugggagcc

SEQ ID NO: 479144 - RNA, 32 nt, Human
gugggaaggagagcgagccauaggggagugac

SEQ ID NO: 479145 - RNA, 32 nt, Human
gugggaaggagaggagugagugaaguagccug

SEQ ID NO: 479146 - RNA, 32 nt, Human
gugggaaggagagugucaaggacgaagaggag

SEQ ID NO: 479147 - RNA, 32 nt, Human
gugggaagggaugcuuucucuuugucgcccac

SEQ ID NO: 479148 - RNA, 32 nt, Human
gugggaaggggugauggaugaugaaccuggca

SEQ ID NO: 479149 - RNA, 32 nt, Human
gugggaagguaggugggaaaugacaagaugag

SEQ ID NO: 479150 - RNA, 32 nt, Human
gugggaaguggguuggagggaggccaggccgg

SEQ ID NO: 479151 - RNA, 32 nt, Human
gugggaauaucugggcaugcacugaagacacc

SEQ ID NO: 479152 - RNA, 32 nt, Human
gugggaaucaucgcucagguccucgcuccccu

SEQ ID NO: 479153 - RNA, 32 nt, Human
gugggaaucuuucaguugaaguacaauauguc

SEQ ID NO: 479154 - RNA, 32 nt, Human
gugggaaugaauuggcauugcaggaaagacag

SEQ ID NO: 479155 - RNA, 23 nt, Human
gugggaaugugacuugagcccag

SEQ ID NO: 479156 - RNA, 32 nt, Human
gugggaauuacagauaaacggaagccggcugg

SEQ ID NO: 479157 - RNA, 32 nt, Human
gugggaauucccaguuccuauccucugaguaa

SEQ ID NO: 479158 - RNA, 32 nt, Human
gugggacaaaagggagaaaaaggaagcaagau

SEQ ID NO: 479159 - RNA, 17 nt, Human
gugggacacaccuguga

SEQ ID NO: 479160 - RNA, 19 nt, Human
gugggacacugaucuguga

SEQ ID NO: 479161 - RNA, 32 nt, Human
gugggacagagguggagacaggugcagugacc

SEQ ID NO: 479162 - RNA, 22 nt, Human
gugggacagauuugguuuuuua

SEQ ID NO: 479163 - RNA, 32 nt, Human
gugggacagccaaguacucguuuccacaccaa

SEQ ID NO: 479164 - RNA, 32 nt, Human
gugggacagccaggccagaugaccugauucca

SEQ ID NO: 479165 - RNA, 32 nt, Human
gugggacagcgucugacgggaagccugaucug

SEQ ID NO: 479166 - RNA, 32 nt, Human
gugggacaggagacagauguuccaugacagcc

SEQ ID NO: 479167 - RNA, 32 nt, Human
gugggacagguaaacuacauucagcaggaacu

SEQ ID NO: 479168 - RNA, 32 nt, Human
gugggacaguacagugugagcccccgggaagu

SEQ ID NO: 479169 - RNA, 32 nt, Human
gugggacagugagaagacugagaagaugugaa

SEQ ID NO: 479170 - RNA, 32 nt, Human
gugggaccaacaccccucccacacucccccag

SEQ ID NO: 479171 - RNA, 32 nt, Human
gugggaccaggacaguggcuuaagucuccacu

SEQ ID NO: 479172 - RNA, 32 nt, Human
gugggaccaggacgguggcuuaagucuccacu

SEQ ID NO: 479173 - RNA, 19 nt, Human
gugggaccaucucuauucc

SEQ ID NO: 479174 - RNA, 18 nt, Human
gugggaccauuuuuucca

SEQ ID NO: 479175 - RNA, 32 nt, Human
gugggacccacccacccccauccaggaaccgu

SEQ ID NO: 479176 - RNA, 32 nt, Human
gugggacccacuggacacacacagucccuugu

SEQ ID NO: 479177 - RNA, 32 nt, Human
gugggaccccuuucauuuucaguuuugcucau

SEQ ID NO: 479178 - RNA, 32 nt, Human
gugggacccucccaccauggcagcugagcaca

SEQ ID NO: 479179 - RNA, 32 nt, Human
gugggaccggucgcuccgcccugcugcgcaga

SEQ ID NO: 479180 - RNA, 32 nt, Human
gugggacgaaugcacuugcuuccuguggcaau

SEQ ID NO: 479181 - RNA, 32 nt, Human
gugggacgaugaccaggagcuggaugaggagg

SEQ ID NO: 479182 - RNA, 24 nt, Human
gugggacggcuccagcucaggacu

SEQ ID NO: 479183 - RNA, 19 nt, Human
gugggacgggagauuacca

SEQ ID NO: 479184 - RNA, 32 nt, Human
gugggacgggaggcgggagggggcugguggug

SEQ ID NO: 479185 - RNA, 32 nt, Human
gugggacgucuguaaucccagcuacuugggag

SEQ ID NO: 479186 - RNA, 32 nt, Human
gugggacuacaggcacgugccaccauacucag

SEQ ID NO: 479187 - RNA, 19 nt, Human
gugggacuaggaacucagc

SEQ ID NO: 479188 - RNA, 32 nt, Human
gugggacuaggaggggaacagggcggagcuga

SEQ ID NO: 479189 - RNA, 32 nt, Human
gugggacucccagacacugccaccacagcuga

SEQ ID NO: 479190 - RNA, 32 nt, Human
gugggacuccgagccugggcuauuucuggcgc

SEQ ID NO: 479191 - RNA, 32 nt, Human
gugggacugaagacaguggucaagagacuuga

SEQ ID NO: 479192 - RNA, 32 nt, Human
gugggacugcuggcccugacucugcagcccac

SEQ ID NO: 479193 - RNA, 32 nt, Human
gugggacuggaagucgggcccugggcugcccg

SEQ ID NO: 479194 - RNA, 32 nt, Human
gugggacuggcuggaggccugccugugucuag

SEQ ID NO: 479195 - RNA, 32 nt, Human
gugggacugggcccuggacacaccccucagcc

SEQ ID NO: 479196 - RNA, 32 nt, Human
gugggacuggguuucuguagccaagccagacu

SEQ ID NO: 479197 - RNA, 32 nt, Human
gugggacuuccuccugcccuuucaaagaauaa

SEQ ID NO: 479198 - RNA, 29 nt, Human
gugggacuucuguguguguuuaggguugg

SEQ ID NO: 479199 - RNA, 32 nt, Human
gugggagaaacugccuccuacuuuuauaauac

SEQ ID NO: 479200 - RNA, 32 nt, Human
gugggagaagugaggcugugacugggguugga

SEQ ID NO: 479201 - RNA, 24 nt, Human
gugggagaaucaccugagcccagg

SEQ ID NO: 479202 - RNA, 24 nt, Human
gugggagaaucacuugagcccagg

SEQ ID NO: 479203 - RNA, 23 nt, Human
gugggagaaucgcuugagcccag

SEQ ID NO: 479204 - RNA, 32 nt, Human
gugggagaaucgcuugagcucaggaguucgag

SEQ ID NO: 479205 - RNA, 24 nt, Human
gugggagaaucgcuugaguccagg

SEQ ID NO: 479206 - RNA, 24 nt, Human
gugggagaaucucuugagcccagg

SEQ ID NO: 479207 - RNA, 32 nt, Human
gugggagaaucucuugagcccaggaauucgag

SEQ ID NO: 479208 - RNA, 24 nt, Human
gugggagaauggcuugagcccagg

SEQ ID NO: 479209 - RNA, 23 nt, Human
gugggagaauguuccccugggga

SEQ ID NO: 479210 - RNA, 24 nt, Human
gugggagaauuaccugagcccagg

SEQ ID NO: 479211 - RNA, 24 nt, Human
gugggagaauuacuuaagcccagg

SEQ ID NO: 479212 - RNA, 24 nt, Human
gugggagaauugccugagcccagg

SEQ ID NO: 479213 - RNA, 24 nt, Human
gugggagaauugcucaagcccagg

SEQ ID NO: 479214 - RNA, 32 nt, Human
gugggagaauugcuucaaccugggaggcagag

SEQ ID NO: 479215 - RNA, 24 nt, Human
gugggagaauugcuugaacccagg

SEQ ID NO: 479216 - RNA, 24 nt, Human
gugggagaauugcuugaacccggg

SEQ ID NO: 479217 - RNA, 24 nt, Human
gugggagaauugcuugaagccagg

SEQ ID NO: 479218 - RNA, 24 nt, Human
gugggagaauugcuugagcccagg

SEQ ID NO: 479219 - RNA, 32 nt, Human
gugggagaauuuccucucccaccuccucacau

SEQ ID NO: 479220 - RNA, 32 nt, Human
gugggagacccaacagugggugcaguuucuca

SEQ ID NO: 479221 - RNA, 20 nt, Human
gugggagacccgugauccca

SEQ ID NO: 479222 - RNA, 32 nt, Human
gugggagagagaggagacagaaagagcgagcg

SEQ ID NO: 479223 - RNA, 32 nt, Human
gugggagagaggcuacccagagcccggcccgc

SEQ ID NO: 479224 - RNA, 32 nt, Human
gugggagagccagagcaaagaggcagagaugc

SEQ ID NO: 479225 - RNA, 22 nt, Human
gugggagagggagggggguuaa

SEQ ID NO: 479226 - RNA, 32 nt, Human
gugggagaguugaccgugucacccccugcauu

SEQ ID NO: 479227 - RNA, 32 nt, Human
gugggagauggcaccagcagugccccagugcc

SEQ ID NO: 479228 - RNA, 23 nt, Human
gugggagauugcuugaguccagg

SEQ ID NO: 479229 - RNA, 32 nt, Human
gugggagcaauggcacugacacugcuagagga

SEQ ID NO: 479230 - RNA, 32 nt, Human
gugggagcaauuauaagacuggcuuauuuuga

SEQ ID NO: 479231 - RNA, 19 nt, Human
gugggagcacaucccagca

SEQ ID NO: 479232 - RNA, 32 nt, Human
gugggagcagaggagguggcuccugccccagu

SEQ ID NO: 479233 - RNA, 32 nt, Human
gugggagcagggugagcugcaggccuggggcc

SEQ ID NO: 479234 - RNA, 32 nt, Human
gugggagcagguggggucaggggccagagugc

SEQ ID NO: 479235 - RNA, 32 nt, Human
gugggagcaguuacaucgggucuggugcucca

SEQ ID NO: 479236 - RNA, 32 nt, Human
gugggagcaguuuauuccaguaucacccaggg

SEQ ID NO: 479237 - RNA, 32 nt, Human
gugggagccaacgguccauugaccucaacaag

SEQ ID NO: 479238 - RNA, 32 nt, Human
gugggagccacugcacccggccugaaugauga

SEQ ID NO: 479239 - RNA, 23 nt, Human
gugggagccacugcaccuggcuc

SEQ ID NO: 479240 - RNA, 32 nt, Human
gugggagcccaggcagaggaggcgccgagagc

SEQ ID NO: 479241 - RNA, 32 nt, Human
gugggagccgcuccagccaggccugggcagug

SEQ ID NO: 479242 - RNA, 32 nt, Human
gugggagccuccaggugggaggagagcaugcc

SEQ ID NO: 479243 - RNA, 32 nt, Human
gugggagccuccauccgcugcucuuuaccuuu

SEQ ID NO: 479244 - RNA, 32 nt, Human
gugggagccugggaggucaaggcugcagugag

SEQ ID NO: 479245 - RNA, 32 nt, Human
gugggagcgccuggcccucccucccuagcccu

SEQ ID NO: 479246 - RNA, 20 nt, Human
gugggagcgggaaggucaaa

SEQ ID NO: 479247 - RNA, 32 nt, Human
gugggagcguguugaagauuuuaaguggucuc

SEQ ID NO: 479248 - RNA, 19 nt, Human
gugggagcuaccuguggca

SEQ ID NO: 479249 - RNA, 32 nt, Human
gugggagcuggaagcaggcucccggcugagcg

SEQ ID NO: 479250 - RNA, 32 nt, Human
gugggagcuggcagagcgcagggaagaaguuc

SEQ ID NO: 479251 - RNA, 32 nt, Human
gugggagcuucucccuuccuuccaucuuccuc

SEQ ID NO: 479252 - RNA, 32 nt, Human
gugggaggaagagucaggcucacagcuggggu

SEQ ID NO: 479253 - RNA, 32 nt, Human
gugggaggaccugguggggaggaggccguguu

SEQ ID NO: 479254 - RNA, 24 nt, Human
gugggaggacgacuugagcccagg

SEQ ID NO: 479255 - RNA, 24 nt, Human
gugggaggacugcuuaagcucagg

SEQ ID NO: 479256 - RNA, 22 nt, Human
gugggaggacugcuugagccca

SEQ ID NO: 479257 - RNA, 24 nt, Human
gugggaggacugcuugagcccagg

SEQ ID NO: 479258 - RNA, 32 nt, Human
gugggaggacugggaguggggagccagaggga

SEQ ID NO: 479259 - RNA, 32 nt, Human
gugggaggagaaaucugaccugagaugggaaa

SEQ ID NO: 479260 - RNA, 23 nt, Human
gugggaggaggaggggaagcggc

SEQ ID NO: 479261 - RNA, 32 nt, Human
gugggaggaggaggggaagcggcgaaggagga

SEQ ID NO: 479262 - RNA, 32 nt, Human
gugggaggaggcaccggccgcgcggcgggagg

SEQ ID NO: 479263 - RNA, 24 nt, Human
gugggaggaguacuugagcccagg

SEQ ID NO: 479264 - RNA, 22 nt, Human
gugggaggauagcuugggccca

SEQ ID NO: 479265 - RNA, 32 nt, Human
gugggaggaucacaugaacccaggagguugaa

SEQ ID NO: 479266 - RNA, 24 nt, Human
gugggaggaucacucgaguccagg

SEQ ID NO: 479267 - RNA, 32 nt, Human
gugggaggaucacugagaccagccugggcaac

SEQ ID NO: 479268 - RNA, 24 nt, Human
gugggaggaucacuuaagcccggg

SEQ ID NO: 479269 - RNA, 24 nt, Human
gugggaggaucacuucagcccagg

SEQ ID NO: 479270 - RNA, 32 nt, Human
gugggaggaucacuugaacccaggagguagag

SEQ ID NO: 479271 - RNA, 21 nt, Human
gugggaggaucacuugagccc

SEQ ID NO: 479272 - RNA, 22 nt, Human
gugggaggaucacuugagccca

SEQ ID NO: 479273 - RNA, 23 nt, Human
gugggaggaucacuugagcccag

SEQ ID NO: 479274 - RNA, 24 nt, Human
gugggaggaucacuugagcccagg

SEQ ID NO: 479275 - RNA, 32 nt, Human
gugggaggaucacuugagcccaggaaguccag

SEQ ID NO: 479276 - RNA, 24 nt, Human
gugggaggaucauuugagcccagg

SEQ ID NO: 479277 - RNA, 22 nt, Human
gugggaggaucauuugugccca

SEQ ID NO: 479278 - RNA, 22 nt, Human
gugggaggaucccuugagccca

SEQ ID NO: 479279 - RNA, 23 nt, Human
gugggaggaucccuugagcccag

SEQ ID NO: 479280 - RNA, 24 nt, Human
gugggaggaucccuugagcccagg

SEQ ID NO: 479281 - RNA, 32 nt, Human
gugggaggaucccuugagcucaggaguuugag

SEQ ID NO: 479282 - RNA, 32 nt, Human
gugggaggaucccuugagcuggggagauggag

SEQ ID NO: 479283 - RNA, 24 nt, Human
gugggaggaucgccugagcccagg

SEQ ID NO: 479284 - RNA, 24 nt, Human
gugggaggaucgcuuaagcccagg

SEQ ID NO: 479285 - RNA, 22 nt, Human
gugggaggaucgcuugagccca

SEQ ID NO: 479286 - RNA, 23 nt, Human
gugggaggaucgcuugagcccag

SEQ ID NO: 479287 - RNA, 24 nt, Human
gugggaggaucgcuugagcccagg

SEQ ID NO: 479288 - RNA, 24 nt, Human
gugggaggaucgcuugagccccgg

SEQ ID NO: 479289 - RNA, 24 nt, Human
gugggaggaucgguugagcccagg

SEQ ID NO: 479290 - RNA, 32 nt, Human
gugggaggaucucucgggccagggagguugag

SEQ ID NO: 479291 - RNA, 24 nt, Human
gugggaggaucucuugagcccagg

SEQ ID NO: 479292 - RNA, 32 nt, Human
gugggaggaucucuugagccugggaggucaag

SEQ ID NO: 479293 - RNA, 32 nt, Human
gugggaggaucucuugggcccaggagauugag

SEQ ID NO: 479294 - RNA, 24 nt, Human
gugggaggauggcuugagcccagg

SEQ ID NO: 479295 - RNA, 32 nt, Human
gugggaggauggcuugagcucaggauguaagg

SEQ ID NO: 479296 - RNA, 22 nt, Human
gugggaggauuacuugagccca

SEQ ID NO: 479297 - RNA, 24 nt, Human
gugggaggauuacuugagcccagg

SEQ ID NO: 479298 - RNA, 22 nt, Human
gugggaggauuccuuggauccc

SEQ ID NO: 479299 - RNA, 32 nt, Human
gugggaggauugauugagcucaggagguggaa

SEQ ID NO: 479300 - RNA, 24 nt, Human
gugggaggauugcccgaguccagg

SEQ ID NO: 479301 - RNA, 24 nt, Human
gugggaggauugccugagcccagg

SEQ ID NO: 479302 - RNA, 24 nt, Human
gugggaggauugccugagccuagg

SEQ ID NO: 479303 - RNA, 24 nt, Human
gugggaggauugcuuaagcccggg

SEQ ID NO: 479304 - RNA, 22 nt, Human
gugggaggauugcuugaaccca

SEQ ID NO: 479305 - RNA, 24 nt, Human
gugggaggauugcuugaacccagg

SEQ ID NO: 479306 - RNA, 24 nt, Human
gugggaggauugcuugaacccggg

SEQ ID NO: 479307 - RNA, 24 nt, Human
gugggaggauugcuugagaccagg

SEQ ID NO: 479308 - RNA, 24 nt, Human
gugggaggauugcuugagccaagg

SEQ ID NO: 479309 - RNA, 22 nt, Human
gugggaggauugcuugagccca

SEQ ID NO: 479310 - RNA, 24 nt, Human
gugggaggauugcuugagcccagg

SEQ ID NO: 479311 - RNA, 24 nt, Human
gugggaggauugcuugagcccugg

SEQ ID NO: 479312 - RNA, 22 nt, Human
gugggaggauugcuugagccua

SEQ ID NO: 479313 - RNA, 24 nt, Human
gugggaggauugcuugagccuagg

SEQ ID NO: 479314 - RNA, 22 nt, Human
gugggaggauugcuugagcuca

SEQ ID NO: 479315 - RNA, 24 nt, Human
gugggaggauugcuugagcucagg

SEQ ID NO: 479316 - RNA, 32 nt, Human
gugggaggauugcuugagcucaggaauuugau

SEQ ID NO: 479317 - RNA, 32 nt, Human
gugggaggauugcuugagcucaggaguuugag

SEQ ID NO: 479318 - RNA, 32 nt, Human
gugggaggauugcuugagcucggaagauggag

SEQ ID NO: 479319 - RNA, 24 nt, Human
gugggaggauugcuugaggccagg

SEQ ID NO: 479320 - RNA, 24 nt, Human
gugggaggauugcuugaguccagg

SEQ ID NO: 479321 - RNA, 24 nt, Human
gugggaggauugcuugugcccagg

SEQ ID NO: 479322 - RNA, 24 nt, Human
gugggaggauugcuuuagcccagg

SEQ ID NO: 479323 - RNA, 32 nt, Human
gugggaggauuggagguuggugggauaggggu

SEQ ID NO: 479324 - RNA, 22 nt, Human
gugggaggauuguuugagccca

SEQ ID NO: 479325 - RNA, 24 nt, Human
gugggaggauuguuugagcccagg

SEQ ID NO: 479326 - RNA, 23 nt, Human
gugggaggauuugcuugaaccca

SEQ ID NO: 479327 - RNA, 24 nt, Human
gugggaggcaaacacgccuuguuc

SEQ ID NO: 479328 - RNA, 32 nt, Human
gugggaggcaagagugaagcagaggagagcaa

SEQ ID NO: 479329 - RNA, 22 nt, Human
gugggaggcacccccauugcuc

SEQ ID NO: 479330 - RNA, 22 nt, Human
gugggaggcaccuguaauccca

SEQ ID NO: 479331 - RNA, 26 nt, Human
gugggaggcacggccugggccugcuc

SEQ ID NO: 479332 - RNA, 21 nt, Human
gugggaggcacucccaucugc

SEQ ID NO: 479333 - RNA, 32 nt, Human
gugggaggcacucggucucuccccacaccucu

SEQ ID NO: 479334 - RNA, 32 nt, Human
gugggaggcagaggcaggagaaucauuugaac

SEQ ID NO: 479335 - RNA, 32 nt, Human
gugggaggcaggcagaaggugacaauugacac

SEQ ID NO: 479336 - RNA, 25 nt, Human
gugggaggcaggcagcugccugcuc

SEQ ID NO: 479337 - RNA, 32 nt, Human
gugggaggccgaggcagacggaucacuugagg

SEQ ID NO: 479338 - RNA, 32 nt, Human
gugggaggccgaggcaggaggaucacgagguc

SEQ ID NO: 479339 - RNA, 32 nt, Human
gugggaggccgaggcggauggaucaccugagg

SEQ ID NO: 479340 - RNA, 32 nt, Human
gugggaggccgaggcgggcggaucaccugaga

SEQ ID NO: 479341 - RNA, 32 nt, Human
gugggaggccgaggcggguggaucaccugagg

SEQ ID NO: 479342 - RNA, 22 nt, Human
gugggaggcggcaacauuguuu

SEQ ID NO: 479343 - RNA, 23 nt, Human
gugggaggcuccgcgcaccugcu

SEQ ID NO: 479344 - RNA, 32 nt, Human
gugggaggcugaggcaggagaaucacuugaac

SEQ ID NO: 479345 - RNA, 32 nt, Human
gugggaggcugaggcggguggaucaucugaga

SEQ ID NO: 479346 - RNA, 32 nt, Human
gugggaggcugagguggguggaucaccagguc

SEQ ID NO: 479347 - RNA, 32 nt, Human
gugggagggaaacuucauuucacuggaaugag

SEQ ID NO: 479348 - RNA, 32 nt, Human
gugggagggaccgugagggagccccagaaugg

SEQ ID NO: 479349 - RNA, 32 nt, Human
gugggagggaggcagugggaaguaguugaauc

SEQ ID NO: 479350 - RNA, 32 nt, Human
gugggagggcaccauccucuugcucugcucuc

SEQ ID NO: 479351 - RNA, 32 nt, Human
gugggagggcggcccuuuccagccucugcccc

SEQ ID NO: 479352 - RNA, 32 nt, Human
gugggagggcugggacaguuuuucuucuagaa

SEQ ID NO: 479353 - RNA, 32 nt, Human
gugggaggggaauaaaguucuguuauauuucc

SEQ ID NO: 479354 - RNA, 32 nt, Human
gugggaggggauaagguggcagaaggaaccug

SEQ ID NO: 479355 - RNA, 32 nt, Human
gugggaggggcagacucuguggucugagacac

SEQ ID NO: 479356 - RNA, 32 nt, Human
gugggaggggcaugucaguaagugguguguuc

SEQ ID NO: 479357 - RNA, 32 nt, Human
gugggagggggacaaggucaguauuuaccaaa

SEQ ID NO: 479358 - RNA, 32 nt, Human
gugggaggguaaccucacucuucuccaggcca

SEQ ID NO: 479359 - RNA, 32 nt, Human
gugggaggguccuugucugcucuccuuugaac

SEQ ID NO: 479360 - RNA, 24 nt, Human
gugggagggucgcuugagcccagg

SEQ ID NO: 479361 - RNA, 32 nt, Human
gugggaggguggacaggcaaugguucaguggc

SEQ ID NO: 479362 - RNA, 32 nt, Human
gugggaggguugaucacuugaggcugagaggu

SEQ ID NO: 479363 - RNA, 24 nt, Human
gugggaggguugcuugagcccagg

SEQ ID NO: 479364 - RNA, 32 nt, Human
gugggagguaacugaaucauggggacaggucu

SEQ ID NO: 479365 - RNA, 32 nt, Human
gugggagguaggcagagggcaggcaggagaaa

SEQ ID NO: 479366 - RNA, 32 nt, Human
gugggagguggaagaagggagaagaaagguga

SEQ ID NO: 479367 - RNA, 32 nt, Human
gugggagguugaggcaggagaaucacuugaac

SEQ ID NO: 479368 - RNA, 24 nt, Human
gugggagguuugcuuaagcccagg

SEQ ID NO: 479369 - RNA, 32 nt, Human
gugggaguagagugcccaggagagggucugag

SEQ ID NO: 479370 - RNA, 32 nt, Human
gugggagucaacucuagucacuguggugaugc

SEQ ID NO: 479371 - RNA, 32 nt, Human
gugggagucaccugaaagcugaaggaauggcu

SEQ ID NO: 479372 - RNA, 32 nt, Human
gugggagucaggagacaagacagcgcagagag

SEQ ID NO: 479373 - RNA, 32 nt, Human
gugggagucaucugucagccuucuauguuuca

SEQ ID NO: 479374 - RNA, 18 nt, Human
gugggaguccucccagca

SEQ ID NO: 479375 - RNA, 32 nt, Human
gugggagucugcacucuucaaggggccugggc

SEQ ID NO: 479376 - RNA, 32 nt, Human
gugggagugagcuggggguuuuguccauagcu

SEQ ID NO: 479377 - RNA, 32 nt, Human
gugggaguucagcugcuucucuugccuaagua

SEQ ID NO: 479378 - RNA, 32 nt, Human
gugggaguucugugccaggagcucccagagca

SEQ ID NO: 479379 - RNA, 32 nt, Human
gugggaguugacaggccagggagagggugaag

SEQ ID NO: 479380 - RNA, 32 nt, Human
gugggaguuggugagagcaggaggagaggugg

SEQ ID NO: 479381 - RNA, 23 nt, Human
gugggaguuuugcuugaggccag

SEQ ID NO: 479382 - RNA, 32 nt, Human
gugggauaaacggagagcagcagccgcccgcu

SEQ ID NO: 479383 - RNA, 32 nt, Human
gugggauaaagggaggaggaggagcuagcaga

SEQ ID NO: 479384 - RNA, 32 nt, Human
gugggauagauucucauggggagugggggagc

SEQ ID NO: 479385 - RNA, 32 nt, Human
gugggauaucagagccccagacagcacugccu

SEQ ID NO: 479386 - RNA, 32 nt, Human
gugggauaugaagcaugagacggaaugagguc

SEQ ID NO: 479387 - RNA, 20 nt, Human
gugggaucacgccuguaauc

SEQ ID NO: 479388 - RNA, 23 nt, Human
gugggaucacgccuguaauccca

SEQ ID NO: 479389 - RNA, 22 nt, Human
gugggaucauaggagccuucug

SEQ ID NO: 479390 - RNA, 32 nt, Human
gugggaucccaaccccaugagcucuccagggg

SEQ ID NO: 479391 - RNA, 32 nt, Human
gugggaucuggugggaaggaaaggcggaaggu

SEQ ID NO: 479392 - RNA, 32 nt, Human
gugggaugaagcacaucuuaaaggaaugaagu

SEQ ID NO: 479393 - RNA, 24 nt, Human
gugggaugaccgcuugagcccagg

SEQ ID NO: 479394 - RNA, 32 nt, Human
gugggaugagcgcggaggugucacagugcgcc

SEQ ID NO: 479395 - RNA, 32 nt, Human
gugggaugaggguggaggagagcaguguaaag

SEQ ID NO: 479396 - RNA, 32 nt, Human
gugggaugaucugucacuacaccugcagcacc

SEQ ID NO: 479397 - RNA, 32 nt, Human
gugggaugccuugccagugugucuuacuuggu

SEQ ID NO: 479398 - RNA, 32 nt, Human
gugggaugcuccucccuucucuaccucauggg

SEQ ID NO: 479399 - RNA, 32 nt, Human
gugggauggaguuucacuugucacccaggcug

SEQ ID NO: 479400 - RNA, 32 nt, Human
gugggauggccagaggaggggacaguguuggu

SEQ ID NO: 479401 - RNA, 32 nt, Human
gugggauggggagaaagguggggaagaagaca

SEQ ID NO: 479402 - RNA, 32 nt, Human
gugggauggggcuugggaguugcagugaaugu

SEQ ID NO: 479403 - RNA, 32 nt, Human
gugggaugggggaggguggggagcagcuccca

SEQ ID NO: 479404 - RNA, 32 nt, Human
gugggaugggggagugggggaggcagaaaaag

SEQ ID NO: 479405 - RNA, 32 nt, Human
gugggauggugcccagggguugccuugggacc

SEQ ID NO: 479406 - RNA, 32 nt, Human
gugggauguugugagaggaacaugagccagac

SEQ ID NO: 479407 - RNA, 32 nt, Human
gugggauuaucuugccuccucacuuagaauac

SEQ ID NO: 479408 - RNA, 32 nt, Human
gugggauuugagauguguuuuucuuuuugguu

SEQ ID NO: 479409 - RNA, 32 nt, Human
gugggcaaagugcugggauuacaagcaugagc

SEQ ID NO: 479410 - RNA, 24 nt, Human
gugggcaaauugcuugaccucagg

SEQ ID NO: 479411 - RNA, 32 nt, Human
gugggcaacagagugagaaccaucucuaccca

SEQ ID NO: 479412 - RNA, 32 nt, Human
gugggcaacguagugaaacccugccucuagaa

SEQ ID NO: 479413 - RNA, 32 nt, Human
gugggcaagccccgacacuggagcuuagccug

SEQ ID NO: 479414 - RNA, 24 nt, Human
gugggcaagcuuauggguuucuug

SEQ ID NO: 479415 - RNA, 32 nt, Human
gugggcaaguagaaggugagcaaggugaagag

SEQ ID NO: 479416 - RNA, 32 nt, Human
gugggcaaucucacuuggcaauaaaagaugac

SEQ ID NO: 479417 - RNA, 23 nt, Human
gugggcaauggcuugagcccagg

SEQ ID NO: 479418 - RNA, 32 nt, Human
gugggcaauuccagagaauucaguaccugcuu

SEQ ID NO: 479419 - RNA, 32 nt, Human
gugggcacacagauugccugggacccagccgu

SEQ ID NO: 479420 - RNA, 21 nt, Human
gugggcacaccccagacccca

SEQ ID NO: 479421 - RNA, 20 nt, Human
gugggcacacuccagggccc

SEQ ID NO: 479422 - RNA, 32 nt, Human
gugggcacagccuuccaugccuccaggagugu

SEQ ID NO: 479423 - RNA, 21 nt, Human
gugggcacagcuccccacaga

SEQ ID NO: 479424 - RNA, 32 nt, Human
gugggcacaggggccuucugggggacuuggcu

SEQ ID NO: 479425 - RNA, 26 nt, Human
gugggcacagggguggcuaguugggg

SEQ ID NO: 479426 - RNA, 19 nt, Human
gugggcacauguaauccca

SEQ ID NO: 479427 - RNA, 32 nt, Human
gugggcaccaggagcagagggaagggaggaug

SEQ ID NO: 479428 - RNA, 32 nt, Human
gugggcacccacccugcgauucuccacccuuu

SEQ ID NO: 479429 - RNA, 19 nt, Human
gugggcacccguaauccca

SEQ ID NO: 479430 - RNA, 23 nt, Human
gugggcaccggaaaggaggggac

SEQ ID NO: 479431 - RNA, 32 nt, Human
gugggcaccggagggaggaugggaugggcagg

SEQ ID NO: 479432 - RNA, 32 nt, Human
gugggcacggggagggcuuggccccgccuauc

SEQ ID NO: 479433 - RNA, 32 nt, Human
gugggcacuauggaagcuaaaccccaugcucc

SEQ ID NO: 479434 - RNA, 32 nt, Human
gugggcacucccugcucaugcccacagccucg

SEQ ID NO: 479435 - RNA, 21 nt, Human
gugggcacugacccaccccca

SEQ ID NO: 479436 - RNA, 32 nt, Human
gugggcacuggucacuccuaugugcuaagaca

SEQ ID NO: 479437 - RNA, 32 nt, Human
gugggcagaagcacaaacacacaugcugacag

SEQ ID NO: 479438 - RNA, 32 nt, Human
gugggcagaauccagaugagcuggccagugcu

SEQ ID NO: 479439 - RNA, 32 nt, Human
gugggcagacagauugccugggaccgagccgu

SEQ ID NO: 479440 - RNA, 32 nt, Human
gugggcagagagacauggcccugcuacugcuu

SEQ ID NO: 479441 - RNA, 32 nt, Human
gugggcagagcaccagccugggcaucaggaag

SEQ ID NO: 479442 - RNA, 32 nt, Human
gugggcagagccaccaggaacccagacaccac

SEQ ID NO: 479443 - RNA, 19 nt, Human
gugggcagagcugcccucu

SEQ ID NO: 479444 - RNA, 22 nt, Human
gugggcagagguggcgcccagg

SEQ ID NO: 479445 - RNA, 24 nt, Human
gugggcagauagcuugagccgagg

SEQ ID NO: 479446 - RNA, 22 nt, Human
gugggcagaucacaaggucagg

SEQ ID NO: 479447 - RNA, 24 nt, Human
gugggcagaucaccugaggucagg

SEQ ID NO: 479448 - RNA, 22 nt, Human
gugggcagaucacgagcucagg

SEQ ID NO: 479449 - RNA, 20 nt, Human
gugggcagaucacgagguca

SEQ ID NO: 479450 - RNA, 24 nt, Human
gugggcagaucacuugagcccagg

SEQ ID NO: 479451 - RNA, 32 nt, Human
gugggcagaucacuugagcucaggagcucaag

SEQ ID NO: 479452 - RNA, 24 nt, Human
gugggcagaucgccugagccuagg

SEQ ID NO: 479453 - RNA, 24 nt, Human
gugggcagaucuccugagcucagg

SEQ ID NO: 479454 - RNA, 32 nt, Human
gugggcagaucuccugagcucaggaguucgac

SEQ ID NO: 479455 - RNA, 24 nt, Human
gugggcagaugccagcggcccagg

SEQ ID NO: 479456 - RNA, 21 nt, Human
gugggcagaugucuuugaaga

SEQ ID NO: 479457 - RNA, 24 nt, Human
gugggcagauugccugagcucagg

SEQ ID NO: 479458 - RNA, 24 nt, Human
gugggcagauugcuugagcugagg

SEQ ID NO: 479459 - RNA, 22 nt, Human
gugggcagauugcuugauccua

SEQ ID NO: 479460 - RNA, 24 nt, Human
gugggcagauugcuugauccuagg

SEQ ID NO: 479461 - RNA, 24 nt, Human
gugggcagauugcuugcgcucugg

SEQ ID NO: 479462 - RNA, 32 nt, Human
gugggcagcacccucccccgcagcgggguagg

SEQ ID NO: 479463 - RNA, 32 nt, Human
gugggcagcagaaaggagaggcuccuugaagc

SEQ ID NO: 479464 - RNA, 32 nt, Human
gugggcagccccucuaccuccuggacugaacu

SEQ ID NO: 479465 - RNA, 21 nt, Human
gugggcagcccuggccucuug

SEQ ID NO: 479466 - RNA, 32 nt, Human
gugggcagccuccugcccucucugggucucag

SEQ ID NO: 479467 - RNA, 32 nt, Human
gugggcagcuucccacccucccugggccuugg

SEQ ID NO: 479468 - RNA, 32 nt, Human
gugggcaggagagagcaugugcaggggaacuc

SEQ ID NO: 479469 - RNA, 32 nt, Human
gugggcaggcaaccuccccgggcaggguccug

SEQ ID NO: 479470 - RNA, 32 nt, Human
gugggcaggcagcggagccaggggcugugaca

SEQ ID NO: 479471 - RNA, 32 nt, Human
gugggcaggcaggccagggcugcgcaucagug

SEQ ID NO: 479472 - RNA, 32 nt, Human
gugggcaggcgaggagcgggaagaccaucucu

SEQ ID NO: 479473 - RNA, 32 nt, Human
gugggcaggcuggauggaaaugggccagagaa

SEQ ID NO: 479474 - RNA, 32 nt, Human
gugggcagggaaauccugccacccucacuucu

SEQ ID NO: 479475 - RNA, 32 nt, Human
gugggcagggccgggggugguccagcccucgc

SEQ ID NO: 479476 - RNA, 32 nt, Human
gugggcaggggagagagggaaaugccaaaaac

SEQ ID NO: 479477 - RNA, 32 nt, Human
gugggcaggggguguggcaggagcucccagca

SEQ ID NO: 479478 - RNA, 32 nt, Human
gugggcaggguucuuaguggaugaguuacugg

SEQ ID NO: 479479 - RNA, 32 nt, Human
gugggcagucaccacuuauucaccaucaagca

SEQ ID NO: 479480 - RNA, 32 nt, Human
gugggcaguggcaucccagagcagcaggggua

SEQ ID NO: 479481 - RNA, 20 nt, Human
gugggcaguuugguuucuug

SEQ ID NO: 479482 - RNA, 32 nt, Human
gugggcaucauuuugugccccucaaaugucac

SEQ ID NO: 479483 - RNA, 32 nt, Human
gugggcauccuuccagcugacucaugguuuga

SEQ ID NO: 479484 - RNA, 32 nt, Human
gugggcaucuguccagccuggaagaggggcac

SEQ ID NO: 479485 - RNA, 32 nt, Human
gugggcaugccacccucacacacacagcuggg

SEQ ID NO: 479486 - RNA, 32 nt, Human
gugggcaugguggcucaugccuguaaucccag

SEQ ID NO: 479487 - RNA, 32 nt, Human
gugggcauuaacuauauugcuacagcaucuag

SEQ ID NO: 479488 - RNA, 23 nt, Human
gugggcauucacaccacccccca

SEQ ID NO: 479489 - RNA, 32 nt, Human
gugggccaagccuggcaaccuuguaguagaug

SEQ ID NO: 479490 - RNA, 32 nt, Human
gugggccacagccauggugggaguggccugga

SEQ ID NO: 479491 - RNA, 23 nt, Human
gugggccacaggcugguuucuug

SEQ ID NO: 479492 - RNA, 24 nt, Human
gugggccaccaguagcaucuucua

SEQ ID NO: 479493 - RNA, 32 nt, Human
gugggccacugcacaucugccucucucaggga

SEQ ID NO: 479494 - RNA, 32 nt, Human
gugggccacugguagagauugcccggaauaga

SEQ ID NO: 479495 - RNA, 32 nt, Human
gugggccagccgauuccuccagcccuggugcu

SEQ ID NO: 479496 - RNA, 32 nt, Human
gugggccagcugucacaggacagaggugagcu

SEQ ID NO: 479497 - RNA, 32 nt, Human
gugggccaggaguucaagaucagccuggccaa

SEQ ID NO: 479498 - RNA, 22 nt, Human
gugggccaggccugggcccagg

SEQ ID NO: 479499 - RNA, 21 nt, Human
gugggccaggcugcccuccau

SEQ ID NO: 479500 - RNA, 23 nt, Human
gugggccaggcuguggggacgac

SEQ ID NO: 479501 - RNA, 32 nt, Human
gugggccaguguccaagcagagcuugugaaga

SEQ ID NO: 479502 - RNA, 32 nt, Human
gugggccagugugccugguucuuccaauauuu

SEQ ID NO: 479503 - RNA, 32 nt, Human
gugggcccaccucugccuccacccucacugug

SEQ ID NO: 479504 - RNA, 32 nt, Human
gugggcccaccuggcccacuggcuguuuaugc

SEQ ID NO: 479505 - RNA, 32 nt, Human
gugggcccaggauccacccagagcaggcaggc

SEQ ID NO: 479506 - RNA, 32 nt, Human
gugggccccaggaagcugaggcauccagucac

SEQ ID NO: 479507 - RNA, 32 nt, Human
gugggcccccuucacgugggacccacuuccca

SEQ ID NO: 479508 - RNA, 32 nt, Human
gugggccccucccagcccgucuguugagggcc

SEQ ID NO: 479509 - RNA, 32 nt, Human
gugggcccucggugccugcugugaacugcuuu

SEQ ID NO: 479510 - RNA, 32 nt, Human
gugggcccugccucugccuguucuucuggaau

SEQ ID NO: 479511 - RNA, 32 nt, Human
gugggcccuggguuugaagcagccuggcuuuc

SEQ ID NO: 479512 - RNA, 32 nt, Human
gugggcccugucuucgggucucaggacccaaa

SEQ ID NO: 479513 - RNA, 32 nt, Human
gugggcccuugucucugcucugggucaggcga

SEQ ID NO: 479514 - RNA, 32 nt, Human
gugggcccuuucuccauagucugccgcuuccc

SEQ ID NO: 479515 - RNA, 32 nt, Human
gugggccgaagcagugccucugcgcaaucucc

SEQ ID NO: 479516 - RNA, 32 nt, Human
gugggccgcagguggagguguugggaaagcgc

SEQ ID NO: 479517 - RNA, 32 nt, Human
gugggccgcuacccuucuuucccuuuagaaaa

SEQ ID NO: 479518 - RNA, 32 nt, Human
gugggccgggcucacacacaaaugaugcuuca

SEQ ID NO: 479519 - RNA, 32 nt, Human
gugggccuaccaccuggugcccucauggagac

SEQ ID NO: 479520 - RNA, 32 nt, Human
gugggccuagaucacuggugugauaaacccca

SEQ ID NO: 479521 - RNA, 32 nt, Human
gugggccuauuccucucuaccuuuaaggacau

SEQ ID NO: 479522 - RNA, 32 nt, Human
gugggccucacccucuggcagcugagccaagc

SEQ ID NO: 479523 - RNA, 32 nt, Human
gugggccucgcccuuccucucccuccagguuu

SEQ ID NO: 479524 - RNA, 32 nt, Human
gugggccucugccuucucuucuguuuggccac

SEQ ID NO: 479525 - RNA, 32 nt, Human
gugggccucugguuuggggcgaggcagaggac

SEQ ID NO: 479526 - RNA, 32 nt, Human
gugggccugagugcugcuguguuuacuugugc

SEQ ID NO: 479527 - RNA, 32 nt, Human
gugggccugaugggcucggccacccagggaug

SEQ ID NO: 479528 - RNA, 32 nt, Human
gugggccugcagucccagcuaccugggaggcu

SEQ ID NO: 479529 - RNA, 32 nt, Human
gugggccugccuggcuuggcaggugcuuuuug

SEQ ID NO: 479530 - RNA, 32 nt, Human
gugggccugggcugggcuggggcuaggagggc

SEQ ID NO: 479531 - RNA, 32 nt, Human
gugggccuguaaucgcagcuacucaggaagcu

SEQ ID NO: 479532 - RNA, 32 nt, Human
gugggccuguggacugcagccucggcgaucag

SEQ ID NO: 479533 - RNA, 32 nt, Human
gugggccuuagccgucacccaccagcuuccuc

SEQ ID NO: 479534 - RNA, 32 nt, Human
gugggccuucccugggcugugcugcaggcaca

SEQ ID NO: 479535 - RNA, 32 nt, Human
gugggccuucuccuggccuuguucuugcucau

SEQ ID NO: 479536 - RNA, 32 nt, Human
gugggcgcagaugucaguguuccguggagagg

SEQ ID NO: 479537 - RNA, 32 nt, Human
gugggcgcaguggcucacaccuguaaucccag

SEQ ID NO: 479538 - RNA, 32 nt, Human
gugggcgcaucccucuuuuccuucccuggguu

SEQ ID NO: 479539 - RNA, 32 nt, Human
gugggcgccccuuccccagccucgcugccgcc

SEQ ID NO: 479540 - RNA, 32 nt, Human
gugggcgccuguaaucccagcuacucgggagg

SEQ ID NO: 479541 - RNA, 32 nt, Human
gugggcgccuguaaucccagcuacuugggagg

SEQ ID NO: 479542 - RNA, 32 nt, Human
gugggcgccuguaaucccaguuacucgggagg

SEQ ID NO: 479543 - RNA, 32 nt, Human
gugggcgccuguaaucucagcuacuugggagg

SEQ ID NO: 479544 - RNA, 32 nt, Human
gugggcgccuguaauuccagcuacucaggagg

SEQ ID NO: 479545 - RNA, 32 nt, Human
gugggcgccuguaauuccagcuacucaggagu

SEQ ID NO: 479546 - RNA, 32 nt, Human
gugggcgccuguaauuccagcuacucaggggg

SEQ ID NO: 479547 - RNA, 32 nt, Human
gugggcgccuguaauuccagcuacucgggagg

SEQ ID NO: 479548 - RNA, 32 nt, Human
gugggcgccuguaauuccagcuacucuggaag

SEQ ID NO: 479549 - RNA, 32 nt, Human
gugggcgcgcagcuggaaccuccggcugucag

SEQ ID NO: 479550 - RNA, 32 nt, Human
gugggcgcgggaggggcucggagccagggucg

SEQ ID NO: 479551 - RNA, 32 nt, Human
gugggcgcgguggcucuugccuguaaucccag

SEQ ID NO: 479552 - RNA, 32 nt, Human
gugggcgcugcuuccaggauaaggagacugag

SEQ ID NO: 479553 - RNA, 32 nt, Human
gugggcggagccacccgaaaggcuccggucgg

SEQ ID NO: 479554 - RNA, 32 nt, Human
gugggcggagggagaccgggaggcacgggcgc

SEQ ID NO: 479555 - RNA, 22 nt, Human
gugggcggaucacaaguucagg

SEQ ID NO: 479556 - RNA, 24 nt, Human
gugggcggaucaccugagcucagg

SEQ ID NO: 479557 - RNA, 32 nt, Human
gugggcggaucaccugagcucaggaguuuaag

SEQ ID NO: 479558 - RNA, 24 nt, Human
gugggcggaucaccugaggucagg

SEQ ID NO: 479559 - RNA, 24 nt, Human
gugggcggaucaccugaguucagg

SEQ ID NO: 479560 - RNA, 22 nt, Human
gugggcggaucacgaggucagg

SEQ ID NO: 479561 - RNA, 32 nt, Human
gugggcggaucacgaggucaggcgaucgagac

SEQ ID NO: 479562 - RNA, 23 nt, Human
gugggcggaucgcucgagcccag

SEQ ID NO: 479563 - RNA, 24 nt, Human
gugggcggaugacuggaguccagg

SEQ ID NO: 479564 - RNA, 24 nt, Human
gugggcggauugccugaguucagg

SEQ ID NO: 479565 - RNA, 24 nt, Human
gugggcggauugcuugagcuuagg

SEQ ID NO: 479566 - RNA, 32 nt, Human
gugggcggauugcuugagcuuaggaguuugag

SEQ ID NO: 479567 - RNA, 24 nt, Human
gugggcggauugcuugaggucggg

SEQ ID NO: 479568 - RNA, 32 nt, Human
gugggcgggagccugcagcaggcacaucugac

SEQ ID NO: 479569 - RNA, 32 nt, Human
gugggcgggagggagaggggguguccgagggc

SEQ ID NO: 479570 - RNA, 32 nt, Human
gugggcgggagggagagggguuguccgagggc

SEQ ID NO: 479571 - RNA, 32 nt, Human
gugggcgggcggcagagaacgggugaaguccg

SEQ ID NO: 479572 - RNA, 32 nt, Human
gugggcggggcugagagaggguaucagggaca

SEQ ID NO: 479573 - RNA, 23 nt, Human
gugggcgggggaggggguucuug

SEQ ID NO: 479574 - RNA, 32 nt, Human
gugggcguaguggcucuugccuguaaucccag

SEQ ID NO: 479575 - RNA, 32 nt, Human
gugggcgucuuccugccccaugcuccccugcc

SEQ ID NO: 479576 - RNA, 32 nt, Human
gugggcgucuuggagaacagagcgagauggag

SEQ ID NO: 479577 - RNA, 18 nt, Human
gugggcuacaggaagagg

SEQ ID NO: 479578 - RNA, 32 nt, Human
gugggcuaugccacuaggcccuggucuggcuu

SEQ ID NO: 479579 - RNA, 32 nt, Human
gugggcucacugcaaccucugccuuccagguu

SEQ ID NO: 479580 - RNA, 32 nt, Human
gugggcucacugcauuugguuuucuuuucaga

SEQ ID NO: 479581 - RNA, 32 nt, Human
gugggcucaggaauauauguaucuagcaagcu

SEQ ID NO: 479582 - RNA, 32 nt, Human
gugggcucauucucuccaagcugcuuuucauu

SEQ ID NO: 479583 - RNA, 32 nt, Human
gugggcuccagggacuggaguguaaugcucgg

SEQ ID NO: 479584 - RNA, 32 nt, Human
gugggcuccagucagucuuacacugcccuucu

SEQ ID NO: 479585 - RNA, 32 nt, Human
gugggcucccucugcccauggaaacgggcagc

SEQ ID NO: 479586 - RNA, 32 nt, Human
gugggcuccucccaggccugacugucaccaac

SEQ ID NO: 479587 - RNA, 32 nt, Human
gugggcuccucuaacaaagugcauuagccugg

SEQ ID NO: 479588 - RNA, 19 nt, Human
gugggcuccuguaguccca

SEQ ID NO: 479589 - RNA, 32 nt, Human
gugggcucggggaggugggagcagggaccauc

SEQ ID NO: 479590 - RNA, 24 nt, Human
gugggcucugaggacggcuucuug

SEQ ID NO: 479591 - RNA, 32 nt, Human
gugggcucugccagagcagccugugacuaaug

SEQ ID NO: 479592 - RNA, 32 nt, Human
gugggcucugcugugugcccucaggcaagcca

SEQ ID NO: 479593 - RNA, 32 nt, Human
gugggcugaacugucugcuugcuuggaaggcc

SEQ ID NO: 479594 - RNA, 32 nt, Human
gugggcugaacugugcccuccaccccaccaag

SEQ ID NO: 479595 - RNA, 24 nt, Human
gugggcugacugcuugagcucagg

SEQ ID NO: 479596 - RNA, 32 nt, Human
gugggcugagccagaggaaggcaggcaggagc

SEQ ID NO: 479597 - RNA, 32 nt, Human
gugggcugaggucagagguuggugggguguca

SEQ ID NO: 479598 - RNA, 32 nt, Human
gugggcugauaguugaucacacauugugcuuu

SEQ ID NO: 479599 - RNA, 32 nt, Human
gugggcugcagagugggcucccugccccucuc

SEQ ID NO: 479600 - RNA, 32 nt, Human
gugggcugcccaggaugcggugcgugcuucug

SEQ ID NO: 479601 - RNA, 32 nt, Human
gugggcugcgugugugguagggaugugcaggu

SEQ ID NO: 479602 - RNA, 32 nt, Human
gugggcugcguuuugggcaagacacugagcuc

SEQ ID NO: 479603 - RNA, 32 nt, Human
gugggcugcucuggcccuggugugcacggcug

SEQ ID NO: 479604 - RNA, 32 nt, Human
gugggcugcugcagcugcaugggugccugcug

SEQ ID NO: 479605 - RNA, 32 nt, Human
gugggcugcuggccaugaaucucugccucucc

SEQ ID NO: 479606 - RNA, 32 nt, Human
gugggcuggaugccgccaugcccaccgguuug

SEQ ID NO: 479607 - RNA, 32 nt, Human
gugggcuggcaccugggcacagugcuuccagg

SEQ ID NO: 479608 - RNA, 32 nt, Human
gugggcuggcgauucccuagccucagauggcu

SEQ ID NO: 479609 - RNA, 32 nt, Human
gugggcuggcgccgccgaggaggcaggagacc

SEQ ID NO: 479610 - RNA, 32 nt, Human
gugggcuggcgggguggguucacagcuggacu

SEQ ID NO: 479611 - RNA, 32 nt, Human
gugggcugggcccucgcuccugacuguugcug

SEQ ID NO: 479612 - RNA, 32 nt, Human
gugggcugggggcaguggcucacaccuauaau

SEQ ID NO: 479613 - RNA, 32 nt, Human
gugggcuggggugggaacaggauggcgggcaa

SEQ ID NO: 479614 - RNA, 32 nt, Human
gugggcugugcaggcugguggccugggugccu

SEQ ID NO: 479615 - RNA, 32 nt, Human
gugggcugugccucgggcuuggcuccaccuca

SEQ ID NO: 479616 - RNA, 24 nt, Human
gugggcuuagagggaggaccugau

SEQ ID NO: 479617 - RNA, 32 nt, Human
gugggcuuccaccucagacaguugcgcuggcu

SEQ ID NO: 479618 - RNA, 32 nt, Human
gugggcuuccccagguggccuggaggugggca

SEQ ID NO: 479619 - RNA, 32 nt, Human
gugggcuucucgggcgguggggugggcgcgga

SEQ ID NO: 479620 - RNA, 32 nt, Human
gugggcuucuggucgcacugggugacagcaca

SEQ ID NO: 479621 - RNA, 32 nt, Human
gugggcuuggagggugaagaggaugugguccu

SEQ ID NO: 479622 - RNA, 32 nt, Human
gugggcuuguguucuuguccugggucuuuguc

SEQ ID NO: 479623 - RNA, 32 nt, Human
gugggcuuugaaaccuaaugaaaccuguuagc

SEQ ID NO: 479624 - RNA, 18 nt, Human
guggggaaagagaugggg

SEQ ID NO: 479625 - RNA, 32 nt, Human
guggggaaagcaggggagccugugcuggguga

SEQ ID NO: 479626 - RNA, 32 nt, Human
guggggaagaccugggugcuucccugggugcc

SEQ ID NO: 479627 - RNA, 32 nt, Human
guggggaagagaguguuuauaauuauguuauu

SEQ ID NO: 479628 - RNA, 32 nt, Human
guggggaagcugggcagagagcagaggggguc

SEQ ID NO: 479629 - RNA, 32 nt, Human
guggggaaggagaguccccugaaggucugaca

SEQ ID NO: 479630 - RNA, 32 nt, Human
guggggaaggauuggugcuggggcaacaggaa

SEQ ID NO: 479631 - RNA, 32 nt, Human
guggggaaggcagaggaguaacuguggggacu

SEQ ID NO: 479632 - RNA, 32 nt, Human
guggggaagggaaagaaagacagaggagagag

SEQ ID NO: 479633 - RNA, 32 nt, Human
guggggaagggcccuggagaagcccucauccu

SEQ ID NO: 479634 - RNA, 32 nt, Human
guggggaaggggguggccaggagcagaaggaa

SEQ ID NO: 479635 - RNA, 32 nt, Human
guggggaaugaaguugggggaugugggggaag

SEQ ID NO: 479636 - RNA, 32 nt, Human
guggggaaugccuucuauguacacacuguucu

SEQ ID NO: 479637 - RNA, 32 nt, Human
guggggaauggacgccagcagaguuguaccag

SEQ ID NO: 479638 - RNA, 32 nt, Human
guggggacacuuguuuauaaaugcagaaucaa

SEQ ID NO: 479639 - RNA, 32 nt, Human
guggggacaguucuuccagcaggcacugguuu

SEQ ID NO: 479640 - RNA, 32 nt, Human
guggggaccaaaggaaacagagccagagcagc

SEQ ID NO: 479641 - RNA, 32 nt, Human
guggggaccagcuggccacauggugcugcuuu

SEQ ID NO: 479642 - RNA, 32 nt, Human
guggggaccccacggcaggcacccuaagucuu

SEQ ID NO: 479643 - RNA, 32 nt, Human
guggggacccguccaaggacaggcuggcugcu

SEQ ID NO: 479644 - RNA, 32 nt, Human
guggggacccugggcccaucucucccugcgca

SEQ ID NO: 479645 - RNA, 32 nt, Human
guggggacgcaggauggcggcagcaguggcgg

SEQ ID NO: 479646 - RNA, 32 nt, Human
guggggacucuggccucuccagacuaauguuc

SEQ ID NO: 479647 - RNA, 32 nt, Human
guggggacuggcugcccccuagagccugccag

SEQ ID NO: 479648 - RNA, 32 nt, Human
guggggacugugaauagcucuccagcaggaag

SEQ ID NO: 479649 - RNA, 32 nt, Human
guggggacuucugauuucuccaccccauagau

SEQ ID NO: 479650 - RNA, 32 nt, Human
guggggacuugaacagagcuccaugggagcug

SEQ ID NO: 479651 - RNA, 17 nt, Human
guggggagaaagaggga

SEQ ID NO: 479652 - RNA, 16 nt, Human
guggggagaaaguggg

SEQ ID NO: 479653 - RNA, 32 nt, Human
guggggagagaaguugaaggaucccgaagcuu

SEQ ID NO: 479654 - RNA, 32 nt, Human
guggggagagacggcaggugcagugauggcug

SEQ ID NO: 479655 - RNA, 32 nt, Human
guggggagagagaaggggaggaguaggguggg

SEQ ID NO: 479656 - RNA, 32 nt, Human
guggggagaggaccagcugggugcuugggcau

SEQ ID NO: 479657 - RNA, 32 nt, Human
guggggagaggcauggcugggguggggguggg

SEQ ID NO: 479658 - RNA, 32 nt, Human
guggggagagggcugggugauuguauucugug

SEQ ID NO: 479659 - RNA, 32 nt, Human
guggggagagugaagaaagagauagaauacag

SEQ ID NO: 479660 - RNA, 32 nt, Human
guggggagagugagccaggugagaaagaaaag

SEQ ID NO: 479661 - RNA, 32 nt, Human
guggggagaguucggaaagaaauauguuuuua

SEQ ID NO: 479662 - RNA, 32 nt, Human
guggggagauggguuagggaggaggacgggcu

SEQ ID NO: 479663 - RNA, 20 nt, Human
guggggagcagcucccagca

SEQ ID NO: 479664 - RNA, 32 nt, Human
guggggagcauggugggaaugagucuugcuuu

SEQ ID NO: 479665 - RNA, 22 nt, Human
guggggagccaggccccuggug

SEQ ID NO: 479666 - RNA, 18 nt, Human
guggggagccgaugggga

SEQ ID NO: 479667 - RNA, 32 nt, Human
guggggagcgagucacugccuccucugagcag

SEQ ID NO: 479668 - RNA, 32 nt, Human
guggggagcuggagaggacugaagagcugagg

SEQ ID NO: 479669 - RNA, 32 nt, Human
guggggaggacuuugguaucagguguggauag

SEQ ID NO: 479670 - RNA, 32 nt, Human
guggggaggagaaguggggaaagguggagcag

SEQ ID NO: 479671 - RNA, 32 nt, Human
guggggaggaggaggaagaagaggaggaggga

SEQ ID NO: 479672 - RNA, 32 nt, Human
guggggaggaggcacagcuagcugcacaguuc

SEQ ID NO: 479673 - RNA, 32 nt, Human
guggggaggaggucagaggagaugggggccgg

SEQ ID NO: 479674 - RNA, 32 nt, Human
guggggaggaggucagaggagaugggggcugg

SEQ ID NO: 479675 - RNA, 32 nt, Human
guggggaggcggacguuccagccggcauggcu

SEQ ID NO: 479676 - RNA, 32 nt, Human
guggggaggcuggaaagcaugguugccccgcc

SEQ ID NO: 479677 - RNA, 32 nt, Human
guggggagggaagggagccaagggauggacau

SEQ ID NO: 479678 - RNA, 32 nt, Human
guggggagggagaaggugguagcuuauguucu

SEQ ID NO: 479679 - RNA, 32 nt, Human
guggggagggagggagaggccgccacccccgc

SEQ ID NO: 479680 - RNA, 32 nt, Human
guggggagggagguggaggagccgugcaaucc

SEQ ID NO: 479681 - RNA, 32 nt, Human
guggggagggccucugacugcugggacugacc

SEQ ID NO: 479682 - RNA, 32 nt, Human
guggggaggggagauuguugagagauggacua

SEQ ID NO: 479683 - RNA, 32 nt, Human
guggggaggggaggcagguguggguagcgcac

SEQ ID NO: 479684 - RNA, 31 nt, Human
guggggaggguggaagaaaugguggacugua

SEQ ID NO: 479685 - RNA, 32 nt, Human
guggggaggguggaggggugacaguggaggaa

SEQ ID NO: 479686 - RNA, 32 nt, Human
guggggagguacaguggguggaagaggagaag

SEQ ID NO: 479687 - RNA, 22 nt, Human
guggggaguccuaagacagaca

SEQ ID NO: 479688 - RNA, 32 nt, Human
guggggagugccugcugggcaccugaaggaug

SEQ ID NO: 479689 - RNA, 32 nt, Human
guggggagugcugugucuccugggucugccca

SEQ ID NO: 479690 - RNA, 32 nt, Human
guggggaguggcugccccugccucagggucau

SEQ ID NO: 479691 - RNA, 32 nt, Human
guggggagugggaggaagagccugggacagug

SEQ ID NO: 479692 - RNA, 32 nt, Human
guggggagugggggucuuggaggcagggcugu

SEQ ID NO: 479693 - RNA, 32 nt, Human
guggggagugugagaggugcguuuggugcagc

SEQ ID NO: 479694 - RNA, 32 nt, Human
guggggaucagacagagauuggagagaagggc

SEQ ID NO: 479695 - RNA, 32 nt, Human
guggggaucagguuuggccaggagaacacuca

SEQ ID NO: 479696 - RNA, 32 nt, Human
guggggauccugcagucacacucuccaccuga

SEQ ID NO: 479697 - RNA, 32 nt, Human
guggggaucugguuccccuugagaccaugcgg

SEQ ID NO: 479698 - RNA, 19 nt, Human
guggggaucuucugagaca

SEQ ID NO: 479699 - RNA, 32 nt, Human
guggggaugggacagauaagaauaagauguuu

SEQ ID NO: 479700 - RNA, 22 nt, Human
guggggaugggaggggagagac

SEQ ID NO: 479701 - RNA, 32 nt, Human
guggggaugggaggggagagacagaaguugag

SEQ ID NO: 479702 - RNA, 32 nt, Human
guggggauguggcagugaggaagacgacagac

SEQ ID NO: 479703 - RNA, 32 nt, Human
guggggcaaagggcuggaccccugccaggucu

SEQ ID NO: 479704 - RNA, 32 nt, Human
guggggcaaggagauccucucuaaggccucug

SEQ ID NO: 479705 - RNA, 32 nt, Human
guggggcaaggcugggagaugcaggcucuguu

SEQ ID NO: 479706 - RNA, 32 nt, Human
guggggcaauccagagccaugggggcuuccca

SEQ ID NO: 479707 - RNA, 32 nt, Human
guggggcaauccagagccaugggggcuuucca

SEQ ID NO: 479708 - RNA, 32 nt, Human
guggggcaauccagagcugugggggcuuccau

SEQ ID NO: 479709 - RNA, 32 nt, Human
guggggcacugaggcagcccagccaggcugcc

SEQ ID NO: 479710 - RNA, 32 nt, Human
guggggcagaaggcacccuggccaugcacagg

SEQ ID NO: 479711 - RNA, 32 nt, Human
guggggcagagcaggguuaggaccgcguuacc

SEQ ID NO: 479712 - RNA, 32 nt, Human
guggggcagaucuuaucuuuguggauuacagg

SEQ ID NO: 479713 - RNA, 32 nt, Human
guggggcagcagcaguggagagaugggacaau

SEQ ID NO: 479714 - RNA, 32 nt, Human
guggggcagcggcgagcggaaagggaagccgg

SEQ ID NO: 479715 - RNA, 32 nt, Human
guggggcagcuccagcccugcccacaggccac

SEQ ID NO: 479716 - RNA, 17 nt, Human
guggggcaggagauggg

SEQ ID NO: 479717 - RNA, 32 nt, Human
guggggcaggagggugccugauuucggggagu

SEQ ID NO: 479718 - RNA, 32 nt, Human
guggggcaggagugccaggaccagccuguacc

SEQ ID NO: 479719 - RNA, 32 nt, Human
guggggcaggcggagguugcaguaagccaaga

SEQ ID NO: 479720 - RNA, 32 nt, Human
guggggcaggggucaggccagccuucugccau

SEQ ID NO: 479721 - RNA, 32 nt, Human
guggggcagggugagcaggggcuuccaggcug

SEQ ID NO: 479722 - RNA, 32 nt, Human
guggggcagggugagcguggaagaagggacgc

SEQ ID NO: 479723 - RNA, 32 nt, Human
guggggcagguguggagaagggcuuuaaggag

SEQ ID NO: 479724 - RNA, 32 nt, Human
guggggcagucagcuaagccauuugccuaagg

SEQ ID NO: 479725 - RNA, 32 nt, Human
guggggcagugugagguaguccuggauccccg

SEQ ID NO: 479726 - RNA, 32 nt, Human
guggggcaguguguggggaagcuggcugucgg

SEQ ID NO: 479727 - RNA, 32 nt, Human
guggggcauugagaauggaggcucccaggguc

SEQ ID NO: 479728 - RNA, 32 nt, Human
guggggccaauacccagaccccuucagccacc

SEQ ID NO: 479729 - RNA, 32 nt, Human
guggggccagagaaagcugggguuuccggugg

SEQ ID NO: 479730 - RNA, 32 nt, Human
guggggccagagcugggcucugaccucuguac

SEQ ID NO: 479731 - RNA, 32 nt, Human
guggggcccacccuccggucuguguaugauga

SEQ ID NO: 479732 - RNA, 21 nt, Human
guggggcccagcaaccugagu

SEQ ID NO: 479733 - RNA, 32 nt, Human
guggggcccagccacugcacuucaccggaugc

SEQ ID NO: 479734 - RNA, 32 nt, Human
guggggcccagccaggaggugggguguggacc

SEQ ID NO: 479735 - RNA, 32 nt, Human
guggggcccauggaggagacaggaagccucaa

SEQ ID NO: 479736 - RNA, 32 nt, Human
guggggcccauggccccagcuggcugggucgc

SEQ ID NO: 479737 - RNA, 32 nt, Human
guggggcccccuccucaucagaaucacuagau

SEQ ID NO: 479738 - RNA, 32 nt, Human
guggggccccugaucuaauauucaaaguguca

SEQ ID NO: 479739 - RNA, 32 nt, Human
guggggccccuggagugugcucuccuccagug

SEQ ID NO: 479740 - RNA, 32 nt, Human
guggggcccuccugcagguccuagaucugagg

SEQ ID NO: 479741 - RNA, 32 nt, Human
guggggcccucugcucaggcucagggagcucu

SEQ ID NO: 479742 - RNA, 32 nt, Human
guggggcccugacgcccaccucccaggugccc

SEQ ID NO: 479743 - RNA, 32 nt, Human
guggggcccuggacgguggcccagugguggca

SEQ ID NO: 479744 - RNA, 32 nt, Human
guggggcccuggauggcagcucuggcccagac

SEQ ID NO: 479745 - RNA, 32 nt, Human
guggggcccuggggccaccuggugggcucagg

SEQ ID NO: 479746 - RNA, 23 nt, Human
guggggccgggaccgcgagggag

SEQ ID NO: 479747 - RNA, 32 nt, Human
guggggccgugcgcuccuucagccuggaggcc

SEQ ID NO: 479748 - RNA, 32 nt, Human
guggggccugaggaggugggccuggaggugag

SEQ ID NO: 479749 - RNA, 32 nt, Human
guggggccuggacuugcucuccccugcuggaa

SEQ ID NO: 479750 - RNA, 32 nt, Human
guggggccugggaggggcaauccucaaaugcg

SEQ ID NO: 479751 - RNA, 32 nt, Human
guggggcgcuauucccaccccugggccugagu

SEQ ID NO: 479752 - RNA, 32 nt, Human
guggggcgggagccucucagcuguccagauuc

SEQ ID NO: 479753 - RNA, 32 nt, Human
guggggcgggcuggguaccugaggucaccagc

SEQ ID NO: 479754 - RNA, 32 nt, Human
guggggcuauaggcagccucucugaugcacuc

SEQ ID NO: 479755 - RNA, 32 nt, Human
guggggcuauucugugccuucuaccucuuucu

SEQ ID NO: 479756 - RNA, 31 nt, Human
guggggcucaauaaauggcucugugaacuuc

SEQ ID NO: 479757 - RNA, 21 nt, Human
guggggcucacaccuguaauc

SEQ ID NO: 479758 - RNA, 18 nt, Human
guggggcucagguuucca

SEQ ID NO: 479759 - RNA, 20 nt, Human
guggggcuccagaaucucca

SEQ ID NO: 479760 - RNA, 32 nt, Human
guggggcucccuaggccucucccucuucagag

SEQ ID NO: 479761 - RNA, 32 nt, Human
guggggcucugaccucagggcucccagcucgg

SEQ ID NO: 479762 - RNA, 32 nt, Human
guggggcugaccgauaagacccugaccaccuu

SEQ ID NO: 479763 - RNA, 32 nt, Human
guggggcugagacugggcugacaucuagaauc

SEQ ID NO: 479764 - RNA, 31 nt, Human
guggggcugaggagagaaaagggugauuagc

SEQ ID NO: 479765 - RNA, 32 nt, Human
guggggcugcccaggcaaagucagugaacaug

SEQ ID NO: 479766 - RNA, 32 nt, Human
guggggcugcggcucuggccucccaggcccau

SEQ ID NO: 479767 - RNA, 32 nt, Human
guggggcugcuuguugaaagauuuaagaguuu

SEQ ID NO: 479768 - RNA, 22 nt, Human
guggggcuggaaaaggguuaga

SEQ ID NO: 479769 - RNA, 32 nt, Human
guggggcuggagcugcucccaccucccugacc

SEQ ID NO: 479770 - RNA, 32 nt, Human
guggggcuggccggggacaggagggguggcca

SEQ ID NO: 479771 - RNA, 32 nt, Human
guggggcugggagcaugggcucucaggcugcu

SEQ ID NO: 479772 - RNA, 32 nt, Human
guggggcugggcagggaugggggcuugagaaa

SEQ ID NO: 479773 - RNA, 32 nt, Human
guggggcugggcugggcugggcugggcugggc

SEQ ID NO: 479774 - RNA, 32 nt, Human
guggggcuggggacccucacaggugacaggga

SEQ ID NO: 479775 - RNA, 32 nt, Human
guggggcuggggacuuugagggaguuggcucu

SEQ ID NO: 479776 - RNA, 32 nt, Human
guggggcuggggcagagcaggguuccuggggc

SEQ ID NO: 479777 - RNA, 32 nt, Human
guggggcuuucaacccucucccccaccaccca

SEQ ID NO: 479778 - RNA, 32 nt, Human
guggggcuuuugggagaugaccagggguggaa

SEQ ID NO: 479779 - RNA, 32 nt, Human
gugggggaaggggaggaggggaagaaggaaag

SEQ ID NO: 479780 - RNA, 24 nt, Human
gugggggaaucacuugagccuagg

SEQ ID NO: 479781 - RNA, 24 nt, Human
gugggggaaucccuugagcccagg

SEQ ID NO: 479782 - RNA, 32 nt, Human
gugggggaaucuugccuuucccuuucagagcc

SEQ ID NO: 479783 - RNA, 23 nt, Human
gugggggaauuuggcaccugcuc

SEQ ID NO: 479784 - RNA, 32 nt, Human
gugggggacuccguuuacuaccacagggagac

SEQ ID NO: 479785 - RNA, 32 nt, Human
gugggggagaaaaggcuucaaaggaacuuggu

SEQ ID NO: 479786 - RNA, 32 nt, Human
gugggggagagggaaagcagguauugcaguuu

SEQ ID NO: 479787 - RNA, 32 nt, Human
gugggggagagggaaauaaaggggagucaugc

SEQ ID NO: 479788 - RNA, 32 nt, Human
gugggggagagggcuggggcaggggagaggga

SEQ ID NO: 479789 - RNA, 21 nt, Human
gugggggagaggggaggggac

SEQ ID NO: 479790 - RNA, 32 nt, Human
gugggggagaggggaggggacgggcagggucu

SEQ ID NO: 479791 - RNA, 20 nt, Human
gugggggagaggggguuaga

SEQ ID NO: 479792 - RNA, 32 nt, Human
gugggggagagggguggaauggagaggaaaca

SEQ ID NO: 479793 - RNA, 32 nt, Human
gugggggagaucgcuuaaccccaggagguggg

SEQ ID NO: 479794 - RNA, 32 nt, Human
gugggggagcugcucacuggggagagggccug

SEQ ID NO: 479795 - RNA, 32 nt, Human
gugggggaggagcacaaaacuccagcccacug

SEQ ID NO: 479796 - RNA, 32 nt, Human
gugggggagggagggagacgugaagccuauuu

SEQ ID NO: 479797 - RNA, 32 nt, Human
gugggggaggguguuguuggggccugagaaga

SEQ ID NO: 479798 - RNA, 32 nt, Human
gugggggaggugaaccagggaggggcagggca

SEQ ID NO: 479799 - RNA, 32 nt, Human
gugggggaugcuaaccacagggccugagaagu

SEQ ID NO: 479800 - RNA, 19 nt, Human
gugggggauggggguuaaa

SEQ ID NO: 479801 - RNA, 20 nt, Human
gugggggcaaccccuggaua

SEQ ID NO: 479802 - RNA, 32 nt, Human
gugggggcagauggguggacagcugcugcugc

SEQ ID NO: 479803 - RNA, 32 nt, Human
gugggggcaggcagaagggagaaccagcucaa

SEQ ID NO: 479804 - RNA, 31 nt, Human
gugggggcaguguccauccacaaaggggcag

SEQ ID NO: 479805 - RNA, 32 nt, Human
gugggggcauacaccuguaauuccagcuacuc

SEQ ID NO: 479806 - RNA, 32 nt, Human
gugggggccacugaucuuccuggacaggagug

SEQ ID NO: 479807 - RNA, 32 nt, Human
gugggggccacugcgcauggcgcagggcuugg

SEQ ID NO: 479808 - RNA, 32 nt, Human
gugggggccacugcucacagaaggcucugggc

SEQ ID NO: 479809 - RNA, 32 nt, Human
gugggggccacuucugagcacccauguggcac

SEQ ID NO: 479810 - RNA, 20 nt, Human
gugggggccaucacaccugc

SEQ ID NO: 479811 - RNA, 32 nt, Human
gugggggcccagacagggaggcaccugccacc

SEQ ID NO: 479812 - RNA, 32 nt, Human
gugggggcccuggcuagggagugggacuggca

SEQ ID NO: 479813 - RNA, 32 nt, Human
gugggggccucccaggggcauuuacgcaccag

SEQ ID NO: 479814 - RNA, 32 nt, Human
gugggggccucuuuaccauagcuuaagaagua

SEQ ID NO: 479815 - RNA, 22 nt, Human
gugggggcucaugccuguaauc

SEQ ID NO: 479816 - RNA, 32 nt, Human
gugggggcucccuugaagagcuuccucccucc

SEQ ID NO: 479817 - RNA, 32 nt, Human
gugggggcuggaucugcccuuccuucggugcc

SEQ ID NO: 479818 - RNA, 32 nt, Human
gugggggcuuccagguggcccuucccggcaca

SEQ ID NO: 479819 - RNA, 32 nt, Human
gugggggcuuugcccaaugacuguagcauuca

SEQ ID NO: 479820 - RNA, 23 nt, Human
guggggggauucggggggauaaa

SEQ ID NO: 479821 - RNA, 22 nt, Human
guggggggcaccuguaacccca

SEQ ID NO: 479822 - RNA, 22 nt, Human
guggggggcagucaccacugcu

SEQ ID NO: 479823 - RNA, 17 nt, Human
guggggggccucccagc

SEQ ID NO: 479824 - RNA, 20 nt, Human
gugggggguaaucccugcuu

SEQ ID NO: 479825 - RNA, 23 nt, Human
guggggggucucuacgccagcuc

SEQ ID NO: 479826 - RNA, 22 nt, Human
guggggggucucugacuugcuc

SEQ ID NO: 479827 - RNA, 23 nt, Human
guggggggugaacaccuugguuc

SEQ ID NO: 479828 - RNA, 32 nt, Human
gugggggucugcgggcugggaacucucguccu

SEQ ID NO: 479829 - RNA, 32 nt, Human
gugggggucuggaggaggggacaugaggugag

SEQ ID NO: 479830 - RNA, 21 nt, Human
gugggggugacuuuuggcagc

SEQ ID NO: 479831 - RNA, 32 nt, Human
gugggggugagaaaaugcuucugccuguuguu

SEQ ID NO: 479832 - RNA, 32 nt, Human
gugggggugcagaugagguugcuagagaaugu

SEQ ID NO: 479833 - RNA, 32 nt, Human
guggggguggagaaaggggaagugguccagaa

SEQ ID NO: 479834 - RNA, 19 nt, Human
guggggguggagaugagga

SEQ ID NO: 479835 - RNA, 32 nt, Human
gugggggugggacuucuaacugcaugaauuaa

SEQ ID NO: 479836 - RNA, 32 nt, Human
gugggggugggaggggcagaggccaacggauc

SEQ ID NO: 479837 - RNA, 32 nt, Human
gugggggugggggaugaagggaagaaaucacu

SEQ ID NO: 479838 - RNA, 32 nt, Human
gugggggugggggcgggggccugcuuugaucg

SEQ ID NO: 479839 - RNA, 32 nt, Human
guggggguuggcaggauggugacauugaacau

SEQ ID NO: 479840 - RNA, 32 nt, Human
guggggguuggggguggggugggugggugcug

SEQ ID NO: 479841 - RNA, 32 nt, Human
gugggguaaggaggagaaaauaaaccaacaau

SEQ ID NO: 479842 - RNA, 32 nt, Human
gugggguaggagggacagagagacagggagag

SEQ ID NO: 479843 - RNA, 16 nt, Human
gugggguaggcugcug

SEQ ID NO: 479844 - RNA, 32 nt, Human
gugggguagggaggggcuuagaggucaucaac

SEQ ID NO: 479845 - RNA, 32 nt, Human
gugggguagggggugauggagacugugggcaa

SEQ ID NO: 479846 - RNA, 32 nt, Human
gugggguauccaggaacacccucccagcaggg

SEQ ID NO: 479847 - RNA, 32 nt, Human
guggggucaaaaagauagccaauuuccauuac

SEQ ID NO: 479848 - RNA, 32 nt, Human
guggggucagugugugagugagagcaggagua

SEQ ID NO: 479849 - RNA, 32 nt, Human
gugggguccaggcugggccaggagaccaggca

SEQ ID NO: 479850 - RNA, 18 nt, Human
guggggucccaaauucca

SEQ ID NO: 479851 - RNA, 18 nt, Human
gugggguccccucccagc

SEQ ID NO: 479852 - RNA, 32 nt, Human
gugggguccccuuugauguucucccccaaguu

SEQ ID NO: 479853 - RNA, 32 nt, Human
guggggucccugucccagcugcuccuggggag

SEQ ID NO: 479854 - RNA, 32 nt, Human
gugggguccucccauggaucaucaaggugaaa

SEQ ID NO: 479855 - RNA, 32 nt, Human
gugggguccuucaggacugcccuuuucugccu

SEQ ID NO: 479856 - RNA, 32 nt, Human
guggggucucuagccugauauuccauugaaag

SEQ ID NO: 479857 - RNA, 32 nt, Human
guggggucugaggagggcuggggaugaguaga

SEQ ID NO: 479858 - RNA, 32 nt, Human
guggggucuggccuguugauguuuacauggcg

SEQ ID NO: 479859 - RNA, 32 nt, Human
guggggucugggcaguggggaggcaggagcca

SEQ ID NO: 479860 - RNA, 32 nt, Human
guggggugaaggaggaggcaggugggcugcug

SEQ ID NO: 479861 - RNA, 32 nt, Human
guggggugaaggaggcgugcagggaggaaccu

SEQ ID NO: 479862 - RNA, 32 nt, Human
guggggugacucggagcagcagguguggcccc

SEQ ID NO: 479863 - RNA, 31 nt, Human
guggggugacuucccuggucaccaaggcagu

SEQ ID NO: 479864 - RNA, 32 nt, Human
guggggugagggugagcuuacucagggccccc

SEQ ID NO: 479865 - RNA, 32 nt, Human
guggggugaggguggccagcguacaacagguc

SEQ ID NO: 479866 - RNA, 32 nt, Human
guggggugauucacagcacaaaagaccucacc

SEQ ID NO: 479867 - RNA, 32 nt, Human
guggggugcagaggcagaagaugaaggacaaa

SEQ ID NO: 479868 - RNA, 32 nt, Human
guggggugcaggaaggcaccaagggugaaccc

SEQ ID NO: 479869 - RNA, 32 nt, Human
guggggugcgaggggagcaggacgcccggccg

SEQ ID NO: 479870 - RNA, 32 nt, Human
guggggugcugaagcuugaagagcauuucuuu

SEQ ID NO: 479871 - RNA, 32 nt, Human
gugggguggcuccgcccaggaggcggcugcac

SEQ ID NO: 479872 - RNA, 32 nt, Human
guggggugggaagagaggaggccaggccaggc

SEQ ID NO: 479873 - RNA, 32 nt, Human
guggggugggacaacagugaaaucuaaaguaa

SEQ ID NO: 479874 - RNA, 22 nt, Human
guggggugggaggggaggagac

SEQ ID NO: 479875 - RNA, 32 nt, Human
guggggugggggcagaggagaggcggauacag

SEQ ID NO: 479876 - RNA, 32 nt, Human
guggggugggggugggcagcagcaucccagcc

SEQ ID NO: 479877 - RNA, 32 nt, Human
guggggugggugggaaggaagggauuuggggg

SEQ ID NO: 479878 - RNA, 31 nt, Human
gugggguggguggggucgggugguggagagg

SEQ ID NO: 479879 - RNA, 32 nt, Human
gugggguguauucagagcaccucuccagaugc

SEQ ID NO: 479880 - RNA, 32 nt, Human
gugggguguccagcaaggguugcaaggaguag

SEQ ID NO: 479881 - RNA, 23 nt, Human
guggggugugaacugugguuuaa

SEQ ID NO: 479882 - RNA, 32 nt, Human
gugggguguggccgauuccucccuuuagucau

SEQ ID NO: 479883 - RNA, 32 nt, Human
guggggugugggcuggaagcacuggcucccug

SEQ ID NO: 479884 - RNA, 32 nt, Human
gugggguguuucgccugcaccccugguuccuu

SEQ ID NO: 479885 - RNA, 32 nt, Human
gugggguguuucgccugcaccccugguuucuu

SEQ ID NO: 479886 - RNA, 32 nt, Human
gugggguuaccacauggagagauuuuccauua

SEQ ID NO: 479887 - RNA, 31 nt, Human
gugggguucaauaaauggcucugugaacuuc

SEQ ID NO: 479888 - RNA, 32 nt, Human
gugggguucccaagcuuuaaucuuccuacccc

SEQ ID NO: 479889 - RNA, 32 nt, Human
gugggguugauaccccaacucccucuacccuu

SEQ ID NO: 479890 - RNA, 32 nt, Human
gugggguuggaaaaugacgagauggaggcuac

SEQ ID NO: 479891 - RNA, 32 nt, Human
gugggguuguagagagcuggaacucaccugcu

SEQ ID NO: 479892 - RNA, 32 nt, Human
gugggguuuaauaccuaggugauggguugaca

SEQ ID NO: 479893 - RNA, 32 nt, Human
gugggguuuaccccucacagguuuaagagacc

SEQ ID NO: 479894 - RNA, 32 nt, Human
gugggguuuuggccagcacagagccggggcgu

SEQ ID NO: 479895 - RNA, 32 nt, Human
guggguaaaugagagucgacuggauucuguca

SEQ ID NO: 479896 - RNA, 32 nt, Human
guggguaagaggagcagagggcaggggugcug

SEQ ID NO: 479897 - RNA, 32 nt, Human
guggguacagcccaguggaggaggggguacag

SEQ ID NO: 479898 - RNA, 21 nt, Human
guggguaccaaucuuuuguga

SEQ ID NO: 479899 - RNA, 19 nt, Human
guggguaccuguaauccca

SEQ ID NO: 479900 - RNA, 32 nt, Human
guggguaccuguaaucccaguuacuuuggagg

SEQ ID NO: 479901 - RNA, 24 nt, Human
guggguagagcaaggaggcccagg

SEQ ID NO: 479902 - RNA, 32 nt, Human
guggguagaggccgggugagcaacauggcaca

SEQ ID NO: 479903 - RNA, 24 nt, Human
guggguagaucacuugaguccagg

SEQ ID NO: 479904 - RNA, 24 nt, Human
guggguagaucauuucagcucagg

SEQ ID NO: 479905 - RNA, 24 nt, Human
guggguagaucgcuugagcucagg

SEQ ID NO: 479906 - RNA, 32 nt, Human
guggguagaucgcuugagcucaggaguucaag

SEQ ID NO: 479907 - RNA, 24 nt, Human
guggguagauuacuugagcccagg

SEQ ID NO: 479908 - RNA, 32 nt, Human
guggguaggaagagaauggcugccaguggcug

SEQ ID NO: 479909 - RNA, 32 nt, Human
guuaacauuguugagugccugcugugugccag

SEQ ID NO: 479910 - RNA, 32 nt, Human
guuaaccaagcaggccaggcacgguggcucac

SEQ ID NO: 479911 - RNA, 32 nt, Human
guuaacccuccaccuccucucuuggacucccu

SEQ ID NO: 479912 - RNA, 32 nt, Human
guuaacccuguuuuucagaagggcuacuguua

SEQ ID NO: 479913 - RNA, 32 nt, Human
guuaaccuaacacaugacccuaaccuagccau

SEQ ID NO: 479914 - RNA, 32 nt, Human
guuaaccuaagcacauacacagcaauugcucg

SEQ ID NO: 479915 - RNA, 32 nt, Human
guuaaccuaguauucuaaccaguuaaccagcc

SEQ ID NO: 479916 - RNA, 32 nt, Human
guuaaccucuuaacaucuccccaaauugcauc

SEQ ID NO: 479917 - RNA, 32 nt, Human
guuaaccuguucccuucucuauccuuccccgu

SEQ ID NO: 479918 - RNA, 32 nt, Human
guuaaccuuccaccuccucccuucccuccucc

SEQ ID NO: 479919 - RNA, 32 nt, Human
guuaacggcucagagcuaacgaauccaugguc

SEQ ID NO: 479920 - RNA, 32 nt, Human
guuaacuaacuugcccaaggucacacaguuag

SEQ ID NO: 479921 - RNA, 32 nt, Human
guuaacucaacugucuauugucacaugaugaa

SEQ ID NO: 479922 - RNA, 32 nt, Human
guuaacucauuucucaugccauuagcucucua

SEQ ID NO: 479923 - RNA, 32 nt, Human
guuaacuccuuaguuucagaccacagacucaa

SEQ ID NO: 479924 - RNA, 32 nt, Human
guuaacugcauaggaggcucucgauagcaccu

SEQ ID NO: 479925 - RNA, 32 nt, Human
guuaacuggagugccugggagucgcgugccag

SEQ ID NO: 479926 - RNA, 32 nt, Human
guuaacugguuccugcucacacuccagaauua

SEQ ID NO: 479927 - RNA, 32 nt, Human
guuaacuugaaggagaacagaaaugguauuac

SEQ ID NO: 479928 - RNA, 32 nt, Human
guuaagaaaugauguuuucccaaccaaggcua

SEQ ID NO: 479929 - RNA, 32 nt, Human
guuaagaagaggaggaagugagacggggaagg

SEQ ID NO: 479930 - RNA, 32 nt, Human
guuaagaaggagguggacgaugccuuagugga

SEQ ID NO: 479931 - RNA, 32 nt, Human
guuaagaagugagucagagaggagauggguag

SEQ ID NO: 479932 - RNA, 32 nt, Human
guuaagaagugagucagagaguagauggguag

SEQ ID NO: 479933 - RNA, 32 nt, Human
guuaagaaugaccacauuuugagaaccauacu

SEQ ID NO: 479934 - RNA, 32 nt, Human
guuaagacaugauuuccuugaauguggcuuga

SEQ ID NO: 479935 - RNA, 32 nt, Human
guuaagaccagccugggcaacauggcaagacc

SEQ ID NO: 479936 - RNA, 32 nt, Human
guuaagaucccaaauccugagauauugcugau

SEQ ID NO: 479937 - RNA, 32 nt, Human
guuaagauugugccacugcacuccagccuggg

SEQ ID NO: 479938 - RNA, 32 nt, Human
guuaagccggauuugaagguugcgaugauuag

SEQ ID NO: 479939 - RNA, 32 nt, Human
guuaagccucaguauucuuagcuuuuguugau

SEQ ID NO: 479940 - RNA, 32 nt, Human
guuaagcuccaaagguucacuguguuucugcc

SEQ ID NO: 479941 - RNA, 32 nt, Human
guuaagcugaaccagugucuuuacauuucauu

SEQ ID NO: 479942 - RNA, 32 nt, Human
guuaagcuguguacagaugauggagaguuugg

SEQ ID NO: 479943 - RNA, 32 nt, Human
guuaagcuuacugcccaggugacuugugcauu

SEQ ID NO: 479944 - RNA, 32 nt, Human
guuaaggacacacaccccaguugaaaaucacu

SEQ ID NO: 479945 - RNA, 32 nt, Human
guuaaggaccuaauagagugacauauauaaau

SEQ ID NO: 479946 - RNA, 32 nt, Human
guuaaggauugugguagagaacugugacagcc

SEQ ID NO: 479947 - RNA, 32 nt, Human
guuaaggcaggggacacugaggagaaccaguc

SEQ ID NO: 479948 - RNA, 32 nt, Human
guuaaggccagucuuaacccacuggaugaaaa

SEQ ID NO: 479949 - RNA, 20 nt, Human
guuaaggcugccacagggca

SEQ ID NO: 479950 - RNA, 32 nt, Human
guuaaggggaggcggagagugacgcgguuugc

SEQ ID NO: 479951 - RNA, 32 nt, Human
guuaaggggaggggguguaagagccagcgaau

SEQ ID NO: 479952 - RNA, 32 nt, Human
guuaaggggcuacuggaaaaauuucuauucuc

SEQ ID NO: 479953 - RNA, 32 nt, Human
guuaagggggaaguuuguauugccaaguacac

SEQ ID NO: 479954 - RNA, 32 nt, Human
guuaagggggcugaagccggggagccaagugg

SEQ ID NO: 479955 - RNA, 32 nt, Human
guuaagguacaugauaccaugacaaacuguaa

SEQ ID NO: 479956 - RNA, 32 nt, Human
guuaagguacaugguaccaugacaaacuguaa

SEQ ID NO: 479957 - RNA, 32 nt, Human
guuaagguuguucacuaugauggcaucuuaga

SEQ ID NO: 479958 - RNA, 32 nt, Human
guuaaguaacaucuauuugccuucauuaguuu

SEQ ID NO: 479959 - RNA, 32 nt, Human
guuaaguaauuuaggagcaaagcaaugcucca

SEQ ID NO: 479960 - RNA, 32 nt, Human
guuaaguacauacauauucuccguuuugugcu

SEQ ID NO: 479961 - RNA, 32 nt, Human
guuaaguaccacacuuuacacagcauuucaaa

SEQ ID NO: 479962 - RNA, 32 nt, Human
guuaaguaccuugacucaggugacacagcaau

SEQ ID NO: 479963 - RNA, 32 nt, Human
guuaaguagggagaaggcaggggagguggcug

SEQ ID NO: 479964 - RNA, 32 nt, Human
guuaagucaaaaccaucuuggcuaauauguac

SEQ ID NO: 479965 - RNA, 32 nt, Human
guuaagucaagugccuggaacagaacagccau

SEQ ID NO: 479966 - RNA, 32 nt, Human
guuaagucacaaggugcugcuuuucagaucca

SEQ ID NO: 479967 - RNA, 32 nt, Human
guuaagucauuuucacccuaagccauucuugg

SEQ ID NO: 479968 - RNA, 32 nt, Human
guuaaguccucaccucagcccccagcccccuu

SEQ ID NO: 479969 - RNA, 32 nt, Human
guuaagucuguuucugacuccaacagggacca

SEQ ID NO: 479970 - RNA, 30 nt, Human
guuaagugaaaauaaaaacuguugccaggc

SEQ ID NO: 479971 - RNA, 31 nt, Human
guuaagugcaacaacaucacaguagagcuac

SEQ ID NO: 479972 - RNA, 32 nt, Human
guuaagugcaggaaguugagagagauaaaaau

SEQ ID NO: 479973 - RNA, 32 nt, Human
guuaagugggagacaaugucacaaguuaaaag

SEQ ID NO: 479974 - RNA, 32 nt, Human
guuaagugggcauuuugcaacauggcuucucc

SEQ ID NO: 479975 - RNA, 32 nt, Human
guuaaguuccuugauucaguccuugacaagga

SEQ ID NO: 479976 - RNA, 32 nt, Human
guuaaguugcagccgcuggguccucgggggcu

SEQ ID NO: 479977 - RNA, 32 nt, Human
guuaaguuguuggcuuggggcaagugaaguuu

SEQ ID NO: 479978 - RNA, 32 nt, Human
guuaaguuuuugcccacauugcauaugccuuu

SEQ ID NO: 479979 - RNA, 22 nt, Human
guuaauaagauugaaacuuuag

SEQ ID NO: 479980 - RNA, 20 nt, Human
guuaauaaguuaaaauucug

SEQ ID NO: 479981 - RNA, 20 nt, Human
guuaauaauaaugacucuaa

SEQ ID NO: 479982 - RNA, 23 nt, Human
guuaauaauuagcuaagcuuuag

SEQ ID NO: 479983 - RNA, 21 nt, Human
guuaauaauuguaaaacuuug

SEQ ID NO: 479984 - RNA, 32 nt, Human
guuaauaauuguuacuuacugcuccaggcauu

SEQ ID NO: 479985 - RNA, 32 nt, Human
guuaauacauuuacuuuagcauugaagccacu

SEQ ID NO: 479986 - RNA, 32 nt, Human
guuaauagaccagcuuagguucuucauuuagu

SEQ ID NO: 479987 - RNA, 32 nt, Human
guuaauagccgaugcugggauuggaggcucuc

SEQ ID NO: 479988 - RNA, 23 nt, Human
guuaauaguaaauaagacucuga

SEQ ID NO: 479989 - RNA, 32 nt, Human
guuaauauaucagucaugaaacaugcaauuac

SEQ ID NO: 479990 - RNA, 32 nt, Human
guuaauauuuuguuguugagguuuuuauuuuu

SEQ ID NO: 479991 - RNA, 31 nt, Human
guuaaucacagcuggauugaaagaguauuug

SEQ ID NO: 479992 - RNA, 32 nt, Human
guuaaucacauaguaaguuauuuucuaguuuu

SEQ ID NO: 479993 - RNA, 32 nt, Human
guuaaucauuugaauucugaacacuggagaaa

SEQ ID NO: 479994 - RNA, 32 nt, Human
guuaauccacaucuuuacucaggcaaggggca

SEQ ID NO: 479995 - RNA, 32 nt, Human
guuaauccuaugaacucccuuuuguaggagag

SEQ ID NO: 479996 - RNA, 32 nt, Human
guuaauccuugcauauucuccuuucauccugg

SEQ ID NO: 479997 - RNA, 24 nt, Human
guuaaugaugucaaagcuuccacu

SEQ ID NO: 479998 - RNA, 20 nt, Human
guuaaugauugaaacuguaa

SEQ ID NO: 479999 - RNA, 32 nt, Human
guuaaugcaguuucacuuauguuaaauguugc

SEQ ID NO: 480000 - RNA, 32 nt, Human
guuaaugccaaaagcaaagaucaagcccaugu

SEQ ID NO: 480001 - RNA, 32 nt, Human
guuaaugccagucuuccuccccuggacacuga

SEQ ID NO: 480002 - RNA, 32 nt, Human
guuaaugcggccuaauguagcagcgggaagag

SEQ ID NO: 480003 - RNA, 32 nt, Human
guuaaugcuaagaaaagauuuggggaagguua

SEQ ID NO: 480004 - RNA, 29 nt, Human
guuaauggaaagaggaaagaagaaaagaa

SEQ ID NO: 480005 - RNA, 29 nt, Human
guuaauggagcaguacugcuccauaaaga

SEQ ID NO: 480006 - RNA, 32 nt, Human
guuaaugguuaauguucccaaaccagagaaug

SEQ ID NO: 480007 - RNA, 32 nt, Human
guuaaugucacaucugccuucggagauuacaa

SEQ ID NO: 480008 - RNA, 32 nt, Human
guuaaugucacaucugccuuuggagauuacaa

SEQ ID NO: 480009 - RNA, 21 nt, Human
guuaauguggauguagugcuu

SEQ ID NO: 480010 - RNA, 32 nt, Human
guuaauguuaugaugugcauuaggcugcccca

SEQ ID NO: 480011 - RNA, 32 nt, Human
guuaauuccaaauauuuguucccaaguagcua

SEQ ID NO: 480012 - RNA, 32 nt, Human
guuaauucuucggugacacuggcauugcuggg

SEQ ID NO: 480013 - RNA, 19 nt, Human
guuaauuuaccaacugaua

SEQ ID NO: 480014 - RNA, 32 nt, Human
guuaauuuauaaaaucacagauugguaaaugc

SEQ ID NO: 480015 - RNA, 32 nt, Human
guuaauuucacucugccuguuagguggguuuu

SEQ ID NO: 480016 - RNA, 21 nt, Human
guuaauuuguuagaauucuaa

SEQ ID NO: 480017 - RNA, 32 nt, Human
guuaauuuuuaccuuacaugugagagucuuac

SEQ ID NO: 480018 - RNA, 32 nt, Human
guuacaaaaauggugcacccuauccuuuaauc

SEQ ID NO: 480019 - RNA, 32 nt, Human
guuacaaacuauguauaguauguauguuuugu

SEQ ID NO: 480020 - RNA, 32 nt, Human
guuacaaagucaggaaaagucuuggcuggacc

SEQ ID NO: 480021 - RNA, 20 nt, Human
guuacaacaaacccaccaga

SEQ ID NO: 480022 - RNA, 32 nt, Human
guuacaacagaagcuggggaggugagagugca

SEQ ID NO: 480023 - RNA, 32 nt, Human
guuacaacagaagcuggggaggugagagugcu

SEQ ID NO: 480024 - RNA, 32 nt, Human
guuacaaccaggagucaguacaggcuuuauuc

SEQ ID NO: 480025 - RNA, 32 nt, Human
guuacaacucagggcuccagaccucagcuaaa

SEQ ID NO: 480026 - RNA, 32 nt, Human
guuacaacuccuuggugccacugccuuuauga

SEQ ID NO: 480027 - RNA, 32 nt, Human
guuacaagcuaguaaguagcagagccaagauu

SEQ ID NO: 480028 - RNA, 32 nt, Human
guuacaaggcccuguccuggcuggugaccugc

SEQ ID NO: 480029 - RNA, 32 nt, Human
guuacaauucaagaugagaucuggguggggac

SEQ ID NO: 480030 - RNA, 32 nt, Human
guuacaauuccauagccagaagugcugacauu

SEQ ID NO: 480031 - RNA, 32 nt, Human
guuacacaaaacugaucaucacagaucuguag

SEQ ID NO: 480032 - RNA, 31 nt, Human
guuacacaagggguaccaaaguccacucuga

SEQ ID NO: 480033 - RNA, 32 nt, Human
guuacacacaaacuguuguggguuccugccag

SEQ ID NO: 480034 - RNA, 32 nt, Human
guuacacagagaaccuggcuucccuggucuua

SEQ ID NO: 480035 - RNA, 32 nt, Human
guuacacauauggaaguaagcaaaaugaaaag

SEQ ID NO: 480036 - RNA, 32 nt, Human
guuacacaugcuuucugaucucaguauuuacc

SEQ ID NO: 480037 - RNA, 32 nt, Human
guuacacauguucauguucaccucucauucac

SEQ ID NO: 480038 - RNA, 32 nt, Human
guuacaccuguaaucccagcacuuugggaggc

SEQ ID NO: 480039 - RNA, 32 nt, Human
guuacacucagguguccucagagcuagugugu

SEQ ID NO: 480040 - RNA, 32 nt, Human
guuacacugaaccaucucaugugucuuuucac

SEQ ID NO: 480041 - RNA, 31 nt, Human
guuacacugcuucucccaugccagagaauaa

SEQ ID NO: 480042 - RNA, 32 nt, Human
guuacacuuacuuuuucaaguuggaguauaua

SEQ ID NO: 480043 - RNA, 32 nt, Human
guuacagaaauguuguguagcagagaaauaag

SEQ ID NO: 480044 - RNA, 32 nt, Human
guuacagaaccaagggcucuguucauaaacug

SEQ ID NO: 480045 - RNA, 32 nt, Human
guuacagaaguggaaugguuucuggugguauu

SEQ ID NO: 480046 - RNA, 32 nt, Human
guuacagaaguuaagugacuugcucaaggccc

SEQ ID NO: 480047 - RNA, 32 nt, Human
guuacagacaguaaugcuggaccuggacgguc

SEQ ID NO: 480048 - RNA, 32 nt, Human
guuacagacucaaggaaaccucucauuuuaga

SEQ ID NO: 480049 - RNA, 32 nt, Human
guuacagagccucacaguuacaguuccaagaa

SEQ ID NO: 480050 - RNA, 32 nt, Human
guuacagaugugagccacuucgcccagcugag

SEQ ID NO: 480051 - RNA, 32 nt, Human
guuacagcaucaguccuugcaguauuaaaaac

SEQ ID NO: 480052 - RNA, 32 nt, Human
guuacagccaucccuugucauaacuuuugaac

SEQ ID NO: 480053 - RNA, 32 nt, Human
guuacagcccaguuuccaggggcgugugggcu

SEQ ID NO: 480054 - RNA, 32 nt, Human
guuacagcucugccguaaucucagccaaauug

SEQ ID NO: 480055 - RNA, 32 nt, Human
guuacaggaagucccuugccauccuaaaagcc

SEQ ID NO: 480056 - RNA, 32 nt, Human
guuacaggcagaauuggauagauacagcccua

SEQ ID NO: 480057 - RNA, 32 nt, Human
guuacaggcaggcugcacacagcagucccagg

SEQ ID NO: 480058 - RNA, 32 nt, Human
guuacaggcaugagccaccacacccagccuuc

SEQ ID NO: 480059 - RNA, 32 nt, Human
guuacaggcaugagccacugugcccagcccag

SEQ ID NO: 480060 - RNA, 21 nt, Human
guuacagggggaaucaaggca

SEQ ID NO: 480061 - RNA, 31 nt, Human
guuacagggugaccuguucucuagcugugau

SEQ ID NO: 480062 - RNA, 32 nt, Human
guuacaggguuauuuauauaaugugacauuau

SEQ ID NO: 480063 - RNA, 32 nt, Human
guuacagguaggucccaaaaguggccaggcug

SEQ ID NO: 480064 - RNA, 32 nt, Human
guuacagguaugagccaccacacccagcccaa

SEQ ID NO: 480065 - RNA, 32 nt, Human
guuacaggugugagccacugcacccggccaca

SEQ ID NO: 480066 - RNA, 32 nt, Human
guuacaggugugagccacugcgccuggacuga

SEQ ID NO: 480067 - RNA, 32 nt, Human
guuacaggugugagccaucgcgccuggccagg

SEQ ID NO: 480068 - RNA, 32 nt, Human
guuacaggugugugccgccaugcccagucucu

SEQ ID NO: 480069 - RNA, 31 nt, Human
guuacagugagaccuguguucgguggaagcc

SEQ ID NO: 480070 - RNA, 32 nt, Human
guuacagugagccaaguuugugccucacacuc

SEQ ID NO: 480071 - RNA, 32 nt, Human
guuacagugagcuaugauugcaccacugcacu

SEQ ID NO: 480072 - RNA, 32 nt, Human
guuacagugagcugagagugccccacugcacu

SEQ ID NO: 480073 - RNA, 23 nt, Human
guuacaguucagcguuugccuua

SEQ ID NO: 480074 - RNA, 32 nt, Human
guuacaguuuaucccuguaggauaaaugaucc

SEQ ID NO: 480075 - RNA, 32 nt, Human
guuacauagguaaacacaugucaugggguuuu

SEQ ID NO: 480076 - RNA, 32 nt, Human
guuacauagguaaacuugugucaugggggcuu

SEQ ID NO: 480077 - RNA, 32 nt, Human
guuacauagguaaacuugugucauggggguuu

SEQ ID NO: 480078 - RNA, 32 nt, Human
guuacaugagauguuuuguacaggcaugcaau

SEQ ID NO: 480079 - RNA, 32 nt, Human
guuacauguauaucuugccucucuuaagucuc

SEQ ID NO: 480080 - RNA, 19 nt, Human
guuacaugugaaacucuaa

SEQ ID NO: 480081 - RNA, 32 nt, Human
guuacaugugaccugaacagggccaaugagac

SEQ ID NO: 480082 - RNA, 32 nt, Human
guuacaugugguuccaggccagaggcauggaa

SEQ ID NO: 480083 - RNA, 32 nt, Human
guuacauuccucuccacaaugaggcuaaaugu

SEQ ID NO: 480084 - RNA, 32 nt, Human
guuacauuuuucucccuuuucuugggcuaaag

SEQ ID NO: 480085 - RNA, 32 nt, Human
guuaccaacucauggccaaucauuuuucaucu

SEQ ID NO: 480086 - RNA, 32 nt, Human
guuaccaacucauguggggaaggucuuacugc

SEQ ID NO: 480087 - RNA, 32 nt, Human
guuaccaaugaccuguugcaugcuucaauacc

SEQ ID NO: 480088 - RNA, 32 nt, Human
guuaccacaaauuucagguccuuaccuuauga

SEQ ID NO: 480089 - RNA, 20 nt, Human
guuaccacccauuucuccca

SEQ ID NO: 480090 - RNA, 32 nt, Human
guuaccaccguguuagaaagcagccucaggac

SEQ ID NO: 480091 - RNA, 32 nt, Human
guuaccacgguuggccaggcgcggugguucau

SEQ ID NO: 480092 - RNA, 32 nt, Human
guuaccagaguuuuuggugauugguuccuaua

SEQ ID NO: 480093 - RNA, 32 nt, Human
guuaccagcauauccugagucauuugaccaag

SEQ ID NO: 480094 - RNA, 32 nt, Human
guuaccagccugggcaacauagugagacccug

SEQ ID NO: 480095 - RNA, 32 nt, Human
guuaccaggccugaggcaucucagccaagcuu

SEQ ID NO: 480096 - RNA, 32 nt, Human
guuaccagugcugggcaguguccuccaagugc

SEQ ID NO: 480097 - RNA, 32 nt, Human
guuaccaguucuuccuccuuccucuuuucccc

SEQ ID NO: 480098 - RNA, 31 nt, Human
guuaccaugacaaccagccgcugcagucacc

SEQ ID NO: 480099 - RNA, 32 nt, Human
guuaccauugaaugagauggaucaguggauau

SEQ ID NO: 480100 - RNA, 32 nt, Human
guuacccacugcaguucuccucugagcuguac

SEQ ID NO: 480101 - RNA, 23 nt, Human
guuacccagauuggagugcagug

SEQ ID NO: 480102 - RNA, 24 nt, Human
guuacccagauuggagugcagugg

SEQ ID NO: 480103 - RNA, 23 nt, Human
guuacccagccuggagugcagug

SEQ ID NO: 480104 - RNA, 24 nt, Human
guuacccagccuggagugcagugg

SEQ ID NO: 480105 - RNA, 32 nt, Human
guuacccaggagaacaaggagauggucuaaac

SEQ ID NO: 480106 - RNA, 32 nt, Human
guuacccaggcaggagugcaguggcgugaucu

SEQ ID NO: 480107 - RNA, 23 nt, Human
guuacccaggccggagugcagug

SEQ ID NO: 480108 - RNA, 24 nt, Human
guuacccaggccggagugcagugg

SEQ ID NO: 480109 - RNA, 24 nt, Human
guuacccaggcuagaguguagugg

SEQ ID NO: 480110 - RNA, 23 nt, Human
guuacccaggcuccagugcagug

SEQ ID NO: 480111 - RNA, 24 nt, Human
guuacccaggcuccagugcagugg

SEQ ID NO: 480112 - RNA, 23 nt, Human
guuacccaggcuggaauacagug

SEQ ID NO: 480113 - RNA, 24 nt, Human
guuacccaggcuggaauacagugg

SEQ ID NO: 480114 - RNA, 23 nt, Human
guuacccaggcuggaaugcagug

SEQ ID NO: 480115 - RNA, 24 nt, Human
guuacccaggcuggaaugcagugg

SEQ ID NO: 480116 - RNA, 23 nt, Human
guuacccaggcuggaggacagug

SEQ ID NO: 480117 - RNA, 23 nt, Human
guuacccaggcuggaguacagug

SEQ ID NO: 480118 - RNA, 24 nt, Human
guuacccaggcuggaguacagugg

SEQ ID NO: 480119 - RNA, 23 nt, Human
guuacccaggcuggagugcaaug

SEQ ID NO: 480120 - RNA, 24 nt, Human
guuacccaggcuggagugcaaugg

SEQ ID NO: 480121 - RNA, 23 nt, Human
guuacccaggcuggagugcagug

SEQ ID NO: 480122 - RNA, 24 nt, Human
guuacccaggcuggagugcagugg

SEQ ID NO: 480123 - RNA, 23 nt, Human
guuacccaggguggagugcagug

SEQ ID NO: 480124 - RNA, 24 nt, Human
guuacccaggguggagugcagugg

SEQ ID NO: 480125 - RNA, 32 nt, Human
guuacccaggguggagugcagugguagcgauc

SEQ ID NO: 480126 - RNA, 21 nt, Human
guuacccaggguggauugcag

SEQ ID NO: 480127 - RNA, 32 nt, Human
guuacccaucuucucuacuguccccauucucu

SEQ ID NO: 480128 - RNA, 24 nt, Human
guuacccaugcuggaguacggugg

SEQ ID NO: 480129 - RNA, 32 nt, Human
guuaccccagagagacacauggggaguagacc

SEQ ID NO: 480130 - RNA, 32 nt, Human
guuaccccuccccauuccccaggcccugggcc

SEQ ID NO: 480131 - RNA, 32 nt, Human
guuacccuacagccugaucugcaccugcucca

SEQ ID NO: 480132 - RNA, 32 nt, Human
guuacccuagaggcaacaauuaauacccacug

SEQ ID NO: 480133 - RNA, 32 nt, Human
guuacccuccacugcccuggaugucccacguu

SEQ ID NO: 480134 - RNA, 20 nt, Human
guuacccuuuggggcuccuu

SEQ ID NO: 480135 - RNA, 32 nt, Human
guuaccgaugcuugugucuugugaaagagaac

SEQ ID NO: 480136 - RNA, 32 nt, Human
guuaccggauggcaucuguucucuccaugccc

SEQ ID NO: 480137 - RNA, 32 nt, Human
guuaccggcacccgcucccucgcucgcaaacu

SEQ ID NO: 480138 - RNA, 32 nt, Human
guuaccggcuggagagccggaggugggaccgg

SEQ ID NO: 480139 - RNA, 32 nt, Human
guuaccgugaaacugguuguaaaagagaaacu

SEQ ID NO: 480140 - RNA, 32 nt, Human
guuaccuacaucuaagcuguucccgaaagagu

SEQ ID NO: 480141 - RNA, 32 nt, Human
guuaccuacuguguucuuaacacugaguugug

SEQ ID NO: 480142 - RNA, 32 nt, Human
guuaccuagcuggcuggguagcaguggauguu

SEQ ID NO: 480143 - RNA, 32 nt, Human
guuaccuagcuucccucuaccguugucuacug

SEQ ID NO: 480144 - RNA, 32 nt, Human
guuaccucacaguccccacccuuucaaaguug

SEQ ID NO: 480145 - RNA, 32 nt, Human
guuaccuccauccuggacacaggaagccagcu

SEQ ID NO: 480146 - RNA, 32 nt, Human
guuaccuccugaccugaggguggagaguggca

SEQ ID NO: 480147 - RNA, 32 nt, Human
guuaccugacccuucucuucuggaaaagugag

SEQ ID NO: 480148 - RNA, 32 nt, Human
guuaccugagauacugaagugcagcucaggag

SEQ ID NO: 480149 - RNA, 32 nt, Human
guuaccugagucugggcaucugugaagaaggg

SEQ ID NO: 480150 - RNA, 32 nt, Human
guuaccuggacuggaacagacugugaauauag

SEQ ID NO: 480151 - RNA, 32 nt, Human
guuaccugggccccaccaggucaucaggagca

SEQ ID NO: 480152 - RNA, 32 nt, Human
guuaccuggucucauuccccuccccacaccua

SEQ ID NO: 480153 - RNA, 32 nt, Human
guuaccuuuaagaagguggaaguggcaaacca

SEQ ID NO: 480154 - RNA, 32 nt, Human
guuaccuuucccaugcugaauuauuuuguugu

SEQ ID NO: 480155 - RNA, 32 nt, Human
guuacgacccaggacaauuagaaaaauucacc

SEQ ID NO: 480156 - RNA, 32 nt, Human
guuacgcagccagccagcaucugggagcccgg

SEQ ID NO: 480157 - RNA, 32 nt, Human
guuacgccgggcauaauggaauugcagaggac

SEQ ID NO: 480158 - RNA, 32 nt, Human
guuacgcggccucucugugccgcuucauuugu

SEQ ID NO: 480159 - RNA, 31 nt, Human
guuacggaaauacgcgacaggagggaguaug

SEQ ID NO: 480160 - RNA, 32 nt, Human
guuacgggacuucucauugucuuaauuucgcu

SEQ ID NO: 480161 - RNA, 32 nt, Human
guuacgggcaacugcucacacaguuguuucuc

SEQ ID NO: 480162 - RNA, 32 nt, Human
guuacggucccaucucuucacaggcauggauu

SEQ ID NO: 480163 - RNA, 32 nt, Human
guuacguacuguguagccccaucuacuaaaac

SEQ ID NO: 480164 - RNA, 32 nt, Human
guuacguguucuguucuaugccuaagcauuuu

SEQ ID NO: 480165 - RNA, 32 nt, Human
guuacuaaaaugguacauuaaaaauucaauua

SEQ ID NO: 480166 - RNA, 32 nt, Human
guuacuaagaagcugcugcgagagggaaaaau

SEQ ID NO: 480167 - RNA, 32 nt, Human
guuacuacaugacaaguacuuauuucacauau

SEQ ID NO: 480168 - RNA, 32 nt, Human
guuacuaccugccuuacccaggaaaaggacau

SEQ ID NO: 480169 - RNA, 32 nt, Human
guuacuacuuagucacaaaccccacauuauuc

SEQ ID NO: 480170 - RNA, 32 nt, Human
guuacuaguuuggaauguccaucaggaccuuu

SEQ ID NO: 480171 - RNA, 32 nt, Human
guuacuauacaauuaugaaauguaauguaaga

SEQ ID NO: 480172 - RNA, 32 nt, Human
guuacuauccucugccuuccucuccuccccua

SEQ ID NO: 480173 - RNA, 32 nt, Human
guuacuauuaucugugcuuuugaggcuauuuc

SEQ ID NO: 480174 - RNA, 22 nt, Human
guuacucaguauaaaacucuga

SEQ ID NO: 480175 - RNA, 21 nt, Human
guuacuccagaggcuaaggca

SEQ ID NO: 480176 - RNA, 32 nt, Human
guuacuccauccacuucucucuccuucucccu

SEQ ID NO: 480177 - RNA, 32 nt, Human
guuacucccuuucucuuccuaccuguggcuca

SEQ ID NO: 480178 - RNA, 32 nt, Human
guuacucucagccuggaauccccaccuugccc

SEQ ID NO: 480179 - RNA, 32 nt, Human
guuacucuccuucccccuaccugggccaguga

SEQ ID NO: 480180 - RNA, 32 nt, Human
guuacucucuuugguaguugaacguugaauuc

SEQ ID NO: 480181 - RNA, 32 nt, Human
guuacucugaagggcaucaugcaucuuacuga

SEQ ID NO: 480182 - RNA, 32 nt, Human
guuacucugcucaugagacagaucugggcucc

SEQ ID NO: 480183 - RNA, 19 nt, Human
guuacucuuaaaacucuag

SEQ ID NO: 480184 - RNA, 32 nt, Human
guuacucuuucaaagcauucacaaacuuuugu

SEQ ID NO: 480185 - RNA, 21 nt, Human
guuacugaauacuccaaguca

SEQ ID NO: 480186 - RNA, 17 nt, Human
guuacugaccccagggc

SEQ ID NO: 480187 - RNA, 22 nt, Human
guuacugagaaacuccaaagca

SEQ ID NO: 480188 - RNA, 20 nt, Human
guuacugaggggccugaggu

SEQ ID NO: 480189 - RNA, 32 nt, Human
guuacugaucacuuaccuucuucucuuucaga

SEQ ID NO: 480190 - RNA, 19 nt, Human
guuacugaugauucagggc

SEQ ID NO: 480191 - RNA, 21 nt, Human
guuacugcagaggcugaggca

SEQ ID NO: 480192 - RNA, 32 nt, Human
guuacugcagcccuaggaaauucacaggguuc

SEQ ID NO: 480193 - RNA, 32 nt, Human
guuacugcaguugaagggcaauaugaaguuac

SEQ ID NO: 480194 - RNA, 32 nt, Human
guuacugccgguuugaaaauaugccugcaauc

SEQ ID NO: 480195 - RNA, 20 nt, Human
guuacuggaagacgaaggua

SEQ ID NO: 480196 - RNA, 22 nt, Human
guuacuggagacaagaagcgca

SEQ ID NO: 480197 - RNA, 32 nt, Human
guuacuggggacugcucugagcuccuagguga

SEQ ID NO: 480198 - RNA, 21 nt, Human
guuacuggggaggcugaggca

SEQ ID NO: 480199 - RNA, 32 nt, Human
guuacugguguugauccugaaagcagacugag

SEQ ID NO: 480200 - RNA, 32 nt, Human
guuacuguaggucuucaaaguuaagaguguaa

SEQ ID NO: 480201 - RNA, 32 nt, Human
guuacuguccacccucauuucugccagcgcau

SEQ ID NO: 480202 - RNA, 20 nt, Human
guuacugucugcuuaaggca

SEQ ID NO: 480203 - RNA, 32 nt, Human
guuacugugagccuggcagagcagaaaaggca

SEQ ID NO: 480204 - RNA, 32 nt, Human
guuacugugguuucacuaaaagcuaccguggu

SEQ ID NO: 480205 - RNA, 32 nt, Human
guuacugugucuuauugguucaaugaugauuu

SEQ ID NO: 480206 - RNA, 32 nt, Human
guuacuguuacccaaggagcaguugaauaucc

SEQ ID NO: 480207 - RNA, 32 nt, Human
guuacuguucaucauggggguaccguggacaa

SEQ ID NO: 480208 - RNA, 32 nt, Human
guuacuguugcauuuaggaggcuccuugaaag

SEQ ID NO: 480209 - RNA, 32 nt, Human
guuacuuaaaagcugacauaagaaaaauuauu

SEQ ID NO: 480210 - RNA, 32 nt, Human
guuacuuagcauuucuuaggugacacaacauu

SEQ ID NO: 480211 - RNA, 32 nt, Human
guuacuuaugaaaaguauuuugcuuaagguug

SEQ ID NO: 480212 - RNA, 32 nt, Human
guuacuuaugauugugccucagucccuaauuu

SEQ ID NO: 480213 - RNA, 32 nt, Human
guuacuuauugacaccucuaugugccaggcuc

SEQ ID NO: 480214 - RNA, 32 nt, Human
guuacuucaguuacccuugcagggggccaggg

SEQ ID NO: 480215 - RNA, 32 nt, Human
guuacuucuuuaucuuuuccuuucuucagacu

SEQ ID NO: 480216 - RNA, 23 nt, Human
guuacuugaccuucucuccuguu

SEQ ID NO: 480217 - RNA, 32 nt, Human
guuacuugaggugggaggaucgcuugagccca

SEQ ID NO: 480218 - RNA, 32 nt, Human
guuacuugauaacagcguuccaucuuuguguu

SEQ ID NO: 480219 - RNA, 32 nt, Human
guuacuugccuaggaggaauguccaagugugu

SEQ ID NO: 480220 - RNA, 32 nt, Human
guuacuugcuccuucauuuccugggccuggug

SEQ ID NO: 480221 - RNA, 32 nt, Human
guuacuuucaauaugacagaagguggaugaag

SEQ ID NO: 480222 - RNA, 32 nt, Human
guuacuuucaguuguccugcuggauuuuaaaa

SEQ ID NO: 480223 - RNA, 32 nt, Human
guuacuuucccaagaucuccccacaagcaagu

SEQ ID NO: 480224 - RNA, 32 nt, Human
guuacuuuccucacaucucccaaacucucucu

SEQ ID NO: 480225 - RNA, 32 nt, Human
guuacuuuucccuugacuggaucccaaguagc

SEQ ID NO: 480226 - RNA, 32 nt, Human
guuacuuuucuuaaaugugucuagucauauau

SEQ ID NO: 480227 - RNA, 32 nt, Human
guuacuuuuugucuuauugauggauuugaaaa

SEQ ID NO: 480228 - RNA, 32 nt, Human
guuagaaaaacaaggcccacagaggccaagag

SEQ ID NO: 480229 - RNA, 32 nt, Human
guuagaaaccagccuggccaacguggugaaac

SEQ ID NO: 480230 - RNA, 32 nt, Human
guuagaaagaugaucuguaucaacagaucuag

SEQ ID NO: 480231 - RNA, 32 nt, Human
guuagaaaggguaggacugagaaacagccuau

SEQ ID NO: 480232 - RNA, 32 nt, Human
guuagaagggaaggaaggaaagaucaaggaac

SEQ ID NO: 480233 - RNA, 32 nt, Human
guuagaagggccagauuucauucucaguccca

SEQ ID NO: 480234 - RNA, 32 nt, Human
guuagaagucaguauuucuucuaaucugaggc

SEQ ID NO: 480235 - RNA, 32 nt, Human
guuagaaguggacuggccauugaggaggcucu

SEQ ID NO: 480236 - RNA, 32 nt, Human
guuagaaguggaugugcaagaccagccacugg

SEQ ID NO: 480237 - RNA, 32 nt, Human
guuagaaugaggaggaaggagagaaggggagg

SEQ ID NO: 480238 - RNA, 32 nt, Human
guuagaaugucugccuuacugguuuccccagg

SEQ ID NO: 480239 - RNA, 32 nt, Human
guuagaauuagccacaggagaauguaaagcau

SEQ ID NO: 480240 - RNA, 32 nt, Human
guuagaauuuagcaggagcuauccugacuuaa

SEQ ID NO: 480241 - RNA, 32 nt, Human
guuagacaaucaguacacaugcugguguguuu

SEQ ID NO: 480242 - RNA, 32 nt, Human
guuagacaauuuaaaagggguguaugagggcc

SEQ ID NO: 480243 - RNA, 32 nt, Human
guuagacacagucccuggucugcagucagagc

SEQ ID NO: 480244 - RNA, 31 nt, Human
guuagaccgcagagagcuggcauucacucaa

SEQ ID NO: 480245 - RNA, 19 nt, Human
guuagaccucgcacaggga

SEQ ID NO: 480246 - RNA, 32 nt, Human
guuagacguuucuccccuuuucccuaccuucc

SEQ ID NO: 480247 - RNA, 32 nt, Human
guuagacuaggaauaagauaacaggaaugucu

SEQ ID NO: 480248 - RNA, 32 nt, Human
guuagacuuuucaguaaaacuaaaguaacugu

SEQ ID NO: 480249 - RNA, 32 nt, Human
guuagagaaaggagugaaggaggcagguggga

SEQ ID NO: 480250 - RNA, 32 nt, Human
guuagagaagcaguacauuugcuuuugauaga

SEQ ID NO: 480251 - RNA, 32 nt, Human
guuagagaaugagagggaaagagagagaauac

SEQ ID NO: 480252 - RNA, 32 nt, Human
guuagagaccagccugggcaacauggugaaau

SEQ ID NO: 480253 - RNA, 32 nt, Human
guuagagaccagccugggcaacguauugagac

SEQ ID NO: 480254 - RNA, 32 nt, Human
guuagagacggagaaagggaagaggcugggau

SEQ ID NO: 480255 - RNA, 32 nt, Human
guuagagagagggcuucucagcaggaugauga

SEQ ID NO: 480256 - RNA, 32 nt, Human
guuagagaugagaaaaggauugagaaggauaa

SEQ ID NO: 480257 - RNA, 32 nt, Human
guuagagcaggacugaugucuccuaagcaccu

SEQ ID NO: 480258 - RNA, 32 nt, Human
guuagagcccucuuucuccccgaagaaagagc

SEQ ID NO: 480259 - RNA, 32 nt, Human
guuagagcuggucagccuuuuuggguaacaca

SEQ ID NO: 480260 - RNA, 32 nt, Human
guuagagcugugguuuggaugcccagagggac

SEQ ID NO: 480261 - RNA, 31 nt, Human
guuagaggaaggaacucuggcauucagaggu

SEQ ID NO: 480262 - RNA, 32 nt, Human
guuagaggacugccugugauccuggccacuag

SEQ ID NO: 480263 - RNA, 32 nt, Human
guuagaggaggaagagggagucuggcaugagu

SEQ ID NO: 480264 - RNA, 32 nt, Human
guuagaggaggaggaggaggaggaagaggugg

SEQ ID NO: 480265 - RNA, 32 nt, Human
guuagaggcaaaaaugaugacccugacaagcc

SEQ ID NO: 480266 - RNA, 32 nt, Human
guuagaggccagccuggcgaaaccccaucucu

SEQ ID NO: 480267 - RNA, 32 nt, Human
guuagaggcccaggcugucugccugcgguccu

SEQ ID NO: 480268 - RNA, 32 nt, Human
guuagagggaaaccgagcuggccuggccagag

SEQ ID NO: 480269 - RNA, 32 nt, Human
guuagagggaaagaggcuugggaagaaaacag

SEQ ID NO: 480270 - RNA, 32 nt, Human
guuagagggagaagauggagggaaucuaggga

SEQ ID NO: 480271 - RNA, 32 nt, Human
guuagagggaugcaagaaggagaggugaaggu

SEQ ID NO: 480272 - RNA, 32 nt, Human
guuagagguauacauuuauuuaucuguuguac

SEQ ID NO: 480273 - RNA, 32 nt, Human
guuagaggucaaaagcagcugccugaaugagu

SEQ ID NO: 480274 - RNA, 32 nt, Human
guuagagguggaggauuuuccuauguuccccc

SEQ ID NO: 480275 - RNA, 32 nt, Human
guuagaggugugcuguguuaaaaggccagaua

SEQ ID NO: 480276 - RNA, 32 nt, Human
guuagagucgggcuccgacagcgcggccgagu

SEQ ID NO: 480277 - RNA, 21 nt, Human
guuagauaaauggaauccugu

SEQ ID NO: 480278 - RNA, 24 nt, Human
guuagauagauggaaucucuguca

SEQ ID NO: 480279 - RNA, 32 nt, Human
guuagaucaccaugcugcaacaugguuuauau

SEQ ID NO: 480280 - RNA, 22 nt, Human
guuagaugcugaaauguccaga

SEQ ID NO: 480281 - RNA, 32 nt, Human
guuagaugucauaaaccauuuguauuuguugu

SEQ ID NO: 480282 - RNA, 32 nt, Human
guuagauguucaugcuguaugugcccgugccu

SEQ ID NO: 480283 - RNA, 32 nt, Human
guuagauucaaaacaucauaaagaugauagca

SEQ ID NO: 480284 - RNA, 32 nt, Human
guuagauugcuucacauucucuugucaccacc

SEQ ID NO: 480285 - RNA, 32 nt, Human
guuagauuuucugccagaggggugggucagag

SEQ ID NO: 480286 - RNA, 32 nt, Human
guuagcaaaucaggaaugcaagccuuguucaa

SEQ ID NO: 480287 - RNA, 32 nt, Human
guuagcaaggcccacugcugcuccugggugag

SEQ ID NO: 480288 - RNA, 32 nt, Human
guuagcaaugccgaaagguuucugucuuaaaa

SEQ ID NO: 480289 - RNA, 32 nt, Human
guuagcacagccugugacagagccugggcagg

SEQ ID NO: 480290 - RNA, 32 nt, Human
guuagcacgaggaggaaggaagaaauggagau

SEQ ID NO: 480291 - RNA, 32 nt, Human
guuagcacgguggagcugguagccacgccugc

SEQ ID NO: 480292 - RNA, 32 nt, Human
guuagcagagaaaggacucaccuuagugguga

SEQ ID NO: 480293 - RNA, 32 nt, Human
guuagcagggguccccagggcaagucagccuc

SEQ ID NO: 480294 - RNA, 32 nt, Human
guuagcagugccugggccugggccucagaggg

SEQ ID NO: 480295 - RNA, 32 nt, Human
guuagcauccgucagggugacccuuuacagaa

SEQ ID NO: 480296 - RNA, 32 nt, Human
guuagcauccgucagggugacccuuugcagaa

SEQ ID NO: 480297 - RNA, 32 nt, Human
guuagcaucugccagggugacccuuuacagaa

SEQ ID NO: 480298 - RNA, 32 nt, Human
guuagcauguugaaggacacucccacgacagu

SEQ ID NO: 480299 - RNA, 19 nt, Human
guuagcauuaaaguucuag

SEQ ID NO: 480300 - RNA, 32 nt, Human
guuagccacggaaacauagaaacauacacaag

SEQ ID NO: 480301 - RNA, 32 nt, Human
guuagccacugcaggcccucggugggacagcg

SEQ ID NO: 480302 - RNA, 32 nt, Human
guuagccagcacuucugcucugucgucucucc

SEQ ID NO: 480303 - RNA, 32 nt, Human
guuagccaggacagugacagugaggcauaccc

SEQ ID NO: 480304 - RNA, 32 nt, Human
guuagccaguuucuucagauaaguacccccac

SEQ ID NO: 480305 - RNA, 32 nt, Human
guuagcccaaguugaagaaagccgggcugugc

SEQ ID NO: 480306 - RNA, 32 nt, Human
guuagccgcccucuacucccaggcuggaggga

SEQ ID NO: 480307 - RNA, 31 nt, Human
guuagccguggggaaagauggcggaaaauuu

SEQ ID NO: 480308 - RNA, 32 nt, Human
guuagccuaccuucauuaauucuaucacauag

SEQ ID NO: 480309 - RNA, 32 nt, Human
guuagccucuugcguauuggcuuuuucagagu

SEQ ID NO: 480310 - RNA, 32 nt, Human
guuagccuggcagagccaggggugaagggaga

SEQ ID NO: 480311 - RNA, 32 nt, Human
guuagccuuuucuccccagacuuguuggcaua

SEQ ID NO: 480312 - RNA, 32 nt, Human
guuagcgaccuacugggcuuuccucuugcuga

SEQ ID NO: 480313 - RNA, 32 nt, Human
guuagcggcgguggaggaggaggcagagagga

SEQ ID NO: 480314 - RNA, 32 nt, Human
guuagcuaagagaauagacagaauuggaaaau

SEQ ID NO: 480315 - RNA, 32 nt, Human
guuagcucccugcacucuggcucuuuacuggc

SEQ ID NO: 480316 - RNA, 32 nt, Human
guuagcuccuacugcuaaucuuuccauaagcg

SEQ ID NO: 480317 - RNA, 32 nt, Human
guuagcugagacacccccucuccaggggacag

SEQ ID NO: 480318 - RNA, 32 nt, Human
guuagcugauugugguaaacaauguuuaaugu

SEQ ID NO: 480319 - RNA, 32 nt, Human
guuagcuggaggacaggauguugggaaaggaa

SEQ ID NO: 480320 - RNA, 32 nt, Human
guuagcugggucuggugccucugugguuccag

SEQ ID NO: 480321 - RNA, 32 nt, Human
guuagcugugagccagcacucagcugugucag

SEQ ID NO: 480322 - RNA, 32 nt, Human
guuagcuuucagucaucagccaugguuccaag

SEQ ID NO: 480323 - RNA, 32 nt, Human
guuagcuuuggguugcagugcuagauauuguu

SEQ ID NO: 480324 - RNA, 32 nt, Human
guuaggaacauguaaggccaaguacacugaga

SEQ ID NO: 480325 - RNA, 32 nt, Human
guuaggaagcuuuuccucugaggcccacgauu

SEQ ID NO: 480326 - RNA, 24 nt, Human
guuaggaaugucaacagagcaagg

SEQ ID NO: 480327 - RNA, 32 nt, Human
guuaggaccaaagugcuggauuacaggcguga

SEQ ID NO: 480328 - RNA, 32 nt, Human
guuaggaccacagcccugggcaaaggggacca

SEQ ID NO: 480329 - RNA, 32 nt, Human
guuaggaccuccugugacccacccucauuccu

SEQ ID NO: 480330 - RNA, 32 nt, Human
guuaggagaagggguuucuugaucaugucaug

SEQ ID NO: 480331 - RNA, 32 nt, Human
guuaggagagcauagcaucaugauguauuagc

SEQ ID NO: 480332 - RNA, 32 nt, Human
guuaggagagcugccugaaacaacaccucugc

SEQ ID NO: 480333 - RNA, 30 nt, Human
guuaggagcuugcaggcauuaggacugucc

SEQ ID NO: 480334 - RNA, 32 nt, Human
guuaggaggaagaagggggaaaaaggaagaag

SEQ ID NO: 480335 - RNA, 32 nt, Human
guuaggaggcuccccauccacccuuuacauga

SEQ ID NO: 480336 - RNA, 32 nt, Human
guuaggaggcucuacaggagaaucauuuccuu

SEQ ID NO: 480337 - RNA, 32 nt, Human
guuaggaugcggcuuucucugccucugggcag

SEQ ID NO: 480338 - RNA, 32 nt, Human
guuaggcaaggaggugguuggccagagauggg

SEQ ID NO: 480339 - RNA, 32 nt, Human
guuaggcaagggacaaugaugccuuggaccug

SEQ ID NO: 480340 - RNA, 32 nt, Human
guuaggcauuguggagcuccuccugagccugg

SEQ ID NO: 480341 - RNA, 32 nt, Human
guuaggccagcggggauugaggcugcgggauc

SEQ ID NO: 480342 - RNA, 18 nt, Human
guuaggccaggugcaaug

SEQ ID NO: 480343 - RNA, 32 nt, Human
guuaggcccaagggugggggaggcaggaggag

SEQ ID NO: 480344 - RNA, 32 nt, Human
guuaggcccugcacuccaccuggggacggccc

SEQ ID NO: 480345 - RNA, 32 nt, Human
guuaggccugcucuggccuaauggaucuuacu

SEQ ID NO: 480346 - RNA, 32 nt, Human
guuaggccugggagaacugagggaccugagga

SEQ ID NO: 480347 - RNA, 32 nt, Human
guuaggcuauucacaaccacucauucaaaagu

SEQ ID NO: 480348 - RNA, 32 nt, Human
guuaggcucacugucuaggccaggcccaccuu

SEQ ID NO: 480349 - RNA, 32 nt, Human
guuaggcugucgucccccuccagugcuuggcu

SEQ ID NO: 480350 - RNA, 32 nt, Human
guuaggcuuagagagaaaagcuggauaugaga

SEQ ID NO: 480351 - RNA, 32 nt, Human
guuaggcuuccucucuuucuuucucacagaua

SEQ ID NO: 480352 - RNA, 32 nt, Human
guuaggcuugcaggaagauaugacccagcuga

SEQ ID NO: 480353 - RNA, 32 nt, Human
guuagggaagcauaaagggggcuugaaccugu

SEQ ID NO: 480354 - RNA, 32 nt, Human
guuagggacaccccuggcuggcagcagccguu

SEQ ID NO: 480355 - RNA, 32 nt, Human
guuagggaugucacagaaaugucugugucuga

SEQ ID NO: 480356 - RNA, 32 nt, Human
guuagggcaaagagagucuggccacaugcagc

SEQ ID NO: 480357 - RNA, 32 nt, Human
guuagggcagggaggggacuggggaagugcgc

SEQ ID NO: 480358 - RNA, 32 nt, Human
guuagggcagugaggaagggaaauauggggcu

SEQ ID NO: 480359 - RNA, 32 nt, Human
guuagggccucaccgaccugcuuccaccccuc

SEQ ID NO: 480360 - RNA, 32 nt, Human
guuagggcuagucagagaaucauagaacguua

SEQ ID NO: 480361 - RNA, 32 nt, Human
guuagggcuccuauucaacacacacaugcuuc

SEQ ID NO: 480362 - RNA, 32 nt, Human
guuagggcuggggcucagccugggggagccua

SEQ ID NO: 480363 - RNA, 32 nt, Human
guuagggcugguggugagggaucauguaaaga

SEQ ID NO: 480364 - RNA, 31 nt, Human
guuaggggagcaccuguuucagacugggcau

SEQ ID NO: 480365 - RNA, 32 nt, Human
guuaggggagcaccuguuucagacugggcaug

SEQ ID NO: 480366 - RNA, 32 nt, Human
guuaggggagccaacaugccaguggcccggag

SEQ ID NO: 480367 - RNA, 32 nt, Human
guuagggggcuugccuugcucucuccagggcc

SEQ ID NO: 480368 - RNA, 32 nt, Human
guuaggguguggggaauuucuacugaagucug

SEQ ID NO: 480369 - RNA, 32 nt, Human
guuagguaaugauuucuccaagucacaggagc

SEQ ID NO: 480370 - RNA, 32 nt, Human
guuagguacugaccccucccucuugggcagca

SEQ ID NO: 480371 - RNA, 32 nt, Human
guuagguagcuuuagggcaauauugccauggu

SEQ ID NO: 480372 - RNA, 32 nt, Human
guuagguagggagcugguuggagaaggugcua

SEQ ID NO: 480373 - RNA, 32 nt, Human
guuagguauuggggaagagagacugaagucac

SEQ ID NO: 480374 - RNA, 32 nt, Human
guuaggugauuucaucauccugcaacaucaga

SEQ ID NO: 480375 - RNA, 32 nt, Human
guuaggugcucaauaaaaacuguaugguuaga

SEQ ID NO: 480376 - RNA, 31 nt, Human
guuaggugcucaauaaacggaguugccgcug

SEQ ID NO: 480377 - RNA, 32 nt, Human
guuagguggagugugcagggagguaggucuuc

SEQ ID NO: 480378 - RNA, 32 nt, Human
guuagguggauaccugcccugacaugugaggc

SEQ ID NO: 480379 - RNA, 32 nt, Human
guuaggugucagaaagaaaaggaaguaauuua

SEQ ID NO: 480380 - RNA, 32 nt, Human
guuagguuaugacaggagcagcacugcagcca

SEQ ID NO: 480381 - RNA, 32 nt, Human
guuagguugcgcagagguggucuuauccagcu

SEQ ID NO: 480382 - RNA, 32 nt, Human
guuagguuuaccucccccuuucugugccuggg

SEQ ID NO: 480383 - RNA, 32 nt, Human
guuagguuuuuaccccuucuaaaauaaguuuu

SEQ ID NO: 480384 - RNA, 32 nt, Human
guuaguaauguucaacuuuucacaaagauggu

SEQ ID NO: 480385 - RNA, 21 nt, Human
guuaguagacgucuucauuca

SEQ ID NO: 480386 - RNA, 32 nt, Human
guuaguagaggaggcagcuaggcguggcucuc

SEQ ID NO: 480387 - RNA, 32 nt, Human
guuaguaguucuaauauccacuugagaguaua

SEQ ID NO: 480388 - RNA, 32 nt, Human
guuaguauuauuuauguguaucgggagugugu

SEQ ID NO: 480389 - RNA, 32 nt, Human
guuaguauugcugcccuucuucacauaaauuu

SEQ ID NO: 480390 - RNA, 32 nt, Human
guuagucaagaugaaggaggaggacuggcugc

SEQ ID NO: 480391 - RNA, 32 nt, Human
guuagucaucugugcuuucuuuaccaacuggc

SEQ ID NO: 480392 - RNA, 32 nt, Human
guuagucauuagcugagauguugauuuuaaaa

SEQ ID NO: 480393 - RNA, 32 nt, Human
guuaguccagccgccggcacgugucccggaac

SEQ ID NO: 480394 - RNA, 32 nt, Human
guuaguccuccaccaaggccaccagugaucag

SEQ ID NO: 480395 - RNA, 32 nt, Human
guuagucugcauuccacagcuucucaguugcc

SEQ ID NO: 480396 - RNA, 23 nt, Human
guuagucuguucucaugcugcua

SEQ ID NO: 480397 - RNA, 32 nt, Human
guuagugagaguuucacucuuguugccuaggc

SEQ ID NO: 480398 - RNA, 32 nt, Human
guuagugcacaugugcacccagaagaccacuc

SEQ ID NO: 480399 - RNA, 32 nt, Human
guuagugcagcuccugaccaggccuucagggu

SEQ ID NO: 480400 - RNA, 32 nt, Human
guuaguggagcuuggaugggaacuuacccagc

SEQ ID NO: 480401 - RNA, 32 nt, Human
guuaguggcugccucauauagcacuuuugaag

SEQ ID NO: 480402 - RNA, 31 nt, Human
guuagugggcagguggccacagcaggacuga

SEQ ID NO: 480403 - RNA, 32 nt, Human
guuaguguagugugugucugauuauuuacaug

SEQ ID NO: 480404 - RNA, 32 nt, Human
guuaguguggucuguucuuuaccucccuuuau

SEQ ID NO: 480405 - RNA, 32 nt, Human
guuaguuacuaguuauuacagcuguaaggaua

SEQ ID NO: 480406 - RNA, 32 nt, Human
guuaguuacuuucuccaauucucccuccuuuu

SEQ ID NO: 480407 - RNA, 32 nt, Human
guuaguuaugauuuuuaaaagcauuaaauuaa

SEQ ID NO: 480408 - RNA, 32 nt, Human
guuaguuauguauacagaacuggcaguuguca

SEQ ID NO: 480409 - RNA, 32 nt, Human
guuaguucacccaguucuguggggcaggaaag

SEQ ID NO: 480410 - RNA, 32 nt, Human
guuaguucgugucuaggauuugagugccuuac

SEQ ID NO: 480411 - RNA, 32 nt, Human
guuaguucuuuucuccccuugaggucaguaau

SEQ ID NO: 480412 - RNA, 32 nt, Human
guuaguugaagaaaaagcaguucccaggugcc

SEQ ID NO: 480413 - RNA, 32 nt, Human
guuaguugcuaguacaggaaucguuuauuggu

SEQ ID NO: 480414 - RNA, 32 nt, Human
guuaguugcucucugucauagcccgcagaagc

SEQ ID NO: 480415 - RNA, 32 nt, Human
guuaguugcugacucggaugcagagagucggu

SEQ ID NO: 480416 - RNA, 32 nt, Human
guuaguuucuccaagcaggacauggacaagga

SEQ ID NO: 480417 - RNA, 32 nt, Human
guuaguuuugccguggaucagaugguuuauaa

SEQ ID NO: 480418 - RNA, 32 nt, Human
guuauaaaaugagaaacuuuguaacuggaaaa

SEQ ID NO: 480419 - RNA, 32 nt, Human
guuauaaaccuacaaaaugggcccugcccuca

SEQ ID NO: 480420 - RNA, 32 nt, Human
guuauaaagaauugguuucuuggaaagcaggc

SEQ ID NO: 480421 - RNA, 32 nt, Human
guuauaaagaguauuuacaaauuuccauuggg

SEQ ID NO: 480422 - RNA, 32 nt, Human
guuauaaagccagaagcauguucuccacaauu

SEQ ID NO: 480423 - RNA, 32 nt, Human
guuauaaccugacugaaccaaauccaucagca

SEQ ID NO: 480424 - RNA, 32 nt, Human
guuauaacucugggaaauuccaucucuugcau

SEQ ID NO: 480425 - RNA, 32 nt, Human
guuauacaaacccugagucaacagaugcguuu

SEQ ID NO: 480426 - RNA, 32 nt, Human
guuauacaaugccaguuugcaauaguugauuu

SEQ ID NO: 480427 - RNA, 32 nt, Human
guuauacacagaaacaaacacacacgcacgua

SEQ ID NO: 480428 - RNA, 32 nt, Human
guuauacaugaacagaacaagauccucaugaa

SEQ ID NO: 480429 - RNA, 32 nt, Human
guuauacauugauauuuauucuuucugucccc

SEQ ID NO: 480430 - RNA, 32 nt, Human
guuauaccauuuccucagcuuaucucuuuuau

SEQ ID NO: 480431 - RNA, 32 nt, Human
guuauacuggaaaauucaggugccacugaaag

SEQ ID NO: 480432 - RNA, 19 nt, Human
guuauacuguaaccucuua

SEQ ID NO: 480433 - RNA, 32 nt, Human
guuauacuuccuauuuuuaaugggcuuuuaug

SEQ ID NO: 480434 - RNA, 32 nt, Human
guuauagacucauguguguucugaauucuggu

SEQ ID NO: 480435 - RNA, 32 nt, Human
guuauagaggucuuuggacucuaaagaccaau

SEQ ID NO: 480436 - RNA, 32 nt, Human
guuauagauggagagaccuauaaaggacucca

SEQ ID NO: 480437 - RNA, 32 nt, Human
guuauagauuaguuacugcuacccaggguauc

SEQ ID NO: 480438 - RNA, 32 nt, Human
guuauagcaggaggagaaaaacaagccauuuu

SEQ ID NO: 480439 - RNA, 32 nt, Human
guuauagccgagcaaaugaaccguccuccugc

SEQ ID NO: 480440 - RNA, 32 nt, Human
guuauagcugugacuucugcccugccaggccg

SEQ ID NO: 480441 - RNA, 32 nt, Human
guuauaggacaccaagcagauuuaacccaaag

SEQ ID NO: 480442 - RNA, 32 nt, Human
guuauaggucucccccuaggccugucucuccc

SEQ ID NO: 480443 - RNA, 32 nt, Human
guuauaggugugagccacugucccuggccuau

SEQ ID NO: 480444 - RNA, 32 nt, Human
guuauaguggaaagugccucagcuggaaagau

SEQ ID NO: 480445 - RNA, 20 nt, Human
guuauauaauuaaagcucug

SEQ ID NO: 480446 - RNA, 19 nt, Human
guuauauacucaaauguau

SEQ ID NO: 480447 - RNA, 32 nt, Human
guuauauaguuauauuucacuucucuuuuaau

SEQ ID NO: 480448 - RNA, 32 nt, Human
guuauaucagacaguccucuauaacucuguac

SEQ ID NO: 480449 - RNA, 32 nt, Human
guuauaucucuuguccuuagcacaguaccugg

SEQ ID NO: 480450 - RNA, 32 nt, Human
guuauauguuaugugcauucuaccacaauuca

SEQ ID NO: 480451 - RNA, 32 nt, Human
guuauauuacuguagaaccacagugcccaucu

SEQ ID NO: 480452 - RNA, 32 nt, Human
guuauauucugagucaaaguuggggcuuuuua

SEQ ID NO: 480453 - RNA, 32 nt, Human
guuauauugccuaggcuggaaugcagugguua

SEQ ID NO: 480454 - RNA, 32 nt, Human
guuaucaaaaccacacugaaagaagauacagu

SEQ ID NO: 480455 - RNA, 32 nt, Human
guuaucaacacacacccuagaguaaaucuguu

SEQ ID NO: 480456 - RNA, 32 nt, Human
guuaucacaccacugcacuccagccuggguga

SEQ ID NO: 480457 - RNA, 32 nt, Human
guuaucacaccacugcacuucagccuggauga

SEQ ID NO: 480458 - RNA, 32 nt, Human
guuaucacagaagauacugucucauagaaguu

SEQ ID NO: 480459 - RNA, 32 nt, Human
guuaucagaauccauuucuuccacaccucuga

SEQ ID NO: 480460 - RNA, 32 nt, Human
guuaucagggacugugcucgugagcgccgacc

SEQ ID NO: 480461 - RNA, 32 nt, Human
guuaucagggacugugcucgugagcgcggacc

SEQ ID NO: 480462 - RNA, 32 nt, Human
guuaucagucuggaaauauucagcauuauucu

SEQ ID NO: 480463 - RNA, 32 nt, Human
guuaucaguguacguucuaauugagagcauuc

SEQ ID NO: 480464 - RNA, 32 nt, Human
guuaucaugacuucuauuuggcaccggcccgu

SEQ ID NO: 480465 - RNA, 32 nt, Human
guuauccacagccugggaaccugccuuaagcu

SEQ ID NO: 480466 - RNA, 32 nt, Human
guuauccagaagcuguuauguccuguuuccau

SEQ ID NO: 480467 - RNA, 23 nt, Human
guuauccaggcuggugugcagug

SEQ ID NO: 480468 - RNA, 28 nt, Human
guuaucccaagugcucuuauucugguga

SEQ ID NO: 480469 - RNA, 32 nt, Human
guuaucccaagugcucuuauucuggugagaag

SEQ ID NO: 480470 - RNA, 32 nt, Human
guuaucccacugcacucugcuuaaggguuccu

SEQ ID NO: 480471 - RNA, 32 nt, Human
guuaucccagcacuuggggaggcugaggcggg

SEQ ID NO: 480472 - RNA, 32 nt, Human
guuaucccuacgcuucccagagagaacaaugc

SEQ ID NO: 480473 - RNA, 32 nt, Human
guuauccucccgccuuggcaucccaaaguguu

SEQ ID NO: 480474 - RNA, 32 nt, Human
guuauccucuccucugaauuuuguucuucaga

SEQ ID NO: 480475 - RNA, 32 nt, Human
guuauccuuagaguguuuuccgucuagggccg

SEQ ID NO: 480476 - RNA, 32 nt, Human
guuaucgaacuuucuuuguugcugcuaguuaa

SEQ ID NO: 480477 - RNA, 32 nt, Human
guuaucgugagcugacauugcgccacugcacu

SEQ ID NO: 480478 - RNA, 32 nt, Human
guuaucuaaugaggaacaaacacuaaccuaag

SEQ ID NO: 480479 - RNA, 32 nt, Human
guuaucucaaaccagucugcugguuaaaugga

SEQ ID NO: 480480 - RNA, 31 nt, Human
guuaucucaauaagauacuuauaugagaacu

SEQ ID NO: 480481 - RNA, 32 nt, Human
guuaucucaugcaccucugagugccuucuucc

SEQ ID NO: 480482 - RNA, 32 nt, Human
guuaucucauugugguuuugauuugcauuucu

SEQ ID NO: 480483 - RNA, 32 nt, Human
guuaucugaaagcucaguaacucagaacagga

SEQ ID NO: 480484 - RNA, 32 nt, Human
guuaucugcucccugcaggccuagagaaguuu

SEQ ID NO: 480485 - RNA, 32 nt, Human
guuaucuguuagaacagucucuguacacaauu

SEQ ID NO: 480486 - RNA, 32 nt, Human
guuaucuguuuugacacagauuuccuuguaaa

SEQ ID NO: 480487 - RNA, 22 nt, Human
guuaucuuccugcugggcagug

SEQ ID NO: 480488 - RNA, 22 nt, Human
guuaucuuugugcuauauagug

SEQ ID NO: 480489 - RNA, 32 nt, Human
guuaugaaaagaagcucagagcagagcaccga

SEQ ID NO: 480490 - RNA, 32 nt, Human
guuaugaaaggaguuaauguaucugcgagcuc

SEQ ID NO: 480491 - RNA, 32 nt, Human
guuaugaaaugaguaguaauauugggugguug

SEQ ID NO: 480492 - RNA, 32 nt, Human
guuaugaggaagggggaggccucuguaggcug

SEQ ID NO: 480493 - RNA, 32 nt, Human
guuaugauggggcaagauggcagagguauugg

SEQ ID NO: 480494 - RNA, 32 nt, Human
guuaugauugugccacugcgcuccaggcuggg

SEQ ID NO: 480495 - RNA, 32 nt, Human
guuaugauuuauuuugcaacuaccucaggaca

SEQ ID NO: 480496 - RNA, 32 nt, Human
guuaugauuucauauccugagauagcucugca

SEQ ID NO: 480497 - RNA, 32 nt, Human
guuaugcacaauauuaaauacauguuaccagu

SEQ ID NO: 480498 - RNA, 32 nt, Human
guuaugcacacuuuacaaacaaggggauugag

SEQ ID NO: 480499 - RNA, 32 nt, Human
guuaugcaccgccauggcccacauuaacgcuc

SEQ ID NO: 480500 - RNA, 32 nt, Human
guuaugcagaagcagagaugaggaggcuggcc

SEQ ID NO: 480501 - RNA, 32 nt, Human
guuaugcagcuacuuccucuccccagccuuac

SEQ ID NO: 480502 - RNA, 32 nt, Human
guuaugcaguuacuuccucuccccagccuuac

SEQ ID NO: 480503 - RNA, 32 nt, Human
guuaugccuccuccucaaguuccuggcccgug

SEQ ID NO: 480504 - RNA, 32 nt, Human
guuaugccuuucaguguuaacuccuuucuuuu

SEQ ID NO: 480505 - RNA, 32 nt, Human
guuaugcggcuggcugccaccgaccuguuguu

SEQ ID NO: 480506 - RNA, 32 nt, Human
guuaugcucugccaccuaccaaacucuggagu

SEQ ID NO: 480507 - RNA, 32 nt, Human
guuaugcuggaccgggcggugagggaaaccga

SEQ ID NO: 480508 - RNA, 32 nt, Human
guuauggaaggugacuuugggauguaagagug

SEQ ID NO: 480509 - RNA, 32 nt, Human
guuauggacacauaacucccgggccagaggcu

SEQ ID NO: 480510 - RNA, 32 nt, Human
guuauggacacauaacuccugggccagaggcu

SEQ ID NO: 480511 - RNA, 32 nt, Human
guuauggacacauaauccugggccagagacua

SEQ ID NO: 480512 - RNA, 32 nt, Human
guuauggacacauacuccugggccagaggcua

SEQ ID NO: 480513 - RNA, 32 nt, Human
guuauggaccaaaagccaaaucuccaucugac

SEQ ID NO: 480514 - RNA, 32 nt, Human
guuauggacugcugccuuuaaaccacaucggu

SEQ ID NO: 480515 - RNA, 32 nt, Human
guuauggagaaaaauacagcagaggaaggaga

SEQ ID NO: 480516 - RNA, 32 nt, Human
guuauggagaugguucagggaggcuuggagua

SEQ ID NO: 480517 - RNA, 32 nt, Human
guuauggaguaucagaaucuuuccauggaaac

SEQ ID NO: 480518 - RNA, 32 nt, Human
guuauggauuuccuuguucugugucuuuaucc

SEQ ID NO: 480519 - RNA, 32 nt, Human
guuauggccacugggcugggcggcugaccgcg

SEQ ID NO: 480520 - RNA, 32 nt, Human
guuauggccucugcacuccagccugggugaca

SEQ ID NO: 480521 - RNA, 32 nt, Human
guuauggcuaaggacaugaaauugucagaaug

SEQ ID NO: 480522 - RNA, 32 nt, Human
guuauggcucagaagaagaaaugaacugugaa

SEQ ID NO: 480523 - RNA, 32 nt, Human
guuauggcugcagccccugccugugugucugg

SEQ ID NO: 480524 - RNA, 32 nt, Human
guuaugggaggugagagaagaacgaugugaua

SEQ ID NO: 480525 - RNA, 28 nt, Human
guuaugggcccguuccaggcagaaagag

SEQ ID NO: 480526 - RNA, 32 nt, Human
guuaugggucuauuucuuccaugauuagagga

SEQ ID NO: 480527 - RNA, 32 nt, Human
guuaugggugugagccaccgcgccuggccuau

SEQ ID NO: 480528 - RNA, 32 nt, Human
guuauggucauuuauuaauuuucacuaaucca

SEQ ID NO: 480529 - RNA, 32 nt, Human
guuauggugauggauggauguggauuuggaag

SEQ ID NO: 480530 - RNA, 32 nt, Human
guuaugguguaaggaguaugcccagccccuga

SEQ ID NO: 480531 - RNA, 32 nt, Human
guuauguacaaggcacugggcuuagcaccaca

SEQ ID NO: 480532 - RNA, 32 nt, Human
guuauguauacacaugcacauaugugccuugg

SEQ ID NO: 480533 - RNA, 32 nt, Human
guuauguaucagcuagauacugagcuuugaua

SEQ ID NO: 480534 - RNA, 32 nt, Human
guuauguauuuccuggauguuuggaaacauuu

SEQ ID NO: 480535 - RNA, 32 nt, Human
guuaugucauuugagacuguuucuaauaacug

SEQ ID NO: 480536 - RNA, 32 nt, Human
guuaugugaaggaugaaaggugggugaaagga

SEQ ID NO: 480537 - RNA, 32 nt, Human
guuaugugagccacugucuuucccauuuuugg

SEQ ID NO: 480538 - RNA, 32 nt, Human
guuauguuaaugauaucucuauacugcaucau

SEQ ID NO: 480539 - RNA, 32 nt, Human
guuauguucccuuucuggcauagcauucacuu

SEQ ID NO: 480540 - RNA, 24 nt, Human
guuauguugcccaggcuggucuca

SEQ ID NO: 480541 - RNA, 32 nt, Human
guuauguugguucauuuguucaauuguacagg

SEQ ID NO: 480542 - RNA, 32 nt, Human
guuauguuuaucucaauucccuggugguauug

SEQ ID NO: 480543 - RNA, 32 nt, Human
guuauuaaaaauuugauacacacagaaaaucu

SEQ ID NO: 480544 - RNA, 32 nt, Human
guuauuaaaaccagaagaauacuuuguggcug

SEQ ID NO: 480545 - RNA, 19 nt, Human
guuauuaauagagcucuaa

SEQ ID NO: 480546 - RNA, 32 nt, Human
guuauuacauuuacuguauugggaaacuugag

SEQ ID NO: 480547 - RNA, 32 nt, Human
guuauuaccaggaggaagagaaagaggacaaa

SEQ ID NO: 480548 - RNA, 32 nt, Human
guuauuaccccauacuugaagauagcuuagug

SEQ ID NO: 480549 - RNA, 32 nt, Human
guuauuagcuuuguggcuuugugaaauucuaa

SEQ ID NO: 480550 - RNA, 32 nt, Human
guuauuaggagaauguacaaagagcacuguga

SEQ ID NO: 480551 - RNA, 32 nt, Human
guuauuauaugcagagcucuugguucacaguu

SEQ ID NO: 480552 - RNA, 32 nt, Human
guuauuauguguaagaugaguugcuauuuuuc

SEQ ID NO: 480553 - RNA, 32 nt, Human
guuauuauuauuauuacuacuauugccuucuc

SEQ ID NO: 480554 - RNA, 32 nt, Human
guuauucaaaagggaguggagugcagucaugc

SEQ ID NO: 480555 - RNA, 32 nt, Human
guuauucaaauuuguacaggacuguaaagauu

SEQ ID NO: 480556 - RNA, 32 nt, Human
guuauucauaaagagaaaaugaugaguuuuua

SEQ ID NO: 480557 - RNA, 32 nt, Human
guuauucauaaauauuggacaguuuauuaauu

SEQ ID NO: 480558 - RNA, 32 nt, Human
guuauucaucugccgugcaacugggguuugca

SEQ ID NO: 480559 - RNA, 32 nt, Human
guuauucauucuagaugauacaacucuuauuu

SEQ ID NO: 480560 - RNA, 32 nt, Human
guuauuccucaccccuucacucaacuccauug

SEQ ID NO: 480561 - RNA, 32 nt, Human
guuauuccuugugacauacuuucuuacauguu

SEQ ID NO: 480562 - RNA, 32 nt, Human
guuauuccuuugcagugcagcugcccuguaga

SEQ ID NO: 480563 - RNA, 32 nt, Human
guuauucucaacugaauuucugcuaagugcau

SEQ ID NO: 480564 - RNA, 32 nt, Human
guuauucuccaucucccagcucagcuuuuucu

SEQ ID NO: 480565 - RNA, 32 nt, Human
guuauucugucuccucuucuuugucaucagcc

SEQ ID NO: 480566 - RNA, 32 nt, Human
guuauugaaacagcuccagacagccaagccuu

SEQ ID NO: 480567 - RNA, 32 nt, Human
guuauugaagaaaugauggaguaagagacucu

SEQ ID NO: 480568 - RNA, 19 nt, Human
guuauugaaggccccaagg

SEQ ID NO: 480569 - RNA, 32 nt, Human
guuauugacuacuauucagcacugccuucaau

SEQ ID NO: 480570 - RNA, 32 nt, Human
guuauugacucugaauuugccucaucguaugu

SEQ ID NO: 480571 - RNA, 32 nt, Human
guuauugauaccuuaaaggucaccuaccacaa

SEQ ID NO: 480572 - RNA, 32 nt, Human
guuauugauauggugagccccaucucucaguu

SEQ ID NO: 480573 - RNA, 32 nt, Human
guuauugcagaacuuccuguccugguggagaa

SEQ ID NO: 480574 - RNA, 32 nt, Human
guuauugcugguacuuuugagggggcacaaua

SEQ ID NO: 480575 - RNA, 32 nt, Human
guuauugcuguucgcccgcugugugugcucau

SEQ ID NO: 480576 - RNA, 32 nt, Human
guuauuggagugaugacaggaacacgggagaa

SEQ ID NO: 480577 - RNA, 32 nt, Human
guuauugggaaguauucugaagaggcaauagc

SEQ ID NO: 480578 - RNA, 32 nt, Human
guuauuggugcucuuuacuggccaaagcucag

SEQ ID NO: 480579 - RNA, 32 nt, Human
guuauugguuuguaaugcuagcacagaacuga

SEQ ID NO: 480580 - RNA, 32 nt, Human
guuauuuaaauaaaaagaaaguggaacuggaa

SEQ ID NO: 480581 - RNA, 32 nt, Human
guuauuuaguaaaauaugaauuuugcucuauu

SEQ ID NO: 480582 - RNA, 32 nt, Human
guuauuuaugcuugcugcacagacauauuaga

SEQ ID NO: 480583 - RNA, 32 nt, Human
guuauuucauucuuuuucuaaauucacacuac

SEQ ID NO: 480584 - RNA, 32 nt, Human
guuauuucuaagccucccaguuuauaguauuu

SEQ ID NO: 480585 - RNA, 32 nt, Human
guuauuucucaaacucugaggcugcggaguuc

SEQ ID NO: 480586 - RNA, 19 nt, Human
guuauuucuggaagcugga

SEQ ID NO: 480587 - RNA, 32 nt, Human
guuauuucuuacaaccacugugugugaaauug

SEQ ID NO: 480588 - RNA, 32 nt, Human
guuauuucuuucucuucaggucuuuccuucuc

SEQ ID NO: 480589 - RNA, 32 nt, Human
guuauuugaucucucagccugcuuucucaucu

SEQ ID NO: 480590 - RNA, 32 nt, Human
guuauuugcccaaacuaccucucguggcuggu

SEQ ID NO: 480591 - RNA, 32 nt, Human
guuauuuggaaagaaagaaagaaagagagaga

SEQ ID NO: 480592 - RNA, 32 nt, Human
guuauuugggaaaguuaacugugugcacuuuu

SEQ ID NO: 480593 - RNA, 32 nt, Human
guuauuuguucugaaggcugcagagaauugaa

SEQ ID NO: 480594 - RNA, 32 nt, Human
guuauuuuagugaggcuccaaaaugagcaaag

SEQ ID NO: 480595 - RNA, 32 nt, Human
guuauuuuagugugaaggucaugggaaauggc

SEQ ID NO: 480596 - RNA, 32 nt, Human
guuauuuucucccauccuuggcccaaggaacu

SEQ ID NO: 480597 - RNA, 32 nt, Human
guuauuuucuuucuaaaauaaguguuauuacu

SEQ ID NO: 480598 - RNA, 32 nt, Human
guuauuuugaauaucacuuucucugaaauagc

SEQ ID NO: 480599 - RNA, 32 nt, Human
guuauuuuuggcugggugugguggcucacacc

SEQ ID NO: 480600 - RNA, 32 nt, Human
guuauuuuuggcugggugugguggcucauacc

SEQ ID NO: 480601 - RNA, 32 nt, Human
guucaaaaccagccugaccaacauggugaaac

SEQ ID NO: 480602 - RNA, 32 nt, Human
guucaaaaccagccuggccaacaugcugaaac

SEQ ID NO: 480603 - RNA, 32 nt, Human
guucaaaaccagccuggccaacauggugaaac

SEQ ID NO: 480604 - RNA, 32 nt, Human
guucaaaaccagccugggcaauauagugagac

SEQ ID NO: 480605 - RNA, 32 nt, Human
guucaaaagaagccaauggagggagagggagc

SEQ ID NO: 480606 - RNA, 32 nt, Human
guucaaaagguggcaacacugaaaguuguuuu

SEQ ID NO: 480607 - RNA, 32 nt, Human
guucaaaagucaugcagaaugugagacaauuu

SEQ ID NO: 480608 - RNA, 32 nt, Human
guucaaaauauccaauuggagaaaaauucaga

SEQ ID NO: 480609 - RNA, 32 nt, Human
guucaaaaucagccuggccaaaaugcugaaac

SEQ ID NO: 480610 - RNA, 32 nt, Human
guucaaacaaaaggaggcaaagugaucugucu

SEQ ID NO: 480611 - RNA, 21 nt, Human
guucaaacaauucuccugccu

SEQ ID NO: 480612 - RNA, 23 nt, Human
guucaaacaauucuccugccuca

SEQ ID NO: 480613 - RNA, 32 nt, Human
guucaaaccaauagagcagggaaagggaaaug

SEQ ID NO: 480614 - RNA, 32 nt, Human
guucaaacccaguugcugccccggcugcaacc

SEQ ID NO: 480615 - RNA, 32 nt, Human
guucaaaccuccagccugugaaucaacugugu

SEQ ID NO: 480616 - RNA, 32 nt, Human
guucaaacguguguucucuguucucuaagaug

SEQ ID NO: 480617 - RNA, 32 nt, Human
guucaaagacaagggaaauggcaaacaaaaga

SEQ ID NO: 480618 - RNA, 32 nt, Human
guucaaagaccacccuaccagccccuauuugc

SEQ ID NO: 480619 - RNA, 32 nt, Human
guucaaagagauugacugcuguggagacagau

SEQ ID NO: 480620 - RNA, 32 nt, Human
guucaaagcugcagugagucaugauagcacca

SEQ ID NO: 480621 - RNA, 32 nt, Human
guucaaaggugggaagagagccuggaaaagaa

SEQ ID NO: 480622 - RNA, 32 nt, Human
guucaaauaaaaccagccucagcggaauccua

SEQ ID NO: 480623 - RNA, 32 nt, Human
guucaaaucccagcuccagcaguugccagcgc

SEQ ID NO: 480624 - RNA, 32 nt, Human
guucaaaugagcgagaggaacauuuggcuaaa

SEQ ID NO: 480625 - RNA, 23 nt, Human
guucaaaugauucuccugccuca

SEQ ID NO: 480626 - RNA, 32 nt, Human
guucaaauguacagugguccuuuucagaguug

SEQ ID NO: 480627 - RNA, 32 nt, Human
guucaacaaggcauggaggcagggccaucuuu

SEQ ID NO: 480628 - RNA, 32 nt, Human
guucaacaccagccugggccauauugugagaa

SEQ ID NO: 480629 - RNA, 32 nt, Human
guucaacagacauuuacuugagugccugcucu

SEQ ID NO: 480630 - RNA, 32 nt, Human
guucaacagcggcaaacagugcagugaauaug

SEQ ID NO: 480631 - RNA, 32 nt, Human
guucaacaggaaagacaaaguguacgugaaug

SEQ ID NO: 480632 - RNA, 32 nt, Human
guucaacaucccugcugaccagcacuuggagu

SEQ ID NO: 480633 - RNA, 32 nt, Human
guucaacauggcgaaaccccauucuaccaaaa

SEQ ID NO: 480634 - RNA, 32 nt, Human
guucaacauuuuuaugcugaaguuucccuuag

SEQ ID NO: 480635 - RNA, 21 nt, Human
guucaaccaauucuccugccu

SEQ ID NO: 480636 - RNA, 32 nt, Human
guucaaccacuauuagagugagaaauggcauc

SEQ ID NO: 480637 - RNA, 32 nt, Human
guucaaccacugcacuccacuaagcaacuggc

SEQ ID NO: 480638 - RNA, 32 nt, Human
guucaacgaaguguaccaaaucucagcuauug

SEQ ID NO: 480639 - RNA, 32 nt, Human
guucaacucccacuuauaagugagaauaugca

SEQ ID NO: 480640 - RNA, 32 nt, Human
guucaacucugccaaaagauggaucuuuaaug

SEQ ID NO: 480641 - RNA, 21 nt, Human
guucaacugauucuucugccu

SEQ ID NO: 480642 - RNA, 23 nt, Human
guucaacugauucuucugccuca

SEQ ID NO: 480643 - RNA, 32 nt, Human
guucaacuuccucuguaaauauccaaguauaa

SEQ ID NO: 480644 - RNA, 25 nt, Human
guucaacuuucucauuuggccugug

SEQ ID NO: 480645 - RNA, 32 nt, Human
guucaacuuugcuuuugcugugccaguucaaa

SEQ ID NO: 480646 - RNA, 32 nt, Human
guucaagaacagcaaguuugcuauuuaaacac

SEQ ID NO: 480647 - RNA, 32 nt, Human
guucaagaagauggccagcagaugaaacccug

SEQ ID NO: 480648 - RNA, 32 nt, Human
guucaagacaagccuggccuacaugguugaaa

SEQ ID NO: 480649 - RNA, 32 nt, Human
guucaagacagccugggcaacauggugaaacc

SEQ ID NO: 480650 - RNA, 32 nt, Human
guucaagaccaaccuggugaaaccccgucucu

SEQ ID NO: 480651 - RNA, 32 nt, Human
guucaagaccaccuggccaacauggugaaacc

SEQ ID NO: 480652 - RNA, 32 nt, Human
guucaagaccagccuaggcaacauagugagau

SEQ ID NO: 480653 - RNA, 32 nt, Human
guucaagaccagccugaccaacauggugaaac

SEQ ID NO: 480654 - RNA, 32 nt, Human
guucaagaccagccugacgaacauggugaaac

SEQ ID NO: 480655 - RNA, 32 nt, Human
guucaagaccagccugacuaacauggagaaac

SEQ ID NO: 480656 - RNA, 32 nt, Human
guucaagaccagccugagaaacauagugagcc

SEQ ID NO: 480657 - RNA, 32 nt, Human
guucaagaccagccugagcaacauagugagac

SEQ ID NO: 480658 - RNA, 32 nt, Human
guucaagaccagccugaucaacauggugaaac

SEQ ID NO: 480659 - RNA, 32 nt, Human
guucaagaccagccugcccaacauagugaaac

SEQ ID NO: 480660 - RNA, 32 nt, Human
guucaagaccagccugcccaacauggugaaac

SEQ ID NO: 480661 - RNA, 32 nt, Human
guucaagaccagccuggacaacauagugagac

SEQ ID NO: 480662 - RNA, 32 nt, Human
guucaagaccagccuggacaacauggcaaaac

SEQ ID NO: 480663 - RNA, 32 nt, Human
guucaagaccagccuggacaacauggugaaac

SEQ ID NO: 480664 - RNA, 32 nt, Human
guucaagaccagccuggacaauauagugaaac

SEQ ID NO: 480665 - RNA, 32 nt, Human
guucaagaccagccuggcaaacauggugaaac

SEQ ID NO: 480666 - RNA, 32 nt, Human
guucaagaccagccuggccaaacauggugaaa

SEQ ID NO: 480667 - RNA, 32 nt, Human
guucaagaccagccuggccaacauagugaaaa

SEQ ID NO: 480668 - RNA, 32 nt, Human
guucaagaccagccuggccaacauagugaaac

SEQ ID NO: 480669 - RNA, 32 nt, Human
guucaagaccagccuggccaacaugguaaaac

SEQ ID NO: 480670 - RNA, 32 nt, Human
guucaagaccagccuggccaacauggugaaaa

SEQ ID NO: 480671 - RNA, 32 nt, Human
guucaagaccagccuggccaacauggugaaac

SEQ ID NO: 480672 - RNA, 32 nt, Human
guucaagaccagccuggccaacauggugaaau

SEQ ID NO: 480673 - RNA, 32 nt, Human
guucaagaccagccuggccaacauggugaauc

SEQ ID NO: 480674 - RNA, 32 nt, Human
guucaagaccagccuggccaacauggugaauu

SEQ ID NO: 480675 - RNA, 32 nt, Human
guucaagaccagccuggccaacauggugagac

SEQ ID NO: 480676 - RNA, 32 nt, Human
guucaagaccagccuggccaacaugguggaac

SEQ ID NO: 480677 - RNA, 32 nt, Human
guucaagaccagccuggccaacaugguguaac

SEQ ID NO: 480678 - RNA, 32 nt, Human
guucaagaccagccuggccaacguggugaaac

SEQ ID NO: 480679 - RNA, 32 nt, Human
guucaagaccagccuggccaacguggugaaag

SEQ ID NO: 480680 - RNA, 32 nt, Human
guucaagaccagccuggccaauguagugaaac

SEQ ID NO: 480681 - RNA, 32 nt, Human
guucaagaccagccuggccacauggugcaacc

SEQ ID NO: 480682 - RNA, 32 nt, Human
guucaagaccagccuggccagcauagugaaac

SEQ ID NO: 480683 - RNA, 32 nt, Human
guucaagaccagccuggccaucauggugaaac

SEQ ID NO: 480684 - RNA, 32 nt, Human
guucaagaccagccuggcuaacauggugaaau

SEQ ID NO: 480685 - RNA, 32 nt, Human
guucaagaccagccuggcuaauauggugaaac

SEQ ID NO: 480686 - RNA, 32 nt, Human
guucaagaccagccugggaaacauggcaaacu

SEQ ID NO: 480687 - RNA, 32 nt, Human
guucaagaccagccugggcaacauaccaagac

SEQ ID NO: 480688 - RNA, 32 nt, Human
guucaagaccagccugggcaacauaguaagac

SEQ ID NO: 480689 - RNA, 32 nt, Human
guucaagaccagccugggcaacauagugaaac

SEQ ID NO: 480690 - RNA, 32 nt, Human
guucaagaccagccugggcaacauagugagaa

SEQ ID NO: 480691 - RNA, 32 nt, Human
guucaagaccagccugggcaacauagugagac

SEQ ID NO: 480692 - RNA, 32 nt, Human
guucaagaccagccugggcaacauggcuauau

SEQ ID NO: 480693 - RNA, 32 nt, Human
guucaagaccagccugggcaacaugguaaaac

SEQ ID NO: 480694 - RNA, 32 nt, Human
guucaagaccagccugggcaacauggugaaac

SEQ ID NO: 480695 - RNA, 32 nt, Human
guucaagaccagccugggcaacauggugaaau

SEQ ID NO: 480696 - RNA, 32 nt, Human
guucaagaccagccugggcaacauggugagac

SEQ ID NO: 480697 - RNA, 32 nt, Human
guucaagaccagccugggcaacauggugagau

SEQ ID NO: 480698 - RNA, 32 nt, Human
guucaagaccagccugggcaacgugguggugu

SEQ ID NO: 480699 - RNA, 32 nt, Human
guucaagaccagccugggcaacuuagggagau

SEQ ID NO: 480700 - RNA, 32 nt, Human
guucaagaccagccugggcaacuuagugaggc

SEQ ID NO: 480701 - RNA, 32 nt, Human
guucaagaccagccugggcaauauagugagac

SEQ ID NO: 480702 - RNA, 32 nt, Human
guucaagaccagccugggcaauguaguaagac

SEQ ID NO: 480703 - RNA, 32 nt, Human
guucaagaccagccugggcagcauggugaaac

SEQ ID NO: 480704 - RNA, 32 nt, Human
guucaagaccagccugggcuacaugacgaaac

SEQ ID NO: 480705 - RNA, 32 nt, Human
guucaagaccagccuggguaacauggugaaau

SEQ ID NO: 480706 - RNA, 32 nt, Human
guucaagaccagccuggucaacauagugagac

SEQ ID NO: 480707 - RNA, 32 nt, Human
guucaagaccagccuggucaacauggugaaac

SEQ ID NO: 480708 - RNA, 32 nt, Human
guucaagaccagccuggucaacauggugaaau

SEQ ID NO: 480709 - RNA, 32 nt, Human
guucaagaccagccuguccaacauggugaaac

SEQ ID NO: 480710 - RNA, 32 nt, Human
guucaagaccagccuuggcaacauggugaaac

SEQ ID NO: 480711 - RNA, 32 nt, Human
guucaagagaucaggaggaacauucgaccuga

SEQ ID NO: 480712 - RNA, 32 nt, Human
guucaagagauccauccucccaccucagucuc

SEQ ID NO: 480713 - RNA, 32 nt, Human
guucaagagaucucuuguacaacauggggauu

SEQ ID NO: 480714 - RNA, 32 nt, Human
guucaagagcaauuucugcccuuuguaaauua

SEQ ID NO: 480715 - RNA, 32 nt, Human
guucaagagcagccuggucaacauggugaaac

SEQ ID NO: 480716 - RNA, 32 nt, Human
guucaagaucagccuggccaacauggugaaac

SEQ ID NO: 480717 - RNA, 32 nt, Human
guucaagaucagccugggaaacauagugagac

SEQ ID NO: 480718 - RNA, 32 nt, Human
guucaagaucagccugggcaacauagugaaac

SEQ ID NO: 480719 - RNA, 32 nt, Human
guucaagaucagccugggcaacauagugagac

SEQ ID NO: 480720 - RNA, 32 nt, Human
guucaagaucagccugggcaacauggugaaac

SEQ ID NO: 480721 - RNA, 32 nt, Human
guucaagaucagccugggcaauauagugaaac

SEQ ID NO: 480722 - RNA, 32 nt, Human
guucaagaucagcuugugcaauguaucaaaac

SEQ ID NO: 480723 - RNA, 32 nt, Human
guucaagcaagucuugugccucaguuuaccaa

SEQ ID NO: 480724 - RNA, 32 nt, Human
guucaagcaauuccccugccucagcuuccuga

SEQ ID NO: 480725 - RNA, 32 nt, Human
guucaagcaauucucccaucucagccuccuga

SEQ ID NO: 480726 - RNA, 20 nt, Human
guucaagcaauucuccugcc

SEQ ID NO: 480727 - RNA, 23 nt, Human
guucaagcaauucuccugcccca

SEQ ID NO: 480728 - RNA, 21 nt, Human
guucaagcaauucuccugccu

SEQ ID NO: 480729 - RNA, 23 nt, Human
guucaagcaauucuccugccuca

SEQ ID NO: 480730 - RNA, 32 nt, Human
guucaagcaauucuccugccucagcuucccaa

SEQ ID NO: 480731 - RNA, 32 nt, Human
guucaagcaauucuccugccucagcuucccga

SEQ ID NO: 480732 - RNA, 32 nt, Human
guucaagcaauucuccugccucagcuucccgc

SEQ ID NO: 480733 - RNA, 32 nt, Human
guucaagcaauucuccugccucagcuuccuga

SEQ ID NO: 480734 - RNA, 21 nt, Human
guucaagcaauucuucugccu

SEQ ID NO: 480735 - RNA, 32 nt, Human
guucaagcaguuuccugcuucagacuuccaag

SEQ ID NO: 480736 - RNA, 32 nt, Human
guucaagccauccucccaccucagccucccaa

SEQ ID NO: 480737 - RNA, 32 nt, Human
guucaagccauucuccugucucagccucccaa

SEQ ID NO: 480738 - RNA, 32 nt, Human
guucaagccauucuccugucucagccucccga

SEQ ID NO: 480739 - RNA, 32 nt, Human
guucaagccauucuccugucucagccuccuga

SEQ ID NO: 480740 - RNA, 32 nt, Human
guucaagccuuccagggauuugccucaccuug

SEQ ID NO: 480741 - RNA, 21 nt, Human
guucaagcgauucuccugccu

SEQ ID NO: 480742 - RNA, 23 nt, Human
guucaagcgauucuccugccuca

SEQ ID NO: 480743 - RNA, 32 nt, Human
guucaagcgauucuccugccucagcuucccag

SEQ ID NO: 480744 - RNA, 32 nt, Human
guucaagcgauucuccugccucagcuuccuga

SEQ ID NO: 480745 - RNA, 22 nt, Human
guucaagcgauucuccugccuu

SEQ ID NO: 480746 - RNA, 21 nt, Human
guucaagcgauucuccugcuu

SEQ ID NO: 480747 - RNA, 23 nt, Human
guucaagcgauucuccugcuuua

SEQ ID NO: 480748 - RNA, 21 nt, Human
guucaagcgauucuccugucu

SEQ ID NO: 480749 - RNA, 23 nt, Human
guucaagcgauucuccugucuca

SEQ ID NO: 480750 - RNA, 21 nt, Human
guucaagcgauuguccugccu

SEQ ID NO: 480751 - RNA, 32 nt, Human
guucaagcgauuguccugccucagcuucccaa

SEQ ID NO: 480752 - RNA, 21 nt, Human
guucaagcgauuuuccuaccu

SEQ ID NO: 480753 - RNA, 21 nt, Human
guucaagcgauuuuccugccu

SEQ ID NO: 480754 - RNA, 23 nt, Human
guucaagcgauuuuccugccuca

SEQ ID NO: 480755 - RNA, 32 nt, Human
guucaagcuauucucaugccucagccucucaa

SEQ ID NO: 480756 - RNA, 32 nt, Human
guucaagcucuggaggccagcccuggcuuugg

SEQ ID NO: 480757 - RNA, 32 nt, Human
guucaaggacagucuuucucuggugucauuuc

SEQ ID NO: 480758 - RNA, 24 nt, Human
guucaaggaccacauguguucucu

SEQ ID NO: 480759 - RNA, 32 nt, Human
guucaaggagcaagagcuucagccugaagaca

SEQ ID NO: 480760 - RNA, 32 nt, Human
guucaaggcacagucauucucuggcuuucaua

SEQ ID NO: 480761 - RNA, 32 nt, Human
guucaaggcaggcagggguugggaggugcgga

SEQ ID NO: 480762 - RNA, 32 nt, Human
guucaaggccagccuggacaacauaguaagac

SEQ ID NO: 480763 - RNA, 32 nt, Human
guucaaggccagccugggcaacauaguaagac

SEQ ID NO: 480764 - RNA, 32 nt, Human
guucaaggccagccugggcaacauagugaagc

SEQ ID NO: 480765 - RNA, 32 nt, Human
guucaaggccagccugggcaacauggugaaac

SEQ ID NO: 480766 - RNA, 32 nt, Human
guucaaggccagccugggcaacauggugucuc

SEQ ID NO: 480767 - RNA, 32 nt, Human
guucaaggcuagagcugcuggggaggggcugc

SEQ ID NO: 480768 - RNA, 32 nt, Human
guucaaggcugcagagagcuaggaucacacca

SEQ ID NO: 480769 - RNA, 32 nt, Human
guucaaggcugcagagagcuaugaucauccca

SEQ ID NO: 480770 - RNA, 32 nt, Human
guucaaggcuuucagacaagccacuuuuggca

SEQ ID NO: 480771 - RNA, 32 nt, Human
guucaagggaaagacgagaucuugcacaaggc

SEQ ID NO: 480772 - RNA, 21 nt, Human
guucaagggauucuccugccu

SEQ ID NO: 480773 - RNA, 23 nt, Human
guucaagggauucuccugccuca

SEQ ID NO: 480774 - RNA, 31 nt, Human
guucaagggucaaagggacccucugugccuu

SEQ ID NO: 480775 - RNA, 32 nt, Human
guucaagggucuuguacccccaccucagcugg

SEQ ID NO: 480776 - RNA, 32 nt, Human
guucaagguaaggagacaggaggaguaggagg

SEQ ID NO: 480777 - RNA, 32 nt, Human
guucaaguaauucuccugccucagcuuuccaa

SEQ ID NO: 480778 - RNA, 32 nt, Human
guucaagugauccucaugucucagccucccua

SEQ ID NO: 480779 - RNA, 22 nt, Human
guucaagugaugcuccugcuuc

SEQ ID NO: 480780 - RNA, 23 nt, Human
guucaagugauuccccugccuca

SEQ ID NO: 480781 - RNA, 21 nt, Human
guucaagugauucuccugccu

SEQ ID NO: 480782 - RNA, 23 nt, Human
guucaagugauucuccugccuca

SEQ ID NO: 480783 - RNA, 32 nt, Human
guucaagugauucuccugccucagcuucccaa

SEQ ID NO: 480784 - RNA, 23 nt, Human
guucaagugauucuccuggcuca

SEQ ID NO: 480785 - RNA, 32 nt, Human
guucaagugauucuugugccucagccauugag

SEQ ID NO: 480786 - RNA, 22 nt, Human
guucaagugauuuuccugccuu

SEQ ID NO: 480787 - RNA, 32 nt, Human
guucaaguggaggaaugcuggcuuugagcccu

SEQ ID NO: 480788 - RNA, 32 nt, Human
guucaaguggguuaaggagaccuccuguacau

SEQ ID NO: 480789 - RNA, 32 nt, Human
guucaaguucucuccugcuguggucagaguug

SEQ ID NO: 480790 - RNA, 32 nt, Human
guucaauaaauggugcugggauaacuggcuag

SEQ ID NO: 480791 - RNA, 32 nt, Human
guucaauccuaccuguuuuguggucagcugua

SEQ ID NO: 480792 - RNA, 32 nt, Human
guucaauggcugcugaagcugccugcuuuuca

SEQ ID NO: 480793 - RNA, 21 nt, Human
guucaauucaguugaucucga

SEQ ID NO: 480794 - RNA, 17 nt, Human
guucaauuggcuaccgg

SEQ ID NO: 480795 - RNA, 32 nt, Human
guucaauuuggggguuuuguuuugcaaaauaa

SEQ ID NO: 480796 - RNA, 32 nt, Human
guucacaagcucuaucggaguugaaagcgugg

SEQ ID NO: 480797 - RNA, 32 nt, Human
guucacaaggccccagcacaucgucuaggacg

SEQ ID NO: 480798 - RNA, 32 nt, Human
guucacaagguaccccaaaacucuguagcuua

SEQ ID NO: 480799 - RNA, 32 nt, Human
guucacaauucaguuccucccaaccaaccagu

SEQ ID NO: 480800 - RNA, 32 nt, Human
guucacacaaccagugcacuccugccuuuuca

SEQ ID NO: 480801 - RNA, 32 nt, Human
guucacacagcccaguucccgugacgaggcuc

SEQ ID NO: 480802 - RNA, 32 nt, Human
guucacaccacugcacuccagucugggcaaca

SEQ ID NO: 480803 - RNA, 32 nt, Human
guucacaccacugccauuuccuccugggcaac

SEQ ID NO: 480804 - RNA, 23 nt, Human
guucacaccauucuccugccuca

SEQ ID NO: 480805 - RNA, 32 nt, Human
guucacacccucccauccuuccugccuccugc

SEQ ID NO: 480806 - RNA, 32 nt, Human
guucacaccgcugcacucaagcuugggugaca

SEQ ID NO: 480807 - RNA, 32 nt, Human
guucacaccuguaauccaagcacuuugggagg

SEQ ID NO: 480808 - RNA, 32 nt, Human
guucacaccuguaaucccaacacuuugggagg

SEQ ID NO: 480809 - RNA, 32 nt, Human
guucacaccuguaaucccagcacuuugggagg

SEQ ID NO: 480810 - RNA, 32 nt, Human
guucacaccuguaauccccgcacuuuggaagg

SEQ ID NO: 480811 - RNA, 32 nt, Human
guucacaccuguaaucccggcacuuugggagg

SEQ ID NO: 480812 - RNA, 32 nt, Human
guucacaccuguaaucccggcauuuugggagg

SEQ ID NO: 480813 - RNA, 32 nt, Human
guucacaccuguaauccuagaacuuugggagg

SEQ ID NO: 480814 - RNA, 32 nt, Human
guucacaccuguaauccuagcaguuugggagg

SEQ ID NO: 480815 - RNA, 32 nt, Human
guucacaccuguaauugcagcacuuugggagg

SEQ ID NO: 480816 - RNA, 32 nt, Human
guucacacggaggcagagguggggaugaggua

SEQ ID NO: 480817 - RNA, 32 nt, Human
guucacacugggugcacuuguguggggacuuc

SEQ ID NO: 480818 - RNA, 32 nt, Human
guucacagcacuaggaaaugggagcacaguau

SEQ ID NO: 480819 - RNA, 32 nt, Human
guucacagcauguagggugaugagcacucaca

SEQ ID NO: 480820 - RNA, 32 nt, Human
guucacagcuacuacauucagugggaagguuu

SEQ ID NO: 480821 - RNA, 32 nt, Human
guucacagggugccugggcugcauuugaauau

SEQ ID NO: 480822 - RNA, 32 nt, Human
guucacaguacucggaaaugggagcauaguac

SEQ ID NO: 480823 - RNA, 23 nt, Human
guucacaguccuguuguugucga

SEQ ID NO: 480824 - RNA, 32 nt, Human
guucacaucagccuggcacucagcgaugagcc

SEQ ID NO: 480825 - RNA, 32 nt, Human
guucacauccaccugcuucucuuccaggcuuu

SEQ ID NO: 480826 - RNA, 32 nt, Human
guucacauccucuuuguuuccucuuuucacca

SEQ ID NO: 480827 - RNA, 32 nt, Human
guucacaugauucuccugccucagcuuccuaa

SEQ ID NO: 480828 - RNA, 32 nt, Human
guucacauuguacaaaaauaaugugacuucug

SEQ ID NO: 480829 - RNA, 32 nt, Human
guucacauuuaggacucucagugccauaugaa

SEQ ID NO: 480830 - RNA, 32 nt, Human
guucacauuuguaaucccagcacuuuggaagg

SEQ ID NO: 480831 - RNA, 32 nt, Human
guucaccaaacagcuagcacucuagcuugcau

SEQ ID NO: 480832 - RNA, 32 nt, Human
guucaccaaguugucauuuauuugauggaaua

SEQ ID NO: 480833 - RNA, 32 nt, Human
guucaccacuugggugcuguuaaaggcauuca

SEQ ID NO: 480834 - RNA, 32 nt, Human
guucaccaucaucucuugcuuuugucaccgcu

SEQ ID NO: 480835 - RNA, 32 nt, Human
guucaccauucauuccagaccugggccuuuga

SEQ ID NO: 480836 - RNA, 32 nt, Human
guucacccagcagaacugggaggugcaaagga

SEQ ID NO: 480837 - RNA, 32 nt, Human
guucacccaguucauacuaagcagagccaggc

SEQ ID NO: 480838 - RNA, 32 nt, Human
guucacccaucuguucugucugccucauuccc

SEQ ID NO: 480839 - RNA, 32 nt, Human
guucacccaucuuaucaaggacucugguuucu

SEQ ID NO: 480840 - RNA, 32 nt, Human
guucaccccaaagcccccgggcccucagaguu

SEQ ID NO: 480841 - RNA, 32 nt, Human
guucaccccucaccuccagccuggaggagaca

SEQ ID NO: 480842 - RNA, 32 nt, Human
guucaccccugggauuggacaguguauccuaa

SEQ ID NO: 480843 - RNA, 32 nt, Human
guucacccggaguucuggaggcaggcugccag

SEQ ID NO: 480844 - RNA, 32 nt, Human
guucaccuccuccagcuccaucaagggcuccu

SEQ ID NO: 480845 - RNA, 32 nt, Human
guucaccucuacucugcccuccucauagucau

SEQ ID NO: 480846 - RNA, 19 nt, Human
guucaccucuguguccuuu

SEQ ID NO: 480847 - RNA, 32 nt, Human
guucaccugcagucccagcuacuugggaggcc

SEQ ID NO: 480848 - RNA, 32 nt, Human
guucaccugccucuugcuuuuuguggguggcu

SEQ ID NO: 480849 - RNA, 32 nt, Human
guucaccugcuguguacuccuguuuggaagua

SEQ ID NO: 480850 - RNA, 32 nt, Human
guucaccugugacuaaggaguuguuguuaacg

SEQ ID NO: 480851 - RNA, 32 nt, Human
guucaccugugcaaaggcuuccucagacaugc

SEQ ID NO: 480852 - RNA, 32 nt, Human
guucaccuuuaaucccagcuacuugggaggcu

SEQ ID NO: 480853 - RNA, 32 nt, Human
guucacgaagugaggccgcuguugaaauucgu

SEQ ID NO: 480854 - RNA, 32 nt, Human
guucacgaccagccuggccaacauggugaaac

SEQ ID NO: 480855 - RNA, 32 nt, Human
guucacgccauccuccugccucagccucccaa

SEQ ID NO: 480856 - RNA, 32 nt, Human
guucacgccauccuccugccucagccuccuga

SEQ ID NO: 480857 - RNA, 23 nt, Human
guucacgccauucuacugccuca

SEQ ID NO: 480858 - RNA, 32 nt, Human
guucacgccauucuacugccucagccucccga

SEQ ID NO: 480859 - RNA, 21 nt, Human
guucacgccauucuccugccu

SEQ ID NO: 480860 - RNA, 23 nt, Human
guucacgccauucuccugccuca

SEQ ID NO: 480861 - RNA, 32 nt, Human
guucacgccuguaauccagcacugugggaggc

SEQ ID NO: 480862 - RNA, 19 nt, Human
guucacgccuguaauccca

SEQ ID NO: 480863 - RNA, 32 nt, Human
guucacgccuguaaucccaauacuuugggagg

SEQ ID NO: 480864 - RNA, 32 nt, Human
guucacgccuguaaucccagcacuuugggagg

SEQ ID NO: 480865 - RNA, 32 nt, Human
guucacgccuguaaucccagcacuuugggaug

SEQ ID NO: 480866 - RNA, 32 nt, Human
guucacgccuguaaugccagcacuuugggagg

SEQ ID NO: 480867 - RNA, 32 nt, Human
guucacgccuguaauuccagcacuuugagagg

SEQ ID NO: 480868 - RNA, 21 nt, Human
guucacgcgauucuccugccu

SEQ ID NO: 480869 - RNA, 23 nt, Human
guucacgcgauucuccugccuca

SEQ ID NO: 480870 - RNA, 32 nt, Human
guucacgugcagagaacaaagcagugacaacc

SEQ ID NO: 480871 - RNA, 32 nt, Human
guucacgugcagcucaaggaaaggccugaaag

SEQ ID NO: 480872 - RNA, 26 nt, Human
guucacguugccacagaauucacaug

SEQ ID NO: 480873 - RNA, 32 nt, Human
guucacguuucagagaggcugcagcccggcgc

SEQ ID NO: 480874 - RNA, 32 nt, Human
guucacuacaaccuccgccuccuggguccaag

SEQ ID NO: 480875 - RNA, 32 nt, Human
guucacuagaagagcauguugacaggaaugac

SEQ ID NO: 480876 - RNA, 32 nt, Human
guucacuagagacguggaauugagacuaauaa

SEQ ID NO: 480877 - RNA, 32 nt, Human
guucacuauguuggccaggauggucucgaucu

SEQ ID NO: 480878 - RNA, 32 nt, Human
guucacucaggaaccacuggcuccuccagugc

SEQ ID NO: 480879 - RNA, 32 nt, Human
guucacucauucucagauuaaauugccacuua

SEQ ID NO: 480880 - RNA, 32 nt, Human
guucacuccuuuccuuuccugacuuaugccug

SEQ ID NO: 480881 - RNA, 32 nt, Human
guucacucucaggggcgcacaaaggcaugaaa

SEQ ID NO: 480882 - RNA, 32 nt, Human
guucacucugcaguucucuugccuacugccau

SEQ ID NO: 480883 - RNA, 32 nt, Human
guucacugacagcacaggacccugcagauggu

SEQ ID NO: 480884 - RNA, 32 nt, Human
guucacugaggcccccacucugccauuuugga

SEQ ID NO: 480885 - RNA, 32 nt, Human
guucacugcaaccuccaccuccaggguucaga

SEQ ID NO: 480886 - RNA, 32 nt, Human
guucacugcaaccuccaccucccagguucaag

SEQ ID NO: 480887 - RNA, 32 nt, Human
guucacugcaaccuccaccucuuggguucaag

SEQ ID NO: 480888 - RNA, 32 nt, Human
guucacugcaaccuccgccuccuggauucaag

SEQ ID NO: 480889 - RNA, 22 nt, Human
guucacugcaaccucugccucc

SEQ ID NO: 480890 - RNA, 23 nt, Human
guucacugcaaccucugccuccu

SEQ ID NO: 480891 - RNA, 32 nt, Human
guucacugcaaccucugccuccugggcucaag

SEQ ID NO: 480892 - RNA, 32 nt, Human
guucacugcaaccucugccuccuggguucaag

SEQ ID NO: 480893 - RNA, 32 nt, Human
guucacugcaacuuccgcuucccagguucaag

SEQ ID NO: 480894 - RNA, 32 nt, Human
guucacugcaagcuccaccucccggguucacg

SEQ ID NO: 480895 - RNA, 32 nt, Human
guucacugcaaucucugccuccuggguuuaag

SEQ ID NO: 480896 - RNA, 32 nt, Human
guucacugcagccucaaccucuccagauucaa

SEQ ID NO: 480897 - RNA, 32 nt, Human
guucacugcagccuccaccuccccgguucaag

SEQ ID NO: 480898 - RNA, 32 nt, Human
guucacugcagccuccgcccuccagguucaag

SEQ ID NO: 480899 - RNA, 32 nt, Human
guucacugcagucuugaccucccaggcuuagg

SEQ ID NO: 480900 - RNA, 32 nt, Human
guucacugccucuaccaccaccucucacuucu

SEQ ID NO: 480901 - RNA, 32 nt, Human
guucacuggagggcccagccuggggaaaggau

SEQ ID NO: 480902 - RNA, 32 nt, Human
guucacugguaaucccagcacuuugggaggcc

SEQ ID NO: 480903 - RNA, 32 nt, Human
guucacuggucgcucuguugugccccacagca

SEQ ID NO: 480904 - RNA, 32 nt, Human
guucacuguccccaaaccuauggaaguuguug

SEQ ID NO: 480905 - RNA, 32 nt, Human
guucacugugcauauggcagagacaggagugg

SEQ ID NO: 480906 - RNA, 32 nt, Human
guucacuguggugggaaagaucacacuacaug

SEQ ID NO: 480907 - RNA, 32 nt, Human
guucacuguuccucugucauacuguaucugga

SEQ ID NO: 480908 - RNA, 32 nt, Human
guucacuucaaccccuaccuccugggcucaag

SEQ ID NO: 480909 - RNA, 32 nt, Human
guucacuugagcugccaagaucccaaguagau

SEQ ID NO: 480910 - RNA, 32 nt, Human
guucacuuugccuccugcugcuucugugcccu

SEQ ID NO: 480911 - RNA, 32 nt, Human
guucacuuugggcccacagacccaagagcuaa

SEQ ID NO: 480912 - RNA, 32 nt, Human
guucacuuugguuccagcauccuguccagcaa

SEQ ID NO: 480913 - RNA, 32 nt, Human
guucagaaaagcaccucuugaagaacugacuu

SEQ ID NO: 480914 - RNA, 32 nt, Human
guucagaaaccucaaagagaaauguuuucuaa

SEQ ID NO: 480915 - RNA, 32 nt, Human
guucagaaaccucaaagagaaauguuuuguaa

SEQ ID NO: 480916 - RNA, 32 nt, Human
guucagaaacuagacauuccauugaacuaaga

SEQ ID NO: 480917 - RNA, 32 nt, Human
guucagaaacuccaccaauuuuagggugaccg

SEQ ID NO: 480918 - RNA, 32 nt, Human
guucagaaccagccuggacaacauagugagac

SEQ ID NO: 480919 - RNA, 32 nt, Human
guucagaagucauuuccucuucaagauuccau

SEQ ID NO: 480920 - RNA, 32 nt, Human
guucagaaucuccagagcagagcccaggaauc

SEQ ID NO: 480921 - RNA, 32 nt, Human
guucagaauggcaguccuggaggcagggggug

SEQ ID NO: 480922 - RNA, 32 nt, Human
guucagaauggucauccauccaucguugcauc

SEQ ID NO: 480923 - RNA, 32 nt, Human
guucagaauuucaugcuggaaggaaaguuaga

SEQ ID NO: 480924 - RNA, 32 nt, Human
guucagacauuccauggugauuccugggaagg

SEQ ID NO: 480925 - RNA, 32 nt, Human
guucagacccuccauggagaaguuugggauga

SEQ ID NO: 480926 - RNA, 32 nt, Human
guucagacucaccuauguggcaccuuaaacuu

SEQ ID NO: 480927 - RNA, 32 nt, Human
guucagacuccugguuucuuccaggcuuacag

SEQ ID NO: 480928 - RNA, 21 nt, Human
guucagacuggagugcagugg

SEQ ID NO: 480929 - RNA, 32 nt, Human
guucagagauccaggccucccaccucagacuc

SEQ ID NO: 480930 - RNA, 32 nt, Human
guucagagcagccuggccaccauagugagauc

SEQ ID NO: 480931 - RNA, 32 nt, Human
guucagagcccagcucugccacugucagccau

SEQ ID NO: 480932 - RNA, 32 nt, Human
guucagagcccccguuccccaggguccugugg

SEQ ID NO: 480933 - RNA, 32 nt, Human
guucagagccugggucucagcgcgggacccgu

SEQ ID NO: 480934 - RNA, 32 nt, Human
guucagaggaagaggaaguguagccggcggac

SEQ ID NO: 480935 - RNA, 32 nt, Human
guucagaggaaggguguccccuguccucuuga

SEQ ID NO: 480936 - RNA, 32 nt, Human
guucagagucacccaucucagcaagcccagaa

SEQ ID NO: 480937 - RNA, 32 nt, Human
guucagaguggcagaggagaaagaaaauccca

SEQ ID NO: 480938 - RNA, 32 nt, Human
guucagauccacggccuccacccgggacgccu

SEQ ID NO: 480939 - RNA, 32 nt, Human
guucagauuuacuuugaaagaaucaaguaugu

SEQ ID NO: 480940 - RNA, 32 nt, Human
guucagcaacucccuggcaucugugaugaccu

SEQ ID NO: 480941 - RNA, 32 nt, Human
guucagcaacuguuuaaccuguuuucagucuu

SEQ ID NO: 480942 - RNA, 32 nt, Human
guucagcaacuugcccaacaucacacagcaac

SEQ ID NO: 480943 - RNA, 32 nt, Human
guucagcaaggcgagaagcagcuuuuugagaa

SEQ ID NO: 480944 - RNA, 31 nt, Human
guucagcaaguggagacuggcauucagauuc

SEQ ID NO: 480945 - RNA, 32 nt, Human
guucagcaaugucaauggcaucaggagggcgc

SEQ ID NO: 480946 - RNA, 32 nt, Human
guucagcacccaggcugugguacuucaacuuc

SEQ ID NO: 480947 - RNA, 32 nt, Human
guucagcaccucccaucccauggauacagugg

SEQ ID NO: 480948 - RNA, 32 nt, Human
guucagcacuugaaggaaggaucucgaaacau

SEQ ID NO: 480949 - RNA, 32 nt, Human
guucagcagaaaggaggaauccuggcccucag

SEQ ID NO: 480950 - RNA, 32 nt, Human
guucagcagaccaccaguaccagacucagaau

SEQ ID NO: 480951 - RNA, 32 nt, Human
guucagcagcggguuuggaacauagcgaaucc

SEQ ID NO: 480952 - RNA, 32 nt, Human
guucagcaguucuuccccuccuacaccuaagu

SEQ ID NO: 480953 - RNA, 32 nt, Human
guucagcaucaucuugguuauauacugaaaau

SEQ ID NO: 480954 - RNA, 32 nt, Human
guucagccauuuuguucagaacgaucauccag

SEQ ID NO: 480955 - RNA, 32 nt, Human
guucagcccaggaggaagccagcugcaaugug

SEQ ID NO: 480956 - RNA, 32 nt, Human
guucagccggugcaggcuccucccucccucuc

SEQ ID NO: 480957 - RNA, 23 nt, Human
guucagccucccuccccaccuca

SEQ ID NO: 480958 - RNA, 32 nt, Human
guucagccucuucgcugaccucgacccacucu

SEQ ID NO: 480959 - RNA, 32 nt, Human
guucagcgcacuccugaccucuucuagaccua

SEQ ID NO: 480960 - RNA, 17 nt, Human
guucagcggggcagcuu

SEQ ID NO: 480961 - RNA, 32 nt, Human
guucagcuagaagucauaccacccucaggaau

SEQ ID NO: 480962 - RNA, 32 nt, Human
guucagcucuucauucuucaaggccugaccuu

SEQ ID NO: 480963 - RNA, 32 nt, Human
guucagcugcugucacagucucauuuguucuu

SEQ ID NO: 480964 - RNA, 32 nt, Human
guucagcuggacucugccaucugugggcccag

SEQ ID NO: 480965 - RNA, 32 nt, Human
guucagcugguaccagaguagaaacaaggugc

SEQ ID NO: 480966 - RNA, 32 nt, Human
guucagcuguccucccuccaccuaccacucac

SEQ ID NO: 480967 - RNA, 32 nt, Human
guucagcuuccuccaccucgcuuccacugcac

SEQ ID NO: 480968 - RNA, 32 nt, Human
guucagcuuuucucccccacgccuugcucccu

SEQ ID NO: 480969 - RNA, 32 nt, Human
guucaggaaaacugggcuguugcucuggaauu

SEQ ID NO: 480970 - RNA, 32 nt, Human
guucaggaagggagacaggggcacagagagac

SEQ ID NO: 480971 - RNA, 32 nt, Human
guucaggaagucaguccucacagaucaaggua

SEQ ID NO: 480972 - RNA, 32 nt, Human
guucaggaccagccugaccaacauggugaaac

SEQ ID NO: 480973 - RNA, 32 nt, Human
guucaggaccagccuggccagcauggugaaac

SEQ ID NO: 480974 - RNA, 32 nt, Human
guucaggacugcugacuaaacacuuucaagca

SEQ ID NO: 480975 - RNA, 32 nt, Human
guucaggagcaugacuccagugcugggcucuu

SEQ ID NO: 480976 - RNA, 32 nt, Human
guucaggaggaggacuccaucucauucagaaa

SEQ ID NO: 480977 - RNA, 32 nt, Human
guucaggaguuuaagaccagccuggacaacau

SEQ ID NO: 480978 - RNA, 32 nt, Human
guucaggcaauucuccugccucagcuucccga

SEQ ID NO: 480979 - RNA, 32 nt, Human
guucaggcaggugacguguggaaagucuaggg

SEQ ID NO: 480980 - RNA, 32 nt, Human
guucaggcaucacagguuacuagaauacacau

SEQ ID NO: 480981 - RNA, 32 nt, Human
guucaggcauucucucaguguuuagggugaug

SEQ ID NO: 480982 - RNA, 32 nt, Human
guucaggccgccucccccuccucugccugggg

SEQ ID NO: 480983 - RNA, 32 nt, Human
guucaggccggcucccccuuccuggucucccu

SEQ ID NO: 480984 - RNA, 32 nt, Human
guucaggccucagcgcgugagccacacugucu

SEQ ID NO: 480985 - RNA, 32 nt, Human
guucaggccuguaauuccagcacuuugggagg

SEQ ID NO: 480986 - RNA, 23 nt, Human
guucaggcgauucuccugccuca

SEQ ID NO: 480987 - RNA, 32 nt, Human
guucaggcgauucuccugccucagcuucccga

SEQ ID NO: 480988 - RNA, 32 nt, Human
guucaggcuaggguuucaucaugggacaacag

SEQ ID NO: 480989 - RNA, 32 nt, Human
guucaggcucccaggaaaggcaacuuucaacu

SEQ ID NO: 480990 - RNA, 32 nt, Human
guucaggcuggguggagcagugggaacauaga

SEQ ID NO: 480991 - RNA, 32 nt, Human
guucaggcugucucaucccuugccaggagcuc

SEQ ID NO: 480992 - RNA, 32 nt, Human
guucaggcuucagccgaccaccucucgaccug

SEQ ID NO: 480993 - RNA, 32 nt, Human
guucaggcuugagcuggguggggugaggggug

SEQ ID NO: 480994 - RNA, 25 nt, Human
guucagggaaggaggggaaaaggga

SEQ ID NO: 480995 - RNA, 32 nt, Human
guucagggagcuagaagacacuuuaaguuaua

SEQ ID NO: 480996 - RNA, 18 nt, Human
guucagggaggggccaga

SEQ ID NO: 480997 - RNA, 21 nt, Human
guucagggauuacaggcauga

SEQ ID NO: 480998 - RNA, 32 nt, Human
guucagggcaaaaacugccuaacuuccauggc

SEQ ID NO: 480999 - RNA, 32 nt, Human
guucagggccagcuuugauaauggagcgagau

SEQ ID NO: 481000 - RNA, 32 nt, Human
guucagggcuacucguggguggacugaguccc

SEQ ID NO: 481001 - RNA, 23 nt, Human
guucaggggacagaugcaagcug

SEQ ID NO: 481002 - RNA, 20 nt, Human
guucaggggcacaugugcuc

SEQ ID NO: 481003 - RNA, 32 nt, Human
guucaggguggaggcacagaugagcagagugg

SEQ ID NO: 481004 - RNA, 32 nt, Human
guucagguaacaggcagauacaggaaaagcug

SEQ ID NO: 481005 - RNA, 32 nt, Human
guucagguauucuuugagacacacaguaucau

SEQ ID NO: 481006 - RNA, 32 nt, Human
guucaggucucagcaggugucagaggugauua

SEQ ID NO: 481007 - RNA, 32 nt, Human
guucaggugcagcucuuaaacacauugccuua

SEQ ID NO: 481008 - RNA, 32 nt, Human
guucaggugcagcugguccuccauuacccacu

SEQ ID NO: 481009 - RNA, 32 nt, Human
guucaggugcaggagcuagaugcguggacgcc

SEQ ID NO: 481010 - RNA, 32 nt, Human
guucaggugcccuggagggaaggggaagccug

SEQ ID NO: 481011 - RNA, 32 nt, Human
guucagguucuggcaggggcccagggauccag

SEQ ID NO: 481012 - RNA, 32 nt, Human
guucagguuuugcccaagagucagcucauuug

SEQ ID NO: 481013 - RNA, 32 nt, Human
guucaguaacacacccucccugcuccaagugc

SEQ ID NO: 481014 - RNA, 32 nt, Human
guucaguagaggccccgguuucccaguuguug

SEQ ID NO: 481015 - RNA, 32 nt, Human
guucaguauuuggaguucaacacugucucuca

SEQ ID NO: 481016 - RNA, 32 nt, Human
guucagucacuaccuuagagccuguuuuauuu

SEQ ID NO: 481017 - RNA, 32 nt, Human
guucagucaucugcuuucuguuucuggaugug

SEQ ID NO: 481018 - RNA, 32 nt, Human
guucagucauuuucuuuauuggugacuccucu

SEQ ID NO: 481019 - RNA, 32 nt, Human
guucaguccuggcuggaggagccacagccugu

SEQ ID NO: 481020 - RNA, 32 nt, Human
guucagucuuccagauuaugccucacaugcua

SEQ ID NO: 481021 - RNA, 32 nt, Human
guucagugcaaucuccgccuccuggguucaaa

SEQ ID NO: 481022 - RNA, 32 nt, Human
guucagugggcaagucuagggcagcagaguug

SEQ ID NO: 481023 - RNA, 32 nt, Human
guucagugucccaggcagcacagugugugaac

SEQ ID NO: 481024 - RNA, 32 nt, Human
guucaguguggcuggggaggccucaggaaacu

SEQ ID NO: 481025 - RNA, 32 nt, Human
guucaguucguuuggcaggcacacacaguggc

SEQ ID NO: 481026 - RNA, 23 nt, Human
guucaguuuuggugucugcuuca

SEQ ID NO: 481027 - RNA, 18 nt, Human
guucauacuccugcuuca

SEQ ID NO: 481028 - RNA, 32 nt, Human
guucauacuggagaaaggacuuaugagugcug

SEQ ID NO: 481029 - RNA, 32 nt, Human
guucauagaggcagaggguggggaagggcugg

SEQ ID NO: 481030 - RNA, 32 nt, Human
guucauaguccacaguugaugcagcauccuga

SEQ ID NO: 481031 - RNA, 32 nt, Human
guucauaucuguaauccuaacacuuugacagg

SEQ ID NO: 481032 - RNA, 23 nt, Human
guucauaucuguguugcugacua

SEQ ID NO: 481033 - RNA, 32 nt, Human
guucauauuuugcuuugagccagcuuuuuagu

SEQ ID NO: 481034 - RNA, 32 nt, Human
guucaucaacaaacuaaaggggaugccagaaa

SEQ ID NO: 481035 - RNA, 32 nt, Human
guucaucaagggugaagcauggucaaauguca

SEQ ID NO: 481036 - RNA, 32 nt, Human
guucaucacaaaaaucaguaagcacaauaaag

SEQ ID NO: 481037 - RNA, 32 nt, Human
guucaucacacguggguuggacaugcuaacag

SEQ ID NO: 481038 - RNA, 32 nt, Human
guucaucaccccaguaaaagugucaucaccca

SEQ ID NO: 481039 - RNA, 32 nt, Human
guucaucagacuccugugcaacuuucccaaug

SEQ ID NO: 481040 - RNA, 32 nt, Human
guucaucagagcagugugugaaauuccaugug

SEQ ID NO: 481041 - RNA, 32 nt, Human
guucaucaugauagaucugcuguuuccuuaua

SEQ ID NO: 481042 - RNA, 32 nt, Human
guucaucccagccauuccccugcuucuagaug

SEQ ID NO: 481043 - RNA, 32 nt, Human
guucaucccuugaccaccucuggaccacuaac

SEQ ID NO: 481044 - RNA, 32 nt, Human
guucaucgaacugcacugccugcccagaacgc

SEQ ID NO: 481045 - RNA, 32 nt, Human
guucaucggucugccuugauucagcaucagaa

SEQ ID NO: 481046 - RNA, 32 nt, Human
guucaucuagaaaucucaaagccaugucucag

SEQ ID NO: 481047 - RNA, 32 nt, Human
guucaucuaggaaacuguccugggaaccaaac

SEQ ID NO: 481048 - RNA, 32 nt, Human
guucaucugcagcuguugcaagguguucagau

SEQ ID NO: 481049 - RNA, 21 nt, Human
guucaucuuuaaauucuuucc

SEQ ID NO: 481050 - RNA, 32 nt, Human
guucaucuuuuccuugcucaagugugggcuau

SEQ ID NO: 481051 - RNA, 32 nt, Human
guucaugacacugcacuccagccugggugaua

SEQ ID NO: 481052 - RNA, 32 nt, Human
guucaugacuccuggccuugggaugcccaagg

SEQ ID NO: 481053 - RNA, 32 nt, Human
guucaugagaugcauucucuucugucuuuggu

SEQ ID NO: 481054 - RNA, 32 nt, Human
guucaugaggucagagggagcuagccuggcac

SEQ ID NO: 481055 - RNA, 32 nt, Human
guucaugagugaaggagcuccuggagucauga

SEQ ID NO: 481056 - RNA, 32 nt, Human
guucaugcaaccuccgccuccuggguucaagc

SEQ ID NO: 481057 - RNA, 32 nt, Human
guucaugcaauugcacuccagccugggcaaca

SEQ ID NO: 481058 - RNA, 32 nt, Human
guucaugcaggguccuuggcaggccugagggc

SEQ ID NO: 481059 - RNA, 32 nt, Human
guucaugccacugcacuuccagccugggugac

SEQ ID NO: 481060 - RNA, 32 nt, Human
guucaugccaguaaucccagcacuuucggagg

SEQ ID NO: 481061 - RNA, 21 nt, Human
guucaugccauucuccugccu

SEQ ID NO: 481062 - RNA, 23 nt, Human
guucaugccauucuccugccuca

SEQ ID NO: 481063 - RNA, 21 nt, Human
guucaugccauucuccugucu

SEQ ID NO: 481064 - RNA, 23 nt, Human
guucaugccauucuccugucuca

SEQ ID NO: 481065 - RNA, 32 nt, Human
guucaugcccuaacccucagaaccuauaaaua

SEQ ID NO: 481066 - RNA, 32 nt, Human
guucaugcccugccaaggcauuguucgacucc

SEQ ID NO: 481067 - RNA, 32 nt, Human
guucaugcccuguaauccuagaacuuugggag

SEQ ID NO: 481068 - RNA, 32 nt, Human
guucaugcccuguaauccuagcacuuugggag

SEQ ID NO: 481069 - RNA, 32 nt, Human
guucaugccuauaaucccagcacuuugggaga

SEQ ID NO: 481070 - RNA, 32 nt, Human
guucaugccuauacgauaaacaugauacauaa

SEQ ID NO: 481071 - RNA, 32 nt, Human
guucaugccuaucaucccagcacuuugggagg

SEQ ID NO: 481072 - RNA, 32 nt, Human
guucaugccuggaaucccagcacuuugggagg

SEQ ID NO: 481073 - RNA, 32 nt, Human
guucaugccuggaauccuagcacuuugggagg

SEQ ID NO: 481074 - RNA, 32 nt, Human
guucaugccuguaauaccagcguuuugggagg

SEQ ID NO: 481075 - RNA, 32 nt, Human
guucaugccuguaauccagcacuuugggaggc

SEQ ID NO: 481076 - RNA, 19 nt, Human
guucaugccuguaauccca

SEQ ID NO: 481077 - RNA, 32 nt, Human
guucaugccuguaaucccaacauuuugggagg

SEQ ID NO: 481078 - RNA, 32 nt, Human
guucaugccuguaaucccaaugcuuugggagg

SEQ ID NO: 481079 - RNA, 32 nt, Human
guucaugccuguaaucccagaacuucgggagg

SEQ ID NO: 481080 - RNA, 32 nt, Human
guucaugccuguaaucccagcacuaugggagg

SEQ ID NO: 481081 - RNA, 32 nt, Human
guucaugccuguaaucccagcacuucacuuug

SEQ ID NO: 481082 - RNA, 32 nt, Human
guucaugccuguaaucccagcacuugggaggc

SEQ ID NO: 481083 - RNA, 32 nt, Human
guucaugccuguaaucccagcacuuuggaagg

SEQ ID NO: 481084 - RNA, 32 nt, Human
guucaugccuguaaucccagcacuuugggagg

SEQ ID NO: 481085 - RNA, 32 nt, Human
guucaugccuguaaucccaguacuuuggaaag

SEQ ID NO: 481086 - RNA, 32 nt, Human
guucaugccuguaaucccaguacuuugggagg

SEQ ID NO: 481087 - RNA, 32 nt, Human
guucaugccuguagcucucuuccuuuuguuuc

SEQ ID NO: 481088 - RNA, 32 nt, Human
guucaugccuuaaucccagcacuuugggaggc

SEQ ID NO: 481089 - RNA, 32 nt, Human
guucaugccuucuguuuugcucuugucccugg

SEQ ID NO: 481090 - RNA, 32 nt, Human
guucaugcucaauauugugaaaagcuuuuaaa

SEQ ID NO: 481091 - RNA, 32 nt, Human
guucaugcucugagccucugccaagcugagua

SEQ ID NO: 481092 - RNA, 32 nt, Human
guucaugcuguaaucccaucacuuugggaggc

SEQ ID NO: 481093 - RNA, 32 nt, Human
guucauggacuuuuauuccugugucuuggcug

SEQ ID NO: 481094 - RNA, 19 nt, Human
guucauggauauccacuga

SEQ ID NO: 481095 - RNA, 32 nt, Human
guucaugggaggcggaggugacuggcuggcug

SEQ ID NO: 481096 - RNA, 32 nt, Human
guucaugggugagggauaaaaugaggcuccaa

SEQ ID NO: 481097 - RNA, 32 nt, Human
guucauguccuaggaagucagcuuuugcccca

SEQ ID NO: 481098 - RNA, 32 nt, Human
guucauguccucugcucauuguuuucaaaugg

SEQ ID NO: 481099 - RNA, 32 nt, Human
guucaugucuguaaucccagcacuuugugagg

SEQ ID NO: 481100 - RNA, 32 nt, Human
guucauguggacacacaaaggcaaacagaucu

SEQ ID NO: 481101 - RNA, 32 nt, Human
guucauguggcaccugccugccauguccacaa

SEQ ID NO: 481102 - RNA, 32 nt, Human
guucauguucuaggucuguacuguccaguaca

SEQ ID NO: 481103 - RNA, 32 nt, Human
guucauguucuagugaacacagcuuguucagg

SEQ ID NO: 481104 - RNA, 32 nt, Human
guucauucaaggagaguugagauacagugaaa

SEQ ID NO: 481105 - RNA, 32 nt, Human
guucauucauuuccuccauaaacaccaacuuc

SEQ ID NO: 481106 - RNA, 32 nt, Human
guucauucauuucucuucaccauguauccugc

SEQ ID NO: 481107 - RNA, 32 nt, Human
guucauucauuuucucuguuuugacucuuuua

SEQ ID NO: 481108 - RNA, 32 nt, Human
guucauuccauggcugggagucacugaugcug

SEQ ID NO: 481109 - RNA, 32 nt, Human
guucauucggcacagaccccugccucauucag

SEQ ID NO: 481110 - RNA, 32 nt, Human
guucauucucagugguggaugaugagcagguc

SEQ ID NO: 481111 - RNA, 32 nt, Human
guucauucucguaaccuccauauuuucaggau

SEQ ID NO: 481112 - RNA, 32 nt, Human
guucauucuguuuccaaaggcucuacuuucaa

SEQ ID NO: 481113 - RNA, 32 nt, Human
guucauugacaccuuuaagcuggugcacaggg

SEQ ID NO: 481114 - RNA, 32 nt, Human
guucauugagauguggagauugcuuggcagag

SEQ ID NO: 481115 - RNA, 32 nt, Human
guucauugcagcgcuauucacacuagcaaaga

SEQ ID NO: 481116 - RNA, 32 nt, Human
guucauuuauuuuucuucauugcaguggauug

SEQ ID NO: 481117 - RNA, 32 nt, Human
guucauuucaaaagcuaagaacuguccggcag

SEQ ID NO: 481118 - RNA, 32 nt, Human
guucauuucagccucagguccaagccauguuc

SEQ ID NO: 481119 - RNA, 32 nt, Human
guucauuucagccucuggauggcuggcugccu

SEQ ID NO: 481120 - RNA, 32 nt, Human
guucauuucaggagcuucuccuucccacagac

SEQ ID NO: 481121 - RNA, 17 nt, Human
guucauuugccauucga

SEQ ID NO: 481122 - RNA, 32 nt, Human
guucauuuggagcaucuugaaaagcuggagcu

SEQ ID NO: 481123 - RNA, 32 nt, Human
guucauuugucaggagaacugugagaaauaaa

SEQ ID NO: 481124 - RNA, 32 nt, Human
guucauuugucucucugucucagcuuccuccc

SEQ ID NO: 481125 - RNA, 21 nt, Human
guuccaaacacucggccugug

SEQ ID NO: 481126 - RNA, 32 nt, Human
guuccaaagaggaagccaaaggggaagaaaca

SEQ ID NO: 481127 - RNA, 32 nt, Human
guuccaaagugcugauauuacaggcauaauau

SEQ ID NO: 481128 - RNA, 32 nt, Human
guuccaacucacugugcgucuccuccacacag

SEQ ID NO: 481129 - RNA, 32 nt, Human
guuccaacuguacauacauacuguaugaagcu

SEQ ID NO: 481130 - RNA, 32 nt, Human
guuccaagaaggauuucucugaacaaccaguc

SEQ ID NO: 481131 - RNA, 32 nt, Human
guuccaagagccuuuuagugauuaaaauagaa

SEQ ID NO: 481132 - RNA, 32 nt, Human
guuccaaggcccgcgcugggaaaaaggugggg

SEQ ID NO: 481133 - RNA, 32 nt, Human
guuccaagggccugagucaaugugucuguggg

SEQ ID NO: 481134 - RNA, 24 nt, Human
guuccaaguacucacaggggcucu

SEQ ID NO: 481135 - RNA, 32 nt, Human
guuccaaguagcugggauuacagacgccugcc

SEQ ID NO: 481136 - RNA, 32 nt, Human
guuccaagucucuccuuuccuggcaggucuua

SEQ ID NO: 481137 - RNA, 32 nt, Human
guuccaauggcugacagaaacugccuauuuga

SEQ ID NO: 481138 - RNA, 32 nt, Human
guuccacaacaaccugugaaauagcugugagc

SEQ ID NO: 481139 - RNA, 32 nt, Human
guuccacacacacuccaaagccgauuucaaau

SEQ ID NO: 481140 - RNA, 32 nt, Human
guuccacacagccccggccuuucgcggugaca

SEQ ID NO: 481141 - RNA, 32 nt, Human
guuccacacccagcaggcgcaaccagagucuc

SEQ ID NO: 481142 - RNA, 32 nt, Human
guuccacacuucacguggacugagguagaccc

SEQ ID NO: 481143 - RNA, 20 nt, Human
guuccacaggcuguacggga

SEQ ID NO: 481144 - RNA, 32 nt, Human
guuccacaucccuagacugggugagagggccu

SEQ ID NO: 481145 - RNA, 32 nt, Human
guuccacauggcuggggaggccucaaaauagu

SEQ ID NO: 481146 - RNA, 32 nt, Human
guuccacauggcuggggaggccucaaaaucag

SEQ ID NO: 481147 - RNA, 32 nt, Human
guuccacauggcuggggaggccucagaaucau

SEQ ID NO: 481148 - RNA, 32 nt, Human
guuccaccucuacagggcauuuuauggcuuaa

SEQ ID NO: 481149 - RNA, 32 nt, Human
guuccaccuucccaucacucaaauccuuuuau

SEQ ID NO: 481150 - RNA, 32 nt, Human
guuccacggaggaggggagcugagagguucga

SEQ ID NO: 481151 - RNA, 32 nt, Human
guuccacuagcuacaggugagcauuuuaccca

SEQ ID NO: 481152 - RNA, 32 nt, Human
guuccacucuggccugggccugaggccagcgc

SEQ ID NO: 481153 - RNA, 32 nt, Human
guuccacugauuaaaaacuuucucuuccacgg

SEQ ID NO: 481154 - RNA, 32 nt, Human
guuccacugcacuccagccuggguuacagagg

SEQ ID NO: 481155 - RNA, 32 nt, Human
guuccacuggucucaaaagucaccugccuaca

SEQ ID NO: 481156 - RNA, 32 nt, Human
guuccacuucaugugguuuugcuucaucuucu

SEQ ID NO: 481157 - RNA, 32 nt, Human
guuccacuugcacacacgcacacacucaugcu

SEQ ID NO: 481158 - RNA, 32 nt, Human
guuccacuuugccucccccaaucacugcggcg

SEQ ID NO: 481159 - RNA, 32 nt, Human
guuccagaaaauuauguugucuuccucuaaua

SEQ ID NO: 481160 - RNA, 24 nt, Human
guuccagaaaggccuccagcugag

SEQ ID NO: 481161 - RNA, 32 nt, Human
guuccagaaaucccaacucucacacccagccc

SEQ ID NO: 481162 - RNA, 32 nt, Human
guuccagaacagguaccacagcuuugguuuua

SEQ ID NO: 481163 - RNA, 32 nt, Human
guuccagaaggggagaagcauagagggccugu

SEQ ID NO: 481164 - RNA, 32 nt, Human
guuccagaauuacuggagucuccugaugcuga

SEQ ID NO: 481165 - RNA, 32 nt, Human
guuccagaccagccuggccaacauagugaaac

SEQ ID NO: 481166 - RNA, 32 nt, Human
guuccagaccagccuggccaacauggugaaac

SEQ ID NO: 481167 - RNA, 32 nt, Human
guuccagaccagccuggccaucauggugaaau

SEQ ID NO: 481168 - RNA, 32 nt, Human
guuccagaccagccuggcuaauauggugaaac

SEQ ID NO: 481169 - RNA, 32 nt, Human
guuccagaccagccugggcaacauagugagac

SEQ ID NO: 481170 - RNA, 32 nt, Human
guuccagaccagccugggcaacauagugagau

SEQ ID NO: 481171 - RNA, 32 nt, Human
guuccagaccagccugggcaacaugcgagacc

SEQ ID NO: 481172 - RNA, 32 nt, Human
guuccagaccagccugggcaauacagcgagaa

SEQ ID NO: 481173 - RNA, 32 nt, Human
guuccagaccagccuggucaacauggugaaac

SEQ ID NO: 481174 - RNA, 32 nt, Human
guuccagagagggacagcagguacagaggccc

SEQ ID NO: 481175 - RNA, 32 nt, Human
guuccagagguaaaccaggucucagggaagag

SEQ ID NO: 481176 - RNA, 32 nt, Human
guuccagaucagccuggccaacauggugaaac

SEQ ID NO: 481177 - RNA, 32 nt, Human
guuccagauguggcaaaaucuggcaaaggcag

SEQ ID NO: 481178 - RNA, 32 nt, Human
guuccagcaaaucaagcugagcuuugaaaaag

SEQ ID NO: 481179 - RNA, 32 nt, Human
guuccagcagaacuggacuaauucuguggacc

SEQ ID NO: 481180 - RNA, 32 nt, Human
guuccagcagguagcugagcugagaggacaua

SEQ ID NO: 481181 - RNA, 32 nt, Human
guuccagcagguccuccggcucccagagguga

SEQ ID NO: 481182 - RNA, 32 nt, Human
guuccagccacugguugccuugcaggaaugca

SEQ ID NO: 481183 - RNA, 32 nt, Human
guuccagcccuuuaagauguugcgcgugguga

SEQ ID NO: 481184 - RNA, 23 nt, Human
guuccagcuacucaagaggccga

SEQ ID NO: 481185 - RNA, 23 nt, Human
guuccagcuacucaagaggcuga

SEQ ID NO: 481186 - RNA, 21 nt, Human
guuccagcuacucaggaggcu

SEQ ID NO: 481187 - RNA, 23 nt, Human
guuccagcuacucaggaggcuga

SEQ ID NO: 481188 - RNA, 23 nt, Human
guuccagcuacucgggaggcuga

SEQ ID NO: 481189 - RNA, 32 nt, Human
guuccagcugagcugccuucuggcuauucccu

SEQ ID NO: 481190 - RNA, 31 nt, Human
guuccagcugcucgggagguugagggagaag

SEQ ID NO: 481191 - RNA, 32 nt, Human
guuccagcuguucacaaccagugugugauuuu

SEQ ID NO: 481192 - RNA, 32 nt, Human
guuccaggaacucaggaucugcagugaggacc

SEQ ID NO: 481193 - RNA, 32 nt, Human
guuccaggauuacuucaugcuguccagguccu

SEQ ID NO: 481194 - RNA, 32 nt, Human
guuccaggcccagguagcuucccaucaccaac

SEQ ID NO: 481195 - RNA, 32 nt, Human
guuccaggccucggccuuccugcuccacgugc

SEQ ID NO: 481196 - RNA, 32 nt, Human
guuccaggccuuucaccugcucugccuugaaa

SEQ ID NO: 481197 - RNA, 17 nt, Human
guuccagggaaaguguc

SEQ ID NO: 481198 - RNA, 32 nt, Human
guuccagggaccccucugucacaaggccaggc

SEQ ID NO: 481199 - RNA, 32 nt, Human
guuccagggagccaaagggggagccagagagc

SEQ ID NO: 481200 - RNA, 32 nt, Human
guuccagggcccaaagcccagcucuuuguuca

SEQ ID NO: 481201 - RNA, 32 nt, Human
guuccagggcccagugcuggaggacugggaaa

SEQ ID NO: 481202 - RNA, 32 nt, Human
guuccagggcucugggcacacagcugugcuca

SEQ ID NO: 481203 - RNA, 32 nt, Human
guuccagguagugagagaagaaacucgaccug

SEQ ID NO: 481204 - RNA, 32 nt, Human
guuccagguauucugcauccucaccaacacuu

SEQ ID NO: 481205 - RNA, 32 nt, Human
guuccaggucacugcaucugucucuccaccau

SEQ ID NO: 481206 - RNA, 32 nt, Human
guuccaggugcccuggcuggagucaguccuca

SEQ ID NO: 481207 - RNA, 32 nt, Human
guuccagguuuuacuggcugcaccacaccccu

SEQ ID NO: 481208 - RNA, 32 nt, Human
guuccaguagacucaucacugcagccucagca

SEQ ID NO: 481209 - RNA, 32 nt, Human
guuccaguaugaaaguugggggagagcaccag

SEQ ID NO: 481210 - RNA, 23 nt, Human
guuccagugauucuccugccuca

SEQ ID NO: 481211 - RNA, 32 nt, Human
guuccagugcacacuucccaugcuucugaguc

SEQ ID NO: 481212 - RNA, 32 nt, Human
guuccaguucccaacaaguuccucaucuccau

SEQ ID NO: 481213 - RNA, 32 nt, Human
guuccauaaacaaaacauacauagugggaacu

SEQ ID NO: 481214 - RNA, 32 nt, Human
guuccauaucccuuucucucuuguccaauggg

SEQ ID NO: 481215 - RNA, 21 nt, Human
guuccauauucugguauugug

SEQ ID NO: 481216 - RNA, 32 nt, Human
guuccauccuaccugccugaccugcccagcau

SEQ ID NO: 481217 - RNA, 32 nt, Human
guuccaucucugucuccagccugcccacuucc

SEQ ID NO: 481218 - RNA, 32 nt, Human
guuccaucuugcccauuuccugggcuuauauc

SEQ ID NO: 481219 - RNA, 32 nt, Human
guuccaugaaaccucucaaguacacaauugua

SEQ ID NO: 481220 - RNA, 32 nt, Human
guuccaugaaaguuacccaggguccucauguc

SEQ ID NO: 481221 - RNA, 26 nt, Human
guuccaugccucucuccuuggcuugu

SEQ ID NO: 481222 - RNA, 32 nt, Human
guuccauucagucugcagcuauucacacacac

SEQ ID NO: 481223 - RNA, 32 nt, Human
guuccauucuaaccuaggaugaucucauuugg

SEQ ID NO: 481224 - RNA, 32 nt, Human
guuccauugcuccccgcugccaugcucucucc

SEQ ID NO: 481225 - RNA, 32 nt, Human
guuccauuggucuacaugacugucuuuguuuc

SEQ ID NO: 481226 - RNA, 32 nt, Human
guuccauugugccauucagguuugcugucaca

SEQ ID NO: 481227 - RNA, 32 nt, Human
guuccauuuaugcugguuaagagaucccuuaa

SEQ ID NO: 481228 - RNA, 32 nt, Human
guuccauuuccauuuucccuguucucaaggga

SEQ ID NO: 481229 - RNA, 32 nt, Human
guuccauuuucccccagcaccguguggcaccu

SEQ ID NO: 481230 - RNA, 32 nt, Human
guuccauuuuugaaugaacuaguuuaaugugg

SEQ ID NO: 481231 - RNA, 32 nt, Human
guucccaaacacaggaagugauuuucugccug

SEQ ID NO: 481232 - RNA, 32 nt, Human
guucccaaccauacuucuucugacccuuuacc

SEQ ID NO: 481233 - RNA, 32 nt, Human
guucccaaccuacaggccauggacagguccau

SEQ ID NO: 481234 - RNA, 32 nt, Human
guucccaagcucagaggcgcacugugaccccc

SEQ ID NO: 481235 - RNA, 32 nt, Human
guucccacagaacuuuggcacauucugaagaa

SEQ ID NO: 481236 - RNA, 32 nt, Human
guucccacccaccaguuccucuaagcacauac

SEQ ID NO: 481237 - RNA, 32 nt, Human
guucccaccucucuccaccacauacuuacagg

SEQ ID NO: 481238 - RNA, 32 nt, Human
guucccacuauguugaucaggcuggucucaaa

SEQ ID NO: 481239 - RNA, 32 nt, Human
guucccacucacuggaaucuccagccuuccag

SEQ ID NO: 481240 - RNA, 20 nt, Human
guucccacuccuucaggaca

SEQ ID NO: 481241 - RNA, 32 nt, Human
guucccagacacacaaccccucuagcucucgg

SEQ ID NO: 481242 - RNA, 32 nt, Human
guucccagacacccuacccacacacaugccuu

SEQ ID NO: 481243 - RNA, 32 nt, Human
guucccagacaggucccugaguacugacgguc

SEQ ID NO: 481244 - RNA, 32 nt, Human
guucccagacccaggaaguauaagucauugac

SEQ ID NO: 481245 - RNA, 32 nt, Human
guucccagacccuucccaagauggaaccaaua

SEQ ID NO: 481246 - RNA, 32 nt, Human
guucccagaggcaggcggagguugaagaaagg

SEQ ID NO: 481247 - RNA, 32 nt, Human
guucccagauacaaagaauugugcuuuuaauu

SEQ ID NO: 481248 - RNA, 32 nt, Human
guucccagcacacccacuugcucacuggggcc

SEQ ID NO: 481249 - RNA, 32 nt, Human
guucccagcacuaggugagauuugaaagauga

SEQ ID NO: 481250 - RNA, 24 nt, Human
guucccagcagaacagcggagccu

SEQ ID NO: 481251 - RNA, 32 nt, Human
guucccagcagggggagaaacccuucacaccc

SEQ ID NO: 481252 - RNA, 32 nt, Human
guucccagccaagaguaugagaacauccaguc

SEQ ID NO: 481253 - RNA, 32 nt, Human
guucccagccacugcucauguaauguacuccc

SEQ ID NO: 481254 - RNA, 32 nt, Human
guucccagccagacaguuauggggaagcaagg

SEQ ID NO: 481255 - RNA, 32 nt, Human
guucccagccccguucagcugguggcuuuuag

SEQ ID NO: 481256 - RNA, 32 nt, Human
guucccagcccucccucucucuugaccuggau

SEQ ID NO: 481257 - RNA, 32 nt, Human
guucccagccucugcugacagcaccucagcua

SEQ ID NO: 481258 - RNA, 32 nt, Human
guucccagccucuuccaggcacuggcaaugca

SEQ ID NO: 481259 - RNA, 32 nt, Human
guucccagcuacucaggaggcuauggugggag

SEQ ID NO: 481260 - RNA, 32 nt, Human
guucccagcuacucaggaggcugaagcaggag

SEQ ID NO: 481261 - RNA, 32 nt, Human
guucccagcuacuugggaggcuaaggugggaa

SEQ ID NO: 481262 - RNA, 32 nt, Human
guucccaggaagaggaaguaaaucugcaaccc

SEQ ID NO: 481263 - RNA, 32 nt, Human
guucccaggaaggacaaggaucugccuccccc

SEQ ID NO: 481264 - RNA, 31 nt, Human
guucccaggagaccugauucccuguggugau

SEQ ID NO: 481265 - RNA, 32 nt, Human
guucccagggcugggaggacagcucuggcccu

SEQ ID NO: 481266 - RNA, 32 nt, Human
guucccagggcuuugcccucugugucuuagca

SEQ ID NO: 481267 - RNA, 32 nt, Human
guucccaggguggggcagggagguggggguug

SEQ ID NO: 481268 - RNA, 32 nt, Human
guucccaguaggggcggccgggcagaggcgcc

SEQ ID NO: 481269 - RNA, 32 nt, Human
guucccaguguacuugaacaguugcauuuaua

SEQ ID NO: 481270 - RNA, 32 nt, Human
guucccaguguggcugaggccacccagaggca

SEQ ID NO: 481271 - RNA, 32 nt, Human
guucccaucaguuucaggccaggacuggagag

SEQ ID NO: 481272 - RNA, 32 nt, Human
guucccauccaggaauguuaaggugaggugaa

SEQ ID NO: 481273 - RNA, 32 nt, Human
guucccaucccccagcccuggcuccuaggucc

SEQ ID NO: 481274 - RNA, 32 nt, Human
guucccaucucaucugucagccacagucauuu

SEQ ID NO: 481275 - RNA, 32 nt, Human
guucccaucuucucucaccccuuucaucucug

SEQ ID NO: 481276 - RNA, 32 nt, Human
guucccaugcaagcccuggccuuccguucauc

SEQ ID NO: 481277 - RNA, 32 nt, Human
guucccauggaagaaguaaagaagaggucacu

SEQ ID NO: 481278 - RNA, 32 nt, Human
guucccauuaccagaagcaaagcugcugcuaa

SEQ ID NO: 481279 - RNA, 32 nt, Human
guucccauucuucuuugugagacagagagaau

SEQ ID NO: 481280 - RNA, 32 nt, Human
guuccccaaguguccuggaaauuugccuggua

SEQ ID NO: 481281 - RNA, 32 nt, Human
guuccccacccaguucuucauuuggaggaauc

SEQ ID NO: 481282 - RNA, 32 nt, Human
guuccccacgccacuccccacccaagagauug

SEQ ID NO: 481283 - RNA, 32 nt, Human
guuccccacugccagggaaccccacgccaccc

SEQ ID NO: 481284 - RNA, 27 nt, Human
guuccccagaagcugccagugcuuuca

SEQ ID NO: 481285 - RNA, 32 nt, Human
guuccccagcaccccaaauggauuuccaguca

SEQ ID NO: 481286 - RNA, 32 nt, Human
guuccccagcugaacuuuagaggacagauagg

SEQ ID NO: 481287 - RNA, 32 nt, Human
guuccccagcugcagggagacuggagugggac

SEQ ID NO: 481288 - RNA, 32 nt, Human
guuccccaggagacaagggucccugcagagau

SEQ ID NO: 481289 - RNA, 24 nt, Human
guuccccaggccggagugcagugg

SEQ ID NO: 481290 - RNA, 23 nt, Human
guuccccaggcuggagugcaaug

SEQ ID NO: 481291 - RNA, 24 nt, Human
guuccccaggcuggagugcaaugg

SEQ ID NO: 481292 - RNA, 32 nt, Human
guuccccaugcgcacacacauacacacacccc

SEQ ID NO: 481293 - RNA, 32 nt, Human
guuccccauucugccacauucugaccaugaga

SEQ ID NO: 481294 - RNA, 21 nt, Human
guucccccaaaccuguccucu

SEQ ID NO: 481295 - RNA, 32 nt, Human
guucccccagacaagagagggcaagucagcca

SEQ ID NO: 481296 - RNA, 21 nt, Human
guucccccucccucugagaaa

SEQ ID NO: 481297 - RNA, 32 nt, Human
guucccccugccucucuggccucuugucuccc

SEQ ID NO: 481298 - RNA, 32 nt, Human
guucccccugcuccaucccccauugcaugggg

SEQ ID NO: 481299 - RNA, 32 nt, Human
guuccccggagcaggcccugcccuccacaccc

SEQ ID NO: 481300 - RNA, 32 nt, Human
guuccccucagccucugagcugaggccccaca

SEQ ID NO: 481301 - RNA, 32 nt, Human
guuccccuccacugccaaguccucauuuucca

SEQ ID NO: 481302 - RNA, 24 nt, Human
guuccccuccagccuggugcuggg

SEQ ID NO: 481303 - RNA, 32 nt, Human
guuccccuccaggaugcugccggacuggaaga

SEQ ID NO: 481304 - RNA, 20 nt, Human
guuccccuccaggccgcuga

SEQ ID NO: 481305 - RNA, 32 nt, Human
guuccccuccauccacuuugguuuggaagccu

SEQ ID NO: 481306 - RNA, 32 nt, Human
guuccccuccuccagcccagcggcccucuuuc

SEQ ID NO: 481307 - RNA, 32 nt, Human
guuccccugaggugcucuggccuaugcccuga

SEQ ID NO: 481308 - RNA, 32 nt, Human
guuccccugcagcucuucaggaacccacaucu

SEQ ID NO: 481309 - RNA, 32 nt, Human
guuccccugcagcucuucaggaauccacaucu

SEQ ID NO: 481310 - RNA, 32 nt, Human
guuccccugcaguaucuguucugugaaguuug

SEQ ID NO: 481311 - RNA, 32 nt, Human
guuccccugccuccaccuuguuuucuuuucuc

SEQ ID NO: 481312 - RNA, 22 nt, Human
guuccccuggacuccagccaag

SEQ ID NO: 481313 - RNA, 32 nt, Human
guuccccugugggucccucccagcacagggga

SEQ ID NO: 481314 - RNA, 22 nt, Human
guuccccuuauucccgcuaagu

SEQ ID NO: 481315 - RNA, 32 nt, Human
guuccccuugguaccaggagagcugcucacuu

SEQ ID NO: 481316 - RNA, 32 nt, Human
guucccgagccaggaacucugggccccaugga

SEQ ID NO: 481317 - RNA, 32 nt, Human
guucccgaguagcugggacuacaggcaugugc

SEQ ID NO: 481318 - RNA, 32 nt, Human
guucccgauucacguuuuucuggaccaaggug

SEQ ID NO: 481319 - RNA, 18 nt, Human
guucccgcuccugucucc

SEQ ID NO: 481320 - RNA, 22 nt, Human
guucccggcaccucgguuugug

SEQ ID NO: 481321 - RNA, 32 nt, Human
guucccggcaugccaugaaauuggccucggcg

SEQ ID NO: 481322 - RNA, 32 nt, Human
guucccggccccugccacccagccucaugcaa

SEQ ID NO: 481323 - RNA, 32 nt, Human
guucccggcuccccgcaccaucauggcuuugc

SEQ ID NO: 481324 - RNA, 32 nt, Human
guucccgggaaagacuggagcagcgaacagga

SEQ ID NO: 481325 - RNA, 32 nt, Human
guucccgguaggucugcuuucccuggaagagc

SEQ ID NO: 481326 - RNA, 32 nt, Human
guucccguuucuggaguuucaugaggauuuac

SEQ ID NO: 481327 - RNA, 32 nt, Human
guucccuacucagugucuguucuaggugcuga

SEQ ID NO: 481328 - RNA, 32 nt, Human
guucccucaacagagcucugcagccccaagug

SEQ ID NO: 481329 - RNA, 32 nt, Human
guucccucacugcuagucagcuucuuuuggaa

SEQ ID NO: 481330 - RNA, 32 nt, Human
guucccuccagaacuccccauuccccucugag

SEQ ID NO: 481331 - RNA, 32 nt, Human
guucccuccccuccccuuccuguccuuucaca

SEQ ID NO: 481332 - RNA, 32 nt, Human
guucccuccgugguggccucagucuuuuggcg

SEQ ID NO: 481333 - RNA, 32 nt, Human
guucccucggcuguggaccgggcggcacgcac

SEQ ID NO: 481334 - RNA, 32 nt, Human
guucccucuccuccucccuucuucccgggacu

SEQ ID NO: 481335 - RNA, 32 nt, Human
guucccucuccucuccucauucccaacccaaa

SEQ ID NO: 481336 - RNA, 32 nt, Human
guucccucucucccucucccucucccacucuc

SEQ ID NO: 481337 - RNA, 32 nt, Human
guucccucuucuguucccuccuccugccccca

SEQ ID NO: 481338 - RNA, 18 nt, Human
guucccucuugcucagug

SEQ ID NO: 481339 - RNA, 32 nt, Human
guucccugaaccuuccugucucccagggacau

SEQ ID NO: 481340 - RNA, 32 nt, Human
guucccugagaccuggccucaaagggcugacc

SEQ ID NO: 481341 - RNA, 32 nt, Human
guucccugaucccugugccucuucccaucuca

SEQ ID NO: 481342 - RNA, 32 nt, Human
guucccugauucugaaagaaguuuacacuaca

SEQ ID NO: 481343 - RNA, 32 nt, Human
guucccugauuuuuacacaucaugucaaagau

SEQ ID NO: 481344 - RNA, 32 nt, Human
guucccugcaguaauuguaugaucucacccag

SEQ ID NO: 481345 - RNA, 32 nt, Human
guucccugcccaccgacgccagccugcuugga

SEQ ID NO: 481346 - RNA, 32 nt, Human
guucccugcuuuggcuaauguugacuggagug

SEQ ID NO: 481347 - RNA, 32 nt, Human
guucccugcuuugguguagggguugggaaaaa

SEQ ID NO: 481348 - RNA, 32 nt, Human
guucccuggaaccugagucgggaggccugcaa

SEQ ID NO: 481349 - RNA, 32 nt, Human
guucccuggagaaggagaaagacugaagccac

SEQ ID NO: 481350 - RNA, 32 nt, Human
guucccuggaggauccagggaugaggauagag

SEQ ID NO: 481351 - RNA, 32 nt, Human
guucccuggaggcauaaguggcugggguagag

SEQ ID NO: 481352 - RNA, 32 nt, Human
guucccugggagaaggcugggaauggcacguc

SEQ ID NO: 481353 - RNA, 32 nt, Human
guucccugggcugauuccaggcugggccaggc

SEQ ID NO: 481354 - RNA, 32 nt, Human
guucccuuccuguagcagcagcauuuaugaau

SEQ ID NO: 481355 - RNA, 32 nt, Human
guucccuucuuuccuuccuacuuuccuucauu

SEQ ID NO: 481356 - RNA, 32 nt, Human
guucccuugaaacuuugggaaaacauguuaau

SEQ ID NO: 481357 - RNA, 32 nt, Human
guucccuuucaugcugucugugugguugcaug

SEQ ID NO: 481358 - RNA, 32 nt, Human
guucccuuuggguuccauguuuuccuuguucc

SEQ ID NO: 481359 - RNA, 32 nt, Human
guuccgaaaugagaaacuguggaaucuaagcu

SEQ ID NO: 481360 - RNA, 32 nt, Human
guuccgaauucaggcuguuggccagguaauug

SEQ ID NO: 481361 - RNA, 32 nt, Human
guuccgaggaccugggaggagcccucgguacc

SEQ ID NO: 481362 - RNA, 32 nt, Human
guuccgaggcauucagagcaucagagcaagua

SEQ ID NO: 481363 - RNA, 32 nt, Human
guuccgcaacuugcuccugccucccagcccca

SEQ ID NO: 481364 - RNA, 32 nt, Human
guuccgcacccaggcgggggccccugcuaaug

SEQ ID NO: 481365 - RNA, 32 nt, Human
guuccgcagaugcagagguugagguggcugcg

SEQ ID NO: 481366 - RNA, 32 nt, Human
guuccgcagccuggcauggcuucuggggaccu

SEQ ID NO: 481367 - RNA, 26 nt, Human
guuccgcagcgcgcccacggccugug

SEQ ID NO: 481368 - RNA, 32 nt, Human
guuccgcagggcuggggaggccucaggaaacu

SEQ ID NO: 481369 - RNA, 32 nt, Human
guuccgccaggaguuugagcagcuggccaaua

SEQ ID NO: 481370 - RNA, 32 nt, Human
guuccgccccacccucuacagccuuccucagg

SEQ ID NO: 481371 - RNA, 32 nt, Human
guuccgccuguaaucccagcacuuugggaggu

SEQ ID NO: 481372 - RNA, 32 nt, Human
guuccgcuauucggucucacaccuacagugga

SEQ ID NO: 481373 - RNA, 23 nt, Human
guuccgcugccuucuugucugug

SEQ ID NO: 481374 - RNA, 24 nt, Human
guuccgcuggccgguaguguagca

SEQ ID NO: 481375 - RNA, 32 nt, Human
guuccggaacuccaguucugaggggucuugaa

SEQ ID NO: 481376 - RNA, 32 nt, Human
guuccggaggcugaggccaggaggaugggugg

SEQ ID NO: 481377 - RNA, 32 nt, Human
guuccggcacgaaucccauccccacgucuggg

SEQ ID NO: 481378 - RNA, 32 nt, Human
guuccggcaguggaagagacgcgccggcguug

SEQ ID NO: 481379 - RNA, 20 nt, Human
guuccggccacucucugccg

SEQ ID NO: 481380 - RNA, 32 nt, Human
guuccggccucccagggacucaggucacuaau

SEQ ID NO: 481381 - RNA, 32 nt, Human
guuccgggaggaagcaggaaguuauuuucagc

SEQ ID NO: 481382 - RNA, 32 nt, Human
guuccgggcagcaggaucgacgcccaguccag

SEQ ID NO: 481383 - RNA, 32 nt, Human
guuccgggcaggcauuucaggaagaccgccuu

SEQ ID NO: 481384 - RNA, 32 nt, Human
guuccgggcucggugcgacugcgcagcuccuc

SEQ ID NO: 481385 - RNA, 32 nt, Human
guuccggggcuccugucucugccuccugggcc

SEQ ID NO: 481386 - RNA, 32 nt, Human
guuccggggcuuuuggaccucugugauuccgg

SEQ ID NO: 481387 - RNA, 32 nt, Human
guuccggguuggaacagcagaggcucagaaac

SEQ ID NO: 481388 - RNA, 32 nt, Human
guuccggugguggcagaggugcuuguguuuuu

SEQ ID NO: 481389 - RNA, 32 nt, Human
guuccguaguuugguugcuggcuguaggaguu

SEQ ID NO: 481390 - RNA, 32 nt, Human
guuccgucaucaccccagcccaaacugaagac

SEQ ID NO: 481391 - RNA, 32 nt, Human
guuccguuuccaaacagccaugguggugucca

SEQ ID NO: 481392 - RNA, 32 nt, Human
guuccuaaagccaccucucagcagaaucguca

SEQ ID NO: 481393 - RNA, 32 nt, Human
guuccuaaccagccuggucaacauggugaaac

SEQ ID NO: 481394 - RNA, 32 nt, Human
guuccuaacuucauagaaacuaaagcagaaag

SEQ ID NO: 481395 - RNA, 32 nt, Human
guuccuaaucagagaugacauggagaucccuu

SEQ ID NO: 481396 - RNA, 32 nt, Human
guuccuacuguacuguaacuuugaucaugucu

SEQ ID NO: 481397 - RNA, 32 nt, Human
guuccuagaacaauuuccagcacauagcaagu

SEQ ID NO: 481398 - RNA, 26 nt, Human
guuccuagacaucaguguuugcuuca

SEQ ID NO: 481399 - RNA, 32 nt, Human
guuccuagagcagucgcuccagccggggcugc

SEQ ID NO: 481400 - RNA, 32 nt, Human
guuccuagcucccuccgggcucugaugccauu

SEQ ID NO: 481401 - RNA, 32 nt, Human
guuccuagcugcagaagggucccgccuaggcc

SEQ ID NO: 481402 - RNA, 22 nt, Human
guuccuaggcuccuuuguacaa

SEQ ID NO: 481403 - RNA, 32 nt, Human
guuccuagucccgggaaggcaacuacccaaag

SEQ ID NO: 481404 - RNA, 32 nt, Human
guuccuagucucuucuucauugcccuuccuca

SEQ ID NO: 481405 - RNA, 32 nt, Human
guuccuaucccaggauggcuguugggauuagg

SEQ ID NO: 481406 - RNA, 32 nt, Human
guuccuaugggugcuauucaucuggaaggccu

SEQ ID NO: 481407 - RNA, 32 nt, Human
guuccuauuaagaagucacuucccucuacucc

SEQ ID NO: 481408 - RNA, 32 nt, Human
guuccucaagagaguccuuggcuuaaagcugu

SEQ ID NO: 481409 - RNA, 32 nt, Human
guuccucaccugaggcuagagcagcagcugcc

SEQ ID NO: 481410 - RNA, 32 nt, Human
guuccucacucuuccuuuucagaaccugaugc

SEQ ID NO: 481411 - RNA, 32 nt, Human
guuccucagcuggucaugcugagcucauaccc

SEQ ID NO: 481412 - RNA, 32 nt, Human
guuccucaggaaaagcuccagcuagcauguuu

SEQ ID NO: 481413 - RNA, 32 nt, Human
guuccucaucacuguccaugcaccaugcagcc

SEQ ID NO: 481414 - RNA, 32 nt, Human
guuccucauggggcuggacucaucucaguggc

SEQ ID NO: 481415 - RNA, 32 nt, Human
guuccucauucacaucaacagagcgaggcugu

SEQ ID NO: 481416 - RNA, 25 nt, Human
guuccuccaaccccaggaggccagg

SEQ ID NO: 481417 - RNA, 25 nt, Human
guuccuccaacucuaggaggccagg

SEQ ID NO: 481418 - RNA, 32 nt, Human
guuccuccaagugcacauuuagccuuaaaauc

SEQ ID NO: 481419 - RNA, 32 nt, Human
guuccuccagcaggguauggccagcuuuaguc

SEQ ID NO: 481420 - RNA, 32 nt, Human
guuccuccagccccuucuccucucugcaccuu

SEQ ID NO: 481421 - RNA, 22 nt, Human
guuccucccagcaaccuucccu

SEQ ID NO: 481422 - RNA, 27 nt, Human
guuccucccaggaaaucaaaggccagg

SEQ ID NO: 481423 - RNA, 23 nt, Human
guuccuccccgcugcaggccagg

SEQ ID NO: 481424 - RNA, 32 nt, Human
guuccucccuuuucucugcuuuucuccucucu

SEQ ID NO: 481425 - RNA, 32 nt, Human
guuccuccuccccucuccuaucagcccuaauc

SEQ ID NO: 481426 - RNA, 32 nt, Human
guuccuccucuccuacucggcucugcaguccu

SEQ ID NO: 481427 - RNA, 32 nt, Human
guuccuccuguguucauucuccuuccugccac

SEQ ID NO: 481428 - RNA, 32 nt, Human
guuccuccuuagugccaucacagcaggugaau

SEQ ID NO: 481429 - RNA, 32 nt, Human
guuccucgaacucugcaccuuccuccaccagg

SEQ ID NO: 481430 - RNA, 32 nt, Human
guuccucuccaaugacacggugcagcugaacg

SEQ ID NO: 481431 - RNA, 32 nt, Human
guuccucuccccucaggaggccaccucaggaa

SEQ ID NO: 481432 - RNA, 32 nt, Human
guuccucugccugcuaacaagcccacguggac

SEQ ID NO: 481433 - RNA, 32 nt, Human
guuccucugcugcagcccuggcugggcagaca

SEQ ID NO: 481434 - RNA, 32 nt, Human
guuccucuggguugggagaggggcugggcaug

SEQ ID NO: 481435 - RNA, 32 nt, Human
guuccucuggugccugccguggcucaaauuau

SEQ ID NO: 481436 - RNA, 32 nt, Human
guuccucugguuccucccuacauuucaggccu

SEQ ID NO: 481437 - RNA, 32 nt, Human
guuccucugguucuugccugcuucacugugga

SEQ ID NO: 481438 - RNA, 32 nt, Human
guuccucuguuuccucacccuaacccuaaacc

SEQ ID NO: 481439 - RNA, 32 nt, Human
guuccucuguuuuucuuuuugauuuuuguuuu

SEQ ID NO: 481440 - RNA, 23 nt, Human
guuccucuuaggggucugccuca

SEQ ID NO: 481441 - RNA, 32 nt, Human
guuccucuucucauucucuccccgccgccugu

SEQ ID NO: 481442 - RNA, 32 nt, Human
guuccugaaagcuucugucacucaagaaucca

SEQ ID NO: 481443 - RNA, 20 nt, Human
guuccugaaccgaugagaaa

SEQ ID NO: 481444 - RNA, 32 nt, Human
guuccugacucugaaagccagcuuauugccga

SEQ ID NO: 481445 - RNA, 32 nt, Human
guuccugacucugacaagaaagcauaagucuc

SEQ ID NO: 481446 - RNA, 32 nt, Human
guuccugauagcuacccacagagcaagugauu

SEQ ID NO: 481447 - RNA, 32 nt, Human
guuccugaucaaagcaauagccagcuuucgac

SEQ ID NO: 481448 - RNA, 32 nt, Human
guuccugaucuagccccagaccuggccaggcc

SEQ ID NO: 481449 - RNA, 32 nt, Human
guuccugcaacgcguguuccugcugggguucu

SEQ ID NO: 481450 - RNA, 32 nt, Human
guuccugcacacaggagcacccacagagagac

SEQ ID NO: 481451 - RNA, 32 nt, Human
guuccugcacguggcuaugcuguggggccucu

SEQ ID NO: 481452 - RNA, 32 nt, Human
guuccugcacuccugguggugcgucuucuggg

SEQ ID NO: 481453 - RNA, 32 nt, Human
guuccugcauuucagcagugcauaaucgagca

SEQ ID NO: 481454 - RNA, 32 nt, Human
guuccugccaaucagagaucucuauauuaaau

SEQ ID NO: 481455 - RNA, 32 nt, Human
guuccugccagccucaggccagggguucagag

SEQ ID NO: 481456 - RNA, 32 nt, Human
guuccugccaugacauggaaaccuggugguau

SEQ ID NO: 481457 - RNA, 32 nt, Human
guuccugccccaggaauaggccaggagggaag

SEQ ID NO: 481458 - RNA, 32 nt, Human
guuccugccccuuccuccucguaaccaaaacc

SEQ ID NO: 481459 - RNA, 32 nt, Human
guuccugcccucauggaggggagggaggcaau

SEQ ID NO: 481460 - RNA, 32 nt, Human
guuccugccgcagcucucuccccuucuuaccu

SEQ ID NO: 481461 - RNA, 32 nt, Human
guuccugccuccuugauauuuguauuuauucu

SEQ ID NO: 481462 - RNA, 32 nt, Human
guuccugccuucucuucuauccugcaauuucu

SEQ ID NO: 481463 - RNA, 32 nt, Human
guuccugcugaagacauuuacuuucaaugauc

SEQ ID NO: 481464 - RNA, 32 nt, Human
guuccugcuucuggucuucuccugggcuccac

SEQ ID NO: 481465 - RNA, 32 nt, Human
guuccuggaggaccagcugccaaggaagggca

SEQ ID NO: 481466 - RNA, 32 nt, Human
guuccuggcugcaggcucgaguucagggggca

SEQ ID NO: 481467 - RNA, 32 nt, Human
guuccuggcuuccaugugacuuguaagugugc

SEQ ID NO: 481468 - RNA, 32 nt, Human
guuccugggagaagccgggcugccucacgagg

SEQ ID NO: 481469 - RNA, 32 nt, Human
guuccugggaggcgggcgcggcaggacuggga

SEQ ID NO: 481470 - RNA, 32 nt, Human
guuccugggcuccccuucucucuaccuucucc

SEQ ID NO: 481471 - RNA, 32 nt, Human
guuccugggcugggagaggagccuucugacug

SEQ ID NO: 481472 - RNA, 32 nt, Human
guuccuggggcaagaagccagaugggagauga

SEQ ID NO: 481473 - RNA, 32 nt, Human
guuccugggugaggaccacacaaucagauaag

SEQ ID NO: 481474 - RNA, 32 nt, Human
guuccugggugaggcugaagccacuaguccau

SEQ ID NO: 481475 - RNA, 32 nt, Human
guuccugguccuuucacuaagaauuuccacau

SEQ ID NO: 481476 - RNA, 32 nt, Human
guuccuggugacccaggcucucaccagccaau

SEQ ID NO: 481477 - RNA, 32 nt, Human
guuccugguguucccuuucccugcugaccuug

SEQ ID NO: 481478 - RNA, 32 nt, Human
guuccugguuauggcaguuucuuggugauuug

SEQ ID NO: 481479 - RNA, 32 nt, Human
guuccuguaacauuaccuccacacaacugcac

SEQ ID NO: 481480 - RNA, 32 nt, Human
guuccuguagcucuggggccaggucagccgug

SEQ ID NO: 481481 - RNA, 21 nt, Human
guuccuguccccucugagaaa

SEQ ID NO: 481482 - RNA, 32 nt, Human
guuccugugccacccuuuccccgccccucaaa

SEQ ID NO: 481483 - RNA, 32 nt, Human
guuccugugccuccagacuaugcagcucauca

SEQ ID NO: 481484 - RNA, 32 nt, Human
guuccugugccugccuuccccaccccagcagu

SEQ ID NO: 481485 - RNA, 32 nt, Human
guuccugugcugcccugcaccuaggagagacu

SEQ ID NO: 481486 - RNA, 32 nt, Human
guuccuguggauagccugggaggcagguagaa

SEQ ID NO: 481487 - RNA, 31 nt, Human
guuccuguuuaugagagucauguuucaucuc

SEQ ID NO: 481488 - RNA, 23 nt, Human
guuccuguuucagccucugccuu

SEQ ID NO: 481489 - RNA, 32 nt, Human
guuccuguuuccuggaaucacuggugcuauga

SEQ ID NO: 481490 - RNA, 32 nt, Human
guuccuguuuggacccaggagaguggaagaga

SEQ ID NO: 481491 - RNA, 28 nt, Human
guuccuguuuuacaaugcuucugucuua

SEQ ID NO: 481492 - RNA, 32 nt, Human
guuccuuaaucuccucuucuuucauccucagc

SEQ ID NO: 481493 - RNA, 23 nt, Human
guuccuuagccuccugguuugug

SEQ ID NO: 481494 - RNA, 32 nt, Human
guuccuucacaacauaaaauaggauaaaugac

SEQ ID NO: 481495 - RNA, 32 nt, Human
guuccuucacaacaugaaauaggauaaaugac

SEQ ID NO: 481496 - RNA, 32 nt, Human
guuccuucacguccucccuucucagccucguc

SEQ ID NO: 481497 - RNA, 32 nt, Human
guuccuuccagugucauuucucauccacauac

SEQ ID NO: 481498 - RNA, 32 nt, Human
guuccuuccaugcucugugacuuuaagagaag

SEQ ID NO: 481499 - RNA, 32 nt, Human
guuccuucccagcacucccagccugggauaag

SEQ ID NO: 481500 - RNA, 32 nt, Human
guuccuuccucugcgcccuccuguuucucccu

SEQ ID NO: 481501 - RNA, 32 nt, Human
guuccuuccucuuucuccucuccaauuuaugc

SEQ ID NO: 481502 - RNA, 32 nt, Human
guuccuuccugagucaggcuuuguacuugacc

SEQ ID NO: 481503 - RNA, 32 nt, Human
guuccuuccuuguaccucagcacucugggggu

SEQ ID NO: 481504 - RNA, 32 nt, Human
guuccuucuagggccaccuguccccuuaaaca

SEQ ID NO: 481505 - RNA, 21 nt, Human
guuccuucuggugucugcuuu

SEQ ID NO: 481506 - RNA, 23 nt, Human
guuccuucuggugucugcuuucu

SEQ ID NO: 481507 - RNA, 32 nt, Human
guuccuucuguucagcagcccgugcagaggag

SEQ ID NO: 481508 - RNA, 32 nt, Human
guuccuugaaucugaaagagcauuauuccugg

SEQ ID NO: 481509 - RNA, 32 nt, Human
guuccuuggcacccuguuggguauuggguacu

SEQ ID NO: 481510 - RNA, 32 nt, Human
guuccuuggcagacugccuuuccuggaagagg

SEQ ID NO: 481511 - RNA, 32 nt, Human
guuccuuggcugccccggcuucugcacuuacc

SEQ ID NO: 481512 - RNA, 32 nt, Human
guuccuuggugcuaggaggagccuucuggaug

SEQ ID NO: 481513 - RNA, 32 nt, Human
guuccuuuauguccuguacaucauucucugcu

SEQ ID NO: 481514 - RNA, 32 nt, Human
guuccuuucacugcauuuuccaccaacaguca

SEQ ID NO: 481515 - RNA, 32 nt, Human
guuccuuucauaauuacuuuagcuuuucucca

SEQ ID NO: 481516 - RNA, 32 nt, Human
guuccuuuccccucaccugcuugccuccuuaa

SEQ ID NO: 481517 - RNA, 32 nt, Human
guuccuuuccucucuugccucuucccacucac

SEQ ID NO: 481518 - RNA, 32 nt, Human
guuccuuuccuugugggggcccagugugcaau

SEQ ID NO: 481519 - RNA, 32 nt, Human
guuccuuucuaggagcauccaacaggagucag

SEQ ID NO: 481520 - RNA, 32 nt, Human
guuccuuucucccauucccagccucauuucuu

SEQ ID NO: 481521 - RNA, 32 nt, Human
guuccuuuuuagucugacauuuuguggagcag

SEQ ID NO: 481522 - RNA, 32 nt, Human
guucgaaaccagccuggccaacauagugaaac

SEQ ID NO: 481523 - RNA, 32 nt, Human
guucgaaaccagccuggccaacauggugaaac

SEQ ID NO: 481524 - RNA, 32 nt, Human
guucgaaaccagccugggcaacauagugagac

SEQ ID NO: 481525 - RNA, 32 nt, Human
guucgaaccagccuggccaacauggugaaacu

SEQ ID NO: 481526 - RNA, 32 nt, Human
guucgaaccaguuugggcaacauggcgaaacc

SEQ ID NO: 481527 - RNA, 32 nt, Human
guucgaagagucauauuauagcaacggaaauc

SEQ ID NO: 481528 - RNA, 32 nt, Human
guucgaaggguggccaagugccacugcaauua

SEQ ID NO: 481529 - RNA, 32 nt, Human
guucgaccccuccaaggagcgccugcucgagu

SEQ ID NO: 481530 - RNA, 32 nt, Human
guucgacggcgccgggcgaguggcuguugagc

SEQ ID NO: 481531 - RNA, 32 nt, Human
guucgacuggacugugcugagugcgggcacug

SEQ ID NO: 481532 - RNA, 32 nt, Human
guucgacuuguggaucuucacacucagaaaca

SEQ ID NO: 481533 - RNA, 32 nt, Human
guucgagaccaaccgaccaacauggugaaacc

SEQ ID NO: 481534 - RNA, 32 nt, Human
guucgagaccaaccuccaacauggugaaaccc

SEQ ID NO: 481535 - RNA, 32 nt, Human
guucgagaccagacuggcaacauagugagacc

SEQ ID NO: 481536 - RNA, 32 nt, Human
guucgagaccagccugaccaacauagugaaac

SEQ ID NO: 481537 - RNA, 32 nt, Human
guucgagaccagccugaccaacaugguaaaac

SEQ ID NO: 481538 - RNA, 32 nt, Human
guucgagaccagccugaccaacauggugaaaa

SEQ ID NO: 481539 - RNA, 32 nt, Human
guucgagaccagccugaccaacauggugaaac

SEQ ID NO: 481540 - RNA, 32 nt, Human
guucgagaccagccugaccaacauggugaaag

SEQ ID NO: 481541 - RNA, 32 nt, Human
guucgagaccagccugaccaacauggugaaau

SEQ ID NO: 481542 - RNA, 32 nt, Human
guucgagaccagccugaccaacauggugagac

SEQ ID NO: 481543 - RNA, 32 nt, Human
guucgagaccagccugaccaacauggugaggc

SEQ ID NO: 481544 - RNA, 32 nt, Human
guucgagaccagccugagaaacauagugagcc

SEQ ID NO: 481545 - RNA, 32 nt, Human
guucgagaccagccugagcaacauggugaaac

SEQ ID NO: 481546 - RNA, 32 nt, Human
guucgagaccagccugccaacauggugaaacc

SEQ ID NO: 481547 - RNA, 32 nt, Human
guucgagaccagccugcccaacauggugaaac

SEQ ID NO: 481548 - RNA, 32 nt, Human
guucgagaccagccugccuaacauggugaaac

SEQ ID NO: 481549 - RNA, 32 nt, Human
guucgagaccagccuggacaacauagugagac

SEQ ID NO: 481550 - RNA, 32 nt, Human
guucgagaccagccuggccaacauagugaaac

SEQ ID NO: 481551 - RNA, 32 nt, Human
guucgagaccagccuggccaacaugguaaaac

SEQ ID NO: 481552 - RNA, 32 nt, Human
guucgagaccagccuggccaacaugguaaacg

SEQ ID NO: 481553 - RNA, 32 nt, Human
guucgagaccagccuggccaacauggugaaaa

SEQ ID NO: 481554 - RNA, 32 nt, Human
guucgagaccagccuggccaacauggugaaac

SEQ ID NO: 481555 - RNA, 32 nt, Human
guucgagaccagccuggccaacauggugaagc

SEQ ID NO: 481556 - RNA, 32 nt, Human
guucgagaccagccuggccaacauggugauac

SEQ ID NO: 481557 - RNA, 32 nt, Human
guucgagaccagccuggccaacauggugugag

SEQ ID NO: 481558 - RNA, 32 nt, Human
guucgagaccagccuggccaacguggugaaac

SEQ ID NO: 481559 - RNA, 32 nt, Human
guucgagaccagccuggccaauacggcaaaac

SEQ ID NO: 481560 - RNA, 32 nt, Human
guucgagaccagccuggccacauggugaaacc

SEQ ID NO: 481561 - RNA, 32 nt, Human
guucgagaccagccuggccagcauggugaaac

SEQ ID NO: 481562 - RNA, 32 nt, Human
guucgagaccagccuggccagcauggugagac

SEQ ID NO: 481563 - RNA, 32 nt, Human
guucgagaccagccuggcccacauggugaaac

SEQ ID NO: 481564 - RNA, 32 nt, Human
guucgagaccagccuggcuaacauggugaaac

SEQ ID NO: 481565 - RNA, 32 nt, Human
guucgagaccagccugggcaacauagugagac

SEQ ID NO: 481566 - RNA, 32 nt, Human
guucgagaccagccugggcaacauaugagaaa

SEQ ID NO: 481567 - RNA, 32 nt, Human
guucgagaccagccugggcaacauggugaaac

SEQ ID NO: 481568 - RNA, 32 nt, Human
guucgagaccagccugggcaacauggugaaau

SEQ ID NO: 481569 - RNA, 32 nt, Human
guucgagaccagccugggcaacauggugagac

SEQ ID NO: 481570 - RNA, 32 nt, Human
guucgagaccagccugggcaaccuaaugagag

SEQ ID NO: 481571 - RNA, 32 nt, Human
guucgagaccagccugggcaacguggugaaac

SEQ ID NO: 481572 - RNA, 32 nt, Human
guucgagaccagccugggcaucguagugagac

SEQ ID NO: 481573 - RNA, 32 nt, Human
guucgagaccagccuggguaacauagcuagac

SEQ ID NO: 481574 - RNA, 32 nt, Human
guucgagaccagccuggucaacauggugaaac

SEQ ID NO: 481575 - RNA, 32 nt, Human
guucgagaccagccuggucaauauggugaaac

SEQ ID NO: 481576 - RNA, 32 nt, Human
guucgagaccagcugggcaacauggugaaacc

SEQ ID NO: 481577 - RNA, 32 nt, Human
guucgagaccaucuuggcuaacauggugaaac

SEQ ID NO: 481578 - RNA, 32 nt, Human
guucgagaggcugaggcaagaagaucacuuga

SEQ ID NO: 481579 - RNA, 32 nt, Human
guucgagaucagccuggccaacauggugaaac

SEQ ID NO: 481580 - RNA, 32 nt, Human
guucgagaucagccuggccaacauggugaaau

SEQ ID NO: 481581 - RNA, 32 nt, Human
guucgagcaauucuccuguaaucccagcuacu

SEQ ID NO: 481582 - RNA, 32 nt, Human
guucgagccagccugaccaacaugaugaaacc

SEQ ID NO: 481583 - RNA, 32 nt, Human
guucgaggccagccuggccaacauggugaaac

SEQ ID NO: 481584 - RNA, 32 nt, Human
guucgaggccagccugguuaacacgcugaaau

SEQ ID NO: 481585 - RNA, 32 nt, Human
guucgaggcugcagucagucaugauggcacca

SEQ ID NO: 481586 - RNA, 32 nt, Human
guucgauaccagccugggcaacauagugggau

SEQ ID NO: 481587 - RNA, 32 nt, Human
guucgaucacuugaggccaggaguucgagauc

SEQ ID NO: 481588 - RNA, 32 nt, Human
guucgaucagcccuccuaaagcuggcuggaaa

SEQ ID NO: 481589 - RNA, 32 nt, Human
guucgaugacgacauggagcagcuucgagacg

SEQ ID NO: 481590 - RNA, 32 nt, Human
guucgaugcugauuaugcagaccgaugaguag

SEQ ID NO: 481591 - RNA, 32 nt, Human
guucgauuucuaccucagcagcaguuggaucu

SEQ ID NO: 481592 - RNA, 32 nt, Human
guucgcaccacugcacuccagccugggugaua

SEQ ID NO: 481593 - RNA, 32 nt, Human
guucgcaggccugcuaagcagccggcggccgg

SEQ ID NO: 481594 - RNA, 32 nt, Human
guucgcaugccacugcacuccagccugggcga

SEQ ID NO: 481595 - RNA, 32 nt, Human
guucgcauugguaaccugcugcuguauuucau

SEQ ID NO: 481596 - RNA, 32 nt, Human
guucgccauuuccaccaccgccagcugccagc

SEQ ID NO: 481597 - RNA, 32 nt, Human
guucgcccucaagguggugccguguggcgggg

SEQ ID NO: 481598 - RNA, 32 nt, Human
guucgccucaucuaaccccugccugcaggguc

SEQ ID NO: 481599 - RNA, 32 nt, Human
guucgcggaggugcggagagacuccuuggggg

SEQ ID NO: 481600 - RNA, 32 nt, Human
guucgcggccgcgugcagaggugcaggcagag

SEQ ID NO: 481601 - RNA, 32 nt, Human
guucgcggggcugcaggagcugcaggggcugc

SEQ ID NO: 481602 - RNA, 22 nt, Human
guucgcgggucgcuggcggggg

SEQ ID NO: 481603 - RNA, 32 nt, Human
guucgcuuaucaacuaaugauuuagugaucaa

SEQ ID NO: 481604 - RNA, 30 nt, Human
guucggagaccaugugcguugugugcaugc

SEQ ID NO: 481605 - RNA, 32 nt, Human
guucggagaggggacguggccuggggaagagc

SEQ ID NO: 481606 - RNA, 32 nt, Human
guucggagcucccaccuggacgcaucccucac

SEQ ID NO: 481607 - RNA, 32 nt, Human
guucggagcucuucugugcccuggcuccaugc

SEQ ID NO: 481608 - RNA, 25 nt, Human
guucggaggauuauucgucuucucc

SEQ ID NO: 481609 - RNA, 32 nt, Human
guucggagucauccuccagauguccacaaagg

SEQ ID NO: 481610 - RNA, 31 nt, Human
guucggauuuccaauaaagaaacagagugau

SEQ ID NO: 481611 - RNA, 32 nt, Human
guucggauuuccaauaaagaaacagagugaug

SEQ ID NO: 481612 - RNA, 32 nt, Human
guucggcaaucacugucacccccggacagcag

SEQ ID NO: 481613 - RNA, 32 nt, Human
guucgggaaagauaccagcugcaugacagggu

SEQ ID NO: 481614 - RNA, 32 nt, Human
guucgggaccagccuagccuacauggugaaac

SEQ ID NO: 481615 - RNA, 32 nt, Human
guucgggaccagccugggaaauauagugaaac

SEQ ID NO: 481616 - RNA, 32 nt, Human
guucgggaccagccugggcaacauggugaaac

SEQ ID NO: 481617 - RNA, 19 nt, Human
guucgggacggcgggcuga

SEQ ID NO: 481618 - RNA, 32 nt, Human
guucgggaggcugaggcaggagaaucacuuga

SEQ ID NO: 481619 - RNA, 32 nt, Human
guucgggcugugcgggguggccagcagggacg

SEQ ID NO: 481620 - RNA, 32 nt, Human
guucggguuaagugaugaaaauggcaguggug

SEQ ID NO: 481621 - RNA, 32 nt, Human
guucgguccucccaguuuccgcuaagacacaa

SEQ ID NO: 481622 - RNA, 32 nt, Human
guucguacucaagugaucuauuaucuagcugc

SEQ ID NO: 481623 - RNA, 32 nt, Human
guucguaggaaggugcaggagaggaggugggc

SEQ ID NO: 481624 - RNA, 32 nt, Human
guucgucagagagcauguugaaguucuauuuu

SEQ ID NO: 481625 - RNA, 28 nt, Human
guucgucagcuggcugccucauugccac

SEQ ID NO: 481626 - RNA, 32 nt, Human
guucgucauccucccuucccauauccuucaaa

SEQ ID NO: 481627 - RNA, 32 nt, Human
guucgucccgggcuguuucgcguccggccuga

SEQ ID NO: 481628 - RNA, 32 nt, Human
guucguccgccugcagcuucugagagcugugc

SEQ ID NO: 481629 - RNA, 32 nt, Human
guucguccugagacggagucucgcucugucgc

SEQ ID NO: 481630 - RNA, 22 nt, Human
guucgucgccuccuugcccgug

SEQ ID NO: 481631 - RNA, 32 nt, Human
guucgucucugcccugaugcugccucaggauc

SEQ ID NO: 481632 - RNA, 32 nt, Human
guucgucugcugucugugucuucuauuuggca

SEQ ID NO: 481633 - RNA, 32 nt, Human
guucgugccaucggacuccagccugggugaag

SEQ ID NO: 481634 - RNA, 32 nt, Human
guucgugccauuacacuccagccugggugaca

SEQ ID NO: 481635 - RNA, 32 nt, Human
guucgugccuguaaucccagcucuuugggagg

SEQ ID NO: 481636 - RNA, 32 nt, Human
guucgugcuccugguugggccccucggggugc

SEQ ID NO: 481637 - RNA, 32 nt, Human
guucguggagccacaggcagacgaugucaacc

SEQ ID NO: 481638 - RNA, 32 nt, Human
guucguggucacugcacuccagccuggcuaca

SEQ ID NO: 481639 - RNA, 32 nt, Human
guucguggucggccugccauguuuccaugugc

SEQ ID NO: 481640 - RNA, 32 nt, Human
guucguggucucacuggcuucaggagugaagg

SEQ ID NO: 481641 - RNA, 32 nt, Human
guucguguucucuugcccucccugccuaagag

SEQ ID NO: 481642 - RNA, 32 nt, Human
guucguucagaauagugcuguguguuaccacg

SEQ ID NO: 481643 - RNA, 32 nt, Human
guucguucugagacggagucucgcucugucgc

SEQ ID NO: 481644 - RNA, 32 nt, Human
guucguuuguucaugcaaacuauauuugcauu

SEQ ID NO: 481645 - RNA, 32 nt, Human
guucuaaagacccgugguaacagggcaaguuu

SEQ ID NO: 481646 - RNA, 32 nt, Human
guucuaagcaccuguuccuggccaggcucuag

SEQ ID NO: 481647 - RNA, 32 nt, Human
guucuaaggcugcugcuaauuacagcccccaa

SEQ ID NO: 481648 - RNA, 32 nt, Human
guucuaaguuagcuuucucauaacgguucuca

SEQ ID NO: 481649 - RNA, 18 nt, Human
guucuaauauccacuuga

SEQ ID NO: 481650 - RNA, 32 nt, Human
guucuaaugcuauaauaacuuaccucagcuuu

SEQ ID NO: 481651 - RNA, 32 nt, Human
guucuaauguacaacuaacuauuugcauauaa

SEQ ID NO: 481652 - RNA, 32 nt, Human
guucuaauugccuucuaaccugggagaucauc

SEQ ID NO: 481653 - RNA, 32 nt, Human
guucuacaaugagugccaaaucugcuaucagc

SEQ ID NO: 481654 - RNA, 32 nt, Human
guucuacacagauuucacaaauugugcuaaga

SEQ ID NO: 481655 - RNA, 32 nt, Human
guucuacauaaauagaaaaguugaucauucaa

SEQ ID NO: 481656 - RNA, 32 nt, Human
guucuaccaguaaaaauaaagaaccaggagug

SEQ ID NO: 481657 - RNA, 32 nt, Human
guucuaccuagugcccauguucugauugugug

SEQ ID NO: 481658 - RNA, 32 nt, Human
guucuaccucuugcugucuguguguucuuaag

SEQ ID NO: 481659 - RNA, 21 nt, Human
guucuacgccuggauccggga

SEQ ID NO: 481660 - RNA, 32 nt, Human
guucuacucuguuccuggcccugccggcagcc

SEQ ID NO: 481661 - RNA, 32 nt, Human
guucuacucuucucucaaccagacucauacac

SEQ ID NO: 481662 - RNA, 32 nt, Human
guucuacugccucagccucccguguagcuggg

SEQ ID NO: 481663 - RNA, 32 nt, Human
guucuacugguacagauagucccacuggcaca

SEQ ID NO: 481664 - RNA, 32 nt, Human
guucuagaagcccguuccccaguggcuguauc

SEQ ID NO: 481665 - RNA, 32 nt, Human
guucuagaccagccugaccaacauggugaaac

SEQ ID NO: 481666 - RNA, 32 nt, Human
guucuagaccagccuggccagcauggugaaaa

SEQ ID NO: 481667 - RNA, 32 nt, Human
guucuagaccagccuggccagcauggugaaac

SEQ ID NO: 481668 - RNA, 32 nt, Human
guucuagaccagccugggcaacguggugaaac

SEQ ID NO: 481669 - RNA, 32 nt, Human
guucuagacuugcuucucccaccucugagauu

SEQ ID NO: 481670 - RNA, 32 nt, Human
guucuagagauuuaccaccauugcuuauugcu

SEQ ID NO: 481671 - RNA, 32 nt, Human
guucuagauuuauacagggagguggauauuua

SEQ ID NO: 481672 - RNA, 23 nt, Human
guucuagcaguccccagcugagu

SEQ ID NO: 481673 - RNA, 32 nt, Human
guucuagcccaggagcgguggcucacacuugu

SEQ ID NO: 481674 - RNA, 32 nt, Human
guucuagcuagcagcacgcuccucagagaggg

SEQ ID NO: 481675 - RNA, 32 nt, Human
guucuaggagccucugguuacuguugggaaug

SEQ ID NO: 481676 - RNA, 32 nt, Human
guucuaggccccuucccagccugggugagggg

SEQ ID NO: 481677 - RNA, 32 nt, Human
guucuagggaaugggggcagggaggauuuugc

SEQ ID NO: 481678 - RNA, 32 nt, Human
guucuagggacaggagaagcagaggaagaggc

SEQ ID NO: 481679 - RNA, 32 nt, Human
guucuagggcuggagggcaggggugacaugga

SEQ ID NO: 481680 - RNA, 21 nt, Human
guucuaguaagaagggauucu

SEQ ID NO: 481681 - RNA, 32 nt, Human
guucuaguccuccucuaguuaacuuagcuuua

SEQ ID NO: 481682 - RNA, 31 nt, Human
guucuagugaaacugcauuauuuguugacua

SEQ ID NO: 481683 - RNA, 32 nt, Human
guucuagugggaaggggugcccccaggcucuc

SEQ ID NO: 481684 - RNA, 32 nt, Human
guucuaguucccaaauuaucuuuucuuccuug

SEQ ID NO: 481685 - RNA, 32 nt, Human
guucuauaaauuucucgcuuccuucacuucug

SEQ ID NO: 481686 - RNA, 32 nt, Human
guucuauacccuacagucagacaggaaaagaa

SEQ ID NO: 481687 - RNA, 32 nt, Human
guucuauaguaaaauaauguuuccacauuaua

SEQ ID NO: 481688 - RNA, 32 nt, Human
guucuaucagguuuguaaucacuguagcuuca

SEQ ID NO: 481689 - RNA, 32 nt, Human
guucuaugaaggagauugagggagaagagaca

SEQ ID NO: 481690 - RNA, 32 nt, Human
guucuaugccuauggagccacagugccucccu

SEQ ID NO: 481691 - RNA, 32 nt, Human
guucuaugcugagccuuagccucccagguuau

SEQ ID NO: 481692 - RNA, 32 nt, Human
guucuauggggaggacaaucaguagagguuuc

SEQ ID NO: 481693 - RNA, 32 nt, Human
guucuauguggagucuguuacugugauuccuu

SEQ ID NO: 481694 - RNA, 32 nt, Human
guucuauuccucaguauccagaaaguuacuga

SEQ ID NO: 481695 - RNA, 32 nt, Human
guucucaacuauuuaugaacuguggugacuac

SEQ ID NO: 481696 - RNA, 25 nt, Human
guucucaagaaacaaaugcuagcuu

SEQ ID NO: 481697 - RNA, 32 nt, Human
guucucaaggucucaggcuauuugggaaauuc

SEQ ID NO: 481698 - RNA, 32 nt, Human
guucucaccacucacucaugguugagacucau

SEQ ID NO: 481699 - RNA, 17 nt, Human
guucucaccacuguccc

SEQ ID NO: 481700 - RNA, 32 nt, Human
guucucacgcccuguuuuaauuuaacccagcu

SEQ ID NO: 481701 - RNA, 32 nt, Human
guucucacgccuguaaucccagcacuuuggga

SEQ ID NO: 481702 - RNA, 32 nt, Human
guucucacucccuguuuuaauucaacccagcc

SEQ ID NO: 481703 - RNA, 24 nt, Human
guucucacugucuccuggucugug

SEQ ID NO: 481704 - RNA, 32 nt, Human
guucucacuguucccucugcuccuggagccuu

SEQ ID NO: 481705 - RNA, 23 nt, Human
guucucagaauaguggcuagcuu

SEQ ID NO: 481706 - RNA, 32 nt, Human
guucucagcaaucccugucaccaucucaucac

SEQ ID NO: 481707 - RNA, 32 nt, Human
guucucagcacaccuuccaugaaucugcuugc

SEQ ID NO: 481708 - RNA, 32 nt, Human
guucucagccaguacaccagagccaggccaug

SEQ ID NO: 481709 - RNA, 21 nt, Human
guucucagcucacugcaaccu

SEQ ID NO: 481710 - RNA, 32 nt, Human
guucucagcuuacucaaccucugccucuuggg

SEQ ID NO: 481711 - RNA, 22 nt, Human
guucucaggaaguuacagucuu

SEQ ID NO: 481712 - RNA, 32 nt, Human
guucucaggagaaaacagacaaauccuccugc

SEQ ID NO: 481713 - RNA, 21 nt, Human
guucucaggaucaccggcagu

SEQ ID NO: 481714 - RNA, 32 nt, Human
guucucaggccucuccucaccccaccaacuuc

SEQ ID NO: 481715 - RNA, 32 nt, Human
guucucaggcuggcugacaggucugacagccc

SEQ ID NO: 481716 - RNA, 32 nt, Human
guucucagggguucaggaauccgugcaugugg

SEQ ID NO: 481717 - RNA, 32 nt, Human
guucucagguucuuauguagacagugagggcu

SEQ ID NO: 481718 - RNA, 32 nt, Human
guucucagugccugugcauugcugccacuaca

SEQ ID NO: 481719 - RNA, 32 nt, Human
guucucaguggcaguggguggaagugagcaca

SEQ ID NO: 481720 - RNA, 32 nt, Human
guucucaucauuucuccucuggauucaucugc

SEQ ID NO: 481721 - RNA, 32 nt, Human
guucucaucuuucuugaucaacaucuuuucuu

SEQ ID NO: 481722 - RNA, 19 nt, Human
guucucauuguucaucucc

SEQ ID NO: 481723 - RNA, 32 nt, Human
guucuccaaacaguaaaccaguauuucacacu

SEQ ID NO: 481724 - RNA, 32 nt, Human
guucuccaaacgugcugggauuacaggcauga

SEQ ID NO: 481725 - RNA, 32 nt, Human
guucuccaaauugucugugaacugcuuaggua

SEQ ID NO: 481726 - RNA, 32 nt, Human
guucuccaacuugagacaauuucuccccgcau

SEQ ID NO: 481727 - RNA, 32 nt, Human
guucuccaagcucuagaaaucucugacacauc

SEQ ID NO: 481728 - RNA, 21 nt, Human
guucuccaaguccccagcccg

SEQ ID NO: 481729 - RNA, 32 nt, Human
guucuccaauccagcucuaucagcuauaaagc

SEQ ID NO: 481730 - RNA, 32 nt, Human
guucuccacagccugugugagccgcacuuccg

SEQ ID NO: 481731 - RNA, 32 nt, Human
guucuccacagccugugugagccucacuuccg

SEQ ID NO: 481732 - RNA, 32 nt, Human
guucuccacagugucuccaguggaaacuuguc

SEQ ID NO: 481733 - RNA, 32 nt, Human
guucuccacguucucaccuaagcccagagcaa

SEQ ID NO: 481734 - RNA, 21 nt, Human
guucuccagaaacagcuccgu

SEQ ID NO: 481735 - RNA, 32 nt, Human
guucuccagcugagcagcuuuccccaacgugg

SEQ ID NO: 481736 - RNA, 20 nt, Human
guucuccaggauccagaucc

SEQ ID NO: 481737 - RNA, 32 nt, Human
guucuccaguucuuuccgucucugccucucuc

SEQ ID NO: 481738 - RNA, 32 nt, Human
guucuccauauauucaauaaaaaccaauuuga

SEQ ID NO: 481739 - RNA, 32 nt, Human
guucuccaugccaguaucugggugugggucuc

SEQ ID NO: 481740 - RNA, 32 nt, Human
guucucccaaagugcugagauuacagguguga

SEQ ID NO: 481741 - RNA, 32 nt, Human
guucucccaaagugcugggauuacagguguga

SEQ ID NO: 481742 - RNA, 32 nt, Human
guucucccaaauaggagaccuggggccuggcc

SEQ ID NO: 481743 - RNA, 32 nt, Human
guucucccaacaacaugaaacugccuauucac

SEQ ID NO: 481744 - RNA, 32 nt, Human
guucucccagcuccucaccugggcuacuuccu

SEQ ID NO: 481745 - RNA, 26 nt, Human
guucucccauaaagaggaggaaaagg

SEQ ID NO: 481746 - RNA, 32 nt, Human
guucuccccagccacuguggucuacagauucc

SEQ ID NO: 481747 - RNA, 32 nt, Human
guucuccccagccgaaccucacgcccggcccc

SEQ ID NO: 481748 - RNA, 32 nt, Human
guucucccccagcaucacuaacaaauaugcuu

SEQ ID NO: 481749 - RNA, 18 nt, Human
guucuccccucugcugcc

SEQ ID NO: 481750 - RNA, 32 nt, Human
guucucccuccaggaaagggggaggagggacc

SEQ ID NO: 481751 - RNA, 32 nt, Human
guucucccuccaggggacacagcucccccucg

SEQ ID NO: 481752 - RNA, 32 nt, Human
guucucccuccccuccuacuucucucacacuc

SEQ ID NO: 481753 - RNA, 32 nt, Human
guucucccugcaacccaggcccugccauucuu

SEQ ID NO: 481754 - RNA, 32 nt, Human
guucucccugccccucagccugggggaagaag

SEQ ID NO: 481755 - RNA, 22 nt, Human
guucucccugucugaagaggga

SEQ ID NO: 481756 - RNA, 32 nt, Human
guucucccuuaagcaaccucacaaacaagccg

SEQ ID NO: 481757 - RNA, 32 nt, Human
guucucccuuucuccguccuucauggaagccc

SEQ ID NO: 481758 - RNA, 32 nt, Human
guucucccuuucucucuccucucugcuucaua

SEQ ID NO: 481759 - RNA, 32 nt, Human
guucuccgggccugaaugucuggggugcuugu

SEQ ID NO: 481760 - RNA, 32 nt, Human
guucuccguggccauuuggggauucaugccug

SEQ ID NO: 481761 - RNA, 21 nt, Human
guucuccuauuccucauaaag

SEQ ID NO: 481762 - RNA, 32 nt, Human
guucuccuccacuguuugaccaaauucucagu

SEQ ID NO: 481763 - RNA, 32 nt, Human
guucuccuccauugcuguuguugcagggaagu

SEQ ID NO: 481764 - RNA, 32 nt, Human
guucuccucccaucagcaagaagacaaaccga

SEQ ID NO: 481765 - RNA, 32 nt, Human
guucuccuccccugagcauccaugaagacccc

SEQ ID NO: 481766 - RNA, 32 nt, Human
guucuccucuaaaaggaaaccccaucccauua

SEQ ID NO: 481767 - RNA, 32 nt, Human
guucuccucuggacuggccacacccaccccau

SEQ ID NO: 481768 - RNA, 25 nt, Human
guucuccugacaccaggaaaagaga

SEQ ID NO: 481769 - RNA, 32 nt, Human
guucuccugagggaagaggaguggaguagggg

SEQ ID NO: 481770 - RNA, 32 nt, Human
guucuccugagugcucuagugucuccaguugu

SEQ ID NO: 481771 - RNA, 32 nt, Human
guucuccugcacuuccuccucauguagucugg

SEQ ID NO: 481772 - RNA, 19 nt, Human
guucuccugccccagccuc

SEQ ID NO: 481773 - RNA, 23 nt, Human
guucuccugccucagccuggcca

SEQ ID NO: 481774 - RNA, 32 nt, Human
guucuccugcugccuccugccugcugcagcug

SEQ ID NO: 481775 - RNA, 32 nt, Human
guucuccuggaagggagguuuuugcuuuaccc

SEQ ID NO: 481776 - RNA, 32 nt, Human
guucuccugucuccagauaccuaaaugaccuu

SEQ ID NO: 481777 - RNA, 32 nt, Human
guucuccuuacuccaucuccuccccaaacacg

SEQ ID NO: 481778 - RNA, 32 nt, Human
guucuccuucaccacagaacccaaaccucagg

SEQ ID NO: 481779 - RNA, 32 nt, Human
guucuccuuuagcccucuuccugggcaucacc

SEQ ID NO: 481780 - RNA, 23 nt, Human
guucuccuuugagguagggaagg

SEQ ID NO: 481781 - RNA, 32 nt, Human
guucucgaaacacacaaacucagagacacaga

SEQ ID NO: 481782 - RNA, 32 nt, Human
guucucgaauauuuaauaaaacugauauuauu

SEQ ID NO: 481783 - RNA, 32 nt, Human
guucucgcucaucugggcaggugguuuguccc

SEQ ID NO: 481784 - RNA, 32 nt, Human
guucucgcucccggccgccaucaugcuggcgc

SEQ ID NO: 481785 - RNA, 32 nt, Human
guucucggacucguuccuccuggaccagccca

SEQ ID NO: 481786 - RNA, 31 nt, Human
guucucggccaucuccugcuucugggaccug

SEQ ID NO: 481787 - RNA, 32 nt, Human
guucucgggauuagaaggacaagagcacuccc

SEQ ID NO: 481788 - RNA, 24 nt, Human
guucucgguauuucacaugcagcu

SEQ ID NO: 481789 - RNA, 32 nt, Human
guucucuacuaaaaauacaaaaauuagcuggg

SEQ ID NO: 481790 - RNA, 32 nt, Human
guucucuacuguuuucuuuguaauguaugacu

SEQ ID NO: 481791 - RNA, 32 nt, Human
guucucuagagcuguaaucugauuuguuguuu

SEQ ID NO: 481792 - RNA, 32 nt, Human
guucucuauacucagguaccucuuucaggguu

SEQ ID NO: 481793 - RNA, 32 nt, Human
guucucuaugcaagauggagagaggaugcacc

SEQ ID NO: 481794 - RNA, 32 nt, Human
guucucucaggcucccguucaggauuuuuaga

SEQ ID NO: 481795 - RNA, 32 nt, Human
guucucucauuuccaaaccaucagcugcuuuu

SEQ ID NO: 481796 - RNA, 32 nt, Human
guucucuccaaaucagagagcuacucaucucu

SEQ ID NO: 481797 - RNA, 32 nt, Human
guucucucccucucuccuucccagagcaauuu

SEQ ID NO: 481798 - RNA, 32 nt, Human
guucucuccugcaacccccacugcucagccuc

SEQ ID NO: 481799 - RNA, 32 nt, Human
guucucuccuuuucucucuuugccucacucuc

SEQ ID NO: 481800 - RNA, 32 nt, Human
guucucucuauauuuugcuauuuugcaaggga

SEQ ID NO: 481801 - RNA, 32 nt, Human
guucucucuggcaccagccgagcugcuucgug

SEQ ID NO: 481802 - RNA, 32 nt, Human
guucucucugugucccccucgcgggccccgca

SEQ ID NO: 481803 - RNA, 32 nt, Human
guucucucuuauuuucagcuuuacagacaaga

SEQ ID NO: 481804 - RNA, 32 nt, Human
guucucucuuccuuguccuccccuccuccacc

SEQ ID NO: 481805 - RNA, 32 nt, Human
guucucucuugcccaccuccccaagcuccuuu

SEQ ID NO: 481806 - RNA, 32 nt, Human
guucucugagagucaccugucccgccuggccc

SEQ ID NO: 481807 - RNA, 32 nt, Human
guucucugaggacaggauuuaauucgauggua

SEQ ID NO: 481808 - RNA, 32 nt, Human
guucucugaugcauacggccacugcagaugug

SEQ ID NO: 481809 - RNA, 32 nt, Human
guucucugcaugccccaggccauuucucccac

SEQ ID NO: 481810 - RNA, 32 nt, Human
guucucugccuugucucucuuugucuuaaaau

SEQ ID NO: 481811 - RNA, 32 nt, Human
guucucugcuccaggaacagagcugcugcucu

SEQ ID NO: 481812 - RNA, 32 nt, Human
guucucugcuuccagaaugagaagcuuugcug

SEQ ID NO: 481813 - RNA, 32 nt, Human
guucucuggaaacccauccauaugguugaagg

SEQ ID NO: 481814 - RNA, 32 nt, Human
guucucuggaaccugacuuuagauguuuuggg

SEQ ID NO: 481815 - RNA, 32 nt, Human
guucucugggccugagccuggggccaccccca

SEQ ID NO: 481816 - RNA, 32 nt, Human
guucucuguccccuagcacuagacucagcugu

SEQ ID NO: 481817 - RNA, 32 nt, Human
guucucuguccugccuugaagggaaggagacc

SEQ ID NO: 481818 - RNA, 32 nt, Human
guucucugucucacuguaaacuaguguucucu

SEQ ID NO: 481819 - RNA, 32 nt, Human
guucucugugagagucuggauuuucauuucug

SEQ ID NO: 481820 - RNA, 32 nt, Human
guucucugugugugugcacauaugcagaugua

SEQ ID NO: 481821 - RNA, 32 nt, Human
guucucuuagguugaguaacccacucugaauu

SEQ ID NO: 481822 - RNA, 32 nt, Human
guucucuucucccagcaggccucauugugugc

SEQ ID NO: 481823 - RNA, 32 nt, Human
guucucuucuccuguguucccuuugaguccag

SEQ ID NO: 481824 - RNA, 32 nt, Human
guucucuugcccaggcuggagugcaguggcac

SEQ ID NO: 481825 - RNA, 32 nt, Human
guucucuuggaaggcugcuuugcaguuuguau

SEQ ID NO: 481826 - RNA, 32 nt, Human
guucucuuguccacacagcucuuccaauaaag

SEQ ID NO: 481827 - RNA, 32 nt, Human
guucucuugucugucugucucugucuugaagc

SEQ ID NO: 481828 - RNA, 32 nt, Human
guucucuuguguccuauggaauccaguucuga

SEQ ID NO: 481829 - RNA, 32 nt, Human
guucucuuguguuguuuuuccuuuuuaaaccc

SEQ ID NO: 481830 - RNA, 32 nt, Human
guucucuuuccauuugccucccccucuucagc

SEQ ID NO: 481831 - RNA, 32 nt, Human
guucugaaagcccauucccugcucugcggcuc

SEQ ID NO: 481832 - RNA, 32 nt, Human
guucugaagggcugccggcuuccuucugggau

SEQ ID NO: 481833 - RNA, 32 nt, Human
guucugaauaccuucagguuccuggccucccu

SEQ ID NO: 481834 - RNA, 32 nt, Human
guucugaaucaggauguugacacuucuugguu

SEQ ID NO: 481835 - RNA, 30 nt, Human
guucugaaucauguagauacauggcaggua

SEQ ID NO: 481836 - RNA, 32 nt, Human
guucugaauguucacauugcuuuaccaguuug

SEQ ID NO: 481837 - RNA, 32 nt, Human
guucugaauuuaaaggaugaaaaaccuccauu

SEQ ID NO: 481838 - RNA, 32 nt, Human
guucugacuggcagggggagaaaguaaacaga

SEQ ID NO: 481839 - RNA, 32 nt, Human
guucugagacaugucacuuggcaauuucauca

SEQ ID NO: 481840 - RNA, 32 nt, Human
guucugagaucuagucccucucugauucacuu

SEQ ID NO: 481841 - RNA, 31 nt, Human
guucugaggagaccugcacuugagaacaaaa

SEQ ID NO: 481842 - RNA, 32 nt, Human
guucugaggccugguuugcucuuaauuaauau

SEQ ID NO: 481843 - RNA, 32 nt, Human
guucugaggccuugggauuagccucuuccuca

SEQ ID NO: 481844 - RNA, 32 nt, Human
guucugagggacaggcuugagaucggcugaag

SEQ ID NO: 481845 - RNA, 32 nt, Human
guucugagggcagcuaaggagcuguuuauucc

SEQ ID NO: 481846 - RNA, 32 nt, Human
guucugagggcuuaugccgggugcaggcuuuc

SEQ ID NO: 481847 - RNA, 23 nt, Human
guucugaggggauucccagccuc

SEQ ID NO: 481848 - RNA, 32 nt, Human
guucugaguagcugggauuagaggcgugugcc

SEQ ID NO: 481849 - RNA, 32 nt, Human
guucugauaaaaucaguccagcacuuuuagaa

SEQ ID NO: 481850 - RNA, 32 nt, Human
guucugaucuucucauucugguugaguaccug

SEQ ID NO: 481851 - RNA, 32 nt, Human
guucugaugaaacugaaacaggaggugauugu

SEQ ID NO: 481852 - RNA, 32 nt, Human
guucugauugugugugggauugcauggugucc

SEQ ID NO: 481853 - RNA, 32 nt, Human
guucugcacaguacuguccuccagagagggug

SEQ ID NO: 481854 - RNA, 32 nt, Human
guucugcaccaaacccacacuugagugauggg

SEQ ID NO: 481855 - RNA, 32 nt, Human
guucugcacgaggcugggccugccucacucuc

SEQ ID NO: 481856 - RNA, 25 nt, Human
guucugcacugccccuuggccugug

SEQ ID NO: 481857 - RNA, 32 nt, Human
guucugcagggccuuccuccuccagguugggu

SEQ ID NO: 481858 - RNA, 17 nt, Human
guucugcagggcugcuc

SEQ ID NO: 481859 - RNA, 32 nt, Human
guucugcagggugucagcuccaggacccacag

SEQ ID NO: 481860 - RNA, 32 nt, Human
guucugcauggcuggggaagccucaggaaucu

SEQ ID NO: 481861 - RNA, 32 nt, Human
guucugcauggcuggggaggccucacaaucau

SEQ ID NO: 481862 - RNA, 32 nt, Human
guucugcauuccccaccaccucccaggauggc

SEQ ID NO: 481863 - RNA, 32 nt, Human
guucugccacuuccugucccuggggagccacu

SEQ ID NO: 481864 - RNA, 32 nt, Human
guucugccacuugcacugugcuugcuccuaag

SEQ ID NO: 481865 - RNA, 32 nt, Human
guucugccagggcuccccucccugccuguccc

SEQ ID NO: 481866 - RNA, 32 nt, Human
guucugccaucucugguuaagaugggcucacc

SEQ ID NO: 481867 - RNA, 32 nt, Human
guucugccgcuucuccccugauggccaccucu

SEQ ID NO: 481868 - RNA, 32 nt, Human
guucugccuccuggccaagcaggcugguuugc

SEQ ID NO: 481869 - RNA, 32 nt, Human
guucugccucucaaacuccugaccucaaguaa

SEQ ID NO: 481870 - RNA, 32 nt, Human
guucugccugccaggccagcugucucccagcc

SEQ ID NO: 481871 - RNA, 32 nt, Human
guucugccugggcauguaggggagguguuuuu

SEQ ID NO: 481872 - RNA, 21 nt, Human
guucugccugucugaaagguu

SEQ ID NO: 481873 - RNA, 32 nt, Human
guucugccuuacaguacaugcaggugggaguc

SEQ ID NO: 481874 - RNA, 32 nt, Human
guucugccuugccugugagcuaugucacuccc

SEQ ID NO: 481875 - RNA, 32 nt, Human
guucugccuuucugaucaaucuuuuggguuca

SEQ ID NO: 481876 - RNA, 32 nt, Human
guucugcggcuggagugggugggugcagcaac

SEQ ID NO: 481877 - RNA, 32 nt, Human
guucugcguaccccucuccagugucaaccugg

SEQ ID NO: 481878 - RNA, 32 nt, Human
guucugcuacuccccagaccucagggacaacu

SEQ ID NO: 481879 - RNA, 32 nt, Human
guucugcuaggaagaaggggagcagguggugc

SEQ ID NO: 481880 - RNA, 32 nt, Human
guucugcucagaccauaggaggccaacccaaa

SEQ ID NO: 481881 - RNA, 32 nt, Human
guucugcuccaaucagaauuuugccuuaccuu

SEQ ID NO: 481882 - RNA, 32 nt, Human
guucugcucuccccaucaucuuugugcaaggc

SEQ ID NO: 481883 - RNA, 32 nt, Human
guucugcucuguggaucaucccauggaaguuu

SEQ ID NO: 481884 - RNA, 32 nt, Human
guucugcugcaccaagugauuuuuaagcccca

SEQ ID NO: 481885 - RNA, 32 nt, Human
guucugcugcccaagcuggaguggcaguggca

SEQ ID NO: 481886 - RNA, 32 nt, Human
guucugcugcccagguuggagugcaguggcac

SEQ ID NO: 481887 - RNA, 32 nt, Human
guucugcuggacugagcugguugccucauguu

SEQ ID NO: 481888 - RNA, 32 nt, Human
guucugcugggaagggaagggaauggggagaa

SEQ ID NO: 481889 - RNA, 32 nt, Human
guucugcuggggccaugaaggcagaagguuua

SEQ ID NO: 481890 - RNA, 32 nt, Human
guucugcugucucccugaagagugaacccucu

SEQ ID NO: 481891 - RNA, 32 nt, Human
guucugcuguuugguugcugaagggggucagu

SEQ ID NO: 481892 - RNA, 32 nt, Human
guucugcuucugcuucucucugcuccacuguc

SEQ ID NO: 481893 - RNA, 23 nt, Human
guucugcuuggcaguaguuauua

SEQ ID NO: 481894 - RNA, 32 nt, Human
guucugcuugugggcgggccugucuuucacca

SEQ ID NO: 481895 - RNA, 32 nt, Human
guucugcuuugcuguuugucuuccuaguuaag

SEQ ID NO: 481896 - RNA, 32 nt, Human
guucuggaagaaacagaucuccuggcaaaggc

SEQ ID NO: 481897 - RNA, 32 nt, Human
guucuggaaggaugacaucacccaggaugcaa

SEQ ID NO: 481898 - RNA, 32 nt, Human
guucuggacuguguucugggccugcugaggau

SEQ ID NO: 481899 - RNA, 32 nt, Human
guucuggagaaagacgaccacugugggccuuu

SEQ ID NO: 481900 - RNA, 32 nt, Human
guucuggagagggacaaggagaggaggagacu

SEQ ID NO: 481901 - RNA, 32 nt, Human
guucuggaggaaagggaggaguggaggugggc

SEQ ID NO: 481902 - RNA, 32 nt, Human
guucuggaggccccugaacagagggcuauggc

SEQ ID NO: 481903 - RNA, 32 nt, Human
guucuggaggcgacugcugggccuccugccug

SEQ ID NO: 481904 - RNA, 32 nt, Human
guucuggaggcuggaagucccggaucaaggug

SEQ ID NO: 481905 - RNA, 32 nt, Human
guucuggagguuggagguuccgcucagugaca

SEQ ID NO: 481906 - RNA, 32 nt, Human
guucuggaugaaaagagcaggaguaacaauug

SEQ ID NO: 481907 - RNA, 32 nt, Human
guucuggaugccaaaugagacuguguguaaau

SEQ ID NO: 481908 - RNA, 32 nt, Human
guucuggccaggagcuggaggagcaggcagug

SEQ ID NO: 481909 - RNA, 32 nt, Human
guucuggccccuuggauuuaaaaauaaaauua

SEQ ID NO: 481910 - RNA, 32 nt, Human
guucuggcccuuggcugugcucuccuuagccu

SEQ ID NO: 481911 - RNA, 32 nt, Human
guucuggccuaacagcagacuugcuguuuuca

SEQ ID NO: 481912 - RNA, 32 nt, Human
guucuggccuaggugggcucuagaaccauuua

SEQ ID NO: 481913 - RNA, 32 nt, Human
guucugggaaguugaaaguggggaaugaagag

SEQ ID NO: 481914 - RNA, 32 nt, Human
guucugggagugagaggcccacaggcaggaag

SEQ ID NO: 481915 - RNA, 32 nt, Human
guucugggccagcccauugcucugggcuguuu

SEQ ID NO: 481916 - RNA, 32 nt, Human
guucugggccaggucccagcuugagcugccuc

SEQ ID NO: 481917 - RNA, 32 nt, Human
guucugggcucaggcaggagggcgggguccca

SEQ ID NO: 481918 - RNA, 32 nt, Human
guucugggcuguagugcacugugcugauccac

SEQ ID NO: 481919 - RNA, 32 nt, Human
guucuggggcauaggaaacacauacacuucca

SEQ ID NO: 481920 - RNA, 32 nt, Human
guucuggggccccuuggcaguaccauggagca

SEQ ID NO: 481921 - RNA, 32 nt, Human
guucuggggcugagcagcuaggaagcuaggaa

SEQ ID NO: 481922 - RNA, 32 nt, Human
guucuggggugagggucuagugccagggaugg

SEQ ID NO: 481923 - RNA, 32 nt, Human
guucuggguccuggagugcaggccugucaacu

SEQ ID NO: 481924 - RNA, 32 nt, Human
guucugggugaggcaggagcugggaggggugg

SEQ ID NO: 481925 - RNA, 32 nt, Human
guucuggguggaagcagcggugccgcggaggg

SEQ ID NO: 481926 - RNA, 32 nt, Human
guucuggguggggguagaaugagguggggugg

SEQ ID NO: 481927 - RNA, 32 nt, Human
guucuggucagaauggaagugguggccuccac

SEQ ID NO: 481928 - RNA, 32 nt, Human
guucuggugaaacagacuuacacuucuucaga

SEQ ID NO: 481929 - RNA, 32 nt, Human
guucuggugauggcuggcucugguucauacau

SEQ ID NO: 481930 - RNA, 23 nt, Human
guucugguggugggaagggaggc

SEQ ID NO: 481931 - RNA, 32 nt, Human
guucuggugucaacuccagcgucggcacaggc

SEQ ID NO: 481932 - RNA, 32 nt, Human
guucugguuggggccaggcaugguggcucacg

SEQ ID NO: 481933 - RNA, 32 nt, Human
guucuguaaaauauuagaacgcuuuguuuuac

SEQ ID NO: 481934 - RNA, 32 nt, Human
guucuguaacccaggcuggagugcaguggccu

SEQ ID NO: 481935 - RNA, 32 nt, Human
guucuguacagagagagaugcagcaggggcgg

SEQ ID NO: 481936 - RNA, 32 nt, Human
guucuguacaguuuaggaaauagaggcuuuca

SEQ ID NO: 481937 - RNA, 32 nt, Human
guucuguacuaaggaacaacauucccuuugaa

SEQ ID NO: 481938 - RNA, 32 nt, Human
guucuguacuuuucgagagaagggaauaggga

SEQ ID NO: 481939 - RNA, 32 nt, Human
guucuguaggagagacuggccagaggcagcua

SEQ ID NO: 481940 - RNA, 32 nt, Human
guucuguaggcucugugacaucuuugguuuau

SEQ ID NO: 481941 - RNA, 32 nt, Human
guucugucaaccaggcuagaaugcagcggugc

SEQ ID NO: 481942 - RNA, 32 nt, Human
guucugucacccaggcuggagugcagugacuc

SEQ ID NO: 481943 - RNA, 32 nt, Human
guucugucacccaggcuggagugcaguggcac

SEQ ID NO: 481944 - RNA, 32 nt, Human
guucugucacccaggcuggagugcaguggugu

SEQ ID NO: 481945 - RNA, 32 nt, Human
guucugucacccaggcuggcgugcaauaguuc

SEQ ID NO: 481946 - RNA, 32 nt, Human
guucugucacccaggcuggggugcaguggcgu

SEQ ID NO: 481947 - RNA, 32 nt, Human
guucugucaccuaggcuggaaugcaguggugc

SEQ ID NO: 481948 - RNA, 32 nt, Human
guucugucaccuaggguggagugcaguggcac

SEQ ID NO: 481949 - RNA, 32 nt, Human
guucugucacucaggcuggaguacaguggugc

SEQ ID NO: 481950 - RNA, 32 nt, Human
guucugucagugaauggauaaucuaugugcuu

SEQ ID NO: 481951 - RNA, 32 nt, Human
guucugucaucaauggaguguauucuuguaau

SEQ ID NO: 481952 - RNA, 32 nt, Human
guucuguccccgaggccggagugcaauggcgu

SEQ ID NO: 481953 - RNA, 32 nt, Human
guucuguccuacuucugacuuuacuuguggug

SEQ ID NO: 481954 - RNA, 32 nt, Human
guucugucgcccaggcuggagugcaggggcau

SEQ ID NO: 481955 - RNA, 32 nt, Human
guucugucgcccaggcuggcgugcaguggcgc

SEQ ID NO: 481956 - RNA, 32 nt, Human
guucugucgcccuggcuggaguggaaugccgu

SEQ ID NO: 481957 - RNA, 32 nt, Human
guucugucgcuuagcuggagugcgguggcgug

SEQ ID NO: 481958 - RNA, 32 nt, Human
guucugucguccaggcuggagugcaguggugu

SEQ ID NO: 481959 - RNA, 32 nt, Human
guucugucguccaggcuggagugcgguggcgu

SEQ ID NO: 481960 - RNA, 32 nt, Human
guucugucuacaauaagacacagacuuuugac

SEQ ID NO: 481961 - RNA, 32 nt, Human
guucugucucagaggacaaaaggccugggagc

SEQ ID NO: 481962 - RNA, 32 nt, Human
guucugucucccaggcugaagugcagugaguc

SEQ ID NO: 481963 - RNA, 32 nt, Human
guucugucuguccgugcaccgaugcacacacc

SEQ ID NO: 481964 - RNA, 32 nt, Human
guucugucuguccgugcaccgaugcauacacc

SEQ ID NO: 481965 - RNA, 32 nt, Human
guucugucuuuuccuugacuaauuguagaacu

SEQ ID NO: 481966 - RNA, 32 nt, Human
guucugugaaaucccgcucaccuccuggaggg

SEQ ID NO: 481967 - RNA, 32 nt, Human
guucugugaacaaguccaugcugccaucaagg

SEQ ID NO: 481968 - RNA, 32 nt, Human
guucugugaacugguccaaggagguucuguua

SEQ ID NO: 481969 - RNA, 32 nt, Human
guucugugacagcagagcaugaccuuaagggu

SEQ ID NO: 481970 - RNA, 32 nt, Human
guucugugacauccuuugcucucugaccaacu

SEQ ID NO: 481971 - RNA, 32 nt, Human
guucugugagcuaugggaaggccauugguugu

SEQ ID NO: 481972 - RNA, 32 nt, Human
guucugugcaugccauuagaggagcugaaguu

SEQ ID NO: 481973 - RNA, 32 nt, Human
guucugugccuguaaacauagauucgcuuucc

SEQ ID NO: 481974 - RNA, 32 nt, Human
guucuguggcccuggcuggaguucaguggugu

SEQ ID NO: 481975 - RNA, 32 nt, Human
guucugugucagcacccaggacaguggugucu

SEQ ID NO: 481976 - RNA, 32 nt, Human
guucugugucaugguuggaagacagaguagga

SEQ ID NO: 481977 - RNA, 29 nt, Human
guucugugucugucugucaccuggucacg

SEQ ID NO: 481978 - RNA, 32 nt, Human
guucugugucugugcuccuccuucccucucag

SEQ ID NO: 481979 - RNA, 32 nt, Human
guucuguguggguggucacaggagggugugag

SEQ ID NO: 481980 - RNA, 23 nt, Human
guucuguguucuccccgcccgug

SEQ ID NO: 481981 - RNA, 32 nt, Human
guucuguuaauguggcuuaguacauugauuua

SEQ ID NO: 481982 - RNA, 20 nt, Human
guucuguuagcucaccauag

SEQ ID NO: 481983 - RNA, 32 nt, Human
guucuguuccaaccuccugcucugggaggugg

SEQ ID NO: 481984 - RNA, 32 nt, Human
guucuguuccaugucuguguuguggacauucc

SEQ ID NO: 481985 - RNA, 32 nt, Human
guucuguucuuucuuguguugccauguuacua

SEQ ID NO: 481986 - RNA, 32 nt, Human
guucuguugcccaggagggagugcaguggugc

SEQ ID NO: 481987 - RNA, 32 nt, Human
guucuguugcccaggcaagagugcagugguau

SEQ ID NO: 481988 - RNA, 32 nt, Human
guucuguugccuaggccagagugcaguggcau

SEQ ID NO: 481989 - RNA, 32 nt, Human
guucuguugccugggcuggagugcaguggcau

SEQ ID NO: 481990 - RNA, 32 nt, Human
guucuguugccugggcuggagugcaguggcgu

SEQ ID NO: 481991 - RNA, 32 nt, Human
guucuguuguccaggauggagugcagugguug

SEQ ID NO: 481992 - RNA, 32 nt, Human
guucuguugugaugcuaauuucucagaugagg

SEQ ID NO: 481993 - RNA, 32 nt, Human
guucuguuucccaggcuggagugcaguggugg

SEQ ID NO: 481994 - RNA, 32 nt, Human
guucuguuucugugcugaucuggaccaucuuu

SEQ ID NO: 481995 - RNA, 32 nt, Human
guucuguuuuaagccucagaaaaugaacuaag

SEQ ID NO: 481996 - RNA, 32 nt, Human
guucuuaaaauguguauuuccuaacaacagag

SEQ ID NO: 481997 - RNA, 32 nt, Human
guucuuaaagguaguguacaccagguuuuuac

SEQ ID NO: 481998 - RNA, 32 nt, Human
guucuuaccauguuggccaggcuggucucaaa

SEQ ID NO: 481999 - RNA, 21 nt, Human
guucuuacccacaagcaccac

SEQ ID NO: 482000 - RNA, 32 nt, Human
guucuuaccugggaaccuaauuccccagaagc

SEQ ID NO: 482001 - RNA, 32 nt, Human
guucuuacugccugugacgaugcagcuacagc

SEQ ID NO: 482002 - RNA, 32 nt, Human
guucuuacuugcauucccacugccuuucaugg

SEQ ID NO: 482003 - RNA, 32 nt, Human
guucuuagacaccuguaugauuuucuaaaguu

SEQ ID NO: 482004 - RNA, 32 nt, Human
guucuuagcuuguuugaugaggaagaggauaa

SEQ ID NO: 482005 - RNA, 32 nt, Human
guucuuaggacuccaguccaggcuggacggcu

SEQ ID NO: 482006 - RNA, 32 nt, Human
guucuuagucucuuuccaucugugucuuggcu

SEQ ID NO: 482007 - RNA, 32 nt, Human
guucuuaguguucacaacuuccauaagauacu

SEQ ID NO: 482008 - RNA, 23 nt, Human
guucuuauuuuaaagaaagguug

SEQ ID NO: 482009 - RNA, 32 nt, Human
guucuucaaccagcaacagcaacagcuaggga

SEQ ID NO: 482010 - RNA, 32 nt, Human
guucuucaagaacuuucucugccaucaacuac

SEQ ID NO: 482011 - RNA, 32 nt, Human
guucuucaagcaucgugucacugugaaauccu

SEQ ID NO: 482012 - RNA, 32 nt, Human
guucuucaccacccuccaaguccucugaccua

SEQ ID NO: 482013 - RNA, 32 nt, Human
guucuucaccauguuugucaccagcagggccu

SEQ ID NO: 482014 - RNA, 32 nt, Human
guucuucaggagaaagcuuacaguguuucagg

SEQ ID NO: 482015 - RNA, 32 nt, Human
guucuucaggguggguggcagggggauauagu

SEQ ID NO: 482016 - RNA, 32 nt, Human
guucuucauaggagagcaacuguaggugauca

SEQ ID NO: 482017 - RNA, 32 nt, Human
guucuucauggcguccccaccuccucugugag

SEQ ID NO: 482018 - RNA, 32 nt, Human
guucuucauuuuuaaagaaggaagggucauau

SEQ ID NO: 482019 - RNA, 32 nt, Human
guucuuccacaaaggcagccagugcucaccug

SEQ ID NO: 482020 - RNA, 32 nt, Human
guucuuccauucuggcaggcuuggggaccugg

SEQ ID NO: 482021 - RNA, 32 nt, Human
guucuucccuuuccucugcuguuuccuucuug

SEQ ID NO: 482022 - RNA, 31 nt, Human
guucuuccgccuccuuucccugugucauacu

SEQ ID NO: 482023 - RNA, 32 nt, Human
guucuuccuaaaggucaugcagcugguggugg

SEQ ID NO: 482024 - RNA, 32 nt, Human
guucuuccuccaccuccacccagugaucccaa

SEQ ID NO: 482025 - RNA, 32 nt, Human
guucuuccucucucaacauccauaucaaguug

SEQ ID NO: 482026 - RNA, 20 nt, Human
guucuuccugcaauacagug

SEQ ID NO: 482027 - RNA, 32 nt, Human
guucuuccugcccuuuccuuccuuccuuuucu

SEQ ID NO: 482028 - RNA, 32 nt, Human
guucuuccuucacaaccuucugagccuucuuu

SEQ ID NO: 482029 - RNA, 32 nt, Human
guucuucuagugggugagugcagagagagaag

SEQ ID NO: 482030 - RNA, 32 nt, Human
guucuucuaugcucccuccuucuugcugccuc

SEQ ID NO: 482031 - RNA, 32 nt, Human
guucuucuccauccucaauuuugccacuuuca

SEQ ID NO: 482032 - RNA, 32 nt, Human
guucuucucucccuuuuuccccuuccaggaag

SEQ ID NO: 482033 - RNA, 32 nt, Human
guucuucugaaagugugacaguguccagccgg

SEQ ID NO: 482034 - RNA, 32 nt, Human
guucuucuggcugcccggcugcagagagcuga

SEQ ID NO: 482035 - RNA, 32 nt, Human
guucuucuguaucccgggaaaaguacgcucgg

SEQ ID NO: 482036 - RNA, 32 nt, Human
guucuucuguugacccagacgaauagggcaca

SEQ ID NO: 482037 - RNA, 32 nt, Human
guucuucuuaccuugccuguaaaacaaaaccu

SEQ ID NO: 482038 - RNA, 22 nt, Human
guucuucuugcucuggaucccc

SEQ ID NO: 482039 - RNA, 32 nt, Human
guucuugaaaacuuguacuucaagagaaauga

SEQ ID NO: 482040 - RNA, 32 nt, Human
guucuugaacaccacucugauucuccaaggac

SEQ ID NO: 482041 - RNA, 32 nt, Human
guucuugaacaccacugugauucuccaaggac

SEQ ID NO: 482042 - RNA, 32 nt, Human
guucuugaacagaaugaaaucacaucuccauu

SEQ ID NO: 482043 - RNA, 32 nt, Human
guucuugacccgaggucgcccugaaggugucg

SEQ ID NO: 482044 - RNA, 32 nt, Human
guucuugaucugcuccuucuccugggugcgca

SEQ ID NO: 482045 - RNA, 32 nt, Human
guucuugcaacaaauucugcaugguccagcgc

SEQ ID NO: 482046 - RNA, 32 nt, Human
guucuugcauccuauacuggauaagccuguuu

SEQ ID NO: 482047 - RNA, 22 nt, Human
guucuugcauccucagccugug

SEQ ID NO: 482048 - RNA, 30 nt, Human
guucuugcaugacaaucagagggacacgga

SEQ ID NO: 482049 - RNA, 32 nt, Human
guucuugccccaggguuaggcaccccaaagau

SEQ ID NO: 482050 - RNA, 17 nt, Human
guucuugcccugagcca

SEQ ID NO: 482051 - RNA, 32 nt, Human
guucuugccguggcucuuccuccucccucagc

SEQ ID NO: 482052 - RNA, 32 nt, Human
guucuuggcaccucucuaccagaaagauauca

SEQ ID NO: 482053 - RNA, 32 nt, Human
guucuuggccuaccuaauggcccugaggauca

SEQ ID NO: 482054 - RNA, 32 nt, Human
guucuuggccugggccuguugcuuuugagccc

SEQ ID NO: 482055 - RNA, 32 nt, Human
guucuugggagagaggggaagagucgggacuu

SEQ ID NO: 482056 - RNA, 32 nt, Human
guucuugggcuagguaguggggaccaaguuca

SEQ ID NO: 482057 - RNA, 31 nt, Human
guucuuggggcugcucccaugcagacaggau

SEQ ID NO: 482058 - RNA, 32 nt, Human
guucuuggucucacugacuucaagaaugaagc

SEQ ID NO: 482059 - RNA, 32 nt, Human
guucuuggugucugcuuucucagauuccaagg

SEQ ID NO: 482060 - RNA, 32 nt, Human
guucuugguucugggauuuucuuaauuggguc

SEQ ID NO: 482061 - RNA, 32 nt, Human
guucuuguccaucaguucauacugcaauuuua

SEQ ID NO: 482062 - RNA, 32 nt, Human
guucuugucccccaggcuugagugcaaugacu

SEQ ID NO: 482063 - RNA, 32 nt, Human
guucuugucugcuggagguggcauuaccugug

SEQ ID NO: 482064 - RNA, 32 nt, Human
guucuuguguaccucauugcuuuagcugguca

SEQ ID NO: 482065 - RNA, 32 nt, Human
guucuuguguugucagcuucugaccucuugau

SEQ ID NO: 482066 - RNA, 32 nt, Human
guucuuguuaauacagucauuccauggaauua

SEQ ID NO: 482067 - RNA, 32 nt, Human
guucuuguugcccaaccuggagugcaguggug

SEQ ID NO: 482068 - RNA, 32 nt, Human
guucuuguugcccaggcugcagugcaauggca

SEQ ID NO: 482069 - RNA, 32 nt, Human
guucuuguugcccaggcuggaaugcaauggcg

SEQ ID NO: 482070 - RNA, 32 nt, Human
guucuuuaccuggcucugcuuccagcaguauu

SEQ ID NO: 482071 - RNA, 32 nt, Human
guucuuucacuuguaaguuucagucauuuucu

SEQ ID NO: 482072 - RNA, 32 nt, Human
guucuuucauuucccccuuccccauuccuuua

SEQ ID NO: 482073 - RNA, 32 nt, Human
guucuuucauuuccuccagcacuuucuuuccg

SEQ ID NO: 482074 - RNA, 27 nt, Human
guucuuucccugcuuaaugaaaagcuu

SEQ ID NO: 482075 - RNA, 32 nt, Human
guucuuuccuagccaccuuucuagccucccac

SEQ ID NO: 482076 - RNA, 32 nt, Human
guucuuucgggaccggcaggagcugcuacagc

SEQ ID NO: 482077 - RNA, 32 nt, Human
guucuuucuagcaucucuccccacccucugag

SEQ ID NO: 482078 - RNA, 32 nt, Human
guucuuucuccucugugccccucaugcugauc

SEQ ID NO: 482079 - RNA, 32 nt, Human
guucuuucugagaaacuggagaugucuuguua

SEQ ID NO: 482080 - RNA, 32 nt, Human
guucuuucuuucuccauccacuggcugaaugg

SEQ ID NO: 482081 - RNA, 32 nt, Human
guucuuugacaagaaaaguugagaggacuuua

SEQ ID NO: 482082 - RNA, 32 nt, Human
guucuuugagacaaauuuccucuuggcauuua

SEQ ID NO: 482083 - RNA, 20 nt, Human
guucuuugcccccugucuca

SEQ ID NO: 482084 - RNA, 32 nt, Human
guucuuugcucuucugaguucuugguggcuaa

SEQ ID NO: 482085 - RNA, 32 nt, Human
guucuuugcugcauucugccucucuaggacca

SEQ ID NO: 482086 - RNA, 32 nt, Human
guucuuuggagggaaaacuuugcugaauuguu

SEQ ID NO: 482087 - RNA, 32 nt, Human
guucuuugggguuuuuguuuguuuucccccau

SEQ ID NO: 482088 - RNA, 32 nt, Human
guucuuuucaaggcuccagucaccgcagcagu

SEQ ID NO: 482089 - RNA, 32 nt, Human
guucuuuucccaggauggcuccaggauaagga

SEQ ID NO: 482090 - RNA, 32 nt, Human
guucuuuuccuuacacgcaaaacauuuuuaac

SEQ ID NO: 482091 - RNA, 32 nt, Human
guucuuuuccuuccuuccuuccuuccucccuu

SEQ ID NO: 482092 - RNA, 32 nt, Human
guucuuuucucaaguccugcugcccaggccca

SEQ ID NO: 482093 - RNA, 32 nt, Human
guucuuuugacagccgugagcuuccccgccag

SEQ ID NO: 482094 - RNA, 32 nt, Human
guucuuuugccuagguuggaguacagcgguga

SEQ ID NO: 482095 - RNA, 32 nt, Human
guucuuuugccucccauagccucuugcuuuuc

SEQ ID NO: 482096 - RNA, 32 nt, Human
guucuuuugugccagcucuguaugauguuugu

SEQ ID NO: 482097 - RNA, 32 nt, Human
guucuuuuuaacauguaguuaugaaaaucucc

SEQ ID NO: 482098 - RNA, 32 nt, Human
guucuuuuuccucuuggcauuuccuaauaaca

SEQ ID NO: 482099 - RNA, 32 nt, Human
guucuuuuugccuaggcuggagugcaguggua

SEQ ID NO: 482100 - RNA, 32 nt, Human
guucuuuuugccucagaaccucuccuucagga

SEQ ID NO: 482101 - RNA, 32 nt, Human
guucuuuuugcuauuucuccaggcuuugccug

SEQ ID NO: 482102 - RNA, 22 nt, Human
guugaaaaaaggcagagcaggg

SEQ ID NO: 482103 - RNA, 32 nt, Human
guugaaaacuccagaaauacaucacccaaggu

SEQ ID NO: 482104 - RNA, 32 nt, Human
guugaaaacuuaguauaugacacagaaagaaa

SEQ ID NO: 482105 - RNA, 32 nt, Human
guugaaaagaaagaagaaggaggcggaaaucu

SEQ ID NO: 482106 - RNA, 32 nt, Human
guugaaaagucaggaauaaauuuguugaaaau

SEQ ID NO: 482107 - RNA, 32 nt, Human
guugaaaaucuacaauauaugcugcauuuaau

SEQ ID NO: 482108 - RNA, 32 nt, Human
guugaaaauguccuuugugggggagaacucag

SEQ ID NO: 482109 - RNA, 21 nt, Human
guugaaacauuauucaggcug

SEQ ID NO: 482110 - RNA, 32 nt, Human
guugaaaccaacacaacguugaaauccaggcu

SEQ ID NO: 482111 - RNA, 32 nt, Human
guugaaaccacuucauuggacauguugcaaua

SEQ ID NO: 482112 - RNA, 32 nt, Human
guugaaacccuccucugccagccugggguccu

SEQ ID NO: 482113 - RNA, 32 nt, Human
guugaaaccucuggaaguacagaagggaaggg

SEQ ID NO: 482114 - RNA, 32 nt, Human
guugaaaccugcugggacuuuuuagccauucu

SEQ ID NO: 482115 - RNA, 32 nt, Human
guugaaacuucaaacaacaggacccauaugga

SEQ ID NO: 482116 - RNA, 32 nt, Human
guugaaagaaccaggccagacaugguggcuca

SEQ ID NO: 482117 - RNA, 32 nt, Human
guugaaagaagauuaggggaaaagaggucacc

SEQ ID NO: 482118 - RNA, 32 nt, Human
guugaaaggaagcucaauccaacucucagaca

SEQ ID NO: 482119 - RNA, 32 nt, Human
guugaaaggagagaccaauauuugugacaugg

SEQ ID NO: 482120 - RNA, 32 nt, Human
guugaaagggagcaaugacaugggggacaguu

SEQ ID NO: 482121 - RNA, 32 nt, Human
guugaaaugccuuucaaccauuuccuucugug

SEQ ID NO: 482122 - RNA, 32 nt, Human
guugaaauggucuuucucccuuccucagagag

SEQ ID NO: 482123 - RNA, 32 nt, Human
guugaacaacggccaggcacaguggcucaugc

SEQ ID NO: 482124 - RNA, 30 nt, Human
guugaacagucucgaucagaaaggcauuug

SEQ ID NO: 482125 - RNA, 32 nt, Human
guugaacauacaaacaaguccagguuuuucau

SEQ ID NO: 482126 - RNA, 32 nt, Human
guugaacaucacugauuccugaccugcagcac

SEQ ID NO: 482127 - RNA, 32 nt, Human
guugaaccagccuugcauucaugguauaaauc

SEQ ID NO: 482128 - RNA, 32 nt, Human
guugaaccaguguggccgagguugcagugagu

SEQ ID NO: 482129 - RNA, 32 nt, Human
guugaacccaggaggcggagguugcagugagc

SEQ ID NO: 482130 - RNA, 32 nt, Human
guugaacccaggagguggagguugcagugagc

SEQ ID NO: 482131 - RNA, 32 nt, Human
guugaacccgggaggcggagguugcagugagc

SEQ ID NO: 482132 - RNA, 32 nt, Human
guugaacccgggagguggagguugcagugagc

SEQ ID NO: 482133 - RNA, 32 nt, Human
guugaacccguguggcagagguugcggugagu

SEQ ID NO: 482134 - RNA, 32 nt, Human
guugaaccugggaggcggagguugcagugagc

SEQ ID NO: 482135 - RNA, 32 nt, Human
guugaaccugggaggcggagguugugaugagc

SEQ ID NO: 482136 - RNA, 32 nt, Human
guugaaccugggagguggagguugaggugagc

SEQ ID NO: 482137 - RNA, 32 nt, Human
guugaaccugggccagcuccuugaggacacag

SEQ ID NO: 482138 - RNA, 32 nt, Human
guugaaccuguggcuaggggaagacauugucu

SEQ ID NO: 482139 - RNA, 32 nt, Human
guugaacgugggaggcggagguugcagugagc

SEQ ID NO: 482140 - RNA, 32 nt, Human
guugaacucuacugugucaggccagccugagu

SEQ ID NO: 482141 - RNA, 32 nt, Human
guugaagaaagccaugugggagcucagcaaau

SEQ ID NO: 482142 - RNA, 32 nt, Human
guugaagaauagaguuaggcaccagaagaaga

SEQ ID NO: 482143 - RNA, 32 nt, Human
guugaagaauguaaacuccaaauguuuacagc

SEQ ID NO: 482144 - RNA, 32 nt, Human
guugaagaccagccuggccaacauggugaaac

SEQ ID NO: 482145 - RNA, 32 nt, Human
guugaagaccagccugggcaacauagugagaa

SEQ ID NO: 482146 - RNA, 32 nt, Human
guugaagaccaguucugaggugaagcugggca

SEQ ID NO: 482147 - RNA, 32 nt, Human
guugaagagacacaggccacacauuucaggcu

SEQ ID NO: 482148 - RNA, 32 nt, Human
guugaagagacagagacaaguaauuucagugu

SEQ ID NO: 482149 - RNA, 32 nt, Human
guugaagagggcugcaaggugggaagugaagu

SEQ ID NO: 482150 - RNA, 32 nt, Human
guugaagauaaauaagcuuaaacaaauaacuu

SEQ ID NO: 482151 - RNA, 32 nt, Human
guugaagaugcauuucagggccugggaaaaga

SEQ ID NO: 482152 - RNA, 32 nt, Human
guugaagccuccaaggcagugaggggcuuggg

SEQ ID NO: 482153 - RNA, 32 nt, Human
guugaaggaggcagcgggagcggagagcgccc

SEQ ID NO: 482154 - RNA, 32 nt, Human
guugaaggccugaguguaacaaaagggcuuau

SEQ ID NO: 482155 - RNA, 32 nt, Human
guugaagggaaacgcuacaucuucucugguug

SEQ ID NO: 482156 - RNA, 22 nt, Human
guugaagggaaaugucgaggcu

SEQ ID NO: 482157 - RNA, 18 nt, Human
guugaaggggauccuguc

SEQ ID NO: 482158 - RNA, 32 nt, Human
guugaagggggcggcuuccuggagccagcacc

SEQ ID NO: 482159 - RNA, 32 nt, Human
guugaaguacagagggagguugggguggguca

SEQ ID NO: 482160 - RNA, 32 nt, Human
guugaaguccccauccuggccuccucucagcc

SEQ ID NO: 482161 - RNA, 32 nt, Human
guugaagucuuguugugugcucuuccuuccag

SEQ ID NO: 482162 - RNA, 32 nt, Human
guugaagugagcugagauugcaccacugcacu

SEQ ID NO: 482163 - RNA, 32 nt, Human
guugaagugcagugucagaaaugaugugaguu

SEQ ID NO: 482164 - RNA, 32 nt, Human
guugaauagcuuuucuucugcaaugggaguug

SEQ ID NO: 482165 - RNA, 31 nt, Human
guugaaucaauaaauaccaauuugugaaaca

SEQ ID NO: 482166 - RNA, 32 nt, Human
guugaaucauugcuguuggaggcagcacaaau

SEQ ID NO: 482167 - RNA, 32 nt, Human
guugaauccacaacuucauuuauauacaggcu

SEQ ID NO: 482168 - RNA, 32 nt, Human
guugaaucccugagaagagagagcauggggcg

SEQ ID NO: 482169 - RNA, 32 nt, Human
guugaaucugggagggaaguggagguugcugu

SEQ ID NO: 482170 - RNA, 32 nt, Human
guugaaugaguguguuuuguacauaacuucag

SEQ ID NO: 482171 - RNA, 32 nt, Human
guugaauggaaagaggcaggcagggggagagg

SEQ ID NO: 482172 - RNA, 32 nt, Human
guugaauggagauuaaguggauucaggaggau

SEQ ID NO: 482173 - RNA, 32 nt, Human
guugaauguaaugcuggggacaggcaugcugc

SEQ ID NO: 482174 - RNA, 32 nt, Human
guugaaugugccaugcccucucccucucugga

SEQ ID NO: 482175 - RNA, 21 nt, Human
guugaauguguuuauuuuuag

SEQ ID NO: 482176 - RNA, 23 nt, Human
guugaauucuauuuuauuuuuaa

SEQ ID NO: 482177 - RNA, 32 nt, Human
guugaauuguaauccccaauauuggagauagg

SEQ ID NO: 482178 - RNA, 32 nt, Human
guugaauuguaauccccaaugcuggagguagg

SEQ ID NO: 482179 - RNA, 32 nt, Human
guugacaagaaagaggagacgcagccgcccau

SEQ ID NO: 482180 - RNA, 32 nt, Human
guugacacauugcacacacagucuguucagag

SEQ ID NO: 482181 - RNA, 32 nt, Human
guugacaccauucagugaagguugugaacuuu

SEQ ID NO: 482182 - RNA, 32 nt, Human
guugacacccuccauccucagagcaggucgaa

SEQ ID NO: 482183 - RNA, 32 nt, Human
guugacacgaggcacagaaaacaaauaucaaa

SEQ ID NO: 482184 - RNA, 32 nt, Human
guugacagagguuuaccucccuacuuucuuag

SEQ ID NO: 482185 - RNA, 32 nt, Human
guugacagggaggggaggauugugaggugagg

SEQ ID NO: 482186 - RNA, 32 nt, Human
guugacaggugcgugacagugggagcugcucu

SEQ ID NO: 482187 - RNA, 32 nt, Human
guugacaucccccuucuggcucaugugucuga

SEQ ID NO: 482188 - RNA, 31 nt, Human
guugacaugacuuacgugcauuuaaauauau

SEQ ID NO: 482189 - RNA, 32 nt, Human
guugacauggagaaaguuuuaguggccugagu

SEQ ID NO: 482190 - RNA, 32 nt, Human
guugacauggaggcagugcuugcauugcuuug

SEQ ID NO: 482191 - RNA, 32 nt, Human
guugacauugaauaaaagaacaugacaaaccc

SEQ ID NO: 482192 - RNA, 20 nt, Human
guugacauuuagaacuuuaa

SEQ ID NO: 482193 - RNA, 31 nt, Human
guugacauuuucuuucagcauuuaaaauuuu

SEQ ID NO: 482194 - RNA, 32 nt, Human
guugaccaaacagaaagaggccucuauuucaa

SEQ ID NO: 482195 - RNA, 21 nt, Human
guugaccaacuuugauuucca

SEQ ID NO: 482196 - RNA, 32 nt, Human
guugaccacaucuggcuccugccaggcaacga

SEQ ID NO: 482197 - RNA, 24 nt, Human
guugaccaggcuggagugaagugg

SEQ ID NO: 482198 - RNA, 24 nt, Human
guugaccaggcuggagugcagugg

SEQ ID NO: 482199 - RNA, 32 nt, Human
guugaccaucgauauuuccucccacauguggc

SEQ ID NO: 482200 - RNA, 32 nt, Human
guugacccgaaacagcccuccgucuuccugcc

SEQ ID NO: 482201 - RNA, 32 nt, Human
guugaccggaccuuccuuccagggcuuuuccu

SEQ ID NO: 482202 - RNA, 32 nt, Human
guugaccucugccuggcucccccuuggugcaa

SEQ ID NO: 482203 - RNA, 32 nt, Human
guugaccuguccuuggucacugaggccauugg

SEQ ID NO: 482204 - RNA, 32 nt, Human
guugaccuucauuuaguugauguaauacauag

SEQ ID NO: 482205 - RNA, 31 nt, Human
guugaccuugggguaggcugggugaagggua

SEQ ID NO: 482206 - RNA, 32 nt, Human
guugaccuuguacagaaccagaauccuguccc

SEQ ID NO: 482207 - RNA, 32 nt, Human
guugacgauguuuuaagauugcaccuggcagu

SEQ ID NO: 482208 - RNA, 32 nt, Human
guugacgcuucacaaguaaauguugucaggcu

SEQ ID NO: 482209 - RNA, 32 nt, Human
guugacguugccuggugguuccuaccuucugu

SEQ ID NO: 482210 - RNA, 32 nt, Human
guugacucacuacagccucugccucccagguu

SEQ ID NO: 482211 - RNA, 32 nt, Human
guugacucuacagucaugaaacauacaggucu

SEQ ID NO: 482212 - RNA, 32 nt, Human
guugacucuccgggggcacuggcucauuccaa

SEQ ID NO: 482213 - RNA, 32 nt, Human
guugacucucucuggaaugcgguaauaagagc

SEQ ID NO: 482214 - RNA, 32 nt, Human
guugacugcaugcacacuuuacauuuauuuau

SEQ ID NO: 482215 - RNA, 32 nt, Human
guugacugcuacauuuccccagccugguacca

SEQ ID NO: 482216 - RNA, 32 nt, Human
guugacugcuuuggaggcacaaacccaugcaa

SEQ ID NO: 482217 - RNA, 32 nt, Human
guugacuggaggcggagguugcagugagccga

SEQ ID NO: 482218 - RNA, 32 nt, Human
guugacuguggcugaagagcuuggggaagagc

SEQ ID NO: 482219 - RNA, 32 nt, Human
guugacuuaacauugaguucaagccuuaauug

SEQ ID NO: 482220 - RNA, 32 nt, Human
guugacuuaacauugaguucaagccuuuauug

SEQ ID NO: 482221 - RNA, 32 nt, Human
guugacuugagagaagggcugaucucagagcc

SEQ ID NO: 482222 - RNA, 32 nt, Human
guugacuuucaaaucacguuaggaccuggauu

SEQ ID NO: 482223 - RNA, 32 nt, Human
guugacuuuuggcugaaggugggagccggugu

SEQ ID NO: 482224 - RNA, 32 nt, Human
guugagaaaggccauaugacuguaaggaauuu

SEQ ID NO: 482225 - RNA, 32 nt, Human
guugagaacaccuuucauauugguccuaguuc

SEQ ID NO: 482226 - RNA, 32 nt, Human
guugagaagacuccugggcuucagccucuccc

SEQ ID NO: 482227 - RNA, 32 nt, Human
guugagaaggagagaaaaagguggcaggaauu

SEQ ID NO: 482228 - RNA, 19 nt, Human
guugagaagggccagggua

SEQ ID NO: 482229 - RNA, 32 nt, Human
guugagaccaauuguaaccaguuuaacucauu

SEQ ID NO: 482230 - RNA, 32 nt, Human
guugagaccagccugaacaacauggugaaacc

SEQ ID NO: 482231 - RNA, 32 nt, Human
guugagaccagccuggccaacauggugaaacc

SEQ ID NO: 482232 - RNA, 32 nt, Human
guugagaccaggaguucgaguccagccugacc

SEQ ID NO: 482233 - RNA, 32 nt, Human
guugagaccauccuggccaacauggugaaacc

SEQ ID NO: 482234 - RNA, 32 nt, Human
guugagacgcacucccacccugggugcugcag

SEQ ID NO: 482235 - RNA, 32 nt, Human
guugagacugaaguguucacuuccauagaaga

SEQ ID NO: 482236 - RNA, 32 nt, Human
guugagaggaaaugcauaaaaugaaagaugaa

SEQ ID NO: 482237 - RNA, 32 nt, Human
guugagaggagaaaagggaagaaaagucgggg

SEQ ID NO: 482238 - RNA, 32 nt, Human
guugagaggcagcugcuucgcacagaccagag

SEQ ID NO: 482239 - RNA, 32 nt, Human
guugagaggccccucuucuggagcucagcagc

SEQ ID NO: 482240 - RNA, 32 nt, Human
guugagauagagacggccugcccacacaacuc

SEQ ID NO: 482241 - RNA, 32 nt, Human
guugagauauaggguucauccauguugcugca

SEQ ID NO: 482242 - RNA, 32 nt, Human
guugagauaugaguucuucguacuggaaaagc

SEQ ID NO: 482243 - RNA, 32 nt, Human
guugagaucgcacuccagccugggugacagag

SEQ ID NO: 482244 - RNA, 32 nt, Human
guugagaucgccacugcacuccagccugggaa

SEQ ID NO: 482245 - RNA, 32 nt, Human
guugagaugaaugauguguucacaaaugaggg

SEQ ID NO: 482246 - RNA, 32 nt, Human
guugagaugcagauuccucagaguccguguca

SEQ ID NO: 482247 - RNA, 32 nt, Human
guugagauucugugagucuagguugaccacag

SEQ ID NO: 482248 - RNA, 24 nt, Human
guugagcaacaacaaaaugcugua

SEQ ID NO: 482249 - RNA, 23 nt, Human
guugagcacucggaguguaguca

SEQ ID NO: 482250 - RNA, 32 nt, Human
guugagcagagggaaggcaugggggcaggaag

SEQ ID NO: 482251 - RNA, 32 nt, Human
guugagcagugucaugccuuggcguuucagcu

SEQ ID NO: 482252 - RNA, 23 nt, Human
guugagcauuugaaauaugguua

SEQ ID NO: 482253 - RNA, 32 nt, Human
guugagcccaggaguucaagaccagccuggac

SEQ ID NO: 482254 - RNA, 24 nt, Human
guugagccccuccuaguucuucau

SEQ ID NO: 482255 - RNA, 32 nt, Human
guugagccgacuuggaaaugugaacgcaagaa

SEQ ID NO: 482256 - RNA, 32 nt, Human
guugagccgccggccucggccucccaggaagu

SEQ ID NO: 482257 - RNA, 32 nt, Human
guugagccucuuucugggucucugccuggguc

SEQ ID NO: 482258 - RNA, 32 nt, Human
guugagccucuuucugugucucugccuggguc

SEQ ID NO: 482259 - RNA, 32 nt, Human
guugagccugggauggaggagcccuaggccag

SEQ ID NO: 482260 - RNA, 32 nt, Human
guugagcucuacugagagccaaggccccuaga

SEQ ID NO: 482261 - RNA, 32 nt, Human
guugagcugagcagggggaggggaagaucuac

SEQ ID NO: 482262 - RNA, 32 nt, Human
guugagcugggcucucgcuuuguugcccaggc

SEQ ID NO: 482263 - RNA, 32 nt, Human
guugagcuuaggagguugaggcugcagugagc

SEQ ID NO: 482264 - RNA, 32 nt, Human
guugagcuuccagacaugugauguugcuaaag

SEQ ID NO: 482265 - RNA, 21 nt, Human
guugaggacagcuauccuguu

SEQ ID NO: 482266 - RNA, 30 nt, Human
guugaggacuugugaucagaaaaacugaag

SEQ ID NO: 482267 - RNA, 32 nt, Human
guugaggagacacccgcaauccuccacgaucu

SEQ ID NO: 482268 - RNA, 32 nt, Human
guugaggaggaaugugcuuaauguuuuaggaa

SEQ ID NO: 482269 - RNA, 32 nt, Human
guugaggaucucugccugccuuccugccgucc

SEQ ID NO: 482270 - RNA, 32 nt, Human
guugaggaugugggaacuuuucugucaggaaa

SEQ ID NO: 482271 - RNA, 32 nt, Human
guugaggcagaggcaauaaccucccauugcuc

SEQ ID NO: 482272 - RNA, 32 nt, Human
guugaggcagccagcugugcagccagguguga

SEQ ID NO: 482273 - RNA, 32 nt, Human
guugaggcagggccaucccgauccuugcucua

SEQ ID NO: 482274 - RNA, 32 nt, Human
guugaggcagggugaguagcugcuugacaccc

SEQ ID NO: 482275 - RNA, 32 nt, Human
guugaggccacuguucagggggcugguggccg

SEQ ID NO: 482276 - RNA, 32 nt, Human
guugaggccaggaguuugaggcugcagugagc

SEQ ID NO: 482277 - RNA, 32 nt, Human
guugaggcgggcagaucacugaggucaggagu

SEQ ID NO: 482278 - RNA, 32 nt, Human
guugaggcuaaaacaaaucucagaacagucug

SEQ ID NO: 482279 - RNA, 32 nt, Human
guugaggcugcagugagccaugaucauuccac

SEQ ID NO: 482280 - RNA, 32 nt, Human
guugaggcugcgauuuucucucucccaguacc

SEQ ID NO: 482281 - RNA, 32 nt, Human
guugagggaaauuuguuuuguuuuccacauug

SEQ ID NO: 482282 - RNA, 32 nt, Human
guugagggagagaagaccuugggccaagaugc

SEQ ID NO: 482283 - RNA, 22 nt, Human
guugagggcaggacccagggca

SEQ ID NO: 482284 - RNA, 32 nt, Human
guugagggcaggcagagguagcugaggguagc

SEQ ID NO: 482285 - RNA, 32 nt, Human
guugagggcugagggagagacugaggugcagc

SEQ ID NO: 482286 - RNA, 32 nt, Human
guugaggggaaaggagggauggcagguaggug

SEQ ID NO: 482287 - RNA, 32 nt, Human
guugagggggacgcccugcacauggcuuugcu

SEQ ID NO: 482288 - RNA, 24 nt, Human
guugagggggcacacagggcaagg

SEQ ID NO: 482289 - RNA, 32 nt, Human
guugagggggcuagagggagaaugggaaccac

SEQ ID NO: 482290 - RNA, 32 nt, Human
guugaggggguguugagggcggagaaaugcaa

SEQ ID NO: 482291 - RNA, 28 nt, Human
guugagggucgagccuguuuguuucuaa

SEQ ID NO: 482292 - RNA, 32 nt, Human
guugaggguggguggagggguuugcagugugg

SEQ ID NO: 482293 - RNA, 32 nt, Human
guugaggugagcugggguuggccccggcccag

SEQ ID NO: 482294 - RNA, 25 nt, Human
guugaguagggcuauugauuucuag

SEQ ID NO: 482295 - RNA, 32 nt, Human
guugagucaucaacacuuugccaauuagcuca

SEQ ID NO: 482296 - RNA, 32 nt, Human
guugaguccuggaaagggagccuggagagcgg

SEQ ID NO: 482297 - RNA, 32 nt, Human
guugagucuccucucugagacugcuaaguagg

SEQ ID NO: 482298 - RNA, 32 nt, Human
guugagugaauaaccaauuugcagugguggau

SEQ ID NO: 482299 - RNA, 32 nt, Human
guugagugagccaaugaggccaggaagaucag

SEQ ID NO: 482300 - RNA, 32 nt, Human
guugaguugguucacauccacauucuggcugu

SEQ ID NO: 482301 - RNA, 32 nt, Human
guugaguuucuuuuucugucaugcccuggggg

SEQ ID NO: 482302 - RNA, 32 nt, Human
guugauaaagaaugccaaaugcucuggagaua

SEQ ID NO: 482303 - RNA, 32 nt, Human
guugauacucaagccuuguacaagcacauauc

SEQ ID NO: 482304 - RNA, 32 nt, Human
guugauagggagucugaagccacccagacgug

SEQ ID NO: 482305 - RNA, 32 nt, Human
guugauauccauaagcuggcacuggaugcucu

SEQ ID NO: 482306 - RNA, 32 nt, Human
guugauauggccaaagggagagaggccuuuua

SEQ ID NO: 482307 - RNA, 32 nt, Human
guugaucacagacaaucucugccauccauaag

SEQ ID NO: 482308 - RNA, 20 nt, Human
guugaucaccugaggucagg

SEQ ID NO: 482309 - RNA, 18 nt, Human
guugaucagcaugcaaug

SEQ ID NO: 482310 - RNA, 32 nt, Human
guugaucaggagugaauucacagucuaccaug

SEQ ID NO: 482311 - RNA, 32 nt, Human
guugaucauccagaacugguaccgagguuaca

SEQ ID NO: 482312 - RNA, 32 nt, Human
guugaucaugcugguggcuugguuacugugac

SEQ ID NO: 482313 - RNA, 32 nt, Human
guugaucccagccgugaaagugcaugaugccu

SEQ ID NO: 482314 - RNA, 32 nt, Human
guugauccuggaugugucugugaggguguugu

SEQ ID NO: 482315 - RNA, 32 nt, Human
guugauccugggugugucugugaggguguugu

SEQ ID NO: 482316 - RNA, 32 nt, Human
guugaucuccugguagcaugaccuuuuggccu

SEQ ID NO: 482317 - RNA, 32 nt, Human
guugaucugugcaugccacuccugggucagac

SEQ ID NO: 482318 - RNA, 32 nt, Human
guugaucuuucuggcugcuggaauuggagaua

SEQ ID NO: 482319 - RNA, 32 nt, Human
guugaugaaaacagcaauguuuaucaaguguu

SEQ ID NO: 482320 - RNA, 32 nt, Human
guugaugaacagcacuuggauuuccuguuggc

SEQ ID NO: 482321 - RNA, 32 nt, Human
guugaugaaggcucggccgcggcacuuccuga

SEQ ID NO: 482322 - RNA, 32 nt, Human
guugaugacuaggaaaggcugagggaauucca

SEQ ID NO: 482323 - RNA, 32 nt, Human
guugaugagcacuguagguggcuucgagaugc

SEQ ID NO: 482324 - RNA, 24 nt, Human
guugaugaggcuggagugcagugg

SEQ ID NO: 482325 - RNA, 32 nt, Human
guugaugaucuagcacuuucaccaagaaaugg

SEQ ID NO: 482326 - RNA, 32 nt, Human
guugaugcauagcuagaucaccaguuuaaaug

SEQ ID NO: 482327 - RNA, 32 nt, Human
guugaugccagcugcuccauggaccaggcccu

SEQ ID NO: 482328 - RNA, 32 nt, Human
guugaugccccaggacacagagacuucaucaa

SEQ ID NO: 482329 - RNA, 32 nt, Human
guugaugccggauucgaagccaggaaggccca

SEQ ID NO: 482330 - RNA, 24 nt, Human
guugaugccuugcagggcauucuu

SEQ ID NO: 482331 - RNA, 32 nt, Human
guugaugcugcuguucauggcacuacaaagcu

SEQ ID NO: 482332 - RNA, 32 nt, Human
guugauggaugcugcugcccucuccucaaccu

SEQ ID NO: 482333 - RNA, 32 nt, Human
guugauggguuuccuuauccccaaagucacuc

SEQ ID NO: 482334 - RNA, 31 nt, Human
guugauggucuuuucuguacuggaggccucc

SEQ ID NO: 482335 - RNA, 32 nt, Human
guugaugugcauucauuuccauucacugauga

SEQ ID NO: 482336 - RNA, 32 nt, Human
guugauguucuagagaggacagcagacaaggc

SEQ ID NO: 482337 - RNA, 32 nt, Human
guugauuaacacucauaacuagggagugagug

SEQ ID NO: 482338 - RNA, 32 nt, Human
guugauucauuucccaaauuccccagacugaa

SEQ ID NO: 482339 - RNA, 32 nt, Human
guugauucccacccucccuccccaguuacuua

SEQ ID NO: 482340 - RNA, 32 nt, Human
guugauucuagguugaaaauguuauaggcacu

SEQ ID NO: 482341 - RNA, 32 nt, Human
guugauugaagcuuccucuguaucugaaucuu

SEQ ID NO: 482342 - RNA, 32 nt, Human
guugauugaauaccuauuaugugccaggcacu

SEQ ID NO: 482343 - RNA, 32 nt, Human
guugauugcaccacugcacucuagccugcgug

SEQ ID NO: 482344 - RNA, 32 nt, Human
guugauuggcaaaagcagcacaguauuaauau

SEQ ID NO: 482345 - RNA, 32 nt, Human
guugauugugacauuuucccagaagagaggcu

SEQ ID NO: 482346 - RNA, 32 nt, Human
guugauuucuccaccaaaugcaugucauguau

SEQ ID NO: 482347 - RNA, 32 nt, Human
guugauuugagaagaaaucuggcugguuugag

SEQ ID NO: 482348 - RNA, 32 nt, Human
guugauuugcugcaagaguagcugagaauuca

SEQ ID NO: 482349 - RNA, 32 nt, Human
guugauuuucacugcaacucugccuuugugug

SEQ ID NO: 482350 - RNA, 32 nt, Human
guugauuuuucagaccugcuccucaguaauaa

SEQ ID NO: 482351 - RNA, 32 nt, Human
guugauuuuucuauuuauauuuccuuguacaa

SEQ ID NO: 482352 - RNA, 32 nt, Human
guugcaaagacaauuucuucacuugagcccuu

SEQ ID NO: 482353 - RNA, 32 nt, Human
guugcaaaguaugcacacauaucuugaauggc

SEQ ID NO: 482354 - RNA, 32 nt, Human
guugcaaaguuagccgagaucacgccaucaca

SEQ ID NO: 482355 - RNA, 32 nt, Human
guugcaacacuguacuccagccugggcaacag

SEQ ID NO: 482356 - RNA, 32 nt, Human
guugcaaccaggagucaguacaggcuuuauuc

SEQ ID NO: 482357 - RNA, 32 nt, Human
guugcaacccauguggugauaaggcucacagc

SEQ ID NO: 482358 - RNA, 32 nt, Human
guugcaagaauaguuuuaguucagagaauugu

SEQ ID NO: 482359 - RNA, 32 nt, Human
guugcaagguugagccaagaucaugccacugc

SEQ ID NO: 482360 - RNA, 24 nt, Human
guugcaagugauucuccugccuca

SEQ ID NO: 482361 - RNA, 32 nt, Human
guugcaaucuuucuccuuagguccucacacaa

SEQ ID NO: 482362 - RNA, 32 nt, Human
guugcaaugaagcggagguugcagugagccga

SEQ ID NO: 482363 - RNA, 32 nt, Human
guugcaaugaggcaaaggaugcagugacuuuu

SEQ ID NO: 482364 - RNA, 32 nt, Human
guugcacaaaaaggaaaguuugggaagggaug

SEQ ID NO: 482365 - RNA, 31 nt, Human
guugcacaagaacuuuuacucacuuguaauu

SEQ ID NO: 482366 - RNA, 32 nt, Human
guugcacaaucagaauugauaagcacuguucc

SEQ ID NO: 482367 - RNA, 32 nt, Human
guugcacaaugccacccauccacuccuugcca

SEQ ID NO: 482368 - RNA, 32 nt, Human
guugcacacaugcuccccacacacacauagac

SEQ ID NO: 482369 - RNA, 32 nt, Human
guugcacaccugcacacacgcccuggcacaca

SEQ ID NO: 482370 - RNA, 32 nt, Human
guugcacagacugucuguauucaauggcuauc

SEQ ID NO: 482371 - RNA, 32 nt, Human
guugcacagagaaagccagcugucgucauuug

SEQ ID NO: 482372 - RNA, 32 nt, Human
guugcacagcugcugcugacaggucuaccuga

SEQ ID NO: 482373 - RNA, 32 nt, Human
guugcacauuauacuccguguguucuucaacu

SEQ ID NO: 482374 - RNA, 32 nt, Human
guugcaccacuguacuccagccugggcgauac

SEQ ID NO: 482375 - RNA, 32 nt, Human
guugcaccauugcacuccacccugggcgacag

SEQ ID NO: 482376 - RNA, 32 nt, Human
guugcaccauuguacuccagccugggcaacaa

SEQ ID NO: 482377 - RNA, 32 nt, Human
guugcaccucauucucccgaugacuauucaaa

SEQ ID NO: 482378 - RNA, 32 nt, Human
guugcaccuuucucaccuacuuugggaccuuu

SEQ ID NO: 482379 - RNA, 32 nt, Human
guugcacgucggccccagcccugaggagccgg

SEQ ID NO: 482380 - RNA, 32 nt, Human
guugcacucauuuuuccuggaccucagucuau

SEQ ID NO: 482381 - RNA, 32 nt, Human
guugcacucuguagacuggaucuguuuuagga

SEQ ID NO: 482382 - RNA, 22 nt, Human
guuuucauuuuuguuguacgug

SEQ ID NO: 482383 - RNA, 32 nt, Human
guuuuccaaaggaguggucaagcccuugccca

SEQ ID NO: 482384 - RNA, 32 nt, Human
guuuuccaaauacugucucuucucaauaacuc

SEQ ID NO: 482385 - RNA, 20 nt, Human
guuuuccaaauuuaaacuca

SEQ ID NO: 482386 - RNA, 20 nt, Human
guuuuccaacccccagccuc

SEQ ID NO: 482387 - RNA, 32 nt, Human
guuuuccaagaguguaccauuaacuugauugu

SEQ ID NO: 482388 - RNA, 32 nt, Human
guuuuccaaggcuuccuccacccugccaccga

SEQ ID NO: 482389 - RNA, 21 nt, Human
guuuuccaccucacugucucc

SEQ ID NO: 482390 - RNA, 32 nt, Human
guuuuccacugaagcaugcacaugccacuguc

SEQ ID NO: 482391 - RNA, 32 nt, Human
guuuuccacugcauucugaagagcaggugaca

SEQ ID NO: 482392 - RNA, 32 nt, Human
guuuuccagaucaccacccaaguugugugggg

SEQ ID NO: 482393 - RNA, 32 nt, Human
guuuuccagcuuuuauacacacguaucucauu

SEQ ID NO: 482394 - RNA, 32 nt, Human
guuuuccaggagauggagccaguugggugugg

SEQ ID NO: 482395 - RNA, 32 nt, Human
guuuuccagggcccuugaccaacaucggcuuc

SEQ ID NO: 482396 - RNA, 32 nt, Human
guuuuccagugaucuugggacaugaaguugcu

SEQ ID NO: 482397 - RNA, 32 nt, Human
guuuuccauccccuucagguccuuccucggga

SEQ ID NO: 482398 - RNA, 32 nt, Human
guuuuccaucuuguucuggccuagaggucagu

SEQ ID NO: 482399 - RNA, 32 nt, Human
guuuuccaugaagaaaucaaccaguccagaaa

SEQ ID NO: 482400 - RNA, 32 nt, Human
guuuuccauucuauggagaggaucccagucuu

SEQ ID NO: 482401 - RNA, 32 nt, Human
guuuuccauugccaccauaacaaguuacaaaa

SEQ ID NO: 482402 - RNA, 28 nt, Human
guuuucccaaguggcauuuucaucucgc

SEQ ID NO: 482403 - RNA, 32 nt, Human
guuuucccacgaggaaucugugggucugggag

SEQ ID NO: 482404 - RNA, 19 nt, Human
guuuucccacuuuuuggua

SEQ ID NO: 482405 - RNA, 32 nt, Human
guuuucccaucuccugggaagggaucuuucga

SEQ ID NO: 482406 - RNA, 32 nt, Human
guuuuccccaaaacauaucaguuugaauacuu

SEQ ID NO: 482407 - RNA, 32 nt, Human
guuuuccccacaagucaucuugccuuguggca

SEQ ID NO: 482408 - RNA, 32 nt, Human
guuuuccccacauucuauagccauaaaccuga

SEQ ID NO: 482409 - RNA, 32 nt, Human
guuuuccccacccccucaaucugucggggagc

SEQ ID NO: 482410 - RNA, 32 nt, Human
guuuuccccuaaaagcuuacucuagaaaggau

SEQ ID NO: 482411 - RNA, 32 nt, Human
guuuuccccuccuguccucaugauacugaaua

SEQ ID NO: 482412 - RNA, 32 nt, Human
guuuuccccugccuuccuugcagaggccaugg

SEQ ID NO: 482413 - RNA, 28 nt, Human
guuuucccuacugcugccugaucccucg

SEQ ID NO: 482414 - RNA, 32 nt, Human
guuuucccucagccuggaaaacauauuaaucc

SEQ ID NO: 482415 - RNA, 32 nt, Human
guuuucccucauaaccaaagcuucagguuaga

SEQ ID NO: 482416 - RNA, 32 nt, Human
guuuucccucuacagacacugucugguuuuag

SEQ ID NO: 482417 - RNA, 32 nt, Human
guuuucccucugcgugaaucucugucucuuca

SEQ ID NO: 482418 - RNA, 32 nt, Human
guuuucccugagggaauguggagcagcucggc

SEQ ID NO: 482419 - RNA, 32 nt, Human
guuuucccugauccgugguguugcaguccguu

SEQ ID NO: 482420 - RNA, 32 nt, Human
guuuucccuuuuccuuuuaagccucgccuugu

SEQ ID NO: 482421 - RNA, 32 nt, Human
guuuuccgccgugccccgaggcuccccagcgu

SEQ ID NO: 482422 - RNA, 32 nt, Human
guuuuccuacacaaauacaaaauaauugggga

SEQ ID NO: 482423 - RNA, 32 nt, Human
guuuuccucaagaagacuacuggaacuggaug

SEQ ID NO: 482424 - RNA, 32 nt, Human
guuuuccucacacuccuuacuugacugcuuuc

SEQ ID NO: 482425 - RNA, 32 nt, Human
guuuuccuccacccuuuccucucccucaguuu

SEQ ID NO: 482426 - RNA, 32 nt, Human
guuuuccuccccgcccugucccucucugguca

SEQ ID NO: 482427 - RNA, 32 nt, Human
guuuuccucuauacaucucuccccaacccuag

SEQ ID NO: 482428 - RNA, 32 nt, Human
guuuuccucuucaacauaaugaaauagacuug

SEQ ID NO: 482429 - RNA, 32 nt, Human
guuuuccugcagcaggugcauagucaaaucca

SEQ ID NO: 482430 - RNA, 32 nt, Human
guuuuccugcagcucuccaacaaacgccugag

SEQ ID NO: 482431 - RNA, 32 nt, Human
guuuuccugcagcuguugacuuguugcccuga

SEQ ID NO: 482432 - RNA, 32 nt, Human
guuuuccugcugacccucuccccaccauuagc

SEQ ID NO: 482433 - RNA, 32 nt, Human
guuuuccugcugacucucuccccacuauuacc

SEQ ID NO: 482434 - RNA, 32 nt, Human
guuuuccugucuuuugacauuugacuuugcau

SEQ ID NO: 482435 - RNA, 32 nt, Human
guuuuccuuaucuguaagacagguaaauggua

SEQ ID NO: 482436 - RNA, 32 nt, Human
guuuuccuuccucugcuaucucucacaccucu

SEQ ID NO: 482437 - RNA, 20 nt, Human
guuuuccuugcucuauacag

SEQ ID NO: 482438 - RNA, 32 nt, Human
guuuuccuuugguaugaauacaggaaaaggcu

SEQ ID NO: 482439 - RNA, 32 nt, Human
guuuuccuuuguccucacuacaggucucauua

SEQ ID NO: 482440 - RNA, 32 nt, Human
guuuucgacgacagauuaaccaaaaaugcccc

SEQ ID NO: 482441 - RNA, 32 nt, Human
guuuucgccauguugcccaggcuggucucaaa

SEQ ID NO: 482442 - RNA, 32 nt, Human
guuuucgucuguucaguagacuccgauuccag

SEQ ID NO: 482443 - RNA, 32 nt, Human
guuuucuaaaacaaaccaaggcuuuucuccug

SEQ ID NO: 482444 - RNA, 32 nt, Human
guuuucuaaaacugacaaccaggugggaccaa

SEQ ID NO: 482445 - RNA, 32 nt, Human
guuuucuaccucuccaggccugcccacuaccc

SEQ ID NO: 482446 - RNA, 22 nt, Human
guuuucuagaucuuuuacagug

SEQ ID NO: 482447 - RNA, 32 nt, Human
guuuucuagguaaacuucacuacugguaauua

SEQ ID NO: 482448 - RNA, 32 nt, Human
guuuucuaguguccuggcauguucacucagcc

SEQ ID NO: 482449 - RNA, 32 nt, Human
guuuucuauggagccuguggcccuuuugcagc

SEQ ID NO: 482450 - RNA, 32 nt, Human
guuuucucaaagucaggagcugaccaggagca

SEQ ID NO: 482451 - RNA, 32 nt, Human
guuuucucacagcagcugccugggugaagcau

SEQ ID NO: 482452 - RNA, 32 nt, Human
guuuucucacuguuggacucuaccucacuggu

SEQ ID NO: 482453 - RNA, 32 nt, Human
guuuucucagagaaguggagggaggaggaagg

SEQ ID NO: 482454 - RNA, 20 nt, Human
guuuucucagcuuaauagug

SEQ ID NO: 482455 - RNA, 20 nt, Human
guuuucucaucuguaaagug

SEQ ID NO: 482456 - RNA, 32 nt, Human
guuuucucccagaagagggucugccuugagau

SEQ ID NO: 482457 - RNA, 32 nt, Human
guuuucucccagacacaccacaccuaccuugg

SEQ ID NO: 482458 - RNA, 32 nt, Human
guuuucucccccagacgccugauauugaagua

SEQ ID NO: 482459 - RNA, 20 nt, Human
guuuucucccgccugcugug

SEQ ID NO: 482460 - RNA, 18 nt, Human
guuuucuccuaacacgug

SEQ ID NO: 482461 - RNA, 21 nt, Human
guuuucuccugccugugcugu

SEQ ID NO: 482462 - RNA, 17 nt, Human
guuuucuccugcuggug

SEQ ID NO: 482463 - RNA, 19 nt, Human
guuuucuccuggcgcaugg

SEQ ID NO: 482464 - RNA, 19 nt, Human
guuuucuccugggauggug

SEQ ID NO: 482465 - RNA, 20 nt, Human
guuuucuccuguguuauaua

SEQ ID NO: 482466 - RNA, 17 nt, Human
guuuucuccuuacacag

SEQ ID NO: 482467 - RNA, 21 nt, Human
guuuucuccuugaugcaugug

SEQ ID NO: 482468 - RNA, 32 nt, Human
guuuucuccuugggguugaaucauucaacuua

SEQ ID NO: 482469 - RNA, 32 nt, Human
guuuucucucaaacaugaacacuuuagaauug

SEQ ID NO: 482470 - RNA, 32 nt, Human
guuuucucucacccucucucuuuuguuuaucu

SEQ ID NO: 482471 - RNA, 32 nt, Human
guuuucucucaguguguucucagaguugcgcu

SEQ ID NO: 482472 - RNA, 19 nt, Human
guuuucucucugccgggug

SEQ ID NO: 482473 - RNA, 20 nt, Human
guuuucucucugccuuggug

SEQ ID NO: 482474 - RNA, 32 nt, Human
guuuucucucugcuuccuagcuucaaucuuug

SEQ ID NO: 482475 - RNA, 32 nt, Human
guuuucucugaacucuuccccuuguuccaagg

SEQ ID NO: 482476 - RNA, 32 nt, Human
guuuucucugauggacaaaggcaggggaccag

SEQ ID NO: 482477 - RNA, 32 nt, Human
guuuucucuggcucgcuccccuuuccccauuc

SEQ ID NO: 482478 - RNA, 32 nt, Human
guuuucucugucugcugucuaacccugugccu

SEQ ID NO: 482479 - RNA, 20 nt, Human
guuuucucuuacuauuugug

SEQ ID NO: 482480 - RNA, 32 nt, Human
guuuucucuugaauuugggggcugccauuuaa

SEQ ID NO: 482481 - RNA, 19 nt, Human
guuuucucuuguuugcagu

SEQ ID NO: 482482 - RNA, 19 nt, Human
guuuucucuuuuuuacagu

SEQ ID NO: 482483 - RNA, 32 nt, Human
guuuucugaagccagccaggugcaguggcuca

SEQ ID NO: 482484 - RNA, 32 nt, Human
guuuucugaaugaacugaauaaagcuucuguu

SEQ ID NO: 482485 - RNA, 32 nt, Human
guuuucugcaggggaaguucugauucccuuag

SEQ ID NO: 482486 - RNA, 32 nt, Human
guuuucugcaucugccaaagggguuaaacacu

SEQ ID NO: 482487 - RNA, 32 nt, Human
guuuucugcauucuguaaagaaacauaucaaa

SEQ ID NO: 482488 - RNA, 32 nt, Human
guuuucugccuguauuucccagugauuuacuc

SEQ ID NO: 482489 - RNA, 32 nt, Human
guuuucugcuucugugccaaaaugagauauuc

SEQ ID NO: 482490 - RNA, 32 nt, Human
guuuucuggaccagaagcagggagggugugga

SEQ ID NO: 482491 - RNA, 32 nt, Human
guuuucuggagugcuuuggaggagaggacuau

SEQ ID NO: 482492 - RNA, 32 nt, Human
guuuucuggaugcucccuuacuuucucagcgc

SEQ ID NO: 482493 - RNA, 32 nt, Human
guuuucuggcuucugcuucauccugcuccauc

SEQ ID NO: 482494 - RNA, 32 nt, Human
guuuucugggcugugacugaaagacacacuga

SEQ ID NO: 482495 - RNA, 32 nt, Human
guuuucuguagccucagauugccuaucugcuu

SEQ ID NO: 482496 - RNA, 32 nt, Human
guuuucugucacuggugggcacuggacaggca

SEQ ID NO: 482497 - RNA, 32 nt, Human
guuuucuguggacugaaaaaucguguccuuuu

SEQ ID NO: 482498 - RNA, 20 nt, Human
guuuucuguugaaugcagug

SEQ ID NO: 482499 - RNA, 18 nt, Human
guuuucuuaaugccagug

SEQ ID NO: 482500 - RNA, 32 nt, Human
guuuucuuauccuuugaacacuccucauuuca

SEQ ID NO: 482501 - RNA, 17 nt, Human
guuuucuuauuauagug

SEQ ID NO: 482502 - RNA, 20 nt, Human
guuuucuucacagugcagug

SEQ ID NO: 482503 - RNA, 22 nt, Human
guuuucuucacuuaauauagug

SEQ ID NO: 482504 - RNA, 23 nt, Human
guuuucuucagugcuguacugug

SEQ ID NO: 482505 - RNA, 25 nt, Human
guuuucuuccuauauuuguauagug

SEQ ID NO: 482506 - RNA, 20 nt, Human
guuuucuuccucaaacagug

SEQ ID NO: 482507 - RNA, 32 nt, Human
guuuucuuccuucugcagcagcuuucugcuuc

SEQ ID NO: 482508 - RNA, 21 nt, Human
guuuucuucugcauuuuagug

SEQ ID NO: 482509 - RNA, 19 nt, Human
guuuucuucuguguaaagu

SEQ ID NO: 482510 - RNA, 32 nt, Human
guuuucuucuucucguccucguuuguguucug

SEQ ID NO: 482511 - RNA, 21 nt, Human
guuuucuucuugcucacacug

SEQ ID NO: 482512 - RNA, 32 nt, Human
guuuucuugagaugcaaaaguucacuguugca

SEQ ID NO: 482513 - RNA, 32 nt, Human
guuuucuugagcaacaguuacacuagguagaa

SEQ ID NO: 482514 - RNA, 32 nt, Human
guuuucuugcagcuggugccauccaugucuca

SEQ ID NO: 482515 - RNA, 32 nt, Human
guuuucuuuaacuuggcagugugcagaggaga

SEQ ID NO: 482516 - RNA, 32 nt, Human
guuuucuuuaccuuuuuccuccaugcaccaug

SEQ ID NO: 482517 - RNA, 23 nt, Human
guuuucuuuaugaugauacagug

SEQ ID NO: 482518 - RNA, 32 nt, Human
guuuucuuuccagauuggagguuuccaagagg

SEQ ID NO: 482519 - RNA, 32 nt, Human
guuuucuuuccuggugggguaguggggugggg

SEQ ID NO: 482520 - RNA, 21 nt, Human
guuuucuuucuuguguacagu

SEQ ID NO: 482521 - RNA, 32 nt, Human
guuuucuuucuuucuuuuuguuuuugacacag

SEQ ID NO: 482522 - RNA, 32 nt, Human
guuuucuuugaaaaggagggcuggaaugguac

SEQ ID NO: 482523 - RNA, 32 nt, Human
guuuucuuugagauggagucucgcucugucac

SEQ ID NO: 482524 - RNA, 19 nt, Human
guuuucuuugcuuuaagug

SEQ ID NO: 482525 - RNA, 19 nt, Human
guuuucuuugguauaugug

SEQ ID NO: 482526 - RNA, 32 nt, Human
guuuucuuugugaccagaacacauuuaaaauu

SEQ ID NO: 482527 - RNA, 19 nt, Human
guuuucuuuugcuugagug

SEQ ID NO: 482528 - RNA, 32 nt, Human
guuuugaaaaugucaugauaccuguugagaua

SEQ ID NO: 482529 - RNA, 32 nt, Human
guuuugaaaccaggaacugugagucuuccagc

SEQ ID NO: 482530 - RNA, 32 nt, Human
guuuugaaaguccuguucacaugaguuccuau

SEQ ID NO: 482531 - RNA, 32 nt, Human
guuuugaaaugaggaaguguggaucggcauuc

SEQ ID NO: 482532 - RNA, 32 nt, Human
guuuugaaauuaugcaggcaugguggcacaca

SEQ ID NO: 482533 - RNA, 32 nt, Human
guuuugaacuccuggccucaagcaauccacuc

SEQ ID NO: 482534 - RNA, 32 nt, Human
guuuugaagguggccugagaauggagcuucuc

SEQ ID NO: 482535 - RNA, 32 nt, Human
guuuugaaguuuucaaagacuggcucugcugu

SEQ ID NO: 482536 - RNA, 32 nt, Human
guuuugaauuggguugugugugcacuggaguc

SEQ ID NO: 482537 - RNA, 32 nt, Human
guuuugacacaaugaaaauggaagcacuuuag

SEQ ID NO: 482538 - RNA, 32 nt, Human
guuuugacauuuaggauuuugugucuuuuaaa

SEQ ID NO: 482539 - RNA, 18 nt, Human
guuuugaccacccccaga

SEQ ID NO: 482540 - RNA, 24 nt, Human
guuuugaccagagaggcccagaug

SEQ ID NO: 482541 - RNA, 32 nt, Human
guuuugaccccaaaguaaagagaagcucuucu

SEQ ID NO: 482542 - RNA, 32 nt, Human
guuuugaccucccaggcaucugaacaggauga

SEQ ID NO: 482543 - RNA, 24 nt, Human
guuuugaccuguauccuuuauuua

SEQ ID NO: 482544 - RNA, 21 nt, Human
guuuugacgucuuuuuacuug

SEQ ID NO: 482545 - RNA, 32 nt, Human
guuuugacucacugcaaccuccgccuccuggg

SEQ ID NO: 482546 - RNA, 32 nt, Human
guuuugacuguggagcucuucuaacacccaua

SEQ ID NO: 482547 - RNA, 32 nt, Human
guuuugacuguuccacagcuacuucccaggac

SEQ ID NO: 482548 - RNA, 32 nt, Human
guuuugagaaugccagaucuguggcugucuuc

SEQ ID NO: 482549 - RNA, 32 nt, Human
guuuugagagagagucuugcucugucucccug

SEQ ID NO: 482550 - RNA, 32 nt, Human
guuuugagaucaaacuccccacccucacaaaa

SEQ ID NO: 482551 - RNA, 32 nt, Human
guuuugagauggagucucucucugucaccuag

SEQ ID NO: 482552 - RNA, 32 nt, Human
guuuugagcaaaauuuuggacugugaagcaag

SEQ ID NO: 482553 - RNA, 32 nt, Human
guuuugagcaacaaacuuuuucuucaaucugu

SEQ ID NO: 482554 - RNA, 32 nt, Human
guuuugagcugcagagacccgugcccgguagc

SEQ ID NO: 482555 - RNA, 31 nt, Human
guuuugaggguggaaugaggugaagggcaag

SEQ ID NO: 482556 - RNA, 32 nt, Human
guuuugaggguuauuggaaaacagagcaguga

SEQ ID NO: 482557 - RNA, 32 nt, Human
guuuugagucauggcuacuguuagaggaugga

SEQ ID NO: 482558 - RNA, 32 nt, Human
guuuugagugaagggaaaggaaacccagaaac

SEQ ID NO: 482559 - RNA, 32 nt, Human
guuuugauagaagggaagaccugcagugcacg

SEQ ID NO: 482560 - RNA, 32 nt, Human
guuuugauaguagaaucaagguguuugccaac

SEQ ID NO: 482561 - RNA, 21 nt, Human
guuuugaucaucuguacagug

SEQ ID NO: 482562 - RNA, 32 nt, Human
guuuugaucuucuuccccuucuuuucuucccc

SEQ ID NO: 482563 - RNA, 32 nt, Human
guuuugaucuuuucaaaacuaaaacagacccu

SEQ ID NO: 482564 - RNA, 21 nt, Human
guuuugauguguuguacagug

SEQ ID NO: 482565 - RNA, 32 nt, Human
guuuugcaagcaccuucuccuguguccuuggg

SEQ ID NO: 482566 - RNA, 32 nt, Human
guuuugcacagacgugggccugggccuucuca

SEQ ID NO: 482567 - RNA, 32 nt, Human
guuuugcagagcucaguuggaggcccucuccg

SEQ ID NO: 482568 - RNA, 32 nt, Human
guuuugcagagcuggucuucaggaacuggccu

SEQ ID NO: 482569 - RNA, 32 nt, Human
guuuugcagaugggggaaacugaggaagcacc

SEQ ID NO: 482570 - RNA, 32 nt, Human
guuuugcagcccaggcuggagugcaguggcac

SEQ ID NO: 482571 - RNA, 32 nt, Human
guuuugcagcuuuguacaaguaacauaaauug

SEQ ID NO: 482572 - RNA, 32 nt, Human
guuuugcaggugggagugcagggugagcccgg

SEQ ID NO: 482573 - RNA, 26 nt, Human
guuuugcauagggagugguaugacca

SEQ ID NO: 482574 - RNA, 31 nt, Human
guuuugcauaucuacugcaugccaagcacuu

SEQ ID NO: 482575 - RNA, 32 nt, Human
guuuugccaacacacugguagaugugugugca

SEQ ID NO: 482576 - RNA, 32 nt, Human
guuuugcccgcaucuucuguuccaugggugcc

SEQ ID NO: 482577 - RNA, 32 nt, Human
guuuugccugccacuagucuggcagccuccac

SEQ ID NO: 482578 - RNA, 32 nt, Human
guuuugcggagacugguucugcccuuucuauu

SEQ ID NO: 482579 - RNA, 32 nt, Human
guuuugcgugagcccucaaccugccugcaaua

SEQ ID NO: 482580 - RNA, 32 nt, Human
guuuugcuacuugcaaaggaaauguucauguu

SEQ ID NO: 482581 - RNA, 32 nt, Human
guuuugcuauagacuucagaaguguuuauuua

SEQ ID NO: 482582 - RNA, 32 nt, Human
guuuugcuauguuaaaaguggcagaacaggaa

SEQ ID NO: 482583 - RNA, 32 nt, Human
guuuugcuauuacaaaauacuacacaggagca

SEQ ID NO: 482584 - RNA, 32 nt, Human
guuuugcuccuugguauuugauuugcacuaua

SEQ ID NO: 482585 - RNA, 32 nt, Human
guuuugcucuccaaucuagguucaguugaagg

SEQ ID NO: 482586 - RNA, 32 nt, Human
guuuugcucuguuuugauaccuguaauauagg

SEQ ID NO: 482587 - RNA, 32 nt, Human
guuuugcugccagcccccaaaaagcaggcgau

SEQ ID NO: 482588 - RNA, 32 nt, Human
guuuugcugcugcaucucaccggaauacugag

SEQ ID NO: 482589 - RNA, 32 nt, Human
guuuugcugggcagugguucccagagagucag

SEQ ID NO: 482590 - RNA, 32 nt, Human
guuuugcuguguugcccaagcuggaacuugaa

SEQ ID NO: 482591 - RNA, 32 nt, Human
guuuugcuuaauuccacuuaugcaucagucau

SEQ ID NO: 482592 - RNA, 32 nt, Human
guuuugcuucugucugucuguuuauuggaaac

SEQ ID NO: 482593 - RNA, 32 nt, Human
guuuugcuuugcuugcuugucccccauccugu

SEQ ID NO: 482594 - RNA, 32 nt, Human
guuuugcuuugcuuguugugaauuaaaauggg

SEQ ID NO: 482595 - RNA, 23 nt, Human
guuuuggaagagcuuuuuauuua

SEQ ID NO: 482596 - RNA, 32 nt, Human
guuuuggaaggugaagggcuaucagaaacaau

SEQ ID NO: 482597 - RNA, 32 nt, Human
guuuuggacaaaacagucacuggggagaucac

SEQ ID NO: 482598 - RNA, 32 nt, Human
guuuuggagagggaaguggagcagccagcaag

SEQ ID NO: 482599 - RNA, 32 nt, Human
guuuuggagauuacuccaucuguccaucaaaa

SEQ ID NO: 482600 - RNA, 32 nt, Human
guuuuggagccaagucgaccuggcaucagguc

SEQ ID NO: 482601 - RNA, 32 nt, Human
guuuuggaggcaggcgggagucauggauguag

SEQ ID NO: 482602 - RNA, 32 nt, Human
guuuuggagguggcugggcaguggcgggcaga

SEQ ID NO: 482603 - RNA, 32 nt, Human
guuuuggauacaguuauugaugaggcuuggcc

SEQ ID NO: 482604 - RNA, 32 nt, Human
guuuuggcucaauuuggguuuguuggucacau

SEQ ID NO: 482605 - RNA, 32 nt, Human
guuuuggcucacugcagccuccgccuucuggg

SEQ ID NO: 482606 - RNA, 32 nt, Human
guuuuggcuccuggugcugacaugggcugggg

SEQ ID NO: 482607 - RNA, 32 nt, Human
guuuuggcugcucuccaucucuuguaccagcc

SEQ ID NO: 482608 - RNA, 32 nt, Human
guuuugggaagcgcuucacuccagguugguag

SEQ ID NO: 482609 - RNA, 32 nt, Human
guuuugggcacaggggaaggaggacuccgguc

SEQ ID NO: 482610 - RNA, 32 nt, Human
guuuuggggaaaggaagaaguucuuggcugag

SEQ ID NO: 482611 - RNA, 32 nt, Human
guuuuggggaaaguuggagaagccguggccuu

SEQ ID NO: 482612 - RNA, 31 nt, Human
guuuuggggcauucaggaguuggagauagcc

SEQ ID NO: 482613 - RNA, 32 nt, Human
guuuuggggccagacacgcgacggcucugcug

SEQ ID NO: 482614 - RNA, 32 nt, Human
guuuuggggcguucugucagaggggaaggacg

SEQ ID NO: 482615 - RNA, 32 nt, Human
guuuugggggcauucauugcagguguggcagu

SEQ ID NO: 482616 - RNA, 32 nt, Human
guuuuggguuaauuuguuauacagcuguagau

SEQ ID NO: 482617 - RNA, 32 nt, Human
guuuuggguuccugcccugauggucuaugucu

SEQ ID NO: 482618 - RNA, 32 nt, Human
guuuugguaggagugcucaugguucugucauu

SEQ ID NO: 482619 - RNA, 32 nt, Human
guuuugguccaucaugcauccauccucauuaa

SEQ ID NO: 482620 - RNA, 32 nt, Human
guuuuggucccugcacuuuguggugugacucc

SEQ ID NO: 482621 - RNA, 32 nt, Human
guuuugguggcagaggugggaugagcuggaaa

SEQ ID NO: 482622 - RNA, 32 nt, Human
guuuugguucuagcuuuagauuuuggauuuuc

SEQ ID NO: 482623 - RNA, 32 nt, Human
guuuugguuuccuucuaacuugcccacggcag

SEQ ID NO: 482624 - RNA, 32 nt, Human
guuuugguuuuguuuggggugggugggucauu

SEQ ID NO: 482625 - RNA, 32 nt, Human
guuuuguaaaaauacaaaaauuaccugggccu

SEQ ID NO: 482626 - RNA, 32 nt, Human
guuuuguacauacuucauuucuuuccuccucu

SEQ ID NO: 482627 - RNA, 32 nt, Human
guuuuguagauauggugacuccagucuuuguu

SEQ ID NO: 482628 - RNA, 32 nt, Human
guuuuguaguaacuugcacuucccuggugcca

SEQ ID NO: 482629 - RNA, 23 nt, Human
guuuuguauaguuuucuguuuga

SEQ ID NO: 482630 - RNA, 19 nt, Human
guuuuguaugcccuggaga

SEQ ID NO: 482631 - RNA, 32 nt, Human
guuuuguauuuuuaguagagacaggguuucac

SEQ ID NO: 482632 - RNA, 32 nt, Human
guuuuguauuuuuaguagagaugggguuucac

SEQ ID NO: 482633 - RNA, 32 nt, Human
guuuugucacagacuucccuaguguuuguacu

SEQ ID NO: 482634 - RNA, 32 nt, Human
guuuugucacccaggcuggagugcaguggggc

SEQ ID NO: 482635 - RNA, 32 nt, Human
guuuugucacccaggcuggagugcaguggugu

SEQ ID NO: 482636 - RNA, 32 nt, Human
guuuugucacccuguuggucagaaagaugucu

SEQ ID NO: 482637 - RNA, 32 nt, Human
guuuugucagcuuucucauguugagaucuguu

SEQ ID NO: 482638 - RNA, 32 nt, Human
guuuuguccaugccuuccucccugcacgcaca

SEQ ID NO: 482639 - RNA, 32 nt, Human
guuuuguccugccucuuguuucugugccccgg

SEQ ID NO: 482640 - RNA, 32 nt, Human
guuuugucgcccaggcuggagugcaguggcau

SEQ ID NO: 482641 - RNA, 32 nt, Human
guuuugucuaacuccauucugaacuuucaccg

SEQ ID NO: 482642 - RNA, 32 nt, Human
guuuugucuccucugagguuggcccauggcca

SEQ ID NO: 482643 - RNA, 32 nt, Human
guuuugucugauuuucuccaucauccugauua

SEQ ID NO: 482644 - RNA, 32 nt, Human
guuuugucuguuucccccuugugugguuuccg

SEQ ID NO: 482645 - RNA, 32 nt, Human
guuuugugaaacacacacucugccauuucagg

SEQ ID NO: 482646 - RNA, 32 nt, Human
guuuugugcuugaacccagggcugugcuggug

SEQ ID NO: 482647 - RNA, 31 nt, Human
guuuuguggugccuggagccuguguccugcc

SEQ ID NO: 482648 - RNA, 32 nt, Human
guuuugugugcuguuuggagacuggguguuua

SEQ ID NO: 482649 - RNA, 32 nt, Human
guuuugugugugugcccacacguagacaaaug

SEQ ID NO: 482650 - RNA, 32 nt, Human
guuuugugugugugcguguguguaaaugugua

SEQ ID NO: 482651 - RNA, 32 nt, Human
guuuuguucucagcaucugaugaaggggcuca

SEQ ID NO: 482652 - RNA, 31 nt, Human
guuuuguucucaguuuuaaccaaagccagug

SEQ ID NO: 482653 - RNA, 32 nt, Human
guuuuguucucccacauauucucuucaaugcu

SEQ ID NO: 482654 - RNA, 32 nt, Human
guuuuguucuucuuggugugcuuuuuggaugg

SEQ ID NO: 482655 - RNA, 32 nt, Human
guuuuguucuuucuuuugccuuaaguaaugac

SEQ ID NO: 482656 - RNA, 32 nt, Human
guuuuguugcccaggcuggucuccagcuucua

SEQ ID NO: 482657 - RNA, 32 nt, Human
guuuuguuguuuuuguuguugauggcuaacca

SEQ ID NO: 482658 - RNA, 32 nt, Human
guuuuguuuccccucagugucuguaacccuua

SEQ ID NO: 482659 - RNA, 32 nt, Human
guuuuguuucuauuuguaguuucuugaguaag

SEQ ID NO: 482660 - RNA, 32 nt, Human
guuuuguuucuugucuuuguguucugugguac

SEQ ID NO: 482661 - RNA, 32 nt, Human
guuuuguuugagacucagucucgcucuguugc

SEQ ID NO: 482662 - RNA, 32 nt, Human
guuuuguuugagauagggucuugcucuaucac

SEQ ID NO: 482663 - RNA, 32 nt, Human
guuuuguuugagauggagucucgcucuguugc

SEQ ID NO: 482664 - RNA, 32 nt, Human
guuuuguuuggaggauggcuucugcugcuaaa

SEQ ID NO: 482665 - RNA, 32 nt, Human
guuuuguuuguuuccuuugugguacaaaaguu

SEQ ID NO: 482666 - RNA, 32 nt, Human
guuuuguuuuaaaauagcuuugcagugaaagc

SEQ ID NO: 482667 - RNA, 32 nt, Human
guuuuguuuuggugguuguuuuggaaaaacag

SEQ ID NO: 482668 - RNA, 23 nt, Human
guuuuguuuuguucuucuuggug

SEQ ID NO: 482669 - RNA, 32 nt, Human
guuuuguuuuuaaagaauacagaaggagccaa

SEQ ID NO: 482670 - RNA, 32 nt, Human
guuuuguuuuucuuuccuugggcucagcaauu

SEQ ID NO: 482671 - RNA, 29 nt, Human
guuuuguuuuuguuacugccuggaugagg

SEQ ID NO: 482672 - RNA, 32 nt, Human
guuuuguuuuuguuuuguaacuuugguugaug

SEQ ID NO: 482673 - RNA, 32 nt, Human
guuuuuaaaaaucaguuucauuuucauauuuc

SEQ ID NO: 482674 - RNA, 32 nt, Human
guuuuuaaaagguuuugaaacagcugcauccu

SEQ ID NO: 482675 - RNA, 32 nt, Human
guuuuuaaaguguggcaguuuugaguaguaac

SEQ ID NO: 482676 - RNA, 32 nt, Human
guuuuuaaaugcuauagcccugggcuugcccc

SEQ ID NO: 482677 - RNA, 32 nt, Human
guuuuuaagagagggcugauuaucacagcccu

SEQ ID NO: 482678 - RNA, 32 nt, Human
guuuuuaaggaaauauggcugugagaggaaua

SEQ ID NO: 482679 - RNA, 32 nt, Human
guuuuuaauacauagcaacagacuggguuauu

SEQ ID NO: 482680 - RNA, 32 nt, Human
guuuuuaauaucuguauauaaguuguguauuu

SEQ ID NO: 482681 - RNA, 32 nt, Human
guuuuuacacuucucuuuaauucccaccuaag

SEQ ID NO: 482682 - RNA, 32 nt, Human
guuuuuacauuggaaauugucuucucaaaauu

SEQ ID NO: 482683 - RNA, 32 nt, Human
guuuuuaccugacaguuauaccacagguagac

SEQ ID NO: 482684 - RNA, 32 nt, Human
guuuuuacuacaaaauaaguuacuuaguuuua

SEQ ID NO: 482685 - RNA, 19 nt, Human
guuuuuacucuauauagug

SEQ ID NO: 482686 - RNA, 32 nt, Human
guuuuuacucuauauagugaaaagcuagggag

SEQ ID NO: 482687 - RNA, 32 nt, Human
guuuuuacuguguauggggagguuguaguauu

SEQ ID NO: 482688 - RNA, 32 nt, Human
guuuuuacuugucaguuuucucucagcaaaca

SEQ ID NO: 482689 - RNA, 32 nt, Human
guuuuuagacccuuccaaggaagaggccagaa

SEQ ID NO: 482690 - RNA, 32 nt, Human
guuuuuagagaaggaaaaaugcuacucaguga

SEQ ID NO: 482691 - RNA, 32 nt, Human
guuuuuagccaauugauccucuacuuuccuuc

SEQ ID NO: 482692 - RNA, 32 nt, Human
guuuuuaguagagacaggguuucuccaugcug

SEQ ID NO: 482693 - RNA, 32 nt, Human
guuuuuaguagagacaggguuucuccauguug

SEQ ID NO: 482694 - RNA, 32 nt, Human
guuuuuaguagagaugggguuucuccaugucg

SEQ ID NO: 482695 - RNA, 32 nt, Human
guuuuuaguccauugacuaugcagccuaaugu

SEQ ID NO: 482696 - RNA, 32 nt, Human
guuuuuaguugcucaaagagccucacaguuac

SEQ ID NO: 482697 - RNA, 32 nt, Human
guuuuuauaucuguucccuaccccuguaaucc

SEQ ID NO: 482698 - RNA, 31 nt, Human
guuuuuaucaauaaauacuuguugauugugg

SEQ ID NO: 482699 - RNA, 32 nt, Human
guuuuuauccugucuuuucuucaucacaaaag

SEQ ID NO: 482700 - RNA, 32 nt, Human
guuuuuaucugguacccacacacacauaauac

SEQ ID NO: 482701 - RNA, 21 nt, Human
guuuuuaucuuguuauuggug

SEQ ID NO: 482702 - RNA, 32 nt, Human
guuuuuaugcugaagaggagaauggagcacua

SEQ ID NO: 482703 - RNA, 32 nt, Human
guuuuuauggauccuugucuucucccauucau

SEQ ID NO: 482704 - RNA, 32 nt, Human
guuuuuauuagggauuuuaaaaggggaggggu

SEQ ID NO: 482705 - RNA, 32 nt, Human
guuuuuauucucaguaccucaggcuccccugu

SEQ ID NO: 482706 - RNA, 32 nt, Human
guuuuuauuuaauucuuuuaaaaugaaaaauu

SEQ ID NO: 482707 - RNA, 32 nt, Human
guuuuucaaauccauugcuuagcuaacuuuuu

SEQ ID NO: 482708 - RNA, 32 nt, Human
guuuuucacgagacaggagcgcagagauggag

SEQ ID NO: 482709 - RNA, 32 nt, Human
guuuuucacuguucaguggccuaaauguagau

SEQ ID NO: 482710 - RNA, 32 nt, Human
guuuuucagagaacugaacuguggaaaaauga

SEQ ID NO: 482711 - RNA, 32 nt, Human
guuuuucagcaacuaaggugccucauguucug

SEQ ID NO: 482712 - RNA, 22 nt, Human
guuuuucaggcugggcacagug

SEQ ID NO: 482713 - RNA, 32 nt, Human
guuuuucagucauuuccuacugugaguggagu

SEQ ID NO: 482714 - RNA, 32 nt, Human
guuuuucauuggccugaccucugcuucucagg

SEQ ID NO: 482715 - RNA, 32 nt, Human
guuuuucauuuugccuuuaccaaagaucauuu

SEQ ID NO: 482716 - RNA, 32 nt, Human
guuuuuccagaagagaguagcuuuaggaagag

SEQ ID NO: 482717 - RNA, 32 nt, Human
guuuuuccagccuccaagucaccuggccuggg

SEQ ID NO: 482718 - RNA, 32 nt, Human
guuuuuccagcggcccagccccagaaaggucc

SEQ ID NO: 482719 - RNA, 32 nt, Human
guuuuuccagugccauuggugaaagcauuucu

SEQ ID NO: 482720 - RNA, 32 nt, Human
guuuuuccauuuccucacauguccacgagaug

SEQ ID NO: 482721 - RNA, 32 nt, Human
guuuuucccaaguacccugagauacuucccaa

SEQ ID NO: 482722 - RNA, 32 nt, Human
guuuuucccacauuugcugcaggcauggcugu

SEQ ID NO: 482723 - RNA, 32 nt, Human
guuuuuccccagcaccaccaucaaggccucga

SEQ ID NO: 482724 - RNA, 32 nt, Human
guuuuucccccuucaaauuuaugucuuuguua

SEQ ID NO: 482725 - RNA, 32 nt, Human
guuuuuccccuccacucagaaaccccugcccu

SEQ ID NO: 482726 - RNA, 32 nt, Human
guuuuuccccuucacacauuaucucucauguu

SEQ ID NO: 482727 - RNA, 32 nt, Human
guuuuuccuagaggagagauuaguaccuauuc

SEQ ID NO: 482728 - RNA, 32 nt, Human
guuuuuccucaccgacaguaccaucaugccuu

SEQ ID NO: 482729 - RNA, 32 nt, Human
guuuuuccuccuuuaagacuuaccucaacacu

SEQ ID NO: 482730 - RNA, 32 nt, Human
guuuuuccucuguuaaaaaccuuaagugcugc

SEQ ID NO: 482731 - RNA, 32 nt, Human
guuuuuccuuucucucucuuaagccuuauucu

SEQ ID NO: 482732 - RNA, 32 nt, Human
guuuuucuagcuauagugucucgaguacuaau

SEQ ID NO: 482733 - RNA, 32 nt, Human
guuuuucucauugugucucugccuagcucccu

SEQ ID NO: 482734 - RNA, 32 nt, Human
guuuuucuccaaaaccugaacauuuuuacucu

SEQ ID NO: 482735 - RNA, 22 nt, Human
guuuuucucccuuuuccauccc

SEQ ID NO: 482736 - RNA, 21 nt, Human
guuuuucuccuucuccuuccc

SEQ ID NO: 482737 - RNA, 32 nt, Human
guuuuucucuauaaagggucaggcccgucagc

SEQ ID NO: 482738 - RNA, 32 nt, Human
guuuuucucuuucuuacucccucucucccuuu

SEQ ID NO: 482739 - RNA, 32 nt, Human
guuuuucugagugccuuagacauugacuucau

SEQ ID NO: 482740 - RNA, 32 nt, Human
guuuuucugccauuaggaaacagccccuuacu

SEQ ID NO: 482741 - RNA, 32 nt, Human
guuuuucugucugccuucgguucucuguuucu

SEQ ID NO: 482742 - RNA, 32 nt, Human
guuuuucuuaaugccaguuuacaugggaaugc

SEQ ID NO: 482743 - RNA, 32 nt, Human
guuuuucuuacuggagcuucauuuugguaaga

SEQ ID NO: 482744 - RNA, 32 nt, Human
guuuuucuucagaacaucaacagcuucuuucc

SEQ ID NO: 482745 - RNA, 32 nt, Human
guuuuucuucgggugcauuuaugagaguucac

SEQ ID NO: 482746 - RNA, 32 nt, Human
guuuuucuuuauagcuccuuuuuacucuccug

SEQ ID NO: 482747 - RNA, 32 nt, Human
guuuuucuuuuaagaauggccccacacugaac

SEQ ID NO: 482748 - RNA, 32 nt, Human
guuuuucuuuuucauuuauucagcaacuauuu

SEQ ID NO: 482749 - RNA, 32 nt, Human
guuuuugaaacagggucucacucuguugccca

SEQ ID NO: 482750 - RNA, 32 nt, Human
guuuuugaaagaagaaaaauauggcucuguuc

SEQ ID NO: 482751 - RNA, 32 nt, Human
guuuuugaagcugcaaacacuacaaugcuuug

SEQ ID NO: 482752 - RNA, 32 nt, Human
guuuuugaaggcagaaagcaaaauuauguuug

SEQ ID NO: 482753 - RNA, 32 nt, Human
guuuuugacuugacuugaauugcuugauacuu

SEQ ID NO: 482754 - RNA, 32 nt, Human
guuuuugagacagggucucgcucuauggccca

SEQ ID NO: 482755 - RNA, 32 nt, Human
guuuuugagacagggucuugcucugucaccca

SEQ ID NO: 482756 - RNA, 32 nt, Human
guuuuugagauggagucucgcucugucgccca

SEQ ID NO: 482757 - RNA, 32 nt, Human
guuuuugagauggagucucuugcucugucauc

SEQ ID NO: 482758 - RNA, 32 nt, Human
guuuuugagauggagucuuguucugucaccca

SEQ ID NO: 482759 - RNA, 32 nt, Human
guuuuugagggcagaaagcuagcuauggguag

SEQ ID NO: 482760 - RNA, 32 nt, Human
guuuuugagguaaaguuguuuuugaaauuucu

SEQ ID NO: 482761 - RNA, 32 nt, Human
guuuuugaugcuagaaaaauggaaacaagaga

SEQ ID NO: 482762 - RNA, 32 nt, Human
guuuuugcaaagcaccuggagauguuugcugg

SEQ ID NO: 482763 - RNA, 32 nt, Human
guuuuugccaguuuagggcaguagcugcuuuu

SEQ ID NO: 482764 - RNA, 32 nt, Human
guuuuugccaucaccaguuucucaggcugggg

SEQ ID NO: 482765 - RNA, 32 nt, Human
guuuuugccauguugcccagacuggucuugaa

SEQ ID NO: 482766 - RNA, 32 nt, Human
guuuuugccauuaaaaaugauguaauaguuac

SEQ ID NO: 482767 - RNA, 32 nt, Human
guuuuugcccauccucccaaucucaauacagc

SEQ ID NO: 482768 - RNA, 32 nt, Human
guuuuugccucugccauagagcucaccucauu

SEQ ID NO: 482769 - RNA, 32 nt, Human
guuuuugcguuggucacccugcccuccgcacg

SEQ ID NO: 482770 - RNA, 32 nt, Human
guuuuugcucugccauuuacuugcuguguguc

SEQ ID NO: 482771 - RNA, 32 nt, Human
guuuuugcugggacaaauacuacucaaauacu

SEQ ID NO: 482772 - RNA, 32 nt, Human
guuuuugcuguagcccuagagcacuuuguuug

SEQ ID NO: 482773 - RNA, 32 nt, Human
guuuuugcuguugaacggugauuucuguccaa

SEQ ID NO: 482774 - RNA, 32 nt, Human
guuuuuggaagacagcaaagaggggcaauggc

SEQ ID NO: 482775 - RNA, 32 nt, Human
guuuuuggagagaaauucaggagcaccuagcu

SEQ ID NO: 482776 - RNA, 32 nt, Human
guuuuuggagaucaugaauguuucuacaacac

SEQ ID NO: 482777 - RNA, 32 nt, Human
guuuuuggcaaaaacuccaugacuuuaaacua

SEQ ID NO: 482778 - RNA, 31 nt, Human
guuuuuggcaaaggaagguaacuucaaugua

SEQ ID NO: 482779 - RNA, 31 nt, Human
guuuuuggcuuuuucugaaauagcugagagg

SEQ ID NO: 482780 - RNA, 21 nt, Human
guuuuugggggaacagggagc

SEQ ID NO: 482781 - RNA, 21 nt, Human
guuuuuggggucauggggagg

SEQ ID NO: 482782 - RNA, 20 nt, Human
guuuuugggguggggggugu

SEQ ID NO: 482783 - RNA, 32 nt, Human
guuuuuggugcuaauggaaaggacccgagaua

SEQ ID NO: 482784 - RNA, 32 nt, Human
guuuuugguuagagccaagauagcucccaugc

SEQ ID NO: 482785 - RNA, 32 nt, Human
guuuuuguaaaguguggucccaacaggaggac

SEQ ID NO: 482786 - RNA, 32 nt, Human
guuuuuguaauagugagccucacuuuccuguc

SEQ ID NO: 482787 - RNA, 32 nt, Human
guuuuuguagcaaaugaaaauuucuucaaaua

SEQ ID NO: 482788 - RNA, 32 nt, Human
guuuuuguauuuuuaguagagacagaguuucg

SEQ ID NO: 482789 - RNA, 32 nt, Human
guuuuugucacauacacauacagcauuuggaa

SEQ ID NO: 482790 - RNA, 32 nt, Human
guuuuugucaugccacgugccaaaggccacau

SEQ ID NO: 482791 - RNA, 32 nt, Human
guuuuugucugacuucuacucugucaaucucu

SEQ ID NO: 482792 - RNA, 20 nt, Human
guuuuugucugcuguaagug

SEQ ID NO: 482793 - RNA, 32 nt, Human
guuuuugugaagaucaaagaagcuaaauauau

SEQ ID NO: 482794 - RNA, 32 nt, Human
guuuuugugcaggaacagccccucccgucuuu

SEQ ID NO: 482795 - RNA, 32 nt, Human
guuuuuguggcagccuuugugggaguggucug

SEQ ID NO: 482796 - RNA, 32 nt, Human
guuuuuguggccagggucuucaugaacacuaa

SEQ ID NO: 482797 - RNA, 22 nt, Human
guuuuuguggguauuugccuca

SEQ ID NO: 482798 - RNA, 32 nt, Human
guuuuugugguuagcuccuucuugccaaccaa

SEQ ID NO: 482799 - RNA, 32 nt, Human
guuuuuguguccugccaggcaccguggucuca

SEQ ID NO: 482800 - RNA, 32 nt, Human
guuuuuguguuacugggcaugugccccuuuag

SEQ ID NO: 482801 - RNA, 32 nt, Human
guuuuuguguuaggaauaaaaagucauaaacu

SEQ ID NO: 482802 - RNA, 32 nt, Human
guuuuuguguuuuuaguaaagacagggguuuc

SEQ ID NO: 482803 - RNA, 24 nt, Human
guuuuuguucaguuuaucuguuca

SEQ ID NO: 482804 - RNA, 32 nt, Human
guuuuuguugagauguaauuuugcucuuguug

SEQ ID NO: 482805 - RNA, 32 nt, Human
guuuuuguuguuguuuauagacacucuugggu

SEQ ID NO: 482806 - RNA, 32 nt, Human
guuuuuguuguuguuuuuccucuccuuuugag

SEQ ID NO: 482807 - RNA, 32 nt, Human
guuuuuguuucucaagcucagugcauaguggu

SEQ ID NO: 482808 - RNA, 32 nt, Human
guuuuuguuuugcugaggcucagcuucuuccu

SEQ ID NO: 482809 - RNA, 32 nt, Human
guuuuuguuuuguuuuuacuguauuuauuuua

SEQ ID NO: 482810 - RNA, 32 nt, Human
guuuuuguuuuuguuuuccuugcagauacugu

SEQ ID NO: 482811 - RNA, 20 nt, Human
guuuuuucaaugcugcagug

SEQ ID NO: 482812 - RNA, 23 nt, Human
guuuuuuccacgaaacccagaug

SEQ ID NO: 482813 - RNA, 21 nt, Human
guuuuuuccaguuugucagug

SEQ ID NO: 482814 - RNA, 19 nt, Human
guuuuuuccugcacaugug

SEQ ID NO: 482815 - RNA, 20 nt, Human
guuuuuuccuggagucagug

SEQ ID NO: 482816 - RNA, 20 nt, Human
guuuuuuccuuugaauggug

SEQ ID NO: 482817 - RNA, 20 nt, Human
guuuuuucuucugugcauug

SEQ ID NO: 482818 - RNA, 23 nt, Human
guuuuuugagguggagugagugg

SEQ ID NO: 482819 - RNA, 22 nt, Human
guuuuuuggccgggcgcagugg

SEQ ID NO: 482820 - RNA, 32 nt, Human
  misc_feature (1)..(1): n is a, c, g, or u
ncacgccuguaaucccagcacuuugggaggcc

SEQ ID NO: 482821 - RNA, 32 nt, Human
  misc_feature (1)..(1): n is a, c, g, or u
ngcucacaccuguaauccuagcacuuugggag

SEQ ID NO: 482822 - RNA, 32 nt, Human
  misc_feature (1)..(2): n is a, c, g, or u
nncacgccuguaaucccagcacuuugggaggc

SEQ ID NO: 482823 - RNA, 32 nt, Human
  misc_feature (1)..(3): n is a, c, g, or u
nnncacgccuguaaucccagcacuuugggagg

SEQ ID NO: 482824 - RNA, 23 nt, Human
uaaaaaagaucauguucauuguu

SEQ ID NO: 482825 - RNA, 23 nt, Human
uaaaaaauuuacuucugucauua

SEQ ID NO: 482826 - RNA, 32 nt, Human
uaaaaacaacacagucauugacuuuacaauuc

SEQ ID NO: 482827 - RNA, 32 nt, Human
uaaaaacaagaaaaggagcagcuuugagaguu

SEQ ID NO: 482828 - RNA, 32 nt, Human
uaaaaacaauuuacaacaguaagcaccuguac

SEQ ID NO: 482829 - RNA, 32 nt, Human
uaaaaacacaugcacauguauguucauugcag

SEQ ID NO: 482830 - RNA, 32 nt, Human
uaaaaacaccaaagaaggagguugcuacaccu

SEQ ID NO: 482831 - RNA, 32 nt, Human
uaaaaacacugcauccucuuaggcaaccacuu

SEQ ID NO: 482832 - RNA, 32 nt, Human
uaaaaacagacaccuucuauagcauuguuuua

SEQ ID NO: 482833 - RNA, 32 nt, Human
uaaaaacagcaaaaccaaauaaaguggagaug

SEQ ID NO: 482834 - RNA, 32 nt, Human
uaaaaacaggaaaaacccaaaggagagaacua

SEQ ID NO: 482835 - RNA, 31 nt, Human
uaaaaacauacuuuauaacuuuaagagauuu

SEQ ID NO: 482836 - RNA, 32 nt, Human
uaaaaaccaaaccaauaaaauuuuuauuuauu

SEQ ID NO: 482837 - RNA, 32 nt, Human
uaaaaaccaaggauccuguccuagagaaagca

SEQ ID NO: 482838 - RNA, 32 nt, Human
uaaaaaccacugccucaaucucugguucacuc

SEQ ID NO: 482839 - RNA, 32 nt, Human
uaaaaaccaguccucucuaaucucagguggga

SEQ ID NO: 482840 - RNA, 32 nt, Human
uaaaaaccauaugcaauaaauaccucauugua

SEQ ID NO: 482841 - RNA, 32 nt, Human
uaaaaaccccacagugacacacacaaaagagc

SEQ ID NO: 482842 - RNA, 32 nt, Human
uaaaaacccugaacacugaggcuugagggagu

SEQ ID NO: 482843 - RNA, 32 nt, Human
uaaaaaccucaaaaaugcauugccaugauuuu

SEQ ID NO: 482844 - RNA, 32 nt, Human
uaaaaacguagcuaccguacacacacaucaau

SEQ ID NO: 482845 - RNA, 32 nt, Human
uaaaaacuaaaucacauugguaaaaggccuac

SEQ ID NO: 482846 - RNA, 32 nt, Human
uaaaaacucagaauguaccaucuuguuuccuu

SEQ ID NO: 482847 - RNA, 32 nt, Human
uaaaaacugcauuggcugggugcaguggcuca

SEQ ID NO: 482848 - RNA, 32 nt, Human
uaaaaacugccaccccaacacccuuccauuaa

SEQ ID NO: 482849 - RNA, 32 nt, Human
uaaaaacuggagaaauaggaauuugugaaccc

SEQ ID NO: 482850 - RNA, 32 nt, Human
uaaaaacuguaacacucaccgccaggguccgc

SEQ ID NO: 482851 - RNA, 32 nt, Human
uaaaaagaaaacaaaaccaaaaguuauuaaaa

SEQ ID NO: 482852 - RNA, 32 nt, Human
uaaaaagaaaacagcuccuugaacacagugag

SEQ ID NO: 482853 - RNA, 31 nt, Human
uaaaaagaacaaucauuuaaucaguaccauu

SEQ ID NO: 482854 - RNA, 32 nt, Human
uaaaaagaagccauggaaaaacuuccuaguaa

SEQ ID NO: 482855 - RNA, 23 nt, Human
uaaaaagacacaaguuuucuuuu

SEQ ID NO: 482856 - RNA, 32 nt, Human
uaaaaagacgcuuuccucuccucuucccuccu

SEQ ID NO: 482857 - RNA, 32 nt, Human
uaaaaagacguccugcccugugccccaguaca

SEQ ID NO: 482858 - RNA, 32 nt, Human
uaaaaagagcaucugcucuuggacuuguaucu

SEQ ID NO: 482859 - RNA, 32 nt, Human
uaaaaagagccaucuggucucuggcuagaguu

SEQ ID NO: 482860 - RNA, 32 nt, Human
uaaaaagauagucuucccauuagcuagagagc

SEQ ID NO: 482861 - RNA, 32 nt, Human
uaaaaagauucuggggaaggggaaaggcaggc

SEQ ID NO: 482862 - RNA, 32 nt, Human
uaaaaagcaaacauuucaaacuguccaaauga

SEQ ID NO: 482863 - RNA, 32 nt, Human
uaaaaagcaacuccugccucccuuccucaccc

SEQ ID NO: 482864 - RNA, 32 nt, Human
uaaaaagcacagggggaagaagaagagauuuc

SEQ ID NO: 482865 - RNA, 32 nt, Human
uaaaaagcacccuuucuuuguacagugggggu

SEQ ID NO: 482866 - RNA, 32 nt, Human
uaaaaagcaggcugagguggucucagauggcg

SEQ ID NO: 482867 - RNA, 32 nt, Human
uaaaaagccaaaggucaaagucaaaguccuuu

SEQ ID NO: 482868 - RNA, 32 nt, Human
uaaaaagccaccugagcuccugaggccauguc

SEQ ID NO: 482869 - RNA, 32 nt, Human
uaaaaagccaugaaagggacucucauuagaag

SEQ ID NO: 482870 - RNA, 32 nt, Human
uaaaaagccccuuuuaaagcaucuacuugaag

SEQ ID NO: 482871 - RNA, 32 nt, Human
uaaaaagccuccaucacucuauuuggcucauu

SEQ ID NO: 482872 - RNA, 32 nt, Human
uaaaaagccugagacgccuuacaaaaagcaag

SEQ ID NO: 482873 - RNA, 32 nt, Human
uaaaaagccugauuauuuuaggccaguuuacc

SEQ ID NO: 482874 - RNA, 32 nt, Human
uaaaaagcuagcauuugccuagaucauaacua

SEQ ID NO: 482875 - RNA, 32 nt, Human
uaaaaagcucagucuuuccccugggcccagaa

SEQ ID NO: 482876 - RNA, 32 nt, Human
uaaaaagcucuaagcucuagagucuagaucca

SEQ ID NO: 482877 - RNA, 32 nt, Human
uaaaaaggaaauaguugcugaagaggaaaacc

SEQ ID NO: 482878 - RNA, 32 nt, Human
uaaaaaggaacaaaacuuuaguauuuaauuag

SEQ ID NO: 482879 - RNA, 32 nt, Human
uaaaaaggaaugagaucauguccuuugcaggg

SEQ ID NO: 482880 - RNA, 32 nt, Human
uaaaaaggacagaggcuacagauggaguugcu

SEQ ID NO: 482881 - RNA, 32 nt, Human
uaaaaaggagaaacagggcucagcuggcaucu

SEQ ID NO: 482882 - RNA, 32 nt, Human
uaaaaaggagccacccagaaacuuagacagaa

SEQ ID NO: 482883 - RNA, 32 nt, Human
uaaaaaggccccagagagcuaacucacccuuc

SEQ ID NO: 482884 - RNA, 32 nt, Human
uaaaaagggaagagaaggaccgagacagaagc

SEQ ID NO: 482885 - RNA, 32 nt, Human
uaaaaagggggcugcauucuuguugguagcau

SEQ ID NO: 482886 - RNA, 32 nt, Human
uaaaaaggucuguuaaugucauggccuugaaa

SEQ ID NO: 482887 - RNA, 32 nt, Human
uaaaaaggugugcaauugacaauguuugugcc

SEQ ID NO: 482888 - RNA, 32 nt, Human
uaaaaaguaaagcauacaaauacuagaagaaa

SEQ ID NO: 482889 - RNA, 32 nt, Human
uaaaaaguaaaggggaagaaagaacuugacag

SEQ ID NO: 482890 - RNA, 32 nt, Human
uaaaaaguacauguaaaaguacauuugaugac

SEQ ID NO: 482891 - RNA, 32 nt, Human
uaaaaaguaccuguaucaaaggaauuuuaaca

SEQ ID NO: 482892 - RNA, 32 nt, Human
uaaaaaguagccaggcgugguggugcaugccu

SEQ ID NO: 482893 - RNA, 32 nt, Human
uaaaaaguaggagggguggaggugagaaggag

SEQ ID NO: 482894 - RNA, 32 nt, Human
uaaaaaguaucuaagcuguuacaguagcuuuc

SEQ ID NO: 482895 - RNA, 32 nt, Human
uaaaaagucaaauuacgaccauaaugaguauu

SEQ ID NO: 482896 - RNA, 32 nt, Human
uaaaaagucaucuuucccucacagaaagaaac

SEQ ID NO: 482897 - RNA, 32 nt, Human
uaaaaagucaugccacaggaagggucuauugc

SEQ ID NO: 482898 - RNA, 32 nt, Human
uaaaaagucauuuggguccugggaagcacugg

SEQ ID NO: 482899 - RNA, 32 nt, Human
uaaaaagucuucacucucugaagaugaucauu

SEQ ID NO: 482900 - RNA, 32 nt, Human
uaaaaagugaaauaugggauggauucuagaaa

SEQ ID NO: 482901 - RNA, 32 nt, Human
uaaaaagugagaaauggggaaaagaagaggag

SEQ ID NO: 482902 - RNA, 24 nt, Human
uaaaaagugguagcuacagaugau

SEQ ID NO: 482903 - RNA, 32 nt, Human
uaaaaauaaaaauugcuuucagagaguagccc

SEQ ID NO: 482904 - RNA, 32 nt, Human
uaaaaauaaggucauuuuucuccaucaggggc

SEQ ID NO: 482905 - RNA, 32 nt, Human
uaaaaauacaaaaaguuagcugggcauggugg

SEQ ID NO: 482906 - RNA, 32 nt, Human
uaaaaauacaaaaauuaacagcagagcgagac

SEQ ID NO: 482907 - RNA, 32 nt, Human
uaaaaauacaaaaauuagccuggggugguggc

SEQ ID NO: 482908 - RNA, 32 nt, Human
uaaaaauacaaaagaaaauuagccgggugugg

SEQ ID NO: 482909 - RNA, 32 nt, Human
uaaaaauacaaaauauuagcugggcguggugg

SEQ ID NO: 482910 - RNA, 32 nt, Human
uaaaaauacaaacuuggcugggcuuaguggug

SEQ ID NO: 482911 - RNA, 32 nt, Human
uaaaaauacaauaaauuagcugggcauggugg

SEQ ID NO: 482912 - RNA, 32 nt, Human
uaaaaauacacaaaauuagcugggcguggugg

SEQ ID NO: 482913 - RNA, 32 nt, Human
uaaaaauacagaaaauuagcugggcgcagugg

SEQ ID NO: 482914 - RNA, 32 nt, Human
uaaaaauacagcaaauuagcugggcguggugg

SEQ ID NO: 482915 - RNA, 32 nt, Human
uaaaaauaccaaaaauuagccgagcguaguga

SEQ ID NO: 482916 - RNA, 32 nt, Human
uaaaaauacgaaaaauuagcugggcauggugg

SEQ ID NO: 482917 - RNA, 32 nt, Human
uaaaaauacugaauuuaccuucacaaaagauu

SEQ ID NO: 482918 - RNA, 32 nt, Human
uaaaaauagaagaagaaagaauaaagcuuagu

SEQ ID NO: 482919 - RNA, 32 nt, Human
uaaaaauagacaggguacccaguguugccugg

SEQ ID NO: 482920 - RNA, 32 nt, Human
uaaaaauagcucuguaaucugugugacauggc

SEQ ID NO: 482921 - RNA, 32 nt, Human
uaaaaauagcuguguacuacuaauuaauagaa

SEQ ID NO: 482922 - RNA, 32 nt, Human
uaaaaauaggaaauaaagcaguugcuuaaaau

SEQ ID NO: 482923 - RNA, 32 nt, Human
uaaaaauauaaaacuagcugggcacaguggcu

SEQ ID NO: 482924 - RNA, 32 nt, Human
uaaaaauauaaauuguacauuuuguaaaauau

SEQ ID NO: 482925 - RNA, 32 nt, Human
uaaaaauaucuuuuucuccucucagcucauac

SEQ ID NO: 482926 - RNA, 32 nt, Human
uaaaaauaugaggugacaucuuuggcaaccag

SEQ ID NO: 482927 - RNA, 32 nt, Human
uaaaaauauguauuaauuuacuuggccugcua

SEQ ID NO: 482928 - RNA, 32 nt, Human
uaaaaauauuaaaaauaauggcaaaaacuggc

SEQ ID NO: 482929 - RNA, 32 nt, Human
uaaaaauauuuuuaguagagacaggguuucac

SEQ ID NO: 482930 - RNA, 32 nt, Human
uaaaaaucaagaaauauaaaccagauguagca

SEQ ID NO: 482931 - RNA, 32 nt, Human
uaaaaaucaaugaucagaaccccacauuuuag

SEQ ID NO: 482932 - RNA, 32 nt, Human
uaaaaaucacggccaggcacaguggcucaugc

SEQ ID NO: 482933 - RNA, 32 nt, Human
uaaaaaucagaggccuaucuccacuuuaaauc

SEQ ID NO: 482934 - RNA, 32 nt, Human
uaaaaauccuaccuugaguauucagccaauau

SEQ ID NO: 482935 - RNA, 32 nt, Human
uaaaaaucugccagugguguucccaagggaag

SEQ ID NO: 482936 - RNA, 32 nt, Human
uaaaaaucuguggagguugcugguacacacca

SEQ ID NO: 482937 - RNA, 30 nt, Human
uaaaaaugaagcaagagguugaggauucug

SEQ ID NO: 482938 - RNA, 32 nt, Human
uaaaaaugaaggagaaggaggguuugggaugg

SEQ ID NO: 482939 - RNA, 32 nt, Human
uaaaaaugaauugaaccauuucaacuauuuuc

SEQ ID NO: 482940 - RNA, 32 nt, Human
uaaaaaugacuguauuuuuaaaggaauaaauc

SEQ ID NO: 482941 - RNA, 32 nt, Human
uaaaaaugagaaaucacuaaugcuuuuuagac

SEQ ID NO: 482942 - RNA, 32 nt, Human
uaaaaaugagaucucaauagcagcgggcuggg

SEQ ID NO: 482943 - RNA, 32 nt, Human
uaaaaaugagccuuucucaagcacgugagcag

SEQ ID NO: 482944 - RNA, 32 nt, Human
uaaaaaugcaaacuguguaaacagggccucuu

SEQ ID NO: 482945 - RNA, 32 nt, Human
uaaaaaugcuuuucuggcugggcacaguggcu

SEQ ID NO: 482946 - RNA, 32 nt, Human
uaaaaauggaacuuauuuuugucaaaaauaag

SEQ ID NO: 482947 - RNA, 32 nt, Human
uaaaaauggagaaaggagucauggcucucuuu

SEQ ID NO: 482948 - RNA, 31 nt, Human
uaaaaaugggacuucuuuucacauucuuaua

SEQ ID NO: 482949 - RNA, 32 nt, Human
uaaaaaugggugucuucucaggaucuagcagu

SEQ ID NO: 482950 - RNA, 32 nt, Human
uaaaaaugguauggccauuagaucugugcuuu

SEQ ID NO: 482951 - RNA, 32 nt, Human
uaaaaaugucuauuaauauuccaucguauaga

SEQ ID NO: 482952 - RNA, 32 nt, Human
uaaaaaugugccagaauccaccuguggcccga

SEQ ID NO: 482953 - RNA, 22 nt, Human
uaaaaauguguuuucaagcugu

SEQ ID NO: 482954 - RNA, 32 nt, Human
uaaaaauguuguaaauacaucaaaagccugca

SEQ ID NO: 482955 - RNA, 20 nt, Human
uaaaaauuaaauagagguga

SEQ ID NO: 482956 - RNA, 32 nt, Human
uaaaaauuaaccaguaaacacucuguaguaac

SEQ ID NO: 482957 - RNA, 32 nt, Human
uaaaaauuacuuuucuagaaacaccauucugg

SEQ ID NO: 482958 - RNA, 32 nt, Human
uaaaaauuagccaggcgugguggugcaugccu

SEQ ID NO: 482959 - RNA, 32 nt, Human
uaaaaauuagcugagcaugcuggugauuuucu

SEQ ID NO: 482960 - RNA, 32 nt, Human
uaaaaauuagcuggaugugguggugcacaccu

SEQ ID NO: 482961 - RNA, 32 nt, Human
uaaaaauuagcugggugugguggugcaugccu

SEQ ID NO: 482962 - RNA, 32 nt, Human
uaaaaauuauucucucgaagagcaacuuacga

SEQ ID NO: 482963 - RNA, 32 nt, Human
uaaaaauucagaaaauuugcagccugacaaug

SEQ ID NO: 482964 - RNA, 32 nt, Human
uaaaaauucucaaagaccccuaccugcagagg

SEQ ID NO: 482965 - RNA, 32 nt, Human
uaaaaauugcaccccuggacugugcauugucu

SEQ ID NO: 482966 - RNA, 32 nt, Human
uaaaaauugcuauauuuucacaguuucauuau

SEQ ID NO: 482967 - RNA, 32 nt, Human
uaaaaauugcucccaugaaauuccaagcacuc

SEQ ID NO: 482968 - RNA, 32 nt, Human
uaaaaauugucucugcaccaucuuccuuuugu

SEQ ID NO: 482969 - RNA, 32 nt, Human
uaaaaauuucucuuggcuuuaaugacauuuag

SEQ ID NO: 482970 - RNA, 32 nt, Human
uaaaaauuugcucuaauaaaacauaccaaauc

SEQ ID NO: 482971 - RNA, 32 nt, Human
uaaaacaaaguaggaugaaaauucucuuaguu

SEQ ID NO: 482972 - RNA, 32 nt, Human
uaaaacaaaugcggaggcugggcacgguggcu

SEQ ID NO: 482973 - RNA, 24 nt, Human
uaaaacaacaaugagauaccacua

SEQ ID NO: 482974 - RNA, 32 nt, Human
uaaaacaagauggugauuccugacauuccuug

SEQ ID NO: 482975 - RNA, 32 nt, Human
uaaaacaagguguugcuuuguauaucaaaagc

SEQ ID NO: 482976 - RNA, 32 nt, Human
uaaaacaaguagcuucaagaaaccacuggugu

SEQ ID NO: 482977 - RNA, 32 nt, Human
uaaaacaaugcauauuuuacuacaguacagag

SEQ ID NO: 482978 - RNA, 32 nt, Human
uaaaacaauugcucaggaauucugggcuccca

SEQ ID NO: 482979 - RNA, 32 nt, Human
uaaaacacaaaugacagauauggaagaaaaua

SEQ ID NO: 482980 - RNA, 32 nt, Human
uaaaacacaccucacuuauuguacauguugga

SEQ ID NO: 482981 - RNA, 32 nt, Human
uaaaacacagagguguucugaccugcaacuug

SEQ ID NO: 482982 - RNA, 32 nt, Human
uaaaacacagccgucuggccagcugccucgaa

SEQ ID NO: 482983 - RNA, 32 nt, Human
uaaaacaccaauauauucaacuuuacacuucu

SEQ ID NO: 482984 - RNA, 32 nt, Human
uaaaacaccucugcuuucugauguugccuuaa

SEQ ID NO: 482985 - RNA, 32 nt, Human
uaaaacaccuuuccuuaugucuccugaccuga

SEQ ID NO: 482986 - RNA, 32 nt, Human
uaaaacacucucaggauuucaccagaaguuac

SEQ ID NO: 482987 - RNA, 32 nt, Human
uaaaacacuggcauggccuaggaagggcguug

SEQ ID NO: 482988 - RNA, 32 nt, Human
uaaaacagaacaguaacucuaugugaccccag

SEQ ID NO: 482989 - RNA, 32 nt, Human
uaaaacagacuuggacagagucuggaaaaaca

SEQ ID NO: 482990 - RNA, 32 nt, Human
uaaaacagcaccacauaacgcacacaaagaua

SEQ ID NO: 482991 - RNA, 32 nt, Human
uaaaacagccccaccccuaucucccuuugcug

SEQ ID NO: 482992 - RNA, 32 nt, Human
uaaaacagcuggagcauuuccuucccuuucca

SEQ ID NO: 482993 - RNA, 32 nt, Human
uaaaacaggcugcagucuggcacuuuuagaag

SEQ ID NO: 482994 - RNA, 27 nt, Human
uaaaacagguugccagccgaguacaga

SEQ ID NO: 482995 - RNA, 32 nt, Human
uaaaacaguauuuauuuuuacuuuugugacca

SEQ ID NO: 482996 - RNA, 32 nt, Human
uaaaacaguuauuuaauuuccacauauucaag

SEQ ID NO: 482997 - RNA, 32 nt, Human
uaaaacauaccauggagaaugaccucagccuu

SEQ ID NO: 482998 - RNA, 32 nt, Human
uaaaacauauagaaaagagcaagaaugcacau

SEQ ID NO: 482999 - RNA, 24 nt, Human
uaaaacauccuaacuuguuuuuca

SEQ ID NO: 483000 - RNA, 32 nt, Human
uaaaacaugaugacugugucugccugucccca

SEQ ID NO: 483001 - RNA, 32 nt, Human
uaaaacaugcuucagaagaacuggcaccccuu

SEQ ID NO: 483002 - RNA, 32 nt, Human
uaaaacaugugaagcucagagagggguaauga

SEQ ID NO: 483003 - RNA, 32 nt, Human
uaaaacauuagcugggugugguggcgcauacc

SEQ ID NO: 483004 - RNA, 32 nt, Human
uaaaacauucauuaagucuggggugaagauuu

SEQ ID NO: 483005 - RNA, 32 nt, Human
uaaaacauugcuuccuuccuggcucugcuaaa

SEQ ID NO: 483006 - RNA, 32 nt, Human
uaaaacauuuauuuguaaaaugagcuauguuc

SEQ ID NO: 483007 - RNA, 32 nt, Human
uaaaacauuucuccaucacucauuccaggucc

SEQ ID NO: 483008 - RNA, 32 nt, Human
uaaaacauuugguugcuacuguguagacucag

SEQ ID NO: 483009 - RNA, 32 nt, Human
uaaaaccaaagaaaucaauggaacccuugcac

SEQ ID NO: 483010 - RNA, 32 nt, Human
uaaaaccaauacacaaccuauuuucuaggcag

SEQ ID NO: 483011 - RNA, 32 nt, Human
uaaaaccacagccaugaacagacguuggggcu

SEQ ID NO: 483012 - RNA, 32 nt, Human
uaaaaccacccaucuaggucaggaaucacuug

SEQ ID NO: 483013 - RNA, 32 nt, Human
uaaaaccacugcagggaagccaucuggagacu

SEQ ID NO: 483014 - RNA, 22 nt, Human
uaaaaccagcaccgaggcccag

SEQ ID NO: 483015 - RNA, 32 nt, Human
uaaaaccaggugcaugccuguucuuccaucca

SEQ ID NO: 483016 - RNA, 32 nt, Human
uaaaaccaucugcucaguuugacauuuaaaag

SEQ ID NO: 483017 - RNA, 25 nt, Human
uaaaacccacaauaagauauuacua

SEQ ID NO: 483018 - RNA, 32 nt, Human
uaaaacccacaggccaucagcagcuagaggug

SEQ ID NO: 483019 - RNA, 32 nt, Human
uaaaacccaggaggcagagcuugcagugagcc

SEQ ID NO: 483020 - RNA, 32 nt, Human
uaaaaccccacaauaacuuuacauuccuagcu

SEQ ID NO: 483021 - RNA, 32 nt, Human
uaaaaccccaucucccugcccuuuuguuuucu

SEQ ID NO: 483022 - RNA, 32 nt, Human
uaaaacccugaacuuuggcugccugugaaucc

SEQ ID NO: 483023 - RNA, 20 nt, Human
uaaaaccgcugaccugugug

SEQ ID NO: 483024 - RNA, 32 nt, Human
uaaaaccgggcuuucacccaaccugcucccuc

SEQ ID NO: 483025 - RNA, 32 nt, Human
uaaaaccguacaguuucauuugcauuuugaca

SEQ ID NO: 483026 - RNA, 32 nt, Human
uaaaaccuaguauuuuccacuuguucaucaau

SEQ ID NO: 483027 - RNA, 32 nt, Human
uaaaaccuccacaauugauucucccccuguga

SEQ ID NO: 483028 - RNA, 32 nt, Human
uaaaaccucugaaccaaaaucuucccaggaau

SEQ ID NO: 483029 - RNA, 32 nt, Human
uaaaaccucuuuggagcuucugaggacucagc

SEQ ID NO: 483030 - RNA, 32 nt, Human
uaaaaccugcuguucuuccuuuaagucuccau

SEQ ID NO: 483031 - RNA, 32 nt, Human
uaaaaccuuacacccauuauugauuuauuuuu

SEQ ID NO: 483032 - RNA, 32 nt, Human
uaaaaccuuauuuaugucuuauuugaagauga

SEQ ID NO: 483033 - RNA, 32 nt, Human
uaaaaccuucauuccucaagaccagcaauucu

SEQ ID NO: 483034 - RNA, 32 nt, Human
uaaaaccuucuauuugaugucauuccauuuau

SEQ ID NO: 483035 - RNA, 32 nt, Human
uaaaaccuuuccaguauugguacaucuuggcu

SEQ ID NO: 483036 - RNA, 32 nt, Human
uaaaaccuuuucuccccuuuccccauccucua

SEQ ID NO: 483037 - RNA, 32 nt, Human
uaaaacgaggagagagaaaaauaauggcaaaa

SEQ ID NO: 483038 - RNA, 32 nt, Human
uaaaacggccccaccccuaucucccuucgcug

SEQ ID NO: 483039 - RNA, 32 nt, Human
uaaaacggccccacccuuaucucccuucacug

SEQ ID NO: 483040 - RNA, 32 nt, Human
uaaaacggugguagcugugcagcugcugcuga

SEQ ID NO: 483041 - RNA, 32 nt, Human
uaaaacguucugcagugccaggcugcagugug

SEQ ID NO: 483042 - RNA, 32 nt, Human
uaaaacuacagaaccacaucccaaagguaccu

SEQ ID NO: 483043 - RNA, 19 nt, Human
uaaaacuagagcaguuuga

SEQ ID NO: 483044 - RNA, 22 nt, Human
uaaaacuauaucugccugugug

SEQ ID NO: 483045 - RNA, 32 nt, Human
uaaaacuauuuuggaucccagcacuuugggaa

SEQ ID NO: 483046 - RNA, 32 nt, Human
uaaaacucaaaucuuguuggaucucugcaggg

SEQ ID NO: 483047 - RNA, 32 nt, Human
uaaaacuccauucucagagaaaaggccuccaa

SEQ ID NO: 483048 - RNA, 32 nt, Human
uaaaacucugaagacauuaaacaggcaguuug

SEQ ID NO: 483049 - RNA, 19 nt, Human
uaaaacugaguccugugua

SEQ ID NO: 483050 - RNA, 32 nt, Human
uaaaacugagucucaccguacuucugacuaua

SEQ ID NO: 483051 - RNA, 32 nt, Human
uaaaacugauggcuacauggaaaaagaggacu

SEQ ID NO: 483052 - RNA, 32 nt, Human
uaaaacugcaugaugaauagcaccuuaauuuc

SEQ ID NO: 483053 - RNA, 32 nt, Human
uaaaacugccaaggaaaguaauuaccuguagg

SEQ ID NO: 483054 - RNA, 32 nt, Human
uaaaacugccaagggagcucuaacuugaagcc

SEQ ID NO: 483055 - RNA, 32 nt, Human
uaaaacugccaucacacagaagagagaacuua

SEQ ID NO: 483056 - RNA, 32 nt, Human
uaaaacugcucacacauuuuacuguacuuucc

SEQ ID NO: 483057 - RNA, 32 nt, Human
uaaaacugcugauuuuucugguggcaaauaag

SEQ ID NO: 483058 - RNA, 23 nt, Human
uaaaacuggacccuagaggccca

SEQ ID NO: 483059 - RNA, 32 nt, Human
uaaaacuggcaacaagcaaacaggucuucagc

SEQ ID NO: 483060 - RNA, 32 nt, Human
uaaaacugggcccugaagacgguuccagccuu

SEQ ID NO: 483061 - RNA, 32 nt, Human
uaaaacuucacugcaguggccacuucugaauc

SEQ ID NO: 483062 - RNA, 32 nt, Human
uaaaacuucaggcagaacauccauucauucau

SEQ ID NO: 483063 - RNA, 32 nt, Human
uaaaacuuccccugacagaggguggcagcccc

SEQ ID NO: 483064 - RNA, 23 nt, Human
uaaaacuucucaagauacugcua

SEQ ID NO: 483065 - RNA, 32 nt, Human
uaaaacuucugauuucucuucagcuuugaaaa

SEQ ID NO: 483066 - RNA, 32 nt, Human
uaaaacuugguugcauuauuuguggaggcuca

SEQ ID NO: 483067 - RNA, 32 nt, Human
uaaaacuuuaaucccacuugccccuguuaccu

SEQ ID NO: 483068 - RNA, 32 nt, Human
uaaaacuuuaaugccauuucuaaugcuuuuau

SEQ ID NO: 483069 - RNA, 32 nt, Human
uaaaacuuuacacccaaguguccugguuaacu

SEQ ID NO: 483070 - RNA, 32 nt, Human
uaaaagaaaaacaaaagaccucuaaacuucaa

SEQ ID NO: 483071 - RNA, 32 nt, Human
uaaaagaaaauagaauguggccacuucacuau

SEQ ID NO: 483072 - RNA, 32 nt, Human
uaaaagaaaggcugcugcagucacauguuaua

SEQ ID NO: 483073 - RNA, 32 nt, Human
uaaaagaaauauaggaaacacuucauucuuua

SEQ ID NO: 483074 - RNA, 32 nt, Human
uaaaagaacuccaggaaacaugaauucuggaa

SEQ ID NO: 483075 - RNA, 32 nt, Human
uaaaagaagacaaauaggucuuaaacauauga

SEQ ID NO: 483076 - RNA, 32 nt, Human
uaaaagaagggaugugggaucaaggaggacag

SEQ ID NO: 483077 - RNA, 32 nt, Human
uaaaagacaaccaacggccgacugccugugaa

SEQ ID NO: 483078 - RNA, 32 nt, Human
uaaaagacagauacaaaccaguaccauggaaa

SEQ ID NO: 483079 - RNA, 32 nt, Human
uaaaagacauaagguggauaauucuacauuug

SEQ ID NO: 483080 - RNA, 32 nt, Human
uaaaagacccagacucagcugcagugaggaga

SEQ ID NO: 483081 - RNA, 32 nt, Human
uaaaagacuccaccaucucccuucucaucuag

SEQ ID NO: 483082 - RNA, 32 nt, Human
uaaaagacugcacuuuggagaggcaagcacgc

SEQ ID NO: 483083 - RNA, 32 nt, Human
uaaaagagagaagcaggaaaagaucuuccuuu

SEQ ID NO: 483084 - RNA, 32 nt, Human
uaaaagagagcagagcuuagucaguggaggaa

SEQ ID NO: 483085 - RNA, 32 nt, Human
uaaaagagagggucuguccccuccucuccacg

SEQ ID NO: 483086 - RNA, 32 nt, Human
uaaaagagccaguuuuuaaauaauggggcauu

SEQ ID NO: 483087 - RNA, 32 nt, Human
uaaaagagcuccagguguugucuguuuugaga

SEQ ID NO: 483088 - RNA, 32 nt, Human
uaaaagagcucccaucugaucugcagucauua

SEQ ID NO: 483089 - RNA, 32 nt, Human
uaaaagagcuguuccccacccccagggagcuc

SEQ ID NO: 483090 - RNA, 32 nt, Human
uaaaagaggaagaagagaggcuccagcuggcg

SEQ ID NO: 483091 - RNA, 32 nt, Human
uaaaagaggcauugggagagaccccucaccuu

SEQ ID NO: 483092 - RNA, 32 nt, Human
uaaaagaggguuuucucagaccuucugccaau

SEQ ID NO: 483093 - RNA, 32 nt, Human
uaaaagaggugugggagcagaggaauggaaac

SEQ ID NO: 483094 - RNA, 32 nt, Human
uaaaagagucaagugaccaucauuucaccugc

SEQ ID NO: 483095 - RNA, 32 nt, Human
uaaaagagucaguguaagcauugaaagagaua

SEQ ID NO: 483096 - RNA, 32 nt, Human
uaaaagagugccuggcacauaguaggugccau

SEQ ID NO: 483097 - RNA, 32 nt, Human
uaaaagagugggagacauucccagggagguga

SEQ ID NO: 483098 - RNA, 32 nt, Human
uaaaagauaaugcauccugaaagggaucauuu

SEQ ID NO: 483099 - RNA, 32 nt, Human
uaaaagauacacaccaauaucuucuucaggcu

SEQ ID NO: 483100 - RNA, 32 nt, Human
uaaaagaucaaaacauauuuauaauaauauuu

SEQ ID NO: 483101 - RNA, 32 nt, Human
uaaaagaucaaauucauucaacuaagaauuag

SEQ ID NO: 483102 - RNA, 32 nt, Human
uaaaagaucaguagcuuccuuuaccgacgugu

SEQ ID NO: 483103 - RNA, 32 nt, Human
uaaaagauugccccauguuggagcucaguagc

SEQ ID NO: 483104 - RNA, 32 nt, Human
uaaaagcaaagaggaaggaagggaggucugug

SEQ ID NO: 483105 - RNA, 32 nt, Human
uaaaagcaaguguccuacagcauuucccaaau

SEQ ID NO: 483106 - RNA, 32 nt, Human
uaaaagcaauggcaagugcucuccaauaaagu

SEQ ID NO: 483107 - RNA, 32 nt, Human
uaaaagcaauucugacuguccaggagcuaauc

SEQ ID NO: 483108 - RNA, 30 nt, Human
uaaaagcacuggcugugugauuuuacccuc

SEQ ID NO: 483109 - RNA, 32 nt, Human
uaaaagcagcagcugcucacauaagccggggu

SEQ ID NO: 483110 - RNA, 32 nt, Human
uaaaagcaggagaagucuaugggauucuagaa

SEQ ID NO: 483111 - RNA, 31 nt, Human
uaaaagcaggggagagaaaagccuugugaag

SEQ ID NO: 483112 - RNA, 32 nt, Human
uaaaagcaguacuccaaucugcagagacucua

SEQ ID NO: 483113 - RNA, 32 nt, Human
uaaaagcagucugggcgcaggcuggggaccca

SEQ ID NO: 483114 - RNA, 32 nt, Human
uaaaagcaucacagcuuaccauuuuucuuuuu

SEQ ID NO: 483115 - RNA, 22 nt, Human
uaaaagccaaaagcugcugccu

SEQ ID NO: 483116 - RNA, 32 nt, Human
uaaaagccaaucuaugagcuucucccgauggc

SEQ ID NO: 483117 - RNA, 32 nt, Human
uaaaagccaccuggguugacaccuuccuacuu

SEQ ID NO: 483118 - RNA, 32 nt, Human
uaaaagccacugcagugugcagugagaaacuc

SEQ ID NO: 483119 - RNA, 32 nt, Human
uaaaagccagguaacaccuaccaguccaguua

SEQ ID NO: 483120 - RNA, 32 nt, Human
uaaaagccaguucuguggugaugaccuaugga

SEQ ID NO: 483121 - RNA, 32 nt, Human
uaaaagccuguugccacuguugugucaugauu

SEQ ID NO: 483122 - RNA, 32 nt, Human
uaaaagccuuucuagaaggcagacuuagcccc

SEQ ID NO: 483123 - RNA, 32 nt, Human
uaaaagcgccucuuuggacacugaggcccucu

SEQ ID NO: 483124 - RNA, 32 nt, Human
uaaaagcgguagcaccacaugguuguguagau

SEQ ID NO: 483125 - RNA, 32 nt, Human
uaaaagcuacucuggaccuacaguguccggca

SEQ ID NO: 483126 - RNA, 32 nt, Human
uaaaagcuggggacccacagagggguuggcag

SEQ ID NO: 483127 - RNA, 32 nt, Human
uaaaagcuuggcuuuccuuauaugagugaggc

SEQ ID NO: 483128 - RNA, 32 nt, Human
uaaaagcuuugccacauucuucacauuuguag

SEQ ID NO: 483129 - RNA, 32 nt, Human
uaaaaggaaaccugcaaaugucuacauauaug

SEQ ID NO: 483130 - RNA, 25 nt, Human
uaaaaggaacaaagggauguucacu

SEQ ID NO: 483131 - RNA, 32 nt, Human
uaaaaggaagaacuacuuucaguaagaugguu

SEQ ID NO: 483132 - RNA, 32 nt, Human
uaaaaggaaggugaagugcgggagagaaacag

SEQ ID NO: 483133 - RNA, 32 nt, Human
uaaaaggaaucaggguauuuugcuggaaggau

SEQ ID NO: 483134 - RNA, 32 nt, Human
uaaaaggacaugcccacugaauucagguccuu

SEQ ID NO: 483135 - RNA, 23 nt, Human
uaaaaggaccagggaggaucaga

SEQ ID NO: 483136 - RNA, 32 nt, Human
uaaaaggagagcagggaaaggagccagugaga

SEQ ID NO: 483137 - RNA, 32 nt, Human
uaaaaggaggccgaggugggaggaucaccuga

SEQ ID NO: 483138 - RNA, 32 nt, Human
uaaaaggagucacauagagaaaccccaugaaa

SEQ ID NO: 483139 - RNA, 32 nt, Human
uaaaaggcaaaguguuucugaaggcaauuucu

SEQ ID NO: 483140 - RNA, 32 nt, Human
uaaaaggcacgcaagggugcggcugcacgcgg

SEQ ID NO: 483141 - RNA, 32 nt, Human
uaaaaggcccagagagaagagccccacucuca

SEQ ID NO: 483142 - RNA, 22 nt, Human
uaaaagggacaauguggccacu

SEQ ID NO: 483143 - RNA, 24 nt, Human
uaaaagggacaggaauugcucacu

SEQ ID NO: 483144 - RNA, 32 nt, Human
uaaaagggagagagggagggaggaaggaagga

SEQ ID NO: 483145 - RNA, 32 nt, Human
uaaaagggauccggggcugagggcaggggucg

SEQ ID NO: 483146 - RNA, 32 nt, Human
uaaaagggcuaggaauuucuuuuuccgggagc

SEQ ID NO: 483147 - RNA, 32 nt, Human
uaaaagggcuccgaacacuacauuagccuaca

SEQ ID NO: 483148 - RNA, 32 nt, Human
uaaaagggcuucuuccucuuuuacugggugau

SEQ ID NO: 483149 - RNA, 32 nt, Human
uaaaaggggagcuuccugggaauuucaggcuc

SEQ ID NO: 483150 - RNA, 32 nt, Human
uaaaagggugggaguagcaggagggucuuaaa

SEQ ID NO: 483151 - RNA, 32 nt, Human
uaaaagguagccucuucauaggaaccaggagg

SEQ ID NO: 483152 - RNA, 32 nt, Human
uaaaagguaggugggguggggaguggggcccc

SEQ ID NO: 483153 - RNA, 32 nt, Human
uaaaagguagugugacccaaauuuguauaaag

SEQ ID NO: 483154 - RNA, 32 nt, Human
uaaaaggucauguagagguuguaguagaaugg

SEQ ID NO: 483155 - RNA, 32 nt, Human
uaaaagguggaggacugauagacaacuuagag

SEQ ID NO: 483156 - RNA, 32 nt, Human
uaaaaggugggaaaggagagcacuguucuuug

SEQ ID NO: 483157 - RNA, 32 nt, Human
uaaaaguaaagaaacauacacuaucuuagccc

SEQ ID NO: 483158 - RNA, 32 nt, Human
uaaaaguacaugaggcugggcacaguggcuca

SEQ ID NO: 483159 - RNA, 32 nt, Human
uaaaaguagagggagguaagagacgguagcac

SEQ ID NO: 483160 - RNA, 32 nt, Human
uaaaagucaguagaaucuucuaccucauaacu

SEQ ID NO: 483161 - RNA, 32 nt, Human
uaaaagucucugaaguauuccaugccuuuugg

SEQ ID NO: 483162 - RNA, 32 nt, Human
uaaaagugaaagucaucuagcauucuuauuca

SEQ ID NO: 483163 - RNA, 32 nt, Human
uaaaagugagccacuaucagauuugcacauca

SEQ ID NO: 483164 - RNA, 32 nt, Human
uaaaagugcaauagaccaugcugguaacuaca

SEQ ID NO: 483165 - RNA, 32 nt, Human
uaaaagugcaauuacugucaaaagaguucaaa

SEQ ID NO: 483166 - RNA, 32 nt, Human
uaaaagugggcacagauccagagagguagcaa

SEQ ID NO: 483167 - RNA, 32 nt, Human
uaaaaguggggagaaggaagauccucagugaa

SEQ ID NO: 483168 - RNA, 32 nt, Human
uaaaagugucacucuuccuccuuuucuacuuu

SEQ ID NO: 483169 - RNA, 32 nt, Human
uaaaaguuaagaaggaaagaaggaaagcagga

SEQ ID NO: 483170 - RNA, 32 nt, Human
uaaaaguuaggggaacacaacugguaguguua

SEQ ID NO: 483171 - RNA, 32 nt, Human
uaaaaguucagaaaacuugcagccugacaaug

SEQ ID NO: 483172 - RNA, 32 nt, Human
uaaaaguuccaaugcuaagcccaauuccagac

SEQ ID NO: 483173 - RNA, 32 nt, Human
uaaaaguuccucucccuucccuucccucaccc

SEQ ID NO: 483174 - RNA, 32 nt, Human
uaaaaguucugugacaguacagaaggaaaaca

SEQ ID NO: 483175 - RNA, 32 nt, Human
uaaaaguugaugugugacaaaauacuuaugug

SEQ ID NO: 483176 - RNA, 32 nt, Human
uaaaaguugcagagauuggaggcugccccgag

SEQ ID NO: 483177 - RNA, 32 nt, Human
uaaaaguugcagcccacagcccuucaugugga

SEQ ID NO: 483178 - RNA, 32 nt, Human
uaaaaguuggaaaggcuggagccgugugugug

SEQ ID NO: 483179 - RNA, 20 nt, Human
uaaaaguuuaaauugcucac

SEQ ID NO: 483180 - RNA, 32 nt, Human
uaaaaguuuaacauaugggcauaugugacaua

SEQ ID NO: 483181 - RNA, 32 nt, Human
uaaaaguuucaucagaaacuuuacauaucuuu

SEQ ID NO: 483182 - RNA, 32 nt, Human
uaaaauaaagaaaagaggaggaggaggaggaa

SEQ ID NO: 483183 - RNA, 32 nt, Human
uaaaauaaagguaaaaugcugccugaaaauaa

SEQ ID NO: 483184 - RNA, 32 nt, Human
uaaaauaaauguaauuuaucuuugccaaaacc

SEQ ID NO: 483185 - RNA, 32 nt, Human
uaaaauaagacauacaguuuucuggccauucu

SEQ ID NO: 483186 - RNA, 32 nt, Human
uaaaauaagcacccaugaaagccagccagccc

SEQ ID NO: 483187 - RNA, 32 nt, Human
uaaaauaagcuugcaaaugacagcagagacau

SEQ ID NO: 483188 - RNA, 32 nt, Human
uaaaauaauaagcauuuaaaauaguuuacaga

SEQ ID NO: 483189 - RNA, 32 nt, Human
uaaaauaauagggagguuggggaaguggguug

SEQ ID NO: 483190 - RNA, 32 nt, Human
uaaaauaaucuugacuuaaauugucagaaugu

SEQ ID NO: 483191 - RNA, 32 nt, Human
uaaaauacaauugagauuccauuuuucuccua

SEQ ID NO: 483192 - RNA, 32 nt, Human
uaaaauacacacacaacugaucuagacaucaa

SEQ ID NO: 483193 - RNA, 32 nt, Human
uaaaauacacagaaaugguauaacaaucaugu

SEQ ID NO: 483194 - RNA, 32 nt, Human
uaaaauacacccaucaauauaaggcaagaaaa

SEQ ID NO: 483195 - RNA, 32 nt, Human
uaaaauacgcucuuaaauuauuuucuagucuu

SEQ ID NO: 483196 - RNA, 32 nt, Human
uaaaauagcauuagagcaaguugcuugucaug

SEQ ID NO: 483197 - RNA, 32 nt, Human
uaaaauagccaagagguauaucgaugauggaa

SEQ ID NO: 483198 - RNA, 30 nt, Human
uaaaauagccucucucugaucauucugucu

SEQ ID NO: 483199 - RNA, 32 nt, Human
uaaaauagggggaggaaggaaggggaguaaug

SEQ ID NO: 483200 - RNA, 32 nt, Human
uaaaauauagagacaggacagaauguguucuu

SEQ ID NO: 483201 - RNA, 32 nt, Human
uaaaauauauacacuuguacaaaaagggaaaa

SEQ ID NO: 483202 - RNA, 23 nt, Human
uaaaauauauauuaauucauuua

SEQ ID NO: 483203 - RNA, 32 nt, Human
uaaaauauauuugcuuugagaguaauucccca

SEQ ID NO: 483204 - RNA, 24 nt, Human
uaaaauauauuuuaauuacauuua

SEQ ID NO: 483205 - RNA, 31 nt, Human
uaaaauauauuuuaauuacauuuaaaaagac

SEQ ID NO: 483206 - RNA, 32 nt, Human
uaaaauauccgucccuuccaugccuuaguuua

SEQ ID NO: 483207 - RNA, 32 nt, Human
uaaaauauguaaucucuuaaauggcaguaaga

SEQ ID NO: 483208 - RNA, 27 nt, Human
uaaaauaugugcauucacuuguauuug

SEQ ID NO: 483209 - RNA, 32 nt, Human
uaaaauauuauuaccagugaacaucaggcacu

SEQ ID NO: 483210 - RNA, 32 nt, Human
uaaaauauugauuuuaauugaucuuuucaauu

SEQ ID NO: 483211 - RNA, 32 nt, Human
uaaaauauuuuaaucaggcagaguuuuaugga

SEQ ID NO: 483212 - RNA, 32 nt, Human
uaaaauauuuuuauuuucuuccuugucucaua

SEQ ID NO: 483213 - RNA, 32 nt, Human
uaaaaucaaaccugaauaaaacuacaaguuua

SEQ ID NO: 483214 - RNA, 32 nt, Human
uaaaaucaagacaggguacaagcaggagcaca

SEQ ID NO: 483215 - RNA, 32 nt, Human
uaaaaucaauagaucugggauuauguggccuu

SEQ ID NO: 483216 - RNA, 32 nt, Human
uaaaaucacaauauuguuuuuguuccuauuuu

SEQ ID NO: 483217 - RNA, 24 nt, Human
uaaaaucacaaugaaauaucacua

SEQ ID NO: 483218 - RNA, 32 nt, Human
uaaaaucacacagcgugauuuuacaagguccc

SEQ ID NO: 483219 - RNA, 32 nt, Human
uaaaaucaggacuccuaaccugcuccagucag

SEQ ID NO: 483220 - RNA, 32 nt, Human
uaaaaucaguccagcacuuuuagaacccacug

SEQ ID NO: 483221 - RNA, 32 nt, Human
uaaaaucagugugaacacccaacccauuacca

SEQ ID NO: 483222 - RNA, 30 nt, Human
uaaaaucauaaauauaaucuaauacacuuu

SEQ ID NO: 483223 - RNA, 32 nt, Human
uaaaaucauagaauguuguacugacgacacaa

SEQ ID NO: 483224 - RNA, 32 nt, Human
uaaaaucccugccuucuugagcuaacauucuc

SEQ ID NO: 483225 - RNA, 32 nt, Human
uaaaauccgcuagagcagcccaaauuuuucuc

SEQ ID NO: 483226 - RNA, 32 nt, Human
uaaaauccggaggugaaggaagaaaagauuga

SEQ ID NO: 483227 - RNA, 32 nt, Human
uaaaauccuuagaaucuccaaagugaugucuu

SEQ ID NO: 483228 - RNA, 20 nt, Human
uaaaaucgucugccugugua

SEQ ID NO: 483229 - RNA, 32 nt, Human
uaaaaucuacaaaucagcccucgaguuauuca

SEQ ID NO: 483230 - RNA, 32 nt, Human
uaaaaucuccaucucucagucaauccaagugu

SEQ ID NO: 483231 - RNA, 32 nt, Human
uaaaaucucccaggccuuuaggaugcaauagg

SEQ ID NO: 483232 - RNA, 32 nt, Human
uaaaaucucccuccccucuuuuauuuuaauua

SEQ ID NO: 483233 - RNA, 32 nt, Human
uaaaaucugauccccucucuacccuaccacuu

SEQ ID NO: 483234 - RNA, 26 nt, Human
uaaaaucugaugaugaauauaaaaaa

SEQ ID NO: 483235 - RNA, 32 nt, Human
uaaaaucuuaaaacuuacucagcugguugcaa

SEQ ID NO: 483236 - RNA, 23 nt, Human
uaaaaucuuaaagcagacaaaaa

SEQ ID NO: 483237 - RNA, 24 nt, Human
uaaaaucuuaaauaaaacagaaaa

SEQ ID NO: 483238 - RNA, 32 nt, Human
uaaaaucuuggccagagcuccuugccaucugc

SEQ ID NO: 483239 - RNA, 32 nt, Human
uaaaaucuuggggcuuagccugggcuuuucug

SEQ ID NO: 483240 - RNA, 32 nt, Human
uaaaaugaaaaaggagaauuucaagucagcag

SEQ ID NO: 483241 - RNA, 32 nt, Human
uaaaaugaaaaccaaaccagacaccugacaua

SEQ ID NO: 483242 - RNA, 32 nt, Human
uaaaaugaaagauuggcaaaggcccuugaggg

SEQ ID NO: 483243 - RNA, 32 nt, Human
uaaaaugaacaagccuguguucuugaucaugu

SEQ ID NO: 483244 - RNA, 32 nt, Human
uaaaaugaaucuaaacauugaaugugaauggc

SEQ ID NO: 483245 - RNA, 32 nt, Human
uaaaaugagugaaaucacagugcacccuguuc

SEQ ID NO: 483246 - RNA, 32 nt, Human
uaaaaugaguuacaagacacuuuuccagagua

SEQ ID NO: 483247 - RNA, 32 nt, Human
uaaaaugauaaauagguaauuugaauaauuuu

SEQ ID NO: 483248 - RNA, 24 nt, Human
uaaaaugauaugcuuauacauuug

SEQ ID NO: 483249 - RNA, 32 nt, Human
uaaaaugauggauucaacuucugccucggaug

SEQ ID NO: 483250 - RNA, 29 nt, Human
uaaaaugcacuucuuccugaaaauggaga

SEQ ID NO: 483251 - RNA, 32 nt, Human
uaaaaugccaucaguucaccuuuaaagacaca

SEQ ID NO: 483252 - RNA, 32 nt, Human
uaaaaugcccaggaguccuggaagcuacgcgg

SEQ ID NO: 483253 - RNA, 32 nt, Human
uaaaaugcccuaggcagccaggcuucccuggg

SEQ ID NO: 483254 - RNA, 32 nt, Human
uaaaaugcguccuugaaagaaaaagaaucuga

SEQ ID NO: 483255 - RNA, 32 nt, Human
uaaaaugcuaauuugagagaaguaggagugua

SEQ ID NO: 483256 - RNA, 32 nt, Human
uaaaaugcuguuauugugaugagucuuugguu

SEQ ID NO: 483257 - RNA, 30 nt, Human
uaaaauggaaagguccugcuguggaaacuu

SEQ ID NO: 483258 - RNA, 32 nt, Human
uaaaauggaagggagagcugggcauggcgguu

SEQ ID NO: 483259 - RNA, 32 nt, Human
uaaaauggaauauuauucagcaaucaaagaaa

SEQ ID NO: 483260 - RNA, 32 nt, Human
uaaaauggacaacugagaauucucccagcugc

SEQ ID NO: 483261 - RNA, 32 nt, Human
uaaaauggagagaagaaugaacuagaacauuc

SEQ ID NO: 483262 - RNA, 32 nt, Human
uaaaauggauaggacauaauuucccaacuagu

SEQ ID NO: 483263 - RNA, 32 nt, Human
uaaaauggauuuaaaaauuccuacucacagcc

SEQ ID NO: 483264 - RNA, 32 nt, Human
uaaaauggcagcuucaguucuagagaagaaag

SEQ ID NO: 483265 - RNA, 32 nt, Human
uaaaauggcaguguuucucccacuuugauaug

SEQ ID NO: 483266 - RNA, 32 nt, Human
uaaaauggcuguaaaaaugacuuaaauguuua

SEQ ID NO: 483267 - RNA, 32 nt, Human
uaaaaugggacugggugcaguggcucaggccu

SEQ ID NO: 483268 - RNA, 32 nt, Human
uaaaaugggcuuuccucugucugccauccuca

SEQ ID NO: 483269 - RNA, 32 nt, Human
uaaaauggucuaagggcucuuuuuccaacauu

SEQ ID NO: 483270 - RNA, 32 nt, Human
uaaaaugguucucagggauuccugccaauacu

SEQ ID NO: 483271 - RNA, 29 nt, Human
uaaaauguaccaagaaauaucuguacuuc

SEQ ID NO: 483272 - RNA, 32 nt, Human
uaaaauguauacaucaaauucucuccaaggac

SEQ ID NO: 483273 - RNA, 32 nt, Human
uaaaaugucaggaacaacuuuccucuuauuaa

SEQ ID NO: 483274 - RNA, 32 nt, Human
uaaaaugucaucugcuaaacauucacugugac

SEQ ID NO: 483275 - RNA, 32 nt, Human
uaaaaugucaucuguuaggaagccauucuaaa

SEQ ID NO: 483276 - RNA, 32 nt, Human
uaaaauguccccagaguggagaaguucaguuc

SEQ ID NO: 483277 - RNA, 32 nt, Human
uaaaaugucucaucuucucaugccaucuaguu

SEQ ID NO: 483278 - RNA, 32 nt, Human
uaaaaugucuucaaggcuucagucucauauuu

SEQ ID NO: 483279 - RNA, 32 nt, Human
uaaaaugugcugcccuucacagaugacaccac

SEQ ID NO: 483280 - RNA, 32 nt, Human
uaaaauguguaauuuuguuuauauuuucccau

SEQ ID NO: 483281 - RNA, 32 nt, Human
uaaaaugugucccuggcuucugagcuugccca

SEQ ID NO: 483282 - RNA, 32 nt, Human
uaaaauguuaucuccuaguugccaugcauucc

SEQ ID NO: 483283 - RNA, 32 nt, Human
uaaaauguuccuggucggggcuuggaagagcu

SEQ ID NO: 483284 - RNA, 32 nt, Human
uaaaauguucuagucauuuugagaaaucauau

SEQ ID NO: 483285 - RNA, 26 nt, Human
uaaaauguugccuuccccacuucuca

SEQ ID NO: 483286 - RNA, 32 nt, Human
uaaaauguuucauuugaaaagucugguuucuu

SEQ ID NO: 483287 - RNA, 32 nt, Human
uaaaauguuuugaauuuaacuuguuuagaaaa

SEQ ID NO: 483288 - RNA, 32 nt, Human
uaaaauguuuuuaaaaccuguuaguuaaaaca

SEQ ID NO: 483289 - RNA, 32 nt, Human
uaaaauguuuuuaagaauuuuucuuuuuauua

SEQ ID NO: 483290 - RNA, 32 nt, Human
uaaaauuaccagggcucucugaacauggaccu

SEQ ID NO: 483291 - RNA, 32 nt, Human
uaaaauuacugacugaugacauugagacaaga

SEQ ID NO: 483292 - RNA, 32 nt, Human
uaaaauuacugcuuuccaucuacuggguaaaa

SEQ ID NO: 483293 - RNA, 32 nt, Human
uaaaauuagaaauguccccucacugcagauca

SEQ ID NO: 483294 - RNA, 32 nt, Human
uaaaauuagggagaagagaggagucaugaucu

SEQ ID NO: 483295 - RNA, 32 nt, Human
uaaaauuagggaggccacagcagagguacaga

SEQ ID NO: 483296 - RNA, 32 nt, Human
uaaaauuauaguaacagaaauaauagcucaua

SEQ ID NO: 483297 - RNA, 32 nt, Human
uaaaauucaaaaacaaaauuagccgggcauga

SEQ ID NO: 483298 - RNA, 32 nt, Human
uaaaauucaaugccucuccauauuaaaaacuc

SEQ ID NO: 483299 - RNA, 32 nt, Human
uaaaauuccuauaacauaguauuuuacaguuu

SEQ ID NO: 483300 - RNA, 32 nt, Human
uaaaauuccugccucucccuaacacaggaguu

SEQ ID NO: 483301 - RNA, 32 nt, Human
uaaaauuccugcucugccacagcuccacucag

SEQ ID NO: 483302 - RNA, 31 nt, Human
uaaaauucuaggagagaaauaaagagucugu

SEQ ID NO: 483303 - RNA, 32 nt, Human
uaaaauucucauaagaagcaucuccccagcca

SEQ ID NO: 483304 - RNA, 32 nt, Human
uaaaauucuguugguuuuagaggucagauucc

SEQ ID NO: 483305 - RNA, 32 nt, Human
uaaaauucuucucaucccauuggaguuuuuaa

SEQ ID NO: 483306 - RNA, 32 nt, Human
uaaaauugaagagauuucaacauaucauuuuu

SEQ ID NO: 483307 - RNA, 32 nt, Human
uaaaauugauuguggugaugguuguauaacug

SEQ ID NO: 483308 - RNA, 32 nt, Human
uaaaauugcaacuggugcccuaacccaaaacu

SEQ ID NO: 483309 - RNA, 32 nt, Human
uaaaauugcccagucuucagcggagcaguuuu

SEQ ID NO: 483310 - RNA, 32 nt, Human
uaaaauugccccaccugcucuagauggaucuu

SEQ ID NO: 483311 - RNA, 32 nt, Human
uaaaauugcgguauaaagucucauuuccaaau

SEQ ID NO: 483312 - RNA, 32 nt, Human
uaaaauugcugcggaaugugugcaguaucuag

SEQ ID NO: 483313 - RNA, 32 nt, Human
uaaaauugcugugagcucgacagugccugaag

SEQ ID NO: 483314 - RNA, 32 nt, Human
uaaaauugcuucagcucggcucccucuucccc

SEQ ID NO: 483315 - RNA, 32 nt, Human
uaaaauuggaaccuaauucgagaggaaguaag

SEQ ID NO: 483316 - RNA, 32 nt, Human
uaaaauugggacauccauccucccagacagug

SEQ ID NO: 483317 - RNA, 32 nt, Human
uaaaauuguaucauugcuuucuuucuauauug

SEQ ID NO: 483318 - RNA, 32 nt, Human
uaaaauugucucaggcaggaagucagucuaua

SEQ ID NO: 483319 - RNA, 32 nt, Human
uaaaauugugugugcacguucauguacacaug

SEQ ID NO: 483320 - RNA, 32 nt, Human
uaaaauuguuggugggaagcacuuauaaggca

SEQ ID NO: 483321 - RNA, 32 nt, Human
uaaaauuuaaucacaggaaacuacuuauaucu

SEQ ID NO: 483322 - RNA, 32 nt, Human
uaaaauuuaauuuucuagcuggcuccaauuca

SEQ ID NO: 483323 - RNA, 20 nt, Human
uaaaauuuacaacagucuga

SEQ ID NO: 483324 - RNA, 32 nt, Human
uaaaauuuauaugauguaugcauauguguaca

SEQ ID NO: 483325 - RNA, 32 nt, Human
uaaaauuugcacacaaaacaucuuaggcacuu

SEQ ID NO: 483326 - RNA, 32 nt, Human
uaaaauuugcaguuuaacaagaugacuagggg

SEQ ID NO: 483327 - RNA, 32 nt, Human
uaaaauuuuauaucaccuccacaaacaaaacu

SEQ ID NO: 483328 - RNA, 32 nt, Human
uaaaauuuucacaccaccugcuuuucuauuca

SEQ ID NO: 483329 - RNA, 32 nt, Human
uaaaauuuuggaccugagacacuguggcuguc

SEQ ID NO: 483330 - RNA, 32 nt, Human
uaaacaaaaacuaaaacuaagaauucucaaaa

SEQ ID NO: 483331 - RNA, 32 nt, Human
uaaacaaaaagauauuaaauauacagaaguua

SEQ ID NO: 483332 - RNA, 32 nt, Human
uaaacaaaauaugggcaugcaugcuaaaggga

SEQ ID NO: 483333 - RNA, 32 nt, Human
uaaacaaaauugcugcaccaaugcacugagug

SEQ ID NO: 483334 - RNA, 32 nt, Human
uaaacaaacauacacuucuccuggcaagguua

SEQ ID NO: 483335 - RNA, 32 nt, Human
uaaacaaagcaaaacaccaaacuacaguuuua

SEQ ID NO: 483336 - RNA, 32 nt, Human
uaaacaaaggccaagaaagagagaagaugaga

SEQ ID NO: 483337 - RNA, 32 nt, Human
uaaacaaagggcacagaaugucagccucaggg

SEQ ID NO: 483338 - RNA, 31 nt, Human
uaaacaaauaaacaagaacacugcagacaug

SEQ ID NO: 483339 - RNA, 19 nt, Human
uaaacaaaugcagcuggaa

SEQ ID NO: 483340 - RNA, 32 nt, Human
uaaacaacacugcaauuugucuccuugcaccg

SEQ ID NO: 483341 - RNA, 32 nt, Human
uaaacaacagccaagagagcaggggugacgau

SEQ ID NO: 483342 - RNA, 32 nt, Human
uaaacaacagguuugcauucaugaagcuuuca

SEQ ID NO: 483343 - RNA, 32 nt, Human
uaaacaacaguuggaggaauccauggaaaaua

SEQ ID NO: 483344 - RNA, 32 nt, Human
uaaacaaccagcuguccccgcaguaagaagcc

SEQ ID NO: 483345 - RNA, 32 nt, Human
uaaacaacccauauuggggacccccugugacu

SEQ ID NO: 483346 - RNA, 32 nt, Human
uaaacaagagcagagaggccauuuggucaaag

SEQ ID NO: 483347 - RNA, 32 nt, Human
uaaacaagccuggaucugacagugccacaaug

SEQ ID NO: 483348 - RNA, 32 nt, Human
uaaacaaguccuggcaggacucacaggaacaa

SEQ ID NO: 483349 - RNA, 32 nt, Human
uaaacaauaauacuaucuuuuauagggguuug

SEQ ID NO: 483350 - RNA, 32 nt, Human
uaaacaauccaucccacagauccucaggcauu

SEQ ID NO: 483351 - RNA, 32 nt, Human
uaaacaaucucgcauuaaaaauucaaauguaa

SEQ ID NO: 483352 - RNA, 32 nt, Human
uaaacaaucucuuccucagccagcacagggaa

SEQ ID NO: 483353 - RNA, 32 nt, Human
uaaacaaugaaagcgaugaggggaccauuuac

SEQ ID NO: 483354 - RNA, 31 nt, Human
uaaacacaauggcuaucaacagcugcuaaua

SEQ ID NO: 483355 - RNA, 32 nt, Human
uaaacacacgugcacacaucguacacauguga

SEQ ID NO: 483356 - RNA, 32 nt, Human
uaaacacagaauguaagcuauaguuuaaucug

SEQ ID NO: 483357 - RNA, 32 nt, Human
uaaacacaugguguacacccacuguaacauua

SEQ ID NO: 483358 - RNA, 32 nt, Human
uaaacaccacaguauagaucuugugacugugu

SEQ ID NO: 483359 - RNA, 32 nt, Human
uaaacacccaagagaaauucuggaccuaguaa

SEQ ID NO: 483360 - RNA, 32 nt, Human
uaaacacccaggagaccaucagccucuccugg

SEQ ID NO: 483361 - RNA, 32 nt, Human
uaaacacccucaggcacccuaacccuguguau

SEQ ID NO: 483362 - RNA, 32 nt, Human
uaaacacgcccccaucucacacacaaacugag

SEQ ID NO: 483363 - RNA, 32 nt, Human
uaaacacgugacacaaacacacacaaaaggga

SEQ ID NO: 483364 - RNA, 32 nt, Human
uaaacacuaagcucacuuaggucacuuucuag

SEQ ID NO: 483365 - RNA, 32 nt, Human
uaaacacuggccuuggcggcugagggaggagg

SEQ ID NO: 483366 - RNA, 32 nt, Human
uaaacagaaagaaagaaagaaaaaggaaggaa

SEQ ID NO: 483367 - RNA, 32 nt, Human
uaaacagacagaaagacagacacagacacaga

SEQ ID NO: 483368 - RNA, 32 nt, Human
uaaacagaggagaaagggaaagaguacaaagc

SEQ ID NO: 483369 - RNA, 32 nt, Human
uaaacagauggucaaauuaaaaaugcuuuacu

SEQ ID NO: 483370 - RNA, 32 nt, Human
uaaacagauuuuuaaaaaucuccacccauuaa

SEQ ID NO: 483371 - RNA, 32 nt, Human
uaaacagcaaaaguucuuucucguggguaaau

SEQ ID NO: 483372 - RNA, 32 nt, Human
uaaacagcacuccccaccccacccucauuuuu

SEQ ID NO: 483373 - RNA, 32 nt, Human
uaaacagccaaaaugaagcagaaaaauagcuc

SEQ ID NO: 483374 - RNA, 32 nt, Human
uaaacagcccucaccggugaauaaacauaaga

SEQ ID NO: 483375 - RNA, 32 nt, Human
uaaacagcuccgcucuuucagggaaggauggu

SEQ ID NO: 483376 - RNA, 32 nt, Human
uaaacagcucggcuuguccuugucccaugugu

SEQ ID NO: 483377 - RNA, 32 nt, Human
uaaacaggaccacccuuuauucuuaaauuugu

SEQ ID NO: 483378 - RNA, 32 nt, Human
uaaacaguauuuuuagaucaccuucaaaaggg

SEQ ID NO: 483379 - RNA, 32 nt, Human
uaaacagucuuaacugaaacacucugauauua

SEQ ID NO: 483380 - RNA, 32 nt, Human
uaaacaguggggguuaugaaacccaccucaca

SEQ ID NO: 483381 - RNA, 32 nt, Human
uaaacaguuuucguaaagauggggucuggcua

SEQ ID NO: 483382 - RNA, 32 nt, Human
uaaacaguuuuguuuuguuuuacuugaggggg

SEQ ID NO: 483383 - RNA, 32 nt, Human
uaaacauacauauauacacauaugcaugugug

SEQ ID NO: 483384 - RNA, 32 nt, Human
uaaacauacucuuacuguucugucuuuaugaa

SEQ ID NO: 483385 - RNA, 32 nt, Human
uaaacauagacacacacauauacagcucucuc

SEQ ID NO: 483386 - RNA, 32 nt, Human
uaaacauaggagagaaguuuauaaagggcauu

SEQ ID NO: 483387 - RNA, 19 nt, Human
uaaacaucaaauacuuuca

SEQ ID NO: 483388 - RNA, 32 nt, Human
uaaacaucacacacugagaaucucuucauaau

SEQ ID NO: 483389 - RNA, 32 nt, Human
uaaacaucacacgccagagaagccacaguuac

SEQ ID NO: 483390 - RNA, 32 nt, Human
uaaacaucacauaguagacagccauuaaauua

SEQ ID NO: 483391 - RNA, 32 nt, Human
uaaacaucccaggucucauccuucaggaauuu

SEQ ID NO: 483392 - RNA, 32 nt, Human
uaaacauccuauaaugcacagggcaguacccc

SEQ ID NO: 483393 - RNA, 32 nt, Human
uaaacaucucccagugugcuauaguagaaaau

SEQ ID NO: 483394 - RNA, 31 nt, Human
uaaacaucucugccuuugccuguguguguuc

SEQ ID NO: 483395 - RNA, 32 nt, Human
uaaacaugaccacgaagaaugcuguucugauu

SEQ ID NO: 483396 - RNA, 32 nt, Human
uaaacaugcagggggugggagcagggucacaa

SEQ ID NO: 483397 - RNA, 32 nt, Human
uaaacaugccauaaugcacaggacuguccccu

SEQ ID NO: 483398 - RNA, 32 nt, Human
uaaacaugcugugugccacaggccaguguugu

SEQ ID NO: 483399 - RNA, 30 nt, Human
uaaacauggagacugaaccaaaggcaaguu

SEQ ID NO: 483400 - RNA, 32 nt, Human
uaaacauggccucucccuccccuaggcuacca

SEQ ID NO: 483401 - RNA, 32 nt, Human
uaaacaugggagaaaccuggaagaauauuugc

SEQ ID NO: 483402 - RNA, 32 nt, Human
uaaacaugggaggcggagguugcagugagccg

SEQ ID NO: 483403 - RNA, 18 nt, Human
uaaacauguauguacucc

SEQ ID NO: 483404 - RNA, 32 nt, Human
uaaacauuaaacaauacagcugccucaaaucu

SEQ ID NO: 483405 - RNA, 32 nt, Human
uaaacauuacugggugagcaaauuccuuaaua

SEQ ID NO: 483406 - RNA, 32 nt, Human
uaaacauuccaaaaccuccagacuuauugcaa

SEQ ID NO: 483407 - RNA, 32 nt, Human
uaaacauucucaaauguuugagauucaaguga

SEQ ID NO: 483408 - RNA, 32 nt, Human
uaaacauucucccagucccuggccccaccucu

SEQ ID NO: 483409 - RNA, 32 nt, Human
uaaaccaaagaauauuuguauuucaagcaguu

SEQ ID NO: 483410 - RNA, 32 nt, Human
uaaaccaaagcacauuuugaaugaguauggaa

SEQ ID NO: 483411 - RNA, 31 nt, Human
uaaaccaacaacaccuaauuggggaaagcau

SEQ ID NO: 483412 - RNA, 32 nt, Human
uaaaccaagaugagcagaaggaagagagcagg

SEQ ID NO: 483413 - RNA, 32 nt, Human
uaaaccaaggcacuccagccugggugacagag

SEQ ID NO: 483414 - RNA, 32 nt, Human
uaaaccacgagcguucaggguuugucuguuug

SEQ ID NO: 483415 - RNA, 32 nt, Human
uaaaccacuguacagguggcacuggacuuaga

SEQ ID NO: 483416 - RNA, 32 nt, Human
uaaaccagaaauacuuuugggcccaacacuug

SEQ ID NO: 483417 - RNA, 32 nt, Human
uaaaccagagucuauuacuucuguucuccaac

SEQ ID NO: 483418 - RNA, 32 nt, Human
uaaaccagcccccacccccacccuccaccugc

SEQ ID NO: 483419 - RNA, 32 nt, Human
uaaaccagccucccuuaacccuaccuucuucu

SEQ ID NO: 483420 - RNA, 32 nt, Human
uaaaccagccugggcaccauggugagacccca

SEQ ID NO: 483421 - RNA, 32 nt, Human
uaaaccagcugaugcugucaguguucaaguuu

SEQ ID NO: 483422 - RNA, 32 nt, Human
uaaaccagcugcaucuagcucuaaaccaccug

SEQ ID NO: 483423 - RNA, 32 nt, Human
uaaaccaggaaauggacucucacuggacacua

SEQ ID NO: 483424 - RNA, 32 nt, Human
uaaaccaggaaggcagagauugcagugagcug

SEQ ID NO: 483425 - RNA, 32 nt, Human
uaaaccagugugaaggaggagagagguggagg

SEQ ID NO: 483426 - RNA, 32 nt, Human
uaaaccaucccugaaaccuaaauucacguuuc

SEQ ID NO: 483427 - RNA, 32 nt, Human
uaaaccauuaguaauacaugcuguaauauaga

SEQ ID NO: 483428 - RNA, 32 nt, Human
uaaaccauucaugcccuuaaauagcuagauuu

SEQ ID NO: 483429 - RNA, 32 nt, Human
uaaaccauucuuacugcucucuuccaaaacaa

SEQ ID NO: 483430 - RNA, 32 nt, Human
uaaacccaacacuuugggaggcugaggcaggc

SEQ ID NO: 483431 - RNA, 32 nt, Human
uaaacccaagaaaugauccuggaauacaguac

SEQ ID NO: 483432 - RNA, 32 nt, Human
uaaacccacaggcuucuauacugacauauuuc

SEQ ID NO: 483433 - RNA, 32 nt, Human
uaaacccacugcuccaggcuugaaaggcagca

SEQ ID NO: 483434 - RNA, 32 nt, Human
uaaacccagcacuuugggaggcugaagcgggu

SEQ ID NO: 483435 - RNA, 32 nt, Human
uaaacccagcuacugaggaggcugaggcauga

SEQ ID NO: 483436 - RNA, 32 nt, Human
uaaacccagcuacuugggaggcugaggcagga

SEQ ID NO: 483437 - RNA, 32 nt, Human
uaaacccagcuauucaggaggcugagguggga

SEQ ID NO: 483438 - RNA, 32 nt, Human
uaaacccaggaggcaaaggcugcagugagcca

SEQ ID NO: 483439 - RNA, 32 nt, Human
uaaacccaggaggcagagguugcagugaguga

SEQ ID NO: 483440 - RNA, 32 nt, Human
uaaacccaggaggccgagcugacaaagugagc

SEQ ID NO: 483441 - RNA, 32 nt, Human
uaaacccaggaggcggagguugcagugagcug

SEQ ID NO: 483442 - RNA, 32 nt, Human
uaaacccaggaggcggagguugcagugaguug

SEQ ID NO: 483443 - RNA, 32 nt, Human
uaaacccaggaggcggugguuguaggaagcug

SEQ ID NO: 483444 - RNA, 32 nt, Human
uaaacccaggagguggagguugaaaugagcug

SEQ ID NO: 483445 - RNA, 32 nt, Human
uaaacccaggagguggagguugcagugagccg

SEQ ID NO: 483446 - RNA, 32 nt, Human
uaaacccaggagguggagguugcagugagcug

SEQ ID NO: 483447 - RNA, 32 nt, Human
uaaacccaggaguucaagaccagccuggguaa

SEQ ID NO: 483448 - RNA, 32 nt, Human
uaaacccaggcggcagagguugcagugagcca

SEQ ID NO: 483449 - RNA, 32 nt, Human
uaaacccagguggcggagguugcagugagccg

SEQ ID NO: 483450 - RNA, 32 nt, Human
uaaacccagugagaggugagggggagugauga

SEQ ID NO: 483451 - RNA, 32 nt, Human
uaaaccccagcaauugcacuccugggccucug

SEQ ID NO: 483452 - RNA, 32 nt, Human
uaaaccccauuauacuuccacugguuaucucc

SEQ ID NO: 483453 - RNA, 32 nt, Human
uaaaccccggagccaccaugccugcucccccg

SEQ ID NO: 483454 - RNA, 32 nt, Human
uaaaccccuuuccuuuucuguggcuuuuaauu

SEQ ID NO: 483455 - RNA, 32 nt, Human
uaaacccgggaggcagaggcugcagagagcca

SEQ ID NO: 483456 - RNA, 32 nt, Human
uaaacccgggaggcggagcuugcagugagcca

SEQ ID NO: 483457 - RNA, 32 nt, Human
uaaacccgggaggcggagguugcagugagccg

SEQ ID NO: 483458 - RNA, 32 nt, Human
uaaacccgggaggugaaggaugcagugagcca

SEQ ID NO: 483459 - RNA, 32 nt, Human
uaaacccgggagguggagcuugcagugagccg

SEQ ID NO: 483460 - RNA, 32 nt, Human
uaaacccucacaugaucauguaagcuaugcag

SEQ ID NO: 483461 - RNA, 32 nt, Human
uaaacccucacugacuuuuuagcaauaaagcu

SEQ ID NO: 483462 - RNA, 32 nt, Human
uaaacccucauggguggugucugagaggcgug

SEQ ID NO: 483463 - RNA, 32 nt, Human
uaaacccuggaggcagagguugcagugagcca

SEQ ID NO: 483464 - RNA, 32 nt, Human
uaaacccugggugcaagugcgggaucccucca

SEQ ID NO: 483465 - RNA, 32 nt, Human
uaaacccuuugucagaaugcaguuuccuagag

SEQ ID NO: 483466 - RNA, 32 nt, Human
uaaaccgaggaguggucacaucccagugcaug

SEQ ID NO: 483467 - RNA, 32 nt, Human
uaaaccggggaggcggggguugcaaugagcua

SEQ ID NO: 483468 - RNA, 32 nt, Human
uaaaccucagcccucuggccuccacuuuccuc

SEQ ID NO: 483469 - RNA, 32 nt, Human
uaaaccucaguuauuacauguaauuugaugag

SEQ ID NO: 483470 - RNA, 32 nt, Human
uaaaccucauguuucggaugaagaggaagaag

SEQ ID NO: 483471 - RNA, 21 nt, Human
uaaaccucucugaccugugua

SEQ ID NO: 483472 - RNA, 32 nt, Human
uaaaccucuucccauacaccuuucccccauaa

SEQ ID NO: 483473 - RNA, 32 nt, Human
uaaaccucuucccuuucuguguguuuuuauuu

SEQ ID NO: 483474 - RNA, 32 nt, Human
uaaaccugagaggcagagguuacagugagcca

SEQ ID NO: 483475 - RNA, 32 nt, Human
uaaaccugagagguggagguuacagugaguug

SEQ ID NO: 483476 - RNA, 32 nt, Human
uaaaccugagagguggagguugcaguugagcc

SEQ ID NO: 483477 - RNA, 32 nt, Human
uaaaccugagucguacagaaagcugccuggua

SEQ ID NO: 483478 - RNA, 32 nt, Human
uaaaccugcacugaaaccugagauggagcugc

SEQ ID NO: 483479 - RNA, 32 nt, Human
uaaaccugcucuuacuguccaggcucuggggu

SEQ ID NO: 483480 - RNA, 32 nt, Human
uaaaccuggacagggagagggaggguguuaga

SEQ ID NO: 483481 - RNA, 32 nt, Human
uaaaccugggagacggagguugcagugagcca

SEQ ID NO: 483482 - RNA, 32 nt, Human
uaaaccugggaggcggagaguacagugagcca

SEQ ID NO: 483483 - RNA, 32 nt, Human
uaaaccugggaggcggagcuugcagugagccg

SEQ ID NO: 483484 - RNA, 32 nt, Human
uaaaccugggagguggagguugcagugacccg

SEQ ID NO: 483485 - RNA, 32 nt, Human
uaaaccugggauguggagguugcagugaacug

SEQ ID NO: 483486 - RNA, 32 nt, Human
uaaaccuucacaaccuucaugauuucauagga

SEQ ID NO: 483487 - RNA, 32 nt, Human
uaaaccuucucccaucucuuucaaaaucuuuu

SEQ ID NO: 483488 - RNA, 32 nt, Human
uaaaccuuucaaaagacuuucuaaggaugaua

SEQ ID NO: 483489 - RNA, 32 nt, Human
uaaaccuuugguggcugggauaugauggguua

SEQ ID NO: 483490 - RNA, 32 nt, Human
uaaacgaaauacugcucuguccagaggcuuua

SEQ ID NO: 483491 - RNA, 32 nt, Human
uaaacgaagauaagcaaacuacaaaccaggaa

SEQ ID NO: 483492 - RNA, 32 nt, Human
uaaacgacugaccuuccuuaaaaacagaauga

SEQ ID NO: 483493 - RNA, 32 nt, Human
uaaacgagcucccuucuuugcacacauagcca

SEQ ID NO: 483494 - RNA, 32 nt, Human
uaaacgauccagagacaagacagcaccuagua

SEQ ID NO: 483495 - RNA, 32 nt, Human
uaaacgcacacaguaucuagucaggggaaaag

SEQ ID NO: 483496 - RNA, 32 nt, Human
uaaacgcaccaaucagcacccugucaaaacag

SEQ ID NO: 483497 - RNA, 32 nt, Human
uaaacgccagucuccacuccagccucaaaaga

SEQ ID NO: 483498 - RNA, 32 nt, Human
uaaacgccucagucucacccugcugcugcucc

SEQ ID NO: 483499 - RNA, 32 nt, Human
uaaacgcuaaaacauucgucccuugaagcgga

SEQ ID NO: 483500 - RNA, 32 nt, Human
uaaacggaaacugagaugaggaaccagccguc

SEQ ID NO: 483501 - RNA, 32 nt, Human
uaaacggggguucugaugcucucaccugaauu

SEQ ID NO: 483502 - RNA, 32 nt, Human
uaaacgguauuuaaaaugcaaucuaauuguga

SEQ ID NO: 483503 - RNA, 32 nt, Human
uaaacggugaaaugacaugcaaaggccauagu

SEQ ID NO: 483504 - RNA, 32 nt, Human
uaaacguccugggaagugggcccuucccuggg

SEQ ID NO: 483505 - RNA, 32 nt, Human
uaaacguugggucucacguuuguugccauuau

SEQ ID NO: 483506 - RNA, 32 nt, Human
uaaacguuguauuaaaaagaccccguguaaac

SEQ ID NO: 483507 - RNA, 32 nt, Human
uaaacuaaauuuagguuugcagaaaguauuaa

SEQ ID NO: 483508 - RNA, 32 nt, Human
uaaacuaaccacugcuuuccaggauggccugc

SEQ ID NO: 483509 - RNA, 32 nt, Human
uaaacuacaguagguaacuuuaaggauuucuu

SEQ ID NO: 483510 - RNA, 32 nt, Human
uaaacuacuaguuuuaaaaaccuguguuaaau

SEQ ID NO: 483511 - RNA, 32 nt, Human
uaaacuacugcaacccucacauccucaaaggg

SEQ ID NO: 483512 - RNA, 32 nt, Human
uaaacuagaaccaaugucuccaggcagauuag

SEQ ID NO: 483513 - RNA, 32 nt, Human
uaaacuagaagaggaagaagaagaggaaguag

SEQ ID NO: 483514 - RNA, 32 nt, Human
uaaacuagacuggcacaucguuacccuuaugc

SEQ ID NO: 483515 - RNA, 32 nt, Human
uaaacuagccuucucaaaaucccagcaauaua

SEQ ID NO: 483516 - RNA, 32 nt, Human
uaaacuaucugugguguguguggggaaugaag

SEQ ID NO: 483517 - RNA, 32 nt, Human
uaaacuauuagccuggcgugguagcgcacgcc

SEQ ID NO: 483518 - RNA, 32 nt, Human
uaaacuauuucuaucaauugggccacacucaa

SEQ ID NO: 483519 - RNA, 24 nt, Human
uaaacucaaaagucccugccccag

SEQ ID NO: 483520 - RNA, 32 nt, Human
uaaacucaggaagugucaggugauuuccuagg

SEQ ID NO: 483521 - RNA, 32 nt, Human
uaaacucaggcucccagaacugaagauggugg

SEQ ID NO: 483522 - RNA, 32 nt, Human
uaaacucagugguuugguuuuuauuauuaaua

SEQ ID NO: 483523 - RNA, 32 nt, Human
uaaacucaucucuuuucccuuuauucaagcug

SEQ ID NO: 483524 - RNA, 22 nt, Human
uaaacuccacaauucacaccaa

SEQ ID NO: 483525 - RNA, 32 nt, Human
uaaacuccacagguaucagagaggguguaacu

SEQ ID NO: 483526 - RNA, 32 nt, Human
uaaacuccccuucauauauacaucuauccuau

SEQ ID NO: 483527 - RNA, 22 nt, Human
uaaacuccuggccucaagugau

SEQ ID NO: 483528 - RNA, 22 nt, Human
uaaacuccugggcucaagugau

SEQ ID NO: 483529 - RNA, 32 nt, Human
uaaacucgggagguagagguugcagugagcca

SEQ ID NO: 483530 - RNA, 32 nt, Human
uaaacucucccagaguaagagcuguaucguga

SEQ ID NO: 483531 - RNA, 32 nt, Human
uaaacucuuccccucaucacccuuugguagga

SEQ ID NO: 483532 - RNA, 32 nt, Human
uaaacucuuucaugacccuugaucaucagauc

SEQ ID NO: 483533 - RNA, 32 nt, Human
uaaacucuuuccugccaccagaauugcagugg

SEQ ID NO: 483534 - RNA, 32 nt, Human
uaaacugaaaaaugugauuggcuuccucucgc

SEQ ID NO: 483535 - RNA, 32 nt, Human
uaaacugaaaccaggggaagcuugcuuaguuu

SEQ ID NO: 483536 - RNA, 32 nt, Human
uaaacugaacuuaugcuaggaaaccuuaagua

SEQ ID NO: 483537 - RNA, 32 nt, Human
uaaacugaagauuuccucuggaagcuaccaca

SEQ ID NO: 483538 - RNA, 32 nt, Human
uaaacugaccaacauggagaaaccccgucucu

SEQ ID NO: 483539 - RNA, 32 nt, Human
uaaacugagaaggauauuaaaauaaguggcuu

SEQ ID NO: 483540 - RNA, 31 nt, Human
uaaacugagcagagagaaagcugacaaagag

SEQ ID NO: 483541 - RNA, 32 nt, Human
uaaacugauuucacuccagacugguguggcca

SEQ ID NO: 483542 - RNA, 32 nt, Human
uaaacugccuauuugcuuaucgggguguauug

SEQ ID NO: 483543 - RNA, 32 nt, Human
uaaacugccugggaagaggacaccuccuuggg

SEQ ID NO: 483544 - RNA, 32 nt, Human
uaaacugcgucucggaugucugucuuuugucu

SEQ ID NO: 483545 - RNA, 32 nt, Human
uaaacugcucuucccuccccacagggaacaca

SEQ ID NO: 483546 - RNA, 32 nt, Human
uaaacugcugcuauuuggaaaccccuucuuua

SEQ ID NO: 483547 - RNA, 32 nt, Human
uaaacugcuuauaauaauccaggaguugcauu

SEQ ID NO: 483548 - RNA, 32 nt, Human
uaaacugcuuuagauauuacugcucaguguuu

SEQ ID NO: 483549 - RNA, 32 nt, Human
uaaacuggaaacacucugaacccugccaucuu

SEQ ID NO: 483550 - RNA, 32 nt, Human
uaaacuggagccaauagaaaagacaaaaauga

SEQ ID NO: 483551 - RNA, 32 nt, Human
uaaacuggcaaaaggaacuuggauugcaggaa

SEQ ID NO: 483552 - RNA, 32 nt, Human
uaaacugggaaacugcuguggucucuguugcu

SEQ ID NO: 483553 - RNA, 32 nt, Human
uaaacugggaaggcuuucaggcuaccuuuuuc

SEQ ID NO: 483554 - RNA, 32 nt, Human
uaaacugggggaggcagggcacagggagaugc

SEQ ID NO: 483555 - RNA, 32 nt, Human
uaaacuguccuggagugacaucaugucauguu

SEQ ID NO: 483556 - RNA, 32 nt, Human
uaaacuguggaagagugacugcuagucccuuu

SEQ ID NO: 483557 - RNA, 32 nt, Human
uaaacugugucacagacuucugaauguuuagg

SEQ ID NO: 483558 - RNA, 32 nt, Human
uaaacuguucucuucagcuacugaaguucugu

SEQ ID NO: 483559 - RNA, 29 nt, Human
uaaacuguucugugugggucuggggaggg

SEQ ID NO: 483560 - RNA, 32 nt, Human
uaaacuguugcagaacuaaaaggcucuguggc

SEQ ID NO: 483561 - RNA, 32 nt, Human
uaaacuguuucuuagcugcacuguuuauggaa

SEQ ID NO: 483562 - RNA, 32 nt, Human
uaaacuucagaagaaaauaacagcaaccuauu

SEQ ID NO: 483563 - RNA, 32 nt, Human
uaaacuucagccacaugauucuuucacucaaa

SEQ ID NO: 483564 - RNA, 32 nt, Human
uaaacuuccucugcauuuccagccugaacaga

SEQ ID NO: 483565 - RNA, 32 nt, Human
uaaacuuccuguuauuuaaucucccccacggu

SEQ ID NO: 483566 - RNA, 32 nt, Human
uaaacuucuaggauuuucuucuacuuucugag

SEQ ID NO: 483567 - RNA, 32 nt, Human
uaaacuucucucucccugcucuugcccaggga

SEQ ID NO: 483568 - RNA, 32 nt, Human
uaaacuucuuagcacuuagcacugccuaccuc

SEQ ID NO: 483569 - RNA, 32 nt, Human
uaaacuugaccaaacaaaaauuaacuguuuuu

SEQ ID NO: 483570 - RNA, 32 nt, Human
uaaacuugaggagagcuaucagguuugcauag

SEQ ID NO: 483571 - RNA, 32 nt, Human
uaaacuugcaaaaucacuaggaucuccauuuc

SEQ ID NO: 483572 - RNA, 32 nt, Human
uaaacuuggccaaagugugugccugaauuauu

SEQ ID NO: 483573 - RNA, 32 nt, Human
uaaacuugggacgcggagauugcaguaagcca

SEQ ID NO: 483574 - RNA, 32 nt, Human
uaaacuuguaaauccacacacaacucugagaa

SEQ ID NO: 483575 - RNA, 32 nt, Human
uaaacuugugguuccguggguugauauccaga

SEQ ID NO: 483576 - RNA, 32 nt, Human
uaaacuuuagccuuuuggcugguguugaaugu

SEQ ID NO: 483577 - RNA, 32 nt, Human
uaaacuuucacaccccagacgaugucuucaua

SEQ ID NO: 483578 - RNA, 32 nt, Human
uaaacuuugccaugaacuccugggcuuugggg

SEQ ID NO: 483579 - RNA, 22 nt, Human
uaaacuuuggaauguguuuaaa

SEQ ID NO: 483580 - RNA, 20 nt, Human
uaaacuuugugcaggcccuu

SEQ ID NO: 483581 - RNA, 32 nt, Human
uaaacuuuuugcugggaacacugcagagacaa

SEQ ID NO: 483582 - RNA, 32 nt, Human
uaaagaaaaagcuccugaauugcccaaaccaa

SEQ ID NO: 483583 - RNA, 32 nt, Human
uaaagaaaaaggauuuuucuucgaguuagcug

SEQ ID NO: 483584 - RNA, 32 nt, Human
uaaagaaaaaucaccauuuaggagacuccauu

SEQ ID NO: 483585 - RNA, 23 nt, Human
uaaagaaaacaaaacuggacaga

SEQ ID NO: 483586 - RNA, 32 nt, Human
uaaagaaaagaggaggaggaggaggaagaaag

SEQ ID NO: 483587 - RNA, 32 nt, Human
uaaagaaaagauaacuacuggccaggugcagu

SEQ ID NO: 483588 - RNA, 32 nt, Human
uaaagaaaaguugccgaagaugagacugccca

SEQ ID NO: 483589 - RNA, 32 nt, Human
uaaagaaacaaggaccaacagcuggagcagag

SEQ ID NO: 483590 - RNA, 32 nt, Human
uaaagaaacucaggcagauacaagagaacaca

SEQ ID NO: 483591 - RNA, 32 nt, Human
uaaagaaagauaauucuaaagcuaaccaaaga

SEQ ID NO: 483592 - RNA, 32 nt, Human
uaaagaaagauuagcugggacauggugacacg

SEQ ID NO: 483593 - RNA, 32 nt, Human
uaaagaaauccauucaccccaaaacuuguuuu

SEQ ID NO: 483594 - RNA, 22 nt, Human
uaaagaaaucuuccuggacaga

SEQ ID NO: 483595 - RNA, 26 nt, Human
uaaagaaaucuuuggaaauuaggaga

SEQ ID NO: 483596 - RNA, 32 nt, Human
uaaagaacaggauuccagaaugaucauuaaau

SEQ ID NO: 483597 - RNA, 32 nt, Human
uaaagaacccuuuaauaaugcaucaccccauc

SEQ ID NO: 483598 - RNA, 22 nt, Human
uaaagaacugaaaaggguucug

SEQ ID NO: 483599 - RNA, 32 nt, Human
uaaagaacuuaaacaaauuuacaggaaaacaa

SEQ ID NO: 483600 - RNA, 32 nt, Human
uaaagaacuugacucaacuacaggggccuggg

SEQ ID NO: 483601 - RNA, 32 nt, Human
uaaagaagaaaauugucuauuucagugucuuu

SEQ ID NO: 483602 - RNA, 32 nt, Human
uaaagaagacacacagccaacguucaugcauu

SEQ ID NO: 483603 - RNA, 32 nt, Human
uaaagaagacugacuagaugcaucuuucuuug

SEQ ID NO: 483604 - RNA, 32 nt, Human
uaaagaagagcguccaggugggacugggauaa

SEQ ID NO: 483605 - RNA, 32 nt, Human
uaaagaagaggagaaaaagaagaaaagauucu

SEQ ID NO: 483606 - RNA, 32 nt, Human
uaaagaagaggugagagcaaaaggaauaaggg

SEQ ID NO: 483607 - RNA, 32 nt, Human
uaaagaagaguuucuaggggcuacuguuuaug

SEQ ID NO: 483608 - RNA, 32 nt, Human
uaaagaagauuugcauucagcaguucauuaag

SEQ ID NO: 483609 - RNA, 32 nt, Human
uaaagaaggagaaggaagaggaagaaggaaaa

SEQ ID NO: 483610 - RNA, 32 nt, Human
uaaagaaggaugaguuuaugcccuuuguaggg

SEQ ID NO: 483611 - RNA, 32 nt, Human
uaaagaagguagcucagcgccacugagauugu

SEQ ID NO: 483612 - RNA, 32 nt, Human
uaaagaaguuguguuuucagaggugauuuuau

SEQ ID NO: 483613 - RNA, 32 nt, Human
uaaagaauccuuagauccuaaaaaucccuucc

SEQ ID NO: 483614 - RNA, 32 nt, Human
uaaagaaugccauggccgggugcaguggcuca

SEQ ID NO: 483615 - RNA, 32 nt, Human
uaaagaaugcccuuuaugaugcacugauucca

SEQ ID NO: 483616 - RNA, 22 nt, Human
uaaagaauggaagagugcccug

SEQ ID NO: 483617 - RNA, 22 nt, Human
uaaagaaugugagaaaguucug

SEQ ID NO: 483618 - RNA, 30 nt, Human
uaaagaauucucuccauguuuuuguaucgg

SEQ ID NO: 483619 - RNA, 21 nt, Human
uaaagaauuuuaacaguccug

SEQ ID NO: 483620 - RNA, 32 nt, Human
uaaagacaaaaauacaucaaggaguuaugcug

SEQ ID NO: 483621 - RNA, 32 nt, Human
uaaagacaaagacaaauucuguuucuugagaa

SEQ ID NO: 483622 - RNA, 32 nt, Human
uaaagacaaagucaaugguccuaggagagcug

SEQ ID NO: 483623 - RNA, 32 nt, Human
uaaagacaaauacuucacucuuuuucauacua

SEQ ID NO: 483624 - RNA, 32 nt, Human
uaaagacaauccuugcacaaggcuuccaacuc

SEQ ID NO: 483625 - RNA, 32 nt, Human
uaaagacacaugcacacauauguuuauuacgg

SEQ ID NO: 483626 - RNA, 32 nt, Human
uaaagacacaugcacacguauguuuauugcag

SEQ ID NO: 483627 - RNA, 32 nt, Human
uaaagacacaugcacauguauguuuauugcag

SEQ ID NO: 483628 - RNA, 32 nt, Human
uaaagacacaugcacgcguauguucguugcag

SEQ ID NO: 483629 - RNA, 32 nt, Human
uaaagacacaugcauacauauguuuauugcag

SEQ ID NO: 483630 - RNA, 32 nt, Human
uaaagacacaugcaugcaaauguccacugcag

SEQ ID NO: 483631 - RNA, 32 nt, Human
uaaagacacaugccacauauauguuccuugca

SEQ ID NO: 483632 - RNA, 32 nt, Human
uaaagacaggagacaaaagagcagugguaaga

SEQ ID NO: 483633 - RNA, 32 nt, Human
uaaagacagugaggcccaggccuaggggcacg

SEQ ID NO: 483634 - RNA, 32 nt, Human
uaaagacaugguuaaagacacuucggagauau

SEQ ID NO: 483635 - RNA, 32 nt, Human
uaaagaccaccaggagcacacuuguaauuaca

SEQ ID NO: 483636 - RNA, 32 nt, Human
uaaagaccacccuggccaacauggugaaaccc

SEQ ID NO: 483637 - RNA, 32 nt, Human
uaaagaccagccugauuauuuguauagccaca

SEQ ID NO: 483638 - RNA, 32 nt, Human
uaaagaccagccuggccaacaaggugaaaccc

SEQ ID NO: 483639 - RNA, 32 nt, Human
uaaagaccagccuggccaacauggcaaaaccc

SEQ ID NO: 483640 - RNA, 32 nt, Human
uaaagaccagccuggucaauauagcaagacca

SEQ ID NO: 483641 - RNA, 32 nt, Human
uaaagaccaguucuuuaagcuaagacauguaa

SEQ ID NO: 483642 - RNA, 32 nt, Human
uaaagacccacauucugcuuucuuacucaugg

SEQ ID NO: 483643 - RNA, 32 nt, Human
uaaagacccaggagaaauagguaucccaaaga

SEQ ID NO: 483644 - RNA, 32 nt, Human
uaaagaccuagaggugaggucucugagcaagg

SEQ ID NO: 483645 - RNA, 32 nt, Human
uaaagaccucauugacacaggccucauuuggg

SEQ ID NO: 483646 - RNA, 32 nt, Human
uaaagaccugcacuauuuuguagaaaaauagg

SEQ ID NO: 483647 - RNA, 32 nt, Human
uaaagacgcacugccaagggcuccgugugccc

SEQ ID NO: 483648 - RNA, 32 nt, Human
uaaagacggguuucaccauguuggccaggcug

SEQ ID NO: 483649 - RNA, 32 nt, Human
uaaagacgugagccacggcaccuggccugaau

SEQ ID NO: 483650 - RNA, 32 nt, Human
uaaagacuagagcuuuccuccuccaggauguu

SEQ ID NO: 483651 - RNA, 32 nt, Human
uaaagacucacagguccgccucccaggcucaa

SEQ ID NO: 483652 - RNA, 20 nt, Human
uaaagacuuugagaauggau

SEQ ID NO: 483653 - RNA, 32 nt, Human
uaaagagaaaaauacaaauuaccuguaauuca

SEQ ID NO: 483654 - RNA, 32 nt, Human
uaaagagaaaguauaugucauauguuugcaaa

SEQ ID NO: 483655 - RNA, 31 nt, Human
uaaagagaacaaugccaggcuugacuugcaa

SEQ ID NO: 483656 - RNA, 32 nt, Human
uaaagagacaguguuagggaucuuggaagcac

SEQ ID NO: 483657 - RNA, 32 nt, Human
uaaagagagaaggcucuugauuccuuaugcaa

SEQ ID NO: 483658 - RNA, 32 nt, Human
uaaagagagacaggaaauggcuguguuagugc

SEQ ID NO: 483659 - RNA, 32 nt, Human
uaaagagagaucaauuacccacccuuaaauag

SEQ ID NO: 483660 - RNA, 32 nt, Human
uaaagagaguggcugcuauugacauugccaag

SEQ ID NO: 483661 - RNA, 32 nt, Human
uaaagagaucagagaccuaaagugccagacca

SEQ ID NO: 483662 - RNA, 22 nt, Human
uaaagagauuucccuucauuua

SEQ ID NO: 483663 - RNA, 32 nt, Human
uaaagagcaaaacuagacuucuaugugagaag

SEQ ID NO: 483664 - RNA, 32 nt, Human
uaaagagcagaguagaaauggaagaggcuuug

SEQ ID NO: 483665 - RNA, 32 nt, Human
uaaagagcagaugcauggccauuuuucuuuga

SEQ ID NO: 483666 - RNA, 32 nt, Human
uaaagagcagccuggcuaacauggugaaaccc

SEQ ID NO: 483667 - RNA, 32 nt, Human
uaaagagcaguuucaugcugcugaacuugcaa

SEQ ID NO: 483668 - RNA, 32 nt, Human
uaaagagcauucucuaccauugcccagcugaa

SEQ ID NO: 483669 - RNA, 32 nt, Human
uaaagaggaaacagccugucucagcuguacuc

SEQ ID NO: 483670 - RNA, 32 nt, Human
uaaagaggcagaggcgcagcuguggugggcag

SEQ ID NO: 483671 - RNA, 32 nt, Human
uaaagagggacaggcugaagagagggacaggc

SEQ ID NO: 483672 - RNA, 32 nt, Human
uaaagagggcuggagucaggggacuucucuuc

SEQ ID NO: 483673 - RNA, 32 nt, Human
uaaagagggugguuccaacuucaucaauaccu

SEQ ID NO: 483674 - RNA, 32 nt, Human
uaaagagucuguucuggcuucugauuuucagu

SEQ ID NO: 483675 - RNA, 32 nt, Human
uaaagauacuauauacguuuuguauaucauua

SEQ ID NO: 483676 - RNA, 32 nt, Human
uaaagaucacuugguaguuagccacauugaga

SEQ ID NO: 483677 - RNA, 32 nt, Human
uaaagaucauaauuagcuguguuaacacagaa

SEQ ID NO: 483678 - RNA, 32 nt, Human
uaaagaucaucucuucagagcugcaugguaaa

SEQ ID NO: 483679 - RNA, 32 nt, Human
uaaagaucauuuaucagaggagguucagcauu

SEQ ID NO: 483680 - RNA, 32 nt, Human
uaaagauccaacaacaucuggauuuucucaga

SEQ ID NO: 483681 - RNA, 32 nt, Human
uaaagaucugagggacuccucaguccuggggc

SEQ ID NO: 483682 - RNA, 32 nt, Human
uaaagaugacgaagaaaagcccaagaucaaag

SEQ ID NO: 483683 - RNA, 32 nt, Human
uaaagaugcauugaaugcuuggaagaaugcuu

SEQ ID NO: 483684 - RNA, 32 nt, Human
uaaagaugcucaccuuguucagaagagaauaa

SEQ ID NO: 483685 - RNA, 32 nt, Human
uaaagaugcuccuggcuuaucuucugcauguc

SEQ ID NO: 483686 - RNA, 32 nt, Human
uaaagauggaaaggagaaagaagcaaccucug

SEQ ID NO: 483687 - RNA, 32 nt, Human
uaaagauggguaaacugaggcacagggagccg

SEQ ID NO: 483688 - RNA, 30 nt, Human
uaaagaugguggugaugaacagccugaggg

SEQ ID NO: 483689 - RNA, 32 nt, Human
uaaagaugucucauguacuuggaaaagugagc

SEQ ID NO: 483690 - RNA, 32 nt, Human
uaaagaugugggggaggaagcuuggguaaggu

SEQ ID NO: 483691 - RNA, 32 nt, Human
uaaagauguguuuagaaccucuuguuuaaaaa

SEQ ID NO: 483692 - RNA, 32 nt, Human
uaaagauguuaacaauccaucuguauuuaaaa

SEQ ID NO: 483693 - RNA, 32 nt, Human
uaaagauuacaguacacauacaacccauucac

SEQ ID NO: 483694 - RNA, 32 nt, Human
uaaagauuauuuguaguuuacuuuccaucuau

SEQ ID NO: 483695 - RNA, 22 nt, Human
uaaagauucaacuuguuuuuca

SEQ ID NO: 483696 - RNA, 32 nt, Human
uaaagauucauauuguauucccugcagcaacc

SEQ ID NO: 483697 - RNA, 32 nt, Human
uaaagauucauuucucucccacccucaacucc

SEQ ID NO: 483698 - RNA, 32 nt, Human
uaaagauugaauaauugaaggcacuaugcuug

SEQ ID NO: 483699 - RNA, 32 nt, Human
uaaagauugugccagugauagauguugugaga

SEQ ID NO: 483700 - RNA, 18 nt, Human
uaaagauuugucugugua

SEQ ID NO: 483701 - RNA, 32 nt, Human
uaaagauuuuuaucuuugccugucuacuguaa

SEQ ID NO: 483702 - RNA, 31 nt, Human
uaaagcaaauaguaagaauuuuuaaaacuau

SEQ ID NO: 483703 - RNA, 32 nt, Human
uaaagcaacagucacugucauaagaauaaacg

SEQ ID NO: 483704 - RNA, 32 nt, Human
uaaagcaauucauuuucucccacccucggccc

SEQ ID NO: 483705 - RNA, 32 nt, Human
uaaagcacaaauauacuugaauauugcuuaaa

SEQ ID NO: 483706 - RNA, 32 nt, Human
uaaagcacccuguaucacagacuggcaacaag

SEQ ID NO: 483707 - RNA, 32 nt, Human
uaaagcaccgucuuuugcuagaagaacaagag

SEQ ID NO: 483708 - RNA, 20 nt, Human
uaaagcacugggauuauuuc

SEQ ID NO: 483709 - RNA, 24 nt, Human
uaaagcacuguuugucacuuuuca

SEQ ID NO: 483710 - RNA, 24 nt, Human
uaaagcacuuuguacuguuauuca

SEQ ID NO: 483711 - RNA, 32 nt, Human
uaaagcagagcucuguaacaaaauaauacaca

SEQ ID NO: 483712 - RNA, 32 nt, Human
uaaagcagauggggaguuacggaguuguuccu

SEQ ID NO: 483713 - RNA, 32 nt, Human
uaaagcagauuggagcucugcaguaccacaga

SEQ ID NO: 483714 - RNA, 32 nt, Human
uaaagcagauuggagcucugcaguaccacagg

SEQ ID NO: 483715 - RNA, 32 nt, Human
uaaagcagcuuccaucaggaacauggagcagg

SEQ ID NO: 483716 - RNA, 32 nt, Human
uaaagcaggaccugccuuaacugcuccuggcc

SEQ ID NO: 483717 - RNA, 32 nt, Human
uaaagcagucacuuuuccugugcuguuucaaa

SEQ ID NO: 483718 - RNA, 32 nt, Human
uaaagcagucauggucccuaccaucuaggaac

SEQ ID NO: 483719 - RNA, 32 nt, Human
uaaagcagugaaggaagagaacagagacaaac

SEQ ID NO: 483720 - RNA, 32 nt, Human
uaaagcaucuggaaauaggaagacagagaagg

SEQ ID NO: 483721 - RNA, 32 nt, Human
uaaagcaugaauuuuaauaucuagucauuaaa

SEQ ID NO: 483722 - RNA, 32 nt, Human
uaaagcaugacuuucaaggaugguucuuaggg

SEQ ID NO: 483723 - RNA, 32 nt, Human
uaaagcauucugaguggaugugcacugcaugg

SEQ ID NO: 483724 - RNA, 32 nt, Human
uaaagcauuggugaaaucacauauuuuauauu

SEQ ID NO: 483725 - RNA, 32 nt, Human
uaaagcauuugaaugguacaguagauguaaaa

SEQ ID NO: 483726 - RNA, 18 nt, Human
uaaagccaauggcugugu

SEQ ID NO: 483727 - RNA, 20 nt, Human
uaaagccacaugugccugug

SEQ ID NO: 483728 - RNA, 22 nt, Human
uaaagccacauuucauugucuu

SEQ ID NO: 483729 - RNA, 32 nt, Human
uaaagccacccacaaacaaacuacccauuuuc

SEQ ID NO: 483730 - RNA, 16 nt, Human
uaaagccacuagugua

SEQ ID NO: 483731 - RNA, 32 nt, Human
uaaagccacugcacucaaacguggggaacaag

SEQ ID NO: 483732 - RNA, 32 nt, Human
uaaagccacuuuccucuucagauccuggucug

SEQ ID NO: 483733 - RNA, 32 nt, Human
uaaagccagcgaggcccugccugccagccggg

SEQ ID NO: 483734 - RNA, 32 nt, Human
uaaagccaggguggagcugggagaggcccuug

SEQ ID NO: 483735 - RNA, 32 nt, Human
uaaagccagguggcagggccuuggggagcccc

SEQ ID NO: 483736 - RNA, 22 nt, Human
uaaagccagucaucaucucuug

SEQ ID NO: 483737 - RNA, 32 nt, Human
uaaagccaguggaguacaggcugcaauauaaa

SEQ ID NO: 483738 - RNA, 19 nt, Human
uaaagccaguggcagugua

SEQ ID NO: 483739 - RNA, 18 nt, Human
uaaagccaguggguggua

SEQ ID NO: 483740 - RNA, 20 nt, Human
uaaagccauacuuuugugug

SEQ ID NO: 483741 - RNA, 18 nt, Human
uaaagccauagcuuuugu

SEQ ID NO: 483742 - RNA, 32 nt, Human
uaaagccauccagaacaccagcaccucacugc

SEQ ID NO: 483743 - RNA, 18 nt, Human
uaaagccaugacuuuugu

SEQ ID NO: 483744 - RNA, 17 nt, Human
uaaagccaugagccgug

SEQ ID NO: 483745 - RNA, 17 nt, Human
uaaagccaugguagugu

SEQ ID NO: 483746 - RNA, 32 nt, Human
uaaagccauuugaagaauaaagucauccagag

SEQ ID NO: 483747 - RNA, 32 nt, Human
uaaagccauuuggucuuaauucugaccaauaa

SEQ ID NO: 483748 - RNA, 19 nt, Human
uaaagccauuugucugugu

SEQ ID NO: 483749 - RNA, 32 nt, Human
uaaagcccaagaaauucagcugacaagacaga

SEQ ID NO: 483750 - RNA, 32 nt, Human
uaaagcccaaguguucuuuagcuuuuuauaau

SEQ ID NO: 483751 - RNA, 32 nt, Human
uaaagcccacacccucuacccuguuccucagc

SEQ ID NO: 483752 - RNA, 32 nt, Human
uaaagcccaggacugaauuggccaccugaggc

SEQ ID NO: 483753 - RNA, 32 nt, Human
uaaagcccauaagcugggucucaggcugggcu

SEQ ID NO: 483754 - RNA, 32 nt, Human
uaaagccccagagacgugcucagccccaggac

SEQ ID NO: 483755 - RNA, 32 nt, Human
uaaagccccaggcuggguuagguggucuagga

SEQ ID NO: 483756 - RNA, 32 nt, Human
uaaagccccucagagucaccucucauucauag

SEQ ID NO: 483757 - RNA, 32 nt, Human
uaaagccccuuccuccccagccccugcuuuca

SEQ ID NO: 483758 - RNA, 32 nt, Human
uaaagccgagacuugggaacgagcccugacgu

SEQ ID NO: 483759 - RNA, 32 nt, Human
uaaagccgcgugccucaaggggaggcuggacc

SEQ ID NO: 483760 - RNA, 17 nt, Human
uaaagccuagucugugu

SEQ ID NO: 483761 - RNA, 32 nt, Human
uaaagccucacaccuauggccaucugaucuuc

SEQ ID NO: 483762 - RNA, 32 nt, Human
uaaagccugaacccguucuucucugguucaag

SEQ ID NO: 483763 - RNA, 19 nt, Human
uaaagccugcagaacugug

SEQ ID NO: 483764 - RNA, 32 nt, Human
uaaagccugcagagguggaaauuggagcucau

SEQ ID NO: 483765 - RNA, 32 nt, Human
uaaagccuguaaucccagcacuuugggaggcc

SEQ ID NO: 483766 - RNA, 32 nt, Human
uaaagccuuugacccaggccuacugagucaaa

SEQ ID NO: 483767 - RNA, 32 nt, Human
uaaagcgacacuuuacucacagccuggcuuga

SEQ ID NO: 483768 - RNA, 32 nt, Human
uaaagcggaaauguaugugcucuuccugcaaa

SEQ ID NO: 483769 - RNA, 32 nt, Human
uaaagcgggggaggggaagaggggcugagaaa

SEQ ID NO: 483770 - RNA, 32 nt, Human
uaaagcguggccgccucccgcggcgcucggga

SEQ ID NO: 483771 - RNA, 32 nt, Human
uaaagcguuccaaauauccacuugcagacacu

SEQ ID NO: 483772 - RNA, 32 nt, Human
uaaagcuacaccucaauccauucuucugaagu

SEQ ID NO: 483773 - RNA, 32 nt, Human
uaaagcuagagacgggggaggcuuaccacuuu

SEQ ID NO: 483774 - RNA, 32 nt, Human
uaaagcucaaauacuguuuucuuucauucuuc

SEQ ID NO: 483775 - RNA, 19 nt, Human
uaaagcucagcucugugua

SEQ ID NO: 483776 - RNA, 32 nt, Human
uaaagcuccuucuaucuugugaugccaccauc

SEQ ID NO: 483777 - RNA, 32 nt, Human
uaaagcucuugcuauguugcuauaagacagua

SEQ ID NO: 483778 - RNA, 20 nt, Human
uaaagcugaaugaccugugu

SEQ ID NO: 483779 - RNA, 32 nt, Human
uaaagcugaccagccugcucuguacagugaca

SEQ ID NO: 483780 - RNA, 32 nt, Human
uaaagcugagauuacaggcaugcgccaccaca

SEQ ID NO: 483781 - RNA, 32 nt, Human
uaaagcugaggcaaugcucccuccucuaucuc

SEQ ID NO: 483782 - RNA, 32 nt, Human
uaaagcugaguauuuccuaauuguauagaauc

SEQ ID NO: 483783 - RNA, 32 nt, Human
uaaagcugaucuguaaacccuuaccccuugcu

SEQ ID NO: 483784 - RNA, 32 nt, Human
uaaagcugcugaccgaucucccuccuccucac

SEQ ID NO: 483785 - RNA, 32 nt, Human
uaaagcuggcaguggagucucugccucaccca

SEQ ID NO: 483786 - RNA, 32 nt, Human
uaaagcugggcaauguaaugaucagaucuuug

SEQ ID NO: 483787 - RNA, 32 nt, Human
uaaagcugguggcggggugcuuggggagggug

SEQ ID NO: 483788 - RNA, 32 nt, Human
uaaagcugguuuuucuugauuacuugagaagc

SEQ ID NO: 483789 - RNA, 32 nt, Human
uaaagcugugagccacugugccaaggcuuuuu

SEQ ID NO: 483790 - RNA, 32 nt, Human
uaaagcuguuucuguauguaacaacugcaacc

SEQ ID NO: 483791 - RNA, 32 nt, Human
uaaagcuguuugcuuuuucaggcuuuggauua

SEQ ID NO: 483792 - RNA, 32 nt, Human
uaaagcuucauuuugaucgccacagccccaga

SEQ ID NO: 483793 - RNA, 32 nt, Human
uaaagcuucuuguccauggcuuuuguuugaug

SEQ ID NO: 483794 - RNA, 22 nt, Human
uaaagcuugaaggcaccguggg

SEQ ID NO: 483795 - RNA, 29 nt, Human
uaaagcuuuacagccuucugcaaagaaaa

SEQ ID NO: 483796 - RNA, 32 nt, Human
uaaagcuuuacuauucuguccugggcuuauau

SEQ ID NO: 483797 - RNA, 32 nt, Human
uaaagcuuucugguuagauuguuuucacuugg

SEQ ID NO: 483798 - RNA, 32 nt, Human
uaaagcuuuguccucugugaagaauuauaaaa

SEQ ID NO: 483799 - RNA, 32 nt, Human
uaaaggaaaaauagcagagauguucaccuuuu

SEQ ID NO: 483800 - RNA, 32 nt, Human
uaaaggaaacacugcaacuuuccuuaacagcc

SEQ ID NO: 483801 - RNA, 32 nt, Human
uaaaggaaagagauguggcuuuugugauauuc

SEQ ID NO: 483802 - RNA, 32 nt, Human
uaaaggaaggucuucaaucagaaacaaaagga

SEQ ID NO: 483803 - RNA, 31 nt, Human
uaaaggacaggccacaccacagcagagacca

SEQ ID NO: 483804 - RNA, 32 nt, Human
uaaaggacauuuuccaggaucucagugugagu

SEQ ID NO: 483805 - RNA, 32 nt, Human
uaaaggacccagaccccggcacccucaacauc

SEQ ID NO: 483806 - RNA, 32 nt, Human
uaaaggacuggcugggaugagaagaguguugc

SEQ ID NO: 483807 - RNA, 32 nt, Human
uaaaggagcaggaaagggcgugaggcaggagg

SEQ ID NO: 483808 - RNA, 32 nt, Human
uaaaggagcccggcggaggcagcgguggguuu

SEQ ID NO: 483809 - RNA, 32 nt, Human
uaaaggagccuucucaucucuggccgagaaca

SEQ ID NO: 483810 - RNA, 32 nt, Human
uaaaggaggaagauggcggggugcaggggguc

SEQ ID NO: 483811 - RNA, 32 nt, Human
uaaaggaggaaggcugccagaacugaacuagc

SEQ ID NO: 483812 - RNA, 32 nt, Human
uaaaggaggagcacgaauauucccuggauuuc

SEQ ID NO: 483813 - RNA, 32 nt, Human
uaaaggaggcugagguugcagugagcugagau

SEQ ID NO: 483814 - RNA, 32 nt, Human
uaaaggaguucaaauacuauagcugucaguug

SEQ ID NO: 483815 - RNA, 32 nt, Human
uaaaggaguuggaggagagggagggggaggac

SEQ ID NO: 483816 - RNA, 32 nt, Human
uaaaggaucgaaccagcaaauccagaggcuuu

SEQ ID NO: 483817 - RNA, 32 nt, Human
uaaaggaugauaugaugaaccuagccuguuaa

SEQ ID NO: 483818 - RNA, 32 nt, Human
uaaaggauucugggagaugguccaaggguguu

SEQ ID NO: 483819 - RNA, 32 nt, Human
uaaaggcaaggaaauuaagaacugaauccaua

SEQ ID NO: 483820 - RNA, 32 nt, Human
uaaaggcacagaugaguaugugguguguguug

SEQ ID NO: 483821 - RNA, 32 nt, Human
uaaaggcacgugccaccaugacuggccaauuu

SEQ ID NO: 483822 - RNA, 32 nt, Human
uaaaggcacugaggucuucucaguuaccccaa

SEQ ID NO: 483823 - RNA, 32 nt, Human
uaaaggcacuggccagcagugugugacuuugg

SEQ ID NO: 483824 - RNA, 32 nt, Human
uaaaggcaggccucucucuucuugccuuuaaa

SEQ ID NO: 483825 - RNA, 32 nt, Human
uaaaggcauaccuuaaacaagcuccaccuucc

SEQ ID NO: 483826 - RNA, 32 nt, Human
uaaaggcaugagccaccgcacucagccacuua

SEQ ID NO: 483827 - RNA, 32 nt, Human
uaaaggccagcuuuggccaggcugccacaggg

SEQ ID NO: 483828 - RNA, 32 nt, Human
uaaaggcccaugcacacuauaggcacucaaua

SEQ ID NO: 483829 - RNA, 32 nt, Human
uaaaggccguggcugugcuguauuugauauaa

SEQ ID NO: 483830 - RNA, 32 nt, Human
uaaaggccuaaccaccucccugcagucucuua

SEQ ID NO: 483831 - RNA, 32 nt, Human
uaaaggccuaucucugggucauaaauccugca

SEQ ID NO: 483832 - RNA, 32 nt, Human
uaaaggccucuggauacugggcuccccagaac

SEQ ID NO: 483833 - RNA, 32 nt, Human
uaaaggccugggagcuagacccuccccaagcc

SEQ ID NO: 483834 - RNA, 32 nt, Human
uaaaggcgugagccaccaugcccagccuccua

SEQ ID NO: 483835 - RNA, 32 nt, Human
uaaaggcgugagccaccguaccuugcccuugg

SEQ ID NO: 483836 - RNA, 32 nt, Human
uaaaggcgugagccaccgugcccagccuaauu

SEQ ID NO: 483837 - RNA, 32 nt, Human
uaaaggcguuuuccccacccugccucaguguu

SEQ ID NO: 483838 - RNA, 32 nt, Human
uaaaggcugccucuucucccugugguuugauu

SEQ ID NO: 483839 - RNA, 32 nt, Human
uaaaggcugccucuucucccugugguuugguu

SEQ ID NO: 483840 - RNA, 32 nt, Human
uaaaggcuuccucugggugccugcugaacaac

SEQ ID NO: 483841 - RNA, 32 nt, Human
uaaagggaaaggagaauuaaggaaauaauagg

SEQ ID NO: 483842 - RNA, 32 nt, Human
uaaagggaaagggaagucguggagaggcaggg

SEQ ID NO: 483843 - RNA, 32 nt, Human
uaaagggaagcuggaagagaagaaaccugcug

SEQ ID NO: 483844 - RNA, 32 nt, Human
uaaagggaggaaacuccucacagccuuuuuau

SEQ ID NO: 483845 - RNA, 32 nt, Human
uaaagggagucucucaccagcccaggcccuca

SEQ ID NO: 483846 - RNA, 32 nt, Human
uaaagggauacuuggaacaacuuuaugccaau

SEQ ID NO: 483847 - RNA, 32 nt, Human
uaaagggauucaggaagacgacguauggcucu

SEQ ID NO: 483848 - RNA, 32 nt, Human
uaaagggcaaggaggugggggccgcaggguug

SEQ ID NO: 483849 - RNA, 32 nt, Human
uaaagggcaguggcaugaucucggcucacugc

SEQ ID NO: 483850 - RNA, 32 nt, Human
uaaagggcccuccacugccaccucucauggga

SEQ ID NO: 483851 - RNA, 32 nt, Human
uaaaggggacaugccgggaguugcaguacccu

SEQ ID NO: 483852 - RNA, 32 nt, Human
uaaagggggaaugagggaguauggagggguau

SEQ ID NO: 483853 - RNA, 32 nt, Human
uaaaggggugagccaccgcacccaguccugag

SEQ ID NO: 483854 - RNA, 32 nt, Human
uaaaggguauuagggggcuugggggcuggggg

SEQ ID NO: 483855 - RNA, 32 nt, Human
uaaagggucgaaucucucugaagaacugccac

SEQ ID NO: 483856 - RNA, 32 nt, Human
uaaagggugcagugcagccacugagggacagc

SEQ ID NO: 483857 - RNA, 32 nt, Human
uaaaggguuaauagccagauaguagaaccagu

SEQ ID NO: 483858 - RNA, 32 nt, Human
uaaagguagccuugaggccagagcagguagca

SEQ ID NO: 483859 - RNA, 32 nt, Human
uaaaggucaaguggucaaguucuguuuucuuu

SEQ ID NO: 483860 - RNA, 32 nt, Human
uaaaggucacugggagcguuucugauucccgg

SEQ ID NO: 483861 - RNA, 32 nt, Human
uaaagguccaacaaugaaacagaacagauaua

SEQ ID NO: 483862 - RNA, 32 nt, Human
uaaaggucucuuuacaccagagcuaagaucac

SEQ ID NO: 483863 - RNA, 32 nt, Human
uaaaggucuuaauaacaagaacagugacuucg

SEQ ID NO: 483864 - RNA, 32 nt, Human
uaaaggugauucuuggguuugaagacauuugu

SEQ ID NO: 483865 - RNA, 32 nt, Human
uaaaggugcaauuacugucaaaagaguucaga

SEQ ID NO: 483866 - RNA, 32 nt, Human
uaaaggugcacgccgccaugcccagcuaauuu

SEQ ID NO: 483867 - RNA, 32 nt, Human
uaaaggugcgugccaccaugcccggcuaauuu

SEQ ID NO: 483868 - RNA, 32 nt, Human
uaaagguggagugagucaaaccucagcccagg

SEQ ID NO: 483869 - RNA, 32 nt, Human
uaaagguguagaagggagagaaguugggacac

SEQ ID NO: 483870 - RNA, 32 nt, Human
uaaaggugugagccaccaugccuggcccuaug

SEQ ID NO: 483871 - RNA, 32 nt, Human
uaaagguguucuauggcaacagugaugacauu

SEQ ID NO: 483872 - RNA, 32 nt, Human
uaaagguguucuguggcaacagugaugacauu

SEQ ID NO: 483873 - RNA, 32 nt, Human
uaaagguuggaaagaugacuguugcuggcagu

SEQ ID NO: 483874 - RNA, 32 nt, Human
uaaagguuucaacgucuugcucuaauaaauca

SEQ ID NO: 483875 - RNA, 32 nt, Human
uaaaguaaaauauuaacuuuuccucuuugaaa

SEQ ID NO: 483876 - RNA, 24 nt, Human
uaaaguaacuauacauguuuuuua

SEQ ID NO: 483877 - RNA, 32 nt, Human
uaaaguaauuuuccuuuugcaggauggcauag

SEQ ID NO: 483878 - RNA, 30 nt, Human
uaaaguagccucugcaucugccugccucgg

SEQ ID NO: 483879 - RNA, 32 nt, Human
uaaaguaggaacuguugugugagcgagacaug

SEQ ID NO: 483880 - RNA, 32 nt, Human
uaaaguaggagagauugguuggaaggcuuuua

SEQ ID NO: 483881 - RNA, 32 nt, Human
uaaaguaguacuuugaaucauaguaugaaaug

SEQ ID NO: 483882 - RNA, 32 nt, Human
uaaaguaugagugaaaaagagacugaaggucu

SEQ ID NO: 483883 - RNA, 24 nt, Human
uaaaguauguauuauuuacauuua

SEQ ID NO: 483884 - RNA, 32 nt, Human
uaaaguauuaaaugcacuaucugcuguaaacg

SEQ ID NO: 483885 - RNA, 32 nt, Human
uaaagucaaagaaugauggcagguaggaugaa

SEQ ID NO: 483886 - RNA, 32 nt, Human
uaaagucacagcaaacggcagaacuaacaaua

SEQ ID NO: 483887 - RNA, 31 nt, Human
uaaagucacagcuggccuguaggcucccagu

SEQ ID NO: 483888 - RNA, 32 nt, Human
uaaagucacccagcaggucaacaaugggccca

SEQ ID NO: 483889 - RNA, 32 nt, Human
uaaagucagcacagcuuuucuuguguccugua

SEQ ID NO: 483890 - RNA, 32 nt, Human
uaaagucagcauaagccaucaugugggcuuuc

SEQ ID NO: 483891 - RNA, 32 nt, Human
uaaagucagcuauuagauaugagaaaaccauu

SEQ ID NO: 483892 - RNA, 32 nt, Human
uaaagucaggcagggcuggagugagcagccag

SEQ ID NO: 483893 - RNA, 32 nt, Human
uaaaguccaguauuugaggauauaaagaggau

SEQ ID NO: 483894 - RNA, 32 nt, Human
uaaagucccaggauuggcuccaggcagcaauu

SEQ ID NO: 483895 - RNA, 32 nt, Human
uaaagucccuguaccccgucucccagggcaca

SEQ ID NO: 483896 - RNA, 32 nt, Human
uaaagucccuuuccuugcuccaacuccuuguc

SEQ ID NO: 483897 - RNA, 32 nt, Human
uaaaguccuccaccaccacucuggaccuaaga

SEQ ID NO: 483898 - RNA, 32 nt, Human
uaaaguccuccagggccucugaggaugggggc

SEQ ID NO: 483899 - RNA, 32 nt, Human
uaaaguccucuaagaugucauaacuuucuguu

SEQ ID NO: 483900 - RNA, 32 nt, Human
uaaagucuagggaaaagggaagacugguuaau

SEQ ID NO: 483901 - RNA, 31 nt, Human
uaaagucuagugaccuuaaacugaaugauuu

SEQ ID NO: 483902 - RNA, 32 nt, Human
uaaagucucuccugaaaauguuggcauaguaa

SEQ ID NO: 483903 - RNA, 32 nt, Human
uaaagucuggguggguggagggcaggcaggug

SEQ ID NO: 483904 - RNA, 32 nt, Human
uaaagucuuauaucccccucugugccuuuucu

SEQ ID NO: 483905 - RNA, 32 nt, Human
uaaagucuuuaagaugcauccauguuuccagu

SEQ ID NO: 483906 - RNA, 32 nt, Human
uaaagugaagaaaggggguggggaaccauauu

SEQ ID NO: 483907 - RNA, 32 nt, Human
uaaagugaagaacaaggcuggccacacaccac

SEQ ID NO: 483908 - RNA, 32 nt, Human
uaaagugaagugaggaggugcugaggcugcca

SEQ ID NO: 483909 - RNA, 32 nt, Human
uaaagugaccgcauauuucccuagccaggaga

SEQ ID NO: 483910 - RNA, 32 nt, Human
uaaagugacucuggggugcuuacuuuagucaa

SEQ ID NO: 483911 - RNA, 32 nt, Human
uaaagugacuucauuuguauacauuuggaauc

SEQ ID NO: 483912 - RNA, 32 nt, Human
uaaagugagcccagaggccacugagaaugcag

SEQ ID NO: 483913 - RNA, 32 nt, Human
uaaagugaggaguucaagaccagccugagcag

SEQ ID NO: 483914 - RNA, 32 nt, Human
uaaagugaugggcuuugcaaauccaggguaga

SEQ ID NO: 483915 - RNA, 32 nt, Human
uaaagugauuccuucuugcucagucccucugg

SEQ ID NO: 483916 - RNA, 32 nt, Human
uaaagugcaaacauuucgucccaaagucuaag

SEQ ID NO: 483917 - RNA, 32 nt, Human
uaaagugcaagcacuuuuccauuuuacaguau

SEQ ID NO: 483918 - RNA, 31 nt, Human
uaaagugcacuuugcagacguuucacuccuu

SEQ ID NO: 483919 - RNA, 32 nt, Human
uaaagugcagagccugggacccagugagacgg

SEQ ID NO: 483920 - RNA, 32 nt, Human
uaaagugcuucugcuuuuccaugaacuccucc

SEQ ID NO: 483921 - RNA, 32 nt, Human
uaaagugcuugaggcuaccucuaccuucaaau

SEQ ID NO: 483922 - RNA, 32 nt, Human
uaaagugcuuuagguaugaaaauaaaucaucu

SEQ ID NO: 483923 - RNA, 32 nt, Human
uaaaguggaccacacaccacaucugcugccgu

SEQ ID NO: 483924 - RNA, 32 nt, Human
uaaaguggaccaugcaggcugcagaggguggg

SEQ ID NO: 483925 - RNA, 32 nt, Human
uaaaguggcucuuggggaaaagcaauuuaaug

SEQ ID NO: 483926 - RNA, 32 nt, Human
uaaaguggcugaagaggcaggauggcuugggg

SEQ ID NO: 483927 - RNA, 32 nt, Human
uaaaguggcugguaacaacagcacuuuacagu

SEQ ID NO: 483928 - RNA, 32 nt, Human
uaaagugggaggcuucacuaaaugagggggua

SEQ ID NO: 483929 - RNA, 32 nt, Human
uaaaguggggacaacacgaugagagaccccag

SEQ ID NO: 483930 - RNA, 32 nt, Human
uaaagugggguuucuuccauauugacaaauga

SEQ ID NO: 483931 - RNA, 22 nt, Human
uaaaguggguuuucccuggagg

SEQ ID NO: 483932 - RNA, 32 nt, Human
uaaaguguagaccauaugaaaugaacugcaaa

SEQ ID NO: 483933 - RNA, 32 nt, Human
uaaagugucacccacagccauuaaguaugcag

SEQ ID NO: 483934 - RNA, 32 nt, Human
uaaaguguccaaagccuauggaagaaaaccau

SEQ ID NO: 483935 - RNA, 24 nt, Human
uaaaguguguauucuugauguuua

SEQ ID NO: 483936 - RNA, 21 nt, Human
uaaaguguguguaccugugug

SEQ ID NO: 483937 - RNA, 32 nt, Human
uaaaguguuaccuccccuccuaacccuucccc

SEQ ID NO: 483938 - RNA, 32 nt, Human
uaaaguguucuccuuuuaaggguggguuuaau

SEQ ID NO: 483939 - RNA, 32 nt, Human
uaaaguguugccaaagauaccugcugaauucu

SEQ ID NO: 483940 - RNA, 32 nt, Human
uaaaguguuuauguuaagaggauuaggccagg

SEQ ID NO: 483941 - RNA, 31 nt, Human
uaaaguuaagugucccucaggcagggagagg

SEQ ID NO: 483942 - RNA, 32 nt, Human
uaaaguuauaaauacaauauuuauaucuauaa

SEQ ID NO: 483943 - RNA, 32 nt, Human
uaaaguuaugauauuguaaaacaggugccacg

SEQ ID NO: 483944 - RNA, 31 nt, Human
uaaaguucaauaaauacuuuguugaauuuau

SEQ ID NO: 483945 - RNA, 32 nt, Human
uaaaguucuagacugggugaauucuuucauga

SEQ ID NO: 483946 - RNA, 32 nt, Human
uaaaguucugcucucuuggggacuucauagag

SEQ ID NO: 483947 - RNA, 32 nt, Human
uaaaguuuagaacuuccauguuaguaugugca

SEQ ID NO: 483948 - RNA, 32 nt, Human
uaaaguuuaggagauaggaagaaggacugugu

SEQ ID NO: 483949 - RNA, 32 nt, Human
uaaaguuucaguggagguggaggcagagauua

SEQ ID NO: 483950 - RNA, 32 nt, Human
uaaaguuucuuucuuacagaaguucugauauu

SEQ ID NO: 483951 - RNA, 32 nt, Human
uaaaguuuucugcuuuccuucuguccugaugg

SEQ ID NO: 483952 - RNA, 32 nt, Human
uaaauaaaaaccaauaguacuaauuuugcuuu

SEQ ID NO: 483953 - RNA, 32 nt, Human
uaaauaaaaauacuauuaacuggacuuccuaa

SEQ ID NO: 483954 - RNA, 32 nt, Human
uaaauaaaaauguagacauggcuggcgcagug

SEQ ID NO: 483955 - RNA, 32 nt, Human
uaaauaaaacacaggaaguauucugguggaaa

SEQ ID NO: 483956 - RNA, 32 nt, Human
uaaauaaaagauuaaaauauauacaaaucaaa

SEQ ID NO: 483957 - RNA, 32 nt, Human
uaaauaaaccuucagaccagagaucuauucuc

SEQ ID NO: 483958 - RNA, 29 nt, Human
uaaauaaacuuuuucacuaugcaccuggu

SEQ ID NO: 483959 - RNA, 32 nt, Human
uaaauaaagacaggguuuugcuauguuaccua

SEQ ID NO: 483960 - RNA, 32 nt, Human
uaaauaaagaccuuccucugcauggagaccgc

SEQ ID NO: 483961 - RNA, 32 nt, Human
uaaauaaagaugaacuugguuucaagccaaau

SEQ ID NO: 483962 - RNA, 32 nt, Human
uaaauaaagccucugggugguggagacgguac

SEQ ID NO: 483963 - RNA, 32 nt, Human
uaaauaaauaucaaacuacauucuuccgaaaa

SEQ ID NO: 483964 - RNA, 32 nt, Human
uaaauaaaugcaccuucucuguaugcagugcu

SEQ ID NO: 483965 - RNA, 24 nt, Human
uaaauaaauguuuuccuguaguca

SEQ ID NO: 483966 - RNA, 29 nt, Human
uaaauaaauuacccccuccuccagaucaa

SEQ ID NO: 483967 - RNA, 32 nt, Human
uaaauaacaacucccugaaccucaguuuccuc

SEQ ID NO: 483968 - RNA, 32 nt, Human
uaaauaaccaaaauaaagugcuuugaauggaa

SEQ ID NO: 483969 - RNA, 32 nt, Human
uaaauaacuuaucuuuuggacauauuuuuaua

SEQ ID NO: 483970 - RNA, 32 nt, Human
uaaauaagggaaauaacuguucuugggccacu

SEQ ID NO: 483971 - RNA, 32 nt, Human
uaaauaagguaaugccuguaagaaugccauaa

SEQ ID NO: 483972 - RNA, 32 nt, Human
uaaauaagguuaguacauucacuaggggcaaa

SEQ ID NO: 483973 - RNA, 32 nt, Human
uaaauaaguagaucagcaagacuuguuucaga

SEQ ID NO: 483974 - RNA, 32 nt, Human
uaaauaagucauauguuuguauccuguuuuau

SEQ ID NO: 483975 - RNA, 32 nt, Human
uaaauaauacuggccuuuaggguuggggaggu

SEQ ID NO: 483976 - RNA, 32 nt, Human
uaaauaauauagucuacaacauagagacugua

SEQ ID NO: 483977 - RNA, 32 nt, Human
uaaauaaucucaauaaauuuugugcuguggcc

SEQ ID NO: 483978 - RNA, 32 nt, Human
uaaauaauggauugcuuuuuagcaauagagcu

SEQ ID NO: 483979 - RNA, 32 nt, Human
uaaauaauucaguaggucuggggugaggccug

SEQ ID NO: 483980 - RNA, 32 nt, Human
uaaauacaauagcugaguuuuccccaguguau

SEQ ID NO: 483981 - RNA, 32 nt, Human
uaaauacaccugcuuuggguaaaacucuuugc

SEQ ID NO: 483982 - RNA, 32 nt, Human
uaaauacaggaagaaagagcuugaggugggag

SEQ ID NO: 483983 - RNA, 32 nt, Human
uaaauacauaaauaaaagaaaaauaugcauuu

SEQ ID NO: 483984 - RNA, 32 nt, Human
uaaauacauaaauauguauauuauuuagauua

SEQ ID NO: 483985 - RNA, 32 nt, Human
uaaauacauaguauuccucaguaucuauucca

SEQ ID NO: 483986 - RNA, 32 nt, Human
uaaauacauauguacauagauauaugggccuc

SEQ ID NO: 483987 - RNA, 32 nt, Human
uaaauacaucacagacagaaaccuuuauaaaa

SEQ ID NO: 483988 - RNA, 32 nt, Human
uaaauaccccacacccuccccucugcaaaggu

SEQ ID NO: 483989 - RNA, 32 nt, Human
uaaauacccucuguucucacacaaaugcuguu

SEQ ID NO: 483990 - RNA, 32 nt, Human
uaaauaccuccaggguucccagcaaguggcca

SEQ ID NO: 483991 - RNA, 32 nt, Human
uaaauacuauaccuuggcugggcauagugacu

SEQ ID NO: 483992 - RNA, 32 nt, Human
uaaauacuuauauuuuauuuuugaggcaugua

SEQ ID NO: 483993 - RNA, 31 nt, Human
uaaauacuucugacacuacauuuaaauguuu

SEQ ID NO: 483994 - RNA, 32 nt, Human
uaaauacuugcugaaugaaugcagaaaucagc

SEQ ID NO: 483995 - RNA, 32 nt, Human
uaaauacuugcugggugguugacacaggauua

SEQ ID NO: 483996 - RNA, 32 nt, Human
uaaauacuuggacagagguugcugaacuuuaa

SEQ ID NO: 483997 - RNA, 32 nt, Human
uaaauacuuucuguguuuaacagcccuuggcc

SEQ ID NO: 483998 - RNA, 22 nt, Human
uaaauagacuagucauguccuu

SEQ ID NO: 483999 - RNA, 32 nt, Human
uaaauagagacagggucucacucugucaccca

SEQ ID NO: 484000 - RNA, 23 nt, Human
uaaauagagcauuuucuuaauca

SEQ ID NO: 484001 - RNA, 32 nt, Human
uaaauagaggcugcuuuuccacccucacccuu

SEQ ID NO: 484002 - RNA, 32 nt, Human
uaaauagcaacuccuagugagacagcaggcgg

SEQ ID NO: 484003 - RNA, 32 nt, Human
uaaauagccagccaauucaucaacauucuggu

SEQ ID NO: 484004 - RNA, 32 nt, Human
uaaauagccaugagcuucacugcuuagaggga

SEQ ID NO: 484005 - RNA, 22 nt, Human
uaaauagccuagucuggggagu

SEQ ID NO: 484006 - RNA, 32 nt, Human
uaaauagccucucuccccauuuaggagcagcc

SEQ ID NO: 484007 - RNA, 23 nt, Human
uaaauagccuggugugguggcuc

SEQ ID NO: 484008 - RNA, 32 nt, Human
uaaauagcuuggaacacccugaagagcaacau

SEQ ID NO: 484009 - RNA, 31 nt, Human
uaaauaggaccaauaaauccuuuggaagagc

SEQ ID NO: 484010 - RNA, 31 nt, Human
uaaauaggcagcuagaaugcugccuauauuu

SEQ ID NO: 484011 - RNA, 32 nt, Human
uaaauagggaagcaacaaaaccuacagggaac

SEQ ID NO: 484012 - RNA, 32 nt, Human
uaaauaggguacugcauuguagucuccauauc

SEQ ID NO: 484013 - RNA, 32 nt, Human
uaaauagugcugcagugaacauacacaugcau

SEQ ID NO: 484014 - RNA, 32 nt, Human
uaaauaguguggagaccagagcucggcaccuu

SEQ ID NO: 484015 - RNA, 32 nt, Human
uaaauaguuaaaggauuauggaaaagauggug

SEQ ID NO: 484016 - RNA, 32 nt, Human
uaaauauacaucugaguuuaaauguucuguuu

SEQ ID NO: 484017 - RNA, 32 nt, Human
uaaauauagcacaaaaauacuaaacuucauaa

SEQ ID NO: 484018 - RNA, 32 nt, Human
uaaauauauaaauacaaauguauauuuuucag

SEQ ID NO: 484019 - RNA, 32 nt, Human
uaaauauauaaauacauguauguaugucaaaa

SEQ ID NO: 484020 - RNA, 32 nt, Human
uaaauauauaaauauacauagacauaaaaaua

SEQ ID NO: 484021 - RNA, 32 nt, Human
uaaauaucacaucacaauaaaaaucaaauugg

SEQ ID NO: 484022 - RNA, 32 nt, Human
uaaauaucaggaaagacgcugugggaaaauag

SEQ ID NO: 484023 - RNA, 31 nt, Human
uaaauaucaguauucugacauguaagaaaau

SEQ ID NO: 484024 - RNA, 32 nt, Human
uaaauaucauaucacuguaucuucucagucau

SEQ ID NO: 484025 - RNA, 32 nt, Human
uaaauauccaaucacauuuguaagcguggaag

SEQ ID NO: 484026 - RNA, 32 nt, Human
uaaauauccaauuuguugugauuuucagcacc

SEQ ID NO: 484027 - RNA, 32 nt, Human
uaaauauccuuuuucaggaggaacugauaucu

SEQ ID NO: 484028 - RNA, 32 nt, Human
uaaauaucugaccuuuugggaagcaggacaga

SEQ ID NO: 484029 - RNA, 32 nt, Human
uaaauaucuggaaucuuagcagucacuacauu

SEQ ID NO: 484030 - RNA, 32 nt, Human
uaaauaucuuucucagugguuaccuuuauauu

SEQ ID NO: 484031 - RNA, 32 nt, Human
uaaauaugaguauuugcaauaaacuaugauau

SEQ ID NO: 484032 - RNA, 32 nt, Human
uaaauaugaguauuuugaccuggcagcagaug

SEQ ID NO: 484033 - RNA, 32 nt, Human
uaaauaugcucuguuaguuuguauggaaugau

SEQ ID NO: 484034 - RNA, 32 nt, Human
uaaauaugcuucucaaaccucuaccuuuuuca

SEQ ID NO: 484035 - RNA, 32 nt, Human
uaaauaugcuucugucuucauaauauauuaua

SEQ ID NO: 484036 - RNA, 32 nt, Human
uaaauauggagcuuucaaaaagcacaaauagg

SEQ ID NO: 484037 - RNA, 32 nt, Human
uaaauauggcucacugcagccucgacaccugg

SEQ ID NO: 484038 - RNA, 25 nt, Human
uaaauaugucuguguguugacuggu

SEQ ID NO: 484039 - RNA, 32 nt, Human
uaaauauguguccuccccacugagcuuuguuu

SEQ ID NO: 484040 - RNA, 32 nt, Human
uaaauauuaguaucuuucaaugguugacugcu

SEQ ID NO: 484041 - RNA, 32 nt, Human
uaaauauucaaaauuuuauuaggauaaauuug

SEQ ID NO: 484042 - RNA, 32 nt, Human
uaaauauuccuucgagcuuuguuuucauaaaa

SEQ ID NO: 484043 - RNA, 32 nt, Human
uaaauauugauuucugccuuccuugcuaaugc

SEQ ID NO: 484044 - RNA, 32 nt, Human
uaaauauugauuucugucuuccuugcuaaugc

SEQ ID NO: 484045 - RNA, 32 nt, Human
uaaauauugcuuaucuugaggccagugcuugu

SEQ ID NO: 484046 - RNA, 32 nt, Human
uaaauauuuaacauagguuuugauuuauaugu

SEQ ID NO: 484047 - RNA, 32 nt, Human
uaaauauuucucugaguaauucacugguuuau

SEQ ID NO: 484048 - RNA, 32 nt, Human
uaaauauuuuaggccuucugggcuacaaagag

SEQ ID NO: 484049 - RNA, 32 nt, Human
uaaauauuuuuccuccucugaacuggauuuua

SEQ ID NO: 484050 - RNA, 32 nt, Human
uaaaucaaaagcuucuugaguaaaacuucuua

SEQ ID NO: 484051 - RNA, 32 nt, Human
uaaaucaaauaacaaaauagagaauucaggua

SEQ ID NO: 484052 - RNA, 32 nt, Human
uaaaucaacuaaucaaaaaugauauagacgac

SEQ ID NO: 484053 - RNA, 32 nt, Human
uaaaucaagcaaaccccuaaacauuguguagg

SEQ ID NO: 484054 - RNA, 32 nt, Human
uaaaucaagcuuuggaaguccaaaaagaauaa

SEQ ID NO: 484055 - RNA, 32 nt, Human
uaaaucaaugaaauguuucaaugauauaugca

SEQ ID NO: 484056 - RNA, 32 nt, Human
uaaaucaauuccucaaagugugcacaaaacua

SEQ ID NO: 484057 - RNA, 32 nt, Human
uaaaucacauuggguuauuauauaaucauuuc

SEQ ID NO: 484058 - RNA, 28 nt, Human
uaaaucaccucuuccgcuguuuuagcug

SEQ ID NO: 484059 - RNA, 30 nt, Human
uaaaucaccucuuccgcuguuuuagcugaa

SEQ ID NO: 484060 - RNA, 32 nt, Human
uaaaucaccucuuccgcuguuuuagcugaaga

SEQ ID NO: 484061 - RNA, 32 nt, Human
uaaaucacuauuuaauugccucuaauacuuua

SEQ ID NO: 484062 - RNA, 32 nt, Human
uaaaucacuguguugacccucuucugaaccaa

SEQ ID NO: 484063 - RNA, 32 nt, Human
uaaaucagaagaugaaugaauggauggaaucu

SEQ ID NO: 484064 - RNA, 32 nt, Human
uaaaucagacuggaucucugccacuuuucccu

SEQ ID NO: 484065 - RNA, 32 nt, Human
uaaaucagauuguaaucccaguacuuugggag

SEQ ID NO: 484066 - RNA, 32 nt, Human
uaaaucagcaagaagaauaaugguggggucuu

SEQ ID NO: 484067 - RNA, 32 nt, Human
uaaaucagcaaggauggcagaaaaugagcuga

SEQ ID NO: 484068 - RNA, 32 nt, Human
uaaaucagccuccaguuuuugaagcguucauu

SEQ ID NO: 484069 - RNA, 32 nt, Human
uaaaucagccuuccgcaauucauguaguuucu

SEQ ID NO: 484070 - RNA, 32 nt, Human
uaaaucagggguccgugcucccagcccgcuuc

SEQ ID NO: 484071 - RNA, 32 nt, Human
uaaaucauaggcaccacauuuuucaugucaga

SEQ ID NO: 484072 - RNA, 32 nt, Human
uaaaucaucagcccuguuuggugcagucucau

SEQ ID NO: 484073 - RNA, 32 nt, Human
uaaaucaugaaucccgccagguacgguggcuc

SEQ ID NO: 484074 - RNA, 32 nt, Human
uaaaucauuucaaagagaacagguagucagga

SEQ ID NO: 484075 - RNA, 32 nt, Human
uaaauccaaaaauuagcugguuguggugaugc

SEQ ID NO: 484076 - RNA, 31 nt, Human
uaaauccaaagcuagaaaugacgaagcucag

SEQ ID NO: 484077 - RNA, 32 nt, Human
uaaauccaaauuugaaucauuugucauguaug

SEQ ID NO: 484078 - RNA, 32 nt, Human
uaaauccaagguugaaaagaaaaagaaggaga

SEQ ID NO: 484079 - RNA, 32 nt, Human
uaaauccaaguuggccguuuuauuaguauguu

SEQ ID NO: 484080 - RNA, 21 nt, Human
uaaauccaauaucaugucuug

SEQ ID NO: 484081 - RNA, 32 nt, Human
uaaauccacaauauuuuauuacauuuuuaacu

SEQ ID NO: 484082 - RNA, 32 nt, Human
uaaauccacaguuuaauucacaagcuaguacu

SEQ ID NO: 484083 - RNA, 32 nt, Human
uaaauccaggaggcaaagguugcagugagcca

SEQ ID NO: 484084 - RNA, 32 nt, Human
uaaauccaggaggcggagguugcagugagcca

SEQ ID NO: 484085 - RNA, 32 nt, Human
uaaauccaguuuccaagaaccuaaacugauug

SEQ ID NO: 484086 - RNA, 32 nt, Human
uaaauccaucguaagauugagccucaaguuug

SEQ ID NO: 484087 - RNA, 32 nt, Human
uaaaucccaagugucucuugacuggcucaaga

SEQ ID NO: 484088 - RNA, 32 nt, Human
uaaaucccagcacuuugggaaggccgaguugg

SEQ ID NO: 484089 - RNA, 32 nt, Human
uaaaucccagugcagucaacagccuggccuau

SEQ ID NO: 484090 - RNA, 32 nt, Human
uaaauccccagccugugagucucagccucuuu

SEQ ID NO: 484091 - RNA, 32 nt, Human
uaaauccccaggacucagaccuaggcagcacc

SEQ ID NO: 484092 - RNA, 32 nt, Human
uaaaucccuacccacguuccagccucuaggug

SEQ ID NO: 484093 - RNA, 32 nt, Human
uaaauccguucccugcucccguccuguugacu

SEQ ID NO: 484094 - RNA, 32 nt, Human
uaaauccucacguuaacguacacacacaaaca

SEQ ID NO: 484095 - RNA, 32 nt, Human
uaaauccucccuccucuccucacauccugguc

SEQ ID NO: 484096 - RNA, 32 nt, Human
uaaauccuggccacauucaccaaccaaagggg

SEQ ID NO: 484097 - RNA, 32 nt, Human
uaaauccuucagcugauucucagucuaguaaa

SEQ ID NO: 484098 - RNA, 32 nt, Human
uaaauccuuguucacugaagucuuucaauuga

SEQ ID NO: 484099 - RNA, 32 nt, Human
uaaaucgaggcucucagacuccugcugccugg

SEQ ID NO: 484100 - RNA, 32 nt, Human
uaaaucgauaaauaaacucaaccuaaacaggu

SEQ ID NO: 484101 - RNA, 32 nt, Human
uaaaucguugggacucucagaugaaacaggau

SEQ ID NO: 484102 - RNA, 32 nt, Human
uaaaucuaagguugaaaagaaaaagaaggaga

SEQ ID NO: 484103 - RNA, 32 nt, Human
uaaaucuacuccuguauuaugcuuuacagugc

SEQ ID NO: 484104 - RNA, 32 nt, Human
uaaaucucccagaagaggaaaguggccugcuc

SEQ ID NO: 484105 - RNA, 32 nt, Human
uaaaucucccagaagaggaaaguggccugcuu

SEQ ID NO: 484106 - RNA, 32 nt, Human
uaaaucucuaccacagccucacaagcaaaugc

SEQ ID NO: 484107 - RNA, 32 nt, Human
uaaaucucucuaugccuccagccgagaagaua

SEQ ID NO: 484108 - RNA, 32 nt, Human
uaaaucucucucugucacccaggcuggagugc

SEQ ID NO: 484109 - RNA, 22 nt, Human
uaaaucugauaggcaacaguag

SEQ ID NO: 484110 - RNA, 32 nt, Human
uaaaucugccuggcguccccucccucugucuu

SEQ ID NO: 484111 - RNA, 32 nt, Human
uaaaucuggaaauguuuuguugcacuaaaaua

SEQ ID NO: 484112 - RNA, 32 nt, Human
uaaaucuggcagccuuaauuauuacacaacua

SEQ ID NO: 484113 - RNA, 32 nt, Human
uaaaucuggcuguauucaguagcaauacaaaa

SEQ ID NO: 484114 - RNA, 32 nt, Human
uaaaucuggcuguauucaguagcaauacaaga

SEQ ID NO: 484115 - RNA, 32 nt, Human
uaaaucuguaccaccuaacauugaacaucauu

SEQ ID NO: 484116 - RNA, 32 nt, Human
uaaaucugucuucugcucaguuucuggucccc

SEQ ID NO: 484117 - RNA, 32 nt, Human
uaaaucuguuccauuaucuucucuguaggaug

SEQ ID NO: 484118 - RNA, 32 nt, Human
uaaaucuucuguuccuccuuuuuccaagggaa

SEQ ID NO: 484119 - RNA, 32 nt, Human
uaaaucuugcaagaauauuuugugcuuucuuu

SEQ ID NO: 484120 - RNA, 32 nt, Human
uaaaucuugcugcugcucacucguuggguccg

SEQ ID NO: 484121 - RNA, 32 nt, Human
uaaaucuugcugcugcucacucuuugggucca

SEQ ID NO: 484122 - RNA, 32 nt, Human
uaaaucuugcugcuguucauuguuugggucca

SEQ ID NO: 484123 - RNA, 32 nt, Human
uaaaucuugcuugaugugugugcaauguacau

SEQ ID NO: 484124 - RNA, 32 nt, Human
uaaaucuuguuuuaaaaauacauauuucuacc

SEQ ID NO: 484125 - RNA, 32 nt, Human
uaaaucuuuuauuuucuuucagguuuacuuga

SEQ ID NO: 484126 - RNA, 32 nt, Human
uaaaugaaaacacacaaauugaaaaugcacag

SEQ ID NO: 484127 - RNA, 32 nt, Human
uaaaugaaaauggauauaagguauguauaacu

SEQ ID NO: 484128 - RNA, 32 nt, Human
uaaaugaacugcuuagcccugcucugaagaac

SEQ ID NO: 484129 - RNA, 30 nt, Human
uaaaugaagaaagugaaguaggccgggcac

SEQ ID NO: 484130 - RNA, 32 nt, Human
uaaaugaagaaagugaaguaggccgggcacgg

SEQ ID NO: 484131 - RNA, 23 nt, Human
uaaaugaagauugagugugcaca

SEQ ID NO: 484132 - RNA, 32 nt, Human
uaaaugaagcguggaaggcaucaaagaugugc

SEQ ID NO: 484133 - RNA, 32 nt, Human
uaaaugaagcucacuaaaugaaguucucauuu

SEQ ID NO: 484134 - RNA, 32 nt, Human
uaaaugaaggggauauucgacuguauaaccau

SEQ ID NO: 484135 - RNA, 32 nt, Human
uaaaugaaguaguggcccgugaccugucugau

SEQ ID NO: 484136 - RNA, 32 nt, Human
uaaaugaauggccacagaaagguggcccggcc

SEQ ID NO: 484137 - RNA, 32 nt, Human
uaaaugacacaguggcaccuggcacauaguag

SEQ ID NO: 484138 - RNA, 32 nt, Human
uaaaugaccugacaaaaacugacucaugucuu

SEQ ID NO: 484139 - RNA, 32 nt, Human
uaaaugacuucuugcaccaucuugccuaaugg

SEQ ID NO: 484140 - RNA, 32 nt, Human
uaaaugacuuuguuuuucaaggugcugucauu

SEQ ID NO: 484141 - RNA, 32 nt, Human
uaaaugagaguggauggauggguccuuuggaa

SEQ ID NO: 484142 - RNA, 32 nt, Human
uaaaugagauuacagcauaaugaagaagacaa

SEQ ID NO: 484143 - RNA, 32 nt, Human
uaaaugagcucagaguuuaccuagcuaaggcc

SEQ ID NO: 484144 - RNA, 32 nt, Human
uaaaugaggaagagcagcaggcauugucaugg

SEQ ID NO: 484145 - RNA, 32 nt, Human
uaaaugaggacuuggcuuaugaccagucugau

SEQ ID NO: 484146 - RNA, 32 nt, Human
uaaaugaggugagagugaagagacuagagcca

SEQ ID NO: 484147 - RNA, 32 nt, Human
uaaaugagguggcuucagaaauggcagaauaa

SEQ ID NO: 484148 - RNA, 32 nt, Human
uaaaugagguuggcagaguggcagugggggcu

SEQ ID NO: 484149 - RNA, 32 nt, Human
uaaaugaguucugcuuucuuuuuggaacugcu

SEQ ID NO: 484150 - RNA, 32 nt, Human
uaaaugaguuuaaacuuguagauggcuuagaa

SEQ ID NO: 484151 - RNA, 32 nt, Human
uaaaugauagccacaguauugcucccuaaaau

SEQ ID NO: 484152 - RNA, 32 nt, Human
uaaaugaucacuucgaucauguuuccaugcaa

SEQ ID NO: 484153 - RNA, 32 nt, Human
uaaaugaugagugaaugugaggcccuuggaca

SEQ ID NO: 484154 - RNA, 32 nt, Human
uaaaugauguaacagaggcuugauuuguguua

SEQ ID NO: 484155 - RNA, 32 nt, Human
uaaaugauguugcuuaacucucccucugaugu

SEQ ID NO: 484156 - RNA, 32 nt, Human
uaaaugcaaacaucauuuuuaaauuuucagug

SEQ ID NO: 484157 - RNA, 32 nt, Human
uaaaugcaacagauaucauuucaggugacuua

SEQ ID NO: 484158 - RNA, 32 nt, Human
uaaaugcaacucuuucuguucuuucuggcagc

SEQ ID NO: 484159 - RNA, 32 nt, Human
uaaaugcaaucagguaguguugcuuuuuacag

SEQ ID NO: 484160 - RNA, 32 nt, Human
uaaaugcacaucuucucgccaccugcuuuuuc

SEQ ID NO: 484161 - RNA, 32 nt, Human
uaaaugcagagcuuggcauuugcccauguuaa

SEQ ID NO: 484162 - RNA, 32 nt, Human
uaaaugcagucaaagaggcagucccuucccau

SEQ ID NO: 484163 - RNA, 32 nt, Human
uaaaugcagugucaugccuauaagcauuucuc

SEQ ID NO: 484164 - RNA, 32 nt, Human
uaaaugcagugucugugagaaagccuucagua

SEQ ID NO: 484165 - RNA, 32 nt, Human
uaaaugcaugcuagaaaaauagggcuggaucu

SEQ ID NO: 484166 - RNA, 32 nt, Human
uaaaugcaugugaauagcuggcaaaaagaugu

SEQ ID NO: 484167 - RNA, 32 nt, Human
uaaaugccacgacuaggggaaaaagaaacuau

SEQ ID NO: 484168 - RNA, 32 nt, Human
uaaaugccauugucacagccucauuuguaagc

SEQ ID NO: 484169 - RNA, 32 nt, Human
uaaaugccuuucuguguuucugaaucagaagc

SEQ ID NO: 484170 - RNA, 32 nt, Human
uaaaugcgugagccaccaugcccggccgcuau

SEQ ID NO: 484171 - RNA, 32 nt, Human
uaaaugcuaccaaccauagacaauaaauaaua

SEQ ID NO: 484172 - RNA, 21 nt, Human
uaaaugcuaucucagcauguu

SEQ ID NO: 484173 - RNA, 32 nt, Human
uaaaugcucacugugagugcccccaacuuucc

SEQ ID NO: 484174 - RNA, 32 nt, Human
uaaaugcugcuaggguggaggaguaugcagag

SEQ ID NO: 484175 - RNA, 32 nt, Human
uaaaugcuuaagaguuuuaaucaguccgccau

SEQ ID NO: 484176 - RNA, 29 nt, Human
uaaaugcuucaguuuccugaaauggaaug

SEQ ID NO: 484177 - RNA, 32 nt, Human
uaaaugcuuuacaacaugaaguauaacucaac

SEQ ID NO: 484178 - RNA, 32 nt, Human
uaaaugcuuuagugaagcagaauagcccuuuu

SEQ ID NO: 484179 - RNA, 32 nt, Human
uaaauggacaggagggagaaguuggggaaaau

SEQ ID NO: 484180 - RNA, 32 nt, Human
uaaauggaugaaacuucaaauuaucuuauuug

SEQ ID NO: 484181 - RNA, 32 nt, Human
uaaauggcaaaaacucuuucucagacuuacag

SEQ ID NO: 484182 - RNA, 32 nt, Human
uaaauggcauuguuugaaggggccggcuaauu

SEQ ID NO: 484183 - RNA, 32 nt, Human
uaaauggccaaaaacuuuaacuaugaaauguu

SEQ ID NO: 484184 - RNA, 32 nt, Human
uaaauggccguuuuuggaauuacuugauaaga

SEQ ID NO: 484185 - RNA, 32 nt, Human
uaaauggccugaccaaggagaaugacuacaag

SEQ ID NO: 484186 - RNA, 32 nt, Human
uaaauggcuguucaguucauguuguacgugau

SEQ ID NO: 484187 - RNA, 32 nt, Human
uaaaugggagagagaaggggagaaccaaucuc

SEQ ID NO: 484188 - RNA, 32 nt, Human
uaaaugggcaaggacgcccugcccucacuggg

SEQ ID NO: 484189 - RNA, 32 nt, Human
uaaaugggccucucuuccuuugcugugcacuu

SEQ ID NO: 484190 - RNA, 32 nt, Human
uaaaugggcugaguugggggaggcaugggguc

SEQ ID NO: 484191 - RNA, 32 nt, Human
uaaaugggggcagaagcugagccaagcagagg

SEQ ID NO: 484192 - RNA, 32 nt, Human
uaaauggugcuaugacugccuuccgccaaaaa

SEQ ID NO: 484193 - RNA, 32 nt, Human
uaaauggugucuuucuauguugcccagggugg

SEQ ID NO: 484194 - RNA, 32 nt, Human
uaaauggugugaccaggaucuaguuucuuucu

SEQ ID NO: 484195 - RNA, 32 nt, Human
uaaaugguuaacuuucaaaugaugcugcugcc

SEQ ID NO: 484196 - RNA, 32 nt, Human
uaaaugguuccucuugaagcucaaauuggcag

SEQ ID NO: 484197 - RNA, 32 nt, Human
uaaauguaaagaaauaguacuuuuagcauaag

SEQ ID NO: 484198 - RNA, 32 nt, Human
uaaaugucaacuugucauugaauguaaagaau

SEQ ID NO: 484199 - RNA, 32 nt, Human
uaaaugucaguaaaccaaauaaaaguucauuu

SEQ ID NO: 484200 - RNA, 32 nt, Human
uaaaugucauaacuacaccugcuccaggacca

SEQ ID NO: 484201 - RNA, 32 nt, Human
uaaaugucauagucaagauuugguagauaaau

SEQ ID NO: 484202 - RNA, 32 nt, Human
uaaaugucauuaaauuuauuuguacucagaac

SEQ ID NO: 484203 - RNA, 32 nt, Human
uaaauguccauucuuuaucaagggccuacuuu

SEQ ID NO: 484204 - RNA, 32 nt, Human
uaaaugucccucuccagagacagccccuccug

SEQ ID NO: 484205 - RNA, 32 nt, Human
uaaauguccguguuaagaauuggcccacuggu

SEQ ID NO: 484206 - RNA, 32 nt, Human
uaaaugugaaagcucaguggccgcuccuucuu

SEQ ID NO: 484207 - RNA, 32 nt, Human
uaaaugugcagggcagacagagccagaagggc

SEQ ID NO: 484208 - RNA, 32 nt, Human
uaaaugugccuuuguuccuccuucaccuucug

SEQ ID NO: 484209 - RNA, 32 nt, Human
uaaauguggagacaggaggaggugagauggcu

SEQ ID NO: 484210 - RNA, 32 nt, Human
uaaauguggcagagugaaaggagaaguuuuaa

SEQ ID NO: 484211 - RNA, 32 nt, Human
uaaaugugggaauaucaaugcaguucaccuca

SEQ ID NO: 484212 - RNA, 32 nt, Human
uaaauguguaacucauggucacuguguaaaca

SEQ ID NO: 484213 - RNA, 32 nt, Human
uaaauguguauuugugaauaacaaacugcaca

SEQ ID NO: 484214 - RNA, 32 nt, Human
uaaaugugucccaucaugcuuuccacugaccc

SEQ ID NO: 484215 - RNA, 32 nt, Human
uaaauguguugagugauauagcuaucagaugu

SEQ ID NO: 484216 - RNA, 32 nt, Human
uaaauguguuuuguuccuagggccagaggagc

SEQ ID NO: 484217 - RNA, 32 nt, Human
uaaauguuacugguagaaaggcaguucaggua

SEQ ID NO: 484218 - RNA, 32 nt, Human
uaaauguuagguuggugcaaaacuaaucgugg

SEQ ID NO: 484219 - RNA, 32 nt, Human
uaaauguugcugcuggguagcuccacaguguu

SEQ ID NO: 484220 - RNA, 32 nt, Human
uaaauguugugcuguuaacacugcaaauaaac

SEQ ID NO: 484221 - RNA, 32 nt, Human
uaaauguuuauuuaaauauucuaaauuggauu

SEQ ID NO: 484222 - RNA, 32 nt, Human
uaaauguuugccagacugggugcagaauuuau

SEQ ID NO: 484223 - RNA, 32 nt, Human
uaaauguuuuugacaauaaacuucuugugcag

SEQ ID NO: 484224 - RNA, 32 nt, Human
uaaauuaaaauggcauucuuaaagauuuucuu

SEQ ID NO: 484225 - RNA, 32 nt, Human
uaaauuaauauaauugcuuuccuccacaccca

SEQ ID NO: 484226 - RNA, 32 nt, Human
uaaauuacaucugaauaaagcuguaauuaaaa

SEQ ID NO: 484227 - RNA, 32 nt, Human
uaaauuaccacauuuggcuucccuucaucagc

SEQ ID NO: 484228 - RNA, 32 nt, Human
uaaauuacccagccucagauauuucuaugcag

SEQ ID NO: 484229 - RNA, 32 nt, Human
uaaauuacguuuauaacacugcagagaccuua

SEQ ID NO: 484230 - RNA, 32 nt, Human
uaaauuacucaggacuuaauguagcauugcac

SEQ ID NO: 484231 - RNA, 32 nt, Human
uaaauuacucaucucugucuuuaccagcaggc

SEQ ID NO: 484232 - RNA, 32 nt, Human
uaaauuacuccguucucuaucaguuaaagcua

SEQ ID NO: 484233 - RNA, 32 nt, Human
uaaauuacugaugaaauucuguuucuugucug

SEQ ID NO: 484234 - RNA, 32 nt, Human
uaaauuagucacggcacugcagccugggcaac

SEQ ID NO: 484235 - RNA, 32 nt, Human
uaaauuagugauauuuuaaucagguuuuacua

SEQ ID NO: 484236 - RNA, 32 nt, Human
uaaauuauggacuacaaccaagucaacuguuu

SEQ ID NO: 484237 - RNA, 32 nt, Human
uaaauuauggcaauauuugcacuuugggaaug

SEQ ID NO: 484238 - RNA, 32 nt, Human
uaaauuauugcuguauguaaacuguuacugaa

SEQ ID NO: 484239 - RNA, 32 nt, Human
uaaauucaaaaguaaugcuucaaucagauagu

SEQ ID NO: 484240 - RNA, 32 nt, Human
uaaauucaaaccauauccacacacaacaacua

SEQ ID NO: 484241 - RNA, 32 nt, Human
uaaauucacaucucaaggagggagaacccggg

SEQ ID NO: 484242 - RNA, 32 nt, Human
uaaauucacaugcaugauaggcauguuggaaa

SEQ ID NO: 484243 - RNA, 32 nt, Human
uaaauucaccugacgagggcacucugagauag

SEQ ID NO: 484244 - RNA, 32 nt, Human
uaaauucagagcagauuagagccugcgcaaug

SEQ ID NO: 484245 - RNA, 32 nt, Human
uaaauucagcuuuuauaaggcagcaguaccug

SEQ ID NO: 484246 - RNA, 32 nt, Human
uaaauucaggcugcaggcuccuuccauccaga

SEQ ID NO: 484247 - RNA, 32 nt, Human
uaaauucagggauauguauauguauguuugug

SEQ ID NO: 484248 - RNA, 32 nt, Human
uaaauucaguauguuggcauuacuuggaccug

SEQ ID NO: 484249 - RNA, 25 nt, Human
uaaauucagugauggcaagaaccaa

SEQ ID NO: 484250 - RNA, 32 nt, Human
uaaauucaguugaucugggccgagcauggugg

SEQ ID NO: 484251 - RNA, 32 nt, Human
uaaauucauuagugugaaagaggugggaguga

SEQ ID NO: 484252 - RNA, 32 nt, Human
uaaauuccaccuuuagaucugugaaagguaaa

SEQ ID NO: 484253 - RNA, 32 nt, Human
uaaauuccagggucucagaugguuaggacaaa

SEQ ID NO: 484254 - RNA, 32 nt, Human
uaaauucccaccaaggcaaccagacacaucca

SEQ ID NO: 484255 - RNA, 32 nt, Human
uaaauuccugucacuaaauggaaauguguuug

SEQ ID NO: 484256 - RNA, 32 nt, Human
uaaauuccuguccccucugucccuccccucca

SEQ ID NO: 484257 - RNA, 25 nt, Human
uaaauucuauuauauaaagccccaa

SEQ ID NO: 484258 - RNA, 32 nt, Human
uaaauucucucccucccuacugaggccuuggu

SEQ ID NO: 484259 - RNA, 32 nt, Human
uaaauucucuuucucccucucuucuccaauca

SEQ ID NO: 484260 - RNA, 32 nt, Human
uaaauucugucaccuccugucauuuuauuuuu

SEQ ID NO: 484261 - RNA, 32 nt, Human
uaaauucugucugccuacuaguuuuaaguaua

SEQ ID NO: 484262 - RNA, 32 nt, Human
uaaauucuuuuacugcaucuauugagaugauc

SEQ ID NO: 484263 - RNA, 32 nt, Human
uaaauugaaaggcuguuggcuguuguaucuug

SEQ ID NO: 484264 - RNA, 32 nt, Human
uaaauugaaauguuugcauugcaccaaaggag

SEQ ID NO: 484265 - RNA, 32 nt, Human
uaaauugaacaagccaggcuguccaggguggc

SEQ ID NO: 484266 - RNA, 32 nt, Human
uaaauugaagugccaugcaaguagcuagcaug

SEQ ID NO: 484267 - RNA, 32 nt, Human
uaaauugagacagggucucacucugucacuca

SEQ ID NO: 484268 - RNA, 32 nt, Human
uaaauugaucacuguaacuaaccccuucuguc

SEQ ID NO: 484269 - RNA, 22 nt, Human
uaaauugcaguaguccuuccca

SEQ ID NO: 484270 - RNA, 32 nt, Human
uaaauugcaguuguagacaccgaggaugguug

SEQ ID NO: 484271 - RNA, 32 nt, Human
uaaauugcauuucaaguggaaggaaaggggug

SEQ ID NO: 484272 - RNA, 32 nt, Human
uaaauuggaaacaaaagguugcaacgugacaa

SEQ ID NO: 484273 - RNA, 32 nt, Human
uaaauuggaguuggaguagaauguaguuugag

SEQ ID NO: 484274 - RNA, 32 nt, Human
uaaauuggcccaggguuggcuggugggucacc

SEQ ID NO: 484275 - RNA, 32 nt, Human
uaaauuggccugguauggcugcaguccuccgg

SEQ ID NO: 484276 - RNA, 32 nt, Human
uaaauugggaaugggagaagggaggauauaag

SEQ ID NO: 484277 - RNA, 32 nt, Human
uaaauugggccagggugggagcagggaaagaa

SEQ ID NO: 484278 - RNA, 32 nt, Human
uaaauugggggaacuccuucaucucucauggc

SEQ ID NO: 484279 - RNA, 32 nt, Human
uaaauuggugugagcucaaagcccagucaugu

SEQ ID NO: 484280 - RNA, 32 nt, Human
uaaauugucaccaauugaaaaucuugucacuc

SEQ ID NO: 484281 - RNA, 32 nt, Human
uaaauugucagucacuucuucaaaaccuuaca

SEQ ID NO: 484282 - RNA, 32 nt, Human
uaaauuguccccauuaccuuaagguaaucacu

SEQ ID NO: 484283 - RNA, 32 nt, Human
uaaauugugauuguuuauucuauuacuauugu

SEQ ID NO: 484284 - RNA, 32 nt, Human
uaaauugugggcaaaagagaaaaagaaggauu

SEQ ID NO: 484285 - RNA, 32 nt, Human
uaaauuguuagcaagaguguugagcuaguucc

SEQ ID NO: 484286 - RNA, 32 nt, Human
uaaauuguugggaggaaacuguuaacauugug

SEQ ID NO: 484287 - RNA, 32 nt, Human
uaaauuguugugugugcacauaugcauauauu

SEQ ID NO: 484288 - RNA, 32 nt, Human
uaaauuguuuucugcucugaguaaacaguaau

SEQ ID NO: 484289 - RNA, 32 nt, Human
uaaauuuaagggacuugaacucagggaacacu

SEQ ID NO: 484290 - RNA, 32 nt, Human
uaaauuuaauuuaaaaguagagguccaaauga

SEQ ID NO: 484291 - RNA, 32 nt, Human
uaaauuuaccauuuuguuuuucuugaauaguc

SEQ ID NO: 484292 - RNA, 32 nt, Human
uaaauuuagagucaaauuuagagcagaaaaua

SEQ ID NO: 484293 - RNA, 32 nt, Human
uaaauuuaggggaauuggaugcauuauucaac

SEQ ID NO: 484294 - RNA, 32 nt, Human
uaaauuucaagcaucugaucacaucacauggu

SEQ ID NO: 484295 - RNA, 32 nt, Human
uaaauuucacaauauaaaguucuacaguuaau

SEQ ID NO: 484296 - RNA, 32 nt, Human
uaaauuuccagacagagaccagaaggaagguu

SEQ ID NO: 484297 - RNA, 32 nt, Human
uaaauuucucuccugauggguacuuuaauuug

SEQ ID NO: 484298 - RNA, 32 nt, Human
uaaauuucucucuccaaaauaaaguucaagca

SEQ ID NO: 484299 - RNA, 32 nt, Human
uaaauuucuuccuauuucuggaauggaaaagg

SEQ ID NO: 484300 - RNA, 32 nt, Human
uaaauuugaagugaaugguuaaacauccagcu

SEQ ID NO: 484301 - RNA, 32 nt, Human
uaaauuugacaaaaauucagcugaacuuguaa

SEQ ID NO: 484302 - RNA, 31 nt, Human
uaaauuugacccucugggccgagucacauua

SEQ ID NO: 484303 - RNA, 32 nt, Human
uaaauuugcaguuccacuaaugacauuuugau

SEQ ID NO: 484304 - RNA, 32 nt, Human
uaaauuugcauccuuuucauaaugccacugag

SEQ ID NO: 484305 - RNA, 32 nt, Human
uaaauuugcuuuucacaccuuucuuuaaauaa

SEQ ID NO: 484306 - RNA, 32 nt, Human
uaaauuuggaaaacagucagugucuggguuga

SEQ ID NO: 484307 - RNA, 32 nt, Human
uaaauuuguaaauacugcuucuguuuuguuuc

SEQ ID NO: 484308 - RNA, 32 nt, Human
uaaauuuguucucaccaagcacugccugugca

SEQ ID NO: 484309 - RNA, 20 nt, Human
uaaauuuguuuguacauuga

SEQ ID NO: 484310 - RNA, 32 nt, Human
uaaauuuucauucuguuuugcaugucaguuag

SEQ ID NO: 484311 - RNA, 32 nt, Human
uaaauuuuccaacucaggagaugaacuugcug

SEQ ID NO: 484312 - RNA, 32 nt, Human
uaaauuuucuuuguaguuggugguguuugagg

SEQ ID NO: 484313 - RNA, 32 nt, Human
uaaauuuugcaaaggccuuuuagcugacacuc

SEQ ID NO: 484314 - RNA, 32 nt, Human
uaaauuuuucagacugacagacuucaaggaug

SEQ ID NO: 484315 - RNA, 32 nt, Human
uaaauuuuugcuggaaguggagucaugagacu

SEQ ID NO: 484316 - RNA, 32 nt, Human
uaacaaaaauuagccaggcaugguggcggaca

SEQ ID NO: 484317 - RNA, 32 nt, Human
uaacaaaaauuagcugggcgugguggugggug

SEQ ID NO: 484318 - RNA, 32 nt, Human
uaacaaaagauuaaucuuuaaaccacuaaaau

SEQ ID NO: 484319 - RNA, 32 nt, Human
uaacaaaaggccauagaagucuguuuuucugg

SEQ ID NO: 484320 - RNA, 32 nt, Human
uaacaaacacagugaaaccccgucucuacuaa

SEQ ID NO: 484321 - RNA, 32 nt, Human
uaacaaacauggcucccugaagccgcucaggc

SEQ ID NO: 484322 - RNA, 32 nt, Human
uaacaaacauuuauuaauccagccucugccuu

SEQ ID NO: 484323 - RNA, 32 nt, Human
uaacaaaccaauuucaaaaauagacuaacugc

SEQ ID NO: 484324 - RNA, 32 nt, Human
uaacaaacuggugagcaaauguuaaacaaaau

SEQ ID NO: 484325 - RNA, 32 nt, Human
uaacaaagaccaccaggacauccugggaacuc

SEQ ID NO: 484326 - RNA, 32 nt, Human
uaacaaagaggaaugagccaggagaacaaacu

SEQ ID NO: 484327 - RNA, 32 nt, Human
uaacaaagaugaugaacuuaggguaaaccaac

SEQ ID NO: 484328 - RNA, 32 nt, Human
uaacaaagauuaguggagaagcuguauaaucg

SEQ ID NO: 484329 - RNA, 32 nt, Human
uaacaaagcuguuccuugaaccagaacaacca

SEQ ID NO: 484330 - RNA, 32 nt, Human
uaacaaagggccugacccuugaaggcuuacug

SEQ ID NO: 484331 - RNA, 32 nt, Human
uaacaaaguaaucacuuugucuaucacuaagu

SEQ ID NO: 484332 - RNA, 32 nt, Human
uaacaaaguauuaguaugacuuuuugaauaag

SEQ ID NO: 484333 - RNA, 32 nt, Human
uaacaaaucauccuccccaguuaagacuuccc

SEQ ID NO: 484334 - RNA, 32 nt, Human
uaacaaauccauuucccuccucccucccuccc

SEQ ID NO: 484335 - RNA, 32 nt, Human
uaacaaaugaaaaagcgaucugaacagacauu

SEQ ID NO: 484336 - RNA, 18 nt, Human
uaacaaaugagccauccc

SEQ ID NO: 484337 - RNA, 32 nt, Human
uaacaaaugcucaugugauacucccuuaugug

SEQ ID NO: 484338 - RNA, 32 nt, Human
uaacaaauguacaaaccuuaauuuaaaaauau

SEQ ID NO: 484339 - RNA, 32 nt, Human
uaacaaauguuccuccucccucugggauacca

SEQ ID NO: 484340 - RNA, 32 nt, Human
uaacaaauuaacuaaggaaauauuucaaucuc

SEQ ID NO: 484341 - RNA, 32 nt, Human
uaacaaauuuggagaaauaaaaauaucuaaaa

SEQ ID NO: 484342 - RNA, 32 nt, Human
uaacaacacaauaucaauccagcaaucuuuag

SEQ ID NO: 484343 - RNA, 32 nt, Human
uaacaacagcacugugggaggcugaggugggu

SEQ ID NO: 484344 - RNA, 32 nt, Human
uaacaacagcacuuuacaguuuguagauguaa

SEQ ID NO: 484345 - RNA, 32 nt, Human
uaacaacagccaggagcuuccugucaguaacc

SEQ ID NO: 484346 - RNA, 32 nt, Human
uaacaacaguuaaugcaucuauccugaucccu

SEQ ID NO: 484347 - RNA, 32 nt, Human
uaacaacaugaucuucuuugaguuaaaccuac

SEQ ID NO: 484348 - RNA, 32 nt, Human
uaacaaccaaccaaccaaccaaccaaccacaa

SEQ ID NO: 484349 - RNA, 32 nt, Human
uaacaaccacccuuacugauaguugggaaaag

SEQ ID NO: 484350 - RNA, 32 nt, Human
uaacaaccagagaugacugaaaccacucugaa

SEQ ID NO: 484351 - RNA, 32 nt, Human
uaacaacccuguaagccacauucucuggcaca

SEQ ID NO: 484352 - RNA, 32 nt, Human
uaacaacgugucuccuggauuuuacuuugaag

SEQ ID NO: 484353 - RNA, 32 nt, Human
uaacaacucugagcacaugcugggugaaguca

SEQ ID NO: 484354 - RNA, 32 nt, Human
uaacaacugaaagcuuuacaguguucaugcua

SEQ ID NO: 484355 - RNA, 32 nt, Human
uaacaacugcacuccagccuggaugacagaac

SEQ ID NO: 484356 - RNA, 32 nt, Human
uaacaagaaagcuuccaucucaaaccuuuucu

SEQ ID NO: 484357 - RNA, 32 nt, Human
uaacaagaaaggagagucuugcagugauuaag

SEQ ID NO: 484358 - RNA, 32 nt, Human
uaacaagacagcacuccagauaggcagccacg

SEQ ID NO: 484359 - RNA, 32 nt, Human
uaacaagaccaucuugucuuucugggguagcc

SEQ ID NO: 484360 - RNA, 32 nt, Human
uaacaagacuccuaccuugagaucuuagucua

SEQ ID NO: 484361 - RNA, 32 nt, Human
uaacaagaggcauuugugcacacacacagggc

SEQ ID NO: 484362 - RNA, 32 nt, Human
uaacaagaucuguagaucugcuauugaaucag

SEQ ID NO: 484363 - RNA, 32 nt, Human
uaacaagauuuucuuaccucucaguuguugaa

SEQ ID NO: 484364 - RNA, 32 nt, Human
uaacaagcaccaacuugccagccauguaaggg

SEQ ID NO: 484365 - RNA, 32 nt, Human
uaacaagcccagcauccccuggggcugugauc

SEQ ID NO: 484366 - RNA, 32 nt, Human
uaacaagccuugcucagucuuacuaacggauc

SEQ ID NO: 484367 - RNA, 23 nt, Human
uaacaaggaaagccccuggagcu

SEQ ID NO: 484368 - RNA, 32 nt, Human
uaacaaggcuguaaagucacacaaaucagcag

SEQ ID NO: 484369 - RNA, 32 nt, Human
uaacaagggacacacagaguuggcagcacaaa

SEQ ID NO: 484370 - RNA, 32 nt, Human
uaacaagggcugagccccagguacagguugcc

SEQ ID NO: 484371 - RNA, 32 nt, Human
uaacaagguucuguguuuuucucaccucauuc

SEQ ID NO: 484372 - RNA, 32 nt, Human
uaacaauacuuacaacuuccauuuuuguaacc

SEQ ID NO: 484373 - RNA, 32 nt, Human
uaacaauccaagaauaaaugauuguaaaagau

SEQ ID NO: 484374 - RNA, 32 nt, Human
uaacaaucuaacacuuucauagaaucauuugg

SEQ ID NO: 484375 - RNA, 32 nt, Human
uaacaaugagcuccucccucccugccuccuug

SEQ ID NO: 484376 - RNA, 32 nt, Human
uaacaaugcagcccucuccacccuccggccag

SEQ ID NO: 484377 - RNA, 32 nt, Human
uaacaaugcauuucaucuagcacuccaguggu

SEQ ID NO: 484378 - RNA, 32 nt, Human
uaacaaugccuuguuguauuccugccuuugau

SEQ ID NO: 484379 - RNA, 32 nt, Human
uaacaauggaagcagaggucagagugaugcaa

SEQ ID NO: 484380 - RNA, 32 nt, Human
uaacaauuauuuuuaaaaggaggaauuuaaau

SEQ ID NO: 484381 - RNA, 32 nt, Human
uaacaauucauccugaaguuucuccaugaauu

SEQ ID NO: 484382 - RNA, 32 nt, Human
uaacaauuuucagaccuguugguauaggaaug

SEQ ID NO: 484383 - RNA, 32 nt, Human
uaacacaaagggcaagagguugcuaugguauu

SEQ ID NO: 484384 - RNA, 32 nt, Human
uaacacaacaaagugggaccaucucuauuccc

SEQ ID NO: 484385 - RNA, 32 nt, Human
uaacacaagcugacucuucccuucccuucucc

SEQ ID NO: 484386 - RNA, 32 nt, Human
uaacacacccagcuaauuuuguauuuuuagua

SEQ ID NO: 484387 - RNA, 32 nt, Human
uaacacacuugagccaucaccaaucagcauag

SEQ ID NO: 484388 - RNA, 32 nt, Human
uaacacagaaacagcuguggauuucuaucaac

SEQ ID NO: 484389 - RNA, 32 nt, Human
uaacacagaaacgcaauaaacacacacaaaau

SEQ ID NO: 484390 - RNA, 32 nt, Human
uaacacagaaagaaaaugggaacuuuacguuu

SEQ ID NO: 484391 - RNA, 32 nt, Human
uaacacagaaaggaaaugggaacuuuacauuu

SEQ ID NO: 484392 - RNA, 32 nt, Human
uaacacagauuugcuggauggaagcugcgugu

SEQ ID NO: 484393 - RNA, 32 nt, Human
uaacacagcagaaccacguggguauuuuagua

SEQ ID NO: 484394 - RNA, 32 nt, Human
uaacacagccugacauaggagagccccuggcu

SEQ ID NO: 484395 - RNA, 32 nt, Human
uaacacagcugcaucuugagcagugaccugcc

SEQ ID NO: 484396 - RNA, 32 nt, Human
uaacacaggagcagaaaaccaaacaccacaug

SEQ ID NO: 484397 - RNA, 32 nt, Human
uaacacaggaugaaacagguucagagagggga

SEQ ID NO: 484398 - RNA, 32 nt, Human
uaacacaguaaauauguacuuguagccuggau

SEQ ID NO: 484399 - RNA, 32 nt, Human
uaacacaguuuucccuuccauauuccucucuu

SEQ ID NO: 484400 - RNA, 32 nt, Human
uaacacaucugaacaggguuagucagcaaaau

SEQ ID NO: 484401 - RNA, 32 nt, Human
uaacacaucugggugucaucggacaccucacc

SEQ ID NO: 484402 - RNA, 32 nt, Human
uaacacaugccuaugauccagcuuuggucaua

SEQ ID NO: 484403 - RNA, 32 nt, Human
uaacacaugccugugguccuagcuacuuggga

SEQ ID NO: 484404 - RNA, 24 nt, Human
uaacaccaaacuaccucucugaua

SEQ ID NO: 484405 - RNA, 32 nt, Human
uaacaccaccagaaagugaacagggaaaauaa

SEQ ID NO: 484406 - RNA, 32 nt, Human
uaacaccacggcacuucagccugggugacaga

SEQ ID NO: 484407 - RNA, 32 nt, Human
uaacaccacugcacuccaaccugggcaacaga

SEQ ID NO: 484408 - RNA, 32 nt, Human
uaacaccauggaccagccccgaagagacaucu

SEQ ID NO: 484409 - RNA, 32 nt, Human
uaacaccauuagcuuuugugaucugguuaaga

SEQ ID NO: 484410 - RNA, 32 nt, Human
uaacacccagcccagugguucuuucauagaug

SEQ ID NO: 484411 - RNA, 32 nt, Human
uaacaccccacacccaacccacgccaugcccc

SEQ ID NO: 484412 - RNA, 32 nt, Human
uaacacccccuucccagccucugggaaaaucg

SEQ ID NO: 484413 - RNA, 32 nt, Human
uaacaccccuuccugagguucccuucaccccu

SEQ ID NO: 484414 - RNA, 32 nt, Human
uaacaccuccagguucucuaaguucuggggag

SEQ ID NO: 484415 - RNA, 32 nt, Human
uaacaccucccugcugccccucccucucucuc

SEQ ID NO: 484416 - RNA, 32 nt, Human
uaacaccugccugccggcccaccugcagcccg

SEQ ID NO: 484417 - RNA, 32 nt, Human
uaacaccuguaaucccaacaguucgggaggca

SEQ ID NO: 484418 - RNA, 32 nt, Human
uaacaccuguaaucccagcacuuugggaggcu

SEQ ID NO: 484419 - RNA, 32 nt, Human
uaacaccugugucucauuccucccucucugcc

SEQ ID NO: 484420 - RNA, 32 nt, Human
uaacaccuucaugaugacaacacugccucgcg

SEQ ID NO: 484421 - RNA, 32 nt, Human
uaacaccuugguguccugggccccagaguucc

SEQ ID NO: 484422 - RNA, 32 nt, Human
uaacacgggggaggggcaggagagggauaugg

SEQ ID NO: 484423 - RNA, 32 nt, Human
uaacacgucauuuccuuuuuguauuuuuaaac

SEQ ID NO: 484424 - RNA, 32 nt, Human
uaacacuacugcauuccagccugggugacaga

SEQ ID NO: 484425 - RNA, 32 nt, Human
uaacacuaguauuuguuaaaugggguauuuuu

SEQ ID NO: 484426 - RNA, 32 nt, Human
uaacacucaaauauuaacauuuuagguuucuc

SEQ ID NO: 484427 - RNA, 32 nt, Human
uaacacucacugcaaaggucugcaacuucacu

SEQ ID NO: 484428 - RNA, 32 nt, Human
uaacacugaacaaaggcuucacuuguccucau

SEQ ID NO: 484429 - RNA, 32 nt, Human
uaacacugaccuuggacuggauuugcagggca

SEQ ID NO: 484430 - RNA, 32 nt, Human
uaacacugaccuuuuauaauuugaugucucaa

SEQ ID NO: 484431 - RNA, 32 nt, Human
uaacacugagguagcucucuucaucuuauuug

SEQ ID NO: 484432 - RNA, 32 nt, Human
uaacacugcacuccaggcuggacaacacagca

SEQ ID NO: 484433 - RNA, 32 nt, Human
uaacacuucaaaaugcauuuuaucauaauuua

SEQ ID NO: 484434 - RNA, 32 nt, Human
uaacacuugccuguaaucagugaagggcugug

SEQ ID NO: 484435 - RNA, 32 nt, Human
uaacacuuuaagggccccaggucuccacugcc

SEQ ID NO: 484436 - RNA, 32 nt, Human
uaacacuuugggaggccaaggugggaagauug

SEQ ID NO: 484437 - RNA, 32 nt, Human
uaacacuuugggaggccuagacaggaggauug

SEQ ID NO: 484438 - RNA, 32 nt, Human
uaacacuuugggaggccuaggugggaggauug

SEQ ID NO: 484439 - RNA, 32 nt, Human
uaacacuuugggaggcugaggugggcggauca

SEQ ID NO: 484440 - RNA, 32 nt, Human
uaacagaaaaacacaaaauuucaaccauucuu

SEQ ID NO: 484441 - RNA, 32 nt, Human
uaacagaaaaauuguuccucuaagagucccaa

SEQ ID NO: 484442 - RNA, 32 nt, Human
uaacagaaacaucuuuaggauauuuuugucug

SEQ ID NO: 484443 - RNA, 32 nt, Human
uaacagaaacuauccugggauuaggugaaaaa

SEQ ID NO: 484444 - RNA, 32 nt, Human
uaacagaaagauaguccaggugcagugucuuu

SEQ ID NO: 484445 - RNA, 32 nt, Human
uaacagaagagaagacuguggagccagcuacc

SEQ ID NO: 484446 - RNA, 32 nt, Human
uaacagaauuaguuuggggaauacucauuuuu

SEQ ID NO: 484447 - RNA, 32 nt, Human
uaacagacaagucccauauuuugucaguagau

SEQ ID NO: 484448 - RNA, 32 nt, Human
uaacagacuuucaacagaggacugucuuauuc

SEQ ID NO: 484449 - RNA, 32 nt, Human
uaacagagacgggguuucaccauguuggccag

SEQ ID NO: 484450 - RNA, 32 nt, Human
uaacagaucaaauuggaugaaauauauaauua

SEQ ID NO: 484451 - RNA, 32 nt, Human
uaacagauccaaagagguccagaaggaaugac

SEQ ID NO: 484452 - RNA, 32 nt, Human
uaacagauggccagggugggaggcaggcagcu

SEQ ID NO: 484453 - RNA, 32 nt, Human
uaacagauugacugcagaaacaggucaagcuu

SEQ ID NO: 484454 - RNA, 32 nt, Human
uaacagcaaacaguagcagcagcaugcaccaa

SEQ ID NO: 484455 - RNA, 32 nt, Human
uaacagcacagcuucugagaaggcagagagaa

SEQ ID NO: 484456 - RNA, 32 nt, Human
uaacagcaccaaaucaaaaucucuccacuuuc

SEQ ID NO: 484457 - RNA, 32 nt, Human
uaacagcagaguaacauaaaauaaaaguacau

SEQ ID NO: 484458 - RNA, 32 nt, Human
uaacagcagcagagggaggugggggagaggga

SEQ ID NO: 484459 - RNA, 32 nt, Human
uaacagcagcagcggcaacggcagcagcagca

SEQ ID NO: 484460 - RNA, 32 nt, Human
uaacagcaguaggagagugaguuuuggggcca

SEQ ID NO: 484461 - RNA, 32 nt, Human
uaacagccacuccaacucuccaccuccagcuu

SEQ ID NO: 484462 - RNA, 32 nt, Human
uaacagccccaaggagcagcaggcaugggucc

SEQ ID NO: 484463 - RNA, 31 nt, Human
uaacagcgucagagagaaagaacugacugaa

SEQ ID NO: 484464 - RNA, 32 nt, Human
uaacagcuauguuugcaauagagacauuugga

SEQ ID NO: 484465 - RNA, 32 nt, Human
uaacagcucacugcagucuugaacuccugggc

SEQ ID NO: 484466 - RNA, 32 nt, Human
uaacagcucuccaagcccuuggggugacucgg

SEQ ID NO: 484467 - RNA, 32 nt, Human
uaacagcugugguuuccagugggaguccuggu

SEQ ID NO: 484468 - RNA, 32 nt, Human
uaacagcuucccacucaaccagucuccccaaa

SEQ ID NO: 484469 - RNA, 32 nt, Human
uaacagcuucucuauuugauauuugaaauucu

SEQ ID NO: 484470 - RNA, 32 nt, Human
uaacagcuugaacauuaugaaaugcuaaguuu

SEQ ID NO: 484471 - RNA, 21 nt, Human
uaacagcuuuggcucuacuca

SEQ ID NO: 484472 - RNA, 32 nt, Human
uaacaggaacuuccagccuccagccuacuuag

SEQ ID NO: 484473 - RNA, 32 nt, Human
uaacaggaccaacagggcuuaagcccagacuu

SEQ ID NO: 484474 - RNA, 32 nt, Human
uaacaggagggaggggaagaaggaaguuucca

SEQ ID NO: 484475 - RNA, 32 nt, Human
uaacaggaucuaagaugaccaucaggagaagg

SEQ ID NO: 484476 - RNA, 32 nt, Human
uaacaggcagaacaugggagaauccuuauucc

SEQ ID NO: 484477 - RNA, 32 nt, Human
uaacaggccaccccaaaccucagagggcgaaa

SEQ ID NO: 484478 - RNA, 32 nt, Human
uaacaggccgugguuaggaaggacggagaagg

SEQ ID NO: 484479 - RNA, 32 nt, Human
uaacagggaaauagaguuacaguucuugccua

SEQ ID NO: 484480 - RNA, 32 nt, Human
uaacagggagaggaugggggaggggacaaauu

SEQ ID NO: 484481 - RNA, 32 nt, Human
uaacaggggcugggcugccuuuuucuaccuug

SEQ ID NO: 484482 - RNA, 32 nt, Human
uaacagggugcugauagaugggccacauaaca

SEQ ID NO: 484483 - RNA, 32 nt, Human
uaacaggugccuucacuuuugagacuuagugc

SEQ ID NO: 484484 - RNA, 32 nt, Human
uaacaguaaaccccauacgcaggugggaggga

SEQ ID NO: 484485 - RNA, 31 nt, Human
uaacaguacagcuagaaaccaagagcugucg

SEQ ID NO: 484486 - RNA, 32 nt, Human
uaacaguaccaaaucaaaaucucuccacuucc

SEQ ID NO: 484487 - RNA, 32 nt, Human
uaacaguaccuagagagagagugugugugagu

SEQ ID NO: 484488 - RNA, 32 nt, Human
uaacaguauuauaaaaucaaaauauggguaaa

SEQ ID NO: 484489 - RNA, 32 nt, Human
uaacagucucugcuuugccuucugccugguag

SEQ ID NO: 484490 - RNA, 32 nt, Human
uaacagugcacaaggugggaaaagccagcuca

SEQ ID NO: 484491 - RNA, 32 nt, Human
uaacaguggggaggggacaucuggcagcaucu

SEQ ID NO: 484492 - RNA, 31 nt, Human
uaacagugggugggaaagguagaggccugug

SEQ ID NO: 484493 - RNA, 32 nt, Human
uaacaguuaucuuugacucucuugccuguuau

SEQ ID NO: 484494 - RNA, 32 nt, Human
uaacaguucccuguuaaaaugaaaaucuuagg

SEQ ID NO: 484495 - RNA, 32 nt, Human
uaacauaaaauuaugauaguuuguuuuaauag

SEQ ID NO: 484496 - RNA, 32 nt, Human
uaacauacuguagcuuuuucucccuugggggc

SEQ ID NO: 484497 - RNA, 32 nt, Human
uaacauacuguugauaucaagaaccuguuuag

SEQ ID NO: 484498 - RNA, 32 nt, Human
uaacauagaugugugggaauauuacuucuugu

SEQ ID NO: 484499 - RNA, 32 nt, Human
uaacauagugucugcugcugccucccugggga

SEQ ID NO: 484500 - RNA, 32 nt, Human
uaacauagugugaaugaaagucuggccaacag

SEQ ID NO: 484501 - RNA, 32 nt, Human
uaacauaucaaggagcucuucuagcuaaauga

SEQ ID NO: 484502 - RNA, 32 nt, Human
uaacauaugccuggacauccugaaggagaagu

SEQ ID NO: 484503 - RNA, 32 nt, Human
uaacauauuagcugcccuaaaugaucuuggag

SEQ ID NO: 484504 - RNA, 32 nt, Human
uaacaucagagccaccacuucucagugucagu

SEQ ID NO: 484505 - RNA, 32 nt, Human
uaacaucaggcgaucugccugccuuggcaucc

SEQ ID NO: 484506 - RNA, 32 nt, Human
uaacaucaucaguauugaagcauuuuauaaau

SEQ ID NO: 484507 - RNA, 32 nt, Human
uaacaucauuuuucuuuucuucuugcauuuug

SEQ ID NO: 484508 - RNA, 32 nt, Human
uaacaucccacugugaacauuaggcagaucaa

SEQ ID NO: 484509 - RNA, 32 nt, Human
uaacaucccaugugccucaccuaauaaaaugg

SEQ ID NO: 484510 - RNA, 32 nt, Human
uaacauccucaccuuuccuucucaccuguccu

SEQ ID NO: 484511 - RNA, 32 nt, Human
uaacauccuccugccugaaaacaaauaggucc

SEQ ID NO: 484512 - RNA, 32 nt, Human
uaacaucucaagcuacuaauuuugccaaccuu

SEQ ID NO: 484513 - RNA, 32 nt, Human
uaacaucucagguuuuuaucuugucuuaaauu

SEQ ID NO: 484514 - RNA, 32 nt, Human
uaacaucuccaucccuuugaugccucauccau

SEQ ID NO: 484515 - RNA, 32 nt, Human
uaacaucugaggugaccaagaggcagaagagc

SEQ ID NO: 484516 - RNA, 32 nt, Human
uaacaucugugcaagccccuuuccaggauucu

SEQ ID NO: 484517 - RNA, 32 nt, Human
uaacaucuucuuuccuaugcccucucugugga

SEQ ID NO: 484518 - RNA, 32 nt, Human
uaacaucuuuggagaaagugauacaagagcuu

SEQ ID NO: 484519 - RNA, 32 nt, Human
uaacaugaagcacaauggauuuacagcucuag

SEQ ID NO: 484520 - RNA, 32 nt, Human
uaacaugagaccaaaacuauguucuuugauua

SEQ ID NO: 484521 - RNA, 32 nt, Human
uaacaugaguaagaugaacuggaacacaaaau

SEQ ID NO: 484522 - RNA, 32 nt, Human
uaacaugcacagcuccauauccuggaagccuc

SEQ ID NO: 484523 - RNA, 32 nt, Human
uaacaugcuaacuuuccacacauggcugcauu

SEQ ID NO: 484524 - RNA, 31 nt, Human
uaacaugcuaucauaguacauuuagaaugau

SEQ ID NO: 484525 - RNA, 32 nt, Human
uaacaugcugcaauucaggagcugguuagaac

SEQ ID NO: 484526 - RNA, 32 nt, Human
uaacaugcuuucaaaguacuguguauuucaca

SEQ ID NO: 484527 - RNA, 32 nt, Human
uaacauggacugcuucaucugcuguauccucu

SEQ ID NO: 484528 - RNA, 32 nt, Human
uaacauggagugauuuccaagauagaugguua

SEQ ID NO: 484529 - RNA, 32 nt, Human
uaacauggauauuuucuugugugucuuuaaag

SEQ ID NO: 484530 - RNA, 29 nt, Human
uaacauggauuucaucuuucaugagaaac

SEQ ID NO: 484531 - RNA, 32 nt, Human
uaacaugggacaugccuuucuuuuccgaucag

SEQ ID NO: 484532 - RNA, 19 nt, Human
uaacauggugaaaccccgu

SEQ ID NO: 484533 - RNA, 20 nt, Human
uaacauggugaaacccgcgu

SEQ ID NO: 484534 - RNA, 32 nt, Human
uaacauggugaaacccuguuucugcuagaagu

SEQ ID NO: 484535 - RNA, 32 nt, Human
uaacauggugacuugcucacagccucacugga

SEQ ID NO: 484536 - RNA, 32 nt, Human
uaacauguauacaaaguaaauucuuagccagg

SEQ ID NO: 484537 - RNA, 32 nt, Human
uaacauguauacuagaaaacaaaaagauguua

SEQ ID NO: 484538 - RNA, 32 nt, Human
uaacauguauauguguacacaugccuauucug

SEQ ID NO: 484539 - RNA, 32 nt, Human
uaacaugucaagaagacuuuauaguaagcaca

SEQ ID NO: 484540 - RNA, 32 nt, Human
uaacaugugccagccaggcagagucuugugcu

SEQ ID NO: 484541 - RNA, 32 nt, Human
uaacauguugagucucugagagugcaaaacuu

SEQ ID NO: 484542 - RNA, 32 nt, Human
uaacauguugcaggaaaacacucuccccuuau

SEQ ID NO: 484543 - RNA, 32 nt, Human
uaacauguugggaggccaaggcuggcagauca

SEQ ID NO: 484544 - RNA, 32 nt, Human
uaacauuaaagagaaaaugcugcuauccguga

SEQ ID NO: 484545 - RNA, 32 nt, Human
uaacauuaagaaaauauuuaacucccuguaac

SEQ ID NO: 484546 - RNA, 32 nt, Human
uaacauuacccuccaagguugcaccugucuaa

SEQ ID NO: 484547 - RNA, 32 nt, Human
uaacauuagauccaaagugcauugguucagug

SEQ ID NO: 484548 - RNA, 32 nt, Human
uaacauuaucaucugcaguuacuguuuacaag

SEQ ID NO: 484549 - RNA, 32 nt, Human
uaacauuauuuaccaucuugcauauguauagu

SEQ ID NO: 484550 - RNA, 31 nt, Human
uaacauucaauaaauagcuauaugaaaucaa

SEQ ID NO: 484551 - RNA, 32 nt, Human
uaacauucaauaaauagcuauaugaaaucaaa

SEQ ID NO: 484552 - RNA, 32 nt, Human
uaacauucacuuauggauucaugauggcugua

SEQ ID NO: 484553 - RNA, 32 nt, Human
uaacauucagaauauagcauugguugccuauu

SEQ ID NO: 484554 - RNA, 32 nt, Human
uaacauuccuucuguaccuguaguucaugcgg

SEQ ID NO: 484555 - RNA, 32 nt, Human
uaacauugaugaaccuugaaaauaugcuaagu

SEQ ID NO: 484556 - RNA, 32 nt, Human
uaacauuggucagcagaugacacuggugacuu

SEQ ID NO: 484557 - RNA, 32 nt, Human
uaacauuguaaugcaaguucuacaaugauaau

SEQ ID NO: 484558 - RNA, 32 nt, Human
uaacauuguguuagcuuuuauuuccuggauag

SEQ ID NO: 484559 - RNA, 32 nt, Human
uaacauuuacuuuugcucccuaccugacugcc

SEQ ID NO: 484560 - RNA, 32 nt, Human
uaacauuuauuucucacaguccuggagacugg

SEQ ID NO: 484561 - RNA, 32 nt, Human
uaacauuucacacaaaaggaaaaugaggcuga

SEQ ID NO: 484562 - RNA, 32 nt, Human
uaacauuucucuccaccuuaguacuuuagacu

SEQ ID NO: 484563 - RNA, 32 nt, Human
uaacauuugcaaaauggaaauguaauaauaau

SEQ ID NO: 484564 - RNA, 32 nt, Human
uaaccaaacuacucccuaauccuugaaaaucc

SEQ ID NO: 484565 - RNA, 32 nt, Human
uaaccaaacuggaggcuggcaugggagaagug

SEQ ID NO: 484566 - RNA, 32 nt, Human
uaaccaaaggaaacugguuugagaaaauugug

SEQ ID NO: 484567 - RNA, 32 nt, Human
uaaccaaaugucaaaaugcuaauagucuguuc

SEQ ID NO: 484568 - RNA, 32 nt, Human
uaaccaacauggugaaaccccgucucuacaaa
